United States Patent Application Publication US 2007/0067865 A1 - sequence listing, part 65

SEQ ID NO: 415254 - DNA, 380 bp, Oryza sativa
  unsure (1)..(380): unsure at all n locations
ggagcttgagcttggagagagacaacaatggcggctcaggctcttctctctgggaggcagctgctggggaggccattgcaatcttcagtctccaggtcttcttcctccaggaaggcacccttcatggtcagggcagaggccactccccctgccaagcaaggtgctgacaggcagctgtggttcgcatccaagcagtccctgagctacctggatggcacgcttccgggagacttcgggttcgacccgctggggctatcggacccggaggggaccggtgggttcatcgagccacggtggctggcctaccgcgaggtgttcaacggccggacggcgatgatgggcgtcgtcngcatggtcgccccggagctcctcggcaagct

SEQ ID NO: 415255 - DNA, 408 bp, Oryza sativa
agaaagatgtctataaaatccagttgcacagcattcacgaacatgaaacagttaaacagataaataacacaaataaaagaggaagtaaatttgcaacaaagttctcagatccaagtacttgtgattacatagcaattgtactcggaaacctaaggttcacacccatatggcagatacaactcaggctgctacagttgcagcttctgatgttgcagcttccggtggactgtcggtgtatgcacgcctggcatactccctagcaccctctttatcaacaatcttgattatgaagttttgaggagcaacgaccaacctgagccgaatttctttaatgcacttgtcaacaagatcaacagcttcctcgacttgacatgtctggacgatataacttgtccatcaacgagagac

SEQ ID NO: 415256 - DNA, 350 bp, Oryza sativa
  unsure (1)..(350): unsure at all n locations
cttgctttcgtttcttctcacctcggcgagttcgcaacgtcctccctccaggctccacttcccagacgaatcggcggcggcggcggcggcggcggtgatggagtgcgttatcggggtcgtcggccgcgacttcgcggtggtggccgccgacacatcggcggtgcagagcatcctggtccacaagaccgacgaggacaaggtgatggtgctcgacagccacaagctgatgggcgcgtccggagagcccggcgaccgggtgcagttcaccgagttcatccagaagaatctccacctgtatcagttccgcaacaacatcccgctcagcaccgccgccaccgncaatttcaccc

SEQ ID NO: 415257 - DNA, 447 bp, Oryza sativa
gtatatgggcaagatgggtgctcacatggcaatgcgaagcaatgagcaaagagcggtcctcaggtttaggccgctctgatgccattaggccaccatgtccatttccctcgcattcggaggactgcccttattcttacactcgccagtgcaaccacgatggacccatctttgtgattatgcttgaacatgataagatgtctgtccaagagcttcctgcgaactcaactgtagtcgatctgatggagagagtgggggccaatagtccaagatgcagcccttacagcttcccactgaaagaggaattgcgcccgagggttaaccacaagcccataagtgaccctaaccggaaactgtgcatgggagatgtggtggaaagctgacgcctgcgctcccacacaagtcgctaactgagtatcgggaagagatccagcgcatgtatgaacgagg

SEQ ID NO: 415258 - DNA, 392 bp, Oryza sativa
gattcagaaccgttttattcaacactattgttcctgtacaaggatctgaaacagaaaactgatgcacacatacaagccatggcgacgactgcagtttatgctcgctatttgtaacagctaacataacataaatggtgaatcttgatcctatgcctaattcccccccaatagtggggtgcaccttatggagtgaacctagtaagcttcagtgacaggctcagtcgaggaaaatcatgaattctctagatctaattctgctcaagtgtatggtggaatgtcttcgagattattggcctaacgtcctccacaccaacaagtgtctccaggaatgggagtaactcgaccaattcctggtctgaggggtcatcaaaccagctctttattggtatacc

SEQ ID NO: 415259 - DNA, 466 bp, Oryza sativa
  unsure (1)..(466): unsure at all n locations
tcgattgaagtctgtgagacaaactatgcttttcagtgcaaccttcccaccagagattcagagactggcttcggactttttgtcgaactacatatttatcactgttgggagggtgggttcaagtactgacctaattatgcagaaagttgaactcctctctgacggggagaaacgaggctacctgcttgatcttttacagaggcaatctgtcggtgtggctaacagtaagctgcagcaacctctgacattggtgtttgtggagacaaaacgagaggctgactctctgaggtactggctatacagcaaaggtttccctgcaacagcgatccatggtgacagaacacagcaggaaagggagagcgcactgagatcctttaagactggcctcactcctataatggttgccactgatgtagcctcacggggcctggatgtccaaaatgtngctcatgtgatcaactacgat

SEQ ID NO: 415260 - DNA, 414 bp, Oryza sativa
tcgcgcaaactggcaaacatgaaagcaggctgcacgcacaaaactgcttcaccttttgcagatatgttggctttccgcaaggtcaaagcaaggcttggtggtcgtcttcgcctattaatctcgggtggggctccattaagtaatgagatcgaagagttcttgagagtaaccagctgcgcatactttatccaaggctatggtttaacagaaacactgggacctagcacggtctgttaccctgatgacatgtccctggttggaactgttggcgtggctgctacctatacggaattgcgattggaagaagtgcctgagatgggttacaatccacttggtactccttcccgtggtgaaatatgcgtccgaggaaccttcttaaccgaatactataaaaatcctgagctcacgaatgag

SEQ ID NO: 415261 - DNA, 384 bp, Oryza sativa
aggagaaatcaggctactacatttacaacaaaaactctcgggtcaattacaagatcgaggatatacaagcgaaacttcatttttgtttcgattcgtctcctgttttgtctctcttcttgttcttctatctatctatggtggtttgattttttttttgtattagacatagtaaatcatgccgacctcgagggtggaggcgtgagggatggtgacggcgtagttggggccgcggctgttgcggcggaggaagtcgtagcagaagttgatgaccagccgccggaagaagctggagccgttcttggccttgacgtaggagtggccgaggatgaacgccatgccggcctcgcgcgcgtccatcagcttctgcagctcctcccgcacgcc

SEQ ID NO: 415262 - DNA, 470 bp, Oryza sativa
  unsure (1)..(470): unsure at all n locations
tttgtgtgtgccttgggatgaagctgctgaggaagcgcgacatcccggaggagaagtacaccaacgccttcctcggctatggcgcggaggacaaccacttcgtcgtcgagctcacctacaactatggcgtcgacaagtatgacatcggggcaggtttcggtcactttggcatcgccgtcgacgatgtggcgaagacggtggagctgataagggcgaaaggagggaaggtgaccagggagcccggccctgtcaagggcggcaagacggtgatcgccttcgtcgaggacccagatggctacaagtttgagatccttgagaggccagggactccagagcccctgtgccaggtgatgctncgtgtcggtgatcttgatcgggccataagcttctatgagaaggcctgtggcatggagctgctagggagagagataaccctgaatacaagtacacagtggcaatgatggggtatg

SEQ ID NO: 415263 - DNA, 474 bp, Oryza sativa
gtttcggtgaccggcacgcgtacgcggcgatgatgtacatggggacgccgagggactacgagttctacgtcgccgtgcgcgtcatgatgcgctccctcgccaggatcggcgccgacgccgaccgcgtcctcatcgcctccgccgacgtccccgccgactgggtccgcgcaatgagggaagaggatggcatgagagtggtgctggtggagaatatgaagaatccttatgagagcaaccttggagggatcaacaggaggtttaagctgacgctgaacaagctctatgcgtggaccctggttgactatgagcgcgtcgtcatgatcgactccgataacatcttccttcagaagaccgatgagctcttccagtgtggacagttctgtgccgttttcatcaacccttgctacttccacactggtcttttcgtgctccagccttcatggatgtcttcaaggcatgcttcatgacctagag

SEQ ID NO: 415264 - DNA, 356 bp, Oryza sativa
gttcttgatgtccacgtcgagcggcgcctccaggcagttgagcgccatgccctcgcggtcggcagccgacggctcggggagcttctggccggacttgatcttgacgatgccggaggcaggctggctggacacgagcttgacggcgtcggactcggcgaggtcccatgcgcggccgacgaactccgtggagaagccggtgaagatgccggtggcaccggtgagctgcatgtttgtgaattggccggccttgtgcgccttcgatgtgtcgccgaggaagaggatgacgagcttgattggggactccgggaggttatgccaccatgttaccacgccaaaggggagtggcagggagtctc

SEQ ID NO: 415265 - DNA, 394 bp, Oryza sativa
cctatctccaaatcctcctcatctcctcttccagaacctttctttttcgatttcgtgttcgagttctttgtgattgcagcgatggcgtccgtggatctgaccccgaggcaggcgaggaaggcgtacggcggcgatggtgggacctactacgagtggagccccgcagacctgcccatgctggaactcgccaacatcggcggcgccaagctgtcgctcaacgccggtggcctcgccctgcccagcttttccgactccggaaaggttgcgtatgttcttcaaggcaagggcacttgtggcattgtcctgccggaggcgagcaaggagaaagtgatcgccgtgaaggagggagactccctggcactcccctttggcgtggtgacatggtggcataacc

SEQ ID NO: 415266 - DNA, 439 bp, Oryza sativa
  unsure (1)..(439): unsure at all n locations
tcgtatgaattaaaaaatcgatcctccaagaaaccacaggatgctgaccaacccatgggaaaaagggcctccagtccccagacaggatctgagaaagacacaaaagacaaatcagcgaaagacaaagacaaagacaaatcaggccagcaagacaaagacgcaaaagaggggtcctctgtgcaggttgctggttcttctggtgaaattactgcaggttaccttttgaagaaaagtgcaaaaacaaatggatggagaagggtgngtntttgtcctcaatgagaaaagcggaaagcttggctacacgaagaaacaagaggagagacatctctgcggtgtcatcactcttgaggagtgtaaccttgaaaaagtagaggaggaagaacctcctaaagtttgaaggaattaaaaaaggcaaatgggccagagaaaggcccaagtc

SEQ ID NO: 415267 - DNA, 477 bp, Oryza sativa
tcggtttctcacgtctctcgctgccgccgccgccgccgccgccgccgcgagaagccgtaggaggaggagagagagggagggatggcggagaagaagcagcgccccggcggcgcgaggaaggacgaggtggtcacccgcgagtacaccatcaacctccacaagcgcctccacggatgcaccttcaagaagaaggctcctaatgccatcaaggagatcaggaagtttgcacagaaggccatgggcaccattgacgtcagggttgatgtgaagctcaacaagcacatctggagcagcggtatccggagcgttccaggcgtgtccgtgtcagaattgcccgcaggaggaacgacgaggaggatgcgaaggaggagctctactctctggtcactgttgctgaggttccccaagaggggttgaagggcctgggtaccaagcttgtcgaggacgatgagtaaatatgcctaggttttgatctta

SEQ ID NO: 415268 - DNA, 409 bp, Oryza sativa
gtggtgtgatttctcagggctggcctaactggggactgaccaaaactcttccagcctgattgtgttgtacattatggagatctatcaggcaatttcaaagttaacacaatatcacagatttcctctttgactgaatatccagtatgaatagaccaaaatgcccctacctacactgctctccaaacatgtgggaattatcaagaagacaaagcaaaaggggacatttttctgatcatgccaccaggaggagcaccaccaagatcgccgaggcggcggcggccacggaacgcggcggcccgatcggagcgaagttgggtaggtaggggtaggagtccggcggcggcatcttgcactcgtcgccgttgaagtagatcttgcgcgggaacgcccagccctggcttgaggtgaa

SEQ ID NO: 415269 - DNA, 408 bp, Oryza sativa
tcgctctcttctcattcaattccctgctcacctcgatcgagtagctgctgctgctgtgctagcttgctcgccggccggtgaggtcgacgatggagctgcacagatgctctctcctcgctctgctcctcgccgtgacatgctcggttgcagtggcgtatgatccgctggacccgaaggggaacatcacgataaagtgggacgtgatatcgtggacgcccgacgggtacgtggcgatggtgacgatgagcaactaccagatgtaccggcagatcctggcgcccgggtggacaggggggtgggtcgtgggccaagaagggaggtcatctggtccatcgtgggggcccaggccaccgagcagggcgactgctccaagttcaagggcggcatcccccacagctgcaagcgcac

SEQ ID NO: 415270 - DNA, 396 bp, Oryza sativa; identical to SEQ ID NO: 393328

SEQ ID NO: 415271 - DNA, 505 bp, Oryza sativa
tttcatcagtacaaaaggttaacttgaccaaatctgtcttcgatccaccttctcatccaaagaaggcagataaaggtgacactgatccaagttcaaagaaagttgtttcaggacagaagaatgtgggcaaatcggatgcaaatgttgattccaagaaagctgcaccagagaataaagctcctgagaataaggcaaatcctactccagcaaaaaataacaaaccttctggggataaaaagaaagcccaggagaaatctgcaggaaaaccaaatgagggagttgcggataaagctccacagaaaactgcagaaaaggactcagaatgcaatgtcagtatcctgaatatacaggttggccttattcgcaaagcatggaagcacccatctgctgacagcctcttggttgaggagatagatttgggagatggcaatgtgcatcaagttgttagtgggcttgccagttcttagcccagagaacttgtaatcggcatgtgtattatcacgat

SEQ ID NO: 415272 - DNA, 514 bp, Oryza sativa
ttgctttagctcaacaggtggctcagcgacgaggaggggccgcacctgaaggttgctgccattgttggacctgcagggattggtaagacggcacttgctacagagttgtaccgtgaccgtagatggcaattcgagtgccgagctttcgtccgggcgtcgcgaaagcctgacatgcagcggcttcttgggggtattctctctcaagttcagcgtcgccaacgatcgtctgatgcctacgctgacagcacggtgcagagcctcattgataatctccgggagcatctccaagataggaggtaccttattataattgatggtttgtgggagacggcagtatggaatattgctaacagtgcttttccagatgttaacagtttcagtagaatattaataactgcggatatcgaacaggtagctctggaatgctgcggttacaagtatgattatattatgaggatggaacctcttggcagccttgatttcaaaaagttttcttaataaagttttggctccg

SEQ ID NO: 415273 - DNA, 515 bp, Oryza sativa
tttgtttttttttttttttttgtggaaccagcaaatcaaggctgaaaataattacactagaaacttattttaatggctttacatgtcgctacatacttaaatcaatcaaagttgctaccaaagccatgttccctaaacagagggttccgggctttcaaacattcttaatcttctatacattgataaaaagtatacataaaaagaaaacctattaagatggaaatgttgaattctcttaagaaaggcataaaaaatgcagggtaataaccttttcttgtcatgtcctacttggtttcaacctatattgctagcaaaattttcacgctatctataacctcaggaagcagaatagctcagaatcactagcaattgtatacttacagataatcgaaattcatattgtgaggttttcttggatggctcggaatgatccacagatgttaccacccatgtctgggaatgacgtacatcctgggcagggtttcaccttgcccctacggtcaacacttacaggg

SEQ ID NO: 415274 - DNA, 470 bp, Oryza sativa
caggaaacaggaaccatttttactcatcatcagaaaacagttattttggatgctgatgctggcaatcataagaggaaaataattgcttttgttggtggcctcgatttatgcggtgggcgatatgatacacctagccatcctctatttaggtctcttcagactgtgcacaaggaggattattacaatccaaattttgctacagttgatgctcgtggcccaagggaaccatggcacgacttgcattccaagattgatggtccagcggcatatgatgttttgcaaaattttcaggagcgttggttaaaggcatccaaacgccatgggattaaaaagttaggaaaatcatatgatgatgccctcctcagtattgaaagaatacctgattttataagcattaatgacgcaatatattttagtgacaatgatccagagacgtggcatgttcaagtgtttcgttctattgattcaaa

SEQ ID NO: 415275 - DNA, 518 bp, Oryza sativa
tttgttttttttttttttttgttttttttttttttttttttttttttttttttttttttttttttaaaaagaaaacaaattcttcaaggcgaactggtagaacccaaagggggctggccccaaagggtccagaattccggggggggcttcgataaacataaataataattggggggggggtctgtttggggttgccccccccgtagggggggactagaacccacccgggtcgggcatggttcctgggggctgaactatgttggcccccctcaaatttgggacatgcttttccaagggctttttgggatcctgccggcccacatgggcaatcgctggtttttaaggggggaggtaatcctcctccggcactggcttgttatatttgggggctgggttcaacatttcctgaacaggctgctcattggttttcgaatgggggtaaaaactcttaaaaatcaatccatcggcccattttttttggggaaggtaagcaacattttctcctccagttcattttt

SEQ ID NO: 415276 - DNA, 532 bp, Oryza sativa
ctccgtctctctctcccctcttcctctcctccgcgcggcgaacgaagcgagcgagcggcggccatggagcggctgcagcggatcttcggggcgtcggggatggggcagccgccgacggactcgccgctgctcgactcctccgagcaggtctacatctgctccctcgccctcctcaagatgctcaagcacgggcgggccggcgtgccgatggaggtgatggggctgatgctcggggagttcgtcgacgactacaccgcaggggtggtcgacgtcttcgccatgccgcagagcgggacgggcgtcagcgtcgaggccgtcgaccacgtcttccagaccaacatgctcgacatgctcaagcagaccgggagaccagaaatggtggtgggctggtatcactcccattctggatttggatgttggctttcaggtggtgatatcaacactcagcagaggtttgaagctttaaatcccagggctgttgcagttgtgatagacccaatccagagtgtcaaggggaaggtggtcattgatg

SEQ ID NO: 415277 - DNA, 534 bp, Oryza sativa
tttgtttgatcaacaaccatgactgacatactcacattttagatttcaccagaataatgaagttatcgaacaaatattctgtacaacaatcctgagaagtacatcacctgaacatacatgtatcacgtgccgtcaaaacttcaacagcaccacaacatctcattgttacaaatcttaccaatacctaagtgacaggacactggagaagcctcttcttcttcttctcaagtccccttcaaatgctagcaattcccatccaccttcaaacacagcatcatacagaacctgatactacaaggaacatttgccctgctgttgctagcatagacccaagcaaagctccagcaacaacctgggttggagtatggcctaagagttcacgcaatggtcttgtttcagacaagggatgttcagaaggaagttcgcagactatttgattcaacacctctgcttgctttccagcatgtaatctgataccagaagcatcgtacataaccacacttgcgaatattgctgctgtcgcaaatagggcac

SEQ ID NO: 415278 - DNA, 513 bp, Oryza sativa
gggtgagccatgggcgacgacggtggtggtgatggcggcgcctcctccgcgggattctcctacttcgccgtcttccacaactaccccctcgtcgccgccttgctgggcttcgccgtcgcgcagtccatcaagttcttcgtcacccggtataaggagaacagatgggatcctaagcagcttatcggttctggtggcatgccatcgtcacattctgccacagttacagcactagctgtagcgattggcttccaagatggttttggctgtgccctatttgcgacagcagcaatattcgcaagtgtggttatgtacgatgcttctggtatcagattacatgctggaaagcaagcagcggtgttgaatcaaatagtctgcgaacttccttctgaacatcccttgtctgaaacaggaccattgcgtgaactcttaggccatactccaacccaggttgttgctggagctttgcttgggtctatgctagcaacagcagggcaaatggtccttgtagtatca

SEQ ID NO: 415279 - DNA, 352 bp, Oryza sativa
tttgtttttttttttttttaatgaattcccgcttaattaataaacaccagccttaataataaagtaataaattaactaatggctcgttctttccagtcattttgccttagctgtggaggatggccgggctacagtacgggccgttgagccagccgtcagtgatctgcttgtaagctgcctcggtgaggtggatgccgtcccagctaagatgcgacgccgggttggagcacgctgatgcgcctgacatcccacacctcgcgttgttgttgtagttgaacttgccgccgcctgacccggagcacgttttgaacaccgggctaaatccgtagttgccggggttgcggaccatgtc

SEQ ID NO: 415280 - DNA, 409 bp, Oryza sativa
tcttttcttggcttgtgctctgttttaatttctttgcaatgatggggaggcagagctcgtcggcggctaggagggtggtggtggtggtgtgcgcggcgatggtggtggcggcggcggcggcgcagaagtacaatgcggtgtacaacttcggggactcgatcacggacaccggcaacctgtgcaccaatggcaggccgtcgcagatcaccttcacccagcctccctacggcgagacctacttcggctcccctacctgccgctgctgcgacggccgcgtcgtcgtcgacttcctcgcgagttagttcgggctgccgttcctgccgccgtcgaagtcgactagcgcctacttcaacaagggagcgaacatggtgatcaccggagccaccgtcatggacgccaacttttttcc

SEQ ID NO: 415281 - DNA, 420 bp, Oryza sativa
atctcatctcatcatcagcaaccaattcgcaccgatcgatcgatcgatcgatccagcaactagatcaacagtactagctaggaagcatggcccgtgcacagttggtgttggtcgccctggtggcagctctgctcctcgccgccccgcacgccgtcgtggccatcacctgcggccaggtcaactccgccgtcgggccctgcctgacctacgcccgcggcggcgccgggccgtcggcggcctgctgcagcggcgtgaggagcctcaaggcggcagcaagcacgaccggagaccggtgcaccggctgcaactgccttaagaacgcggcccgcggcatcaaggggctcaacgccggcaacgccgtcagcattcccttcaagtgcggcgtcagcgtcccctacaccatcagcgctttcattgact

SEQ ID NO: 415282 - DNA, 448 bp, Oryza sativa
ttggttgtttaacaaccatgggtgacatacttacattttagattttaccagaataatgaagttattgaacaaatatgccgaacaacaatgctgagaagttcaccacctgcacatgcatgtatcacgtgccgtcaaaactaaaacagcaccacaacatcttattgttacaaatcttaccaatacctaagtgacaggacactggagaagcctcttcttcttcttctcaagacccctacaaatgctagcaattcccatgcagcttgaaacacagtatcatacagaacctgatactacaaggaacatttgccctgctgttgctagcatagacccaagcaaagctccagcaacaacctgggttggagtatggcctaagagttcacgcaatggtcttgtttcagacaagggatgttcagatggaaggtcgcagactatttgattcaacaccggt

SEQ ID NO: 415283 - DNA, 498 bp, Oryza sativa
tttctctgctgtcatgtgaactacaatattgtctgttattttttttattatcatggtaagctggggtctttatgtgcattgtaatttgttgttttgagaaagtaatagaaaaaatgcctcttggttaactatagtgcaatgtgatcagtgatcatgacatgcattatctagagattatgaaaaaacttcgagagcaggtggtctttattatgaaaaaacttaaaacatattgtttttgttaattatatatttgaagctattggttctgaggcaattctgttgttttacctttgcaggccattagtttcacttgcttatccattatatgcctttctgagagcaatagaaacaaaatctcctgttgatgatcagcaatggctcacttactgggtgctgtactcgtttatcactttgtttgagcttacttttgctccagtaattgaatggcttcctttttggtcctatgcaaagttgttcttcaactgctggttggtctta

SEQ ID NO: 415284 - DNA, 473 bp, Oryza sativa
ggaagggcaaagcagcattaaggcaaatgcaaggtttttaagatacaacacgaatacactctgaacataaactgcccttatttagggcattatgatgcattacagtatccccccattttggggttcccttttgggggtcctctaccaaaatacataaatggcaaaacatacacattttcaagattacggacggcacattacaaacaggcccacgttttagaggccttcaagtcccaggtccttgcagggggcaaccaacagcttgcgctcaacgaacatgagaacatagggaaccaccttccacaacatacaagagcgatatgtcctaaagccttaaagcaaccaccttttcaacagttcagacgccttttttctcacaaaggtctagcagtgataaggtctcagctttggagagctcaagacgaaactttggaccatcgtaatggtgcagcactggtctgaaagcatccttt

SEQ ID NO: 415285 - DNA, 519 bp, Oryza sativa
cccaagacgagtcgcggctgaacagaagagggggagtaggcggcgatctccatctggcgactcgcgagcagagcaggggaggggatcctgatctggaagaagctctcctcttaatttcagcgccttaaccttaatacaagtaccagtttgagtttgtttgttcccaagttggatccggccctgggtaatttctttcttgctgaaggtggagagactgagctgagctatggacaacttgtggcatctcggggatgagttccgtgggcagtcgaaggtagtggaggaccgtcagtggtctctcatgacatcgaagttggctgagatcaacaagtccaaggcggagaggacgaatgagcttgactatgcgcggatgaacaccatccctgatgtcaagcaatgggataaggtatcctaccaccaagatgagagcaagatggaccacctcaatcttggccttatgaatctagatcttaagatgaacgacatcaggatgaatgacgcagctatgaagaatccttt

SEQ ID NO: 415286 - DNA, 529 bp, Oryza sativa
  unsure (1)..(529): unsure at all n locations
tctcacttggatacagttttggagaagctgaagaacatattggagaatgcaggacagagcgctctccaaaggttcctatcacttttctcattgggagcaaaagttgaggatgttgatgacacatatgcagccctggcattgatgtatggatatgctgcaaaatatgctccatcaacagttattgaagccaggatcaatgcacttgtggggactaatatgcttggaagatttcttcatgttcaacatcctactgcaaagcaagctgtcattactgccattgaccttttaggccaagctgttattactgctgctgaaatggggatttcattcccactgaaacgaagagaccaattgctggagtatgtgctaacgctaatgggaagagatcaaaatgatgaccttgttgatttcagcactgagcttctgcacactcaaagtctagctttaagtgcctgtactactctggtttcgatagagccaagattacctatggaaacangaaaccgtgtgatgaaggcaacactaggat

SEQ ID NO: 415287 - DNA, 428 bp, Oryza sativa
tttgtttacacaatcaggtccattgtacttctttcatcaaccaaccagataacattgttttacacaatctgaacgaacgaagcaaatattcgggtacgcggaaagaggagaacgtcgcgcgtctcaccgcagcctgcatgaaagcaatggacctcaccgccgttgctcgccggagatccacactcacttgccggggacgaagttggtggcgtaggcccatgcgttgttgttgacggggtcggcgaggtggtcggccaggttctccagtggccccttgccggtgacgatggcctggacgaagaacccgaacatggagaacatggcgaggcggccgttcttgatctccttcaccttgagctcggcgaacgcctcggggtcgtcggcgaggccgagcgggtcgaagctgctcgcggggtagagcgggtcga

SEQ ID NO: 415288 - DNA, 508 bp, Oryza sativa
gggcgcgctcggctgcgtcttcccggagctcctcgcccgcaacggcgtgaagttcggcgaggccgtgtggttcaaggcggggtcccagatcttcagcgagggggggctcgactacctcggcaaccccagcctgatccacgcgcagagcatcctggcgatctggggttgccaggtcgtgctcatgggcgccgtcgaggggtaccgcgtcgccggcggcccgctcggcgaggtcgtcgacccgctctaccccggcggcagcttcgacccgctcggcctcgccgacgaccccgaggcgttcgccgagctcaaggtgaaggagatcaagaacggccgcctcgccatgttctccatgttcgggttcttcgtccaggccatcgtcaccggcaaggggccactggagaacctggccgaccacctcgccgaccccgtcaacaacaacgcatgggcctacgccaccaacttcgtccccggcaagtgagtgtggatcttcggcgagcaacggcggtga

SEQ ID NO: 415289 - DNA, 533 bp, Oryza sativa
gtcccagctgctcggctcctccctcgcctgcctcctcctcgccgccctcaccggcggcgaggaggccgtcccggtgcacgcgccggcgcccggcgtcggcgcggcgcgcgccgtggccatggaggccgtgctcaccttctccctcctcttcgccgtctacgccaccgtcgtcgaccggcgccgcgccgtcggcgcgctcggcccgctcctcgtcggcctcgtcgtcggcgccaacatcctcgccggcgggccctactccggcgcctccatgaacccggcccgctccttcggcccggccctcgccgccggcgaatgggccgaccactggatctattgggttgggcctcttataggtgggcctttggctgggctggtttatgagggcctcttcatgggcccgcccggccatgagccgcttcctaggaatgacggcgacttctaagttaattaggccttaataataactttgatctcgagctagtaaaaataatgaatgtatgagaagtgattggtttttaggtgcatgtaatttc

SEQ ID NO: 415290 - DNA, 450 bp, Oryza sativa
ttgttttaataaaaatggcgggagatacataagaaataatttaattacactagctagcagtggcacatctgaaaaaacaacgtgaaataaaagggaaaaaaagcaagcagaaagctagctcatcactttattccagaaacggtacagtgtagtgactcgctcgctcctccctctggcgaaataatgtcgtcaatgcctcaatcgtgcagcagcaagtgctcggtctccggtgatcgccgtcactggtcggtcgctggcggtatgtgcggcggcttgtgcttcttcggaggtgcttcaggttttggctcaggcttaggcttaggttttggttcaggctttggctctgggtatggtttaggctccggttttggttcgggctcaggctctggattaggttcaggcttgggctctggtgttggctccggctgtggcttgggctctggctttggt

SEQ ID NO: 415291 - DNA, 532 bp, Oryza sativa
  unsure (1)..(532): unsure at all n locations
ctgagccgtagccagtgccaaaaccggaaccgaagccggaaccaaaaccggagcccaaaccaaagccagagcccaaaccacacccagaaccaaagcctgatccgaaacctgagcctaagccacacccagagcctgagcctaagcctgaacctaagcctgagcccaagccacaccctgagcctgaaccaaagcctgagcctaagcctgagccaaagccagaaccaaagccggagccaaaacctgaaccaaaaccaaagccaaagccagagccaaagccaaagcctgagcccaagccataccctgagcctaagcctaagcctgaaccaaagcctgagcctaagcctgagccaaagccagaaccaaagccggagccaaaacctgaaccaaaaccagagccaaagccagagccaaagccaaagcctgagcccaagccacaccctaagcctgagcctaagtctgagcccangccagaaccaaagccagagccaaaacctgaaccaaaaccagagccataaccagagcctgaaccgaa

SEQ ID NO: 415292 - DNA, 365 bp, Oryza sativa
ctccgtccagagcaagaagctcatctcctcctactttcgcatggcagccatggccaccaccgtgtccagcctcctcaagaccttcttcgctggcgcgcgcctccccgtcgccgcccgcaaccccaccgtgtccgtcgcgccgagcaccgtcggcgccatgtgcaactccatctcgtgggcgtcgtccactcccccctacgacctcaacgccatcaggttcagccccatcaaggagtccatcgtgtcccgcgagatgacccggcggtacatgaccgacatgatcacctacgccgacaccgacgtggtggtcgtcggcgccggtttcgcggggctcttctgcgcgtaccagctttccaaggacccct

SEQ ID NO: 415293 - DNA, 509 bp, Oryza sativa
gcgccacacccctggaggaatgggaaggtagaatgaacgtggggatgtcaaattcagtgacgactgcgataagggacagcataagggagacggcaattgggaaaacatggaacacagagaaggctgatcgtgctacagtagaacaggctattgatccaagaacacgcatggttctgttcaagatgttaaaccggggggtttttaataccataaatgggtgcatttctacagggaaagaggcaaatgtctatcatgcatcaaaggctgatggccaggagttagcgatcaaagtctataaaacatctgtccttgtttttaaggatagagaccgatatgtccatggagattaccgctttagacatggttactgcaagcataatcctcggaaaatggtgaagacctgggctgaaaaggaaatgagatatcttttacgagttggagcagctggaatccgatgcccaaaaccattgctcctgaggcttcatgtactggtgatggaattataggaa

SEQ ID NO: 415294 - DNA, 390 bp, Oryza sativa
cccgggaatagttaaagggaaattcccattcataacagctcccagtaaaaagatccgaaaaaaacccaaaggcaactggggctaaaaacagtaagacaatgggggctttggttaaatcaatataggccatattgaataagaatggcatatgcggatttaaggcagggttacccggaatgggtaaccttataaaattcaatagggaaaatgccaatgttaacctacacaggaggcctaattgggatcaacaaagggccttccaagaaaggacctttcaactcagggctactgaaaagggaaaagttgtaaagggcacaaatcctaatctaagacttgcccttatcatggagggcacgtttgttgggccaggggacacttttataaccctta

SEQ ID NO: 415295 - DNA, 514 bp, Oryza sativa
gtggatgttctccgtgaccacagtgaggatgtacgcactgtgttccttctagcatcagtaaatctgatatttactggtggtaatgactctgtgatccgaatgtgggacttggaggaagggcttttgattgataagtcccgcccactttgttgcaccatccgggccattgcagctgacactaggcttttggtcactgcaggaaccaatgcctttattcattgttggagggctgttgaaggtaattcttaccctttccacatctctgggaatggcactgaccagagtcctgagtttcgcctttgggggcatgaaggacctgtgacttgtcttgccttggattcattgaggattttcagtggtagctgggatatgactgtccgtgtttgggacagatccgaaatgaaatgtgttcaaaagttcatgcatgcagattgggtttggagcgtggcacctcatggaaatactgctgccagtacaggctgtaaggatgcctatgtatgggatatcaagagtg

SEQ ID NO: 415296 - DNA, 522 bp, Oryza sativa
ctcgactcaagtgaagagtccgccgcctttccctcctcgccgccgctcggatggggatggcccccgccggtcgcctcctcctcatctcctgcctcctctgtgtgcccaattcatttggatttgcatttgctgtggaggaggaggaggacggcagcgggctgatgccacagctctcacccaccggctctcccaaccccttggttcccttcctcgcgcccgcccctctggcgccattcttcaacaccacccctcctaacttgtcaggcaagtgctcattgaattttactgctgtcggtgacctcatcaccaccactgctgtcgactgctttgcgtccttcgccccgttcctcgccaatgtcatctgctgcccccagctccaggccatgctcaccatcctcattgggcagtccagcaagcagactggctcccttgctttggatcccaccgtcgctacctactgcctctccgatgttcagcagctattgttgagccagggcgctagtgatgagcttcacaacattt

SEQ ID NO: 415297 - DNA, 489 bp, Oryza sativa
ggcaggtggagaccgggaggcgcgacgggcccgtgtctctggcgtccaacaccggcgcgctgccgtcgccgttcgccgggttcagcacgctcctccagagcttcgccaaccgcgggctcaacctgaccgacctcgtcgcgctctccggcgcgcacaccatcggcaaggccagctgctccagcgtcacgccgcggctgtaccaggggaacaccacctccctcgacccgctgctcgactccgcctacgccaaggcgctcatgtcgtcgtgccccaacccgtcgccgtcgtcgtccaccatcgacctcgacgtcgccacgccgctcaagttcgacagcggttactacgccaacctgcagaagaagcagggcgcgctggcgtccgacgccgcgctcacccagaacgccgccgcggcgcagatggtggcagacctcaccaacccgatcaagttctacgccgcgttctccatgtccatgaagaagatgggacgca

SEQ ID NO: 415298 - DNA, 477 bp, Oryza sativa
ttggttttttttttttttttgtttttttttttttttttttttttttttttttttaaaagagtatcaactggttttttacatgggttacattatagtacaagtccacaatcaacaggggatgcagggctccatccaaaaagacatcccaatgcaccaccaccattgacggcctactccgatccaaaaaaagagaggaagggggggtggacgaaaagacttttaatcttcctccatgggcagccatgggtaacactccaacacctgaagaactccggatttgggggggaaggcccggaaaatggtggcgtggccggggtcggcaagatgggcaaaaaggttgcagagggggccgcttccccgggactttgccgggaaccaaactcccatgacggccagcatggggagccccccgatctggatctgggtggaggggaactccttgatctttttgggggagccggtgccccaaccgagggg

SEQ ID NO: 415299 - DNA, 443 bp, Oryza sativa
cccggagagtttgcggtggaacgtgcaggcggagctggtgcactgccggtgggcgatgctgggcgcggcgggcatcttcatcccggagttcctgaccaagatcggcatcctcaacacgccgtcgtggtacaccgccggcgagcagcaatacttcaccgacaccaccaccctcttcatcatcgagctcatcctcatcggctgggccgagggccgccggtgggctgacatcatcaagcccggctgcgtcaacaccgaccccatcttccccaacaacaagctcaccggcaccgacgtcgggtaccctggtggtctgtggtttgacccgctcggctggggcaccggctcgccggagaagatcaaggagctgcgcaccaaggagatcaagacgggcggataggcatgctcgccgacatgggagcttggttccaggcagagtacaccgg

SEQ ID NO: 415300 - DNA, 440 bp, Oryza sativa
tcgaattccattcctcgcgattcctctcccctcggctcctcgtgctccccctcccaggggatcgccggagaggaatcgcgcggaggaaaaaaatagaaaagggcttccccgtcgtctaagttaaaaggaagccatggagcacaaggagactggatgccagcagccagaaggcccgatcctttgcatcaataactgcggcttctttggcagtgcggctaccatgaacatgtgctcaaagtgccacatggagatgataatgcagcaggagctggccaagctggcagcctcctctatcgacagcattgtcaatggtggtgattccggcaaggaaccaactattgctggtcacgctgaagtagctgttgctcaagtcgaggtgatgacgcttgttgcgcaccctgctgagattgctggtcctagtgagggggtcacggcgaacc

SEQ ID NO: 415301 - DNA, 509 bp, Oryza sativa
atggtaaaaacattaataagaggagattacatgggacaagagagagagagagagagtgagagagagagagatgggttcttgcgcttcggttcacaaggacctcgggttccccaagaagctgtttcttgcgtcgtcgcctaccaaggagaagaaggccgcgaacgggaagggtggcggtggcggtgtgtctgttgatctcaagcgaaaggagcagcagcaggcggcggcggcaggggttggcgtcaggagccccggttctggtagcaaggatgaaatgttctttgactcgcgggcatggttagattctgattgcgaggacgacttctacagtgtgaatggagattttactccgtctcgtggcagcactccaaactaccaacccagaacacaaacagttatgagcaatgtctttgtacctgataatgtacagaattccaaatcacctgaaccttctccaactggaaggagaaaactagccgagctcttgcaggaggcgatgcagaatggtt

SEQ ID NO: 415302 - DNA, 466 bp, Oryza sativa
gggaaacccaagtttgagattgaggaggtggaaccttccaagaagcgggggtatttgacaaagaagcgattgaagcttcagaggaagagggaaaagaagaagaggaaagaggccaataaaaatgatccacggcgtatcagacccaagggaaagaagataaaacagaaatttcctacacctgaagctcgactcaaatacaagattgagaaggccaaattgaaagaagctatgttggttgagaagttaaagaagtatgagattgctaaagcacaaggccctatggctaaacaagatgatcttgatggcgaggaaagattttatttgaagaaggtttctcaaaaaaagtcaaattatgtccctgttggaaggagaggagtctttggtggtgttattctaaacatgcatttgcactggaagaaacatgagactgtaaaagtcatctgcaaaccctgcaagccagggcaaa

SEQ ID NO: 415303 - DNA, 427 bp, Oryza sativa
cattgccggcctggatccggttaccgaggggcagctgccattaaccgctgggaacgttgagtctgctctagatcaagtgcgcccttacctgacggaagatggaggggatgttgcccttcatgaaattgccgggaatgtggggaggctgcagcttcaaggagcttgtggatcgtgcccaagctcgctgatcacgatcaagaggggcatcgagcgccgtttgatggagaaaataccaaatggtgctgctgttgaacctgttacaaataaggagactgggcttgagctgaatgaatagaaggctgacaaggttctcaacgaaatcaggccataccttgctggcacgggaggtggtgggctccactttctcatgatcaagggccccattgtgaaagttcggctcacaggccctgctgcagttgtgaggact

SEQ ID NO: 415304 - DNA, 464 bp, Oryza sativa
gctgctcatcaccatcaccctcatgctgctctgcctgctggaggtgaagtggtccgggatcgggctggaggagtggtggcggaacgagcagttctgggtgatcggcggcacgtcggcgcacctggcggcggtgctgcagggcctgctcaaggtggtggccgggatcgagatctccttcacgctcacggccaaggcggtggcggaggacgacgacgaccccttcgccgagctctacctcatcaagtggacgtcgctcttcatcccgccgctcgccgtcatcgggatcaacatcatcgcgctcgtcgtcggcgtgtcgcggacggtgtacgcggagatcccgcagtacagcaagctgctcggcggcggcttcttcagcttctgggtgctcgcgcactactacccgttcgccaagggcctcatgggccgccgcggccggacgcccaccatcgtctacgtctgggccg

SEQ ID NO: 415305 - DNA, 465 bp, Oryza sativa
aataaatcgcacataatagtaactatgatcttcaaattcacaaattctccatatgaatattacatacatgcagaatgtgaaggaaaattaaccaaacttggaagcaccagcgggaagcaacatatggcggacatagttcaaaggaatggagaccatatgcatggatacatagtacataatagtgcagtagaatctatccacgaggcgaaatgcaggatgcgaaggctgaattcgttgatctagtgctggaccgaggcggccatcttgtacgcgtatctacacttcagcgccacctcgcgcgcgccgccgccgccgatctcaggcgttgctccggtaggacccgagcttggcggcgctggccctcagcacgtactggtggtaggcggcggcgatggcggcgccgatcagggggcccacccagaagatccattggtcatcccaggccttgtccttgttgagataacc

SEQ ID NO: 415306 - DNA, 487 bp, Oryza sativa
ccgaccccaagcgcaacgcccgcgactcccacatcccggtgttggctcctctcccaattggattcgcggtgttcatggtccatctggccaccatccccatcaccggcaccggcattaacccggcgaggagcttgggagccgcggttatctacaacaaggacaaggcctgggatgaccaatggatcttctgggtgggccccctgatcggcgccgccatcgccgccgcctaccaccagtacgtgctgagggccagcgccgccaagctcgggtcctaccggagcaacgcctgagatcggcggcggcggcgcgcgcgaggtggcgctgaagtgtagatacgcgtacaagatggccgcctcggtccagcactagatcaacgaattcagccttcgcatcctgcatttcgcctcgtggatagattctactgcactattatgtactatgtatccatgcatatggtctccattcctttgaactatgtccgccatat

SEQ ID NO: 415307 - DNA, 536 bp, Oryza sativa
gtcgtccgtagcgggagggagggagagagtacgtgcggtcgtccggtggtctcagcgcacgcccgcggccgggccgtcgcgccgatcgcgatggggtcgtggcggcgcatggcctacggcgccctcaaggactccaccaaggtcggcctcgccaaggtcaacagcgacttcaaggagttggatattgcaattgtgaaggccaccaaccatgtagaatgccctcccaaggacaggcacgttagaaaaatattcgtggcgacctccattaaccgccctcgagcggacgttcaatactgcatctatgccttgtcaaggagattgtccaagacaaagaattggacagttgcattgaagacattgatagtggtacataggctcttgagagaaggtgatcctacattcaaagaagagtttctggcctactcatacaagggaagcgttttgcagagagcaaacttcaaggacgattcatgccaattagcttgggattgctctgcgtgggttcgcgcctacgcgctcttcctagaagaacggtt

SEQ ID NO: 415308 - DNA, 439 bp, Oryza sativa
ctcctctcctctcctctcctcagatcggatcgcgagagccccaatcccaccaccgatcgatccattcctgctgctcgcggccaccggagaaggagagagagagagagctcgacctcgtcggcgggtgaaggatcgcagcagcagcagcggcggtagagcaggaggagaggcgaagatgtcgtcggtgttcagcggcgatgagaccgcccccttcttcggcttcctcggcgccgcctccgccctcgtcttctcatgcatgggggcggcgtacgggacggcgaagagcggcgtcggggtggcgtcgatgggggtgatgcgcccggagctcgtgatgaagtccatcgtgcccgtggtcaatgctggtgtgctgggtatttacggcctcatcatcgcagtcattatcagcacggggatcaaccccaaaggccaagccctacta

SEQ ID NO: 415309 - DNA, 452 bp, Oryza sativa
gggggcagatcaagactgctaaatcatgcattacccacaaaataaaagatgctaccagaagacataaaggagcaatccatatgataacttataaagcaaaataaaagatccgggcaaacaaaatacccaatccacgcgcattgcctaaatgcctagttcaactaccaataaaactaaaactccaataaaccaagtaaccaagtcgttttcaattttagatagataagataactgagatatggatcaaaaattggtgccgtcgatatgcttaggaggaaacgacgccgtgattcagcgacagagaagcaagctgctgttcaggcgtcgagttcgtttggatctgctgggccgtgcgaaggacctccatggcttcagcaaccttggccttgagagcctctggagactcgagcaggtgcagcacctcaatctggtccatatccagcagcatgcca

SEQ ID NO: 415310 - DNA, 506 bp, Oryza sativa
gttgcgtttaaatctgctgaagatgcttcccgagctcttgccgaaatgaacagcaagatggttggcagcaaaccgctctacgttgcgcttgcacagcgcatggaagacaggaaagcaaggctgcaggcacaattttcacaactgaggcctgtcccacttgctccttcagttggtcctcgcatgcccatgtttccacctggtgttcctggagttggacagcaactgttctatggtcagccccctccagcgtttatcaacacacagcctggtttcggcttccagcagcctcttatgcctgggatgaggccaggtgcaggtccaatgccgaactttatcatgcctatggttcagcaaggacaacagccgcagcgtccggctggtaggcgtgctggtgctggtggaatgcagcaacccatgccaatgggtcagcaacagatgatggctaggggcggccgtggctatcggtatcctacaggacgtggcatgcctgatcctgcaatgcatgg

SEQ ID NO: 415311 - DNA, 525 bp, Oryza sativa
gagcagcactgggtcttacattccaatggagctcgcctgttgctttcattacatgcttcgtgactttatttgctttggtcattgctataaccaaagatctcccagatgttgaaggggatcggaagtatcaaatatcaactttggcgacaaagctcggtgtcagaaacattgcatttcttggctctggtttattgatagcaaattatgttgctgctattgctgtagcttttctcatgcctcaggctttcaggcgcactgtaatggtgcctgtgcatgctgcccttgccgttggtataattttccagacatgggttctggagcaagcaaaatatactaaggatgctatttcacagtactaccggttcatttggaatctcttctatgctgaatacatcttcttcccgttgatatagagaccaagcaatctgatatggtctgcatgttgagtgcggcaaaaactagaagcccatatgaacagtgggagtaggggaacgaacatgccatccatgggaggactctgataac

SEQ ID NO: 415312 - DNA, 426 bp, Oryza sativa
cattgtcggcctggatccggttaccgcggtgcagctgccattaaccgctgggaacgtcgagtctgttctagatcaagtgcgcccttacctgacggcagatggaggggatgttgcccttcatgaaattgccgggaatgtggtgaggctgaagcttcaaggagcttgtggatcgtgcccaagctcgctgatcacgatcaagaggggcatcgagcgccgcttgatggagaaaataccagatgttgctgctgttgaacctgttacagataaggagactgggcttgagctgaatgaagagaatgttgagaaggttctcaatgaaatcaggccataccttgctggcagggaggtggtggccttcagtttctcatgaacaagggccccattgggaaaggtcggctcacaggccctgctgcagttgtgaggact

SEQ ID NO: 415313 - DNA, 475 bp, Oryza sativa
attgcaaaaacatcatcttcttcttcatcttcttagtgtacacaacaccaactcgatcatcatctcgtcgcactaaacccatcttccccaacccaaagacaacgaactcgctggccacaaatccatccaaccacaattaaccactgctaagctacggtcccccacttcacttgccggggacgaagttggtggcgtacgcccaggcgttgttgttgacggggtcggcgaggtggtcggcgaggttctcgagggggcccttgccggtgacgatggcctggacgaagaagccgaacatggagaacatggcgaggcggccgttcttgatctcctcaccttgagctccgcgaacgcctcggggtcatcggcgaggccgagcgggtcgaaggcgccgccggggtagagcgggtcgacgacctcgccgagcggcccgttcgcgatgcggtacccctcgacggcgcccatgagcaccacctgc

SEQ ID NO: 415314 - DNA, 507 bp, Oryza sativa
atcgccatctctctcagctgtgacagctcactgcatcaatggccgcggccaccatggcgctctcctccccggtgatggcccgcgcggcgccgtcgacctcctccgcgctcttcggcgaggcgcggatcaccatgcgcaagaccgccgcgaagcccaagccggcggcgtcgtcggggagcccgtggtacggcgccgaccgcgtcctctacctcggcccgctctccggcgagccgccgagctacctcaccggcgagttcccgggcgactacgggtgggacaccgcggggctctccgccgacccggagacgttcgccaagaaccgggagctggaggtgatccactcccggtgggcgatgctgggcgcgctcggctgcgtcttcccggagctcctcgcccggaacggcgtcaagttcggcgaggccgtgtggttcaaggcgggctcgcagatcttcagcgagggcgggctcgactacctcggcaacccgagcctgatccacgcgcagagca

SEQ ID NO: 415315 - DNA, 484 bp, Oryza sativa
cgaacgcgaagcgcggcggcgagaaatccggcgacgatgagccgcggcacgggcgccggctacgaccgccacatcaccatcttctccccggagggccgcctctaccaagtcgagtacgcgttcaaggcggtgaagtcggcgggggtgacgtcgatcggcgtccgcggcaaggactccgtctgcgtcgtcacacagaagaaagtgccggacaagttgctggaccatacgagcgtcacgcacttgttcccgatcaccaagtacatcggtctgctcgccactggcctcacagctgatgcaaggtccttagtctaccaagcaaggaatgaggcagctgaattccgtttcaaatggggctacgagatgcccgtagacgtattagcaaaatggatagcagacaaagcacaagtctacacgcagcatgcctacatgaggccccttggagtagttgctatggtcttgggctatgacgaagagaaaaacgctc

SEQ ID NO: 415316 - DNA, 492 bp, Oryza sativa
caccttctcccttctcctcgctcttccccctccgccgccgccgcagcggagcagcaacagcaggcgagcgacatgggagggtttgtcaagacccagaagacccatgcctacttcaagcgtttccaagtcaagttcaagagacggaggcagggcaagactgactacagggccaggattaggctcaccaaccaagataagaacaagtacaacacaccgaagtaccgctttgttgtgagatttacaaacaaagatatcacagctcaaattgtctatgctaccattgcgggtgatatcgtgatggctgctgcctactcccatgagctgcctcgttatggtcttgaagttggtctcaccaactatgcggcagcttactgcactggcttgcttctggctcgccgtgtgctcacgctccgtggtttggaccaggagtacgagggcaatgttgaggccactggggaggactactatgttgaaccagctgatgaaggaggc

SEQ ID NO: 415317 - DNA, 527 bp, Oryza sativa
tttgtttttgtaggagcagcataacacacatagaatttccacattagaagcttacgtagaataagttactcccaaataaacacgctacaaaaataaggtccagatatttctttgatatattctcttgcactgacagacaaaagccggtcccagagcgacaggtctattttaagaggaaaagcttggtttcaactgatccttttcacttctaggtggaacacaccaacttagaacaccctgattggtttccccatggtgctcttgatgtaaaggcacctcacattctgccagttctttttcaaaagggacacgaggaagttgacgctcatttggatgttttgctggatctgcttctcctccattgacaagttacccacagcaacacccatgcacagaaccttcttcagctggaacttgactgtagcttttcgctcgttgaccttggattcaagagactcctggtgagtaaccaatgtagggaacttgccctgcttgttgagaccaggaccaaggagacgaggaatctg

SEQ ID NO: 415318 - DNA, 504 bp, Oryza sativa
  unsure (1)..(504): unsure at all n locations
ctcctctcgcgccgtttcgctccctgaccctccgccgccgccgccgccgatcatcatgagtaagttgcagagcgaggttctcaaggaagccatctcccaggttgttggggaatccaaggagaagggcaggaagttcaccgagaccgttgagcttcagattggtctcaagaactatgacccgcaaaaggacaagcgtttcagcggctccgtcaagctgccccatatcccccgccccaagatgaaggtctgcatgcttggtgatgcccagcatgtcgaggaggctgagaagattgggcttgactacatggatgttgaggctcttaagaaaatgaacaagaacaagaagctggttaagaagcttgccaagaagtaccatgctttcttagcatcagaggccatcatcaagcagattcctcgtctccttggtcctggtctcaacanggcaggcaagttccctacattggttactcaccaggagtctcttggatcccaggtcaacgagac

SEQ ID NO: 415319 - DNA, 512 bp, Oryza sativa
  unsure (1)..(512): unsure at all n locations
gcagggcgtccggctcggtcggcctgtcttacggcgctcactccaacctctgcattaaccagctggtccggcatggcagccctgcccaaaagctcaagtacttaccaaagctaatcagtggggagcatgtgggggcattggcgatgagcgaacccaactctggttctgatgttgtcagtatgaagtgcaaagctgagaaagtagatggtggttatgtcattaacgggaataagatgtggtgcaccaacgggccatctgctcagacactggttgtgtatgcaaaaacagatatagctgctggatcaaaaggaataaccgcgttcataattgagaaggggatgcccgggttcagtactgcacagaagttggacaagcttggcatgagaggaagtgacacatgtgagcttgtgttcgagaattgttttgtgccccatgaaaacgttctcggngaagagggaaaggtgtttatgtcatgatgtcagggcttgatctagaagacttgtgttagctgc

SEQ ID NO: 415320 - DNA, 413 bp, Oryza sativa
tttgtttttttttttttttttgttttttttttttttttggatccaacaagtaaagctgatgactgttttttggagttacatgaaatgggtcactgaatgtttcttggctgaacatgaaataaaatgacactggtgaaagactagagggcagggtgaagcagtaacatgtccaattttattgtagtttagttgcgctaatttatggctgttaggtgctgatcgatctcctttgtcgggagggctttgaaaacaccagcatttttttttacaacaccgaccttaatctgggggggcttgaaattttcctgaaaaactgattgcaatgcaaaaattgcaatctggacagttttctcgtaggaaaactgggggaaatcctcattttttttccagaaaattattgcttcctgctcctt

SEQ ID NO: 415321 - DNA, 529 bp, Oryza sativa
gccgtctcgccgcaatcgctcgctcggtcgcctcctcttccgccgcgagacacgaagagcagcagctcacaggtaggcctgcgcgtcggcggccatgggagacagccagtactccttctccctcaccaccttcagcccgtcggggaagctggtgcagatcgagcacgcgctcaccgcggtcggatccggccagacgtccctcgggatcaaagctgctaatggtgtagttatcgccactgagaagaaattgccttctattttagtcgatgaaacatctgtgcaaaagattcagtcattgactccgaacattggagttgtctacagtgggatgggtcccgatttccgtgttcttgtgagaaaaagtcggaaacaagcacagcagtattatcggttgtacaaggaaactatccctgttactcagcttgtccgagaaactgctgctgttatgcaggagttcacacagtctggtggtgtcagaccatttggagtatcattattgattgccggtacgatgacaatggcccacagc

SEQ ID NO: 415322 - DNA, 483 bp, Oryza sativa
cctcctcctgcttcccctccggcgacggcggcgcagatctccggttggaagttagggtgttcatcttgacacaaaatcatgccgaaatcaaactgtaccgaagcgaaaataagatatggattagctctccttccaattgatttatcgttctgtcaatattgatccgaatacgaaaattttaagtgctgttattttgaaggtttcggaaccggaattcggaattgcagtagcagtggatgcctttataaatcaagttcttgtccttggcttcaaatactcgatgtgtttcttggctaatcctaatccctagctgcttgtgtgttgcgtgtgcaatttctgacccttttgtggtggtgtatatcaacagagaaatctctagctttttcagcggcgaagcgaatccatggccgagcacctcgcttccatctttgggcacgagaaagaccgcgtgaactgccccttctacttcaagatcggcgcgtg

SEQ ID NO: 415323 - DNA, 517 bp, Oryza sativa
cactattggtaaagatggtgctcctgctggtgctgccgctcaattattgccgcgtccaaccacgccgattgtacatgggatcaggctatgagggtcatcataaatgacaaaaggtatggtgccctcaaaactctcgacgagaggaagcatgcttttaatgagtatctaaaacacatgaaaaagcttgaagcagaagaaagacgtatcaaacagcggaaggcacgtgatgattttttagctatgctagaagaatctaaggagcttacttcatcaacaagatggagtaaagcaataactatgtttgaggatgatgaacggtttagtgctgttgagcgtccaagggagcgtgaagacttatttgagagctatcttatggaactacagaagaaggaaagagccagggctgctgaagagcacaaaaggcacatagcagaatatagagcttttcttgagtcatgtgaattcataaagacaagtacccagtggagaaaagtttaagaacgtcttgaggatgatg

SEQ ID NO: 415324 - DNA, 461 bp, Oryza sativa
aaaacgtaactgtttgagcaaataccacgaaatgttcaggcgctaagatacggcaataccgatacatccagcatagcaaaaatggcgaagagcacagagtcagataaagctatagagaactagggctccaggagatgggggccgaatgacaaccatggcgcttagtcgacctcctccatcttgctctcgccggcgtcgtcctccagcggcggcatgtcggcgtcagcctcagcagactcgtcctcgtcgatgctcaggccgagcttgagcatccggtggatcctggtgccgaaggtgttggggtcctcaaggctgaagccggaggtcaggagggcagtctggaagagcagcatcaccaggtccttcacagacttggcgttcttgtcagcatcggcacgcttgcggagctcgtccatgatggaattctccgggttgatctccatggtcttcttgctcgacat

SEQ ID NO: 415325 - DNA, 598 bp, Oryza sativa
tactatagggaatgctgctccgcctgctggtgctgcggcggaattggggcgtcccacgcgtccggtgattcctgtggtgagcagcttggacggggtactaagatcaccctctacctcaaggatgatcagctggaataccttgaggaacgtcgcctcaaggatctggtgagagatggattctgagttcatcagctaccctatctccttatggactgagaagacaaccgagaaggagatttctgatgatgaagacgaggaagagaagaaggatgctgaggagggaaaggttgaggatgttgttgaggagaatgcagagaaagagaacatatagatgaagatcaaggaagtctctcatgagtggaacgtgatgaacaagcgacaacctatttggttgaggcagccagaggagatcaccaaggaagagtatgcggctttctacaagagcttgacaaacgactgggaggaacatctggctgtcaagcacttctctgtggagggtcagcttgaattaaggccatcctgtttgtaccaaaaatagcgccatatgatcttttgacactcggaggagcatgcaacattagctgtcgtacccgggtgt

SEQ ID NO: 415326 - DNA, 478 bp, Oryza sativa
caatagtcgaggtagacccccgcctgcttcctcctcctcctcgcgcttcgatttggtttggtttgattcggtttgcgagatgaaggatggtggtggaggaggagggagggggcagcagcagcagtggccttgcgactactgcggggaggcggcggcggctctgcactgcatggcggacgccttggccttcaagaggaggtggcagaacaagatgaacgcagccggcacgccatgcgacaagcctaacattgtcaccggcgccaatgtccaagtctgctgggagaagttcgcgcgatacttctaggttgagctcaaggaagtgaagctgagtgacggctactacgtcatggacccagctaaggccgcggatatggtcgacgagaacaccatctgcgtcgcggcgaacctccggtcgacgctgaacggggagttcgaggacgtgaagctgctcaacgatctgctcaccaagaagagacgc

SEQ ID NO: 415327 - DNA, 430 bp, Oryza sativa
aaccaaaacataggagggttcattttttcttctcaaagtaggggagcatttttccttttttcaccattacataagcttaagcaataacagataacaaatcctcctcctcctttagggaaaatattcaaacacaatacccttataagtacttattattaggaaagtagcgtgcatgggcataaatggcaacggggggcaggttaagaatcacaatgctgagcagcggggaaacaaaacaccataatgggacagagcaaaagcctccgaaagggagcttttaggccgaaggcttctcccacttggggggcttcaccacctcccaggtgaagtctgggtcgtcccttccgaagggaccgtaagcccccgttttgaggtagcgtccgttgccgcctttcttgaggtcaagggtgatgatgatcatgccaggcct

SEQ ID NO: 415328 - DNA, 523 bp, Oryza sativa
ctcctccacctcctcctcctccccccgatcggatcggcccggctcctcctcctccgccgccgccaccgccgccgcagataggagaagatggccgcacttgataccttcctctttacctcggagtctgtgaacgagggccaccctgacaagctctgcgaccaagtctcagatgctgtgcttgatgcctgcctcgccgaggaccctgacagcaaggtcgcttgtgagacctgcaccaagacaaacatggtcatggtctttggtgagatcaccaccaaggctaacgttgactatgagaagattgtcagggagacatgccgtaacatcggttttgtgtcagctgatgtcggtctcgatgctgaccactgcaaggtgcttgtgaacatcgagcagcagtcccctgacattgcacagggtgtgcacggccacttcaccaagcgccctgaggagattggtgctggtgaccagggacacatgtttggatatgcaactgatgagacccctgagttgatgcccctcagccatg

SEQ ID NO: 415329 - DNA, 365 bp, Oryza sativa
caggcaaatgcatgcacagttttacagaagcaaagcaacgggttcccaaaggtccacacttacagtacgttcaacgtacaactgatccaagcaaatgaaacaggtttgatgatgcactgatgcgagaaactaaacggttggatcggagtcggagacgaggcgatcatggacaagcggcgggggcggcgatgagcttagtagtcggtggtggggagctgatcgtggttgtgggagatgaagaggacctcgtacttgaccccgcggaggccaccgccgatgagggggccaacccagtacacccactgggactcccaggaccagctgacgagggccgggccgatggagacggccggcttaatggaggc

SEQ ID NO: 415330 - DNA, 485 bp, Oryza sativa
atcttcgtcttcgccggccagggctccggcatggccttcagcaagctgaccggcggcggagcgacgacccccgccgggctgatcgcggcggcggtggcccacgccttcgccctgttcgtggcggtgtccgtcggcgccaacatctccggcggccacgtgaacccggccgtgaccttcggcgccttcgtcggcggcaacatcaccctgttccgcggcctcctctactggatcgcccagctcctgggctccaccgtggcgtgcttcctcctccgcttctccaccggcgggctcgccaccggcaccttcggcctgaccggcgtctccgtgtgggaggccctggtgctggagatcgtcatgaccttcggcctcgtctacaccgtgtacgccaccgccgttgaccccaagaagggcagcctcggcaccatcgcccccatcgccatcggcttcatcgtcggcgcgaacattctcgtcggcggcgcgttcga

SEQ ID NO: 415331 - DNA, 437 bp, Oryza sativa
gccaggccaaacgacgattgtgaatttgtgattgatgaggttgatccaaccggtttatttcattattcttactatctccctttggaggataaaaatactgagtctgactacggtacaattttcatcttgaatttccaatcagaatttagttttaatcaaattagccacgtagtctgcagcccaaaacgatccagcttccgtgcagtaatagccgtgtgtatggccttcagtttcgacagacaaggcatccccaggagcacgctttgagatctctttcaagtgtgcaagcggaccccagggatcgtccacaccaaacagaaatgcaatctggtcctgttttgcactgatgaaattccagtccggttcttcagagagcttcgtgaactctgtcattgccatgaagagaacattacgcatcgtatggtaccataagagat

SEQ ID NO: 415332 - DNA, 532 bp, Oryza sativa
gttcatgttctggttattcccggaaatccaggtatcgttgcattctacaaggactttgttgaagagctctatgagaacctcggtgggcaagcatctattacagcgattgggcatatttcacatagcaaaaaggatgcagagtgtggacgattgttttcgttgcatgaacaaattgatcacaaggtcgatttcattgagcaagaatttcaacattcggaacaatcattagttctggttggtcattcaattggtgcctacatatgcctggaaatcttcaaaagacttcagaagaaggtgaaactttgtgtaggactctatccatttttaacactcaacaagaagtccatgaagcaatcagctattggatatattgcaaggtcatctctcctaagtaaaggggttagctcatttgtttcttttatcggatcactccaagcttcagtaactaggggcatcgtgagaaggttacttggaccttcatggtctgtaacggctgtcgaagctacatgcggtcatctcttatggtaccata

SEQ ID NO: 415333 - DNA, 509 bp, Oryza sativa
ctcatccaggcctccgtcaacaagaactacgtcgacatggacgagtaccccgtcaccaccgaactccagaaccgatgtgtgaacatgattgcacacctcttcaatgctcctctaggggactctgaaacggccgtcggagtcggcactgtcggctcgtctgaggccatcatgctcgccggtttggccttcaagaggaggtggcagaacaagatgaaggcagccggcaagccatgcgacaagcctaacattgtcaccggcgccaatgtccaagtttgctgggagaagttcgcgcgatacttcgaggttgagctcaaggaagtgaagctgagtgacggctactacgtcatggacccagctaaggccgtggatatggtcgacgagaacaccatctgcgtcgcggcgatcctcgggtcgacgctgaacggggagttcgaggacgtgaagctgctcaacgatctgctcaccaagaagaacgctgaaacaggctgggacacgccgatccacgtgga

SEQ ID NO: 415334 - DNA, 526 bp, Oryza sativa
gcctgcgccgcgatcccacccacccggacgaggaggaggaggattttttccccctctctccccttcgctttcctggagcttgaaggatagggatcgaggaggaagaagacgaatcaagaagcaagcaagtactgtgttgcagcaagaagaggatagcaatggcaaaagagaacttagagagagagagagacagagacagaggagatagtatgagcaaaagcagttctcaactctgaacattgatagcttcatcttcatagcttgatagaattatatccgagcttgcaggcatgtacaagaaccagcttcaggagcttgctcagaggagctgcttcaatctgccatcctatgcgtgcatccgcgagggtccagatcacgcgccacggtttaaggccacggttaatttcaatggagaaacgttcgaaagccccgccttctgttctactctgcggctggcaaaacaagcggcggcagaggttgcgctcaatgagctgtcgaaaagagggccatcatcgtcacttgctgc

SEQ ID NO: 415335 - DNA, 504 bp, Oryza sativa
gtcgccgccatcgccggcgctgccgccgttcttgcaagcgagctctacagtcggaggtgccgtcggttggcgacgagggtccgggagctggaggcctcgcttgccgccgccacggagaaggccgccgccgagcgccgcggtagggttcgggcgcagcagtcgctaaggaaggctctgagcgagcaagagctcagctcggatgagaagaagaagctgagccaatcccccaagtcgttccccatggcttcgatcggtgtcgtgcagtcatgcttctccactaggaatgggacgccgaggcagcctttggtggtgccacttgccagagcaaccgtgatgcttgatccagcccgtgtccctgcggaagcgcttgagggacttgccgattactcgcactgctggatcctttatgtgttccatctgaacactgaccttgataaaatgtggaatgaccctgctaggtccaagctaaaagcaaatgtgagagtacctaggttgcaagggggc

SEQ ID NO: 415336 - DNA, 529 bp, Oryza sativa
cagaatgctaagctaaagtgctaaactaagcacgagaaaatctaatcaaccaagcttagattagatcattagctatatatagctaggcgatttaatcatccacgagctagcttattagctaagcagtagcagcagcagaagatcgaagatggtgaaggagttcgtgcaggacgaggagaagcagcggctgctgctggacgagcacaccgagaagcacttcaccgccggcgaggtggtccgcgacatcatcatcggcgtctccgacggcctcaccgtgccgttcgccctcgccgccggcctgtccggcgccaacgccccctgcgccctcgtcctcaccgccggcctcgccgaggtcgccgtcggcgccatctccatgggcctcggagggtatctggcggcgaagagcgacgccgaccactaccaccgtgagctgcatagggagcaggaggagatcgacaccgtgccggacacagaggccgcggagatcgcggacatactgtcgcagtatgggctgggcccagaggagtat

SEQ ID NO: 415337 - DNA, 460 bp, Oryza sativa
agctttagcgttggcaaggagagagagagaagagagagagagagagagagagagagagtaattaaggctgggaggataggcagcagcagcagcgagagggaaacgagcgagcgagcttagctggtgcttgcctataggtagctaagcaaaatggggcagaggaggaggtcggggccgcggcgtcagagccagagcgtggtggtggtggtggtcgccgtgttgctggcgacggcgtcctgcgcggcggcgcagctgagccagagctactacgcgtcgacgtgccccaacgtggagacgctcgtccgcggcgccgtcacgcagaagctcaaggagaccttcaacgccgcgcctgggacgctccgcctcttcttccacgactgcttcgtcagggggtgcgacgcgtcggtgctgatcgcggggcccgacgacgagcacagcgcggtcgcggacacgacgctgt

SEQ ID NO: 415338 - DNA, 531 bp, Oryza sativa
  unsure (1)..(531): unsure at all n locations
cccacgcgtccgcccacgcgtgcgccgaccccatcatccagacgctgctccccatgtcgcccaagggggagatctgcgacatcaacggcgtgtgcgtggacgccaccgaggacgagctgttccggctcaccaccaaggaagggaagctgaccgtggagcgggagaaggtgaagatcgagacgcagcccttctcacccgtggtgcagttcgagcaggaccccgtccagatcctcgacgcgctcctcccgctctacctcaacagccagatcctccgcgcgctccaagagtcgctcgccagcgagctcgccgtcaggatgagcgccatgagcagcgccaccgacaacgccatcgagctccggaagaacctctccatggtctacaaccgccagcgccaggccaagatcaccggcgagatcctcgagatcgtcgtcggcgccgacgccctgccttaatccaatcaactcatttcttcatcccatccacctngcttgagctgctgaggttgctgctggtatatatactactctattc

SEQ ID NO: 415339 - DNA, 534 bp, Oryza sativa
gcttagcagaaggaagcgccctgatcgtatgaatcatgtgtggagcgtggtcgaaccccttgtaaagtctgcttcgctgccagtagaaccagaatccattggacattgggtgaataagaaccgcacgccattctacttcatatgcccaatttctcaggaggtcatgagggatcctcacattgcagcagatgggttcagttacgaagaggaggccatcaaaggatggctcggcagcgggcacaacacctccccgatgacaaaatcaactctggaacatcttcagctgatcccgaatctcgctcttcgttctgccattgaggaatttatgcagcagaagcagcagcagattccatcatagtaattagttcagtgaacttgattattcttagcttcataagttgtaaagttgatagctcattctttgttcagaagtctgctcgtgtagtgtagctgttttgttttgtgagcagcaacttacaataaatcgtgcatgctcatatgagcaggtgatgatcagctagcatatgtttgatg

SEQ ID NO: 415340 - DNA, 487 bp, Oryza sativa
aagtcacaaggttgtaagtaacattagatgaatgaagatgtacatttttcatgtttttggacagatatgcttagattctgccttttacggatacatccatgctattttgcaagccatgtaactgatttataattaatgcagcctctccggtggttccatgacgatcatcgcattactcgttatcatcatcagccaggtcgaactgcttgagcagcgcgccgcagatgggcagtgggatgtccttgaggtagccgagtgggttggctaagcgcaggttgtcacagatgccgacattcctggtgagcaaaacacgggcacgatccctttcggcctcgatttcagagcagtttgcaagggggctgtggacgaggacaacctcgcagatgtcctcctcatggctgtccttgagctcaatcttgtatgtcccggtctcatcagtcacaccgtcaatcgcacgctcgaccttgcggtgccaagtgcttgcact

SEQ ID NO: 415341 - DNA, 512 bp, Oryza sativa
catgggtgccaaggtcaggctggagtgcaagcactttggcaccgacaaggtcgagcgtgcgattgacggtgtgactgatgagaccgggacatacaagattgagctcaaggacagccatgaggaggacatctgcgaggttgtcctcgtccacagcccccttgcaaactgctctgaaatcgaggccgaaagggatcgtgcccgtgttttgctcaccaggaatgtcggcatctgtgacaacctgcgcttagccaacccactcggctacctcaaggacatcccactgcccatctgcggcgcgctgctcaagcagttcgacctggctgatgatgataacgagtaatgcgatgatcgtcatggaaccaccggagaggctgcattaattataaatcagttacatggcttgcaaaatagcatggatgtatccgtaaaaggcagaatctaagcatatctgtccaaaaacatgaaaaatgtacatcttcattcatctaatgttacttacaaccttgtgactt

SEQ ID NO: 415342 - DNA, 412 bp, Oryza sativa
ttgtttttagtaaaaaggtaaactcttcataataatattattaagacattatagctgatgtcttttgatcacactgcgatcaaattatgcatcataggcagtacaactccgcgtcaggaaaaagtagaggagatatatttcttgttattacttaatacagcattcacatatatcgaaccatccggtacgtacgtagtagtactccacgcgttcacatcgatgatcggggacgatatcctcaggtagtacttatgcaaaagcgttggcgtaaactgacgaactgaacggacggacggtcggatttagggctcccataagtccaagttgccggagacgaagtcgtagtggccgccgacgagcttgagggtgccgttggcgatccccttcttgacgaacgggtaggtcttgaggt

SEQ ID NO: 415343 - DNA, 489 bp, Oryza sativa
gctgcggcgacgaagccgtccatagattcttcttcctccccgtcactcctcaccaacaaccatcccccaccctccaagatggacgccgccgtcgaccgcctcaaggatgggttcgccaagttcaagaccgagttctatgacaagaagccggagctcttcgagccgctcaaggccggccaggcacccaagtacatggtgttctcgtgcgccgactctcgcgtgtgcccgtcggtgaccatgggcctggagcccggcgaggccttcaccgtccgcaacatgggcaacatggtcccagcttactgcaagatcaggcacgctggcgtcgggtcggccatcgagtacgccgtctgcgccctcatggtcgaactcatcgtgggtgattggccacagccgctgcggtggaatcaaggccctcctttcactcaaggatggagcaccagacctctttcacttcgtgaagcactgggtcaggaccggtttcccggccag

SEQ ID NO: 415344 - DNA, 503 bp, Oryza sativa
gacactatagaagtactttcgagcgtggattggcccccgtcctaaggttggattctttttagggggcggcctttttttttttgttttttttttttttttggatacatcaactgtgcgcggtggacttgtgaacatggacagtgagaatcgaagatcattatggagaagaagaggaagaagaagaagagagacacagagaagaattcaccaatttaccctttttaccacccaaatgtgagctatactgctctacgttattagttgaccttggtgcagactcgccggatcttggcgttggagccggcggccgttttgacgccgacgcggccgagcttggtgatggcggtgaccaaggcgtttaagaaggcggtctggttggcggcgaaagagttgacggtggcgcgcgagcggtggtcggcgaagagcacctggtcggaggcgaggaggcccttgagctgctgcagcgtctggaagtagccattgttgaacttgttgggcgagac

SEQ ID NO: 415345 - DNA, 479 bp, Oryza sativa
gctgaaagaggagagcttactgaacttgttcttatggtcatatggaatcgacttgatgttgctcgccgcgatgatgagagggatgccatcagaagccttgatctcttatacagaagggtagagacggaaattttaaggagtgaagcaactcctgctatgagattgctcaatgaccttctgaatcttcatgatggatctgatgatgacaagtggttaaagaaatgtaaaaaacatatgcttgaagtttttcccagagaagacccgttcaccatggtctttcctgctggtttcaacatggaggaacatcaaggacagatcaagctgccacctcaggatgatgatgttcttctaagagttgatttcatcaggaagttgatgagctcttgaaggaagttcaagctgcacatgaaaacaataaggtcccaactggtaatgaccccgaagctgttgcgaccaagttgaagtatcaagagaagctg

SEQ ID NO: 415346 - DNA, 507 bp, Oryza sativa
tgtggaaggaataaacatgatgagcattaatgacaatgacgtcaataaccattgtggtgctccagaagatggccgcttgttggatatagctagcacagcactcatgagtgatttacctacaggagacaagttcaaacctttaataggttcttcttcaggagatgggatgaatcttctgccacttaattcagatcagccagctgagccagtttcaacgacgcctaaggcaccctgtgtcacagacaaagatatgttcaatgatgggagcgtatatggagacttctgtgtggatgatgctgacctaacatttgagaattatgaagaattattcggtacctctcacgttcaaacagaacaactctttgatgatgctggaattgacagttattttgaaatgaaggatgtgccagcagatgaatctaatgagcagcccaaacctgtgcagccagaatgtagcaatgtcgcaatctgtgattctgggatgtcaaacccagcttgcagggctga

SEQ ID NO: 415347 - DNA, 520 bp, Oryza sativa
ctcagataccagggagatggacggccgttctggaggattgtggtggcagaggcaaccgaatgcaccaataatgattatttcgaagaagtatatgagtattacgctcatggagatgcatggcgtctgcctgctggggcttacgaaacactgcgtgatctaaaggatgctggagttaagctagctgttgtatctaacttcgacacacggttacgaaaattacttaaggaccttcatgtctcggatatgtttgatgccattgttgtatcatcggaggttggacatgaaaaacctgctccagagatcttcaagagagcattagatcaaattggcgtagaggccagcaaggcagtacatgttggagatgatgaaactgcagacaaggcaggtgctaatgccatagggcttgagtgctggctgtggggacaggatgtgaggacattttttgagatacaagaccggattttaacaagatttccacaatgacatcatagaaaccttaccgcaggtgatcttcacaggc

SEQ ID NO: 415348 - DNA, 431 bp, Oryza sativa
tttggttttttttttttttttgtttttttttttttttttttttttttttaaacaagctaattttataattaattcacaacaccatatttcattgatcaggttcagaacctgcacagaaatacacactaccggtacagatctcaccttttttccaatactgggacatccatccacgcgggccacacgaatacgtacatttatacgggacacgtacgtacatttactgcaccgggtacacacacgcacacttttttgcagagacccgcattggcgtcaacctagctagcttagctgaaggcgatgcgtctccatggcagcacggcggggggggcgctcacttgccggggacaaaattggtggcgtaggcccaggcgttgttgttgacggggtcggcgaggtggtccgcgaggttcttgagggggcccttgccg

SEQ ID NO: 415349 - DNA, 487 bp, Oryza sativa
gtcgtggggtaccgcatcgccggcgggccgctcggcgaggtcgtcgacccgctctaccccggcggcagcttcgacccgctcggcctcgccgacgacccggaggccttcgcggagctcaaggtgaaggagatcaagaacggccgcctcgccatgttctccatgttcggcttcttcgtccaggccatcgtcaccggcaagggccccctcgagaacctcgccgaccacctcgccgaccccgtcaacaacaacgcctgggcctacgccaccaacttcgtccccggcaagtgagcgccgccgccgccgtgctgccatggcgacgcatcgccttcagctaagctagctaggttgacgacgatgcgcgtctctgcaggagagtgtgcgtgtgtgtacgcggtgcagtagatgtacgtacgtgtaccgtatagatgtacgtattcgtgtggaccgcgtggatggatgtacgagtattggagagaaggtgagatct

SEQ ID NO: 415350 - DNA, 479 bp, Oryza sativa
ctcgtctgcgccgccacctcctccaccttctcttcccctcccaaccatgacggcggccgagatcgggaagcaggaggaggagctccgcgcccagatcgaggagcagaagctcaacgagggagatgagccagtcgttgttgaagatgacgatgacgatgaagatgatgacgacgaggatgacaaagatgacgatgatgcggagggaggtgatgcaagtggaagatctaagcagagtcgtagtgagaaaaaaagcaggaaggccatggtgaagcttggcatgaagtctatcactggtgtgagccgtgttactgtcaagaagagcaagaatatcctttttgtcatctccaaaccggatgtcttcaagagccctacatccgacacctatgtcatttttggcgaggccaagatcgaagacctgagctcgcaactgcagacccaggctgcagagcagttcaaggcgccggatctgagcagcatgc

SEQ ID NO: 415351 - DNA, 489 bp, Oryza sativa
ttcgccttgcgtcccgcggccaccatcaccaccaccaccaccacccacctcctctcctcccggatccgagatccgatccggcggcgatggcgtcgacggcggcgaggcggctacgggagctgcaggggcaggcggggaacaagacgtgcgtggactgcgcgcagcggaacccgcagtgggcgagcgtctcgtacggggtgttcatgtgcctcgagtgctcgggcaagcaccgggggctcggcgtgcacatcagcttcgtccgctccgtcaccatggactcgtggaccgaggcgcagctccgcaagatggaggccggcggcaacgaccgcctcaacgccttcctcgccgcgcggggcgtgcccaaggagaccccccacgttgccaagtacaacttcaacgccgccgccgcgtaccgtgaccgcattgtcgccgtcgccgagggccgcccgtggaccgacccgcccgtcgtgaaggagacctccggatctg

SEQ ID NO: 415352 - DNA, 386 bp, Oryza sativa
gcggagtccggcaagatcaccttcccgtcctcgctcaagcagccagggccaagggagttcccaatgcaatgtttcattaagcggaataagaagaactctacgttctacctctaccttggtttgacaaatgcaactgtggataaagggaagttcctcatggctgctagaaggtttagacgtggtccccataccgagtacatcgtatcccttgatgctgatgacctttcacaaggaagcaatgcatacatggggaaactgagatctgatttttgggggacaaacttcaaaatatatgatagcaagccaccatatgatggcgctaaagcatcaagtagtcgatccagtcggcgttttggaagtagaaggataagtccccaagtgtcagc

SEQ ID NO: 415353 - DNA, 503 bp, Oryza sativa
gtaagcgagccaatctattcatacaggtacggagtaaatgtccagccaaaagtaaaaaaggtatcatcacttcatcaagaacttatgtacaacagactgccttctgctttcacttaaaaagcaaaagttttacaacacaatttccttctcggagctaaatccatttggtaaaatggtacatttcccgcacaagaacaggatatgaatagtaccttgatatccagagtaaaaaggaaagaaatgaaagaagaaaaatgccgggaacaaccacaacggcatgcatccacaaccacaaccagatggcaatatgaggacatcaaactatgttgctattcacaagctagcttggtaccaaagctgctgaggctgatagcaaaggcttgaaacgctgagagtggctgccggtaatccatcgtgaagatattgtcatcgaccttaccaaactgcaacagaactgtttcctcatccttcgagctagcaggatcattgggatcagcagcagc

SEQ ID NO: 415354 - DNA, 433 bp, Oryza sativa
ttggttttttaacaaactggggacttaatttttaaagattccacaaagaaggttcacataaacaacacatgtcacagtatagaaagcttcaagcaaaccctgcataagcgaaaagcaaaagtttaccacaaccagacacacaaactgaaaaaaagaagcccacacggacagaccaaaggatagcagcaaaaaacaagcggggcccaggcaccaggcaagaaccctgaacccccctagaaccccccacccctcaacaccctagtaaccaacccccgaactaagagccgacctccccatagcccttctccagcgcggccaggacctcgcgggccctggagaattccccacctgcatgccctaaaccaccaaccaatggaccaaggggcgcttggagaaaacgaggtcgaactcgatgccgatgcggaagaacacc

SEQ ID NO: 415355 - DNA, 526 bp, Oryza sativa
ggcgtcttcgtactcgcctctctccgcgccctcctccgccgccgctcgccgccgttcgtctccgccgccaccgccgccgccatgagggagtgcatctcgatccacatcgggcaggccggtatccaggtcgggaacgcgtgctgggagctctattgcctcgagcatggcatccagcctgatggacagatgcccggtgacaagaccgttgggggaggtgatgatgcttttaacaccttcttcagtgagactggtgctgggaagcatgtcccccgtgctgtcttcgtcgatcttgagcctaccgtgattgatgaggtgaggactggtgactaccgccagctcttccaccctgagcagctcatcagtggcaaggaggatgcagccaacaactttgcccgtggtcactacaccattggcaaggagattgttgatctgtgccttgaccgcatcaggaagcttgccgacaactgcactggtctccagggctttcttgtgttcaacgctgttggaggaggaacgggctccggtc

SEQ ID NO: 415356 - DNA, 511 bp, Oryza sativa
gccaccaattatctatggtgatgtgagccgccccaaccccatgactgtgttctggtccaagttggcgcagagcatgacctctcgccccatgaagggaatgttgactggtcccgtcacaatccttaactggtcttttgtcaggaatgaccagccgaggtttgagacatgctaccagattgctcttgccatcaagaaggaggtcgaggaccttgaggctggtggtattcaggtcatccaaatcgatgaggctgctttgagagaaggtctgccactccgcaaggcggagcatgctttctacttggactgggctgttcactccttcagaatcaccaactgcggtgttcaggacaccacccagatccacacccacatgtgctactctaacttcaacgacatcatccactccatcatcaacatggacgctgatgtgatcaccatcgagaactcccggtccgacgagaagctgttctccgtcttccgcgagggtgtgaagtatggtgctggcattggc

SEQ ID NO: 415357 - DNA, 560 bp, Oryza sativa
gctcgagtcaaccatcggcaaattcctgacgcagagcgggacgttcaaggacggcgatctgctcgtcaacaaggacggcctccgcatcgtctcgcagagcgaggaaggggaggcccctcctatagaacctttagatcataatcagttgagtctagatgatctagacgcaatcaaagttatcggtaaaggtagtagtggaatcgtgcagttggttcgccacaaatggactggccagttttttgctctgaaggtaatacaactcaatatccaggagaatatacgcagacagattgcgcaggaattgaaaatcagcttgtcaacacagtgccaatatgttgttgcatgctgtcagtgtttttacgttaatggtgtcatttcaattgctttggagtatatggacagtggctctctctcagatttcctgaagacagttaaaaccattccagagccctaccttgctgcaatctgtaagcaggtgctaaaaggactgatgtacttacatcatgagaagcacattatacaccgagatctgaagccgtcaaatatattaataaatcata

SEQ ID NO: 415358 - DNA, 481 bp, Oryza sativa
gcagtaagagagggatttattatttaactggattacttccatctcttgtaccaaattcacgcaaaacatatactcttttattattcaatgagaaaagcaatgagtgcaatggtgcttttttatcatttcaggaggaacttcttgaaccaatgggcagagttcttggggtatctcttccttccgtcattgtaatctacgaagtttatcccaaatcgaactgtgtagccgttcgaccactcgaagttatcaagcagcgaccatgcaaagtatcccttcacgtttgctccatcccttatagcacttagcagggaaaggaggtgcttgtggtagtattctatcctagcgtcatccttcaaggcttcttggagtggtaaggtcttattgttgaattcatcaacgccattttcagtgatgtagacggtaggattgccatagttctccttaacataaagtagcaagtcacggaagccttgaggggtga

SEQ ID NO: 415359 - DNA, 552 bp, Oryza sativa
  unsure (1)..(552): unsure at all n locations
cggacgcgtgggtggagattcaggaagggagccttacactgcatgccatcatcaactacttgcccacgcggaaactgttcggttgtacaaagcgaaatatcaggccttacaaaaagggaagattggaataactctggtctcgcactggtttgttcccttctcccgctccaaatccaacgatgatgctgcaaagcgtgctatagacttcatgtttggatggtttatggatcccctcattagaggcgactaccccctaagcatgagaggattggttgggaatcgcttgccacagttcactaaagaacagtctaagttggtcaagggtgcatttgactttattggacttaactactacactgcgaactatgctgataaccttcctccatcaaatggccttaacaacagctataccaccgattctcgagctaatcttaccggtgtacgaaatggcatccccataggaccgcaggctgcttcaccttggctttacgtctaccctcaaggcttncgtgactngctactttatgttaaggagaactatggcaatcctac

SEQ ID NO: 415360 - DNA, 469 bp, Oryza sativa
atctgcggcagcctcaacaccacggtcaccgaggagatgatgaacatcctcaagggcatcgagaaggcgtccgggtggtcgatgccgatggtccacatcgaggacgtgtgccgcgccgagatcttcgtcgccgaggaggagtcggcgtcggggaggtacatctgcggcagcctcaacaccacggtcaccgagatcgccggcttcctggctgccaagtacccccagtacaacgtcagatgcgattgcatcgaagagcatcaccccgagaagccgaccatctcgctctcgtcggcgaagctcatcggcgaagggttcgagttcaagtacaagaacctggacgagatgtacgacgacctcgtcgcgtacggcatggcacttgggttgatccccaactgacggtgatgatggacggcgtgattccactgatttggcgattacgaccaaacgtgtgcttgtttcaaaaacacta

SEQ ID NO: 415361 - DNA, 500 bp, Oryza sativa
ttttgtttttttttttttttttttggggctcaaaacgaacaagccgatcaatcttattactgctaaattcagagcacaaaagatagcctggattttagactacttaatcatgcgacagtgcacacgcttgtctgtatacaaatctccattattactttaaaacttatacaagtcatgtaaaacctgcaagtacacataaatgtcaccatactcatctcacatcaatacaacataagttcactctgttgcatctcacatcagcttctcaccagactcatcgacactgttatcaacttaaaagacaacagattttgtgagggcagatggacaggtaattgcattctaccccagctagataacctagatttttttccatatagagaacctcatatcttagaaccaatatataggatgcagtctcggttgctcactgatcatgatcaaagctgcactttgcggtcataaacccagctgaaaggaataacaggcgcttgcttagc

SEQ ID NO: 415362 - DNA, 553 bp, Oryza sativa
agcctcaggacttcctgccagacccttcttccgatgggttttatgatgaagtaaaagagctgcgggagagggctaaggagatccctgatgactactttgtttgcttagttggagacatggttactgaggaagctcttcctacctatcaaacaatgcttaacacccttgatggtgtccgagatgaaactggcgcaagcccaaccacctgtgctgtttggacaagagcatggactgctgaagagaacaggcatggtgatcttcttaataagtacatgtaccttactggacgtgttgacatgaaacaaattgagaagacaatacaatacctgattgggtctgggatggatccaggaactgagaataatccctacttgggtttcctttacacatcatttcaagaaagagctacatttatatcccatggcaatactgcaaggcacgccaaggagtacggtgaccttaagctggctcagatatgtgggacaatagcagctgatgagaagcgccatgagacagcttacaccaagatagtggagaagctcttcgagatgat

SEQ ID NO: 415363 - DNA, 494 bp, Oryza sativa
tttgttttttttttttaggtataaacagatttatgtgtagattgcatcaagcccacatgggagggatagattacaattacaacctacacatccaccaaaaaaaggcaatgaagatacaccaatacaggcacaactgctcttcatgattgactggtccctaactctaagacgcctacagcatttcctcggtaacacaggggtaacatgtacatcatcactgaagctacaacagtatttcacagtaccagctactatgtttttgttacccacgtccatcaccacttatcatcaagaagctacctcctatcaagggttgatcacatttcactttccttttcgcttcttttggaatccaatgcaacttgggcaataccacttccccttcggatgctctttcacgccgacgcacccaaagtgataccattcgatcttgcaatcattattgtcgcatgcgaccatctctccgtagctgacttggttgcagaggcaatatg

SEQ ID NO: 415364 - DNA, 545 bp, Oryza sativa
gtggctttagccagtcagacttatgacctggttgatgctcatatccaacagctagatcagtttatgagaaaacttgaagaacttcgacaagaaaaggaggcagctacaactgctgctgctgctgctgctgcggcggctgctagtgttgctacaggtacgcctgttgctgctactgtaacagctagcgctggtacttcaactgctgacaatactccaaaaggtggaaggtctagcgaaagaggccgagggggtcgaaagaagactgctaaggtgcccactgagcaaccagcaccagccatagatttagaactgcctgtggatcctaacgaaccaacatattgcctctgcaaccaagtcagctacggagagatggtcgcatgcgacaataatgattgcaagatcgaatggtatcactttgggtgcgtcggcgtgaaagagcatccgaaggggaagtggtattgcccaagttgcattggattccataagaagcgaaaaggaaagtgaaatgtgatcaacccttgataggaggtagctccttgatgata

SEQ ID NO: 415365 - DNA, 491 bp, Oryza sativa
aacaaaagccatactctctgtattaaagatccaacaggttcagagaacacgcaagctcagaactacacatcaccaaaattggagcaagtttgggggtacatatccgctcatacagtggaggatttatttctcgattctacgagctttttaactagagttcgaccgggaagtcaattacggatagaaatgagcatcctgtcttcacaaaacccatgcacacaacagtgggcatgaaccgcatgatattcaccatcaagtttagtagggctccacgggtgcgcggaacttggcaccagcgtagacagcagccgcaccaagctcctcctcaatcctaagaagctggttgtatttggcaaggcgctctgatcggcagggtgctccagtcttgatctgacccgtggccaaaccaacagccaaatcagcaatgaaggtatcctcagtctcaccactcctgtggctggtcatcacaccccagccagcacgctttgaca

SEQ ID NO: 415366 - DNA, 565 bp, Oryza sativa
ttctacagcaggggcaaccccaccgtcgaggtcgatgtgtgctgctcagatggaacctttgcaagggctgcagttcccagtggtgcatcaactggtgtctatgaagctctcgaattgagggacggtggatctgattacttgggaaagggtgtttccaaggctgtcgacaatgtgaactcggttattgccccagctctgattggcaaggaccctacgtcacaggctgagcttgataacttcatggttcagcagcttgatggaaccaaaaatgagtgggggtggtgcaagcagaagcttggtgctaatgcaatcctggctgtgtcactggccatttgcaaagctggagctatcatcaagaagattcctctgtaccagcacattgccaaccttgctggaaacaagcaactggttttgcctgtacctgcattcaacgtcattaacggtggatcacatgctggaaacatgcttgccatgcaggcagtgatctgaactaaagatttctcattctatgtgttgctcataaagttatttaatgatgtgctctatattgcaggagttcatgatc

SEQ ID NO: 415367 - DNA, 450 bp, Oryza sativa
  unsure (1)..(450): unsure at all n locations
gggatgaaagcagaggtagattatattaagaagcctggcacgcatgaggagatggagcaggagtacatgatgagatcaccatgatgatagatgatccatccaagctagctagggatccatccaacattgatcgacacacgcacacactgacaacgacgacgacggttttatttaggcgtcagagcaaaaggcaaggcctgcctacatataagctgggtactaatgcaagcaaattaaggcctcgatcaaagctctgatcgacagtagcagcatccatacgataaatcctcatgcagccgggcgacgacgacgatagattcagttgcaggagcagcaggagcagccgctgcagctggtgccacacttgcaggtgttgcagccgcagccgccgttctcgccgctctccaccgccatctncattcctccagagctcgccttgttggatggagc

SEQ ID NO: 415368 - DNA, 576 bp, Oryza sativa
  unsure (1)..(576): unsure at all n locations
tagcaattcttgagctcaatcagcaacaacatctatctccttcttgcttagttaagtccttcgccctcccaagaagaagaagatgtcttgctgcggcggcaactgcggctgcggcagcggctgccagtgcggcggcggctgcggcggatgcaagatgttccctgatgtggaggccacagccaccaccaagaccttcgtcctcgctgctccatccaacaaggcgagctctggaggaatggagatggcggtggagagcggcgagaacggcggctgcggctgcaacacctgcaagtgtggcaccagctgcagcggctgctcctgctgctcctgcaactgaatctatcgtcgtcgtcgcccggctgcatgaggatttatcgtatggatgctgctactgtcgatcagagctttgatcgaggccttaatttgcttgcattagtacccagcttatatgtaggcaggccttgccttttgctctgacgcctaaataaaaccgtcgtcgtcgttgtcagtgtgtgcgtgtgtcgatcaatgttggatggatccctagctagctnggatggatcatctatcatcatg

SEQ ID NO: 415369 - DNA, 414 bp, Oryza sativa
aattaaatgatctctttgacctctctctatatatttctttgctgctacagaattgaagagcagcctgacggtgctacatcatgcagtcgattattcgatcgactaggcagctgcgacgctgagggagaagggcaatggcgcatagtgcggcgaggccgagtagtcgttggccttgagggcttcagatccacagctgtctgcatggtcgtccattagcatatggtggcacctgcactcggagctgcagaaggctttctcccccctgtacatgtagatgtcgagcccatcaagcctcttgtcacacaggaagcaccggctcaagaagtcagccgccggcgccggctcctagtcggcttccacaagccagctcgtcgccaccgtcggcgaacccaaagtacacccgcttcctcacgc

SEQ ID NO: 415370 - DNA, 462 bp, Oryza sativa
ttcttgtatggctatgatcctgtactaactgaggctgatttggaacctaacattgttgttaagagctgctgtggtggcagaaagaaaaagagcaagagctacatggatagcaaaaaccgtatgatgaagagaacagagtcttcagctcctatctttaacatggaagatatagaagagggcattgaaggttatgaagatgaaaggtcagtgctgatgtcccagaagagattagagaaacgttttggtcaatcgccaatttttattgcgtccaccttcatgactcaaggaggcataccaccctcaacgaacccagcatctctactgaaggaagccatccatgttatcagttgtggatatgaggacaaaactgaatggggaaaagagattggctggatctatggttcagttactgaggatattctgactggatttaaaatgcacgcaagaggttggatatcaatc

SEQ ID NO: 415371 - DNA, 558 bp, Oryza sativa
aagaatcaagaaagacaacaccaacaaactagctagctcaccaatggcctcgttgtcctccttccggctcgccgtggcagtggcggcattgttggtcgtcggctcatgcgccactgaggtcaccttcaaggtcggtgagggctctagcggaaaaagtctagagctcgtcaccaacgtcgccatctctgaggtggagatcaaggagaagggcggcaaggactgggtggcgctcaaggagtcgtcgactaacacctggtcgctcaagagtgaggcggcgctcaagggccccttctccgtccgcttccttgtcaagaacggtggctaccgtgtcgtcgacgacgtcatccccgaaagctttacggccggctctgaatacaagagtggtatcaacgtctaattaatagacatgcgtactcttgcattgggttgcatgataattattaacctctaaaaaattttggcttgaaaaagatcacgctacgcgtgagcaaagcaacaattaatttctggtggttattttgtggcataagccagggtaaaataaggatacatgtgtcc

SEQ ID NO: 415372 - DNA, 530 bp, Oryza sativa; identical to SEQ ID NO: 392084

SEQ ID NO: 415373 - DNA, 571 bp, Oryza sativa
gcggcatggaccatggtctgctccctgggttggggaagctggtggtgcatataacagtggcagccgaaaagtgtctaatactttcctgaatagcttctggtatcttgatcagcttggtcagtcagcaaagtatgacacaaaggtttactgcagacagactttgattggaggcaactatggccttcttgataccgaaacttttgttccaaaccctgattactacagtgccttgctgtggcatcggctcatggggaagggagttatttccttagacaccagcggttcttcgtacttgcgtgcctatgcgcattgcggaaagcaaaagggcggcgtcgcgctcctcatgctcaacctgaacaagaacatgggattcatggtctcagtcagaaatgacctcaacattaatttcagagaaatggcagggataaagagggacaactcctttgtccatggcctgaagaggacagtctcctgggttgggagcaaagcctcggatgggctggagaagagggaggagtaccatctgactccacaggatggcaaccctttgcccagacagtgctgctcaatg

SEQ ID NO: 415374 - DNA, 456 bp, Oryza sativa
gcttcctttgcttgtcctccgtcgctggtgaagctgtcaccgaggagcatatgtccatggcttgcacgaaggtgtggagaagcacgatgtacacacccaggcggctgaagcgaacgacaccggcgtcaagagtatcaagcacggccatggcggcggcgaacggcgatgccagccatggcgccaacggcggcattcagattcagtccaaggagatgaagacggccatccacagcaacgatagccccaagaccctcctcaagagtgaatccctccacgagtacatgctgaacacgatggtgtacccgcgggagaacgagttcatgcgcgagctccgcctcatcaccagcgagcacacctatgggttcatgtcgtcgccgccggaggaagggcagctgctgtcgctgctgctgaacctgacaggcgccaagaacaccatcgaggtgggcgtgttcaccg

SEQ ID NO: 415375 - DNA, 424 bp, Oryza sativa
aaggtagacaaacatttcacacatcattactatggtatgagtaactagtacaccttaaacagcaaaattcatgcaacataaatttgtagagatgacacaaaatccatacaataggtgcaatggcactgcaggctagtaaattcaagagttgcctactcttgcaaggagatgcgtctaaagatggcctggaaagtctgacctccatttcttgcaaccttctgaccttcttcagtggcggtagacagtagcttgacaactgggtctgcttttgtctcttcctctgggatagcttcgaacagcgggtgtttctccaggcatgaccgcatccattctccgagctcctccacatctgtgattgtatatatgattcctcccactttcatcacataagcatactcatctagcagctgcatgctgatcaccc

SEQ ID NO: 415376 - DNA, 488 bp, Oryza sativa
cgctgccaagccagcttccgcccacgacgccgccgccgccgaccggtccggcgaatcccccgctctcccgactcgcgagggctctctctctctccggttcgtactccctccccacccctctcccgcttccctctcccacaacaccgctcgcgtcgagtgacatgctcaccgggtgttcggcgtaatgcctctcccagaccaagaagcagctgcaggcggggacggcggcgcgatggcgagcggcgacggcgcgaacggcggtggcggtggcgggcaggggaagctcccgcggaagcggttctaccgggcgcgcgcgcacagcaacccgctcagcgactcgcacttcccgatcccgatatcgcccgacgaggtagacctctcgcagcactacccgcggtacttcccctccggcgagggcgaggcccgccagggcgacgcggcggtgccacggatccgcttcgcggacgttgggtgtgggttcggcgggc

SEQ ID NO: 415377 - DNA, 528 bp, Oryza sativa
  unsure (1)..(528): unsure at all n locations
ctcctgagtatgcacgtaccctcgtggccactccaaaaggggatgtttatagctttggagtcgtgttgcttgaacttgtcactggtgaagagcccacacaggtgaaaaatgccccagaaaacttcaaaggaagtttggtggattggataacatacctgtcaaacaattctatccttcaggatgcagttgataagtccttgattggaaaggatcatgatgctgagctgcttcaattcatgaaggttgcatgctcttgtgtgctttccgctccaaaggaaagaccgacaatgtttgaggtttaccagctaatgagagctattggagagaaataccattttagcgctgcagacgatgaattgacgatgcagccgcagaatgctgaagccgaaaagcttgatgagcttattgtagcaaactagatgagggtgatgaatggatgttgctcagatgcagtagctactgtgaagcttctagataatcanggtgatctgaacttgatggaatcctgctaagtgtttttttttcagc

SEQ ID NO: 415378 - DNA, 474 bp, Oryza sativa
gtcctgaatttttgctagtatatgcatataagtagatactactccactacagtacagaggagaggattgacattgactagctagtccacttaaccgtctccttactactatcagaagaagctaatttaattaagtggagtaaaagcaaaatgaggggtgggctgggctcattggtcgtcgttgtcgtcggtgacgaacttgccggttccggggttgatggcggcgaagaagaagaagaggatgttgaagaggaggagcggctcgatctcgttgatggggacgccggtctcgatgttgagctgcgccagcgcgcccttcccggtgatgatctcgccgatgagggagaaggcgatccccagctgcgcgaggcgacccacgaagagctcgttcgccttggtgaacccgaacagcgggccaccctcgctgagccccagcgccgcgcggaacccctttcccggggggatcacggcgcgc

SEQ ID NO: 415379 - DNA, 543 bp, Oryza sativa
gcctagatcaagagatcgatcatatcgtattttgtagtaatttagcagctagctagtgcagctgcaagctattagcgactgcatgctttgatcgatccatctagctaattgttgaatccatctaagcttaatggctctgcagcagagcatggcgatgccgatgatggtagtgtctgaccttggcaccgctcctcggtcatcgccgatggttcagctgcagaggatgaagaagcatctggtggtggtggcggcgttcaagagcagaaccaaggcttcccccaaggtggacaagtcgaacaagaacaagtcgatcgtggaggacggcatcttcggcacctccggcggcatcgggttcaccaaggagaacgagctgttcgtggggagggtggccatgctggggttcgcggcgtccctcctcggcgaggcggtcaccggcaagggcatcctggcgcagctcaacctggagacgggcattcccatctacgaggccgagccgctgctcctcttttcatcctctcacgctgctgggcgccatcgcgcgct

SEQ ID NO: 415380 - DNA, 515 bp, Oryza sativa
  unsure (1)..(515): unsure at all n locations
agaagggaagggaccataaccagcaataggcatagctgcacaatgtcgaagtctggaaacttactaacaccacaccacatactaaacagcagtccattaaacctaacttaaaagctaaaagggtttggttaaaggatactcctaccagcagataatccatgacacaggcagcatgccaagggcaggtacataggttccatacatgttcctaattatgagaagcaaaagtactagtagttcccccaggccgatcaccggatttctcaacgtcggcgagcatttgatcgagaggcggcacgatcagcagaaaaacatggagctcctcactttctcatggaggcgaggcagctcaggcaccggtacacttccgacagacgtatgacctccttggctggacgacgcgtccgacatatcttcgaacttgaggaatgtgcccacctgagcagcagcaagatgggcatnagcaaatcgagcaacaactgatatggctgttgtgcttctctgatacacataag

SEQ ID NO: 415381 - DNA, 539 bp, Oryza sativa
gtcgaggattccattcaagtttccgtggcacacagagtggactttctctgaatatcgatgtttcgacaactatgattgttaaacctggtcctgttatcgattttcttcttgccaaccagaaagttgatcaccctgacagaattgattggcaaaaggccaagcgtgctctcaagaacttgaggataagaaccacccctgtgaattcagaattcaagatcattggtttgagtgacagaaattgcaacgaacagatgttttcgttgaggcagaggaatgggaacaatggggatgttgatgaagttgaagttacagtctatgattactttgtgaaaaacaaaggcatagagctgcgctattctggcaatcttccttgcataaatgtggggaaaccaaagcgtccaacttattttccaatagagctatgctctcttattccactacaaagatacaccaaaagcttgtcaacactgcaaaggtccctccttgttgagacatccagacagaagccccaggaaagaatgtcagtccctaatgatgca

SEQ ID NO: 415382 - DNA, 530 bp, Oryza sativa
tttgttttttttatcgaagccgtttcgtttgcttttattccattcgattcgattcaattcgttcatctcaacatgcacatcgtccaagctaactccttaccggaatactctctatagaaagtagaaaccaactttggattcctttctgctgcccctcaggccctcgcatacataaaaagaaacagccttttctagagagcgtcgttgccttgttcaaaggttgcaccaatgccgctctacaagactacaactcatccttgaaatttgtaccggaactcctctcccccctcaaattagttgaagctgtgctctgatccttctctgttttcgttgctgacgaatccggccgcttcagtttgaaagggatgctagcgtgcttcttgataaacttgtacatctccaccaccgtacggtccccctcaaaagtaataggctcaaaacttttctttcctgctggataaaagaggatcgttgggaatccatcaagctttgcacgtggatgctcattggcagtgccatccattttagct

SEQ ID NO: 415383 - DNA, 477 bp, Oryza sativa
cacttccacagcagtggactcagtgagcaacggaggaagcaacgatgcgctcccgatctctcctcctcgtcgccctcgccacccttcttctccacgcctccgcctccgcctccgacgacgacctcgactacctcatcgacaacgccgacgacatccccgccaacgaccccgacggctggctccaggagggctcccccgacgacgacgacgacgacgacctcttccaccatggccaggcccaggaccatcccatagatgagacccacgtcttcctcctctccgccgccaacttctccgacttcctcgcctcccaccgccatgtcatggtcgagttctacgccccctggtgcgcccattgccaggcgctcgccccagactacgccgccgccgccgccgacctctcccctcttgcccatcaagtcgccctcgccaaggtcgacgccaccgaggacactgatctcgcccagaagtacgacg

SEQ ID NO: 415384 - DNA, 493 bp, Oryza sativa
ggtatcctctaatctcaccgatcaaatgttgtgcactttcaagctcaggagcctcctcttcctctgcacatttctcacgggagcgttgctctggttcatctcccatttcctctggtgatccatcaatccattttatccgccattgatccgatccgattcgatcaaacccatgtgtatctagaaatctagagagagagagagagaggcatcgatcgatcgatcgatcgaaggatggttggttcttgtcatgcatcttcaccattgccggatctgccggggaggaagaagaagaagtgctgttgctgcccaggattatgagatcgatggactactacgagatcctccatgtcgaccggagcgccaccgacgacgacatccgccgcgcctaccgtcgtctcgccatgcggtggcaccccgacatgaaccacaccggcatgatggacgccgtggccaagttcaaagacatcaccgaagcctcaacgtgctcagcgac

SEQ ID NO: 415385 - DNA, 485 bp, Oryza sativa
ggctactgctcgtcggggtcggagggggaggacgaggacgaggggatggaggggtaccggaagggagggtaccacgccgtcaggcccggcgaccgcttcgccggcgggaggttcgtcgcgcagcggaagctcggctgggggaacttctccaccgtctggctcgcgtacgacaccctcctcaacagatttgtcgcgctcaagatccagaaaagcgcgagggattacgcacaggcggcactccacgagattgagttgctgtcggcgatagccaaaggtgacccgacaaattccaagaatgttgtgcaattgctggaccatttcaagcatgctggtccaaacggacatcacgtttgcctggtcaccgagttcctcggtgatagcttgctaaggttgatacggtacaaccggaataagggcattggtctgagcggagtcaaggaaatctgccgatcagtgttggtcggtcttgattacttgcacagaga

SEQ ID NO: 415386 - DNA, 372 bp, Oryza sativa
tttgttttaacaaaacagagaaactagtctcaaaatcccacagataacttcttatggagatgttcaggtaaaaacagattgataaatccttgagataagatccggtaacgctgctactcaaaacttaaaacaagacaacgctcactgcgtcactccgagccacttcgagaagttgtcgaactcagcatagtcactgtctgagatcatggtcttgtaccatgcctttcctgcagccttaaccttagcagcctcctccgggctaagcttggtcctcttggagtcaagcttctccttcctggccttgatgcgggcagcctcagcaagggtggccatcttgcgtgcagtgccgaagttggggttgagcttgagcac

SEQ ID NO: 415387 - DNA, 570 bp, Oryza sativa
tttaaccctagccgccgccgccgccgccgccgtcgtcgtcatggccacccaaacgggggcagtacaatgcgtatgtgatcacgtacaactacatggccaccgacaacagcagaagcctcgccctcgacgaggtgtcccagtgcgcggctccgccccgacgtggcccgcttcgggcacaggctggtctcatgatgcaggcgccagccctacgccgtgtaccgacaggccggacagcagacccaggcggagtcgtggggcacggggcgcgccgtgtcgtgtatcccccgcgtacccggcggcggaacgcaccgtgccgggcagggagccttcggcaacatgtgccgcggcgggcgcatgttcgcgccgaccaagacatggcgcaagtggcaccgccgtgtcaacgtccacctccgccgcgtcgccgtcaactccgtcctcgccgtcacctgcgtcccgttcctcgtgcctcgccgcggtcaccgcatcgagaccgttcccgagctccccctgttattttcgactccgccgagttcatcgagaagaccttccagccatcaagatcctgagcag

SEQ ID NO: 415388 - DNA, 561 bp, Oryza sativa
catggcgcaggacgacgccccggactccaccacctcctcctcatccgcctcatccgcctccgcccccgccccctccgccgcccgcctcaacgccgccgccccggagttcacccctcgatccgccgtccaccaccaccaccaccacgccaaccctcgccgccagcaccgcgggggcgggggtggggcctaccaccaccaccagcagcactaccagccgcaccaccaccaccagcaccaccagcactggcaacactacggggaggatgagggggacgccgcggcggccggggcggtgggagaaggagggatcccggaggatgtggctcgtcgggtcgtcaagcaggtggaattttacttcagtgatgtcaatctggctacaacagaacatttgatgaaattcatgattagagatccagagggatttgtgccaatgtctgtagttgcatcttttaggaagatccgggagttagttagtgagagatccgcattggctgcagtattgcggacgtcagcagagctggttgttcagatgatggaaaagggtagacgcgagtgctctta

SEQ ID NO: 415389 - DNA, 504 bp, Oryza sativa
  unsure (1)..(504): unsure at all n locations
aaatacttaatagtaatagactctttgatggagtattacaacatgcagcagtggcattaatacgccagtacattaattaagttacacatatgcaggctccattttggtttcttttaatttatcgtattacagaatttctgtagccttgcagatgatcacttggatatcatgtactagtaattaacaataggatgcatacaaaagatggcccaacgacaacagaagatgcgtgcatctgacattgtctggccttatttgttggtagtaatccaattaattaacaagagatgatgcattcttgtgccttagtttcttcacatgcttggcttcacgttgagcctattcgcaatcttcacccccaacgactcatcacactgggagaggtagttgacccagatggcgcggagctcaggggagactttggggtgcgcgagctcgccggcgaagcggcggatgaacctctcctgtctatccggcgcccacgacctgtacctctncccgggc

SEQ ID NO: 415390 - DNA, 485 bp, Oryza sativa
cgacgacgtcggcatccccaccgattaccgccacatggacggcttcggcgtcaacacctacaccttcgtcacccgcgacgccaaggccaggtacgtcaagttccactggaagcccacctgcggcgtcagctgcttgatggacgacgaggccacgctcgtcggcggcaagaaccacagccacgccacccaggacctctacgactccatcgccgccggcaacttccccgagtggaagctgttcgtccaggtgatcgacccggaggaggaggagaggttcgacttcgacccgctggatgacaccaagacatggccggaggacgaggtgccgctccggcccgtggggcgcctcgttctcaaccgcaacgtcgacaacttcttcaacgagaacgagcagctggcgttcgggccggtgctggtggtgccggggatctactactccgacgacaagatgctgcagtgcagggtgttcgcgtacgccgacacgc

SEQ ID NO: 415391 - DNA, 518 bp, Oryza sativa
ttttgtttttttttttttttttttacgacaaaccacgaacttggatattaaagatgccacaaagaaggttcacataaacaacacaggtcacagcagcgaaagctacaagcaaaccctgcataatcgaaaagcaaatgtttttcaaaaccagacacacaaactgatagatagaagcccacacggacagatcataggatagcagcggtaatcaagcattgccaaggcaccaggcaagaaccctgaacctttctagtactcgtcaccctcatcaccctcgtcaccatcgtcgaactcggagccgacctcctcgtagtccttctccagcgcggcgaggtcctcgcgggcctcggagaactccccctcctccatgccctcgccgacgtaccagtggacgaaggcgcgcttggagtacatgaggtcgaacttgatgtcgatgcgggagaacacctcgacgacgctggtggagttgggatcatgcacacggccctctgcaccttggccaggtctccccccgggac

SEQ ID NO: 415392 - DNA, 517 bp, Oryza sativa
  unsure (1)..(517): unsure at all n locations
cgacaatgaggccatctatgacatctgccgccgctccctcgacattgagcgcccaacctacaccaacctcaacaggcttgtgtcccaggtcatctcctcactgactgcctccctgaggttcgatggtgctctgaatgtggatgtcaacgagttccagaccaacctggtgccctacccgaggatccacttcatgctttcctcctacgccccggtgatctcggccgagaaggcctaccacgagcagctctccgtggcggagatcaccaacagcgccttcgagccgtcctccatgatggccaagtgcgacccgcgccacggcaagtacatggcgtgctgcctgatgtaccgcggcgacgtggtccccaaggacgtgaacgccgcggtggccaccatcaagacgaagcgcaccatccagttcgtggactggtgccccacggngttcaagtgcggcatcaactaccagccgcccagcgtcgttccgggggagacctggccaggtgcagagggcgtgtgcatg

SEQ ID NO: 415393 - DNA, 463 bp, Oryza sativa
gtcgcgtcggcggcggtgagcgcgggcgccgggaagatgacggcgtcggcgccggggttgtagaaggaggcgatggacatgcggttgccgtcggggcgcgtgaggacgcggtgcatgacgctcttgtacctgccgttggtgatcacctccagctggtcgccgatgttggcgacgatggcgtggcgcatgggcggcacgtccacccactccccgtccttgagcagctggaggccgctcacctggtcgtcctggaacagcaggatgatgccaccggcgtcggtgtgggcgcggaggccgtcgacgagatcggggcgcgggcacggcgggtagctgctcaccttggtgccgaacgttgggccgttcgacccggcgaaggccttcttcaggtaacccttcttcaggcccagattctcgcacagcaggtccagcaccctctccgagagctttcgatctccgacgcaaa

SEQ ID NO: 415394 - DNA, 486 bp, Oryza sativa
ctcagcttaagcgagcgagcgagtgaacgagagagagagacagagatggcgagtgttgcctccttcccggtgatcaacatggagaacctggagaccgaggagaggggcgcagcaatggaggtcatccgcgacgcctgcgagaactggggcttcttcgagatgctgaaccatggcatcgcgcacgagctgatggacgaggtggagcgggtgagcaaggcgcactacgccaactgccgggaggagaagttcaaggagttcgcgcggcggatgctggaggccggcgagaagggcgccgacgtgaagggcatcgactgggagagcaccttcttcgtccgtcaccgtcccgtcttcaacctcgccgaccttcccgacgttgacgaccactacaggcaggtgatgaagcaatttgcgtcggagatcgagaagctctcggagagggtgctggacctgctgtgcgagaatctgggcctggagaagggttacctg

SEQ ID NO: 415395 - DNA, 471 bp, Oryza sativa
acattctccaaggctatatttcttggcaatggcctggtcgcaattgtatccgggctatttgcaaacctgcttgccgacaacttgggctttggtcccgtggcaccatttgatgctgctgcatgcttcctggcaataggcatggctatcataatgtcttcatggagtgaaaactatggagacccatctgaaagcaaggatttgatgtcccagttcaaggttgcagccaaagcaattgcttcagatgaaaaaattgcattactgggagccatacagtcattgtttgagggctcaatgtatactttagctttgctctggactccggcgttgagcccaaatgaagaagatattcctcatggcttcatattggccacattcatgctgacatcaatgttgggtagctcaattgctgcacgcttgttagcccgaaagctgaaggtcgaaggttatatgcagatcgtgtttacaatatca

SEQ ID NO: 415396 - DNA, 427 bp, Oryza sativa
  unsure (1)..(427): unsure at all n locations
atccaggggatatcaaaaggtattgtcctgaacctactccaccagattttcaaggaatgagagcgcttgttgttgacggaagatgtactcgtgctgaggttaccatgtaccatctgcggagacttggaatacaatgtgatcttgcagccacatctgaatcagcactttctgctctattggaatcctgcaattcaagtgtaaaaagcagtctaaatatggtgcttgttgacaaagaagcttggggcgaggactcaggcttggcatttttccggtgtcttatagatcttcggctgaagggcacactcaagtcttggcaaaccatgccaaagttctttcttttggcaggttcaataactcctgctgactctgattgtttgaggttggcggngtattctaatagcataagaaaaccccttcgtcttagtac

SEQ ID NO: 415397 - DNA, 522 bp, Oryza sativa
cactaacaacgcaacccaaagattcccagtatcccaccaccgcattgtgcatttgtgaattgtgagtgtcgaatccaagagttggagttcgtgttcgatggggtcgcaggcgatagaggcgcacagggagggggcggtggtgtaccacggggcggcgctgtgcgcggagaaggcggtggagctcctcgcggagatccacatgccgctgggcctgctgccgctggcggagatggaggaggtcggctacaaccgcgccacggggttcgtgtggctgcgccagaagaaggccatcacccacaccttcaagcagatcagcaggcaggtctcgtacgccgccgaggtcaccgccttcgtcgaggaccgccggatgaagcgcgtcaccggtgccaagaccaaggagctcctcatctgggtctccctctccgacatgttcatcgacaaggacgacgcctccaagatcaccttcaagacccccaccgtcctcgggaggacctaccccgtcgacgccttcgccaaggagga

SEQ ID NO: 415398 - DNA, 561 bp, Oryza sativa
caggaagagcttgacatcgatgtccttgttcacggcgagcctgagagaaacgatatggttgagtacttcggtgagcagctttctggttttgcattcactgccaacggatgggtgcaatcttatggatcacggtgtgtcaagccaccaattatctatggtgatgtgagccgccccaaccccatgactgtgttctggtccaagttggcgcagagcatgacctctcgccccatgaagggaatgttgactggtcccgtcacaatccttaactggtcttttgtcaggaatgaccagccgaggtttgagacatgctaccagattgctcttgccatcaagaaggaggtcgaggaccttgaggctggtggtattcaggtcatccaaatcgatgaggctgctttgagagaaggtctgccactccgcagggcggagcatgctttctacttggactgggctgttcactccttcagaatcaccaactgcggtgttcaggacaccacccagatccacacccacatgtgctactctaacttcaacgacatcatccactccatcatcaacatggac

SEQ ID NO: 415399 - DNA, 495 bp, Oryza sativa
  unsure (1)..(495): unsure at all n locations
ttcaaagatgctattgctaaagttggattagcaaagttggtttctaatctccttgtggtgggcttgttctatcacctttataaccaggttgctacaaacacattagaaagggtgacccctctaacacatgctgttggcaatgtgttaaaacgtgtcttcgtcattggcttctcaatcattgcattcggcaacaagatcaccacacaaacaggaattggcacttgcattgccatagctggtgttgcactctattcttatatcaaggctaagattgaagaagagaaaacgcaaatgaagagcgcataaggagttgaatctgtggatatagttgggtagctgctttgatcgatctgtattgcctccgagaaataaaatgagctgtaagatttataacaatctaggtgcctgctgtatctcatcttgtttgttattggcgatttcgctttgaacagncaaagctaccgatgcatttttttttttttttgaaattataac

SEQ ID NO: 415400 - DNA, 481 bp, Oryza sativa
ctcggatctgtagcaaagagcgaagagcgaagctgcagcctgcagctacgcttgttcgcttgagacctagggtacgagcaacaataatagagagtgactgagtgagcgagcactgagtagcaagggcccggcacaaacaggacgcagccggcaacgtgtacgtcgaaccaaacagagaacagctagctaatcgatcggtcgccatgaccaaggacgacgccgtcccggtggccgtggcgccggcgaagcgcccgcccatcaacaagtacgccttcggctgcgctctcctcgcctccatgaactccgtcctcctcggctatgatatctcggtgatgagcggcgcgcagatattcatgaaggaggatttgaagatcaccgacacgcagatcgagatcctcgccggcgtcatcaacatctactcgctgttcggctcgctggcggcgggcatgacgtccgactggctgggccggcggtacaccat

SEQ ID NO: 415401 - DNA, 541 bp, Oryza sativa
tgacattccaccagctactgaatctcttaatggccttaagatggagctggttgatgctgcatttcctcttttgaagggaattgtcgcaacaactgatgttgtggaggcctgcactggtgtgaatgttgcggttatggttggtgggttccccaggaaggagggaatggaaaggaaggatgttatgtcaaaaaatgtctccatctacaaatcccaagcttctgctcttgaggctcatgcagcccctaactgcaaggttctggtagttgccaatccagcaaacaccaacgctctcatcttaaaagaattcgatccatccatccctgagaagaacattacttgcctcacccgtcttgaccacaacagggcacttggccagatctctgaaaaacttaatgtccaagttactgatgtgaagaatgcgatcatctggggcaaccactcatccacccagtaccctgatgttaaccacgccactgtgtagactcccagtggagagaagcctgtcagggaactcgttgctgatgatgagtggttaaatacg

SEQ ID NO: 415402 - DNA, 410 bp, Oryza sativa
aagcacgaataataaatatgatttaggaaacgacttaaataacagaacagtcagggagaacagactaccagactgaaacggacttcacagggggggggacatatgagttcaactgggcacaacagccctaaaaaggccattcatacttcgttggggggagaggggtgacttgatggttatttaggggataacgtcgttgggtttcgacacgtccaccagtttggctggctttagcccatggggtacttttgtgtccaggagcgagcgggggattaatacttggccctatcagtcttggacatgggagcaatttccggcaccaacggatcattggggttcgggtccgtcagcagggaacaaattgacagggggacctttgatatggtaagggcaggactccactgttcctt

SEQ ID NO: 415403 - DNA, 565 bp, Oryza sativa
gtttttcttggccgaaccccccctcgacacgccgtcgccgccgaggggagagagagagaggccgccggccgccgctaccactgacccccccccctcgccggagcgccccgtcgccggtcgggtttgatcgatggcgtccaagaggatcctgaaggagttgaaggacctgcagaaggaccctcccacctcatgcagcgcaggtcctgtgggtgaggacatgttccattggcaagctactattatgggaccctcagacagcccatttgctggtggggtattcttggtgaacattcatttcccaccggattatccttttaaaccaccgaaggtctctttccgcaccaaggttttccacccgaacattaatagcaatggcagcatttgcctcgacatcctcaaggaacagtggagtcctgcacttaccatatcaaaggtcctcctgtcaatttgttcactgctgacggacccgaaccccgatgatccgttggtgccggagattgctcacatgtacaagactgatagggccaagtatgaatccaccgctcgctcctggacacagaagtac

SEQ ID NO: 415404 - DNA, 547 bp, Oryza sativa
  unsure (1)..(547): unsure at all n locations
gagatcgtcgccgtcaagcagctggacaaggacgggttccaggggaaccgcgagttcctggtggaggtgctgatgctcagtctcctgcaccaccccaacctcgtcaagctgctcggctactgcaccgacatggaccagagaatcctcgtctacgagtgcatgcggaacggctcgctggaggatcatctcctagatctccctccaaaggcaaagcctctcccgtggcaaacgcggatgaagatcgcggtgggcgcggcgaagggcatcgagtacctgcacgaggtggccaacccgccggtgatctaccgcgacctcaagacgtccaacatcctcctggacgaggacttcaactccaagctgtccgacttcggcctcgccaagctcggccccgtcggcgacaagagccacgtcagcacgcgggtcatgggcacgtacggctactgcgcccccgagtacgccatgaccggcaagctcaccaagacgtcggacatctacagcttcggcgtcgtgctgctgagatcatcaccgcaggcnggcgatcgatacc

SEQ ID NO: 415405 - DNA, 453 bp, Oryza sativa
gctttataacaatgggttcccagcaactagcattcatggagacagaacacaacaggaaagagagtatgccctgagatccttcaagagtggagcaactcccatcctcgtggcaactgatgttgctgctcgtggactggatatacctcatgttgcccacgtcattaattttgacctcccaaatgatatagacgactatgtccatcggataggaaggacagggcgtgcagggaaatctggtctggcaactgcatttttcaacgagagcaacaccccactggcaaggccgctgagtgagctcatgcaggaggctaaccaggaggttcctcaatggcttgagaggtatgctgcccgttcatcgtttggaggcggcggcgggagaaaccgcaggtcaggtggtggtgctaggtttggtggccgggacttccgacgagacagaggcagtggtggtggagg

SEQ ID NO: 415406 - DNA, 544 bp, Oryza sativa
  unsure (1)..(544): unsure at all n locations
gataacttggaaccatcttgattggcattattcagattcctattacattgttcggagccattctaatggataagagtggaagacgggttcttctaatggtctcggcatccggaacatttttgggctgctttctgacaggaatatccttctacctaaaggcacaagggctattctcagaatgggttcctgaattggctcttaccggtatactggtttatattggagcatactcgattggaatgggccctgtcccttgggttgtcatgtctgagatattctcgattgacatgaaagcaatcggtggaagcttggtgacactagttagttggttaggttccttcgcgatttcttactcgttcagcttcctcatggactggagttctgcagggaccttcttcatgttctccgcggcgagcttgatcaccatcctgttcgtggtgatggtcgtgcctgaaaccaaagggaggacgctcgaggagattcaggactcgctcatcgactncagatcaagattgagggatccatagaccatagagatatgatc

SEQ ID NO: 415407 - DNA, 430 bp, Oryza sativa
tttgttttttttttttttttttttttttttttccgagaaccaccgtatatatgctggtaattaaatgacttcgaacagaagtttatagccacaagagcctacgaagaattccaatttacttcaagaagatcttttgcatgaccctccttagggcccattcatccgtaagaattgaaccatgagaagcattattgagcttgatcgacttgaatcgccccttttgtccgggctgccgacgcatttcctcgtcgaacgccaacatgctaaccaggtggatggaatcatttccgtcaccatacactatttctggcggttcatcggcgaagttaccatcccagtatacgaattgccggggggtcctcttccccactgcattgatgcacgtcagcggcaccatgggcgcctcgatgtagtttatctcggcgatcgt

SEQ ID NO: 415408 - DNA, 489 bp, Oryza sativa
gcaactatcattccagtactcctgcggctgctgctcctgctgctcccgcttcccctgatccgagaccacctctgggcgccgagccacctccggccaacgccgcaggacgatgcgggtgagctccacccgatcttcctggtgcccggggcgacctgcagcaacgtggaggcgcggctcaccgaggcgtaccggccgtcggcggcgcactgcggcgcgatgaaggggaagggatggttcgggctgtgggagaacaacacggagctgcaggcccacgactacgcggagtgcttccaggagcagatggccctggtctacgaccccgccgccaacgagtaccggaacctgcccggcgtcgacacccgggtgcccaacttcggctccgtacggtcgtttggcagcaaggacgtttttaacccagaatggtgccttgcgagtcttataggggcgctggaggagatgggataccgtgacggagacaacatgtacgga

SEQ ID NO: 415409 - DNA, 499 bp, Oryza sativa
caataatcaatagtatgatcatatatatgcatcatagcgtgacatgcgatcgacttttacatgggtaaaaggggaggaaaaaaaaaagaagaaaaacaaatcaacctcagattacaattgcatcccgtgatgctgtcgctagtgtacacttaaaattacacagaatgacgtcgcctatcattctctccttccattagcctttcctctccagaacccaattcaatctgcaacgaagctcagggagatggtgaaccaaccatgcagggacgcacgcctaaacaaactgtgcatatacatccactgactagttctggccatcatcatcttcatcttcatcttcatctcgccaagaaatacgacaagaattgaaaagaggctattggcaatgcagctactatgatccactctcactttggttactgaatggcaacctgtctactcccctctaaatggcgtctctccacaaccgataccggataccaagcttgtcatatgatac

SEQ ID NO: 415410 - DNA, 524 bp, Oryza sativa
  unsure (1)..(524): unsure at all n locations
taagaacaacgcatgggaggccttgttccatgtcgatgacccggggccaagggttccaattgcaaaaggcaagttcttggatgtcaaccaagctcttgaggtggtccggttcgatatccagtattgcgattggagggcgcggcaggacctcctcaccatcatggttcttcacaacaaggtggtagaggttcttaatcctttagcaagggagttcaagtcaattggaaccttgaggaaagagcttgcagaattacaggaagaattggcaaaagctcacaatcaggttcatctgtcggaaactagagtatcatctgcccttgataagttggcacaaatggagacccttgtcaacgacagactgttgcaagatggaggctctagcgcatctacagccgagtgcacttcccttgctccaagcacgtcatcagcgtnccgtgttgtaaacatgaaaccttctcgccggagtctgaacgtgtctggtccagtgcagccatacaantccagtctgaagaacttttgtaccc

SEQ ID NO: 415411 - DNA, 509 bp, Oryza sativa
ggcggcggcggcagagggaggtggcggcgaggacgagcggcgggcgcgggcgctgtcgtcgtcgtcgtcgtcgctgcggcagcgcgcgatgagcgcgtcgtcgaagctgctccggacgtcgctgagcaggagcagcaagggggcggcggcgcggcagcggagcagcaaggtgatgtcggtgtcgatcgaggacgtgcgcgacgcggaggagatgaagtcggtggacgcgttccggcagacgctggtgctggaggagctcctcccggcgcgccacgacgactaccacatgatgctccgcttcctccgcgcccgcaagttcgacatcgacaagagcaagcagatgtggagcgacatgctgcaatggcgcaaggagttcggatctgacaccatcctcgacgacttccagttcgaggagatggaccaggtgctcgagcactacccgcagggccaccatggcgtcgaccgcgacggctcgcccgtctacatcgagaagcttggggcgatcgaca

SEQ ID NO: 415412 - DNA, 520 bp, Oryza sativa
gatccgtaattccgtatgctggaaaaacattcatgagactgcataacaatgccaagagtgttttgttgctgaattacactatggactaaaaaggacagatacttatacagaaagtagccatggccagtctttgatcaaaggagatgatgaacaatgttttaaaaaccatggcagatgaaattactcagatactatatctcttcttgccaacagaacatctctctttctgatacggtgaccacatagcataatccagctaaaacttattctgatactttgcaactgaatcatcaaccttgagcaactgggcagaacccatgcataattgcagcagaccaaactttgtccatatcaagcaccttgtcaccacattcatgctcattccatccctccaacgcatgaagaattcccgcgattcgccatgcgctcataaccctccttggcagccaattctcgcatgaatgcacattcttgagcgtttttggtacagccattgcaggagttgcgagtagcttgagct

SEQ ID NO: 415413 - DNA, 491 bp, Oryza sativa
catgactcttgccgtgttgagactgcagaaacgagagctagctagccagaggctgcatgaagattctgcacccatagatcgtctaccatggccacaaacccaggactcttcacggagtggccatggaagaagcttggcagcttcaagtacgtgttgctggcgccgtgggtagcgcacgggtggtatgaggtggcgaccaaggggtggcgggaggtggatctcgggtacatcgccatcctcccgtcgttgctgctgcggatgctgcacaaccaagcctggatcaccatctcccgcctccaaaacgcccgtggccgtcgccagattgttcgccgcggcatcgagttcgaccaggttgaccgcgagaggaactgggacgaccagatcatcctgagcggtatcctactatacctcggcgcactgtacgtaccgggcgggcaacacttaccgctgtggaggacggatggcgcggtgctgatcgccttgctgcatgc

SEQ ID NO: 415414 - DNA, 481 bp, Oryza sativa
ctccctctccgcccatttctcctctccacctgcgatccatccgcgcccgcgaggaggagggagccggacgccgccgcggggagagcaggggagagaaggagaggaggagatcgccgtcgccgtaaccgtcgccgtcatcgatctcgagcgggagcggagatggggctcacgttcacgaagctgttcagccgcctcttcgccaagaaggagatgaggatcctcatggtcggtctcgatgctggcggtataaccaccatcctgtacaagctgaagctcggcgagatcgttaccactatccccaccatcggttttaatgtcgaaactgttgagtacaagaacattagcttcaccgtttgagatgttggtggtcaggacatgatcaagcccctgttgtggcactatttacagaacacccaggggctgatttttgttgtggacagcaatgacagagagcgtgttgttgaagccagggatgagctcc

SEQ ID NO: 415415 - DNA, 484 bp, Oryza sativa
agtggtaatggatcagctgcctatattatacacataattatttgtaccaatttatacaaatttacatgatatgttaataggataggtgcacagacctgagatggctataacaatcatcactgctcctgaagttctccaagcatgcccaacaaatgtgactgccacatttacactcgacatggttgcaaccatcagctttctcgattgtaaagtggcaagaagggcataccttcacattctccttccccttgcgccattcaagcagagttgcatcagggtcttccttgtattctttgtatgcctcacaggatatgaaaggatgatattcaagatgacacttgttgcagatctccacaaagcaagccccacagacaaaaggtttgctttcagcatctgcagcagccacttggtaaatggatgggcaatcaggagtaggacagaaacgatattttcctgcattagaagcaacaaatgctctcaagga

SEQ ID NO: 415416 - DNA, 513 bp, Oryza sativa
agctgaggagaaattgatccatgcccttctacaactccgtgataagaaacctttggatattcgtcttcgtggccgtaacctacctccaaacttgatgaaggaaatgttaaaaaagttcggggctgatctggaaggattgaagagagaggtgcctgcagtagagcttcgattaaatttacgacaacatacactttacgttcgaggcagtaaagaagacaagcaaagggtggaagaaatgatctctgagctggtaaattctacaaagtacaatggcctgcttcaacttccattagagaatgcatgccctatttgcctgtgtgaggtagaagatccctttaagcttgaatcttgtgggcatgtgttttgtctgacttgcttggtggatcagtgtgaatctgctttgaaatcacatgatggtttccctctgtgttgcctcaaaaatgggtgcaagaagcagctccttgttgttgatttgagatctctcctatcgagcgagatactggaagagctatt

SEQ ID NO: 415417 - DNA, 501 bp, Oryza sativa
ttttgttttaagtaaattaacatttgcaaaacttacgaacgactgggcaacataaaatatctgattgctcttatagcgagatcaaagctgtcgaaggagagacccgtttggcccagagtcgagcattgcacagataaaaaaagaaagaacggagcaaaacagagttactcacaataattaactaagaatgcatcgccatatccaaaagctgttcagatgaaagttccaaaccacaggtaaaccacagcgttcctcccccacaactctcacttaatttctaccagaagcaacgacgatacgacagatcaagccacagccaaaagagacgatggcagaaagaacatcgtgagcggcaaccatggagcagtttagtcgacctcctcgatcttggggcctgcgccgctgccgcccgccggcgcgtcctcgtccatgcctccggccatgtcggcgccggggccctggtacatcttgggcgatgatcgggtgcagatgccctccagc

SEQ ID NO: 415418 - DNA, 498 bp, Oryza sativa
gagaaattcccacgcagcagcaagcaatccaatccgagagcgcgcgtttgcgattattcgctttcgattccgcgaggtttttggagagggaggagaaggaggaggagatgtcgaagggggaagggccggcgatcgggatcgacctggggacgacctactcgtgcgtgggcgtgtggcagcacgaccgcgtggagatcatcgccaacgaccaggggaaccggaccacgccgtcgtacgtcgccttcaccgacaccgagcggctcatcggcgacgccgccaagaaccaggtcgccatgaacccaaccaacaccgtcttcgatgcgaagcggttgattggtaggaggttctccgacccgtccgtgcagagtgacatgaagctatggccgttcaaggtggtgcctggccccggcgacaagccgatgatcgtcgtccagtacatgggcgaggagaagcagttcgccgcggaggagatctcgtccatggtgctgatcaagatga

SEQ ID NO: 415419 - DNA, 511 bp, Oryza sativa
ggatcattcaggtatcgagaaccattggtgatgtttacttgaagaaacaagagtatagcatggatcccgtgtttcgtaacgttggtccccctattcctttgaagcggccagctcttagcgcagaaccatcgattcaagttcgcaagctcaaaccaaatgatctgttcctgatatttgcttcagatggtctctgggagcatctcagtgacgacgctgcggtgcagattgtcttcaagaatccaaggacgggtatagcaaacagattggtgaaggccgctttaaaggaagccacgaggaagagggaggtcagcttccgtgatctgaagacgatagagaagggagtgaggcgccatttccacgacgacatcagcgtcatcgtcgtctaccttgaccgccaccgcggtcgccgtcacacaagggtcgtcgactcgagcagcaactgcaccaacgcccccgtcgacatctactcctccaactccggccaatccgtggagactcttcaagcccatcg

SEQ ID NO: 415420 - DNA, 520 bp, Oryza sativa
aattaaaggaaaaaaaaacaaaacacaccaagccaaataaaagcgacaatgggatcgctcaccaccaacatcgtcctcgccgtcgccgtggtggcagcgctggtcggcggcgggtcgtgcggcccgcccaaggtgccacccggcccgaacatcacgaccaactacaacgccccgtggctccccgccagggccacctggtacggccagccctacggctccggctccaccgacaatggtggcgcgtgcgggatcaagaacgtcaacctgcctccctacaacggcatgatctcctgcggcaacgtcccaatcttcaaggacggcaggggatgcggctcatgctacgaggtgaagtgtgagcagccggcggcgtgctcgaagcagccggtgacggtgttcatcacggacatgaactacgagcccatctcggcgtaccacttcgacttctccggcaaggcgttcggcgccatggcttgcccgtgaaggagaccgagctccgcagggccgcatcatcgacatgcag

SEQ ID NO: 415421 - DNA, 418 bp, Oryza sativa
agcgcgagcagttcgaggagcgcgccgagaccatcctccacctcctcaagctccagttccccggcacccctcagtcccagctcgacatctccaagatccaatacaaccgggacgtggggtacgcgatactggagagctactcgagggtgctggagagcctggcgtacagcgtgatgtcgaggatagaggacgtgctgggggcggacgcggcggcgcagaacctgacggcgacggaggcggcgaggaggctgatggacggggacgcggcggcgaggaagctggacgccatggaggagctggagaagctcaacgaggcgccggcgtccatgacgctctacgacttcatggggtggcacttcgaccaggacgagctcatgaggaagaaggaggaaggcaccctcgacgaggcccgcgaggc

SEQ ID NO: 415422 - DNA, 575 bp, Oryza sativa
ctgatccaaagactggtcgcccgagtccctacatgcctccaccctctccctggatgactcagaggccgctgggcgttgatgtgaatgtcgcttatgtggagaaccgtgaggacccagataggaccggacagcctccgcaactaactaaggattttctaatgatgtcctctgggaaacgcaagagggatgaatatcctggtcagctcccttctggttcttttgtgccacaacaagatggaagtgcagatcagatagttgaatttgttgtctcaaaggacaacgcacaacaactttggagttccattgtgaacaagcaaggaacagcaacaaaagaatcttccacaaaggaaacaataattgctccaacgattcctcaacgggatgggatggatgactataatgatccattttacttgcaaggagttccaactgaggattacaatacccctggagaatcgtctgaataccgagctgccacaccggctgtcgaaacagcaaacccgagaaatgatgtaggcgatgatgatgagcctccgcttaatgaagatgacgatgatgatgatgagttagatgac

SEQ ID NO: 415423 - DNA, 456 bp, Oryza sativa
  unsure (1)..(456): unsure at all n locations
atcgacattgacctgcttaaaggatcatgtggcaagtcacttgcacctttcccacaaggttgcttctattccaatgctcttggaggcttgaagtgctatgagaacccaaagaacaaggtgactgctgttcctgcaaatgaagaagagatctgtggtgcaaccttcaaggttgagagcgccactgcaatcctcacagctctgcactaggatgatgtttcggtgtccggtcgttgtacatggtggtggtgtaacatagttgcaactgatctgtatcatcttttcataaaagagaagtactgcctgcatggcaagtgcttcagtgttctgggtgtgtagtatgatctctgtacctttgttgttcaagcaggaatgaactccaggccggctgtgatcagttgaatgtagttctgttgcncancaaaaaaattctaaaatacaaataaaacaatcctaaac

SEQ ID NO: 415424 - DNA, 499 bp, Oryza sativa
gcggaatacaataatgtaaggagccagcttagtgcgatcaacagaaagcaaactggaagcttagcagttcgtgatctttccaatctggtaaaaccagaggatatggtcacatcagaacatctagtgacactccttgcagttgttcctaagtactctcaaaaggattggttgtcaagctatgagtcccttgacacatttgtggtaccgagatcgtctaaaaaactttatgaggacaatgagtatgctctctacacggtaacattgtttgctaaggttgttgacaactttaaggtccgtgcacgtgaaaaaggtttccaggttcgcgattttgagtatagttctgaagcacaggaaagtaggaaggaagagctggaaaagctaatgcaagaccaggaagcaatgagggcatcacttctgcaatggtgctatgccagctacagtgaggtattcagttcctggatgcacttctgtgctgtgcgtgtctttgtagagagcattc

SEQ ID NO: 415425 - DNA, 415 bp, Oryza sativa
agggaaacacacggcagtatttacacatggaagatgtttacacacaaacacacttctttgggttgtcgctagcccttgataggagccagcaggctagctgacacgtaccggtctctggtagtactaacagagacagcaagctactaggaacagagtaacaagataagatagcaacatactagataattaattacgtattagataaccacaaggaccagcaaacatggcgtgacagagagatcgaccagcctccgatcaatgggattattcagttcagcgatggctgctcctggtctcgtcgctgtacagccagtcgtagaccgtgggggagttgggctgggggcggtcgaagaggttggcgccgaggctcttggtggcgaggttgctcccccggtggaacacgcttcttcacacg

SEQ ID NO: 415426 - DNA, 453 bp, Oryza sativa
agatcagttagtttgttgagtggaagcagatcaggaagatgctggagaagctgtgggacgacgtggtggccggtcctcgaccggagaccggcctcgagaagctccgcaaggccgctacaacccgcccccttgtcatcaacaaagatggcgacggcgaggcgagcggagtggcgtacaagcggacgcagtcgatgccgacgaccccgacgacgccggtgacgccgtcgtcttcgtccccgacgacggcgacgacgacgacgccgcggggcagcaacgtgtggaggagcgtgttccacccggggagcaacctcgccaccaagagcctcggcgccaacctcttcgaccgtccccagcccaactcccccaccgtctacgactggctgtacagcgacgagaccaggagcagccatcgctgaactgaataatcccattgatcggaggctggtcgatctc

SEQ ID NO: 415427 - DNA, 456 bp, Oryza sativa
cgccgatagcagcagcagcagcaatggccgccctcgccgccgcatccaccgtcttcgccgccaagccgcgcctggcgcgcgcgccgtcgtccccggccgcgcggttctccgtgtcgtgctccgcgtcgggcaacaacggcggcgccggcgagatggcgcagtcgctggcggcgtcggccaagacgttctccgcggcgctggcgctgtcctcggtgctgctctcctcggcggcgacgtggccgccccccgccgtcgtcgacatcgccgggctgacgccgtgcaaggagtccaaggcgcttcgcgaagcggtagaagcagtccatcaagaagctgccgtcgtagctcatgaagtacgcgccggactccgtgccggcgctcgccatcaacgccaccatcgagaagacgaagcgcctgttcgagaactacggcgagttcggcctgctctgcggcgccgac

SEQ ID NO: 415428 - DNA, 508 bp, Oryza sativa
ttttgttttaatagaaaaacggatggtatatagatctaacaacattattcagttgaagttccacattaaatttcacaaccctcttcagccaaaattatgataggaacgatcttcggagtacactggtaaaagcaaaaacagacagaaaattatggttcatataagataggaaaattgctaagacgaaaggaggcgcagccgacatgagtaaattgttcatcttgatgcgaagctaataggcgaaggagggttcgctgggcctgaagctcctgtaaatggaggctgcaactgggataagacccaacagcgcgatctggacctgctccgaggtgcttgtcctgacagtgatctggccacttagtttgttattcaatccaagacgaaccaccatcttcgagccccttccaatcgagaactgggactgcaaattcgcaccgagagcaaggtctcggcgccacttcatcaaagaaagacccaggttgacagggactggccaatcggataatct

SEQ ID NO: 415429 - DNA, 208 bp, Oryza sativa
atgtgatccgcaggttgaaggagatgaagaagagaggtaaaactgatatggatgcttatgggtatgctaacatcgcaggagaaaatgatctggatcctcctccagagaacgtatcagttcccttacctgatatggtgctgcccccttcatttgactgtgacaatcccacataccggtaccgctttctggagccaaacttcgactgttc

SEQ ID NO: 415430 - DNA, 538 bp, Oryza sativa
gctgcaccggctgctgaagctggcggtgctggacctggggttcaacaaggtcaccacggcgagggcgctgggccagctggtggccaactaccactccctccgcgccctcaacctcgtcggcaaccccgtccaggccaacgtcggtgacgacgccctccgcagggcggtcacgggcctcctcccccacctcgcctacctcaacaagcagcccgtcaagccccgcggcgccgcccccgccgacggcgccgtgtcgcgcgccgcgctcgaggccggcggcgccgggggaggctcccgtagcgcgcggaagcggtcgtccgctgcggcggcgtcgcggaggctggggcagcgcggcgaggggagcgggagcgggaggagcaggtccaaggggaggcagccgtcgagcagcttgccggcgaggaggtgaagacggcggcggcggcggcgagtgcgaggtccattttgtgttgttgcgatacattcgaatttagaatttgaagatcttttgaatctggaatttggattggagagagagagagcg

SEQ ID NO: 415431 - DNA, 574 bp, Oryza sativa
gtctgctcatcctcaccgacccaaggaccgatcaccagccaatcaaggagtctgctctgggaaacatcccgaccattgccttctgtgacaccgattccccaatgcggtatgtcgatatcggcatcccggccaacaacaaggggaggaacagcattgggtgcctgttctggctcttggctaggatggttctgcagatgaggggtactatcctccctggccacaagtgggatgttatggttgatctgtttttctacagagaccctgaggaggccaaggagcaggaggaggaagctccagcacaagactttgctgccatcactgattacaccgcacctgaacaatggtctgctgaccagtggacctctgatgtggctgctcccccagctgctactgttggtgattggggcgcagctccagctccagttgctgctgccgaaggatgggatcaagcaggagcacccgtagccactgaagccgccgtcgttccaccggttgcgcctactggatgggacccggcagctcaaccagctgctcaaggctgggattagactaggcaatcactctgagatgtctt

SEQ ID NO: 415432 - DNA, 418 bp, Oryza sativa
caattcagaaacagataataatattccagggggctcctactcaaagttttccaatgggaaacggaaaacaaaacgcatataatctgaataacatgtaaccagcagcagttaatttcagctaatgataataccagataaaggggaatgaaaagcttcagatcagagcaaagcgggcagcagcaagcataaacctaggccttttggttgtaaacctaggggaggccgcacttgccgaaataggggcaatcgaaggggttggccatgaaggggcccgccccgaaatcgttgttggggcactccttcctgagcctggggaccttgccgggggcgtcgcccaccttgaaaaactggagcacggggggcttaaccttcttgggcttgggcttgatcttttggggcttggagacgtttttttttt

SEQ ID NO: 415433 - DNA, 384 bp, Oryza sativa
gtcgccgcagccgcggaggcgacccctcccccgccgccgccaagatgcagatcttcgtgaagaccctgacggggaagaccatcacgctggaggtggagtcctcggacaccatcgacaacgtgaaggccaagatccaggacaaggaagggatccccccggaccagcagcgcctcatcttcgccggcaagcagctcgaggatggccgcaccctcgccgactacaacatccagaaggagtccaccctccacctcgtgctccgtctccgcggcggcgccaagaagcgcaagaagaagacgtacaccaagcccaagaagatcaagcacaagcacaagaaggtgaagctcgccgtgctccagttctacaaggtggacgacgccaccggca

SEQ ID NO: 415434 - DNA, 513 bp, Oryza sativa
tcgagcagaacggggttctagttccatcggcgccgcctgattctcccaagctcaagtacctgaggatatcatccttgaatagtagcaaatgtcttgtgaccaatggcgttagcacggtcttgtttgaagacacatgcgcggaggatgatattaaggatggtggtaaagttgcttcggaggagtgcactcggcagaactccggagaggctccatctgagatatgtgaagttgatcaggcctcaccagaaaaacatcctcatgagaactccgagaaggtagcagaggcgacatgtgagctttggctgcgtgtgctgagcaaggacgacgatgagtgtgtcgacgagcaacgtgaggtgatcgagcagattagattccttttgaaggatgacaacgagcttaggaaatacgcgggtgctaatggtattaccgagctactcatccactttgtgaagaaggcagtctgcagagatgatgttcagtgccaggtggttggaacaatggctctgttcaacc

SEQ ID NO: 415435 - DNA, 551 bp, Oryza sativa
ggtgattgtcgatagctcccttgagttcctcatccttgctagcgatggactttgggatgttgtaagtaacaaggaagctgttgacatggtgaggcctattcaggatcccgaacaggcagcgaagaggcttctccaggaggcgtaccaaaggggtagcgccgataacatcaccgttgttattgtccgctttttggagggaacaacgactggtggtggaccaagtagggaggccgccagcgaccaaaactcatagtttctcccaggcagcagcatggcttgttcctgtctgtcatatctgatgctcaaggtagacgattacagtggcggcaccacccaccatgctgtcaagaactgacccggcccgaatttcgtcctcgctttcatgctcctggctgaccttaggtggtgatggtggtggtaatgtaggagcagaatggcgatggggccagtgttggtacatatgatatgatcgaaggtgtattgggtcttatatattactttgcaatgagattctattgcttgtgttccatgctaggtcttttttttttttt

SEQ ID NO: 415436 - DNA, 531 bp, Oryza sativa
ggtcaccagaaaacaattacttcactttcaaaatctgcagattggtcacatttcctaacaggctccttggataagtctgctaagctatgggatacaagaactctgaccctgatcaagacatatgtcaccgagcgacctgttaatgctgatgacatttctcctcttctagaccatgtggttatcggaggtggtcaagatgcgatgaatgtgactatgacagatcgtcgagcgggaaaatttgaagcgaaattctttcacaagattttgcaagaggaaattggtggtgtaaaaggccattttggaccaattaacgcactggcatttaatcctgatggacggaggtaatattcttaatacatgtgtaatattatatgaatgctatatttatgttctaccaccgcacttatgttctcgattagctttttgtttcatattaccttgtgtgttttctgctcaatgattaagccatgttaatccatggcaatatgcgctattctgaatcatattaagatgtcatacacattatgagag

SEQ ID NO: 415437 - DNA, 526 bp, Oryza sativa
  unsure (1)..(526): unsure at all n locations
cgtgtggccgtccgccgctccgcgcctccgctctgctacctgcgcctgcgcgtcgtgctccctgcgtccatccctcgccacgccttgccgcaccaacagcgctccctgcacctccgcctccctccccaatccgtcccatctcctcgcccgccgccctcgcctgccatcctgccagcagaggtggcgccgccgttctcctgctcccgctgcattcgctcaccggtgagcatcctaatccatcccatccggcctcggcctcgtcctcgaatttcgtctcctcgcccggcgtcctcctgcatccaccgcatcatcgctcgccgttggggatcccactgacttgctgattgcaactgtcagtgtggtgattggactgcatcagttgtgggaattgaactggtcaagtctcagactaatacaatgcaaggcatttttgcatgtggttcaatttcctcggcccatggatcatgctttagaccagctngtctngcagtggatgatctgaggctgttttacaaaataaattcag

SEQ ID NO: 415438 - DNA, 505 bp, Oryza sativa
tttgtttttttttttttttttttttttttttttttttttttttttttttttaattttttttttttttcaagagggaaaacttttgcgggtcaattccaacgggggggagtaaaaggacaggcattttcccagaaacgggtgggatgagagaaacgaagccccaaaaccattttttaacagccatcagggggggccgacctcctgctcgagcttgcccacccacccccagggcccggggaccacctccctggccggcccctgcagcggggggaccccggggggcggggccccctgcagcgagcccagcagtttgggctaccccttggcgcgggtgggcattgtcttgggcgccttgaaatccccgggggcgtaaaacttgcccttgaacaccgtgcccacaaagacggtgggctcctcgaggggctcctccttttggaaggcccgggagggcttgagcgccgcggggacctccttggtgtgggcgaacagccccccttcatcccct

SEQ ID NO: 415439 - DNA, 526 bp, Oryza sativa
  unsure (1)..(526): unsure at all n locations
gctcccggcctccgaagatggagacctcctccttcctccgcaccaccctccccaccgcgaagcccctcccggcgttccagaccctcgcaccccgcccccgcccccgcccgctccgccgctccaccatcagcgcggccatcacccgaggccgcaaggaggacacggtggccgccgtccgcgagcagctggagggctgctacctcctcgccgggatccgctacgagggcctcacggtgaagcagctgcagggcatccgcgacaccctcccggagacctgccggctgctggtggcgaagaacacgctggtggggaaggccatcgagggcacgccgtgggaggcgctcaagccgtgcatgaaggggatgaacgcgtggctgttcgtccacaccgtggaggtccccgccgcgctcaagccctaccgtgccttccagaaggaggagcgcctcgaggagaccaacgacttcgtcggcgcggtgttcgagggcatgttctacgcccncggngacctcaaggcgctcgagacaat

SEQ ID NO: 415440 - DNA, 545 bp, Oryza sativa
gctgattctcagtatcaaattgtgacgacagcagaactgcagccatctgcagaagatatctctgaagagaaacagaccatggagctgattacacagtttgagaagccaacattagcttcagaaaatgccatgacaaaaggatttgatgttgtgaccgactgttctgatcaccactttgtcaaagaaattggtcacgaaaatgtcaaaagaggttgggtgaagaagatacaacaggaatggtcaatcttacaaaacgatctgccagatggtattcatgttagagtttatgaagaaaggatggacctcctgagggcatgccttgtaggtgcagctggaacaccttatcatgacaatcttttcttctttgatattttctttcctcctgattatcctcatgagccaccttctgttcactaccattccggtggcctccgtttgaacccaaatttgtatgagtctggcaaagtgtgccttagcctgctcaaaacatgggcaggaactggtagtgaagtgtgggaccctgaaaattcaactgttcttcaact

SEQ ID NO: 415441 - DNA, 438 bp, Oryza sativa
tttgtttaaatcaaactgttgtttatcatagtaaatcttcccggagaatcagatgctcagaattcatagtgttcttcagcatcttacaacttacaagatggcgcagatatacaagcgcaactatcttaaagtaagctgtaggaggaaatggaaccatttctaacaacgggaaaaatataggttatagaaggaaaccatttgaacaaattaatagggaaataaattaggaggatcgtttccgtccgatctcaatagaactggacgtttgatacgtagatggcgtctggcatccagttgaccgggatgacgtctttggcgatgaggctcttgccggactcggtggtgacgcgaatggagaagggtgccttgagtggcctgcggtgtccatcctccagatggcgccccacgacagcttcatgggccttcacgctggcaatc

SEQ ID NO: 415442 - DNA, 518 bp, Oryza sativa
taaaaaaggaaaaaaaaacaaaacacaccaagccaaataaaagcgacaatgggatcgctcaccaccaacatcgtcctcgccgtcgccgtggtggcagcgctggtcggcggcgggtcgtgcggcccgcccaaggtgccacccggcccgaacatcacgaccaactacaacgccccgtggctccccgccagggccacctggtacggccagccctacggctccggctccaccgacaatggtggcgcgtgcgggatcaagaacgtcaacctgcctccctacaacggcatgatctcctgcggcaacgtcccaatcttcaaggacggcaggggatgcggctcatgctacgaggtgaagtgtgagcagccggcggcgtgctcgaagcagccggtgacggtgttcatcacggacatgaactacgagcccatctcggcgtaccacttcgacttctccggcaggcgttcggcgccatggcttggcccgtgaaggagaccgagctccgcatggccgcatcatcgacatgc

SEQ ID NO: 415443 - DNA, 307 bp, Oryza sativa
ttgtatctgaggccatttgtttggctgaacaggaggaaagatgcaccaacctgatcaatgggtcgtgggagagtagagctcaaaaagattgaaaatccgacaaaccgccaagttaccttctccaagaggaggatggggctgctcaagaaagcaaatgagctggccattctttgtgatgcacaaattggggcgattgtgttctgaagctctggggagatgttctagtgccccacgcccccttggaggattgcaaatatctttgatagatacctgaaagcccccagcacccgttttgaggagatggatg

SEQ ID NO: 415444 - DNA, 543 bp, Oryza sativa
gcttttctgggattggagctggcaagagttagctgaatatgaccttttagcaatgctaggctatgtgtatacagtcacacagtccaaaattctatatgtggggcattcacagggaactataatgggtttggcggctttgacgatgcccgaaatagtaaaaatgattagctctgcagcacttctttgtcctatttcttatcttgatcatgttagtgctagttttgttctcagagcagtcgccatgcatcttgatcagatgcttgttactatgggaattcaccagctgaacttccgtagcgacatgggggttcaaatagtagattctttgtgcgatggtgaacacgtggattgcaacaatttgctatctgcgattacaggtgatggttgcaaaaataaattacttggttgcttttttcctgtattggtcctaaagaaaggtattgttgttctgcatagttcacatttgggtgtgaaacattatatgcatctttcattgattgagggtacagaccaaacatgcactagtattactggactatgaaa

SEQ ID NO: 415445 - DNA, 356 bp, Oryza sativa
ttttgttttttttagcagaaggcaaaggaaatttcccgcaaatacttattcatatgttttgacaacatttctcccgacgcatgctcattgtggcagacgcagctgaccacctagagcttttagttcaccattattatttagaccaagcatacgtcccaagatcagaacacatgcttacaagcgaaaatactaatagcctggctggctgcttcacagaataaccaaacgacaacctcaacagataaaaatgccacggaatgaaaacaaagcagcgaatcgtcaccagaagtcccatcttactcatcaaacactccatcattctcctccaacgcatcctcttcccaggggagaagatt

SEQ ID NO: 415446 - DNA, 466 bp, Oryza sativa
  unsure (1)..(466): unsure at all n locations
atatgatctcccccccctcctcgctccccgccgtcgccgccgttttcttggagaggagaaatccgtaggctcagaggatttttggtagtcttgtttcgtgatattcgtgaagagggggggagctaaggggggattcgtaagatcagaattggatcacgcgggggcgcgctcgggatcgggggttccaaacacagcttcttcgttgaatttaagtggatgtactaatggagtcaaagggtggcaaaaagaagtctagcagtagtcgttccttgatgtatgaagctccccttggctacagcattgaggacgttcgacctgccggaggcgtgaagaagttccagtctgctgcttactccaactgcgcgaagaagccatcctgatagccctttcggcttctccatcctagtagnttaagatttcttgcaattccattttggcacttttcttctgacctatttctctggct

SEQ ID NO: 415447 - DNA, 595 bp, Oryza sativa
gagctttatgaagatcgccactcacctgcgccgctcctgcttcctccactccttctcggttgtcttcctctactggttttatgtgatctcataattctgggggaatcatcttctccgcgtcaatccgccattgttactagtagtagtagagctctcttgttgttgttcttcttcttcgtgttcttcttcggttgattaaataatcgtagcagcagaagaagcagctgtttgtagacaaggtgtttgtggaaatgtcgtcgtcgtcgctgtcgccggcggggtcgtcggacggggactcggcgggggtggtggtggcggcggaccaccggagggagaagcggcggctgtcgaacagggagtcggcgaggcggtcgcggctgcggaagcagcagcacctggacgagctggtgcaggaggtggcgaggctgcaagcggacaacgcgcgcgtgctggcgcgcgccagcgaaatcgccgggcagtacgcgcgcgtggagcatgagaacactgtgctccgggcgcgcgccgtcgagctcggcgacaggctgcgcagcgtcaacgaggtgctccgcgtcgtcgaggagttcagcggcgtcct

SEQ ID NO: 415448 - DNA, 570 bp, Oryza sativa
  unsure (1)..(570): unsure at all n locations
aaatacctgatatatatgactcttgcaagtatgacctccttcataactcacatctcaaacttaatggtttgagtgatctcttcagagtttctcagtcactagctgatggtgtaattccaaatgagtatggaataaatgcgaagcagaaactcaaaattggttcaaagattgcacgccgtttgttgggcaagattctgattgacctgcataacaccagacgagaggttgctgctgctggtggtgaatctaatgcatgccatgatccaacaatagtgccttcttcaaaacggaaggataggggttactatggggatgttaagaatgagggttttgatagacctaactcaaacaagaagtcaattgatcttgatgattcgcacaaagaaaccaaatactgcttggatccaaaatatgccaatgtgatggaacctgaacgacgtgttcgaacaaggctctattttacatcagaatcacatatacattctctaatgaatgtacttcgatactgcaattttgatgaatctatggactgaagagaaagtcttngtctgcaaaatgctctagatatct

SEQ ID NO: 415449 - DNA, 450 bp, Oryza sativa
ttttgttttttttttttttaggatcaaaacatttctattaccacaactttttaaggatggaattgagtagcaatactttcaccccaaaatacagtttagcgacaatatcttagaaaagccgcttgctttgccgccatggctggcaagctgagcagagcagctaacacaaagaacacgagatcactataaaccaaacggcaacgaacgaagaaaatacagggtcttttttgtctgaagatacacgaagcggttcgttttcttttatttttagtctcctctcctcctcgatgatgggtgtatggcaatggcaatggcgatgggatcttggcttagttgatgggaaggggctcgccgttccactccttgaggcagtcgagcatggggtcgatgagcttgccctggctgatgccgaggaacaccttgttgcactcctcgccgggggacttgagc

SEQ ID NO: 415450 - DNA, 547 bp, Oryza sativa
ctcgccgggagctcgttcatgagccacgccaagaaggtgaacgagatggacccgctgctgaagccgaagcaggacaggtacgcgctccgcacgtcgccgcagtggctcggcccgcagatcgaggtcatccgcgccgccaccaagtccatcgagcgcgaggtcaactccgtgaacgacaacccggtgatcgacgtccaccgcggcaaggcgctccacggcggcaacttccagggcacccccatcggtgtgtccatggacaacgcccgtctcgccatcgccaacatcggcaagctcatgttcgcgcagttctccgagctcgtgaacgagttctacaacaacgggctgacctacaacctggccggcagccgcaacccgagcttggactacgggttcaagggcaccgagatcgccatggcctcctactgctctgagctccagtaccttgccaaccccatcaccaaccatgtccagagcgcggagcagcacatccaggacgtgaactcgctgggtctcgtctcggccaggaagaccctggaggcggtggaca

SEQ ID NO: 415451 - DNA, 539 bp, Oryza sativa
ctccacctcgcgcactcagtctgtactacctgtacgtacgtggccgccgctagctaagctaggaattgaaatggggatggagaggccgcaagagaaggtggccaccaccaccaccgtcgtcttcaacctcgccgagtccggctacgccgaccgccccgacctcgacgacgacggccgcgagaagcgcacagggacgctggtgacggcgagcgcgcacataataacggcggtgatcggctccggcgtgctgtcgctggcgtgggcgatagcgcagctggggtgggtgatcgggccggccgtgctggtggcgttctcggtcataacctggttctgctccagcctcctcgccgactgctaccgatctcccgaccccgtccatggcaagcgcaactacacctacggtcaagccgtcagggccaacctaggtgtggccaagtacaggctctgctcggtggcacagtacgtcaatctcgtcggcgtcaccattggctacaccatcactacggccatcagcatgggtgcgatcaaacggtccaact

SEQ ID NO: 415452 - DNA, 532 bp, Oryza sativa
tttgagcattcctgcagagccccctctttctgtacaagatgataaattgacgcaggactggccatcagaaggagaaattatgctcaataacgtccatgtgagatatgctccacatttgccatttgttcttaagggccttactgtcacattccctggaggcatgaagaccggtatcgttggaagaaccggcagtggtaaatcaactctcatacaggcccttttccgtatcatagaccctaccgttggtcagatactcgtagacagtatcgacatctgcaccatcggacttcatgatctgagatccaggctaagcatcatcccgcaagagccaaccatgttcgagggtaccgtgagaaccaaccttgatcctattggagagtacactgatagccaaatctgggaggccttggatcgctgtcagctaggagatgaagttaggaggaaggagctgcgacttgattcaccagtgatagagaacggcgagaactggagcgtgggtcagcgtcagctggtgtgccttgggaggtgatcc

SEQ ID NO: 415453 - DNA, 431 bp, Oryza sativa
ctttgaggccttccagcttgggatggcaccagtctatatggcctttctccgtttcatgggtgatgaaaatgaggcaaggaactatagctacagccttgaggtcggcgcaaacggcaggaaaatggtatgggagggcaccccccgaagtgtccgggacagccaccggaaggtgcgggacagccatgatggcctcatcatccagaggaacatggcgctgttcttctcggggggcgaccgaaaggagctgaagctgaggatcaccggccggatctggaaggagcagcagaccccagacggtgcctgcataccaaatctctgtagctaagcaatcacaacattcagaagaaacaaagaaactcaactccactttgcggccggataacatctatcccgttgccatgtcttactggttttttgtatgctccgaggca

SEQ ID NO: 415454 - DNA, 390 bp, Oryza sativa
gcccgcaagaagaacagcctcaggttggatgattgggtgctgtgccggatttacaacatgaagggcgggctggagaagccgccggccgcggcggtggcggcggcggggatggtgagcaacggcggcggcgtcgagaggaagccgatggtgggggtgaacgcggcggtgagctccccgccggagcagaagccggtggtggcggggccggcgttcccggacctggcggcgtactacgaccggccgtcggactcgatgccgcggctgcacgccgacttgagctgctcggagcaggtgctgtcgccggagttcgcgtgcgaggtgcagagccagcccaagatcagcgagtgggagcgcaccttcgccaccgtcgggcccatcaaccccgtcgtc

SEQ ID NO: 415455 - DNA, 512 bp, Oryza sativa
attattttggaaggaattctggttttccatgattcacgtgtccgggatttgatgaacatgaagatctttgttgacacagatgctgatgtgcgattaacaaggaggattcgacgtgacaccattgagaagggtagagatatcaaaactgtgctagatcagtactcaaagtttgttaagcctgcttttgaagacttcatcctcccaaccaagaagtatgctgatattatcatcccacgaggtggcgataatgatgttgcaattgacttaatagttcagcatattcgtactaagcttggtcaacatgatctctgtaaagtacaccccaatttgtatgtcattcagactacttatcagatacgaggtatgcacacaataatacgggatgctgtcacaacaacacatgatttcatattctatgctgatcggttgattcgattggttgttgagcatggtcttggtcatcttccattcaaggaaaagcaggtcataactccaactggatcggtttacac

SEQ ID NO: 415456 - DNA, 490 bp, Oryza sativa
  unsure (1)..(490): unsure at all n locations
ctctctggatgcagcaaactttcaagcctaaaaattggcatatgcttgaggataactgatgagggccttagacacgttagcaagtcctgtccagatctccgagatatcgatttgtacaggtctggggcgatcagtgatgaaggggttactcatatagctcaaggatgcccaatgttagagtctatcaatatgtcctactgcacaaaattaacagactgttcactgagatcactttcaaaatgcataaagctgaacacattggagattcgtggctgccccatggtttcatctgctggtctctcggaaattgcaacaggatgcaggctactttctaagcttgatatcaagaaatgctttgagatcaatgacatgggaatgattttcctttcccaattctctcacaacctccggcagataaacttgtcatattgttcggtcaccgacattgggcttatatccttntcatgcatatgtggcttgcagaacatga

SEQ ID NO: 415457 - DNA, 416 bp, Oryza sativa
ggccatcttctggtccaccccaagaagattttcctggggtcgtacctgaatcccttgttcctccagacgaattccaggtatcctcagtcttatttttccaagaccctcctccaccggatccaccaccagtcatgctgtcagcaggagcaccccacggattgtttccattgttttttcctgcctggtcatctccaccagaaggttttggcgctccccagctggactgtcctttgttggcgttccagtcggaagattgggaccagtcaccacctcgatcttgaccgaacggtcttctgtcatcatttcggttccaatttttgcaaccatcctggtccctgtttcccctgccagaaccccaggttctgtcattgttgtcacccgaaccatagttattaccttgattgcgatcacctctg

SEQ ID NO: 415458 - DNA, 551 bp, Oryza sativa
gttgtctttgggctgaaacttttcggagcagatttaatggctatccctggtctttacagatttgttcaggagaccataaaaaagcaagttgcgagcatgtatttgtggccaaagacattggaagttcccataatggatccctcaaaagcttctaagaagcctgttggaattctacttgtgaaagttttaagagctcaaaacctgcgaaagaaggatctgttgggtaaatcggacccatatgtgaaacttaagatgtcagatgacaagcttccgtccaagaaaacaacagtgaagcgtagcaatctcaatccagagtggaatgaggatttcaaatttgttgtgacagaccctgaaactcaggcactggaaattaatgtctttgattgggaacaggttggcaagcatgagaaaatgggcatgaacaacattctgttgaaagaacttcccgcagatgagactaaagtcatgactgttaacttgcttaagacgatggatcctaatgatgtacaaaatgagaagtcccgtggtcagcttactctggaggtgacata

SEQ ID NO: 415459 - DNA, 447 bp, Oryza sativa
  unsure (1)..(447): unsure at all n locations
cttcttacatcagtgatcatctctaccatcatctcgttcgtcagcaaagctcatggcatcagtgttattggcgatctccccaagggattgaaccctccttcagcgaatatgctgaccttcagtggctcctacgtaggactggccttaaacacaggaattatgactggcatactatctctcactgaagggatagcactaggcaggacatttgcatccatcaacaactaccaggctgatggaaacaaggagatgatggccattggtgtcatgaacatggctggctcatgtgcctcctgctatgtcaccacaggatcgttctcgaggtcggcggtgaactacagcgcggggtgcaagacggttgtgtccaacatcgtgatggcgtccgcggtgctggtgacgctgctgttcctgatgccgctgttccactacaccnccaacgtgatcctc

SEQ ID NO: 415460 - DNA, 466 bp, Oryza sativa
gtaaatgaaagaaattaaaaagaaaatcacggcgcgtgagcttgcagagacagcaatggtgagagttgctgccgccgcggcggtgctcgtgctggcggcggcggcggcggcggcggcggccatggccgccgagccgcccaccgatgacggcgcggtccgggtggcggcggggctgacgaagtgcgtgtccgggtgcggtagcaaggtgacctcctgcttgctcggctgctacggcggcggcggcggcgccgccgccgccgtgacggcgatgccgttctgcgtcatcggctgcaccagcgacgtcttgtcctgcgccaccggctgctccacctcgctctgattaagtactaatgaaagaattaaccgcgctaattaataataaatcgcacctacgtatgccacatgtggactcgcttgactaattaaatactgccatgccaatgcgattagtggattatgaaaagag

SEQ ID NO: 415461 - DNA, 480 bp, Oryza sativa
gtcggatctaattaatttacctcctccacctcctcctcctccccccgatcggatcggcccggctcctcctcctccgccgccgccaccgccgccgcagataggagaagatggccgcacttgataccttcctctttacctcggagtctgtgaacgagggccaccctgacaagctctgcgaccaagtctcagatgctgtgcttgatgcctgcctcgccgaggaccctgacagcaaggtcgcttgtgagacctgcaccaagacaaacatggtcatggtctttggtgagatcaccaccaaggctaacgttgactatgagaagattgtcagggagacatgccgtaacatcggttttgtgtcagctgatgtcggtctcgatgctgaccactgcaaggtgcttgtgaacatcgagcagcagtcccctgacattgcacagggtgtgcacggccacttcaccaagcgctctgaggagattggtgctggtg

SEQ ID NO: 415462 - DNA, 473 bp, Oryza sativa
gtgttattccaggttatgttgtggaaggcacccttgcaaagaccattattaacgagccaagagaagtgacactggcgaatgggctcactgctcctcttcatatgcaggtccactatatttccttttctgctcatgctgatttccctcagacaagcaccttcttggatgagctccagccacccaacattgttcttgtacacggggaagcaaatgagatgtcaagacttaagcagaagcttatttctcagtttgatgggacaaatataaaagttgttaaccccaagaattgccaatcagtggagatgtatttcagttctgagaaaatggccaagacaattggcaggttggctgaaaaggtaccggaagctggagaatcagttaatggcttgcttgtaaagaagggattcacatatcaaattatggcttctgaggatctccgtgtgtacacgcagctatctacagttaacattacc

SEQ ID NO: 415463 - DNA, 427 bp, Oryza sativa
tgtcgtcgtccgccgcgcgcacgccgccgccgtcatggggaggagacctgcatggtgctatcgccagatcaagaacaagccgtaccccaagtcaaggtactgccgtggtgtccctgaccccaagatcaggatctacgatgtcgggatgaagaagaagggtgtggatgagttctcccactgtgtgcatctcgtctcttgggagaaggagaatgtcaccagtgaggctcttgaggctgcgcgtatcgcgtgcaacaagtacatgaccaagtctgcaggaaaggatgccttccacctcagggttcgggttcacccgttccatgtgctccgtatcaacaagatgctttcgtgtgccggggcagataggcttcagactggaatgaggggtgcttttgggaagccacagggaacctgtgctagggtggatatt

SEQ ID NO: 415464 - DNA, 514 bp, Oryza sativa
attcgcagttgccgcctaagagctttcgccttgccaggtttgagagctaatgctgctaattccttccttggatgtctgatgcaatgcaacaccaactgtattctctttaaattattgttttgccacttctataattaatgtttactgaatgtaagtgagctgttgatggacgcctaatgatgctaaaatttctcatagcatctgcagttactgcctaatagctttcgccctgccaggcttgagagctagtgctgttaaatccttcgttgaatgcatacccaagctcactattttgatcaacctgtgtttttaataaatataaattctaaaagttcgatgaaatgttgatttcatgtgaaacttgtctgttcgagttgtgaattcagctattgagacagtgaaaagagcagttattccacaagatccagctattgagacagtgaaaagagcagttattccacaagatcagaactagacaagaacacttccaacctgtaaaatcttattttgtact

SEQ ID NO: 415465 - DNA, 435 bp, Oryza sativa
gtgctaaattgacagataaactggagcaacagatgcatgatcccttggttttaaggtctcgttgcctgcctttatggtgcactgaactgatgtctgcatgtcccttcttgttttcttttgaggcaagatggaagtatttccagctgacagcatttggttctttgaccccacaacatgggaatatgatggatacaagtggcagtggtgtaatgacagaaagggtgccttccttctcacggaaaaagttcaaagttgatcgcgacaatatacttgtttctgctgctaaagtgatgcaatcacatgctcggagtaatgcaatgcttgaagtagaatatgaagaggaagtaggcacaggcttgggtcctacgatggaattctatacattgataagtcatgagtttcagaagtctggtttaggcatgtggagaggggagc

SEQ ID NO: 415466 - DNA, 488 bp, Oryza sativa
gtcgttcattctactccaccactccactccccaatccaaccaccccccgaacaaccggagaagagaggctgcactccactcgccgccggcgaccgatgctccgcgccgccctcctccgctcaggctccggcctccgccggcctcccatggccgcgccgctctccaccgccgccgccgcctcgtggctctccgacagcgcctcgtctccgcctagggtgcgcctcctcatcggcggggagttcgtcgagtcgcgggccgacgagcacgtcgacgtcaccaatccggcgacgcaggaggtggtgtcgcggatcccgctcaccaccgacgacgagttcagggccgccgtggacgccgtcaggaccgtcttccccgggtggcggaacacgccggtgaccacgcggcagcgcatcatgctcaagtaccaggagctcatgcgggccaacatggataaactggcagagaacaatacaaccgaacaggggaagaca

SEQ ID NO: 415467 - DNA, 429 bp, Oryza sativa
tgttttcaactatcgcctgaaggagaagatggcgatggccaataatccacatgcttcacccttcccaaagaaatttccgatgcagcccgagaggaggacagcatttcctcaatcctctcactccagctactcgaagattctccctctatttcgccccaagtttaattcaaggtcaaggccagagtcgccagcagcgtctgatgcagcatcacagactcctttccggccaactgaaagtccaaatccaaggtgaaggttccccgctgcagaggcggctccttatgttccagctgggcacttccgtatgccttgccatagcatggctcctccagtcacagtcaggacttttatccctgttttctttgcttcacctctcccacccccaggtgcgcggacacaacagcttcctcctcttatgagccacccgcc

SEQ ID NO: 415468 - DNA, 482 bp, Oryza sativa
cttttccaagattgctgagctcctgaggtatcactccaccaagagtggtgatgagttgaccagcctcaaggactacgtaacccggatgaaggagggccagagtgagatctattacatcactggtgagagcaagaaggctgttgagaactcccccttcctcgagaagctgaagaagaagggttatgaggtcctgtacatggttgatgccattgatgagtacgctgttggtcagcttaaggagtttgaaggcaagaagctcgtctctgccaccaaggaaggtctgaagcttgatgagagtgaggacgagaagaagcggcaggaggaactcaaggagaagttcgagggtctgtgcaaggtgatcaaggaggtgctcggtgacaaggtggagaaagatgttgtctctgaccgtgtggtggactctccctgctgtctagtcactggggagtatggctggactgctaacatggagaggatcatgaagg

SEQ ID NO: 415469 - DNA, 539 bp, Oryza sativa
gaagggtctcgtcgactcggacacattgcctctcaatgtatcacgagaaatgctccaacaacatagcagcctgaagaccatcaagaagaaactaatccgcaaagctcttgacatgattagaaaacttgctgaggaagatcctgatgagtacagcaacaaagataagacagatgaagaaaaaagtgcaatggaggagaaaaagggccagtatgccaagttctggaatgagtttggaaaatcagtcaagttgggcatcattgaagacgcaactaacaggaaccgtcttgcaaagcttctgagatttgaaagtaccaagtcggaaggcaaacttgcctctcttgatgagtacatttcaaggatgaagccagggcagaaggacatcttttacattaccggaagcagcaaggaacaattagagaaatcaccgttccttgagaggctaaccaaaaagaactacgaggttatctacttcactgaccctgttgacgagtacttgatgcaatacctcatggactacgaggaccagaagttccagaacg

SEQ ID NO: 415470 - DNA, 524 bp, Oryza sativa
gttggtcggtggctcaaggacaggaaggagaagaagaaagaggagacacgggcacacaatgcgcaggtccacgctgctgtttcggttgcagcagtggctgctgcagtcgcggctgtcgcagctgcgacagctgcagcctctggttctggcaaggatgaccgtgctgcccgcaccgacatggccatggcatccgcagctacgcttgtggctgcgcaatgcgtcgaggctgcagagtccatgggagctgagcgtgagcatttggaggctgtcattggctcagcggtgaacgtcaggacacctggagacattgttactgtcacggctgctgctgctaccgcattgagaggtgccgccacattgaaagcaagggctttgaaggaggtgtggaacatcgcggcagtgatccccgtagaaaagggtacaatgggaggagggcaccatcacaagcagaatatgcagaagcagcaccgcaggctggagagcaatggtagtagtattagtgatgatctttcactcgaggagga

SEQ ID NO: 415471 - DNA, 486 bp, Oryza sativa
gtcgaccacctccaaaaccagaccccgaaatctcgaggagcttgtcttttttcggtagcaatggcgttggagcagaccttcatcatgatcaagcccgacggcgtccagaggggcctcattggcgaggtcatcggccgcttcgagaagaagggattctacctcaaagccatgaagctcatcaacgtggagaagtcgttcgccgagaagcactacgccgatctgtcctccaagcccttcttcggagggctcgtggagtacatcgtctccggccccgtcgtcgccatggtctgggagggcaagcaggtcgtctccaccggccgcaagctcgtcggggccaccaaccccctggccgctgagccgggcaccatccgtggcgacttcgctgtcgacattggcaggaatgtcatccacggaagcgactcggtcgagaacgccaggaaggagattgctctgtggttccctgagggcattgccgagtggaggagc

SEQ ID NO: 415472 - DNA, 488 bp, Oryza sativa
ttttacgcgtccgcccacgcgtccgcccacgcgtccggctaattaagcaaaagaagaagaagaagaaagaagaagatgaagatgcagaccgctgctagcagtgtcgttggattgtcggccgtgttgcccgctgctgtgaaggggcgcagcctgcagattcaggctcctcgccgtgttgcgttgcgcgttcgtgcggcggcggcggcggtggcagtggaggctgcggaggtggactacagctctaacatctcggtgtttccgatggaggcgtgcgacctcatcggcggcgaggcgtgcaacgtgcagatgtacccagaggccaagctctcatcatcggctgctgttgctgttcctcgtgcggcggcggaggaagtcgacagggactacctatcctacgacgagcccaccacggtgttccccgaggaggcgtgcgaccatctgggcggagagttcatgcaggccacctgatcccattcccatccatggag

SEQ ID NO: 415473 - DNA, 482 bp, Oryza sativa
tctttttgatcatggttactgcttgccagagaagtttgaagattgtacctttgagtggctgtactggccccaggctcgtgaaccattcagtgatgaaaccattgcatacatcaaatcactagacgctgaagaggacatcaagcttctcaagttccatgggtgggagctgtctgcaagatgtgctcgtgtcctgtgcatcagcaccatgcttttaaagaaaggtgcagcacgaggcctcacaccgtatgacatcgggcgtatactgtgcagggaaactgtgaatagagactctgagattgaggacatcgtccaggaagccgagggccatgttctcccagggtcaagtgaagtaatcttcttagaaaccgtatctgaaatcatagaccgtcacctcgacaagaagttcgcttagaaacccaaaataactgatctagttgttcagctgtatcccagtagtttggtgtagtatgttgacaagccac

SEQ ID NO: 415474 - DNA, 532 bp, Oryza sativa
tttttgtgatgagggcctggatattgttgatgcaagcgaagcgatggcgaatggtggtgacggttttgatgctgaggagggtgaagcaaatgaggaggatggcgaggaaggtggttgggacctagaagatctggaacttctgcctgaagcagagaccccaaaaaatgctggcaatgcacgctcagcggtcttcgttgctcctccaccaggcatgcctgtcagcctgatttggactcagaaatcttctcttgctggggagcatgcagcagcagggaactttgacactgcaatgaggttgcttagtcgccagttgggcataaaaaactttgctcccctcaagcccctgtttcttgatctgcacatgggcagccactcatatcttcatgcacttgcaactgcccccatcataccagttgctgttgagaaaggttggagcgagtctgcaagtcctaatgtgagaggccctcctgcacttgttttcaccttcccacaaatggaagacagactcaaggctgcctattaggccaccaca

SEQ ID NO: 415475 - DNA, 411 bp, Oryza sativa
tgtttgcgatgccgatggcggcgctggcgggggtggcgatcgcgacggtgctggcggcggcggtgctggtgacggcggggttccacgtgtccggcgggcacctgaacccggcggtgacggtggcgctgctggcgcgggggcacatcacggcgttcaggtcggagctctacgacgccgcccagctgctggcttcctgcctcgcctgcattctcctgcgctacctcaccggaggcatggtaagcacccaacccgctaccgtcgataaatctttctttctatctttgcctgtcaaaattaggatccgtgaacagaggaggaaatttttcttatttgggggtggaaacatgcctacctgtcgaattgtccggggccatcaacctctaaatttgttatctgtagctttttttggga

SEQ ID NO: 415476 - DNA, 517 bp, Oryza sativa
  unsure (1)..(517): unsure at all n locations
ttttgggaaagtcggtgggtcaagtcagaatggaagaaggatgagaacatggctggtgaatggaaccacacatctgggaagtggaatggagatcctgaggacaaaggtatccaaacctctgaggactacaggttctacgctatttcagcggagtacccagaattcagcaacaaggataaaaccctggtgctgcagttctctgtaaagcatgagcaaaagcttgactgtggtggtggatatgtcaagttgcttggtggtgatgttgaccagaagaaatttggtggggacacaccgtacagcattatgtttggaccagacatctgtgggtacagcaccaagaaggtccatactatctttactaagaatgacaagaaccatttgatcaagaaggatgtcccctgcgagactgatcagctgtcccatgtgtacactttgatcatccatcctgatgctacatacaccatacttattgacanatgtgagaagcaatctggcagcatctacgagcactgggata

SEQ ID NO: 415477 - DNA, 532 bp, Oryza sativa
gtcctacttactctctccgattctctcccctccttccccgataggggagagatccagcagcggcagcagccaagctcaagctctcccaccgagatcccccgcgcgccgcgccccgtcggccgccgccgccgtcgtcgccgccatggaggcgtcttcctgggacgccctccgcaagcaggcaaggaggctagaagctcagttagatgaccaaatgagtgcttaccgtaaattgatttccatgaaatctgatggttctgagaatgatatcgagtccgatatagaaagatcgctgaagcaacttcagcaagtaaattctcaaatgcagacatgggtatcatcaggaggctcagaagtcctttctcatacattgactcgtcatatggagatattgcaagaccttacacaggaattctatcgcctccgatcaagccttagagcaaagcaacaacatgcttctcttcttgacttgagagattctgacagagcgaagtttgatgttgaagagggtgctgactctgatcaagctctgctc

SEQ ID NO: 415478 - DNA, 104 bp, Oryza sativa
gtcctccctttttttttttatgttcggaactccgctcaaagaacctatttctttcggtttttggttctcaacctggagtgtgagaagctgccgtttggatattg

SEQ ID NO: 415479 - DNA, 511 bp, Oryza sativa
gccgcgtgccgccggccttcttgcccgacgtcgaggacgccgagagccccatccacgagatcaagcgcaagggtggcgatttgagatattgtcagaaatgttcccattataagcctacccgtgctcatcattgtcgtgtctgcaagagatgtgttctaagaatggaccatcactgcatatggattaacaattgcgttggacatgaaaactacaagattttgctagtctttgtgctgcatgctgtagtagcaagcttatattcactggttctggttataggaggtgctgtgcacagcttgcctaagaatgaacaattaggcagtgattcttctagaacatcaattatcatttgcggggtatttttgtgtccactagctttggcattgcccattcttttgggttggcatgagtatctgatctttcataataaaactactattgagtaccatgaaggagttagggcaatgtggttggcagataagggtggaatactataccaccatccctatga

SEQ ID NO: 415480 - DNA, 555 bp, Oryza sativa
ttgtttatcatcagcaaccaattcgcaccgatcgatcgatcgatcgatccagcaactagatcaacagtactagctaggaagcatggcccgtgcacagttggtgttggtcgccctggtggcagctctgctcctcgccgtcccgcacgccgacgtggccatcacctgcggccaggtcaactccgtcgtcgggccctgcctgacctacgcccgcggcggcgccgggccgtcggcggcctgctgcagcggcgtgaggagcctcaaggcggcagcaagcacgaccgcagaccggcgcaccgcctgcaactgcctcaagaacgcggcccgcggcatcaaggggctcaacgccggcaacgccgtcagcattccctccaagtgcggcgtcagcgtcccctacaccatcagcgcttccatcgactgctccagggtgagctgagccatcgatcagagagacggatcatatatatacaagagtgcgccggttgccacctagtagattctgcctgggtcgatgtgtggagccgaattctgtattcagtactagtagtatcatatctg

SEQ ID NO: 415481 - DNA, 414 bp, Oryza sativa
gtcgcttctctcctcctctaatctcaagtctctgtctcgtcgtcctcgcatctccactcgccatgggcaagattaagatcggaatcaacggtttcggaaggatcgggaggctcgtggccagggtggccctccagagcgaggatgtcgagctcgtcgccgtcaacgaccccttcatcaccaccgactacatgacctacatgttcaagtacgataccgtgcacggccaatggaagcacagcgacatcaagatcaaggactccaagactctgctcttgggcgagaagccggtcaccgttttcggcatcaggaaccctgacgagattccgtgggctgaggctggtgctgagtatgtcgtggagtccaccggtgtcttcactgacaaggagaaggctgctgctcactcgaagggtggtg

SEQ ID NO: 415482 - DNA, 542 bp, Oryza sativa
ttgttttgaacaagcacaaccgtctctacatggaagctcgccccttggaggagggattggctgaggccattgatgacggtcgtattggcccacgtgatgatcccaaggtgcgctccaagatcctgtctgaggagttcggctgggacaaggatcttgcaaagaagatttggtgttttggacctgagacaactggccccaacatggtggttgatatgtgtaagggagttcagtatctgaatgaaatcaaggattccgttgtggctggtttccagtgggcatcaaaggagggtgctctggctgaggagaacatgcgtggtatctgctttgaggtgtgcgatgttgttctccatgctgatgctattcacagaggtggtggccaggtcattcccacggtcaggagggtcatctatgcttctcagctcacagcaaagcccaagcttcttgagcccgtctacctggtggagatccaggcccctgagaatgcccctggtggtatctatggtgttctgaaccgaagagaggacatgtgttcgaggagatgc

SEQ ID NO: 415483 - DNA, 461 bp, Oryza sativa
ctgaacacagcaccaccccttgtgctgcatctcccacctccctctgaattgtgggcctgaggcgatggcggcgctcgccccgtccaagatgctcggcacccggctcaacttcgccggctcctcccgttacgccaccgtggcaccgaccaccggagcgcagaagatcgtctccctcttcagcaagaagcccgccccgaagcccaagcccgccgccgtcacctcctcgagccccgacatcggcgatgagctcgccaagtggcacggccctgacaggaggatcttcttgccggagggtctcctggaccgcctcagaggcgccgggctacctcaacggagaggtccccggagactacggctacaacccttttggcctaagccagaagccagaggacttctccaagtaccaggcctatgagctgatccatgccaggtgggcgatgctcgccgccgctgggttatta

SEQ ID NO: 415484 - DNA, 491 bp, Oryza sativa
ttttcgcgcaagccgcatcccctccccacaactggaccaggatttacatggcttcaaacgctggcaagaagctcattcagatcgatgtgagctctgatacggtgtgcccatggtgctttgtcgggaaaaagaacctcgagaaagctatggagcaaaacaaggacaagtttgatttcgaggtccgctggcatccattctttttaaatccgaatgcacctaaggaaggcatcaagaaatctgattactaccggatgaagtttggccctattcagtttgagcatgcaactgctcgtatgacagagatatttagaggacttgggatggaatatgacatgtctgggttgactggaaatacaatggacagccataggctcataactcttgctgggcaccaaggttatgacaaacaaagtgctcttgttgaagaattattccaaagttacttttgccatggaaagtttattggtgatccgcaagttctgctggatgct

SEQ ID NO: 415485 - DNA, 478 bp, Oryza sativa
tttgtataaaaggatcaattacgcagatacccattttaaccatgcctaatgatgatattacacatccaactcctgatcttactggttatatcactgagggacagatctacattgacaggcaactacataatcgacagatctatccaccgattaatgtccttccttcactctcccggctcatgaagagtgctattggtgaaggcatgactcgcagggatcattctgatgtctcgaaccagctgtatgccaattacgccataggcaaggacgtacaggcgatgaaggcagtggctggagaggaagcgctgtcatcagaggacctgctgtacctcgagtttcttgacaagttcgagcggaagttcgtgacacaaggagcatatgacacacgcaacatctttcagtcgcttgaccttgcctggtcactactgcgcatactttcccgagagctgctttaccgataccaacgaaaaccttgacc

SEQ ID NO: 415486 - DNA, 513 bp, Oryza sativa
ctccactccatttctgagctcttctagtttgagtgagagagcagcagaagggagtagtgcaagatgccgatccgcaatatcgccgtggggagccaccaggaggtgtaccacccgggtgcactcaaggcggcgttggccgagttcatctccaccctcatcttcgtcttcgccggccagggctccggcatggccttcagcaagctgaccggcggcggagcgacgacccccgccgggctgatcgcggcggcggtggcccacgccttcgccctgttcgtggcggtgtccgtcggcgccaacatctccggcggccacgtgaacccggccgtgaccttcggcgccttcgtcggcggcaacatcaccctgttccgcggcctcctctactggatcgcccagctcctgggctccaccgtggcgtgcttcctcctccgcttctccaccggcgggctcgccaccggcaccttcggcctgaccggcgtctccgtgtgggaggccctggtgctggagatcgtcatg

SEQ ID NO: 415487 - DNA, 520 bp, Oryza sativa
atttctcagaggcccatttgttgtggaaaagaagcaaaccacctaagtttcccaccagatacaattttactcgctttgcaatcacattaaatgaacttaccgctggattgaaggaaaaactgccaccaacagactctagattgcgaccagatcagcgatgcctagagaatggtgagtatgaaagagcaaatgctgagaagttgaggcttgaacagagacaacgacaggcacggaagatgcaggagagcgggtggaaacctcggtggtttgcaaaagataaagctaccgacacataccgctaccttggtggttactgggaatccagagaaaagggcagctgggaaggctgtccagatatcttcggacaagttcctaacgatttgatgataactgactaggctttgagtaggttacaggtcttctggttctctgcttttattctttctgtgggatcacttgattccagattttttagcggtttatattagagcaattaaacgggtcttggcctgtaaggaga

SEQ ID NO: 415488 - DNA, 542 bp, Oryza sativa
gacaaattctccaggtatgcccactttgttcctctgtcacacccattctcagccctagatgttgcagtgtcatatatgaagaacatctacaaacttcatgggatgcctaaagtactgatctctgatagagacaaaatttttactagcaaattgtgggaatttcttttcttgaaatctggcattgccctgcaccttagttctgcttatcacccacagtccgatgggcaaactaagagggttaaccagtgtctggaaatgtttctccgttgtttcactaatgcagccccttttaagtgggttacttggttacatttagcagggtattggtataatacttgctttcattctgctttgaacaagacaccattcgaagtactctatggccataaccctcttcagttgggtgttactatggaaacttgtgcgattcccgatctggctgtttggcttcatgagaggaaactgatggcagaattgctgcaacagcatttgcaccgagtacaacaaaagatgaagtttcatgctgataagaacaggtcatt

SEQ ID NO: 415489 - DNA, 534 bp, Oryza sativa
tttttaaggcctgtagttcctaggatgcgcaaattctatgaaggtggctttcaacctacaatgactcgaagagaagctggtttaatcctaggtgtcagggaaaacgcccatcctgagaaggtaaaagaggcgcataagaaggtcatggttgctaaccatccagatgcaggcggtagccattaccttgcttcaaagatcaatgaggccaaagatattttgttagggaagacaaaaggaggggggtcagccttttgattattacaataataatgcaccatatgttctttcaatgaaatggtgaattttggtatctgtagtctgaggacttgaaaggtaggcttaaatcttgatgcgtgactagaaatttatggacagaaaatgttagcaggtctgtccactgtttgacatttcagtgcccggtcgtgttcgctcaactggttatcgaataactgatataacatggaaatgggtactacctgtacgatgtatcatatctctcaataattataaaacttctaccactctctctctctt

SEQ ID NO: 415490 - DNA, 528 bp, Oryza sativa
tttgccgccgccgccgccgccgcgccgcccaatcccaacgttctgcagctagccccacgcctccgaggcctcgtctccttcccctcctcatactcctcctcatcgccgttctccaaccgcctccgcctccgcctcccccgcgccgcctccatgtccgccgaggcgcgggtgcccgtggcgccgccggcccaccccacctacgacctcaaggccgtcatcaacctcgccctatccgaggacgccggcgaccgaggggatgtatcttgcttggcaaccataccttctgacgtgaaagctgaagccacctttattgcaaaggaggatggtgttgtcgctggaataagcctagcagatatgatatttaagcaagttgatccatcattgaaggttgaatggtttgaaagtgatggaaattatgtccataagggattgcaatttgggagagtttatggttgtgctcgcaacattattgttgctgaaagagttgtgctcaatttcatgcaaagaatgagtggaattgctacaatg

SEQ ID NO: 415491 - DNA, 446 bp, Oryza sativa
tcttgttccctcggatcttcggccatgaagctggaggtattgtggagagtgttggagagggtgtgactgatcttgcccctggtgaccatgttctccctgtgttcactggggagtgcaaggagtgtgcccactgcaagtcagcagagagcaacatgtgtgatctgctcaggatcaacactgacaggggtgtgatgattggtgatggcaaatcacgcttttccatcaacggtaagcccatttaccatttcgtcgggacttcgacctttagcgagtacactgtcatgcatgttggttgcgttgcgaagatcaacccggcagctccacttgataaagtttgcgttcttagctgtggtatttctactggtcttggtgctacaatcaatgtggcacagccacctaagggtgcaacgggggctatttttggtctaggagctgtaggccttgct

SEQ ID NO: 415492 - DNA, 541 bp, Oryza sativa
atggtatcctgacctaggtggaaagatgaacatcaatatgatgccttcactcctggaggaattcaagagcaacaaaagcaaatcttatgagctctcagaaattgctggtcatgttgttgagttcagtgctgatcaatatggaagccgattcatacagcaaaagctagaaacggccagtactgaagagaaggacatggtcttttcagaaatcatgcctcaagctctcacgttgatgaccgatgtatttggaaattatgttgttcagaagttctttgagcacggaagccctacccagataaaggaattggccgaccagcttattggacgtgttcttgctctcagtcttcagatgtatggatgccgggttatacagaaggctatagaggttgttggtttagatcagcagactaaaatggttgctgagctggatggacacgtcatgcgctgtgtacgtgatcaaaatgggaaccatgtaatacagaaatgcatagaatgcatccctcaacatgctatccagttcattgtctcaacattctatggt

SEQ ID NO: 415493 - DNA, 483 bp, Oryza sativa
aaaaagacatcatgtccttgaataatatcaatttgtgtcttgtctgaacaattcactgatttcaataggagttttcaggaaacgatgacgaattacagcaaactacaacttcacacctcactaaccacgaagatatacatccaaatatccaatacacaaggaaaccgagatgagattgctcctcaagatggctcaaaatcgggctgtaacctgggagaacaacgatttgaagtcttttgttggtgtgcctgtgccttcaggctttgaagccaaatcaaatgccttgaactttgtctcttcatactgcagggcctgaacacaaacttcagcaacatcagctcttggaattgacttcgtgtctgtctggagaagttcatcgtcattgccaacaatcaactccctcactcccccgtctttgtcttgcagaccaccaggccttattattgtataagggactccactgtctgccaaatactgttctga

SEQ ID NO: 415494 - DNA, 457 bp, Oryza sativa
tttgttttcgtactcgcctctctccgcgccctcctccgccgtcgctcgccgtcgttcgtctccgccgccaccgccgccgtcatgagggagtgcatctcgatccacatcgggcaggccggtatccaggtcgggaacgcgtgctgggagctctattgcctcgagcatggcatccagcctgatggacagatgcccggtgacaagaccgttgggggaggtgatgatgcttttaacaccttcttcagtgagactggtgctgggaagcatgtcccccgtgctgtcttcgtcgatcttgagcctaccgtgattgatgaggtgaggactggtgactaccgccagctcttccaccctgagcagctcatcagtggcaaggaggatgcagccaacaactttgcccgtggtcactacaccattggcaaggagattgctgatctgtgccttgaccgcatcaggaagcttg

SEQ ID NO: 415495 - DNA, 395 bp, Oryza sativa
tttgtgacaccgaaggcatgccgtacctgaaggcctttgtgaaggagctcctccgcaagcacccgccgacgtacttcgcgctgagccacgccgccgtggagcccgggagcaagctcgccggctacgacgtccccgtcgacgcgaacctggacatcttcctgccgaccatctccgaggaccccaagctgtgggagcggccgacggagttcgacccggacaggttcctcgccggcggtgagacggcggacatcaccgggttggcgggcgttcggatgatcccgttcagcgccgggcggcggatctgccccggggtgggcatgggcacggcgcacatcgtgctcatggtggcgcggatggtgcacgcgttcgagtggcgcgcccaccccgtgcagccg

SEQ ID NO: 415496 - DNA, 474 bp, Oryza sativa
ttttcaggtgatttgcctgaaattgttgtagctgctccacttcagccacctactttgtcatggagcctatacttgccattgttgaaagtatttgagtatttacctcgtgggagtccatctgaagcatgccttatgagaatttttgtggcaacagttgaagctatactgagaagaacttttccatcagaaacctctgaacaatccaggaaaccaagaagtcaatctaagaaccttgctgttgctgaactccgaacaatgatacattcactctttgtggagtcctgtgcttcaatggaccttgcgtccagattactatttgtagtattaactgtttgcgtcagtcatcaagctttgcctgggggaagtaaaaggccaactggtagtgataatcattcctctgaggaggtcacaaatgattcgagattaaccaatggaagaaacagatgtaagaagagacaaggaccagatgctaca

SEQ ID NO: 415497 - DNA, 470 bp, Oryza sativa
tttttatagtgcagattgtcggtgatgacctccttgtcaccaacccaaccagggtggcaaaggcaatccaggagaagtcatgcaatgctcttctgctgaaggttaaccaaattggatctgtcactgagagtattgaggccgtgaagatgtcaaagcgtgctggctggggtgtgatgaccagccacaggagtggtgagactgaggataccttcattgctgatttggctgttggtttggccacgggtcagatcaagactggagcaccctgccgatcagagcgcctttgccaaatacaaccagcttcttaggattgaggaggagcttggtgcggctgctgtctacgctggtgccaagttccgcgcacccgtggagccctactaaacttgatggtgaatatcatgcggttcatgcccactgttgtgggcatgggttttgtgaagacaggatgcttatctctatccgtaattgac

SEQ ID NO: 415498 - DNA, 515 bp, Oryza sativa
cctcttcctgttccccccccccccctctcttctgtccccccggccggggaagaaattttgcccccaaaataattttctgcacggacgatcaatgaaagggcaaaatttttctgcgcctccggttgaaggaagccgtgatccatgtcggacgagactggccgcaccattccaaagttcggcgcatgggacgtcaacaacccggcctctgccgacggtttcacggtgatcttcatcaaagccagggatgagaagaagggccccgtcaacgtggacgccagcaccaggtcaaactctgacatgaaagactccaataacaataaggcaacagagaagatcaacccctaccaccgcaggacaaactccgcatcaaagaagtggttttgctgtgtgtcgcccagccccacccaaccttgaggaagcataggaataccaaatataacatgatgctgctactgccgccttgtaatgcatatagtaatgattatacacacccagttgaaaatggccggtgttat

SEQ ID NO: 415499 - DNA, 450 bp, Oryza sativa
gaggccctccgtcccatccgcgaggacgaggtcaccgccatggtcgagtccggccaccgcgccgtcacccagccaggtagtgaacataaaccaatcgtagtgaggaatcaccttgctatggcggccttcaacaatataacaaggctagctttcggcaagaggttcatgaatgctaatggtgacattgatgaacaagggcgtgagtttaagactattgtcaacaatggaatcaagatcggtgcatctctttctgttgctgagtacatttggtatttgaggtggttgtgttcacttaacgaggagctatacaagacccacaacgagagaagggatcggctgaccaagaagatcatagatgagcatgctaaggccctcaggtgagtggtgccaagcatcactttgcggatgctctgtttactctcagagaacagtatgaccttagtgacgaca

SEQ ID NO: 415500 - DNA, 449 bp, Oryza sativa
aaatcctgtgagaaggcgcttgatgcatccaaggaattatcaaagaaatgaacaatggaaaataatctgcttgaccagacggttcaaaggcttgaaagagcaaaatgtgtatagaaaagttatatggaaagagtttatgaggatgaatgctgcacgctgaaatctcgtattgctgtattggagtaaaaactggaaagcagaacacgttccctgaatgttactgaatcgactcttgccttaagaaatgctgaggtggatacattgcacaacaacctcaaagaacttgactagttacgagagttcaaagcggatgtggacagagaaaaccaacagactgctgagattcttaaaaggcaaggcgcacaattgattgagcttgaaaatctgtatacgcaagagcaggttctgcggaagcgttattatgacacaattgtagatcttgagggaaa

SEQ ID NO: 415501 - DNA, 547 bp, Oryza sativa
tttttggaaagctcagggcccaaagagccaagtccatgaagttcaaggatggttacatgatctcatctggtcagccagtcaatgagtacattgactcggctgtgagacacgtgctcctgagacagggtgttcttggcatcaaggtgaagatcatgctcgactgggaccccaagggcaaggttggcccgaccacccctctgccggatcttgtaaccatccatgctcccaaggaggaggaggagctgcgccctccggtgttgatcgctgaggcttaagcttatgatgatatttcacatctttttgaagccttgggcatgtttgacagtaccctcttaaaactccagtttggccagttctagctaggtctctgtcttcagtaagggcaatgcaacagtcggttactttagttttattatggacaaaagctatgtactggggtaattttatttttctctaaacttaagtttgccgagacaaaagtttcagtcattatgatgccaaaatcttggtttgtagcctcaaatgcattccatcttgtttggagcgc

SEQ ID NO: 415502 - DNA, 368 bp, Oryza sativa
ttgtttggtgatccactcccggtgggcgatgctgggcgcgctcggctgcgtcttgccggagctcctcgcccggaacggcgtatagtatgggcaggccgtgtgggctaaggaggtctcgcagatcttcagcgagggcgggctcgactacctcggccacccgagcctgatccacgcgcagagcatcctcgccatctgggcggtgcaagtggtgctcatgggcgccgtcaaggggttccgcatcgtcggcgggccgttcggtgaggtcgacgacccggtctaccccggcggcgccttcgacccggtcgggctcgacgatgaccccgaggcgttcgcggagctcaaggtgaaggagatcaagaacgggcgtc

SEQ ID NO: 415503 - DNA, 542 bp, Oryza sativa
tgtttcctcctgcgcctccgccgccgccgtcttcttcgtctgctgagttcgtagatcagctcgagctcgccgccatgtcgtccagcgaggtcgcctgcacgctcgccgccctcatcctccacgacgatggcatccccatcacctctgagaagatcgccaccctggtgaaggcggccaacatcaaggtcgaggcctactggcccggtctcttcgccaagctcctcgagcaccgcagcgtcgatgacctcatcctctccgtcggatctggtggtggtgctgctccagttgctgctgctgctgcccctgctgctggcggtggcgctgctgctgccccagctgccgaggagaagaaggaggaggcgaaggaggagagcgacgatgacatgggtttcagcttgttcgactaagcagtccacagatgttagccagtccgcctatgctttgcaagactatcttatgatgtgtcttttaggttcacttaaagtactctcaagtttgagttttgatatggtgttatccagaattcttgtctgtgggatgag

SEQ ID NO: 415504 - DNA, 489 bp, Oryza sativa
gcttggaggtttgggtgagatcggagcagcgaagcggaggcagccgcagccatggcgttggccgctcgcctcgtctcccgctcccggcagctatactctgctcaagctgccttggcaaatggaggcgccactcaagtccgcttgtatgccaaggaggcagatcgtactcccgtcaatggtgatgacctattgaagggcatattttttgaggtaaagaagaaatttgagactgcccttggtgtacttaagaaggaaaagatcactattgatccagatgatcctgcagcagtttctcgttatgcccaagtcatgaagactgcaagacaaaaggcagatcttctatccgactctgagaggattaaatataccatcgacacctttacaaagggcattcctgatgcacggacttacttgaatactcttcaggagatcaggataaagagtggccttatagatgatatgggtgctgaggctatgatgatggaaccc

SEQ ID NO: 415505 - DNA, 497 bp, Oryza sativa
  unsure (1)..(497): unsure at all n locations
tatanttctttgcttctcatgttcttaggaggagcttatgagggtgcagttagaaacaacaacacaattaaatcagctgaaagaggttcatggagcttggttgccaccttggttagtgacacacacagctcgtgctaaggaaatgatgttaagtcactggaatgaacatgggaaacctgctgttaacagtttattgcagaaggcatcagagaaatcagttcaggcaaagaaatgggccgagccacatgtagaagctgccaagacgaaatggatacctgttatcaaggaaaaatgggttaccatgaagacaaacgcagagccttatgtgcaaaaggtctcagcaaaatctatagagctttatcaagcatctaaggatgttgtcttacctcatgttgtgaaagcacataagaatgttgattccttctttcaggaagccaagaaagtttccaatccttacattgatcaagttgctaaggccactaagccacatgtcgaga

SEQ ID NO: 415506 - DNA, 533 bp, Oryza sativa
atcaattcgcagtacatcccggccaaggccttcaaatcacgcaaggtttattacactaacgaggaaaacggattgcttcatgtcccgaaagaggaagcacagaaagctcaggctgccatgttttcagatccaaacatggccatggacatgatgaagaagaacctctctatgatagttcctcagacacttacatttgcatgggtgaacttcttcttttcgggttttgttgcagctaagattccctttccattgactccgcgattcaggggaatgctgcaaaacgggatagacctgagtactgttgatgtgagctatgttagcagccgttcatggtactttctcaatttgtttggtttgaggggtcttttcagtctgatcctcggtgaagaaaatgctaatgatgatgcacataagatgatgcagatgggtggcggatttggcggtaatcccacaatgggtttggtcgcagagaaagacaacctggatataatccagcatgactgggctttaccaaagatggagcattatgctga

SEQ ID NO: 415507 - DNA, 408 bp, Oryza sativa
tgtttcgcctcgcctcgcagtgtggaagaaaggaaggaaggctaaaaccctagcgagcgcgcgagcgagcgagggctctctgcttccttgcgatgacggcgccggcggacaaggggaagaaggccaagaccgacgccgacggcggcgccgccgaggagaacgagcagatcgacggcgccctcgtcctctccatcgagaagctccaggagatccaggacgagctcgagaaggtcaatgaggaagctagtgacaaggttttggaggtcgagcagaaatacagtgagattcgcagacctgtctatctccgaaggagtgacattatccaaacaatccccgacttctggctgacagcgtttctgagtcatcctctacttagtgagcttttgaccgaagaggatcaaaagatgt

SEQ ID NO: 415508 - DNA, 501 bp, Oryza sativa
  unsure (1)..(501): unsure at all n locations
tttttaaatattatgatgcagtcatgccatatctcaagtctatactcatgaatgcagctgacaaatcaaatagaatgttgcgggccaaatcgatggaatgcattagcttagttgggatggctgttggaaagcaaaaatttaaggatgatgctaagcaggtgatggaagttatgatgacattgcaaggatctcagatggaggctgatgaccctataacaagttacatgctgcaagcatgggcgagattgtgtaaatgccttggtcaggacttcttaccatacatgaatgttgntatgcctcctctgctccagtctgctcagcttaaaccagatgtgagtgtcacatctgctgggccagaagatgaaaatggtgaatctgatgatgagggtgttgagactattacgctaggagacaagagaattggcatccgaaccagtctgctggaggaaaagcaacggcatgtaatatgctatgttgttatgctgaaaagctcaaggaagg

SEQ ID NO: 415509 - DNA, 532 bp, Oryza sativa
tgtacaaatcccaagcttctgctcttgaggctcatgcagtccctaactgcaaggttctggtagttgccaatccagcaaacaccaacgctctcatcttaaaagaattcgctccatccatccctgagaagaacattacttgcctcacccgtcttgaccacaacagggcacttggccagatctctgaaaaacttaatgtccaagttactgatgtgaagaatgcgatcatctggggcaaccactcatccacccagtaccctgatgttaaccacgccactgtgaagactcccagtggagagaagcctgtcagggaactcgttgctgatgatgagtggttaaatacggaattcatctctaccgtccagcagcgtggtgctcgccatcatcaaggcgaggaagcaatccagtgccctatctgctgccagctctgcatgcgatcacattcgtgactgggttcttggcacttctgaaggaacatttgcctccctgggtgtgtactctgatggttcgtatggtgtgcctgctggtctgatct

SEQ ID NO: 415510 - DNA, 434 bp, Oryza sativa
tacctccttcctcctcatcctccccaaccactgcatccgggtcggcgtcctcctcctcctcctccttctcgcagaatgcaacgggcaattcacgctatcgggtcacatggcagtctcctcaagtctgctgttctgcgacacatcagtgctccaaaaccatctattttacctgctgtatattcacgctccatgtcagtttcatctgctcaaatagaggagagtggatttgagactgccactgtggcagatattttgaagtctaaggggaagagtgctgatggatctcggctctggtgcactactgatgactttgcctatgatgctgccaaatctatgacgcaacacaatgttggagctctggtggttggctaacctggacaggataaataaaatgctgggattgccactgagagagactaccttaggaaaatcat

SEQ ID NO: 415511 - DNA, 419 bp, Oryza sativa
gataaatatcgagtcgccggattggtagccgccctgctcgtgctgcattcgctagccacgccgtccgctcaggccgaggcgcatcgcgcagggggagaaggggaggagaagatgtcgagcgacggagggccggtgcttggcggcgtccagccggtggggaacgagaacgacctccaccttgtcgacctcgcccgcttcgccgtcaccgagcacaacatgaaggccaattctctgctggagttcgagaagctcgtgagtgtgaagcagcaagttgtcgctggcactttgtactatttcacaattgaggtgaaggaaggggatgccaagaagctctatgaagcttaaggtctgggagaaaccatggatggactccaaggagctccaggaggtcaagcctgtcgatgccagggcaaatgcct

SEQ ID NO: 415512 - DNA, 340 bp, Oryza sativa
tattccttgatatcttgaaggagcagtggagtcctgcattgtctatttcaaaggtgctactctcaatttgctcgctgttgacggatccaaatcctgatgatccattggttccagagattgctcacatgtacaagactgatcgggccaagtacgagtccaccgcaaggagctggacccagaaatatgctatgggctagaatggttaacaataagaaatgtgagatatgccattgtattgccttgtattctcctgtaactctttcaacatttaagaaacagcaagaatcaaattgaactctaaaaaatagaaaaactacatgtgttaatctatactaattcg

SEQ ID NO: 415513 - DNA, 368 bp, Oryza sativa
tacatctcctccggctgtagtggagtatggaatgcttttttttcctcgtgccgaccaccaccaccgttacaatggcgggcaacgggccgatcaacaaggaggacccgctcaactggggcacggaggtgctcaagatggccgtgagccacctctacgaggtgaagagcatgttggcgcagttccgcgagccgctggttacgatccagggcgccaccctccgcgtgagccagggggccggccccaaccaggccaaggacgccgccagcatcgtctaacagcttgtcgaggaggcccgccccccgattaaggccacccgcgtgtggatcctcatctgcatcgcccacggtggcgacatctacggcgtgacc

SEQ ID NO: 415514 - DNA, 325 bp, Oryza sativa
tagtaaggactggaggggtggcagggcggccagttttaacatcattcccagcagcactggtgctgccaaagctgttggcaaggttcttcctgatttgaatggcaagcttacgggaatgtccttacgtgttcacactgtcgatgtctcagttgttgatctcacagttagaatcgagaaggctgctttatatgatgctatcaagagtgctataaagtctggatcagagggaaagctcaagggaatcataggacatgttggggaagacctgaatactactgacttttgtggtgacagcacgtctagcatcttccacgccaaggctgga

SEQ ID NO: 415515 - DNA, 462 bp, Oryza sativa
ttgtcgcgtgggtggtgatttgaactccagaagaggacaggtcaatagcttcggggataaacctggtggcctgaaggttgtcgatgctttcgtgccacttgcggagatgttccagtacgtcagcacgctgagaggaatgaccaaggggcgcgcgtcttacacgatgcagctcgccaagttcgacgtcgtcccacagcacatccagaacgagctctctgcggcgaaacaggaggaagctagtactgcttaattttttttccagattttggtagatatactaaacggcgacaccggagcaggtggataataggacatccaagtgtatgtagctttgtagcgtcaagcccctcggggagatattgtttgccattgttttggacctgataatggccttgtcaagttcttttcttctttttgaagactgccttgttaaggttttcagaagagaaagcggtacctttt

SEQ ID NO: 415516 - DNA, 550 bp, Oryza sativa
ttgtgatggtgcaaagcttgtccgtgatgcctttcagcttgcaaaggagaaatccccctgcatcatttttattgatgaaattgacgcaattggaacaaagcgttttgatagtgaagttagtggtgacagagaagtgcagcgcacaatgttggagttgctgaatcagctagatggattcagtagtgacgagaggataaaggtgatagctgcaactaatcgcgcggacattcttgatcctgctttgatgaggtctggtaggctggaccgaaaaattgagttccctcatccatccgaagaagcacgagctagaattttgcaaatccattcaagaaaaatgaatgtaaaccctgatgtcaactttgaagagttggcacgatctacggacgacttcaatggtgcacaactgaaggccgtttgtgtagaagcaggcatgcttgccctacgccgagatgctacagaggtgacacacgaggatttcaatgaagggatcatacaagtgcaagccaaaaagaagtccagttaaatattacgcttaatcttccgaagagta

SEQ ID NO: 415517 - DNA, 496 bp, Oryza sativa
  unsure (1)..(496): unsure at all n locations
ttaattcctagggttcagcagcttctgcaggattgcttcaatgggaaggaactctgcaagagcattaaccctgatgaagctgtggcatacggtgctgccgtccaggctgctatccttagtggagaggggaacgagaaggtgcaggatcttcttctccttgatgtgactccactgtctcttggtctcgagacagcgggaggtgtgatgacagtgctcatcccaaggaacaccaccattcctaccaagaaggagcaggtcttctccacctactccgataaccagcctggtgtgttgattcaggtctatgagggtgagaggacacggaccagggacaacaatctccttggcaaatttgagctgtctggaatccctcctgcccctaggggagtccctcagatcactgtctgctttgacattgatgccaacggtattctgaatgtgtctggcgaagacaagacaactggccagaagaaccaagataccatcacanatgaca

SEQ ID NO: 415518 - DNA, 428 bp, Oryza sativa
cttcgtttcagacatggcacaacacccacctaaagttcgagacccagtgtgttctcttgttattctccttcgttgccacgataaaagcaggccatgagtctatccctgacctatcccataagacgagccaacattcttcatcatataacccgcagcctcgggacttcccaaacgatcggctctaccgagcctaccttgtcatccagctcttcaagagcaccgtcacttccgacccaaagaacatcactgccacctgggtcggccacgacatctgcagcaacacagcctaccttggcttccactgcgggacaccagggcgtgataaaatgctcacagtcacagcattcattctcaatggctacaacttacgtgcgccgcggctgcaaggcttcatcgaccagcttcccgaccttgctcttttccatgct

SEQ ID NO: 415519 - DNA, 144 bp, Oryza sativa
ttgtttgctgctgaaacacaagtctacattcctcgacggctgtaacacactggcgggacacacacatggtgctcgaggcgatgatgatcagcatagacaactcagatgtgtacgaccgaacgagtattactgccacacgctgat

SEQ ID NO: 415520 - DNA, 415 bp, Oryza sativa
tcgttagcactctggtattctcccatggcgactgcgaccgaggaggttgccgctgcggctgctgccgccggcgaggcgccgtcgccgccgccgtcagcggtggtagaggaggtgaaggaggcggtggaggcaccgaagccggaggaggcgcctaaggctgaggagggggaggagaagaaggcggagggtgagaaggagaaggagaaggcgattaatgagaggaaaccgagggcgaggaagccccgatcggctgtgccacaccacccgccctacttcgagatgatcatggaggcgatcatggctctgtacgggaacggcaaggcgggatcgagcccgtacgcgatcgccaagtacatgggggagcatcacatgggggttctaccggtgaactaccggaaggtgctcgccgtgcagc

SEQ ID NO: 415521 - DNA, 543 bp, Oryza sativa
tcttcgacgatacacaagcagaacgacttcaagcagcccgtggagaggtacaggtcgtgggcgccggatagacaggagaggttcatccgccgcttcgccggcgagctcgcgcaccccaaggtctcccctgagctccgcgccatctgggtcaactacctctcccagtgtgatgagtcgttgggggtgaagattgcgaataggctcaacgtgaagccaagcatgtgaagaaactaaggcacaagaatgcatcatctcttgttaattaattggagtactaccaacaaataaggccagacaatgtcagatgcacgcatcttctgttgtcgttgggccatcttttgtatgcatcctattgttaattactagtacatgatatccaagtgatcatctgcaaggctacagaaattctgtaatacgataaattaaaagaaaccaaaatggagcctgcatatgtgtaacttaattaatgtactggcgtattaatgccactgctgcatgttgtaatactccatcaaagagtctattactattaagtatttaaat

SEQ ID NO: 415522 - DNA, 506 bp, Oryza sativa
gccgcgccggaaccggccgggaccgacccacgccgtttgtttgctccccaaaccaagccaaccccctcgacggccggaacacatcggggggacgcagacatggtgctcgaggcgacgatgatctgcatagacaactcagagtggatgccgaacggcgactactcgccgagctgatgccaggctcaggccgactccgccaacctcatctgtggcgccaagacctagtccaacccggagaacacggtgggcgtgatgacgatggccggaaagggcgtgcgcgagctcgacactcccaccagcgacctaggcaagatactggctcgaatgcacggacttgaaggtggagctgaagcacatctggctgcagcaatgcaggttgctcagctggctctgaagcatcgccagaataagaggcagcaacagcggattatagcttttattggaagccctgtgaaatacgacaagaaagttttgggaacaatcgggaaaaagcttgagaagaatat

SEQ ID NO: 415523 - DNA, 543 bp, Oryza sativa
  unsure (1)..(543): unsure at all n locations
ttgtgtttgagcggagaaaggtgactaaagaggatgtgaaggaacttatattccgtgaaatactggagtatcatcctcaacttcttaaggattacatgaatggaaccgaaaaaacaaacttcctatatcctagtgcccttgacaactttcggagacaatttgctaacctggaagaaaatggagggaagaatggagatgctgttccatcagacaggaaacatgtttcgctcccaaggactactacagttcattctgctccaattcctcccaaagatcatcaaaatataacttcccaagtaccccaaaggattccaggtagaacaggacgaggagcttgccctgtaataccatttgagaatttgagtgcaatgggcccatacaatcaacgaagggtggtaaggaatccagtgcttnctccagccaccaccaacctatcagcatatgcctaccaccgtaaatcggatagctcagaaagagagctccagcaggagcttgagaaagatcgcatgcggtaccagccatcagagcatttcatggatgcta

SEQ ID NO: 415524 - DNA, 527 bp, Oryza sativa
aaaaaaaaaaacacaacaaaaccaaacccgacagatcttctcttcttcctcctccctttcccatcttcgacgaggcgacccggcgcgagagaagaagagatcgatcgatcgatcaaccgatctcgccggagaaggaagaggagcaaagatgtcgtcggtgttcagcggcgatgagacggcgcccttcttcggcttcctcggcgccgcctccgccctcatcttctcatgcatgggtgcggcgtacgggacggcgaagagcggcgtcggcgtggcgtccatgggcgtgatgcgcccggagctcgtgatgaagtccatcgtgcccgtggtcatggctggtgtgctcggtatctacggcctcatcatcgccgtcatcatcagtacagggatcaaccccaaggctaagccgtactacctctttgacggctacgcgcatctgtcgtccgggctcgcctgtggcctcgccggtctcgctgccggaatgggccatcgcatcgtcggtgatgctggtgtcagggcaaatgcacagc

SEQ ID NO: 415525 - DNA, 435 bp, Oryza sativa
tgttcggggtcggggagaccagctcctccgccgagatcaaggcctccttccaccgcctcgccaaggagacccaccccgacgtcgccgccgccgccgggtccagccgcttccttcagatcctcgctgcctacgagatcctatcggattcacagagaagggctcactatgatatctacctgcgatcgcggaagcgagtttttgggaagcattctaggccatctcatcatgtatatccaaatccaagtggttcaggcattgtagtaacaagagaaagtaatgttgttgagtggctaaaatggtataggctcactattgatgacatagttacaaagaagagggttgcgacagggtcaggttactttgataagcttggaagtgaactgtacacagcaatccatgctgcatactatggtccggatgttcggtctgtggatc

SEQ ID NO: 415526 - DNA, 478 bp, Oryza sativa
tttgtttactagaaccgacaaagtccgtgccttgcgcgaggctttctaccgccagaatcttccaaatgtgaccaacttgcttgctactgttttagtcttcctcatagttatctacttccaaggcttccgtgttgtgctaccagtgagatccaagaatgcccgcggtcaacaaggctcatacccaattaagctgttctacacttcaaacatgcccatcattctgcattctgcactgattaccaacctctatttcatatcccagcttctctacaggaggtacagtggaaatttcctagtcaaccttattgggaaatggaaggaatctgagtactctggccattctgttcctgttggtggtcttgcttactatgtaactgctccatcaagtttagctgatgttctcgcaaatccattccatgcactgttctatgtggtcttcatgctgtcagcttgtgctctcttctcaagacatggattg

SEQ ID NO: 415527 - DNA, 574 bp, Oryza sativa
tcgttcttctggtgattggcattgcagtagctgtatatgtaggttctgtggttctacccaagaaataacaacatcgtctgctgagttactttcttgtttacagtgttcaaggaaatatcatcaagtttgtgcacctggaaccatgaaagactctgttaaagctgaatccaattcctcaactgattgtttttgcagcccaggatgtagaaagatttataaacatctgagaaaactacttggggtaaagaacgctattgaggctggattttcctggagcctggttcgctgttttcctgataaactagctgcacctcccaaagggaaagctcatttgatacattgcaattccaagacagctgttgctttctcagttatggatgagtgctttctgccacgtattgatgagagaagtgggattaatataatccacaatgtcatatataactgtgggtcagatttcaatcgtttaaattgtacgaagttctatacatttattctggagcggcgtgatgaagttatatctgcagcaactgtcaggattcatggaactgacttagcagaaatgccattcata

SEQ ID NO: 415528 - DNA, 446 bp, Oryza sativa
tcgttcttgcagagatgatgaacagctcagtgctgttcttgccaagctcatccctgttcctcacaaagcagctggtacctgcaaccaagggcagagcatcagcagcagctgctgttaggtgcagcagtgggcccaatctgtcagaagcacatgaggaggaggatggtgtagcctccttgatggggaggaggcatgcaatggcttctgctgctgctgcctgtggagtttcagtgtttggttttgcaggtgagagcatggcagtgaagcagggccttctggctgggaggatccctgggctctctgaccctgatgaaaaaggttggagaacataccgtaggccagacgacaaggtccgtggacatggagttggatggagcccaatcattccctacagcttcaagttcgtgatggctgggaagaggtcccggtgtcgattgctgatcttg

SEQ ID NO: 415529 - DNA, 450 bp, Oryza sativa
  unsure (1)..(450): unsure at all n locations
tcggcaaggcaccaaatccccccaccatggatcaccgcctcctcctcctcggcctcctcctcctctccccggcggtggccgccgcctcagtccccggcgaggaggagccgctgatccggcaggtggtcggcggcggcgacgacaacgagctggagctgaacgcggagcgccactttgacagcttcgtccagaggttcgggaagtcctaccgtgacgccgacgagcacgcgtaccggctctccgtgttcaaggccaacctccgccgcgcgcgccgccaccagctgctcgacccctccgcggagcacggcgtcaccaagttctccgacctcaccccggccgagttccgccgggcctacctcggcctccgcacgtcgcgccgcgccttcctgcgggggctcggcgggtccgaccacgaggcgcccgtnctccccaccgacgggctncccgacg

SEQ ID NO: 415530 - DNA, 534 bp, Oryza sativa
  unsure (1)..(534): unsure at all n locations
ttggttcgtagggatcagcagcaaagagcggagagcgaaactgggaagggactctgcacgagcattaacgctgacgaagctgcgggatacggtgctagcgagcgagctgctgtgcttagagtagagagcaaggagacggcgcaagcaggacgcagccgggaacgtgcacgacgaaccaaacagagaacagctagctaatcgatcggtcgccatgaccaaggacgacgccgtcccggtggccgtggcgccggcgaagcgcccgcccatcaacaagtacgccttcggctgcgctctcctcgcctccatgaactccgtcctcctcggctatgatatctcggtgatgagcggcgcgcagatattcatgaaggaggatttgaagatcaccgacacgcagatcgagatcctcgccggcgtcatcaacatctactcgctgttcggctcgctggcggcgggcatgacgtccgactggctgggccggcggtacaccatggtgctcgncgncgncatcttcttcacggggcgcgctctcatggg

SEQ ID NO: 415531 - DNA, 528 bp, Oryza sativa
ttatgatcaagcacgctggcgtcgggtcggccatcgagtacgccgtctgcgccctcaaggtcgaactcatcgtggtgattggccacagccgctgcggtggaatcaaggccctcctctcactcaaggatggagcaccagactccttccacttcgtcgaggactgggtcaggaccggtttccccgccaagaagaaggttcagaccgagcacgcctcgctgcctttcgatgaccaatgcgccatcttggagaaggaggccgtgaaccaatccctggagaacctcaagacctacccgttcgtcaaggaggggatcgccaacggcaccctcaagctcgtcggcggccactacgacttcgtctccggcaacttggacttatgggagccctaaatccgaccgtccgtccgttcagttcgtcagtttacgccaacgcttttgcataagtactacctgaggatatcgtccccgatcatcgatgtgaacgcgtggagtactactacgtacgtaccggatgggtcgatatatgtgaatg

SEQ ID NO: 415532 - DNA, 419 bp, Oryza sativa
gcatgaagcaattcttgagctcaatcagcaacaacatctatctccttcttgcttagttaagtccttcgccctcccaagaagaagaagatgtcttgctgcggcggcaactgcggctgcggcagcggctgccagtgcggcggcggctgcggcggatgcaagatgttccctgatgtggaggccacagccaccaccaagaccttcgtcctcgctgctccatccaacaaggcgagctctggaggaatggagatggcggtggagagcggcgagaacggcggctgcggctgcaacacctgcaagtgtggcaccagctgcagcggctgctcctgctgctcctgcaactgaatctatcgtcgtcgtcgcccggctgcatgaggatttatcgtatggatgctgctactgtcgatcagagctttgatcga

SEQ ID NO: 415533 - DNA, 344 bp, Oryza sativa
tcgtttcaattaaccaaagctaattaagctggctgatgctctaatccacatttagctagaatggcgccgtccaagttcacagccggcgacggcgtcctcctcgttctgctcgtcgcggccgcgggcggcggcgcaaaggcggcggcgacgacctgcgtggcgtcgctgatggagctgagcccgtgcctgccgttcttcaaggacaaggcggtgacggcggttccggaggagtgctgcgcggggctgtcgtccatcgtgaagggtgaggcggcgtgtctgtgtcacattgagaaccacactctggagcgcgccatccgcgtcgacatccacgttgaccgtgcctt

SEQ ID NO: 415534 - DNA, 568 bp, Oryza sativa
tttatcttctccaagtccaatcgacctcatttcattcgattcatcgatcgctcggcgcggcttagggtttttggcggcagcgatggcgtcggagaagcacttcaagtacgtcatcctcggcggcggcgtcgcagcgggatatgcggcacgggagttcgccaagcagggtgttaagccaggggagctcgccatcatctccaaggaggccgtggctccttatgagcgccctgctctcagcaagggatacctctttcctcagaatgctgcaagactcccaggatttcatgtgtgtgtcggcagtggaggagagaggcttttgcccgaatggtactcagagaaaggcattgagttgatcctgagcactgaaattgtcaaagctgatcttgcctccaagactttgactagtgcagttggagcaacctttacatatgagattttgatcattgcaactggctcctcagtcatcaagctatcagattttggtactcaaggagctgattccaacaacattttatatctaagggaagtagatgatgctgacaagcttgttgcagctatccaagcaaaa

SEQ ID NO: 415535 - DNA, 555 bp, Oryza sativa
  unsure (1)..(555): unsure at all n locations
tcgttagtttccactggaggaccttcagaggcagcttgaagaactggagaaggccaagactgagaagaaaaaggcaacttcaagtgcgtccagcggcggtagcagtggccctgccactaagcgcatccgggcaagcaatggaggcccgatgcctcctgcgaaggcaggtcgtctcactaacaatgcttgtgtgtcttctaccccagctgccaccacctttgtccgctccccctcgcacacatcgtacgccatggcctccccctacccttacgataggccggttggtcatggcctctactgcaaccaaagcccaccggcgatcagggagccatatgtctacccagccaaggaggtaactaattttgcgccaggtttgccgtactcttcccctcccataagctatccccacgcctatggcgggtacaacaatggaatgggagcttacaacaatggaatggcacctgccttccaccaggcttactaccggtaggatcagtcaggaaagtcgctgatgaatgacatgacanataactgatgatgtcgacgacaactcaa

SEQ ID NO: 415536 - DNA, 530 bp, Oryza sativa
tggacgcgtggggcggcgacgccggcgagcccgcgactgcgaccttcgcctcgacgaccgctcatcgtcgcgcttcaactagccggggaaggcaaggcggagcagcggcggcggcaagaagaccgcagcaaggcggtagatatggcgacggctggggccagcagctttgaggacgagatcatggagtctgacattgagttggaaggtgaagctgttgagccagataatgaccctcctcagaagatgggagatccatctgttgaagtctccgatgagaagcgtgaccaggcgcagctgtgcaaaaacaaaggcgtcgatgcattttcagaagatgcagcattaaagattaatccagattctgctaaaggatataaatcacgagggatggcaaaagctatgcttgggaaatgggaagaggctgctcaggaccttcgcatggcagcaaaattggattatgatgaagagattggagcagaacttaagaggggtgaacccatgtactcaaaatgaggagcacaaggaaaaatatg

SEQ ID NO: 415537 - DNA, 571 bp, Oryza sativa
tattcttattgacgatcttggcctacaaggcaaacagcagtatcctaactcacaacacaagcgttacattgtcaaagatggagcaccaacactgattccctcagatcccattgcgctcatgaaaagcactgttctttctacaaaatcaaagctcaagctatttctggaaccatttctctatgagaaatctagcagaaggacctcgggaaaagtgtctgatgaacatttaagtgagagtgttgcaagtttctttgaacgccactttggaaaagaggttgttgattatcttattgatccatttgtggctggaacaagcggaggagatcctgagtcattatcaattcgtcatgcatttccagcattatggaatttggagaataagtaagtttgtagtagtttgtttggagaataagtatggctctgtcattgctggtgccatcttgtccaaactatccactaagggtgattcagtgaagacaggaggtgcttcgccagggaaaggaaggaataaacgtgtgtcattttcatttcatgggtgaatgcagtcactaatagatgcacttcacaatga

SEQ ID NO: 415538 - DNA, 533 bp, Oryza sativa
ctcgagcaaagaaggagagagcttggtgagctgcagagatggccccctccgtgatggcgtcgtcggccaccaccgtcgctcccttccaggggctcaagtccaccgccggcatgcccgtcgcccgccgctccggcaactccagcttcggcaacgtcagcaatggcggcaggatcaggtgcatgcaggtgtggccgattgagggcatcaagaagttcgagaccctctcctacctgccaccgctcaccgtggaggacctcctgaagcagatcgagtacctgctccgttccaagtgggtgccctgcctcgagttcagcaaggtcggattcgtctaccgtgagaaccacagatcccccggatactacgatggcaggtactggaccatgtggaagctgcccatgttcgggtgcactgacgccacccaggtgctcaaggagctcgaggaggccaagaaggcgtaccctgatgcattcgtccgtatcatcggcttcgacaacgtcaggcaggtgcagctcatcagcttcatcgcctacaag

SEQ ID NO: 415539 - DNA, 457 bp, Oryza sativa
  unsure (1)..(457): unsure at all n locations
tcagcccagatccagcagatccaggcccagttcttggcccagcagcagcagcagagggccctggccggcgccttccttcggccgcgtggccagccgatgaagcagtccgggtcgccgccgcgcgcggggccgttcgcggcggtcgccggggcggcgcagtcgaagctctaccgcggagtgcggcagcgccactgggggaagtggngtggcggagatccgactcccgaagaaccggacgcggctgtggctcggcaccttcgacaccgccgaggacgccgcgctcgcctacgacaaggccgacttccgactccgcggcgacctcgcgcggctcaacttccccaccctccgccgaggaggcgcccacctcaacggtccgctccacgcctccgtcgacgccaagctcaccgccatgtgccagaccctcgacacgagatcgtgcaagaacacccccggcgag

SEQ ID NO: 415540 - DNA, 425 bp, Oryza sativa
tttgtgctcttcactctccccctgttcctgcaggggtcaggcactgcctgctacaagagtggtgtaggtgattcggctagctcagcgcgaagatgggggagatcaccaatgtcacggagtaccaggccatcgcgaagcagaagcttccgaagatgatctacgactactatgcatctggggccgaggacgagtggactctccaggagaacagggaggccttcgccaggatcctgtttcgcccacgcatactgatcgacgtatccaagattgacatggccacaacagtcctggggttcaagatttcaatgcccattatgattgctccctctgccatgcagaagatggctcacccagatggagagtatgcaactgcgcgtgctgcatcagcagcgggcactataatgacattgtcatcatgggctact

SEQ ID NO: 415541 - DNA, 465 bp, Oryza sativa
ttcgtcgatactgctatcttgtcgtgctacccaggtacaatggccggcgacgctcgaacgtatatgtaaggcagggagagactgaccgacgcagaagcgcgcaggtcgtgagggcagagactgctacaggctggcatgataggagtgccgtgagacgcgcgcactacgcggagagcatctacactctgagtacaagctctgtgctgcacactgacacacctgtggaggcctctccgtatacccgacactacatatgcttattcaccaaccgatccgtacaggtacttgctgatgtacaacttcatggagtgcgtgaggaattgcaacgaggctatggagaaggaccgggagctacgagcctacagcaagctattggtgcgggctcttatgaggatctgcgtatcgctgaatcaagattacgcctgcgtcatggactacaacccgacaatcatggcgctgcagtac

SEQ ID NO: 415542 - DNA, 542 bp, Oryza sativa
  unsure (1)..(542): unsure at all n locations
tctgtatgcttcttgttgagcaagttaaagttagcaaaggtagtccacttgtgacatgcctcttggaaggtcctgctggaagtggtaaatcggctttggctgctactgttggcattgacagtgattttgcttacgtcaaaattatatcagcagagacaatgattggtttcagtgaaagcagcaaatgtgcacagatttgcaaggtttttgaggatgcatacaaatctcagtttggcatcataattctagatgacatcgaaaggttactggaatatgttgccattggaccacgcttttcaaacataatctcacaaactctactagtccttctcaagagggttcctcctaagggcaagaacttgcttgttattggaacaacaagtgaagtaggctttctagaatccattggtatgtgcgacgtgttctccgtgacataccatgtccncaaactgaaaaaggaggatgctacaaaggtgttgcggcatctcaatgtgttcgatgaaagcgacattgatgccgctgcagaagcactggacgatatg

SEQ ID NO: 415543 - DNA, 517 bp, Oryza sativa
tcgttcgctatgaaaataggccaattgttgaacttgaggttgcggcacatgaagaactgaagataactgaactgcgtcttgcaaagctttttgcatcagagcctgttgcccccccttcttcaacagttggaggtcctactagccaatcggataaagcagcagctcctgaaattacaggtagctccaaccgaactcgccctccaatcacaacccatgttttggatgtcgctcgtggatcgccagcatcaggaattgaagttcacctagagatgtggaaggatgcatcaacacccccatcattcaacaacaaagatttcaatggatgggtgaccctgggctcatcggttacgaacaatgatggccgtagcggtcaactgatggacattgtcaacaacgtcgctcctggtttctatcgcataagtttcaacaccagcaagtatgcaccttcagggttcttcccttatgtgagcatcatatttgagataaagaagaaccagacgaccgagcatttccatgt

SEQ ID NO: 415544 - DNA, 543 bp, Oryza sativa
  unsure (1)..(543): unsure at all n locations
ttgttacacagccatcaaaaatctgctctcaggttggtctgtgtacttttgatgggaagcatggtgttagtgctggaattaagagtgtagtagatgatgaagctggggaatcgaatggtctccaaagcggtcccatgtgcaatgcctgtgagatggctgttgtatggatgcagaaccaacttgcacagaacaagactcaggatctcatcttgaactacattaatcagctctgtgacaagctcccaagtccaatgggagaatcatctgtggactgtggcagccttgcatccatgcctgagatttcattcaccattggaggcaaaaagtttgcactgaagccagaagagtatattctgaagggttggtgaaggagctgctgcccagtgcatcagtggattcacagccatggacatccctctncccgtggtcctctctggatcctgggtgacgttttcatgggtgcctaccataccgtgttcgactacggcaagatgagggttgggcttcgcgaagtcggcctaaaacgtgtgttgcacgttccta

SEQ ID NO: 415545 - DNA, 503 bp, Oryza sativa
  unsure (1)..(503): unsure at all n locations
tcgtactccaatattcaagagagagcgaaagctttggaagcgattcaacatttaaaggagacataccacaatggagtgtgtgatgttgcgattgttgatgatggaaaattgcaagcagaatcagattctggtgaattctgggttctttttggaggttttgcaccaatagggaagaaagctatatgtgacgatgatgttgttcttgaaaccacagcccccaagctttacagcatcaataatggtcaattaaagttagaagacacagttctgacaaaatcaattcttgagaacaataagtgctttttggtcgactgtgggtctgatttatttatatgngttggtcgactaacacaagtggaggagagaaaagctgcaagtgcagcagttgaggaattcattgctactcaaaataggccaaagacaacaagagtaacccgagtgattcaagggtacgagaatcatacattcaagtctaagtttgaatcatggccagtaaataatgc

SEQ ID NO: 415546 - DNA, 486 bp, Oryza sativa
  unsure (1)..(486): unsure at all n locations
tcgttctctcttcctctcgtcgccggaggccatcgacgctgcagtgaaggggggcctcgcaagtcgcgatctccggtgagcgcgcgggggaagatggctgacccagagttggaagctatcaggcagaggagaatgcaagagctaatggcacagcgtggtgcggcaaatccgcaaaacgctgggcaacaaaaggctcaagaagatgcaaagcaggaagctgaggaacggcggcagatgatgcttgctcagattttatcttctgaagctagagaaaggctctcccgcatagctttggtcaaacctgataaagcaagaggggtggaggatgttcttctgagagctgctcagtccggtggaatatctgaaaaggtgtctgaagaaaggcttatctcacttctggagcaaatcaatacccacactagncaacagacgaaagttacgattcagaggcgccggagcgtccttgacgacgatgactagctgcat

SEQ ID NO: 415547 - DNA, 542 bp, Oryza sativa
  unsure (1)..(542): unsure at all n locations
ttgtcttgaagctcaaggaagaatatggaacataatttcctgagaattgtgcatgcccaccaccaagcaagggaaacatgatcacaattctgagtattgatggaggtggggtgaagggtatcattcctgctgtcatcctctcattcctggaatctaaacttcaggagcttgatgggaaggatgctcggattgcaaactactttgatgccattgctggcacaagcacaggtggtcttattgcaggcatgctagcagctccatcactgggcaatgccaatcaaccatgctatgccaaggatattgtcccattttacctcaagcattccccccacatctttccgcacaggactggattttttggttggttcttcaacatcctgngcatcataaagatggccattgggccaaagtatgatggaaaataccttcacagactaatcattgatcttcttggcgagacgaggatgaaagaaacattgacaaatgttgtgattcccacttttgatgtgaagtgtgtgaagccaataatattcagcacattc

SEQ ID NO: 415548 - DNA, 437 bp, Oryza sativa
  unsure (1)..(437): unsure at all n locations
tcgttcggacgcggtgctcgacgcgtgcctcgcccaggaccccgacagcaaggtggcgtgcgagacgtgcaccaagaccaacatggtgatggtgttcggcgagatcaccaccaaggccaccgtcgactacgagaagatcgtccgcgacacctgccgcggcatcggcttcgtgtccgacgacgtcggcctcgacgccgaccgctgcaaggtgctcgtcaacatcgagcagcagtcgcccgacatcgcgcagggggtgcacggccacttcaccaagcgccccgaggagatcggcgccggcgaccagggccacatgttcggctacgccaccgacgagacccccgagctgatgcccctcagccacgtnctcgccaccaagctcggcgcccgcctcaccgaggtccgcaagaacggcacctgcgcctggctcaggcccgacg

SEQ ID NO: 415549 - DNA, 457 bp, Oryza sativa
ttcttacgagggagactactcccacgaagtggccaacattatcagcaatgcttcctgcacaaccaactgcctcgctccgttcgtcaagatcttggacgaagagttcggaatcgtaaagggaaccatgaccacaactcactcctacaccggcgaccagaggttgctggacgcgtcgcaccgtgacctgaggagggcccgggcggcggcgctgaacatcgtgccgacgagcaccggcgccgcgaaggccgtggcgctggtgctcccgcagctgaaggggaagctcaacggcatcgcgctgcgcgtgccgaccccgaacgtgtccgtggtggacctggtgatcaacaccgtgaagaccggcatcaccgccgacgacgtgaacgccgcgtttcgcaaggccgcggcggggccactcagcggcattctcgacgtctgcgacgtgccgctggtgtccgtcgac

SEQ ID NO: 415550 - DNA, 543 bp, Oryza sativa
  unsure (1)..(543): unsure at all n locations
tctttcagacaatttccttatcggcttaggccggaaagcgaaccaggtgtacataattgattatgggcttgctaagaaatacaaggatctccagacccataaacacattccctacagggagaacaagaatctgacaggaacggcacgttatgctagtgtgaatactcatcttggaatagagcaaagcaggagagatgatctggagtctgttggctatcttctcctatattttttaagaggaagtcttccatggcagggtcttaaagctggtacaaagaaacaaaaatatgacagaatcagtgaaaagaaaatgctcaccccagcagaggttctgtgcaaatcttatccatcagagttcacctcatatttccactactgtcgttccctgcgattcgaagataaaccagattactcttatttgaagaaactctttcgggatggtattactcgtgaaggataccaactngattacataattgactggactacaagcaaaaatcctcagatgggttctaccaataagcttattcaacaacaaagtgg

SEQ ID NO: 415551 - DNA, 546 bp, Oryza sativa
tgcagccgccgccgcagcctcctctcggctgctcccatcctctccttcgagttagcttcctccttattcaaccatgggtaaggagaagacgcacatcaacattgtggtcattggccacgtcgactccggcaagtcgaccaccacgggccatctgatctacaagcttggaggtatcgacaagcgtgtgattgagaggttcgagaaggaagccgctgagatgaacaagaggtccttcaagtacgcgtgggtgcttgataagctcaaggccgagcgtgagagaggtatcaccatcgatatcgccctgtggaagttcgagaccaccaagtactactgcacggtcattgatgcccctggtcaccgtgacttcatcaagaacatgatcacgggtacctcccaggctgactgtgccgtgctcatcattgactccaccactggtggttttgaggctggtatctccaaggatggccagacccgtgagcacgctcttcttgcttcactctggagtgaagagatgatctgctgctgaacaagatgatgcaccactcc

SEQ ID NO: 415552 - DNA, 468 bp, Oryza sativa
tcgaagatggtgaggatgagaccaaaggagtgtatgttgctaagcttgaagaacttaaaaaggtggggggtcccattgaggcaaggtacaaggaatggatggacagaggcccttccatcgaccaacttgcttactgtatcaacagtttcagagatgctgccttgtccaaagatccgaagtttgatcacattgagatggaggagaaacagaaggtgattaaccagtgttccgaagcagaagtctggctgagagagaaaatacagcagcaagatgctctgccgaagcatgctaaccctgtcctactctcttctgatttaaagaaaaaggccgaaacggttgacaggttctgcaaaccgataatgatgaagccgaaaccagctcctaagccacagacgcccccacaaacgccaccgaccgagaaccccgctggcggagcccaaacaccagagcagcaacctcagggagctg

SEQ ID NO: 415553 - DNA, 528 bp, Oryza sativa
ttacaagcgtgtgattgagaggttcgagaaggaagccgctgagatgaacaagaggtccttcaagtacgcgtgggtgcttgataagctcaaggccgagcgtgagagaggtatcaccatcgatatcgccctgtggaagttcgagaccaccaagtactactgcacggtcattgatgcccctggtcaccgtgacttcatcaagaacatgatcacgggtacctcccaggctgactgtgccgtgctcatcattgactccaccactggtggttttgaggctggtatctccaaggatggccagacccgtgagcacgctcttcttgctttcactcttggagtgaagcagatgatctgctgctgcaacaagatggatgccaccactcccaagtactccaaggcccgttacgatgaaatcgtgaaggaagtctcatcctacctgaagaaggttggctacaaccctgacaagaattccttcgttcccatctctgggtttgagggtgacaaacatgatgagaggttcaccaaccttgactg

SEQ ID NO: 415554 - DNA, 448 bp, Oryza sativa
tcgttgagcgggagaacaacaagcggagggagcggcggcgtcgcgcgatcgccgccaagatcttcgccggcctacgcgcccacggaggctacaagctccccaagcactgcgacaacaacgaggtcctcaaggccctctgcaacgaggccggctgggtcgcagagcccgacggcaccacctaccgcaagggatacaagcctcctgaacgcatggaagtgattgggtgctccgtatcaccaagcccgtgttcctcgtatcaaccaagcccgcgggcatcatacaatgcgagtcctactttctcctcattccctagcggcgcatactaccccttacttccttaccctaacaacatggccaatggtgttgatggtaatcctatcctaccatggcttaaaacactgtccaattctccatgatcaaagaaacatccacagcttcccccactatt

SEQ ID NO: 415555 - DNA, 479 bp, Oryza sativa
tcgttccgctctgcgctgccccgggagatcgaggccgcccgcgtcgccgtcgccaacggcaccgcccccgtcgccaaccggatcgtcgagagccggtcgttcccgctctaccgcttcgtccgcgaggagctcggctgcgtattcctcaccggcgagaagctcaagtcccccggcgaggagtgcaacaaggtgttcctcggcatcagccagggcaagctcatcgaccccatgctcgactgcctcaaggagtggaacggcgagccccttcccatcaactaagccaagatcccatcgccattgccattgccatacacccatcatcgaggaggagaggagactaaaaataaaagaaaacgaacccgtttgtgtatctttagacaaaaaagaccctgtattttcttcgttcgttgcccgtttgtttatagtgatctcgtgttctttgtgttagcttgtctgctcaacttggccgccatggcgga

SEQ ID NO: 415556 - DNA, 552 bp, Oryza sativa
tcgttgatcttgtgcactataatcaactctctgggaatgggctgactcaatcaactaacaccagcctcacattcggggtgtgacacgttgcatcagaagtcaagagacaattcaagcctcgaagtccagaaaagaagattcctatagaccccagtgtcatgaacttcttcaggggtatgtctgcacctgtcaaggaggccatcaagctatcggactatgagcgaacgctgaagaaagcatcttctggaaagtctaaaccagtccctcagcttggagagcaaccaaaccaggagatcgagccgttggtgaccgggaaagacatgacgatagaagaatttattattgacaccggtctaactacggatcaattgctaggagttgaaccaatagaaaaggcggaattgaaatacatgtacgaactcggtaaatcgcttgtcaagcccaagctggtgcagtccctacccacacaaatgtacaggttccatcagctgtacgtggagatgagcgccaccggtagagagatgatcggagcgaggatcagggacttggact

SEQ ID NO: 415557 - DNA, 523 bp, Oryza sativa
tcgttcgactcaagtgaagagtccgccgcctttccctcctcgccgccgctcggatggggatggcccccgccggtcgcctcctcctcatctcctgcctcctctgtgtgcccaattcatttggatttgcatttgctgtggaggaggaggaggacggcagcgggctgatgccacagctctcacccaccggctctcccaaccccttggttcccttcctcgcgcccgcccctctcgcgccattcttcaacaccacccctcctaacttgtcaggcaagtgctcattgaattttactgctgtcggtgacctcatcaccaccactgctgtcgactgctttgcgtccttcgccccgttcctcgccaatgtcatctgctgcccccagctccaggccatgctcaccatcctcattgggcagtccagcaagcagactggctcccttgctttggatcccaccgtcgctacctactgcctctccgatgttcagcagctattgttgagccagggcgctagtgatgagctccacaacat

SEQ ID NO: 415558 - DNA, 556 bp, Oryza sativa
  unsure (1)..(556): unsure at all n locations
tcgttttggcttgtggaaacactgttgtgctcaagacggctgagcaaactcctctgtctgctctatttgcttctaagctgttgcatgaggctggactcccagatggtgttgttaacgtggtatctggttttggacctactgctggtgctgctcttgctagtcacatggatgtcgataagattgcattcactggatcgaccgatactggaaaagtcgtccttgagttggctgcaaggagcaaccttaagtcagtgacactggagctaggaggcaagtctcctttcatcatcatggatgatgctgatgttgaccatgctgttgagcttgcgcattttgcactgttctttaaccagggacaatgttgctgtgctgggtctcgtacatttgtgcatgagcgtatctatgatgagttcgtggagaaggccaaggctcgtgctctcaagcgtgtggttggtgatccattcaagaatggtgttgacagggccctcagatngatgacgagcaattcaacaagatcttgcgctacatcaagtatggtgttgacagtggagcccac

SEQ ID NO: 415559 - DNA, 529 bp, Oryza sativa
gtcctaccaacaatggaggtcgccgccatggagatctctacctcattgctcctcaccaccgtggctctctccgtcatcgtgtgctacgccctggtcttctcccgcgccgggaaggcgcgtgcgccgctgccgctgccgcctggccccaggggatggccggtgctgggcaacctgccgcagctgggcgggaagacgcaccagacgctgcacgagatgaccaaggtgtacggcccgctgatccggctccggttcgggagctccgacgtggtggtcgccggctcggcgccggtggcggcgcagttcctccgcacccacgatgccaacttcagcagccggccacgcaactccggcggcgagcacatggcgtacaacggccgggacgtcgtgttcgggccgtacgggccgcggtggcgcgccatgcggaagatttgcgccgtcaacctattcttcgcgcgcgcgctcgacgacctgcgcgctttccgggagcgggaggccgtgctgatggttaggtcgctggcggaggcgagcg

SEQ ID NO: 415560 - DNA, 482 bp, Oryza sativa
  unsure (1)..(482): unsure at all n locations
tgaccaccttctccgtgtcccaggcgaccaccatggaccgccacatcggcgcctccttccagatcccggcgggctccctcaccgtcttcttcgtcggctccatcctcctcaccgtgcccatctacgaccgcctcgtcgtgcccgtggcgcggcgcgccaccggcaacccgcacgggctcaccccgctccagcgcatcggcgtcgggctggtgctgtccatcgtcgccatggtgtgcgccgcgctgacggaggtgaggcggctccgcgtggcgagggacgcgcgcgtcggcggcggcgaggccgtgcccatgaccgtgttctggctgatcccgcagttcctgttcgtcggcgccggcgaggcgttcacctacatcggccagctcgacttcttccctcgcgagtgccccaaggggatgaagacgatgagcacggngctgttcctgagcacgctctcgctggggttcttcgtcagctcggcgctc

SEQ ID NO: 415561 - DNA, 509 bp, Oryza sativa
ttccaccatccgctgtctttcgcaccccagcgcgcatgtccgtgcactcagcatgtccgtccttcgcgacatcttgaacagcggacaaataaactccagtaagctcatccaaggggaacaccggaatggcatccagagcccaacctaccagtgcttggcagcaagcatcatcaactggcaagccgatgtggagagatgcatagagtgggaagcccacagccgccgcgccaccgggctgacgctcgccttcctcaccgcggcggcgaaggagctcggctgcccactcacttgctgacaaggccacaccatgactgtcactgcaagcagctgctgtaggatcagcgagtaggaaaggatgacttgccggtcagtttcctgagatgtgatttaagactgatattagctgatgttcccaagcatgatacggggcttgctcccaagatgtgatttttactttacttttgttaatgtgctaccgctgacattagatgttcaagcatatgaaaact

SEQ ID NO: 415562 - DNA, 558 bp, Oryza sativa
  unsure (1)..(558): unsure at all n locations
gtacctaatacgctgttactatgtctgacatgagctacccatgtcaacactgacattttatttaacttttcctatgtgaagactggagcaggaaagacatacagcatggaggggccgagcatcttgcattgcaataagcagaaaactggactagtccagagagttgtagatgagctttttcaatctctacaatcatcagaaagcatggctatgtggagtgtgaaattgtcgatggtggagatatatttggaaaaagtaagggatcttcttgacttgtccaaggacaacctacaaatcaaagagagtaaaactcaagggatctacatttctggagcaacagaagtatccatccagaatagttcagatgccttggagtgcctttctgaaggaattgccaacagagctgttggagaaacacaaatgaacctggctagtagtagaagtcactgcttatacantttntcagttcaacaaggatcaacttctgatgagagggtgagaggagggaagatattctttgtgatttagctgttcagagaaggtgagaaaactgtgctg

SEQ ID NO: 415563 - DNA, 435 bp, Oryza sativa
ttccgttctgcgctgcgccgggagatcgtggacaccctttccagcatctctatcaaacaccgccctgttacaaaccgagtggttgaaaaggtgccagaaccgatctaactataccaaggttagaaggtcgcatgaagattactcaccaaagagaagcttaagctcatacgggcgcagtgccacatggatcaagtgcaaagactccaggacgagcttatccttccaacacttgcatgcttgaaccagctgcacgtgaagcgcgtttcaatacactaacacctgacaccatctcaacagccattgccgtacaaccttcatcaatgatgagaggagactccttgccgatgaggactgaccgcttctttgcaatacacacagaacctactgtatacttgctaaattcgaagacacccgtaggatcatgacacaagactg

SEQ ID NO: 415564 - DNA, 519 bp, Oryza sativa
  unsure (1)..(519): unsure at all n locations
tcggtttcttctcgtcctctccacgcccccgagatctcaggagcacaggaggaggaagccatggcgtcggagaccgagacgttcgccttccaggccgagatcaaccagctgctgtccctcatcatcaacaccttctactccaacaaggagatcttcctccgcgagctcatctccaactcctccgatgcattggataagattaggttcgagagcctcacggacaagagcaagctcgatgcgcagccggagctgttcatccacattgtccccgacaaggctaacaacaccctgtcgatcatcgacagtggtgtcggcatgaccaagtcggacctcgtcaacaacctcggtaccatcgccaggtcggggaccaaggagttcatggaggcgctcgctgctggtgctgatgtgtccatgattgggcagtttggtgtcgggttctactccgcctaccttgatgctgagagggttgntgtgaccaccaagcacaacgacgacgagcagtatgtgtgggagtcacag

SEQ ID NO: 415565 - DNA, 517 bp, Oryza sativa
  unsure (1)..(517): unsure at all n locations
tcgtgaacggatccgggcgcagggtgcgagtgcgtgaggcccaatccccaaatcccccccccccctcgccgccgccgccgcccgtctgcacgcaggcctcctcgtcgcttcacttcatcaacaatcaagatgagtcgtggtgggagtgccggtggtggccaaagttctctgggttacctttttggaggcaatgaggcccctaagccagctgctaaaccagcacctgcagctgcacctgcaccagcgccagcaccagcaccagctgcggctgtggctgctcctgctgagaaaccatcacctgcaaaggctgatgccaccaagcagattccagctgggattcagggcagccggagcaataacaactaccatagagctgatggccagaacactggaaactttcttacggatcgcccttcgaccaaggtccatgctgcccctggtggtggatcttccctgggctancctcttggtggaaactgaaggagtgatcctggtgcactgtagcaccggatgaaga

SEQ ID NO: 415566 - DNA, 525 bp, Oryza sativa
tttttctcccacccccctcaccggcgctcttcccccgcggcagcatcccggccggccgccggcgagcccttctctcgcgagccgcgctcccctggacgaggatgcgttgacagcgcctccccctccgttcttccccacggaagcgtcctcctcctcctactcctactactgggctcgtggactggtggtccccccccctccgaccaccgcctccctccccggcgacgaccatccatggagctccaccgctcttcctcctcctgccgcagtggtaaagttactcaacagtgaggatttctaaagctcaacagaactagatgatacttgcataatgcggccctcagatatttggaaggcgcatgcagggtcatcacagtcagagggatcagcactggatatggagagaaacggatgcaaccataactgttgcccatctcctctccaaccaattgcatcaggtggtcagcactctgaaagcagcgctgcatatttttcttggccaacatctactctaatgcacgggtc

SEQ ID NO: 415567 - DNA, 237 bp, Oryza sativa
ttgtcccacatgatgagcaagcctgacagagcccagagcggcccgagcgtgcacatcatcatcaggatcaagacgagaggattctacctgacggggctgaaggtcatgaacgtggttaggtcctttgcacaaaccctctatgccggccctttcgactagcccattcttcctagatgggtggagaacatcatctatggccccataaaggcaatggtactggaagggaaggatgttctt

SEQ ID NO: 415568 - DNA, 468 bp, Oryza sativa
  unsure (1)..(468): unsure at all n locations
ttaatacaaatgaagtgctttctgaggagatccaagagcgtgacgagcctgctttgaaatatctgaaagatatcaagtgggctagaattgacgatcctaagggtttcaagctggattttttctttgatacgaaccctttcttcaagaactctgtcctaacaaaaacgtaccacatggttgatgaagatgaaccaattttggagaaagcaattgggactgaaattgagtggtatcctggtaaaaacctgacacagaagattctaaaaaagaaacccaagaaaggttcaaagaatgcaaagcctattaccaaaactgaagtctgtgagagcttcttcaactttttcagtcccccgcaagtacccgatgatgatgaggacattgatgaagacactgctgatgagcttcanggtcaaatggaacatgattatgacattgggacccaccatagggataagatcatcccacatg

SEQ ID NO: 415569 - DNA, 445 bp, Oryza sativa
  unsure (1)..(445): unsure at all n locations
caaattccaaggtagtacaccaagcactatcaagcttgctattggctacagtgcatacatacacatccctagctatctacccagtacacgcatacgtacatgcacgtattgtacgtacagcttaattaattaattaattaaattagacgttgacgagcggcgagccggtgaggaactcggtgaaggcgagcgcgacgaggccgagcatggcgaaccgcccgttccagagctcggcgtcggcgctcatcacgccgccgctcctcgcctccgcggtctcgccgcggagcagcggcaccagcgacgccgcggagagcacggcggcggtggcggcgaaccacgccagcccgctccagctgccggcctggtccaggagcccgtcgncgngcgacgccttcacggncagngccgacacgaaccccaccatcgncagncgcccgtgatccgc

SEQ ID NO: 415570 - DNA, 573 bp, Oryza sativa
gtactatcggatcgggagaggacgcgacgcgaggcgggctgcgttgtgagggagagaagggatgctggcggtgttcgatcgggcggtggcgccgagccctgaggggctccggcatcccggggcggcgggggacggcgcggcggggctcgccgagaggttccgcgacgcgcgccccggcgccgtcaccgtcgccctcggccccggcggcgccaactccctcgcctactcctcccacggccagagccccctcctccccaggttgttcgcggcgacggacgagatattctgcctgttccaaggcacgatcgagaacatcgcggtgctgaagcagcagtacgggttgcacaacaagggctccaccgagatcaacatcatcatcgaggcttacaggacattgagagacaggggaccttaccctgcggatcaagtcgtcagagacatcaacggcaagttcgcgttcgtgctctacgattgctccaacaactccgtcttcatggccaccgatgctgatggtagcggtccattttattggggagttgatcctgacagccgtcttgtggtttctgatgatga

SEQ ID NO: 415571 - DNA, 488 bp, Oryza sativa
gttcgcagtcgcagcagcggtggtgtgcgagtgcgaggcgaagccgcgagcctttttcgtgtttggcgactcgctggtggacagcggcaacaacaactacctgatgacgacggcgcgggcggactcgccgccctacggcgtggactacccgacccaccgcgccacggggcgcttctccaatggcctcaacgtccccgacatcatcagcgagtacctcggcgccgaatccgtgctgccttacctcagcccgcacctggacggacccaagctgctccacggcgccaacttcgcctccgccggcgtcggcatcctcaacgacaccggcatccagtttgtaataataagctgctgctgctgctgctgctagtacttaattaattaattatatgcatgcataaaatggaactaattaataagaaatatatatatattgaatgaaattaaggccaacatcatccgcatcgagaagcagcttcggtacttcaatc

SEQ ID NO: 415572 - DNA, 496 bp, Oryza sativa
  unsure (1)..(496): unsure at all n locations
tcgttcgccgcgaactccggaaccgaacgccacacgcgccttcctctcacttaatccgccatgcttcctcctagggttgccccctcctctctggccgccgccgccgccgccgcgcctacctatctcgccgccgcggcctcgacccctgcttccgtctggctgcctgtgccgcgtggagccggagccgtggcagtgtgcagggccgccgggaaagggaaggaggtgctcagcggcgtggtcttccagccattcgaggagctcaagggggagctctccctcgtcccccaggccaaggaccagtctcttgctaggcaaaagttcgtcgacgaggtgcaggccgncatcaacgagcagatcaatgtgggagtcaatgcattcgacgcgtaccactcccttttcgcctactttgaccgtgacaacgttgctctcagggattcgccaattcttcaaagatccagcgatgaagagagggatcacgcagagaaactcatgaagt

SEQ ID NO: 415573 - DNA, 498 bp, Oryza sativa
tcgttttaatgtagcggaggcacatgctgtatgcttatcttctcaaggggtcattctggtttggaatgaatcaaagaaaagactatctacattcactgtcaatggactccctattgctaccacagttctatcacctttttgtggacgggttagttgcattgagatttctactgatggccatttcgccttaatgggaacatgttcttcaagcaattataagtgtgaggacagtactgagactggggatcatgaacctaatgaaccaaatggcaaggatggcatatctaaacaagctgaaactaggcaatctgttcatgtgccttctgtatgctttggtgatctgcataaacttaaggtatttcatacaatggagctggggaaaggccaggacgtcacagcaatcgctctaaacaaaagagacacaaatcttctactgtctactgctgataagcagctaatagtgttcactgatcctgctttgagcttgaaggtagtgga

SEQ ID NO: 415574 - DNA, 567 bp, Oryza sativa
  unsure (1)..(567): unsure at all n locations
tcgtgtgccactacttctccctagggaatgtcgggagacatgtgaggtcatgggttacgatatccccataggtactattgtgcttgttaacgtatgggcaataggtagagatcctaagtattgggaggatgctgagacattcatacctgaacgatttgaggatggccatatagacttcaaaggaacaaactttgaatttataccgtttggagctggacgaaggatgtgccctggcatggtatttgcagaagtaatcatggagctcgctctagcctcattgctttaccactttgattgggagctccctgatggcatctcgccaaccaaggtggacatgatggaggagttgggtgctacaattcgaagaaagaacgatctttaccttattcctgctgtccgtgtgcctttgtcaactgtcttatagttgtctacacttacaaatagtatgtttgtctcgtataaatagtatgtttgtctcgtatgtacgtgcctaaatgataagctatgtaacttttgatgatgtgtactcctacttcctatnctacctattataaatattatttaagt

SEQ ID NO: 415575 - DNA, 458 bp, Oryza sativa
ttgtaaatccgtaggctcagaggatttttggtagtcttgtttcgtgatattcgtgaagagggggggagctaaggggggattcgtaagatcagaattggatcacgcgggggcgcgctcgggatcgggggttccaaacacagcttcttcgttgaatttaagtggatgtactaatggagtcaaagggtggcaaaaagaagtctagcagtagtcgttccttgatgtatgaagctccccttggctacagcattgaggacgttcgacctgccggaggcgtgaagaagttccagtctgctgcttactccaactgcgcgaagaagccatcctgatagccctttcggcttctccatcctagtagtttaggatttcttgcaattccattttggcacttttcttctgacctatttctctggctgctgcttcctgataatcgaccagttctctagtcttgctccctgcac

SEQ ID NO: 415576 - DNA, 376 bp, Oryza sativa
cggatttcgtttctcccatcctctcgcgcatactcctgggacgggctctcatttgaattttgggggcggctggagatgtcggactccgaggagcaccacttcgagttgaaggccgacgccggcgcgtccaagacctacccgcagcaggctggtactattcgcaagaacggtcatattgtcatcaagaaccgcccatgcaaggttgttgaggtctccacctccaagactgggaagcatggacatgcaaaatgccactttgtggccattgacatcttcaatgggaagaagcttgaagatattgtgcccttctcccacaactgtgacgtcccccacgtgaaccctactgataatcagctgattggacatttctgaagat

SEQ ID NO: 415577 - DNA, 433 bp, Oryza sativa
cccggttccattttctggaaaacgtgttctcagatccgggggggtttggaattggccctgacgggaagtaccggtgtgaggatcccttgttcacgcaaggcacggcccaagtctgagaggctcaacgagcacgcttatcagttattatgtcatgctttttcttgtctctctctagctctaccctatcctagtttttgtcgaacccatcgtcgtgttaagcgtaatgtaagcacaacctacttcttcatttgtttcattcttagacctcccatatcaatatgctcaactgctgccccagtttttgctcagtgtgttcgatttgctcttcagtagttctattggtttcagaacagctgggcctgtaatcactcactcctatgtctggacatgcaaagatacttctggtttagagtttcagctgagttacagtgat

SEQ ID NO: 415578 - DNA, 222 bp, Oryza sativa
ccaccgcccgtttcgtgtgaagaagagaccgaccgatcgatcagggggggttttcattgaaagaagcggagcggacatctacccggtgtccagcggcgatgagacggcgcccttcttcggttccctcggcgccgcctccgccctcatcttctcatgcatgggtgcggagtaccggacggcgaatagcggcgtcggcgtggcgaccatgggcgtgatgccgcc

SEQ ID NO: 415579 - DNA, 255 bp, Oryza sativa
ttttgtttttcacgcaaaatcagagaatgaatttagcagaaaatattgtgggcaaaaacaaatgaccccattgtcacagggccagttcgatgggagagcagacgccattatagtgctggcgtgtatatgctccacaatcctagctcagaaatttatagattatttcgtttaaaaaatatttctctggatatatatgtgcatgcatgcaagcatgcagcaacacatatatagtcatatgttaaaaggtcggttatg

SEQ ID NO: 415580 - DNA, 239 bp, Oryza sativa
caatattattatattgcagcaatggcatcctcctcccggggacgggtcagtgtagaggtggcggctatagtatacgccgtctcctgcgggccacccaaggtgccaccgggccccaacatcacgacaagctaccgcgacatgtggctggaagccaaggccacctggtatggtgcgcccaagggtgctggccccaaggacaacggcggcgcctgcggctacaaggattgtcacaagggtcc

SEQ ID NO: 415581 - DNA, 547 bp, Oryza sativa
ttgaagatgtctacaagagtgctgaggctgttgagtgggttacaaaagaactagggggaaggattttgcggcagccaggtccactaccagggctcaacacaaagattgcctctttccttgaccctgatggctggaaagtggtatggctcctgtcttcgtgttccactatattttactactgttaaccatcaaatgatcggtacatcaattgtatttaagcctagagcatttggcagttcttgtttaagaaagcctggtcaaaaaggaaagcaaaccatttgcttacacacaacatagtaatttttagtgcaggcacaaaactaaaacatagtcacaaaggaccaaagtacaagggctagtgtttaggcattactgtttaccagctaggtccattcttctcggctaatccgccagattatcaccgcagattatttgcaccatgcttccaaaaattctcttcaccagcattgattgattaacctttctcaatctatttggtagggttataatggatataatatttattatactcataaacaagcatatc

SEQ ID NO: 415582 - DNA, 378 bp, Oryza sativa
ttctgtctcaggtggctcgacacatacgatgaaggaggggttcgttgctatgaaccaggaagtgatgcatctggggcaggccctctacagccagcagggtgccccaggagcaggacctaccccaggagctgatgctgccgctggctctgctggcccatccgagaagccaggaggcgaggaaggtgatgtcatcgatgctgattttacagacagccaatgagcaggagagtagctaggtccgaaattttaaggaacgtttcgcgacgaggttgaaatttgttccacaagattgtaggatctggggtgtatctttatgttagatgggcacctttgcttcctatttgaggagttctgggcggcggagtttttgagctctgg

SEQ ID NO: 415583 - DNA, 339 bp, Oryza sativa
gacagcaactcaataatctttcgatatttcaccgagggtaatgtatggtaggaaaatcgccagacataacagagccggccagactcaactcaaactcaaccctatgatggtaaactgtttgcgattaacgcctccgcctatgacaatgtttggagataaacgcttccaccaaaaaacgaatgtcggggagtgttctcccctacaagaattattattgtgttaaaatcaatggtcctacccccctctttgcggcggctgttacttttcttgccgccaaataccgggcgcctcctgcttgccgggggggggggctacgggattgcgcctggcctccttttt

SEQ ID NO: 415584 - DNA, 582 bp, Oryza sativa
gtcctttcccttgcgaaggcagagtctgggatagggaggtcggggttgtttgagaaggcgacgtcgcccacatgaagctgttcgtgaagaccctgaagggcaccaacttcgagatcgaggcgagccccgaggcgtcggtggctgaggtgaagagaatcattgagagtactcaggggcagaatgtgtacccggcggatcagcagatgctcatacaccaagggaaaattctcaaggatgatacaactttggaaggcaacaaagttgctgagaacagcttccttgttattatgctgtctaaggccaaagcatcatcaagtggagcttcaactgctttaaaggcacctgtgagccagtcttaaccagcaactccagttgcctcagttgcaagaacaccacctccacaagcacctgttgttacacctgaaccggcaccttcaagtgcacagccttcagttgcttctgccactccagctgctgctgccactccagctgctgttgtgaccgcatcaagtgatgcggatgtctacagtcaggctgcatcaaattttggttcaggtagcacctagtacagacaatccacca

SEQ ID NO: 415585 - DNA, 476 bp, Oryza sativa
caacatttcagacttcaaagagctgtaccccacgttggcggagggttatattcgctactacatatatgagctactcaaggcattagactactgccattcacaaggcattatgcatcgagatgtcaagccccacaatgttatgatagatcatgagctccgaaaacttcgattgatagactggggcctggctgagttctatcatccagggaaggaatataatgttcgtgttgcttcaaggtatttcaaggggcctgagcttcttgatgatttgcaagattatgattattctttggacatgtggagccttggttgcatgtttgctgggatgatattccgcacggagccattcttctatggtcatgataaccatgatcaacttgccaagaacgcaaaggtacttggaacagaagcactaaatgcttatttgaacaagtaccatattgagcttgaacctcaacttgaagctcttgttggga

SEQ ID NO: 415586 - DNA, 313 bp, Oryza sativa
tttggggttacaaaaatgaaacatgattaattactaggattacttaacacacggatcacagaaaatcaatccttgcatgcaggggaaatcgatggatcgacctttctccttaacttgttcttaattctcatgtacaatcaaagaaacacacacgcacacacacatgcgtgcactgcatctctctgagcaacgaactcgattgatttgattttgattcgctagggattaaagagatcgcgagggagcatcactgatagagataaacggcttggccaatataggcagccaacacttttttaccgtgattttttct

SEQ ID NO: 415587 - DNA, 231 bp, Oryza sativa
cacttttaggtttgcgatcagcggcgaggcaccatccgggccgggctgtaatggaaaacacctgctgcttcctacaccagttcacggcccgcgtcgtcgcgcgcgtcgccttcccgtgcccggggacgcgggccaacctcctcgtgtgccgcgcccagaatcatgacgacgccgccgtcctcaggcgggcggtgctggcccacctcgccggagcgaccggggtgggggggg

SEQ ID NO: 415588 - DNA, 506 bp, Oryza sativa
tgcggtatgagcgagcgagggaggaagaggaggggaggagacgaagatggccggggtggcggcgttgcagggcgcgatggcgtccctctccatctctgcgccgggggcggcgagcaccagcagcttctggggccacccgctctccaccttcgccgccgcgccggctggggttaaatttatgatcaagacatgcccaattcaaatgaggcttaagcgatgggagaggaagaagtgtaaaccaaacagtcttcctgtcctgcacaagatgcatgttaggattggcgatacagtacaagtcattgcaggccgtgagaaaggtaaagttggagaagttacgcggctttttaagcacaacagcactgtaatagtgaaggacttgaacttgaagtccaagcacaagaaaggaacagaagatgaaccgggtgaaatcgtcatgattgaaggccattcacagcttatatgtgatgctctactcaaaggaaaagaatgtggcgagtagggttgga

SEQ ID NO: 415589 - DNA, 331 bp, Oryza sativa
  unsure (1)..(331): unsure at all n locations
tgtttttgctactcaataatctttcgatatttcaccgagggtaatgtatggtaggaaaatcgccagacataacagagccggccagactcaactcaaactcaaccctatgatggtaaactgtttgcgattaacgcctccgcctatgacaatgtttggagataaacgcttccaccaaaaaacgaatgtcggggagtgttctcccctacaagaattattattgttttcaatgttaaaaaggcaaaattcaccagatcccgttagtgcaggaccaggaataaacacttgttcgtcatgacttcgaggaggtgaaggtgnctcctcatcacattgt

SEQ ID NO: 415590 - DNA, 505 bp, Oryza sativa
ttcgctctctcctctctctccctcttccgccgccgcgcgtggggatggaaggagaaagcaagccatcggcccccgcctccgcctccgaagggacattgttgctagttggtgatggctgagcaggctaatcaaccgactgtccttcagaagttcggtggccagttccaccttggctccagcttttctgaaggtgtacgggctcgcaacatctgcccatctgtctcatcctatgacaggcgctttaccacaaggagctacatgacccagggccttgtcaatggtggcatcaacgtcccaatgatgtcgtcctctccaatttttgctaatgctccagctgagaaaggtggcaaaaacttcatgattgatttcctcatgggtggagtgtcagccgcagtttcaaagactgctgctgctccgattgagcgtgtgaagctgcttatccagaaccaggatgaaatgatcaaggctggtaggctctcagagccatacaagggtattggggact

SEQ ID NO: 415591 - DNA, 448 bp, Oryza sativa
tttcgtttaaggaaaaaaagagagaaaaaaaaaggaaggggttaaaataaaactcgcgcacagcaaccgaatcatctgcctcctcctcaagtagtctagtcctcctctcttctccggagtctgcgtgcgatcgaagcagaggcgcggcgctcctcctcctcctccggctccgatccccatggcgttcatgcgttcccactccaatgcatcctccggtatgggggttgctcctgacatcagggacacattccttgagcttcagatgaagaaagcatttcgctatgttatcttcaaaatcgaggaaaagcaaaagcaagttgttgtggagaagacccgggcaacaactgagagttatgatgatttcctggcatctctcccagaaaatgactgcagatatgccctctatgattttgactttggtacctgggagaatgtgcaaagagcaaga

SEQ ID NO: 415592 - DNA, 556 bp, Oryza sativa
ggcattgtatgggtggagctgaaaacaagacaagacacagggggggttagcaaccttcagaagtgtgcagacttcgtacatgcttttatgcttggttttgacatcgccgatgctgttgcgctgctccgtctcgatgacctgtatgtggattccttcgagatcaaggacgtgaagacactccgaggagagcatctgtcacgtgctattggccgcttgtcaggaaaaggaggcaagaccaaatatgccatcgagaattctaccaggactcgcatagttatcgctgatacgaagatccatatacttggatcctttgttaacatcaaggttgctcgggattcactctgtagtcttatcttaggttctcctgcaggcaaagtctattctaagctaagggctgtttctgctaggttagcagaaaggtattagatggtgcatcgtaccgttgcagttatggcctcgtaatatgttgtattggctgtttgtgtgcctgggctcttaatgtatcgttcgatgaacaaacttaaaatgctgagagttttgtaacaatacatatgca

SEQ ID NO: 415593 - DNA, 470 bp, Oryza sativa
agcaaaccttatgtttcgcttctaactggaattgtcagggggggaggtgctgatgtttctatacagtggaaggatccgagttgtcacagatagcacggtttttgctatgccagaaacagcgttgggtctctttccagatattggggcttcatattttctatctcgacttcttgggttctatggagagtatgttggtcttactggtgtaagggtggatgctgctgaaatgcttgcttgtggcctagcaactcattttgtaccttcagataggctgtctttgctagaagaatcacttaaaaaggttgatacatctgatccatttgctatatgtggaatatatcatcaatattcgtaacaaccatctttgaaagaaaaaagccgctctgaaaaggctagaaatcatcaacaaatgctcttccaaaaaaacaattggaggaatattagtctttcttgaacaagaggcttccaat

SEQ ID NO: 415594 - DNA, 572 bp, Oryza sativa
catttgtattttgcttggatttatgctacttgcgctgggctggaaattatataacccccctggggtggacctaatcatagcaattctaaatgatgggaccatcatgactatatcaaaggatcgggtaaaaccatctccactacctgacagctggaagctggctgagatttttacaactggagttgtcctcggtggatacttggcaatgatgacagtaatcttcttctgggctgcatataagacagactttttcccgagaatatttcatgttgaaagccttgagaagacagctcaagatgatttccaaaaacttgcctctgctggttacctccaagttagcaccatcagccaagctctcatctttgtcacaaggtcccgcagctgggcatttgttgagcgccctggatttctgctggtctttgctatcttggttgcacagctgggctgctcctactctctcactggctccctcttataatttgcttcaggaggtaaaacccgcattgacgtaaacttttgggttaaacaaatacagattgctacactgattgctgtgtatgctgactgggcgt

SEQ ID NO: 415595 - DNA, 530 bp, Oryza sativa
cgcgaacgcgcctctctcgcttatcctttctccttcgagagcttcgtctccgagggattgggtagcattgagcggcgcaggcaaagggaagtggcttctatcaccctacaaaattgcgttgtttgctgaaatggggggcatagtcgggcggggtgattctccaaggcacacttcaccagcatcaaagttagagagaaagatggttgaagccatgcagcagagagcacagaaaggaacttctgttaaatcattcaatagtgttattatgaagttcccaaaaattgacgagagtttgagaaactgcagaattatctttcagcaatttgatgaagattccaatggtgaaatagatcaacaagaacttaagcattgttttcaaaagttggatatcttattcacagatgaggagataaaagaccctatttcaggcatgtgacatttatgaaaacatgggcatgaaatctaatgagttcaatgtcttcctgtgccttggttatcttctgaagaaccgttggtgcagaagccagaaa

SEQ ID NO: 415596 - DNA, 580 bp, Oryza sativa
  unsure (1)..(580): unsure at all n locations
cgttgttgccctcttcattcgctcgctcccctcctcggggcggggtcatctagggtttcgtcttctcctccgccgccgaccgccatggctcgccgcagctcagcaaggtctcgccctgcaccacgtgctgctcccgtgaggaaccctccgcagccagcaaggcaggctcctcctccagctcctgcccagaacggaggtggctctatcctgggaggaattggttccactattgctcaaggcatggcttttggtactggtagtgccatggcacatagggctgttgatgctgtaatgggtccccgtaccattcagcatgagactgttgtctccgaggctgctgcctctgccaccccaatggccaacgccactccatctgactcatgcagcatccattccaaggccttccaagactgcatcaacaactatggaagtgacatcagcaagtgccaattctacctggatatgctgaacgagtgccngccgggtggtgcatctgcttaggctggtggcctttcggaactttattaattgggcctcgcgtaactctcatgatatacatgaataacctgggcaattcatg

SEQ ID NO: 415597 - DNA, 525 bp, Oryza sativa
ttttgtctcgtctagttgagcagccgcgacgagcacgggggtgactacgacctccgccgcgacgatggccgcgcgcctcctcctcctcgtacttttcgccgtcgtggcagcgcgcgtaggcgcagcggcggcctatcagcccggatctgctgaggggcacacgatcgcgggccgcatcaagatcgatgctgcaagtgcaattgcaaagggctttggtcttccagccaagacatcaaacacaaaagtgatacttaacggtggtcagagggttacatttgccaggccagatggctactttgcattccacaatgtgccagctggtactcatttaattgaggtctcctcattgggctacttattttcaccagttcgggtagacatcagtgccaggaatcctgggcacattcaagcagcattgactgaaaacagaagagttctaaatgagcttgggttgggacctttcagagaagagcaatacttcgagaaaagggagccctttttcattatgtaacttttgagagccct

SEQ ID NO: 415598 - DNA, 511 bp, Oryza sativa
ttatggcagcaacagcctccctgaagagcagggggcgggtaccatttactatctgtgactggagtagtgcaccactctccatctcaacccaggctaggaggaggtcatggcagccaaggggggcaaggatgcagggagcatcagctgcagactccaagaacattcttgtgatggggggaaccaggttcattggtgtcttcttgtccaggctccttgtcaaggaggggcaccaggtcacattgttcactagaggaaaggcccccattacccagcagttgccaggagagtcagatgcagagtatgcagagctctcttcaaaggtgttgcacttgaaaggtgacaggcaagactttgatttcgttaagacaagccttgcggcaaagggcttcgatgatgtttacgacatacacgggagagaagctgttgaggtagccccaatcctagacgcattgccaaaccttgaacagtacatctactgctcatcagcaggagtgtacctgaaatcagacct

SEQ ID NO: 415599 - DNA, 456 bp, Oryza sativa
tgtttgttagtggacgaaatgcttccagcagttgcgcaaggtgctattggaatagcttgcagaagcagtgatgacacaatgatgaattacttgtcctcattgaaccatgaagataccagattagctgttgcatgtgaaagagaattcttgtcagttcttgatggcaactgccgaactccaattgcggcatatgcttctcgtgacaaggatgggaattgttcattccgagggctattggcttcacctgatggatctacagtatatgagacttcgagaactggaccttatgatttcgatatcatggttgagatgggtaaagatgctggccacgagctgaaagcaaaggctggccctggcttctttgatagcttgcaatgaatatagaaatccaccattggccaactagagtgttgagtggattattttgattttttttgtaccctagttctactagag

SEQ ID NO: 415600 - DNA, 593 bp, Oryza sativa
cggaactgacagtcccgacccaccccaccgtttcgacctttttggaggtactttggatgtctccctgggtagcattgattaaagtatttgtgaggttaacgcaacacctggcgacactcaccttggcggggaggactgtgacaaccgtctggagagccactttgtccaagagttcaagagaaagcataagaaggatatcagcgggaaccccagggctttgaggaggctcagaacatcatgtgaaagggcaaagaggaccctctcctccactgcccaaactactattgaaattgattccctctttgagggtggggatttctattccaccatcaccagagccaggtgtgaggagcttaacatggacctcttcaggaaatgtatggagcctgtggagaagtgcctgagggatgcaaagatggacaagagcactgttcatgatgttgtccttgttggtggttcaactagaatccctagggttcagcagcttctgcaggatttcttcaatgggaaggaactctgcaagagcattaaccctgatgaagctgtggcatacggtgctgccgtccaaggctgtatccttagtggagagggga

SEQ ID NO: 415601 - DNA, 348 bp, Oryza sativa
tctggtcagtcatatgagcgggcttgcattgagaaatgggggggcaattgtaacacaacctgcccatagactcccaatgaattattccagctctccatgacgcccaactattgcatcaagggtttgatagcttcatggtgcgagcagaacggggttctagttccatcggcgccgcctgattctcccaagctcaagtacctgaggatatcatccttgaatagtagcaaatgtcttgtgaccaatggcgttagcacggtcttgtttgaagacacattcaccgaggaggatatcaccgatgaggctccccacaggtgcttcatgaccatctcccccttgcttatcccgact

SEQ ID NO: 415602 - DNA, 450 bp, Oryza sativa
ggcaattgctaataaacatggtgtggagacgggcagtggtttcatatacttgaaagaatcttcacctgagtttgaggcaggcagccaggaaacttcggttagtggctcccatatttcagatgctgaaccttctgaaagtacatgcaataagaccgatttggtttcacctaagcaatctgcagtatctgtatctgaggccaaacgccatacttcattgttctttgcactttgcacgaagaggcccattcttcttcaacatctgttcaatgtttatggaaggtctccaaaagttgtcaagcagtgtatccattggcatatacccaatcttgtaagaaacctgggatcctcatgttctgagatgctggctattattcataacccacctgaaggcagtgaagagcttgttaccttgatattgcaaactctgacagaagattcaactccttcagc

SEQ ID NO: 415603 - DNA, 463 bp, Oryza sativa
tataactataacggaggcgagctcgcctccgttcaccggggctttctttgacatggacggggggtcgctgctcccgttcgcgctggcgctggtggcgatcccgatctcgctggcgctgctggaccggctgcggctggggcggatcccgccggggccgcggccgtggccgatggtggggaacctgtggcagatcaagccggtgcggtgccgcggcttcctggagtgggcggagaggtaccgcccgatcgtgtcggtgtggttcggctcgtcgctgaacgtggtggtgtcgacgtcggagctcgccaaggaggggctcaaggagaacgaccagctgctcggcgaccggccgcgcaaccgctccacgcagcgcttcagccgcaacgggatggacctgatctgggcggactacgggccgcactacatcaaggtgcgcaggctctgcaacctcgagctcttcaccccc

SEQ ID NO: 415604 - DNA, 389 bp, Oryza sativa
ttcccttcactccgctaggggtttaccccgcgagggggggctttcgttcgacgccgccgggcggaggctcctctcccgccgcgccacctccttctcggcctccgctctcctccgccgcggcggccccggtgcgccggagtcgctgctgcgccccaccgtcgccgcggtctcgcgcgtcggcttccttcgcgggttcgcgcggcggccgggcggcgatgggtactccccgatgcggaccggtggcggcggaggaggaggcggaaacccagcgccgacggagatggccccgctgatccccgggtgcgactacgagcactggctcatcgtgatggacaagccaggcggggagggcgccaccaagcaccagaagaatgactgctacatcaaac

SEQ ID NO: 415605 - DNA, 465 bp, Oryza sativa
  unsure (1)..(465): unsure at all n locations
taaactcacacattgccaattccctttcttggggggagtctggctgctgcaatggcttcgtcgctggccctggtagctctgctcctcgtgagctgcgccgtggtggcggcggcggcgaccaagtacaccgtcggcgacacgtccggctgggcgatgggggcggattacaccacctgggccagcgacaagaaattcaaaatgggcgataccctcgtgttcaactacgccggtggggcacactcggtggatgaggtgagcgcancggactacgctgcgtgcaccgtcagcaacgcgctccagagcgacagcagcggcacgaccaccggcaccctcaagaccgtcggcaagcactacttcatttgcgggatcgccggccactgcagcaactgaatgaagctcgtcttggatgatgccgcggcctattcagtcccagtcccaaaagctccgtgcaccacaccggcgact

SEQ ID NO: 415606 - DNA, 406 bp, Oryza sativa
tgttggtcttagatgtgctgccaaaacatgctgtgatcatgcattcccttccaaggcttgatgagatcacaatagatgttgacagtgatccgagagctgcatattttagacaggccaaaaacggcctctacatcagaatggcgttgctcaaacttctgcttgttggtcgctgacagctttcttagtgcgtggcgctgtggtgttgatgggggtcaaaaaatgtttgtcttaatcaatggctccaaatcaactgattagtattgtactaggcaccataagttagatccttgcaaggatttaaccatgtctagaactctagatgcataattttcgatgtaacaaaatattctgaaacagagatttgttgctctcatatgttcttgtgaatcattatcaaactaattaa

SEQ ID NO: 415607 - DNA, 559 bp, Oryza sativa
ctatagggtaggttgggacgcctgccggtagggggaccggaattgaattgtcgacccaaccgtccggtttgtttgttgacgaccagttcatttcagcagaaaatctcagggacatctcagaagatctatgcagatggattggttaagaaagcatatgaggattggatgcatgttgtagaatatgatggcaaggcactactgagcttcaagcagaaaaagaaatctgtcacaacaagaagtgacacggctgcagcagcaacaaacagccctgtttcctatggttcatccaacacacacaaacaattgtctcaaccagcaaaagcagggcaaacttctacaggcactacaagtgaagcagatggatctacaagtgcatacaatggaaatcaggcaggacgatatgcagtcaattctcaaagcatacctgcaaacgtcactacacaatatgagcggagttcactgacacctgaaagccagttcaatggttccgcactgcaaaatcaagtttctaggggctccaatatactggcattgggaccaccacagcaacaacatcagc

SEQ ID NO: 415608 - DNA, 285 bp, Oryza sativa
gctgtttttctattcttggaaccctacaagactaaggggatgggtttaattgaaaagggagggaggcaacccaacatcaccattggaattctggtctccatcggtgccctctttgtgactgcgctcttcaggatcctgctcggcggcaagaagccagcggcttctgtgaagcccgcagcccaggtcaaaaaaccaaagtctaccgggtcccaagcagctggaagcaactgtggctaggaggaccagaaggaagaggaagagaatgatggatcttttgccccacgc

SEQ ID NO: 415609 - DNA, 382 bp, Oryza sativa
acccaacccacccgtgcgttcaccttcacccaacgggcggtaaactatagggagaggtcggatactagacgatggacgacgactccaacatgcaccaagcggagagaaaagagaatggcgtcacgaaggcgtgctcctggggatgagcaaccccctgactcaacatctaccccgtctttaactacacctacctcaccaagtctgacatcaagctgaacaatgcaattatcgctgaggaaaagcactagactatgtatgatgagatggccaacaagggcaatgctgaatatattgccggaggagccacccaaaactctatcagggttgctcaatggatgccttaaactcctggtgcaacaagttacatgggttgcattggaaa

SEQ ID NO: 415610 - DNA, 380 bp, Oryza sativa
gcaaggtgttatgtacatatggagaacacaggggctgggggggctttttaagggcaatgggtccaattgcgccataattgtgacaaattctgacgtgaaggtttacagctatgagcaagcatcaagtggacatactatggctttatcggaaacaaacaaggaatgaggaaggatagccaagtatcaggattgcgcaagggggccagccgggagactcattggtattccattattttggtcacggagcacaacaaagaaactacagcggagaagaagttgatggaatggatgaaaccctctgcccattggattttgagacacagggaatgattgtggatgatgaaataaatactgctcttgttagaccacttactcctgga

SEQ ID NO: 415611 - DNA, 385 bp, Oryza sativa
aatagcaaacacaccaagcactatataaataccaccacattgtatatgtacatatctagcagagcacacaaaggctcatccttattaacaccaacaacatgatgagcttccaatgtagcattaccagatgatagggcacatacaaatcacaccagaatgcgcttccaatcaaacccaaatgtttaggccttgcgaccagtagtatacacatataccattggttctctctctgaaagaaccattttacagttgcaagatgcaatgttcttgcttatttgaggtagtttcagctttctaggccgcaaccgcctcgcgcagtttgctgctgtccgctgatggcctcaagactcttcgtggcaggtggagatcatatttgccacttggc

SEQ ID NO: 415612 - DNA, 363 bp, Oryza sativa
gtcgttctctttgacattgagatctacaagcataacagggaagattggattgtacagacatgggggacaactgcacctgggctgccttatgttgatgaggcgattacaaatgctggtgattggttaattggtggtgactaggaggttatagaaccaatcaagtacaatgatgggcttgatcagtatcgctagtgtccagcccagctgtatgaagagtttgccagacacagtgctgatgcggatttcgcgtttcagcttagcaatcctgtacacaatggacatgctttgctcatgactgatacacgcaaacgcctttcttgagatggggtacaaaaaatactgctcttttggttcatccattgg

SEQ ID NO: 415613 - DNA, 430 bp, Oryza sativa
tgcaacttaagtttttctatagctcctagcaagctagcgatgggttcctttgagatggcgtgggcggccacctccgtggctcccttccaggggctcaagtccactgcgggcctcccggtgaaccgccgctccagcagctcgagctttggcaacgtcagcaatggcggaaggatcagatgcatgcaggtgtggccgattgagggcattaagaagttcgagactctgtcgtacttgccgccattgacagtggaggaccttttgaagcagatcgagtacctgctccgatctaagtgggtgccttgcttggagttcagcaaggtcggattcgtctaccgtgagaatcacagatcacccggatactatgacggtaggtactggaccatgtggaaactgcccatgtttggatgcaccgatgccacccaagtgctta

SEQ ID NO: 415614 - DNA, 363 bp, Oryza sativa
cgtctttatgttaaaaaaacaaaacacaccaagccaaggggagggtttaatggaattgctcacgaggaacatcgccctcgtcgtcgccctggtgtcaaaactggtcggaggagggtcatgcggccctcccaaggtgccacccggcccgaacatcacgaccaactacaacgccccgtggctccccgtcagggccacctggtacggccagccctactgctcctggtccaccgacaatggtggcgcgtgcgggatcaagaacgtcaacctgccttcctacaacggcatgatcttctgcggcaacgtcccaatcttcaaggacggcaggggatgcgggtcatgctaccaggtgaactgtgagcaacc

SEQ ID NO: 415615 - DNA, 377 bp, Oryza sativa
agggatcacttattcattatagttcttccatgctgctctaccacagcaaaacgtttcagacaccatcaaaccagacttaaggatacacattacaggtaaatagtacacaatgaaacgggacacgaccaaggaccagaccagacaaccatagctccattggggaagacaaataggcagacttgtgaaccctagaacagcagcagctccatggctgaggacttactggccaccacggaggcggagcaccaggtggagtgtggactccttctggatgttgtaatccgcaagggtgcggccatcctcaagctgcttaccaagaaagatcaaaagcctgcgtagtattcaacaaggaccactactcgccgttggtgcccatc

SEQ ID NO: 415616 - DNA, 493 bp, Oryza sativa
ggacatggagggtatccccccggaccagcagcgcctcatcttcgccggcaagcagctggaggatggccgcaccttggctgactacaacatccagaaggagtccacccttcacctggttctcaggctcaggggtgggatgcagatcttcgtgaagaccctgactggcaagaccattacccttgaggttgagtcgtccgacactattgacaacgtgaaggcgaagatccaggacaaggagggcatccccccggaccagcagcgtctgatctttgctggtaagcagcttgaggatggccgcacccttgcggattacaacatccagaaggagtccacactccacctggtgctccgcctccgtggtggccagtaagtcctcagccatggagctgctgctgttctagggttcacaagtctgcctatttgtcttccccaatggagctatggctgtctggtctggtccttggtcgtgtccccgttcattgtgtactattta

SEQ ID NO: 415617 - DNA, 417 bp, Oryza sativa
ataaaaaaagggaaggaatttttttctttttttggggggggtttacgcttattcctcacgcagctctcgcctcgcctcgccgcccgccactagagaggagagggagaaggaggaggaggcaaatcccagcaaaagaagatgcagatcttcgtgaagaccctgacggggaagaccatcaccctcgaggtggagagcagcgacaccatcgacaacggcaaggccaaaatccaggacaaggaagggatccctccagatcaacagcgtttgatattcgccggcaagcagctggaagatgggcgcacactggccgactacaacattcagaaggagtcaactcttcacttgggcctcaggctcaggggtggcactatgatcaagggtaagaccctcactggaaaagagattgaaattgacatt

SEQ ID NO: 415618 - DNA, 412 bp, Oryza sativa
tttggtgttttcatccccgggcgggagtagggtattacttcttttataagaaggcctgaacctgcataaatcctttgtctccaaacccatacacttttccagcttgatagccacccccttttattattgccgaaatctagtttcgacaaatggcgacttgaccacagatatcgccagacgagctcaactacgcgttgctccggaaggagccgtaccccctggcactggcacggaggatgatcttgtggtacagggccaagatcgccgcgccgatgaacgggccgacccagaagatccactgatcactccaggccttgttgtttgttgtagaccacggggtttgcccaggccaaaagcttttttgatttttttggaggtccttatgggggaccaaggtcaaaaccttgggggg

SEQ ID NO: 415619 - DNA, 517 bp, Oryza sativa
cacactttctttacccaccgccgttgccgaagccgcagttggagcgctagtaaaaggggctagcggaaaccccagcagcgtgagggctaagcttcgcggcggattggagatgacgcagaagcagagccagttcaaggggcaggggaagaagaagaccatccctcccaaccgccatggcaaggcgccccacgtccgcaaagggaagagggccgtgaagccgaccaagttcaccaaggacatggacgccgataaggaactcacaaaattcatcaaccagtgcaacgagaagaaggctgcaagtcttgccagcaaagaaggcggcgacctcagtatactcaaggcggacgttgatccctccaattcaaactaggaatctgtggctacctctgcctacggctatgtgctatagaagatgagtgtgtggaatggatattatgttacattgcttacttgcattctagtatttccctgcagaaatgtaataattctgaatttctctgaagaaggtatgcttact

SEQ ID NO: 415620 - DNA, 306 bp, Oryza sativa
  unsure (1)..(306): unsure at all n locations
tttttggttttttttttttttggccatacgttaaatttatttaaacgcaacagcatccgaaagcacctaatatgtccatagttccccactgcttatcatcatcatctagtcttagccaccaccagaaccgttctttttaccaaagacgaccacctgcagcttgtcatatccagcaagcacaccagcaccagcaacagcacgcagaatgttagcaccagcgcccttgaagagtgacttcgcaccctccttcgcaacaatctgcttgaacgcatcctnggctgacccccaaaaacataagcagtccgg

SEQ ID NO: 415621 - DNA, 462 bp, Oryza sativa
ggcggttctccacctccgccacctccttctccactcccacgaagcctgtctcctcctcctcctcctcctcaagtcccaactccgtctgcttcgccagggcgtcggggaggtgcaggatggcgtccgtggtggtgagggcggaggcggtggacgcgaccatcagcccgacggtgagcgcgctgcggccgtccaagaccatggccatcaccgaccaggccacggcgctgcggcaggctggcgtcccggtcatcggcctcgccgccggggagcccgacttccacacgccgcacgtgattgctgaggctgggatgaatgcaattaaggatggttatacaaggtacactcctaatgctgggactttggagctgagaaaggctatctgcaataaactccaagaggaaaatgggatatcctacagtccagatcaggtgctggtgagcaatggagctaagcaatgcatta

SEQ ID NO: 415622 - DNA, 348 bp, Oryza sativa
ttaaattggaaaaaaaaacaaaacacaccaagcgggatggttgcgacaatgggatcgctcaccaccaacatcgtcctcgccgtcgccgtggtggcagcgctggtcggcggcgggtcgtgcggcccgcccaaggtgccacccggcccgaacattacgaccaactacaacggcccgggggtccccgtcagggccacctggtacggccagccctacggatcctgctccaccgacaatggtggcgcgtgcgggatcaagaacgttaacctggcggcctacagcagggtgatctcctgcgggctcgtcccaatttttaaggtctgtaggaggtgcggttcttgcttcgaggtg

SEQ ID NO: 415623 - DNA, 311 bp, Oryza sativa
ttttctattgaggaaaagaacattaactcatcaggggggggttcattggaaaaaaaggatgcttcaagatcacacaggaaaaatggttttgcaagaccactcttgaaatgtgcagaagatgttatactaaatggtgatgtcgcaagtacttctgggaaagccattgcaagtttacaggtggaagcttctgatttggcaaactttctcaccatggaccgaaatgggggttacagaggttctcaaactctcctaagatctgtactgtcagagaagcaggagctatgcttctctgttggctcattgctctggca

SEQ ID NO: 415624 - DNA, 295 bp, Oryza sativa
tgtgttttttgcaacaccgggggtataaatcccaactcgatgatgcaaatagtttaagcataaccatagaatttacacagacatgttaaatatgagccaacaaattcatggcagcaacatgtaacaccacacatcaaaagtttgcaacccatcaggcacgcaggaaacgtccacattccacagacaagctaacactagcatgcattggcctaattgagactctaaagaagagactcatgctgaagcatgatagaatcaataacggggagtttaacattcccaccatattgaatca

SEQ ID NO: 415625 - DNA, 346 bp, Oryza sativa
ccgccttttatttttgtctctcgctcctaccaccccagggggggggttataattaaaagggggggtccgacacctccctggctccctcccaggggctcacgtacactgggggcctcccggtgaaccgccgctccagcagctcgagcttcggcaacctcagcaatggcggaaggatcacatgcatgcaggtggggcccatcgagggccattaagaacctcgagactctgtcgcacctgccgccattgaccgaggaggaccttttgaaccacatcgagtccctgctcccatctacgcgggcgcctcgcttggagctcaccaaggccggaatcctcctaccgtgagaat

SEQ ID NO: 415626 - DNA, 423 bp, Oryza sativa
acgggcgcttttctgtgactacggcttcgacccgttcggggggggggggttggttgagtacccgcagttctagctggactcgctggaccagaacctggccaagaacaacgccggcgagatcatcggcacccggttcgagaccggcgaggtgaagtccaccccgttccagccctacaccgaggtgttcggtctccagcgcttccgcgagtgcgagctcatccacggccgctgggccatgctcgccaccctcggggccctctacgtcgagtggctcaccggtgtcaccctggcaagacgccggcaaggtggagctggtggatgggtcgttctacctggggcagccgctgccgttctcgatctcgacgctgatctggatcgaggtgctcgtcattggctacatcgagttccagcgcaacgcggagc

SEQ ID NO: 415627 - DNA, 248 bp, Oryza sativa
agagatgccttcttcgccgccgccgccgcactccacggggcgctcttcgtatccggccgccgccagacaagatggtgagagtcagtgtcctcaatgacgctctgaaaaccatgtacaatgctgagaagcgtggtaagcgccaagttcttatccggccctcgtcaaaggtgatcatcaagttcctcatcgtcatgcagaagcatggttacattggtgagtttgagtttgttgatgaccaccggtctggc

SEQ ID NO: 415628 - DNA, 288 bp, Oryza sativa
cgccgttactcccccctcgccgagagagctctagggtggccgctgttgaatttttttttaattcggggggagagatttgaagaggcggcaccatgttggtctaccaggatctgcttaccggtgacgagctcctgtcggattcgttcccctacagagagatcgagaacggcatcctctgggaagtcgatggcaagtgggtcgttcaaggagctattgatgtggacattggtgccaacccatctgctgagggtggtggagatgaccagagtacatggtctgtgccggcct

SEQ ID NO: 415629 - DNA, 368 bp, Oryza sativa
agtatcaaggttgtattcactttctaggatttaatcacctgtacaaacattttcagatttcacaagaacatgcacaagaattagctagctaacctctacttctacatgacatcacaaccgttgtgaggaaccctcttcttatacacgtaaacgcgcgacacgaacacgaacgcgacgagctcgacggcgcataggccggcgaggagccagtagaagtagtcgaggtgggcgcggttgaggttgttggcgaaccagctcgccccgctcttcttggtggcgccgtcaatggcggagatgatgaagctgctgaagaagtgacccaccccgaatatgctgaggaagaaggcgagccccaggctgcgcagcgc

SEQ ID NO: 415630 - DNA, 531 bp, Oryza sativa
  unsure (1)..(531): unsure at all n locations
gcgggggcggcggcggcgatcaacctgtggagcggcggggcgacgatgctgccgctgctggtcgcctgcgtcgccgacgcctggctcggccgctaccgcaccatcgtgctcgcctccctcctcttcgtcgtgagcatggggatgttaaccctctcgtcggcgctcccggcgttccacggcgacggcggcggctgcagctacacctccaagtcgctgtcctgcgctccctccaccgcgcaggtggccatcttctacgtgtcgctgtacctggtggcgctcgccgaggccgggcacaagccgtgcgcgcaggcgttcggcgccgaccagttcgaccagaacgacgccaaggagtccgtctccaggagctccttcttcaactggtggtacttcggcatgtgctccggcaccgccatgaccaccatggtgtcctcctacattcaggacaacatcggctggggcctcggcttcggcataccctgcctcgtcatggcgtcgccctcgccatgttcttgctcgggacanggaactacc

SEQ ID NO: 415631 - DNA, 324 bp, Oryza sativa
ttggtttttaaaattgaacaaacgcgcatattataagtgacgaagcggtctcacataaaacagggcacacaggttacaacaacgagggttgtaagcccattaagccccaaacatcagatcaccacaagcaaatgtctcgaagacacacgcacacggcaacaggataactccacactggcagatcatgggatagcagcagttatcaatcaggccttgacacacagaacatcaagcccccagacgacgacgactcctctagtactcgtcaccatcatagccatggcagcaaaagttgaaaagctctccccagttttttgttccccc

SEQ ID NO: 415632 - DNA, 499 bp, Oryza sativa
agaaaggcgtcttcgtactcgcctctctccgcgcctgggggcttttcctcctcctctgccctctctcccttctccgccgccgtcgcagcatcaacccaatccgccgccatgagggagtgcatctcgatccacatcggccaggccggtatccaggtcgggaacgcgtgctgggagctctactgcctcgagcatggcatccaggctgatggtcagatgcccagtgacaggactgttggtggaggtgatgatgctttcaacaccttcttcagtgagactggtgctgggaagcatgttccccgtgctgtatttgttgatcttgagcctactgtgattgatgaggtgaggactggttgctacccgcagctcttccaccctgagcagctcatcaatggcaaggaggatgcagctaacaactttgccccgggtcactacaccattggcaaggagattgttgatctgtgccttgaccgcatcaggaagcttgctgacaactgcactg

SEQ ID NO: 415633 - DNA, 491 bp, Oryza sativa
tttcatggcaccaaatccccccaccatggatcaggcggggcttctactaagactcctgctgctctccccggcggtggccgccgcctcagtccccggcgaggaggagccgctgatccggcaggtggtcggcggcggcgacgacaacgagctggagctgaacgcggagcgccacttcgccagcttcgtccagaggttcgggaagtcctaccgtgacgccgacgagcacgcgtaccggctctccgtgttcaaggccaacctccgccgcgcgcgccgccaccagctgctcgacccctccgcggagcacggcgtcaccaagttctccgacctcaccccggccgagttccgccgggcctacctcggccttcgcacgtcgcgccgcgccttcctgcgggggctctgcgggtccggccacgaggcgcccgttcttcccaccgacggcctacccgacgacttcgactggagagaccacggcgccgtcggccccgtcaaga

SEQ ID NO: 415634 - DNA, 432 bp, Oryza sativa
ccccatgtttccgccccccttcctctctccctccggcgggggtgttcacgcagggaacaagcgacatgggcgtctacaccttcgtgtgccgcaacaacggcggcgagtggaccgccaagcagcactccggcgagatcgaggcttccgccgctaccccatacgagctgcagcgccgcctcgtcgccgccgcctccgtggccgactctgcctacggcgttcagtcgtccttctccatggtcacccccagctccgtcgtgttccaggtgattgtcggtgctgtcggtggtggtgcaatgatggtgagcggaggtggcggcggtggtgctgctgcatctggtggtgctgctgccgaggctcccaaggaggagaagacggaagaggagaaggcagagagcgacgacgacatgggattcttcctgttcgactagaagt

SEQ ID NO: 415635 - DNA, 457 bp, Oryza sativa
tttgtttttttttttttttttgaaattaagaggcattagggaatgatgattaatttaactgttcactgttgtatacatcgaggttcaagattaattaagtaaaagctgcagtaccttcacaaaattatactccttactccttagcatagagctgatcgatggagcgtataaaaatttaactttacatacagagaccaaattatatgcaataggattaatttgccgctgttccgttctgccaaactgcaggcagaaccatcgctgctgagaattgctttccttccttcgttcgttgtgcttcagatcctggacgggatgagcggcgtcgaattcgacaggtacgccgccgtcgccgtcacgccggagccgagcttcaccgggtagccgatgtccttgagcaccatctccactccactcagggcacccatcaattgcagctcgttgaggtggccgaggt

SEQ ID NO: 415636 - DNA, 301 bp, Oryza sativa
tttgttttttttatttttttggttttttaagttttgaatttaaccaacatgtttttttgtttttatatacgcctatctaacattatttagtgatcacaggcacagatgtgcacacatttacaaatggaagaaaaaaaagaaacatatgtgaggaaaattggaagaattatgataacttcccgttccattgctcgcccttattcagttgcttcttgaatcagacaaacgattccatcttttgaaaccaatgtcaccataatgtaattaatacccttctccatgcctttcagcccaaacattt

SEQ ID NO: 415637 - DNA, 463 bp, Oryza sativa
gcagtgcatttttaggttggatgtagcaatgtccaatgctggggtgtgtgtatcagatgatgaaattccaacagacccgctgtctgatcccataactgatcctaaaggtcttccaatgccatctgggaaaatcagcttcggtgctggggcccaactgaaaaatgctattggcagctggtctagatgtcttactgacttgtttggcatggatatggacgactatcaagaacttgacaatgaaggtggtgaaaatggctttggcgaatctgccaagccattctatcacctgaatgcactgagtgatcttctaatgctttccaaggatgtgctcatggataccagtagcaggaaagagctttgccctacctttagctcatcaatcatcaagaacatcctggatgtctttttaccagatgaattttgtccagatcccattcaaggttctttacttcaagcactagag

SEQ ID NO: 415638 - DNA, 375 bp, Oryza sativa
gctaggtggactttcaaaaaagaagaaaaagacacagggcaaaatggggaagaagtataagaaaggaagccacagaagttctgtgcttggtcttgcatggaacaaggaagtgaggaatgttctagctagtgcaagtgcagacacaactgttaaaatctgggatatagctgttggtaaatgtgcagtcactctagaacaccatgatgacaaggttcaagcagttgcttggagcccacagtcacctgaagttctgcttagcggatcctttgataaaacagttgccatgaatgatatgaaagatggtgggcagaattgtcataaatggtctgttgaagcagacgttcaaagtttagcttgggaatcacacaatgaaca

SEQ ID NO: 415639 - DNA, 525 bp, Oryza sativa
ctttgttatggctttaagataattgatatcctaactagctcagctattgcacggcatactgcatctcttgctacttatgcgagaaacaaaatgctggaattgaagcatagcaatgagaaaaatgtttgcataatctatggacaagattttaaggcaaattatctgaaaatgggtccttcaatcacattcaatttgaaaagagaagatggcacatggtttggatatcgcgaggtggagaagcttgcctcattgtcaggaattcatttgcgtacgggctgcttctgtaaccctggtgcatgtgctaagtatgttggtttgtcacactcagatctagtttccaattttgaggctgggcatgttctgtgggatgataatgacgtaataaatggaaaaccaactggtgctgtgaggatatcatttggctatatgtccacaaacgaagatgcagaggaatttcttaagttcctgcagtcatcttttggtgccacacctgcagaattgaacaatggctacatggtgaatatg

SEQ ID NO: 415640 - DNA, 507 bp, Oryza sativa
gtattgttcaccagctagttactagcgtcaaatgttgggtcagagtaccatcgtcagctgcttgaaaataccatgttatgtggtggcaccgcatcaatgactggttagttgccttttgtttttgatgtgcacctttgctctattcaaccttgtgaggtataggtcaaatagcgaaagggcctctaacgtaatggttaaggcttccgagtagcatcttcaggtcttggttcgatccctaatttcgggcttggttaaaaaaatcccctcgctgtgtcccatccgttctcggttatgtcctgcgcgtcacccctctggctgggccgctgcagagtgggcagaatggattttatcggtcaagaccatgtttcgatctcttcttaatttaatattgggagggcggtctttccctacccggccgagtttttttagctataggccaaatgcatatcaattagctgtatagggcaaggtatatcattttggtttaaacttacatatgttttctag

SEQ ID NO: 415641 - DNA, 513 bp, Oryza sativa
ctgaatgtgagagcaaggccgagctggacaggttctgggacgctcttatctccatcagggaagagattgcagagatagaaaacggcaaagcagatgtgcttaacaatgtcctgaagggcgctcctcacccaccgcaactcttgatgggtgacacatggagcaagccgtattccagggagtacgctgcgttccccgcggcatggctccggggcgccaagttctggccaacaactggtcgtgtggacaacgtctacggggaccgcaacctcatctgcacgctgcagcaggcgacccaggtggccgaggaagccgcggtcgcaactgcaaccgcgtaatctcgtccgagaaccacgataattgatcgcggcgtgcgaaacatccttaagaaaatataatgcatgcttcctgtaggagggaagcatcgtcatcttcctcgtcatcctttttgcagtgtatatactagctcatggcagcgcctgatcccccaccaccaccagtccaccacacacacac

SEQ ID NO: 415642 - DNA, 430 bp, Oryza sativa
tttgttttttagtagtaattcttatatgaagcttgaatttaaccaacatgacaaacagtatatatatacgcctatctaacattatagagtgatcacaggcacagatgtgcacacagatacaaatggaagaaaaaaaagaaacagatgtgaggaaaattggaagaattagtagacttccacgttccattgctcgcccttcttcagttgcttcttgtaatcagcccagtcgattccatcttttgcagccaatgacaccataatgtcatcaatacccttctccatgcctttcagtccacacatgtacacataggtgtggtccttcttcaggagctcccacagctcttccttgtactctgccatcctggtctgaatgtacatcttctctccttgagcattggtctgctccctgctcacagcataatcgacccgg

SEQ ID NO: 415643 - DNA, 511 bp, Oryza sativa
ttatgtttgcggagattgagataaaaacagcagggggggactttcgtttacctacaacaaaccaaacaaggcattgttttactcgctatgtcgagtaccacaggtgtttgaatgccaaaggggatgatgctggtgtttgcgaaaaatttgccaagtactacaggtccctttgccctggagaatgggctgagatatggaacgagcagagggagcatgggacgttaccaggacctctctgaatgtaccgaccgagacctccagttggaccagtcaacatgttggccagccagtcctactggtccattctggattcctacttcccggatcgcaaatggcttttgtctcttgctcttcaaccagtcaccacaaaactgttagtgatgcctatcgtatgcaaccctaataatttggctacagtggcctcacatgcagccatggtttgtgtgttgactgcggacctatatttgttcacttttttgtggtaacgtctgaaaggacttgcatttttttt

SEQ ID NO: 415644 - DNA, 289 bp, Oryza sativa
tttactcagagaagttctcaagagtgaagcctagggaggtggtgacctgggtggtgctgtacacatagcttacttcataatggatgaaatgactccaggacaaagaggatggcgggaactcgaagctcttggagataagattaatcagtttagcggcataatagaaggctatatttgggctcctaaaggcagtgattcaaatgatagacatgatgattgggcttttgaggagggaccacactctgattttactgggccaaattgtgggagtacagcctgtgtagctttg

SEQ ID NO: 415645 - DNA, 463 bp, Oryza sativa
tttgttttaggtaatgacacaggaatcattgtaggacaaaaaaatagacatgatattcccattctaaggcacatctccgttgtccaattagtaagattcgcctattataagtacacaaaactgacgcacagcaacactgaagaaggccagcagaattatgttcagacatgaaccatttttgcttgggtgacatttgctagatcattcagacagcagggaagaacttgttcagattgaacggtaacgagtagaattcttcgctcctcgcgtctttcttgaagctcctgaatttgtcccaccaatggtagcctctatccttcctcaccgtgttattgtgcgtctcgatcgtgttgtcgaggaagtaggccacaagacccgcgacaaacggctttgatgagaacggcacgtttatcatatcattgaaccatctggcaccagtgtgcactggtccataaacctgcac

SEQ ID NO: 415646 - DNA, 431 bp, Oryza sativa
cttcttcttcttcttcacacaggggtgctccttctgctcttgtgctaagtagctagctcacaacagaagaggacgagaggaagcaaggcggcggcggcggcagcaacaacatatacaccgccggccgtggcgccatgggcatcctggaccacatgtcgcatgtgtgcagcatcacggagacgaaggaggcgctcaagctcaggaagaagcgaccgctgcagacggtgaacatcaaggtgaagatggactgcgaaggttgcgagcgtcgcgtgaagagcgcggtgaagtcgatgcgcggcgtgacgagcgtgacggtgaacgcgaagcagagcaagtgcacggtgaccggggacggggagcccgccaggtgctggagcgcgtcaaggccaccggcaagaacgccgagatgtggccctacgggccctacacgc

SEQ ID NO: 415647 - DNA, 441 bp, Oryza sativa
tttgtttttttttttttttttgttttttttttttttttttttttttttttttttggataacgataaacgaggactttgaatcttatcgatctttaccgaaggggacatcccaggaccacaaaacccacagcattttcagaacattcgacgaattcatgacatgttaccctggtatgaatcacacaaaactcttgctaacttattcgggaccttccactcttataacactaaaagaacagcactaaggggactccgacttgggggaaatcctaattgcaacagccaggcccaatatggggaggggaaccaaaaactggaggatcttgatgatgaactccggggtcttgtcccggctgtagtggggttgctttgggggaacgtacttcgtcctcgcgggtattggggatgggtcgatgtcgccaacgtaatactcatccatta

SEQ ID NO: 415648 - DNA, 464 bp, Oryza sativa
cccggcctcgacccaccgcagtccgagcactttgtctacctgagggccgcgacaaaagattggggggggattcttaaaatgacggggctcctggacccccacctgtccatggatagctgcaccatcgatggctacacggtccccgtcggggtgcaggccctgatcaactcctgggccatcggcagggacacgcgctactggggcgacgacgctgaggagttcgtccctgagaggctcatggatggcggcagcgcccttcatgtcagctctcaaggggagtgacttccagttcctgccattcggctctggtcgaaagatgggcgccggggtgaatctcccgatggtcaccggagaactaatgctggcgaacctcgggcatccgtttgactgggatctaccaccggggcaagaggggcgcgacactgaagggtcgcaggtgttccggctaggattccccccgaaaa

SEQ ID NO: 415649 - DNA, 474 bp, Oryza sativa
tcttactcattcactgaaggagatcccaccaagatcagtccggggttggtcaagagtcgttgtagggatggtgttgaatggaagaagttctagtgatggctacaaagtaatgtggttagatattgatgggacttgcgaagtctatgactctacaaagaacgtgtggtcttgccctggaacttttcctccaagcatcaaacttccacttgctctaaatttgaggtcacaaccagtggcggttggcagcatgatatacttcatgtgcgcagaaccagatggtgttttgtcatatgatgtaagcaccgggatttggaggcaatttgccatcccactgccactgcatctgactgatcacacacttgccgagttccagggaagggttatgctggtgggtctgctgtgcaaaaatgcagcgacctgcatctgcatatgggagttgcagaagatgactctcctctggaaggaggtggacag

SEQ ID NO: 415650 - DNA, 494 bp, Oryza sativa
gcagtgcatatctaggttggatgtagcaatgttcaatgctatgttgcgtgaatcagatgatgaaattccaacagacccgctgtctgatcccataactgatcctaaagttcttccaatcccatctgggaaattcagcttcggtgctggggtccaactgaaaaatgctattggcagctggtctagatgtcttactgacttgtttggcatggatatggacgactatcaagaacttgacaatgaaggtggtgaaaatggctttggtgaatctgtaaagccattctatcacctgaatgcactgagtgatctcctaatgcttcccaaggatgtgctcatggataccagtagcaggaaagagctttgccctacctttagctcatcaatcatcaagaacatcctggatgtctttttaccagatgaattttgtccagatcccattcaaggttctttacttcaagcactagagttggaggaccacctggaggttaacaggggca

SEQ ID NO: 415651 - DNA, 445 bp, Oryza sativa
ctgtttttctgcttgagaaggctgaggagctcatgagggggggcttgcatccgagtgagctcatcattgcctacaccaaagccatcaacaagacaatagaaattttagaggatcttgatgagaaaggctcacagaacatggacgaaagaaacacggaggatgttgcgttgaggatgagatctgctgacgcatgcaagcagtctggccaggaggatatgctgagccctcttgcggctgatgcctgcaatcaagtctgccccaaaaatcctgccaactttaatgatgacaatgctagactggctaaactacttggaggtggattgcacaattcttctgtgggccgagaattggatctgaaaaatgatgctggtgggagcattaaaaagacggacaaggcaaagactgccctatctgctggtggagtcgacacctcagcacctgaaac

SEQ ID NO: 415652 - DNA, 438 bp, Oryza sativa
gccaagcagcatcaaactttgctcagaaacattaagccaagtcaaatctcgtaatagtaacacaaccaaagaaaaacatttttcccacatagcatttcaaacttcatgacattatctccaggggcgatgttaaaacattttggcaggagtgctaatttaacagaggttctacagggtagcttttgatgagatacgatttaaacagccggggagaaccaggcgaccctttcctggggatcaagaaatcttcagggctttccaccaccaccaccaatctttgggcccttggaacccctcggggcggcacccttcgactgcgacttctgggacttggttacctcagccttcttcgccttcttttcatccttgggcttcttgatgcgttccttgatctcacgaagagcagcttttctagcagcatcacgaactttaggcttt

SEQ ID NO: 415653 - DNA, 405 bp, Oryza sativa
gggaccgaaaaactaaaaccttggaagggcataaaacataacagaatgctgtagctgagtacacatggaacctaaataccacgagaatacaaccatagcatgtgaaaattctcacaatcagttcttccaagctaagagttgattcatcattctttcagaaaattggtgttcagtagggtctgtaggcacgacatagacgcaaacatgactaacaaaatccactgaataaaataggcgggccttccagcgtaaaacacactcgagagaacgctctaagctgcagcacccttgcccttcttcctctggagcttcttcatgtagaactcaagctctttgccctccaggatgtacccatcagctctgccacattgcccaggccgggaggagatgcaggccaagagcctt

SEQ ID NO: 415654 - DNA, 446 bp, Oryza sativa
cttctgtttggtaaagcgacaggcagaactaagtacagggggggatgtttgaaagcatcaggccggttgcaagagcgccaacgagctgctcccgcccagcgccagtttcgtgaagctgtcggacatgagccctaaacagtggagcgcattcctcgacaagctccaggagctgctcccaggtgccctgagcgcccggaagcacgctgccggtgtcgtcggccagcgctcgatgccgaggctgggcacgccttgccagttctgagagttgcagaagagaagcccaccgacccaagggtccacgaacgcgcttctgttcgagctctggtgtgcagcagacaagcaggtacggagtattatataatgcttgcagcaagtgctctgggcccgtggtggcagagagggttcccgaataagatcatccatggcatgtgagatgaggctgcggg

SEQ ID NO: 415655 - DNA, 466 bp, Oryza sativa
ttttgttttaaatcaaactgtgggttatcatagtaaatcttcccggagaatcagatgctcagaattcatagtgttcttcagcatcttacaacttacaagatggcgcagatatacaagcgcaactatcttaaagtaagctgtaggaggaaatggaaccatttctaacaacgggaaaaatataggttatagaaggaaaccatttgaacaaattaatagggaaataaattaggaggatcgtttccgtccgatctcaatagaactggacgtttgatacgtagatggcgtctggcatccagttgaccgggatgacgtctttggcgatgaggctcttgccggactcggtggtgacgcgaatggagaagggtgccttgagtggcgtggcggtgtccatcctccagatggcgccccacgacagcttcatgggcctccacgctggcaatccggcctcctggaggtccatctggat

SEQ ID NO: 415656 - DNA, 460 bp, Oryza sativa
ttttgtttaagcttgaatgattggaaaagcttcttgccatattatccaccatcagttcatgtgtcatgatggataatttttgaactgactaggatttagagaaataagcggacaagagcccgacttgaccttcaatgcaaagaaaagagggggcaacgcacaattgcacgatctgaaaggaacaaattacagacatacaatgcacaggtctgatgaacacattaaactacacagacattgagatatttgggatacttgcgatgaacaattccaaagctgctagatcagttgcctttctcgtccagacgaaggttaatcttatctgctctgccctgactgctctattgatcttggagctattccagcagcatcagatcctctcatgattttcaatttccggcagatagtggtaaacaaatcccaaggaagatcaccaacaagcatccagtcagcatcctta

SEQ ID NO: 415657 - DNA, 353 bp, Oryza sativa
ggctatttgtataactgcacaggatatcatgaagccaagggggggcttttaacactgcaaaggcggttacagaccctgatgagtatgaatcacttactttgggtagcttaccacccacctttcaagggatgaaagtctatgtcacagaggagcaagagctgattatggaaccatcttttaaatgggctgcaaacccaaatattactgttgctgtaaaagcctatggcttgaaagctactatccacattgtggatctacaagtatttgcatcacctcgcattactctgaagccattggtgcctacatttccctgctttgcaaaaatccttgtctcactcatggagaagccacat

SEQ ID NO: 415658 - DNA, 344 bp, Oryza sativa
tttgtttttttttttttttttgttcgttattactttgtttattattcagtcctgatcgatgagccgcgcagcatgtgtgcatgtaactcaacagtaaaggttgccacccgggtcaacgccgaattggcggcagaagtctttgtagtagtttacccttgcgttgacggcgccggggttcttgccgttgcactcgagcgcaccgttgatggcccggatggtggcgccgaacccctgcaacatcacctggtgcacgttgttcatccagaaccagagcgccgtcttgaaggagatcgttgggtcctgcgccaccctgtccgggtccctcagcccgtcgaacccgatgt

SEQ ID NO: 415659 - DNA, 406 bp, Oryza sativa
tggaatttctttaacatcactgatggatgttgagaggggggggggttttttcaagccagtgggcgggaaagctatggtggaacttgatgctgcacctttcaagaaatatgcatcgatgcgtgatgagtgggccctcaagaacagatacatcagccctggccccatccagttcagcggccctggaagtgatgactcgaaccatactttgatgctggaactcggtgctgcgctatagagatgcgtcctttactttgctcttacagtttttgggagtggagactggcactggagcagcctgcaggtctccatattgtgtgtgaaattgcctaaccagaagcttgatgggagccttctgcgtagccgactggatgcggactgtggtagcaaattagaaccgggttttagt

SEQ ID NO: 415660 - DNA, 460 bp, Oryza sativa
gtgaagttattggcagagctaccagcaagtgggtcatggtgagcctaaatacacggagacttcagcgggtcagtgatgacgtgagggatgaggtgtttatgcactgtccaaaggctccaagattagcattcccagaggaaaataatggcagtttgaagaagattccgaatctttcagaccctgcagaatattcaagacttggactagtgccaagaagagctgacctggacatgaaccaacatgtcaataatgttacttacataggttgggtcctcgaaagtatacctcaagatataattgatacacacgagttacaaacaatcactctcgactacagaagggagtgtcaacaggatgatatagttgattctcttacttgcatagaggaaggagaggagaaaagcatgaacggctctgcttctgcagcagcgcctcacaaagaagagcggcagcagttcct

SEQ ID NO: 415661 - DNA, 443 bp, Oryza sativa
cccactcgttcggggaggatgagtatgcaaggattgggggagattgtgacaaggtcatacaatggaacggttatcgagttttcggtgttcttgcaatgtcgcgatcaattggtgacagatatctgaagccatggataattccagtcccagaggtaacaatagtttcgcgggctaaggatgacgagtgccttattcttgccagcgacggcctctgggatgtaatgtcaaatgaagaggtatgtgaaatcgctcgcaagcggatacttctgtggcacaaaaagaacagcacaagctcatcatcagccccacgggttggtgattccgcagactcagccgctcaagcggctgctgaatgcttgtcaaagcttgctcttcaaaaggggagcaaagacaacattactgtcgtggtagttgatctgaaagcacagcgcaagttcaagagc

SEQ ID NO: 415662 - DNA, 435 bp, Oryza sativa
tttggttgatgaaaaccacttggagacaatttactcaggtagcaaatatttctcagccacaaatccaaacacttggtccttcctatcagaagatcagaatgaacaggttttcaaattcatctcccaactcgacgataatttacacgtacatttaacacattcttccacccttctcaaactcctcccttcttcttcccgggtaagattaaaattaacttgaggccagccagcgtcgccggcggcgagatgtttacaggctgggcgtcctctcggcggcgccggagatgacggtgagcaggttgttgccgaaggggtcgctgaggtgcttggagaggttctcgacggggccctcgccggtgacgtaggcctggatgaagaaccccagcatggagaacatggccagccgcccgttcttgatctccttcaccttcagca

SEQ ID NO: 415663 - DNA, 457 bp, Oryza sativa
cctgtttttcggccaagccccaaccatctgggaacagggtgactttaagaacgccatacggtacaaagggcttgctgcccagagccgcttcctggtgccagtcatgctcagggagtgcggcaaggcggtgcttcgtgggatcgactcgttggtcgacgttggcggtgggcatggtggcgcctgcaccgacatcgccgctgtcttcccgcacctcaagtgcagcgtgcttgacctcccgcacgtcgtcggcggggctccatccgatggcaacgtgcagttcgtcgcaggcgacatgtttcagagtattccggcagcaaccgctgttttcctcaagacgggtttacatgactggggtgacgatgagtgtatcaaaatattgaagaatcgcaggcaagccatattttcatgcgatgaaaggggggaggtaataattatggacatgggagctggatttgat

SEQ ID NO: 415664 - DNA, 463 bp, Oryza sativa
tttgtttttttatctttaaaggcaagaatattattcataaatgacgcatgatttttatcaaaacgcttgcaaatgatatcagataagtagagtcaacaagacaaaactgtatctgccaaagcacacctccccaactccacccaattacgccattatttctgggcaaaagcaaacggcttcccattcctccccttcaccagtctcaaaccataaaccccacaacaaatcctcctaagtgacggcatataagatgatgaaaacaaagcaggatactccagagtcgtcatggcgaacttcaagttgacacttctcatgccacagccgctagtcgtgctgggcagcctagtaccggtagtgcgcgggcttgtagggaccctcaactggaacgctgatgtattcagcctgcgacttggagagcttggtcagcctggcaccaagcttgcccaagtggagggcggccacc

SEQ ID NO: 415665 - DNA, 270 bp, Oryza sativa
ttcctgattcaaaaacttgggcagagcctgagggactgggttctgtataccgtcatttggttgctcatgcaaacaggcagagccaagctcgttgagccaactgacggacactaccggacgaaccttgccccctagtacaatgaccagtatctgcaccccacggagaatttgcccaagggaacaggccagtcggacctgattggggctcttacacaaggtgagccaattgatgactctagacctgcaggtgctgatatcctaggtggacaa

SEQ ID NO: 415666 - DNA, 441 bp, Oryza sativa
tttgtttttttttttttttttgtttttttttttttttttttttttttttttttttttttttttttttttaaccacaaaccccaaacttggattttaaagaagccccaaaaaagggtcacataaacaccccaggtcacaggagggaaaggtacaagcaaaccctggataatcgaaaaggaaatgtttttaaaaaccagacacccaaactgttagatagaagcccccccgggccgatcataggatagcagcagtaatcaagctttggcaagggcccaggcaagaaccctgaacctttttaggactcgggaccctaataacccttgttaccatcggggaactcggagccgacccccttggagtccttttccaggggggggagggccccccgggcccaagagaactcccccttcttcatgcccttggcaacaaaccaatggaaaa

SEQ ID NO: 415667 - DNA, 371 bp, Oryza sativa
ctctttcttcttcacaatccatgtgacactcaaggagggttttaggtatcacagtcacgaggttatgggctgggaggccactgatctggcttatggtgacatgaactagagggtcatccggagctgaggtcctacataggtctccgatgtcgagaccatcttcctcgggcgagaacatgccggtacatggggaaaggcacttggggcataggtgctatgactgaaacaacatggggtagcacgatcttgctcaaggatgtcccctcaggctccaaggcttctgtcatactaaatacggtctggctacattgcccaaatcagcatcacactgcttggacaggtagagctatgagagtgctctcggttctatg

SEQ ID NO: 415668 - DNA, 462 bp, Oryza sativa
ttttgttttttttttttcattcggaaattttattcgaatgacatataacaattccgatataattaagcacgcgtgattgagtgcacacgtacgtgtgtccacccacgtattagacgactgatcacgctcgttttattgtatgttattattattttcctggatacaatttagtagaggtatatatatagtactctctccgtttcagattgtaagactttctagcatcgctaatattcgtttaaaagttaatgaatctaaacacatatatatgcctagatttattaacatctatatgaatatgagcaatactagaaagtcttacatagtgaaacggaggaagtagtatgcatgaaatcatgggcagaagacgactcggtagttgctgttgccgttgcaggagcgcagcttggagtcgtcggaggggtactggtacgcgtccgggcagctcctttccctgcacgt

SEQ ID NO: 415669 - DNA, 530 bp, Oryza sativa
  unsure (1)..(530): unsure at all n locations
agaaggttttatttccccaaaccctagcttcggatctggagggcgaacccccgcgtcttcttcgacatgaccgtcggcggtgccccagccggccggatcgtgatggagctgtacgccaacgaggtgcccaagaccgcggagaacttccgcgcgctgtgcacgggcgagaagggcgtgggcaagtccgggaagccgctccactacaagggctctaccttccaccgngtcatcccccagtttatgtgccagggcggcgacttcacccgcggcaacggcaccggcggcgagtccatctacggcgagaagttccccgacgagaaattcgtccgcaagcacaccggccccggggtgctctccatggccaacgtcggtcccaacaccaacggctctcaattcttcatctgcaccgtggagaccccctggctggatggcatgcacgttgtcttcggccaggtcgtcgagggcatggaggtcgtcaangtcatcgagaaggtgggctccgcagcggcgccaccttcaaggaggtgaag

SEQ ID NO: 415670 - DNA, 426 bp, Oryza sativa
actcgtttgtgaggtcttttcggtagaggcggacgattggccgacccctgtaggtactcgaacacgttcacgaatgaccacacgaagtagcctttcacgttggcgccattccttagtgcagtcaggatactccctatatagctcttcaggtaatcaaccctgtcattgtcatggacagtgtcattgcttgatccataaccattctcgaggatataaatgggaaggttcccataggtttcttgtaggtactgcaccatcaatctcaatccttgtgggtcaggtccaatagatgttggagcggccttaccaggtggtggatctgtcttggaacctctgtagtaaattgacatattcgctacaaagttgcgtgtgcccttacccaaaggacgatcattcacatagagagagtagtagtgattcattccc

SEQ ID NO: 415671 - DNA, 411 bp, Oryza sativa
gtttgtcttgcttattgacaattttgatgctcaataggggggtgttgaaaatgatggggatgaatttacatttttgaccaataaaagtgcccctaagaataagctggtaagggtaaatataaaaatccagagctgtggactgatgttctctcagagcatgaaaaagatgtgctcgaatcagccgacgccggtaacaataaccaacttttggtgaattatatgtcagatgttaagcatattctgcagataagagaccttacaactggaaactttattcatcaggtgcctttggagatcggttctggttcagagatctcgtgcacacgagaagacaaggaagtatttattggcttcacaagctttctttctccaggcattatttttaggggcaacttaacatctacaatccct

SEQ ID NO: 415672 - DNA, 465 bp, Oryza sativa
aaacttttggtgcaggttctaggcaataaagggggggggggggttctaagttcgaaacctgtacaatttttgatcaaaatgcctgaagttttctgtgaaaaattgaaatgtacattgagttttacgatgttatgtctgttccaatggcaattgctttgtctggtcaaccgctgcttggacaagcagtgatggttaagccatctgaggctgaaaagaacttagttcagtcaaatgcgacatcaggtggtgcggcttcaggtggagcaagaaagttgtatgttggcaatcttcactcaaatattactgaagaccaattaagacaggtatttgaaccattcgggcacgtggagcttgtacagcttcctctagatgcaatgactggactgtgcaaaggttatggctttattcagtttgcccggcttgaagatgcaaaagctgcacagagtctgaatgggcagcttgata

SEQ ID NO: 415673 - DNA, 425 bp, Oryza sativa
tttgtttggattaattaactagcatatttaaatttaaaacgtaactgtttgagcaaataccacgaaatgttcaggcgctaagatacggcaataccgatacatccagcatagcaaaaatggcgaagagcacagagtcagataaagctatagagaactagggctccaggagatgggggccgaatgacaaccatggcgcttagtcgacctcctccatcttgctctcgccggcgtcgtcctccagcggcggcatgtcggcgtcagcctcagcagactcgtcctcgtcgatgctcaggccgagcttgagcatccggtggatcctggtgccgaaggtgttggggtcctcaaggctgaagccggaggtcaggagggcagtctcgaagagcagcatcaccaggtccttcacagacttgtcgttcttgtcagca

SEQ ID NO: 415674 - DNA, 548 bp, Oryza sativa
gtgattctgctgttgctgatcaaacacttggtgaaagcagtctggttgatgaaactgaagatatcaatatgagctctgatgcctcagagcacaccagcataaacaacaattctgtcgaggatgaaacagggactgaagatgtgatgcaatttttcctgactaatgagagaatcccagaccaacgcatgaagatagaaatggatctatccattacggtgaatgatccgcataagcgtctgcatgtggctgtgtgttgggaggacagtggactggaccaatacaactttagttctttgaattctcttccagaagtttacaaagcggtgctgttttctaggaggccacaggacacatgttctctatatgcatgtctggaagcttttattaaggaagaaccattaggcccagaagacatgtggtactgcccaggttgtaaagagcatcggcaagctagtaagaagttagacctctggagattacctgaaatccttattatacaccctgaaagattttcatacagtcggtataccataaacaagctggagaca

SEQ ID NO: 415675 - DNA, 404 bp, Oryza sativa
tttgacttgagctcttgaaaactgcaattgagaaggctggttacactggcatggttgtcatcggaatggatgttgctgcttcggagttctacagtgacaaggaccaaacctatgacctcaactctaaggaggagaatcatgatggttcacagaagatatctggcgatagcttaaagaatgtatacaaatgttttgggagcgaataccccattgttgcgattgaagatccttttgaccaggatgactgggttcactatgctaagatgactgaagaaattggagagcatgtgcagattgttggtgatgaccttctcgtgaccaaccccactagggttgctatggctatcacggagaaatcatgcagtgcccttctgctcaaggataaccaaatcggatctgtgact

SEQ ID NO: 415676 - DNA, 402 bp, Oryza sativa
gtttgttgtgaaggcagcggacgcggcggaagagggggcttttgtaagagaagctcgtgacccaactcttcgccaagaaggagatgcggattcttatggtcggtctcgacgccgccggtaaaaccaccattctctacaagctgaagctcggcgagatcgacacaaccatccccaccatcggtttgaatgttgaaactgttgagtacaagaacattagcttcacggtctgggatgacgggggtcaggacaagatcagacctctctggaggcattacttccagaacacacagggtcttatcttcgctgtggatagcaatgaccgtgaccgagctcgtgaagccagagaagagctgcacaggatgcttaaccaggatgagctacccgatgctgtgctgcttgttt

SEQ ID NO: 415677 - DNA, 486 bp, Oryza sativa
acaagcactctagcaatggcttctgaggttgtccgcgggagggacgcctagctactaaaggcacaagccgacatatggcggctcagcctctcctacctcacgcccctgtcactgaggtgcgccgtggagcttggcatccctacggcgatctaccgccatggcggggctgcctcagccgctgagctggtcacggcgctgtctctcccctccactaagctgccgttcctccgccgcctgctgcggctcctcgccgcgtcgggcgtgttcaccgtcgacaagcagagcacggaggaggagcggtaccgcatcagccccgtgtcctacctcctggtggacggcatccctcacgaggaccacatgaaccacaccgctctggtgctcacctgcacctcgacgcgctacatcgaggcggggatagggctggccgaatggttaagagggacctggtcacgtcaccgttcgaggagctgcacgggcgactctgtt

SEQ ID NO: 415678 - DNA, 359 bp, Oryza sativa
gctgatttttcaagacaaaaacaagtacaacacacgggggggctatttgtagtgcgatgtaccatcaaggacatcactggccaaatcatatctgctagtatagcgggtgatatggatcttgcttctgcctactcgcatgagttgccacgatatggtcttgaagctggcttgaccaactatgcagctgcctactgcactggccttctgttggctcgccgtgtgctcaagatccggggttcggatcaggagtacaagggcaatgttgaggccactggtgaggacttctttgttgagccagcctatgagaggaggcctttccgtgctctcttggatgttggccttatcaggactacaacagg

SEQ ID NO: 415679 - DNA, 429 bp, Oryza sativa
tttgttttgcagaaaagtttggggtgtgatttctcagggctggcctaactggggactgaccaaaactcttccagcctgattgtgttgtacattatggagatctatcaggcaatttcaaagttaacacaatatcacagatttcctctttgactgaatatccagtatgaatagaccaaaatgcccctacctacactgctctccaaacatgtgggaattatcaagaagacaaagcaaaaggggacatttttctgatcatgccaccaggaggagcaccaccaagatcgccgaggcggctgcggccacggaacgcggcggcccgatcggagcggagttgggtaggtaggggagggagtccggcggcggcatcttgcactcgtcgccgttgaagtagatcttgcgcgggaacgcccagccctggctgaaggtgaa

SEQ ID NO: 415680 - DNA, 437 bp, Oryza sativa
ggttcttgaagaagtatagcaagaagtacgaacagggggaccatgttgcattcaatcaggtgagcgagcaggaccgcaagaggcggacacagcttcaggaagaatgggactcatgggttgccaagtggaagcagatgcatgaggaggagcgtgcttacaggagggagctcagggatggggaggccagcgacgacgaggaagagtatgaggccaaggaagttgaggtggaggaagtcgttgatgtccgtcaagaagttcttgcattcgacctagatcaggagtgaaaacacttattatagaatctgttgatttctttcctgttggtgttaaagttcattggggtcgcattgcataataggccctagtgatcaagtgcgcaatttactgaatcgtggactgcttaattggacacttgctgcttgaaattgtggatcatg

SEQ ID NO: 415681 - DNA, 287 bp, Oryza sativa
tgacatagatatgagccatccacaaatgccaaagggaggggaggtagtaaagattgcgggcctgacatgcccatttgagccaccgaagcctaagaccaagcataaggttgacattgatactgtcgagaaagcccagacactgggtgagcaagagcagaaacacttcgatgaaatgggtcagaagtgcatagatgctggtgcaaccctgggtatttgtaagtggggttttgatgagtgaagccaatcatttgttgatgcatagaaatctgccagctgccagatgggaa

SEQ ID NO: 415682 - DNA, 429 bp, Oryza sativa
ggttgcgctgaaacatgcaacacagcatgcatagatggaactaattggcagagaccacagggacaaacggggtggcgcacagcatcagtggcgagcggcggcgaaccccgaggcctggcgcctccgccatgtccacctcatttacaccctccggtagcgaccagtcgaagtggtagagaagacccgtaaacatgagctccatgcttgcgaggccatagttgaaaccggggcacatcctccggccagagccgaaagggatgaactcatagttgcttcccgtgaagtcgagggttccatcctcgaaccgttctggcctgaactcctcaggattatcccagtacttggggtcgcgtcctatcgcccacgcgttgatgataacgcgtgatttggcagggatcgtgtacccgtcgagctcgcacacgtcgatgc

SEQ ID NO: 415683 - DNA, 396 bp, Oryza sativa
tcgtcttcttttcgcgacaggatacataaaacacggcgggaggttacatatctagtgaaggatacattagacaagcttaaacaagctagcgaggcggatcatcgcgttgaagacagcgctaccaaaaagattgctgatgcaaagctagctaaagattttcaagcagtcctaaaagaattccagaaagctcaacgattagcagtagagagagaagctgcatatgcaccttttattactcaagcgggcctgccacagagctacaactcaaatgaagcgaacaatggtgctgataagttggcagagcagcgcacacagcttctagaatctagaaggcaggagttggtcttcttggacaatgaaatagtgctcaatgaggccatcattgtggagagggat

SEQ ID NO: 415684 - DNA, 447 bp, Oryza sativa
aaagaaacagagataatataacgttatattgcacgaaatttattgatacaacaaaataattgactgttcaagcataaggtggtaaagaagacacaaaaaccttgccacgattagcacgctagtaactcaactacaaacgatacacacagcagcatcagttcactggatggagcttctccaaggatcattctaagctaaggcactcattccgatggcgtgtggcaatgcttctacggttcttcacgatagataccaagacacaatcaggcagtcttgggcttgggtttaagccgcttcaattgtgagtacaggaaaactccggcaagagcgactccggttcccagagagttgataggcgaaacaggggtgcggaagaacagaacggatgtcacaatgaccaccactcgcttgacacagttacccaccgagtgagtaacaggtgacact

SEQ ID NO: 415685 - DNA, 471 bp, Oryza sativa
tttgttttttaacaccctgtgtagctattatttatagactcccacaccatgaataacaaagggtcctctcagcaacatattcaccatacacaaagcaaactcatcaaaagtcaacaaattactggggaactttctattacgattaaacagcctatgccgatattcacatttctttatatgaaaaggcaaacgtaggtaacataccaaacagtaccatgcatagagaagaactgtgatgattaactaggtcataaccctgccatcttagtatcttggacccatactacaagaacgggacagacgcaaattccccatctcacgttcacttccaaccgtttctccacctgaagaagctgagatgtactgcttcctgcaggcaggacagcgcccatctgcctcaagaattctcttgtggcagaacagacacagatgaaaaccgcaggggcaagggaggaagcttgaatctgttgg

SEQ ID NO: 415686 - DNA, 441 bp, Oryza sativa
cgaacgcgccgctgttttatggaggctccgcccacgccactgtcggggagggtctttttagaagaggagggagaaggccaccatacgcaagcccaaacgacttaagcagccaggggagaggcaccgaatcctgggacgccgaccgacaggaccgattcgtgaggagactcgccgactagcttggacacccaaaggacagccaggagcttaggttcctctggatagacctcctcgccaagtgcgacgcgtcgctggggatgaagattgccacccggctcaacatgaagccacacatgtgatgcattatgcctgcgctgaaaaaaaaagaagacgcatacatgtcgcagccaggaacaaagattctgtcatatataccagacccgcacgcatgggcatacttccatatattgttccgcccgggcccgtgtacgcctttgtacc

SEQ ID NO: 415687 - DNA, 465 bp, Oryza sativa
cagaatcgttagtatgtgatcgtcggggcagggaacggggggggttacttccacaggacgtccgtctagcatggcatggctgacggccgcctttgcatcgtctccaaggagccagctccaccatacgagcggtcagccttgaccaaaggctatctttttcctccggacaagaaaccggctcgcctacctgggttccatacatgcgctggatctggtggacagcgacagactgctgaatggtacaaggagaatggcatagaggtgcctgatgaggatccagctgtagcatttgatggcaaaacgcaaaccttaaagacttcatcggggaaagttctgaaatacggctcacttattatttctactggatgcgaagcatcgagaatacctgagaaaattggaggggaattacctggagttcactacctaccggatgctgctgatgcctgagctctagcatcctcattg

SEQ ID NO: 415688 - DNA, 459 bp, Oryza sativa
tttggttttttttttttttttggtcctaaaatgcgtatatttgaattacacaaaggaccagtttggtttcatctttgagatacacatggattactatatggctattgaatacaatgcagtgcacagtagtggttttacaacagtttttttaaagcaggaaacatcagcctcaatcgaaatgatctgcagagaagtcaggctcatcaggcttctgcagcctccggatggcggtatcgtcggcacggaaccttctggaagcggaggcgaacttgtgcatttgagcaatggcactctcagcaatagtcttggtactgcttgaagtgccctcctgtttaggcttgtcagctggtggatgttcttctggccaccatgagtatgattcccaccggctcaggctctttgccagctttttcctctggtgctgccgccaagcagcctggatgaagcaggcagcccatg

SEQ ID NO: 415689 - DNA, 453 bp, Oryza sativa
ctttgttctatctgaatgctggaataagatatgtacaaggggggaatgatgtaatggcacccctcttctttgcatttcggagtgatccggatgataaaaatgctgaattcgcggaagcggattcattcttttgcttcgttgagctgcttagtgggttcagagacaacttctaccagaaactggacaacagtgctgttggcattcgaggtacactagccaagttatcacagcttgtagcaaagtatgatggagaactccagcaacatctggaaataactacggaagttaatccccagttctacgcattcagatggataaccttactgctgacccaggaattcaacttcgccgacaccattcacatctgggacacactattaagtgatcctggtgggccccaggaaaccttgctcagaatatgctgcgcaatgctgatccttgtccggaagcgcc

SEQ ID NO: 415690 - DNA, 445 bp, Oryza sativa
tgcttctgagggtctgaagttttttgtctttgaggtttgcctagctgatcgggggggggtttaggatcaagctggcaggaaaatcaggctccgtgctgaagatgtgcagggcaggaatgtgctcacaaacttttggggtatgaattttaccactgataaattgagatccctagtgaagaagtggcagacattaatcgaagcccatgttgatgtcaagacaaccgacaactacatgttgcgtctgttctgcatcggcttcaccaagaggcgcccaaaccaggtcaagagaacctgctatgctcaggcattccagatccgtcagatccgccgtaagatggctgagattatgatcaaccaggcttctacatgtgacctgaaagaacttggtttgaagttcattccagatgttattggtatggagattgagaagtttaccttcagcatt

SEQ ID NO: 415691 - DNA, 433 bp, Oryza sativa
tttggttcgaactcttttttttctccttgttttctatttcatttcattccgatagatagcaacaagcagttcaaacaccataaccaaagcgaactcaattcatggtaacatcacggacgaagaacacctaacactggatggatggatagagggcttctcgactcgagagagccactggacacgataacgactcgactcgatgataagatgattctgacacggatagctaaggataactggccacgatgggccccaccaatcagttcctccagttcccgccggagtcgccgccgtagccgccgccacggctgccaccgtagccgccgccgccgccgtcacggccgtcgccgtagccgccgccgccaccgtagccgccctcacggtgcccgtagccgccgccgccaccttctccgtagccgccgccttcacgacc

SEQ ID NO: 415692 - DNA, 382 bp, Oryza sativa
acatttttcaggaggtctatgaagctgactggaaggggcgattttttgatgctggaatccggtatgagcaccgccttattgatgacatggttgcgtacgcgcttaagagcgaaggaggctatgtgtgggcttgcaagaactactatggagatgtgcagagtgatttcttagctcaaggttttgggtctttgggtttgatgacatcagtgttggtgcgccctgatggaaaaaccatcgaagctgaagctgcccatggcacggctacccgtcatttccgtgtccaccagaaaggaggcgataccagcacgaaccagcattgctttggacctttgcatggacaagagggcttgcccacagggcaaagcttgacgacaacgctaga

SEQ ID NO: 415693 - DNA, 303 bp, Oryza sativa
gtcgtttgaagatttggttggtggactcaaagggggggggtgttgtctatacgaaaaactgtgttcagacattcaaaaaaccttgggcacatgagcatgagcccttgacaaccttgtacgatgctggtcagtccatcaaacctacagttttgattgggacgtctggagttggaagaacattcacaaaagaagttgttgagggcatggcttccttcaatgagaggcctatcatctttgcactggcaaattcaacctttcattctgaatgtactgctgaagaagcatataactggactcaggggc

SEQ ID NO: 415694 - DNA, 409 bp, Oryza sativa
ggcagaaagtaaatattttaacttaataacatccagagtacataacccattctcatgtcatcatgctaaagttgtttaatcataaaaaaacagctatgcgtctgcaaacataacataggagctctcagggaacaaaaaagggtagttctttcagtgtagaaccagcaacaaagaaagacttgctctaagctgaggcacccttgcccttcttcctctggagcttcttcatgtagaattccagctccttgccctcaaggatatagccatctgctcggccacactgcccagggcgggaagaaatgcaggccagcaacctcccactgccaaactgttcttcgatgtgggcgtcaagtgtgcgtccctgttggcgcttctcaagcttcctgacaacatggttgcttttcttcgc

SEQ ID NO: 415695 - DNA, 315 bp, Oryza sativa
atttttatgcagcatggattgagtgatgccattggggggggttgtttgacaaagttgggcggtgacctacacctgggtggactgttctaccatctgtataaccagattgctacaaacaccttggagcgagtggcttctctgacacaagctgtccgcaaagagttgaaacgtgttttcgtcatcggattctcaatcattgtttttggtaacaaaattagcacacaaactggaattggcacgtcacattgacctagctggatctgctatggaccttcacattaaggctaacattgcagaggtcaaaaggaaaaagat

SEQ ID NO: 415696 - DNA, 455 bp, Oryza sativa
tttgtttgatggcacttctatgatcatgatgtcacaaatgaaattgccgacacgtttcttataacaaacaaatcaactacattcaatcacatacacgaagattgaagagaagggatgtcagttgacaacatataagctttactgtgccagcttgtaagacaattacaagataactcctattgatttcaggtaacagaaccaaacttggaaattaattaacagtagccaagtagcagctcattattctttactagaaggtgtccaactaagtccagcaacaaaaaggtgaaacgtcaaaccaacagagaatagaagtgccataagattttaaaccctgtggtcaatgtaatctcagccgatgagcaatttgttctcttccagaaatgagtaggtcgggacttcgaggttgtatggtgcagggcccttacggattctacctgatatatcataatggg

SEQ ID NO: 415697 - DNA, 338 bp, Oryza sativa
gctgggtttttctaatgcaaaaatctacaaatgtgaggggggggagatgttaaagaccaatgtgctacaaggcctacggaagcggaaaagaagatagccctctatgcgatgcgcctggatccgaaaacactagaacgaaactcccgagacatgcttcttttgatgactgcccggggcaccacattcttatggctacaacgcttaatggagctgctaacatgggcggagctcttcatttgagcgcagccaacgaaagttgtccacagacccagacatcagagcatcttgctgctgatgaaatgatgcgtcagcaacatataatcaatctgcagaacaag

SEQ ID NO: 415698 - DNA, 389 bp, Oryza sativa
  unsure (1)..(389): unsure at all n locations
gtcaactttgtatcctgttaaggtggttgtcgctgacaggggggactattttaanattcaaatctggcaaaaatgcccatattgaaaaactatgccccctggtgcggacactgcaagaagctggcgcccatcctggacgaggcagccaccactctccagagcgacgaggaagtcgtgattgccaagatggacgcgactgccaatgacgttcccagtgagtttgacgtccaaggctacccgaccttgtacttcgtgaccccgagcgggaaggtgacatcctacgacagcggcaggacggcggacgacattcgcgacttcataaagaagagcaaggggaccgtcgtcttcgtcgcaccaccacccaggtgccaccggcattcgagaaggca

SEQ ID NO: 415699 - DNA, 455 bp, Oryza sativa
ccttgttgttcctattgacctatccaaggttctatttgggggcactgcaaacgtagtagagatgataccaaatccattactggataggatggagatcattgctatagctgggtatataactgatgagaagatgcatattgctcgggactatctagagaagaatacaagacaggcttgtggcattaagcctgagcaggttgaagttacagatactgctcttcttgctctcattgaaaactactgtcgagaagctggagtgaggaaccttcaaaagcagattgagaaaatttaccgtaagatagctctgcagcttgttcgccaaggagtatcgaatgagccagaccatgagtctgtcagtgcctctgtaactgaggaatctggtaatggtgattacaccacatcaaaagatgagattttgaaggatcctgctgtagatgatgctttaattcgccaac

SEQ ID NO: 415700 - DNA, 453 bp, Oryza sativa
  unsure (1)..(453): unsure at all n locations
gtaacaaggaaattactacagattgcctcggcaagaagctgccaagctggagtacgtagttagctaggtccaagtctggacaagatgcaattcatcaacgtaggattacacgtacacagagcggtgtacagagtcaagaaaattaagatagcatgcacgcacggagcgtgcaacataaagtatacagagatagagagagagatgaccagcgctgcattgatatgccccagctgttatttttactgtagctattattttggctagttgatcaactgcgagccagcatcgatcgatatatcgatcggtcggtccaagcaggattaatcgatctagctgaccttgctgcagtcagtggagaggctgatggggaagccgacgttgacgccgcacttgccggggatgccggcggcggcgccgaggttgagagacttgatggtgccngcgagggtcttg

SEQ ID NO: 415701 - DNA, 555 bp, Oryza sativa
cccacttttccgggagaccttcggcgcccctccggcgaggcgagcttgtcgaaatggtcgcccacaggttccatcagtaccaggtggtgggtcgcgcgctgccgaccccaaccgatgagcaccccaagatctaccgcatgaagctctgggccaccaacgaggttcgcgccaagtccaagttctggtacttcctgagaaagctcaagaaggtgaagaagagcaatggccagatgcttgccatcaacgagatctttgagcgcaacccgaccaccatcaagaactatggcatctggctgcgctaccagagcaggactggttaccacaacatgtacaaggagtaccgcgacaccaccctgaatggtgcagtggagcagatgtacaacgagatggcctcccgccaccgcgggagggccccctgcatacagatcatcaaaacggcgacggtccacttcaagctgtgcaagaggggcaacaccaagcagttccacaacttcgagatcagttcccgctcgtgtaccgcaaggtcaggtccgctaccaggaagcttcggaccac

SEQ ID NO: 415702 - DNA, 409 bp, Oryza sativa
tttgttttttaagtgtgaaatgatccaagcacagttgcacaccacgcatacataatacaacatcatcagtaactggtacaaaatgtcaagagacaacacacggtttaaccgctggatcatagcacacatcaagtggtttggtaaatgaaatgaagttcttgcgttgatcgataataatgcatgcgcatgcaggtaagtaacacgagcactgcaatttattcgtcggcttgttatctagatcgagcgatgatacggtgtccggcggccggccggccggcgacgagcaggccgccggcggcggcggcggcggcggcgatgatatatcaaccgaggcgcatgtcgtggttgccgccgtaggccatgccgtgcaggttgggctggctgggcaccactcggaaggcgaacatgt

SEQ ID NO: 415703 - DNA, 338 bp, Oryza sativa
ccgttggtctcgtgcgccagaagatgaagtaccgggggggtctctttatgcggatgagcacctatccatcccatgggcccatccacttccgcgccccgtccaagatcctgtggcgcaccatccgcgggatgattccgcacaagaccaagaggggggaggcggctctggcgaggctcaagacgtacgagggcgtcccgccgccggacgacaagaccaagcgcctggtcatccctgacgctcttaaggtcctgagggtgcaacctggacacaagtactggctccttggtgagctttctaaggagggcgggtggaactaccatgaccccatcagggagctt

SEQ ID NO: 415704 - DNA, 414 bp, Oryza sativa
gttcttttaaaaggatggagcttctggtgctacgggggggaatgtttaagatgcatgctgttactgctctgccatttgttgaatactttcttcataaattgagggatcatggtgcaccctccttgcttgcacgctctcgctcttccgaccttgtcttgagcactgctaaaggtgctgaattcgtggtattcagaccctcagagattgctgccagcgttgctcttgcggcgattggggaatgcagcagttctgtaattgagagaggtgctactagctgcaactatttggacaaggagagggttttaagacgccatgaaatgattcaagaggagattgctgtgggaagcattgtcctaaaggctgctggaacatcaatttcctctgtgccacgaaagccccatagcgtcctggatg

SEQ ID NO: 415705 - DNA, 419 bp, Oryza sativa
tgcttctgagggtctgatgctcagagtctttgaggtttgcctagctgatgttgaaggtgtcgaggatcaagcttacaggaaaatcaggctccgtgctgaagatgtgcagggcaggaatgtgctcacaaacttttggggtatgaattttaccactgataaattgagatccctagtgaagaagtggcagacattaatcgaagcccatgttgatgtcaagacaaccgacaactacatgttgcgtctgttctgcatcggcttcaccaagaggcgcccaaaccaggtcaagagaacctgctatgcttaggcatcccagatccgtcagatccgccgtaagatggttgagattatgatcaaccaggcttctacatgtgacctgaaagaacttgtttcgaagtttattccagaagttattggtaagg

SEQ ID NO: 415706 - DNA, 292 bp, Oryza sativa
cttactcgtccggtcgagaaagattgctgtgttgggattgatcaatacagcctacatgtttgtggaatttggctgtgggtttgtgagtgatagtcttgggctgatctctgatgcttgccatatgttgtttgattgtgctgcactggcaattggtctctatgcgtcctacattgcgagattgcctgcaaatgggatgcacaactttggaaggggcaggtttgaggttctgtcagggtatgtcaatgcagtgttcttggctcttgctgctgtgatatctgtgttatcttccctt

SEQ ID NO: 415707 - DNA, 446 bp, Oryza sativa
aataacacaaggcaagcatagcttaataaagaaagtaaatattccagtagtgtctccctctcccagctagcccaggaagcagcacagcctaacagctacaaaaatttccaaacatagttgcatacggaaaagagaaaaacatggaagccgtccttaaccacaattcaaatagaccccgtccttaccactcctcccaaacgagaaagttggtcatattaaaacaaaaacaaaaacaaacttttatccagaaccttacttcctaagacataatctagagaaggtcagcgacgttggccggcagctcctcgatggtcacattgtagaacctctggatgtcgaacagcatcctctcatcatcgcgggtgacaaagttaatggcaactcccttcctgccaaaccgaccactacgaccaatgcgatggaggtagttctcaggctgggtgggc

SEQ ID NO: 415708 - DNA, 473 bp, Oryza sativa
gttctttgacctctacggcgccaacggcaaccccgtgggcaggtggtatttacctgacttcgaacatggctcaatcaaggatgattattgtgggggaagctcaggatacaactcggaattactgaagatcatggaaactaaccaatctcccccttgcaagcgaccgcggagagatcgaaaccgtgaaaaggcaccctcctcaaacaaaattgaagtcatggaacaagagatatggagagatttccctgaagatcttttcgaaactgtcatagcaaggcttcctgttgctgcaattattcgattccgcactgtctgccgaaggtggtcttcccttttgggctcagacagtttctctcgtcagtactctgaagctccacatggactgccatggttctatacaatcactcatgagaattcaaacaacaatgttgggatgaatgatcctttgctgaagaaatggcatcaccaatctg

SEQ ID NO: 415709 - DNA, 257 bp, Oryza sativa
gacattttcggtattgttgagggtctgatgaccactggggatgccatcactgctacccagaagactgttgatgggccctcatctaaggactggaggggtggaagggctgctagtttcaacattattcccagcagcactggagctgctaaggctgttggcaaagtgcttcctgtcctcaatggaaaattgactggaatgtctttccgtgtcccaactgtcgatgcttctggtggtgatctgactggtaggcttgagaa

SEQ ID NO: 415710 - DNA, 187 bp, Oryza sativa
gtgggtttcttttccaccgccgttagaagaagagctcgggggggccttgtttttgagagaagatgcctaatcacacccatgagattaaggacttcctcctcaccgcgaggaggaaggatgcccgttcagtgaagatcaagaagagcaaggatgttgtcaagttcaaggtgcgctgctccaagtactt

SEQ ID NO: 415711 - DNA, 419 bp, Oryza sativa
tttgtttttttcatcaagcaggtgcacagttatgcatgcaaattctttattgcaagtatgatgagattgaacactttctgtttacatctctgacaggttaagtcggcgaaatcgaacattacaacaactaatctccacctagcacaaaattgggctggcatccaaaacttttattaacttaacccagaggaatatttgggctaattactcacaaccgtcgcttcgccattcgcctgttatgtgtatttggcagctatctcacgcatcaggctttcaggagcttcaataccacctgtgaaatgctcaaactgacccatggcttgtctgacaaacatctctacaccgctgacaactttaatcccacatttttctgcttcttcgagaagccgggtaactttcggggcatataccgcattaaa

SEQ ID NO: 415712 - DNA, 371 bp, Oryza sativa
gaaaatggttttctatgggggagttgatcatgctttgagaggggaggtttttgaaattcttgttgcggtattcatgaatatgattcaacatatgctgagagggaataccttgctgtcatgaaacgagcagaatatgaagtcataaaatctcagtggaagagtatctcagccacccaagctaaaagatttcaccaagttcagggaaagaaaaggcccaatcgacaaagaagtggcgagaacagactggtccattccctattatgaaggagatgacaatcagaacgttgcagctttacgtgaaatttctgtaacatattccttctacaatttcgaccctggttattgccaaggaatgagggactttttggctt

SEQ ID NO: 415713 - DNA, 334 bp, Oryza sativa
ctttgttgttcctactgggtggaaattttttggcaatgggagggatgcttgaatgtgctcaatatgtggtgaacaaagcttcggcactgggtctgaccacattcgtgagaaagatggcatctgggctgtgcttgcatggctttctattattgctttcaagaataaggacatccttggaggagataagcttgtcactgtatgaagatattgcccggcagcactggtccacatatggtcgccatgattacacacgcctatgactatgaaaatgcctatgctggggctgctaaggagtctatggtgatcctagaaagcatgcgaggatcactttctg

SEQ ID NO: 415714 - DNA, 202 bp, Oryza sativa
cttggtgattagctgaacgaggatgcaatgcttgggaaacgggatggtatgaaggatgtgatcgaacatgtgaacaggcaatttaaagatccagacttgacaacttttgtatgtgttagtatcccggaattactttcattggatgaaacaaaaagattgtggcatgagttagcgtagcatgagatggatgaacatctttatt

SEQ ID NO: 415715 - DNA, 434 bp, Oryza sativa
ggggcgcaataccgcatttcataccaacacatctagaaagaggtttcagtggatgcagcattgcagttgagcataacagcccaccgagacattgacaacgtactgaggatggccataggccgaacaaattttattacagaggcgactcacagtggtagtctgctggttcacactggccctagcctagatgcaaaacaagagtaccacgggcaatgttctagcagtagtagactagaaacctcttaagcatcagcgaaccccagttcggagagcttgaggtgggcctccttgtagtcttcaaagaaagccttctcatctgcagcatatttcttgaccagtgggcggaaggcagggtcactcaacagggctttgtcactaggaagctgaagaaggccctccttgtcaccactcacaagctccgtgaagtaagagtt

SEQ ID NO: 415716 - DNA, 430 bp, Oryza sativa
tttgttttttttattttttttgttttttttttttttttttttttttgggcaacaccggataaataaataccagctcgatgatacaaatagtttaagcctaaccatagaagtaacacagcagggttaaaaaagagccaacaaattcatgggagcaacatgtaacaccacacatcaaaagttttcaacccatcaggcacgcaggaaacgttcacattccacagacaagctaacactagcatgcattggcctaattcaaactcttatgaagagactcaggctgaagcatgatagactcatgatcctctctactcgatcagatcggcatcgtcatctgggagagggtgggctgctgtaaccgcaagctcaacctcatgctggtgctgcattggcaggtcaatgggaacttccggagggttaagagcaacagctt

SEQ ID NO: 415717 - DNA, 444 bp, Oryza sativa
tttggttgcttgattccaatggggaatcgttatttctttttccctagtccaagacagcaagagcttcacgaagggaagcaacaaaatgcatctggacctcctcatcgatcgtcaagaacaggggcacatgtacaaacagagattcgatgccgtgttgctctgcgaaccgaagagaacgataatacacatagttgcatacaaaccgaccagcatcgtctgatggcattacatcgtagcctgtcttccggagtgacttggtcaactcatttaccggaagcgtaatctctcttgtccgtgagatggctccatccgatggtacaataggaaccctctgaggtttccaccctagctcatctggacaacggaaggtggcttcgttaacagcctgattctcaagagcaaacctttgtgcaccactattaactccaaaacgggatctgaaca

SEQ ID NO: 415718 - DNA, 361 bp, Oryza sativa
cggcgagtacggttggaccgccaacaggggggggttttttaaagcccaggcgctgttggactccagcatgtgtgggtacatgtcctccaagaagaacatggagattaatcccgagaacgccataatggaggagctttccaagcgtgctgaggctgacaagaacgacaagcctgctaaggaccatgtcatgctgctgctcgagacggcgctgctcacatccggctttagccttgacgatcccaacacctttggcagccgcatccaccgcatgctcaagctggcccccgagcattgacgaggacgaggaggctcccgaggctgacactgacatgccccccctggaggatgaccctggcgagag

SEQ ID NO: 415719 - DNA, 428 bp, Oryza sativa
ttttgttatatggtactgagagagctaagtattcagaatccgggcctcattttattcgggaaaaagatgctcaggccagttccaggtcacctgatggcaagctcacaagttcagacagtcacgcacacacatacaatactctcggacaaactgtaacaagatgcaagctcccttgagattatcttatctcactctacgatgactgccggagctctgggcgcacgaaatcggcgttggcaggcacggagatgtcgacggtgggccgcagctcagcgcacacctcgattgcgccatggacggggtcggacatgaagttgctgatgaggtcctggttgatgggagcatccttgtccactgtcacgaatgcttgctgggtcaggatgtagtcgaagcgtggcgcccatttccttgatcccagacgagccgtc

SEQ ID NO: 415720 - DNA, 511 bp, Oryza sativa
gtttggttgttatacgtacaaggcaaagaaattaatggggcttgtatcaactctagttttgctgttcaccaggatgttgatggaagggcaactgatgttgctctaggatggtcagttgcgctgggatctcccttcacatttgctactaccttagaacaggagtacaagagcgatatctttggggagcgaggcattcttcttggagctgttcatggcatcgtggaggctctgtttaggagatacacagagcaaggaatggatgaagaaatggcatacaaaaacaccgtagagggcatcactggaattatctcgaaaactatctcaaagaagggaatgcttgaagtgtacaactccttgacagaggaggggaagaaggaattcaacaaggcctacagtgcatcattctatccttgcatggacatactctatgagtgctaccaagatgttgcctctggaagtgaaatcccggagtgtgtgttggcttgacggagattttactgagaacgaaggc

SEQ ID NO: 415721 - DNA, 422 bp, Oryza sativa
ggaattaaaggagatttacgtaatttgtttgtacagaagaagagagtagtaattgattgggggtggaagacgacacaggtagcagctgcatggagtaattaatattctagctatatatggatcgagacgggggacgaattcgattattgagactgggggcagacgatatgatatgatatgatcagtagtcggcggtgggcagctggtcgtgcgggcgctggccgatgaagatgatgtcgtagatgagcgcggcgatggcggcgccgacgaaggggccgagccagtagacccagtggttgtcccagactccggtgacgacggcggggccgaaggagacggcggggttcatggaggctccgtcgaaggcgccgccggcgaggatgttggcgccgacgatgaagccgatggcgatgggggcgatg

SEQ ID NO: 415722 - DNA, 306 bp, Oryza sativa
gattatgttcggtgagccggatcgcggtgggcgcccggggggtgttgtcccacccggacacggtcaaggccgccgtcgccgagttcatctctatgctcatcttcgtcttcgccggatcgggatccggcatggccttcagcaagctgacggacggcggcggcacgacgccgtcggggctgatcgccgcctccctggcgcacgcgctggccctgttcgtggcggtggcggtgggagtcaacatttccggcgggcacgtgaacctggtggtgtcatattgtgcgttagtgtgggggactcttcttcttt

SEQ ID NO: 415723 - DNA, 396 bp, Oryza sativa
tttttgtttaaaaaggtaaactcttcataataatattattaagacattatagctgatgtcttttgatcacactgcgatcaaattatgcatcataggcagtacaactccgcgtcaggaaaaagtagaggagatatatttcttgttattacttaatacagcattcacatatatcgaaccatccggtacgtacgtagtagtactccacgcgttcacatcgatgatcggggacgatatcctcaggtagtacttatgcaaaagcgttggcgtaaactgacgaactgaacggacggacggtcggatttagggctcccataagtccaagttgccggagacgaagtcgtagtggccgccgacgagcttgagggtgcccgtggcgatcccctccttgacgaacgg

SEQ ID NO: 415724 - DNA, 483 bp, Oryza sativa
cctttcttctcctcctcctcctccaacagcagcaggctggcttttttttaacgctcccgtcttatcctcaacacccccgtctttgccgcccccgttgctcccggtgtgatggacgccgtcgtctaccggctaaaggatgggttcgtcaagttcaagacctgagtctatgacaagaagccggagctcttcgagccgctcaaggccggccaggcacccaagtacatggtgttcttgtgcgccgactctcgcgtgtgcccgtcggtgaccatgggcctggagcccggcgaggccttcaccgttcgcaacattgccaacatggtcctagtttactgcaagatcaagcccgctggcgtcgggttcgccatcgagtaccccgtctgcgccctcaagggcgaactcatcggggtgttggccacagcctttgcggtggaatcaaggcccttctttcacttaaggatggggcttctgattcctttccttcgt

SEQ ID NO: 415725 - DNA, 405 bp, Oryza sativa
gaaggcaaaggaaatttcccgcaaatacttattcatatgttttgacaacatttctcccgacgcatgctcattgtggcagacgcagctgaccacctagagcttttagttcaccattattatttagaccaagcatacgtcccaagatcagaacacatgcttacaagcgaaaatactaatagcctggctggctgcttcacagaataaccaaacgacaacctcaacagataaaaatgccacggaatgaaaacaaagcagcgaatcgtcaccagaagtcccatcttactcatcaaacactccatcattctcctccaacgcatcctttccccaagggagaagattgcccagtttaccttccttaacaggagcagggttcaccatattctcagcctcgaagcagtgcaaaac

SEQ ID NO: 415726 - DNA, 431 bp, Oryza sativa
gagaaatccgtaggctcagaggatttttggtagtcgtgtttcgtgatattcgtgaagagggggggagctaaggggggattcgtaagatcagaattggatcacgcgggggcgcgctcgggatcgggggttccaaacacagcttcttcgttgaatttaagtggatgtactaatggagtcaaagggtggcaaaaagaagtctagcagtagtcgttccttgatgtatgaagctccccttggctacagcattgaggacgttcgacctgccggaggcgtgaagaagttccagtctgctgcttactccaactgcgcgaagaagccatcctgatagccctttcggcttctccatcctagtagcttaggatttcttgcaattccattttggcacttttcttctgacctatttctctggctgctgcttcctgataatcgac

SEQ ID NO: 415727 - DNA, 419 bp, Oryza sativa
acaacattaatgttacatttctttgtaattaccatctgaaagagccagtcacggcaactgaccacctcaacacactacatttagacagaagaattacaaacttacatttgctaattagaaccctacactttgtatggtttttgtatggtcaaatacattccaattcatagggctttacatgctagggagagctgttttctctgcttgtttttcctcctcctcccctacaatcttcttccagaaccaatgcttcctccagacctgctccatctgctccatgggcagcttctttgtctccggcaggaagaaataaacaaacactgtcatcaagcagatccatcctgcaaagaagaagaatgtccctgacttgatgcggcataaaactgcaaggaatgtctgtccattcacaaatgtcatca

SEQ ID NO: 415728 - DNA, 326 bp, Oryza sativa
gtttttggtcaagttggtgcacttgtgctatgtcgcgacaagggagctagcttaccagatttgccatgaatttgagaggtttagcaagtaccttcctgaggtaaaagttgctgtcttctatggtggcgttcacataaaaaaacacaaggatctgttgaagaatgactgccctcatattgtggttggaacacctggaaggatacttgctctagctagagaaaaggatctttccttgaagaatgcgaggcatttcattcttgatgaatgtgacaagatgcttgattcgcttgatatgcctagagatgtgcaggagatacttcaaaatg

SEQ ID NO: 415729 - DNA, 453 bp, Oryza sativa
tttgtttttttttttttttatgacaaatgatattttcaccttaagcacacaatccaactccacaatgaaagttgctaccaaatacccaaagggttaacaaaacgtctagggatggtggtttaggggtacaggaactcaggaaatttaggacagtgaatcgacgacgagacccagataaataagagcctgactggcggggacgagttttgtgatacaattccttaatggttgtgactctgtatgttttaagagaatccttgttcctacatacccaaaccgatcataactgaaagttcagtagtaatcacatggaacaggtgaggtttacttcgggccgatgtccttcagcgcgcagatctgctcctctcccatggcagacataacagtcaccaccaggtccttcccttctccaaatccatccttgatctgactaagcaggttatcatcagtagg

SEQ ID NO: 415730 - DNA, 464 bp, Oryza sativa
tcgcctttccgtcgccgccgccgccgccgccgagcgccggcgcgaccacctctcgcaaggggattttgtaggggtttctgatccgaggagcgggcgatgtcggactccgaggagcaccacttcgagtcgaaggccgacgccggcgcctccaagacctacccgcagcaggctgggaccatccgcaaaaatggctacatagtcatcaagaaccgcccctgcaaggttgttgaggtttcaacctctaaaactgggaagcacggtcacgccaagtgccactttgttgcaattgacatctttactgccaagaagctcgaagatattgtgccatcttctcacaactgtgatgtcccgcatgtgaaccgtacggagtaccagctcattgatatatctgaggatggatttgcgagtttggtaactgaaaatggccacccccaggatgaccttaggctccctactgatgatac

SEQ ID NO: 415731 - DNA, 508 bp, Oryza sativa
ccgtctgctaactttgatcaaaagattggtgtacggatcatttagaatgctttgaagacaccggtgcacacgattgcttccaacgcaggtgtagaaggggctgttgttgtcggtaagcttttggaacaagataacaccgaccttggctatgatgcggctaaaggtgaatatgtggacatggtgaaggctggtatcattgacccactaaaagtgatcagaactgccttggtggatgctgcaagcgtatcatctctgatgacaaccacggaatccatcatcgtagagatcccaaaggaagagaaggaggcgccagcgatgggaggcatgggtggaatggattactaatcaacacccattaaagtaaactaaaaacatactcctgggatttaggattttttttgcggtgcaagttcatcgtcgatgtattttttgttcttgttgatgaggtggttgtcagacaattttgattccactggcggtaggacctctcggttggaacgaataaaat

SEQ ID NO: 415732 - DNA, 430 bp, Oryza sativa
gaagacagaacacagaatactttattcttccaagctgaaggatcataccacattgtacactaaaagatagcatttccattgtgtctcaaaacctatcataactcagaacgtcctggtactcatctctctgtgcttaattgtctaacaagatacaaggtgacccttggatttcctctcatccgacaaataggaaaagaaataaacaagaggatagagcaggaaaccaagatgcatatatcataacctggagcagtggccttggtgtatcatgcctttctatctatttaacaagttttacctagcctatcttggatgaaaaatgagctcaggctggtagctccagcttcacattgttcttccagctcattatgtaatagtagaagaagtcagcatacaagagagtctgcacgatgcccgcaacccagcttat

SEQ ID NO: 415733 - DNA, 434 bp, Oryza sativa
cgattacttgagcctcgacggcgacgaccccacgcgggcggttgagatgaacgcgtggcggctagccggggacatgacccacctcctcagcgtggtggtgctcctcctcaagatccacaccatcaagtcctgcgcaggcatatctctaaagacccaggagctatatgcacttgtgtttgctgctcgttacttggacctgttcattcattttatatctctgtataacactgtcatgaaggtggtctttctggcaagttctttctcaatagtttggtacatgaggcggcataagattgtccgaagaacctatgacaaggatcatgacacctttcgtcatcacttcttagcggtgccatgtttggctctggccctccttattaatgagagggttacttttagagagggtatgtgggcattctccatatatttagaag

SEQ ID NO: 415734 - DNA, 497 bp, Oryza sativa
cctttcctaccctcttctccccggccgcgcccggggccggtttcgtcggacgtcgcgatgcctgctccccgcttactccgggtgctcctgctgctcgtcgcgctagcctgcgccacgtcgggggtcgggtgctccgacccgcggttcccgctacctcggccgcgtccgggagctccaccgcggggagggtcgccccgcggccgagcaggaggccgtggcgcgcgggctcctagcgctccttcttccgtcgcactccgggagcttcgatttcagggtcatctacgcggaccaatgtggtggaaaggcatgcttcattgtggacaaccatccattgtttgatggagaagggactccacaagtacttttacttggaacaagtggggttgaaatctctgttggtcttcattgggacttgaaacattactgtgcagcacaatgtttcatgggataaaactggtggggcccattattatcagtgccaaggcctgggtcactac

SEQ ID NO: 415735 - DNA, 406 bp, Oryza sativa
gggcaacaccggataaataaataccagctcgatgatacaaatagtttaagcataaccatagaagtaacacagcagtgttaaaaaagagccaacaaattcatgggagcaacatgtaacaccacacattaaaagttttcaacccatcaggcacgcaggaaacgtccacattccacagacaagctaacactagcatgcattggcctaattcagacttttatgaagagactcaggctgaagcatgatagactcatgatcctttttactcgatcagatcgtcattgtcatttgggagaggttgtgctgttgcaaccccaaggttaagcctaaggttgttgctgcattgccaggtcaatgggaacttccggaggtttaagagcaacagcttcaacgaaatgcaggttcgggt

SEQ ID NO: 415736 - DNA, 519 bp, Oryza sativa
ctagggttttgttggcccccattcctcccccaccggggggttctcccctccgccggtcgcgtcgccgcctttttcccctatggcgctgccgaatcaggggaccgtggattaccccagcttcaagctggtcatcgtcggcgatggcgggactggtaaaactacatttgtgaagaggcatctcactggagagtttgaaaagaaatatgagccaaccattggtgtcgaagttcaccctctagattttaccaccaactgtggtaagatccgcttctactgctgggacactgctggacaagagaagtttggtggacttagggatggatactatatccatggtcaatgtgcgataattatgtttgatgtcacttcaaggctgacttacaagaatgttccaacatggcatagggacttgtgcagggtgtgtgaaaacatcaccattgtcctgtgtggaacaaggttgatgtgaagaacaggcaggttaaagccaagcaggtcacattccacaggaagaagaatctg

SEQ ID NO: 415737 - DNA, 406 bp, Oryza sativa
ccagcaacagagatgataacttaagaattaagatctccatcacataaaaacatacagtgactgagtactggattacacgattgagttgttcagggttcagataggaaaaacatcttggggactagagatagagggaatcgacagatgcgcagcagtagcgcgcgggaaacaggacatcacgattgcgttgcatgtcgtcggctgcgcaacggcggcgcggggcttaagacctgctcttgaatgggatcgccctgatgatcacctgggggtagatggcagccagggcagcgccaacgaaggggccaacccagaagatccaatggtcattccaggcatgggccttgttgtagatgatggcagcgccaaggctcctggctgggttgatgccactaccggtgatggggat

SEQ ID NO: 415738 - DNA, 492 bp, Oryza sativa
gtctccactcacacgcattgcagaggagaggcgacaatggaggggaaggaggaggacgtgcggctgggggcgaacaggtactcggagaggcagccgatagggacggcggcgcagggcgccggggacgacaaggactacaaggagccgccgccggcgccgctgttcgagccaggggagctcaagtcgtggtctttctaccgggccgggatcgccgagttcgtcgccaccttcctcttcctctacatcaccatcctcaccgtcatgggggtctccaagtcctcctccaagtgcgccaccgtcggcatccagggcatcgcctggtccttcggaggcatgatcttcgcgctcgtctactgcaccgccggcatctccggaggacacatcaacccagcagttacttttgggctgttcttggccaggaagctgtccctgacccgggccatcttctacatagtgatgcaatgcctaggggccatctgcggagctggagtt

SEQ ID NO: 415739 - DNA, 411 bp, Oryza sativa
gaattgtataatctgagatatattgcagctatagtttgcgttgtataatcagaacggaaatggaatgaatcctaatacacacatctaacttttgattaggaaacactgaacaaactgcaactgcagctaggcactctggaatgttcacgcaactgaaaaaaaaaaaagtaggacttgcctccaaaccatttaagatcactatgctccgagtctacccgcgaatctcacacctggctctctacaatatgatgttgaacgctccattgtacatatcaagcagagcagcatgccctctttgtgtttcctgcagcgctgtcaatgctgatagttttaccctgggaaggcagcggagcagaagcagcagctgcttctttggcggccagtgctttcctgttaacaatgccatagacc

SEQ ID NO: 415740 - DNA, 497 bp, Oryza sativa
tcgactccaagtccaccatcggcgtcgagttggccgccaaatccctgcagatggagggcaaaacaataaaggctcagatctgggacacagcaggacaggagagatatcgtgccatcacaagtgcttactaccgtggcgctgttggggctctccttgtttacgacatcacaaagaggcagagcttcgacaatgtccacaggtggcttcgtgagctccgcgaccatgccgactcgagcattgttatcatgatggtcggtaataagtctgatttgattcatctaagggctgtctccgaggatgaaggtaaggcattggctgaaaaggaggggctgttttttcttgagacatcagctatggaggccgtgaatgtggaggaagcctttcagactatcatcacagaggtctatggcattgttaacaggaaagcactggccgccaagaagcagctgctgcttttgctccgttgccttccagggttaaactatcagcattgacag

SEQ ID NO: 415741 - DNA, 445 bp, Oryza sativa
tttgttttttttttttttttttaccaaatattcaaaccatgcattgctattgtaattacacatgcagacaataagaattcctagatgccaagtggcatgaagctgtaaaaaaaaatctagagactactgtttatgcacagcagacataaatgaaccgagtcttttggcatgttaacactggagcaactacgtttcagtcagcatcaagaagatgattccaagggtaagtggcagtgtgacacacgatagacacccgagtatatcgttccattagctactgcagcagccacccccttgagaagacgaggaaccagcacctccggattggcccgggaccgtgtaaccaagtttgattccattagcctcattagataaatcaaagacaccatcttgaattttcttgtatattgctccagcagtcttgacaaaagccttctcaacattt

SEQ ID NO: 415742 - DNA, 456 bp, Oryza sativa
ggcaggaggagggagacacctcgaggaaaccacagcactcaaagaacaagaaaggcaataccccttctcccaccaccaccgtttccgtccatctccatcctcaccgccggcgacgctcacctccgacgaccgatcggcgacctgcttcagccatggcaatggcttacaagatggcgacggaggggatgaacgtgaaggaggagtgccagaggtggttcatggagatgaagtggaagaaggtgcaccggttcgtggtgtacaagatcgacgagcggtcgcgcgccgtgctggtggacaaggtgggcggccccggcgaagggtacgaggagctcgtcgccgtgctgcccatcgacgactgccgctacgccgctcttcgacttcgacttcgtcaccgtcgacaactgccagaagagcaagatctttttcttcgcctggtcacccaccgatctaggataa

SEQ ID NO: 415743 - DNA, 404 bp, Oryza sativa
tttatttacttgcctgagtctatgcttaaatgggtgggtttatttgagtgtcacgtgggttcagccagcaaacaaaggacagtgatggtgatcgtgtcacccaaggccttggaaccgtgtggagttttattttagcacggtctccactttgacaagattgcttagatattgctcttaagtgtgccattcactcttaagatgaagtcaggggaaaggcagttagattggttacaaaaaaactctatgaactaacatacgcattataaagagttgagcagtttgccatcgacagtcttttggcaattgctaataaacatggtgtggagactgacattaatttcacattcttgaaagaatcttcacctgagtttgaggcaggctatcaggaaacttcggtttggggc

SEQ ID NO: 415744 - DNA, 505 bp, Oryza sativa
gtttgattaacccagaccgcattgagtgctatgcgggaggggttttgtttaaaggcaatgttctggaaccgcaagggttaattgagatcaagttcaggtcagaggaactccaggattgcatgagtcggcttgacccaacattaattgatctgaaagcaaaactcgaagtagcaaataaaaatggaagtgctgacacaaaatcgcttcaagaaaatatagaagctcgaacaaaacagttgatgcctctatatactcagattgcgatacggtttgctgaattgcatgatacatccctcagaatggctgcgaaaggtgtgattaagaaagttgtggactgggaagaatcacgatctttctttctataagagattaccgaggaggatctctgaggatgttcttgcaaaagaaattagagctgtagcaggtgagcagatttcccaccaaccagcaatcgagctgatcaagaaagggattcagcttcacatgcagcttaatgggatgatga

SEQ ID NO: 415745 - DNA, 403 bp, Oryza sativa
gaaacatatctagcgcgaatagcaaagatcgagcccgcgggttcattgaaactgcttgggcgcggaacccgtccaagaacacccccaggaatatcataaggacgagggtccagacccgcaagggccagcccaccccgttccagccctacaccgaggtgttcggcctccagcgcttccgcgagtgcgagctcatccacggccgctgggccatgctcgccaccctcggcgccctctccgtcgagtggctcaccggcgtcacctggcaagacgccggcaaggtggagctggtggatgggtcgtcgaacctggggcagccgttgccgctctcgaactcgacgctgatctggatcgaggtgctcgtcatcggctacatcgagtttcagcgcaacgcggaagctggacc

SEQ ID NO: 415746 - DNA, 358 bp, Oryza sativa
ccaggggcattaattaacaactaattaaacaagggacgttttaacccctacccggccacagtacatatacacctagaaaaaaagactaaaggacccccaaccccaacaggggggggaaacccccggaaaaacaaccgacccccgaaattttacttttgggcgcaagcaaaaacaaacttgccggtcccggggttaacggccggaataaaaaaaaaaaccacgttaaaaaggcccagcggctcaatctggggggggggaaccccggcctcaatgtaaagctgcgcgagggcccccttgccggtaaaaatccccccgatgatggaaaaggcaatccctagctgggcaagccggcccacaa

SEQ ID NO: 415747 - DNA, 407 bp, Oryza sativa
gtccaattttattgtattatttaaggcctaccgcgggtgggtctatacactttgaggggcagcggccggccatcatcagtgatcctctacaatcatcgactttcagcaaattaagatggctgctgccttctcctccaccggtggagctccggcgtccactccgaccaacttcctggggaagaagctgaagaagcaggtgacatcggcggtgaactaccatggcaagagctccaacatcaacaggttcaaggtgatggccaaggagctggacgagggcaagcagaccgaccaggacaggtggaagggtctcgcctacgacatctccgatgaccagcaggacattaccagggggaagggtttcgtcgacttccttttccaggctcccacgggtgatggcaccccacgag

SEQ ID NO: 415748 - DNA, 510 bp, Oryza sativa
gaccacccttggctgcatcatcgcccctctgacgtgttggctctactggactgttttcgatatcggcaatcctgatggcatgttcaaggctccatatgccggcatctaccgtgagatgtcaatcctgggtgtcgaaggattctcagcgctgccccaacattgcctggcgatctgctcggtcttctttgtcgcagctattttgatcaacctcctgcgggacgtcactccgaagagcatctccaagttcatcccgctcccgatggctatggctgtcccattctacattggggcgtaccttgcgatcgacatgttcgttgggacggttatcctgtttgtctgggagagggtgaaccgcaaggaatctgaggactttgcaggcgccgatgcatctggtttgatctgcggtgatgggatctggagtgttccatctgcgatattgcccatcatgaggaatgaccaccaatgtgcatgtacttcaagccatccctaccagctgaaaatagcgcaaat

SEQ ID NO: 415749 - DNA, 434 bp, Oryza sativa
ttggttttttttttttttatgtaaatgtaatcgcgtatctactaaattcagttatttaacttgtacagaaaaagagaaacaaatccaatactttctcttgtacataatcgtgaacccctcgttttacaatggaaaaataattgaatcgtaccgcagcgatttgtttcattccatgtactgtactccttaacaaccaagaagaagcggaggcacacagcaaatatacagaagcacaggagatcgatcaagatcaatgcctctgcatctggtcctgctgctgttgctgctgctgcaagctgacgagcttgtggtaggcgccgttcctgttctcgatgagctggtggtgagcaccctgctcgatgatcttgccgtcctgcagcaccgagatgacgtcggcgttcttgatcgtcgacagccggtgcgccaccatcacg

SEQ ID NO: 415750 - DNA, 417 bp, Oryza sativa
tcgggtgtatcactctcgtcgttctcgccacgtgcccccttatagtcagcggccacattagcgagaaaatgttcatgaaaggctacgggggcaaccttggcaagtcgtatctgaaagccaacatgctggccgtggaggcagtgagcaacatccgaacggtggcggccttctgcgctgaggagaaggtgataaagctctacgccgacgagctgaaggagccagcgaagcagtcattccggcgaggccagggcgccgggctcttctacggagtttcccagccctacctcttctcttcctacgcgttggctttatggtatggttcggagctgatgagcaaggagaaggccagcttcaagtcggtgatcaagtcatttatggtgctgattgtgacggcgctggccatgggggagacgctgt

SEQ ID NO: 415751 - DNA, 411 bp, Oryza sativa
ggaccaaatattcaaaccatgcattgctattgtaattacacatgcagacaataagaattcctagatgccaagtggcatgaagctgtaaaaaaaaatctagagactactgtttatgcacagcagacataaatgaaccgagtcttttggcatgttaacactggagcaactacgtttcagtcagcatcaagaagatgattccaagggtaagtggcagtgtgacacacgatagacacccgagtatatcgttccattagctactgcagcagccacccccttgagaagacgaggaaccagcacctccggattggcccgggaccgtgtaaccaagtttgattccattagcctcattagataaatcaaagacaccatcttgaattttcttgtatattgcttcagcagtcttgacaaaag

SEQ ID NO: 415752 - DNA, 517 bp, Oryza sativa
cgtaaccctcctctcctctcctcgcctcggcgccgtcctgacgaaggaaatcccaccctctccccgccccgcgaatccgccgcggtaaaccaccccccgcgccgccgccgccggtgcgggccgaggcggcgaagatgtcgtacgcctacctcttcaaatacatcatcatcggcgacacaggggtgggcaagtcgtgcctgctgctgcagttcacggacaagcggttccagcccgtccacgacctcaccatcggcgtcgagttcggcgcccggatgatcaccgtcgacagcaggcccgtcaagctccagatttgggacacggcaggccaggagtcattcagatcgataactagatcgtactacagaggggctgccggtgctcttttggtttatgacattacaaggagggagacattcaatcatcttgcgagctggctggaagatgcaaggcaacatgcgaatgctaacatgaccataatgcttgtggaaaataatctgatctatcttataggcgtgct

SEQ ID NO: 415753 - DNA, 446 bp, Oryza sativa
tttgtttttttttttttttttgaccaaaacataggaggtttcatttcttcttctcaaagtagtgtagcatctttccttctttcaccattacataagcttaagcaataacagataacaaatcctcctcctcctctaggtaaaatattcaaacacaatacccttataagtacttattattaggaaagtagcgtgcatgggcataaatggcagcggggggcaggttaagaatcacaatgctgagcagcgaggaaacaaaacaccataatgggacagagcaaaagcctccgaaagggagcttttaggcagaaggcttctcccacttgaggggcttcaccacctcccaggtgaagtctgggtcgtcccttccgaagtgaccgtaagccgccgtcttgaggtagcgtccgttgccgcctttcttgaggtcaaggttgatgatgatcatgcca

SEQ ID NO: 415754 - DNA, 504 bp, Oryza sativa
aatttacctcctccacctcctcctcctccccccgggcggagctgtttggctcctccttctccgtcgccgccaccgccgccgcagataggagaagatggccgcacttgataccttcctctttacctcggagtctgtgaacgagggccaccctgacaagctctgcgaccaagtctcagatgctgtgcttgatgcctgcctcgccgaggaccctgacagcaaggtcgcttgtgagacctgcaccaagacaaacatggtcatggtctttggtgagatcaccaccaaggctaacgttgactatgagaagattgtcagggagacatgccgtaacatcggttttgtgtcagctgatgtcggtctcgatgctgaccactgcaaggtgcttgtgaacatcgagcagcagtcccctgacattgcacagggtgtgcacggtcactttaccaagcgccctgaggagattggtgctggtgaccagggacacatgtttggaatgcaactgatgagacc

SEQ ID NO: 415755 - DNA, 444 bp, Oryza sativa
tttgtttttaatctaacatacgcaaactgatattatcacaatgttagccgatgacaatggaaagagtaatctaggtacaagcggatcattgacggtggagacaagacattggctgcaccacaacacccaccagtggcgccaacaaggagcgctatccgttataggacgagagaaaaagtaaaacatcacgatgtgaagtgaaactgaataattctagtagacgatgatgatgatggataggctccttaggacgcccgccgcccttagcgtcttgctgctcccatcttgtccactggaaggctcactcgtcatcgtcttcatcctcttcgctgccctcgtcgtcatcctcatcattgacctcggacttggacttgtcagattcctcctcgtcgtcctcctcttcctccttggcgggtgccttcttggcagtgctctcgcccttgt

SEQ ID NO: 415756 - DNA, 421 bp, Oryza sativa
tgtttccttgtctcccctctccttcctcctctcctttgggctcctttgtacccccctctcacaagagagagagcgccagactctccccaggtgaggattcagccatgaagggggccaaatccaagggcgccgccaagcccgacgccaagttggctgtgaagagtaagggcgcggagaagcccgccgccaagggcaggaaggggaaggccggcaaggaccccaacaagcccaagagggctccctccgctttcttcgtttttatggaggagttccgtaaggagttcaaggagaagaaccccaagaataaatttgtcgctgctgtaggaaaagcagccggtgataggtggaaattcctgaccgaagcggacaaggctccctatgttgccaaggccaacaagctcatggccgagttcaacaaggc

SEQ ID NO: 415757 - DNA, 361 bp, Oryza sativa
ccttgctgttccgccctctccggcctcctcttcgggatgcgttttttgaagtttgacgtggctgagtacacggaagggttccctcaattgttctacttccaagattcctggaccaaggtgagcaacgtgatatttctggacgcgccggtggggacggggttctcctacgcccgtgaggaacaagggtacaacgtcaccctcacacagacgggacagcagctggtggtgttcctcaccaaatggctgggcgatcacccagagttcgcctcgaaccctttctacatcggcggcgacttctactccggctacaccggcccagtgacggcgctccagattgccaaccactactactctccgggcg

SEQ ID NO: 415758 - DNA, 437 bp, Oryza sativa
ttttgtttttttttttttttttgtgtttttttttttctttttttttttttttttttttttttttgttttttctttgtgttttattgcatgaatgaagagaaagacaattggaatcacataaaaagatggcccaaagcacactaatttttattacaaccgccacgacagtcttgatcgtactgactctaaggcgcaaaatacaaatcggcattaatcttttgcggatatcccgctctctaaaggcttcttattcctcagcaaatcccagttcagagagcttgaggtgggcctcggcgtaatccgcaaagaaggcgtcctcatccgcagcatatttctccaccagtggacggaaggctgggtcagccatgagggctttgtcacttggcagctgaagaaggccttccttctcgccactcacaagctcggtgaagtaagag

SEQ ID NO: 415759 - DNA, 502 bp, Oryza sativa
ggatcattcaagatggcacaccatggccaggagggggggtttggaccatcctggaggtgagtcaggttttccttggtcacagtggtggccttgataccgagggtaatgagcttccccgcctggtctacgtatctcgtgagaagcgtcctgggtttcagcaccacaagaaggctggtgccatgaatgctcttgttcgtgtctcagctgtgcttaccaatggacagtacatgttgaatcttgattgtgatcactacatcaacaacagcaaggctctgcgggaagctatgtgcttccttatggatccaaacctaggaaggagtgtctgttatgttcagttcccacaaaggttcgatggtattgataggaatgatcgatatgcgaacaggaacacttggtttttcgatattaacttgaggggtcttgatggcattccaggaccagtttatgtgggaactggttgtgttttcaacgaacctgtttattgggtatgaacccccaatta

SEQ ID NO: 415760 - DNA, 420 bp, Oryza sativa
  unsure (1)..(420): unsure at all n locations
ttttgtttttttaatattttcgggtctaccctttttctttttttttcctttttttgttgtcttttattcttatttttaaatttcttcctctcgactttcccaccaaacccatgggaagagaacaatcccacttcggtaccactcaacttcatctttccaacacctactacacactctggattatgcccccccacgcctctgctatagacatttgtatacaaggaaaccaactttccccctccccgtttaaaaaattaacaagaaacaaagcctctcccatgtaattaagctgtncccacccttgcaagcatcacatttcatgacacaagcacacactcacactataaccgccaaccaagaaggctttttcactccctttttttggccgggtgacccagggcagcttactccaactcaacg

SEQ ID NO: 415761 - DNA, 455 bp, Oryza sativa
tctcttcttcctccctttcttctcctcgccacctagcgtcgtcgacgctcgccggcggcgaggtgtgatctgtgaccgatcatcgatggggcctcagcaagaccggtcggcggccaagccgtacgcgaacggcagcacggcggcggcggcggcggcggggaggaaggagaacaacaaggtggtgcggtacagggagtgccagcgcaaccacgccgccagcatcggcggccacgccgtcgacggctgccgggagttcatggcgtcgggcgccgatggcaccgccgccgcgctcctctgcgccgcctgcggctgccaccagagcttccacaggcgagaggtggaggccgccgcggccgaatgcgactgctcctccgacaccttctccggcaccggccgccggtgatcgccgtggatttgattcggctcgtcgtgcgagtagatcagcatcatcagta

SEQ ID NO: 415762 - DNA, 426 bp, Oryza sativa
gcagttggaatgtgtgagatgcatatatatatatatatataacaacaagtatatgtatatgaaaataaataatgggggccggcaattgatgcaggtgagtgagagatcgaagatccatatatagtgtgtagtacgtaggtccgggctgggggctggggcgatgatggttatagtacaggagtgaaaaattagtgcatcctgccctgctgcgtctgggggagaaggccggggatgtaagggacgccgaacttggggatgaactcctggccctggatgaaggcctccacggtgaactccttctggacgtcctggtaggtgagggactggacgcccttccacttggcgcgcttgctcatgtcggcgccggggccatggttgtcaacctccgcgtagtagagggtgtccagggcgaagttgccgttccac

SEQ ID NO: 415763 - DNA, 312 bp, Oryza sativa
ctttgccgccgtgcagctcgggctgtgcatgaacgttttcttcaccatgccggtgatgatgcaccccgtgtacgaggtcgccgagcggctgctccacggcaaacgctactgctggtggctgcggtggctgctcgtcctggccgtcggcctctcggccatgtacgtgcccaacttcaccgacttcctggcgctcgtcgggagcagcgtctgcgtcctgctcggcttcgtgctgccggcctcgttccacctcaaggtgttcggcgccgagatgtcctggtccggggtgctcagcgacgtcctggtcgtcctgct

SEQ ID NO: 415764 - DNA, 431 bp, Oryza sativa
actaataagtaaattactagtagtagtataatatcactctgcttgtgttgtgctttcagccagcgtcaacatctctccctctcgacgttacagacaaaacccaagggaagagaacaacaacactacagtaccactcaacttcatctgtccaacacctactacacactctggattatgcaccaaacgcctctgctatagacatttgtatacaaggaaaccaacacccccacccccgcaaaaaaaataaacaagaaacaaagcctctcccatgtaattaagctgtaacaactcgtacaagcatcacattccatgacacaagcacacactcacactataaccgccaaccaagaaggcatcttcactacatttctcgtccgtggtgaccccagggcagcttactccaactcaacgtcatctctcctctacaactt

SEQ ID NO: 415765 - DNA, 514 bp, Oryza sativa
gtgtggttcttcttctcctcgatccggttgaggacgttgaggtagagagaggcagaggcgacgaggaaggatctgatctatcgatggcgcgcgtttcgcattccagaaagcggactagggctccctccaactccaactccaagcccacttcacaaacccaaccgccgccgccggagctcaccgaccgccctgtccgcgtctacgccgacggcatcttcgatctcttccacttcggccatgcccgcgccctcgagcaggccaagttgctgttccccaacacgtacctgctagtgggctgctgcaacgacgagctcaccaaccgctacaagggcaagaccgtcatgacccaggatgagcgatacgagtcccttcgccactgcaaatgggttgatgaggtcattcctgatgctccatgggtcctcacgcaagagttcattgacaaacatcagattgactatgttgctcatgatgcactgccttatgccgatactagtggagctgctaatgatgtcta

SEQ ID NO: 415766 - DNA, 429 bp, Oryza sativa
ttgtttttttttttttttttgttttttttttttttttttttttttttttttttttttttcacgttaattttctccaggggcattaattaacaactaattaaacaggggccgtttttacccctacccgtccacagtacatatccacttgaaaaaaagtttaaatgatgcccaagcccaacaatggggggaaaacctcgggagatcgaccgaccctcgaaattttacttttcgtcgacgtcgttaacaaacttgccggtgccggggttgatggcggcgataaaaaaaaaaaccaccttaaaaaggacgagcggttcaatctcgttgatggggaccccggtctcaatgttaacctgcgcgagggcccccttgccgggaataatctccccaataatggaaaaggcaatgccaagctgcgcaagccggccaaaa

SEQ ID NO: 415767 - DNA, 446 bp, Oryza sativa
cggtgaccgcggcagcttcgtcgacgaccagccggtgacgggcctcgacaaggccgtcatcgccccgggcaagggcttccgctccgcgctgggcctcagcgagggcggcccgctgttcggcttcaccaaggccaacgagctgttcgtcggccggctcgcgcagctcggcatcgccttctccatcatcggcgagatcatcaccggcaagggcgccctcgcgcagctcaacatcgagaccggcgtccccatcaacgagatcgagccgctcgtcctcttcaacgtcgtcttcttcttcatcgccgccatcaaccccggcaccggcaagttcgtcagcgacgacgacgaagagtagaattacgaggatcgatcgatctaccgaggtttcgccgccattgttgtgcttgcgcatcattgagactttctttcaagtgtatatgtactgtgta

SEQ ID NO: 415768 - DNA, 433 bp, Oryza sativa
ggcagagaatatcgacactcatgaacaaaactgaaccaagcacttgattgggtcacagtgcccttgaattgtctttgcaggaatgtcgacagatacaaaaggatctcttctgagatcaaattagtccaaaatgcaggaacagcttactcaggacatcttcactagttacatttattgcggaaaaaacacaccatcagatatctgcataatttggccaaaacagaaggtggggggaaaatggcagacgcctctcagattgactatctagtttatgcaagcgctggggtaggggtgcaaccagtggcaggagcaacttcagaggtcttctgtgcagaactgtacttctttgtgatgaacctgaagaaatctctccatagcaattcgaacattaaccaatttgtaccagcatcagatgtgccatcaccattcttgg

SEQ ID NO: 415769 - DNA, 436 bp, Oryza sativa
ttttgtttttagcaatgtaaatactcgcattccacaacagccgaagggcaataatcaggctcagaacaagtttaaaccgaacagaaaatagagagttttaaacgacacagtgcacacagcgggcatatgataataacggtcaatgcaacgagtgccatggccgtgcacaaaacttaacgaattatttaaagctagatatcttaaatgcagacacgcaaaccaccatttgaacgaggatcatttcttcttggcggcagccttggtcaccttggcaccggttgggtccttcttctccacgttcttgatgacgccaacagccaccgtttgccttatgttacgcaccgcaaaacgaccaagaggagggtactcagagaatgtctccacaaccatgggcttggtggtaattatcttaactataccagtatgaccgttcttg

SEQ ID NO: 415770 - DNA, 301 bp, Oryza sativa
gattaacttgaggtccttcaagtactcctgggttgtcgggtttgataaggccttgcgttagagaggcctcaccatcgatattgccctgtggaagttcgagaccaccaagtactactgcacggtcattgatgcccctggtcactgtgacttcatcaagaacatgatcacgggtacttcccaggctgactgtgtcgtgctcatctattgactccaccattggtggttttgaggcttgtttcttacacttttgtcttgacttcttgatcccattaaggaccatatttatttcatatattttcat

SEQ ID NO: 415771 - DNA, 494 bp, Oryza sativa
cggacgcgtgggcggttccgcttctcctctcccctcgccatgtcgcttgccgtggccactcccgcctccgcccgcctctccccgctcaccacctcctcccccgaaccctgccgccgccgccgcctcctcctctccgcagccgcccctctccggcgcacccgtctccggcgccgcatcgccgtcgtcgcgtccgtccccgaccccgcggcgcggccggcggagtacacgccctggctcatcgccggcctcggcaaccccggcagcaagtaccacggcacgcgtcacaacgtggggtttgagatggtcgatcgcatcgcgcgagacgaggggatcaccatgaacacgatccagtccaagtcgctgctcggaataggttcgattggggaagtgcctgtcttgttggtaaagccacaatcatatatcaactacagtggggagggcaatggacctcttgctgcctattatcaagtaccattgcgggatatccttgggat

SEQ ID NO: 415772 - DNA, 401 bp, Oryza sativa
tttgttttgacagcaaatagtgtggtaactttgaaactccacagtacaatacggcgttctagaggtccagacaaagagcatcaaagcaagaatgaagagaaagacaattggaatcacataaaaagatggcccaaagcacactaatttttattacaaccgccacgacagtcttgatcgtactgactctaaggcgcaaaatacaaatcggcattaatcttttgcggatatcccgctctctaaaggcttcttattcctcagcaaatcccagttcagagagcttgaggtgggcctcggcgtaatccgcaaagaaggcgtcctcatccgcagcatatttctccaccagtggacggaaggctgggtcagccatgagggctttgtcacttggcagctgaagaaggcct

SEQ ID NO: 415773 - DNA, 514 bp, Oryza sativa
caggggagcatgggcagcaagtcgtacccggcggggagcgatgagtacctggcggccgtgggcaaggcgaagcgcaagctccgcggcctcatcgccgagaagaactgcgccccactcatgctccgcctcgcgtggcactctgctggcaccttcgatgtgtcgtcgaggaccggcgggcccttcggcaccatgaagaaccccggcgagcagtcccacgccgccaacgccggcctcgacatcgccgtcaggcttctcgaccccatcaaggaccaacttcccatcctctcctacgccgacttctaccagcttgctggcgttgtggccgtcgaggtcaccggcggacctgaggtccccttccatccgggcaggcaggacaagcctgagcctcctcctgaaggccgtcttcctgatgccacacaaggttctgaccacctaaggcaggtcttttctgcgcaaatgggtttgagtgacaaggacctagttgctttttctggtggtcacaccctgggaagat

SEQ ID NO: 415774 - DNA, 443 bp, Oryza sativa
  unsure (1)..(443): unsure at all n locations
cagcactaaatcaacattttatttcgtctctcagacagtaccatgctgatgatgcgcacgaccaacacacaacacatgcttacatattcacaaaatgtatgtaggtaatgcacttgaaggtttgagatgctacaaacaaatgaaatcatttagtccattgaagagtggcttgtcaacatacttacaccaaactgactggatacagctgaacaactagatcagttattctgggtttctaagcgaacttcttgtcgaggtgacggtctatgatttcagatacggtttctaagaagattacttcacttgaccctgggagaacatggccctcggcttcctggacgatgtcctcaatctcagagtctctattcacagtttccctgnacagtatacgcccgatgtcatacggtgtgaggcctcgtgctgcacctttctttaaaagcatg

SEQ ID NO: 415775 - DNA, 427 bp, Oryza sativa
  unsure (1)..(427): unsure at all n locations
tttttgttgacgagagcggagcacactaagattcattcattcattcatttgatcaaagcaaacgagacgagctttcttcttgcgatcaaaaacacagatgggcaaccacacagttaacacaaactagatagttccacacaaaactaacgatgataacgatcggatgatgatgatggtagctcgattagatagatagataacttggccatgagggccccaccgctcagttcctccagttcccgtcggagttgccgccgccgcggctgccgtagccgccgccgtagccgncgtcaccacggccgccaccgtagccaccgccaccgccgtagccgccttcacggtgctggccgtagccaccgccgccgtcaccaccactgtagccgccgccaccgtagcctncgncttcgccgngctggccgtagccacc

SEQ ID NO: 415776 - DNA, 378 bp, Oryza sativa
ggttggttggcttctcctccccctcccggttcggttcgggtcggttcgggtccggttcgatttcggcttttccttcggttcgggggttggtgggaaagcatggcggcgccggatgttgagtaccgctgcttcgtcggcggcctcgcctgggccaccgacgaccgctccctcgaagccgccttctccacctacggcgagatcctcgagtccaagatcatcaacgatcgggagacggggaggtcgcgcgggttcgggttcgtgacgttctcgagcgagcaggccatgcgcgacgccatcgaggggatgaacggcaaggagcttgacggccgcaacatcaccgtcaacgaggcccagtcgcgccgctccggaggcggaggc

SEQ ID NO: 415777 - DNA, 426 bp, Oryza sativa
ttttggttttttttttttttttttttttttttttttttttttttttttttttttttttttttttttttttttttggggggaacgggaaaatctttttccacgcgaacaatgtatccacggggctttgcccatgtccccaggaaaaccccacaaaaagcctaaaattccggggcgtcatggaaccccgcgtaaggggggagggctagcctccattgatcccaccatttccccggggattaacccctcaaccgggcctccggggagcccgagtcccaggcccaagcccattcgtccacctttcctaccccccggttgttgggccccccaaccattttacgttccccggggcggggggccgggcttttacccctaccggggttgacccctggaacccccctgatgcttttgcggggggaacccccctcc

SEQ ID NO: 415778 - DNA, 404 bp, Oryza sativa
gcatgttttcaccacaggctacgcaaaattctcgtggtggcttttttaccacctgcgctggcgctatcctcctcctgatcctgtgccggccggcgatggcgtaccggttgctggagctcacgctggtctccgcgagcgacctcaagaaggtcactctcttctcgcgcatgcatgtctacgccgacgcctccatctccgggagcaacgtccccatgcccatgcacggcacccaccccgaccgcaacggcggcagcaaccccgtgtggaacaccgtgctccacttccccgtccccgcccgctttgacacccgcggcctcgtcctccacgtccagctcctcgcccggcgctccttcggcggccaccgcgacctctgggaccggttccggcccttcgacgacctcctc

SEQ ID NO: 415779 - DNA, 488 bp, Oryza sativa
gtccccgttgccgtgctggcgtggttccccttcgggtccgagttacagacgaggctgctcttcaaccaggccttcagccgaggcctccagatctcccgcatcttggcaggcgggaagaagcagagctgagcccgcacaaagtccaccaagtgaccgtacataagcatgcacaggtttaggcgaacagcatcacaagaggttaggtccaggattgatcgttgtacagtggagaagtttgttcaggaggcgtcgtacagctgctgacttgctgacccttcagaagttccgttacttttgtacacacagggcgatgatttttttttctttttaggcattttcgaggtattacatctccataccatattattcttacgtctgttacataggctgttgctgagtattgtatagatagatggtgtatgcccaccaaacggggcatcaaagcatcttcgttgattaaatgcccaagatgagattggttatttttt

SEQ ID NO: 415780 - DNA, 472 bp, Oryza sativa
tgcaagacataatgaagatggagtagatgaaagctgggactgttgaacaggctaccatgtaaatgcttgctcttatgagcactacatcaacacaccatcagttgctagccgatcaagtgacacccctaaaagcaaagtctctgaatggagctcatcatgctttcacaaccacactgataaccagattgacacacagatgcatcaaccttcaagtgatggtgtgggaggtgttttggaggcccttcaacgtgccaagatgtcccttagagaaaagctgagcaaaccaagtccacctagcctggaaatgttagcacttccagcaccagagtatcactacgcaacggatgattcgccagtcagagacacagagctttcactttgcatgtcaacgtttcctagccaggaaatattggcgctaccagaaccagcagagtatcgcagcaggatcataccacgggatgacgtgaaagtg

SEQ ID NO: 415781 - DNA, 434 bp, Oryza sativa
agtaataattaagctttgttacttccaatttaactcaaattgatcttttacaagtactttttttttcgccgggccttttacaacacgtacacaaatttgtcggtacgtcgtgtcatcctcctccagacgagtgagtgctagctcaggcttcttcttcacagagagtgacgcatttgcttcgcagtgatatgtacacaagaaggcgttcatgcagcttagcccacacgtgtcatttccaaatctttagcgagtccttccaggtcccttgcttcatgcactgggcgtatatcttgtcgagcctgatgattatctctgaaaatgttggccttgctataccctgagtatcccagcattcttcgatcagcgctttgaaatctggaggatatcccctgagcttgttcttcagcgatggacgcatcccatcatatcgaatt

SEQ ID NO: 415782 - DNA, 336 bp, Oryza sativa
tcgaggctgtcgaaaatctctcctggcagagtgaaggtggcctatcatgagtccatgggtgacagcttcagtcactacactgcacctgagctgtacagaaacgaaatattcgacgcaagcgtcgacgccttctcatttggtttcatcctctatgagatggttgaaggaacacacactgtacatgggaagtcatcagaggaatctggccacacaattcgatatgatgggatgcgtccatcgctgaagaacaagctcaggggatatcctccagatttcaaagcgctgatcgaagaatgctgggatacttagggtatagcaaggccaacattttcagag

SEQ ID NO: 415783 - DNA, 441 bp, Oryza sativa
ctcatcaaaacttgcacagtaaaaatggacggatgtactttgacatagcatatgtttcgccattacaagccgctctgcagttcaactacttcaagataagaggcactaatgacaggcatcactcaaaaataaactcaaactagcacttctgtgaaggataataagatgggatgaaaaatgcttccagaacaaccagtcccagtcccagtttttagataagtagcaacatccccttttgatattttaaatcttgttgaacgcaacgatgtcgcagctctggacaaattcgttgatcggctcttcagtcagatgttcttcgataaggctatccacagacaccaagtcatcaacaatggtcaacatgatctgcaacttcttgatcccgtaacccacaggcacaagctttgatgctccccaggtgagaccctccatctgcacact

SEQ ID NO: 415784 - DNA, 503 bp, Oryza sativa
attttagccgccgccgccgccgctcacccgcgccttcgacgagctccagcccgtagacctcgccggatctccccgatggccgtgaccttcaccgacctccacaccgccgacgggctcaaagccctcgagcagcacctctccggcaagacctacgtctccggaaacgcgatcagcaaggacgacatcaaggtgttcgccgccgtgccatcaaagcctggagctgagttcccgaacgctgctcgctggtatgataccgtcgctgcggccctcgcttcaaggttccctggcaaggcagttggagtgaatctgcctggaggaggtgcggcatcgtctgctgcagcggctgcgccagctgctaaggatgctgatgaagatgatgatgacctggatctttttggtgatgagaccgaggaagacaagaaagcagcagatgagcgtgcagcttccaaggcctcttcaagaagaaagaaagcggaaaatcatctgtcctgttggatgtcaaa

SEQ ID NO: 415785 - DNA, 482 bp, Oryza sativa
ctcggatctgtagcaaagagcgaagagcgaagctggagtctgtagatacgcttgttcgcttgagacctagggtacgagcaacaataatagagagtgactgagtgagcgagcactgagtagcaagggcccggcacaaacaggacgcagccggcaacgtgtacgtcgaaccaaacagagaacagctagctaatcgatcggtcgccatgaccaaggacgacgccgtcccggtggccgtggcgccggcgaagcgcccgcccatcaacaagtacgccttcggctgcgctctcctcgcctccatgaactccgtcctcctcggctatgatatctcggtgatgagcggcgcgcagatattcatgaaggaggatttgaagatcaccgacacgcagatcgagatcctcgccggcgtcatcaacatctactcgctgttcggctcgctggcggcgggcatgacgtccgactggctgggccggcggtacaccatg

SEQ ID NO: 415786 - DNA, 457 bp, Oryza sativa
cgctgagaggagggccggatcactactaaggaccaaccgacagtcgtgaggaaggtaaggacttgcttggcttgctcctggctatggtgcaggagcaggagtggctcgccgccggcgaggacgacaggatcaccgacacggaaatcaaggcccttatcctgaatctattcgtggcgggcacagacacaacatcaaccatagttgagtggacaatggcagagctgattcgacacccagatatcctcaagcaggcccaagaggagctagatgttgttgtgggtcgtgataggctcctctcagagtcggatctatcacatctcaccttcttccatgctatcatcaaggagacattccgccttcatccatcaaccccggtctcgctgccacgcatggcatctgaggagtgtgagatcgcaggctaccgtatcccccagggtgcagagttgctggtcaatgt

SEQ ID NO: 415787 - DNA, 325 bp, Oryza sativa
atatcccaccagatataccgacagggaggggtttgaatatattgagccgtgtttaggagatggtccgtacgatgatgaccggcaccaggtctatactggttatgggcctgcagaaatacctcgtcaggaaggtggagaggaagatatctacgatcaccggcgagcatgaagaagccctacctttacaggcctgggacggtggcgctcctcgagaaccgaaggtaccaaaagagtactgagctcctgattcgaaagctcccctttccagcgccttgttcgttagatcccgcaggatttttaagatcggcttccgctttcagagtca

SEQ ID NO: 415788 - DNA, 509 bp, Oryza sativa
tgcaaaccaacagtgtgttagtccttatcagccatgatgtgacagagtgcagcacatggcttccaggcttcagctcttgtacttcattgccattacagtgctcgcttcggtgttccaaccttgcacgtccattgagctccaccgtgagctctctggctggtcgaatggcattgctacatggtatggcgatcctaatggtgcaggaagtgaaggcggtgcatgtgggtaccagtatgctgttgaccagccaccgttctcatccaggattgctgctggtagcccctacatctatgactctggcaagggatgtggttcgtgctaccgggtggtgtgtgctggtaatgaagcttgctctggtatccctgtaaccgttgtcatcactgaccaggggcctggtggcccatgcttggaagagctagtcgatggtcaatgcatgaatgaagcagctcactttgacatgagcgggacagcattcggtgccatggcgaggcctggccaggctgatcaac

SEQ ID NO: 415789 - DNA, 403 bp, Oryza sativa
ttttgggttttttttttttttttgtttttttttttttttttttttttttttttttttttttttttttttttttgagaaagaaaaaatcatcgatggggccccgggcccagggaaacaaaatggcccagggggggaaaaaggataaacacaacttaggggcttttaaccagaacacaacacaaccctgacccgatgatttgacagacgggggggatagggttaaagaaggccaatggtggaccacaaaacacgcttaaagaccaccccggggggccaggacaaggggcaggggggacccctttgggatggtataggcgggaagggggggggcatcctcgagctggttgccgggaaaaaaaaaggccttttggtctggagggaagccccccttatccgggaactt

SEQ ID NO: 415790 - DNA, 431 bp, Oryza sativa
cgaggatggccgcacccttgcagactacaacatccgaaaggtttccaccctgcaccttgtcctgcgcctccggggcggtatgcagatctttgtgaagacccttactggcaagacgatcaccttggaggttgagtcctctgacacgatcgacaatgtgaaggccaagatccaggacaaggagggtattccaccagaccagcagcggctcatcttcgctggcaagcagcttgaggacggccgcacccttgctgactataacatccagaaggagtccaccttgcacttggtcctccgccttcgtggaggtatgcagatcttcgtgaagaccctcaccggcaagaccatcaccctggaggttgagtcgtctgacacgatcgacaatgtgaaggccaagatccaggacaaggagggtatttcaccagaccagcagc

SEQ ID NO: 415791 - DNA, 458 bp, Oryza sativa
gtcagaacaccgcagagcaagtgtgtgtcctgccgggcgtgaaagataagcggcgctctgctctgctcgccgaggagagagagaagagagagagagagagctagagatggcggcggcctcagcggcggcgcaggcggagggaacggtgatcgcgatccacagcctcgacgagtggaccatccagatcgaggaggccaacagcgccaagaagctggttgtgattgacttcactgcatcatggtgcggaccatgccgcatcattgctccagtttttgccgatctagcaaagaagcacacaaatgctgtttttctgaaggttgacgtcgatgaactgaagcctattgctgagcaattcagtgttgaggctatgccaacattcctgtttatgaaggaggggaatgttaaagacagggttggcggtgctatgaaggatgaactggcgagcaagcttgagctac

SEQ ID NO: 415792 - DNA, 423 bp, Oryza sativa
aataccatccattttttttattgtcgacgaatttatcagatatgctctagatacatatcttgtgtgtatatagccggagctttgttttcacatatcctcacccaacgataattgtagtactcttacaataaaaccggtcggagagggagggaagagattattacatatgtgttaagagcagaggccattgagatggtacataaccaaattgtaaaataaaaatatatagcatattatatattgatatatcatcaacatagcccaaaacaaagctgcatactattattataggcagcaatccaccagcgcgatgcttgatcttagcttagttgccaccagactcctcgcaacctgggggcttgtaggcgatgaagctaatcaactgcacctgcctgacgttgtcgaagccgatgatacggacaa

SEQ ID NO: 415793 - DNA, 375 bp, Oryza sativa
gcttctggacatactctactactactagccagtaagctagctaactaactacgtggctatggcccccaccgtgatggcctcctcggccacctccgtggctccattccaagggctcaagtccaccgccggcctccccgtcagccgccgctccaccaactcgggcttcggcaacgtcagcaatggcggaaggatcaagtgcatgcaggtgtggccaattgagggcatcaagaagttcgagaccctatcgtacctgccaccactcaccgtggaggatcttttgaagcagatcgagtacctgcttcgatccaagtgggtgccttgtctcgagttcagcaagtgttgggtttgtctaccgtgagaaccactgctttcccg

SEQ ID NO: 415794 - DNA, 448 bp, Oryza sativa
tttgtttttaggccacacaaagctcaatttcaatccgtaaatgcaaacagtcaaacactgagctgactagcatcagactaccaacaatagcttcctcgatcgggttcattcctatacgccatgacacgccacaatctatatatcgtgtacgtaccatgaacaatttcatacagattacagaccacacgaatagtttgcaggcgatgccatcactcggcggcggcggcgtggagggtgttcccgacgtcgatgacgaagcgatacctgacatccgccttggcgaggcgctccatggccgtgttcacgtcgtcggcgccgatcaccttgatgtccgccgtcacgccgtgcttcgccgccagctcgatcatctcctgcgtgtccgccatgccgccgatgttgctccctgccagagtcctgttcccgtggacgagagagaagggagggacct

SEQ ID NO: 415795 - DNA, 498 bp, Oryza sativa
cgccgtacctggcgttgctgaagcccaacgggaagattatcctcgacggcctcccggagaatcccctggaggtccctcccttctctctcgtccacgggaacaggactctggcagggagcaacatcggcggcatggcggacacgcaggagatgatcgagctggcggcgaagcacggcgtgacggcggacatcgaggtgatcggcgccgacgacgtgaacacggtcatggagcgcctcgccaaggcggatgtcaggtatcgcttcgtcatcgacgtcgggaacaccctccacgccgccgccgccgagtgatggcatcgcctgcaaactattcgtgtggtctgtaatctgtatgaaattgttcatggtacgtacacgatatatagattgtggcgtgtcatggcgtataggaatgaacccgatcgaggaagctattggtggaaggctgatgctagtcagctcagtgtttgactgtttgcattaccgattgaaattgagcttt

SEQ ID NO: 415796 - DNA, 424 bp, Oryza sativa
ttgttttttttgattaacgggggcaaacgaggatccattaattcttctcaaagaacaggggcatgtctccttgtttcaccattacataagcttacgcaatagcagataacaaaatctgctccgtctctaggtaaaatatttaaacagaacaccctaataagaacttattacaaggaaaggaccgcgcatggacataaaaggcaacggcaggaatggtaagaataacaatgctgagcagtcaggaaacaaaacaccataatgggactgagcaaaggcctgcgaaggggagctatgaggcagaaggcttctccgacttgaggggcttcaccacctgccaggtgaagtcggggccgcccctgccgaagtgaccgctagccgtcgactagagggacagtgcggcgccctctcacatgagggcaagggt

SEQ ID NO: 415797 - DNA, 426 bp, Oryza sativa
attccatgtaaacagaccacatgcatataatacagaccattcaaaagattggtaatagtaaaaatacaagttcgtgaatggcgataatacttaaagctacctccaaatagcgtgtagcattgcgtagcaaaccaagcatataacttaggacaaacattcagttgcagcttcacatcatcgctgcttatcataactgcaataacagcgcagatggagcataaactaagtatatttcgtagttctagcttatatataatatcagaatcaccaactgtgaaccatccacaggatggtcgggggactactgatcagaatctactcctttgaggtgtggatggcagacacggtggagaccatagaatccacgccacatttgttgcggacgttggagcccctgcagatcttgtagtacccatgctctcccca

SEQ ID NO: 415798 - DNA, 499 bp, Oryza sativa
tgggaagtcctaccgtgacgccgacgagcacgcgtgccggctctccgtgttcaaggccaacctccgccgcgcgcgccgccaccagctgctcgacccctccgcggagcacggcgtcaccaagttctccgacctcaccccggccgagttccgccgggcctacctcggcctccgcacgtcgcgccgcgccttcctgcgggggctcggcgggtccgcccacgaggcgcccgtcctccccaccgacggcctccccgacgacttcgactggagagaccacggcgccgtcggccccgtcaagaaccagggatcgtgcgggtcgtgctggtcgttcagcgcgtcgggggcgctagagggagcgaactacctggcgacgggcaagatggacgtgctctccgagcagcagatggttgattgcgaccatgagtgtgattcatcagaacctgatttatgggatgtggatgcaatggtggattggtgactaacgccttcagctatcttttga

SEQ ID NO: 415799 - DNA, 365 bp, Oryza sativa
ttttggttaaaaaggaagcgggtcttcagatgcgttaacgtttactgaatttcatcgcaacagataaaaggaagcaacaatcttttgcaagttcatgatgttcttagccaaaattctacgacatcataaaagacagttgtgtctggaggattgtgtcccgtcgatccaatactaaaaaaacatgccttgcattagcgcaactgattactgatggcgttcatgacgatccaaatcagtccacaagggtgcccaagatgtcatgctctctgaagagaaggtactctttttcagcagcaagcttgacttcgagtccaccatattcaggcaggagaacagtgtctccttccttgagagcaacagggatc

SEQ ID NO: 415800 - DNA, 432 bp, Oryza sativa
cgattagtgtagaacttttgctcggtcttttttgcgtgggtcttaagaagaagaagaggatgagggcggcggctatggcgaggcggctgatcccgtcgctgaaccgcgtgctggtggagaagctggtgcagcccaagaagagcgccggcggcatcctcctccctgagacgtccaagcagctcaactctggtaaagtggtggctgttggccctggcgaacgtgacaaggatggcaagctgatccctgttgctctcaaggaaggagacactgttctcctgcctgaatatggtggactcgaagtcaagcttgctgctgaaaaagagtcccttctcttcagagagcatgacattttgggcacccttgtggactgatttggatcgtcatgaacgccctcactcattcgttgcccttatgcatggcatggtttttttg

SEQ ID NO: 415801 - DNA, 397 bp, Oryza sativa
  unsure (1)..(397): unsure at all n locations
cagtactattttcttcattcctccagatggatcgtgtggcgttatgattaacagacttagcgcgcangtgaaacctcttatctgggtagaagcacaagtggagaaacattcaagaagtcggatacagatcacagtgaagacaagaagtcagttcaaagaaaggagcacagcaacaaatgtagaaattgaagtaccagtgcctgaggattcgacaaacccaaatataagaacttcaatgggctctgcggcatatgcacctgagagagatgcgatggtctggaaaataaaatcatttcctgggggcaaggaatatatgtgtagagcagaatttagccttccaagcttaacatcagaagatggaatgcccgaaaagaaggctcccatactggggaaattt

SEQ ID NO: 415802 - DNA, 399 bp, Oryza sativa
tgcctctgggtcacacacacatactccccatggcaggtgtaggggaagtggtgatgcttggtggcattctcctccctctcctcctggttgtcgccgtctccggtgagccgccgccgatcagccggaggagcttccccgaggggttcatcttcgggacggcctcgtcgtcgtatcagtatgagggtggcgccagagaggggggcagaggaccaagcatctgggacacattcacacaccagcacccagataagattgctgacaaaagcaatggggacgtggctgcagactcctaccatctatacaaggaagatgtgcgcatcatgaaggatatgggagtggatgcatatagggtcttcatctcatggacaagaattctttccaatggaagtctgagcgggt

SEQ ID NO: 415803 - DNA, 384 bp, Oryza sativa
ttgttttgcgagaggcatacctggatctcagggacccggtacaaggagaagcgcatgactaatatgggaaagacgacattgcaacggaagcgggaagggatgcaagagcaactatggcagactgggttggtagagaaccatctgaggattacattgctcaattggtgacagcatccatacatggactcgatatataaggagacgaagaagacactgatctaagggaggtggaagccaaaaatcctgtggtacaagaagatccggaggacaaacttgcttagacattgtatagcacattgcacggtaatggacaaggggacatagaggaacttgcgcacaatgcaaaagctgaactgtccagactatctaatgcacagcttgggg

SEQ ID NO: 415804 - DNA, 276 bp, Oryza sativa
tgagtttttttatgtattgggggcttaacctgttccattttttttttttaaagtaatgtatcatttttccttctttcaccattacataagctgaagcattaacagataacaaaccctcctactcctatagggaaaagattcaaacacaatacccttataaggacgtattattaggaaagtatctgcgccgggcccccaaggggggaccccgggtggcaccgtttaagagaggacacttgctgagcatgcgaggaatcaaaacgaccatatatggga

SEQ ID NO: 415805 - DNA, 504 bp, Oryza sativa
tcggttttagtggcctggcaccatctgcgcctgaaccggtcactgttgcgccatcaacggatgctgccgctcggagccgctccagacgttcacgatccatgggctgtggccggactacgacgacgggacctggccggcgtgctgccgccacaccagcttcgacatggacaagatattgcccctgaagccgacgcttgagaagtactggccgtccctctactgctcatcctcttccacttgcttcagtggcaaggggcccttctgggctcatgagtgggagaaacatggaacatgctcatccccggtagttaaggatgaattagagtatttcaccactgctcttgacctctacttcaaatacaacgtcacggaaatgttggcaagtggtggtatctatgtttcaaatggtaaacaatatgcgctaactgatgtcattgatgccatcaaatgtgcttttggggcctcaccgcaaattgtttgcaagaagggctcaattgaagaact

SEQ ID NO: 415806 - DNA, 424 bp, Oryza sativa
tgggtttttttttaaccgggcataggaggtttcatttcttcttctcaaagtagtggagcatctttccttctttcaccattacataagcttaagcaataacagataacaaatcctcctcctcctctaggtaaaatattcaaacacaatacccttataagtacttattattaggaaagtagcgtgcatgggcataaatggcagcggggggcaggttaagaatcacaatgctgagcagcgaggaaacaaaacaccataatgggacagagcaaaagcctccgaaagggagcttttaggcagaaggcttctcccacttgaggggcttcaccacctcccaggtgaagtctgggtcgtcccttccgaagtgaccgtaagccgccgtcttgaggtagcgtccgttgccgactttcttgaggtcaaggttgat

SEQ ID NO: 415807 - DNA, 513 bp, Oryza sativa
aattatatttacctcctccacctcctcctcctggcgggatcggatcggcccggctgctcctcctccgccgccgccaccgccgccgcagataggagaagatggccgcacttgataccttcctctttacctcggagtctgtgaacgagggccaccctgacaagctctgcgaccaagtctcagatgctgtgcttgatgcctgcctcgccgaggaccctgacagcaaggtcgcttgtgagacctgcaccaagacaaacatggtcatggtctttggtgagatcaccaccaaggctaacgttgactatgagaagattgtcagggagacatgccgtaacatcggttttgtgtcagctgatgtcggtctcgatgctgaccactgcaaggtgcttgtgaacatcgagcagcagtcccctgacattgcacagggtgtgcacggtcacttcaccaagcgcccctgaggagattggtgctggtgaccagggacacatgtttggatatgcaactgatgagacccct

SEQ ID NO: 415808 - DNA, 392 bp, Oryza sativa
ctgttatcggagatgacgtcgccggcgacgacggacgcctcgccgttcgtgctggcggggctcctcctcgtctccatcccggtcatcttcctcctcgcgccgcgcctcctcccgcccaagacgcttccggccatcccggacgccgacgagtccgacgacctcgcgctcttccgccgcgccatactctcctgctcctccccctcctccggcacgcccacgccctcctccgccgcgtcctacttcttccgccgccgccccgcccccaaggtcgccttcctcttcctcaccaactccgacctcgtcttctccccgctctgggagaagttcttccgcggccaccaccacctctttaacctctacgttcacgccgaccctttcttcgccctcacgat

SEQ ID NO: 415809 - DNA, 348 bp, Oryza sativa
caattaccaagtccattcctcctctgtttcttccgtgccaccacgcgatcagcgcgcgcgcgagagagagagagagagagggagaaggcgcgatcgcaatggggaggatccagtacgcggcggtggcgaggggggcggtggtgatggcggagcacggcgacgcggcgttccccaacgccggggccgtcgcgcggcagatcctcgaccgcctctccgccggcgatggcggcggcggcggcgattgcaacatctcctacacgcaggatctccacgtgttccacgtcaagcgcaccgacggcgtcaccgcgctctgcatggccgacgacgccggcggacgacggattccct

SEQ ID NO: 415810 - DNA, 489 bp, Oryza sativa
  unsure (1)..(489): unsure at all n locations
ctcttatattgtcgtacgtcatccgtcagaattgggtgcatcagccaactggtttaactccaagtcaggaaagaagattcctttaagatcagttacttcgatcatcgatgggttaaagaaatcttacattgagaagttgaggccactagaaaaaacatatcagttcgatgactttgtttcacctttgctgactagcagtgatttcgatgcgaagccaatggtcatgttgctgggtcagtattccacaggaaaaaccacattcataaagcatttactgaagacaaattatccaggtgctcatattggtccagagcctacaactgacagatttgttgttattacttctggacctgatgaaagatgcatccctggaaacacaattgccgtgcaagcagacatgccatatagtggcttgtcatcttttgggacagcatttctatcaaagtttgaatgttctcagatgcctcatncactactggatcatataac

SEQ ID NO: 415811 - DNA, 400 bp, Oryza sativa
gggttataatgtcagtatgatggctgattctactggtcggagggctgaagctttgcgggagatttcaggacgtctggctgaaatgcctgcggatagtggttaccctgcatatttggctgcacgtttggcatccttttacgaacgtgctggtaaggtgaaatgtctcggcagtccagatcggacaggcagtgtcacaattgttggtgctgactctccacctggaggagatttttcagatcctgttacctctgcaactcttagtattgcgcacgtcttttggggattggataacaagctggctcaaagaaagcatttcccatctgtcaattggctcatctcttactcaaaatactcaaaggctctggaatccttctatgagaagtttgatcaagatttcatt

SEQ ID NO: 415812 - DNA, 377 bp, Oryza sativa
gcattctcagtccttgcaccaggaagccctgacggggttctcgctaatccctctccagcgatccagactatgtcccaagcatggtttgcatggcaggaattctaaccattcttggagggaaatcattgtcgatcgcaagaacgttcctccgtaatgccctccgtttggaacccacaagccatcaagcctggctgcgccttggactcgtcttgaaatctgaaggatcactgcttgaagcggccgactgcttccaggcagcctacgagctccaggagttatcgccgatacaggacttctcaaagcacctccccatcatgctgcaataggaacgcaatagcccaagattccttgtagaaattacctctcactttttaaac

SEQ ID NO: 415813 - DNA, 422 bp, Oryza sativa
agctaagattgcaattcaaagggcttatgagaaagggttccaggacctccattacgtggagcgatatgaggaccacacaattgctcatgcaattcaggccaaatatgagaagacaaagatatacctctggcctggaccaatgagaagtggaatgtctgctgctggtaggacggttgaaacagtactgtatttagctggtttcagcaacgtcaagtcaaagattattggttcaaggaaccccctgaatgttatcaaagctctcttcatagcattaaacgccattgaaacgccaaaggatgttgagcagaagtttgggcggaccgtggttgagtcatacttattgtagtcatcaatttgtttgtcctgtggagctcgccatctggctgtggcgatggacgtccaaagaaagagctaattgcaca

SEQ ID NO: 415814 - DNA, 359 bp, Oryza sativa
gccgagaaggtcaccgccgccggtcgccgtcgtgggggtcgccgccgccgccgccgccgttgtgctcgcgggagctcgaaaccccacgctggtcgcgcggcggaggagggaggtaggagggatgggtcgatctgtttacgtggcggcggccgtcgccctggtgctcacgagctgctccgtgctctgccttggcgcggagcggttcggggcgagggagtgcgaggagctggggttcaccggtctcgccctctgctccgactgcaacgccctcgcggagttcgtcaaggaacaagaattggtggaggactgccgtaaatgttgtacagaggattcagatgattctatcagcaagctcacat

SEQ ID NO: 415815 - DNA, 396 bp, Oryza sativa
cgctttttagttaattagtagttgttaattatctggactaaccttaattaccctcacgcaaagcactctctaatcctcctcggcgctcgcataatcttgtatccctcatctcagattatcatcacctcgccgtgttagaaaaaagggagtaagttcgttttatcgtcggatttggtgagagttcgccggagtagaagaagatgacggtgacgccgcagatcacggtgagcgacgggaggctggcggtgcgggggcggacggtgctgaccggcgtgccggagaacgtgacggcggcgcacgcgttcggcgccgggctcgtcgacggcgccttcgtcggcgccgacgccggcgaggccaagagccaccacgtcttcaccttcggcacgctccgggaat

SEQ ID NO: 415816 - DNA, 431 bp, Oryza sativa
ggattagcaccctggtggcgatgaagtgttgctaggagtaactggcaaagacgcaaccaatgattttgaagacattggccacagtgaatcagcaagggagatgatggagaagtatctcattggggagattgatgcttcaaccatcccagtaaagcgtactcatgtcactccccagcaagcgcccggcaacccagacaagggcgatgacatgctcattaagatcttgcagtttcttgtccccatcttgatcttggggcttgcatttgctatccggcagtacaccaaatctgagtagatctgttattacaatggtgataatcaatatggtccatgaagctatattaggtgaaatgatttggatcaaaagaactaaataatgatatttggtgaggggaacggtatgttgtattggtatattatggagtattatg

SEQ ID NO: 415817 - DNA, 452 bp, Oryza sativa
gcgttgcgaacccttctccgccgcctccgctcttcgctgcacggtgctagctcgccgccgtccgtctcgcgcgcctcaagggttatcacaagatgtatacagcaaggaggaagatccagaaggacaagggtctggagccaactgagtttgaggacactgttgctcaggcattttttgaccttgagaatgggaatcaggagctgaagagtgacttgaaggacctttacatcaatggagcagttcagatggatttacctggcaacaggaaggctgttattattcatgttccatacaggctgcggaaggcatataagaagatccatgtgaggcttgttagggaacttgagaagaaattcagtgggaaggatgtggttctggttgcaactagaagaatagtgaggcccccaaagaaaggctcagctgttgttcgccctcgtacccgcacacttact

SEQ ID NO: 415818 - DNA, 428 bp, Oryza sativa
cagttcacaagccccagcaccagcaagctgctactcatcatcagcgagagctagctagctgtgtgtgccacttacactgctgctgctgctggttctagctaagctcaccgatcgtcgtcttcgtcatcgccggtgacctggtgaattagtcgagagagatggcggcggcggtgacggtggaggaggtgaggagggcgcagagggcggaggggccggcgacggtgctggcgatcgggacggcgacgccggcgaactgcgtgtaccaggccgactacccggactactacttcaggatcaccaagagcgagcacatggtcgagctcaaggagaagttcaagaggatgtgtgacaagtcgcagatcaagaagaggtacatgcacctgacggaggagatcctgcaggagaaccccaacatgtgcgcgtacatg

SEQ ID NO: 415819 - DNA, 430 bp, Oryza sativa
cgattcgatccgatccgatccaaggggaggggaagcaatggctacaaaaaggagcgtggggacgctgggggaggcggatctgagggggaagaaggtgttcgtgcgggccgacctcaacgtgccgctcgacgacgcccagaagatcaccgacgacacccgcattcgcgcgtccgtgcccactgtcaagttcctactcgagaagggcgccaaggtcatcctcgccagccatctgggccgtccgaaaggtgtcacccccaagtacacgctgaagcctcttgtttcacgctttgctgagctacttggagtcgatgttgagatggccaatgattgcattggtgaggaagttgagaaattggctgctgctttgccggaaggtggtgttctacttctagagaatgttagattctacaaggaggatgaaaagaatgat

SEQ ID NO: 415820 - DNA, 213 bp, Oryza sativa
gactgtacacgacgaaataccaacaggcgaatcgtgggtattgaaaaacggggtgtactacacctgacaagattaccctttcctttaatatcatgtgctgagggcgacaacatgagtaagaagtctcaccaaccttgactcgggcaaagtacccacatagatcgaggctgttgaccacatcaacgagcccaagatggcatcagacaagcccct

SEQ ID NO: 415821 - DNA, 288 bp, Oryza sativa
ggctttttcaagctcacagaggaagaaacaaatatggtttgcaagttaacagaaggttactcaggatctgacatgaaaaatcttgtgaaagatgcctcaatgggaccactaagggaagctcttcaacagggtgttggcataacaaagctaaacaaggaggacatgcggccggtgatgctcaaggattttgagactgctttgcaggaggttagaccttttgtttcctcaagtgaactgggaacttatgaagaatggaacaagcaatttgggagcttaacaaattaattt

SEQ ID NO: 415822 - DNA, 490 bp, Oryza sativa
gtgttagtgggggattgcgtgctgatgcgggcgtgggacactgagaaggcgccgtacgtggggagggtggagaggctggagacggacgggagggggagcgtgcgggtgcgggtgcggtggtactaccggccggaggagtccaagggcgggaggaggcagttccatggtgccaaggagctgttcctcttcgaccacttcgacacccagagcgcccacaccatcgagggcaagtgcgtcgtccacttcttcaagaactacaccaagctcgacaacttaggccccgaggacttcttctgtcgcttcgagtacaaggtcgtcaccggggcctttaacccctaccgggttgccgtgtactggaagtgccagatgccgtattacccggatgatctaatggtgcattgcgagggatgcaaggacctggttcattcattttggttgggaatgaccatttgacacgcccaaaaaatagatcatttccttgtgcgcaatt

SEQ ID NO: 415823 - DNA, 426 bp, Oryza sativa
gcttggcgtaaaagaaaatctccccgtctcgtcgggtcctccgctccttgcgccatctcgcggctgaacaggggaggggcggcgatctccatccggcgagcggagcaggggaggggaggggatcttgacaatggttggacctgggcataggaacagtcacgggaagcgtcactctgattatgctgaaaatggaggtggcaagagaaggaatcctggtgatgatacatatgctcctggtccagatgatactgtctaccgctatctttgcccttctagaaaaatagggagcatcattgggaggggtggagaaattgctaagcagatgagggccgacactcaagctaagataaggattggtgagagtgtatctggttgtgatgagagagttatcacaatatttagcttcaggcagggaaactaaatacc

SEQ ID NO: 415824 - DNA, 432 bp, Oryza sativa
ggctttttcaagctcacagaggaagaaacaaatagtgtttgcaagttaacagaagggtactcaggatctgacatgaaaaatcttgtgaaagatgcctcaatgggaccactaagggaagctcttcaacagggtgttggcataacaaagctaaacaaggaggacatgcggccggtgatgctcaaggattttgagactgctttgcaggaggttagaccttctgtttcctcaagtgaactgggaacttatgaagaatggaacaggcaatttgggagcttagcaaattaatttgcagggagatgttgaaaccttgaaggcgctagtatgctttcccatgcaaagcatgcgaaacatatgcttgcgagagtcgacagaggacaatgaagcataccttgtgcagccatatacctctagactacttgtgatcactgatgc

SEQ ID NO: 415825 - DNA, 402 bp, Oryza sativa
  unsure (1)..(402): unsure at all n locations
gcttatagagcgtgcccgtcctgctccacgccggggggccggtgaacgagtcgcaggtcatcgtgcagtacatcgacgaggtctggccgggcggcgccgggggacgcccgtccgtgatgccctctgacccctacgagcgcgcggtggcgcgcttctgggccgcctacgtcgacgacaaggtccggccggcgtggctggccatcctgttcgggagcaagacngaggaggagagggcggcggcggtggcgcaggccgtggcggcgctggagacgctagagggcgcgttcggggagtgctccaaggggaagccgttcttcggcggcgacggcgtcgggttcgtcgacgtcgtgctcggcggctacctcgggtggttcacggcgatcgacaagctgatcggtcgca

SEQ ID NO: 415826 - DNA, 314 bp, Oryza sativa
gttttgtcctcggacacgatcgacaacgtgaaggggaagatccatgacagggagggtctccccccggaccagcagcgcctcatcttcgccagcaagcaagtggaggatggccgcaccttggctgactacaacatccagaacgagtccacccttcacctggttctcaggctcatgggtgggatgcagatcttcatgaagaccctgactggcaagaccattacccttgaggttgagtcggccgacactattgacaacgcgaaggctaagatccaggacaaggagggcatcccccccgaccagcagcgactgatctt

SEQ ID NO: 415827 - DNA, 325 bp, Oryza sativa
cattatacatgattaccggcgccgcgcagatggacggggccatcctcgtcgtctgcggcgccgacgggcccatgccgcagaccaaggagcacatcctgctcgccaagcaggtcggtgtccccaagattgttgtcttcctcaacaagaaggaccaggtcgacgacgaggagctgcttcagctcgtcgagctcgaagaccgcgaattggtctcctcctacgagtacgatggcgacgaagtgcccatcgtcgctggcttcgcgctcaaggcgctcgagaaccttatggccaaccctgccattaaacgcggcgatgatgagtgggtgga

SEQ ID NO: 415828 - DNA, 442 bp, Oryza sativa
  unsure (1)..(442): unsure at all n locations
cgcttatggcggcggtggcggtgaacgggggctcgccgggggctgtcaccgcggcggcggcggcgggaggggtcggcgtcgccgtgggcctcgggggcggcggggcgcagtcgctgtacgtgggcgacctggaggcgtcggtcacggactcgcagctgtacgagctcttcagccaggcggggcaggtgatgtcggtgcgcgtttgcagggacatcagctcgcgccgctcgctcggctacgcctacgtcaacttcaacaaccccgtggatgctgcaagagcactggagctgctcaactttgctcctctgaatggcaaacccattcgggtaatgtactcaaaccgtgacccaagcagtcgcagaagtggatctgctaacattntcatcaagaaccttgacaaagcaatagaccacaaaactttccatgataccttttctgcatt

SEQ ID NO: 415829 - DNA, 302 bp, Oryza sativa
ctttttgccatctctctcagctctcacagctcagggatcattggccgtggccaccatggcgctctcctccccggtgatggcccgcgcggcgccgtcgacctcctccgcgctcttcggcgaggcgcggatcaccatgcgcaagaccgccgcgaagcccaagccggcggcgtcttcggggagcccgtggtacggcgccgaccgggttctttaccttgggccgctctccggggagccgccgagctaccttaccggcgagttcccgggcgactactggggggacaccggggggcttttcgccgacc

SEQ ID NO: 415830 - DNA, 426 bp, Oryza sativa
ggttctcatcgtcctaccttcatacagctgaaagggttccctcatatacaagataaagcaatggaggtgctgatccggtggagcaaactgccggcggccggctccttggtgctgtacgccgtcttcttgctgtcggcggcggccacatcggaggccaacatcggcgagtacgacgagtactggcagaagcgcaagctcatggctgatgccgccgccgaggctacctacaagcgtgaccccttcgaggtcaccaacagcttcaaccgcgccgtccacagatcggaggaggagagcgggaggagggagctggcgatgaccaaaaggaagaagttcgcggggacgtgcaaggcgacgaacccgatcgaccggtgctggaggtgccgcgccgactgggtgacggacaagaaacggctggcgcggtgcgcg

SEQ ID NO: 415831 - DNA, 428 bp, Oryza sativa
ggctatctgggcgttcagcgtggtgacctacttcccgctggacgtgctcaagttcatcatccggtacgcgctgagcgggcgggcgtggaacaacatcaacaacaagacggcgttcgtgaacaagaacgactacgggaagggggagcgggaggcgcagtgggcgacggcgcagaggacgctgcacgggctcaaccagtcgtccaccagctccgacctcttcaacgacaagaccggctaccgcgagctctccgagatcgccgagcaggccgcaaagcgagccgaggtcgccagactgagggagttgcacacgctcaaggggcacgtagagtcggtggtgaaacttaaggggctcgacattgacacaattcaacagagctacaccgggtaacatacaagatgccatcgatgtgttggtggtggtggtcata

SEQ ID NO: 415832 - DNA, 191 bp, Oryza sativa
aatcgaacgaaacttatttgttcctcagcttattctctgatgaaatttcaaaaggagagcgaaacagtggacactgacgcttgcgaaataaaaaggtggcgccagaaactccggcgagactacggcgacgagacgcccgacgacaacgaccatgacacgatacaaccacacactgggtggagattaccgtc

SEQ ID NO: 415833 - DNA, 450 bp, Oryza sativa
cacatgtgcttgcttagcttagcttagctttgctggtgctccttctcattcataagccagcagctagctagcaagcagcacacacatatatcacaggccatctctctatccctaattaagctatatactccatatagctagctaaacacaggaggagtggaggaaggagaggctagctgatctagctatctgcagtgattagttaaaatgatggcttctgataggttggatgcagaaaggatcatagagtacttcaagggcaagagcatcctcatcactggagcaactggctttcttggcaagattcttgtggagaagatactgagggtgcagcctgatgtcaagaagatctacctgctcgttcgcgccatcgaccaagcatctgcaaaccaacgcgtccaatctgaggtgacggagacggagctgttcagcgtggtgaaggagaagcac

SEQ ID NO: 415834 - DNA, 241 bp, Oryza sativa
atcttgccctagtgctatggcgttcacaggctcttgcttcttccggaatgatacgcggttgcgtgctcttcgtttccttgaccatttgcttgagagagacaatatgcagaagacggagtttctgaaggcattatcggatatgtggaaggacttcgattcccgagttcttcggtataaagttcttccacctctctgtgctgagttacgcaacatggtcatgcagccaatgattttggccatg

SEQ ID NO: 415835 - DNA, 255 bp, Oryza sativa
cgttgttcgtctagggtttagtgggttgagatgggggcgcctgatgtcgagtaccgctgcttcgtcggcggcctcgcctgggccaccgacgaccgctccctcgaggccgccttctccacctacggcgagatcctcgactccaagatcatcaacgacagggagacggggaggtcacgtgggtttggcttcgacaccttctccttcgagcagtcgatgcgcgacgccatcgagggcatgaacggcaaggagctcgac

SEQ ID NO: 415836 - DNA, 288 bp, Oryza sativa
ggtggacaagggcaccatcgaggttgccggcacggggaaggttaccaccacccaggggcatgatgaccttggcaagagatgcgccaagtactacgaggctggtgcccgcttcgccaagtggcgcgccgtcctcaagatcggccccaacgagccgtcgcagctcgccattgatctgaatgcgcagggcctcgctcgctacgccatcatctgccaggagaacgggctggtgccgatcgtcgagcccgagatccttgttgatggccctcacgacatcgaccgctgcgccta

SEQ ID NO: 415837 - DNA, 369 bp, Oryza sativa
ctgttggtgatggctcatctgtactttgggtattgggtggattatagtggtacttgcatggctaatgatgccaaggctgaaaataaggatgaggggaggcaagtcaatggactttgtgatgtcactcgaagaccctagagtctgatgatatggttggagggcaccgaggatgcaacattttctgtgttggtgtcatagactatcgagcgctcggctttggaacgtatgattgctctaagccacttagtattgtggggaacctataggataactttcttggcaggatctcactttgttggcgcattaccattggtgctgggctggggtgataacccaatcgacactgatcgtcgaccgatgatgatgaca

SEQ ID NO: 415838 - DNA, 397 bp, Oryza sativa
cgcttacaacggcgagtaccaattgtcctctgtcggggagacctggctcttcgtgggggtctcacatttgttctttgtacgccgccgcgacaagatgaaccaaatacgccgccatgagggagtgcatttcaatccacatgagacacagaggcatccaggcatgcaactcttgctggaagctttactggactcagactgggatcaatgctgatggtcatattcccaccgatacgactgctgctggacgtgaacaaactctcacacactttcttaacggagagtggtgctcaggatcatattcccagaacagggtcctatgatcttcaccatactgaaactgatgaggcgcggactggttaataccagcagctgtttcaacatgagccagtcatcaatg

SEQ ID NO: 415839 - DNA, 330 bp, Oryza sativa
gctttatcttctccttccagctcctcccatggcgtgcctcgtcgccatcgccatcgccatggctctcatggtggttcaacctggccggcagatgactgcctttgctgctcggacgtcgccggcggcggcggcggaggcgttctggcgtgccgccatgcccggcgctgccatgccggacgccatcgtcgagctcctccaccatgagcacggcgttgctagcgccggcggcaaggccaacggggggggcgacggtccaccggcggcgatgaacttcaactacgacgactacagggccctgccttggagcgacgcccctttcccggatgcatt

SEQ ID NO: 415840 - DNA, 374 bp, Oryza sativa
gcctttagccactgagatttgaccttctgtttctaccagaaaaacacaaacagtgaagatgtcgcagcctgctgagctttcccgtgaggagaatgtgtacatggctaagcttgcagagcaggccgagaggtatgaggagatggttgagttcatggagaaggttgctaagacagttgactctgaggagctcactgttgaggagcgcaaccttctatcagttgcttacaagaatgttattggtgctcgccgtgcgtcatggcgcatcatatcatccattgaacagaaggaagagagccgtggtaatgaggatcgttgcacgctcatcaaggaatacaggggaaagattgaaactgagctcttcaagatctgtgatg

SEQ ID NO: 415841 - DNA, 471 bp, Oryza sativa
agttgttagggccgtggcatggaaaggtcgtcaggggcttgttgtagttagctccctgctaaatcaaccatgggtaaggataggacacccataaagattgcggtcattggccacgatgactactgcaaggcgaccaccacgggccatttgatctacaagcttggaggtatctacaagcgtaagatctggaggttcgaaaatgaattcgttaatatgaacaaaacgatcttaaagttcggaagggggctccataagattgaagacttcccgcgagagactgatcaccattgatatcgccctgtggaagttcgagaccaccaacaactactgcacggacatggatgcctctggccaccgtgacttcatcaagaacatgatcacggatacctcccatggtgactgtgccttgctcataattgacttgaatagtgatgaatttgatgctggactctacaagatagaaaaacccca

SEQ ID NO: 415842 - DNA, 464 bp, Oryza sativa
catttcaccccgacacgaatcgctcaggcctcccccctgttgttcatccctcactcaacttttgggcagcttggctttattcaattccccttcctttttattgcgaatttgcgactgcgagcgagcttttcttcctcaaaggaagacgacgacggaggagcagccctgcagagcataaagagaggagaggagaggagagggggccggtcaaggaagaggagggaagatgagcagcacagctccactcctcacaccctacaagatgggaagatttgatctttcccacagggtagttctcgcaccactgacaaggcagcgatcctatggtaatgttcctcagcctcatgccattctgtactatcagcagagaacaaccaaaggaggccttttgattgctgaggccactggaatctcggacactgctctagggtacaaagatactcctggtatttggaccaaggagc

SEQ ID NO: 415843 - DNA, 375 bp, Oryza sativa
ggattatgaagaacaatgccatcgtttgcaacattggtcactttgacaatgagattgacatgctcggccttgagacctaccctggtgtcaagcgcatcaccatcaagcctcagaccgaccgctgggtcttccctgagaccaacactggcatcattgtccttgctgagggtcgtctcatgaaccttgggtgcgctactggccaccccagttttgtcatgtcctgctcattcactaaccaggtcattgctcagcttgagctgtggaaggagaagagcactggcaagtacgagaagaaggtgtacgttcttcccaagcacctcgacgagaaggtggcccgcctccacttgggcaagcttggtgccaggctgaccaagc

SEQ ID NO: 415844 - DNA, 461 bp, Oryza sativa
aatttaaggcctgtgtcaaggagagggtagtagcaccttgctctcctttgccttcagagaaaccggaagcaatggcgtctgctactctcctcaagtcatctttccttcccaagaagtctgaatggggtgccacccgccaggctgccgcccccaagccggtgactgtctccatggttgtccgcgctggtgcctacgacgatgagcttgtcaagaccgcgaaaaccattgcatcaccaggaaggggtatccttgccatggatgagtcgaacgcgacctgcggtaagaggcttgcgtcaattggccttgagaacaccgaggccaaccgccaggcttaccggaccctccttgtcaccgcaccgggcttgggacagtacatctccggtgctatcctcttcgaggagactctgtaccagtcaactgtagatggcaagaagattgtcgacatcctcactgagcagaaa

SEQ ID NO: 415845 - DNA, 523 bp, Oryza sativa
ccgttctttcccccttcttctcccctctcctacctcgccgagatctagccctagggttcgccaacttcaccggcggcgaggagcacgtcaccggcggcgagcacaggcggagggcgaggggagagagagagggaggaggacatggggcagcagtcgctgatctacgcgttcgtggcccgcggcacggtcatcctggccgagtacacggagttcaccggcaacttcaccaccatcgcctcccagtgcctcatgaagctcccggcgagcaacaacaagttcacctacaactgcgacggccacacgttcaactacctcgtggaggacggcttcacatactgtgtcgtagctgttgaatcagtagggcggcagattcccattgcattcttggatagagttaaggatgatttcacaaaaagatatgctggtggaaaagctgctactgctgctgcgaacagccttaaccgagattttggatcgaaacttaagaacacatgcagtactgtgtggatcattcttgagagat

SEQ ID NO: 415846 - DNA, 425 bp, Oryza sativa
gcattacttatcatgagcatgcagctcagtgatggtgactttccacaagaggaaatgatcggaagtttcttgaaaaatggccccttgtgttatatggcttatcgcaatatattcccaatatgggctcttggagagtatcagaaattagtatttcagaactatcagacctctagcatcaagcaaacaaatatagctccatctgctggcaatgctgctctgaagaattcagcaagtacaacagcgccaacttgatttcttggcagaatcaagcaaacagtccagtgtattgtaggtcatgtgaaagagtacaaaactctaaatctagaatctgctgtattgttttggtcgattttatgagatccttatgaattttttgtacattctttagatctgtgcaagaacatgtacatcacattttacattta

SEQ ID NO: 415847 - DNA, 309 bp, Oryza sativa
tccttttcctcgatcctttgtcttcttgcttagctggctctgccatggtggggagctacgcggcgggagggggacggggagcggcagtggcggcggtggcggaggggaagctggacgagctgcggcggaggatggggaaggcggacggcgacctgctgaggatcgtctgggtggggggcggggcgtgggggagcgccttctgcgcgctgctgcaggacgcgtacgggcggcaccgcgacaaggcgcatgtgcgggtgtggcggaagccctggcgcgccgtcgaccgcgccaccggcgagcacctttttg

SEQ ID NO: 415848 - DNA, 404 bp, Oryza sativa
ctcttcttcttaccaccctctcccggataagaggcgcaaccaaagcccccaccctcgcccaaaacccccacgagccgcggccatggcgaccaccaccaccaccccctcctcctctctcaccgcccctctcctccgcccgagctcgaacgcgaaccccgccccgagatctctgccgctcctcaggagccggaggtgcgctcgggccgtggcgaccgccgccgccgccgctggccacggggccgctcatcagaggagcgggatttggtcgatcagggatgatttggtggtgccgaggtcgccctacttccctgtggagtatgcgtcggggcaggaacgcgggccatcgcccatggtgatggagcggttccagagcgtcgtcagccagctcttccagcacaggatta

SEQ ID NO: 415849 - DNA, 513 bp, Oryza sativa
gctttacgcagggcaagcaggacttgtgacggtgcaggggaagattaccgctgttcttggaactgtgttgataagcgcctaccttttcatcacattgttccctgaccaggctgaaaagctttttgacttggctggaatcaaattgtgatcagaattgtatctcttttcatgcattttggttctcctcttggggattcatgttcccattgcatggctaacttaagcggacttggggagatcttttcatgatgaaaagaaagttaggctcaacgtgcaatatgtagggaattgttggcatatccaaatgtatttcctcttgaatacattattttgctcgcatgcatgctatccttttccaattgtatgtatggtttatcgaatttttgttgttccgacaaaaaaattacgcccttgcagagtaatggttcatgatttcaagctgagcacacaatagaaagtttaacaaaaaaaaaaaagtgtagtctgtagattgtataccaataacatctgaaa

SEQ ID NO: 415850 - DNA, 489 bp, Oryza sativa
gatttagcagctcttctgcatttgagcatgtgctggttggtgagatcaagggacgacgaggacagcgagagaatgaggtctaaggattccataattggattcaggcaagttcttgtaatgttacaacagttcttgtattccttgcataaaaattactctgattggtatttcgtgaaacaattgcagttttacctggaagaagccaatgggaatgtggattaccaaggttacatattcccaaggaggcgtggggaatcgcctgattcagagacacagctattgactattcagtttgagtggcacggagttctgaaatcggtatccagcactctgattggtgtcagccctgagtttgaggttgcactctacacgctctgcttctttatgggaggggaagataaccgcgttgagattggcccgtacggagtaaacatcaagtgctaccgaatgggaaacagcaaaattgggtcagcatttccaattgcagat

SEQ ID NO: 415851 - DNA, 415 bp, Oryza sativa
ggcagcctccatgccgtgccgcctgcctctgcgcagcgggcttgatatcttacctgcgttttctgcgccgcgtcctcctatctatccttacccctaaggctatagctacaccggctgtcggacaccgccgctccccgtcgccaccgacgacgactcgcgagggagtgtggtgaggactgatgaacttctaaacattgggtatggatggatgtgactgcatagagccactatggccaactgatgagctcctcatcaagtatcaggacatctcggacttcttcatagccctcgcatatttctcgatcccgttggaactaatttatttcgtgaagaagtcattcttcttaccatacagatgggttttgatccaacttggtgcatttatagtcctatgtggagcgacttaacttataaa

SEQ ID NO: 415852 - DNA, 383 bp, Oryza sativa
cacatactcgttaacctccatcttctcttctcctcgcacgagctcgcagctcaagcgcacccagccatggcgactcctcagatctcgcgcaaagccctcgcctccctcctcctcctcgtcgccgccgccgccgcggtctccaccgcgtccgccgacgacgtgctcgccctcaccgagtccaccttcgagaaggaggtcggccaggaccgcgccgccctcgtcgagttctacgcgccatggtgtggtcactgcaagaagcttgcccctgaatacgaaaaactcggtgcaagtttcaagaaagccaaatcagtcctaattgcgaaggttgactgtgatgagcacaagagtgtgtgcagcaagtatggagtttctgggtaccccac

SEQ ID NO: 415853 - DNA, 442 bp, Oryza sativa
atattgactaggtctggtagttttgagtttgcaacagtcgaaaatgttgttatctgtggaagcatgaactctgcattggaactactatcatcaactccatactgtttatccattgagaaagtttttgttatagggggtggacaagtactaagggaatctcttaatggaccttcatgtgaggcagtccatttaactgacattcagtcaagcattgagtgtgacacctttattcctccgattgacttatcggtgttccaaccatggtattcatctttgcctgtggtagagagcaacattaggcattcgtttgtgacctatgttcgggttagaaaaacaatggcagaaacacatgactcaaatggcaaggaatcagctaatgatggtatcaagagtgacaaatttgaaaccgagaatttctcttttctccctaagttgatatttg

SEQ ID NO: 415854 - DNA, 72 bp, Oryza sativa
ggcaaatagtcaggcatgacacaaataaataacatcattcggtcatacatagttttaacaatagatataaaa

SEQ ID NO: 415855 - DNA, 527 bp, Oryza sativa
ggattctgtagttctgtccctgtttgcgacgatcgtgaacaaatacaaaggtgaagtgcttgaagacgtgcctcgcatatttgaggctgttttccagtgcactcttgagatgatcactaaaaactttgaagattacccggagcatcgcctcaaatttttctctttgcttcgtgcgattggcacccattgcttccaagcattaattcagctttcaagtcagcaattgaaacttgtgattgactctatcaactgggcatttagacatacagagagaaacatcgcagagactggtctcagtctattgctggaaattttaaagaactttcaggcctcaggattccaaaatcaattctacaaaacttattttttgaatattgaacaagagatctttgcagttctgacagacacattccacaagcctggtttcaagcttcatgttttggtgctgcagcacttattttgtgtggttgatggtctgacggagcctctcttggatgcatcctcagtaccatacccatatactgaca

SEQ ID NO: 415856 - DNA, 441 bp, Oryza sativa
cttttgattgctgaggccactggaatctcggacgctgctcaagggtacaaagatactcctggtatttggacaaaggagcaagtggaagcgtggaagccaatcgtagacggcgttcatgccaaaggaggaatatttttctgtcagatttggcacgtaggaagagtctctaataacacttttcagcctaatgggcaggctccaatttcgagcaccaataagtcactaaaacctgcagtaagagccaacggcatagatgtggctactttctcaactcctaggcgattagagactgatgagatcccttttgtcgtgaatgattacagggttgctgctagaaatgcaattgaagcaggatttgatggtgttgaaatccatggagctcatggttatttgatcgatcagtttctaaaagaccaagtcaatgatcgttctgacaaatat

SEQ ID NO: 415857 - DNA, 361 bp, Oryza sativa
gtattccttttgagcgagagatcgaagcaagctgcggcgcgtatcttacgacatgggggaggtggcgtcagcggtggcggcggtgactacggagcaagggaatgggagcagcgggtgtgagcagaagactcggcactcggaggtcgggcacaagagcctcctcaagagcgacgatctctaccattacattctgtagacgagcgtgtacccctgcgagcacaagtgcatgaacgagctccgtgaggtcaccgccaaccacccatggtacctgatgactacatctgcggacgaggggcaattcctgaacctgctgatgaagctcatcagtgccaataataccatggagatcggcgtttacacc

SEQ ID NO: 415858 - DNA, 576 bp, Oryza sativa
tcgctttacgtcttttcttaactgttcgtggttgtttgaccacattatgttctttgataacaaaagaagtgtccaatgttgaatcacaggagagaagccttagcattgacatttcacaaggattcattcttcacaagcttgttgagcttctcaacaaatttcttgaaattcccaatattagagcaagatttatgagtgataatttattatctgatgtgctggaggcttttctggttatccgtgggctagttgtgcaaaagacaaagttaattaatgactgcaataggcttttgaaggaccttcttgatagcttgcttgtagagagtactgcaaacaaacgtcaatttattcgtgcttgcatctctggattgcaaaagcatgtgaaggaaaagaagagacggacatctctgttcattttggagcaactctgcaatttaatttgcccagtaaagccagaacctgtttatctcttaattctaaacaaagcacatactcaagaagagttcattaggggctctatgacaaggaatccatactccagtgctgagatttgcccactgatgagagatgtgaaaa

SEQ ID NO: 415859 - DNA, 530 bp, Oryza sativa
ttcgctaatccccctcctcaatctctcctcctgttttgtcctatcgccgccggtgcgcgctggcaaatctgcatgccaagccgcgatgccatgccatggcaaggccaggatgggtctgaatttgtcgtgtcatatccactcgagtcgcgagttggccggacgccgaggagagtagccgcggatctgactgcatgacgcggtcagcgggcctggattcctacgaaaggagccgcctttgatctataatcggaggaatatgaaggattaaataccttaacaactgccaaggcaccattgttctctacggtgcagaagcgagcctaaagtgccgctcattttggtttataatcggattagtctttgttcagctgatctgcgcaatccaataccgagtcgtgaaggaacatgctgatgatgcattctatgaattgcagaatccccaacagcaaattcaggcctatgcctttgatgtggtcctggccctagttccaagaatgaatcttgatgacctttttgagtaaaagatgatg

SEQ ID NO: 415860 - DNA, 380 bp, Oryza sativa
ttctctcaccatcaggggtaaaagcaatacgggggcgtggaaacatcatatcgaggtagtcatcggctcttccaccatgggcctatcttcctcctcgctggccattaaggccactcttaaagtgttcagcgaggggcgcattaccatgcacaagtctgaagctaacaccaagcccgcctcgtactggagcccttggtacggcaccaaccgcgtactatacctcggaccactctccacgctagcctttctaactacctgacctgcgattttctcggcgactacaggtgggacaccgcatggctcttcgccgacccggatacgtactgcaacaacctggagctattagttatccactccacgagggcgatactcggcactct

SEQ ID NO: 415861 - DNA, 385 bp, Oryza sativa
tttggttaccgtgatggaaatccaagagtcacggcaggggttacaagggacgtatgcgtgttagctagaatgatggctgctaacttatactatgcacagatagaggatctgatgtttgagctatctatgtggcgctgtagtgatgaactacgtgtaaaagctgatcagttacaccgttgcgcaaagaaaaacacaacaaagcactatatagagttctggaaacaagttcctccgagtgaaccctatcgtgtaatactgagcaatgtcagagataagttgtacaatacacgcgagcgagcacgccatttattagccagtggattttctgaaattcctgacgaagcaacattcactgatgttgagcagttcttggagcctcttgagc

SEQ ID NO: 415862 - DNA, 458 bp, Oryza sativa
gcactcctctcctctcctctcctcagatcggatcgggagggccccaatcccaccaccgatcgatccattcctgctgctcgcggccaccggagaaggagagagagagagagctcgacctcgtcggcgggtgaaggatcgcagcagcagcagcggcggtagagcaggaggagaggcgaagatgtcgtcggtgttcagcggcgatgagaccgcccccttcttcggcttcctcggcgccgcctccgccctcgtcttctcatgcatgggggcggcgtacgggacggcgaaaagcggcgtcggggtggcgtcgatgggggtgatgcgcccggagctcgtgatgaagtccatcgtgcccgtggtcatggctggtgtgctgggtatctacggcctcatcatcgcagtcatcatcagcacggggatcaaccccaaggccaagccctactacctcttcgacggctacg

SEQ ID NO: 415863 - DNA, 362 bp, Oryza sativa
cattctatttcaagaagctcagctcctcctcctcgggcatggtagaaatggccacgggcgcgtccagcctcctcaagacctccttcgccggcgtgcgcctccccgacgacgtccggaaccccaccgtgtccgtcgcgccgggcaccgggggcgccatctgcaacttcatctggtgcgcggcgtgcactcccccctacgaccgtaacgccatcaggttcagccccatcaaggagtccatcgtgttccgcgagatgacccggcggtacatgaccgacatgatcacctacgccgacaccgacgtcgtcgtcgtcggcgccagcttcgcggggctctactgcgcgtacgagctctccaaggacccc

SEQ ID NO: 415864 - DNA, 514 bp, Oryza sativa
gccctatcggttccgcttctcctctcccctcgccatgtcgcttgccgtggccactcccgcctccgcccgcctctccccgctcaccacctcctcccccgaaccctgccgccgccgccgcctcctcctctccgcagccgcccctctccggcgcacccgtctccggcgccgcatcgccgtcgtcgcgtccgtccccgaccccgcggcgcggccggcggagtacacgccctggctcatcgctggcctcggcaaccccggcagcaagtaccacggcacgcgtcacaacgtggggtttgagatggtcgatcgcatcgcgcgagacgaggggatcaccatgaacacgatccagtccaagtcgctgctcggaataggttcgattggggaagtgcctgtcttgttggtaaagccacaatcatatatcaactacagtggggaggcaattggacctcttgctgcctattatcaagtaccattgcggcatatccttgtgatgtatgatgagatgagtctacccaat

SEQ ID NO: 415865 - DNA, 502 bp, Oryza sativa
  unsure (1)..(502): unsure at all n locations
ttggtttaccttacacacctgaccaccctgcgttccatctaccacatgaggcccggtttcgccgaatttgcgtccaggccctacgtttccaggtggtacatgaggatgatgtggcctctgtcatggctctccatggtgctgacatggacgtacggttcttcattcactgttgagaggaatgtcatgaagaagatcaggatgcagtcatgggccataccaagatacagtttccattatggattggattgggagaaggaagctatcaatgatcttatcgaaaaggcggtatgtgaagctgacaagaatggggctaaagttgtaagccttggactcctgaatcaggtagctcatttcctaatgaattcagagcaagttgaaacattatcatccatacttcagaattcagatgttagctatatgtccacatgtactgccaaattttagtcaagataaaacagntagtgcttaataattgactatcttcagggaaaggtttagtcat

SEQ ID NO: 415866 - DNA, 493 bp, Oryza sativa
ttggacttcgccgtcgaggacatcctcatcaccgccgcccacgtcacgctctacgacttcaacatcgagctcaaccagtggagccggaaggacgtcgagggatcgctgttcgtggtgaagaggaacaagcagccgaggttccagttcatcgtcatgaacaggcgtaacaccgataatctcgtggaggatctattgagtgactttgaatttgaacttcagcctccgtatttgttataccgaaatgctgcacaagaagtaaacggtatttggttttataaccaacaagactgtgatgctgttgcaggtgtttttggaaggatattgaatgcttacgccaaagtgcctccaaagcccaaagtaccttccacaaaaagtgagtttgaggaattggaagctgttcctacatccgctgctatagatggcccccttgaaccttcttcgtcgtccactgttctagtttctaatgcccctgatgaatcattgactgattatt

SEQ ID NO: 415867 - DNA, 520 bp, Oryza sativa
ctgtgatttctgaaatcatccctgagatggagatgggtgactttgagtttgacccgtgtgggtactcaatgaatggcatttatggtcccgccgtctccacgatccatgtcactcctgaggaaggtttcagctatgcaagctatgaagcaatgaacttcaatcctagctccttggtctacgatgatttgatcaagaaggtcctggcttgtttctgcccttcagacttttcggtcgctgttaccatcttcggtgggcatggttttgccaaatcatgggcaaaaggtgcagaggttgattcctacatgtgcgatgatcttgttgagcaagagcttcctggtggcggtgtgctgatgtatcagagttttactgctgttactcctggtgctgtgtcaccgaggtcgaccttggatggctggaacagcgatggagcagagatggttgcgaagagcaaagagatgagtgtctgctgggaaggagagaaggcggccaaaaagaaagatgcagatgcctgagaaatcgc

SEQ ID NO: 415868 - DNA, 514 bp, Oryza sativa
gcattcgcatccacgagaccactcgaacccgacccgcctggccgccgccgccaccgaagtaatcccttaattggtcaaaatgtctcgggaggagaatgtctacatggccaagctggccgagcaggctgaaaggtatgaggagatggttgagtacatggagaaggttgcaaagactgtagatgtggaagagctcactgttgaggagcgcaacctcttgtctgttgcttacaagaatgtgattggtgcccgccgtgcctcctggcgtattgtctcatccattgaacagaaggaggagggtcgtggcaatgaggaacatgttactctgatcaaggagtaccgtggcaagattgaagctgagctgagcaagatttgcgatggtatcctgaagttgcttgactcacaccttgtgccctcatctactgctgcagaatctaaggtgttttacctcaagatgaagggtgattaccacaggtaccttgcggaatttaagactggtgccgagagaaaggaagct

SEQ ID NO: 415869 - DNA, 506 bp, Oryza sativa
  unsure (1)..(506): unsure at all n locations
tcgccagcttcttctcaactcgacataagagctccctggcttctctgtaggggggtcactttggtcgatggagggggggacgaagaaagttttcacagttcaggtggaggatggaaagcccaggaaggacggccggccggcggtagggccagtgttcaggagtgcactgtcaaaggatggattcccgccacttgagcctgacatgaaaacatcatgggacgtgttcagggtcgcagcaggcaagtacccagataatcggatgctcggatggcgtcctgtaaaagatggagtgatagggccatacatatggaaatcatacagggaagtgtatgaagaagtcctgcaagttggatctgctttgcagcagctgggggtgaagccaggttcccggattggaatatatggatcaaactgccctcagtggatagtagcaatgcaggcttgcaatggttacagcttaatctgtgtcccactctacgatancgtaggtgcaggagcttgtgact

SEQ ID NO: 415870 - DNA, 453 bp, Oryza sativa
ggctccgccgctcgccgcgccgcgcttccgggcgggcgcgctacccctccgcctccgcctccgcacccgcccccagaagctcccctgctggcgccgcgccgcccggcccaacgacgaggattactacttgatcgatgcgccggagtccatcggggacggcttctcgttcagtggggggaagtatacggatggcccgagcaagtccgatgagtggtttgctcaagggagaatggtaaaagctcatccagtatacgggaacaaagggaaggcaaaagatcccatctttgggctcacaatgggagctgaatcacaatcttcaaatgatgttttcaggtggttttgtgtggaggctgggagttcttcgaatcctcctgttctttctattcatggatttccatctcaggcatactcttatcgaaatgtgctacctgtagtatcagacaattatcatgc

SEQ ID NO: 415871 - DNA, 480 bp, Oryza sativa
  unsure (1)..(480): unsure at all n locations
tcggactaccgcgcgcgagcagagcatctcctgactcgctancttgctccagtttcggggagctgcgtgacagttcaattgaactctctggattcgttggttacttcgtctgagctgctgcagcgttgaggaggaggaggagcaatggcgctcacgacgttctccatttcgagaggaggcttcgtcggcgcgctgccgcaggaggggcatttcgctccggcggcggcggagctcagtctccacaagctccagagcaggccacacaaggctaggcggaggtcgtcgtcgagcatctcggcgtcgctgtccacggagagggaggcggcggagtaccactcgcagcggccaccgacgccgctgctggacacggtcaactaccccatccacatgaagaacctgtccctcaaggagctccagcagctcgccgacgagctccgctccgacgtcatcttccacgtctccaagaaccggggacatctc

SEQ ID NO: 415872 - DNA, 474 bp, Oryza sativa
  unsure (1)..(474): unsure at all n locations
tgctatccgccgccgccggcgtactcnagagagacaggatcatccatggcgggcaagggcgagggtccggccatcggcatcgaccttggcacgacctactcgtgcgtgggcgtttggcagcacgaccgcgtggagatcatcgccaacgaccagggcaaccgcaccaccccctcctacgtcggcttcaccgactccgagaggctcatcggagatgctgccaagaaccaggtcgccatgaaccccatcaacaccgtcttcgatgccaagcgtctcattggcaggaggtttagcgatgcttctgttcagagtgacattaagctctggcccttcaaggtgattgctggacctggtgacaagcctatgattgttgtccagtacaagggtgaggagaagcagtttgctgccgaagagatctcctccatggtcctcatcaagatgcgtgagattgctgaggcctaccttggcaccaccatc

SEQ ID NO: 415873 - DNA, 431 bp, Oryza sativa
ggtttccttacacacaccactccatttctgagctgttctagtttgagtgagagagcagcagaagggagtagtgcaagatgccgatccgcaacatcgccgtggggagccaccaggaggtgtaccacccgggtgcactcaaggcggcgttggccgagttcatctccaccctcatcttggtcttcgccggccagggctccggcatggccttcagcaagctgaccggcggcggagcgacgacccccgccgggctgatcgcggcggcggtggcccacgccttcgccctgttcgtggcggtgtccgtcggcgccaacatctccggcggacacgtgaacccggccgtgaccttcggcgccttcgtcggcggcaacatcaccctgttccgcggcctcctctactggatcgcccagctcctgggctccaccgtggcgtgc

SEQ ID NO: 415874 - DNA, 432 bp, Oryza sativa
gtttgctgttcgtctgaggccatattacattatcgcgatggttgagattgacaatggccatggtaacacattcagtgctttccttcaaatattggacaatggaagggttactgactcgcaaggcacgaaagtgagcttcaccaacagtatcattatcatgacatccaatgtttgatcacagctcatactaaacatggatgaataaggtgggtcaactgattcagcctatgagaatataaacaagagggtgatggatgctgcaagatctgtcttccggccagagttcatgaatcggattgatgagtacattgtcttcaagccacttgagagggaacagatcaacagcattgtcgaattacagcttgcaagagtacaactaagaattgccgatcgcaagatcaaactacaagtcgtcactggagcaatcaaatt

SEQ ID NO: 415875 - DNA, 595 bp, Oryza sativa
  unsure (1)..(595): unsure at all n locations
ctcgctttcacgcaagattaaaagctgcccctcttgctgctgcagactgcagtcctgcaagatcagcgcctgaagcaagaagcgaagaatcaaacgagagcctagcagcgtagcagatcgatcgatcgatcgatattatggaggcgcgaggaagcagaggaatgcggctgtggctcctgtccgtggcggtgatggccatggcgatggcgacgaggtcgcaggcgcagctgcaggtcgggtactacgacacgctgtgcccggcggcggagatcatcgtgcaggaggaggtcagcaaggcggtgtccgggaaccccggcatggccgccggcctcgtccgtctccacttccacgactgcttcgtcagggggtgcgacgcgtcggtgctgctggactcgacgcaggggaacagggcggagaaggacgcgcccccgaacacgagcctccgcggcttcgaggtcatcgacagcgccaagtcccgcctcgagacggcctgcttcggcgtcgtcttctgcgccgacgtnctcgccttcgccgnccgggacgccctcgcgctggtggggagggacgcgtaccangtgccggggggggagagaga

SEQ ID NO: 415876 - DNA, 511 bp, Oryza sativa
tcgtcttcttcgattcgcttcgtttcgttctcggtgttgatttgttcgagagagggggattctagcaatggctcctctcggtgacggaacggcggcggctgcggcggcagaccccaacctggtggtgtcgttcggggagatgctgatcgacttcgtccccgacgtcgccggtgtctcgctggccgagtccggcggtttcgtcaaggctcccggcggcgcccccgccaacgtcgcctgcgccatctccaaactcggtggctcctccgccttcgtcggcaagtttggtgatgatgagttcgggcacatgctggtggacatcctgaagaagaacagggtgaacgcggaggggtgcctgttcgacgagcactcgcgcacggcgctggcgttcgtgaccttgaaaagcaacggcgagcgcgagttcatgttctaccggaactagagcgccgacatgctcctgaccgatgcagagctcaacctggacctgatccggcgcgccaagatctttcactac

SEQ ID NO: 415877 - DNA, 490 bp, Oryza sativa
  unsure (1)..(490): unsure at all n locations
tcgttttttggaggggccgaggcaaccgtcgccgctgggacgatcccgtcccatccggcggcgccgccgccggagatttcctcgagataagccatgggtcaagcactcggtttggtacaagtagatcaatcgacagtagccatcaaggagtcctttgggaagtttgatgaggttcttgagcctggatgccactttttaccctggtgcatagggaagcagatcgctggatatctttccttgcgtgtgcagcagctggacgtccgttgtgaaacaaagactaaggacaatgtttttgtcaatgttgtggcatctgtgcaataccgtgctcttgctgagaaggcatcagacgccttttacaggcttagcaacaccagggagcaaatccagtcatatgtttttgatgtgatcagggctagtgttccaaagatgaacttggatgatgcatttgagcagaagaatgagatcgcanaagctgtggaagatgagcttg

SEQ ID NO: 415878 - DNA, 374 bp, Oryza sativa
cgcttcactatctgtcttggcgcgtcgtgtacacgagcgatcaccagacaatggcggtggcgcagcagcagcagcagcagcagaggcaggccaccggtgagtcgctgatgcagaagtgcaagccgtacgtggcgatggtctcgctgcagttcgggtacgccggcatgaacgtgatcaccaaggtgtccctcaaccacggcatgagccactacgtgctcgtcgtgtaccgacacgccttcgccaccctctacatcgcgcccttcgcgctcgtcctcgagcgcaaggtccgccctcgcatgtccttctgggtcttcctccagatcttcgtcctcgccctcctcgggccggggatcgatcagaatttctactacgcc

SEQ ID NO: 415879 - DNA, 484 bp, Oryza sativa
ggttaggtcatttcaggctacttaagaggcttgggtgtggtgacattgccagtgtttatttgtcggagcttagtggaacaaagtgctacttcgctatgaagattatggacacggcgtctctagcgagccgcaaaaagctactgagagcccagactgaaagggagatattgcagtgcctggaccatacttttttgccaacattgtacactcattttgagactgataagttctcatgcctagtaatggagttttgccctggaggagacctgcacaccctaaggcaaaagcaaccggggaagttttttccggaacaagctgccaagttttatgtggctgaggagcttcttgctctagaatacctgcatatgcttggcatcatatatcgggaccttaagccagaaaatgttcttgtgagaaaagatggccacatcatgctgtctgattttgatttgtccctaagatgtgctgtgagccctacccttct

SEQ ID NO: 415880 - DNA, 414 bp, Oryza sativa
atttatctgaacgcccagggccttgctcgctacggcatcatttgccaggagaacgggctggtgccgatcgtcgagccggagatcctcgtcgatggccctcacgacatcgaccgatgcgcgtacgtctccgaggtggtcctcgccgcgtgctacaaggcgctgaacgagcaccatgtcctcctcgagggcaccctcctgaagcccaacatggtcaccccgggttccgacgccaagaaggtggcgccggaggtcatcgcggagtacaccgtccgcaccctccagaggaccgtccctcccgccgtgccggccatcgtcttcctctccggtggacagagcgaggaggaggcgacgctgaacctgaacgccatgaacaagctcagcgccaagaagcgcgggtcgctgtccttcttcttt

SEQ ID NO: 415881 - DNA, 520 bp, Oryza sativa
  unsure (1)..(520): unsure at all n locations
tcgcattgatcgaaaagagaagaggagcggcggcgagatccaattccaatcgatccttgtgctgctgctgctgctgcgctcgacgatcccatccggatctcgatggcggccatggctcgccatctccctgctattcttcttctctcgtcggcgctgctcctcgcccttgcctccgcctccgcttccgctgctgctccggcgctggccgccttcgtcgatgccgcgtcgcgccgctacctgcgggatcagcaacaccacgaccaggccgcttcaatgtcactagaccaagtttctgcggctgtttctgtcttgcttggttttgcaccaccaccctcgctacctgcacaatcttcttcaaagttagacaagctgttactccctaacccatttgacagaccacgggctgntttcttgctgcaaatcgatggattccatgcctccgttgaaagcatcacatctgaagctggtagcatcttcaaaccactattgatggtctaaagcgatctgctacagggcttac

SEQ ID NO: 415882 - DNA, 362 bp, Oryza sativa
ttgtttttgagggtgatggcctactactcgccagcaggcacggtatctaatatcgcggggttcgcccccaccaggggtggctgctggagcacctggctgggttcaatcaacgtggaagagatcactccgcggcatctacgccgacatgcctacaccagctctgcccttcgtcagcggagacatgccgatgtcatcaatcccagcgccggatgtccacttcacgccatcgacagcggaggaagtctataaggacataactcattcaggcgtgaccatcttctccagcagattgaggccccctgctgatgcatgtggttgtgtcccctccagcttagctagggctggctctggtaccggcacaa

SEQ ID NO: 415883 - DNA, 474 bp, Oryza sativa
  unsure (1)..(474): unsure at all n locations
gttttctgtttaagcaattgaggctaatgatgtggggatcatctgaccttccttcgcgacttatgaaacaggcgggaggaagtgacaggtcaccgtctttcggaacgatacggcatgactgagtttggcatggtactggctaacccattgcatggtgcacgtaaagaaggctcagtcagcaaaccgcttccgtgtgttgaggccaagattattattgaggatggcgctgcatctacatctgaggtgggcgagctgtgtattaaaagggcatccatttttaagggacattgtacaaaaccagatgttactgcaaaatcatttattgatggtggggtgtgtaacactggcggtacagcaactgtanaggcatgagggacattcataattttagggcgcacaaataggtgacatcatgaaagttaggtggatataagctgtctgcattagaaattgattcagggctgtacagcatga

SEQ ID NO: 415884 - DNA, 530 bp, Oryza sativa
  unsure (1)..(530): unsure at all n locations
agatattcatggatataaagtgtagatatagtggattaatgcctcagtgtgctattattgtggccacaattagagctcttaaaatgcatggtgggggccctgatgttgtggctgggaagcctttggatcatgcatatgtgagtgaaaatgtggctcttgttgaagctggatgcgtcaatcttgctaaacatatcgcaaacacaaagagttatggagttaatgttgtagttgcaatcaacaagtttgcatcagatactgaagcagaaatggacgtggtgcgaaatgcgtctttggctgctggtgcttttgatgctgttgtctgcactcaccatgcgcatggtggtaaaggagcggttgatcttggactcgcggttcaacgggcatgtgagagccaggcagaccctctgaaatttttgtatcctttagaatctggcataaaggagaagattgagtcaatagctaagttctatggtgctagcggcgttgaatactctgaacaggcngagaagcagattgaatgtataccaagc

SEQ ID NO: 415885 - DNA, 543 bp, Oryza sativa
ttggcctcagagaggcgcacacaccagtgcagcaatgagaggctaaccgatcagatcatcaagctcaagcaagctaaaatcaatgatcgatgacgtgcctaagcaacagtcgccatggatgctgcctttttgttcgaccgatgctggtgctggtgatggtgctggagctgacgatattgattccgccggctagctgtcttgcaagtccggttcggaacatctcggccatcttcatcttcggcgactcgaccgtcgatccaggcaacaacaacaaccgcctgacgccgtccaaggccaacttcccgccgtacggccaggacttccccggcggcgtggccacaggcaggttttccaacgggaaggccatgagggacatgatagcttcaaaattgggtgttaaggagctaattcctccttatctcggcgatggtcttcaactcgatgatctactcagtggggtagcatttgcttctggcggcagtggatatgaccctctcacttctaaaataacgaccgcgatatcaagtagtcagcagcttcaat

SEQ ID NO: 415886 - DNA, 408 bp, Oryza sativa
ttggccggactctccccttctctctgtctcgctgcttcgttcgctcgctttatcccccccgaataaaggcgagaagccggagcggcggacgaagaagagggcagatagaaatggcggcggagacgttcctcttcacctccgagtccgtgaacgagggtcacccggacaagctgtgcgaccaggtgtcggacgcggtgctcgacgcgtgcctcgcccaggaccccgacagcaaggtggcgtgcgagacgtgcaccaagaccaacatggtgatggtgttcggcgagatcaccaccaaggccaccgtcgactacgagaagatcgtccgcgacacctgccgaggcatcggcttcgtgtccgacgacgtcggcctcgacgccgaccgctgcaaggtgctcgtcaacatcgagc

SEQ ID NO: 415887 - DNA, 401 bp, Oryza sativa
tttgggtggtggtgcttctggtcttgggggaggggaggggcgcgagcgagcgagcgaacgagcgagagagagagagagagagagaggaaggggagggagagggaggtgtgtgtgtgagagagagagagagatggcggtggagaagacggtgccgggcggggtgaggacggtgctggtgacgggcggtgcggggtacattggcagacacgccgtgctgcagctgctgctagtcggattccgcgccgtcgttttcgacaatctcaacaactcctccgagctcgtcgtccgttgcgttgcctgcctagccggtgaccacttcctgaacctcgtctttcacaaggttgaccttcgtgacaagggagcactggaaaaggtttttgctttaacaagattcgatgctg

SEQ ID NO: 415888 - DNA, 453 bp, Oryza sativa
  unsure (1)..(453): unsure at all n locations
ttgaaaaccaaaaccatttcccccatttcctcccctcgcctaccctaccatggacttctccggcggcagcggcggcggcggcgtcgcgtcggggagggtgcaggcggagcggtggctggagatcgccgggaagctcctcgcggcgcgggacctcgtcgggtgcaagcggttcgcggagcgcgcggtggaggcggacccgctcctccccggcgccgacgagctcctcgccgtcaccgacgtcctcctcgcctcccagtcggtcctcccctcgggccaggccgacccgctcgccgtcctccagctccccccgtccaccaacccggccgaccacgccgccgtctcccgcgcctaccgccgcctcgccctcctcctcaggcaggacaccaacccgcacccgggcgccgacgtcgccctcagcctcgtccacgacgcctatgccatcctctncgatcc

SEQ ID NO: 415889 - DNA, 476 bp, Oryza sativa
agctgcccgcctgggtaccggccgaattccggtcacccacgcgtttttttttgccgccgcggcggtgctcgtgctggcgggggctgttgcagtcatagtgggggagccacccaccgatgacagctccgtcctggtggccgcggggctgacgaattgcgtgtcctggtgccgtaccaaggtgacctactgcttgctcggctgctacggcggctgcggcggtcccgctcacatctcgacagcgataccagtctgcgtcatcagctgcaccagcgacgtcttgtgctgcgccaccggctgctccacctagctctgattaaggactaatgaagtaattaaccgcgctaattaataataaatcgcacctacttatgccacatgtggactcgcttgactaattaaatactgccatgcgaatgcgattagtggattatgaaaagaggaaatgtaataactcatggctctctctgtgccatgcc

SEQ ID NO: 415890 - DNA, 346 bp, Oryza sativa
  unsure (1)..(346): unsure at all n locations
gtcttcgactccggtggccgcatcaccatgcgccggaccgtcaagagcgcgccccagagcatctggtatggacctgaccgtcccaagtacctgggcccgttctcggagcagacgccatcgtacctgaccggagagttcccgggagactacnggtgggacacggcggngctatcggccgacccggagacgttcgcgaggaacagggagctggaggtgatccacttcccgggggccaatgctgggggcgctgggctgcgttttcccggagatcctgtccaagaacggggtgaagttcgggagggcggtgtggttcaaggccgaggcgcacatcttttctcaggggggg

SEQ ID NO: 415891 - DNA, 477 bp, Oryza sativa
gctttccgtcgccggccacaaccattcctcacgaggggaggatgacgaaaaaaaaaaaaaaatcccactccgtgttggtaaaatccgactaccacttcggcctgtctcaatccaagaattcaagaatcgaactcctttggggtcgcctcgctgaatcttccttatatatacgcgctctcccattcgcgtgtgctccaaatcgtagtggggggaagtggagttgacgagctgtggaaaaaaagcctatcgcaatggagtccatcgccgccgccacgttcacgccctcgcgcctcgccgcccgccccgccactccggcggcggcggcggccccggttagagcgagggcggcggtagcggcaggagggaggaggaggacgagtaggcgcggcggcgtgaggtgctccgcggggaagccagaggcatgcgcggtgatcaacgggagcgcggcggcgcgggcggcggaggaggacaggaggc

SEQ ID NO: 415892 - DNA, 531 bp, Oryza sativa
  unsure (1)..(531): unsure at all n locations
atctcatgtagcaaaagcagtttcagtttcggctccattggttattaatttacctctacagaagaatgggcacagagatggccaccgtggaggtggagggcatcccatttcctcaggagatcaccgtcagtaagccgttatcactgctagcccatggcattacagacattgagattcatttccttcagatcaaatacaacgccatcggggtgtatcttgaaaaggacaatgtactatggcatttggagagttggaagggcaagaaggcagaggagcttgtgcaggatgatggcttctttcaggccctagtttctgctcctgtggagaaactattcaggatcgtggtgatcaaggagatcaaaggatcacagtacggcgtgcagctggagagctcagtgcgcgaccgtctcgtgtcagtggacaagtacgaggatgaggaggaagagtctctggagaaggtgactgaattctttcagtccaagtatttcaagcccaactccgtcctcaccttccactttnctaacacccctg

SEQ ID NO: 415893 - DNA, 459 bp, Oryza sativa
ttgccagtctcccccaaatctcctttgcgtccggtcgatttctcagcaaccatgtgggcctactgcggcaagtacaaggacgagctcatcaagaacgctgcctacattggcactcctggcaagggtatccttgctgcagatgagtccactggcaccattggcaagcgctttgccagcatcaatgtcgagaacgttgaggagaaccgccgctctctccgcgagctgctcttcaccacccctggtgccctccagcacctaagtggtgtgatcctcttcgaggagaccctgtaccagaagaccaaggacggcaagcccttcgtcgatgtcctcaaggagggtggtgtcctccctggcatcaaggttgacaagggtaccgttgaggttgccggcaccaacaaagagaccaccacccagggccacgatgatcttggcaagcgttgcgccaagtactacgaggcc

SEQ ID NO: 415894 - DNA, 477 bp, Oryza sativa
tttggtcgccaatggacgtgacattgaggtcgcgacggtcgatgtcgcgataggcaacacctaccttgccctcgcccgcttcgacgaggctgtcttctcctaccagaaggcgttgacagtactcaagtctgcccgtggtgatgaccacccttcggttgcatctgtctttgtccgcctcgcagacctttaccaccgaacagggaggctccgcgagtccaaatcctactgtgagaatgcactccgtgtctatgcaaagcccgcgcctggcgctgcccctgatgaggttgctggaggcctaatggagattgctgccatctatgaggcgcttggagaccttgatgaggcactgaagcttttgcaaagggcactaaagttgcttgaggactcaccaggacagtggagcactgttgctggcatcgaggcacaaatgggtgtgttgtactacatggtagggaggtatgccgattcaaggaactc

SEQ ID NO: 415895 - DNA, 324 bp, Oryza sativa
gcgtgaactgccgcgtttctgccaatggcatgaggggtctgtgcgtctcggcgccccgcgccgacccgctgaactgggggaaggccacggaggagatgacggggagccacctcgacgaggtgaagaggatggtggcggagtaccgccagcctctggtcaagatcgagggcgctagcctgaggatcgcgcaggtcgccgcggtggccgcggccggcgaggccagggtggagctcgacgagtcggcccgcgagcgcgtcaaggccagcagcgactgggtgatgaacagcatgatgaacggcacggacagctacggtgtcaccaccg

SEQ ID NO: 415896 - DNA, 424 bp, Oryza sativa
  unsure (1)..(424): unsure at all n locations
cccttcgattaaggaaaaaaaaaggaggaaaagaagagaggatgaaagcgaanaggggggagagagacgctcgtctccacgtcgccgccatggccgcccgcgccgccgccgccgcgttcctgctgctgctcatcgtcggcgcgggcaccgcggcgccggacatgtcgatcatctcctacaacgcggagcacggggcgcgggggctggaggaggggcccacggaggccgaggcgcgcgccgcgtacgacctctggctcgccgagaacggcggcggctcgcccaacgcgctcggcggcgagcacgagcgccggttcctcgtgttctgggacaacctcaagttcgtngacgcccacaacgcccgggccgacgagcgcggtgggttccgtcttgggatgaaccggttcgccgatcttaccaacgagga

SEQ ID NO: 415897 - DNA, 439 bp, Oryza sativa
gtcttgtttctcctcgagaagggcgccaaggtcaggctcggcagacatctgggccgggggaagggtgtcacccccaagtacagcttgaagcctcttgttccacgcttgtctgagctacttggagtcgatgttgtgatggccaatgattgcattggtgaggaagttgagaaattggctgctgctttgccggaaggtggtgttctactcctagagaatgttagattctacaaggaggaagaaaagaatgatcctgagtttgccaagaagcttgcagctgtcgctgacctctatgtaaatgatgcttttggcactgcacacagagctcatgcttcaactgagggagtgaccaaatttttgaagcctgctgttgctggcttcctgatgcagaaggaacttgactatcttgttggagctgttgcaaacccaaagaagccatttg

SEQ ID NO: 415898 - DNA, 470 bp, Oryza sativa
cggtcgcgtggggctggcccagatggcaactgttggcctggatcaccaaagagattgtgcgccgaatctaggaactcattggtagagcgcaattcgcagacaccacccccaaagcaaagccaaacagggttaagtattttgaaagcaaaataccatcctctccaggcaacattcgcaagccccactgtcagtaatcctgttagtgggaatgaaaaatgtgctgtagtaggggtccagatcttcttttccaaaatcttgaagttggctgctattagaataagaaacctatgtgaaaggctacgacatgaagagctgactgtgagcgtctataatatctttaagcagattcttgaccaacagacagctttatttttcaacagacacgttgaccaaatcattctgtgctgcctctatggtgttgccaaggtttctcaattatcattgacgttcaaggagatcgtcaacaatta

SEQ ID NO: 415899 - DNA, 506 bp, Oryza sativa
tttagctatctccaaaacgtgccccatatctaatgtggcgttgcacgcggccggcggcggaagagcagagcatcaggcgcgtgtggatagccggaggacatggccacccacttcacgctcaacaccggagcacgcatcccctcggtgggcctcggcacctacaaggccggcaccggcgtcgtcgccgacgtggtctccgccgccgtcaaggcagggtaccggcacatagactgcgcgccgctgtacaagaacgagcaggagattggtggtgctctgaagaagctcttcgatgatggggttgtcaagcgggaagacctcttcatcacctccaagatatggtgcagcgacctcgcacctgaagatgtcccactcgcaatggatagtacactgaaagatctgcagctggattacgttgatctgtatctgattcattggccgtttcagatcaagaaaggcacggagctcagtccagagaacttcgtcaagcctgacatacccagcacctg

SEQ ID NO: 415900 - DNA, 348 bp, Oryza sativa
  unsure (1)..(348): unsure at all n locations
tttgcttactcagcagcaagatgggtgccggcggcaggatgacggagaaggagcgggaggagcagcataagctgctcggccgcgccggcaatggcgcggccgtgcagcggtcgccgacggacaagccgccgttcacgctggggcagatcaagaaggccatcccgcctcactgcttccagcgctcggtgatcaagtccttctcctacgtggtccatgacctcgtgatcgtcgccgcgctgctctacttcgcgctggtcatgatccccgtgctgccgagcgggatggagttcgcggcatggccgctctactggatcgcgcanggctgcgtgctcaccggcgtgtgggtca

SEQ ID NO: 415901 - DNA, 429 bp, Oryza sativa
tttcgcttatctccatctggcgaggagagcagggcaggggaggggatcctgatgggtggtggccccaaagtttgggggttcaactgaaaccccatgcccccccatgtcccaagttggatccgccggtgagggatccaattccatggcggctgctcctcctcctcgcctactcctcctcgtcgtcctcctcctcgtgccagtctccaacgccatctactgcgaggaggatgattgctatgatcttctaggagtcaagcaggacgcgaacgtatcggagatcaagaaagcctactacaagctctctctcaaacaccatccggataagaatcctgatccggagtcacggaagctgtttgtcaagattgccaatgcttacgagattctaaaagacgaatcaactagggggcaatatgactatgctattgcaca

SEQ ID NO: 415902 - DNA, 429 bp, Oryza sativa
cccacccaccctctcgccgtcgcagatccgatccgggaagagctcgccgccgccggtgccatggcgctctccgtggagaagacctcgtcggggagggagtacaaggtgaaggacctctcccaggcggacttcggccgcctcgagatcgagctcgccgaggtcgagatgccggggctcatggcgtgccgcgccgagttcggcccctcccagccgttcaagggcgcccggatctccgggtccctccacatgaccatccagaccgccgtcctcatcgagaccctcaccgcccttggcgccgaggtccgctggtgctcctgcaacatcttctccacgcaggaccacgccgccgccgccatcgccagggactccgccgccgtgttcgcctggaagggggagaccctcgaggagtactggtggtgcaccgagcgc

SEQ ID NO: 415903 - DNA, 516 bp, Oryza sativa
  unsure (1)..(516): unsure at all n locations
attttcatctccgccgccgccgccgccgcctccggcgaggccccaccgacacagatccccccgcgatggcgttccgccgcctcctctccgccgcagtgcgccgtcgctccgccgccgcggcggcggcggcggggcccgggaatgcgcgcgaggcatccaccgcggtcgccgccgcggggcccggcgtcatcgcccccgacgcggccccggtccgccccccgatgatggtgtacgaccgcatcgccgaggccgtcaacgccaggctccgtcggctcgagcacccggacccccgcttcctccgctacgcgagcccagtccccgcccacgccgaccacaccgtcatcctcgccgcgccggagacccgcgtcacgacgctccccaacgggctccgcgtcgccacggagtcctcgctcgcctcgcgcaccgccaccgtcggcgtgtggatcgacgccgggagcaggtacgagacggaggactcggtcggngtcgcgcatttcgtcgagcacatgctgttca

SEQ ID NO: 415904 - DNA, 530 bp, Oryza sativa
caaaagcttctttgcatctatctattaaattattgtccctttctcttctccatggatttttgcaaggcgagatggaaggttccggcgctgtgcctggtgactgttcttctccaagcaagcctctctgcttgcgcgccaactcccaagacttacatcgtgcagatggcggcgtctgagatgccgagctcgttcgatttttaccatgagtggtacgcttccacggtgaagtcggtgagctcttcgcagctggaagatgaagaggatgatgcttccacgaggattatctacaactacgagacggcattccatggcttcgcggctcagctcgacgaggaggaagccgagctgatggccgaggcggacggcgtgctggccgtgatcccggagacggtgttgcagctgcacaccaccaggagccctgacttcctcggcattggcccggaggtcaagcacaagatatggttcgacagcctcgccgaccacgacgtcgtcgtcggcgtgcttgacaccggcatatggccggagagccc

SEQ ID NO: 415905 - DNA, 309 bp, Oryza sativa
gctctatttctcgaggatcacatggtgccaacagggacagtttcactaaacagggctgaggcgttcataaacgccgattttatgaacagtgtggacagtatggcataagtaccaacccgtgtgaattttgagcctcgaactgagcggaaagaaaatttccgtaccactgccggaaatgttgctagaacaaatggtattcatgaccacaataattaccagcaacctcagcaccttatgcgaaatggtctagcaccatctgtatcagaggcattaagtggctcgactgggagagagggaggctgttttccc

SEQ ID NO: 415906 - DNA, 324 bp, Oryza sativa
gatttagattactttgattaaggctatgcaggagggtgtggttaataacaagtgggggagtggctaatggggcacgaagctaattgtccagaagaggagagcgtcactcaatgactttgacaggttcaaggttatgttggccaagatcaacaggggaggtgctatcaggcaagagcttgcgaagctcaagaagactgccgcggcttaatagtgccatgttgagtttttggttccaagttggatcagcaatatgtttcaatggtcttagagccagaattagtactactgtttaatggaacctatttcatatttaaattgagcatg

SEQ ID NO: 415907 - DNA, 372 bp, Oryza sativa
tcggtttcgcgccaccgtgaagtggatcctcgagacgcgagggtgcttcggattctgccaccgcacggcgtacctggccatcgcctacttcgaccgtttctgcctccggcgatgcatcgacaggtcggtgatgccgtgggcggcgcggctgctggcggtggcgtgcgtgtcgctggcggcgaagatggaggagtaccgggcgccggcgctgtcggagttccgcgccggcgtcggcgacgacggctacgagttcagctgcgtctgcatccgccgcatggagctgctcgtgctctccacgctcgactggcgcatggccgccgtcacgccgttcgactacctcccctgcctctcctccaggctccggcgacacgt

SEQ ID NO: 415908 - DNA, 392 bp, Oryza sativa
gtccggaatccccgtttccgggtcggcctacgcattttgattatggaggttgggctctgataattgggtgcgtgtggtattctaatgggtgtggggcatctgaagtatggaagcaaactgaagtatgacagtgaagttaaaaagaagctttcaaaggatttgatgagaaaattggggcccaaccttggtactattagagctcctggattaggcttggtctacagtgagatagtgaaaggagttccggcaatttttgggcattttctgattgcccttcctgcaatccactcgataatcggttttgtatgcatcatgaatgtaccagtgcccgtggttccccagactgaaaggtttcttttccaacgtgtgttgacaagggggtatcacatgtt

SEQ ID NO: 415909 - DNA, 469 bp, Oryza sativa
ttgggttcttcctcttccgccgccgccaccggggccggagatattagaagatggccggggttgataccttcctctttacctcggagtctgtgaacgagggccaccctgacaagctctgcgaccaagtcttagatgctgtgcttgatgcctggctcgccgaggaccctgacagcaaggtcgcttgtgagacctgcaccaagacaaacatggtcatggtctttggtgagatcaccaccaaggctaacgttgactatgagaagattgtcagggagacatgccgtaacatcggttttgtgtcagctgatgtcggtctcaatgctgaccactgcaaggtgcttgagaacatcgagcaacagtcccctgacattgcacagggggtgcacggccactttaccaagcgccctgaggagattgggcttgtgaccagggacacatgtttggatatgcaactgatgagacccctgagttg

SEQ ID NO: 415910 - DNA, 512 bp, Oryza sativa
  unsure (1)..(512): unsure at all n locations
cggttgttctccgccgcagtctccattgaagcggcgggtgtatattccgcgcctcagagtgaaaatacatcaggaatcagaagtaagtgaactcaaatgccaaggcagtgaagaaccaatggatgcttcaagggcaactacggaacaattaatggagagtggagaggatgcaaaaactaccgaaggtgcaaaatggatggcaaagaagaggaaaagggctgttgaaagcatagcagcattttgctatgaagctgggattccttttaatattctttgcatagagagtttccagttaatgttagaagaaattgggaaatttggacctggctttcaggggccctctatggatgagcttcgagagaatttattgcaggagcatgtttcagctataactgataaagttcgatggctgaaggattcattggagtttgggggatgttctattattcttgacacttggctngatgaaaatggaaggcgccttatgatgctgggagcccactctattattg

SEQ ID NO: 415911 - DNA, 239 bp, Oryza sativa
gcttctcttgttaccagaccgcccgcagcaagcagcgcatcttcgaccgcggcatcgagttcgaccaggtcgaccgcgagcgaggctgggatgaccagatcctgtttaatgggttggtgttctacgcggggtacctggcgatgccgagcgtgaggcggatgccggtgtggaggacggacggcgccttggtgacggcgctggtgcacacgggccccgtcgagttctctactactggttca

SEQ ID NO: 415912 - DNA, 485 bp, Oryza sativa
agttatttttcatacaaccagctcactggaagctttccctcctgggctacccagaacaacttgcaattgaatttggtggcaaacaactttgatcttggcagcaccaacaacggtcaattatgtccacagtattctacctccagggctaaactgcctccagaaagacactccatgtttacgaggttctccagaatattattcctttgcggtagactgtggtagtaacagatctatcagaggctcagataatactatgtatgaattggatttcacagaccttggcagctcatcatattacgttaccagtgaaacaagatggggtgttagcaatgtaggaaaatatttccagtctccaaatgacagtaagatcatatatagcaatgagaagattcagaatgcagtggtttcagaactactccaaacttgcaggatgtcaccatcgtctctgagatactttggccttggacttgagaatggaattacac

SEQ ID NO: 415913 - DNA, 443 bp, Oryza sativa
cgttacgtacttgcatttccacaagacggatccggagcagacgtactacctctccatggagtacctgcagggccgcgcgctcaccaacgccgtcggcaacctcggcatcaccggcgcctacgcggaggccgtgaagaagttcgggtacgagctcgaggccctcgtcgggcaggaaaaagatgcagctctgggaaatggtggcttgggtaggctcgcatcttgctttttggattcgatggcaacactaaatttgcctgcttggggatatggtctgcggtaccgatatggtctattcaaacaatgcatcaccaaggaaggccaggaagaaattgctgaagattggcttgagaagttcagcccatgggaaattgtcaggcatgacattgtatacccaatcagattttttggccacgttgagattttgccagatggatctcgtaaat

SEQ ID NO: 415914 - DNA, 438 bp, Oryza sativa
atttctctctctctcctcctcctcgccgccgaccggcgccgtcgacgcgagtcgccttcgccgtccgggtagcagcaggaagagggaggaagggggggcatggcgctacggaggctgctccaggggagcgtcctgccgcggatggcgggcagagccgccgcggcgccgttctcgacggcgtccggggagaccgtccgcgccacgctcttcccaggcgacggcatcgggccggagatcgccgagtcggtcaagcaggtattcaatgttgcaggggtaccaatagaatgggaagaacactatgttggtacagaagttgatcccagaacagagagttttctgacttgggaaagcttggagtcggtgcggagaaacaaagttggcttgaaagggcctatggctacgcctattggaaaaggccaccgttcattgaatcttaca

SEQ ID NO: 415915 - DNA, 456 bp, Oryza sativa
tcggaaaaggcctgtgtcaaggagagggtagtggcaccttgctctcctttgccttcagagaaaccggaagcaatggcgtctgctactctcctcaagtcatctttccttcccaagaagtctgaatggggtgccacccgccaggctgccgcccccaagccggtgactgtctccatggttgtccgcgctggtgcctacgacgatgagcttgtcaagaccgcgaaaaccattgcatcaccaggaaggggtatccttgccatggatgagtcgaacgcgacctgcggtaagaggcttgcgtcaattggccttgagaacaccgaggccaaccgccaggcttaccggaccctccttgtcaccgcaccgggcttgggacagtacatctccggtgctatcctcttcgaggagactctgtaccagtcaactgtagatggcaagaagattgtcgacatcctcactgag

SEQ ID NO: 415916 - DNA, 410 bp, Oryza sativa
atttaactgatgagacccctgagttgatgccccggagcgatgtccttgctaccaagcttggcgctcgtcttacggaggttcgcaagaatgggacctgcgcatggctcaggcctgacgggaagacccaagtgactgttgagtaccgcaatgagagcggtgccagggtccctgtccgtgtccacaccgtcctcatctctacccagcatgatgagacagtcaccaacgatgagattgctgctgacctgaaggagcatgtcatcaagcctgtcattcccgagcagtaccttgatgagaagacaatcttccatcttaacccatctggtcgcttcgtcattggcggacctcatggtgatgctggtctcactggccggaagatcatcattgacacttatggtggctggggagctcac

SEQ ID NO: 415917 - DNA, 581 bp, Oryza sativa
  unsure (1)..(581): unsure at all n locations
agtatacatgcggcagcgacgagccatggccacacacgcggcgctcgcggcgtcccgcattccggccaccgcccggctgcacagcaaggcggcgtccaagcagagggtggacttcgccgacttctccggactgaggccgggatcgtgctccatcagccacgccgcgagggaggcgtccttctccgatgtccttggctcgcagctcgtcgccagggctaccggagagaacgccgtgagggcgccggctgaggcgaagctcaaggttgccatcaacggcttcggccgcattggccgcaacttcctccggtgctggcacgaacgcgagaactccccgctcgaggtcgtcgtcgtcaacgacagcggaggcgtcaggaacgcatcacaccttctcaagtacgactcgatgctcggcaccttcaaggccgacgtcaagatcgtcgacgaccagaccatcagcgtcgacggcaagctgatcaaggtcgtctccaacagggaccccctcagctgncatgggctgagctcggcatcgacattgcatcgagggtacccgagtgtcgtcgacggccccgcgccggaagaca

SEQ ID NO: 415918 - DNA, 469 bp, Oryza sativa
aattaaattcctattcaaatcgaaacccctctctgtgaggtcgtcttcgaggaattaggaggagagagagcaatggccgccgaggagggagtcgtgatcgcctgccacaacaaggacgagttcgacgcccagatgaccaaggccaaggaggccggcaaagtggtcataattgacttcactgcttcctggtgtggcccttgccgcttcatcgccccagtgttcgctgaatacgccaaaaagttccctggtgctgtcttcctgaaggttgatgttgatgagctgaaggaagttgctgaaaagtacaatgtcgaggcaatgccgaccttcctattcatcaaggattgtgctgaggcttacaaggtcgttggcgccaggaaggatgacctccagaacaccatcgtgaagcacgtcggtgccactgctgcatctgcttctgcctaagaattctcgcaggcgcaagttatcaaat

SEQ ID NO: 415919 - DNA, 268 bp, Oryza sativa
gtttttgtgtttgttctacgataccagcaatgatcgtgagggtggatactatgcaagaggtgcctgcgcgtcagtttgggagaatttcaagaacaacccgttgattgacatcttaaccgatcacccacccacgtactacgaagatatgcagagatctgtgttctgcttgtgcccattgggctgggctccatggagccccagactggtggaagctgtggatttcggttgtattccggtgatcattgcagatgacattgacctccccttt

SEQ ID NO: 415920 - DNA, 414 bp, Oryza sativa
tcgcaccccagcagcagcagcagcagcagctgagctggaagcatcagagcgaggtagacatggccgccgccaccatggccctctcgtccccggcgctggccggcaaggccgccgcgaaggtgttcggcgaggggcgcatcaccatgcgcaagtcggcggcgaagcccaagcccgccgcgtcggggagcccgtggtacggcgccgaccgcgtgctctacctcggcccgctctccggcgagccgccgagctacctgaccggcgagttccccggcgactacgggtgggacaccgcggggctctccgccgacccggagacgttcgccaagaaccgggagctggaggtgatccactccaagtgggcgatgctcggcgcgcttggctgcgtgttcccggagctcctcgcccgcaacggcg

SEQ ID NO: 415921 - DNA, 391 bp, Oryza sativa
gttttggtatcgtccaactagttcggcacaagtgggtggggacattatatgccttgaagggcatacaaatgaacattcaagaggcagttcgcaaacaaatagtacaagagctcaaaataaatcaagcaacacagaacgcacatatagtcctttgccaccaatctttctaccataatggtgtaatatatcttgttctagaatacatggaccgtggatctcttgcagatatcattaaacaagtcaaaacaattctggagccatacctggcagtactttgcaaacaggttttggagggtctactgtatcttcatcatgaaaggcatgtgattcacagggatataaagccatctaacttgttagttaaccgtaaaggtgaagtaaagattaccga

SEQ ID NO: 415922 - DNA, 420 bp, Oryza sativa
tcgctttctcctcatcctccccaaccactgcaggcggggcggcgttctcctcctgctgctgctcctcgcagaatgcaacgggcaattcaagctatcgggtcacatggcagtctcctcaagtctgctgttctgcgacacatcagtgctccaaaaccatctattttacctgctgtatattcacgctccatgtcagtttcatctgctcaaatagaggagagtggatttgagactgccactgtggcagatattttgaagtctaaggggaagagggctgatggatcttggctctggtgcactactgatgacttctgctatgatgctgtcaaatctatgaacgcaacacaatgttggagctctggtggttgtaaaccctgacaggataaatcaattgctggtattggtactgagagagattacctc

SEQ ID NO: 415923 - DNA, 370 bp, Oryza sativa
cctactctaccccccctttccccccctcccctgcgcggggttcgatttatccccccggagggctcgccgccctcggacgtcgccgccgcctccgccgcctcgcctcccggagattcgccgccttcgccgccgccgccatgaatcccgagtatgactacctcttcaagcttctgctcatcggagactcgggcgtcgggaagtcttgcctgcttctgaggtttgcggacgattcatatctggagagctatatcagtaccatcggtgttgattttaaaatccgcactgttgagcaagatgggaagacaataaagctgcaaatttgggatactgctggccaagagcgatttaggaccattacaagcagctacta

SEQ ID NO: 415924 - DNA, 464 bp, Oryza sativa
gtttcatgtgcggcatcggcgccgacgacgagtggggggaggaacttgataacacacgtgagggggttccaagggaggctgccgttccacctggagacggggtatgtggaggtggacaacaccgataccgttgagctcttctactacttcatccagtcggagcgcagccccgccgatgaccccctcatcctctggatcaccggcggccccggctgctccgccctctccggcctcctcttcgagattggccctctcaagtttgacgtagctgggtacacggaagggttccctcaattgttctacttccaagattcctggaccaaggtgagcaacgtgatatttctggacgcgccggtggggacggggttctcctacgcccgtgaggaacaagggtacaacgttaccctcacacagacgggacagcaggtggtggtgtttcttaccaaatggctgggcgatcaccc

SEQ ID NO: 415925 - DNA, 424 bp, Oryza sativa
tcggccgcggaggcgtcgtcgtctcccgtggggggcgggaggctaatgctatggggtccaagactaaggggtgctgcgggtggctgatcgtggcgctggtggcgtcgctggtggcgacggcggcggtggtggccatcatgaagaagaaggtcggcggggggagcgggcgcaagctcaagccgctgccggtgcccggcccgcccggggccatcgactccaagtacggcgacgcgctcggggtggcgctccagttcttccaggtccagaaggcggggaagctggagaacaaccagatcccgtggaggggggactcggcgctggatgatgggaaaccagcggggctggatctttccaagggaatgtatgatgctggtgatcatatcaagtgtagtttccctatggccttcacggcaacggtgctctc

SEQ ID NO: 415926 - DNA, 469 bp, Oryza sativa
ttgccctcctctcacattttccccaaataatagtggaggatggggaaaaacacatttgcagccacatcatccatggcctctctccgcaccattccggtgatcttcggcatcctcttctatgtccttgccagcactgccactgccaccgacgcaccggactacgtcgtccaaggccgtgtctactgtgacacgtgccgcgccgggttcgagaccaatgtcaccgagtatatcaagggtgccaaggtcaggctggagtgcaagcactttggcaccgacaaggtcgagcgtgcgattgacggtgtgactgatgagaccgggacatacaagattgagctcaaggacagccatgaggaggacatctgcgaggttgtcctcgtccacagcccccttgcaaactgctctgaaatcgaggccgaaagggatcgtgcccgtgttttgctaccaggaatgtcggcatctgtgacaacct

SEQ ID NO: 415927 - DNA, 427 bp, Oryza sativa
ggtcacttcccctgccaagcaaggtgctgacagggaggggtggttcgcatccaagcagtccctgagctacctggatggcacgcttccgggagacttcgggttcgacccgctggggctatcggacccggaggggaccggtgggttcatcgagccacggtggctggcctacggcgaggtgttcaacggccggacggcgatgatgggcgtcgtcggcatggtcgccccggagctcctcggcaagctgggcctcgtccccgccgagacggcgatcccgtggttccagaccggcgtgatcccccccgcgggcacctacacctactgggccgacccttacacttcttcgtcttcgagctcgccctcgtcggcttcgccgagcaccgccgcttccaggactggtacacgccgggctccatggggaagcagtact

SEQ ID NO: 415928 - DNA, 493 bp, Oryza sativa
cataaaattcccaaaaacaaaaaataataaaaaagagagggagagagacatttcgcatctgctgccctgcctcctctcccatcacctgcccattttttcacattgaggcccctctgaaaatattatatttacaactaggtccctggccgggccggccggccaccggaaggagcacctcgccggagaaggctttgtctcttctttttcttctcctcctcctcctccatcggcggcggcatggggttctcgctgtaccccatgaagacgtcgacgcgcatgctgtggagcaccagcttcttccgccataaggtcgcctcctccttctaagcccacgccctctcgggcggcggcggccagccggcggcggagcgcgcggttggtaggtgcgcgtgcgtgcgtgaacgggaaagcagcttcgagatcgggttttcttgggttcttggagaaaggaggaaaaaaaggggaggagagcatggatcccggccgcgtcgtg

SEQ ID NO: 415929 - DNA, 453 bp, Oryza sativa
  unsure (1)..(453): unsure at all n locations
cgttgagtaaggcgtcttcgtactcgcctctctgcgcgcctccgcgcttttcctcctcctctcccctctctcccttctccgccgccgtcgcagcatcaacccaatccgccgccatgagggagtgcatctcgatccacatcggccaggccggtatccaggtcgggaacgcgtgctgggagctctactgcctcgagcatggcatccaggctgatggtcagatgcccagtgacaggactgttggtggaggtgatgatgctttcaacaccttcttcagtgagactggtgctgggaagcatgttccccgtgctgtatttgttgatcttgagcctactgtgattgatgaggtgaggactggttgctaccgccagctcttccaccctgagcagctcatcaatggcaaggaggatgcagctaacaactntgcccgtggtcactacaccattggncaggaga

SEQ ID NO: 415930 - DNA, 448 bp, Oryza sativa
ttggttggatgcgccctcgccgccatcaccgagctcaatttcaatatgattggattcatgggggcgatgatctcgaacctggcattcgtgttccggaacatattctccaagaaggggatgaagggcaagtcggtgagcgggatgaactactacgcctgcctctccatgctctcgctggtcatcctcctccctttcgccttcgccatggaggggcccaaggtgtgggctgccggctggcaaaaagccgtcgccgagatcggtccaaacttcgtctggtgggtggcggcgcagagtgtgttctaccacttgtacaaccaagtgtcctacatgtcattggacgagatctcaccactgacattcagcatcggcaacaccatgaagcggatctccgtcattgtcgcctccatcatcatctttcacacgccggtccagcccatcaacgccctcg

SEQ ID NO: 415931 - DNA, 489 bp, Oryza sativa
  unsure (1)..(489): unsure at all n locations
ttgctctaactcacacattgccaattcccttggtgggggtgattttggctgctgcaatggtttcgtcgctggccctggtagctctgctcctcgtgagctgcgccgtggtggcggcggaggcgaccaagtacaccgtcggcgacacgttcggctgggcgatgggggcggattacaccacctgggccagcgacaagaaattcaaaatgggcgataccctcgtgttcaactacgccggtggggcgcactccgtggatgaggcgagcgcagcggactacgctgcgtgcaccgatagcaacgcgctccagagcgacagcagcggtacgaccaccgtcaccctcaagaccgtcggcaagcactacttcatctgcggtattgccggccactgcagcaacggcatgaagctcgacgaggacgttgtcgtggcctctccagccccagtcccaaaagccctgtacaccacaccgacgacttcatntacgacaccagcga

SEQ ID NO: 415932 - DNA, 433 bp, Oryza sativa
tcgttgtaatcatcatcatgatctcttcagtggctcgggtagctgggagcttcccttggggcagggctggttcatggcccaaaatcatacaggtgcttctccatctattccgattgatgtcggcagttctagaggatcaaatcgacatcatgcttctcgtcgtcatgttgtgggctcattacgtggggttgggagttcacttctaggcccccaaattgatgaagctgaggttcatgctgcatcattaggtgttggatctgaacttactacctcactgcttgctgctggagctgctgaattaccttgcacagtgaagcttagaatatggcggcatgatatcaaggatccatgtgttacattggaacccgaggcatgccggttgacaatttctcatgccgttctctgcagtgaaatgggtgcccatttttcccct

SEQ ID NO: 415933 - DNA, 446 bp, Oryza sativa
gttgtctttggtgcgcaacgcggagctgaagagcgtcgaccccgacaccggcaccttcctcggccggaaccagtccggcgagatctgcatccgcggagaacagatcatgaaaggctatctgaatgatcctgaggcgaccaagaacaccatcgacgaggacgggtggctgcacaccggagacatcggcttcgtcgacgacgacgacgagatcttcatcgtggacaggctcaaggagatcatcaagtacaaggggttccaggtgccaccggccgagctggaggcgctgctcatcactcacccggagatcaaggacgccgccgtcgtctcgatgaaggatgatcttgccggtgaagtgccagtcgccttcattgtccggacagaaggctcagaaatcaccgaggatgagatcaagaaattcgttgcaaaagaggtgggtgtctacaaga

SEQ ID NO: 415934 - DNA, 402 bp, Oryza sativa
catatgcttcgaagtttagcccatccccgatcgcggcagcatcatgttacaagaattcttgctcatatcgccgtgcaacgtctgaagaggtgttcaatccggacgaacaagatgcagcagagccggcaggacgtggacgagcatgtcgccgagctccgcggcgagctgcgcaaggcgcgcgaggagcgagaccgcgcgtaccgcgtcctggaggtgagcgagtggaaggcgctggcgtcggccaacgaccgcaccaccatagagacgctcgaggcggagctcgacgcgtccagggagtccgagaagcggatgctcgagtccctggcgatgcagacgaagcagctcgagatgaccaagatcgagctcgaggaggccaggctggagaacgcgtcgctgcgtgag

SEQ ID NO: 415935 - DNA, 457 bp, Oryza sativa
ccttgattctctacctggctcacagacaagacctgttgaactttcaggcactcctgatcagataagcagagctgagcaattgatcaatgaggtcctggcagaggctgatgctgcttcatctggtaatctctctagccgaaagtacaatgctcctcaaccaggcgctgatcaattccaaatgaaaatagctaacaataaggttggtctggttattggaaagggtggtgagactataaaatccatgcaagccaaatctggtgctcgtatacaggttgtccctttgcatttaccccctggtgatcctgcaaccgaaagaacagtgtatattgatggtacacaagagcaaattgaaactgcaaagcaattggtgattgaggttaccagtgaggtccgcttttatcccttgtcatatttgttgcctgatttcatgattgctatgccaatttgcgacttatct

SEQ ID NO: 415936 - DNA, 522 bp, Oryza sativa
gcttcacatttatgttgagactgaaaatgttcgctatgtgtatcagtcaatagaaggcctgtacttgctacttatcactaacaagcagagcaatattcttgaagatctggacaccttgaggctgctctctaagcttgtgcctgaatattctccctctcttgatgaggagggtgtttgtaaaacagcatttgagcttatatttgccttcgatgaggccatctgtcttggaaataaggaaaacgtaacagtccaacaagtcaaacaatattgtgagatggagagccatgaagagaaggcgcacaagctgatgatgcaaagcaaaatcaatgaaacaagggatgtgatgaagaagaaagccagtgagcttgataagatgaagatggaaagaggaaaacttgacaaaggaggatactcggcaatatcaggtcccagggtagttgaaaaagcatttggtgacatgagcattactggtagtggatttggagtggttctggataggtggactgagcatggatatggact

SEQ ID NO: 415937 - DNA, 416 bp, Oryza sativa
tcgctttaaccgcccctgcaaggttgttgaggtttcggcctctataaactgggaagcacggtcacgccaagtgccactttgttgcaattgacatctttactgccaagaagctcgaagatattgtgccatcttctcacaactgtgatgtcccgcatgtgaaccgtacggagtaccagctcattgatatatctgaggatggatttgtgagtctgttaactgaaaatggcaacaccaaggatgacctcaggctccctactgatgataacctgcttagtcagatcaaggatggatttggagaagggaaggacctggtggtgactgttatgtctgccatgggagaggagcagatctgcgcgctgaaggacatcggccccgaataaacctcacctgttccatgtgattactactgaactttt

SEQ ID NO: 415938 - DNA, 407 bp, Oryza sativa
tcgaatacaaagtgggagagagagagagagagaggggatggaaatggcggatgagctggggcacttgctggtgttcgggttcctcttcaacctgggcgtttacatggtggcgccggcgatgaccgacgtgaccatggacgccctctgccccggccaggacgagtgctccctcgccatctacctcaccggcctccagcaagccattacagggttgggtgctcttgtggcgactccgatcgtgggcaacctgtcggacaaatatggtcgcaaggcgttgttgctgctccctgcaactgcatccatccttccgttggttattttagcgtgcaaccggacgaaggccttcttctacgcctactacatcaccaggatggtgacagccatggtcgccgagggcagcatgcact

SEQ ID NO: 415939 - DNA, 453 bp, Oryza sativa
tggattattgaacggtggaacgcgtacttacccacgagttaggtgcatgccatggcaccattcatggcgtgcgcctcgccaccggtactcacgctggccctgctcgcgtcgtgcggtgcccttctcgccacctccatgctcccggcgcgtgcgacggcgggcagttgcttggacgtcggcgacatggtgatgatggacaggttccgcgcttggcagggagctcacaaccggtcgtacccgagcgcagaagaggcgctgcagcggttcgatgtgtaccgccgcaacgcggagttcatcgacgccgtcaacctgcgcggcgacctcacttaccagctcgccgagaacgagttcgcagacctcaccgaggaggagttcctggccacgtacaccgggtactacgccggcgatggccccgtggacgactccgttatcacgacgggtgccggagacgtt

SEQ ID NO: 415940 - DNA, 439 bp, Oryza sativa
  unsure (1)..(439): unsure at all n locations
tcggtttaggtggctggggctcgtgacggcggggtgggtgcagtgcatctccggcaacaactacaccttctccaactactcccactccatcaagacgctcatgggcctcacccagctgcagctcaacggcctctccgtcgccaaggacgtcggcaaggcgttcggcctcctcgccggcctcgcctccgaccgcgtccccacctggcttctcctcgccgtcggctccctcgagggcctcctcggctacggcgcgcagtggctcgtcgtgtcccgggccgtcgcgccgctgccctactggcagatgtgcgtcttcctctgcctcggcgggaacagcacgacgtggatgaacaccgncgtgctcgtcacctgcatccgcaacttccgccggagcagggggccggtgtccgggttgctcaagggctatgtggggctcagcacg

SEQ ID NO: 415941 - DNA, 465 bp, Oryza sativa
cttttccttgccgccgccgccgcagcctcctcctgtcgccatctcccgtcctctccttcaagtcagctacctgcttaatcaaccatgggtaaggagaagacgcacatcaacattgtggtcattggccacgtcgactctggcaagtcgaccaccacgggccatctgatctacaagcttggaggtatcgacaagcgtgtgattgagaggttcgagaaggaagccgctgagatgaacaagaggtccttcaagtacgcgtgggtgctcgacaagctcaaggccgagcgtgagagaggtatcaccatcgatattgccctgtggaagttcgagaccaccaagtactactgcacggtcatcgatgcccctggtcaccgtgacttcatcaagaacatgatcacgggtacctcccaggctgactgtgccgtgctcatcattgactccaccactggtggttttgaggctggtatc

SEQ ID NO: 415942 - DNA, 493 bp, Oryza sativa
  unsure (1)..(493): unsure at all n locations
ggttttgttatcatcgtttacataattcaagacaataataaagttgcttaagtaatctctcccttcttccagaacgccaccatccccaaggagtgcgacaccgtccagaagtgctacctctccctcgccgagcaggtcagggagaagctcggcaagatcgacccctacttcgtcaagcttgccgatgccatggtcacctggatcgaggcctgggatgagctgaacccctcgactgctgctgtcgagaacggcaaggccaagtagattgatcctgggagcttgtgtgtcgcaggatggaaagtaccctttaagtgaaagtgttgctgtggcctaggccccctagatatagctctttttgagatgaagggagagattacttaagcaactttataattctttggtggtatgctggntcttttgtagctggaaaaggatttgttatcatcgtttacataattcaagacaataataattttatcatgtaattttgatt

SEQ ID NO: 415943 - DNA, 492 bp, Oryza sativa
gattatttttccctgctctaaaggaacgcacatgtagtcgtgttgtaaacacaagagctacagttgccattgctataaaatattcaattgttgaacggcctggaaaaatagatgaaattatgtactccgagatttctaccttcctgatgttgattaaagacagtgacaggcacgtgaggcgtgcagctgtgctggccttgagtacagctgcccacaacaagccaaatttgattaagggtcttcttcctgaattattgcctcttttgtatgaccaaactgttgttaagcaagaattgatcagaacagttgaccttgggcctttcaagcatgttgtggacgatggtcttgaactcaggaaagctgcctttgaatgtgtggatacattgctggatagctgtcttgatcaagtgaacccatcatcatttatcgttcctttcctcttatctggtttaggtgatcattatgatgtaaaaatgccttgccatctgattc

SEQ ID NO: 415944 - DNA, 489 bp, Oryza sativa
ccttgagttttgcactagctagctagggtgtaacgcacctattaactaggaagcgccttgtctctgctaaccaccaagctcgagcaaattaagcaagtgacacagttcagaacaccagcattcgccatggcctcctccccctgcggcggcttcctagagaaggccaagccctacttcgccatgatctgcctgcagttcggctacgccggcatgaacgtgatcaccaaggtctccctcaaccacggcatgagccactacgtgctcgtcgtctaccgacacgccttcgccaccatctccatcgcacccttcgccctcctcctcgagaggaaggtgaggcccaagatgacgtggtcggtgttccttcagatctttcgcctggcactgctcgggcctgtgatcgatcagaacttctactacgccggccttaagttcaccgggccaaccttcgcatgcgccatgagcaacattctccccgccatgaccttcgtg

SEQ ID NO: 415945 - DNA, 406 bp, Oryza sativa
tcgggttatgccaagacttgtagaggttgtgaaaggttcaacaaaagagaaggttgtcagggtcgttatcatgtctatccgtaacttgcttgcaaagggtgcgtttgctgcccaaatgattgatcttggactgccacacatagtacagaatttgaaagctcaagcatggactgatgaggatttattagatgcgctgaatcagctagaaataggactcaaagacaaccttaagaagttgagttcatttgagaagtacaagcaacaagttcttcttggccatcttgactggtctccaatgcacaaagacccaagtttctggcgcgagaacattaataattttgaagaaaatgatttccagattctacgtgtgcttatgacaatcatcgacacatcggccgacacgact

SEQ ID NO: 415946 - DNA, 465 bp, Oryza sativa
tcgcttataaccctagctgctcgcctcgcccacgccctggctcgcctcgcctgatcccgccgcgtcgtaccagcagggcggagccatgtcgtccgggaagggaggtggaggcggcggcaagggaggcggagggaagaagaaggaggtgaagaaggagacgaagctcgggatggcgtacaagaaggatgacaacttcggggagtggtactccgaggttgtcgttaacagtgaaatgatcgagtactatgacatatccggttgttatatcttgaggccatgggcgatggagatctgggaattgcttaaagaattctttgatgcagaaataaaaaagctgaagctgaaaccttattatttcccattgtttgtcactgagaatgtcctacagaaggagaaagaccacattgagggctttgcaccagaggtagcatgggtcactaaatcagggaaatctgatctggaagc

SEQ ID NO: 415947 - DNA, 467 bp, Oryza sativa
tttatttaccgaaggggagggggagcgaagctgtgcgttctctaatcgcctcgtcaagatgcagatattcgttaagaccctcactggcaagaccatcaccttggaggttgagtcctccgatacgattgacaatgtgaaggctaagattcaggacaaggagggcatccctccggaccagcaacgccttatcttcgctggcaagcagcttgaggatgggcgtactctcgcggattataacatccagaaggagtccaccttgcaccttgtcctccgccttcgtggaggcatgcaaatattcgtgaagaccctcaccggcaagaccattaccctggaggtcgagtcctccgacacgatcgataatgtgaaggccaagatccaggacaaggagggaatcccaccagaccagcagcgtctcatctttgctgggaagcagctcgaggatggccgcacccttgcagactacaaca

SEQ ID NO: 415948 - DNA, 374 bp, Oryza sativa
ttgcgatcggtgatcggtctatgccgttgctgccgatgacgaagctggagctcggccaccgcggcgaggcgtgggagcccggctgcctccgcgccgtcgccggcgagctcctcttcaccttcctcttcgtcttcatcggcgtcgcctccaccatcaccgccgggaaggcggcgggtggggccggcgaggcggcggcggtgacggcggcggcgatggcgcaggcgctggtggtggcggtgctggcgacggcggggttccacgtctccggcggccacctcaacccggccgtgacgctctccctcgccgtcggcggccacatcacgctcttccgctcggcgctctacgtcgccgcccagctcgccggctcctccctc

SEQ ID NO: 415949 - DNA, 461 bp, Oryza sativa
ctttcggttattgccgctccccgccgccgccgcgcgcgagtttcgtttaagtgtggtgaggattgatgaacccctaaacattgggtatggatggatgtgactgcatcgagccactatggccaactgatgagctcctcatcaagtatcagtacatctcggactttttcatagccctcgcatatttctcgatcccgttggaactaatttatttcgtgaagaagtcatccttcttcccatacagatgggttttgatccagtttggtgcatatatagtcctatgtggagcgactcattttataaacctgtggacttataccacacacacaaagactgttgctatggtcatgacagtcgcaaaggtttcaacggctgttgtgtcctgtgcgacagctttgatgcttgtcatattatccctgacttgttgagcctgaaaacaagggaattgttttcgaagaataaag

SEQ ID NO: 415950 - DNA, 465 bp, Oryza sativa
gatttacttcatgagaatcttagacaactcaaatgctcagaagccagtagtgcgcatggcaaatttgtgcgtagtgtctccccatacggtgaatggagtggctgagttacacagcaacattttgaaggaagagctttttgcagactatctctctatatggcccaacaaatttcagaacaaaacaaatggaattacacctcgtagatggctccgtttctgcaacccagagttgagtgaaatagtaacaaaatggctaaaaacagatcagtggacaagcaaccttgatcttcttaccggacttcggaaatttgcagatgatgaaaagcttcatgctgagtgggcatcagctaagttggctagcaaaaaacgcctagccaagcatgtgttggatgtgacaggtgttacaatcgacccaaatagcctttttgatatacaaattaaacgcattcatgagtacaagagaca

SEQ ID NO: 415951 - DNA, 367 bp, Oryza sativa
cgcttcgttaaagggccttcgagacttgggaggtgggagcgtgcaatctcggccatggcgaagctctcctgccttctcatcgtctccttcgccgtcgtcgcggcgttggcggccacggacgacgacgcggcggcggcggctgaggggatcacggtggcggaggcgtcgtcggacccggagaacaagtgcgtgtacacgatatacgtgcggacggggacgatctggaagggcgggacggactcggtgatcggcgtgacgctgctgggcgccgacggctccggggtgcggatccgcgacctggagcggtggggcggcctcatgggcgacggccacgactactacgagcgcggcaacctcgacatcttca

SEQ ID NO: 415952 - DNA, 378 bp, Oryza sativa
ttggatgagagagaggtctaaaaccctaacccccgagttgaatttagtcggaagccgccgtcgccgccgccgccgacgacgacgcccgcgacgccatggacatgggagcgatgagcgatcctgagaggatgttcttcttcgacctggcatgccagaacgccaaggtcacctacgaacagaacccgcacgacgccgacaatctcacgcggtggggaggcgcgctgctcgagctctcgcagatgcggaacggccccgagagcctcaagtgcctagaagatgcggaatccaagctggaggaagcactgaaaattgatcccatgaaggcggatgcgctttggtgcttgggaaatgcacagacctctcatggattcttcactt

SEQ ID NO: 415953 - DNA, 379 bp, Oryza sativa
ttggttcagtgagagtgaggtgcagaaaaatgtgagcttaagctgaggatggcaacatccatgatcacctcgccgctggtggcgccggcccgggccaagggccttccgtccatctcccgccggggatcctccttcgccatcgtctgcagcggtgggaagaagatcaagaccgacaagccctacgggattggaggtggcatgtcagtcgatattgatgcatctggcaggaagagcacggggaagggtgtgtaccaattcgttgacaagtacggcgcaaacgtcgacggctacagcccaatctactcgccggaggaatggtctcccaccggtgacacctacgttggtggaaccaccgggcttctgatctgggccgtgaccc

SEQ ID NO: 415954 - DNA, 469 bp, Oryza sativa
tcggctttctcctcccgctacgccaccgcggggccgggcaccggtgcgcagaagatcgtctccctcttcagcaagaagcccgccccgaagcccaagcccgccgccgtcacctcctcgagccccgacatcggcgatgagctcgccaagtggtacggccctgacaggaggatcttcttgccggagggtctcctggaccgctcagaggtgccggactacctcaacggagaggtccccggagactacggctacgacccttttggcctcagcaagaagccagaggacttctccaagtaccaggcctatgagctgatccatgccaggtgggcgatgctcggcgccgctgggttcatcatccccgaggcctgcaacaagtttggcgcaaactgcggccccgaggccgtctggttcaagaccggcgccctccttctggacgggaacaccctcaactactttggcaacagcattccca

SEQ ID NO: 415955 - DNA, 466 bp, Oryza sativa
ccttcttatcctactcttgtcttctcccgacttcgggtgcgtgttagataccttggtgagtcaaccatgggcacggagaagacgcacatcaacatcgggggcattgtccacgcccactccggcaagtacaccaccacggaccatgtgatttacaagctaggaggtatcgacaagcgagtgatctaaaggttgacgaaggacgccgatcagatgaacaagacgtcgttcacgtacgcgtgggagcaagacaagctcaaggcctagcgagacataggaatgaccatcgatattgccctgtggaagttagcgaccaccaagtactactgcacggccatcgatgcccctgggaaccgagacttcgttatgatcatgatcacgggtacctgacaggctgactgagacgtgctaaatattgactacaccactggtggtaatgaggctggtatgtccaatgaaggccagaccc

SEQ ID NO: 415956 - DNA, 505 bp, Oryza sativa
gacccacgcgtccggtttacctcaacggcgtggacgcgccaaacatcttctggctcaggacactcgctgtcaagataatcggtaacatcgcggccgtgtcatcctcgctgcacgtcggcaaagctggcccaatggtacacacgggcgcgtgcatcgccgccatcttcggccagggcgggtcgcgcaagtacggcctcacctgccgctggctgcgctacttcaagaacgaccgcgaccgccgtgatctcgtcaccataggcgccggcgcaggtgtcaccgcggctttccgcgcccccgtcggcggcgtcctgttcgctctcgaatcactctcgtcatggtggcggagcgcgctgatctggcggtcgttcttcacgacggcggtggtggcggtggtgctgcggatgttcatcgagctgtgcgcgtcggggaagtgcgggctgttcagcaagggtgggctgatcatgtacgacgtcagcaccaagtttgatgacctcatgacctacca

SEQ ID NO: 415957 - DNA, 477 bp, Oryza sativa
gccgccgtagcctcctcaaggctgctcccatccggtccttcgagttagcttcctccttattcaaccatgggtaaggagaagacgcacatcaacattgtggtcattggccacgtcgactccggcaagtcgaccaccacgggccatctgatctacaagcttggaggtatcgacaagcgtgtgattgagaggttcgagaaggaagccgctgagatgaacaagaggtccttcaagtacgcgtgggtgcttgacaagctcaaggccgagcgtgagagaggtatcaccatcgatatcgccctgtggaagttcgagaccaccaagtactactgcacggtcatcgatgcccctggtcaccgtgacttcatcaagaacatgatcacgggtacctcccaggctgactgggccgtgctcatcattgactccacactggtggttttgaggctggtatctccaagatggccagacccgtgagcacgctct

SEQ ID NO: 415958 - DNA, 500 bp, Oryza sativa
tgtttatcacactcaaattgagtaccgttgggggggagaaggtttaaggaagacactaattcgatgggcagcagaaaaaagcgagggtggtcaagtggtacttgtacaatatgaagaatgttcatccacttattgtatttcatttagagtgaagaatgctgaggctgtacctcctgtgaaagagcttaggaagacaatgagaattcaagcactgcgctgtcatgttttgtacagtcatgatggtagcaagttgaatgttattcctgttttagcatcacgatcgcaggctctaaggtacttgtatataagatggggggtagagctgtcaaatatgacagtggttgttggtgaaagtggtgatactgattatgaaggactattaggaggcgcgcacaagaccattattctcaaaggctcatttaatgctgttcctaaccaagtccatgctgccagacgttattcattacaggatgtcatattctttgacaaaccaggaatta

SEQ ID NO: 415959 - DNA, 509 bp, Oryza sativa
tctttcgcctgggcggacgcgtgggcgacgcctgggcttgacggaaggaaacagaggggaagagagaggatcgtcgtcgaccatgatgcggcggcggctgggctgaaagagaaacagcatctcttgaggatcgtcgtttcgttgcatgggcaactactactcgtgcggcgcctcgtccacgtccagcccgacctcaccgtccttggtcgactactactactgctatcatcggtatccaagcagttgcagtagtacaagcacagcaacaagtagcggggggaggatgccgatccgcacccaccagcagaggctgtcgtccccgacggcggtgctggggcacgagacgccggcgctgcgggaggtgtacactgtggggcggaagctggggcatgggcagttcgggacgacgtacctgtgcacgcaggtgtcgactgcggcggagtacgcgtgcaagtctatcgccaagaggaagctgctgagcccggacgacgtggaggacgtgcggcggg

SEQ ID NO: 415960 - DNA, 468 bp, Oryza sativa
ctttagccgcgttggcggtggcggcggctggtgggggcggttggtgacagcagcggcgacagcggccggcttgcagcggctgtgaatgttgaggcacggtggcgaacgtggctgcggtggaaggaggcatggtggtgatcaccgtggctgaggtgggaggatgtatggcggccttggacggctagccgagggtgtaggagacgattgcatctagccggcgcggcaacgtttggaggaggggttggagaccggcttggcgcagagaggcgcaaccgatggcagcggaggccggctcggcgcgagaggcgctggcggaggagatggaggccgtcttggcacgagaggcgcggccgatggagggaggccggattggcgcgagaggcgcatccggtggaggaggcccgtttgacgcgagaggcgcggcctgcattggaggcgacctcggttcgaggagctgctgatggatgt

SEQ ID NO: 415961 - DNA, 507 bp, Oryza sativa
gtgtttctccggatgttatctctgaaaatgatgagttggatttctctgatgtttttggcaccactccagttcagacgccaacaggcatttcggtagctggtccagacagtcctgcacctttggctgagtccaatgagggggtttacaatgatcctattgtcatcatcaagcgatctcattctcttgttggtccaacatcacttgttagccagtccctgcgacttagcaatctcactctaaataaaacagaggggtcatcagaacctgcagaagaaaaggaaaggaacctagggcagctcagtgatgaagagtttgacaatgccacaacagaaaatgaaggtattgggcttgatgactttgaaatcttgaagcttgtaggccaaggggcatttgggaaagtctttcaggtgagaaagaaaggtacttcagagatatacgcgatgaaagttatgaggaaggataagatcttggaaaagaaccatgcggagtacatgaaagccgaaagag

SEQ ID NO: 415962 - DNA, 411 bp, Oryza sativa
gtctgcttaacatagagcaggtcattgtgcttgactggggcagggagggtgacaaatgagtctgtatccgactagtatttggaacaacataagagaggaggctctctgtacggtcgtgtgaggaagagcaatccagacatgttcattgcttaacaagatacatatagtgaaaaattgttcgtagcattttagctctagtatagatcgatcaatcgatcgttcgttcgttcgatcgttcgaggacgagagatttgctaacatggcgttggcagggacctccaaagtagtgctgggatgtgtcgcgtttgggatattctgggtgctggccgtcttccccaccgtcccgttcatgcccgtcggccgtacggccggctccctacttggcgccatgctcatggtcctcttccgtgt

SEQ ID NO: 415963 - DNA, 441 bp, Oryza sativa
tcttcttggagaaagaaaccacctgatcgagcccgtgtctttgcagccgcaggagaggaggacgagtcgttcgttgtgcagcaggaggcggcggcgaagatgtcgtggcagacgtacgtcgacgagcacctgatgtgcgagatcgagggccaccacctcacctccgccgccatcgtcggccacgacggcaccgtctgggcacagagcgccgccttcccgcagttcaaaccggaggagatgaccaacatcatgaaggacttcgacgagccggggttcctcgccccgaccggactgtttcttggaccaaccaagtacatggtcatccaaggtgaacctggcgctgtcattcgtggcaagaagggatcaggaggcatcacggtgaagaagaccgggcaggcgctggtggtcggcatctaccaccagccgatgacccccgggcag

SEQ ID NO: 415964 - DNA, 482 bp, Oryza sativa
cttctcgctttcaccggaggaggagaaggagaggaaggtgttgatcgaatcctcctccaatcgcgcgcgattcgatccccgttgctggctcgctcgctccgccgatccctcatccgatctcaatccccgatctgatggcggccaaccccggcaacaagatccgcaacgccaagctggttcttcttggagatgtgggcacgggcaagtcgagcctcgatctccggtttgtgaagggccagtttgatgagttccaggagtccaccatcggcgcggccttcttctcgcagaccttggcggttaacgacgagacggtgaagttcgaaatctgggatactgcagggcaggagaggtatcatagcttggctgcgatgtactatcgtggtgcggctgccgaaatagttgtctacgacatcacatatgcggcctctttcacacgtgcaaaataatgggttcaagaacttcaagcgcaaggaaacccaaac

SEQ ID NO: 415965 - DNA, 506 bp, Oryza sativa
gtttcagcaaagaaggccagagacttccttcctttcttacagcggaacagaagacattccgcaattgttgaatatgtcttcagtggccaccgtttcaaactaacaattcctaaggagacttgcagcattgccttctctttctctggtgttagatgccctggtaaagatgagccctactcgaacgaagctattgctttgatgaggaggagaattctacagcgagatgtggagatagaggttgaagcagttgatagaactgggacattcttaggttccttatgggagtccaaaaccaacatggcttctgttcttctggaggctggtctggccaagcttagttcatttggcttggataggattccggatgcaaatgttctaatgagggctgaacagtctgcaaagcagcagaaactcaagatctgggagaattatgtagagggtgaagaagtttccaatggatctgcatctgaatccaaacaaaaggaaattctcagggttgtgtaact

SEQ ID NO: 415966 - DNA, 447 bp, Oryza sativa
  unsure (1)..(447): unsure at all n locations
tgctcagctcttcttccaccaccacccagctcctcgtcctcctcctcgtcgttgttcgccaccaccgctcggagagatggcgagccagaccgccgacgccacggggttcgtcgcgagcgacccgctgtcgtggggcaaggcggcgctggagatgacggggagccacctggacgaggtgaagcgcatggtggcgcagtcacgggaggccgtggtgaagatcgaggggtccagcctccgcgtcggccaggtggccgccgtctccgcggccaaggacgcctccggcgtggtggtcgagctggacgaggaggcccgcccccgcgtcaaggccagcagcgagtggatcctcaactgcatcgcccacggcggcgacatctacggcgtcaccaccggcttcggcggnaccttccaccgncgcaccaaggacggccaggccctccaagttgagct

SEQ ID NO: 415967 - DNA, 520 bp, Oryza sativa
tcgactaacgcaaaccgcatcgatcaactccttccgggagtcgtagcaaaatccctagcgatgtcgtcgccgccgcccgccgtcgtcgccgcgatggccgttgacgacgccgacgacgaccagctcgtctccatgtccacggaggacatcgtcagggcaacccgcctcctcgacaacgagacccgcgtcctcaaggatgagctgcagcggacgaaccttgaggtggaatcctacaaggagaagatcaaggagaaccaggagaagatcaaactcaacaagcagctgccttaccttgtcggcaacatcgtcgagatattggaaatgaaccccgaggatgaggctgaagaggatggtgcgaacatcgatctggattcacaaaggaaaggaaaatgcgttgttttgaagacatccacaagacaaacaatattccttcctgtaatcgggcttgttgaccctgaaaagcttaagcctggggatttggttggagtcaacaaagacagctacttgatactagacacgc

SEQ ID NO: 415968 - DNA, 510 bp, Oryza sativa
atctttttccaagattgctcgatcccctcgtgtgcctgtctcccaacaacactgcgcgacagacacaaatcacactcagatacgaaagataagtacagagagagagagagggcacggattatacactgcacacaagcatatatatatatatatcgattagccatccgtgctgatctgaaaagtatcatcggtagagagttttacagagttgtttggacaaggagacacacacatggctttcttgctcttctttggctttgtgacagctgcagtgctgtgcttcgtagtcccggcgttcttgctgctctgcacgagcgtgcagaggaggagagatgttggacagggtggagggcgagattggcagaagaagaagaagctcaggcttcctccgggatccatgggctggccgtacgtaggcgagacgctccagctctactcccaggaccccaacgtcttcttcgcctccaagcagaagaggtactgcgagatattaagacaaatttgtggggg

SEQ ID NO: 415969 - DNA, 479 bp, Oryza sativa
gttctcttcctcctcctcctcctcgccggcgtcggcggcgccgcggcgccactgctcgccaccgcccagctcttcgccgacttctactccttcacctgccccaacgtcgagaaggtcgtctccaccgtcatcgagcgcaagttcaaggaggaccctaccacctccgccctcctcctccgcctcctcttccacgactgcttcgccaatggatgcgacgcgtcgatcttgatcgacccgctgtcgaaccagagcgcggagaaggaggcggggccgaacatctcggtgaagggctacgacatcatcgacgagatcaagacggagctggagaaggagtgcccgcaggtggtgtcgtgcgcggacatcgtggcgctcagcacgcgcgacagcgtgcgcctcgccgggggccccaactacgacgtgcccaccggccgacgcgactcgctcgtcttcaaccgcgaggaaggcgactcgctccccgg

SEQ ID NO: 415970 - DNA, 386 bp, Oryza sativa
tttgtttatagctcaaatgaaattggtgcggtagttgtggatgctgctaaggtgtctgggttgtaaaatacacccaggacatgcttaattgcactgcttgagctgaagcatagcacgtggaatgctgagacagctaccacgacatcatgaactgtaccatttgatatgagttgaatggtaaaacagtaacctaacattgtgaacaaatgtaatcctttagaagctaagctgagccttacacaagtaaaagaggatgaacctgccatcgaggaaaagaacattaactcatgatatggtggagcattgcaaaaaaaggatgcttcaagatcacacatgaaacacgggtgagcaagagcactaataaaatgatgcagagaatgttatac

SEQ ID NO: 415971 - DNA, 508 bp, Oryza sativa
tttgttagagcagagctaagctagctcagagtgagtagcgtgttgagcttgctgaagggagcggcaatgtcgaaggaggtgagcgaggagccggagcacgtgcggcccaaggactacaccgacccgccgccggcgccgctgttcgacgtcggcgagctccggctgtggtccttctaccgggcgctcattgcggagttcatcgccacgctcctgttcctatacatcaccgtcgccaccgtcattgggtacaaggtgcagtcgtccgccgaccagtgcggcggcgtcggcaccctcggcatcgcctgggccttcggtggcatgatcttcatcctcgtctactgcaccgccggcatctccggagggcacattaaccccgcggtgacgttcgggctgctgctggcgaggaaggtgtcggtgattcgcgcggtgatgtacatcgtggcgcagtgcctgggcggcatcgtgggcgtgggcatcgtgaagggcatcatgaagcaccagtacaacg

SEQ ID NO: 415972 - DNA, 494 bp, Oryza sativa
gttccatcttgacatattccccgatgctgttcagaagcttgatgatgcccttcgtctgtttgctgctcctgaatctttggaaggatacagaacagctgctggaaaggctgggttggtgacggctagaaaatcagtgaagatacactcactttcaaagataatgatactgcacctgaagaggtttagttatggaagtcatggctgcacgaaactcttcaagccaattcacttccctcttgagctggttcttagtcgtgatctgctgagttcgccatcatcagagcacatgcagagtagaagatatgagcttgttgcaaccatcacgcatcttggggcaaacccgtccaggggccattacactgccgatgcaaagtctgccagtgggcagtggcttcgcttcgacgatgataacgtcacacctgtcagtctgaacaaggtcttgcatgaccaagcatatgtcctgttctacaaacaattataagtttgggggtatt

SEQ ID NO: 415973 - DNA, 496 bp, Oryza sativa
gtatagaactgtggatgaagttgctagaagcttggaaagagttctacttactatgcggataactacttctgaacctaaggagctagcttttgttgtggatggttgggctcttgaaatcatcctgtcacgctacaatgaagcctttactgaattagcagctctttcaaaaacagcaatatgctgccgggttacaccgtctcagaaagcacagcttgtaaagcttctaaaatcatgtgactatcgaactttggctattggagatgggggaatgatgtcaggatgatacaacaggctgatattggtgtaggaattagtggcagagaaggtcttcaagcagcaagggctgctgactatagcgttggcaagttcagatttttgaaaaggctgattcttgtccatgggcgatactcatacaaccgtacagcttttctttctcagtattctttctacaagtcattgttaatttgctttatccagatacttttttcttttcttc

SEQ ID NO: 415974 - DNA, 502 bp, Oryza sativa
gtcgccaccaccgcagctgcgccgcttcaaggggggacattgtgaaagtttcccaagtctgaaaagatggttctgaagactgaactttgccgttttagtgggcagaagatatacccaggcaagggtatcaggttcattcgtgctgattcccaggtttttctgtttgccaactcgaaatgcaagcgctacttccacaaccgcctgaagcctgccaagcttacctggacagctatgtacaggaagcagcacaagaaggacattcatgctgaagctgtcaagaagaggcgtcgcaccaccaagaagccatactcacggtcaattgttggtgctacactggaagttatccaaaagaagaggagtgagaaacctgaagtccgtgatgcagccagagaagcggctctccgtgagatcaaggagcgcatcaagaaaaccaaggatgagaaaaaggcaaagaaggcagaggtggcaaaatctcagaagacacagtcgtagggtggtgcta

SEQ ID NO: 415975 - DNA, 506 bp, Oryza sativa
ggttaatatactcagaggaggtccattcagtgttctcaacatttgctcacagcctagtccatgcattccaaacattcgaggaggtttgggaagatctatgcactgatataagagacggtgttctctcaaagaaagttacagcaccatcaattcgtgaggctgtttcaaaaatcctgaagcccaatcctgaacttgctgactcaatatacaagaagtgtattggtttgagcaattggtatggagtgatcccagcactgtggccaaatgcaaagtatgtgtatggtatcatgacaggatccatggagccatatctgaaaaaattaaggcattacgcagggaacttgccacttataagtgctgactatggcgcatcggaaggatgggttggctctaacatagaccctactgtgccaccagagcaggtgacatatgctgttctcccacaagttggttattttgagttcattcctttggagaaaccaataggggaggagacagaaaactcc

SEQ ID NO: 415976 - DNA, 448 bp, Oryza sativa
tcggtgcagtcgatgtcatcgactaatggggagagtgatgtgtatacagggatggtggactatacaatctgcggaagtgccgagtatcaaccaccatccgctgtctttcgcacccgagctctcatgtgcgtgcactcagcatgcacggtcttccagacaacttgaacagcgcacaaataaactgcaggaagctcatccaaggggcacaccggaatggcatccagagcccaacctaccacagcttggcagcaagcatcatcaactgtcaagccgatctgaagagatgcatagagtgggaagcccacagcacggcgaccacctggctgacgctcgccttcctcaccgcggcggcgatggagctcggctggccactcacttgctgacaaggccacaccatgtctgtcactgcacgcagctgctgtccgatcatcgagtgggaaaggatgac

SEQ ID NO: 415977 - DNA, 506 bp, Oryza sativa
atccgctactcgctatcctccttcctccatgggtcccttctcgaatcttctcactttcttctgaagtgctccgctccgctccgctccgatccaatccactccgcccgagtcccccacccatcggcacccaccagcgcgagggtgggtggccatcgatcgatcggcccatcgccgattcccgcgggatctgcggcggcgcggggggatttgatcggagggtgaatatgtcgacgccagcaaggaagaggttgatgagggatttcaaacgactgatgcaggatcctccagctggcataagtggggccccacaggacaacaatataatgctttggaatgctgtaatttttggccctgatgatactccttgggatggaggtacgttcaagctgacacttcagtttactgaagattatcctaacaagccacctacagtgcgatttggttctcggatgtttcatcctaacatttatgctgatgggagcatatgcttagatatactacaaaac

SEQ ID NO: 415978 - DNA, 460 bp, Oryza sativa
cctcatgaagatcctgacggagcgtggttgctcattcaccacaacggccgagcgggaaattgtgagggacatgaaggagaagctttcctacatcgccctggactatgaccaggaaatggagactgccaagaccagctccttcgtggagaagagctactagcttactgatggacaggttatcaccattggtgctgagcgtttccgctgccctgaggtcctcttccagccttccttcataggaatggaagctgcgggtatccatgagactacatacaactccatcatgaagtgcgacgtggatattatgaaggatctatatggcaacatcgttctcagtggtggtaccactatgttacctggcattgctgacaggatgagcaaggagatcactgacttggctcctagcagcatgaagatcaaggtggtcgtccctcctgaaaggaagtacagtgtttggatt

SEQ ID NO: 415979 - DNA, 509 bp, Oryza sativa
  unsure (1)..(509): unsure at all n locations
cttgattctacctcccctccccaaatctcgctcccacgcctcttccttccgacttgtgacagaatggcgctcaatgaggagtacacatacgtggagctggagaaggagccttactggccatttgagaagctgcggatctcgattacgggagctggcgggttcatcgcatcccacatcgcgaggcgcctcaagagcgagggccactacatcattgcttctgactggaagaaaaatgagcacatgactgaggatatgttctgccatgagttccatcttgttgatttgagggtgatggacaactgcctcaaggtgaccaccgnggttgaccatgttttcaaccttgccgctgatatgggagggatgggattcattcaatccaatcactctgttatcatgtacaacaacaccatgatcagctttaacatgcttgaggccgctaggattaatggtgtcaaaaggttcttttatgcttcaagtgcttgtatctaccctgaatttaagcagctgga

SEQ ID NO: 415980 - DNA, 508 bp, Oryza sativa
atcactgaacctcctcgtggcggcgagctctcgcgagtcgactctcgcgtcgcgcgcgcgcacggcgccatcaatcgattctcacatccatccatctgcctatctatctctcgcaattctggcggcgcgctgcgcgcatagggggggatcgaatttgatctagtggtgatggaggcggcggcggcgatggaggcgggcggaagctggcggcgcggcacccgcacgggcggagcaggacggcgcacaacatgtcgtcgtcgtcgctgcggaagaagtcggacgccgcgctggtgcggaaggtccccgtggcgccgatccgcccgctgctcgccaacctccaggaggtctttctcgccaccaagctcgccgtcctcttccccgccgtcccgctcgccatcgccgcccagtgctttcgcttcgaccaggtgtgggctgttcgctcttagtttactgggcctcatccctctcgccgagagagtaagtttccttacagagcaaattgtactct

SEQ ID NO: 415981 - DNA, 505 bp, Oryza sativa
tttgctccagctgcaggcgctacgagaacgacgccggggccgacctcgtgaacgacatatcgtccaagtcagatgtctgcaacgtgtacgcagccgaggggattctacggatcacccaccagaacatccccagcatggtgctcacgtacaggcagctatgcaacgccaccgactccttcagcccgaacaacctgctcggggaaggcggctttgggagggtgtacagaggccacctcgaagagatcaacgagatcgtcgccgtcaagcagctggacaaggacgggttccaggggaaccgcgagttcctggtggaggtgctgatgctcagtctcctgcaccaccccaacctcgtcaagctgctcggctactgcaccgacatggaccagagaatcctcgtctacgagtgcatgcggaacggctcgctggaggatcatctcctagatctccctccaaaggcaaagcctctcccgtggcaaacgcggatgaagatcgcggtgggcgcggc

SEQ ID NO: 415982 - DNA, 481 bp, Oryza sativa
tttcttaacgggaagcgcccgttgtttggcccagaccttcccatgaccgacgagattgctgacgttctcgacacgtttcgtgtgatagctgagcttcccgctgacaatcttggggcctatatcatttccatggcgacagctccgtcagacgtgcttgctgttgagctcctccaacgtgaatgccatgtgaagacgccacttagagttgtcccgctgtttgagaagttggctgatcttgaatctgccccagcagcagtggccagactgttctctatagattggtacagagaaaggataaatggcaaacaggaggtcatgattggctattcggactcgggtaaggacgccggtcgtctctcagcagcttggcagctgtacaagtctcaggaggagctcatcaacgttgccaaggagtttggggtgaagttgacaatgttccatggtcgcggtgggactgtctgaagaggcggaggtaccactc

SEQ ID NO: 415983 - DNA, 510 bp, Oryza sativa
tcgtgtttacctcatgaagatcctgacggagcgtgggtactcattcaccacaacggccgagcgggaaattgtgagggacatgaaggagaagctttcctacatcgccctggactatgaccaggaaatggagactgccaagaccagctcctccgtggagaagagctacgagcttcctgatggacaggttatcaccattggtgctgagcgtttccgctgccctgaggtcctcttccagccttccttcataggaatggaagctgcgggtatccatgagactacatacaactccatcatgaagtgcgacgtggatattaggaaggatctatatggcaacatcgttctcagtggtggtaccactatgttccctggcattgctgacaggatgagcaaggagatcactgccttggctcctagcagcatgaagatcaaggtggtcgcccctcctgaaaggaagtacagtgtctggattggaggatccatcttggcatctctcagcacattccagcagat

SEQ ID NO: 415984 - DNA, 491 bp, Oryza sativa
  unsure (1)..(491): unsure at all n locations
ttttgtttcaggctgcccccagcttagtttgagaagcaaactgccaataaacacagggtgaaaaactgaatcagtaactgtaaaaattggtaagcctcaggcgctcagttttcttttacctcctcccatcttttatatgccaccggaagacaaagccctttttgtctccagacttcctgctccctctgtgtgtaatgcagacatgaggaaattcatagcagcactgcggcttgcactagcagcagcagctcatctgctgctgacgctgccaccggcacaatgctactggctcaacccggagatctacgacgccggcgggctgagccggcgagccttcccgaggggttcgtgttcggcacggccgcgtcggcgtaccatgtggagggcatggcgaagcagggtggccggngccctagcatctgggacgctttcatagagaaaccagggacgatccctaataatgccacagccgatgtgacggttgatgagta

SEQ ID NO: 415985 - DNA, 506 bp, Oryza sativa
atgtggatccgatgctccgccatgttgaacctcctctatctacattccttgagttgaacaaggtgaatttggatggttacaatgaagtaaagtacactccatcacgcgatcgccagtggcatatttacacactcatcaagaacaagaaagatcagagatcaaatgaccagaggttgttccttcgtaccatagtaaggcaaccaggtgtgaccaatgggtttttgtcaggaaatgttgacaatgaagtaggccgtgctcaggcttcatcatcatacacatcaagtagtatactcagatcactgatggcagcactagaagaaatagagctacatgcacataatgagacagtgaggtcaagctattcacacatgtatctgtgcatattgagagtacaacagttgtttgatcttataccattttcaagaacgattgataatgttggtcaagatgaagcaactgcatgtacgcttttgaagaatatggctttgaatatatatgaacatgtt

SEQ ID NO: 415986 - DNA, 509 bp, Oryza sativa
ggttgaccaagaaggtgtcagaaccttagatgatgataacttcattgatgatactggggttgatccagctgaccgttatggcagcgataatgatggccactcacctcggcattaccctcaggcagaggaaggggaagaggatgatgaaattgagcggctctttaagggtgggaagaagaagaaaaagaacgatcgacctcgtgctgatattggtcttatagtggaacaattcattgctgagtttgaagtggcagctgaagaagatgccaacttaaataggcaatcaaaaccagctattaataaacttatgaagcttccactactcatagatgtactctcaaagaagaatctccagcaggaattccttgatcatggagttctcactcttctaaaaaattggcttgaacctttgcctgatggtagcttgccaaatatgaatattcgaacagctgttctgaaattattaactgattttccaattgatttggagcaatacgatagaagggagc

SEQ ID NO: 415987 - DNA, 504 bp, Oryza sativa
gttgatggtcagctggaattcaaagctgttctctttgttcccaagagggcaccattcgacctctttgatacgaggaagaagctcaacaacatcaagctctacgtccgccgagtcttcatcatggacaactgtgaggagctgatccctgagtggctgagctttgtcaagggcattgttgactccgaggatcttcccctcaacatctcccgtgagatgctgcagcagaacaagattctcaaggtcatcaggaagaaccttgtcaagaagtgcgttgagctcttcttcgagattgctgagaacaaggaagactacaacaagttctatgaagccttctccaagaacctcaagctcggtatccacgaggactccaccaacagaaacaagattgccgagctcctgaggtaccactccaccaagagcggcgatgagctgaccagcctcaaggattacgtgacgaggatgaaggaaggccagaacgacatatactacatcaccggcgagagc

SEQ ID NO: 415988 - DNA, 510 bp, Oryza sativa
ctccaccttatccctttcgcacgaccgcatctcccgcacacgcgcacgcacgctcgcacgcagggatccggccgcttcccccgttgccgctctcttgtactaccagtgcctgttgcctcgcctagctagctgctggcctggccggcgtcgcgttccttcatggcctcgctcctacccagtccggtgttccccgccgccgccgccgcggcgtccacatcctcgtcctcgaggtgccggtgtcgcatcacaacgtcatcttcggcgcgcggttggtcctactgtcagggctggagactccatcaccgggtttgggccgcccaggctgctgatcagcagcagcaacaacaagaagaaaatgaagacggtgtagtcgacagcaacgtgctcccctactgtagcatcaaccggaaggagaagaagactattggggagatggagcaggagtttctccaggcgctgcaggccttttattacgacaagaaggccgtaatgtcgaacgaggagttcgat

SEQ ID NO: 415989 - DNA, 514 bp, Oryza sativa
ttttacttcctcctccgcccgcgtcgcccctgctctcctctccctcccggctcccggctaccgccgccgccgccccgaggaaatggctgccctgcaaccctcattctcttcagcaatggctatgaaaagtctgaagttacccaaaactgcagttttacctggatttggtggtattgcacgtcctcaagatgtgcaggacaggagcgctaacttcacttgttcaaggcctagagcagcttcagtgactgaccagtcaacagcagagccagcaaaacccaggcaaaacaagcacactgttgatccttctgctccagaatttctgccactcccatcatttgaagaatgctttccaaggagcacaaaagaatccagagaaattgtgcacgaggaatctggccatgtcctcaagatcccatttaggagaatccatttgaccggagatgagaagcattttgacacatacgacaccagtggtccacaaaacattagtccaaggattggacttccaaagata

SEQ ID NO: 415990 - DNA, 510 bp, Oryza sativa
tttatcacatcctctccttcctcttcctctgctcactcagctctcccccgcgcgcgccaccgtcgtcgccatgtcgggcaacatcgccttcggccgcttcgatgactccttcagcgcggcctccctcaaggcctacgtcgccgagttcatctccaccctcgtcttcgtcttcgccggcgtcggctccgccatcgcctacaccaagttgaccggcggcgcgccgcttgacccggccgggctggtcgccgtggcggtgtgccacgggttcgggctgttcgtggcggtggccatcggcgccaacatctccggcggccacgtcaacccggccgtcaccttcggcctcgccctcggcggccagatcaccatcctcaccggcgtcttctactggatcgcccagctcctcggcgccatcgtcggcgccgtcctcgtccagttctgcaccggcgtggcgacaccgacgcacgggctgtccggcgtgggcgcgttcagggcgtggtgatggagatcatc

SEQ ID NO: 415991 - DNA, 507 bp, Oryza sativa
tcgattcaccaccaccttccttccttcttctctctttctcagtctcagatcacaattatcagatcccgagggagggaggaagggaggccatggccaccgctctttgactccccgaccgcctcgcccgccgcctctcccttcgacgacgactccttcctccgcttcgacgccgccgcgcccgctcccgcgccagcggacgccttcccgccatcaccggagccctacgccttccgccccgacgcgccctcccccttcggtatgcccgaggccaacggctccctccacgacgaccccttcgccgcccccgacaacgacaacggacccgtgctccctccgcccaaccagatgggcgctgacgagggcttcctgctgcgcgagtggcgccgtcaaaatgcaatccttctggaggaaaaggagaagaaggaaaaggagatgaggaatcaaatcatccttgatgccgaagaattcaagaaggcatttgttgagaagcgaaagctgaacattgag

SEQ ID NO: 415992 - DNA, 511 bp, Oryza sativa
  unsure (1)..(511): unsure at all n locations
tttctcccaaggaggcagcggtggtggtgccgtccgccggcgacgccaccctgggcgggcacctggctcggcgcctcgtgcaggtgggcgtgagcgacgtgttcgccgtgccgggggacttcaacctgacgcttctggaccacctgatcgccgagcccgggctccgcgtggtgggctgctgcaacgagctgaacgccggatacgcggccgacgggtacgcgcgggcccgtggcgtgggcgcctgcgccgtgaccttcaccgtgggcgggctgagcgtgctgaacgccatcggcggggcgtacagcgagaacctgccgctgatctgcatcgtggggggccccaactccaacgactacggcaccaaccgcatcctccaccacaccatcggcctcccggacttctcccaggagctccgctgctttcaacccctcacctgctaccaggccgtcgtcaacaaccttgacgacgcccacgaccagatcgaccgcgccatctncaccgccatcaggga

SEQ ID NO: 415993 - DNA, 419 bp, Oryza sativa
tcgctatgaaccaaccacaggaaaaatgccaatccagtgcttattccctcatcaaagcgcgagccttgtggcctctgccgcgggtggcgccagcggcgccggccacagggcggtgacagatggcgggcggaccctggtgcgtggggaataggagctacaacgggacgctcctacccggtgacggcatcaggccagaagtggtcgccctccccaaggacggtctgtccctcgccggtgctatggaaggcggacagttccgcttacaggagaagctgatgggcggtgaggcaggggatgcttacagagggccgatcccggaggagacgctcagggcggcgcatgcatttgactcctgtatccatctggccataagacggtataagtgggattacaaagagaagcacctacagccagacact

SEQ ID NO: 415994 - DNA, 511 bp, Oryza sativa
  unsure (1)..(511): unsure at all n locations
cgggtttccctcgccgccgccgccgccgccgccgccgccgccgcagtgaccacctcgctcgccggcggactcgattggctcaccggcggcgacggaggaggaggaggcatctgcggcgttcggcgcgaccccggagatggaggggttcctctgcgaccgcctgctcgacgcggcgcagcccatcgccgagcgcttccgggcgctcttctccctccgcaacctccgcggcgacgcccctcgccgcgccctcctccaagctgcaagggactcttcaaacttgcttgcccatgaggctgcatttgcactaggacaaatgcaagatgctgaggctatccctgcattagaggcagttctcaaagatctttcacttcatccaattgtccgacacgaggctgcggaagcgcttggagctattggcctggaaaagagcatttccctgctggaggagagtttagctgttgatcctgccggggaagttcaagnacatgtgagctgctattagacggataga

SEQ ID NO: 415995 - DNA, 474 bp, Oryza sativa
gtcgtttccgcggcgcccacgcggccgtcggcgctggtgtgcgggacgtacgcgctcaccaaggaggagcgggagcgggagcggatgtgccagctgttcgacgaggcctccgagcgctgccgcaccgcgcccatggagggcgtctccttctcgcccgaggacctcgactccgccgtcgagtccaccgacatcgacaccgatatcggctcactcattaaaggaacagtgttcatgaccacttcaaatggtgcatatgttgatatccaatcgaagtctactgctttcttgcctttggatgaggcatgccttctcgatgtcaaccatatagaagaggcagggatccgtgcaggtttggtagaagagttcatgattattgacgagaatcctggtgatgaaactttgattttgagcttacaagcaattcagcaagaccttgcctgggaaaggtgcagacagcttcagcagaagatgttg

SEQ ID NO: 415996 - DNA, 490 bp, Oryza sativa
agtaattgccggtgagccggatcgcggtgggcgcccccggcgagctgtcccacccggacacggccaaggccgccgtcgccgagttcatctctatgctcatcttcgtcttcgccggatcgggatccggcatggccttcagcaagctgacggacggcggcggcacgacgccgtcggggctgatcgccgcctccctggcgcacgcgctggccctgttcgtggcggtggcggtgggagccaacatctccggcgggcacgtgaacccggcggtgacattcggcgcgttcgtgggggggaacatcagcctggtgaaggcggtggtgtactgggtggcgcagctgctggggtcggtggtggcgtgcctgctgctcaagacgcggacgggcggcgccgccgtgggtgccttctcgctgtcggcgggcgtgggcgcctggaaccggtggtgttcgagatcgtcatgaccttcggcctcgtctacaccgtgtacgccacc

SEQ ID NO: 415997 - DNA, 498 bp, Oryza sativa
tttctttattccacttctcttctctctcgtggtcgggggatctcatcaggagcgcagatgctacggcgtccttgagaattgcagagaggcaaaagaagaacaagcagagagcaagaacaagcagaagcagaagcaaagaggcgatggacggcgacacgctgtcggcggcggcggcggaggacgggaaggtgctgcacgcgttccagacgagcttcgtgcaggtgcagagcttgctggaccagaaccgggtgctgatcaacgagatcaaccagaaccacgagtccaaggtccccggcgacctctcccgcaacgtcggcctcatccgcgagctcaacaacaacatccgccgcgtcgtcgacctctacgccgacctctcctccctcttcgccgcctcctcccccggccccgccgactccgagggcgccttcgtcggcaccgccgtccgccacgccggccacaagcgtgtcaggtccacccacctcgactgaacaagaacca

SEQ ID NO: 415998 - DNA, 436 bp, Oryza sativa
ggtatattgaacggaggaacgcgtacttacccacaagttaggtgcatgccatggcaccattcatggcgtgcgcctcgccaccggtactcacgctggccctgctcgcgtcgtgcggtgcccttctcgccacctccatgctcccggcgcgtgcgacggcggacaggtgctcggacgtcggcgacatggcgatgatggacaggttacgcgcttggcagggagctcacaaccggtcgtacccgaacgcagaagaggcgctgcagcggttcgatgtgtaccggcgtaacgcggagttcatcgacgccgtcaacctgcgcggtgacctcacttaccagctggccgagaacgagctcgcagaccttaccgaggaggagttcctggccacgtacaccgggtactacgccggtgatggccacgcggacgactacgctatcacgac

SEQ ID NO: 415999 - DNA, 490 bp, Oryza sativa
  unsure (1)..(490): unsure at all n locations
tttccctttcctttctctctcgagccttcctcttcctcttcctcttcctcctctactccacctcccctctcgccgctccagatcgattcccccccccacctcgcccgcgcgaattccccgctccgatctccgccgcctccctcccagcatactattagctctcctgtgaaagagaagaattgagaggtttctttaacatcaaggatgtcggtttctatgaaggatttggatccagcttttcgtggtgctgggcaaaaggaaggcttggaaatatggcgcatcgagaacttcaagccagttcctattcctgcgtcttcatatggaaaatttttcatgggtgattcttacatcatcttgaagacaactgccttgaaaaatggttctcttcgacatgacattcattactggattggcaaagatactagtcaggatgaatctggaactgcagcaattttaacagntgagcttgatgctgcacttggtggacgcg

SEQ ID NO: 416000 - DNA, 460 bp, Oryza sativa
  unsure (1)..(460): unsure at all n locations
ttttctcccttctcctcgctcttccccctccgccgccgccgcagcggagcagcaacagcaggcgagcgacatgggagggtttgtcaagacccagaagacccatgcctacttcaagcgtttccaagtcaagttcaagagacggaggcagggcaagactgactacagggccaggattaggctcaccaaccaagataagaacaagtacaacacaccgaagtaccgctttgttgtgagatttacaaacaaagatatcacagctcaaattgtctatgctaccattgcgggtgatatcgtgatggctgctgcctactcccatgagctgcctcgttatggtcttgaagttggtctcaccaactatgcggcagcttactgcactggcttgcttctggctcgccgtgtgctcacgctccgtggtttggaccaggagtacgagggcaatgttgaggccactgnggaggac

SEQ ID NO: 416001 - DNA, 338 bp, Oryza sativa
tcggtcattgctaaagctgagaagatcgccaaggagtcggcttcataagatctcttcattgttaagttctgtacaagttaaatttttggattctggtttctatatgcccgttctgtagccaggacgtgattacaagcaggggtgacatcttctgatgagcgatgtttttttgtcttccttttctccttttacccctaataaggaaccgcagtgacattgtattgtgctgcacaaaagtactcggaacttcgaaagcatgtgtcctttataatgcagatccatgaagcataggatcattgagttcttgtttttagttggtcaaaaaaaaaaaaaaaata

SEQ ID NO: 416002 - DNA, 504 bp, Oryza sativa
  unsure (1)..(504): unsure at all n locations
ttggtttggtcgcagcaacggccgcggcgttggggggaatggaacgcccaatctgcatgcttcttcttgctgtcgaacaccagatcgcaggtgacaagaatcagtgagcatgcatcatgtcgtccaacatgttcggcaagaaagggtgggactcgaatgggatggatacatctggttctgtctgcagaagttcttcagatatcaattacattaatcaacgggcaagattgaagagtgcgagcctaaactgtgtgggttcgccgccaaggaagaacaacaatgctacacagtaccggatgtttgttgccacatggaatgtgggaggaagaactcctaataaacgacttaaccttcaagactttctgcaggttgaagaatctcctgacatctacgtcttagggtttcaggagattgtccccctgaccgccggcaatgtgctcgtcctcgaagacaacnagccggcggcgaggtggctggcgctgatccaccaggcgctgaacatgc

SEQ ID NO: 416003 - DNA, 512 bp, Oryza sativa
  unsure (1)..(512): unsure at all n locations
tttctagcttcctcgctgcttcgcccgccacgtgaggctcctcctcctccccttttttttctctcgctcgcctcgccatccatggcgtcgatggcgaaccagcagtagtagtagtccaccccaacgacgcgcgcgagccagctccggggtacccgccgctcgtgcccgggggggaagggggtgcaccggggagccgtcgcgccgcgcggctctgattcttcccgttcccggagatttgaaccatggagtctttacgtgacatggtcctcccaccaggatttggattccacccaaaagatactgagctcatttctcactatctgaaaaagaaaatacatggccaaaagattgaatatgagatcattccagaggtggatatatacaagcatgaaccatgggatttacctgcaaagtgcgatgttccaactcaggataataagtggcatttcttcgctgctcgtgacagaaagtatcctaacgngtctcggtcaaatagggcaacagttgctggg

SEQ ID NO: 416004 - DNA, 475 bp, Oryza sativa
cctctttctcctccccctcccggtaaggcggacgaccgagctgaggctgagctagggctagggcacccacctcctccccttccgtatcctggatggctgctggtcggggcattaaccagctcctacggagaacactccataatcagtcctcaggctcatctctgctatcctcgttccggataaagcatgaagaatcctccgctggactgagagcattggctcttcttggagttggtgcttctggtcttttaagctttgctacaatagcttctgcagatgaagctgagcatggtttggcagcagctgaatatccctggccacatgctggcattcttagctcttatgaccatgcatctattcggcgtggacatcaagtttatacacaagtgtgtgcctcttgccattccatgtcattaatttcgtaccgagatttggttggtgtggcctacacttgagaagaaacaaaggctatggc

SEQ ID NO: 416005 - DNA, 511 bp, Oryza sativa
gtttatactttcaatcagagccagtatcctcgtgtggtagccgatgagttcttgccatggccttccaaggggaagacctgcaaggatggctggtaccctcctggccatggtgatatcttcccatccctgatgaacagtggcaagcttgatttgttactttcacagggaaaggagtatgtgttcattgcaaactcagataacttgggtgctatagtggacatgaagatactgaaccatttgatccacaaacagaatgaatattgcatggaggttaccccgaaaactctggctgatgttaaaggtggcacactgatctcatatgaagacaaggttcagctcctggagattgcacaagttcctgatgcacatgtgaatgaattcaaatccatcgagaaattcaagatcttcaacacgaacaatctatgggtgaacttgaaggctatcaagcgccttgttgaggctgatgcactaaagatggagatcattccaaaccctaaggagtggatggagt

SEQ ID NO: 416006 - DNA, 497 bp, Oryza sativa
tgttgttgttcaccgtattgcggatagaattgtaagggggacagcccttgaaaagcatgccaggttttggaagggagctgacatcttggtattcaacagctacctttggtggatgactggacaaaagatgaaaattctgcaaggttcttttgaagataagagtaaggatattgtagaaatggaaacagaggaagcctatgggatggtactgaatgcggtcgtgaggtgggtggagaacaacatgaaccccagaaattcaagggtctttttcgtcacaatgtcacccactcataccaggagcaaagattggggtgatgattcggatggaaattgctacaaccaaactactccgatcagagatttgtcatactggggtccaggaactagcaagggcttgatgcgcgtcattggagaagtgttcagcacatctaaggtccctgtggggatcgtcaacatcacccagcttttccagtaccgcaaagatgctcacactcaga

SEQ ID NO: 416007 - DNA, 486 bp, Oryza sativa
attcttttcggtgcaggtcttgcctcttaccccgtgggtttcgttcgcagaaggatgttgatgacctctggagaggctgtcaacgtcaagagctccatggatgcctttctcccagatcctgaagaacgagggtgccaagtcactgttcaagggtgctggtgccaacatcctacgtgccattgctggtgctggtgtgctctcaggctatgaccagctgcagatcctcttctttggaaagaagtacggctcgggcggagcctaaactggcagaaaatgatgacgaacaagtgtttattcctggtcctgcactaacgggatctggtgaattttgcctttttaacattgaaaacaataataattctttgaggggagaacactccccgacattcgttttttggtggacgcgtttatctccaaacattgtcataggcggaggcgttaatcgcaaacagtttaccatcatagggttgagtttgagttgagtct

SEQ ID NO: 416008 - DNA, 510 bp, Oryza sativa
ttctttttcaccatcgacgacgactgcttcgttgccgaggacccatctggcaaggacatcaatgctcttgagcagcacatcaagaacctcctcagcccgtccaccccgttcttcttcaacaccttgtatgatccctaccgcgaaggcgctgactttgtccgtggttaccccttcagcctcagggagggagccaagactgctgtctctcacggcctgtggcttaacatccctgactatgatgctcctactcagatggtcaagcctcgtgagaggaactccaggtatgttgatgctgtcatgactgtgcccaagggaaccttgttccccatgtgtggcatgaaccttgcttttgaccgtgatctcatcggtcctgcaatgtactttggtctcatgggtgatggccagcctattggtcgctacgacgacatgtgggctggatggtgcatgaaggtcatctgtgaccacctgagcctgggagtgaagactggactgccgtacatctggcacaag

SEQ ID NO: 416009 - DNA, 484 bp, Oryza sativa
ctttatttgtggccgtcgaggtgtccggtggacctgccgtccccttccacccaggaagggaggacaaacctgcacccccacctgagggccgtcttcctgatgctaccaagggttctgaccacctaaggcaggtcttcggtgcgcagatgggcttgagtgatcaggacattgttgccctctctggcggtcacaccctgggaaggtgccacaaggaaagatctggttttgagggaccttggacaagaaaccctctgcagtttgacaactcttacttcacggagcttctgagtggtgacaaggagggccttcttcagcttcctagtgacaaagccctgctgagtgaccctgccttccgcccactcgtcgagaaatatgctgcagatgagaaggctttctttgaagactacaaggaggcccacctcaagctctccgaactggggttcgctgatgcttaagaggtttctagtctactactgctagtaca

SEQ ID NO: 416010 - DNA, 442 bp, Oryza sativa
cttttaattatgatgaccttgatagtgtttcaaagcttcagaaaacacaacgttacaatgacattatgcaaaaagttgaaaatgcacttcagaaaggtacagatttttccaatcaaaggtcgatcctggaggaagatccagaataccagctgattgttgattgcaatgctctatcagtagatattgagaatgagatcattataatccataatttcatacgtgacaagtataggctgaagtttcctgaactagaatcccttgttcatcatccgatcgattatgctcgtgttgtccagaagattggaaatgagatggatttaacgcttgtagatctggaagggcttttaccttctgcaattataatggtaatttcagtgacagcatcaacgacaagtgggaaagccgtttccgaggagaaccttgtaaaaactattggagcatg

SEQ ID NO: 416011 - DNA, 447 bp, Oryza sativa
tttttaatcaagaaacaagcaagattattctagccaactagctagcttgcgaatggcttccttgtcctccttaatgctcgtcacggcagtggccgcattgttggtcattggctcatctggcactgaggtcaccttcaagatcggtgagtcctctaccacctctacactggaactcatcaccaatgtcgccatatctgaggtggagatcaaggagaagggtggcagcgactggagggggctcaaggagtcatcggctaacacctggaaaatcaaaagtgatgcaccgctcaagggccccttatccgtccgcttccttgtcaagaacggtggctatcgcgtcgtcgacgatgtaatccccgaaacctttaaggccggctccgtctacaagagtggcatccaggtccagtaatggacatgcatgtccttgcattaggtcacatggaaata

SEQ ID NO: 416012 - DNA, 382 bp, Oryza sativa
ttttgaggtgggttggcttctcctccccctctttaccttttcctcctcggttcggttccgtggttcgtctagggtttagtgggttgagatggcggcgccggatgtcgagtaccgctgcttcgtcggcggcctcgcctgggccaccgacgaccgctccctcgaggccgccttctccacctacggcgagatcctcgactccaagatcatcaacgacagggagacggggaggtcacgtgggtttggcttcgtcaccttctcctccgagcagtcgatgcgcgacgccatcgagggcatgaacggcaaggagctcgacggccgcaacatcaccgtcaatgaggccccatcccgccgctccggcggcggaggcgggggctacagcggc

SEQ ID NO: 416013 - DNA, 502 bp, Oryza sativa
  unsure (1)..(502): unsure at all n locations
gttatcctcctatacctgccagaaacatggagggggacaccaacagactaggtagcggaccaatggcctcgttgtcctccttccggctcgccgtggcagtggcggcattgttggtcgtcggctcatgcgccactgaggtcaccttcaaggtcggtgagggctctagcggaaaaagtctagagctcgtcaccaacgtcgccatctctgaggtggagatcaaggagaagggcggcaaggactgggtggcgctcaaggagtcgtcgactaacacctggtcgctcaagagtgaggcggcgctcaagggccccttttccgtccgcttccttgtcaagaacggcggctaccgtgtcgtcgacgacgtcatccccgaaagctttacggccggctctgaatacaagagtggtatcaacgtctaattaatagacatgcgtactctngcattgagttgcatgataattattaacctctaaataattttgtcttgtaagagatcacgctacgc

SEQ ID NO: 416014 - DNA, 305 bp, Oryza sativa
gtgcgtatgaaaaagaaaagaaaggctttcgggtcggtgggcaaaagcgcgagggcaaagcgaaggtatagcatctagtaggcgatggcgagctccggtttctcatggacgctgcccgaccaccccaagctccccaaggggaagacggtagccctcgtcgtgcttgacggatggggcgaggccaacgccgacaagtacaactgcatccatgtcgcccagacgcccgtcatggattcgctcaagaatggttctcccgagaggtggagattagtgaaggctcatggaacagcttgttggtcttccta

SEQ ID NO: 416015 - DNA, 402 bp, Oryza sativa
ttttcagagttctaccatatggagtacgaccatctctgagcagaagggacactacaaatttacggcgtcttgcccgtgggctgccacctcactttgctcttgggcgaagcagacaactccaaggcttagcagctgctatggtgaagttgtgggagaaaagttctattgcaaaaattgctctgaaaagaggagtgcagcttaccacaagtgagaggatggctgaagatataaagaaattgacaggtggtgtaatgctttcgaggaacaatgactgtatggtcttctacagaggaaaggatttcttgtccccagaactcgcggagaaactgctagagagggaaagatgggcaaagtccttacaagatgaggagcaagcctcattaaatgcagcgtcttcctttt

SEQ ID NO: 416016 - DNA, 495 bp, Oryza sativa
tcgatagccgccgaccgaccgagcgcgatggcggcggcgcggctccggctgctgtccgcggggctcctctcgccggcggtgtccagggcgcggcactcttctcccctgcagggtctccgcgcgctgtccacgctctccactacgctcgggtccggcgcgggggaggacgagatcgagcgcatccgccgcgagttcgaggacgccaagcggaactacctcagcatccccgtcgccatcaaggacatggccaagatgaacccgcaaggcatttatgtgaacaagaacgtcaaactggatgacctgcaagtctatgggatttgactatgactacacgctgtgccactactacgagcacctgcagtgcttgatctacgatctcgccaagaagcacttggtcaatgagttgaagtatcccgagagctgcttgaagtttgagcatgaccacggcttttcccataaggggctctattatgaccgataaaaggttgccttttg

SEQ ID NO: 416017 - DNA, 380 bp, Oryza sativa
tcgtttgagctccccgtgcggcggcgcaagaggggagctacgcgggggaggcggcgaggtaaccacgagctgcgcagcggagcgcgctctggcgaggcagcaggcggaagcgtgcggcgcggcggcggacggcggcaggtagcaggcgaagcgcgcggcgccgcgagcgcgagcagccgagcaggtgcagcaacaggccagctggatgggaaaggacgcatgctagcgaaaagcgtggcgcacacctgggagcacgctagccagaggcaggaccagccgagcaacaggcaggcagcagctggccaacggttgcaaaataactaaacaagcgagcaagattgatcccaaggtgctggtgctgattaccttccaaaccatgt

SEQ ID NO: 416018 - DNA, 319 bp, Oryza sativa
tttcatggtcactgaagggcgcaataggaagaagaagcaagaaaatcaaatgaaacttgaagcaaaactccaaaatttgcaggtcgagtggaatggaggctcggatactatggaggaaatacttgggaggatccaacaaagggaagaagccgcagtaaagcgtgaacgagctatggcatatgcattcaatcatcagtggagagcaaggtctgccacaagtcttggaaacttcaactatgaagttggcaagggtggctgtggttgcagctttatggaccttatgtatcgtgttccggtcatgggagtcctgatcacctgt

SEQ ID NO: 416019 - DNA, 402 bp, Oryza sativa
ttttgcttcgccagaatgaccaccttgggctgggttatcagctaagatgggttgtccatcatcatgcccttaatgaaggtcatgatcattatgcacctgtggagagttccgagcgaggcacatgcggcgcacctcagaaatagctttcatacacctgaaggagtgaagcatgcaaggaagcaagtgacattattgtttaaatcgtttggaggaaccatcgcatggtcgctcttccagtggatcttcgcctctgggccgggctgtggcttcaaattcttccccacatttggcctcgaggcatataaacacggattctttttcgatttcaccatggccaatgttggcattggcatgaagtgcccgtacatgaacgcgatcttcgtattcaattggcaccatcat

SEQ ID NO: 416020 - DNA, 341 bp, Oryza sativa
aaaaccctagccgccgttccagcttgcggagaagaagcgcgcgagccagcaatctcgggcggcggcggcggcgaggaggaggaagtagccggagaggagggagatggggagcgacacggaggcggagaagaagaagactcccgtggcgctggcgcccatcgcgaagccgctcgccggcaagaagctctgcaagcgaaccctcaagctcgtccgccgagcgtctgaggccaaatgcttgaagcgaggagtcaaggaggtcgtcaagagcattcgccgcggacagaaaggaatgtgccatattgttggcaacattttttccattgatgtgattacacatgttc

SEQ ID NO: 416021 - DNA, 342 bp, Oryza sativa
tctgtaaaatgctgatttagatgcttgtgtcaaatcatttgctactatagacaaattggcccttgttaatgtggaaggaactggaatggctggtgttccaggtacagcaagtgccatatttagtgctgccaaggatgttggagctaatgttatcatgatatctcaggctagcagcgaacactcggtatgctttgctgttccagaaaaggaagttgcagcagtctcgacagccttgcatgttaggtttcgtgaggcattagcagcttggaaggctatctaaggtcgaagtcattcttgggtgcagtatttttgctgttgttggcttgaggattgccagttttt

SEQ ID NO: 416022 - DNA, 490 bp, Oryza sativa
gtcctcctccagtggaggaatgagatgtacaattcagtaatagacgcattcaaagattttggccaaacaaatcctcaacttcatcatcttggttaccgagacaaagcttggaatgtgaacaagcttgctcacatagctcgcaaacaaggtcttcctgacgtttgtgtaactatactcgataagatgtatggtcatgctaccatggaagttcaggaagcatttgtgaagatatgtgaacaagccaaggcatacttagagatgaaaggcgaactagtcagtggtcttaacttaatcaataacaccaatttggaatttttccctgtgaagaacaaagcagaaatatttcgtctggagaggtgacttcctgctaaaaatgaatgactgcgagaatgcaaatgttgcttattcaaatgctataacactttttaagcatttgcccaaagcatggattagctgggggaattactgcaatatggtttccaggagacaa

SEQ ID NO: 416023 - DNA, 313 bp, Oryza sativa
gcgcgacccgtccgatcggatctagagcggccaccttctgggcctggttctactccccccgatcggatcggcccggctcctcctcctccgccgccgccaccgccgccgcagataggagaagatggccgcacttgataccttcctctttacctcggagtctgtgaacgagggccaccctgacaagctctgcgaccaagtctcagatgctgtgcttgatgcctgccttgccgaggaccctgacagcaaggtcgcttgtgagacctgcactcaagacaaacatggtcatggtcttcggtgagatcactaccaaggc

SEQ ID NO: 416024 - DNA, 497 bp, Oryza sativa
tttccatcacctcaacctcatgaccatcgccgacactgatcacagggttcgacaagtgcgcaattacgccgacctgtcgaaattatgtgatgatacatttgccaaaatgattcaaagcgggggtagcccggaagaactctatgacactgtatgcaagcaggaggttgaaattgttctgacagcttatccaacttaaattaatcggtggactttgcagtacaaacaccttagaatagctcaccaattggaattcatctaacgtgctgttctttagctcgtggataatgcaattcttttctgttgatttgttatgagatattttttgttttccgtccaacttttgttgcttgtcatcctttattcttttaatgcttgctatctttataatttgccaccatcttctccagctacctcggtattaccgccaccatgatatacgcgcaacacctcgccgtcggccttccggacccgccggtcgaccttctttaccccggtgt

SEQ ID NO: 416025 - DNA, 156 bp, Oryza sativa
tcgtagaaccaccccgacaagggcggagaccccgagaagttcaaggaattggctcaggcttatgaagtcctgagtgaccctgagaagcgtgaaatctatgatcagtacggtgaagatgctctcaaggaggggatgggtcctggtggtgttaattat

SEQ ID NO: 416026 - DNA, 494 bp, Oryza sativa
ttaccgttaaggtccacacctcttctcgcaaccacttgagccactcgcaagtctcaagccaaaatcatatcacagtcgccatggaactctcctcaacctcagcttctctcctgctcatcctcctgctcaccctcgtctacttcctctacctgcaccaggatcccaagaagaagcctcgcacccatggactcaagtcctaccccgtggtcggcacgctgccgcatttcatcaataacaaggaccgtttccttgagtggtcgaccggcgtcatgaagcgcagccccacgcacaccatgtcgttcaaggagctcggactcaccggcggcgtcatcaccgccaacccggccaacgtcgagcacattctcaaggctaactttggtaactaccccaagggcgagcttgccgtgtccttgctcgaggattttcttggccacggcatcttcaattccgacggcgaacagtggctatggcagcggaaggccgccagttacgag

SEQ ID NO: 416027 - DNA, 495 bp, Oryza sativa
gtggcgtctgctccacccgctcttcgactcctgccggttctccgggttttctctcgatttccgccgaatttcgctccgctccagcaatgggcgaattgggtgctctccagtccatcgtctaccaccgcggatcgctccgcctgcttgatcagaggaagctcccactcgaggtggactacatcgacgtcaagtgctccggcgatggatggaacgcaatcagagacatggttgtccgtggcgctcctgcgattgccatagcagcggctttggctctggctgtagaggtttctgggttggaggatttcaccggtacgcctgcagaggcagcagtttttgtttccgagaaattggagtaccttgtatcgagccgcccaactgcagtgaacctatctgatgctgcaaccaagcttcggagtttagtttcaaggacagcagaaactgagaaagatgccaaagcaatctttcaggcctacattgatgcagcagagaccatgc

SEQ ID NO: 416028 - DNA, 501 bp, Oryza sativa
ttaatttacctcctccacctcctcctcctcccgccggtcggatcggcccggctcctcctcctccgccgccgccaccgccgccgcagataggagaagatggccgcacttgataccttcctctttacctcggagactgtgaacgagggccaccctgacaagctctgcgaccaagtctcagatgctgtgcttgatgcctgcctcgccgaggaccctgacagcaaggtcgcttgtgagacctgcaccaagacaaacatggtcatggtctttggtgagatcaccaccaaggctaacgttgactatgagaagattgtcagggagacatgccgtaacatcggttttgtgtcagctgatgtcggactcgatgctgaccactgcaaggtgcttgtgaacatcgagcagcagtcccctgacattgcacagggtgtgcacggccacttcaccaagcgccctgaggagattggtgctggtgaccagggacacatgtttggatatgcaactgat

SEQ ID NO: 416029 - DNA, 377 bp, Oryza sativa
ttcatgcctaagacaacaaaataaaaaacacgaagagagataaaattaaaccaaacctacataatcacactcctaaaacgatagcataatctcgagcgctactagatccatctctggggggccgtactacaagggcaaagtttacttacccgtgcttgcgacgtaatacctcttctatggctcgacctaaatcaaactcactggccggggttctacaacgccaagactggaaaaaccctggcttaccccaactaaatcccctggaagccgatccccttttatgacggtgaggtcaatgaaaaaagccctgaacagagcgcctttcccaagaattgcgcagacttaaggtcaaaaggtactccccttggcccagctca

SEQ ID NO: 416030 - DNA, 489 bp, Oryza sativa
ttcaggaatgctgaagaggaagcccttgctctggtccaaatggagaaggcaaagtgcagagccgcactggaagcagcagaggctgcacagagaattgcagagctggaggctcagaagagactgagagcagagtggaaggcgaagcgcgaagccgaggagaggaagagagcaacagaagcaatgaacaacactgatttaaggtacaggaggtattccattgatgacattgaagctgccacccataagtttgacaaggcactcaagataggggaaggtggatatgggccggtgtataaagctgtcatggatcatactaatgtcgccattaaaatcttaaggccagatgcatcacaagggaggaaacagtttcagcaagagatagaagtgcttagctgcatgaggcatccaaacatggtgctgctgctgggagcatgcccggagtacgggtgcctggtgtacgagtacatggactacggcagcctggaggac

SEQ ID NO: 416031 - DNA, 465 bp, Oryza sativa
agttgatcccagagtggctcagctttgtcaagggcattgttgattctgaagaccttcccctcaacatctcacgtgagatgctccagcagaacaagatcctgaaggtgatccgcaagaaccttgtgaagaagtgcgtggagctcttctttgagatcgctgagaacaaggaagactacaacaagttctacgaggccttctccaagaatctcaagcttggcatccatgaggactccaccaacaggaccaagattgctgagctcctgaggtatcactccaccaagagtggtgatgagttgaccagcctcaaggactacgtaacccggatgaaggagggccagagtgagatctattacatcactggtgagagcaagaaggctgttgagaactcccccttccttgagaagctgaagaagaagggatatgaggtcctgtacatggttgatgccattgatgagtacgctgttg

SEQ ID NO: 416032 - DNA, 497 bp, Oryza sativa
attcgatccccaaattccccgatccccgcaggcgctcctgcgactcgtaggtctcgtcaagtcggcggcgacgactttgatctctattcaagatgcagatctttgtgaagactctcactggcaagaccataacccttgaggttgagtcctcggataccattgacaatgtaaaggccaagatccaggacaaggagggaatcccaccggaccagcagcgtctcatcttcgctggcaagcagcttgaagatgggcgcacgcttgctgactacaacatccagaaggaatccaccctccaccttgtcctccgcctccggggaggcatgcaaatctttgtcaagaccttgactggcaagactatcacccttgaggttgagtcttctgatactattgacaacgttaaggcaaagatccaggacaaggaagggattcccccggaccagcagcgtctgatctatgctggcaagcagctcgaggatggtaggacccttgctgactac

SEQ ID NO: 416033 - DNA, 461 bp, Oryza sativa
ttgactttgtgggcgcgcatggcggcggcgggctaccggcggaacgcgaagcggtgcaaggagaagtgggagaacatcaacaagtacttccgcaaggccaaggagagcggcaagaagcggccggcgcacgccaagacgtgcccctacttcgacgagctcgaccgcctctactcccgctccggctccggcggcggtggtgggtcgtcctcggcgggcggcaatggcggggaggaggcgaagggcagctcggagctgctggacgcggtggtgaagtacccagacgtgcggtgcgcgccgccgggtttcccgttcgacggggagcagaacgaggaagggaggactaaggacgactgcgacgaggcgcaccatgatggcgacggcgacggcgacgaggaaaaacgttggcgttggcgttggagagcgaccgatgatcatgacgaccaagtggatgagagccatga

SEQ ID NO: 416034 - DNA, 489 bp, Oryza sativa
ttctcgtcttctcccgtcttctccttcgagttagctacctccttattcaaccatgggtaaggagaagacgcacatcaacatcgtggtcattggccacgtcgactccggcaagtcgaccaccacgggccatctgatttacaagcttggaggtatcgacaagcgtgtgatcgagaggttcgagaaggaagccgctgagatgaacaagaggtccttcaagtacgcgtgggtgcttgacaagctcaaggccgagcgtgagagaggtatcaccatcgatattgccctgtggaagttcgagaccaccaagtactactgcacggtcatcgatgcccctggtcaccgtgacttcatcaagaacatgatcacgggtacctcccaggctgactgtgccgtgctcatcattgactccacactggtggttttgaggctggtatctccaggatggccagacccgtgagcacgctcttcttgctttcactcttggagtgaagc

SEQ ID NO: 416035 - DNA, 513 bp, Oryza sativa
cggccgggtcgggcccaggccacccgtgtcgttaacggcccccaacgcactcgcggcgacgttgttgcccttcttgcacggaaggaagagcggcggcggcggcgtgtccgtgcacgccggggcgccttcgccttcgcgggcggtggcggtggtggcgcggaggttgtgggggagcgctagcagtagcaggaggatggtggtggcggcggcgactgcggcggagatggcgcccgcgcgagcggcgaggaagggaagccgttcgtggaggagatgagggcggtggccatgcggctgcacaccaaggaccaggccaaggaaggggagaaggagccgcaggcgccgccggtggccaggtgggagccctccgtggacggctacctccgcttcctcgtcgacagcaagctcgtcttcgagacgctcgagaccatcgtcgaccgcgccgtcgtcccctggtatgctgagttcaggaatactgggttggagagagcagatcactgaagaggatctggaatg

SEQ ID NO: 416036 - DNA, 497 bp, Oryza sativa
ttccctcctcgctccccgccgccgccgccgttttcttggagaggagaaatccgtaggctcagaggatttttggtagtcttgtttcgtgatattcgtgaagagggggggagctaaggggggattcgtaagatcagaattggatcacgcgggggcgcgctcgggatcgggggttccaaacacagcttcttcgttgaatttaagtggatgtactaatggagtcaaagggtggcaaaaagaagtctagcagtagtcgttccttgatgtatgaagctccccttggctacagcattgaggacgttcgacctgccggaggcgtgaagaagttccagtctgctgcttactccaactgcgcgaagaagccatactgatagccctttcggcttctccatcctagtagtttaggatttcttgcaattccattttggcacttttcttctgacctatttctctggctgctgcttcctgataatcgaccagttctctagtcttgctccctg

SEQ ID NO: 416037 - DNA, 489 bp, Oryza sativa
ttgcgagagcctgcccggcgctcccatgccggacgccatcgtcgagctcctccaccatgagcacggcgttgctagcgccggcggcaaggccaacggcggcggcgacggtccaccgccgccgatgaacttcaactacgacgactacagggccctgcctcggagcgacgccccttccccggatgcattgaaccgcgtcgccgccgtacagaacgccgacgagaacggcgtgtcctcgccgacgtcgtcgccgccgacggtgttcttcctcgaggacgccgtgcgcgtcggcgagagcctgcccctaccgcgaccggcggccgacgcaaccgcgcgaggcggtgaacggccacggacttggcgcctctgcggctgtacatcgctctgttacagattgctagtggggcttcctgttagaagggcgtgctagggtgtgctcaggtttgtatggagagtggcgctaaaggctgtgaggttattgggagtgggaag

SEQ ID NO: 416038 - DNA, 488 bp, Oryza sativa
  unsure (1)..(488): unsure at all n locations
gctagcttagctcagctcaaccacatctcgaactaaccaactaagctaaagctaagctagcttcaccgtcatcctccactgacacatggggagcttggacgccaacccggccgccgcctacgccgcgttcgccgccgacgtcgagcccttccgcccgctcgacgccgacgacgtccgctcctacctccacaaggccgtcgacttcgtctacgactactacaagtcggtggagtcgctcccggtgctccctggcgtcgagccgggctacctcctgcggctgctgcagtcagcgccgccgtcgtcgtcggcaccgttcgatattgctatgaaggagctcagggaggcggttgtccccgggatgacccactgggcgagcccgaatttcttcgcgttctttccggcgacgaatagcgccgccgcgatcgccggtgagctcatcgcgtcggcgatgaacaccgtcnggttcacgtggcangcggcgccggcgg

SEQ ID NO: 416039 - DNA, 489 bp, Oryza sativa
tttcgatcaaattccgcgcgggttgggaagagcgagctcgtgaggagagcagagggaaagcgcgagggggaaggaggaggaaaggtgcacaaggtcagactaagtttgcgttgaagaacaaaggagaggaaaaatgtcgcctgctgaggcatcgtgtgaggagaatgtgtacatggcaaagcttgccgagcaggctgagcgttacgaggaaatggtcgaattcatggagaaggtggcaaagaccactgatgttggtgagctcaccgttgaggagcggaacctgctttctgtggcttacaagaacgtgattggtgctcggagggcatcgtggaggatcatctcttctattgagcagaaggaggagagccgagggaatgaggcatatgttgcatcaattaaggagtaccgtagcatgattgaaactgagctctagcagatctgtgatggtatccttaagcttctggattcccaccttgtcccatctgccac

SEQ ID NO: 416040 - DNA, 485 bp, Oryza sativa
atcctcctcctcctcctccgccgccggctccgtgctcccccacctccactctccactccaatggcgactcacacgcagatcagcaagaagcgcaagttcgtggcggatggggtgttcttcgcggagctgaacgagatgctgacgcgcgagctcgcggaggacggctactccggcgtcgaggtccgcgtcacccccatgcgcaccgagatcatcatccgcgccacccgcacccagaacgtcctcggcgagaaggggaggaggatccgcgagctgacgtccgtggtgcagaagcggttcaacttcccggagaatggcgtcgagctctacgccgagaaggtgaacaaccgcggcctctgcgccatcgcccaggccgagtcgctccgctacaagctcctcggtggcctcgccgtcagaagggcgtgctatggtgtgctcaggtttgttatggagagtggtgctaagggctgtgaggttattgtgagtgg

SEQ ID NO: 416041 - DNA, 432 bp, Oryza sativa
acgttagagttgcgtcgcctctcctcctcctgcgtgacccctacgcttccagaaccttctcgaagctcccgctcccccccccttccgctccaatggcgaaggaaccgatgcgcgtgctcgtcaccggcgccgcaggacaaattggatatgctcttgtccccatgattgctaggggtgtgatgatgggtgctgaccagcctggtatgctacacatgcttgacataccaccagctactgaatcacttaatggcctaaagatggagctggttgatgctgcatttcctcttttgaagggaattgtcgcaacaactgatgttgcggaggcctgcactggtgtgaatgttgcggttatggttggtgggctccccaggaaggagggaatggaaaggaaggatgttatgtcaaataatggctccatctacaaatcccaag

SEQ ID NO: 416042 - DNA, 493 bp, Oryza sativa
agagatttctaatccacaccctctcaagccagcgcatggcggagcgcggcggcgagcgtggcggcgagcgcggcgggttcggccgcggcttcgggcgcggcggtcgcggcgaccgcggagggcgccgtggcgggcgccgcggcccgcgccaggaggaggagaagtgggtgcccgtcaccaagctcggccgcctcgtgaaggaaggcaggttctccaagatcgaggagatctacctccactccctccccgtcaaggagcaccagatcgtggagaccctcgtgccggggctcaaggacgaggtgatgaagatcacacccgtgcagaagcagacgcgcgccgggcagcgcacccggtttaaggcgttcgtcgtcgtcggcgacaacaacggccacgtcaggctgggggtcaagtgcgccaggaggtggccaccgccattcgcggcgccattatactggccaagctgtccgtggtgcccgtcaggaggggttactgg

SEQ ID NO: 416043 - DNA, 487 bp, Oryza sativa
  unsure (1)..(487): unsure at all n locations
tttagattgtatcggcaggaagccggttattgggtttggaattttcttcacgctggtatttaatactttgattgggctaagcacgcagtactggatggcaataactacacgttttcttgttggatcattgaatggtttacttggcccaataagagcttacactactgaagtttgtcggcctgagcatcaagctattggattgtcacttgatagcacatcatgggcaatgggtcttattattggatcagttattggtggatatcttgcacagccaacggaaaaatatccaaagttatttcctggcaactcactattcggaaggtacccgtacttattaccttgcttatgtatatcggncttctgctttattatttatataagctgcatgtggctcccggagacactgcatgatctcaaagtccacaaaaaggactatggaccaattgaatctccgttgcacattttgccaaatctgaagaacttttga

SEQ ID NO: 416044 - DNA, 487 bp, Oryza sativa
  unsure (1)..(487): unsure at all n locations
ttcacgttgccaccacaggctacgcaaaattctctcccttcctcctccaccacctccactccgacgatcctcctcctgatcctgtgccggccggcgatggcgtaccggttgctggagctcacgctggtctccgcgagcgacctcaagaaggtcactctcttctcgcgcatgcatgtctacgccgtcgcctccatctccgggagcaacgtccccatgcccatgcacggcacccacgccgaccgcaacggcggcagcaaccccgcgtggaacaccgtgctccacttccccgtccccgcccgcttcgacacccgcggcctcgccctccacgtccagctccgcgcccggcgctccttcggcggccaccgcgacgtcggngacgtgttcgtgcccctcgacgaccatctcgccggcgcgcacgacggcggcgagccgaggcctgctagctaccaggtgcgctcgcccatgtncgcccgcgcgcacggcacgc

SEQ ID NO: 416045 - DNA, 490 bp, Oryza sativa
atgcattcgaccggcatggagatggaggtggaggtcgccggcgacgacgaggcggtcccggaggcgccggagcggtccgtcgtcctcatctccgccggcgccagccactccgtcgccctgctcagcggcggggtggtgtgctcgtgggggcgcggcgaggacgggcagctggggcacggcgacgcggaggaccggccggtgccgacggtgctgacggcggcgttcgacgacgcgccggggggcgtcgcctccgtcgtcatctgcggcgccgaccacaccaccgcctactccgacgaggagctgcagctctacagctggggatggggcgacttcgggaggctgggtcacggcaactccagcgacgtgttcaacccgcagcccatccaggcgctccagggcgtccggatcacccagatcgcctgcggcgacagccactgcctcgccgtcaccgtcgccggccatgtccacagctggggacgcaatcaaaatg

SEQ ID NO: 416046 - DNA, 488 bp, Oryza sativa
ttatcccccacccagcgactcgccggaaccctagccctagatcccgcgcggcttgccgccgtgctagccatggcgtccctcaaggagctcctcccgacgcccaaggcggcggcgtcgacgttctacgaccacagcagcgacccgtggttcaaggagcggtatggcggggagtcggcgcaatccgacgcggcggcggcggcggcgaagccttcgggccccgccaagcccgtgccgccgtacgggaagcgtggcgggttcgtgccgcggcggccggaggacttcggggacggcggcgccttcccggagatccacgtcgcgcagtacccgctcggcatgggccggcgcgacgagaagggcggctcgaagatcctcgcgctcaccgtcgacgccaagggcagcgtcgccttcgacgccgtcgtgaagcagggtgagaacgcctctaggatcgtttactcaaagcacagcgacctcgtgcccaagattgccac

SEQ ID NO: 416047 - DNA, 487 bp, Oryza sativa
cgctcgtcgaggttgccgtctccttgtctcctccgctccttgcgccgccgccgcgacgagtcgcggggaggggcggcgatctccatctccatctgaggcgaggagagcaggggaggtgaggggatcctggtgaggtttgtgattactggacaatagaaatatttacacaatatggctggcggctctgctgatgcagtgaccaaggagatggaggcgctactcgttggacaaaatccaaatgcggttagtggagaaacatgcgagacctcatcaaaagaaggcaaagctgcagatagcaatggatctcattcttcaccaccagaagatgatgatgatgaagcgcaggggatggtccatctcaagatggaggatcagaagctgcaaagaagaaaaagaagaaaagcaaatccaaaaagaagaaaggccctcttcagcagactgatcctccatcaattcccatagacgaacttttcccatcaggagattt

SEQ ID NO: 416048 - DNA, 491 bp, Oryza sativa
attaaacaaagaattcaattaaaattgatgctgtgaagaggcatgaactcccacgccatgaagtgcagcaggttatatgctcgttgtgtggcacggaacaagaggtacggcaagtatgtatcagttgtggtgtatgcatggggaagtacttctgtgaagtgtgcaagctctttgatgatgatgtttcaaaacagcaatatcattgcaatggttgtggaatatgcagaattggtggcaaggagaatttctttcactgctcaaaatgcggatgctgttattctatagtattgaagaacagtcatgcatgtgttgaaggagcgatgcatcatgactgtccaatctgctttgagtacctttttgaatcaaccaatgatgtttccgtcttgccctgtggtcataccattcatgtcaagtgcttgcgagaaatggaggagcactgccaatttgcttgcccgctttgctctaatctgtctgcgacatgtcgaaggcat

SEQ ID NO: 416049 - DNA, 477 bp, Oryza sativa
atcctttttcccccccaaaatcatcagatccggctcgggctccttctactccaccttctgccaccccctcgccgatccagatccatcgccggggaggcgccagccatggccggcggcgggggcgccggcggcatgtcggagtcggtgctccgcaaggtgctcctctcctactgctacgtcggcgtctggatcttcctctccttcgccgtcatcgtctacaacaagtacatcctcgaccccaagatgtacaactggcccttcccgatctccctcaccatggtccacatggccttctgctcctccctcgccgacgccctcgtccgcctcctccgcgtcgtcgagccgccctcgtcgcccgccatgaccccgcagctctacacctcctccgttgtacccatcggcgcgctctacgccatgtcgctgtgggtcttcaactcgggctacatctaccttttcgtgttcttcattcagatgctc

SEQ ID NO: 416050 - DNA, 461 bp, Oryza sativa
  unsure (1)..(461): unsure at all n locations
ttttggacctcgtcgccacaaccaccatgttccctgaaaccaacaccggcaaaacacaaagcaggggagccggtgaggggcccccgtgcgtgcgtgcggacgtgccatgcgccaagatggcctcgacggtaccggccctgatcgccgacgacctgccgacgaacgtgacgtcgcagatcaccgatgcggtgcgccccaagaccaccagctcggtggtctgctactccccgatgatgatcaccaccaacggcatctggcagggcgtcaacccgctcgagttctccctccctctcttcatcctccaggtcgccgtcatcgaagacaccacccgcctcctcgtcgtcctcctcaagcccttccgccaaccccgcgtcatcgctgaaatcctcgccggngtggtgctcgggccgtcggtgatggggcaggtggaagtctgggcgaccaatgtgttcccgcagcgc

SEQ ID NO: 416051 - DNA, 490 bp, Oryza sativa
ataggaggtcatcacctcgtgtgacaaacgaggaagtccaaaaggctgctgctgctctgaaggggtctgaccaccgccgtgctaccaatgttagcgctagactggacgcacagcagaagaagctcaaccttccagtccttcctacaaccacaattggttcattcccacagactgtggagctcaggagagtccgccgtgagtacaaggcaaaaaagatctctgaggaggagtacatcagtgccatcaaggaggaaatcagcaaggttgttaagatccaggaagagcttgacatcgatgtccttgttcacggcgagcctgagagaaacgatatggttgagtacttcggtgagcagctttctggttttgcattcactgccaacggatgggtgcaatcttatggatcacggtgtgtcaagccaccaattatctatggtgatgtgagccgccccaacccctgactgtgttctggtccagttggcgcagagcatga

SEQ ID NO: 416052 - DNA, 400 bp, Oryza sativa
cttctattttgattctgttgaatctctccctggtgaaccattggagccagccgagttgaagccagagaatactagatatgatgcacaaatcagtgtttttggatctaaccttcaaaagaaacttgagcaggctgaaaatatttatggttggtactggggcgcttggatgtgaattcttgaaaaacctagcactaatgggcatttcttgcaatcagaatggaaagctgacagtgacagatgatgatgttattgaaaagagcaatctcagtcgccagtttctcttccgtgactggaacattggtcaggccaagtccacggctgctgatactgctgctatggcaattaatactaagcttcatgtgcaggcccttcgaacagagcaagtcctgagactgaaaat

SEQ ID NO: 416053 - DNA, 393 bp, Oryza sativa
atgggatcttggcagggctgtcggggtgcacggggctgatggagctgaacctggtggggaacaagatcagcgacgtggaggggctgcaccggctgctgaagctggcggcgctggacctggggttcaacaaggtcaccactgcgagggcgctgggccagctggtggccaactaccactccctccgcgccctcaacctcgtcggcaaccccgtccaggccaacgtcggagacgacgccctccgcagggccgtgacgggcctcctccccgacctcggctaccttaacaagcagtccgtcaagccctgctgcgcgcgccccgccgacggagccgagtcgcgcgccgagctcgaggccggcctccgcgggggaggctcccgtagcgcgcggaagcggc

SEQ ID NO: 416054 - DNA, 500 bp, Oryza sativa
ttcctctcttcgtctctctctctctctcgtcgcgttggatttgacgagctcgtcaccaccggctgcggcggcgaggcaggcatccgcactcctcggcgtcgggccgtcgtcgttgtccgctacctggaaaagatggctggtggctttagggtattgcatcttgtcaggccttttctggctttcctgcctgaagtacagagtgctgataggaaaataccatttagagaaaaagtgatctacactgttatttccctattcattttcctggtatgcagccagctaccactgtatggcatccattcaactactggagctgatcctttctactggatgcgtgttatccttgcatcaaaccgtggtactgttatggagctgggtatcactccaattgtgacatctggcatggtaatgcaacttctagtgggatcaaagatcattgaagttgacaacagtgtgagagaggatcgtgctctgctgaatggcgcacagaagttacttgg

SEQ ID NO: 416055 - DNA, 510 bp, Oryza sativa
acccaccccaccggttcaaacaggctcaacaggtcagcctattcattgttgatgagcttcatctgattggatctgaaaagggacatgttctggaagtcatcgtctctaggatgaggcgtattgcaagtcatatcggcagtaacatccggattgtggctctttcagcttcacttgcaaatgctaaagatctcggagaatggattggtgctacctctcatggccttttcaactttcctccagctgtccggccggtgccattagaaatacacattcagggtgtggatatagcaaattttgaggcaaggatgcaggcaatgacgaagccgacatacactgctattacccaacatgcaaagaatggtaaacctgcctggtgtttgtgcctacacggaagcatgcaaggttgactgcattggacttgtgtgcatactcgagtgctgagggtggtggaacacctttccttcttggttcagaagatgagatggatgctatcactggtggtatcagtga

SEQ ID NO: 416056 - DNA, 488 bp, Oryza sativa
tttcggttaatttcatggacacaacgacgaccagtggcgcctctccctctcctcaccacgacgtctctgctgctcttcttcttcctcgcgtcgacgttcgccgccgacttcgtcgtcgcgggcggcggcggcggcggcggctacgacgacggcggcgacagcgaaggcggcggcggcggcggagccaagatgccgcacgtgaaccacggcaggtacaagtgcgggccgtgggtggacgggcacgcgacgttctacggcgggcgcgacgcgtcgggcacgacggagggcggcgcgtgcgggtacaaggacgccgacgggtacggcgcgatgacggcggcggtgagccccgccctgttcgacaacggcgccgggtgcggcgcgtgctacgagctcaagggggattccgggaagaccgtcgtggtgacggccaccaaccaggcgccgccgccagtgaacgggatgaagggcgagcacttcgacctcaccat

SEQ ID NO: 416057 - DNA, 470 bp, Oryza sativa
gttagaaagagaaagagagagcaacgccccaagcaccaccccctctgcccaggccccagatccctccaccccatcgcacgccacaacataacataacaccgcaaacacgcaccctaccaacagacgcctactatggtgcgtttctgccacctacactccgctgcgcagccagcttcgctcgcccgctacctcactcactctcgggtgagcgcggccaccgctgccggcgacgaggtagggaggaggaggagggcaagatgttcgggcgggacccgtggggcgggccgctggagatctcgaatgcggactcggcgacggacgacgaccggagccgggacctggacaggggggcgctgatgcggcagctggacgagacgcagcatagctggctcctggccgggccgggcgaccaggcctgcaagaagaagaagaagtacgtcgacctcggctgcatggtcctcgaccgcaag

SEQ ID NO: 416058 - DNA, 450 bp, Oryza sativa
tttgagggcgtcaacatctccatggttgttcatgaacccagctacactctgtacaggatgttcgacgacctgatacttctagccaagggagggatgacggtgtaccatgggcctgtgaagaaggtggaggagtacttcacggggctgggcatcaccgtgccggagcgagtgaatccgccggactactacatcgacatcctggagggcatcgtcaagcccaccatgagcgccggcgtcagcgtcaaggacctgccgctcaggtggatgctgcacaatggctacgacgtcccccgggacatgctgcagagctcctccgactctgagtcctccttccgagggagcacgagcccggcctccggcgatgcctccgtcgcggccgaggtatggggcaacgtcaaggacatcgtcggccagaagaggacgagtatgactactacagagcactgaaga

SEQ ID NO: 416059 - DNA, 497 bp, Oryza sativa
tcgtttgactgaagagcaggtgaaagctttaggaattccctaccgtgttggcaaatttccgctgttggcaaacagccgtgcaaaggccattgacgatgctgagggcttggtgaaggtggtggctgagaaggaaactgacaagattctgggcgtgcatatcatggctcccggtgctggagagataatacatgaggctgtccttgctttgcagtatggagcatcaagtgaggacatagctcgtacatgccacgctcatcccaccgtgagcgaagccttgaaggaggcctgcctgcaaaccttcacaaaggcgattcacatttaagttctgttttgcttttaacatccaaactgcttggcttcacaaattccaaaattttgtaataattttggatatatgggatcaaaaagccactgtctatcattttactctcgttcgtgatgctgtgaattgacactagttgccacagccaatagtatatgctattgattccattccc

SEQ ID NO: 416060 - DNA, 498 bp, Oryza sativa
tgttcgttatcacggaggacatcctaacggggttcaagattcactgccgcggctggaggtcggtgtactgcatgccgaaaagggcatctttctagggggcaacgccagtcaacctatctgaccgactcaaccaggtgctccggagggcgctcggctccgtcgagatcttcttcagccggcacagcccgctcctctacggctacaagaacggcaacctcaagtggctcgagcgcttctcctacatcaacaccaccatctaccccttcacttctctccccctcctcgcctactgcaccctacccgccgtctgcctcctcaccggcaagttcatcatgcctccgattagcacgtttgcgagtttgttcttcatcgcgctcttcatctccatcttcgcgacgggcatcctggagatgaggtggagcggggtgagcatcgaggagtggtggaggaacgagcagttctgggtcatcggcggcgtgtctgcgcacctgttcgcgg

SEQ ID NO: 416061 - DNA, 410 bp, Oryza sativa
attagatcaaaagttttggagcaaaggctggagttgttttgaatcctgcaacccctctcactgcgatagattatgtacttgatgttgttgatctagaattgattatgtcggagaatcctgggtttggtgggcagagctttattgaaagctcagtgaagaagatttgtacagttgagaagattattgtgcagagaagggtgtaaacccttggattgaggttgatggtggaggttggttcccaaaaaacgcctacaaggtcattgaaatcttggggtcaactgccaattgttgcttggtacaagccgtttttcgggtgctccagaactaatgcagaaatcctattcaaagggtaatcaaggacctgcctaaaaattttgtggctgtaccagcatagaggatcctaaagtagt

SEQ ID NO: 416062 - DNA, 335 bp, Oryza sativa
tgaaaatgcacacaccgtaaaaaagaagctgcagattgcgcttaatattcccactgaagagagttcactgacatgtggtgatcaacttttgaacaatgatctcagctacattagcaatgacttctctattggcttctaaactaggaatcacatgcactagaaagttgtcttcacaaccttgcctcttctacaaaatggaaaaggaatgttcaaccactggtgattgaatagtagatagttatttgaaaattcgtggggtgtgccacaaagccccctttcttggcatggaaattgaaagtcaaatttcgtttgaatggataattaggtttcggggg

SEQ ID NO: 416063 - DNA, 320 bp, Oryza sativa
tcgctaggagggcgtcgctatcgagatagccgaagctgtctgcggtgcactgagaggtgagctcgcagcaacagccgtgaatgctcccatggtcccagctgaggtcatgtcagagcttgccccgtatgtttcactggcagagaagctgggcaagctggcggtgcagctcgttgcaggcgagagcggcggcatcaagggcgtcaaggtggtgtacaccacggcccgtggcctggacgaccttgacacgaggctccttcgtgccatggtgaccaagggcattgtggagcccgtgtcgagcacgtttgtcaacctggtgaact

SEQ ID NO: 416064 - DNA, 424 bp, Oryza sativa
tatttttaactatcgatccatcagtagctagctagctagctagctgcatcgtccggcgagagagatagctgctgcagggggcggccatggggaggggcaagatcgagatcaagcggatcgagaacgcgaccaacaggcaggtgacctactcgaagcgcctgacggcgatcatgaagaaggccagggagctcaccgtgctctgcgacgcccaggtcgccatcatcatgttctcctccaccggcaagtaccatgagttctgcagcccttccaccgacatcaagggggatctttgaccgcttccagcaagcctatcggcaccagcctttggatcgagcagtatgagaatattgcagcgcacgctgagccatttaaggacattaaccgcaacctgcgcacctgagaacaggcaaaggatgggagaaga

SEQ ID NO: 416065 - DNA, 370 bp, Oryza sativa
tcggttactttcatctcatactcctaattgtcatcactagcttctagctagcttaattaattaattagccatggcggaggagaagcaccaccaccacctgtaccaccacaagaaggacgacgagccggccaccggagtagactcctacggcgagggcgtctacacgtcggatacggtgaccaccgaggtggtcgccggcggtcaggacgagtacgagaggtacaagaaggaggagaagcagcacaagcacaagcagcacctcggcgaggccggcgccctcgccgccggcgcctttgccctgtatgagaagcacgaggcgaattaagacccggagaacgtgcacaggcacaagatcacggaggaaatcgtg

SEQ ID NO: 416066 - DNA, 403 bp, Oryza sativa
tcggttccgccagcgtccctggggcaaatgggcagctgaaatccgagaccccagcaagggtgtccgtgtttggcttggaacatataacactgctgatgaggcagctagggcatatgacgctgaagcccgcaagatccgtggcaagaaagccaaggtcaactttcctgatgaaccagctgttgctcagaagctttccctgaagcaaaacgctgccaagcaagagaaactagctccacctttgaagacctgtggcgaagatgctttctttcagctaaacagttcatacaatgattttgtttgccattgcttgcaaaggtgcctgctaagccggcatagcctgttgatcttatgccttcagacaaatctcttgctttcactggaaccattcggatgaacaatgctt

SEQ ID NO: 416067 - DNA, 314 bp, Oryza sativa
acggttagcggaccccctctttttttttttttttatgacaaatatagtgcacattactaaaccgaacatttcaatttgacaatttaattgaggattaagcataagtagcagcgccctcgtctttctcatcaaggaaaggatagtccgtgtagccaacaacaggatcctgtatgtaaaaggtggacctattatacttgttcaatggtgcgttgatcgcgaacctattgggcaaggccggattggttaagaagtgccttccgtaggcgacgaggtcagcatatccatcgggtatcaccttgtgatcttcctcccga

SEQ ID NO: 416068 - DNA, 471 bp, Oryza sativa
gtggcatcgcatctggaggtggaggccaatccgctcgctcgctcgctcgccggcgacccgaatccggccaggagggggggcggctggccggagctagggtgggtgggtggttggccgcaccaccttcctccgcgccgccggagcgtgggcagcggcggcggccggtgggaggaggggaagcatggcgggctccatggtggaccgggcgaccagcgacatgctcatcgggcccgactgggccaagaacatggagatctgcgacatcttgcaccgcgaccccgggcaatcaaaagatgttgtttaggctctcaagaaaaggattgggcacaaaaatccaaaagtccaaattcttgcgctgacttttttggaaactgcaattaagaactgtggggatatattccacatgcctgttgcataaagagatgtgttgcatgagatggtgaagaatgtgaaaaaaaagtttgttctgaa

SEQ ID NO: 416069 - DNA, 372 bp, Oryza sativa
tcgtttatcgccatctctttcagctctcacagctcactgcttcaatggccgcggccaccatggcgctcttcttcccggtgatggcccgcgcggcgcctgtgaccttctccgcgctcttcggcgaggcgcggatcaccatgcgcaagaccgccgcgaagcccaagccggcggcgtcgtcggggagcccgtggtacggcgccgaccgcgtcctctacctcggcccgctctccggcgagccgccgagctacctcaccggcgagatcccgggcgactacgggtgggacaccgcggggctctccgccgacccggagactttcgccaagaaccgggagctggaggtgatccacttcccggtagggtcgattgcttggg

SEQ ID NO: 416070 - DNA, 275 bp, Oryza sativa
tcgtattcaatggcgccgccgccggaggcgtggactagtcgctgacggcggcgacgccggcggtgaggacgttcaacttcctgagcgcgctgggggacgtggcgttcgtgtacgcggggtacaacgtggtgctggagatccaggcaacgatcccgtcgacgccggagcggcctgtcaaggggcctatgtggcgcggtgtcgtgctggcctacggcgtggaggccttctgctactttcccgtggcaggtcgcgtgggacttctgtgttctggtaac

SEQ ID NO: 416071 - DNA, 404 bp, Oryza sativa
tcacacatctcctctaaagcagctcacagctcaagagaaggagagggcaacaatggcgacggcgaggttgctcctcctcctcacggtggtggcagcggcggcgggctcctgcttctgcagcggccaggaggcgaagccaccgacgccgccgccgccgccgtactgcggcagcgtgaggacggcggtggaggcgcacaacatcatcgggtggaagacgtttccggcggattgcgccaaatacgtcgccgactacatcaccggcgaccgctacggccgcgactccgacgtggtgatcaacgaggccgtcgcctacgccgagagcctcaagctctccggcagtggcaaggaggtctgggtgttccgacgttgacgagaccggacttttcaccgtgccctaccaggct

SEQ ID NO: 416072 - DNA, 475 bp, Oryza sativa
atataatttagcaaaaccctcggccctcacccgccgccgccgtcgtcgacgccttcaccggtaaacggaagcatgagtcggcaccctgaagtgaagtgggctcagaggattgacaaggtttacataactgtacaattagctgatgctaaggatgctaaggtcaatctggaaccagaaggagtattctctttctctgctacagctggaactgatgggaacttatacgaatcaaagctagagttgaacgacaaagtaaatgttgaggagagcaaaataagtgtaggtgttaggtccatattctggattgtagaaaaagctgaggcctaatggtggaagaagcttgttcgagatgatcaaaaggcaccacactttgtgaaagttgacttgggacaaatgggttgatgaagaagattatggtgctggtgtcaacgtggatggaatggacttttcgaattttggtggcatgggtggaatg

SEQ ID NO: 416073 - DNA, 370 bp, Oryza sativa
tcggtaaatcaaaataagtcctggaatcatgctcgtaatttatcagaagtcagctaatcatgttccattacagatactctcaattgaggatggaaccccactgaaaaccttcacccagttgcttcattggagcagaaaggttgacttcatcgagcagtttaatgaaaaacttcttgtgaaacaagacaaggaaaacctacagattattgatgttagaaactccaacttgattgaggtcaacaaaaccgaattcatgactccttcggcattcatcttcctctacgaaaataagtctattcctggacattctgcaataaggacagttgcagcatggaatttccggggagagctaggtacttcatttgatgaa

SEQ ID NO: 416074 - DNA, 402 bp, Oryza sativa
tcgctcggatgagaaagactataatagagttgccacgggctccaacaaatctattacctgataagaagtacaacagcctggtgtctctcagtggccacctctttgataagttccttattaatgaagctctggatattattgaaacagccggaggttcttttcacttgattagatgcgatgttgggcaaagcattgatgatatgtcatactcagagcttgaagtaggagcagatgatacagctacattggataagattattgattccttgacttctctagctaatgcacatggagaacctaatgccagaagagaaattgaattatctctaaagatgggaaaagtcaatgaagtgtggaactgataacagcttggttaaagaagggtcaaagggttaaattttt

SEQ ID NO: 416075 - DNA, 225 bp, Oryza sativa
taccggtccttactggctggaccgacgcgtgcgttcactctcacacaacacaaccctccccaaaacctgccgaagagagcaagatgttcggcttcgggcaccacggccaccatggccaagaccagccgccccagcaccacggcggcggcggcggcggcgcgcaccagcccaccttcaagatcttctgccgcgccgacgaggggtactgcgttgccgtgcgcgagg

SEQ ID NO: 416076 - DNA, 397 bp, Oryza sativa
ttggcttgcactgaaaggagtgcccaaactgaaggtgcttcctacgcacagagagcaatagccaatatgcagggaggatgtgaacaaatggcggatgttgcagacttgctgcttggagttaaccttattaatcaagctagatgtgccacatctgattcagagagagcttcttggcagtgtgaagctctggaggtgcttgaaaatgctgaaaataagatgcatgggaaagatcctcgtgcaatgtacagtctcagccttgaaaatgctgtccagagaaaattagatgctgctgtcttttatgccaagaaattgttgaatattagaggctggattggaattgttgagttgtctttttatatattttatactttttgttttttaattattttttctttat

SEQ ID NO: 416077 - DNA, 208 bp, Oryza sativa
gtattcggcaagtttgtcctttcagtcgcatggagtcctgatggcaagctcttagcttgtggttccatggatggcaccatcgctgtgtatgacgcagttcgcatgaagttcctccaccacctagagggccatcacatgccagtgagatcaatggtgttctcttcagtggacccgcacgtgctcttcactgtctccgaccattgccaca

SEQ ID NO: 416078 - DNA, 229 bp, Oryza sativa
tttttaccgtcggcataacaagccatctccgggtgtcttgatttgtgatctagctacccttacgatcattgtgatataggcatgggcaggatatcgtcgccgatgctcgaacatacggaccgggtggtgactcactctggctgcagagcgaccgtgcgaagtgcctactcacacgcaattttattcgatcgatcggggcctgtacggtggcgcacacgtctactttgtc

SEQ ID NO: 416079 - DNA, 510 bp, Oryza sativa
gtgaacaggagaggatccgtcgacaattggttgaaaaagaaaagatagaggcagaagaactgcttcagaaacagataaaggagatagcaaagagaggaggaaaaaaacctgtccttcagggggaagttactaaggaggctgtgatggaattggctatgaatgagcagtttaaggagcgccaagagatggagaaaaaactacagaagactggtaagcaaatggattacttggagagggcaaaaaggcaggaagaggcacctctaattgagcaagcttttcaaaaacgccttgaagtagagaaaatccttcatgagcaagagcagctgagagagattgagctcagcaagcaacaccatgcaggtgacctgcaggagaagaacagactttctcgaatgttggagcataagaacatttttcaggaaagaattgtccaacgtcgtgaagctgagtttagtcgtttaagaaagagagggttgaaaggactagtcatttgatatcattcaaggagcg

SEQ ID NO: 416080 - DNA, 55 bp, Oryza sativa
tctgagcaaagaaggagagagcttggtgagctgcagagatggccccctccgtgat

SEQ ID NO: 416081 - DNA, 100 bp, Oryza sativa
tcgatcgctcggcgcggcttagggtttttggcggcagctattgcgtcggagaagcactttaagtacttcatcctcggtgtctgttttcatactagtattt

SEQ ID NO: 416082 - DNA, 510 bp, Oryza sativa
atctgtaggtcgtatcgtagggagggcctgcgccgatccccatccgtcccgcgactcgaactcgagcgagcagaggcggcgccggcgctcgtcctgccgcctgagccgatcccatccatcccgcgagcgagcgagcgcttccgccgcatcctggtcctggatcaggtagaaggagatggcgactcttggtcttgccccaaacatgaatccaaacaagtcatttgaggtactgcctaatccaggtgactccgtatcgagcctcagttttagcccaaagagcaaccttctggtggcaacttcctgggataaccaggtgcggtgctgggagattgttggtgggagtagtcaaccaaaggcatctatatcgcatgaccagccagtcctctgttcagcttggaaggatgatggaactactgtgttctctggaggctgtgaataacaagtaaaaatgtggcctctgttgtctggtgggcaggctcagactgttgcaatgcatgacgcacctgtcaa

SEQ ID NO: 416083 - DNA, 511 bp, Oryza sativa
ttttgaattcagagatccaataaccaaaagcgagaacaccatgagagccccatccttcttcttcctctccctcctcctcctcctcctcctcatccacatctccatccattgcaatgctgcagattcccagctaggttcagagaaggtcaccaacctcctcttctacctgcacgacaccctcagtgggaaggatccaactgctgtcccagttgctcgtgctgagaacgctgtacccaagcctgataatccggtacccttcagcacgatctatgtggtcgatgatctgctgacagaggggcctcagagagaatccaaggtggttgggaatgcgcaggggatgtacatttcgacagccaagaaagggctcacgcttgttcttgggatcgatttcgagctcactgatggcccctacaaaggcagctcgttcgtcgtgtactcgcggaacccggtcatgcaagggaatggcagggagctcgccattgttggtggccgtggtttgttcaggatggct

SEQ ID NO: 416084 - DNA, 513 bp, Oryza sativa
gtttcaacgctggcaattgttcccgggaactggtgaagagagacctgtactggcaaatcaattttctgcgttcatttcccgcaaagatggtagaaactattcctcagtgctgcatcctgggaaaccagatttgccaaaaggaagtaacatttcaggaattggatcctgggactggaatatgagtggacaaaactctacgtaccacgctctttaccctaggtcctggacgatatacaatggagaacctgacccagatgtcaacatagtgtgtcgtcagatttctccaattattccacataattatcaacagagcagctatccagtttctgtattcactttcacagtaatactactttccatgagataccttcaatacactattttagtaactaactcaggcaatacggctgctgatgtaactttgctttttacatgggctaactctgttggtgggaaatctgaactaactggatatcactccaatttccctatgatagaaaaggatggtgtgca

SEQ ID NO: 416085 - DNA, 520 bp, Oryza sativa
atcgtcgtcctcctcctcctttcctctcttcggggaacccttcctcctcctctggctcgctcgccggaggcgatgacggcggaggcggacgacccgacggcggcggagacgctggagaagttccgcctctacgagacgcgcgcgaggttctacctgatcgggacgtcgcgggagaagcggtggttccaggtgctcaagatcgaccgctccgagcgctccgagctcaacatcagcgaggaccccgtctggtactcccagcaggaggtcaagaacctcctccagcgcatctccgagggcaaccgctccactggcggcctcaccttcgtcaccaaggcctatggcatcgctggttgcatcaagttcttggagtcatattatctgattttggtcaccaagcgctgccaaattggttgcatttgtgggcatcctatttactgtatagatgagagccagatgataaccattccacactcatctgtgcagacagatgttgcaacctctaagaatgagctaaggtaca

SEQ ID NO: 416086 - DNA, 520 bp, Oryza sativa
gtgagcgaagccagcagcagaagcagtagagagaaagtagagagatggaggggaaggaggaggatgtccggctgggagccaacaagttctcggagaggcagccgatcggcacggcggcgcagggctccgacgacaaggactacaaggagccgccgccggcgccgctgttcgagccaggggagctcaagtcgtggtccttctaccgcgcagggatcgccgagttcatggccaccttcctcttcctttacatcaccgtcctcaccgtcatgggggtcaacaactccacctccaagtgcgccaccgtcggcatccagggcatcgcctggtccttcggcggcatgatcttcgccctcgtctactgcaccgccggcatctccggcggccacatcaacccggccgtcaccttcggcctcttcctcgccaggaagctgtccctcaccagggccctctttacatggtgatgcagtgcctcggcgccatctgtggcgccggcgtcgttaagggcttccaaaaggcctgt

SEQ ID NO: 416087 - DNA, 509 bp, Oryza sativa
tgtggcttgagcggtggtgacaccgctcgcctccgtccgcctcgcctccaccgagaggttctctctgccgccgattcagatttacagggagattatcttgtgatctgtaaacatgtttgggcgtgtaccgaggagtaacaacaccaagtactatgaggttcttggagttcctaaaactgcaagcaaggatgagctaaagaaggcataccggaaggctgccataaaaaaccatcctgacaagggaggggatccagaaaagtttaaagaattatcacaagcgtatgaggttctcactgatcctgagaagagagacatatatgaccaatatggggaggatgctcttaaggatggaatgggaggaggcagtgacttccataatccatttgacatatttgagcagtttttcgggggtggtgcctttggggggagtagctcaagagtacgcagacagagacgtggtgaagatgtggcgcatactttgaaggtgtctttagaagatgtgtataatg

SEQ ID NO: 416088 - DNA, 511 bp, Oryza sativa
tctttaattatcatatgcagactattatgaaagggcactgataaatggtgttttaagcatccaaagagggactgatcccggggtgatgatttacatgctacctcaggcccctggacggtctaaagcggtttcctatcatggttggggaacaaagtatgactccttctggtgttgttatgggacagggatagaatccttttcgaaacttggcgattccatttacttcgaggagaaaggagatagaccggtgctaaacatcattcagtacataccaagtgcttataactggaaagcagctgggcttactgttaatcaacaactaaagccaatcagctctttggacatgtttcttcaagtttcactctccacttctgcaaagacaaatggtcagtctgccacattgaatgtgagaataccatcatggacatctgccaatggcgcaaaagcaactctaaatgacaacgatttaggattaatgtctccagggtctttcctttaatctccaaacagt

SEQ ID NO: 416089 - DNA, 510 bp, Oryza sativa
tcctaaccgcttctcccgccgcgccggcgccatggacggcatcgacgcggagcttgcgcgggcgcaggaggagcgcaagaagatggaggaggccctggccgccggcgcgcccatggccgtctcctccgtcaccttcgacactgatctctacggcggcggcggctccgaccccaaccgcttcgccggctacgacacctccatccccgcctccgaggacgacgcgcccgaggacgaatccgaggcggccgtcaaccccgccgcccgccgcctcgcctcctacaccggccacgccgtcgccgcccccgacatcccccgcgccgccgaggacgacggcctccccaagaagtcgcagcgcatcatcgaccgcgaggatgactatcgccggcggcggctggcccgcatcatctcgccggagcgccatgatcccttcgccgctggtgaggccaccccggacccttccgtgcggacatatgctgatgccatgcgcgagaatgacctgcagaagcagaa

SEQ ID NO: 416090 - DNA, 511 bp, Oryza sativa
attgtcctcggggcttctggagaccgggccaagaagaaaactttcccggcactcttccatctttttgcacagggatttatacaatcaggtgaagtgcatatatttgggtatgcgagatcaaacctttctgatgatgggttaagggaacgcattcgtggatacctcaaaggagcctcagaagaacatctctcagactttttgcaacatataaaatatgtcagtggttcctatgacagcggagaaggatttgagaaattgaacaaggaaatttcagagtatgagaagtcaaacaaatcagaaagccctcgcaggctcttctatttggcattgcctccatctgtctacccttcagtctgcaaaatgatcagaacatattgcatgaatccatctggatggactagagtcattgttgagaagccatttggaaaggacttggactctgcagaagattaagtgcccaacttggggagctatttgacgaaaccaactctacagaatgatcactacttgg

SEQ ID NO: 416091 - DNA, 510 bp, Oryza sativa
ttcgtcttcgccaagatggggatcaaccccatcatgatgagcgccggagagctggagagcggcaacgccggagagccggcgaagctgatcaggcagcggtaccgtgaggcggcagacatcatcaagaaggggaagatgtgctgcctcttcatcaacgatctggacgcgggtgcaggtcgcatgggaggcaccacccagtacacggtgaacaaccagatggtgaacgccaccctgatgaacatcgccgacaacccaaccaacgtgcagctccccgggatgtacaacaaggaggacaacccccgtgtccccatcatcgtcaccggcaacgacttctccacgctgtacgcgccgctcatccgtgacgggcgtatggagaagttctactgggctcccacccgcgacgaccgtgtcggcgtctgcaagggtatcttccgaccgacaacgtccccgacgaggacatcgtcaagatcgtcgacagcttcccaggccaatccatcgatttcttcggcg

SEQ ID NO: 416092 - DNA, 520 bp, Oryza sativa
gtggcggggggaggctgctcgtcggggtgctgctcctgacgctggtggtgtccgggcactgcctggagagcacgcaccaccgcgggctgaagcggcggcggcggaagcacgagatccactcgccgatcaagacggtggtggtggtggtgatggagaatcggagcttcgaccacatcctcgggtggctcagccgcacccgccccgacatcgacgggctcaacggcacgcaatccaaccgcctcaacgcctccgacccttcctccccggagatcttcgtcaccgacgaggccggctacgtcgactccgaccccggccacggcttcgaggacatccgcgagcagatcttcggctccgccgacacctccgccgtgccggcccccatgtccggcttcgcccagaacgcccgcgggatgggcctcggcatgccgcagaacgtcatgagcgggttcaagccggagtccgtgccggtctacgccgccctcgccgacgagttcgccgtgttcgaccggtggttcgcctc

SEQ ID NO: 416093 - DNA, 519 bp, Oryza sativa
tgtgttgttcatgtcaaagaggttccttttgctcgatcgtccctgaatcatgatgacatatttattctggacacgaagtccaaaattttccagttcaatggctccaattcgtctattcaagagcgtgcaaaggctcttgaagtcgtgcagtacatcaaagatacatttcacgagggcaagtgtgaagttgcagctgttgaggatggcaggttgatggccgatgctgaagctggtgaattttggggtttttttggtggctttgcccctctaccaaggagagcccctgtagaagataatgagaaatatgaagaaactgttttcaaattgctctgttttaaccaaggaaagttggagcctatcaattatgaatccttattgcacgagttgctcaagacaaataagtgttacttgttagattgtggtgtcgaattatttgtttggatgggcagaaccacatctttgcaggagaggaagagtgccagtgaagctgctgagaaattgctctctgatgataaccga

SEQ ID NO: 416094 - DNA, 496 bp, Oryza sativa
tttggaggccgccgcaaccaaaaaaaaaaaagtctaaccctagatccaggccccgcgtctccggcgatctcccggccatggcgactcgccgggccctctcctccctcgtccgcgccgcctccaggctccgcggggcctcgcccgccccgcgcccgcgcgggccgctccaccgaccgtcgccatcggggtacctcttcaaccgcgccgccgcgtacgccacggccgccgcggcgaaggaggcggcgcctcccgcgcccgcgacggggaaggccacgggtggaggtaagatcaccgacgagttcaccggcgccggcgccggcgggcaggtgtgccaggtcatcggcgccgtcgtcgacgtgcggtttgacgaggggctgcctcccatcctcacggcgctcgaggtgctcgaccacaacattcgtctcgtgctcgaggtggcgcagcaccttggcgagaacatggtgcgcaccatcgctatggacgggactgaggggct

SEQ ID NO: 416095 - DNA, 492 bp, Oryza sativa
  unsure (1)..(492): unsure at all n locations
ttacaacaacaaaaaccacttctcgtgggtagaagagagagagagcgaggcgatttcgaccaagaagatggccgggatcgtggtggtgttcgacttcgacaagacgatcatcgacgtcgacagcgacaactgggtcgtggacgggctcggcgcgacggaggagttcgagcggctgctgcccaccatgccgtggaacaccctcatggacaccatgatgggcgagctccacgcgagcggcaagtcgctcgccgacgtcgcgggcgtgctcaggtcggcgccgctcgacccgcgcgtcgtcgccgccatcaaggcctgctacggcctgggctgcgacctccggatcctcagcgacgccaaccgcttcttcatcgacaccatcctcgaccaccacggcctcacgggttacttctccgagatcaacaccaacccgagcgccgtcgacgccgncaccggccgnctccgcatcgcgccgtaccacgacttccacgcttg

SEQ ID NO: 416096 - DNA, 417 bp, Oryza sativa
cgtcgcgcatccgacggccactcaccatcggcgtcgggggaggcgaaaacagcggctgcaattccgcttccaggtggagggggaggaggcccggtttgtgtgccacgccgccccactccgtccgtggtttgctacccaagaagacaagaagaaggaagtggcgaaacctcaccctccatcctccatcctctcctttcttccttcgaggaggaggagctatatatagacggggatggttcatctagcctcctcaccggttttgatttgatctgtgtgatttgagtgagtgagtgagattctttggaggagggattttggtttggtttggtttggtgggtttgtgcgggattttgtggggaggagagtaatggctaccgcagggaaggtgatcaagtgcaaagcggctgtggcatggga

SEQ ID NO: 416097 - DNA, 497 bp, Oryza sativa
tttttacaggagaagaaaaccttggcccttgaagggttgtgttcttctctgaaacctttttagagaggtgagtgcttgttcatcagaagcagagagacaagatgtataacgctccaatggcacaggacatgtcctactatgaacatgtgcagaggcgccatgaggagaagggttgcctctatgcatgcatcttcactgcactgtgctgcttctgctgctacgagacctgcgagtgctgcctcgactgcctctgctgctgctgcaactaggctgccatatcaagccatagcaagaacatgatcaagatgaggatggagatcgcctccatctctcttacccctgagatttcataatttatcagcccgttgtcatcatgtaaaattaataaacatgtagtagatggaaactttgtcagaatcgagcatttgtgttctgaaaaagaggactattgtaagaaacccagaatactgttatctgaagtgctttctatgcgtgtg

SEQ ID NO: 416098 - DNA, 491 bp, Oryza sativa
  unsure (1)..(491): unsure at all n locations
gtatttgatcaggttacagttgctggcctgggagttaattaatctcttgctggttgattagttgctatcagctacacgctctcgctagctgccactgtactaatacatactcccatctattcgcctgagaaaatatcgaaaagtagcagcaaagaggagcaggcaagatggtgatgaaccctgacgccgtccgcaatgtcgttggaatcatcggtaacttgatatcgttcgggttgttcttgtcgccattgccgacgttcgtgacgatcgtgaagaagaaggacgtggaggagttcgtgccggatccgtacctgncgacgttcctcaactgcgcgctgtgggtgttctacggcctacccttcatccaccccaacagcatcctcgtcgtcaccatcaatggcaccggtctcctcatcgagatcgcctacctcgccatctacttcgcctacgcccccaagcccaagcggtgcaggatgctcggcgtcctcacc

SEQ ID NO: 416099 - DNA, 471 bp, Oryza sativa
ttttgcttccggtctccggtctcctcctccaaactccggtcggtctccggcgcggcgtagccgagcccccaccatacgacgcggggaggcagacgacggggcgccgctgctgctgcccggggagccaccgccggtcgccgccgcagcagcagcagcagcgtgttcagaggagaagggggcagcaggtaccttggggctctgccgcatgccgctgtgggggacaggctcgtccgcgccgtccgcggcggcggagggcagcgcggccggaggggatggggcggcccgctcgtcgtccggcggcgccgcggtgatccggtcgctgctccccacccgccgccgcctccgcctcgacccgccatccaagctcttcttcccttatgagcctgggaagcaagtccggagtgctgtcaagatcaagaacatcagcaagtctcatgtagcattaaagttccaaacaacagcaccgaagag

SEQ ID NO: 416100 - DNA, 484 bp, Oryza sativa
gcgttttaaccttggcccttgaatagttgtgttcttctgtgaaacctttttagagaggtgagtgcttgttcatcagaagcagagagacaagatgtataacgctccaatggcacaggacatgtcctactatgaacatgtgcagaggcgccatgaggagaagggttgcctctatgcatgcatcttcactgaactgtgctgcttctgctgctacgagacctgcgagtgctgcctcgactgcctatgctgctgctgcaactaggctgccatatcaagccatagcaggaacatgatcaagatgaggatggagatcgcctccatctctcttacccctgagatttcataatttatcagcccgttgtcatcatgtaaaattaataaacatgtagtagatggaaactttgtcagaatcgagcatttgtgttctgaaaaagaggactattgtaagaaacccataatactgttatctgaagtgctttctatgcgt

SEQ ID NO: 416101 - DNA, 514 bp, Oryza sativa
tttcagcatgcattttatttaggcacggtccacagttcatacatgtatagtggatacgtctcgtcggcagacactcacggtatagtagggtagtcgtgtgtacagtgatatagtcatatctgcgcgtcttttcatgccgttcgttgacttcgttcacagggtcagggtcgggtaggcgatatcgagtgtgacgccacacaggccggggccaccgacgtcgcggagaatccggatgtggccgcgctcgccccatgactggccccatgagttcttgatggtccagtacttggcgccggaagacgcgtcggtgccgtacccgacgacggtgacggcgtgcgctaggcgcgtgccgcacgggcccgtgtaaacgccacccttgtagaactgcatcccgctaccgacctcgatggccacagccacgggctgccgagcgacggcggcctgcaacgccgcctcgttccgcggcggcaccttcccgaagccggtgatcttggcggcatggtgcgcggacttg

SEQ ID NO: 416102 - DNA, 444 bp, Oryza sativa
tgttctccgggatcacactgatatgaatgcagagggaaagaatagtgtacggagcgtgcatgtgaatccagacgtaaatggaattagagcattctacggcaatgatctgtgtgtcgcagatgtatgtctatctcttccagctgtgacttcgctaaccgatcatttccacgcgactgagtcgatctcgttccgggcagatttgtacagctctagcctcttgactaaggaatccctcttctccatcaaagcgggatcctcatccaacatcgcgctgagctgtttcttctccttgcttcccacatgagcatagaaacggttaagcaagtttctatttgccttcttcacttgactgtgcacattggtttttgaactggcgatacgcattgtctcgtattccatgattttgtacgatgtatacgtttggcccttatatgaaacctctga

SEQ ID NO: 416103 - DNA, 507 bp, Oryza sativa
ttgttccttcagcctcagcttcctcctctccggcaccgtggaggccctcccgatcctcctccacgagcggcgcgtcctgatgcgcgaggcgtcccgccgcgcctaccgcctttcctcctacgtggtggccaacgccctcgtcttcgcgccgtgcctcctcgccgtgtccctcctcttctcggcgcccgtctacttcctcgcggggctccgcgccacgacccaggccttcgcctgcttcgcgctcgccgtgtggctcatcgtgctcatggcgagctccctggtgctcttcctcagcgccgtctcccccgacttcgtgctggggaactcgctgatctgcatgtcgctgggcgtgttcttcctcttctccggctacttcatcccgagggagagcattccgaggtactgggcgttcatgtactacgtgtccatgtccaggtacccgctggacctgctgctgatcaacgagtacggcggcagcagctgcggcaggtgcctggcgtgggcggt

SEQ ID NO: 416104 - DNA, 481 bp, Oryza sativa
  unsure (1)..(481): unsure at all n locations
tttctccttgtgggatatggttttggtgcgtcttttgtcgccctttttgctcagttgggtggtggaatatacaccaaagctgctgatgtcggagctgatcttgtgggaaaggttgagcagggaataccagaagatgatcctcgtaatcctgctgtcattgctgacttggttggtgacaatgttggagattgtgccgcacgaggggctgacctttttgagagcatagcagctgaaattatcagtgcaatgatactcgggggaacaatggcacaacgctgcaaaattgaagatccctcaggctttatactgtttcctcttgttgttcattcatttgatctggtgatctcatcagttggaatactctcaattcggggaacacgtgactctgggttaatatcccctattgaagatccgatggcaatcatgcagaaaggatattctatcactatactngctcgctgttgtacctttggagtgtcta

SEQ ID NO: 416105 - DNA, 496 bp, Oryza sativa
tggacgcgtgggctggcaataggagttgctgggttgtgcaaggcgctgcatagcagcttggtgataccaccagtttctcagaagaagttactttcgaactcagatagactttattacactggaggcctgaaaaatcttggcaacaattgctttcttaatgttatcctgcaggcacttgctagctgtgacgggtttgtttcctctctagataatttgcttggaagtgaggatgtgctacctgaggaaaagtccgaaaaaatgcctcttatttttgctctaagttctcttataaaagacttgagcgtagttcgagacaaaaggactgaactgagtccacacagagtaatggatgctttgagcttctacgtcggccactttaatttgacaagagagcaggatgcttcggaagcctttcatcatcttttgacctcactgagggatgaattttcccgttgttatgtaccaaatagggagttctctggcagacatcaccatg

SEQ ID NO: 416106 - DNA, 525 bp, Oryza sativa
  unsure (1)..(525): unsure at all n locations
ccctttccgcctctcgtttcttctcgtcctctccacgcccccgagatctcaggagcacaggaggaggaagccatggcgtcggagaccgagacgttcgccttccaggccgagatcaaccagctgctgtccctcatcatcaacaccttctactccaacaaggagatcttcctccgcgagctcatctccaactcctccgatgcattggataagattaggttcgagagcctcacggacaagagcaagctcgatgcgcagccggagctgttcatccacattgtccccgacaaggctagcaacaccctgtcgatcatcgacagtggtgtcggcatgaccaagtcggacctcgtcaacaacctcggtaccatcgccaggtcggggaccaaggagttcatggaggcgctcgctgctggtgctgatgtgtccatgattgggcagtttggtgtcgggttctactccgnctaccttgttgctgagagggttgttgtgaccaccaagcacaacgacgacgagcagtatgtgtgggag

SEQ ID NO: 416107 - DNA, 516 bp, Oryza sativa
gtgatctatggcgcatccagagatccacctgaaaagcaggcgccgatgtgtactgtacattcatttcctcataatattgatcattgcctaacctgggctaggtctgagtttgagggtttgcttgagaagacccccactgaagtaaatgccttcctatcgaatcctggtggatatgcaactgtagcaagaactgctggtgatgcacaggctagggatcagcttgagcgcgttattgaatgtctcgagagagagaagtgtgagacattccaagattgtattacctgggcccggctcaagtttgaggattatttctccaaccgtgtgaagcaactgacatacactttccctgaagatgcgatgaccagctctggtgctcctttctggtctgctccaaagcgtttcccacgaccactggagttcttgacatctgatccaagccagcttaactttattttggctgctgcaatttaagggcagagacatttgggatacccatacctgactgggtcaaaaacc

SEQ ID NO: 416108 - DNA, 523 bp, Oryza sativa
ttgttatacaaatgatcttgggcaataatatctgatcatatacgtattccaataaggaaggaggattttcaatgcgggatataaaaacatatctctctgtagcacccgtgctaagtactctatggtttggggctttagcaggtttattgatagaaattaatcgtttatttccagatgctttgtcattcccctttttttcattctagttgttgctatgtgaggaatagagttcttcgtgacatgataaaaaattaccacttttcaatccctttttagtataggaaagaaaaagaaagaaaagatagattgggttggaccttagagtcatgaaaaatttggtaaatctcatttttgaaaaaagaaattcaattaaaagcagtatccaagctaagtcaggcctcagaaatcagagcatagaaagaggctgggttggctactaaaatgaaaggattttgcttcaaaatccttgctaatttgacaaggattgtattccttaattatttctctattttttattacttaa

SEQ ID NO: 416109 - DNA, 477 bp, Oryza sativa
tcgtcatatctctcgtggtcagccaaagcgacaggggctaattacaggctggagcgggttttaaagtgcaaagagacttgacgccggggatatcagtcctaatttatctggaatgacaacaaccagcttctactgggaattcgtcgagctaaccgcccacatactgttatgccatcttcagtcctatctagtgatagcatgcatattggtctttttgctgcggctgctcatgctgcttcaacaaatagccggtttacaattttttataacccaagagcaagcctcttcagagtttgttatcccactttctaaatatgttaaggctgtatatcatacccgaatatctgcgggcatgcgtttcaggatgctttttgagacagaagagtctagtgttcggagtatacatgggcaccgaaacaggaattagtgatcttgatgctgattgttggccaacttcacattggctttctgtaaagg

SEQ ID NO: 416110 - DNA, 525 bp, Oryza sativa
tgtaatcaagcaaacaaagaaagaaaagcatcacaaatctcacgcactgtctctcgttcgcgcaaagcacgctgcttttctccgctttgcgagcaccatagcctagcccaccatgtgcggcggcgccatcctctccgacctcatcccgccgccgcggcgggtcaccgccggcgacctctggctggagaagaccaagaagcagcagcagcagaagaagaagaacaagggcgcgaggaggctgccactgcgccaagaggaggaggatgatttcgaggccgacttcgaggagttcgaggtggattccggcgagtgggagggtggagtccgacgccgacgaggccaagccgctcgccgcgccccggagcggcttcgctaaaggtggattgaaaaacactactgttgctggtgctgatgggcctgcagcaaggtctgctaaaaggaagagaaagaaccaattcaggggtatccgccagcggccatggggcaaatgggctgcggaaatcagagatcctcgcaaggtgtccg

SEQ ID NO: 416111 - DNA, 455 bp, Oryza sativa
ttcttctaatccagggaaaaatgatacgatcggcgtcgccgtcgccggcgttggttcgatacgacgagccgagagagagtgaatgatcgaaagggggaaggagtgcttggccgagatgtcgtgcgcgcgcttggctgaccgccgaccatggaagcggcactgtatggggtgggacgttggccccgagatgcaccaagatcaaattgtgctatgtgggcaagaaggtgtatatgttatcagagatgggactctgggggttttgtgccacgaaatacttcgagtagtgtcccctaatgtgagagaagatgacaaggatggacattttgtatttgatggtggagacaggcttgcaccacgatacaggattaatgcaaaaagggggaaggtttattggccgagctgcctcttttagaattaaacatcttaacaccataggttttttgcttgctaaattt

SEQ ID NO: 416112 - DNA, 493 bp, Oryza sativa
gtgtaattttgaggagagactccgacccgcgccgccgccgccgcagccaagccatggagggatccgccggggcgccgctccgcacgcgcgtgtgcatcatcgggagcgggccgtcggcgcacacggcggcgatctacgccgcccgcgcggagctcaagcccgtgctcttcgagggctggctcgccaacgacatcgcggcggggggccagctcaccaccaccaccgacgtcgagaacttcccggggttccccgaggggatcctcggcggcgagctcatggatcggtgccgcgcccagtccctccggttcggcaccagcatcatctccgagaccgtcaccgcggtcgacttctccgcccgccccttccgcgtcgcctccgactccaccaccgtgctcgccgacgccgtcgtcgtcgccaccggcgccgtcgcccggcgactccacttcgccggctccgacgcctactggaaccgcggcatctccgcctgcgccgt

SEQ ID NO: 416113 - DNA, 513 bp, Oryza sativa
  unsure (1)..(513): unsure at all n locations
taaccccgtctccttcctccattcctccgccgctagaaccttctagaagctctcctcctcctcccatggcggcgacgatcgtgtccgtcaaggcgcgccagatcttcgacagcaggggcaaccccaccgtcgaggtcgatgtgtgctgctcagatggaacctttgcaagggctgcagttcccagtggtgcatcaactggtgtctatgaagctctcgaattgagggacggtggatctgattacttgggaaagggtgtttccaaggctgtcgacaatgtgaactcggttattgccccagctctgattggcaaggaccctacgtcacaggctgagcttgataacttcatggttcagcagcttgatggaaccaaaaatgagtggnnggtggtgcaagcagaagcttggtgctaatgcaatcctggctgtgtcactggccatttgcaaagctggagctatcatcaagaagattcctctgtaccagcacattgccaaccttgctggaaacaagcaactg

SEQ ID NO: 416114 - DNA, 494 bp, Oryza sativa
gtggtggtggcggtggcgggggcgggaggaagaaggccatattaggggacgcggccgacatgaagacggtggtggggatcccggagaggtacaggctggcggcggagctggggcgcggggagttcggggtgacgcggcggtgctctgacgcggccaccggggaggccctggcctgcaagacgatccgacggaagcggctgcgccggtgccgcggcgacgccgaggacgtgcggcgggaggtggagatcctccgccgcatctccgtcctcggcgccggcgccgactccgtggtgcgactccgcgacgcctgcgaggacttcgacggcgttcacctcgtcatggagctctgcgagggcggcgagctcttcgaccgcatcttcgcccgcggccactacaccgagcgcgtcgtcgtcaagctcgcccgcaccatcgtcggcgtcgtccagctgtgccacgagaacggggtgatgcacagagacctgaagccggagaac

SEQ ID NO: 416115 - DNA, 513 bp, Oryza sativa
gtatgaccaagtggcaaatatttcttcagatggagcagtccttccaagttcatcgcagttatggaagtatgcttgaaggggaggctgatgagctcaagagagttttccttgaaggaaatccatactttttgggattgaccatgattgtttctctgttccactctctgtttgattttctggctttcaaaaatgatattcagttctggaataagaacaagtccatggaaggtctatcagcaaaatccgtggttctgaactttgtatgccagctgattattttcctctacctgctcgacaatgagacttcatggatgatccttggtagctctggaattggtgtttgcattgaattttggaagattggaaaagcaatgcatgttgagatcgatagaagtggaaagattcccatgttgaggttccgggaccgtgaatcatatgcacagaataagacaaaggagtatgacgcaattgcaatgaagtatcttacatatgtacttctcttcttgggttctg

SEQ ID NO: 416116 - DNA, 475 bp, Oryza sativa
  unsure (1)..(475): unsure at all n locations
tcgttcttagctaagcccccactgggagtattctttgcagctgttgcacctcgcctacaaccgcgttactactccatatcatcatctccaaagatggctccttccagaattcatgtaacatgtgcgttagtttatggacctacaccaacgggaaggattcaccaaggagtttgttcgacatggatgaagaacgcaatcccatcagaatatagtgaagagtgtagctgggcaccaatttatgtgaggcagtcaaattttaagttgcctgcagatccgaccactccaattatcatgattggtcctggtacagggttagcaccatttagaggcttcttgcaggaaagattagctctaaaacaatctggagttgaactgggcaattcagttctcttctttggatgcaggaaccgtaatatggactacatatatgaagacgagttgcaaaacttcattcangagggtgcactttctgagc

SEQ ID NO: 416117 - DNA, 461 bp, Oryza sativa
tgatgccctgtgccaggccgccgaccttcgccgccttgaggagaacatcaagagctccgtcaagaactgcgtcacccaggtggccacgaaggtgctcaccatgaaccccaccggcgacctctccagcgcgcgcttcagcgagaagaacctcctgaccggcatcgaccgcgaggccgtgttcagctatgccgacgacccgtgcagcgccaactacccgctcatgcagaagctccgcgccgtgctcgtggagcacgccctcaccagcggcgacgccgagcccgaggccttcgtgttctccaagatcaccaagttcgaggaggagctccgctctgcgctgccccgggagatctaggccgaccgcgtcgacgtcgtcaacggcacccgccccgtcgcccaccggatcgtcgagagccggacattcccctttaacgctttgttcgcgaggagctcggctgcgtatt

SEQ ID NO: 416118 - DNA, 434 bp, Oryza sativa
ggaggtgctcttcaacatcaactcgctccgctccttcgacggggtcgacgagatcaaggaggcgctggaggagcgctgccctggcgtcgtctcctgcgccgacatcatcgtcatggccgtccgtgacgccgtcgccctgacaggtgggcccttctgggacgtgaggctcgggcgcgaggacagcctgactgcgagccaggaggactcggacaacatcatgccgagcccacgcgccaacgccaccaccctcatcaagctcttcgacggctacaacctcaccgacaccgacctggtcgcgctctccggctcgcactacatcggcgaggcccgctgcttgttcatcgtcttacgcctctacgaccaggccggcttcggcaggccacgaccacaacatggaccccgcctaccgagcggggctcgactagctctgcccc

SEQ ID NO: 416119 - DNA, 431 bp, Oryza sativa
ctcatttgatttgcaggccaattccagttgagtttctccacgggccacatatatggcttccggcaggatagctctgctctgccttcttggcttgctgctggtagcagcctcaccggctgccattgctgccaaagatgacaaaatcttctaccagattactttcatgtggccgggagcgtactgcgcgcagacgaaggccggatgctgcatgccgaagaccgacgtcgcgccggcgtccgacttctacgtcgccggcttcacggtctacaacgccaccaccaactcttccctgtccagctgcagcaacactccattcgacatgaaccaaattggggatgtcacgaggctgatgcagtactggaacaacatcaggtgccccagcaagagcggccagaaaggctggaagaacgcgtgggagacgtccggcgtct

SEQ ID NO: 416120 - DNA, 550 bp, Oryza sativa
gtttgttccatcacactcacacaacacaaccctgcccagaaccttccgaagagagcatgatgttcggcttcgggcaccaccgtcaccatggccaagaccagccgccccagcaccacggcggcggcggtggcggcgcgcaccagcccaccttcaagatcttctgccgcgccgacgaggggtactgcgtcgccgtgcgcgaggggaacgtagtacttgccccgaccaacccgcgcgacgagcaccagcactggtacaaggacatgcgcttcagcgccaagatcaaggacgaggagggcaacccggcgttcgcgctcgtcaacaaggccaccggcctcgccatcaagcactccctcggccagggccatccggtgaagctggcgccgttcaacccggagtacccggacgagtcggtgctgtggacggagagcggcgacgtgggcaagagcttccgctgcatgcgtatgctgaacaacatccgtctcaacttcgacgcgttccacggcgacaaggaccactgtggcgtgcacgacagcaccaccatcgtgctttg

SEQ ID NO: 416121 - DNA, 521 bp, Oryza sativa
ataccttcgagccctaatcccctcttccccttcctccgggctacggcggcggcggcgacggtgaccgccggagccgacccgatcccacccgagtccttccctgtgcgcgcaccgatccttcctctacttgccgaccgccgcttcctcccctgttggtgtgggcgcgggcggctagaggaatcgaattgaagattacggaacaactctggagacatggcagaggggtccctagttgttgccatttgccagtatggtggagaggtcacttctggccccaatggcaatttgatctacaaaggaggagaagcacacgctgttgacgtcacacgagagatgtcactagataacttcaaggatgaggtgtccaaggtgtttcatgttgaggttgcagaagtgtcactgaaatactgtctcccgaacaataacagaactcttatcacaatatcatgtgatcgagatttgaacggatggtcgattttactgctagttctgcacaagtggatgtttttctgataactaga

SEQ ID NO: 416122 - DNA, 460 bp, Oryza sativa
ttaattatcacttcaagactgcactagggacaagcaagccgtatgctctccgtgaaactgttgttgaagttccaaatgtctctcgggaggatattggtggactggagaatgtcaaacgggagctgcatgagactgcgcaatatccagtggagcatcctgagaaatttgagaagtttggcatgtctccgtccaaaggtgttctgctctatggccctcctggctggggtaagactttgttggccaaggcaattgctaacgagtgccacgctaacttcattagtgtcaagggacctgagctgcttaccatgtggtttggtgagagtgaggccaatgtgcgtgagatttttgacaaggctaggcagtcagatgcttgtgttctcttctttgatgagcttgactcaattgctacccatagaggaagcagcgttggtgatgccggaagtgctgctgatagagagct

SEQ ID NO: 416123 - DNA, 416 bp, Oryza sativa
ctttctagcccatgattctgcatcaaattgaggcctggggagatgttggagtaacagaagttgttttagccatcaactaccgaccggaggtaatgctcaatttcctgaaggactttcaggataagcttggcatcacaatcacgtgttcccaagagactgagcccttgggaactgctggccctcttgctctaccaagggacaagcttgtggatggatctggtgagccattctttgtcctcaacagggacgtcattagtgaatacccttttgctgagctcatagaatttcacaagagccatggtggtgaggcaacgattatggtcaccaaggtggaccaaccatcaaaatatggtgttgtggctatggaggaagtcactggaatggtggaaaaatttgttgagaaacccaaaatattt

SEQ ID NO: 416124 - DNA, 375 bp, Oryza sativa
tttattatccatcccgaccgccatcgaatcgacctcgggagatctatggcctagtccgggctggaccaaaccaccagcttcctcggcaccgcccctcgccgggatgagctcgtccgccgcgtcggcgactccggtggccgcatcaccatgcgccgcaccgtcaagagcgcgccccagagcatctggtatggacctgaccgtcccaagtacctgggcccgttctcggagcagacgccatcgtacctgaccggagagttcccgggagactactggtgggacacggcggggctatcggccgacccggagacgttcgcgaggaacagggagctggaggagatccactcgcagtgggcgattctgggggcgctgggctgc

SEQ ID NO: 416125 - DNA, 410 bp, Oryza sativa
acgatgcctcatctccggcggcgccaccgccgccgcctgctcgctgccgtcgtcttcctcctcctctctgccgtcgtcgcgcgaccagcagcaggcgccttcaccgagctcgagtccgcccagatcggccgcttccaggactacctccgcatccgcaccgcccacccgtccccggactacgccggcgccgccgccttcctcctcccctacgccgcctcgctcggcctccgcgccgccacgctccacttcaccccgtgcaagtccaagccgctcctcctcctcacgtggccgggcaccgacccctccctgccctccctcctcctcaactcccacctcgactccgtcccggcggagcccgagcagtggctccacccgccctttcgtcgccaccgtgacgccgtcacgggccg

SEQ ID NO: 416126 - DNA, 539 bp, Oryza sativa
cgggagagaagcgcacgcacctccgtccctcgtcgggagcgcagaaatggcgaccctctcgatggtctccgtccccatcgccacctcctccctgcccctctccgcccgaggccgcagctcctccgtctccttccccgttcccaagaaagggggtattggtcatggtggcctgcggatcgagtgcattcgtattggtggagtggagatcccgaaccacaagagggtagagtactcactgcagtacatccatggcattgggcggtcacgctcccgtcagatcctcttggacctcaattgtgacaacaaggtcacaaaggacctctccgaggaggaagtcatcactctccgtaaggaggttaccaagtacatgattgagggagaccttaaacggtttaatcgtgtggcgattgagaggttgaaggagattaggtgttacaggggcatccgccacaagctagggctgccagttcgtggacagaggacgaagaacaattgcaggacgctgaagggaaggagggcttctgttgcgaaagagaagt

SEQ ID NO: 416127 - DNA, 397 bp, Oryza sativa
gtctgttctatttaatttacctccttcacctccacctccgcgcgctgatcggagggggccagctccttctcctacggcatcgggaccgacgaggtagataggacaagagggccgcactggatacatgcctatgtactgagactcatggaacgaggaccaccctgacaagctctgcgaccaggtctcagatgctgtgcttgaagtacggctagggggggaccctgacagcaaggtcgtttgtgagacctgggccaacacaaacatggtcatggtctttggggagagcactacctaggctaacggtgactgtgagaagattgatagggagacatgccgtgacatctgatgtgcgtcagctgatgattgtctccatgctgaccagtgcaaggtgcttgtg

SEQ ID NO: 416128 - DNA, 570 bp, Oryza sativa
cagtttctttattgaggcaccagaaaattgccttgtcatggatggtacaaaaggagagaaatggttcgagttgctctggcggaattcttgcagatgatcagggcctgggtaaaacagtgtcgactatatcactgattttgacagaaaggtcaccagttccatcttcagctgttaagcaagaaccatgcgaagctgtaacccttgacgatgacgatgaggatgacgatgctgagcctcatttgaagaaaccggcactagcacatctagcagatacatgtaaacctgaagcgacaagtagtaccattaagacagaaaatcctattgcaaatgttaaggctagaccagctgctgggactttggttgtttgccccacgagtgttctacgtcagtgggcagatgaactgaggaataaagtcaccagtaaagctaacttgacctttttagtatatcatggtagcaaccgcacaaaggatcctaatgatcttactaaatacgatgtcgtgttaaccacatattctatagtaagcatggaagtaccaaaacaatcaagtcctgatagtgatgatgaaa

SEQ ID NO: 416129 - DNA, 542 bp, Oryza sativa
ttgaataggcctgtgtcaaggagagggtagtagcaccttgctctcctttgccttcagagaaaccggaagcaatggcgtctgctactctcctcaagtcatctttccttcccaagaagtctgaatggggtgccacccgccaggctgccgcccccaagccggtgactgtctccatggttgtccgcgctggtgcctacgacgatgagcttgtcaagaccgcgaaaaccattgcatcaccaggaaggggtatccttgccatggatgagtcgaacgcgacctgcggtaagaggcttgcgtcaattggccttgagaacaccgaggccaaccgccaggcttaccggaccctccttgtcaccgcaccgggcttgggacagtacatcttcggtgctatcctcttcgaggagactctgtaccagtcaactgtagatggcaagaagattgtcgacatcctcactgagcagaaaatcgttccaggtatcaaggtcgacaagggtcttgtgccccttgctggctccaacaacgagtcatggtgccaaagtcttgac

SEQ ID NO: 416130 - DNA, 541 bp, Oryza sativa
ttcattatctgaattaacacaacgttttgatggtcgaaaggtaatgcttggtgttgaccgacttgacatgatcaaaggaattccgcaaaagattttggcctttgaaaagtttctcgaagaaaaccatgaatggaatgataaagtggttctacttcaaattgctgtgccgacaagaactgatgtccctgagtatcaaaagcttacaagtcaggtgcatgaaattgttgggcgcataaatggccgatttggaacactgactgctgttcctattcatcatctggaccgatctcttgatttccatgccttgtgtgccctttatgcagtcactgatgtggcccttgtaacatcgctgagagatggaatgaatcttgtaagctatgaatatgttgcatgccaaggatcaaaaaaaggagttttgatattgagtgagtttgctggggcagcacagtctcttggagccggtgctattttagtaaacccctgaatattactgaagtcgcagactcaatcaagcatgctttgacatgtcatctgatgagag

SEQ ID NO: 416131 - DNA, 385 bp, Oryza sativa
gttcattccgccacatcagcagcgtcttatttttgccggcatgcagctggaggatggcaggaccctcgctgactacaacatccagaaggagtccacccttcaccttgttctgcgcctaaggggtggaatgcagattttcgtcaagactctcactggcaagactattaccctggaggttgagagctcagacaccattgacaacgtgaaggcgaagatccaggataaggagggcatccccccggaccagcagagactcatcttcgctggtaagcagctggaggatggccgcacccttgccgactacaacattcagaaggagtctaccctacacttggtgctccgcctcaggggtggtatgcagatcttcgtcaagactcttactggc

SEQ ID NO: 416132 - DNA, 389 bp, Oryza sativa
  unsure (1)..(389): unsure at all n locations
ttcgtttgcaagaccttcttcatcccgatcgcgacgcgcctacttgaccgcgtcggacggaggccgctcctcctcgccagcggcggcggcatggccatcttactcttcaccctggccacgtccctgctcatgatggaccggcggccgcagggcgaggcgaaggcgctagtcgccataagcatcgccgcgatgctgtcgttcgtggcgtcgttcgcctaggggctgggccccgtcgcgtgggtgtacacgtgggagatctacccggtgcggctgcgtgcgcaggcggtggccatcgggacggggctgaaccggctgatgagcggtgccaccaccatgtccttcctctcgctctccaacgccatcaccatcgncgggagcttgtacctgta

SEQ ID NO: 416133 - DNA, 540 bp, Oryza sativa
caggtttattgtaccaagccaccccgacacgaatcgctgaggccttccccctgttgttcatccctcactcaacttttgggcagcttggctttattcaattccccttcctttttattgcgaatttgcgactgcgagcgagcttttcttcctcaaaggaagacgacgacggaggagcagccctgcagagcataaagagaggagaggagaggagagggggccggtcaaggaagaggagggaagatgagcagcacagctccactcctcacaccctacaagatgggaagatttgatctttcccacagggtagttctcgcaccactgacaaggcagcgatcctatggtaatgttcctcagcctcatgccattctgtactatcagcagagaacaaccaaaggaggccttttgattgctgaggccactggaatctcggacactgctcaagggtacaaagatactcctggtatttggacaaggagcatgtggaagcgtggaagccaatcgtagaccgcgttcatgccaaaggaggaatatttttctgtc

SEQ ID NO: 416134 - DNA, 384 bp, Oryza sativa
gttgttttgttatatgaaggagaaaaatgtggcaaaagcagaaggcaggcctgagcctgcattgtatggtagtgaggacattcgtcctctgaccttagatgatttcaaatgtgcccatgagcaggttcgtgcaagcgtttaatctgatgcagcaaacatgaatgaacttctataatggaacgacctatatggtgagggcggttcgaggaagaagaaagcactgatctacttcatgtgagagcgattccatcataacatgtgagagagattaagaccctgccatattgatattgtacagtcgctataccacccctcttggcaagcgcttcgcgacttggccggccaaaaccagacgggttttttcctgttctcccttcaggagca

SEQ ID NO: 416135 - DNA, 564 bp, Oryza sativa
ctccttttcctccccctcccggtaaggcggacgaccgagctgaggctgttctagggctagggcacccacctcctccccttccgtatcctggatggctgctggtcggggcattaaccagctcctacggagaacactccataatcagtcctcaggctcatctctgctatcctcgttccggataaagcatgaagaatcctccgctggactgagagcattggctcttcttggagttggtgcttctggtcttttaagctttgctacaatagcttctgcagatgaagctgagcatggtttggcagcagctgaatatccctggccacatgctggcattcttagctcttatgaccatgcatctattcggcgtggacatcaagtttatacacaagtgtgtgcctcttgccattccatgtcattaatttcgtaccgagatttggttggtgtggcctacactgaagaagaaacaaaggctatggctgctgagattgaggtggttgatggtcctaatgatgagggtgatatgttcacacgtccctgtaagttaagtgaccggttcccacaaccata

SEQ ID NO: 416136 - DNA, 444 bp, Oryza sativa
gtaatttgtttgacgaacccaccaaatctgcatgcgatgatgcgtcatctgatcagtccatggtcatcgtcgccgtcacggacggaggacggcgccctccctgccgccgtgtgccgtccagagctttttcgtccgcgaggctttctagtcgttgtgccaaccacacagaaaacgagaaggaatgtactatccacaatgatgtcacactataacagtgttcctcttcggaccgaaacagatcacactggccgagacaactggtggcacattcagggagtacattgtcacattcgatggctactccttggtatacccaaagagctgtatccacgaacagggagctgatgctgacatattctctatagaccgaggattactcgacgagaacatgttggtcgagatatagtctccttcatcggcgaagtacatgacggctgaagatct

SEQ ID NO: 416137 - DNA, 539 bp, Oryza sativa
gtacttaccaagtttaatttggagcacacatttcagctcaccactgctagcttgggaagaggaggaggagcttgagcttggagagagacaacaatggcggctcaggctcttctctctgggaggcagctgctggggaggccattgcaatcttcagtctccaggtcttcttcctccaggaaggcacccttcatggtcagggcagaggccactccccctgccaagcaaggtgctgacaggcagctgtggttcgcatccaagcagtccctgagctacctggatggcacgcttccgggagacttcgggttcgacccgctggggctatcggacccggaggggaccggtgggttcatcgagccacggtggctggcctacggcgaggtgttcaacggccggacggcgatgatgggcgtcgtcggcatggtcgccccggagctcctcggcaagctgggcctcgtccccgccgagacggcgatcccgtggttccagaccggcgtgatcccccccggggcacctacacctactgggccgacccttacact

SEQ ID NO: 416138 - DNA, 539 bp, Oryza sativa
gtaactctccgaaactgattcgatatatgatacagagaaattggctgagaggattgcaaagctttctggtggtgtggctgtcatcaaggttggggctgcaactgagactgagcttgaggaccgccaactacgtatcgaggatgcgaagaatgcaactttcgcagctattgaggagggcattgttcctggaggtggtacagcgtatgtgcatctttcaactaccgtccctgcgatcaaagaaacaatcgaagaccatgatgagcgccttggtgcagacattattcaaaaggcgttggtagctcccgcttcactgattgcccacaatgctggagtggaaggggaagtggtagttgagaagatcaaggacggggagtgggaagtcgggtacaatgcgatgaacgacaagtatgagaacttgattgaggcgggtgttattgacccagctaaggtgacgagatgcgcgctccagaatgctgcctcggtggctggaatggtccttaccacacaggccattgttgtcgagaagccgaagcccaggg

SEQ ID NO: 416139 - DNA, 527 bp, Oryza sativa
aagagctcggtttggagaagggttggggtgactgtgcaaagcgtgtgcttgacaccatccacttgcttcttgaccttcttgaggcccctgatccggccaacttggagaagttccttggaactattccaatgatgttcaatgttgttatcctgtctccgcatggatactttgcccaatccaatgtgttgggataccctgatactggtggtcaggttgtgtacattttggaccaagtccgcgctttggagaatgagatgcttttgaggatcaagcagcaaggccttgatatcacacctaagatcctcattgtaaccaggctgttgcctgatgctgttggtactacatgcggccagcgtgtggagaaggttattggaactgagcacactgacattcttcgtgttccattcaggagtgagaatggtatcctccgcaagtggatctcccgttttgatgtctggccattcctggaaacatacactgaaggatgtgcaacgaaattatgagggaaatgcaagccaaacctgatc

SEQ ID NO: 416140 - DNA, 468 bp, Oryza sativa
gggagattggatcggaagcttctagaagtttccgtgggcgatggcgatccgcgcgaggtcctcctcctacgccgccgcggcggtcgcgctggcgctcgcgctggcgtccgtcgccgctgtcgccggcgaggtcttcttccaggagaagttcgaagatggatgggaaagtcggtgggtcaagtcagaatggaagaaggatgagaacatggctggtgaatggaaccacacatctgggaagtggaatggagatcctgaggacaaaggtatccaaacctctgaggactacaggttctacgctatttcagcggagtacccagaattcagcaacaaggataaaaccctggtgctgcagttctctgtaaagcatgagcaaaagcttgactgtggtggtggatatgtcaagttgcttggtggtgatgttgaccagaagaaatttggtggggacacaccgtacagcattatgtttgg

SEQ ID NO: 416141 - DNA, 543 bp, Oryza sativa
  unsure (1)..(543): unsure at all n locations
cggacttgttgattctaccggaaaggatatgcccctagcttccatttacagtgatgggatgctccaatcactcactagtgatggccagccagtcttcactactgttcttcaatttaataagaaggaggaagaattcatatttaacaacatacctgagaaaccagtgccttccttgttgaggggatacagtgctcctgttcgtcttgattctgatctgactgagagtgacttgtttttcctacttgccaatgattcggatgaatttaacaggtgggaagctggtcaggtgctgtcacgtaaactgatgctcagtcttgtagctgacttccagcaacagaaaacactggccctgaaccctaaatttgttgatggacttagatcaatcctgcggaacacaagcttggataaagaattcattgcgaaagcgataactttgccgggtcaaggggagattatggatatgatgccagttgcagatcctgatgcagttcatgctgtccgtacctttattaagaaagagcttgcccttcaactcanagatga

SEQ ID NO: 416142 - DNA, 482 bp, Oryza sativa
gtagtttctttctttattgctctctccctgtgcggcacgcgcgttgaatcgaactgtgcggtgagtatacacatcgagatcggggggaaatgtcggcccagatcacatcggggcatatctgatgagacgaatgcaactattgcaacactatccttgtggtgaatgtgccaaacactcgtccctacagcattgtgactgttagatgtgggcattgcgcattagggcgctccctggaaattgctccgtattacccagcacgcactgttaaagatcaccaggttcagagcagacgatctcaaggccatagctttggaagcaatgacatagcttgcataactcagaggacatcgactgccaatgtacccaatgccaaccagtcagcagcaggtgtgacctatacataggactgagaaaagacagcgtgtcccatctgcatacaacagattcatcaaggaggagatacagaggattaatacccgcaa

SEQ ID NO: 416143 - DNA, 560 bp, Oryza sativa
atgagatgggtggcaaggtgattgcacttggagatgtgacaggctcaatcagaaacaagaatgggttagacatacctgctctgatgaagcacagaaatgagggtggtgctttgaaagattttcatgatgcggaagtcatggattcttcagagctactagtgcatgaatgcgatgttctcatcccatgcgctttaggtggagtgctcaacagggaaaatgcacctgatgtgaaggccaaatttataattgaagctgctaatcatccaactgatccagaagctgacgagattcttgccaagaagggagtgaccatattacctgacatttacgccaactccggtggtgtgatcgttagctattttgagtgggttcagaacattcaagggttcatgtgggatgaggagaaggtgaacatggagctccacaagtacatgaacaattctttccagcacatcaaggccatgtgtaaatctcatgattgcaacctgaggatgggggcgttcaccctgggagtcaaccgggttgcacgtgccaccctcttgaggggatgggaggcatga

SEQ ID NO: 416144 - DNA, 454 bp, Oryza sativa
aagcttgttacgcaacgccgcgtgcaaatggcgtcgaggacgatgacactggaggtgacggtggtgtccgccgaggaggtcgtgctgtcgccgacgaggcgcccgctcggtcgcggcgcgtacccagtggtgcgcacggcgtgcgtagcgatctcaacggcggcggcggtgtgcacgcgcgtcgacgaggaatcgggcggagactgcaacgggtacccctactggaaggagacgctgcgggtggcgttgccggagggggcgcgctggctggacgtagagatctgccggaggaggccgaacggtcaggtggaggcggtggcggaggcgagcgtacctgtaggcgacttcaccgttggaccgccgggccacctgcattgcctcagctacaggctgttcgacgcctccgggtgcacgacgcgccgtaacggcatcgtcaacatcaccgtcaggagga

SEQ ID NO: 416145 - DNA, 520 bp, Oryza sativa
gctaatgatgatgataaagtgagatatgcacgatttatcttacgtgcatatgttgaagatagcaagaagactaaatggtgtccagctcctgactgtacatgtgcagtggaatttgtcagcgatgggaactatgatgtctcatgcaattgcaaattcagtttttgttggaactgcacggaggaagctcatcgaccagtgaactgtgagactgtttctaggtggatattaaagaatagcgcagaatctgaaaatatgaactggatactggctaattctaagccgtgcccaaaatgcaaacgaccaatagagaaaaaccagggatgcatgcatatgacttgcactccaccttgcaaatttgagttctgctggttatgtctgggttcatgggctgaacatggggagagaactggtggattttacgcttgtaatcgctatgaatcagcaaagaggagggagtttatgatgagactgaagcaggagggaaagagccaaaaattcacttgagagatacatgcattac

SEQ ID NO: 416146 - DNA, 527 bp, Oryza sativa
ttgcctaagtcgcgtcgcaccgaagcagagtagagaaggagaggagcggagcgccatcagccgtccgatcgagtgatccgatggctctcgctctctccacctctgctgctgctgccgctgccgccgcggcgcgggcgctcgcggcgagggtgacgacgacgaggggttacgccgcgtcggcggcgtcgtcggcgatgaggcgggcggtggcggcggtggaagggaagggcgctgcggggatgacgcaggcgaaggacgggtcgtcgtcgtcggcggcgagggaggtgtcgtgggtgcccgaccccgtgacgggccactaccggccctccaacttcgccggcggcgccgacgccgccgacctccgcgccgcccacctgggccgcagctacgcccgcgcgtgatgcgcgcgacctcgccgtcgtccgaccgacgacgacgccatccatccatatatatctgctccgcgtcaactactcatcacctcttgaccgcgccgggcggacgccgatacgctccggtgcacctga

SEQ ID NO: 416147 - DNA, 499 bp, Oryza sativa
gtcggtgccgccggcgagggctcgggccgactacgattacctcatcaagctgctcctcatcggcgacagcggtgttgggaaaagttgtctcctcctacggttctctgatggttccttcaccaccagttttattaccaccatcgggattgatttcaaaataagaacaatcgaactggatggtaaacggattaaacttcaaatctgggatacagctggtcaagaacgtttccgaactattacaactgcctactacaggggagcaatgggtattttgcttgtttatgatgtcaccgacgagtcatcatttaataatataagaaactggattaggaacatagagcaacatgcttccgataatgtgaacaagattttggttggcaacaaagctgacatggatgaaagcaaaagggccgtaccaacttcaaaggggcaagcacttgctgatgaatatggcatcaagttctttgaaacgagtgcatagacatacctgaatgtcgag

SEQ ID NO: 416148 - DNA, 538 bp, Oryza sativa
  unsure (1)..(538): unsure at all n locations
cttgttccctgaaaggattcaagatgttatatgcaggggggcggttctttttgacatgcttcctgaagagtacacgttccaagagatcattgccaagttggggccgattccaagcacattttctgctgttcatctttctagctatctgctacagaatgttgatcggtacagataccttctcccagggtactgcaggagagaaagtgggtagattttgatgatctacactcttcaatctgatgtgcaggcctgtcactgccatgttctccacctccgagattggctggccgtgacggttgcatctgatatgattggctaacttagctggatgattgcttgggatgagtggctatggatgatttcatcatccttcactgtgcaatctaacaccggacgaccctacaggctacagcatattgtatgctcggtcgtggcatggttaccttcccagaggagctcattaccctgtggtagccaccacangttcacctgtcattcatattacttccctgattgatacataaactgagaactgctg

SEQ ID NO: 416149 - DNA, 477 bp, Oryza sativa
ccccaatcttgcccttcctcctcctccgatcgatccaggccccgcccctccccgcccctcgccgcgcgcgcgaaggagagagagagagagagggagagagggagggagatcgcctcgccgccgcggcgtgggatccggaggtggtgtagcgaggatgtcgtctgattcgtcgtcgtgggcgcgcgcgctcgtgcagatctcgccctacaccttctccgccatcggcatagccgtctccatcggcgtctccgtcctcggcgccgcctgggggatcttcatcacggggagcagcctcatcggggccgccatcaaggcccccaggatcacctccaagaacctcatcagtgtcatcttctgtgaggctgttgcaatttatggtgttatcgtggcaatcatcctccaaactaagcttgaaagtgtaccaactgctctagtgcatcatccagagtctctccgggctggctatgcaaactttgc

SEQ ID NO: 416150 - DNA, 428 bp, Oryza sativa
caagagtacgtatacagagacgtggtgaagatgtggcgcatactttgaaggtgtctttagaagatgtgtataatggatctatgaagaaactatcattatcacgaaatatcctgaggccaaagcgcaaaggaaaagggaccaaatctgaggctccagcaacatgctatggttgtcatggtgtaggaatgaggaatataatgcgacagataggactaggcatgattcaacatatgcagactgtctgtcctgaatgcagaggatcaggtgagatcataagtgacagggataaatgcacaaactgcagagctagcaaagttattcaggagaaaaaggtgcttgaggttcatattgagaaggggatgcaacatggccaaaaaatgtattcaaggtgaagctgatgaagctcctgatacagtgacaggagatat

SEQ ID NO: 416151 - DNA, 541 bp, Oryza sativa
gtgaggagctcgtcgggggcggcggccgagccgcctcctacgccggttgcaagttctgcaggaccctcgtcacctgctatgcaagctaatgttgccagcatagattggtcgggtagcagacaagcttccagagttgattcctcatcacatgttgctccgcatgcccatcagccttctcatagtttcgatgccactggaactgctttggattctgcaccgtcatgtaggccatgggaacgcggagacttacttcgtcgactggcaacatataagcctacaacttgggcttctaggcctaaggctgctagttctttggcttgtgctcggagaggttgggttaacgttgacatggacaaaattgaatgcgagtcatgtggtgcacatctcatattcagtacattgacatcctggtctccagctgaagtttcaaatgctggagaagcctttgccgagcagcttgatgcatcacaccataatagctgtccctggagaggcaatagctgtgctgacagcttggtgcagctccacctaacacaatcag

SEQ ID NO: 416152 - DNA, 565 bp, Oryza sativa
ctgagttcttgcctgttaatttctcctcttcctccggcgtcgtcgtcgaggagatcgttcgatcgactgatcagcgattaggcgtgagatagaggaggaggaacggattgtggttttcttgaattgttaggttgggttgtggttatgatgatgcaggggggtaggattgcgaggagagggttgtcgaggctcgcagcggcggtggagacggccgccgtcgcgccgccgagaatggcggacttcaaccacgtcccgctcccctacgacggcccgtccgccgccgagatcgcacggaagcgcgccgagttcctcagcccgtccctcttccacttttattccaaaccactgaacatcgtggagggtaagatgcagtacctgttcgacgagcgcgggcggcgctacctggacgcgttcgccggcatcgccaccgtgtgctgcggccactgccacccggacgtcgtcggcgcgatcgccgcgcaagccggccgcctgcagcactccaccgtgctctacctcaaccacgccatcgtcgactttgccgaggcgctcgtcttcaagatgcccc

SEQ ID NO: 416153 - DNA, 471 bp, Oryza sativa
tgatttctcgccaccacacccacccacccaccaatggcgtcctcccgcctcctcctcctcgccgcgctgctcgccacggcggcggtgctggcggcgtcgcagaagccgaaggccgccacgccgacgaaggccacgccggcgtcgcccggccccgcggcggcggcggccgacggccccgcgccgacgaacgtgacggcagtgctggagaagtccggcaagtacaccaccttcctccggctcctccacgagagccgggtggacacccagatcaacagccagctgatggacagctacaacgggctgaccatgttcgcgcccacggacgccgcgttcgcggcgctcaagccgggcacgctcaactcgctgtcgtcgcaggaccagatccagctgatgctctactgcgtgctcccgcggttctacagcctcgccatgctcaccacccttggcgggcccgtgaacacgcaagcgttc

SEQ ID NO: 416154 - DNA, 474 bp, Oryza sativa
ctcactgttcagttctaccacgtacaacaacggaagtgagagagggagaagaatacacgggaagaggaggagcttagctagccagccatggcgaggcgctctccttgcctcgccgtcgccatgcttctgcttggggcgttggcggtggcgagcgccttcattgatgaagcggcggctgctggccgggggctcggccatggcgcccgcttcatgagcaagcagggtcgtgtgacatacgagaagctgccggagccggagccgaagccaaagccaaagcctaatcctaaacccacgccaaaacctgagcccaagccagagccggagccaaaaccagtacctgagcctgagcctaaaccggaaccaaagccagaaccaaaacctgagcctaagcctgaacctaaaccatacccagagccaaaaccggagccgaagccagagccaaaacctgagccggagcctaaacctgagcctaag

SEQ ID NO: 416155 - DNA, 523 bp, Oryza sativa
ccagttcttaattacttcaaggtttctgaaggggctgagcctcactcagccactttattcacagctttcatttgtatctgctgtgtggttattggcaacttggatttgattacgcccaccatcacaatgtttttccttctgtgctatgctggtgtgaacctgtcatgctttctccttgacctccttgatgctcctagttggcgtcctcgttggaaatttcaccattggagtttatcacttgttggtgcattgctttgtgttgtgatcatgtttttgatatcctggtcttttactgttgtctcccttgcccttgcaagcctcatctattactatgtgagcttaaaaggtaaggctggagactggggagatggatttaagagtgcatactttcaattggcactacgaagtctcagatcattaggagcaaaccaagtgcatcctaagaattggtaccccattcctctgatattctgccgtccttggggtaaacttccagaaaatgtaccttgtcatccaaagcttg

SEQ ID NO: 416156 - DNA, 469 bp, Oryza sativa
gatcattcctttcacgcctctctctcttctctgattgattactactccactacagtactagtccaaggcgggcggagacggcgacggattgcgcgggcgcaagcagcactcaagttcgctagtcctcctcctccttcctgtgtagtggagcgaggcgaggcgagccgacgccatggccgcggcgcagcgctggctccctgggatcctccgccgaggggacgggctcgcgcggcgcctctactcctccgcctcctccctcctcttcgacgacacccaggagcagttcaaggagagcgtgcacaagttcgcgcaggagaccatcgacccgcacgccgacgtcatcgacgcctacaaccatttccccaaggacgtcaacctctggaagctcatgggcgattttaatctccacggtcttaccgccccagaggagtatggtgggatggggctcggctacatgtaccactgcatt

SEQ ID NO: 416157 - DNA, 499 bp, Oryza sativa
cccgataccttgaaaccctagatcgccatatggcctcctccgccgccgccgccttctaccgcgacagggaggacgcggcgccgccgtcgtccggccccgggggaggcggcgccatggcggcgtacgacccgagctacgtgccggactcggtgaagacgttcgtgtcgcacctctaccgccacatccgcgaccgcaacgtgtacgagacgcaccagatgtacgagggcgggttcacccgcctctccgaccgccactttcgcgacacgccgtggccgccggcggaggccgtggcggcgcactgcgacggcgaccacgtcttcctcctcctctaccgggagctctggttccgccacgcccacgcccgcgttcagggcctcaccccggcgcagcgcgccgagtcgtgggacaactactgctccctcttcagcgtcgtcctccagggcgtcgtcaacatgcagctccccaaccagtggctctgggacatggtcgacgagttcgt

SEQ ID NO: 416158 - DNA, 444 bp, Oryza sativa
atcaagttggtcatcgagctcgagctgaatctaaacctttgcaacaatggcggcgcgtgttgttgtggcgttcgcggttgcgtccgccatgttcgtggccgtctccggccagaagttcaacgccatcttcagcttcggcgactccatgtccgacaccggcaacctctgcgtgaacggcccccccgccggcctgacgctcacccagcctccctacggcgagaccttcttcggccgcgccacctgccgctgctccgacggccgcctcgtcgtcgacttcctcgcggagaagttcgggctgccgttgctgccgccgtcgaagaggggcggctccgactttcggcgaggcgcgaacatggcgatcatcggcgccaccaccatggactccggcttctttcagtcgctcgagattggcgacatgatctggaacaatggcccccttaacac

SEQ ID NO: 416159 - DNA, 511 bp, Oryza sativa
ctcattctttgatttgggtggttgccattcatctccatctctcgatccatttctccccccaaattcttctccaatcagctcgattccgtcctcttcgagcagatcagctcccgctgatcgaatcggtgtcgaattttggttgtggttgctgttcttgggttggatcttggtggtgagaaagatcgtgatttttgttgttgggatttgggaggaattgtttgcgctggagggaggagttgagctcgctggccatggtttgccgaggcgagcagagaagaaatctctgagctttatgaagatcgccactcacctgcgccgctcctgcttcctccactccttctcggttgtcttcctctactggttttatgtgatctcataattctgggggaatcatcttctccgcgtcaatccgccattgttactagtagtagtagagctctcttgttgatggtcttcttcttcgtgttcttcttcggttgattaaataatcgtagcagcagaagaagcagct

SEQ ID NO: 416160 - DNA, 551 bp, Oryza sativa
  unsure (1)..(551): unsure at all n locations
ggcggtcgactcgagctgaggctgagctagggctagggcacccacctcctccccttccgtatcctggatggctgctggtcggggcattaaccagctcctacggagaacactccataatcagtcctcaggctcatctctgctatcctcgttccggataaagcatgaagaatcctccgctggactgagagcattggctcttcttggagttggtgcttctggtcttttaagctttgctacaatagcttctgcagatgaagctgagcatggtttggcagcagctgaatatccctggccacatgctggcattcttagctcttatgaccatgcatctattcggcgtggacatcaagtttatacacaagtgtgtgcctcttgccattccatgtcattaatttcgtaccgagatttggttggtgtggcctacactgaagaagaaacaaaggctatggctgctgagattgaggtggttgatggtcctaatgatgagggtgaaatgttcacacgtcctgntaagttaagtgaccggttcccacaaccatatccaaatgagc

SEQ ID NO: 416161 - DNA, 485 bp, Oryza sativa
cgccattcctgacaccgatcgagagagagagatcgcaccgatcgacgtacggtacgagacgaccatggcgcgtcctcgcttcgccaccacggcgccattgttggcgctcgccgtcctcgccgccgtggtgtccgtcgccgtcgccaccgctcccgccggcaaggaccccggcggcttcgtcgtcaccgggcgcgtctactgcgacccctgccgcgccggcttcgagaccaacgtctccaaaagcatcccaggggcgacggtgtcggtggagtgcaggcactacggggcggggagggagagcctgaaggcggaggcgacgacggacgagaaggggtggtacaaggtggagatcgaccaggaccaccaggaggagatctgcgaggtggtgctggacaagagcagcgacccggcgtgctccgagacggagaagacccgcgaccggtcccgcgtaccgctcaccagcaacaacggcctcaagcagaacg

SEQ ID NO: 416162 - DNA, 442 bp, Oryza sativa
ggaagaacattcaatctatttccctttttggtaaaaatgtgtctggttacaatcggatataatcaattgtacaacaaacaaaaaatacatcaactagaatacgcttgacgatatgtatatatccctttctcagatgatgaaaacatgggggaacatctgtgtctgttttccaatgcagcgctgttctattctgcatcaacgaaaatctctatgtctgacaaaggttcgtaaagcttcttttactgcacggcatacagtgtaattccagaaattttttgcacgcctacttgagtagctaccatactcaagtcaaaggtgatggattcaaaagcctcaactagtggcaaaaccaacttctgaaatccattgaccagaacatatttctattcattaaagtcccttggtgctaaaaatacttggaaagggccaactgtattgtctg

SEQ ID NO: 416163 - DNA, 482 bp, Oryza sativa
ttcgtggcagcttgcttggcgctcgcctccctcggccgcacttctttcttcctgattcctgacgtcttggatggtgcgctttattatgacacacgacctgcactagtgtttacagctccaagtatgggttccagagaacccttcctgagtgccatcttcttcttcttcttcttgcttttgttctgcctcggctgcaagtgtatagcttcagagttacacttacacacgacccagactgcggtcctcaaggttgatgcctcactgcaacatgctcgacagatccccgacacgctatttggaatattttttgaggaaatcaaccatgcaggagctggtggaatatgggctgaacttgttagtaacagaggttttgaagctggaggccctcataccccatcaaacattgatccatggtccataattggagatgactcttccatatttgtggcgactgatcgaacgtcatgtttcagtcggaatac

SEQ ID NO: 416164 - DNA, 553 bp, Oryza sativa
tcggtgctgtaaggctcccaccaggcattgttgtttctgaaacatatctttttccacggagattgtggggtgatcctagtgaggacctgagtagcgaaccacggtaccttgttacttttacagttggaattacacagaaggctaatattgatgctgctgtcaaaaagttttcagataaattcactatcatgctattccattatgatggccggactactgaatgggatgaatttgagtggtctaaaagagctatccatgtgagtgtcaggaagcatactaagtggtggtatgcaaagcggtttttgcatcctgatgttgttgcccgatatgactacatattcatctgggatgaggacctaggtgttgagcatttcaatgcagagaagtatattgaacttgttaggaagcatgggctagatatctctcagcctgggttgcaacctgacgagggactgacatggcaaatgacataacggctaggtgatcaagaagttcacagagttactgaggagaggccaggctggtgcactgatccccatctgccaacatgtgc

SEQ ID NO: 416165 - DNA, 427 bp, Oryza sativa
ggtgcctctgttccggagccgaactccgacgccttatcgactcactcaccaagtgctcgacgcaattccccaccggggagcccgcccgccatgccggagagcaacggcgccgcgtgcggcgcggcggagaaggtgaagccggcggccagccccgcgtcggaggagccggccgccatcgccggtaacatctacttccacgcgcagtacagcccccacttctcgccgctcgcgttcggccccgagcaggccttctactccaccgccgagagcgtccgcgaccacctcgtccagagatggaacgagacgtacttgcatttccacaagacggatccgaagcagacgtactacctctccatggagtacctgcagggccgcgcgctcaccaacgccgtcggcaacctcggcatcaccggcgcctacgcggagg

SEQ ID NO: 416166 - DNA, 465 bp, Oryza sativa
ggacgttggttgtgggcgtgcgggcggacgccgcgagccggacgctgctcacgtgggcggtcatcaatgtcgccgaccccggcgaccgcatcgtcgccgtccacgtcgtgctcgcctccgcgcccgtggccgtcgccaccaccgccgtcgactgcgacaccatgctcgccgtctacgagggcttctgcagtctcaagcagatcaatctaaagctcaagatttgcaaggactcctcggtccgcaaggcgctagttcgtgaggccaacctgtttggggcatccaaggttatcgtcggcatcgccaagaagaagcgcgggatttcgtccctgcactccggcgccaaatactgctccaagaagctgtcggccaagtgcgcggtgctcgccgtggacagcggcaagatcgtgttcaggagagaatccaatgtccactcaagcaaggtcttccgggagattcctggatgtg

SEQ ID NO: 416167 - DNA, 494 bp, Oryza sativa
gacgtgtctttgtggagcaacaagaacggcgcggcgagcggcggggaggagagattggatcgacgccggggggttaggaagggagcttggagagatggcggcttccgcgaggcccgtggatgcaggcggtgagagggcgacgagcttcgccatggcgtgcagcctgctcagccgctacgtccgccagaacggcgccgccgccgtcgagctcggcctcggcatcagaggtgagggtgaggctccaagggcggcgccggcgacgatgagcttgctgcccggcgaggccgagaggaagaaggagaccatggagctcttcccgcatagcgccggctttggccagcaggatgccatcaccgccgattctgctgctgatgctagggaacaagagcctgagaagcgtcagctgaccatcttctatggtgggaaggtgcttgtgttcaacgacttcccagccgacaaggcaaagggcttgatgcagctggctagcaagggca

SEQ ID NO: 416168 - DNA, 386 bp, Oryza sativa
cggacttttgggcgctcatctccatcttcctcctccctgcctcgctcctgtgcttcttctcttcatcaacaagagagctatccctggatctgtgtgtgtatatatatagagagagagggactgatctgggtgtagcgagctaggtagcctagctagcatggggaggtccccatgctgcgagaaggcgcacacgaacaagggagcctggacgaaggaggaggaccagcggctcatcgcctacatcaaggccaacggcgagggatgctggaggtcgctccccaaggccgcagggttgctgcggtgcgggaaaagctgccggctgccatggatcaactacctgagaccggacctcaagcgaggtaattataccgacgagtggacgagtt

SEQ ID NO: 416169 - DNA, 525 bp, Oryza sativa
gaagtgttttacaatcccgtgcaggtccacaatagagatatgtcagttgctcttttaaggactttcattgccaagcgtgaggaagaacataaggcaatgatggataagagggacaaggcgcataacaaagtgagccagagtaaatcatctggtccaaatggagagaatgggtcaacaggacagcatgatgaaatggatgttgatgctgaaaaggaaacaaataaagttgcggatgaaacagaagatctgtcaacagaagcaacaaagacaccttcgcggaaagtagccagagagcttaaggcaccagttgttcttgaggctttggctgcttctgggttgagatctatccgttatgctcgtgaaatagacgtgttagaaaaggtggtcgctctggacattgataaagtttgtattgaagcttgcaggcggaatataaagtttaatggtgcttctgctatgagtaagatcgagccttatttgactgatgctcgagtttatatgctcacacatcccaaagagtttgat

SEQ ID NO: 416170 - DNA, 536 bp, Oryza sativa
ccaagttcatgagatcgatcatatcgtattttgtagtaatgtagcagctagctagtgcagctgcaagctattagcgactgcatgctttgatcgatccatctagctaattgttgaatccatctaagcttaatggctctgcagcagagcatggcgatgccgatgatggtagtgtctgaccttggcaccgctcctcggtcatcgccgatggttcagctgcagaggatgaagaagcatctggtggtggtggcggcgttcaagagcagaaccaaggcttcccccaaggtggacaagtcgaacaagaacaagtcgatcgtggaggacggcatcttcggcacctccggcggcatcgggttcaccaaggagaacgagctgttcgtggggagggtggccatgctggggttcgcggcgtccctcctcggcgaggcggtcaccggcaagggcatcctggcgcagctcaacctggagacgggcatcctcatctacgaggccgagccgctgctcctcttcttcatcctcttcacgctgctgggcgccat

SEQ ID NO: 416171 - DNA, 530 bp, Oryza sativa
gtatttcttacatggcttggctggttcgtagctgggcaattcgacatataccctcgagaatggattccaaaggcaatggatagctttgagcttgctctgcagtttggaatatctgttcttgttgttgcatgcccgtgtgctcttggactggctaccccgactgctgttatggttgccactggaaaaggtgcttctcaaggtgttcttattaagggtggcaatgcacttgagaaagctcacaaggttaaagctatcatatttgataaaactggaacgctgactgtcggtaaaccttctgttgttcaaacaaaggtgttctccaagataccgctactagagctgtgtgatttggctgctggtgcagaggttggcttcttagatgcaaatgctaataatttttgttgaatgtcgtgtgatgttcctagtttgctgtctcatgtcatctaaccttaacttttttttaactttgtcaggcgaacagtgagcattctctataaaggcttttgagagtacacaaagagctcaggaac

SEQ ID NO: 416172 - DNA, 401 bp, Oryza sativa
ttcactctcaagccagctccagccacacgagcctagttcaggtagatacaatggcgtccaccgcctctttcatgctcgccgtcttgctggcggtggccgtcgcggcggcgccggcgagggcggtgcgatgcccgccgagcgacaagcaggcgctgatgagagtgaagcagtcgctgggaaacccggcgacgctgtcgacgtggtccctggcgtcggcggactgctgcgagtgggaccacgtccggtgcgacgaggccgggcgcgtgaacaacgtcttcatcgacggcgccaacgacgttcgcggccagatcccgtccgccgtggcggggctgacggcgctcatgttgctggagctgttccgcctaccgggcctctccggccccataccggcgtgccttacc

SEQ ID NO: 416173 - DNA, 536 bp, Oryza sativa
ttgcttaaagatccactgggagatggtgtggcccgaggcagaatactaatcacaacacggagcgaggaagtggcaacaggcatgaaggccatggtccaccgcgtcgacaaaatggatgcagagaatggctgggcattgttgtgcaggcagtctctcccagagtgcagttcagaagagctcgcgtcactgaaggatgttgggatcaagattgtggagagatgtgatggccatcctctagcaatcaagatggttgctggtgtcctaaggtctagaggcaagagcaaggctgagtgggagatggttatgagaagtgatgtttggtccatgcggccaatcattcctgagctgcctcaagctctctacttgagttatgttgatctgccttctgaattaaaggagtgcttcctccattgctctttgtatccagaagaattacccattcagaggtttggtcttatccgacgttggatagctgaaggccttgtaagtgacaaagacaataagttgctagaagattctgctgaagagtactatgc

SEQ ID NO: 416174 - DNA, 274 bp, Oryza sativa
acacctacttcacctactactcctagggccgatcggatcggaccgggtcctactacttcaacaccgccaccgtcgccgaagataggagaagagggccgtactagacaccttactctttaccttggagtttgtgaacgagggccaccctgacaagctgtgcgaccaaggctgagatgctgagctaggtgcctgactcgtcgaggaccatgacagcaaggacgcttgcgagacctggaccaagacaaacatggacatggtgtttggtgagatcacc

SEQ ID NO: 416175 - DNA, 569 bp, Oryza sativa
gtttttatatattatttagtatgatctttcggaacttatggtgcttttgttttgtcattgcaggttaccagagctcccaaggaaacagtttggagaatgatcccaataatacaacaatctttgtgggcgggttagattccaatgtaaatgaggaccatctaaagcaagtatttactccatatggggaaattggttatgtgaagattcctctaggcaagcgttgtggatttgtccaatttactagcaggtcatctgctgaagaagccatccgtgtgctgaatgggtctcagattggtgggcagcaagttcggctttcatggggccgtactcctcagaacaagcaggctccccagcaggatgccaaccagtggaatggcaactactatggataccaacagggctatgattcttcttactatggtgcacccaatgcacaggatcctagtgcgcaaaactactatggatattctggctatggcaattacgaacagcagcaggagccctcacagcagcagcagcaacccccacaacagcccccacagcagtgaccatggcgacgtgcaactttt

SEQ ID NO: 416176 - DNA, 464 bp, Oryza sativa
tgatgttgcttaagaaaactagaagactgtcaaaaatgccaggtgaagttagagctgagcataggcccatatcatcaatgaccgttcagatataacagaggagctaagtgaaaagttagccaagacaggaaatatagtcggagatgatgctacagagcaattcataagaaaggggctcactcctagatggggtgacctcgatgtcaatcatcatgtgaacaatgttaaatatattgggtggatccttgagagagcttcaatttcagtactggagaagcatgagctagcaagcatgaccctggattacaggaaggagtgcggtcgagacagtgtgctgcactcacttaccagcgtgtcaggggaatgcaccagcattggcgccgacaagcaggcttttgccattcagtgcgaccatcttctttagcttgagttaggagctgatattgtgaaggcacacacagagt

SEQ ID NO: 416177 - DNA, 559 bp, Oryza sativa
aaacattcgtaagttcctgatattcaccgtttagcagggagaacaaagggtgctttggtaaatgtgccttactttgaacagttcggtgtcaccttgatagaggctgccatgcatggtttgcctgtaattgcaacaaaaaatggagctcctgttgaaattcaccaggtgctggacaatggtctccttgttgatccccatgatcagcatgcaattgcagatgcactctataaactcctttctgaaaaacaactttggtcaaaatgccgagagaatgggctgaaaaatatacatcagttttcttggcctgaacattgcaagaattacttgtcaaggatatcaactcttggcccaaggtattctgcttttgctagcgatgaataccggattaaggcacctattaaggggaggaagcatgtcactgttattgctgtagattctgtcagtaaggaagatctgattcgcattgacagaaattctatcgaggctgcacgtaaagaaaatttgtcaggatcgacaggttttgtgttggcaacttccctgaccataggggagatacatt

SEQ ID NO: 416178 - DNA, 474 bp, Oryza sativa
gtccctgtcttaacttatccaagatcgctgatgcttccaaaggagtttgatgccaggtctgcgtggtcacagtgtaacacaattgggaccatacttgatcagggtcactgtggctcgtgttgggcatttggtgctgtggagtgtctccagcatcgattctgcgttcatttgaacatgaacatgtagctatctgtcaatgacctagtggcatgctgcggttacatgtgcggcgatggttgtgatggacgctatactatcatggcatggcgctactttgttacggaatggtgttgctaccgatgagtgcgatccatactttgatcaggtcggttgtaagcatccaggatgcgaacctgcttatcctacgccagtgtgcgagaagaaatgcaaggcgcagaaccaagtttggctggaaaagaagcattttagtgtcaatgcatacagagtaaattgtgatccacatgacataatggc

SEQ ID NO: 416179 - DNA, 521 bp, Oryza sativa
  unsure (1)..(521): unsure at all n locations
ttgctttatctgtctttggttttatcgcttgttgtttggtctggttcaataatacagcttatccgagtgagttttatggacctactgggccagaagcttctcaagctcaagcatttacttttctagttagagatcagcgtcttggagctaatgtgggatctgcccaaggacccacaggtttaggtaaatatctaatgcgttccccaacgggagaggttatttttggaggggaaactatgcgtttttgggaccttcgtgctccatggttagaacctctaaggggccccaacggtttggacttgagtaggttgaaaaaagacatacaaccttggcaagaacgacgttcggcagaatatatgacccatcctcctttaggctctttaaattctgtgggtggcgtagctaccgagatcaatgcagntaattatgtttctcctagaagttggttagcgacttcccattttgttctaggattctttttttttgtgggccatttgtggcatgcaggaagagcccgggct

SEQ ID NO: 416180 - DNA, 496 bp, Oryza sativa
gcgattagatcctcctcgtggcggagagctctcgcgactcgactcttgtgtcgcgcgcgcgcacggcgccatcaatcgattctcacatccatccatctgcctatctatctctcgcaattctggcggcgcgctgcgcgcatagggggggatcgaatttgatctagtggtgatggaggcggcggcggcgatggaggcggggcggaagctggcggcgcggcacccgcacgggcggagcaggacggcgcacaacatgtcgtcgtcgtcgctgcggaagaagtcggacgccgcgctggtgcggaaggtccccgtggcgccgctccgcccgctgctcgccaacctccaggaggtctttctcgccaccaagctcgccgtcctcttccccgccgtcccgctcgccatcggcgcccagtgctttcgcttcgaccaggtgtgggtgttcgctcttagattactgggccttattcctctcgccgagagagtcagcttccttacagag

SEQ ID NO: 416181 - DNA, 484 bp, Oryza sativa
gttctttgctaacacggagacattcaccctgatgatcagtgtgttcgggaaggtcagaattcatagcacaatattgtttttcagttcactgtaaaaatcttttcatttctctttctttgaaaacttacctctgaagaatttctgacatatattttttcatggtcaatttgaatggcaaagcaaccaatgtcatcgatgaaagttttcaacgagatgaagtcgattgggtgcaagcctaatatctgcacttacactgccctggtgaatgcatttgctagggaaggcctgtgccagaaggctgacgaagtgttcgaggagatgcaccacgcagggcacgagcctgacgtgtatgcttacaatgccctcatggaagcttacagccgcgctggattgccccaaggcgcataggagatcttctccttgatgcagcacatggggtgtgagcctgacagagcttaatacaacatcttggtagatgcatatg

SEQ ID NO: 416182 - DNA, 553 bp, Oryza sativa
  unsure (1)..(553): unsure at all n locations
ctctgttcaacattgtggggagtgttgccataaactggggttccaaccttctgaaattgggccatgatcagagagagaagctttcgacaaccaacaacaatcaaggcaatgacaaatttgttccgaagtcagttatgcattttcaaacttggagaataggcatactgttctttgctgcgggaaactgcctcaacttcatgtccttcgcatatgccgcacagtcacttcttgcagctcttggatcgattcaatttgtgtccaatattgcatttgcttactttgtgttgaacaagaccatttcagtgaaagtcatggtagcaacaacatttattgtatttggcaatatcttcctagtttcctttggtaatcatcaatctccagtttacaccccggagcagctagttgcgaaatacagcaatttagtgtttgttctctattgcatgtcactggtctttgtggttgcattcaatcagtatctctacaggagtggagaaactatcattttggatagtgcgaaacatactggctcacanttgcggacatttgtgccatt

SEQ ID NO: 416183 - DNA, 466 bp, Oryza sativa
gtttttggttcgccaaactgccacatccgcatccggcaccagatgcgctcgccggcgatgctctgatggaccgccgccgaggaggcgctcgcgctcgtcttcctactcctcatcgtcgccgtgccccccgccggggtcttctacctgcccggtgtcgcgcccaacgacttccagatgaaagatccacttcaagggaaggtgaacaagctgtcatccacaaagacacagctcccctattgataatactcccttcctttctgcaagccagatacgatagttgacagcgcataaaatcttggagaagttctacgtggggaccgcattgagaattctccttatgtagcagagatgagagagcccaagatgtgtcagatcgtctgcaaaagcaccattatcgattaacatgcgaaggagcttatggacaagatagaggatgagtaccggctgaacatgattcttgacaacc

SEQ ID NO: 416184 - DNA, 496 bp, Oryza sativa
gaaaaagattaaaaaaaactcgagctcacgcgcacacgcacgcgacgcgacgcgaccccgaatcggaggcgaggtcgccgactccgagcggatcgggccgaggtcgacggcatgggcagcggaggaggcgaggccgggggcggcgacggaggggagtcctctcctgctgcggctgcagcggcggcggtggcggaggccgcggcgctgcacatccggtgcgcgaacgggtccaagttcaccgtgcgggccgacctcgacgccacggtgggggcgttcaacgaggtggtggcggggagctgctacgtgccggcggcgcagcagcgcctgatctacaagggccggatcctcaaggacgagcaaaccctagaaagctatggtgttgaaacagatcataccattcatatggtgcgtggcgctggtcccccagccggatcagctgcacctgctgcagccagcccccaagcttcagctgctcctagcagccgcccaacagatg

SEQ ID NO: 416185 - DNA, 272 bp, Oryza sativa
gactatcgatcatggcgctcgcctccacctcctccggcgcgggcgcgtccgagctcaagacggccttcctcggggcgaagcgcgcgctcgccaatgccgagggagtcgcgggcgccaagcccgcgccgcgccgagcgctcgttgggttggccaagaagtcgtggatcccggccttcaagagcgacgccgcgttcatcaaccccgtcgtggctcgatggctcgatccccggtgacttcggcttcgacctcgttgggcttggcaaggacccggc

SEQ ID NO: 416186 - DNA, 286 bp, Oryza sativa
  unsure (1)..(286): unsure at all n locations
cgttatatttcaagatgcgccgccagcccngctgggagtcggacagctgtggatatcatggcgatgatggctatctttaccggggtcctgggaaaagtgagtcattcggtcccaaattcacttctggtgacacaattggtgctcgcatcaactatttctcacaagaatttttcttcactaaaaatggatctctagttggatccttacgaaacgaaattaaaggcccactatatcctaccattgctagtcatacccaagatgaagacgtgacagtcaacattggaaa

SEQ ID NO: 416187 - DNA, 471 bp, Oryza sativa
gatatggagcggccggcgccggtgaggaagtccgggaccttgacggtcgacctactcgcctggccacagcagcagcaccagcccgacggccacgccgcctccaccccctcccccgctcgccgcccccaccagccatcggaggcgctgaggaaggtggtgatcggtggccaggtcacggaggaggaggccgagagcctcaacaagaggaagccatgctccgcgcccaagtggaaggagatgaccgggagcggcatcttcgcggccggcgccgactgggaggcggaggagcccggcagcgccgccgagcccggccgagccgtcccgcgcaattaccagccagctactgtgagccacatttcatttgctgaggatggaagtgttcctcccaaaaagccaacttaagtggctgaggtagcaaagcagcgtgagcttagcggtactctgcaaagtgaagcagacagtaagatgaag

SEQ ID NO: 416188 - DNA, 541 bp, Oryza sativa
cgttaccgaggaggcgccagctcgactccgcgcgagccgaggcctagaaccctaacccccattcgatttccggcgagatgcccaccggcgtatgagccttgctcgtcggcggcgaggtggggtggggcggggggcgggggcggcgagggatggaggcgaggcgggtctccgcgaaccctcggccgtcctgcgtgcggagggtgcttgcgcggaagcggcggaggcccgaggcgacggcgaacagcgcgcggaagctgcagcggcgggagatctccgcgctgccgtgccgcgcgttctccgcgagcaccacgcgggagcggttccgcaacatccagctccaggaagagtttgatactcatgatcccaaggagatgggttcactactaccttacttgatgaaaaggtctgagattattgagatagttggagccagtgatatcatgtttgctttatcacagtcaggagtatgtgctgcattcagcagagtctcaaaccagcggttttgctttctggatggaagaccagatgaagtcattcgcag

SEQ ID NO: 416189 - DNA, 503 bp, Oryza sativa
ggttgtgcttatgaaaccccatgcccatacaaatgggtatcagatagatatcgtatgcctcactgatatactgctctggaagagttgatatacacttttgggggaccttggatatttggcctattactttcaggtcttcttgttttgttagctcttgttttaagtgttgccaggatgaaatttgttggtactgatgagttacctgggcccgcaccaactcaacaaggatcccaaattgatcattcttttcctttcctagaatctctaaatgaggtcttggaaactaatagggctgaggaatcgcatgggcatgtacacaggatgtatttcatgggccccaacaccttcagtgaaccttggcatcttccacacaccccaccagaacagatttctgagattgtgtatgaggatgcatttaaccgatttgtcgatgagataaacactcttgcagcttaccagtggtgggaaggatcgattcacagtatcctctgtgtacttgcata

SEQ ID NO: 416190 - DNA, 501 bp, Oryza sativa
agttaggtttcttctctagtctagaccaaaggaaggaaaccaaccgagaggcgaggcgaggagaggagaggagaggagaggagaggcggaggaggagggaggagaagatgagagagatcatcagcatccacatcggccaggccgggatccaggtcggcaacgcgtgctgggagctctactgcctcgagcacggcatcgagcccgatggcaccatgcccagtgatacaacggttggcgtcgcacacgatgcgttcaacactttcttcagcgagacgggcgctggcaagcatgtgcccagggccatctttgtcgacctggagcccactgtcatcgacgaggtgcgcactgggtcgtaccgtcagctcttccaccctgagcagctcatctctgggaaggaggatgccgctaacaactttgcccgtggccattacactgttggaaaggagatcgtagatctatgcctggaccgtgtgcgcaagttggcagacaactgcactgggc

SEQ ID NO: 416191 - DNA, 460 bp, Oryza sativa
ctctctccaagtccgtctgcctctctcaccaccaccaccgtgcgctgctccaagggggagatggcggtggtgaagtgcatcagggtccacgagctgggcgggcctgaggtgttgagatgggagcaagtggaggtcggggagcccaaggagggcgagatccggatcaagaacaccgccatcggcgtcaatttcatcgacgtctactaccgccagggggtctactccgctccactgcccttcgtccctgggagggaagccgttggagtggtgaccgctgtaggtcctggcctgactggcagaaaggttggggacgtcgtcgcctattgccggcatcccatgggctcttatgctcaagagcagattatttccgcctccgtcgctgttccccttccttcttccatcgaccacaacacttgtgccgctattatgctcaaggggatgactgctcacgttctacttc

SEQ ID NO: 416192 - DNA, 411 bp, Oryza sativa
  unsure (1)..(411): unsure at all n locations
ctcagtgttcaccattgctgaccctccctctccaatccaagctccaacaatggctaaaccatccttgctcctccttcttcctctgctcatcttctccatcggcgcggctctcgcccgcgccgatctcatgctggacaggttcgagcagtggatgatcaggcatggccgcgcctacaccgacgccggtgagaagcagaggaggttcgaggtgtacaggaggaacgtcgagctcgttgagacgttcaactccatgagcaatggctacaagctggctgacaacaagttcgccgacctgacgaacgangagttcagagccaagatgctggggttcagacctcatgtcacgattcctcagatttcaaatacctgctccgctgacatagcaatgcctggagagagcagtgatgatat

SEQ ID NO: 416193 - DNA, 305 bp, Oryza sativa
cttgaccgtatcaggaagcttgctgacaactgcactgggcgccaaggtttccttgtgttcaacgctgttggaggtggaacgggctctggtcttggttcccttctcctggagcgcctttctgtggactatggcaagaagtccaagcttgggttcactgtgtacccatcccctcaggtctccacctctgtggttgagccatacaacagtgtcctctctacccactccctccttgagcacactgatgttgctggtctgcttgataatgaggccatctatgacatctgccgccgctcccttgacattga

SEQ ID NO: 416194 - DNA, 520 bp, Oryza sativa
  unsure (1)..(520): unsure at all n locations
tcggacttgtttggtattgttgagggtttgatgaccactgtccatgcaatcactgcaactcagaagaccgttgatggaccctcgagcaaggactggaggggtggaagggctgccagtttcaacatcatccctagcagcactggagctgcaaaggctgtcggcaaggtgcttcctgctctcaatggaaagttgactggtatggctttccgtgttccaaccgtggatgtctctgtcgttgatttgactgtcaggcttgagaagccagcatcctatgatcagattaaggcagctatcaaggaggagtctgaggggaaactcaagggtattctgggttacgttgaggaggaccttgtttccacagacttccagggtgacaacaggtcaagcatctttgatgcaaaggccggtattgctctcaatgacaactttgttaagcttgtgtcttggtatgacaacgaatggngatacaagctctcgcgttgtgacctgatccgtcacatgtacaacacccagtagaaga

SEQ ID NO: 416195 - DNA, 447 bp, Oryza sativa
ccctgtctcccctccttcctcctctcctttcccctgctctcttcccccctctcacaagagagagagagcgccagactctccccaggtgaggattcagccatgaagggggccaaatccaagggcgccgccaagcccgacgccaagttggctgtgaagagtaagggcgcggagaagcccgccgccaagggcaggaaggggaaggccggcaaggaccccaacaagcccaagagggctccctccgctttcttcgtttttatggaggagttccgtaaggagttcaaggagaagaaccccaagaataaatctgtcgctgctgtaggaaaagcagccggtgataggtggaaatccctgaccgaagcggacaaggctccctatgtagccaaggccaacaagctcaaggccgagtacaacaaggccattgctgcctacaacaagggcgagagcact

SEQ ID NO: 416196 - DNA, 413 bp, Oryza sativa
ggttatactgccagcttcttctcaactcgacataagagctccctggcttctctgtaggggggtcactttggtcgatggagggggggacgaagaaagttttcacagttcaggtggaggatggaaagcccaggaaggacggccggccggcggtagggccagtgttcaggagtgcactgtcaaaggatggattcccgccacttgagcctgacatgaaaacatcatgggacgtgttcagggtcgcagcaggcaagtacccagataatcggatgctcggatggcgtcctgtaaaagatggagtgatagggccatacatatggaaatcatacaggaagtgtatgaagaagtcctgcaagttggatctgctttgcagcagctgggggtgaagccaggttccccgattggaatatatggat

SEQ ID NO: 416197 - DNA, 510 bp, Oryza sativa
  unsure (1)..(510): unsure at all n locations
gatgggggggagggcaaagcgatggctccgatgaagctgtacgggtcgacgctgtcgtggaacgtgacgaggtgcgtggcggtgctggaggaggccggcgccgagtacgagatcgtgccgctcgatttctccaaaggcgagcacaaggcccccgaccacctcgccaggaacccctttggtcaggtgccggctttgcaagatggtgacttgttcctctgggaatcacgtgcaatttgcaagtatgtatgccgcaagaacaaaccagagctgttgaaggatggcgacctcaaggagtcagcaatggtggatgtgtggcttgaagtggagtccaaccagtacactcctgcactgaaccccattctttntcagtgcctaatccgtccgatgatgtttggggcaccccccgacgagaaagttgttgaggagaaccttgagaagctgaagaaagtgttggaggtgtacgaggcgcgcctgacgaagtgcaagtacctggctggagactacatcagt

SEQ ID NO: 416198 - DNA, 543 bp, Oryza sativa
gactgctttcgccttctgggcggcggcgccggcgtcgcggcggtgctggcgtccggcgcggagcgcggcatccgcggcgacgatgccgacgtggcgcgccgcaagaaggcgttcggatcgaacacctacccgaagcccaagcccaaggggttcttccgccacgtgtgggacgcgctcgccgacgtcttcctcatcgtgctcctcgtctgcgccgccgtctccctcgccttcggcatcaaggagcacggcatcaaggacggctggtacgacggcgtcagcatcttcctcgccgtgttcctcgtcgccgcggtctccgccgtcagcaaccacagccagggcaagcggttcgacaagctggcacgggagtccgagaacatcatggtcagcgtcgtccgcgccgcgcggcgccaggaggtgtccatattcgacgtcgtcgtcggcgacgtggtggtgctcaagatcggcgacgtcgtccccgccgacagcgtgttcctggacggccacgcgctgcaggtcgacgagtcgagcatgacccgcgagccg

SEQ ID NO: 416199 - DNA, 498 bp, Oryza sativa; identical to SEQ ID NO: 393932
  unsure (1)..(498): unsure at all n locations

SEQ ID NO: 416200 - DNA, 510 bp, Oryza sativa
gtgttagtttatgctgggaagatgggaaatatatggggggactaatacttaaagctacactggacagaacacggagattaacggaggagtactctgaagcacttctttctatattccctgaaaaagtaatggttattgggaaagcccttggaataccagataacagtgtgagaacttacacagaggcagaaattcgtgctggcattgtttttcaggtatctaaactatgcacagtacttcagaaagcaattcgagaagtacttggatcaactggctgggatgttcttgttcctggagtggcccatggaactctgatgcgggtggaaagaattcttcctggatcattaccttcatctgtcaaagaacctgtggttctaattgtagataaggctgatggagatgaagaggtcaaagctgctggggataatatagttggtgttattcttcttcaggaactacctcacctttcacatcttggtgttagagctcgtcaagagaatgttgtatttg

SEQ ID NO: 416201 - DNA, 388 bp, Oryza sativa
gttgtcacctccacgaacccaccaaatctccatcgctgcggctacactgctccggccatggccatcgtcgccgtcacggccggaggacggcgccctccctgccgccgcgtgccgcccgccgcttccccgcccgcgaggctctcctgccgctgtgccacccacaccgttcccaggaggaatgtactatccacaatgctatccacttcaacagtcttcctcttcggaccgaaacagatcacactggccgagacaactggtggtacattcagggagtacatcgacacattcgatggctactccttcctctacccaaagagcctgatccaggtcccgggaagctgtgctgacatattcttcagagacccgtttcttctcgacgagaacatgt

SEQ ID NO: 416202 - DNA, 543 bp, Oryza sativa
atctgatgtgatttcttgatatcctaaatataagattaatacttcacgttgctgagttgagaaaaagatggttgaatcaaaagaattctttttttgaagttcattttttatcaggggacaatatgaatattataccgtgttccattaaaacactcaaggggttatacgatatatcgggcgtagaagtaggccaacacttctattggcaaataggaggtttccaaattcatgcccaagtacttatcacttcttgggtcgtaattactatcttgctaggttcagttatcatagctgttcgcaatccacaaaccatcccaaccgatggtcagaatttcttcgaatatgtccttgagtttattcgagacttaagcaaaactcagattggagaagaatacggtccctgggttccctttattggaactatgttcctttttatttttgtttcgaactggtcgggtgctcttttaccttggaaaattatacagttaccccatggagaattagcagcgcccacgaatgatatacatactactggtgctttag

SEQ ID NO: 416203 - DNA, 529 bp, Oryza sativa
gcgcaaagccctcgcctccctcctcctcctcgtcgccgccgccgccgcggtctccaccgcgtccgccgacgacgtgctcgccctcaccgagtccaccttcgagaaggaggtcggccaggaccgcgccgccctcgtcgagttctacgcgccatggtgtggtcactgcaagaagcttgcccctgaatacgaaaaactcggtgcaagtttcaagaaagccaaatcagtcctaattgcgaaggttgactgtgatgagcacaagagtgtgtgcagcaagtatggagtttctgggtaccccacaatccaatggttccccaaaggttccttggagcccaagaagtatgaaggtcaacgtaccgcggaagcccttgcagaatatgttaactctgaagcagccaccaatgtaaagatagctgcagttccttctagtgtcgtggttcttaccccagagaccttcgactctgttgtccttgatgaaaccaaagatgtccttgtagaggtctatgccccatggtgtggtcactgcaagcat

SEQ ID NO: 416204 - DNA, 512 bp, Oryza sativa
  unsure (1)..(512): unsure at all n locations
tcgcttcaacatgaagatgccattgctactcctcatcgccatcgtcgtcgtctccctctcccgtggcaacggggagcagaccgacctcacgcgggagacgttccccgcgggcttcgtcttcggcaccgcgtcgtcggcgtaccaggtggaggggaacgccctccagtatggccgagggccctgcatctgggacaccttcctgatgcaacctggtgtaactcctgataattcgaccgcgaatgtgaccgtcgacgagtaccaccgctacatggatgatgtggacaacatggtgagagtgggcttcgacgcgtatcgcttctcgatctcctggtctcgcattttccccagtggacttgggaagattaacaaagacggcgtggattattaccacaggctcattgattacatgcttgctaacaacattattccatatgttgagctctaccactacgaccttncacaggtgctgcatgatcaactacagggatggctacaccccagaattgtgagag

SEQ ID NO: 416205 - DNA, 494 bp, Oryza sativa
  unsure (1)..(494): unsure at all n locations
tttcaattctccttgctggaatattgtgcatatatataaactatgactgtgatcgtcagcgccaagaattccgtcggacaaatgggaaatgctcaatatggggcaaagctccatctaagattgttgcttcctatcagactacaaatggagaaacaaaaagcagtcttctcttgacttctggatggttaatatattcgtcatttcttctttacatagttcatcaaaagtgatttgtaccatgtttgtttcaatagaggcaatgaatggcttttgagcatgcaccctcattttccatttggacaggtggggcttgtctcgtcattttcactatgttccagagattctatctgcttttttctggacagttccagctctttntgatcatttcctgccgtacttctatgtgatctttctgaccatattgctgttcgaccgagctaaaagggatgatgaccgatgctcatcaaagtatggcaagtattggaagatgtact

SEQ ID NO: 416206 - DNA, 331 bp, Oryza sativa
ttgtaatggggcacatgatactgctaagctggctggtctccttgagaacttcatcaagaagtatgtccaatgctatggatgtggcaaccctgagactgaggtcctaatctccaagacccagatgattacactgaagtgtgctgcctgtggttttgtgtcagatgttgacatgagggacaagctcacaacttttatcctgaagaatccacctgaacagaagaagggtgctgggaaagacaagaaggcaatgaggagagctgataaagagcgtctaaaggaacgtgaggctgctgatgatgactttacgaagctaaagaaggacgcaaacaag

SEQ ID NO: 416207 - DNA, 445 bp, Oryza sativa
  unsure (1)..(445): unsure at all n locations
tgggctggtggcataaggcagcagcgattctcgccggggccgccgcccgccgccgcagtgccacgatggaccgcccgcccgcgccagcgccagcggtggcgctgctcctcgtcgtcgtcgtcgtcgcggcggcggtaatgctggcggcggtggagggagcgggggcggaagcaacaggggtgttccacgtgcgccgcagcctccccnccggtggtgcgggggcggcggcggaggcgtaccgagcgcacgacgggagccgaggggggaggctcctcgctgccgccgacatccccctcggcggactcggcctccccaccgacaccgggctgtactacacggagatcgggatcgggacgccgaccaagcggtgctacgtgcaggtggacaccggcagcgacatcctttgggtgaactgcatcntctgcgatcgatgcccacgncagag

SEQ ID NO: 416208 - DNA, 517 bp, Oryza sativa
aggtatacttgttcaggtcgagcagcggcgactgcgcggcgttcctgtccaacttccacacgagcgcggcggcgagggtggcgttcaacgggcggcggtacgacctcccggcgtggtccatcagcgtgctgccggactgcaggaccgccgtgtacaacaccgcgacggtgacggcggcgtcgtcgccggcgaagatgaacccggcgggcgggttcacctggcagtcgtacggcgaggccaccaactcgctggacgagacggccttcaccaaggacggcctcgtcgagcagctcagcatgacgtgggacaagtccgactacctgtggtacaccacctacgtcaacatcgactccggcgagcagttcttgaagtccggccagtggccgcagctgaccgtctactccgccgggcacagcgtgcaggtgttcgtcaacgggcaatacttcggcaatgcgtatggtggctacgacgggccgaagctgacgtacagtgggtacgtcaagatgtggcagggcag

SEQ ID NO: 416209 - DNA, 499 bp, Oryza sativa
tgatgatgcatggcttgctcttaccatgaagctattggattgtttcaattctagtcttgcttatacatcaaatgagcaagaatggaagatattaattgggatattgtgccttattttaaaccattcagcaaacaaggtgcttattgagcctgcaaaagccataatcttgaataattgtttggttttgttgatggatggtatagttcaagaagcttgtgcaaagggcccatctttatttcaacacaatcaggagacaacctttggggaattattgattcttatgcttttattgatatttttctctctacgaagcctgcaagcgatcttagaggcaagcattgactggcaggaattcctgcaatattcagatgacactgagtcttcctctgttcttggcattccgtgccatgatttgtgtcgtctcatgcactttggcccttcttccgaaaagctattgcttcacaatgcctgttggaattgcttaacagaatttcagatc

SEQ ID NO: 416210 - DNA, 438 bp, Oryza sativa
ggtttccttcaccatggccctctcgtccccggcgctggccggtaatgccgacgcgaaggtgttcggcgaggggcgcatcaccatgcgcaagtcggcggcttaagcccaagcccgccgcgtcggcgagcccgtggtacggcgccgaccgcgtgctctacctcggaccgttctctggcgagccgccgagctacctgaccggcgagttccccggcgactacgggtgggacaccgcggggctctccgccgacccggagacgttcgccaagaaccgggagctggaggtgatccactccaggtgggcgatgctcggcgcgctgggctgcgtgttcccggagctcctcgcccgcaacggcgtcaagttcggcgaggctgtgtggttcaaggcggagtcgcagatctttagcgagggcgggctcgactacctctggaacccgagcc

SEQ ID NO: 416211 - DNA, 411 bp, Oryza sativa
cggttctctaaaacctctcccgctccacgcgcggggcgcgtgaaaccctagcgagaggcgccagatctcccgcatccggatcgccgccatggccgccgccaccgcgctggactcgctgccggcgccgctccggtcgctgcggctgaagacgaagcagcaggagctcctgctccgggtctcggcgctggcgctcatctacgtgctcgcgttcgtcgtccgcctcttctccgtgctccgctacgagtccatgatccacgagttcgatccctacttcaactaccgcaccacgctcttcctctccgaccatggattcagcgagttctggaactggttcgatttcgagagctggtacccgctcggccgcgtcgtcggcggcaccctcttcccgggcctcatggtcaccgccgcgct

SEQ ID NO: 416212 - DNA, 481 bp, Oryza sativa
ctctatcattgctcatcatcacaatcatcaacagctcagttcatccgtgccgtgttaatttagctagctagcaatcgagctcagttttcctaattaattgctagctcgatttgctcggtgatctcttcaattcgccggagcttggaatcaatcgagagattagagtgtacgtgagagctagcgggagatcgtcggcggcgatggtgaacacggcggcggtggcggcggcgaagggcagcaggggcagcgggctgccgctggcgtcgctgaaccacatcagcatcgtgtgcaggtcgttgcaagagtcgctcaccttctacaccgacgtgctcggcttcttccccgtccgtcgccccggatccttcgacttcgacggcgcatggctgtttaattatgggattggtatccatctgcttcaggctgaagatcctgacagcctgcccaggaaaacagagatcaaatcctaagataatcacatctc

SEQ ID NO: 416213 - DNA, 425 bp, Oryza sativa
gtttatccgtggcgcatcccatctcgccccggcgactcgtcggcgtcggcgtcggccatgggcggcgactggcaggagcttgcccaggcggcggtaatcggcctcctcttcgccttcctcgtcgccaagctcatctccacggtcatcgccttcaaggaggacaacctgcgaatcacccgctccacgccgacctccccctgcggcgtggacacccccgtcgccccggccccacctgcggcctgcctcgacggcggccatggggacaccagcgacggcagcggcagcgacagcgacagctactgggagggcgtggagagcacggagctcgaccaggagttcagcgcccgctccgagttcgtcgtcggctccgctgcgtctggcacgagcgtccccgagcaagcccagcttcagctctatgggctcta

SEQ ID NO: 416214 - DNA, 443 bp, Oryza sativa
gcttcagatgaagcagctgtttgtagacaaggtgtttgtggaaatgtcgtcgtcgtcgctgtcgccggcggggtcgtcggacggggactcggcgggggtggtggtggcggcggaccaccggagggagaagcggcggctgtcgaacagggagtcggcgaggcggtcgcggctgcggaagcagcagcacctggacgagctggtgcaggaggtggcgaggctgcaagcggacaacgcgcgcgtgctggcgcgcgccagcgaaatcgccgggcagtacgcgcgcgtggagcaggagaacacggtgctccgggcgcgcgccgccgagctcggcgacaggctgcgcagcgtcaacgaggtgctccgcgtcgtcgaggagttcagcggcgtcgccatggacatccaggaggagtgcccccccgacgacccgctgctccggccatggcaga

SEQ ID NO: 416215 - DNA, 489 bp, Oryza sativa
catgaagctcagctcctcctcctctcgcatggcagccatggccaccaccgcgtccagcctcctcaagacctccttcgccggcgtgcgcctccccgccgccgcccgcaaccccaccgtctccgtcgcgccgcgcaccggcggcgccatctgcaactccatctcgtcgtcgtcgtccactcccccctacgacctcaacgccatcaggttcagccccatcaaggagtccatcgtgtcccgcgagatgacccggcggtacatgaccgacatgatcacctacgccgacaccgacgtcgtcgtcgtcggcgccggctccgcggggctctcctgcgcgtacgagctctccaaggacccctccgtcagcgtcgccgtcatcgagcagtcggtgtcccccggcggcggcgcgtggctcggcgggcagctgttctccgccatggtggtgcgcaagccggcgcacctgttcctcgacgagctcggcgtcgcgtacgacga

SEQ ID NO: 416216 - DNA, 430 bp, Oryza sativa
aatttaaggaaaaaaaaacaaaacacaccaagccaaatagaagcgacaatgggatcgctcaccaccaacatcgtcctcgccgtcgccgtggtggcagcgctggtcggcggcggttcgtgcggcccgcccaaggtgccacccggcccgaacatcacgaccaactacaacgccccgtggctgcccgtcagggccacctggtacgggcagccctacgggtctgggttcaccgacaatggtggtgcgtgcgggatcaagaacgtcaacctgcctccctacaacggcatgatctcctgcggcaacgttccaatcttcaaggacggcaggggatgcggctcatgctacgaggtgaagtgtgagcagccagtggtgtgctcgaagcagccggcgaccgtgctcatcacggacatgaactacgagcccatctcggcgt

SEQ ID NO: 416217 - DNA, 441 bp, Oryza sativa
tcgattgttactgagattgaccccatctgtgccctccaggcccttatggagggtctccaggtcctcaccttggaggatgttgtctcggaggctgacatctttgtgaccaccactggcaacaaggacatcataatggttgaccacatgaggaagatgaagaacaatgccatcgtttgcaacattggtcactttgacaatgagattgacatgctcggccttgagacctaccctggtgtcaagcgcatcaccatcaagcctcagaccgaccgctgggtcttccctgagaccaacactggcatcattgtccttgctgagggtcgtctcatgaaccttgggtgcgctactggccaccccagttttgtcatgtcctgctcattcactaaccaggtcattgctcagcttgagctgtggaaggagaagagcactggctagtacgagaag

SEQ ID NO: 416218 - DNA, 513 bp, Oryza sativa
ttgtactaatttcggagaacagatgaacctgaaaaacaaactgctgatgagacaggaccttttggtggaataatgacagagtgtggcaccaatcaacctattgagaaagtactcgcacctgaagatgcggagtgttgcatttgcctttcggcatatgatgatggtgcagagctgcgtgaacttccttgtgggcaccatttccactgtgcctgcattgataaatggctgcatatcaacgcaacatgccccctgtgcaagttcaatatccggaaaagtggcagtagcagtggaagtgaagaagtatgattgtgtgaatatcctccggtcgagaacaccgatccatttcaacttcacacctgtctctgctaatgcaaccacaggacctgaccagtgtaaattttgtatccaaaatgtgtgattagcgtcatatatgtacttgaagtgactcaagactgctgttcatatccacatacatggttgtccaatgtgtcttttactgaccggaatacatgc

SEQ ID NO: 416219 - DNA, 526 bp, Oryza sativa
tcgatttcagtgctccagcaaagaaacttggttttggtctgattggctctggcaagcggacatctgtaccttcagtttttgctgaagaggatgacgaagataatgatgataagcgggcaagacctttagttcctattgattactcaacagaggaactgcaagctgttcaggccaattcttctactggccaaccaaatattgtagcagctgctgaatttgccaagcgcatattggtaacaaaggatgataaatctgatgttgagaaggataggagtaggagatcaagtgatagaacgaaccaaagggatagagatagaaatgatcaagatgttggtcgcaccggtgatgagagaagggaaaagacacatgaccgagagaaagataagcacgataagccaaagtctgagaacaagaatattttggatgcaaacaattaattgacatgattccgaggacaaaggaagagctttttgcctatgatattaattgggcgatatatgacaagcatgagttgcatgagagaatg

SEQ ID NO: 416220 - DNA, 457 bp, Oryza sativa
atgtagctgtgtcaaatggtgacacaaggcatgtgggatcgtgattctgttcttttacaacttccacatttcaccaaggagttggcacggagatgtcaggagaatgaagggaggcccattgagagcatctttgatctggctgagatgagcatcgatgagatgcgggatctgttgcagcaatcaaaccctcagctgcaggatatcattgaattcttcaagcgtttccccaatgtcgatatggcttacgaagttcgcgagggtgatgatatcagggctggtgacaatgtaactgtacaggtgaccctggagcgtgacatgacgaacttgccttctgaggtggggccagtttatgcccccaggtaccccaaagccccaagaaagaggctgggtgctggtaattggtgatagctctaccaatcagttgcttgcaatcaagagggttgcacttcagaagagg

SEQ ID NO: 416221 - DNA, 438 bp, Oryza sativa
ccatgatgctcgacgccggcaagagcttcggccgcccgcacggggtggtcatcaacggcaagtccggcaaggccgccgccgacccgcccatgttcaccgtcgaggccggcaagacgtaccggctccgcgtctgcaacgtcggcatcaaggcgtcgctcaacttccgcatccagggccacgacatgaagctggtggagatggagggctcccacacggtgcaggacatgtacgactccctcgacgtccacgtcggccactgcctctccgtcctcgtcgacgccgaccagaagcccggcgactactacgcggtggcgtccacgcggttcatccacgaggccaagtcggtgtcagccgtcatccgctacgccggctcgagcacgccgccgtcgccggccgtgccggagccgccggcgggatgggcgtggtcgatcaaccagt

SEQ ID NO: 416222 - DNA, 490 bp, Oryza sativa
  unsure (1)..(490): unsure at all n locations
gttttaccatcaatggaggtcgccgccatggagatctctacctcattgctcctcaccaccgtggctctctccgtcatcgtgtgctacgccctggtcttctcccgcgccgggaaggcgcgtgcgccgctgccgctgccgcctggccccaggggatggccggtgctgggcaacctgccgcagctgggcgggaagacgcaccagacgctgcacgagatgaccaaggtgtacggcccgctgatccggctccggttcgggagctccgacgtggtggtcgccggctcggcgccggtggcggcgcagttcctccgcacccacgatgccaacttcagcagccggccacgcaactccggcggcgagcacatggcgtacaacggccgggacgtcgtgttcgggccgtacgggccgcggtggcgcgccatgctgaagatttgcgccgtcacctcttttncgcgcgcgcgctcgacgacctgcgcgcttttctggagcggga

SEQ ID NO: 416223 - DNA, 541 bp, Oryza sativa; identical to SEQ ID NO: 389287
  unsure (1)..(541): unsure at all n locations

SEQ ID NO: 416224 - DNA, 496 bp, Oryza sativa
attcggtgcctctgcccggagccgaactccgacgccttatcgactcactcaccaagtgctcgacgcaattccccaccggggagcccgcccgccatgccggagagcaacggcgccgcgtgcggcgcggcggagaaggtgaagccggcggccagccccgcgtcggaggagccggccgccatcgccggtaacatctccttccacgcgcagtacagcccccacttctcgccgctcgcgttcggccccgagcaggccttctactccaccgccgagagcgtccgcgaccacctcgtccagagatggaacgagacgtacttgcatttccacaagacggatccgaagcagacgtactacctctccatggagtacctgcagggccgcgcgctcaccaacgccgtcggcaacctcggcatcaccggcgcctacgcggaggccgtgaagaagttcgggtacgagctcgaggccctcgtcgggcaggaaaaagatgcagctctgggaa

SEQ ID NO: 416225 - DNA, 487 bp, Oryza sativa
tcgatctatcggcgatggtcgccgccgaggagaacccggagtccttcttcgcggcggcgccgccgctgcgggacgccgacgccgtggccgcgaggctgggggaattcatcgcccgcaactcctccgcagcgggcgcgggcggcggcggcaggcggatcgtgtgcgtgacgtcgggcgggacgacggtgccgctggagcagcgctgcgtgcggtacatcgacaacttcagctccggccaccgcggcgccgcctccaccgagtattttttgaaggctggctatgcagttatcttcctccatcgacgaggaagctgccaagcttattgtaggttcctccccgatgattcattcctcaaattctttgatgtcgatgcagaatcgaaggttcaagtggcggagtgccacgcgccagtggtcaagaaagcattggagattatgcaaggcattgagggggtatctgttgaaactccattcactaccatattgat

SEQ ID NO: 416226 - DNA, 431 bp, Oryza sativa
tcgctatattcccaaaggcaacagacttttcttttgctaacaagcttaagcagcacttgaggggaaactctgccttcaggggtgaacaagaaggtgcttttaagatttgccattatgctggagaggtgacgtatgatacaactggtttcttggagaagaacagagatccgttgaactctgagttaattcaactactctcatcatgtaaatctgaactcccaaaatactttgcctctgtcatggttgctgattctcagaataaatcaaccttgtcatggcactcagctgttgattcacaaaagcaaagtgtcgtgaccaaatttaaggctcaactgttcaagctgatgcagcaattggagaacacaactcctcatttcattcgatgcatccagccaaatagcaaacaacgtcccatgctatttgagcatgat

SEQ ID NO: 416227 - DNA, 495 bp, Oryza sativa
tcgctctcctcctcgtctaccttacctagcagcagcagctagctagcttaattagctatagcagccatggcggcgacggcactgagcagccaggtccggttgccgatgtccctgcgggtggcgacggcgccggcgccggcgcgcgtgtcggtgctgccggcgagcaacaagctgggagacaggctgcggatgcaggcgacgtacaacgtgaagctgatcacaccggacggcgaggtggagctgcaggtgccggacgacgtgtacatcctggaccaggcggaggaggaagggatcgacctgccttactcctgccgcgcgggctcctgctcctcctgcgccggcaaggtggtctccggcgagatcgaccagtccgaccagagcttcctcgacgacgaccaggttgccgccggctgggtcctcacctgccacgcctaccccaagtccgacgtcgtcatcgagacccacaaggaggacgacctcatctaatcaatcaag

SEQ ID NO: 416228 - DNA, 499 bp, Oryza sativa
  unsure (1)..(499): unsure at all n locations
tcgcatgctacgaggtgaagaagctgagagtgatcgatcgatcgagtgttcgacggcggcggcgaggtcgaagatggtggacatgaacgacgtgctgctggtggtgtcggcggcggtgctggcggcgatgtggtggcggcggtgttccaggaccggcggcgccgacggcctcccgccggggccgccggggtggccggtggtcggcaacctgttccaggtgatcctccagcggcggcccttcatgtacgtggtgcgcgacctccgcgagaagtacgggcccatcttcaccatgcggatggggcagcgcacgctcatcgtcgtcaccgacgccgacctcatccacgacgcgctcgtcaagcagggcgcggcgttcgccagccgccccgaggacagcccgacgcggctgctcttcagcgtcggcaagtgcaccgtcaactcggcgccgtacggcccgctctggcgcgcgctccgncgcaacttcgtcgccgagatcgtgtcg

SEQ ID NO: 416229 - DNA, 392 bp, Oryza sativa
  unsure (1)..(392): unsure at all n locations
acgcattctgtttatggttccttaaagcacggaaatttgatgttgagaaagcaaagagtatgtggtcagatatgcttaaatggagaaaggaatttggggctgacaatatagaggagtttgactacaccgaggcggatgaggttatgaaatattatacacaattttacgatggagtggatatagaaggaaggcctatctacatagagttaatacgaaaagttgatgcgaataagctaatgcaagtaactactatagagcgatatgtgaaatatcatgtgaaggagtttgagagatgctttcaaatgagagttcctgcctgctcgattgctgcanaaaggcccatagattcatctactactattctggacgcgcaaggcgtgggtttaaagaac

SEQ ID NO: 416230 - DNA, 570 bp, Oryza sativa
catttcttgttctcaatcagcaacaacatctatctccttcttgcttagttaagtccttcgccctcccaagaagaagaagatgtcttgctgcggcggaaactgcggctgcggcagcggctgccagtgcggcggcagctgctgccgatgcaagatgttccctgatgtggaggccacagccaccaccaagaccttcgtcctcgctgctccatccaacaaggcgagctctggaggaatggatatggccgtggagagcggagagaacggcgggtgcggctgcaacacctgcaagtgtggcaccagctgtcgtcgctgcttctgctgctcctgcaactgaatgtatcgtcgacgtcgcccggctgcatgaggatttatccgatggatgctgctactgtcgatcagagctttgatcgaggccttattttgcttgcattagtacccagcttatatgtacgcagccctgccttttgctctgacgcctaaataaaaccgtcgtcgtccgtgtcagtgtgtgcgggtgtcgatcaatgttggatggatccctagctaggctggatggatcatctatcatca

SEQ ID NO: 416231 - DNA, 509 bp, Oryza sativa
ccatatatcgtagagaaaaaaaaatctcccctcgaagcgaagcgtcgaatcgccttctcaagatgcagatctttgtgaagaccctcaccggcaagaccatcaccctcgaggttgagtcctcggacaccattgacaatgtcaaggccaagatccaggacaaggagggcatccccccggaccagcagcgtctcatctttgctggcaagcagcttgaggatggccgcaccctggccgactacaacatccagaaggagtccaccctccaccttgtgctcaggctcaggggaggcatgcagatcttcgtcaagaccttgactggcaagaccatcacccttgaggtcgagtcgtctgacaccattgacaatgtcaaggccaagatccaggacaaggagggcatccccccggaccagcagcgtctcatcttcgctggcaagcagcttgaggatggccgcaccctggccgactacaacatccagaaggagtctaccctccaccttgtgctcaggctc

SEQ ID NO: 416232 - DNA, 276 bp, Oryza sativa
aggataatttgtgtaagccgtcaggggcagcggctgctaccgtcggtggcggcggaggcgatggcacggctcgtcctctccgagtgctgcggcctcacgccgctccgcctgcgcgggcgcggcgccattgcgctgccggcgcctcccagcctcgccgcggggccgcgccgccccgtgtccgccgccgccgcggggggagccatccaccgcgagtgggcgctccgcgtctccgcccccacccgcctcacctccgtcgtcgaggaggataatagaggg

SEQ ID NO: 416233 - DNA, 437 bp, Oryza sativa
gtttcggcccacgacccacgcgttcggtttatggtgcactagagcaaagaaggagagagcttggtgagctgcagagatggccccctccgtgatggcgtcgtcggccaccaccgtcgctcccttccaggggctcaagtccaccgccggcatgcccgtcgcccgccgctccggcaactccagcttcggcaacgtcagcaatggcggcaggatcaggtgcatgcaggtgtggccgattgagggcatcaagaagttcgagaccctctcctacctgccaccgctcaccgtggaggacctcctgaagcagatcgagtacctgctccgttccaagtgggtgccctgcctcgagttcagcaaggtcggatttgtctaccgtgagaaccacaagtcccctggatactacgacggcaggtactggaccatgtggaagctgcccatgt

SEQ ID NO: 416234 - DNA, 513 bp, Oryza sativa
tcggcatttgctagctagctcatcgtcgataccaatggcgactaccagggccacatcgacgctgctgctgctgctgctgctggtttcggcaacatgggcggcatcggcgccgacgacgagtcgggcgaggaacgtgataacacacgtgaaggggttccaagggaggctgccgttccacctggagacggggtatgtggaggtggacaacaccgataccgttgagctcttctactacttcatccagtcggagcgcagccccgccgatgaccccctcatcctctggatcaccggcggccccggctgctccgccctctccggcctcctgttagagattggccctctcaagtttgacgtatctgggtacacggaagggttccctcaattgttctacttccaagattcctggaccaaggtgagcaacgtgatatttctggacgcgccggtggggacggagttctcctacgcccgtgaggaacaagggtacaacgtcaccctcacacagacgggacagca

SEQ ID NO: 416235 - DNA, 531 bp, Oryza sativa
tcggcttaacagaaactcatagagtgtgagcaggtcatattgaatgatcctttccttggaaagcgcattgaggaagggaattttgtcactgttcctttgagagatgaattccttgaaaatgctcgtctgtttatctttgaaacttactgccgtattcatcggtgcattgatattggcatgctttctcagaagctgaacatgagctacgatgaggcagaattgtggattatgaacttagttaggaattcaaagctcgacgccaagattgattcagtgtctggaactcttatcatgacgaccaatcatgttaacatccatgagcaggttatcgaaagcttaaagaatcttaacatgcggactttcctgctagcaaagaacattgtggagccggctcaagcagcacaacaggcagctcggtgagattgacagagaagaccacagttttgaggcgcccggaattatttaagtagagacaatcctctaaacttttggagttttgttgtttagcattgactccgttatcagtaccta

SEQ ID NO: 416236 - DNA, 546 bp, Oryza sativa
tcggtctctgctccaagcagcaccagccaaacagttcaaaccaaattggctggaggctttgacaagctgctactcgacagcctctacgaagacgagacgaggcggcggcagatcgccggagtcacctacaccggtagcattggaggaggagcacccaaccctttcgacaccaacgatccatttgctacgtcgagcagcttcttgcccccatccaatgtccagtttgcaatgctgaaccagcagcagcatcagtactaccagtctcaacaccagcaacaatactaccagcctcatcatttccaggatcatcaacatcaccataacatgtattttcagacacattatcaacaaaatcagatataccaacaacagcagcagcagcagcatcagtaccctgcacctcaggctggatcttccaatccgtttggtgaccctttcggtgacctcgtaccaatggcaatggctgtcttctcaaaacatggacattcaagtttgatatgaatttgccatattcatgttgttaatgatcccaggcaatttaacata

SEQ ID NO: 416237 - DNA, 500 bp, Oryza sativa
ttggcttatcaatctctccttgctcctcctcccagcatcaaatcttcagaaaattcccccttcttcatcacatcaccagaatctatcacctctgtcactgttcttgatcacaaaaagttaagacagattttgctgttcttgctatcttccctgctctgctcatctcctctgctccagttcagaaattgctgctggttcttgcacattggtgctcatcaagaactgatcaggagctgaagaaatcttgtgagaagctgaagaaatgggagggaagaatctggtggtgttgttcttggtgtcggtggtgatggcgatggtgccagggagcacgcagctgcaggcgtcgcaaacatggtcgctgctcaagatccagcagatgctcggctacccggcggtgctcggccactggcacaactacaccgacttctgctacggcggcgactacaagaccacgtcggcgttcgtcgagtgctacggcgacagcgtcacgcagctgcaca

SEQ ID NO: 416238 - DNA, 136 bp, Oryza sativa
gagctcgttgccgtcaacgaccccttcatcaccaccgactacatgacctacatgttcaagtacgataccgtgcacggccaaaggaagcacaacgacatcaagatcaaaggactccaagactctgctcttgggcgag

SEQ ID NO: 416239 - DNA, 499 bp, Oryza sativa
acagtagccgccgccatcgccatctctcggacggaaaccgtagacgagcgaccatggccaccatgccaagcacttgcgcctcctcctcctccctcttcctcctcctccgcagggacaggaggagcagcaggagtgccagcctccccggacccgcccgccgtttgggggttgtgcgcgcctccgccaaggagatcgccttcgaccagggatcgcgatcctccctccaggccggcgtcgagaagctcgccgccgccgtcgccgtcaccctcggtcccagaggaagaaatgtcgtcttggatgagtttgggagccccaaagtggtcaatgacggagttaccattgctcgagctattgagctcgctgatccaatggagaatgccggtgctgctttgattcgtgaggttgccagcaagacaaatgactcagcaggtgatgggactacaaccgcatctgtcctggctcgtgagatcataaaattgggcctgctgagtgttacttc

SEQ ID NO: 416240 - DNA, 529 bp, Oryza sativa
gcatccagctcacatggacttccggttcttttctctggggaatttatggtccatagtaagcagcttggcaacaactcatcaatcccatgccattttggatctgattgaatccaaatggtctgatttagtggcagagatgccattgaagatatgctatcctgctctagagaaccaggaatggaagatcattactggaagtgacccaaagaatacgccttggtcatatcataatggaggatcctggccaacattgttatggcagctcacagtagcatctatcaagatgaacagaccagagattgctgcaaaagctgtagaggtagctgagaggcgaattgctatcgacaaatggcctgaatactatgacaccaaacgagcacgcttcattgggaaacagtctcgtctttaccaaacctggtctattgctgggtaccttgtggccaagcaactgctggacaaacctgatgctgctagaattctttcgaacgacgaggatgcagaaattcttaatgctttgagcacgaacagg

SEQ ID NO: 416241 - DNA, 538 bp, Oryza sativa
tccttctccatctccctctacacatctctctctttctctgtctctccctctcttcatctagcctgtgaagaaaggaggacaaggctcgtaggacgtgttcaaaaggacaagatcttctttgcagtacacagtggatgaaactccaaggctgattcaatttgccagtgtgtgagaaacgagaaacaaccaagaggctcatcaggatcaagtggctgatcatcatcatctctctctaggatgtagagctagtggtgatcatggtgcaaggtgaggagagttcttggaggatggcagcaagcacccaccatgagagagcaatacctctcaaccaagcacttgcttatggagtccaagcccatgcttctccttctgttgctgctgcaccacctgccagcttcttggacttccagcctgctgccgcggcagctgcctacttcggcgagctggaggaggccctcatccatggcgccaacgccggcggcgtcgtcgatcccggcatgatcagagccgacgtgcacagcaagtccgcggcagcggc

SEQ ID NO: 416242 - DNA, 413 bp, Oryza sativa
cgcgcgcacgcctgtccctcccctcctgctccgtcgcgccttgcagagtggaagaaaggaaggaaggctaaaaccctagggagcgcgcgagcgagcgagggctctatgcttccttgcgatgacggcgccggcggacaaggggaagaaggtcaagaccgacgccgacggctgtgccgcccatgagaacgagcagatcgacggcgccctcgtcctctccatcgagaagctccaggagatccaggacgagctcgtgaaggtcaatgatgaagctagtgacaaggttctggaggtcgagcaaaaatacagtgagattcgcagacctgtctatctccgaaagagtgacgttatccaaacaatacccgacttttggctgacagcgtttctgaggcatactctacttagtgagcttttga

SEQ ID NO: 416243 - DNA, 529 bp, Oryza sativa
tcgggagtaggagtaggagtgacgcctccggatttccgacgccttgacgaacccccacaaccccgagatcgatcgggaggaggacgaccacgcccttcacctgcccccaaatcttgccccgatctcccccgaccgcggcaatgggggccgcctccgacgacgccgtcaagcagctcgccctcctcatggaccaagtggaggcgccgctgaggaggacgtttcagaatgtgcaccagggctatcctaaagaaacattattgcgtttccttaaggccagagagtggaacgtatctaaggctcataaaatgcttgtagactctttgaattggaggattcaaaacgaaatcgatactgttctggagagacctatagtcccagtagatttgtacagatcaatccgtgattcacaacttgttggactctcaggatacacacaggagggtctcccagtttttgccgttggtgttgggcagagcacatatgacaaagcttcggtccattactatgtgcaatctcatattcagattaa

SEQ ID NO: 416244 - DNA, 455 bp, Oryza sativa
tcgaacttacccctctcactcccagatacctgctgcgggcactattgcactaccatggatgcttgcaagctccggccgtagagctcgttcgacacgaagacgacgacgacgaacgcgggagctccggtgtggaacgacaacgaggcgctgacagtggggcccagggggccgatcctcctccaggactaccacctgatcgagaagggggcgcacttcgcccgggagcgcatcccggagcgcgtggtccacgcccgcggcgcctccgccaagggctgtttcgagtgcacccacgacgtcaccgacatcacctgcgccgactttctccggtccccgggcgctcagacccccgtcatcgaccgcttctccaccggtatccacgagcgcggtagcccggagacgatccttgacccgcgcggggtcgccgttgagttctacacccgggagggcaactggga

SEQ ID NO: 416245 - DNA, 340 bp, Oryza sativa
tcggtttggttcgggtccggttcgatttcggtttttcggtcggtttgggggttggtgggaaagcatggcggcgccggatgttgagtaccgctgcttcgtcggcggcctcgcctgggccaccgacgaccgctccctcgaagccgccttctccacctacggcgagatcctcgagtccaagatcatcaacgatcgggagacggggaggtcgcgcgggttcgggttcgtgacgttctcgagcgagcaggccatgcgcgacgccatcgaggggatgaacggcaaggagctcgacggccggaacatcaccgtcaacgaggcccagtcgcgccgctccggaggcgga

SEQ ID NO: 416246 - DNA, 574 bp, Oryza sativa; identical to SEQ ID NO: 385436

SEQ ID NO: 416247 - DNA, 339 bp, Oryza sativa
ggcttttcattctgctcaggcaggagatgcattccatcagatgctgaatggtctcgctcgcaagcttccacatggcgaaaacgtcttcttgaagccaggggagagggccatgaactggactgctggaccggtgggcgacctgaagccttggtagcatgcatctcactgcctatagagatgtaaaaacttttgtgaaaaagatatatttacagacatgatatatacttgcgccttgagatcaccatggttgcatagtgctgaccataaatcaacaaatgtacattgtgttgtatctttttccctgatagctatataccatatatctgcattccaaaacaa

SEQ ID NO: 416248 - DNA, 427 bp, Oryza sativa
atcgttccatacaatcacgtcggtcgacgagaagaagtgagtgatggcgtcaccgacccggccggtgccgtacatgccgcgcccaccggcggtgccggagtggctgaacaccggggacaacgggtggcagctcgcggcggcgacgttcgtcgggctccagtcgatgcctgggctggtggtgctgtacggcagcatcgtgaagaagaagtgggccgtcaactcggtcttcatggcgctgtacgcgtacgcgtccacgctcatcgtgtgggtgctggtcggcttccgcatggcgttcggcgaccggctgctcccgttctgggggaaggccggcgcggcgctgacagaggggttcctcgtggcgcgcgcgtcggtcccggacacggcgcactacaggaaggacggcgccctggagtcgacgcgcaccgag

SEQ ID NO: 416249 - DNA, 534 bp, Oryza sativa
  unsure (1)..(534): unsure at all n locations
tttggttttcctctctctctctcgcatcgcatggatcggctcgtgtcgccgccggcggaggctgcggcgagccttcaccccccacccgcccaccgccggcgagccacggcgtgggcgacctcctctcctctcccgatcccctctcgcccttaggtaggggcttctccccagtccccaccacacgcgcgtgcgtggccgacgagcaccccaggttcggatcggatggaagaccagaagaaacatgcaaaaccagaggggtcttctggctcgcaaaggggagctcccccggcacctgatgcaggccttcccaatccttttgatttttctcagtttagcaacttgctcaatgatccatctataaaggagatggcagagcagattgcaagcgaccctgtgttcacccagatggcagagcagctgcagaagagtgctcatgtgaccggngaacagggtggccctgcattggatcctcagcagtacatggaaacaatgacacangtcatgcacaaccctcaatcatgtcaatggcagacg

SEQ ID NO: 416250 - DNA, 101 bp, Oryza sativa
ttcatatatgcatgcattactgtgtcatatatactacggtcaaatacgtactccatgtatgtgaaagaacagttaattaataagctatatatcctagttct

SEQ ID NO: 416251 - DNA, 548 bp, Oryza sativa
  unsure (1)..(548): unsure at all n locations
gaaggaaggtagaagagcaggaggagcccaacgcccgcgaaaccctagccctcgcgctcgcccaccgccttcctctccccccctaccctaccccgagctcgccacccgatccgatcgaagatgcataagctggggagaggaagccgcgacaaggtgcagcagttcatgaccataactggtgcgagtgagaaggtcgcccttcaggccctgaaagctagtgattggcacttggaaggagcttttgattttttctacagccaaccacaaatttctctgacgaactctcggcatcttgaagatctgtacaacagatacaaagaacctgatgttgatatgatcatggtggaaggtgtatctcagttttgcactgatcttcaggtggatccccaggatattgttatgcttgtcatatcatggcacatgaaagctgccacaatgtgtgaatttactcgccaggaattcattggtggactgcagtcaattggggtggattcaattgaaatgctccgtgagaaatngccatctntacgggctgagataaaagatga

SEQ ID NO: 416252 - DNA, 494 bp, Oryza sativa
gtctgttaatcatctgcgaagccataaaaatccggagatacagaagaaggcaaagtgtcttgtcgaaaattggaagaagcgcgttgatgctgaaatgaagtcaaatgatgtgaaaccagtggtatcaggtcaggctgtatcctggccaggcaaacctgggtttccagaaatttctagtgctggaaacagacgaagtggctcaagtgagtctagtctgaaaagcccagtgtctcagctttcttcatcgaaggccttgacttctaaacctgtagccgccgatgctgctgcgaaatcgagtccagtgatatctggttcttcaaaattgcaacatatgcaaccaggaaatgctgtaaccaacttgaaggagcaaccctccaaatcaactggtggcacttgtggctctgagctgcctgcagtgaaagaggagaaaagcagcagttcaagccagtctctgaacaacagccagtcatgttctagtgaacatgcaaaaacaa

SEQ ID NO: 416253 - DNA, 530 bp, Oryza sativa
  unsure (1)..(530): unsure at all n locations
ttgtttcttacaccagtaaaaaaggatgaacctcccattgaggaaaagaacattaactcatcagatggtggtgcattggaaaaaaaggatgcttcaagatcacacaggaaaaatggttttgcaagaccactcttgaaatgtgcagaagatgttatactaaatggtgatgtcgcaagtacttctgggaaagccattgcaagtttacaggtggaagcttctgatttggcaaacttcctcaccatggaccgaaatgggggttacagaggttctcaaactctcctaagatctgtactgtcagagaagcaggagctatgcttctctgttgtctcattgctctggcagaagctcattgcatctcccgaaatgcagatgtctgcagaaagtacatcagctcatcagggttggagaaaggttgtggatgcgctttgtgacgttgtttcagcctcaccgaccaaagcttcagctgctatcgttctgcaagtcaagatattgatattgtatacttacatactngttatcatatttaaaag

SEQ ID NO: 416254 - DNA, 325 bp, Oryza sativa
ttcattagagaagaatcctatttgacttattggatcggcatggtcagcataccgtatgatcaagagatggctttccaaacagctgcttcaatgaggaattcactggagggaccgcctattttgggtcaggttgatcacgggacagaaccacctcagtttatagacctttttcaggccatggtcattctaaagggtggaatcaggtctggataccagaagtccagtgactaaaatggcttgtaggatgaactcatattctagccactgcatccgtctttgctgaatctctggagcatccattgacatcagtatagtgcttaaagct

SEQ ID NO: 416255 - DNA, 508 bp, Oryza sativa
tccgtctccgcgtcgccccgccgcgcgcctcctccccgcctcgccgccggcgcgcaccttctcgcggatcgcgatgcacaagacggcgcaggcctggttcaccggcggccccgccgtccccgccgcctccgccggcgagtcgcagccgtccctcctcgccgactggaactcctacgccgtctcccgccccgacgcctcctcctcctcccctctccctttcgacatcgaggccgccgtccgctccgccaacgacaccgtctccggcaccttcagcgtggtgaccaagggcgtgcgggagctgccggggagcttccagagcgcgacgagcagcttcccgtcggggaaggcgctcatgtacttcggactcttcctcgccaccggcatcttcttcgtcttcatcgcgttcgcgctcttcctccccgtcatggtgatcatgccgcagaagttcgccatctgcttcacgctcggctgcgggctcatcatggcatccatcttcgcgctcaaagga

SEQ ID NO: 416256 - DNA, 534 bp, Oryza sativa
  unsure (1)..(534): unsure at all n locations
ctactttctttctccggctcttcttcagtatcgaatgctctcttctccttgtgcccaccaccaccaccgtagcaatggcgggcaacgggccgatcaacaaggaggacccgctcaactggggcgcggcggcggccgatatggccggcagccacctctacgaggtgaagcgcatggtggcgcagttccgcgagccgctggtcaagatccagggcgccaccctccgcgtcggccaggtggacgccgtcgcccaggccaaggacgccgccggcgtctccgtcgagctcgacgaggaggcccgcccccgcgtcaaggccagcagcgagtggatcctcaactgcatcgcccacggcggtgacatctacggagtcaccaccggctatggtggcacctaccaccgacgcaccaaggacggccccgacctacaagtcgagctgctcaggcatctcaacgccggaatcttcggcactggctacgatggccacacgctgccgacggagacagtgcgggcggncatgctcgtgcgcatcaacaccc

SEQ ID NO: 416257 - DNA, 554 bp, Oryza sativa
  unsure (1)..(554): unsure at all n locations
gccttgtacataatatcaggagtagcttgcattctcctatatcttgagtacaagcacattgctaggctgaggctccgtcatcttacttgtgcaatgcccaatccaagccattttactgtccttgttcgtggaataccaaaggaaaccaaagaatcatgcagtaatgctattgatgatttcttcaccaagtaccatggatcaagctacctgttccatcaagttgtttacaaagttggaaaagttcagaagataatggtaaaatctgcactcgaagggatgtgctgcatataaatttgaacatattgtaataaagaatattgctgattgtttattgggaattttaaaagacggccttgatagttgttgtcatttgatattaattttgggtctactatcttgtagttgggtaatcactgggggaaacaagcaaaacctatcacattcttcccactaatttgattctcagctctgtgcttntatatagaagtagtgttcattaatctccngttccngaaatgaatttatggctttgcatattttatttcactttcttc

SEQ ID NO: 416258 - DNA, 509 bp, Oryza sativa
cagctatcgttggcggcggcgacgctggagaggcggtcctgcgacgatggtccacgtcagcttctaccgcaactatggtaagacattcaagaagccacgtcgcccttacgagaaggagcgtcttgatgcagagctgaagctagtgggtgagtatggactgaggtgcaagcgtgagctgtggcgtgttcagtatgctttgagccgtatccgtaacaatgcaaggcacctgctcacacttgatgagaagaatccacgccgcatcttcgagggtgaggcactgcttcgccgcatgaaccgttatgggctccttgctgatgggcagaacaagcttgattatgtccttgccctcactgttgagaacttcctcgcaaggcgtcttcagactcttgtcttcaaggctggcatggccaagtccatccaccatgctcgtgtcctgatcaggcaacgccacatcagggtcggcaggcaaattgtcaacatcccgtcgttcatggtgaggggtgagtctg

SEQ ID NO: 416259 - DNA, 528 bp, Oryza sativa
ctcgtctccgcttctccactctccggtagatcccaccctccaccgccgccgccgccgccgtgctccggtgagccgccggtgagccggagactacagcgacgtcgcgcagagccgttgggcgggtaggcggttgggggctttgcccgagatggcgacgatggggagcctgatcgggctggtgaaccggatccagcgggcgtgcaccgtcctcggcgaccacgggggcggcggcgaggggggttccctctgggaggcgctgccctccgtcgccgtcgtcggaggccagagttccgggaagtcgtcggtgctcgagagcatagtggggagggacttcctgcctcgtggatccggaatcgtgacgaggaggcctcttgtgctgcagctgcacaagacggagggtgggcaggagtacgccgagttcctccacgccccgcggaagcgtttcactgactttgcttgctgtaggaaagagatggctgatgaaaccgatcgcattactggaaaacgaagctatatcaaatattccca

SEQ ID NO: 416260 - DNA, 560 bp, Oryza sativa
  unsure (1)..(560): unsure at all n locations
cttgttatgtaatctagggttttgctccttctctcatccagtagcggcggccggcggcgagggcagcggcggcggcatggcgaaccgcacggaccccctggcgaagagcatccacgggacgaaccctcagaacctggtggagaagatcgtccggtccaagatctaccagagcacctactggaaggagcagtgctttggcctcaccgccgagaccctcgtcgacaaggccatggagctcgaccacaccggcggcacctacggcggcaaccgcaagcccacccccttcctctgcctcgccctcaagatgctccagatccagcccgacaaggacatcgtcgtcgagttcatcaagaacgaggattacaagtatgtccgtgttcttggtgccttctaccttcgcctcactgccaccgtcgccgacgtctaccaatacctcgagccgctctacaacgactaccgcatgatcaggcacatgctcagtgatggaaagtttaccctgacccacgtcgacgagttcattgacgacctnctcaccaaggactactnctgcgatacggccc

SEQ ID NO: 416261 - DNA, 471 bp, Oryza sativa
tattgttaccgacgacaaggaggggctaaacagcgagctggagaagcacattgaggatatgcatgtcttgatcaccacccctttccacccagcctatgttagcgcagaaaggatcaagaaggcaaagaacctcgagctgcttctcacagctgggattgggtcagatcatattgatctgccagcagctgctgcagcaggtttaactgtggcagaggttaccggaagtaacactgtgtcggtggcagaagatgagctcatgcgcattttgattttgctcaggaacttcttgcccgggtatcagcaggttgttcatggtgaatggaatgttgctggcattgcctatagggcttatgatcttgaaggaaaaactgtggggactgctggggctggtcgtattggcaggctcttacttcagcgtcttaagccctttaactgcaacctgctgtaccatgacatacttaaaattgaccc

SEQ ID NO: 416262 - DNA, 566 bp, Oryza sativa
  unsure (1)..(566): unsure at all n locations
cgcgtgaaaaagtcaaaagcagcagcagcggcggagcaaccaagcctacctccaccaaaatcttctccccccctctcctctcctctccacccgccggtgacccgagcccccccaccgcctcacgccgccgccgccgccgccgcggggagttccattccaccgggtcgccttccggccgtctcctgcagagaggttcatgaggggctcgaggatgaatccaggtgaccgtagaacgcggagcacgatgtccatcgtaattgtgatgagtttgtgctgcttcttttatatactaggagcttggcagaaaagtgggaccggaaggggggatagtattgcattgagggtgacaaaagagaccgactgtacaatcttgccaaacttgcactntgagacccatcatagcttaggtggtgttaatcctttggtcatgaccgataaagtctttgagccatgccatattcgatacagtgactatactcctngtcaggatcagaaccgagncatgaactnntctagagaaatatgaactaccgagagaggcatngtcctacagagactaagaaact

SEQ ID NO: 416263 - DNA, 475 bp, Oryza sativa
agatgttctcgagcaaagaaggagagagcttggcgagctgcacagatggccccctccgtgatggcgtcgtcggccaccaccgtcgctcccttccaggggctcaagtccaccgtcggcatgcccgttgcccgccgctacggctactccagcttcggcaacgtcagcaatggcggcaggatcaggtgcatgcaggtgtggccgattgagggcatcaagaagttcgagaccctcttctacctgccaccgttcaccgtggaggacctcctgaagcagatcgagtacctgctccgttccaagtgggtgccctgcctcgagtgcagcaaggtgggatttctctaccgtgagaaccacaggtcccctggatactacgacggcaggtactggaccatgtggaagctgcccatgttcgggtgcaccgacgccacccatgtgctcaaggagctcgaggaggccaagcaggcgcaccctgatgcat

SEQ ID NO: 416264 - DNA, 536 bp, Oryza sativa
ttgtccttctccccctccctccgagggcgagatcggaacaaggcccccacccaaccaccgtcgccgccgccaccggcgatcgccggcgacccccgggccacgggaggcgccccgccctcctcgccattggagaggaccttctctcctgctcggattcgtttgctctggtggtggtggtggggctttgctggcgcgaggccgcgcctgccatgccggagaccgggccctacggccacaagaagaccgacggcatctgcgacggcgtgtgcggcgagcctgcgtcaaaggcagttctgaccatgtcgaggctgagatgtgcacttcggggatttgatttcagagcactattggccctattgataggagtgccaattctaattttaatgatatatgctcatggtcagaaggtcacatacttcctcaggccaatatgggagtctcctcccaagcccttgaaaactatccctcattactaccatgagaatgtcaccatggcgaaactctgcaagatgcatgggtggaaaagtccggagacc

SEQ ID NO: 416265 - DNA, 427 bp, Oryza sativa
aaatttaagttcattcttgtcagcaccgtttggtttcattgctgctactttgtttttggatgctgttcatcagagcgcatggatcacgcaagctgtacatagcgtatctcggtgacagaaagcatgcacgcccagacgacgttgttgcttctcaccatgatacgctctcgagtgttcttggaagtaaagacgaatccttatcttccatcatctataactacaagcatgggttctcaggctttgctgccatgctgacagctgagcaggcagaacagcttgcagagttaccagaagtcatcagcgttcagcgaagcaggaggtacaggacggcgaccacacggagctgggacttcctggggctggattaccaaaagcccagtgaattactcagaaggagcaaccacggacaagagataatcatcgggat

SEQ ID NO: 416266 - DNA, 441 bp, Oryza sativa
gtgctctctttcccttcacctctcctccctctcacccttccattacatggatcagggagggaggaaggaggcctgaagtggcgcagagtaggcgcttgtaaacaaatccccccatttgcttcttttgcactgaagaatccctgaagaatccagcaggatggagaagaaggcgtccatcctcatgaaccggtatgagctcggccgcatgctcgggcaaggcaccttcgccaaggtgtaccatgcacggaaccttgcatccaaccagagcgtcgccatcaaggtcattgacaaggaaaaggtattgcgtgtcggcatgattgaccagatcaagcgagagatctccatcatgcgcctcgttcgccaccccaacatcgtccagctgcacgaggtcatggccagcatgagcaagatatattttgcaatggagtatgtccggggtgg

SEQ ID NO: 416267 - DNA, 530 bp, Oryza sativa
tggtttctcttcatgaccggtcggcggccaagccgtacgcgaacggcagcacggtggcggcggcggcggcggggaggaaggagaacaacaaggtggtgcggtacagggagtgccagcgcaaccacgccgccagcatcggcggccacgccgtcgacggctgccgggagttcatggcgtcgggcgccgatggcaccgtcgccgcgctcctctgcgccgcctgcggctgccaccagagcttccacaggcgagaggtggaggccgccgcggtcgaatgcgactgctcctccgacaccttctccggcaccggccgtcggtgatcgccgtggatttgattcggcctcgtcgtgcgagtagatcagcatcatcagttggtaaggtggtattggcgatttggcattcacaggattcggtggatgaatgaatctgattgtgtatgaaccgattaaaaagttctcttcctttctttctttcatattttgatctttggtgaatcgatggtgtgtaatgtaacataatatatgttaaaaagc

SEQ ID NO: 416268 - DNA, 531 bp, Oryza sativa
  unsure (1)..(531): unsure at all n locations
gtgctgttgtggacgacgacgacgagcaaggcgaacatgggcaaggtgatgggcgtggccgccggcggcgaggtggccggcgggttcgtggtgtggcagaagaagccggatctgtggtgcgtggagatggtcgtcgccggtggcgtcaagatgagcgccggcagcgacggcaaggtcgcatggcgccagacgccatggcaggaagcccacgcctcccgtggcccgccacggtcgctccgccgatgtattcagggcttggacccgaagtcgacggccgacctgttctcgagcgcggcgtgggtgggcgagaggtgcgtcgacggcgacgactgcttcgtgctccgcgtcgacgccgaccacgccgcgctgcgcgcccggagcagcggcgacgtcgaggtggtccggcacgccgtgctcggctacttcagccagaggacggggctgctcgtccgcctcgaggacagccacctgctgcgcatcggnctcgcccacgccgccgccgagagcgcctactgggagaccaccatggag

SEQ ID NO: 416269 - DNA, 509 bp, Oryza sativa
  unsure (1)..(509): unsure at all n locations
tttattttacccggcctagcgagcgagagagagggaagggttgcgacttgcgactcgcgagcggcgagatggcgaaggacgtggagatggcggtgcggaacggagacggcggcggtggcggcggctactacgccacccacccgcacggcggcgccggcggcgaggacgtcgacgacgacggcaagcagcggcgaaccggtaacgtatggacggcgagcgcgcacatcatcacggcggtgatcggctccggcgtgctctctctcgcatgggcaacggcgcagctcggctgggtggtcgggccggtgactctgatgctcttcgccctcatcacgtactacacctgtgggctcctcgccgactgctaccgcactggcgatccggtcagcggcaagcgcaactacacctacatggatgccgttgcggtctacttaggtggctggcangtctggtcctgtgggtgtttccaatatgtcaacctggttgggacagcaatnggtacacaatcacag

SEQ ID NO: 416270 - DNA, 431 bp, Oryza sativa
tggcttttgacattcttggtcccaactgagatatgtccacttgagatcagatcagcagggcagagtattgttgttgcagtggtcttcctgatgacatttgtgattggacagacattccttgcagttctatgccgcatcaagtcagggacttcttcttctttgcaggatggatctgcttgatgacagtgtttgtttatttcttcctgccggagacaaagaatctgcccatggagcacatggagcaggtctggaggaagcattggttctggaagaagattgttggggaggaggaggaaaaacaagcagagaaaacaggtctccctagcatgtaaagccctatgaattggaatgtatttgaccatacaaaaaccatacatagtgtagggttctaattagcaaatgtacgtttgtaattctactgtctatatgta

SEQ ID NO: 416271 - DNA, 445 bp, Oryza sativa
tgtcttgccttgctttccccaactaaaccctaactcggggccgccgtctccgcctgcggctgctcgtcggagcaccgagccgctgctccttctcctacaccaccagccatggcgacccagatcagcaagaagaagaagttcgtgagcgatggcgtgttctacgcggagctgaacgagatgctgacgcgggagctggccgaggacggctactccggcgtggaggtgcgcgtgactccgatgcgcacggagatcatgatccgggccacgaggacgcacaacgtgctcggcgagaaggggcgcaggatcagggagctcacctccgtcgggcagaagcgcttcaacttccccgagaacggcgtccagctctacgccgagaaggtcgtcaaccgcggactctgcgccatcgcccagggcgagtccctccgatacaagcttcttggaggcc

SEQ ID NO: 416272 - DNA, 455 bp, Oryza sativa
aaacctcccttcacaaaagaaccagagagaagaggcgggaagcgaagccgcagcccgccactcgcctccgccctccgcgcgcgcgaacccctccctcggcggcggcgacgaccaaggcggcggcggcggcagcggcgcaagaggacgcggtagcccgatggcgccgctcgtgccgtcctcgcagccatgggtggagaaataccggccgaggcaggtgaaggatgtcgcgcaccaggaggaggtggtccgggtgctcaccaccaccctccagaccgccgaccttccgcacatgctgttgtacaggccgcctggcaccgggaagaccaccaacgcgcttgccattgcttaccagctgtacggaccagagctctacaagtcaagagtggtagaactaatgctagcgatgatcgcggaataatgaggtgaggactgagatcaaggacttgctgctgtgc

SEQ ID NO: 416273 - DNA, 580 bp, Oryza sativa
gttctgtcatttaataggtgatttcatcagaggtgtatattctgttttccaagacttggatttctcattccttgagatgaatccgttcaccatggtgaatggggaaccatatcctctagacatgagaggagaattggacgacacagctgcctttaagaactttaagaagtggggaaacattcagttccctctgcctttcggaagagtcctcagcccctctgaaagctttatccatgaactggatgagaagacaagctcatcgctcaaattcacagtcctgaacccgaaagggcgcatttggacaatggttgcaggtggtggtgctagtgtcatatatgctgatactgttggagatttgggatatgcgtcagagcttggaaattatgcagaatacagcggcgctcccaacgaggaggaggttctgcagtatgctagagtggttgtggattgtgccactgctgatcctgatggccgtaagagagctcttctcattgtaggtggtatagcgaacttcactgatgtcgctgctacattcagtggcatcattcgagccttaagagaagaggaatccaaattgaag

SEQ ID NO: 416274 - DNA, 503 bp, Oryza sativa
  unsure (1)..(503): unsure at all n locations
ggacttagagtcattctcaaacattcccacaaacgctgtgaatgcggtcacatggggtgttttccctggcaaggaaatagtccagccaactgtcgttgactcagccagctttatggtttggaaagacgaagctttcgaaatttggtcaaagggttgggcttgcctgttccctgagggcgactcatctagggagatactagacaaggtccagaagagctacttcttggttagtcttgtggacaacgactacatcaacggtgatctcttcgcggcgttcaaggagatttgatgacatcttatagtctgcaacctctcgtgtctgaattcctatctttatcaagtgttattgcttccacgactataggacagctttcgtcgaaagcttttgctcatgtgatctcgaaggattcatctagtctgatttttcgtgacttgtatccgttttattggattcatccaacatatatncaataaaaaatgagtgggttcctttcttcctagtc

SEQ ID NO: 416275 - DNA, 530 bp, Oryza sativa
tccacgcgtccgcccacgcgtccgcaacagtgcattaattgatagggagtggaaagttgctgaggtgtgccagaaactagagcacagcttagagattcttggtgtcagtgctatagaggaccgcctccaggctggtgtaccagaaactattgaaatactgaggcagtcaggaataaacttttggatgttaactggcgataaacaaagcactgctattcaaatcgcgcttttgtgcaatctcatttcttcagagcccaaggggcaactcttgtatatcaatggaagaactgtggatgaagttgctagaagcttggaaagagttctacttactatgcggataactacttctgaacctaaggagctagcttttgttgtggatggttgggctcttgaaatcatcctgtcacgctacaatgaagcctttactgaattagcagctctttcaaaaacagcaatatgctgccgggttacaccgtctcagatagcacagcttggtaagcttctaaaatcatgtgactatcgaaacttgg

SEQ ID NO: 416276 - DNA, 386 bp, Oryza sativa
ttttgttttaccatcagattctagtgcagcagaaacaactgttgctcttgcaaagactgtttcatcttgtgtgctccatatggaactaggtgctcttagtgcttgccttgctgctgtcgtatgttcatctgagcagccacctctgcgtcctcttgctagctctgctggtgatggggcttctcttattattaaatcagtactggaccgagcaaccgagttgctgactgaccaccatgctgcagccagctatacagtgtcaaaccgaactctctggcaggcatcatttgatgctttctttggactcctgacaaaatactgcctcagtaagtatgaaagtattaagcagatgtctgtcatgcagtcaccatgctctgtaactggatctg

SEQ ID NO: 416277 - DNA, 529 bp, Oryza sativa
taactgcccaaacatttcatttgagtcggtaaggcttcctatgttggtagacctgagactactaagttgtgaggggatcacgtctgcttccatggctgcaatagcttacagtcgtctgcttgaggcattacaacttgataactgcagtttgttgacatctgtgtctttggatctgccacatctcaagaacataagtcttgttcacctgcgcaagtttgctgagttgactttgcgaagtcctgttctttcttacattaaagtttccagatgctcagtacttcatcgtgttagcataacatcaaatgctcttcagaaattggtgttgcaaaagcaagagagcctatcaagtttgtcattgttatgcaacaacttgatcgatgtcgatcttagtgactgcgaatcattaacaaatgcagtttgcgaagttttcagtgatggaggtggttgcccattgctcagatcattgattcttgacaactgtgagagtctgagcactgttgaactgaatagtagtttcatggtcaatctc

SEQ ID NO: 416278 - DNA, 447 bp, Oryza sativa
tcttagtgtaaaggagaaaaaaaacaaaacacaccatggcaaatatatgcgactatgggagcggtcaccaccaacatcgtcctcgccgtctccgcggtggcagttctggtcggtggtggttcgcgcggacggcccaaggtgccacccggtctgatcattacgaccaactacagcgccccgtggctgcccggcagggccacctggtacggccagccctacggctccggctccaccgacaatggtggcgcgtgcgggatcaagaacgtcaacctgcctccctacaacgggatgatctcctgcggcaacgtcccaatcttcaaggacggcaggggatgcggctcatgctacgaggtgaagtgtgagcagccggcggcgtgctcgaagcagccggtgacggtgttcatcacggacatgaactacgagcccatctcggcgtaccacttcgac

SEQ ID NO: 416279 - DNA, 494 bp, Oryza sativa
gccggtgacctcgccggaggtggcgagctcgggtgccggcgatctcctccccgcgggcggcgtccgtccatggctcgtcggtcctcctcctcctcgtcgtcgtcgggggcgtggcggtacctcaacccggcgtattacctcaagcggccgaagcgcctcgccctcctcttcttcgtcttcgtcgccgccaccttcgccttctgggatcgacagtcgctcgtccgcgagtacgagtcagaaatttctcgattggatgataaagtaaatcagttgcgtgaccagttaagaaaggctggagttcatctggatgaaaatccaacaggtgacaaagtatccagagaaaagcttgtagaaattgatcctattaataatgaaaggagagaaaaggttaaggaggctatggcccatgcttggaattcctatgtgaagtatgcctggggaatggatgaacttcagccacaatcaaagaatggtgtcaatagctctggtggtct

SEQ ID NO: 416280 - DNA, 452 bp, Oryza sativa
gcgactctatccgacggaatccccaaccccaacccccaaaaccaatccgccgccgcgctgcctcgcctcgctcgtcgctcccaccaccaccacaaacccgcgcctcctccgccgccgcacgcccgcccgccgacgaatcagagtttggatttaatattacaggcgcagccatgttcaacaggctctttggtaagcccaaggagcaggccaatgctagtgcgttggccacgcttgataagttaaatgagacccttgacatgctggagaagaaggagaaagtcttagagaaaaaggcagccgcagaactggagagggctaaggagttctcaaaagcaaagaataaaagagcggctatccaatccttgaagagaaaaaagctttatgaacaacaaattgagcagctagggaacttccagttgagaattcatgatcagatgatcatgttagaagct

SEQ ID NO: 416281 - DNA, 564 bp, Oryza sativa
  unsure (1)..(564): unsure at all n locations
gagctctcggaaagcaccaccaccagcacagagccagcgcgagagagagagagagggagaccaaaccccatcccggatctctcgtcgtcggcggcgtctgcgatggcgctctccgaccgctcccgcgagtcgctcctcccgagcttcctctacacctcctccgccgcgaggtccttcgccaccggcgccacccgcttcccctccccggtgtccccagcttccccggctccgggtgccgtcgggggcggcgcgcccatctcgatccaggctcccagggagaagatcgagatgtactcgccggcgttctacgccgcctgcactgccggtgggatcgccagctgcgggctcacccacatggccgtcacgccgctcgacctcgtcaagtgcaacatgcagattgatccagcaaaatacaagagcataacatctgggtttggcgtcctcttaaaggagcaaggacctagaggcttcttcaggggatgggtgcctaccttgcttggttacagtgctcagggcgcatgcaagttngggttctatgagttctttaagaagtactactcagat

SEQ ID NO: 416282 - DNA, 467 bp, Oryza sativa
aaatcatctaggggttttgtatccctatccattcccccatgagcaagacactgccatgtcagacaccatagcctacaagaattttatttacggcaacatcgcctgctcactgaacacgcacctcctttctaacggatggaaggaactctggcttgggcacgctcaccaacctggggaggaagaccctccgaacagtttacgcctacttctaccaccacaactcctgcgtcgccgccaacggatggctcgctgccatccccgccgctgtttacatgctacaggatcaggaggcgcatgctgcagagatggagcgcacctttatcgccatcaagcctgacggcgtccaaaggggcctgatttctgagatactgtcccgatttgaaagaaaaggattcaagcttgttgccatcaagctggtggttccatccaaagaatttgctcagaagcactatcatgatttgaaagac

SEQ ID NO: 416283 - DNA, 499 bp, Oryza sativa
tgattttcccagggatttcgccggcggctaggatcgggtcgggggtccgccatggccgacgtgttcgagggctacgagcgccagtactgcgagatctccgcctccctcgcccgcaagtgcaccgctgcctccgctctccaaggagagaagctgaagcagaaggcgtcggagatcaagtctggcatcgatggggccgaggcactgataaagaagatggatcttgaagcaaggaaccaacagccaagtgtgagggctgggctgctggcaaaactgagggagtacaagtcagatcttaacaacctgaaaggaacgttgaagagggtcaccaccggtaacgcgcagcatgggtcgagggaagagttgctggagtcaagaatggctgaaacgttgggggtatctgctgatcaaaagtcatgactgctcaggataactgaaaagcataataaaacaaccgataggatcagagatagccacagaactatgctggagactgaagatc

SEQ ID NO: 416284 - DNA, 322 bp, Oryza sativa
ttttatttagggtttctagggttttgggttgcggcggcgagtgggcgagggcgaggtctagatggcgtcggtgagggtgaaggggacagtgaagtggttctactccaccaaggggttcggcttcatcaccctcgacgacggtggataggatctcttagtccaccaattctcgctcaagttcgacggctaccgcaacctaaacgaccgatacttgcgcgtgttcttcgcttgatccggtaactacggccgttccaatgccgtggacgtcaccgagcctgtgggcggtgcgctcagcggcagatcccgtgccagctgaggaggt

SEQ ID NO: 416285 - DNA, 554 bp, Oryza sativa
  unsure (1)..(554): unsure at all n locations
tctttctcagggaggaggaggagaaggcgaaggcgaagcaaagcaaaacctcggaagagcggcagagcccactccacacgcggagaggagaccacgccgccgccggaagccatggccgccgccaccgccgccgccttcgcggagcccaagaccaagtacgatcgccagctcaggatatggggtgatcaaggacaggctgcactggagaaggctagcatatgcttgcttacctgtggccctacaggaactgaagcgatgaagaaccttgtgcttggaggagtagggagtgttactgttgttgatggttccaaagttgaacaatctgacatgggaaacaatttcctgttggatgcagaatgcttggggcaatcaagagcaaaatctgtatgttcgttcctgcaagagctgaatgatgctgtaaatgccaatttcgtcgaggagtctcctctggctctcatagacacaaacccttcattcttttcccatattaccgtagtcattgctactcagcttccagagagatncttactgatactagatgatatctgcaggaa

SEQ ID NO: 416286 - DNA, 547 bp, Oryza sativa
  unsure (1)..(547): unsure at all n locations
tggattttcgcagaggtgatgttgttgcatggcctactaacctcggttggatgatgggcccatggcttgtttatgcctctttactgaatggagcctccatggctctttataatggctccctgaatagttcaggctttgcaaagtttgtacaggatgcaaaggtgactatgcttgggttggtacccagcattgctcgttcatggaaaagtacagattgtacagctgggtttgattggtcaaccattagatgttttagctcatccggggaggcatccagtgtggatgattatttatggttgatgggaagagtttgctacaaaccagttatagagtactgtggaggcacagaaattggtggtggatttgttgctggatcattgctgcaacctcaagcattatctgcattcagtacacctgcaatgggttgtaacctgtttattcttgacaacaatggaaatccattaccacaagattctgttggtactggagaacttgcgctngatccaacctttcctggagcttcaacaacattgcctgatgctgatca

SEQ ID NO: 416287 - DNA, 549 bp, Oryza sativa
tgtactatccaatccaatccaatcaaatcacatcgagggacgccgcaacccagcagcagcagcggaaccctagccaagccaccatgagcaagctctgccagtcggcgtgcaaggccgccaagtctctcctctccgccaccgccgccgtctcctccccgcgcacctccctcctagccgaggggaggaacgcggcgctggccaccctcaccaacctggggaggaagaccctccccacagcttacgcctactcctaccaccacaactcctccgccgccgccgccggatggctcgctgccatccccgccgctgtttacatgctacaggatcaggaggcgcatgctgcagagatggagcgcacctttatcgccatcaagcctgacggcgtccaaaggggcctgatttctgagatactgtcccgatttgaaagaaaaggattcaagcttgttgccatcaagctggtggttccatccaaagaatttgctcagaagcactatcatgatttgaaagacagacctttcttcaatggattgtgtgactttcttagctctg

SEQ ID NO: 416288 - DNA, 467 bp, Oryza sativa
ggcattttgttataaaggtgcgaaggcatacctatggcagcgtattctcttggttcaatgatgcgtaacaaggatgataatgcctggttatgggcaagggataaggaaatatgggaattgccaaaagtatttgctaatgggtttgagttacttgcaccattcagtgaaatatatcacagtatgccctcagctttaaaatcatgcttctcttacttgtcaatcttccccataggattcgtaatagatagagagaagctgattcaacagtggatagcacttgacatggctggttcaaagcacggggctttacctgcttatgtgcatggagagatgttcattcaggaactcttatcactattcttccttgaaatccaaaagataccctctgccactggaatcagtcctaccaatcgtcgtacattactccaggtgaatagcttggtgcatgcttttgcaaatatgttgct

SEQ ID NO: 416289 - DNA, 429 bp, Oryza sativa
cgccgtcgcttcggccaccggcggcgactgtggccccgtccgtgccggatccctccccgtcgggccacgtgacgatccgcccctccgagctgtcccgcagggaggcccaggtgctccgcgcgcggctcaccggcgagctcagccgggtccgcgccctcctctccgacatcgacgggtgggaggcgcggcggcggcggccggcggagcctccgcggcagcgggggcacgtgtcgccgcccccggccctccaggcggcgatgcggaagcggtgcacgcagatcctgacgcggctgcggaagcagaagatcagcgtgtggttcaactcggcggtggacgttgagcggctgaagctgcacgactaccacgccattattaggaaccccatggatctcggcaccgtcaaggagaacctcgccttcgggaggtacc

SEQ ID NO: 416290 - DNA, 375 bp, Oryza sativa
actaccttcttctccggctcttcttcagtatcgaatcctctgttctcctcgtgcccaccaccaccaccgtagcaatggcgggcaacgggccgatcaacaaggaggacccgctcaactggggcgcggcggcggccgagatggccggcagccacctcgacgaggtgaagcgcatggtggcgcagttccgcgagccgctggtcaagatccagggcgccaccctccgcgtcggccaggtggccgccgtcgcccaggccaaggacgccgccggcgtcgccgtcgagctcgacgaggaggcccgcccccgcgtcaaggccagcagcgagtggatcctcaactgcatcgcccacggcggcgacatctacggcgtcaccaccg

SEQ ID NO: 416291 - DNA, 511 bp, Oryza sativa
ggcgttttcgaggctgggctctacaaggatggccagacccgtgagcacgctcttgttgcttccactcttggagagacccagatgatctgctgctgcaacaagatggatgccaccactcccaagtactgcaaggcccgttacgatgaaatcgtgaaggaagtctcatactacctgaagaaggtcggctacaaccctgacaagattaccttcgttcccatctctgggtttgagggtgacaacatgattgagaggtccaccaaccttgactggtacaagggccccaccttgcttgaggctcttgaccagatcaacgagcccaagaggccatcagacaagcccctgcgtattccccttcaggacgtgtacaagatcggtggtattggcaccgtgcctgtgggtcgtgttgaaactggagtcctcaagcctggtatggtggtgacctttggttccagcggcctgaccactgaggtcaagtcggttgagatgcaccacgaggctctccaggaggctc

SEQ ID NO: 416292 - DNA, 465 bp, Oryza sativa
ttcattcaggcaatcagcggcgaggcaccagcccaccggccggctatggcgtccacctcctgcttcctccaccagtccacggcccgcgtcgccgcgcgcgtcgccttcccgtccccggcgacacggacccaccttctcgtgtgccgcgcccagaagcaggacgacgccgacgtctcccgccgcgcggcgctcgcgctgctggccggagcgacggcggcgctgggggtgaaggtggcgcccgccgccgcggcctacggcgaggcggcgaacgtgttcgggaagcccaagacgaacacggagttcatcgcctacagcggcgaggggttcaagctgctgatcccgtccaagtggaaccccagcaaggagcgcgagttccccggacaggtcctccgctacgaggacaacttcgacgccaacagcaacgtctccgtcataatcaaccccaccaccaagaagaccatcacc

SEQ ID NO: 416293 - DNA, 436 bp, Oryza sativa
gctattgctgccacgccgctcggcggcgcaatgcgtccgagatatggcagggttctgggaatcatcctcctactcactttcttgtgcggcttgactggcgccaccaccggtgtgaccacattcacctcgaaccagaagccgacgtatatgaccagccttccgggactcgacagcgcgctgccttcccttctcgagaccgggtacgtgaccgtcgacgaggagaacggggcagagctgtcctactacttcgtggagtcggagggcgaccccggccgtgaccccgtcctcctatggctcaccggcggccaccggtgcagcgcgctcagtggattggtcttcgacatcggccccgaggagctcgtcagggagccggatgacggcatcatcctgccgcggctgcggtggaacccaaactacgggaccaaggtggatggca

SEQ ID NO: 416294 - DNA, 436 bp, Oryza sativa
ctcatgatgttcatcatagaggacaaagggggtgccattgccctcatgctggcctccctcttcttcctggggacatggcctgcggtcctcaccctcctcgagcgccgaggccggctcccgcagcacacctacctcgactactcgatcacgaacctcctcgctgcggtcctcatcgcgctcaccttcggtcagctcggcgatagcaagcccaacatgcccaatttcttcacccagctcagtcaggataattggccttcagtgctgttcgcaatggcagggggtgttgtgctcagtatagggaacctctctactcagtatgcatgggcatatgtaggtctctcagtgactgaggtcatcagctcaagtatggatggtgtaataggcacaacactgaattatttcctggacaaccgcatcaacagagcagagattcttt

SEQ ID NO: 416295 - DNA, 423 bp, Oryza sativa
acgatgagttgatgcaacactttgaggactacaatggcggtaactggatacaattagaagaactttgttatgaagacatgcaactgctgtatggaagaattgctgcattgctaaaaagcctaggcatccctgcactttctaaggttatttatcgagaagcaatattttacggtacagtggataacagagaaaaggttacagcaatttattggctatgaccatatatgcaacgctacatctatgagatgcatagagatacatatgtaaactgatgacaaaatgaaatcacgaagcttagcaatctacaagctattgttgttgagaagtgattccacatgtataagctgaaagaacgtgtgagactttgtaagagaagatgtagatgcaattgcctattgcagggaaataatctatatgctacgc

SEQ ID NO: 416296 - DNA, 346 bp, Oryza sativa
cttttaccgtccgcttcccttcccttcccttcccagaccctaacccccccaaatctcccacaccgctcccccgccgccatggccgcctccgacgccgacgccgcggaggtcgagcggctctacgagctcggcgagcgcctctcctccgccaaggacaagtcccagcacgcggcggactacgaggcgatcatatcggccgtgaaggggcagagcgtgaaggcgaagcagctcgcggcgcagctcatcccccgcttattccggagcttcccggcactcgccccgcgcgccatggaggccatgttcgacctcgtcgacatggaggaactcgcgactagaatacaagcta

SEQ ID NO: 416297 - DNA, 521 bp, Oryza sativa
ggaactcacattcccacacgcctcgctgcctcgattgattgattgattccttggagaagaagacggaggaggaggagatcgagcagccgctgacgctcgtcgtctacctcccgatctgatccgaggagcgaagcgaacaggggcaagatgcattcgacgaatctgctgctggaggagcccatcaggatggcatccatcctggagccatccaagccgagctttttcccggcgatgaccaagatcgtggggacgctgggtcccaagtcgcgcgccgtcgacaccatctcctcctgcctcaaggccggcatgtcggttgccaggttcgatttctcgtggggagacgctgagtaccaccaggaaaccctcgaaaacctcaagctcgccatcaagtccaccaagaagctctgtgctgtcatgctcgacactgtcggcccggagttgcaggtggtgaacaagagtgaggctgcaatctcccttgaagcgaatggcactgttgttctcacccctgaccaggggcagga

SEQ ID NO: 416298 - DNA, 462 bp, Oryza sativa
ctcctttgccaaaccagtctcccccaaatctcctttgcgtgctctcgattcctcagcaaccatgtcggcctactgcggcaagtacaaggacgagctcatcaagaacgctgcctacattggcactcctggcaagggtatccttgctgcagatgagtccactggcaccattggcaagcgctttgccagcatcaatgtcgagaacgttgaggagaaccgtcgctctctccgcgagctgctcttcaccacccctggtgccctccagcacctaagtggtgtgatcctcttcgaggagaccctgtaccagaagaccaaggacggcaagcccttcgtcgatgtcctcaaggagggtggtgtcctccctggcatcaaggctgacaagggtaccgttgaggttgccggcaccaacaaagagaccaccacccagggccacgatgatcttggcaagcgttgcgccaagtacta

SEQ ID NO: 416299 - DNA, 415 bp, Oryza sativa
tctaccataccacctcagttccattgcgtaataattcccgttctaaaggaatcattccaaggaccacatcagcacccgggttatcaacaaaaagcagtgctcttttgtatgggtggcccttcttatcagcgagcattctctttttaaacatatcaaagtcatcaatccgccaaggacgttgcatattattgcggctcatgcgataaatttctattatagttcccttgtgataaaggtgcacacaagctcgagagccccaatcaaatatgttcgcagcaaggacaccctggatgagtgcaagcaatctagcttcctgattgatactatcacgttccatcagaagatcaggtgaaacagcctgtgaagcttcattgtacctttgctaatgctatcatatgcatcgacaaactggaat

SEQ ID NO: 416300 - DNA, 481 bp, Oryza sativa
ttatttttgcaagaagagacgagacgagggtgagaaggggacgagggggccggccgcgggcgtcgtcgtgttcctccccccctctctctcctctcctgtcctctcgatctgcatccttccttccatccattcctccccgcacccttcgcattgctctcgtcgtctcgattcggtcgaggatctccaggaaaagaggaggaagcgatatgggttgcttttcatgctgcggagcggatgatgtcggcatgaagaagaagcgcgacgatccttacgtcccgatccctgatccaggtgggaactatggacgtagcaagcccgggcccccagccccttcgcgttctccccccaccagcagaaatctgccaattgctgtaccggcaattccccttgatgaaataaagggaataaccaagaacttcagcagcgatgctctcatcggagaaggctcgtacgccagagttttcttcgtgtgctgagagat

SEQ ID NO: 416301 - DNA, 388 bp, Oryza sativa
tgtcggttacgcacgcgctgctgtaccggttcctgccgcgcgcgttcggggtgcgcgcatcgttcgtggacgctgacaacgaggcggcggtgcgcgccgcggtgcgcccggcggagacactggtggtgtacgtggagacgatgtcgaacccgacgctggccgtggccgacatcccgatgctggcccgcgtggcgcacgacgccgggaccaagctggtggtggacaacaggtgcactcccatggtcgtgtcgccggcccgcctctgagccgacgtagcctgtcacaggggatccaagttcattagaggcggggccgacagcatcgcaggggcgatctgtgggccggtgagcctggtgaacgcgatgatggacctgcaggagggggccct

SEQ ID NO: 416302 - DNA, 407 bp, Oryza sativa
tcgtcctcgcactcttctatgaaggttaattttcaggggagcggtgcatgaattggccactcgtacgccatcaaccaatccaaccaacagatcttatagctactaccgccatgctgcatgatcgttctatctgcatctgaattctgaagaagattagaacatgtgcaggattccttggctggcatctgaattctgaagaagatgattagaagatgtcgaggatttcttggatgaaaccggggcagagagggcagttgccgcggctgacccagagctcgcgggagcagaggcggcagaaggtgtggccgcacggaatgaatgcggcgcccttgtggagcaccatgtacacttcgcacacgcatgccacagggatcatgcgaagcctgaagaacgttgcctcctactac

SEQ ID NO: 416303 - DNA, 553 bp, Oryza sativa
atttcatattgtacaagaagctatcagaaatcaggggggctagctagcagtaggaacaaacattgaggccgaccccgatcatcttcctgctcctggccgccgccgacgacatcgccgctccgtggcaggttgcgcacgccgcgggcaagtgcggcaagacaccggaggagaaggtggcgctgaagctggcgccgcgcgcgaaggcggcgcaggaccccggggcccggccgccggccgcgtgctgcgcggccgtgcgcgacatcggcacgcaccagagccacgcgtgcctgtgcgccgggctgctgtccagcaccgggaggcgctccggcgtcaagccggaggtggccatcaccatccccaagcgctgtagactcgccaaccgccccgacggatacaagtgcggcgcttacacgctgcccagcctgcaaggctgatgacgacgtacgacgggcttgcctaggctctggcgccactaaaagctacctacagatcgcttacagtatactactcctataatactggtgcttaagtgtgctagctataccctgcactg

SEQ ID NO: 416304 - DNA, 450 bp, Oryza sativa
ctttcttttccggttgtgcttgccttgactgtgggggggaaactagaggtactaacaaacgtcctgccaaaaataatgggaaacaataagtatcttgggcaggaaaagcttccaatcattgtttgggttattgctcaggcatctcaaggtgacctagtgactggaatgttttgttgggctcatttcctgtttcccacactgtgtgctaagccaagtgggaatccccagacgagagatttagttctgcagttgctcgaaagaattttgtctgcccccaaagctcgaggcatcttactgaatggtgctgatagaaagggggaacgcctgattccccctgttacatttgatctgttcatgagagctgcatttactgtttccagcgctcgtgtaaaggctacagagaggtttgaagcagtctacccaacaatcaaggaagttgcccttgctggt

SEQ ID NO: 416305 - DNA, 533 bp, Oryza sativa
ggctcttcagactttggttggggggatgacaccatgaccccagactacacttcagtcttcgttcctaatgctgccatgccagcatatggtgaacctgcttacctgacaggtggagcgccaaagagaatgaggaacaactatggtatcgccgtgccccagggaaatggcatgcctaatctcgcacaaaacatgcccaccttcgatcccgagatgaagtatttgccattaccttatgtttagagcagctcaaatgaatcaatggacaaccttctgcaaaatgatgctacacaagacggggcaagcaacgagggcatctggagccttgatgagctgctcatggcaactggtgcctactgaggagactaaatgttctggtcagtgtggtctgtcactagcaaaccatgttgaatgagtatggccaagatgaagagctggtgatgtctgctatgttatgcagagggatgctaccaaagtaatgctagaatattacaagctgctatcagctgtactctctatgacaactgttatactat

SEQ ID NO: 416306 - DNA, 276 bp, Oryza sativa
catgatctccattcgtttatgagttcctcgtaggcgggggttatattaaactcatgggcgttattaacatcggaatcaatgggttcggacgcatcatcaggctggtggtcaatgtcgcgctgtacagcgaggatgtcgagctcgttgccgtcaacgatccattcatcaccaccgagtgcatgacatacatgttcaagtatgacacccgccacggccagtggaagcatcatcaggtcaaggtcaaggactccaagaccctcatctttggcaccaaag

SEQ ID NO: 416307 - DNA, 459 bp, Oryza sativa
ttcttcagccacctcgacgaggtgaaccgcggggggggtcttttaattaagccggtggtcaaaaaccagggcgccaccctccgcgtcggccaggtggccggcgacgcccaggccaaggacgccggcggcgtcgccgtcgagctcgaccaggaggcccgcccccgcgtcaaggccagcagcgagtggatcctcaactgcatcgcccacggcggcgacatctacggcgtcaccaccggcttcggtggcacctaccaccggcgcaccaaggacgggcccgccctccaagtggagctcctcaggcatctcaacgccggaatcttcggcactggctccgatggccacacgctgacgtcggatacggtgcgggcggccatgctcgtgcgcatcaacaccctactacagggctactccggcatccggttcgagatcctcgaggccatcaccaagctgctcaacacc

SEQ ID NO: 416308 - DNA, 365 bp, Oryza sativa
ttcttgtctatgtcgcgtagccctagcatcggggggctctatgagcaagattggggtctgaaacaacgggttcggaaggatcgggaggctcgtggccagggtggccctacacagcgaggatgtcgagctcgtctccgtcaacgacccctttatcaccaccgactacatgagctacatgttcaagtactataccgtgcacggccaatggaagcacattgacatgaagatcaaggacttcaagactgtgctcttgggcgagaagccggtcaccgttttcggtatcaggaaccctgacgagattccttgggctgacgctggtgctgattatctcatggagtccaccggtgtctatactgacaaggaga

SEQ ID NO: 416309 - DNA, 458 bp, Oryza sativa
  unsure (1)..(458): unsure at all n locations
tttcttttgaagcctccatttatacangaattgcgggggctaaatacttccgtgaggggggctataaaatcagtatgatggctgattctacttctcggtgggctgaagctttgcgtgagatttcaggacgtctggctgaaatgcctgcggatagtgggtaccctgcatatttggctgcacgtttggcatccttttacaaacgtgctggtaaggggaaatgtctctgcagtccatatcggacaggcagtgtcacaattgttggtgctgtctctccacctggaggtgatttttcagatcctgttacctctgcaactcttagtattgtgcangtcttttggggatatgataagaagctggctcaaagaaagcatttcccatctgtcaattggctcatctcttactcaaaatactcaaaggctcttgaatccttctatgagaagtttgatcaagatttcatt

SEQ ID NO: 416310 - DNA, 225 bp, Oryza sativa
  unsure (1)..(225): unsure at all n locations
ttgtttctgccgctgctgaagaaaaacacacatncgtacttattaacaccaactcggcacccaataaggccattaccttccaaaattctcccatccaatggcgctactcctctccgtcttcttctctcacgggccggctttctcgcccgccatcttcacatgccgcccccccgcctgcgggcacttacccaccttgctcagcggccgtgtggcttctcaaaggaa

SEQ ID NO: 416311 - DNA, 524 bp, Oryza sativa
atttctaaaaaaggatgatacatctgatccatttgctatatgtggaattatcgatcaatattcgcagcaaccatctctgaaagaaaaaagcgctctgaataggctagaaatcatcaacaaatgcttttccaaaaaaacagtggaagaaatcatagcctctcttgaacaagaggctccaaatgttgctgatgaatggattgcttctgcaatccagtccatgaggaaggcttctactactagtatgaaaatatccttgagatcgataagagaagggcgaacacaaactgttggtgaatgcttacgtcgagaatatagaatggtttgccatgtgatgcgtggtgacttcagtagagactattgtgagggatgcatggctatattgttggatagagatcgagacccagagtggatgcctccaaggctggaagaggtgcacgacgaggtggtcgaaaaatatttttccaaagtctatgatccagagtgggaagatgtggacctacctcctagacgttcccatggaagga

SEQ ID NO: 416312 - DNA, 510 bp, Oryza sativa
gtttattctaacctccgcgccgcaccggacgggggggggctcgtgtaccacctccgggggggcgaatcccctcatcttcgccggtcgcctcctccaagcctccgcgacgcgcacggcagagatgtaccgcatcgccgggagccacttgcgctctctcaagagatacagttatagtaggtttgctagtacaagtgttgtgaagcagtcttcaggtggtttgtttagctggcttcttggggagaagtcaagccaattgcctcctcttgatgtccctctcccgggtattacccttcctccaccactgccagactttgttgaaccgtctaagacaaaagtcaccactctcccgaatggcatcaagattgcttcagaaacgtcagtgagtccagcagcatctgtgggactgcatattgactgtggttcaatatatgaaacacctgcttcatctggagcatcacatcttgtggagaggatggcgttcaagagcactacaaacaggagtcatttgcg

SEQ ID NO: 416313 - DNA, 193 bp, Oryza sativa
catgttcccctcctcctcgcctcgcatcccctggctcttttcgtgagcagggaagagcatcccctctctcttttcgtgagcagggaagagggggggggggggggggttcacatataaccataaggagctcaagggctgacgggtcgttattcttggacactgaaagcaccaccgcacagggagagaggaagag

SEQ ID NO: 416314 - DNA, 482 bp, Oryza sativa
cttgcgttcgagagatcgaagcaagctgctacacagaggtcacgacatggccgaggcggcgtcggcggcggcggcggcgacgacggagcaggcgaatgggagcagcggcggcgagcagaagacgcggcactcggaggtcggccacaagagcctcctcaagagcgacgatctctaccagtacatcctggagacgagcgtgtacccgcgcgagcacgagtgcatgaaggagctccgcgaggtcaccgtcaaccacccatggaacctgatgacgacgtcggcggacgaggggcaattcctgaacctgctgctgaagctcatcggcgccaagaagaccaatggagatcggcgtctacaccggctactccctcctcgccaccggcctcgccatccccgacgacggcacgatcttggcgatggacatcaaccgggagaactacgagctggggctcccgtcgatcgagaaggcgggagtggcgcacaag

SEQ ID NO: 416315 - DNA, 533 bp, Oryza sativa
tctctctctctctctctttcctctccactttgaatcaatcaaaacggagaagaagaagaagaagaagaagaagaagaagaagacatcaagaacacgtggagcagaagcttctctgccggcttctatcgtagctctcaaggataaagaaaatctgctgcagaggtacaagatctagtggcagaacatgatgagcaatcttaagcttggggtggaggttaccagtgctcatgacctcctaccaaaagagcagggcacatgcaacccctatgtcgagatcgaattcgatgaccagaagttccgcacagccatcaaagagagggatatcaaccctgtctggaacgagcagttctacttcaacatatctgatccatcccgcctcactgagaaagacctcgaggcgtatgtgtaccacgcaaaccgcgccagcaattccaagacttgccttggcaaggttcggatctccggtacatcctttgtcagccactcagatgccacacctcttcactaccccctggagaagcgcacgatcttat

SEQ ID NO: 416316 - DNA, 444 bp, Oryza sativa
tttatcccatccactccagagctccccgcggcacttggcaccaccaccaccaccaccggcatccggcggcgcgggcggtgatggcgaccatcaccacgcagctccggtcggccctcctctcgccggcggcctcgccgagccgccgtgccaggcgcgccccgtcgtccgtgcggtgcgactcctcggcagcgtcgtccctgtccgcctccgcgtcgctcgacgccgacttcgacaagaagcagttccgccacaacctcacccgcagcgacaactacaaccgcaagggcttcggccacaagaaggagacgctcgagctcatgagccaggagtacactcagcgacgtgatcaagacgctcaaggagaacgggaaccacgacacgtggggccccgtgacggtgaagctggcggaggcgtacggcttctgctgggcgtcgagcgcgccg

SEQ ID NO: 416317 - DNA, 533 bp, Oryza sativa
tttgttcttgcctgtgcctgcttgcgttcgctggcctcctcctgctcctcctcctccctgcaggatcaatgactgcaggccaggacaccaccaaccacgacaccattcacatataaccataaggagctcaagggctgaggggtcgtttttcttggacactgaaagcacaagcagagagggagagggagagagagggaagaagaaggtgagggagctgggcaatggcgacttcctttcaggggacgacgaccaagtgcatggcgtgcgacaagacggtgtacctggtcgacaagctcaccgccgacaacagggtctaccacaaggcctgcttccggtgccaccattgcaagggcaccctcaagctcgcgaactacaactcgtttgaaggagtgctctactgcaggcctcactttgatcagctgttcaagaggactggaagtttagacaagagctttgaaggaactccaaggttgtcaagccagaaaaaccagtgagaatgagaatgctattaaagtctcgagcgcatttgctgg

SEQ ID NO: 416318 - DNA, 549 bp, Oryza sativa
catattaggctcgggttaaggagttcaacctaaagcaaatgtggaagagccccaatggcacaattaggaatattatcaatggcactgtattcagagagccaattatatgcaaaaatgtcccaaggcttgttccaggatggactaagcccatttgcattggaaggcatgcttttggtgatcagtaccgagcaactgatgcagttctgaaggggcctggcaagctcaagctggtttttgagggaaaggatgagcagattgatctggaggtgttcaacttcactggtgctggaggagttgctttgtctatgtacaacactgatgagtcaatccgagcttttgctgaagcttctatgacaactgcttatgagaagaaatggccgctttatcttagcaccaaaaacacaatcctgaagaaatatgatggaaggttcaaggatattttccaggaggtctatgaagctgggtggaaatccaagtttgaggctgcccgaatatggtatgagcatcgtctcatcgatgacatggttgcttatgcacttaagagtgaag

SEQ ID NO: 416319 - DNA, 518 bp, Oryza sativa
ggtgcttcctccacgcctcgccaccatctcccggtccgcaagcggatcttcgcctatgccctctacgccctcctccccctcgccgccctccactacctcctcctctcccctccccctcctcccctcgccaccacctccacctccaccacgccgccggttgcggcggtggcggtggcgaggaaggcggcgccgcggtgcgactactcggagggggagtgggtgcggagcgcgtcggcgccgcggtacaacgggacgagctgcggctcgacgatcaagggcgggcagaactgcatggcgcacgggcggcccgacacggggtacctgcactggcggtggcgcccgcgcggcggcggcgggtgcgcgctgccgccgttcgcgccgggggagttcctggagctggtgcgcgggcggcacgtcgcgttcgtgggagactcgctggcgcggaaccagtgcgagtcgctcgtctgcctcctcgcctcggggttccccgccgagctggtgcgccgcggcaacggcgg

SEQ ID NO: 416320 - DNA, 441 bp, Oryza sativa
atttgtttgagggaaaaaaaaagagaaaaagaggaggggattaaagaagaagaagagagaactcgaactctcgcctaccatttcgccccccttcgcaagcaatccaccactgcatcggcggcgagggctcaccggcggcgagccatgtgcggcggcgccatcatccaccacctgaaggggcacccggaggggtcgcgccgggcgacggaggggctcctgtggcccgagaagaagaagcccacgtggggcggcggcgggaggcgccacttacgggggttcgtggaggaggacgacgaggacttctaggccgacttcgaggagttcgaggtggactccggggactcggatttggagctcgggaggaggacgacgatgacttcgtctagatcaagccggccgccttcaagagggccctctccagagataacttgagcaccatta

SEQ ID NO: 416321 - DNA, 492 bp, Oryza sativa
atgcggttttttgcgagagcggcggcatcaagggcgtcaagggggtgtacaacacggtccgtggtccggacgacctcgacacgaggctcctccgtgccatggtgaccaagggcattgtggagcccgtgtcgagcacgttcgtcaacctggtgaacgccgactacacggcgaatcagcgcggtctgcgcatcaccgaggagcgggtctcccacgagagccccgccgtggaggcgccgctggagtccatccaggtgaggctctcacacgtgcagtccaagttcgccggcgccatcagcgacggtggtgacatcgtcctcgaggggagggacaagtacagcgtgccgcaccttaccgttgtagggccctacgaggtggacgtcagtctggagggcaacctgatcctgtgccggcagatcgaccagcccggtatgatcggtaaggtcggtaacatactcggccagacgaacgtcaacatcagcttcatgagcgtcg

SEQ ID NO: 416322 - DNA, 368 bp, Oryza sativa
ttgatttgtcggacggcggcggcacccctgcgagggaactaactagataggccggccattgagacggcggccggggacaggtacacccgcgggggcgggacgcgctccacagcgtgctgcgcggacaggtccatgctcgcagcaactacaggcccaaggcctggagaccgtcgagcacgttctacggcaagtcgtggagggttaacacggggaggtgcgctgcgtgtgggaggcattgcaaggaagcaagccggacggggctagcacccgagcgagatctgggacagcatggaggagtttctgaccaaggagacgccggataacaacctcatcaggctgctgatcagcatgggggaggcgatgaggac

SEQ ID NO: 416323 - DNA, 523 bp, Oryza sativa
ttttagcaagaagctcagctcctcctcctctggcatggcagccatggccaccaccgcgtccagcctcctcaagacctccttcgccggcgtgcgcctccccgccgccgcccgcaaccccaccgtctccgtcgcgccgcgcaccggcggcgccatctgcaactccatctcgtcgtcgtcgtccactcccccctacgacctcaacgccatcaggttcagccccatcaaggagtccatcgtgtcccgcgagatgacccggcggtacatgaccgacatgatcacctacgccgacaccgacgtcgtcgtcgtcggcgccggctccgcggggctctcctgcgcgtacgagctctccaaggacccctccgtcagcgtcgccgtcatcgagcagtcggtgtcccccggcggcggcgcgtggctcggcgggcagctgttctccgcctggtggtgacgcaggccgcgcacctgttcctcgacgagctcggcgtcgcgtacgacgagcaggaggactacgtcgtcatcaagcacg

SEQ ID NO: 416324 - DNA, 436 bp, Oryza sativa
  unsure (1)..(436): unsure at all n locations
caattccagcgcgggagccgtgaggggcttcacttacgtacgattgcagcgcggtggggtgggcgaggtgcgtggccatggcggacgcggcggtggagctgcctggacggctcgcgatactgccgttccgcaacaaggtgctcctcccgggggccatcgtgcggatccgctgcaccaaccccagcagtgtgaagcttgtggagcaggaactctggcaacgggaggagaagggtctgatcggggtgctccctgtgcatgactccgaagctgctggctcattgctgtctactggtgtaggcagcgattcaggtgagggtgggagcaaggcgctgggtggttctgcaggagaatcaacgaagcaggatactaagaatgggaaggagaccattcactggcacagccgnngagtagctgctagggctttgcacctttcaga

SEQ ID NO: 416325 - DNA, 415 bp, Oryza sativa
tttgatctacacatagtaaatcatgcgggccagggggacatgggcacagaggacgcttgcggccccagagaaggctaggagcagacgtgaataacaagcgggccaaacggtgaacaacaccccgcggcaggagatcgagacgcactacgacctgacgacagaagagcaccagactaacgaccaggcggggcaagaggaagccagcctgccctggaagcggctgcacaacaaggtgaccgggtccaccacccacctgatgcgaacgagacagcgcgggccggcgcggagcataaaacagaggctgcggacagaggagcgggagcgcaacatggactttgttaccaaaacctcaggactagactggaaggaaaccccaagggacgaggagaccatggagatgctaacagcgctgggc

SEQ ID NO: 416326 - DNA, 483 bp, Oryza sativa
agttttcaaaccagcaggagtcgcctcgcctcctccttcatcctcctcgtcgtcgccgcgggggtcgcctgagatcacattaacaatggtgaaggctgttgttgtgcttggtagcagtgagattgttaagggcactatccactttgtccaagagggagatggtcccaccactgtgactggaagtgtctctggcctcaagcctggtctccatgggttccatattcatgcacttggtgacaccaccaatggttgcatgtcaactgggccacactacaatcctgccggaaaggagcatggagcaccagaagatgagacccgccatgctggtgatcttggaaatgtcaccgctggagaagatggtgttgctaatatccatgttgttgacagtcagattccacttactggaccaaattcaatcattggcagagccgtcgttgtgcatgccgatcctgatgatcttggaagggtgggcacgagctgagc

SEQ ID NO: 416327 - DNA, 549 bp, Oryza sativa
  unsure (1)..(549): unsure at all n locations
gttttgttcgtggctcgtgcccaccgtgattggcgggggcatcgtggagttcatcggcgagatgtacgtcaacaactgccccaagcacggcagcgcgctcggcggctgcgtcgccggcttcctccgccgcttctccttccagccgctccgcgagaacccgctcctcggcccgtcttccgccactttgcagaaaatgggagctcttgactggaacaaagttgttcatcagcaccaaggatggcgtctcattagctgtatctggctccatgctggcctaatccatttggttgtgaacatgctgagtttactgtttattggaatccgccttgaacagcaatttgggttcgttcgcattggtgccatatacctgctatctggttttggcgggagtgtgttgtctgcgcttttccttcgtaataactacatctctgttggagcctctggagctntatttggactgcttggatcaatgctttctgagcttattatgaactggactatntattccaaccaggcagcagccataataactcttctatttataatcgc

SEQ ID NO: 416328 - DNA, 543 bp, Oryza sativa
  unsure (1)..(543): unsure at all n locations
aaacccaaagctaagcttcgagctccggcattgatcagtgagctagctagtagctggttggttaaaaggcctttttgttttgtttgagttggagcagaggagaagaatggcggctctgcttgtggtcgtgttggttgccatgtcggccatggtggcgacggccaactttaaccaggagttcgacatcacctggggcgatggccgtggcaagatcctcgaggatggccagctgctgacgctcacgctggacaggacgtccggctcagggttccagtccaagcacgagtacctctacggcaagatcgacatgcagctcaagctcgtccccggcaactacgacggcaccgtcaccgcctacttacttgtcgtcgcaggggccgacgcatgatgagatcgacttcgagttcctggggaatgtgaccggtgagccgtacacgctgcacaccacgtgttcacgcaggggcagggccagcgcgagatgcangttccgctatggtacgaccccaccaaggacttccacacctacttcatcctctggaaccc

SEQ ID NO: 416329 - DNA, 545 bp, Oryza sativa
tttccaccctcgccgccgccgccgccgcaagtagccacccgcgccgccgccgccgccgtcgccggagaaggagaggagcagccatgggtcgcgtgcggaccaagacggtgaagaagacctcgaggcaggtgatcgagaagtactactcgcggatgacgctcgacttccacaccaacaagaaggtgctcgaggaggtgtccatcctgccgtcgaagcggctgcgcaacaaggtggccgggttcaccacccacctgatgcgccgcatccagcgcgggcccgtgcggggcatctcgctgaagctgcaggaggaggagcgcgagcgccgcatggacttcgtcccggagaagtcggcgctcgaggtggaggagatccgcgtcgacaaggagaccatggagatgctcgccgcgctcggcatggccgacctcctcggcgtcgagcgccagcaagaggtctccgcgccgacctactcccgcccgtcgtacggtggcccccgccgcgaccgcgtctagatcgtcgtcgcctctttcgccgcgtcgtcgccatgg

SEQ ID NO: 416330 - DNA, 510 bp, Oryza sativa
ttcttacacacagacgcactcacacactcagcttgggcgagcgagcgagtgaacgtgagagagagacagagatggcgagtgttgcctccttcccggtgatcaacatggagaacctggagaccgaggagaggggcgcagcaatggaggtcatccgcgacgcctgcgagaactggggcttcttcgagatgctgaaccatggcatcgcgcacgagctgatggacgaggtggagcgggtgagcaaggcgcactacgccaactgccgggaggagaagttcaaggagttcgcgcggcggatgctggaggccggcgagaagggcgccgacgtgaagggcatcgactgggagagcaccttcttcgtccgccaccgtcccgtcttcaacctcgccgacctccacgacgtcgacgaccactacaggcaggtgatgaagcaatttgcgtcggagatcgagaagctctcgagagggtgctggacctgctgtgcgagaatctgggcctggagaaggttacctg

SEQ ID NO: 416331 - DNA, 427 bp, Oryza sativa
ttgttcgtcaagaactacgtctactaatccgatccaatccaatcaagacagtgaacctgctgctgctgctgctacgtactacagctactgctatactgctagtacctcgagggcactgtagccagtgtgtcgtcacagttacaggttgagatcgatggacaaagttaaaactatactgcattaattaattttaccttgagaacatacgtggttcatcatgtatttcatcacatgaatcttttctagagcgtttgatatacatacctcgtgttttgcctctgcaataaccttgtgtgtagacgaatctgtatactacctgtatgtgtggcctgtgaatcgatttggttactgcaaagatttgcgtctttttgaaaaaaaaaaaaaacaacacagaaaaagaacaaattaaaataaaaaaaaagggcgg

SEQ ID NO: 416332 - DNA, 449 bp, Oryza sativa
gtttatgagcattcctccaaatcagatgatcagggggatgtgtttgaagagttggatcccacattctgcttcatgtgtgatcttgagcatgacaccattgagaattgcatggtccacatgcacaaaaagcatgggtttttcatacctgatagcgaatacttgaaagatccaaatggtcttcttatatatgtcgggctgaaggtgaagcgtgattttatatgcctatactgcaatgacagatgccagccttttcaaattctagaggctgtgagaaagcatatggatgcaaaaggacactgcaaagtacgatatggagatggtgcggatgatgaatatgctgaccttggaaatttctatgattacagccgcagttatgctggatgtggagggaaagaattggttgctgcagatgacaggataacattgaactggatgtggtgaggctgaac

SEQ ID NO: 416333 - DNA, 395 bp, Oryza sativa
gttatttcacacccgcaagcgtgaggtcgccgggttcctggcccagacttcccacgcgacctctggtgggccctactcgtggggctactgctacaaggaggtgaagggcgcgacgtcagacttctgcgtgccgaacgcgcgctggccgtgcgcgcccggcaaggcgtaccacgcccgcggacccatgcaaatcgcatacaactacaactatggggcggccggcgaggcgatcggcgcggacctgctgggcaacccggagctggtggcaacggacccgacggtggcgttcaagacggcgctgtggctgtggatgaccgcgcggtcgccgagccagccgtcgccgcacgccgtcgtcacggggcagtggactccgactcccgcggacagtgcgggcg

SEQ ID NO: 416334 - DNA, 363 bp, Oryza sativa
ctttatgatactaattactactaaccgtgaaaagaagccgtcggttaatattcgatcgatcgatcatgtggtgtacgtgggcgttggggcggttggtgttggcggtggtgttcctggttgcgttggctgccggctatgcaccgccgaacaaggttcaccggaaccactgaaaggtcacggcggggccatggaagcatgcgcacgcaacgttatacggagggcgcgactggtcccgcacgctggactgctcgtgcgggtacaaggacaccttcaaggaaggctacggcgtgcagaccgtggctgtgagcacgccgctgatcggggccggcgtcagctgctgcgcctgctacgaggtaagtgcgt

SEQ ID NO: 416335 - DNA, 528 bp, Oryza sativa
cgttgatcctcctccccgttcttggctcccctcgcgggcgtcctcacttcccttcttgcatgggggttcgccgccgtgagtgaggaggaggaggagtagtactaggaggaggtgaggccatggagagggtggaggatccggacctggaggacccgaacccggacgtgggggagctgttcagccactacgacgggctctacttccgcggcgcgctcgccggcgccggcttctccgtccagtggagctcgccgccgtcgcggatggccggttcttttggatcgtgtaccttcggaaaaccggataataccataacattgtctgaaactgtgctgaaatatcgctcacgtattgatatgaagaatgcattgctgcatcagatgatccatgcaatcttatttgtaaagcatcataggaaggactgccggggtcatggtcctaattttcgtgcttggatgactgctattaacacctgttctattgacgatcaccagagaccacctgatgggtacaatatcaccaccagacatg

SEQ ID NO: 416336 - DNA, 494 bp, Oryza sativa
  unsure (1)..(494): unsure at all n locations
ctttttcctcgcaccaccctgcttgttacagctgcgccgtctattgcttccttctcctcatcgaccgccatggcttctctcaccgatctcgtcaacctcaacctctccgacaccacggagaagatcatcggcgagtacatatggatcggtggatctggcatggatctcaggagcaaggctaggactctatccggacctgtgactgagcccagcaagctgcccaagcggaactacgatggctgcagcaccggccaggcccccggccaggacagtgaggacatcctgtacccacaggctatctacaaggacccattcatgaagggacacaacatccttggcatgtgcgattgctacacgccagccgggagaaccgatccccaccaacangaggcacaatgctgcaaagatcttcagctcgcctgagggtgcttctgaggagccctggtacggtattgagcaagagtacacccttctacagaaggacatcaactggc

SEQ ID NO: 416337 - DNA, 527 bp, Oryza sativa
gatgattgcgaccctcgccacgggaagtacatggggggctgtctcatgtaccgcggtgatgtcgtgcccaaggacgtgaacgccgtcgtcgccaccatcaagaccaagcgcaccatccagttcgtggactggtgcccgacggggttcaagtgcggcatcaactaccagccgcccagcgtcgttcccagcggcgacctcgccaaggtgcagagggccgtgtgcatgatctccaactccaccagcgtcgtggaggtgttctcccgcatcgaccacaagttcgacctcatgtactccaagcgcgccttcgtccactggtacgtgggtgaggggcatgaggagggctgagttctctgaggcccgtgaggatctcgccgcgttggaaaaggactactaggaggttggcgctgagtccgaccagaatgaggatggcgatgatggtgacgagtactagaggagtcgtcgtcgtctgggggcttgatgatctgtgtgtcaaggcctgattgataactgctgctatccatgatctg

SEQ ID NO: 416338 - DNA, 537 bp, Oryza sativa
ctttgatcgatcgagacagctactgacatggacgtgaaaaagggaagaagaactaaccatgtccatgcaggagatgctccgcattggagacgacgacggccggagcgatgctctggaacgcgagctcaaggagaagctgaggttgcgcggcgatgcctcaccggcgaaatgcaccaggcaggagcagcggtggcggtctgatcatggcatcgtcgacgcccgcgagaggttcgtgcaggcgtacggccgcctcagggacgatctcgtcggcgacgactcgtgcgagctcaccgacgaagccaggcgctggcttgctcagatgatcgactacaatgtacctggaggaaagttgaaccgagggctgtcagtgatagacagttacctgctgttgaaacaaggaagtgaggttactgaagatgacttcttccttgcttgtgtgcttggttggtgtgtagaatggtttcaagcatgtgcactactacttgatgacatcatggacgattcacataccaggagagatcaagattgctggtaccg

SEQ ID NO: 416339 - DNA, 473 bp, Oryza sativa
  unsure (1)..(473): unsure at all n locations
tgtttctgaccaccattggttcctgaaattgagtcatggctgccaagctagctcgcctccacagtctccgcgaacgcctcggtgccaccttctcgtctcatcccaatgagttgattgcactcttctctaggtatgttaaccagggaaagggaatgctccagcgtcaccagctgcttgcggagttcgatgccttgatcgaagctgacaaagagaaatatgctccctttgaagacattctccgggctgctcaggaagccattgtgctgccgccctgggttgcactggccatcaggccaaggcctggtgtctgggactacattcgggtgaatgtaagtgagttggcagtggaagagctgagtgtttctgagtacttggcattcaaggaacagcttgttgatggacacaccaacagncactntgttcttgagcttgattttgagccctttcatgcctncttcccgcgcccgtccatg

SEQ ID NO: 416340 - DNA, 521 bp, Oryza sativa
ttttatagctagctaactgttactgtacctgctcccatatatcatcttcatattcttgcagatcgataagcgagaaaaatgggagcacgctgcctcgcattgcttctactctatggcacgttgctgctgctgttgctgctgccacagatgccgctcgccggcgcggcgacgagatactacaccttcaatgtgaagcttcagaatgtgacacggctgtgcaacacccgggcaataccgacggtgaacggcaagttccccgggccgaaaatagtcaccagggagggagaccgcgtcgtcgtcaaggtggtcaacaatatcaaggacaacattaccatacactggcacggagtgaggcagatgcggacggtgtggtcggacggctcggcgtacgtgacgcagtgcccgatccagacggtgcagagctacgtgtacaacttcaccatcaacgggcagaggggcaccctgttctggcacgcgcacgtctcctggctgcgatccacgctgtacggccccatcatcat

SEQ ID NO: 416341 - DNA, 401 bp, Oryza sativa
tccctttcttatttttactaattttttttggggggagttttttaaaaataatttggggttataaaataaattttttttatttttttggggggagccaaaacacaaaaagctcacccatttaccacgagataaagctttaactctagccaacaaggggcactactaccaacaaagtgacactatccctagcaaaccgagcaaccagacataaaccgatcgcataggtcatcaacaaaacacttcattattgaacaatcaccacactggctgcaacaaaatattcaatctcggtaagacacacaacaataatgaatccgatggcatattgaaccaaacatcaggcaaacatgtctgctctgaacttaactacgaacaagaaactgctatactagaaaagaaaa

SEQ ID NO: 416342 - DNA, 248 bp, Oryza sativa
agtctttttctctatagtctcagctcttcttccggggcacccaggtcctcctcctggtcctcgtcgttgttcgccaccaccgctcggagagatggcgagccagaccgccgacgccacggggttcgtcgcgagcgacccgctgtcgtggggcaaggcggcgctggagatgacggggagccacctggacgaggtgaagcgcatggtggcgcagtcacgggaggccgtggtgaagatcgaggggtccagcc

SEQ ID NO: 416343 - DNA, 559 bp, Oryza sativa
cataatttgcttcccttccttccgtatagtgtaacgtacgcatcaccacctcgcgggctggagatggagaaggagtaggagtaggagtgacgcctccggatttcccacgcctcgacgaacccccacaaccccgagatcgatcgggaggaggacgaccacgcccttcacctgcccccaaatcttgccccgatctcccccgaccgcggcaatgggggccgcctccgacgacgccgtcaagcagctcgccctcctcatggaccaagtggaggcgccgctgaggaggacgtttcagaatgtgcaccagggctatcctaaagaaacattattgcgtttccttaaggccagagagtggaacgtatctaaggctcataaaatgcttgtagactctttgaattggaggattcaaaacgaaatcgatactgttctggagagacctatagtcccagtagatttgtacagatcaatccgtgattcacaacttgttggactctcaggatacacaaaggagggtcctccagtttttgcccgtggtggtgggcagagcacatatgacaaagct

SEQ ID NO: 416344 - DNA, 544 bp, Oryza sativa
gggagagaatctcccccctgggtcttatgtagtattgcaattagagaaggaggcgatgttagcaccacatactcacttctgcttgatctgtggcaagggtttcaaaagagatgctaatcttaggatgcacatgaggggccatggagacgagtacaaaactgcggcagctcttgcgaaaccttcgaaagattctagctcagagtctgcaccagttacaaggtactcgtgcccatatgttggctgcaagcggaacaaagagcacaagaagttccagcctctcaagacaatcctgtgtgtgaagaaccactacaagagaagccactgtgacaagagctacacctgcagccgttgcaacaccaagaagttctcagttatcgcggacttggagactcatgaaaagcactgtggccgtgacaagtggctatgctcgtgtggaactaccttatgaagaaagacaagttatatgggcatgttgctctattccaagggcacacgcctgcactccctatggatgatatcaaagtaacaggagcatcagagcaac

SEQ ID NO: 416345 - DNA, 470 bp, Oryza sativa
agttatctcacgtagtctccctctcccggtcttcgggacgacgctagctttacacgttcgtgataatggcggcgctgctgctgctggcggcggcgatggtggtggtggtgttcgcgcacgcggcggcggcgcagcggtacaatgctatctacagcttcggcgactccatctccgacaccggcaacctctgcgtcggcggctgcccgtcgtggctcaccaccggccagcccccctacggcaagaccttcttcggccgccccaccggccgctgctccgacggccgcgtcgtcgtcgacttcctcgctgagcactttgggctgccgctgccgccggcgtcgaagggcggcggcgacttcaagaagggggcgaacatggcgatcatcggcgccaccttcatggacgccgcctttttaagtccatcggccctagcgacaagatttggaacaatggccccctcgacacccagatca

SEQ ID NO: 416346 - DNA, 554 bp, Oryza sativa
ctttaacctatcagccatggaacaagttcatgttgggaccaatgagaaagactcgaacttacttgcagctatttcatctgaaaccaaccacgatgacaatcccatatcaaccctcccaacaagggaaggatggtccaccccacttaccctttacaacaactgttgacttagatcacacatggtcaccaaattcatgcttgtcaaggagaactttaagccccgccatgacgacgtcatcctcgtgacacaccccaagagcagcactacttggttgaaggcccttgcctttgctatagtcaaccgctcaagctttgaatccattgatgctagccaccaccctctcctcacccaaaacccgcagcaccttgtgccgttcgttggtgcacaggaggtaatctcgactaccttgagacattgccatctccacggctgctcaccacccaccttcctctctccctgctcccttccactgtcaccaccatgggctgccacatcatctacctttgccgggaacccaaggacgcctttatatcaaggtggcacttcgacaacag

SEQ ID NO: 416347 - DNA, 510 bp, Oryza sativa
  unsure (1)..(510): unsure at all n locations
tctttttggctcataacaaccttgaggtgttgcgtgaagacctcagaaatttgtcttcgctcgttgtattaaacattagtcacaacaatatttcttccctccccgcagctattggagaccttcctttgctaaaatcgttggatgtatcttctaatcaaataaacgcttttcccgaagagattggttttgcgaccgctttagtcaaggttgactgctcaaataattgccttacagatctcccagttagtcttgccagatgcctggagttgtcagaactcaatgcgtcaaacaacactatatccgtactgccagatgaacttgctggctgttccaagttattcagattgaatctagagggtaacaagctcgtgacgctatcagacaagatgtttatgtcatggacaatgcttacagagatgaatgctgcanagaatctactgacagccatcccggatggtattggtgcactgtcaaagctaattcgtctggacctgcatcagaacaaaataa

SEQ ID NO: 416348 - DNA, 564 bp, Oryza sativa
tgtttcggagccgagcgtcccggacaccatcagcatcctgcgaggcctcaaggagaagtacgaggggcaccacggtgtgaggatccaggaccgcgcgctcgtcgtcgccgcgcagctctcggcgaggtacatcatgggacgccacctgcctgacaaagcgatcgacctcgtcgacgaggcctgcgcgaacgtgagggtgcagctggacagccagccagaggagatcgacaacctcgagaggaagaggattcagctggaggtggagcaccacgcgctggagaaggagaaggacaaggcaagcaaggcccggcttgtcgaggtcaagaaagagctggacgatctgagggacaagctgcagccattgacgatgaagtacaggaaggagaaggagaggatcgacgagatcaggaagctgaagcagcgccgcgaggagctccagttcacgctgcaggaggccgtagcgccgatggacctcgcccgcgtcgccgacctcaagtacggcgcgcttcaggagatcgacgtcgccatcgcgaagctcgagagcgagacgggggagaacctgat

SEQ ID NO: 416349 - DNA, 392 bp, Oryza sativa
ttttagaaggggtcggctaactcctctgaacaggggggccttgaggggatcgccgggactgaggactagcacaggctgttccttcttggacttgagaagtacggcaaaggcgactggaggagtatctcaagaaactttgtgatctcaaggacacccacccaagtagctagtcatgcacagaagtattttattcgcctgaactcaatgaacagagagaggcggcgatcaagtatacatgacataaccagcgtgaacaatggagatacatctgctgctcaggggccaatcacaggtcagccaaatggcccatcagcaaatcctggaaaatcctctaagcagtctctacagccagcaaatgcgcctccaggcgtcgatgcttatggtacgacaat

SEQ ID NO: 416350 - DNA, 564 bp, Oryza sativa
  unsure (1)..(564): unsure at all n locations
gcctgctggaggcgccccggcataattgcctcgacccacgcctccgccttgttcactaacgtctaccaattggacgttggtggaatttttgagacatattgggggggggatgagaaatcgggcttagcccctgatctggagtcaaaacacatatggcttaaatatctaccatcagataaaggtctacctcttgtcaacaagggtaacttctaccaaaatggtgacactggtccttggggaccgtgcagtcaaatatattttgatcagattgggcatcatgatgttgcttcattattgaacaatgatgaccctggttgtattgagatatggaatcttgttttttttcagttcaataaggaagcaggtggcatattgatgccatcatcagccaaacatgtaggcactggactgaacttcgaacaattaacttctatacttcagaagaaaaagagcaaatttgacaccgacatattaatgccgacaattgactccatcncgcaatgtactggcaatgaaattcaaccattactctgtaaattggtcctgatgatataatgaagttga

SEQ ID NO: 416351 - DNA, 347 bp, Oryza sativa
atgcgaattatttcctcctactcctcctcgccgaccacgggggggtctcttaaaccggaggcggggggaactcgctgccgacggtggggcctgacagtgtcaatctgagtttgtgctacttctacgacgcggaggtggggaactactactacaggcaggggcaccctatgaaacctcaccgaatacggtttaccaacgcgtctatacaccactacacgtctcctagatcaaatgcaagggctgaaacaacactccacactcgtgatggagacatgccgatttcactcccactactatcatgggctttctcccctccgacacgccggagacccagcaggaccaaattc

SEQ ID NO: 416352 - DNA, 502 bp, Oryza sativa
gtgttttagcttggagagagacaacaatggcggctcaggctcttctctctgggaggcagctgctggggaggccattgcaatcttcagtctccaggtcttcttcctccaggaaggcacccttcatggtcagggcagaggccactccccctgccaagcaaggtgctgacaggcagctgtggttcgcatccaagcagtccctgagctacctggatggcacgcttccgggagacttcgggttcgacccgctggggctatcggacccggaggggaccggtgggttcatcgagccacggtggctggactacggcgaggtgttcaacggccggacggcgatgatgggcgtcgtcggcatggtcgccccggagctcctcggcaagctgggcctcgtccccgccgagacggcgatcccgtggttccagaccggcgtgatcccccccgcgggcacctacacctactgggccgaccctacactctctgcgtcttcgagctcgccctcgtcggc

SEQ ID NO: 416353 - DNA, 531 bp, Oryza sativa
gttctttagagatggcgtcccacgccgccgctgtggggcatcatccgccgccgccgtcgccgcccgagtcgctcccctccaccgcgtgcacgtactcctcgcgccgccgcgcctctccgtggggcggcgctgggcggttgatactgttacgcctgcgggggcactgcccctcgcccgcctaggcgcgcgccgcgagggtggtctccccgcgctgctcctcctacggcgccgtcgccgacgccggggagtcgcccgcggaggcgctccggagggtcctggagtcccccggcgcccaccaggcgcccgcgtgctacgacgcgctcagcgcccgcctcgtggggcgcgcggggttcaaggtctgcttcacgagcggtttctcaatatctgctgcgcgacttggattgcctgatgtgggtctcatctactatggggaaatgatagatcaagggtgtctgatcaccgaagcggcctcaatcccagtgattggtgatgctgataatggttatggaaactgtatgaatgtcaagagaa

SEQ ID NO: 416354 - DNA, 511 bp, Oryza sativa
ccttttcaaacccgccgtttccaagcttgctctcctgtcccccccaatccttccctcccgagtggcagggtgctcgacgggatggcgcagaaggaggccaatggcagcagcaacggggagcacaccacccgcccgccgccgacgccctcgccgctccggttctccaagttcttccaggcgaacctgaggatcctcgtcaccggcggagctggcttcatcggctcgcacctcgtcgacaagctcatggagaacgagaagcacgaggtcattgtcgcagacaactttttcactggttcaaaagacaacctgaagaagtggatcggacacccaagatttgagctaatccgtcatgatgtcacccagcccctgcttgtggaggttgaccaaatctatcaccttgcttgccctgcttcaccaatcttctacaagcacaaccctgtcaagaccatcaagacaaacgttatcggaaccctgaacatgcttggacttgccaagagagttggagctaggg

SEQ ID NO: 416355 - DNA, 547 bp, Oryza sativa
cttacgcgtccggcgacgggctgcgcggcctcgtggagaggatggcgtcgcggccggggttcctgcacgagcacatgccggcggcgtggccagtgcccgtcggcgagtttcgggtgcccaagttcaaggtgtcatgcggcggcagcgtcgtcggcgccctcgagcagctgggcctccggctgccgttttcgccggagctcgccgacctgtccgacatggtggaggacgacggctccggctggccgttgttcgtcggcgacatccagcacaaggcggtgatcgaggtgaacgaggaaggaaccgtggctgccgccgccaccatgacaaggatgcttccttccggtgtgccgccgccgccggtggacttcgtcgccgaacatccgttcgcctacttcatagtggaggagatgtcaaagtgcggtcgtcttcgccggacacatcgtcgacccgtcgatggaatgaaatatgatgtaaattttcatgtgaaattggtcaaaaacacagtagaaggatacgcttccaaacgatgaacaatgatggataatta

SEQ ID NO: 416356 - DNA, 440 bp, Oryza sativa
ttgtcggcgaacgcgcagcgcgcgaccaccgttgcttggagctagctcgcggggatctgcagatctcgcccatggcgtcctcgtcggacgagcagccgaagccgccggagccgcccgcggcggcggcggtggcggggacggccgtggccaccgccgccgcggcggtgccgacgcacgccgagtgggcggcttcgctgcaggcgtactacgccgccgcggggcacccctacgcgtggcccgcgcagcatctgatggcggcggcggctgcgggggcgccgtacggcgcgccggtgccgttcccgatgtaccacccgggcgccgccgcggcgtactacgcgcacgcgtccatggccgcgggtgttccttacccgacagctgaagccatggcggcggcggcggcggccgcggcgggggcggtgccagaagggaaggggaagggg

SEQ ID NO: 416357 - DNA, 531 bp, Oryza sativa
tttttcactacaggtcgctcatctacatgcggtgttgctgcaaacatgctgctccatggaatggagcatcaaggattcaccactgccgaaggaatttttattgctggttggtcagaagaaggatatgggtattggttccaaacaccggaaggctggaccatagacgggcactacaggtcgctcatctacatgcggcctctcgccatttgggcaatgcaatgggcacgttctccacccaaggcaatgcttgatgtcccgaaggtagacctgatggacaggatacacctatccccacaaatgatccgggcattgaacgagattaatgttagaaagatagcacccgacaatagatgtttccctagctctgatttcgttgtgaatgctgaccacaaaaaaaaaagagaagcaaaatgcaacaactgagtagtaacatacatatatatactctccttttcggcttttccttggccccttacaagtttcagtggggtttcatgggttttccttgaaatcagagggcatataaatcta

SEQ ID NO: 416358 - DNA, 436 bp, Oryza sativa
  unsure (1)..(436): unsure at all n locations
gtgggtgtgtccctgtctcccctccttcctgggctcctttcccctcctctctgcccccctctcacaagagagagagcgccagactctccccaggattcagccatgaagggggccaaatccaagggcgccgccaagcccgacgccaagttggctgtgaagagtaagggcgcggagaagcccgccgccaagggcaggaaggggaaggccggcaaggaccccaacaagcccaagagggctccctccgctttcttcgtttttatggaggagttccgtaaggagttcaaggagaagaaccccaagaataaatctgtcgctgctgtaggaaaagcagccggtgataggtggaaatccctgaccgaagcggacaaggctccctatgtagccaaggcccacangctcagggcgagtacaacaggcccatgctgcctacaacagg

SEQ ID NO: 416359 - DNA, 421 bp, Oryza sativa
tgttgctcatcctgcatccttacttgcacatggggctctttgaaaactcacctggggtgtgaaaagcagctcgacgccatggcgcggaaagagcccaatggcaagagcaacggggagcacaccacccgcccaccggcgacgccgtggtcgatacggttctccaagttcttcccggcgaacctgaggatcctggtcaccggcgtagccggcttcatcatctcggacctctactacaagctcatgcacaacgagaagcacgacgccattgtcgcagacaactttatcactggctcaaaagacatcctgaagaaacggatcggacacccaatatttgtgctattccgtcatgatgtaacccatcccctgctcgtggaggttgaccaactctattaccttgcttgcgatgattcaccaatcttct

SEQ ID NO: 416360 - DNA, 429 bp, Oryza sativa
tttctcgggggtgatgcggcggaggcccaagagggagatcgtgtgcacgctgggggcggcgtcaaggtcggtggagatgatcgggcggctgctccgcgccgggatgtgcgtcgcgcgcttcaacttctcccacggatcccacgagtaccaccaggagacgctcgacaacctccgcgccccatggagagcaccggcatcctctgcgccgtcatgctcgacaccaaggggccagagatccgaactggatttctgaaagatggaaaacccgtacaggtgaagaagggtcaagaaatcacagtttcaactgattatagcataaagggtgatgacaacatgatatcaatgagctacaagaagctagcggtggatctgaagcaggcagtgtaatattatgtgctgatggcaccatcactcttactgtccttcact

SEQ ID NO: 416361 - DNA, 330 bp, Oryza sativa
catttgttcccctgatccgggtcatataggctgggggggacaggatcaccatggggggctttgtgggaaaatacgcagatgagctgatcaagacggccaagtacatcgcgacgccggggaagggcatcctcgccgccgacgagtcgacgggcaccatcggcaagcgcctggccagcatcaacgtggagaacgtggagcccaaccgccaggcgctccgggagctcctcttcacgacgcccggcgcgttccagtacctctccggcgtcatcctcttcgaggagacgctctaccagagcacggccgccggcacgccgttcgtcgacgtgctca

SEQ ID NO: 416362 - DNA, 473 bp, Oryza sativa
ggtcattataacatgaaatgcagatggagtcctgggggtcccagtcatgagagtatgatgcataacaaccatggctttggtgcagaatctgctataattgaaactgatgacagtgagaaatcaacccacactgtgaaatttgaaattcagctttacaaaacaagggatgaaaaataccttcttgacttgcaaagggtcagtggaccacagcttctctttctggacctgtgctctgcctttctaactcagctgagagtcctttaattatgccggtgactgcattccaactgaacttactggagtataccgtgaattgtgacgtgacatttgagatatggacataatgaccatcaatctacagctgataatattggctgtagtgcgttgacgatagacgctgccagtgatgtatattgacggtacatggacaaaccataggtaacaggcaggaggcaaacctttcttgttttttt

SEQ ID NO: 416363 - DNA, 548 bp, Oryza sativa
  unsure (1)..(548): unsure at all n locations
tctggtgatcatcatcatcatcaagtcctattgggcgtcttgagaatggctgaggagaagaagaccccatgcctgaatgagcggatcctgtcgtcgctctcgaagcgatccgtggctgcgcattcctggcatgatcttgagattggacctggagctcctcaggttttcaatgttggtgttgagatcacaaaggggagcaaagtgaagtatgagcttgacaagaagactggaatgatcaaggttgacagggtgctatactcatcggtggtgtacccgcacaactacggtttcataccgcgaacgctgtgcgaagatggggatccaatggatgtgctggtcctgatgcacgaaccagtgattcctggctgctaccttagagccaaggccattggcctcatgcctatgattgatcagggtgagaaagatgataagatcatcgcgggttgcgttgatgatcccgagttccgccacttcaatgatctcaggagctctcntctcaccgacttgctgaaatccgccgcttctttgaagactacaagaagaatgaa

SEQ ID NO: 416364 - DNA, 544 bp, Oryza sativa
  unsure (1)..(544): unsure at all n locations
cgtgccgcggccatggcgaccaccaccaccacggggggcttctctctcaccgcccgggtcctccgcccgagctcgaacgcgaaccccgccccgagatctctgccgctcctcaggagccggaggtgcgctcgggccgtggcgaccgccgccgccgccgctggccacggggccgctcatcagaggagcgggatttggtcgatcagggatgatttggtggtgccgaggtcgccctacttccctgtggagtatgcgtcggggcaggaacgcgggccatcgcccatggtgatggagcggttccagagcgtcgtcagccagctcttccagcacaggattatccggtgtggtggacccgtggaggatgatatggcgaacatcatcgttgcccagctgctatatctcgatgccatcgatcctaacaaggatatcattatgtatgtgaattctcctggaggatcagtgacagctgggatggccatattcgacacgatgaagcatatcagacctgatgtttccacagtttgtattggactngctgaagtatggg

SEQ ID NO: 416365 - DNA, 434 bp, Oryza sativa
tattttcttctccagtgagactttccccacggggggttttcttgaatatgggtggggatataacacctttctttcgagctttcttgcaattttgggcttcttttcttttaatctgggtactttccctccaatatctgaatacgaggagcaatgtggttcaagggattatcggagggtggcatcccgtccatcatcactgggtgctctacgcacccgctctatttgattaaagtgaggatgcatcttcacggggaggcatcagcagcggcggctgctaccccgccagcgcatgccgctctacctccagcgcttgctttccactctgggcaagccgtggcgatcccgcatgacctgattgcgccagctaggaaacccgggcctatagccgtcggcgcgcagatcctacgggcagacggctcaccagcactcttctc

SEQ ID NO: 416366 - DNA, 330 bp, Oryza sativa
ggggggttatgccatcatagggaggggataaccgcatatcaaaatatcgatccatgagagtatgtatgtcagttcgaaccacttcactcgcggcagcgaggaagtcgaaaagcttattcacgactcatctagcaaaacttgacgataagcctatctcaagttcttcatacaagcattgacattgcaaagttacaccgagagggctgaaacaaaagtgcagactgctgatggagacaagccgaattagcttacgcttcatcaagggcaagaacacctgggagggtgttgccttccagcaactccaagctagcaccaccgccggtggagatg

SEQ ID NO: 416367 - DNA, 464 bp, Oryza sativa
tgttgtgttgattccggagtttacgatgatggggggactaggcttaaggctgggatcaaggacactaactcgctgctggaactctactattctgtgggagggttgctcagcatcaaggaacaaggccacaatgttgttttacctgatgcagataacacatttcacgcaattaaggcacttagccaaagcgacggaagatggcgttatgacactaacagcgctgaatcgagcacgtttgctgctggtatcgcactagaagcattgtctgcagttatttcactggcagattcggaagttgactcatccatgatagctgtggtgaaaaatgacattgtgaagctatttgacacgatcaagagctatgatgatgggacattttactttgacgagaagcatgttgatgctgccgaatacaagggccctataacaacatctgcttcagtagtaaggggtgtcacctcttt

SEQ ID NO: 416368 - DNA, 333 bp, Oryza sativa
  unsure (1)..(333): unsure at all n locations
tgataaataaatgtatcctagaaaattttaggggggacttgttctcaatgtgggtccatccttctttctctctctcaattgcttctgttttaaggtgcgggagaatcagggaagtctacgatatttaaacaggtgatgaatgttatattccatggagaatcataatccgtacgccgctagttagtctgatgtattcttactgttcacctgcagattaagctccttttccaaactggctttgatgaggcagaacttaggagctacacatcagttatccatgcaaacgtctatcagacaattaanatactatatgaaggagcaaaagactctcac

SEQ ID NO: 416369 - DNA, 458 bp, Oryza sativa
cttactcttgggggcggcggtcgcgcctgcgcggggggctctgaggacggcgctggcgttccacacggggcaggccgtggcgatcccgcatgacgtgattgcgccgccgaggaagcccgggccgatagccgtcggcgcgcagatcctgcgggcggagggcgcggcggggctcttctccggcgtgtcggccaccatgctgcgccagacgctctactccaccacccggatggggctctacgacatactgaagaagaagtggacccaggagaacggcggcgtgctgccgctccaccggaagatcgccgctgggctcatcgccggcggggtcggcgccgccgtggggaacccggccgacgtcgccatggtgcggatgcaggccgacgggcggctcccgctcgccgagcgccggaactaccgcagcgtcggggacgccatcggccggatggcgcgcgacaagg

SEQ ID NO: 416370 - DNA, 438 bp, Oryza sativa
cgcatcatcctcttgcctcgatctttactgctctgtaggatgctcgagctgtgtggggggggtgatgcggagagcttttctttttcttcttctattgatcggagtggccatggcggagatggctgctgccgcggccgcgctagtggcggccaagaggtgcatgaacgcctcgtgcggggccccggccccctccccggcaggaggggagtggaggaagggctggccgctgcgatccggtggcttcgccgtgctctgcgacaagtgcgggttggcatatgagcatcttgtgttttgtgatatatctcaccaaaaagaatctggctggagggactgctcattttgtgggaagcgtatccattgtggatgtattgcttctaagaactcctttgatctacttgatagcggtggagttcaatgtgtcacttgcattaaaaattc

SEQ ID NO: 416371 - DNA, 498 bp, Oryza sativa
tctctccggaccagggaagcagctaactgggggggcactaaaggtggttcaagcgcgatgagacggaaccatctttgcctggtcacttgcttgtggattctgttatgcgcagttctgcttcatgcttctcctgatggattgctgagaattagcctgaataagaagagattggacaagaagaccttggacggtgcaaaattggcaagggaggaaagccatcgtctgagagccgacggtttaggtgatgacatagttcctttggacaactacctggacacgcagtactttggagagatcggaatcgggactccaccacagaacttcactgtgatattctacactggaagctccaacttgtgggttccatcagtgaaatgttatttttcgatagcatgctacttacaccacaggtacaagtcacaagggtcgagcagttacaaaaagaatggagaatattgcagcatttcctatgggtctggatcaattgctgatttcttc

SEQ ID NO: 416372 - DNA, 491 bp, Oryza sativa
tatcatttcatttcttcttcttcttcgccgggggggcctccttacaccccttggggcgccactccaatccaaggaggatgagtgaagaggacaccaatgctgctgctgggcagcccaggcgcgcccctaagctcaacgagaggatcctgtcctccttgtcgaggagatcagtagctgcacatccgtggcatgatcttgagatcggccctggtgctcctgctgtcttcaacgttgttgttgagatcaccaagggaagcaaagtgaaatatgagcttgacaagaaaactggactgattaaggtcgaccgtgtcctatactcatcagttgtgtatccccataattatggtttcattccaaggacactttgtgaagacaatgatccaatggatgttctggtcctgatgcaggagcctgctattcctggttccttactccgtgctagagcaattggccttatgcccatgattaccagggtgagaaggatgacatga

SEQ ID NO: 416373 - DNA, 498 bp, Oryza sativa
tctttcttctcctccggctcttcttcagtatggggggcctcttttctcctcgtgcgcaccaccaccaccgtagcaatggcgggcaacgggccgatcaacaaggaggacccgctcaactggggcgcggcggcggccgagatggccggcagccacctcgactaggtgaagcgcatggtggcgcatttccgcgagccgctggtcaagatccagggcgccaccctccgcgtcggccaggtggccgccgtcgcccaggccaaggacgccgccggcgtcgccgtcgagctcgacgaggaggcccgcccccgcgtcaaggccagcagcgagtggatcctcaactgcatcgcccacggcggcgacatctacggcgtcaccaccggtttcggaggcacctaccaccgtcggccaaggacggccccgcccttcaagtcgagctcctcaggcatctcaacgccggaatcttcggcactggctccgatggccacacgctgccgtcggaga

SEQ ID NO: 416374 - DNA, 465 bp, Oryza sativa
tcactaaaaccctctgcctccttcgctcgcgggagcctcttctaggcgatccgtggcgggctgccacgaagttcttcgtcggcggcaactggaaatgcaatgggacaggggaggacgtgaagaagatcgtcaccgtcctcaacgaggccgaggtgccctccgaggacgtcatcgaggtggtggtgagcccgccgttcgtgttcctgccgcaggtgaagggtttgctccggccggacttctccgtcgccgcgcagaattgctcggtgcgcaagggcggcgccttcactggcgagatcagtgccgagatgttggtgaacctgcaggtgccttgggtgattctgggacactctgagcggagagcgctgatgggcgaatcaagtgattttgttgctgacaaaattgcgtacacactttccaaggtatcaaggaattgcttgattggtgagacccttgacagagaaagca

SEQ ID NO: 416375 - DNA, 517 bp, Oryza sativa
  unsure (1)..(517): unsure at all n locations
gaaaaaactcactgcatcgcctccgcctctgggggccatcgccgcgatgaggcggggcgtctccgccatggagaacaacttcgtcgcccacgccgtcggcggcgaggacgactgctgcctcttcggcgccggcgcccacctgcccgccatggagctccccacctgccccgccgacttcgacgggttccataaggagaccaacgagatgctgaagcacaagaagggaacgaccacgctcgggttcatcttctacaagggcgtcatcgtctccgtcgactcctgcgccagcatgggcggatacatatcttcgcaaactgtgaggaaaattattgaaataaatccgtacatgcttggaacactggcaggaggtgctgctgattgtcaattttggcatangaacttgggcatcaagtgccgactccatgagctctcgaacaagcggaggatctctattgctggtgcttcaaagcttttggtcacattctgtactcctaccgtgggatgggactgtcaattg

SEQ ID NO: 416376 - DNA, 446 bp, Oryza sativa
gactgtgtataactggcaacttttcttgtgtgggggggttggtctttgggctggagctaatcatcggatttgtgacagagtattacacaagcaacgcctacagccctgtccaagacgttgctgattcctgcagaaccggagctgctactaatgtcatctttggccttgctctgggatacaaatctgtcattattcctatttttgctattgcttttagtattttcctcagcttcagccttgccgcaatgtacggtgtagctgtggctgcccttggaatgcttagcacaattgcaactggtcttgccattgatgcctatggccctatcagtgacaatgctggaggaattgctgagatggctggcatgagtcacagaattcgtgagagaactgaagctctggatgctgcaggaaacaccactggtgccatcgggaaggggttcgccatt

SEQ ID NO: 416377 - DNA, 497 bp, Oryza sativa
cttaattaaagagagctgtgtgtcttcttccgtaagggtcatttcaacacaatgttgaggtacaatggaagcctatatctcttagccactgatcagggttttttcagccaaagtgatttagtatggcaaaagttggatgaggtgaatggagatggagtttttctgaccagcaatttcacaccatttaaggctgaaaacccgagaaatgattcttggaatgaacagcaggctatgacaagtaccgctgactatcttgctcaatttgacaatactaccctgcagcactcgtctggaaactctgatctagagctagctatagcacttcaacaacaggagtttgagcggcaacaacctcaacgacaccagtcgtcaacacagcagcaggagccggtgccccagcagcaacagcagacacccaatcaatcacatggcacaggtcggccaggattagttgttggtccaacaacggcaaggaggccacctgctccacagccgac

SEQ ID NO: 416378 - DNA, 494 bp, Oryza sativa
gttttctccatcaatgacgcggttggcgaggagggtgtatctgagttgggcgggggcatggacaggcagggattagatatgaaaattgcagcattggttaatgacactgtcggcacattggctggtgggaggtatgcggataacagtgttgttgctgctataatattgggcactggtacaaatgcagcatatgttgagaatgctaatgcaattcctaaatggaccggtttactgcctaggtccggaaatatggtaatcaacacagaatgggggagctttaaatcagataagcttcctctttcagaattcgataaagcaatggattttgaaagcttgaatcctggagagcagatatatgaaaagttgatttctggcatgtatcttggagagatagtgcgaagaatcttgctgaagcttgctcatgatgcagctttgtttggggatgttgttccatctaagctagagcaaccgtttgtactaaggacaccggatat

SEQ ID NO: 416379 - DNA, 508 bp, Oryza sativa
tcatgccacagcatgcatcttggggttcttgccagagcatggcatgctgttaacgcagggaccatgttcactgtctactacaagcctaggacaagtccagccgagtttgtggtcccttacgatcgctatatggaatcactgaaacaaaattactccattgggatgagatttaagatgaggtttgaaggtgaagaggctccagagcaaagattcactgggactattgtcggaatgggggattctgatccagctggctggcctgaatcaaaatggcgctcccttaaggtgagatgggatgaagcttcttccatacctcgccctgaaagagtttctccctggcaaatagaacctgctgtaagccctcctcctgtcaacccactaccagttccaagaaccaagaggcttcgtccgaatgctaccgctttgccggctgactcttctgctatagcaaaagaagctgctacgaaagttgtggtcgagtctgaaccaaatgggtacgcaaggacct

SEQ ID NO: 416380 - DNA, 498 bp, Oryza sativa
  unsure (1)..(498): unsure at all n locations
cacaaggtgaagctactcctatgcgagaggagcggagagagataagatgagggaggttctcccaccaatgatgaagatgctcctcgccgccctcctcgtcgtcgccgccgcctccttcagggctgccgaggcggcgctcccgtcgatggcggagggcgtcaactacggcgccaacgccgacaacctccctccggccaaggacgtggcggccttcctcgccgctcacaccaccatcgaccgcgtgaagctgttcgacgccaacccggccttcatctccgccttcgccaacacacccatctccctcgccgtctacctccccaactccgacctcccttccctcgccgacaagcagaccggcctcgacaccgcccgcgcctgggtccgagccaacctctcccactacgtgcccgccaccaacgtcaccctacttctcgacggcaacgagatcctcctatgccctgaccccaacctngtgctctccctactccccgccatgcg

SEQ ID NO: 416381 - DNA, 498 bp, Oryza sativa
  unsure (1)..(498): unsure at all n locations
ccacatcccgcgcccctcgcctccgccgcctcggcggaatcgaagccgcctcctcccctctcccgctctcaccggacggcaccgatcctttccctgctcctgtctccaccgttctactcgcctcgaaagggaggggggaggatgtggtcgtcgagccaggccagcacgaggggcgtgattgaggtggggaggggtggaggcggngccttcccatttccccaagaggcccgcgccgcggaattcctccagggtcaatctgtcaaggacatatgcaattaaatcttgttcagtgagtagccgtacagggctttgccttggacaatgttatcataagaagtcttctgcttgcaaatgcaagttgggatggtcttctcaaccactgtctagcttgaggcatcacttaagagtacattcatcagcatcggaggcggttcttacttcccaatctgatttcacaaaacttcttgttgggaatgaaaaaattggtgttctcttgct

SEQ ID NO: 416382 - DNA, 411 bp, Oryza sativa
gttccttataaccctaggccccccttctcctccgggggcgttttcaaaatccgacgggggctgcacaacctcggaatcggaggcggcgggcggccccatggacaacgccctcgcgagcgccgcggttatcgccgaccagactcctaagacttgagcacatggcatctacatgactctcctacgtcctgtcgacccacctgtcggacatatcactggcgaagcgcttcctcgaccacatggttcccgacacggtgccgctcgtggtgtcgcggcagctgctgcacacggacctcctagagcttgggaggttggagccagaagctcaaaaggaggacgcgcactacccgctcacgcacatccagcctaaagtggtctccttcgaggagcaggaggttgtgattcaagagaagc

SEQ ID NO: 416383 - DNA, 351 bp, Oryza sativa
tatttaaagctgctcgcctgctggaccggcccggacttaacttgctcgacccacgcatccggtttgttagcatgccaatcatgccattaaaaacgggggattttttaaaacacaagggggttaaccacacaggatcaccctatgatgagtactggcaaaaactgaacatgccccagacagggatgtaaaagccctatcgccagtataggcggtgtacatcagattatttcaaacattaccctcagccagctatagatcttatagataatttgcttgcattacaaccagaaactcgtggaacagctgactcgacttttcatactgacttcttcagaagaaagccttgcttgc

SEQ ID NO: 416384 - DNA, 500 bp, Oryza sativa
ctctgtttcactgtacaaggttctacacacaggggagtcgatactaaaccagcgtaggcacaacccatgtgcaggagatcgcggcggacaccaacctgcgctcagtctcgaaactctgatgatagtgaatcaagtgactgctgggtcttgagacatggatctaatgactctaagaggctcggcctccgaatttttgacttcatgattggtggagccactagatcggaactgctgacggtgcacatgcttactatgaaactgaagcgcgaaattgtcctgggatcttctagcatagatgaccttccacaatttatttcgaagctgcagatgctaactgcagtgtggtgccaatgacgtctaaactgcgcacttagttatgcagattaaccgatgaaacaaacttgtgaccttttgaacccattgctacgaacagttagaaacgttggatgtcatcaatgactggactactcacaatgattacacgatttttcatagtctag

SEQ ID NO: 416385 - DNA, 511 bp, Oryza sativa
tattttcttcgccttcttcccacgcaacgccttgggggagaaacaggatacgaggagtataccactagtgcgagccaagggcatggcgcggcagcagcatcagcgggaggaggagagggccccaatgggctcggcccaacggcggctgcgcgccgtctactgccacctacagccgccgactgagtccggctggcgttgacctcgccgccaaccccaccgccggcgagtactctcacgtgcagggctacagtgctgtactccctgagaagttgcaaactggaaagtggaatgtgtacatatcctcatagtcacctcttaagttaataaatagattccctgataacccatacattggaacgcttcatgataactttgtgtgtgcagttgaaacctttagggactgtagatacctgggcacaaagtctgtgttgatggaacagttggggactactaatggatgacatatggagaagctagtacaaggccgactgcgatagttctggtcttatta

SEQ ID NO: 416386 - DNA, 486 bp, Oryza sativa
cctgatcacaggagaagccgcagccactgagaggaacacaaacagtgaagatgtggcagcctgctgagctttcccgtgaggagaatgtgtacatggctaagcttgcagagcaggccgagaggtatgaggagatggttgagttcatggagaaggttgctaagacagttgactctgaggagctcactgttgaggagcgcaaccttctatcagttgcttacaagaatgttattggtgctcgccgtgcgtcatggcgcatcatatcatccattgaacagaaggaagagagccgtggtaatgaggatcgttgcacgctcatcaaggaatacaggggaaagattgaaactgagctctccaagatctgtgatggcatcctcaagcttcttgactcccaccttgtgccttattcactgtccagagtccaggtcttctacctcaagatgaaaggcgactactacaggtacctcgcagagtttaagactggagctg

SEQ ID NO: 416387 - DNA, 398 bp, Oryza sativa
gtttatttctctcaaatctgacagctcactgcatcaatggccgtggccaccatggcgctctccttcccggtgatggcccgggcggtgccttcaaccttctccgcgctcttcggcgaggcacgtatcaccatgcgcaagaccgccgcgaatcccaagccggtagcgtcgactgggagcccgtggtacggggccgaccgcgtactctacctcggcccgatatccggcgagccgccgaactacctcaccgaggagctcccggacgactacgggagggacaccgtggggctctgcgtcgacccggagacgttcgccaagaaccgggagctggaggtgatccactcccggtgggcgatgctgggcgcgcttggctgcgtattcccggagctcctcgcccggaa

SEQ ID NO: 416388 - DNA, 481 bp, Oryza sativa
cttactttcccatccacgcttctcgactcccagacgacgcttgttgctgcctttcgtcaaccccccacttctccttccccggcgacgctcgccgccatggatgaggagtacgacgtgatcgtgctggggacgggcctcaaggagtgcatcctcagcggcctcctctccgtcgacggcctcaaggtcttgcacatggataggaatgactactatggaggagattccacctcgctcaaccttaaccagctgtggaagaggtttagaggggaagacaaacccccggctcatctgggctcaagcaaagattacaatgtagatatggtcccaaagtttatgatggcaaatgggacactggctaggaccctcattcacactgatgtgacaaagtatttgccattcaaagctgacgatggaagctatgtcttcagcaaagggaagattcacaaggtacctgctactgacatggaggctctgaagtccc

SEQ ID NO: 416389 - DNA, 213 bp, Oryza sativa
ttattattgtgcgtctacctcctcgctccggggagcttccattgaggcggacacggccaaccatgccagacaagctgcggatcacgtccaggctgcaaagaactgtcagaatgatccgaaggggcaaaagtaccataacggtatggaccattagctctgccagtacaaccggaatagtgcggtacgggacatcgcgaacctttcatgaggcca

SEQ ID NO: 416390 - DNA, 409 bp, Oryza sativa
tcatgacctccgcctccccaatccgtcccggtggtcgcccggcaacctcgagtggggtctccacgcctggcgctggcgccgatctccatcctgctagcagagggggggccggcgtcctcctgctcccggcgcattcatcctaatccatcccatccgggctcgggctcgaatttcggctcctcgcccgccggttgcgccgatccccatcctgcgagcagagggggcgcccggggtcctccttcttccaccgcatcggcgctcgccgctaggatattgaagggtgaagctttgtgggtatccagcaaggatttcaatggcgctgctacaggttggaggtaccttggctcccaaacttggggaaaaacctcagctggtgcccaagtcacctgcacttacaagaggtatttat

SEQ ID NO: 416391 - DNA, 505 bp, Oryza sativa
cattctccgaaaacaccgtgcagcagcgaaacgggagaaacccgcgagcgcagaggggaaaaccgaagtctcctcgatggactcctccgcggcgtcggcggcggctgcggcggcggcgccggtggtgctggtgacgaacgacgacggcatcgacgcgccgggactccgcttcctcgtcggccagctcgtcgccgcccgccgctaccgcgtcctcgtctgcgcgcccgacacagacaggtcaggtgttagccactccatcacatggcgccctgcactccgctgtaaacgagttgatatagatggtgctacagcatttgcagcctcagggactcctgctgactgtgcttctttaggcatatctgggaagctctttgatggtttggttcctgatctggtagtcagtggaatcaatgttggcaacaattgtggatgccatgttatctattctggaacagttggcggtgctagggaggcattcttgtacgggattccttcattagccatg

SEQ ID NO: 416392 - DNA, 435 bp, Oryza sativa
ttcatctctcgccgttcgcagagaaaaactcagcgcctgtcatcgctcaccctctgcgaacagatcgaatccagacccagacgcggatctaggattcgagagcggggatgtgagtcaacacacgccctgctccggatcgacccgctgctctttagccatggcaggaatggcgcctacaggctcccagcttgatgctcagcactatgacaggacgatgcaggagctactgcaccaaggtgacaatgcggaatgcttcactacatatgatgaagtgctagagagcggcgatgacatgagccttagagagaccctcctaagaagcgtctatacttatggttccgagaacgcatcatctatcgatcataaggggattgttcactacagcacagggctcgatgagatgcagtatgctcagtctggaacaggaaaaactgc

SEQ ID NO: 416393 - DNA, 421 bp, Oryza sativa
gagaagcttccgcccgacgccgagtcgcgcctgtgcttctcgcaggaccggtgggtcttccacgtcctccgctcccctccccccgccgccgccgatgggctcaccttcctctgcatgggcaacgacaccttcggaagacgaattccctttctttacctcgaggacatccaaatgagggtcatcaagaactatggcagaatcgcccataatgcgctcgcctatgccatgaacgatgagttctctagggtcctccatcagcaaatggagtacttctccagcaaccccagcgccgacacactcaaccgtctccgtggggaagtcagtgagatacatactggcatggttgacaacattgagaagattctcgacagaggtgagcgcatctcgctactcgtcgacaagacctccaccatgcaagaca

SEQ ID NO: 416394 - DNA, 437 bp, Oryza sativa
acccacgcagtccgcctgctttagccacacgagcctagttcaggtagggcaatggcgtccaccgcctgtgtcatgctcgccgtcttgctggcggtggccgtcgcggcggcgccggcgagggcggtgcgatgcccgccgagcgacaagcaggcgctgatgagagtgaagcagtcgctgggaaacccggcgacgctgtcgacgtggtccctggcgtctgcggactgctgcgagtgggaccacgtccggtgcgacgaggccgggcgcgtgaacaacgtcttcatcgagggcgccaacgacgtccgcggccagatcccgtccgccgtggcggggctgacggcgctcatgtcgctgtcgctgttccgcctcccgggcctctccggccccataccggagtgcctcaccgggctctgcaacctccagttcctcaccatttccac

SEQ ID NO: 416395 - DNA, 497 bp, Oryza sativa
gtcaagccggggagggcacgcacgcacagatccctcccctctcctcgctgcccatctctctctctctcttcccctcgacgcggcgagatcaggaggaggaggaggagaggggggaagggaggaagggaggctgagatcccgaggccccccaccggagacggcgaatcctggcccggcgcctggtttgcccccggattcgggaggagtttccgatcggggtcgagggatctcaggggcgcgcgcagccatgaacgagaaggcctccgactacaaggagctcaacgccaagcacaagaagatattggaaggcctcctgcggctgcctgagaatagagaatgcgcagactgcaagtcaaagggtcctcgatgggcaagtgtaaatcttgcgatctttatacgcatgcagcgttctggaattcatagaagcctcggggcacatatagttaagggaagatcggctaccctggatacatggctgccagagccagtagcattta

SEQ ID NO: 416396 - DNA, 493 bp, Oryza sativa
ttctaacacaacgcaacacaacccaaccggatggtctcctccaccacccgcccgccacacgcccaaaaaacgccccgaaatcccctccaaatcgcccaaaaccaccgtacgccgtcgctacatggagaacggcaagtgcaacgggtcgtcgaccaccaagtgcaacggtgcggcggcggcggcgatgcacgtggcgatgctggtgacgccggggatggggcacctgatcccgctggccgagctggcgaagcggctggcggcgaggcacggcgtgacgtcgacgctgctcacgttcgcctccacggcgtcggcgacgcagcgggagttcctggcgtcgctgccgccggcgatcgagtcggtgtcgctgccccccgtcgacctctccgacctccccgtcgacgccgccatcgagacgctcatgtcggaggagtgcgtccggctggtcccggcgctcacggcgatcctgtccgggatcagggagaggcggcggctg

SEQ ID NO: 416397 - DNA, 516 bp, Oryza sativa
  unsure (1)..(516): unsure at all n locations
ggatcttctggctgggatgttcttgttcctggaggggcccatggaactctgatgcgggtggaaagaattcttcctggatcattaccttcatctgtcaaagaacctgtggttctaattgtagataaggctgatggagatgaagaggtcaaagctgctggggataatatagttggtgttattcttcttcaggaactacctcacctttcacatcttggtgttagagctcgtcaagagaatgttgtatttgtaacttgtgaatatgatgacacagttacagatgtgtatttgcttgagggaaaatatatcagattagaagcatcatccatcaatgtcaatctctcaatagtttcagaaaaaaatgacaatgctgtctctacagaaccaaatagtacagggaatccatttcaacagaaactccaaaatgaattctctctaccatcggatatcgagatgccactgcaaatgtctaagcaaaaaagcaaatcangagtgaatggtagttttgctgctcttgag

SEQ ID NO: 416398 - DNA, 501 bp, Oryza sativa
ctttattcctccgtcgccgccgtcgcctaatccggggtgcccagcctaggcgagatgtgggggcgcgcgatgaaggagaagcgcgggctggaagccgcggcggccggtggcgactgccaccccgaggccaagcgcgcgcggcctcccgcactggccagtgttattgttgaagcattaaaggtggatagtctgcagaggctttgctcatcactggaaccaattcttcgtagagtggttagtgaagaagtggagcgtgcgttgggcagactgggtcctgcaacaataactggaaggtcttccccgaagcgaattgaaggtcctgatggaagaaatctgcaacttcagttcaggacacgactgtctcttcctctttttactggaggaaaagttgaacgggagcaaggagccgcaattcatgttgttttgcttgatgctggcactggctgtgttgtatcttctggacccgagtcatgtgccaaacttgacattgttgttctagaa

SEQ ID NO: 416399 - DNA, 472 bp, Oryza sativa
ctcgctcgattccgagagatcaatggggggatctaatcaaactggggggcgtttgagagagaggaataggaagaggaaccgaggagcctaagagcacggtagctagggcagcttgggcatggccagccgtcggtttctggcgacaacgagactggtggcaagaaccggcggctgtggtcgctccactagagctggaggatatcaacgtgactacggtggcgttctaggaggggtacacgccgctattcggcttagacaacatacttcgtttcggccacgaccgcaccgtcaaccttctcctagagcgctgcaccgattctggggtcatgtagtcgtccatgtaccaacacgggttttttagtgcctgcatcaaactccccttttactacaccgccggcgtcgtcctcgccttctacacatctaacggcgacatgatctataagctgatcgacgagctggacttccatttcct

SEQ ID NO: 416400 - DNA, 503 bp, Oryza sativa
ctctattggaaactgcaatcaagaactgtgggggtatattccacatgcatggtgcagaaagagatgtgcagcatgagatggtgaagatagtgaagaaaaagtgtgatcagaatgtgaaagagaaggtgttaactatgatagatacatggcaagaagcattcgggggaccacgtgcaagatatccacagtactatgcagcgtaccatgacttggtgcgtgctggagctgcatttgcaaagagatctgatcgacctgcaccattgtttaatggccagtcttcagcaggcagaaatatgcgtagccctgatcagcaggatgaagctgaatcgtgtgctgcaaatgattttcctgctttgagcatgtgatagattcagaatgctcgtggcataatggatgtgctagccgatatgctagatgctctataccctggaaacagagagggactaaggcaggaggtaattgcggaacttgttgatcagtgactcacttacaagcagagagtg

SEQ ID NO: 416401 - DNA, 457 bp, Oryza sativa
  unsure (1)..(457): unsure at all n locations
tcgtagcccaagcccgccgcgtcggggagcccggggtacggcgccgaccgcgtgctgtacctcggcccgctctccggcgagccgccgagctacctgaccggcgagttccccggcgactacgggtgggacaccgcggggctctccgccgacccggagacgttcgccaagaaccgggagctggaggtgatccactccaggtgggcgatgctcggcgcgctgggctgcgtgttcccggagctcctcgcccgcaacggcgtcaagttcggcgaggcggtgtggttcaaggcggggtcgcagatcttcagcgagggcgggctcgactacctcggcaacccgagcctgatccacgcgcagagcatcctcgccatctgggcggtccangtggtgctcatgggcgccgtcgaggggtaccgcatcgccggcgggccgctcgcgaggtcgtcgacccgctctaccc

SEQ ID NO: 416402 - DNA, 503 bp, Oryza sativa
gtttaccacagattggggataagtttagtagtgggcatggtcagaaaggaactgggggaatgacttatacacaagaggacatgccatggactattgaaggcatcacacctgatattattgtgaatccacatgctattccatcccgtatgactattggtcaactgattgagtgtattatgggtaaagttgctgctcacatgggaaaagaaggagatgcaactcctttcactgatgttactgtggataacatcagcaaagcacttcataaatgtggttatcagatgcgtggattcgagaccatgtacaacggtcacactggaagaaaattaactgccatgattttccttggtcctacttattaccagagacttaagcacatggtggatgacaagattcactctagaggccgtggtcctgtgcagatacttaccagacaacctgcagaggggcgctcacgcgatggtggtcttccgtttggagagatggagagggactgtatgatt

SEQ ID NO: 416403 - DNA, 377 bp, Oryza sativa
cgcctttttctcctctcgccgctcgcagcgaaggggcgggtgttttccagcgcccacgcgatcccgacgaatcgaatcgagtccgagacgccgatctcggattcgagaccgttgatttcaaccaacacaagccctcctccggatcgatccgctcctcttcagccatggcaggaatggcacccgaaggctcccagtttgatgctaagcactatgacagcaagatgcaggaactactgcaccaaggtgacaatgaggaattcttcacttcatatgatgaagtttttgagagttttgatgacatgggcctccaagagaaccttctcagaggcatctatgcttatggttttgagaagccatcagctattcagcaaaggggg

SEQ ID NO: 416404 - DNA, 407 bp, Oryza sativa
catgattttgtgagatatccatcaatacttggagtaggagttcatatatttactggcggtgtttcatcccttgcatggttcatgtcaaatcaggagaccagttttgtgactattggacagcgtgtgcttgccaaccccctgagggttcgatttcactatggccatcctgatatctttgatcgtcttttccacctcacaaggggtggtgtaagtaaagcatccaaaattatcaatcttagtgaagatatatttgccggtttcaattcaacattgcgtgaaggcaatgtcactcatcatgagtacatgcaagttggcaagggaagagatgtgggtctcaaccaaatttctctgtttgaggcaaaaatagcaaatggtaatggtgaacaaacactgagccgtgacattta

SEQ ID NO: 416405 - DNA, 444 bp, Oryza sativa
gataggtttcgcgagcttttcatcaatcctctgggtgggctccatgtttccccacccggaaagagcctcaaaattccccctcctctgtcgcgaccgatcgcgaccacggcgccggacgagcagacaccgccgccacgatgccggcctccaccggctccgtcccacccgccgcatcaacgccggcggctggggacgaggccaccgccgccgggagggtactcctcggcaggtacgagctcggcggcctcctcggccgcggcgcctccgccaaggtgtacctcgcccgcgacctcctcaccggccgcgacgtcgccatcaagtccttccccaacccccgacacggaggcggcctccgcggcggcgaggaggatgttcttctccgacccgcgcccatagagcgggaggcggacattctacccaggctgcgccaccgccacgtgatgc

SEQ ID NO: 416406 - DNA, 490 bp, Oryza sativa
ggtgcactccgcgtcccaaatcccaaaccggagctagggttgctgctgctgccactcgcgagcagcagcgccccctcacgctgagccgcctccggctccctcgccgccgatcctgcgcgtgcggcggcggcgggtggccggtttgaaggaggagaggaggcttttggtcgtcactccttgcgcaggatgggtgggagatatctgcattctccacctgctgttaatttaatctgtgaggaatcaacttttgtgcgctcaacaagttgctgtctccactcttgtctgtgtttgagatgcaaaacatcgaatttgaagccatgtcgaacactggtgttcaatatgccatcaaggcgcttcaatagaagagtggctgcgctgccagatgtcgatgatttcttttgggagaaggatccaactccaatcctggacacgatcgatgcacccatccatttgaaaaatctatctagtaaggagttaaagcaactagctg

SEQ ID NO: 416407 - DNA, 361 bp, Oryza sativa
atttatcttggggtagggaagcgattaaccggcggcgatctatcgatacaagtggtggggctcggatgatccaggaattggagagcatcggctgatcgagagatggcggggaacgagtggatcaatggctacctggaggcgatactggacagcggcggcgcggcggggggaggtggaggcggcggaagaggtggtggtggaggtagaggttacctctttcctaagcaggagggtaaagaactagtctagaagggcaaggagatatggatggatgaaagcaatgttcagcctggaaaaacaccaataacgatttgtggaagtattacgtggaatttcatgatgtcgataaagttcttcagtt

SEQ ID NO: 416408 - DNA, 406 bp, Oryza sativa
tatttagaataaataaaaatcccaatcccgggcgggttttcttcttcctccgtgggcccttttcgattcgattggattggattgttttgctggctcgctctctctctctctctcgtggtgtggtgtggacaacaaaggaaggaaagatggagggcggcctatggggggaggtggaccacctctccggcgagagggccaccgcgcagttcgacgttgaacacatgaaggttgcctgggctggctccctccacgccgtcgatgtcaccgaccgcatggcgcgcctcgtcgcttccgaccccctgttccgcaaggataacaagactatgctccccaggaaggagctgttcaaggacacactcagaaaggcagcccatgcgtggaagcgtatcttcgagctccgtcttac

SEQ ID NO: 416409 - DNA, 506 bp, Oryza sativa
  unsure (1)..(506): unsure at all n locations
gctactcccccctcgccgagagagctctagggtgtccgctgccgaattttttttttaattcggggggagagatttgaagaggcggcaccatgttggtctaccaggatctgcttaccggtgacgagctcctgtcggattcgttcccctacagagagatcgagaacggcatcctctgggaagtcgatggcaagtgggtcgttcaaggagctattgatgtggacattggtgccaacccatctgctgagggtggtggtgatgatggngctgtttgatgaccaagctgtgaaggtggtcgacattgtggacaccttccgtcttcaggagcaacctccttttgacaagaagcagtttgtgaccttcatgaagcgctacatcaagaacctctccgccaagctggatgcggaaaagcaagaggaattcaagaagaacattgagggtgccaccaagtacttgcttggaaagctcaaggacctttagttcttttgtggtgagagcatgcatgatga

SEQ ID NO: 416410 - DNA, 492 bp, Oryza sativa
ctcttctctctctcagtctcactctcccaggcgggctcggcccgagcgcgcgggcgctttccccccctcgccgccggcgacgagctcgaggcggcggtgcgctcgcctacctccggagggcggagcggggggatggagcccatgagcgtggacggcggcgggggatgcggcggcctggacacgcagatcgagcagctgatgcagtgtcgcccgctcgccgagcaggaggttaaagcactgtgcgagaaggccaaggagatattgatggaggaaagcaatgttcagcctgtcaaaagcccagtaacgatttgtggtgatattcacggacaattccatgatcttgtagaactttttcggatcggtgggaagtgcccagatactaattatttatttatgggggattatgtggatcgtggctattactctgatgagactgttactctattggtagcgctgaaggtgcgtcacccacatcggattacaatccttcgc

SEQ ID NO: 416411 - DNA, 488 bp, Oryza sativa
agatatgtgccacggtcagttcatgggatcaaagaggcatgtagattctatatgattgaaagtgcatttgccctcacgatagcgttcctcattaacatatctatcatatctgttagtggtgctgtctgcgggtcagataatttgagtcctgaagaccagatgaattgcagtgatcttgatcttaacaaagcttcgtttttgttaaagaatgtcctcggaaactggagctcaaagttatttgcagtagccttgttggcgtctggccagagttctacaattacaggaacttatgcgggacaatatgtcatgcaggggtttctagatcttgggatgacaccctggatacggaaccttttaactaggcccttggccaatctgcctaggctgattgctcccattattggtggtccctcaccacgtggaccgttgcctatctttgcatctttgattctgtcattaaggctttcctttgctcatagttcttctca

SEQ ID NO: 416412 - DNA, 263 bp, Oryza sativa
cgctttctcgtagaagagacggcacaatttacacttcgggccctccaaatcttctcctgggcctcctcctcctcctgggcggaagatagttgggttcgggcaccaccacaaccaggcaccggcggcgccgtcggacccgaaccagatcttcaagatcttctgccgcgccaacgagaactactgccttaccgtccgcgacagcgccgtcgtcctcggccccgtcaaccccaaggacgagcaccagcactgggtcaagggacatg

SEQ ID NO: 416413 - DNA, 447 bp, Oryza sativa
ttcgaggcaagaaaagaagtgaaatctctccgttagacaggaagaggaaaagcaagggggaattggggatggcgtcaaagaggatacagaaggagctcaaggatctgcagaaggatccccctacatcatgcagtgcaggtcctgttggtgaagacatgttccactggcaggcaacgataatgggtccatctgatagcccatatgctggtggagttttcctagttaccatccacttccctcctgattatcccttcaaaccacccaaggtggcgttccgcaccaaggttttccatccaaacatcaacagcaacgggagcatttgccttgacattcttaaggaccaatggagcccagcactaaccatttccaaggtgttgctgtcaatcttgttccctgctgactgatccgaaccttgatgatcctttggtctcctgatatcgcccacat

SEQ ID NO: 416414 - DNA, 516 bp, Oryza sativa
  unsure (1)..(516): unsure at all n locations
ctccgtctccttcctccattcctccgccgctagaaccttctagaagctctcctcctcctcccatggcggcgacgatcgtgtccgtcaaggcgcgccagatcttcgacagcaggggcaaccccaccgtcgaggtcgatgtgtgctgctcagatggaacctttgcaagggctgcagttcccagtggtgcatcaactggtgtctatgaagctctcgaattgagggacggtggatctgattacttgggaaagggtgtttccaaggctgtcgacaatgtgaactcggttattgccccagctctgattggcaaggaccctacgtcacaggctgagcttgataacttcatggttcagcagcttgatggaaccaaaaatgagtgggnggtggtgcaagcagaagcttggtgctaatgcaatcctggctgtgtcactggccatttgcaaagctggagctatcatcaagaagattccttctgaccagcacattggcaaccttgctggaaacaagcaactggttttg

SEQ ID NO: 416415 - DNA, 273 bp, Oryza sativa
tttattcaagaacaaggaacatgggaaagctagtgcagccgctagtctgggaatgattcttctgtgggattctgattcaggacttgcccaacttgataagtacctgcacagtaatgatattcatgttgttgctggggctttgctaggtattggaattgtttcttgtggtgtgaagagtgactgcgatccggcatttgctcttatttctgagtatttcagcagggatgagtcaattatacgaattgcagcaatccttggtcttgttattgctta

SEQ ID NO: 416416 - DNA, 319 bp, Oryza sativa
gttttagatcgcgagcggccgcagcacaaaaacatgttctctcgcgagtcgcgagttgcaccgatcgaattaagggtcgaagatgtttgggttcgggcaccaccacaaccaggcaccggcggcgccgtcggacccgaaccagatcttcaagatcttctgccgcgccaacgagaactactgcctcaccgtccgcgacagcgccgtcgtcctcgcccccgtcaaccccaaggacgagcaccagcactggttcaaggacatgaggttcagcaccaaggggaaggacggggagggcatgcccgcgttcgcccttggtaacaag

SEQ ID NO: 416417 - DNA, 562 bp, Oryza sativa
  unsure (1)..(562): unsure at all n locations
atcaaaatcgaaaccaaacctccccaaatttccccagagaccctaaccctaaccccacccggcgccatggatctcctccagtcgtcctacacgccggacgacgaggacgacgacgagcagcagcccctctcctcgccggacgcctcgccgctccgcctccccgtcaagtcggtcgaccccgccgtcgacgacacggcgctcgcgctctacgccggcgccgcgtgcacctcccgtccggtcgacccctgcctccacctggggccctttaaccccaccgccgaccagctctgggcgcccgtcctcgggccccagcacccccacgcccccatatcctccgcctccggcaatccgaaccacaagctcggccacgtcgaggacgccgccgtactccccttgctcttcgacgagcagtacaacaccttgcaccgcttcggctacgccgtcgacccctacggcctncacatcgttggcgacgcccagccctcggtcgagcccgacaccgaatacaaccttgccccctgcgagcacaagcagccgccgctgcagttcaaggacgaggagg

SEQ ID NO: 416418 - DNA, 497 bp, Oryza sativa
caggttttatgctctcaatgaatatactcctgttggtggttcttttcttaggacggtggagcgccaggttgggcccaaatttctctttccaattggtgttaatgacactgttgttgggatttatgatgatgaacctactagcatcatctcctatgcgcttgcttcccatgaatatcatcttcagctatcagatgaactggaaggcgacacaacagataattcactctcagtaactgatttgagaggtgcttcattaactgaatcagtggatgaaactgcttctgaacttctaagaagttttgtttctacagaggacaatatcctctatatgtcaggaggcaagaatccatccccttcagatccactcgcatacagaaaagcaagtcacataaaggtgaattttggagatgaaggtcctttaggacaagtgaagtatactgtaatttgttactatgcaaaacaattggatgctttgaggagaatatgctgcccatcag

SEQ ID NO: 416419 - DNA, 485 bp, Oryza sativa
atcttcttttctctcagctctcacagctcactgcatggggggccgcggccaccatggggctctcctccccggtgatggcccgcgcggcgccgtcgacctcctccgcgctcttcggcgaggcgcggatcaccatgcgcaagaccgccgcgaagcccaagccggcggcgtcgtcggggagcccgtggtacggcgccgaccgcgtactctacctcggcccgctctccggcgagccgccgagctaccttaccggcgagttcccgggcgactacggctgggacaccgcggggctctacggggacccggagacgttggccaagaaccgggagctggaggtgatccactcccggtgggcgatgctgggcgcgctcggctgcgtcttcccggagcttctcgcccggaacggcgtcaagttcggcgaggccgtgtggttcaaggcgggctcgcagaccttaaccgagggcgggctcgactacctttggaacccg

SEQ ID NO: 416420 - DNA, 473 bp, Oryza sativa
gttttcaccatcaaggatgacttgcaagagcaactgaaaagtctagagagtggagaggttctttctgacaaggtgattgatgatttgaaaagaagaaagcttatcacaaaagagaaatcaatttggtatgccctaaagaaaggaccccagtttgtcgcgaagaggaaaaaactggcaactgatgtgacacaagagcatctcataagtggtgattggaaggatcttgaattcaaagactataactttggagcccagggacaacctattgccattggttatgtgcaacctttgttggaggtgcgagaggaaatccagaacatctttcttcagatggggttcactgagatgccaactaacaattacgttgagagcagcttctggaacttcgatgccctgtttcagccccaacagcatcctgctcgggattacacgatacattttctcttgaagcccctgctgctacaaacaattgt

SEQ ID NO: 416421 - DNA, 234 bp, Oryza sativa
gcctcggactcctctaattctctctcttgctttctctctcctcgcttcccgggtttgatacgtggggtagggaagcgattaaccggcgatcgatcgatcgatgcaagtgatcgcgctcggttgatccaggaattggagagcatcggctgatcgagagatggcggggaacgagtggatcaatggctacctggaggcgatactggacagcggcggcgcggcggggggaggtgggag

SEQ ID NO: 416422 - DNA, 454 bp, Oryza sativa
tgataatccccccctcctctggcagacatccgggggccaccacgtcagcctctcatggccttcgcggcggagccgatggatctggaggtgtcgccggattcctcgccggcggcggcggcggcggcggcggtgtgctcgatctgcctggacgcggtggcgtgcggcgacggggtggcggcgaggtccaccgcgcggctgcagtgcggccacgagttccacctagactgcattggatctgcatttaatgcaaaaggggtgatgcagtgcccaaattgtcggaatattgagaaaggtcactggctctatgggaatgagagccaaccatgtagccattctgatacaggtgactggctgaatggtgaaacctttgactacccgttctcatttgaatttgggtgggggtcccttcaatacaccattgacctctgtttttggggaaagcgaatctgagcca

SEQ ID NO: 416423 - DNA, 498 bp, Oryza sativa
  unsure (1)..(498): unsure at all n locations
ctatgatctcatgctctcgcatgctttggtggcgctggtcctcaacatgcatgtgctatggcaagatcccttggcatgtctgagttacttattcatcgctactgtggcatattgagtgcatatggaatgggccttgctgatgttattgaagatttgcaagagccatactctgctatttataatgttgattctgctgcagaggcatctcgaagagtagatcttttagttaagcaggtgaaagaaaagttaatagagcagggttttggagaggacagcatcaggacacattcatacttgaacttgaggtacgaggcaaccgatacagcaatcatggttaaacaaccagagagagaatctggaagtgattatgctgatgagtttgtgaaactgtttcagcaagagtatggcttcaaattattaaacagaaaaatactcatatgtgatgtgagggttcagggagtnggtgctacaaatatcttgcagcctcatgaactgaca

SEQ ID NO: 416424 - DNA, 530 bp, Oryza sativa
gcttattataggcgcaacacagaaaccctcaccgcggcccgcatccatggcggaggagcacgagacgaggccgccgtccgccggaaggccgccgtcgtccggccgcggcagggccgacgacgctgacgagagggaggagggggagatcgccgacgacgacttcggccacgcgccgccgcaggccaaccccgccgcgccgcacccgctcgagcacgcctggaccttctggttcgacaacccgcagggaaagtccaagcaggcaacctggggaagctccatccgccccatccacaccttctccaccgtcgaggacttctggagcctttataacaatatccatcacccaagcaagttggttgtgggagctgacttccattgctttaagaataaaatcgagccaaaatgggaagatcctatctgtgctaatggaggtaaatggaccttcagctgtggcagaggaaagtccgacacaatgtggttgcatactttattggcaatgattggcgaacaattcgattatggggatgaaa

SEQ ID NO: 416425 - DNA, 563 bp, Oryza sativa
  unsure (1)..(563): unsure at all n locations
ctcaccatcccatccacgcttctcgactcccagacgacgcttgctgctgcctttcgtgaaccccccacttctccttccccgccgccgctcgccgccatggatgaggagtacgacgtgatcgtgctggggacgggcctcaaggagtgcatcctcagcggcctcctctccgtcgacggcctcaaggtcttgcacatggataggaatgactactatggaggagattccacctcgctcaaccttaaccagctgtggaagaggtttagaggggaagacaaacccccggctcatctgggctcaagcaaagattacaatgtagatatggtcccaaagtttatgatggcaaatgggacactggttaggaccctcattcacactgatgtgacaaagtatttgtcattcaaagctgtcgatggaagctatgtcttcagcaaagggaagattcacaaggtacctgctactgacatggaggctctgaagtcccctttgatgggtctttttgagaagcgcagagcanggaacttctttattacgtccaagatacaatgaagctgatccaaaacaca

SEQ ID NO: 416426 - DNA, 488 bp, Oryza sativa
gtcttctccccgccgcgctcgtgccctcgcctcgggtggcctcgccgaaaccctaaccctagaatcgtcgatcgcccgcgagagaggagggggagggggacgagggggaaccgcgcgtgatggggaagaagaagaagcgcgtggagaaggtgttctgctactactgcgaccgcgagttcgacgacgagaagatcctcgtgcagcaccagaaggccaagcacttcaagtgccacgtctgccacaagaagctctccaccgccggcggcatggccatccacgtcctccaggtccacaaggagtccgtcaccaaggttcccaatgcaaagcctgagagggaatcaacagagattgagatctttgggatgcaagggattcctccagatgtgttggccgcccactatggagaagaggaagacccttcatcgaaggtagccaaagtggaagtgccatcgctaaggcctcctgttatgcccaatccagcgggcatg

SEQ ID NO: 416427 - DNA, 569 bp, Oryza sativa
  unsure (1)..(569): unsure at all n locations
cgcgcggtgaacgcggcctcaccatccggggctgggcgccgcagatgctcatcctgaaccacccggccgtcggcgggttcgtgacgcactgcgggtggaactcgacgctggaggccgtgaccgccggcgtgccgatggtgacgtggccacggtacgccgaccagttctacaacgagaagctcatcacggaggtgctcgaggtgggtgtcggcgtcggctccatggacttcgcgtcgaagctggagaaccgccgggtgatcatcggcggcgaggtggtcgcgggagccatagggagagtgatgggcgacggcgaggagggcgaggcgatacggaaaaaggcgacggagctgggcgtgaaggcgaggggcgcgctggagaagggtgggtcgtcgtacgatgatgttggaattctgatggacgagttgatggctcgccggggctccgtcaatgtgtgacagcactccctaacanggtgattgacggcttgacgcatcaagaagatgtgatcggacattcggacatnctcagagtccagactatggtctntntcctcagagnntttttttttg

SEQ ID NO: 416428 - DNA, 484 bp, Oryza sativa
gagctcaatcagcaacaacatctatctgggtcttgcttagttaagtccttcgccctcccaagaagaagaagatgtcttgctgcggcggcaactgcggctgcggcagcggctgccagtgcggcggcggctgcggcggatgcaagatgttccctgatgtggaggccacagccaccaccaagaccttcgtcctcgctgctccatccaacaaggcgagctctggaggaatggagatggcggtggagagcggcgagaacggcggctgcggctgcaacacctgcaagtgtggcaccagctgccgcggctgctcctgctgctcctgcaactgaatctatcgtcgtcgtcgcccggctgcatgaggatttatcgtatggatgctgctactgtcgatcagagctttgatcgaggccttaatttgcttgcattagtacccagcttatatgtaggcaggccttgccttttgctctgacgcctaaataaaaccgtc

SEQ ID NO: 416429 - DNA, 473 bp, Oryza sativa
gttctacattaaagtggatgatgatgtacatgtaaatatagcaactcttggtaacatattggctaagcatcggtcgaagcctcgagcttacattggttgcatgaaatctggtccagtcctggctcagaagggtgtaagataccatgagcccgagtactggaaattcggcgaatgggggaacaagtacttccgtcatgcaaccggccagttatatgcaatctccaaggatctagcttcttatatatcaatcaaccagcatgttctccacaaatatgctaatgaggatgtatcattaggagcatggttcataggtctagacgtcgaacacgtcgatgatcgcaggctttgctgcggtacacaaccagattgcgaatggaaggcgcaggcaggcaacgtgtgcgccgcgtcgttcgactggagctgcagcggcatctgcaaatcggcggatcggatgaaggaggtccatcaacgat

SEQ ID NO: 416430 - DNA, 488 bp, Oryza sativa
  unsure (1)..(488): unsure at all n locations
gcagctgcttcgctctgctttctccgtaggggttatccctttgcttctcctcgtctccctccccctcgcacgcaaaggcacaaagcccggattccaccgccggagccgacccgcttcgaggcgaatcgagagttagctttccagccagcaatcgaggatgtcgtcggtgcagctctccggtgccggagtcgccgcggtggccttcaccaagaatggcgcgtcttccttcgacgggctccgcctcgcgccgccatctgtgcgagtctgctcctccaggcgcccgtctcgtagcctcgtcgtcaaggccgccacggtcgtcaccccaaagtatacctcgctcaagcctctgggagacagagtgcttgtgaagcttggtgctgcagaggagaagactgttggtgggattctgcttccgtcaaccgcacagtctaagcctcanggaggtgaggttgtcgctgatggagagggaagaactatctgggataaga

SEQ ID NO: 416431 - DNA, 436 bp, Oryza sativa
cttgctgatcatcatatatctcttgtgagcttcagcaatgggggctctgccaagggctctagtcctcggcgtttgcgccgccgtcttgctggtgaacgtgctcgccgttgccgccgacggcgacgccgcggcggcggcgtccatggtcgtcggattggccaagtgcgccgactgcaccaggaagaacatgaaagctgaggccgttttcaagggtgttcgcgtggcgatcaagtgcaagaacagcaacggcgagtacgagacgaaggccaccggcgaggtcggcaagtctggcgcgttcgccgtgcccctcgcggcggacctcctcggcgacgacggcgagctgaggcagcaatgcttcgcgcagctgcacagcgcggcgtcgaaccagccatgcccacggcaggagccgtcgtggatcgtcaacgcacgcgacgac

SEQ ID NO: 416432 - DNA, 431 bp, Oryza sativa
tttgtcgcgtgggtcgtcttcttgctggtgtgggcgaggtggaggaggaggaggagaagctagccgcggcggcggcaatggcgacaagcgggctgaggagctgcagcgcggtgcgcgatcccagcctgctggacgccgacgtggacaggagccgcctgccagtctgcgcctacgccaccacctacgggcgcgctaccaggtcctccgagtggatgccgcatcagccacgccccgtccacctagacgggtcctctcaccgtgactctgggggcgacccgctgggcctctccaccggggcccagaacatcgagcggatcacggagcctgacgggtaccactgacggagcgccacgctcactgtgcctggggtctcgacaacggaggcgctcgggccgatcatcttggagcaggccctacctgggcgggctccc

SEQ ID NO: 416433 - DNA, 427 bp, Oryza sativa
tttttgatggaggggaaggaggaggatgtacggcggggatccaacaagatctcggagaggcagccgatcggaacggcggcgcagggctccgacgacaaggactacaaggagccgccgtcggcgccggtgttcgagccaggggagctcaaatggtggtccttgtaccgggcagggatcgccgagatcatggccaccttcctgttcctttacatcaccggacttaccgtaatgggggtcaacaactccacctgcaagtgcgccaccggctgcatccagggcatctgctggtccttcagcagcatgatcttcggcctcggctactgcaccgacggaatctacggcggccacatcaaccctgcacgaacctttagcctattgactctgaggaagctgatcataaccagggtcctcttctacatggtgatgc

SEQ ID NO: 416434 - DNA, 471 bp, Oryza sativa
  unsure (1)..(471): unsure at all n locations
gcctcattgtcaacgccatagccgccgaggttgaggtgagccacctagaggggagagagagcgcgccgagatgtccggcgaggaggaggagaacgcggcggagctcaagatcggggaagagttcttgaaggccaagtgcctgatgaactgcgaggtggcgataatcctggagcacaagtacgagcagatccagcacatgtcggacggggacccgtcgtcgcaggtgtcgcaggtgttcgagaaatcgctgcagtacgtgaagcggttcagccggtacaagaacccggacgcggtgaggcaggtgagggagacgctgagccgctacggcctcgccgagttcgagctctgcaccctcggcaacctctgccccgacaccagcgacgaggcctgcgccctcgtnccctccctccgctccggcggcaggttcgtcggcgaccccggcagcgagaagatcgacaagatgctcaacga

SEQ ID NO: 416435 - DNA, 527 bp, Oryza sativa
  unsure (1)..(527): unsure at all n locations
cgcttgggggaaggaggaggaaaggtgcacaaggtcagactaagtttgcgttgaagaacaaaggagaggaaaaatgtcgcctgctgaggcatcgcgtgaggagaatgtgtacatggcaaagcttgccgagcaggctgagcgttacgaggaaatggtcgaattcatggagaaggtggcaaagaccactgatgttggtgagctcaccgttgaggagcggaacctgctttctgtggcttacaagaacgtgattggtgctcggagggcatcgtggaggatcatctcttctattgagcagaaggaggagagccgtgggaatgaggcatatgttgcatcaattaaggagtaccgtagcaggattgaaactgagctcagcaagatctgtgatggtatccttaagcttctggattcccaccttgtcccatctgccactgctgcagagtccaaggtgttctacctgaaaatgaagggtgactaccacaggtaccttgctgagtttaagtcangagctgagaggaaggaagcagctg

SEQ ID NO: 416436 - DNA, 469 bp, Oryza sativa
  unsure (1)..(469): unsure at all n locations
ttgtttgcggcggcggcggtcggcgaggagggagccagctgttgcgcggtggggaaccggtggccgcggcaggagacgctggcgctgctcaagatccggtcggacatggacgccgcgttccgggacgccaccctcaagggcccgctctgggaggaggtctccaggaagctggcggaggagggttaccggaggagcgcgaagaagtgcaaggagaagttcgagaacgtgcacaagtattacaagcgcaccaaggagagccgcgcggggcgcaacgacggcaagacgtaccgcttcttcacgcagctcgaggcgctgcacggcaccgccgccggcgtcgtggcggcgccatcgccggtgacgtcgctggccccgccgccggcgacggctgtgggggtgtccggcggngtgcgcgcccccgacgagccgtcgtccgcggtggtgatggggaacgtgatgagcttttcgacgt

SEQ ID NO: 416437 - DNA, 470 bp, Oryza sativa
ctcttctcgccgctcgcagcgaaaaagccagcgcctcccagcgcccacgcgatcccgacgaatcgaatcgagtccgagacgccgatctcggattcgagaccgttgatttcaaccaacacaagccctcctccggatcgatccgctcctcttcagccatggcaggaatggcacccgaaggctcccagtttgatgctaagcactatgacagcaagatgcaggaactactgcaccaaggtgacaatgaggaattcttcacttcatatgatgaagtttttgagagttttgatgacatgggcctccaagagaaccttctcagaggcatctatgcttatggttttgagaagccatcagctattcagcaaagggggattgttcccttctgcaaagggcttgatgtgattcagcaggctcaatctggaacaggaaaaactgctaccttctgttctgggatcctgcagcaacttgactat

SEQ ID NO: 416438 - DNA, 491 bp, Oryza sativa
cttggttgcaaaaaccaagacatacacacagaatgaaataataacaaaggtttcctagcctcaaaggatacatatatatagtttccctacaatacaatggagcctgtcaatgatttccaggaaggcatttcaacagagcatgcctttgaggcagagcctgtgccatcattgtcggaaacaataacgccacgatcaatggtggtgagcttcatccttagtgtaactctcagcatcgtcgccatgaaggtcaccttgagctctggcttcattccgtcgttcagcatcccagccggcctcctcggtttttgtgtatcccgtgcgtcgatccgcattcttgactacttcgcagtggcacaactaccattcacacgccaagagaacaccatcatccagacctgtgtcgtcgcatgcacctcgatcacattcaccggtggctttgggacatatattcttgcaatgggaaagaaagcagctgtaggggatgtcaatgc

SEQ ID NO: 416439 - DNA, 495 bp, Oryza sativa
  unsure (1)..(495): unsure at all n locations
gcgcgctcgttgccaccacaggctacgcaaaattctctccctgcctcctccaccacctccactccgacgatcctcctcctgatcctgtgccggccggcgatggcgtaccggttgctggagctcacgctggtctccgcgagcgacctcaagaaggtcactctcttctcgcgcatgcatgtctacgccgtcgcctccatctccgggagcaacgtccccatgcccatgcacggcacccacgccgaccgcaacggcggcagcaaccccgcgtggaacaccgtgctccacttccccgtccccgcccgcttcgacacccgcggcctcgccctccacgtccagctccgcgcccggcgctccttcggcggccaccgcgacgtcggggacgtgttcgtgcccctcgacgacctcctcgccggcgcgcacgacggcggcgagccgaggcccgctagctaccaggtgcgccgtcccatgtncgcccgcgcgcacggtacgctctac

SEQ ID NO: 416440 - DNA, 579 bp, Oryza sativa
gaactggtgtgggtggcgagctcctgaccatctctgtgggccctctccgtttcgccggtgcctcgccggatccatctccaaaagaggacgtcggagaagatgatgggcggattcctctcccgggtcctcctgttggcctttggctacgcctatccagcatatgagtgctacaagactgtcgaactgaataaaccagagattgagcagctcatattttggtgtcagtattggattctagtagctctgatgacggttatggagagatttggagattttacaatatcatggctaccattttactcggaagcaaagctgatgttctttatatacttgtggtaccctaagacaaagggaactacctacatttatgggactttctttaggccatatatttcacagcatgagaatgaaattgaccgtaatttgcttgagttgagagctcgagccaccgatgtagttgtcctttattttcaaaaggctgctactggaggacagaatacattcttttgacgtttgaagatgttgcttctcaacaccatctcagagggcaagtcaacaaccttctaggagccgaacaac

SEQ ID NO: 416441 - DNA, 530 bp, Oryza sativa
  unsure (1)..(530): unsure at all n locations
ttctgtgtgtgtgtcttggttgcaaaaaccaagaggtacacacagaatcaaataataacaaaggtttcctagcctcaaaggatacatatatatagtttccctacaatacaatggagcctgtcaatgatttccaggaaggcatttcaacagagcatgcctttgaggcagagcctgtgccatcattgtcggaaacaataacgccacgatcaatggtggtgagcttcatccttagtgtaactctcagcatcgtcgccatgaaggtcaccttgagctctggcttcattccgtcgttcagcatcccagccggcctcctcggtttttgtgtatcccgtgcgtcgatccgcattcttgactacttcgcagtggcacaactaccattcacacgccaagagaacaccatcatccagacctgtgtcgtcgcatgcacctcgatcacattcaccggtggctttgggacatatattctngcaatgggaaagaaagcagctgtaggggatgtcaatgcccaaaataacgtgaggagccaagct

SEQ ID NO: 416442 - DNA, 576 bp, Oryza sativa
  unsure (1)..(576): unsure at all n locations
catatgtcctcacctttctgatgtcaatagccatggccgtcctcttgctcgttgcgttgttctatcggatcaagaagcaggcagctgccatggcggccaagaggaagcaacaacccaagctaccacccgggctagctaccatgccggtggttagcaacatgcaccaaatgctgatgaacaagccggtgttcaggtggatccaccgcctgctcgacgagatggacaccgagatcctgtgcctccgtttcggtcgcgtccacgtgatcgccgtcgcctcgccggagatggcccgggaggtcctgcgcaagaaggacgccatgctcgcctcccggccatcgtcgttcgcgtcgcggacgttcagctttgggtacaagaacaccatcatgtcgccggccggtgaccagtggaggaagatgaggcaggtgctcacgtcggagatcctctcgccggccatggagcggcggatgctcggctcgcgcgtcgaggaggctgaccacctngtcaattacgtctacagccactgtaatgatgggcactgagaacgtccgcacgtaacgagacacttctgtggcaaca

SEQ ID NO: 416443 - DNA, 397 bp, Oryza sativa
ttgttcgccagactctccccaggtgaggattcagccatgaagggggccaaatccaagggcgccgccaagcccgacgccaagttggctgtgaagagtaagggcgcggagaagcccgccgccaagggcaggaaggggaaggccggcaaggaccccaacaagcccaagagggctccctccgctttcttcgtttttatggaggagttccgtaaggagttcaaggagaagaaccccaagaataaatctgtcgctgctgtaggaaaagcagccggtgataggtggaaatccctgaccgaagcggacaaggctccctatgtagccaaggccaacaagctcaaggccgagtacaacatggccattgctgcctacaacaagggcgagagcactgccaagaaggcac

SEQ ID NO: 416444 - DNA, 471 bp, Oryza sativa
tatttcttcctataacagggcaagagcagatcgatggtttccttttgatttctgaggagaagaggatcgatcgtttcgttcgatcgtttggttttgaattttgaggagaagagaagagaagaggatcggaagagatggccggcggcggcgtggaggacacgtacggcgaggacagggccaccgaggatcagctcatcaccccatggtccttctccgtcgccagcgggtacacgctgctgagagacccgcggcacaacaagggtttggccttctcggaggcggagcgcgacgcgcactacctccgcggcctcctcccgccatccatcgtctcgcaggagctccaggagaagaagctcatgcacaacctgcgcaactacaccgtccccctccagcgctacatcgccatgatggacctccaggagaggaatgagaggctgttctacaagctcctgatcgacacctggaggagct

SEQ ID NO: 416445 - DNA, 489 bp, Oryza sativa
tttttcaaagaaagaaaagcatcacaaatctgaggcactgtctctcgttcgcgcaaagcacgctgcttttctccgctttgcgagcaccatagcctagcccaccatgtgcggcggcgccatcctctccgacctcatcccgccgccgcggcgggtcaccgccggcgacctctggctggagaagaccaagaagcagcagcagcagaagaagaagaacaagggcgcgaggaggctgccactgcgccaagaggaggaggatgatttcgaggccgacttcgaggagttcgaggtggattccggcgagtgggaggtggagtccgacgccgacgaggccaagccgctcgccgcgccccggagcggcttcgctaaaggtggattgaaaaacactactgttgctggtgctgatgggcctgcagcaaggtctgctcaaaggaagagaaagaaccaattcaggggtatcccccagcggccatggggcaaatgggctgcgga

SEQ ID NO: 416446 - DNA, 460 bp, Oryza sativa
acgtctttcatcggcatcgaccttggcacgacctactggtgcgtgggcgtttggcaggacgaccgcgtggagatcatcggcaacgaccagggcaaccgcaccaccccctcctacgtaggctataacgactcctagaggctaatcggagatgctgccacgagccacgtctgcttgaacccacatcaacaccgtatgcgatgccaagcgtttcattggcaggaggtctagcgatgcttgtgcttacagtgacattgagctctggccattcaaggtgattgctggacctggggacaagcctatgagtgctggacagtacaagggtgaggagaagcagcatgctgccgaagagatctgatgcatggtcctgatcacgatgcgtgagattgctgaggcctaccttggcaccaccatcaagaatggcaggggcactggtcctgcatactataatgactcccagagg

SEQ ID NO: 416447 - DNA, 442 bp, Oryza sativa
cggtttcttgggaaacaagaaaaaaaagagagagagatggcagctacagactccctgaagaggagcctcctgctaccatctcctatgtgtgacttcagtagtgcagcactctccatctcaacccaggctaggaggaggtcatggccgccacggggggcaaggatgcaggtagcaacagctgcagactccaagaacattcttgtgatggggggaaccaagttcattggagtcttcttgtccaggatccttgtcaaggaggggcaccaggtcacattgcccactagaggaaaggcccccattacccagcagttgccacgagagtcagatgcaaagtatgcagagttctcttcaaaggtggaagacttgaaggtgacaggcaagactgtgatttcgctaagacaagacttgcggcatagggctttcatgtttgctacgacataaa

SEQ ID NO: 416448 - DNA, 549 bp, Oryza sativa
atttttatttaaactcgcacaagggagaagagaagagaggcttcgtgagagtggtggaggaggagaccagcgcgtggtggtggtggtgttggcggcgatggatcgggttcgcggatgcgcgttcctgctcggcgtcctgctcgcaggatccctgtttgcattttctgttgcgaaggaggagaccaagaagctcggtaccgtgatcggtattgatcttggtacaacctactcgtgtgtcggtgtgtacaagaatggtcatgtcgagattatcgccaatgaccagggtaaccgtatcacaccctcatgggttgcattcaccgatagcgagaggctcatcggtgaggctgccaagaaccaggcagctgtgaacccagagaggaccatcttcgatgtcaaacgtctcattggaagaaagtttgaagacatggaagttcagagggacatgaaacttgtcccctacaagattgtgaacaaggaccgtaagccctacatttaggtcaagatcatggatggagagaacaaggtctttagccctgaggaggtcagtgc

SEQ ID NO: 416449 - DNA, 447 bp, Oryza sativa
gttgttagctctcacggggcctccttaccctcggcgtcgctcctatccgggggagcctgggcacggccgacgaccttctccccatccgccggcgctacacgcgcgcgcgcgcggtggaggtccaaagcaagggccaccaaggcaacttgcacacactgaagctgatggggtacggaaacccgacggtgcctagccccaacctggtcaagcttaaggaggccaggacgccgttcgatttcaagacaggagtcaagaagcgcatgaagacggcctacactgggatggcgcaatccacgaggacgcatgcaagagcccagggaccactggtgcgcgccacaccgacacacatgcaagaccaaggctgcaaagaaggataggatccggacaagaaactagagcaatgtgcagatacggtggctgaaaaactgcataaataggacccacaga

SEQ ID NO: 416450 - DNA, 354 bp, Oryza sativa
gttgtaaagttgcgagagagagagagagagagatcagttagtttgttgagtggaagcacatcaggaagatgctggagaagctgtgggacgacgtggtggccggtcctcgaccggagaccggcctcgagaagcttcgcaaggccgctacaacccgcccccttgtcatcaacaaagatggcgacggcgaggcgagcggagtggcgtacaagcggacgcagtcgatgccgacgaccccgacgacgccggtgacgccgtcgtctttgttcccgacgacggcgacgacgacgacgccgtggggcagcaacgtgtggaggagcgtgtttcacccggggagcaacctcgccaccaagagcc

SEQ ID NO: 416451 - DNA, 520 bp, Oryza sativa
tttgttttaagagggacgtggtatcatatgggagtatgatttcgtgcttctcgaaagccggaagtttggacactgtcatgaagctctttaaccgcatgaaggaggctggtgttgtaccagacaggaaaatctacaatgcagttgtctacgctctcgccaagggacggtgtgtgaatgaggcaaaggctcttgtccggagcatggaggagaagggggttgccccagacacggccactttcaactccctcattagacctctttgcaaggctcgtcaggttcaggaggcaaggaaaatgcttgatgacatgttagggagagggctgtcaccttcagtgagaacatttcatgcgttactcgatgtggctagaagccccattgaggtgtttgatctgttggataagatgaaagaattgcagtgtgacccagagatggacactttcattatgttgatcaggaaattctgccggtggaggcaacatgacagtgtggagaagctctggagtgcaatgcctgcaaatgg

SEQ ID NO: 416452 - DNA, 351 bp, Oryza sativa
attttgattatcatgctcttggtggccgtaacaggggtgaaaggctagtggtacatgaatcatcaaatattgtcataacaagagagaccttgcagtgcttgaacgaaacggagtggctaaatgatgaggtcataaatttgtatcttgagctgctgaaagagagggaactgagagaacctaacaagtttttgaaatgccacttcttcaatacctttttgtacaaaaagctcattactggtggggatgattaataagtatgccaaaagatggacaactcaaaggaagttaggttacagcctacttgaatgtgataagatctttgttcctatacacaaggaagtgcattggtgt

SEQ ID NO: 416453 - DNA, 462 bp, Oryza sativa
gcgctcttttttataaacacccaaaaacccaaccaaacggtagagccgccgtctccccgctgctccgtctccgactccggcgacgcccgcgcggccacgatgccgaacctcgagtgccggatgtacgagccgcggttcccggaggtggacgcggcggtgatgatccaggtgaagcacatcgccgacatgggcgcctacgtctccctcctcgagtacaacaacatcgagggcatgatcctcttctccgagctctcccgccgccgcatccgatccatctcctccctcatcaaggtcggccgccaggagcccgccatcgtgctccgcgtcgaccgcgacaagggctacatcgacctctccaagcgcagggtctccgaggaggaggcgcacgcctgcgaggacaggtacaacaagtgcaagctcgtgcactcgatcatgcgccacgtcgccgagaccctcgggatc

SEQ ID NO: 416454 - DNA, 359 bp, Oryza sativa
ctgttttttcctcaaggcgaacggcctccatcttggcggtcctgctactcccatggggtcgctcgtccccatcgccatcgccatggctctcatggtggttcaacctggccggcagatgactgcctttgctgctcggacgtccacagccgcggccgcggaggcgttctggcatgccgccatgcccggcgctcccatgccggacgccatcgtccagctcctccaccatgagcacgggcttgctagcgcccgcgggaaggccaacggcgggggcgactgtccaccgccgccgatggacttgagctacgactactacagggccctgccgtggagcgacgccccttccccggatgcattgaacc

SEQ ID NO: 416455 - DNA, 489 bp, Oryza sativa
tatttaatcccgtgcgacgcgtagagacctccgcctgcgctttctcctccaaagcccaagctaatccccctcctcttcctcgtcgccggcgagagctcttcgtcttctccaactcgaccggaagcaagcgcgcttccgatccgccatggtgctctcccacggcgtgtcgggctccgatgagtccgtccactccacgttcgcctcccgctacgtccgcacctccctccccaggttccggatgccggagcagtcgatccccaaggaggcggcgtaccagatcatcaacgacgagctgatgctggacggcaacccgcggctgaacctcgcgtcgttcgtcaccacgtggatggagcccgagtgcgacaagctcatacaggcctccgtcaacaagaactacgtcgacatggacgagtaccccgtcaccaccgaactccagaaccgatgtgtgaacatgattgcacacctcttcaatgctcctctaggggactc

SEQ ID NO: 416456 - DNA, 396 bp, Oryza sativa
cagttccctttcccaaccctccccgaggtcgcagccttatggtctcctgtcccctccgcgaggtcaggaaatcatggcttcaacattcggtgccacttctacggatggcctcatggctgcgccaaccggaattgtatcagacaagaagccatcttctctatcttcggtgtcatctgtttctgttgccagccgaccacgcaatgcacgccttcagaggaagtgcaacttcagggtaaaagctgccaaggagttgtacttcaacaaggatggctcggctatcaagaagcttcagactggagtaaacaagcttgctgaccttgttggagttacactgggaccaaagggaaggaatgctgttttggagagcaagtattggtcccctaggattgccatgat

SEQ ID NO: 416457 - DNA, 486 bp, Oryza sativa
ttaattttgatgttactgcttcgcagaagttcattgatgctagcatcacccctaaagttgttacttttgacaagaaccctgacaaccatccttaccttctgaaatttttccaaagctcagctgccaaggctatgctatttttgaacttctccactggaccgtttgagtctttcaagtcagtttattatggtgctgctgaggagttcaaggacacggaaattaagttcctcattggtgacattgaggccagtcaaggtgccttccagtactttgggctgagggaggatcaagtaccactcatcatcatgcaggatggtgagtccaagaaatttttgaaggcacacgttgagcctgaccaaattgtttcttggttgaaggaatactttgatggtaaattgtctccattcaagaagtctgaacctattcctgaggtcaacgacgagcctgtttaagttggggaccctgataacgtccatgattttgtct

SEQ ID NO: 416458 - DNA, 277 bp, Oryza sativa
tggctgaggaaagaggagaagaaaagatggcggctttcgcctccgctctccgcgttctcccctcgccgccggctgcggtgcctcgtcggcttcgctcgagagaacaaaggcagggctgtagatctccaaggtattcaaaagtcgtggcttactacgctctcactactccgccgtataaacttgatgccctggaaccttatattagcaagaggacagttgaacttcactggggtaagcatcaacaagaactttcggatcgcttgaataatcagcttgc

SEQ ID NO: 416459 - DNA, 272 bp, Oryza sativa
tccttgtagtacttgctgtagtcatcaactaggacggcgtacatgatatcaaagtactgctcattattgaagctgcaaaccaccccacagaccctgaggcttatgagatcctgtccaagaaaggggttatgattattagagacattctcacgaactccggtggtgggacagagagctacttggagtgggttcagaacattcatggtttcatgtgggacgaggcgaaggtgcacaatgagctgaagacctacatgacccgtggtgtcagggat

SEQ ID NO: 416460 - DNA, 447 bp, Oryza sativa
cggctttctctgactgacattaagattgacatcaagcgtgtccctaagaagaccaccttgattaaggcaatggaggaagctgatgtgaagaacaagtgggagaacagctcatggggtaagaaactgattgtccagaagaggagagcatccctcaacgactttgacaggttcaaggttatgttggcgaagatcaagcgtggcggcgctatcagacaggagcttgctaagcttaagaaggaggctgctgcgtagatcattttggtggtgatcagttgagattttgatcaatgatgtttgatgtccctaaatatgaaacattgtgccagccactgttattgggatctcatgaaaaatttaagttttgaactcctgtgtttagaccttgtgccacaaattctattcagaatctaagatagcatgccatatgttgtgtgaagtgcttgaaca

SEQ ID NO: 416461 - DNA, 424 bp, Oryza sativa
ggaatattgatacggtggaacgcgtacttacccacaagttaggtgcatgccatggcaccattcatggcgtgcgcctcgccaccggtactcacgctggccctgctcgcgtagtgcggtgcccttctagccacctccatgctcccggcgcgtgcgacggcgggcagttgcttggacgtcggcgacatggtgatgatggacaggttccgcgcttggcagggagctcacaaccggtcgtacccgagcgcagaagaggcgctgcagcggttcgatgtgtaccgccgcaacgcggagttcatcgacgccgtcaacctggcgcggcgacctcacttaccagctcgccgagaacgagttcgcaaacctcaccgaggaggagttcctggccacgtacaccgggtactacgccggcgatggccccgtggacgac

SEQ ID NO: 416462 - DNA, 285 bp, Oryza sativa
gctctccaagggggaaggcgacatcagggccgtgctggtgacccccgacggcaagttcaacaccgccggcatgatcgcggccaagtgcggctgctggaccatgctcaagggcggcgccacctcctacgacgacggcaagggcgacatcttcttcgagaccaacgtgacggcggaggtgatggcggaagggatggcgctgcagcccttcagcttcgacgaatggaagggccatcgcgcggagtccgtcaagaaggagaggatgaagaaggtgaagatcacggtggt

SEQ ID NO: 416463 - DNA, 371 bp, Oryza sativa
tgttcattcgttcgcccacgcgtccgcccacgcgtgcggttcagcttcccgttcaggttcaggcaatcacgcctactctcctgtcctctcctctccttcttcactccactccaacgccccacgccctcccccgctttataagggggagctccacatcaccacccttgccacaccatcgggggagccaccgcatctttcctcctctttccctggagccatttcctcccctaaagggcctttccttttcttgatctctcttttatcttcgatccatccatccatccggccatccttcctaggtgaatatcaacgatgcagttcaacagtgtgtttcccttagaggggtaagcatgcctgagcccaataaggag

SEQ ID NO: 416464 - DNA, 385 bp, Oryza sativa
tattttgaatctctagcttacacactagtttttgttctacgggggcgtctaccttggcaaggttatcagggtgaaaacaagggtttccttgtgtgcaaaaagaaaatggctacgtctccagaatcattgagctgcttttgcccacaaccctttagggagtttgtagagtatgtggtcaacttgaagattgatgaacatcctaacatatgcaaagtgtatattccttttcgatactgcggtgggcccaaatgcccatatcaggccaattaacaccgatggtgctcagaagcttatacatctagttggccaaaagagaggtcgcttattgattggaagagacagatgaacatccaaagaagaagatcaggatggttcttcctgcaac

SEQ ID NO: 416465 - DNA, 343 bp, Oryza sativa
tccgtttccttcctccattcctccgccgctagaaccggctagaagctctcctcctcctgccatggcggcgacgatcgtgtccgtcaaggcgcgccagatcttcgacagcaggggcaaccccaccgtcgaggtcgatgtgtgctgctcagatggaacctttgcaagggctgcagttcccagtggtgcatcaactggtgtctatgaagctctcgaattgagggacggtggatctgattacttgggaaagggtgtttccaaggctgtcgacaatgtgaactcggttattgccccagctctgattggcaaggaccctacgtcacaggctgagcttgataacttcatg

SEQ ID NO: 416466 - DNA, 141 bp, Oryza sativa
agcctccgtcgccgcagcctcctcctctcgtcttctccttcgagttgttagctccctccttattcaaccatgggtaaggagaagacgcacatcaacattgtggtcattggccacgtcgactcccgcaagtcttccaccacg

SEQ ID NO: 416467 - DNA, 282 bp, Oryza sativa
atcagttacaccgttgcgcaaagaaaaacacaacaaagcactatatagagttctggaaacaagttcctccgagtgaaccctatcgtgtaatactgagcaatgtcagagataagttgtacaatacacgcgagcgagcacgccatttattagccagtggattttctgaaattcctgacgaagcaacattcactgatgttgagcagtccttggagcctcttgagctcttgtacaggtatctctgtgcctgtggtgataattctattgcagatatgcaatctttat

SEQ ID NO: 416468 - DNA, 177 bp, Oryza sativa
tgttttaatccagtagacttgttacgcctgttggtgttcgagtggtaggagcccttgggcttttccaggttcagatcgacgcctccttcctctggacattgttgctagttggtgatggctgagcaggctaatcaaccgactgtccttcagaagttcggtggccagttccaccttggc

SEQ ID NO: 416469 - DNA, 189 bp, Oryza sativa
tttttcttcctcccctctctaagccggggaagctaagccatggcgtccgtcaccgcccgcaccccggtcgcagccctccgctcgtcggcgtcgctcaagtctaccttcctagggcaatcctccacccgcctcgcccgcgcaccgactacgaggcgtaatgttcgggcggaggccatgggagagtgatta

SEQ ID NO: 416470 - DNA, 373 bp, Oryza sativa
gacctctctttttatgagctcttctagtttgagtgagagagcaacagaaagacgtagtgcaagatgcctatccgcaccatctccatggagagccaccaggaggtgtaccacccgggtgcactcaaggaggagttggacgagttcatgtacaccctcatcttcttcttacccggccaggtcttccggatggccttcagcaagctgaccggctgaggagcgacgacccccgcccgtctgatcgaggaggaggttgtccacgccttcgccctgttcgaggcggtgctcgtcggggccaacatattcggcggccacgtgaacccggtcgtgaccttgagcgccttcatcatgcgcaacatctccctgttccagggtc

SEQ ID NO: 416471 - DNA, 448 bp, Oryza sativa
cagccttataccctagctccgtctgccacctcccttgtctgttctagggtttttgcgtcggcgtcgtctccggcggcgattccgatggagttctggggtctggaagtcaagcctggacagactgtcaaatgttagcctgaagatgaacgcttgttgcacctttctgaggctgctcttggggaatcaaagaaaggatctgacaatgctaggatgtatgttacaaactgatgatcaaacgctagtcattggaaccctctcagctgacaagttccctcagatccagtttgatttggtctttgacaaagagtttgtgctgtcacacacttcaaagactgctagtgtgttctttcttggctacaaagtttcccacaccgctgaggaagatgaaatggattatgattctgaagaagctgaacatgaagatgatgaagataagatcattccagct

SEQ ID NO: 416472 - DNA, 486 bp, Oryza sativa
  unsure (1)..(486): unsure at all n locations
tttcttttccagcttgctgagaagaagcgcgcgagccagcaatctcgggcggcggctgcggcgaggaggaggaagtttccggagaggagggagatggagagcgacacggaggcagcgaacaagaatactcccgttgctctggcgcccataagaaatccgctcgccggctagaagctctgggagcgaaccctcaagctggtacgacgagcgtctgaggccaaatgcttgaagctaggagttaaggaggtcatgaagagcatccgccgcaggcagaaaggattgtgcatcattgttggcaacatttctaccattgatgtgataacacatgttcccatcctttgggaagaaaccaacattacttatgtatatgttccgtacgaagaggatctggacacagctgggactaccaagaggcctacctggtgagtattggttgtgaccaagccagancaggacgagcttgatgaagatgtcaaggagacactt

SEQ ID NO: 416473 - DNA, 498 bp, Oryza sativa
ggcgtttggttggagcgggattcggagggggagcgcggccacggaggggcacacgggggcgcaacagggtcgggcgctcggcgccatggatgctaagaagggctcgggggagccggagttcttcagcgagtacggcgatgcgagccggtacgaggtcaccgaggtggtcggcaagggcagctacggcgtggtggccgccgccgtcgacactcacaccggcgggcgcgtcgccatcaagaagatcaacgacgtcttcgagcacatctccgacgccacccgcatcctccgcgagatcaagctactccgcctgctgcgccacccggacatcgtcgagatcaagcacatcatgctcccaccctcccgccgcgagtttcgcgacatttacattatcttcgaactcatggagtccgatctccaccaggtcatcaaggccaacgacgacctcacccccgagcaccaccagttcttcctctaccagctgcttcgtgggatgaagac

SEQ ID NO: 416474 - DNA, 430 bp, Oryza sativa
caacgcagttaaaggcgtcttcgtactcgcctctctccgcgcctccgcgcttttcctcctgctctcccctctctcccttctccgccgccgtcgcagcatcaacccaatccgccgccatgagggagtgcatctcgatccacatcggccaggccggtatccaggtcgggaacgcgtgctgggagctctactgcctcgagcatggcatccaggctgatggtcagatgcccagtgacaggactgtcggtggaggagatgatgctttcaacaccttcttcactgagactggtgctgggaagcatgttccccgtgctgcattagatgatcttgagcctactgtgattgatgaggagaggactggttgctaccggcagctcttccaccctgagcagatcatcaatggcaaggaggatgcagctaacacctttgcccg

SEQ ID NO: 416475 - DNA, 553 bp, Oryza sativa
cggtctcgtgggcggacgcgtgggcgggcactgagctcttctactacttcgttgaatcggagaggagcccaagtacaggccctgtgatcctctggttgacaggcgggcctggctgctccggattcagcggtgtcgtctttgaagtaggacctatgaaatacgtgttggagccttataatggtagtttgccacgattggtttataatcagtattcatggacacagatggcaagcatcctcttcttggacactcctgttggttctggtttctcatacgctcatgatcctaaaggttataatgtcggggacatatcatcgtctttgcaagtcgtaacatttctgaagaagtggttcaatgatcacccacgctatctctcaaatcatttctatgttggaggaagctcatacgctggaaaggggattccaattatcatgaagttcatttcagaaggaattgaacaaaggcagcagccattggttaatcttaagttacaggggtatatagttggcaaccccattacaggctcgaagattgatgataatttcaaattcca

SEQ ID NO: 416476 - DNA, 565 bp, Oryza sativa
cactttcccacctcgtcgtcttccgcgccgccctctccctgctccaccgcctccgcctccgccttctctcgtgccgccgatctccatcgccggcgtgcggtgcaccgagatccacccgagatgtggcgcggctgcgtctcgcgtggcctcaggagcctctccaagggcaagggctcctcctcctccgcccccgtctccgccgccgctaggctcttctccaccgcctcgtcgtcgtacacggtggtggatcactcgtatgacgcggtcgtggtgggagccggcggcgcggggctccgtgcggcgatcgggctctccgagcacgggttcaacacggcttgcatcaccaagctcttccccacgcggtcgcacaccgtcgcggcgcagggtggcataaatgctgctcttggaaacatgacggaagatgactggagatggcatatgtatgacactgtcaagggtagtgattggcttggtgaccaggattcttcagtatatgtgcagagaagcaccaaaagcagttatagaacttgaaaactatgggtggccattttcaagaacctgagat

SEQ ID NO: 416477 - DNA, 520 bp, Oryza sativa
tttcttttccaccaccaccattcctccccccttctcccctcctccccgcgacgcgaaggcgaccaccacgcccatgccctccgttcctcgcggcggcgcgaccgcgaccaccaccaccagcagcagcagctagccccatggccaagtcgacgcccgctgcggcggcggcggcgcccgaggaggcgacggcggcggcgctgcgcctccgcctgcgccgcctcgtggccgccgtgacagccggcggcgtcggaggggaggaggccttcgacgaggcggcgtcggcgctcgcggcgctgagagacgcggagctggggccaccgccgaaggaccgccccggggccggggcggaaaggaggaggagtgggcacgcggaggcggcggccgtgccggagcagttcctctgccctatctcgtcggagatcatgcgggaccccgtcgtgctcgcgtccggccagacatatgatcgccgctttattcaagaatggttaagtgctggaaacaggacatgcccacagactca

SEQ ID NO: 416478 - DNA, 458 bp, Oryza sativa
tttgtcttcctctccaagtccatccccttccccgatctaagatccatccgatccaggccatggcggcgaccatccagagcgtgaaggcccgccagatcttcgacagccgtggcaaccccaccgtcgaggttgatatttgctgctcggatggaacatttgcgagggctgctgtgcctagcggtgcatctactggtgtatatgaagctttggaattgagggatggtggctctgattacttgggaaagggtgtcctcaaggctgttgacaatgtgaactctattattggaccagcattgattggcaaggaccctacagaacagactgtcattgacaacttcatggttcagcaactggatggaaccaaaaacgagtggggctggtgcaagcaaaagcttggtgctaatgctatcctggctgtctcacttgctctatgcaaagccggagctattatcaagaaa

SEQ ID NO: 416479 - DNA, 500 bp, Oryza sativa
tcaatttaaaggcctgtgtcaaggagagggtagtagcaccttgctctcctttgccttcagagaaaccggaagcaatggcgtctgctactctcctcaagtcatctttccttcccaagaagtctgaatggggtgccacccgccaggctgccgcccccaagccggtgactgtctccatggttgtccgcgctggtgcctacgacgatgagcttgtcaagaccgcgaaaaccattgcatcaccaggaaggggtatccttgccatggatgagtcgaacgcgacctgcggtaagaggcttgcgtcaattggccttgagaacaccgaggccaaccgccaggcttaccggaccctccttgtcaccgcaccgggcttgggacagtacatctccggtgctatcctcttcgaggagactctgtaccagtcaactgtagatggcaagaagattgtcgacatccctactgagcagaatatcgttccaggtattaaggtcgacaagggtcttgtg

SEQ ID NO: 416480 - DNA, 493 bp, Oryza sativa
ggcttgcctttaaggagtggcgcatccggcgctacatcccgagcaccatcggcatggccatcaccttcttcatgccgccgcgcgtgcccgtcggcatgtgcatcggcagcctggtggcgtacctgtgggagaagatggacgccggccgcgggcggatgctctcgccggcgctggcgtcggggctcatctgcggcgacagcgccagctcgatcttgctgtccatgctgacactcatgggtgccagggcgcccatctgcatcaagttcttgtctcgaggtgacaatgtcaagttggacgccttcttggcaacactccatgacatgagatagctactagctagctatccatgtagggaaactagatcattttctcaagtgtcaaaacttttgtacatatgtatccacgtcataggggcttgagttaggagtcgtggcaaactgtataatcaagtttcagttcagtctataaacacagtttgatctcctctatcaac

SEQ ID NO: 416481 - DNA, 470 bp, Oryza sativa
ctcctttgtttcctctcgcccccactccgccgccgccgccgcctcgcctcccgcgggatcgcgccatggcattgaacgcccccgtcctcgtgctgaaggactcgctgaagcgggagtccggcacgaaggttcaccatgccaacatccaggccgccaaggctgtggcagacatcatccgtactacactcggtcctcggtccatgttgaagatgcttctggatgcttctggaggtattgtggtcactaatgatggcaatgctatattgcgagaaatagatattgcacatcctgctgccaagtctatgattgagctaagccgtacacaagatgaagaaggtggtgatggcacaacatctgtcattgttttagctggtgagatgctccatgttgcagaagcattcattgataagcactaccacccaactgttatttgccgagcatacaccaaagctcttgaggatgctttagct

SEQ ID NO: 416482 - DNA, 478 bp, Oryza sativa
ggactaggttatgaagatcacacccgtgcagaagcagacgcgcgccgggcagcgcacccggttcaaggcgttcgtcgtcgtcggcgacaacaacggccacgtcgggctgggggtcaagtgcgccaaggaggtggccaccgccatccgcggcgccatcatcctggccaagctgtccgtggtgcccgtcaggaggggttactggggtaacaagatcgggcagccgcacaccgtgccgtgcaaggtcaccggaaagtgtggctctgtcaccgtgcgcatggtgcccgccccgaggggttcgggtattgtcgccgcccgcgtgcccaagaaggtgctgcagttcgccggcattgaggatgtcttcacctcgtcccgtggatccaccaagacccttggcaacttcgtcaaggccacctttgactgcctgatgaagacttatggattccttactcctgacttctggagggacaccaagttcgtc

SEQ ID NO: 416483 - DNA, 349 bp, Oryza sativa
cacccgtccgcgcttagggccccgctcgcgggccgtacctctaccgctccttcgtcgccgcgggcggcgcgttgccagccttcgccggcacgctcaacgccgacacccacaggcttgaggtatctgctgccctgaccgaaacttaccacgcgacctctggtgggccgtactcgtggggctactgctacaaggaggtgaagggcgcgacgtcagacttctgcgtgccgaacgctcgctggccgtgcgcgcccggcaaggcgtaccacgcccgcggacccatgcaaatcgcatacaactacaactatggggcggccggcgaggcgatcggcgcggacctgctgggcaaccc

SEQ ID NO: 416484 - DNA, 399 bp, Oryza sativa
gcgatgggatgctcacggaagatgaggtcaaggagggtattatactgagtgcgtcggcgaacaagctggcgaagctgaagggacacgcggcgacgtacgcgtcgctgatcatggaggagctggacccggacgaccgcgggtacatcgagatctggcagctggagacgctgctgcgcggcatggtgagcgcgcaggcggcgccggagaagatgaagcggacgacgtcgagcctcgcgaggacgatgatcccgtcgcggtaccggagcccgctgaagcggcacgtgtccaggacggtggacttcgtgcacgagaactggaagcggatctggctcgtcgcgctgtggctcgccgtcaacgtcggcctcttcgctacaagttcgagcagtacgagcggcgcgc

SEQ ID NO: 416485 - DNA, 537 bp, Oryza sativa
cgcactcgttgtccatgggacgccgcgcgcgcgctctcctccacgcgccggcgccgctcctgctgctgctggcactggccgccgcggcggcggcggtcgccgtggcgtcgggcccgcccttctcctgcggcgcgccgtccagcgcggcgttctgcaacccgaggctgcccatcgagcagcgcgcggacgacctcgtgtcgaggctgacgctggaggagaagatctcgcagctcggggaccagtcgccggccgtcgaccggctcggcgtcccggcgtacaagtggtggtcggaggcgctccacggcgtctccaacgccggccgcggcatccacctcgacggcccgctccgcgccgtcaccagcttcccgcaggtcatcctcaccgccgcgtcattcaacccgcacctctggtaccgtatcggccaggtgatcggcacggaggcgagggcggtgtacaacaacgggcaggcggaagggctcacgttctgggcgcccaacatcaacgtgttcagggacccgaggtggggccgcgggcagg

SEQ ID NO: 416486 - DNA, 509 bp, Oryza sativa
cttttctattaaggactggtatgatatcaaggccccgtcggtgttcaatgtgcggaacatcggcaagaccctcgtgtccaggacacagggtacaaaggtatgagcaccgcttccttgttcttggccgttgtataattctctgttgtgtttgcgctaagtgtttgctgcctaacccttcctgtgaacgaagggatctatacgaccttgacattgtcaactcgccatgtgatggattttgcaaattttgtaactttgctatgtgtgtgtgtgcactgcgtatggtaggattgatctatatgctgtactaagggctaagatagcatgggaaatatatgatgtattattagcatgttagttccatttttgttcctgatgagaggttacagatgctggtttggatgagcttagttattccgaatagatttgtcttctggtttagcttgtctagttgtacctcccaattgtttatttcatcaaacgtcaaacagcgtggttcaattgttgagagc

SEQ ID NO: 416487 - DNA, 397 bp, Oryza sativa
gacttatgtttgcggaactcctcacgcaaagcgacccgaggcggcaagagcaacctaagctcgggcgagcatggcgaaggacgaggagaacgatagcggcggagaccatcaccatttaggtggacaaagtctacacggatccacaacctgaaggccaagatccagcacaaggaggtggattcccccggaccaggaccgtctcatcatcgccgagatgatcgctcacagcgacggtcgctccccagcagactacaacatccagatggaatacaccctccaccttgagcttaggctcacgggaggcatccagatcttcgacaagaccctcactgtcaagatcatgacacctgaggtcgagttcacggacacgatcgactacgtgaacgccaggatccac

SEQ ID NO: 416488 - DNA, 452 bp, Oryza sativa
taattttccgacgccagagcgcgaggagacgcacacagagacttggcatttgtagagtttttagatttatagatagcaaagatgtcggcacaggcggagctttcccgtgaggagaatgtgtacatggccaagctcgctgagcaagccgagaggtacgaggagatggtcgaattcatggagaaggtggccaagacggttgactctgaggagctcaccgtggaggagcgcaacctcctgtctgttgcatacaagaatgtgattggagcccgccgtgcgtcatggcgcattatctcctccattgagcagaaggaggaaagccgtggtaacgaggaccgtgtcacactcatcaaggactaccgtggcaagatcgagactgagctcaccaagatttgcgacggcattctcaagctgcttgaatcccaccttgtcccctctttcactgcccctgagtc

SEQ ID NO: 416489 - DNA, 478 bp, Oryza sativa
ttcagttgctggtggagatggagatcccggaggtgtacatcgagtcgctgcccaagaagggcaagaccagcctcggcgacgccatctaccggagcatcaccgacgaggagttcgacccgatcgagttcctggaaggcgtggacctgtccacggagcacaaggtgctcgacctcaagaaccgcatcgaggcgtccaccatcatctggaagcgcaagatgcagaccaagcaggaggccaagtcgtcgtggggctccatcatcagcttcgagaagcgcgagcagttcgaggagcgcgccgagaccatcctccacctcctcaagctccagttccccggcacccctcagtcccagctcgacatctccaagatccaatacaaccgggacgtggggtacgcgatactggagagctactcgagggtgctggagagcctggcgtacagcgtgatgtcgaggatcgaggacctgctgggggctgacgc

SEQ ID NO: 416490 - DNA, 477 bp, Oryza sativa
tctccttctccacgccgatccgtctctcctcgtcaccgccgtgcagagatcgaaacctatcaaccatggcgaactcagcgtcggggatggccgtgggcgacgagtgcaagctcaagttccaggagctcaagtcgaagaggagcttccgcttcatcacgttcaagatcgacgagcggacgcagcaggtggtcgtggacaggctgggccagccgggcgacacctacgacgacttcaccgcctccatgcccgccagcgagtgccgctacgccgtcttcgacttcgacttcgtcaccgacgagaactgccagaagaagcaagatcttcttcatcttctggtcggcggacacgtcgaaggtgaggagcaagatgctgtacgcgagctccaaggaccggttcaagaaggagctggacgggatccaggtggagctgcaggcgaccgatcccagcgagatgagcatggacatcgtcaaagcgaga

SEQ ID NO: 416491 - DNA, 463 bp, Oryza sativa
ttccgttcacgggcggatcgggaagcaccggaagcacgcgggagggcgcgggaacgccggcgggatgcaccaccaccgcatcctgttcgacaagtaccacccgggctacttcggcaaggtcgggatgcgctacttccacaggctcagcaacaggttccactgccccgccgtcaacgtcgagcgcctctggtccatggtgcccgccgaggccggcgccggcgccggcaaggcccccgtcatcgacgtcacgcagttcggctacaccaaggtgctcggcaaggggatgctccccccagagaggcccatcgtcgtcaaggccaagctcatctccaaggtcgccgagaagaagatcaaggccgccggcggcgccgtcctcctcaccgcctaggttataccattgtatttgggatcaacactagattagcatcacaaatctacaatggttcgaggaaatgtggatatt

SEQ ID NO: 416492 - DNA, 490 bp, Oryza sativa
ttgatctggacatcaccgagatctcgtcctacgaccggaacgggtttgctcgaggggagaagatgatggcgttcgaagttccggtctcgcagatctagtggagcttgagtgcattgattgggcgagaaaagaaattaacataaagtatgaaatcagagataacaggaagggatacaaagcaggagccttgaagaagggcatggaacatatctatacccaacagtgcgattttgttgccattttcgatgcagatttccaacctgaatctgatttccttctaaaaataataccatttcttgtgcataaccctaagattggtctggttcagacacgttgggagtttgtgaactatgatgtttgccttatgacaaggatacagaagatgtcactggactatcatttcaaagtagagcaggaatcaggctcatctatgcattcattctttggcttcaacggtactgctgctgtgtggcgggtatcagctactatt

SEQ ID NO: 416493 - DNA, 393 bp, Oryza sativa
ggtttgcgttcggcggcggcggggatgtcgacgccggcgaggaagcttctgatgcgggacttcaagcggctgcagcaggacccccccgcggggatcagcggtgcgccgcacgacaacaacataatgctctggaacgccggcatcttcgggccggatgatacgccgtgggacggaggcacgttcaagcttaccttgcagtttacagaagattatcccaacaagccgccgactgttcggtttgtttctaggatgttccacccaaatatttatgcagatggaagcatctgcttggatattctacagaaccagtggagccctatatatgatgttgctggcatattgacttcaaatcattctttgctgtgtgatccaaaccccaacttttcagcaaac

SEQ ID NO: 416494 - DNA, 556 bp, Oryza sativa
cttatgatataatttcttgtccctcaattgggaatggaacgaaggactctgtcagcaagcttgtgactgaattgaatgctgctacacttgaacctgatgttgatgttgtggttgcaccaccattcatttatattgatcaggttaagaactcactaactgatcgtattgaggtatctgctcacaatgtttggattggaaaaggaggagcatacactggagagatcagtgcggagcaattggtggacattggctgccaatgggttattcttgggcattcagagcgtagacatgtcattggtgaagatgatcagtttattgggaagaaggctgcatatgccttgagtcaaaatgtaaaggttattgcctgcataggggagctgttggaagagagagaagcagggaaaacttttgacgtctgttttaagcagatgaaggcttttgcagacagtattacaaactgggcggatgtagtaattgcatatgagcctgtttgggctattggaaccgtaaagttgctacttctgagcaagctcaggaagttatgctgctgtcgtga

SEQ ID NO: 416495 - DNA, 275 bp, Oryza sativa
ctcgtactctcaaccccaccctttctccccaccatggtggcgatctccgagctcgggtgagcggaagagaaagaatgcggccgatttgaggagggggatggggttttcgggtggatttgtgaggggatcgatcatgagtatggaccaggttgggaactcactaactgatcgtattgaggtctctgctcacaatgtttggattggaaaaggaggcgcatacactggagagatcagcgcggagcaattggaggacattggctgccaatgggttattc

SEQ ID NO: 416496 - DNA, 348 bp, Oryza sativa
tccgtacgatcctagttcaggtagatacaatggcgtgcacgggctctttcatgctcgccgtcttgctggcggtggccgtcgcggcggcgccggcgagggcggtgcgatgcccgccgagcgacaagcaggcgctgatgagagtgaagcagtcgctgggaaacccggcgacgctgtcgacgtggtccctggcgtctgcggactgctgcgagtgggaccacgtccggtgcgacgaggccgggcgcgtgaacaacgtcttcatcgacggcgccaacgacgtccggggccagatcccgtccgccgtggcggggctgacggcgctcatgtcactgtcgctgttccgcctcccgg

SEQ ID NO: 416497 - DNA, 390 bp, Oryza sativa
  unsure (1)..(390): unsure at all n locations
taattatgggacctgcgcatggctcaggcctgacgggaagacccaagtgactgttgagtgccgcaatgagagcggtgccagggtccctgtccgtgtccacaccgtcctcatctctacccagcatgatgagacagacaccaacgatgagattgctgctgacctgaaggagcatgtcatcaagcctgtcattcccgagcagtaccttgatgagaagacaatcttccatcttaacccatctggtcgcttcgtcattggcggacctcatggtgatgctggtctcactggccggaagatcatcattgacacttatggtggctggngagctcacggtggtggtgccttctctggcaaggacccaaccaaggttgaccgcagtggaacatacgtcgc

SEQ ID NO: 416498 - DNA, 460 bp, Oryza sativa
ctcctcgtcgccgacgagccgcctcctcctcgtcggggccggcggcagagcaccggagcagccaccccatggcgtccccggacctcctcttcaacctgcgcaacctcttctacctcggcgcctaccaggccggcatcaacaacagcgacgtcccgggcctcgacgccgacgccgccgccgagcgcgacgccatcgtcttccgctcctacgtcgcgctcggctcctaccagttggtgatcagcgagatcgactcgtccgcggcgacgtcgctgcaggccgtgaagctgctcgcgctgtacctctccggagacaaggaaagtgcgattgtcagtcttgaaggaatggttgagtgattcagcggttggaagcaatcctgttctacgattgattgctggaattatatttatgcatgagcaagactacactgaagctctcaagcacacacactctggtggaactc

SEQ ID NO: 416499 - DNA, 421 bp, Oryza sativa
tgcgttggggaaggaggaggaaaggtgcacaaggtcagactaagtttgcgttgaagaacaaaggagaggaaaaatgtcgcctgctgaggcatcgagtgaggagaatgtgtacatggcaaagcttgccgagcaggctgagcgttacgaggaaatggtcgaattcatggagaaggtggcaaagaccactgatgttggtgagctcaccgctgaggagcggaacctgctttctgtggcttacaagaacgtgattggtgctcggagggcatcgtggaggatcatctcttctattgagcacaaggaggagagccgagggaatgaggcatatgttgcatcaattaaggagtaccgtagcaggattgaaactgagctcagcaagatctgcgatggtgtccttaagcttctggattcccaccttggccca

SEQ ID NO: 416500 - DNA, 552 bp, Oryza sativa
  unsure (1)..(552): unsure at all n locations
tgttttatcgccgccgccgccgcttctccactctccggtgcccccgtcgccgtcgccaccgccgccgccatgtccgggaggaagaagacacgggagcccaaggaggagaacgtcaccctcggcccgaccgtgcgcgagggcgagtacgtcttcggcgtcgcccacatcttcgcctccttcaacgacaccttcatccatgtcaccgatctgtccgggagggagacgctcgtccgcatcactggtggcatgaaggttaaagctgatcgcgacgaatcttccccttatgctgctatgcttgcttcacaggatgttgctcaaagatgcaaggagcttggaataactgctttgcatatcaagctccgtgctactggtggtaacaagacaaaaacccctggtcctggtgctcagtccgcacttagagcacttgctcgatctggcatgaagattggtcgtattgaggatgttactccagtgccgactgatagcacactcanaaagggtggtagaaggggtaggaggctgtattcttcatgcgggctcaaaccgacacac

SEQ ID NO: 416501 - DNA, 518 bp, Oryza sativa
ttgattctctccgagaggtgtcaggtcatccttcgattgcatcgacgggtatgacacgccggtggagggcatgaagatcaactggatgaaggccggaatcctggaagccgacagggtgctcaccgtgagcccgtactacgccgaggagctcatctccggcatcgccaggggatgcgagctcgacaacatcatgcggctcaccggcatcaccggcatcgtcaacggcatggacgtcagcgagtgggatcctagcaaggacaagtacatcaccgccaagtacgacgcaaccacggcaatcgaggcgaaggcgctgaacaaggaggcgttgcaggcggaggcgggtcttccggtcgacaggaaaatcccactgatcgcgttcatcggcaggctggaggaacagaagggccctgacgtcatggccgccgtcatcccggagctcatgcaggaggacgtccagatcgttcttcttggtactggaaaagagaagttcgagaagctgctcaagagcatggaggaga

SEQ ID NO: 416502 - DNA, 389 bp, Oryza sativa
cattctctcattgagagaactcgcatcccctgggtgaactgcctgaaggatgcaggcgtatctgcaaaagacattgatgaggttctactggttggtggtatgacgagggtgccaaaggttcaggatattgtttctcagatattcaacaagacaccaagcaagggtgtcaatcctgatgaggctgttgccatgggagctgccattcagggtggcatcttgagggttgatgtgaaggagctccttttgctggatgtcactcccctttcccttggtatagagactcttggaggcatcttcacaaggctaattaatcggaacacaaccatgccaaccaagaagaggcaggtcttctccactgctcgcagacaaccagaccgaggtggggaatc

SEQ ID NO: 416503 - DNA, 334 bp, Oryza sativa
catgaacttcatgcaccgggacgaggaggtggggtagtacccatcgagccacgcgccgctccgccacgcgccgccgacgcccatcacgccgggccccgtggtggggaggaggcagaacgcgacgatacacaagcagaacgagttcaagcagcccggggagaggtacaggtcgcgggcgcctgatagacaggagagggctaacgaccggtatgccggtgatgtatgagacattacgggctcctaaaggttccacgcgagatgggtcaaatacctggagcaaggtgaagaggacaaagcataaataattgccatgatacaaaaacagaaggcgaat

SEQ ID NO: 416504 - DNA, 305 bp, Oryza sativa
cttagccagcgcgagagagagagagagggagaccaaaccccatcccggatctctcgtcgtcggcggcgtctgcgatggcgctctccgaccgctcccgcgagtcgctcctcccgagcttcctctacacctcctccgccgcgagggccttcgccaccggcgccacccgcttcccctccccggtgtgcccagcttccccggctccgggtgccgtcgggggcggaccgcccaaattgccccaagctcccggggagaagattgatatgtcctaggacttgcattacgcacccagggctgtgccatccgag

SEQ ID NO: 416505 - DNA, 262 bp, Oryza sativa
ttctaactcgtcgccggtccgacgatcccgtcccgtccgccgccgccgccgtcggagattttctcgagataagccatgggtcaagcactccgtttggtacaagtagatcaatcgacagtagccatcaaggagtcctttgggaagtttgatgaggttcttgagcctggatgccactttttaccctggtgcatagggaagcatatcgctggatatctttccttgagtgtgtcataattgtacttccgttgtgaaactatttact

SEQ ID NO: 416506 - DNA, 479 bp, Oryza sativa
attattctgaacttgtgtgatttcattcacagggtgataaaagcagtcatgagtgctgataatttgttgctgcagatggatgggttaactaagacagatgatctcgtttttgttctagccgccacagatttgccatgggaactggatgcagcaatgttgcgccgtttggagaaacgtgtatccttttttctcaaaccatcttgtaatttctttgttcacgagtgctcctaaatactactccgtaattgccagttttgctattaggtaaactcccttggttttgtccgcaaatcgttgatgtttttggacaaaatctggttaaacttttgaaaccttgactatcgatgaactttaaaaacttagttcaaaaacataaatatgatatgctttgattttgtttaaaggactttcaacctcttattaaactgattaggattttttaaaccctattttaataataatcatggggaccaatttgc

SEQ ID NO: 416507 - DNA, 415 bp, Oryza sativa
tcgatatcgccggcgaaatggacgccttcctggggggaatcccgcagctccgcaggccggcggcgctgatcgcgtggtgctgagcgctggtcctcctcgccaccgtgctcctcctcccgcgcgctcctcccgccgccccggagcagcttgcctccgccgccggcgccgccgccgtccgcctggacgcgagggtcgagcggaggagcggcaacgaggtgctgcggcagaatgtccacgactacgacagcttcactggccgtggtgttagaggacttgcattaggcaaccatggatatgcatccggaggtggcatgacacatttatcaccattgaagtacacgcggtgtgggaaggcccaacccttgtcaaaggtgaagatcctttggaatccttacccaaaggatctcggacctgt

SEQ ID NO: 416508 - DNA, 489 bp, Oryza sativa
tcgttaattcagagcagaagtagtatgaagcttggtgacacatgcatgccaaaacatggctccgtttggagaaggcttatcaattagcatgtttgaggatgtgcaagaggaggtttatccaggacaatctataaagtgcacaccatggaacctgacaacttgaagctcaccgaatttcttggtttcactcatcatgcataagccagcaaagtagccaacacaatcgaaaataccaaaaccgagagtgtcaatggttgttttgtcagaggacttgcattaggcaaccatggatatgcatccggaggtggcatgacacaattatcaccattgaagtacacgcggtgtgggaaggcccatcccttgtcaaaggtgaagtccttggaatccttacgcagaagaagttctggctgtgcatttccaagtggaccagtttgcatgagccaatcgttatagaactttactttcctaaacattgcagttttatttaaa

SEQ ID NO: 416509 - DNA, 518 bp, Oryza sativa
cctcaaatcgcgaaattttcttttcccccaaaagaccgaataaagagaaatctctccgagcgaattcgacgagatcggaggctcggatcgaggtattctccttctgatttgattggattcgggatctgctggcggggatccatctttaggtaggatttcataattttatggactttgattgcaaaacagcaagaggagactcttcatctgtgaatcgttcatgcattgtcactgaaggcactgtcgtccaggcaaagcccgtttctcacaacgggaaagctaaacactggaatagcctcagtacattgaataaccagaagtgcagttatgaattactttccgacccaaagaaaaatgttgaaacaagtgatggtgagaccgcctcaaagtgtgactcatggtgcttcactgatttgccatccgcattggtctgtgaagtgcttgaacacctcgatccaaggaacttggcattgtatcttgcgtctccaccctactgcataccctagccacagatcatc

SEQ ID NO: 416510 - DNA, 525 bp, Oryza sativa
atttaaaaaaaggaaaaaaaaacaaaacacaccaggccaaataaaagcgacaatgggatcgctcaccaccaacatcgtcctcgccgtcgccgtggtggcagcgctggtcggcggcgggtcgtgcggcccgcccaaggtgccacccggcccgaacatcacgaccaactacaacgccccgtggctccccgccagggccacctggtacggccagccctacggctccggctccaccgacaatggtggcgcgtgcgggatcaagaacgtcaacctgcctccctacaacggcatgatctcctgcggcaacgtcccaatcttcaaggacggcaggggatgcggctcatgctacgaggtgaagtgtgagcagccggcggcgtgctcgaagcagccgggacgggtgttcatcacggacatgaactacgagcccatctcggcgtaccacttcgacttctccggaaggcgttcggcgccatggctagcccggggaaggaagaccgagctccgcagggccggcattatctacatgca

SEQ ID NO: 416511 - DNA, 517 bp, Oryza sativa
gacccctcgtgatggacacccgcctccccctcctcctcctcctcgccggcgtcgtcgccgccgcggcgccactgctcgccaccgcccagctctccgccgacttctactcctccacctgccccaacgtcgagaaggtcgtctccaccgtcatcgagcgcaagttcaaggaggaccctaccacctccgccctcctcctccgcctcctcttccacgactgcttcgccaatggatgcgacgcgtcgatcttgatcgaccccgctgtcgaaccagagcgcgtagaaggaggcggggccgaacatctcggtgaagggctacgacatcatcgacgagatcaagacggagctggagaaggagtgcccgcaggtggttgtcgtgcgcggacatcgtggcgctcagcacgcgcgacagcgtgcgcctcgccgggggccccactataacgtgcccaccggccggcgcgactacgttgtattcaaccgcgaggaaggcgactcgctcccggcccggacatcgccgtccc

SEQ ID NO: 416512 - DNA, 491 bp, Oryza sativa
tcgttaaaatttctccccaatctcgcgaggggctcgttgtcgaatcgaatcctctcgcgtcctcaagatgcagatctttgtgaagacattgaccggcaagactatcaccctcgaggtggagtcctctgacaccatcgataatgtcaaggctgagatccaagataaggagggcatccccccggaccagcagcgtctgatcttcgctggcaagcagctggaggatggcaggacccttgctgactacaacatccagaaggagtcgacccttcaccttgtcctccgcctccgtggtggcatgcagatctttgtcaagactctgaccggcaagactatcacccttgaggtggagtcttctgacaccatcgacgacgttaaggccaagatccaggacaaagagggcatcctcccagaccagcagcgtctcatcttctccggcaagcatctggaggatggcacgacccttgctgactacaacattcagaaggagtcca

SEQ ID NO: 416513 - DNA, 400 bp, Oryza sativa
tcgtcacgcgtccgcccacgcgtccgcccacgcgtccggttcagcttcccgttcaggttcaggcaatcacgcctcctctcctctcctctcctctccttcttcactccactccaacgccccacgccctcccccgctttataagggggagctccacatcaccacccttcccacaccatcgcggcagccaccgcatctttcctcctctttccctggagccatttcctcccctaaagggcctttccttttcttgatctctcttctatcttcgatccatccatccatccggccatccttcctaggtgaatttcaacgatgcagttcagcagtgtgtttcccttagagggtaaagcatgcgtgagcccaataaggagaggtgttgagggctcagctagtgatagat

SEQ ID NO: 416514 - DNA, 472 bp, Oryza sativa
tcgtttgagaagccacaccggcggacgaagaatagggcagatagaaatggcggcggagacgttcctcttcacctccgagtccgtgaacgagggtcacccggacaagctgtgcgaccaggtgtcggacgcggtgctcgacgcgtgcctcgcccaggaccccgacagcaaggtggcgtgcgagacgtgcaccaagaccaacatggtgatggtgttcggcgagatcaccaccaaggccaccgtcgactacgagaagatcgtccgcgacacctgccgcggcatcggcttcgtgtcgaacgacgtcggcatcgacgccgaccgctgcaaggtgctcgtcaacatcgagcagcagtcgcccgacatcgcgcatgggggtgcacggccacttcaccaagcgctccgaggagatcggtgccggcgaccagggccacatgtttcggattcgcccccgacgagacccccgagctgatgcccc

SEQ ID NO: 416515 - DNA, 380 bp, Oryza sativa
ttgctgttgatggtcatctctctcagctatgacagctcactgcatcaatggccgcggccaccatggcgctctcctccccggtgatggcccgcgcggcgcctgctacctcctccgcgctcttcggcgaggcgcggatcaccatgcgcaagaccgtcgcgaagcccaagccggcggtgtcgtcggggagcccgtggtacggcgccgaccgcgtcctctacctaggaccgctctctcggcgagccgccgagctacctcaccgacgagttcccgggcgactactgagtgggactccgtggcgctctctgtccacccgcagacctgggacaacaacggggagacgcaggtgaatcgccttggagcacatacccttttcgccagct

SEQ ID NO: 416516 - DNA, 507 bp, Oryza sativa
atgcgttcgcttataccctgcctcttcttccttcccactaccagaaccctaccaaatattgtattgctggctcgctgcttgggaagataaaagtgcggctctgaaggggaatttcgccgaacaggatgaatgcgttggcagcaacctgcaggaacttcaaggatgcgcctcgaatgaccctactggactgcacacaggacaataacatctgcattcggagagggagaataaggctacaatgacgtctcctgcggtcgctttgggcctcgtgcctgttgtcatggaccatgagcctggtactatggacagtgtcccgcactggaccctttggtcagatctttccgccctgacaacttttgtcttgtggcaatctggtgctggtaacaactgggccaagggacactacactgagggtgccgagctaaatgattcagtattagatgttgtgaggaaggaggctgagaactgtgactgcctgaaggattccaagtatgccactcttttggt

SEQ ID NO: 416517 - DNA, 453 bp, Oryza sativa
tttcttggtccgtcttgggtggcacgattctggcacgtacgacaagaacatcgaggagtggccgcagaggggcggagccgacgggagcttgagatttgacgcctaattgagccacggagccaatgctggcactgattactgttatgtcgcttatccaaccattttaggacatttaccacagcttaccaaatgcagattcggatctgatgccatgtaacacagataattaggatgctaactattggtattttacttttgatgttctacagggacacaaatatttcagggcttatattcaaagcaaccggtggacattctaagtttgattagtgcttggttgaatattcaaagctggtattgtactttcatccatcattgtattggcattcttttatcattttatgctttgaatgaaaccaatttttaattcacatattcctattttaatttttc

SEQ ID NO: 416518 - DNA, 493 bp, Oryza sativa
ctctattctctccctccacaccccactccgacgaccaccaccacctcgcccgcggtaacgccgccgccgtcgctcgccgcggtaaaaccagcgcgcgcgagagagtgggtgtccgtgtggcctactacttgcttcctcggcgcgcgcggcgcgtgtgtgcctcgcatcctccaccaccactagtgcagccaagtgcgtgcgtgtgtgtgtgtgcggacaccgttgctgccgccgccgccgccgccgcgcgcagggtggtgacaagatgacggcgacgccggcggtgatcgggctgagcgcggggaacaggctgctgagcgcgtcgttcgggccgaccgacgccgtcgcccgtctggcgcgccgcccacgcccatgacctcgagtcctccctcgaggccatcgtgctgctgcagaggtccatgctcgagaagcagtgggagctccccttcgacgacgacaaccacgccatggccatcggcttggccgaggatga

SEQ ID NO: 416519 - DNA, 523 bp, Oryza sativa
tcgtttgcctccatttggtgttttcatacgggcgagggcaatgccagatcgtgagatttagctataatttatcaccctctttcttggctttcttgatcatcaccgtgttcccaaatattacagacataagttggtggtatcgattgcatcatgggatagaattgatgtctacaattttggctcgataattccatcctacgcaatggcttccaagagtcgtttcgttgtgggatctcatgtctgggtcgaggacccatatgaggcttggatggatggcctggtagaggagatcaatgaaaatgatctcgtagtaaactgcactcctggcaagaaggtcaccattaatgtgggaagtgcctatcctaaggatacagaatctccccgaggtggtgtggaggatatgacaaggctagcttatttgcatgagccaggagtactccaaaatctaaagtccagatatgcactcaatgaaatatatacttatactgggaatattttaatagctgtcaatccatttaaaggc

SEQ ID NO: 416520 - DNA, 523 bp, Oryza sativa
tcgtttaagaaagaaattaaaaagaaaatcacggcgcgtgagcttgcagagacagcaatggtgagagttggtgccgccgcggcggtgctcgtgctggcggcggcggcggcggccatggccgccgagccgcccaccgatgacggcgcggtccgggtggcggcggggctgacgaagtgcgtgtccgggtgcggtagcaaggtgacctcctgcttgctcggctgctacggcggcggacgacgcgccgccgccgccgcgacggcgatgccgttctgcgtcatcggctgcaccagcgacgtcttgtcctgcgccaccggctgctccacctcgctctgattaagtactaatgaagtaattaaccgcgctaattaataataaatcgcacctacgtatgccacatgtggactcgcttgactaattaaatactgccatgcgaatgcgattagtggattatgaaaagaggaaatgtaagaactcatggctctctctgtgccatgcctgtactgcattgaaatgaatctgcttg

SEQ ID NO: 416521 - DNA, 517 bp, Oryza sativa
tcgtctcacccacccctcgatctctcgctcgctcgccgccgatcggatcgcgtggttggatcatcacaactcggcaaagatgagagagatcctgcacatccaaggcgggcaatgtggcaaccagatcggtgccaaattctgggaggtggtgtgtgatgagcatggcattgaccctactgggcggtacacaggcaactcagatctgcagttggagcgtgtcaatgtgtactacaatgaggcctcctgcggtcgctttgtgcctcgtgctgttctcatggaccttgagcctggtactatggacagtgtccgcactggaccctatggccagatcttccgccctgacaactttgtcttcgggcaatctggtgctggtaacaactgggccaagggacactacactgagggtgccgagctaattgattctgttttagatgttgcgaggaaggaggctgaaaactgtgactgcctgcaaggatccaagtatgccactctcttgtggtggtactggatctggtat

SEQ ID NO: 416522 - DNA, 484 bp, Oryza sativa
ttcgtttcctaattgtcatcactagcttctagctagcttaattaattaattagccatggcggaggagaagcaccaccaccacctgttccaccacaagaaggacgacgagccggccaccggagtagactcctacggcgagggcgtctacacgtcggagacggtgaccaccgaggtggtcgccggcggccaggacgagtacgagaggtacaagaaggaggagaagcagcacaagcacaagcagcacctcggtgaggccggcgccctcgccgccggcgccttcgccctgtatgagaagcacgaggcgaataaggacccggagaacgcgcacaggcacaagatccggaggagatcgcggccacggcggcggtcggcgccggcggctacgccttccacgagcaccacgagaagaagaaggaccacaagagcgccgaggagtccaccggcgagaagaagcaccacctgttcggctgatcgaccttatcac

SEQ ID NO: 416523 - DNA, 474 bp, Oryza sativa
tcgctcctcctctccttatcccttcccttcaccagggcccccccgacaccgagcgcgtcctcctcgacctcgccgcaaatcctccgccgctcctccgccgctagggcataaccgcccgcctctcgccggcatccgcatctcccggggaagggaagggaagggaagggaaggaaggaaggtgagggcggatatgtcggcggcgcccataccccgcgagtgggtggggctgcagcagtttccggcggctacccagaccaagctgcacgagctcctcggcaagctcaaggaggagaatgtgagcacattgacaattctggtgatggggaagggcgggggtgggaagtcatccaccgtcaactccatcgttggcgagagggtcgctactgtcagcgccttccagtccgagggtctcaggccgatgatgtggtctcgcaccagggcaggcttcaccttgaacaatattgacactcctgg

SEQ ID NO: 416524 - DNA, 451 bp, Oryza sativa
gtctattctgattggttgggatgtactggcctggatgatcattagtctccaagtgctaacagatcggccgccactaagttttcgcgagcacatcctacagactacacgtctaacaaactgcgggagatgatccgtgtgatgaagcaaaggaatgtccctgcctctattaaatggtaggggaactaccacataattgactctctatcgaatgacatcttgttttacaaaatggtcatccatgtgctcagtgaatctgtttgtagacgctatgagccagagatgacgagaaatccagggatgtggccactgtatagggggatctttgctggtgtagacatgttcaaggataataatatgaaatctttcatacctgaggaagacattgtcatctggctgaaaaatatatgtggtgccttggatataaattcgtcagctaatgatggtctggctg

SEQ ID NO: 416525 - DNA, 525 bp, Oryza sativa
tttcgtatcaccgcatcagcagcagcaagcagctaatcgtgcacgtacgcacaccgcggcccggtgcgagatggcgcagttgatgctggtgtcgggagccaatggcacggtggccgccgcgagcaccagcaggctgcagcccgtgcggccgacgccgttctcgcggctcgtgctgtcgcagccgccttcttctgtggaacgcgcggagtacgtcatgactgctcctgaccggggctaccataagacgtttgctcttttatgatggtggggctcttggggcacagactacgagaccgaagggccaattttaagggagttgaaccgacttggatttagtttgatgaacccacacttgttcttgaccttgactctcaccaattggctgcattctctgctgcatacacagaacttgagtcggcactttctggattgaatgtgcttattgagacatacttcgctgacattcctgctgaatcatacaagaccctcacattccttgacagcgtgactgcttatgttttgacc

SEQ ID NO: 416526 - DNA, 523 bp, Oryza sativa
ctcgatatcgccatgggcgcggccgacgacgccaaccaccgccacgaggaggccagccccctcctgccaccgggcggcggcggcgccggcgccggcggcaagaagctccaccagtctccgcctccatcgcctccggaggcagccaagtgctgcgccgatggagtccccgtcgttatgggcgagccgctcggggcacccgcaccgccgcgggagagctggaactcgggggtgctctcctgcctcggccgcaacgacgagttctgcagcagcgacgtcgaagtgtgtcttcttggaagcatagcaccatgtgtgctgtatggtagtaatgtcgagaggtttgcagccagaccaggaacttttgcaaacagctgcttgccttacactggcctctatatgcttgggaatgctctcttcgggtggaactgcatagccccatggttctctcatcacactcgtacagctattcgtcgacgatacaatcttgagggtagctttgaggctttcactaagcaatgtgggtgct

SEQ ID NO: 416527 - DNA, 504 bp, Oryza sativa
tttgattccctcaattgaactgggtccagagttcaagaaggtcgggtgtttccttggtcgcttcaagtcaatccccagcattgttgagcttgacaccttgaaggtttccggtgatgtttggtttggctctagcatcacattgaagggcaaggtgaccatcacagcccaacctggtgtcaaactggaaatcccagatggagcagtgatcgagaacaaggatatcaatggccccgaggacctttgagcgaaaggatgcagagttcacaaagagagatcatatcaccattccatataatcaatcaagctccacgacattgtggagaatatttttgatccaatattgcttcggcataaggaataacaaaattagtacatgtcttttacctacttgactatgcttcttgatctattttctccttgtgagtgggcaaacaagtcatgtcccggcaaaatatcatatgaacatatttggttacatatctgttcaacaatcagcaagaaaac

SEQ ID NO: 416528 - DNA, 496 bp, Oryza sativa
ttcgaattggggagcacacaacaaaattccgatccaaccctaagcccgatccgccctagcacgatcccctcccccctccccgtctccgatccccctcctccacctcagatctccggcgagccgatcgaatcggcggctgcggcggcggcggcggcgcgatgtcggggcagacgcagcgcctgaacgtggtgccgacggtgacgatgctcggggtcatgaaggcccggctcgtcggcgccacccgcggccacgcgctcctcaagaagaagtcggacgcgctcaccgtgcagttccgcgccatcctcaagaagatcgtcgccgcaaggagtccatgggggaggccatgagggcgtcctccttctccctcgccgaggccaagtacgtcgccggcgacggcgtccgccacgtcgtcctcagtccgtccgctccgactacctccgcgtccgctcccaccaggagaacgtcgccggtgtcaagctccccaagttcacccact

SEQ ID NO: 416529 - DNA, 514 bp, Oryza sativa
ttctttccccgcattccgcgccggagctgaggagggacagcgtgccagcgagggaggtggggcaatccagcgagcgccagatcgtgccgccagccccgctccgtcctctctccggcgaccctccgccccgcctgatcccgtggtggatcaactacaactcatctttaggaaagcctcttgaacattagccttgtgtgcctttcaacagtatggcctcggtaggtgtggtgcgttcttccttggggtttcagaacgaaacaagtacaagtggcgatgccgaccgacttccgaatgagatgagcaatatgagtataagggatgataataaggacattgacgacatagttgtcaatggcaatgggacagaacctggtcatgttattgtgacaagcattgatggaagaaatggacaggctaaacagaccattagctacatggccgagcgtgtcgtaagtcatggatcctttggaactgttttccaggccaagtgcctggaaaccggtgagactgtggc

SEQ ID NO: 416530 - DNA, 528 bp, Oryza sativa
ttctgtagatccgtcgccgagttcgcctgagccccaatctccgatcccccaccatcgccggcgccgccgccgctccaccctgccgcttttcctcccgccgccgcatcctcgccgcgcgggatggccggagcgacggatctccccccgaagggagggttcagctacgacaattgcgcgaggaacgccatgcttgtggagaagggcttgaagatgcctgggttcctcaagaccgggactaccatcgtcggtttggtctttcaggatggtgttgttcttggggcagacacgagggccaccgagggtcctatagttgctgataagaactgcgagaaaattcattatatggcgccaaacatatattgctgtggagcaggaactgccgctgatactgaggctgtaacagatatggtcagttcccagcttcaacttcaccgttatgcaactggtcgtgagtccagagttgtaacctctcttacattactgaagtcgcacctttttagctaccaaggtcatgtcagtgctgccctt

SEQ ID NO: 416531 - DNA, 493 bp, Oryza sativa
ttctttcttctcgatggctaggggcaatgccactgtccctgccatggagatgaccaagtggtttgacaccaactaccactttatcgtccctgaacttggtcccaacaccaagttctcctactcttcccacaaggctgtgaatgaatacaaggaggctaaggcgctcggcgttgacaccgtgccagtacttgttggaccagtttcatacttgttgctctccaaacctgccaagggtgtagagaagtcgttcgctcttctttcccttctgagcagcatccttcctgtctacaaggaggttattgctgagttgaaggcagctggtgctacttggattcagtttgatgaacccacacttgttcttgaccttgactctcaccaattggctgcattctctgctgcatacacagaacttgagtcggcactttctggattgaatgtgcttattgagacatacttcgctgacattcctgctgaatcatacaagaccctcaca

SEQ ID NO: 416532 - DNA, 530 bp, Oryza sativa; identical to SEQ ID NO: 392085

SEQ ID NO: 416533 - DNA, 516 bp, Oryza sativa
tcggtcgctcgccgctcgcccaccatggccatggcgacggcgctccgcaagctctcctccgacgccctccgccgccagccgctctcccgcatcaccccgctctactacatggcgtccctgccggcgacggaggagagatccggagtcacctggccgaagcagctgaacgcgccgctggaggaggtggatcccgagatcgccgacatcatcgagcacgagaaggcccgccaatggaagggtctggagctcatcccgtcggagaacttcacctcggtgtcagtgatgcaggcggtgggatccgtcatgaccaacaagtacagcgaggggtaccccggcgcggaactacggtggaaacgaatacattgatatggccgagtcattgtgccagaaacgtgctttggaggccttccgcttggacccagcgaaatggggagtgaatgtgcaacctctatcaaggtcacctgccaactgccatgtttacactgccctattgaaaccacatgagagaatcatggc

SEQ ID NO: 416534 - DNA, 518 bp, Oryza sativa
ttcatgttcagggtgtggaaggtgtcgcccaggaacggtctgcacaagcgcgtcggcagcctgccccggctgcgcgacttcctccgcggctggctcaacccgtccaactacgtcgaggtccgcaagaaccggacggcgctctggatccgccacagcgacgccgtgtcgtgcctgagcccgacggactcggcgcagggcctgctctactccggctcgtgggaccggaccttcaaggtgtggtggatcaacgactccaagtgcctcgagtccgtggtggcgcacgacgacaacgtgaacgccatcgtggcagcgttcgacgggctggtgttcaccgggtcggcggacgggactgtgacagtgtggaagagggagctgcatgggaaagggaccaagcacgctccggtgcagacgctgctgaagcaggagcacgcggtgaacgcgctcgccgtgagcgccgtcgcgcccgagctctactgcggctcctccgacgggctcgtcaacttctgggaaggggagcg

SEQ ID NO: 416535 - DNA, 527 bp, Oryza sativa
gtgagcttggtgagctgcagagatggccccctccgtgatggcgtcgtcggccaccaccgtcgctcccttccaggggctcaagtccaccgccggcatgcccgtcgcccgccgctccggcaactccagcttcggcaacgtcagcaatggcggcaggatcaggtgcatgcaggtgtggccgattgagggcatcaagaagttcgagaccctctcctacctgccaccgctcaccgtggaggacctcctgaagcagatcgagtacctgctccgttccaagtgggtgccctgcctcgagttcagcaaggtcggatttgtctaccgtgagaaccacaggtcccctggatactacgacggcaggtactggaccatgtggaagctgcccatgttcgggtgcaccgacgccacccaggtgctcaaggagctcgaggaggccaagaaggcgtaccctgatgcattcgtccgtatcatcggcttcgacaacgttaggcaggtgcagctcatcagcttcatcgcctacaagcccccgggct

SEQ ID NO: 416536 - DNA, 480 bp, Oryza sativa
gtcgctttgggtagcgcacgggtggtatgaggtggcgaccaaggggtggcgggaggtggatctcgggtacatcgccatcctcccgtcgttgctgctgcggatgctgcacaaccaagcctggatcaccatctcccgcctccaaaacgcccgtggccgccgtcagattgttcgccgcggcatcgagttcgaccaggttgaccgcgagaggaactgggacgaccagatcatcctgagcggtatcctactatacctcggcgcactgtacgtaccgggcgggcaacacttaccgctgtggaggacggatggcgcggggctgatcgccttgctgcatgcggggccagtggagttcctctactactggttccatcgtgcgttgcaccaccactttctctacacccactaccactcgcaccaccactctttaatcgtcactgagcccatcacatccgtcatccatccgtttgctgagctcgttgccta

SEQ ID NO: 416537 - DNA, 524 bp, Oryza sativa
ttttactcggaagagagagcccccctacgacgacgacgaccatggcgctcgcctccacctccgccaccgcgtccgcggccgtgctcaagacgcccttcctcggggcgaagcgcgcgctcgccaatgccgtcggcgtcgcgggcgccaagcccgcgccgcgccgcgcgctcgtcgtgtcggccaagaagtcgtggatcccggccttcaagagcgacgccgagttcatcaacccgccgtggctcgatggctcgctccccggtgacttcggcttcgacccgctggggctgggcaaggacccggcgttcctcaagtggtacagggaggcggagctgatccacgggcggtgggcgatggcggcggtgctggggatcttcgtcggccaggcgtggagcggcgtgccgtggttcgaggccggcgcgcagccggaggccatcgcgcccttctccttcggctccctcctcgggacgcagctgctgctcatgggctgggtagagtccaagcggtgggtcgacttcttcaacccg

SEQ ID NO: 416538 - DNA, 470 bp, Oryza sativa
tcgctatcattgcttgcaaagctggtcgtgtgactcctcccgttaagcttcccgcggcggcgagagcaagctaagctaggtcgggcatggggaaggacgaggtgatggagagcggcggcgccgccggcgagttcgcggccaaggactacacggacccgccgccggcgccgctgatcgacgcggcggatctggggtcgtggtcgctgtaccgagccgtcatcgccgagttcatcgccacgctgctgttcctgtacatcaccgtggccacggtgatcgggtacaagcaccagacggacgcgtcggcctgcggcgcccacgcggcgtgcggcggcctgggcgtgctcggcatcgcgtggccgttcggcggcatgatcttcatcctggtctactgcaccgccggcattctgcggcgggcacatcaacccggcggcgacgttggggctcttcctggcgcgccaggtgtccctggt

SEQ ID NO: 416539 - DNA, 518 bp, Oryza sativa
tcggttgctctccttcgactaccgcctcgcgccggagcaccgcctgcccgccgcgcacgaggacgcggcggcggcgctcatctggctccgcgaccagctcctctccgacccgtggctcgccgacgcggccgacgcgcgcaaggtgttcgtctcgggggaatccgccggcggcaacttcgcgcaccacctcgccgtgcggttcggcgcggcggggctggacccggtgagggtcgccgggtacgtcctcctcatgccggcgttcatctcggagaggccgacgccgtcggagctggcggcgccggccaccgtgttcctgacgcgcgacatgtgcgaccgctactgccgcctcgcgctgcccgtcggcgccgacaaggaccacccgctcgtgaacccgttcgggccggcgagccggaacctgcaggcggtggacatcagccgcgtgctggtggtcgccgccgacggcgacctcctcagggacaagaacgtcgagtactcggagcggatgaaggcgatgggga

SEQ ID NO: 416540 - DNA, 518 bp, Oryza sativa
ttgttcgagccctagccgccagccgactcgaccagcgcccggaggcggagcacccgccgccgccgccctcgccatcgtcggcttcacccctcatcggcaacctagtgcaggttgttttctgaagatggctgacgatttgggccctcccactgtgctccagaagatacatgggcagtccatgatgttcagcaggatctcaccttattctttgatgaagaatcccgcactctacaatgccaacacttgttacagtgtgcctgtgaagtcatacaatgggatggatgggaacaatgggttctcatctgtcacatctgtatccccagtctttgcttctgcacccaaaggagaaaggtctttctgggtttatgattgacttcatgatgggtggagtttcagctgctgtctccaagactgctgctgctcccattgagcgaatcaagcttctcattcaaaaccatgatgaaatgatcaagagtggtaggctctctcacccatacaaaggtattgcggactgcttt

SEQ ID NO: 416541 - DNA, 340 bp, Oryza sativa
tctgataagcttcccagctcgcgctgccaaggaggggagggagaaacgcatcaccgcgactatttttctactctgctctctgctcgtgaaaattggattgcgccatatatacacggctcttgggggcccggagcgtccgcatcgatcagcattgggctctctgaggaggagaagttgctgtggagatggtgctgatgctttcttgatctgatgacggcgagcacaacatcagtaacagacgccgggggcgcgttcgcggccgctaagacttctactagagtcgactgcacagggagggggggcatgagctagggttcactacggcggaccatagccatcc

SEQ ID NO: 416542 - DNA, 481 bp, Oryza sativa
acccaaccgtcgcgttcgtttctttgtcaagacactgaccggcaagaccatcacccttgaggtggaatcttctgacaccatcgacaacgtcaaggccaagatccaggacaaggagggcattcccccggaccagcagcgtctcatctttgccggcaagcagcttgaggacggcaggacccttgctgactacaacatccagaaggagataacgcttcaccttgtcctccgtctcaggggaggcatgcaaatcttcgtgaagactctgaccgggaagaccatcaccctcgaggtggattcttctgatacacatccacaatgtcaagggcaaaatccaggacaaggagggcattcccccggaccagcagcgcctcatctttgctggcaagcagctggaggatggcacgacccttgctgactacaacatccagaaagagtacaccctccaccttgtgctccgccttcggggtggtatgcagatctt

SEQ ID NO: 416543 - DNA, 450 bp, Oryza sativa
gtcatgacatggtgcaacagcttcaacgacgtgcgcgccgtggagaacaacctggccaccgccgccgccgtggccgcggccaagaagcagcagcagcagcagcaggtctcccagcacgtcaacctcatcaagacctgcccctcctgcggccaccgcgcgcagtatgagcagagtcagttgcaggcagcggcggcggcgacgatccaggacctgccggggctgccggccggggtgaagttcgacccgacggaccaggagctgctggagcacctggaagggaaggcgaggcctgacgcgcggaagctccaccccctcatcgacgagttcatccccaccatcgagggcgagaacggcatctgctacacccatcccgagaggctttcaggagtcggcaaggacggcctgatccggcacttcttccaccgcccgtcgaagcgtacacgacgggga

SEQ ID NO: 416544 - DNA, 286 bp, Oryza sativa
acaagttccctttttgaggggccggggccaccatgaacctctcctgccgggggatgcccctcgcggcgcctttgacctcctaaatgctcttcggtaagtcctggatcatcatgcgcaaaaccgacgggaagccaaagccggcggcgtaaatcgggaagcccgtggtacggcgccgaccgcgtcctttacctcggcccgctctccggcgagccgccgagctacctaaccggcaagttcccgggcaattacggtgggaacaccgggggcttttccgccaacccgaaaa

SEQ ID NO: 416545 - DNA, 494 bp, Oryza sativa
  unsure (1)..(494): unsure at all n locations
tcgttcgcaacccaaactcgcacaagggagaagagaagagaagcttcgagagagaggtggaggaggagactagcgcgtggtggtggtggtgttggcggcgatggatcgggttcgcggatgcgcgttcctgctcggcgtcctgctcgcaggatccctgtttgcattttctgttgcgaaggaggagaccaagaagctcggtaccgtgatcggtattgatcttggtacaacctactcgtgtgtcggtgtgtacaagaatggtcatgtcgagattatcgccaatgaccagggtaaccgtatcacaccctcatgggttgcattcaccgatagcgagaggctcatcggtgaggctgccaagaaccaggcagctgtgaacccagagaggaccatcttcgatgtcaaacgtctcattggaagaaagtttgaagacaaggaagttcaaagggacatgaaacttgtcccctancagattgtgaacaaggacggtaagccctaca

SEQ ID NO: 416546 - DNA, 535 bp, Oryza sativa
ttggtagaaggagaaggtaggctccagccatggcttcccagttctgcgccgccacatccgtgccgcagttccatggcctgcggacctactcctctcctaggtccatggtgacgctgccatcgttgaggatgagcaagaagaggtcccagggcatccggtgcgactacatcggctcagccaccaacgttatcatggtgacgacgacgacgctgatgctgttcgcggggaggttcgggctggcgccgtcggtgaacaggaagtcgacggcggggctgaagctggaggcgcgcgactccggcctgcagaccggcgaccccgccgggttcacgctcgccgacacgctggcctgcggcgccgtcggccacatcatgggcgtcggcgtcgtcctcggcctcaagaacatcggcgtcctggaccagatcatcggctaatcaaattcattaagctagtcacacgaatcaatactcctatgtgtaatcgatgcatgagtgcctgtgtgatggacgatgtaatgatcatgtcaaatgtgcgtgga

SEQ ID NO: 416547 - DNA, 499 bp, Oryza sativa
gtcgttgaggccggcgagcgagccgccaccgggggtgggcgacagccagtactgcttgtccctcaccaccttcagcccgtcggggaagctggtgcagatcgagcacgcgctgacgggggtcgggtcccgccagacctccctcgggatcaaagctgctaatggagtagttattgccaccgagaagaagttgccttctatcttagtggatgaaacatctgtgcaaaagattcagtcgtggactccaaatattggtgttgtctacagtggcatggggccagacttccgtgctttagtgaggaaaagtcgaaagcaagcacaacagtattatcgtctgtacaaggaaactatacctgttacacagctagtccgagaaactgctgctgtcatgcacgagtttacacaatctggtggtgtaagaccatttggtgtatctttgttgattgctgggtatgatgacaatggtccccaattgtaccaggttgatccatcagggtcatac

SEQ ID NO: 416548 - DNA, 463 bp, Oryza sativa
tcgttctctcagctctcacagctcactgcatcaatggccgcggccaccatggcgctctcctccccggtgatggcccgcgcggcgccgtcgacctcctccgcgctcttcggcgaggcgcggatcaccatgcgcaagaccgccgcgaagcccaagccggcggcgtcgtcggggagcccgtggtacggcgccgaccgcgtcctctacctcggcccgctctccggcgagccgccgagctacctcaccggcgagttcccgggcgactacgggtgggacaccgcggggctctccgccgacccggagacgttcgccaagaaccgggagctggaaggtgatccactcccggtgggcgatgctgggcgcgctcggctgcgtcttccggagctcctcgccccgaacggcgtcaagttccgcgaggccgtgtggttcaaggcgggctcgcagatcttcagcgagggcgggcttg

SEQ ID NO: 416549 - DNA, 568 bp, Oryza sativa
  unsure (1)..(568): unsure at all n locations
gtaccggtccggcctgcccggcccaccccatcgcgtgtcgtttgtcatcatggattattcgaggggatcagcgcacgcacgaggacaccacgacgtgccgatcgctatggggtcgtggcggcgcatggcctacggcgccctcaaggactccaccaaggtcggcctcgccaaggtcaacagcgacttcaaggagttggatattgcaattgtgaaggccaccaaccatgtagaatgcccttccaaggacaggcacgttgaataaatattcggggagacctccattaaccgctctcgagcggacgttcaatactgcatatatgccttgtcaaggagattgtccaagacaaagaattggacagttgcattgaagacattgatagtggtacataggctcttgagagaaggtgatcctacattcaaagaagagttcctggcctactcatacaagggaagcgttttgcagagagcaaacttcaaggacgattcaagccaattagcttgngattgctctgcgtgggttcgcgcctacgcgctcttcctagaagaacggctcgagtgttttaggatc

SEQ ID NO: 416550 - DNA, 503 bp, Oryza sativa
tcgatctcctcctcctcctcctcttcctccgcgcgcgcgagatccagggagagggagagggagagatcatggcggggacggtgacggtgccgtcggcgtcggtgccgtcgacgccgctgctcaaggacgagctggacatcgtgatcccgacgatccgcaacctggacttcctggagatgtggcggcccttcttccagccctaccacctcatcatcgtgcaggacggcgacccgaccaagaccatccgcgtccccgagggcttcgactacgagctctacaaccgcaacgacatcaaccggatcctcggccccaaggcctcctgcatctgcttcaaggactccgcatgccgctgcttcggctacatggtcttcaagaagaagtacctttttaccatcgacgacgactggtttgttggcaaggacccatctggcaaggacatcaatgctcttgagcagcacatcaagaacctcctcaggtccgtccaccccgttctttttaacacc

SEQ ID NO: 416551 - DNA, 428 bp, Oryza sativa
tttgtttcctctctgtttctctcttcttctcggactccaccttgtcacttccagaccaagggagaaattaaaaaaaatatatacagtgagagatttttctctctccggtctggagcacaaatgggcatcttcagtggagcgggagcacatcgccctagctgcccgtcggccgcgaattgcgcaaaatgggctcaaacctacctgaagtactgcctttgtagcacgagggatggcatggcactgacgcttggactgttaagcgtcatcagctggggagttgctgaggtgccacagatcataactaattacaagcataagtcaacagaaggcctttcccttgcttttctaatgacatggattgttggggactttattaaccttattggctgcttcttggaacctgagacgctgccacacaattttacatg

SEQ ID NO: 416552 - DNA, 462 bp, Oryza sativa
ctcctactgagagctgagcaggcgagcgagcgggggtggcagcatcgctccaaggggcggccaccctgatgcagccggccaagctcggcggccgggcctcctccgccgcgctgccatcgcgcccgtcttcgcacgtcgccagggcgttcggcgtcgacaccggtgccgccggcaggatcacgtgctccctgcagtccgacatccgggaggtcgccaacaagtgcgccgatgccgacaagctcgccggcttcgccctcgccacctcagctctgctcgtctcgggcgccagcgcggagggcgtgccgaggaggcttaccttcgacgagattcagagtaagacgtacatggaggtgaagggaaccggcacggcgaaccaatgcccgacggtggagggcggagtcgactccttcgccttcaaggccgggcagtacaacatgaagaaagtctgcctggagccgacgt

SEQ ID NO: 416553 - DNA, 363 bp, Oryza sativa
gtttgatctcgtccatggtgctgatcaagatgagggagatcgcggaggcctacctggggtcgtccatcaagaacgccgtggtcaccgtcccggcctacttcaacgactcgcagaggcaggccaccaaggacgccggcgtcatcgccgggctcaacgtgatgcgcatcatcaacgagcccaccgccgccgccatcgcgtacggcctcgacaagaaggcgacgagcagcggcgagaagaacgtgctcatctttgacctcggcggcggcacgttcgacgtgtcgctgctcaccatcgaggagggcatcttcgaggtcaaggccaccgacggcgacacccacctcggcggcgaggacttcgacaacc

SEQ ID NO: 416554 - DNA, 450 bp, Oryza sativa
tttttcatggccaagatccccaatgccgtcctgggacagggttacggtatgactgaggctgggccagtgctggcaatgtgcctggcgtttgccaaggagcccttcaaggttaagtccgggtcgtgcggtacagtggtgcgcaacgcggagctgaagatcgtcgaccccgacaccggcacctccctcggccggaaccagtccggcgagatctgcatccgcggagaacagatcatgaaaggctatctgaatgatcctgaggcgaccaagaacaccattgacgaggacgggtggctgcacaccggagacatcggcttcgtcgacgacgacgacgagatcttcatcgtggacaggctcaaggagatcatcaagtacatggggttccaggtgccaccggccgagctggaggcgctgctcatcactcacccggagatcaaggacgcccccgtcgtc

SEQ ID NO: 416555 - DNA, 508 bp, Oryza sativa
tgtcgagcccgaggcctccgtgttctccaagatgaccaagttcgaggaggagctgcgctctgcgctgccccgggagatcgaggccgcccgcgtcgccgtcgccaacggcaccgcccccgtcgccaaccggatcgtcgagagccggtcgttcccgctctaccgcttcgtccgcgaggagctcggctgcgtattcctcaccggcgagaagctcaagtcccccggcgaggagtgcaacaaggtgttcctcggcatcagccagggcaagctcatcgaccccatgctcgactgcctcaaggagtggaacggcgagccccttcccatcaactaagccaagatcccatcgccattgccattgccatacacccatcatcgaggaggagaggagactaaaaataaaagaaaacgaaccgcttcgtgtatcttcagacaaaaaagaccctgtattttcttcgttcgttgccgtttggtttatagtgatctcgtgttctttgtggtagctgctctgctc

SEQ ID NO: 416556 - DNA, 552 bp, Oryza sativa
  unsure (1)..(552): unsure at all n locations
tctattgaagccccaataactgaaaacattgggaggaccacaatttcctttgggatgagtgtcttctggatctcaaccatggctggagagctcctgaactgccttgcagcaatcggagtcattatggatttccctccagctatacttggcatgacggtcttggcttgggggaattcggtgggtgacctcgttgctgatgtagctttggcaaagtctggccagccgacaatagccattgctggctgctttgctggtccaatgttcaatatgctggttggactgggaactgcacttgtaatacaaacagccagggtgtaccccaaagcttatgtactcgaattccatgttggaattgctgttgcatttgtatttcttcttttgagcctgatgggcaccctgttgatggtcacctggactaggtttcgggttcccaggttttggggttactgccttattgggctttacatctctgttacagtagtgagtatagctatagcgagctcttctggatgatacatanttttatacataatagcaactagtccgttgcag

SEQ ID NO: 416557 - DNA, 465 bp, Oryza sativa
cctaatcacccatgtctgctgaagtcagcgaggaatatccttatttcctctcctgctacttctggttcatatattgcataaaattccgagatttcacttgatacaagcggatcacctggaggttcatgctaatggtgtacatgatcgtgtcgatgcaactgctggtgaccgtcgccgtctcctgctcggtgaacctcgtcgagcccatcaagaccttcttccaggctcgcacgccggatgtcctcgtcgcctacctcatcatcatcatctcccccctcatcatgatgctgccgatgatctacttccgtaacaagcatacgatcaacctcttattactgctgctcttcaccgtctgtattagcttctccgtcggccctgagttgccctctcaagatgggacagtgatatttcaagccgcgggaatgaccgcggcgatagtgatcggactgacctgctacacgttct

SEQ ID NO: 416558 - DNA, 379 bp, Oryza sativa
tttggttcatgcacgagtaccgcctcgccgacgtggaccgctccgccgccgcccgcaggctctccaagtcctcccacaacgccctcaggttggatgattgggtgttgtgccgaatctacaacaagaagggagtgatcgagaggtacgacacggtggacgccggcgaggacgtgaagccggcggcggcggcggcggcggcgaagggtggtcgcatcggcggcggcggcggcgcggcggcgatgaaggtggagctctccgactatgggttctacgaccaggagccggagtcggagatgctgtgcttcgaccggtcggggtcggcggaccgcgactcgatgccgcggctgcacaccgactccagcgggtcggagcacgtgct

SEQ ID NO: 416559 - DNA, 526 bp, Oryza sativa
  unsure (1)..(526): unsure at all n locations
cccgtatctctcgcgtttctggtctaagttccaggccacttgttgccgcattccttctccctccctgcaaatccaatccaatccaatcccaccccaagctcgcggaggaggagatggggagaggagggatcggcggcgcggggctggtggcggcggtcgcgaaggcggacgtggagaacaccgactccacccgcggcttcgtcaaggacgtgaagcgcatcatcatcaaggtcggcaccgctgttgtgactgggccgaatggccggttggctatgggcaggctcggtgctctgtgtgaacaggtgaagcagctaaattttgaggggtacgaggtgattctggtcacctctggtgctgttggtgttgggaggcagaggctcaagtaccggaagctcgtcaatagcagtttcgctgatctgcagaacccacagatggacatggacgggaaggcctgcgctgccgtcggtcaaagtgtgctgatggcgatctatgacacgttatttagccagctngacgtaacatcatc

SEQ ID NO: 416560 - DNA, 539 bp, Oryza sativa
cttcactaaagagaaccgggctgaggagctgtgaaaccttctaacccagctcaggccttttttctcgttgattcccaaggcaaagactgcaaaaattgtgcgtggaatcatcgatgctgctgccaagataccaggaacatctgaacttcagatctcactctgcaaggagatggctgaatggacccgtgctgagaagcggacattcctcaggcagcgtgtggaggcaaggctagcagcccttctgttagagaatcaggagtacactgaagcgcttactctccttactggtcttatcaaggaagtcaggaggcttgatgacaagttgcttcttgtggacattgaccttctggagagtaaactccacttttctctgagaaacctgccaaaggccaaagcttcattgactgctgctagaacagcagcgaatgccatttatgttccaccagcacagcagggtactattgatctgcagagtggaatccttcatgctgaagaaaaggactacaagactgcatacagctacttttttgaagcatttg

SEQ ID NO: 416561 - DNA, 504 bp, Oryza sativa
ttctttcctacatcgccctggactatgaccaggaagtggagactgccaagaccaggtcctccgtggagaagagctacgagcttcctgatggacaggttatcaccattggtgctgagcgtttccgctgccctgaggtcctcttccagccttccttcataggaatggaagctgcgggtatccatgagactacatacaactccatcatgaagtgcgacgtggatattaggaaggatctatatggcaacatcgttctcagtggtggtaccactatgttccctggcattgctgacaggatgagcaaggagatcactgccttggctcctagcagcatgaagatcaaggtggtcgcccctcctgaaaggaagtacagtgtctggattggaggatccatcttggcatctctcagcacattccagcagatgtggattgccaaggctgagtacgacgagtcttgcccatccattgtgcacaggaaatgcttctaattttcggacccaagaatgc

SEQ ID NO: 416562 - DNA, 503 bp, Oryza sativa
ttttctccaagctgttcagccggctcttcgcggaggaggagatgcggatcctgatggtgggtcttgacgcggccggaaagaccacaatcctctacaagctcaagctcggcgagatcgtcaccaccatccccaccatcggattcaatgttgaaaccgtggagtacaagaacatcagcttcaccgtctgggatgtggggggtcaggacaagatcaggcctctgtggaggcattatttccagaacacccagggtctcatctttgttgtggacagcaatgatagggaccgtgttgtcgaagccagggatgagctccacaggatgctgaacgaggatgagctacgtgatgctgtgctgcttgtctttgctaacaagcaagatctgccaaacgctatgaatgctgctgagatcactgataagcttggactgcactcccttcgccagcgacactggtatatccagagcacttgtgctacaacaggtgagggattgtacgagggcctggac

SEQ ID NO: 416563 - DNA, 413 bp, Oryza sativa
tgtcggtttatgagcaccaaccgcgggtaggggctccattagtgcgccggtagaaccttatagaagctgtcctgctcgtcccatggcagcgaccatcgtgtgcgtgaaggcgcgccagatcttggacagcaggggcaaccccaccgccgagggctatgtgggctgctcacatagaacctttgcaaggtctgcagtcaccagggaggcatcaactggtgtctatgaagccatggactagagggacgggggagctgaacacttgggacagggagtttgcaaggctactaacaatgcgaactcatctattgccccaaacttgactggcaaggaccctacttaacaggctgaacttgacatcttgatggatgagcaactcgacagtaccaaaaatgagcggaggagtgagcaagcag

SEQ ID NO: 416564 - DNA, 477 bp, Oryza sativa
  unsure (1)..(477): unsure at all n locations
ttcgcctcactttattagcaccaaccccgtctggttggtccattcctccgccgctagaaccttctagaagctctcctcctcctcccatggcggcgacgatcgtgtccgtcaaggcgcgccagatcttcgacagcaggggcaaccccaccgtcgaggtcgatgtgtgctgctcagatggaacctttgcaagggctgcagttcccagtggtgcatcaactggtgtctatgaagctctcgaattgagggacggtggatctgattacttgggaaagggtgtttccaaggctgtcgacaatgtgaactcggttattgccccagcttctgattggcaaggaccctacgtcacaggctgagcttgataacttcatggttcagcagctcgatggaaccaaaaatgagtgggggtggtgcatgcagaagctnggtgctaatgcaaatcttgctgtgcactggccatttgcaaagctggagctatca

SEQ ID NO: 416565 - DNA, 525 bp, Oryza sativa
tctgtcactttattagcaccaaccccgtctgggtggtccattcctacgccgcgggagccttctagaagctctcctcctcctcccatggcggcgacgatcgtgtccgtcaaggcgcgccagatcttcgacagcaggggcaaccccaccgtcgaggtcgatgtgtgctgctcagatggaacctttgcaagggctgcagttcccagtggtgcatcaactggtgtctatgaagctctcgaattgagggacggtggatctgattacttgggaaagggtgtttccaaggctgtcgacaatgtgaactcggttattgccccagctctgattggcaaggaccctacgtcacaggctgagcttgataacttcatggttcagcagcttgatggaaccaaaaatgagtgggggtggtgcatgcagaagcttggtgctaatgcaatcctggctgtgtcactggccatttgcaaagctggagctatcatcaagaagatttctctgtaccagcacattgccctccttgctggaaacaag

SEQ ID NO: 416566 - DNA, 515 bp, Oryza sativa
ttggtttaatacagatttactttcacattccgaagggtgctacacttcccaggagtggagaatatccgagacacctctcatctatgcttatcagagtctcatctatttcctgtctttgtcatagacagatattctcatggctagaacctctccttttccacctctaactagacggaaaatcgcttccctcaagttgctgataccatgtgttctagttctttcagtggctgttattgttgttacgcagtatttccataatatctcttaccttctgcggccactgtgggacacaccacctaagccatttatccgcatcccacactactatgcccccaacatctccatgccgcagctctgtcagctccatggttggggtatcctccccacccctcgccgtgtctttgacgcccgcctcttcagtaatgaacttgatattctagaaattcgctacggtgagctccttccgtatgttgacaggtttgtcatccttgaagctaatgccacattcactggca

SEQ ID NO: 416567 - DNA, 537 bp, Oryza sativa
ttttcctctcccgcagatcagatcagatcagagccgatcaggtgaaaaagaggaggggggaaagatggggttggcgttcgggaagctgttcagccggctgttcgcgaagaaggagatgcggatcctgatggtcggtctcgacgccgccggaaagaccaccatcctctacaagctcaagctcggcgagatcgtcaccaccatccccaccattgggttcaacgttgaaactgttgagtacaagaacattagcttcactgtttgggatgtcgggggtcaggacaagatcagacctctttggaggcattacttccagaacacacagggtcttatctttgttgttgatagcaatgatcgggaccgtgttgtggaagctagagatgagctccacaggatgctgaatgaggatgagttgcgtgatgctgttttgcttgtgtttgccaacaagcaagatcttccaaatgctatgaatgctgctgagatcactgataagcttggactgcactcccttcgccagcgacactggtacattcagagcac

SEQ ID NO: 416568 - DNA, 539 bp, Oryza sativa
  unsure (1)..(539): unsure at all n locations
cttgtatttccggagatctctgtgggaggagcccctccaatttggcagggaatgaaagagcagcaactgatcgagaaggatgtattctccttctggctcaaccgcgatcctgatgcaccgacagggggtgagttaatctttggtggtgtagacccaaatcattacaaggggagccatacatatgttcctgttacccgcaaaggctactggcagtttgagatgggggatcttcttattgatgactactcaactgggttctgttctggtggttgcgccgctattgcggattcagggacttcattgctcggtggcccaacaactattgttgctcaaattaatcacgcaattggagctgagggaattgttagtatggaatgcaaacaagttgtgcgggactacggggacatgatcctcgagatgctcatagcacaggcaagccccatgaaactgtgctctcagattggtctctgtgcatttgatggtactcgntctgtcagaaacaatatagagtctgttggtgataaagaaaaggtgggctc

SEQ ID NO: 416569 - DNA, 509 bp, Oryza sativa
ttccttgcacgcgccgcgcagcctacgagcgggagccacacctcgagggctgcatctgttgcactcatgatttagcaccagctgaagtgacctctgagactgcgcggtgacgtagcctgttgctaggataaaaatctcagtagttaagcatggcggattctatggtgtcaagtttctgggggcctgttacttcaacaactgagctctgcgaggaaaattatgcacactcgtcatatattgcagaattctacaatactgtttctaatgttccatgtgttcttctggcacttgttggacttgtgaatgctcttcgccaaggttttgagaaacgattcagtgtcctgcacatatccaatatgatacttgctatcggcagtatgatcttccatgccaccttacagcacgttttacagcagagcgatgagactccaatggtgtgggagattctcctatatctttatggactttattcaccagactggcattaccggagcactatgcctactttc

SEQ ID NO: 416570 - DNA, 500 bp, Oryza sativa
cttgctccatccatctatccatccaaggagtgtggaacgccacacgtattttttttttatctatgctaatctgatcattagcagaggagagttttagcagtaggattggattaaattggagtagtttcatagtttgtgtgtagtgatcttaattagctttgattagacagacagtacagtagagtagaggatgttggctgtgttcagcggcgcggtggtggaggtgccggcggagctggtggccgccgtgagccggacgccgtcgcccaagacgcgggcgtcggagctggtcggccgcttcctcgccgccgccgagcctgccgtgtccctgcagctcggcgaccttggccacctcgcctactcccacgccaaccaatccctcctggcgccaagatcctttgcatcaaaagatgacattttctgcctgtttgagggagtcctggacaatctgggcaggctgagccagcagtatggcctgtccaagggcgccaatgaggtgc

SEQ ID NO: 416571 - DNA, 467 bp, Oryza sativa
tctcagccgttcctcctcgcgctcgcgtcgagctccaacatcgggtcggcggcgacgcccatcggcaacccgcagaacctcgtcatcgccgtcgagagcggcatcacgttcggccagttcctcctcggcgtgttcccggcgatggtcgtcggcatcctcgccaacacctgcatcctcctctgctacttctggaggtacctctccgccgaccgcgaccagctcgagggcggcggcggcgcgcatggtcccgaggtcgtcgccgacgaggaggtcacctcgcaccggttcaccccggcgaggatgtcccacgcgtcgtccgtcaacgacagcgactgcatcagcgagcccatccgccggagcgagagcatgaaccgcgccgacgcgctccgcagccggagctacaactccgagggcgacatccaggtcgccatccgctcgctccgggcgtcgagcctgtcgcgcgagat

SEQ ID NO: 416572 - DNA, 479 bp, Oryza sativa
  unsure (1)..(479): unsure at all n locations
ttgtttttccatataaactatctggggacagagcagccgacgttcactctgaacttctccaaaggttccagccagataatcgcacagtactatcaactaatacgcctgggattcgagggatacaagaacatcatgcagaattgcatggagaacacagcaatactaagggaaggcatagaggcgactggtcgattcgaaatcctctccaaggaggccggtgtgcccttggtggcgttctcgctcaaggacagcggcaggtacaccgtgttcgacatctccgagcacctgaggaggttcggctggatcgtgccggcgtacaccatgccggccaacgccgagcacgtcgccgtcctccgcgtcgtcatcagggaggacttcagccggagcctcgccgagcggctcgtctcggacatcgtcaagatcctgcacgagcctgacgcccattcggcccangtgctgaagatcttcagcgccatcgc

SEQ ID NO: 416573 - DNA, 511 bp, Oryza sativa
  unsure (1)..(511): unsure at all n locations
tcgttttgtctatagaccctcgtgccctaatgcggggacgagattcatccctgggggaccaaagaaaccgaattaacctccgagtcctctgctccctctttgcttcttggaccaggatctgatctgcgcggcgctcgaccggaatcgcgcggagatggacggcggcgacctgaggagcagcatcaagaagtggaacgtcatctacccggtgtacctcaactccaagaagacggtcgccgagggccgccgcatcgcctccggcaagggctgccccgaccccacctgcgtcgagatcgccgattgctgctcccacctcaagatccctcacgccatcgaattggataaggcgtatccacgagatttcttccangtgggaagggtgagagtgcagctcaagaaggatgacggctccccagtcaatcctgcaatcaaaacaaagaagcagctgatgatccaaatcgcggagcttgtccccaagcatcatggcatgactaagaagcangaaccagca

SEQ ID NO: 416574 - DNA, 512 bp, Oryza sativa
  unsure (1)..(512): unsure at all n locations
ctcccgccccggccaggtgtttgacgaaatgggcgtgctccgccatggagctctggctcctcaacccggcgggaatgcgcggcctctccgccgccaagccccgcgtcgtgtcttccaggcgcatcgtgcggttccgcgtggcgtcgtcagccgcggcgccgcccgcggcgaagcccgggacgcccaagaagcgcgggaagacggagatccaggagacgctgctgacgccgcggttctacaccacggacttcgacgagatggagcggctgttcaacgccgagatcaacaagcagctcaaccaggaggagttcgacgcgctgctgcaggagttcaagacggactataaccagacccacttcgtccgcaacccggagttcaaggccgccgccgacaagatggaggggcctctcaggcagatcttcgtcgagttcctcgagcgctcctgcaccgcggagttctccgggttcctcctctacaaggagctncgccgcaggctcaagaaaacaaaccca

SEQ ID NO: 416575 - DNA, 530 bp, Oryza sativa
ttcagccgccgccatcgccatctctcggacggaaaccctagacgagcgaccatggccaccatgccaagcacttgcgcctcctcctcctccctcttcctcctcctccgcagggacaggaggagcagcaggagtgccagcctccccggacccgcccgccgtttgggggttgtgcgcgcctccgccaaggagatcgccttcgaccagggatcgcgatcctccctccaggccggcgtcgagaagctcgccgccgccgtcgccgtcaccctcggtcccagaggaagaaatgtcgtcttggatgagtttgggagccccaaagtggtcaatgacggagttaccattgctcgagctattgagctcgctgatccaatggagaatgccggtgctgctttgattcgtgaggttgccagcaagacaaatgactcagcaggtgatgggactacaaccgcatctgtcctggctcgtgagatcataaaattgggcctgctgagtgttacttcaggggcaaacccagtatctatcaaaaagggcat

SEQ ID NO: 416576 - DNA, 404 bp, Oryza sativa
tttttgttccatatgctggcgaccgtcggcggggggatcgtggtgagccaggggcttttccgttcggtgaagcacggggacagtacgatcgaggcgatcaacctgtacacgggggggacggagaacgttgcgcaccactaatgtaccccatacttcgagatgagccgacacgacgtgatcaagcccatcctgctagaggacgaccagatataccacctggtctgccccgtttaccccgtacactacaagtacaaccctgttcagacactctagaccaatgtggttggtactctcaacatgctcggatttgcctataggatcaatgcccggtccctacttaccaacaccagtcaggtctacagagataccctgcaccatcctgaagtggatacttaccgtggcaa

SEQ ID NO: 416577 - DNA, 457 bp, Oryza sativa
ttctttgctcgcttcctccccctctcccacgagggagggcgtctcacattggggggtacccccgcatgggccccaagagggagctcaagtttgccctggagtctttctgggatgggaagagcagcgctgaggatttggagaaggttgcgaccgacctcagggccagcatctggaagcaaatggctgacgctgggatcaagtacatccccagcaacaccttctcgtactatgatcaggttcttgacacggctgccatgcttggtgctgtcccagagcgctactcatggactggtggagagattgggttcagcacctacttctcgatggctaggggcaatgccactgtccctgccatggagatgaccaagtggtttgacaccaactaccactttatcgtccctgaacttggtcccaacaccaagttctcctactcttcccacaaggctgtgaatgaata

SEQ ID NO: 416578 - DNA, 397 bp, Oryza sativa
  unsure (1)..(397): unsure at all n locations
tcgtttagtttactcgtctcgagggtaaatggagcttcacgtgcaggtctgaggggagtacatcgacatgaggatccagtgcgacgcgtgcgaggccgctgcggccacggtggtgtgctgcgcggactaggcggcgctgtgcgcgcgctgcgacgtctagatccactccgccaacaagctcgccagcaagcaccagcgcctcccgctcgacgccgagctcccctccgncctcccgcgctgcgacgtctgccaggagaaggcggcgttcatcttctgcgtggaggacagggcgctcttctgccgggactgcgacgagcccatccacgtcccggggacgctctccggcaaccaccagcgctacctcaccaccggcatccgcgtcgggttcagctccgtc

SEQ ID NO: 416579 - DNA, 394 bp, Oryza sativa
ctcctctccatttctgagctcttctagtttgagggagagagcagcagaagggagtagtgcaagatgccgatccgcaacatcgccgtggggagccaccaggaggtgtaccacccgggtgcactcaaggcggcgttggccgagttcatctccaccctcatcttcgtcttcgccggccagggctccggcatggccttcagcaagctgaccggcggcggagcgacgacccccgccgggctgatcgcggcggcggtggcccacgccttcgccctgttcgtggcggtgtccgtcggcgccaacatctccggcggccacgtgaacccggccgtgaccttcggcgccttcgtcggcggcaacatcaccctgttccgcggcctcctctactggatccgccagc

SEQ ID NO: 416580 - DNA, 527 bp, Oryza sativa
ttctcccctcctctcctcctcccgccgccgccgccgccgcaaaaacccgaggccgagaggaggagacgggcgcgggggctgatctcgtcagcgaggcgaggcgaacgggcgatccggtgcggtgcgggccgggtggacatggcatcggaggacgtggtggggaagagcaggggggacaccgcggtcaccaccatcgtcaacctggcggaggaggccaagctcgcgcgggagggggtcaaggggcctggttaccaggtgctctccatctgcaagtctctcttcgccggtggcgtcgccggtggagtatcacgtactgctgttgctccgctcgaacgaatgaagattctgcttcaggtccaaaaccctcacagtatcaagtacaacggtacaattcaaggtcttaagtacatatggagaacagagggtctccgtggactttttaagggcaatggtaccaattgtgccagaattgttccaaattctgccgtgaagtttttagctatgagcaagcatcaagtggaatttta

SEQ ID NO: 416581 - DNA, 476 bp, Oryza sativa
tttgttattaccacacccacctccatctccgcctgcgccgccgccgccgccgaccaagtcgagggggagatccagcgagagcgaggaggaggaggaggatggcggtgatggaggagcagcaggagggagccgcggtggtgatgcggcggaggcccaagacgaagatcgtgtgcacgctggggccggcgtcgaggtcggtggagatgatcgggcggctgctccgcgccgggatgtgcgtcgcgcgcttcaacttctcccacggatcccacgagtaccaccaggagacgctcgacaaccttcgcgccgtcatggagagcaccggcatcctctgtgccgtcatgctcgacaccaaggggccagagatccgaactggatttctgaaagatggaaaacccgtacagttgaagaagggtcaagaaatcacaggtccaactgattatagcatatagggtgatgacaacatgatatcaatgagc

SEQ ID NO: 416582 - DNA, 510 bp, Oryza sativa
tcagctccagccacacgagcctagttcaggtagatacaatggcgtccaccgcctctttcatgctcgccgtcttgctggcggtggccgtcgcggcggcgccggcgagggcggtgcgatgcccgccgagcgacaagcaggcgctgatgagagtgaagcagtcgctgggaaacccggcgacgctgtcgacgtggtccctggcgtcggcggactgctgcgagtgggaccacgtccggtgcgacgaggccgggcgcgtgaacaacgtcttcatcgacggcgccaacgacgtccgcggccagatcccgtccgccgtggcggggctgacggcgctcatgtcgctgtcgctgttccgcctcccgggcctctccggccccatcccggcgtgcctcaccgcgctctccaacctccagttcctcaccatctcccacaccaacgtctccggcgtcatcccggactcgctcgcgcggatccgcagcctcgactccgtcgacctctcccacaacagcctgaccg

SEQ ID NO: 416583 - DNA, 460 bp, Oryza sativa
accgtatccttccccaaaatccccaatccccgagctgtttcacctccagcgagcgagcgcggcggccatgtcggggcgcggcaagggcggcaaggggctcggcaagggcggcgcgaagaggcatcgcaaggggctgcgcgacaacatccagggcatcaccaagccggccatccagaggctggcgaggaggggcggcgtgaagcgcatctccgggctgatctacgaggagacccgcggcgtgcttaagatcttcctcgagaacgtcatccgggactccgtcacctacacggagcacgcccgccgcatgaccgtgaccgccatggacgtcgtctacgcgctcaagcgccagggccgcaccctctacaggttctggggctgaggtccgccgctgcatccggctggccgtggggacatgtctcggctcgcggtcaagaaatccgggaggatatctgcaattgat

SEQ ID NO: 416584 - DNA, 482 bp, Oryza sativa
cgttctccgccgtgtttttcgttcgttctgtggcttggtgttcttgaagagtgcctgaaattgagtcatggctgccaagctagctcgcctccacagtctccgcgaacgcctcggtgccaccttctcgtctcatcccaatgagttgattgcactcttctctaggtatgttaaccagggaaagggaatgctccagcgtcaccagctgcttgcggagttcgatgccttgatcgaagctgacaaagagaaatatgctccctttgaagacattctccgggctgctcaggaagccattgtgctgccgccctgggttgcactggccatcaggccaagggcctggtgtctgggactacattcgggtgaatgtaagtgagttggcagtggaagagctgagtgtttctgagtacttggcattcaaggaacagcttgttgatggacacaccaacagcaactttgttcttgaggctgattttgagcccttcaat

SEQ ID NO: 416585 - DNA, 403 bp, Oryza sativa
cttcctcctccccaaaccctatccggggggggcttcttactcgagagagggatcaacatccatggcgggcaagggcgagggtccggccatcggcatcgaccttggcacgacctactcgtgcgtgggcgtttggcagcacgaccgtgtggagatcatcgccaacgaccagggcaaccgcaccaccccctcctacgtgggctataccgactccgagaggctcatcggagactgctgccaagaaccaggtcgccatgaaccccatcaacaccgtcttcgatgccaagcgtctcattggcaggaggtttagcgatgcttctgttcacagtgacattaagctctggcccctcaaggtgatatgtggacctggtgacaagcctatgattggtgaccagtacaagggtga

SEQ ID NO: 416586 - DNA, 459 bp, Oryza sativa
agaagagcccagattccaaatgaagaaatggaaactcgaaaaggatccttctgattctcaaagaatgaggggcaaggggattgataccgagaaagatttcttcttattataagacgtgatttgatccgcatatgtttggtaaaagaacaatcttctcctttaatcataaatggaaagcgttcaattagaacatgaaaacgtgactcaattggtcttagttagtcttcgggacggagtggaagaagggcggagactctcgaacgaggaaaaggatcccttcgtatgaattgaacgaggagccgtatgaggtgaaaatctcatgtacggctctgcaaagggacaggaagggtgacttatctgtcgacttttccactattaaccccaaaaaacccaactgtgacctacgtaaagttgccagagtacgattaacctctggatttgaaatcactgcttatatac

SEQ ID NO: 416587 - DNA, 476 bp, Oryza sativa
tcgttatcagaggccactacccgtgcaccacgcgccctctcccacaatctcgctaaaaagttgattttctttttcagcttcctcctcccctcctccgcttctcaatccactagcatacatatcagatcagattcctgtacacttcccttttctcgcatccaatcccgactatcgcagcacccatcaaatcatcatccttttgcaaaacctaaaaaaaaaaagggtagataagagaaggttcttgcatccagagaggacactgtccgtcgtgcagcgtttcttgcttggttgcttggttgaatcgggtggttttgggcggatggcggggaagtgaaaaaagatggcttccatcgacgcgcagctgcggatgctggcgccggcgaagctgtcggaggacgacaagctggtggagtacgacgccctcctcctcgaccgcttcctcgacatccttcaggacctccatggcgacgacctcc

SEQ ID NO: 416588 - DNA, 294 bp, Oryza sativa
gctcctccctttttttttttttgcccacggccatggctctcgtttcatggaccggtaatatctgctcgcaatgtgcactatgtcagtcgtttaatactcgtttatttctgttcggttaaaactgatgctctgagtccgattattgtccatcggctgttttggaatgcgagtatttacattgctacttcctgtgtcgttattttcgtttgtgctattccctgcttttgctgctaaaaaaaaaaaataaaaacggaaaacaaaaactaaaagatgaacataacaaccaaaaacacg

SEQ ID NO: 416589 - DNA, 462 bp, Oryza sativa
ttctttagctgctggaggcggcggggcccgagggcgggcccgtggagttcaaggcggacgtgacggtggcggcggactggagcggcgacgtgatgacgatcggcgaggcggtggcgaaggtgccccctatgaacaaggagcggtacaccatctacgtgaaggccgggacgtacaatgagtacgtgtcggtggggcggccggcgacgaacgtgaacatgataggcgacggcatcgggatgaccatcatcacggggaacaagaacttcaagatgaacctgacgaccaaggacacggcgacgatggaggcgatcgggaacggcttcttcatgagggggatcacggtggagaacacggcggggccggagaaccaccaggcggtggctctccgcgcgcagagcgacatggcggtgttctaccagtgcgagttcgacgggtaccaggacacgctgtacccgcacgcgc

SEQ ID NO: 416590 - DNA, 408 bp, Oryza sativa
gctttctggtttgcgcgccttttcacagctgggcgggcaggaaggctgctggggctgggatgtacactcttccaagcagggagcagctgatcgtgaggctcaacgaaactgattgctccgtgcacaaggagatgaggagatacatcgatgcctctagccctatcatagactacatcgacaaccttttcctctcgaggagcattagcctagactggtgaaactgaactggagttcatatttgcagctgctgacaaagctgtcgttgatgccattgttttgttcttttcatagctattatgtagccttgggtgtggttgtctggtggatgctcaccctgactcccttcgcagagtcatgtgtaatgtataactgtatggtgattcagtacgatcatggataacctgtttt

SEQ ID NO: 416591 - DNA, 477 bp, Oryza sativa
ttcttgcgccaagcatttcgttggggatggtggcacggacaaggggatcaatgagggaaacaccatttgctcacttgaagatttggaagggatccatatcagaccttatcctgattgtatatctcaaggggtggcaactgtcatggcgtcctacacccaatggaacggggaaccattgcacgcaagccgctatttgctgacagatgttttaaagggcaagttaggcttcaagggttttgtggtgtcagattgggagggtattgacaggctctgtgagcccagaggttctgattatcgctattgcatcgcgcagtctgttaatgcaggaatggatatgattatgatacctttcagatttgagaagtttttggaagatcttgtgttcttggtagaggcaggggagataccaatgtcacggattgatgatgctgttgagcggattctgagggttaagttcatatccggagtgttcgagca

SEQ ID NO: 416592 - DNA, 394 bp, Oryza sativa
gctcttagcctgaacacattcatagcgtacttgggggctgattctctcctacctgaggggatcgccatactagtgagggtattatggattcttcttcaccatcgtcgcgcacctaggctcagagacagacgaactttgattacctctttaaggtgctcctaacaagtacatctggcgacggcaagatcagtaccctcctccgatggacttcaaactgttcggaggatatgtccgccaccatgaagcatcagactgcaaggtcaagatggttaacaccgccagcacaagactagaaactggcgatctgagacacagctagacaggagccattcagaacctagaccagctcatactacagcggtgcacatggctttagcatggcgcacgacttcac

SEQ ID NO: 416593 - DNA, 502 bp, Oryza sativa
ttcttttaggagctcgtccgcgtgctccagtcggggggcatgatggagaaggccagggggcacatgacggcggaggacgccgccgactgccgcgacgaccgggccaaggccatcgtcggcgacatggagccctacgaggtggattccgtcgttatgggcttgctcaaggtgtggatggacgacaggttcaagatcaccatggactgcctcgccagagccaaagaaaccgagagctggataccaaaatccaaagatgaaccttttgccgggtcagcgatggagatgatgaagctggctaagtataccgtcgaagagttctccgagatcccggcgagcgcgaaagacgaggtggtgcaagacctcgtcgacggcctcgaggcgatcttccaagagtacatctccttcgtcgcctcgtgcggggccaagcagaattacctcccaccgttgccaccattgacgaggtgcaaccaggactcgggcttctcaagctgtggaggaagac

SEQ ID NO: 416594 - DNA, 451 bp, Oryza sativa
gtcagggcaacaaatgcattcattcatttggactatgcaaaaaacatgcaaatccaatgcgatcaatcgagctttacgcctcgtgagagaagacatagtggatcagatcaacgacacggttggagtagccccattcgttgtcgtaccacgaaatcaacttgacgaacgagtcattgagggcaatgccagccgaggcatcaaagatggaagagcgcgagtcgccaataaagtccgacgacaccacctcatcctcggtgtagcccatgatgcccttcagcggtccttccgaagcagccttaatcacgttcttgatttcgtcatacgtagccggacgagccaagcgcaccgtcaagtccaccacagacacgttcacggtgggaacacggaaagccataccagtcaacttgcccttcaacgaaggaatgacagcaccggcagccttagcggcgcc

SEQ ID NO: 416595 - DNA, 445 bp, Oryza sativa
ctgcggtgcagcaacagcaggcgagcgacatgggagggtttgtcaagacccagaagacccatgcctacttcaagcgtttccaagtcaagttcaagagacggaggcagggcaagactgactacagggccaggattaggctcaccaaccaagataagaacaagtacaacacaccgaagtaccgctttgttgtgagatttacaaacaaagatatcacagctcaaattgtctatgctaccattgcgggtgatatcgtgatggctgctgcctactcccatgagctgcctcgttatggtcttgaagttggtctcaccaactatgcggcagcttactgcactggcttgcttctggctcgccgtgtgctcacgctccgtggtttggaccaggagtacgagggcaatgttgaggccactggggaggactactatgttgaaccagctgatgaaag

SEQ ID NO: 416596 - DNA, 428 bp, Oryza sativa
cttgctagtgcttcagatcttcttcttcgagcaactgatggaatgcttgttgatggtgaagcttgtactttaccacaattagagctattggaagtaaccgccagagcagctcatctcatcgtcgaatggggagattcaggtgtatccgtcgctgagggcctatccaatctgctgaagtgccgtctatcaaccaccatgcggtgtttgtcgtaccccagcgcgcatgtccgtgcactcagcatgtacgtgcttagcgacatcttgaacagcggacaaataaactccagtaagctcatccaaggggaacaccggaatggcatccagagcccaacctaccagtgcttggcagctagcatcatcaactggcaagccgatgtggagagatgcatagagtgagaagcccacagacgccgcgccaccggactgac

SEQ ID NO: 416597 - DNA, 441 bp, Oryza sativa
  unsure (1)..(441): unsure at all n locations
atccggctaaccccacctgcccccgtccgtccgcccgcccgcccgcctcggcgacttcacgcgtacaagggggatttgttttctctagggtttcgttcgcgaggaggagagatctggttggggagatggacgggaagccgccgccgccgaacccgaacctgccctaccgggaggactgctggagcgacggcgagacggcggcgctcgtcgacgcctgggggaggcgctacgtcgacctcaaccgcgggagcctccgccagccgcagtggcgggaggtggccgaggccgtcaacgcgcggccgggggcgtccgcgcgccgccggccgccgcgcaccgacatccagtgcaagaaccgcgtcgacaccctcaagaagaagtacaaggcggagcgcgcgcggnggacgccctcgtcctggtacttctacagggacctcgacatgc

SEQ ID NO: 416598 - DNA, 447 bp, Oryza sativa
ccagcaatagtacctcacactgctagtagtttattacgattgatcagaatggtactaatttacagggtaaaactggtgaaaatctgctaagccacaatgctgacaataaacaagatcaagccatgaaaggagggagtaaacagagctgactccacacaagccctgtctcacgaccattattaaacttaaatggaaaacctcaaacttctcatccattttttgctttcatttttggtttcttgtatgcactgaaactgcaagagagagagagagagagatagatcatcatcatctctactcatccatcctcatgacgcagcggagactctcccccttgagcatgagatcgaacgccgtgttgatctccgagaacggcacgctgtgcgtgatgaacttttccagcttcagctcctttttcatgtacagcttgacgactttgggcaggtc

SEQ ID NO: 416599 - DNA, 534 bp, Oryza sativa
  unsure (1)..(534): unsure at all n locations
tcgctgcgagtgattcaagaaaaaagaaaacctgagctttcgatctcttcggagtggtttcttgttctttgaaaaagagggggattaatggcgacagccgggaaggtgatcaagtgcaaagcggcggtggcatgggaggccgggaagccgctgtcgatcgaggaggtggaggttgcgccgccgcaggccatggaggtccgcgtcaagatcctctacaccgccctctgccacaccgacgtctacttctgggaggccaaggggcaaacacctgttttccctaggatcttgggccatgaagctggaggcattgtggagagtgtgggagagggtgtgaccgaactcgcgccgggcgaccatgtcctcccggtgttcaccggcgagtgcaaggagtgtgatcactgcaaatcggaggagagcaacatgtgtgacctcctcaggatcaacgtcgaccgcggcgtcatgatcggcgacggcaagtcccactcaccatcaaggggaagcccatcttccacttntgtggcacatccaccttca

SEQ ID NO: 416600 - DNA, 461 bp, Oryza sativa
  unsure (1)..(461): unsure at all n locations
tttgttttttatttggaagggaaattcccagaactcaaaaactccgccgcccaaaactccacaaataggaagcaaaggtgcccatctaacaaaaagatacaccccagatcctacaatcttgtggaacaaatttcaaactcgtcgcgaaacgttccttaaaatttcggacctaactactctcctgctcattggctgtctgtaaaatcagcatcgatgacatcaccttcctcgcctcctggcttctcggatgggccagcagagccagcggcagcatcagctcctggggtaggntcctgctcctggggcaccctgctggctgtagagggcctgccccagctgcatcacttcctggttcagagcagcgagagcatccttcatcgtctgtgtcgagccacctgcaacagcgtccttgagctccgtcagctttgcctcaaccttacccttcaattgcctgggacctt

SEQ ID NO: 416601 - DNA, 499 bp, Oryza sativa
tcgctaaggcagtgatcacagtcccagcatatttcaatgactcacaaaggacagcaacaaaagatgctggccggattgctgggttggaagttctccgcatcataaacgagcctactgcagcatctttggcatatgggtttgaaaagaagaacaatgagaccattcttgtttttgacctgggaggaggcacatttgatgtttcagttcttgaagttggtgatggtgtttttgaggtgctgtctacatctggtgacactcaccttggtggtgatgactttgacaagagggttgttgattggctggcggggaacttcaagaatgatgaaggtattgacctactaaaagacaagcaggccttgcaacgtcttacagaagcagctgagaaggcaaagatggagctatcatccttgacccaaacaaatatcagtttacccttcattacagctactgctgatgggcccaagcatatcgagacaactcttaccagggctaaatttga

SEQ ID NO: 416602 - DNA, 480 bp, Oryza sativa
attgcgccccttatgcattagagcccccggagtcccctctgtttcgcagataagtcctttggttcccatctttttattacattcaggtcctcctagtttcttttccttacgagactactccttgcattcttgcgaggaagcccctcgggttggtcgaattttagttgccactccctctcctcgcggagtcgttgctgtgcttgttcttggtcaaggttgaggttggtggcgtagatccgatctgcggaatgacaacctatcctttgctctaacgatcgccgtactgcgatgaagttgaacgtgctccgccgccgtcgttcccactccttctccgtcgccttcctctactggtactacgtgttctcatgaactcatgcgcttcctcccaagaacaccatctccagcctctaattgattatatcttgatttctttttcatcctcctactagtttctttcttgggttcttgggaatttttttg

SEQ ID NO: 416603 - DNA, 450 bp, Oryza sativa
ggcgccgccgccattggtggtgtgcggcgaggcggcggactcggggtcgtcgtagatgtggttgaggacgtccttgacgatgctgatgagaggggtggcgccgatgccgaggccgatgaggaggaggacgtcgtacttccagtagtcctgcgccggcgcgccgtacggcccgtcgatcaggagcttggggaaccttgaatggtgctccatggacatgcagtcagcccggaggaggccgctctggccgttcatcggaggcctgcatatctgagagaagatggccctgaagctcgaggtccagtcaccgcggcaccggatatgcatgctgagatagctgtcgtcgggagccgaggtgatggtgaacgggtgccactcgaatggcgagaccttgccgcagttaacatagatgtactggccactcttgtacttgaacccatggggcttggcatg

SEQ ID NO: 416604 - DNA, 495 bp, Oryza sativa
gtttggttggatccgaggagtttgcggttcagatcttctactcgcttgcgcggcggcgagggatcacggctcagttgctgaccaaggatcagctccgggagttttgggagcagctctctgatccaggatttgatgccaagctgcagactttctttgacatggttgacaagaatgcagatggtcagatcactgaagaggagctcaaagaggtcctcaccctgactgcctctgcaaacaagctgtccaagatcctggagcgcgtcgacgagtacaccgcgctgatcatggaggagctcgatcccgatcaattaggctacatagatatatcaaacctggagtcgctgctgctgctgccgccgtcgcaggcgccgtcgaagctggtgacgcacagctccaacatcagccagctgatcagccagaagctggtgccgacgcacgaccggaacccgctccggcgggggcttctgcggctgttctacttcatggaggacaact

SEQ ID NO: 416605 - DNA, 389 bp, Oryza sativa
gttgatgggagaaaaatatatgatgttcaagtagatggtcatcgtgcttattcaactatcaacatgtgcacaggtatcttacaatataaataattgtacaccaaaaagaatgccttcatcgagcaccggaggtcaaacaggaagctacaaaaagcagcagcagtgtcgatgcagaaggaaaatatgatgattctgaaacgtaattcacatttacaacctcacgcgaagcaaaataaattgccccaactcgcttcgaatattctggtgatattttattggtttacacgaatgtgatcctcaatttacagcactttacctagcttcatcttctaggttgcggaatccggttgtgaggtcatcatacaatttctggaattttgcgacttgga

SEQ ID NO: 416606 - DNA, 476 bp, Oryza sativa
ctggaattccagggcatcaaaaagcaatttactatgctccagacatggcctgtccggtcaccaaggcctgtttcatcaaagcttgctgctgacacgcctcttctaacaggacagcgtgtacttgatgcactatttccctcagttcttggaggaacttgtgctattcctggagcatttggttgtggaaaaactgtcattagtcaggcactttcaaagtactccaattctgaagctgtggtttatgtgggctgcggggaaagaggaaacgagatggctgaggtccttatggacttcccacaattgacaatgacattgcctgatggacgtgaagagtctgtcatgaaaagaactacacttgttgctaacacatccaacatgcctgttgctgctcgtgaagcctccatttatacaggaattacaattgctgaatacttccgtgacatgggctataatgtcagtatgatggctgattctac

SEQ ID NO: 416607 - DNA, 476 bp, Oryza sativa
gacgccgtcaccaacttccgcccgctcgccgaggccgacccggacgccgccgccgagcttcgcttcctcgccacgcgctccaaggccgaggtggacgacatgctccgcaagcacacctacttcgacgagctcgcgcagagcaagcgcaccttcgccgcctccacgccgtcggccgcgaccaccaccgcctccctctccaacggccacctctcgtcgccccgctcccccttcgcgcccgccgcggcgcgcgaccacctgttcgacaagacggtcaccccgagcgacgtgggcaagctgaacaggctcgtcataccgaagcagcacgccgagaagcacttcccgctacagctcccgtccgccggcggcgagagcaagggtgtcctcctcaacttcgaggacgccgccggcaaggtgtggcggttccgggactcgtactggaacagcagccagagctacgtgctaaccaagggctggag

SEQ ID NO: 416608 - DNA, 459 bp, Oryza sativa
ctttaaccagaaccccaaactcaagtcgagcaggaagtcaaattgtaagtgacggaagaggtgaagaaagaggaggaagatttcgtggtcaatccctatacgatttccagcagcaccaacaaagaaattgattacaacaagctaatcgagaagtttggatgttatcatatcacagaggagcagatccaaagaatagagaagtataccaaacagccagcgcattacttcatcagaagaggcatcttcttctcccatagagatctcgatgccatcctcactgcctgcgaaacacacaaagatccaactatcccgcctttttacctctacacgggaagaggaccgtcctcggaagcactccatctcggccacatgctgcctttcatcttctgcaagtacatgcaagaggccttccgagtgccctttatcatccagatcaccgatgacgagaagtacttccac

SEQ ID NO: 416609 - DNA, 569 bp, Oryza sativa
cttcgatctccttcctctcaattccatccatcgtctagtcttcttcccaaacccaacaactccatcttcttctttgcttcgcccttgatttgtgtgctgcgtgaacaaggcctgtctagagggcagccatggccactgtttctgacatcggcctctccgcggctatcaacgtctcgatggccgttgcattcttgctggtctttgcttttctacgattacagcccatcaacgatagggtttactttccaaaatggtacctcagaggaatgagagacagccctgtttcctctggtgctgcagtgcaaaaggttgtcaatttaaacatgagatcatacttgaaatttttaagttggatgccggctgctctcaagatgccagaggatgagttgatcaatcatgcaggccttgattccgctgtctatctacggatatacctaacagggatcaagatattcgttccaatatccaatttagcttcgcttgttctgttcctgtgaactggacaaatgacaccctagacagcatgaaggtagtccacagtaaaatggacaaactttaatatcaaacat

SEQ ID NO: 416610 - DNA, 463 bp, Oryza sativa
  unsure (1)..(463): unsure at all n locations
catctgctcacacttgatgagaagaatccacgccgcatctttgagggtgaggcactgcttcgccgcatgaaccgttatgggctccttgctgatgggcagaacaagcttgattatgtccttgccctcactgttgagaacttcctcgcaaggcgtcttcagactcttgtcttcaaggctggcatggccaagtccatccaccatgctcgtgtcctgatcaggcaacgccacatcagggtcggcaggcaaattgtcaacatcccgtcgttcatggtgagggtnntgagtctgagaagcacatttgacttctcactgacaagcccattcggtggaggcccccctggtagggtgaagaggaagaaccagaagaaggcaagtggcggtggcggtgacggtgaggaggaagatgaggaatgagaacagaagtttgcaactagttgtttccgtaatgatcataaaactctgg

SEQ ID NO: 416611 - DNA, 456 bp, Oryza sativa
ggtgcaacttcgaatccataaaaacattaaaaacagcattggtacgagtgagtatcactagttcaagcgcactggtacgatgaggattaccatgaaacgaatccataaaacagcattaaccacaagtctatacctaacataatgccaaaaagggttaacataaaccaacacctgaagcacaacctgcttgaattctgaatcccagataggcaagctacagaatttgggcctagttactcagcacagagttttatgatcattacggaaacaactagttgcaaacttctgttctcattcctcatcttcctcctcaccgtcaccgccaccgccacttgccttcttctggttcttcctcttcaccctaccaggggggcctccaccgaatgggcttgtcagtgagaagtcaatgtgcttctcagactcaaccctcaccatgaacgacgggatgttgacaat

SEQ ID NO: 416612 - DNA, 412 bp, Oryza sativa
ttttgttttttgccgctaatggtcgattttaaatttggcaatttcaggggtcaggcaatacagaaacggtgcttgcgattcttcgtacaggtgcataccccgtttctacgaataaatcatatatgtcaagacgtttccaaaagagatattacaacatttttccgtccctactatgaacatacaaacagcatgagattggtgcttctgtcagctcctttgatcttggatgttctagacggcatggcgagctcatttggcacttctgtacatgttgtcaattgttccctggtagtacttgagcaattgagggcgcttctttttatatgttggagtaatcaaatcacggtccatgtcaaatggcactggttcaagatgtacagcctttatgaattcaaaacctttgagctttttc

SEQ ID NO: 416613 - DNA, 450 bp, Oryza sativa
tcgctgacgcgtgggcgacgcgacccgaacacgagagaggagggaagcaagcaaagcaaagcgaagcagcgagagggagaagcatacgaagaagaagaagaagaggaagaggagggcatggagatgcagcacgtggtggaggtcgagcagggccgcgcggccgccgacggccggccctccgtgggccccgcctaccggagcgccttcgcccgcggcggcttcccgccgcccgtcgccggcctggactgctgctacgacatcttccgaatggccgtggagaagttcccagacaacagaatgcttggtcaccgtgagattgttgacgggaaggctggtgcatacgtttggaagacatacaaggaggcgtttgacctttcgactaagattggtaactctattaggagccgtggacttgcaaagggaagccgctgcggtatctatggtgctaat

SEQ ID NO: 416614 - DNA, 457 bp, Oryza sativa
ggcagaacataacagcaactctccttgaaaattttgtaatttgatccgcaacaactcagatgtagatgaaacactgctgatttccactcagtttacaatacaaatacaccgacagactgcctcaaaaaccaccaaattcattcaaagtaaaatgggtatgagtgatcttggccccaagagactgactaaacctaaccacagacagtggatccactggacccagattattcaaaaacaagatggctatgatggcattcctcctcaaaatcgaagggaacttgctgcaaaggcgatcctcacttcgcgctagcgagctgggtgcggatgagcttggcggccaaaaccatgttggtgagggcaggcttcacctcggtgtacttgcgggtcttgagaccgcaatcaggggtcacccagagaatgttagtgtcgagccccgcaagcctcttgttgatgcggt

SEQ ID NO: 416615 - DNA, 493 bp, Oryza sativa
tcgctccgtgccagtacttgttggaccagtttcatacttgttgctctccaagcctgccaagggtgtagagaagtcgttcgctcttctttcccttctcagcagcatccttcctgtctacaaggaggttattgctgagttgaaggcagctggtgctacatggattcagtttgatgagcccacacttgttcttgaccttgactctcaccaattggctgcattctctgcagcgtacacagaactcgagtcggcactttctggattgaatgtgcttattgagacatacttcgctgacattcctgctgaatcatacaagaccctcacatccctgaacagcgcgactgcttatggttttgaccttatccgtggttccaagactcttgaccttgtcaagagtgctggtttcccctctggcaagtacctctttgctggtgctgtggatggacgcaacatcctggctgatgatctcgccgcatctctcaccaccctcgagtct

SEQ ID NO: 416616 - DNA, 587 bp, Oryza sativa
atcaatagctagtcattggaaccctctcagctgacaagttccctcaaatccagtttgatttggtctttgacaaagagtttgagctgtcacacacttcaaagactgctagtgtgttcttttctggctacaaagtttcccagccggctgaggaagatgaatatcctttgtaatgttttaccatgtttggtcaatatatgtaatgcatataatgtcatactctattttattttcattaaggtatgtattacaatattgttttccttgacctgccttttttgttgttccacaatggattttgattctgaagaagttgaaggtatgattgctactagtgcttgtgttctgcctagagagaatttaacgagcctgtttataatttatttcagatgaagaggaggaagaaaagatcattccagctcccagggcaaatggcaaagttgaagggaaggaaaatgagcagaaaaaacaaggcaagacagattcttcagcttcaaaatcaaaggctgcagtgaatgacgatgatgatgatgatgacagtgatgaggatgattctgaggacaagatctttctcctgaggatgatgatga

SEQ ID NO: 416617 - DNA, 478 bp, Oryza sativa
tctcgcctgttacgcccgttggcaagcggcggatgttctggacggcgatcaaaccgaataacaccagggcttcgctagtcatgacgacaataatcctcctctccgtcgtgatcctgctcctggcggcggcggccgtggcggcgctcgtggtgcgaagccggcggtacgccgaggaagaggaggaatgggagatcgagtacgggccacacaggatcagctacaaggacctccacggcgcgaccaaggggttccgcgacgtcatcggcgccggcggcttcggcagcgtgtaccacggctgtgctgccgaggtccggcgtggaggtcgccgtgaagaaggtgtcgcacgactcgcggcaggggctgcgggagttcgtgtcggagatcgccagcatgagccggttgcgccaccgcaacctggtgcagctgctcggctactgccggcgccgcggcgagctggtgctcgtctacgactacatgg

SEQ ID NO: 416618 - DNA, 538 bp, Oryza sativa
ccctcctcctgccgcgatccactcctgctctccagctcagggaatccacctccacccgcagagaccaaccagcagctgtccgtcctctgcggcggcggcggcggcggcgagatggggcaagctctgcggcggctcttcgacgccttcttctccaccagggagatgcgggttgtgatgcttggtttggatgcagctggcaagacaacaattttgtataggctgcacatgggagaagttctttcaacggttcctacagtaggttttaacgtagagaaggttcagtacaagaatgtggtatttactgtgtgggatgttggcggacaagaaaagctcaggccattatggaagatgtacctcagcaattctgatgcactgatctaacgttgttgattcattggacagagaaaggattatagacgccagacaagaatttcagaccattattcaggacccactgatggcaaacagcataatcttagtatttgcaaacatacaggacctgagaggtgcgatgagcccagatgaggtgagcgagggg

SEQ ID NO: 416619 - DNA, 568 bp, Oryza sativa
ttccgtctccgcctccgccgccgccgcctcctccatcctccagtccctccccctccacgtgtccttcgaccgcggcttctacctcctcgtcaaggcgatccaggagctgcgtgagcgcaaggacggcctcgtcgtcaccgtcggcatcggcgggccaaccggctccggcaagaccagcctggcggagaaggtggcgtcggtgctggggtgcgtcgtgatcgtctccatggaggactaccgcacggtggccggggccgacgacggcagcgacgttgacgccatcgacttcgacgccctcgctcgtaacctccaggatcttgtaaagggtaaagatacattgatgccattggttgattttcaagagaagaaacgtacaggatggaggcaactgaagatttcgccatctggagtggtgattgttgatggtgcttatgctcttcattcaacactgaggtcactgcttgatattcgtgttgctgtggtatggtgtgttcattttagccttctgtctaaagtccagcatgatatggagattcttgctcgtggactattgatggaagcatatttc

SEQ ID NO: 416620 - DNA, 498 bp, Oryza sativa
gtaggcttatggtaagccctggtgaatatttgtgggaggtcagtaagtggtggcctgattaagactgcatcagagaaatttgtggttatctttctttactaatgacggcattgacgagaatgaagttcccaaagcgctatgtcattgtgctgctgacattcatctgcacaaatgtttgttacatcgagcgtgtcggattctcgattgcttacaccgtggcagctgatgccattggcgtgaatcaagcaaacaaaggcatgatactttccatgttctactatggttatgtcttatcacagatccctggtggatgggcagcacagagaattggaggtagacgtgttctgctgctgtcatttgtgcatgtggtctttgatatgcggtttaattccactagaccccaagagagaagtcatcctggtcctttctcgcctttttgtcggcgtagcacaaggattcatatttcctgccattcacactgttctggcacaatgggtg

SEQ ID NO: 416621 - DNA, 479 bp, Oryza sativa
tcgctcaacgcaacacaacccaaccgcatcgcctcctccaccacccgcccgccacacgcccaaaaaacgccccgaaatcccctccaaatcgcccaaaaccaccgtacgccgtcgctacatggagaacggcaagtgcaacgggtcgtcgaccaccaagtgcaacggtgcggcggcggcggcgatgcacgtggcgatgctggtgacgccggggatggggcacctgatcccgctggccgagctggcgaagcggctggcggcgaggcacggcgtgacgtcgacgctgctcacgttcgcctccacggcgtcggcgacgcagcgggagttcctggcgtcgctgccgccggcgatcgagtcggtgtcgctgccccccgtcgacctctccgacctccccgccgacgccgtcatcgagacgctcatgtcggaggagtgcgtccggctggtcccggcgctcacggcgatcctgtccgggatcagggaga

SEQ ID NO: 416622 - DNA, 452 bp, Oryza sativa
aataacaagacaaacagctcatgtattattgtctaatgtctacaccaagcggtccataacacccgaaataacaccttgcaacattattatccaagatcagcaaattgcaacatacaacatcagttgctagagaagaaacatgcaacaatggacagcttcctgcacagaaaccccccctacttctgtctcttgtagatcttgtgcaagaaggacttcagaacattctgaacagctatgcttggctgggcttctatatccgcaatcaacttcttgtaactctcgttctcatagtccagaaagaccgcctctaggtttagttctctgtagaggctcttcacttttgccacacaggctggatctttctttccataatttttaaatagaacgctcttttgactctcatcagcacgcttaagggcttgcacaactagccaagagcatttgtaatcttc

SEQ ID NO: 416623 - DNA, 523 bp, Oryza sativa
gtccatctcggccgccgccgctgtcgctgtcgcgatcgcgatccccgcctagatagacttccccaagaacccgccgccgccgctgcaggggtggcgtggcatcgcgggagaccagctcgagccttcagcctcttttgcgccgccgccgccgccgccggtcgatccgtgttcttggctcaggcggcgtcaatggcggcggcgaatgggagcgcctgcggcggaggcggcgtggacaaggagaaggaggagttcaagcagatctacggggtgctcaaggaggagctgctcagggaccccgccttcgagttcaccgactcgtcgcggcagtggatcgatcgcatgttggactacaatgtacctggagggaagtgcaatcgtggtctctctgtggtcgatagctataagctgttgaagggcaccaatgttctaagtcaggaagacatgtttctcgcgagcactcttggttggggcgttgaatggcttcaagcttactttctcgtgcttgatgatatcatggatgatt

SEQ ID NO: 416624 - DNA, 432 bp, Oryza sativa
gcgtggtccgcgcccgtgtcgccgcgcccggagccgcccgtgctcgtcatcccggcgcgcgcgcgcagcaaacggtctaggccgtccgcgttcccggctgtccgcggcgcgccggcggcgacggagaccaccatcctggtgccgacgccaatgtactcgtccacctcgtcgcactcggatcccgagagcattgccgagtccaacccgcacccgccgccgatgaagaagaagaagaaggccaagaagccggccgctccggccgccgcctctgacgccgaggccgacgccgacgcggcggacgccgactacgaggaaggcggcgcgctcgcgctcccgccgggcaccgtgcggcggtgcacgcattgccagatcgagaagacgccgcaatggcgcgcgggcccgctcggccccaagacgctctggaacgcgtgc

SEQ ID NO: 416625 - DNA, 505 bp, Oryza sativa
tcgattacccttcctccgtaccagtcagcattacaggcttgacaaggcatatgaaatctttgcacaaaaagagcttgtacgggagcaagtttttgtgcttggtcgtatgggaaatgcaaaggaagctctctctacaattataaacaaattggaagatattcaggaggccgttgaatttgtgatggagcaacacgatgatgagttatgggaggaattgataagacagtgcctccaaaaacctgagatggttggaatgctgttggaacatactgttggcaatcttgatcctttgtacattgttagtttggttcctgatgggctagaaataccaaggttgcgggatcgccttgtgaaaattgtgacagactatcgaacagaaacttcattaagacatgggtgcaatgatatacttaaggctgattgcgtaaaccttttggtaaaatattatcacgaggctcggcgtggagtctacatggctagtatggacgaggaggtgacaggaact

SEQ ID NO: 416626 - DNA, 461 bp, Oryza sativa
gttcaacaatgaaaggaccagttccataaattccgcaaagttgtgaagaaataaaaatacaatagaaaatatgacacaggaattccctgatggctaggatagccaatatttcaggacttatttccaataatgaggttgcaatgtagtggtgccgctagctcatctgtcataaactgatcatttgttggagtgtggctgaacacagactcaccagacagatattacggcaaatcaagtaagtttctagtccttgacgcgcaactctggaacatggtgcatcttttgttgcattccatttttttcccactgagatctgaaattcttatgcagacccaaaagccacagcttcttcaggtacctaagggactcaatgccttcaggaatagtgtccagctttgggagtgacactacatataaacctttaatatgctggagggcaccgcctatgatctccaaatggt

SEQ ID NO: 416627 - DNA, 563 bp, Oryza sativa
gtcttttgacctccagaaatcatcatctgactagctctgcgcttcgatggattagctgacgaaagaagacccttgttctgatttacagggttttcatcacattatttcgccatctgctgcaataatacttataactacaagctcaagtcaagcccccacgagcacaaatggcagaggctgtaatgcttgtggtctcaaagattggctccgttttattagaggaaatcaccttcacagtgataagcaagctatctgaaaagattactaatctgaaggaattgccggtcaaggttaaggaaatagggaaagaactgaacatgatgaacacttttataaaaaggataagtacaaccgatcttacagatgatgtcaaggcctggattgctgaggtgcgagagctggcccactgtgttgaggatgtacttgataaatattcatatcatgctcttaaattggatgaagaaaatgctgtgaaacaaatcttcaccaaagctaattatatcaaagttttaagcgaaattgctgatgagattacccagatcgaagggaaaattgagaatgct

SEQ ID NO: 416628 - DNA, 442 bp, Oryza sativa
aagaaaatacagattctggattaattaactagcatatttaaatttaaaacgtaactgtttgagcaaataccacgaaatgttcaggcgctaagatacggcaataccgatacatccagcatagcaaaaatggcgaagagcacagagtcagataaagctatagagaactagggctccaggagatgggggccgaatgacaaccatggcgcttagtcgacctcctccatcttgctctcgccggcgtcgtcctccagcggcggcatgtcggcgtcagcctcagcagacctcgtcctcgtcgatgctcaggccgagcttgagcatccggtggatcctggtgccgaaggtgttggggtcctcaaggctgaagccggaggtcaggagtgcagtctcgaagagcagcatcaccaggtccttaacagacttggcgttcttgtcagcatcggca

SEQ ID NO: 416629 - DNA, 533 bp, Oryza sativa
ttcgttaaggctagcaacaccctgtcgatcatcgacagtggtgtcggcatgaccaagtcggacctcgtcaacaacctcggtaccatcgccaggtcggggaccaaggagttcatggaggcgctcgctgctggtgctgatgtgtccatgattgggcagtttggtgtcgggttctactccgcctaccttgttgctgagagggttgttgtgaccaccaagcacaacgacgacgagcagtatgtgtgggagtcacaggccggtgggtccttcactgttacacgtgatacctctggtgagcagcttggacggggtactaagatcaccctctacctcaaggatgatcagctggaataccttgaggaacgtcgcctcaaggatctggtgaagaagcattctgagttcatcagctaccctatctccttatggactgagaagacaaccgagaaggagatttctgatgatgaagacgaggaagagaagaaggatgctgaggagggaaaggttgaggatgttgatgaggagtagggagagaagag

SEQ ID NO: 416630 - DNA, 596 bp, Oryza sativa
ttcaaattcctcgccgccctcggtcgtcgccgccgcctccgccgcctcgcctcccggagattcgccgccttcgccgccgccgccatgaatcccgagtatgactacctcttcaagcttctgctcatcggagactcgggcgtcgggaagtcttgcctgcttctgaggtttgcggacgattcatatctggagagctatatcagtaccatcggtgttgattttaaaatccgcactgttgagcaagatgggaagacaataaagctgcaaatttgggatactgctggccaagagcgatttaggaccattacaagcagctactaccgtggtgcccacgggatcattgttgtttatgatgtgactgatcaggagagcttcaacaatgtcaagcagtggctgaatgaaattgataggtatgctagtgaaaatgtgaacaagctcttggtggggaacaagtgtgatctagctgagaacagagtgggttcttatgaggctggcacggcccttgctgatgagattggaataccattcctggagaccagtgcgaaggatgcaacaaatgttgaagaggcattcatgaccattgcaggagagataaagac

SEQ ID NO: 416631 - DNA, 427 bp, Oryza sativa
catcgcagattattgttccatctttattcattcacaaaagtagatacagccagtgccttggagagttggaggttcgagcatcttggcctacaatgctcttgctaacaattctggcgaatgaaaaccaaaaagagctcaagtgtgaaagtttaaagatacatggcacaatattacagaagttgccgtgacaaagtgatctacgaacgaattatgctcacccgacagaaagaataggaccggactatatataactacagcaaaaaggccacaagtttcaaaacatttcaatttattcaagctgcacttgagagaaaacatttgatttttctgaacatagatcagtgggtagcatctctgctgtagtactgatccaatgtcttcgcagggatacgatggagaagctcaccagggaatatgccaagcaatg

SEQ ID NO: 416632 - DNA, 557 bp, Oryza sativa
  unsure (1)..(557): unsure at all n locations
ttcgtcgccgatccgatccgcctccgcctccgcctcgcggcccggcctgcctgcctcgccgccggtggtcccgatccgaggttgctcttgctgggcatcaaacatgggtctggtgaaggatggcgccgccgatttggaggaggggaccctggagatcggcatggagtacaggactgtttctggtgtggcaggacctctggttatcttggataaagtaaagggcccaaagtaccaggaaattgtaaacatccgattgggagatggcaccactcgccgtggccaagttctggaagttgacggtgaaaaggctgttgtgcaggtctttgaaggcacttcaggaatagacaacaaatataccactgtgcagttcacaggagaggtcctgaaaactcctgtctcacttgatatgcttgggcgcatttttaatggatctggaaaacccattgataatggcccacctattttgccagaggcctacttggatatctctggaagttcaaataatcccagtgaaagaacctatccagaagagatgatccanacagggatatcaacca

SEQ ID NO: 416633 - DNA, 330 bp, Oryza sativa
atagcacccactgtatcagtctttattatctctttcccaagacacagcaaggcatattttcaggattccagatacagtttcacaacttgcgtcaccagtatacatatcaccgtatcacattttattcacgactacggctggtcgacacattacagttcatgtttgactgtccaacatagcaccaccactggattcctcctggccgatctacatgtttggtttcaggttgagacgtgaagccagcttctgcccaagggacgcattacactgcgaccagtaggaggatccagatgccccggagttcatgttgtaatacggaggatctgagag

SEQ ID NO: 416634 - DNA, 585 bp, Oryza sativa
tcgatctggagaatagttgatttcttttcacaccacccagagagcctgcacatgttctccttcctctttgacgatgtaggcatcccactcaactacaggcacatggagggttttggtgtcaacacctacaccctaatcaataaggatggaaagcctcaccttgtcaaattccactggaagcctacctgtggtgtcaaatgcctgttggatgatgaagctgtgactgttggcggcacctgccacagccatgccacgaaggacttgactgattctattgcagcagggaattacccagagtggaagctttacatccagactattgatcctgatcatgaggacagatttgacttcgatcctcttgatgtcaccaagacatggccagaggatatcatccccctgcagccagttggacggatggtcctgaacaaaaacattgataacttctttgcagaaaatgaacagcttgctttctgcccagcgataattgtccctggaatccattactctgatgataagctgctccagacaagaattttctcctatgctgatacccaaaggcaccgtcttggcccaactatttgatgc

SEQ ID NO: 416635 - DNA, 356 bp, Oryza sativa
agcaatggaaaaacccgcattccaaaacagccggtggacaaaaatcggacccagagcatcagttttaacccaacagaaaaaaacggggtttaaacgaccggcatagggcccattgggagccgatattaacgggccatgaaacgagagccctggccgggggcaaaacttaacaaataccagaactggatatttcaaccggagacaggcaaaccccccctttgaacgagggctcacttttttttggggggagccctgggcaccctggccccggggggggcccttttctccacgttcttgatgaccccaacagcccccggttgccccaaggcacgcaccggaaaacgcccaaggggggg

SEQ ID NO: 416636 - DNA, 510 bp, Oryza sativa
tcgctcctcctcctctcgccttctcccgtcttctccttcgagttagctacctccttattcaaccatgggtaaggagaagacgcacatcaacatcgtggtcattggccacgtcgactccggcaagtcgaccaccacgggccatctgatttacaagcttggaggtatcgacaagcgtgtgatcgagaggttcgagaaggaagccgctgagatgaacaagaggtccttcaagtacgcgtgggtgcttgacaagctcaaggccgagcgtgagagaggtatcaccatcgatattgccctgtggaagttcgagaccaccaagtactactgcacggtcatcgatgcccctggtcaccgtgacttcatcaagaacatgatcacgggtacctcccaggctgactgtgccgtgctcatcattgactccaccactggtggttctgaggctggtatctccaaggatggccagacccgtgagcacgctcttcttgctttcactcttggagtgaagcagatgat

SEQ ID NO: 416637 - DNA, 410 bp, Oryza sativa
gccaaaattgtcctcatattatacatataaatcatactataatacacagtcgaaaaaacctcttatggaactcaagaaagataaaagaaagggaaaaaaaaaagaaaagagagaagaaaaaaaaatgctgagctactaaaagcatttcatcttggtcatgtgtcaatattcttccagcaatattgctccttgaaggaacttctgtactactatatatgaacgaatgttgtgcctcatgaatacaggcgtttttggtgtgctgaaaatcaccttcttaccacacatctctcagatacctaccctccgtttggaggctcttcacaaagctctcagccttagagctgtcaagtgatccctgttcctgtacaatggtgtggagaactttatgtacatctttggccatgcctttg

SEQ ID NO: 416638 - DNA, 526 bp, Oryza sativa
  unsure (1)..(526): unsure at all n locations
tcggtcaaggttgttgatgagctcctagttgagcaaggtggaaaacgtcttgttccggttggtcttggagatgatgatcaatgcattgaggatgacttcaacgcatggaaagaaactctctggccagaattggatcagttacttcgggatgaaaatgatgtttcaacaggcactacctacacagctgccattcctgaataccgggttgaatttgttaagcctgatgaggcagcccatttggagagaaatttcagtcttgcaaacggttatgcggttcatgatgctcagcatccttgccgggccaacgtggctgtgcgacgggaactccacactcctgcttctgatcgttcatgcactcacttggagtttgacattgctggcactggtcttacgtatgaaaccggtgaccatgttggtgtatacacagagaactgcctcgaggttgtagaggaggcagagaggttgttaggctactccccagagacttntttcaccatccatgcagacaaagaggacggtacaccac

SEQ ID NO: 416639 - DNA, 460 bp, Oryza sativa
tcgcttgaatccgcaccgtcccctttcctctcgccgccgacctcgtcggccgtctccaccgccggccggactacgcttccccatcggtgcggccaccccctcgaggccttcacatcagcgccgccaccaaccggttgcagtatcgctgatctcctcctcttaccaggaggcaagatgtcgtcgctcgccgcggcaagggcggataacttctactacccgccggaatggagcccaaagaagggtgggctcaacaagttccatggacaacatgctctcagggaacgggcgaggaagctggaccagggcatcctgattataagattcgagatgccattcaatatttggtgtggtgggtgcaactccatgatagcaaagggagtgaggtttaacgctgagaagaaacaagttgggaattattactctaccaagatatggagcttcaccatgaaatcaccatgct

SEQ ID NO: 416640 - DNA, 436 bp, Oryza sativa
acttcagattatcataaacaataactcaaacgcaagtattgtgtcaacataattgatctttttaggttgattaattatactgaattactcggtgatcaatcgatcaacttaaatctttgcaaattcaagcgtcttcttgccctggagccggctggtgacgtagtgccggctgtactcgccgtggttgtacgtccggtacctgcgcggctccccgtcggcgacgagctccggcagcgggccgagctcgacgtcgtacgccggcgcgtagaaggtgacgacggacatgcggtcgtgctcgccgctggccaccgcccggtgctccacgcttttgtacctgccattggtgagcaccttgagcgtgtcgccgacgttgacgacgagggcgccggggacgggatggacggccacccaaccgtcgtcggcccggagcacctgc

SEQ ID NO: 416641 - DNA, 497 bp, Oryza sativa
atagattcttggagaactgggcaaattttggcatggattctggtgctgctgccgtctgcgcggagaaggcgagtgagatcatcaagatcggtcaggttgatgacgtgcaggagctgcagcgacgactgtgctccgccaccaccgtgccggagcggtacatcagggacggcgacgaccggccggatcacgccgtcgtcgacgacgagcgcgcgcaggagcggattccggtgatcgacgtcggcgagctgcagcgcggcagcgaggacgagctcgacaacctcaggctcgcctgcgagcagtggggcttcttccaggttgtgaaccatggagtggaggaggagacgatgaggagatgtagtaggcggcgagggagttcttcatgctgccgctggaggagaaggagaagtaccccatggagcccggcggcatccagggctacggccacgccttcgtcttctccacgaccagaaactcgactggtgcaacatgcttgccct

SEQ ID NO: 416642 - DNA, 443 bp, Oryza sativa
  unsure (1)..(443): unsure at all n locations
atgctgtgacaaagacagttgtgatgatgtagcactaactgatgatgatgatacatttgacatgcagttactctgtcccgaccgaggaatcgagtagtaactttactttttatgaagcaaaaccattctaactaagcagagaatgcatggaaaccaaacaccacgcgcagatggcatcctcttaattattattactagcacaaaacataaacataaaacgatcactaattactccataagttaattaggcgtcggcggcgaagccttggtcgntcgtcggcagcgttgaggagggtcggaggagcggcggttgggagcggcgcagttgttgcggatctcgccggcgttgccggtgaggacgttcatctggctcatcttgaccatggagcgtgcgaactggtcgaagaaggcggcctggttgagggcgaaacggacggcggtgc

SEQ ID NO: 416643 - DNA, 517 bp, Oryza sativa
gatctttgttagctagagtgttgagcaatggcgtccaagctgggtatggttgtgctactgatctcgggcctctttgctgcccgttgcgcggccgtggtgaccaccggcgaacccgtcgtcgccggcctctcctgggggttctatgacacgtcgtgcccgtcggtggagggcatcgtgaggtggcacgtcaccgaggccctccgccgcgacatcggcatcgccgccggcctcgtccgcatcttcttccacgactgcttcccgcaggggtgcgacgcgtcggtcctcctgacgggttcccaaagcgagctgggtgagatacccaaccagacgctgcggccgtcggcgctgaagctcatcgaggacatccgcgccgccgtacactccgactgcggcgccaaggtgtcctgcgccgacatcaccacgctcgccacgcgtgacgccatcgtcgccttcggcgggccctacttcgacgtgcctctggggcggcgcgacgggctggcaccggcgtcgagcgaca

SEQ ID NO: 416644 - DNA, 511 bp, Oryza sativa
gtccgtacacactcctatctatccaacaagctaattaagcgaggagcttggtagacggcggcaatggcgggcgcggcggcggcggccttcgcggcgcaggtgctgcgggggcggtggttcatggcgtacggctccttcctcatcatgtcggcggcgggggcgacgtacatcttcgccatctactccaaggacatcaagtccaccctcggctacacccaggagcagctcaacaccgtcggcttcttcaaggacgtcggcgccaacatcggcatccacgccggcctcatcgccgaggtcacgccgccatggttcgtcctcgccatcggcgccgccatgaatctcgggggttacctcatgctctacctctccgtcaccggccgcgtcggcgccaggaccccgctctggctcggctgcctctacatcgccgtcggcgccaactcgcaggccttcgccaacaccggcgcgctcgtcacctgcgtcaagaacttctccgagagccgcggcgtcatgc

SEQ ID NO: 416645 - DNA, 404 bp, Oryza sativa
cagagataagcgatgttactttgtttttaccaacatttacatacaagcggtacaacacatattgccagaaaccacttggttttccagccataatttttgacaattcatgacgcgcgcgcgcacacacaatgctggattcacagggtcacacagccatgagccatcagactggaagggctctgtttgttcatcacatagccacagatcgccttggcctttagcagttgcaggggttgcacttgcagctggaaccacagctgcagccatgggccaccctcaccagattcagcttgcttttgccaacttccttaaatttgcccctttttcaggttgcaacaccgaggacagtggtttgtagtagttagtggtgatggtgaatcttctcagccaggtcagggtacatt

SEQ ID NO: 416646 - DNA, 512 bp, Oryza sativa
ttcatttcatccaactatacaagttcctgaagagtttacaagtgacccagaagatcaagatgtcgtgcggtggaagttgcaactgtggttcctgcggatgcagcggtggctgcggaaagatgtaccctgacctggctgagaagatcaccatcaccactactactacaaccactgtcctcggtgttgcacctgagaaggggcaatttgagggagttggcaaagcagctgaatctggtgagggtgcccatggctgcagctgtggttccagctgcaagtgcaacccctgcaactgctaaaggccaaggcgatctgtgactatgtgatgaacaaacagagcccttccagtctgatggctcatggctgtgtgaccctgtgaatccagcattgtgtgtgcgcgcgcgcgtcatgaattgtcaaaaattatggctggaaaacaagtggtttctggcaatatgtgctgtaccgcttgtatgtaaatgttggtaaaaacaaagtaacatcgcttatctctg

SEQ ID NO: 416647 - DNA, 491 bp, Oryza sativa
ttcattcataagccagcagctagctagcaagcagcacacacatatatcacaggccatctctctatccctaattaagctatatactccatatagctagctaaacacaggaggagtggaggaaggagaggctagctgatctagctatctgcagtgattagttaaaatgatggcttctgataggttggatgcagaaaggatcatagagtacttcaagggcaagagcatcctcatcactggagcaactggctttcttggcaagattcttgtggagaagatactgagggtgcagcctgatgtcaagaagatctacctgctcgttcgcgccatcgaccaagcatctgcaaaccaacgcgtccaatctgagatgcgtgctgtgcaggtgacggagacggagctgttcagcgtggtgaaggagaagcacggcaagggattctcgcgattcatcgaggaagaggtgggtcgcccttgcggcgacatcatctacgacgacc

SEQ ID NO: 416648 - DNA, 454 bp, Oryza sativa
gctgtctgaatattttaaataaaagattaggcactcaggcaaactgatatccttattatttccaaatggtgcaaaaagctgaagtttcaatggataatttattatcaactttccaactgttaaagcaaaatcatacatattctatgcatgctatgtcgcagcaaaacctgatcgcataaccatcctaattcttctttgggtattctcttgcaccaaatatagttcgatccaactctaacatttgtgcttcccatttcaatcgcttgctcaaaattcagcagacatgcccatagacagttcacactgctcctctggaattccaagctccttgcacaccttttttcggcaattagccagtgccttgaaattctctggagttgaggagtaatcaagcatccctattgtcattaaacccggaaacacgagattcgggccgcctaaattgacatgcttt

SEQ ID NO: 416649 - DNA, 502 bp, Oryza sativa
gttggttgccgcggcggagggcgcggtggtggcgctccggtcggtgctgtcccgcgcgcagcaggcggcggcgcggtcggggcgggcgccggagtccgtgcgcgtggtggcggtgagcatgacgaagccggtgggcgtcatccgcggcgtgtacgacgccggccaccgctgcttcggggagaactacgtccaggagctcatcgacaaggcctcccagcttccagaggatattgagtggcatttcatcgggaaccttcaaagcaacaaggccagagccctcctagctggtgtaccaaatcttgacatggtcgagagtgttgatgatcagaagattgccaatcgccttgatcgtgtggtagctgacttgggaagaaaaccccttaaagtcttagtccaggtcaacaccagtggagaagaatcgaaatttggagttgatccatcaggatgtgtagagcttgcaaagcatgtcaattaggctgcccgaatctcgtgttttctggtt

SEQ ID NO: 416650 - DNA, 529 bp, Oryza sativa
tcgttagactcagtgtgtcatcgatcatcaagctcttccatgtctcttgaacctcttgaccaacaatcataagaaaagcatcaagaaagaagcatgctggactatctcaaacatcactgctggcaatagggaacagattcaggctgtgatcaatgcaaacataattgctcctctagtacatctgctgcaaactgctgaatttgacatcaagaaagaggctgcgtgggcaatctcaaatgccacttctggtggaacacatgatcagattaagtaccttgttgcccagggttgcatcaagccactctgtgatctgcttgtttgcccagatcccaggatcgtgacagtttgcttggaaggtcttgagaacatcttgaaggttggagaggcagaaaagaaccttggggcaggggatgtcaattcctatgctcagatgattgatgatgctgagggactggagaagattgagaaccttcagagccatgacaacactgaaatatatgagaaggcagttaaaatgctcgagtcctac

SEQ ID NO: 416651 - DNA, 523 bp, Oryza sativa
tcggtgttccagtagcagcagtctccaactcctcttctcttcccttcccctcatctcgcgctctcgcctccgcgcggagctcgattcctaaaccctacctcgccgcgccgccgcgcgccggggagatcgccctcgccctccgccatgccgccgcgcgaggaccccaacggggacgcctcctccgcctccccctcggaccccgtcccgcctccgccgcagcagccgcagccgcagccggccaagggcaaggggaagaagaaggatgagaagaaggacgacgacctgtcggaggaggaccaggcgctcaaggagcagctcgagctctacgtggtgcgggcgcaggacaccgatcccggcgtccagaagctcgccctcgagagcatgaggcaggagatccgttctgcgacaagttcaatgacctctgtcccaaagcctctcaaattccttcgcccgcactatggaactctcaaggcttactttgagacaatgccagaatctgatcctgagaagtatatggctgata

SEQ ID NO: 416652 - DNA, 411 bp, Oryza sativa
ggaaaacaaaaaaaaaaactagaacaaacctttatttcataacttttttttcagatctttttcctaacttctaaggatgaaaactaccagtaatcctctttttgtttcttttttactactattacatagggttgggacaacaacagatatcagtaataatcataggatctaaataaataagaacaagcaatggagttgggaatcactcatcttcgtcgggcctgctcgcgaggcacagctcatggagctcattgagaatccactcctccccaggggggccacccaggacaagaaccctggtgccgccaaccacgcatgtgctatgaccccaggcgaacttgggtggctggccagggacgttcaaaatcctccatgtcggcttctcctccgctgggtcgaggaggaacagct

SEQ ID NO: 416653 - DNA, 329 bp, Oryza sativa
aaatatatcatatattcgattatatatatatatataatagcagacaggttacatccattagaactcagaatcaccggaattgaacatcaaaagtacaacacaagcagcagcagcatcagccagcagcaaacgacatgattacccacgcttttggatgaagaacaagaagtacgagaagaagaagacgatggtcgaacaccttgatcgagctcaacaatggcgatcgatcaccaatcacctacttggtgaactcgatggcccaggcgttggcgtagatgtaggtggccttgaagccggtgaatccggcggcgcgggcgagctccctgaac

SEQ ID NO: 416654 - DNA, 332 bp, Oryza sativa
tcggttcagggagctcgcccgcgccgccggattcaccggcttcaaggccacctacatctacgccaacgcctgggccatcgagttcaccaagtaggtgattggtgatcgatcgccattgttgagctcgatcaaggtgttcgaccatcgtcttcttcttctcgtacttcttgttcttcatccaaaagcgtgggtaatcatgtcgtttgctgctggctgatgctgctgctgcttgtgttgtacttttgatgttcaattccggtgattctgagttctaatggatgtaacctgtctgctattatatatatatatataatcgaatatatgatatattt

SEQ ID NO: 416655 - DNA, 475 bp, Oryza sativa
tcgttcggcgttgacaccgtgccagtacttgttggaccagtttcatacttgttgctctccaagcctgccaagggtgtagagaagtcgttcgctcttctttcccttctcagcagcatccttcctgtctacaaggaggttattgctgagttgaaggcagctggtgctacatggattcagtttgatgagcccacacttgttcttgaccttgactctcaccaattggctgcattctctgcagcgtacacagaactcgagtcggcactttctggattgaatgtgcttattgagacatacttcgctgacattcctgctgaatcatacaagaccctcacatccctgaacagcgtgactgcttatggttttgaccttatccgtggttccaagactcttgaccttgtcaagagtgctggtttcccctctggcaagtacctctttgctggtgttgtggatggacgcaacatctgggctgatgatc

SEQ ID NO: 416656 - DNA, 359 bp, Oryza sativa
tttggttccgggtttttatggttcctttcacgcgattgttccgttgatcttgtaaccaaacatcccaccggctacaatttataccaatttactatactacgattaatttattcatagcccagctttattattagcatcgtgaactgaactatcatgcatgatggagctcgttcaattcaccggcacatgcggatgcggccgtgcaaatgtttccattctatttattatttttctcgtcgtaagtcgtgactgcttcgccaacccaaccgacgagccgttgttgaacgggcctttggttgatagcagtccgaggtttgccgccggctgccttatgcctaacgcggccacaagtagcgctg

SEQ ID NO: 416657 - DNA, 515 bp, Oryza sativa
tcggtttgaattaagcatgtcgacgccgagagcggcggcgagcctcgccaagaaggcggcgctggtggcgctggccgtcctggccgcggcgctcgcgacggcggcgcgcgccgagcagtgcggcgcgcaggccggcggcgccaggtgcccgaactgcctctgctgcagccgctggggctggtgcggcaccacctccgacttctgcggcgacggctgccagagccagtgcagcggctgcggcccgacgccgacgccgacgccgccgagcccctccgacggcgtgggctccatcgtgcccagggacctgttcgagcggctcctcctccaccgcaacgacggggcgtgccccgcgcgcgggttctacacctacgaggccttgctcgccgccgccgccgagttcccggcgttcggcggcaccggcaacaccgagacgcggaagcgggaggtcgccgcgttcctgggccagacctcccacgagaccaccggcgggtggccgaccgcgcctgacggcccct

SEQ ID NO: 416658 - DNA, 459 bp, Oryza sativa
aaagaaaaaaaataactgagtataataccattgatgattcatttgattctggaagagaaacaattatcaaattacaacagtaaccaacatttattctacagatgccatcgctttctttgcttttttggcaacgcaagtaaaccatttcaccgtcacaccacccaccatatatgccacccaaataaaaatcaagaacccaaacaattcccctttaattaattcccgcttaattaataaacaccagccttaataataaagtaataaattaactaatggctcgttctttccagtcattttgccttagctgtggaggatggccgggctacagtacgggccgttgagccagccgtcagtgatctgcttgtaagctgcctcggtgaggtggatgccgtcccagctaagatgcgacgccgggttggagcacgctgatgcgcctgacattccacacctcgcgttgtt

SEQ ID NO: 416659 - DNA, 407 bp, Oryza sativa
  unsure (1)..(407): unsure at all n locations
ctctgtttctcctcttcttttcttggcttgtgctctgttttaatttctttgcaatgatggggaggcagagctcgtcggcggcgaggagggtggtggtggtggtgtacacnactgatggtggtggcagagacagcagcgcataactacactgcgacggacaactactgggactggatcacggacaccggcaacctgtgcactaatgggaggccgtcgcatatcaccttcacctatcctccgtacggacagacctacatcggctcccctacctgccgctgctgcgacgggcgcgtaaccacccaacatctcccgagtaattttgggttgtccatcctgaccccaggaaaaatgacgagcgcctcctacaataagggagcgaacatggctaataccggaggcacccgcat

SEQ ID NO: 416660 - DNA, 405 bp, Oryza sativa
ttcgttaccaagctgctgggccgcatctactaccgcgtcgacgggtccccgtcccccggcacgctccccccgcacgtctccgcctccgtcaacggcgtggccttcgtgggcacgctctcagggcaactcttctttggctggctgggcgacaagctcggccgtaagcgcgtctatggcatcaccctcatgctcatggtgctctgctccctcgcctccgcgctctcctttggccacaccccgacctccgtcatggccaccctctgcttcttccgcttctggctcggcttcggcatcggcggcgactacccgctctccgccaccatcatgtccgagtacgccaacaagaagacgcgtggcgccttcatgtcgccgtcttcgcgatgcagggcttcggcatcatcaccg

SEQ ID NO: 416661 - DNA, 430 bp, Oryza sativa
gcgcaactttccctgaagccccggatccactcaacccccctccccctccgcgccagatcgttgtgtttatgagctcgaaggagaagcccactcttggaggccagcggattaagacccgcaaacggaatattgctgctcctttggaccctgcatcattctctgatgcaattgtccagatttatctggataatgctggagacctggaacttgttgccaaaagtatcgagtcctcggatctcaacttctcacgttacggtgacaccttttttgaggttgtattcattggagggcgcactcagcctggcacaataaaacctgaggaagaaggagagcgtcacccctattctgtacttgattgtgcagcgcagcgtgaagcaattttgccttctgttctctacattcagaaaacattgcgcaggaggcctttctt

SEQ ID NO: 416662 - DNA, 477 bp, Oryza sativa
aagttgtaacaaccaataatttagcaaatcctggaataacttcttgcatgggattttaacattcagtagactattaggatcagcatgtgatcataaaatggtcggcccagtaacaagggagcaaaagatacataactttagctggaaacttgggatataaggaaatattcaaacaatacattcgcacagcctccagtagcaccatttattcctcctcctcggcctcctccagccatttaacaaaaggttccagtgctttgacgaaagattgcctgccctttgggtttgaacccttgcggaaccaaaggaggatggtatcttcagctaggacatcttggtcatacagcgttctgattatttcaggaaatagcttcatcagcttagcatcctcatagcactgtgtctgaactttgtatatgagttcgagttcaagcctgccacttgtgcagaatgcattcaaaaggccagcccatgctt

SEQ ID NO: 416663 - DNA, 457 bp, Oryza sativa
aagaaagaattgcattacttttggggtctgcgatactataagcaacagagttttgtaccagtctaaaagcagccttcttttactcttgccacataaacatattcagtttaactacacttttagcaccctgtgtggatgtcatgtgatgagaggcaggaccgactgacttgttcactcacgggattattcaagctgccaggctctttgaagctatctcgtacacattctctgatagcccattggctgacacgatcatctccagctgagccttagcaagagcttgtctgctctcatcatatcgcctccaccgagagaaagctgacaccatgcgggaggccacctgaggatttatcttgtctagctgtaaaacaacttcacccaagaacttgtaaccagagccatcttttgcatggaaattcacaggggacccacaaatcctccaattagcgaatacacc

SEQ ID NO: 416664 - DNA, 506 bp, Oryza sativa
gtattcattgcgaaagcgataactttgccgggtcaaggggagattatggatatgatgccagttgcagatcctgatgcagttcatgctgtccgtacctttattaagaaggagcttgcccttcaactcaaagatgaccttctttcaacagtgacaaataacagaagttctgaagcttatacatttaaccatgatagcatggcccgccgtgcattgaaaaacacatgccttgcttatcttgcatctctgaatgaaccggacaccactgaacttgcatttgttgaatacaagtctgctactaacatgacggagcagtttgctgcactagcagcattgtctcaaaatccaggccaagttcgtgatgacacccttctggacttctataacaaatggcagcatgattatttggttgtaagcaagtggtttgctcttcaagctacatcagacatccctggaaatgttgctaacgttcaaaagttacttggtcaccctgcttttgacatgaggaa

SEQ ID NO: 416665 - DNA, 436 bp, Oryza sativa
  unsure (1)..(436): unsure at all n locations
agtgctggaattaactttccactcgtttgattggaaataattgtaccatcttcttggttggaagttgaaaaagggcacgggatgacaagatcattatttgtctgtaattaaaacagaaaatctataatctaaagtacagggttgcggcagtcatgccatttgcaaccgaataaaaaactaattgctcattggaacaatgcatggcccagccataggcgtcgttccttttattccaaagcccacccaattttacacactnatccaagaccggaaatttctaagccagcaagcatatcctcatctacattgcattctccaaggtaaaccttgatgcttcgaggagaaccgcagctgccttctgctatgagcgctctatcatttgctgccatgtgctggattattttgtatataatctaatatcttcagggcaatgaca

SEQ ID NO: 416666 - DNA, 513 bp, Oryza sativa
tcggtcgaaaccatcggttcccctcctatctcgctctcgccggagttagatgcgcgtgagctcgtgtaggagagcgggagcgagcactaccgggtgagactccggcggcggcggtggccgcgatggcgttcatctccggcgcggcggagcctccgtcctcgtcggcggcgtgcaggctgcggctgcggcggcagctcctcctccgcccctcccacctccgcctccgcgccccccactccatcgcggacctctcccgctcctcctcgtcctcgtcggagcagcagccctcctctaccccggcggtgccgctcgcctccaggccggggcagaacggcagcacccgcggcgcggtggagaaggacccgatcaagctgtgggagaggtacgtggagtggctgtaccagcacaaggagctcggcctgttcgtggacgtgagccggatggggttcacggaggagttcctccgccggatggagccgcggatgcagcgcgccttcgcggcgatgcgggagc

SEQ ID NO: 416667 - DNA, 448 bp, Oryza sativa
tttttggatcgtgccaaacaccaccagcgtgggaggggctgttattggggcgatcaacagggaggacccgtgcaactggcgggcggcggtggtcggaatgttctgcagctcatttcaacgaggtgaagctcatggtggcgctcgttcgccagactgtgatctggatcacagggtgccacccgttggtgtaggacatgtggccatctgtgcccaggctaaggacgccttcggtgtggccgttgagcttgacaaggaggcccgcccacgcgtaaaggccatgggagagtggcttctcaactgcatggaccagggcggcgtcatctactgcgccaccaccgtctcttgttgactcttcaggggcgtaccataggacggagctcgactccaagtcgagctctttaggcatcttaacggcgaatcttcggcactggctcccatggccagacgc

SEQ ID NO: 416668 - DNA, 468 bp, Oryza sativa
aaacacaatttcacatctatatatcactggatagcaattaagctccccaaattattattgaatcaatcagaagtacccaaaaaaaaacagagaatcccaaaacatgactactgtacagaaatcagtcaggagggccactgcaaacaaggcgtttgcttcatgctcagtttcagtcagcacagcaagaccgacgcttcttcagtcttcacaccaaatccgggtcattcttgggtccagcagccacctcctcgacgtgcaatggcttcttgtagagctggagcagcagcgacgagcagacgacgctcaccgacgaggccgccatgcaagctccggcgagccatggcggcagccggatgccggtgaacgggaacaggacgcccgcggcgaccggcatgcccaggacgttgtagcccagagcccagacgtagttgagccggattcttgagaggtcttcctggagagatcgat

SEQ ID NO: 416669 - DNA, 526 bp, Oryza sativa
  unsure (1)..(526): unsure at all n locations
ccgacggcgacagggcgaccaaacaaaagtcctcgcatcccgccgccgccgccgccccgcctcctcctcccatgcgccgccacgtaggatcgcgcgatcagatctagggtcgagcactccactctcccgcctcccacgcgatgcggtggtggccggcgctgccgctgctcctcctcgccgtcgccgtcgccggtgccggcgacgcggctcccgtgtgcacgcggccgtccgcggctgaggcgatcgtgggatcccccgaggcgtgccgctcgccgctgcgccgcccgctcggcgtcaccgagggagatgatgctatcttagcgagggccgttaatctacttcatgcaaacaaggaggatttcgctgctgtgctcttctatgcttcctggtgcccattttcacaagaatgcagactacgctntgagaagttggcttgcatatttccaactattcgtcatcttgcaattgaagaatctacggtcaggttaaggacaagatatcggtatgggattcatggatacccaac

SEQ ID NO: 416670 - DNA, 444 bp, Oryza sativa
agccgcagccgcagccgcgggagtggcggttcgcgcaggtcttcggggaacgcgcggcgggggaggacgtgcaggaagttgacatcatctctgcaattgagtttgacaaatccggtgaccatcttgccactggagatagaggtggtcgtgtagttttatttgaaaggactgactccagggatagcgccagtcggagtgaacttgagagacaagattacccgattgccaggcatcctgaattccgttacaagactgaatttcagagtcatgaacctgagttcgactacctaaaaagtttggaaatagaggagaagattaacaagatcaagtggtgccaaacagccaacaacgccctctttctcttatctacaaatgataaaacaatcaagtattggaaggtgcaagagaggaaagtaaaacgaatttcagtgatgaatttgaata

SEQ ID NO: 416671 - DNA, 393 bp, Oryza sativa
agctacaataactgtagtaaaattttatgttcaaagatttggatgtccatgacaagagatggttgttagccctggctaggtggcattacatgtgaagaaatgaaaaagaaaagaaaaaaaaattttacagccctgttaagcagatattttctgtgaccttcggtgaaattagcatcagcatcgcctatcttctgctttatctttcaactgctgattctggctacaaggcagctacaatcatatcttgggaccaaaaatgttgatatgattagatatatttaacatttactaaagaatcggaacggagcagcctgctactgtcgcaagtagcatcgggagtggtctcgtggaaaccgactgcctcttttggccccagtcatgaaattgacaaca

SEQ ID NO: 416672 - DNA, 437 bp, Oryza sativa
tcgatccgatcttaattacatcattagccagctaattaagtatatatctagcttgcttagctagaacacactctacagctaagctagcaatggcgcgcaataatggcgtcgcggtgatgttcgccgccgtggtcgtcgtcgccggcgcgctggtggcgggggcggcggcgcagagcgggtgcacgtcggagatggtgagcctggcgccgtgcctggactacatgcaggggaacgcgtcgaggccgacggcgtcgtgctgcgcggcgctgtcgagcgtgatgaagtcgaggccggagtgcctgtgcgcggtgctcggcggcggcgcctcctcgctcggcgtcaccgttaacaccacccgcgccctcgagctccccgccgactgcggcgtcaagaccccgtcttccagcgagtgcagcaaagtcggtgctccgattccg

SEQ ID NO: 416673 - DNA, 407 bp, Oryza sativa
acagaagcaaagcaacgggttcccaaaggtccacacttacagtacgttcaacgtacaactgatccaagcaaatgaaacaggtttgatgatgcactgatgcgagaaactaaacggttggatcggagtcggagacgaggcgatcatggacaagcggcggcggcggcgatgagcttagtagtcggtggtggggagctgctcgtgggtgtgggagatgaagaggacctcgtagatgacgccggcgaggccaccgccgatgagtgggccaacccagtacacccactgggactcccaggacccagctgacgagggccgggccgaaggagacggccgggttcatggaggcgccgtcgaacgcgccgccgacgaggatgtttgtgccgacgatgaaccccgtggcgatgggggcg

SEQ ID NO: 416674 - DNA, 537 bp, Oryza sativa
tcgctcaccactccatttctgagctcttctagtttgagtgagagagcagcagaagggagtagtgcaagatgccgatccgcaacatcgccgtggggagccaccaggaggtgtaccacccgggtgcactcaaggcggcgttggccgagttcatctccaccctcatcttcgtcttcgccggccagggctccggcatggccttcagcaagctgaccggcggcggagcgacgacccccgccgggctgatcgcggcggcggtggcccacgccttcgccctgttcgtggcggtgtccgtcggcgccaacatctccggcggccacgtgaacccggccgtgaccttcggcgccttcgtcggcggcaacatcaccctgttccgcggcctcctctactggatcgcccagctcctgggctccaccgtggcgtgctttctccttcgcttctccaccggcgggctcgccaccggcacctttggcctgaccggggtctccgtgtgggaggccctggtgctggagatcggcatgacctttggcctcgtttaca

SEQ ID NO: 416675 - DNA, 459 bp, Oryza sativa
  unsure (1)..(459): unsure at all n locations
tttggtttaggatcaaaacatttctattaccacaactttttaaggatggaatcgagtagcaatactttcaccccaaaatacagtttagcgacaatatcttagaaaagccgcttgctttgccgccatggctggcaagctgagcagagcagctaacacaaagaacacgagatcactataaaccaaacggcaacgaacgaagaaaatacagggtcttttttgtctgaagatacacgaagcggttcgttttcttttatttttagtctcctctcctcctcgatgatngggtgtatggcaatggcaatggcgatgggatcttggcttagttgatgggaaggggctcgccgttccactccttgaggcagtcgagcatggggtcgatgagcttgccctggctgatgccgaggaacaccttgttgcactccttgccgggggacttgagcttttcgccggtgaggaata

SEQ ID NO: 416676 - DNA, 539 bp, Oryza sativa
atcgaatcctcttttttcctcgtgcccaccaccaccaccgtagcaatggcgggcaacgggccgatcaacaaggaggacccgctcaactggggcgcggcggcggccgagatggccggcagccacctcgacgaggtgaagcgcatggtggcgcagttccgcgagccgctggtcaagatccagggcgccaccctccgcgtcggccaggtggccgccgtcgcccaggccaaggacgccgccggcgtcgccgtcgagctcgacgaggaggcccgcccccgcgtcaaggccagcagcgagtggatcctcaactgcatcgcccacggcggcgacatctacggcgtcaccaccggcttcggcggcacctcccaccgccgcaccaaggacggccccgccctccaagtcgagctcctcaggcatctcaacgccggaatcttcggcactggctccgatggccacacgctgccgtcggagacggtgcgggcggccatgctcgtgcgcatcaacaccctcctccagggctactccggcatccggttcgagat

SEQ ID NO: 416677 - DNA, 419 bp, Oryza sativa
  unsure (1)..(419): unsure at all n locations
aaaggcaagaatattattcataaatgacgcatgatttttatcaaaacgcttgcaaatgatatcagataagtagagtcaacaagacaaaactgtatctgccaaagcacacctccccaactccacccaattacgccattatttctgggcaaaagcaaacggcttcccattcctccccttcaccagtctcaaaccataaaccccacaacaaatcctcctaagtgacggcatataagatgatgaaaacaaagcaggatactccagagtcgtcatggcgaacttcaagttgacacttctcatgccacagnccgctagtcgtgctgggcagcctagtaccggtagtgcgcgggcttgtagggaccctcaactggaacgctgatgtagacagcctgcgacttggaaaagctggtcagcctggcacc

SEQ ID NO: 416678 - DNA, 431 bp, Oryza sativa
atccacccaccctctcgccgtcgcagatccgatccaggaagagctcgccgccgccgctgccatggcgctctccgtggagaagacctcgtcggggagggagtacaaggtgaaggacctctcccaggcggacttcggccgcctcgagatcgagctcgccgaggtcgagatgccggggctcatggcgtgccgcgccgagttcggcccctcccagccgttcaagggcgcccggatctccgggtccctccacatgaccatccagaccgccgtcctcatcgagaccctcaccgcccttggcgccgaggtccgctggtgctcctgcaacatcttctccacgcaggaccacgccgccgccgccatcgccagggactccgccgccgtgttcgcctggaagggggagaccctcgaggagtactggtggtgcaccgagcgct

SEQ ID NO: 416679 - DNA, 437 bp, Oryza sativa
ggagtataacagactgatgctattattttaaatgtcgccacaaaccaattagccgtcccatttgtacagcagcaattcgcttacacagttacactttaaaacaagccgcttttggcatagcagtggctgggtgttcagacccttggcctcaccctgcgcccgctggtatcgccgccatccgagagctgcccccacacgctctggctcttccctccgctgctgcattcctcctcacacccggcgaccgtcctcagtatctccgattgcagcgcggggcagttgtctttgaggtaatcaaacccgtcggtccggattacagctgaaagattttcagcagcaaattttaggcaaacagatttaagctccatagcatgatgtcggtcagccaatgctagggtagttgccacagagtttacagaaatatgcttgcccaagta

SEQ ID NO: 416680 - DNA, 344 bp, Oryza sativa
ctcctttccaaaccctagcaaaggctatctctctcttcgccgccatggaggatgacgacgcggggggcggaggcggaggcggcgaggcgtccccgccgcacgcgggctccgccgcggcgatggcgggggcggggagggacatcgcggcgtcgccgacgagctcgcggtcggtgacgcagacggtgaacgggtcgcacaggttcgtgatccaggggtactcgctggcgaaggggatgggggtgggggaagcacatcgcgagcgagacgttcacggtgggagggtaccagtgggcgatctacttctaccccgacgggatgaaccctgaggacaactgcggctacgt

SEQ ID NO: 416681 - DNA, 444 bp, Oryza sativa
  unsure (1)..(444): unsure at all n locations
cttccttctgcatacaagaggctgcctcccatttctcttctctgtcggtgttctcctcaagatctgtcttaagttcttgagatctgtttcagaactaagctgagaagatggtgaagatctgctgcattggagctggctatgtcggcggcccaaccatggccgtcattgccctcaaatgcccagcaatcgaggtggtggttgttgacatttccaagcctcgcattgatgcctggaacagcgaacagctcccgatctacgagcctggcctcgatgaggtcgtgaaggagtgcagaggcaggaacctcttcttcagcactgatgtggagaagcatgtcgccgaggcgaacatcatctttgtatctgtcaacacccncaccaagacccgtggtcttggagcaggcaaggctgctgacctcacctactgggaaagtgctgctcggatga

SEQ ID NO: 416682 - DNA, 461 bp, Oryza sativa
tttggttagaatttatgtggggttataaatcatgtaggtttgtcaaccttcatgccacaaatcacaaaggatacttaaaaaaatcaactttaagccacagcaagaaccaaaaataaaagggttctgaacatgatggttaggttccttattgcaagcaaattcaacccagaagcctcttaatcgcaataagtttctttagagaagtcactctcaaggcaaggacgaaagctgttagcaacatatgttacttcattccatgtaaagccattacaatggctccatttcagctgcaggggtggaatcactggcgtagacagggtggagcacatgcccagcaacaggatcaacatgaacccattttctgccagtcagcttgttgcgctcgaatcgcacatgtccttctttcaaacagaagagagtatgggccttccccatgccaacgtagttcccaggatggaagc

SEQ ID NO: 416683 - DNA, 471 bp, Oryza sativa
  unsure (1)..(471): unsure at all n locations
tttcttacccctcgcaccccctccacctcgccgccgccgccgactcgccggggctcgccgccaccggtggtgggggggagctcgacctcctcgccccacgcgcgcgtccggacgccgtcgttctgggcgcgggagagatccgtccgtcgccccccgctgggcttgcgccatcctctcgccgggtgatttgagacaatcaagatggctttttcatcagttttcaggagaggaaatgtcaaagaattgatctcaaatgtttcggtctacactagcgcaacagagtcatctggaggattgagcttgatttttaagcgttgggccaccaaaaagacagctggatcaacaaaaaatggccgtgactctaaccctaagtatttgggtgttaaaaagtttggcggagagaaagtggagccaggaaacatcatcatccgccaaagaggaacccgcttcatcnctggaactacttggcat

SEQ ID NO: 416684 - DNA, 489 bp, Oryza sativa
tcgtttaggcacagaggagaagctccccccgctcaactcaccaaaaccctcctcccctcgaaatccttcccaagacgccgcacgcttctccatttcatataagattcccgagagacgccgccgcccgagaggcgtgggccgcgcgcgccgaaacatatcccgccggggcgccgccatggccggcgaggtggccatcgactccggcgagaagcgcctcaacgagctcgggtacaagcaggagctccgcagggagatgactctgttcaagacgctggccatctccttctcgacgatgacgctgttcaccgggatcacgccgctgtacgggagcagcctgcggtacacggggccggccagcctcgtctggggctgggtcgtcgtctccttcttcacctggttcgtcggcttcgccatggccgagatctgctcttccttccccaccactggttctctgtacttatgggctgctcatctggctggcccagtctg

SEQ ID NO: 416685 - DNA, 489 bp, Oryza sativa
tcggtcaagtcgctaataccaccaccgccgccccgtgacgacctcccctccccgcctccgatctccggccatggccgcgcgccgccccggatcgcccgctcccaggtgggcgccatggcccctcctcgccgccgccgccgtgctcctcctcctctcggccgcgccgcggacggcgcgcgccctccggttcgacctcgagtccggccacaccaagtgcatctccgacgagatcaaggtcaactccatggtcgtcgggaagtaccacgtcgtcggccccgaccccaacttccccgacaaccctctccccgactcccaccgcatctccctcagggtgacgtcaccgtacgggaacagcgtgcactacgcggagaacgtgccgtcggggaacttcgcgttcacggcgacggaggccggcgactacctggcctgcttctgggcgcccgaccacaagccgccggtctccatcgggttcgagttcgactggaggag

SEQ ID NO: 416686 - DNA, 453 bp, Oryza sativa
actaggattgaagattcatttatctttgaattttaaccacttacaagaaaccaacccttttgtttctttccttctctttcctcacccacttaatcctatagattttataattcaagacaccacagatacaaaaatacaagagagaaatgatgaggcagaaaaaaaaaacccagctaaaagcactccaccaattaattatctgccattgacataattaattaaccacccaaacgaacaaacttcacttcacttgcatctcagttggcggctgcccccttgaacctgtaccacttggcgcagatcatgaagtagatgatgttgaagatgccgatgccggcgatcatccagtagaagaggtcgagcctccccttgttgaggtcctgcgccagccagttgctcccggcgccggtggtccggtgcacgatggtgacgaggaacccactgaggtagttc

SEQ ID NO: 416687 - DNA, 489 bp, Oryza sativa
gtctcctcccccgcgtcggtcgcttcgcttctactggaggagagcagaggtggtggttggtgagagaggatgcgcggcggcggcggcggcggcggcggcggcggcgaggaggccggccagaagctgaagagcatggacgtcgacaagctggagaacggcggcgacaagcccgccctcaagtaccacggctggagggccatgcccttcatcatagggaacgagacgttcgagaagctggggacgctggggacgtcggcgaacctgctggtgtacctgacgcaggtgttccacatgcggagcgtggacgcggcgacgctgctcaacggcctcaacggcaccaccagcctcgcccccatcatcggcgccttcctctccgacgcctacctcggccgctacctcgccctcgccatcgcctccgtcgcctccctcatcggcatgttcttgctgacgatgacggccgccgcggacgggctgcacccggcggagtgc

SEQ ID NO: 416688 - DNA, 452 bp, Oryza sativa
tgtttttttttttttttatgagaaaaaaggattgacattttgatgttacagcacagtaagcttccacaaataatgatgaatgatctactgtttgcataaaagaacatacaacatggtgttggcaccaactattctgaaataaatgtggctttctaaattgggttgtagtttttttatattatctttggatcaacctttatctgattcatggctgtatggatatgtatgcttcccattattggatgtcggattcacaagcatttacaatttagaaccagcaagccagcggctatagaaagccaatgatttttggggtttgaattcaggaacagtgtgcccagcacccttaatggtagcaaaggtgaggccatgttcatatccttgggtgtacccagaaacttggccatttaggtgccacgggctccatgaattaataacttcgaaccccaaaa

SEQ ID NO: 416689 - DNA, 532 bp, Oryza sativa
  unsure (1)..(532): unsure at all n locations
ttttacctcaagaccgccgcggattcgcatacttttcttctgaagtggtttcagctgtaccctgagttcctgagcaatccattttacatagctggggagtcgtatgctggggtttatgttcctactctttcgcatgaagttgtcaaaggattacatgatggagtgaagcctacaataaacttcaagggctacatggtcggaaatggtgtttgcgacactgtttttgatggtaatgctcttgtgccatttgctcatggaatggctctaatttcagacgatatataccaggaagctcagactgcatgccacggaaactactggaatactaccactgataaatgtgaaaatgcactctacaaagtcgatacgtcaattaatgacctaaatatttatgacattcttgagccatgctaccacagcaaaactatcaagaaagtgaccccagcatataccaaattgcccaaaagtttccaacatcttggtacaactaccaagcccttngctgtaagaacaagaatgcatgggcgtgctt

SEQ ID NO: 416690 - DNA, 431 bp, Oryza sativa
ggagatgagcaccatgattcacttgatgctcttgcacaccgtctggatcaccgtcggcccgggctccgggatcgtcaggttcaggttgtcgccgaacccctccgcgtacggcggctcgccgaccaccacgatcgcgtagtcgtacttgtcgccggtgaccacgctgctgtccgggctctccgagtacaccaccgtcgtgctgggatcaacggtggccttgatcgccgacaggatcgtcgtgccagcagtgatgttgttgccgggctgtccttgccaggtgatggtccatgctccacactgtctgcccaaatcatcagcatggcttcccgcgacgagaattttaccggctttcttcgggaggggaagcaccgtagagtagagagattttttcggtctttagcagcaccaaggacttcctgaccggtttgcgc

SEQ ID NO: 416691 - DNA, 207 bp, Oryza sativa
gtgtcgtcgaagaacttctttatcggctcgtactcggcgtcggtggcatggagcagccgtggtaaatcgcaggtcaggtgagagatgacgtgcagtccggcccccacggtgatccccactggcgttcacccttgtggaagttgcgggtggcttccaacggctccactcgggcgacccattcacggatgtggctccaattgacggtgt

SEQ ID NO: 416692 - DNA, 490 bp, Oryza sativa
ttattttttttgaaggggggagttgctattctgctagcactcctttcacactaacatgcgatcctccactaagtttcagcttgatttgatcacaagttcaatttacatacacctgtgaccactaatgattgtgaccagaaaaactgaagatcacactagctgcttcccaaatgacagtaaagtataatataatacaagattgtataaatacataaagcagatataatttaaatcgttgcccctccagcacccctaagaaacgccagcttagttgctttaacagcatgaatctgcctctccttcttctcacgtttacattcaccacaccagcccgaaaagtccttctgatatttcttcatctccctgaacacagagcttctgcaccacaaaagaagattgattctgagcccagatgatgtccggcggacaccatgcctatgacgaccacgatggagcacagctcgtccaggaacatgagagtaatcgaaca

SEQ ID NO: 416693 - DNA, 513 bp, Oryza sativa
gcaatgtatactcgcattccacaacagtcgaagggcaataataagtcttaacatccaagtttaaaccgaacagaaaatagagttttaaatgactgacatagtgcacaaagcgagcagatattaacggtcaatgcaacaactgaaatgaccgtcgacaaaacttaacgagtactaaaagagctagatatctcaaatgcagatatggaaagcaccacttgaacgaggctcatttcttcttggcggcagccttggtcaccttggcaccggttgggtccttcttctccacgttcttgatgacgccaacagccaccgtttgcctcatgtcccgcacggcaaaacgaccaagaggagggtactcagagaaggtctccacaaccatgggcttggtgggaatcatcttaaccataccagcatcaccgtttcttgaggaacttgggctccttctccagctccttaccggatcgtctgtcgatcttggtcaccagctcagcaaacttgacggcaatgtgggag

SEQ ID NO: 416694 - DNA, 392 bp, Oryza sativa
gggggaggcggtgctgtcgacgaagcgctcgccggcggcgtccacgcagaagtagagctggtacagctggctgttgccggactcgtcgcggttgcactccacgaacggctcggcgccgacgccgcgctggatggcgcccttgatctgggacagcgtgtagtagccgccgtcgggcgacacgccgccgtcgcgcagcgcggcgagcacgggcagccgcgaccggaggcggagcgccgcctcgaagtagccgtgctcgtcgccgagcgccgccgcggcgcatgtgccgtgcttctaccactcgtgcgcccagaaccggatgccgtcgttgctcgggcacgccagcgtcggccactcccggcgcatgctcccagcaagtcgctcacttggagggg

SEQ ID NO: 416695 - DNA, 347 bp, Oryza sativa
atagagccccgcatggataatcgccggggaggatgatgcaaattcgtttttctagtttggccacctaataatggaacaaaattctcttctgttgcttttgaggagattaattgaaccattatatcatggacacggaactgccgagctgtaccattaaaaccaatgtccacaggttgaaccagacttttgttgatgagctcataaaagtagctctccgcaacagaggccaatttctgcccacaggcttgacagataaagccttcaactatccatcgtcatactaccatgcttctttcaataatacaattcctcggcaagaccatgaaccccaccgaataagttttgag

SEQ ID NO: 416696 - DNA, 412 bp, Oryza sativa
cgtagaatgattggtccatattttattttggatcgggctgcaaaagccaaataagtccccccttgacatttacatcaagtacacaaccaaaagaaaacgtgcgagcaaaaaaaaagtctccagaattcactagcatcggcgaacgtactagttaaacatattcaccatctcatcatggaaggagttattgatgattgattgattgcacctgctggaagcattcttgtggacaatctagcctgtgttctgcatgccggcagcaatgcccttcatacgtaggatgaggggtgtcctccaggccaggtgcgtactcgctcgcagcgttcagttggaccagctcggcagactggttgctgtcgacgaactccttcgacaaggccggctgggacatcacctcgaagctagggtccct

SEQ ID NO: 416697 - DNA, 523 bp, Oryza sativa; identical to SEQ ID NO: 388660

SEQ ID NO: 416698 - DNA, 404 bp, Oryza sativa
aagtaaatatatcatatattcgattatatatatatatataatagcagacaggttacatccattagaactcagaatcaccggaattgaacatcaaaagtacaacacaagcagcagcagcatcagccagcagcaaacgacatgattacccacgcttttggatgaagaacaagaagtacgagaagaagaagacgatggtcgaacaccttgatcgagctcaacaatggcgatcgatcaccaatcacctacttggtgaactcgatggcccaggcgttggcgtagatgtaggtggccttgaagccggtgaatccggcggtgcgggcgagctccctgaactcccttttgtacctctccttgccgcacgggcttgtgggcgagcatgatcaagtcgacggggaacaacccct

SEQ ID NO: 416699 - DNA, 339 bp, Oryza sativa
accacaactttttaaggatggaatcgagtagcaatactttcaccccaaaatacagtttagcgacaatatcttagaaaagccgcttgctttgccgccatgggctggcaagcctgggcagagcagctaacacaaagaacacgagatcactataaaccaaacggcaacgaacgaagaaaatacagggtcttttttgtctgaagatacacgaagcggttcgttttctttttatttttagtctccctctcctcctcgatgatgggtgtatggcaatggcaatggcgatgggatcctggcttagctgatgggaaaggggctcgccgtcccacttccttgaggccc

SEQ ID NO: 416700 - DNA, 459 bp, Oryza sativa
ggagaaggctatggcgtggatctggatgctcatggcggcgggggccgtgctcctgtgggcggtttctctggggcgggtgctctcctcctcctcgccggcgtgtctgcctgccaactccaccttcctctcccctcctcgcggcgacaggatgagccggaatgtcctcctcgttctcgcccaccccgacgacgaatccatgttttttgctccgactattcttttcctcaagtcaaaaggtcacagcattcatatcttgtgcttgtctcaaggcaatgctgatggccttggaaatatccgcaaagaggaactctaccttgcctgtgtcactcttaagattccagctgagcaagttaaagtcttggaccactcagaactgcaggatggatttcataaaaacttgggatcatggactaatagcagaacttaccctggcacaatcccagttatggaatatcgaca

SEQ ID NO: 416701 - DNA, 457 bp, Oryza sativa
gcttaaatactgttagccttttacacaaatcatttaaccagttttgtcggctccatcacacgccagacaatgtctctaacctacaactagtgcattgcaacaatcatgaccttgtctaatgtggtcttacaacttacaagttttcaagactcgttataagtgaactagtttcagcagagctttgcatgaggttttgactcgctatacagaactacagacttactgttagagcaaggagaatttactgtttcagactacctagcctctattgtagttgtcgtcacaccattgctggtaagtccatgagatgattctgtgtctaatgtgatcttcccaatgttcactccaggctcatttggctgtggcaacgtggcattctcactggctagcatcataacaactgaagacatcaatggtctgttcttgggttccactttaacgcacaacagagcgacgt

SEQ ID NO: 416702 - DNA, 407 bp, Oryza sativa
  unsure (1)..(407): unsure at all n locations
ggaagcaaacacatctcttgggtctcgataacagtaatatcctcatgaggttggtacaaaactttgaaggggttacaattagcacagctcactacagcattttgtttcaaaaggctactacagcagtattcttggccagcaagttgaacagtgaaacattccccattttttatgtccgtgccgatcagattcttggtgctcctccgattgtagcttcagggagtcgttctatcgagtacctgtgccgagtgatatacatgattggaacaccaggaacctttcttatcctccttttcaaatctctatcacatgttgcgacgatgtagcacttgtgctgagtaaccctctctacgatacagtcatcagcataagttcccttgngtgtgcatgcttaattttggaaccta

SEQ ID NO: 416703 - DNA, 466 bp, Oryza sativa
  unsure (1)..(466): unsure at all n locations
agnataacagactgatgctattattttaaatgtcgccacaaaccaattagccgtcccatttgtacagcagcaattcgcttacacagttacactttaaaacaagccgcttttggcatagcagtggctgggtgttcagacccttggcctcaccctgcgcccgctggtatcgccgccatccgagagctgcccccacacgctctggctcttccctccgctgctgcattcctcctcacacccggcgaccgtcctcagtatctccgattgcagcgcggggcagttgtctttgaggtaatcaaacccgtcggtccggattacagctgaaagattttcagcagcaaattttaggcaaacagatttaagctccatagcatgatgtcggtcagccaatgctagggtagttgccacagagtttacagaaatatgcttgcacaagtaagattcacacaataaccgtagtcttggcaac

SEQ ID NO: 416704 - DNA, 386 bp, Oryza sativa
agcgctctcaaagtagcatatattagtcaatcttgatgaaagagggacacaagccatcatctatagtgatggtgcctcttacaaacttcaacacacggataacaagcatacactcaagagtcaagaggtggctaggttttgtgtgtacaatggaacacgcaggcatgtacacaaccaagtatactccaccccaaactatagtctttgcaatggttttggcagttgctcagaaaccatgaatcttgatgtgttccttcttcacaatgccggcctgaacaagaaaatttgatacgttcttcctctgatcaccctgaagttgaatgacctggccaagctctgggtcctggacaacagtaccattgcagcaaaactttttcttgagatct

SEQ ID NO: 416705 - DNA, 493 bp, Oryza sativa
aacaataaaaagatagcatggaattaaagccgctgttccaatttaccatacgcagcatttgattacaggaataccaaaaaactactaccgatgacaggtattaattattaaaaagcacaggttcagattattgcgacaaaagtttttgatacccgtaagattggacgcttgatagccaaaccacactcagaaccctaaatatgcatacggaggatgtccaatcggatcttcagccaccaccagaggcagatcagtacttgtagtccttgacgtgaaggctctcagaggcaccctcgccgagcacagcatcaccctggtatgtaccaagggtagcctcagagttggccttgcacctggtgatgaaggccttctgcgccttcaccacgttctccgtcttgccgtcccaggccttgagcgtgctctgctggagagcacggccgaaggagaaggacagagcccacggcttcttggtgctgagcttgttcatggcgtt

SEQ ID NO: 416706 - DNA, 301 bp, Oryza sativa
gatccaattcagattttttttttcacgggggcagtttatacacaaatgggggctttcttggacagttacacgtacctttgcagcagcagaagtgcagcttgagaaggacagggaaaagaagaaaaaaacttacagggagaacagtagagtagatgaatgtagtagtaaaagacatactagtggtagctagtggtcgatcttaagaagcgttttaaccacagcttaattaaagactttaataaggggatcgggatgagtaacttcaccgagtctgggtaggtagacattcgggtccgggacg

SEQ ID NO: 416707 - DNA, 443 bp, Oryza sativa
ataagcaatcgactatttctgcacctcttatggctctattttcattcggtagggaaaatgtttaggactaacaaatagagacatacgtttgcacgtgcagctgtagcacggatgccataaccactaataatccagtgacacgctgcactcacataatccaattgagaatgaagattagccccaaactgtgtaaatcttaagtccacaaagactgagcatggaaaaaaagtaaggagcaatgaacatagacacgaacagcgcttcttgctttggccgactatctcatttgaactattccagcgcttacaagcttctgaatcttctgcattactccagggttcttaagatgctcctgagaagccctagggttcttctgcaaatcgaccagtacctgtcgcatgatgggatctcgtagaatattctggatctctggatcctgcata

SEQ ID NO: 416708 - DNA, 447 bp, Oryza sativa
  unsure (1)..(447): unsure at all n locations
atcccaaacaagcgatatatatttcataatgaacataaatctgcttctacaatatactccatcagtaacatgagcaccaaccacaaggtttattagagacaatgccagccccatgctaggacaagcttatttcagctgttcttcctcctcctcttcttcttcttcatcatcatcatcataatcttatcgccataatttatcgccattttcgcatccgtccataagattatacctatttcttccccagttctgaaatgtccaaacatctatgtgtttacaaccacgcggcgttcttgatcggcgtgacgacggccttgacctgangtagttcttaggctgtcgatgcccttctccctcccgatgccgctctgcttgtatccgccgaacgggatcgcggcgtcaaagacgtcgaagcagttcaccccacggtcccgaccctgacgcgcg

SEQ ID NO: 416709 - DNA, 473 bp, Oryza sativa
gccattgctccttgctgtaaacaaaaccgatcctcaaaaccattattggtgctcttttacttaatgtacatgtcgaaactacaaacctactagccatcacctctattatatttatagccgttgatcatttacaatttcagcaagggaaggtgattcagagtcattgtatttactcggaactggggtgttccgtctggactggcgctttgtcgccacgagaacctgctccgcctctggttcgtcggagatggagaacttctcgtcgtcctcgtcgcctttgaacaccgggtggatgtaggcattcatcaggtatcctttgaggtcgaaccctggctctcttgcgcgttctagggtatccttccgcattgcatcctgtaatggatattccacacaagcaggctcatagcgattcttgcagcatttatagaaataaaaggttacaacagggagaacaaggagcaccggtgttgact

SEQ ID NO: 416710 - DNA, 396 bp, Oryza sativa
ccaaacaaagtgtgaaatttattttattcataatccaaaagaaataatcaacagatcatacaaggacccacacatgaaacgaataaaaacacggaaaatcgagtagctccatggtacgtgtgcatgcttaatttgcaggtgcacgcatgcatatttgtcgatcgatccatgcatgcgcgcaaatgttgcaagctaagctagcacgtagtagcaatcaaacagtccagataaaatagccagcggaacaaatgcgcagtagcgccgccgcctatcgatgcttagcatttgaagccggtgggcacgcgcttgccgcagtagttgaggatgaggctgaggtcgacgggaggtgagggttgatgccgaggatgttgcctctgatggccgtgcagaggcata

SEQ ID NO: 416711 - DNA, 427 bp, Oryza sativa
  unsure (1)..(427): unsure at all n locations
gatgaagccagatacgaaaagttggacaaaattgctctgaaacgacttggatctatcgtatacacttctgtcctaactgacagtacagttacagtaaattttgaaccccattttcatgtttggacaaaactcctataagtttccacattgaacctctctttgggaaaaaaaaattctatcaaaacatttcaggcattccatgatgctgaccgtcgcatggtcggcttcaccggccggtcttcctccatggagatcatcatcagcgtcgacgggtcctccagcatcatacgggctacgaggtagccagcgatggaccatgtctggaacttcctggcctgcttgccgatgaaccgtcccagcttgccatcgtagtactctggcccagccgtctttagtagcctggactcngcgagcttaatggcgcgct

SEQ ID NO: 416712 - DNA, 490 bp, Oryza sativa
attggatcaaaacatttctattaccacagctgtgtaaggatggaatcgagtagcaatactttcaccccaaaatacagtttagcgacgatatcttagaaaagccgcttgctttgccgtcatggctggcaaggtgagcagagcagttaacacaaagaacacgagatcactataaaccaaacggcatcgaacgaagaaaatacagggtcttttttgtctgaagatacacgaagcggttcgttttcttttatttttagtctcctctcctcctcgatgatgggtgtatggcaatggcaatggcgatgggatcttggcttagttgatgagaaggggcttgccgttccactccttgaggctagcgagcatgggggcgacgagcttgccctggctgatgcccgggaacaccctgatgcactcctcgccgggggacttgaggttttcgtcggtgaggaaaacccaacccgggctctttgggggcacagcggttgagcgg

SEQ ID NO: 416713 - DNA, 459 bp, Oryza sativa
gtatgcttgactttgcaactgtacatgatcaacatcacatccatacatcccgactgcagcccaaacagggctcaaaccgcacgacccaccccaacagcaccaccaactgcgtacaaccaatgcaacaccctgctgcaacccccaacatacagcacaccttttactgtacccggcccgccatactgcctgcgccgcctgctcctacgcccgcgctgctgctgccactgctgatgttctcatacatgttgtctatcaacgcctgataggccaccttggcttgcggccgcttcaacttgaaggtgggtgtcaggagctcattctctacagtgaagggctccgggaccaaggtgattgctgacacgtgttcaaagccacgcagctgcgcggccctgccctcctgcgccatgctgtgcatgacggtttggatcacggcctttctcctggcacagggcaggcatg

SEQ ID NO: 416714 - DNA, 417 bp, Oryza sativa
gcaaccaaacaagcttatttgatgttcatttctcaattctcacgttacatatgtataatcaattacttgactgctttaaacctatacatgagaattctggactatgcacatttcgagccctcgaaaccctatgtcagctgattaccttcaaaactttgcgccctatgttggagatcagtaatacctccactcccatttggggtataatggcacgaaaaggaaacaactgtatacatcaaatatacaagctatttagggatctcatgaaaaccactgatttcatcaaggagcaagtacaagaactttaatggtgccctgactgttagcagttaacatggtagggctatcgctcttccagcagactgcgctaataaaataagagccaggatcatcatctgcatcatcgagatcagatga

SEQ ID NO: 416715 - DNA, 457 bp, Oryza sativa
caaaaaccacgatttataaagtgccggagatgaagtacacaaattaacattacatcgagttttaataaaacatcatgcgaaaagccagcaaaaacaaaaggcagcatacagctaatgaagctctactggagtagctcgcaaaaggtccgacttattttcagtagcactctactccatttcttccgaaagagtgaccatcttctactgggtgttgtacatgtgacggatcaggtcaacaacgcgagagctgtatccccattcgttgtcataccaagacacaagcttaacaaagttgtcattgagagcaataccggcctttgcatcaaagatgcttgacctgttgtcaccttggaagctctgtggaaacaaggtcctcctcaacgtaacccagaatacccttggagtttccccttagactcctccttgatagctgccttaatctgatcataggatgctg

SEQ ID NO: 416716 - DNA, 480 bp, Oryza sativa
aggggagctacacatctttggatttcaacaaacaagactgctaggaacagtatatctcagctctctagtggatcggacgtccgacgcgtagtcacgtcccattttccatatacgagtactacttacaacacacacttatgtgaaaaatcacagcgtggtcttggctgccctcctgaccagcacagcccagcacatgaccctgtacaagacgaagaaccctagcatgaccccgacattgacccacctcatcccctcgtcgatccctctccccctcagcacatcaccccccttcctcaagcacacgcctcccgcccacgccacgcacctgccgctgctgctgccgccgtactcgttgatcagcagcaggtccagcgggtacctgtacatggacacgtagtacatgaacgcccagtacctcgggatgctcttcctcgggatgaagtagccggagaagaggaagaacacgcccagcgacatgca

SEQ ID NO: 416717 - DNA, 190 bp, Oryza sativa
cacggcggacgagtacgtgcgcatccgctcgggctcggacattcccttcctgggcggggtgatgcaccacatcttcaagaacggctgggaagacaagaaatacctggaggaccgtgtctggggcatggacaaggtccgtgaggaggtgctgaccaagtggacgccggacaaggtgcaggaggcctgcggc

SEQ ID NO: 416718 - DNA, 292 bp, Oryza sativa
ggtgcaatcaaaaccagtacaagaatccaatacactccccaaacatatgcgatagcatacgaatccaaacatggtctggtaggtgaaacggattaaagtggcagtagcatcagcggcgctacggaccacacagcattgtactactactacattacccaaaagcacataaccaattaagcatcatcataccgaaacaataataaagatggcccaaacggtaggacacagcaggcgacactcaagatgggatcccaggagaaactccggcgagattactcgtcttcggggacct

SEQ ID NO: 416719 - DNA, 490 bp, Oryza sativa
agtattaattactaggttcataccagagcagcaatagtgttacataacatggggattatacaagtatacaacaatgggagaaacaaagataaaaacctgacgccttcttttctgttaggtttcccccagcatttccagaacaagggagaaaaacactaatctaaataagccgtatacaaaatgaatcagaatcagatagtggcagccaatcatggtttccatggtgccggaggcggtgggggcgaagggaacatcggcggcacggcagaaaacatagtgttcttatccacgccatggccttcacctgacaatgctactaatgctgcaactagaccggcattgccagctagagttgcttccgtgtagttgtaattcttgcgaacattcttgaagccgtcgtggcgatcagggtcagctaccctcgcttcgacaatgatgttgggtattgggttttttgggtttctttccaacttccaaccttctttggaac

SEQ ID NO: 416720 - DNA, 537 bp, Oryza sativa
acataaaaagagcacctatgtacattctgtatatttcccattcttagttcatgcactgggacagcagtttcacacttccataagattgaacagtgttattaccctcaaatacaagtaaataagaagcagataagccctatggatataatggcagggtttccatgtatgaagttggtgctgtaaaccttcataagccataaaaagctcaaggcgtatcaactaacgcaccgcgaaagcacgagaggttcctgtaaaatgcctgaccgaaccaaacattggtttggaggcaccaaaatgcctcaatctgtaaacaccagcagcagcgtcttcaggaactgtccactctagagttgcaaaacttcttgaactcaatcttgcgggccttgaccacttgaaacgcaatgaccaatcatcatcatcgtagacaggaacccaattattgttaccatctagcttctcgacgagtgcaaaggtaccatccgtaagaaggtcattccttgggcatgctgaataaaatgtagcattcacagtactacc

SEQ ID NO: 416721 - DNA, 436 bp, Oryza sativa
gcaatcaaatcaactacaggtgattaaattaacgaactgcttattttgttacgacgtcgatcaatcgcctccaaacggtagccagttactgttgtaaaacacacaattaaatgagcttagagttcgtcgtggtggcggtgctcctcgtcatcatcatcttcgtcgtcgtcggtgaccttcttgatcttcttgggcgccgggttcggcgaggtcttgatggggtaggatgcttccatggcgatgccgcagagccccttcttggcggacacgttgcgcttcatccggatgtaccccttctcaccccagtctgcgccccacgagttcctgacgaaccagtacttggtgccgaccaccgtagtgccgtagcccaccgccggcacgccatggacgagctccgttccgcattttccggtgaccaccccctcccagtagaact

SEQ ID NO: 416722 - DNA, 487 bp, Oryza sativa
gcgattcaaagttgattgcaatattaccagatacattatgaatgagaaccactttggcaaatgtttaactcgagcgtgaacaaggtgaatgtgctgagcatgttacaggagttgatagatagaatcatagaaaacttcgatgacaagtgatagcaacatccaagtattctacgggactcctcggtaaaggattctacagtacacgtaggagggcgatataaaccatagaggacatcacaatttgcttgatggcacaccaacaccagaggccctaaccttcttctcgacaacctttgagagctccttcacttcctccttcggaatatggcgagggcgacttagccaaagaccttcatcaacaaccactgtagtcccatttacatatttttctggatcagaagcaaggtaaagcgcagccatagttatgtcccatttttcacccaacttaaataaagggatttattttccgacttcccttgggccattt

SEQ ID NO: 416723 - DNA, 402 bp, Oryza sativa
cagtatatggtttacaccgttccaaatgaattattgataccaaacagagggcacaaataaaaccatggaaaatacaggatcccaaatgtcatgatggggtagcggtaatcagataatgccacacccagcaatcactgcacttgttactgcggtttcaagctgggtggatgtcttttgtagcattccttctcaatacatgtctttgttttttagtttaggtttgatacataaggatccctctgttctgccttccacttgagggatccatgtgttctgcctttcactcgagggattcctctgtcctgccttacactcgagggatccctctgtgttgccttccacttgagggagttccttggggccaatgttcttcagtgtacagatcttgttgcttccccatgg

SEQ ID NO: 416724 - DNA, 419 bp, Oryza sativa
gtcaaggccagcttttactgggtcatgaacagcatgatgaacgggaggggacagctacggcgtcaccaccggcttcggcgccacctcccaccgccgcaccaaggagggcggcgcgctccagagggagctcatcagattcctcaatgccggcgccttcggcaccggcaccgacggccacgttctgccggcggaggcgacgcgcgcggcgatgctcgtccgcatcaacaccctcctccagggttactccggcatccgtttcgagatcctcgaggccatcaccaagctgctcaatgccaacgtcacgccgtgcctgccgctccggggcaccatcaccgtctacggtgacttggtcccactgtcctacattgccggacttaacaccggtcgccagaactccgtggccgtcgccccggatggcc

SEQ ID NO: 416725 - DNA, 435 bp, Oryza sativa
aatttatctaaatccatccatcgatctctcaattagttaacctcaagagagaagtggggaattgagctagctagctagatagtgagataaatagtgatcaatagctaagctagctagcttcgatcgattgatcatgatgaggtcgccgtggatggtgtttgcatgggcggcggacgatcgtggccgtggcggcggcgtcgccggtgccgacgaagctgaaggtggggttctacgagcacagttgcccgcaggcggaggagatcgttcgcaacgccgtccgccgcgccgtcacccgtgaccccggcctcgccgccggcctcatccgcatgcatttgcacgactgcttcgtcagagggtgtgacgggtcgatactgataaactcgacgccgggacacgtggcggagaaggattcggtggtgaacaaccctagcatgc

SEQ ID NO: 416726 - DNA, 545 bp, Oryza sativa
atttgaacccgcggctgaacctggcgtccttcggaccactttgatggagcccgagggcgacaagctcatcatggactccgttaacaagaactacgtcgacatggacgagtaccctgtcaccacggagctccagaaccgttgtgtgaatatgatagctcacctgttcaatgcaccaatcaaggaggatgaaacagctattggagttgggacggtgggatcctcagaagcaattatgcttgcaggactggcattcaagaggaagtggcaaaacaaacggaaggaacaggggaagccatgtgacaaacccaacattgttactggtgctaatgttcaggtttgctgggagaaatttgccagatattttgaagtaaacttgacggaggttagctcaatgaaggatactatgtcatggatccctgaaaggctgttgaaatggtggatgagaacactatatgcgttgcggccatcttgcgctttactcttacttgagagtttgaggatgttaagttattgaataatctcctaacagaaaagaataaggaaac

SEQ ID NO: 416727 - DNA, 499 bp, Oryza sativa
atctccagctgatcaagagctcttaattagctgggtagtgattagctgcgcttgtgatcgatcgatctcgggtacgtagcaatggcgtccaaggcgttcgctctgttcctggccgtgaacctcgtcgtgctcggggtggcaagcgcctgcggcggcagcccgtcgtgcccgacgccgacgccgtcgaccccgacaccgtcaacgccgacgccgacgccgtcggcgttcgggaggtgcccccgcgacgcgctgaagctgggcgtgtgcgccaacgtgctgggcctgatcaaggccaaggtgggcgtgcctccggcggagccgtgctgcccgctgctggaggggctcgtcgacctcgaggcggcggtgtgcctctgcacggccatcaggggcaacatcctcggaatcaacctcaacctccccatcgacctcagcctcatcctcaactactgcggcaagaccgtccccaccggcttcaagtgctaagcaacgtgcatatgca

SEQ ID NO: 416728 - DNA, 481 bp, Oryza sativa
aaaaacaaataaaccgtgagatcactgtgcatcatgtatacacatatagtaattcgacaggttacaaatcagtacatcatcgcaattcgcaaacatccaaaaaccaaaacaaacatcaaaaccatcacggcaacagtcacacgccttacaagttacaagcgacacatccaacaaaatctgctatagccgccaagttcacaaaagagcatttctattgaagctagtacaccgtattagagagtaacagcgagttccaccatcgaccgtgttgtctcacttccttctttgccgagatatcgattctttagctacagcatgggcagcagcgctcgccagagacgacttcttcagattgccctttgggtcgagagctttccgaattttgaagacagcccatgcgactccaagagcgtttccagaggcgtgaaggtaatcctgtgtgacctgtccagcttgatctccgtatctatgtgttacaaca

SEQ ID NO: 416729 - DNA, 445 bp, Oryza sativa
tttatctctcgattgatccacgaacagtgacacgtgcgctttcaaagaatccgcgatggccaccaagcagagcctctaccccgaggtgaaccagtcccaccccgacctcaacaccgccttcctcgccaaccccaaccgcgccgccactgccagccctggcggctcgctctacccctccgtcgacccgcagcagctcgccgagaacctcttccccgacgccgccgatgacgccgcgccgccgcctcccaccaccgaggaggccctcgtcgcggttccgggcgcgcagctccacctcgtcgaccccgaccgcagcatggacctcggtgccggcacgctctccgtcgtccgcctccgccagggggaccactccgtcgccgtcctcgcgaggctcgtcccggagaagcgcagccagcgccgcggcggcctcttcggcttcttgagcggc

SEQ ID NO: 416730 - DNA, 429 bp, Oryza sativa
acagcggcaaatccatctaattaaacatcaagactcgtctcaacaacaacctgccacaattcacaaacagcaggctgctgcacaagacggtgtacacggttcattttatttgggtgttcgtttccaccatcagattgatataatacacgcgaacaagcagaaacattcggcaacaatttctccaggaaaatcgcggcctatttcgtcatcatcccgagcgagcgttatttggaagagggagtctttttcagacaggcacagcctcaatggcaggagcgagtgaccaacgtcgacgtcggcgtcctagtagccaccctggatgtaggcgttgagccggttcagctcttcccggggctcgctgaccacggcgcggacaatgtctgcaatggagaccatcccaaccatgcccgtgccgtcgatcaccgggat

SEQ ID NO: 416731 - DNA, 484 bp, Oryza sativa
tgttctccttcctcctcatcctccccaaccacgggtccttttagaagtcctccgggttctcctcctcctcgcagaatgcaacgggcaattcaagctatcgggtcacatggcagtctcctcaagtctgctgttctgcgacacatcagtgctccaaaaccatctattttacctgctgtatattcacgctccatgtcagtttcatctgctcaaatagaggagagtggatttgagactgccactgtggcagatattttgaagtctaaggggaagagtgctgatggatcttggctctggtgcactactgatgactctgtctatgatgctgacaaatctatgacgcaacacaatgttggagctctggtggttgttaaacctggacaggataaatcaattgctggtattgttactgagagagattacctcaggaaaatcatagtgcagggacgatcttccaagtaactaaagttggagacatcatgactga

SEQ ID NO: 416732 - DNA, 288 bp, Oryza sativa
atgcacaattgtaattttattcttattttttattccccacaattagagtttgtcttcatatctatcaaggggagggatttcttcagcgagacccttacgttttctgatttgcaagcacaatacgttaggcttagatccagtttcaagaggatttccagccaatggttgccagtggtcaaatacgcattgagggaaggcttgaccagaagtgttagaacgtaagtactgagtgaaacccaatgactccatgacaggccaactggcctttaccatgtaaataggagtacc

SEQ ID NO: 416733 - DNA, 346 bp, Oryza sativa
tttaccactcgaactaaagagaatggtcaatttgagtgtagttcaaattcattcggtgatggacaaaaaggaaaacattcgtaacatgtctgtcatcggtcacgtataccatggaaaaagtaccttaactgattcccttattggcgctgctggtattatagccagtgctaaagttggtgaacaaaggtatactgatactaggcaagacgaacaagatagatgtattaccatcaagtgcactggtgtatctctgtattttgaactcgaagagtccaaagtacctgctggttctaatggaaacgctcttctgattaacttgattgatttcccgggacacgttgacttc

SEQ ID NO: 416734 - DNA, 526 bp, Oryza sativa
  unsure (1)..(526): unsure at all n locations
gggaaggcggcgatggagcggcaccagtcgatcgacgcgcagctgcggctgctcgcgccggggaaggtatccgaggacgacaagctcgtcgagtacgacgccctcctcgtcgaccgcttcctcgacatcctccaggacctgcacggccctcacctccgcgaattcgtgcaggagtgctacgagctgtcggcggagtacgagaacgacagggacgaggcgcggctcgacgagctggggaggaagctcaccagcctgccgccgggggactccatcgtcgtctccagctccttctcgcacatgctcaacctcgccaacctcgccgaggaggtgcagatcgcgcaccgccgccggatcaagctcaagcgcggggacttcgccgacgaggcctccgcgcccaccgagtccgacatcgaggagacgctcaagcgcctcgtcacccagctcggcaagtcgagggaggaggtgttcgatgcgctcagaaccagaccgttgacctcgtgttcacgngcattcacgcagtccgtca

SEQ ID NO: 416735 - DNA, 382 bp, Oryza sativa
aaccaaaacataggaggtttcatttcttcttctcaaagtagtgtagcatctttccttctttcaccattacataagcttaagcaataacagataacaaatcctcctcctcctctaggtaaaatattcaaacacaatacccttataagtacttattattaggaaagtagcgtgcatgggcataaatggcagcggggggcaggttaagaatcacaatgctgagcagcgaggaaacaaaacaccataatgggacagagcaaaagcctccgaaagggagcttttaggcagaaggcttctcccacttgaggggcttcaccacctcccaggtgaagtctgggtcgtcccttccgaagtgaccgtaagccgccgtcttgaggtagcgtcc

SEQ ID NO: 416736 - DNA, 511 bp, Oryza sativa
gttttatctaattaatttacctcctccacctcctggtcctccccccaatcggatcggcccggctcctcctcctccgccgccgccaccgccggcgcagataggagaagatggccgcacttgataccttcctctatacctcggagactgagaacgagggccaccgctgacaagctctgcgaccaagtctcagatgctgtgcttgatgcctgcctcgccgaggaccctgacagcaaggtcgcttgtgagacctgcaccaagacaaacatggtcatggtctttggtgagatcaccaccaaggctaacgttgactatgagaagattgatagggagacatgccgaaacataggcattgtgacagctgatggcggtcttgatgctgaccactgcaaggagcttgtgaacatcgagcagtagtcccctgacattgcacagggtgagcacggccacttcaccaagcgccctgaggagattggtgctggtgaccagggacacatcgttggatatgcaactg

SEQ ID NO: 416737 - DNA, 460 bp, Oryza sativa
cttttctcgtcgcctcgcctcgcgagttcgcccggcgcctgtgccgagcagccgccgatctccgccacgcgagcagcggcgccggcgtcctgctacttccgccgcgtcctcgccggtgagcaaccaaaggaaggatgagtaggcgctggagcaggacaatttatgtcgggaacctcccgggcgacatcagggagagggaggtagaggatctgttctacaagtatggacgcattgttgatattgacttgaagatccccccaaggccgcctggttttgcttttgttgagttcgaagatccccgtgatgctgaagatgcaatccgtggacgggatggctataattttgatgggaaccgtttgagggtggaacttgcacatggtgggagaggtaactcttcctactttaacaattctggtggaggtggacgccgtgggggtcgaattaggcatacagagtatcg

SEQ ID NO: 416738 - DNA, 408 bp, Oryza sativa
gggaagcaacacttcgatttagattaagcgcaagaaaattagacacaaaatatgagccatgaccaggcccaaccaaccaccatgatacaaccaagtatagttttaggtttcgacggacataaaaccatacagaatttaaaatttattctcggaagagggttcatctactcttctctggggcaaaacacaactcccctgtatctgcaggcctccatgaggagggctcgtctagttggggctgtgcatgtgacggatcaggtcgatcacacgggtgctgtatccccattcgttggcgtaccaggacacaagcttcacgaacgtgtcgctcaaagcaatgccagccttggcatcaaagatgctggacctgctgtcaccctggaagtcagtggaaacaagggcctcctcaac

SEQ ID NO: 416739 - DNA, 533 bp, Oryza sativa
cttttctctcgatctccattcgtttttgagttccgcgtttgttacgcctctctttggcgtcatgggcaagattaagatcggaatcaatgggttcggccgcatcggcaggctggtggccagggtggcgctgcagagcgaggatgtcgagctcgttgccgtcaacgatcccttcatcaccaccgagtacatgacatacatgttcaagtatgacaccgtccacggccagtggaagcatcatgaggtcaaggtcaaggactccaagaccctcatctttggcacgaaagaggttgcggtgttcggctgcaggaaccctgaggagatcccatgggctgcggctggtgctgaatacgttgttgagtctactggtgttttcaccgacaaggacaaggcagcagctcacttgaagggtggtgccaagaaggtcgtcatttctgctcccagcaaagacgcccccatgtatcgtggtggtgtcaacgagaaggagtacaagtctgacgttaacattgtcttcaacgctagttgcaccaccaact

SEQ ID NO: 416740 - DNA, 498 bp, Oryza sativa
acaactgtacaaggcaacaatatattctgggcagaaatcattaataccaaggcagaatgcccagcccaaaaccaatacaagagtgccaataataattaaacaaactcaacatctagtacttgactatagcaaactgaagcccgtaccccacacgaaacacaaacttcgatcactgatcgggcttcgctgaccaggccttgaccaatcttgacacgaacttaacaaagctgcagtgcagaaaaagcaccaaactaacacacgccaaacacttccaaattccaaccatggcctggtctcacacacgccccaattaagcgctgctcttgtgctcgccggtggcggcggcggcggtcttgtcttcctcgccggagcccttgtggtaaccgggcagtttctccatgatcttgcccagtataccctttttctccttcccatccgggctgctcacttcctctgtagccggcggttggtgtgctggcgccggagtagtggcaggag

SEQ ID NO: 416741 - DNA, 479 bp, Oryza sativa
ctcttcacagctcaaacaagtcaagagcgaatagggcttgctgatctgttgtttgattactttagatctcgagaggctttagctgaatccatcgatcgatcatggaggatgagaggaacacggagagccaccagggtggcgaggctgcagagcaggtggaggtgaaggacaggggcctcttcgacaacctccttggcaggaagaaggacgatcagccggaggagaagaagcatgaggaggagcttgtcaccggcatggagaaggtctccgtggaagagccaaagaaggaggagcaccacgccgagggcgagaagaaggagagcctcctctccaagctgcaccgatccagctccagctccagctcgtcgagtgatgaggaagaagaggtgatcgatgacaacggcgaggtggtcaagaggaagaagaagaaagggcttaaggagaagatcaaggagaagctgcccggccacaaggaccat

SEQ ID NO: 416742 - DNA, 517 bp, Oryza sativa
actacttcgacgtcgtcgccggcacgagcaccggtggcctcctgacggcgatgctcactgctccaaacgagaacaaccggccactgttcgccgccgacgaattggccaaattctacatcgaacactcgcccagcatcttcccacagaagaactgggtcttgtccaagatcgccggcacgctgaggatggtgagtggcccaaagtacgacggcaagtacctccattcgctgctccgagagaagctcggcgacacgaggctggacaaggcgctgacgaacgtggttattcccaccttcgacatcgctaacctgcaaccaaccatcttctccaaattcgagttgaagtacaagccactgaagaatgctctcctgtcggacatttcgatcagcacctccgccgcaccgaccttcttcccggcgcactatttcgagaccaaagacgacaatggccagacgagggagttcaacctcgtcgacggtggggtcgccgccacaacccgacattgtgtgcaatgagc

SEQ ID NO: 416743 - DNA, 528 bp, Oryza sativa
gtttcctatcacatttctcgaagttggtgtttggggtttcataacatactatgtcatgggatttgatcccagtgtaagcaggttcttcaagcagtatctgctgctacttgcactcaaccagatgtcatctgcactattccgcttcattgctggaatcggaagagacatggttgtgtctcacacatttggacccttatcactgttggcctttgcagcattgggtggctttatccttgcaagacctgacgtgaagaaatggtggatttggggttactggatatccccgctatcgtatgcacaaaatgctatttcgacaaatgaatttttgggtcacagttggagccaaatacttcctggagaaaatgtgaccttgggagttagtgtactaaaatctcgtggtatctttactgaagctaagtggtactggattggacttggtgctttgcttggatacactctcctctttaacctgctctacactgtagctctttcagttttgagtccattcactgactctcatgcattaat

SEQ ID NO: 416744 - DNA, 522 bp, Oryza sativa
  unsure (1)..(522): unsure at all n locations
agactgacaaaagatccaatattgcatatttaaaaacaaacggcggtttacacgtcaaacgaaacacaatgtaaatagaatccagaatcctgcatttaaaagggttactcagccaagcatgagtaccaaacgacacacactaaatatccacttagaacatagcagcacaccacgactccagcggatagtgattgccatgaaggcatgaaccggccatccatagagatatcactgctttcgttcaaggcttttcctcccgttcacggttccactgttcaatcttcgccctgcgttcctcgctgctttccctgactgggctccttgcacgccttggggggctgccatgcctgcgccttcctccatcatcatacctgtcatacctgctgcccccacccctgngttcaccaccaccaccaccacggtaactatcaccgccgcggtaaccgttaccaccaccgncaccgncgtcgtcacggtaaccatcaccaccaccacgataaccatcacgttcacgggggaaat

SEQ ID NO: 416745 - DNA, 497 bp, Oryza sativa
ttttgcgtcgcgccgcctcaaccgaagcaagggggaaagtttagattcagaacgggaaggagaaggtccggttcgtccgctctcgagctcaagtgtcagttgaagtgttttgaaagtcatggcggagcatttggcttcaatatttgggactgagaaggatagggttaactgccccttttacttcaagattggggcttgccgtcatggggatcgttgctcccgtctgcacaacaggccaactgtgtcgccgacaattgtgcttgctaacatgtatcagcgccctgatatgatcacaccaggagtcgatgctcaaggccaacctattgatcctgaaaagatgcaggagcactttgaggatttctatgaggatatctatgaggagctgagcaagtttggtgaggttgagaccctcaatgtctgtgataaccttgctgaccacatgataggcaatgtgtatgtccagttcaaggaggaagaacaagcagtcgctgcgcata

SEQ ID NO: 416746 - DNA, 456 bp, Oryza sativa
tttacatttctcgacacactcgcgcgcgcaggggcgcaattatggtgcacgagggtgtcaatggacatggccacgaggtgaccgtgaaggtgacgtccgcgtcgacggtggcgccggcgctgccggtgcaggagcaccggctgccgctgtccaacctcgacctcatcctgccgcccatggacgtcggcgtcttcttctgctacggcgccggcgagggctccggcggcggcggcgcgctgctgccggcggcgaccctcaaggccgagctggcgaaggtgctggtggcgtactaccctctcgccggcgaggtcgtggccaatacccgccgcgagggggagctcctgtgcagcggacgcggcgttgacttcgtcgatgcgaccgccggcgacgccgtgctgcgttagctccggcttgccgtggtcgacgagagcgccgagacgctcgtgcccaagaaga

SEQ ID NO: 416747 - DNA, 389 bp, Oryza sativa
ggacagcaactcaataatctttcgatatttcaccgagggtaatgtatggtaggaaaatcgccagacataacagagccggccagactcaactcaaactcaaccctatgatggtaaactgtttgcgattaacgccttcccctatgacaatgtttggagataaacgcttccaccaaaaaacgaatgtcggggagtgttctcccctacaagaattattattgttttcaatgttaaaaaggcaaaattcaccatatcccgttagtgcaggaccaggaataaacactgggtcgccatcattttctgccaagttaagcaccgaccgagccgtacttttttccaaagaagaggacctgcagctgggcatagcctgagagcacaccagcaccagcaat

SEQ ID NO: 416748 - DNA, 391 bp, Oryza sativa
tatatctcgctctatcctatctctccctcttcgagcgcctttctaggggaaggggggataaagcaagccatcgacccccgcctccggctccgaagggacattgttgctcgttggtgatggctgagcaggctaatcaaccgactgtcctttagaagttcggtggccagttacaccttggctccagcttttatgaaggcgtacgggctcgcaccatatgcccatctgtctaatcctatgacaggcgctttaccacaaggagctacatgacccagcgccttgccaatggtggcataaacgtcccaatgatggcgtcctctgcaatatttgctaatgctccagctcagaaaggtggcaaaaacttcatgattgattttctcatgggtggagtgtc

SEQ ID NO: 416749 - DNA, 474 bp, Oryza sativa
ttctgtccgcccggagaccaccaccaccacgcacctcacgccgccgccgcagacgttctggatcacgctcggccccggcgccgggatggtcaggttcaggttgtcgccgagcgtctcggcgtacggcggctcgccgacgacgaccacggcggcgtcgaacctccccgcgttccgccgcatgaagccggcgtcgggcgcctcggcgaagacgacctccgtggcggcatccacggcgcggcggatgccgtcgaggatggtggtgccgccggcggtgaggtcgttcccggcgaggccctgccaggtgatggtccagccgccgcactggctgccgaggtcgtcggcgtgggcgccggcgacgaggatggagcgcgcccgcttcggcagcggcagcagcggcgcgtcgccgggcttgccgttcttgaggaggacgagcgacttgcgcacggcatcgcgagcaaggtcgcggtgctcctg

SEQ ID NO: 416750 - DNA, 474 bp, Oryza sativa
gtttcttacttagcctgagctgtgcaatggggctgctccggctaggtagtatcggcggcggacccgagctcgtggcggtggtgtgtgtaggctgcattgggcggacggctatggctgttcaggaagctgaagtccgacgactagtacagtgtactacgtacagggactcccggcagacgattaactagaggtgcgtcgacctacttcgcaggactagctatggtgataatgtttggcatggaactgagaaattacttagcagccaatactagcacatctgtgattgctgctaggatttcagatggctagttgttacggatagattgtaacttaagcttgcctgcactttcatgcgaatgtgcatcagtagatgagatgcaatgttgtggcaacaaacagatcgtacataaccaaaactgctaccgcatattcaattgatcggaatctagtgactactggatccgagttatattc

SEQ ID NO: 416751 - DNA, 494 bp, Oryza sativa
gaatgatagacacccagccgtgccggacaccacacttggataaaccaaagaattgtgcaaccaaaatgtcggatcgatgcgatatcaactgtcaacaaaacgccagcgcacgacggtacagagagtggattaatagttgatggcgcggcacgtcttcctgatctggcggacgctgcccgccggcatggccagcttgctgagcttgacgagcgcctgcgcgaagtcgatgttccagagcgtgccgttctcggcgtactcgttgacgtgctggagcgtggcgttgctgccgacgagcgcccagtcggagttgaacagcaccaggttgttcttgttgttcttgtagtagctgttgtccaggtagtcgccgccgacggccggcacgacgtagctcgccaggtcccccagcgtcgccgcgtcgatgtcgcggatgttgttcgccagcgtcgggtttcgggcggatttgcaggtcttgctcaggacgttgtcgcggtagt

SEQ ID NO: 416752 - DNA, 505 bp, Oryza sativa
gtgtataagagacgccacatactcgatccaagtctgttgtgctagatcgatcgatcgagtatacgtcaaaatgaaggttttcatggcagtgtgcatgttggcggtggccgtccggctagccgccgccatcgtggtgccgtcggcggcgccgtgcgcgttgacggagggtttctacaatggcaagtgcggcaacgtcagcgttgagtccgtcgtgtacgatactgtgaaggccttcctcgatgctgacaaatccaagggcgccgccctcgtgcgcctgttgttccatgactgcttcgtcaatgggtgtgacggatcgatccttcttgataattcgaccacaaatccttcaccggagaagttcgccggtgcgaacctcggcatcgccgggctcgacgtgatcgacgcggtcaaggccaagctcgagaccgcatgccccggcgtcgtctcctgcgccgacatcgtcgtgttcgctggccgcgacgcgtcgaggtacatgagcaacggc

SEQ ID NO: 416753 - DNA, 541 bp, Oryza sativa
cctgtttcttcagacatttttcactgccttaggagcaaatttcttcactgggtcccctacagtcaggaatatcttgtcttcaccgatgagatccgtgaatttcgctgatcggagcttcaggatcacagctggccccggattggctagaatcagctgaggaatgccaggaaggatgctccgatcaatatcgtctgccagttccactgcagcagcaaccaagctagcatcagttgtacccaatactggtttccatcaaagaatgatgaagaagcaataagttcttaaaggaatgatattattttgtcctaccccatggtgaacatttccccagactgatttcatgaccgagatgatgtcagtcttcttggtgaagtttgcaattccaaggaagcctttaagctgctgaagggcaatggtgatggccgctcccgccatgaatccaacgatggcagcatgggacaagaactctatgataaaccctagcctgcagcagaggacaatctcactctatggtagccactcacctgaggaatccgagcgc

SEQ ID NO: 416754 - DNA, 477 bp, Oryza sativa
catcaaagcttgctgctgacacgcctgggctaacatgacagcgtgtacgtgatgcactatttccctcagttcttggaggaacttgtgctattcctggagcatttggttgtggaaaaactgtcattagtcaggcactttcaaagtactccaattctgaagctgtggtttatgtgggctgcggggaaagaggaaacgagatggctgaggtccttatggacttcccacaattgacaatgacattgcctgatggacgtgaagagtctgtcatgaaaagaactacacttgttgctaacacatccaacatgcctgttgctgctcgtgaagcctccatttatacaggaattacaattgctgaatactttcgtgacatgggctataatgtcagtatgatggctgattctacttctcggtgggctgaagctctgcgtgagatttcaggacgtctggtatgatgctttctttcgagatgctatttta

SEQ ID NO: 416755 - DNA, 489 bp, Oryza sativa
aacacaacacaagtctggacgaattaacgtagggtatagttaacaaggatccactgtcttattgttcttacgaagtcgtttagcaaaacagtgaggtccctacctactattactatatatcatgaccccaacttctcctcctctgccaacccactaccctctttcacatcttgatatattaagaattcctaccctggtataacaaaataatgactaaaactagtgcaaccactaagcttgaggctgcttctgaagaataatcttgttgttcaaatgttcttcccaagctcgaccttcttaaccagccgcaaggtgttgtggaagatggaatccagtattccagcaaccgtgaaaactcctccaatgatagcacaaacatttgtgatgaaatgggagaaggattttggaagttcagttaccaagacctgcatgggagaaggttcaaaatggaatttcacaacaggaacatagaagctgtgcaccaagctg

SEQ ID NO: 416756 - DNA, 529 bp, Oryza sativa; identical to SEQ ID NO: 394638

SEQ ID NO: 416757 - DNA, 504 bp, Oryza sativa
ggcggcggtggacgtgagcaaggcgctgtacgcgttcaccaacgccgtgatctgccgggcggtgtccgggaggctctcccgggaggacgaagggaggagcgagctgttccgggagctcatcgaggagaacgcgacgctgctcggcgggttctgcgtcggcgactacttcccggcgctggcgtgggccgacgcgttcctctccgggttcgccgcgagggcgtgcaggaacctccggcggtgggacgagctgctcgaggaggtgatcgcggagcacgaggcgaggctacgcggcggagacgatggcggcggcgaagagcacagggaggaggacttcgtcgacgtgctgctcgcgctgcaggaggagagccaacgccatgatgggagcttcaagctcacgagggacatcatcaagtcgctcttgcaggacatgttcgcggcggggacggacacgtcgttcatcacgcttgagtgggccatgtcggagctcgtcaagaacccggcggc

SEQ ID NO: 416758 - DNA, 424 bp, Oryza sativa
tgtgttttttttatttaaagggaactctgatgaacttattcctgccaaaattactgcacacacatgaacttgcaaactagaaccaagatgggctggacaaaaagctcccagcgattaacacgcgcgattcggcccattatttatttattcctaaattaacacagtccacgcggtctcccgtctcccagacaaaaaaaaaaaaaacacacagatcacactattcggctacttgtcgtcttctgacccgaccggcttggcgacgagccggagagggatccgccgccgcacggtgaatcccgggtcgtcggacatgtcgagctccccgggcggcgggatctcccagtcgaagaggcggaccaggctggccagcgcgagctcgacggtggcgagcgcgaactgcatcccggggcacacgcgccgcccg

SEQ ID NO: 416759 - DNA, 533 bp, Oryza sativa
gcgcaactttccctgaagccccggatccactcaacccccctccccctccgcgccagatcgttgtgtttatgagctcgaaggagaagcccactcttggaggccagcggattaagacccgcaaacggaatattgctgctcctttggaccctgcatcattctctgatgcaattgtccagatttatctggataatgctggagacctggaacttgttgccaaaagtatcgagtcctcggatctcaacttctcacgttacggtgacaccttttttgaggttgtattcattggagggcgcactcagcctggcacaataaaacctgaggaagaaggagagcgtcacccctattctgtacttgattgtgcagcgcagcgtgaagcaattttgccttctgttctctacattcagaaaacattgcgcaggaggcctttcttgataaagaatcttgaaaatgttatgcgcaaattccttcagtcactggagttcttcgaagaaaatgagaggaagaaacttgccattttcacagcacttgccttt

SEQ ID NO: 416760 - DNA, 519 bp, Oryza sativa
tttcgcacagcctccagtagcaccatttattccggctccttggcctcctccagccatttaacaaaaggttccagtgctttgacgaaagattgcctgccctttgggtttgaacccttgcggaaccaaaggaggatggtatcttcagctaggacatcttggtcatacagcgttctgattatttcaggaaatagcttcatcagcttagcatcctcatagcactgtgtctgaactttgtatatgagttcgagttcaagcctgccacttgtgcagaatgcattcaaaaggccagcccatgctttcacctgccgaagtgctgaattagaattttgttgctggttcttcccagaccactgaacagcctccatcagcacatcccatagcatgcgaacaacctctatatcaggaaatttagcatctttcacctgttgcttgacagcttctgtgacttcagatatttcagcctcttcattgatcatttggtgcaggggtaactttatcttcttaagttaacctaaacat

SEQ ID NO: 416761 - DNA, 511 bp, Oryza sativa
agggggcccccggcgggcccggcccggtatccggggggagccacagcgcgcgcgttctcgaacaaggagcgcctcctgccttatgggggtctcttcaatcttcctggaggcatggcggcgatggcggtgggctgcctcctgtgcgcgagggcggcggcagcggcgcccacgctgcgcctacgcggcggaggcaggggagcacgcctggtcttctcctgctgcggctcctcgtggtcgccgtacggggaaggagggttcagtgggaaggtggggttcctcggcctcgggatcatgggcgcacccatggcctccaacctcatcaacgccgggtgcgatgtcacggtgtggaacaggaccaggagcaagtgcgacccgctcctcagcctcggcgccaagtacgagcctacaccggccgatgttgcttccggttgcgatgtgaccttcgcgatgcttgctgatcccgatagcgcggttgcggctgcatgcggggccaatggagctgcacagggga

SEQ ID NO: 416762 - DNA, 382 bp, Oryza sativa
gcagggtaacggggaagtgaaacagattacaaatcggagcaccaaacatagcaacgattcaacgaatgtaccaccaccacaccaaaaccaaagctaaaagagtcgatgatgatttgggtatgcagtaaaaatctgaactgtaaagcgacgagccggtgatgatgagcgtgagatttggcattggtttttttataggaaagcgtccatttcgagcaccttgaggacctcatcctggttgttcagcttggccacctcgatgggggttttcccgtccagattctggggcgtgacagcagcgccatgcttcagcagaagatccacacattttttccgaccatatccagcagcgtaatgcagtggggtgttcttgttcttatccagt

SEQ ID NO: 416763 - DNA, 516 bp, Oryza sativa
ttttcatcgagggttttcctctctctctctcgcagggcattcatcccctcgtgtcgccgccggcggaggctgcggcgagccttcaccccccacccgcccaccgtcggcgagccacggcgtgggcgacctcctctcctctcccgatcccctctcgcccttaggtaggggcgtttgcccagttcccaccacacgcgcgtgcgtgggcgacgagcaccctaggttcggatcggatggaagaccagaagaaaaatgcaaaaccagacgggtcttctggctcgcaaaggggagctcccccggcacctgatgcaggccttcccaatccttgtgattcttctcagcttagcaacttgctcaatgatccatctataaaggagatggcagagcagattgcaagcgaccctgtgttcacccagatggcagagcagctgcagaagagtgctcatgtgaccggtgaacagggtggccctgcatgggatcctcagcagtacatggaaacaatgacacaagtcatgcaaa

SEQ ID NO: 416764 - DNA, 509 bp, Oryza sativa
caacgcctcgtgttactgaactattgttccacaaattcatagctgaagcagtttgcaggggcagcaacccaacacaccactaattccacaaaattgagaccacgcacaagcatagccaaaatcctatcaacccaaacacaccattaattcccccaaaacatcctcagattgccaaaatttacgcacagtaaattcatttccctgtctatgcattgtagttgtccacgcccagatccctcaaggcagatgtggcagcatctttgcagctcccgtgcatcatcttggttttcctaataagcttctccacaccatcattaagcaagatcgtccggttttcagggtttctgacgacaagattacggatcataaggcaggcttgcttctgagtttgagcagaagaagggaacttttgcattgcctgtatagccaaagtgccataccctgctcccattgcacgagctgcattttctggtgaccgcagtgtaaggatagtcaccatagacattacc

SEQ ID NO: 416765 - DNA, 498 bp, Oryza sativa
agcatcgaaaccaaaacagttactatctttcttatcattcaggtgaactccaaatttccctatgctatctgcaaacgggtctttcagaattcagagaaagggataacattacatttatataatctgacacaaacttaaaatcacaaatccacaaactatcttagtttgttccttttttccccttatgtacagctccatccaaatggaaatttcatgaatggagtttcattccatgttggcatgatctgcttcctggagacctggactgaagtccccccctgcattgctgcctgaacttctttgttttctgacagcaagagtggtttgcgcttgcaaacaccaaattaaggcaagagatgaaaggatttgaatcaatcacttggtgctcctgtgacctgatgaagccatgagcaccgcgaccgcgacgatgaacatgaacagcatgaacccgagcaggatatacgtctttcgcgacgatttccggtactccccaacagg

SEQ ID NO: 416766 - DNA, 548 bp, Oryza sativa
tttgagagttcagttcttgagttctctggagggggagcatttcatccctttctctgcttctgactttaggtttttgaaggcccccttgtgaattccctgttgtccatcagacaaggaggcctcaagatgtacatcatagaggacaaagggggtgccattgccctcatgctggcctccctcttcttcctggggacatggcctgcggtcctcaccctcctcgagcgccgaggccggctcccgcagcacacctacctcgactactcgatcacgaacctcctcgctgcggtcctcatcgcgctcaccttcggtcagctcggcgatagcaagcccaacatgcccaatttcttcacccagctcagtcaggataattggccttcagtgctgtttgcaatggcagggggtgttgtgctcagtatagggaacctctctacttagtatgcatgggcatatgtaggtctcttagtgactgaggtcatcagctcaagtatgggtgttgtaataggcacaacactgaattatttcctggacacccggatcaaccgagcaga

SEQ ID NO: 416767 - DNA, 496 bp, Oryza sativa
atttcaggacgccaacaattgttattgtctggtcgattcttctggcttcaatcttctcactcctctgggtccggattgatcctttcttagcaaagaatgatggtccacttctggaagagtgtggtttggattgcaactagggagttgggaactcccccatcggtgtgtgctgaaggaatacacacttggttctgtgtagatagaaacacgaaaggtcatgcgttgcttttgtcccatggtggtagctcagcctcatatctgcaatatttgggcaaaccggaggctgcggcaaccttgtgaacttcggccaccaagtacagccaaactgcgtttgattgtccagcattctttattactgctttggtggtaaatttaattgggtgagctgaacagaaggtgttggcattgctgttcatgtacaaacttgtgtctcaataaggcaggcaggaatggatctgctatggagtagaaaggtgatgcacagtatttatgtagt

SEQ ID NO: 416768 - DNA, 520 bp, Oryza sativa
ttatcgagcagtagctaattgcatagtgatcgatcggtctgtatagatggtggtggccggcaagaagcagggacggcattctttttctgcatcatcatcgtcgtcttcgtcttcttcttgttcagtagtgcagctgggtcatcatcagcgcccacagggtgaggaccctctcatcggcatcaaagcagcagcagcaggaggaggaggaataatgagaaagggcccgtggacggagcaggaggacgtgcagttggtttggttcgtgcggctgctgggcgaacggcggtgggatttcttagcaaaggtgtcaggtttgcgcggcggcgggtgatgagcatatgcgtgcgtgcatctaatctatcgattaattgttgatgatgtcgatcagatggatggatgcatgcatatgccgtacatagtagatttgatgatagtaactgacataaatataatgtatgcgtgcgatcaacgctggttgttggatcgtccgtcgtgtgtattggtggtgtgtggctgatgc

SEQ ID NO: 416769 - DNA, 519 bp, Oryza sativa
gctgcaaacattatagcataggttcaatgtcaaaatattacaatcatcagttcatcacatcacaaaccagcacacatgtgctctccaagaattacatcaaatcggattgttctcttccacccttattagcaaggagcactggagatgaacacatctcacataagactagacaagattacaacacacattgcttattaatggtctagattaatgaaaacaacatgaagcaaaccataattaaacataataagcatcatcagacacaaccacagaggctagtactactagttgtaatgcagctgcaaccatgccattgatgccaatggccatggcgtgcgagctctccatggtggctcacaactggaaggcgtcggccatggcggtggcgacgatgggctgggccgcgaacggcggctgccatgggcggagcagcgggtcgtcggggatcttccggatgtcgacaggcgcgcccgccacctgaggatctccaggacgctgcccagcgcctggaggcgcccg

SEQ ID NO: 416770 - DNA, 544 bp, Oryza sativa
  unsure (1)..(544): unsure at all n locations
ttctccccggagtcccctctgtttcgcagataaggcctttggttcccatctttttattacattcaggtcctcctagtttcttttcctttcgagtctactccttgcattcttgcgaggaagcccctcgggttggtcgaattttagtttccactccctctcctcgcggagtcgttgctgttcttgttcttggtcgaggttgaggttggtggcgtagatccgatctgaggaatgtttacctatcctttcctctaacgttcgccgtactccgatgaagttgaacgtgctccgccgccgccgttcccactccttctccgtcgccttcctctactggttctacgtcttctcatgaactcatcgccttcctcccaagaacaccatctccagcctctaattgattatatcttgatttctttttcatcctcctactagnttctttcttgtgttctttgngaattttttgatctcttgaagagatccggttcttggattaagttttggacaagaaccgtactgtgaccatgttcgtcgcttcgcgccggagctt

SEQ ID NO: 416771 - DNA, 521 bp, Oryza sativa
gaaagcaaaagaatcaaccagtaattatccatccctttcatctttctgcacacagtttccatgtccagcctacagtataatagtagattgaaatataaaaacacagtatgattaacccagcgacaatgcacaaacacaacctctttgtttttaattaagtcacataattaacgactgatgcatgcatgacacgtctcaaaagatcatcgtcgtagtgacaatgtatgaacttggtgttgaactttcttcttcctttgttggctaaaaaaaaaacttttgcagtaactggtttcatcatgtgtgcctatgagtagaacttgaacttgcagccacatgagattactatgatgaacatgtaatctatgagtagaacttgtatgtcttggcatctatgatgatctgccggagtcctccgattggtgacaggatcatgagcatcactccaagaatgatgcagatccagttggtgaaccatgagagactgaaccttcttggcttgtagattgctagccacatgatgc

SEQ ID NO: 416772 - DNA, 513 bp, Oryza sativa
tacccttcttcatcttcttctttttcgtcttctggttcttcttcttcttcttcctctgatattgctgcaaaagaagaagaggtagacgaaggaggaggagatcaggtgatcatggggactcaggtggcagataactacccaccggccaaggatggccggagcgcgcaggagaaggcgatcgacgactggcttcccatcacgtcgtccaggaacgccaagtggtggtactccgccttccacaatgtcaccgccatggtcggcgccggcgtcctcagcctcccctacgccatgtccgagctcggctggggacctggcatcgcggtgctgatcctgtcatggatcatcacgctctacacgctgtggcagatggtggagatgcacgagatggtgcccgggaagcggttcgacaggtaccacgagctcgggcagcacgcgttcggcgagaagctgggcctctggatcgtggtgccgcagcagctcgtcgtcgaggtccgcgtcaacatcgtgtacatg

SEQ ID NO: 416773 - DNA, 491 bp, Oryza sativa
gatcatgcaaatgtaattatgatttgacttcaatattcaaatccaaagcataacatccaacaagggagtcctcgagtatatcagtatatggggttttgcttcttacaccacgagaaacgcaagtttcagttggccagtgaacttaaacccctacaaaattacaaaaaaaaatgttgatctgcatcaatttacaccaattcagcagatgtgcttggttaaattttccagtttgtaccatcacctgttaaccaaagcacaaatcaatcatgtgactattcagactctggctcgcatggtctccatactgtaccagtaggttcatccatgagggctatgcctttgctgcctagctgtttcctgatttggtcagacacatcaaactgcttgtttttccttgcagcagttctctgctcaatttgctcctgcaacagttcttcagtcaaccctgctctcttaaagctttatcccaaagttgcttcagtgcctctgcc

SEQ ID NO: 416774 - DNA, 502 bp, Oryza sativa
cgcgggtcttaggcactgaagcaacttaaggataaagctgggaagatagcaaggttgactgaggaactgttgcaggagcaaattgagcagagaactgctgcaaggaaaaacaagcagtttgatgtgtctgaccaaatcatgaaacagctaggcagcaaaggcatagccctcatggatgaacctactggtacagtatggagaccatgcgagccagagtctgaatagtcacatgattgatttgtgctttggttaacaggtgatggtacaaactggaaaatttaaccaagcacatctgctgaattggtgtaaattgatgcagatcaacatttttttttgtaattttgtaggggtttaagttcactggccaactgaaacttgcgtttttagtggtgtaagaagcaaaaccccatatactgatatactggaggactgccttgttggatgatatgctttggagttggatatttgagtgaaatcataattacctttgcctgatcaaaaa

SEQ ID NO: 416775 - DNA, 502 bp, Oryza sativa
aggtaaaaggtttaattaacataggagtacagcagaaaataacaataaaaagatagcatggaattaaagccgctgctccaatttaccatacgcagcatttgattacaggaataccaaaaaactactaccgatgacaggtattaattattaaaaagcacaggttcagattattgcgacaaaagtttttgatacccgtaagattggacgcttgatagccaaaccacactcagaaccctaaatatgcatacggaggatgtccaatcggatcttcagccaccaccagaggcagatcagtacttgtagtccttgacgtgaaggctctcagaggcaccctcgccgagcacagcatcaccctggtatgtaccaagggtagcctcagagttggccttgcacctggtgatgaaggccttctgcgccttcaccacgttctccgtcttgccgccccaggccttgagcgtgctctgctggagagcacggccgaaggagaaggacagagcccacg

SEQ ID NO: 416776 - DNA, 572 bp, Oryza sativa
  unsure (1)..(572): unsure at all n locations
ctcgctgcctgctacaatgttccctcaacgaacaccatgtcctcctggagggttcccttctgaagcccaacatggtcaccccaggatctgaatccaagaaggtttcccctcagctcatcgccgagtacaccgtccgcgccctccagaggactgtccctgctgccgtgcctgccattgtcttcctctctggtggacaaagcgaggaggaggcgaccgtgaacctcaacgccatgaacaagctcagcaccaagaagccgtgggctctgtccttctccttcggccgtgctctccagcagagcacgctcaaggcctggggcggcaagacggagaacgtggtgaaggcgcagaaggccttcatcaccaggtgcaaggccaactctgaggctacccttggtacataccagggtgatgctgtgctcggcgagggtgcctctgagagccttcacgtcaaggactacaagtactgatctgcctctggtggtggctgaagatccgattggacatcctncgtatgcataattagggttctgagtgtggtttgctatcaagcgtcatctacgggatcaaaaact

SEQ ID NO: 416777 - DNA, 434 bp, Oryza sativa
cattccgatagatagcaacaagcagttcaaacaccataaccaaagcgaactcaattcatggtaacatcacggacgaagaacacctaacactggatggatggatagagggcttctcgactcgagagagccactggacacgataacgactcgactcgatgataagatgattctgacacggatagctaaggataactggccacgatgggccccaccaatcagttcctccagttcccgccggagtcgccgccgtagccgccgccacggctgccaccgtagccgccgccgccgccgacacggccgccgccgtagccgccgccgccaccgtagccgccctcacggcgcccgtagccgtcgccgacaccttcttcgtagccgccgcctccacgaccgccggcgtagccgccaccgccgccgccgtagcccccgtctccgcc

SEQ ID NO: 416778 - DNA, 485 bp, Oryza sativa
ctttacggccgcaacatcaccgtcaatgaggcccggtcccgccgctccggcggcggaggcgggggctacggcggcggcggtggcggctacggcggcggtcgtggaggcggcggctacggaggaggtggcggcggcggctacgggcgccgtgagggcggctacggtggcggcggcggctacggcggcggccgtggcggcggcggcggcggctacggtggcagccgtggcggcggctacggcggcgactccggcgggaactggaggaactgattggtggggcccatcgtggccagttatccttagctatccgtgtcagaatcatcttatcatcgagtcgagtcgttatcgtgtccagtggctctctcgagtcgagaagccctctatccatccatccagtgttaggtgttcttcgtccgtgatgttaccatgaattgagttcgctttggttatggggtttgaactgcttgttgctatctatcggaatg

SEQ ID NO: 416779 - DNA, 416 bp, Oryza sativa
atgcaactccttttttccatatcatttatagaaagatcagcaatacaaacacaaccatccggacaagaggatggtaacatctggaagagaagtagagagctcttagctctaaattatcactccagttagaggaagacatagccacagctaatacattacacaagtgacactgcaaggcaaagtgttgggctcatatacgagcaactatggagcatacaaggcctaatggaggaaatccctcataggatcatcatggggaattctcttcatgcgggaagcctccatgtcttccggggggacctcatcattccatttcacattggacttcctattcctttcatccatctcctttttcctcctcgcaccctccttttttagggcttcatcaagcagctttttgtcaagaacaatatcat

SEQ ID NO: 416780 - DNA, 507 bp, Oryza sativa
gttctcctcgcgagcgatccccacctcgccgcggggcgcctacatctcgccggcgcgtagcgctcccccgaggtccactcctctcctgccggagaagcgggcctaggcgaagagcagcgccatggcgaccgcttcggtgtcgtttaagtctagagaggatcaccggaagcagctcgagctcgaggaggcgaggaaggctgggctcgcgcccgccgaggttgacgaggatggaaaggagatcaatccccatatcccccagtacatgtcctcagccccatggtatcttaacgctgataagccgagtttgaagcatcaacggaattggaaatcggacccgaactacaccaagtcatggtacgataggggtgctaagctttttcaggctaacaagtacaggaaaggagcttgtgagaactgtggagccatgacttatgacaagaagtcatgcatggagcgacctcgcagtgtgggagctaaacggactaacatcaatttagcaccagatga

SEQ ID NO: 416781 - DNA, 466 bp, Oryza sativa
gttggtgatccgcacgaaccttgtgaagaagtggggggagttctaactttgagatgggtgagaacaaggaagactacaacaagttctacgaggccttctccaagaatctcaagcttggcatccatgaggactccaccaacaggaccaagattgctgagctcctgaggcatcactccaccaagagtggtgatgagttgaccagcctcaaggactacgtaacccggatgaaggagggccagagtgagatctattacatcactggtgagagcaagaaggctgttgagaactcccccttccttgagaagctgaagaagaagggatatgaggtcctgtacatggttgatgccattgatgagtacgctgttggacagcttaaggagtttgagggcaagaagctcgtctcttgcaccaaggaaggtctgaagcttgatgagagtgaggacgagaagaagcggcaggaggaact

SEQ ID NO: 416782 - DNA, 497 bp, Oryza sativa
aaaagacactgaaaggtctcattttattcagagcattttgttcagcagcactcctaccaaccaacgctattcaaatcagagatgaatagctggtgggtctcacaatcagatcaagccattctcatacagttcagccaactccaacatctcaaaactatagctgcctctgcaccaaaatcttaacatttatacagtaacaggcacaacaacgaaatggcaggtaaatttctcctcaatttgccatcgaaggcatcagtttttcagtaccctctgtgattagcacactaaaaaaaagcatgtctggctttgatttattttgttttggtctacacgatgatgctatcatggggacaaaaaaaaagaaggcctggggaaaatccatcaggcttgtatagaactccccatctgttcaatggtgaatggcaatcaatcgcggtacgctgccatgaagccctcatggaatgccttgaagcgggagatgatcgcggggatcttct

SEQ ID NO: 416783 - DNA, 423 bp, Oryza sativa
tttgatactggcttcagtgctccagttagagagcggattttaaagtggcgtgagggaacttatgttccaatatcactggccagatccttgccagcctcgtcatgaatccaccaaaggctggagatgcatcatatgcttcatacaaggcagagaaagatggaatcctccaatcattagctcgccgcgcaaaggcattggagaatgctttcaacagtcttgagggaattacatgcaacaaaactgaaggagcaatgtacctcttccctcagcttagtctgccacaaaaggcaattgacgctgctaaagctgctaacaaagcacctgatgctttctatgcccttcgtctcctcgaggcaaccagaattgttgttgaccctggatctggatttggtcaagttcctggcacatggcacattagatgca

SEQ ID NO: 416784 - DNA, 470 bp, Oryza sativa
gtaaaatagcagcaatgcatttatcatattatatatgtagctacaaactacatatagcaagctataagtatgtacagcaatgatggcaggtaatattgccatatcaattttcctgctatggtatgtacaccagagaacgagaacaatttacatgatttgggatggtggagcatctgaaataatgcacagttcttcagacttcacctacggttcaagcactactgcccccaatcgatcatcaaactacaggggcaagagaaaaagataacttgggtatattgcaggagctgagaatatttgctaagttttcttcacctatgatttaagcactaaaacccctatgggtggaactccaggggttggagggaatgctggtgcaagcctgcacagcaacctttgccatcgcttaagcagagatgccagcatttgcagatgtttgccaaggaacgcatatgcttcattccatactg

SEQ ID NO: 416785 - DNA, 489 bp, Oryza sativa
ttccgagcgaagcgaacgaaccaattctcctctcgttcctccgcacggaacagcgccgcgccgcgactcgccgcgaagccatggcggcgcgcgctcgcctccgcctcgtcctgcccccgctcgcggcgctgctcctcttcgcgcacctcgccgccgtcgcggtggcgcggccgcggtgggaggaggagggcagcaacctccgcctgccgtcggagcgcgccgtggcggctggcgcggcggcggacgacgctgccgaggccgccgagggcaccaggtgggccgtcctcatcgccggctccaacggctactacaactaccgccaccaggcggatgtctgccatgcctaccagatcatgaagaggggcgggctcaaggacgagaacatcatcgtcttcatgtacgatgacatcgcgcacaacccggagaatccgaggcctggtgtcatcatcaaccatccccagggtggcgatgtctatgctggggtcccga

SEQ ID NO: 416786 - DNA, 447 bp, Oryza sativa
ctaaaaattctgtgtgtattgtattgaatgtcgctccacatgagagcagaaatgcctacctagctacttctctattgctcaatcactgtggctcggtacaaaccatttcttttactatacaaaaatgaagctaaaatcattggaagcacacttaagtatctgctgagtatggtctgggatcaccataactagttcccttgaactcatagcccatctttgtatcaatctcttcacaaggtatatagctaaccaaattctccatcaaatggccaggtcccttaagcctctgaatcatgctgtcgaaggggttggttctcgttgttctggctgtcaagcggcatgtactgggacatgatggccatgatctccgagtccatgtacgacctgagtctgtacttgtagaacacatagccggtaatccccacgccgggtacgcacgacgccacc

SEQ ID NO: 416787 - DNA, 440 bp, Oryza sativa
tttagagagagagagagagagagagagagagaggggtgatcgagttgcagcaatggcgaggagggcgccatggctcgccgggattggggccgtgccgttcttgatcgtcgtcgtggtggcggtggtgggcgccgtcgtgccggcgatggggaggttcgtggtggagaagagcagcgtgagggtgctctcgccggagcacatccgggggcaccacgacgccgccatcggcaacttcggcgtgccggactacggcggcacgctcaccggcgtcgtcgtctaccccgacaagaaggccaccggctgcgccgagttcgacgccaagttcaagtccaagtctcgccgcccggtcatcctcctgctcgaccgtggagagtgctacttcgcgctgaaggcgtggaacgcgcagcaggcggtcgcggcggcggtgctgatcgcggaca

SEQ ID NO: 416788 - DNA, 398 bp, Oryza sativa
atcaaacaaaaaatgcatgatctattgctcttgcattgaaactaaaagcaaattgtttagggaactacatcccaaaatggaataagcgctgatatataagatttaagattcggatttggtgctctcgtctataattgtcagagagaccccctcacggtatcctcaactcaaatttcgtctttctcagaaaagcaactctttgtatcagtcaaaaatttgcagtattattttccagacaaagcacaaagcagctctcaggctgcgattggtggcgcgcgcggagtttatatgtcgaggagcaatctccgtgggtcttcaaccacgtccttgatgcggcgcaggaagtagacagcttctctgccgtcgatcagcctgtggtcatatgtcagcgcaaggta

SEQ ID NO: 416789 - DNA, 236 bp, Oryza sativa
cttgcaaagaaggctactgaggtggggactcttaattgatgagatggcaggaggaacatttaccatttttaacggtggttgttacagaagccttatcagtacacctattatcaaccccccacagtgctgctattcttggaatgcactccattgtacaacgccctgtggtcgtggacggtaacattctttcgaggccaatgatgtaccttgcgctgacatatgaacacaggctgatc

SEQ ID NO: 416790 - DNA, 470 bp, Oryza sativa
acacacgccggactctccccttctctctgtctcgctccttcgttcgctcgctttatcccccccgaataaaggcgagaagccgcagcggcggacgaagaagagggcagatagaaatggcggcggagacgttcctcttcacctccgagtccgtgaacgagggtcacccggacaagctgtgcgaccaggtgtcggacgcggtgctcgacgcgtgcctcgcccaggaccccgacagcaaggtggcgtgcgagacgtgcaccaagaccaacatggtgatggtgttcggcgagatcaccaccaaggccaccgtcgactacgagaagatcgtccgcgacacctgccgcggcatcggcttcgtgtccgacgacgtcggcctcgacgccgaccgctgcaaggtgctcgtcaacatcgagcagcagtcgcccgacatcgggcaaggggtgcacggtcacttcaccaagcgccccgaggag

SEQ ID NO: 416791 - DNA, 422 bp, Oryza sativa
  unsure (1)..(422): unsure at all n locations
gtgtgttgatagtacactgtcatggaatgctcgccgccaggttgctcttggttcaggaaaggccttagagtatctccatgaaagcttccagcctccaattgtgcatcagaactttgaaccggctaatgtactccttgataataaattttcagtgcgtgttgctgaatgtggactagaaaaattgttggcatcaagttctgncactcagttggcagatcgaatgcattcactgttgaactatgaaccaccggaattccgggaatctgggatagttacagaacaaggtgatgtttacagttttggagtagtgatgctagaaattcttactgggcgtaaaccatacgacagttcactcccacgtgctgagcaacattttgttagatgggccaattctcagcttcatgacatagaatcactgtcca

SEQ ID NO: 416792 - DNA, 434 bp, Oryza sativa
gacaataatttggcatgttttcaactaggaaaactcgtcttgctcgatcccccaacaaaaaaggcataagcatctgccaccgattttacacactcagaaacctcacctgacgcctaataacatgtaaacggtgtccatacgttaaatttatttaaacgcaacagcatccgaaagcacctaatatgtccatagttccccactgcttatcatcatcatctagtcttagccaccaccagaaccgtacttcttaccaaagacgaccacctgcagcttgtcatatccagcaagcacaccagcaccagcaacagcacgcagaatgttagcaccagcgcccttgaagagtgacttcgcaccctccttcgcaacaatctgcttgaacgcatccaaggagctgttgtacttgacagcctcaccagatgtcatcatcatccgac

SEQ ID NO: 416793 - DNA, 434 bp, Oryza sativa
gtcggatgatgatgacatttggtgaggctgtcaagtacaacagctccttgggtgcgtttaagcagattgttgcgaaggagggtgcgaagtcactcttcaagggcgctggtgctaacattctgcgtgctgttgctggtgctggtgtgcttgctggatatgacaagctgcaggtggtcgtctttggtaagaagtacggttctggtggtggctaagactagatgatgatgataagcagtggggaactatggacatattaggtgctttcggatgctgttgcgtttaaataaatttaacgtatggacaccgtttacatgttattaggcgtcaggtgaggtttctgagtgtgtaaaatcggtggcagatgcttatgccttttttgttgggggatcgagcaagacgagttttcctagttgaaaacatgccaaattattgtc

SEQ ID NO: 416794 - DNA, 386 bp, Oryza sativa
ggggaataggggaatagtcattcgcccatcaggatagtagacaatgggatggtttcacgttggccaaatttacaatgtacagtatgtaaatttacaatggtttcaggttggccaaatttacaatctactagcatactcatcatgcttgctcatgctgcacaatggccaacatctcacttgcaccagattgccctgctcgcatcctcatgctgataatgaaggcaatgagcgtacaaaagccagcacacatgatactgaaacctttgaatttgaatggcgctgtttctgaaaggacccatgctgttagaggggtaaaaattagtggagctaatatgctggcaaacgagcttatgcccgatatacagccttgagcaattccctggtca

SEQ ID NO: 416795 - DNA, 418 bp, Oryza sativa
gtttgagacgccaggatgaaggacttggctggggtggggctctagttcgtggcggcgttcatgttccacttcgcctcctacatggtcatcccggcgatcaccgacgtgacgatggacgccgtctgccccggccgcgacgagtgctccgtcgtcatctacctcagcggcttccagagcgccatcacagggatgggggctcttgtggtgactcccatcgtggggaatttgtcggacaaatacggcaggaaggcgctgatgacactgacggtgaccgtggccattctgccgttgtttatactggcctgcaaccgctccaaggtgtacttctacgagtactacgtcgttaaggtcctcgccggcatctttctgcagggcagcaagcattgccttttgctcgcctacgtggcccaccaaagtc

SEQ ID NO: 416796 - DNA, 443 bp, Oryza sativa
aaaaaaaataccagatatccaattgatactagactcgagcataaattgatgaaaaaatatataactacatacaggcccaactgcaatctggacataccaaggacaagaattactggttcacataaaacacaagagatctgaaaacacacttcagaggaacatagcaggaaaatcctttttagcgactacagctagtaggatgcttcactggaaattgataaaacaagtgttgcatcttaactaggactatgcaacacacaatctcctctgccttagagtatggttccatggctcacttggccatcatgaccttcacaaactcctcatagtttatctgaccatcaccatcaacatcagcctcacggatcatcttatccacctcctcgtcagttagcttctcgccaagatttgtcatcacatggcggagctcagcagcggagatg

SEQ ID NO: 416797 - DNA, 507 bp, Oryza sativa
ttttcctcctcccatctgcgcttcccttcttcggcttcttcgttgatccactcacccgccgcgcgcagaggaggccatggcggatcagctcaccgacgaccagatcgccgagttcaaggaggccttcagcctcttcgacaaggacggcgatggttgcatcacaaccaaggagttgggaactgtcatgcgttcactagggcagaacccaacggaagctgagctccaggacatgatcaacgaggttgatgctgatggcaatggaaccattgattttcctgagtttctcaatctgatggctcgcaagatgaaggacactgattcagaggaagaactcaaggaggccttccgggtgtttgacaaggaccaaaatggcttcatctccgctgctgagctccgccatgtgatgacaaatcttggcgagaagctaactgacgaggaggtggatgagatgatccgagaggctgatgttgatggtgatggtcagataaactatgaagaggttgtgaa

SEQ ID NO: 416798 - DNA, 475 bp, Oryza sativa
caaggcaaaaacagataaactccactttaactttggcaaaaagaagtggttgctcagtttggtgccgacagaggtttattaacagtagaccaaaatgtttctaggggaaatcaagccaaaataattccacttcaaaaggatttggggttcccaacttcagacccctgaaatatgtcatgagcaccgctcatcttgtgccagcaaaaaataaacttgatgttggtatactacaaatagttaattatttgacagatgcttttacagctttctcagccgcatcatcaagatcctctgcagtgattaaggtcattccactttcctttagaatcctcttcccttggtcaacattggtgccttccaaccgaacaacaacaggcaccttcaggtcaacctgttttgctgcattcactattccacttgctatcacatcacatttcatgataccaccaaaaatgttcactagaatagccttcac

SEQ ID NO: 416799 - DNA, 495 bp, Oryza sativa
ttttcagcgaaagaccacgcgtgccatccctcggggcttgttgggtttccggatcggaggagagagccccccacgccgccgcagccatggttcgcggatcgctcgggaagctggcctcgcgcgccctctccgtcgccgggaaattgcagcaccagcagctccgccgcctcaacatccacgagtaccagggcgcggagctgatggggaagtacgggatcaacgtgcccaggggcgcggcggcgggatcggtggaggaggtcaaaaacaccttgaagaacgtcttccctagtgagaaagagatagttgttaagagtcaaatcctggctggtggccgtggattgggaacattcaaaagtggactgcagggtggtgttcatattgttaaggcagaggaagctgaaagcctcccaacaaaaatgcttggccagattctggtaacaaaacaaactggtccacaggggaagattgtgagcaaggtctacttatgtgagaaac

SEQ ID NO: 416800 - DNA, 395 bp, Oryza sativa
acgtaacaatacgctatgcccaagacaagtcaatactacaacatctgtggcgagtacagaggtacaaaagtcaggcaccgtaagcctttcgattaaaaaccaaactgaaacacgcacgattttttaacaccccacgaaaaacaatctgatagctagctcctttggtggtggaacctaaagagctttatcttcccaaaacatccacatcattatctgtcatgactatatagtttcgatacgtaaaaaggcagcgttcactcagggatatccgccatgtcttcctttcatttaagcccggccaagatgcttcaagccttgttggcaatgttgttggaaagccagtcaagcccctcatacaacccctcaccagaggtagcacatgtgctctggatgta

SEQ ID NO: 416801 - DNA, 409 bp, Oryza sativa
cgacccacagcgcgcgccttttctgctctgcacctgcgatccatacgcgcccgcgaggtttaaagagccaggcggcttctctgggagagcaggggagagaaggagaggaggaaatactccccctcacctgcgtgagcagatcctatctccagctgtagcggagatggtgctcacgttcacgaaactgttcaggcgtctcttcggcgagatggagatgaggattctcatggtcggcctagctctccgcggtaaaaccaccatcctctacaagctcaagctcggcgagatcttcacccctatgcccaccattcattttaatgtcgaaactgttgagtacaagaacattagcttcaccgtttgggaatgttgtggttacgactagatcaggcctcctttggaggccctattt

SEQ ID NO: 416802 - DNA, 133 bp, Oryza sativa
gccgccttgatgcgctgcaggtcgttcggccggtccggcttgtggccgacggagagggggacggggacgccggcgcggcagaggacggtacgggagtcgtcggagttgtcgactacgactcggttaggaccta

SEQ ID NO: 416803 - DNA, 498 bp, Oryza sativa
gcatagaaacagtaatatgctaatcataattgtgaacaatgaaacgacagtcctaaaaagagcagagcgacagaacctctgcacacatagaccagttttacatgcaagtatcttgaggacataacttgctgctccaaaattcaaatttatgcagccaactcgccagcttctagtttatagtagaagatatcgtacaaccagaacgatagtcatcaagggctgaatagactatatgcaaaacatgcatatcggatatggaggtaagacagcatactgaaatcttacaaggaagacacaaaggagttgatttatttcttctcatcttctggcttgtctgatttgtcttccttcttctcttgctcgccctgcccatgcaatgatgccagcaaatctttcacagaggggtcattggggtcaacaccagggagagagttaaggatggatgtaacaaatgatctgtcttcaaacaccttgctcatatcagactgactagacccg

SEQ ID NO: 416804 - DNA, 526 bp, Oryza sativa
ctcttaccaagccaaccccctcgacggccggaacacgatcggggggacgcagccatggtgctcgaggcgacgatgatctgcatagacaactcggagtggatgcggaacggcgactactcgccgtcgcgattccaggctcaggccgacgccgtcaacctcatctgtggcgccaagacccagtccaacccggagaacacggtgggcgtcatgacgatggccggaaagggcgtgcgcgtgctcgtcactcccaccagcgacctcggcaagatcctcgcttgtatgcacggacttgaagttggtgctgaagcaaatttggctgcagcaattcaggttgctcagctggctctgaagcatcgccagaataagaggcagcaacagcggattatagcttttattggaagccctgtgaaatacgacaggaaagttttggaaacaatcgggaaaaagctgaagaagaataatgtggctcttgacatcgttgactttggtgaaaccgatgatgataagcctgagaaactggaagcgc

SEQ ID NO: 416805 - DNA, 519 bp, Oryza sativa
agtagtaggagattaatcattccaaagtagtagtcagcaataccacgacacgaacaaaacaaggtcgatctcttgtcagaatcggcgtccgttttacaagggtcagcgcagcgcagccaaccaaaactcccacaatcccctcccaaaaccgaaccgtttctgtgacctgaactggatcctgtgtccccccaagctttgtacttgtacttgcttttggtgctcttttgtgactcaccattgtcctagctaagctagctaccatcctgtcctccccttgactcgtttgactcccttccaatccccctcctcccaaattctacttcaagaaatacagaaaagaaaagaaaaatcaaagagtcctgactttgcaaacagtgtaccagctctgtcttcttctcccctcttcttaacatggctggttgtcaggagcaggaatttacatgcatgcaactcgattacagcccaagcatgatgtagtagacgagggtgataggcacagcgatgagcatgcccaagatg

SEQ ID NO: 416806 - DNA, 509 bp, Oryza sativa
  unsure (1)..(509): unsure at all n locations
cctantaaatgctcctcctccgccgcctcctctcgctgagctgagctgagctgtgaaatagtgccaccgagtgagcgctgagctgagctcgaagcaagagaggaagaggaggaggagggaagagggggggcgaagatgattacggcggcggacttctaccacgtgatgacggcgatggtgccgttgtacgtggcgatgatactggcgtacgggtcggtgaagtggtggcgcatctttacgccggaccagtgctccgggatcaaccgtttcgtggcgctcttcgccgtgccgctgctgtcgttccacttcatctccaccaacaacccgtacacgatgaacctccggttcattgccgtcgacacgctgcagaagctgatggtgctggccatgctcacggcgtggagccaccttagacgccgggggagcctcgagtggaccatcacgctcttcttccttttcacgctgtccaacacgcttcgtatggggatccctttgttcagggcatgtac

SEQ ID NO: 416807 - DNA, 511 bp, Oryza sativa
aaaaaagcaagcattgccaaaatgcttttattcatatatagacttacaaagatcacaacaaaggttccaatgataaatatccatgttctctccaccctgggctgctccttacattaaaagaatggagatagctatggacctccttatccaaattaagcgtagcacattgaccataaaatttaacaacagttcctcccaccctacaagcgactcagcagcaagcagcaaccaaatattaccgaaaatttgaagcatttcacatcttagcagcacgcgcgatcttgaaccactcggtgtggaaggagccgggcatgtcgaccctctcgtaggtgtgagccccgaaatagtccctctgtgcctgcaccaggttggcaggcagcctgtccctccggtaggagtcgaagtacgcgagactcgccgacatgcctggggtgctgacgccatttgtgatggcaaggcagaccaccctgcgccatgccgtttgcctgtccatgatcttctgagcgaactc

SEQ ID NO: 416808 - DNA, 430 bp, Oryza sativa
gtttttgtcagttacccagatctcatcttacgcggggagattttaaagtcactagagttggtcttgctggccttgcggtcatggggcagaaccttgccctcaacattgcagagaaagggttccctatctctgtctacaacaggacgacttctaaggttgatgagaccgttcagcgcgccaaggtagaaggaaaccttcctgtgtacgggttccatgaccctgcatcctttgtgaactccattcagaagccacgtgttgacatcatgcttgtcaaggctggtgcaccagtggaccaaaccattgcaactcttgcagcacacttggagcagggtgactgtattattgatggaggaaatgagtggtacgagaacactgagaggagggagaaggcaatggaggaacgtggccttctctatcttgggatgggtgt

SEQ ID NO: 416809 - DNA, 456 bp, Oryza sativa
  unsure (1)..(456): unsure at all n locations
ttatcatccagaagattacaaannagcaatgaagatgggttgcttttaaaaaagcttcgggctgttcaaataagaacagaaaattcacgtggtctatggcagccattcaccgctcttcttggggatgtccctagtgtcgatgtcaagaagaatgttattgtagccattacctctgacaagggtctttgtggtggtatcaactcaacgtcagttaaagtcagcaaagcactccacaagttgacttctggaccagagaaagaaagcaagtatgtcatattaggagaaaagggtaaagttcaactcattcgtgactccaaggataacatcgagatgacagtatctgagttgcagaagaaccctatcaactacacacagattgctgtgctggcagatgatatcttgaaaaatggtgagtatgatgctctaagggttgttttaacaagttccactcgggca

SEQ ID NO: 416810 - DNA, 356 bp, Oryza sativa
agagattcaaagataagcgatgttactttgtttttaccaacatttacatacaagcggtacaacacatattgccagaaaccacttggttttccagccataatttttgacaattaatgacgcgcgcgcgcacacacaatgctggattcacagggtcacacagccatgagccatcaaactggaagggctctgtttgttcatcacatagtcacagatcgccttggcctttagcagttgcaggggttgcacttgcagctggaaccacagctgcagccatgggcaccctcaccagattcagctgctttgccaactccctcaaattgccccttctcaggtgcaacaccgaggacaggggttgt

SEQ ID NO: 416811 - DNA, 410 bp, Oryza sativa
gtcctgaagagtttacaagtgacccagaagagcgagatgtttaagcggtggaaggcgcaactgtggttcctgcggatgcagcggtggctgcggaaagatgtaccctgacctggctgagaagatcaccatcaccactactactacaaccactgtcctcggtgttgcacctgagaaggggcaatttgagggagttggtaaagcaactgaatctggtgagggtgcccatggctgcaactgtggttccagctgcaagtgcaaccccttgtaactgctaaagggccagggcgacctgtgactatttgatgaacaaacagaagcccttccagtctgatggctcatggctgtgtgaacccttgaaatcagcattgtgtgtgcgccccgcccgtcatgaattgtcaaaaattatggct

SEQ ID NO: 416812 - DNA, 437 bp, Oryza sativa
tttattcctcctcccaactcttgcttccgttgtgcgtgctttttaatgccgacagggctacacctgaatagctcatcctcacctgatcagctgaacctgtttgagagaaagaagttagttggccatctcgccctcgctagaaaaaggaaaaaaaagaaggaaaggagaaggaggagagagcttgctttgctgctgggttgttgctaatggtgttctactacaaggcgaggccggacgccggcgactacaccatctacatgggcgccgacaagaacgagaacgaggagctcatcaagtacggcctccccgaggacgtctggttccacgtggacaaggtatcctcggcgcacgtctatttgaggctcaagaaaggcgagtcgatagatagcatctgcgacggtctgctggaggactgtgcacagcttgtaaaggcttat

SEQ ID NO: 416813 - DNA, 327 bp, Oryza sativa
gggttcccagtctcgaccttgaagatcgtggagtttctggttcttcaatttgattccgaacgactgtcccactgatagacgtgtcttcatacgaggagaatctactgggaggcttggaactgtggttagtagctgcagggtacacctgcgatgctcttggcgagcgcagtacaacagtttcagacccacttatagattggtcattatcttctgtagaactctctagtcttccatattcactttgtgcatctttctgcgacgggttttgtgagatcgactctttagaccccgtccattatgtacttccaatgattttctggtttcagc

SEQ ID NO: 416814 - DNA, 487 bp, Oryza sativa
tttgtttgttttgacttcagacggcggtaagatcttgggaaacttggttttgccaccttgtaagaaggaacctcgccaaagggcttacggtaggggcagccaaggaaggtgtattagccattttcttgttacttggaggttcagagggaggttcagatttctttgcgaaaactgatgtcgccgtctcttgaagactttgcagcgaggactccttcgagctccctagccgatggagcattctgccaatcagcacctcacaagatccaggtagctctttttcgagatgcatcaaggaatcaaggaatgtatgaacaactggtccgttaaacttgtcaccagtagcctcttttagagaaggaattatcaatgacgagagtgcaggtgaagatacagaaccagaagcttgaggagctgattgtcatcatgtatctggcgtggattgcgaccttttttcatgtcagcattcttacttggggcatcatgactg

SEQ ID NO: 416815 - DNA, 537 bp, Oryza sativa
ggtgggaggaggagggcagcaacctccgcctgccgtcggagcgcgccgtggcggctggcgcggcggcggacgacgctgccgaggccgccgagggcaccaggtgggccgtcctcatcgccggctccaacggctactacaactaccgccaccaggcggatgtctgccatgcctaccagatcatgaagaggggcgggctcaaggacgagaacatcatcgtcttcatgtacgatgacatcgcgcacaacccggagaatccgaggcctggtgtcatcatcaaccatccccagggtggcgatgtctatgctggggtcccgaaggattacactgggaaggaggttaatgtcaaaaacttgtttgctgttctgctcggtaacaaaactgctgtcaaaggtgggagtggcaaagtcctggacagtggccccaacgatcatattttcattttttacagtgaccatgggggtcctggtgttcttgggatgccaacctatccatacctctacggagaagatcctgagatggtctgaagaagaagcatgc

SEQ ID NO: 416816 - DNA, 473 bp, Oryza sativa
aataaaatagcggcaatgcatttatcatattatatatgtagctacaaactacatatagcaagctataagtatgtacagcaatgatggcaggtaatattgccatatcaattttcctgctatggtatgtacaccagagaacgagaacaatttagatgatttgggatggtggagcatctgaaataatgcacagttcttcagacttcacctacggttcaagcactactgcccccaatcgatcatcaaactacaggggcaagagaaaaagataacttgggtatattgcaggagctgagaatatttgctaagttttcttcacctatgatttaagcactaaaacccctatgggtggaactccaggggttggagggaatgctggtgcaagcctgcgcagcaacctttgccatcgcttcagcagagatgccaacattgcagatgtttgaaaggaacgcatatgcttaattcatactgcgcta

SEQ ID NO: 416817 - DNA, 466 bp, Oryza sativa
tttcattaccgcagctgcacccgcatccgcacggcaccatcagtgcgcaccaagaaagaaacacggagaaaagaaagatcgccatggcgccgagaacgtcggacaagactatgtcaccggcggccgcggccaccggactcgcgcttggcgtgggcggtgtcgccggagccgccgccgtgggcaccggccagcacttccgtggcgtgaggaagcggccgtggggccgttacgcggcggagatccgcgacccggccaagaagagccgcgtgtggctcggcacgttcgacacggccgaggaggccgcgcgcgcctacgacgccgtggcgcgcgagtaccgcggtgccaaggccaagaccaactttccctaccctaaccgcgcgcccgccgccggtgtgaacagcggcagcagcaacagcagcaccgtcgagtcgttcggagcgaccggcatgcgcccataaggccatgc

SEQ ID NO: 416818 - DNA, 483 bp, Oryza sativa
  unsure (1)..(483): unsure at all n locations
gaaaatgtagaaaagtttttcgcagccgcgggggccggccaattaaccaacccgaccggtcaacgcggatcgcctctcgagcaccaaaccctacccggatcgccagcgcagccactcaccaagccttcccccccaccctgcttctgctgctcgcgccgggattcttggctcgtctgctcttcgcggtcggtgtcgcgccatcagcaaccatggagggcgagaggagggcggtgaggacggtgcgggtgcggaacatctcagatctggcaggggagcgggaggtgcgggagttcttctccttctccggcgaaatcgagcacgtcgacatcagatgcgatggggtggcgacggggaggacggcctacgtcacgttcaaggatcccaaagccctagagatcgcgctgctgctgtcgggagcaacaattgtggatccggntggcaacataacccctgcctgagactacatctacatccctgttactg

SEQ ID NO: 416819 - DNA, 457 bp, Oryza sativa
gcggtctttttcctctaccctctagattgatggacgagcggctttattaggatttgtgggggccccatggacaattgcaacttatgttgttgaaggggggatgaccaacacttacacaaatataaagagcatgtgccacacagcaccaaatgtgttaaggggacttttgtctcaccttgcagacgccatatctgaatacattatttaccaagtaaactctggggctcaatgtatacaaatatttgattcatggggtggacaacttccacctcatgtgtgggagcagtggtcaaaaccatatatcaagcagattgtgaataagattaagattgaatgccccaatgtaccacttgttctttatataaatggaaatggaggcttgcttgagcgaatgacggacacaggagtcgatgttattggtcttgactggacagtggatatggcaaatggaaggaga

SEQ ID NO: 416820 - DNA, 377 bp, Oryza sativa
tttcagttcagtactcgtagctgcttctgcatgtttggttgatcgattcatcagccatggcgactaagctgcttgctgctgtgatcactgtgctagctttgctgggccatgtcatgggccaaggagggtacggcccaagcccaagcccaagcccgagcccgagttcgagcggcggcgggctcgccgtcggctactacgacagcgtctgccccaacgccgaggagatcgtgaggggcgttgtcaagaacgcggtggcgcaggacgcctgcgtcggagcggggctcatccgcttgctcttccacgactgcttcgtccaggggtgtgatggctccgtccttctcgacgcgacggcggcgaacacgcagcccgagaagctg

SEQ ID NO: 416821 - DNA, 276 bp, Oryza sativa
gttactttttcagttcttcctaaggtggttgaggatgctttgaagggcgagggcgaccctcaccgggcgaaatggtggtacgcgacgttccacagggtcaccgccatggtcggcgccggcgtgctcagcttgccgtacgccatggctcacctaggatgggggccggggacggcggcgctggtggcgtcgtgggggatgacgctgctcacgctgcggctgctgatcgagctgcacgagtgcgtgcccggggtgcggttcgaccggtaccgcgacctt

SEQ ID NO: 416822 - DNA, 435 bp, Oryza sativa
tcgctaaaatatccggccgactcgccggaggggaggagtgagaaggcatcgccggccgccggcggagattccgacgacccagcaatcgtgcgatggcgtgctgccgggccctcgcgctccgctcgctcctcgtccccgaccacccccgcgccgccggtcgcgccacctccgctgctgctccggcggcggggacccgggccagcccccgcaggaggccgtgctcgaggccatctccaaggtagccaggtctaaaggaagggttgcactcacaacaaacatggtccttggtggcactgtgacagatgatgcaagtgatgaatggcttgttctggatcagaagggaaattcataccccacatatagaggatttacagcaattgggactggaggtgatgattttgtccagtcaatggttgttgcggttgaatctgttct

SEQ ID NO: 416823 - DNA, 499 bp, Oryza sativa
gttctctaagcaaaaactgtggggatgttgtttaccagcaaatcattgagcgagacatattaagtgaaatggttaagatagtaaagaaaaagccagatttaaatgttcgggagaaaatattgagtttgattgacacatggcaagtggcttttggaggtgcatctggcagatatccccagtatcacgctgcttaccaagaactcaggaatgctggtgttgattttccacctcgtgaggagaacacggttccactgtttacacctcctcaaactcaaccattgaggcaaccacatctatatccacctccaggtcaaagctatgaagatgcagcgatacaagcttctcttcaatctagcgccccttctgcacctgccttgagtctaagtgagattcagagtgctcgaggaattgtggatgtgttggatgagatgttaaatgctttggaccacaggcaccctgagggtgtgagggagaagtcattgttgccttgttgggcagt

SEQ ID NO: 416824 - DNA, 481 bp, Oryza sativa
tgttatccccgttcgttttatttgcgtttacttcgggtcttgggaaggcacttccttcctcttcctaggaaggcttgaggagccaagaggaagaggagagcaatgggggaagctgccggcgaccgcgtcctgagccgcctccacagcgtcagggagcgcatcggcgactccctctccgcccaccccaatgagctcgtcgccgtcttcaccaggctggttaacctcggaaagggaatgcttcaggcccaccagatcattgctgagtacaacaacgcaatctctgaggctgatcgtgagaagctgaaggacggtgcttttgaggatgtcctgaggagtgcacaggaggggattgttatctccccatgggttgcccttgccatccgcccgaggcccggtgtctgggagtatgtgagggtcaatgtgagcgagctcgctgttgagttgctgacagtccccgagtacttgcagttcaaggaacagc

SEQ ID NO: 416825 - DNA, 424 bp, Oryza sativa
ttttggtaatcaagatagcgctatatgagtatatttcacttgcaaaatacaacaacggaatcagaaagctgccagccaaggccatgaacgctgcaggcgccacggcattgcagcagcaatctcacacgattacaacacggataaatacagcaagctcaaaaaggaaaaaaaaaacacggacggagaaacaacgtaatctgctgatgagcgtacgagaagccttcaggatcctgaattcctccctttcttatttcggtgcacgtatcgtctcttcctggatcttgtcgcgttcgcgggtggactggttcgatcagcagatgggcaggggctcgccgttccactccttgaggcactcgagcatcgggtcgatgagcttgcgctcgctgatggccaggaacaccttgttgcactcctcgccggggga

SEQ ID NO: 416826 - DNA, 470 bp, Oryza sativa
ttttgctgaggtgctgacaggaaagcctgtattttctggtaaaaatgttgtccatcaattagatttgatgactgatcttctgggcacgccatccatggatacaatttctcgggtccggaatgacaaagcaaggaggtatctgagtagcatgagaaagaaggagccaatcctattttcgcagaagtttcctagtgcagatcctttggcgttggatcttctacaaaaactattagcattcgatccaaaggaccgtccaactgccgaagaggcattggctcatccatacttcaaagggctcgcaaaagttgagagagaaccatcctgtcaacctatcacaaaaatggagtttgagtttgagcgtagaagagtgacaaaggaagatataagagagttgatatttcgtgaaatactggaataccatccacaattgctcaaagactatatcaatggcaccgagagaacaacctttc

SEQ ID NO: 416827 - DNA, 531 bp, Oryza sativa
tcgtttgagggaagaagcgcgccttgtcgaggagcgggatcctgtacgacgcggtgggggaggagcgggtgctggacgccgacaagtacgccatcatgcaccgcgtcgacatcaacgcgcgcgacctgcgcatcctcgacccgctgctctcctacccatccaccatcctcggccgcgagcgcgccatcgtcctcaatctcgagcatatcaaggcgatcattactgctgaagaggttttgctccgggatccattagatgataatgtgattcctgtagtagaggagctccggagacgacttgcaccttcaagtgccactcaacatgatgtggaaggtgctgaagaagatgaatctccctttgaattccgcgcactggaggttactctggaagccatttgcagttttcttggtgcacgcactactgagttggagagtgctgcttacccagctttggatgaactgacatccaagattagcagccgcaacttggatagggtgcggaagttaaaaagtggtatgacccgattgaatg

SEQ ID NO: 416828 - DNA, 442 bp, Oryza sativa
ttcgtgtccttcctgcctgtgttcggcaagggggcagactccggttctgaaccgggccggccactgcgacccggcgtcgaacggctgcaccggcgtgggcgccgacatcaagtcgtgccagagcctcggcatcaaggtcatgttctcgatcggcggcggtgtcggcaactacggtctgtcctcccgcgacgacgccaagcaggtcgcggcgtacctgtggaacaactaccttggtggtacgtcgccgtcgaggccgctcggcgacgccgtcatggacggcatcgacttcgacatcgagagcggcgggggcatgtactgggaccacttggccaggtacctcaaggcgtacttccggcaggggagcagcaagaagccggtgtacctgacggtggcgccacaggggcccttcccggacgcgtcgctcggcgtcgcgcttagcacc

SEQ ID NO: 416829 - DNA, 525 bp, Oryza sativa
  unsure (1)..(525): unsure at all n locations
ttaccttctcctccggctcttcttcagtatcgaatcctctcttctcctcgtgcccaccaccaccaccgtagcaatggcgggcaacgggccgatcaacaaggaggacccgctcaactggggcgcggcggcggccgagatggccggcagccacctcgacgaggtgaagcgcatggtggcgcagttccgcgagccgctggtcaagatccagggcgccaccctccgcgtcggccaggtggccgccgtcgcccaggccaaggacgccgccggcgtcgtcgtcgagctcgacgaggaggcccgcccccgcgtcaaggccagcagcgagtggatcctcaactgcatcggccacggcggcgacatctacggcgtcaccaccggcttcggcggnacctcccaccgccgcaccaaggacggccccgccctccaagtcgagcttctcaggcatttcaacgccggaatcttcggcactggcttcgatggccacacgctgccgtcggagacggtgcgggcggccatgctcgtgcgcat

SEQ ID NO: 416830 - DNA, 439 bp, Oryza sativa
tttgtcggcattcatcgccgaaatccccaaatggacacggcgagcttgtgcaccgtggagaagcgcggcgccgtccacgtcatcaccctcaccggcgccggcgagcaccgcctcggcccgcccctcctgtccgcgctccgctccgccgtcaccgccgtccgcgccggcgccgccgggggcgccggcggcgcgctggtgattgccggcgagggcaagtacttctccaacggctttgacctggactgggcgcgcgccgcgccggccgagctgcacgcttccatgggcggcgccttccggggccttgtcgacgacctcctcgcgctcccggtgcccaccgtcgccgccgttaccggccacgccgcggcctgcgggtgcgcgctggcgctcgtgcacgacgccgtggtcatgcgcgcctcccgcggtttcctgtacatgagcg

SEQ ID NO: 416831 - DNA, 462 bp, Oryza sativa
gtctcttctctctccatttttctcgaagcgagagtgcgttgcgttgcgagcgggaagcgaaaactcgaaaccatggccacggccggcgacgagcagcagcagcaggcggcggcggcgcagacggcggaggtgacggaggcggcggcgaaggaggtggtgtccgtggagatgccggcgccggaggggtggacgaagaagtttactccccagagaggggggagatttgagattggttttgtctcaccaactggagaagagattaagaacaagagacagctgagccagtatctgaaggcacaccctggaggccctgcatcctcagagttcgattggggaactggtgatactccaaggcgctgtgctcgcattagcgagaaagttaaggctttcgatagcccagaaggggagaagatcccgaaacgttctaggaactcatttggcataaagggcaagcaggagaaa

SEQ ID NO: 416832 - DNA, 534 bp, Oryza sativa
ttaagtttttctgttcaggctgctggttgggaacccggacgttttattactatccatgcgacaccgaagtcaaaggcgcctgctcgcatcctgggttccaagccaggtgtatttgttgctgcttcccatcctttctttgatcccttggtggacatggacccaaggcttgttgttgcaatgctggacctgccccgggatgctgatgttagcgctctggttttaaggtttggcggggagtgtgaattggtttggctgaatgacaagaatgctgtggctgtcttcaatgatccagctagagcagcgacagctctgaggcggctggattatggttctgcttaccagggtgctgctgtgtttttgccaagcagcagcgctcagccaggcaatgtctgggttgcagggcagaaagatggagtggcggctaccaagagcagtgccaatccatggaagaaggccactgcctctgagcctgatccatccctaggagactggacaggtgtgcttggtcaagcttcaggatcagtatggaggccg

SEQ ID NO: 416833 - DNA, 354 bp, Oryza sativa
tcgttcctcttcccaacactagtaggataaagccgcagagagagcagtagtagtagcgagctcgccggagaacggacgatcaccggagaagggggagagagatgagcggcggtcaggacctgcagctgccgccggggttccggttccacccgacggacgaggagctggtgatgcactacctctgccgccgctgcgccggcctccccatcgccgtccccatcatcgccgagatcgacctctacaagttcgatccatggcagcttccccgtacgataatcctcctcctccatcctcccaatcatcaccaccatcaacgccgtcgtgaattgattgattgatttggtttgatttgtt

SEQ ID NO: 416834 - DNA, 451 bp, Oryza sativa
tcggtcagctccagccactgctcccatggcgaccgttcctacgccgagcgaggcccacggcggcgcgacgccgacggccgccgacgtggagatggtggaggcgagcgagctccgtcggcggggcaagcccagcggcgaccgtgcgacggggccgtcccgagacggggccgccgcggcggcggaggaggcggcggcgccgtcggtggagcgcgtgttcgcggacaggcccgtgccgtcgtggcgggagcagctgacggtgcgcgcgttcgtggtgagcttcttcctggtcatcatgttcagcgtcatcgtgatgaagctgaacctcaccaccggcatcatcccgtcgctcaacgtctccgccggcctcctcggcttcttcttcgtccgcctctggacggcggccatcgagagggtggggcttctccggcagccgttcacgcgccaggagaac

SEQ ID NO: 416835 - DNA, 513 bp, Oryza sativa
tcgttctgggaaaggaagatatgaatgtcacccaggatattgttgataggcaaagggaagggcttgcattgctcaagtctgcatggacatctgagatggatgatcctctgtatgatgttgatcttgctcttatcatctgtaatgcaaatgcattcaaagatgggctattgtttctgtatgagaaactaaaactattcaaagaagttattagttgctacaagcaagctcatgatcacgagggtctaattgcctgctgtaagaagctaggagattcatctcaaggtggggatccatctctttggggtgatctgttgaaatattttagtgagcttggggaagattgctctaaagaggtcaaggaggtattgacctatattgaaaaggaggatgttttgcctcctattgttgtgctagagacattgtccaaaaacccatgcttgacactgtcagttgtcaaggattacattgcccgcaaacttgagcaagaatcaaagctaatcgaagagataggaa

SEQ ID NO: 416836 - DNA, 347 bp, Oryza sativa
ttcctttcgatctccattcgtttttgagttcggcgtttgctcttcctctctttgactcatgggcaagattaagatcggaatcaatgggttcggccgcatcggcaggctggtggccagggtggcgctgcagagcgaggatgtcgagcttgttgtcgtcaacgatcccttcattaccaccgagtacatgacatacatgttcaagtatgacaccgctcacggcccgtggaagcatcatgaggtcaagggcaaggactcccagaccctcatcttttgcacgaaaagaaggtgcggtgttcggctgcaggaacccctgagagatcccatgggctgcggctggagctgaatac

SEQ ID NO: 416837 - DNA, 398 bp, Oryza sativa
ttatttcgatcgaatttcacccaaagtccacacaaactttcgattcgatttctccgatctcgcagcggtggcggccatggcgcagaggacgctggagctgacgctgatctcggccaaggatctcaaggacgtgaacctcctcttcaagatggaggtctacgccgtcgtcttgctctccggcgaccgccgctcgcggcagtggatcgccaccgaccgcgccgggggccgcaacccggcgtggaacgccgccccgctccggttcaccgtaccggcctccggcgcgggttccctacacgttctccttcgagccgagcgcgcccttcgcgaccgcgacgtcgacgaggtccacatacccctctgggagattctctccggagcacccgacggtgccgttcccg

SEQ ID NO: 416838 - DNA, 489 bp, Oryza sativa
ttcatttgttccatcaacataggttatacatgtgcggtcttttttaggaggggagaagggtgttcatttgtgaacagaagctttatacaaggacacagttaaatcagcatgtaaaaactggtgactctgaggtggatggctctgaggttgagcgcagtggttttgcaggacatcctatgtgcgagttctgcagaagttcattttatggagataacgagctttacacacatatgtcccgagaacactattcatgtcacatatgtcaaaggcaacatcctgggcagtatgattatttccggaattatgatgactcggagttgcattttcgtaaagatcatttcctctgtgaagatgaagcatgtttggcgtagaagtttgtagtcttgcagagcgaaacagagctcaagagacatattgctatggagcatggtgggcggatgtctcgtgctcagaggaatgccgcacttcagataccaaccagttttatat

SEQ ID NO: 416839 - DNA, 456 bp, Oryza sativa
ctcatcccagccgccgttcgccgcagcctcctcctctcgccatctcccgtcctcttcttcaagtcagctacctgcttaatcaaccatgggtaaggagaagacgcacatcaacattgtggtcattggccacgtcgactctggcaagtcgaccaccacgggccatctgatctacaagcttggaggtatcgacaagcgtgtgattgagaggttcgagaaggaagccgctgagatgaacaagaggtccttcaagtacgcgtgggtgctcgacaagctcaaggccgagcgtgagagaggtatcaccatcgatattgccctgtggaagttcgagaccaccaagtactactgcacggtcatcgatgcccctgggcaccgtgacttcattaagaacatgatcacgggtaccctcccggctgactgtgccgcgctcatcattgacttcaccactggtggttttga

SEQ ID NO: 416840 - DNA, 408 bp, Oryza sativa
tcggttttgcgttctctaatcgcctcgtcaagatgcatatattcgttaagaccctcactggcaagaccatcaccttggaggttgagtcctccgatacgattgacaatgtgaaggctaagattcaggacaaggagggcatccctccggaccagcaacgccttatcttcgctggcaagcagcttgaggatgggcgtactctcgcggattataacatccagaaggagtccaccttgcaccttgtccttcgccttcgtggaggcatgcaaatattcgtgaagaccctcaccggcaagaccattaccctggaggtcgagtccttcgacacgatcgataatgtgaaggccaagatccaggacaaggagggaattccaccagaccagcagcgtcttatcttttgtgggaagcaac

SEQ ID NO: 416841 - DNA, 438 bp, Oryza sativa
gtgacgcgagcgcgagagcgaggaggagagcccgagatctcggcggcggcggcggcggcgatggcgctctccgaccgctcccgcgagtcgctcctgccgagcttcctctactcgacggcgggggcgcggccgtacaccgcgggcggcggcggcgccgccttccgcctccccgccgcggcggccccgggaggtgtaggagggggcacaccgatcgagatccaggcgcccagggagaagatcgagatgtactcgccggcgttctacgccgtctgcacggccgggggcatcgccagctgcggactcacccacatggcggtcaccccgctcgacctcgtcaagtgcaaacatgccaattgatccagcaaagtacaagagcatcacatctgggttcggaatattggcttaagagcaaggaagtaggggcttcttcaggggctg

SEQ ID NO: 416842 - DNA, 513 bp, Oryza sativa
tcgttcttccacccccgaaaccactccaaaaccaagaccaaatctcgcggcgcatggcggcggcggcggtggcggcgaacggcggcggcgacggcgcgcaggcgtccaacgcgcccgcccccaccaggctcgcgtcggtctacagcgaggtgcagaccagccgcctcaagcacgcgctccccctcccctccgtcctccgctcccccttcgccctcgccgacggccccgccagctccgccgccggcaaccccggtgagatcgcgaagctgttccccaacctgttcggccagccgtccgtgtcgctggtgccgtcgccggagccggcgtccaccaggccgctcaaggtcggcgtcgtgctctccggcggtcaggcgcccggcggccacaatgtcatctgcggcatcttcgattacctgcaggaatatgcaaaaggatccgtcatgtatggattcaagggaggtccagctggagtcatgaagtgcaagtacgttgagctcactgcggattatgtgt

SEQ ID NO: 416843 - DNA, 513 bp, Oryza sativa
tcgttctgaatcaagtgatgacgttactgaaaaagctgctttaaaaacacttgaccaagaaccaatgctggctgctagaatcacaattgaagatggcctctgcctactgcttgatgtagatgatattgatcgcttgctgcaatttagccagcagcaagatggtggcttgcaactgagaaacaggagacaggccctccttgagcagctggcagaatccctgcaactagttgatccacttacacctagtaacaatgcacctctctcaccaaatgatgatctggtgtttctccgaatagtctctcttccgaagggccgcaagctactttctcgttaccttgaacttgtgagttctggcagtgagcttgctagaattgcttgcatggcagtcttccggcatctaagatttatatttggaaatttgccatctgatagtagtgctgttgagacaacgacaaaacttgctactgctgtatcaacctgtgttgttcggttggagttgagtggactaagtgc

SEQ ID NO: 416844 - DNA, 285 bp, Oryza sativa
tgtgtcgtcttctccccttcttctcctcctcctcctcgattcggagctccacccgcagccatggctaagaactaccccgtcgtgagcgccgagtaccaggaggccgtcgagaaggccaggcagaagctgcgcgccctcatcgtcgagaagagatgcgcccctttcatgctccgccttgcgtggcactcggcggggacgttcgacgtgtcgttgaagaccgggggcccgcttgggacgatgaaaaccccggcggaagttgttgacgccgccaacccggggctggac

SEQ ID NO: 416845 - DNA, 500 bp, Oryza sativa
ttcatgctctctctctctctctcttctctctttgggggtggttcttggtgcagagccgatctgcggcggcggcgggtgtggggggctcgaggagccgctggtcgggaagaggaggaggaggaagaacggccgccctgacacaatggcagatgtcttaggatgttacactataaagtcccatggaaccaaagtggcgagacttcacatgtacgactggataatacttctactccttgctgttatagatggactgttgaacataattgaaccttttcaccgtttcgtcgggagggacatgatgactgacttgagatatccattgaagggcaatactgttcccttctgggctgttccgatcattggaattgtattgccttgtgccatctttggtggaatttacttcaaaaagaagaatttctatgatttgcaccatggcatactggggaatctatactctgtgcttataactgcggtattcacagatgcattaaggatggtgt

SEQ ID NO: 416846 - DNA, 532 bp, Oryza sativa
ttttgctttccctcaggatcggccatggcgaccgccgttgcgtcccaggttgctgtctctgctccggctggctcggatcgcggcttgaggagttctgggatccagggtagcaacaatattagctttagcaacaaatcatgggttggcaccacattggcgtgggagagcaaggccacgcgaccgaggcatgcgaacaaggtgctctgcatgtcagttcagcaagcgagcgaaagcaaggttgctgtcaagcctcttgatttggagagtgctaacgagccgccgctcaacacatacaaaccaaaggagccttacaccgccacaattgtctcggttgagaggatccgaggccccaaggctccaggagagacatgccacattgttattgatcatggtggcaatgtgccttactgggaggggcaaagctatggcattattcctccaggggagaacccgaagaagcctggtgcaccacataatgtccgtctttattcaattgcatctacaaggtatggagattcattcgatgaaggac

SEQ ID NO: 416847 - DNA, 512 bp, Oryza sativa
tcgtaactatcagagcacatatggcactcactcagcttctctgctccctcctccttgccaccgcattgctgctgctctccatctcccgtacagaggctggcgaggtgggcgtgtgctacgggagggacgcggacgatttgatggatccaccggccgtggtgaatcttctgaaggagaacggcatcacgaaggtgaggatctacgacgccgacccgacggtgctgagatcgctgtccaacacaggcatcaaggtgatggtggcactacccaacaaggaccttgcttctgcaggccacgatcagggaagtgcgctagactgggtgaaaacaaacattgttccgtactataaccagggcacacaaaataatggtgtggctgtggggaatgaggtgttcaggcaagcacccaacttgacccctcagctgttacccgcgatgaaaaatgtgcagaccgcgctagcgagactgggccttgccgacataataagggattaacacccattaatttgatgc

SEQ ID NO: 416848 - DNA, 189 bp, Oryza sativa
gtgtgtttaatgcctactgcttactgaactttggggacagcattacgacagaccatatttcaccagcaggtagcattcacaaagacagccctgctgccaagtacttgcttgagcgaggtgtggaccgtaaggacttcaattcatatggtagccgtcgtggtaatgatgaacttatggcaagaggaacat

SEQ ID NO: 416849 - DNA, 177 bp, Oryza sativa
tttctttataccgagggtaatgagcttccccgcctggtctacttatctcgtgagaagcgttctgggtttcagcaccacaagaaggctggtgccatgaatgctcttgttcgtgtctcagctgtgcttaccaatggacagtacatgttgaatcttgattgtgatcacttcatcaacaac

SEQ ID NO: 416850 - DNA, 450 bp, Oryza sativa
tctgctccttcgatggtttctcgcgacggatggcggctactcctcctcctgctcggcttcctgctcgtggcgccgacttgccgcgctcgggaggcgcagccgctgccggtactggaggaagaggaggtggtggcggacgcggcaggagggcgtggtggcgcgggcgctgctgccggtggaggaaacaggcgcgcgccggtgcggcacgagctgtcgctggacttctacgccaagacgtgcccggccgtcgaccagatcgtcggcaacgtcaccgcgccgcggattcgtgacaaccccggcgccggccccgccgtgctccgcctcttctaccacgactgcttcttcgaagggtgcgacgcgtacatactgatcgcgccgacggccaacaacggtggcagtgcgccaagggtggatagggacaggaggtaaaccggaacctgtcgaagaggt

SEQ ID NO: 416851 - DNA, 486 bp, Oryza sativa
ttatttaaacccgccgtttccaagcttgctctcctgggccccctaaaccttccctgccgagtggcagggtgctcgacgggatggcgcagaaggaggccaatggcagcagcaacggggagcacaccacccgcccgccgtcgacgccctcgccgctccggttctccaagttcttccaggcgaacctgaggatcctcgtcaccggcggagctggcttcatcggctcgcacctcgtcgacaagctcatggagaacgagaagcacgaggtcattgtcgcaaacaactttttcactggttcaaaagacaacctgaagaagtggatcggacacccaagatttgagctaatccgtcatgatgtcacccagcccctgcttgtggaggttgaccaaatctatcaccttgcttgccctgcttcaccaatcttctacaagcacaaccctgtcaagaccatcaagacaaacgttatcggaacccctgacatgcttggac

SEQ ID NO: 416852 - DNA, 226 bp, Oryza sativa
ttccgctcctagcgccgccgagtcgcggctgaacttaacaagggagggaggggcggcgatctccatctggcgagcagagcaggggaggggatcctcgtgagcatccacattctctttctgattcatctctctcccatcgggacactcgataatttttgcgttcttcgctaaccctagcttctcttttagatctggaagaggctcttctttttaatttcagagcctt

SEQ ID NO: 416853 - DNA, 389 bp, Oryza sativa
tcgttctctctctcgcttcctagggtttcgcgccctcttatcccgcggcggcggcgagaagcttccactcgcctcggcggcggcgccggccagaaagatggctggcggttttcgagtactgcatcttgtcaggccctttctggctttcttgccagaagtacagagcgcctgtaggaaaataccattcatagaaaaagtgatcctatacccctatctctctcttcattttcctggtgggcagccagctaccactctatggaatttactcaactacttgagcagaacctttctactggatgcgggttatttttgctttaaaccgtggctctggtatggagctgggtcttaccccaattgtgacatcttggaatggtaatgcaactttttat

SEQ ID NO: 416854 - DNA, 414 bp, Oryza sativa
tttcgttaccttctactccggctcttcttcaggatgggatcctttattctcctcgtgcgcaccaccaccaccgtagcaatggcgggcaacgggccgatcaacaaggaggacccgctcaactggggcgcggcggcggccgagatggccggcagccacctcgacgaggtgaagcgcatggtggcgcagttccgcgagccgctggtcaagatccagggcgccaccctccgcgtcggccaggtggccgccgtcgcccaggccaaggacgccgccggcgtcgccgtcgagctcgacgaggaggcccgcccccgcgtcaaggccagcagcgagtggatcctcaactgcatcgcccacggcggcgacatctacggcgtcaccaccggcttcggcggtaccttccaccggcgcaccaaggac

SEQ ID NO: 416855 - DNA, 333 bp, Oryza sativa
ttttgatcagtggcaaagcaagtgatctcttgggctgggttcatttatgcattggcaggggcagctgctcgtcacggcaatggcatccaccaacagttggacccacgagatcgagtcgccggtggccgcgccgagcctgttccgcgccgcccgtatggactggcacacccttgcccccaagatcgcctcctacatcagtgtcagcgcccacccactcgacagcgaccgcagcgtttgaagcgtcaggcagttcaacttcaccttagccatgccattcagccacatgaaagagaggctggagtttctggacgtggacaagtgctagtgcaagtt

SEQ ID NO: 416856 - DNA, 490 bp, Oryza sativa
gtaattatcgccatctcgcatggctgcgccggcgtcgccgcgcgagcttgcggcctcgtcggcatggagcccgctaaggttgccgaaatactcaaggatcggccgctgtggctgcgcgattgccggtccatggatgtggtgaacgtgctccctgctggcgccaacggcaccatcgagctgctctacatgcagctctatgctccgacgacgctggcgccggctcgcgacttctggctgctgcggtacacctccattctcgacgatggaagcttagtggtgtgtgagagatcactcagtagcaagcaaggaggcccaagcatgccacttgtccagccttttatcagaggtgagatgcttcccagtgggttcttgatccggcctagcgatgttggaggcagcgtgatacacatcgttgatcatatggacctcgagccttggagcgtgcctgaagttgtacgacctttgtatgaatcttctgccatggttgcgc

SEQ ID NO: 416857 - DNA, 501 bp, Oryza sativa
gaataatatagtgttgtttcttgatacatttttttttgaacgactcgcacgagacggtacgaagttctattgatagagcaggaaaaaattacaagatcacaaccctaaagggtcgtaaccaggaaaaaggaaaaatataccaccacccacacaccgacagcttcaacacacaagaccgggagaaggctaacaccggaccggccgccgctaagcttgaccgactgccgctagaccaacaaagaaacatagatgagatcgcccaaaagaacaccctcacaaccaatacaaagccaactcctagagtgtgcttgcaccaatcgatcgagaggcttcggctaggggataccaaaacgacgtattcaagaagagaagcgatggtaaaccaccgccgccattcgttggggcttaaaggagccaggactgggctttcgcccggcaaccacccttgagggatgagacagcacgacaacaccctcaagagggggaattccatcgttgtcg

SEQ ID NO: 416858 - DNA, 422 bp, Oryza sativa
tgtattttatcaatgatcagatcaatgttatcagggggtttctttgaaaggaagagaacttatctggcaaggagggaaaattaacccgtctccggtacattgatcagtagctaaggcaacaacgtgctttccaacagtacggtatgatttcacaaaacgcctggagaccacagaggggactgcctgaaaacttctgttacaattctccgcgctaggctgtttgaacacttacttcatccgtacccaaaagattcccagaagtctatgcttgctaggcagactggcctgactaggattcaagattttgaattgttttataaatgcccgtgtacgtctttggaaaccaatgaatgaaggacatgtacatagaagagattggtgatttagagcaagactccaactttttctttgacaatgtacca

SEQ ID NO: 416859 - DNA, 432 bp, Oryza sativa
tcgttcacaccaaaaacgaatcagctcgtctcctggctccgcctccgcctccgcgagctcccattccattcccggattgcgccgccgccggtgttgcagcagccatggggatggggccactagagaacgccgtggtggacgcggcggcggaggccgtggcggcgaaggccgcggtcggcggcgtgggcgtggggggttcgtacgcggtgctgcagtgcggggaggactcggagtacgtgaggaaggcgtacgggggctacttcgaggtgttcagggcgctgctggcggaggacggcgagcggtggcgggtgtaccgcgccgtgcgcggggagctccccggggaggaggaggccgcggggatcgacgggttcgtcatctccgggagctgcagcgacgcccacgccgacgacccgtggatcgtcgccctcgtcg

SEQ ID NO: 416860 - DNA, 453 bp, Oryza sativa
ttttgtctgaaggaagctaagattattaatcggggggtttctatgacatggctgaggagaagaagcaccaccacctgttccaccacaagaaggacggggaggaggagagctccggcgtggtggactacgacaaggagaagaagcaccacaagcacctcgagcagctcggcggcctcggcgccatcgccgccggcgcctacgctctccacgagaagcaccaggcgaagaaggacacggagaacgcgcacgggcacaaggtgaaggaggaggtggcggcggtggccgcgctgggcgccgcggggttcgcctttcacgagcaccacgagaagaaggacgccaagaagcacgccgcccaccaatactagatcgatcccgatcgaatgaacgcaagaacgaacggtttatatgcttaattacttttttcccataattacatgtatgcatgtggttgat

SEQ ID NO: 416861 - DNA, 491 bp, Oryza sativa
ttatacagcaacgacgaactaagccatagctccggtggctcttcgatctctctcaaggtctcaccaaccagccgatcgaagcagaagcagagctacagtataggcgtacgtactccggcgactggttcaggtgatctcgcggcgtacgtctagtagccatgggtaatctggggtggatggtggcggcggcggtggcggcggtggtggcgtcgtgggcgttcgacgcggtggtgaagctggtgtggaggccccgcgccatcaccaggcggctgcgggcgcagggcgtcggcgggccgggataccggtttttctccggcaacctcggcgagatcaggcgtctccgcgacgagggcgccggcgtcgtgctcgacgtctcctcccatgacttcggtcccattgtgcagcccgactttcgcaaatggaaccccctctatgggaagacattcaagtattggttcggagcgcgggctaccatttgcttggcagacctg

SEQ ID NO: 416862 - DNA, 335 bp, Oryza sativa
ttttgtgtcagatttcttcaaccagtggctcagtatattttctcaaaaaattacaaaatacagtaggaagggtttattgaagcagcaaagaagaactacaggccgcccacattctccgcctatgcccaaaacttaaacttaggtctggtttagttcccaattttttcttcaaacttttaacttttccatcacattaaacttttctacacacacaaacttccaacttttccgtcacattggttcaatttcaatcaaacttctaattttagcgtgaactaaacacacctttaagcataatttataattcaatttttaataaaaacattaccacttat

SEQ ID NO: 416863 - DNA, 385 bp, Oryza sativa
gggcccggaccggaacggacatgtgcgacgctgcccacgcgttcggtagaactagagcccccccttccccctggagcgttgttatgtgaaggagcgtgggaaagccaaaggcacctcgagagtggcggcggcggttggtggccatggcggagctgaagcggctgtcggagagccgcgacctgacgcggatcgagcgcatcggggcgcactcccacatccgggggctggggctggactcctcgctggaggcccgcggctcgtcggaggggatggtcgggcagctccccgcgcggcgcgccgcggggctcatcctgcagctcatccgccaggggaaagaacggcgggcgcgccctgcttcttgccggtcagcccgggaccgggaaga

SEQ ID NO: 416864 - DNA, 477 bp, Oryza sativa
cactccccaatcctcccccgatctccccaatcctggagctcctgaagagcagcgcgggggcggaaatggcgctgcggcgagcgctgctcagatctgccgagatctcccccgatcgcaaggctgcacttgagtacctccattatctatcgagagcacagcctactcgttctctaacaggtgctggcctttattctgctggcaaatcattcagcactcaggctgctactacatcaagcacaccacaacctccaccaccacctccacctccggagaagactcactttggtgacctcaaagatgaggaccgcatttttaccaacctctatggtcagcatgaccctttcctgaaaggtgcaatgaagaggggtgactggcatagaaccaaggatttggtgcttaaaggggcagactggatagtgaatgaaatgaagaaatcgggactttcagggcgtggaggtgcaggaattccttctgggc

SEQ ID NO: 416865 - DNA, 367 bp, Oryza sativa
gcctgctcgctgaggatcatctcgtcgtgcctcggtctgtgttaaacaacgccgcgtccgtcacgtccactgtgcgctcggccggcgcctccgtcgccgccttcatcgccccccaggccgaggacgagaaggaccaggtattgtgggctggatttgataaattagagcttcatccatcatctttcaagcatgttttgcttgttggttattcaaatgggttccaagtgcttgatgttgaggatgctgcaaatgtttgcgaaatggtctcaaaacgtgaaggtccaggtacatttttaacaatgccaaccacaccagtttactttgatggtaccgaaggattcagaaacatcaaatccatgcttctggt

SEQ ID NO: 416866 - DNA, 374 bp, Oryza sativa
cagttttagttgacaacaacgagcacaagtttattcgtaatgttaagaacaagccggtggtcttctacatggctcgtcttgaccgtgtcaagaacttgactggtctggttgagctgtatggtcgcaaccctcgcctgcaagagctggttaaccttgtggttgtctgtggtgaccatggcaacccatctaaggacaaggaggagcaggctgagttcaagaagatgtttgaccttattgagcaatacaacttgaatggccacatccgctggatctccgcgcagatgaaccgtgtccgcaacggtgagctctaccgttacatctgccacaccaagggtgccttttgtgcagcccgctttctactaggcattcggtct

SEQ ID NO: 416867 - DNA, 389 bp, Oryza sativa
cctattatctctcccggtcggatgctcactcgtctgggccaccattaatcgacccttgtcttcccctgccgcctttccgccgccgccgtcgaccggacgctctacaccgacaccggcagaaactgcaccaccgtcaagatggctaggtcggcgctcgacgaggtcaccgacgccggcgccttcgaccggtcgccgttcaccttccggagctctatctccagggacagctccgcccggttccccgccgcgccggggaggtaccacctctacgtttcctacgcgtgcccctgggcgtcacgctggctcgcctaccttaagcctaagggccttgaccacgccataggctttacctatgtgaagaccaactttgagaggaccagggagacgga

SEQ ID NO: 416868 - DNA, 424 bp, Oryza sativa
gtttttgaaaaggaagatatggttcaacaccaagcctcattctaacctttgcggtgtgattgagagccgattttgtggtgacactgttcaagctggtggagaaccacttgatgctcgggatcggcttcgcaacatgtgtgagcacgagagtatctgtggatccaggactgcaccatgtgattcttgtggacggtcagtcatgctgaaggacatggacattcatgtgattgctgtgcatcagaagagctaactattgtaaagcattggctctgagaaagatggcctgtcctttatcctgctgggctttaaccaccaaggccatgaagtttcagcactgctggaccaaatggtatttccttttgtgttacatatatcttgggtcattgggtacattgtaacactgtgtatgggagcattgaacact

SEQ ID NO: 416869 - DNA, 358 bp, Oryza sativa
ttttacgcctccacaaataaagctcgtcccgagggagggcgtagacccacccccgggaatcgccaaaaccctaactccgatccgatcgagctctgcttcccatggcgactgccgcgagccaggcgagcctcctgctccagaagcagctcaaagatctcgcgaagaaccccgtggatgggttctcggcggggcttgtggaccatagcaacgtgttcgagtggcaagtcaccatcatcggcccgcccgataccctgtatgatggaggctacttcaatgcaataatgacccttccccagaattatccgaatagtcccccactcagaagggttacctctgggatgtggcatccaaatgttta

SEQ ID NO: 416870 - DNA, 517 bp, Oryza sativa
ggattttccagttgagaattcatgatcagatgaggatgttattagatgcaaaagggtgggacagaaaccgttgatgctttgaggactggagctgcagctatgaaagcaatgcaaaaggcgacaaatattgatgacgttgataagactatggatgaaattaatgaacagactgaaaacatgaaacaaatacaagatgctttgtcagcccctcttggagcatctgctgattttgatgaggacgaactagaggcagaactggaagaactggagggagcagaattggaatctcagcttttcgagcctgttgcagctccacctgtgcattcagtgcaggttccaggcaccaggataccaactcgccctgctccacagaaagcattagctgaggaggatgagcttgcagccttgcaagctgaaatggcattgtgaacaggttcacaatgaagagaccaaatgtacaaatgattggctgggctctacggaatttcaacgagtgtagctacaatataatttccca

SEQ ID NO: 416871 - DNA, 506 bp, Oryza sativa
gtctttgcaccagattcctgtattttttatacgcatggtctgtcctcatatacctttcattcgttcaatactaatgatgcactgtggaccatttcatatgggagatttgctgaagtggatattggtaagcattgtacagtttgttgtcggcaaacggttctacattgcggcttatagggccctgagacacggctctacaaatatggatgtgttagttgttcttggcaccactgcatcatatgtatactctgtttgtgcactcctatacggagcattcactgggtttcaccctcccatatattttgagacaagtgcaatgataattacatttgtgttgtttgggaagtatcttgaggtgcttgcaaaagggaaaacttctgatgctatcaagaagcttgtagaattggtccctgctactgctcttttgcttctgaaagacaaagaagggaaatatactgaggagagagaaattgatgcgctattagttcaacctggagacatcttaa

SEQ ID NO: 416872 - DNA, 478 bp, Oryza sativa
gatgaagaagcaacagcagcagtcaagccaaccgttcctttttagaaagaagcaggcggatgcaacaaaaggaggaggagggaggactccactgttcgcttgtatcgtcttatgggggaagaggatatcagcaacgacagcaagagcagctgcggctgcgaggactgcacggtggaggctccggcggctgcggcgccgaaggagaacgggcgagccgcggacccgcgcctccaggccatctccgacgccatccgcgtcgtcccgcacttccccaagccagggatcatgttcaacgacatcacggcgctgctgctccggcccgccgcgttcaaggacgccgtggacatgttcgtcgagcgctaccgcggcatgcgcatcgtggccgtcgcaggtattgaagccagaggattaatatatggcccagcgatcgcactagcaattggagcaaaattcatacccgtgcgcaaacctaagaaac

SEQ ID NO: 416873 - DNA, 504 bp, Oryza sativa
ttttgaccatctcactagctaatcgctggtactggaagctgtagtagcagctggccaaaaatggcgccatttcttgttgtgttcgccgtcatggccgcggcttttgcgtcggcctccggctccggcgagctcaccccggacttctacagcgagacgtgcccgcaggcgctgacgaccatcaagctcgtcgtcggcgccgccatcttgaaggagccgaggatgggcgcgtccttggtccggatgcacttccatgactgcttcgtcaatggttgtgatggctccgttctgctggacgacaccgacgacatgatcggggagaagctggcgaagccgaacaacatgtcattgagagggttcgacgtgatcgacgccatcaaggtggcggtgaacacggcctgcttggggaatgttgtctcctgcgctgatatcttggcagttgctgctcgtgattcaaatcgcgcgctcggtggaagctcgtacgaggtgctcctgttgcggggcgac

SEQ ID NO: 416874 - DNA, 487 bp, Oryza sativa
ccttacccaccgcgggttggtggagtcgatgcacagcttccggtcgggcgccgacgcggccccgggcgtcatccgcgacgcgctcgccagggcgctggtcttcttctacccgctcgccgggcgcatcgtggagcccgaggccgggtcccccgccatccggtgcaccgccgacggcgtctacttcgccgaggccgccgccgactgcagcctggaggacgtccgcttcctggagcgccccctcctcctccccaaggaggacctcgtcccctaccccggcgacgaccgctggggcgtcgagccccacaacaccatcatgatgatgcagatcaccaaatttacctgcggcgggttcgtgatggggctccggttcaaccacgcgtcggcggacggcatgggcgcggcgcaattcataacgcggtgggcgacatggcgcgggggcttcccgagccgagggtgaagccggtgtgggacagggggaagttcccga

SEQ ID NO: 416875 - DNA, 300 bp, Oryza sativa
gatgtgattcttgttttcttgatcatccatggcgcgggtgcggtgtggtctcgaacacctggagcggcggtacgcgttctacgcggcgtaccactccaacccggcgaacgtgctcgtccacgccgtgtgcgtgtggcccatcctcctcaccgtgatgctcccgctccggtacgcgccgccgctgccgctgctccgattctactgcccgttctgtcgtcagaacctccccgtgcagcttggcttccccgttgccgtcgcgctgggcgcgtactacgcgctcatggaccgccgtgcgggcgc

SEQ ID NO: 416876 - DNA, 512 bp, Oryza sativa
tgttaaattcatttcagaagaagctttcacttcttttcggaatgcgctcagagagtggatctaagagttcaggtgatggtggaccaactcagagggcatcagcattggctgctctttcatctgcattcaacccatcttcccaaaagaataagggtaatgataggcctaaaagctctgatggtggacccactcagcgcgcttcagcaatggctgccttaacatcagcgttcaatccatcagcaaaacccaaaagcccaccacaacgtgcaggtcaaggttctcagcgagcagctgctgttgctgcgctgtctaatgttttgactgctgagggttcatcttcaaagcccacgcataggtaggtctttcccaatggcaggtgatgcagatacagctgaactaactccgtctgctgcattccctctgtctgaaggagcatcagaatttttcgcttgtaaagatgccccaggagatggggcattatctgagggagggcgaactgagcctgacctatc

SEQ ID NO: 416877 - DNA, 393 bp, Oryza sativa
gttgttttttataattgaacaggggcgcatattataagtgacgaagcggtctcacataaaacagggcacacaggttacaacaacgagggttgtaagcccattaagccccaaacatcagatcaccacaagcaaatgtctcgaagacacacgcacacggcaacaggataactccacactggcagatcatgggatagcagcagttatcaatcagggcttgacacacagaacatcaagcccccagacgacgacgactcctttagtactcgtgaccatcatcgccatcctcatttttgtcggactcagcgccaaccttcttgtagttcttcttcaacgcggggagattctcacgggcctcagagaacttaccctacttcatgccctcacccacgtacc

SEQ ID NO: 416878 - DNA, 414 bp, Oryza sativa
gcttgaccgtctccaacgacgacctcgcgctcagtcggcaagttattcccgctgttgagggagctgacgctggtgtgctgcgatgggttcagcacgctaggcctcgccgccatcgccgagcggtgccggcatctccgtgtgctggatctgattgaagactatattgacgaggaggaggatgagctagtggattggatctccaagttcccggagtccaacacgtcgctggagtcacttgtgtttgattgtgttagtgtcccattcaactttgaggccctggaggcgcttgttgcacgctcaccagctatgcgccggttgcgaatgaatcaccatgtgacagtagagcaattgcgccgtctaatggcaagggcttcccagctcacacaccttggtactggtgcattcccgtctgag

SEQ ID NO: 416879 - DNA, 313 bp, Oryza sativa
gacgcgtggggcttttgtggatgctgctgaggccgatgaattttcagacgttgcatcgaaatcattaagatccttaccttatgattgaccaggacatacctttgtggcttttgaaacgctagaaggtgtccttgctactgggaagatgtgaaatatactgagatttattggtaacgaggctgatccatccacaggtgaagctcatgatgatggccttgaggacgagtaccagcttgaagatctggaaaatacttatggtgatcatatgttgaaggttggagtttctaactacagaaatgcctgggaaaggatg

SEQ ID NO: 416880 - DNA, 404 bp, Oryza sativa
cttgctctttctgctccgcccgcaatttcgccggcgccgtcgttgaactcctccccggccgcttcccttcatccaggttcccccatggcggactccggcgctcgcaggcagcctagcttcaccaaggtcgaccagctccgccctgggacccatggccacaaccttctcctcaaggtcgtcgactccaagatggtccttcagaggggcggaggccctcagggcaggcacatgcggattgccgagtgcctcgtcggcgatgaaaccggcattattgtcttcaccgcaaggaacgaccacggggatgtaatgaaagctggggctagtgttgaccctgggaatgcccagattgatatgttcaaggggtcgatgcggcttgcggtggacaagtgggggattgtgaaagc

SEQ ID NO: 416881 - DNA, 430 bp, Oryza sativa
ccttcattggttcctgaaattgagtcatggctgcggagctagttagactccacagggtgcgcgaacgcctcggtgccaccttctcgtctcatcccaatgagttgattgcactcttctctaggtatgttaaccagggaaagggaatgctccagcgtcaccagctgcttgcggagttcgatgccttgatcgaagctgacaaagagaaatatgctccctttgaagacattctccgggctgctcaagaagccattgtgctgcccccctgggttggactggccataaggcccaagccttggggctgggactaccattcggtgaatgtaagtgagttggcaagtgaagagctgagtgtttttgagtacttggcattcaaggaacaagcttgtgatggacacacccacagcaactttgttcttgagcttgattttta

SEQ ID NO: 416882 - DNA, 361 bp, Oryza sativa
gtgtttttttttaattttcaacgcgaaggcagaagagccataataagtactaacacatgttcgcatatcatgattaaaagcacttcaaatttaggaataacatcaaaccaccggataaaagggtcagattctgaatatcaaaattgcaagattttcttgatacacttcctagtgcaaaataagcttactttaaaatatcatccaaacacagtgcgctaacaatgagctcatggaactagttcatccttctgatgagttcgttgatgtagttctcacggttaccagcatcaccaccctcaacgtagtgggtccttttcttctttagcccacccagtggtgccttcagcttgaatggccagag

SEQ ID NO: 416883 - DNA, 464 bp, Oryza sativa
ttatacgtccgcctaaagaaaaacacgcacacgcgtcttctgttatacctcccctgggttccgctccacttcccttccaagcaagaaaaccgaggcttcagcttagctaggaccgaccgatccgatgtgcggcggtgcaatcatctacgactacatcccggcgcgccgccggttgtgcgcctccgacttctggcccgacgccgacgactccgacccccacacccccgctcccgagaaaccgccgcgcgcgaagagggagcggaagaaccagtaccgcgggatcaggcagcggccgtgggggaagtgggcggcggagatccgcgacccggtgaagggggtgcgcgtctggctcggcacctacccgaccgccgaggccgccgcgcgggcctacgaccgcgccgcgcgccggataagggcgccaaggcgaaagtcaacttcccaacgacttttgtgcccgccccgcg

SEQ ID NO: 416884 - DNA, 387 bp, Oryza sativa
gatgacgcggcgctggcggcgaagggcggcggtgcggatgtgaaagagctgatggggccaacaaacgggaaggcgttccggcggctgatggcgctctgcgtccaccgcccgcccaagtacatccccgacttcctcgtccgcgacctcctccggaaatatttcgcggacaaaagagaggagaagatccggctgatcaaagagatcgtcaccgaggaacaagactcgcagcttaattcttctctccctcaagaaattttgatcatctggggggagttcgaccagatttttccttgggagaaagcacacaaagcgaaagagaagcttggggagaaggcgaccgtgaaaataatacccaacaccgggcacctggcgcaccacgaggatccc

SEQ ID NO: 416885 - DNA, 407 bp, Oryza sativa
ctgatgacaccattttccccgcgtcttgtcgcctggtgcgtttactcctcgggggggtcgccaccgccgtcgccggaggcgggacgggcgcctacacccgcgtgttcagcttccgcgactcgctcaccgaccccggcaatgcgctgcacctcccgtccaccggcggcggcggcggcccggccagccgccctccctacggtgagacctttttccgccgccccaccgggcgcgcctccgacggccgcctcgccgtcgacttcatcgtggaggcgctgcggttggggcacccggcgccgtacctcgctctcggtggcgagacggcggtcgagttccggcacggcgtgaacttcccccgtggcgggtcgaccgcgcctcccccggagttctaccagggccgtggtcttaag

SEQ ID NO: 416886 - DNA, 429 bp, Oryza sativa
gtttttgaagcaacagcagcagtcaagccaacccgggcggcgttcaagaagcaaccgaggcagcaaaaggaggaggagggaggactccactgttcgcttgtatcgtcttatgggggaagaggatatcagcaacgacagcaagagcagctgcggctgcgaggacggcacggtggaggctccggcggctgcggcgccgaaggagaacggccgagccgcggacccgcgcctccaggccatctccgacgccatccgcgtcgtcccgcacttccccaagccagggatcatgttcaacgacatcacggcgctgctgctccggcccgccgcgttcaaggacgccgtggacatgttcgtcgagcgctaccgcggcatgcgcatcgcggccgtcgcaggtattgaagccagaggattcatatttggcccaccgatcgc

SEQ ID NO: 416887 - DNA, 370 bp, Oryza sativa
cttttaagggttggtaatggtgggcggcgtgacggggacgttcacgaacaggtgcggcggcacggtgtggccgggggtgctgtcgaactcggggagctcggcgctggggacgacggggttcgcgctgggcgccggcgagacgcggtcgctggcggcgccggcggggtggtcggggaggttctgggcgcggacggtgtgcacgttcgacgacgacggcaagggcacttgcgcgacgggggactgcggctccggcgaggtggagtgccgaggagcgggtgcgacgccgccggcgacgctggtggagttcacgcttgtcagcggcggcggcggcgggaaggactactactacgtgagcctggtggacgggtac

SEQ ID NO: 416888 - DNA, 528 bp, Oryza sativa; identical to SEQ ID NO: 389123

SEQ ID NO: 416889 - DNA, 485 bp, Oryza sativa
gtgtacttcgatgaagtcctgtttaagcactttgcagggaaattcaaggatgagtacaagatagatgtttaccagaatgctcgtgcctgcattaggctccgtgtggcttgtgagaagctcaagaaggtgctgagtgctaaccctgagtcaccaatgcacattgaatgcttgatggatgagaaggatgtgagaggttttatcaagagggaagagtttgagaagattagtgcatcaatactggaacgtgttaaggggccactggagaaggctttagcagaagctggtttaacgacagagaatgtccattttgttgaagttgttggttcaggttctcgtgtcccggcaataattaagatactcacagatttctttgggaaagaaccaaggaggacaatgaatgcgagtgaatgtgttgccaggggatgtgcgctggagtgtgctatccttaagtccacttttaagtgcgggagctttaggttaatgat

SEQ ID NO: 416890 - DNA, 374 bp, Oryza sativa
cattcacctccgccgccgccgtcgccgccgcatctgtccttctaaaaagccgcgcgcggtcgagcatgctgcgccggttaccccgcgcggcgctcgccgcctctcgcccgacgccgacgtcgacgacgcgtacggtgcagcagccgtcgccctcggtcggcagacgctcggccaccgagctaggatgggacacaccgacgacgtcgccgtcgccgagggccccgcgctcgggctcaccaagcccaacgccgacgagcccccgcaggtttcatttgctgctaaagacgtcgaattctccgaatggaagggagacattcccgcaatcccagtgacagagaatgatctggtcaaaggatcagacttcaaatttgaga

SEQ ID NO: 416891 - DNA, 518 bp, Oryza sativa
tttttttttgcggccattatcaatggctatgtcgagtgttgcatataacatatatttggggatgtgccttcttcacctcttgttgggcttcttcaggacaaaatccataactggagatcgacagctcttaccttgacatctatcctcttcattgcagctatattttggtttattggcatatttgtccgtagcgttgatcgtttcaacgaacagagtgagcatgatgtccctgccgtcgagagatcaaacctcaggccattgctcgatgaaaaccaagaggcacgggcatcttattaatctgcgcaatcattaaatccgtgtttttctcttgtagattactcttggccggattatgtccatcacgccaggaacatgtgaaatgcaaatttgcatgtgtatcggctgtacctgtaaatatagaaaaaagcagaatcttttgctttgtgaattttcttttctttttgtggaccgaccacacatacaagccacagagtatcagaactactttgtttctggtg

SEQ ID NO: 416892 - DNA, 452 bp, Oryza sativa
  unsure (1)..(452): unsure at all n locations
ttttggcttccccactctctcttcttcttgggggggtgggagctaccagcacagcgcaccaaggaagctgaggtgcgttgatttcttgatatcatggccaagaggcacctcttgttggtgacaacttgtttgtgggctctgtcatgtgccttgctgcttcatgcttcctctgatgggttcctgagagtcaacctcaacaagaagagattggacaaggaagatctcactgccgccaagttggcgcagcagggcaaccgtcttctgaagaccggcagttcagacagtgatcctgtccctctggtggactacctcaacacccagtactatggggtgattggcctcggctcaccgccgcagaacttcacggtgatatttgacactggaagctncaacctgtgggttccttcagcaaaatgctatttttcgatagcatgctacctccacagcagata

SEQ ID NO: 416893 - DNA, 482 bp, Oryza sativa
tttcagcaatcggcggcggcggcgacgcgggagaggcggtccggcgacgatggttcacgtcagcttctaccgcaactatggtaagacattcaagaagccacgtcgcccttacgagaaggagcgtcttgatgcagagctgaagctagtgggtgagtatggactgaggtgcaagcgtgagctgtggcgtgttcagtatgctttgagccgtatccgtaacaatgcaaggcacctgctcacacttgatgagaagaatccacgccgcatcttcgagggtgaggcactgcttcgccgcatgaaccgttatgggctccttgctgatgggcagaacaagcttgattatgtccttgccctcactgttgagaactttctcgcaaggcgtcttcagactcttgtcttcaaggctggcatggccaagtccatccaccatgctcgtgtcctgatcaggcaacgccacatcagggtcggcaggcaaaatgtcaaca

SEQ ID NO: 416894 - DNA, 421 bp, Oryza sativa
tttttccacccccaaatcgcctcgactagcggctgttgtgtttaaagcaggagaggggcggccgaagcggctgcggcgggggcgagatgagcgactcgttctgcccggactgcaagaagcacacggaggtggcgttcgaccactcggcgggggacacagtgtgcacggagtgcgggctcgtcctggaggcgcactccgtcgacgagacctccgagtggcggacgttcgccaacgagtccagggacaacgaccccgtccgtgtcgggggccctaccaacccgctcctcaccgacggcgggctctccaccgtcatcgccaagcccaacggggcccagggggaaggtcctctcctcctccctcggcaggtggcaaaaccgcgggttcaaccccgaccggttccttatactttgctttccgacca

SEQ ID NO: 416895 - DNA, 479 bp, Oryza sativa
tttgatcttcgtcaagaccctgaccggcaagacgatcaccctggaggtcgagggcggggacacgatcgacaacgtgaaggccaagatccaggacaaggagggcatccccccggaccagcagcgtctcatcttcgccggcaagcagctggaggacggccgcacccttgccgactacaacatccagaaggaatccaccctccaccttgtgcttaggctcaggggaggtatgcagatcttcgtcaagaccctgactggcaagaccatcacacttgaggtcgagtcctcggacacgatcgacaatgtgaaggccaagatccaggacaaggagggcatccccccggaccagcagcgtctcatcttcgctggcaagcagctggaggacgggcgcacccttgccgactacaacatccagaaggagtgcacccttcaccttgtgctcaggctcaggggtggtatgcagatctttgttaagacccttg

SEQ ID NO: 416896 - DNA, 397 bp, Oryza sativa
attattcagatattattccaatgtgtttctggacaagtagcctaaactccgatcagtctcgagaagcctgcccgtgtgtgcaaaatccagaaatcacccaggacaaatttacatgatcccaaccgtatttgaggccattaacattgattaaagtcaaactatggccgttccgactccgaaggcgctatcatagttcctcaccatgttcttcgtcgagggcataccagcaacaacatcttcttcgatgccacattcgtttgtgccccttatgatcttgaagtacccatcattgccccatcctctgttccactggtttgcaagcagccagtaatcctcgccagcatccgtggttccccattcaatcaacttgacagcatgaccacccattatgccacct

SEQ ID NO: 416897 - DNA, 434 bp, Oryza sativa
ctttaatgtgctctccagggaggcgctcttctacgaccgtcatcttccccttcatcgccttcttcggcgcctttgccttcgtgctctaccctctcaggaatgtgatccaccccaccgcgctcgccgacaagctccttgcggcgctcggcccgagctttcttggccccgtcgccattctgaggatttggagcttttgcttgttctatgtcatggccgaactgtggggcagcgtcgtcatctcggtcctcttctggggcttcgctaaccagattactacagttgaggaagcaaaagaattctaccctctatttggtcttggggctaatattgcgctcatcttttctgggcgtactgtgaagtatttctcaaatctgcgcaagacattgggtccaggtattgacggatgggaggtgtctttgaaaggaatgatgagc

SEQ ID NO: 416898 - DNA, 457 bp, Oryza sativa
caccaaatccccccaccatggatcaccgcctcctgctcctcggcctcctcctcctctccccggcggtggccgccgcctcagtccccggcgaggaggagccgctgatccggcaggtggtcggcggcggcgacgacaacgagctggagctgaacgcggagcgccacttcgccagcttcgtccagaggttcgggaagtcctaccgtgacgccgacgagcacgcgtaccggctctccgtgttcaaggccaacctccgccgcgcgcgccgccaccagctgctcgacccctccgcggagcacggcgtcaccaagttctccgacctcaccccggccgagttccgccgggcctacctcggcctccgcacgtcgcgccgcgccttcctgcgggggctcggcgggtccgcccacgaggcgcccgttcttcccaccgacgggcttcccgaccgacttcgactggagag

SEQ ID NO: 416899 - DNA, 503 bp, Oryza sativa
gtttatgttgcaagtgacgtaatccaaaatgtggcaagtggcatacttcaagatgttgcaagtgatgtaattcaagatgggaataaggacttcgttggagaactatcagtgacattagttgatgccaggaagcttagctttgtcttattcgggaagactgatccatatgttgtcatgattcttggtgatcaagaaataaagagcaagaagaatagtcaaacaactgtaattgggcaaccaggcgaaccaatctggaatcaagactttcatatgctagttgcaaaccctcgcaaacagaagttgtgcattcaagtaaaggattcagttggtctaaccgatgtcactattggcactggagaggttgagttaggatcacttaaagacacagtacctacagacaaaattgtaactttatatggaggatggggcttacttgggaaacggtcaaaaggggaagtactcctttcgctcacatacaaagcatatgtcgaggacgaggaaga

SEQ ID NO: 416900 - DNA, 488 bp, Oryza sativa
tttttgctgtaggtctggagagtggagaggagggggaatcctactcagtcctcgccttcagatttcagaacacaggcaatcggccctagctgcaatccaacaagatgggcatgcctctgctgctgctgctgctgatcctcgtcgctgctggcccccaggcaggcagagctgcaaagccaatcccaaatctccagctcatgaccaaggagggcggcagttcaagaatcatccaggacgacatcataaaggcaatcaacaagcatcccaatgctggctggacggctgcacggaatccatactttgcaaactatactactgcgcaattcaaacatatccttggagtgaagccaacaccgcatagtgtgctaaatgatgtccctgtcaaaacttatccaagatcgctgatgcttccaaaggagtttgatgccaggtctgcatggtcacagtgtaacacaattgggaccatacttgatcagggtcactgtggc

SEQ ID NO: 416901 - DNA, 373 bp, Oryza sativa
atctaactgcgagtgattcaagaaaaaagaaagcgtgagctttcgatctcttcggagtggtttcttgttctttgaaaaagagggggattaatggcgacagccgggaaggtgatcaagtgcaaagcggcggtggcatgggaggccgggaagccgctgtcgatcgaggaggtggaggttgcgccgccgcaggccatggaggtccgcgtcaagatcctctacaccgccctctgccacaccgacgtctacttctgggaggccaaggggcaaacacctgttttccctaggatcttgggccatgaagctggaggcattgtggagagtgtgggagaggggtgtgaccgaactcgtgccgggcgaccatgttctcccggtg

SEQ ID NO: 416902 - DNA, 418 bp, Oryza sativa
  unsure (1)..(418): unsure at all n locations
ccattctcttataccagagcctccgccgcctcagatganccttttaagatccaccggggcagcctcaagttcaagcttcacgccacgtggggaaagctgccgaattacgcggtgattgagcagaggtacttcgattgcgagatgttccctgcaaacgatgaccacccctcgcacgacgtagcgagggggcagaggttcgtcaaggaggtgtatgagacgctgcgagcgagtccgcagtggaacgagactgctctgatcatcacctatgatgagcatggtggattctatgaccatgtgcctacgccgggtgtcggggttccacagcctgatggaattgttggccctgatccttactactttaagtttgatcggcttggagggggcgtgccttcttttcttattctcaccatggatcgag

SEQ ID NO: 416903 - DNA, 336 bp, Oryza sativa
cgctttgcatcgcacttgtagctctcgaccccctcgtctaatgcatactctcgctggggtcaaaccaaaatcgcaactggcgaagattaagctcgggatcaatgggttcgggaggctcgtgaggctcgatgccagggtggccctgcagagcgaccaccatcagctcgctacctgcaaccacccctctatcaccaccgactacatgacatacatgttcaagtatggcactgtgcactgccagtggcagcaccatgagggtatggtgaaggacttcaagacccttctcttaccccagaaagaggtcaccgcgttccgctgtatgaaccctgtggcgat

SEQ ID NO: 416904 - DNA, 504 bp, Oryza sativa
attcacagaagctgctgagctcttgagtgtatggtgggtggaaatcattggcaatgtggacagcaggatgctctccccgaactcaacttatgctgcagttttggtgttcaagatagctgaggagttctaccagctggatactatagatgcaacagtcaacctcggaggctcgaaatcaagtcgcgaggttgctctcactcgatcccgtcgtcgtcctgaagaagagatcagtgcagtactgttccctcggacaagagctgacggctggatggaggtggagctaggcgagttctttaacgaggaaggtgaagatggacacgtgaacatcagaatttttggtaaaggacccaattggaagacaggtcttattgtgctgggcattgagattagaattaagaaatctgccagatgatcgagcttctggatcaatgatgcgtcctggtgagactgaaatgtataagatttcccgaccccgaagctttgtcgcttaagtggcattcgctt

SEQ ID NO: 416905 - DNA, 293 bp, Oryza sativa
cttcctcccagccatcggcgacgcgaggacgcgacgctccctaacaaccaccaccggcttcgccgacctcgccgacatgctgtccgcgcgcgccgccgccaccgacgccgccgtcgccgcctacccgctgtggaagcgcggcgagggtggcagcagcgggagcgggagcggatgcacgagctgcagggaggtgcggaggagggccgcggcggcgagggtccgtgcggcggctcccaggagggtggaggcggccgcgatggagtccgcggccggagacccagaagaaggaggag

SEQ ID NO: 416906 - DNA, 435 bp, Oryza sativa
cattaagaaagggtcaacaatctggttagatgtccattggatacacttgcagggggaattgctgcagtaggaactgcttctcggcccctcttgcatcaagaatctggtgatccttatgcaaaggcttatgcaaaactgactgcactttttgaacaaagaatggactcatatgctaatgctgatgccagggtttcactcgaacatattgcagtgaaacaaggacatagtaatgtgacgacacttacaccaagtgccattgctattgaggcattgctaaagatggagagctttcttactgagaaggcaatgatcagaaactaaccacttttgggtgggtaaaagcacatcaacaaacaaaaactcttgtttgttctggtggatttatcgcatatacctaaggcgggtttcttagtatagcatgaacttgttagtcac

SEQ ID NO: 416907 - DNA, 387 bp, Oryza sativa
gtttgtgtccctgtctcccctccttcctcctctgctttcccttaaactcttgcgcggtctcacaagagagagagagcgccagactctccccaggggaggattcagccatgaagggggccaaatccaagggcgccgccaagcccgacgccaagttggctgtgaagagtaagggcgcggagaagcccgccgccaagggcaggaaggggaaggccggcaaggaccccaacaagcccaagagggctccctccgctttcttcgtttttatggaggagttccgtaaggagttcaaggagaagaaccccaagaataaatctgtcgctgctgtaggaaaagcacccggtgataggtggaaatccctgaccgaagcggacaaggcttcctatgtag

SEQ ID NO: 416908 - DNA, 416 bp, Oryza sativa
tccaatctcgccgcaatccccatcgccgccggtggtaaagctaaaatttcggggggggcacctcctcggcgacgaccgagaccgcgagcgatttcggagggctcgatcgatggcggctgagggagagaagaagatgatcaccctgaagagctccgaccgggaggagttccaggtggaggaggcggtggcgatggagtcgcagacgatccgccacatgatcgaggacgactgcgccgacaacggcatcccgctccccaacgtcaactccaagatcctcttcaaggtcatcgagtactgcaacaagcacgtgcacgccgcggccgccccggcctccaagggcgccgacgaccccgcgttcgtcgtcggagacgtgccgccgtcctccggcgaggacctcaagaactgggacgcccact

SEQ ID NO: 416909 - DNA, 144 bp, Oryza sativa
tatctaagccagcaattgcatccgagctcacctagcttttttaataacaaccagcggttctatcaattccatctccaagaagcagcggctagcatcagctagtagttgccatggactcttctactctgggctctcccgtgagct

SEQ ID NO: 416910 - DNA, 486 bp, Oryza sativa
ttttgatcgccccctccttcatcctccggtgggggtcattaaatcgtcgggggggatctgaaacacccagcagcggaagggcctccaggcgcacgccggagcgattcacaagacgcacctgcgcgatctgatggatgatgccgagcgctgcaaggcaatgacagctgagtatgaaggcatatttctggattactcgaggcagcgtgcaactggcgagaccatggagaagctgtttaaatcggcagaggcggcaaagctcaaggagaagattgagacgatgtttagtggtgacaagataaatagcacagagaacagatctgtgcttcatgcagctctaagggctccaagagacgaagtaatacaaagtgatggggtcaatgtgggtcccgaagtttggggtgtcaaagataaaatcaagcagttttcagaaacttttaggagtggatcatgagttgtggcaactggtaaagcattgacacatgctgt

SEQ ID NO: 416911 - DNA, 104 bp, Oryza sativa
gggggccaaataatatacggaaattaaccaacacgccatataccacacgcgcacttacatacagtgctacgtacacgtacgcacacatgccgtggctgcatcac

SEQ ID NO: 416912 - DNA, 439 bp, Oryza sativa
ttttgggttttataggatcagggggttctattaccacaactttttaaggatggaatcgagtagcaatactttcaccccaaaatacagtttagcgacaatatcttagaaaagccgcttgctttgccgccatggctggcaagctgagcagagcagctaacacaaagaacacgagatcactataaaccaaacggcaacgaacgaagaaaatacagggtcttttttggctgaagatacacgaagcggttcggtttcttttatttttaggctcctctcctcctcgatgatgggtgtatggcaatggcaatggcgatgggatcttggcttagttgatgggaaggggctcgccgttccactccttgagggagtccagcatggggtcgatgagcttgccctgggtgatggtgaggaacacttttgtgaactcctcgccgggggactt

SEQ ID NO: 416913 - DNA, 501 bp, Oryza sativa
tttaccttctcctccggctcttcttcaggagggaatcttatattctcctggggcccaccaccaccaccgtagcaatggcgggcaacgggccgatcaacaaggaggacccgctcaactggggcgcggcggcggccgagatggccggcagccacctcgacgaggtgaagcgcatggtggcgcagttccgcgagccgctggtcaagatccagggcgccaccctccgcgtcggccaggtggccgccgtcgcccaggccaaggacgccgccggcgtcgccgtcgagctcgacgaggaggcccgcccccgcgtcaaggccagcagcgagtggatcctcaactgcatcgcccacggcggcgacatctacggcgtcaccaccggcttcggcggcacctcccaccgccgcaccaaggacggccccgccctccaagtcgagctcctcaggcatctcaacgccggaatcttcggcactggctccgatggccacacgctgccgtcggagacgg

SEQ ID NO: 416914 - DNA, 459 bp, Oryza sativa
tttttatcctctctctctgtctccgtccccaagggagcgtttgacgatcccgtgggctgcacagttcaaaacggggatcggtagtgttctgcatcagtgatgggctggagatttgcgttgttactgttacatgttcttctgtgccttgtcaatggcgtctcctgtggccgcacgagctcttacgtgcgtacggagtacccatcgactgatatacctctagaaagcgaatggtttgcggttccaaacggctacaatgcgccacagcaggttcatatcactcaaggtgactataatggaaaagctgttatagtataatgggttactgtagcagaacctgggacaagtgaggtgctctatggtaaaaatgagcaccagtatgatcagagagtggaaggaacagtaacaaattataccttttacgactataaatctggatatattcaccattgcctctgtgat

SEQ ID NO: 416915 - DNA, 424 bp, Oryza sativa
tcttttctatgctcgaatgtttggtctagctgggggctttgttatatgtttgcagggtatgtatactggagatgatgattatatattagagttcttcctgccaccaaattgcaggaacgaagatgatcaaaatgccttgttggagtccatattagctcgaatgaagaagtgccttcgtaccctaaaggtagttggcaacggagacaccaatgaagtttgtctgcaaataagtaatgtgctaataattgagactgaagatttgaagacaaatgtgcactttgagaattctgaaggttgctttcgtgaatcgcctgaaagtaatggaagccaaagagtccacgaggttgataatgatggcaacaaagtttcaatcatgtcagagagacatctgctagctgatgacaactctcataacatgggcatc

SEQ ID NO: 416916 - DNA, 482 bp, Oryza sativa
ggttgttgcagtcaccagatccctttcaaggtcaaaaggaatagggtccaatattacacctttgacatactcaaatccccgtagcttgttctttgctgcaacagattgcagctctttcaggatatgctctttaaggccttcagacttgcatatttcagcaaaagaacccttgcagccatttgattctgcccacttcatggtgttctcttcatgtggattaactactgccactaacattgatctgaagctgtccccatatacccagacatcttcaacggttggagggaaaacatatactttctccaggtattcaactgcaacatactccccttgtgacaacttgaatatatttttctttcggtcaattaccttcaggattccatctgagttcatctctccaatgtcacctgtgtgaaaccatccatcagccatgaccttattcgtgagctcaggatttttatagtatccggtgaagaagtttc

SEQ ID NO: 416917 - DNA, 481 bp, Oryza sativa
gggacgatgaatcatatcaccagggcacgaatggcttgtgtccactggtcgaattcattcaccaaggagatgatccgctctagggtcgaagcaggtggcacagtctgttatttcggaggtaccctactactcacttctaggtacaaaaaagaacgaagcacgggggatttaaaatggcaaagaaagaaaaggtcgtgcgccagcccagcatcaaatattaagggcaatgaggtgctcctgtacaagacgcagaaatgagaattctcaaccttgaaggaccttcaatggatctaactgcccactacagtaactggaaggaacagctgatagtgcaagtcttcctttccactcttcacctggcttcagagtaataggcttctcaacagctgcaggctccacacaaagcatgtgtttgtattctccatctccaaaatcttgcatagcttttgccttcttgtcccaagggttccaaacaacagca

SEQ ID NO: 416918 - DNA, 377 bp, Oryza sativa
gacaaagcatatcaatttactagaccatttcagaacaaacgggtacatatggacaggacagtaaatgttggaaaaccaaacaaaatataagcacttatagggcccacgaaaaggaacaatctgggactagcctccacaaaggggttttttccttcacaggcacccacactaggtgtggtagggggactatatgttatataatatgtaagaccggcactaggggattgttcagatatccaggtgccaaaacgctcaagccttgttggcaatgttgttggaaagccagtcaagacccttatacaaccctttaccagatgtagcacaagggctttggatgtaccaatgcctctggcgcagggaatgcaaaccaagcttgt

SEQ ID NO: 416919 - DNA, 510 bp, Oryza sativa
cgcaagcgcaagcccagccgcctcgtcgtgttcgcgttcgtcgcgcgggtccgacctccaaagccgccggtacccttcccgtcttcgtcgtcgccgcgcacgcagatcgcgaaccagcccgcgcgccgcgcagcagcgccgcggagaggaaaggagagctccgccgcgcaccccccgccaccatctcgtagggagagatggggctcacgttcacgaagctgttcagccgcctcttcgcgaagaaagagatgaggattctcatggtcgggctcgatgcagccggtaagaccaccatcctctacaagctcaagcttggcgagatcgtcacgaccatccccaccatcggatttaatgttgaaaccgtggaatacaagaacatcagcttcactgtttgggatgtcggcggccaggacaagatcaggcccctgtggaggcactatttccagaacacacagggactcatctctgctgtggacagcaatgataggagcgtgttgttgaggccagaga

SEQ ID NO: 416920 - DNA, 478 bp, Oryza sativa
gtaggttaaaatccagcggattcataaagcatactgctgtcccacaggaaactgtttcataaaactaacatatcatacggactcgatggtccattaaaccagacacaagtagacatcagcaccacaaatacttgacgaacagaggctcgggacgaccaggcacatcggcagctccaccaaactggctgattactgaccaccacggaggcggagcaccaggtggagggtggactccttctggatgttgtagtcggcgagggtgcgttcattcttcagctggttggcagcgaagatcagacgctgctggtctgggggaatcccctccttgttctggatcttggccttcacattatcaatggtgtcggagctctcaacctccaaagtgagggggtttccagtcaaggtgttcacgaagatctggataccaccacggagacgaagcaccagggggaggggagactccttttggatgttgtag

SEQ ID NO: 416921 - DNA, 495 bp, Oryza sativa
acgcctgttttttcaagactctgaccggccagactatgagccttgttgaggaatcttatgtgcccaccaacaacctcaggggcaagatccaggacaaagagggcatccccccagaccagcagcgtgtcatcttcgacggcaagcagctggaggatggcaggacccttgctgactacaacatccagaaggagtccaccctccaccttgtcctccgcctccgtggtggcatgcagatctttgtcaagacactgaccggcaagaccatcaccctcgaggtggaatcttctgacaccatcgacaacgtcaaggccaagatccaggacaaggagggcattcccccggaccagcagcgtctcatctttgccggcaagcagcttgaggacggcaggacccttgctgactacaacatccagaaggagtcaacgcttcaccttgtcctccgtctcaagggaggcatgctaatcttcgtgaagactctgaccggcaagaccatca

SEQ ID NO: 416922 - DNA, 492 bp, Oryza sativa
gcatcatcgtggaggtgttcaagacgcagggcgccgaggtcggcgacggcaccacctcggtggccgtcttcgccggcgagctgctgcgccaggcgcaggagctggtggagcagaagatccacccgcagaccatcatccgcggctggcgcaaggccgtcaaggtggcctacgacgcgctgcaccagtccagcaaggacaacagcgccaacccggagctgttccgccgcgacctggtcaacatcgccgccaccaccctcagctccaagatcctcaacgtggacaaggagtacttcgccgagctggcggtctcggccgtgctgcgcctgcgcggcagcaccgacctgcagaacatccagatcctgaagaaggtgggcggatccatgcgcgactcgtacctggacgagggcttcatcctggacaagtccatcggcgtgggccagcccaagggcattgagaatgtgggtattatggtggccaacacggccatggaca

SEQ ID NO: 416923 - DNA, 447 bp, Oryza sativa
agcgggcgaaggccgatcccgcgcgcggaaggtggcgaagctgggggagcgcacaagccgaacaaaggcgaaaaagacacgggaaaagcacgccgcacgcagtcgggccgccacccgccgccgccgccgccctctgggcccgccgtctcaactagtgtgtgcgctggcgcggggccgcgcggatgatgtcgtcgacgcggaggatgacctcggcggcctcgtggccggagaccagcacctggctcttgcacttgaacgactcggtgatgcggaggtccaccatgtcgcccaccacgccgcgctccatgtccaggcccgcggtgctgcggccctcgtagtgcgcggcgcggaggcgggtcaccagctcggagctgtcgaagccggcgttgtcggcgatgatgggggggatggcgcgcaaggccttggagaaagcctcgatggccagcg

SEQ ID NO: 416924 - DNA, 468 bp, Oryza sativa
cacggtactgcttttctaggttcacaagtcatcattagcagtaggcactcttgaagttgaggcgaccaaatataaggattcttcaaattaaccatccaagttgaccacagcataacataacatggattgaataactagaggtactaagatgaagtatcaaaattcaacaactccaaaactaagatatatggggaatacactctagtcttcctcctcgccctcgttctcagcaatgttgaagtatctgagctcatagacattgcggtccttgttagccgcaataacacgtagccagtcccgcacattgggcttcttcaagtacttcttggtcaagtacttcagatacctcttggagaaggccccgtcggaggtgacggggaccttggtcttgtcgcgcgtgacggtgacggagtcgccgaggttcccggccttgccgccggcgaccttgatgcgctcctgcaggaactt

SEQ ID NO: 416925 - DNA, 456 bp, Oryza sativa
gttttagcttccaccagcgcgaagcggcggggggggggcttgatggcgcgcggcgtgtctgcagcggccaagggcggcgcgggcggcaagaagaagggctccgtctcgttcgtgatcgactgctccaagcccgtggaggacaagatcatggagatcgcgtcgctggagaagttcctgcaggagcgcatcaaggtcgccggcggcaaggccgggaacctcggcgactccgtcaccgtcacgcgcgacaagaccaaggtcaccgtcacctccgacggggccttctccaagaggtatctgaagtacttgaccaagaagtacttgaagaagcacaatgtgcgggactggctacgtgttattgcggctaacatggaccgcaatgtctatgagctcagatacttcaacattgctgagaacgagggccaggaggaagactaaagtgttttccacatatatctt

SEQ ID NO: 416926 - DNA, 501 bp, Oryza sativa
gtcttctacatgctatggaggtcagtggtttattacttctgtattcatcccttggtgatgctgaagggctaacaaaattaacatctatggctaaagaacaagggaagaacaatgttgctttcctttgtttcttcatgcttggaaaactggaagaatgtcttcaattgttaatcgaaagtaatcgtataccagaagcagcattgatgtcgagatcttatcttccgagcaaagtccctgagattgtaacattatggaaaaaggatctccaaaaggtaaaccccaaagcggcagaatcattggcagatcccaacgagtacccaaacttgtttgaagactggcaaattgctctcaatgtagaagctaatgttgcgcccaaaaggggtatttatgcaccagctaaggagtacattatccatgctgagaggcctaacgagactctggtggaagctttcaaaaatatgcgtatacatcaagaggaggtgctgccagatgaaaatggag

SEQ ID NO: 416927 - DNA, 333 bp, Oryza sativa
atgacttcaggcctccgcatgtttgaggaactccaagatgttgattaccttgtaagttgttcataattataggtatgaacaggtagtttgaatatttggctacattcttttgttgcttgatgctttgtgtaattttggcaggcaagaagctgtagcagagccatgaaggctgttggtgttgttgaggcatcctgtgaggctatatttcaacttgtgatgagcatggataccacccgttatgagtgggactgcagcttccagtatggtagtctagtggaggaggtagatggtcacactgcaattctgtaccataggctacagctggattggttc

SEQ ID NO: 416928 - DNA, 524 bp, Oryza sativa
tttttgtttgatccaaacagggcgtatattattatagcagagtggtgtcacagttcaaagtgcttctaagcgaaacgagcagaataattcaatttccaaggctggtagatctggattacaatttggcgtgacatagctcagaagcacagccaaaagcagatgaaccatcatcggttcatttatcagttgccagaacacaccgcaggcagccaccttcatgcagcaggtcaaacgccttgttgatgtcagtcaggttcatgctgtgagtaacgtactcgtccaccttgatttccttgttcaagtacttctcaacgagccatggaacttggcttcggctcttgaaaccgccgaaagctgttcccttccagacacggccagtgacgagctggaatggccgggtagagatttcttgcccagaagcagctacaccaacgatgacagaggttccccagcccttgtggcagcactccaatgcagaccttataacagaaacatttccaatgcattcaaagctgtagtccaca

SEQ ID NO: 416929 - DNA, 88 bp, Oryza sativa
ttcctctcacctcgcaatcacatcctcttcgcttctcttatccatcgcatgtaccaccgagcgtgcaaggaggggggggggggggggg

SEQ ID NO: 416930 - DNA, 459 bp, Oryza sativa
ggacagtaacatgaacaggagatgggggtagtatatatactcaaccaacgttagtacgttacacaaccaacctcttgttcagctaggtatatggaaccaaccccattttattattgttggcctagacagttaagtcaaccatcaccacagaaaaaattcaaggtacaagagaaaaggggaaagaggcaactcatgcgctaagttacagaatgacacaaggacaggcaaaaaacatcaggaagtccagcatcaatgtgattctttggcggcctcaatctctgatgtgctttcgaccatcacaatcacagggctacagctgaaatactgagagctacgagtttagagcaaccgcgctctgcgactctacagtcttcaggacttcctctcccattcgcttgcatccgaccaaggtcgttccaggagaatatatgtccccagttcggaacccgttgtttagtg

SEQ ID NO: 416931 - DNA, 479 bp, Oryza sativa
  unsure (1)..(479): unsure at all n locations
tttttgggtttttttttttttttttttttgaggaagcgcggcaataaaacattgcattgaattctgaacgataaacaccaggaaccggcgtttatttgaggcaagcactgcccaaaatctcgcaaaagtactgaaaccttagacatagtacacatccatggcaaacatggatgccaaatgacaactacagaaaattatcaaattcgaatgcagctgacggcttctcctgctgaagatgcatattttcccctccattacttggatgggctctttccatcgacagccaatgggacggcgctggccaggctgcggtatttcagagcatagaacatctcaatgtaacggcgagtctcgcgcctttcaaggttgcttacgtacttccagaatccgtatacaccagtcaaggtcatcagcctttcagagtacagcttccaggtgtacttttngtaaatcctttgcagacctccctgtgaaatatt

SEQ ID NO: 416932 - DNA, 394 bp, Oryza sativa
ttttctcgctcttccccctccgccgccaccgtggagccttttaaacaccttgggggctccataacccggcccaccatgtcccagaagacccattgccttccttcctgatccccccagccaagctgaacacactcagccagggcaagactgactacagggccaggattaggctcaccaaccaagataagaacaagtacaacacaccgaagtaccgctttgttgtgagatttacaaacaaagatatcacagctcaaattgtctatgctaccattgcgggtgatatcgtgatggctgctgcctactcccatgagctgcctcgttatgctcttcaacttcgcttcaccaactatgcaaaacattactgcacttgcttgtttttggctcgccgtatgct

SEQ ID NO: 416933 - DNA, 390 bp, Oryza sativa
ggagactgaatggagcaatggctttgtacatctcaaaagttactgtaaggtgtaagccaagccatttccacatttacaaattgtttgtcactacgctgtaactagcagtagcacaactaggaatcaaccacgctaattaacaaaggaaaaattactgaaacaacgaagatatattacatttacattgtctaagctacaccctcaaactttgcctttgtatatcatcaccatttctgaaaaaagttcagaactggatcagcttatatcagctatatatagctctagctctagctaagctagaacgggttccacgcctgcgacgccatggcgctctgctgcacgtagccggaggactcctcctccatccagccaagatggaacccctccgac

SEQ ID NO: 416934 - DNA, 366 bp, Oryza sativa
tttccttctctatctagaattctagatctccaggtgaatttgaaatctctatcggggtcaaaggagaatgaaccatcaaatcaatatatacaatgagcttgatcagcatgatggaggcgaacctgccgacggggttccggttccaccccattgacgaggagctcgtggttgactacctataccacaagctctccggcggcagcggcggcggcgccggcgagagatacagaggcgtggacatggcggacgaaaacctctacaagtgcaagccgtgggagctctcagacgccgctcggtagtgcgccacgcagtgtaacttctgcagtctgcacgaccgcacgaactccacggtgcatggcaccaacc

SEQ ID NO: 416935 - DNA, 119 bp, Oryza sativa
ttttggtctttataaaggggggggtaataacactgatgataaaaccacatgtggaaaggaggacgatgatccacaggatgggacaagtacttttggtacggccattattggaggattac

SEQ ID NO: 416936 - DNA, 472 bp, Oryza sativa
ccttactactgtggcatcggtgctgacggggcttttgggcgtgatattggggactcccactacaaggcttgcctctatgccggcatcaacatcagtggaatcaacggcgaggtcatgccaggacagtgggagttccaagttggcccgtctgtcggcatttctgccggtgatcaggtgtgggttgctcgctacattcttgagaggatcaccgagatcgccggagtcgtcgtctcatttgaccccaagcccatcccgggagactggaacggtgctggtgctcacaccaactacagcaccaagtcgatgaggaacgatggtggctacgagatcatcaagtccgccattgagaagctcatgctcaggcacaaggagcacatctccgcctactgcgagggcaacgagcgccagctcaccggcaggcacgagaccgtcgacatcaacaccttcagctgtggagttgccaaccgcggcg

SEQ ID NO: 416937 - DNA, 464 bp, Oryza sativa
tgttttattagcaccaaccccgtctccttgggcattcctgcgccgctagggcgttctagaagctctcctcctcctcccatggcggcgacgatcgtgtccgtcaaggcgcgccagatcttcgacagcaggggcaaccccaccgtcgaggtcgatgtgtgctgctcagatggaacctttgcaagggctgcagttcccagtggtgcatcaactggtgtctatgaagctctcgaattgagggacggcggatctgattacttgggaaagggtgcctccaaggctgccgacaatgtgaactcggttattgccccagctctgattggcaaggaccctacgtcacaggctgagcttgataacttcatggttcagcagcttgatggaaccaaaaatgagctggggtggtgcaagcagaagcttggtgctaatgcaatcctggctgtgtcactggccatttgcaaaggtggagc

SEQ ID NO: 416938 - DNA, 503 bp, Oryza sativa
gtatcaatatccaaacgggagcttctcacataaataagataaccgatagctcaaggttgagaatcaaaaaccgaaagaaataggttctttgagcagagtgcagaacataaacaaaaatgcctgttgcaaattgcaagactacaggtaaacttaaatgccataaggagtttgtttggcagcataagatgaaactactgtgataaggctactctctcactcgtcatcctcttcctcgtcatcatcatcagcaccagctgaggagttgagagcattcaatctttcgacgagactggccttcctctgctcgtaggttagcttcttgaggttgtatctcttgtgggtagccggttccttcttggtcgatttggccatggtaggatcagcgcggatggcagcatggaccttcttgtacagtgattccatgccatcagcgtcaattcccttcttgaggtactcactaaagtgggcttggaatttctcaggttcctcctcagccatagacc

SEQ ID NO: 416939 - DNA, 474 bp, Oryza sativa
  unsure (1)..(474): unsure at all n locations
tcttctcgctcttccccctccgccgccgccgggggggatctgcaacagcaggcgagcgacatgggagggtttgtcaagacccagaagacccatgcctacttcaagcgtttccaagtcaagttcaagagacggaggcagggcaagactgactacagggccaggattaggctcaccaaccaagataagaacaagtacaacacaccgaagtaccgctttgttgtgagatttacaaacaaagatatcacagctcaaattgtctatgctaccattgcgggtgatatcgtgatggctgctgcctactcccatgagctgcctcgttatggtcttgaagttggtctcaccaactatgcggcagcttactgcactggcttgcttctggtcgccgtgtgctcagctccgtggtttggccaggagtacgagggcaatgttgaggccatgnggaggacttctatgttgaaccagctgatgaaagga

SEQ ID NO: 416940 - DNA, 421 bp, Oryza sativa
tttttgtttttttttttttttatggacaccccaatttcgtacaaaatggaatcaatgcattacacacagtaacatcatcagtaggagcaaatgctcatgaacaaaaactaatctcgtgtacaacaaagaagtactaaaataaccccctcctaatgaacaacttctacaccttgagactcttgaggatcataggcagcccatactttggccgaagcgtgatcacgtcggttggcacgtggacgtacttgggtgatagagtaaaggagaacctctgtaggatcattgcaattacggccttggcctcgatcatggcgaagttctgcccaatgcatgccctcggcccactggagaaggagagcaacgcgttgggatattttcccgcctttgacaccccattcttgaacctttccggcttgaatat

SEQ ID NO: 416941 - DNA, 485 bp, Oryza sativa
  unsure (1)..(485): unsure at all n locations
tcttttattacgtgctgcagggaagacattgggtattggatacggagcgggggctaccatttgcttggcagacgtgagcatggtgaggcaggtgttatcggaccggacggggatgtaccctaagaacgtgtggaacccatacttcgcacgactactcggcaaggggcttgtgctcaccgacggcgatgagtggaagcgccaccgcaaagtagtccacccggcatttaacatggacaagctcaagatgatgactgtgactatgtccgattgtgcccaatctatgatttccgagtgggaatccgagttggggacaaagggcgatatagtggagatcgagctgagccgacgattcgaggagcttaccgctgatgtgatctcgcacacagcattcgggagcagctataaggaggggatgcaagtgttcttggacaaagagagcttcaatttcttgccttctccaccttncttagcatccaaatcccggg

SEQ ID NO: 416942 - DNA, 344 bp, Oryza sativa
accacaactttttaaggatggaatcgagtagcaatactttcaccccaaaatacagtttagcgacaatatcttagaaaagccgcttgctttgccgccatggctggcaagctgagcagagcagctaacacaaagaacacgagatcactataaaccaaacggcaacgaacgaagaaaatacagggtcttttttgtctgaagatacacgaagcggttcgatttcttttatttttagtctcctctactcctcgatgatgggtgtatggcaatggcaatggcgatgggatcttggcttagttgatgggaaggggctcgccgtttcactccttgaggcagttgagcatggg

SEQ ID NO: 416943 - DNA, 350 bp, Oryza sativa
ttttcactgctggcgctgacttcatcctggtggggtccatttacaagccgtgcggtctgatccagctgcacaccatgcagtccggctcaatggccactggtgtcatgcaccggtggcctgtcgtgcactgtgtaggagggcaccacaggctttcacatgggtgccttagaccctgacatgctgaaccaggcagatgctgatgccattgcagcaacagtgcacccgcgtcacacaggtttactgcatcccctggttccaggatacggtgaaggcctgcatgaacccggacctcagatgtagccagcccgccaggaagtggcaggccacgctggaggaggacaccaaggggt

SEQ ID NO: 416944 - DNA, 456 bp, Oryza sativa
ttttctagatcgcgagcggccgcccctcaggttgtttttttataaaaactaagcggggcatagaataacaaccaccatgtgccgagcaatttacatgttgggacccaaagacaacaatactatgaggatgcctgaactacctcccactggataagaccactaagcctgcaaatcagacaaataacctcaccagcatcagcagggcacctcctccatcctatccaccggattgcatatgccggggcttctccagtcgaatgacgcttcgcacggattcccagcctgcgccttccattcacaatctgggggagttccacaggaaaggcttctgttatccacatgctgaacatccaatccattcaaccaataaccatatgacacctgctcgatggaatatttgaacaagatataccaacctgctgatatgtatgctgctaaatccatgggtacaacata

SEQ ID NO: 416945 - DNA, 475 bp, Oryza sativa
tttttgttatagaatggtcaatgtatatgcacagcaaatgaattagtcttggggttatgtatgcatgcaggtacacccacgacaacaaaattaaaaactataccaacaagaagaatttgcttgagcatatctgctcaaaaattacaacgcatatgccagtggtcagactagtatgtatgtcatgaatttgtcacctctgactaattaataactagatatacaatttaagatgatcttattacttatgagtcaccatgtcttcttttgatttgattagcgagtacgtcaggtatacatttttttctgccctttaccttttacgctttgatttaagggttgatgtctgtgagttgttgtgccagttacgctttctctgattgatgaaccagttgttgatttgcttgagctgcaggccagtctttttaacaagctttgccttatcattctccgtggggtatggccacttggagtgttg

SEQ ID NO: 416946 - DNA, 473 bp, Oryza sativa
gttctagatcgcgagggccgcccttttttttttttttttttttagttacaagaggatgtaaattaaatatgctttgtgtctgaggttgcatttacacacttggcgtgcagttaaaggggttcatctatgtaatattagtgaatcataaaatattttcgaattcaatttttgtacagtcctacaaatgccatacatagagtgacatttttgggtgggtcgatcaagaagcagcagtgctccctttgtatcgcatggcgcagaagacaaagaagagcaggtcgaggagcaagagagcagccatgagccagaagaagtagtcgaggtgtcccttgttgaggtcgtcggggatccatccggggtcgccgccgcgcgtggtggcggaggcgacgacggtgaggaggaacgcgctgaggtagttcccggcggcgatggcgagctggccgagcgcggggcacatgctcctcatggagcgc

SEQ ID NO: 416947 - DNA, 493 bp, Oryza sativa
tctaaatttcttatcctcccctctctaggggggcctgcctaactcctggtgagctaccactaccagcagctatgctggcatggaatcgagctgctcccaacaggtaactcatcaacatgaacctactccaacctctatgctcactctgaattctcaaggtggagatctcatcaggtagatggccatggaagcaccatatgaggagagggcgcctctgcttcatccccaacctgaaccttcacggggggatgcacattcacagtatacaggtgatggatcggcggacgtcaacaaccagcctgctctcaagcgcaacacggggaattgtagagcatgcttcatgatcctaggtgtacaattcagggagaatctggcttactttgggatctccaagaacctggtgacctacctcaccaaggtgctggacgaaagcacagagaacgccacgaggaattcctctgcttgggcgtgcgcctgctacctcactccactc

SEQ ID NO: 416948 - DNA, 468 bp, Oryza sativa
tacgcactgtctctcgttcgcgcaaagcgggctgcttttatccgctttgggggcaccatagcctagcccaccatgtgcggcggcgccatcctctccgacctcatcccgccgccgcggcgggtcaccgccggcgacctctggctggagaagaccaagaagcagcagcagcagaagaagaagaacaagggcgcgaggaggctgccactgcgccaagaggaggaggatgatttcgaggccgacttcgaggagttcgaggtggattccgcgagtgggaggtggagtccgacgccgacgaggccaagccgctcgccgcgccccggagcggcttcgctaaaggtggattgaaaaacactactgctgctggtgctgatgggcctgcagcaaggtctgctaaaaggaagagaaagaaccaatcaggggtatccgccagcggccatggggcaaatgggctgcggaaatcagagatcc

SEQ ID NO: 416949 - DNA, 325 bp, Oryza sativa
gggacaataatgttgaacataccattaacccagataaaaatagtccgacaaggcaacatagtatttggaaataataacattaacctagcatctaacaagcacccccaatcaacgatggtaactagtagtagcaaatgtcacaagggatatctatatagctcaaacatgcagagaggtggcttaggcagcaacctcctcgtcctcctcttcctcctcatagtcctcttcctcagcggtggcatcctggtactgctggtattcagctaccaggtcgttcatgttgctctcagcctcggggaactccatctcgtccattccctcacca

SEQ ID NO: 416950 - DNA, 386 bp, Oryza sativa
acacgcgcgtttatacgccgcctcctccttctcctcctaggggcatttttactcgccggggggggcttaaacagcggagaggcgacatgaggtagatcctgaacatccagagaggccaatgcgggtaccatatcggggacaagctatgggaggtgatcttcgaccagcaccgaatccaacacacctgcgagtactcccttgactacaacctacagctggaacgagtcaacgcctactacaacgaggtcagagtacaccattacttgccccactgcatgctaatggtcctttagcccgagaccatggactcctgcctctcagaacattattggcagaccttacagcaatggatctcgttcttcggacttttcgaagaccagcacaac

SEQ ID NO: 416951 - DNA, 453 bp, Oryza sativa
gccccgccccaagtatcccgggcgacgccaccacgcgcgtcttatatcgcgagcgtcactccttcctttgtgttcttttttaacccacgggggggtgttgcagcggcggcggcaggatggcggattcgactgcgaggacggtgaaggacgtgaaccctcatgagttcggcaaggcctactccgcccacctcaagcgctgcggcaagatggagctccctgagtgggttgacatcgtgaagactgggaggttcaaggagctccctccttatgatccggactggtactacacgagggctgcctcgattgcaaggaagatctacctgaggcagggtattggtgtaggtggcttccacaagatctatggcggccgccagaggagatgggtcacgtaccccgcacttctgcaagagcagcggcgctatctcacgcaacatccttcagcagctgcagaag

SEQ ID NO: 416952 - DNA, 470 bp, Oryza sativa
ctccctcttccgccgcctttcttggggaaggaaggagaaagcaaggggggggtctttaactccgcctgggatgggacactgttgctagctggtgatggctgagcaggctaatcaaccgactgtccttcagaagttcggtggccagttccaccttgggtccagcttttctgaaggtgtacgggctctcaacatctgcccatctgtctcatcctatgacaggcgctttaccacacggagctacatgacccagggccttgtcaatggtggcatcaacgtcccaatgatgtcgtcctctccaatttttgctaatgctccagctgagaaaggtggcaaaaacttcatgattgatttcctcatgggcggagtgtcagccgcagtttcaaagactgctgctgctccgattgagcgtgtgaagctgcttatccagaaccaggatgaaatgatcaaggctggcaggctctcagagccct

SEQ ID NO: 416953 - DNA, 488 bp, Oryza sativa
tcatcgatgaccgtcgacgtcgttgccgatgaggccgcctccgacgcagcggcggcgcaacagcaggaggagctgccgccggggcacggccaaacggtgtgtgtcaccggcgccgccgggtacatcgcgtcgtggctcgtcaagctgctgctggagaggggctacaccgcgaagggcacagtgagaaacccagatgacccgaagaacgcccacctgaaggcgctggacggcgccgacgagaggctggtcctctgcaaggccgacctcctcgactacgactccatccgcgccgccgccgacggctgccacggcgtgttccacaccgcctcccccgtcaccgatgaccctgagcagatggtggagccggcggtgcggtggacggagtacgtgataaaggcggcggcggaggccggcacggtgcgtcgggtggtgttcacgtcgtccatggcgccgtcaccatggaccccaaccgcggccccgacgtggtc

SEQ ID NO: 416954 - DNA, 501 bp, Oryza sativa
  unsure (1)..(501): unsure at all n locations
gatgttcaagtagatggtcatcgtgcttattcaactatcaacatgtgcacaggtatcttacaatataaataattgtacaccaaaaagaatgccttcatcgagcaccggaggtcaaacaggaagctacaaaaagcagcagcagtgtcgatgcagaaggaaaatatgatgattctgaaacgtaattcacatctacaacctcacgcgaagcaaaataaattgccccaactcgcttcgaatatctggtgatattttattgtttacacgaatgtgatcctcaatttacagcacttcacctagcttcatcttctaggttgcggaatccggttgtgaggtcatcatacaatttctggaattttgcgactaggacatcttcaccctctgcagggtcctcaaacttttgagatactaggcgataaaatagatcacccatacgatgctttatgacactgtatgttattttttgtccatcagcattagctgcacgctccacagnctgatttg

SEQ ID NO: 416955 - DNA, 410 bp, Oryza sativa
ttcatgatcgagcgagagagccggctccctcttggcttcttctgtcccccccgggatctgaccagcggggacgaccccatgacaccaggccggcgacgccgtcgctgcccccaccatcgccggctacgaccaccatgtggtacgatcgcatcacgacctatcatggactgcccacaaggagagggagcccgtgatcgtccgcaaggattctggacctgagggcgaggatgaaggaatggagggcgctgccatggatgaacttgaccgagtcggcaatgacaaccccaggggggaaaccactcggctggaggatgattcaaccaccattcaaggttatgaggaaacagctgggttgatggtcaatgatccagagccgagaacaagaaagcctcttgcagatggaaagagac

SEQ ID NO: 416956 - DNA, 462 bp, Oryza sativa
  unsure (1)..(462): unsure at all n locations
acacattcgttgggtttttctgagattttatttagaatccaaacgcccccattccttctcgttgctccttgatgaaagcctcgtagaactggaagataatggttaccgacaacaaaataccagttccagtaccaatggcgcccatgaagtcagcaatgacggaaagggcaccgatgcacataccaccaaaggcagcagcagtgggaatgtaacggttgaggacatggatcaatgcagaatcacggtgtcctttcatgaccatttggttgtcacgaagctgtttggcaacgtcacgcgccgacgctccagagacttcgatccaagtcttactgaaaagagcacaggcagtgaggatgaaagtcaagtagaagacagcatggaaaggatcatagatgatttcgccgaacgaggagggtggggaaatgcagctagcaatccccccacccggaatattttctnagg

SEQ ID NO: 416957 - DNA, 366 bp, Oryza sativa
tacactcttcattttcttggtgtgctgccaaattccgatctatggagtgcagagtgccaagtcatcggaccctccctactggatgcgtgccattttggcctccaaccagggtactaccatggagctagcgatcagtcccactgttacgcctggtctgatcatgcagagtattgcccgttctagaatcatctagggggactacaatgccaaggaaagacgcgcacttttctctggcgcccaaaagctgatcggccttccgatcaccacctgtgaagctataacttatagctgtagtgtaatgctcggtgacctaggatctatcggcgctgctaatgctgttatgatcattgaccaagtcttctgcgc

SEQ ID NO: 416958 - DNA, 439 bp, Oryza sativa
  unsure (1)..(439): unsure at all n locations
ttttgggttttttttttttgggcttaatttaattttcttttgtccggaactagtgacagtgcattaggagttcattcaggaaaagacaaaacacatactgcagtatcatacctagatgcatccaacttccaattctctgagccagcaaagatagggcatgttctaattcaaaactgcaaacaaactatagccgactcaaccaaagatagggcatgttctaattcaaaactgcaaacaaactgtagccgactcaaccaccaaacatatgagaggcagtaagggttgaagatccatggatctgttcaggcgatggtaacattaacttttccggccacttggtccagatcacgccttccctgggaggtgatgagtttttcgtccttggggttgacattgatgatgnccattttttgcagctgctgaaggaagttgcgtgaga

SEQ ID NO: 416959 - DNA, 477 bp, Oryza sativa
tttttcagccgaccctcactccctcctctgtggtctcttttaaacccacggggggggctgcagcggcggcggcaggatggcggattcaaccgcgaggacagtgaaggacgtgaaccctcatgagttcgtcaaggcctactccgcccacctcaagcgctccggcaagatggagctccctgagtgggctgacatcacgaagactgcgaggttcaaggagctccctccttatgatccggactggtactacacgagggctgcctccattgcaaggaagatctacctgaggcagggtattggtgcaggtggcttccagaagatctatggcggccgtcagaggaatggctcacgtcccccggacttttgcaagagcagcggaactatctcacgcaacattcttcagcaggtgcagaagataggcatcatcgatgtcgaccccaagggcagaagactcatcacctcccacggaaggcatgatct

SEQ ID NO: 416960 - DNA, 462 bp, Oryza sativa
  unsure (1)..(462): unsure at all n locations
ttttggtataaattccgttattggtcagtattcactgccaaagtgccaaggcagagttacacgtacgttgctgaatcttgagcagctgtgcttattaccacaaaactatatgctggccgtacgttcccatgcatgcatgcggttttgcatttgacatgagcagctagcttattccaaatccaaatgtaatattagtatatcactcttgtctagtggaatctaattttgtaggacggcgacttgttggggttgaacagcccgaagtgcctctcggtctcagccccggtcttctggttctcgttgaacatggcgaacacgtacgtctccaacgccacccctggtctcttcggagtgcctccttggacatggctgataagcttctggttgtacgtctgcgcgttgctcacgctggncccgaacccaccggccgacggccacccggtcttcgacaccaccacgccg

SEQ ID NO: 416961 - DNA, 444 bp, Oryza sativa
ctccctcttccgccttttcgcttggggaaggaaggagaaagcagtggatcttttaagactccgtgggctaaggcacattggtgctagttggcgacggctgagcaggctaatcaaccgactgtccttcaaaagttcgggggccagatccaccttggctccagcttttctgaaggtgtacggtctcgcaacatatgcccatctgtctcatcctatgacaggcgctttaccacaaggagctacatgacccagggccttgccaatggtggcatcaacgttccaatgatgtcatcctctacaatttttgctaatgctccatctgatacaggtggcaaaaactccatgattgatttcctcatgggtggagtgtcagccgcagcttcaaagactgctgctgctccctttgagcgtgcgaagctgcttatccagaaccaggatgaaatgatc

SEQ ID NO: 416962 - DNA, 459 bp, Oryza sativa
  unsure (1)..(459): unsure at all n locations
ggctaattgctactgttcattataatgactgcatgatgataacggtctcagccattttggtagcttcaaggccaaaagatgaacacaataaaatggctcgataacatgaaataacagtagaaaaggatgcatctctgcaacttaacagtattactgggaactacatttcaactaggatggaaaattctgtcaacccaaacaaaactcaaattttgaagatagaaatgtatttaagcatttgcagcagcctgagcagcagcatctcgcttcctctgttcctcgatgatgctgagcttgatacccttgcccttagggagagacacccatggcttgttgcccttgccgatggtgaacacattgcccagacgggtggcgaaggcatggcccaatgcgtcctccacatggatggtctcaaaactgcccttgggcttctccctggtnttaattactccaacacga

SEQ ID NO: 416963 - DNA, 489 bp, Oryza sativa
tcctgcccctgatcctcatcatcaggaacgggttgatgtatgcgctgacatagccgtgaggttatctctatcctgatgcagcggcatgtcttggctgatgggaaggtcaggactgacaagacctaccctgctggtttcatggatgtgatttccattccaaagactggtgagaactacaggcttctctatgacaccaagggtcgcttccgccttcagtccgtcaaggatgaggatgccaagttcaagctttgcaaagttcggtctgtccagtttggacagaagggcattccctatctgaacacctatgatggacgcaccatccgctacccggaccctttgattaaggctaacgacacaatcaagatttgatcttgagaccaacaagattgttgacttactcaagtttgatgtgggcaatgtcgctatggtcacaggagggaggaacactggtcgtgctggagtaattaagaacagggagaagcacagggc

SEQ ID NO: 416964 - DNA, 465 bp, Oryza sativa
aagctgcacggctgcatgcaccgccccggaatccccggggacgccccacgcgtttttcatacacctggccgacataaaccccaagggaggattacaaaaaaggatggggataccaaccgctgcctctgcctcatcctgacaggttacacactcctcatgaacctccaccatctgctcccgcgatgccgcatcatactaccagtggcccgccgcgctcaactccatcgtccgccacgagaggctacatcaggccgtggcgcatgctgccgtggctgtgggagttgtacgacgcaggccatggaccagcaccaagctctgcttccagagccgctagctctcactcctattgaaaaactacaccagagcatattgagaaaacgctaggcaaacatatcagcaacacgagccaatataatgtctcatatacagcataatttggagtacttgagtaaccatccacacttt

SEQ ID NO: 416965 - DNA, 231 bp, Oryza sativa
ggaccaaaaggcaaagctgggagcgccagaacattttaatacaacagcttttgggcgaaatgctacaggagctttttcctcccttgcaaaaagaaacccaaaccttatttacaacggaacacacacaccggacacagagggctcgatcgatcgaagcagacgagacgacgatggggaactactactagggaagggacaacccctagggtatacagggaaacagggcggggg

SEQ ID NO: 416966 - DNA, 501 bp, Oryza sativa
ccccgccggagtttccggggcgacgccaccacgcgcgttttgtggctgctgtgctctctactgatgtggatatggtcaggcagagaaatcttcacacagaggggagcgtcagagtgcatcatagagaatgcacggaagatgcctcggggtatacactctcctctatctgcaatcagaggattacatcagcaaattaccagcaccaactcgaaatgagtcgggccttcaacacaagcaacagatggaaaaagcgggggctctctgtcgtgccgatagtgcatatattcgcatctcggccaacgcctgggaaagagtctattcttaatgagggatccgctgctgttgaagttggaggcactgaactcggccaagggctttggacaaaagtgaagcagatggcaacgttcggtcttggacacgctttggactgatataaagcaagaaccgtgggagagagtgagaattattcaagcagatacacttagtgtgatacagggaggg

SEQ ID NO: 416967 - DNA, 440 bp, Oryza sativa
ttttcatatgagcgcaatcttgacgcattgagggttctttaaaggaatggttggcagtaaagcaatgcatccattggcgttaccaccactttattcggggacaacaaggatgttatgaatattgagcactatcacctgactgactgatgtgaatcaagtgcacctgatccgaggatatcagagaggtatgcactagatgcctcccagttaaaggctctctcattaggcttgaacaagaagaggcctgttctaattatccagagtcctgctgggacgggcaatacagtcttgctcacagatctcattgtacgtgctgtccaacaaggtgtgaacgtccttgtaacagctcctagcaatgccgcagtcgataacatgtatgaaaggttgtcaaacactaacttgaacattgtgcgagttggaaaccctgctcgatatcacca

SEQ ID NO: 416968 - DNA, 451 bp, Oryza sativa
gtgttcttttgaagtgctgggaggggacaaggaagtgtgagtgagtagtgagcaccatggcgagccgagagcacctcctgctcgacccggcggcgctggccgtctcttgtgctgaccccgctgctgtggagatcccgcccgagctcctctccgcgctgggtgagtacctgtccgccaggcgtagcgacggggaggccgtggccgacgccgatgcggaggctgatgatgagttcatgatgtacgagttcaaggtgcggcggtgcgcgcggtcgcggagccacgactggacggcgtgcccgtacgcgcaccctgtcgaggccgcgaggctgcgtgacccgagtcgcgtggcgtacacgggcgagccgtgcccggacttccgccgcctgccggtcgccgtgtgcccgaggggcatcacgtgcccgttcgcgcacggcacgttcgagctcttgct

SEQ ID NO: 416969 - DNA, 493 bp, Oryza sativa
ttttgttttgctgaagaattagaaaagatttcattaacttttctcataattcaatcaattagtggtagtagtacaatcaatataccaattatcaagctgttaatccaccaaccagcagatttggtgaattggtacatataagaatgccgtccaagaaaaagcagacggccatttttttgttgctttgttcctttgttcatatcatggaatcaaactgaattaatccaaaccaaatttgctgctactactactactgctaatcatactagtaattaggtaccaaatcaaggcaattaatcccctccttttgagtgattaattataattaattaattaaccaaatcaccacctggtaaaaacactgtcttgaccaatcaaagcttgatactttcacaagtttgtcatggcgatggatggattgtttctagaagagctctttggtgacgagcggcgcggcggcgttccacgtgctttggcttgtccggtcggcggc

SEQ ID NO: 416970 - DNA, 401 bp, Oryza sativa
ttctccacctcgccgccatttgatcgagcgcctgattgcacatgatggatgggggcctcagcctcggcctcggcctcgcctcgcagggcagtctcacctcctccaccaccaccacctcctcccccggcgccggatcatcctccccgtgggccgccgcgctcaactccatcgtcggcgacgtgaggcgggatcaggccgcggcgcatgctgccgcggcggtgggggttggggttgggggcgaggagatgtaccaggggtggttgcacacctggcaggaccactcggtggaaatactccaccagtgcatattgagaaagcatgagcaagagccgaggctcaccggggttgacttcatcgaccatatccaacaggacttggattatggaggtgctgatccacat

SEQ ID NO: 416971 - DNA, 385 bp, Oryza sativa
tttttgttaatagaagaaagcatccatagctccattggaccatgcatagagagcatacagttttgcaattcagctcagaatggcatatgtaccaagcttgggggggagtagcaagcaatgcacagcaaaatgggaagatatgaacaatcatggccaacgaggggctaacaacagtttagcacagtacaaaaagtaaacacacataacaggaatatgcaatgcaacggaaccggagtatactgacaaaccaatcattaaccagagaactacttattaaccagctactaatagtcttctccatcgtcgttctcgtcgtctgcacccttggggccgacttccttatagtcctttttaagggcaggcaagtcctcacgggctttttgag

SEQ ID NO: 416972 - DNA, 450 bp, Oryza sativa
ttcctgttgtttagtctctacctactgatgggaaccttcccagacgcgaggcgcttcgcgcagaggagagcctcggttaggctcatgatgaatgcatggaagatgccttggggtatacacttccctctatctgcaatcagttgattacatcagcaaattaccagcaccaacttgtaatgattcggtccttcaacaaaagcaacagatggaaaaagcgggggctttctgtcctgccgatagtgcataaattcgcatctcgcccaacgcctggtaaagcgtctattcttaatgatggatccgctgctgttgcagttggtatcatcgaacttggccacgggctttgtacaaatttgaagcatatggcagcgttcgcacttggacagttttgcactgatcgaaggcaacaactgttacagagtgcgagatttattcaagcagatacactaagtg

SEQ ID NO: 416973 - DNA, 502 bp, Oryza sativa
gctcgggtggcgcgtggcggccgtcgccactacgggagtgcaaggtgccaaggatgctggtctggagaaagctgccagaagtgcttcccaatcaaaggtggaaaatggctcaccttcagaaatcattttagatgattttgaagacttgagccctctatcagaaaatgatgactccactgttagtatcactgtagtcggagcatctggtgaccttgccaagaagaagatatttcctgcactttttgctctatactatgaagattgtcttccaaagcatttcactatcttcggatatgcacgcagcaagatgacagatgctgaattgagaaacatggtcagcaaaacactgacatgcagaatagataaaagggaaaactgtaatgagaagatggaagagtttttaaagagatgcttctattaattaaggccaatatgattaaaaggagcatttaatggaccttgacaagaagctgaaacaacatgagggttccagagtttctaa

SEQ ID NO: 416974 - DNA, 494 bp, Oryza sativa
  unsure (1)..(494): unsure at all n locations
tttttgtccgggcttcaggggaagtctcagatagtgcaaaatgaacttgcaaggttgggagaacagatggtatcaagcgctgaaggaaccagggctgttgctttggagctttgccgtgaattcgaagacaagtttcttgcccatgttacttctggtgaggggtctggttggaaaattgttgcaagctttgaggggaagtttccagataggatcaaacagtttactttggacaggcattttgatattaacaatgtcaaaaggattgtcctggaagccgatggttatcaaccatatttgatatctccagagaaaggtttaaaatccttaatataaggagtactcgaaatggcaaaggagccatcacggctgcgtgttgaagaggtacaccgtgcattattggacatagtaaatgcttatgcaaatgctacaccatgactnggaagatatcctccattcaaacgcgaggtcgatgatattgcaaccaatgcattgga

SEQ ID NO: 416975 - DNA, 440 bp, Oryza sativa
gcgttctctcgccgccgcaaccaccgccgactcgggggagcatgacccgcagccgccggcgccggcgccatggactccgtcgcgtcatgggggctgaccccgctcgacgcggacgacccgctcgtacacgacctactcaagcggcagaagcggcggcagagtagcggcatacagctcatcgactcggagaactttacctgcttcgccgtgatggaggccctcggctgcgcgctcaccaacaagtactccgaggggatgcccggagcgcgctactacggcggtaacgacgtcatcgacgagatcgagaacctgtgccgcgaccgcgccctcgccgagttccagctcgacgccgcgctaggaagcgtaaacgtgcagccctactccgggtcgccggccaacttggccgcctacacggagctgctcacgccgacgaccgcata

SEQ ID NO: 416976 - DNA, 499 bp, Oryza sativa
gacatctacaccacatacaatacaagagctactactacagctcaccatcaccggagcaagagccaagaagacgacgacgacgacgagctagcagcagcattgcaaccgacggcaatggaggagcagcagcaggtggaggtggaggtggaggtgccgttctacttcgtgtgccccatctcgctgcagatcatgcgcgacccggtgacgctccccaccggcatcacctacgaccgcgacggaatcgagcgatggctcctcaccggcggcacctgcccggtcaccaagcagcccgtgccgcccgactgcgaccccacgcccaaccacaccctgcgccgcctgattcagatatggtgcgccctccacgccgaccatggttgtgtactcgtccccacccccaagcacccaggcgaccgcgcccgcgttgccgacctcgtctaccgactacgagccgtcacgagctccgatgcccttctagacgcgctgcgcgagctcagggacg

SEQ ID NO: 416977 - DNA, 404 bp, Oryza sativa
gtcggacaccaccgactgcatggcctggaagagcccgaggtggtcacccccggagccgccgctcccgagcagcagcgacgccagcgaggttcccccggtgagccccagcgccgacgacagcgacggcagcgaccctggctgcggcagcgccagcgacgacgcgggcgaagtcccagctgcaccgccgccagccgacgagacggccgccgccgccccgcctccaggcccgcccctccccacgccgccaccaggcgccgcgccgccgctcctcgaccgcttgttcttccggcacccgccgccgacggggacgttccgcagcgtgccgccgcgcgtccagtagcgcttgcacgccttgcagaagtgccgcggctgcgacagcgagtagttgttggagtagcagaact

SEQ ID NO: 416978 - DNA, 477 bp, Oryza sativa
gaaaaggtatataccattaacttgctgtctgcacaaaggagagcttcatgttgacaaggaacctagtaccaacgtaccatatatacttgaagctccaattttactgacaaaaaacaatattactacaagcagtacaatacaatgacaacaatagcttagactagttacccatgttacagtacgagactttacaaagatctacatgacttgtcatgtacagtacatatgtacctacaaactatccagtaacttagtgcatgcagatgcaggtttggtttacttcaccaaccatatacagggtgctgcacttgaggcggcaggaggcccatgtccacgcagtgttgcttgtcgtagtcgcgcgtaccaggaatcgctcccgttgccagcctgagaacctcgctaccagttaggcagtggtgagcaaacgccaatcctccatccatggcgtccgacagattactctgaattgttcttctc

SEQ ID NO: 416979 - DNA, 314 bp, Oryza sativa
tgttagatttgttggataaacgtaaaagcgacttgcaaggattcaagttggatgtatatggaagtggcgaggactcacaagaagtccaatctaccgccaagaaactgaacctgaatctaaacttttttaagggaagggaccatgcagatgactcactccatgggtacaaggtattcatcaacccgagcatcagtgatgtcctgtgcacagcaacagcggaagctctcgcgatggggaagttcgtcatctgcgcggagcatccatcgaacgagttcttcatgatcgttcccgaacttgctgacgtacaggacccc

SEQ ID NO: 416980 - DNA, 500 bp, Oryza sativa
  unsure (1)..(500): unsure at all n locations
tttgaaagggtcctcctttgtttaaagcgtgggttaagtattgcaaatgccgctcaacagatggctaatgtaacaaggggaagtagcggatctgtcgcgctatttatcgaaattttgaacaagtatttgtacttcttcgagaaaggaattccagagatcacgaacactgtaatccaggatttgattgaattgattaggacagagaagcaaagtgagaacactgtagctgatccatcgacagaggccttctttgcaagcactttacgttacattgaattccagaagcagaaaggtgggagcataggtgaaaaatatgagcaaataaaaactacctgattgtgcactaagtcaaaacaagaacagcgtcacgacgtgttgtttttgtctcgagtcatatttgcgngaagttcagtgaaatacaagccattggtctcagctgcctctggcctaaggatctttgcatcctgtgtgatttgcgcatcttacgctcaaagcggggg

SEQ ID NO: 416981 - DNA, 445 bp, Oryza sativa
ttttgtgttattggttgttacaacttaaaatttagcaaatcctggaataacttcttgcatgggattttaacattcagtagactattaggatcagcatgtgatcataaaatggtcggcccagtaacaagggagcaaaagatacataactttagctggaaacttgggatataaggaaatattcaaacaatacattcgcacagcctccagtagcaccatttattcctcctcctcggcctcctccagccatttaacaaaaggttccagtgctttgacgaaagattgcctgccctttgggtttgaacccttgcggaaccaaaggaggatggtatcttcagctaggacatcttggtcatacagcgttctgattatttcaggaaatagcttcatcagcttagcatcctcatagcactgtgtctgaactttgtatatgagttcgagttcaagc

SEQ ID NO: 416982 - DNA, 437 bp, Oryza sativa
ttcttgaactcgaactcatatacaaagttcaggcacagtgctatgaggatgcgaagctgatgaagctatttcctgaaataatcagaacgctgtatgaccacgacgtgctagctgaagataccatcctcctttggttgcgtaggggttcaaacccaaagggcaggcaatctttcgtcaaagcactggaaccttttgttaaatggctggaggaggccgaggaggaggaataaatggtgctactggaggctgtgcgaatgcattgttcgaatatttccttatatcccaagtttccagctaaagttatgtatcttttgctcccttgttactgggccgaccattttatgatcacatgctgatcctaatagtctactgaatgttaaaatcccatgcaagaagttattccaggatttgctaaattttaagctgtaacaaccaat

SEQ ID NO: 416983 - DNA, 357 bp, Oryza sativa
ggggggtggaatcgagtagcaatactttcaccccaaaatacagtttagcgacaatatcttagaaaagccgcttgctttgccgccatggctggcaagctgagcagagcagctaacacaaagaacacgagatcactataaaccaaacggcaacgaacgaagaaaatacagggtcttttttgtctgaagatacacgaagcgggtcgttttcttttatttttaggctcctctcctcctcgatgatgggtgtatggcaatggcaatggcgatgggatcttggcttagttgatgggaaggggctcgccgttccacttcttgaggcagtcgagcatgggggcgatgagcttgccctggctgatg

SEQ ID NO: 416984 - DNA, 342 bp, Oryza sativa
tttttcttctcctccggctcttgttattatgtaatcttgtaattctcctggggcgcaccacacaccaccgcaacattggggggcaacgggccgatcaacaaggaggacccgctcaactggggcgcggccggggccgagatagcctgctcccacctccacgaggagaaacacatggtgggccaattgctctaggctgtgcacaaggacccagaagggccacactccgagttgccacatggcgcccgcgaccaagaccacgacgacttcgccgtctgcggctggctctgcgcagacggccgcccccgcgtcaacggcagcagcgactggatcctcacctgcatc

SEQ ID NO: 416985 - DNA, 325 bp, Oryza sativa
ccaggggctattactctccttccctctcctctcctctcctctctcgccatctctctctcctccgatctgcgcagccagccggagccaccgccgcctctctgtcgccgcctcgcccgcgggggctccggcgaacgggccgcccgcctcgacctcccctccttcccgtcgccgagctagcctctccacgctgcgcggggccgcctccggcgagcaggctgggcctcgggcctcggggcctcattccaccgccctgcgccttttgggttcgatcgggcttgaaagtgaaggtatggacttcggtgattctagacgcaagcctaatggc

SEQ ID NO: 416986 - DNA, 389 bp, Oryza sativa
aagggtggaatcgagtagcaatactttcaccccaaaatacagtttagcgacaatattttaaaaaagccgtttgctttgccgccatggctggcaagctgagcagagcagctaacacaaagaacacgagatcactataaaccaaacggcaacgaacgaagaaaatacagggtcttttttggctgaagatacacgaagcggttcggtttcttttatttttaggcttctctcctccttgatgatgggtgtatggcaatggcaatggcgatgggatcttggcttagttgatgggaaggggcttgacgttccactccttgggggaaacgcggatggggtcgatgagcttggcttgggggacagccgggaaccccttggtggaattttatgccggg

SEQ ID NO: 416987 - DNA, 391 bp, Oryza sativa
tcccggggcgacccacacgcgcgtttctcctccggctcttcttgagtgtcacaggggtgtcttgtagtagggccggcgccaccaccagagcaagggggggcagcgggccgatcaacacggaggacccgctcaactggggcgcggcggcggccgagatggtcggcagccacctctactaggtgaagcacatggtggcgcatttccgtgagccgctggtcaagatccagggggccaccctccgcatcgggcatgtgtgcggcgtcgcccatgccaaggacgccgtcaggcgtggcgaccagctcgacgaggagggccgcccccgggtcaaggccagcagcgagtggatcctcaactgcatcggccacagcggagacatctacagcggcaccac

SEQ ID NO: 416988 - DNA, 494 bp, Oryza sativa
tttcaccatcccagccgtcctcctcctcctccggcaagcttctaaaccctagccgcaacgcaaaccctccactcctcctctccccttagcccccccctaacgccgccgcaaattaaccgacgtcgacgatgatgcagactgccgggcgccgccgccaccgatgggtcaaggagtgggttccgcaggatctggtcgtcgccggtggcccatgcgcgctctacaaatgggtgcgagaggataggttgtcagctctcaaatccagggacaaggaacaagaagcagaactggcaaaacctgaaccaaccaccgaggttctcttcctgtgcagctatgagggctgcgggaaaacttttgttgatgcaggggctcttaggaaacatgctcatgttcacggggagaggcagtatgcgtgtcactatgccggttgcgacaagaaatttttagacagctctaagctgaagaggcattttcttattcatacaggagagaagaac

SEQ ID NO: 416989 - DNA, 489 bp, Oryza sativa
  unsure (1)..(489): unsure at all n locations
tttttggggcaaagtaggagtacggcaatccatcaaaagttatatagtttatcatataggcgcgtacagatgagacaaatattttgtctcttaagtgtaaacagctatagggcagtcgacataggcacacgaacagttggaacgagataaagatcattcttttttcgaatagttgcacccaactcctccatcatgtccaccttggtcggcgagatcccatcaggaagctcccaatcaaagtgatagagaagcgaggctagaacgagctccatgattgcttctgcaaatgccataccagggcacatccttcgcccagctccaaacggtataaattcaaaatctgttcctttgaagtctatatgtccatcctcaaatcgctcgggtctaaatgtntnagcgtcctcccaatacttagggtctctaccgattgcccacacgttaacaagcatagtagtacctatggggatatcgtaccccatgaccttacat

SEQ ID NO: 416990 - DNA, 451 bp, Oryza sativa
  unsure (1)..(451): unsure at all n locations
tttggtgcaatacgtcaccggctacctgtgccgctccttggctctcctcttgctcactctcgtcctccacaaggtggcgaggaaggcgaccggtaatggcgccggcaagccgaggcttccgccggggccgtggcggctgccggtcatcggcaacctccaccaggtcgcgatgggcggcccgctcgtccaccgcaccatggccgacctggcgcgccggcacgacgcgccgctcatgtcgctcaggctcggcgagcttcgcgtcgtcgtcgcctcgtccgccgacgctgccagggagatcaccaagacgcacgacgtcgcgttcgcgacgcggccgtggagctccaccatccgcgtcatgatgagcgacggcgtcgggctggtgttcgcgccctacggcgcgctgtggcggcagctccgcaagatcgccgtggtggagctcctcagncgcgcg

SEQ ID NO: 416991 - DNA, 488 bp, Oryza sativa
cagcggtgtagagagagagacacagggagagttagagagagagctggagcaactaacaggtcgaggagggtctgcggccatggcgatcctgtctgatgtgtccaccgaggcgctgatcccgatcgtcgccatcatcggtatcgtggttctccatcgcgcagtggttgctggtcgcccgggtcaagctggcgccagtgcagccgatagcgttgaggagcaaggacgggtacggcgactcgctgctcgaggaggaggaagggctgaacgaccacatcgtattgggcaggtgtcttcgtgatacagaacgccatcgctgaatgagcaacatcgttgcttttcaccgaataccaatacgttggcgtcttcatgttgatattcgcgtgagtgatcttcctattgctcggctccgtcgaggaattgagcacaaatacccacccctgcacatacagcatggtcaaggagtgtaatcctgctctgttcaatgccct

SEQ ID NO: 416992 - DNA, 447 bp, Oryza sativa
tcttcgattgcgcatggagctggacaagaggtgtaatgtgatatgcctgcgcggcttccccacaagtgggagttttctgaagaagcaaatcatcaaatggaatccttccatcttccaacaatttgacatggtcttccctgatggcatattcccagctggagggaaatcagagatagaaagcatatttcccccaccctactttgagtggtttcagttcaacaaggacttcactgaatacacaaatctggatgagtgcatttcatacctgcgtgattacatggtgaaaaatggaccttttgatggcctgcttggattctcccagggtgcaactctttctgctcttttgataggttaccaagcacagggcaaagtactgaatgatcatccaccaatcaagttcatggtctcaatagctgggagcaagttcaaggacccagcatatgcaat

SEQ ID NO: 416993 - DNA, 485 bp, Oryza sativa
tttatcaagcaacaacttgctgctatagcgggacactttagaagttgaacagggtgaaaaacgaaagagtgcgggaatttgttaatgttcagtcacaaattgatcaaatatgtggtgagattgctggcactacggaggtgggtgagaaggtggcaacgccacaagttaatgaggatgatttgacacttgagaggcttgaagaatttcgttcacaactacaggagctcgaaaaagagaagagcaataggttggagaaggttcttgattatgtgagcatgatacataatctctgtactgtcttagggatggattttcttagcacagtgactgaagttcatcccagtttggatgactctattggtgacaactgcaagagcattagcaatgatacactgtcaaaacttgacaagactgtagccacacttaatgaagacaaaaagtcaagactaagcatgcttcaagagcttgctggtcaactctacgat

SEQ ID NO: 416994 - DNA, 354 bp, Oryza sativa
tttttgttaatttaaataaagtgtgttaagcaagagcagaattaggggataaaccccattacataaccaaggataaaagctgaaagcaaaagagccacccctgagaagggagggttaactgaactacgaaatcaatcttcctgaaataacctaatagcagaaaaaggagcaagtcgatagggatctgcggcgaagccgcgacgactggtaccctgggcctcaaaagatgtgcactccgcttgacaaaccgttaatccccatcagctgccttcacggaaacggcacaagaccgaggtttgttgctgagccgtagatttttggagtgtgcataactggactttagtgaaggtttcc

SEQ ID NO: 416995 - DNA, 531 bp, Oryza sativa
  unsure (1)..(531): unsure at all n locations
ggcgccgncaacgctctggcggctgatccgcctagaaagcggtcgccaccatgcgcacgcctcctcctcctccaaccgcctattgcccactctcctccgtcctcctcgcgacggtttccgcggcggccgcctcatcgcctcctcctcctcctcctcctctcagatggcggcgcctgccgatgcaccgggcggatccgcggacgcgttcgaggtgatccgcgctcaccaggaaaaagctgctcgacttcctccggttgaagaaatacggaccattctggaccaaagtgttaggggtgtccttgccacccattctcagggtcatgttggctatccgtctggttcaatggttgattttgcatgtgatcaggatggttcccccatattagcagttagtagtttagcaattcactcaaagaatctctctgaaaatcctaaatgctcgcttctggttgccaaagaccctggggacagaacagatactgtgaatactgtatatggtgatgccacacctgtttcagaccaagaaaaaga

SEQ ID NO: 416996 - DNA, 277 bp, Oryza sativa
gtcagccaactcgcttgacattgtggggactgtatactgtaggtttaattgtcagaagctaaagctaccagagggctgtgggcacgaatatcaaatgcattatggatcaattggttgccggaggggcaactttgggatatgcacaggctggtaaggataagcgaggcattgcttgcatcggcaatggaagctttcatgtgacggcgcaagaagtgtcgacaatgctttattgggggcagaaaagcatcattttttctcatcaaccaatgaagggtac

SEQ ID NO: 416997 - DNA, 413 bp, Oryza sativa
  unsure (1)..(413): unsure at all n locations
ggggtttctaaaaacagggggggattataangttctcaagagcgaagggcagagcacaagaatgctcatagcagtacaagacttaggttggatcatatgcagcataacaacacaatcctgattgcttgaacattcaacatccaggacacacataataacacaaatccttaaacgggcaaccaactgggcgcaccttagcttattatgaggaccatggacgacaaacctgtgcctagaacaactaccttaaggaggaggcttcatcagtgaagccaccttctgggaagacgggcttgccatcaggtcagtccaccaggccttcacatgcgggtatgcgtccaacacggatgcttggggagtagcccccaagcatacagtgccaggcacatggcttaggtccgcgcactgatgta

SEQ ID NO: 416998 - DNA, 350 bp, Oryza sativa
atttattcgcgcgcggtgcgtagtagcgagaagagaagggggggagggcaaagcgatggctccgatgaagctgtacgggtcgacgctgtcgtggaacgtgacgaggtgcgtggcggtgctggaggaggcggcgccgagtacgagatcgtgccgctcgatttctccaaaggcgagcacaaggcccccgaccacctcgccaggaacccctttggtcaggtgccggctttgcaagatggtgacttgttcctctgggaatcacgtgcaatttgcaagtatgtatgccgcaagaacaaaccagagctgttgaaggatggcgaacctcaaggagtcagcaatggtggatgtgtggc

SEQ ID NO: 416999 - DNA, 355 bp, Oryza sativa
ccttattctcaaaaaccaaaaaccaaaacctctcctgtggcctcttcttctctaccctcttcttcgacctcctccatccgagaggcagcaagccagcaactgcacgagcaaccacccgtagtcagtgacctagcggcggagggagatcggccggcggcgagcgacgacgatgaagtacgtgctggtgacgggcggggtggtgagcggcctcgggaagggggtgacggcgagcagcatcggcgtcgtgctcaaggactgcggcctccgcgtcacctccatcaagatcgatccttacctcaacaccgatgctggaaccatgtctccattcgagcacggtgaagtgtttgttttggac

SEQ ID NO: 417000 - DNA, 520 bp, Oryza sativa
tttttggggctttagagtcaggggcacaccacaccacaccaacacagagcacccaagcacaccactccctcatggtcagtacacgtacggcacgatccgccacggcaccaggctgcagtacttgtcccagtccgccccgtacttcagccggcacgccgcctcatcccgccgctccctgtgcaccagcaggctggcaaagtaggcgctgtagaagtagggcaccacgctgccaaagccgcagggcaggcaccaggccaggcccatgagccagtcccccaggtagttgatgtggcgggccatgccccagtagccgctaatcagcagccgcgtgccccgcacagtgggcatgctctgcaggtgcgccacagaggggtggcccgggtcccgcctgaacgcgtccttctgcccgtttgccccccggaacagcctgtagcccagcagctggacccctatgacacccaccagccccagccctgacagcttctgttgcgggtggtctgccagtagcgagcctgggtgc

SEQ ID NO: 417001 - DNA, 503 bp, Oryza sativa
tttttggggcaaatatatgcacatgaactgcagatgaaaaccatctggtcactttatacaagccgtacatcagctaaaagaagttcacgatgcctcagggctcaggcagacagaaactgaaaacgacgcagcaagttaaaaacaaattacaaaacctacatgagacaaaattaaatcgtagagatagtgtcccactaccaccaaagcaacattatttgcagaggttcctttttttcagcccacatgatcccgtggtctagttattattcgaaaatctccgtccgtcctcaaattcgatcgaattttaaatctctctctcctagaagagcttgaatagaattcctccgtgcgtggcgaagaatggcgcgaacaccagcgactcgacggccatgagcttgatgaggatgttcagcgacgggcccgacgtgtccttgagcgggtcgccaatggtgtcgccgatcaccgccgccttgggggagtccgatcccttggccccagcgacc

SEQ ID NO: 417002 - DNA, 336 bp, Oryza sativa
cctgctctgttcaatgccctgttcagcaccgtctccttcctgcttggagccatcacctcagtggtttctggcttcctcgggatgaagattgcgacttacgcaaatgcgcggaccacccggaggcgaggaagggtgttggcaaggccttcatcaccgcgttccgttcgggagcggtgatgggattcttgctggcatcaaatgggcttctggtgctttacattgccataaacttgttcaagatgtactatggcgatgattgggagggtctctttgagtccatcactggctatggccttggtggatcctcaatggctctgtttggaagggtgggtggag

SEQ ID NO: 417003 - DNA, 514 bp, Oryza sativa
ggttacagaaaagcaacatggggagcccattggtatatatatatattctgccattgctccttgctgtaaacaaaaccgatcctcaaaaccattattggggctcttttacttaatgtacatgtcgaaactacaaacctactagccatcacctctattatatttatagccggtgatcatttacaatttcagcaagggaaggtgattcagagtcattgtatttactcggaactggggtgttccgtctggactggcgctttgtcgccacgagaacctgctccgcctctggttcgtcggagatggagaacttctcgtcgtcctcgtcgccttttgaacaccgggtggatgtaggcattcatcaggtatcctttgaggtcgaaccctggctctcttgcgcgttttagggtatccttccgcattgcattctgtaatggatattccacaaaagcaggctcatagcgattcttgcagtatttatagaaataaaaggttacaacagggagaacaaggagcaccg

SEQ ID NO: 417004 - DNA, 346 bp, Oryza sativa
catttattgctactattcaagatataggtgtctctgcagctatcaacatactgagtgccatcactttcctgctagcgtttgctttcctgcgactacagcccatcaacgatagggtttacttcccagtggtatctcaaaggtgcaagagagagtccaagtcatgggggtgcatttgtgcggaagtttgtcaatttggacatgcgatcatacttgaaggtcttaagttggatgcctgctgctctcaaaatgccagaggatgagttaattagccatgcaggccttgattcagctgtctatctgcggatcctacttaatagggcttaaaatatttgctccaatcacagtt

SEQ ID NO: 417005 - DNA, 500 bp, Oryza sativa
agcagatagaagtaatataacaagaacagtaattcatgtcaataaacgatccggagggacagaagcatgacacagaacaaattcatgtctgcccaaacttcacttattcataatttgtaagtatgaaaccacatgcaaattgatacacagctggagggtaaaggaaatcatagccagccccatagcactccatttttgtgaacaaagtctctactccagttttgcagttggcacaaatacaatattttcacgataaagatcgggtagcactctactgcctcaagctttgcaagatatattgcgcatacaggtccatggagtactgaatggcgtcacgagcagtgttggcaggcaagaatgcatcaacagcaacctccttgttctcattcttcttgtagtcttcaaagaagcgtttaatctcttggaggcggtgaggagacagctcactgatgtcattgtaatgacggtattcaggatcatcagcacatactgctattatc

SEQ ID NO: 417006 - DNA, 335 bp, Oryza sativa
cttcttcttcgccgccgccgccaccttccaccccttcagccgccactccaatccaaggaggatgagtgaagaggacaccaatgctgctgctgggcagcccaggcgcgcccctaagctccgagaggatcctgtcctccttgtcgaggagatcagtagctgcacatccgtggcatgatcttgagatcggccctggtgctcctgctgtcttcaacgttgttgttgagatcaccaagggaagcaaagtgaaatatgagcttgacaagaaaactggactgattaaggtcgaccgtgtcctatactcatcagttgtgtatccccataattatggtttcatt

SEQ ID NO: 417007 - DNA, 456 bp, Oryza sativa
tttttggggcgcttaaaggtaaaaggcatccgaaatatcaacaatcgcagaccagcatcaagtaatacagtacccaaaaaggttcccatagcacagacgaaaaaacaaagcgaagacataggaaccgggcggtggcgtacgaggcggtaatacggggataatgtaagacggaaacaccaagcacacaaaaccctgccctagaaccaccaagcaagagccaccttacatgtcgtcagcctcctgctgctcctcgtcctcgtactcgcccttctcatcggcggaggcattctgggactggtggtactcagagacaaggtcgttcatgttgctctctgcctcggtgaactccatctcgtccatgcctttggcagtgtaccagtgcaagaaagccttcctcctgaacatagcagtgaactgctcgctcaccctccggaacatcttctggatggatgttga

SEQ ID NO: 417008 - DNA, 340 bp, Oryza sativa
ctacgacatttgcttcaggactctcaagctgaccacacctagctttggggatttgaaccatttgatttctgccaccatgagtggagtcacatgctgcctaaggttccctggtcagttgaatctgacctccgtaagctggcagtgaaccttatcccctttccccgtctccacttcttcatggtcggattcgccccgctgacatcacgtggctcccagcagtaccgtgcccttactgttcctgagctcacacagcagatgtgggatgccaagaacatgatgtgcgctgctgatcctcgccatggccgttacctcaccgcctctgccatgttccgtggaaaga

SEQ ID NO: 417009 - DNA, 364 bp, Oryza sativa
ccccactcccggctgcagtgttttgcggcgatggccgacgctccgccgccggtgctgacgctgcaggtgaagaagggccgccgcggcggggagacccggcagtggcgggcgggcgccgtgctccgcgtcggccgcgtcgccacggcaacgacatcgccgtgcgcgacgccggggcgtcgcagcgccacctttccatcgagttcctcccgccgccggcctcgcggtgggccgtctccgacgtgggatcctccaacggcaccctcctcaacggctcccccctcgtgcccaccgtcccctccccgctctccgacggcgatgtcatcaagatcggggagtccagcatgctcgtggtctccatcgcgcc

SEQ ID NO: 417010 - DNA, 341 bp, Oryza sativa
tatagctaagctagctcagagtgagtagcgtgttgagcttgctgaagggagcggcaatgtcgaaggaggtgagcgaggagccggagcacgtgcggcccaaggactacaccgacccgccgccggccgctgttcgacgtcggcgagctccggctgtggtccttctaccgggcgctcattgcggagttcatcgccacgctcctgttcctatacatcaccgtcgccaccgtcattgggtacaaggtgcagtcgtccgccgaccagtgcggcggcgtcggcaccctcggcatcgcctgggccttcggtggcatgatcttcatcctcgtctactgcaccgccggcat

SEQ ID NO: 417011 - DNA, 349 bp, Oryza sativa
ttcttttccttctgttctctcaaccctttgttcatcttcttgttcctcctcttgtctcgtctcgatggccgggattggtccgatcaggcaggactgggagccggtggtggtgcggaagaaggcgcaccgccgccgccaagaaggatgagaaggccgttaacgccgtccgccgtttcggcgccgagatcgagaccatgaagaagtataacgctggaacgaacaaggcggcgtcaagtggcacatccctcaacaccaagcggttggatgacgacaccgagagccttgcccatgagcgtgtctcaagtgacctgaagaaaaacctcatgcaagcaaggctggacaagaagat

SEQ ID NO: 417012 - DNA, 529 bp, Oryza sativa
tgtcggaaagaagggaaatctcccgtggctttgtctcctgccaagacgagtcgcggctgaacaggggaggggccgcgatctccatctggcgggcagagcaggggacgggaggggatcctgatataataccaagataatacacctgcttgtcaaatgatgatgggtttgctagcgtttgagagcaaccaagggctctggaatagtggatattattcccagctgtttgggattggaggagttatggtcactgtcgccattctttggttatcgacaggctactttggaggaattggtgctccttttgccccatatttttggccatatctaggacaacttccaaagaagaaggaacggaaaaggcctgtgagagtgtacatggatggatgctttgacctcatgcactatggccatgcaaatgcattacggcaggccaagttgttgggagatcaacttgtagtgggagttgttagtgatgaggagattgtggcgaacaagggtccacctgtgctttcaatggaagagaggttga

SEQ ID NO: 417013 - DNA, 345 bp, Oryza sativa
ggtgttcacccccacgcagctgctcgccatggtgctctccaacctcaaggggatcgccgagggcaatctcaacgccgcggtcttcgattgctgcattggcatcccggcgtatttcactgatctgccgaagggctgtcgccgatgccgccgccatcgcgggcctccgcccgctgcgcctgttccatgagacgaccgccacggcgctggcttatggaatttacaagaccgatctcccggagaaggagtggttgaatgtggcgttcatcgatgtcgggcatgctagcatgcaggttagcatcgtcgggtacaagaaagggcagcttaacatgctctcgcatgcgtatg

SEQ ID NO: 417014 - DNA, 438 bp, Oryza sativa
gtgggttcagccaactccaacatctcaaaactatagctgcctttgcaccaaaatcttaacatttatacagtaacaggcccaacaacgaattggcaggtaaattcctcctaaatttgccatcgaaggcataagtttttaagtaccctctgtgattagcacattaaaaaaaagcatgtctggctttgatttatttagtttgggtctacacgatgatgctatcatggggacaaaaaaaaagaaggcctggggaaaatccatcaggcttgtatagaactccccatctgttaaatggtgaatggcaattcagtcgcggtacgctgccatgaagcccttatggaatgccttgaagcgggagatgatcgcggggaacttttccttctggggaggattgtgcatttgatgggccatgtgccaggaacttggccaaatccagatcca

SEQ ID NO: 417015 - DNA, 348 bp, Oryza sativa
gttattgtgatccatgctcagcgcctgcagcaacagctacagactcaaccagggtctcttccttttgatgagatcctatactgcaacattgggaatccccagtctcttggtcagaagccagttacatcttcagggaggttattgctctttgtgatcatccatgcttgttggaaaaggaggaaaccaaatcattgttcagtgctgatgccatttctcgagcaacaacaattcttgcctcgattcctggaagagcaactggagcatacagccacagccagggcatcaaagggctgcgtgatgcaattgctgctggaattgcatcacgtgacggataccctgcaaatgcag

SEQ ID NO: 417016 - DNA, 335 bp, Oryza sativa
actcccaggtcaacaaggccaaaagggccagtgagtggctagcttaattagctaagctcatagtcatagcaatggctggagccgtgctggtgaggagaatggtggtggtggttgccattccgccttggtggcgcccggcgaggtggcggcgcagctgacgccgacgtactacgacggcagctgcccgagcctgcagtccatcgtgaggtcggccatggcggccgccgtgcagcaagagccccgcatgggcgcctccatcctccgcctcttcttccacgactgcttcgtcaatgggtgcgacgcgtcggtgctgctggacgactcgtcgacgatca

SEQ ID NO: 417017 - DNA, 339 bp, Oryza sativa
tttttctatagctaagctctgagctccatggccatgaagtgcttcttcctcttcttcaccttcctcggggccttcttccccggcgccgccgtcggcgccgggctgaaggtcgggttctacaaagacgtgcccgtcggcggagcgcctggtgcagcaggcggtggccaccgcgttcaagaacaacagcggcgtcgcccccggcctcatccggctgcacttccatgactgttttgtcagaggctgcgacgcctcggttttgatcgacgggaacgacaccgtgaagaccgcgccaccaaacaaccccagcctccggggattcgaggtgatcgacgccgtcaa

SEQ ID NO: 417018 - DNA, 419 bp, Oryza sativa
ttttgggggatggcaaatcctatgaatacaccataggaaaaactgctcatttgaagctataggattatacatagccaagaagcaacgtttttggcctagtcaaaatctggcaaaacatgccatagtatcattgacgacgagcacaagctgcttgtctaatcgtccagctcaatgatcttcacaaccgaggaatctcccaccttctggcagacaacaacgcgatcatgcgactttatcacaccagaaactttaccgtggtcaagagcaaccttcaaaacggattcatttgtagcgttggttgattcagctggatgcctcggatcagcaagcattggaaagaggcctttaactatgagcgattgtcttgcttcaaatgcgccagggaaactccacctcagttgatttggttttagacgagg

SEQ ID NO: 417019 - DNA, 335 bp, Oryza sativa
gtcggtcatgcttgacacggacggcccagagttgcattgtggtgaacatgagcgaagcctccatcttcctcgaggagaacggcactgttattctcacccctgaccaggggcaggaggtcttcacaagtgctgccaattaacttcgctgggctagctaaggctgtgaagccaggcgacacaatattcggtgggcaatacttgttcacaggcagtgagactacttcagtttggttagaggtttctcaaattaaaggagatgatgtggtctgtgtgataaaaaacacagcaactctggctgggtcgctcttcacattgcattgctcgcagattcacat

SEQ ID NO: 417020 - DNA, 344 bp, Oryza sativa
cttatgctttggttaattagctgagagagaaattaagagagagatgagttgcagcagcagcaacagcagcgcccatggcttcttgtggctgatgctcgtttatgcgttctgtgcagctgttcactcagcaagcagcgagaactgatccagcagaagtggctgcactgaacacgatcctggggagatggggcctgcgggcgtcgccggcgtggaacatcagcggcgagccctgcagcggcgtcgccatcgacgagaccggcgtcgacaacaaccccaacatcaacccggccatcaagtgcgactgctccttcaacgccggcaccgtctgccacatcatcagactg

SEQ ID NO: 417021 - DNA, 500 bp, Oryza sativa
tttggggtttattaagagtggatgtgtatagggtcggaagtcttgccatccgaatgtttgccccaaaaatgttggggtaaaaaaaagagaagagaaaataggataacctgaaacggagctatgaatatttcgtttcattctatagtttacaactgtttattttactcatcatgctacataaattctgtgtgattcatggcaaaaagaatttcttttatacctacctcaaacagaaggctaaataggcaacaatggttttctctcatcggttgcagtaagatggcttgcatcatcagcagcgccagcagtcatatttacaaaagaagagtcggatgacctatgattctgtgcatcttccggttttaatgctccagctggtttgtcatctttgacctttgccagtggggagaaaaactggtgcatcgaaataaacactattgagatgcctaggagaaagttaactgtcaaggtatgtccaaaaatgcaccatatgctagacc

SEQ ID NO: 417022 - DNA, 347 bp, Oryza sativa
ccctttcaccgctccctctccctctccgtgcctggccgcgcggccgccttcaatttcgctctggtccaggagacctaccccggggacccctactccgaggcggcggcggaggtcatccccacgtactcgcctactccgcctccggctccgtcgccgccgaggtcgtgtacgccaactacggcaacaccaaggactacgagtacctcgcctcccgcggcgtggacgtcgccgggaaggtcgcgctcgtgcgctacggaaacctgcactgcgaggacatggtgcggaacgcccgtgccgcgggcgccgccgccgcgatcgtctacaccgacgccaaggactttggcggg

SEQ ID NO: 417023 - DNA, 342 bp, Oryza sativa
  unsure (1)..(342): unsure at all n locations
cttgttcagcagcgtctcgccatcgtctccccgctctccggcgaccagccgctgtacaacgcggaccggaccatcgtcgtcgtggccaatggagagatctacaaccacaagaagatcaggaagcgttcgcctccaagcacacgttcagcaccggcagcgactgcgaggtcatcatcccgctgtatgaggagtacggcgaggacttcgtcgacatgctggacggcgtgttcgccttcgtcctctacgacacccgcaccaagacgtacatggccgcccgcgacgccatcggngtcaaccccctctacatcggcaggggcagcgacggcgccgtctggatatcgt

SEQ ID NO: 417024 - DNA, 342 bp, Oryza sativa
tgtttcagtttttctaaagctactttctgaaaatgatcaggcttttgacattctctactgcataaccttcaagttgatggatcagcaatggcttgacatgcatgccacttacatggacttcaacggtcatgaagtccacacgacgtcagctagaaagggagctcttgcttgaagatattcagcggattgaggacatgccatcatacaagcttttggcccgctagctagtaactgaaccataacatggctacgtgctgcaaggcttgagttgcataagggttgcaactagtgcccacaaacagtgtgaattccaaaacgcagatgcacttgtttcctctcaag

SEQ ID NO: 417025 - DNA, 500 bp, Oryza sativa
ttttgggaattgaaaagcaaaggtttttcaaaaccagacacacaaactgatagatagaagcccacacggacagatcataggatagcagcagtaatcaagcattgccaaggcaccaggcaagaaccctgaacctctctagtactcgtcaccctcatcaccctcgtcaccatcgtcgaactcggagccgacctcctcgtagtccttctccagcgcggcgaggtcctcgcgggcctcggagaactccccctcctccatgccctcgccgacgtaccagtggacgaaggcgcgcttggagtacatgaggtcgaacttgatgtcgatgcgggagaacacctcgacgacgctggtggagttggagatcatgcacacggccctctgcaccttggccaggtctccccccgggacgacgctgggcggctggtagttgatgccgtacttgaaccccgtggggcaccagtccacgaactggatggtgcgcttcgtcttgatggtgggcaccg

SEQ ID NO: 417026 - DNA, 338 bp, Oryza sativa
catcgcgccctcctccgccgtcgctcgccgccgttcgttttcgccgccaccgccgccgccatgagggagtgcatctcgatccacatcgggcaggccggtatccaggtcgggaacgcgtgctgagctctattgcctggagcatggcatccagcctgatggacagatgcccggtgacaagaccgttgggggaggtgatgatgcttttaacaccttgttcagtgagactggtgctgggaagcatgtcccccgtgctgtcttcgtcgatcttgagcctaccgtgattgatgaggagaggactggtgactaccgccagctcttacaccctgagcagctcatca

SEQ ID NO: 417027 - DNA, 447 bp, Oryza sativa
gaaagcaacaaaaatgctatcatttgctggtcactcttacagacttacacttccccagtttcgcagtggtatccacaacagcgaaaggtttcttcacaagggaaaaaacaacacggagcagctcaacagaaggctttacagacaaaaatgcacactccctgttggctctcccaagatttgcaactggctggctggccatgaggtgctccaacatcaactgccaccttcaggttagcggtgtcggcatgaagtgatatgtacagatggagatctcatctctagctttatacagctgctgctactatcagacttggtagaccattcccacctccagtgtggaggcatgaggtatggtagcagcataagatggtccgcggctgtttctcctcaagaactcgtagaagaagtttatcaccattcgctttagaaactagacccgctcttctc

SEQ ID NO: 417028 - DNA, 339 bp, Oryza sativa
ttttatctctactaatcagccatgagctcaatggggctaattatactatcatgcatgcttctcctttctaattctggcagaacaactacaggtgcagagctaggtgacactcttggcaagggcggaacatcaccgacggcgagaggctcgtctccgccggcggctcattcacgctgggcttcttctcgccggcgtcgtcttcgtcgtcgagcaccagccggagatacctcgggatatggttctccgtctccgacgacgtcgtctgctgggtcgccaaccgcgaccgccctctcacggacacctccggcgtgctggtgatcaccgacgcggggagcctcc

SEQ ID NO: 417029 - DNA, 498 bp, Oryza sativa
gagacggcggagggggggaaggccgtgcaggcgctcaagtcggtgtacgcgcactgggtgcccgaggacaggatcatcaccaccaacctctggtccgccgagctctccaagctcgccgcgaacgcgttcctggcgcagaggatctcgtcggtgaacgccatctcggcgctctgcgaggccaccggcgcgaacgtcaccgaggtggcgtacgccgtcggcaaggactcgaggattggccccaaattcctcaacgccagcgttggattcggcggctcctgcttccagaaggacatcctgaatctggtgtacatctgcgaatgcaatggcctccccgaggttgcgaactactggaagcaggtgatcaagatcaacgactaccagaagagccggttcgtgaaccgggtggtgtcgtccatgttcaacacggtgtcgggcaagaagatcgccgtgctggggttcgcgttcaagaaggacaccggcgacacgagggagacgccg

SEQ ID NO: 417030 - DNA, 310 bp, Oryza sativa
caagttgaattcctgcagctcgaatcgaggttgagaatcgaatcgatcgattaaaattcacatgaatcttatcatgccacggcgggcatgccttgagccaggcgtcgagcggcttgccgatggagtagacgatgaagccgatctccctgagcttctccgggtcgacgacgttgcggccgtcgaagacgaacgccggcttctgcatgttgtcgtagatcttctggtagtcgagcgtcttgaactcgtcccactcggtgaggatgcagaggccatgggcgttcttggtggccttgtacgcgttccacaccac

SEQ ID NO: 417031 - DNA, 345 bp, Oryza sativa
gtatccccgttcggtttattcgcgtttacttcgtttcttgggaaggcacttccttcctcttcctaggaaggcttgaggagccaagaggaagaggagagcaatgggggaagctgccggcgaccgcgcctgagccgcctccacagcgtcagggagcgcatcggcgactccctctccgcccaccccaatgagctcgtcgccgtcttcaccaggctggttaacctcggaaagggaatgcttcaggcccaccagatcattgctgagtacaacaacgcaatctctgaggctgatcgtgagaagctgaaggacggtgcttttgaggatgtcctgaggagtgcacaggagggg

SEQ ID NO: 417032 - DNA, 482 bp, Oryza sativa
actctagatgtataatcttgaacatttttttcccaaaaggagcaatcacgcaggcaaagtttcaagcttgaatttgaagcctgacaacaggggttagatgaattgcagaaaaggaaaagaagcaaaaacaaatttggggcgattttttctgacgcatttttatacaggttcatttttgcaacaaaaaatggcagaaatgcctgaggactttttcaccaatgcttttttctccaggctatcatattatattagaagaaataatgccgccattttttcgttgtcagcctatggaagagatgcttttaattccttcctgggtgccccaaatgactccacaccaaaacccttgacatatacatttgtaaagagctcaaaagtatcaggcataggacttttctttgcttttccaatggcatcatcgacttcttttctgaatactttctccatggccctgagcccaacaacattgttaggtcatgagc

SEQ ID NO: 417033 - DNA, 345 bp, Oryza sativa
cttcttcctccccacccacccccaaatccacctcgccgtcgccgccgcgaaaccctaggcagccatagccatggctgcggccatcctcctccgccgcgtcccccccgcgcgggcccaggccacgggctcatcgcggcgcgctcgatctcggactccacggcgccgctcaccatcgagacctcggtccccttcacctcccacatcgtcgacccgccctcgcgcgacgtcaccaccaccccggccgagctcctcaccttcttccgcgacatgtccgtgatgcgccggatggagatcgccgcggattccctctataaggccaagctcatccgcgggttctgccacctc

SEQ ID NO: 417034 - DNA, 359 bp, Oryza sativa
tctagaacgcgagcggtttgttctttatgggttcgctgttttaaccactagtaagtatatattccagggtaaaacaggtaaaacctgtgatacaaagcagtcacataactgaaaaagcgcacgatagtttgtgctactaacagtaaaccaggacagaacacatccaacacgatgacgacgaggtcatgggggtttcgacgatagcaatactggcagtacgaattcgaggtgccgcacaacggcgcaccacattcacttcagcagggttttaacgatggatttgacattgagcttcttgaggtcagtgtaagactgaccacagccaacgaacatgactggagctacagatatataaacca

SEQ ID NO: 417035 - DNA, 344 bp, Oryza sativa
cttatttactcccaggtcaacaaggccaaaagggccagtgagtggctagcttaattagctaagctcatagtcatagcaatggctggagccgtgctggtgaggagaatggtggtggtggttgccatgccgccttggtggcgcccggcgaggtggcggcgcagctgacgccgacgtactacgacggcagctgcccgagcctgcagtccatcgtgaggtcggccatggcggccgccgtgcagcaagagccccgcatgggcgcctccatcctgcgcctcttattccacgactgcttcgtcaatgggtgcgacgcgtcggtgctgctggacgactcgtagacaatcacc

SEQ ID NO: 417036 - DNA, 490 bp, Oryza sativa
tttttgtgttgacatgagtattttattaatactattaagccctgggccgggatgtcacactaggtcccctagcggttttgactctggttttctccgacccggttttctccgacatgacagctaactcagcgtgggacccacacgtcagcctcttcttctcctctcctatccacctttcttcctctttcccctcctctctcaccccctctcttctctgtattatccgcgtcacgaagccggcgggatggagcggggcggcgatgggcggagtggggcgaccggcgacggcgaggcggagtggcggatgcgcaacgccgagagacccgcaggggtggccaacgggcgccatggccacaggcgccggcgcgagggacaccggcggcggggggcgcgcggaggcggcggcgccgtggagggcctcgagctcggtgaagaagcgctaggtcttgccgtcgccgtggccggcgcggccgtccttggtgctcctctt

SEQ ID NO: 417037 - DNA, 338 bp, Oryza sativa
ctctgcaggccgccggcgggtggggaggaggccggcggggagctcctcctgcgtgatcgcgagctccgcggtcggacacgtcgccgaggtcgccgcgtaccgcctcatcttctcaactcaccactcgttctacgacgggctctacgtcggcggcgtcgccgacgcccgcatccgcccggcgctccgcacgttgaagcagaacatgtcgctgctcctctccgtgctcatcgaccgcgtgcagccggtggcggtgcaggaggcgagcgaagcagccaggcggagtggggggcgccgtcgccgatcagcagccgctcgtcgccggagtaggcgacggcaaa

SEQ ID NO: 417038 - DNA, 508 bp, Oryza sativa
ttttggggtgtttagagaacgaaggttcaacgcatatcaaatatgaaataataagacttgctgacacactcgagtaatgaccctctacacattgcaatagatatgaagacatgcatgtgttctcagatctcactcacaaaaaagcaccattcgttatcctaggccttcacgccaagcatataacagtgcaatatgaagatttaatctttcacctagaatttaaactgacgacggatactaaacggtacaaaagtaaacaataataaggtttcacataagccacattaggtcctaagctcattatttaagcaagtcagtgcccactttagtactgcccttcatagcctgggttgccatcaccatagctcttcttggttgccataaccaccggcaccaccaccatacccgccgtcactcttagttccctggaggtctttcattcgcgaagatcacgcggatactccgtcccttcagttccttaccgtccatggcatccatggcacttctt

SEQ ID NO: 417039 - DNA, 291 bp, Oryza sativa
tgctaagttagctttgccaatggcgatgatgccaggagtgcttatggatgccatggacggtaaggaacttgagggacggagtatccgcgtgaactttgcgaatgagagacctctagggaaccgaggggcggcgggtatggtggtggtggtggcgagaatggcaaccaaagaggctatggtgatggcaactgaggctatggagggcagtagctaagcgcgtactgacttggttaaaataatgggcttaggacctgatgtggcttatgtgaagccttattattgtttactttt

SEQ ID NO: 417040 - DNA, 532 bp, Oryza sativa
ggcgatgaccacgggggcgcggtcgacctgggctccggccaagggcggcaacgagcagggcggcacccgcatcttcgggccctcgcagaagtactcctcccgcgacctcgccgcccacaccaccctcaagcccaggaaagaaggacaacatacccaagaagagttacagaagaggaatctcagggacgaacttgaggagcgtgagaggaagcactactcgtcaaaggacaagtcctatgctgaggagagagataggcggaaaagcacaagcctactcctagaaggttcaaggagagaggctgaggataagatagttcctagagaaatcgatgcagatgattctgatgtggaacccagaagtgatgatgaaagtgatgaggatgatgacgacgatgatgacactgaagctctaatggcagagcttgaaagaatcaagaaagaaagagctggagaaaaccttagaaaggaacgcccacaagcagaagaggaggctaagatgaaggaagctgaactgatgcgggaaacccctgat

SEQ ID NO: 417041 - DNA, 251 bp, Oryza sativa
gaatgaaaacatttcataagcttagccaccaagctaataatccacaagcatagattctttccatttttaggggaaaaatgtgccatccagattaagcagatgttacaggtggggcacatatagaccttccactcaaatttcagaaacagaaacacagggatctcagacagagacaggcaggccgagaaggccagggaacaacgtacaacggcagcattacttaatggacctttgcagaaacttacggtgga

SEQ ID NO: 417042 - DNA, 474 bp, Oryza sativa
tttttgggtccattaaaatcggattattttcaaaaaaaattcgaatacatctttctcgaacaatatcaatattacattagctcattaatctcgaatcaacagctacaaacttacaacaaaaaaatgtattcatgcttgtccgtatcacatgataagtgttacattattaatccaaataataggctaaaattggattatttaggtgacaattaagcataagtagttcttgactcctcatcaatctcctcaagaaaagggtaatctgtatagccaacaacgggatcctgtgtataaaaggtagacctgtcatacctgttcaatggtgcgtcaagctcaaacctcctcggcaagtcagggttagccaagaagagccttccataggcgacgagatcggcatagccatcagccaccaccttgttcccttcctcccggtcatacccgccagcagcgatgaaagtgccattgaactgcttc

SEQ ID NO: 417043 - DNA, 340 bp, Oryza sativa
ttggtatcagagcaatttcgatcgagaagaaccaaagctacttctaagccaaagatggtgcacgcaccggcgaaagtggcagctgcggcggcgatcccgctgctgacgccgtacaagatggggcctggagctctcccaccgtgtggtgctcgcgccgctcacgcggtgccgctcctacggcaacgtgccgaagccgcacgcggcggtgtactactcgcagcgggcgaccaggggcggcctcctcatcgcggaggccaccgacatctcccccaccgcgcagggctacccggagacccccggcatttacacgcagcagcagatcgaggcgtggaagcccatc

SEQ ID NO: 417044 - DNA, 543 bp, Oryza sativa
gccgccgagatggcgaaaaccctcaccgtcgacacggacgacgccttcgcggggctcctcgagctcgccgcggacgacgacgcggagggcctgcgccgcgcgctggagcgcgccccgcccgccgccgcggacgaggcgggcctctggtacggccgccgcaaggtcctcgagcaccgcacgccgctgatggtcgcggccacctatggcagcctcgcggtgcttcgcctgctgctgtccctcccgtccgtcgatgtcaatcgccgctgtggctccgacggcaccaccgccctccactgtgcggcgtctggtggctcgccgtcttgtgtggaggccgtcaagctgctgcttgctgctggggctgatgctgatgccacggatgcttccggatatcgtccagctgatgtgatctctgttcctccaaagatgtttgacgccaagattgccctccaagatctttttggatgcccaaaggctgggcatggcgttctccgggtggtgacaagggccgcaaactctatgttgtcacctgtatcatcccctaca

SEQ ID NO: 417045 - DNA, 456 bp, Oryza sativa
tttttgggacataatgacccctgcgccaccacctaaccccatgcttctcttcagaaacttttacatggcacatcagaaaacgaagaagaaaaaactaatgaagagaagaaaaagaacatcagtaggaaagatacacatatactacctagggctaaattaagaaacagatgcagatcaaactgtattccacacatgattaatgcttggatacacttgcacacttcaccatatattatatatatatatataaatatatatatatcatcagcttcttcatcaccaaattaatgggcaattcgagttcttccccgggccgacatagtagaaggaggtgccccaggcgtcattgacgccggtctgaacatcgaaccaattggactgctcggtgtaggggcccacccccttgggggcctacagctggttgctgctgaccaccacctgcaaggtcttgaagta

SEQ ID NO: 417046 - DNA, 492 bp, Oryza sativa
gataatgaaccaatactccaatagtatctgaagcagctcagatgacaaaccagtatgcaggacagattttattatatgagcactgctatgcagactagctcacttgtatcattcagaaacaacaaaatagaacacagttctatgcagatcttattttccgatcaaacaaggaggatcagacagacgagatggagcagatatacacctcactctgctccaaggagggcaaggagtatatcctcgtagtctctggttgtatctttagcaacagctcgctccaatgggacactgtttctcttctggtaggcctcctttatcagcttcaggtctacctcggcacgagttgttatgatccttgtaagagagttctcgtctgtgcccattcctcctagagccaatcgaatgactttctcaaagtatctgtcagggcaagtgaagcatcttatgatcgcccttagtgtaccaaggaactcgtccttaggatcagcttta

SEQ ID NO: 417047 - DNA, 348 bp, Oryza sativa
tttttaccgtgattggatcgatcaccggagcgacgatcaatggcgacgctcaccgtgcccgccgccgtgccgcccgtcgccgaggactgcgagcagctgcgcaaggcgttcaaagggtggggcacgacgagaagctcatcatctccatcctcgcccaccgcgacgcggcgcagcgccgggcgatccgccgcgcctacgccgaggcgtacggcgaggagctgctccgcgccctcaacgacgagatccacggcaaattcgagagggcggtgatccagtggacgctggacccggcggagcgggacgcggtgctggcgaacgaggaggcgaggaagtggcacccggggggcc

SEQ ID NO: 417048 - DNA, 341 bp, Oryza sativa
ttgtacgcactccaccactgcatcggcggcgagggctcactgttggcgagccatgtgcggcggctccatcatccaccacctgaaggggcacccgcaggggtcgcgccggacgacggaggggccctgcggcccgagaagaagaagcccaggtggtgcggcggtggcaggcgccacttccgggggttcgtggaggaggacgacgaggactttgaggccgacttggaggagttggaggtggactccggggactcggatttggagctcggggaggaggacgactatgacgttgtcgagagcaagcctgccgccttcaaaagggccctctccacagataacttgag

SEQ ID NO: 417049 - DNA, 341 bp, Oryza sativa
ttgtgttataaacaaggacaacgcagatgaggtgagagcttagtacatcattgaggctgcaaaccaccccacagaccctgaggcagatgagatcctgtccaggaaaggcgttctcatccttccacatcctcgcaaactccggtggggtgacacagagctacttctagtgggaacagaacattcagggtttcatgtgggacgaggagaaggtgaacaatcagctgaagacctacatgacccgaggactcagggaagcgaaggagatgtgcacgagccaccactgcgacctccgaatgggcgccttcaccctcggtgtcaaccgtgtcgcttcgcgccaccgt

SEQ ID NO: 417050 - DNA, 340 bp, Oryza sativa
ttgtttgagggaaaaaaaaagagaaaaagaaaagaaaaaaatgaagaagaagagagaactcgaactctcgcctaccatttcgcccccctccgcaagcaatccaccactgcatcggcggcgaggctcaccggcggcgagccatgtgcggcggcgccatcatccaccacctgaaggggcacccggaggggtcgcgccgggcgacggaggggctcctgtggcccgagaagaagaagcccaggtggggcggcggcgggaggcgccacttcggggggttcgtggaggaggacgacgaggacttcgaggccgacttcgaggagttcgaggtggactccggggactc

SEQ ID NO: 417051 - DNA, 353 bp, Oryza sativa
catttttctacctgactagtactaccactactagctagtagcgatgctactctctctggccatcaagctttgagtggttggagtggtggcagctatggctttttccatctccaagaaggctgcagttgctactcttctccttccttgttgtcacctgcgtcgccggcgccaggccggggaacttcagcgcctccgacttcaccgccgatcccaactgggaagtcgccagggccacctggtacggcgctcccaccggcgccggccctgacgacgatggcggtgcttgcgggttcaagaacaccaaccagtacccgttctcgtcgatgacctcctgcggcaacgagcctatcttc

SEQ ID NO: 417052 - DNA, 350 bp, Oryza sativa
cttttgtgtgggcggagatatcactactactactcctctttcccactcctctggctggcttcctactcctcccctgcttcgccgccgcgtgctcctccggcgccggcggagaagctccaagcctactacctccgggccgccgggaatggcggggaagcaaggagatgggcgcgaggaggatggcgctaaggtcggcctcccggcgctggatatatcgctcgcgttgccgcaggccacgccggcatacatcttcccgccatcagcatcggactattatcagattgatgatttactcaccactgaagagcagtctatcaggaagaatgtcagggctataatggagaaagaaa

SEQ ID NO: 417053 - DNA, 447 bp, Oryza sativa
aggtacaaaaaaaacatgacatttcatttgagtaattctcgaaataaattacaattattttaggtgccttaacatgcaacctctgatagctgtttgatgtttatggcagcaattaccgtgggcacacaaacaaaaaatattatttatacacatgcaaacctccatttgcaggtcatcatacatttcgtcaagcaaagcatgttgcgagtgtccatcgtaacataaattatttaagcattatttactcttcgtatatttacaagatgcaccaacggtttgcttcattagtactcgccgatcacagcatcacctgcgctgctgctagccttgcaattggaaccctgaatggggagcaagaaacgtagttcagcccaacctttgcgaaaaatgcaactgaagaaggctcacccccatgttccccacaaatgcccacctctaaatcaggcc

SEQ ID NO: 417054 - DNA, 343 bp, Oryza sativa
ttctatcagaactagttgagaattgcaaaatcttggaaagcctctacaaagaaatgatggatattgagttcactgttcaagaaaatagactgtggatgctgcaatgcagaacagggaagcgcacgcaaaggtgctgtgaagattgctgtagacatggtcaatgagggactgattgaccggcgttcagcaattaagatggtggaaccacggcacttggaccagcttcttcatccccagttttgagagcccgttgtcatatggagacaaagttattgctacaggcttgcctgtatcaccaggagctgctgtaggccagattgttttcacagctgacgatgctgaa

SEQ ID NO: 417055 - DNA, 336 bp, Oryza sativa
ctaaatccctcggagagagagagagatagagaggttgaaaaaatcaaacccttttgaggaagaaatcatggcgtggcagtatcccatggacggaccccacgcgagcgggagcaaggcgcggcggcggtggctgatggcccgggaacccagaggacgcactatccttatgcgactggctcatcaatcattgcactgaaacacaaggatggtgtcatcatggcatccgacactggagcctcatatggcttaactttgcgatccaagagcgtggagcgcattaaggattgtggtaagcatacccttattggagcaagtggggagttcagtgattcccag

SEQ ID NO: 417056 - DNA, 348 bp, Oryza sativa
ttttcccccaccacctcgcgctcgcggcggccaccggcgcggcggcggcggcggcgtgccttgccttgcctagctcgctggtgccatggaggtgcgccgcagggcgccgctgccgccgccgcccgagggtgcaggcgggcgacgcgctgccgctgccgatccggcacacgaacctgatattctcggagctgttcgcggcgtcgctggcgtacctgatgcggcggtggcgggagaagatccggtcgtcgacgccgctccacgtggtggggctcgccgagatgctcgccatcttcggcctcgtcggctagctcatctacctcctcagcttgttcggcatcgcctacgtgc

SEQ ID NO: 417057 - DNA, 414 bp, Oryza sativa
ttcccgccctcgttggccacgtagatcgccatctgctccgccttgacggcttcgagaagcttcggcgagtcgtggaggtacttgaggatccaggtgaggacgctggcggtggtgtcctgcgccgcgaacagcacgccgacgacgttgtcggcgatctggtcgtcggtgagcagcgccaccgcgccggcggtgccgtcgtcgcgcgaccgcatgaggccgccgaggaggtcgtcgccgccgccgccgccgccgccgccgcgcgcccgccgctccgccacgatctcgctcaggatcgcgcgcagccgcttcctcgcctggatcgccttgtggtagagcgtccccgggaagcggttggggaagcagttgtagcctctcttcacgacggagtagttcgtcctcagctcctccctgtgc

SEQ ID NO: 417058 - DNA, 392 bp, Oryza sativa
agggaaacacacggcagtatttacacatggaagatgtttacacacaaacacacttctttgggttgtcgctagcccttgataggagccagcaggctagctgacacgtaccggtctctggtagtactaacagagacagcaagctactaggaacagagtaacaagataagatagcaacatactagataattaattacgtattagataaccacaaggaccagcaaacatggcgtgacagagagatcgaccagcctccgatcaatgggattattcagttcagcgatggctgctcctggtctcgtcgctgtacagccagtcgtagacggagggggagttgggctgtgggcggtcgaagaggttggcgccgaggatcttggtggtgagggtgctccccg

SEQ ID NO: 417059 - DNA, 356 bp, Oryza sativa
ttttcttctactccaccaccaccatctcctctccggtctcgtcttccctggcgcgcgcggccggcgagccggcgagcggcgtcgcggcggtgaacttccttgtcctcgtccccttcccgactccccgccccacctagcctccttccaagtgaggactcctcgcgctcgcgcgcgcgcggccggcgaggggcgacgcagccggggcctccgtcctctcggcagcacgaattgaattggaggcacatttgtaaaaatgggagtttaccttagtacccccaaaaccgagaagctatctgaagatggcgaaaatgataagcttaaatttggactctcatctatgcaaggatggcgtgcaa

SEQ ID NO: 417060 - DNA, 495 bp, Oryza sativa
cttaaaaaatcatatctaggggtattattttttttcaaagaagtacaagtagtatttactcttgaccactctttgctccgtatatacaccggtttatcattacaccatatttcctccgtcctgagtccctcacaccaaagttgaacaggttgacgtggcaggatcgaacaaagccggaagcaggtatttcctcccgtgtgctccattggcgttgtagctcgctcccgtcgcggggtccaccgccaggttcccggcataaccggggtacgcaccgctgccgtagacccccggacacgccgtcgcggcctccagcggcgcctccttggggccctggtagaacccgtcgccgaacgggttggtcacgacgccggcgaccatgctggcgatgttcatcaccatgccgtccatcccgacgtcgccgctgggcggcaccagcgccggcgtctgaggcccgtacaccggctggtgaacggccacgcgcactggccgggcact

SEQ ID NO: 417061 - DNA, 346 bp, Oryza sativa
ctttcaccaagcaagcgtgcacaacaattgcactacgagatcatggcctcggatcgtagggtttgcaccgtccaccacatgagccacgcggcaatcgtgctggtttcagtactgctgctgtgctccacatccctccgcgggagccaggaggctcatggagctgtacaagccaccgcccagcgagcaactcacgtaccacaacggcaccgtgttgcggggcgacatccccgtgtcggtcgtctggtacggccgcttcacgccggcgcagaaggccgtcgtctccgacttcctcctcttgctcaccgtcgcctcgccggcgccgaccccgtccgtgtcgcagtggtgg

SEQ ID NO: 417062 - DNA, 350 bp, Oryza sativa
tttttcgatcccctcccctgcacggttcaaaacggggatcgttagagttctgcatcagtgatgggctggagatttgcgttgttactgttacatgttcttctgtgccttgtcaatggcgtctcctgtgcgcacgagctcttacgtgcgtacggagtacccatcgactgatatacctctagaaagcgaatggtttgcggttccaaacggctacaatgcgccacagcaggttcatatcactcaaggtgactataatggaaaagctgttatagtatcatgggttactgtagcagaacctgggacaagtgaggtgctctatggtaaaaatgagcaccagtatgatcagagagtgg

SEQ ID NO: 417063 - DNA, 295 bp, Oryza sativa
tgggtctgaatatgaatcataaaatcacccatgtaattcataagcttctgcatcacatgatgaacgaaaggaagcatgtaacttttgcctgtcaattgcagctggtacctttgctatctaagaagggaaaacaaaaaaaaaaagaaatataaaacccaaactaactaagagaggataaaaaaaaacaaaggactaaaatgaaaacacaaatctggatcgagtgcctttcatccctgtgagattaccatggagaaaaataggccttttgatggcctggtgggtttttcccagggtg

SEQ ID NO: 417064 - DNA, 505 bp, Oryza sativa
ttttgggttttttttttttttttgggatcaaaacatttctattaccacaactttttaaggatggaatcgagtagcaatactttcaccccaaaatacagtttagcgacaatatcttagaaaagccgcttgctttgccgccatggctggcaagctgagcagagcagctaacacaaagaacacgagatcactataaaccaaacggcaacgaacgaataaaatacagggtcttttttgtctgaagatacacgaagcggttcgttttcttttatttttagtctcctctcctccttgatgatgggtgtatggcaatggcaatggcgatgggatcttggcttagttgatgggaaggggctcgccgttccactccttgaggcaatcgagcatggggtcgatgagcttgccctggctgatgccgaggaacaccttgttgcacttcttgccgggggacttgagcttttcgccggtgaggaaaacgcaaccgagcttcttgcggcccaaacggtag

SEQ ID NO: 417065 - DNA, 342 bp, Oryza sativa
  unsure (1)..(342): unsure at all n locations
tgctcntcttcagtatcgaatcctctcttctcgtcgtgcctatcaccaccaccgtagcaatggcggccaacgggccgatcaacaaggaggacccgctcaactggggcgcggtggtggccgagagccggcagccaccttgacgaggtgaagcgcatggtggtgcagttccgcgagccgctggtcaagatccagggcgccaccctccgcgtcggccaggtggccgtcgtcgcccaggccaaggacgccgccggcgtcgccgtcgagcttgacgaggaggcccgcccccgcgtcaaggccagcagcgagtggatcctcaactgcatcgcccacggtggggacatc

SEQ ID NO: 417066 - DNA, 296 bp, Oryza sativa
cttttaaaagatttggggcggcatgcgcgcgcacgcaagcgcgggtcctctttagagggcgccctctgttctccggggtctactactactacagggcgtcgtcgtagtcgtcggaatttcaagttgccttaggggaccacacgggtggcacggggtccgcaccaaacaaggttaaattgggaagggtttggtgtggaactggggctagaaaggaactcttgaaactaaagtgcaaatcacaaatatgccaaaaattggactaagagaaacaagtttctaaatactggacaggaaga

SEQ ID NO: 417067 - DNA, 301 bp, Oryza sativa
aaacaaacataataatgtgtccgatcttgctcaattacaacatcatcaacatcaaacacagagaacgaggggtcggagccatacattatcatcttgggaagtgtttggtctgttactggggctagaaaggaactcttcaaactaaagtgcaaattacaaatattccaaaatttggactaagagaatcaagttctaaatactggacaggaagacagttagcttgacatcatgatttgatcgcatgcctgaagggcctggtttgcatagtatcttacatccacattagggtcctcactgagtt

SEQ ID NO: 417068 - DNA, 403 bp, Oryza sativa
ttgtttttcaaaacccactcatttattggcacaacttcatagctcaaaatacaaccatatcactgtcttttaaaactactctagtacattactcttatgttacagctctgaacacatcacaacttcttagttcacagattgcatatgtgtgtggccagacacatgggcaaaattcagaaagaaaaagaaacatggtttgaacagagacaccaaaactatacactagaagctgcaagggagcacacggacacaaacttggccggacagacatgccaaattcgtttcagttctagccgttgcgctataataaggttcaactgccatcagcaagtgcctgaaccttcttttcgagctcaggtttgttggcgcccacaagcttgtcgacctgcttctcgtttttatg

SEQ ID NO: 417069 - DNA, 549 bp, Oryza sativa
tgtttctccactgcccccgcacaaatcaactctactgtccaattcgcggcggcggcggcggatcaaaccctcatttggtgggattttttgctgcgtttaatcaaatcctctctctctcttcgaccgcggggagatccggggttcgattgtttcgtctcctcctccccctctcgtgcgggcgtcggaatcgatccacgccccgcccgctcgctcgctcgctcgctctgtgagcccaagaggacattttgctcagtgctgtgctagctttgttggctcaagttcacaatgggaggttgtgtgggcaagggacgacgacatattgaggaagacaagcttgatttcaaaggtggaaatgttcatgtcataacaagcaaagaggactgggataggaagattgaagaagcaaacacggatgggaaaattgctgtggcaaatttcagtgcttcctggtgtggaccatgtcgtgttattgcacctatttatgctgagatgtcaaagactaatcctcaactcatgttcttgccatagatgttgatgacctaatggatt

SEQ ID NO: 417070 - DNA, 353 bp, Oryza sativa
  unsure (1)..(353): unsure at all n locations
gtataaggagcgtctagacaagaangtggtgggtntcttttttaaaagtgggggggggttgaaaaacccccataccggcgccatcttgacgtggtggtggcttgtgaggacgatgatgacaacgactttgacatcccactggtatcaatctacttcccgacaggtgagagacggcactcctactgacatgactactgatctggtcttttcagagagacgatgtataagttgcaccggtgcctgtaaactaagtgggggtttaagccacattactgattttattttgctaccatcttgatagagctcgttcagatgggcggtttgttaccatccccgaaacttgtatacccctc

SEQ ID NO: 417071 - DNA, 468 bp, Oryza sativa
tttcacgccgcctttgccttagatctcctgggggccgcctccaccgccggcgcgtgcccacggtccctccctcgccatggagggtaacagtaccaacctcgatgcggcgatagagtcgctcctcaacgtggagaagcagatgaggctggccggcgatgtcgccggcacgaggaaggccgccatcgacatcgtcgagctctgctacaaggccggcgcctggaagacgctcaacgatcagatcgtggtcctctccaagaggaggggccagcttaagcaggctatcactgccatggttcagaaagcaatggagtacattgacttaacgccagacatggacacacgtattgagctaatcaagacgttgagcagtgtatctgctggaaaaatatatgtggagatagagagagcaagattgatcaaaagacttgcaaaaatcaaagaggagcagggacagattgatgaggctgc

SEQ ID NO: 417072 - DNA, 378 bp, Oryza sativa
ttttggttttttttttagtccacacaaaacggaacaagtcttatttccaaggcaaattaacaaatgcaaacagatttacaaacggaagaaataaactgcacgctacagacagtatccactaaaattattccgtaaccaaatcaaatgagtttgatcagatggactttgctgatgaaagaaaatgccagaaaattgatgggaagatcgacggcgtgccggcctaccgatcactttgaaccttggcccttgaaggccgtcccacctgcggggaccgtctacgccggaatgccctttggcgaggaccttcggacggccacgggccggtgccgcggcaaaaagcttggcgggcaatggcctgggtgccctggaagctggctg

SEQ ID NO: 417073 - DNA, 366 bp, Oryza sativa
  unsure (1)..(366): unsure at all n locations
ttttgggggcgatactacatacacttagtgctaacattaagcaatgttcaattctctcgtaggggagctctatgtcgacctaacttggcatggattgttggaaacctaaacatgtgggccaaagctggtgtagtcaacacttcctttgccttcgtacttcttgaagttttcgatgaacattttcgcaagtttcttggcttgctcatcgtacttttcggggtgagaccaagtgctcttgatatcaaggacatgcggatngacgccatccaaatgggccggaacatcaaacccgaaaactggccgccccccctcaactcagtatgttgaacggacccctcccaaatggcatcgatgcatgtttgagta

SEQ ID NO: 417074 - DNA, 298 bp, Oryza sativa
ggagcccaccgtgtccaagtcggcgccggagctggtcccgcccgcggggcccaccccgcgcggcgcgctgccgctgtcgtccatcgacaagaccgccgcggtgcgcgtctcggtggacttcatccaggtgttcccgccggcgaccggcgggcccgcggcggacggccaggaggacgccgtggccaggatgcgcgacgggttcgcgagggcgctcgtgccgtactacccggtggccggccggatcgcggagccggcccccggggacgtgggggtggactgcaccggcgaggggttgtgg

SEQ ID NO: 417075 - DNA, 453 bp, Oryza sativa
  unsure (1)..(453): unsure at all n locations
ataataataataataatattattaatgccattttatgaacattgcacaagctgctgcagcagcatcaaccaaccaacaaaccaaactataaacttcctctgctccatttctgcctccattttcatggacagcaacatcatatctctgcatttttttttcaccggttgtgtgactgaaaatagagaaaacgtcggcgttggccttagctgcttttgggcgcatcggcggcggcggcggcgacggcgtcggggatgccggcggcgagcctggctctcaagtccttcctgaggatcttgccggaagggttcttgcggatggaatcggtgaagaacacnttgttgatcctcttgtagaacaccacctcttttgcaacgaatttcttgatctcatcctcggtgatttctgagccttctgtccggacaatgaaggcgactggcacttcaccggcaagat

SEQ ID NO: 417076 - DNA, 412 bp, Oryza sativa
ttcttgtaaccctagcttagtggattagtttaggtgtttgtcggagattatgggggcggcggcggcggaggaggtggtggtgttccggtcgaagctgccggacatcgagatcgacaacagcatgacgctgcaggagtactgcttcgcgaggatggcggaggtcggggcgcggccgtgcctgatcgacgggcagaccggggagtcgtacacgtacgcggaggtggagtccgcgtcgcggcgcgccgcggcggggctccggcggatgggggtgggcaagggcgacgtggtgatgagccttctccgcaactgccccgagttcgccttctccttcctcggcgcggccaggctgggcgccgccaccacgacggtgaacccgttctacacgccgcacgaggtccacccccaggcggag

SEQ ID NO: 417077 - DNA, 180 bp, Oryza sativa
gacaacatcaatatggaatacactgtaaattcaaaaaagtgtaacatgtacataggtataaatgcctctcccttattatacctccgtttgtatcggagaaattccaaaggaattaatttcaaaggattcaattcctaaggaaatatttcactcttaatttcatcacccgtttgcaacaag

SEQ ID NO: 417078 - DNA, 449 bp, Oryza sativa
ggctggagcgcgccgacttcgcgagcatgatgaaccccggctcgcgccagatttacctcaccttcccggcggatagcaccttccgcgaggaggacgtctccaactacttcagcatctacggccccgtccacgacgttcgcatcccgtaccagcagaagcgcatgttcggcttcgtcaccttcgtctacccggagacggtgaagctgattctcgccaagggcaacccgcacttcatctgcgacgcccgcgtgctcgtcaagccatacaaggagaagggcaaggtccccgacaagtacaggaagcagcaccagccgggcgagagggtggacttctccagctgcactactccaactggactcgatgccagagaccccttcgacatgcaccagctcggtgcgagaatgctgcagcacttcacagcgcgaatgagatgctgctgaggaggaagc

SEQ ID NO: 417079 - DNA, 364 bp, Oryza sativa
gtttttgcctttcttggagcttgccaggcatggggggtgcttttagtagcgaggtgtggtggtgccaacaagcggaagggcgaggggctcggggagatgcacgacgacgtgctcgagcgcgttctggcgaggctcccgccggcgagctacttccggctcaggggggtgtgccggctgtggagcgacgccgcgtcgtcgcccacgttcctcgccgcgtgcggacgcgtccccgcgcgcgacccgtggatgctcatgctgacggagggggaggggcaggagcggcgtcttccggccgtacgcgttcgacgccagccagggggaatgggcgcggtgcgggggcgcgcccgagcacgagatgccggcg

SEQ ID NO: 417080 - DNA, 346 bp, Oryza sativa
ggttgggcgtccccgcgaagccgatgcagccgggggggtccatacgatccggcatgggcaagaaggccaacaaggccagcgcctgatcattgccggcgtctcgccgcccgtcgccgccgcgcgctgtatccctgtatagcctaggtgttgctgcttacctagtagtagttcgccatggtcatctcgtctgcttcgatcgatcgagcgctctgtgtacggtgtgtgtgttgcgttgtagataaggttcgggtttctttttgcaagggaggaagaagctactgtagcatatcgccaagaagcttgtatgataagacgatctggcgctcgcagctttgtcttatgttca

SEQ ID NO: 417081 - DNA, 425 bp, Oryza sativa
ggtcttgatggtgaagaagggcaagcgcgaggcaccggtcaccgactttgtgccggccaagacgcagatgaggctcgttgagaacgctgccaatgcagacaccacggccgcctccgagccggagctagttgtcggtgaagctgtcaatgacaatttaccggtggtcgaatctgagtttgaattcagccgcggaaagtatctcatctacatgggcggtggtgagagatgcaagagcatgaaccactacggttggggattcttgtgtgcacttggtgaggcacagtacttgaaccggacacttgttatggaccttaatgtgtgcctcaattcacggtatacttcaagtggcaaggatgaagagagagattttaggctctactttgattttgagcacttgaagcaatcagcatcggtcattgaccaga

SEQ ID NO: 417082 - DNA, 533 bp, Oryza sativa
ctagatcgcgagcgggtttcctttttttttttttttgagcaaatttgtgggtaattaattagtacaaactagcaaagtgccgatgcatgaattcaacaaactaatgtgttctgggtgataaaatacaacaacagtgtcctgcagaaacactcatatgaactagctagctacaacaaagccatatgtgcttaagatacacggtagttcaaaaatattatatcaagcacaacatttgagactcagcgcacataattcacgagatgttcatgaggaagcagggcatgtattgacaccattcttgcaatcacgagtaagatcactgaatgtctccaatttcctcttcccccgaaggaacacctcagtgtcaactgcaaccctcatgtatccatcgaattcaacagcattaccattgcttagcttctttgtttaagtgtaccactttgtgttctcatcccataaatccttgaagtcatccaggaagtgtgttcgatacttacccttcattgtgtcaaagaatgatttatcgggttcat

SEQ ID NO: 417083 - DNA, 465 bp, Oryza sativa
gcaagggcaaggaggggaagaagggcaagcgcgaggcaccggtcaccgactttgtgccggccaagacgcagatgaggctcgatgagaacgctgccaatgcagacaccacggccgcctccgagccggagctagttgtcggtgaagctgtcaatgacaatttaccggtggtcgaatctgagtctgaattcagccgcggaaagtatctcatctacatgggcggtggtgagagatgcaagagcatgaaccactacgtttggggattcttgtgtgcacttggtgaggcacagtacttgaaccggacacttgttatggaccttaatgtgtgcctcaattcacggtatacttcaagtggcaaggatgaagagagagattttaggctctactttgattttgagcacttgaagcaatcagcatcggtcattgaccagaggcagttctggacagattgggggaagtggcacaaga

SEQ ID NO: 417084 - DNA, 506 bp, Oryza sativa
ctagatcgcgagcggttttcctttttttttttttttgagcaaatttctgggttaagcaattagtacaaactagcaaagtgccgatgcatgaattcaacaaactaatgtgttctgggtgataaaatacaacaacagtgtcctgcagaaacactcatatgaactagctagctacaacaaagccatatgtgcttaagatacacggtagttcaaaaatattatatcaagcacaacatttgagactcagcgcacataattcacgagatgttcatgaggaagcagggcatgtattgacaccattcttgcaatcacgagtaagatcactgaatgtctccaatttcctcttcccccgaaggaacacctcagtgtcaactgcaaccctcatgtatccatcgaattcaacagcattaccattgctcagctcctttgtttcagtgtaccactcgctgttctcatcccataaatccttgaagtcatccaggaagtgtgttcgatacttaccctttatt

SEQ ID NO: 417085 - DNA, 442 bp, Oryza sativa
gaatcgtaaaattcataaactgtcaacttgaaataagccgatgaacataattcatattagaacagaacactacatagagctgtagaattcaaccggagatagattacattgcttgaaacaacaaactctgcccaaacccaaagcagagcaacactctagcagtgtgcaggaatggcaactcgatcacacactcagagcaacactctacgacgtgaggtaggggatcatgtacgccgacgacgccaatgtcccgatcaccttcgcctccgtgtccgggaagaactcggcgcccgggagcgccgtcacggcgccgccgtccttctcgacggcgaccgggtaggtgagcaggtgtccggggaggtcgccggggagctcctcgccggcgtacagctgccagtgcctgtcggccatcgcgttcactttcggacacactccaagctcc

SEQ ID NO: 417086 - DNA, 339 bp, Oryza sativa
acgttttctagccttgtcaagtgcacacagccacggggggaatcttaaagagcaggggtgatggctcacctgctgatgcacggcacgctcgacgccaccatctttgaggccaccaacctcaccaaccccacccgccttaccgggaacgcccccgagggctttctcaagtggtgggaagggctggagaaccggttggagaagaacaccgggcttggcccccgcgggaccaggctgtaccccaccggggacctccgcagggcgcggctcggccggacgccggtgatctaccaccagcccgtgagccccccgtggggacgagggctttcacttttactgggc

SEQ ID NO: 417087 - DNA, 411 bp, Oryza sativa
gccacaaagaaggttcacataaacaacacaggtcacagcagcgaaagctacaagcaaaccctgcataatcgaaaagcaaatgtttttcaaaaccagacacacaaactgatagatagaagcccacacggacagatcataggatagcagcagtaatcaagcattgccaaggcaccaggcaagaaccctgaacctctttagtactcgtcaccctcataaccctcgtcaccatcgtcgaactcggagccgacctcctcgaagaccttctccagcgcggcgaggtccttgcgggccttggagaactcccccttcttcatgccctcgccgacgtaccaatggaccaaggcgcgcttggagtacatgaggtcgaacttgatgtcgatgcgggagaacacctctacgacgctggtggga

SEQ ID NO: 417088 - DNA, 307 bp, Oryza sativa
gtctatgtactcgcctctctccgcgccctcctggggcgccgctcgcacgccgttcgtgtccgccgccaccgccgccgccatgagggagtgcatctcgatccacatcgggcaggccggtatccaggtcgggaacgcgtgctgggagctctattgcctcgagcatggcatccagcctgatggacagatgccccgtgacaagaccgttgggggaggtgatgatgcctttaacaccctcttcactgagactggtgctgggaaggatgttccccagggctggctttgtcgatctttagcctaccgcgattga

SEQ ID NO: 417089 - DNA, 439 bp, Oryza sativa
accaagggaaagaaaggagaatgtataatagagaagctaattactgtacattatttagtgtacctcttcttcacataactactgtagttaatactacagtgtgtgccttagctttttatatggatcactatctgcctaaacatttctcactgcaataataatagtaaaccaccaattacaagacgaaagaacagtacaatttaggctggttcataaattttgcacaggagtttcttctgatgttggagattctgtttctgcaggcttcagaaacttcaggatatccatttttgttttctcagtacagcctgatccttgtggttatatgctgctggcacatagggcagcgcaccaaattctttccgcattcataacaggtctgatgtccacatccaaatgcaagaacctttgatttatccatacagatagcgcacaaaag

SEQ ID NO: 417090 - DNA, 195 bp, Oryza sativa
ggcccaccgcgccgcgaggcgcggggggccagacaccgggtccccgcgccctcccggataggcgggggcgcgcggagcgttttttggcgggacccccaggcaggcgtgccctcggccggatggcctcgggcgcaacttgggttcaaagacctgatggttcacgggatttttgtatttcacaccaggtattgcatt

SEQ ID NO: 417091 - DNA, 544 bp, Oryza sativa
catgacttgtctctaaggcctgagctcagtctgggagacctcaggtcgtcttcttgctccaatctctcgtacgaaagaagaaagtttttaggaagctaggagcagcacacagtccttctccctctcttcttgctatttagtgcagacctcaaatccaaagtgcctttattttccatcaagaaagcaaacacagtgtattcaagagtgcttctgttcctgaaaattaaacaaattgataataattttcaaggaagtatgaaactaatagcttttgggctgttattactggggtatatacaatattttgctacacctgattccgaagtcatagcattgtatgaaataaggacaatgctcaatgacagtcgcggcgtactgaatggctggaataataatcaagttagtccctgctattttccttccatcagttgtaatcaagatcaaaaggtcatttcaataactttgagctcatcaggattatctggattcttgcacccagcattggaaagctactatatttacaacagctattattgaatgataa

SEQ ID NO: 417092 - DNA, 513 bp, Oryza sativa
cgccgcttcgccgacctgtttggcctcgaagccaagaccgatggcgacgaggactggctcgggatttgggacggccaccgcttcgtcttccagacgctccgcccgctaccgcccgggacgtcctggctccgccgcaagctgcacacccttgttaactcgctgcgcctctttaagcgctatggtctctcgctgctcaagatggacagatttgtccaggaaatgttgcaaagatttatgctctactacaatggctttgaatcccgacctgtttttgacacggttgaggagatgctcaaatggtcgggcctctatggcctcactcgcaggacactagaggcagagctgcttgatgctggcctcaattctcaaactatttcagagcttgtcactgtgataacaagaatcaactatgggcaaagtgtgagtataagtggccttgctggtgcggtttctttagctggttctgaatcaggactgtgggctgtcaaagggggcaacctgcagctagctgct

SEQ ID NO: 417093 - DNA, 439 bp, Oryza sativa
gccggtgaggcgaagatgtcgtggcaggcgtacgtcgacgaccacctgatgtgcgagattgacggcaaccacctcaccgccgccgccatcgtcggccacgacggcagcgtctgggcgcagtcccccaacttcccgcagtacaagcctgaggagattactggcatcatgaaggactttgatgaacccggcagtctcgcaccaactggtcttttccttgggggcacaaaatacatggtgatccaaggtgaaccaggggttgtcatccgaggaaagaagggcactggaggcatatgtgtcaagaagactggcctgtcgttgattcttggaatctatgatgagccgatgaccccaggccagtgcaacatgattgtggagaggcttggcgattatctgatcgagcagggttgcttagtcctcaatatgctattttggtaatttg

SEQ ID NO: 417094 - DNA, 433 bp, Oryza sativa
acaaagaaccgtaaaatagtatcatcaccatgttcatctagacatagtagaaaacattcacactctcgaaatgctctctatctttcagttttgggttgctatacgtcttcttgttttgcattttttttagtattccatttctgttcagcagagtggcagtggcgcgccattccattccttgaggcattcgagcagcgggtcgatgtgcttgcgctcgttgatggcgacgagcaccttgttcagctcctcgccgggcgaccgcgttttctcgccggtgaggtactcggtgccgaccttctcgcgcacgaaccggtagagcgggtacgagcggcactccttgatccggttggggacgagcggggtgccggtttcgacggcggggcgggcggccttcacctccttgggcagcgcggcgcggacgtgctgctcgaac

SEQ ID NO: 417095 - DNA, 380 bp, Oryza sativa
tttgagctcttcttctacttaaaagaaaaagagcacgcatatctagtagtactgttctagtgttcttgtacttctattcgtgtgctactactgcatctgtgagtctgtgtgactgtacacatctgtaatggagtgcgaaaccgggcttgttcgttccctgaacggcgacgggctgtgcatgtcgtcggtgtcggcgccgccgcgggccgacccactgaactgggggaaggcggcggacgagcttgcggggagccacctctaccaggtgaagcggatggtggaggacttccgccagccgctggtgaagatcgagggcgccagcctgacaatcgcgcaagtggccgccgtggtcgtcggcgccggcgacgccagggtggagc

SEQ ID NO: 417096 - DNA, 440 bp, Oryza sativa
ggttaaatcttcacttgtatcagaaaactttgtttaatgtaactatataggattacacatcaaaagctactagtacaacttgactaaactgtagatcccctgaagcatccggggataagagagcagcctaattaccaatttatcatgacctgattaacaaattaactcttatacatgctagtagtatctcgagcaagcacgttaatgacactgcattcatgcaagtgcaagtgtaattaagctctagtcgatcttgacggaggagtagatgagcctggtgaaccagaagcaggcgtagaagccgattgtgccggtgaggacgaagaaggcggcggaggcgatgagcatgtagccgaagtagagcacgccggagacgaccttggtgatgtcgagcttggtgaagaagtagaaggcggcgtaaaggaagaggtagagcgccc

SEQ ID NO: 417097 - DNA, 180 bp, Oryza sativa
ttttatatgcaggagagcgatatcaaatggggggtgcttttggacagctacggggggattaccgatgatcagatccactggttctccatcgtgaactcgctgatgatcgtgctgttcttgtccgggatgctggccatgatcatgctgaggacgctgtaccgggacatttccaagtacaac

SEQ ID NO: 417098 - DNA, 426 bp, Oryza sativa
ttgtcgcgtggggcaagtcgcaagccccagggggtcaccttggacggcagcggggggcacacaagaacgggaacccgaacggcaaccccacgccggccgccgcgtcgcgctgttcccgctgccgttccagggccacctgagccccatgctccagctcgccgatctcctccgcgcgcgggggctcgccgtcaccgtcctccacacgcgctccaacgcgcccgacccggcgcgccaccgccacgggccggacctcgccttcctccccatccacgaggcggggctccccgaggaggccacctcccctggcgccgacatcgtcgcgcagctcctcgcgctcaacgccgcctgcgaggccccgttccgggacgccctggcgtcgctgctcccctgcgtggcgtgcgccgtggtggacgggcagtggtactc

SEQ ID NO: 417099 - DNA, 449 bp, Oryza sativa
gaagagcaaaaaagcgaactcgtctgaatatatttcacttgaatcaaatattcgtattacaattaggagctagatgaaaatttgaaaccaataacagctcctgatatacaaacctatacttctcacaagacttactaagattcacaatgtggacaaataattaactaattctgttctgtctcaccaagatacaaaaaaatcaagtaattctacaacatttatcgtgtatgcagtaaataacgttgtactgcgtgatccagcaggtgaagtgctactgactatatttgcagcatcatatagaatccagatgagtaaacacacattgttttgattactcatccaaaattctttgacggaagtccttcaccattaagggaagaccttccctgagagagacctttggctcccaacgtagcaggtgcttggccttggtaatatctggctttctc

SEQ ID NO: 417100 - DNA, 424 bp, Oryza sativa
agcagaaggcaaaggaaatttcccgcaaatacttattcatatgttttgacaacatttctcccgacgcatgctcattgtggcagacgcagctgaccacctagagcttttagttcaccattattatttagaccaagcatacgtcccaagatcagaacacatgcttacaagcgaaaatactaatagcctggctggctgcttcacagaataaccaaacgacaacctcaacagataaaaatgccacggaatgaaaacaaagcagcgaatcgtcaccagaagtcccatcttactcatcaaacactccatcattctcctccaacgcatcctctccccaggggagaagattgcccaggttaccttccttaacaggagcagggttcaccatattctcagcctcgaagcagtgcagaacagatttgggcgaccc

SEQ ID NO: 417101 - DNA, 454 bp, Oryza sativa
ctttcttgcataagaactcccccccctcctcggggcccttcgacgccgccggggggttggacaggagaaatccccaggctcagaggatttttggtagtcttgtttcgtgatattcgcgaagagggggggagctaaggggggattcgtaagatcagaattggatcacgcgggggcgcgctcgggatcgggggttccaaacacagcttcttcgttgaatttaagtggatgtactaatggagtcaaagggtggcaaaaagaagtctagcagtagtcgttccttgatgtatgaagctccccttggctacagcattgaggacgttcgacctgcccgaggcgtgaagaagttccagtctgctgcttactccaactgcgcgaagaagccatcctgatagccctttcgggttctccatcctagaagtttaggatttcttgcaattccattttggcacttttc

SEQ ID NO: 417102 - DNA, 413 bp, Oryza sativa
ttgttttttttttagcataaggcaaaggaaatttcccgcaaatacttattcatatgttttgacaacattttttccgacgcatgctcattgtggcagacgcagctgaccacctagagcttttagctcaccattattatttagaccaagcatacgggcccaagatcagaacacatgtcttacaagcggaaaatactaatagaactggctgggctgctttcacaagaatgaaccaaaccgacaaccctcaacaggataaaaaatgcccacggaaatgaaaaccaaagcaagcgaatcgtcaccccagaaggtcccaattttactcatgaaaacactccatcattctcctccaacgcatcctctccccaagggagaaaaatggccaatttaccctccttaacaggagcagggttcac

SEQ ID NO: 417103 - DNA, 235 bp, Oryza sativa
cgatcggccgcccttcttttttttttttctttgggtctttcgatttcttcttctggctttagatttcttatccttcttcttgttgctaatctcgatcgatccatctatccatccaaacaacctcattcttttttccttcgaatagattcttcgctgctaacgccccccacacagacaacagatttacccgcctttaaaaacaaaaaaggaagggtcacccttctctgtggatttt

SEQ ID NO: 417104 - DNA, 408 bp, Oryza sativa
gagcaaacgagggaacattccctcgagggattgaatagtttccccgcggtgcagcatccaatgttcagtttgtaaaccagatggcagtcacagggcttctgccaattgcagataacatttgcccataaaaatggagtgatacatgaattgttgggtcacgactaatcatgtattgctatcaactaacaaaagaggtcagacgacgtctccatgacacaagacagcgtaagacagcgtaggccatggggtccattattctggtactccgccattaggagagcttagaactggaactgcatctccttggtgtacccgagcttatcaaggtgcgcagccattgccttggtcatcggaggaggaccccaccttaagatttgaatgtcctcggcaggtgctggcaaatgagct

SEQ ID NO: 417105 - DNA, 439 bp, Oryza sativa
cttttacccgccaccgattccgagcgcgccgcggggagcgagcgggagagaggggggtcgcaagcgcagcttcctccccggccatggatctcctgcacggggagagcgtccagaccacggtggccatcgccgtcgccgtcgtcgcggtcgccgcgggcggcgccttcctcctcctccggtccaggaagcccaagggctgtttggatcctgagaacttcaagaagtttaaacttgtggaaaagaaacaaataagtcataacggggccagattcaaatttgctcttccaactccaacctctgtattgggcctttcaacaggacatcatatcagaatgcagaggacaagatgctacaggcgaagaagtaatcaaaccttatacccctactacattggattctgatctagggcattttgagcccggtattaagatgcaccctc

SEQ ID NO: 417106 - DNA, 485 bp, Oryza sativa
ctttctgtccttcctcgccgaggcctcgccgccggggggggatgccatcgtcgccgactggcgaggatcgccggactgctgcaggtgggatggcgtggggtgcggcggcgcaggcgacggcgatggcgcggtcacgcgtctgtcgctgccgggacgcggattcaacgggacgatctcgccgtcgattggcaacctcaccgggctcacgcacctcaacctgtccggcaacagcctcgccggccagttcccagaggtgctcttctccctgcccaatgtcaccgtcgtcgacgtcagctacaactgcctctccggcgagctacctagcgtggcgacgggcgccgctgcccgcggcggcctctcgctggaggtgctcgacgtgtcgagcaacctcttggcggggcagttcccgtccgcgatctgggagcacacgccgcgcctcgtgtcgctgaatgccagcaacaacagcttccatggctcgatcccct

SEQ ID NO: 417107 - DNA, 458 bp, Oryza sativa
ggcatgaacacgtagaactagtaaaccattttagagaatagatcatctagagctgagtacaggggctgggcggctctgggtttctccaccttcccaaacaggatatcagttgtggtcaagtaagcatcgccatagaagcgtagattggtctctgatctggttgtcacgacatttccttccaatgagaccccaacaaaggcacctttgctacagctgtaagtgtagcagagcccagaacctttttcactggccctaacatctgcttcaaaggccctgccaattggtcctgctgctgcacttaatcctgccccaagagaaagatgcatgcgactgctgaatgccttgacagccttacgatcatgaagtacaattataaaatctgtcagttcgccaccaaactgaactccccatcccaggccaacagatgcaattgctgatggggcagaccatgatccatc

SEQ ID NO: 417108 - DNA, 511 bp, Oryza sativa
gttagtagtggtagatccagagcggcctgctggggaagttgggatgcctgccatggccaagcccgcctcccgcgctgccaagcccgcgtcggcgccgaagaagcagaaggcaaagccctccgccgccgccggtggctcctcccacccgccttatttcgagatgatcaaggaggcgatcacggtgcttaaggagaggaccggctcgagcgcgcacgccatcgccaagtacatggaggagaagcacggggcgtcgctgccggccaactacaagaagatgctctccatccagctgcgcgggttcgcttccaagggcaagctcgtcaaggttaaggcctcctacaagctcttcgacgccgccaaggactcgcccaaggccaagcctgccgcccccgcccccaaggcagcagcgccgaagccagcgaaggacgccgccaaacccaagaaggacgccgccgctgccaaacccaagaaggcccccgccgctggcaccaagccgcaggcgccggaaaag

SEQ ID NO: 417109 - DNA, 499 bp, Oryza sativa
gttccgggttggcctcgcctgccgcgggccctggccggataggggcatctccctggactccgcgcgatccgtcctcgatcacattcagggggaggacttgctggtcacctgctactacatcgactgcggcatgaacgcctacgccatatcacctgcgcagctatattccaacaccccttcagattttgatttcaaacttgaaagtctagcccaaggattccaatccctatttgactttgcacaacatcttgccgcaaatgttgacattgtcttcccggtgatccatggcaaatttggtgaagatggcggtattcaggagctcttggagaaagccaacgttccattcgttgggacaccctctaaaaattgcctccttgcttttgacaagtataatgcatcgcttgagctcaatgcacacggctttttaacagtaccaaactttcttgtagagaaggacacattagctaagtcgaaactggaggaatggcttcaaagcatc

SEQ ID NO: 417110 - DNA, 491 bp, Oryza sativa
gttttggcagtaggagaacatgccggcggcgaggtgggagacgagcgacaggcgcggcctgcccaggccgacgagccccgccgagccgttccagtcgtcgctgctggcgttgctgcacccgaaggcaatgccggggacgcgcacctggtcggccggcgacgagccgaacgtgaacgtctccgagccctgcaggccggacgtccacccggtgccgtacgtctggttgtacctgcacgcgcaccccggcggcggggtcgcgccggccagcctcgcctcggcggcgcacaggttcagcgcgctgctgcacgggagcacgcggaacgtcggcgagctcgacgggttgtacagcgggctcggctgcttgaagcaccgctccccgcacggcgcgcactgcgtccagacgaggtcgctgccggtgtcggcgatggccgggtacgactgcggcggcgtgccgatggccagcggcatgatgtactccccgccgttgggca

SEQ ID NO: 417111 - DNA, 234 bp, Oryza sativa
tttgttgtttaccacaactttttaaggatggaatcaagtagcaagactttgaccccagactacaaatcagcgacaatcttttaaaaaacctatttgattttggcacatgactggcaagaatggcatagaatgtaaaacaacatgcacgcaacctctgtaacctaaaggggaactactgtacatgatacatgtcagtgttcgattgaagaaccactatacagttacaacggttga

SEQ ID NO: 417112 - DNA, 200 bp, Oryza sativa
gtctattgcgccccttatgcattagagcccccggagtcccctctgtttcgcagataagtcctttggttcccatctttttattacattcaggtcctcctagtttcttttcctttcgagtctactccttgcatttcttgcgaggaagcccctcgggttggtcgaattttagatttcactccctctccctccggagtcactgc

SEQ ID NO: 417113 - DNA, 239 bp, Oryza sativa
ttttggtttttttttttttccaaacatatagcacccactgtatcagcctttattatctttttcccaagacacagcagggcatattttcaggattccagatccagtttcacaacttgcgtcaccagtatacatatcaccgttatcacattttattcacgactacggtcgtggtcgacacatttacagttcaatgtcttgactggtccaaacatagccaccacccactgggattcctcctg

SEQ ID NO: 417114 - DNA, 358 bp, Oryza sativa
  unsure (1)..(358): unsure at all n locations
tcttccccacatccagttcgattgtggtgtttttacaacaaatcacggcatggatccctacaagcatcggccgtccagcgggagcaattccaccttctggaccaccaactccggcgcccccgtctggaacaacaacctcgcccttaccgtctgagagcgaggccctatccttcttgaggactatcatctgattgaaaagcttgcacagtttgacagggagcgtattccttaacgtgttgttcattcaggggagccattgccaatgggatttttgaggtcactccatgatattttttaccttaaanntgctgatattatctctgctcctggtgttcagaccccctttatttgttcggtt

SEQ ID NO: 417115 - DNA, 214 bp, Oryza sativa
aggaccacttgggaattctgaacattatgaggagtgcatgcactttgcacctgtgaaacatgcagggggccccattggacaatagcagtacatgtatttaactgggtgggtaaagggagataccacagagataaacactaacaccactggtttacaaaagcaggtttaaatgtgttcgtgggggagtacatggattattatatgacacacggta

SEQ ID NO: 417116 - DNA, 285 bp, Oryza sativa
cttgcttgccgctacactttatctactctctcacacactcctctgatctctctctctctctctcgctagtcgattggcttgcctagctctctcaaactgctctagtgcagttcagcaaaaactaagtgactgaaactaatttacatggcaacggtgacccgtgcacacctggagcagaagctcgccctcgccaagcgctgctcgcgtgaggcaaacattgcaagggttaaggcgggtgccgttgcgaccactcgttttgcagttcccacccttgcgagcgtgagg

SEQ ID NO: 417117 - DNA, 382 bp, Oryza sativa
gctgcaaacattatagcataggttcaatgtcaaaatattacaatcatcagttcatcacatcacaaaccagcacacatgtgctctccaagaattacatcaaatcggattgttctcttccacccttattagcaaggagcactggagatgaacacatctcacataagactagacaagattacaacacacattgcttattaatggtctagattaatgaaaacaacatgaagcaaaccataattaaccataataagcatcatcagacacaaccacagaggctagtactactagttgtaatgcagctgcaaccatgccattgatgccaatggccatggcgtgcgagctttccatgggggctcagaactggaaggcgtcggccatggcg

SEQ ID NO: 417118 - DNA, 152 bp, Oryza sativa
catgccgtgcctgccgctccgtggcaccatcaccgcgtccggtgacctggttcccctgtcctacattgccggcctcatcaccggccgccccaacgcgcaggccatctcgcccgacggcaggaaggtggacgccgcccaggcggttaagctcg

SEQ ID NO: 417119 - DNA, 360 bp, Oryza sativa
gtccggctttttcgtcaccgccgcagccgcggtggcggggcccagcagcggcgcggggaagcgcgccgcgtcgcacgcgaaggcgtgcgcgacaggtgcagcggcgttcacggcgagcgcaggcatctcgtcacaaaccggagaacgctaaaatccacagaaaaaggttagccttccttctttttttttcttttgctgtaaatctgttgtctgtttcggtggcgttagcagcgaagaatcaaatcaaaggaaaaaagaatgaggttgtttggatggatagatggatcgatcgagattagcaacatgaagaaggataagaaatctaaagcaagaagaagaaatcgaatgattgaaagaata

SEQ ID NO: 417120 - DNA, 365 bp, Oryza sativa
caggtactgctatgaggggaaaatttctataaatccagtcatgttcttcaatcttacatggtgattatatcctacctgataacacattgttacaagctaaaactctacgtatgggcttttgcagcagcctgaaattgcaggagaagataggaggttgcaacctctgaactctggtccatcttctcagaattccaaggcaccttccaactacttaagctacctgcctggcttgctgacacgcgccttgcgaacggcttcttggatctgcctctcgtgctccttgagcatgtcctcaacgttccctcctggcggcatcaatggccctgagtgggggatccttctggacttcctcccatgggtcatgc

SEQ ID NO: 417121 - DNA, 416 bp, Oryza sativa
ttatgcttcaagggattgtaacatctcgcgtatggcaaagcctgtatcttgtcttcgaatacatggaacatgacctttctggtctcattgcaactcctggcctcaagctctctgagccacagataaagtgcttcgttcagcagctgcttcatggccttgatcattgccacaaaaatggagttcttcatagagacatcaaaggctcaaaccttttgattgataacaatggagtgctgaaaattgccgactttggactggcaatatcttatgatcccaagaatccacaaccgctgacaagccgtgtagtgacattgtggtacagaccaccagaactttttgttggtgcaacaaaatatggtgtggcctgtgatatgtggagcacagggtgcattgtggcagaactcttttctggaaaa

SEQ ID NO: 417122 - DNA, 430 bp, Oryza sativa
aaattgaacaaacgcgcatattataagtgacgaagcggtctcacataaaacagggcacacaggttacaacaacgagggttgtaagcccattaagccccaaacatcagatcaccacaagcaaatgtctcgaagacacacgcacacggcaacaggataactccacactggcagatcatgggatagcagcagttatcaatcaggccttgacacacagaacatcaagcccccagacgacgacgactcctctagtactcgtcaccatcatcgccatcctcattctcgtcggactcagcgccaacctcctcgtagtccttctccaacgcggcgagatcctcacgggcctcagagaactcaccctcctccatgccctcacccacgtaccagtggacgaaggcgcgcttggagtacatgaggtcgaacttgtggtcga

SEQ ID NO: 417123 - DNA, 414 bp, Oryza sativa
  unsure (1)..(414): unsure at all n locations
ttatggcgtcttcgtactcgcctctctccgcgcgggcgcgcttttcctcctcctgtgccctctctcccttctccgccgccgtcgcagcatcaacccaatccgccgccatgagggagtgcatctcgatccacatcggccaggccggtatccaggtcgggaacgcgtgctgggagctctactgcctcgagcatggcatccaggctgatggtcagatgcccagcgacaggactgccggtggaggtgatgatgctttcaacaccttcttcagtgagactggtgctgggaagcatgttccccgtgctgtatttgttgatcttgagcctactgtgattgatgaggtgaggactggntgctaccgccagctctttcaccctgagcagctcatcaatggcaaggaggatgcagctaacaact

SEQ ID NO: 417124 - DNA, 406 bp, Oryza sativa
gaaaaaaaatgaagtttattcatatgatcatgatgagcacgtacttggagaaaactttgttacatacatgcatggctcgctatataaacaaaacaattaattaatgaagtgattgaaatcaagaaaaaaaaagaagggacaggtaaatcttacgataatgatctacatggaaattaattataagatggtcacggccggaatcaaaagctgaaatccataatcacagtctcggcgagcagctgatgatatatgacgataattaagagagatgattagttaaccacgttggacttcttcctgatctcgccctggctgccggtgagcactttgacgccgcccattttgaccatgggggcggcgaaatcggcgaagaactcgtccttgtagccgcccccggcgtggcgct

SEQ ID NO: 417125 - DNA, 279 bp, Oryza sativa
  unsure (1)..(279): unsure at all n locations
ttatatctagccttagcctagctagctagcttgggtgtctttttatgatcgaggggggtggcgaccatggcgccctcgagggtgatcctagcgctgctgctcgcggcggcggcggtgatggcgtcctccgcgcacctggacgagaagttctacagcaattcttgccccaccctggaggcccgcatccctaatgagatggtgcgcgcgctcagagnngntgggcagcctcgccggccccctcctcaggatgcacttccacgactgctttgtcagggggtg

SEQ ID NO: 417126 - DNA, 291 bp, Oryza sativa
ttgtttttttttttttatcattcatgcattccttgataacttcaaaaccatactgatcggtacataacatgggcttcctgatctgtttcaaacactttgtgctgatcagagaaaacactcttagcaaacatttcagactaggaaaatactactactgggacatatatggcccagccttattcccaaatttgggtttgcttttgcatccaggttgattctttacttaattattagttcactttggagcagctaagcctgaactggccctggcttccggagagggctccgagg

SEQ ID NO: 417127 - DNA, 256 bp, Oryza sativa
gcatttgcaagagtagtagtagtggtgctctggggggctacttctgcttgatcgagggatcgatcgccatggcttcttctctttcagtggccgtgctcctgtgcctcgccgccgccgcggcggcgcagctgtcgccgacgttctacgacacgtcgtgccccagggcgctggccaccatcaagagcgccctgacggccgccgcgaacaacgagcctcgcatgggggcgtcactgctcaggctgcacttccatgactg

SEQ ID NO: 417128 - DNA, 327 bp, Oryza sativa
ttttggtattcctaccaaccatgctagcattattatcattatcaagacatgcaagatgcatgtgtgattacaaaaatagtacatctacatccatagtacatatatgcaccagctgaagaagcctagaaaactagtaagatacatcatctggtattctggttttggcagcagcactagctaggtagaaagctagctagaggaagtcgaagcgcatgaggagcctgacagacttgtacctggtgccccggcgatcgtggagaggcacagcgcggatgccctgctttagcttcgacactggcaggcatgtctgccccccaaagtcatgct

SEQ ID NO: 417129 - DNA, 271 bp, Oryza sativa
ttttggttttttttttttttttttttttttttttttttttgggccccgaaaccaaagagattttttggccgcatcacatgtaaataatcggtccaaaacacaatcgatgttgatcaaagagaccgtcgcaaagttgtagtactgaagaaagggtacacaacagtcacagttttttaaaacaggagtcttttggaaactcagacacggtgtaaggggggagataagatgtattttgggcctagatgtccatgggcgcggcgtccgggccctt

SEQ ID NO: 417130 - DNA, 126 bp, Oryza sativa
acacatacacatcgtaagccgcccaaagggtacattttaaatgaatgggggcgcgaatcacacgagagagaaatccaaggccaggaccaggaggaggagaaggaagcttctagaatgttcctgaac

SEQ ID NO: 417131 - DNA, 408 bp, Oryza sativa
tggttttttttttttttttgcatcaatatatcctcattgatcagcttctcatccggttgtgtcatttacacaagaacaccagccatggtgaatggcaatggtgccataacactatcatatactgtatatatctatctaccacggtttcaggtcttcccgggtcccctcggcccagttgagcaccttctgcccgggcttgaggaacacatccctgccatggggcagcttccttgccagcgcgttcatcacctgggggaagccatccccgggctccgcaggctgcgggaacagcatggtctgcttcatcgacggctccgggagcatcgcctgcttccggaggatcacctccgtcggtatggaggtcaggatggtgtccagctgcgggacattgtcctcggccacgaacac

SEQ ID NO: 417132 - DNA, 338 bp, Oryza sativa
gtttgtcctgaatccctgaccttcagacaaatgggaaggttccaatgcagaagagacactaaatcttggtttgttttcatcacctccaagaaacagaaaattctcctataaaaccgaagtgatcactctcctcccgagctcgaaggagcaacaatggcggatcagatcgagcacctccaccttcccattcgtgggctcaacctccacattgctcaagtcggcaaaaaatagctcgggacggtgatgttcttgcaccggttccccgagatatggtactcgtggcgccaccagatgctcgccgcggcggccgccgggtaccgcgccgtcgcgccggactg

SEQ ID NO: 417133 - DNA, 443 bp, Oryza sativa
tttacgagctcgctctttcctcttccgccctagcgcctgttgaacggctccagcggatctcggcggcgtgctccggcgaccaaggaggccacggaatactgagaggatcagtggaagtgagggccggaccttcttagggcggagtcgaaatttcgtagcagttgagaatcttcgcaggtactggagggcggccatggaggagctggagttgcctctccccacggagaagctcgccgcggatccgggcagggagggaggaaagcgaggtgtggctgtgctcgtggccaccgggagcttcaatcctcccacctacatgcacctgcgcatgtttgaactggcaaaggatgaattgcagcagcgagggtattctgtcttgggtggttacatgtctccggtgaacgatgcttacaagaagaaggtaatgtgtggcatcaccactgttc

SEQ ID NO: 417134 - DNA, 321 bp, Oryza sativa
ttggtggtgattaaaccactagggttacatgtcagaacttacaggtgatttagctcaaggagggcactcaaaacacttttcaagccttcagctactgaccaccagagacgtcttacaaaacgggactgcagcctgctacgcagcacaggtgacaaaacgaagcacggacgcaaaccttacccatacatccatcacgcacgtcagagaaagaaaaaagagcacagcatcacaaagacacaaaactcttcactggcaaaacaacctgtgaagggcaaatggggctcaatgctattcggccttagcttctttctcttcgtcttc

SEQ ID NO: 417135 - DNA, 483 bp, Oryza sativa
  unsure (1)..(483): unsure at all n locations
tttcgcttcgctactctcctcgtcgtctccggcgccggctttggattccggcgagcggcggcgcgatcccgggcggcgaaggagggggaagccatgagggagatcctccacatccagggcgggcagtgcgggaaccagatcggggccaagttctgggaggtgatctgcgacgagcatggcgtggacgcgacggggcggtacgcgggggactccgacctgcagctggagcggatcaacgtctactacaacgaggcgagcggcgggaggtacgtgccccgcgccgtgctcatggacctcgagcccgggaccatggactccgtgcgctccggcctcttcggccagatcttccgccccgacaactttgtcttcgggcagtccggcgccggaaacaactgggccaaggggcactacaccgagggcgccgagctcatcgactncgtcctcgacgtcgttcgcaaggaggccgagaactgcgactgctta

SEQ ID NO: 417136 - DNA, 280 bp, Oryza sativa
aaaacttgggtaaatatagctcaacttgtacaaagttcacataaaaaggcattgattcatgacacttagagagccatgcacaccacttattaggacacacaaagggcaaggctgcagagaaattcaaccaacacaagctgaactaacggccccacctgtcaacctttaactggtcgaggccggatactcttgtgaaaaacagcaacaccacccatgcagaaaaagacaaatttttacacacacaaatcgacgacactgcagcctacgacatacggggagg

SEQ ID NO: 417137 - DNA, 479 bp, Oryza sativa
tttgaaggacccggagaacgcgcacaggcacaagatcactgaggagatcgcggccacggcggcggtcggcgccggcggctacgccttccacgagcaccacgagaagaagaaggaccacaagagcgccgaggagtccaccggcgagaagaagcaccacctcttcggctgatcgacctcatcacaacgtcgccggcggcggcgacgacctcgccgtacgtcgccggccgccgtgtcgtcgatttgtgtgtgtaataatttgtcttcttctgcatgcgtggtgttgctgtttttcacaagagtctccggcctcgaccagtgagaggctgacaggtggggccgtgagttcagcttgtgttgcttgattttctctgcagccttgccctctgtgtgtacaaataagtggtgtgcatggctctctccgtgtcatgtatcaaatgtattttatctgtactttgtacaagtgaagcaatatttattcg

SEQ ID NO: 417138 - DNA, 404 bp, Oryza sativa
ttgttttttatggtgccagggtcacatatggttccttcatattgaaagagacagtattacagatgcggttacacaacaacctgaaaaaaaaaaagaacaagacaaactgatagagcaaactgcagagctctcttgcagtttcagctgactcaaaaaaatgaaaaaaggataaaacgccgaagatatctgaacactaaaactctggctggtacaccgatatcactagcaacttcgcaaggcgatttcaaccctttcatcatcttcccatcttcttcttcttccatggagcaaccagtcactactgatcaaagacacatcaggtaggcggcgggggcgcctacaacggccggcaatggaggtagatagcgagagagagacccccctttcatgggcatcatctttat

SEQ ID NO: 417139 - DNA, 451 bp, Oryza sativa
ttcacacgccggactctccccttctctctgtgtcgctttttaattcgctcggggtatcccccccgaataaaggcgagaagccgcagcggcggacgaagaagagggcagatagaaatggcggcggagacgttcctcttcacctccgagtccgtgaacgagggtcacccggacaagctgtgcgaccaggtgtcggacgcggtgctcgacgcgtgcctcgcccaggaccccgacagcaaggtggcgtgcgagacgtgcaccaagaccaacatggtgatggtgttcggcgagatcaccaccaaggccaccgtcgactacgagaagatcgtccgcgacacctgccgcggcatcggcttcgtgtccgacgacgtcggcctcgacgccgaccgctgcaaggtgctcgtcaacatcgagcagcaagtcgccgacatcgcgcagggggtgcacggtcact

SEQ ID NO: 417140 - DNA, 525 bp, Oryza sativa
  unsure (1)..(525): unsure at all n locations
ttcctcagattttcaaggcgagaagccctcgaggcccgccggggcgcactttagggatgtcggcgagcagcgcgccggtggacgcatcgggggatccgatcccgacctcgtcggtgctgatggcggcgtcgaagcacatcgccgtgcggtgcaggccggagaacgtggccttcctcaactgcaagaagaaggaccccaacccgcagaagtgcctcgagaagggccgccaggtcaagcgctgcgtcttcgacctgttgaaagaacttcaccagaagtgccccaaggagatggacgcctatgccggctgcatgtattactacaccaacgaatttgacttctgtcgtaaggagcagcaagattttgagagtgcatgccccgtatctgagtagcctctcagggttttacttcaaatgaatgatcttcacaaataaggagaaaaagccgacaaaccaagttcatgatctcccatnngttgtggtgtnctcacagaatttttctttttcgatgactagcacgcctctgagc

SEQ ID NO: 417141 - DNA, 505 bp, Oryza sativa
  unsure (1)..(505): unsure at all n locations
tatcagtttgttgctttgctgcttcttccggttccaatttgagaggggggattggcgcgggaggcgaggcgaggcggcagccatggtggggcggagctccctcccggagggttccctcttcctcggattcgacagctccactcagtccctaaaagctaccgtgctgaacaacgaattgataatagtagcttcagatattgttaactttgattctgacttaccgcactacaaaacagaaggtggtgtttacagagatcctgcagatgatggccacatattttcaccaacaataatgtgggttgaagcctttgaattgctacttgagaagctaaagccaaagatcaactttagcaaggttgtggccatttcagggagtgggcaacaacacggcagtgtttattggaagaagggtagtcatgcggngttgtcttacttggatcctactaagagctntgtatcccagctgaaggatgccttttctaccatggactcaccaatatggatg

SEQ ID NO: 417142 - DNA, 526 bp, Oryza sativa
ttaagtgttacttgttagattgtggtgtcgggtatttgttaggatgggcagaggcacatctttgcaggagaggaagagtgccagtgaagctgctgagaaattgctctctgatgataaccgaacaaaaacacatgtaatcaaagtaattgaggggtttgagacagttatgttcaagtcaaaatttaaagagtggccacagacacctgacttgaaattgtcatctgaggatggaagaggaaaagttgcagctcttctgaaacgccagggcttaaatgttaagggcctgatgaaagctgctcctgcaaaagaagaaccccaagcttacattgattgcactggcagtttgcaggtctggcgcataaatgataaggacaagatacttttgccatctgctgaccaatcaacattttacactggcgattgctacatatttcaatatatgtaccctggagatgacaaggaggagtgtcttattggaagttggtttgggaagaagagcattgaggaggatagggataactgtatt

SEQ ID NO: 417143 - DNA, 426 bp, Oryza sativa
ttggggtttttttttttttatcagttgtaaacagccaaagagatcattgatattttaataagcatcatgcataaaccacgcaggttatcaagtcagttttaaggtccagcacaactcttgcacactagggactatgacacacaaagagcggcagcattacaaggtttgcgacaacataatagttattcagtattcactcatgcaccaacagaaacatcctgcatggtatcaaaagacccagcataggttacgcaaacattttggctttggttgctccaacactatgcttcagggcctaatagtagaacattatttcttgccgcgcagctttgttccaagagccctttcaagcttcccgatgatctgctggttcggaatagctttacctgactcgtactcctggatcacctggggcttttcattgat

SEQ ID NO: 417144 - DNA, 449 bp, Oryza sativa
gcgccgctcccgccggcgtccgtccgctccgcgttcctcgcctccgccccctccccgcgccgcttctccgtctccatcgccgccggccgcgccaggagccccatcattgcgatggcttctgccaaggaaggaaatggtgccccaacgaagaggacaacccttcatgatctctatgatctccagggtcagtccccgtggtacgacaacctctgccgtcctgtcaccgatttgctgccccttattggcagcggcgtccgtggagtcaccagcaacccatcaattttccagaaagccatctcgacttccaatgcatacgatgaccagttcaagcagcttatattagctggaaaggacgcacagagcgcttattgggaacttggcatcaaggatatccaagatgcgtgcaaactttttgagcctatctacgaccagaccgaaggggcagatgg

SEQ ID NO: 417145 - DNA, 471 bp, Oryza sativa
tttgttttttttttttaccaacatatgcctttgcattgcccaaatgacctggtatattacagcatttatgttccagcattgttcaattcttttgccttgtgcgcgatgcaatatcaacctataacctttacacataccagaggatttacttccatgaagctggaatctaaagactgtaaacataactcgaatggatcataactatcctgcagctgtaccttgtagcatgaagtagagatttagcttagaacacagggcaaacgcttgttggacccaagtcaaccccttttgcagtgggacatgtggccagtgggcagtgttctcctgccgtgccccaccagtcgatgctccggttctccatggatagtgagaagtacagcagcaccgccatgaaagccacgccagcgtctagtgcggcagagagaatgtagttgtacctcttccaccactttttccggtaccggaacacga

SEQ ID NO: 417146 - DNA, 286 bp, Oryza sativa
ttctgctacactagctctctctctcctgtggggagctaagcgggaggcattaaccccccgcgtcacgcgcaatgggtgaggcagcggcggacgagcgcggcctcgccgccgccgccgccggggaagacgaggaggagacgtcgccgatcgaggaggtgcggctgacggtgccggccggcgacgacacggcgctgccggtgtggacgttccggatgtggagcatcggcctcctctcctgcgcgctcttgagctttctcaaccagtttttcttctaccgcaccgagcc

SEQ ID NO: 417147 - DNA, 452 bp, Oryza sativa
  unsure (1)..(452): unsure at all n locations
tttattgctgccgcggcaacgctgatggttgggttttttggagcattggtatgctgcttggcaaggcagaaggcgggaagaagaggcgcacgcgggagaggggtggatacaaatgaggaaagcacacgtggcgtgcgcaggagggatagtagtgtaaacccggtgacatcaccaccagtagcagtgtccccaagtgccaattctggacataaggatccgggtgttgtttccggtgaatttacctttgagcagttggtccatgccacaggcgggtttggagatgacaacctcctcaagcatgggcactctggggatatttaccatggggtctttgagagtggatcccaggttgctgtcaagaaggtcaacgcacagagcgtcaacaagcatgcaggtgaaattgacttctataaaagtatttccatgagaggattgntccgttgctcggacat

SEQ ID NO: 417148 - DNA, 443 bp, Oryza sativa
caaaaagttcacttttcattaacaggaagacgatccagtatccaatagcagcagaaacagcgaatagcacaagcgaaaataaagacaaaggaattagcaatgtatactcgcattccacaacagtcgaagggcaataataagtcttaacatccaagtttaaaccgaacagaaaatagagttttaaatgactgacatagtgcacaaagcgagcagatattaacggtcaatgcaacaactgaaatgaccgtcgacaaaacttaacgagtactaaaagagctagatatctcaaatgcagatatggaaagcaccacttgaacgaggctcatttcttcttggcggcagccttggtcaccttggcaccggttgggtcctttttctccacgttcttgatgacgccaacagccaccgtttgcctcatgtcccgcacggcaaaacgaccaaga

SEQ ID NO: 417149 - DNA, 417 bp, Oryza sativa
ttatcaccagcagctcaagcagcaacagctgaaacggtttaagatctcatcgcgatgacgaccggcaatggcgacgcaccggtgatcaagaacgcccacagcgacatcgacagcaccaacaagacgctgctcaagagcgacgccctgtacaagtatgtcctggacacgacggtgctgccacgggagccggagtgcatgcgcgatctgcgcctcatcacggacaagcaccagtgggggttcatgcagtcgtcggcggatgaggcgcagctgctggggatgctgctgaagatggccggagcgaagaggacaatccaggtgggtgtctttaccggctactctctgctggcgactgcgctggcgcttcccgaggactggaaggtggtggcgatcgaccccgacagggagagctactagatc

SEQ ID NO: 417150 - DNA, 464 bp, Oryza sativa
ttatatttgcatcgttcttgggatgctttttaggcttgtttgagagggtggagcggtgacattcacgttcgtgaaccggtgcacggggacggtgtggccgggcatcctgtcgaacgccgggagcgcgaggatggacccgacggggttcgagctgccgcccggcgcggcgcgcgcggtgccggcgccgaccggctggtccggccgcctgtgggcgcgcacgggctgcacgcaggacggcaccgggaaggtcgtgtgcgcgacgggcgactgcggctcgggcacgctggagtgcgccggccgcggcgcggcgcccccggccacgctggcggagttcacgctcgacggcggcggccgcaacgacttctacgacgtcagccttgtggacgggtacaacctgccgttgctggtggagccctcgggcgccctcagcgcgacggggacaacttgcgcggtcgccgggtgcg

SEQ ID NO: 417151 - DNA, 363 bp, Oryza sativa
tttgatctccattcgtttttgagttcctcgggggctccttttatctttcactcgggggcaagattaagatcggaatcaatgggctcggccgcatcggcaggctggtggccagggtggcgctgcagagcgaggatgtcgagctcgatgccgtcaacgatcccttcatcaccaccgagtacatgacatacatgttcaagtatgacaccattcactgtcagtggaagcatcatgaggtcaacgtcaaggactccaagaccctcatctttggcacgaaagaggttgcggtgttcggctgcaggaacccttaggagatcccatgggctgctgctggtgctgaatacaatgctgagtctactggtgttt

SEQ ID NO: 417152 - DNA, 467 bp, Oryza sativa
  unsure (1)..(467): unsure at all n locations
tcttaaccagacactgcacacatcatcatcttgtccccttagaccggcaagaacaacaacaaaaaaaacgcagaggagaggatgcatgcatgatcaatcaaattaagcttcaagcatggggctcctcgaccagctctgggacgacacggtggccgggccgcggccggactccggcctcggcaagctccgcaagtacgcctccttctccccttcctcctcctcctcgacgatggcggcgtcgccgtcgcccatctcggcggcggcggcggtggtcgacgcgccggccgtgacgcgcagcattaccattctccgcccgccggcgctgtccgtgacgtcgccgcgcggcagcgagttgggccccttcacgccgttgtnnnnnnncagcgtcccggactcccccttcggctcagcaccgacgccgaanggancggagggctggaagaagcttgtccgtggggcggcgagga

SEQ ID NO: 417153 - DNA, 444 bp, Oryza sativa
ttcaatctaaatccatccatcgatctctcaagtaattaacctcaagagagaaggaattaattgagctagctagctagatagtgagataaatagtgatcaatagctaagctagctagcttcgatcgattgatcatgatgaggtcgccgtggatggtgtttgcatgggcggcggcgatggtggccgtggcggcggcgtcgccggtgccgacgaagctgaaggtggggttctacgagcacagttgcccgcaggcggaggagatcgtccgcaacgccgtccgccgcgccgtcgcccgtgaccccggcctcgccgccggcctcatccgcatgcatttccacgactgcttcgtcagagggtgtgacgggtcgatactgataaactcgacgccgggacacgtggcggagaaggattcggtggcgaacaaccctagcatgcgagggttcgag

SEQ ID NO: 417154 - DNA, 454 bp, Oryza sativa
ttcttccacccccgaaaccactccaaaaccaggccaaatttagcggcgcatggcggcggcggcggtggcggcgaacggcggcggcgacggcgcgcaggcgtccaacgcgcccgcccccaccaggctcgcgtcggtctacagcgaggtgcagaccagccgcctcaagcacgcgctccccctcccctccgtcctccgctcccccttcgccctcgccgacggccccgccagctccgccgccggcaaccccggtgagatcgcgaagctgttccccaacctgttcggccagccgtccgtgtcgctggtgccgtcgccggagccggcgtccaccaggccgctcaaggtcggcgtcgtgctctccggcggtcaggcgcccggcggccacaatgtcatctgcggcatcttcgattacctgcaggaatatgcaaaaagatccgtcatgtatggattcaaggga

SEQ ID NO: 417155 - DNA, 462 bp, Oryza sativa
ttatctcccccctcccccacacacatctcccgggctcgatttaaccctcctgcggggtcgaacacgacaacgccttctcctccgcctactcccccaacgcatcgccccaccccatccatccagattcctccctcctcctcctcctcctcttcctcctcccccgatcccgccccgatgcgatgcccccgcggcgcgatcgcgtgacgccgccatgatgaatcccgacggcggcgacggcgaccgcctccaggcggcgggggcgggctcgtcgtcggcgcagccaggggcatccgacgatggagtggcggttcgcgcaggtcttctgcgagcgcccggccggtgaggacgtgcacgaagttgacatcatctctgcaattgagtgtgataaatatggtgatcatcttgccacccgagacagaggaagacgcgttgttttatttgaaaggacagatgctcgggata

SEQ ID NO: 417156 - DNA, 449 bp, Oryza sativa
acccaagcaagttaattactgtagtaaatatttacacgtcttttaaattcaaattcaaattctcctcctcctcctcctagctactgctgctgctgctatcctatgatgaagtgaacacgtccgtttaatttctttcctgtccttgcaaatgaaaatgcagagaactcaaactgagccacttgagctccatgtcgtcttccccggcgagctcagcgacgacatcttgctcctcctccggtgatcgatcaggctggccgttgccggcggcgagctcagctcgctttacgccggctcgcgcgggcgcgccgcccagagcgagctgagcgcgcggaggcgctggcagtagtcgccgagcgcgaggagcccgcgcgccgcctgcggcagcgtcaggatcttgtacatgttctgcagcgtctcctgcccgagatggtcggcatggtcgacgaacg

SEQ ID NO: 417157 - DNA, 505 bp, Oryza sativa
tttttgtaaaactgaagcaggggccaagatatagacacaggattgaccataacaataaacaccaataaaaaggcaaacagaaaaacaggaagtgccaccaagcagttcaagaggctcccccacccccaaccaggcctggctccacagacccccacctgctctgctacgagtagcttaaaggcgagactgcaaaaccatcgctagcaacctcacatacgggggagccccagatttcccgacaacaatcacagccacataggtgtcattacacagttaccaaagcactagctacaagcttttagggcacataaagccggctttactgcccctcgctggagtcgcgcttcggagcttccctgatctcttccgcggtgtcctccgagatgtctgaagtccacagggtcaggttatcacggaggagttgcatgatcaaagtgctgtccttgaaggactcctcgctcagggtgtccagctccgagatggccttatcaaaagcctgctttgc

SEQ ID NO: 417158 - DNA, 395 bp, Oryza sativa
tttctccttagttgatttcatcttcagttgctggggctttttaacagactgagggaggatgtcttgcagctgtggatctagctgcagctgcggctcaaactgctcctgcggaaagaagtacccctacctggaagagaagagcagcatcaccaaggccaccgtcttgctgggtgtggcgcccgagaagaaggcgcatcactttgaggctggccgcatagtccggccagaccgcccatggctgcagctgcggttccagctgcaggtgcaacccttgcaactgttaaaatgcctgcctgcatctaccatctatgtgaattgggatgcagaaaaataaacaagcttggccatttgggctggtgcttgaccaatatatatggtgtgtgtgtgtgtgagtg

SEQ ID NO: 417159 - DNA, 467 bp, Oryza sativa
ttgagagttcagttcttgagttctctggaggaggagcagttcatccctttctctccttctgactttaggtttttgaaggcccccttgtgaattccctgttgtccatcagacaaggaggcctcaagatgtacatcatagaggacaaagggggtgccattgccctcatgctggcctccctcttcttcctggggacatggcctgcggtcctcaccctcctcgagcgccgaggccggctcccgcagcacacctacctcgactactcgatcacgaacctcctcgctgcggtcctcatcgcgctcaccttcggtcagctcggcgatagcaagcccaacatgcccaatttcttcacccagctcagtcaggataattggccttcagtgctgtttgcaatggcagggggtgttgtgctcagtatagggaacctctctactcagtatgcatgggcatatgtaggtctctcagtgact

SEQ ID NO: 417160 - DNA, 497 bp, Oryza sativa
gaaaccaaaacgggtactatctatcttatcattcaggtgaactccaaatttccctatgctatctgcaaacgggtctttcagaattcagagaaagggataacattacatttatataatctgacacaaacttaaaatcacaaatccacaaactatcttagtttgttccttttttccccttatgtacagctccatccaaatggaaatttcatgaatggagtttcattccatgttggcatgatctgcttcctggagacctggactgaagtccccccctgcattgctgcctgaacttctttgttttctgacagcaagagtggtttgcgcttgcaaacaccaaattaaggcaagagatgaaaggatttgaatcaatcacttggtgctcctgtgacctgatgaagccatgagcaccgcgaccgcgacgatgaacatgaacagcatgaaccccagcaggatatacgtctttcgcgacgatttcccgtacttcccaaacaggagta

SEQ ID NO: 417161 - DNA, 383 bp, Oryza sativa
ttgtttttttttttttttttaaccaaaacataggagggttcatttcttcttctcaaagtagtgtagcatctttccttctttcaccattacataagcttaagcaataacagataacaaatcctcctcctcctctaggtaaaatattcaaacacaatacccttataagtacttattattaggaaagtagcgtgcatgggcataaatggcagcggggggcaggttaagaatcacaatgctgagcagcgaggaaacaaaacaccataatgggacagagcaaaagcctccgaaagggagcttttaggcagaaggcttctcccacttgaggggctttaccacctcccaggtgaagtctgggtcgccccttccgaagtgaccgtaagccg

SEQ ID NO: 417162 - DNA, 474 bp, Oryza sativa
ttttcggatctaattaatttacctcctccacgtgctccttttaaaccccgatcgggtgggcccggctcctcctcctccgccgccgccaccgccgccgcagataggagaagatggccgcacttgataccttcctctttacctcggagtctgtgaacgagggccaccctgacaagctctgcgaccaagtctcagatgctgtgcttgatgcctgcctcgccgaggaccctgacagcaaggtcgcttgtgagacctgcaccaagacaaacatggtcatggtctttggtgagatcaccaccaaggctaacgttgactatgagaagattgtcagggagacatgccgcaacatcggttttgtgtcaactgatgtcggtctcgatgctgaccactgcaaggtgcttgtgaacatcgagcagcattcccctgacattgcacagggtgtgcactggcactttaccaagcgccctgaggagattg

SEQ ID NO: 417163 - DNA, 297 bp, Oryza sativa
tggtttttagcgacaataggttacaaaagcctcttgctttgccgccatggctggcaagctgagcagagcagctaacacaaagaacacgagatcactataaaccaaacggcaacgaacgaagaaaatacagggtcttttttgtctgaagatacacgaagcggttcggtttcttttatttttagtctcctctcctcctcgatgatgggtgtatggcaatggcaatggcgatgggatcttggcttagttgatgggaaggggctcgccggtccactccttgaggcagtcgagcatggggtt

SEQ ID NO: 417164 - DNA, 470 bp, Oryza sativa
taaccttctcctccgggtcttcttcagtatgggatcctttatactcctcgtgcccaccaccaccaccgtagcaatggcgggcaacgggccgatcaacaaggaggacccgctcaactggggcgcggcggcggccgagatggccggcagccacctcgacgaggtgaagcgcatggtggcgcagtttcgcgagccgctggtcaagatccagggcgccaccctccgcgtcggccaggtggccgtcgtcgcccaggccaaggacgccgccggtgtcgccgtcgagctcgacgaggaggcccgcccccgcgtcaaggccagcagcgagtggatcctcaactgcatcgcccacggcggcgacatatacggcgtcaccaccggcttcggtggtaccttccaccgtcccaccaaggacggtccccgcctccaagttgagctcctcaggcatcttaacgcctggaatcttttgaattggc

SEQ ID NO: 417165 - DNA, 377 bp, Oryza sativa
gcgtttcaatctcgtacgtagcatatctacatcgggggaacattaaaatcactcgcgcgtaggtatagatctgacgcacgtctaggctgtggaggagggcagcgaggcggcggccgccgtgttcgacgtaaggtacgtgcacgacccggtgccgaggtactagctcagccagaggtcgatatacaaggactccccgtaccagatcgtccacgacgagctcctactggacagcagcccgtgcctgaacctagcgtccttcgtcaccacctggatggagcccgagtgcgacaggctcatactcgaggccctcaacaagaactactccgacatggacgagtacccccggaccaccgaactccagaaccggtgcgtgaaca

SEQ ID NO: 417166 - DNA, 435 bp, Oryza sativa
  unsure (1)..(435): unsure at all n locations
ttttcctcctccccctcccgagctctacagcggggcggctttagaaacgcgatgagggtctccatcaaaacgctcaagggctccagcttcgagatcgacttcgagcccaccagcaaggtcagtgatgttaaaaagctcatcgaggctacgcacggagacaatgtctaccccgctgatcagcaaatgctcatccatccagggaatgtccttaaaaacgacacaacacttgaagagaccaaagctgaacataacaacttcattgtgatcatgttatctaacaagggaccatcaagtgctgcttcaagtacagctaaagagcccacaaaacatccctgagttgaccgggcgatacccactgcagctgcaacccaaccacctgctccaccagcacctgttagcgagcctgtgactgcaccagtancaactgcaacaact

SEQ ID NO: 417167 - DNA, 516 bp, Oryza sativa
  unsure (1)..(516): unsure at all n locations
tggggctccttccaaaccacctccgaggnnaacgtcggcggccgccacgtcgtccccggcggcgtaacaacgacacaaaaaaatgaagccccgaaaaacgtctctgtaccagccactgcaaccaaatctctgccccaaccccaggacaagcttctcggaggactactctctgccgcattcgaagaatcctcatgtcagagcagatacaaatcatctctctaccggaagaagtctccgttccctctgtccccttacctggttcagaagctgcggaagtacgaggcctaccacaagaagtgcggccctggcacgaagcgctaccggaaggcgatcgagcagctcaaggcggggcgcaacgccgacaacgccgagtgcaagtacgtggtgtggttcccctgcaacggccttggcaaccgcatgctcaccattgccttcacctttctgtacgcgctcatctccaaccgcgttctcctcatgcacgttgcggcggagcaggagggcctcttctgcgagccg

SEQ ID NO: 417168 - DNA, 434 bp, Oryza sativa
ttttggtgacgttacaaacgcaattcggaacgtgaaaccgaagaagtcacttctccaaaaaattagctatcgaacaacttgagaccgaacccgacatcctcgcagtgccgaacgtacggcttgacggtggccgcgtcgacctccttcttggccctgcacgagaggatcggcggtgagtggaggcacggttccaccgacgtcgacctgacgcacgccacctccgacctctccttgtcccagtccggccggagcaggatccacggcttgacgccggcagaagctgtaggccacgtacccgaacgttgaccaggcgctcatggcgatcttgtcgcaggagctgagcagatagacctcggccagcgccttctggttgtgctcgctggacgatgactgctgctgcttctcgtggctcggctggtacaccgggacgatct

SEQ ID NO: 417169 - DNA, 425 bp, Oryza sativa
tttggttttatgtgatgaacaataacttcattcattttcacagcatacaaaaatatgatcatgtatctcctgcatattacacaaggaaaaataaattgccctaggtagatattaactgcaggagaagagtttaagtttgggattgctctataaaattacaatgcaatgcatgacactctgtccaagcttgcttgaagtccctcgaagataatagcgcaaggaaaaggggaaatgaccagagggagatgtatacaaagcatcgctatctcatagacgagccacatatgagttagcctgcgttacgtatctcacccacctataggggttgtatgtcttggatttctttgctatctgaagatatctaacctgcaactttgaagtattgtacatcggcatagagaaattcatgtttactggtccagctt

SEQ ID NO: 417170 - DNA, 523 bp, Oryza sativa
  unsure (1)..(523): unsure at all n locations
gttatccacaaaccacctctaccgaggttctgaagtcatacatattcaatgagccaataatggttgatgctggtcggctgcctccacttggtcctgctgctatgttcatgcaaggcactaagcgtatgcctggtacagctgttacaaaatctgttgttgctaccgaacctggtgggaagaagagggaggaaatttttgttgatatcattgagagaataagtgtgacatttagttcaagtggttacatacttacatctgagattgatggaaccatccaaatgaaaagttaccttactggaaatccagaaattcgtctagctctaaatgaggatttgagcataggaagaactggctcttcttcgtatgattacagaagttcttctggaggaggagctgtcattcttgatgattgcaatttccacgagtcagtacatctggatagttttgacattgacagaactctacatttaatnaccaccgatggngaantcgcttgaatgaactanccgattactcaagaatt

SEQ ID NO: 417171 - DNA, 420 bp, Oryza sativa
agcaaatgcaatggatcaaaatatcacaaatttaaggatctcagtatttttccaaaagggatgcaatccagtctcaccgactggtgatcaaaatactggtgttttccagcagttaaagcaaaagctgtgaaagacttttcctgctaaacctaagatatggaacccataaaccataagaacaaaatataacaagataattgtctcgtggattgcactctgtaaaaccagagcgacccagatgtctaaatatttttatttaactgtagaatgaattgtccgattgtcttatgttacgaccggttcacttcttttaagaggttgcttccttcaggtaggaaataagatcagcacgcttctgtggcttttttaacccagggaagaccattttggttccagggatgtacttcttaggattaagca

SEQ ID NO: 417172 - DNA, 483 bp, Oryza sativa
tttccagaaaaaaaaggaaaaaaagagagtcgggggtcttttaaacttcctccgggcgttctcgcggcggcggcggagatggcgtcgttctcggaggctcccccgggcaaccccaaggccggcgagaagatcttcaagaccaagtgcgcccagtgccacaccgtcgacaagggcgccggccacaagcaaggtccaaacttgaatggtctgtttggaaggcggtcaggtaccacccctggttattcctactctacggccaacaagaacatggctgtgatctgggaggagaacacactttatgactacctgcttaatcctaagaagtacatccctggaaccaagatggtcttccctgggttgaagaagccacaggagcgtgctgatcttattttctacctgaaggaagcaacctcttaaaaggagtggagcttgcgtaacatgagacaatcggacaattcattctactagttaataaaaatattt

SEQ ID NO: 417173 - DNA, 488 bp, Oryza sativa
gatataatggcaatgttcttattagctagtcccaacactaaaccattggcaaacaatgcaacatttttcccatgctaagtttcttattttttgtcacaagtactgcaccttaaaattacagctgcagcaatccactagatcatcatattaaccataacccacaaaggattttcaagtccacatgagtcaatcaagcagctccacttttatttcttactggttgcaacattggaactgcccactgacaccccttcaggtggatcacttggatttggctggggctgggagcaactgatagcaagcaatgagtgagctagcaaatccaaacgcccctgtcacacgcggagtcactttcttgggagccagttgaagcagccctatagcaacaactatgtcgaggctcgatttgatgagagcgagacgcctctcgttgcacttctgcagtttcatctggtattgctcgttctttaacagctcctggtgttaag

SEQ ID NO: 417174 - DNA, 488 bp, Oryza sativa
ttttggcagcagcgatttcatccaagcaccaggggcgccttcgacgtcgaagccggtctcctgcgcgcggagcggatcgcctctgtcagtcaccagctatacagtatgagttcactggagagtgcaagagcagatcttgctctgcttattttatacctaaacaaggctgaagcaagagataagatctgtagagctatacaatatggctcgaaatttgtgagtaatggacaaccagggcctgcacagaatgttgacaagtcgactagtctagctcgtaaagttttccgactttttaagtttgttaatgatctgcatgctttgattagtcctcctgccaaaggaactccactacccctgatcttacttggaaagtcgaagaatgcactgctatcaactttcctctttctggaccaaattgtatgggctggaaggacaagaatatacaagaacaaggagcgagcagaatttctcagcaagatagcatttta

SEQ ID NO: 417175 - DNA, 543 bp, Oryza sativa
gcagcagcagcggctgtagcaaccaagcctacctccaccaaaatcttcgccccctttatacctctcctgtgggacccgccggtgacccgagcccccccaccgcctcacgccgtcgacgccgccgccgcggggagttccattccaccgggtcgccttccggccgtctcctgcagagaggttcatgaggggctcgaggatgaatccaggtgaccgtagaacgcggagcacgatgtccatcgtaattgtgatgagtttgtgctgcttcttttatatactaggagcttggcagaaaagtgggaccggaaggggggatagtattgcattgagggtgacaaaagagaccgactgtacaatcttgccaaacttgcactttgagacccatcatagcttaggtggcgttaatcctttggtcatgaccgaataagtctttgagccatgccatattcgatacagagactatacctcttgtcaggatcagaaccgagcaatgtactttcctagagaaaatatgaactaccgagagaggcattgttctacagagac

SEQ ID NO: 417176 - DNA, 377 bp, Oryza sativa
caacacctagctagcttctgcttgtgtgcgagctactcttgcagctgggtgctatttacagccaaaggtggcgcagcaacagaaattaactgtgtgagacgtctatcagatcgttcgagagaatgggtgtaggaagggttatgaacgatgcgaagccgtacctggcgatgatactgctgcaggtggggttcgtcgggatgtacctggtggccttcgactcgcttaagcgcggtatgagccacttcgtgctcgtcgtctaccgtaacctctttgccacccgcctgatggggccctttgtcctctgggttgagaggcgagtaagaccaagggtgaccctcatcatcttcctgaagatcatggggctcgccatacttgag

SEQ ID NO: 417177 - DNA, 543 bp, Oryza sativa
  unsure (1)..(543): unsure at all n locations
ctaaccaggcacttctttttggatgctctgctggtggtgtttcaaccatacttcactgagacgagttccgtggattgtttagcggcagtacaaacgtgaagtgccttgctgatgctggaatgtttctggactttgttgatgtttctgggcaacgagaaatgagggacttcttcaatggtattgtgagattgcagggttccggaagaagcctgcctaggtcttgtacctcccgcatggataaaacttcgtgctttttcccccagaatgtggtgccaaacattcaaactccaacttttattttgaacactgcttatgatgtgtggcagcttcaacaaagtgtggcccccaaaagggctgatccgcaaggtctatggcgaggatgtaggatgaatcatgcctcctgtaatagcaaccaactgcaatttttacaaggtttcaggaatcaaatgctcgatgcggtgaggggtttcttccgcgcaaggcagaaacggncttttatcaactnctgtttcgcacattgccaaagtgagagacaggacacat

SEQ ID NO: 417178 - DNA, 460 bp, Oryza sativa
gcacataaactgcagatgaaaaccatctggtcactttatacaagccgtacatcagctaaaagaagttcacgatgcctcagggctcaggcagacagaaactgaaaacgacgcagcaagttaaaaacaaattacaaaacctacatgagacaaaattaaatcgtagagatagtgtcccactaccaccaaagcaacattatttgcagaggttcctttttttcagcccacatgatcccgtggtctagttattattcgaaaatctccgtccgtccttaaattcgatcgaattttaaatctctctctcctagaagagcttgaatagaattcctccgtgcgtggcgaagaatggcgcgaacaccagcgactcgacggccatgagcttgatgaggatgttcagcgacgggcccgacgggtccttgagcgggtcgccaatggtgtcgccgatcaccggcgccttggggca

SEQ ID NO: 417179 - DNA, 521 bp, Oryza sativa
  unsure (1)..(521): unsure at all n locations
tttaggaagggtgttggcaaggccttcatcacggcgttttgttcgggagcggtgatgggattcttgctggcatcaaatgggcttctggtgctttacattgccataaacttgttcaagatgtactatggcgatgattgggagggtctctttgagtccatcactggctatggccttggtggatcctcaatggctctgtttggaagggtgggtggaggtatctacaccaaggcggctgacgtcggtgctgatcttgttggcaaagttgaaaggaacatccctgaagatgatcctcggaaccctgctgtgattgctgacaatgttggagacaacgttggtgatattgctggaatgggatcagatctgttcgggtcngacgctgaatcttactgtgctgcccttgttgttgcttccatttcttcctttgggatcaaccatgatttcactgtgatgtgctacccgctgctggtcagcttcatgggcatcattgtctgcttgaacaccactctttttgccctgacttc

SEQ ID NO: 417180 - DNA, 374 bp, Oryza sativa
ttctcctctcgcttccttcctcctcctcccgtgctttttcgacgcgtgctcctgcgccgccgccggagaagctccaagcctcctcctcctccgggccgccgggaatggcggggaagcaaggagatgggcgcgaggaggatggcgctaaggtcggcctcccggcgctggatatctcgctcgcgtttccgcaggccacgccggcatccatcttcccgccatcagcatcggactattatcagattgatgatttactcaccactgaagagcagtctatcaggaagaatgtcagggctataatggagaaagaaattgcacccattatggcaacgtactgggagaaagcagagttcccatttcatgccattcctaaactt

SEQ ID NO: 417181 - DNA, 485 bp, Oryza sativa
ttataaacaagattggtggtatgattgaaggggtgatttgttatccgagaggcagtgattcgaataatggacaagatgattggtctttcgaagagggaccccactccgattttgctgggccaacatgcggatgcacagcatgtgtagcgctaataagaaataaccaacttgttgtggcgaacgctggtgattcccgttgtgttatttctagggctggccaggcatacaatttgtcaagagaccacaagccagagcttgaagctgagagagacagaatagtaaaagcagggggtttcattcatatgggacgaataaatggaagtttaaacttgacaagagcaattggagatatggaatttaaacagaacaaattcttgccttctgagaagcaaatcgtgactgcaaatcctgacatcaacgttgttgagctttgcgacgaccaccactctcttgttttagcatgtgacggcaattgggactgcatg

SEQ ID NO: 417182 - DNA, 421 bp, Oryza sativa
  unsure (1)..(421): unsure at all n locations
cccgcaccgccgtgcttcgcgagcacggcaccgctgcgcggcgcgaggccgcatttgacaagccgagcgtatatcccacgcccgcccgtccgcatcaccgccggatggccgccggtcgtctcccgtagggcgataggcgggtagatccaaatccggcggcgcgggatcatatacacccctcgcccatcgcagtctccgagtctgcgctgtttcttctggacatcaagggcctcgttctagtttggcgcgactaccgcggcgacgtttcctccctccaggctgaacgcttcttcaccaagctcttctatcaaggagggtgactcggatgcgcactcccccggtggtttacaactattcccgcgtcacctacatgttcatccagcacaacancgtgttcctactaaccgccttccgccagaac

SEQ ID NO: 417183 - DNA, 420 bp, Oryza sativa
ttttcagctgatcaagagctcttaattagctgggtagtgtttagctgcgcttgggatcgatcgatctcgggtacgtagcaatggcgtccaaggcgttcgctctgttcctggccgtgaacctcgtcgtgctcggggtggcaagcgcctgcggcggcagcccgtcgtgcccgacgccgacgccggcgaccccgacaccgtcaacgccgacgccgacgccgtcggcgttcgggaggtgcccccgcgacgcgctgaagctgggcgtgtgcgccaacgtgctgggcctgatcaaggccaaggtgggcgtgcctccggcggagccgtgctgcccgctgctggaggggctcgtcgacctccaggcggcggtgtgcctctgcacggccatcaggggcaacattcttggattaacctcaaacttcccat

SEQ ID NO: 417184 - DNA, 323 bp, Oryza sativa
ttttgtttttaactgtattttttctccatggtttttatttaatttgattccgatagataggatcaagcagttcaaacaccaaaacgaaagcgaactgaatgcatggttacataacctacgaagaacacctaacactgggtggatggatagagggctctgcgactggggagagcccctggagacgatatcgactagagttgatgataagaggattatgacacggctagctaaggataactggccaagatgggccccaccagtcaattcctttcagttgccgccggagtcgccgtcgtaacggacgtcggggctgccaatgcagg

SEQ ID NO: 417185 - DNA, 224 bp, Oryza sativa
ttttggctcctcctccccctctttaccttttggggctcttttaggatccgtggggggtctagggtttagtgggttgagatggcggcgccggatgtcgagtaccgttgcttcgtcggcggcctcgtctgggcctctgacgaccgttccctcgaggccgacttcttcacttacggcgagatccttgactccaagatcatcaactacagggagacggggaggtcacg

SEQ ID NO: 417186 - DNA, 483 bp, Oryza sativa
ttctctgccgccgccgtcgccgccgcttgctcggtactcctcctcttcagcggcgatgaagggacggcaaggccagcgcgtgaggctgtacgtccgcggcaccatcctcggctacaagaggtcgaagtcgaaccagtacgagaacacgtcgctgctgcagatcgagggggtgaacaccaaggaggaggttgggtggtacgccgggaagcgcatcgcctacgtctacaaggccaagacgaagagcaacgactccaccatccgctgcatctggggcaaggtcacccgcccgcacggcaactccggtgtcgtccgcgccaagttccggtccaacctcccgcccacctccatgggcaagaaggtccgcgtcttcatgtaccccagcagcatctaaaagcattcaaggtttcttgcctatgctgcgaaactgatagttgtcaccgtggagggttttatatcagctagtcacttggttaaccagtcaga

SEQ ID NO: 417187 - DNA, 587 bp, Oryza sativa
  unsure (1)..(587): unsure at all n locations
gttttagaccgcgagcgggccgccttttgctgggtactcttcctcttcagcggcgatgaagggacggtatggccagcgcgtgaggctgtacgtccgcggcaccatcctcggctacaagaggtcgaagtcgaaccagtacgagaacacgtcgctgctgcagatcgagggggtgaacaccaaggaggaggttgggtggtacgccgggaagcgcatcgcctacgtctacaaggccaagacgaagagcaacgactccaccatccgctgcatctggggcaaggtcacccgcccgcacggcaactccggtgtcgtccgcgccaagttccggttcaaccttccgcccaccttcatgggcaagaaggtccgcgtcttcatgtaccccagcagcatcttaaagcatccaagggttctttgcctatgctgcgaaactgatagttgtcaccgtggagggttttatatcagctagtcacttggttaaccagcagaaaattaagccgctntgaggagttttagcttttcttttatttcggactattgctgttcatgatgacaattattgagcttttagcgatttgagctcaaggttagca

SEQ ID NO: 417188 - DNA, 414 bp, Oryza sativa
tttaaagtggtttatttcacttgtgtgaatggagtgaagattgtgagttcactggtatgtctactcagatacttcactttttgggaaatgaaggtccaaagacatcagatcctagtaaatacatacgttatatatataacagagtgatacttgaaaatgctactgttcgagctagtgctgtaagtactttggcaaagttcggtgcattggttgactcactcaagcctcgaatttttgtccttctgagacgctgcctgtttgatggtgatgatgaggtgcgtgacagggccacgctttatctcaaattgcttggcggggaagctacagttggtgaaactgagaaggatgtgaatgaatttctctatggttcatttgatattccactagttaacctggagactaggctacaaaact

SEQ ID NO: 417189 - DNA, 425 bp, Oryza sativa
aaaatagcagcaatgcatttatcatattatatatgtagctacaaactacatatagcaagctataagtatgtacagcaatgatggcaggtaatattgccatatcaattttcctgctatggtatgtacaccagagaacgagaacaatttagatgatttgggatgggggagcatctgaaataatgcacagttcttcagacttcacctacggttcaagcactactgcccccaatcgatcatcaaactacaggggcaagagaaaaagataccttgggtatattgcaggagctgagaatatttgctaagttttcttcacctatgatttaagcactaaaacccctatggggggaactccaggggttggagggaatgctggtgcaagcctgcgcagcaacctttgccatcgcttcagcagagatgccagcatt

SEQ ID NO: 417190 - DNA, 499 bp, Oryza sativa
tttccaaatggcatcaatgtttatgccaccacggcatcaaacgctgatgagagcagctggggaacatactgccctggggagtacccgagcccacctccggagtacgacacatgcctaggggacttgtacagcgttgcttggatggaagacagcgatgtccacaacctgagaactgaatcactcaagcagcagtacaatctcgtcaaggaaaggacatctgtgcagcacacatattactctgggtcacatgtgatggaatacggttctttagagctgaatgcccatcatgtgttcatgtacatgggttccaatccggctaacgacaatgctacatttgtggaagataactcgttgccatcgttctcaagggctgttaatcagcgggatgctgacctggtttacttctggcagaagtaccgcaaattgcctgagagttctcctgagaaaaaccaagctcggaagcaattgctttgaatgatggcacacagatctcatgttg

SEQ ID NO: 417191 - DNA, 301 bp, Oryza sativa
ttttctggtcgttccagacaatgagtatgaaggggagatttgaacaacggttaggccagccaatgaaataggagtgacatttgatgacattggagcactggctgatatcaaagaatgccttcacgagcttgtcatgcttcctcttcaacgacctgatttcttcaaaggtggtctcttgaagccatgcaagggcgttctgctgtttgggccacctggtacggggaaaacaatgctcgccaaggccctagcaaacgcagcaggagctagcttcttgaacatctctatggctagtatgacattc

SEQ ID NO: 417192 - DNA, 458 bp, Oryza sativa
tttttggtggtcacacgaacaggccagaatacacatttcgctgacaggacactacgcaagttagagttgtacccaggtgcatagctgcattatgcagtcccatctgctgtacattatttgtacaaatatattccagctatcacaaggctaggcacaaaattagagacaaactaaccaggccctacttgatacaatgccgtcgatcaatttacagtagctcatatacttctctgataccgagatttcagagaagcctgacctttctcttcattaggagcatttggcaccggaccaacaaaatcagcatccccactgcttggccagactagaggaatcagcttctgctgatatgcattcgtattatcgcatatgccaagctggatgacaaacgttactgtgcagcctcttcctgttccttcgctatccaaccagatgtgccctcccatcaaagtaacaaa

SEQ ID NO: 417193 - DNA, 404 bp, Oryza sativa
aagctggcacgcgtgcggtcccggcccgaattcccggggtgagccacagccgtccgtactattacagttgactcttgtgctgcaaagggtgactatttaagagaatggagatgcccacattttcacccaactgcaagcgatgacaatttttatttgaaagttcagattaaagatacgggctgtggcattagccctcaggatctacctcaagtatttacaaagtttgctcaatctaagcctggaggaaacagaggatacagtggtagaggtcttggccttgccatttgcaagacgtttgttactctgatgggagggcacatctggttggatagcgaacgaacaggaagaggctgcacagtaacgtttggcatccagcttggcatatgcgataatacgaatgcata

SEQ ID NO: 417194 - DNA, 277 bp, Oryza sativa
ttctcctcttgctcactctcgtcctccacagggtggctaggaaggcgaccggtaatggcgccggcaagccgaggcttccgccggggccgtggcggctgccggtcatcggcaacctccaccaggtcgcgatgggcggcccgctcgtccaccgcaccatggccgacctggcgcgccggcacgacgcgccgctcatgtcgctcaagctcggcgagcttcgcgtcgtcgtcgccttgtccgccgacgctgccagggagatcaccaagacgcacgacgtcgc

SEQ ID NO: 417195 - DNA, 408 bp, Oryza sativa
ttgttttttcaaaattcataaatctcaacagtttgatcatccgcagcaccagcagctcagagtagcaaagcatttaaactgggtactcaaaatatctgccacaaaactcaggacaagtacagaaactgggaaagctatcaggtgaggttcgattgaattctgatggcctaggccttgagcttgccgaagaacctctgcttctcgtcggtggtctggaagcgaccgtgcccgaacttggacgaggtgtcgatgaacttgagcttgatctcctccagggcgagccgcgaggtctgcttaagcagcgactggcggagggtgacgacttttttcttcggaccgacgcagcaacccttgatcatgaggtagtcgccctttaccacaccgtaatgcgggaagccgcccatcggg

SEQ ID NO: 417196 - DNA, 413 bp, Oryza sativa
ttgtttttttttgaagtggtaatttaaatacttaatagtaatagactctttgatggagtattacaacatgcagcagtggcattaatacgccagtacattaattaagttacacatatgcaggctccattttggtttcttttaatttatcgtattacagaatttctgtagccttgctgatgatcacttggatatcatgtactagtaattaacaataggatgcatacaaaagatggcccaacgacaacagaagatgcgtgcatctgacattgtctggccttatttggttggtagtactccaattaattaacaagagatgatgcattcttgtgccttagtttcttcacatgcttggcttcacgttgagcctattcgcaatcttcacccccaacgactcatcacactgggagaggtag

SEQ ID NO: 417197 - DNA, 544 bp, Oryza sativa
ttatgctgccggtgaacgcgcccaagtgcgcgcaccacaacaaccactacgacggcgccatgaacttcatgcaccgggacgaggaggtggactactacccatcgcgccacgcgccgctccgccacgcgccgccgacgcccatcacgccgcgccccgtggtggggaggaggcagaaggcgacgatacacaagcagaacgacttcaagcagcccggggagaggtacaggtcgtgggcgccggatagacaggagaggttcatccgccgcttcgccggcgagctcgcgcaccccaaggtctcccctgagctccgcgccatctgggtcaactacctctcccagtgtgatgagtcgttgggggtgaagattgcgaataggctcaacgtgaagccaagcatgtgaagaaactaaggcacaagaatgcatcatctcttgttaattaattggagtactaccaaccaaataaggccagacaatgtcagatgcacgcatcttctgttgtcggtgggccatcttttgaatgcatcctattggtaatacctagacat

SEQ ID NO: 417198 - DNA, 341 bp, Oryza sativa
gccagccgcgggccgtcatgggaccgctcccgcggcagggcctccgcccccggatcccccatggatggggtcgtggagccgccccggaaggaggtgcttgctttgccgcctccaccgagccctggtaccccggcgcctccgcctccggccgccgaggcacagtcgcctgttactccggcacctgtgtcgactggtatggagcaggagatgaacggaggaggggaggtagatcgggaggagtggatcactgtattcgggttctcccttaaagataccaaccttgttatccgggaatttgagaaatgcggagtaattttgcggcatcactctggtccacgagt

SEQ ID NO: 417199 - DNA, 391 bp, Oryza sativa
tgcatcttcttcctcccgcctctcgaccgcgggccgccttcgacgccgccggcgcctccgaatgcgaagcttggagagttcgagcacgggcatggcgtcctcggggggagcggcgatctcggcggggcccacgccgccgttggtggcggcggcgtcgtcgtcggtggactggcacctgcggccgccgaacccgaagaacccggtggtgttcttcgacgtgaccatagggtccatccccgccggccgcatcaagatggagctcttcgtcgacattgttcccaagacggcggagaactttcggcagttctgcactggagagcacaggaaatcacgtttaccacagggatataagggttgtcagctccatcgagtgatcaaagatttcattgat

SEQ ID NO: 417200 - DNA, 380 bp, Oryza sativa
gcgtctcctgcagcgacctccccggctggctcagcctgctggagtgggtctggaagctccacggcgcggctggcggcggcggcatcctcgaggccgtcgaccagaggctcgccggcgagttcgacgaggtcgaggccgagcggctcctgctgctgggcctcgcgtgcagccacccgaaccccggggagcggccgaggacgcaggccatcctgcagatcctgacgggcgccgccccgccgccgcacgtgccgccgtcgaagccggcgttcatgtggcccgcgatgcccgtcgcgctcgatggcgacgacgacgacagcgagacgccgacgtcgcgcagcagcatgctgctgacctcgtcgtcgacggggtggaccaaaatc

SEQ ID NO: 417201 - DNA, 475 bp, Oryza sativa
tgtctcggcggcaggtgcggcggccgggccttgggcggcgccgccgccgctttcttggtcttggcacggatggcgtcgagggcctcgacgtacttctgcacccgcttctcctgcactcggcgctgctccttgacctcgccgtcggcggcgatggagtcgagcttgaccagctcattcatcagcgcctcggtgagcgccaccacgtcggcgtcaaccaccctcccgcccttgctcacgatcgcctccagcgccgacaccttggaggcgagcttgtcgacgtcgagggcgacgcgggagacggacttggcggcgcgctcggccttgcaatggcggcgctcctcgaggaggcgcttggcctgggcggtggggtcctcgaggaggagcatcttggagcggtccttgacgccggcgatgtcgaggaacgccctggagtccctctccttgtccctgtacaccaccttctggtcgtcggggt

SEQ ID NO: 417202 - DNA, 378 bp, Oryza sativa
tctttgccgagcaaggtcgcggcgggggacttggtggagccggcgcgctgctcggacgccgccgcatcgccggcttcttggattgacaagaagctgcttgttgaccccaagaatttgtttatcggatccaaaatcggggagggagctcatggcaaggtctacaaggggaagtatggtgaacaaattgtagcaataaaggttcttaacaatggcaccactccggaggaaaaggcaacccttgaagctcgtttcattcgagaagtaaatatgatgtgtaaagtgaaacatgacaatcttgtgaagcttattggagcttgcaaggaaccattaatggttattgtcagcgagttattgcccgggatgtcactgaaaaactac

SEQ ID NO: 417203 - DNA, 368 bp, Oryza sativa
gaaaaaaaatgaagtttattcatatgatcatgatgagcacgtacttggagaaaactttgttacatacatgcatggctcgctatataaacaaaacaattaattaatgaagtgattgaaatcaagaaaaaaaagaagggacaggtaaatcttacgataatgatctacatggaaattaattataagatggtcacggccggaatcaaaagctgaaatccataatcacagtctcggcgagcagctgatgatatatgacgataattaagagagatgattagttaaccacgttgcacttcttcctgatctcgccctggctgccggtgagcacttcgacgccgcccatcttgaccatggaggcggcgaagtcggcg

SEQ ID NO: 417204 - DNA, 536 bp, Oryza sativa
ctccttcaaatcgtccatgttattgcatcgcaatatagtgtaggtttacaaaacattaattccaagcatttgaattacatacattatcataggataggtaacacccatcgacatgtactaattcaacctcttctctaagaaaattttgaatggatacagaaacagaagcgttaaacaattaattcacagacgatgataagcagcacatcttagacattggcagcccagcaatttcgagtgtgcgtcctgagaagacgagcagcaagatcactggggattaggcggcctgctgttggcagccgagaccctggatccccactcgagaagctctttgctcgtgtcatctttgtgcacgatgatctcgatgaagcagaggcagtctttcttggcgcccgtcgccgtcgcgatcgcctctatcagctcctcctcagtccggaccttctttgtccagcagttgccgtcagagttgtggatggcgtcgatgaagccggtgtagtcccagttcttgatgacgttgtacggcccgtcgtggatct

SEQ ID NO: 417205 - DNA, 421 bp, Oryza sativa
tgtgtttcggcctttttttttttttttcatttggtggtaggatgcaagctgaaaacactatcataaccctcgtagcatttgattggagaaacagatgttcacaagtagatacagagctaccgaaactggaagaacagaaacccgagggaatggacacaaggaacataactgaagggcaaagtgtttacattattatgattgagcccagcttgcaacaagtactaaaagtttctactgaggatttggtggcctggagttggcagcagaaaccctcgatccccattccagcagctctttgctggtgtcgtccttgtgcgcgatcacctcaatgaagcacaggctgtccttttcccccagtgccatcccgatcgccttcgttaggtcctgcttggactttaccttaaaaggccagcatttgccc

SEQ ID NO: 417206 - DNA, 318 bp, Oryza sativa
aaccttttgtatggacttcatgaagacttgtaccgtgtgaaacataggccttacatccagcccacacacgctaatggcctatcagataatgaggttggtgatgaatgatagcgcgctcatattgccgaaacaatgaatcaggggggtctatgccaccgaccgtgcacaacaagttccgtctgcgccggctgctgaaaggcttcaatgactgttggaccttccatgtatctatcgttgcgaccaccgatgagagtcgccattagcatgaccgttgtggaccttacttttgatgggagttgtaccccaccacgattcact

SEQ ID NO: 417207 - DNA, 476 bp, Oryza sativa
tttaactgcaggctaggacacatcgaggatgctcagaggcacctctcactggcgacccctcagcctgacctactagagttgcacaaattacaaacagtggagaagcaccttgggagatgtatggatgcacggaaagttggggactggaagagtgtgttgagggaaagtgacgcttctattgcggcaggagctgactgctctgctatggttggatcccatctttcttgtactatggtgttgagtagccctttcttgattaaagggcatacacttatgtaattcaccatttgcagctcttcgcctctagagcagaagctcttctacggctcaatcagcttgacgaggctgatctggcgatctcgagtgcttacaagttggactactcatctttatgcacctcagacaacaaattctgtgggttccttgcccatgcatacctcttttatgtgcatgcccaaattgacatggcattggga

SEQ ID NO: 417208 - DNA, 520 bp, Oryza sativa
tttctcttttttttttttttttttttttgttttttttgggcacatacaaatcacaccagaatgcgcttccaatcaaacccaaatgtttaggccttgcgaccagtagtatacacatataccattggttctctctctgaaagaaccattttacagttgcaagatgcaatgttcttgcttatttgaggtagtttcagctttctaggccgaaaccgccttgcgcagtttgctgctgtccgctgatggcgtcaagctgtcgtagtattaaacagggaccttccagccacccgggcacatgaatccgtcaggggggctctggcagttcttggcaagagtacgcatttttgtgccagagatgaacaggaaatcatctttccttgatggatcgaaaaagtccattttcttttgctttgtgtcatatgcagccaccttgaaaggaaggatattgagcttctcaagcccaggagccatgctcaacacctttttcccatgatcagcatcatacaggtccctcttttcagtt

SEQ ID NO: 417209 - DNA, 529 bp, Oryza sativa
atcatatgatttccatctttatttgtgcatgcacgtcacatgacattacttactttatttgtgcacgtactagtagtagctcgtgcatgaatccagtgaagtgatcagtgatcaaagtgaaaatggatcaaggtctggttaattaccagccgtccatcacagaacctgatccaggagaccaggctcattaccagccgtccatccggtcttcttgtcccagtacctgttccagaccatgatgcccccatagttgggcagcttgttgatgaactgcagcacgtcgtagtagagatccttgtgcgacacgtagccgtccctgtcagcctccggcgacgcgacgacgccgacgaggacgcggctctgcgggtacgccgccatccacttctccagctcctccctcctcgacgcgcaccgcccgtcgccgaacaccttgacgtggatccgcgagaagagccccgtggacagcgccgcctgcagccgctggtccgggaacacgcacctcgccgtcgccgtcagcatcaccccgagc

SEQ ID NO: 417210 - DNA, 383 bp, Oryza sativa
tttctcctccccggccggtaggcagcaacaagctgtaagcacaagtatcgaaatggttagcggtgatgtaggagtagtagtgtactacctgctgctagtattagtggtggtgcaggggtgcaaaggcagcagcgcggtgcagggtgaaggtcggtggtacaacgagagcgaggccatcggtggtgcggcggcgtgggggaacgcgaaggcgacgtggtacgggcagccgaacggcgccggggcggcggacaacggcggggcgtgcgggttcaagaaggtgaaccagtacccgttcatggggatgacgtcgtgcgggaaccagccgctgtacaagggcggcaagggctgcggctcctgctaccgcgtcaggtgcaatcgaaacc

SEQ ID NO: 417211 - DNA, 494 bp, Oryza sativa
ggaagactcagagcatccaagtttttaaccgaatagaaataaacgagttttaaacgactaacatagtgcacattgcgagcagatattaacggtccatgcaacgagtgccatggccgtgggcaaaacttaacgaacgctaagatatctcaaatgcagccagcataaccaccacttcaacgatgctcatttcttcttggcggcagccttggtcaccttggcaccggttgggtccttcttctccacgttcttgatgacgccaacagccaccgtttgcctcatgtcacgcacggcaaaacgaccaagaggagggtactcagagaaggtctccacaaccatgggcttggtgggaatcatcttaaccataccagcatcaccgttcttgaggaacttgggctccttctccagctccttgccggatcgtctgtcgatcttggtcaccagctcagcaaacttgacggcaatgtgtgaggtgtggcagtccagcactggggcgt

SEQ ID NO: 417212 - DNA, 482 bp, Oryza sativa
ataggagcaaaaaagaacttggaacaaaatcatttccatcatacaaagccaccgaatgttcttgtaacaatttggtctttcgcaggtggtgaataaaaatggaatttacaggatttacctcccaataaaactggttaggtcacttgcaccaccagccttcaaatgggtggtcagagactctgaggctctacccaaaacagcttcacaaaccaccactgttaccgcccttcgtgaagatcttcagagaaagccgttctcgatatgttctcagtctcaaaggggctgaggcctgaaaagggtccagaagagaacatggatgaagtgccatcagattcataggtggttgaggactgcctaacattgggtcgtgctggaggtgttggtatggattcctggaactcagagcgttggaccatcttcagtgactgcaccacctcgcccattgttggcctttggcttgcctccggtgaaacacaggcggc

SEQ ID NO: 417213 - DNA, 502 bp, Oryza sativa
tccccaatatccccgcttcaccccacgcttttttattgtagatctgtacctagaccccagtgtgcattttaaaaacaagtggtgtttactacaaggctaactactgcacaacactaccggcgacggaacgggctactaccaaggatccctcatcctcgagcgcctttgtgtggactatggcaagaagtccaaacttgggtccactatgtacccatgaccctcatgcctccacctctgtggttgagccatacaacagcgtcctctctacccactgcctactttagcacactgatgttgctcatctgatcgataatgaggacatctatgacatctgccgccgatcccttgacattgagcgcccaacctacaccaacctaaacagggttgtgtctcacgctatctcatccctgaccgcctacctgaggtttgatggtgctctgaacttgtatctcaatgagttccagacccaccttttgccctacccaaggatccacttcatgct

SEQ ID NO: 417214 - DNA, 261 bp, Oryza sativa
acaatatcctgggagtttcaggacggcttatattcttcacaagcaaaacaagagacccaggtccatattatggggtttgtaaccacttacaagtgggtcgattggaaaacaaaatgcaactcattatcccaacttgcattaacagagggggtgggtcccgatgaacaccggccacgttttattctcagcatagacaaagcataccggtatctccggctcggggggcatggaataccatggcaagcgaaaggattctactgg

SEQ ID NO: 417215 - DNA, 450 bp, Oryza sativa
ttgcttctctcctcctctaatctcaaggctgtgtctcgtgaacctcgcatgggcactcgccatgggcaagattaagatcggaatcaacggtttcggaaggatcgggaggctcgtggccagggtggccctccagagcgaggatgtcgagctcgtcgccgtcaacgaccccttcatcaccaccgactacatgacctacatgttcaagtacgataccgtgcacggccaatggaagcacagcgacatcaagatcaaggactccaagactctgctcttgggcgagaagccggtcaccgttttcggcatcaggaaccctgacgagattccgtgggctgaggctggtgctgagtatgtcgtggagtccaccggtgtcttcactgacaaggagaaggctgctgctcacttgagggtggtgccaagaaggttgtcatctcagccccgagcaaagatgct

SEQ ID NO: 417216 - DNA, 459 bp, Oryza sativa
ttctttgcacctcagttcagtggatacaacgaacatgattcacaggagtgggtggcattcctcttggatggacttcatgaagacttgaaccgtgtgaaacataggccttacataaagtccaaagacgctgatggtcgatcagatgatgaggttgcagatgaatattgggccaatcatattgccagaaacaattcaatcattgttgatgtatgccagggacagtacaagtcaactttggtatgcccagcctgtggaaaggtttcagtgacttttgacccattcatgtatctttccttgcctctacaatttacatcaacccggagcatgaccgttatggtctttacttttgatgggagtactccaccaacaccatacactgtaaatgtacccaagcaaggaaggtgcagagatcttatccaagccatcagcaatgcatgctcactcagacatggggagaga

SEQ ID NO: 417217 - DNA, 263 bp, Oryza sativa
aatagcgtgcgataagtcacttgcgttatatcaaattcatggaagtgtgcagcaaaatagtgataacttaaccactgaggcattcccttagtataacctccaaacctccattcccttagggcccgggccccaaatacctcctgcacacccctacctaaatggttcccatcctggtgggccactccaggggcttcgaagccgggggcaagctcaacgtaggccttttttttccattaaggcctgaccaaagggtcaccttcctt

SEQ ID NO: 417218 - DNA, 426 bp, Oryza sativa
gggagtcatacacacacacacacagcacatttattcctcgagtatttacatcagcaagatgattatccccttcctgttacaagcacttgatagggtttaacataatcatcatcaaaacagggtttatagtatgtacagcccccatgaacagattacagtaagcatctggagcacagataaaaacttgcaagctctttcagtggtgcacacaggctgtatctgccatggcaatctcagtttcctctgaaagactgaagaatatccatgaaacagcaatttggctgtcttctaccagctcaaacttgctgcacaacttttcattcttttctagctcatttttccttcttacttcatcaacaaaagtgcgtctcggtgtcgccctaaaagggtcagtgcggttgctgcgatgtgatgagcagtcaaccc

SEQ ID NO: 417219 - DNA, 533 bp, Oryza sativa
cattggtctgataagtctttgatttgctagtaccggcatcgcctgcttcgctttcgtcacgttcttgatttgggcgggcgcggagatttagaacggtgctgaatttacaatcttgggaccaagaggagaactactctcaatgatggaaatggtattgccagtcgcgaatgctacggctgcggcacttgcacgggtttctgctgtgttcaatgccccacttgcccgtgctgttgtctttgggattcatattgatggacatttggttgtggaagggcttctcattgctgccatactgtttcagctctccaggaagagctacaaacctccaaagaagccactcactgagagggaggttgatgagctctgtgatgactggcaaccggagcctctatgcccacccatcaaggaaggagcacggatcgacacgcctacattagaaagtgctgctggacctcatacaacttgtgatgggaaagaagttgtaactttgcatcagcaaactaccttggtttgattggcaatgaaaagataat

SEQ ID NO: 417220 - DNA, 477 bp, Oryza sativa
cactatttatctcctcgcctagggtttcacgctctccgatcccgcggcggcggcggcgagaagcttccagtcgcctcggcggcggcgccggccagaaagatggctggtggttttcgagtactgcatcttgtcaggccctttctggctttcctgccagaagtacagagtgctgataggaaaataccattcagagaaaaagtgatctataccgctatctctctcttcattttcctggtgtgcagtcagctcccactctatggaattcattcaactactggagcagatcctttctactggatgcgtgttattcttgcatcaaaccgtggcactgttatggagctgggtattaccccaattgtgacatctggaatggtaatgcaacttctagtgggatcaaagattattgaagctgacaacagtgtgagagaggaccgtgccctttttgatggcgcacaaaagctgctgggtatcttgatt

SEQ ID NO: 417221 - DNA, 425 bp, Oryza sativa
ttttaaaccctagagccgctcctcctcctcctcctcgcctaccccgaaacccaaatcccccccaaggcggacgcgcccgcaaagggtcgagcgcgctcatggctcgcgtgtacgtggggaacctggatccgcgcgtgacggcgcgggagatcgaggacgagttccgcgtgtttggggttctgaggagtgtatgggttgctagaaaaccaccaggttttgcctttattgactttgatgaccgcagggatgcagaagatgcaattcgtgatttagatggcaagaatggatggagggttgagctgtcaaccaaagctggtagtggtcgtggccgagatcgttccggtggttctgacatgaagtgctatgaatgtggcgaacctggtcattgtgcacgtgaatgctcgttacggattggatctggaggc

SEQ ID NO: 417222 - DNA, 438 bp, Oryza sativa
tgctaatcccaccgcttccctttcctctcctctccccgagaagaagagggcggcatccatggcgcccaaggcggagaagaagccggcggcgaagaagcccgcggaggaggagcccgcggcggagaaggccgagaaggccccggcggggaagaagcccaaggcggagaagcgcctccccgccggcaagggcgagaagggcagcggcgaggggaagaaggcggggcggaagaaggcgaagaagagcgtcgagacctacaagatctacatcttcaaggtgctcaagcaggtccaccccgacatcggcatctcctccaaggccatgtgcatcatgaactgcttcatcaatgatatcttcgagaagctcgccggagagtccgccaagctcgcgcgctacaacaagaagcccaccatcacctcccgggagatccagacccgcgt

SEQ ID NO: 417223 - DNA, 535 bp, Oryza sativa
  unsure (1)..(535): unsure at all n locations
attggaagcgcttgttgagaaaataaataagttaacatcatctgctgagtcacatttgcagagagaattggctatgtcctctagtcctattgaaaagctcttcagtctcattgatgaagtttatgcacttcggcacgaagtagataccttgagatatgaaaatgaagatttacatttaaatcttgaatcccatactcgtgaaatggagcagctaaaggaggcatccagaaatagtgactcaaaccgcagggagctggaatcaaagagtagtgaactacttgagataacagttagtatggaacgaatgattcagcgattaggatatcttggaggaaaagaagcactagaagataacaagcctacaagcacacaagcactcttatcaaagctggaaaaactaataattgcctcaaatgtggaatctgggaatgccaagtctgtaatacaggaactgggagcaaagctgcaggtcagggaaaaggcaattgatgagtcgtcaacanaagttaagatgtttgatgacttgcatcatgct

SEQ ID NO: 417224 - DNA, 466 bp, Oryza sativa
tcgctctcctcctcctcctccatccattcccctcctcctcctcctcctcccatgcatgggaggccgtcgaggccattagcttcctcctcgtcgtcgtcgtcgtcccgcgtcttctccttcttcttggcgccgcgggttttcttgttcttggtggtggtggtggtcgtcgtcttcttgccgggtcggtcgtcttgctggtggctggagggcacggaggagttggaggaggagatggggtttgccggggactgctcgccggtcagcggtggcgggctcagtgaaaacggcaagttcagttatgggtatgcaagtgctcctgggaaaagggcttcaatggaggatttctacgagacgagaatcgatggtgttgatggagagaccattggattatttggcgtattccacggccatggcggagctcgagccgctgaatatgtcaagccgcaccttttcagcaattttaatt

SEQ ID NO: 417225 - DNA, 318 bp, Oryza sativa
gacgtgctaggtcttatatagtgtatcctgaaaccaatacacaggccgctggtcgacaacgtacagactggggacagcgtgacgtcacccaactcaatcgtctagcagcacataccacattcgcctgctggcggattagcgaataggcccgaagcgatcgcccttcgcaacagctgaccagtgtgcatggtgaatgggacacgccacgcaccctgtcattaagcacgaagggcgtggggggtacgcgcaacgcgaccggtgcacttgacagtggcctagggcccagtgcctgcgctttctgccctttcttcctcgtca

SEQ ID NO: 417226 - DNA, 477 bp, Oryza sativa
atttattgtctgctgccatcactgaggaagtgaatcaagaacaaacagctgctagatttgtcacgcgtgaagctcaggaggggcaaagagttgagttgaggttcctcaataagttgaaccctctcgtttttacaaaggaaaaaattacagcggaggatggtacagctatcaaaattgccatagttagggataatcagataattacatctggtccactttcttctgcaagaattgaaattttggctctccatggtaacttttatgatgttgtccctgataattggaccgaatctgagtttgatcaccgcatagtaagtagttcacaagggcccgcgttaggaggagtttgtcaagtcaagctgaagaatggggaggcctctccttctgatgtatttttcaatataccatcttcgaagactgaaagtggaaggctcattctagcagcaaaagttcatacaagtgacaatggtgggcttc

SEQ ID NO: 417227 - DNA, 462 bp, Oryza sativa
gccaattcaaagcgaacctaagctcgcttcgtctctctctcggattcgatcatggcgcagagggagaagaaggtggaggagccgacggagctgagggcgccggagatgacgctctgcgccaacagctgcgggttcccgggcaacccggcgaccaacaacctctgccagaactgcttcttggctgcctcggcgtcttcttcttcttcttccgccgctgcctcgccgtcgacgacgtcgttgccggtgtttccggtggtggagaagccgaggcaggccgtacagtcgtcggcggcggcggcggtggcgctggtggttgagcggccgacggcggggccggtggagtcgtcgtcgaaagcgtcgaggtcgtcgtcggtcaaccgatgccacagctgcctgaggcgggtgggcctgaccgggttccggtgccgctgcggcgagctctactgcggcgcgcaccggtac

SEQ ID NO: 417228 - DNA, 506 bp, Oryza sativa
gcggattgctctgaacgaggactgcgtggagttcgagatcttccctccgggccacctctactccagcgccgccggcgggctccggcggtggtacaagccgcagtggttcgccgagaacgtaccggcgacgccgtaccagccactcctcctcagagaggccttcgagaaggccgtcatcaagaggctcatgaccgacgtgcccttcggcgtcctcctctccggcggcctcgactcctccctcgtcgccgcggtgaccaagcgccacctcatcaagactgaagccgtcgagaagttcggagctgagctccattccttcgtcgttggccttgagggttcccctgacctgatagctgcacgagaggtcgctgaccacctaggaaccatccatcacgagttccacttcactgtccaggatggcatcgacgcgatcgaggaggtcatctaccacgacgagacgtacgacgtgacgacgatacgggccagcacgccgatgttcctgatggcgc

SEQ ID NO: 417229 - DNA, 507 bp, Oryza sativa
tcataacccactcctcctccccatcgccgccgccgccgacgagggagatggcgacgctcctccggcgatccgtcggccccgcgcgccagctcctcctccgcccgcgcccgctcccgctcccccacgccgcctcctccacccgctccttctcccgctactactcccgcgacgacgtctcgaggtacgaggcgctgagcacgccggtgaactggggggtgagcatcgtgccggagaagaaggcgttcgtggtggagcggttcggcaagtacgtcaagacgctcggctccgggatccacgtgctcgtccccctcgtcgaccgcatcgcctacgtccactcgctcaaggaggaggccatccccatccccgaccagtccgccatcaccaaggacaacgtctccatccagatcgacggcgtcctctacgtcaagattgttgatccctaccttgcttcctatggtgtggagaatccaatttttgcagtcatacagcttgcccaaacaactatga

SEQ ID NO: 417230 - DNA, 542 bp, Oryza sativa
tgtattctcttgcggacacacgagccccaggaaggaaagcagcgagacccccggatcgaaacgcacaccggcggcgatggcgatggcggcgctgcgacgggaggggaggcgcgtcctcctctcctccaccccatccccggcggccgccatggccgcgcgctcccccggcgtcgcccaccaggagattgccccactaggcgcacgttctgtttcaacacaagttgtgagaaccctcatgaagagtgttaggaacatccagaagattacaaaagcaatgaagatggttgcagcatcaaagcttggagctgttcaaataagaacagaaaattcacgtggtctatggcagccattcaccgctcttcttggggatgaccatagcgtcgatgtcaagaagaatgttattgtagccattacctctgacaagggtctttgtggtggtatcaactcaacgtcagttaaagtcagcaaagcacttcacaaagtgacttctggaccagagaaagtaagcatgtatgtcatattaaggagaaagggtaaagttc

SEQ ID NO: 417231 - DNA, 486 bp, Oryza sativa
cgtcacttctctcatcttcacgcaacgaacagcagcagcagctcaagctaagctaagctaaagtactacgtgttctttcgtcttcgtcggcgccggagtttgattcgtcggagctagctagcaagaggaagaagaaaatgttggccatattccagaagcaggtggcgcacgcgccggcggagctgaacagcccgcggagcagcgcggcgaagcccaagaaccccgacgagatcctcagggacttccacgccctccaccccatcgaggccttctccacctccttcggcggcggcgccgccctcgcctgcgtcgccggccacgcccgcaatggcctctctggctacgagaggatgttctgtgggctggatgacatctactgcgtgttcatggggaggctggacaacctgagcagcctgattccgcagtacgggctgtgcagccgctccaccaacgaggcgctgctcgtcatcgaagcctaccgcaccc

SEQ ID NO: 417232 - DNA, 510 bp, Oryza sativa
catcatttctttttagtgctaaagatgaatccagtcttttggaagactgcctcttggcatcagttaaggttcttatgaacttagcaaatgacaacccatctggttgtgaattgattgcgtcatgtggtggacttaacaccatggcctccttgatcatgaagcatttcccctcattttgttttgtcgtggacaacaactataacacgagagatggagcatcttcctgtcgagatgtcaatcttgatcatgagttatcatcttctcaaaacagcaaggcacaccaggtcaaaattaagcaattgcgagatcatgaacttgattttctggttgccatattgggcttgcttgttaaccttgtagagaaggatagccttaatagggtacggctttcatctgcccgtgttcctgttgatctatcttagaatccacagagtgtagagacacagagagatgtcatagcactcctctgttctgtattcttagcaagtcaaggtgctagtgaagcttctg

SEQ ID NO: 417233 - DNA, 458 bp, Oryza sativa
tattgtttcaagaattctatccatggtaccaccttggacacgagtttaccgtgtacaaagagatatccctatgcctcttgttacttctggtgttgaaaaaggtaatcttcgtgagcttgctttggctcgaatggaagatttaggcttgaagtgccgagatgttagaactcgtgaggcgggaattcaggatatccatcacaaaattagacctgacgaagtagagcttgttaggcgtgactatgctgcaaatgagggctgggagacctttctctcatacgaggatacacagcaggatatccttattggtctgctgcgattgcgaaaatgtggccgcaatgttacatgccctgagctagtagggaggtgttcaattgtccgtgaacttcatgtatatggaactgcagtccctgtacatggtcgtgatgcagacaaactacaacaccagggttatggtactc

SEQ ID NO: 417234 - DNA, 526 bp, Oryza sativa
ccctctcccaaccacgaccgcggccggccggcgaatcgcctcgattccggcgtgcgaattcctccacctcgccgccgccgctgctcgcgaccgatcttcaccttccgcttccccccccctgcagccgattggactcgatcctatcctatcctatcctatccccgaacgggcgatctggtaggcgagagagaccagccatgtcgggggtgttcggcaaggtgttcgggaagtccaaggcgcagagccaggccaccgcgctggcctccatcgacaagctcagcgagactcttgaaatgctggaaaagaaagaaaatttgctagtgaagaaagcgaatcttgaggttgagaaggccaagaccttcactaaagcgaagaataaaagagctgcaatacaatgcttaaagaggaagagattatatgagcaacagattgagcagcttggtaatttccaattaaggatacatgatcagatgataatgctggaaggtgcaaaggctacaacagaaactgttgatgcattgagaac

SEQ ID NO: 417235 - DNA, 599 bp, Oryza sativa
cctctcttcaaccacgaccgcggccggccggcgaatcgcctcgattccggcgtgcgaattcctccacctcgccgccgccgctgctcgcgaccgatcttcaccttccgcttccccccccctgcagccgattggactcgatcctatcctatcctatcctatccccgaacgggcgatctggtaggcgagagagaccagccatgtcgggggtgttcggcaaggtgttcgggaagtccaaggcgcagagccaggccaccgcgctggcctccatcgacaagctcagcgagactcttgaaatgctggaaaagaaagaaaatttgctagtgaagaaagcgaatcttgaggttgagaaggccaagaccttcactaaagcgaagaataaaagagctgcaatacaatgcttaaagaggaagagattatatgagcaacagattgagcagcttggtaatttccaattaaggatacatgatcagatgataatgctggaaggtgcaaaggctacaacagagactgttgatgcattgagaactggagcatcggcgatgaaagcaatgcacatagcgaccaatattgacgacgttgacaagaccatggatgaaatt

SEQ ID NO: 417236 - DNA, 538 bp, Oryza sativa
gttttcgtactcgcctctctccgcgccctcctccgccgccgctcgccgtcgttcgtctccgccgccaccgccgccgccatgagggagtgcatctcgatccacatcgggcaggccggtatccaggtcgggaacgcgtgctgggagctctattgcctcgagcatggcatccagcctgatggacagatgcccggtgacaagaccgttgggggaggtgatgatgcttttaacaccttcttcagtgagactggtgctgggaagcatgtcccccgtgctgtcttcgtcgatcttgagcctaccgtgattgatgaggtgaggactggtgactaccgccagctcttccaccctgagcagctcatcagtggcaaggaggatgcagccaacaactttgcccgtggtcactacaccattggcaaggagattgttgatctgtgccttgaccgcatcaggaagcttgccgacaactgcactggtctccaggctttcttgtgtcaacgctgtggggaggacgggctccgtcttggttccttctcctgagcgt

SEQ ID NO: 417237 - DNA, 542 bp, Oryza sativa
  unsure (1)..(542): unsure at all n locations
cctagctactaagggaagattacttggcacagaatgcatttaccccatatgacaagttctgtccattctacaagtctgtttggatgatgcgcaacattattcatttcaatacattagcaaatcaggctgtggagcgtgcagctaatgctgatggacaaaaaataacatacagtgtcataaagcatcgtatgggtgatctattttatcgcctagtatctcaaaagtttgaggaccctgcagagggtgaagatgtcctagtcgcaaaattccagaaattgtatgatgacctcacaaccggattccgcaacctagaagatgaagctaggtgaagtgctgtaaattgaggatcacattcgtgtaaacaataaaatatcaccagatattcgaagcgagttggggcaatttattttgcttcgcgtgaggttgtagatgtgaattacgtttcagaatcatcatattttccttctgcatcgacactgctgctgctttttgtagctttctgttggacctncggtgctcgatgaaggcattctttttgtgta

SEQ ID NO: 417238 - DNA, 430 bp, Oryza sativa
ttgtctcctcctccttcttctccatcgccggcgagagagagagagttagctagctaggatgggttctacagccgccgacatggccgcggcggccgacgaggaggcgtgcatgtacgcgctgcagctggcgtcgtcgtcgatcctgccgatgacgctcaagaacgccatcgagctgggcctgctcgagacgctgcagtccgccgccgtcgccggaggaggggggaaggcggcgctgctgacgccggcggaggtggccgacaagctgccgtccaaggcgaacccggcggcggccgacatggtggaccgcatgctccgcctgctcggcttctacaacgtcgtcaggtgcgagatggaagagggcgccgacggcaagctcatccggcgttacgccgacggtctcgagtgcaagtggctgactcccaacgaggac

SEQ ID NO: 417239 - DNA, 519 bp, Oryza sativa
  unsure (1)..(519): unsure at all n locations
tgtctcactcgccgctcaagcgccccatcgccgagtacctccgctacggcgtcatcaacctcgacaagccctccaacccctcctcgcacgaggtcgtcgcctggatcaagcgcctcctccgcgtcgacaagaccggccacagcggcacgctcgaccccaaggtcaccggcaacctcatcgtctgcgtcgaccgcgccacccgcctcgtcaagtcgcagcagggcgccggcaaggagtacgtctgcgtcgcgcgcttccacgccgcagtccccgacaccgcccgcgtcgcccgcgcgctcgaggctctcaccggcgccgtgttccagcggcccccgctcatctccgccgtcaagcgccagctcagggtgaggaccatctacgagagcaagctgctcgagcacgacgccgaccggcacctcgccgtgttctggatctcctgcgaggcccggacctatgtcaggacgctctgcgtccaccttggcctgctgctcggcgtcngcgcgcatatgcaggagctgc

SEQ ID NO: 417240 - DNA, 453 bp, Oryza sativa
ctctcttctcctctcttccatcgccgctgctcgcttcctccccctctcccacgaaagatggcgtctcacattgttgggtacccccgcatgggccccaagagggagctcaagtttgccctggagtctttctgggatgggaagagcagcgctgaggatttggagaaggttgcgaccgacctcagggccagcatctggaagcaaatggctgacgctgggatcaagtacatacccagcaacaccttctcgtactatgatcaggttcttgacacggctgccatgcttggtgctgtcccagagcgctactcatggactggtggagagattgggttcagcacctacttctcgatggctaggggcaatgccactgtccctgccatggagatgaccaagtggtttgacaccaactaccactttatcgtccctgaacttggtcccaacaccaagttcttctac

SEQ ID NO: 417241 - DNA, 529 bp, Oryza sativa
gtttctgctgaacaggggagggccgggcggcgatctccatcgcagcggaggggaggggaggggatcctgaattgcaggcgtagtctggtcgtcgtggcggtgaggtgagggggtgacggcgatggccaacagcgagtacgagtacgtgaagagggagttcgagctcgacagcctcctcccgccctctaattggatcgttgtgcgcatcgacggctgccacttccaccgattctccaagatacatacctttgagaaaccaaatgatgagcgtgctttaagattgatgaacgcctgtgccacttctatgctcgaaaagttcccagacatagtcttcgcatatggcgtcagtgatgagtacagttttgtttttagagaggaaactgaattctatcaaagacgagaaagtaaaattctatctttatgtgtttcctacttcacttctgtgtacgtgatgaagtgaaagatttctttcctataaggagttgaaagagccttcatttttgatggtcgagttgtatgctatccaaac

SEQ ID NO: 417242 - DNA, 505 bp, Oryza sativa
atcctctccttcctcttcctctgctcactcagctctcccccgcgcgcgccaccgtcgtcgccatgtcgggcaacatcgccttcggccgcttcgatgactccttcagcgcggccttcctcaaggcctacgtggccgagttcatctccaccctcgtcttcgtcttcgccggcgtcggctccgacatcgcctacaccaagttgaccggcggcgcgccgcttgacccggccgggctggtcgccgtggcggtgtgccacgggttcgggctgttcgtggcggtggccatcggcgccaacatctccggcggccacgtcaacccggccgtcaccttcggcctcgccctcggcggccagatcaccatcctcaccggcgtattctactggatcgcccagctcctcggcgccatcgtcggcgccgtcctcgtccagttctgcaccggcgtggcgacaccgacgcacgggctgtccggcgtgggcgcgttcgagggcgtggtgatggagatcatcgt

SEQ ID NO: 417243 - DNA, 481 bp, Oryza sativa
ctcgccgtcctgtccgaggtgctctcggcggtgttctgcgaggtgatgaacggcaagccggagtacaccgaccacctgacccacaagctgaagcaccaccctgggtcgatcgaggccgccgccatcatggagcacatcctcgccgggagctcgttcatgagccacgccaagaaggtgaacgagatggacccgctgctgaagccgaagcaggacaggtacgcgctccgcacgtcgccgcagtggctcggcccgcagatcgaggtcatccgcgccgccaccaagtccatcgagcgcgaggtcaactccgtgaacgacaacccggtgatcgacgtccaccgcggcaaggcgctccacggcggcaacttccagggcacccccatcggtgtgtccatggacaacgcccgtctcgccatcgccaacatcggcaagctcatgttcgcgcagttctccgagctcgtgaacgagttctacaacaacgggc

SEQ ID NO: 417244 - DNA, 417 bp, Oryza sativa
gcactggaaggttgtatcagtgtacatcaatcgaatgggcctggtaaatgttcaaactgctttcgaatgtagtaaaccggcatggtggttgtgcgcttttgcttagctatgatggcatgtttacaggtcatgctcaaaatgaaaagccggcatgttgctgggacaatcaccaagaagaagaaaagtaagtggcaaactagcatgcttgtgaaaacagtttactaccccctccatggcattgaggttgatccatccgtcactgtgcaggtgtggtgatagatgtctgcaaggatgtcgcggcgtggccaggccggcacctgctggaggacggcgagcaccgccgctactttggcctcaggacagcggagcaccgggtaatcgaattcgagtgcaccagccagagggagtatgagatgt

SEQ ID NO: 417245 - DNA, 527 bp, Oryza sativa
tcttatctttttcacggacaaattcggtgtcagatcaatcaggaacagtgaacatgagatgatgtctgcactgtacctccaagtcagtattgtgagtcaggccctcatcttcgtcacccgttctcgcagctggtccttcatcgaacgccctggtcttctcttggtcactgcattcatgcttgcacaactggttgcgacattcctcgctgtctatgccaactggggctttgccaggatcaagggcattggctggggctgggctggcgttatctggctttacagcattgtgttctacttccctcttgacatcttcaagttcttcatccgctttgtgctgagtggaagggcctgggacaacctccttgagaacaagattgcattcaccaccaagaaggattacggtagggaggagagggaggcacaatgggccaccgcacaaagaacacttcacggccttcagccaccggaggtcgtcttcacacgctcttcaacgacatgagcagctaccgcgagctctctgagatcgc

SEQ ID NO: 417246 - DNA, 450 bp, Oryza sativa
tatttttctccccaatctcgcgaggctctcgtcgtcgaatcgaatcctctcgcgtcctcaagatgcagatctttgtgaagacattgaccggcaagactatcaccctcgaggtggagtcctctgacaccatcgataatgtcaaggctaagatccaagataaggagggcatccccccggaccagcagcgtctcatcttcgctggcaagcagctggaggatggcaggacccttgctgactacaacatccagaaggagtcgacccttcaccttgtcctccgcctccgtggtggcatgcagatctttgtcaagactctgaccggcaagactatcacccttgaggtggagtcttctgacaccatcgacaacgtcaaggccaagatccaagacaaagagggcattcccccagaccagcagcgtctcatcttcgccggcaagcagctggaggatggca

SEQ ID NO: 417247 - DNA, 481 bp, Oryza sativa
cgctgatctcgagccgctgctggagacctgcgccgcgctccgggagctcgacctgtcggagttctactgctggaccgaggacgtcgtgagggcgctcaccacgcacccttccgccaccgcggcgctcacccacctcgacctcggcctcgccgccgccaccgacggcttcaaatcctccgagcttgggccaatcgcggcctcctgccccaacctccgcaagctcgtggtgccatgcttgttcaacccacggttcagcgattgcgtcggcgacgacgcgctgctctcgctggccaccagctgcccgcggctgaccgtcttgcggctcagcgagccgttcgaggctgcggccaacatccagagggaggaggcggccatcaccgttgcggggctagtcgccttcttcgcggcgctccccgcgctggaggatttcaccatggatctccagcacaatgtgctggaggccgcgcccgcgatggaggcg

SEQ ID NO: 417248 - DNA, 397 bp, Oryza sativa
agtgagggagccaaagaaagctctcatcttcctcttctcaaactccatctctctctcttcttcttcttcctctcctcctcctcctcgcttggaccccggattttttgcaagggggtaaggaggcgggaggagatggggagggaggagaggccgccgctgtggcaggcggcactcgtcacctgtgtctccgccttctctgccaccgggctcgaaggagtctacctatccatgccggactcctactacagcttccacaagatgcctcgcaacctcatggagctccaatctctcactggacatcttgagaactataccagtgattacaccatacaagtgttggtgggatactgttccgagaccatcttcatgcaaacccttatgatctcaggacaataat

SEQ ID NO: 417249 - DNA, 571 bp, Oryza sativa
gtttatttatcaaggaaaaatctctcttcctatctccttcctccccacccacccccaaatccacctcgccgtcgccgccgcgaaaccctaggcagccatagccatggctgcggccatcctcctccgccgcgtcccccccgcgcgggcccaggccacggcgctcatcgcggcgcgctcgatctcggactccacggcgccgctcaccatcgagacctcggtccccttcacctcccacatcgtcgacccgccctcgcgcgacgtcaccaccaccccggccgagctcctcaccttcttccgcgacatgtccgtgatgcgccggatggagatcgccgcggattccctctataaggccaagctcatccgcgggttctgccacctctacgacggccaggaggccgtcgccgtcgggatggaggccgccatcacccgctccgattccatcatcaccgcgtaccgcgatcactgcacctacctcgcacgcggcggcgacctcgtctccgcgttcgcggagctcatgggccgccaggcttggtgctcccgcgggaagggcggatccatgcatttctacaag

SEQ ID NO: 417250 - DNA, 553 bp, Oryza sativa
  unsure (1)..(553): unsure at all n locations
gctgcttggacggggtactaagatcaccctctacctcaaggatgatcagctggaataccttgaggaacgtcgcctcaaggatctggtgaagaagcattctgagttcatcagctaccctatctccttatggactgagaagacaaccgagaaggagatttctgatgatgaagacgaggaagagaagaaggatgctgaggagggaaaggttgaggatgttgatgaggagaaggaagagaaagagaagaaaaagaagaagatcaaggaagtctctcatgagtggaacgtgatgaacaagcagaaacctatttggttgaggaagccagaggagatcaccaaggaagagtatgctgctttctacaagagcttgacaaacgactgggaggaacatctggctgtcaagcacttctctgtggagggtcagcttgaattcaaggccatnctgtttgtaccaaagagagcgccatttgacctctttgacaccaggaagaagcaaacaacatctagctgtacgtaccgccggttgttatcatggacaactgtgaggagttgatcc

SEQ ID NO: 417251 - DNA, 549 bp, Oryza sativa
gtttcttggacggggtactaagatcaccctctacctcaaggatgatcagctggaataccttgaggaacgtcgcctcaaggatctggtgaagaagcattctgagttcatcagctaccctatctccttatggactgagaagacaaccgagaaggagatttctgatgatgaagacgaggaagagaagaaggatgctgaggagggaaaggttgaggatgttgatgaggagaaggaagagaaagagaagaaaaagaagaagatcaaggaagtctctcatgagtggaacgtgatgaacaagcagaaacctatttggttgaggaagccagaggagatcaccaaggaagagtatgctgctttctacaagagcttgacaaacgactgggaggaacatctggctgtcaagcacttctctgtggagggtcagcttgaattcaaggccattctgtttgtaccaaagagagcgccatttgacctctttgacaccaggaagaagcaaaacaacatcaagctgtacgtacgccgggtgtttatcatggacaactgtgaggagtt

SEQ ID NO: 417252 - DNA, 507 bp, Oryza sativa
tatctaacagtaatatcacagaggcgtccggtaactgaagcagagaaggaccatgctcttcaaagggcaagagagtttaaatctaagaatccttttgccgtgcaaataatgatggagtcatatgtctatgttggatttttcatgaatatcccatgtgaatttgtccgtgagtgtcttccccataccaacaaaaggatcacactctgggatccacaagggaaggcttgggaagttaactatgtctactacagtgatcgttctgttggttctttcagtggtggctggggcaaatttgctgttggcaacaatctggagaagtttgatgtgtgtgtcttcgagcttgtccagaaggataacataaaagtgcacatctacagagttgttccagaaattactccgcacaaactccgttctgacccgaagtaacattgctatgtcggcatgttggaggcttcaatccattgatctgaggctgtagttggcaagtaaaaaactatttatatgttg

SEQ ID NO: 417253 - DNA, 404 bp, Oryza sativa
caccaccaccaccaccaccaccgtctccagccatggcctcctccgcctccctgcagcgcttcctccccccgtacccccacgcggcagcatcccgctgccgccctcccggcgtccgcgcccgccccgtgcagtcgtcgacggtgtccgcaccgtcctcctcgactccggcggcggacgaggccgtgtcggcggagcggctggagccgcgggtggagcagcgggagggccggtactgggtgctcaaggagaagtaccggacggggctgaacccgcaggagaaggtgaagctggggaaggagcccatgtcattgttcatggagggcggcatcaaggagctcgccaagatgcccatggaggagatcgaggccgacaagctctccaaggaggacatcgacgtgcggctc

SEQ ID NO: 417254 - DNA, 442 bp, Oryza sativa
gctgttgggagcacgccgctgtgcaaggcgcacggcggcgggaagcggtgcatgttcgagggcggcgggctctgccccaagagcgtccacggcggcaccagcttctgcgtggcgcacggcggcgggaagcggtgcacggtgcccgggtgcggcaagagcgcccgcggccgcacggactgctgcgtcaagcacggcggcggcaagcggtgcagggtcgacggctgcgccaagagcgcgcaggggagcacggagttctgcaaggcccacggcggcggcaagcgctgcacctgggccaccggctgcgagaagttcgcccgcgggcggagcggcctctgcgccgcgcacggcacgctcatggcctcacagcagcgtcgcgccggcggcggcgggagcatgatcggtccagggctcttccacggcctcgtcggcgccatgaacaacg

SEQ ID NO: 417255 - DNA, 285 bp, Oryza sativa
  unsure (1)..(285): unsure at all n locations
tgttaacggtggctgttggcgtcatcaagaacgtggagaagaaggacccaaccggtgccaaggtgaccaaggctgccgccaagaagaaatgagcatcgttgaagtggtggttatgctggctgcatttgagatatcttagcgttcgttaagttttgcccacggccatggcactcgttgcatggaccgttaatatctgctcgcaatgtgcactatgttagtcgtttaaaactcgtttatttctattcggttnaaaaaaaaaaaaaaaaaaaaaataaaaaatattag

SEQ ID NO: 417256 - DNA, 398 bp, Oryza sativa
catcaatttcgacgagaagatgaagctcgggcagggcggctacggcgtggtctaccgcgccaccgtcgttggggagaacggccagaacatggaggtcgccgtgaagcagttctccggtgccaacaccaaggggcaggaggatttcctcgccgagctcagcatcatcaaccgcctccggcaccgtaatctcgtcaagctcgtcggttggtgccaccaaaatggcgtcttgttgctggtgtacgactacatgccgaacggtagcctggacacgcacctcttcggcgggccggagtcggaggtgctgaactggcagcagcgctacaacgtcgtcaccggcgttgcgtcggcgctgaactaccttcaccacgagtacgaccagatggtgatccaccgcgaca

SEQ ID NO: 417257 - DNA, 441 bp, Oryza sativa
ctcggttatcggagcggttagctgcggcgatgtcggggcgcggcaagggaggcaaggggctgggcaagggcggcgcgaagcgccaccgcaaggtgctccgcgacaacatccaggggatcaccaagccggcgatccggaggctggcgaggaggggcggcgtcaagcgcatctccgggctcatctacgaggagacccgcggcgtgctcaagatcttcctcgagaacgtcatccgcgacgccgtcacctacaccgagcacgcccgccgcaagaccgtcaccgccatggacgtcgtctacgcgctcaagcgccagggccgcaccctctacggcttcggaggctagacgagtacagattcgatggtgttgggcgtagcaacgctagcattattatgtcgtgtgcttcgtgtgtgtcgatgtgtctgtgactccttgtgttctagtc

SEQ ID NO: 417258 - DNA, 605 bp, Oryza sativa
  unsure (1)..(605): unsure at all n locations
ggctttgagttctcttgtcaccactctgcaagagaaaaaggatccagatcatcctgctgaaaaagatcattctgatgcattgtcccagatttctgaaattaacactgcattggatgcattatggttggagctgagtaattgcataagcaaaatagagagctcttcagaatacgcatcgaatctaagtcctgcttctgcaaatgcagccacattaacaacaggtgtagcacctccattgcctgccggaactcagaacatattaccgtacatagaatcattttttgtgacatgtgagaagttacgccctgggcaacctgatgctattcaagaagcttcaacatctgacatggaggatgcatcaacttctagtggtgggcagaaatcatctggaagccatgcaaatcttgatgagaagcacaatgcgtttgttaaattctcagagaaacacagaagattgttgaacgcatttatncgccaaaaccctgggctattggagaagtcattctctctgatgttgaaaatccctcgcttgattgaaattgacaccgcgtgcatatttccgtctaaaataacatcacatgatcatcatatagcctgtagaattc

SEQ ID NO: 417259 - DNA, 423 bp, Oryza sativa
gttattttgtatccattgttgcgccactttgggtatggtttggacttgaaagaagccacaattcttgtttgggcgggactgcgaggggctgttgctctgtctctatcattatctgttaagcgtgctagtgatgcagttcagacccatctgaaaccagttgacggaacaatgtttgtgttcttcactggtggcatcgtgtttttgacattgatttttaatggttctactacacaatttttgttgcatctacttggaatggacagattagcagcaacaaagcttcgcatattgaattatacaaaatatgaaatgctaaacaaggcattggaggcttttggtgatcttagggatgatgaggaacttggtcctcctgctgattgggttactggaaagaaatatatcacatgcttgaacgacttggac

SEQ ID NO: 417260 - DNA, 423 bp, Oryza sativa
tttttctgcgaaagctagggtttcgtgcgattcacctcctcggcgacgaccgagaccgcgagcgatttcggagggctcgatcgatggcggctgagggagagaagaagatgatcaccctgaagagctccgacggggaggagttcgaggtggaggaggcggtggcgatggagtcgcagacgatccgccacatgatcgaggacgactgcgccgacaacggcatcccgctccccaacgtcaactccaagatcctctccaaggtcatcgagtactgcaacaagcacgtgcacgccgcggccgccgcggtctccaaggccgccgacgacgccgcgtccgtcgccgcagccgtgccgccgcccttcggcgaggacctcaagaactgggacgccgactttgtcaaggtcgaccaggccaccctttttgacc

SEQ ID NO: 417261 - DNA, 463 bp, Oryza sativa
ttcatttcttggtcttcgtctccgtctccgtccttgggttgatatccagaatcagtcggtttggtttgtcagcaatggcgaggctagccggcgttgctgctctctcgttggtgctcgtcttgctcggcgccggcgtgccccggccggcggccgccgccgcggcgaagacgcaggtgttcctctccaagctgcccaaagcgctcgtcgtcggcgtctcgcccaagcacggtgaagtcgtgcacgccggcgagaacacggtgacggtgacgtggtcgctgaacacgtcggagccggcgggcgccgacgcggcgttcaagagcgtgaaggtgaagctgtgctacgcgccggcgagccggacggaccgcgggtggcgcaaggcctccgacgacctgcacaaggacaaggcgtgccagttcaaggtcaccgtgcagccgtacgccgccggcgccggcaggttcgacta

SEQ ID NO: 417262 - DNA, 562 bp, Oryza sativa
  unsure (1)..(562): unsure at all n locations
atccagtaatcgagctccagacatccatcaatggccatggagctctctaacctgacgaggtgccatctgccactgctcctgctcttcctgctggcaggatcctcctccatggctttgccagtgcatcctgcaatggacagggtgagatggcaggtcgacaaggtcaaccggcggggccattccatcgggctcgtcatgtcgtacatcgatgaggccactgctcttgaatcctccggctacttcagaccttggcatgtcctccccttcgttgacctctacggacgaaggtatcacatcgggagtattagaggtgtcaatgttatatatgcactgacaggacaacgcaagttaaatgcggctgtgactgtacagactctcatcgacgtctttactgtgtctggcattgttcattatggcacagcaggaagctctaatgattcaatgtcatttggcgatgtcagtgtccccaaatttgttgcttatacaagtgctnggacatggaagaagtcaaatcaccaaaagagtcggatacagaactagctttgagatttactgtcccaat

SEQ ID NO: 417263 - DNA, 518 bp, Oryza sativa
gagttggggagattgttttggaaaggaacatttggcaaggtgcactatgcaaggaatctggagtcaaaccagagtgtggccataaagatgatggacaaacagcagatattgaaggtcgggctttcggagcagatcagacgtgagatcacaaccatgcggttggtggctcataagaacattgttcagcttcatgaggtcatggcaacacggaacaagatctactttgtgatggagtatgtgaaaggtggtgagctatttgaaaaggttgcaaagcgtggaaagcttacagaggttgttgcacataagtatttccagcaactcattagtgcagtggattactgccacagtcgaggtgtgtatcaccgggacttgaagcctgagaacctactgttggatgagaatgagaacctgaaagtctcagactttggattgagtgcgctttcagagtcgaagaggcaagatggcttactccataccacctgtggaacacctgcatatgtagctccagaggtgattag

SEQ ID NO: 417264 - DNA, 341 bp, Oryza sativa
gtcgccgccgccgcccgccgcgccgtggagcttccacacggcctccagcagctggctgcacccggcggcgttgctgcaggagatgcggcggccgcagacgatctccaggatgacggcgccgaagccgaacacgtccgactcccgcgtcgcgcggccggtgtggaagcactccggcgcgatgtaccccagcgtccccggaacgccgatgatgtcggagtacgacggcttgacggactcgagcgcgcgggcgaggccgaagtcgccgagccgcgcgttgaaggcggagacgagcatgacgttggacggcttgatgtcacggaggatcaccatgtggatcgact

SEQ ID NO: 417265 - DNA, 290 bp, Oryza sativa
catcaacttggacgagaagatgaagctcgggcagggcggctacggcgtggtctaccgcgccaccgtcgttggggagaacggccagaacatggaggtcgccgtgaagcagttctacggtgccaacaccaaggggcaggaggatttcctcgccgagctcagcatgatcaaccgcctccggcaccgtaatctcgtcaagctcgtctgttggtgccaccaaaatggcgtattgttgctggtgtacgactacatgccgaacggtagcctggacacgcacctcttttgcggtccgg

SEQ ID NO: 417266 - DNA, 468 bp, Oryza sativa
gctccttcaagagcaccgtgctcaaggagattctccaggagccactgtggtccaaggacgaggcgaatgcggtggtggttgaggcggatgcgttcaaggagacggacgtgatctaccgtgccattagctccatgggccaccacaacgacatgctccagactgctgagctggtgcaccagtcgtcgacggacgcggcgtcgtcgctgctggtgacggcgctgaacgagggtcgagacgtcatcctcgacggtaccctctcctgggagccgttcgtccagcagaccatcgccatggcgcgcgacgtccaccgccgccgctaccgcatgggccccggctacaaggtcgaccccgacaccggcgacatcaccgagaactactgggagcccgacgacgccgacgccgacttgtcgtcgtcgaccaggaagccttaccggatcgaggtcgccggcgtggtctgcgacgcgtacc

SEQ ID NO: 417267 - DNA, 501 bp, Oryza sativa
atctccagctgatcaagagctcttaattagctagctagtgattagctgcgcttgtgatcgatcgatctcgggtacgtagcaatggcgtccaaggcgttcgctctgttcctggccgtgaacctcgtcgtgctcggggtggcaagcgcctgcggcggcagcccgtcgtgcccgacgccgacgccgtcgaccccgacaccgtcaacgccgacgccgacgccgtcggcgttcgggaggtgcccccgcgacgcgctgaagctgggcgtgtgcgccaacgtgctgggcctgatcaaggccaaggtgggcgtgcctccggcggagccgtgctgcccgctgctggaggggctcgtcgacctcgaggcggcggtgtgcctctgcacggccatcaggggcaacatcctcggaatcaacctcaacctccccatcgacctcagcctcatcctcaactactgcggcaagaccgtccccaccggcttcaagtgctaagcagcgtgcatatgcaat

SEQ ID NO: 417268 - DNA, 348 bp, Oryza sativa
gggacgggttatattcttacaaagcaaaaaaggagactcaggtccatataatcagcactcgctacaacttacaagtcggtagattggaaaacaaaatgcacctcattttcccaactaggattaacagagggggtgggtcctgattaacaccgaccacgttttattgtccgactagacaaagcataccgggttttacggcttgggcgccatggaataccatggcacggaaaagggttctactgggtcttggccatgtgggggatcagggcggtgacacggttgctggaaccccactccttgtgggaccaaggcgaaagcttgacaaagtttttcgtaaaagcaatttca

SEQ ID NO: 417269 - DNA, 311 bp, Oryza sativa
gcttctctcctcctctaatctcaagtctctgtctagtcgtcctcgcatctccactcgccatgggcaagattaagatcggaatcaacggtttcggaaggatcggcaggctcgtggccagggtggccctccagagcgaggatgtcgagctcgtcgccgtcaacgaccccttcatcaccaccgactacatgacctacatgttcaagtacgataccgtgcacggtcaatggaagcacagcgacatcaaaatcaaggactccaagactctgctcttgggcgagaagcccgtcaccgttttcggcatcaagaaccct

SEQ ID NO: 417270 - DNA, 438 bp, Oryza sativa
ttcttgctcgagctggttcagagcagcttcaggctcgggcatggcgtcggtgggcttcactggagtggtggcgatgctgctcatggccacagcgttcttgggggtcactgccgacactagctcagacgacgtgactgccctaaacacgttctacacaagtctgaactcgccctcgcagctgacaaactgggtggcgcagaacggcgacccttgtggccagtcttggcttgggatcacttgctctggatcaagggtgataacaataaaattacccggtatggggctcaaggggaccttggggtacaacatgaacgtcatgactgcactggttgagcttgatgctagcaataacaatcttggaggaggtgatatcccttataatctccctccaaatcttgagaggctaaatcttgagaacaatagcttcactgggacttt

SEQ ID NO: 417271 - DNA, 512 bp, Oryza sativa
tcctaatcttgctgagcatgagaaaccactggaatgcacacaattaccaggagagaccatatttgttcctagtgggtggtggcattgtgttttgaaccttgacatgacaattgctgtcacgcaaaattttgtcaaccaatcaaattttaagcatgtatgtttggacatggcacctggttactgtcacaaaggagtttgccgtgctggcttacttgctgctccagacaaatctattagagatattgaaaatcttcctagtataacgagtagattgaaccactctgacatggcctgtaaggaaaaaagactgaaaagttcagagcctataagaacttcaaataatgcaaatcagtgttctgcatttgagttctcagatgttcatgaaaacttgggggaccaagttttttcgtatgatatagatttcttatcccaattccttgagaaagaaaaggatcactattcttctgtctggagccctactaattcaatttgccagagagaaacaagagaat

SEQ ID NO: 417272 - DNA, 467 bp, Oryza sativa
tcgctccccgccggatcgagcagctagggtttcgacctttttttttcccaccaggagggcgacgagatgttcgggcgcgcgccgaagaagagcgacaacacgcggtactacgaggtgcttggggtgcccaaggatgcgtcccaggatgacctcaagaaggcgtaccgcaaggccgccatcaagaaccaccccgacaagggcggagaccccgagaagttcaaggaattggctcaggcttatgaagtcctgagtgaccctgagaagcgtgaaatctatgatcagtacggtgaagatgctctcaaggaggggatgggtcctggtggtgggatgcatgacccatttgacattttttcctcattctttggaggtggctatggaggtggtagcagtaggggcaggagacagcgtaagggagaagatgtggttcaccctctgaggttattcagaggaattgtacatggcacatg

SEQ ID NO: 417273 - DNA, 456 bp, Oryza sativa
gcgcttttatgcctcccagacgctctggctctccgggcgactgctccgccgccggcgtcgcgaccgccgacggagctcctagctgctgcctctactgggttggcggggagtggatcggggatctggacgcaggggccgattccttctctcagttaggaggacataacacagaataggtgaagatgagcagcatacgcacaggatacgatctgggcggtaccaccttctgtccggaaggtcgcgtcttccacgttgagtatgccaccaaggctgtcgacaacagcgggactgccgttggaatcaagtgccaagatggaatcgacctgggtgtggagaagctagccacttctaagatgacgctggcgggatctaatacgaggatccattcaatggactggcactccggcttggctggtgcttgtttacctgcacatggcaggcaaaattgcttaagag

SEQ ID NO: 417274 - DNA, 218 bp, Oryza sativa
ttctttctccgactcctcctcctcgcgcggcggcggcggcggcgtgagccagcagcagccatggtgctgttctcggtgacgaagaaggccaccacgcccttcgacggccagaagcccggcacctccggcctccgcaagaaggttactgtattccagcagcctcattaccttcagaactttgtgcaatccacatttaatgcccttcctgccgacaaagt

SEQ ID NO: 417275 - DNA, 208 bp, Oryza sativa
tcttattcaaatcaagcgttggtgagaggaagaaggtaagctaagcaaagcacgcaaagctcgagagaatgtgacagcagctttggccatgggcgagcttgcgctgctggacttctgggcgagcccgtacaggcagcgttgcctgatcgctctggcggagaagaagcttccctatgactactccgagcaggatctactcatcgccaag

SEQ ID NO: 417276 - DNA, 411 bp, Oryza sativa
  unsure (1)..(411): unsure at all n locations
gttcattcaaatcaagcgttggagagaggaagaaggtaagctaagcaaagcacgcaaagctagagagaaagtgacagcagcaatggcagggggcgagcttgcgctgctggacttctgggcgagcccgttcgggcagcggtgccgcatcgcgctggcggagaagaagctcccctacgactactccgagcaggagctcctcggcgccaagagcgacctgcttctgcgctacaaccccatacacgccaaggtccccgtccttcttcacagggacagagacacggccgcaccttctgcgagtccctcaccatcctagagtacctagacgacgcctttcaggacgccacctgtgcttctacccttcgncgncgacgacccgtacgcgcgcgcccgggccaggttctgggccgacta

SEQ ID NO: 417277 - DNA, 530 bp, Oryza sativa
tttaccctctcgccgtcgcagatccgatccaggaagagctcgccgccgccgctgccatggcgctctccgtggagaagacctcgtcggggagggagtacaaggtgaaggacctctcccaggcggacttcggccgcctcgagatcgagctcgccgaggtcgagatgccggggctcatggcgtgccgcgccgagttcggcccctcccagccgttcaagggcgcccggatctccgggtccctccacatgaccatccagaccgccgtcctcatcgagaccctcaccgcccttggcgccgaggtccgctggtgctcctgcaacatcttctccacgcaggaccacgccgccgccgccatcgccagggactccgccgccgtgttcgcctggaagggggagaccctcgaggagtactggtggtgcaccgagcgctgcctcgactggggcgtcggcggcggccccgacctcatcgtcgacgacggcggcgacgccacgctgctcatccacgagggcgtcaaggccgaggaggagttcgag

SEQ ID NO: 417278 - DNA, 301 bp, Oryza sativa
ttttactggtcctaggagtgctttgttcgtacctgaggtaccttttgaggtccttgtacgcaggcagatcagcagattgcttgatccaagccttcagtgtgcaggtttcatatacgatgagctagtcaagatgagccatcgctgtcttgctgttgagctgcagcagcttcctctgctccgtatgagcatggatgaagtcatcgggaggtttttacgggatgggcttaagcctgcgccagatatgatagcacatatcattgagatggaagcggattacataaacacctcttatccaaatttc

SEQ ID NO: 417279 - DNA, 511 bp, Oryza sativa
gtcctgttctcttggttttctcatgttgattgcagatcctatatgaaagaatactgtcagctaagactaactcctcctcagctgaaaagaaatggaaagcttctaaggatacgaacttgccagaccaatattcaaagtttatgagtgcactgtataacttgcttgatggttcttctgacaacaccaaatttgaagatgactgccgttcaatcatcgggactcagtcatatgttctttttactctagataagctgatatacaaagttgtaaagcagcttcaagcgatagcttctgacgaaatggataacaagctgctccaactttacatatacgaaaaatccaggtcacctgggagattctttgatctagtttatcatgaaaatgcgcgtgtacttctccatgatgagagcatatatcgatttgaacggcgttcaaatcctacaagattatcaattcagctaatggagtatgggcatgaaaaacctgaagttactgcagtgtcaattgatcc

SEQ ID NO: 417280 - DNA, 514 bp, Oryza sativa
ttttccttctcccaccttctcccttctcctcgctcttccccctccgccgccgccgcagcggagcagctacagcaggcgagcgacatgggagggtttgtcaagacccagaagacccatgcctacttcaagcgtttccaagtcaagttcaagagacggaggcagggcaagactgactacagggccaggattaggctcaccaaccaagataagaacaagtacaacacaccgaagtaccgctttgttgtgagatttacaaacaaagatatcacagctcaaattgtctatgctaccattgcgggtgatatcgtgatggctgctgcctactcccatgagctgcctcgttatggtcttgaagttggtctcaccaactatgcggcagcttactgcactggcttgcttctggctcgccgagtgctcacgctccgtggtttggaccaagagtacgatggcaattgtgaggccacttgggaggactactatgttgaccaactgatgaaggaggcctttccgtgct

SEQ ID NO: 417281 - DNA, 440 bp, Oryza sativa
ttgttcgctgctgagcgcggtgctgatggtgatattccacgtgatcagccccgacgacgcgtacgcctccatcgacctcccaatcctgggcctcctcttcgccaccatggtggtgggcagctacctccggaacgccgggatgttcaagcacctggggcgtctgctggcgtggaagagccagggcgggcgcgacctcatgtgccgcgtctgcgtcgtcaccgccctcgccagcgccctcttcaccaacgacacctgctgcgtcgtcctcaccgagttcgtcctcgagctcgccgccgagcgcaacctccccgccaagcccttcctactcgccctcgcctccagcgccaacatcggctccgtcgtcacccccatcggcaacccccagaacctggtcatcggcttcaatagcaagatcacctttcccaagttcctcatgggaa

SEQ ID NO: 417282 - DNA, 420 bp, Oryza sativa
acgcgcgtttgtttctacatgaaaagctatagccatggcggaggacaaggagctggtgctgctcgatttctgggtgagcccgttcgggcagcggggccggatcgccatggcggagaaggggctggagttcgagtaccgcgaggaggacctcggcaactataaagacctccttgtgcattctaacacctgccacaggaagaatgccattctcctcaacggcggtcgtccagtctcctagtgcgtgctgatactccagtgcctcgacgacgcgcatgcgggtaccctgcacgtgctgccttcagcgaactccggctacgccgacgccctgtacgcgcgcgccacggggaggttctgggcggactacgttgacaggaaggtctacctctgtgggtccaagctgtggaggctcaagggtgagcc

SEQ ID NO: 417283 - DNA, 439 bp, Oryza sativa
tttgttccctccacttcggcctcttcttcctcctccatccccatcctccatcggatgcactagtagctggccttgtaccctacctagcttagctacccacccatgttcttctcctcgtctcctctcgctgtctgcctttgacttggagacctagctcgtcgatcgccggccatgcggatgcagtgcgacgtctgcgccgccgagccggccgcggtgctctgctgcgccaacgaggccgagctctgctccgcctgcgaccgccgtgtacaccgcgccaaccgcctcgccaggaagcaccgacgtctaccgctcgtccacccgttctccttctcctccggcgactgtggcgccgccggcgcgccgttgtgcgacgtgtgcagggagaagaggggcctcgtggtctgcgatgaggaccgcgccatcctgtgcgccgactgcg

SEQ ID NO: 417284 - DNA, 470 bp, Oryza sativa
ttcgtttcttgctccatccatctatccatccaaggagtgtggaacgccacacgtattttttttttatctatgctaatctgatcattagcagaggagagttttagcagtaggattggattaaattggagtagtttcatagtttgtgtgtagtgatcttaattagctttgattagacagacagtacagtagagtagaggatgttggctgtgttcagcggcgcggtggtggaggtgccggcggagctggtggccgccggcagccggacgccgtcgcccaagacgcgggcgtcggagctggtcggacgatttctcgccgtcgccgagccggccgtgtccctgcagcttggcgaccttggtcaccttgtcttcttccacgccaaccaattcctttcttcggccaagatcctttggatcaaaagatgacattttctgcctgtttgagggagtccttgacaatcttggcaggctgag

SEQ ID NO: 417285 - DNA, 459 bp, Oryza sativa
ttgttctctagttgaaaagctatagccatggcggaggatatggagctggtgctgctcgatttctgggtgagcccgttcgggcagcggtgccggatcgccatggcggataaggggctggagttcgagtaccgcgaggaggacctcggcaacaagagcgacctcctcctgcgctccaaccccgtccacaggaagatccccgtcctcctccacgccggccgtcccgtctccgagtccctcgtcatcctccagtacctcgacgacgcgttccccggcaccccccacctactccctgcggcgaactccggcgacgccgacgccgcgtacgcgcgcgccacggcgaggttctgggcggactacgttgacaggaagctctacgactgcgggctcaggctgtggaggctcaagggtgaagcccaagcggcggcagggcgcgagatggcggatatcctccgcacgctg

SEQ ID NO: 417286 - DNA, 462 bp, Oryza sativa
ttctcttcttcagttcttcctaaggtggttgatgatgccggcgagggcgaggccaaccctcgccgggcgaaatggtggtacgcgacgttccacagcgtcaccgccatggtcggcgccggcgtgctcagcttgccgtacgccatggctcacctaggatgggggccggggacggcggcgctggtggtgtcgtgggggatgacgctgtacacgctgcggctgctgatcgagctgcacgagtgcgtgcccggggtgcggttcgaccggtaccgcgacctctgcgcgcacgcgctgggcccgcgcctggggccctggctcgtcgtgccgcagcagctcatcgtgcagctcggctgcgacgtggtgtacatggtcatcggcgggaaatgcctcatgaagttcgccgagtcggtgtcgtcgtggtcgcgcgcgccgcatctgcaccaccagtcctactggatctgcatc

SEQ ID NO: 417287 - DNA, 412 bp, Oryza sativa
gacctggtaacattccgtctttgtattatggggcgactccgccctgatcggatcactggggagcccatggatgatggttttggggcaattgtgatgaactgcaagaagctcactagactttcagtctctggtctgctcactgataaggcgtttgcatacattggaaaatatgggaaactaataaagacactgtctgttgccttcgctggaaatagtgacatgtctctccaatctgtgtttgaaggatgcactaggttgcaaaagcttgaggtcagagatagtccttttagtgataaaggattgctctctggcctgagctatttttacaacatgaggttcttatggatgaattcatgcaggctaaccatgaggggttgtagagatgtagctcagcaaatgcctgacttggtgg

SEQ ID NO: 417288 - DNA, 497 bp, Oryza sativa
cgtgctatcctccttcctccatgattcccttctcgaatcttctcactttcttctgaagtgctccgctccgctccgctccgatccaatccactccgcccgagtcccccacccatcggcacccaccagcgcgagggtgggtggccatcgatcgatcggcccatcgccgattcccgcgggatctgcggcggagcggggggatttgatcggagggtgaatatgtcgacgccagcaaggaagaggctgatgagggatttcaaacgactgatgcaggatcctccagctggcataagtggggccccacaggacaacaatataatgctttggaatgctgtaattattggccctgatgatactccctgggatggaggtacgttcaagctgacacttcagtttactgaagattatcctaacaagccacctacagtgcgatccgtttctcggatgtctcatcctaacacttatgctgatgggagcctatgcctagatatactacaaaa

SEQ ID NO: 417289 - DNA, 351 bp, Oryza sativa
gccccttgtctgtgacattgttaccggaatggtcaaggctgggtttgctggagatgatgctccccgtgctgttttcccgagtattgttggccgtccgcgacatacaggcgttatggatgggatgggacaaaaagatgcttatgtcggtgatgaggcccaatccaagaggggtatcctaaccttgaaataccccattgagcatggaattgtaagcaactgggatgacatggagaaaatttggcaccacacattctacaatgagcttcgcgtagcaccagaagagcatccaattctttttacggaggcttcacttaaccctaaggcccacagggagaagatgacacaaattat

SEQ ID NO: 417290 - DNA, 465 bp, Oryza sativa
tttcttctcctccggctcttcttcagtatcgaatcctctcttctcctcgtgcccaccaccaccaccgtagcaatggcgggcaacgggccgatcaacaaggaggacccgctcaactggggcgcggcggcggccgagatggccggcagccacctcgacgaggtgaagcgcatggtggcgcagttccgcgagccgctggtcaagatccagggcgccaccctccgcgtcggccaggtggccgccgtcgcccaggccaaggacgccgccggcgtcgccgtcgagctcgacgaggaggcccgcccccgcgtcaaggccagcagcgagtggatcctcaactgcatcgcccacggcggcgacatctacggcgtcaccaccggctttggcggcacctaccaccgccgcaccaaagacggccccgccctccaagtcgagctcctcaggcatctcaacgcccgaattttcggcact

SEQ ID NO: 417291 - DNA, 505 bp, Oryza sativa
tttcttcaccaccggcaccgccgcagcataagcagcgcttccgcaggagggaagatgccggcggggcacgggctgcgggcgcggacgcgcgacctattcgcgcggccgttccgcaagaagggttacatcccgctcaccacctacctgaggacgtacaagatcggcgattacgtcgacgtcaaggtgaacggcgccgtgcacaagggcatgccgcacaagttctaccacggccgcaccggccgcgtctggaacgtcaccaagcgcgccatcggcgtcgagatcaacaagctggtcggtaaccgcatcatcaggaagaggatccatgtccgtgtggagcatgtccagccatccaggcgcaccgaggagctccgcctgaggaaaatcaagaacgaacagcttaaggctgatgccaaggcccgtggtgaggttatcagcaccaagagacagcccgagggacccaaacctggtttcatggttgaaggtgctacgctgagactggtacccc

SEQ ID NO: 417292 - DNA, 428 bp, Oryza sativa
tttgtaaccgacttactacaaatggacacaagggattttccttcaactactgaaaagaggactggcctatcaggctgaggtaccggttaattggtgccctgctcttggaactgttctggcgaatgaagaagtaatagatggtgtcagtgaacgtggtggtcatcctgttatacgaaagccaatgcgccagtggatgctgaggattacatcttatgctgatcaacttattgaagatttggatgaacttgattggcctgagagcatcaaagaaatgcaaagaaactggatagggagatcagaaggcgctgagcttgaattctcagctgtggacaaggaagggcacgatctaagtgctaatttgttagtttacacaacatgacctgacacaatttttggtgcaacatatgttgttttggcacccgagcatt

SEQ ID NO: 417293 - DNA, 393 bp, Oryza sativa
tttctcctccctccctgctcgcgctctcagtctcccccatccccaatcaccttactagcttagtagctttgtgaatcaatcaaggccagggtttgttcagatcatccttccctcccatttgcccatgccttggctttgatccgaccaggcatggagggcggtggcacgaggacgcgccgtcgcgccgtcaccgcgagccctggacgcaacatggtctgggtcgagccaccgggcaagactcatcacctgcgctcgccgcccccgcccccttccccgtcctcctcaaagagggtggccgtcgtctactacctctgccgcaatcgccatcttgaacacccccactttattgaggtgccactcgcctcaccggacggcctttacctgcgagatgtg

SEQ ID NO: 417294 - DNA, 479 bp, Oryza sativa
ttttatcaagagatcgatcatatcgtattttggagtaatttagcagctagctagtgcagctgcaagctattagcgactgcctgctttgatcgatccatctagctcattgttgaatccatctaagcttaatggctctgcagcagagcatggcgatgccgatgatggtagtgtctgaccttggcaccgctcctcggtcatcgccgatggttcagctgcagaggatgaagaagcatctggtggaggtggcggcgttcaagaacagaaccaaggcttcccccaaggtggacaagtcgaacaagaacaagtcgatcgtggaggacggcatcttcggcacctccggcggcatcgggttcaccaaggagaacgagctgttcgtggggagggtggccatgctggggttcgcggcgtccctccctggcgaggcggtcaccgggaagggcatcctggcgcagctcaacctgaagacgggcattcccatc

SEQ ID NO: 417295 - DNA, 493 bp, Oryza sativa
tttttaaagaaaagaaaaaaagagaggaagaaagcgagaaaaatctcaccttcctcttcctccgctatctagctcgatccccgcaagaaattcgccccggaatctctcgatccgctcgatccattcccccgatctgtcgatcgttccttgcgaaccctcggttcccggggtcccgatccggtcttcgccgcgtcgccgtcgccgccggagtcggagtcggagtcggagggggaggagatgaacggcgccggcgggaaccaccagcagcagcagcagcagcagcagcggctcaggcagcagcagcagcagcaggccctcctgatgcagcaggcgctgcagcagcagcagcagtaccagtccggcgttctcgccgccgccgtcgtggcggccatgacccagatggagcctatttcaaatggcaatcttccaccagggtttgatccatccacatgtcgcagtgtgtatgttgggaatgtgcaccctaatgttactg

SEQ ID NO: 417296 - DNA, 516 bp, Oryza sativa
  unsure (1)..(516): unsure at all n locations
tgttcctttcccacatcctcctccgccgccgggtgcttcctaccggctcccgatctccgaggcaagcagcgccgcacccggccgctgccgtcgacgccatggcgttcgagaagatcaaggtcgccaaccccatcgtcgagatggacggtgatgagatgaccaggatattctggcagtctatcaaggacaagcttatctttccatttttggatctggacattaagtactatgacttgggagttctccaccgtgatgcaactgatgacaaggtcaccgtggaggctgcagaggctactctcaagtacaatgtggctattaagtgtgcgacgattactccagatgaggctcgggttaaggagttcaacctatagcaaatgtggaagagccccaatggcacaattaggaatattatcaatggcactgtattcagagagccaattatatgcataaatgtcccaaggcttgttccaggatggactaagccccattgcatnggaaggcatgcttttgttgatc

SEQ ID NO: 417297 - DNA, 437 bp, Oryza sativa
ctcccaaatggcatatgccgagctccacgttaacatcataatgacctaaatactgagtgacggaagacacgggaagaaatcggaaaaaggaaaaaaaaatctgagatataaaaattagtaattcgcaggaagcgaagcgcggatccgtttcctcacccaccgatcggcttcttccccccacgctagcagccatggcgtcgtcggcgctcatctgcgacaccgagcagtggaagggcctccaggcgcatgttggggagattcagaaaacgcacctgcgccatctgatgcatgatgttgagcgctgcaaggcaatgacagctgagtatgaaggcatatatctggattactcgaggcagcgtgcgactggcgaaaccatggagaagctgtttaaattggccgaagctgcaaagctcaaggagaagattgagaagatgttt

SEQ ID NO: 417298 - DNA, 446 bp, Oryza sativa
tgtcgttctcctatcctctacgtctaaacccggttcctttttcgcctcgttgactccgacgccgccgacgccgtcagatccagcagcttcaggtcggggctgaaccttggacttggagcggccatggcttcggacaacattggctcgagagatgtatgtgttgttggggttgcacgcacccctatgggtggtttcctaggtgccctgtcttccttgtcagctaccaaacttggttccatagcaattgaagctgctctgaagagggcaaatgttgatccagcccttgtgcaagaggtcttctttggtaatgtgtcgagtgctaatttggggcaagctcctgcaagacaagctgctttaggtgcatggattccaaacacaggtgtttgcagcgcagttaacaaagtttgcgcatctggcatgaaagcgacaatgtttgcagcacagtc

SEQ ID NO: 417299 - DNA, 408 bp, Oryza sativa
ttttcgtacgtacttgctgctcactatcatgaacaaacagtagctaagctagctatagctacgtttttgttcatatgctgctgttgctgccggctgcttggccgcggggaagcatggcggcggcgatggcgttcctcgcggtggtctgcgcggcggcgatggcggcggtgagcggagcggaggaggtgtacgagttcggctccggcgcgtcgttcatcttcggggactcgctcgtcgacgccggcaacaacaactacatcccctcgctgtccaaggccaacatgacgcccaacggcatcgacttcgccgcctccggcggtatgcccaccggccgcttcaccaacggtcggaccatcgccgacatcatcggagaaatgttgggccagacggactactcgccgccgttcc

SEQ ID NO: 417300 - DNA, 500 bp, Oryza sativa
  unsure (1)..(500): unsure at all n locations
tttccactactggagcagagctgagctgagccgagcaggagtggtatacagcagataagactcttgagtgattcaggcaatcaaggcagatgatgtcttcttcaagacctactcaatgttccagttcatccagcaggacccgccaaagctcccgggcatggatattagcacaaacaactcttgatgctgaactcaatgctgaatatgaagaatatggcgactcctttgattactccaaattggttgaagcacagagaactactggacctgagcagcaagctcgttctgagaaggtcatagcttacttgcatcacattcagagagcaaagctaatccaaccatttggttgcttgttggcccttgatgagaagaccttcaatgttatagcgctcagcgagaatgcaccagagatgcttacaactgtcagccatgcagtgccaagtgttgatgatcccncaaagctacgcattggcaccaatgtatggtctcttttcactgac

SEQ ID NO: 417301 - DNA, 111 bp, Oryza sativa
attatgggggattgtgctagggccctgctcttaagtccctatcacattggacgtttggacactattgataaatattaaacgtagactattaatcaaaaaaaacaaattatc

SEQ ID NO: 417302 - DNA, 388 bp, Oryza sativa
cgttttctctctctgtatctctctctctctctgggatcttgtagagctccagaagcttccaaccttcggcggcgagatgagctcctctcagggaggcggcggccgcggcaaggctaagacgactaaggcggtgtcgcggtcgtccaaggccgggctccagttccccgttggccgcatcgtccgctacctcaaggccggcatgtacgcggagcgcgtcggcgccggcgcccccgtctaccttttcgtcgtcctcgagtacctcgccgtcgaggtgctggagctggccgggaacgctgcgagggactacaagaagaacaggatcgtgccgcggcacatccatcttggcggtgcgcaacgacgaggagctgagccggctgctgggcaccgt

SEQ ID NO: 417303 - DNA, 392 bp, Oryza sativa
tttctcgcaagccaatgtctcgggttaccctgacactggtgggcaggttgtctacattttggaccaagtccgtgctatggagaatgagatgcttctgaggatcaagcagcaaggtctcaacattacaccacgcatccttattgtcaccaggttgctccctgatgcaactggcaccacctgcggtcagcgtcttgagaaggtccttggcaccgagcacacccacatcctacgtgtgcctttcagaactgaaaatggaattgttcgcaagtggatctcacgttttgaagtctggccgtacctggaaacattcactgatgatgtcgcgcacgaaattgctggagagctccaggccaatcctgacttgatcatcggaaactacagtgacggaaacc

SEQ ID NO: 417304 - DNA, 534 bp, Oryza sativa
tttctacacctcattttccgcttgcatcttgctcattcagatctcttctgctttgagcaatggccaacctcaccgacctcgttaacctcaacctcagcgactgcagcgacaagatcatcgccgagtacatctgggttggaggatcgggcatagacctcaggagcaaagcgaggactgtgaaaggccccatcaccgatgtgagccagctgccgaagtggaactacgacggctccagcaccgggcaggctcccggcgaggacagcgaagtgatcctctaccctcaagccattttcaaggacccgttcaggaggggcgacaacatccttgtgatgtgcgactgctacacgccacaaggtgagccaatccccactaacaagaggcacagtgccgccaagatcttcagccaccctgatgttgttgctgaggtgccatggtacggtattgagcaggagtacacactccttcataggatgtgaactggccccttggctggccagttggtggcttccctggcccacaggaccatactactgg

SEQ ID NO: 417305 - DNA, 527 bp, Oryza sativa
tttcattcccaactcatcgatccatcagtagctagctagctagctagctgcattgtccggcgagagagatagctgctgcagggggcggccatggggaggggcaagatcgagatcaagcggatcgagaacgcgaccaacaggcaggtgacctactcgaagcgccgcacggggatcatgaagaaggccagggagctcaccgtgctctgcgacgcccaggtcgccatcatcatgttctcctccaccggcaagtaccacgagttctgcagcccttccaccgacatcaaggggatctttgaccgctaccagcaagccatcggcaccagcctttggatcgagcagtatgagaatatgcagcgcacgctgagccatctcaaggacatcaaccgcaacctgcgcaccgagatcaggcaaaggatgggagaagatctggacgggctggagttcgacgagctgcgcggtcttgagcaaaatgtcgattgccgcctcaggaggttcgcacaagaagtatatgtgatcagacaagactg

SEQ ID NO: 417306 - DNA, 501 bp, Oryza sativa
cctttcgccaatcacatcgcctcctccgattcccaaggattcttcccgctctctttccttccttccccattcatccgcttcttcttcttcttcttattcttctttcttgttccgatcggggattcggatttggggattccgaggcagcggccgcggcggaggcggagagagggagaggatggggtacgtggggcagcacggggtggcgacgctgcggaggtacaagtacagcggcgtcgaccactcgctcgtcgccaagtacatcctccagcccttctggtcacgattcgtcaacctcttcccgctctggttcccgccaaatatgattacactgacaggcttcatgtttctattgacatcggcattccttggctttttttattcccctcatctcgatacagcaccacctagatgggtgcaccttgcacatggaatgcttctcttcctttaccagacttttgatgctgtggatgggaaacaagcaagacgtaccaactcatc

SEQ ID NO: 417307 - DNA, 135 bp, Oryza sativa
agcgcccggtttttgtatactgacgcctccatggacattgacgtttactgtttgctccttgacgccaagtagaaaaaggttcgtgcattatgcattgttcatttgggcagtgtgaatgacggcattggccctgcg

SEQ ID NO: 417308 - DNA, 393 bp, Oryza sativa
gttttccttccttcatggagggatgcttggctgccctctgctgctgctgtctcctggacgcctgcttctgaggatagaggcgacgggtgcaagagagctgaagagatttgtttcatggagctgatcaaaccgaactgctatgagaaaatgctgctagatttcgtgttcggcattattacctgttattcgccttgtttatgaacctctctgaacctgatttatttgatcagtgtttgatggatggctaaaactatatagttgtgtactactgttgattccaatcttgctggtggaattcaacccgggttgcggagtgcaagttgaattcgttcttgttatgtctgccatttgatttctttaccattgctgcggggtaacacttgcgttgctttg

SEQ ID NO: 417309 - DNA, 391 bp, Oryza sativa
tcggtttcttcgttcgtgcgagcccactggtgctgctgctgctgccgctcgccgccgccgccggctcgctcccgccggtgccgctctcgacggtcgtcgctgcgggtggtgggcgcggacggtccgcgcgtgcagctggcgtgcgcgaactgggcgccgcacctggagcccgtggccgcggtcggcctgtcgcgccgcggcgtgtgggacatcaccgcgcgcgtggccgcgatggggtccaactgcgtcaggctaacctggccgacctacctcgccaccaacgccacgctggcgagcctgccgctgcggtggccgctggagcgctttggcatgcgggagtccgtcgccggcgtgcgggtcaacaaccccggactgcttgacctgcccctca

SEQ ID NO: 417310 - DNA, 405 bp, Oryza sativa
tctaggttgctcgacaaacaataatatcagttgatactatgtcatctacgcgttggtcactggcaatcaataaacaagaaattgatgacttcacagttcatgtggattcggagaacttggttccactgggtaataagagcgagatcgatgggtggcatacaatccagcttgctggtggtaaggactcaccaacaaaatttcagctaacccttttctgggcaagtaattccaaggatgcattcccaatgcaagtcgaatcagaagatcattctttcttactaaaactaagaacggatgtgaatagagttacaccgctggttggcagggttctcgagaagcttccaagatggtgtgcaccctttggcaagtctacttctccttatacattggctttcttgaccgctc

SEQ ID NO: 417311 - DNA, 448 bp, Oryza sativa
agcaaaagtacaatatcctttgtacggacgcctagctaagctaagctaattaagctctaatttctcttttcttttttcttcgatctccggcgaaaaagtaagtacaatggccgaggtgaacggagccaataacggcaacggccaccacggccacggcaacggcagcggcgctgcggcggcggcggggcggtcgacgagtgtgtcgaggaagatcgagtcggagggggcggtgctgatgcccggggtgtacgacgcgctgtcggcggcgatcgtccagaagaccgggttctacgccggcttcatctccggctacgccgtctccggctccttcctcggcacccccgacgtcggcctcctcacgccgccggagatggcggaagtggcgaggcggatctgcgcgtcggcgcccaacacactcttcatcgccgacgccgacactggtgggggc

SEQ ID NO: 417312 - DNA, 335 bp, Oryza sativa
tttttcttcaagaaggtcattggtgatttcaagcaagcatagtctgtgcctcccgttcagaaaaaggctgctccccctaaggaatcaaaagcaaaggaggccaagatggaggctccgaaggaggcccctaaaccaaaggttgaggcttcagaggaagaggaggcaccaaagccaaagccaaagaatcctcttgatctactgccaccaagcaagatgattcttgatgagtggaagaggctatactcaaacacaaaaaccaacttccgtgaaattgccattcaaggtttctgggacatgcatgacccacagggttactctctgtggttctgggactt

SEQ ID NO: 417313 - DNA, 439 bp, Oryza sativa
tttcttcctccgcgagtgccccaaggggatgaagacgatgagcacggggctgttcctgagcacgctctcgctggggttcttcgtcagctcggcgctcgtcgccgccgtccacaagctcaccggcgaccgccacccctggctcgccgacgacctcaacaagggccagctccacaagttctactggctcctcgccggcgtctgcctcgccaacctcctcgtatacctcgtcgccgccaggtggtacaagtacaaggccggccgcgccgccgccgccggcgacggcggcgtcgagatggccgacgccgagccatgcctccactgatccacaccgtccatccatccatccatcagacggctacgatttcttcttcgcatcttgtactatatatatactagtatactactagtacgtacgtacgtacgtgtgtaccaagcgagg

SEQ ID NO: 417314 - DNA, 469 bp, Oryza sativa
gttcttggatatatttgactccatggacattgacgtttactgtttgctccttgacgccaagtagaaaatggtttgtgcattttgcatcttattttttgtagtgtgaatgacggaattggacctgtgtagtacgttctataagtccttaggttggaaacttggaatagccagcagaaaagacgtatagtgatgtggagttgtgcacgggcttcacttggaaaattttatctggtcccaactcttctcctgggtttgttggctaaccactcgcctaatctagctaggagttcagcttctgcaagtcaggttacacacctaattcattgttcttcatttcataatgttaacctaaacatgataggtttggcattgcggatgtgaacaaggctaatgattgcaacttctcacaagtccacttaattgtctcatctcaaatatatatatatatatatatatatatatatatata

SEQ ID NO: 417315 - DNA, 529 bp, Oryza sativa
ttatatgccttaccatatgcatataaaccttgagcttttggaagccactcacttgatttgtgccatgctgattgaggtccccaatatggctgccagtacttatgacaggaggaagtctatgaacagaacattccgtaggcttcttgagatcagtgagaggcagacttctgtcgggccaccagaaaatgtgagggaccatgtaatggctgcaacaagaaccctccgcaagggtgactaccagaaggctttcgatgtcattaattcgctggagatctggaagcttttgaggaacaaggagcatgctcttgagatgctgaaacttaagatcaaagaagaagctcttagaacctatctatcgtcatactcttcttgctacgagtccctgagccttgaccagctcactacaatgtttgaccttagtgagcaacaagctcatatcattgttagcaagatgatgatgcatgaagagcttcatgccagctgggatcaaccaaccaagtgcattatttttcacaatgttgatcaaact

SEQ ID NO: 417316 - DNA, 381 bp, Oryza sativa
tcctaattcccccaaattttcgtctcccctttgggttccccgtgaagaagagagcggcatccatggcgcccaaggcggagaagaagccggcggcgaagaagcccgcagaggaggagcccgcggcggagaatgccgagaaggccccggcggggaagaagcccaaggcggacaagcgtctccccgccggcaaggcctagaagagcagcggcgaggggtagaaggctctgcggaagaaggcgaagaagagcgtcgtgacctacaagatctacatattcaaggcgctcatgcaggtccaccccgacatctggatatactccaaagccatgtccattatgaacttcttcatgaacgacatcttagagaagctcgccggggagttcg

SEQ ID NO: 417317 - DNA, 438 bp, Oryza sativa
tgtgatacaaacagagagcaattctcttctcctacctagctacctagtgcagtgcagtgcagtgcatcgaaggtttacttggcgacttccatgggttgcctgttgatgctctgcttggtttctcccctcctcctcgccacctctgtccacggcaacccgtggtatgggtatgggtatggcttgttcccgcagttctacgaccactcgtgccccaaggcgaaggagatcgtgcagtccatcgtagcacaggcggtggccagggagaccaggatggcggcatccttggtcaggctgcattttcatgactgctttgtcaaggggtgtgacgcgtctgtgctcctggacaacagcaccaccattattcagtgagaaagggtcaaaccccttacatgaactccctcaggggtttcgaggtcgtcgacaagatcaaggccgccc

SEQ ID NO: 417318 - DNA, 515 bp, Oryza sativa
ttttcattttatatctaagggaagtagatgatgctgacaagctggttgcagctatccaagcaaagaagggtggaaaggcagttattgtaggaggaggttacattggtctagaacttagtgctgcattgaagatcaatgattttgatgtcacgatggtgtttcctgaaccttggtgcatgcctcgtctcttcactgctgatatcgcggctttctatgagagttactacactaacaaaggagttaagatcgtgaagggtacagtagctgttggttttgatgctgatgctaatggtgatgtcacagcagttaacctgaagaatggcagtgtgcttgaagctgatattgctgttgttggtgttgggggcagaccgctgactactctctttaaaggtcaagttgctgaagagaaaggtggaattaagaccgatgctttctttgaaacatgtgttcctggagtctatgctgtccgtgatgtggccaccttccccatgaagatgtacaatgagttgaggaga

SEQ ID NO: 417319 - DNA, 473 bp, Oryza sativa
ttctttctcctccccttccctcccctcccccgcgcgcggtggtggttcgccggagcgcagcagcagcagcagcaaaaggccgcgagggccgccgtcgggatccccgccgccgccaagatgaacgacgccgatgtcgccaagcagatccagcagatggtgcggttcatccgccaggaggccgaggagaaggccagcgagatctccgtctccgccgaggaggagttcaatattgagaagcttcaacttgttgaagctgagaaaaagaagatcaggcaagaatatgaacggaaagagaagcaagtcgaagttagaaagaaaattgagtactctatgcagctgaatgcttctcgcatcaaagtgcttcaagctcaggatgatttggctaattccatgaaagaagatgctacaaagcaactcctgcgtgtcagccacaaccaccatgaatacaagaaccttttgaaagaactcgtcgt

SEQ ID NO: 417320 - DNA, 416 bp, Oryza sativa
ttcttcttttggtgaagatgaccaccgtgtttgtcttgctgctggtatcattgaggccagtgggcttgttgtcgccgttgatgatgatggctgcttcattgaaaagatatctgagttcagtgggcgatatgtcaaagaggctgacagggatatcatcaactctgttaaggattaaggaagacttgtcagtaaagggagcattgaacactcttatccattttgctggcgctcgggcactcctcttatttaccgggctgtcccaagctggtttgcgaaggttgaaaagattagggaccagttgctggaatgtaacaagcagacctattgggttccagattatgtttaggaaaagcggttccataattggcttgaaagtgctagggattgggctgttagcagaagtagattcttgggga

SEQ ID NO: 417321 - DNA, 525 bp, Oryza sativa
gtccgcctaaagaaatatactcacacacttcttctgcttccctccccttgtttccgctccacttcccttccaagcaagaaaaccgaggcttcagcttagctaggaccgaccgatccgatgtgcggcggtgcaatcatctacgactacatcccggcgcgccgccggttgtgcgcctccgacttctggcccgacgccgacgactccgacccccacacccccgctcccgagaaaccgccgcgcgcgatgagggagcggaagaaccagtaccgcgggatcaggcagcggccgtgggggaagtgggcggcggagatccgcgacccggtgaagggggtgcgcgtctggctcggcacctacccgaccgccgaggccgccgcgcgggcctacgaccgcgccgcgcgccgcatcaggggcgccaaggcgaaggtcaacttccccaacgacttcggcgccgcccccgcgccggccgcggcggcggcgaaggccgttcctcgcgtcgcgcccacgccggccgtgctcccgccgccc

SEQ ID NO: 417322 - DNA, 495 bp, Oryza sativa
tttggcgccacgtttaaagggcggagtcgctgtaattagagaagaggatttaaagagagagaaggccattctctcttgattgcttggagaggaagaagaacaagagccgccaccgccgccgttaggttttttatttattttttttctcgatctgatccgaggaggagcgaagcgaagaagggcaagatgcattcgacgaatctgctgctggaggagcccatcaggatggcatccatcctggagccatccaagcccagcttcttcccggcgatgaccaagatcgtggggacgctggggccaaagtcgcgctccgtcgacaccatctcctcctgcctcaaggccggcatgtcggtggcccgatttgatttctcgtggggagacgccgagtaccaccaggaaacccttgagaacctcaaggtcgccatcaagtccaccaagaagctctgcgcggtcatgcttgacacggtctgcccagagttgcaggtggtgaacaag

SEQ ID NO: 417323 - DNA, 437 bp, Oryza sativa
ttcttctgtagttgactgacagtgatagtggcagtcatgctggtcgtgggaaccgtgcgtgtcagtggctgcggcgcggtggtggcgccctcgcgccggcagtgccacgtgtccgcggcggtgctgacggccgcggagacggcgacggcgacgcggcgccgcgtgacgcactcgatgccgccggagaaggcggaggtgttccggtcgctggaagggtgggcgaggtcgtcgctgctgcctctgctcaagcccgtggaggagtgctggcagccgacggacttcctgccggactcgtcgtcggagatgttcgagcaccaggtccacgagctccgtgcgcgcgccgtggggctccccgacgagtacttcgtcgtgctggtcggggacatgattaccgaggaggcgctgccgacgtaccagaccatgatcaacacgctcga

SEQ ID NO: 417324 - DNA, 453 bp, Oryza sativa
ttcttccttctccgcctccgctgagctctgaccgcttccgccatggccgcctcgcgggggccgccgcttctagggttccgagccctcgcgctcgcgctgctgctcgcgatcctcctcttgctcggctgctccgcccccgccgcgtatgcgggggcggagggggtgctgaggcaggtggttgttaggaggggcgactactgtggtggtgggaacttcttcgagccgttcaacgtgacgtacgaccaccgcgcggtgctcatcggtgggaagcggaggatgctcgtctccgcggggctgcactacccgcgcgccacatccgagatgtggcctagtttaattgcaaagtgcaaggagggtggcgcagatgtaattgagacctatgtcttttggaatggccatgagccagccaaaggtcagtattactttgaagaagatttgatcttgtgaaatttg

SEQ ID NO: 417325 - DNA, 544 bp, Oryza sativa
tacacatctcctcatctcttggcggcggcggcggcggcgatgggcgcggtatcggtgcaaccaacggcggcggcggcgaccgccgagcaggcgcaggatctcatcgacgccgctaggtacgatgacctggaggacgtcgtcgcgctgttcaccgccggtgtttccctagactccgtggattcgcaaggacgaacggcacttcatatggcctctgccaatggacatctcgctgtggtgcagtacttgatccaaaatggagcgaatgttaatgctacaaactcagagaagaacacacccctccattgggcatgcctcaatggacatatcgaggtaattaaagcgttgatatgcgctggggctagtgtcagtgcactgaacagccatgagaaaacccctatggatgaagcagtgacgaagggcaagatggaggtgatcgatgcaatcggtgcagcagtagctcatgcagaactcgatggtgtcactgtctcctaaaaggacttggtactcctttctgacggtcctctccttgacaatggatgacata

SEQ ID NO: 417326 - DNA, 512 bp, Oryza sativa
ggggatctctacgatgatggattccgtggttgtcatcagagatgatacgcttgcagcatccaccaaggcagttctgatcacttttagtgggtcaatgataccagccttcaccatgtccacatattcacctttagccgcatcatagccaaggtcggtgttatcttgttccaaaagcttaccgacaacaacagccccttctacacctgcgttggaagcaatagtgtgcaccggtgtcttcaaagcattctgaatgatttgtacaccaatcttttgatcaaagttagcagtcggcaatttatccagctcctttgatgcataaagaagtgcaacacctccacctggtacaataccctcttccacagcagctttagtggcattcaatgcatctgtcactctatccttcttctcaccaacttcaggttcactggctcctccgatctttagaacagcaacaccttcggagagctttgccaaccgctcctgtagctttttcttgtcataatcagaagtgc

SEQ ID NO: 417327 - DNA, 479 bp, Oryza sativa
tctcttcctgcctagccccaggtcgctgctcggctccgccatgtaccgcgcggccgtcagcctcgcctccaaggctcggcaagccgggagcagcgctcgccaggttggaagcaggcttgccttgagcaggaactatgctgccaaggatatcaagtttggagttgaggcccgtgctttgatgctgaggggtgttgaggagttggcagatgcagtcaaagtgacaatgggtcctaagggacgcaatgcgggtattgagcagagctatggttcaccgaaagtcacaaaggacggtgtgactgttgccaagagcatcgagttcaaggatagagtcaagaatgttggtgcaagccttgtcaagcaggttgctaatgcgaccaatgatactgctggagatggtaccacttgtgctactgtattgactaaagcaatatttactgaggggtgcaagtcatgtgctgctggcatgaatgcaatggatt

SEQ ID NO: 417328 - DNA, 481 bp, Oryza sativa
tttcgttacattggaaacagccaagctactaagggatgattacttggcacagattgcatttaccccatatgacaagttctgtccattctacaagtctgtttggatgatgcgcaacattattcatttcaatacattagcaaatcaggctgtggagcgtgcagctaatgctgatggacaaaaaataacatacagtgtcataaagcatcgtatgggtgatctattttatcgcctagtatctcaaaagtttgaggaccctgcagagggtgaagatgtcctagtcgcaaaattccagaaattgtatgatgacctcacaaccggattccgcaacctagaagatgaagctaggtgaagtgctgtaaattgaggatcacattcgtgtcaacaataaaatatcaccagatattcgaagcgagttggggctatttattttgcttcgcgtgaggttgttgatgtgaattacgtttcagaatcattatttttt

SEQ ID NO: 417329 - DNA, 441 bp, Oryza sativa
ggggcgggggcgtgggaggccgaggcgtcgggggtgttccagatcaacacggcggtgtcgacgttccagcggctggtcaacacgctcggcacgcccaaggacacccccgacctccgcgagaggatacacaagacacgtcaacacataacacaactggtgaaggacacatcggtgaagcttaaacaagctagcgaggctgatcatcgtgtcgaagtcagcgccagcaaaaagattgctgatgcgaagctagcaaaggatttccaagcagttctgaaagaatttcagaaagctcaacggttagcggtagaaagagaagctgcttatgcacccttcatttctcaagcgggcttgccacaaagctataactcgagcgaggtgaacaatggtgctgataagttggctgagcaacgcacggcgcttttagaatcaagaagcaagaat

SEQ ID NO: 417330 - DNA, 444 bp, Oryza sativa
actgaccaacttaagcaactattataatgcaaagaccaaactcctcgttcttacaacactcactcaacgatacatcacaggatataaacaggggcgagcgagcaaggcaggaggcactagagtgacaccaagcgattatacttaattacttatatataaaccatgcattccagacacaccattcatcatcacatacaccaccatggcacaagaccagaacgcaaccccctcctccaggcaggagatcaggatacattcccgacttcacagcaaaattaaatcaggaaggaatacttcgctctaagctcaaccagatctaggagtcccatgttcttccaggctgctgactaggctgcgaggacgattatcactatgagcaggaccaccccgaatataaccagcaacaagcatatcagcgaagagttcgacttctgagttttagca

SEQ ID NO: 417331 - DNA, 420 bp, Oryza sativa
ttctcgatttcagctcaggaagcctctgctactttgcttggcctgtacagtaatacagataaagacctgcagttctttggtctctttagtgaggactgaggagtttggttggagattgttgaggagatgggcatcgtcgacgttgtctccgagttctgctccgtgccgaggactcgccgacacctcaagaagaggaaacaattccagacagtggagatgaaggtgcggatagactgcgaaggctgtgaaaggaagatcaagaaggcccttgaggacatgaaaggggtgagctcggtggaagtgacggcgaagcagaacaaggtgacggtgacggggtacgtggacgccgggaaggtgatgcggcgcgtggcgtacaagaccgtgaagcgtgtggagccatggtcatacgtgccgtacgac

SEQ ID NO: 417332 - DNA, 352 bp, Oryza sativa
gggcgcccttttttttttttttgtggaacttaataatcagtgcgatatttcaccgagggtaatgtatggtaggaaaatcgccagacataacagagccggccagactcaactgaaactcaaccctatgatgggaaactgtttgcgattaacgcctccgcctatgacaatgtttggagataaacgcttccaccaaaaaacgaatgtcggggagtgttctcccctacaagaattattattggtttcaatgttaaaaaggcaaaattcaccagatcccgctagggcaggaccaggaataaacacttggtcgtcatcattttctgccaatttaggcaccggccgggccgtacttctt

SEQ ID NO: 417333 - DNA, 501 bp, Oryza sativa
tacgtctctcgctctctcctctctctccctcttccgccgccgcgcttggggaaggaaggagaaagcaagccatcggcccccgcctccgcctccgaagggacattgttgctagttggtgatggctgagcaggctaatcaaccgactgtccttcagaagttcggtggccagttccaccttggctccagcttttctgaaggtgtacgggctcgcaacatctgcccatctgtctcatcctatgacaggcgctttaccacaaggagctacatgacccagggccttgtcaatggtggcatcaacgtcccaatgatgtcgtcctctccaatttttgctaatgctccagctgagaaaggtggcaaaaacttcatgattgatttcctcatgggtggagtgtcagccgcagtttcaaagactgctgctgcttccgatgagcgtgtgaagctgcttatccagaaccaggatgaaatgatcaagctggtaggctctcagagccatacaagggt

SEQ ID NO: 417334 - DNA, 423 bp, Oryza sativa
ggggggagtagcaagcaatgcacagcaaaatgggaagatatgaacaatcatggccaacgaggggctaacaacagtttagcacagtacaaaaagtaaacacacataacaggaatatgcaatgcaacggaaccggagtatactgacaaaccaatcattaaccagagaactacttattaaccagctactaatagtcttctccatcgtcgttctcgtcgtctgcaccctcggcgccgacttcctcatagtccttctcaagggcagccaagtcctcacgggcttctgagaattcaccttcttccattccctcaccaacgtaccagtgcacaaacgcacgcttagcatacatcaagtcgaacttgtggtcgatgcgcgagaaaacctcaacaacaacagtgttgttgctgatcatgcacactgcacgct

SEQ ID NO: 417335 - DNA, 509 bp, Oryza sativa
gagagttcatcagcatccacatcggccaggccgggatccaggtcggcaacgcgtgctgggagctctactgcctcgagcacggcatcgagcccgatggcaccatgcccagtgatacaacggttggcgtcgcacacgatgcgttcaacactttcttcagcgagacgggcgctggcaagcatgtgcccagggccatctttgtcgacctggagcccactgtcatcgacgaggtgcgcactgggtcgtaccgtcagctcttccaccctgagcagctcatctctgggaaggaggatgccgctaacaactttgcccgtggccattacactgttggaaaggagatcgtagatctatgcctggaccgtgtgcgcaagttggcagacaactgcactgggctgcagggattcttggtgttcaatgctgttggtggtggaactggatcaggacttggttctcttctgttggagcgtctcttctgtgattatggaaagaagtccaagcttggcttcacaatt

SEQ ID NO: 417336 - DNA, 554 bp, Oryza sativa
ttcgtttccttcccctttcccccctcacctgtctggtcttctccgccgcaccaatccgccccctcgcgattcgaccagatcggcgcgagggcatatcatggcattgaagcggatcctcaaggaactaaaggacctgcagaaagatcctccaacatcatgcagtgcaggtcctgctggtgaggatatgttccattggcaggcgaccattatgggtcctccagatagtccctatgctggtggagttttcttagtgaatattcatttccccccggactaccccttcaagcctccaaaggtatcttttaagacaaaggtcttccatccaaacatcaatagcaatggaagcatatgccttgacattcttaaggagcaatggagccctgctttgaccatttctaaggtgttgctttcgatctgctcgctgctcactgaccccaacccggacgaccctcttgtccctgagattgcccacatgtacatgacggatcgtccaaagtatgagacgacagcccgcagctggacccagaagtatgccatgggatgatgaaacccac

SEQ ID NO: 417337 - DNA, 511 bp, Oryza sativa
tccgcgcccccacacctcgcctcctcctcggcttggatctcgccgcatcatctgccgccgacgacgacgaagaggaagacgaccgccatggggacggcgagcggggaccagccggcgggggcgtcgtcggacaagctgcggcacgtggagtccatgtcggagctgccctccggcgccggcaggatctccgggatcaacgccgtcgtcctcggcgagtcactcgccgccgaggagcacgacctcgtctacccctccgccgagttctccgccgacgccctcgtgccctcccccaagaagtaccaaaagatgtatgagaggtcaatcaacgacccggccgggttctggtcggagatcgccgacgccttctactggaaggagaagtggaaccccagtgaggtctgctccgagaacctcgacgtcaccaaggggcctgtccagatcagttggttaaaggtggcaaaacatacatatgttacaatgctgctgatcgcaacatcgaggctgggaacgg

SEQ ID NO: 417338 - DNA, 514 bp, Oryza sativa
tttttgtattaaaccactatttttattcatgccaaacaccagcactagtccagtgacaaccaaacgacaatcctacactccaaaagtttacatttaggttctcaaatagtggtacatagctttgagagttgaaaccgtcagatactgacatagtttatgaggtgcccctggagttggcaaaaacttcacgaagattgtcgcagctctggacgcacaaagtctgcatcagcaggcactgaaatgtcaacggtgggcctcaactgagcacagacttcaatggcactatggacgggatcggagaagaaattgctgatgaggtcttgattaactggagcattcttgtcaacagtcacaaaagcttgttgggtcaagatgtagtcgaagcgtggcgcccatttccttgatcccaaccgggctgttgtggagcagttatcaaccatgaaggccaccccacgagcgtgcatgaatgggttcagggaatccacagactcgatcaaactctcgttgatgatct

SEQ ID NO: 417339 - DNA, 539 bp, Oryza sativa
ttcctcgcatcccaaaatggcggcggccacctccacttcctccaccgcgctcgcccaccccaaaaccctaaaccccgccgccgccgcggcgccgtggccgccaaggtctcgtcgccgcaggtgatcggggccaccatgccgtcgctggacttcgagacatccgtcttcaagaaggagaaggtgtctctagctggccatgacgagtatattgtgaggggcgggaggaatctgttcccgctgctgccggaggcgttcaaggggatcaagcagatcggcgtaatcggatggggttctcagggtcctgcacaagctcagaacctgagggactcacttgctgaggcaaaatcagatcatcgttgttaagattggtctccggaaaggttctaaatcttttgaagaagcacgcgcagctggatttactgaagagagtgggacacttggagatatatgggagactatctcaagtagcgatcttttgttgtggtgatatcagatgctgctcaggcggataactatgaggaaattttctcacacatgaa

SEQ ID NO: 417340 - DNA, 480 bp, Oryza sativa
tttttgttgatgaaaatccacgtccatatatattgatcataaaggaggttgtcatgacgtcatgcatttattcgacatggcagtaaccaacatatatccacagtcgtcgtcgtctctttccacattcaacgtacggtacacgtactgacgtacgcgtccatggcgcgcacaattgtgtgtctagagcacgatgctctcggccgcctcgacgacggtctccacggcggcggaccacgggagctcctcgtcggcggcggcggcgccggggttgcggacggagcagtttgcccggatctgtccctgcgagccggtgagcacctggatctggcccatcttgacgacggagaagacgaactggtggaagaacgccgactggtcgacggcgaacttggtgacgagcggcttggtggtggcgttgaccaagaggtcctggtcggaggtgaagaggccctgcggttgagcaggtcgacgtagtacttg

SEQ ID NO: 417341 - DNA, 472 bp, Oryza sativa
ttctcgtttcgatctccattgaaatcaaggcaccttggtaatttctagtaccatattaagctaagaacagtagtgtacatggcttctcgtagaagtgcagcagctagtccggccatggcagcagcagctgcggtagtagctgtatctgtatacttgctggtgtgcagtgctccggcggcggcggtggcgaagaagccgtcgtacccgccggtggcgaaggggctatcgttcgaccactacaagaagagttgcccgcaggcggaggccatcgtgttcagcttcctgcgcgacgccatcggcaaggacgtcggcctcgccgcggtgctgatccggctccacttccacgactgcttcgtacagggctgcgacgcctccatccttctcaccaagacgcccggcgggcccgacggcgagcagcaggcgatacccaacgagtcgctgcggccggcggcgttcaaggccgtcaacgaca

SEQ ID NO: 417342 - DNA, 508 bp, Oryza sativa
tttagtgtgaaagaacctctctgcagtgctgctgctgctagcttgcagaaaaaaaaaactctcatcttttgcaggaagagacatcactgtttctgcattcgtgtgcatttggattaagctttgcttatccctttttagtggagattgttgagtatatcaggtctatatattggcagctctggttggagatagacactcacactgagccaagatggggagtttgcacaagttcagtgttattctcctcatgttatgttttgctacgttggggagcgctcagtatgtcaagtataaggatccgaagcagcccgtctctgttcgtgtcaaggatctgctcggccggatgactctcgctgagaagattggccagatgacccaaatcgagagggagaatgccacggcggagcagattgccaagtacttcataggtagtgtactgagtggtggaggcagtgtgcctgctcctcaggcatcagctcaggcttgggcttcatggtgaatgaaatgc

SEQ ID NO: 417343 - DNA, 528 bp, Oryza sativa; identical to SEQ ID NO: 394681
  unsure (1)..(528): unsure at all n locations

SEQ ID NO: 417344 - DNA, 480 bp, Oryza sativa
  unsure (1)..(480): unsure at all n locations
aaaaaatattgaaagatgagtttacactactaaaaaactctcatagagaccggttcataggtgccggttcatttaaaaccggcacctatagagcttttcctacctccttgcggtgaaaaaatgtagaaccggcacctttaagaacatttgaaccggcacctataatatagatgctggttttttaaaagaaccggcacctaataatttttataggggccggttgtttttaaaaaccagcacctatagcgtttggccgagctgattcgagccgagcccacgcacggcacccatcgcgtccttatctatccctccccttctcgatctctcacgtctctctaactctgctctctctctctctcgctgtcctctctctccctcccctctcccgccgtctngcggtcggcggctggccagcggaggcggcagcggtggtcgcgccctcccctccgtcagatccggcnggaggggaggcggtgggct

SEQ ID NO: 417345 - DNA, 443 bp, Oryza sativa
tttgcggctagatcgcgagcggccgcggttttttttttttttttttttttttttttttttttttttttttttacagggtagcgaccatatcttaaaaaagccgtttgctttgccgccatggctggcaagctgagcagagcagctaacacaaagaacacgagatcactattaaccaaacgggaacgaacgaagaaaataccgggtcttttttggctgaagatacacgaagcggttcgttttcttttatttttaggctcctctcctcctcaatgatgggggtatggcaatggcaatggcgaagggaccttggcttatttgatgggaaggggctcgccgtcccactccttgaggcattccagcatggggtcgatgagcttgccctggctgatgccgaggaacaccttgtggcacttctctccgggggacttgatctttttgccggg

SEQ ID NO: 417346 - DNA, 528 bp, Oryza sativa
tcttttcctccggctcttcttcagtatcgaatcctctcttctcctcgtgcccaccaccaccaccgtagcaatggcgggcaacgggccgatcaacatggaggacccgctcaactggggcgcggcggcggccgagatggccggcagccacctcgacgaggtgaagcgcatggtggcgcagttccgcgagccgctggtcaagatccagggcgccaccctccgcgtcggccaggtggccgccgtcgcccaggccaaggacgccgccggcgtcgccgtcgagctcgacgaggaggcccgcccccgcgtcaaggccagcagcgagtggatcctcaactgcatcgcccacggcggcgacatctacggcgtcaccaccggcttcggcggcacctcccaccgtcgcaccaaggacggccccgccctccaagtcgagctcctcaggcatctcaacgccggaatcttcggcactggctccgatggccacacgctgccgtcggagacggtgcgggcggtcatgctcgtgcgcatcaacac

SEQ ID NO: 417347 - DNA, 425 bp, Oryza sativa
ttttggtttttttttttttttttttccgcaaatacttattcatatgttttgacaacatttctcccgacgcatgctcattggggcagacgcagctgaccacctagagcttttagttcaccattattatttagaccaagcatacgtcccaagatcagaacacatgcttacaagcgaaaatactaatagcctggctggctgcttcacagaataaccaaacgacaacctcaacagataaaaaggccacggaatgaaaacaaagcagcgaatcgtcaccagaagtcccattttactcataaaacactccatcattgtgctgcaacgcatccttttcccaggggagaagattgcccagtttaccttccttaacaggagcagggttcaccatattctcagcctcgaagcagtgcaaaacagatttgggcgac

SEQ ID NO: 417348 - DNA, 484 bp, Oryza sativa
tttagaactcccccccctcctcgctccccgccgccgccgccgttttcttggagaggagaaatccgtaggctcagaggatttttggtagtcttgtttcgtgatattcgtgaagagggggggagctaaggggggattcgtaagatcagaattggatcacgcgggggcgcgctcgggatcgggggttccaaacacagcttcttcgttgaatttaagtggatgtactaatggagtcaaagggtggcaaaaagaagtctagcagtagtcgttccttgatgtatgaagctccccttggctacagcattgaggacgttcgacctgccggaggcgtgaagaagttccagtctgctgcttactccaactgcgcgaagaagccatcctgatagccctttcggcttctccatcctagtagtttaagatttcttgcaattccattttggcacttttcttctgacctatttctctggctgctgcttcctgataatcg

SEQ ID NO: 417349 - DNA, 392 bp, Oryza sativa
ttttgggaggttcaaatccaacttattcataaagcatactgctgtcccacaggaaactgtttcataaaactaacatatcatacggactcgatggtccattaaaccagacacaggtatacattagcaccacaaatacttgacgaacataggctcgggacgaccaggcacatccgaaggtccaccaaactggctgattactgaccaccacgtaggcggatcaccaggtggcgggtggactccttctgtatggtgcaaaccgtgagggagcattcatcctccagctgcttgccagcgaagatcagacgctcgtggtctgggggaatcccttatttgtcatggatcttgggctttagattatcaatggtgggggggttatcaacctccaatgcgat

SEQ ID NO: 417350 - DNA, 475 bp, Oryza sativa
tatatttctccccaatctcgcgaggctctggtcgtctaatcgaatcctctcgcgtcctcaagatgcagatctttgtgaagacattgaccggcaagactatcaccctcgaggtggagtcctctgacaccatcgataatgtcaaggctaagatccaagataaggagggcatccccccggaccagcagcgtctcatcttcgctggcaagcagctggaggatggcaggacccttgctgactacaacatccagaaggagtcgacccttcaccttgtcctccgcctccgtggtggcatgcagatctttgtcaagactctgaccggcaagactatcacccttgaggtggagtcttctgacaccatcgacaacgtcaaggccaagatccaggacaaagagggcatccccccagaccagcagcgtctcatcttcgccggcaagcagctggaggatggcaggacccttgctgactacaacatcca

SEQ ID NO: 417351 - DNA, 324 bp, Oryza sativa
tgcctagatcgcgagcggccgccctggtggggcttctttaaaggagaaggtctttgaaaccaagcaagcggtcctcgtccaccgccacgaatgaccatggaagccaagggccacccgacgatcacgatactcacgcgactgacattcagaacatcaccggccacaccaacgctgaggacaggtggccagaatgagaccagaaccgcaaggggggcgccatcgtcatacccaaagacagaaggaccgccgatggtggagcatgagccaaggcccgctacaaggtggcggcagaggcccaaaaaggtggggacaggcaagatggga

SEQ ID NO: 417352 - DNA, 484 bp, Oryza sativa
tttttgttcaggatcaactaccgttttcgatgtttattgacatgaaaattccagtggttctcactcccagcaacgaacagaaatgaaaatgaaagtggatgaagctaccaaataccagtagcccaatacgccagtctctcccggtgtgttacaaaactggaccttattctctacaacgctcagttgaaatggtagagcggcagctcggcgttgagcgggtgcgacatcaccgtcagcacgtcggtcaccgacagcatcgagctaatcgccgccttcagaacctcccgcgagcatccaggcttcaccatcgtcctcaccttgctgagacagtctttcagtatctcaatgtcgcccatgtagtcttggttctcaatggtcaatgtgatgggttttgcattgcaacccgggccttcatattgaatgcctcctggagtcctgtagaaatcatcaaggagaaaacttgatgctttctctcgcagcaact

SEQ ID NO: 417353 - DNA, 537 bp, Oryza sativa
gcgctgcaccatttgtttctacccaagatcaacaggaaccagagagagagatgaacgccgacttcggcgcgcccaaggacctcgcggggggcctccagcagcggaggtctctctaccagcccaccctccctccctgcctccagggcgcaacggtgaaggtggagtatggcgacgccaccaccaccatcgacccaacctgcgccaacgtcgtcgcgcaggccttcccccgcacctacggccagccgctcgtcagcttcgtcgcgccgccgcccgacgccgtcgacaaggaccgcgccccgatcagggtaggggtggtgttctccggcaggcagtcgccgggaggccacaacgtgatctggggactccacgacgctctcaaggcttacaatcctcatagtgttctctatggattcgtcggtggcactgagggactgtttgcgaacatgacaatcgagatcacggatgatgttcttgctttatacaagaaccaggtggttttgatttgctcggtagaagtatcgatcagatccgcagcac

SEQ ID NO: 417354 - DNA, 362 bp, Oryza sativa
ttaaggccagcggggactgggtcatgaacagcatgaagaacgcgcccgacagctacagcgtcaccaccggctgttggccacctgccaccgccgcaccaaggaggggggtgcgctacagagggagctcatcacatccctcaatgccggcgccttttgtaccggaaccgacgggcacgttctgccggcggatgcagacagcgcgcggcgatgctacgccgcatcaacaccctcctccagggttactccggcatgacgattacgatcctcgaggccatcaccaagctgttcaaagccaacggtacgccgtgcctagggctcaggggcaccatcagcggctccggtgacttgggcccactgtccta

SEQ ID NO: 417355 - DNA, 418 bp, Oryza sativa
ctcgtcgtcgcagatccgatccaggaagagctcgccgccgccgctgccatggcgctctccgtggagaagacctcgtcggggagggagtacaaggtgaaggacctctcccaggcggacttcggccgcctcgagatcgagctcgccgaggtcgagatgccggggctcatggcgtgccgcgccgagttcggcccctcccagccgttcaagggcgcccggatctccgggtccctccacatgaccatccagaccgccgtcctcatcgagaccctcaccgcccttggcgccgaggtccgctggtgctcctgcaacatcttctccacgcaggaccacgccgccgtcgtcatcgtcagggactccgccgccgtgttcgcctggaagggggagaccctcgaggagtactggtggtgcaccgagcgct

SEQ ID NO: 417356 - DNA, 476 bp, Oryza sativa
ttatcttggtaccttaataatttctagtaccatattaagctaagaacagtagtgtacatggcttctcgtagaagtgcagcagctagtccggccatggcagcagcagctgcggtagtagctgtatctgtatacttgctggtgtgcagtgctccggcggcggcggtggcgaagaagccgtcgtacccgccggtggcgaaggggctatcgttcgaccactacaagaagagttgcccgcaggcggaggccatcgtgttcagcttcctgcgcgacgccatcggcaaggacgtcggcctcgccgcggcgctgatccggctccacttccacgactgcttcgtccagggctgcgacgcctccatactcctcaccaagacgcccggcgggcccgacggcgagcagcaggcgatacccaacgagtcgctgcggccggcggcgttaaggccgtcaacgacatccgcgccctgctcgacagggcgtgc

SEQ ID NO: 417357 - DNA, 341 bp, Oryza sativa
gacgagcggccggggttttttttttttttttttttacaggcaatgaccagttgatgtattgagaaactttttacttgattcattacaggagtacatgtcaaaccagaacaaataaaacaagaaaccatacgaacactttgggagaacatgtatttctactttaatactactatggcagtcgatgtgatcagaagtcctcgtcgatgctgaagacatggttgcaagaagcgccgccgttgaggctggacattacggacgccttctggtagtcgccgacgcgcttttcgaagaaattggtcttgccctgcagggagatgagctccatccaagtcaacgggttg

SEQ ID NO: 417358 - DNA, 487 bp, Oryza sativa
ttccaatccccaaaccaccagatcgaatcgcggttgccgcggcggaggcgaggaggaagacgaggatgccggcggcggcggcggcgaagacgctggtgccagcccgcggcggcggcgacatggaggagccgctgctggcggagtcgtcggatcgcttctcgatgttcccgatcaggtacccgcagatctgggagttctacaagaaggcggtggcgtcgttctggacggcggaggaggtggacctctccgccgacgcgcgccactgggacgccgcgctgtcgcccgacgagcgccacttcgtctaccacgtgctcgccttattagcgggctgcgatggcatcgtgctcgagaacctcgcctccaggttcatgtgcgacgtgcatgtcgccgaggctcgcgccttctacgggttgcagatcgtgatggagaacatccactcggagatgtactcgcttctgctcgagacgtacatccgcgacgacgtcga

SEQ ID NO: 417359 - DNA, 506 bp, Oryza sativa
  unsure (1)..(506): unsure at all n locations
ttagtaccagtactcaccacctacgcggtcgcccaccgcgccgtcgccggcgccggtcagcccctcaccgccgcctcccgttcgccaacgacgtcgtcgccgtcggccctatcccccgtcagctccgtcaaaggcacggagaaacgaacaaacgcgagagagaaaacaagaagaggaggaggagccgacgcaaccgaggccccagttccgattgatctccggttcccagatcggccagcaatggcttcatcttcggacccatggatgaaagagtacaatgaggcatctaggcttgctgatgatatcaattccatgattgccgatagagggtctcttccacaatcaggcccggaaattatacgtcacacatcagccattcgaagaaaaataactattctttgtactagactggatagcttggaagcattgttgtccaagattcctccgaagtcactcagtgacaaggagttacacatgcgccaagacacgctntncaatttgaatct

SEQ ID NO: 417360 - DNA, 502 bp, Oryza sativa
  unsure (1)..(502): unsure at all n locations
ttaaaaccagcggaggcggagcagaaaacagcagccatggaatcatccatccatggccaacgggctccccaaccccctcctcaccgccgacgccgcccgatccctcgtcgactccgtcgacgccttcctcttcgactgcgacggggtgatttggaagggggatcagctaatcgaaggggtccctgagactttggacctcctgcggaaaatgggcaagaaattagtttttgtaacgaacaactctagaaagtcgagaagacagtatgcgaagaagttcagagcacttggacttgaagttacagaggaagagatctttacatcatcatttgcagcagccatgttcttgaagttaaataatttctctccagaaaagaaggtttatgttgtcggtgaggatggtattttggaagagctcagattagcccgttttgaatgtttaggtggccccgaggatggcangaaaaacatattgctggaggcaaacttctacnttgaacatgac

SEQ ID NO: 417361 - DNA, 473 bp, Oryza sativa
acccaatggtgaatataccacaaagttatttatagtctaatggttacaggccttgcaacctaagctaactgattgccttattttccatctgtcccactaactgagaaatgcaatcttacagaaatgcaatggcaaaaaaaaaaaggagcgaaaatagatatcatctgtctcatgccttctgttctgtggtcaaatcaccccatctgacgttgtactttgctgcaaggtagtgagcccctacaggaccgcggcttccataagggtatagctcaggggctatccgcttctcttccagctccttgagtaagggagtgaagagctcccatgcggcatccaactcatcagaacggataaaaagccttcgctctccttcaatggcatcaagtaagagcctctcataagcatctggtatctccttggagtaccttgctgcatagggaagattcaaattacttttatctagtctcatacca

SEQ ID NO: 417362 - DNA, 527 bp, Oryza sativa
ttccaggaggaaggcatacaggcatggcgctctcctgcatgaggtgctccccggccgccggcgccgtacgacgaggattggcatcggcggctccgccggcggcgctctcctttgccagatgcggcctccgtagagcggccgcgctcgggtggcgcgtcgccgccgtcgccactacgggagtgcaaggtgccaaggatgctggtctggagaaagctgccagaagtgcttcccaatcaaaggtggaaaatggctcaccttcagaaatcattttagatgattttgaagacttgagccctctatcagaaaatgatgactccactgttagtatcactgtagtcggagcatctggtgaccttgccaagaagaagatatttcctgcactttttgctctatactatgaagattgtcttccaaagcatttcactatcttcggatatgcacgcagcaagatgacagatgctgaattgagaaacatggtcagcaaaacactgacatgcagaatagataaaagggaaaactgtaatgag

SEQ ID NO: 417363 - DNA, 414 bp, Oryza sativa
ttttgtttttttttttttttttttttttttttttgcaccaaaaggcacttttgaatagaatagaattttagggggcgaatcaccacagttcaaccgcaatagcataagactgacagaagggagtaccatctcatgataagagatgaaattattaatgacttaatcctaatttaagacgaccccgacgcgacgacgcaatggcaaagggaagctgctcagttgggcgcgaaaaaaatctccgagtcgatccttttggaccggaacagtttctccatttccggggtcgggttgaacgacgcctacaggaccttcggggagatcggcttccacaccgacgttttccccgccaggggactgaagatcgggtttggcgtggtgataatggaaaaccactgcaggccggaggcgtccgcg

SEQ ID NO: 417364 - DNA, 530 bp, Oryza sativa
tgttccaatccccaaatcctcctcatctcctgttccagaacctttctttttcgatttcgtgttcgagttctttgtgattgcagcgatggcgtccgtggatctgaccccgaggcaggcgaggaaggcgtacggcggcgatggtgggacctactacgagtggagccccgcagacctgcccatgctggaactcgccaacatcggcggcgccaagctgtcgctcaacgccggtggcctcgccctgcccagcttttccgactccggaaaggttgcgtatgttcttcaaggcaagggcacttgtggcattgtcctgccggaggcgagcaaggagaaggtgatcgccgtgaaggagggagactccctggcactcccctttggcgtggtgacatggtggcataacctcccggagtccccaatcgagctcgtcatcctcttcctcggcgacacatcgaaggcgcacaaggccggccaattcacaaacatgcagctcaccggtgccaccggcatcttcaccggcttctccacggagttcg

SEQ ID NO: 417365 - DNA, 441 bp, Oryza sativa
agcttctatttacccacctggaatactttggttgtcctttaatgtaaaaaactttgcagggtttccttctcagcaccttttttacacctaaacatcgagggctgaactccatatgtgaactattccacccaaagaatgaaatggaaaaagaaacttcaaatccacaaggcaaatggtaagccgattacgatatttgcccaatatgtcaattttttctaacactttatttcacgttattgctattccttttcttccccgagtgtccagtatgtctttacaacaaggaggagcttctcccggacgagcgggccatcttcgtgatcaacgatttggctgttccatctcataccgtcggtaatgctctttattttcaccaacatatcaacatcatctcttataatcactgtaccctcaggcctcagtattctgtccatttccagc

SEQ ID NO: 417366 - DNA, 504 bp, Oryza sativa
  unsure (1)..(504): unsure at all n locations
tttctgatgaaatgttcgtggaagacaccaaactatggcagaagagggtcgggctctacaagtccgtgataagtcaatttggacagaaaggacggtaccgcaacttgcttgatatgaatgcgcgctttggcggcttcgctgcggcattggtggatgaccctgtgtgggtcatgaatatggtcccaactgttggcaattcaacaactcttggggttatatacgagcgtgggctcatcggaagctaccaagactggtgtgagggcatgtccacgtaccctcggacctacgacctcattcatgccgattcagtgttcacgctatacaaggacagatgccagatggacaacattctgctggaaatggacagaatactgaggcctgagggtacagtgattataagagatgatgttgatatgttggtgaaaataaagagcattaccgacggtatgagatggaacagccaaatcgttgatcacgaagatggcccgctcgntccggagaagc

SEQ ID NO: 417367 - DNA, 377 bp, Oryza sativa
ttttggggtttttacggaaaaagcaaatccgttttacaaagcattattattcagagaacacaatatgacactcgttgaacaggacagactagtaataaaattcaaagggccttgtgcacaccaaggatagacctagaccgaaattcaacggtgacacataagcggctgatgcacgcacgcgaacagaacttttttttgatgtttttgggcgcaaaaatgcacgggagaggttccttcggacggcttatttatatttccacagcagcggggactctgctatcatgccggtgacaacctatggtgccatgttggaggccgggctactgctctggaagtaccccttgaccttcttatattggccgtgccacaaacggatg

SEQ ID NO: 417368 - DNA, 475 bp, Oryza sativa
  unsure (1)..(475): unsure at all n locations
ttggttgcttgggcttctacacctcattttgcgcttgcatcttgctcattcagatctcttctgctttgagcaatggccaacctcaccgacctcgttaacctcaacctcagcgactgcagcgacaagatcatcgccgagtacatctgggttggaggatcgggcatagacctcaggagcaaagcgaggactgtgaaaggccccatcaccgatgtgagccagctgccgaagtggaactacgacggctccagcaccgggcaggctcccggcgaggacagcgaagtgatcctctaccctcaagccattttcaaggacccgttcaggaggggcgacaacatccttgtgatgtgcgactgctacacgccacaaggtgagccaatccccactaacaagaggcacagtgccgccaagatcttcagccaccctgatgttgttgctgaagtgccatggtacggtattgagcangagtacacactcc

SEQ ID NO: 417369 - DNA, 510 bp, Oryza sativa
cgcccccgtccgtagcctggagaccctttttacgggccgcccttttttttttttggggaccacaaacgttaccattcaagattctacattatatttgtttatacagcaggggttcagagtacaagattggccgggtagtatatcaccatttgagcaaaacagactgagcaaatgcaacataattttcgctgtgttaaggcactcaaaatggaacatgggggatcaattgtgttatctgcaatctggcaagcgttttccgcggacgtgttcaagcgacggcttggagagctctctcgaagttatcttctgctgatacggcacgctttactagcacatgatcggggagtgatagttccagctggctgaggtatcttgatgacggtttgccaagggggagattacacacaataagattagcaagagtttcaggatcttttgcatccttgttcaatgcttcgaggaaaagagtgtgagcctcatcaaagctccccatgtgcaatacagcaaact

SEQ ID NO: 417370 - DNA, 499 bp, Oryza sativa
  unsure (1)..(499): unsure at all n locations
tgcttccttcgtcctcccctccagccgccgaccgaccgatcgcgatggcggcggcgcggctccggctgctgtccgcggggctcctctcgccggcggtgtccagggcgcggcactcttcttccctgcagggtctccgcgcgctgtccacgctctccactacgctcgggtccggcgcgggggaggacgagatcgagcgcatccgccgcgagttcgaggacgccaagcggaactacctcagcatccccgtcgccatcaaggacatggccaagatgaacccgcaaggcatttatgtgaacaagaacgtcaaactggatgacctgcaagtctatggttttgactatgactacacgctgtcccactactccgagcacctgcagtgcttgatctacgatctcgccaagaagcactnggtcaatgagttgaagtatcccgagagctgcttgaagtatgagtatgaccacggctttcccatcaaggggctctattatgacagattaaa

SEQ ID NO: 417371 - DNA, 260 bp, Oryza sativa
tgctgggacgcctcgcgggcccggcccggacctgccgggcggccgctctcgaggtttctttctggcgtacgccggcatgcgacgacagggctattatagagcggcacctacattcaattaacgggacgtcgaacaacatcgtaacgcctgcaatatacgtggcgcttcccagcgaaatgtgctcggaacccatatttgtttattctgctgaagacatacaaatatggatccgatcatgagacacttacaccggttgatgc

SEQ ID NO: 417372 - DNA, 393 bp, Oryza sativa
ttttgtgttttttttgggtacaacatgtacacatgcccagccattttggccattttccagcaaaagacagcgtatataatccactagaagaattcgatcagttttctcttctcaataaaacaagaacaacaagaattcagtttcacccacagctacttaaagactacagagacagtggtagtaaaactgacatccttgtgggtttcacagggaaacgatgacttgtacaagccaaacagaaacagaagtgaagtgaagtgaagagaaaatttgcataaatgagaattcagacctcggccttgtgctcggggcgatgggtgaactcgaagtcgacgtgcacaaaggcgcgctcgacttcggggagttgctccagcttctcctggagcgactccc

SEQ ID NO: 417373 - DNA, 452 bp, Oryza sativa
tactcctccttgcatgtctcgtgaaccaggtaggcggttaacttgtatatcaaacagacgccgcgcgcgcgagcagttcgtcgtcgtcttcgctcgatcgtagtagttgccggccggcatcggcatgggcgacggcggggagaagcaggcggcggcggcggaggggtggcggctgagcgtcaacgacttccagttgccggagcggcccaaggacccgcacttcgtcaagagggtcatcaagcgatgccacggaaagcatcggaaaattgcaaaatactacaagaagcaggaaaatctcctgaaggatttcagcgagatggaaaccatgaatgagattggttccttagatcagaatgctcctactgaggaagagttgaggcatatggcaaagggcgaacgattggccatcaacctgtcgaatatcatcaatctgattcttttcattgggaaag

SEQ ID NO: 417374 - DNA, 398 bp, Oryza sativa
gtcaaggccagcagggactgggtcatgaacagcatgatgaacggcaccgacagctacggcgtcaccaccggcttcggcgccacctcccaccgccgcaccaaggagggcggcgcgctccagagggagctcatcagattcctcaatgccggcgccttcggcaccggcaccgacggccacgttctgccggcggaggcgacgcgcgcggcgatgctcgtccgcatcaacaccctcctccagggttactccggcatccgcttcgagatcctcgaggccatcaccaagctgctcaatgccaacgtcacgccgtgcctgccgctccggggcaccatcaccgcctccggtgacttggtcccactgtcctacattgccggcctcatcaccggccgccagaactccgt

SEQ ID NO: 417375 - DNA, 449 bp, Oryza sativa
aaaatagtatcatcaccatgttcatctagacatagtagaaaacattcacactctcgaaatgctctctatctttcagttttgtgttgctatacgtcttcttgttttgcattttttttagtattccatttctgttcagcagagtggcagtggcgcgccattccattccttgaggcattcgagcagcgggtcgatgtgcttgcgctcgttgatggcgacgagcaccttgttcagctcctcgccgggcgaccgcgtcttctcgccggtgaggtactcggtgccgaccttctcgcgcacgaaccggtagagcgggtacgagcggcactccttgatccggttggggactagcggggtgccgttctcgacggcggcgcgggcggcctccacctccttgggcagcgcggcgcggacgtgctgctcgaactcggacaccttggcgataatggaggtct

SEQ ID NO: 417376 - DNA, 510 bp, Oryza sativa
tttttgttaagagccgggaaatgccaatgcaagcttccatcaaaccataagcagaacaagaaaatgatgcatgatgtacaagatgacaggccgaaaaccattctttccatggacacactggtgcacaattcagttggttacaagggtggagttcacactatttaatccccatcacaaacataaaaaaggcacaacagtctgtcgagaaaatgagcttcccccagaacctaaacttggaaaggagacagaagatatccctcgcagaaatggccacctgcgtcatctttccaatccatgttctcttagaagaccagcgtttgtggcatgtcaaaaagagcgcggatagtctcactagccacatccaaaagctgtaaatactcatccgttccatcgaccaagcacttatctgcttccccaagctttttacatattcttgccttctgctcatctggaatatcatcggcattaactatcacatttagaaactgtgagaacaactgtgaaacgggg

SEQ ID NO: 417377 - DNA, 534 bp, Oryza sativa
tagaaccagagagaagaggcgggaagcgaagccgcatcccgccactcgcctccgccctccgcgcgcgcgaacccctccctcggcggcggcgacgaccaaggcggcggcggcggcagcggcgcaagaggacgcggtagcccgatggcgccgctcgtgccgtcctcgcagccatgggtggagaaataccggccgaggcaggtgaaggatgtcgcgcaccaggaggaggtggtccgggtgctcaccaccaccctgcagaccgccgaccttccgcacatgctgttctacggcccgcctggcaccgggaagaccaccaccgcgcttgccattgcttaccagctctacggtccagagctctacaagtcaagagttctagaacttaatgctagtgatgatcgtggaattaatgtggtgaggactaagatcaaggactttgctgctgttgctgttggttctgcacgaaaaggcggttatccctgcccaccatacaagattattatactagatgaagcagattcgatgacagaagatgcccag

SEQ ID NO: 417378 - DNA, 359 bp, Oryza sativa
gtcgtaaaattaacagacgttcatcaagggctcctttagaattcgagaacttgtttaggtaaggtgctactgaaacagtagcaaaagaaaataccaaaatccgtatgttcagaatccacaaatttatccagccattttgactcccctattattggacaacttcatcatgctgacttcttgccaccgaaagggagattccaaccgtacgcattgcctttctttgctgctacatccagccgctttgcaccaaccttgtccataagccagagaccaaccggcggcatgtattgcaccaaggacataacccctagcacaggctgatatgatatccatgccttctttaatccgggagttggtgc

SEQ ID NO: 417379 - DNA, 504 bp, Oryza sativa
ttaattttaaaagccgctgcttagactgaacacaccacacacgagcacgagcacggtgaagtcgagagagagagaagagagatggtcctccccgtcctcgcgcccctcgccggcgccaccgccgtcgccttcctcctcttcaagttcgccaccgtcgatggggatttcacgctggtctcgcgcggggcgccgcggcgggagaaggtggacgggaaggttgtgtggatcactggagccagccgcgggataggggaagttcttgcaatgcaatttgctagtttaggagcaaagctgatactatctgctcggaacaaggaggagcttgagagagtgaaacataacatcatcaacaagcatccaaatagcagagttgaagtattacccatggatttatcatcgggtgaagagtctctgaaagagcatgtacatgaagcagagtcactcttctccatgcaggcgttgactatatgatccataatgcagcatttgagcgttcaaaaagga

SEQ ID NO: 417380 - DNA, 449 bp, Oryza sativa
tttttgtattagccgtactgaacaggtcgtcttagttattcttctgcagatgtcacagttaaaagcgatgtggcacaggcatatatctaagtttgaaatacggatctatgaatacaagaaaatgccatcaatagagcaaactcgatggtcgacggatggtagaaacaccacgaagaggaagatgcggttacgacggtaaattttgctcactccgaaagcgtggacttcagctctccactcttctccagctcaagaacgatgtcacagcctccaatcagttctgatttgcagtacagctgagggaacgtgggccagttggagtacgccttcaagccttgcctaacctcctcgtcggataggatgtctaacgctccgaagctgactcctgctttgttgagtgcattcaccaacctttcaactgaagccagagcggggggcatttggggggc

SEQ ID NO: 417381 - DNA, 480 bp, Oryza sativa
cgagaacaaccccttcggcgcccgcgccgtccgcctctacctccgcgaggtccgcgagcaccaggcgcgcgcacgcggcgtcagctacgagaagaagaagcgcaagaagccaccccacccctcctccgccgccgccgcgcacgacgacgccgccaacggcgccctccaccaccaccaccacatgccgccgcctcctcccggcgccgccgcctgagccgagccgagcttgctccaagatcgccggaaaacgagctgctagcctcctacgcatgcactagttactccactccactccactccactatgatccctagctaggctgctcttgctactagcaaaactacggattaatctccatgcttgctactgctgctgctgctgctactgcatctaattaattaggttgattatttcctgatcgtttcttcccaactgggtcgctctcgcacgtcgcttgtctactactatttgctggaattt

SEQ ID NO: 417382 - DNA, 363 bp, Oryza sativa
gtacgcaaacatgacgactttcattgcgtaatacaggtcgttgaaagaacaaccaacaaagcgaatgcacctcttttgggttcttttttaattgctaggcggccttgcaactacatcaaccaatataccaccactatatgctcatgctattgtctccatagagactacgctacttatcaactcacacttgcttggaataaataccaactaaatgaattgacttgatctcttatcatacaagtcacagacccgaattgggtagtgaagaatgaatggccaagagaagagaacaaaatctatacattcgtgcatcaatgtacttgaggtgcgtctcttaatgctacattcaaactgctttacatt

SEQ ID NO: 417383 - DNA, 523 bp, Oryza sativa
catcctatcgattttgcagtttagccctcgaagaagcaaggatttcgagcccggtccctaggctcgatccggccgtgtcctttgctccgatcgagcgcgcgaggtctcgtaaggtccatcctgagcttgttgctgtggagtgcgcgattccgcgctcgatttcgtttcttccggcgcagatttcgtgttttttggcctagatttggcttgtgggtgaccgcctaggcgtttctcgcgtgtttcggctttttgtctgggatcgatttgtggctggatttgcttgttcctggctgcggagcttggatcttagcattagaaaccctcagattggggatttcctgccggaggaagctttttggaggagctgcctttgggaggaactcttccagttctgagggtttcggtgtttgttgctcgcctggctcgagaagaagctgggaaatctcgtattttagggcgggttctagtagatttcgtgtagtggagagcataaagtttgtgtggttttggtggtcaagtctgt

SEQ ID NO: 417384 - DNA, 417 bp, Oryza sativa
agaaactaaacgcaacacaagctcaaacatgcattactgaaagtaacaaaccatccataatatatcctttatttgttgacaattcatatcatgatatagcacaatgtttccatcgccaacttgtactacgggtgaagcacaattgagtctacaataacatctatttatccacgggatgatctttcaagaatgcaagaaggagctcattcacatagtcagggaattgctcctgcacaaaatggctcccttcagggatataggtgatcttcatgtctggggcatgcctttccatagggcccgcttttatagcagactccgcccccggggaacttgaaaacataatctttctccccatgacaacaaacactgggacttggaatttgcatctccaattggttcctcttatgagagacctat

SEQ ID NO: 417385 - DNA, 343 bp, Oryza sativa
ttgctctctcttcccactgcagtgctgccgcgtgagcgtgaccgcgtcgtcgtccacggcgagctcgacaccatggccgccgccacggagcagccgcagcagatcaccgagatcgagcacgcccacctccccgtgcgtgggctcagcctccacgtcgcgcaggcgggcaaaggggagctcgggacggtggtgttcctgcacgggttcccggagatatggtactcgtggcgccaccagatgctcgccgtcgccgccgtcgggtaccgcgccgtcgcgcccgactggcgcgggtacgggctctccgaccagccgtcggagccggaggcggcggagtacgacgacc

SEQ ID NO: 417386 - DNA, 286 bp, Oryza sativa
ttttgttgcaagctgaaaacctgtcataaccctcgtagcatttgattggagaaacagatgttcacaagtagatacagagctaccgaaactggaagaacagaaacccgagggaatggacacacggaacataactgaagggcaaagtgtttacattattatgattgagcccaggttgcaacaagtgctaaaagtttgtactgaggatttgttggcctggagttggcagcagaaaccctcgatccccattccagcagctatttgctggtgtcgaacttgtgcgcgatca

SEQ ID NO: 417387 - DNA, 430 bp, Oryza sativa
  unsure (1)..(430): unsure at all n locations
tcgaaccatacccaacaagcgtcaaatcgcgtcaaagccaaaaacctcatacaagtccaggaatctgtaatatattccgagacttttacacgcattccagtcatcactagtgtagcggttgctgcttcttccccggggaggtttatcggatcttgatggagacccatatcggatccgtggacggggcggcggcggcggcggacaacggcgcggtggggtgcccggcgtcggcggtggggtgcccgatgacctcggcgcgccccgcgcccgtgtcggccggcgaggcgtcgctgggacggcacctggcgaggcggctggtgcaagtgggcgtcagcgacgtgttcgccgtgcccggngaccttcaacctcacgctgctcgaccacctgatcgccgagcccgggctgcgcctcgtcggctgctgtaacgagc

SEQ ID NO: 417388 - DNA, 451 bp, Oryza sativa
ttatatgtgtacttcatggatcttcttgccaaatcagtcagagatgaactggctggttgcagtgagaagggttatgattatatgtcaatagctgaagcaagacaagtgctgatgttcagctctgacaaagaattgcaccagtacatcgcagaggagcaccctgaatgggagataaaggatggttccgtcttcttccagaaggcgaaggagacccagccctgcaaggagataccatctttgcaggttatcaaccaaacgctcagctatgctagagagctggagcggattgtatgatttgttaatgaatatcgtttgagatcatttgggacggcatgttcatgctatgtacacatcaggtgtcacggttgagatgcgcatgttgcagctttgaacgtttgagatgcccatgttaccttatgatactttttttaaaaatttcatttaatgggct

SEQ ID NO: 417389 - DNA, 466 bp, Oryza sativa
tttttgtacgacaaaccacgaacttggatattaaagatgccacaaagaaggttcacataaacaacacaggtcacagcagcgaaagctacaagcaaaccctgcataatcgaaaagcaaatgtttttcaaaaccagacacacaaactgatagatagaagcccacacggacagatcataggatagcagcagtaatcaagcattgccaaggcaccaggcaagaaccctgaacctctctagtactcgccaccctcatcaccctcgtgaccatcgtcgaactcggagccgacctcctggtagtccttctccagcgcggcgaggtcctcgcgggcctcggagaactcccactgctacatgccctcggcgacgtaccagtggacgaaggcgcgcttggagtacatgaggtcgaacttgatgtcgatgcgggagaacacctcgacgacgctggtggagttggagatcatgcacac

SEQ ID NO: 417390 - DNA, 528 bp, Oryza sativa
  unsure (1)..(528): unsure at all n locations
tctgtctacccgaggatccacttcatgctttcctcctacgccccggtgatctcggccgtgaaggcctaccacgagcagctctccgtggcggagatcaccaacagcgccttcgagccgtcctccatgatggccaagtgcgacccgcgccacggcaagtacatggcgtgctgcctgatgtaccgcggcgacgtggtccccaaggacgtgaacgccgcggtggccaccatcaagacgaagcgcaccatccagttcgtggactggtgccccacggggttcaagtgcggcatcaactaccagccgcccagcgtcgtcccggggggagacctggccaaggtgcagagggccgtgtgcatgatctccaactccaccagcgtcgtcgaggtgttctcccgcatcgacatcaagttcgacctcatgtactccaagcgcgccttcgtccactggtacgtcngcgagggcatggaggaggggagtttctcgaggcncgcgaggacctcgccgcgctggagaaggactacgaggaggtcg

SEQ ID NO: 417391 - DNA, 553 bp, Oryza sativa
tttttgtgaccacaaacgtcaccattcaagattctacattatatttgtttatacagcaggggttcagagtacaagattggccgggtagtatatcaccatttgagcaaaacagactgagcaaatgcaacataattttcgctgtgttaaggcactcaaaatggaacatgggggatcaattgtgttatctgcaatctggcaagcgttttccgcggacgtgttcaagcgacggcttggagagctctctcgaagttatcttctgctgatacggcacgctttactagcacatgatcggggtgtgatagtttcagctggctgaggtatcttgatgacggtttgccaaggtggagattacacacaatatgattagcatgagtttcaggatcttttgcatccttgttcaatgcttggagtaaaagagtctcagcctcatcaaagctccccatgtgcatacagcatactgacttgccatttagaaccattcctgccatcgggtatttttcagcaaagccttggaatatgaggtaagctttacggatcttagagccaccaacag

SEQ ID NO: 417392 - DNA, 472 bp, Oryza sativa
ctcctcgtcgccgacgagccgcctcctcctcgtcgtcgccggcggcagagcaccggagcagccaccccatggcgtccccggacctcctcttcaacctgcgcaacctcttctacctcggcgcctaccaggccgccatcaacaacagcgacgtcccgggcctcgacgccgacgccgccgccgagcgcgacgccatcgtcttccgctcctacgtcgcgctcggctcctaccagttggtgatcagcgagatcgactcgtccgcggcgacgtcgctgcaggccgtgaagctgctcgcgctgtacctctccggagacaaggaaagtgcgattgtcagtctgaaggaatggttgagtgattcggcggttggaagcaatcctgttctacgattgattgctggaattatatttatgcatgagcaagactacactgaagctctcaagcacacacactctggtggaactctggacctgcatgc

SEQ ID NO: 417393 - DNA, 285 bp, Oryza sativa
ttttggtttttttttttccagcaacagagatcataacttaagaattattatctccatcacataaaaacatacagtgactgactactggattacacgattgagttgttcagggttaacataggaaaaacatcttggggactagagatagagggaatcgacagatgccctgcaataacgcgcgggaaacaggacatcacgattgcgtggaatgttcccggctgcgcagaggcggctcggggcttaagacactggttttgaatgggatcgccctgaagatcacctggt

SEQ ID NO: 417394 - DNA, 439 bp, Oryza sativa
gtaatttctactagcatgagtggagagctgaagagagactactagattggcgaggagatcgggcgcggccgcttcggcgtggtccaccgctgcacgtcgcgcgccaccggcgaggccttcgccgtcaagtccgtcgaccgctcgcagctggccgacgacctcgaccgggagctcgcggagctcgagcccaagctggcccagctggccgccgcgggcaacccgggcgtcgtccaggtgcacgccgtgtacgaggacgacgcgtggacgcacatggtcatggacctctgctccggccccgacctgctcgactggatccgcctccgccgtggcgcgcccgtcccggagcccgtcgtcgtcgtcgtcgtcgggcagctcgcggaggcgctcgcgcactgtcaccgccgcggggttcgccaccgcgacgtcaagcccgacaaca

SEQ ID NO: 417395 - DNA, 313 bp, Oryza sativa
ctcagactgcatcattcaatttatacacatcaggtagatcatacatccatgtctgttcttcttttttcttcagaaagaagcaaccaaagaggtttgtccgtgtactagctactatatatcataaaaccatacatgcttggtttcagcttatgaaatatacaggctaatctccgtgatctgaagagtgatctacatacactcttcatgcagatttagcgaacccgatcctgtctttgccgaagtcgaaaacccgatgaatagcacccatgaagacctctcccagaatccaaaaaggaccgcgtggtggaggcat

SEQ ID NO: 417396 - DNA, 461 bp, Oryza sativa
cctctaccttgactttggcttccccactctctcttcttcttgggaggctgggagctaccagcacaacacaccaaggaagctgaggtgcgttgatttcttgatatcatggccaagaggcacctcttgttggtgacaacttgtttgtgggctctgtcatgtgccttgctgcttcatgcttcctctgatgggttcctgagagtcaacctcaacaagaagagattggacaaggaagatctcactgccgccaagttggcgcagcagggcaaccgtcttctgaagaccggcagttcagacagtgatcctgtccctctggtggactacctcaacacccagtactatggggtgattggcctcggctcaccgccgcagaacttcacggtgatatttgacactggaagcttcaaccctgtggttccttcaacaaaatgctatttttcgatagcatgctaccttcacagcag

SEQ ID NO: 417397 - DNA, 507 bp, Oryza sativa
  unsure (1)..(507): unsure at all n locations
ttcgttccccgcaggtgaacatgagtacatcgacgcggtggtcggcgaggaggtgaggctcattgtggaggtggacttccggtcggagttcgaggtggcgcggtcgaccaaggcgtaccgggcggcgctgcaggcgctgccgccgctgttcgtggggacgccggaccgcctcgggcagatcgtggccgtcgtggcggaggcggcgcggcagagcctgaagaagaagggcctgcacttccctccatggcgcaagccggagtacatgcgcgccaagtggctgtccccgcacgtccgctccggcgacaaggccgccgccgccgctaaaactgtgacgtccactacgtcggcgacggcgacgccggtctcggcggcgagcttctccggcgcgttcgagctcctgttcgataggaaacagagcggngagatccccgccgcggagatgatcacggtggtggtgtctccgtcgccgtggcgcccgacggaggaggcgagcaagaagaaagccgc

SEQ ID NO: 417398 - DNA, 497 bp, Oryza sativa
  unsure (1)..(497): unsure at all n locations
ttgcgtgcgagctagccagccagtgttagagcttgagctgcttgttcttcttctacctcctgcactcgcgtgctgcacaagtagctcagctagatagagcgtcagaaatggccagcaacaactcgagaacaaactccagggcgaactactccaacgagatccacgatctctccacggtgcagaacggcaccatgcctaccatgtactacggcgagaaggccatcgccgacttcttccctcctcacctcctcaagaaggtcgtgtcggaggtggtggccacgttcctgctggtgttcatgacgtgtggggcggcagggatcagcggcagcgacctgtctcgcatatcgcagctgggacagtcgatcgccggtggcctcatcgtgacggtgatgatctacgccgtcggccacatctccggcgcccacatgaaccccgccgtgacgctcgcgttcgccgtgttcaggcatttcccctggaatcaggtnccgtctactggg

SEQ ID NO: 417399 - DNA, 364 bp, Oryza sativa
tttggtgtttttttttttccagcaacagagatgataacttaagaattaagatctccatcacataaaaacatacagggactgagtactggattacacgattgagttgttcagggttcagataggaaaaacatcttggggactagagatagagggaatcgacagatgcgcagcagtagcgcgcgggaaacaggacatcacgattgcgttgcatgtcgtcggttgcgcagcggcggcgcggggcttaagacctgctcttgaatgggatcgccctgatgatcacctgggggtagatggcagccagggcagcgccaacgaagggaccaacccagaagatccaatggttatttcaggcatggtccttgtt

SEQ ID NO: 417400 - DNA, 460 bp, Oryza sativa
ttccactcacacgcattgcagaggagaggcgacaatggaggggaaggaggaggacgtgcggctgggggcgaacaggtactcggagaggcagtcgatagggacggcggcgcagggcgccggggacgacaaggactacaaggagccgccgccggcgccgctgttcgagccaggggagctcaagtcgtggtctttctaccgggccgggatcgccgagttcgtcgccaccttcctcttcctctacatcaccatcctcaccgtgatgggggtctccaagtcctcctccaagtgcgccaccgtcggcatccagggcatcgcctggtccttcggaggcatgatcttcgcgctcgtctactgcaccgctcgcatcttcggaggacacatcaacccagcagttacttttgggctgttcttggccaggaagctgtccctgacccggccatcttctacatagtgatgcaat

SEQ ID NO: 417401 - DNA, 480 bp, Oryza sativa
gcaccccgtactggggcggcaaccagtacatcgagtactactacaactccaccagctactgggacgagtacatgtggagcgcggcgtggatgtactacgccacggggaacaacacctacatcaccttcgccaccgacccgcggctgcccaagaacgccaaggccttctacagcatcctcgacttctccgtcttcagctgggacaacaagctgccgggcgccgagctgctgctgtcgcggctccgcatgttcctcaacccgggttacccctacgaggagtcgctcatggggtaccacaacaccaccagcatgaacatgtgcacctactttccgcgcttcggcgccttcaacttcaccaagggtgggctcgcgcagttcaaccacgggaagggccagccgctgcagtacaccgtcgccaactccttgctcgccgcgctctacgccgactacatggagtccgtcaacggtccccgctggtact

SEQ ID NO: 417402 - DNA, 447 bp, Oryza sativa
ggagatgagcaccgcgacgcacttgatgctcttgcacaccgtctggatcaccgtcggcccgggctccgggatcgtcaggttcaggttgtcgccgaacccctccgcgtacggcggctcgccgaccaccacgatcgcgtagtcgtacttgtcgccggtgaccacgctgctgtccgggttctccgagtacaccaccgtcgtgctgggatcaacggtggccttgatcgccgacaggatcgtcgtgccagcagtgatgttgttgccgggctgtccttgccaggtgatggtccatcctccacactgtctgcccaaatcatcagcatggcttcccgcgacgagaattttaccggctttcttcgggaggggaagcaccggagagtaggaggattttccgttcttcagcagcaccaaggacttcctgaccgcttcgcgcgcgagctcacggtgctc

SEQ ID NO: 417403 - DNA, 452 bp, Oryza sativa
ctttctcaggcagcaagcgtaagcaaggcagaggagagggaaagaacctctctgcagtgctgctgctgctagcttgcagaaaaaaaaaactctcatcttttgcaggaagagacatcactgtttctgcattcgtgtgcatttggattaagctttgcttatccctttttagtggagattgttgagtatatcaggtctatatattggcagctctggttggagatagacactcacactgagccaagatggggagtttgcacaagttcagtgttattctcctcatgttatgttttgctacgttggggagcgctcagtatgtcaagtataatggatccgaagcagcccgtctctgttcgtgtcaaggatctgctcggccggatgactctcgctgagaagattggccagatgacccaaatcgagagggagaatgccacggcggagcagattgccagtac

SEQ ID NO: 417404 - DNA, 453 bp, Oryza sativa
aatcgaacgaaacttatttgttcctcatcttattctctgatgaaatttcaaaaggagagcgaaacagtggacactgacgcttgcgaaataaaaaggtggcgccagaaactccggcgagactacggcgacgagacgcccgacgacaacgaccatgacacgatacaaccacacactgggtggagattaccgtcggcgacggcgacgaacacgacggcgacgacgactgctcagtgcgacaggtacaatggaggaggagaaggaggtgcaagaactcctcgcgtgaacaccaagaagccggcgatggctgcctcggtcacacggtgagcccccgcatgaactcccactcgtcgtcatcctcctccgccgcgccggcggccgacccctccgagtcgctgctcatgccgctgctctccccgtggccattgccgcggcctccgggtcgaacgacaggta

SEQ ID NO: 417405 - DNA, 512 bp, Oryza sativa
ttatgatgctgctcgtgctgttgaggaacttaatggaaagaaaattaatgacaaagaatggtatgttggaagagctcagaagaagtcagaaagagagattgaattgaagagaagatttgagcaaagcatgaaagatgctgctgacaaatatcaaggactgaacttatacatgaagaatttggatgatagcattggggatgaccagctttgtgaattgttctctaactatggcaaaattacttcatgcaagataatgcgtgatgcaaatggtgttagcaaagggtctggatttgttgcattttcaactcgtgaggaagcatctcaagctttaactgaaatgaatggcaaaatgatatctggaaagccattgtatgtcgcatttgcacaacgtaaagaagacaggaaggcgatgttgcaggcacaattttctcaggtgcgccctgtaccgatgacaccttccatggctccacgtcttcccatgtaccctcctatggctcctcttgggcagcaac

SEQ ID NO: 417406 - DNA, 493 bp, Oryza sativa
cccttttcagcaatcgtgcttctatctttaaagatagtcagcctactccaggaatgtggacattcaatctcacttgggctgatattagcagtagcgatttgagacccaagatatcttccccagagagtatatattatcttgtaaggaacccagtgcacaaaaatgcgggaaatttcttcaggttatctgactttctaacatttgctaaggataaagatttgtctggcatcatgatcatcataaagaatgctgtatttatggcaaattcattaggatttgatgttgttgattctgtaaccaaagccttaagtgatgctggctataataatcaaactaccaaagccaaggaggttatgatccagtcagaagatagtgctgttcttgtcaacctgaagcagctggaaaccaaatacaagcttgtctacactctgccatcaactatcggggatgcttctgcttcctcactggtagatgtgaagaaatttgctgatgc

SEQ ID NO: 417407 - DNA, 298 bp, Oryza sativa
ggagacggcgccggaggaacccacattgccctccgccgccgccgatggggcggctagtagcgggacaacatctggcgctggtgctggaacgggaatcaactcgaactcggtgctggtggcgctgctggactcgcattacacggagctggcggagctggtggagaaggccctgctgctccagacgctggaggacgccgtcggcaagcacaacgtcaccatcttcgcgccgcggaacgaggcgctggagcgtgacctcgacccggagttcaagcgcttcctgctcgagccgaggaacctc

SEQ ID NO: 417408 - DNA, 306 bp, Oryza sativa
gctgacggtgccggtggaacccacatggccctacgccgcgccgatggggcggttagaagcggaacaacatctggcgctggtgctggaacgggaatcaactagaactcggtgctggtggagctgctggactcgcattacacggagctggcggagctggtggagaaggccctgctgatccagacgctggaggacgccgctggtaagcacaacgaaaccatcttcgagccggggaacgaggcgctggagcgtgacctggacccggagttaaagcgcttactgctcgagccgaggaaccttaagatggtc

SEQ ID NO: 417409 - DNA, 304 bp, Oryza sativa
gagctcaactctgaatctgttgtgcaggagatggcagagagagttgatgagcttgttgataaggtcatgaacttggagctcaaattcccaaagcagtccgctcaaatcaagcagctgaaggaagataatgatagcctcaaagataggttggatgatctacaagatgagatagcacttcgagatgatccaagtgacttaagtgaacagctcaagttagcagaagatgagttgaacagagtcaaggctcttgaaagatctgttattgaggaagaagttcttgttagcacagtcttttctgaagttt

SEQ ID NO: 417410 - DNA, 441 bp, Oryza sativa
gagctagctgcttctacaactgtgcaggtagctaattaatctagcaatcctcccgtagattggaataatggcagatcagaaggtgattctcgccgagccgctgcttccggggaaggaagctgacttcgccgacgacgacgacgtggaggcgcagctcacttcgtaccacaccggcgcctgcttctgcaggacgtgcctcaacctcaccaatgccgtctccggcatcggggtgctgtccatgccgtacgcggtgtcgcagggcgggtggctcagcctgctgctcttcgtcctcgtcggcgccgtgtgctactacaccggcacgctcatcgagcgctgcatgcgcgccgacggctccatcgccagctacccggacatcgtgcagtacgccttcggcgccaccggcaggagagccgtcgcattcttcatgtacgtcgagctcta

SEQ ID NO: 417411 - DNA, 278 bp, Oryza sativa
cacgcacgcacgcacgcctttccttccttcctccctcccctccctccttcccccacccgcttcccttgccgtcgccgccgccgccgaccgccgcgggaggggaggtccccggcgccatctcccagaaatggacgcctgtttttcaacacagcttattgatggagatggcgttttcaatggttctggattggagaacttcatgaaggaagttaaaatgggcgaatgtgggctttcatatgctgttgtgtcaataatgggtccacaaagtagtggaaaga

SEQ ID NO: 417412 - DNA, 441 bp, Oryza sativa
tgttaattggaagattgcatacaattgctgatggacagcaatcgtatacctgaagctgcgttaatggcacgttcttatcttcccagcaaagtttctgagatagtagcaatatggagaaatgacctcagtaaagttaatccaaaagctgcagagtctctggcagatccttctgagtatccaaatttatttgaagactggcaggttgcacttactgtagaaaagaatgttgcttctcggagggtccattatcctcctgctgatgagtacttgaaccatgctgaaaagtcagacatgactcttgtggaagctttcaaaaggatgcaggtcattgaagatgaggaaacagaagatgcactagatgaaaatggacagcccgatgaagaggttttggaagagaacaaagtggacgagagcacagatgaagctgtcgaagttgatgct

SEQ ID NO: 417413 - DNA, 464 bp, Oryza sativa
ctccgtttcttgctccatccatctatccatccaaggagtgtggaacgccacacgtattttttttttatctatgctaatctgatcattagcagaggagagttttagcagtaggattggattaaattggagtagtttcatagtttgtgtgtagtgatcttaattagctttgattagacagacagtacagtagagtagaggatgttggctgtgttcagcggcgcggtggtggaggtgccggcggagctggtggccgccggcagacggacgccgtcgcccaagacgcgggcgtcggagctggtcggccgcttactcggcgccgccgagccggccgtgtgcctgcagctcggcgaccttggacacctgtgctactcccacgccaaccaatgcctgctgacgccaagatcctttgcatcaaaagatgacatgttctggctgtttgagggagtcctggacaatctgtgcag

SEQ ID NO: 417414 - DNA, 549 bp, Oryza sativa
gtctgcatcagcgccgaggacggtctcgactacgtgttcatacagtacgccgacgccatggccaagctcgccgtcgaccaggccgcccgcatgctctacagatacaacctattgatgtttcctgcagacctcacgagaagcttgctgttcagaaaatggtagtcaatttgatggagttgtatttacaaaggatgaggcagaaaaggcctccttacccgaagcctgtgggaatggatcagtttactgctgaatttccctatgagcccactccagaccaaaaccaggcttttatagatgttgacaaagatctgactgaaagggaaaccccaatggacagattgatttgtggagatgttgggtttggtaaaactgaagttgcaatgcgtgctatattcattgttatatctgctggatttcaagctatggttcttgctccaactgtaatactagccaagcaacattatgatgtaatgtctgagcgtttcttccattatcctgatataaggttgccatgtttagtggtggctcagaccaagaaagaaaagatga

SEQ ID NO: 417415 - DNA, 269 bp, Oryza sativa
ataggatcaaaacatttctattaccacaactttttaaggatggaatcgagtagcaatactttcaccccaaaatacagtttagcgacaatatcttagaaaagccgcttgctttgccgccatggctggcaagctgagcagagcagctaacacaaagaacacgagatcactataaaccaaacggcaacgaacgaagaaaatacagggtcttttttgtctgaagatacacgaagcggttcgttttcttttatttttagtctcctctcctcctc

SEQ ID NO: 417416 - DNA, 528 bp, Oryza sativa
ccttctcctccggctcttcttcagtatcgaatgctgtcttctcctcgtgcccaccaccaccaccgtagcaatggcgggcaacgggccgatcaacaaggaggacccgctcaactggggcgcggcggcggccgagatggccggcagccacctcgacgaggtgaagcgcatggtggcgcagttccgcgagccgctggtcaagatccagggcgccaccctccgcgtcggccaggtggccgccgtcgcccaggccaaggacgccgccggcgtcgccgtcgagctcgacgaggaggcccgcccccgcgtcaaggccagcagcgagtggatcctcaactgcatcgcccacggcggcgacatctacggcgtcaccaccggcttgggcggcacctgccacctggcgaccaaggacggtcccagcctgcaagtcgagctcctcaggcatctcaacgccggaatcttcggcactggctccgatggccacacgctgccgtcggagacggtgctggcggccatgctcgtgcgcatcaacac

SEQ ID NO: 417417 - DNA, 385 bp, Oryza sativa
ttttcttttgcagttgcagagcaagaagcagagggggaagaataggaagcagaggaggaggagtccaagaattgaagcaggagaagaggaggtggtggtttgattcaagaagaaggagaagagcaagagcaaggatgttgcgaggagggacgagcttgctggggatcgtcaacttcgtgacgttcctgatctcgatcccgatcctggggggaggaatctggctggcgtcgagggccaactccaccgactgcatccgcttcctgcagtggccgatcatcgccatcgggctcgccgttatggtggtgtccctcatggggttcgcgggggcgtgctaccgccagacgtggctgctgcagctctacctcttcgccatgttcttcatcgt

SEQ ID NO: 417418 - DNA, 266 bp, Oryza sativa
agaaccgaacaaaccctagcaatatataatttaaaaggcataatggtttacatgtccggacaaactgcaactcagcacactcctgacgaaactcaaaaccagacgggttcaggaatgtgttgtgacggctttgcagaagcttcgactcaggctatacaagtagcaaaatgttgcacaccatactaaaagatgcaaacactacatagtagtagcctgatgaaaaacgcagacttcaaagctttaatccctgttacagacgtagtgat

SEQ ID NO: 417419 - DNA, 411 bp, Oryza sativa
gggtttctcctcctctttcctctcctcctccgccccgacgcctcgctagggtttgggcctctccctccgccgccgccgctgccgcgaggagaggagggggggagagcacccagccggcgagccagccatgtcgctgcgcccgagcgagcgggtggaggtgcggcggaaccgctacaaggtggcggtggacgccgaggaggggaggcggcggcgcgaggacaacatggtggagatccgcaagagccgccgcgaggagagcctgctcaagaagcgccgcgaggggctccaggcccaggcccccgtgcccgcctccgccgcaaccggcgtcgataagaagctcgaaagccttcctgctatgattggtggagtttattcggaccataacaaccttcagcttgaggccacaacaca

SEQ ID NO: 417420 - DNA, 488 bp, Oryza sativa
gcgagccgtacaacccaccaccaccaccaccaccgatctgcggagagcgagctaccaccaccgagcggcgtagcttgagcgatggcggtggaggagatcaccgagggggtgaggaacctggccgtggagggggagcccgcggcggcggcggcggcggcgggaggtggtggtgagggggcgcagaggagggcggccgggagcagcagcaaccgcatgcaggtgtgcaacaccaagaagccactcttgttctatgtcaacctcgccaagaggtacatgcagcagcacggagatgtcgagctctccgcgctcgggatggccattgcaacagttgtaactgttgcggagattcttaagaataacgggtttgctgttgaaaagaagattagaacatctacggtggaaataaacgatgaatcgagagttcgcccgctccaaaaggctaagattgagatagtgttagaaaagagcgagaaatttgatgagctgat

SEQ ID NO: 417421 - DNA, 508 bp, Oryza sativa
catgtaaatctagcttgctgtaaacacagttagttcgtaattatcgcatagggccatggggaagtacagtgtgggtctcgtggttttagggttgctggcccttgcgttttcgaccactgtgctggctgaaacacatgttgttggtgactccaacggttgggacttctctgtgtcgtttgatagctgggctgatggaaaggtcttcgctgctggtgacactcttgttttcaactacaaaccgggcgcacacaacgtgctggccgtggacgcgtcgacgtacaggagctgcaaggtgggcagctcggcggactcggtggcggcggcgacggggaccgcgtcgttcctcctcaagaagggcgtcaactactacatctgcggcgtgcccggccactgcgccgccgggatgaaactccgggtcgtcgccaactgatgaaactccggcgacagatcaatcccttaattaattaaaactatgtgggtgtctctgcagcctgaagcagcatatagc

SEQ ID NO: 417422 - DNA, 460 bp, Oryza sativa
ctcctcctcctctcttccatcgccgctgctcgcttcctccccctctcccacgaaagatggcgtctcacattgttgggtacccccgcatgggccccaagagggagctcaagtttgccctggagtctttctgggatgggaagagcagcgctgaggatttggagaaggttgcgaccgacctcagggccagcatctggaagcaaatggctgacgctgggatcaagtacatccccagcaacaccttctcgtactatgatcaggttcttgacacggctgccatgcttggtgctgtcccagagcgctactcatggactggtggagagattgggttcagcacctacttctcgatggctaggggcaatgccactgtccctgccatggagatgaccaagtggtttgacaccaactaccactttatcgtgcctgaacttggtcccaacaccaagttctgctactcttccca

SEQ ID NO: 417423 - DNA, 357 bp, Oryza sativa
tggtgacctgaggccggcgttcgacgtgctggacgcggaccgcgacggtcgcatcagccgggaggacctcaagtcgttctacgccagcggcgcggccaccagcgagcggttcgacgacgaggacatcgccgccatgatcgccgcagccgacgtggacaacgacgggttcgtgcagtacgacgagttcgagcgcctgctggggcgcgccgccgcgggggcggggtgccggcccgcgatggaggacgtgctccgggtgatggaccgcgactgggaccgcaaggtggggttcgacgacctcaaggcgtacctcggctgggccgggatgccggcggccgacgaggagatccgcgccatgat

SEQ ID NO: 417424 - DNA, 469 bp, Oryza sativa
  unsure (1)..(469): unsure at all n locations
cctcccatggcctcttccatggccgccaccggcgccctctcgccgccggttttatccgccgagaggccgactgtccgcggcggcctcttcttgcccccttcgccggcgacctcccgctctctccgcctccaatccgcccgccgctgcggcatctcgccggcgaccaggaagccacgctccttgcctcgagcagccaaggttgttgtggctgtgaaggctgatcctttgaaggtcatgatagcaggggctccagcatctggaaagggaacgcagtgtgagctcatcaagagcaaatatggtctggtgcacatttctgctggagatttgctaagggcagaaattgctgcaggcagtgagaatgggaagcgagctaaggaatttatggagaagggtcagctggttcctgatgagattgttgataatatggtgaaggaacgccttctgcaaccagatgctcangaaaagggtt

SEQ ID NO: 417425 - DNA, 484 bp, Oryza sativa
ctccaactacccacaattggactcatggggagggctccatgctgcgacaggaacaacgtcaagaagggaccttggtcgcctgaggaggatgccaagctcaaggagttcatagagaagcatggcaccggcggcaattggattgctctccctcagaaagcacgattgaggagatgtggcaaaagttgtaggcttagatggctaaattacctgaggcccaatattaagcatggagagttcacagagcatgaagacaggatcatctgcaacatgtttgccagtattgggagcaggtggtctataatcgcgtcgcagctccccggcagaacggacaacgacatcaaaaactactggaacaccaagctcaagaagaagctcctcggctcgagcgccgacgccgcctgcgcgcctgcacggatacagcgtcatcagcagagccaccaccggtcgtctctgctcctgccgaactcgccgtcgctcaatcccg

SEQ ID NO: 417426 - DNA, 517 bp, Oryza sativa
ctagatcctaaagatctcgctgcactggaggctacatgtacattcttcagtaaacctgcaaatttcgagccaaactttgctctatcgcttccagaggttgcggcatttgatatgtgccataaaagacccatggttaagctaatggcacagcaggaacgggagcaactgaagcagaggtgtggtggatcttggaagcttgttttcaagtatattgtggctagagaaaggaattactctcggattgtcgccgggccgggccatagtattgttgtcaccacaaagggagatgcatactcatttggggctaattgctggggccagcttggccttggggatactgaagatcggttcaagccatgccttattaggtctttgcaaagcatcaaaatcacacaggctgcagttggatcaaggcagacaatgcttgtgagtgacacaggaagtgtctatgcatttgggaagggtagctttgtgtgggaagagctttctgatgcagctgatcacattaccactccta

SEQ ID NO: 417427 - DNA, 259 bp, Oryza sativa
gcgctctcaaagtagcatatattattcaatcttgatgaaagagggacacaagccatcatctatagggatggggccttttacaaacttcaacacacggataacaagcatacactcaagagtcaagagggggctaggttttgtgtgtacaatggaacacgcaggcatgtacacaaccaagtatactccaccccaaactatagtctttgcaatggttttggcagttgctcaaaaaccatgaatcttgatgtgttccttcttc

SEQ ID NO: 417428 - DNA, 540 bp, Oryza sativa
cttggtgtagcttgccactttcaccagcaaagtttcatgtctgatctcgacattcagatcccaactgccttcggtatgcatgttgttctcttccctctttgtgatggtctgagtgcctggaatatttgtgctcatcatgttttcctgaacatgtacagatccctttgctgaggccaatgctggagactctggtgcggctgcaggatcaaaggactacgttcatgtacgcatccagcagcgtaatggccgtaagagcctgaccactgtccagggattgaagaaggaattcagctacaacaagatcctcaaagatctcaagaaagagttttgctgcaatggtactgttgtccaggacccagagcttggccaggtgtgtgtaataacccaaatttgtggtgcctgatctgtacgtttttctatctttctgagctagtttttctgatcaatgcttcactctgtaggtcattcaacttcagggtgatcagaggaaagaacgtatcaaatttcttggtcaggtagggatcattctcttgtgcatgc

SEQ ID NO: 417429 - DNA, 462 bp, Oryza sativa
gcgttcgtttttgtgtgtgagagaggggagaggccggcggcgatggggaggacgctggacgtgttgctggggcggacgacgaagcagacggcgaggctcaagtcgatgctggggctggcggtgacgcggctcggcgtgctgcgcgggcacaggcaggtgcggtgcgcgcaggcgcgcggcgacgtggagcagctgctccgcctcggccaccccgaccgcgccctgctccgcgccgagcaggtcatccgcgagcagaacacgctcgacgccttcctcatgctcgagtgctactgcaatctcatcaccgagcgcgccgccctcgtggactcgcacagggagtgtcccgaggagctgcgtgaggcggcagcgggtttgatctacgccgcggcgaggtgcggtgacctgccggagctgcaggaggtgaagcgcctcatggcggccaagttcagcagggagttcgtc

SEQ ID NO: 417430 - DNA, 279 bp, Oryza sativa
aaaaagagagagagaaaaaaacgctcttaattgatccgttcgcaatttgcattgcaatcacacacacacacacacacacacagaatcgtagtacagtactagtgccgaactgccgatcggtagaatcaaaattcgttcttgaccggcgacacaagacgacgaaggcattgcatgcacataggtagatcgatcgatggatcaacggaactggactttggagccgtagttggtgttggccctccagttggccgggatgacctggtgggcgatgacggtctg

SEQ ID NO: 417431 - DNA, 440 bp, Oryza sativa
gttcacgtacggcttcgccgccggcgtcgtgtacaccaacgactggctcccggccaaggccacctggtacggccagcccaacggcgccggacccgacgacaacggcggtgcgtgcgggttcaagaacaccaaccagtacccgttcatgtccatgacctcctgcggcaacgagcctctgttccaggacggcaagggctgtggcgcctgctaccagatacggtgcaccaacaacccgtcgtgctccgggcagcccaggacggtgatcatcacggacatgaactactaccccgtggccaggtaccacttcgacctgagcggcacggcgttcggcgccatggcgaggccggggctgaacgaccagctgctgcacgccggcatcatcgacatccagttcaggcgcgtgccgtgctaccaccgcgggctgtacgtgaactgccacg

SEQ ID NO: 417432 - DNA, 555 bp, Oryza sativa; identical to SEQ ID NO: 394691

SEQ ID NO: 417433 - DNA, 486 bp, Oryza sativa
gacagatatgacggccgccctgcaagcgctgctcgacccgacggcgctgtccttgggcctgcccacgccggcgatcaacaaggaggagtacctcgccatctgcctcgccgcgctcgcctgcacgcgggcggggaaggccctggtgggagtgggaggccagcagcaggtgcaggcctgcaataagtggctgtgcccagcgcccgcggcgcctgaggagctccgcttccggtgcaccgtctgcgggaaggccttcgcctcgtaccaggcgctcggcggacacaagtgcagccaccggaagccgccttccccgggagaccactacggcgccgccgccgcggcgcagcagctggcatccgctggtgactcgaaggaggactcggcgtcgtcagcggccgggagcactggcccgcaccggtgcaccatctgcaggaggagcttcgcgactgggcaggcgctcggcggccacaagcgctgccactactggga

SEQ ID NO: 417434 - DNA, 257 bp, Oryza sativa
caggcaaatgcatgcacagttttacagaagcaaagcaacgggttcccaaaggtccacacttacagtacgttcaacgtacaactgatccaagcaaatgaaacaggtttgatgatgcactgatgcgagaaactaaacggttggatcggagtcggagacgaggcgatcatggacaagcggcggcggcggcgatgagcttagtagtcggtggtggggagctgctcgtgggtgtgggagatgaagaggaccttgtagatgac

SEQ ID NO: 417435 - DNA, 369 bp, Oryza sativa
gcgcacacaccactccatttctgagctcttctagtttgagtgagagagcagcagaagggagtagtgcaagatgccgatccgcaacatcgccgtggggagccaccaggaggtgtaccacccgggtgcactcaaggcggcgttggccgagttcatctccaccctcatcttcgtcttcgccggccagggctccggcatggccttcagcaagctgaccggcggcggagcgacgacccccgccgggctgatcgcggcggcggtggcccacgccttcgccctgttcgtggcggtgtccgtcggcgccaacatctgcggcggccacgtgaacccggccgtgaccttcggcgccttcgtcggcggcaacatcaccct

SEQ ID NO: 417436 - DNA, 479 bp, Oryza sativa
gcggttacaatcagcacacgctctctgctagtctgagcgctctcgccatcgcacctgtgtctcgtcgaacaatggcctccaccgccgccgcttgctcccctttcgactgcgtcctctttgacctcgacgacacgctgtacccgggaagcgcgggcatcgggctggcgacgaagcgcaacatcgacgagttcctcatggcacggtgcggcgtcacggcggagcgggccgccgcgctccgcgtcgagctcttccgctcctacggcagctcgctcgccggcctcatcgctctcggctatgacgtgcacccggatgagtaccacagctacgtgcacgggaggctgccctacgaccggatcgccgccgacccgcagctcgccggccttctgcggagcatcccgcagcgcaaaattctgttcaccaactctgatcgcgcgcacatgaggaaggcgctgcagcggctgagcgtcgacgagggctgc

SEQ ID NO: 417437 - DNA, 470 bp, Oryza sativa
ggtacatcaatgagccgtacaaattctttgatagggggtgataacaagggagccgctgcacgcttcatggaagactgggctgaacaaatgggcttgcccaaacagtcagctcatgcaaattctgatgatttgagatctttgcacaagacatctgtgcttcctcggagagttgctactataattcctgaaccaaatgagataactgatgacttgatacaattggcatcatcctatgaggcctcaggtggcaggcggttggcaggttcaagtatcactaggcgcattagaagtactcaacaaaacaaacctaaatttgtttctgcatttcgtcagtccaatcgtggagatgttagtgcaaatgtgcttggaacattttgcatagacaccaatcttacctgtgacttgaatcacagcacatgtaatgggaaaaatgaactttgctatggactaggcccaggataccctgatga

SEQ ID NO: 417438 - DNA, 278 bp, Oryza sativa
aaccaaaacataggaggtttcatttcttcttctcaaagtagtgtagcatctttccttctttcaccattacataagcttaagcaataacagataacaaatcctcctcctcctctaggtaaaatattcaaacacaatacccttataagtacttattattaggaaagtagcgtgcatgggcataaatggcagcggggggcaggttaagaatcacaatgctgagcagcgaggaaacaaaacaccataatgggacagagcaaaagcctccgaaagggagcttt

SEQ ID NO: 417439 - DNA, 409 bp, Oryza sativa
ctcctgcacctgctcctgctccccccgatcggatcggcccggctcctcctgctccgccgccgccaccgccgccgcagataggagaagatggccgcacttgataccttcctctttacctcggagtctgtgaacgagggccaccctgacaagctctgcgaccaagtctcagatgctgtgcttgatgcctgcctcgccgaggaccctgacagcaaggtcgcttgtgagacctgcaccaagacaaacatggtcatggtctttggtgagatcaccaccaaggctaacgttgactatgagaagattgtcagggagacatgccgtaacatcggttttgtgtcagctgatgtcggtctcgatgctgaccactgcaaggtgcttgtgaacatcgagcagcagtcccctgacattgcac

SEQ ID NO: 417440 - DNA, 278 bp, Oryza sativa
acatgataaaattattattgtcttgaattatgtaaacgatgataacaaatccttttccagctacaaaagaaccagcataacaacaaagaattataaagttgcttaagtaatctctcccttcatctcaaaaagagctatatctagggggcctaggccacagcaacactttcacttaaagggtactttccatcctgcgacacacaagctcccaggatcaatctacttggccttgccgttctcgacagcagcagtcgaggggttcagctcatcccaggcct

SEQ ID NO: 417441 - DNA, 485 bp, Oryza sativa
atcacctgctccttcttctcctcttcctccgcgcgcgcgagatccagggagagggagagggagagatcatggcggggacggtgacggtgccgtcggcgtcggtgccgtcgacgccgctgctcaaggacgagctggacatcgtgatcccgacgatccgcaacctggacttcctggagatgtggcggcccttcttccagccctaccacctcatcatcgtgcaggacggcgacccgaccaagaccatccgcgtgcccgagggcttggactacgagctctacaaccgcaacgacatcaaccggatcctcggccccaaggcctgctgcatctgcttcaaggactccgcatgccgctgcttcggctacatggtctccaagaagaagtacgtgttcaccatcgacgacgactgcttcgttgcaaggacccatctggcaaggacatcaatgctcttgagcagcacatcaagaacctgctcagcccgtgcaccc

SEQ ID NO: 417442 - DNA, 501 bp, Oryza sativa
gttgattttgcttttctttgctttgctttccagtgggaattttgtgtacgagtacagcacaagctcagctcagctgcttcagctataaaagcttctcactctctcacacacacactctctctctctgctagctcagctctagatccagcaatggcgcctcctccggctgcagctgcggcgttggcggcgtgcattctcgccgtcgccgccaccctcgccggcgccgacgacccctaccgcttcttcacctggaacgtcacctacggcagcatcaacccctgtcggctgcacccccgcagcagggcatcttgatcaatggccagtttcctgggccgcgaatcgactgcgtgacgaacgacaacatcatcgtgaacgtgttcaacaacctggacgagccgttcctcctgacatggaatggcatcaagcagcgcaagaactcgtggcaggacggcgtgctgggcaccaactgcccaatgccccctggcgccaactacacctaca

SEQ ID NO: 417443 - DNA, 502 bp, Oryza sativa
tcgtccgatccgatctgagccagagccaaccatggcggcgactagggtttggctctccgccctcctcctcgccttcctcctcgccgacgcccccgtcggccaagttgccagagctcagtccgaggaagaagctgctacagctgaagttgttgatggggctgatctaggaatcgtcagtgatgatacacaagtttccagcgatgggcctctaagtccggctcctggtgtggagacagtatgtgtttttcccaaaaacgctggcaaaattgtgctagcaggtgaagaaactgaactactggttggcctgcaaaacgagggtgaatcaactttgaatgttgttgctatccattcaactctccatcttgcttttgaccataagatgtatggacaaaaccttactgttcagaacttcttcaatgcatcagttcctgtctctgtacaagcaacctttgcgtatacattcgccgtgagcaagttctggcagcctggagcatatgatcta

SEQ ID NO: 417444 - DNA, 298 bp, Oryza sativa
gcccccaacggccacaggtccgactggatcatgcacgagtaccgcctcgagaccaccgagacggccccgccgcaggaagaagggtgggtggtatgccgggtgttcaagaagagattacccacaacaagaagagattcagaccatgacgcaccttgcggcagctggtacgttgatgaagatgcaccgggcgccttcatgtctccgatgatgatcaccagatcatcaatattgcgcccacaccaacaccacgccggcatcacgctgcaagagcaacacctccacaccacttacaagcaca

SEQ ID NO: 417445 - DNA, 549 bp, Oryza sativa
caaatcctcctctccgccgccgccgcctgcacctgcaccgctcgccccctcgccgcgcctgcactcctcacaccacgctcctgctgacctcctccctcgcgcttctccggcggcgcctcgctcctctgcgcggaccgttgcccctggccgagcgcggcgcggcgcgggccgcccgcggggggatcgggctcgggtagaggcgggcgacctggcgggggaagtaaggggtcgcgcgtggcggggagatgatctacacggcgatagacacgttctacctgacggacgagcagctgcgggactcgccgtcgaggaaggatgggatcgacgaggccaccgagaccgccctccgcgtctacggctgcgacctcatccaggagagcggcatcctcctcaagctaccacaagcagtgatggccacagcacaagtattgtttcatcgtttttactgcaagaaatcatttgttcgggttagcgttaagagagttgctgcaagctgtgtttgggctggcaggaaagtggggagagtccaggagatcaagcatataatca

SEQ ID NO: 417446 - DNA, 521 bp, Oryza sativa
tcttgtcaaagaaaccccttctttagagtagcgtgtaactataagtggggttatttgaggctttaaatttttctaaaagtcaacacaaaagttttcttcaacttgtttgtggcttgatattttgtactgaggatattaagaactgcgttagcctcaaagtcttatctagaataaacatgttttacttttgtagtagtttgtggcttgatatgtgaagttgttggcatgtatgcaatagcaatgatgattttactacttataatatttgacttctaatcatattctttgtcttcagggcgaacgcccagcaaccaaagctgttcgtgggtatgatcctcatcctcatttttgccgaagcgcttgctctctatgggctcatcgtcggcatcatcctgtcatcccgcgctggccaatctcgtgcggattaggcatgtttcaacacgcagacccttagtgggttcttggttcatattgctgaaactacaagctgagctctaggggtttattctggcttagtttct

SEQ ID NO: 417447 - DNA, 276 bp, Oryza sativa
accacaactttttaaggatggaatcgagtagcaatactttcaccccaaaatacagtttagcgacaatatcttagaaaagccgcttgctttgccgccatggctggcaagctgagcagagcagctaacacaaagaacacgagatcactataaaccaaacggcaacgaacgaagaaaatacagggtcttttttgtctgaagatacacgaagcggttcgttttcttttatttttagtctcctctcctcctcgatgatgggtgtatggcaatggcaatggc

SEQ ID NO: 417448 - DNA, 448 bp, Oryza sativa
ttcttcagtatcgaatcctctcttctcctcgtgcccaccaccaccaccgtagcaatggcgggcaacgggccgatcaacaaggaggacccgctcaactggggcgcggcggcggccgagatggccggcagccacctcgacgaggtgaagcgcatggtggcgcagttccgcgagccgctggtcaagatccagggcgccaccctccgcgtcggccaggtggccgccgtcgcccaggccaaggacgccgccggcgtcgccgtcgagctcgacgaggaggcccgcccccgcgtcaaggccagcagcgagtggatcctcaactgcatcgcccacggcggcgacatctacggcgtcaccaccggcttcggcggcacctgccacctggcgaccaaggacggccccgccctccaagtcgagctcctcaagcatctcaacgccggaatcttcggcactg

SEQ ID NO: 417449 - DNA, 272 bp, Oryza sativa
gactaggaaaaaacgaaggaactcaggcaaatgcatgcacagttttacagaagcaaagcaacgggttcccaaaggtccacacttacagtacgttcaacgtacaactgatccaagcaaatgaaacaggtttgatgatgcactgatgcgagaaactaaacggttggatcggagtcggagacgaggcgatcatggacaagcggcggcggcggcgatgagcttagtagtcggtggtggggagctgctcgtgggtgtgggagatgaagaggacctcg

SEQ ID NO: 417450 - DNA, 365 bp, Oryza sativa
cacaccatctccatttctgagctcttctagttggagtgagagagcagcagaagggagtagtgcaagatgccgatccgcaacatcgccgtggggagccaccaggaggtgtaccacccgggtgcactcaaggcggcgttggccgagttcatctccaccctcatcttcgtcttcgccggccagggctccggcatggccttcagcaagctgaccggcggcggagcgacgacccccgccgggctgatcgcggcggcggtggcccacgccttcgccctgttcgtggcggtgtccgtcggcgccaacatctccggcgggcacgtgaacccggccgtgaccttcggcgccttcgtcggcggcaacatcaccct

SEQ ID NO: 417451 - DNA, 458 bp, Oryza sativa
gcgacccactcaccatcccaaggcggcgcgacgacccatctcgccgccgcgaattctctctccggcgaattccaactcgaaccctgcctccgccgactccgctcacgagacctaaaccctccttccctctcctctcgtgtcgttcccaccaccatgctgggcgtcgcgaggaggcgcctcggatccggatgcgcgctggggcaactcatgcaggcgctccgaccggccgccgccgccgccgcggcgaggacctactccgccgccgccaaggagatgactgtgcgtgaagcatcgaattctgcccttgatgaggagatgtctgctgacccttctgttttcttgatgggagaagaggttggagaataccaaggggcatataagatatcgaagggtttgttagacaagtatggccctgatagggttcttgacacaccaatcacagaggctggttttactgg

SEQ ID NO: 417452 - DNA, 298 bp, Oryza sativa
gtcgagcggttcatgaacatccccccgctccccgccggcaccgaccccgccaccggcgtcacgtccaaggacgtcgtcgtcgacccggccgtcggcctctgggcgcgcctcttcctcccgcctggcggcggtgctccccagggtaagctccccgtcgtcgtgtactaccacggcggggcctacgtcgtcggctcggccgccgacccgttcacgcactcctacctcaacggcctcgtcgccgaggctggaattctcgccgtcgcgctggagtaccgcctcgcgccggagcaccacctcc

SEQ ID NO: 417453 - DNA, 445 bp, Oryza sativa
  unsure (1)..(445): unsure at all n locations
cttcttcgactgcttcgtcgatgggtgtgacggctgggtgctgatcacgtcgacggggggcaacacggcggagagggacgcgcccgacaacctctcgctggcgttcgagggattcgagacggtgaggagcgccaaggccgccgtcgaggccgcgtgccccgaccaggtctgctgcaccgacgtgctcgccatcgccacgcgcgacgccatcggcctgagcggtgggccattcttcccggtggagctgggcaggctggacggcatgaggtccagcgccagcaacgtcgccggcaagctgccgcagtcgaacaacaccctcagcgagctcgtcgccatcttcaaatccaacggcctcaacatgtctgacatggtcgcgctctcagcggcgcacagcgtcaggctggcgcactgcagcaagttctcggaccggatgtanccgtacaac

SEQ ID NO: 417454 - DNA, 499 bp, Oryza sativa
  unsure (1)..(499): unsure at all n locations
gcgccccaaaaccctagctcgagcgctcccttgttgcccccacctctgcggcggcggcgggcggcgagatggcgaagtcgctgcggtcgaagcgggagaagcggctgcgcacgctgcggcgggagatcgcgcagcccttctacgacaagaaggaggcggccaaactcgccgcgcaggccgccgcgctcgaggcgcccgcgctgccggtccgcgcgcctccgccgccgtccaaggattccggcggctcccgcgccgcctccagctcggcatcggcatggacgttgagatggcggatgaaggaaataacaagtccaagtccttcttgaagccaattggtagcattagcaagaagaaggtacaacttcacttgaagatcaagaaagataaaagaaaagctaggaagaaggngaggtttagtaaaaagtaggtgtcaaagcttacttctgtatgagaaccatcaattttggttagtttgaacaatgcatgtaatggtaatctc

SEQ ID NO: 417455 - DNA, 485 bp, Oryza sativa
tgtcaatcccttcatggcttgggaagctcagctgcttggctatcttgaagctcagcaacaattccttctcggggcctataccgccagagctcggtgactgccagagcttggtgtggctggacctgaatagcaatcagctgaatggatcaatacccaaagagctggccaaacagtctgggaagatgaatgttggcctcatagttggacggccttacgtttatcttcgcaacgacgagctgagcagcgagtgccgtggcaaggggagcttgctggagtttaccagcatccgacctgatgacctcagtcggatgccgagcaagaagctgtgcaacttcacaagaatgtatgtggggagcacggagtacaccttcaacaagaatggttcgatgatatttctcgatttgtcatataatcagctggactcggcgattcctggcgagctgggggacatgttctacctcatgatcatgaatcttgggcacaac

SEQ ID NO: 417456 - DNA, 531 bp, Oryza sativa
cgcctccttcgctgccaccatctccttcgccgccgggcaccatcgccggcggtggccgggttcatgctgtcctgaaggagtggaatgctcgtcggtgattagtaggtcaccagaatatcttctctcctagcctcctgggcttgtttacccaatttatcatcagcttcctgaaatctgaagaaaataaattcggttttactaccaccatgggtgcctgcgtgtcttcaagcaaaaaacggagatcacagaaattgtgctgtatataccggcgttaccgcggaaaagttttgagcaatgcacctatagtacgcgccagtgatgcagggagccgtgctgctcctggagaagttgttcatgtggaggctaaatctgatggctcgaatgtaacatttcatctcacacagttgcagtggcatcatagtgagctagactcagaaaatggaaatgttgtgtgtcaagaagaagcatggttcgactctctcagtattttaggatctgattctgatgaagatttcacagtgttaatggaga

SEQ ID NO: 417457 - DNA, 534 bp, Oryza sativa
cataaatacgagccgctcgacggggaaccgccgcgccgcgtccaccacccaccacaagctcgccgccggcgtcgcggacggcggctcatcccggtccggcgtgcgatccggctgactggccggagacctaggagcttggaccccccccccccccccccgcgatctgggcggcccatggtggggtcggtaccgcagggcggcagccgcggcagcgagatctagggttttcggcgcctcgggggtggggagggagcgatggggcgtcggaaggtcgccgcggcggcggctgcgacgccgccgcgtggctcgtcgaaggccgggggcggcgtcatatccgaaatccgtgagaaacacaaattggaactggagaatttgacactaacaaagcatccattcaggacattacgttttttcatgttagctatgttgcaatacttgaaaagattagcaacatatatcctgagtaagggtgctttgtttgttggcctcattgtgttggtgctagctcctggaattttacttgccgttacagat

SEQ ID NO: 417458 - DNA, 499 bp, Oryza sativa
  unsure (1)..(499): unsure at all n locations
gttaagggagagatttgctcatcggtatcacagtggctccctttttggcatgaactccaggggcaggagaggtgagtcctctcgacgtggtgacataattggttcaggtcttgatagaaatgctggtgattcttctcgacaaccaactagcaagccaattgaaacggaaggatctcctcttgttgacaaggatgctcttaaagctcttattaggctactccgggttgttcagcctctatacaaaggtcaattgcagaggcttctcttgaacctttgtgctcatagggaaagcagaaagtccttggttcaaattctagtggacatgcttatgcttgatctgcagggctcttctaagaaatcaattgatgcaactgagccaccatttaggctatatgggtgccatgcaaatattacgtactcacgcnctcaatcgacagatggcgtgcctgcattaggtttctcgtcgtgttcttgaactttgacatacttggcaagaaat

SEQ ID NO: 417459 - DNA, 522 bp, Oryza sativa
ctcgtcttctccggcgagccaccggcgatgggaagtcgcagcggcggccgccaccgactcttcctccgattcatcgccctctcgtcgctgctcctcatcgccgccggggaggtcatcttcgaggagcgcttcgaagatggttgggagtcccgctgggtgaagtctgattggaaaaggagcgaagggaaagctggaacgttcaaacacacggcaggaagatattctggagatcctgatgacaaaggtatacagacaacgttggacgccaggcattttgctatatcggccaagatccccgaattcagtaacaagggccgtacattggtactccagtattccataaagtttgagcaggatattgaattgggtggtggatatattaaacttatgtctggttatgtcaaccagaagaaatttagtggagacactccatacagcttaatgtttgggccagatatatgcggaactcaaacgaagaagctccatcttatactgtcttatcaagggcagaactaccctatc

SEQ ID NO: 417460 - DNA, 357 bp, Oryza sativa
ctcactctcacttccttagctcgcatgtagcagagagtccagacacaggagagcaatggcggcaatgcatgtggatgcttccacaggggtgatgaacactctcctacccaagctctccaagcttcttgaagagtacacaaatatcaaaggcgctgcgcgcaaccaaattaccttcctgagagatgagttgagcagcatgaagcctgtgctagagatgtttgcagatgtagatgatgggctcgatcctctgaagagggaatggcgggacaatgtgcgtgagctggccttcgacatcgaggactacactgattctttcatgatccgtgttagccatgaaagtgatgaactgcctactgg

SEQ ID NO: 417461 - DNA, 512 bp, Oryza sativa
ctggtacgcctgccggcacgggcccggcacttactggccggacccacgcggccgctcttttagcgaatggggaagcgacagcagcagggggggctcgtacgcttcgccgtcgccgccgccgtcgttgtcgcggcggccctcatcctgaccgcttaggccaagaagtccggagatgtcacggagcttcagatcggggtgaagtacaagccagagtcatgcaccctgcaagctcacaaaggagacaaaatcaaagtgcattatcgtgggtcactcactgatggatcagtgcttgattctagctatgacagaggtgacccctttgaatttactcttggaaacggccaagtgataaaaggttgggaccaagggttactaggtatgtgtgtcggtgaaaagaggaagctaaagatacctgcaaagatgggttatggggagagaggctccccaccgaagattccaggtggagcaacactaatctttgacacggagcttatcgccgtcaatggaaagac

SEQ ID NO: 417462 - DNA, 282 bp, Oryza sativa
caacagcaaccaaaatttagataatcggctttatagggggaggtcattcatcttctaaagaacataacatagctcaaaatttataaatccacatccgatgctaagatcataatagagtacagaacaagttgcaaggacaaggatagatagctttgctttccccccataacaggcactacacggaattacagcctccttcctcttctgccaccctttctgcgggtactgtcagttgggactggagtaacatcctcaatgcgtccaatcttcatgccagaacgt

SEQ ID NO: 417463 - DNA, 523 bp, Oryza sativa
cctaactctagcctgcttctcctcctcctccccgccgccgtcgtcgcgagcacagacgacgcagccatgtccgggaggaagaagacgcgagagcccaaggaggagaacgtgacgctcggccccacggtccgcgagggcgagtacgtcttcggcgtcgcgcacatcttcgcgtcgttcaacgacaccttcatccacgtgacggatctgtccggcagggagacgctcgtccgcatcaccggtggcatgaaggtgaaagctgaccgtgatgagtcatccccttatgctgccatgcttgcatcccaggatgttgcacagagatgcaaggagcttggaattactgctctgcacattaagctccgtgctactggtggaaacaagacagaaactcctggtcctggtgctcaatctgcgcttagagctcttgcacgttctggcatgaagattggacgcattgaggatgttactccagtcccaactgacagtacccgcagaaagggtggcagaagaggaaggaggctgtaat

SEQ ID NO: 417464 - DNA, 484 bp, Oryza sativa
ctctctttgtcgccgtcgccggaaccctaggccgccggcgccgccgtcgccgtcgccggagccggagtcgtcggagctcccgtcgtcggcgggggaggaggaggatgcagctgcggatctcgccgagcatgcgcagcatcaccatctcgagcagcaatggcgtcgtcgactcgatgaaggtgcgggtggcgccgcagacgcccccgccggcgccgccgctcgcgctgcagggggtggtgacgccgggcgcgggccgccaccggatcatggggagaggacggcgagcccaatctgtgaggctgatcgtgagaagctgaaggacggtgcttttgaggatgtcctgaggagtgcacaggaggggattgttatctccccatgggttgcccttgccatgccgccgaggcccggtgtctgggagtatgtgagggtaaatgtgagcgagctcgctgttgagttgctgacagtcccccggtacttgcagttc

SEQ ID NO: 417465 - DNA, 528 bp, Oryza sativa
ctctcctcctcctcgtccccgtcctcaacctcaccgcctccccgccgcagtagcagagtcgcccgccgccgcgcatccgcatggcagctgctcaaggtagcagcgttgtcccatcctctgcgaaagttgactttttaaagctccagaatggcagtgatattcgtggtgttgctgttggtggggtcgaaggcgagcccgtaaatctcactgagcctgttactgaagcaatagcttctgcatttgctgcatggttattaaacaagaagaaagcggatggatggagacgtttaagaatttctgttggacatgattctcgaatttctgcacataaattgcaggatgcagttactcttggaattaccactgcagggcatgatgttttacaatttggattggcttcaacaccagcaatgttcaacagtacacttacagaagatgagataaatcattggcccagtgatggagccataatgataacagcaagtcatcttccatacaaccggaatggtctcaaattttttacaagtg

SEQ ID NO: 417466 - DNA, 274 bp, Oryza sativa
gcaagtcaaatacactcttttctctccatagtagagtttgagcagcgagcgggcaaacataaattattcaattattaaatgatatgatcactcttgatcatctcaacactataggaacaaaacttcgctaccgcgattttactattttagttgtccacaacttcaatgagggttggttcgtagtcagcaggagcctcgaaaccatggaagttcattacggttgcagcaacattggcgagcccaggggtctgaatgtcagaccggaatttcacac

SEQ ID NO: 417467 - DNA, 492 bp, Oryza sativa
gttgatggtgatgcagttgtgactttcaatttgcgagcggatcgtatggttatgcttgccaaagcactagagtatgcagactttgacaaatttgatcgtgttcgtgtaccaaaaatccggtacgctgggatgcttcagtatgatggtgagttgaagcttccgagccattaccttgtctccccaccagagatagagagaacatctggtgaatacttggtaaagaatggcgtccgaccttcgttgcagtggacagtgaagtttggccatgtcacatttttctggaacggaaaccgatctggatactttgatgaaactaaggaagagtacgttgaaattcctagtgatattggaatcacattcaatgttaaacccaacatgaaggcacttgaaattgcagagaaagccagggatgccattcttagtggaaagtttgatcaggtacgtgtcaaccttgccaatggtgacatggttggtcacactggtgatattgaa

SEQ ID NO: 417468 - DNA, 280 bp, Oryza sativa
ggaaacaaggatgctacaatatattattgcagaaacggcaccaaggccgtttctattattcataggtaacatcccaataacaagaggagacagagcaccaaccacacaccacattccactgaactcacccccaactaaatcaaactagaaaactcccaaattcaatcgaccttactttcttaaggaaaaagagcagtgcctaggaatgcaaagcatcctgaaatatctctcttctcttttcatctctgaaaccagagaatggaaacaaagcaaagaaact

SEQ ID NO: 417469 - DNA, 531 bp, Oryza sativa
gctgacctccgttaaccccgttcgttttatttgcggttacttcgtttcttgggaaggcacttccttcctcttcctaggaaggcttgaggagccaagaggaagaggagagcaatgggggaagctgccggcgaccgcgtcctgagccgcctccacagcgtcagggagcgcatcggcgactccctctccgcccaccccaatgagctcgtcgccgtcttcaccaggctggttaacctcggaaagggaatgcttcaggcccaccagatcattgctgagtacaacaacgcaatctctgaggctgatcgtgagaagctgaaggacggtgcttttgaggatgtcctgaggagtgcacaggaggggattgttatctccccatgggttgcccttgccatccgcccgaggcccggtgtctgggagtatgtgagggtcaatgtgagcgagctcgctgttgagttgctgacagtccccgagtacttgcagttcaaggaacagcttgtggaagaggcaccaacaacactttgtgcttgagctgga

SEQ ID NO: 417470 - DNA, 459 bp, Oryza sativa
  unsure (1)..(459): unsure at all n locations
gttgttgtaaagttgcgagagagagagagagggggatcagttagtttgttgaggggaagcagatcaggaagatgctggagaagctgtgggacgacgtggtggccggtcctcgaccggagaccggcctcgagaagctccgcaaggccgctacaacccgcccccttgtcatcaacaaagatggcgacggcgaggcgagcggagtggcgtacaagcggacgcagtcgatgccgacgaccccgacgacgccggtgacgccgtcgtgttcgtccccgacgacggcgacgacgacgacgccgcggggcagcaacgtgtggaggagcgtgttccacccggggagcaacctacgcaccaagagcctgtgcgccaacctgttcgaccggccccagcccaactgccccaccgtgtacnactggctgtacagcgacgagaccaggagcagccatcgctgaactgaataat

SEQ ID NO: 417471 - DNA, 524 bp, Oryza sativa
gacgcccgccggcacgggccgggacactggaccggctgggcccacgcgcgcgttttctcaccggagccatagccggcgggagagggcagcccgactgccagagcctgtacctacgactatccgcggccggatggcgccccgcgtgtccctgctcgccgccggcgccgtggccgtggccgtggtcctgcttctcgccgcgccggcgcgggcgtccaacgacgagggggacgcgctgtacgcgctgcggacgaggctgtcggatcccaacggcgtgctgcagagctgggacccgaccctcgtcaacccctgcacctggttccatgtgacctgcgaccacgccagccgcgtcgtccgcctggatttaggaaactccaacatctccggctcgattggccctgagctaggccgtcttgtgaacctacaatgcctggagctgtacaggagcaatcttaacggtgagatgcccaaagaattgggcaatctcaagatttgatcagcttggatttgtatgccaacaagctcac

SEQ ID NO: 417472 - DNA, 277 bp, Oryza sativa
gtagaagtaataggtggtcctgaataaaatttgtgaatgtatcaaccaacatacagctatatctgacctgaacagcaggaagtaagccgtgcccaaaaaaagggggaaaggactaagaagaacaagacatggatcgataatatgtgcatgacaagcgctagctacaagggctagaagatatgtaaccacctaaaccacagcgatgtacagcaacatccggcgagctaatccctcatcaacaaatcgaaagaaacaaaagaatccatccgtccatact

SEQ ID NO: 417473 - DNA, 413 bp, Oryza sativa
gcttgggggcaacaaggtaggaggcggcgatgggttcggcgagccgcgcggtgtcgtgcctgtgctgcccgtgcaagtgcctggcgtgcggcctcttcagctgcctctgcagcatcctcatctccctcctcgtcaccctcggcgtgctcgccctcatcttctacctgatcttgcgcccccacatgatcgccgccaccgtcgactccgccgccctcacccagttcaccctctgcaccaactccgccctcgcctacagcctcaccgtcgacctgaccgtgcgcaaccccaacaagcgcgtcggcctctactacgacaacgtcgagtccctcgccctcttcgacggccagcgcttcggctacgcccccctcgactgcttgtaccagtccaccgaggcatgcaccaagctctccccc

SEQ ID NO: 417474 - DNA, 433 bp, Oryza sativa
cttttatcaggaccaacgcatctgcaaggcagcggcgagggcaagaacacacacagactgctactgctcttagctgtgcgaaaaagaacactctaagatatcgcacgacgagacatcacttgtactgcatccgcgtgcatgcggattaagctgtgcttatgcctctttagtggagatgtggtgagtccatcaggccaatatatgcgcagactctgggcggagagagacactcacactagcccaagatggggagtgtgcacaagtacagagatattctcctcatgaaaacgactactacgcatggagagcgctcagtatgctacgtatacggatccgaagcaccccggatgtgttgccgtcaaggatctgctcgggcggatgactctcgctgcgaacatagcccagatgacccacactgagaggaagaatgcca

SEQ ID NO: 417475 - DNA, 286 bp, Oryza sativa
tttttggtaacaaaagccatactctctgtattaaagatccaacaggttcagagaacacgcaagctcagaactacacatcaccaaaattggagcaagtttgggggtacatatccgctcatacagtggaggatttatttctcgattctacgagctttttaactagagttcgaccgggaagtcaattacggatagaaatgagcatcctgtcttcacaaaacccatgcacacaacagtgggcatgaaccgcatgagattaaccatcaagtttagttgggctccacgggtg

SEQ ID NO: 417476 - DNA, 506 bp, Oryza sativa
tctaccgtctgcttcctccattcctccggcggtagaaccttctagaagctctcctcctcctcccatggcggcgacgatcgtgtccgtcaaggcgcgccagatcttcgacagcaggggcaaccccaccgtcgaggtcgatgtgtgctgctcagatggaacctttgcaagggctgcagttcccagtggtgcatcaactggtgtctatgaagctctcgaattgagggacggtggatctgattacttgggaaagggtgtttccaaggctgtcgacaatgtgaactcggttattgccccagctctgattggcaaggaccctacgtcacaggctgagcttgataacttcatggttcagcagcttgatggaaccaaaaatgagtgggagtggtgcaagcagaagcttggtgctaatgcaatcctggctgtgtcactggccatttgcaaagctggagctatcatcaagaagattcctctgtaccagcacattgccaccttgctggaacaagcac

SEQ ID NO: 417477 - DNA, 489 bp, Oryza sativa
gtcaccaatgtaggagatatccaagagaaccggacaaaattggtgtgcagtctttgcaaggttatgcatggtgcatgcattcgatgtagccatggagcatgccgagcctgctttcatcctatatgtgcaagagagtcaaagcatcagatggagatatggggcaaaactgggaacaccaatgttgagatgagggcattttgcttgaagcattcgacagtccaagaaactatctcaatacagaatgacagaatatgtgctgaagaggatacctcacaaatcgagcttgatgatgcaagccttgccactcagaagattcaacaactgagattgacacgcaataacaaggacaaatttaccagcagcatgattgctagctcttgttcgtctagcctcaaacagacaacagaattagccacatcgccatctactgctaggagtgtgggaagtcaagaaacccaaataacagatatggctgttgatcgacctata

SEQ ID NO: 417478 - DNA, 284 bp, Oryza sativa
tctctcagactaattcagggtagatttgtagcagctgttgagaaagctttgaggcaggtcgatgctccatgcacaattggtgtggttctcatgtacaagcgacacagtactcgacattatgctaatgcttcagttggaacaacagccgagataagacaacttgggaggatggatgatggttcattaaatgttgtagcccgtgggcagcaaagatttcgtctgaagcgtcattggatggatgttgatgggtgggttgggggtgatctttatttgatgcgtagaag

SEQ ID NO: 417479 - DNA, 511 bp, Oryza sativa
cgttcccctcgtcgctcttcgcgtcggcaagggcgaccgccatggtcctctcctctgcccaacgcccatcagaggaaagctgagccttggtcttcttccttcatcgagcatgtgcattatctttgctggtgatgatggtcattcggagcaactagctctcctgaacaatgaccatgaagtttcagaagtttgtgttgaagaaatttcagctgataatacaggacgatctttcctcatcaggatttcagaatctaaagttttttactattggtgtgctgagaagtcaaagaaacacgggatggaccttcttgcaaagatgaaaaatctactgcagggaaggccaacactctctgatctcacaggcatctcagattcacgactggatgcttttgccactcatctacacgcttatcttgtcgcatcaagtattggagatgttaaatcgctgggatcacttaatgacttcctgggcgcttcaagcccacaagatcaatatgtacagccctcatca

SEQ ID NO: 417480 - DNA, 266 bp, Oryza sativa
cttcttcttcttcacagttcacatggaaatcagaaggaagtagcaaaaggaagagctgttctacactcgacagagtaacaaactaagagagcaacacaagtaacaagaggagagatttagtctcttttctggtgttctgcaaataaaactctcccctcttgctacccctaaaccccaacccaaggtagtagtaagtcaccccactaaaagtaaccggccatctcttacaaaaattggctgtctcctttgaatcaatcgaatcagat

SEQ ID NO: 417481 - DNA, 540 bp, Oryza sativa
  unsure (1)..(540): unsure at all n locations
gcggactaaaccaaagatatccttctcctggatgtggcaccccttaccctcggtatcgagactgtcggtggagtcatgaccaagttgatccccaggaacaccgtcatccccaccaagaagtcccaggtgttcaccacctaccaggatcagcagacaaccgtctccatccaggtctttgagggtgagcgcagcatgaccaaggactgccgtcttctcggcaagttcgacctatctggcattccagcagcaccaaggggcaccccccagattgaggtgaccttcgaggtggacgccaacggcatcctgaacgtgaaggctgaggacaagggcaccggcaagtcggagaagatcacgatcacgaacgagaaggggcgcctgagccaggaggagatcgaccggatggtgcgcgaggcggaggagtttgcggaggaggacaagaaggtgaaggagcggatcgacgcccgcaaccagctcgagacctacgtgtacaacatgaagtacaccgtcggcgacaggacatgctggngacaagctgagagc

SEQ ID NO: 417482 - DNA, 343 bp, Oryza sativa
agccttgctaccacgtgttggagatggaggctaatccggtggcgatggaggtggagggggtcgaggcggcggggggcaagccgcggttcaggatgccggtggactccgacctcaaggcgacggagttctggctcttctccttcgcgaggccacacatggcctccttccacatggcgtggttctccttcttctgctgcttcgtgtccacgttcgccgcgccgccgctgctgccgctcatccgcgacaccctcgggctcacggccacggacatcggcaacgccgggatcgcgtccgtgtcgggcgccgtgttcgcgcgtctggccatgggcacggcgtgcgacct

SEQ ID NO: 417483 - DNA, 481 bp, Oryza sativa
tcttctcttcttccccacattcttttcgattctcatctctcccacaacaaatcacgccatggatccctacaagcatcggccgtccagcgggagcaattccaccttctggaccaccaactccggcgcccccgtctggaacaacaactccgccctcaccgtcggagagcgaggccctatcctccttgaggactatcatctgattgaaaagcttgcacagtttgacagggagcgtatccctgaacgtgtcgttcatgcaaggggagccagtgccaagggattttttgaggtcactcatgatatttctcacctcacatgtgctgattttctccgtgctcctggtgttcagaccccagttattgttcggttctccacagtcgtgcatgagcgtggaagccctgagacattgaaggatccacgtggttttgctgtcaagttttacactagagagggtaattttgatctttgtgggaacaatatgcct

SEQ ID NO: 417484 - DNA, 451 bp, Oryza sativa
ggttgatgtttgcccaatctgtcttgaagaatatgatgcagaaaatcctcgctctttaactaaatgtgagcatcatttccatctttgttgcatacttgaatggatggagcgaagtgatacctgcccagtttgtgaccagattactttgatagatgatatgtatgaatagcattggagcatgggactattatgtttggtttgatgctagtttgttctaatgaggaagtacagtcagcaaagctcctgatctatcaacctggtcagacgggggtgctattggaatgaattttgagaaaactaagggaaaataattgaagacgggaatggcttgaaatttgttaaatatcatctcagctttttacattttgtttgaagcattaactgttcatgacaacaggaggatttgttagtatccatatctactgctggttcgattgcttcacagctgatg

SEQ ID NO: 417485 - DNA, 514 bp, Oryza sativa
gcgcttgttatcgttgaaggaactggaatggctggtgttcctggtactgcatgtgccatatttggagctgacactgatgatggagctaatgttatcatgatatcgcaggctagcaaagaacactccgtatgcttcgctgcaccagaaaaggaagttgctgcagtttctgcagctttgcatgtcaggttccgcgaagcatctatctgcaggcaggctatctaaggccgaagtccttcatacatagatcatccttgatgctgtcggcctgaagatggcattttctcctggggtcagtgcaaccctttttgatgcacttgcaaaggcaaatattaatgtcagggcaatagcataaggttgtagagagtacaacatcactgttgtattgaagcaagaagactgcgtaagggctcttagagctgctcactcaagggtcttcctctacaaaaccacacttgctgtcagaatattggacctgggatgattggtcgtactctccttaacccagctgaggatc

SEQ ID NO: 417486 - DNA, 515 bp, Oryza sativa
tctttggcagtgcaaaagtcctggtgaaaggggaaccaaatatttcatatatctgtgctagatactacagagccccagaactcatatttggggctacagagtacacgacagctattgatgtgtggtctgctggctgtgttcttgctgaactacttctagggcagcctgtttttcctggtgacagtggcgtcgaccaacttgttgaaattatcaaggtactgggtactccaacaagggaagaaatcaaacatatgaatccgaactacactgagtttaagttcccccaaatcaaagctcacccatggcacaagatctttcataaaagaatgccatctgaagctgtagatcttgtgtctcggcttctgcagtactcaccacaccttcggtgcagtgcattggaggtgttaattcatccattcttcgatgaactacgagatccaaatgctcgcttaccaaatggccgtactcttcccccactattcaatttcaagcctcgtgagctgaaaggagcatca

SEQ ID NO: 417487 - DNA, 463 bp, Oryza sativa
  unsure (1)..(463): unsure at all n locations
cttttcctccggctcttcttcagtatcgaatcctgtcttctcctcgtgcccaccaccaccaccgtagcaatggcgggcaacgggccgatcaacaaggaggacccgctcaactggggcgcggcggcggccgagatggccggcagccacctcgacgaggtgaagcgcatggtggcgcagttccgcgagccgctggtcaagatccagggcgccaccctccgcgtcggccaggtggccgccgtcgcccaagccaaggacgccgccggcgtcgccgtcgagctcgacgaggaggcccgcccccgcgtcaaggccagcagcgagtggatcctcaactgcatcgcccacggcggcgacatctacggcgtcaccaccggcttcggcggcaccttccaccgncgcaccaaggacggccccgcccttcaagtcgagctcctcaggcatctcaacgccggaatcttcggcactg

SEQ ID NO: 417488 - DNA, 446 bp, Oryza sativa
ttattttattcagctgaagtgtatttgaatgggcatagagaggttcttccaaaaggaatgttccgaaggcacaccctcgatattactgatgttcttcgtccggatggtaaaaatctgcttgctgttcttgttcatcctcctgttcatcctggtgcaattcctcctcaaggaggtcagggtggcgatcatgagattgggaaggatgttgctactcaatatgttgaaggatgggactggatgtgtccaataagggatcgaaacactggtatctgggatgaagtatcaatatccgtaactgggcctgtgaggataatggacccccacctagtttcaactttttatgatgagtttaagaggtcatatcttgcactgcacgcttcagttggagaacagaagtttatgggtttcagattgtaaattgaaaattcaagttttaactgaactcg

SEQ ID NO: 417489 - DNA, 508 bp, Oryza sativa
gtgttaatggtatcctccgcaagtggatctcccgtgttgatgtctggccattcctggaaacatacactgaggatgttgcaaacgaaattatgagggaaatgcaagccaaacctgatctcatcattggcaattacagtgatggaaaccttgttgccactctgctggctcacaaattaggagttacccagtgtaccattgctcatgccttggagaaaaccaaataccccaactcagacatatacttggacaagtttgacagccagtaccacttctcatgccaattcactgctgatcttatcgccatgaatcacactgatttcatcatcaccagtacattccaagaaattgctggaagcaaggacactgtggggcagtatgaatcacacattgcattcacccttcctgtgctctaccgagttgtgcatggcatagattgttttgatcccaagtcaacattgtctctcctggagctgacatgagtgtctacttcccgtacaccgaggctgac

SEQ ID NO: 417490 - DNA, 449 bp, Oryza sativa
atgcgggtttatttatggactggacagtggctaggacgaggcatgctccatagtccttaccttgagatttcagaacacatgctatcggccctagctgcaatccaccaagatgggcatgcctatgctgctgatgatgctgatcctcatcgatgctggcccccaggctggcctagctgcaaagccactcccaaatctgcagctgatgaccaacgagggcggccgtataagaatcatccaggacgacattataaaggcaatcaacaagcatcccaatgctggctggacggctgcactgaatccatactttgcagactatactactgcgcagttcaaacatatccttggagtgaagccaacaccgcatagtgtgctaaatgatgtccctgacaaaacttatccaagaccgctgatgcttccaaaagagtttgatgccaggtctgtatggtcac

SEQ ID NO: 417491 - DNA, 466 bp, Oryza sativa
ctcatcctcatcctggagaagattccagtccttccattgcagctgtggttgcttctcaagactggcctgaagtcactaagtatgctggattggtgagtgcccaagcccatcgtcaagaattgatacaagatcttttcaaagtatggcaagacccgcatagaggaactgttactggtggcatgatcaaggagcttctcatttctttcaagagggctactggacagaaacctcagaggataatattttacagggatggtgtcagcgaggggcagttttatcaagttttgttgtatgagcttgatgccattagaaaggcttgggcatccctggaacccaactatcagcctccagttacctttgtggtggtccagaagcgggatcacacaaggttgtttgctaataatcacaacgaccagcgtactgttgatagaagtggaaacattctggctggaacttgtgttgactc

SEQ ID NO: 417492 - DNA, 447 bp, Oryza sativa
caccagggaaccatatagggatagaataaccaaaacataggaggtttcatttcttcttctcaaagtagtgtagcatctttccttctttcaccattacataagcttaagcaataacagataacaaatcctcctcctcctctaggtaaaatattcaaacacaatacccttataagtacttattattaggaaagtagcgtgcatgggcataaatggcatcggggggcaggttaagaatcacaatgctgagcagcgaggaaacaaaacaccataatgggacagagcaaaagcctccgaaagggagcttttaggcagaaggcttctcccacttgaggggcttcaccacctcccaggtgaagtctgggttcgtccttccgaagtgaccgtaagccgccgtcttgaggtagcgtccgttgccgcctttcttgaggtcaaggttgatgatgatca

SEQ ID NO: 417493 - DNA, 453 bp, Oryza sativa
tcacttccccaaatccccatccagaaaccaccccgatccgcgacgaagatgccggccgcgccgacgctggtgcccgcctgcgacctggaggagccgctgctggcggagtcgtccgagcgattctcgatgttcccgatcaggtacccgcagatctgggagttctacaagaaggcggtggcgtcgttctggacggcggaggaggtggacctctccgccgacgcgcgccactgggacgccgcgctgtcccccgacgagcgccacttcatctcccacgtgctcgccttcttcgccgcctccgacggcatcgtgctcgagaacctcgccttcaggttcatgtccgacgtgcaggtcgccgaggcgcgcgccttctacggattccagatcggcatcgagaacattcactctgagatgtactcgctgctgctcgagacctacatccgcgacggcgccgag

SEQ ID NO: 417494 - DNA, 484 bp, Oryza sativa
aattctgtttcgtgtcactcctcccgttaagcttcccgcggcggcgagagcaagctaagctaggtcgggcatggggaaggacgaggtgatggagagcggcggctcctccggcgagttcgcggccaaggactacacggacccgccgccggcgccgctgatcgacgcggcggagctggggtcgtggtcgctgtaccgcgccgtcatcgccgagttcatcgccacgctgctgttcctgtacatcaccgtggccaccgtgatcgggtacaagcaccagacggacgcgtcggccttcggcgcctacgcggcgtgcggcggcgtgggcgtgctcggcatcgcgtgggcgttcggcggcatgatcttcatcctggtctactgcaccgtcggcatcttcggcgggcacatcaacccgggggtgacgttcgggctcttcctggcgcgcaaggtgtccctgggccgcgccattctctacattgtggcgcagtgc

SEQ ID NO: 417495 - DNA, 498 bp, Oryza sativa
cgctgcctctgcgccatcgcccaggccgagtcgctccgctacaagctcctcggtggcctcgccgtcagaagggcgtgctatggtgtgctcaggtttgttatggagagtggtgctaagggctgtgaggttattgtgagtgggaagcttagggctcagcgtgctaaatccatgaagttcaaggacggatacatgatttcttctggttatcctgttaacttgtatattgactctgctgttagacatgttcttctgagacagggtgtgctgggtattaaggtcaagattatgcttgattgggatccgaagggcaagcaaggaccaatgactcctttaccggatcttgttaccatccatgcccctaaggatgaggatgagttttcaaagcctcttacagctgagatcccagttgctgcttaaatagaataagtttaggtgatctgatgcatgcgcttcatgttttttcagctatgtaatgttcattattacattattactagt

SEQ ID NO: 417496 - DNA, 538 bp, Oryza sativa
ccatatttctcctcggaaagtcaaaggcaagaaacaccatggatgccactgccatcggcaacggcgccctgcactccaatggcgccggcgccgacaccaaagggaagccgatcaaatgcaaagcggcagtggcgcacggccccggcgaggcgctggtgatggaggaggtggaggtggcgccgccggcgaggatggaggtgcgcctcaaggtgctcttcacctctatctgccataccgacctcagcgcctggaaaggagagaacgagcttcagcgaaagtttcctcgcatattgggtcatgaggcagcaggggtggtggagagcgtgggagagggtgtggaggatcttgcccctggagatcatgttgtccccatcttcaccggcgagtgtggtgcgtgcacctactgcgagtccagcaagagcaacctatgcaaaacctaccgtgtcaacccattcaagagcaccatggtcaccgatggtggcacgagggtcaccatgatcgaccgctccttcggcgcacgcaacccggtctaccattt

SEQ ID NO: 417497 - DNA, 505 bp, Oryza sativa
tttttctgggcagcttacacaggggagtgaagtggagtgagtgtgagagagagtgagtgagaatgggtggcaaggccgctctcctgatggccctggtggccatgagcgtcgtcctggaggccagggcggacgccggtggctacggcggcgggtacacgccgacgccgacgccggtgaaaccggcgccgaagccggagaagccgcccaaggagcacaagccgccgcaccaccacgagcccaagccggagaagccacccaaggagcacaagccaccggcctacacgccgtccaagccgacgcccaccccacccacgtacaccccgacacccaagcctacgccaccgccatcgtacaagccgcagccgaagccgactcccactccgtacactcccactccgacgccgccatcctacaagccgcagcccaagccgaaccctgcacccacgtacaagccgcagcccaagccaaacccgccacccacgtacatgcctgcgccgtcacctac

SEQ ID NO: 417498 - DNA, 430 bp, Oryza sativa
cttggtcttcgtctttgttttcgtccttgggttgatatccagaatcagtcggtttggtttgtcagcaatggcgaggctagccggcgttgctgctctctcgttggtgctcgtcttgctcggcgccggcgtgccccggccggcggccgccgccgcggcgaagacgcaggtgttcctctccaagctgcccaaagcgctcgtcgtcggcgtctcgcccaagcacggtgaagtcgtgcacgccggcgagaacacggtgacggtgacgtggtcgctgaacacgtcggagccggcgggcgccgacgcggcgttcaagagcgtgaaggtgaagctgtgctacgcgccggcgagccggacggaccgcgggtggcgcaaggcctccgacgacctgcacaaagacaaggcgtgccagttcaaggtcaccgtgcagccgtac

SEQ ID NO: 417499 - DNA, 349 bp, Oryza sativa
aggttcaaatccaacttattcataaagcatactgctgtcccacaggaaactgtttcataaaactaacatatcatacggactcgatggtccattaaaccagacacaagtagacatcagcaccacaaatacttgacgaacagaggctcgggacgaccaggcacatcggcagctccaccaaactggctgattactgaccaccacggaggcggagcaccaggtggagggtggactccttctggatgttgtagtcggcgagggtgcgtccattctccagcttgttgccagcgaaaatcaaacgctgctggtctgggggaattccctccttgtcctggatcttggccttcacatt

SEQ ID NO: 417500 - DNA, 467 bp, Oryza sativa
ctcaagctaagggagagagcagcagcagcaagaggagcacgcggggagctagctagctccgccgccgccgacgagctccggcggctcgccgttatccgctcgctgatcgagccgtgtgcgggtgagaaagaaaaagaaaaaaaaaagatcgcgcctttttggcggcttcttggggtgtgaatccacggtttccccggggtaggatcttgatggggctcgaggaaggcggcgcgatgagggcgctgatgcggcggaagcaggtggactccgaccgggtccgcgccgtcggcggccaccagctcgccaaggagctctccgttacgcagctcgtcgcgattggtgttggttcaacaattggagctggagtatatgttcttgtgggaacagttgctcgggagcatgctgggccggcattgacactttcatttctgatagctggagtggcagctgcactctcagcttttctg

SEQ ID NO: 417501 - DNA, 465 bp, Oryza sativa
caacgccgatcgggttgttcgtgttatcctctctgacctctcctttctctctccctgctcttcggcggccgcctcccccctcccccccttccccaagccgccgccgccgccatggccatgaagggacccggcctcttctccgacattggcaagagggccaaggatctgctcaccaaggactacacctatgaccagaagctgaccgtctccaccgtcagctcctccggagtgggcctcacttccacagctgtgaagaaaggggggctttatactcttgatgtcagctcagtttacaagtacaagagtactctcgtcgatgtcaaagtggacacagaatctaatatctctactactttgactgtgtttgatgtccttccatccacaaagcttgtgacaagtgtcaagctgcctgactacaattctggaaaggtggagatgcattacttccatgagaatgccagtttt

SEQ ID NO: 417502 - DNA, 508 bp, Oryza sativa
gtttcgtgttcctctctgacctctcctttctctctccctgctcttcggcggccgcctcccccctcccccccttccccaagccgccgccgccgccatggccatgaagggacccggcctcttctccgacattggcaagagggccaaggatctgctcaccaaggactacacctatgaccagaagctgaccgtctccaccgtcagctcctccggagtgggcctcacttccacagctgtgaagaaaggggggctttatactcttgatgtcagctcagtttacaagtacaagagtactctcgtcgatgtcaaagtggacacagaatctaatatctctactactttgactgtgtttgatgtccttccatccacaaagcttgtgacaagtgtcaagctgcctgactacaattctggaaaggtggagatgcaatacttccatgagaatgcaagttttgccactgctgttggcatgaagccatctcctgtggttgaattttctggaacagctggtgct

SEQ ID NO: 417503 - DNA, 594 bp, Oryza sativa
  unsure (1)..(594): unsure at all n locations
ctctactccggggacgcgcgcagggcgcaggagctgctcgcgccggacctcgagtggtggttccatgggccgccggcgcaccagcacatgatgcgcctcctcaccggcgccgaccacggcgagtcaaggttcctcttctcccctcgctccgtcgacgccttcggctccaccgtcatcgccgagggcaccgacgacacccgccagctctactgggtgcacgcctggaccgtcggccccgatggggtaatcacccagctcagggagtacttcaacaccgacctcaccgtcacccgcctctccgcctccgccgccaagaccaccgccgccatttcttcctccaactccaaccacgcctnctcttcggcgccgccgccgccgccgtccaagcccaagtgcctgtggcagagccgccgcgccgaccgcgcgcacaagtcgctgccgggcctcgtcctcgccatctaagaacgaactcaaaagacatcaagaactcaaggcgcataaagcttnccttaataatcacatataaaaaaatcaagcgatacttatcatagtgataagctaataaataaaacggaagccacgcactgagtgagt

SEQ ID NO: 417504 - DNA, 445 bp, Oryza sativa
gggcgcacagcggcgttcttcaacaggcgacggcatcaagggtcaagggagctgggccccgacggaaagccgtgcatcggcgggcgggagcggcggcaggcaggcaaggcccgaacaactcgccatggccacccgccgccgtgccaccacagccgccggcgtagaccccagagccgtggagcaactcagatgctcactcactcgccacggcgctctcctccgcagtaatggtcgcgcggcgtccacatccctcttcggcgaggcccgcatcaccatccgtaagtccgccgcgaagcccaagccgtccgcctttggcagcccgtggtacggacccaaccgcgtaatccgctccaccgatcggggcaggtgcgtgcggagcccggcgaggagggaggaagatgggggcggcctttgccactagctttctccccgctagccaccaccg

SEQ ID NO: 417505 - DNA, 487 bp, Oryza sativa
  unsure (1)..(487): unsure at all n locations
cttctccaatggcgggtgctagccatcacctggtcgtcttcttggcagcgctgctcgcgttgctcccgggaagctcgcagctgcagtactcgcagacatggacgctgttcaagatccagcagatgctgaaccacccgccggtgctgagccactggcgccggaccaccgacttctgcggcggcggcggcacggcggcgccgtcggcggccgtggtgtgctacggcgacacggtgacgcagctgcacatcgccggcgtccgcggcgcgccgccgctcccgatgaacttctccatcggcgcgctcgtcatggcgctgtcgaggctccccgacctcaaggtgctcacgctgtccgggctcgggctctggggccccctgccggacaagatcggccgcctcgccgcgctggagatcgtcaacatgagcggcaactacctctacggcggcgtccccggcgggcttgcccagctcaccggcctncagacgctgat

SEQ ID NO: 417506 - DNA, 449 bp, Oryza sativa
tctttagtcgcacggattcgtttttcgttaatttggcaaataggtatggttttgccgatgtctcgcgcgacgagggtggccgggaggctgatgccagagatatcgttgctgagacgggggaggaagtcggcggcgagaggcggcgacgatgcggaggtggaggtgtcggtgccggcgaacttcgtgtgcccgatctcgcttgagatgatgagggacccggtgacggcgccgacggggatcacgtacgatcgggagagcgtggaagggtggctggcgagggggcacgacacgtgttcggtgaccggccggccggtgaggctcgccgacctggtgcccaaccacgcgacgcggcggatgatccaggactggtgcgtggcgaaccgggcgcgcggggtggaacgggtgcccacacccagggtgcccgtcggtgaggacgacgccgaggaggt

SEQ ID NO: 417507 - DNA, 532 bp, Oryza sativa
  unsure (1)..(532): unsure at all n locations
cattattgtcccaacttggcaccgtgatttatgcagggtctgtgaaaacatcccaattgtgctctgtggtaacaaggttgatgtgaagaacaggcaggttaaagcaaagcaggttaccttccataggaagaagaacttgcagtactatgaggtgtcagctaagagcaactacaactttgagaagccattcctgtaccttgccaggaaacttgctggcgatggtaacctccactttgtggaaacacctgctcttgctcctccagatgtcacaattgatctagcagcccagcaacagcacgaggctgaactggcagcggctgcagcccaaccactgccagatgatgacgatgacctgatcgagtagatttgcaatgtgctactttacatcgtcttgcgaggagccctgtttttaagcacaggtatatcctaagagatcttttttgccttggagaaaattttcgnggtgttccaagtttaatatgggagtttttgtcgatatttgaccagttcagacaagtcttgggtattgttg

SEQ ID NO: 417508 - DNA, 544 bp, Oryza sativa
catttcttaccacgcgccacccacccccgcaccgcacgccaagatccgaccgccgccgccgccgccgccggagtagggagagggagaggagatggggcggagggcggggtcctacccctactacgtggaggcggcgccgccggtggacgtgaacaagaacacggagtggttcatgtaccccggggtgtggaccacctacatcctcctcctcttcttcgcctggctgctcgacctctccgtctccgcctgctcccccgggatcgcgtggaccgtcgtcaacctcgcccactttgccatcacttatcactttttccattggaagaagggaactccatttgctgctgatgaccaaggcatctacaacagactaacttggtgggaacaaattgataacgggcagcaacttactcgtaataggaagtttttgactgtggtacctgtggtgctgtacctgatcgcgttacacttgaccgactacaaacagccaatgcttttcctcacaccattgcagttctgtactagtggtagcaaactgccaaacatg

SEQ ID NO: 417509 - DNA, 468 bp, Oryza sativa
tgtagtgttgtgtattatttgtccaccgctgagaagctagcaaagccagccatccattcagcgcagtactctcgggagagctagaagcgatctattctagccacaaggaggagagataaacgtatcgaaatggagcacatcgcgaggttcttctttggagtttccggcaatgtcatcgctctcttcctgttcctttcgccagttgtcaccttctggaggatcatcaagaagagatcaacggaggacttctccggcgtgccttacaacatgacacttctcaactgcctgctatctgcttggtacgggctgccgttcgtgtcaccgaacaacatcctggtgacgacgatcaacgggacggggtcggtgatcgaggccatctacgtggtgatcttcctcatcttcgcggagaggaaggccaggctgaagatgatgggtctactgggcctcgtcacctccatcttcaccatg

SEQ ID NO: 417510 - DNA, 493 bp, Oryza sativa
tgttttcttcgtactcgcctctctccgcgccctcctccgccgccgctcgccgccgttcgtctccgccgccaccgccgccgccatgagggagtgcatctcgatccacatcgggcaggccggtatccaggtcgggaacgcgtgctgggagctctattgcctcgagcatggcatccagcctgatggacagatgcccggtgacaagaccgttgggggaggtgatgatgcttttaacaccttcttcagtgagactggtgctgggaagcatgtcccccgtgctgtcttcgtcgatcttgagcctaccgtgattgatgaggtgaggactggtgactaccgccagctcttccaccctgagcagctcatcagtggcaaggaggatgcagccaacaactttgcccgtggtcactacaccattgggcaaggagaatgttgatctgtgccttgaccgcatcatgaagcttgtcgacaactgcactggtcttcagggctttcttgt

SEQ ID NO: 417511 - DNA, 432 bp, Oryza sativa
cttggtcttcgtctctgtcttcgtccttgggttgatatccagaatcagtcggtttggtttgtcagcaatggcgaggctagccggcgttgctgctctctcgttggtgctcgtcttgctcggcgccggcgtgccccggccggcggccgccgccgcggcgaagacgcaggtgttcctctccaagctgcccaaagcgctcgtcgtcggcgtctcgcccaagcacggtgaagtcgtgcacgccggcgagaacacggtgacggtgacgtggtcgctgaacacgttggagccggcgggcgccgacgcggcgttcaagagcgtgaaggtgaagctgtgctacgcgccggcgagccggacggaccgcgggtggcgcaaggcctccgacgacctgcacaaggacaaggcgtgcccgttcaaggtcaccgtgcagccgtacgc

SEQ ID NO: 417512 - DNA, 553 bp, Oryza sativa
tctctttcttcctccctcccctccctccttcccccacccgcttcccttgccgtcgccgccgccgccgaccgccgcgggaggggaggtccccggcgccatctcccagaaatggacgcctgtttttcaacacagcttattgatggagatggcgttttcaatgtttctggattggagaacttcatgaaggaagttaaaatgggcgaatgtgggctttcatatgctgttgtgtcaataatgggtccacaaagtagtggaaagagtacacttttaaatcaccttttccgcaccaatttcagggaaatggatgccttcaaaggaaggtcacagactaccaaaggtatatggatggcgaaggcccataatattgaaccatgcactcttgtaatggatttggaaggcacggatggtcgagagaggggagaggatgacacagcctttgaaaagcaaagtgcactgtttgctttggctgtttcagatattgtgttgatcaatatgtggtgtcatgacattggagagaacaggctgcgaccaacctcttttgagactgttttca

SEQ ID NO: 417513 - DNA, 509 bp, Oryza sativa
cacatctctttccatttctgagctcttctagtttgagtgagagagcagcagaagggagtagtgcaagatgccgatccgcaacatcgccgtggggagccaccaggaggtgtaccacccgggtgcactcaaggcggcgttggccgagttcatctccaccctcatcttcgtcttcgccggccagggctccggcatggccttcagcaagctgaccggcggcggagcgacgacccccgccgggctgatcgcggcggcggtggcccacgccttcgccctgttcgtggcggtgtccgtcggcgccaacatcttcggcggccacgtgaacccggccgtgacctttggcgcctttgtcggcggcaacatcaccctgttccgcggcctcctctactggattgcccaactcctgggctccaccgtggcgtgctttcttcttcgtttttacaccggcgggctcgtcaccggcaccttctgcctgaccggcgtcttcgtgtgggaggccctggtgctggaga

SEQ ID NO: 417514 - DNA, 444 bp, Oryza sativa
ggtgagttggctgatgacatcccgccggagcagcacgcccttgtgccgtctttcatgggcggcggaggaaagaggatccaccctcttccttatgcggatccaaaccttcctgtgcaaccaagatccatggacccgtccaaggatctcgcctggtatggctatgggagtgtcgcgtggaaagaaagaatggaaagctggaagcagaagcaggagaggttacaccagatgaggaatgatggcggtggtaaagattgggacagtgattgcgatgatgcacatctaccactaatggatgaagctagacagccattgtgcagaaagattccgatttgttcaagcctggggaatccttataggatgactatcatcattgggctggtggttctgggcttcttctttcactatcgagagatgcacgcagagcctgatgcatttgcattatgg

SEQ ID NO: 417515 - DNA, 539 bp, Oryza sativa
cactcacacacactccagtacccccacgctttcggcacattctcctcgcgcgagaggggggaggagaggggaggggggaggagcgagagcggagcgatgggctcgcctgggcatggggatgcggcggaaagggacatcgacgatctcccacggaacgacgccaactacacggcgctgacgccgctctggttcctggagcgcgccgccgtggtccacccggacagggccgccgtcgtgcacggcccggtgaggtacacctgggcggagacctaccgccgctgccgccgcctcgcctccgccctcgcgcagcgatccgtcggccccggctgcacggtcgctgtgattgctccaaatgtcccggcactgtatgaagctcattttggcgttcccatgtctggagcggtggtgaactgcgtaaacatcaggttaaacgccgagacaattgcctttcttcttgaccactcagtggcagaggtcgtcatggtggaccaggaatttttcaccctagctgaagagtcccttgagatacttgccgagaa

SEQ ID NO: 417516 - DNA, 452 bp, Oryza sativa
ttgtttccacccacgaacgcttcgccgcttgataaaccaaattccccaccgccgcttcgttctcgccgatccggagggctcgagatgaaggcgaggtcgaggtccagcaatggcgactccaggctctcggtgaggaagaccaaggcggagaaggacccgaacaagccgaagaggccaccgagcgcgttcttcgtgttcatggagcagttcaggaaggactacaaggagaagcaccccaacgtcaagcaggtctcggtgattggcaaggctggcggtgacaagtggaagtccatgactgatgctgacaaggctcctttcgtgaccaaggctgagaagctcaaggctgagtacaccaagaagattgacgcctacaacaacaagcaggcaggaggcccggctacctcaagcgactctgacaagtccaagtccgaggtgaacgacgaggaccaggg

SEQ ID NO: 417517 - DNA, 558 bp, Oryza sativa
gttggtctccgcccatccttaggaaaccacccgcccccggtccccggaggaaagcttcggccatggcggcggcggcggcggctcggaggggatgcctggtcgcgcttctggcggtgctcttcttggcctgcgccgctgaggggggtgcggcggcggcgtcggcggcgcagcagcagcagcagctacggcggcggaggcatctgctgcggcggcagcggcaggtgcacagccacctcaggcggctcaacaaggcgcccctcgccagcatcgagagtcctgatggagacatcatagactgtgtgcacatctccaaccagcctgcctttgatcaccctttcctcaagaaccacactatccagatgaggcctgattaccacccagaaggcctgtatgatgagtccaaggttgcatcacagcagaacacccagacaatcacccaaatgtggcacatgaacggcgtgtgcccggagaacaccataccaatcaggaggaccaagaaggaggatgtcctagggccagcttcataggagatatggcaagaagagcacaagagcaccc

SEQ ID NO: 417518 - DNA, 416 bp, Oryza sativa
gagtgagtgagagagagagagagtaattaaggctgggaggataggcagcagcagcagcgagagggaaacgagcgagcgagcttagctggtgcttgcctataggtagctaagcaaaatggggcagaggaggaggtcggggccgcggcgtcagagccagagcgtggtggtggtggtggtcgccgtgttgctggcgacggcgtcctgcgcggcggcgcagctgagccagagctactacgcgtcgacgtgccccaacgtggagacgctcgtccgcggcgccgtcacgcagaagctcaaggagaccttcaacgccgcgcctgggacgctccgcctcttcttccacgactgctttgtcagggggtgcgacgcgtcggtgctgatcgcggggccggacgacgagcacaagcgcggcgcggaca

SEQ ID NO: 417519 - DNA, 531 bp, Oryza sativa
caggctttttcttctccctcctctccgcctcctcccatgcacatccgcggccgcgccgatcgcacagctttgtgcggtcggggtggtctcggtgccgatggcgaggaagcagcatatcgccatattcaccacggcgagcctgccatggatgactggaactgccgtcaaccccctcttccgagcggcctacctcgcgaaggccggggactgggaggttacgctggtggttccatggctttcgaagggggaccagctgctggtttatcctaacaagatgaaattcagtgtgcccggggagcaagaaggctatgtgcgacggtggctcgaggagcgaattgggctgctgccgaagtttgagataaaattctatcctggaaagttctcaacggagaaaagaagcattctacctgctggggacatcacccagactgtatctgatgataaagcagacattgcagttcttgaagagccagagcatcttacatggtaccatcatggacgaatgtggaaaaacaaaatcagaaaattata

SEQ ID NO: 417520 - DNA, 460 bp, Oryza sativa
ccagtgccttctgcagtgaatgcctccatttttgaaagttttgttaggcggaacattactgagtctgaaactgatgtccgttccagcattcagcagctggtgaaagatagctatggtttcccagcagatggttgttctgaaatattatatggcaacacctgtcttgcactcttcaacaagcttgccctttgctgcatccaagaccagggcaccttacttttccccttgggcgctaatggtcactatgtctcagcagcaaagtttgtgaatgcaaatacgctgactattccgacaaagttagaatcaggcttcaagattgaaccacgggttctagctgacacacttgagacagtatctaggccatgggtttatatttctggccccacaattaaccctactggtttcctgtacagtgacagtgatattcaagagctcctttctgtttgtggtaaatatggag

SEQ ID NO: 417521 - DNA, 400 bp, Oryza sativa
gtcttcttcttcgagttgttagctccctccttattcaaccatgggtaaggagaagacgcacatcaacattgtggtcattggccacgtcgactccggcaagtcgaccaccacgggccatctgatctacaagcttggaggtatcgacaagcgtgtgatcgagaggttcgagaaggaagccgctgagatgaacaagaggtccttcaagtacgcgtgggtgctcgacaagctcaaggccgagcgtgagagaggtatcaccattgatatcgccctgtggaagttcgagaccaccaagtactactgcacggtcatcgatgcccctggtcaccgtgacttcatcaagaacatgatcacgggtacctcccaggctgactgtgccgtgctcatcattgactccaccact

SEQ ID NO: 417522 - DNA, 482 bp, Oryza sativa
ctctagtctctgtctcgtcgtcctcgcatctccactcgccatgggcaagattaagatcggaatcaacggtttcggaaggatcgggaggctcgtggccagggtggccctccagagcgaggatgtcgagctcgtcgccgtcaacgaccccttcatcaccaccgactacatgacctacatgttcaagtacgataccgtgcacggccaatggaagcacagcgacatcaagatcaaggactccaagactctgctcttgggcgagaagccggtcaccgttttcggcatcaggaaccctgacgagattccgtgggctgaggctggtgctgagtatgtcgtggagtccaccggtgtcttcactgacaaggagaaggctgctgctcacttgaagggtggtgccaagaaggttgtcatctcagccccgagcaaagatgctccgatgtttgtctgcggtgtcaacgaggacaagtacacttcagatattgata

SEQ ID NO: 417523 - DNA, 420 bp, Oryza sativa
cggtcgcgtgggctctcccgcaccaagccgcctgagccctagccgccgccgccgccgcgcgccaccaccgccgcaaccatggccgccgcgctcacccgcccgccgccaggcacggtccagtgcttcgggcgcaagaagacggcggtggccgtctcctactgcaagccggggcgcgggctgatcaaggtgaacggcgtcccgatcgagctgatcaggccggagatgctccgcctcaaggcgttcgagcccatcctgctcgcggggaggtcacgcttcaaggacatcgacatgaggatccgcgtccgcggcggagggaagacgtcgcagatctacgcgatccgccaggccatcgccaaggccctcgtcgcctactaccagaagtacgtcgacgaggcatccaagaaggaggtcaaggacatc

SEQ ID NO: 417524 - DNA, 553 bp, Oryza sativa
gcttatctagagctcttaattagctagctagtgattagctgcgcttgtgatcgatcgatctcgggtacgtagcaatggcgtccaaggcgttcgctctgttcctggccgtgaacctcgtcgtgctcggggtggcaagcgcctgcggcggcagcccgtcgtgcccgacgccgacgccgtcgaccccgacaccgtcaacgccgacgccgacgccgtcggcgttcgggaggtgcccccgcgacgcgctgaagctgggcgtgtgcgccaacgtgctgggcctgatcaaggccaaggtgggcgtgcctccggcggagccgtgctgcccgctgctggaggggctcgtcgacctcgaggcggcggtgtgcctctgcacggccatcaggggcaacatcctcggaatcaacctcaaccttcccatcgacctcagcctcatcctcaactactgcggcaggaccgtccccaccggcttcaagtgctaagcagcgtgcatatgcaatgcctgcatgggttgatcctacgtacggtgattagtttgctttgacgactcttgatttga

SEQ ID NO: 417525 - DNA, 380 bp, Oryza sativa
gtcgatgagtaaaattcttttattcaaaaatcgaaaataatttcgtgcatcagtgaccaaatgaattcgaaaactttgttgaaattttacggtttgtcccaggcaaagtccggatccgattcgaaaccatgcgaaatgaagaaatcatcagcttcgctgggtccacgcgaaccaaacacataactgtacggcttcttgtgttgcttctcaatttgatgaagcagcggcgtgaatactctccacgcctcggacaattcgtctgttcgtacgaaattcacctgcgaaccgtcaagaacttcaccaatcaatcgttcatacgattcgggaatctgagcgttcggaaattcgtcctgataaacaagatttaattgagttggatg

SEQ ID NO: 417526 - DNA, 530 bp, Oryza sativa
tttttccaaggaaacacacactgtggcaagctacatctgatttcacaggtggccaagcaagtatgaacaggaggcattttctacagtgcccttcaagcttgttgagcaaaaactttgaaaagcttctccagtgtgatcagcggctaaaccaattgagtcagcaaccagacatcatattggactctcccgtttttgaacccagatgctctatatttgaggacccagttgaatcgaagtgccaaggttttactaatttgaaggacgaacatgaattatctgggttttcaggttctctgtcaccctgtgctggttcatccatgtctgctaagattgaagtcaatgattccattgcaacgcaagcaggatttcttgctcagccaggaaacccaggacctagtgcagtgaacgttcagggagtcagcagaaacgtaaatggtgcttcagagttaaatatccccagctggtggagtcaactgaaagtgcctgggcttagaccgtctatgtcagtggatgttttggtaaccacttgg

SEQ ID NO: 417527 - DNA, 463 bp, Oryza sativa
ttgttcatgagggtgaaattgcctcatcttatccgtgctgtccgcaactctggacagattgtcacatggattactgatcccatgcatggaaacaccatcaaggctccatgtggtctgaagactcgtccatcctattccattctggctgaagtacgtgcgttcttcgatgtccatgatcaagaaggtagccacccaggaggtatccacctggaaatgactgggcagaacgtgactgaatgcatcggtggatcaaggaccgtcaccttcgatgacctgagcgaccgctaccacacccactgtgacccaaggctgaacgcgtcgcaatccctggagctcgccttcatcatcgccgagagactgaggcggatgaagatgctgtccggggtcaacaacaacctgccattgcccccattggctctctaaactgctgaaacggggaagggaaaaaaactgggagaggggg

SEQ ID NO: 417528 - DNA, 420 bp, Oryza sativa
acgggcccggactgactggctggatcgacgcatgcgtgttgtttttgctgtcccacaccaagccatctgagcggtagtcttcgtcgccgtcgcgcgccaccaccgtggcaaccatggccgatgcgctgacccgccctgtggcaggcacgggccactgcttctggcgcaagaagacggcggtggccgtttcctactgcaagccgggacgcgttctgatcaaggtgaagggagtcctgatcgagctgatcaggccggacatgctccgccttaaggcgttcgagcccatcctgctgggggggaggtcacgcttcacggacatggacatgaggatccccgttcgtggcggagggaagacgttctagatctacgcgattcgtctggccattgccaaggcccctcgttgcctactaccataagtac

SEQ ID NO: 417529 - DNA, 425 bp, Oryza sativa
gaaaggaaattaaactgatttatggcgggttccattaaaaccatggcactcgggtacgtggtgaaaccgtgaaagttaaaaaacaaaaacagtagtagtagagtgaggccctgctcgctgttacatgagaggtgcacgaagaaccagcacacgagcagagcatccagcccacacgcagcaaggaaacggtagggatgccgccgccgccgccggccgatccgccgcccggcgatgatgcgtcgtcgtcgtcgttcaggtgcacgcggaggcggagcggcgtgcggcgcggcgcggtcgagaggtgatgagtagttgacgcggagcagatatatatggatggatggcgtcgtcgtcggtcggacgacggagaggtcgcgcgcatcacgcgcgggcgtagctgcgggcgaggtgggcggcgcggaggt

SEQ ID NO: 417530 - DNA, 436 bp, Oryza sativa
tagagtagagaaggagaggagcggagcgccatcagccgtccgatcgagtgatccgatggctctcgctctctccacctctgctgctgctgccgctgccgccgcggcgcgggcgctcgcggcgagggtgacgacaacgaggggttacgccgcgtcggcggcgtcgtcggcgatgaggccgacggcggcggcggtggaagggaagggcgctgcggagatgacgcaggcgaaggacggtgtcgtcgtcgtccgcggagagggaggagtcgagggtgcccgaccccgtgacggtccactaccgaacctacaagcttcgccggcggcgccgacgccgacgacctactctccgaacacctgtgccgcagctacgccggtgcgtgatgcgcgcgacctcacctactgtacgaccgacgacgacgccatccatccatatatatct

SEQ ID NO: 417531 - DNA, 434 bp, Oryza sativa
ggtgggcgtgggctacttcgtcgactcgtgccgcgcctgcgacagctgcggcaaggggtacgagaactactgcccgacgatggtgatcacgtcgaacggcacggactacggcggcgccaccacccagggcggcttctccgacgtcatggtcgtgaggcaggactacgtggtgcgcgtcccggcgagcctgccgccggacggcgcggcgccgctgctgtgcgccggcgtgacggtgtacagcccgatggtggagtacggcctgaacggtcccgggaagcacctcggcgtggtcggcctcggcgggctgggccacctgggtgtcaagttcggcaaggcgttcgggatgaaggtgacagatgatagactcgtcgccggcgaagcggggggaggcgctggggctgctcggcgccgacgcgttcctgtcgagccgcgac

SEQ ID NO: 417532 - DNA, 478 bp, Oryza sativa
gaaagtgaacattccatgggggggattatcatatcttggtgaaacccctcaaagggcaaccaagtttattttaaattgcacaggcgaacgtaggtacatctaacaattgtacaagaccgcataaacgaatgccgtgggattgtggacaattattgttgaagtctcggtgttttaaaagatgtaccagggcacatactgaatttttctagatgcttgagagctaaacataagaaccagatatggagagagcttcttgcgatctctaaggcatgctctacagaagatgcactacagagcttagctttggctacaacgggctgagacttaacgagttgaagattaagcgaaaattcctctgagctaccactctcaaggagaacaccctggagtcgactatcagagtcaatccagaaggtagcaatctctggtgcaaagcttcccacttcaattgttcggcaacattatcaccgaaaattgc

SEQ ID NO: 417533 - DNA, 352 bp, Oryza sativa
ttcagctctacggcggaaggcggcggagatggcttggacggccgcggcggcgtcgtcgaaggggtgcatctcgtgggcgctgcggcagcgtgggcttggtggtggtggtgcgcgggctgtcccggtgcttccccgccagagattctgcgtctccgcggcggcgggtgcggggttcgacaacgagaatcgcgagtatgtgatcgtgggtggaggcaacatatccacctacacgctctggacgttcgacgagcacggtatggctgatggccgcctttgcatcgtctccaaggaggcgtattcggcatatgagcgaccagcactgacaaagggctatttttttcctccagacaag

SEQ ID NO: 417534 - DNA, 523 bp, Oryza sativa
gcagatcaatctgtattgggggcatgattaatgcttgggtacacttgcacacttcaccatatattatatatatatatataaatatatatatatcatcagcttcttcatcaccaaattcatgggcaattcgagttcttccccgggccgccatagtagaagtaggtgccccagtcgccattgttgccgttctgaacatcgtagcaattggactgctcggtgtaggtgcccacccccttgggggccttcagctggttgctgctgtccaccacctggatgttcttgaagtagctcgccttgccgaacccttcctccgggaaccgcccgctccccatctgcgtcgacgtgtgcgtgccgtcgggctccgagttcaccacctccccgccccactcgaccatcgacgcactgtcgacgaggtaggagaagaggaaggacggccagtagccgaggacatactccctgccgaactgcattcaccagtttccttcctttgggtccttccagatcaaaatactgatattatact

SEQ ID NO: 417535 - DNA, 443 bp, Oryza sativa
  unsure (1)..(443): unsure at all n locations
actattgggtatgctgatacgtgtgccgcctccgggtacgcggtccggagttccgagccacgacccactcgtgcgctgagctgaggtgaagtgctgctgaggcgagtgactgaggtgcagtgagagcggcgagaactctggccgcggcggcggcattggcgctgtgggcggcggctgcggagggggcaaggtcgccggcggctagggtgcaccggcacctcaagaggctcaacaagccggccgtcaagagcatcgagagcccagatggagacatcatcgactgcgtgcatctctctcaccaaccagcatttgatcatcccctactcaagaaccatactcttcagatgaggccggcctaccaccctgaaagcttgtatgatgatgacangagaagcgtggcctctgacaatgccggcgagaagccgatgctccagctattgcat

SEQ ID NO: 417536 - DNA, 386 bp, Oryza sativa
  unsure (1)..(386): unsure at all n locations
cgcagatcgtctttttcagagcattgaaagtacatataggaactgcttatcaaatacaagtgatgtcaaagagcttatacctgagttcttttatatgcccgagtttcttgaaaattcaaattcctatcaccttggtgtaaagcaggatggtgaacctttaggcaatgttggtctccctccatgggcaaagggttgtccagaagaattcattcatatcaaccgcgaagctcttgaaagtgaatatgtaagctctaatctccatcactggattgacctcatatttggttataaacagcgcggcaagcctggctgttgaggcggcaaacatattttactatttgacatacnagggtgcagttgatttggaaaacatgatgatatgttgc

SEQ ID NO: 417537 - DNA, 538 bp, Oryza sativa
cggagggagccactattgaaggtacaaaatacatatacataggaaataatagccaaaccagtttaatatattcatcacttcatctgtggatacaccattacaagcatagtacgtgaatagtgaaaccaataacatagcacatcgattaacccatcacacacacacacacacaccatatatattggtcaagcaccaacccaaatggccaagcttctttatttttctgcatcacaattcacatagatggtagatgcaggcaggcatcttaacagttgcaagggttgcacctgcagctggaaccgcagctgcagccatgggcggtctcgccggactctgcggccgcctcaaactgctgcgccttcttctccggcgccacacccagcacgacggtggccttggtgctgctgctcttctcttccaggtcagggtacttctttccgcaggagcagtttgagccgcagctgcagctagatccacagctgcaagacatcttctctcagtctgaattaagctcaagccactgaagatgaaatcaact

SEQ ID NO: 417538 - DNA, 410 bp, Oryza sativa
  unsure (1)..(410): unsure at all n locations
ctctttttcttctccttagttgatttcatcttcagttgcttgagcttaattacagactgagagaagatgtcttgcagctgtggatctagctgcagctgcggctcaaactgctcctgcggaaagaagtaccctgacctggaagagaagagcagcagcaccaaggccaccgtcgtgctgggtgtggcgccggagaagaaggcgcagcagtttgaggcggccgcagagtccggcgagaccgcccatggctgcagctgcggttccagctgcaggtgcaacccttgcaactgttaagatgcctgcctgcatctaccatctatgtgaattgtgatgcagaaaaataaagaagcttggccatttggggtggtgcttgaccaatatatatngtgtgtgtgtgtgcccgtgaaggggtt

SEQ ID NO: 417539 - DNA, 570 bp, Oryza sativa
  unsure (1)..(570): unsure at all n locations
gtaagaacatgtagcagcaggtacaattaaatgaatagcctctcgatccatgtccaaatatttggaccgaacgaacattgccatacaaagtgtgcaacatccttccttgcatgttgctacaatcttgacaaaccgatcgaattcagttttcaacctgattttacactcttcttcatcaactttacagaaccgtggatgattttttggttacaccggcagcagcaaagtgggaggggggaaaagaatacgcggcgtcagaatctcggacaaaaaaatgtagttccacttccatatgcaccagctttcccaaatggctgcacacagggttcatctctgctttctaatggaggacggtgaagaaattctgaactagttttcatgctgacctcagaaatcaccatcctacaaacgcgcattgctttcgagcatgttcggggataagcttcaccaggaattccattggcatacccttcagttcatggngcttgaaagtgaagagaggaggaaggaaacggccgttcggtaagcgggtgtttggatcacggagttcatcgaagaaggatggatcat

SEQ ID NO: 417540 - DNA, 459 bp, Oryza sativa
ctcccctgcattccgcgccggagctgaggagggacagcgagccagcgagggaggtggggcaatccagcgagcgccagatcgtgccgccagccccgctccgtcctctctccggcgaccctccgccccgcctgatcccgtggtggatcaactacaactcatctttaggaaagcctcttgaacattagccttgtgtgcctttcaacagtatggcctcggtaggtgtggtgcgttcttccttggggtttcagaacgaaacaagtacaagtggcgatgccgaccgacttccgaatgagatgagcaatatgagtataagggatgataataaggacattgacgacatagttgtcaatggcaatgggacagaacctggtcatgttattgtgacaagcattgatggaagaaatggacaggctaaacagaccattagctacatggccgagcgtgtcgtaggtcatggat

SEQ ID NO: 417541 - DNA, 396 bp, Oryza sativa
gaaaggaaattaaagtgatttatggcgtgttccattaaaaccatcgcacttggatacttggtgaaaccgtgaaagttaaaaaacaaaaacagtattatttgagtgaggccctgctcgctgttacatgagaggtgcacgaagaaccagcgcacgagcagagggtacagcccacacgcagcatggaaacggtagggatgccgtcgtcgacgccggccgatccgccgcccggagatgatgcgtcgtcgtcgtcgttcaggtgcacgcggaggcggagcggcgtgcggcgcggcgcggtagaaaggtgaagagatggttgacgcggagcatatatatatggatggatggcgtttatcgcggtcggacgacggtgaggtcgagcgcataacgcgcgggcgt

SEQ ID NO: 417542 - DNA, 556 bp, Oryza sativa
  unsure (1)..(556): unsure at all n locations
cactcgcaaaccacatttgtggggacattaccaaaccaaagccatcaaccgttatttacagatgatcatctctacccctccttacacagctactccattctccaagaacagagcacacgaggttaaataagagcgaagcatactgcgaccacatgattacagcattacctggccaagctcgaagctgccacgggttcaaccctgcagccaccacctccttgccgttgctcgcggagatacccaagcaaagtttcagccttgtgcttggcacgggcagagccggactgcgagagcgcgacaagcggtgggatggcgccctcacggacaagaagcgcgcggttgcgggggcactcggagcagagctgcagcagcgccaccacggcgaactccctctccctcgccgggccgtcctcgatggtctcgacaagcgccggtatcccgccagcctccaccacggcgtcgcggccctcgacgatgcctgcgaggctggcgaggaccaccattgcctttctcgacgtcccgctgccacgctcgccganaggtggatgagcggcac

SEQ ID NO: 417543 - DNA, 617 bp, Oryza sativa
  unsure (1)..(617): unsure at all n locations
ggcggaccaggtcgttgttgagggcagggatggcctgctggggtggcgggaccttgcgcggtgccacgccggggagctgtccgtcgccgtcgtgcaggggaaccacgtgctcgaggaccagtgccgcgtcgagtcgggcccgccgcccctcgccgccacctgcatcggcgtcttcgacggtcacgccggccccgacgccgcccgcttcgcctgcgaccacctcctccccaacctccgagaggccgcgtccgggccggagggcgtcacggccgacgccatcagggacgcgttcctggccacggaggaaggcttcctcgcggtcgtctcgcggatgtgggaggcgcagccggacatggccaccgtcgggacgtgctgcctcgtcggagtcgtgcaccagaggacgctcttcgtcgccaacctcggggattccagggccgttcttgggaagaaggttggtcgcgctggtcagattaccgccgagcaactgtccagtgagcataacgccaatgaagaggatgtcaggcaagagctcatggctcagcacccagatgatcctcagattggtgctcttaaacatggngtttggagagtcaagggcattatacaggtgtccagat

SEQ ID NO: 417544 - DNA, 519 bp, Oryza sativa
  unsure (1)..(519): unsure at all n locations
tggaggatgtttgcccaatctgtcttgaagaatatgatgcagaaaatcctcgctctttaactaaatgtgagcatcatttccatctttgttgcatacttgaatggatggagcgaagtgatacctgcccagtttgtgaccagattactttgatagatgatatgtatgaatagcattggagcatgggactattatgtttggtttgatgctagtttgttttaatgaggaagtacagtcagcaaagctcctgatctatcaacctggtcagacgggggtgctattggaatgaattttgagaaaactaagggaaaataattgaagacgggaatggcttgaaatttgttaaatatcatctcagctttttacattttgtttgaagcattaactgttcatgacaacaggaggatttgttagtatccatatctactgctggttcgattgcttcacagntgatgaaacccccagatgagctttctgtttctttggagttttgaactggggatggtcttcatttcatttctg

SEQ ID NO: 417545 - DNA, 518 bp, Oryza sativa
tgtatagacatcattggcgatctaccgcccaatgtcatcgtgcatgatatgagcttcgactggacaggacgccgacttgcagccgtgtgtagtgacaagaccattcgcactttcatcaagcggggcgagaaatggatgaaggaggaagtgctcaccatccagggagctgccgcttggaaggtgaagtgggcgagaccggagttcggcactatcatcgctacttgctcgctggacacacagattcgcatttacgaactaaagaaagtggacaagggagagggagagaagagctcctgggtgtctgtccacaacattcaatagaacaaggctatttaggacatcaagtttatccccagcaagatctatgggctctgcctcgccatcgtctcatctgatggatacctcaaagtgcttatggctgaagatcccctcaagctaaggagtggggcaatcactacagtctacatgttagcgagctagggctaagctgcctctccttgagcaaaaacttggtgaag

SEQ ID NO: 417546 - DNA, 510 bp, Oryza sativa
tctttggcagtgcaaaagtcctggtgaaaggggaaccaaatattatatatatctgttctagatactacagagccccagaactcatatttggggctacagagtacacgacagctattgatgtgtggtctgctggctgtgttcttgctgaactacttctagggcagcctgtttttcctggtgacagtggcgtcgaccaacttgttgaaattatcaaggtactgggtactccaacaagggaagaaatcaaacatatgaatccgaactacactgagtttaagttcccccaaatcaaagctcacccatggcacaagatctttcataaaagaatgccatctgaagctgtagatcttgtgtctcggcttctgcagtactcaccacaccttcggtgcagtgcattggaggtgttaattcattcattcttcgatgaactacgagatccaaatgctcgcttaccaaatggcccgactcttccccactattcaatttaagcctcgtgagctgaaggagcat

SEQ ID NO: 417547 - DNA, 364 bp, Oryza sativa
ctcacctgcttgtttgttcgtctctccctccctccctccgactcgcaccgcacccaggccccagcccacgcggggttcggattccctccgccgccacccgcgagagggagacgccggcgccggcgatcggtgaccgatggcggcggcggcggtgcgggtagacaaggccacgagcgagctgctgctcggccccgactggaccctcaacatcgacatctgcgacgccgtcaactccgatcacgggcaagcaaaagaggtgattaaagctctgaagaagcgtctccagcacaaaaattcaaaggttcagttttttgctttgacgctattggaaactctaatgaagaattgtggggattcatgtgca

SEQ ID NO: 417548 - DNA, 598 bp, Oryza sativa
ggcgcccgccgtgtcgaccgcggcgccgtcggagcccgccgcgggtgccgtaccggggaagccgacggtgctcgtggccgagaagctcggcgccgcggggctcgagctgctccgggggttcgccaacgtggactgctcctacggcctctcccccgaggagctccgcgccaagatcccgctctgcgacgcgctcatcgtgcggtcggggaccaaggtggggcgcgacgtgttcgaggcatccgggggaaggctccgcgtcgtggggcgcgccggggtcgggatcgacaacgtcgatctcgccgccgccaccgagcacgggtgcctcgtcgtcaacgcacccacggcgaacaccgtcgccgcggccgagcacggcatcgcgctgctcaccgctatgtccaggaacatcgcccaggccgacgcgtcgctcaaggctggtaaatggcagcgcaacaggtatgtgggtgtatctctcgttggtaaaactattgcaattcttggatttggaaaggttgggtcagacgtcgctcgtcgtgctaaaggtttgggaatgcatgtgattgcacacgatccgtatgcctttgctgatcgtgcccatgca

SEQ ID NO: 417549 - DNA, 502 bp, Oryza sativa
ggcaagcaaaaaatatatcacatagaacacagtaaacatagattaacagagggcttcttattaataagcaccatgttcaaacctaagccagattaatcaagacactgcatcaaactcgacaaacagcaccataacccaaaaaaggcttattccaacgagaaccatcagtcctctagatcctgattaaatagctagctacatcaaaattgcacaccatgtttgcagcttcaaacatacaacgcatgaatctagagcttgaggaaaacgaattcttcaatcgccggaatctccccaatctttgtcagtgtgctctttttaggttcctcatcaacaccaatcgccatgacggcatgcttgcgaggagcgattcttccaacactcatgaaactgacattaacattctcctcaccaaggacacttcctactgcgccgatcataccaggttgatcgacctgcctgcaaaggatcaggcttccttccaagctcacatcaacctggaatg

SEQ ID NO: 417550 - DNA, 528 bp, Oryza sativa
  unsure (1)..(528): unsure at all n locations
gtgggacggagggagtatttcatatgtattgtgatgtgaaattacttcctttcagttcctccaacctctctttttttcttagaattaaacgaacaaggcctcagatgattcagcacgtccagcagaacgggttgtgcgccttgaacgcctccacgacgccggcgatggatcccgccgaggcggcgacggacacgacgaggcacccggcgctgagcgcctggagggacagccactgcgcgctcccccgcggcacccggcgctgcgcgatgtacatctccacggggaagtagacggtgagcggccagaacgacgccgcgccgatgagccccaccatggagccgaagaacgggagcagcgtggacgccgccgtggtcacgcacacgaacgccgtgcgccacgccagacggaacgggctcacctcgatctcggccagggagcccacgcggagcacccgccttctcttgcccagcgccgngctcccgggccacgcgcccgtcgtggtgcgcccgtcgaggaacgcgaacaccg

SEQ ID NO: 417551 - DNA, 457 bp, Oryza sativa
gccacaaaaaggggggttatctccatgaattggtttcaatctaaacccaatccacacggcagacttcagtgttaatcagagttggtcctcagtctcaggatgatgcggcgattgtccgtgcgttgttctgctttcatagatcgtgctcaggcttgtccaggttgctgctgtcactgtccgccatgcggctcgagccacggccaaggagcccatggccgaagatagccctttgaagctgctgctgccctcactgaggttgtgagatcgacgcgaccgcttccgggtgagctgcggggatgacggcttgtcaggatcacaagcagaccttgtttgggccaccaccagccgtgagatgctgccccggcagaatgggcaggccagtgagggcggtgtcagggtcgtcggattgggtttgttgtgacagcacagtgccagcgtgcacggtgcacacatttga

SEQ ID NO: 417552 - DNA, 503 bp, Oryza sativa
ggaagcacagaacaatacgattagagcgcccgttacacacacttgagtacttgacgcgatacttacatccccaggttacgtacacacactagtagtagtctagtacgtaaaaacattacgcagaaaaacacgggacgggatgtacagcaccacgtacactaccgtacacatcccatatatttggatcatggcacgcgcagccgtagctagggaagtctgatccttatcaagcggtggcgatgggcgccgcgtggacaacctcgggggcggacttcatggccttgaagcgtggctccttggcctcgaacttggggcgcacgtacaggttcatgtagtcctcgaacacaaaccttgggtaggcggccgccgccgcgttggtggaggctagcgcgggccccgggaagatgacggcgtcggccccggggttgtagaaggaggcgatggacatgcggttgccgtcggggcgcgtgaggacccggtgcatgactcttttgtacctgccg

SEQ ID NO: 417553 - DNA, 490 bp, Oryza sativa
  unsure (1)..(490): unsure at all n locations
tctcagcttaagcgagcgagcgagtgaacgagagagagagacagagatggcgagtgttgcctccttcccggtgatcaacatggagaacctggagaccgaggagaggggcgcagcaatggaggtcatccgcgacgcctgcgagaactggggcttcttcgagatgctgaaccatggcatcgcgcacgagctgatggacgaggtggagcgggtgagcaaggcgcactacgccaactgccgggaggagaagttcaaggagttcgcgcggcggatgctggaggccggcgagaagggcgccgacgtgaagggcatcgactgggagagcaccttcttcgtccgccaccgccccgtctccaacctcgccgacctccccgacgtcgacgaccactacaggcaggtgatgaagcaatttgcgtcggagatcgagaagctctcggagagggtgctggacctgctgtgcgagaatctgngcctggagaaaggttacctgaag

SEQ ID NO: 417554 - DNA, 548 bp, Oryza sativa
gaacatcttcattgggagatatttacacccagatcgagaagcaatacgctgcctatcttaaacatctcctcgtcacaaaaatcaaacaaacacgaaactctctccaaaaagagaaaaaaaaattgaacgtaatcctatcccctttcggagcaataatatacaaacacaaaaaaaacactagtcctgtctccacatttccagttcttcttcttgttttttttttttcagatagacgtctgcgtcggcgtctctgacgatgagaaaggctccgtttcatcagtggtgctgaacgatctcatgttggatgaccgtgttgtctcgttctccttctgctggctgctgctgaccttgaggtcggcgaagtcggtgatcatggccggcctggtgatccggtgcaccgagaagtgcttctccccggtgagcatcctgacgacggtgctcatgttggggcggcgcgccattgcgtcctgtgtgcatagcaggccaatcttcaggaaccggcatgcctcgtcgacgtccaggtcattcccaggtcagcatcgatgatc

SEQ ID NO: 417555 - DNA, 392 bp, Oryza sativa
acgacaaaccacgaacttggatattaaagatgccacaaagaaggttcacataaacaacacaggtcacagcagcgaaagctacaagcaaaccctgcataatcgaaaagcaaatgtttttcaaaaccagacacacaaactgatagatagaagcccacacggacagatcataggatagcagcagtaatcaagcattgccaaggcaccaggcaagaaccctgaacctttttagtactcgtcaccctcatcaccctcgtcaccatcgtcgaactcggagccgacctccttggagtccttctccagcgcggggaggtcctcgcgggcctcggagaactcccccttcttcatgcccttggcgacgtaccaatggacgaaggcccccttggagtacatga

SEQ ID NO: 417556 - DNA, 522 bp, Oryza sativa
  unsure (1)..(522): unsure at all n locations
tagaaaggcgtcttcgtactcgcctctctccgcgccctcctccgccgccgctcgccgccgttcgtctccgccgccaccgccgccgccatgagggagtgcatctcgatccacatcgggcaggccggtatccaggtcgggaacgcgtgctgggagctctattgcctcgagcatggcatccagcctgatggacagatgcccggtgacaagaccgttgggggaggtgatgatgcttttaacaccttcttcagtgagactggtgctgggaagcatgtcccccgtgctgtcttcgtcgatcttgagcctaccgtgattgatgaggtgaggactggtgactaccgccagctcttccaccctgagcagctcatcagtggcaaggaggatgcagccaacaactttgcccgtggtcactacaccattggcaggagattgttgatctgtgccttgaccgcatcangaagcttgccgacaactgcactggtcttcagggctttcttgtgtcaacgcttgtggaggagggacggg

SEQ ID NO: 417557 - DNA, 520 bp, Oryza sativa
ggtcaaaaaaaagtttaaaaagatgcttcatgtaagcaagtggaatgttctgttcatactgaaacatatatcgagtttccaataaagattacatgtataacaccatatggcttctatgagcaagaccaaaaaagacagtagcttacagtagtgcctatgatagattgatagtattagtagcatccccatgtgtccaaagaactagctatgtattcagccatggccattttgtccgtgaggtatgaagcaaccaaagaaccaaggcaccaatttcctttccaagtatttctacccgatttaacttctccacatgtagttactataaagtacaagttataggattttaatgagttgtgtgccgttgtcatgttgaaatttaatacatgccaccagctgctgcagattaggcttcctggtcgccaaagatgcgtttgcggaagtcggtaaccatgaagggaaggccctcacgcaggggaaccttgggcttccagcccaggagctctttcgcacgggtgatgtc

SEQ ID NO: 417558 - DNA, 473 bp, Oryza sativa
tgaccatcaagaccaacgtggttgggacactgaacatgcttggattggccaagaggattggggcaaaatttctcctcaccagcaccagtgaggtatatggagatcccctccagcaccctcaggtggagacttactggggcaatgtcaaccccattggtgttagaagctgctatgatgagggcaagcgcacagctgaaacgttgaccatggattaccaccgtggtgccaaccttgaggtgaggattgctcggatttttaacacatatggtcctcgcatgtgcattgatgatggccgtgttgtcagcaactttgttgctcaggcactgaggaaggaacctttgactgtctatggtgatggcaagcagactaggagctttcaatatgtctctgatttggtggaagggttgatgagcttgatggaaggggagcacataggaccatttaaccctgggtatcccggtgagttcaccatg

SEQ ID NO: 417559 - DNA, 507 bp, Oryza sativa
  unsure (1)..(507): unsure at all n locations
ggacttgtacgggcgcctcaacaggagcagcacgcgggggttcctcgcatacgtggcggcgggggcggcgtgcgccgcggtgctcgcctgcttcgtcatccccgccgccgagccgcgcgccggtgacgccaatggcggcctccgcctctcctcgcggtcggcgcgcgtctggccggacctcgcgttcaactggcgggtggtggtggccaccgtcgtcgggttcctcggctcggcgttcggcaccgtcggcggcgtcggcggcggcgggatattcgtgcccatgctcaacctcctcgtcggcttcgacaccaagtccgccgccgcgctctccaagtgcatgatcantggggcgtcggcgtcgtcggtttggtacaacctgcaggtgtcgcatccgaccaaggaggcgccggtcatcgactacaagctcgcgctgctcttccagcccatgctcatgctcgggatcacaatcggagtcgagctcagcgtcatcttcccctactggctcat

SEQ ID NO: 417560 - DNA, 545 bp, Oryza sativa
aatctgaaatgtaggcagatttgaatgaagagttgtaatgggtgcagaactataagcaaatttagcaacgcagattaatagtttacttattaattagtttaaactgctatgacccagcaaatgttcggacagcagtacagcacatttaaacggactcgatggtccactaacagcacaaataaagttttcacgaggataatgcagacacaggataacagtacagcagcaattccatcaatcaatgattactgaccacccctgaggcggagcaccaggtggagggtagactccttctgaatgttgtagtcggcgagggtacggccatcttccagctgcttgccggcgaagatcaggcgctgctggtctgggggaataccttccttgtcctggatcttagccttcacattgtcgatggtatcggagctctcaacctccagagtaatggtcttgccagtaagagtcttgacgaagatctgcataccacccctgaggcggagcaccaagtgtagggtagactccttctgatgttgtagtcggcaagggtg

SEQ ID NO: 417561 - DNA, 494 bp, Oryza sativa
  unsure (1)..(494): unsure at all n locations
ccaaattccccgatccccgcagccgctcctgcgactcgtaggtctcgtcaagtcggcggcgacgactttgatctctattcaagatgcagatctttgtgaagactctcactggcaagaccataacccttgaggttgagtcctcggataccattgacaatgtaaaggccaagatccaggacaaggagggaatcccaccggaccagcagcgtctcatcttcgctggcaagcagcttgaagatgggcgcacgcttgctgactacaacatccagaaggaatccaccctccaccttgtcctccgcctccggggaggcatgcaaatctttgtcaagaccttgactggcaagactatcacccttgaggttgagtcttctgatactattgacaacgttaaggcaaagatccaggacaaggaangggattcccccggaccagcagcgttctgatctttgctggcaagcagctcgaggatggtaggacccttgctgactacaaca

SEQ ID NO: 417562 - DNA, 463 bp, Oryza sativa
attgcagaatcgggaattaattagcttctcttttttttaattattaagcaccatttggcacacatggctagttacaacttacagttctctcaaaagacacacacagtcacaaagaattaatacagatcatcagccaaagaatagagagctctagctcttgatgcacaaccaaccaaccatacacacacacgcacacacaaaatgcacgttacatacatgatacgtcacgttgtcacggcgagctaagctatggcttaccgatttgcatcaggcgaccctgcagtttgccctgaccttgccgctgctgccggggagcacgccgacggcgcccatcttgaccatggcggcggcgaagtcgctctggaagggggaggcgtctttggcgtaagcgaccacctggacggcggtgttcttgtcgccgagcagcgcctggtcggaggagagcaggccccggttgttcatg

SEQ ID NO: 417563 - DNA, 467 bp, Oryza sativa
ttaagcatagccatagctagtgatcgatgtgtccgtgcattcctgtataaaaaagataggcgttgtagcgagcactatcactaagccgtatataaagagagcagtttagtactaaagtgagtgtgctagtgtgagcttagtggcaatggcgatgagaggcggtggtgcgacgatgctgtcgtggtacttgcaggtggcggcggtgagcttgctggcgatggcgacggggctggaggcgcagctgcgggtggggttctacgacaactcgtgcccggcggcggagatcatcgtgcagcaggaggtgagcaaggcggtgtcggccaacccgggcctcgccgccggcctcggtcgcctccactttcacgactgcttcgtcagggggtgcgatgcgtcggtgctgatcgactcgacgaaggggaaccaggcggagaaggacgccgggccgaacaccagcctgcgtgggttcg

SEQ ID NO: 417564 - DNA, 526 bp, Oryza sativa
tctcaccacccgatcgaacaccgccgtcacagcgcgtcgcggcgggggcgatgggcctcttcggcggcaagagcgcctcttcgaagcagaccgccaagctcaagtccctgatcaagctcgctgccgcgcgcgtcgccgtcgcccgccggccccgcctcgggcgccgctccattgcccgcggcgatgtcgcgcagctcctctccatcggccacctcgaccgcgctctcctccgtgcagagcaagtcatcgacgaggacaacatgctggaggtgctggacatcgtagagctctactgcaaaatcctcatcgagcaggccacgcagctagataagcccaaagagtgcggcgaggagatcaaggaggcggcggcggggctcatgttcgcgtcggcgcggtgcggcgacctgccggagctgctcgacgcgcgggccatcctggcggacaagttcggccgggacttcgccgcggcggccaaggacggcgccacggcgtcgtcgatcccacgttggtgcggaagttgtcccgc

SEQ ID NO: 417565 - DNA, 544 bp, Oryza sativa
gttcaaacaagacaccatactcatataaccatggacaaagaaatacaacaaccaatttgaactacagtcttacaattctaatattgcacctgacatgggtcacattgactttctcaaacaaaaatgaacaaactaactttgcactaacatatttactatctccccctaaaagtttatgaagtatctgcaacaaagtcctggattatggtacgaaccgcaataggaattctcacagagtgtgtgataccatcttgccatgtcaaacttccaaacgtgtagccaccttgcactctctgtcttgtggtgaatgtcaccttaaatgtcacacttctactaccgccattggtgaatttgatcactgaaggttccacagacatggtcataccgactggtgcctcaagcattgcatggtaagttgcttctgccactccgatgttgatgatggttcgccaaaccgtgacagagtacttgagatctggtacgacgatggatgggaggttgagctggtaaagttgcctcatgtatgactcacattcatccttgg

SEQ ID NO: 417566 - DNA, 399 bp, Oryza sativa
gaggtgtatagtgtacagttacaaacatgggttctctggatttgcagcgatgctcacagaatctcaagctgaagaaattgcagaattacctgacgtcctcagcgtgaatcctaacatttaccatcaagcacacacaactcgaagctgggatttcctaggcctgaactattacgaacaatcaggccttctaaagaaagccaactatggtgaagatgtcatagtcggtgtcattgactcaggtatatggcctgactcagaaagcttcaatgacagtgggtacagctctgtaccgacccggtggaaggacacgtgccaaactggctggcgttcaatgccacacgcttgcacagaaagatcatcgttgcccggtggttctcaggtggcattcacgatgagtcg

SEQ ID NO: 417567 - DNA, 476 bp, Oryza sativa
  unsure (1)..(476): unsure at all n locations
agtacaattcaccttcttggggaataaactatgtaacactactagccctaattatttggacaaaagagattctttgtccaaagaacacaaaaaaaaaatccaaggattacaagagtttgctttgttctcataaatatcaatgtgaaatacttacaccaattaacttagccacttatgattcacaaagataagatataactaactagcctatcaatagcaatttgagaggacccaccgtcttccaagcagcgtgccactttgttcttaagctcatttgctctttccctcatctcagctccctcatttttccccattaatttcataatcgctttctcaattttgcaccactctaactttccctcgagctcaaaccctacaccccacanccgttccacgtaccttgtatttatcatctgatctgcgaattgaggcctacatatcataagaactccctcacatatactctccaatatcga

SEQ ID NO: 417568 - DNA, 558 bp, Oryza sativa
ccagcaggggaacagaccatgacagccaggtgctccgggctcagagaccacactctcattgtcacagtttgccaagtggttattgctatgcaagaggcttggtgaaatggcatatccattttccatttgtccattttggcggagaccatggctgccaatatttaaggattttaatccattgctcagttccttgtcgacttgccttgagggaaaaacagtgtccgtttcgggcatcctgtggtactgttcaccactaattcgtggcacaacttgatttctctcaggtctcatttgattcaaaatcccaggtgcatgtttttcaacagcctgaagccatgcactttctaacctttgctcctcaacagtcacggctttcgcttgttcaacagagacttctttccctctagttctatgcattcctgtgttcccttcagtggtgcatgactgcaaacctccactagcagctgaagcacagctgaatttctccagttttttctcgatctcttcagattaatttaaatttcttgatggggttcgaattccctttagtcgatcact

SEQ ID NO: 417569 - DNA, 504 bp, Oryza sativa
tgcaggaggcgaatgcgatggggtccaagacgaaggggtgctgcgggtggctgatcgtggcgctggtggcgtcgctggtggcgacggcggcggtggtggccatcatgaagaagaaggtcggcggggggagcgggcgcaagctcaagccgctgccggtgcccggcccgcccggggccatcgactccaagtacggcgacgcgctcggggtggcgctccagttcttccaggtccagaaggcggggaagctggagaacaaccagatcccgtggaggggggactcggcgctggatgatgggaaaccagcggggctggatctttccaagggaatgtatgatgctggtgatcatatcaagtttagtttcccgatggccttcacggcaacggtgctctcgtggtccatacttgagtatggagatcagatgagcgccacgaagcagctggaccctgcgcttgatgctctccgatggatcactgatttcctcgtcatgcgcatccattgacaat

SEQ ID NO: 417570 - DNA, 477 bp, Oryza sativa
ttgtgccttccgatgccactagtgcagaagaaaccatttcatttcacgaagtggatattgtaacaccatcgcagaaactgttggctagcaagctgtcgtgcaatgtggtacaagggaaaagccttcttctgactggccccaacggtagtggaaagagctctattttcagagttctgagagatttatggccagtgtgttccgggagagttaccaaaccttcagatgggatgtttcatgttcctcagcgtccatataccagcttgggtactctgagagatcagatcatataccctctctcaagggaggaagcagagatgaagatttgttcgttatacaatgatggtaacgggtctagtgcttctaatctgctggatgatcacctgaagacaattctagtgaatgttcggttggtctatcttctagaaagagaagatgggactcaacttcaactgggaagatgttttatcgttgggagaa

SEQ ID NO: 417571 - DNA, 513 bp, Oryza sativa
cattgctgcaaacattatagcataggttcaatgtcaaaatattacaatcatcagttcatcacatcacaaaccagcacacatgtgctctccaagaattacatcaaatcggattgttctcttccacccttattagcaaggagcactggagatgaacacatctcacataagactagacaagattacaacacacattgcttattaatggtctagattaatgaaaacaacatgaagcaaaccataattaaacataataagcatcatcagacacaaccacagaggctagtactactagttgtaatgcagctgcaaccatgccattgatgccaatggccatggcgtgcgagctctccatggtggctcagaactggaaggcgtcggccatggcggtggcgaccatgggctgggccgcgaacggcggctgccatgggcggagcagcgggtcgtcggggaatctcgggatgtcgacgggcgcgccgccacctggaggatctccaggacgctgccgagcgcctg

SEQ ID NO: 417572 - DNA, 528 bp, Oryza sativa
tgccccttatgcattagagcccccggagtcccctctgtttcgcagataagtcctttggttcccatctttttattacattcaggtcctcctagtttcttttcctttcgagtctactccttgcattcttgcgaggaagcccctcgggttggtcgaattttagtttccactccctctcctcgcggagtcgttgctgttcttgttcttggtcgaggttgaggttggtggcgtagatccgatctgaggaatgtttacctatcctttcctctaacgttcgccgtactccgatgaagttgaacgtgctccgccgccgccgttcccactccttctccgtcgccttcctctactggttctacgtcttctcatgaactcatcgccttcctcccaagaacaccatctccagcctctaattgattatatcttgatttctttttcatcctcctactagtttctttcttgtgttctttggaatttttttgatctcttgaagagatcccgttcttggattaagttttggacaagaaccgtact

SEQ ID NO: 417573 - DNA, 569 bp, Oryza sativa
gtcacataaactttcaattattctcagtttgtcaatacttcctctgtaccggcaagccgaaaaatgaatgagcaaaaagaatctaaagaaaaaaaatatcctacaattacataaacatttctgtgaatttcgcactaccaaacatggccgtgtgatcgtcttcttcgtgtagctacttcttcaagctcaggcggcgccgttgcagagggcggcgccatcgccggcgttggccagcagcggcggcgccttgacgagcgagttctcgccctcgacgagcggcacgatcggctcctcgtcgtcctgccctgccttctcgacgtcctccgtgctgaggaagcacggctggttcgtcgagcagagcaccctcgcccacatcctgtccgtgatgaccaccttgttctgcttctccgtgatcctgtagaaggggatgtaggcgtggcggccattgacgggtgcgacggtgaagccggtgtacccggccatggcgccatggatggcgctgtgggcgagcagcgagcaatagacgttgtcggaggcgttggacgtaacggcgcgatcatgtacgtggg

SEQ ID NO: 417574 - DNA, 513 bp, Oryza sativa
  unsure (1)..(513): unsure at all n locations
cccacgtacatgatccgcgccgtgccgtccaacgcctccgacaacgtctactgctcgctgctcgcccacagcgccatccatggcgccatggccgggtacaccggcttcaccgtcgcacccgtcaatggccgccacgcctacatccccttctacaggatcacggagaagcagaacaaggtggtcatcacggacaggatgtgggcgagggtgctctgctcgacgaaccagccgtgcttcctcagcacggaggacgtcgagaaggcagggcaggacgacgaggagccgatcgtgccgctcgtcgagggcgagaactcgctcgtcaaggcgccgccgctgctggccaacgccgggcgatggcgccgccctctgcaacggcgccgcctgagcttgaaaaagtagctacacgaagaagacgatcacacggccatgtttggtagtgcgaaattacagaaatggttatgtaattggaggatantttttttcttagattctttttgctcattatttttcggc

SEQ ID NO: 417575 - DNA, 576 bp, Oryza sativa
gtcgattaacctggtatgagatcaactccaggttgtttgtcagtgaaatcccaagggcaatttgcgactattggttccccatatacactagcagttcatcagttgacatgaaaaactcagaaaccagagcttccctaactgatcggaacacatagatgcatcttgcaggggataggaaaggaaacaactgatcaggatccacaagactagacgtaaataaactacgtcaaacaagaaaactgttccttctcgctgcaaaggaaaccatagacctgcttcaagtttcctctagatggtcttgcattaacagcatatttgcaaacaaaaaccagcctcttcctcatctccaacttcgtgacgtctcctttcagaaatgaattgccatgatcaaagaatccatcgcaatcaaataatcgtgtaattatcgccaaggccacacagatgcttatatcctctccattttgacagcatattagtagcttcttccctgctatcaaattcctgtttgcaaagctaactgcttttgaaggtttttcatcaacgaaaaccggtcgttctttgatcccacccatagta

SEQ ID NO: 417576 - DNA, 511 bp, Oryza sativa
taggacaagccagcgtctctctctttctcgtctctccaatggcggcggcggcggcgtcgtcggagtcagcggatgccgccgccgctgggccgtcgacgctgagcatctacaaggcggcgcggcgcatcaagcggcgggagagcacgctgtacaacgcgctgcggagcgtggcggacgacgccgcgttcgtggcggagatcgcggcgctgtggccggcgctgccgctggtcgccaacctccgctgcgggctctggtacttgccgccccgcgccgtcgccgccacctgctacttcaagtccaccgatgggcacgcgggcaactgggccttctccaccgcccgcctcaacctccacctcgccctcctcgctggggagagaggagggtgcataattgttgattcaacaaggagagggaaacgtttccctgacagcatgtcaaagaccatacccattggtgttgtgtcctaaccgagcaatgagaggtatcggctgcagactaacaacaagtcagc

SEQ ID NO: 417577 - DNA, 469 bp, Oryza sativa
attaacggggagggcaaagcatcacatttcaatcttgtgttattgttgttgttgagtggagcacctaaactaatctatagcaataacaagaacaaacaggaggggaggagggaaacctcaatacagtgtttgtagtgcagattgggacggaaatcgaaatgatcagaagaaggcggtgccggccaatccccggtggaggaggttgtgccccatgtcgtccctcaccttgttggcggactccgactgcacaagcacggggtcgtcctcctcctcgtcgggggggaggtcgcaacggaggtcggggtccatgtcctcccccctggtctcgcaaatgttgtggaggacgcaacaagcggcgagcaccgtcgggaggtcctgcagcttcacctccgtgcgcttctgcaggcacgcccaccgccccttgaggcggacgaacgcctacgtgggcacgcgccggaccttgcccacc

SEQ ID NO: 417578 - DNA, 481 bp, Oryza sativa
tgtcgtttgccccgacggcaccttcaccgacgtctgcatcgggtggccggggtccatgagcgacgagcaggtgctccgcaagtcggcgctgcaccagcgggcgtcggcggcggctgggtcgatgtcgtgggtggtgggcggcgcgagctacccgctgacggagtggatgctggtcccctacgcgcagcgcaacctgacgtggacgcagcacgccttcaacgagaaggtgggcgaggtccggcgcgtggccacggaggcgttcgtccgcctcaaggggcggtgggcgtgcctgcagaagcgcacggaggtgaagctgcaggacctccccgcggtgctcgccgcctgctgcgtcctccacaacatctgcgagaccagtggggaggacatggaccccgaccttcgctgtgacctcccccccgacgaggaggaggacgacaccgtgcttgtgcagtcggagtccgccaacaggtgagggacgaca

SEQ ID NO: 417579 - DNA, 523 bp, Oryza sativa
aatcgaacaaaacatttgagggagaaagcttggggaggaggagctcgtcgcgatcgatggaggtgggagcgaaggtgcccaagaaggccggcgccggcggccgccgcggcggcggcgggccgaagaagaagccggtgtcccgctccgtcaaggccgggctccagttccccgtcggccgtatcggccgctacctcaagcaaggccgctactcccagcgcatcggcaccggcgcccccgtctacctcgccgccgtcctcgagtacctcgccgccgaggtgctcgagcttgcggggaacgcggcgcgggacaacaagaagaaccggatcatcccgcggcacgtgctgctggcgatccgcaacgacgaggagctcgggaagctgctggccggcgtcaccatcgcgcacggcggggtgctgcccaacatcaacccggtgctgctccccaagaagaccggctccgccgcggccaaggaggccaaggagggtaagacccccaagtcgcccaagaaggccaccaccaagtc

SEQ ID NO: 417580 - DNA, 402 bp, Oryza sativa
actaaaaccctagctggtcgactcgcccacggcgtcgctcgactagcctgatcccgccgcgtcgtaacagcagggcggagccatataatgcgaaaaggcaggtgcaggcctcggcaagggaggcgcacggaagaagaaggaggtgaagaaggaaacgaagctcgggatggcgtacaagaaggatgacaacttccgggagtggtactcacgaggttgtcgttaacagtgaaatgatcgagtactatgacatatacggctgatatatcttgaggccatgggcgatggacatctaggaaccgcttaatgaattctttgatgcagaaataaaaaaggtagaactgaacacctattatttcccattgtttgtcactgagaatgttctacagaaagagaaagaccaca

SEQ ID NO: 417581 - DNA, 538 bp, Oryza sativa
aagagctatatatgtgattattatctattgacaagtaacaaatacaacgttttttttttatcaaatacaacacctcgtagtttataaaagcgaaaaaaagatctgctcattagaacttcggttttatgagaaatggcatcttgtcagcaaatggagggtcagagtatctccctgtaaggatctgcgacgcgatgtggaaattcgcagcttctgtgtaatggattccatcccaattgacaaattctgtactgtccttgcaccctttggctgttacaagattaccattcagagacgctgtctgcccacaaggtactctactgtcatagttcaagggtggccctccatatccacagcatgcttggatgggattctcgaaccctgtaataatgcaaaggcagaaattaagagtgttgtttgaagggattattgttttgaaagcctactgcttaatattcttatgagctagctacaatagtcatcactgatccagcatgtgtccaaatgcatagtagaagaaagccaaagaaagaaaatggtg

SEQ ID NO: 417582 - DNA, 521 bp, Oryza sativa
  unsure (1)..(521): unsure at all n locations
ctaacttacgtgcgggtgttaattttgctcaagctggctgttcaattactccagcaacggcaacatctgtcagcccattttcatttggtcttcagattaagcaattctttgcattcaaggacaaagttactaagcttctatctaaaggagatacgtacaggagatatattcctcagtcggattacttttcgcagggactttacacgtttgacataggtcaaaatgaccttgctggtgaattctactggaaaacagaggaccaagttgctgcatccattccgactattttgttggaattcgaaactgggctgaaggtttgtatacacagtattttcattcttaagcttttgcagtgcatggaacctttttttcttcttcaatggtcttcagtagtttgtagaatatggttttcagtcttcaaaaaataatctgtttgccttggccaaaaaataatcagtttgccattnttccatactggtccaactatgtactgtttgattgggaaaggacctactctaacg

SEQ ID NO: 417583 - DNA, 492 bp, Oryza sativa
ttggcaatagcttcgcgtagcttagctcggcttccccctcattcatggccattaccacgatgtgtcaccccaccccaccaccgcccgctgctccacttctcctcctcctcctcctcctctcctagtagtagcaacctacggacaccacccccacccgcttcatttatcacttgtctccccctctccctcgcctgctccgctgctcttgtgcttcgcgcctcgcctgacctcgctgtcgctgccgccagccatgaccgggatcgacctcaacaccgtcgaggaggacgaggaggaggcggcggaggaggtggcggcgaacggctcgtctccggctccggcgagggcgggcgcggtgtgcctcgagctgtggcacgcctgcgccgggcccgtggcgccgctgccgaggaaagggggcgtcgtcgtgtacctgccgcaggggcatctcgagcacctcggcgacgccccgcggcggcggcggccgcggccgccgtg

SEQ ID NO: 417584 - DNA, 526 bp, Oryza sativa
acacaaacaacgtgtaacattgatttctcgtttataatttacacttggcaatattgttctctagtcatatgtagtatggcatgttgtgatgtcctccattctgtttccccccaacttctagaaggccaggatgtgtaaaacaaatgctgctagtacaaaaactgaaaagaatggcactgctagcttttggaattcaattcgccgtataaatccctgaattccaataaccggcaatgtctacagcaaacctatgcgaagaagaaaaaacgacaaaaaaaaaaaagtcttccccagcatatgccctcttttttttgtgtgttttggtgaggagaaatgaatcatacaatttgtgcgaggtcacgaaaacgtaaccgtcaaacgtacgccttgggcgggtacttggcgacgcagtccacccaggggttgcagctcttcttccccttcggcggcggcgacacggccggcacgtcgcggagcgcgcgccagaccgcgctgttgcacttgaaccccgagccgaagccgatct

SEQ ID NO: 417585 - DNA, 510 bp, Oryza sativa
gctctagtgctttagccttttccattcacgccaaaggcaacctcgagttcagctcggtacgtgtcggggagagtcaagagaaagagaaagagagggctagcttagctgtgagctccatggaggcggctgtcatggagcgggagcggctcacggcggagatggcgttccgcgacgacgcgcgggcggccgggggggagtgggcgccgagcatcgtgatcaagatccggcgccgcctcccggacttcgcgcggtccgtgaacctcaagtacgtcaagctcgggatccggcacggcggcagcgtcacgtcgtacctgcccatgctgtgcgtgccgctgctcgcctccgccgcctactccttcgtccgcctcgacgtcatctaccgctccatcgacctgctcacctgcgtcgcctggctcggaccgccgtgctgctgctcaccgtctactacttcaagcgcccgcgcccggtgtacctcgttgagttcgcctgctacaaagccgacgaccagca

SEQ ID NO: 417586 - DNA, 383 bp, Oryza sativa
ggatgaattatggtgccgggatcacatatggttccttggtattgaaagagacagtattacagatgcggttacacaacaacctgaaaaaaaaaaagaacatgacaaactgatagagcaaactgcagagctctcttgcagtttcagctgactcaaaaaaatgaaaaaaggataaaacgccgaagatatttgaacactaaaactctggctgctacaccgatatcactagaaacttcggaagtcgatttcaaccctttcatcatcttcccatcttctttttcttccatggagcaaccagtcactactgatcaaagacacattaggtaggcggcggcggcgccaacaacggccggcaatggaggtagatagcgagagagagacccccc

SEQ ID NO: 417587 - DNA, 492 bp, Oryza sativa
ttatcctttacctcaagaggggcggcaaccggttcatcaagaccgcggcgtacggccatttcggccgcgaggatcccgacttcacatgggaggttgtcaagccgctcaagtatgagaaggcatcttcctgaggaagaagataaagatgatgaccatgagaggggggtctctctctcgctatctacctccattgccggccgttgtcggcgccgccgccgcctacctgatgtgtctttgatcagtagtgactggttgctccatggaagaagaagaagatgggaagatgatgaaagggttgaaatcgacttgcgaagtttctagtgatatcggagtagcagccagagttttagtgttcagatatcttcggcgttttatccttttttcattttttttgagtcagctgaactgcaagagagcttgcagattgctctataatttggcttgttcttttttttttcaggttgtgtgtaccccatctgtaatactgctctt

SEQ ID NO: 417588 - DNA, 468 bp, Oryza sativa
ggatgaattatggtgccaggatcacatatggttccttcatattgaaagagacagtattacagatgcggttacacaacaacctgaaaaaaaaaaagaacaagacaaactgatagagcaaactgcagagctctcttgcagtttcagctgactcaaaaaaatgaaaaaaggataaaacgccgaagatatctgaacactaaaactctggctgctacaccgatatcactagaaacttcgcaagtcgatttcaaccctttcatcatcttcccatcttcttcttcttccatggagcaaccagtcactactgatcaaagacacatcaggtaggcggcggcggcgccgacaacggccggcaatggaggtagatagcgagagagagacccccctctcatggtcatcatctttatcttcttcctcaggaagatgccttctcatacttgagcggcttgacaacctgccatgtgaagtcgg

SEQ ID NO: 417589 - DNA, 528 bp, Oryza sativa
taacctttacctcaagaggggcggcaaccggttcatcaagaccgcggcgtacggccatttcggccgcgaggatcccgacttcacatgggaggttgtcaagccgctcaagtatgagaaggcatcttcctgaggaagaagataaagatgatgaccatgagaggggggtctctctctcgctatctacctccattgccggccgttgtcggcgccgccgccgcctacctgatgtgtctttgatcagtagtgactggttgctccatggaagaagaagaagatgggaagatgatgaaagggttgaaatcgacttgcgaagcttctagtgatatcggtgtagcagccagagttttagtgttcagatatcttcggcgttttatccttttttcatttttttgagtcagctgaaactgcaagagagctctgcaggttgctctatcaatttgtcttgttctttttttttttcaggttgttgtgtaaccgcatctgtaatactgtctctttaatatgaaggaaccatatgtgatactggca

SEQ ID NO: 417590 - DNA, 442 bp, Oryza sativa
aacccacgacggagggggctaaacattattggtatgtagtatgttcaggggggtgcattattagcattgctcaagctgcaggtagcttcagggaagtgaaggggaggaaaaagagtagctgctccagcacaaaactactagcattacataagcacagaaaaagggatgatccttttaagacattttcccacgccaaaggtgaatggggtgaaaatcttaggcggacttcacgggggcggagttgatgatgtcgatgaattcaggcttcaatgaagcaccaccggcgagaaaaccatcaacatctggctttgctgccagctccttgcagttcgcaccagttacggaacctccatagatgatccttggtgattcagcaacctctgcactgacattagcagcgagccacttccttaggccatcatgcactttttgtgcttgaact

SEQ ID NO: 417591 - DNA, 403 bp, Oryza sativa
gacccacgcctcctatccattctccagctctctccccctgggcgcacagacgcatacaaggatacaatcttcccccatggccgcaagttcttcgttggtggcaactggaaatgcaatgggaccactgatcaggtggacaaaattgtgaaaattctgaatgagggacagattgcttctacagatgtcgttgaggtggttgtcagcccgccttatgtgttccttcctgtggtcaagagtcagctgcgcccggagatccaagttgctgctcagaatttgttgggtgaagaagggcggggctttcaccggtgaggtcagcgctgagatgcttgtcaaccttagtattccctgggttattcttggacactctgaaaggaggagcttgttgggtgaatcaaatgagttt

SEQ ID NO: 417592 - DNA, 475 bp, Oryza sativa
gatcccgatcccccccaccgccgccgccgcccgatccgaccagatccccactacgcgtcccaattccgggccaattcgaccccccgagcgaccgccatctactcacctcccgatcgattcggatccccaatctagcgggcgcggggcggggcggggaggcgggattgggctagggttttgtgggggattggtgtattggattaggtgatggcgcataagggttgcctcaagcgcctacagaaggagttccacttcgctctgcaggagccgccgccgtagaacgtggctcgcccgctgcccaacgacttatttggagcggcatttaggacttgaaggtagtgctggcacaccattcgaaggtggctattattacgggaaactcacatttccacctgtgtacccttttaagcctccatgcattagcctgacaactcctagcggaaggtttgcccctcacaaaaggatatgcccatca

SEQ ID NO: 417593 - DNA, 548 bp, Oryza sativa
aaacaaaaaactgaagcaaaggggcaagcgccagttaatttgcatgcatatagatacaaaaaaacataatcttgatcactttaatttcacccaagcagcatagcaaacaacaccatccatccattaggaccattacacatctaatcaatcaagcatgagaggcatgcaaggacaacactgagatcttgacagctatagcatataagctcagctatgatcaaggggacactgtgcgtgtgttcttgctgcgaactacatggcattggatttaatttcattaattagctagctcggtcgatcgatcgatcgatcatcccctgcactgggtgatggcggagcagccgcgggagtaagggttggcctcggcgccgggctggcagttgtagtaggacgcgccgcgctgcgagcacggcacgctgtcgcgccgcagcgcgtcgtacccgatgtaccccgacccgccctgcagcacccgtcgttgcccgtcgccgccgccgccagctcgtactccccctcgccgtcgacgccgaggaactccatgcactccccca

SEQ ID NO: 417594 - DNA, 431 bp, Oryza sativa
cacctttcttcctcgtcgacgagatcatcggcatggcggcggcggcagtagcgttgctcgcgttcctcctcgccgcggcgtcagcggcgtcgtcggcgtcggcggcggcggcgacgctggtggagggcggcgtggtggggcgcgcggcggtggtgatgaggcggggagggaggacgtgccgtggcacggtgggggagtgcatggagttcctcggcgtcgacggcgagggggaggacgagctggcggcggcggcgacgggcaagcggcgggtgctgcagggcgggtcggtgtacatcgggtacgacgcgctgcggcgcgacagcgtgccgtgctcgcagcgcggcgcgtcctactacaactgccagcccggcgccgaggtcaacccttacttccgcggttggttcggcatcacccaatgcaggggatgatcg

SEQ ID NO: 417595 - DNA, 632 bp, Oryza sativa
  unsure (1)..(632): unsure at all n locations
ggagatgagcaccacgacgcacttgatgctcttgcacaccgtctggatcaccgtcggcccgggctccgggatcgtcaggttcaggttgtcgccgaacccctccgcgtacggcggctcgccgaccaccacgatcgcgtagtcgtacttgtcgccggtgaccacgctgctgtccgggttctccgagtacaccaccgtcgtgctgggatcaacggtggccttgatcgccgacaggatcgtcgtgccagcagtgatgttgttgccgggctgtccttgccaggtgatggtccatcctccacactgtctgcccaaatcatcagcatggcttcccgcgacgagaattttaccggctttcttcgggaggggaagcaccggagagtaggaggattttccgttcttcagcagcaccaaggacttcctgaccgcttcgcgcgcgagctcacggtgctcttgctttccaagttcatcggcgaggctagagtcagcaaaagggctctcaaatagacccatggtgaacttgactcggagaatcctgtagacagcatcgtcaattctgctcatggngatacttctgtggtaacttgctctgcaggtcatcaatgaatctgtgaagtataaggacatgatcatgtaat

SEQ ID NO: 417596 - DNA, 530 bp, Oryza sativa
  unsure (1)..(530): unsure at all n locations
tcggtattgatgccgtgcatgggcacaataacgtctacaaggctacaatcttcccccataatgtcgggctcggcgctaccagggaccccgacctagtaaagaggataggagaagcaactgctcttgaagttagagctactggaattccctacgtctttgctccttgcgttgcggtttgcagagacccaagatggggacgctgctacgaaagctatagcgaagacccaaaggttgtccagtcattgaccacactcatctctggcttgcaaggcgatgttccatcaaatgatgtaggaagaccatatgttggtggaagtaagaaagttgctgcatgcgcaaagcactatgttggtgatggtggaacggtcaagggaatcaacgagaacaatacaatcatcgatactcacgggctgttgaccattcacatgcctccttattataattctatcattagaggagtctccactgtcatgngttcatactctagctggaatggagtaaaaatgcacgcgaaccatcacctaatcact

SEQ ID NO: 417597 - DNA, 506 bp, Oryza sativa
acagtagcctgaacttggctgatgctgtaatgtaatgggatttaatttacatttttactccacaaagttcggtacagtgcactggtcaccggccttcgacgatggtgacggtgacgtcgttgacggtgcaggtggacgaccactcgccgtcggtcgagccgccgccgccgccgcggtcgctgcagaagcccgggtgcctcggctgcggcaccaccgcgctgaggttgcccagcatcatgaacaccgccgccatgtgcggccggtcctccggccgctcctgcacgcacaggagccccacctgcacgcaccgcagcacctccgacctgctgtaccccccgccgccgccgccgccggccaccgcctcgtcgagcagcgccagcgcgttgccctgccttcacagcctacacgcgtggctgagcaggctcgtctgctcgccgctgctgtacatcccgcggttcttccggcccgtgacgagctccagcaccagcacgccgaagcttgacacg

SEQ ID NO: 417598 - DNA, 461 bp, Oryza sativa
gtcacgatggccatggctgcggcgagcgccatgcggccattagctcccctcttccttttcttcttcttctcccttgccgcctccgcgagtgacaacattcttgccaactcatctctcgccgatggccagaagcttgtctcggccggtggggtcttcgagctcgggttcttcaccccgccgggctcgacgacggcggcgaggttcttgggaatatggtacagggacatcgatccgccgaccgtggtgtgggtggccaaccgggatgctccggtgagcggcacggccgggagcttggctgtcgtcgtcaacggcggcggcggcggctgcggtggtcgtctggtgctcggcgatgggccggggcgagtggtgtgggtcgtcggcgccgacgaacgtaaccgcgagtgatcctgtggcggcgaggctgttggatagtggcaacttcgtgctcgccgcggcggtgg

SEQ ID NO: 417599 - DNA, 437 bp, Oryza sativa
tggagggggtgtcgtcgttcgaccacatcatcgaccagtcgggggggctggaggtgcgcatctaccgggcggcggcggagggtgacgcggaggagggggcggcggcggtgacgcggcccatccttgagttcctgacggacgcgccagcggcggagccgttcccggtgatcatattcttccacggcggcagcttcgtgcactcgtcggccagctcgaccatctacgacagtctgtgccgccggttcgtgaagctgagcaagggcgtcgtggtgtccgtcaactaccggcgcgcgccggagcaccgctacccgtgcgcgtacgacgacgggtggaccgcgctcaagtgggtcatgtcgcagccgttcatgcgcagcggcggcgacgcgcaggcccgcgtgttcctctccggcgacagctccggcggcaacatcgcccac

SEQ ID NO: 417600 - DNA, 395 bp, Oryza sativa
aacctcgtacaactgcatgtggggctttatttattcatacatacatacatacccaatacagagcagtataaccgtacgcaatacacggcacgatcgaactcgtcgaagcagacacgaaatcaagtaagcgagacacgtacgtacgtccatatatagacggggtctatggcaggtgggccatgcgacaggcgcactcacacacgtataaacggcacgcagaactggagtattatggtttggttttagcaggaggggacggggacgtggcaggcggccaagaccttcttgccgttgggggagttgacgtagcgctgcaggtttgggtcgtgcgcgtactggcacaggcacggctgctgctccttcatccggctgcagcacgacgccgacggcgacgc

SEQ ID NO: 417601 - DNA, 520 bp, Oryza sativa
  unsure (1)..(520): unsure at all n locations
ttcaacaacaacacacagcaacaggcctaccatatcgcgagaaggcccccagcgtcgcggagccgaaggatcaggattcactccgccctcgccgacctcgtcgccggccgccgcatcaccaccgacacctccccccatcgccgccggcgagagttgggtggtggagcgagcgtggccgcgaggggacgcggaggggcggcggcggcggcgattgttcgcgggatgagcagcttcggcggcaccagctccgtcgcctccggtggtgggaagaggctcgagtacgggcggacgcatgtcgtgaggcccaagggcgcgcacaaggccaccatcgtctggctccacggcctcggggacaacggagccagctggtctcaactactggaaaccctttccctttccaatataaaatggatttgccccaccgcgcctacaggccagtggcagtttttggtgggttcccatcaactgcatgngttgatgttgctgatctttcagaagacgctcctgatgatgttgaggg

SEQ ID NO: 417602 - DNA, 501 bp, Oryza sativa
gatgctatcgagattttaacacaatctctttcgagaaattgttctgggtttactctgcttgttttcatccttcatgtgatggctctgcagagactaaatgaccttaacaggcagattaatgcttttgattttttgcttgaagatgatacagatcaatttgacaaggagaatagtgaaggcactgagttattaaagaagtctagctgtctcgaggccacacaactcaccagttttatgatgagctatgtgagactattatcatcaggagaaaccggctctttttggtgttatgagattagttcttcctgggattcaagtctatgctctttagatgaattttcatttcctatagcaacttggcaactgctgtgtgaaaacattgatatttggagcccccatgcatctaaaaaggatttgaagaacttcttttctaatctgataaagtttgcttttgttgaaaagaggtcatgcaaagatgtggagaatagtggcagccaatct

SEQ ID NO: 417603 - DNA, 492 bp, Oryza sativa
agcggggaaaaccatctttatttatggcttatcacgagaagaaaacagcaggagcgtgcaccaatcggacaccacatacacactcctttttttgggggacacgatgaatatgaaacgagcatttgaaagcaacaaaagctaatcggactcgcgaggcgaggatcatggaggtggagcagctagcatgcctgtcgatcactccgggggcttcatctcctgcttgatggcagcgaccaggtggtcgtaggcttcgctccacgcgctcttcatcgccgggctccacatgtccgccggaacctcctccttgatcgtgtcaagcagcgcgaacttcaccacctcgaagtgggcgtctccgacgccgtacttgaggtgcgtggcgccgagcctcttgagggtggtgtctctcacggtgaccttcccggctttccgcagctgcgcggcggcctcgcatgtcatgacgaagacggacatggcgtgggtcttgagcttggg

SEQ ID NO: 417604 - DNA, 519 bp, Oryza sativa
tgttttctgagcccagctagctctcgatcatttgttacagagaaattgatcaaagcaggaaattaaccagctgtcaggaagcaatggctctcgtggaggataacaatgccgtagcggtgagcttcagcgaggagcaggaggcgctggtgctcaagtcatgggcgatcttgaagaaggattccgccaatattgccctccgcttcttcttgaagatcttcgaggtcgcgccgtcggcgagccagatgttctcgttcctgcgcaactccgacgtgccgctcgagaagaaccccaagctcaagacccacgccatgtccgtcttcgtcatgacatgcgaggccgccgcgcagctgcggaaagccgggaaggtcaccgtgagagacaccaccctcaagaggctcggcgccacgcacctcaagtacggcgtcggagacgcccacttcgaggtggtgaagttcgcgctgcttgacacgatcaggaggaggttccggcggacatgtggagcccggcgatgaagagcgc

SEQ ID NO: 417605 - DNA, 306 bp, Oryza sativa
ttaagtatccaactaacgcaagatggctctggttgctcaggcctccaccatcgcgcagttcgccggagtggacgcctacggcctgatcaaaatgatcgccgaggcggcgcagacggtgcggcgcaacagggcgacgtgcctgcagctcgcgcggcgcctcaagatgatcggagatcttctcaagcagctccacggtgcgcagctgatgcagcagccggagacgaggaacccggtggagcagctggaggagacgctccggcgagcgtacctgctcgtccggtcatgccaggggccgagctacgtgta

SEQ ID NO: 417606 - DNA, 516 bp, Oryza sativa; identical to SEQ ID NO: 394709

SEQ ID NO: 417607 - DNA, 408 bp, Oryza sativa
agaatcaaacaattcctagttccactttgccagtcctaccaaagcacattttagccatggctagtccatttttcaaagttattccagtacggcctgtgctccgcgatcagtgtgagattaccatgagattgtacttgcaccaagttgttacagggccaaaccacaaccaagaaacaatggtgccctcatcacatcccgcttcgtttggtatgattgttatcaacgattggcctatctatgatggacctgacttcaacacaagtactattgttgcacatgcaagaggaatgcatgtccaggttgatcaagttaacaacacctggtacacatctatgaacatagagtttgtggatgccaggtttaatggatcaaagcttcaagtgatggggactactccagaactggtga

SEQ ID NO: 417608 - DNA, 447 bp, Oryza sativa
tcacgctcacgcttcactacaacgcactgtacacagttgattattagctagttgggtttctggcccggccgccggcgagatgggcaaggacaagcaccaccgcgactggatcctccggcggtgctgcggctccatcgccgcctgcatcctcacgctcgccgttctcgtcggcttcatcgtgctcgtcatctacctcgcgattcacccctccaagccttctttctacctccaggacgtccagctccgcaacatcgacctctccgaccctgccatctccctcaacctccaggtgacgatcgcgtcgaggaacccgaacgacagggtgggggtgtactacaagacgctgcacgtgttcacgacgtacagggaggagccgatcacggtgcctgtggagcttgcggcgatctaccaggggcacaaggacgtgtctgtgtggtcgccggtgat

SEQ ID NO: 417609 - DNA, 535 bp, Oryza sativa
tcacgctcacgctccactacaacgcactgtacacagttgattattagctagttgggtttctggcccggccgccggcgagatgggcaaggacaagcaccaccgcgactggatcctccggcggtgctgcggctccatcgccgcctgcatcctcacgctcgccgtcctcgtcggcttcatcgtgctcgtcatctacctcgcgattcacccctccaagccttctttctacctccaggacgtccagctccgcaacatcgacctctccgaccctgccatctccctcaacctccaggtgacgatcgcgtcgaggaacccgaacgacagggtgggggtgtactacaagacgctgcacgtgttcacgacgtacagggaggagccgatcacggtgccggtggagctgccggcgatctaccaggggcacaaggacgtgtcggtgtggtcgccggtgatgtccggcgagtctgtgcccgtggtgcagtacgtggcagacgccatgaggcatgacatcgcagcgggctacgtgctgctgcacgtcaag

SEQ ID NO: 417610 - DNA, 488 bp, Oryza sativa
aggttcaaatccaacttattcagagggcatactgctgtcccacaggaaactgtttcataaaactaacatatcatacggactcgatggtccattaaaccagacacaagtagacatcagcaccacaaatacttgacgaacagaggctcgggacgaccaggcacatcggcagctccaccaaactggctgattactgaccaccacggaggcggagcaccaggtggagggtggactccttctggatgttgtagtcggcgagggtgcgtccatcctccagctgcttgccagcgaagatcagacgctgctggtctgggggaatcccctccttgtcctggatcttggccttcacattatcaatggtgtcggagctctcaacctccaaagtgatggtcttcccagtcaaggtcttcacgaagatctgcataccaccacggagacgaagcaccaggtggagggtagactccttctggatgttgtagtcggcgagggtg

SEQ ID NO: 417611 - DNA, 475 bp, Oryza sativa
ttgaaaaatttctccccaatctcgcgaggctctcgtcgtcgaatcgaatcctctcgcgtcctcaagatgcagatctttgtgaagacattgaccggcaagactatcaccctcgaggtggagtcctctgacaccatcgataatgtcaaggctaagatccaagataaggagggcatccccccggaccagcagcgtctcatcttcgctggcaagcagctggaggatggcaggacccttgctgactacaacatccagaaggagtcgacccttcaccttgtcctccgcctccgtggtggcatgcagatctttgtcaagactctgaccggcaagactatcacccttgaggtggagtcttctgacaccatcgacaacgtcaaggccaagatccaggacaaagagggcatccccccagaccagcagcgtctcatcttcgccggcaagcagctggaggatggcaggacccttgctgactacaaca

SEQ ID NO: 417612 - DNA, 457 bp, Oryza sativa
ggcggcggagggggaggcgaccacgttccgggcgatatcgggggcggcgctcagtgccaacggatccacgccgctgtccacgtccgtgctgctgctgatgccggaggagtcgtcggcgtccgccaccgcgtcgtcggggtttgagagctcggagtcgttcgctgctgtgccgctgcagccggtgccgaggttctcgtccgggccgatctccgcgcccttctccggcgggttcatgtcggggcccttggagagggggttccaatctgggccactcgacgccgcgctcctctcgggccctctccctggcaccggcacctccggtcgtatgggtggcgccgtccctgcgctccgccggagcctctcccacggtggccgacgcctgcgcaatttcacccgcgcgctcctcgcgcgcaccgagaagtttcaggattctgcggatctaggctcgccggacgcc

SEQ ID NO: 417613 - DNA, 401 bp, Oryza sativa
caaagaaagttgaccaattggtcgattttataaattattaataattgaacaaatcctcatttacatcaacatattataccacgcggccagccctgcgggcgattcatggcgattcagctggatgtgccgagagcccaagccgaatccaaccccccacagtgcttggttgatattgtacagtagcaactgggggaagaggagtagagtagccgcaagaacacctctcagctcaaggaaggcatgggaagaaccccctctatacgttttgtttcactagcctactattgtttctatttacacgcaggatctccaaatcctgccctccaaagagatgacgatgacagatacatcgtcatggtatcgccgacgatcaccatgtggtatctcgatcagttcatgaa

SEQ ID NO: 417614 - DNA, 291 bp, Oryza sativa
aaaaagtatactgggggggcctaaacttgccaccgagatacagaaacgtccttgaaccgcaataccagacacccggggtcccccaactatacaaaaccggtcatccaacgtccctcggtgattttgaccccggttttgatctacgtggcggctgagttagtgtgggacccacgtggccccacatatcaggtgtccacatcatctttatttcccctcttctctgtcccttcctcccctatcagctctatctctcgcaggccaggcctacgggttagggagcagacggctggg

SEQ ID NO: 417615 - DNA, 312 bp, Oryza sativa
cccagaccgagactaaccctgcattgaccatacttggtgcttggggagctacacatcggaacattacactgacgggaacaaaggccgaatctttggtgaataggctgatcaggaggaccatagaggcatgcaagaatcgctcgaaggatgctgacataactaccaaggcggttgacgaggtccttcttgttggcgtcatgacaagagacacgcaagtgcagtacatcgccttctagatcttttgcttgtccacaacgctaggcggataccacataaaagttacggcgatcggtggatgcatacacgacggca

SEQ ID NO: 417616 - DNA, 440 bp, Oryza sativa
gcgagacaaatacacacccaggcggtttgttcttagattctttttccctcaaccacctcacatcaccattattgttacactattccttttccaccacttatcctcccgtttgcaattaaaaagaataaaaagggaaaaacatttgcgagaagagaacagcataataataacatccacaccttcaattcccaatttttttctccatttcttgctaaaacagtagattttttttttaattttgtttgcctctcagaacctaacgatcttggccgcgcgcaccaccgggttgaccctggcgatggcgtccctcgccgccgacttgtagtcgtagctgcagccgtggcggtcggagtaccggtgctcgccgcagaacaggtggccgcaccggcaccggaacccggtgaggccgacacgcttacggcacctggagcaccggttca

SEQ ID NO: 417617 - DNA, 498 bp, Oryza sativa
tctcctgcaatccttatcacacagcaaacccaaaccgtgagcggaatcctcagcctgctgagagagcctgtgaccaagagggggattctttcttggttattgacgatggcgcagcgcgacaagaaggatcaggagccgacggagctcagggcgccggagatcacgctgtgcgccaacagctgcggattcccgggcaacccggccacgcagaacctctgccagaactgcttcttggcggccactgcgtacacctcgtcgacgtcttttttgtcgtcaccggtgctcgacaagcagccgccgaggccggcggcgccgctggttgagcctcaggctcctctaccaccgcctgtggaggagatggcctccgcgctcgcgacggctccggcgccagtcgtcaagacgtcggcggtgaaccggtgctccaggtgccggaagcgtgtcggcctcaccgggttccggtgccggagcggacacctgttctgctgcgagcactggtac

SEQ ID NO: 417618 - DNA, 493 bp, Oryza sativa
gccatgccaatacgggggtcagacttaattccagggggctactacattcataccagccttcctgtgctcattattctttttctaagcacaaaaatgttcaatcagccccgaacaggacaggctaacaatggataataatatgtatgtagtggctacatttcttcaggattcagtttccacgacgatgggaaatttcatttagttaccattgatctgatgaaaagccttgcttccaagaaccaactccttgaagcgaactatgcagcccattgcacgctcgaattcgctgctctccagagcaaagctgaaccgacagtgatccggtattcctgtccatgagctgctgtttatgcacaacccggtggacctgagaatggcttccttgatgttgcagccatctagcttgccatcaaaaccatccaccttgattattttgccgatgtaggcagtcggtttcgccagcatcgatatgccaccatgactgccagcaaca

SEQ ID NO: 417619 - DNA, 392 bp, Oryza sativa
tcttgccagtgccttctgcagtgaatgcctccatttttgaaagttttgttaggcggaacattactgagtctgaaactgatgtccgttccagcattcagcagctggtgaaagatagctatggtttcccagcagatggttgttctgaaatattatatggcaacacctgtcttgcactcttcaacaagcttgccctttgctgcatccaagaccagggcaccttacttttccccttgggcgctaatggtcactatgtctcagcagcaaagtttgtgaatgcaaatacgctgactattccgacaaagttagaatcaggcttcaagattgaaccacggggttctagctgacacacttgagacagtatctaggccatgggtttatatttctggccccac

SEQ ID NO: 417620 - DNA, 504 bp, Oryza sativa
gctcatcaaacagcgcgcgcgagcgagggatggataggatattttcgttcgcgttcgtgccatcctaaatcccgtctataaagccgtgcacatctctatcctcacctccattccattccactcgccaacccgacacgtctctcatcttcacgcaacgaacagcagcagcagctcaagctaagctaagctaaagtactacgtgttctttcgtcttcgtcggcgccggagtttgattcgtcggagctagctagcaagaggaagaagaaaatgttggccatattccagaagcaggtggcgcacgcgccggcggagctgaacagcccgcggagcagcgcggcgaagcccaagaaccccgacgagatcctcagggacttccacgccctccaccccatcgaggccttctccacctccttcggcggcggcgccgccctcgcctgcgtcgccggccacgcccgcaatgcctctctggctcgagaggatgctctgtgggcttgatgacatcta

SEQ ID NO: 417621 - DNA, 331 bp, Oryza sativa; identical to SEQ ID NO: 394975

SEQ ID NO: 417622 - DNA, 454 bp, Oryza sativa
tcgacggccttgggggggtcggagccggggggaccgccgccgcgccgtcgccgaacagcgcctgcccgaccatggagtcgaggtgggactcggagggcccccggaacgtcaccgccgtgatctcggagcacacggcgaggacgctcgcgccggggttgttctcggcgaggtccttggcgacgcggagcaccgtgccgtcggcgaagcacccctgctggtacatcatgaggcggttcacgttgggcctcagggcgagcatcttggccagctggtagtcggcgcctggcatgtcaacgccggatgtggtgcaaaagacgaggtgggcgatgcgggagcgcggctgcccccactccttgatcgccttctgcgccggcgtcttccctagcttggggacctcgacgacgaccatgtcctgccgcgcgtccagcgactgtgccatgtacgcgcacatgtt

SEQ ID NO: 417623 - DNA, 377 bp, Oryza sativa
tttactttgtaaatctagcttgctgtaaacacagttagttcgtaattatcgcatagggccatggggaagtacagtgtgggtctcgtggttttagggttgctggcccttgcgttttcgaccactgtgctggctgaaacacatgttgttggtgactccaacgggtgggacttctctgtgtcgtttgatagctgggctgatggaaaggtcttcgctgctggtgacactcttgttttcaactacaaaccgggcgcacacaacgtgctggccgtggacgcggcgacgtacaggagctgcaaggtgggcagctctgcggactcggtggcggcggcgacagggaccgcgtcgttcctccttaagaagggcgtcaactactacat

SEQ ID NO: 417624 - DNA, 444 bp, Oryza sativa
  unsure (1)..(444): unsure at all n locations
ttcttcattcagcaggccagctgaggaatcggaagaattcaaactctggtggggccaaagtttcagaaagtaccgatatagttacatttgctgatgtggctggagtagatgaggccaaagaagagctggaagagattgtggagttcctaaggaacccagaaagatatattcgtcttggtgcgcgacctccacgaggtgggccttccaggaactggaaagacgcttcttgcaaaagctgtcgcaggggaagctgaagtcccattcataagttgctctgcaagtgaatttgtggagttgtatgtaggcatgggagcagctcgagtgcgtgacctatttgctagagctaaaaaggaatctccttcgattatttttattgatgagattgatgctgtggcaaaaagccgtgatggcncgtatcgtatcgtcagtaatgatgagcgagag

SEQ ID NO: 417625 - DNA, 478 bp, Oryza sativa
tttttgttttttcgaaatgtttgcggattaattaactgttcacaatacaaatacagttggcacaaaatgtgtcctgcccaaaagcgggaaggcaggaagggaaaaatttgcaggaactaacgtgtggaatcaaagaatcgttgctgcatcctaccgatgataggctgtgttaagaaccaccccgcctcctctccatgcatgtgcgcgttcgtgcgtgcgtacgtacgtgttgtttgatttcagaggatcagaagtcgaagatcatcttgcggaacttctccatgtgctcggcctgcagcgagatggccaccgacaggctgccgtcgccgctggcgctggggagcacgaaggcgagcccctcgtacgcgatgccgccggggcccatgaacaccggtcgtccctagccgaagtcggcgtcgtggatcggcagtcggacccagctggtgaggcccaggttggggcaccggaacgtgtgcgc

SEQ ID NO: 417626 - DNA, 312 bp, Oryza sativa
ctgtctttgggggaaatgtaccatctgggtccgaatttcattcgggatatgaccgttcatggcacaccacatttttcatgagcaactcagaatgacgagaccaccgtattgtcgatatgtacaatccaattttgacaacaacaattaaattaccgttcataaataatcatctaaggttatgctaaaagactgctcgtccaggtgaagcggccgctgcttaggcatagtgaggctgaattccctctcggcctcaggccgagcatcttgtccagatggtagtcggcgccgggcatgtcgaccccggaagtggtg

SEQ ID NO: 417627 - DNA, 421 bp, Oryza sativa
ttcttactgttactgtacctcctcccatatatcatcttcatatttttgcagatcgataagcgagaaaaatgggagcacgctgcctcgcattgcttctcctctatggcacgttgctgctgctgttgctgctgccacagctgccgctcgccggcgcggcgacgagatactacaccttcaatgtgaagcttcagaatgtgacacggctgtgcaacacccgggcaatcccgacagtgaacggcaagttccccgggccgaaaatagtcaccagggagggagaccgcgtcgtcgtcaaggtggtcaacaatatcaaggacaacattaccatccactggcacggagtgaggcacatgcggacggggtggtcctacgggccggcgtacgtgacgcagtgcccgatccagacggggcagagatacgtgta

SEQ ID NO: 417628 - DNA, 420 bp, Oryza sativa
tgtgttttttaattttttgggtttttttttttttttttttttttttttttttttttttaggtaaaacactggtggtaccaagaaaaagtttatccccctggagtactggccatcaaaaatttaccacttaacttaccccctcacccatgcattcaaaaccatgcatgcaggaaacaattaccacaacacacacaggaaggttgaattttatcacaaccatctttttttttttcccccccccaatttattaacattttaaacatgcataccccacaaaaaaaaaaagaagaaacaagaagagaacattttccatcgcccaaaaataggtttcaccaccctgaactcattaaggtccttgagatgccctggccctgaagaaaatgatcacacccttaacctgacaacttttggaaaatgggg

SEQ ID NO: 417629 - DNA, 447 bp, Oryza sativa
ttgactttatcagcctatttttttttttttttcgatcagccctttctctcgataaaatacttttttttgggtaaccgcttctgcttttttttgaaacaaaaaaatcaaactagtacaagttatttaaaacaaaaaacaagaaatggcattcgatagcaacgctggtaaacaacccggattggaaatctggcgcattgaacagatgaatcctgttcgtgtggacaagaaagattatggtcgtttctacactggagattgctacttggttctcaagtctactgagaccaagggctccatggctcaagatttgcacttttggttaggagccaattccagccaggatgaacagggagctgctgcctatcgaacagttgagcttgatgatcaactcggtggagctcctgtccaacaccgtgaggtgcagggacatgaaagcgccaagttctt

SEQ ID NO: 417630 - DNA, 424 bp, Oryza sativa
tggttttaaaagagaattggggtgtccatttatttattctgaaatattggactgacactgtgccacatgcatatatatcggtttcagcccggttacaagtttatgacacaccatacttcgactcgatactagtacgttgtaagtacgtacttgtacgacgacacgtacagggagtgagtggcaaagcactcttattttaccgccagccagtcgccgccggcgaagctactagctgttcactgcgccgccgtcaacccgctgttgaacggcctctggtcgtagcagtcgaggttgctcccgtagccgatgccgagcacgtcgcagtagcgctggtagaagccgatccggttcgccacccggtcgtcggggccgaacccgcactccaacccgccgttgatgatgttggtgatcacgccggaccccg

SEQ ID NO: 417631 - DNA, 359 bp, Oryza sativa
ttgttttgggctagcgggttgagatggcggcgccggatgtctagtaccgctgcttcgtcggcggcctcgcctgggccaccgacgaccgctccctcgaggccgccttctccacctacggcgagatcctcgactccaagatcatcaacgacagggagacggggaggtcacgtgggtttgggttcgacaccttctcctccgagcagtcgatgcgcgacgccatcgagggcatgaacggcaaggagctcgacggccgcaacatcaccgtcaatgaggcccagtcccgccgctccggcggcggaggcgggggctacggcggcggcggtggcggctacggcggcggtcgtggaggcggcggctac

SEQ ID NO: 417632 - DNA, 444 bp, Oryza sativa
tgggtttttccaccaaaggggagctcagcgcttttatagtttttgtcaactagttcccctacacttgtatttaagtatactgatcggataaagcagcgtttgaaatgatgtatctatttttcattccagaagccgcttggtgtatacaaaatggcaaaatatacagcgtcacctcttcatcaggacaccaccgtcataaccatgcgtgctgctaactcatgcgtgggaacatactttctcttgtctagaactgccgcagcacaaacggtcgtcatcaacataagtagtattcagccccatcatccatgaacctactgatatgtcatcatgggcatagctctgtagcgatgcactgtttatgttaatgtagcgtgccaaattgttagagaggataaacaaagcaccggaagcatggcgaaaatacgtttttgaatctccaaactt

SEQ ID NO: 417633 - DNA, 476 bp, Oryza sativa
tgttcagcatcaatcaaattcaagctagtcacaacaataatggagccctccatctcgcgtcgacgacgtatcgacatcgctctcgtgtcgctgctgctgctcgccgccgccgccgccgccgtcgacgcggcgaccatcaccatggtgaaccgctgctcgtacacggtgtggccgggcgcgctcccgggcggcggcgcccggctcgacccggggcagtcgtggtcgatcagcgtcgccgccggcacaccggccgccaggatctggccgcgcaccggctgctccttcgacggcgccggccgcggccgctgcgccacgggcgactgcgccggcgcgctgtcctgcgccgactccggcgagccgcccaccacgctggccgagtacacgctcggccgccccggcgccggcggcgacgacttcctcgacctgtcgctcatcgacgggttcaacgtgccggtgagcttccagccggcgaacgg

SEQ ID NO: 417634 - DNA, 497 bp, Oryza sativa
gcaccggcaggggctgagaaggaagtggggcccccttccctgacctcctcatcggagccccctcccctcttcgatggaaccaccaggttgtacgttgcgtaccactgcccttacgcgcagcgcgcgtggattgccaggaactacaagggtttgcaggataagatcaagattgtcgcgattgatcttgcagacaggcctgcttggtacaaggagaaggtttacccagagaacaaggtaccttcacttgagcacaacaatcaggtgaaaggagaaagcttggatttggtcaagtacattgacaccaatttcgaagggccagcattactccctgatgattctgagaagcagcagttcgctgaggagcttcttgcgtacactgatgcgttcaacaaagcatcgtactcatccatagtcgccaagggagatgtgtgcgatgaggctgttgctgctcttgacaaaatagaagcttgtctgtaaagttcaacgatgggccattc

SEQ ID NO: 417635 - DNA, 485 bp, Oryza sativa
gtcaagaagagaagcaagaggagagaggagaatcgctgcctctgccactggaaagcagcagcagcaggggagaggcagcaggcagcagcagaggagaagcaagaagcaagaaagagagagaaagcgttgggacttttcattggatcctccgcttttgggaggagcagcaaaggtctcgtctttcctctcttcttctcttccttgatgccggcgaggaggaagaagaaagaggaggagatgttcccgcctgggctgatccaccaccggccggacggcggcgaggcggggcgtgcggcggggggagggcccagcctggtgctgaccgccgatcccaagccccgcctccggtggacggccgacctccacgagcgcttcgtcgacgccgtcgcccagctcggcggccccgagaaagcaacacctaaaactatcttgaggacaatgggtgtgaaggggctcactcttttccacttgaagagtcatcttca

SEQ ID NO: 417636 - DNA, 456 bp, Oryza sativa
ttcttctcctctaatctcaagtctctgtctcgtcgtcctcgcatctccactcgccatgggcaagattaagatcggaatcaacggtttcggaaggatcgggaggctcgtggccagggtggccctccagagcgaggatgtcgagctcgtcgccgtcaacgaccccttcatcaccaccgactacatgacctacatgttcaagtacgataccgtgcacggccaatggaagcacagcgacatcaagatcaaggactccaagactctgctcttgggcgagaagccggtcaccgttttcggcatcaggaaccctgacgagattccgtgggctgaggctggtgctgagtatgtcgtggagtccaccggtgtcttcactgacaaggagaaggctgctgctcacttgaagggtggtgccaagaaggttgtcatctcagccccgagcaaagatgctccgatgtttgt

SEQ ID NO: 417637 - DNA, 442 bp, Oryza sativa
tttattactctctttctcctgccgataagcttggaaatctcactttggccctcgatatcggtgccaagtattgcaatgtcgaaaagtatctcgaagctgatgatatccacaagttggacgaagtctcgatgattgtgtatctttcggattggtactatggagtcgctcttcttcaaaagcaagacatctccgccaaaagaatcggaaaattggtcctcatgaccgaacttcatgatcaaatgagagcccaatacactgcgggagccaatgccttcatcagctgggtgaatgccaagattgccgagctcaatgtccgagatttcgacaatactctcgctggcgtcaagaaaaaactcgagcaattctacgcttacaaggctggagagaagagcaagcaattgacttccgtcttggacctcgaatccctcttcgacaacttggc

SEQ ID NO: 417638 - DNA, 425 bp, Oryza sativa
aggttcaaatccaacttattcataaagcatactgctgtcccacaggaaactgtttcataaaactaacatatcatacggactcgatggtccattaaaccagacacaagtagacatcagcaccacaaatacttgacgaacagaggctcgggacgaccaggcacatcggcagctccaccaaactggctgattactgaccaccacggaggcggagcaccaggtggagggtggactccttctggatgctgtagtcggcgagggtgcgtccatcctccagctgcttgccagcgaagatcagacgctgctggtctgggggaatcccctccttgtcctggatcttggcctttacattatcaatggtgtcggagctctcaacctccaaagtgatggtcttcccagtcaaggtcttaaccaagatctgcatacca

SEQ ID NO: 417639 - DNA, 479 bp, Oryza sativa
ttcttccccatttgaactccctcctcctccactttcccccccgcatcgagcagcgaagcggcgatggcggaggagcagccgcgcgcggcggcggacggcggcggccagacgctgatggagaagatcgccgacaagctccacatcggtggggacgggtcgtcgtccgactccgacgctgacgagcgcaagcagccgaagccctcggcgccgccggccccggccgaggtcgcaacggagtcgtttgttgattcggctgctgctgccgcggccgaggccaaggccaaggtgttccgcctcttcgggcgcgaggagcccatccacaaggtcctcggtggaggcaaacccgctgatgtgttcctatggaggaacaggaacatctctgccggtgtactaggcggtgccactgcgatctggatccttttgaattgcttggctaccaccttctgactttcgtttgccatgggctcatattctttttg

SEQ ID NO: 417640 - DNA, 447 bp, Oryza sativa
tttttctcctcctctaatctcaagtctctgtctcgtcgtcctcgcatctccactcgccatgggcaagattaagatcggaatcaacggtttcggaaggatcgggaggctcgtggccagggtggccctccagagcgaggatgtcgagctcgtcgccgtcaacgaccccttcatcaccaccgactacatgacctacatgttcaagtacgataccgtgcacggccaatggaagcacagcgacatcaagatcaaggactccaagactctgctcttgggcgagaagccggtcaccgttttcggcatcaggaaccctgacgagattccgtgggctgaggctggtgctgagtatgtcgtggagtccaccggtgtcttcactgacaaggagaaggctgctgctcacttgaagggtggtgccaagaaggttgtcatctcaaccccgagcaaagatgc

SEQ ID NO: 417641 - DNA, 442 bp, Oryza sativa
tggttttttataaattttttgggttttttttttttttttttttttttttttttttttttttttcccacccccaaatccaaacccttggcccttcctatcaaaaaaccaaaatgaaccggttttaaaattcatttcccaactcgacaataatttacccccccatttaacacatttttccccccttctaaaaccccccccttttttttcccgggtaaaattaaaattaacttgaggccaccccgcgtccccggcggcaaaatttttccaggctgggcgtcctcttggcggcccccaaaataaccggaaccaggtttttccccaaggggcccctaaggtgcttgaaaaggttttcaacggggccctcccccgtaacctaggcctggataaaaaaccccacccttgaaaacatggcccccccccccttcttgatccccttcacctt

SEQ ID NO: 417642 - DNA, 480 bp, Oryza sativa
ttgttgacgcgtgggctcactcccaaatcacatgctcaaattcagattcagagtcgtcgaaatcagtagtattcatcaggaatggagcggctgagctcatcggtgcagtcgtgggtggaggaacacaagctcgccagcatcggagggctgtgggcgacggcggtgggcgcatcggtggcgtacgggcggaggaagacgccgcagatgcggctgatccacgccaggcttcacgcgcaggccctcaccctcgccgtcctcggcggcgccgccctcgcgcaccactactacaacccatcatccaagaccaacaacagcagcagcttggactacgacttctactcgcagctgccgccggccaccaccgacgacgggcaggagaacgagaggtggagctggtagtgctacccttccttcctgctgcaagatgcagacaaatgaagatgatgacgatcacgatgatcaattagtaataatctaatc

SEQ ID NO: 417643 - DNA, 489 bp, Oryza sativa
aaactgcacaggctggtccttgttatcaacaacactccaacagtcatgctgatacaggtagcaatgcatagcggatttacagccaaacccagacagtactagcataagcacaacgcatgtgccagaatttattcttgttcatagagcggaaaccgcttctttattacattgcactggcattactacataaggtttgcgctttgcctcctagcacagaacttgggccatctctcatcttcactggagttccttcaggaagtcggcgttatcaaccaaaaccactttccagccatcagggtcaaggaaagaggcaatctttgtgttgagccctggtagtggacctggctgccgcaaaatctttccccctagttcttttgtaaccaactcaacagcctcagcactcttgtagacatcttcagtgccaatagcaacctgagcatatgcgttgcccttggtatattctgtgacaccatagttgtatgtcaactc

SEQ ID NO: 417644 - DNA, 464 bp, Oryza sativa
tttttcagcatgaaggtgggcgtggagatattggacgcgtctgagcttgcgcccaaggacggcgccggcgcctgcaacgcgttcgtagaggtggagttcgacgggcagaagcagcgcaccccgaccaagcccgccgatcgttccccgcaatggaaccacaccctcgtgttcgacgtccgcgacccctcccgcctcccctccctccccgtcgacgtctccgtccaccacgatcgcagcctcaccgaccaccacgccacccgcctgcacaccttcctcggccgcgtccgcatctccgctgtctccctcgccccctccccgcaggacgcccttctacagcgctacccgctcgagaagcgcggtctcttctcccgcgtttccggcgacatcgccctccgactctacctcatcgccaacgactcccctgatccttctcctgctcccgctgtccaccaccaccagcacca

SEQ ID NO: 417645 - DNA, 384 bp, Oryza sativa
atccaagcacagttgcacaccacgcatacataatacaacatcattagtaactgggacaaaatggcaagagacaacacacggtttaaccggtggatcatagcccacattaaggggtttggtaaaagaaatgaaggtcttgcgttgaccgataataatgcatgcgcatgcaggtaagtaacacgagcactggaatttattcgggggcttgttatctaaaacgagcgatgatacggggtccgggggccggcctgcccgagaaaagaaggccccctgcggcggaggcggcggccgccattatttatcaacccgggcccacgtagtggttgcccacataggccattccctgcaggttgggctggctgggcaccacgcggaaggggaaca

SEQ ID NO: 417646 - DNA, 426 bp, Oryza sativa
ttcatgcagcacgcgtaagcaaggcagaggagagggaaagaacctctctgcagtgctgctgctgctagcttgcagaaaaaaaaaactctcatcttttgcaggaagagacatcactgcttctgcattcgtgtgcatttggattaagctttgcttatccctttttagtggagattgttgagtatatcaggtctatatattggcagctctggttggagatagacactcacactgagccaagatggggagtttgcacaagttcagtgttattctcctcatgttatgttctgctacgatggggagcgctcagtatgtcaagtataaggatccgaagcagcccgtctctgttcgtgtcaaggatctgctcggccggatgactctcgctgagaagattggcccgatgacccaaatcgagagggagaatgccac

SEQ ID NO: 417647 - DNA, 444 bp, Oryza sativa
ctaggcgttactccggcacctcccgcctctctctccctcgccatggacgcggcggggaggaggctcgcccgcgtcacggcccacctcctgcccagctccctcccgctcccgctcgcctccgcccctaccctcgcgccttcccccgccgcgtcgccagcgtcggacagctaccgacgggtccacggcgacgtgccgtcggagcccccggagtggcgcgcggcgacggacgagtccgggaagggcttcgtggacatcctctacgacaaggccgtcggcgagggcatcgccaagatcacaataaaccgccctgatagaaggaatgcattccgacccctgaccgtgaaggagcttatgcgtgctttcgaggatgctagagatgatagttcaatcggagtcatcatactaacagggaaggggacccagtccttctgtagcggcggtgac

SEQ ID NO: 417648 - DNA, 393 bp, Oryza sativa
ttcttttccggtgcccggctggcggggcttggcgtcaagtttcaggcgtgcccaaagacggagctcaccttctacctggctcaagcgctagctcggccgccagatggacgcagccaacgcggaggccaagcacgtctactacctgccgatgagggccgacaacagtaacacagagagcgactgtaccaccattgggaagcagcgttgcccgctgtgatgatcttggcgaggggcttaagaaagctggcggtggatggatcaaacctcttggacgatgaagtcacaaaggcagagataacagtgccacgtgcttttagtgacgtgcaaccgacacttacacacgaatctgggcggattgcagcgttgctagatgtacgcattacaaaccaacct

SEQ ID NO: 417649 - DNA, 468 bp, Oryza sativa
tttcactctcccctgcccccgtcgccgtcgccaccgccgccgccatgtccgggaggaagaagacacgggagcccaaggaggagaacgtcaccctcggcccgaccgtgcgcgagggcgagtacgtcttcggcgtcgcccacatcttcgcctccttcaacgacaccttcatccatgtcaccgatctgtccgggagggagacgctcgtccgcatcactggtggcatgaaggttaaagctgatcgcgacgaatcttccccttatgctgctatgcttgcttcacaggatgttgctcaaagatgcaaggagcttggaataactgctttgcatatcaagctccgtgctactggtggtaacaagacaaaaacccctggtcctggtgctcagtccgcacttagagcacttgctcgatctggcatgaagattggtcgtattgaggatgttactccagtgccgactgatagcacacgca

SEQ ID NO: 417650 - DNA, 475 bp, Oryza sativa
agcccctcttggaaccaggacacgaagtgaaacacaatgcagtaggtttcttagaggcttggaagatacctggagttgcgccctttgctctgtgcctcttcttgtacaaattggttgcttacaccttcttgtattggctaccgttctacatcagtcatacacctattggcggtgagtacctctcagatgctttggctggcagcctatcaacaatctttgatgttggaggcgtgttgggtggagtccttgctggtcacatcttggatcgcttaaatgcacgagcggttacagctgccagcttcatgtactgcgcgatacctgccctctttctataccgcacatacggcagcatgtcgataatgtggaacatttgcctcatgttcatcaccgggatgttcgtcaatggtccttatgccctaattacaactgcagtgtcagctgaccttggcactcacagctcattgaatggaaattc

SEQ ID NO: 417651 - DNA, 497 bp, Oryza sativa
tttggttttacaatggaaatgggaccacttaaggcatatataattaaaaaaccagatcagcaaaatttgtgtgcctcggtgtacaatacagatcaacagcttacaaaatctggcatgcaaatctaagctctcaccacgctatgaaaaatatcccctttgcaactgtaagctaggaaagaatatgaccacaacaggggaagaatttgggagccattcactgtccatttgttgtttattcaagccgtttctttgaatatacggggaagcacttcgtggatgctaatgtccaggagctcaggactcctgcataatactcgtcccttttcagttgtgctagggacaaaccatatcttccgcagaattggtgactcaaattgcacaaagaaaccatcactctggtcaagcttccattttcttgatccctgtcctttccagacctgagggtacgagatggcgctcttaggtgctactatacaagcagcctttgagaaagactc

SEQ ID NO: 417652 - DNA, 497 bp, Oryza sativa
tgtttttgataatttaagggcttaatagtaatagactctttgatggagtattacaacatgcagcagtggcattaatacgccagtacattaattaagttacacatatgcaggctccattttggtttcttttaatttatcgtattacagaatttctgtagccttgcagatgatcacttggatatcatgtactagtaattaacaataggatgcatacaaaagatggcccaacgacaacagaagatgcgtgcatctgacattgtctggccttatttgttggtagtactccaattaattaacaagagatgatgcattcttgtgccttagtttcttcacatgcttggctttacgttgagcctattcgcaatctttacccccaacgactcatcacactgggagaggtagttgacccaaatggcgcggagctaaggggagaccttggggtgcgcgagctcgccggcgaagcggcggatgaaaccttcctgtctatccggcgccca

SEQ ID NO: 417653 - DNA, 481 bp, Oryza sativa
ttgttaaatgcaagttaagttagtgcactgaaggagagcctgagatacgtcgtcgtacacacttgattaattaatggcgtggaggaacagcgggcgggtgaaggtgctgaacaggaggagcagcaggatggcagtcatggcagccgccgtgctggccgtgtgcagctttgcggcggtgaccatggcccagctggagatggacttctacagcaagacgtgcccgaacgtcgaggagatcgtccggcgggagatggaggagatcctccgggtggcgccgacgctcgccggcccgctcctccgcctccatttccacgactgcttcgtcagggggtgcgacgcgtcggtgctgatcgactcgacggccggcaacgtggcggagaaggacgccaagcccaacctcactctccgcggcttcggggcggtgtagcgggtcaaggacaagctcaacgccgcctgcccggccaccgtctcctgcgccgac

SEQ ID NO: 417654 - DNA, 487 bp, Oryza sativa
tggtttttttaatttttttggttttttttttttttttttttttttttttttttttttttttttttttgggacaagggggggcataaaatcaacatttgggggggttttattttacaaaacacccccatgcaaggggccattaaccaccaacccagttttcctaatttaagggggaaaaaaaaaaagggggacctttcctttttccaaaccctcccaggttggttggcatcacaaaactaaacagggggggggaacccacaccaacgcattgatcccgtttgaattgcccccgaaaaagcttaaattaaaaggatgaggaaaaggggtcaaaaaagggggggtggaacgggtccctaagggggggggccccaatggtggggggccccttgccgggggggggggcctgcacgggaaaacccaggaaggggaccctggcgaggggggcctgcttaaactccggcagggggagccgcttttttttttttcg

SEQ ID NO: 417655 - DNA, 437 bp, Oryza sativa
atctagtagcctacaatttctaataggcactgacaagcaccgttaaaactcggtgttatgctgtagtacaaataacacaaattcatcgattctcatacagaataccaattccataattagttcaggcttcctggtttctgttcataatcatatataccaaccagtgagaatctgggggaaacaatgaaaagcatagttttaaaagtggaataattcagaaggtaagatatgtctgccaaatgatacatacaagtgtagaaagcattctaaacaagaaactttacaagatttcagcccgtgagttctaagatgttctccactgcaattccaactggatgcggccatttttcgagtcaattagatgatatttctcattgatcctcttattgtttataacatctgcaagacttatgacaacatagccaagattttccttg

SEQ ID NO: 417656 - DNA, 477 bp, Oryza sativa
tcttttactcctactttgaatacctgctcttgctcttcgcctcgctcgtctccaagaagctcgagagccgagggcttctccgtctcttcgttcatctgctgctgtgtctcccctggtgaggtacgacaagatgttggaacattcggagagtgcaacagaaaaaattatgagcagcatcatggataccattgctgagaaccttcctaagcagaaatctgggaaatttgacgtaggcgctgcctctgacaaaatgaaggagaagctgtttggtcgtcagaagaccattcatcgagttctgggtggtggaaagcctgctgatgtgtcgctatggaggaacaagaagatatcctccagtgtcctggctcttgcaacagcaatttgggtattctttgagtggctcgactaccactttctaacaattgtttcatttgcccttgtccttggaatggttgtccagttcgtgtggtccaatttctc

SEQ ID NO: 417657 - DNA, 291 bp, Oryza sativa
tttttattcagtcatcattcgatgaactggagaagatcacaacacctggtgatgacatgaatggggatatgtctagcttgtctacgctattcgctcataggaaaacggggcactttatgaagggtgatgctgtcattgttatcaaaggtgatccgcaaactagggagggttgggttgagaaagtaaaggctgagactgctcacatcacaacacaaagacgtgatctaccgaaaacgttagccttcaatgagaaagagatttgtaagtataccaaacccggagatcatgtta

SEQ ID NO: 417658 - DNA, 436 bp, Oryza sativa
  unsure (1)..(436): unsure at all n locations
ttggtttttatttcctcatggtttttattcattcctcccagagagacggatccatggaagttttcttgccctcatcaggcaagcagagcacacacacacggtggcagtggaattgctatgaacaagacgctaatcaacatccagagctaaaacaaacaaggggatcaaagcaaatcccgaaaaaaaaaacacaggggaaagtccacatcttcttctcgtccccaacgcctccgtgtcaccaccacgtcttgcggattttttttaccctgttctattcgctcaggcgtccacgatctcgccgtcgtccttcgacgccaggatcagctccgggtgcgccgccgccgccgncgnctttttgatcgtgccgtcgatggcgttcggccggccgagcgccttcagcgccaggtgcgccgccttctggccggagatcatcatg

SEQ ID NO: 417659 - DNA, 389 bp, Oryza sativa
gatcaggagcacgcaaggcgcgcggccatggcgtcggagaccgagacgttcgccttccaggccgagatcaaccagctgctgtccctcatcatcaacaccttctactccaacaaggagatcttcctccgcgagctcatctccaactcctccgatgcattggataagattaggttcgagagcctcacggacaagagcaagctcgatgcgcagccggagctgttcatccacattgtccccgacaaggctagcaacaccctgtcgatcatcgacagtggtgtcggcatgaccaagtcggacctcgtcaacaacctcggtaccatcgccaggtcggggaccaaggagttcatggaggcgctcgctgctggtgctgatgtgtccatgattgggca

SEQ ID NO: 417660 - DNA, 489 bp, Oryza sativa
ttgggttttttttttttggggggacagtttgcatacaacagcattgcaacccaaatccttttatccgaagaacacaacgacgacagcaaccagccgagtgcagaggcaaaagaggagctcacatcctgctcttcttgacggggccgagctccttggccttggtcctcagctcgtgcttcttgatcttccccgtcgccgtcttgggcagcggcccgaacaccaccgacttgggcacccagtaccccggcatcctctccctgcagaaccgcatgatgtcgccggccaccgccgcctcgtcggagctgtcggcgccttccttgagcgtcacgaacgcgcacggcgactccccccactgctcgtccgcccttgccaccaccgacgcctccagcaccgccgggtgcgcgtacagcaccttctccacctccaggctgctgatgttctccccgccggagatgatgatgtccttcatccggtccttcacctcgatgt

SEQ ID NO: 417661 - DNA, 475 bp, Oryza sativa
ttatcacttctttctccggatcccctctcctctcctagcttcttcctctatctgtacattcgcaatatcccatcccatcggatcggattggatccacacaaaaatccccatcactgccggccgggccccaaacccaacgatccctccccgattccaatttcttccttcctgcaaatttaaaggatttctttcttcctttccttttcactgctcttttatttttttgagtgagttaacccccactgttgttattctaatggacgcagattctattttctttgtcttttaggagctccaatggacgccaatcctcctaccaccgccatgtatcctctccaccgctgcaaaaccatctacctggtcaggcatgcccagggtgttcacaatgtggaaggcgagaaggatcacagcgcctacatgtcgccccaactctttgacgcccaccttactccattgggctggaaccaagttgact

SEQ ID NO: 417662 - DNA, 492 bp, Oryza sativa
ttgggttttttttttttttggggttttcaacaaagtagttctactaacttaattatcaacagatgaacagcaaggtaccacttactactccttaatacataacaagcattccggcagctaagatcttacagtagactatatagagtcatccactaataacttacacaacagaatggatagcaaactggcgattctttgcctactatcttgctcactcctagcagttgataccacatttttgggtatcagggcctgtgacacggggggggaatggatcgatacgaacccacaggaaggagaagatcgatgcaaggaggatggcccaaacaacaacaatggtcggggtacggttctgccgacccatgagacccttaaggaaggggtacaggtggacaatcacccagaaggcaaagaagagcttcccaaagagcggaccccatgactggtagccactgttgatagcgtaggagataccagcaacaacaccgacca

SEQ ID NO: 417663 - DNA, 491 bp, Oryza sativa
ctcctccggctcttcttcagtatcgaatcctctcttctcctcgtgcccaccaccaccaccgtagcaatggcgggcaacgggccgatcaacaaggaggacccgctcaactggggcgcggcggcggccgagatggccggcagccacctcgacgaggtgaagcgcatggtggcgcagttccgcgagccgctggtcaagatccagggcgccaccctccgcgtcggccaggtggccgccgtcgcccaggccaaggacgccgccggcgtcgccgtcgagctcgacgaggaggcccgcccccgcgtcaaggccagcagcgagtggatcctcaactgcatcgcccacggcggcgacatctacggcgtcaccaccggcttcggcggcacctcccaccgccgcaccaaggacggccccgccctccaagtcgagctcctcaggcatctcaacgccggaatcttcggcactggctccgatggccacacgctgccgtcggagac

SEQ ID NO: 417664 - DNA, 480 bp, Oryza sativa
ttgtctcaagaagatggcaggtgctgtgcgcaccggggggaagggtagcgtgcgcagaaagaagaaggcagtccataagactacaaccacagatgacaaaagacttcagagcactctgaaaagagtaggagtaaacaccatccctggcattgaagaggttaacattttcaaggatgatgtggttattcagtttctgaatcctaaagtgcaagcttcaattggtgctaatacatgggttgtcagtggaactccacaaacaaagaagctgcaggatctgctgccatcaattatcaaccaacttggtcctgacaacttggataatctgcggaggcttgcagagcaattccaaaagcaggctcctggtgcttctggtgaagaggctggtgccagtgctggagctgctcagggtgacgatgatgatgttcctgagcttgtacctggtgagacatttgaggaggcagcagaagagaaaaaggaatc

SEQ ID NO: 417665 - DNA, 418 bp, Oryza sativa
ttggttttttttttgttgggccactgcacacggtgcagtgtcagttgtagcattcacaacataccgagtttctttttaggaggtaaaactctacgagtctcacagcatagtaaaacgtagccagctattactagatacgagtagcattttttaagtcgcaaacaaaagggatacagtcccggcttaaggggtgtaaaatcagcttcactatcttcatgttcgccgcaacgggaaacagagcacaatcatctttgggtccaaaaatttacggcaaacctttgcgacgacgttgatttgtgaaccaatgacgagtttcctagatgacatactctgcttactgttgcgcgcactgaactctctgggcacctccaggcatcttatcgtcctcatcatacgccttctgagcagcttgggcttt

SEQ ID NO: 417666 - DNA, 421 bp, Oryza sativa
tgtctaagtcgcgtcgcaccgaagcagagtagagaaggagaggagcggagcgccatcagccgtccgatcgagtgatccgatggctctcgctctctccacctctgctgctgctgccgctgccgccgcggcgcgggcgctcgcggcgagggtgacgacgacgaggggttacgccgcgtctgcggcgtcgtcggcgatgaggcgggcggcggcggcggtggaagggaagggcgctgcggggatgacgcaggcgaaggacgggtcgtcgtcctcggcggcgagggaggtgtcgtgggtgcccgaccccgtgacgggccactaccggccctccaacttcgccggcggcgccgacgccgccgacctccgcgccggccaccttgcccgcagctacacccgcgcgtgatgcgcgcgacctcgccgtcgt

SEQ ID NO: 417667 - DNA, 455 bp, Oryza sativa
ttggtttttaacttttttgggtttttttaagctagaaatcttctcgatcgatcacacacacacacacaattaagggacatacatacatgcactggtgcaactgcaactgcagggtcggtgcgtggctactacaagtgtacacatggtacgttggttggcaccatctcgatcgtgtcgttgggctcacttgccggggacaaaattggtggcgtatgcccaggccttgttggcgacggggtcggggacgcggccaaagaggttcttgatggggcccttgtcggcgaccatggcctggacgaataagcccaacatggagaacatggcgaggcggacgttcttgaactccttcaccttgagctcggcgaaggtgtcagggttcgctgccaggccgagcgggtcgaaggcgccgcctgggtacaccttgtcgaggccctcgccgagcgggccgccaccca

SEQ ID NO: 417668 - DNA, 456 bp, Oryza sativa
gcattctgcaggacctcatcctgtggcagaacgagctggagggcgagataccggcgtccctgtcgcgcattcagggcctcgagcatctcatcctcgactacaacgggctcacgggtagcatcccgccggagctagccaagtgcaccaagctgaactggatttctttggcgagcaaccggctgtccgggccaatcccttcatggcttgggaagctcagctacttggctatcttgaagctcagcaacaattccttctcggggcctataccgccagagctcggtgactgccagagcttggtgtggctggacctgaatagcaatcagctgaatggatcaatacccaaagagctggccaaacagtctgggaagatgaatgttggcctcatagttggacggccttacgtttatcttcgcaacgacgagctgagcagcgagtgccgtggcaaggggagcttgc

SEQ ID NO: 417669 - DNA, 477 bp, Oryza sativa
tttttcaccaaccccgtctccttcctccattcctccgccgctagaaccttctagaagctctcctcctcctcccatggcggcgacgatcgtgtccgtcaaggcgcgccagatcttcgacagcaggggcaaccccaccgtcgaggtcgatgtgtgctgctcagatggaacctttgcaagggctgcagttcccagtggtgcatcaactggtgtctatgaagctctcgaattgagggacggtggatctgattacttgggaaagggtgtttccaaggctgtcgacaatgtgaactcggttattgccccagctctgattggcaaggaccctacgtcacaggctgagcttgataacttcatggttcagcagcttgatggaaccaaaaatgagtgggggtggtgcaagcagaagcttggtgctaatgcaatcctggctgtgtcactggccatttgcaaagctggagctatcatcaagaagattcc

SEQ ID NO: 417670 - DNA, 486 bp, Oryza sativa
tttggtttatatgtatcgggcgatgtcctctccgcttgtcgaaatgcaaataacatcatcgggggatatgatcatcagttcacgagaacagaggaagaaacaaaagctaaaaattaaaaccatcaacagcccgatcgagtttgcattactagatacacacattgcagccttccttccctctctccatgtatcgatatatcaacccggccacgcacaaaacatttgttcattccctactcgagctgcgcgtaccacaccccttggatcttgacatccttgggcaccttggcgccgaggtctgtgtccgacggctgcacgctctcgaagacgccaatcacctcgccggtctctggcttgctcttggtgacgctcaacgtgatgttgcccgtcgacgacgaggcgttcttgacgttctccttagcgagctcctcctcgtctcctctgcctccggcggggagcgccacagcgttgtcgtagcccgtagag

SEQ ID NO: 417671 - DNA, 475 bp, Oryza sativa
ttcacatcctctccttcctcttcctctgctcactcagctctcccccgcgcgcgccaccgtcgtcgccatgtcgggcaacatcgccttcggccgcttcgatgactccttcagcgcggcctccctcaaggcctacgtcgccgagttcatctccaccctcgtcttcgtcttcgccggcgtcggctccgccatcgcctacaccaagttgaccggcggcgcgccgcttgacccggccgggctggtcgccgtggcggtgtgccacgggttcgggctgttcgtggcggtggccatcggcgccaacatctccggcggccacgtcaacccggccgtcaccttcggcctcgccctcggcggccagatcaccatcctcaccggcgtcttctactggatcgcccagctcctcggcgccatcgtcggcgccgtcctcgtccagttctgcaccggcgtggcgacaccgacgcacgggcttgccggcgtg

SEQ ID NO: 417672 - DNA, 448 bp, Oryza sativa
ttgtctcccccaaatctactttgcgtactctcgattcctgagcaaccatgtcggcctactgcggcaagtacaaggacgagctcatcaagaacgctgcctacattggcactcctggcaagggtatccttgctgcaaatgagtccactggcaccattggcaagcgctttgccagcatcaatgtcgagaacgttgaggagaaccgccgttctctccgcgagctgctcttcaccacccctggtgccctccagcacctaagtggtgtgatcctcttcgaggagaccctgtaccagaagaccaaggacggaaagcccttcctcgatgtcctcaaggagggcggtagactccctggcatcaaggttgacaagggtaccgttgaggctgccggcaccaacaaagagaccaccacccatggccacgatgatctaggcaagcgttgcgccaagtacta

SEQ ID NO: 417673 - DNA, 460 bp, Oryza sativa
aaacataaaagggaacaaacgcgcatattataagtgacgaagcggtctcacataaaacagggcacacaggttacaacaacgagggttgtaagcccattaagccccaaacatcagatcaccacaagcaaatgtctcgaagacacacgcacacggcaacaggataactccacactggcagatcatgggatagcagcagttatcaatcaggccttgacacacagaacatcaagcccccagacgacgacgactcctctagtactcgtcaccatcatcgccatcctcattctcgtcggactcagcgccaacctcctcgtagtccttctccaacgcggcgagatcctcacgggcctcagagaactcaccctcctccatgccctcacccacgtaccagtggacgaaggcgcgcttggagtacatgaggtcgaacttgtggtcgatgcgggagaacaccttcacgacg

SEQ ID NO: 417674 - DNA, 446 bp, Oryza sativa
tggtcacatatccacacacctcgacacgacggcgacggcgacggcgacgatgactgcgggccagcctctccgggacgatccccagccacgccggcacagcccgccggcgctccacccggccgtcgtgccggcgtacccgcccccggagtcggacgccgacgagtcgtgggtctggtcccagatcaaggccgaggcgcgccgcgacgccgacgccgagccggcgctcgcgtcgttcctctacgccaccgtgctctcccacccctccctcgaccgctcgctcgccttccacctcgccaacaagctctgctcctccacgctgctctccacgctcctctacgacctcttcgtcgcctccctcgccgcgcaccccaccctccgcgccgccgtcgtcgccgacctcctcgccgcgcgctccagggaccccggctgcgtcggcttctcccact

SEQ ID NO: 417675 - DNA, 480 bp, Oryza sativa
tcgttaagaggaagacgacggcgaggtggacgagccaggtgagggtgagcgcggcgcgcggcgcggaggggccagccgacgacgggcacagctggaggaagtacgggcagaaggacatcctgggcgccaagcacccgcgcggctactaccgctgcacccaccgcaacacgcagggatgcaccgccaccaagcaggtccagcgcaccgacgacgacgcctccctcttcgacgtcgtctaccacggcgagcacacctgccgcccgggcgccgccagcgccgccgccgccaagaggccgcacgcgcagacgctgctgcagagcctcagcgccagcctcaccgtgaacacggacaccaacacgccgctgacgccggagaaccgcgcgccggcgccgccgctgcagcagcagcagcagcagcagagcgtgtccggcgtcgcccgtggcgtcggactcgtacggcctgggcggcgccgggtacggg

SEQ ID NO: 417676 - DNA, 475 bp, Oryza sativa
ttcggcccggtgctctactgcctcgaggtcgccctgtaccaacgcggcggcggcggagacggcggtggcgacgacatggacaagagggtgggggagatgatgcggcagctcaagtacgtgcggggcctggagttcgcggcgggggtcgggtacgtggacttcctctcgcgcgtgaaccgggtggaggacgaggcccgccgcaacgggagctgggccgcgccgcacccgtggctcaacctcttcatctcctcacgcgacatcgccgtcttcgaccgcgccgtcctcaacggcatgctcgccgacggcgtctacgggcccatgctcatctaccccatgctcaagtccaagtgggacccggccacgtcagtggcgctgccgaatggcgagatcttctacctggtggcgctgctccgattctgccggccctaccccggtggtggcccgtcggtggacgagctggtggcgcataacaacg

SEQ ID NO: 417677 - DNA, 437 bp, Oryza sativa
tttttctactccacctccgcctccgcctctctcagatccgtcgccgccgtcgccatgggccagtgcccctccgccccccgttaccaccaccatcgccacccacccagaaaccctcctcctccctccccaccccccgccgaccatgcgccgacgcagccgctgtccactcccgacgacgatgcccccgcggcggaggaccacaccgctgacctccccgacgacctcctcgccgtcgtcttcggcctcctcggctccgccgaccgcaagcgctgctccctcgtctgccgccgctggctctccgtcgacgccgtctcgcgcctccgcctcgccctcgacgcgcgggcgccggtccacgccgccctcccggggatccttgcccgcttccccgccgtcttcaagctcgccctcaagtgcgaccgccgcgcttagagcgtctc

SEQ ID NO: 417678 - DNA, 489 bp, Oryza sativa
tttgttttttttagggatgggggcaaaagtagattatattaattaagcctggcacgcatgaggagatggcacacgagaacaaaattgagatcaccatgatgatagatgatccatccaagctagctagggatccatccaacattgatcgacacacgcacacactgacaacgacgacgacggttttatttaggcgtcagagcaaaaggcaaggcctgcctacatataagctgggtactaatgcaagcaaattaaggcctcgatcaaagctctgatcgacagtagcagcatccatacgataaatcctcatgcagccgggcgacgaccactatagattcagttgcaggagcagcaggagcagccgctgcagctggtgccacacttgcaggtgttgcagccgcagccgccgttctcgccgctctccaccgccatcttcattcctccagagctcgccttgttggatggagcaacgaggaccaaggtcttggtggt

SEQ ID NO: 417679 - DNA, 478 bp, Oryza sativa
ttatatatcgaaattgaaaagaactgtcttttctgtatactttccccgttctattgctaccgcgggtcttatgcaatcgatcggatcatatagatatcccttcaacacaacataggtcatcgaaaggatctcggacgactcaccaaagcacgaaagccagttagaaaatggattcctatttgaagagtgcctaaccgcatggataagctcacattaacccgtcaattttggatccaattcgggatttttcttgggaagtttcgggaagaaattggaatggaataatatagattcatacagaggaaaaggttctctattgatgcaaacgctgtacctagaggatagggatagaggaagagggaaaaatcgaaatgaaataaataaagaataaagcaaaaaaaaaataagtcgaagatagaagagcccagattccaaatgaagaaatggaaactcgaaaaggatccttctgattctcaaa

SEQ ID NO: 417680 - DNA, 458 bp, Oryza sativa
tttatcgccttccccatgttgtgatgggtgatagatcaggcaatattagatggtgggatgttacaacaggcctttcttcttcttttagcactcacagggaaggcatcaggaggattaaattttctcctgttgttcatggtgatcgaagtagagggcgcattgctgtgctgttctatgataatacattctcgatatttgacctggatagtgcagatcccttggcaaatgctcttcttcagccgcaatcacctggtacgcttgtcttggagcttgattggttgtcaacccgaacaaagaaggatgaaccgcttgtgttatgcatcgctggagctgatagtagtttccggctgattgaggttaacatcgatcctagggccagttctactttgaggccagtaactacaagagagaggtttaggccaatgccattgtgtctgccaatactatttccaacagca

SEQ ID NO: 417681 - DNA, 314 bp, Oryza sativa
tgtactcctttcttccttcgaggaggaggagctatatatagacggggatggttcatctagcctcctcaccggttttgatttgatctgtgtgatttgagtgagtgagtgagattctttggaggagggattttggtttggtttggtttggtggtttgtgcgggattttgtggggaggagagctatgactcacctctagtccgcgatctttatgaccaaaactgttttacattgtttacgtcttcatcacttcgggggcttcatataactgttttcatttgtccttcttcttttctttctcctatgaaatctttcat

SEQ ID NO: 417682 - DNA, 377 bp, Oryza sativa
tggttttgagcaaattggggacatatttaggttcaaatccaacttattcataaagcatactgctgtcccacaggaaactgtttcataaaactaacatatcatacggactcgatggtccattaaaccagacacaagtagacatcagcaccacaaatacttgacgaacagaggctcgggatgaccaggcacatcggcagctccaccaaactggctgattactgaccaccacggaggcggagcaccaggtggagggtggactccttctggatgttgtagtcggcgagggtgcgtccatcctccagctgcttgccagcgaagatcagacccctgttggctgggggaatccccttcttggcctggatcttggcctttacatt

SEQ ID NO: 417683 - DNA, 489 bp, Oryza sativa
cgagatctcgcatggtttgggagccagcaaattcacccgcgattccgcgcgccgccgccgtcgccgccgccgacgtcgccgcctgggtgggggaggagatggccggcctcgggaaggccttctacgcggtagggttctggatccgggagaccggccaggccctcgaccgcctcggctgccgcctccaggggaactactacttccacgagcagctctcaaggcatcgcacacttatgaacatctttgacaaaacccctcatgttcacagagatgcatttgttgccccaagtgcatctctcattggtgatattcaagttggacaaggagcttcaatttggtatggatgcgtcttaagaggggatgcaaacaacgttcaaattggatctgggaccaatatacaagacaattctcttgtccatgtggcaaaatctaatcttagtggaaaagtctttccaaccatcattggggataacgtcacagtaggtcata

SEQ ID NO: 417684 - DNA, 476 bp, Oryza sativa
tttttgagatcaaaattttcccgacaatgacaacgagcgattcgtcgaaatccttcgcagcggtggcggccaacgccagtgccaaaggtggagccggttcaggtcaaatgggcgatgccggtttcaagactcgtcaacgacctgatgccattcgcaattcgaacatcgttgctgcgaaagccgttgccgatgccgttcgaacaagtttgggaccgcgtggaatggacaagatgattcaaacgggaaacggcgatgtgacgatcaccaacgacggcgccactattctcaaacaaatgtcggtcattcatccggcatcgaagatgttggtcgaattatccaaagctcaagatatcgaagccggtgacggaacaacgaccgtcgtcgtgctggccggtagtttgctcgatgctgcgagtcgcctcgttgccaaaggtctccatccgacaaccattgtcgacgcctttgaaaaagccgcc

SEQ ID NO: 417685 - DNA, 471 bp, Oryza sativa
ttgttctcctcctctaatctcaagtctctgtctcgtcgtcctcgcatctccactcgccatgggcaagattaagatcggaatcaacggtttcggaaggatcgggaggctcgcggccagggtggccctccagagcgaggatgtcgagctcgtcgccgtcaacgaccccttcatcaccaccgactacatgacctacatgttcaagtacgataccgtgcacggccaatggaagcacagcgacatcaagatcaaggactccaagactctgctcttgggcgagaagccggtcaccgttttcggcatcaggaaccctgacgagattccgtgggctgaggctggtgctgagtatgtcgtggagtccaccggtgtcttcactgacaaggagaaggctgctgctcacttgaagggtggtgccaagaaggttgtcatctcagccccgagcaaagatgctccgatgtttgtctgcggtgtcaa

SEQ ID NO: 417686 - DNA, 438 bp, Oryza sativa
ttgtgtttttttatgatccggggacttcaattaacatacacacagaatgcattaccgcacatgatcaatcttaatctcctcatcctacatgtcatgtctcatctactgtaacccccatatactatctcagagtacatttttttcacttgtgatgactgtcgccgtcctcgagcggcaggtcgggcatgaccttcttccagaaccagtgcttcctccataggagcaccatctcctcgatgggcacgcccttggtctccggcaggaagacgtcgacgaagaccgccatcacggggatccacccggccaagaacaggaagatgcccaacttgagccctcataccaacgacaggaactccttgccgatgaccaaggtgaagaacaggttcaccgccaccgtgatgctttgccccgccgacctcgtctccagcgggaagatct

SEQ ID NO: 417687 - DNA, 469 bp, Oryza sativa
gtgtttgcttagcttagcttagctttgctgctgctccttctcattcataagccagcagctagctagcaagcagcacacacatatatcacaggccatctctctatccctaattaagctatatactccatatagctagctaaacacaggaggagtggaggaaggagaggctagctgatctagctatctgcagtgattagttaaaatgatggcttctgataggttggatgcagaaaggatcatagagtacttcaagggcaagagcatcctcatcactggagcaactggctttcttggcaagattcttgtggagaagatactgagggtgcagcctgatgtcaagaagatctacctgctcgttcgcgccatcgaccaagcatctgcaaaccaacgcgtccaatctgaggtgacggagacggagctgttcagcgtggtgaaggaaaagcacggcaagggattctcgcgattcatc

SEQ ID NO: 417688 - DNA, 425 bp, Oryza sativa
tttgggtttttttttttttggggtttaagacacaaggttgtaagtaacattagatgaatgaagatgtacatttttcatgtttttggacagatatgcttagattctgccttttacggatacatccatgctattttgcaagccatgtaactgatttataattaatgcagcctttccggtggttccatgacgatcatcgcattactcgttatcatcatcagccaggtcgaactgcttgagcagcgcgccgtaaatgggcagtgggatgtccttgaggtagccgagtgggttggctaagcgcaggttgtcacagatgccgacatttctggtgagcaaaacacgggcacgatcccttttggcctcgatttcagagcaatttgcaagggggctgtggaccaggacaaccttgcagatgtcctcctcatggc

SEQ ID NO: 417689 - DNA, 471 bp, Oryza sativa
ttcatagtcagctcggaatatcatgctcatggagctcaagaagcttattgaggcaaacccactgtttcgggacaagctgaatttcccaccatttaaagtttcaagactccgcacattaatcaatcaaagtcttaactggcaacatcagctatgcaagaatcccagaccaaaccctgacatcaagacactgtttaccgatcattcttgtgccgctcctaccaatggagcaagagctcctccccctgctaatgggcctcttgttggaccaatccctaagtcagctgcatttcctccaatgggtgctcatgcgccatttcaacctgtggtgtcaccatctccaaatgcaattgcgggttggatgacaaatgcgaacccctctttgccacatgctgcagtcgcacaaggaccacctggtcttgttcaacctccaaacacagcggcatttctaaaacatccaaggactccaacaag

SEQ ID NO: 417690 - DNA, 468 bp, Oryza sativa
ttgggtttttttaataagggggggatccaacttattcataaagcatactgctgtcccacaggaaactgtttcttaaaactaacatatcatacggactcgatcggtccattaaaccagacacaagtagacatcaacaccacaaatacttgacgaacagaggctcgggatgaccaggcacatcgggagctccaccaaactggctgattactgaccaccacggaggccgagcacctagtggagggtggactccttctggatgttgcagtcgggcagggtccctccatcctccatttgcttgccagccaagatcaaacgctcctggtatgggggaatcccctccttgttctggatcttggacttcacattatcaatggtgttggagctcttaacctccaaagtgatggtcttcccagtcaaggggttcacgaagatctgaataccaccactgagacgaatcacccgtgggag

SEQ ID NO: 417691 - DNA, 473 bp, Oryza sativa
tttttacaaacccctctcactcccagatacctgctgctgccactagcccactaccatggatccttgcaagttccggccgtcgagctcgttcgacacgaagacgacgacgacgaacgcgggagctccggtgtggaacgacaacgaggcgctgacagtggggcccagggggccgatcctcctcgaggactaccacctgatcgagaaggtggcgcacttcgcccgggagcgcattccggagcgcgtggtccacgcccgcggcgcctacgccaagggcttctttgagtgcacccacgacgtcaccgacatcacctgcgccgacttcctccggtccccgggcgcccagacccccgtcattgtccgctttttcaccgtcatccacgagcgcggtagtccggagacgaaccgcgacccgcgcgggtttgccgtcaagttctacacccgcgagggcaactgtgacctccttggcaacaact

SEQ ID NO: 417692 - DNA, 422 bp, Oryza sativa
tggtttttttatgcacgggagaaatttatacaggtgcattgcccatgtacacaggaaaacacgacaaaagacctaaaattccagtgcgtcgttgaacccggcgtcgtaggcggcgtcagcctccatgtcgccgaccatttccccgagcatcatcccgccgaccgcgccgccgaggagcccgagtccgaggcccatgcccattcgtccacctttcctcgccgccggctgttgtgccgccgcgtagctgtacgtcgccggcggcggtgggccggcgttgtacgcgtacgggggctgacccgcgtaaccgtactggctgttgatgcggggggtcccttcctccgtacggcgcgccgtacggcacgaccggcgggtgcgctaccacggcgttcgacggcggcgggtaggcggtgaccggcgacgac

SEQ ID NO: 417693 - DNA, 451 bp, Oryza sativa
  unsure (1)..(451): unsure at all n locations
ttcttattgagtagaccctatgcatttggttgtgttctaaggttgagaacatcttcagattttgaacctggcaattcttatggccatttcttccctgatcctcaatatgaacatgtgcaacatatcatctgctgcgattcatttgctacttatgcatatgactttaacttttcacaccctgagggcttttccaggcacacagatcctgctgttgtacaaattgcatttcagtatagtgttattgaacctgtcaagcatacatcagagaatgaaacacaatcatctacaagtaacatgttttgtctaaagaggcggttgagaataaggacattgcagtatcgaccagctaaaaatatcaacgaaatatatgacagtgttgatccagagactctnctacatattctagtacataaggttattttaatttcattggataaggagttaaagaggg

SEQ ID NO: 417694 - DNA, 444 bp, Oryza sativa
tttcgtgtccggcaagagcggggagaagaaggggagggagtcgccggagtccaaggcggtgataggcaaggccggggacgggaaccggatcgtgttcttcgagggcccggcattggcgttcgatttggaggacctgctccgcgcttccgccgaggttcttgggaagggcgcgttcggcacggcgtaccgggcggtgctggaggacgccaccacggtggtggtgaagaggctcaaggaggtgagcgccgggcgccgcgacttcgagcagcagatggagctcgtcggccggattcggcatgccaatgtggcggagctccgggcatactactactccaaggacgagaagctgcttgtctacgatttctatagccggggaagcgtatccaacatgctttacggaaagagaggggaggacagaccacctttgaactgggaaaccagggt

SEQ ID NO: 417695 - DNA, 461 bp, Oryza sativa
tgtaacccaagaggttatactgttcttcacattgctgcgaggcgaagagagcctaaaatcattgtctcccttttaaccaagggggctcggccagcagatgttacattcgatgggagaaaagcggttcaaatctcaaaaagactaacaaaacaaggggattactttggggttaccgaagaaggaaaaccttctccaaaagataggttatgtattgaaatactggagcaagctgaaagaagggacccacaactcggagaagcatcagtttctcttgcaatggcaggtgagagtctacgaggaaggttgctgtatcttgaaaaccgagttgctttggcgaggattatgtttccgatggaagcaagagtagcaatggatattgctcaagtggatggaactttggaatttaacctgggttcttgtgcaaatccaccttcttgaagacaacggacaactgttgatct

SEQ ID NO: 417696 - DNA, 405 bp, Oryza sativa
tgttcctccggctcttcttcagtatcgaatcctctcttctcctcgtgcccaccaccaccaccgtagcaatggcgggcaacgggccgatcaacaaggaggacccgctcaactggggcgcggcggcggccgagatggccggcagccacctcgacgaggtgaagcgcatggtggcgcagttccgcgagccgctggtcaagatccagggcgccaccctccgcgtcggccaggtggccgccgtcgcccaggccaaggacgccgccggcgtcgccgtcgagctcgacgaggaggcccgcccccgcgtcaaggccagcagcgagtggatcctcaactgcatcgcccacggcggcgacatctacggcgttaccaccggcttcggcggcacctaccaccgccgcaccaaggacg

SEQ ID NO: 417697 - DNA, 461 bp, Oryza sativa
tcgtttgatgcaatctcagctggaaagtactactattttgtccgtctgatgggtagaaaagcatctcacgtggcctttgaatgtgcacttcaatcacacccaaacatgcttatcttagcggaggaggtagcactatcaaaactcacactgatggaagttattaacaagatatgtgatggagtacaagcaagggcagaattagggaaattccatggtgtgctccttattccagaaggactaatagaaagcattccagaaatgtatgctctgcttcaggaaatcaatatcctccacaacaacaatgttcctgtggcagagatgccatcacaactgtctccttgggcagctgcgctgttccagttcttgccacccttcatcagaagagagctgctgctccatcaagaatcagacaactctgcccagctgtcccagattgatactgagcaattgttggcccactt

SEQ ID NO: 417698 - DNA, 380 bp, Oryza sativa; identical to SEQ ID NO: 394026

SEQ ID NO: 417699 - DNA, 414 bp, Oryza sativa
tatatttgtcagctcggaatatcatgctcatggagctcattatgcttattgaggcaaacccactgtttcgggacaagctgaatttcccaccatttaaagtttcaagactccgcacattaatcaatcaaagctcttaactggcaacatcagctatgcaagaatcccagaccaaaccctgacattaagacactgtttaccgatcattcttgtgccgctcctaccaatggagcaagagctcctccccctgctaatgggcctcttgttggaccaatccctaagtcagctgcatttccttcaatgggtgctcatgcgccatttaaacctgtggtgtcaccatatccaaatgcaattgcgggttggatgacaaatgcaaacccctctatttcacatgctgcagtcgaacaaggaccacct

SEQ ID NO: 417700 - DNA, 424 bp, Oryza sativa
catcagtgaccaagaaccctggtgatgaggtcttctctggctcgacctgcaagcagggtgagattgaggccgtggtcattgccactggagtgcacaccttcttcggcaaggcggcgcattttgtctacagtaccaaccaagttggtcacttccagacggtgctcactgcgatcgggaacttctgtatctgctcgattgcggttggtatcgcgatcgagatcatcgttaagttcccgatccagcaccgtgcctaccgcagtggcattgagaacctgttggtcctcttgatcggtggtatcccaattgccatgcctaccgtgctcttggtcaccatggccattggttcccacaagttgtcccaacaaggtgctatcaccaagaggaagactgccatctatgatatggctgtcatggatgttctgtg

SEQ ID NO: 417701 - DNA, 488 bp, Oryza sativa
ttttgtttttttatttttgggggaagaacagaactgatgatgtttcagctagtaatcggtgttcccgacagaaactacaagctcttttttcagtgcccctgaaaaaactagtactactcagcctacaagaactactccccactcaccaatctctctctctctcgctctctctcacctcccctctaatacttagcagctagcttagccttaataatgtaccgcagacttgtcgatatccgtccagcgctcacttgcaatttgtaaggaatgaagccatgtgcattcctgatcatcaatctctttatttttcatattcgcgagactccaccagcacataaactggtttgccattgagcttgtagaaatccttaaattttgggagcccaatgagacacgcgcactcaacaacgtcagctccagcgcgttcaagaagccttatagcagcacaaagtgtcccaccagttgcaaccagatcatcaacgatcagc

SEQ ID NO: 417702 - DNA, 392 bp, Oryza sativa
ttactatatcgccctgtggaagttcgagaccaccaagtactactgcacggtcatcgatgcccctggtcaccgtgacttcatcaagaacatgatcacgggtacctcccaggctgactgtgccgtgctcatcattgactccaccactggtggttttgaggctggtatctccaaggatggccagacccgtgagcacgctcttcttgctttcactcttggagtgaagcagatgatctgctgctgcaacaagatggatgccaccactcccaagtactccaaggcccgttacgatgaaatcgtgaaggaagtctcatcctacctgaagaaggtcggctacaaccctgacaagattcccttcgttcccatctttggggttgagggtgacaacatgattg

SEQ ID NO: 417703 - DNA, 456 bp, Oryza sativa
tttctaccacggcttgagctcagcagcctggagggtcaccggagtagcgaaaatccagagagcagagatgagaaaaccgaagaggaggtagacgactgcccgatcgaggaggtgcggctgacggtgccgatcaccgacgacccggcattgccggcgctgacgttcaggacatggctgctggggctcatctcctgcgcgatgctggccttctccaaccagttcttcggctaccggcagaatccgctctacatctcgtcgctgtccgtgcagatcgtcgtcttgccgctgggcaagctgatggctgcttgcctccccaagaaggtgttcagggtgaagggcacggcatggtcgttctcgctcaacccggggccgttcaacctcaaggagcatgtgcttatcaccatctttgccaacaccggatccaacttcgtttacgccgtcgggattataaccatt

SEQ ID NO: 417704 - DNA, 364 bp, Oryza sativa
gtgttttttaatttgggggggataacgacgaatcttgtattagttgctgatgtttgcaacttaaaaactagaactctttactagtaataatgttaataatgaacattacataactgaaaaaaacatgaagcgcatgcatcagatcacctaaacttattctatttaagcagcaactgggatctcagctgtaagaggctttgaaaactcatcctcatccttaggggcatggatggtaacaagatccggtaaaggagtcattggtccttgcttgcccttcggatcccaatcaagcataaccttgaccttaatacccaccacaccttgtctcagaagaacatgtctaacagcagagtcaatatacaag

SEQ ID NO: 417705 - DNA, 437 bp, Oryza sativa
aaggcgaaatctgatcaaacattgattactcaagatcgatcacatcaagagtacacttctacaagttcactagacggccacaattctgatcatagacacgaattgcataatcgaatcaatttgcagtccttttatttccatcacatagttcatagccagctctgatgccatccaagcggcagccaagaactgaacatgatgatcaatggatggcaacttcaacttcagtctgcgtgtctttcattctcagggctttagcatgtccctgaaccagtaggccgaccccttgggggggcgcttgagcgtgttgaagtcgacgtaaaccaagccaaacttggacgtgtaacctgacagccccttcaagttgtccaggagagaccaggcgaagtagccagccacattggcgcccttgtcgatggccttcttcagctggggga

SEQ ID NO: 417706 - DNA, 467 bp, Oryza sativa
ttttcttccctgctcaagaagctcaaagactgcgtcgtcactgaagatcatgccaacgatgccctcaccactaggtctgcctccattaagcataggtctcctatcatcccagacgagtttaggtgccccatatccctcgagctcatgcaggaccctgtcattgtgtccagcggccagacatatgagcgatcctgcatccaaaagtggcttgattctggccacaagacctgccctaagacgcagcagccactctcgcatacttctctcaccccaaactttgtcctcaaaagcctcatctcacaatggtgcgaagctaatggtattgagcttcccaagaacaaacagaattcccgtgataagaaggcggcaaaaagttccgactatgaccaatgctggtctagtctcgctgatgaacaggctcaggagtgggaaccaagatgaggcagcggcagcttgcaggtgagata

SEQ ID NO: 417707 - DNA, 260 bp, Oryza sativa
atggtacctaaaatgaacggttttgtggttgggggtgattttgtaacccgattacaagttgatggaccttgggtgtacttttcctaggctaactaactaggcttgtgtagggacaaggctttggcccaaaaaaaaaaggaataagttcaccggaggtcccttaacttaacagcgagattattttgagatccctcaactataaaactagaaatgttcacccctaaactcactcaaaccgttcactggaggtcccataaatg

SEQ ID NO: 417708 - DNA, 479 bp, Oryza sativa
cttgtttcaaccaacaacagcacatcaacatggcaatgctgctgaagaaggccgctgtggcccctgccaggaccagcgtgcgcagcaaggctgccatcgagtggtacgggcccgaccgccccaagttcctgggcccattgagcgagggtgacacccccgtctacctgaccggcgagttgcccggtgactatggctgggacactgctggactgaccgctgacccccagaccttcgtcaagtaccgggagatcgaggtgatccacgcccgctgggccatgctcggcgctctgggctgcgtgacccccgagctgctggccaagaacggcgtgcccttcggtgaggccgtgtggttcaaggccggtgcccagatcttcaggacggtggcctgaactacctgggtaacgagaacctggtacacgcccagtccatcctggcaaccctggccatccacgtgctgctgatgggtgctgctgagagct

SEQ ID NO: 417709 - DNA, 491 bp, Oryza sativa
  unsure (1)..(491): unsure at all n locations
ggtttctcctccccctcccggttcggttcggttcggttcgggtccggttcgatttcggtttttccttcggttcgggggttggtgggaaagcatggcggcgccggatgttgagtaccgctgcttcgtcggcggcctcgcctgggccaccgacgaccgctccctcgaagccgtcttctccacctacggcgagatcctcgagtccaagatcatcaacgatcgggagacggggaggtcgcgcgggttcgggttcgtgacgttctcgagcgagcaggccatgcgcgacgccatcgaggggatgaacggcaaggagctcgacggccgcaacatcaccgtcaacgaggcccagtcgcgccgctccggaggcggaggcggcggtggctacggccagcgcggcggaagcggaggctacngtggcggcggctacagtggtggtggcggcggcggtggctaccgccagcgccgtgaaggcggctacngcggtggcggtggct

SEQ ID NO: 417710 - DNA, 563 bp, Oryza sativa
ggctgacgcagaggacattcagccccttgtctgtgacaatggaaccggaatggtcaaggctgggtttgctggagatgatgctccccgtgctgttttcccgagtattgttggccgtccgcgacatacaggcgttatggttgggatgggacaaaaagatgcttatgtcggtgatgaggcccaatccaagaggggtatcctaaccttgaaataccccattgagcatggaattgtaagcaactgggatgacatggagaaaatttggcaccacacattctacaatgagcttcgtgtagcaccagaagagcatccaattcttcttacggaggctccacttaaccctaaggccaacagggagaagatgacacaaattatgtttgagacattcagcgttccagccatgtatgtcgctattcaagccgtgctttccctctatgctagtggacgtactactggtattgtcttggattctggagatggtgtcagtcacacagtcccaatctacgaaggttatgcccttgcgcatgccattctccgtcttgatcttgctggtagggatctgactg

SEQ ID NO: 417711 - DNA, 552 bp, Oryza sativa
tattgacaaagcaagcatgtacagtagccatggcgaagcatctcgcgctgtccgtggccgtcgcggtggccgtgtcgtggctggcggcgtcgtcggcggcggcggcggggttctacgagaagttcgacgtggtgggcgccggcgaccacgtgagggtggtgagcgacgacgggaagacgcatcaggtggcgctgacgctggaccggagctccgggtccgggttcacctccaaggacacctacctgttcggcgagttcagcgtccagatgaagctcgtcggcggcaactccgccggcaccgtcaccttcttctacctcttctccggcgagggctacggccacgacgagatcgacatcgagttcatgggcatcctcagcggcaacccctacgtcatgaacaccaacgtctgggctaatggcgactgcaagaaggagcaccagttctacctctggttcgaccccaccgtcgacttccacacctacaagatcatctggaatccccaaacatcatattccaggtggacgatgtgccggtgaggacgttcaagagttc

SEQ ID NO: 417712 - DNA, 525 bp, Oryza sativa
ttcacacgcattgcagaggagaggcgacaatggaggggaaggaggaggacgtgcggctgggggcgaacaggtactcggagaggcagccgatagggacggcggcgcagggcgccggggacgacaaggactacaaggagccgccgccggcgccgctgttcgagccaggggagctcaagtcgtggtctttctaccgggccgggatcgccgagttcgtcgccaccttcctcttgctctacatcaccatcctcaccgtcatgggggtctccaagtcctcctccaagtgcgccaccgtcggcatccagggcatcgcctggtccttcggaggcatgatcttagcgctcgtctactgcaccgtcggcatctccggaggacacatcaacccagcagttacttttgggctgttcttggccaggaagctgtccatgacccgggccatcttctacatagtgatgcaatgcctaagggccatctgcggagctggagttgtgaagggctttcagcagggtctgtacatgggcaatggcg

SEQ ID NO: 417713 - DNA, 390 bp, Oryza sativa
cgaccttctcgatgcttcccaaatcctcctcctcgtgaactcgtcgccttcgtcttcgtctcgatctccatggcggactcgagcgcggcccgccccaccgtcctcgtcaccggcgccggcggccgcacaggaaacattgtctacaacaagctcaaggaaaggtctgaccagtttgttgtgagaggtttagtgagaacagaggaaagcaaacaaaagattggtggaggcaatgatgtttacattgccgacataagggacagagatcatcttgtgcctgctgttcaaggtgtcgatgcgctcataatcctcacgagtgctgtgccaaagatgaaacctggttttgaccctagaaaagtgggaggcctgagttttactatgaagatggaatgt

SEQ ID NO: 417714 - DNA, 574 bp, Oryza sativa
gcggtggcggtgaagcggcggcggcggtggcgcagaagaacggggggtggttcgggttcatctccgaggccttggaggtcgtgctcaaagtgctgaaggatggcctgtcagctgttcatgtgccgtactcttatggattcgccatcattcttctcactgttattgtgaaggctgcaacattacctttaacgaaacagcaggtcgaatcaactctggctatgcagaatttacagccacagatcaaagcaattcaacagagatacgcaggaaatcaggaaaggatacagcttgagactgctcggttatacaagcaagctggagtcaaccctctggcaggatgttttccaactttggcaacaatacctgtctggattggcctctaccaagccctttcaaatgtagcaaacgagggattactgacagaaggatttttctggattccatctttgggaggccctacaacaattgctgctcggcaagtggtgctggcatatcttggctcttgccctttgtggatggccatcctacattaggctggcatgacacgatatgttatcttgtgtgcctgtgctac

SEQ ID NO: 417715 - DNA, 449 bp, Oryza sativa
gtataagttagatcagaggagagctcagagctcaaagagttgggaagccatggcgggagggcagctcaacgtgctgagcacgctcgaccaggcgaagacgcaatggtaccacttcatggcgatcgtcatcgccggcatgggcttcttcaccgacgcctacgacctcttctgcatttccctcgtcaccaagctgctcggccgcatctactacaccgacgattccaaggacacccccggcgcgctcccgcccaacgtgtcggccgccgtcaccggcgtcgcgctctgcggcacgctcgccggccagcttttcttcggatggctcggcgacaagctcggacgcaagagcgtgtatggtttcacgctgattctgatggtcgtgtgctcggtcgcgtacgggctctcgttcgggagctcggacagggcgtcgtgtctacgctctgcttctttcg

SEQ ID NO: 417716 - DNA, 339 bp, Oryza sativa
gttttggtgagaacacaggagcgctcactgattaaagagctgggaagccatggcgcgtgggacactcaacgtgctaagctcgctctaccagtcacatacgcagcggatccactaaatgtgaaacggtatatacagcttgggctcctttacagtcgcctactagcttttgtgcatttacatggtgaccaagctgataggtcacagttactactacgaccatgctatggacacccgcggagcgctgccgctcaacgtgttgtgcgatatcaccagagtgtggctctggaatacgctccccggccaggtgacattcagatggatcggccacaagctcggacg

SEQ ID NO: 417717 - DNA, 490 bp, Oryza sativa
ctttccgccgcgagtcgcgaccatttcttgcgagtagtagtagaggggagagtgagtgaggggcgtgctgcaatggcgactgaggaggttgtccctgaggttccggtgaccgaggtggaggctgccgcggcggaggaggccgtcgaggagacgacggcggtggaggagaaggccgccaagccggcgaaggagaagaagaaggccggcaggccgccgaaggagaagaaggaggccaagccggcgaaggagaagaaggtgaaggaggccaaggccaagaagccccgcgtcgccgccgcccacccgccgtacgccgagatgatcatggaggcgatcgtggcgctgaaggagaggactggatcgagctcccaggccatcggcaagcacatccatgccaaccatggcgccaacctgccgcccaacttccgcaggctcctctccggcaacctcaagaagctcaccgcctgccgccaagctggccaaggtcaagaac

SEQ ID NO: 417718 - DNA, 604 bp, Oryza sativa
gcagctatggttacccagctcacctacctagctgcatcagcaggagtgtgcttggcttcagctctagccatcgccttgctgtccatcgccctctacatcatcggcgtcgtcgcctccttcgccgtcctctgcgccaaggagttcgccgagagagcccacgaccggccgccgctcgtcggaacagttttccggcagctcaagaacttcgacagaatgttcgatgaacatgtcaactatgcaaccgcgcatcgcaccagcaggattgtgtatcccggtcactgcgaggtctttacttctgatccggccgtcgttgagcatgtcctcaagaacagcttcagtaaatacagcaagggggacttcctcactacagccatgaaggatctctttggagatggaatttttgcaacagatggggatatgtggcgtcatcagaggaagctagcgagctacgaattctcaaccaaagtgttacgtgacttcagcagtgacacattcagaaggaatgctgcaaaactggcagagaagatctcatgtgcagcagctaacagaattagcataaatattcaggatcttttgatgagagcaactatggactcaatcttta

SEQ ID NO: 417719 - DNA, 543 bp, Oryza sativa
ctcgctttctcaggcaggacgcccttgcttggctttcgtgagggcttgaacctgtgtgcgggctgctgctgctagcttgcagaaaaaaaaaactctcatcttttgcaggaagagacatcactgtttctgcattcgtgtgcatttggattaagctttgcttatccctttttagtggagattgttgagtatatcaggtctatatattggcagctctggttggagatagacactcacactgagccaagatggggagtttgcacaagttcagtgttattctcctcatgttatgttttgctacgttggggagcgctcagtatgtcaagtataaggatccgaagcagcccgtctctgttcgtgtcaaggatctgctcggccggatgactctcgctgagaagattggccagatgacccaaatcgagagggagaatgccacggcggagcagattgccaagtacttcataggtagtgtactgagtggtggaggcagtgtgcctgctcttaagcatcagctcaggcttgggctcaatggtgaatgaaatgcaa

SEQ ID NO: 417720 - DNA, 519 bp, Oryza sativa
ctaactactccatttagctaagacccgtagtgtatagtagtcaagatcaatggcgtcccgacgccttgccccgctgctggtcctactgctctcgtccagcctcgccgccggccagagcaccggcgacaccgtcgtgttctggggccggaacacggaccagctcgaggggtccctccgtgaggcgtgcgacaccggcctctacaccaccgtcatcatctccttcctcagcgccttcggctacatcccgggcacctacaagctggacatctccggccacaccgtctccgccgtcggccccgacatcaagcactgccagtccaggggcatcctcgtcctcctcgccatcggcggccagggcggcgagtactccctgccgacctcccaggcggccgtcgacctcgaggactacctctggaacgccttcctcggcggcggacgccccggcgtcgcccgccccttcggcgacgtcgtcgtcgacggcatcgacttcttcatcgaccagggcgccacggagcacta

SEQ ID NO: 417721 - DNA, 476 bp, Oryza sativa
  unsure (1)..(476): unsure at all n locations
atccaatcctccccccactatcggacagcgagatggtcatggagatcccgagctcgaagcgcgacatggcgcggggagcggaggacgacggcgaggaggaggaggaggaggagtacgaccgcgtgttctacgaggacatcgaggcgcccaagttcgtcgacctcaccgcccccgacgccgcccgcccctccgacgacccctcctggttctgcctccgcatcggttgtgaccagaaccacgagcatgtcgacccggaggcgctgcacaggagcttcttcatgcgggtcatggcagcgaggagccccaacgtgcggctgcagaaggcgatcaggaggaggaaccagagctcgatgctgaaatgcccgcactccgcgccgccgaagcctccaaggtcacggatcgcgaggctaagcacggcgacngaggccgcggcgaagcccaggctgaagacccaccggatttgcaccctgcgggcg

SEQ ID NO: 417722 - DNA, 517 bp, Oryza sativa
cttaagtactcccaggtcaacaaggccaaaagggccagtgagtggctagcttaattagctaagctcatagtcatagcaatggctggagccgtgctggtgaggagaatggtggtggtggttgccattgccgccttggtggcgcccggcgaggtggcggcgcagctgacgccgacgtactacgacggcagctgcccgagcctgcagtccatcgtgaggtcggccatggcggccgccgtgcagcaagagccccgcatgggcgcctccatcctccgcctcttcttccacgactgcttcgtcaatgggtgcgacgcgtcggtgctgctggacgactcgtcgacgatcaccggcgagaagaacgccgggccgaacgccaactcgctgcgcggattcgaggtcatcgactccatcaagtcgcaggtcgaggccgtctgccccggcaccgtctcctgcgccgacatcctcgccgtcgccggccgcgacggcgtcaacctgttgggtgggccgacctgggcggtgc

SEQ ID NO: 417723 - DNA, 593 bp, Oryza sativa
cttctacacctcattttccgcttgcatcttgctcattcagatctcttctgctttgagcaatggccaacctcaccgacctcgttaacctcaacctcagcgactgcagcgacaagatcatcgccgagtacatctggttggcaaacctcctctgcttttgatctgttcttgatttcttatattcgtctgcactagcaagtctcctgctgcactggtgcgttcttcaaggatgcaagatcgcgtttttttgtgcgaaattaatctccatttccctacctatgatcgtcgtggatcgtgaaaattgatgattgttcgcttcctgaattctaccactgatcaaacttttctaccaagtttctttgatacaacaacctgaatgatcttcctcgtctcaaaacgtcatcttttttatttctgttcagggttggaggatcgggcatagacctcaggagcaaagcgaggactgtgaaaggccccatcaccgatgtgagccagctgccgaagtggaactactacggctccagcaccgggcaggctcctcgcgaggacagcgaagtgatcctctacccttaagccattttcaaggacccgttcag

SEQ ID NO: 417724 - DNA, 596 bp, Oryza sativa
cttcttccagaacttcgtgctcaagaacggcgaccagccggagtacatccacccgtactcggtccgctccgccgccgccgcgctcaccctgtgctacccggcgcggaaccactccccgtcgttcgtcatccagacgttcgtcgaggacctgaccgtctccgcggcgtccgacgccgcggcggccgcggcggggcagaggcaccgggtcgccgcgttcgacgacctctcagtcaccctcgacgtctcgccgtcgctcagggcgttcctcgtcaggggctgcccctttgtcaccgtcgccaccgccgacgccgcgggccccgtcgacatctccgtcgcgtccgtccacgccttcatcgaggtggcctcctgcgacgacgcgctcaccaagtggcggctccggatgaacagcggccagaccttcctcctctacgcgttcgcgccgatccgcctcgcgcagtccagcgtcacgcagctgtcggccctcggcttctccggcgtcattcgggtcgtctacctgccggacccgtccatggaggctgttcttgatcaagacagccggtgctttccaaccgccgcgaggccctcgtgaaccgccc

SEQ ID NO: 417725 - DNA, 405 bp, Oryza sativa
tttttcttccagaacttcgtgctcaagaacggtgaccagccggagtacattcacccgcactccgaccgctccgccgccgccgtgctcaccctgtgctacccggcgcggaaccactccccgtcgttcgtcatccagacgttcgacgaggacctgaccgtctccgcggtgtccgacgccgaggcggccgcggcggggcagaggcaccgggtcgccgagttcgacgacctttcagtcaccctcgacgtctcgccgtcgctcagggcgttccttgtcaggggctgcccctttgtcaccgtcgccaccgccgacgccgggggccccgtcgacatcttcgtcgcggtcgtccacgcctttatagaggtgggcttctgcgacgacgcgctaaccaagtggcggcttcggatg

SEQ ID NO: 417726 - DNA, 238 bp, Oryza sativa
tttgtcatggcgatgcaggccgccttcgccgcctcgatgttcccgcagctggcgcggtgggcgggaagcgatcgctcggtggttgtggcaccgccagcgccggtgccggcgaggttggggatgaggagcggtggggcggcggctgcggaggcgagaggggtgaggtgcatggcgagcctgatcgagccccacggggggaggctggtggagctggtggtgccggaggagggagggcggt

SEQ ID NO: 417727 - DNA, 494 bp, Oryza sativa
gtcttcactcacacgcattgcagaggagaggcgacaatggaggggaaggaggaggacgtgcggctgggggcgaacaggtactcggagaggcagccgatagggacggcggcgcagggcgccggggacgacaaggactacaaggagccgccgccggcgccgctgttcgagccaggggagctcaagtcgtggtctttctaccgggccgggatcgccgagttcgtcgccaccttcctcttcctctacatcaccatcctcaccgtcatgggggtctccaagtcctcctccaagtgcgccaccgtcggcatccagggcatcgcctggtccttcggaggcatgatcttcgcgctcgtctactgcaccgtcggcatcttcggaggacacatcaacccagcagttacttttgggctgttcttgcccaggaagctgtccctgaccccggccatcttctacatagtgatgcaatgcctaggggccatctgcggagctggagttgt

SEQ ID NO: 417728 - DNA, 453 bp, Oryza sativa
ggctcttcttcagtatcgaatcctctcttctcctcgtgcccaccaccaccaccgtagcaatggcgggcaacgggccgatcaacaaggaggacccgctcaactggggcgcggcggcggccgagatggccggcagccacctcgacgaggtgaagcgcatggtggcgcagttccgcgagccgctggtcaagatccagggcgccaccctccgcgtcggccaggtggccgccgtcgcccaggccaaggacgccgccggcgtcgccgtcgagctcgacgaggaggcccgcccccgcgtcaaggccagcagcgagtggatcctcaactgcatcgcccacggcggcgacatctacggcgtcaccaccggcttcggcggcacctaccaccgtcgtaccaaggacggtcccgccctccaagtcgagctcctcaagcatctcaacgccggaatcttcggcactg

SEQ ID NO: 417729 - DNA, 571 bp, Oryza sativa
gcttgcgctactgcttggtctcactgtgtgaacaactgctgccgccgcctgccggcggtgtgctccggccgcgcgcggtcgtgatggctgcacggcgagcgaactgcgcgctggtgctggtgctggcgctcgcgctgttggcggcgcgggatgctggtgccgcggcggtgcccaagcccaactggctgggcgggctgagccgcgccgcgttccccaagcggttcgtgttcgggacggccacgtccgcgtaccaggtcgagggcatggcggcgtccggcggccgcgggccgtccatctgggacgccttcgcgcacaccccgggaaatgttgcaggaaatcagaatggagatgttgcgacagatcaatatcatcgctataaggaagatgttaatctcatgaaaagtttgaattttgatgcctaccggttttcaatctcatggtccaggatctttccagatggtgagggacgagttaaccaagaaggcgtagcatattacaacaattttataaactaccttctgcagaaggtatcactccttatgtcaatctttaacaactacgatctcctctt

SEQ ID NO: 417730 - DNA, 561 bp, Oryza sativa
gtgtcgccgcctccgccgccgccgccgcggctccccctcctccccacagccaagatgaatgttgacaagctcaagaagatggcaggtgctgtgcgcaccggggggaagggtagcgtgcgcagaaagaagaaggcagtccataagactacaaccacagatgacaaaagacttcagagcactctgaaaagagtaggagtaaacaccatccctggcattgaagaggttaacattttcaaggatgatgtggttattcagtttctgaatcctaaagtgcaagcttcaattggtgctaatacatgggttgtcagtggaactccacaaacaaagaagctgcaggatctgctgccatcaattatcaaccaacttggtcctgacaacttggataatctgcggaggcttgcagagcaattccaaaagcaggctcctggtgcttttggtgaagaggctggtgccagtgctggagctgctcagggtgacgatgatgatgttcctgagcttgtccctggtgagacatttgaggaggcagccagagagaaaaagggatcatgattttgttgcatg

SEQ ID NO: 417731 - DNA, 460 bp, Oryza sativa
ccaagaccaccaccttcatcttggttggcttcgttcactccgcctacctacctacctctgcagttggtttgctgaaccctcctcaagaacccacgcctctcctctcgcggcggcagctaaccgagccatggcgcgcaagaagatccgggagtacgactccaagcgcctcctcaaggagcacctcaagcgcctcgccggtatcgacctccagatcctctccgcccaggttacacaatcgacggacttcacagagctggtaaaccagcagccatggctgtcaaccatgaagttggtcgtgaagcccgacatgctgttcgggaagcgtggcaagagcggacttgtggccctcaacctagatattgctcaagtcaaggagtttgtgaaggagaggctgggaagtcaggtccagatgggtggctgcaaggctccaatcaccaccttcattgtagagccatttgta

SEQ ID NO: 417732 - DNA, 413 bp, Oryza sativa
ttgtttaaacaggaagaaactttgctgctgggatgagtggaggcattgcttatgtttatgatattgatgggaaattcagcgtccgctgtaaccatgagttagctgatctctatcatgtggaggaagaggaagacattaccacattgaaaatgatgattgaacaacatcgacttaacactgggagtgttgttgctagagatatactctctaattttgatactcttcttccaaaatttgtcaaggtattcccaagagaatctaagagggttttggacaatatgaaggctgaaaaggctgctgctaagcttgcaaaggaaccaaagatttcaaatggtgtttctgtaaccacttagaaagtgcaaccggagcaattaacaaaccgaccaacacgtgttttcaatgccaaaaagtac

SEQ ID NO: 417733 - DNA, 574 bp, Oryza sativa
gtcatatctggggtgacgctgcggtacatgatggagttcggggcgcgccccacggagaggaacctgctgcggtcggcgcagttcctgcgcagggagctccccatccgcatcgcccgccgcgcgctcgacctcgactccctccccttcggcctctccaccaagcccgccatcctcaaggtgagagattggtatttggactcattccgcgacttacggtgcttcccggaggtgaggaaccgggatgatgagcttgcattcaccgagatgatcaagatgattcgagtgcggcacaacaatgtggtgcccaccatggcgttgggtgtgcggcagctgaagaaagacctgggtggcacaaaggcctttccccctggcattgatgagatccatcagttcctcgaccgcttctacatgtcaaggattgggatccgcatgctgatagggcagcatgttgctttgcatgagcctgatccagaacctgggtgtattggactcataagcaaaagattattccccatgctggtggctcaacatgctactgaagatgcacgtgctttttgcatgagggaatatggat

SEQ ID NO: 417734 - DNA, 581 bp, Oryza sativa
ctcttgaccactctagcagtagtagtttggctacttgtctataggcgaagcaagaggaggagaagatcgcgtgaaggttccagtacttcagctaccgcgttagttccaccgctatggaaagtgttcaccagtgaagaacttagatcaatcacaaagaacttcagtgagggcaaccggcttcctgggaatgcaaagactggtggaacctatagcggaattttgccagatggatccagagtagcaatcaagaggctgaagagatcaagcctacaaaggaaaaaagatttctactctgagattgggagagttgcaaagctgtatcatcctaatttagttgcagtaaaaggatgttgttacgatcatggtgaccgctttattgtttatgagtttgttgccaatgggccgttggatgtttggctacatcatgtccctagaggagggcggtgccttgattggccaatgaggatgagagttgctacaactcttgcacaagggatcgcatttttgcatgacaagggtgaagccccaggtcgtgcaccgtgatatccgtgcaagcaacgtgcttctttgaccaggaattt

SEQ ID NO: 417735 - DNA, 429 bp, Oryza sativa
tgccgtttgtcgagcctgagatccttgtcgatggctctcatgacattgagcgctgtgcctatatcaccgagaaggtcctcgctgcctgctacaaggccctcaacgaacaccatgtcctcctggagggttccctcctgaagcccaacatggtcaccccaggatctgaatccaagaaggtttcccctcagctcatcgccgagtacaccgtccgcgccctccagaggactgtccctgctgccgtgcctgccattgtcttcctctctggtggacaaagcgaggaggaggcgaccgtgaacctcaacgccatgaacaagctcagcaccaagaagccgtgggctctgtccttctccttcggccgtgctctccagcagagcacgctcaaggcctggggcggcaagacggagaacgtggtgaaggcgcaaaaagcct

SEQ ID NO: 417736 - DNA, 487 bp, Oryza sativa
  unsure (1)..(487): unsure at all n locations
ttgtggtagcaacaatctctgctgtgcaacaccggaatcttgttaaattgcatgggtgctgcattgatagtaaaacacccttgttagtttatgagtaccttgaaaatggaagcctggatcgagcaatatttggacatagtatcttaaaactagattgggcaatgcgatttgatatcattttaggcatagcaagaggcctaacatatcttcatgaggagtcaagtgtccgcattgtgcatagggacatcaaagccagcaatgtcctacttgacactgacctcaccccaaagatctctgactttggacttgccaaactatatgatgagaagaaaactcatgtgagcacaagaattgcgggcacaatgggctacctagctcctgagtatgcaatgagaggtcatttgtcagagaaggccgatgtttttgcatttggagtacttatgttggagactngtgctggtcgatcgaatacaaacaacttccttga

SEQ ID NO: 417737 - DNA, 451 bp, Oryza sativa
tttgttgtagccgttggccatgaagcaatcacgaagggaggaagtggacgacgatgtgagcgttggtaagaaggaggaagaagcaggatactgcaggagcagcagcatctcacgcctcccagaggcatgcctggctcatgcaatctccttcaccactcccacggacgcctgccgctgctccgccgtctccgccgacttccaagcagcggcgagctccaacgctcgtgtgggagcgctttctgccgccggactaccactccattctcgctcgagccgacgatcctgtggatttcaccactttcaacaaggagctcttcctcagcctcgcccaggaccacgttcttctagaccaacgcagcatgagtttctggttggaaagaacaagcggagcttaaagcctattggtatcatccagatcattagagaaagcatggggggatgatgcccggtt

SEQ ID NO: 417738 - DNA, 510 bp, Oryza sativa
atcgatttcgattcgcttcgtttcgttctcgctgttgatttgttcgtgagatttgaattctagcaatggctcctctcggtgacggagcggcggcggcggcggcggcggagcccaacctggtggtgtcgttcggggagatgctgatcgacttcgtccccgacgtcgccggcgtctcgctggccgagtccggcggcttcgtcaaggctcccggcggcgcccccgccaacgtcgcctgcgccatctccaagctcggtggctcctccgccttcgtcggcaagtttggtgatgatgagttcgggcacatgctggtggacatcctgaagaagaacggggtgaacgcggaggggtgcctgttcgacgagcacgcgcgcacggcgctggcgttcgtgaccttgaaaagcaacggcgagcgcgagttcatgttctaccggaacccgagcgccgacatgctcctgacggaggcggagctcaacctggacctgatccggcgcgccaagatcttccactacg

SEQ ID NO: 417739 - DNA, 516 bp, Oryza sativa
  unsure (1)..(516): unsure at all n locations
ggaacatttgcctcatgttcatcaccgggatgttcgtcaatggtccttatgccctaatcacaactgcagtgtcagctgaccttggcactcacagctcattgaatggaaattcccgggcattggctactgtgacagccatcattgacgggaccgggtctgttggcgccgccattgggccattgctgacaggctacatctcgtcgagtagttggagcgctgtgttcacgatgcttatggcagcagctctccttgctgggctcctcttgacacaacttgtgtgcagtgaactaaaaggaaaggcgacctccaatgcgagcaaggatgtcgccgatgctcaaggtacctactcagatgaggtgtaagactgtaagtaagatctagtcgcaccccaagacacgatacatggattagattctcgtagctccaaagcactgcttggcaagaagttgcattttattgcttnctgcacatgtcttgatcacctctggtttgaggctgaaataaccaaagagatgt

SEQ ID NO: 417740 - DNA, 507 bp, Oryza sativa
cagtgtcgcggcgctcctcctcctcctccggctccgatccccatggcgttcatgcgttcccactccaatgcattctccggtatgggggttgctcctgacatcagggacacattccttgagcttcagatgaagaaagcatttcgctatgttatcttcaaaatcgaggaaaagcaaaagcaagttgttgtggagaagaccggggcaacaactgagagttatgatgatttcctggcatctctcccagaaaatgactgcagatatgccctctatgattttgactttgttactggggagaatgtgcaaaagagcaagattttcttcatcgcctggtctccatcaacatcccggatccgtgctaagatgctgtactccacctccaaggatcgcatcaagcaagaacttgatggattccactacgagatccaggcaaccgacccaactgaggtagaccttgaggtcctctcggagcgggcttattaaagccctggccctgatgaacgatcacct

SEQ ID NO: 417741 - DNA, 387 bp, Oryza sativa
ctgatttctaatcaaacacaaaaacaccacaaaaagcagtcacctccatcagcatcacacctggtacctcgttgggctatttacgcattgactgttgctggagtccttttcattgcagcagtagctactgccatatatgtattcttctcccgtagaaagaaggataatactgtcatgccatgggctacagggctgagtggacagctaaagaaggcatttgtaacaggtgtgccttctcttgagaggacagagctggaggcggcatgcgagggttttatcaatgtgatcggcactttacctgaatgcacattgtataagggaactctgtcaagtggagttgaaatagctgttctgtgcacttcacttaactctgcacaacaatggtct

SEQ ID NO: 417742 - DNA, 506 bp, Oryza sativa
gtcgcgcttagcgtaactagacgaacgtactagcagaagaagaagaagaaaatgccggtgagccggatcgcggtgggcgcccccggcgagctgtcccacccggacacggccaaggccgccgtcgccgagttcatctctatgctcatcttcgtcttcgccggatcgggatccggcatggccttcagcaagctgacggacggcggcggcacgacgccgtcggggctgatcgccgcctccctggcgcacgcgctggccctgttcgtggcggtggcggtgggagccaacatcttcggcgggcacgtgaacccggcggtgacattcggcgcgttcgtgggggggaacatcagcctggtgaaggcggtggtgtactgggtggcgcagctgctggggtcggtggtggcgtgcctgctgctcaagatcgcgacgggcggcgccgccgtgggtgccttcttgctgtcggcgggcgtgggcgcctggaacgcggtggtgttcgagatcgtcatgac

SEQ ID NO: 417743 - DNA, 573 bp, Oryza sativa
ctcgccttcctttccccaactaaaccctaactcctcgccgccgcctccgcctccgcctcctcgtcggagcagcgagccgctgctccttctcctccaccaccagccatggcgacccagatcagcaagaagaagaagttcgtgagcgatggcgtgttctacgcggagctgaacgagatgctgacgcgggagctggccgaggacggctactccggcgtggaggtgcgcgtgacgccgatgcgcacggagatcatcatccgggccacgaggacgcagaacgtgctcggcgagaaggggcgcaggatcagggagctcacctccgtcgtgcagaagcgcttcaacttccccgagaacggcgtcgagctctacgccgagaaggtcgtcaaccgcggcctctgcgccatcgcccaggccgagtccctccgctacaagcttcttggaggcctcgccgtccgcagggcttgctatggtgttcttcgctatggtatggagagtggtgccaagggttgcgaggtcattgtaagtggaaagctcagggcccaagagccaagccatgaagttcaggatggtacatga

SEQ ID NO: 417744 - DNA, 552 bp, Oryza sativa
gtctatcaaatgggcttctggtgctttacattgccataaacttgttcaagatgtactatggcgatgattgggagggtctctttgagtccatcactggctatggccttggtggatcctcaatggctctgtttggaagggtgggtggaggtatctacaccaaggcggctgacgtcggtgctgatcttgttggcaaagttgaaaggaacatccctgaagatgatcctcggaaccctgctgtgattgctgacaatgttggagacaacgttggtgatattgctggaatgggatcagatctgttcgggtcgtacgctgaatcttcctgtgctgcccttgttgttgcttccatttcttcctttgggatcaaccatgatttcactgggatgtgctacccgctgctggtcagcttcatgggcatcattgtctgcttgatcaccactctttttgccactgacttcttcgagatcaaggccgtgaaagaatctaaccgtcactaaagagccgcttatcatttctacggctttgatgactgttggtattgactggtcattggtt

SEQ ID NO: 417745 - DNA, 530 bp, Oryza sativa
gtcagtggaacatgatgaataagaaaatggtcaatggtgggagagtcaacaactgggcatgtattaacttctctagaaatgtgcaagatagtgctgccaggggcttctgtcatgagctggctatcatgtgccaaatatctggaatggattttgcactggaacctgtgctgcccccacttactgctagacctgaacatgtggaaagagcactgaaggcacgctatcaagatgcaatgaacatgctcagaccgcagggcagggaacttgatttactgattgtaatactgcctgacaataatggttctctttatggggatctcaaaagaatctgtgagactgatcttggattggtctaccaatgttgtttgacaaaacatgtttttaaaatgagcaagcagtatcttgcaaatgttgcccttaaaataaacgttaaggtggggggaaggaatactgtacttgtggatgctttgacacggaggaattcccttgtcagtgacagaccaactatcatatttggtggcgatgttact

SEQ ID NO: 417746 - DNA, 532 bp, Oryza sativa
cattctcccaaaacacccacccggtttaccagagatccgcgcccgccacttgtaaacctgctgcacccatggcgcccagagcagctacggtggagaaggttgctgtggcgccacccaccgggcttggtcttggcgtcggcggaggtgtcggagccgggggtcctcactacaggggcgtccgcaagcgcccgtgggggcgttacgcagcggagatccgtgaccctgccaagaagagccgggtgtggctcggtacctacgacacggcagaggaggccgtccgcgcctacgacgccgtcgctcgagagttccggggtgccaaggcaaaaacaaactttccgtttgcatcacagtcgatggtcggctgtggcggcagccccagcagcaatagcacggtagacaccggtggcggcggggttcagacgcctatgcgggccatgcctctgccgacgactctggacttggatttgttccaccgcgcggctgctgtgactgcagtcgccggcaccggcgttcgctttcctttcagaggata

SEQ ID NO: 417747 - DNA, 436 bp, Oryza sativa
tcttctctgtactatgcctgtttcttcagacattctccactgccttaggagcaaatttcttcactgcgtccccgacagtcaggaatatcttgtcttcaccgatgagatccgtgaatttcgctgatcggagcttcaggatcacagctggccccggattggctagaatcagctgaggaatgccaggaaggatgctccgatcaatatcgtctgccagttccactgcagcagcaaccaagctagcatcagttgtacccaatactggtttccatcaaagaatgatgaagaagcaataagttcttaaaggaatgatattattttgtcctaccccatggtgaacatttccccagactgatttcatgaccgagatgatgtcagtcttcttggtgaaagttgcaattcaaggaagcctttaagctgctgaagggcaatggtgatg

SEQ ID NO: 417748 - DNA, 445 bp, Oryza sativa
  unsure (1)..(445): unsure at all n locations
ctgaattccgttcaccgccgtgtttttcgttcgttctgtttcttggtgttcttgaagagttcctgaaattgagtcatggctgccaagctagctcgcctccacagtctccgcgaacgcctcggtgccaccttctcgtctcatcccaatgagttgattgcactcttctctaggtatgttaaccagggaaagggaatgctccagcgtcaccagctgcttgcggagttcgatgccttgatcgaagctgacaaagagaaatatgctccctttgaagacattctccgggctgctcaggaagccattgtgctgccgccctgggttgcactggccatcaggccaaggcctggtgtctgggactacattccggtgaatgtaagtgagttggcagtggaagagcttagtgtttctgagtacttggcattcaagaacagctngttgatggacacac

SEQ ID NO: 417749 - DNA, 389 bp, Oryza sativa
ccacgcgatccattctacagctctagcgccccccgcgtccagttccatctaatcagcttctcgtcgagatgggccgcaagttcttcgttggtggcaactggaaatgcaatgggaccactgatcaggtggacaaaattgtgaaaattctgaatgagggacagatggcttctacagatgtccatgaggtgggtgtcagcccgtcttatgtgttgcttgctggggccaaaagaaaattgtgcacgctgatacaagttggtgtgtcaaattgcatactgaataaaggccgtgctcttaccactgatgtaccacctgtcatgcttggcaactcatatggatccctgggatattcttggacactctgtaaagaggagcttgctgggtgcattaaa

SEQ ID NO: 417750 - DNA, 500 bp, Oryza sativa
gtttattcaacctactaagctagctagctagtgacaattaagtgatcacaagtgttgttgcgatgggtagagtagtggtcgtcgtggcggcggcggcggtagccgtggccgtcgtcgtgctgctgggcgcggcggcgccggcggcgagcgcgatggagttcggcgacaaggacgtggcgtcggaggaggcgctgtgggagctgtacgagcggtgtcgcgggcagcaccgggtggcgcgggacctcggcgagaaggcgcggcggttcaacgtgttcaaggacaacgtccgcctcatccacgagttcaaccgccgcgacgagccctacaagctccgcctcaaccgcttcggcgacatgaccgccgacgagttccgtcgcgcctacgcctcctaccgcgtctcccaccaccgaatgttccgcggtcgcggcgagaggcgcagtggcttcatgtacgccggcgcccgcgacctgccggcggcggtggactggcgcgagaagggc

SEQ ID NO: 417751 - DNA, 555 bp, Oryza sativa
  unsure (1)..(555): unsure at all n locations
tctatcaaagaaaaaacaaacatttcatcagagagagagaatctactagcctactactatacaaagttggggggaaagggagagatttttgttcatagtttgggaacaaagtttagttcttttcttgggggagtctccaggcgaatgttgcagcggccaaggtaggaatgaagaggaggatgagaggaggaggaggtgcagccatggccgtggccactggagctgtgatgctgttcttggcagctactctctctggggttagtgccaacacagactcagatgatgtgaatgctctcaatgtcttgtacacaagcatgaattctccatcccagctgacgaattgggtgtcacaaaatggagacccctgtggacagtcctggcttgggatcacttgctcgggttccagggtgacagcaataaaattatacggcatgtngatcaacgggactttgggctacaacatgaatctactgactttactagttgaacttgatacgagcaagaataatcttggaggcagtgacatttcttataacctttctccaaattttgaga

SEQ ID NO: 417752 - DNA, 427 bp, Oryza sativa
tgaggatccccctgtgttttctgagccagctcttgttaattctcacaacgatggaaatgctgaaaattgcaagttaccaaacggagttgcagttgaagccatgggtcaaggagtggagaaccaaaacattgttggctccaaggcaccaactagtccagagaaactaagcgaagagctagctgcagtgaaggcacaagcggcctttcgaggttacctggcacgtatggcattccgtgcattaaaaggtatcataagactccaggcactgatccgaggacatcttgtaaggagacaagctgcatcaacccttcgtgtgacatggttgatcgtgaaactttaagctttagttcgtggaagaaatgttagactctccggtgctttcattcaatttgttgtgaagtcccgccaacataagtttctgagtgat

SEQ ID NO: 417753 - DNA, 418 bp, Oryza sativa
ctctgcactttcacccccaacattgtcaccaggtgcatcgaaccgagtctgcaatgcacttgcacttcttcagtgtgttgcatctcaccctgagaccaggatccttttcttaactgctcatattcccctgtacctgtacccattcttgaatactaccagcaagacaagaccttttgaatacctgcgactcaccagcctgggtgtcatcggtgcacttgttaaggttgatgatactgaagttatcagttttctgctgcaaactgaaataattcctctgtgtttgcgtaccatggaaatgggaagtgagctgtcaaaaactgtatgtcgctaaccatctcatgtttatctaaataccatcatctttttcttctttaagtatgtgatgatgctgtctgaagtttgtgtgtaattttttttt

SEQ ID NO: 417754 - DNA, 390 bp, Oryza sativa
cgtttcgccaccgcgaatcccaccaccacccgcagatctccgcctcggcgccattgcccaccctccacgcccccgccagattcgcccagatccacagccgggtgcatccggcggcgtggctggggcgccctcgatcgggaagctttgatcttcgtaccctttttgcggtgggcgggcggcgggcggcggaggaagaggaggagatgggtgtcggcggggagaagttccagctggggacggtgggggcgctgagcctctccgtggtgtcatccgtctccattgtcatctgaacaaggcgctcatgagcttcctctgcttcaactttgccactaccttgacgagttggcatcttcttgtcacattttgctccctccatgtagcattatggat

SEQ ID NO: 417755 - DNA, 384 bp, Oryza sativa
cttctttcctccacttactactctttgtgagagtgagcctctcgccattgttgcctcgataagaagcttaattagctcggaagccttttcacttttcagccatgaggctgtcgtccctgctgttcttggtgtgcttcttcactgtcgccatgtcgcaatgcgcggcggcggcgaaggcgaggcacttcaggtgggaggtgagcaacatgttctggtcgccggactgcgaggagaaggtggtgatcggcatcaatggccagttccccgggccgaccatccgcgccaaggccggcgacaccatcgtcgtccacctcaagaacggcctgcacaccgagggcgtcgtcatccactggcacggcatcaaacagatccggacaccatggg

SEQ ID NO: 417756 - DNA, 376 bp, Oryza sativa
ttttgccacacacacaccactccatttctgagctcttctagtttgagtgagagagcagcagaagggagtagtgcaagatgccgatccgcaacatcgccgtggggagccaccaggaggtgtaccacccgggtgcactcaaggcggcgttggccgagttcatctccaccctcatcttcgtcttcgccggccagggctccggcatggccttcagcaagctgaccggcggcggagcgacgacccccgccgggctgatcgcggcggcggtggcccacgccttcgccctgttcgtggcggtgtccgacggcgccaacatctccggcggccacgtgaacccggccgtgacctttggcgccttcgtcggcggcaacatcaccct

SEQ ID NO: 417757 - DNA, 260 bp, Oryza sativa
gtatagtgtgaagaggcatttgcgtggtcctggagcaatcccgataggaaagcctgctattcatgcttttccaattgacctgaaagggaaggcttatgagttgctgcgagagaaagcatcaagatttctccttgatgattgttacaggactccaggaggcattcaatatgaaggcccgggttgcaatgcataacccattacattgaccattgagaaccaagactacatgggcgacatttgagatactgtaagactgtctt

SEQ ID NO: 417758 - DNA, 381 bp, Oryza sativa
tatccgcctcgccgccgcaaccaccgccgcctcgccgcagcatcacccgcagccgccgccgccgccgccatggactccgtcgcgtcgtgggggctgaccccgctcgccgcggccgacccgctcgtccacgacctcctcgagcgggagaagcggcggcagcggagcggcatcgagctcatcgcctcggagaacttcacctccttcgccgtcatggaggccctcggctccgcgctcaccaacaagtactccgaggggatgcccggggcgcgctactacggcgggaacgacgtcatcgacgagatcgagaacctgtgccgagaccgcgccctcgacgtgttccggctcgacgccgcgtcgtggggcgtcaacgtgcaaccctac

SEQ ID NO: 417759 - DNA, 337 bp, Oryza sativa
atcgcctcccagaggcatgcctggctcatgcaatctccttcaccactcccacggacgcctgccgctgctccgccgtctccgccgacttccaagcagcggcgagctccaacgccgtgtgggagcgcttcctgccgccggactaccactccatcctcgctcgagccgacgatcctgtggatttcaccacttccaacaaggagctcttcctcagcctctcccaggaccacgtacttctggaccaacgcagcaagagtttttggttggaaagaacaagcggagctttatgctacttgctatcatccagatcattagagatagcatggggggaagatgcccg

SEQ ID NO: 417760 - DNA, 376 bp, Oryza sativa
gtttcatcttattgtcacttccatctcattctcctaattgtcatcactagcttctagctagcttaattaattaattagccatggcggaggagaagcaccaccaccacctgttccaccacaagaaggacgacgagccggccaccggagtagactcctacggcgagggcgtctacacgtcggagacggtgaccaccgaggtggtcgccggcggccaggacgagtacgagaggtacaagaaggaggagaagcagcacaagcacaagcagcacctccgcgaggcccgcgccctcgccgacggcgccttcgtcctgtatgagaagcacgaggcgaaagaaagacccggagaacgcgcacaggcaccaagatcaccgaggaa

SEQ ID NO: 417761 - DNA, 337 bp, Oryza sativa
agttaacgcgtgcgatccaagcagaccgagtcgacgaagcagcgaagcaaagcagcagcagcagcgagcgagcgcgcgcggccgccgccggtgaggcgaagatgtcgtggcaggcgtacgtcgacgaccacctgatgtgcgagattgacggcaaccacctcaccgccgccgccatcgtcggccacgacggcagcgtctgggcgcagtcccccaacttcccgcagtacaagcctgaggagattactggcatcatgaaggactttgatgaacccggcagtctcgcaccaactggtctttttcttgggggcacaaaatacatggtgatccaaggtgaacc

SEQ ID NO: 417762 - DNA, 373 bp, Oryza sativa
agtctacccaacaaaaagaaaaagaattttcaggttttcttctcgctttcaccggagaaggagaaggagaggaaggtgttgatcgaatcctcctccaatcgcgcgcgattcgatccccgttgctggctcgctcgctccgccgatccctcatccgatctgaatccccgatctgatggcggccaaccccggcaacaagatccgcaacgccaagctggttcttcttggagatgtgggcacgggcaagtcgagccttgttctccggtttgtgaagggccagtttgttgagttccaggagtccaccatcggcgcggccttcttttcgcagaccttggcggttaacgacgagacggtgaagttcgaaatctgggatact

SEQ ID NO: 417763 - DNA, 360 bp, Oryza sativa
ctttcagagagcaattctcttctcctacctagcaacctagtgcagtgcagtgcagtgcagcgaaggtttacttggcgacttccatgggttgcctgttgatgctctgcttggtttctcccctcctcctcgccacctctgtccacggcaacccgtggtatgggtatgggtatggcttgttcccgcagttctacgaccactcgtgccccaaggcgaaggagatcgtgcagtccatcgtagcacaggcggtggccagggagaccaggatggcggcatccttggtcaggctgcattttcatgactgctttgtaaggggtgtgacgcgtctgtgctcctggacaacagcaccaccatcatcagtga

SEQ ID NO: 417764 - DNA, 392 bp, Oryza sativa
ttcaccaccaccaccgtctccagccatggcctcctccgcctccctgcagcgcttcctccccccgtacccccacgcggcagcatcccgctgccgccctcccggcgtccgcgcccgccccgtgcagtcgtcgacggtgtccgcaccgtcctcctcgactccggcggcggacgaggccgtgtcggcggagcggctggagccgcgggtggagcagcgggagggccggtactgggtgctcaaggagaagtaccggacggggctgaacccgcaagagaaggtgaagctggggaaggagcccatgtcattgttcatggagggcggcatcaaggagctcgcccagatgcccatggaggagatcgaggccgacaagcttttcaaggaggacatcgacgtgc

SEQ ID NO: 417765 - DNA, 522 bp, Oryza sativa
ttatataccaaaaataaggaattatacttattatttatataaacatgctactaatcattcatcgtaaacaagcgattcattaatatttatatttcttgatgtccatgtagccaatcttatgtggaagaatgaagagtcacgcattgaatatgacaaaatcattaagatgataggttgttggattgaaatatgcgttgcaaaaataaaattttcagatttagaaatatgactatcaaaagtagatgaatggagttaattaaacagaaagagcgtactgaacgcttatcaatgataaagggctccatttaatgctccatttcctcgaaaaaaataatgcttcatttactcgaaaaaataatgctccatttatgtgcaaaaatgaactaatagtaatggaatctcaaaaaattacccattgcgttgaactattctaagcaaatattttttttcctaaaaagttgtgtttcccagagagagttagagtgtgatagagagagagataatgatagagagagagagttt

SEQ ID NO: 417766 - DNA, 324 bp, Oryza sativa
tcttctcctccggctcttcttcagtatcgaatcctctcttctcctcgtgcccaccaccaccaccgtagcaatggcgggcaacgggccgatcaacaaggaggacccgctcaactggggcgcggcggcggccgagatggccggcagccacctcgacgaggtgaagcgcatggtggcgcagttccgcgagccgctggtcaagatccagggcgccaccctccgcgtcgggcaggtggccgacgtcgcccaggccaaggacgccgccggcgtcgccgttgagctcgacgaggaggcccgcccccgctttaagggcaacagcgagtggat

SEQ ID NO: 417767 - DNA, 428 bp, Oryza sativa
ttcctcctcccaaactttatccgccgccgccggcgtactcgagagaaacatcagcatccatggcgggcaagggcgagggtccggccatcggcatcgaccttggcacgacctactcgtgcgtgggcgtttggcagcacgaccgcgtggagatcatcgccaacgaccagggcaaccgcaccaccccctcctacgtcggcttcaccgactccgagaggctcatcggagatgctgccaagaaccaggtcgccatgaaccccatcaacaccgtcttcgatgccaagcgtctcattggcaggaggtttagcgatgcttctgttcaaagtgacattaagctctggcccttcaaggtgattgctggacctggtgacaagcctatgattgttgtccagtacaagggtgaggagaagcagtttgctggcgaagagatc

SEQ ID NO: 417768 - DNA, 415 bp, Oryza sativa
cttcgttgcacacgcgcgcgctgtggttgctgcatcaaatgggtaacttgcttgatatgaaggtggtggcaatggtggcggcgctagtcgtcatgagcttggcaggggtgtccatggcggcacggagggtgcccgcgctgctgaagagccacgtcggcgacgggatctcctaccacggcggcgccgtgctcggcggcgacattcccgtcaccctcgtgtggtacgggaagttcaagccggcgcagaaggccatcgtcgtcgactttctcctctccctcacggccacgccaccgaacgcgacgacgccctcggccgcgcagtggtggggcgccatcgccgccggctacctgtcgtccaacgcgacgaacgtgacgactgcggcgcgggtggttcttgcgaaccagaccttcgacga

SEQ ID NO: 417769 - DNA, 463 bp, Oryza sativa
tcagctcttgttgtcagcagcacaagctggacaccagatgaagatttcagcatacttctggaagcagcacttatgtacgatagacgtgttgctgcaactttaggagaagatgattcaatggacgagggaaagctttggattgatatcaagaacgggaagcaatttgtctacccaagactgctattcattatcactggcaaaggacctgataggatgaagtatgaggagcaaataaagaggttgaaactgaggcgtgttgccttccggactatgtggcttgcatcagaggactaccctcttttgcttggatcggctgatctaggtgtatcattgcatactttctcttcagggctagacctacctatgaaggtggttgatatgttcggttgtggattaccagtttgtgctgtttaatctcctgcattgatgagctttgaaaaataaataataatggacttttttt

SEQ ID NO: 417770 - DNA, 474 bp, Oryza sativa
caccgctgccgcctccttctacgcctccgccgatccccatccatccatccggcgagcgagcgagcgaggagggtcgccgtcgctcgccctgctgcttccgccgcatccgttccctacttatattattttgaagagatgggttgatctccaaggggccggaacctcccagctcgttgacgtggatcatcttcatcttctagtgatttaccttcctgctgctggaagatgaaaggaacatgcgagcaaaatgatatagcattggtctctgagaaaaaagaatggaaaggagcttcttgcccagtttgcctggagcatccacatgatgctgacctcctcctctgtacttctcaccacaaggggttgccggccctatatgtgtggtaccaaccaccagcattctaactgccttgaacacttcaaagaagcttacgccaaggagaagttggcccacagtgttttaattgagtctttacc

SEQ ID NO: 417771 - DNA, 344 bp, Oryza sativa
agaaacaatggtagatcgagcaaacaaataaagaaggaaatgacataagtaagggtagcaactagcaactggtgtgacttttaaaaactattaaattagaaacataaggatgatataaggtttggactttcaaactcttaagacatgtagatagctatttaataaattttaagtaaaatcatataaaaaatatatataattttgtatgggtgctagccttgcctgggccatcaagctagttgcaaattatttaggtataatttcgttcgatgcaacttgggcattgttgtcttgctgatccttgagctttttgaacagcttgcgttgcacgttcttgtttgaat

SEQ ID NO: 417772 - DNA, 419 bp, Oryza sativa
gttttacacccagttcactcctcattatattacatggtattgccctgaagcttttgttgtgagcaagcagtgcaaatcacagtgtatcaatcatgggaggtattgtgcaccagacccagagcaggatttcagccagggatatgatggaaaagatgttgtggttcaaaatctacatcaaatttgtgtattcaaggctgctaatgagagtgggaagccatggttgtggtgggactatgtgcatgacttctcaattaggtgccctatgaaggagaagaaatacacacctgaatgtgctgttcatgttattaagtcactcgggttggatgttgagaagataaagaagtgttgtggagatccctgagctgatgaggaaaacccttgtttgaaggcaaaacaagatgcccaaattggtcatgata

SEQ ID NO: 417773 - DNA, 394 bp, Oryza sativa
ctttttcgcgtgcccttaaggcgtttcacttggacacaaacgattggggttgcaacgttcagccgtactctggaagcgtggctaacatagctgctcttatttccgttctagaaccaactgataaaatccttggattagcattgccctctgggggacacttgtctcacggacaccaactggaaagtggaaaaaagatatctgcgacttccattttctacaactgctcttcttacggcattgatcagaccactgggttgttggattatgacaaacttgatcaacaaattcaggattttaaaccaaaattggtaattgctggcgcgtctgcatacccgagagactgggactaccaacgcatgagagaatcgtgcgacaagggtggagccttcttgat

SEQ ID NO: 417774 - DNA, 352 bp, Oryza sativa
ctctcacctacactccgctgcgcagccagcttcgctcgcccgctacctcactcactctcgggtgagcgcggccaccgctgccggcgacgaggtagggaggaggaggagggcaagatgttcgggcgggacccgtggggcgggccgctggagatctcgaatgcggactcggcgacggacgacgaccggagccgggacctggacaggggggcgctgatgcggcagctggacgagacgcaacagagctggctcctggccgggccgggcgaccaggccggcaagaagaagaagaagtacgtctacctcggctgcatggtcctcgaccgcaagatctttatgtggacccgaggcacca

SEQ ID NO: 417775 - DNA, 436 bp, Oryza sativa
ctcatcccagccgccgccgccgcagcctcctcctctcgtcttctccttcgagttgttagctccctccttattcaaccatgggtaaggagaagacgcacatcaacattgtggtcattggccacgtcgactccggcaagtcgaccaccacgggccatctgatctacaagcttggaggtatcgacaagcgtgtgatcgagaggttcgagaaggaagccgctgagatgaacaagaggtccttcaagtacgcgtgggtgctcgacaagctcaaggccgagcgtgagagaggtatcaccattgatatcgccctgtggaagttcgagaccaccaagtactactgcacggtcatcgatgcccctggtcaccgtgacttcatcaagaacatgatcacgggtacctccaagctgactgtgccgtgctcatcattgactccaccact

SEQ ID NO: 417776 - DNA, 392 bp, Oryza sativa
cttgggctggccctcaacttctcggtgttttattacgagatcctcaactctcctgaccgtgcttgcaatcttgcaaagcaggctttcgatgaggctatctcagagctggacactctgagtgaggaatcctacaaggacagcactttgatcatgcagcttctgcgtgataacctgacgctgtggacttccgatatctcggaggatgctgctgaggaaatcaaggaggcccccaagggcgaatcaggagatggacagtgaacatgatcgaatgcgtgcgcccacaaactagaatagtgacgctgcaaatgtgctgtgggttatcgtttcattttatagattgtaatgtctcgtgatttgtcggaaacaggaggcgctccccaattatgttgtgc

SEQ ID NO: 417777 - DNA, 493 bp, Oryza sativa
gttgagggtttgatgaccactgtccatgcaatcactgcaactcagaagaccgttgatggaccctcgagcaaggactggaggggtggaagggctgccagtttcaacatcatccctagcagcactggagctgcaaaggctgtcggcaaggtgcttcctgctctcaatggaaagttgactggtatggctttccgtgttccaaccgtggatgtctctgtcgttgatttgactgtcaggcttgagaagccagcatcctatgatcagattaaggcagctatcaaggaggagtctgaggggaaactcaagggtattctgggttacgttgaggaggaccttgtttccacagacttccagggtgacaacaggtcaagcatctttgatgcaaaggccggtattgctctcaatgaacactttgttaagcttgtgtcttggtatgacaacgaatggggaaacagctcttgcgttgttgacctgatccgtcacattgtacaacacc

SEQ ID NO: 417778 - DNA, 458 bp, Oryza sativa
cttaaccttctcttctctcaaccctttgttcatcttcttgttcctcctcttgtctcgtctcgatggccgggattggtccgatcaggcaggactgggagccggtggtggtgcggaagaaggcgcccaccgccgccgccaagaaggatgagaaggccgtcaacgccgcccgccgctccggcgccgagatcgagaccatgaagaagtataacgctggaacgaacaaggcggcgtcaagtggcacatccctcaacaccaagcggctggatgacgacaccgagagccttgcccatgagcgtgtctcaagtgacctgaagaaaaacctcatgcaagcaaggctggacaagaagatgacccaagcacagcttgcacagatgatcaatgagaagccccaagtgatccaagagtacgagtcaggtaaagctattccgaaccagcagatcatcgggaagcttgaaagg

SEQ ID NO: 417779 - DNA, 389 bp, Oryza sativa
gctgacccgatgaaggtggtggagcgagttcagaagaagaccggccggaaggtggagctcctgtcgccgatgcctcctccaccggaggagaagaaggaagaggagaagaaagaggaacctgagcctccaaagcctgaggagaagaaggagccgccggtgatcgcggttgtgctgaaggtgcacatgcattgtgaggcctgtgctcaggggatcaggaagaggatcctcaagatgaaaggggtacaatcagctgagcctgacctgaaggcgttggaggtaaccgtgaagggtgtgtatgaggaggccaagctggccgagtacgtgcacaagcgcaccggcaagcacgcttgcatcatcaagtctgaaccggtagccccttccgagaaggt

SEQ ID NO: 417780 - DNA, 429 bp, Oryza sativa
cattcatccaccgtctcaatctcggtagtaatcctcgcggcctcgccgttagttccaccaccgggcgccaccatgtgcgggatcctggccgtgctcggcgccgccgactggtcgcaggcgaagagggctcacgtcctctcctgctcccgcaggctgaagcacaggggacccgactggtccgggttgtaccagtgcgagggaaactttctcgctcagcagcgtctcgccatcgtctccccgctctccggcgaccagccgctgtacaacgcggaccggaccatcgtcgtcgtggccaatggagagatctacaaccacaagatgatcaggaagcagttcgccttcaagcacacgttcagcacctgcagcgactgcgaggtcatcatccccgtgtatgaggagtacggcgaggactttcgcgacatgctggac

SEQ ID NO: 417781 - DNA, 356 bp, Oryza sativa
tctttgtcttcttccatctccaaatccttcttccctaatccccctcgccggcgaagcgcggcggcggcggcggcgccttcttccctaatcccctcgccagcggggagccgcagggcggcggaggcgtgcgtcggctgctgctgctgcgcgggcgggggaggtggggagagatgcacagatccgcgggcgccacgatggcgtggaacgtgttcaggttctgcactgcgctgagggggctgggctccatcatgatcctgctcgtcctctccatcgtcggggtcacctactacgcgggcgtggtgtacaactacggccccgcgctcttcggcggcggcgccagcacccttcttgcgctc

SEQ ID NO: 417782 - DNA, 425 bp, Oryza sativa
tctccctcccacgccgtcgcccccgcaaaccctagcgaacgcagcggagagaggagagagcgccatggccgtggaggtggcgacgcagaagatcaggtggggagagctcgaggaggacgacgagggggacctcgacttcctgctcccgccgcgcgtggtctccgggcccgacgagaatgggttcaagaaggtggtcgagtatcgcttcgacgacaaggggaacaaggtgaaggtcaccaggaccttccgcgtccgcaagatcgcccgcgcccgcctcttcaagagcgccatcgagcgccgctcgtggcccaagttcggcgacgccgtgcaggaggacgtctgcgcgcggctcaccatggtgtccaacgaggagatcgttcttgagcgcccacgcgccccaaggagcaaagctgaagaaccagtgc

SEQ ID NO: 417783 - DNA, 407 bp, Oryza sativa
atcgccgccgtcgccgccgccgtctccgccgccgccgaggagtatgagtagtaggaggaggaagccggtagccggaggaggagcggggagatggcggacgcgaagcagcagcagcagcagcagacggcggcggccgccacgggggtctggaagacggtgaagccctttcttaacggcggggcctccgggatgctcgccacctgcgtcatccagcccatcgacatggtcaaggtgaagatccagctgggagagggatctgcagctcaggtcacaaagaacatgcttgctaatgagggtattggttccttttacaagggtttgtcagctggtttactaaggcaggcgacatatactactgctcgtcttggatccttcagggttcttgccaacaaagcatttgaaagaat

SEQ ID NO: 417784 - DNA, 473 bp, Oryza sativa
gttgaagcattctgagttcatcagctaccctatctccttatggactgagaagacaaccgagaaggagatttctgatgatgaagacgaggaagagaagaaggatgctgaggagggaaaggttgaggatgttgatgaggagaaggaagagaaagagaagaaaaagaagaagatcaaggaagtctctcatgagtggaacgtgatgaacaagcagaaacctatttggttgaggaagccagaggagatcaccaaggaagagtatgctgcttttctacaagagcttgacaaacgactgggaggaacatctggctgtcaagcacttctctgtggagggtcagcttgaattcaggccatcctgtttgtaccaaagagagcgccatttgacctctttgacaccaggaagaagcaaaacaacatcaagctgtacgtacgccgggtgtttatcatggacaactgtgaggagttgatcccagagt

SEQ ID NO: 417785 - DNA, 451 bp, Oryza sativa
ttctgaagcgagtattgagtcttccgtccatatgttctaagcgtttcttaaccacaaaagttgacaggtgtgtgacaggtcttgttgcacaacagcagacagttggacctctccaacttcctctcgcagatgtggctgtgattgcacagacatatactgacttgacaggtggtgcctgtgccattggagaacaaccagcaaaaggtttacttaatcccaaggccatggcaagacttgctgttggggaggccttgactaatctggtctgggctaaagtttcatcactttctgatgtcaaagcaagtggtaactggatgtatgctgcaaagcttgatggagaaggtgcagatatgtatgatgctgctgttgcattggctgactgcatgattcaacttggtattgcaatcgatggggggaaaggacagtcttttcatggcagctcaatgtgatg

SEQ ID NO: 417786 - DNA, 85 bp, Oryza sativa
tgtttgtgtcgtcactcgttggggtgtcacccggctttctcgcaagacccacaggggtcttccgaagggttgtttgtttggtgcc

SEQ ID NO: 417787 - DNA, 327 bp, Oryza sativa
ctctatctcacttagcctgagctgagcaatggggctactccggcgaggtagtagcggcggcggcgccgtgctcgtggtggtggtgtgtgtaggctgcattgcggcgacggcgatggcggcggcggcgggcggcggcggaggaggaggggagtgtcccaagtacaaggactcgaagcagccgctgaacaagaggatcgacgacctactccggcggatgacgctggcggagaagatcggccagatgtcgcagatcgagcgcgagaacgccaccttcgacgttatgcgcaactacttcattgggagcgtgctgagcggcggcggcagcgt

SEQ ID NO: 417788 - DNA, 433 bp, Oryza sativa
  unsure (1)..(433): unsure at all n locations
atctaatccaatccatcttccacgcgcattccggatccgcggaccaagggaggatgtcgtcgtcgtcgtcgccgcccgccgcctccgccgccgcgaggcaggatctggacggcaaccccatcgcgcccctcaccatctgcatgatcggcgccggcggcttcatcggctcccacctctgcgagaagctcatggccgagaccgcccacgtcgtctacgccgtcgacgtctactgcgacaagatccgccacctcgtcgaccccgccccttcccaccttcatggccgcatctccttccaccgcctcaacatcaagaacgactccaggctcgagggcctcatcaagatggccgatctgacgatcaacctggcggcgatctgcacgccggccgactacaacacgcgcccnctcgacaccatctacaggaactttatcga

SEQ ID NO: 417789 - DNA, 346 bp, Oryza sativa
ccaagggcaccatcgtgttcccgtcggtgtacgagtcgtcgttccaggggttccccgagccggacacgttcgacccggagcgcttcttctcggaggcacggagggaggacgtggtgtacaagcgcaacttcctcgcgttcggcgccgggccgcaccagtgcgtggggcagcggtacgcgctcaaccacctcgtgctattcatggcgctcttcgtctccgtcgtggacttccggcgagaccggacggagggctgcgacgagccggtgtacatgccgaccatcgtgccgagggacagctgcaccgtgtacctcaagcagcgatgcgccaagttcccatcttctgagct

SEQ ID NO: 417790 - DNA, 374 bp, Oryza sativa
ttaccttctcctccggctcttcttcagtatcgaatcctctcttctcctcgtgcccaccaccaccaccgtagcaatggcgggcaacgggccgatcaacaaggaggacccgctcaactggggcgcggcggcggccgagatggccggcagccacctcgacgaggtgaagcgcatggtggcgcagttccgcgagccgctggtcaagatccagggcgccaccctccgcgtcggccaggtggccgccgtcgcccaggccaaggacgccgccggcgtcgccgtcgagctcgacgaggaggcccgcccccgcgtcaaggccagcagcgagtggatcctcaactgcattggccacggcggcgacatctacggcgtcaccaccg

SEQ ID NO: 417791 - DNA, 359 bp, Oryza sativa
gttccttccactcagctttgctcttcaccttcaacaacacctatcaacatggcaatgctgctgaggaaggccgctgtggcccctgccaggaccagcgtgcgcagcaaggctgccatcgagtggtacggccccgaccgccccaagttcctgggcccattcagcgagggtgacacccccgcctacctgaccggtgagttccccggtgactacggatgggacactgctggcctgtccgccgatccccagaccttcgccaagtacagggagatcgaggtgatccacgcccgctgggccatgctcggcgccctgggctgcatcacccctgagctgctggccaagaacggcatcctcttcggtga

SEQ ID NO: 417792 - DNA, 429 bp, Oryza sativa
tttctcctcctctcgccttctcccgtcttctccttcgagttagctacctccttattcaaccatgggtaaggagaagacgcacatcaacatcgtggtcattggccacgtcgactccggcaagtcgaccaccacgggccatctgatttacaagcttggaggtatcgacaagcgtgtgatcgagaggttcgagaaggaagccgctgagatgaacaagaggtccttcaagtacgcgtgggtgcttgacaagctcaaggccgagcgtgagagaggtatcaccatcgatattgccctgtggaagttcgagaccaccaagtactactgcacggtcatcgatgcccctggtcaccgtgacttcatcaagacatgatcacgggtaccttccaggctgactgtgccgtgctcattattgactccaccactggtgggttt

SEQ ID NO: 417793 - DNA, 427 bp, Oryza sativa
cttcttcttcctcctcctcgcgctcccccgattcgaagcgtgaagagaggaacggcgcttgcgagaggagagagatggcccgtaccaagcagaccgctcgtaagtccacaggaggaaaggctcccaggaagcagcttgccaccaaggctgctcgtaagtctgctcccaccactggaggagttaagaagccccaccgttaccgccctggaactgttgccctccgtgagattcgcaagtaccagaagagtactgagcttttgatcaggaagctgcccttccagaggcttgttagggaaattgcacaagactttaagaccgatctgcgttttcagagccatgctgtccttgccctccaagaagctgcggaggcataccttgttggtctcttcgaggacaccaacctgtgcgccattcatgccaagcgtgt

SEQ ID NO: 417794 - DNA, 408 bp, Oryza sativa
tttaagtactcccaggtcaacaaggccaaaagggccagtgagtggctagcttaattagctaagctcatagtcatagcaatggctggagccgtgctggtgaggagaatggtggtggtggttgccattgccgccttggtggcgcccggcgaggtggcggcgcagctgacgccgacgtactacgacggcagctgcccgagcctgcagtccatcgtgaggtcggccatggcggccgccgtgcagcaagagccccgcatgggcgccttcatccttcgccttttcttccacgactgcttcgtcaatgggtgcgacgcgttggtgctgctggacgactcgtcgacgatcaccggcgagaagaacgcccggcccgacgccaactcgctgggcggattcgaggtcatcgacttcatt

SEQ ID NO: 417795 - DNA, 289 bp, Oryza sativa
ggagcaatcaaaaccagtacaagaatccaatacactccccaaacatatgcgatagcatacgaatccaaacatggtctggtaggtgaaacggattaaagtggcagtagcatcagcggcgctacggaccacacagcattgtactactactacattacccaaaagcacataaccaattaagcatcatcataccgaaacaataataaagattgcccaaacggtaggacacaacaggcgacactcaagatgggatcccaggagaaactccggcgagattactcgtcttcgggga

SEQ ID NO: 417796 - DNA, 295 bp, Oryza sativa
gatggtcgccctcgccacaccggtgtcatggtcggaatgggccagaaggacgcctacgtcggcgacgaggcgcagtccaagaggggtatcttgaccctcaagtaccccatcgagcatggtatcgtcagcaactgggatgatatggagaagatctggcatgacaccttctacaacgagcttcgtgtggccccggaggagcaccccgtcctcctcaccgaggcttctttcaaccccaaggccaatcgtgagatgatgacccagatcatgtttgagacctttaacacccctgctatgt

SEQ ID NO: 417797 - DNA, 399 bp, Oryza sativa
ctttcttctccagatcaaaagacccttgctttccctcaggatcggccatggcgaccgccgttgcgtcccaggttgctgtctctgctccggctggctcggatcgcggcttgaggagttctgggatccagggtagcaacaatattagctttagcaacaaatcatgggttggcaccacattggcgtgggagagcaaggccacgcgaccgaggcatgcgaacaaggtgctctgcatgtcagttcagcaagcgagcgaaagcaaggttgctgtcaagccttttgatttggagagtgctaacgagccgccgctcaacacatacaaaccaaaggagccttacaccgccacaattgtctcggttgagaggatccgaggccccaaggctccaggagagacatgccaca

SEQ ID NO: 417798 - DNA, 492 bp, Oryza sativa
cggcgttaccgcatttttatttacatttaaggaaatagttcagtaaagtttatcaaactacaaagcagaatgggcgttgaagtaattccaatttcacctggagatggcagcacatacccgaaaaagaaccagaccgtcgttgtccactacaccggaacattggacgacggttccgttttcgattcatcccgaaatcgcggaaaaccattcaaattctgcatcggcaaaggagaagtaattcgaggctgggatgaaggagttgccaggatgtccgttggagaacgcgctaaattggtctgttcttcagactacgcctacggtagtagaggtcatccgggtgtcatttcaccgaatgccacctttgactttcgatgttgagctccttaaattggaatggattaataaactgcgcctttttttcaaacaaacagaaaaatattttttttccaaacaaataattaacgaacattcttgcacccaattttgaataaa

SEQ ID NO: 417799 - DNA, 417 bp, Oryza sativa
ttcgccggcagcggcggcccccgcggcgctgctcgtccttctcgccgcggccctcgcggcgaccggcgtcgtcgccgacggctccgaccaccgctacaaggccaacgagctcgtcccgctctacgccaacaaggtcggccccttccacaaccccagtgagacgtatcggtactttgacctgcctttctgctctccagagaaagtgaaggagaagagcgaggcactcggtgaggtcctcaatggggaccggttggttgatgcaccttacaagcttgatttccgtgtggattatgactccaagccggtttgctcgaagaagctcaccaaggaggaggtggccaagtttcggaatgcggtagcaaaggactactacttccagatgtactacgatgaccttccactgtggggattcattgt

SEQ ID NO: 417800 - DNA, 365 bp, Oryza sativa
ttcaagtccaccctcggctacacccaggagcagctcaacaccgtcggcttcttcaaggacgtcggcgccaacatcggcatccacgccggcctcatcgccgaggtcacgccgccatggttcgtcctcgccatcggcgccgccatgaatctcgggggttacctcatgctctacctctccgtcaccggccgcgtcggcgccaggaccccgctctggctcgtctgcctctacatcgccgtcggcgccaactcgcaagccttcgccaacaccggcgcgctcgtcacctgcgtcaagaactttcccgagagccgcggcgtcatgctcggcttgctcaagggttcgtcggccttagcggcgccatctttacg

SEQ ID NO: 417801 - DNA, 395 bp, Oryza sativa
tgatgaaggagttcttatctgagctggctaagcgcgtcaacaagaacaccactgcttatgagaactacaagaggatcttcgtgcctgagggccagccgctggagagcgagccgaatgagccgctgcgcgttaatgtgctcttcaagcacgtccagaagatgctgaacagtgacagtgctgtgattgccgagactggtgactcctggttcaattgccagaagctgaagctccctgagggctgcgggtatgaattccaaatgcagtatggttccattggatggtcagtgggtgcattgctcggatatgctcaaggcgctaaggacaagcgtgtgattgcctgtattggtgatgggagtttccaggtgacggcacaggatgtgtcaacaatgattcgc

SEQ ID NO: 417802 - DNA, 394 bp, Oryza sativa
gcttgtcgaggagatggcgagcggccgcaccgcgcgggactgcgcgtacatgagtacaggtacccagcgtctgcgccgctgatcgacgcggcggagctggggtcgaggacgctggaccgatccgtgatgggcgagttcatcgacacgctgatgttcctgcacatcaccgtggacacggtgatcggttacaagcaccagacggacgcgtcggcctccggcgccgacacggcgtgcggcggcgtgggcgtgctcggcatcgcgtgggcgttcggcggcatgatcttcatcctggtctactgcaccgccggcatctccggcgggcacatcaacccggcggtgacgttcgggctcttcctggcgcgcaaggtgtccctggtccgcgccatgctctaca

SEQ ID NO: 417803 - DNA, 508 bp, Oryza sativa
cgttcgtacaatatcctgtcccggtccggccggggtagctgctgcaaattcagcaattgcttggcacatcgagttgattgatcgaggtcgatcgaggctagctaagctgcgtccaatggcgttctcacgggctacggcggcggccgtcgtcgctctcgtcgtcctgctgccgcatttggtcgccgccgtcgtcctcgacgtcggcggcggcgtcgcggcgaggccgtgccactcggcgtccgtggacggcgacgccgggtgcctgagctggcgggtcatggtggaggcgaacaacgccagggggtggcgcacggtgcccgcggcgcgcgtcgcctacgtcaggggctacatgacgcgggggcagtacggcagggacctgagcagcgtcatggaccaggtcgccgcctacgtcgacaccgtcgaggccgacggcgacggcctcgacgcatggatcctcgacatcgacgacacatgcctttccaacctgctctactacgaggccaagcag

SEQ ID NO: 417804 - DNA, 475 bp, Oryza sativa
atccaaaccttcgtcttcgtcttcctctcgccggggattcgattcgatccgatccgatccaaggggaggggaagcaatggcgacgaagaggagcgtggggacgctgggggaggcggatctgagggggaagaaggtgttcgtgcgggccgacctcaacgtgccgctcgacgacgcccagaagatcaccgacgacacccgcatccgcgcgtccgtgcccactgtcaagttcctcctcgagaagggcgccaaggtcatcctcgccagccatctgggccgtccgaagggtgtcacccccaagtacagcttgaagcctcttgttccacgcttgtctgagctacttggagtcgatgttgtgatggccaatgattgcattggtgaggaagttgagaaattggctgctgctttgccggaaggtggtgttctactcctagagaatgttagattctacaaggaggaagaaaagaatgatcctgag

SEQ ID NO: 417805 - DNA, 513 bp, Oryza sativa
ttctgctcagctagcaaaagtacaatatccgggggacggacgcctagctaagctaagctaattaagctctaatttctcttttcttttttcttcgatctccggcgaaaaagtaagtacaatggccgaggtgaacggagccaataacggcaacggccaccacggccacggcaacggcagcggcgctgcggcggcggcggggcggtcgacgagtgtgtcgaggaagatcgagtcggagggggcggtgctgatgcccggggtgtacgacgcgctgtcggcggcgatcgtccagaagaccgggttctacgccggcttcatctccggctacgccgtctccggctccttcctcggcacccccgacgtcggcctcctcacgccgccggagatggcggaagtggcgaggcggatctgcgcgtcggcgcccaacacactcttcatcgccgacgccgacactggtggtggcaatgctctgaatgtgaagcgtactgttcaggacctgattgcagcaggtgctgc

SEQ ID NO: 417806 - DNA, 512 bp, Oryza sativa
tttttaaccgatcagctttggtgttcgatcgagcaagacgaggcggcggcggggctgatcgagatggcggcgccgccggcgaggtcggtgagcgtggcggacagggcgctgcgaggggtggcggacctgatcaagctgctgccgagcggcacggtgttcctcttccagttcctcagcccgctcgtcaccaacaacggccactgcgccgccgcctacagcagggtcctcagcgccgccctcctcgcgctctgcggcgccttctgcgccttctcctccttcaccgacagctacgtcggctccgacggccgcgtctactacggcgtcgtcaccgccagggggctccgcacgttcgccgccgacccggacgccgtcgcgcgggacctgtccgggtacaggctccgcgccggggacttagttcacgccgggctcttgctcctcgttttcgccaccattagcctcctcgacgccgacaccgtggcgtgcctttacccggcgctcgaggtcagcgagcg

SEQ ID NO: 417807 - DNA, 498 bp, Oryza sativa
cacggggtgtaaagtatgtagattgggtgggggttgacaatgcactggtccgcgttgctgatccgacgttcctaggttacttcatagacaaagctgtatcttctgctgcaaaggttgttaggaaggcttacccacaagagaatgttggagtatttgttcgacgaggacgtggtggacctctctctgtagttgagtatagtgaaatggacgcagctatggctactgaaattaatcagtcaacgggacgccttcgttattgttggagcaatatttgcttgcatatgttcactttggattttttgaatcaagtagcaaacagccttgagaaggacagtacttatcatcttgctgagaagaagatcccttccatccatgggtacgcaatgggcttgaagcttgaacagtatatattcgacgcgttcagttactccccatccacagcactttttgaggttttgcgggaggaggaatttgcgcctgtaaagatgcgaatggcgc

SEQ ID NO: 417808 - DNA, 428 bp, Oryza sativa
gctgatctactagctacctagtacggggatgttcttaactagctttggcttgatcaattgcagcaatggcggcgaaggcagcgctcgttctagcggtgagcctcctggtggtggccgtggcgagcgcctgcacctactgcccggagccgtctacgcctaagccgaagccgccggcgccgaggccgccgacgcccggtggcggcgccgggtcgtgcccgcgcgacgcgctgaagctgcacgtgtgcgccaacgtgctcggcctggtgaaggccaagatcggtacggtggcgccgtacgagccctgctgctcgctgctcgacggcctaaacgaccttgacgcctacgtctgcctctgcaccgccatcaaggtcaacgtgctcggtctcaaccttaacatcccgatagaccttagtctcatccttaacaac

SEQ ID NO: 417809 - DNA, 512 bp, Oryza sativa
cgcgccgctactcctttctcgccgagagagctctagggtttccgctgccgaatttttttttaattcggggggagagatttgaagaggcggcaccatgttggtctaccaggatctgcttaccggtgacgagctcctgtcggattcgttcccctacagagagatcgagaacggcatcctctgggaagtcgatggcaagtgggtcgttcaaggagctattgatgtggacattggtgccaacccatctgctgagggtggtggtgatgatgagggtgttgatgaccaagctgtgaaggtggtcgacattgtggacaccttccgtcttcaggagcaacctccttttgacaagaagcagtttgtgaccttcatgaagcgctacatcaagaacctctccgccaagctggatgcggaaaagcaagaggaattcaagaagaacattgagggtgccaccaagtacttgcttggaaagctcaaggaccttcagttctttgttggtgagagcatgcatgatgatg

SEQ ID NO: 417810 - DNA, 463 bp, Oryza sativa
gagccaactccggcgacggtaacgacggcgccgtcggagggcagagcaagctctcgccgtcgggcctgctgatacgcgagattccgggcggctacggcgtgcccttcctctcgccgctgcgcgaccgcctcgactactattacttccagggcgccgacgagttcttccgctcacgcgtcgcccgccacggcggcgccaccgtgctccgcgtcaacatgccgcccggccccttcctcgccggcgacccccgcgtcgtcgccctcctcgacgcgcgcagcttccgcgtcctcctcgacgactccatggtggacaaggccgacacgctcgacggcaccttcatgccgtcgctcgcgctcttcggcggccaccgcccgctcgccttcctcgacgccgccgaccctcgccacgccaagatcaagcgcgtcgtgatgtcgctcgccgcggcgaggatgcaccacgtcgc

SEQ ID NO: 417811 - DNA, 509 bp, Oryza sativa
  unsure (1)..(509): unsure at all n locations
cagcgcaccaccaccaccaccaccaccaccaccaggaccgtctccagccatggcctcctccgcctccctgcagcgcttcctccccccgtacccccacgcggcagcatcccgctgccgccctcccggcgtccgcgcccgccccgtgcagacgtcgacggtgtccgcaccgtcctcctcgactccggcggcggacgaggccgtgtcggcggagcggctggagccgcgggtggagcagcgggagggccggtactgggtgctcaaggagaagtaccggacggggctgaacccgcaggagaaggtgaagctggggaaggagcccatgtcattgttcatggagggcggcatcaaggagctcgccaagatgcccatggaggagatcgaggccgacaagctctccaaggaggacatcgacgtgcggctcaagtggctcggcctcttccaccgccgcaagcatcagtatgggcggntcatgatgcggctgaagctgccaaacggtgtgacgacgagcg

SEQ ID NO: 417812 - DNA, 510 bp, Oryza sativa
gatgccgacacgaggtaagaagcccagaagccctagcgccgccgcagcagcagcagccatgggtatcgacctcgttgccggcgggaggaacaagaagacgaagcgcaccgcgccgaggtcggacgatgtctacctcaagctcctcgtcaagctgtaccgtttcctggtgaggagaaccaagagtaacttcaatgccgtgatcctcaagaggctcttcatgagcaagaccaaccgcccgccgctctccctgcgccgcctcgccaagttcatggaaggcaaggaggagaacaacattgctgtgattgttggtacagtcactgatgacaagaggatccaagagattccgaaaatgaaggttactgccctgaggttcacggagacggctagggcaaggattgtcaatgctggcggcgagtgcctcaccttcgaccagcttgctctccgtgctccgcttggggagaacacggtcctcttgaggggtcccaagaatgcccgtgaggccgtcaggca

SEQ ID NO: 417813 - DNA, 529 bp, Oryza sativa
tgatcgcttcaaacgacagtttgcacacctgggggagaactacagcaaaggagaaagaggttctccactgcagaggaagcatgcttctttaccgagggagagagtaggtgtatcaaaggatggttataaccaacaaaacaccaatgaccaagagaggagtgcagattccgttgcccgcactacagtaagccctccaatgtcacaagatgcacaacaacatggatctgctggccaaaatggtgtgacatccacagacttgagttcgaggagctatctgaagagtgcaagcattagtgcttccaagtgtgtcgctgtcaaggacaataaagaaccagaggatgattacatctctgaagaaatggaagggtcggtcgatggattgtctgaacaagtctccaggatgcactcctagtgcacaacgatgacgatgatcagtgcaagattctgtgaggcgcaccagatgctgataatttccaagcagaatgctgcactgcaagtttggactttggacaatgcaagtatgcaacag

SEQ ID NO: 417814 - DNA, 527 bp, Oryza sativa
gttccccaatcagaatccacgtatccacgagggcttagctacctgggtcaagaaggataggcccctggaggaaactgacattgttctctggtatgtgtttgggctcacccatatcccaaggctggaggactggcctgtcatgccagtggaacgcatcggcttcatgctcatgccacatgggttcttcaactgctcgccggcggtcgacgtgcctcccggctcctccgacgctgacatcaaggaagccgagtcgcccaaagccatccagaacggcctcatctcgaagctctgaagagctttccgctgctcttcgtttcgaagaaatgcaactgtggcatgtcactgctacgtatgcttctcgtcactatattgccccaaataaaagctactcccatggtgttattcctgtgttctgtactgttatgactttcctgctgcgctgtttgatttgtgaaatgtgtcctgttgcgccatttgatttgtgaacttgagccacgtctggtgaaattgggatggctgacgttatg

SEQ ID NO: 417815 - DNA, 465 bp, Oryza sativa
tctctgtctcgtcgtcctcgcatctccactcggggtgggcaagattaagatcggaatcaacggtttcggaaggatcgggaggctcgtggccagggtggccctccagagcgaggatgtcgagctcgtcgccgtcaacgaccccttcatcaccaccgactacatgacctacatgttcaagtacgataccgtgcacggccaatggaagcacagcgacatcaagatcaaggactccaagactctgctcttgggcgagaagccggtcaccgttttcggcatcaggaaccctgacgagattccgtgggctgaggctggtgctgagtatgtcgtggagtccaccggtgtcttcactgacaaggagaaggctgctgctcacttgaagggtggtgccaagaaggttgtcatcttagccccgagcaaagatgctccgatgtttgtctgcggtgtcaacgaggacaagtacacttc

SEQ ID NO: 417816 - DNA, 520 bp, Oryza sativa
tccgatttccgatctctatataaaagacctaggatttcgaaatttgtgggtccccctcccccttcgcgcgcgcgctctcttcccgccctttttttttccttcttcttcaccggtgggattgattcgtggggtgcggatctggtttttgggggtgtgtatggcggcggcggaggcggcggcggaggcggcggcggcgctggaggggagcgagcccgtggacctggtcaagcacccctccggcatcatccccacgctccaaaacatcgtgtcgacggtcaatttggattgcaaattagacctcaaagctatagctttgcaagcacgcaatgcagaatataatccaaagcgttttgctgcagttatcatgagaataagagaaccgaaaactacagctctgatatttgcatcgggtaaaatggtatgtactggggcaaagagcgaacaacaatcaaagcttgcagcaagaaagtatgctcgtattatccaaaagcttggctttgctgctaagttaaggacttca

SEQ ID NO: 417817 - DNA, 529 bp, Oryza sativa
ccgcgtcgcgccgtcgatccgacgccgatgcgggggccggcgccggcgacgacggcaggcgcgggggggaaggtgacgccgaacctggcgatggacgcggaggggacgcggctgctcaacctcaccgtgctgcagcgcctcgaccccgccgtcgaggacatcctcatcaccgccgcccacgtcacgctctacgacttcaacatcgagctcaaccagtggagccggaaggacgtcgagggatcgctgttcgtggtgaagaggaacaagcagccgaggttccagttcatcgtcatgaacaggcgtaacaccgataatctcgtggaggatctattgagtgactttgaatttgaacttcagcctccgtatttgttataccgaaatgctgcacaagaagtaaacggtatttggttttataaccaacaagactgtgatgctggtgcaagtgtttttggaaggatattgaatgcttacgccaaagtgccttcaaaagcccaagtaccctccacaaaagtgaagttgaggaattgga

SEQ ID NO: 417818 - DNA, 493 bp, Oryza sativa
attggattggattgttttgctggctcgctctctctctctctctcgtggtgtggtgtggacaagaaaggaaggaaagatggagggcggcgtagggggggaggtggaccacctcgccggcgagagggccaccgcgcagttcgacgttgaacacatgaaggttgcctgggctggctcccgccacgccgtcgatgtcgccgaccgcatggcgcgcctcgtcgcttccgaccccgtgttccgcaaggataacaggactatgctccccaggaaggagctgttcaaggacacactcagaaaggcagcccatgcgtggaagcgtatcgtcgagctccgtcttacagaagaggaggcaaatttgctaaggctatacgtggaccagcctggttatgttgatctgcactggggcatgtttgttcctgctataaaaggccaagggactgaagagcagcagaagaagtggctacctctggcctacaggtttccaataattggatgc

SEQ ID NO: 417819 - DNA, 443 bp, Oryza sativa
ttcttctcaggagatctttggccacacactggggtctctccgtggaattaagtatctctacaagtacaatgttttccagtatggctttgtggctcttgcgatactcacactcttttactatgcaatatttggatggcgaaagaggaaaccgacaggaagattccagctctcaaattgatttgtggtttgttctgtaaggaagcctgacgaattgaactacaaacatatttgttcacgagtgatagattggttagcaatgtatatgatctttgaaaccgctttctcaaagagctggagagtttatccatgtaaattagcaaccatgaagtataaggagaaaactgagatttcagtagggcacggacatggttgttaaaagcagaacccagctgcctttgtaatgtacacatttctcatcgcggctcttcttttccttgtgtatt

SEQ ID NO: 417820 - DNA, 419 bp, Oryza sativa
ttctcaatctccttggtcgcggaaccgaaggggcagtctaggcacagggtgtgggcggaggacctgctcctgccgcgggaggcggaaggggaggaccacttcgaccgcgtaccggactcgctcgtgctccttatctataaccgtctcgccgacgcgcgctcgctggggcggtgctcggccgtgtgcaagcggttcaactcgctcgtgccgctcgtggacgacgcctgcctccgcatcgaccgcgtcatcaccgacgcggccgacgccaactacacgctcggcctcaccgtgccgcgccccgtcggccgcggggtgctggcgcacctcctcaaggcgatgctgctcgccgtgctcaagccggtcgggcactgcgacgccggggtcaggagcggctgcggtagagagcgctcggggaagca

SEQ ID NO: 417821 - DNA, 469 bp, Oryza sativa
ctgtaagggaaaaggggattgggacgaaacttggggagaaacgtattccaagaaaaggatacctgcattgttcgtggtcaacatttcaagcggtgaagtgcgagctgtgaagggcataccgtgaacattaagtgttggccaagtgatttgggctccatcatcatcacatagcctgttttttgtggcgtggtcatctgataatggttaccaaaagacaccaaggaaacttggaattaaatactgctttaacagaccttgtgctctgtatgctgctcctgatcctttcatggaagaagctgataagccatcacttaatgtcagtaagggtgaaactgcacctacaaccaagttaacatcagagttgagcagtgcttttttcccacgattcagtccagatggaaagtatcttgtgtttatctcagcaagagtgctatagatagtggaacacacaatgcgacaattcaatgca

SEQ ID NO: 417822 - DNA, 442 bp, Oryza sativa
gctagttaccagccatggagtcgctgactctccggggatagccgtcaacggccgcgccgttgcgccgcgtccccgggcggcggcacgcggcggtgtccgtccgcacctccgtcggcgccgtcgagccgtacctctccgtgcgcagtgaacgggctgaagatgcccaacccgttcttgatcgggtcggggcccccgggcaccaactacaccgtcatgaagcgcgcgttcgacgaggggtggagcggcgtcatagccaaaaccgtaaccttggatgctgagaaagtcatcaacgtaacccctcgctatgcccggctcagggcggaccccaatggatctactaagagtcctatcatgggatggcagaacattgaacttatgagtgatcggactctagaaactatgctgagtgaattcaagcaactgaagaaagagtatcctgaca

SEQ ID NO: 417823 - DNA, 403 bp, Oryza sativa
ttttcatctagccacaagcaacacaagtccaagacaagtcaagcgttcgcaccaagtcaaaccgcgcctcactgccaccttcgtttgcgcaccatggagcttgccctggttggcaacccttcgaatggcgtggcgaagccgtcgtgcaactccgtcggctcgctgcccgtcgtcagctccaacgccgtcatcaacccgccggtgaccagcgcggcgggcgccacgctcggcaggcacctcgcgaggcgcctcgtgcagatcggcgccaccgacgtgttcgccgtccccggggacttcaacctcaccctgctcgactacctcatcgccgagcccgggctcaagctcatcggctgctgcaatgagctcaacgccgggtacgcggccgacggctacgcccgcgccc

SEQ ID NO: 417824 - DNA, 535 bp, Oryza sativa
  unsure (1)..(535): unsure at all n locations
cttcctccctccacccgtctcctccgtctccggcgccggcgccggcgagctcgccccccgcgattcgtgccctccgatcagaggcgaggcgggagaagagatggggctcacgttcaccaagctgttcagccggctcttcgccaagaaggagatgcggatcctgatggtgggtcttgacgcggccggaaagaccacaatcctctacaagctcaagctcggcgagatcgtcaccaccatccccaccatcggattcaatgttgaaaccgtggagtacaagaacatcagcttcaccgtctgggatgtggggggtcaggacaagatcaggcctctgtggaggcattatttccagaacacccagggtctcatctttgttgtggacagcaatgatagggaccgtgttgtcgaagccagtgatgagctccacaggatgctgaacgaggatgagctacgtgatgctgtgctgcttgtctttgctaacaagcaagatctgcccaacgctatgaatgctgctgagatcactgataagctnggactg

SEQ ID NO: 417825 - DNA, 462 bp, Oryza sativa
gctagagtgcgttgcgttgcgagcgggaagcgaaaactcgaaaccatggccacggccggcgacgagcagcagcagcaggcggcggcggcgcagacggcggaggtgacggaggcggcggcgaaggaggtggtgtccgtggagatgccggcgccggaggggtggacgaagaagtttactccccagagaggggggagatttgagattgtttttgtttcaccaactggagaagagattaagaacaagagacagctgagccagtatctgaaggcacaccctggaggccctgcatcctcagagtttgattggggaactggtgatactccaaggcgctctgctcgcattagcgagaaagttaaggctttcgatagcccagaaggggagaagatcccgaaacgttctaggaactcatctggcagaaagggcaagcaggagaaaaaggaggccaccgaaaatgaagaagcg

SEQ ID NO: 417826 - DNA, 529 bp, Oryza sativa
tcggctgcgacggcgttttcgtcggctccggcatcttcaagagcggcgaccccgcgcgccgcgcccgcgccatcgtgcaggccgtcacccactacagcgaccccaagatcttggcggaggtcagcagcgggctcggcgaggccatggttggcatcaacctctccgatcctaaggtggagcgcttcgccgcccgctccgagtagcccatccatcatcattcatatccgccttatccttctttcgctatatatatatgctccttccttcgattaagtaataattacatctactatcatcgtcgtgataagaagaaaatgaattagacaccagccagccaggactttgttggcttggctcacttcccttcccttcccttcttggtgatgatgtaacatggaacagcacatgtatcgattaggagcatgtattgctatttttgctaattgctgtggactggatccatttctatggaaactgtcatacttcccgttctgttggtacccatggccacttttacctactcgtactt

SEQ ID NO: 417827 - DNA, 527 bp, Oryza sativa
tagcctggcacggtgttttcgtgggctccggcatcttcaagagcggcgaccccgcgcgccgtgcccgggccatcgtgcatgccgtcacccactacagtgaccccaagatcttggcggaggtcagcagcggtctcggcgaggccatggttgtcatcaacctctccgatcctaaggtggagcgcttcgccgcccgctccgagtagcccatccatgatcattcatatccgccttatccttctttcgctatatatatatgctccttccttcgattaagtaataattacatttactatcatcgtcgagataagaagaaaatgaattagacaccagccagccaggactttggtggctaggctcacttaccttcccttcccttcttggtgatgatgtaacatggaacagcacatgtatcgaataggcgcatgtattgctatttatgctaattgctgtggactggatgcatttctatggaaactgtcatacttaccgatcttgtggtacccatggccacttttacctactcgtac

SEQ ID NO: 417828 - DNA, 479 bp, Oryza sativa
gatgtggtggtggtggtgtgtggcctccttggcgtccctcctctcgcgagggtgccatgcctcccccaagatcctagaacgcatgcccacaacctcacctcgctcgcaagaatcttatttccaccatcgccctccctcgggatcgatccaacccgatcatcaatcgcggcggggaaggaggaggaggggatggaggcggacgccgggaagctgttcatcggcggcatctcgtgggacaccaactaggaccgtctacgcgagtacttcgacaagtacggcgaggtggtggaggccgtcatcatgcgcgaccgcgccaccggccgcgcccggggagtctggttcatcgtctttcctgaccctgccgtggccgagcgggtcattatggagaaacacatgatcgatggccgcatggtggaggcgaagaaagctgttcccagggacgatcagcacgctcttagcacgagcggacgtaagcgctc

SEQ ID NO: 417829 - DNA, 416 bp, Oryza sativa
ccgcgacacgcgcgctagttcaactgcctcgcttcctccctcctcccgagcgaccgcgccatggctgccgccgccgtcaccaagtcgccgccggcgctggtgcccccggcggggcccaccccgggcggctccctcccgctctcctccatcgacaagaccgccgccgtccgcgtctccgtcgacttcatccaggtcttcccctcctccgccgaagccgccaaggaccaggccgcatcggtcgccgccatgcgggagggtttcgccagggcgctcgtccactactaccccgtcgccgggcgcatcgcggagccggtccccggggagcccgagatcgactgcaccggggaaggggtgtggttcatcgaggccgaggcgagctgctcgctcgaggaggcgcgcaaccttgagcgccccct

SEQ ID NO: 417830 - DNA, 422 bp, Oryza sativa
ctcacccaaaaaaaaaaaaaccaaccaatcaaaaaccaaaccatggcgcgccaccgccaccgcctcgccgccggcgcggcgctcctcctcctcctcctctcctccgccgccgcgctgtcgtcatcggcggcggagggggaggaggacccgctcatcgagcaggtggtcggcggcggggaggaggaggacgcgcagctggacgcggaggcgcacttcgcgagcttcgagcggcggttcgggcggacgtaccgggacgccggcgagcgcgcgtaccggatgtccgtgttcgccgccaacctccgccgcgcgcggcggcaccagcggctggaccccaccgcgacgcacggcgtcaccaagttctccgacctcaccccgggcgagttccgcgaccgcttcctcggcctccgccgcccatccctgga

SEQ ID NO: 417831 - DNA, 507 bp, Oryza sativa
ccatttcttcctttgggatcaaccatgatttcactgggatgtgctacccgctgctggtcagctccatgggcatcattgtctgcttgatcaccactctctttgccactgacttcttcgagatcaaggccgtgaaagaaatcgaaccgtcactaaagaagcagctcatcatttctacggctctgatgactgttggtattgcactggtcagttggttggcgctcccatacaaattcaccatcttcaattttggtgaacagaaggaagtcactaactgggggttgttcttgtgtgtttcgatcggtctatgggctggtctgatcatcggatacgtgacagagtactacactagcaatgcatacagccctgttcaggatgtcgcagatgcttgcagaactggtgctgccaccaatgtcatatttgggcttgctctaggatacaagtctgttattatcccaattttcgctatcgcgcttggtatctacgtcagcttcaccattgctgcgatgt

SEQ ID NO: 417832 - DNA, 431 bp, Oryza sativa
tgtcttctcctccccctcccggttcggttcgggtcggttcgggtccggttcgatttcggtttttccttcggttcgggggttggtgggaaagcatggcggcgccggatgttgagtaccgctgcttcgtcggcggcctcgcctgggccaccgacgaccgctccctcgaagccgccttctccacctacggcgagatcctcgagtccaagatcatcaacgatcgggagacggggaggtcgcgcgggttcgggttcgtgacgttctcgagcgagcaggccatgcgcgacgccatcgaggggatgaacggcaaggagctcgacggccgcaacatcaccgtcaacgaggcccagtcgcgccgctcccgatgcggaagcggcggtggctaccgccagccgcgcggatgcggaggctactgtggcggcggctaccgtggt

SEQ ID NO: 417833 - DNA, 493 bp, Oryza sativa
tcgctcgtcgccgctggaatgatcggcggcgtgggccgcagcaggcggcgtggccgtgcgccgccagttctgccctcgagcgccgccgcccgccgcgccgagcactccgtctcttgctggtactgtgactgcaaaatatattccttcaatgacatcatatttaatttgggatggagatatgctagatacatgagagcatggttttctgcaggggtttatttctctgttgttgctttagttggaatatcagtgatgctattgtgggactcaattggtgcagtttatttcagtggtcggtcatttagtacctggctacaaaatctactggcttccagctttggcatatcaataatggacatcgcagcaatcatagcatcaacagttttttctattgcttttcacgaatttggacatgctgttgcagctgcaagcgagggcatacagattgagtatgttgcggtattcgtagctgcactttttcctggggcattaa

SEQ ID NO: 417834 - DNA, 502 bp, Oryza sativa
tctccagcaccagcagcaagcttcttcttcaggaactcagcagcacttcacctgctgctgctgcgaccgccgtgaccatcaccacctcgtcgccggcgagaaacctgcagagggcgagggcgagtgcggcggagcaggggatggaggagcatggcaaggcggctgtcggctgggcggccagggacgactccggcgtcctctccccgtacaacttctccaggagggctcagaaggacgatgacgtcaccatcaaggtgctctactgcggcatctgccacactgacctgcatatcgtcaagaatgattggggcaacgccatgtaccccgtcgtccccggccacgagatcgtcggcgtcgtcaccggcgtcggcgccggcgtgaccaagttcaaggccggcgacacggtgggcgtgggctacttcgtcgcgtcatgccgcggctgcgagtgctgcgggaatgggtacgagaactactgcgccaagatggtaaccacctgccacgg

SEQ ID NO: 417835 - DNA, 337 bp, Oryza sativa
atactttcgtgcttcattctgagctggagaggagaggcaaagtaaaacctgttcatgttgttgacgttcctggtcatgcaaggctcaaacccaaacttgatgaagtcctgcctcaagcagctggaatagtttatgttgttgatgctcaagatttcttgtctaccatgcatgctgctgcagagtacttgtatgacatcctgacaaaggcaactgtagtgaagaagagggttcctgttctgatattctgcaacaagacagataaagttacagctcactcaaaagaattcatcaagaagcaattggaaaaggaattaaacaagctccgggaattaaagga

SEQ ID NO: 417836 - DNA, 391 bp, Oryza sativa
gtaaaacaaaataatttactttagtcccccaacttatacaaatttacagcaccaaaagtttcagaaagctgcgtgccaggccatgcggaactgcaggttatggcaaccgcagaagctgaaacagcaacagtaacatcaagttaactacaaagaaccgtaaaatagtatcatcaccatgttcatctagacatagtagaaaacattcacactctcgaaatgctctctatctttcagttttgtgttgctatacgtcttcttgttttgcatttttttttagtattccatttctgttcagcagagtggcagtggcgcgccattccattccttgaggcattcgagcagcgggtcgatgtgcttgcgctcgttgatggcgacgagcaccttgttcagc

SEQ ID NO: 417837 - DNA, 486 bp, Oryza sativa
cttccttacgggctcacgcgcggcggggagagagaggacgtcaccgatcggccatgtccgcagccaccgcgtgcgcctcgccggcggcggcgcgcccgcccctccacatccccctccgctcgcctccttccgccgcgcaccttccctgcgccgccgcctcccgccgggcctcctccgccgcttgccgctgcaccgcctccgcctccgcctccgcctcgccctccacctgggattggacccgctggacccgccacttcgccgacgtcgaccaggccgagagctacgcctccctcctcaagttccagctcgaggaggccgtcgacaacgaggacttcgcggaagcctccaagctcaagaaggccatactcgaggccacgggcaacgacgccgtcgcccaagtcatgtctgaactcaagactgctatagaggaacagaggtatcaggacgcctcaaggttgacaaagcttgccagaaccaacttggtag

SEQ ID NO: 417838 - DNA, 456 bp, Oryza sativa
gttgttctctttttccactacgcactagtagtaggactctggtattctcccatggcgactgcgaccgcggaggttgccgctgcggctgctgccgccggcgaggcgccgccgccgccgccgccagcggtggtagaggaggcgaaggaggctctggaggcaccgaagccggaggaggcgccgaaggctgaggagggggaggagaagaaggcggagggtgagaaggagaaggagaaggcgaagaaggagaggaaaccgagggcgaggaagccccgatcggcggggccacaccacccgccctacttcgaggtgaggggaaaatcaattgatcgatcgatgcagtgatcatgtattgggctgattcgagtttgtgagaattttgtgtggttttgagccagatgatcaaggaggcgatcatggcgctggacgggaacggcaaggcgggatcgagcccgtacg

SEQ ID NO: 417839 - DNA, 534 bp, Oryza sativa
  unsure (1)..(534): unsure at all n locations
ctccccaccccgaccagcggcgccagagcagaggcagtgaggccgagctcctcgcctcgcctcgccgtctccgcccgcgcggcgctgccgccgagccgccgccggcctcctcctcctcctccttcccggttcggatcgggcccaagagccggactgcagccatggcagatctgcaggagcccctcgttcgtccgaagaggaagaaggttttggtggactacttggtaaagttccgatggattctggtgatctttgtggtgctccccatttccgctctgatctacttcaatatctatttgggcgatgtctggtctgccatgaaatctgagaaacgtcgccagaaggaacatgatgacaatgtgcaaaaagttgtgaagcggctcaagcagaggaacccaaagaaggatggccttgtttgcacagctaggaagccctggattgctgttggcatgcgcaatgtagactacaagcgtgctagggcatttgagggtgacctttccgccttcaggaacattctngagattgacagagaga

SEQ ID NO: 417840 - DNA, 449 bp, Oryza sativa
ttttgattatttgctttctagagtagaaattgtgggaactaggtgtacaatttctagagagtagttgatctatttgctttctagagtggagaaattgtttgaactaggtgtacaacttttagagtgagtacttgatttatttgttttgatgttttctagagtagagaaattgtttgaactatgtagacatgtgaaacattgaaagcctatttggaagatctggcccaattttttgtttgtttggatggcataactgtgatttgttctgcaaccctgccatgcgtatgcgattttgggggaaagtacattgagaaatctctttctggatcactatgattttttgtctccaaaatgttttgatggagcttttgattgtctctaatgttctagtggtgacatcagaggtttgttctgtttgttaaaaaaaaatcggtaatgatgagttcagc

SEQ ID NO: 417841 - DNA, 143 bp, Oryza sativa
tttttttggaaacaaggatgctacaatatattattgcagaaacggcaccaaggccgtttctattattcataggtaacatcccaataacaagaggagacagagcaccaaccacacaccacattccactgaactcacccccaact

SEQ ID NO: 417842 - DNA, 531 bp, Oryza sativa
  unsure (1)..(531): unsure at all n locations
tgtgtgaggagctcgcgaactccaaaaccctaaccctctcggagcttcacatcggcggcggcggcggccatggcggagggtggcggcggaggaggagggtcggcggcgtcggcggcgctgaaggatcaggggaacgagcagttcaaggcggggaactacctcaaggccgccgcgctctacacccaggccatcaagctcgaccccgacaaccccaccctctatagcaatcgggctgctgcatttctccatctagttaagcttaataaggcactcgctgatgctgatacgacaataaaactcaagccacaatgggaaaagggtcatttcaggaaagggtgtgttttagagtcgatggaacactatgaggaggcaatatcttcttttcagatagctttgcaacacaatccacaaaatacagaagtttcaagaaaaattaagaggcttactcagctggcangggaaaagaagcgggctcttgatgtggagaacatgcgttctaatgttgatgttgcaaagaacttgattcactga

SEQ ID NO: 417843 - DNA, 474 bp, Oryza sativa
tcactcactaccctgcacctcgatcaattgaacgcgagcaaggaaagagagagagcgagaaagagagcggcaatggcgacgtcgcacgcggacgtggagaagggggcgaggaggaaggaggtggggaaggtgccgtcgccgctgtacccgcagcacgagggggagagggagtgggtgccgtggatcgtcccgtcgttcctcgtcgccaacatcgtcgtcttcgtcctcaccatgtacgccaacaactgccccctccacaccccgcctcgcagcggcaagtgcatcgcccgcttcctcggccgcttctccttccagcctctccacgagaacccgctcctcggcccctcctccgccacgctacagaagatgggagcacttgtgtgggacaaggtcgtgcacgagcaccagggctatcgcctcatcacctccatctggctgcatgccggtgttctgcacctggtcgccaacatgctc

SEQ ID NO: 417844 - DNA, 310 bp, Oryza sativa
gtgagaagaaaaaaacaactttggggggtgaactccgcgagccagcgcacgccatggaaaacattttctgacctggcggccaacgtttagagtggagacttgatctatttgtttcgatgctgacacagccgggcagattgtctgaccttgtagacatgtgaaacattgaaagcctatttggaagatctggcccaattttttgcttggttggatggcataactgtgatttggtctgcaaccctgccatgcgtatgcgactttggggggaaggacattggagaaatctctttctggatcactatgatttttt

SEQ ID NO: 417845 - DNA, 428 bp, Oryza sativa
atcgatcggagaaaatggtttccgccgccgccgcctcacgcgccggggtgtgaaggcctcacgccgccgccgccgcggcgcgcgcgagccccgccgcgggggcgcgggtgacgctcccgcggcgccgaagcgtccgatccgcggtgatctcgtcgtcggcgtccgcggcggcggtggcggcgtcggagccggcggcggggagggtgacgctgggcgcggggacggacggggcgctgtggccgaagccggcggtgctggtggcggagaagctgagcgaggccgggctggcggtgctgcgcgggttcgcggacgtggagtgcgcgtacgggatgtcccccgcggagctcctcgccaaggtggcgcagttcgacgcgctcatcgtgcgcagcggcaccaaggtgacgagggaggtgctggaggccgggcgc

SEQ ID NO: 417846 - DNA, 478 bp, Oryza sativa
ctttattatttgctttctagagtagaaattgtttgaactaggtgtacaatttctagagagtagttgatctatttgctttctagagtggagaaattgtttgaactaggtgtacaacttttagagtgagtacttgatttatttgttttgatgttttctagagtagagaaattgtttgaactatgtagacatgtgaaacattgaaagcctatttggaagatctggcccaattttttgtttgtttggatggcataactgtgatttgttctgcaaccctgccatgcgtatgcgattttgggggaaagtacattgagaaatctctttctggatcactatgattttttgtctccaaaatgttttgatggagcttttgattgtctctaatgttctagtgttgacatcagaggtttgttttgttttgtttaaaaaaaatcggtaatgatgagttcagcttacccaccttgtacagagttagtagtct

SEQ ID NO: 417847 - DNA, 514 bp, Oryza sativa
tggttcgtcgagagccggtcgttcccgctctaccgcttcgtccgcgaggagctcggctgcgtattcctcaccggcgagaagctcaagtcccccggcgaggagtgcaacaaggtgttcctcggcatcagccagggcaagctcatcgaccccatgctcgactgcctcaaggagtggaacggcgagccccttcccatcaactaagccaagatcccatcgccattgccattgccatacacccatcatcgaggaggagaggagactaaaaataaaagaaaacgaaccgcttcgtgtatcttcagacaaaaaagaccctgtattttcttcgttcgttgccgtttggtttatagtgatctcgtgttctttgtgttagctgctctgctcagcttgccagccatggcggcaaagcaagcggcttttctaagatattgtcgctaaactgtattttggggtgaaagtattgctactcgattccatccttaaaaaagtgtggtaatagaaatggtttgatcctatt

SEQ ID NO: 417848 - DNA, 552 bp, Oryza sativa
tttatcctcagcctatctgggtggagggccctttgttggagccaccagctccaggaaaaaaagcagaaaaggcacaacctgtactggctcttagctgagactggtcggggtgccaccaaaaaaataggataggatagacttcgttcagcgtacagctaccgagtcaagagcagatcgcacctttgctgctggagcttgaagatggctgctactgaagctgcggccacccccgccactgcccctccccagaattcatccctgtatgtgggtgatctggatcgtgaggcaactgaagcgtccctgtatgagttgttctcccaggtcggccctgtggcatccatccgtgtgtgccgtgatgctgtgacccgtcgttcactgggctatgcctatgtgaactacaacagtgccttggactcagccgctgctgagcgtgccctggaggccctgaactacactgaggtgaatggcaagcccattcgcatcatgtggagccaccgtgaccctcaattcaggaagtcaggcgtgggcaacatcttcatcaagaaacctgac

SEQ ID NO: 417849 - DNA, 514 bp, Oryza sativa
ggctaggggagagaggagagcgcgcagcgggagcagcagaagccgccagccagccatggcggtgggcgcgaccgccacgaagctgcacatgccgtccgcgggcggccgccgcccgtccctgttccacctcgcggccgtcgcggtgctctgcacggtgtcctacctcatcggcatctggcaccacggcggcttctccgcctccccggccggcggcgtcgcctcctccgtctccatcgccaccaccgcctccgtctcctgcgtctcccccaccccgacgctccttggcggcggcggcggcggcggcgactcctcgtcgtccgcgccgctcgacttcgcggcgcaccataccgcggaggggatggaggtggcgtcgggccaggtgcaccgcacgtacgaggcgtgcccggccaagtactccgagtacacgccgtgcgaggacgtcgagcgctcgctgcggttcccgcgggaccggctcgtgtaccgggagcggcactgcccgtcggagggcgagcgg

SEQ ID NO: 417850 - DNA, 473 bp, Oryza sativa
tggtttaggatcttaattggtgatgatgaacactgctggagtgataatggtatctctaacattgagggcggctgctatgctaagtgcatagatctttctcaggagaaagaacctgacatttgggatgcaatcaagtttggcacagtgttggagaatgttgttttcgatgagcactcccgtgaagttgattatacagaaaaatctgtcacagagaatacccgtgctgcttaccctattgaatacatagctaatgctaagataccatgtgttgggccacacccaaagaatgttatcctacttgcatgtgatgcatttggtgtcctccctcctgtcagcaagttgagccatgcacaaaccatgtaccattttatcagtggctacactgcattggtcgctggaactgaagatggtatcaaggaaccacaggctacattttctgccttgtttggtgcagcttttataatgctccaccc

SEQ ID NO: 417851 - DNA, 467 bp, Oryza sativa
tacctcccaaaacacccacccggtttaccagagatccgcgcccgccacttgtaaacctgctgcacccatggcgcccagagcagctacggtggagaaggttgctgtggcgccacccaccgggcttggtcttggcgtcggcggaggtgtcggagccgggggtcctcactacaggggcgtccgcaagcgcccgtgggggcgttacgcagcggagatccgtgaccctgccaagaagagccgggtgtggctcggtacctacgacacggcagaggaggccgtccgcgcctacgacgccgccgctcgagagttccggggtgccaaggcaaaaacaaactttccgtttgcatcacagtcgatggtcggctgtggcggcagccccagcagcaatagcacggtagacaccggtggcggcggagttcagacgcctatgcgggccatgcctctgccgccgactctggacttggatttgt

SEQ ID NO: 417852 - DNA, 398 bp, Oryza sativa
cagctcaactgcacaaactggtccttgttttcaacaacactccaacagtcatgctgatacaggtagcaatgcatagcggatttacagccaaacccagacagtactagcataagcacaacgcatgtgccaaaatttattcttgttcatagagcggaaaccgcttctttattacattgcactggcattactacataaggtttgcgctttgcctcctagcacaaaacttgggccatctctcatcttcactggagttccttcaggaagtcggcgttatcaaccaaaaccactttccagccatcagggtcaaggaaagaggcaatctttgtgttgagccctggtagtggacctggctgccgcaaaatctttccccctagttcttttgtaaccaacttaacagc

SEQ ID NO: 417853 - DNA, 367 bp, Oryza sativa
aataaagaaagtaaatattccaggagtgtctccctctcccagctagcccaggaagcagcacagcctaacagctacaaaaatttccaaacatagttgcatacggaaaagagaaaaacatggaagccgtccttaaccacaattcaaatagaccccgtccttaccactcctcccaaacgagaaagttggtcatattaaaacaaaaacaaaaacaaacttttatccagaaccttacttcctaagacataatctagagaaggtcagcgacgttggccggcagctcctcgatggtcacattgtagaacctctggatgtcgaacagcatccttttattatcgcgggtgacaaagttaatgggaacttcctttct

SEQ ID NO: 417854 - DNA, 412 bp, Oryza sativa
ttcacctttaccctcaacttctccaagggttccagccaggtcattgcacagtattaccaactaatccgcctaggctttgaggggtacaagaacatcatggagaactgccaggagaacgcgatggtgctgaagcaggggctggagaagacggggcggatcaacatcgtgtccaaggacaacggcgagccggtggtggccttctccctcaaggacagcgcccggcacaaccagttcaggatctccgacttcctgcggcgcttcggctggatcgtgccgggctacaccatgccccccgacgcgcagcacgtcaccgtgctccgagtagtcatccgcgaggacttcaggcgaacgcttgccgagcgccttacgcttgacgtcgagaaggtggttcacgagcttgaagcgcttcccg

SEQ ID NO: 417855 - DNA, 500 bp, Oryza sativa
cttcttcttcctcctctcccctctcgccgtgctggtggtgagtgaggcggcgagcggcgagctcctccggtgatccgaggctcgccggccggcgagagcttgcctgtttcgggaggttttcagggtgatctgagagcacagcgagccgatggcggcggcggcgaacggggcggcgtgctgcggtggcgcgacggggccagggtacgcgacgccgctggaggccatggagaagggcccgagggagaagcttctttacgtcacctgcgtatacaacggtactggaattaacaagccggattacctgggtacggtggacgaggaccccaatttccctacatactcccaagtgatccacaggctcccagtcacccatgttggcgatgagctgcttcactctggatggaacgcttgcagtttttgccatggtgaaccatcggctagccgccgttttttgaatttgccttccttgctgtctggccgtgtgtatgtcgttgacacgc

SEQ ID NO: 417856 - DNA, 323 bp, Oryza sativa
tcgacggccttgtcggggtcggagccgacgatgagcgtcgccgcgccgtcgccgaacagcgcctgcccgaccatggagtcgaggtgggactcggagggcccccggaacgtcaccgccgtgatctcggagcacacggcgaggacgcgcgcgccgcggttgttctcggcgaggttcttggcgacgcggagcaccgtgccgccggagaaggacccctgctgggacatcatgaggcggatcacgttggggctcaagccgagcatattggcgagctggtagtcggttgcgggcatggggacccccgccgtggtgcataagacgaggcg

SEQ ID NO: 417857 - DNA, 429 bp, Oryza sativa
tctaaatttcctttgcgtcctctcgattcctcagcaaccatgtcggcctactgcggcaagtacaaggacgagctcatcaagaacgctgcctacattggcactactggcaaggcgatccttgctgatcatgagatcagtgcgaccatcggtaagcgctttgccagcatcaatgtcgacatcgttgaggcgaaccgccggtctctccgtgagctgctcttgaacacccctggtgccctccagcaccataagggaggtgatcctcttagaggagaccctgtaccagaagaccaaggacggcaagccctccatggatgttctaaaggaggccggagcacatgctggaattcaaggcagacaaggataccgttgatgttgaccgccccaccaaggagaccaccacccagggccacgatgatcttggcatgcgtt

SEQ ID NO: 417858 - DNA, 478 bp, Oryza sativa
gtgttgacttcgacacaatctatcgatgtcgatgccgatgccaatactcctcctcctcctgctcctcccccagggccagggccacggcggcgccggcgacatctgcatcgtgggcagcggcatctccggatcatccaccgccttcttcttcaccaactacaccaccgccctctccggtgcccagctccgcgtcttcgagcgccgcgctaaggtcggcggccgcctcgccaccgtcaccgtctccggcgatcacttcgaggctggcggctccatcatccacccacgaaatctccatgtgcgccgcttcgccgacctgctaggcctcgaagccaagaccgatggcgacgatgactggctcgggatttgggacggccaccgcttcgtcttccagacgctccgcccgctaccgcccgggacgtcctggctccgccgcaagctgcacacccttgttaactcgctgcgcctctttagcgctatg

SEQ ID NO: 417859 - DNA, 481 bp, Oryza sativa
ttgtcttcgtactcgcctctctccgcgccctcctccgccgccgctcgccgccgttcgtctccgccgccaccgccgccgccatgagggagtgcatctcgatccacatcgggcaggccggtatccaggtcgggaacgcgtgctgggagctctattgcctcgagcatggcatccagcctgatggacagatgcccggtgacaagaccgttgggggaggtgatgatgcttttaacaccttcttcagtgagactggtgctgggaagcatgtcccccgtgctgtcttcgtcgatcttgagcctaccgtgattgatgaggtgaggactggtgactaccgccagctcttccaccctgagcagctcatcagtggcaaggaggatgcagccaacaactttgcccgtggtcactacaccattggcaaggagattgttgatctgtgccttgaccgcatcaggaagcttgccgacaactgcactggtctcagggc

SEQ ID NO: 417860 - DNA, 462 bp, Oryza sativa
ttgtttttttttgaagtgataatttaaatacttaatagtaatagactctttgatggagtattacaacatgcagcagtggcattaatacgccagtacattaattaagttacacatatgcaggctccattttggtttcttttaatttatcgtattacagaatttctgtagccttgcagatgatcacttggatatcatgtactagtaattaacaataggatgcatacaaaagatggcccaacgacaacagaagatgcgtgcatctgacattgtctggccttatttgttggtagtactccaattaattaacaagagatgatgcattcttgtgccttagtttcttcacatgcttggcttcacgttgagcctattcgcaatcttcacccccaacgactcatcacactgggagaggtagttgacccagatggcgcggagctcaggggagaccttggggtgcgcgagctc

SEQ ID NO: 417861 - DNA, 467 bp, Oryza sativa
ttacgccggactctccccttctctctgtctcgctccttcgttcgctcgctttatcccccccgaataaaggcgagaagccgcagcggcggacgaagaagagggcagatagaaatggcggcggagacgttcctcttcacctccgagtccgtgaacgagggtcacccggacaagctgtgcgaccaggtgtcggacgcggtgctcgacgcgtgcctcgcccaggaccccgacagcaaggtggcgtgcgagacgtgcaccaagaccaacatggtgatggtgttcggcgagatcaccaccaaggccaccgtcgactacgagaagatcgtccgcgacacctgccgcggcatcggcttcgtgtccgacgacgtcggcctcgacgccgaccgctgaaggtgctcgtcaacatcgagcagcagtcgcccgacatcgggcagggggtgcacggccacttcaccaagcgccccgaggag

SEQ ID NO: 417862 - DNA, 469 bp, Oryza sativa
gtgaacgtgaagggtgactactacaggtaccttgccgaatctaagaccggggctgagaggacggatgctgctgagaataccatggtggcatacaaggctgctcaggacattgctttggctgagctgcctgctactcatccaattaggcttgggctagctcttaacttctcagtgttctactatgagatcctcaactcgcctgatcgtgcttgcaacctcgcaaagcaggcttttgatgaggccatctcggagctggacaccctgagcgaggagtcctacaaggacagcactttgatcatgcagctactccgtgataacctgaccctgtggacttcagacatctcggaggacaccgcggaagagatcagggaagctccgaagcgcgactccagcgaggggcagataagccggctttatgtgccctagaagcttgtagctagcgctttgctactgtgtaaagacacctatg

SEQ ID NO: 417863 - DNA, 471 bp, Oryza sativa
acacatggaagatgtttacacacaaacacacttctttgggttgtcgctagcccttgataggagccagcaggctagctgacacgtaccggtctctggtagtactaacagagacagcaagctactaggaacagagtaacaagataagatagcaacatactagataattaattacgtattagataaccacaaggaccagcaaacatggcgtgacagagagatcgaccagcctccgatcaatgggattattcagttcagcgatggctgctcctggtctcgtcgctgtacagccagtcgtagacggtgggggagttgggctgggggcggtcgaagaggttggcgccgaggctcttggtggcgaggttgctccccgggtggaacacgctcctccacacgttgctgccccgcggcgtcgtcgtcgtcgccgtcgtcggggacgaagacgacggcgtcaccggcgtcgtcggggtcgtc

SEQ ID NO: 417864 - DNA, 491 bp, Oryza sativa
ccacgccccaccgtctactttcaacaaggggcgtgagcgtggccgtggtggtgttgatggcgatggcggcggtggcggaggcgcaggctcccgctgccactccgacggcgggcgccacggcgccgtcgaacgtgacggcggtcctggagaagggagggcagtacacgacgttcatcctgctgatgaaggagacgcaacaggacacgcagctgaacagccagctgaacaactcctttaacggcaacggttacaccgtgttcgcgcctaccgacaacgccttcaacaacctcaagccgggcaccctcaacagcctgacgcaacagcagcaggtggcgctcgtccagggccacgttctcccgcagttctacttcatggactcctttcagacggccagtaaccccgttcgcacccaagcgttcggcaccgacggtccctacacccttaacatcacctccaccaccaacaacaacctcaacgtcttcaccggcgtc

SEQ ID NO: 417865 - DNA, 297 bp, Oryza sativa
gaaaggaaactcacccgttttattacttgttccattaaacccataacactaaggtacggggtgaaacccggaaagttaaaaaacaaaaactgcattagaagagtgaggccctgcttgctgttccatgagaggtgcacaaaaacccagcgcacgagcagggcatccaggccacacgcaagatggaaacggatgggatgccgacgccgccgacggtcgatcctccgcccggtgatgattgcggcgaagacatcgttcagagtgcacgcagaggcggagcggcgtgcgtcgcggctcggt

SEQ ID NO: 417866 - DNA, 478 bp, Oryza sativa
tcacactttctacccccaaacttgccctccaatctatctccgccgccgccgccgcctccgccgcgagagggcgtcgccgagctgcgcgggaggctcgcctcccgcagcatctggccggattcgtcgtagtcgaggcagctgtaagcgagagagagggagatggccgcggccgccgggaaggcggcgatggagcggcaccagtcgatcgacgcgcagctgcggctgctcgcgccggggaaggtatccgaggacgacaagctcgtcgagtacgacgccctcctcgtcgaccgcttcctcgacatcctccaggacctgcacggccctcacctccgcgaattcgtgcaggagtgctacgagctgtcggcggagtacgagaacgacagggacgaggcgcggctcgacgagctggggaggaagcttaccagcctgccgccgggggactccatcggccgcttcagcttcttttcgcaccatgctc

SEQ ID NO: 417867 - DNA, 425 bp, Oryza sativa
ttccattttatcagtcttccaaaaaacaatcgaccacagccttacctggtgctggtgaggtgagcagagctatcccaattccaattccaattcacaattcccaaagtggaggagaagatggtggcgccgtcgcccgacgccgggaagccgctggtgatcctgccgcggccgctctacccggagttcgctgccgcgctggacggccgcttccgctttgtgcttgccgccgacgcccacgagggcaacgcaacaaaagccagggccctgctcgtgccggctttgacgcctgtgtccgctgatctcgtggcttggctccccaagctggagatccgtgtggccacgtccaccggcgttgaccacattgacctctacgcgtgccgccgccgcgggatcaggggtaccaacgccggcgaggtgtttgcccc

SEQ ID NO: 417868 - DNA, 480 bp, Oryza sativa
tttgtccgttctcctcctcccttctcgcggaggccgccgcaaccaaaaaaaaaaaagtctaaccctagatccaggccccgcgtctccggcgatctcccggccatggcgactcgccgggccctctcctccctcgtccgcgccgcctccaggctccgcggggcctcgcccgccccgcgcccgcgcgggccgctccaccgaccgtcgccatcggggtacctattcaaccgcgccgccgcgtacgccacggccgccgcggcgaaggaggcggcgcctcccgcgcccgcgacggggaaggccacgggtggaggtaagatcaccgacgagttcaccggcgccggcgccgtcgggcaggtgtgccaggtcatcggcgccgtcgtcgacgtgcggtttgacgaggggctgcctcccatcctcacggcgctcgaggtgctcgaccacaacatccgcctcgtgctcgaggtggcgcagcaccttggcgag

SEQ ID NO: 417869 - DNA, 465 bp, Oryza sativa
tttcaacaatggcgaggagcgtagccgtggtggtgttgctggcgatggcggcggtggcggcggcgcaggcgccgggtcccgctgcgacgccggcggcgggcgccacggggccgccgaacgtgacggcggtcctggagaagggagggcagtacacgacgttcatccggctgatgaaggagacgcagcaggacacgcagctgaacagccagctgaacaactccttcaacggcaacggctacaccgtgttcgcgcctaccgacaacgccttcaacaacctcaagccgggcaccctcaacagcctgacgcagcagcagcaggtggcgctcgtccagggccacgtcctcccgcagttctactccatggactccttccagacggccagcaaccccgtccgcacccaggcgtccggcaccgacggcccctacaccctcaacatcacctccaccaccaacaacaacgtcaacg

SEQ ID NO: 417870 - DNA, 443 bp, Oryza sativa
ttcgtccgttcaagtactcccaggtcaacaaggccaaaagggccagtgagtggctagcttaattagctaagctcatagtcatagcaatggctggagccgtgctggtgaggagaatggtggtggtggttgccattgccgccttggtggcgcccggcgaggtggcggcgcagctgacgccgacgtactacgacggcagctgcccgagcctgcagtccatcgtgaggtcggccatggcggccgccgtgcagcaagagccccgcatgggcgcctccatcctccgcctcttcttccacgactgcttcgtcaatgggtgcgacgcgtcggtgctgcttggacgactcgtcgacgatcaccggcgagaagaacgccgggccgaacgccaactcgctggcggattcgagggcattgactccatcaagtcgcaggtcgaggccgccctgccc

SEQ ID NO: 417871 - DNA, 371 bp, Oryza sativa
cccattttccgttcgaagaaggaaaaaaaaaggaggaaaagaaaagaggaggaaagcgaagaggttggagagagacgctcgtctccacgtcgccgccatggccgcccgcgccgccgccgccgcgttcctgctgctgctcatcgtcggcgcggccaccgcggcgccggacatgtcgatcatctcctacaacgcggagcacggggcgcgggggctggaggaggggcccacggaggccgaggcgcgcgccgtgtacgacctctggctcgccgagaacggctgcggttcggcccaacgcgctcggcggtgagcacgagcgccgggttcttcgtgttcttgggacaaccttcaagttcgttgacgcccacaacggc

SEQ ID NO: 417872 - DNA, 411 bp, Oryza sativa
ttttgtccgttccactccatttctgagctcttctagtttgagtgagagagcagcagaagggagtagtgcaagatgccgatccgcaacatcgccgtggggagccaccaggaggtgtaccacccgggtgcactcaaggcggcgttggccgagttcatctccaccctcatcttcgtcttcgccggccagggctccggcatggccttcagcaagctgaccggcggcggagcgacgacccccgccgggctgatcgcggcggcggtggcccacgccttcgccctgttcgtggcggtgtccgtcggcgccaacatcttcggcggccacgtgaacccggccgtgaccttcggcgccttcgtcggcggcaacatcaccctgttccgcggcctcctctactggatcgcccaacttctgggc

SEQ ID NO: 417873 - DNA, 394 bp, Oryza sativa
gaaaggaaattaaactgatttattacttgttccattaaaaccatcacactcgggtacgtggtgaaaccgtgaaagttaaaaaacaaaaacagtagtagtagagtgaggccctgctcgctgttacatgagaggtgcacgaagaaccagcacacgagcagagcatccagcccacacgcagcaaggaaacggtagggatgccgccgccgccgccggccgatccgccgcccggcgatgatgcgtcgtcgtcgtcgttcaggtgcacgcggaggcggagcggcgtgcggcgcggcgcggtcgagaggtgatgagtagttgacgcggagcagatatatatggatggatggcgtcgtcgtcggtcggacgacggcgaggtcgcgcgcattacgcgcgggcg

SEQ ID NO: 417874 - DNA, 320 bp, Oryza sativa
ttattttcggtcttggagctgttggtcttgctgctatggaaggtgccaggctgtctggagcatcgaggatcattggtgtggacctgaaccctgcgaaattcgaacaagctaagaagtttggctgcactgacttcgtaaaccccaaggaccacagcaagccagtgcacgaggtgctgattgagatgaccaacggtggactcgacagggccgttgaatgcacgggcaacatcaacgccatgatatcctgcttcgaatgtgtccatgatggatggggcgttgcggtgcttgtcggcgtgcccaccaaggatgatgtgttcaag

SEQ ID NO: 417875 - DNA, 444 bp, Oryza sativa
ttccgctttttttttttttttttacaagatcaaatatactgtaaccactttatttgtcacactggtgttcgtaaggttcgggtgaagtgaaaacaaaacagtgagcagaaccaaaatcgtcactgcttagctccgagctgaacgcggctgggctaacgaaggaactgacaagctgacgaagtgaacgccgatagcccgcgaggaccaaattctcatcggccccgatcatggctcgcacgagcatcccctgccggacgacgcggctcggaaactccgatcccactggtccacaggcgcagcttcagcgtgagggacatggcgcgggtgcttctccctcttatcaccctttatctgcttcagggcgtgtttcagtgctggaagaagcgcctacatgcactccgaacggcgtttgggttcccgggcatgttgatgataagtgttgat

SEQ ID NO: 417876 - DNA, 308 bp, Oryza sativa
gattaaaaaaagtgcctataggtgagtatggttggacagaacgcccatgtgtgaattgccattctaacacttgtttactatgcagtaccttgctggggatagatgaaaccgactggtacataccagctctcaaactgatcagtggttggtgatgtaagggagtctgacgtaatgacctatatgcatattgggtaacgagtgattgatcggctagcaatgtatatgatctttgaaaccggctctttcaaagagactggagagtctatccatgtaatcttaccaaccatgaatgtataaggtggaaactg

SEQ ID NO: 417877 - DNA, 455 bp, Oryza sativa
  unsure (1)..(455): unsure at all n locations
acaggaaacattgtctacaacaagctcaaggaaaggtctgaccagtttgttgtgagaggtttagtgagaacagaggaaagcaaacaaaagattggtggaggcaatgatgtttacattgccgacataagggacagagatcatcttgtgcctgctgttcaaggtgtcgatgcgctcataatcctcacgagtgctgtgccaaagatgaaacctggttttgaccctagcaaaggtgggaggcctgagttttactatgaagatggaatgtatcctgagcaggtggattggattggccaaaagaatcagattgacactgccaaagctgctggagtgaagcatatcgtgcttgtgggatccatgggaggaacaaatnctaaccatccactgaacagcctaggcaatggcaatatactggtttggaagcgcaagtcagaacagtatttggcagacagtggagt

SEQ ID NO: 417878 - DNA, 476 bp, Oryza sativa
ttttccgttagacaataataattaagccactactactatacagagacatcgatgaggaagcagttagtggtggtgttggctttgctggtggcagcagcagcagccatggcgatggctgatgaggaggacgtgacattgacggacaaggacctggagacggaggagagcatgtggagcctgtacgagagatggcgcgccgtgtacgcgccgtcgcgggacctctccgacatggagagcaggttcgaggtgttcaaggcgaacgccaggtatatccacgagtttcaaccagaagtcgaagggcatgtcctacgtgctcggcctcaacaagttctccgacctcacctacgaggagttcgccgccaaatacaccggcgtcaaggtggacgcctccgccttcgttactgttaccactttcttttccgacgaggagctccccgtcggcgtgcccccggcgacgtgggattggagactgaatg

SEQ ID NO: 417879 - DNA, 438 bp, Oryza sativa
  unsure (1)..(438): unsure at all n locations
aataaatcgcacataatagtaactatgatcttcaaattcacaaattctccatatgaatattacatacatgcagaatgtgaaggaaaattaaccaaacttggaagcaccagcgggaagcaacatatggcggacatagttcaaaggaatggagaccatatgcatggatacatagtacataatagtgcagtagaatctatccacgaggcgaaatgcaggatgcgaaggctgaattcgttgatctagtgctggaccgaggcggccatcttgtacgcgtatctacactttagcgccacctcgcgcgcgccgccgccgncgatctcaggcgttgctccggtaggacccgagcttggcggcgctggccctcagcacgtactggtggtaggcggcggcgatggcggcgccgatcagggggcccacccagaagatccattggtcatc

SEQ ID NO: 417880 - DNA, 374 bp, Oryza sativa
ggggaaacgaaaaaaaacattattggaaaaacaacatcttcttcttcatcttcttaggggaccccacccccacccgatcataattttggggcactaaacccattttccccaacccaaaaaccacgaacccgctggccccaaatccctccaaccccaattaacccctggtaagctacgggcccccactttacttgccggggaccaaattgggggggtccccccaagcctttttgttgaccgggcccgcgagggggcccgccagggtcccgagggggcccctgccggggaccatggcccggaccaaaaaacccaacctggagaacatggggagggggccggtcctgaaccccctcaccctgagccccccgaacccc

SEQ ID NO: 417881 - DNA, 354 bp, Oryza sativa
attcgaatatatatatatataaaaaagcagacagggtacacccattaaaacccaaaatcaccggaattgaacatcaaaaggccaacccaagccgcagcagcatcagccagcagcaaacgacatgattccccacccttttgggtgaaaaacaagaagccccaaaagaaaaaaaccatgggcgaacaccttgatcgagcccaacaatggggatcgatcaccaatcacctacttggggaacccgatggcccaggcgttggcgtaaatgtagggggccctgaagccggggaatccgggggggcgggcgagctccctgaaccccctttagaacctctccttgcccccggggttgggggc

SEQ ID NO: 417882 - DNA, 389 bp, Oryza sativa
tttccactttatttctgagctcttctagtttgagtgagagagcagtagaagggagtagtgcaagatgccgatccgcaacatcgccgtggggagccaccaggaggtgtaccacccgggtgcactcaaggcggcgttggccgagttcatctccaccctcatcttcgtcttcgccggccagggctccggcatggccttcagcaagctgaccggcggcggagcgacgacccccgccgggctgatcgcggcggcggtggcccacgccttcgccctgttcgtgggggtgtccgtcggcgccaacatcttcggcggccacgtgaacccggccgtgaccttcggcgccttcgtcggcgggaacatcaccctgttccgcggccttctttactggatcg

SEQ ID NO: 417883 - DNA, 331 bp, Oryza sativa
gggatgaaagcagagggagattatattaagaagcctggcccgcatgaggagatggagcaggagtccctgatgagaccaccatgatgatagatgatccatccaagctagctagggatccatccaacattgatcgacacacgcacacactgacaacgacgacgacgggtttatttaggcggcagagcaaaaggcaaggcctgcctacatataagctgggtactaatgcaagcaaattaaggcctcgatcaaagctctgatcgacagtagcagcatccatacgataaatcctcatgcagccgggcgacgacgacgattgattcagttgcaggag

SEQ ID NO: 417884 - DNA, 373 bp, Oryza sativa
gggtatatagccggagctttgttttcacatatcctcacccaacgataattgtagtactcttacaataaaaccggtcggagagggagggaagagattattacatatgtgttaagagcagaggccattgagatggtacataaccaaattgtaaaataaaaatatatagcatattatatattgatatatcatcaacatagcccaaaacaaagctgcatactattattataggcagcaatccaccagcgcgatgcttgatcttagcttagttgccaccagactcctcgcaacctgggggcttgtaggcgatgaagctaatcaactgcacctgcctgacgttgtcgaagccgatgatacggacaaaggcatcggggta

SEQ ID NO: 417885 - DNA, 243 bp, Oryza sativa
ctgggaccctcatcaggcatctgattaaatttgaataaaccgaacatatgtgtccaaaatcacaagggagaaccccaggttgcaataggtattacagtctttgaatagaagaaaatgataacagattggccggttgaaaactttggccacgcttatgaagaaacagccccaaaaagggagaaacctgccggaggacggggataacaggtcctcttggcttagcattcttggggcccaagaatt

SEQ ID NO: 417886 - DNA, 400 bp, Oryza sativa
gataagagggtaaaaccattgcattccaaatttatgagaaaactgaatgggtgcacctagaccatataaaagcacaagctacatgaatgttccttccatgcataccgcacatgacacttcattattcaaagtacagaattcagacctagaatcataaagacaacagtagtgaattcaaagagaacccacaaagagacaccacacagagttactgataccattcaagtcctcaaatggccgcaccattactctttctcgccagcttagtccactctgtgtggaacgaacctggacggtcaatgcgctcataggtgtgtgccccaaacaagtctctttgtgcttggatcagatttgcaggcagtcgactacacctgtaggtgtcaaagtatgaaaggctagc

SEQ ID NO: 417887 - DNA, 250 bp, Oryza sativa
ttccgcggccaaaccagtctaccgcaaaacggcttagcgcgctgtcgaatactcagaacgcatagtggcctactgcggcgatgtcaaggacaagctcatgaagagcgctgtctacgtcggggctcctggcaagggtatactagctgcaactgagaccaatggcaccatcggcaagcgctatgccaggatcaatgcttggaacgatgaggagaaccgctgctctcttgacgagatgctatttaccacccct

SEQ ID NO: 417888 - DNA, 411 bp, Oryza sativa
ttagacttttcgtttacgagttcatgacgaggggcagcttggagaagcatctcttcaaaaagtacgcagcgtcgttgccatggtcaacacggttgaagatcgccataggtgccgcgaaagggttggcctttctccatgaagccgagaagccggtcatctaccgagacttcaagacctccaacatcttgctagactcggacttcaaagccaagctctcagatttcgggctagcgaaggacgggccagaggatgacgagacgcatgtctcgacacgtgtcatgggcacacagggatacgctgcaccagagtacattatgacagggcatctgactgcgaagagcgacgtgtaccgcttccgcgtggtgctgctggagctgctgtccgtgaggaagtcggtggacaagagccggc

SEQ ID NO: 417889 - DNA, 426 bp, Oryza sativa
ttcagagttatgagagagagagagcagcagcaggtagcaggtcgaggagggtttgtggccatggcgatcctgtcggatgtggccaccgaggtgctgatcccgatcgccgccatcatcgggatcgggttctccatcgcgcagtgggtgctggtcgcccgggtcaagctggcgccgtcgcagccgggagcgtcgaggagcaaggacgggtacggcgactcgctgatcgaggaggaggaagggctcaacgaccacaacctcgttgacaagtgcgccgagatacagaacgccatcgctgaaggagcaacatcgttccttttcaccgaataccaatacgttggcgttttcatgtcgatattcgcggtggtgatcttcctcttccttgggtccgttgagggaattagcccaaagacccacccctgcacatac

SEQ ID NO: 417890 - DNA, 440 bp, Oryza sativa
ttttggttttttttttttttttttttttttttttttttttttttttttttttttttaaccaaagggaacccaattcatgggaacatcacgggcaaaaaacccccaaccctggggggagggatagggggcttctcgacccgagagagcccctggacacaaaaaccacccgacccgaggaaaaaaagattctgacccggataggtaaggataaccggccccgaggggcccccccaaaaagttcctccagttcccgccggaatccccgccgtagccccccccacgggtgccaccgtagccgccgccgccggcgccacgggcgccgtctaaccggcgccgccccccgaacccccctcacggggcccgtagccggcgccgccacctttttcggaggcggcggcttccaaaacgggggcggaaccgccccccccccccgggatgcc

SEQ ID NO: 417891 - DNA, 416 bp, Oryza sativa
ggaaaaaactaaccactgcattgcataacaatttcgttctcccgagcaatttacatgttgggttcagagaaaacaatactatgaggatgcctgaactaccacccattggttgtcaaaactgtgcctgcaaatcgggcacatgaccttcccagcatcgccggtgcacctcctccatcctttccaccggattgcagatgccggtgcagttccagtcgaatgacgctgcgcacgggttcccagcctgcgccttccattcgcagtctgggggagtgccacagcaaaggcttttttcatgcacatgcttaacatcccaatccaatcaaccaagaaccaaatgacacgtctttggttgaatatttgggccagatatgccgatttgctgatatgaaggttgctaaatctcttgttacagcata

SEQ ID NO: 417892 - DNA, 443 bp, Oryza sativa
tttgtttttttttttttttttttttttttttttggcctgacatcgcgtttcccattggtggatcgggaaatttcttatgcacgggacaaatttatacaggggcattgcccatgttcccaggaaaacacgacaaaagacctaaaattccagggcgtcgttgaacccggcgtcgtaggcggggtcagcctccatgtcgccgaccatttccccgagcattatcccgccgaccgggccgccgaggagcccgagtccgaggcccatgcccattcgtccacctttcctcgccgccggttgttgtgccgccgcgtagctgtacgtcgccggcggcggtgggccggcgttgtacgcgtacgggggctgacccgcgtaaccgtactgctgctgatgcggagggtaccctcctccgtacggtgcgccgtaccggacgaccggggggtgcgcta

SEQ ID NO: 417893 - DNA, 453 bp, Oryza sativa
cgtttgttgagcgcattttgggtcttgataatgataggatgggcgacctcattggagcactattgctggcgaaagttgtggatctactgactgaattggatgttaacataacttgggaagatatactccaagatgaacataacaaaggtatatttgatatggagcttgaagatttgggtgaggatgaggacagccttggacaagaaggaacaaaggccctttttggaggaaatgcttgtgctgaaaagcttgatggtttaatggttgttttttgtgagcacctcaagtcatgtaaagaacatggtcgcttaccccaggagtttgacattctgaagactatctttcgagcatctgtgctaagggtgcacaaatccaaatttgcacagtttatcatgttttatgcctgcttactggatcctgaaatctgtggccttgaattcggtctcttcctct

SEQ ID NO: 417894 - DNA, 453 bp, Oryza sativa
ttacctcccccctcccccacacacatctccccgactcgatctccccctcctcctccgccgccgccgccaacgcctcctcctccgcctcctcccccaacgcatcgccccaccccatccatccagattcctccctcctcctcctcctcctcttcctcctcccccgatcccgccccgatgcgatgcccccgcggcgcgatcgcgtgacgccgccatgatgaatcccgacggcggcgacggcgaccgcctcgaggcggcgggggcgggctcgtcgtcggcgcagcaggggcatccgacgatggagtggcggttcgcgcaggtcttcggcgagcgcgcggacggggaggacgagcaggaagtcgacatgatctctgcaattgagattgataaatctggggatcatcttgccaccggagacagatgaagacgtgttgttctattttgaaggacagatgc

SEQ ID NO: 417895 - DNA, 482 bp, Oryza sativa
tttgtccggttcttcttctcatctcctcccactccagctctgcccctgagccaagaactgagcagcagagagctcgtggtctctttgccagcttctcctcagtcctcaccaagctgttcttgcagagaaaacatagccaaagagctaatttgagctcccaccatgaagtacgtgctggtgacaggaggggtggtgagcggcctcggcaagggcgtgaccgcgagcagcatcggcgtcgtgctcaaggcctgcgggctccgcgtcaccaccatcaagattgacccatacctcaacactgatgctggaaccatgtctccgttcgagcatggtgaggtcttcgttttggacgatggtggagaggtggacttggaccttggaaattacgaacgttttctggacatcaaattgacccgtgataacaacataaccacgggaaaaatatatcagtcagtcattaacaaagaaaggagaggagactactt

SEQ ID NO: 417896 - DNA, 420 bp, Oryza sativa
ttcttccgtttctgcgttggccattatgctcttcaatgttcatggatggcataacttgttctggttctctacaatcccccttgtagtaactttagcagttggaacaaagctgcaggctataattgcaatgatggctgttgaaattaaagagaggcatacagtaattcaaggaatgccggtggtgaaactcagtgatgaacatttttggttcgggaagccacgtctggttcttcatcttatccatttcgcgtcatttcagaatgcatttgaaattacatacttcttttggatttggtacaaattcgggttgagatcctgcttccatgacaactttgagcttatcatcgccagaatctgccttggggtttgcgttcaattcatgtgcagctatatcacaactgcactctatgctctcgtatc

SEQ ID NO: 417897 - DNA, 428 bp, Oryza sativa
ctcttccacccccgaatccactccttaaccaaaccaaatctcgcggcgcatggcggcggcggcggtggcggcgaacggcggcggcgacggcgcgcaggcgttcaacgcgcccgcccccaccaggctcgcgtcggtctacagcgaggtgcagaccagccgcctcaagcacgcgctccccctcccctccgtcctccgctcccccttcgccctcgccgacggccccgccagcttcgtcgccggcaaccccggtgagatcgcgaagctgttccccaacctgtttggccagccgtccgtgtcgctggtgccgtcgccggagcccgcgtccaccaggccgctcaaggtcggcgttgggctcttccgcggtcaggcgccccgcggccacaatgtcatctgcggcatttttgattacctggaggaatatgcaaaag

SEQ ID NO: 417898 - DNA, 309 bp, Oryza sativa
ggcaataataagtcttaacatccaaatttaaaccgaacagaaaatagagttttaaacgactgacatagtgcacaaagcgagcagattttaacggtcaatgcaacaactgaaatgaccgtcgacaaaacttaacgagtactaaaagagctagatatctcaaatgcagatatggaaagcaccacttgaacgaggctcattttttcttggcggcagccttggtcaccttggcaccggttgggtccttcttctccacgttcttgatgacgccaacagccaccgtttgcctcatgtcccgcacgggaaaacgac

SEQ ID NO: 417899 - DNA, 433 bp, Oryza sativa
tttccttttcctccggctcttcttcagtatcgaatcctctcttctcctcgtgcccaccaccaccaccgtagcaatggcgggcaacgggccgatcaacaaggaggacccgctcaactggggcgcggtggcggccgagatggccggcagccacctcgacgaggtgaagcgcatggtggcgcagttccgcgagccgctggtcaagatccagggcgccaccctccgcgtcggccaggtggccgccgtcgcccaggccaaggacgccggcggcgtcgccgtcgagctcgacgaggaggcccgcccccgcgtcaaggccagcagcgagtggatccttaactgcattgcccacggcggcgacatctacggcgtcaccaccggctttggcggtaacctccaccgacggaccaggacggacccgccctccaagtcgagctcc

SEQ ID NO: 417900 - DNA, 469 bp, Oryza sativa
gttcttcttctcatctcctcccactccagctctgcccctgagccaagaactgagcagcagagagctcgtggtctctttgccagcttctcctcagtcctcaccaagctgttcttgcagagaaaacatagccaaagagctaatttgagctcccaccatgaagtacgtgctggtgacaggaggggtggtgagcggcctcggcaagggcgtgaccgcgagcagcatcggcgtcgtgctcaaggcctgcgggctccgcgtcaccaccatcaagattgacccatacctcaacactgatgctggaaccatgtctccgttcgagcatggtgaggtcttcgttttggacgatggtggagaggtggacttggaccttggaaatacgaacgttttctggacatcaaattgacccgggataacaacataaccacgggaaaaatatatcagtcagtcattaacaaagaaaggagaggagact

SEQ ID NO: 417901 - DNA, 443 bp, Oryza sativa; identical to SEQ ID NO: 394990

SEQ ID NO: 417902 - DNA, 444 bp, Oryza sativa
ttcgcttcccccctccacccgtctcctccgtctccggcgccggcgccggcgagctcgccccccgcgattcgtgccctccgatcagaggcgaggcgggagaagagatggggctcacgttcaccaagctgttcagccggctcttcgccaagaaggagatgcggatcctgatggtgggtcttgacgcggccggaaagaccacaatcctctacaagctcaagctcggcgagatcgtcaccaccatccccaccatcggattcaatgttgaaaccgtggagtacaagaacatcagcttcaccgtctgggatgtggggggtcaggacaagatcaggcctctgtggaggcattatttccagaacacccagggtctcatctttgttgtggacagcaatgatagggaccgtgttgtcgaagccagggatgagctccacaggatgctgaaccgag

SEQ ID NO: 417903 - DNA, 310 bp, Oryza sativa
ttggcgctttcgtcacatattcagaggtcaaccacgaagacaccttttgcagagtggctggagtgtgtttgttagtgccaaacggcttgctgctggggatgcctttatctttctcagaggtgagaacggggaactgcgtgttggagtcaggcgtgcaatgaggcagcaaactaatgttccatcttcagtgatatcaagccacagcatgcatcttggggttcttgccacagcatggcatgctgttaacacagggaccatgttcactgcctactacaagcctaagacaagtccagccgagtttgtggtccct

SEQ ID NO: 417904 - DNA, 364 bp, Oryza sativa
tttggtttttcctaaaagtgggttattcacaaagactatgtttagttatggacactataagctataaatatacaggctcatacaaagagggcattgcatccatagatatgaagcttcaatacggagctgatgatataggtgcatcctctttgtttaagcaccctattacaagcatatcaaaatgtacaaggacgttacttttaccgggcaaacagggccattgctacttaggtgtttacatacgattacctgggacagaagattaatagggggctaataggacggaagtttgaaatacctaaggtccaacgaaataacaaacggatgcatgccgtggttgggagattaaggagaaatttcttac

SEQ ID NO: 417905 - DNA, 520 bp, Oryza sativa
tttgtttttacttaaaagtttgttatgcacaaagactatctttagttatggacaatataagctatagctttccaggcacatacaaagaggttcttgcatccaaagaaatgaagcttaaatacgtagttgatgatatagctgcatcctctttctttaagcaccctattacaagcatattaaattgtacaagcaccttacttttaccgggcaaattgtcccattgctactttgttgttttcatacgactacttgggacagattattattacttgcctaataggacggatgttagaaatgcatatgttccaataaaataacaaaaggatgcagtagcttgtttggggttcatggtgaaatttctcgagggtttgcaagcagatggagaccattgtcgatatggagagtgaacattgttttatagattggctccttggattcatcttccagtctgaacttgaagaaatgtatcagggtagcagccatgatcttcatctgcctgtgtgcaaattttttcccaagc

SEQ ID NO: 417906 - DNA, 470 bp, Oryza sativa
ttttgtttttttttttttttgggaatttgatccgcaacgattcagatgcagatgaaacactgctgattcccactcagattacacacaatacaaatacaccgacaaactgcctcaaaaaccaccaaattgattcaaaagtaaaacgggtatgagggatcttcccaccgagactgactaaacctaaccacagacaattggatccactggacccagattattcaaaaacagatggctatgacggcatcgtcctcgcaaccgaagggaacttgcagctatggatatcctcacttcgcgctggcgagctgggtgcggatgagcttggcggccgaaaccatgttggtaagggcgggcttgacctcgttgtacttgcgggtcttgagaccgcagtcagggttcacccaaagaatgttagtggcgagcaccgcgagcatcttgttgacgcggtccgcaatctcctttgtggacgggat

SEQ ID NO: 417907 - DNA, 396 bp, Oryza sativa
tttgagccggagcgagttggctttgttgtgttgagccctttcctgggcctataaattcggcatcacgcccaacgcatcccctgcccagaagaatcccagctaccaaatcgaacctaccaactcattcccgatcgatcgatcttaaaaaaaaactaatcgtaactattctctctctctcctatctgtagaactagcaggtagcaactgcttcgagtgtagtctggtgaacgtacgatctttagatcggtcatcaagatgaccgtgatcgacggcgccggcgctgccgacgccggcggcgcagccgcggcgagggtgcaaccggggaacgggcagaccgtgtgcgtgaccggcgcggacgggtacatcgcgttaaggctccggaagctgctgcttgag

SEQ ID NO: 417908 - DNA, 474 bp, Oryza sativa
tttcgaccacgagatcaactccaggatctacctctggaggggccacccctggaacctggaggtcgacgctgtcgtcaactccactaacgagagcttggacgagtcgcacagcagtcctggtctgcacgccgcggcaggatcggggctcgcggaggaatgctccaccttgggaggatgccgaactgggatggcgaagatgaccaatgcttatgatctgcctgcaaggaaggtcattcatacagtcggccccaaatatgctgtcaagtatcacacagctgcagagaatgcacttagtcactgctaccgttcttgtttggaactcctcattgaaaatggccttgaaagcattgcaatgggctgcatttacacgaagctaaaaactaccctcgtgagccagctgcccatgtggcgataagaactgttagaccctttctggagaaacataaagcaaaatgctggtgttgttttttgact

SEQ ID NO: 417909 - DNA, 510 bp, Oryza sativa
ttgtttttgtgaacatagagaacttcatagaaatacttattcggtcactctggtgcacatgtaacaacaacaggggtgtattacagggcttcagaccagacaaaccagcgaacactactactttggttttacagcacggtaaacactaacacgatatggacatttttcctgctcttttgctctgctgttttcctcatgctcggatggcaatcccgccctggacctcgccggcctcctcctccgtcttctcggcggcgagcaccggcaggtggcccttctcctggaggcacttcaccgtctcgtacagcgactggctcgccggccggaactccagccccaggtcccggagcttctggttcgacatcttgtacggctgcttcctggggttcttctcgtcggagcacctggtggggacagggtactcggggaagagcttggcgaggatgcggacgacaccctcgcgtggaggacagacttcgcgcataggaagcctgccgcggcggtagggga

SEQ ID NO: 417910 - DNA, 478 bp, Oryza sativa
tttccgttttgcgtttgcactcctctcgatctccattcgtttttgagttcctcgtttgctccgcctctctttcactcatgggcaagattaagatcggaatcaatgggttcggccgcatcggcaggctggtggccagggtggcgctgcagagcgaggatgtcgagctcgttgccgtcaacgatcccttcatcaccaccgagtacatgacatacatgttcaagtatgacaccgtccacggccagtggaagcatcatgaggtcaaggtcaaggactccaagaccctcatctttggcacgaaagaggttgcggtgttcggctgcaggaaccctgaggagatcccatgggctgcggctggtgctgaatacgttgttgagtctactggtgttttcaccgacaaggacaaggcagcagctcacttgaagggtggtgccaagaaggtcgtcatttctgttccagcaaagacgccccatgttcgttg

SEQ ID NO: 417911 - DNA, 424 bp, Oryza sativa
ttttgcgttctctcgattcctcagcaaccatgtcggcctactgcggcaagtacaaggacgagctcatcaagaacgctgcctacattggcactcctggcaagggtatccttgctgcagatgagtccactggcaccattggcaagcgctttgccagcatcaatgtcgagaacgttgaggagaaccgccgctctctccgcgagctgctcttcaccacccctggtgccctccagcacctaagtggtgtgatcctcttcgaggagaccctgtaccagaagaccaaggacggtaagcccttcgtccatgtactcaaggagggtggtgtcctacctggcatcaaggttgacaagggtaccgttgagggtgccggtcccaacaaagagaccaccacccaaggccacgatgatcttggcaagcgttgcgccaa

SEQ ID NO: 417912 - DNA, 480 bp, Oryza sativa
ttttgtttactcaacgaaacgcatactcatcaaaacttgcacagtcaaaatggacggatgtactttgacataacatatgcttcgccattacaagccgctctgcagttcaactacttgaagataagaggcactaatgacaggcatcactcaaaaataaactcaaactagcacttctgtgaaggataataagatgggatgaaaaatgcttccagaacaaccagtcccagacccagtttttggataagtagcaacatccccttttgatattttaaatcttggtgaacgcaacgatgtcgcagctatggacaaattcgttgatcggctcttcagccagatgttcttcgataaggctatccacagacaccaagtcatgaacaatggtcaacatgatctgcaactttttgatcccgtaacccacaggcacaagctttgatgctccccaggtgagaccctccatctgcacactgcagacagcctgct

SEQ ID NO: 417913 - DNA, 414 bp, Oryza sativa
gttctgattccgccgcgtcgtagcagcagggcggagccatgtcgtccgggaagggaggtggaggcggcggcaagggaggcggagggaagaagaaggaggtgaagaaggagacgaagctcgggatggcgtacaagaaggatgacaacttcggggagtggtactccgaggttgtcgttaacagtgaaatgatcgagtactatgacatatccggttgttatatcttgaggccatgggcgatggagatctgggaattgcttaaagaattctttgatgcagaaataaaaaagctgaagctgaaaccttattatttcccattgtttgtcactgagaatgtcctacagaaggagaaagaccacattgagggctttgcaccaaaagtagcatgggtcactaaatcaggaaaatctgatctgg

SEQ ID NO: 417914 - DNA, 417 bp, Oryza sativa
tgttcagttcgatttcgatcgaatttcacccaaagtccacacaaactttcgattcgatttctccgatctcgcagcggtggcggccatggcgcacaggacgctggagctgacgctgatctcggccaaggatctcaaggacgtgaacctcctctccaagatggaggtctacgccgtcgtctcgctctccggcgaccgccgctcgcggcagcggatcggcaccgaccgcgccggtggccgcaacccggcgtggaacgccgccccgctccggttcaccgtcccggcctccggcgcgggttccctccacgtgctcctccgcgccgagcgcgccctcggcgaccgcgacgtcggcgaggtccacatcccccttttggagcttctctccggcgcccccgaccgcgccgtccccgccaagttcgt

SEQ ID NO: 417915 - DNA, 527 bp, Oryza sativa
ttggtttttcccattttcttgggtaggaggaaccaagaccaagttttgcccttcccccatcaatgtcgtgtctgcaggacttattcaccttcaatgtctttgcaatctctttcagggcctctgctgtcgctttcttccatatatacatcctacatgaacatatggacgagggacgaccttccgcacgtgcaaatcagaacaaggttaaagaaacccctagccaaattgacaaatgaacaacagctgcttccatgtccaatgattgttcacaccaaaacacctgaagttatgtgcattttctgaactacaaatttgttcagtcatattcaatgtccactgctgctacttgtctcatgggcacaaccatccttgattgcttcttgagcttcattctccatgcctaaagaaagcagagcagcagcctgaagataaaatgcagttggccatgttggagatattactagcgcttgcatcgcatcactgagagcttgttctgccttgtcattcatcagatatgacaggcaacg

SEQ ID NO: 417916 - DNA, 403 bp, Oryza sativa
tttgaaatcctctcctctcttctcctcctcctcctctcctcgctcgtggccgccaccatgtcaggcggcctctacaaccaccagggtttctccccggcaagaaccctctcgccccagattaggagcaaccccgaggccgatagccagtacttgagcgagctgctcgcggagcatcacaagctggggcctttcatgcaggtgctgccgatatgcagccggctgctcaaccaagaaatcatgcgggtatcaagcatggtcaacgaccatggattcaacgattttgacaggcgttgttatagaagtcccagtcccatggctttcgcaattatgagacccaacctacatgggcatggatttgggccttggaaggcatacaccaagagagattaggcttttctcctcc

SEQ ID NO: 417917 - DNA, 451 bp, Oryza sativa
ttccatcgaatcagtcttccaaaaaacaatcgaccacagccttacctggtgctggtgaggtgagcagagctatcccaattccaattccaattcacaattcccaaagtggaggagaagatggtggcgccgtcgcccgacgccgggaagccgctggtgatcctgccgcggccgctctacccggagttcgctgccgcgctggacggccgcttccgcttcgtgcttgccgccgacgccgacgagggcaacgcagcagaggcgagggccgtgctcgtgccggctctgacgcctgtgtccgctgatctcgtggcttggctccccaagctggagatcgtggtggccacgttcaccggcgttgaccacatcgacctcgacgcgtgccgccgccgcgggatcagcgtcaccaacgccggcgaggtgtttgcccccgacgtggcggactacgcggtccggc

SEQ ID NO: 417918 - DNA, 423 bp, Oryza sativa
gtgttttttgataatagaggacaattgaataactaatgaatattcgcaaataataaattattacagaggtggatagttcctctcaatcaaaaataacattctacgcagcggaaaacaaaactaaaacaaactacggaacagctatggcgactcaactccacaggcatcttaaccgagaacaagcctaatcctccagatcatcaccttcactgaagtactcctcttcttgggcttccgcaaacgcttcggaaccttcctcaacggaaacgctctcctccggaacgtcggaaacacgacgagaaacgatgcacgacggcggccggcgacgaataggaaggcggcggcggttcgggtcgacggcgacgagggggctccggtgatcggcggcgaaaacggaggggcggtcgatctttctcgcaccac

SEQ ID NO: 417919 - DNA, 486 bp, Oryza sativa
ttcaactcatgcaagtagtgtactcaaattcaagctacacaacttacaatatcccaaccctttgttacaacagcatgatgcccagagctcagttaaccacatttctcatcgtcactagcttcctctctactgtcccctatctcagggcaccggtgcatggtggcgtcctcactagttacgatgtttcttctttggatatcatgtccaaaatccacactgatcatgacgcgactaccaaggcatcatcggactttggccatattgtacatgctacaccaaacggggtatttcgtcctaccttccctgctgacatcgctgccctaatccgcttatcactctctcagccgacacccttcaccgtggcaccacgaggcaagggccactcctctcgaggacaggccttcgccccgggcggcattgttgttgacatgtcggctctcggtgatcacggtcaccataccagtcaccgtatcgacgtgtcggttg

SEQ ID NO: 417920 - DNA, 334 bp, Oryza sativa
gtgttttttgatatttggggggttttttttatttactgattattttcatttttttaatcattacataggagggaagtttctttcaagcaaaaataacattctacgcagcggaaaacaaaactaaagcaacccacagaacagcaagggcaaaagaactgcacaggcaccttaaccgagaacaaggctgatgctccagagcaccacccagactgaagaaccggacctcttgggcgtccgcacacgcttgggaaccccccccaaaggaaacgctctcctacggaacgggggaaacaccaccagaaacgatgcccgacggcggccggcgacgaacagg

SEQ ID NO: 417921 - DNA, 459 bp, Oryza sativa
gtgattggatttgattgtgaaggcgtagacctttgccgccatggtgctctctgtatcatgcagattgcatttcctgacgctgtttacttagttgatgctattgagggtgggaaagaacttattgaagcttgcaaaccagcacttgaatcagaatatgtcaccaaagttattcatgactgcaaaagggacagtgaggctctgtatttccagtttggcataaaattgcataatgtgatggatacacagatcgcttattctctgttagaggagcaggaagggaaaaagagaggatacgatgagtacatatcttttgtcagcctccttgctgatccccgatattgtggaatggcatatcctgaaaaggaagaagtccgtacccttttaaggcaggaccctaacttttggacgcataggcctttatctgaaatgatgattcgagcagccacagatgatgtccgc

SEQ ID NO: 417922 - DNA, 311 bp, Oryza sativa
ttttacgttcttcacccccacagaagctcccacctgatcgttttctttaagtgcgccaccatgtcaggcggtctctacaaccaccagggtttcttcccggcaagtaccctctcgccccagaataggagcaaccccgaggccgatagccagtacttgagcgagctgcttgcggagcattacaagctggggccttctatgcatgtgctgccgatatttctcatgctgcttcacccaaaaatcatgcgggtattaaagatggcaaaccgcccatggttttaaagaacttttgtacaaggcttagtttttaaaaa

SEQ ID NO: 417923 - DNA, 336 bp, Oryza sativa
gtttttcatggtgagtagccaggattacccggactcggagttctggaaggcgtacctcatgtgcaaggccacgttcggggtggtctgcgacgagctagccgtcgtcgtcgccaaggaggacaccatgctccgtgccgacatacaaaagcgcaagcacgtggccggctgtgtgtggcacctagccacaggtggagcccttgaggctggagatcaagctgcttctgtcttggaagcttcacctgccacaagctcgtgctgcaagtctgcgcccagctcaaggccattgtgatgcccaccgtgaaagcactgatccgaggccggcaacagcgcaaaaca

SEQ ID NO: 417924 - DNA, 491 bp, Oryza sativa
  unsure (1)..(491): unsure at all n locations
cctttttgtttttttgggcgggcaataaaaatatgggtgcatccatttctcaaactactacaagaggtctagaggaacacataatcaggagggattgcgacaatttacagcaacaggagtctggagatcgaggcaagaacanacagtgcagcagcagagctaccctcttcatttccactgaatttttacacatttggaatccatggaaaccgagccttccctcccgtcgtcgtggtgtcaccggagtccgatgagaaaaatggtcatggcgtgctcataatccggatcgctcgccggcgtcggtgaaggaggcggagcgattgttcgggcggctgctgaggagtgggttcagagccttgacgacgatgctcatgttgggcctgaagtccgcctcgtactgcacgcacagcgcagctacggcagccatcttggcaacagccttgggaggataatccccttcaagccttggatccacgcattgcttcaccttg

SEQ ID NO: 417925 - DNA, 420 bp, Oryza sativa
tttctccacctcctcctcctccccccgatcggatcggcccggctcctcctcctccgccgccgccaccgccgccgcagataggagaagatggccgcacttgataccttcctctttacctcggagtctgtgaacgagggccaccctgacaagctctgcgaccaagtctcagatgctgtgcttgatgcctgcctcgccgaggaccctgacagcaaggtcgcttgtgagacctgcaccaagacaaacatggtcatggtctttggtgagatcaccaccaaggctaacgttgactatgagaagattgtcagggagacatgccgtaacatcggttttgtgtcagctgatgtcgggctcgatgctgaccactgcaaggtgcttgtgaacatcgagcagcagtcccctgacattgcacagggtgtgcac

SEQ ID NO: 417926 - DNA, 461 bp, Oryza sativa
  unsure (1)..(461): unsure at all n locations
aaaatatggttggatacatatctcaaactactacaagaggtctagaggaacacataatcaggagggattgcgacaatttacagcaacaggagtctggatatcgaggcaagaacaagacaggcagcagcagagctaccctcttcatttccactgaatttttacacatttggaatccatggaaacccagccttccctcccgtcgtcgtggtgtcaccggagtccgatgagaaaaatggtcatggcgtgctcataatccggatcggtcgccagcgtctgtgaaggaggcggcgcgattgttcggacggctgttgaggagtgggttcagagccttgacgacgatgctcatgttgggcctgaagtccgcctcgtactgcacgcacagcgcanctacggcagccatcttggcaacagccttgggaggataatccccttcaagccttggatccacgcattgcttcacc

SEQ ID NO: 417927 - DNA, 455 bp, Oryza sativa
atccaccgtctcaatctttgtagtaatcctcgcggcctcgccgttagttccaccaccgggcgccaccatgtgcgggatcctggccgtgctcggcgccgccgactggtcgcaggcgaagagggctcacgtcctctcctgctcccgcaggctgaagcacaggggacccgactggtccgggttgtaccagtgcgagggaaacttcctcgctcagcagcgtctcgccatcgtctccccgctctccggcgaccagccgctgtacaacgcggaccggaccatcgtcgtcgtggccaatggagagatctacaaccacaagaagatcaggaagcagttcgcctccaagcacacgttcagcaccggcagcgactgcgaggtcatcatcccgctgtatgaggagtacggcgaggactttgtcgacaatgctggacggcgtgttcgcctttgttctctaccacacc

SEQ ID NO: 417928 - DNA, 461 bp, Oryza sativa
ctcccatccccatccatctctcccccctccctttcctcctaaacttcagcggcgacacccctcgcgagccgctcctcctcatcctcctccgccgccgccgccgcgtcccctcggtgcccccctctccgccggccgccgatccggccccgcgagttgtaggaatccttgataaggctgatggcttcgatggatgagcctctttatcccatcgctatactgatagatgagctcaaaaacgaagatattcaattgcgtctgaactccattaggaggctctccacaattgcacgagcacttggagaagaaagaacccggaaggagttaattccttttctcagtgaaaataatgacgatgaagatgaggtgcttcttgctatggctgaagaattgggcgtgttcattccttacgttgggggtgtagaacatgctcatgttttgctaccaccattggagacattgtg

SEQ ID NO: 417929 - DNA, 430 bp, Oryza sativa
ctcgccgctgattcgattcgatccgatccgatccaaggggaggggaagcaatggcgacgaagaggagcgtggggacgctgggggaggcggatctgagggggaagaaggtgttcgtgcgggccgacctcaacgtgccgctcgacgacgcccagaagatcaccgacgacacccgcatccgcgcgtccgtgcccactgtcaagttcctcctcgagaagggcgccaaggtcatcctcgccagccatctgggccgtccgaagggtgttacccccaagtacagcttgaagcctcttgttccacgcttgtatgagctacttggagcctatgttgtgatggccaatgattgcattggtgaggaagttgaaaaattggctgttgctttgccggaagggtggtgtttttcttcctagagaatggtagattttccaggggg

SEQ ID NO: 417930 - DNA, 204 bp, Oryza sativa
gatggcaatacccctgttaagcgcttgcttgatttagccagagagcgcactatacatgcctccaccaaacaaaacaatctaaaagcatatacctttctaatgaacacagctaataatagctcacgaccataaccttcagtttattcgattcacatgacaacataagcttattggttctctcaactcactgaggatacccttcct

SEQ ID NO: 417931 - DNA, 406 bp, Oryza sativa
gggatctcctcttctattccttttcttccatcgtcataagagcagccgcagatcgaattgcattgcagtctttgcagatttcagcttaattgccggacagtgaagtgaaagcatcttcaagggcgtggaagctctctgagatttcaaagggtcacaaggcaggggatgagtacaaccaaagtgaatagacgtgtgggaaagtatgagctaggaagaacaatcggagagggcacattcgcgaaggtcaagttcgcgagggataccgagaccggcgatccagtagccatcaagatccttagacaaggagaaagttctcaagcataagatggtcgaacagattaaaagggaaatttctacgatgaaattgattaagcacccaaatgttgtccgtatatatgaagtgatg

SEQ ID NO: 417932 - DNA, 461 bp, Oryza sativa
cttgtcaccacacccacccacccaccaatggcgtcctcccgcctcctcctcctcgccgcgctgctcgccacggcggcggtgctggcggcgtcgcagaagccgaaggccgccacgccgacgaaggccacgccggcgtcgcccggccccgcggcggcggcggccgacggccccgcgccgacgaacgtgacggcagtgctggagaagtccggcaagtacaccaccttcctccggctcctccacgagagccgggtggacacccagatcaacagccagctgatggacagctacaacgggctgaccatgttcgcgcccacggacgccgcgttcgcggcgctcaagccgggcacgctcaactcgctgtcgtcgcaggaccagatccagctgatgctctactgcgtgctcccgcggttctacagccttggcatgctcaccacccttggcggacccgtgaacacgcaggc

SEQ ID NO: 417933 - DNA, 458 bp, Oryza sativa
ctcgatctccattcggtttttttttcctcgcttgctccgcctctctttcactcatgggcaagattaagatcggaaccaatgggttcggccgcatcggcaggctggtggtcagggtggcgctgcagagcgaggatgtccagctcgttgccgtcaacgatcccttcatcactcaccgagtacatgacatacatgttcaagtatgacaccgcccacggccagtggaagcatcatgaggtcaaggtcaaggactccaagaccctcatctttggcacgaaagaggttgcggtgtctggctgcaggaaccctgaggagatcccatgggcttgcggctggtgctgaatacgtcgttgagtctactggtgttttcaccgacaaggacatggctatatcttcacttgataggttctgccgagaatgtcgttatttttgcttccagtaaagactctcccatgttcgtt

SEQ ID NO: 417934 - DNA, 435 bp, Oryza sativa
atgtaggaactaatttcattggtggcacttaactcataaagcttatatactattttgatgttcaatgagaaaaagggagtgtgcgcaactattttcaaccttttgtttccatctctgtttcatttccggaggaacttcttgaaccaacgggctgagttcttggggtatctcttcattccgttatcgtaatccacaaagtttatcccaaaccgaactgtgtagccctctgaccactcaaagttgtcaagcagagaccatgcgaagtaccccttcacatttgctccatccctcatagcacttagcagggcgagaaggtgcttgtgatagtattcaatcctgatatcatccttcagggcctccttgagtcgcatggtcttattattgatttcatcaacaccattttcagtgatgtagatggtaggattgccatagttt

SEQ ID NO: 417935 - DNA, 442 bp, Oryza sativa
gtttttacggagaagtacttggttttgcatgaaattgttgacacagcgatgaagaaactggaggctgaggttggtcctatatctggagttgcaaatatgggtcgtggaattgtgagccggcttgctgttggtgctgaagttcagaaactttgtgctcgagcaatagaaaccatggagtctctgttttgtggatctccttctaacttgcaatttcaacgttcacggatgataccatcaaacttcgtaaagtttgaagctataacccaaacatctgtcactgtagttttggatttgggttctataccttgctcaagatgtaacatgctttaatgtatggcacagagtggcagtcacaggctcgttctcatcatggacacctgggatgacacgtggaccatcaaaaacgttagtggtcactcaacttgtgccagttacaagctat

SEQ ID NO: 417936 - DNA, 488 bp, Oryza sativa
cttttctcttctcgtcgccggtggattcgccgccgcctccgccgccgccgccggaggaggaggacgaggagagggcgctccctcgggggtgagcatccagccacctcggcccgttgcctcctcttcgcatctcggccccgcgagattggaagtgagggcagggcagggcggcaggggccatggcggtcccactcgtgctcgtcgtgctcccgctcggccttctcttcctcctctccggcctcatcatcaacgccatccaggccgtcctgtttctctcgataaggccgttctcgaagagcttgtaccggcggatcaacaggttcttggccgagctgctgtggcttcagctggtctggcttgtggattggtgggcaggagttaagatacaactgcatgctgatgacgaaacttacaaggcaatggggaatgagcatgcacttgtcatatcaaatcatcggagcgatatcgattggcttattgggtggatt

SEQ ID NO: 417937 - DNA, 332 bp, Oryza sativa
tgttttcagagcccagctagctctcgatcatttgttacagagaaattgatcaaagcaggaaattaaccagctgtcaggaagcaatggctctcgtggaggataacactgccgtttcggtgagcttcagcgaggagcaggaggcgctggtgctcaagtcatgggcgatcttgaagaaggattccgtcaatattgccctccgcttcttcttgaagatcttcgaggtcgcgccgtctgcgagccagatgttcttgttcctgcgcaacttcgaagtgccgctcgagaagaacccctagcttaagaaccacagccatgtccgtctttgtcatgacatg

SEQ ID NO: 417938 - DNA, 400 bp, Oryza sativa
tgttagatcctgcacatccaaggcgggcaatgtggcaaccagatcggtgccaaattctgggaggtggtgtgtgatgagcatggcattgaccctactgggcggtacacaggcaactcagatctgcagttggagcgtgtcaatgtgtactacaatgaggcctcctgcggtcgctttgtgcctcgtgctgttctcatggaccttgagcctggtactatggacagtgtccgcactggaccctatggccagatcttccgccctgacaactttgtcttcgggcaatctggtgctggtaacaactgggccaagggacactacactgagggtgcccagctaattgattctgttttagatgttgtgaggaaggaggctgagaactgtgactgcctgcaaggattccaag

SEQ ID NO: 417939 - DNA, 398 bp, Oryza sativa
tcttgcggccgcctttttttttttttttttttttttttggacgggaaaccgaaattttactactcgttagcacgggaaacccaaccctaaacgaagctactggttgtagccgaagtaaccagaaaaaatcaaatcaagacacgaacttgatagatacagtaggacgatggcatgcgatgggttggtcgggaggtagagacttttattacgccttggtgggcagcaccggcacgacgaagtgctgtgcgacgatgcggcgctggatcttgccggtggccgtcttgggaagctcgtcggcgatgtacacctttttgggcaccttgaacgcggccagggtccttcgggagtagggcagcaccttctttttcccgagcgacacgcccttccgggggatcacc

SEQ ID NO: 417940 - DNA, 337 bp, Oryza sativa
gaaccgtaaaatagtatcatcaccatgttcatctagacatagtagaaaacattcacactctcgaaatgctctctatctttcagttttgtgttgctatacgtcttcttgttttgcattttttttagtattccatttctgttcagcagagtggcagtggcgcgccattccattccttgaggcattcgagcagcgggtcgatgtgcttgcgctcgttgatggcgacgagcaccttgttcagctccttgccgggcgaccgcgttttctcgccggtgaggttctgggtgccaacctttttgctcaaaataccggtagagcgggtacgagcggctctcttttg

SEQ ID NO: 417941 - DNA, 522 bp, Oryza sativa
cttttctcctccgcctccgtcgccgcgacgagatggaggtcgacagggccgcgagcgccgccgctgcgggggagtcctcctccgccggcgcgatggcggtggagaagccgtggttcgaggcgctgatgccgagcgagatgagcggcgggaggccccagttccggaaggtgccggtgccgcagcaccgcttcgctccgttgaagaaggcgtggatggacatctacacgcccgtctacgagcacatgaagatcgacatacgcatgaacctgaaggcaagaagggtggagctaaaaacaaggcaagacacaccagatgtgagcaatcttcagaagtgtgcagacttcgtgcatgcttttatgcttggatttgacatcgcagatgccgttgcattgctccgccttgatgacttgtatgtggattcctttcggatcaacgatgggaagacattcggggtgagcatttgcacgtgctattggccgtttgcagggaaaggaggcacgaccaataccgcatttgagaatt

SEQ ID NO: 417942 - DNA, 431 bp, Oryza sativa
agcgaatcagccactgcattttttgttcttgttctcttcctcctcccgaatccgatccatccattggccgccgccgcctgcgtcgtctcgtgcgttgcgtgttcgtgtccagagacgatggtcagcctcgtcgtcgagaagaccgtcaccgggtgggccgtctgggacgcctccggccaccttaccccctacaactacaccctcaggaagactgggcctgaagatgtggtggtgaaggtttcgcattgtggtatctgtcatactgacatccaccaggccaagaaccaccttggtgcttccaagtaccccatggtccctggccatgaggtggtctgtgaggtggtggaggtcgggccgtaggtgaccaagttcagttccggcgacgttctctgcttcttgcgtcatcttcggctgatgtccgcgagtgccat

SEQ ID NO: 417943 - DNA, 450 bp, Oryza sativa
aatttataaaaggcgcagcccgtcgtcgagccctctcatccctcttctttgtctgatcgatcgattgcttctccctcctctcgctactagactagagagtaggtagagctagctttctagctcgtggatcgttaagtttgtagtcctgcccgggcgccggcggtgaggtcgcgatggccggcggcgcggtggtgagcacgggggcaggcaaggactaccctggcaagctcaccctcttcgtcttcttcacatgcgtcgtcgccgccaccggtggtctcatcttcggatatgacatcggtatatcaggtggtgtgacgttcatggacccgttcctgaggaagatcttcccggaggtgtatcggaagaagcagatggcggacaagaacaaccagtactgcaagtacgacaaccagctgctgcagaccttcaccttgtcggtctacctcgccg

SEQ ID NO: 417944 - DNA, 507 bp, Oryza sativa
cgatctcatttaaagttcgagttgaacaagttctgcagtcacaaccaagcctgataatttcttacaaacttagcaataccttggaattctatggttacacaatatcagatctgttgggtggagacgctgcactgtgcaatacaatatggtcacttagagatgcaacgcagcagacattctttaatatccttaagagccgaggagaaaagttattgcgatatcctccacttgttgctgttgacctctctccccctccagcagtgagagaaggaatttcattgttgcttgaactcataaatacctacaatagcatgatggttcctgcctctggaaaaaggccaaatttcgatcctgtcatttctgccatactggatcctataattcagatgtgtgagcaagctgcagaggcacaaaagttaaaagggacaattgcacggcgtggtagaactagttttgatccactggaaaaatagagatcaatctaagttgatgcttttttatctaaga

SEQ ID NO: 417945 - DNA, 391 bp, Oryza sativa
ggaaggtatatagccggagggggcatatatttcattcacatatgcctcacccaacaacatatagtcgtagcagataccactcttacatcaagtcagagagagatcaggtgaaacaaaaacaaaagcagagcacggccggtaaaatcaaaagacgatgaacaaactgggaacacacgaaacaaggtgggagacatcatcgaatcagagatgaacaattaaacaaggctatatatgacgatgacggtttagttgccaccagactcctggcagcccgggggcttgtaggcgatgaagctgatgagctgcacctgcctgacgttgtcgaagccgatgatacggacgaatgcatcagggtacgccttcttggcctcctcgagctccttgagcacct

SEQ ID NO: 417946 - DNA, 469 bp, Oryza sativa
ggttgatcgcgcaaagaaccgagaagagctcatctcatccaccatcactcgcgcagagagatcgatagccacagcgcacaagcaacgcgccgccaatcacatgcgcgcggcggtgcaggggcgggcacatgcgtggacgacgacgacgacgacaccgccgggcgcgatgagaggccgggcgctggtcctcgtggccgcgctgctgctgcagctgcttctcctcgccgctgccggtggcgcgggcgcggcggcgacggagaggaaggcgcacaactacgaggacgcgctgcggaagagcctgctctacttcgaggcgcagcggtcggggcggctcccgcacaaccagcgcgtcgcgtggcgcgaccactccggcctcaccgacggcctcgagcaaggggtggatttggtgggaggctactacgacgcccgcgaccatgtcaagtcgggctgcccatggcgttcacggtga

SEQ ID NO: 417947 - DNA, 436 bp, Oryza sativa
gttttcagagcccagctagctctcgatcatttgttacagagaaattgatcaaagcaggaaattaaccagctgtcaggaagcaatggctctcgtggaggataacaatgccgtagcggtgagcttcagcgaggagcaggaggcgctggtgctcaagtcatgggcgatcttgaagaaggattccgccaatattgccctccgcttcttcttgaagatcttcgaggtcgcgccgtcggcgagccagatgttctcgttcctgcgcaactccgacgtgccgctcgagaagaaccccaagctcaagacccacgccatgtccgtcttcgtaatgacatgcgaggccgacgcgcagctgcggaaagccgggaaggtcaccgtgagagacaccaccctcaagaggctcggcgccacgcaccttaagtacggcgtttgagacgcccac

SEQ ID NO: 417948 - DNA, 451 bp, Oryza sativa
ggggagattaaagcagcatggggggcttcttaccaccattacataagcttacgcaataacagataacaaattctcctgctcctttaggtaaaatattcaaacacaatacccttataagttcttattattaggaaagcagcgagcatgggcataaatggcattggggggcaggttaagaatcacaatgcttagcagagaggaaacaaaacaccttaatgggacagagcaaaagcctccgaaagggagcttttaggcagaaggcttctcccacttgaggggcttcaccacctcccaggtgaagtctgggtccacccttccgaagtgaccgtaagccgccgtcttgaggtagcgtccgttgccacctttcttgaggtcaaggttgatgatgatcatgccaggcctgaagtcgacaggctccttcacattcttgaggatctccttgtcagggatc

SEQ ID NO: 417949 - DNA, 514 bp, Oryza sativa
ttttctacaagtaatcacagatatatagggcagaaattaaggctacaaattaaaatgagcacaaagcttgttaagattggtccatggggtggaaatggaggaggttctgtagacatatctgtacccccaaatagcctgaagaacgtgacgatccgtagtggagcagccattgatgctattgcctttacatacgttggcacggacgggaatgaacatcttgcaggtccttggggtggtggtggtggaaatccaactacgattacacttggatctcaggaattcgtgaagggaatctccggaacatttaccaacgtcgtgacaaaccttcaaattgtcaccaatgtcaccacttataattttggacaaggtggtggaactgcttttagcctcccgctgcagagcggcagtgtggttggtttctttggtcgctcgggcgcacttgtggactttatcggagtttattgccacatatgatatatgtaatctacatatgaatatattcaaatggatatat

SEQ ID NO: 417950 - DNA, 431 bp, Oryza sativa
actcaccaccaccaccaccgtctccagccatggcctcctccgcctccctgcagcgcttcctccccccgtacccccacgcggcagcatcccgctgccgccctcccggcgtccgcgcccgccccgtgcagtcgtcgacggtgtccgcaccgtcctcctcgactccggcggcggacgaggccgtgtcggcggagcggctggagccgcgggtggagcagcgggagggccggtactgggtgctcaaggagaagtaccggacggggctgaacccgcaggagaaggtgaagctggggaaggagcccatgtcattgttcatggagggcggcatcaaggagctcgccaagatgcccatggaggagatcgaggccgacaagctctccaaggaggacattgacctgcggctcaagtggctcggccttttcaccgccgcagca

SEQ ID NO: 417951 - DNA, 442 bp, Oryza sativa
ggggggctaaaccacttaggatgcattcctcatctactcaccagaccaaacaattctcaaaaccagaaagattctatcatgtgaatcatttctaagttctaagtgagcttgtatcccaaaggtcatccagcctacttagatgccgaagaccttacataaagtttctgaatattctagtcctcaaggtatgattgttacttgttagagccctactctttctttttgttttgcttgctatctgtatcttcttcacaagcttcctcctcttccgctttggactcgttgtactcaaggagcggttttacttcaccattccacaaacagtgaacagcaacaaaaccaatcacaccaggaacaatgtacaacagagcaggctgtgcagcttggaaccagttcatcactattattggcacagtcagacccacggtataacccaaaatgc

SEQ ID NO: 417952 - DNA, 465 bp, Oryza sativa
tgagagcaagcagcgtgtttacgcccaaatcgcgcgattcgatcgaggcaaccctccccaattccctcaaatcccctatccgaaatccgccaattggccgcgtccgccacgccaagagaataaaggaaaacatcggcgtatcaacaagtgaagctgcattttcttagagctcagatgaagcggcctcgaaggcgtctgtggtgggatgactgatgagggatgatagtgacattgatgaacttgttacgggcatgctggagaccatcatccaaccagcatgcccgggcaggctcagatgttgccggcaggcaggatggacttctatggtacaaggacactggtcagcatgtaaatggggaattctctatggctgtggtccaggccaacaacttacttgaggatcagtgccagattgaatcgggtccattgagctttcttgactttggttcatacggaactttcgcc

SEQ ID NO: 417953 - DNA, 471 bp, Oryza sativa
cttgtattcaaccatcaagcacatcaggaaggatggtcggtggcttcgacaaactgaaagtggagttcatcgaccaagatgagagtgtgcaggtcgttgcagacaccatcagaagctccggtgagattcctgaaaggtatgccaggcctgagatggaggccgatcctgtcatcatcgacaccgatggttacaatctgccggtaatagatatgtcaaggttgatcaatcctgagttctccgaggaggagattgccaagctcggatcagcctgtgaggattggggattcttccagcttgtgaaccatggggtggatggggagttgctgcaacggatcaaggatgacatcacagagtttttcagactttctctgcaggagaagatgtccgtggcgatcccacccaaaggcttgcaggggttcggtcaccacttcgtcttcttcaaggagcataagctggactgggtcgatttgc

SEQ ID NO: 417954 - DNA, 454 bp, Oryza sativa
acatatggatcggtggatctggcatggatctcaggagcaaggctaggactctctccggccctgtgactgatcccagcaagctgcccaagtggaactacgatggctccagcaccggccaggcccccggcgaggacagtgaggtcatcctgtacccacaggctatcttcaaggacccattcaggaagggaaacaacatccttgtcatgtgccattgctacacgccagccggagaaccgatccccaccaacaagaggcacaatgctgccaagatcttcagctcccctgaggttgcttctgaggagccctggtacggtattgagcaagagtacaccctcctccagaaggacatcaactggccccttggctggcctgttggtggcttacctggtcctaagggtccttactactgtggtatcggtgcttgacaagacttttgggcgtgatattgttgact

SEQ ID NO: 417955 - DNA, 517 bp, Oryza sativa
cattgcgccgccacctctccccaaccctagctagctccccctccttccccggcggcgacatcgacgatggcggcggctgcggcaggcggcggcggcggcggcgccccgcgggcgctctcccagcgggagcaggacatccagatgatgctcgcggcggacgtccacctcggcaccaagaactgcgacttccagatggagcgctacgtctacaagcgccgatccgacggcattttcatcattaaccttggcaaaacctgggagaagcttcagctggctgccagagtgattgttgccattgagaacccacaggacatcatcgtgcagtctgctaggccttatggtcagagggctgtcctcaagtttgcacagtacaccggagctcatgccattgctggcaggcacactcctggtacatttaccaaccaactgcaaacctcattcagtgagccacgtcttctcatccttactgaccccaggacagatcatcagccaatcaaggagtctgctcttggaaaca

SEQ ID NO: 417956 - DNA, 483 bp, Oryza sativa
ggttttcctcgtcgtgcttgacggatggggcgaggccaacgccgacaagtacaactgcatccatgtcgcccagacgcccgtcatggattcgctcaagaatggttctcccgagaggtggagattagtgaaggctcatggaacagctgttggtcttcctagcgaagatgacatgggcaacagcgaagtgggtcacaatgctcttggtgctggtcgcatttttgctcagggtgctaagcttgtggaccttgctcttgcctctgggaaaatttatgatggagaggggttcaattacatcaaagaatgttttgacaagggtaccctgcaccttattggtttgttgagtgatggaggcgttcacttccgtcttgatcaagtgcagctgcttctgaaaggtgccagtgagaggggagcaaaaagaattcgtgttcacattcttactgatggacgcgatgttttggatggcagcagtgttggtttgtagag

SEQ ID NO: 417957 - DNA, 403 bp, Oryza sativa
tattttcaaacaacgcaaagcagtagcagcagcgagaagcaagcaagaagcgatggggatggggatgaggagggagagggacgcggaggcggagctgaacctgccgccggggttcaggttccaccccacggacgacgagctggtggagcactacctgtgcaggaaggcggcggggcagcgcctgccggtgccgatcatcgccgaggtggatctctacaagttcgacccgtgggatctgcccgagcgcgcgctgttcggcgccagggagtggtactttttcaccccgcgggatcgcaagtatcctaatgggttacgccccaaccgcgccgtcggcaacgggtactggaaggccaccggtgcccacaagcccgttccgccgtgggggcgcacgcttgggatcaag

SEQ ID NO: 417958 - DNA, 460 bp, Oryza sativa
cgccgatctccatctgtgtttgcagagcaggggaggggaagggaaggtatcctgaaagatgcttaatcttatcaaaataaaggataaaaagaaagagcaggcagcaagtgctgctggaaaggctcctgtgaagaagcaatctgctggagagctccgtcttcacaaagatattagtgagctaaacctacccaagagcacatcaatttcttttcccaatggcaaggatgatctgatgaattttgagatcatcgtccgacctgatgaaggatattacctaggtggcactttcgtctttacttttcaagtctctccctcttatcctcatgaacctccaaaggtgaagtgcaagaccaaggtataccatccaaatattgatttggaaggaaatgtatgcctgaacattttgcgtgaagattggaagcctgttctcaacatcaacactgttatttatggccttaac

SEQ ID NO: 417959 - DNA, 469 bp, Oryza sativa
cttgtacggacgcctagctaagctaagctaattaagctctaatttctcttttcttttttcttcgatctccggcgaaaaagtaagtacaatggccgaggtgaacggagccaataacggcaacggccaccacggccacggcaacggcagcggcgctgcggcggcggcggggcggtcgacgagtgtgtcgaggaagatcgagtcggagggggcggtgctgatgcccggggtgtacgacgcgctgtcggcggcgatcgtccagaagaccgggttctacgccggcttcatctccggctacgccgtctccggctccttcctcggcacccccgacgtcggcctcctcacgccgccggagatggcggaagtggcgaggcggatctgcgcgtcggcgcccaacacactcttcatcgccgacgccgacactggtggtggcaatgctctgaatgtgaagcgtactgttcaggacctgatg

SEQ ID NO: 417960 - DNA, 493 bp, Oryza sativa
gaggaacaaaacttgattcagcagaaagccaatccttgctagagtaaatgtcagacgatgatacttgaatacattgatatggtctgcttaaataagctcctaataacattgaaatattgaggcacagtagaccaacaactatagtatccagtaggtagcaagcaatttagaaaagagatgttcccttgcccttcttgtctccaccaatctcgaaatgcttgcacctcttgatggggtgctgggagtaatgcttgcagctttggcattgcagcttcagcacgatcttcttggtggtttttgccttcttgtggaaaacaggcttggtctgaccaccatatcctgactgctttcggtcataacggcgctttccctgggcagacaggctgtccttacccttcttgtactgagtgaccttgcgaagggtgtgattcctgcactccttgttcttgcagtaggtcttcttggtcttgggaacgttcaccatgagaaagac

SEQ ID NO: 417961 - DNA, 293 bp, Oryza sativa
gtctttgtcgtcgccatctccgccgtcgctcgtcgggctctctccatctcccatccaggatgtagttcatttctgcctatctgatggcctatctggctggcaactccagccccactgcggaggatttgacaacgattctggagtcagctggttgtgaaatcgacaatgcaaagatggaactcctgttgtctcaagtgagtggcaaggacatcactgagctcatcgcttgtggcagggagaagtattgcttcatctcccatctggtggtggtggtgtaccttttgctgctgctg

SEQ ID NO: 417962 - DNA, 451 bp, Oryza sativa
aaaaaaaaaccacaacctttcaaaaataattataacttttaatacaaggaacccagcttacattcttacccaaacatcacaaaggcaaaccaggccttattttttttcttgcaaaaaagcacagatgcctgcaaaaaccatatcactgccccccccataaaacaaatactaattaatccttctacaaactcctccaatcatctccatgaccccctgaatgcacccacccaccgggccagtgtgggggcgcgaccgctaaaaaactgacactgctccttctgatgtggccgccatggtggtagccctcctcgccaagcttaatttccttattattcttcctgccctttttttccttgaaatccccgcccaccccttggacaccggtgaacttgtccttgatcttctccaccacgccttccttgtgctcccctcccttcttgtggagctcccc

SEQ ID NO: 417963 - DNA, 484 bp, Oryza sativa
gtttcatggcaaggggtttcagtctttcatcgatgaaaaggtagttccattggctgcagacatgatgcatcagaacctgggcctcgaggaatccaccttgcaagagctcgccaaggaccttaacatcatcgtcaatggagctgccaccaccaacttctacgaaaggtacgacgtggctctggatgtgaacgtgatgggggtgaagtacctgtgccagcttgccaagaagtgtgccaatctcgaggtgttcctccatgtctccacagcgtacgtgtgtggcgagaggtccggggtggtgcaggagagggcgttgagggagggggagacgctgcgggaggggacgtacctggacatcgagaccgagctgcggctggtgggcgagcagaggcagcagctggaggacgccggcgactccaaggcggagaggaaggcgatgaacgatctgggtttagccagggcgcgccactttgggtggccaacacct

SEQ ID NO: 417964 - DNA, 494 bp, Oryza sativa
ttttagatagatcgccgccgccgccgtcgtctccgcccctctccagccaccagatccagcgaccatggggcagggcaccccgggaggcatgggcaagcagggcggcgcccccggcgaccgcaagcctggcggcgacggcgacaagaaggaccgcaagttcgagccccccgccgccccctcccgcgtcggccgcaagcagtgcaagcagaagggccccgaggcggccgctcgtctccccaacgtcgcccctctctccaagtgccgcctccgcctcctcaagctcgagcgggtcaaggactacctcctcatggaggaggagttcgtcgccgcccaggagcgccttcgccccaccgaggacaagaccgaggaggaccgatccaaggtcgacgacctacgcggtacccccatgagcgtcggatccctccaggagatcattgacgagagccatgccatcgtctcctccttcgtcggccccgagtacttacgtcgcattc

SEQ ID NO: 417965 - DNA, 470 bp, Oryza sativa
tgaatcagagaagaagagcgagagaccgagggaggaggaggagagagaaggcgaggcgcaaagcgcaaatggagctctgcgtccgcgcctcctcgcttctgctcggcctcctgctccagctcctttcctcagtggacgtggtgtcggcggcgcagaaatttggtatcaactatggccagatcgccaacaacctgccggacccgacgcaggtggccggcctcctccagtcgctgaacgtgaacaaggtgaagctctacgacgcggaccccaaggtgctgatggcattcgccaacaccggcgtcgagttcatcatcgccatcgggaacgagaacctgcagtccatggccggcaaccccggcgccgccaggcagtgggtgacgcagcacgtgcagccctttctaccggccacgcgaatcacctgcattaccgtcggcaacgaggtgttctccggcaacgacacccgcatgatg

SEQ ID NO: 417966 - DNA, 450 bp, Oryza sativa
ttcttgcattgttctttctttcgttccataagtcgttgcatcaatattagcctgattttgagctatcaaagtagcaaaacgatggcaagtgctagctcaccggaaggtgcaagttcgagctctcctgaaaaggtcaagatggtcaccgtcctgagcatcgacggcggcggcgtcagagggatcatcccggccaccatcctcgccttccttgagaaagagctccaaaaactggatggtccggatgctaggatcgctgactacttcgacgtcgtcgccggcacgagcaccggtggcctcctgacggcgatgctcactgctccaaacgagaacaaccggccactgttcgccgccgacgaattggccaaattctacatcgaacactcgcccagcattcttcccacaaaagaactgggtcttggtcaaaatcgccggcacgctgaggatggtgag

SEQ ID NO: 417967 - DNA, 453 bp, Oryza sativa
aatacacatcaatttcatcataattagcgttcttattacaaggcaccgtgcagccattattatcagtacatcacaaaggcaaaccatgccttttttttttcttgcaatcaagcacagatacatgcatgagacagatcactgcatcacgtattgcacagatactaattaatcctgctacgaactcctccaatcatttgcagcatcacctgcatgcacccacgcacggcgccggtgtgggggcgcggcggctcaaccgctgtccctgctgctgctgctgtggccctcgtggtggtggccctcctcgccgggcttcttctccttcttcttcttcttggccttcttctccttgggctcgccgccgtcgccgtggccgccggtgatcttgtccttgatcttctccaccacgccttccttgtgctccccgtccttcttgtggtgctccccctccttctt

SEQ ID NO: 417968 - DNA, 358 bp, Oryza sativa
cttcttctctcgacttctccttcgagttgttagctccctccttattcaaccatgggtaaggagaagacgcacatcaacattgtggtcattggccacgtcgactccggcaagtcgaccaccacgggccatctgatctacaagcttggaggtatcgacaagcgtgtgatcgagaggttcgagaaggaagccgctgagatgaacaagaggtccttcaagtacgcgtgggtgctcgacaagctcaaggccgagcgtgagagaggtatcatcattgatatcgccctgtggaagttcgagaccaccaagtactactgcacggtcatcgatgcccctggtcaccgtgacttcattaagaacatga

SEQ ID NO: 417969 - DNA, 496 bp, Oryza sativa
gcgaacggcgccatcttgggggggtccatgaactgcgggagcttcagccccttcatctgcagctgctgctgcagctgctgaagctgctgcggcgtcggctgcggcatctgcggcggcatcatcatcttcacgtctttgctgccgcctccaccgttgccgccgccaccgccgccgcccttctggcccttgccgccggcgtccttgggatgccccttgccgccgccatccttgggctggcccttgccgccgccgccgccgtcaaggtggagcttctgaaactggttgttcaccgccgccaccccgaccttggaaccccatagctccgccggcttgccggccttgttgagcttcttgataatggcggccggatccaccaggccagacaccgtcaccttcccctgctcagcgtcaatgctagtctggtacacaccttcgatcttgtggaggatcttcttgaccttcttctggcacccatcacagtggatgttcactttca

SEQ ID NO: 417970 - DNA, 530 bp, Oryza sativa
tctagatcgcgagcggtcgttcttttttttttttttttgtgcaagaaaaattatctgcaaaacactgattctaaataacttaaatgtatatatacatatagttcatctaactaaaatagtaaaatggagacatagggtaaaatacataccatgactacatcggacacatacaccatgcttaaccttgcaaatgctgcacaccaatttccactgattcttctggacacttccaacattagtaacaggttccattgattccatgtcttccacaagagctcccggtgtccaaaggctacaaaacaagtgcacaaatttaaggttccccccatgcgctgtttgaccaggctcccctttgacaggttttagagcgcctttcttttttgggcatagaacacaaggcatcgacaaggtgttgtccgcatctttctttaacgactgcagtgacttcaaatccttacaccaagtgcacaaccactggtcattaagcacaacatgccaaccataacacttctggggcacaattaccttac

SEQ ID NO: 417971 - DNA, 395 bp, Oryza sativa
  unsure (1)..(395): unsure at all n locations
gaatcaaaacaggtgtattaccacaactttttaaggatggaattgagtagcaatactttcaccccaaaatacagtttagcgacaatatcttagaaaagccgcttgctttgccgccatggctggcaagctgagcagagcagctaacacaaagaacacgagatcactataaaccaaacggcaacgaacgaagaaaatacagggtcttttttgtctgaagatacacgaagcggttcgttttcttttatttttagtctcctctcctcctccatgatgggtgtatggcaatggcaanggccacgggatcttggcttacctgatgggaaggggctcgccgtttcactccttgaggcaccccagcatggggccnatgagcttgccctgcctgatgcccagga

SEQ ID NO: 417972 - DNA, 446 bp, Oryza sativa
ctcagttcttgaatccattcggggtgtaaaaatcatttacagaactaaagaattgaaagagaaacaggacagaagtcgcatttggaatgagacttggctggcaggtttcttttacaaaccgtgcaattatgaactatttgtcaaacagtcgctgaacatggaaatggctatcattatggcaagggatgctggcatggactggatcattcatcttgataccgatgagctaattcatccagctggtgcccgggagtactctctgaggcgattgcttttagatgttcctgataatgttgacatggttatcttccccaactatgagagcagcattgagcgagatgacatcaaagatcctttcacagaggtttccatgtttaagaaaaaatatgatcatctttcaaaggatacatattttggcctatacaaagaagcaacgcgtggtaatt

SEQ ID NO: 417973 - DNA, 464 bp, Oryza sativa
aatccaataatcgggaggtttttttaaaaggactcatctcaacatccataacaagcaaacgatagttgtttccgacaccaacattagaccataacgagtcaactgacaaccatagactagaccaaaaataccgcggactgcatagataaaacatcagtgtcgagcagaaggaaccgctcagcacttgacctccttcagcccatgagagaagtaaaggaaggttgggtcggtggctccgtccttgtagtaggcaaacaccaagccgccatcatcatgcatgctctcaccaacaaagaactgaaggtccttgagctttccaagcaagtacttggtggcaccctcaatgttcttcttgaattcctcttgcttttccgcatccagcttggcggagaggttcttgatgtagcgcttcatgaaggccacacactgcttcttgtcaaaaggaggttgctcctgaagacgga

SEQ ID NO: 417974 - DNA, 484 bp, Oryza sativa
cctcaccccaatcctcccccgatctccccaatccgagagctccggaggagcagcgcggaggcggagatggcgctgcggcgagcgctgctcagatctgccgagatctcccccgatcgcaaggctgcacttgagtacctccattatctatcgagagcacagcctactcgttctctaacaggtgctggcctttattctgctggcaaatcattcagcactcaggctgctactacatcaagcacaccacaaccttcaccaccacctccacctccggagaagactcactttggtgacctcaaagatgaggaccgcatttttaccaacctctatggtcagcatgaccctttcctgaaaggtgcaatgaagaggggtgactggcatagaaccaaggatttggtgcttaaaggggcagactggatagtgaatgaaatgaaaaaatcgggacttcgagggcgtggaggtgcaggaatcccttctgggcttaaat

SEQ ID NO: 417975 - DNA, 473 bp, Oryza sativa
tttttcgtgttcgcgttcgtcgcgcggctccgacctccaaagccgccgctacccttcccgtcttcgtcgtcgccgcgcacgcagatcgcgaaccagcccgcgcgccgcgcagcagcgccgcggagaggaaaggagagctccgtcgtgcaccccccgccaccatctcgtagggagagatggggctcacgttcacgaagctgttcagccgcctcttcgcgaagaaagagatgaggattctcatggtcgggctcgatgcagccggttagaccaccatcctttacaagctcaagcttggcgagatcgtcacgaccatccccaccatcggatttaacgttgaaaccgtggaatacaagaacattagcttcactgtttgggatgtccgtggccaggacaagaacaggcccctgtggaggcacttttttcagaacacacagggactcatctttgtgcggacagcaatgatagggggcgtg

SEQ ID NO: 417976 - DNA, 400 bp, Oryza sativa
ttctcacctcgcgcactcagtctgtactacctgtacgtacgtggccgccgctagctaagctaggaattgaaatggggatggagaggccgcaagagaaggtggccaccaccaccaccgccgccttcaacctcgccgagtccggctacgccgaccgccccgacctcgacgacgacggccgcgagaagcgcacagggacgctggtgacggcgagcgcgcacataataacggcggtgatcggctccggcgtgctgtcgctggcgtgggcgatagcgcagctggggtgggtgatcgggccggccgtgctggtggcgttctcggtcataacctggttctgctccagcctcctcgccgactgctaccgatctcccgaccccgtccatggcaagcgcaactacaccta

SEQ ID NO: 417977 - DNA, 400 bp, Oryza sativa
  unsure (1)..(400): unsure at all n locations
gggagggggaaacataattttccattgaagtgaaataagaaggaaaagaataaactgagggcgattacatcatgtctacttatgaaacagggataacaagaattttttttctcaaacacaggaaataccatttaggaaagttacctaattgccacgacttgtcagtcacacgagataatcacaaggcagaaaggggaaaatgaaacaaacggatcgctcattgcctcgacaaagaggccttgctggagctgccagtaaactaggatccccggaccatgaatgctgtttcgcttaagcaagacccaacaataataaagcctggcaacttaattggtctttttcttgggcgnctactgatgattagaacacaaaatggagcacgcccccctttgcgcctttt

SEQ ID NO: 417978 - DNA, 410 bp, Oryza sativa
acagaaggtgtcattaatatgattgtacatgaaaaagtatattatgattagaatattttcacccattataatgcacgggtattttttcagtataatataaatataaaagcaagaagaggaaataataataaagggagcagtgcaggaggtagctagtagcttggtgcggtgccgagcgcgtagctcttgagaaggtcaccgcagatggggagtgggcgggtcttgaggaagccgagaggattggcgcggcggaccatggtggcgaggccggcgtcctgaacgagggtgaccggcgcgcggtctcgacccacctgcagctcgtggcattcagggaccgggctgatgtatagtgccatcagacagacctgattggcacctatgttgagcaccagctcgatgcggtagtgccc

SEQ ID NO: 417979 - DNA, 387 bp, Oryza sativa
agggaaaagggttaaataaccaagggggccccccaaaaattccccttaaaagattgcctggaattaaaacccgtgttccaatttaccctaccccggatttggtttccggaatccccaaaaactccctcccgtgaccgggtttaatttttaaaaagccccgggtccaattattgcgacaaaagtttttgatccccccaaaaatggacccttgatagcccaaccccccttaaaacccttaatatgcctaccgggggtggcccatcggatctttagcccccccccgagggagaaccccccctgtaggccctgaccggaaggccctcaaagggacccttgccgagcacaggattaccctgggattgacccagggtagccccaaagttggcc

SEQ ID NO: 417980 - DNA, 463 bp, Oryza sativa
gttattcatatacacaggatccagcgacgagtatgtctacatctatgacgtggtaactggggatatcgtcgagaagctttcgtggcatggatcgatcatcagggactgtacctggcatccttacaacctgacaatcgtcagctcttcctgggacggctacctggcaaggtgggaggcatcaggggacgaggacgacctttctgtgctcacggaaaacgaacagaggacgagtccttaccgtcagtcgtacacactgcaccttctgctgtagggaagagaagtcattttggtttcctgtaaggagttgtgatgttgctacatctgtaatcgcctgattgcaatgctcattgcaacagtgtataggactgggtgctgtcaaactgcatttattgctgtagagaggccattggtcgcctgcaaagagttatatttgtgctcttctgattgcaacagagtatatagg

SEQ ID NO: 417981 - DNA, 471 bp, Oryza sativa
ctcgtttggatcagctaccggctttccgttgatatctccgcgcttgatggccgccgccgccgcggtcgcctccctcctcggcttcgtcctcgctctccctttctgcttggcggcgccgtccatcacaacgcatggcagcgacggcggcggcggcagctacgtgtcggcggtcggggaccccggcatgcggcgcgacggcctccacgtcgcctgggaggcatggaacttctgtaacgaggtcggccaggaggcccccggcatgggcagcccccgcggcgccgactgcttcgacctcgagaatggcgtggacgagaacggccagccgacgtacaaggtggtgcaccgggtgaccgacgccgacaacaacctacgcgccggcgacccttttccgggctcgccggcgaacatcacggacgtcgacctgtacgcggcggtgaaggagctctacctgggcgaccggtgccaggtgcc

SEQ ID NO: 417982 - DNA, 503 bp, Oryza sativa
tttttcctccttactcgcagctacatcagtgggtaccaggcttcaaaggatgacatgactgttttcacctcacttccttctgctcccgcagcaagctatgtcaatgtcacaaggtggtatgatcacatcagtgctctcctaagatccagtggagttaccgcagagggtgaaggtgtgaaggttgagtcaactgcttgttctgtgtctccaactgctgaccaaaaggcaccagcagctgatgaagaagatgatgacgatgttgatctgtttggtgaggagactgaagaggagaagaaagcagcagaagaacgggccgcagctgtcaaggcttctggaaagaagaaagaatctgggaaatcatcggttctgctagatgtaaagccatgggatgacgaaacagacatggcaaagcttgaggaagctgtgagaatgtgaagatggagggcctgctctggggtgcatccaaacttgtccagttggtatggcataaaaaattgcaaatt

SEQ ID NO: 417983 - DNA, 458 bp, Oryza sativa
ggggggtatattaaagatggtggggctttctttataactttatacagtgacacaatggttttccgtttatacatacatacatacataattacatcactaagtagactataaacaatcccaattcaagccacacacacaacacaaattcttcattcttcacacgcaccgtgtgatcgggccacgaggctcacatgacggggtagctcggcagcagcgcgatgccgcacagcccggacgccaagccggcgacgtcgcgctgcatgaggatgtagccggcgtcgccccactccgccccccacgagttcttcacgatccagtacttctcgccgcctttcgccgcgccgccgccgtccgtcttcggctcggactcgccgtagcccaccacggtgacgccgtggttgacgtcggcggtgcacggccccgtgtagaccccgctgccgtagagctggaacatgaag

SEQ ID NO: 417984 - DNA, 472 bp, Oryza sativa
aaatattcgggggccactttatttggcacactggtgttcgtaaggttcgggtgaagtgaaaacaaaacagtgagcagaaccaaaatcgtcactgcttagctccgagctgaacgcggctgggctaacgaaggaactgacaagctgacgaagtgaacgccgatagcccgcgaggaccaaattctcatcggcccctatcatggctcgcacgagcatcccctgccggacgacacggctcggaaactccgatcccactggtccacaggcgcagcttcagcgtgagggacatggcgcgggtgcttgtccctcttatcaccctttatctgcttcagggcgtgtttcagtgctggaagaagcgcctccatgcactccgcaacagcgttcggtttcccggccatgctgatgataagtgttgatcccctgatccccgcagtggctctagatagcattgcgaatggtgtcacctttaaacttt

SEQ ID NO: 417985 - DNA, 447 bp, Oryza sativa; identical to SEQ ID NO: 395000

SEQ ID NO: 417986 - DNA, 442 bp, Oryza sativa
attttgttcgatgctcagctcatgccctacctcagccactgtggattagccaggctaagccaatttgtcagtgccataagaacggactcagaagctctcaacagtggtaaaggctatgttgcacctgagcttactgacccagcaacagatagcatcaaggctgacatttacagtttcggtgtgattttgctcgggcttttgactgggcagaaagcctttgacagttcaagaaggcagaatgagcagtttctaggtgattgggcatctcctcatcttcataaccttgattctttggaaagaataacctgatccaagaatacatgcatttattgcacccttaagctttctttacgttagggaaacataatcttactttgcatcaagaaataaccagagcttcgtccgccaatgacagtcataacaagacaaactactgaagctt

SEQ ID NO: 417987 - DNA, 493 bp, Oryza sativa
atttttatctgatctactagctacctagtactctcatcttcttcactagcttttgcttgatcaattgcagcaatggcggcgaaggcagcgctcgttctagcggtgagcctcctggtggtggccgtggcgagcgcctgcacctactgtccggagccgtcgacgccgaagccgaagccgccggcgccgaggccgccgacgcccggtggcggcgccgggtcgtgcccgcgcgacgcgctgaagctgcacgtgtgcgccaacgtgctcggcctcgtgaaggccaagatcggcgcggtggcgccgttacgagccctgcttgctcgctgctcgacggcctcgtcgacctcgacgccgtcgtctgcctttgcaccgccatcaaagccaacgtgctcggccttaacctcaacatacccatcgacctcagccttatcctcaacaacctgcggaagatctgcccattcgactaccagtgtgcttaatcacattgggacactgc

SEQ ID NO: 417988 - DNA, 388 bp, Oryza sativa
ggtgcgctctcaacatgcggtttatttaggcacggtccacaattcatacatgtatagtggatacgtctcgttggcagacactcacggtatagtagggtagttgtgtgtacagtgatatagtcatatctgcgcgtcttttcatgccgttcgttgacttcgttcacagggtcagggtcgggtaggcgatatcgagtgtgacgccacacaggccggggccaccgacgtcgcggagaatccggatgtagccgcgctcgccccatgactggccccatgagttcttgatggtccagtacttggcgccggaagacgcgtcggtgccgtacccgacgacggtgacggcgtgcgctaggcgcgtgccgcacgggcccgtgtaaacgcccggacgcgt

SEQ ID NO: 417989 - DNA, 484 bp, Oryza sativa
gtttgattcgtgttcgcttctccgactcgactcgatcgactcctccctcctcgccgtggtgcggcggcggcggcggcgaagcgcattggtggtccactccggcggcggggggagtgagaagtcaccagtaaggaggagtagaggatggcggcgagcggaggcagctgcccggcggcgatgaaggcgacgtcgcagggggcgttccagaaggagaacccgctggacttcgcgctgccgctcatcatcctccagatctgcctcgtcgtcgtcgtcacccgcgtcctcgcctacctcctccgccccctccgccagccccgcgtcatcgccgagatcatcggtggtatccttcttgggccgtcagcgctgggccggagcagcaagttcttgcacaacgtgttcccgccaaagagcatgaccgttctggacacgctggccaacctcggccttctcttcttcctcttcctcgtcggcctcgagctcgaca

SEQ ID NO: 417990 - DNA, 422 bp, Oryza sativa
gggggagaaaattattgatggaggattactccatcttgcattccgcaagaagaccgctagttagggggaaaagagtaaaaaaagaccaaaaacgatcacaacgacgtggtcgtactccaacacgtacgtacggtactccactagaacgtaaaacctctctagaagagggaaaccggaccatatatttggtagcactttacaactagggctgttcagatcagccatgtttttttgttttttgttcttccaatcattcatcgaaaatttcctttaaccagagcgccgtttgcaattcccgctccagcgctgatgacgatctctcgttgaatgccgagggggttcctcacactgtgtagttctgctggatcgtgtcgatgtccagccccttcagctttaccaccgattcgacgtggcccttgaga

SEQ ID NO: 417991 - DNA, 444 bp, Oryza sativa
gattgaggacatgaagaactggggttacacaacaaccgaaggggaacaataggactgagaacatccaagttttttaccgaatagaaataaacgaggtttaaacgactaacatagtgcacattgcgagcagatattaacggtccatgcaacgagcaccatggacgtgggcaaaactgaacgaatcgctagatttctaaaaatgcaggcagtataaccaccacttgaacgatgcttatttcttcttggcggcagccttggtcaccttggcaccggatgggtccttcttctccacgttcttgatgacgccaacagccaccgtttgtctcatgtcacgcacggcaaaacgaccaacatgagggtactcagagaaggtctccacaaccatgggcttggtgggaattattttaaccattcccagcttaacggtttttgaggaacttgggg

SEQ ID NO: 417992 - DNA, 514 bp, Oryza sativa
  unsure (1)..(514): unsure at all n locations
tcagtatcgaatcctcttttctcctcgtgcccaccaccaccaccgtagcaatggcgggcaacgggccgatcaacaaggaggacccgctcaactggggcgcggcggcggccgagatggccggcagccacctcgacgaggtgaagcgcatggtggcgcagttccgcgagccgctggtcaagatccagggcgccaccctccgcgtcggccaggtggccgccgtcgcccaggccaaggacgccgccggcgtcgccgtcgagctcgacgaggaggcccgcccccgcgttaaggccagcagcgagtggatccttaactgcattcgccacggcggcgacatatacggtgtaaaaaacggctacggcggaaccttccacccgccgaccaaggacggccccgntcttcaagtggagcttctcaggcattttaacgcccgaatctttggcactggctccgatggccacacgctgccgtcggagaccgtgcgggcgggcatgctcgtgcgcataacaactttttt

SEQ ID NO: 417993 - DNA, 245 bp, Oryza sativa
catcatgcccaccactaccaccgtagcattggtgtgctacgggccggtcaacaaggaggtcccgctcaactggtgcgcggcggtcaacgatatttccggctttcacatctactaggtgaagtacatggtggcgcatttacgccagccattggtcaagatccatggcatcacacctccgcgtttgccaggcggtcgtcatagtccatcccaaggactccggcgacttacacgtggagctctattag

SEQ ID NO: 417994 - DNA, 503 bp, Oryza sativa
  unsure (1)..(503): unsure at all n locations
gtatttcctgacgctgtttacttagttgatgctattgagggtgggaaagaacttattgaagcttgcaaaccagcacttgaatcagaatatgtcaccaaagttattcatgactgcaaaagggacagtgaggctctgtatttccagtttggcataaaattgcataatgtgatggatacacagatcgcttattctctgttagaggagcaggaagggaaaaagagaggatacgatgagtacatatcttttgtcagcctccttgctgatccccgatattgtggaatggcatatcctgaaaaggaagaagtccgtacccttctaaggcaggaccctaacttttggacgcataggcctttatctgaaatgatgattcgagcagccacagatgatgtccgcttccttctcagtatacatgagaaaatgatggagaagttaagcaaagtatctttatggcgtctgtcagttcgcagtgagctatactgcangtgcttttgataaatgacaac

SEQ ID NO: 417995 - DNA, 475 bp, Oryza sativa
tgtttacctccccacgccggccaccgccgcacggggtccggcgacgaacgagggcgctgctctcgagcgcgatggggggccggaagcgcgcgctgctggtgggcatcaactacccgggcaccaaggcggagctcaaggggtgccacaacgacgtggcccgcatgcgccgcgccctcgtcgaccgcttcggcttcgacgaggccgacattcgcgtcctcgtcgacgccgaccgggcggcgccgcagcccacgggggccaacaatccgccgggagctcgcgcgcctcgtcggcgacgcccgccccggggacttcctcttttttcactacagcggccacgggacgcggctgccggcggagaccgggcaggacgactacacccgctacgacgagtgcattgggccctccgaaagaaccttatcacagacccagatttcacagaactcgttcaaaagtcccagatgactgcttattcacc

SEQ ID NO: 417996 - DNA, 466 bp, Oryza sativa
tttgttggtgacccgttcgacgcagtgggagcggaggtgagcaaagctccggccgcgacctccagcaagacgacgatggagccaagccgcccgcgcctccctctcctcctcctcctcctcctccacttctcgctgctcgcctcgccgtgttccgcgcggtggcgagacggctgcggcgttggcgatctgcgcgagagcttcctccggtgcgtcgcgcggcggtcgccggcgaccgccggcgacccgtcgcggctcgtgcacgcgccgggcgacgcctcctacccgtcgctgctcgacttcaccatccagaacctccggttcgccttgccgtggacgccccgcccggcgctggtgctcacgcccgtgaccgccgacgaggtgcgcgcctgcgtcgtctgctgccgcgcccaccgcctcaccgtccgcgcgcgcaacggtgggcacgactaccagggcctcttgtacc

SEQ ID NO: 417997 - DNA, 453 bp, Oryza sativa
gtggtatatggtgagtagcccggattacccggagtcggagttcaggaaggcgttccgcatgtccaaggccacgttcgaggtggtctgcgacgagctcgccgccgccgttgccaaggaggacaccatgctccgcgccgacatcccggtgcgcaagcgcgtcgccgtctgcgtctggcgcctcgccacgggggagcccctgaggctggtgtccaagcgcttcgggctagggatctccacctgccacaagctcgtgcttgaggtctgcgccgcgctcaaggccatggtgatgcccaaggtggtgcgcttgcccgaggccggcgacgcggcaaccatcgtcgcgcacttcgaagccatctccgggatctccggcgtcgtcggcgcgatctacaccacccacatcctcagtatcgtgcccaaggtcaacgttgtctcctactacaaccgccgtcacac

SEQ ID NO: 417998 - DNA, 455 bp, Oryza sativa
gtttctgtctgtttgcggctcaaggtttcagcgaggggcgccttcacctcgcctcgtctcgccttgctagtagtggtcgcggcggcggcgttcgtcttcgtctcgccggcgatggctttcccgatgggattgccggcgacggcgaacccgttcccgaacccgtggtccgctttccagaacctctctgggtgccacgccggcaaggagagggaggggctagggaggctcaaggattacctcagccacttcggctaccttccgccgccgccgatgtcgtcgccgtacagtgacgcgttcgacgactccctggaggccgccattgtcgcgtaccagcgcaacttcagccttaacgcgactggggagctggacacggacaccgcggaccagatggacgcctcgcgctgtggcgtctccgaacgtaattaacgggacatccacccattggacaggaactc

SEQ ID NO: 417999 - DNA, 556 bp, Oryza sativa
ctttttctctcctctctctccctcttccgccgccgcgcttggggaaggaaggagaaagcaagccatcggcccccgcctccgcctccgaagggacattgttgctagttggtgatggctgagcaggctaatcaaccgactgtccttcagaagttcggtggccagttccaccttggctccagcttttctgaaggtgtacgggctcgcaacatctgcccatctgtctcatcctatgacaggcgctttaccacaaggagctacatgacccagggccttgtcaatggtggcatcaacgtcccaatgatgtcgtcctctccaatttttgctaatgctccagctgagaaaggtggcaaaaacttcatgattgatttcctcatgggtggagtgtcagccgcagtttcaaagactgctgctgctccgattgagcgtgtgaagctgcttatccagaaccaggatgaaatgatcaaggctggtaggctctcagagccatacacgggtattggggactgcttcggacgcactatcaaggatgagggttttgcttcattgtggagaggaa

SEQ ID NO: 418000 - DNA, 411 bp, Oryza sativa
tctgccgccctttttttttttttttttttatggaacgaaacttatttgttcctcatcttattctctgatgaaatttcaaaaggagagcgaaacagtggacactgacgcttgcgaaataaaaaggtggcgccagaaactccggcgagactacggcgacgagacgcccgacgacaacgaccatgacacgatacaaccacacactgggtggagattaccgtcggcgacggcgacgaacacgacggcgacgacgactgctcagtgcgacaggtacaatggaggaggagaaggaggtgcaagaactcctcgcgtgaacaccaagaagccggcgatggctgcctcggtcacacggtgagcccccgcatgaacttccacttcgtggcatcctacttcggcgcgccgggggtcgacccc

SEQ ID NO: 418001 - DNA, 467 bp, Oryza sativa
tcgtgatcgagatgctcaacacggcgccctaccggttcccgaacggtactcagacggacccgaacctcgacgggaaggtgatgctgttcaaggtcgccggcaaggggaaggtcgacgacatgccggacaagtccaaagtgccggagcacggtgtgccgtacgcgagcgtggcggcgctcccgccgtcgacgacgacgaggtacatcgtcctgtacgagaaccagaccgcaccggggaacctctacatcaacggcctccgtctggaggacccggtgacggaaacgcccaagtccggcacgacggagctgtggcaggtgatcaaccttaccggcgacaaccacccgctgcaccttcacatcgtcacgtttcaggccgtcaagatgaccaaaatcgagggattccaggagttcaagaactgcatgatcgccaacaacaacaccggcacgtgcaacctcacccagcacgcc

SEQ ID NO: 418002 - DNA, 497 bp, Oryza sativa
ccttccccgtctccttcctccattcctccgccggtagaaccttctagaagctctcctcctcctcccatggcggcgacgatcgtgtccgtcaaggcgcgccagatcttcgacagcaggggcaaccccaccgtcgaggtcgatgtgtgctgctcagatggaacctttgcaagggctgcagatcccagtggtgcatcaactggtgtctatgaagctctcgaattgagggacggtggatctgattacttgggaaagggtgtttccaaggctgacgacaatgtgaactcggctattgccccagctctgattggcaaggaccctacgtcacaggctgagcttgataacttcatggttcagcagcttgatggaaccaaaaatgagtgggggtggtgcaagcagaagctcggtgctaatgcaaacctggctgtgtcactggccatttgcaaagctggagctatcatcaagaagatttctcttgaccaacacattgccaaccttgc

SEQ ID NO: 418003 - DNA, 608 bp, Oryza sativa
cggcatacccgggcgagcggcacgccgtcggttttttttagtggagaggaacaggaaaactacagaggacttgcttataggatccacgaacacgggcgaggaaggcctagcatgcaatgcaacaagatgggcatgcctctgctgctgctgctgctgatcctcgtcgctgctggcccccaggcaggcagagctgcaaagccaatcccaaatctccagctcatgaccaaggagggcggcagttcaagaatcatccaggacgacatcataaaggcaatcaacaagcatcccaatgctggctggacggctgcacggaatccatactttgcaaactatactactgcgcaattcaaacatatccttggagtgaagccaacaccgcatagtgtgctaaatgatgtccctgtcaaaacttatccaagatcgctgatgcttccaaaggagtttgatgccaggtctgcatggtcacagtgtaacacaattgggaccatacttgatcagggtcactgaggctcgtgttgggcatttggtgctgtggagtgtcttcaggatcgtttctgcattcatttaacatgaacatttgcatattgtcaatgacctagtggcatgct

SEQ ID NO: 418004 - DNA, 483 bp, Oryza sativa
gtctgtacctctccccaaccctagctagctccccctccttccccggcggcgacatcgacgatggcggcggctgcggcaggcggcggcggcggcggcgccccgcgggcgctctcccagcgggagcaggacatccagatgatgctcgcggcggacgaccacctcggcaccaagaactgcgacttccagatggagcgctacgtctacaagcgtcgatccgacggcattttcatcattaaccttggcaaaacctgggagaagcttcagctggctgccagagtgattgctgccattgagaacccacaggacatcaccgtgcagtctgctaggccttatggtcagagggctgtcctcaagcttgcacagaacaccggagctcatgccattgctggcaggcacactcctggtacaattaccaaccactggaaacctcattcagtgagccacgtcttctcatccttacctgccccaggacagatcattagc

SEQ ID NO: 418005 - DNA, 484 bp, Oryza sativa
ggttctgatgcgcgtgctcgtcaccggcgccgcaggacaaattggatatgctcttgtccccatgattgctaggggtgtgatgttgggtgctgaccagcctgttattctacacatgcttgacattccaccagctactgaatctcttaatggccttaagatggagctggttgatgctgcatttcctcttttgaagggaattgtcgcaacaactgatgttgtggaggcctgcactggtgtgaatgttgcggctatggttggtgggttccccaggaaggagggaatggaaaggaaggatgttatgtcaaaaaatgtcttcatctacaaatcccaagcttctgctcttgaggctcatgcagtccctaactgcaaggttctggtagttgccaatgcagcaaacaccaacgctctcatcttaaaagaattcgctccatccatccctgagaagaacattacttgcctcacccgtcttgaccacaacagggca

SEQ ID NO: 418006 - DNA, 80 bp, Oryza sativa
tatatttacagcaaaaaaaaatgaggttgtttggatggatagatggatcgatcgagattagcaacaagaagaaggataag

SEQ ID NO: 418007 - DNA, 568 bp, Oryza sativa
ttttccctctcactcccagatacctgctgctgccactagcccactaccatggatccttgcaagttccggccgtcgagctcgttcgacacgaagacgacgacgacgaacgcgggagctccggtgtggaacgacaacgaggcgctgacagtggggcccagggggccgatcctcctcgaggactaccacctgatcgagaaggtggcgcacttcgcccgggagcgcatcccggagcgcgtggtccacgcccgcggcgcctccgccaagggcttcttcgagtgcacccacgacgtcaccgacatcacctgcgccgacttcctccggtccccgggcgcccagacccccgtcatcgtccgcttctccaccgtcatccacgagcgcggcagcccggagacgatccgcgacccgcgcgggttcgccgtcaagttctacacccgcgagggcaactgggacctcctcggcaacaacttccccgtcttcttcatccgcgacggcatcaagtatcccgacgtcatccacgccttcaagcccaacccgtgcttccatgtccaggagtactggagggtcttcg

SEQ ID NO: 418008 - DNA, 563 bp, Oryza sativa
tattttccccaaccctaaccctaaccctaacctccccctccgccgcgccccccaccgcgtccgctgcgccaccgacgccgccgccaccaggcaccggcgcgcggccgacgagaacatccgggaggaggcggcgaggcaccgcgccccgaaccacaacttctccgcgtggtacgcgcccttcccgcccgcccccaacggcgaccccgacgagcgctactccctggacgagatcgtctaccgctccagctcgggcggcctcctcgacgtgcgccacgacatggacgcgctcgcccgcttcccgggctcctactggcgcgacctcttcgactcccgcgtcggccgcaccacctggcccttcggctccggcgtctggtccaagaaggagttcgtcctccccgagatcgaccccgaccacatcgtctccctcttcgagggcaacttcaacctcttctgggcggagcgcctcggccgcgaccacctcgccgggatgaacgacctctgggtcaagcactgcggcattttccacaccggatcgttcaggattctcgcatgacggtgctcgt

SEQ ID NO: 418009 - DNA, 453 bp, Oryza sativa
cttatatcgcatcgattttctccttttcgagtttttttccccttcgcttgagagctttcgacgagagcgagggagagggagatcatggccggcaagggagacgggccggcgatcggcatcgacctcgggacgacctactcgtgcgtcggcgtgtggcagcacgaccgcgtcgagatcatcgccaacgaccaggggaaccgcaccacgccgtcgtatgtcgcgttcaccgactccgagaggctcatcggcgacgccgccaagaaccaggtcgccatgaaccccatcaacaccgtcttcgatgcgaagcgtctcatcggccggcgtttctctgacacgtcggtgcagagcgacgcgaagctgtggccgttcaaggtgctacccggccccggcgacaagccgatgatcggcgtgcagtacaagggagaggagaagcagttcttcgctcaggagatc

SEQ ID NO: 418010 - DNA, 501 bp, Oryza sativa
gcttttgtgagataacgcagctggcctcgctgggccgggctgatatagcgttcgcagctatctgctccacggctatgcgacagcggcggtgcgcgtttcttgacttgttcatctctagttgcacttctcaccatgaagaatctactttcgtggctcttcttgcacgatgtctcgatgcccaccaaactataggtgagccgaccatggacatagagaccgacggtcgcttcggcaacaagcgcgtgcaccaccgcctcggcccggccaacggcgccgcctcctcgtccacctccgggaaggtctgcatccactggcgcgccggccgatgcaatcgcttcccctgcccttacctccacagcgagctccccgaggcgacagccaagcgcccgagccaaagcggcggcggcggcaacgtctggaggaatccccactcaggaggtggagggggccgcggcgcccgcggccccggggcccgaacaatgggggaggggccctgttgtg

SEQ ID NO: 418011 - DNA, 513 bp, Oryza sativa
acatcatacagcaaccagccagctgccacactagcttgaggcgagcgagcgaagcttagctagcggatataacaagtcgtcgatctgcttgctgcttttgtgaattgcggtggaagcatgtcgagcgcgtcgtccatggaagcgctccacgccgcggtgctcaaggaggagcagcagcagcacgaggtggaggaggcgacggtcgtgacgagcagcagcgccacgagcggggaggagggcggacacctgccgcaggggtgggcgaagcggaagcggtcgcgccgccagcgatcggaggaggagaacctcgcgctctgcctcctcatgctcgcccgcggcggccaccaccgcgtccaggcgccgcctccgctctcggcttcggcgcccccgccggcaggtgcggagttcaagtgctccgtctgcggcaagtccttcagctcctaccaggcgctcggcggccacaagacgagccaccgggtcaagctgccgactccgcccgcagctcccgttttg

SEQ ID NO: 418012 - DNA, 506 bp, Oryza sativa
  unsure (1)..(506): unsure at all n locations
tatatctctctctccgatccggatcttcctacccactccggcgagccctcgccgcgtcgcctccacgcgactcgctcccgtatatcggcgcttcccttagccgctgccgccgcccgcctataccaccagctatatccgattgcctcctccccctttcgcgcctctgtcccgcgccccaccaaaccctaggcgcgccgcccatggacatagagaccgacggtcgcttcggcaacaagcgcgtgcaccaccgcctcggcccggccaacggcgccgcctactcgtccacctccgggaaggtctgcatccactggcgcgccggccgatgcaatcgcttcccctgcccttacctccacagcgagctccccgaggcgacagccaagcgcccgagccaaagcggcggcggcgggaacgtctggaggaatccccactcaggaggtggagggggccgcggcgccggcggcgccgggggcccgaacaaatggnggaggggccccggaggtgcggat

SEQ ID NO: 418013 - DNA, 484 bp, Oryza sativa
ttgcacgctgtaggtctttagagtggagaggaagaggaatcctcctcagtcctcaccttcagatttcagaacacaggcaatcggccctagctgcaatccaacaagatgggcatgcctctgctgctgctgctgctgatcctcgtcgctgctggcccccaggcaggcagagctgcaaagccaatcccaaatctccagctcatgaccaaggagggcggcagttcaagaatcatccaggacgacatcataaaggcaatcaacaagcatcccaatgctggctggacggctgcacggaatccatactttgcaaactatactactgcgcaattcaaacatatccttggagtgaagccaacaccgcatagtgtgctaaatgatgtccctgtcaaaacttatccaagatcgctgatgcttccaaaggagtttgatgccaggtctgcatggtcacagtgtaacacaattgggaccatacttgatcagggtcact

SEQ ID NO: 418014 - DNA, 99 bp, Oryza sativa
atcaccgttcgtccgctcgccgcgtcgacgagctcctcctccgcttcgcgcttcgtgtcagggtttggagtggagtggagggggaaggaaaagggggag

SEQ ID NO: 418015 - DNA, 353 bp, Oryza sativa
gttgatttcagagcccagctagctctcgatcattggttacagagaaattgatcaaagcaggaaattaaccagctgtcaggaagcaatggctctcgtggaggataacaatgccgtagcggtgagctttatcgaggagcaggaggcgccggtgctcatggatctggagctgaatcgaagcaaggatcggaacctgttactgctgcctaaggacaggacactcacgacatatcttagattttgtgtgctggctaatctttgttctagtggtgcactgatgagaaacgttacttcccaagttgtcgggcgatgatgattcttgttgagattttcaaattgcaatccatatttgaacc

SEQ ID NO: 418016 - DNA, 559 bp, Oryza sativa
gtcgcgctggtccaattgatcagaatcgaatgtagagtacctgagtacggatggacgacacagaaggtgttccatttcatgaactttattgtgaatggagtgcggtcaatcgtgtttgtgctccgacgagatgtgcaacttgtgcagcctgaggtatttcaacatgtgctcattgattttccggggcttgcattcttcacaacctatgctctgttagtgctcttctgggctgagatttactatcaggcacgggcaatgtctactgatgggctcagaccagctttttatacaatcaatggagtggtctatgcaatccagataatactttggatggcgttgtggtggaaaccagttcgagcaatggtcatcttgtctaagatgttctttgcagcgacatctttatttgctgcccttggatttcttctttatggagggaggctatttctgatgttacagcgttttccagttgaattaaaaggaaggcgtaaaaagttgaatgaggttggatatgtgacaatcatatgcttttctggcttcttgatcagatgcgtaatgatgt

SEQ ID NO: 418017 - DNA, 372 bp, Oryza sativa
tctatctgaacacagcaccaccccttctgctgcatctcccacctccctctgaattgtgggcctgaggcgatggcggcgctcgccccgtccaagatgctcggcacccggctcaacttcgccggctcctcccgctacgccaccgcggcaccgaccaccggagcgcagaagatcgactccctcttcagcaagaaggccgtcctgtagcccaagcccaccgtcgagacctcctcgagccccggcatcagggattagctcgtgaagaagttcgagccttccaggaagatgaacctgccggagggtatcctggacctgtcagaggtgccggactactctcacggcgagggccccggagactacggctacgaccctttt

SEQ ID NO: 418018 - DNA, 500 bp, Oryza sativa
tatcactgtgaggtcgatcggcatccggcgtagtgagaagatcgcgtgctacgtgacagtgcgtggtgagaaggcaatgcagctcctggagagtggcctgaaggtgaaggagtacgagctgctgaggaggaacttcagtgagactggatgctttggttttggtatccaagagcacattgatcttggcatcaagtatgacccatccactggtatttacggtatggacttctacgtcgctcttgagcgtgctgggtaccgtgttgcgcggcgccggaggtgcaagtcccgtgttggtatccagcacagggtcaccaaggaggatgccatgaagtggttccaggtcaagtacgagggtgtcatcctcaacaaggtccaagccaacactttctaagcatcaccagtgcctagttctctttagaacttaagttatttggatgttggatttgtatgcttcttaaaactaaagatgttttgttattttgccaactttgagttggatc

SEQ ID NO: 418019 - DNA, 559 bp, Oryza sativa
tgtctgagtcgagtcgcctcccccaccgccggccaaccatgctgccgccggccgcccgcctcgcggcccgccgcctcctagggctcgcgacctcctccgcctcggaatcggccgcggcgcgacgcttgacccgttctccgatctcctacgccgccgcgggctgctcctccaggctgatctccacggcgcttaactaccacctcgattcgccggaaaacaaccccgacatgccgtgggagttcacggaggccaacatgaagaaggttaatgagatattgtctcactatccaagcaactacaagcagtctggcattattccaatgcttgatcttgcccagcagcagcatggtggatgggtgccagttgcagcaatgaatgctattgctaagatcgttgaagttgcaccaatcagagtatatgaagttgctacattttacacaatgtttaaccggactaaggtgggtaaatatcaccttctggtgtgtggaaccacaccttgcatgaatcgtggtcacgtgaaattgaagaagccttgctagaacattttggagttaaaacg

SEQ ID NO: 418020 - DNA, 410 bp, Oryza sativa
tcttttcttcttcatcgcaagctagtcagagtgggtcgacgatgatgaagaagctggtgaggctgctgatcatggtggaggtggtggccatggcggcggcgccgcggagagcggcggcgctgagcatggactactacgggatgagctgcccgttcgcggagatggtggcgaggagcgtggtgagccaagcgctgatgggcgacccgtcggtcgtcgccagcctactgcggctacacttccatgactgcttcgtccagggctgtgacgcctccgtcctcctggacttcaccccggacaacaccgccgagaaggacgcgctcgccaacaagagcctccgcggcttcgaggtcatcgaccgcatcaaggacgccctcgagtcgcggagccccggcgtcgtctactgcgccgac

SEQ ID NO: 418021 - DNA, 561 bp, Oryza sativa
cttttcttagaatcttcccactgacaagctaaggattatatacatggcagttaatggtgttatatatgtaatccaggtttgcatttggatataccttgggacaaatgatagtcctctgctagagcctgtgagcaaaatttttatatcagatgtctcattcttagctcttttgggattcttaatttatggtggaaggctatttttcatgctgaggcgttttccgattgaatcaaagggccgcataaagaagctctatgaggttgggactgtgacagcaatttgcttcacatgtttcttgataagatgcattgtggtggcgatgtcatcatttgatcctgatctattttttgaggttttggatcatccaatactggatttcttttactatatgttaacggagatactgccctctggtcttgtcctattcatcctccgaaagctttcaccgaaactagtatcagcacagtacccccctattcgttagaagggctggttttgttgttacaagcattccaaaaacttgtttcaaagcgagaattgtgatatttgagctgagctttc

SEQ ID NO: 418022 - DNA, 430 bp, Oryza sativa
ctcattcatggcgtgcacggctccacgggaggaggacctcctcatggaggaagacgagcaccggccgcctctcaaccgggccctgctccaccgcagcgccaccaacaacacctcccaggttgccatggtcggctccaacccctgccccatagagagcctcgattacgagataatagagaacgacctgttcgatcagaactggaggtcgagagggaaagccgaccaggtgcggtacgtggtgctcaagtggaccttctgcttcgccatcggcatcatcaccggcatcgccggcttcgtcatcaacctcgccgtcgagaatgtcgccggtcttaagcacaccgccgtgttcgtcctcatggagtccagcagatattggacagcgttctggctgtttgccggaaccaacctggccctgctggtgttcgcgtcg

SEQ ID NO: 418023 - DNA, 367 bp, Oryza sativa
cagaggtggatataagaaatcacttgaaattgatcctgataacagggatgtgaagttgacatacaagaacctcaaggaaaaggtcaaggagtacaacaagaaggatgccaaattctacagcaatatgttcgccaagatgaccaagcagccagccgaagacggcaaagctggatctggagctgaatcgaagcaaggatcggaacctgttactgctgcctaaggacaggacactcacgacatatcttagattttgtgtgctggctaatctttgttctagcggtgcactgatgagaaacgttacttcccaagttgtcgggcgatgatgattcttgttgagattttcaaattgcaatccatattttgaacc

SEQ ID NO: 418024 - DNA, 514 bp, Oryza sativa
tggttgtggtcctcgctgcgtgctacaaggccctgaacgagcaccatgtcctcctcgagggtaccctcctcaagcccaacatggtcaccccaggctctgacgccaagaaggtgtctcccgaggtcatcgctgagtacaccgttcgcaccctccagaggaccgtccccgctgccgtgcccgccatcgtcttcctgtccggtgggcagagcgaggaggaggcgaccctgaacctcaacgccatgaacaagctcagcaccaagaagccgtggtcgctgatcttctccttcggccgtgccctccagcagagcacgctcaaggcctggtccggcaaggcggagaacattgagaaggccagggcggccttccttaccaggtgcaaggtcaactccgaggctaccctcggtacatacaagggtgacgctgtccttggcgagggcgcctccgagagccttcacgtcaggactacaagcactgatttgccttggaggtgctgggttccataggaacattctgc

SEQ ID NO: 418025 - DNA, 457 bp, Oryza sativa
tatagctccaatctgttcatgccaatggctgctggcacctgggtgaagctagagcagaagggagatgggccgggagcaagaagctcccacgccatcaccctcgtcggcggcacggcgtacgcgttcggcggcgagttcacgccgcgcgtgccggtggacaacgccatgtacgccttcgacctcaagtcgcagtgctggtcggcgctggacgcctccggcgacgtgccgccgccgcgcgtcggcgtcaccatggcgtccgtcggcgccaccgtctacatgttcggcggtcgcgaccaggagcacaaggagctgaacgagctctactcgtttgacacggcgaccaacagatggacgctgctgtcctccggcgccggcgacggcccgccgcaccggagctaccactccatggtggccgacgccgcggggggcgggaaggtgtacgtgttcggcgggtgcg

SEQ ID NO: 418026 - DNA, 473 bp, Oryza sativa
cgtgtttcaaatctgatcagttcgatttcgatcgagtttcacccaaagtccacacaaactttcgattcgatttctccgatctcgcagcggtggcggccatggcgcagaggacgctggagctgacgctgatctcggccaaggatctcaaggacgtgaacctcctctccaagatggaggtctacgccgtcgtctcgctctccggcgaccgccgctcgcggcagcggatcgccaccgaccgcgccggtggccgcaacccggcgtggaacgccgccccgctccggttcaccgtcccggcctccggcgcgggttccctccacgttctcctccgcgccgagcgcgccctcggcgaccgcgacgtcggcgaggtccacatccccctctcggagctcctctccggcgcccccgacggcgcccgtcccgccaagttcgtcttctaccaggtccgcaagatctccttcgggaagccacagggc

SEQ ID NO: 418027 - DNA, 428 bp, Oryza sativa
gattttcgaaggaaaggactacggcatacatggggggattgtgcaagtacgaagcctagaggaccactctccccttgccggtgttactcttggtgatatcggcggaaaatttggtagtggtgcatacaacagtatggatcatggagttctgcgaaatgaccatgtgcacatcccaagggatcaaatgttgatgaggctttcacaagttacgaaagagggaaaatatgtgcactcagatgtcccaaaacagctgctttatgggacaatggtttttgttcgacaaacaattgttgcagatgcttctaaggctttatcacgtgctacttgcattgatgtaagatacagcgctattcgaaagcaggttggccctcaaactggtggccctgagactcaagtcctcaattacaagacttagccaagcaaactct

SEQ ID NO: 418028 - DNA, 385 bp, Oryza sativa
cgttatattgttctaagcattatccttcactaccggggacgaatcctgtgcgcaatgcgtatacgctctggcttttatctgttatatgtgagatttggaacgctttgaactggatattgcatcatttcccgaagtggtttacaatcaaccgtgatacctaccttgatcggatgtgctagaggtatgacagagaacgtgagccatctgagatgactgctgtcgacatttttgtcagtacagtcgaccccatgtacgaacctaacgttgttactgagaataccgagcatatcaattatgttggtgattactcaggggacaaggcctcttgctatgtctctgaccatggtgcatgaatgctgacttttgatgcatcggctgaaacttc

SEQ ID NO: 418029 - DNA, 469 bp, Oryza sativa
catttttcaactcgagctcttcttctacttaaaagaaaaaaaacacgcatatctagtagtactgttctagtgttcttgtacttctattcgtgtgctactactgcatctgtgagtctgtgtgactgtacacatctgtaatggagtgcgaaaccgggcttgttcgttccctgaacggcgacgggctgtgcatgtcgtcggtgtcggcgccgccgcgggccgacccactgaactgggggaaggcggcggacgagctggcggggagccacctcgacgaggtgaagcggatggtggaggacttccgccagccgctggtgaagatcgagggcgccagcctgacgatcgcgcaggtggccgtcgtggccgccggcgccggcgaccccagggtggagcttgacgagtccgcccgcggccgcgtcaaggccagcagcgactgggtcatgaacagcatgatgaacggcaccgacagcta

SEQ ID NO: 418030 - DNA, 545 bp, Oryza sativa
ttttattcaaacgcgaggtcgttgaaattgcaaccaatgcattggatgtcttcaaaagtgatgcaaaaaagatggtagttgcacttgttgatatggagcgtgcctttgtcccaccacaacacttcatccgtttagtacaaagaagaatggaaaggcaacgtcgtgaggatgaggtgaaaaacaggtcatctaagaaagcccaagatgcagaacagtccaacaagggctcaggcacaggatctgagcaatctggtggtgccttgaaatcgttgaaagaaaaattcagtcagcaagacaaagataaagatgcaaaagagggaccaaatttgcaggttgctgggcctggtggtgaaataactgcaggctaccttttgaagaaaagtgcaaaaaataatgaatggagcaaaagatggtttgtcctaaatgagaagagtggaaagcttgggtacaccaagaaacaagaggagagacattttcgaggtgttattgccctggaggaatgtcatctggaagagatagaaaaagaagagctttccaagagtttg

SEQ ID NO: 418031 - DNA, 476 bp, Oryza sativa
  unsure (1)..(476): unsure at all n locations
tctaaatcccccaatccgatctgcctttcctctggctcctcgtcaaaccctagccaaatccacgatcggggctagctcgtcggcggcggcgatggggaacccggagaagctgatgacccagatcttcgacctcaagttcacctccaagtcgctgcagcggcaggcgcgcaagtgcgagaaggaggagaaggagcagaagctcaaggtgaagaaggcgatcgagaaggggaacatggacggcgcgcggatctacgccgagaacgccatccgcaagcgcaccgagcacatgaactacctncgtctngccttccgcctcgacgccgtcgtcgcgcgcctcgacacccaggcgaagatgcaggtcatcggcaagtccatggccaacatcgtcaagtcgctcgactccgcgctcgccacggggaacctgcagaagatgtccgagaccatggacaacttcgagcgccagttcgcaacatgga

SEQ ID NO: 418032 - DNA, 553 bp, Oryza sativa
ccttagctttgccgagacctcgttgcctcaagccgtgttgcgtgctgcatgctctgaattgaagaactctcttgagcctgaccaggtatatcagaagtggagaagaagattggaagcatgagggaaatgggagagaagaggaggcgtggacaccttaaccctgctggttttgcaggagggttgcatgatcatgaggagaagaagaacgaggagcataagctagacatgagtggcatgtccatggatgccctcccacacctcaccatgtctcttggtcaagtcaccatcttggatctctctaacaacaatcttgagagcatcccggagtcaataatcgctcggctgctgaacgtggtggtgctggacgtgcggtccaaccagctgaaatcgctgcccaactccatcggctgcctctccaagctcaaggtcctcaacgtctccggcaacctgctcgagtccctcctcaacaccatcgaggagtgccgtgcgctggaagagctgcacgccaacttcaacgagctgacgaagctgccggacacgctggggttcgagc

SEQ ID NO: 418033 - DNA, 533 bp, Oryza sativa
  unsure (1)..(533): unsure at all n locations
cttcagtcctcttctcttcttcctccctcccttggcccactgaatcgccaaaaaaattcccctcctccactccatctctataaaaatcctcccccaaatctcgcctcgtttagccagcacaactcacacaactctctctctctctctctctctctctctctcgacggctgcaagcttccgcctcccggatcgcggcgaccaccggaggaggagggagcagccatggcgaacatcgacatggggaagatcctggcggggctggagaacgacgacgcgcgggtgcccaagaccaagctggtctgcacgctcggcccggcctcccgctccgtccccatgctcgagaagctgctccgcgccgggatgaacgtcgcgcgcttcaacttctcccacggcacccacgagtaccaccaggagaccctcgacaacctccgccaggccatgcacaacaccggcgtcctctgcgccgtcatgctcgataccaagggtcctgagattcgtactggatttttgaaggatggcangccaatcaagct

SEQ ID NO: 418034 - DNA, 252 bp, Oryza sativa
aaagaaagattacaagtgtatgccgtttatttatctctgttttcttttcctggttttaagtacagtttacagccttctctacttcccaaacaaatgtaccgggcagatcatatatacttccttcgtttcacaatataaggtcattctagtattttccatatttatattgatgttgatgaatcatcaacatcaatataaatatggtaaatgctagaatgacttatattggaaaacggagggagtactaattaa

SEQ ID NO: 418035 - DNA, 435 bp, Oryza sativa
atcacaaaaatttcttaacttttttcttttcatttaaacgcttttcgaagcaagtaatacaaaggcctttctccatgacgacatactctagatagtataaagaaaacggtaacaaaacgttcaacagtttatacatgcatgcataattaattaacttggcctcttaattaggcgtgctccggcgagttgttgggcggcgtggcggcggcggcggcggcgttgatgacgttgcggcggccacgctcggagcgggagttctcggcgaacttgagacttgcaccgtggaggcccttgctcttctcctgttcgctccactcggagccgtagtagtgctcctcctcggcgccggcgttgggcgggaggaacatggagccccactgcgggaaatggacgagcaccaccggcagggtgcacgccatgatcatgatgcccatg

SEQ ID NO: 418036 - DNA, 365 bp, Oryza sativa
tttcttttttaacacaagtggcccgaagcgggccttatcctgctccatgtatgaaaaaaatgtaccagagcatgcagcttactctgactatcatatcgatcgccaactggaaagcgaccatggcctatgagggcgcgctacaatgggcctcctgcatctaggagttcaacaacaactagacgctgaacatgttgtccactttctaccacttcttccaccaggactgcatcgacacgtggctcgcgtcgcacgccacctgcccggtctgccgcgccaacctagtcgacggcgcgtccgagccggcgagcgatgtcgccgccgagctaccgactgagcccgctccgcgcccggaaggcgcgacgccg

SEQ ID NO: 418037 - DNA, 531 bp, Oryza sativa
gatccgcctccgtcgttgtagtcacgatgcaagcgcagattgtggcgcctccggacttgcagtgcaaggacaagttcttggtgcagagcgtggtcgtcgacgatggcttgtcagctaaggacatcacctctcaaatgtttctgagagatgagaacaacatggttgaggaggtgaagctgaaggtttcttatgtgatgccacctgaaccagcgatggagattgcagaggagtctgatattccaaagagaattttggtgcctatgcagcggattttggataatgggaggagtggttcggagctgtcaagtggtaatgtctcattgagatcagctgagatggggacagagttgggatcacctcttggacgatttgtgagaaatgaggatatgctgaagactgcaagtcctgttgttgaaacaagagtacatgcaggacctgatgaacaatacctcgagctgtccgctttggttgcaaaatgaccgaagaaaagagtctgcacttgagcaaataggaaacttcgagagagctgag

SEQ ID NO: 418038 - DNA, 343 bp, Oryza sativa
gacaagataaaacaaaattaagttcgtttaacatgcgcgcgcgcgtttaattggtaactagtgctctagcgagaccacccacgcggtaagcttgaatcatatcggcaatgtatggttggccgggatgcgtgggatccatgactttggaggtggcatccatgccagcatcagacatcactgcgtccatgccgccttggtgctcttcgtttgcaaacgaagtcacgtcatagaccttgtctttgataatgacccacaagtcgtttttggtattgtgcttggcgacttcggccttggtgaattttttcaacacaggaggcgctggttttgatgtggatgtcttcac

SEQ ID NO: 418039 - DNA, 404 bp, Oryza sativa
aacagttgaactggatgtattcacaagatcaccgaagccccggagttcagatggtagcagctaaagctagttctgccagcatctttacatcacatggtaactcggcaactacattacatgtataaaagagcaaacaaaatgacgtacacagttgaggatgaccaacagaagattcagctcaaaacaaagctagtattactgggtagtacggcaagcatgatcagaaaaatcgatttagacatagtagatcatgccgacttcgacgaggctaatgtggggtatgtgcagcgccaccgcgggacccctgcagttcttgcggaggaacgagtaagcgtagtcgatggcgaacgtcttgaggaagttggagttcttccttgccttcacgtaggagtggccgatgatgt

SEQ ID NO: 418040 - DNA, 388 bp, Oryza sativa
ggattacgtaacaatacgctatgcccaagacaagtcaatactacaaaatgtgtggcgagtccagagggacaaaagtcaggcaccgtaagcctttcgattaaaaaccaaactgaaacacgcacgattttttaacaccccacgaaaaacaatctgatagctagctcctttggtggcggaacctaaagagctttatttttccaaaacatccacataattatctgtcatgactatatagtttcgatacgccaaaaggcagcgttcactcatggatatgtcgacatgtcttcctttcatttaagcccggccaagatgcttcaagccttgttggcaatgtttgtggaaagccagtaagccccttatacaaacccttacaaaggtagcacatgtg

SEQ ID NO: 418041 - DNA, 292 bp, Oryza sativa
ggggcaaaaaccaccacattggcggtttttctaaagatcatagcaactttttttacaaaggaaaagggtttggttttccctaaagaaacacccgggcaaaaacatttggggggaaaatgatgaaaagggcaagaaagaaatttagaggtactaagcccaatagtaaccccccttgagaaggccccaaaaagggacaatgggattatcaccatcaacttcaacttaaattttatccccccttttttgtccgggccataaaaagcccagaaagggccccgtttcttggcggggc

SEQ ID NO: 418042 - DNA, 362 bp, Oryza sativa
gatgttcaagtagatggtcatcgtgcttattcaactatcaacatgtgcacaggtatcttacaatataaataattgtacaccaaaaagaatgccttcatcgagcaccggaggtcaaacaggaagctacaaaaagcagcagcagtgtcgatgcagaaggaaaatatgatgattctgaaacgtaattcacatctacaacctcacgcgaagcaaaataaattgccccaacttgcttcgaatatctggtgatattttattgtttacacgaatgtgatccttaatttacagcacttcacctagcttcattttttaggttgcggaatccggttgtgaggtcatcatacaattttctggaattttgcgac

SEQ ID NO: 418043 - DNA, 469 bp, Oryza sativa
ggcgctgcaagcaccacaataattaaatttctcacgcaattcatagttgtcatagagctcccaacgcagttcttcaattgaaaaagactgcccaaacagaccaagggtatcatcatagcagcaaagttttttaacacgcaacatcaaagagacactaatgcaataagataacttgaagcgcggatcactagcaaatttcgcgcttagtcgacctcctcgatcttggggccagcaccgctgccgcctgccgggggagcatcgtcctcgtccatgccgccggccatgtccgcgccagcgccctggtacatcttggcgatgatggggttgcagatgccctccagctccttcatcttgtcatcgaactcatcagcctcggcgagctggttgccgtccagccactggatggcctgatcgatggcatcctcgatcttctttttgtccgctgccgggagcttcgaggcgatcttct

SEQ ID NO: 418044 - DNA, 450 bp, Oryza sativa
gaaagcagcgcgtgtttattgcatttaataacccttactaaagtcgacgatatgctctaaaggtttcccttctaagtgccgggtcaaattttcactgaagactttcaggactgattttgggtagcttggggccgaggtgtggcccgttatgaagacattcttcgtagtccaataagggtgcgtctggggcaagggctccgtctgaaacacgtcgagcacggccgctttcaggcgatcgccgtttaaggcggaaatgagggcatcgtcatcgacggcttggccacggccaacgttgattaagacacaatttgccggaagatactcgagaaactctttgcttatgattttgtgagtatttggcgtatttggaagagtcgacacaacgtagtcgaggccttggcagaagtctttggcgttttctattgtgaagtttgcatcgaccaagggact

SEQ ID NO: 418045 - DNA, 408 bp, Oryza sativa
  unsure (1)..(408): unsure at all n locations
aatgctcaagaataatcatcattttgcacagcatgtttgacgaacaccacaaacagctgctggcaggcaaataaaaagaattgccttgagaatgtatgctgaaagaggaaagcctagtgtacaacctctactctcgaaaacacaaactgacacagtacacaattcacagcctacatgtatactcctgctgtcacaccgtgaacactgtaaattcagctaccagcatgaacttcatcacctggaccagtgagcgtaatattgcaatttgaggcaaatttacgagcaagcatgattgctgcgttcctatccctgtccgtttcaaaagctaaggtgtaggacaggcctttccttgcctgccagaaaactgccgtagctgcagcattacccccaccacggnttccacacaac

SEQ ID NO: 418046 - DNA, 395 bp, Oryza sativa
gatcaaatcaagatgctttcaaattccaattcagaaaatagagatgtgtacaggggaagggggaatggagcatactgcatacacaccatcaagctagacaaactgacagaacctaacagacacgcatgaaacttataggaagctagctaaactctaccggtagctgcacatcgatccaacattttcgtcatcatcattggcaaacacgcatagacccacttctttattgtaaccaactgactagcttcatcgcgttctttatctgcatattttttattcttcagtaactcaaaagtttggtccagcagcgaggatcttgtctgtcaggctgctgtctcccccgatcttgtagttggcgaacacctcgaagtttttcttgaacaggccagccagct

SEQ ID NO: 418047 - DNA, 319 bp, Oryza sativa
ggttgatcccaaatgttctcattgattgatagcgatatcatagaagcagcgacacgaattaagatttaaaaccaaccccaagaaggatcgcagatccaactccaccgaatcgatccaagaactccgcctaatccaaccaaaccatgggcgatctcatctcaccaacacgacacgaactcataaaaagactaacaccaccaccaccttcttcttatttagggactcgacgactcaagacgactgatactggcgaaaggcgaaggggaacaggccatatctaggagagctggccgcagtcggggatgacgaccggcttggc

SEQ ID NO: 418048 - DNA, 196 bp, Oryza sativa
aaagaaggaattttatttaggggccaggcggcaacatgacatacatgaaacgctaaggaagctagctagctagctagcaacaaattaaggacttgcatgcaagctaggtagctagtacatggcatatgtagggggactgggagctcgttgatgaagggaaaaattggatggaaaaaagttttcttctaaatgcaat

SEQ ID NO: 418049 - DNA, 317 bp, Oryza sativa
aatccttctttgtacaccgggagaccgggaataagtggcaatcttcagctaaaccattcttacacaacaaaagttgctctaatagctcaaaatgaactgaactggtattctaatggttacaacgttttaatacttttgaatcgtacaagcaccatactaatgggttcatcatgtcacctttcatccctgctgccctgcaatacagctatttttgctggttcaccgggaggtagactccttcagctgcaagccagacattgtcaggacgtttgttgccaacaccacataccttttgctgtccaccagcaatgcgggtg

SEQ ID NO: 418050 - DNA, 383 bp, Oryza sativa
gaaaaagaatataaaaatcccactaattaattacaccgagaatgagagatccaccactagactatcaaaagggaggaggaggagatccaagaaggagaaggaacaccatggcgacgaagagatctctgcataagctcagaagagcttgtaggcggaggaggcgtccagagggtggatgaggtaggtgagcaccagcgccacgatcatcagcaggtatgcgatcccttgatccaccgacgtcccgtcgctggtgggagacggcgcgggcgcctgtgcagccgcggcgatggcgaaagagaggatggcgacgacgatggcggcgaacgggatcctcgccatggcgaacgaatctgagatgatttttgcagatgctgatatttccc

SEQ ID NO: 418051 - DNA, 461 bp, Oryza sativa
aaaaaaatagctgtatattgttgggaaattcagaaattgtcatcgtccagtagccagccacaggagggcaacggcttagaccgagggcatcgtcctcagccaagcagcaccctattgcactgaaaataaatataaccagagggctttgccgtgtttcaagtacgattagtttcaacacaaaggcatggcagatggaaccaatattgaacacaaactcggagggcgagctaacgaaggacacaacagacaacctaactatataaatcgtcatcatcagcgacggcggcagcagacgcaaaaggatcagccgcagctccagcaccagcttctgtccgctcgaaacggaactcactgccaaacccgcgagactgctgcaacgtctgggcgaacgcctggtacttgcggatgtcggcatcgctgacactgcggcgcgcgtacttatcgactcctcgaagtgggct

SEQ ID NO: 418052 - DNA, 457 bp, Oryza sativa
aaggatggaatcgagtagcaatactttcaccccaaaatacagtttagcgacaatatcttagaaaagccgcttgctttgccgccatggctggcaagctgagcagagcagctaacacaaagaacacgagatcactataaaccaaacggcaacgaacgaagaaaatacagggtcttttttgtctgaagatacacgaagcggctcgttttcttttatttttagtctcctctcctcctcgatgatgggtgtatggcaatggcaatggcgatgggatcttggcttagttgatgggaaggggctcgccgttccactccttgaggcagtcgagcatggggtcgatgagcttgccctggctgatgccgaggaacaccttgttgcactcctcgccgggggacttgagcttctcgccggtgaggaatacgcaagcgagcttctcgcggacgaagcggtagagcgggaa

SEQ ID NO: 418053 - DNA, 470 bp, Oryza sativa
gaaggcaaaggaaatttcccgcaaatacttattcatatgttttgacaacatttctcccgacgcatgctcattgtggcagacgcagctgaccacctagagcttttagttcaccattattatttagaccaagcatacgtcccaagatcagaacacatgcttacaagcgaaaatactaatagcctggctggctgcttcacagaataaccaaacgacaacctcaacagataaaaatgccacggaatgaaaacaaagcagcgaatcgtcaccagaagtcccatcttactcatcaaacactccatcattctcctccaacgcatcctctccccaggggagaagattgcccagtttaccttccttaacaggagcagggttcaccatattctcagcctcgaagcagtgcagaacagatttgggcgacccaacagcaacaggtacgtcttcagtagcgtcgaagctctggtagatgagga

SEQ ID NO: 418054 - DNA, 288 bp, Oryza sativa
ggccgaaccagtcgtcgaacccctgcacgcacccgatgaagcggccgtcctccttgtgggacacgatggaggcgccgcggtggtgcacccgggcggggtaccggcggccgtaccccaccatgtagctcagccgcagcgggttccgccccaggatgtagtccgcctgcgacctcgccagcgacaccatctccgccgccgtcgccgcgccgccggggcagcggagggccgcggaggcggaggcggaggaggaggagaggtagtgggagtaggcggtgaagattctggtgc

SEQ ID NO: 418055 - DNA, 468 bp, Oryza sativa
cgtagaatgattggtccatattttattttggatcgggctgcaaaagccaaataagtccccccttgacatttacatcaagtacacaaccaaaagaaaacgtgcgagcaaaaaaaagtctccagaattcactagcatcggcgaacgtactagttaaacatattcaccatctcatcatggaaggagttattgatgattgattgattgcacctgctggaagcattcttgtggacaatctagcctgtgttctgcatgccggcagcaatgcccttcatcgtcaggatgagggtgtcctccaggccaggtgcgtactcgctcgcagcgttcagttggaccagctcggcaggctggttgctgtcgacgaactcctttgacaaggccggctgcgacatcacctcgaagctagggtcccttattcgcttcagggtgtaggccttgcaaacgttcaaggtagtgatgtacgactcacgc

SEQ ID NO: 418056 - DNA, 452 bp, Oryza sativa
aagctgaagacattgtcttataggatcaaaacatttgtattaccacaactttttaaggatggaatcgagtagcattactttcaccccaaaatacagtttagcgacaatatcttagaaaagccgcttgctttgccgccatggctggcaagctgagcagagcagctaacacaaagaacacgagatcactataaaccaaacggcaacgaacgaagaaaatacagggtcttttttgtctgaagatacacgaagcggttcgttttcttttatttttagtctcctctcctcctcgatgatgggtgtatggcaatggcaatggcgatgggatcttggcttagttgatgggaaggggctcgccgttccactccttgaggcagtcgagcatggggtcgatgagcttgccctggctgatgccgaggaacaccttgttgcactccttgccgggggacttgagc

SEQ ID NO: 418057 - DNA, 268 bp, Oryza sativa
tttttgtttaagaattaagatctgcatcacataaaaacatacagtgactgagtactggattacacgattgagttgttcagggttcagataggaaaaacatcttggggactagagatagagggaatcgacagatgcgcagcagtagcgcgcgggaaacaggacatcatcgattgcgttgcatgtcgtcggctgcgcaagcggcggctgcggggtcttaagacctgctctttgaatgggattcgccctgatgatcacctggtggtagatg

SEQ ID NO: 418058 - DNA, 235 bp, Oryza sativa
gaagcttcagtagctaagatacacatttcagtatggaagaaagtacacatatgaactgctcatataacaccaggaaagctgatcgaatccccagactttgattgatgtatgtaagttctttattcagatcaagcgactacatgatggcaagtgcgaccaacatgaagaaatgcactcgggacgccattctctccaagccccctaaaccatggaagcacaatttgcacaatgctgg

SEQ ID NO: 418059 - DNA, 257 bp, Oryza sativa
caacaaacgccatactctctgccttaaagatccaacaggttcaaagaacacgcaagctcagaactacacatcaccaaaattggagcaagtttgggggtacatatccgctcatacagtggaggatttatttctcgatcctacgagctttttaactagagttcgaccgggaagtcaattacggatagaaatgagcattctgtctttacaaaacccatgcgacacaacagtgggcattaaccgcatgattttcaccatta

SEQ ID NO: 418060 - DNA, 285 bp, Oryza sativa
tttttgtttttttttttttttttttttttttttttagcaatcaaaaccagtacaagaatccaatacactccccaaacatatgcgatagcatacgaatccaaacatggtctggtaggtgaaacggattaaaggggcagtagcatcagcggggctacggaccacacagcattgtactactactacattacccaaaagcacataaccaattaagcatcatcataccgaaacaataattaagattgcccaaacggttggacacaacaggcgacactcaagatgggatcc

SEQ ID NO: 418061 - DNA, 537 bp, Oryza sativa
aaaggcccggcaaaaagaatgaagtatatgaatatatgaccatatgactacatcaataatcaagccacaacaacgcagttcctgtcactaagccctccatttcactgtctctcatacatgacaaaatcaagaaccctctttgagtttggtggataaggccaccaaccaaggcacagagaattcagaactagaaacaaacattaacattattgcgtaattacgttacaaacttacagatgtagtttattctaacaatacgatctttctttgttttgttttacaccaacaacagcacacattccctcagagagaaaggcaacacctcacactgacaatttctgaaacaaaatggactcaagctgggaacagcgcaaatagttgtctgaattatgcttcagccatgatgcaatcaatggcttgcttgcagattccagtcattgttgcctctggtccatatacctcaattggaacaccaagttctgcacctagtgtacgcattttggcaaggccagttggtagttttgaccaccttttcga

SEQ ID NO: 418062 - DNA, 454 bp, Oryza sativa
ttttgtgatttttaaaccaacatgacgttttataacaacttttattcacggtttgatatatgtagatagatacagcaatcattagtggacatgaactgtttcggccacgattaatgaatggggtgatagaaatcgaacatgcatgcagcatgtgtacatacagttaattaaacaagccaaattaagcatacatacatgggcgcaggaattgaagaaatgaagcagtgtaatactaggatggatggatcagtcccagatcatgacgacagccatgacggcgacgccgaggaggacggcgaggaacttgaagagcggcttgtcggcggcggtggggtggtgggggcggtagcccttggcgatgaggtggttgatggcgacgtagatgaagacgccggtggcgaggcccatggagatggcgtaggtccagtcggcggcgcggccctgggaggtggcg

SEQ ID NO: 418063 - DNA, 404 bp, Oryza sativa
gcacgaactataatgagatgttttgacattaaaaagaatgttcagcgggtgatgtcaagcaactctgaatgaaacatacaaactgcgacctgatattctgcgagacttaagccctatcacatatttacaaatgaaaaataatttataaataaaacttttatatagatgttcttaacgatctaaaagcaaagactaaaaaataaattttaataaaaataccttaaatcagctttaaatttaaaattgaaagtataaagtataagtgaaaagatagtccgataaagttttacctgtgaaacctgcagctttgagataaagcgtttcaccaccaactatgccccaaggcacccaatccgggccaactttctgtgtgtcgatcagcttttccaaccacaccaagcacc

SEQ ID NO: 418064 - DNA, 336 bp, Oryza sativa
ttttgagatagttaagctaacctgcagtggcgactgccatgcgttgcacatctagccgtggcgaaagtggttccaggtcgtttgccggaccaggagggaggagctgaaccccaaccgagatcccaccaggtcaaactccagcaggttgtcctccatcatgtgaccgccgatcaccaccgacgtttccgacgccacgccgtcgtccaccacaccgaggcagagagcgccgcccttggtggccaccatcgagttcgccccgaacaccacccacgacgtggcctcgctctggaacaccagcttgaccgtcggcacggccggtcccacgcgtgtgcccgc

SEQ ID NO: 418065 - DNA, 363 bp, Oryza sativa
ggagatgagcaccacgacgcacttgatgctcttgcacaccgtctggatcaccgtcggcccgggctccgggatcgtcaggttcaggttgtcgccgaacccctccgcgtacggcggctcgccgaccaccacgatcgcgtagtcgtacttgtcgccggtgaccacgctgctgtccgggttctccgagtacaccaccgtcgtgctgggatcaacggtggccttgatcgccgacaggatcgtcgtgccagcagtgatgttgttgccgggctgtccttgccaggtgatggtccattcttcacaatgtttgtccaaatcattagcatggctttccgcgacgagaattttaccggctttcttcgggagggg

SEQ ID NO: 418066 - DNA, 294 bp, Oryza sativa
aaccatggggaatggagaattttacttgtaaatttatttaattttacacatcccttcttaaaaattccaaatttttcagcgaatttgtattttaattaattacatatttttctgatctgtaaacttcccggggcaacgcacgggcacttttgctaaaccaaacaacacttttggtcaatatacacactttgtaatcacccggtgcaacgcacgggcacttttggtaggatatatatatatgtaaccagtattcaacacgttggacacagggtttcttggtaatttattaagcaa

SEQ ID NO: 418067 - DNA, 488 bp, Oryza sativa
cacaaactattgactctcgaatctcgatagatttccattttcctgattttcataattcaatccaaggaacagagctcccaatacaggacagtggtatacacacatatttcaatggacaccagcaccagggtcatcttgacaggcactacctctatagcaaaagcaaaaagacaaaactgtaatggaactacacaaggttacgatgaatgcgcgccaaatggatgggtgagagcaactaacgggtgagctcatcgcccaaagcatctcagcacagaggacacaagtgcagatgatagaaacttcattccagcagatcccccggggaagtatgaaatagcataatatgctagcgcaagtacctgaagacaagagaagaaaactgaaagtatgtagctatggagcaccattgacacgtaaatggtagcagccatgctgcccacaaatcccatggtgaaaggtaacctttttttggaaatcatatgatagag

SEQ ID NO: 418068 - DNA, 423 bp, Oryza sativa
ttcttctcttctcgtgccttctagggtttcctcttcctcgcaccgcgccgcctcgcctcttcgtccccagattcagatctactcctactcctactaccaaggttgttgccatggctcccgctgttgaagccgtggagaagaagacaggctcagcccccgtcaaggcccctgctctgaatgaaaggatactgtcatctatgtcccggagatctattgcagcacatccatggcatgatcttgagattggacctggtgcaccaactatattcaactgcgtcattgagattcctaggggcagcaaggttaaatatgaacttgacaagaaaactggactgatagtggtggaccgtgtgctctattcatcagttgtgtaccctcacaactatggattcattcctcgcacgctgtgtgaagacagtgatc

SEQ ID NO: 418069 - DNA, 429 bp, Oryza sativa
gtcaagaataacatcagccaagtgtaaaataataatacacaaggaaaagaagagccgcgatgagaaatgtgtacattacaaaggcagctgggttctgcttttaacaaccatgtccgtgccctactgaaatctcagttttctccttatacttcatggttgctaatttacatggataaactctccagctctttgagaaagcggtttcaaagatcatatacattgctaaccaatctatcactcgtgaacaaatatgtttgtagttcaattcgtcaggcttccttacagaacaaaccacaaatcaatttgagagctggaatcttcctgtcggtttcctctttcgccatccaaatattgcatagtaaaagagtgtgagtatcgcaaggaccacaaagccatactggaaaacattgtacttgtagagatacttaa

SEQ ID NO: 418070 - DNA, 437 bp, Oryza sativa
ttcagatcccgcacgccgccggtggccgcagcgccgccgtcgcccaaaccctagccggcgggcgggcgcagtagcggagatctggtaccgtgccgcgatgggggacttcaacgtggcgctggtgatcgtggcggcggtggtgagcgtcctcgtcctgctcgtcagcgtctacctgctcatcaactaccagcaccccgacgacgccaaccaggcctacttccccaagctcgtcgtcgtcctcggcatcaccgtcgccctcctctccatcctcatgctccccgccgacgtcgccaaccgccaggcctgccgccgcgccatctacagcggcgcctgctccctcaccctccccatgaagaccctctggctcgccgtctacatcgccgacgccgtcctcgtctttctcgtcatccccttcgccatgttctactacgagggcg

SEQ ID NO: 418071 - DNA, 469 bp, Oryza sativa
gaaaaaaaaagaaaaattgcagattacattacattattattattcattaatgacacctcaaaatacatcgcttgtcgtgttaatcatattacaaaattctatctgaacaaaacaccttaagtacatagtcatattgtacaaattacaaaagtcgatctgctctcgataactttacgagattgattgattcgttcattcacaaggcaattaacacctcaaattttacaacaacaacatcatgagcaatagctgaaactttgaaagcagaactccagtctgtctgtataaccagcagcagcaggcagcaaagcaaactgttcgatcacatctcgacagggaacctcttgtacaggtccgggttgtcgagcctgggcttggcgatgacctgcagcgacgtgctcatgaacgtgacgacgccgttggactccatcatgttgacgtcctccggcctggtgccctcggggagaga

SEQ ID NO: 418072 - DNA, 445 bp, Oryza sativa
ttcgatcggcgggtacaacatacccaagggcgccaacgtgatggtgaacgtgtgggcgatcgccagggaccccaaggtgtggacgcaacccgctggagtacaggccggagcggttcattgaggagaacatcgacatcaagggcagagacttcagggtgctccccttcggcagccggccgccgcgtgtgccccggcgcccagctcggcatcaacctcgtcgcctccatgatcgggcacctgctccaccagttcgagtggtctctccccgagggcaccaggccggaggacgtcaacatgatggagtgcaacggcgtcgtcacgttcatgagcacgtcgctgcaggttatagccaagcccaggctcgacaacccggacctgtacaagaagatccctgtcgagatgtgatcgaacagtttgctttgctgcctgctgctgctggttatac

SEQ ID NO: 418073 - DNA, 400 bp, Oryza sativa
agcactggaagtactcgtattccacaacaaccgaagggcaacaataagactcagagcatccaagtttttaaccgaatagaaataaacgggttttaaacgactaacatagtgcacattgggagcagatattaacggtccatgcaacgagggccatggccgggggcaaaacttaacgaacgctaagatatctcaaatgcagccagcataaccaccacttcaacgatgctcattttttgttggcgggagccttggacaccttggcaccggttgggtcctttttttccacgttcttgataacaccaacagccaccgtttgcctaatgtcacgcacggcaaaacgaccaagaagagggtactcaaagaaggtctccacaaccatgggcttggggggaaaaatttt

SEQ ID NO: 418074 - DNA, 485 bp, Oryza sativa
  unsure (1)..(485): unsure at all n locations
gcggcgctcggcgccgacgtggcggagctccggctcgaccgcctcgccggcttcgcgccccgccgggacctccccgtcctcctcgcgcagccgcgcccgctccccgccctcgtcacctacaggccgaagtgggaaggaggtgaatatgaaggcgatgacgagccacgattcgaggcgcttctattggcaatggaaatgggggctgaatatgttgatattgagcttaaggtcgctgacaaatttatgaaactcatttctggaaagaaacctgaaacatgtaagcttattgtttcatcccataactttgagaacactccttcaacagaggagctcgaaaatttggtggctcagatacaagcaacaggagctgacatagtgaaaattgcaaccaccgncaccgaaattgttgatgtggcaaaaatgtttcaaatacttgtacattgccaagaaaagcaggtgccaatcattggactggtgatgaatga

SEQ ID NO: 418075 - DNA, 422 bp, Oryza sativa
ttttatgcatcttttcctgttcttgccaaaggaatgaactgggtcttgctatacagcacatggaggcatggaatatctttgtctactctatacagaaggagcatgctttgccctggttactctctcttggtagttggggataaagaaggtgcagtttttggcggtttagttgaggctccattgcatccaaccagtgcaaagaaatatcaggggagcaatagctgctttggtttcactaatttacacagcaatcctagtatatatcgaccgactggtgcttataactatttgacagtgtgctgcaacgactaattggcattaggaggtggaggtcatttcgcactgtatctacatgccgaccatgtgagtggtttaagttccaatttagagacttttaacaacatgtgtttatttcattcccc

SEQ ID NO: 418076 - DNA, 421 bp, Oryza sativa
gctaaagaaagcaatcatttattcacctggagatccattttttgagaaagctgttacaggcagaattcagatgactgagaatacacagatgaatttcagagagtgattttgtatatcaataaagtctgaacgcacatgatttgacacacgatgttaaaattcactagtcattatacacacaaatctttttggggcagcagacaaaccagttatttgtataattgtattgcaacctactgaagtgggcagcaaacttaagtagacaactggtttgctcaattgcaatttcacttagccacatcacttgtccatccaaatggtgcatctgagactcttcccctgcaacagaaggtcaaatgccgtgttgatgtccttcaggggaacctcgtgagttatgaacttgtccaacttcagctccttg

SEQ ID NO: 418077 - DNA, 371 bp, Oryza sativa
ttcgccgcgccgacagaaacctctttactatgtcctctttctcgcgtacatggcgggtcagatcccccaacccatccgttgcaaagcggccgtgtgcagggccgctggcgagccgctggccgtcgaggagatcgtcgtggacccgcccaaggcgcacgaggtccggatcaagatcgtctgcacctcgctctgccacagcgacgtcacgttctggcgtatgcaggatttccccggcgttttcccgaggatttttgggcacgaagccttcggggtggtggagagcgtaagggagcattggaaggggttcggcgtcggcgacccggtggtgcccacgttcctgggccagtgcaccgagtgcgtggactgcgcct

SEQ ID NO: 418078 - DNA, 480 bp, Oryza sativa
  unsure (1)..(480): unsure at all n locations
ttctgagctcagctcatccccagctgcctacctacaattgcggtgggtgcggcggccctcctcctccctcccgcgcattacaacagctacgctacggccccacccaactgctcttcctacgcgcggtcatcgtctgcttcttgttaattcgaccggcggtgatggagtcagcggcggcgttggcgttggttcttgcggtgctcctcctctcctccaccctcgcggcttcagatttctgcgtgtgccggtcggagcagccgacggcgctgctgcagaaggcgatcgactactcgtgcgggcagggggcggactgcacgtccatcctctccagcggcggctgctacaacccaaacaccgtcgccgcccactgctcctgggccgccaacagctacttccagaagttcagggcctccggcgccacctgcgacttcggcggggccgncaccctctncttcttcgaccccagtttctttggatgca

SEQ ID NO: 418079 - DNA, 406 bp, Oryza sativa
ttcaccagtactagtacggctctaatcagttcgcgtttgctaattaactctgccatcatggctggagtacatggacttgcagctgcaggtctggtggtgctactcctcgccgccgttgcgccggctttcgccgtggactacaccgtcggcgacacatccggctggagcagtggcgtggactacgatacctgggcgaagagcaaaaccttcagcgttggtgactcgctcgtgttccagtacagcatgatgcacacggtggcggaggtgagctcggctgactacagcgcgtgctccgccagcaactcgatccagtcctacagcgaccagaacaccaagatcgcgctcaccaagcccggcacccgctacttcatctgcggcaccagcggccactgctccggcggcatga

SEQ ID NO: 418080 - DNA, 451 bp, Oryza sativa
aaaattctaatacatggtggatggctcaatgtgttacttcgtgatagctcaattatgtgctattaatatacagaaggcatggaactacagaactacagaaaagcatagcatatgtacaacatgagtcactcatattactctcaaatacgtaaatgtctttccctaatcaaattcaggattttctgatttatgtgctctgaaattgtgaaccacctgaagtagaactctttgtctgcgaagaagctgtgctattatgcatctgcgaagtttgacttgatgaaacatctgagaaaaaatttatgacatcagggctttcatcaagaaccttcagtgaccttggaacaggaggcatgttgacatcaaggaatccctctaaaatttggacgacctgacccattgtaggtctgccattttcatcatcttggatacaccagcaggcaaccttgcaagc

SEQ ID NO: 418081 - DNA, 443 bp, Oryza sativa
ttttgcttaccttcctctcaggttccaaccaccataatcaaattactccaaaggccaagctcagcttccattcgtcccaggttctcagccctggctgctctgccaagatccatccatggctcctgtcttcttcctcctcctcttcagccaaatctttctctgcaccgcagtggacaccatcaactccaccacgccgctgtccgggacgcagaagatcgtctccaagggcggcaggttcgcccttggattctacaccccgccacaaggtaacaacaccgcctccggcaccggcaactactacatagctatatggtacaacaacataccgttgcagacgacggtgtggacggccaacagcgacgtgccggtgtctgacccgaccaccgcattcttgtccatcggcagcgatggcaatcttgtcctccttgatcaatccaagaaca

SEQ ID NO: 418082 - DNA, 438 bp, Oryza sativa
tcaagcccgggaggcgcacgggtggcggagccatccatggcacggagcgccgtgcggagccagatccgggggatgaaggtgcgggaggtgccggggtacctgaagccgcggctgagctgggagaacgtgaagaagagcagcgaccaggccgtcgaccgctacatcgacaagtacatcgagaccagctcgccggagccgctcttccacgtcatctacggcctcatggccttctcctacctcatcaacctccccaaggagcgccggcacctcgcccacctcgaggagctcgagaggcagggcgccgccggcgccgcccaccactagattcgaggtcaggacttggggtttggcttgggttgattcgatctaacagaatttctgttctttcaccgatgagctacctggagttgtgatgatgttcgtttgaatggttatttt

SEQ ID NO: 418083 - DNA, 417 bp, Oryza sativa
gtaggggttctttgacaggttgacggggaggaacaaggaggcgtggaaggaagggaggatccgtgggacggcggtgctggtgaagaaggacgtgctcggcctcggcgacttccacgcctccctcctcgacggcgtccacaacatcctcggccacaaggagggcgtcgccttccgcctcgtcagcgccaccgcccgcgacccaagcaatggagggagggggaagctggggaagccggcgcacctggaggagctggtggtgacgatgaagtcgacggcggcgggggagtcggtgttccgggtggcgttcgagtgggacgagtcgcaggggatccccggcgccgtcggcgtcaccaactccaaccggtcccgagtcttccttaagacgctcacccttcacggcgttccccgcaagggcac

SEQ ID NO: 418084 - DNA, 281 bp, Oryza sativa
aggcttgcaaactgtgcaattgattttattttcaccatggatacgtgaaataatcacaggcataataacaaaagccatactttctgtgttaaagatccaacagggtcagagaacacgcaagatcataacggctgctaatcaaaattggagcaagtttgggggctcatagacagtcatacaggggaggatttactttgcgaatctacgagctttttaactagagatcgaccgggaagtcaattacggataggaatgagcctcccgtctttacaaaacccatg

SEQ ID NO: 418085 - DNA, 447 bp, Oryza sativa
ttcgtttcattcaaggaggccatgaagatgggtgttgaagtgtaccacaacctgaagtctgctatcaagaagaagtatggtcaggatgccaccaatgttggtgatgaaggtggttttgctcctaacattcaggaaaacaaggagggtcttgagctcttgaagactgcaattgaaaaggctggatacactggcaaggttgtcattggaatggatgttgctgcttcggaattctacaatgacaaggacaaaacctatgaccttaacttcaaggaggagaacaatgatggttcacaaaagatatctggtgatagcctgaagaatgtatacaagtcatttgtcagtgaataccccattgtctcgattgaggatccgtttgaccaggatgactgggaacactatgctaagatgacccgtgaaattggagagcacgtgcagattgtcggcgat

SEQ ID NO: 418086 - DNA, 409 bp, Oryza sativa
tttgttttttttttttttttttttttttttttttttttcaaaatttttttttttcctctatttttttaaggatggaatggagtaggaaaactttcaccccaaaagacagccatagcgacaaaaaccaaaaaaagccgcatgctcagccgccagggcgggcaagctgagcagagcagctaacacaaagaacacgagaccactataaaccaaacggcaacgaacgaagaaaatacaggaacaaaacttgtctgaagaaacacgaagcggaacgattactgttattcaaaggctccactcctcctcgaagatgggagcatggcaacggcaaaggcgaagggatccaggcttaaccgaagggaaggggctcgccgacccactccctgaggcacccgagcaaggggacgaggag

SEQ ID NO: 418087 - DNA, 409 bp, Oryza sativa
ttaaaatttgcagctcgtataggacagtaaacgaagaaaccatcgtcgtacgtcgtccatgtctgacgcccctcccatggccgagaaaccaactatcaaggtggagacgacgccgggagactggaggttcccgtcggccaaccagaccaagcgatgcttcacgtgctacatcgagtacaacaagtgcatagaagccaagggtgaagggtccgacgagtgcaccaagtatgccaagtgctacagatccctctgccccggggaatggatcgagaggtggaaggagcagagggcaaacgggactttcgctgggcctctctgaaacggggacagcgaccgatcgatcgaccatatctctacatatatcgatcggctacagctaataataccaatcaatcctgtatgcaatgtc

SEQ ID NO: 418088 - DNA, 369 bp, Oryza sativa
  unsure (1)..(369): unsure at all n locations
aggtaaaaggtttaattaacataggagtacagcagaaaataacaataaaaagatagcatggaattaaagccgctgctccaatttaccatacgcagcatttgattacaggaataccaaaaaactactaccgatgacaggtattaattattaaaaagcacaggttcagattattgcgacaaaagtttttgatacccgtaagattggacgcttgatagccaaaccacactcagaaccctaaatatgcatacggaggatgtccaatcggatcttcagncaccaccagaggcagatcagtacttgtagtccttgacgtgaaggctctcagaggcacccttgcccagcacagcatcaccctggtatgtaccaagg

SEQ ID NO: 418089 - DNA, 438 bp, Oryza sativa
ttctcccccaaatctactttgcgtcctctcgattcctcatcaaccatgtcggcctactgcggcaagtacaaggacgagctcatcaagaacgctgcctacattggcactcctggcaagggtatccttgctgcagatgagtccactggcaccattggcaagcgctttgccagcatcaatgtcgagaacgttgaggagaaccgccgctctctccgcgagctgctcttcaccacccctggtgccctccagcacctaagtggtgtgatcctcttcgaggagaccctgtaccagaagaccaaggacggcaagcccttcgtcgatgtcctcaaggaggggtggtgtactccctggcatcaaggttgacaagggtaccgctgaagttgccggcaccaacaaagagaccaccacccaaggccacgatgatccttggaagcgttgcgc

SEQ ID NO: 418090 - DNA, 396 bp, Oryza sativa
gcccaacaatttatcagaaaatgcatagcagttcgcaacctcagttacacaaatagcagccaagagcgcctagaatacaaaagctgacccagaaattcgagagcagcacatcacaagagagtttgagagagggagagagccagcaaggtagagcatttatttagtaatcgttcacttgccattgccagggttcaaaacatttcagctatctttgcacctacaggctcacggtcttcttgagggaattgcccttctcctccaagctcccaagcaggctgtcgaaggccttcttgaaggagtccacaccttccagctttagctgcttgccaaccttatcccaatctatacccaggttctccagggcactgtatacaccttcagcatccgaaacgtttg

SEQ ID NO: 418091 - DNA, 416 bp, Oryza sativa
tcaaccctcgtgaccaacccatctccccaccaaccccggccgccgccatgaccggcgccgtctccaagctcgccgccccgaggccggcggacgccgagccgctcccgccggcgtccgtccgctgcgcgttcctcgcctccgccccctccccgcgccgcttctccgtctccatcgccgccggccgcgccaggagccccatcattgcgatggcttctgccaaggaaggaaatggtgccccaacgaagaggacaacccttcatgatctctatgatctccagggtcagtccccgtggtacgacaacctctgccgtcctgtcaccgatttgctgccccttattggcagcggggtccgtggagtcaccagcaacccatcaattttccagaaagccatcttgacttccaatgcatacgatgac

SEQ ID NO: 418092 - DNA, 380 bp, Oryza sativa
acaaataacagagcagagagactttatttttacgtactgaatacaatacaagtgatatgaatcaaacaataatttccaaaaaataaaacaaacatgtaccccgatgcataatctcgcgtacgcgcggagaaggccacaaattaaacaaaatcatatcgaatcaaaccagatacgtacttcttgccaccaaatgcacgcatgcatgaacatgcccatgcatgacaagtgacaacacgctgctagcacgtaggaaccaaataaacccctgttgcgttgagacgtgcatggatcgatcgcgcggctactttataaagcctttagaagcacttgaagccggtgggcacgcgcttgccgcaatagttgaggatgaggctgaggtc

SEQ ID NO: 418093 - DNA, 502 bp, Oryza sativa
  unsure (1)..(502): unsure at all n locations
gcatccagagatttttaatatcggtacggtgtagtgcgcgtgatccagcagcagcaatggcaggcaaggcctcgatcgcgctattcctcgccgtcaacctggtggtcttctcgttgggcagcgcctgcggcggccactgcccgacgccgacgccgccgaccccgtcgacgcccaccccgactcccgccgcattcggcaagtgcccacgcgacgcgctgaagctgggcgtgtgcgccaacgtgctgggcctcatcaaggccaaggtgggcgtgccgccggcggagccgtgctgcccgctgctggaggggctcgtcgacctcgaggcggcggtgtgcctctgcacggccatcaagggcaacattctcggcatcaaccttaacctccccgtcgacctcagncttattctcaactactgcggcaagcgcgtgcccaccggcttcaagtgcttctaaaagctttattaaagagccgcgcgaacgatccatgcacgtctcaacgcaac

SEQ ID NO: 418094 - DNA, 499 bp, Oryza sativa
cacagttaagctgaagacattgtattataggatcaaaacatttctattaccacaactttttaaggatggaatcgagtagcaatactttcaccccaaaatacagtttagcgacaatatcttagaaaagccgcttgctttgccgccatggctggcaagctgagcagagcagctaacacaaagaacacgagatcactataaaccaaacggcaacgaacgaagaaaatacagggtcttttttgtctgaagatacacgaagcggttcgttttcttttatttttagtctcctctcctcctcgatgatgggtgtatggcaatggcaatggcgatgggatcttggcttagttgatgggaaggggctcgccgttccactccttgaggcagtcgagcatggggtcgatgagcttgccctggctgatgccgaggaacaccttgttgcactcctcgccgggggacttgagcttctcgccggtgaggaatacgcagccgagctcctcgcgga

SEQ ID NO: 418095 - DNA, 380 bp, Oryza sativa
ttaccttctgctgcggctcttcttcagtatcgaatcctttcttctcctcgtgcccaccaccaccaccgcagcaatggtgggcaacgggccgatcaacaaggaggacccgctcaactggggcgcggcggcggccgagatggccgggagccacctagacgaggtgaagcgcatggaggcgcagatccgcgagccgctggtcaagatccagggcgccaccctccgcgtcggccaggtgggcgccgtcgcccaggccaaggacgccgccggcgtcgcctgcgagctccacgaggaggcccgcccccgcgtcaaggccagcagcgagtggatcctcaactgcatcggccacggtggcgacatctacggcgttaccaccggctttg

SEQ ID NO: 418096 - DNA, 401 bp, Oryza sativa
caatacaacaaagtacatacattttctacatgtatttgtcaattactatatgacgaaagttatgtgaaccctacagcagtgtaacacctgtagcatcaagggtagagatttactgtacattcacgcaatcataatcttccttatttgcggaagttgcttcgtagtaacaacaaagaaaacaattgcatacctacagactacagtgatatgtacagctaaagtacagactaaaagccagcatatatcaaaatgcaaggcgtaataatgtgtaacagatcagcaatttcgcggtctgttataattcggaggcagagaaggacacctttcattcatgtgagggtacggctgcatggtgttgtatccaggcaactccatttgatacctgccctttatttggcaaa

SEQ ID NO: 418097 - DNA, 430 bp, Oryza sativa
gtacaatcttgagtatcttggtcgagttgttttcaacacagatggaattatgtatcctgacagcgtggttggtaccgattcacatactactatgattgatggtttgggtgttgctggttggggagttggtggaattgaagcagaggccacaatgcttggtcagccaatgagcatggttttgcctggtgttgttgggttcaagttgactgggaagttacagaatggtgtcactgctaccgaccttgttcttactgtcacccaaatgttaaggaagcacggcgttgttggcaaattcgttgaattctatggcgaaggcatgggaaagttttctttggccgacagggccacaatcgcatacatgtcgtctgaatttggagccacaatgggttttttttctgtagaccatgtgacactagattattttaaattg

SEQ ID NO: 418098 - DNA, 455 bp, Oryza sativa
ttttctcattatcctccccttcatcgtgctctgcccgctgtactactaccaccagaagcacccggtcaacctgatcctgctcggtctcttcaccgtcgccatcagcttcgcggttgggatgacatgcgccttcaccagtggcaaggtcattctggagtctgcaattcttacaacagttgttgtgtttagcctgactgcctacacattctgggctgcaaagaggggccgtgacttcagcttccttggccctttcctcttcgcctccctcattgtgctgctcgtgtttgcgttcattcagatcctattcccgctgggcaggatcttccagatgatctatggcgggatcgcgtcgctcatcttcagtggctacatcgtctacgacacggacaacatcatcaagcgctacacctacgaccagtacgtctgggccgccgtctccctctacttcgacgtca

SEQ ID NO: 418099 - DNA, 414 bp, Oryza sativa
ttgccatggaggcgcagaaggtcgagatcgaccgcaccgcagcgctccaggtgcgccgtgagctttggctggggctggcatacctcgtcgtccagactgccggcttcatgaggctcacattctgggagctctcatgggatgtcatggaacccatctgcttctatgtgacctccatgtacttcatggccggctacaccttcttcctccggaccaagaaggagccctccttcgagggcttcttcgagagccggttcgcggcgaagcagaagcggttgatgcacgcccgggatttcgatctccgccggtatgacgagctccggcgagcctgtggcctgccggtggttcggactccgacgagcccctgcagaccgtcgtcgtcgtcttcgacgcaggagagccattgccattcttact

SEQ ID NO: 418100 - DNA, 433 bp, Oryza sativa
aacatgcaacaatcatcatctcattgttcaagagttcaaacattatcgtcgtcatcatgggacgaggaaaatttgccagacacgcaccagagatgggagaacatctggactctggtctcttctaagtgaagctaacagtcaggctaaggtaacaactcccaagaggccaaagataagacaacagcattcctgaaacaacatgagacccaaaaagaaacggtgcgggcgattcccaagcacaacgtacactggcaggcgttattcgtgatgcccgtcgaagatttcagcgctgctgccaatggtattatgttcttagaaccacttgaacagcagaccaccgtgtgtggcgaagaaaggcgcaaacacaagggactcgacggccatgagcttgatgaggatgctgagcgacgggcctgatgtgtccttgaggggg

SEQ ID NO: 418101 - DNA, 406 bp, Oryza sativa
ttagagacgcgtcacctcctccccgccgccgccgccgccgcctcgcctccgttgcaaccgtagtagggttagggttttcgtggtgggcgccgccgccatggcgatcctctcggcgctcgggaccgaggtgttcatccccgtcgcggccgccgtcggcgtcgcgttcgccgtcgcgcagtggctgctcgtcgcgcgggtgaaggtcaacccggcgcacgcggcggcggccgcggcgtcgggggggagcaagaacggcgggtacggggactacctcatcgaggaggaggaggggctcaacgaccacaacgtcgttgtcaagtgccacgagatccagaccgccatcttccaaggagcaacatcatttctcttcacggagtaccaatatgttggtatcttcatgtcaatc

SEQ ID NO: 418102 - DNA, 393 bp, Oryza sativa
tttttatttgggtggctgccattcatctccatgtctcgttccattgctccccccaaattcttctccaatcagctcgattccgtcctcttcgagcagatcagctcccgctgatcgaatcggtgtcgaattttggtcgtggctgctgctcttgggttggatcttggcggtgagaaagatcgtgatttttgttgctgcgatttgtgaggaatcgttcgcgctggagggaggagcagagctcgctggccatggcttgccgcggcgagcagagaacagatctgtgagctctatgaagatcgtcactcacctgcgccgatactgcttactgcactccttatcggatgacttactctactggtttcatgagagctcataattctgggggaatcatctttt

SEQ ID NO: 418103 - DNA, 416 bp, Oryza sativa
aggttcaaatccaacttattcataaagcatactgctgtcccacaggaaactgtttcataaaactaacatatcatacggactcgatggtccattaaaccagacacaagtagacatcagcaccacaaatacttgacgaacagaggctcgggacgaccaggcacatcggcagctccaccaaactggctgattactgaccaccacggaggcggagcaccaggtggagggtggactccttctggatgttgtagtcggcgagggtgcgtccatcctccagctgcttgccagcgaagatcagacgctgctggtctgggggaatcccctccttgtcctggatcttggccttcacattatcaatggtgtcggagcttttaacctccaaagtgatggtcttcccagtcaaggtcttcacgaagatc

SEQ ID NO: 418104 - DNA, 472 bp, Oryza sativa
tataaatttctccccaatctcgcgaggctctcgtcgtcgaatcgaatcctctcgcgtcctcaagatgcagatctttgtgaagacattgaccggcaagactatcaccctcgaggtggagtcctctgacaccatcgataatgtcaaggctaagatccaagataaggagggcatccccccggaccagcagcgtctcatcttcgctggcaagcagctggaggatggcaggacccttgctgactacaacatccagaaggagtcgacccttcaccttgtcctccgactccgtggtggcatgcagatctttgtcaagactctgaccggcaagactatcacccttgaggtggagtcttctgacaccatcgacaacgtcaaggccaagatccaggacaaagagggcattcccccagaccagcaagagcttatttttgccggcaagcaactggaggatggcaggacccttgctgactccaca

SEQ ID NO: 418105 - DNA, 461 bp, Oryza sativa
gcgtgcaagttttgaaccgtaaattaattggtatcggtatacttaaatataggataccacacgtatatttattatatctatatatacaagactcaaccaagactgattgagatttccaagattctctctacaagtttctgacaaataagaaatgcatcgaagcatcaaggagtgaacaattttcctgaactgttcatgaaaccatgcatctctgatgaagattgtgaaacatctttgatggccttctactcttctagcatccgtgcagagcaggtttcagagcttggacagtgcagagtccatcacggcgacgaagaaatcggcatcctccttggtgaagcacagagggggagtgatcctgaagaccttcccgtagaagccgcctttgccgaccaagacgcccatctctttcatgtgctccatggcgcggcaaatctcgtctttcgccggcgtcttgagct

SEQ ID NO: 418106 - DNA, 409 bp, Oryza sativa
ttgccttcgtggcccgtaaagtcctcctctacctcccccgaccgctccaggggcaccgtgagctcgggctggcactgattaggcgtgagatacaggctgaggaacggatggggctcacattctaggagcagtgatgggagggcatgtaacccatctggttgtatgggacctccatgagcttcatggccggctacaccttcttcctccggaccaagaaggagccctccttcaagggcttgttcgagagccggttcgcggtgaaacagaaacaggtgatgcacgcccggtatttcgatcttcgccggaatgacgagctccggcgagccttgtacctgccggtggttcggactccgactagcacctgcagaccgatgtcgtcgtctactacgcaggagagccattgccagtc

SEQ ID NO: 418107 - DNA, 398 bp, Oryza sativa
gataaaagataagtagataaattatgaagggggtaagatttcccataaacggacatatatacgcacggtgatgaattagtatagtaaagtaattcagagctcgccggccggagaggtccatctgtcgagcatgtcgaggcactccttggggcggtactccggggcggtgtggccaccgcccttgacggtggcgaaggtgaggttgtggtcgtagacggtggtgaagccggcaacctggcggttggagtaccacggccttcaggcggtcaccacgttgtagcccagcgtccggatccactgctgcgtgccaacgaacgtcatgtccaggtcgtggtcgccgttgtacaccaacgccctgtagccccgctgcgtgagcttccggtggtaggggatggcgc

SEQ ID NO: 418108 - DNA, 459 bp, Oryza sativa
taggaacaagggtacaacgtcaccctcacacagacgggacagcagctggtggtgttcctcaccaaatggctgggcgatcacccagagttcgcctcgaaccctctctacatcggcggcgactcctactccggctacaccgtcccagtgacggcgctccagatcgccaacgacgacgacgcccgggcgcggctgaacctcaagggctacctggtgggcaacgctgccacggacgtcaagtacgacagtgggggcaaggtgcccttcatgcacggcatggggctcatctccgacgagatgtacgaggccgcgcggagcagctgccgtggcgactacgtgttcaccccgaccaacgccgactgcgccaacgcgctgcaggccatcagcatggcaaccttcgccatcaacccggtgcacatcctggagcccatatgcggatttgcgctgcgcgggcgcgcgatg

SEQ ID NO: 418109 - DNA, 400 bp, Oryza sativa
ttattccacccccttcccttctctcgtcctcctcctcctcctcctcctctctctctctctctctctctcttcaaaataggtgggcggtgctctcgccttccctccccgccggcttccgcctccagatccgcgccgcccgccgccgccgcgctcgctcgagcgggagctatagctgccgccttcgattcgacgctgcatgtactggcgagaggcgtagcgcgtggcgtgctctccccgacgcgcgcctcgcctcctccccgttcattacaagatggcgatgatggtggaccctcctaatggcatgggaaaccaagggaagcattactacacaatgtggcaaacgctatttgagattgacaccaagtatgtgccaatcaagcccatcggaagaggggcttat

SEQ ID NO: 418110 - DNA, 215 bp, Oryza sativa
gcggcgctcggcgccgacgtggcggagctccggctcgaccgcctcgccggcttcgcgccccgccgggacctccccgtcctcctcgcgcagccgcgcccgctccccgccctcgtcacctacaggccgaagtgggaaggaggtgaatatgaaggcgatgaccgagccaacgattcgagggcgccttctattggcaaatggcaaatggggggctgaat

SEQ ID NO: 418111 - DNA, 444 bp, Oryza sativa
tatatgatggcttctttcaggcctttctccctctcgtcgccgatgacaacgacgatgctcctgctctttcttctcctctgcacgaattccgccaccgccgacgtcgccggcagcaatggcggctgcggcggcttcaagcgcatgttcagcttcggcgactccatcaccgacgccggcaacctcgcgaccatcagccctcccgacgcctccttcaacaggctcccctacggcgagaccttcttcggccaccccaccggccgcttctgcgacggcaggctcatcgtcgacttcctagcggatgatctggggctgccgttcctgacgccgttcctccgggcgaagtcgccggaggacttccggcagggggccaacttcgcggtggccggagcgacggcgctgagccaggacttcttcagcagatggggctcaacctcaccatcatac

SEQ ID NO: 418112 - DNA, 421 bp, Oryza sativa
ttcacagacatcgagcttgatcggttagcacctgccggatacaccttttgctgcatgcgagtgatgttctgtggccttgtcggctcatggcaatctcagacgccagagtggttcgccatgtgaggtgtcccaaatgcttcagtgttcttcaggagcccaccggcgcgccggtgtaccaatgcggtggatgcggcactaccctccgagcgaaaaaccgcaccggcaactcacaggaggtgatcagtgctccctcctctttggggagtggcctgcctcctcacagcaagcacctgggctccagtgatgttgcaagcaccagtggatccactcctgaagctcaaatcagcagtgggcagcaaggagctgacatgacaagccgacgcgagactgatgatctcgtgtcggcgaggaacaatgcttc

SEQ ID NO: 418113 - DNA, 402 bp, Oryza sativa
tgggacctgaggccgagcgtgagacgtgctggacgcggaccgcgacggttgcatcagccgggaggacctcaagatcgatctacgccagcggcgcggtcaccagtgagcggttcgacaacaaggacatcgccgtcatgatcgccggagccgacgtggacaacgacagggtcgtgcagtacgacaagttcgagcgcctgctggggcacgccgccgcgggggcggggtgcccgcccgcgatggaggacgtgctccgcgtgatggaccgcgacggcgacgggaaggtggggttcgacgacctcaaggcgtacctacgctgggccgggatgccggcgggcgacgaggagatccgcgccatgaacgcgtggccggcggccgagacggcgatggttgcgtggggctcga

SEQ ID NO: 418114 - DNA, 280 bp, Oryza sativa
aacgcaaaagccacggtttttggaagcccagcaagaactttatttaaaggggatcactaataacaatgatgataaaaccacatgtggaaagggggacgatgatccacaggatgggacaagtaccgaaggaacggccattattgggggattacacaagagcacccaaacgcacttacccaaaagaccgaagaaaaaggggctaatttaaatggcagatggagcaatgtagaagtagtggtaggtatgcaaccaaatcgaaatggaatgagaattttttttg

SEQ ID NO: 418115 - DNA, 384 bp, Oryza sativa
ttatggcttgcctctatgccggcatcaacatcagtggaatcaacggcgaggtcatgccaggacagtgggagttccaagttggcccgtctgtcggcatttctgccggtgatcaggtgtgggttgctcgctacattcttgagaggatcaccgagatcgccggagtcgtcgtctcatttgaccccaagcccatcccgggagactggaacggtgctggtgctcacaccaactacagcaccaagtcgatgaggaacgatggtggctacgagatcatcaagtccgccattgagaagctcaagctcaggcacaaggagcacatctccgcctacggcgagggcaacgagcgccggcttaccggcaggcacgagaccgccgacattaacacct

SEQ ID NO: 418116 - DNA, 433 bp, Oryza sativa
gaaattatgtcacgcattcagcatgaattaaatctcataatttcattatgatatccagttatccacatatatggacaaagcggacaaatgccggcatttcatccgctaatgggaagaaaaggaatgaagatatatggtatatagctatcagggaaaaagatacaaaaaaatgtacatttgttgatttatggtcagcactatgcaaccatggtgatctcaaggcgcaagtatatatcatgtctgtaaatatatctttttcaaaaaagtttttacatctctataggcagtgagatgcatgctaccaaggcttcaggtcgcccaccggtccagcagtccagttcagggccctctccccgggcttcaagaagacgttttcgccatgtggaagcttgcgagcgagacccttcagtatctgatggaatgcatctcctgc

SEQ ID NO: 418117 - DNA, 440 bp, Oryza sativa
tagggagagggttggagaggagaggagacacaggtgctgggaagaggcctgtggggatcaagaagatgaggaggtgggtcttggccattgccattcttgctgctgctgtatgcttcttccttggagctcaggcccaggaggtgcggcagggccaccagacagagaggatctcaggaagtgctggtgatgtgttggaagatgaccctgttgggaggcttaaggtctatgtctatgatctcccaagcaagtacaacaagaagctgctgaagaaggatcctaggtgcctgaaccacatgtttgccgctgagattttcatgcaccggttcctgttgtcaagcgctgtccgaacttttaatcccgaggaagctgattggttctcccaccggtgtacactacatgcgacctgactcccttcggtctttccttgcccttcaaatccc

SEQ ID NO: 418118 - DNA, 363 bp, Oryza sativa
tttccgacgcgatcttttttatacagagcgcttctgctttgagcaatggccaacctcaccgacctcggtaacctcaacctcagcgactgcagcgacaagatcatcgccgagtacatctgggttggaggatcgggcatagacctcacgagcaaagcgaggactgtgaaaggccccatcaccgatgtgagccagctgccgaagtggaactacgacggctccagcaccgggcaggctcccggcgaggacagcgaagtgatcctctaccctcaagccattttcaaggacccgttcaggaggggcgacaacatccttgtgatgtgcgactgctacacgccacaaggtgagccaatccccactaacaag

SEQ ID NO: 418119 - DNA, 476 bp, Oryza sativa
tcgcggtggtggttcgccggagcgcagcagcagcagcagcaaaaggccgcgagggccgccgtcgggatccccgccgccgccaagatgaacgacgccgatgtcgccaagcagatccagcagatggtgcggttcatccgccaggaggccgaggagaaggccagcgagatctccgtctccgccgaggaggagttcaatattgagaagcttcaacttgttgaagctgagaaaaagaagatcaggcaagaatatgaacggaaagagaagcaagtcgaagttagaaagaaaattgagtactctatgcagctgaatgcttctcgcatcaaagtgcttcaagctcaggatgatttggttaattccatgaaagaggatgctacaaagcaactccggcgtgtcagccacaaccaccatgaatacaagaaccttttgaagaactcgtcggtcaaggtttgtttcggttgaaagagcagcggtacttt

SEQ ID NO: 418120 - DNA, 386 bp, Oryza sativa
ttccattcgtttttgagttcctcgtttgctccgcctctctttcactcatgggcaagattaagatcggaatcaatgggttcggccgcatcggcaggctggtggccagggtggcgctgcagagcgaggatgtcgagctcgttgccgtcaacgatcccttcatcaccaccgagtacatgacatacatgttcaagtatgacaccgtccacggccagtggaagcatcatgaggtcaaggtcaaggactccaagaccctcatctttggcacgaaagaggttgcggtgttcggctgcaggaaccctgaggagatcccatgggctgcggctggtgctgaatacgttgttgagtctactggtgttttcaccgacaaggaccaggcagcagctcac

SEQ ID NO: 418121 - DNA, 450 bp, Oryza sativa
ttttgatacaagtgtcatcccgcatccaacaaccatggactccttgtatgatatctcctgctttgctgctggtcttgcaggcaacatctttgcgcttgctctcttcctgtcgccagtgacgacgtttaagaggatcctgaaggccaaatcgaccgagcgattcgacgggctcccttacctgttctcgctgctgaattgcctcatctgcctgtggtatggacttccctgggtcgccgatggcaggctgctcgtcgctaccgtcaacggcattggagcggtgttccagctcgcctacatttgcctcttcatcttctacgcggacagcaggaagacgaggatgaagatcatagggctcttggtgctggtagtttgcgggtttgcgctagtttcacatgcgagcgtctttttctttgatcaaccgctttcgcagcaggttgtgggagctgtgag

SEQ ID NO: 418122 - DNA, 486 bp, Oryza sativa
ttttggtttcatgccaaaaggtttttgaaggcccccttgtgaattccctgttgtccatcagacaaggaggcctcaagatgtacatcatagaggacaaagggggtgccattgccctcatgctggcctccctcttcttcctggggacatggcctgcggtcctcaccctcctcgagcgccgaggccggctcccgcagcacacctacctcgactactcgatcacgaacctcctcgctgcggtcctcatcgcgctcaccttcggtcagctcggcgatagcaagcccaacatgcccaatttcttcacccagctcagtcaggataattggccttcagtgctgtttgcaatggcagggggtgttgtgctcagtatagggaacctctctactcagtatgcatgggcatatgtaggtctctcagtgactgaggtcatcagctcaagatgggtggtggaataggcacaacactgaatattttctggacaaccggatc

SEQ ID NO: 418123 - DNA, 293 bp, Oryza sativa
gcgcgagctgcggcgggaaggcctcgacgtgacggtgctcgagcagctcgccggcgtcggcgggcagtggctgcacgacgcggcgaccgacgccggcgacccgctcggcatggcccggcgtgcacagcagcgtgttcgcctcgcttccgtatcaacggtaccgagggcagtccatcggctttttccgactttcccgtttccgaacccaaccaaacgacgcccggccggccgaccgcgccggtcgggtaccccgtaacacggccgagcctcattcaggttacattcaggggact

SEQ ID NO: 418124 - DNA, 337 bp, Oryza sativa
aatccgagaagaaagatggcggcatatttatagcaattccgaaaataaaaaggttcagtttttagtacaatgaaaaatcctcttgagacagacaggccagcattttttttgttgaattgtcgtgtatttatttggtttgcttcatcttaacctgaatttattggagtccaatccaagtgcttttatttgtgggcgtcgtcgtcctcctcggcgggagtccaaccgtgccggcgcacggcgtcgcggacgaggtcgctgtcgtggtagccgtcgcggaagttctcgatgtcgtcgaccatgtcggagagggatgacacaaagatctccttttttcact

SEQ ID NO: 418125 - DNA, 413 bp, Oryza sativa
atgaacattatctcgttccaaacctcacctcctacactccctccccacccaccacggggatcagtgatgcgcatcatgcatcggacggtgtataattgtacacgtggaaggtggcctgtggggccaccgcggccaggaagatcctggccgtcgcttcctgcgacaccaaccccgcttccttctccacgagcgccgccgccaccacgtctccggcggcgccgcccccggcggccaccatccctatgatggccgcctgcacggggcctagtgtcggattatacgccgcggactccaggcatcctccggcgtacaccttcccttcgccgtccgccacggcgaatcccgacgggcactcgctatacggcgcatgcgccgcccgcgcgggcgcctccgctgccttcctcaggcgcgcc

SEQ ID NO: 418126 - DNA, 271 bp, Oryza sativa
acttcggctagtagcattgcaacgcaaacagtatgacaaggtaccacgcattgtttaagagctaagacaaagacaaaactgatgcatccaacgtaccaaaaagaaagcgaacagcagcagtcagatagctatgagaagagaactaggagagggataactagaagggacagaatggcatccatgggtccatgacgtttagtcgacctgctccatcttgctctcgccggcgtggtcctccagcggcggcatgtcaagttgagcctaggcggac

SEQ ID NO: 418127 - DNA, 412 bp, Oryza sativa
ttttcttctcgtcctctccacgcccccgagatctcaggagcacaggaggaggaagccatggcgtcggagaccgagacgttcgccttccaggccgagatcaaccagctgctgtccctcatcatcaacaccttctactccaacaaggagatcttcctccgcgagctcatctccaactcctccgatgcattggataagattaggttcgagagcctcacggacaagagcaagctcgatgcgcagccggagctgttcatccacattgtccccgacaaggctagcaacaccctgtcgatcatcgacagtggtgtcggcatgaccaagtcggacctcgtaacaacctcggtaccatcgccaggtcggggaccaaggagttcatggaggcgctcgctgcttgtgctgatgtgtccatgat

SEQ ID NO: 418128 - DNA, 433 bp, Oryza sativa
acgcgcgcagcatgcattttatttaggcacggtccacaattcatacatgtatagtggatacgtctcgtcggcagacactcacggtatagtagggtagtcgtgtgtacagtgatatagtcatatctgcgcgtcttttcatgccgttcgttgacttcgttcacagggtcagggtcgggtaggcgatatcgagtgtgacgccacacaggccggggccaccgacgtcgcggagaatccggatgtagccgcgctcgccccatgactggccccatgagttcttgatggtccagtacttggcgccggaagacgcttcggtgccgtacccgacgacggtgacggcgtgcgctaggcgcgtgccgcacgggcccgtgtaaacgccacccttggagaactgcatcccgctaccgaccttgatggccacagccacgggctgccg

SEQ ID NO: 418129 - DNA, 388 bp, Oryza sativa
gtggaacgcgtacttacccacaagttaggtgcatgccatggcaccattcatggcgtgcgcctcgccaccggtactcacgctggccctgctcgcgtcgtgcggtgcccttctcgccacctccatgctcccggcgcgtgcgacggcgggcagttgcttggacgtcggcgacatggtgatgatggacaggttccgcgcttggcagggagctcacaaccggtcgtacccgagcgcagaagaggcgctgcagcggttcgatgtgtaccgccgcaacgcggagttcatcgacgccgtcaacctgcgcggcgaccttacttaccagctcgccgagaacgagttcgcagaccttaccgaggaggagttcctggccacgtacaccgggtactacgcc

SEQ ID NO: 418130 - DNA, 293 bp, Oryza sativa
caaagaaactatcaattttttttttattaaacaaagggtagaagcagtgttaagaagatccctcagccaccaatgggaatcataggtctttttgccgttttagcattatcaaacatcccagcatgtttagctttcttccttttaaccgcagcgcttattatttctctgagtccagcatcatcaacaccagttcgaataggttttttcaggctcacctttggggggccaaataagcccactttcaagttgccatcagccaatagtcgaaatttattgcacccagcccaaaaatg

SEQ ID NO: 418131 - DNA, 312 bp, Oryza sativa
gtgctggttgcaatagattacgactattggctgatggcaacttgaaagtgtgcttatttggcccctcagaggtgagcctgagagagcctattcgagctggtgttgatgatgctggactcagagaaataataagcgctgcggttaaaaggaagaaagctaaacatgctgggatgtttgatattgctaagacggcaaatagacctatgattcacattggtggctgaggtatcttcttaacactgcttctaccctttgtttaataaagaaagaattgatagtttctttgaaaaaaaaaaaaaataaaaagaataa

SEQ ID NO: 418132 - DNA, 444 bp, Oryza sativa
caatacaaaaataattgaatttatgcatatgactatatgacagctataaagatttagtatatttttgtactgttacattgatcatcatgatcggtgcaaacttcgtcatgacatcaagaattgagatctactatagttaaactttacaccaccaccaacagaatcagcccaatcttatgtatctctacgatcatctgcccttggagctcgtcctcgcactatcgctccttggagaattcccctgtccacgcaccagtgaggagctgttcctgggctccctcgacttgctcttaatcaactcgatcttctcgagagcctcaacgacttccttcatggatggtcggctcttgggatcaccagacagacacttgagagtgagctgagcaccttggagggctcccctggaatgatactgccccttaagacgactgtccatcagctggc

SEQ ID NO: 418133 - DNA, 422 bp, Oryza sativa
ttcatctgcacttgcactgcgccatggcggcctcgaccaccctcggcttatcccaccccaaaaccctagccgccgccgacgccgcggcccccaaggccccgacggcgccggccgtcgactccttcccggtctcacatgccgcctgcgcgccgctcgccgcccgacgccgcgcggtcaccgccatggtcgcggcgccgccggccgacggggccgccatgccgtcgctcgacttcgacacataccgtcttcaacaaggagaaggtctccctcgccggccacgaggagtatatcgcgaggggtgggaggaacctgttcccgctgcttcccgaggcggtcaagggcattaagcagatcggagagattggatgggggttttcagggcctcgacaagcccagaacctgagggaatcactagctgaagc

SEQ ID NO: 418134 - DNA, 438 bp, Oryza sativa
aaatgaagtggggttaataattaattaaatgggccattatatatggacaaaaagaagagggcgagatctcatcaaaataaacccatacagctcatctggaaaggcatgtactatccacagaagacttggttttcatcatatattatacctgtatatacaagggcatctctctttatgtactcattctgattgtttaacacaaggctgagaaaatttgatacacttggaccttgcatttcaatctcatcaatcccatgcacatcctctgagaatttgagcaagaccgtcgcgttgctcgaaagtaagctgcttcgggaacgcgatctcaaactttacccttagatcaccccgtgctcctttttgatcggcaattggcattccttcccctttgatgatcttctcatatcctgggcagatgatcttatcctgaaatgagca

SEQ ID NO: 418135 - DNA, 421 bp, Oryza sativa
tggaaccctcccgagctgtaccaccgcatcctcaacatccccagggagacctcgccgcaggaaatccgcgccgtctacaagagcctcgtcaagaaatggcaccccgacaagcacccgccgtcctccaagcccgaggccgaggcccgcttcaaggctatcaccgaggcctacgaggcgctccttgaccagcaggagaacagggcggtgttcggggtgtgctgcaacgacggccgcgcgggcgagaaggccatggcgtgcggcgtggtcggcggcggaggggcacacatcgcgaggacgcgcagcgacgacttcggcgcgaggatggcgcccggcacgccggcgagggagttcaagaaggtgtacagctccggcaactccggcgggcggcgcgcggtcgccgagttctccagctcaatcatgc

SEQ ID NO: 418136 - DNA, 429 bp, Oryza sativa
ttagttcttgacaagacgatcaagctggggattagacaaggtattgcgaaaggtttggctgccggattcacgggcctttccttcgccatctgggctttcctcgcttggtacggcagtagactggtgatgtaccatcatgaaagcggaggaaggatatatgctgcagggatttccttcgttttaggcggcctatcccttggaatggcactccctgaactgaagcatttcacagaagcgtcggttgctgccacaagaattctcgatcggataaaccgtgtgccagagataaatgctgatgaccccaagggacttattttggatcaagtccggggagagcttcagtttgagtctggccgctttgtttacccatcgaggcctaacatgactgtcctcaaagactttaaccttcagatttctgctgggcaaact

SEQ ID NO: 418137 - DNA, 429 bp, Oryza sativa
gtccggcaacacatcagagttgtcttgcatttctttagaagggccttgtcaccggggacagttcctatcaaaaagggtgataagcagttgatcacatattcagtcatcattacgatgcaactattcggaccgagattcatccaatacgccataatgttacaggaaacgaactaatgtagctgctccactattacgaatttgatcgaacggctgaacggctcctgattcacctcacacacttgtatgccaactcgatctttgccacccatcactagtctgctagtttgggaacttcattttgtactgctgagcagtcataaaggtcgctgtaatcatctttcctgcgaaccatctaccatgcagtgcgcgttgagcagctgtcgcagctgctacactgtcgaaatgaaagtacacaaagccagcagtatt

SEQ ID NO: 418138 - DNA, 409 bp, Oryza sativa
ttcctccacactttgaggaaacgtctaagcacaagtgctaaacgcgattagaaggcagcgaaatcgtacactaaattgcacggattagagatagatctcaagcaatgggggaggagaaagtggcgccgaagtctgacgctgccccggcggtggagttgctggggttcgtgatgagcgcggaggaggccgagcgcgccgcggcggcggccggggtggagacggtggaggacctgctgccgctgctcgtcccttccgcgatgcggcgcgcgcgtgccccgatctcgcggttccccgtgggcgccgtgggcctcggcgcgagcggccgcgtctacgccggcgtcaaccttcagtttcggggcctaccgctgtcccatttcgtacacgccgagcagttccttgtcgtcaacgc

SEQ ID NO: 418139 - DNA, 461 bp, Oryza sativa
gatcgcgacttttcggaatttgcatcagacgctcggaatgttaggattgcaatagcaacagatgggtttaatccatttggtatgggtgctgtctcctacacctgctggcctgtgtttgtcatccctctcaaccttccacctggtgtttgcatgcagaaacacaacatgttccttagttggattatccctggacctgattatcccggcaagaaaattagtatgtacatggagcctctagttgatgacctactccatgcctaggagcatggtgtgcagacatatgatcgggccactaaacagaattttaacatgcgggtgtcatatttattctcgttccatgatcttccagactatgggatattttgtgggttggtgtgtacatggaaagatgccctgtccagtctgtttggaggtgctttaaggaagaccgctgaaagttggtggaaagtactccttttttg

SEQ ID NO: 418140 - DNA, 418 bp, Oryza sativa
cgccgttgccgccgccgccgtcagctccgacacgttgaacacttcctggatacctccgggtccccacagaggtagggcgaggttgcatgagccgacaggaagccggagcttctcctccagccgctcgacgtcgaccatgtacatccaccactcgccgtccctccccaccgcctcgtcgcaccggaacaagtccatcatgggctcgcactcgctgcgcaccaccacgcgcacccgcccgccgccgccgccgccgccggcgtcgtgccgcagccccttgcgcgccgccatgtgcgccgtcacgaggtgcacctgcagcctgaacacgtcgcggttccacgcggcgtccgaacggttgcacggcagcgacgccaccaccacgttgacgtcgccgtaccgggagaagtccggcatggggagc

SEQ ID NO: 418141 - DNA, 449 bp, Oryza sativa
actcaaaaagacaatttgtatcatatttccggaggcaatttacacaatcatgtgtctgttacattttcatagttatgtcgcctgacaaataaacaaaatcaagcttttgacagccctattccacctttgtacctgactgcaatgaatgtaatagaatgaaaatatacatgtatgcaaccttggaaccatatggaagaactactttccctgctccatttcagtgcactatcgtgatacacctctacaattacaacggaagaagtgactttctcatgaagattggaagatcggttggtcagcgaaaggaccatatacccaacctctggcaatgtgaccgtaagccgcctctgtcaggtgaatgccatcccagctccaatgggttgatggatcatcacacgcggttgcaccagccttaccacatttggctgtgacattgaagttgtaagcgg

SEQ ID NO: 418142 - DNA, 418 bp, Oryza sativa
ttcttttcctcttcttcttcttcttccctcttcttgtggtggtgggtttgacccaagaacggaggagggatagggcgggcggcgatgggggcagttcgggggattttggtcgtggcggtggttcttgcggtggcggcgattcttgctggggcggcggaggggaaggtgaacgggaaggcgaaggggaagtacagggcgctgttcaacttcggggactcgctggccgacgccggcaacctcctcgccaacggcgtcgacttccgcctcgctaccgcccagctcccctacggccagacctttcccggccaccccaccggccgctgttccgactgccgtctcgtcgtcgaccacctcgccgacgagttcggtctgccgctgctgccgccgtccaagcttaagaactccagcttcgctcacg

SEQ ID NO: 418143 - DNA, 421 bp, Oryza sativa
ttaagatgaagtgcatcgtttaaagggaatttcagggaagggagaacgtgctaaatggcttaaaaataatggcatccataccgtggcagacttcaaaaaggctttaaacaaggatgaagaaaagatctgcactgagtgtttcaacatgaagaaggacaacatgctttggaaagctactgttgaacatgctgaacagtgtgatctcgaaggcaattacaaactgaaatcatatagagttgaagagaaacatgttacacttttctttaactgtgtacacgacctcgttggagcaaaatttcgtggtcgctatgttgcaaaggacaatttcagttcagatgagaaggatgaagtgaattgtttgaaaatacaagcatacgatgaactggataacattgtctttgatcacgaaatgaaagacaat

SEQ ID NO: 418144 - DNA, 395 bp, Oryza sativa
gtcattaggcagcgacgttggtaatgccccaggagcggtcggtcgaggtggtcggcattcagggaagcggaagcagtcgacgaggtggtcgatgacgatgccggaggcctgcatgaaggagtagacgatgacggggccaacgaggcggaagccgcggcggacgaggtccttgctcaccgcctctgacttgggcgtccggaacgggatgtacttgtggtgcttgtacctccccaccgtcggccggtggttcacgtgcccccatatgtatccgctgaacgacccaaactccttcgccaccttctgaatgcatttggcgttctcgatgatgcaccggaccctgcactcggccagcttgagctccttgttgccgctgatctccgggacgtcgttctcgt

SEQ ID NO: 418145 - DNA, 415 bp, Oryza sativa
  unsure (1)..(415): unsure at all n locations
atcaaaattacatgataaaattattattgtcttgaattatgtaaacgatgataacaaatccttttccagctacaaaagaaccagcataacaacaaagaattataaagttgcttaagtaatctctcccttcatctcaaaaagagctatatctagggggcctaggccacagcaacactttcacttaaagggtactttccatcctgcgacacacaagctcccaggatcaatctacttggccttgccgttctcgacagcagcagtcgaggggttcagctcatcccaggcctcgatccaggtgaccatggcatcggcaagcttgaccaagtaggggttcgatcttgccgagcttctccctgacctgctcggcnagggagaggtagcacttctggacggtgtcgcactccttggggatggt

SEQ ID NO: 418146 - DNA, 446 bp, Oryza sativa
ttcgctcctactcctcttcctccgcgcgcgcgagatccagggagagggagagggagagatcatggcggggacggtgacggtgccgtcggcgtcggtgccgtcgacgccgctgctcaaggacgagctggacatcgtgatcccgacgatccgcaacctggacttcctggagatgtggcggcccttcttccagccctaccacctcatcatcgtgcaggacggcgacccgaccaagaccatccgcgtccccgagggcttcgactacgagctctacaaccgcaacgacatcaaccggatcctcggccccaaggccttctgcatcttcttcaaggactccgcatgccgctgcttcggctacatggtctccaagaagaagtacgttttcaccatcgacgacgactgcttcgttgccaggacccatctggcaaggacatcaatgctcttgagca

SEQ ID NO: 418147 - DNA, 440 bp, Oryza sativa
cggccctgcaccgagtgtcccgcgcggtggcggcggggattggccacgcgtcggtccaccgcgcgccgaggtggggcgcggcggcggcggcggcgaggtggctgagcgggggcagggaggcgatgagctacgacgtggtggtcgtgggggctgggcccgcggggctcgccgtggccatccggctgaagcagctctgccgcgacgccgacaccgacctctccgtctgcgtcctcgagaagggctcccaagtcggtgcgcatgtattgtcggggaacgtgttcgagccacgagcgttggatgaactcatcccgaagtggaggcaagaggataccccaataagagtccccgtcttatctgacaagttctggctgttgacaaagaataatgcatggacacttccatcttctttcgatacaagggaaactttgtgataagcttga

SEQ ID NO: 418148 - DNA, 493 bp, Oryza sativa
gtggggcgtcgccggggagcagacacggccaggaccaccgctcgcgcaagatccaccgcaccttcaacaacgtcaagatcaccgtgctctgcggcctcgtcaccatcctcgtcctccgcggcaccatcggcctcaacctctccctccccaaccagcccaccgacgccgacgcgctcgccggcgccaaggccgtcgaggacatcgaccgcatcctccgcgagatccgctccgacggcggcgccgacgacgacgacgccgccgccgccggggacctcgccggctccttcaacgccaccgcgctcaacgccacggaggcggcggcggcctacgcctccgctgtcgaacgctacgcgctcggccccaagatctccgactgggacggtcagcgccgccgctggctcaggcagaactctgggttcccgtccaccgtcgccggcggcaagcccaggatcctgctcgtcacgggctcgcagccggggccctgcgacaaccc

SEQ ID NO: 418149 - DNA, 450 bp, Oryza sativa
gagatgtaacgcagtataaaaggcaagtctatttctgctgatttgagcccctatcacatttaactccatgataaacattagattgcaacctctaactgttacataacaataacaattccatgaacaaaaagaaaagaaaaaaagagtggaaaataaaacaacaccatccccaagtcacaaaatgctctgaccttgaagagagccaaagcaagtatgctattgccataccaactctcatcaggacttttcaagaagtggtcgatatcttggccttcacatcaagattctccttgtcatcaataggctttggggtctgattcctgacccttttgatcttggggcttttgagccccttgtgagcaaacccatagagccgcaacacctggttatcgggaaaattaaatgctcgcctcatactcctgagacaccgctccacaggataatccccat

SEQ ID NO: 418150 - DNA, 454 bp, Oryza sativa
atccttatcttcttcgcgacggcggcgccgatcgtgaaccagaagtacggcggcgcgatctcgccgttcgggaacgcggcgtgcgcggggctcgccgtgacgaccatcatcctgtcgacggggcacatctccggcgcccacctcaacccgtcgctcaccatcgccttcgccgcgctccgccacttcccgtggctgcaggtcccggcgtacgtcgccgtccaggtgctcggctccatctgcgccggcttcgccctcaagggcgtcttccaccccttcctctccggcggcgtcaccgttcccgaccccaccatctgcaccgaccaggccttctataccgagctgatcatcaccttcaacctcctcttcgtcgtcaccggcgtgggcaccgacacccgtagccgttgagaggtcgcccgcgtaggcgacggcgccgacgacaccctcaacatcctca

SEQ ID NO: 418151 - DNA, 467 bp, Oryza sativa
  unsure (1)..(467): unsure at all n locations
tttgcggccgcgtgcggggccttcctgtgggacgcatcccggtggggctccaacccgagtgtggaagtaagcagctatgtgaacaccacctcttatgtcctcaaggaacctggcagtaataaacgtgtaaggtcagggtcttgtggtaggccaacatcaaaagcttccagggaaaagatcagaagagataagatgaatgataggtttcttgaattggggactactttggagcctgggaagccagtaaaatctgacaaagctgctatcttaagtgatgccactcgcatggtaatacaacttcgtgctgaagcgaagcagctaaaggatactaacgagagtcttgatgataagattaaagaactgaaggcggagaaggaccagcttcgtgatgagaagcanaagctgaaagtagagacggcgactttagagcagctggtgaagattgtgactgcaactccaggctacat

SEQ ID NO: 418152 - DNA, 480 bp, Oryza sativa
tttggtttgtcacagagattgggctctgctgtgtttgcactagcttaccgatttgagtcgatacagtaaggtaaaagagtcgcacaagcacttgaagggtacaagcctgggttccgcaccagaggatataaccaatatttgaaaggaacattctaaatggacaagaaattagaaacctactagagttattacaggactgggttacacagatagtcacacgattcagctccttggagcacagctggccaagtgagtcttgaagttctccagctctgcaagaacttcatcttctggacggtatatcaggtcactcatgcgccatatctgcaatgttccacctccaccagtactctcaccatcatcagacacactcacaatagtccaaggatccgaagaattccagtggaagtctacaatcttatccctatgaccagcatgttgaaagaaaagcccagcaggtgcgttgggatttttcttatt

SEQ ID NO: 418153 - DNA, 521 bp, Oryza sativa
  unsure (1)..(521): unsure at all n locations
tcataaggatattgctgagtttgcgcttgctatgtgcccagctgagccatatgtgttatctggaggaaaagacaaatctgttgtatggtggagcatccaagaccacatatctgcactgggagattcctcgaaaactgaatcttctccaggggcatcaggaagcaagggaaaaactgcaaatgataaggatagtcctaaagttgatcctcgtggtatctttcttggccacgacagtactgttgaagatgtccagttctgcccttctagtgcacaggagttttgtagtgtaggcgatgattcttgtcttattctttgggatgcccggagtggtacaggcccagctgttaaggttgagaaagctcatggtggtgatgttcattgtgttgactggaacctccatgatgttaactatatcttaactggttctgcggataattctgtccgtatgtgggaccggagaaatctgggttctggaggagcntgcatttcagttcacaaatttgagggtcataaagctgctg

SEQ ID NO: 418154 - DNA, 487 bp, Oryza sativa
  unsure (1)..(487): unsure at all n locations
agttcttggctttcttcgccgtactcgtcttagcaacggcggtcgttcctgccgtcagccagcaaggatacctgagcatcgactgcggcctggaggccaacagcagctaccaggacgacaacaggatcttgtacgtgcccgacggtccgtacgtcgacggcggggagaaccacaaggtggcggcggagtacgcgtccagcttccagcgcccagaccagacgctccggagcttcccctccggcgtacggaactgctacacgctccccaccgccgccgggtccaagtacctggtccggctggtgttcgtctacggcaactacgacggcaagaacatctnctcctcctcctcgtccgcggcggcggcggcgctcaggttcgacctgtaccttcggctgagccgttggaccaccgtgcagggcggcacccgcagcggcggcgaggtgcacaggccgtgttcgtggcgtgggccagctgggcgcccgtgtgc

SEQ ID NO: 418155 - DNA, 541 bp, Oryza sativa
  unsure (1)..(541): unsure at all n locations
tcgggtgtctcagttcctgcccttgacaaagatgctttgtggcattttaagccagaaaaactaggtgttggagatattatcacgggtggagatctatatgctattgtcaatgaaaatactttgatgcaacacaaggttgctcttccacctggcgctatggggaaaataagttacatcgccccagctggtcaatatagcctgcaggatacagtgctagaattggaatttcagggtatcaaaaaggaatttaccatgctccagacatggcctgtgcgttcaccaaggcctgttatggaaaaacttgctgcagatacacctcttcttacaggacagcgtgtacttgatgcattgttcccctcagttcttggaggaacatgtgccattcctggagctcttggttgtggaaagactgtcattagtcaggcactttccaagtattccaactcccaagctgtggtttatgtcggatgtggcgaaagaggacatgagatggctganggtctcatggactttccccattgacaatgacgacagaggatga

SEQ ID NO: 418156 - DNA, 338 bp, Oryza sativa
ttgtgtttttggagaaagggggggttcgataaatattgcttcacttgtacaaagtacagataaaaatacattgatacatgacacggagagagccatgcacaccacttatttggacacacagagggcaaggctgcagagaaaatcaagcaacacaagctgaactcacggccccacctgtcagcctctcactggtcgaggccggagactcttgtgaaaaacagcaacaccacgcatgcagaagaagacaaattattacacacacaaatcgacgacacggcggccggcgacgtacggcgaggtcgtcgccgccgccggcgacgttgtgatgaggtcgatca

SEQ ID NO: 418157 - DNA, 467 bp, Oryza sativa
ttgcttccatctcattctcctaattgtcatcactagcttctagctagcttaattaattaattagccatggcggaggagaagcaccaccaccacctgttccaccacaagaaggacgacgagccggccaccggagtagactcctacggcgagggcgtctacacgtcggagacggtgaccaccgaggtggtcgccggcggccaggacgagtacgagaggtacaagaaggaggagaagcagcacaagcacaagcagcacctcgtcgaggccggcgccctcgccgccggcgccttcgccctgtatgagaagcacgaggcgaagaaggacccggagaacgcgcacaggcacaagatcacggaggagatcgcggccacggcggcggtcggcgccggcggctacgccttccacgagcaccacgagaagaagaaggaccacatgagcgccgaggagtccaccggcgagaagaagca

SEQ ID NO: 418158 - DNA, 480 bp, Oryza sativa
tttgggttgagtgccgagagagggaaggcaaaagcgcatctgattttttattattccacaacccaacactatgacactaacaacagccacagcctcaagaattgagcacatcactcactctcatcgttattgcattcccccaccacaaacaaatccaccccaacaacatgtggatgtagtactacatgatcgccatctctctccacacgacggcgtcacgtcccaaccaacgtcactctccaccgacatcgccggcgcatcagctgctgtgcgcctgcgtggtgaggccgtagcctaaggggaagagcgggtcgtagtgcgcgtcgccgacgttcatcggcaggtgggccacggacttgaaccacgtccgcgacagcttaccggggaacccgtagtggccgaacagcacgtcggccacgccctgcccctccgtccccggcagccacgccgccacgaacgcgtcgatgccgccgatgtacg

SEQ ID NO: 418159 - DNA, 512 bp, Oryza sativa
gtcttttgctttgctttcaggacatggtcacctttctcaggcagcaagcgtaagcaaggcagaggagagggaaagaacctctctgcagtgctgctgctgctagcttgcagaaaaaaaaaactctcatcttttgcaggaagagacatcactgtttctgcattcgtgtgcatttggattaagctttgcttatccctttttagtggagattgctgagtatatcaggtctatatattggcagctctggttggagatagacactcacactgagccaagatggggagtttgcacaagttcagtgttattctcctcatgttatgttttgctacgttggggagcgctcagtatgtcaagtataaggatccgaagcagcccgtctctgttcgtgtcaaggatctgctcggccggatgactctcgctgagaagattggccagatgacccaaatcgagagggagaatgccacggcggagcagattgccaagtacttataggtagtgtactgagtggtggaggc

SEQ ID NO: 418160 - DNA, 479 bp, Oryza sativa
ttttgttggtcgtctagaatgggttgccccagtacatgaggatgtcctggaggagggggtcgctgccgccgccgccgaggccgccgaggccgccggagccggcggggtcgaggatggaggcggcggggttgatgggcccgacggtggcgaaggtgcgctcccactcgctgatcttgggctggctctgcacctcgcacgcgaactccggcgacagcacctgctccgagcagctcgagtcggcgtgcagccgcggcatcgagtccgacggccggtcgtagtacgccgccaggtccgggaacgccggccccgccaccaccggcttctgctccggcggggagctcaccgccgcgttcacccccaccatcggcttcctctcgacgccgccgccgttgctcaccatccccgccgccgccaccgtcgcggccggcggcttctccagcccgcccttcttgttgtaaatccggcacagcacccaatca

SEQ ID NO: 418161 - DNA, 487 bp, Oryza sativa
tgcactacctctgccgccgctgcgccggcctccccatcgccgtccccatcatcgccgagatcgacctctacaagttcgatccatggcagcttccccggatggcgctgtacggagagaaggagtggtacttcttctccccgcgagaccgcaagtacccgaacgggtcgcggccgaaccgcgccgccgggtcggggtactggaaggcgaccggcgccgacaagccggtgggctcgccgaagccggtggcgatcaagaaggccctcgtcttctacgccggcaaggcgcccaagggcgagaagaccaactggatcatgcacgagtaccgtctcgccgacgtcgaccgctccgtccgcaagaagaacagcctcaggttggatgattgggtgctgtgccggatttacaacaagaagggcgggctggagaagccgccggccgcggctgtggcggcggcggggatggcgagccacggcggcggcgtccagaggaa

SEQ ID NO: 418162 - DNA, 459 bp, Oryza sativa
ttttgtttttttgggaaaacaggacaaaatttgtatagacctcacgaatgcacaaattaatccctctgtttacaaatcaaccaaaatgatcaatgcaaccgtataatctatctctaacaacacaatcttctcgccggtgtgcgccgccctatcttggaccggagagctgcgacgacgacatgtacgacggccacccgctcatcgtcgtcaccgtcgtcgtccccgaccttgtgtggtccccattggaacccgccatggcttgcttgatgccgccgccgctgccgcccgagccgtcggccggtccggcgaacccccggccgtagagccggaggaacccgagcgactgcacgcgtggctcccacagttccatggtgccctcgagcatgccggccaccatcgccatgctcggccgcagctgcgggtcctcgtggaggcagcagagccccacctttaccaccc

SEQ ID NO: 418163 - DNA, 493 bp, Oryza sativa
  unsure (1)..(493): unsure at all n locations
gccgctcccgcctcccccatgagatgacccctcccccgccgccgtcccatgtgctcgccaccgtcgatgcggcggcatccgctgctccctctcctcgccgccgtccttgtcggcgccgccgtccgcgccgggaagatcgccacggaggtggtcgtgccggacttcgtggcgtcgtacctgctgttcattgacacctacggcgtgttcctccagtccggcggcggcggcgcgttccaggccgtcgtgtacaacccggcggggcagcaggaccggtactacctcgccgtggtgcacgcgccgtccaagacctgcgtctgggtcgccaaccgcgacgcgcccatcaccgaccgcgccgcgccgttgcggctcacggcgagggggatctncgccgaggatcccaacgggaccgtcgtgtggtcgacgccggcgttcgcgtcccccgtggcggcgcttcggctcgaccaattcggcaacctcgcgctgttcgatggga

SEQ ID NO: 418164 - DNA, 473 bp, Oryza sativa
ttttgtttttttttttatccggtgtgcatgttgatactatatatattcgctcgaacaattcacaccacactcaaaatctcaaatcaacagatgttctcaagatttcgatcaagcatctccagccccatcttcattggcctcgttggtcgattgccgccgtcccgcggcccagcgaccgagcagtcctctgatatcccactccaaatccctcaggcgtagcaacaggtacagcacgattccggagatgaagcccagcgcggcgctcgagcctgtgagcgacacgccggcgcagaccagcatgacgaacgactcctgcttgctccccatgtcgcgcgacgccatggcgagctcgatcccggagaagagcagcatgacgcccagtatcccgatcgggaactgccccaggatcgtcacgaacgagttgccgaacaccagcccgagcgccagcttgccgatggccaggaacaccacgg

SEQ ID NO: 418165 - DNA, 454 bp, Oryza sativa
atcgtgtgcaagctaacaacatcgctaggcaaaaggaagtcgttgctttcgagtttcccacccatggcatcctccgccggcgacccgctcctctccggcgaggccggcgacggccgccgcaggttcgtcccgtccaccatacggctcaagacgtcggtgtggtcggagctgggcggcgcggtgggcgatctgggcacctacatccccatcgtgctggcgctgtcgctcgcgtcccacctcgacctcggcaccacgctcatcttcaccgcgctctacaacttcgccaccgggctcctcttcggcatccccatgcccgtccagcccatgaagtccatcgccgccgtcgcgctctcctccgcgcacctcaccatcccgcagatcatgtccgctggcctcgccgtcgccgccatcctccttttcctcggcgtcaccggcctcatgaccaccctctacc

SEQ ID NO: 418166 - DNA, 474 bp, Oryza sativa; identical to SEQ ID NO: 395018

SEQ ID NO: 418167 - DNA, 448 bp, Oryza sativa
atcgtttgcaagctaacaacatcgctaggcaaaaggaagtcgttgctttcgagtttcccacccatggcatcctccgccggcgacccgctcctctccggcgaggccggcgacggccgccgcaggttcgtcccgtccaccatacggctcaagacgtcggtgtggtcggagctgggcggcgcggtgggcgatctgggcacctacatccccatcgtgctggcgctgtcgctcgcgtcccacctcgacctcggcaccacgctcatcttcaccgcgctctacaacttcgccaccgggctcctcttcggcatccccatgcccgtccagcccatgaagtccatcgccgccgtcgcgctctcctccgcgcacctcaccatcccgcagatcatgtccgctggcctcgccgtcgccgccatccttctcttcctcggcgtcaccggcctcatgaccaccc

SEQ ID NO: 418168 - DNA, 479 bp, Oryza sativa
ttggtttttacaataaaaccaagttaacttctgtgtaaaaatggagcaatggatcatgcaaagctaacatcagttattattggtacacatatctctactccacagaaactcccaatggaacctcttattgagcactccacaaatatggagcctgcaggtcactctgcgaggttccatctcaacttttcaaaactgtaagaacaaaaaatttaaaaggtacacgtcggtatcgtcgtgtctctctatgcctcggcgccgagttccaacatcaaggtgtggttcgcatcgttgcttccagggccactgaactggatgggaccagggctgatgtaatggttcttgagggaccactcatctcgcaatgaagcaaacttcttaaacggtgccccgtcaagttccaccatagccttcttgatcactggcttgtactttccgtgccttctctcaacatccatcaacgatgtcaatgcagttccacc

SEQ ID NO: 418169 - DNA, 515 bp, Oryza sativa
  unsure (1)..(515): unsure at all n locations
ttcttccacccccgaaaccactccaaaaccaaaccaaatctcgcggcgcatggcggcggcggcggtggcggcgaacggcggcggcgacggcgcgcaggcgtccaacgcgcccgcccccaccaggctcgcgtcggtctacagcgaggtgcagaccagccgcctcaagcacgcgctccccctcccctccgtcctccgctcccccttcgccctcgccgacggccccgccagctccgccgccggcaaccccggtgagatcgcgaagctgttccccaacctgttcggccagccgtccgtgtcgctggtgccgtcgccggagccggcgtccaccaggccgctcaaggtcggcgtcgtgctttccggcggtcaggcgcccggcggccacaatgtcatctgcggcatcttcgattacctgcaggaatatgcaaaggatccgtcatgtatggattcaggngaggtccagctggagtcatgaagtgcaagtacgttgagctcactgcggattatgtgtaccccta

SEQ ID NO: 418170 - DNA, 513 bp, Oryza sativa
cttacctctgccgcgctcctcctcctctcctctcctctcctctcctctcccggtggcggcgcggccaactccagccatgtcggactccaaggccgcggcggcggtcaccctccgcacccgcaagttcatgaccaaccgcctcctctcccgcaagcaattcgtgctcgaggtgatccaccccggccggcccaacgtctccaaggctgagctgaaggagaagctggccaagctgtacgaggtgaaggacgcgaactgcatcttcgtgttcaagttccgcacccacttcggtggaggcaagtccaccggattcggcctcatctacgataacctcgacgccgcgaagaagtacgagcccaagtaccgcctcatcaggaatggtcttgctaccaaggttgagaaatctcgcaggcacatgaaagaacgcacgaacagagctaagaagatccgtggtgtcaagaagaccaagctggtgatgccgtgaaaagaaggaaaactcattacatttgactactg

SEQ ID NO: 418171 - DNA, 483 bp, Oryza sativa
tttgtttaaattgctactgagtactatattaataaaaccataataatccaaactttaacaagtaaagcaaaaccggggccataatgaaagcccgtaccaaaaaagttgcaggagcactcaagaattcggtgtaaaacgaacgacaaattattgcaggtataactaaaagcgataaaagatcgatcatttagtcgacttcctcgatcttgggccctggtccgctgcttccgccggcggccgccggagcatcctcgtccatgcctccggccatgtcagctccggcgccctggtacatcttggcgatgatggggttgcagacgccctccagctccttcatcttgtcctcgaactcctcggcctcggcgagctggttgctgtcgagccagctgatggcaccgtcgatggcgtcctcgatcttcttcttgtcggcctccggcagcttggacgcgatcttgtcgtccttgatggtgttccgcatgttgt

SEQ ID NO: 418172 - DNA, 470 bp, Oryza sativa
tcgctcctgccatcttcagatcgcatcgattttctccttttcgagtttttttccccttcgcttgagagctttcgacgagagcgagggagagggagatcatggccggcaagggagacgggccggcgatcggcatcgacctcgggacgacctactcgtgcgtcggcgtgtggcagcacgaccgcgtcgagatcatcgccaacgaccaggggaaccgcaccacgccgtcgtatgtcgcgttcaccgactccgagaggctcatcggcgacgccgccaagaaccaggtcgccatgaaccccatcaacaccgtcttcgatgcgaagcgtctcatcggccggcgtttctctgacacgtcggtgcagagcgacgcgaagctgtggccgttcaaggtgctacccggccccggcgacaagccgatgatcggcgtgcagtacaagggagaggagaagcaagtctccgccgaggagatctcg

SEQ ID NO: 418173 - DNA, 472 bp, Oryza sativa
tttgttttttttttttttttggttttttttttctgggtaaaaatggagcaatggatcatgcaaagctaacatcagttattattggtacacatatctctactccacagaaactcccaatggaaccttttattgagcactccacaaatatggagcctgcaggtcactctgcgaggttccatctcaacttttcaaaactgtaagaacaaaaaatttaaaaggtacacgtcggtatcgtcgtgtctttttatgcctcggcgccgagttccaacatcaaggggtggttcgcatcgttgcttccagggccactgaactggatgggaccagggctgatgtaatggttcttgagggaccactcatctcgcaatgaagcaaacttcttaaacggtgccccgtcaagttccaccatagccttcttgatcactggcttgtactttccgggcctcctctcaacatccatcaacgatgtcaatgc

SEQ ID NO: 418174 - DNA, 551 bp, Oryza sativa
cggcatattctctttcacccccgaaaccactccaaaaccaaaccaaatctcgcggcgcatggcggcggcggcggtggcggcgaacggcggcggcgacggcgcgcaggcgttcaacgcgcccgcccccaccaggctcgcgtcggtctacagcgaggtgcagaccagccgcctcaagcacgcgctccccctcccctccgtcctccgctcccccttcgccctcgccgacggccccgccagctccgccgccggcaaccccggtgagatcgcgaagctgttccccaacctgttcggccagccgtccgtgtcgctggtgccgtcgccggagccggcgtccaccaggccgctcaaggtcggcgtcgtgctctccggcggtcaggcgcccggcggccacaatgtcatctgcggcatcttcgattacctgcaggaatatgcaaaaggatccgtcatgtatggattcagggaggtccagctggagtcatgaagtgcaagtacgttgagctcactgcggattatgtgtacccctacaaaaaccaagtgtcaagtactgctga

SEQ ID NO: 418175 - DNA, 482 bp, Oryza sativa
ttgtgttgtccgaaaaaaagggccagtttgatactattcgaaatcactgcaatgagtgagtgacacaatggagcaacaccaagagtgcactgcaaagccggttttgatccttacaccacacaaggcgagagggagacacacccgttgataatgttgttacaacatcgacatgtccatcgatatctgaggtgctacatggcgtacctctgagtccaggtccttgctgtgttctcgtacttgtgcctatctgtcttgtacatgtgggcgatctcagggaccagaggatcatcagggttcggatcagtcagcagggaacagattgacaggcaacaccttgaaattggtagtgcttggcttcattggtccttaaggatgtcaaggcaaatgctcccgttgctgttgatgtttggatggaaaaccttggtgcgaaacgccaccttgggtggtttgaagggataatcaggagggaagtggatggtaac

SEQ ID NO: 418176 - DNA, 572 bp, Oryza sativa
tttctttaggcgaggcaagaaaagaagtgaaatctctccgttagacaggaagaggaaaagcaagggggaattggggatggcgtcaaagaggatacagaaggagctcaaggatctgcagaaggatccccctacatcatgcagtgcaggtcctgttggtgaagacatgttccactggcaggcaacgataatgggtccatctgatagcccatatgctggtggagttttcctagttaccatccacttccctcctgattatcccttcaaaccacccaaggtggcgtttcgcaccaaggttttccatccaaacatcaacagcaacgggagcatttgccttgacatccttaaggaccaatggagcccagcactaaccatttccaaggtgttgctgtcaatctgttccctgctgactgatccgaaccctgatgatcctttggtccctgagatcgcccacatgtacaagacagataggcacaagtacgagaacacagcatggaccttgactcagaggtacgccatgtagcacctcagatatcgatggacatgtcgatgttgtacaacattatcaacggtgt

SEQ ID NO: 418177 - DNA, 485 bp, Oryza sativa
ttttgttaaaatcaaaagttatgcaacttttatttgactcatcatttcatcaatcaccagttatcagtacatgagcatgggcattcgactgataaaacggctgatgatacaacactacagtacagattacccaaagcacgacaagtacatcagtttttggcatatcaacactacggattatacagagaggaagagaaatagacctcggcgcgtcgccctcaaatggtgtagtccgaccactgtcgaatgaaggatgtgtgatccatggattccccgggcatgtcctcatccttctcaacctcaccgttcttcctgccaatcaacctggctggattccccaccgccgtgttcctcgccggcacatctatcagcaccactgacccggcaccaatcttggccccggctccaatcttgacgttgccaagaatcgtcgccccggcgccaatcagaacaccatccccaatcttggggtgccggtcaccgac

SEQ ID NO: 418178 - DNA, 471 bp, Oryza sativa
tttgggtggttagctaggttggtatgagcctctgatgatcatgccaccatctgctcctgctccggccactgcgcgaatatgtcgccggcggcgtggccgtccttgacaagagagttcacccatgacacgtccggctccgccgccgcggcgtgcgtcgccaccggcatggcggattggccgcggaacgcgaacgacgccgacttgcggagcttgtgcagctcgtcgccctggacgccccagtccagcttgccgtccggcgagccccagtccgagagaatggacggcgcgccggtcgtcgccggcgacatgagcgaacgcgccgccggggcgcggcctccgcggtcgatgaagctctggctgcgcttggcgaacgccgaggcgcgggagctcatgatcgccttcgccatggagtggtccagcccgaacgcggtgttcgcgccgcccaccatcggcgaggtcggcatgtgcatc

SEQ ID NO: 418179 - DNA, 443 bp, Oryza sativa
ctcccgcgcgccaccgcttcggagaaggccatccggctgctgctcaagtcgccggccgtgtcgccgtcgtcgtcgccgaagaagtcggcctcgccgccgtcgccgccgccgccgcaggaggcgaagaaggagtacccgcctgacctgacgctgcccgacctcaagagcggactgttcagcaccgacgagttccgcatgtacagcttcaaggtgaagccgtgctcccgcgcctactgccatgactggaccgagtgccccttcgtccaccccggcgagaacgcgcgccgccgcgaccctcgccgctactcctacagctgcgtgccttgcccggagttccgcaagggcggctcgtgccgcaagggcgacgcgtgcgagtacgcccatggcgtgctcgaaggctggctccacccggcgcagtacaggacgcgcctctgcaggaccag

SEQ ID NO: 418180 - DNA, 475 bp, Oryza sativa
ttttgttatcgtgaaaaccatgtatacacaatagatgggtcttctttacaggaagcaacttgtgacatcaatcatttggaatcactaccagaaaaaatatgctacgactaggatggaatatacatctcttaattgcccggccaacaaggatcatggaacaaataatcagaccgccgcattgctgcttaattgcgtagacttaccctctcccaaccctgacgtggcgctggttgcgaaaatagcttagaagaacctgagccttctctcttgcacgggctgtgcctgattgcgacaatgcaaccaaaggtggcacgacgccttcttgaagaaccagggtgcaaaacctgttactgtttgtgcagagttgtagcagggcagcagcggcattctcctttgaacgtgcagaacccagctcaacaacctcaaccagtacccggatgcctcctgcctgagcaatggcattccttccatcatg

SEQ ID NO: 418181 - DNA, 571 bp, Oryza sativa
  unsure (1)..(571): unsure at all n locations
ctgggttacaacatttgtccaaagacacgccaaatattgggacacaccaaattgattcctaacttcactgtcaaacagttgattgaaaattggtgtgaggtacatggtataatgctaccagatcctgttaaactcttgagtttgtgcttccctgtttccctcaacatcacagatggaagtgcaagtgcagacaagtctggatcaccagaacactgccaattggtagctgcattgcatccaaaagcacagtgcgcatcggatgatagtcatcattataatttgatgcatgaaaactctgattcagatgatagagtgtcatcatttggagacacagatgattctgaacctgattctttaagattatcaacagaaactactgcagcaaacaaatctctacttgatgaaaaaactgatcgttctgatggtcttaagcaattgagagacaatggttttcaagtttctgatgaggaacagtatctcgaaaggatggtaaaagtcatatcagcagncatcatcaacttgaagttgatggagagaatgtcagggtacaagcatcaagtgacatcaatgc

SEQ ID NO: 418182 - DNA, 467 bp, Oryza sativa
ttttgttaaaagttaaagggagctctgatgaacttattcctgccaaaattactgcacacacatgaacttgcaaactagaaccaagatgggctggacaaaaagctcccagcgattaacacgcgcgattcggcccattatttatttattcctaaattaacacagtccacgcggtctcccgtctcccagacaaaaaaaaaaaaaccacacagatcacactattcggctacttgtcgtcttctgacccgaccggtttggcgacaagccggagagggatccgccgccgcacggtgaatcccgggtcgtcggacatgtcgagctccccgggcggcgggatctcccagtcgaagaggcggaccaggctggccagcgcgagctcgacggtggcgagcgcgaactgcatcccggggcacacgcgccgcccggtgccgaacgggacgagctggaagtggccgcccctcaggtccatc

SEQ ID NO: 418183 - DNA, 520 bp, Oryza sativa
gcaagatctgcagcgacagccatggagatcgagctctcacccgtgctcctcctcctccccttcctcctcctcggcttcctctacctcaccggcggcgtgctccgctccggcgggaacgcgcggcggcgtctcgctccggctcctcggggactgcccgtcatcggcaacctgcaccaggtgggcgcgctgcctcaccgcgccctgcgcgcgctcgccgcggccaccggcgcgcctcacctgctgcgcctccgcctcggccatgtcaccgcgctcgtggcctcgtcgccggccgccgccgccgcggtcatgcgcgagcacgaccacgtgttcgcgacgcggccctacttccgcacggcggagatcctcacctacgggttcaaggacctcgtcttcgcgccctacggcgagcactggcgccacgcccgccgcctctgctccgagcacgtctctcagcgccgccgctcccaccgatacggacccatgagggagcaggaggtcgcgctcctcgtcaacgccatca

SEQ ID NO: 418184 - DNA, 552 bp, Oryza sativa
gggacatccaagagaggtgtaagattgggtcagggccgcagaacgactggtacttcttcagccacaaggacatgaagtacccgacggggacgaggacgaacagggcgacggcggccgggttctggaaggccaccggtcgcgacaaggccatctacaacgccgtccaccgcatcggcatgcgcaagacgctcgtcttctacaagggccgcgccccccacggccagaagtccgactggatcatgcacgagtaccgcctcgacgaccccgccaccgacaccgccgccgtcacacccacggttacttctgctgctgctgcggcggcggcgatggccgcggcggcggacggcgggcaggaggatggctgcgtggtgtgcagggtgttcaagaagaagcaccaccacaaggaggcccgcgggaggcggcggcaagcacggcggtcgacggcagcgcccggcgccaagggcggcgcacgcttactcctccagcgacgacgcgctcgaccagattctgcagtacatgggcaggtcgtgcatgcaggagcacgagcttccc

SEQ ID NO: 418185 - DNA, 512 bp, Oryza sativa
  unsure (1)..(512): unsure at all n locations
agctgatcaagagctcttaattagctagctagtgattagctgcgcttgtgatcgatcgatctcgggtacgtagcaatggcgtccaaggcgttcgctctgttcctggccgtgaacctcgtcgtgctcggggtggcaagcgcctgcggcggcagcccgtcgtgcccgacgccgacgccgtcgaccccgacaccgtcaacgccgacgccgacgccgtcggcgttcgggaggtgcccccgcgacgcgctgaagctgggcgtgtgcgccaacgtgctgggcctgatcaaggccaaggtgggcgtgcctccggcggagccgtgctgcccgctgctggaggggctcgtcgacctcgaggcggcggtgtgcctctgcacggccatcaggggcaacatcctcggaatcaacctcaacctccccatcgacctcagcctcatcctcaactactgcggcaggaccgtccncaccgctttcaagtgctaagcagcgtgcatatgcaatgcctgcatgatttgatc

SEQ ID NO: 418186 - DNA, 481 bp, Oryza sativa
ttgtttttaaggatggaatggagtagcaatactttcaccccaaaatacagtttagcgacaatatcttagaaaagccgcttgctttgccgccatggctggcaagctgagcagagcagctaacacaaagaacacgagatcactataaaccaaacggcaacgaacgaagaaaatacagggtcttttttgtctgaagatacacgaagcggttcgttttcttttatttttagtctcctctcctcctcgatgatgggtgtatggcaatggcaatggcgatgggatcttggcttagttgatgggaaggggctcgccgttccactccttgaggcagtcgagcatggggtcgatgagcttgccctggctgatgccgaggaacaccttgttgcactcctcgccgggggacttgagcttctcgccggtgaggaatacgcagccgagctcctcgcggacgaagcggtagagcgggaacgaccggctctcgacg

SEQ ID NO: 418187 - DNA, 531 bp, Oryza sativa
cttccttctcctccggctcttcttcagtatcgaatcctctcttctcctcgtgcccaccaccaccaccgtagcaatggcgggcaacgggccgatcaacaaggaggacccgctcaactggggcgcggcggcggccgagatggccggcagccacctcgacgaggtgaagcgcatggtggcgcagttccgcgagccgctggtcaagatccagggcgccaccctccgcgtcggccaggtggccgccgtcgcccaggccaaggacgccgccggcgtcgccgtcgagctcgacgaggaggcccgcccccgcgtcaaggccagcagcgagtggatcctcaactgcatcgcccacggcggcgacatctacggcgtcaccaccggcttcggcggcacctcccaccgccgcaccaaggacggccccgccctccaagtcgagctcctcaggcatctcaacgccggaatcttcggcactggctccgatggccacacgctgccgtcggagacggtgccggcggccatgctcgtgcgcatcaacac

SEQ ID NO: 418188 - DNA, 481 bp, Oryza sativa
gcgccgtcgtagggcctccgccccgtcagaagctgcagcatcaccaccccgaagctgtacacgtcgcccttgtccgtccatggcgccgccgccgcctccggtggctcgtagctcagcgcgtcgagccagcattccgactgaagatccaagccggatttcacagccgcagcaaggccgcagccggacacgcgcacacgcatctcgccgtcgacgagcacatgttcaggcctgaaatgctggtgcacaacctgtctctgaccaccttcgtggaggtactctagagctttcgcagcttcgagtgcgacagctacccgggcatcccatggaagagtgatcttggcagcaggatcgtctgatgatgccagtttcttcagatggatcatgtcgtcgagagtttcatcgctgaaatgcttgtagacgagcagcctctgtccgtgctcgacgcagcatcctgcaagctcctcgatgttgggatgctgga

SEQ ID NO: 418189 - DNA, 489 bp, Oryza sativa
tgttgttctcagttctcaccaccatttttacctcgaagatttctagattcgatcagcaaaccaattggaagcacaatgcagttcaggctggtgatcttggttctgctcctctcctgctcgcttcagctgcttcgcgcgtttccattccccatcccgttctttggccccttcacgagcccacaagacgttgatgcgataaacgagctgtacgcgtcgctgggctcgcctgacctccatggctgggcttcttcaggaggagacccctgcatggaagcatggcagggggtgcaatgccttggacccaacatcactgcaatagagctcagaggtgcaggcctgggaggaaagctgagtgagacgctgcggaagttcactgccatgacagcattggatctgagcagcaaccgcattgggggagtgattcctgagagcttaccacctgcagttaaacaactgaatttatcttcgaatagtctcagtggcaaactc

SEQ ID NO: 418190 - DNA, 472 bp, Oryza sativa
ttggtttttcaggcagccaccgagggcgagggataacgagttctaatggcaatgtgaaccagaggggattctgaaatctgaattatgatcacgctccagcaaactggaagcacatagagctggctggccttgggaactatgtatttgcataccagcacagcaatggtaaaagcaatagcatcctaattacagcagtggtatcagaactgaggcaaagggtttcctcctccagatctcctaatgcaagggctcctccgaatctcctagccgtgataggtggaggtaagcatcggttccatatccttccatagaaatgatctgcaggtccccgccaaaatatcgagcataaagacggctaatcgggatcccatagccgtacccggccatggtcactccttcgttacggccatccagatcaggtgggttttctgctgtgctgtagagatatgtgaaaattctcgagagaccactt

SEQ ID NO: 418191 - DNA, 477 bp, Oryza sativa
ttgttttttttacagtagaagaggactggaatataagtataacaaagtcacaattataagatattgatggtagtgagtaccattcgacgaaattaaaccactctattaatactagccaaaccatatataatgtagcataaagctgaaacataagctaacaaaattatgtctcagtcgaaggatgagacgcgatacaacaccaatccaccagacagtatgaataacggcgtagaacaagtcctaaagattggataaacaggccttccttcaccctaatcccaacaccgaactgcaattatactgctcttcctgaaaccagtgatgctaagcagcagtgctgaattacttatcgcctgctcgtcttgccaatagaacgttttccagagaatagatgctttggtttcaaagttggaatgacacgatccgcctcaccgcgacgagcctccttgttcctgttcctcacagaatccttagctt

SEQ ID NO: 418192 - DNA, 533 bp, Oryza sativa
aattaggtttcatgttgctatgccaaagcctcgtgataacaaggagaggcctgcttgcatccctcaggctgttctggatgctcgagcaagtgctgctgctgcaaaggaaaagaagaagctggaaaggaaactggagaaggacctcgagaatgagaatggaggtgctggggtctattctgctagtctcaagaagcattacttattggctgatgatgaatggaaggaagatattctgcctgagatattggatgggcataatgttgccgattttctggatccagatatactgcagaggtgtgaagagttggagagagaggagggtcttcgcctcgaagaggaagctgcacaggaagctctccagattgatggccatgaactaactgaagagcagcgtgaaatcttgggtcagattagaaagaagaaggcattgctcatccaagagcatagaatgaagaagaggactgcagacagccgtcctattgttcctagaaagtttgacaaagacaggacattcacaactaatagaatgggtc

SEQ ID NO: 418193 - DNA, 533 bp, Oryza sativa
  unsure (1)..(533): unsure at all n locations
ctccttttctgagtcagattgagacagatggtggcaagtccgtggacctcagcaactatgcttacatattcatgagatggaaagagcagtactttgtcaatgttggagtggactgtgggttgaccatagctggtttctactatgtctgcttttcatgtagcgacggttccattagcgggtattattatgatccaaacagcagtccgtttcagaagcttgaactgaagtgtaccaatgagaaagattctggatttaccttttcgtcctacgagctgcagtgagagactgacaggcctgctgtcattatagtatgtgcggatgttaatatacacaatgtatgtactgaactcataattctgaatggtgtcccattaaaagggctgagatggcatgtttgtaacagtgatttggagcaagatgtattttattctctttgtaatatgaatataagctggtaaactgtctagtttgaactacttgtgtgttctttttgtgctaatcatggcatggntatgtccaaaataatatgacag

SEQ ID NO: 418194 - DNA, 476 bp, Oryza sativa
ccgtggcgcacgccctgaacatgccggtggtgttgtacgccatggccacctcgccggcggccgacacggccaccagcccgaccttgcccggcggcacgccggccacgacgcgcgcggcggcgtcccccagggagaggccggccggcggggcgtgctccagcagggccgcgacgtcgcgcgccaccgtgtgccggatgatggcctcgcccacgcccgtggccgacacggcgcacagcgcgttggcgtacgtcccggcgccgatcaccggcgtgtcgccgatcctgccggccatcttgttcaccagcccgccggtggacgtcgccgtcgcgaggttgccggcggagtcgatggccacgcagcccaccgtgccgacccggctgttgtcgtccttgggaattggttgggtgtaatccacctgcaccctgttggcttcttttgcttgtctgagcctctctttgtttgcctccgtaataaag

SEQ ID NO: 418195 - DNA, 512 bp, Oryza sativa
gtcgctgcctcgacctcgccaccgccgcgctccgttccggccgcgctgccctcgacgtcgtcgagctcgtcgtgagggagctggagaactgcccgcactacaacgccggcgtgggctccgtgctcaccgccgacggcaccgtcgagatggaggccgccgtcatggacggcaacaccttgcgctgcggcgccgtctccggactctccaccgtcgtcaacgccgtctccctcgccaggctcgtcatggagaagacgccgcacatctacctcgccttcgatggcgccgaggccttcgccagggagcagggagtggagactaaagatccaagccactttattacggaggcaaacaaagagaggctcagacaagcaaaagaagccaacagggtgcaggtggattacacccaaccaattcccaaggacgacaacagccgggtcggcacggtgggctgcgtggccattgactccgccggcaacctcgcgacggcgacgttcaccggcgggctggtgaac

SEQ ID NO: 418196 - DNA, 555 bp, Oryza sativa
tatctgatcaagagctcttaattagctagctagtgattagctgcgcttgtgatcgatcgatctcgggtacgtagcaatggcgtccaaggcgttcgctctgttcctggccgtgaacctcgtcgtgctcggggtggcaagcgcctgcggcggcagcccgtcgtgcccgacgccgacgccgtcgaccccgacaccgtcaacgccgacgccgacgccgtcggcgttcgggaggtgcccccgcgacgcgctgaagctgggcgtgtgcgccaacgtgctgggcctgatcaaggccaaggtgggcgtgcctccggcggagccgtgctgcccgctgctggaggggctcgtcgacctcgaggcggcggtgtgcctctgcacggccatcaggggcaacatcctcggaatcaacctcaacctccccatcgacctcagcctcatcctcaactactggcggcagaccgtccccaccggctttaagtgctaagcagcgtgcatatgcaatgcctgcatgggttgatcctacgtacggtgattagttggccttgacgactcttgatttga

SEQ ID NO: 418197 - DNA, 470 bp, Oryza sativa
ttggttttttttttttttttggtttttttttttttttttttttttttttttttttttaacgagaaaattcccagcatacaggaatggggtttattcagtttcataacagggggtttcgaaatcagatttgctcataacagataaccaaatttcagcctaagcgctttgggctccgggggatttccagagttggggccattcctccattggatcagcagttttagcgaaaattgcattttgggggcccagtttctccttgacaatgctgggtagttccttaacacagtttttaacaggaactgaaggcctcgatagcttcagagattcgaaaaagggaagaaccacctccatgactttcaccccttcccattttttaaagctttcgagagccttacctggttttggatcacttttcatcacataagggagacctgtctttacgccctaccggaagggatcacacccccctt

SEQ ID NO: 418198 - DNA, 506 bp, Oryza sativa
ctgtgatgacagttccacttggtgcgatgatgcctgtgagcgggataaatgttgcattcaaccgtgaggtgctgggacctgtaatgttccctgctctgcggctgcgcaaggaaggaaagcacagatgggatacacttgaagacgtttggaatggcttgtgtgctaaagtggtgtgtgatcgcttacggtatggcgtgaagacaggtcttccttatgtgatgagaagtgatgcagaagcaggtaaggctctcgagagcttgaaagaatgggaaggggtgaaagtcatggacgtcgttcttcccttcttcgaatctctgaagctatcgagtacttcagttactgttgaagactgtgttaaggaactaaccagcattgtcaaggagaaactgggaccgcagaatgcaatcttcgctaaagctgctgatgcaatggaggaatggaccaaacttttggaatctcacggagctcacagcgcttaggctgaaattggctatctgttatgagca

SEQ ID NO: 418199 - DNA, 462 bp, Oryza sativa
aatcacgaatcaagtgctttacaattcaaatcatgtttgtgctaaaaacaaatggtgtgacatacaagcaaataactcaaatcaaatgctctaatatagcaaatcacgaaagaacatgttacgcggaaaagagtagatgccttttaaacatcaccgtctctgcttaatctccaaattcttctactcgtttcaaactgcatcagcgcactgcttggtgacgcacgccgctcggcttggctggacctggcaagcggccggcgtgatctccggcgcgcttggcgctgtcgccgccgctgccggcggcggcggctggtgtgggtgcgggtgcgggccgtacggcatcggcggcggcggcatgcccgggtgtggggcgccgtggccgacgtagtagccgccgacggggtgctgcgcccgcagcttgttcgtctgcagggccgtgacgtagacgacgaagccgacgac

SEQ ID NO: 418200 - DNA, 519 bp, Oryza sativa
  unsure (1)..(519): unsure at all n locations
cttcgatgcaggcggcgatgccggcggcggtgacgcacgacgacctgtcgctgcggaaggcgcaggagaggcgggcggcgcggtcgagcgggcgggcggcggtggcgctggtgtcgctctcggtgctctgcggcatcgtcggcttcatcctctgcctcgccgccgaggggtcgcgctccgaggcgtcgcactacctcatgaccgtcggcggcggcggcgccaacgcggcggcgaacaacgggcaggtggacgtctgcttctacaactccagcggccgggcgccgctggcgttcgccatcggggcgttcctgatgctcgccgtcgccatgttcgccgagcacgcctacatgctgctcgccgtcgccgcgccggactcgtccgcggcggggctcgccgtcgccgagggacacccgcgcgtcccctccgaccccgccaggctcacctggcagacctgctgcctcttcttcgtcacctggatctgcttcnggctcgcggaggtgatgctcatggtcggcatcg

SEQ ID NO: 418201 - DNA, 473 bp, Oryza sativa
  unsure (1)..(473): unsure at all n locations
ttgttttttttttttttaccggaaccagcaattggtatattaactcgagcaaacttaaaatgctcgaaaaagttgttcagcaacgaacaaaaaaaaagctctaagcaaaataaaactaatcacattgttgcccaatggcagataaactttgagcataccaactgacgacggttacaaaatcctaccagctgagagcatcttcctcttgtttattggcccgggggaaaaaagggtaaaatgcggctaactctttcgagtttatgctcagttattagcatcaaagatgctcaaagagtnaaaaaaaaaaaaaaaaaacgcagccgtgtaggcgtgtgtagcttcaagcagcaaccttcttgcagtggttctccagccactccatggtgacactcttcggtctttcgagcggcaggccaagagcacggtcccaaatgagctgagatcctattccaatgctccttgaaactccgaaa

SEQ ID NO: 418202 - DNA, 509 bp, Oryza sativa
tttcttgaaaggtgccaaccaaagagcaagttgatgctctatcaaaggaattggctagtcgttcgagtgttccaggtcatgtgtatgaggcaatcgatgctcttcctgtaactgctcatccgatgacccagtttaccacaggagtgatggcacttcaggtggagagtgagtttcaaaaagcctatgacaaaggaatgtcaaaatcaaagttctgggagcctacctatgaagattgcttaaatttgatagctcgccttccagcagtggcttcatatgtttaccggaggatattcaagggagggaaaactatagcagctgataatgcactggattatgcagcaaatttttcacacatgcttgggtttgatgatcccaaaatgcttgagttgatgcgactatatataacaatccacactgatcatgaaggtggaaacgtcagtgctcatactgcacatctggttggaagtgctctgtcagacccttatctttcttttgcagctgcactgaat

SEQ ID NO: 418203 - DNA, 463 bp, Oryza sativa
  unsure (1)..(463): unsure at all n locations
cttctactgcacgccgcaacacaacgcgctcgcctcgcctcgccccgatcggtggtggtgctcgccgtcgccgggcggcgctagggtggccggagaggctccggagagtaggaggaggaggaggagccggagatgagggggtcgaggaggccggtggccgtggtgctgagctgggtgcggaggcagccgcccaaggtcaaggcgttcctcgccgtggtcgccgggatggccgcgctcgtcttcatccgcttcatcgtccacgaccacgacaacctcttagtcgccgccgaggccggccacgcgctcggcctcggagtcctcatctacaagctcaccaaggagaagacctgtgccggactctcactcangtctcaggatttaacagcactatttttggctgttaggctgtactgcagtttctgtatggagtatgacattcataccatacttgatacaggtacac

SEQ ID NO: 418204 - DNA, 453 bp, Oryza sativa
ctccttatgttacctaagcagttcgtgtgtgctaatagtgatgatgcgattaattttgcacgcatggatacatcacatgtctctacacgcaccatattaccagccgggccactgacaggtgggccccactgtcagccacactcgcgcctcttcttcttcttgctctagctatggcgccaaaacgaacaaaggaaaaaaaaagaatcgaatctatggccgcagcggccggaggtggacggggacgccgtgcttggggcggagggtgagcacgttctccggcgcgtggcggtagttgtcggagatggcgaagcggaaggccgagaggagcatggcgaggacgaccttggcctcgacgagcgcgtacgcctggccgacacagttgcgcgggccggcggcgaacggcaggaacctggcggcgccggcagccgacgggcggaacgcgcccggggcgaa

SEQ ID NO: 418205 - DNA, 471 bp, Oryza sativa
ttttgttgttcaggccgtaaaaaggtcacagcttgattagttaaatgactgcttgaaagttgaatcccacaacacactcaagcaacagtgccaacttggtaaagagccatttatagtgatgaaaatacagggtccaacccagttacagccccttccagtggggcttccatattttaacactacaattcatcggaatattcccgttcaagagcatgaagaggcgtaatcttgtcaccggataatttacactgccgcaccaggatcactgataacgcccaggaagtcatcttttattgtgccaatgcaaaaaatttctgttgcatcaacacgtgtcccaataatatttaaccgaacctaactatgtttttgaatttttaccgatccatcagaagtagtataatttggcacatccccagattggaactccatatcatcaggaatcaaatggttggacacgaagatctgcacagg

SEQ ID NO: 418206 - DNA, 562 bp, Oryza sativa
gtcgtactgttgaggaatcgctcgctcgctcgctcgctcgccggcggcgcggacgaggagggggcgagatgttcttccacatcgtgctggagcggaacatgcagctgcacccgcggcacttcggcccgcacctccgcgacaagctcgtctccaagctcatcaaggacgtcgagggcacctgcagcgggcggcatgggttcgtggtggcgatcacgggggtggaggatgtcggcaaggggctcatcagggagggcacgggctacgtcaccttcccggtcaagtaccagtgcgtcgtcttccgccccttcaagggcgagatcctggaggccgtcgtcaccatggtcaacaagatggggttcttcgcggaggctgggcctgtgcagatcttcgtgtccaaccatttgattcctgatgatatggagttccaatctggggatgtgccaaattatactacttctgatggatcggtgaaaattcagaaagatagtgaggttcggttgcagactattgggacacgtgttgatgcaccagaaatttcttgcattggcacaatacaagatga

SEQ ID NO: 418207 - DNA, 487 bp, Oryza sativa
gccatgcggagacggagaagagggcgcgatcttgccagcagaggaagaagttgcccttctcctcccggaccttgaagccgtcgcagccgaggccctgcgccacccgccgcgcctggagcagcgcgtagtagctgagcgggacgcggccgaagccggcgccctccagccgccgcgcccaccgctccagccgctcgtgccgctcccgccgctcgccgccgtcgcacgccacgatgttcttgatctcctccccgagcagccaccgctccacgcgcgcgcgctccaccgacccgcgcgccgcccccacctccaggcagtcgaacagcgccgcgtagtagttgagcgcctccacgaacctctccgtcagccccgccgcgttgtggctcgcctcctgctccgccaccaccatcaccttcggcgacagcccccacagcgcgcccaggaacgcgtccgcgcgcgacgtcgacggcgacagcccggactccgggct

SEQ ID NO: 418208 - DNA, 479 bp, Oryza sativa
tttgttttttttttttttttttttttttttttttttttttttttttttttttttttttttttacgcgcgcagcatgcattttatttaggggcgggccacaattcaaacatgtataggggaaacctttgggggggagaaactcacgggatatgaggggagtcggggggacagggaaatagtcaaatttgggcgttttttaatgccggtcgttgactttgttgacaagggcagggtcgggcaggccaaatctggggggaccccacaaagggcggggccaccgacgatggggaaaatccggatgtagccgcgctcgccccatgaatggccccaagagttcttgatgggccaatacttggggccggaagacccgttggtgccccaccccaccaccgtgacggggtgggctaagggcgtgccaaacgggcccctgaaaaccccacccttggagaaatgaatcccgctaccgaccttgatgggca

SEQ ID NO: 418209 - DNA, 543 bp, Oryza sativa
tggtaacgcgtacttacccacaagttaggtgcatgccatggcaccattcatggcgtgcgcctcgccaccggtactcacgctggccctgctcgcgtcgtgcggtgcccttctcgccacctccatgctcccggcgcgtgcgacggcgggcagttgcttggacgtcggcgacatggtgatgatggacaggttccgcgcttggcagggagctcacaaccggtcgtacccgagcgcagaagaggcgctgcagcggttcgatgtgtaccgccgcaacgcggagttcatcgacgccgtcaacctgcgcggcgacctcacttaccagctcgccgagaacgagttcgcagacctcaccgaggaggagttcctggccacgtacaccgggtactacgccggcgatggccccgtggacgactccgttatcacgacgggtgccggagacgtcgacgccagcttctcctaccgcgtggacgttccggccagtgtcgactggagggccccaggcgcccgtgtgcctcccaagtcccaacgtcacatgcagtaactgct

SEQ ID NO: 418210 - DNA, 479 bp, Oryza sativa
gcgctcctgctggtcctggcgctctccgccggggccaacgacatcgcgtcggacgccgcggcgctgcaggcgttcatcgcgccgttcgggtcggcgaccgtgtcgtggaacacgtcccagccgacgtgctcgtggacgggcgtcgtgtgctccggcggccgcgtcgtggaggtccacctcccgggggttggactccgcggcaacgtccccgtgggcgcgctcgggggcctcgacaagctcgccgtgctgtcgctgcgctacaacgcgctctccggcccgctgccgtccgacctggccaagtgcgcggagctccgggtaattaatctgcagtcgaatcacttctccggcgagctccccccggagattctggctctcccggcgctgacgcagctcaacctcgcggagaaccgcttttccgggaggattccggcgagcattgccaagaacgggaggctacagctgctctacttggacggcaa

SEQ ID NO: 418211 - DNA, 449 bp, Oryza sativa
tttgttttttttatttactgggcaactaaagcaactattataatgcaaagaccaaactcctcgttcttacaacactcactcaacgatacatcacaagatataaacaggggcgagcgagcaaggcaggaggcactagagtgacaccaagcgattatactgaattacttatatataaaccatgcattccagacacaccattcatcatcacatacaccaccatggcacaagaccagaacgcaaccccctcctccaggcaggagatcaggatacattcccgacttcacagcaaaattaaatcaggaaggaatacttcgctctaagctcaaccagatctaggagtcccatgttcttccaggcttctgcctaggctgcgaggacgattatcactctgagcaggaccaccccgcatataaccagcagcacgcatatcagcgaagagttcgacttct

SEQ ID NO: 418212 - DNA, 556 bp, Oryza sativa
gtcacgtctccgactccggctcgatttccaccccccccaaatcctcctccggcgagcggccggccgcgagacaccccggactctcccgcgcggcgattcttcggtaccccgatcggaggaggaggcggcggggagggaggaggaggatgagcttccaggacctggaggcggagaacgcccgcgggctgccgcggaggggcggtggcggcagggcgggcgccgcggccgccggggcgggggcgtcgcaggccgtggcgtcgggggtgttccagatcaacacggcggtgtcgacgttccagcggctggtcaacacgctcggcacgcgcaaggacacccccgacctccgcgagaggatacacaagacacgtcaacacataacacaactggtgaaggacacatcggagaagcttaaacaagctagcgaggctgatcatcgtgtcggagtcagcgccagcaaaaagaatgctgatgcgaagctagcaaaggatttccagcagttctgaaagaatttcagaaagctcaacggctagcagtagaaagagaagctgcttatgca

SEQ ID NO: 418213 - DNA, 483 bp, Oryza sativa
ttttgttttacatctaacaatggctagatgctttcatcaacagaagtagcggataaaatcatgtaaaacacccattggctcctgcccacagagcagcaaaactttaaaagattgaagtaacaggtctgcggaacaaattattggccattgctttgcaaaacaaccaaagaattcgaaatttaacagccatcaaccacagacgatgttatcagggcctgagtgcaagcgctagaccaaacttggggggtctgtccaaggccttggtgtcgaattcaccagagattgtcaaaaccgacttgggtttaacctcatgctggagaagagcagcaagctttccagtgttgttgagccttgccttcacagctgtctcggggtcaaccttgtacaggccaccaacagtgagagtgttctcatttgttgagagcctgcgggttaattcagcaacaacagaggatttctgcttatcatcaaggtgatatacac

SEQ ID NO: 418214 - DNA, 516 bp, Oryza sativa
gttctttcatccacaaagcttgtgacaagtgtcaagctgcctgactacaattctggaaaggtggagatgcaatacttccatgagaatgcaagttttgccactgctgatggcatgaagccatctcctgtggttgaattttctggaacagctggtgctcaaggacttgcctttggtgcagaagctgggtttgacactgctacaggaaaatttaccaagtacagtgctgcgataggtgtaaccaagccagattatcatgctgcaatcgttctggcggacaaaggtgacaccgttaaagtgtcaggtgtatatcaccttgatgataagcagaaatcctctgttgttgctgaattaacccgcaggctctcaacaaatgagaacactctcactgttggtggcctgtacaaggctgaccccgagacagctgtgaaggcaaggctcaacaacactggaaagcttgctgctcttctccagcatgaggttaaacccaagtccgttttgacactctctggtgaattc

SEQ ID NO: 418215 - DNA, 544 bp, Oryza sativa
ctctgttcatcccctccccagatctccagccccaggagctccggagggttcccaatggcggtgaaggtctatgtcgtgtactactctatgtatggacatgttgctaaactagctgaagagatcaagaagggtgcttcatctattgaaggtgttgaggctaaaatatggcaggttcctgaaactctccatgaggaagtacttggaaagatgggcgcgcctcctaagccagatgtgccaacgatcacaccacaagaacttactgaggctgatggaatcctgtttgggttccctacaaggtttggcatgatggctgcgcagatgaaagcattctttgatgcaaccggtggcctgtggagtgagcagagccttgcaggcaagcccgccggcatcttcttcagcactggtacccagggcggtggtcaggagactacaccgttgacagcaataactcagttgactcaccacggcatggtgttcgtcccgtcgggtacaccttcggtgccaagatgtctacatgggagaagttcacgggggcagcccgtac

SEQ ID NO: 418216 - DNA, 479 bp, Oryza sativa
ttttgttacacaatcatgtgggtgttacattttcatagttatgtcgcctgacaaataaacaaaatcaagcttttgacagccctattccacctttgtacctgactgcaatgaatgtaatagaatgaaaatatacatgtatgcaaccttggaaccatatggaagaactactttccctgctccatttcagtgcactatcgtgatacacctctacaattacaacggaagaagtgactttctcatgaagattggaagatcggttggtcagcgaaaggaccatatacccaacctctggcaatgtgaccgtaagccgcctctgtcaggtgaatgccatcccagctccaatgggttgatggatcatcacacgcggttgcaccagcctcaccacatttggctgtgacattgaagttgtaagcggccttcgcaacggacccaggagccccgcagcatgccctaggtagctgcttgtaaaatccaaactt

SEQ ID NO: 418217 - DNA, 376 bp, Oryza sativa
ctctcttcctcttcttcttcttcttccctcttcttgtggtggtgggtttgacccaagaacggaggagggatagggcgggcggcgatgggggcagttcgggggattttggtcgtggcggtggttcttgcggtggcggcgattcttgctggggcggcggaggggaaggtgaacgggaaggcgaaggggaagtacagggcgctgttcaacttcggggactcgctggccgacgccggcaacctcctcgccaacggcgtctacttccggctcgctaccgcccagctgccctacggccagacctttcccggccaccccaccggccgctgtcccgacggccgcctcgtcgtagaccacctcgccgacgagttcggactgccgc

SEQ ID NO: 418218 - DNA, 566 bp, Oryza sativa
tttctctcctttcacttcttctctcctctccgctgtggtttcttgctggttcttggaggcctccacttggttaaatgatgggtgtaggtggtggtcttggtatggaagctactaactgtggtgctttgctcagggagcttcagcaaatctgggcagaggtaggagaaagtgaaggtgagaagaacaaggttctgtcagagatcgagagggaatgcttggaagtgtaccgcaggaaggtggacgatgccaatcggaccagggtccagctgcaccagtctgtggccaccaaagaagctgaagttgcatccttggttgccactctaggggagcataagctatatctgaagaaagacaagagtgttgttccactcacagaacaacttgcggcagtcgttccagtacttgagaacttaaaaggcaagaaagaggagaggctcaagcagttctctgacattcaatctcagatcgagacaatccgctcggagttaagtgaatatagcgatggcgatgttaagcaaatagtctcatcgtcgatgaaaatgattatcaacaagaagcttacatta

SEQ ID NO: 418219 - DNA, 524 bp, Oryza sativa
gtattctccactcgcttgcgtttgccgttgcgtttgcgttttgcgtagcaagggaagggagagagctcgtgcttttggattggccgcgatgagctgcgggggcgccgggcagagcgggtggctgctcgagtacgggctggtggaggaggagatccagggctccgacttcatctacatggtcgacgaccccgcggccgtctccagcgtgctactgggcttcgacgttcccaggaaggaggacggcagcggcggccaggacaactctgcctccaagaaaagatctcgtccagaatcgagcgcaccgccgggcaccaaggcttgccgcgaaaagctccggcgagacaggctcaatgaaaggttcaacgagctcagcgcgatcttggagcccggcaagccgccgagggccgacaaggtctccatcctgagcgacgccgtccgtctcctgagccagctgcgcgccgaggcccagaagctcaagagctcgaacgagtcgctccaggactccatcaagagcctcaaggccg

SEQ ID NO: 418220 - DNA, 482 bp, Oryza sativa
tttgttttttttttttttttttttttttcagcaaaacttaaccttttattttgcttcaaattaatcgcaggacacctctacccccaactttgcagtccaaaattacaatggagaattacagcatgaagaaaactaataacaggaggagcaccgcatacatacacatgtgccctaatcaaggtagcagtggttaagacgcctgcctgccgttttgcttcaatcaacggaatgtctcatcatcagtactacaacacatgaaagctcattgggaataaggcgccagcaaagggataagagctcacaatttacagatgcttcgtcctttctttctcctctagggcctttgtcttgcggtaatctttatcagtcccaaacagccagtccatgtagatgaaggtcgacgagtaattcccagacttggtgtagagaacacggtgatgatagtcatggaattcagcgccgccatacaatggcaagaaata

SEQ ID NO: 418221 - DNA, 585 bp, Oryza sativa
acaatacaagagatgattaagggaagggaatcctcctcctcttcaataaaaaggaagggcagagtgcagagagaaaggagatcccctgatccctcttcctcgccggcggcaatcgctcgccggagtcaaggtaggatgatggcggcggcggggctggagtcggcgtgggagtacctcatcacgcatttcagcgagttccagctggcctccatcggcaccttcctcctccacgagagcgtcttcttcctctccggcctcccctctctcctcttcgagcgcctcggcctcttctccaagtacaagatccagaagaagagcaatacacccgattaccagaacagatgtgtagtgcgtctcgttctctaccatgtctgcgtcaatctccctctcaccattttatcatatcgcaccttcaaattcatgggcttgaggagcacccttccgctgcctcactggacagttgtcgtctcccaagtgctcttctttattgtgcttgaggatttcatattctactggaggcatagggcactgcataccacatggctgtaccagcatgttcacagcgttcaccatgaatatgccaca

SEQ ID NO: 418222 - DNA, 479 bp, Oryza sativa
tttgtttggaatgaagatatatggtatatagctatcagggaaaaagatacaaaaaaatgtacatttgttgatttatggtcagcactatgcaaccatggtgatctcaaggcgcaagtatatatcatgtctgtaaatatatctttttcaaaaaagtttttacatctctataggcagtgagatgcatgctaccaaggcttcaggtcgcccaccggtccagcagtccagttcagggccctctccccgggcttcaagaagacgttttcgccatgtggaagcttgcgagcgagaccattcagtatctgatggaatgcatctcctgcctgagcaggctgggggaacagcatggcctgcttcatcgacgggttcgcgagaagcctctgcttcctcaggataacatctgttggtatggatgtcaggatactgtccagcttcggaacatcctcctcggcgacaaacacgccaatctcctcccaggggat

SEQ ID NO: 418223 - DNA, 541 bp, Oryza sativa
agtgggttggagaggagaggagacacaggtgctgggaagaggcctgtggggatcaagaagatgaggaggtgggtcttggccattgccattcttgctgctgctgtatgcttcttccttggagctcaggcccaggaggtgcggcagggccaccagacagagaggatctcaggaagtgctggtgatgtgttggaagatgaccctgttgggaggcttaaggtctatgtctatgatctcccaagcaagtacaacaagaagctgctgaagaaggatcctaggtgcctgaaccacatgtttgccgctgagattttcatgcaccggttcctgttgtcaagcgctgtccgaacttttaatcccgaggaagctgattggttctacacaccggtgtacactacatgcgacctgactccctccggtctttccttgcccttcaaatccccaagaatgatgcgcagcgcaattgagctgattgcaacaaattggccttactggaatagatcagagggggctgatcattcctttgtacaccacatgactttggcgc

SEQ ID NO: 418224 - DNA, 479 bp, Oryza sativa
tttggtttttggagaaagtgggggttcaataaatattgcttcacttgtacaaagttcagatcaaaatacattgatacatgacacggaaagagccatgcacaccacttatttggacacacagagggcaaggctgcagagaaaatcaagcaacacaagctgaactcacggacccacctgtcagcctctcactggtcgaggccggagactcttgtgaaaaacagcaacaccacgcatgcagaagaagacaaattattacacacacaaatcgacgacacggtggccggcgacttacggagaggtcgccaccgacgccggcgacgttgcgatgaggacgatcagtcgaagaggtggtgctttttctcgccggtggactcctcggcgctctaggggtccttcttactctcgaggtgctcgtggaatgagtagccgccggtgccgaccggcgccgaggccgcgatctactacgagatcttgaggct

SEQ ID NO: 418225 - DNA, 495 bp, Oryza sativa
tttccatctcattctcctaattgtcatcactagcttctagctagcttaattaattaattagccatggcggaggagaagcaccaccaccacctgttccaccacaagaaggacgacgagccggccaccggagtagactcctacggcgagggcgtctacacgttggagacggtgaccaccgaggtggtcgccggcggccaggacgagtacgagaggtacacgaaggaggagaagcagcacaagcacaagcagcacctcagcgaggccggcgccctcgccgccggcgccttcgccctgtatgagaagcacgaggcgaagaaggacccggagaacgcgcacaggcacatgatcacggaggagatcgcggacacagtggcggtcggcgccggcggctacgccttccacgagcaccacgagatgatgacggaccacacgagcgctcaggagtccatccgcgagaagaagcaccacctcttcggctgatcgacctcatcacaa

SEQ ID NO: 418226 - DNA, 488 bp, Oryza sativa
ttttgtgtagatctaaaacaaggcaaagcactgtgctcatcaaatctgataagagtacccaatacaaaaagagagcagtctacaccttgcatgtcagcgtcaatttgaacatctaaaagccggacccagtgtgtctgggtaatctgtcgaattttcgtctcaaaatggtggtacatttacgaaagaactttctggacttcagcagttacttctttcggtggcttctcggcatgaagattggccaccaaggccttcttggagtagtagtcaatcactggttcagtttgtttgtggaaggcttcaagtctagacttcaaaacctcagctgtgtcgtctttcctttgaattagtggttctccagtgacatcatcaactccaggaacctttggaggtgcaaacttagtgtgataactcctgccactggagggatggatccaccggccagtaattctttcttccaaaaatgaatcatcaatggcaaagttaag

SEQ ID NO: 418227 - DNA, 478 bp, Oryza sativa
gatagttgcaagagaggagagggtttctgcggcggcgatggcggcggcggcgaacctggaggacgtcccgtccatggatctgatgaacgagctgctacgctcgaggaagtgcaactccaagcccgacaagcgcctcatcctagtaggtccacctggctctggaaagggaacacaatcgcccattattaaggatgagtactgcttatgccatttagctacaggtgatatgttgagagctgctgttgctgctaagactgctttaggaggcaaggcgaaagaagcaatggacaagggagagcttggatctgatgactagggtgttggaattattgatgaagccatgaagaaaccttcatgtcaaaagggcttcattcttgatgggttcccacggacagttgttcaagcacagaagcttgatgaaatgctaggaaagaaaggtacaaaggtcgataaggttcttaactttggcattgatgat

SEQ ID NO: 418228 - DNA, 422 bp, Oryza sativa
ggagcatcctcgtgcatgcctccggccatgtgagctccggcgccctggtacatcttggcgatgatggggttgcagacgccctccagctccttcatcttgtcctcgaactcctcggcctcggcgagctggttgctgtcgagccagctgatggcaccgtcgatggcgtcctcgatcttcttcttgtcggcctccggcagcttggacgcgatcttgtcgtccttgatggtgttccgcatgttgtaggcgtagttctcgagcgagttcttggcgtcgaccttcttcttgtgctcctcgtcctccgccttgtacttctccgcctcctgcaccatcttctcgatatcctccttggtcaaaccggccttggcggctggggatggggatcttgttcttctgcccgggggtcttgtcctccgccgagacac

SEQ ID NO: 418229 - DNA, 561 bp, Oryza sativa
ctcctgccatcttcagattgcttcgattttctccttttcgagtttttttccccttcgcttgagagctttcgacgagagcgagggagagggagatcatggccggcaagggagacgggccggcgatcggcatcgacctcgggacgacctactcgtgcgtcggcgtgtggcagcacgaccgcgtcgagatcatcgccaacgaccaggggaaccgcaccacgccgtcgtatgtcgcgttcaccgactccgagaggctcatcggcgacgccgccaagaaccaggtcgccatgaaccccatcaacaccgtcttcgatgcgaagcgtctcatcggccggcgtttctctgacacgtcggtgcagagcgacgcgaagctgtggcccgtcaaggtgctacccggccccggcgacaagccgatgatcggcgtgcagtacaagggagaggagaagcagttctccgccgggagatctcgtccatggtgctcaacagatgaggagacgccgagcctatctcgtagcaccgtcagaacgcgtcgtaccgtccggcctacttaacgactcccaggca

SEQ ID NO: 418230 - DNA, 475 bp, Oryza sativa
tttggttttttttttgatcgaaggcccagactttgattgatgtatgtaagttctttattcagatcaagcgactacatgatggcaagtgcgaccaacatgaagaaatgcactcgggacgccattctttccaagcccccctaaaccatggaagcacaatttgcacaatgctggagccgttcatggctcgaacccatgttttcggcctccctcttgatcgattcgaagaggacagacgacaggtagcgctcaccgaagctcgggaagaccacaactacgagcttccctttgttctcgggccgctgcgcgaccctgatggcagcgactgcagcagcaccagatgagatcccaaccagcagcccttctttcaacgctagctgcttcgccatgctgatggcttcatcacttgagacttggaccacttcatccaggagattgacatcaagtacaccaggaacaaaaccagcacctatacctt

SEQ ID NO: 418231 - DNA, 450 bp, Oryza sativa
cctttttcctttcctctcgcagccgtcggcggggggagtggttagttggctactggcttgcagagctctcagagagatttaggcaatggcggaatcaggcccatcgattgcgagtgatgtgactgcactgatcggcaatacttccctggtgtacctgaacaaggtggcggatggatgtgaggcccaaatcgctgccaagcttgagatcatggagccctgctccagcgccaaggataggattggctatagcatgattacagatgcagaagagaagggtctcattactccaggaaagagtgctctgattgagcctactagtggaaatactggtattggccttgctttcatggctgctgccaagggctataagctaaatcctgacaatgccagcatccatgagcatggaaaggaggatcattctaagggctttggtgcccagttggtccttac

SEQ ID NO: 418232 - DNA, 482 bp, Oryza sativa
ttttgtttttttttttttgagggaactctgaaagcaaaatgattttattaactttcattattccatgtgaataattcctaatgaaattatccatgcctcaaggttactcacatttgcaacgacttatccctgagaccctgaactacgaagaatcacggtaatgcacactgatacaaacaatgaaacaaatcgacgacggcaaacgcgcaacactagcaatagcacacgtatatcgatctaaagaatgcacgcgagactcagatggagatgctgttggggatgcccatggcggtgagcccttggcccttctccttggtgacatccgacgtgttggggtacagcagcatgtacggcatcttcaccggcccgttccggttcttgagcgccgagttgccgttcatgtccttgatccggttctcgatatccaccagccggctgccgaacctcttgaacgcgtccagcgccttggcgtccgacgtcca

SEQ ID NO: 418233 - DNA, 570 bp, Oryza sativa
gttctttctcaagacgctcaccctcgacggcgtccccggcaagggcaccgtcgtcttcgtcgccaactcgtggatctaccccgccgacaactaccagtacgagcgcgtcttcttcgccaacgatacatatctgcctagcaaaatgcctgcacctttgatcccttaccggcaagaagaactcaacattctacgaggggacggtaaaattggaccatacaaggagcatgaccgtatctaccgttatgattactataacgaccttggccaaccagacaaaggcagtaaactagtacgaccagtcctcggtggcagccaagaactcccctatccccgtcgaggcagaactggccgggccccaacaaagactgacccaaatacagaaagcaggcttactctgctggacttgaacatttatgtcccacgcgacgaacggttcgggcacctcaagatgtcagactctcttgggtactctctcaggctattgctgaggggtgtcgtccaataatatggacctatgtcgatacgacaccaaaggagtttgattcttttacgacatcatggaactctatg

SEQ ID NO: 418234 - DNA, 424 bp, Oryza sativa
gttcgtggtgacggccttcttctacgccaccgcgggcgccggcggcgtgccggcgccgttcatggtgcggaaccgggagtcgaactggatggggtacgtggccgtggcgacggacgccggggtggccgcgctgggcaggcgcgacgtggtggtcgcgtggcgcggcaccgtccggcccatggagtggctcaacgacctcgacttcacgctcgtgtccgccgccggagtgctcggcgccggtggccgttcgccggcgccgagggtgcacagggggtggctgtccatctacacggcgagcgacccggcgtccaagtacagcaagctcagcgccagggagcagatttcggatgagatcaagaggctaatggacaagtacaaggacgaggagaccagcatcaccgtcgtcggacatagcctcggagcc

SEQ ID NO: 418235 - DNA, 431 bp, Oryza sativa
attgacaagattatcaatctgttgattattcactggatagctatcgactagagcgagggatacacggaccatggcttccacaggagactgtcctgcgatcggtactgtagcatactgctacctactcatgatgaaagcggaggaaggatatctgctgcaaggatttccttcattttaagcggactatcccttggaatgtcactgcctgaactgacgcatttcacagaagcatcggttgctgccacaagaaccatgtctccatgaacccgtgtgccagagataaatgctgatgacccctcatgactcagtgtgtatctagtccggggagagctatagactgagacttgccgctttgtatacccatagaggcctcacatgacggtgctcagagacttcaacctccatagtcctgctgggcaaactgctgcctt

SEQ ID NO: 418236 - DNA, 487 bp, Oryza sativa
tttgttttttacaaaatacctgcaaatgcattatcatctacagtatgatccctagtacacagcaaagattaaaattcagcgagagttggctgcagaaatgcagatgcagacagaggcgagaaagcagagtctactctaaaattcagcagcagctcttgctccgggcgcaagccctcgccgccggcggctggccgcgggggctgcacggcccggcgccggcgtcggtgagcatcttcaccacgtccctcatcgtcggccgccccgccggcagcttggcggtgcagagcacggcgaccttgagcaccttgatcatgtcctccctgtccctggccgccgctgccgccgacgacgacgacgacaccgccgccacgcgcgggtccagcacgtcgtcgatgctctccgcggcgagcttggtcgacagccagaacacgatgtccttcccctcgccgaacgccgggtcgatcgggctccggccggtgatgagctc

SEQ ID NO: 418237 - DNA, 543 bp, Oryza sativa
  unsure (1)..(543): unsure at all n locations
ggaacaacctctccgggcagatcccggcggcgtggggcgagctgaggtcgctgaagagcttctccgcctacgagaaccgcttctccggcgagttcccggcgaacttcggccggttctcgccgctcaacagcgtcgacatctccgagaacgccttctccgggccgttcccgaggcacctctgcgacggcaagaatctccagtaccttctcgccctccagaacggcttctccggcgagctccccgacgagtactcgtcgtgcgacagcttgcagaggtttcggatcaacaagaacaagctcaccggcagcctcccgcggggttgtggggtctccccgccgtgacgatcattgacgtgtcggataatgggttcaccggaagcatctcgccggcgatcggcgacgcgcagagcttgaaccagctgtggctgcagaacaaccatctcgacggcgagatcccgccggagatcgggcggctcgggcagcttcagaagctgtacctgtcgaacaactcgttcttcggcgagataccngcgagatcgggagc

SEQ ID NO: 418238 - DNA, 482 bp, Oryza sativa
tttgtttaacaaaagccataggctctgtattaaagatccaacaggttcagagaacacgcaagctcagaactacacatcaccaaaattggagcaagtttgggggtacatatccgctcatacagtggaggatttatttctcgattctacgagctttttaactagagttcgaccgggaagtcaattacggatagaaatgagcatcctgtcttcacaaaacccatgcacacaacagtgggcatgaaccgcatgatattcaccatcaagtttagtagggctccacgggtgcgcggaacttggcaccagcgtagacagcagccgcaccaagctcctcctcaatcctaagaagctggttgtatttggcaaggcgctctgatcggcagggtgctccagtcttgatctgacccgtggccaaaccaacagccaaatcagcaatgaaggtatcctcagtctcaccactcctgtggctggtcatcacaccccag

SEQ ID NO: 418239 - DNA, 560 bp, Oryza sativa
ctttattagcaccaaccccgtctccttcctccattcctccgccgctagaaccttctagaagctctcctcctcctcccatggcggcgacgatcgtgtccgacaaggcgcgccagatcttcgacagcaggggcaaccccaccgtcgaggtcgatgtgtgctgctcagatggaacctttgcaagggctgcagttcccagtggtgcatcaactggtgtctatgaagctctcgaattgagggacggtggatctgattacttgggaaagggtgtttccaaggctgtcgacaatgtgaactcggttattgccccagctctgattggcaaggaccctacgtcacaggctgagcttgataactccatggctcagcagcttgatggaaccaaaaatgagtgggggtggtgcaagcagaagcttggtgctaatgcaatcctggctgtgtcactggccatttgcaaagctggagctatcatcatgaagattcctctgtaccagcacattgccaaccttgctggaaacaagcaactggatctgcctgtacctgcattcaccgtcattaacggg

SEQ ID NO: 418240 - DNA, 532 bp, Oryza sativa
cttcgacctccacgccgacgtcgcgctgcgcctgccacctttatcttgaaccgcgacgtcgttgtccgcccctcccgcgccggcgaggcgaccgagccccctcccctccttccctgcctcgtgccactagcgccgcccttcgccgccgccgccgccgccgcccgcgagggagacgcgagaaggatgagggtgaagaggcggtccaagaaccgcaaggtggtcaggttctacgccacctgcttcggcttccgcgagccctacagggtgctcgtcgacggcaccttcgtccaccacctcctcagtcacagcctcctccccgccgacgacgccctccagtccctcctctccgcctccaggccccctcccctcttcacctccaagtgcgtcctcgccgagctcaggcgcctcggcaagtcccacgccgacgccttcgacgccgtcgccctgctcgccacggccaagtgtgagcatgacaaagtagtcagtgcagtggattgtgttctgtcactgataggtgaaaagaatcccgaca

SEQ ID NO: 418241 - DNA, 307 bp, Oryza sativa
ttgtttttcaccaccccgtcccaggccctggcccttgtccctggcgccgtcgacagccgcgtcggcggcggcggcggcggctctgcgcgggtgagctttccgctcggccgtgttcagcgcctaggtgcgctggggatgcgtttgcgggcgttggtggttatcgataaggagactcccgagagcgagccgcctccgaccttgctgcggaaggaccggtccggggcggcgtccgggtcggcgcgggagcggttcgaggccattatccgccgcgtgcacggtgaggtgtgcgctgcgctggaggaggtcg

SEQ ID NO: 418242 - DNA, 281 bp, Oryza sativa
ggagcatcctcgtgcatgcctccggccatgtgagctccggcgccctggtacatcttggcgatgatggggttgcagacgccctccagctccttcatcttgtcctcgaactcctcggcctcggcgagctggttgctgtcgagccagctgatggcaccgtcgatggcgtcctcgatcttcttcttgtcggcctccggcagcttggacgcgatcttgtcgtccttgatggtgttccgcatgttgtaggcgtagttctcgagcgagttcttggcgtcgaccttctt

SEQ ID NO: 418243 - DNA, 444 bp, Oryza sativa
ctcctgccatcttcagatcgcatcgattttctccttttcgagtttttttccccttcgcttgagagctttcgacgagagcgagggagagggagatcatggccggcaagggagacgggccggcgatcggcatcgacctcgggacgacctactcgtgcgtcggcgtgtggcagcacgaccgcgtcgagatcatcgccaacgaccaggggaaccgcaccacgccgtcgtatgtcgcgttcaccgactccgagaggctcatcggcgacgccgccaagaaccaggtcgccatgaaccccatcaacaccgtcttcgatgcgaagcgtctcatcggccggcgtttctctgacacgtcggtgcagagcgacgcgaagctgtggcccgtcaaggtgctacccggccccggcgacaagccgatgatcggcgtgcagtacaagggagaggagaagc

SEQ ID NO: 418244 - DNA, 541 bp, Oryza sativa
attagttgcatctgtcaacagaaaccgtagtacaatcattgttccggctggtagttctggtgaagaaggttgggaagcattcaggaatgtattgttggaaataaacaatgaggcttcccgactttatgttctaccaaaccatcctaatcagcaacacttggaacctccagagcgccttcctggactttctgatgatgttggtgctggatttatagctggacatggaagtcaatctgcttctggaccagaggtagatgttgaacgcctggttgatttgcctcctcaggaagaaattagtggcatgggcatgtctaaggtcataagggcagatcaaaagaagttcttctttgaccttggaagcaacaacaggggtcattacctgaggatttctgaggttgctggagctgatcgttcgtcgataatcttgccactctccgggttgaagcaatttcatgaaatggttggccactttgtagatataatgaaggacaggctggaagggattgacggcgcgaacgtgcgcacagtggagtccagtcag

SEQ ID NO: 418245 - DNA, 485 bp, Oryza sativa
ttttgtttttttttttttttgggtcattttttccagtatcttctaaacaaagatgcaaacttaccacggttcactgatttatttcactacaggctacaggtacagaaaatttacgcgcatgtcacagattgcacacaatcggaagcaaaaacagcatatgacgaaacatagggacaagctagttagcttcacatttcacattgatcacagcgtcatttggcctggctactttcttctccctcggaatccatcaacttccaggggccatgggcgcccctaaccatgcccttgtccctttgcacgctccacgacggggggacgtggtactcctccttgagcgcgtccacattcttgttcaccagcgccacgtcccggtcgacctccagcttgaacccgccgggcttgccctgcgccccggcgacgccgtgcatgtagcactcgaggctgtgccacaccgcctggttccccggcgacttgaggtacgg

SEQ ID NO: 418246 - DNA, 495 bp, Oryza sativa
gttcgtggtgacggccttcttctacgccaccgcgggcgccggcggcgtgccggcgccgttcatggtgcggaaccgggagtcgaactggatggggtacgtggccgtggcgacggacgccggggtggccgcgctgggcaggcgcgacgtggtggtcgcgtggcgcggcaccgtccggcccatggagtggctcaacgacctcgacttcacgctcgtgtccgccgccggagtgctcggcgccggtggccgttcgccggcgccgagggtgcacagggggtggctgtccatctacacggcgagcgacccggcgtccaagtacagcaagctcagcgccagggagcagatttcggatgagatcaagaggctaatggacaagtacaaggacgaggagaccagcatcaccgtcgtcggccatagcctcggagcacgcgtcgcgacccttaacgccgtcgacatcgtcttcaacggccttgatcagcacggcgcctgccccgtcac

SEQ ID NO: 418247 - DNA, 479 bp, Oryza sativa
tttgttttgaacaggaaatgcggaatggtccatatattgcgaggccgaatttataccggaaaggcacacggacgttacatggacaagtcgtcagagtctcacacaaacaagttcaagaacggatcatacggatgctgccatgagggtgcacggcggcgatcaggcgggcggcgcgtcggcgtcgtcgatgttgctgccggcgacgtcgacgacgaagcggtagcggacgtcgttgcgctcgaggcgctcgagggcctggttgacgtagtccatcttgacgacctcgatctgggaggtgagccccttgtcgacgcagaagttgagcacctcctccgtctcggccatgctcccgatgaagctgccggtgatggccttccggccgagcatcaccatgggcgagatgaagctcagcggctggttgatcacccccatcaggatcagcttcccgtccagcttcagcagcgccaggtacggctcca

SEQ ID NO: 418248 - DNA, 497 bp, Oryza sativa
atcgaatcagccactgcacttcttgttcttgttctcttcctcctcccgaatccgatccatccattggccgccgccgccgccgccgcctcgtgcgtcgcgtgttcgtgtccagagacgatgggcagcctcgccgccgagaagaccgtcaccgggtgggccgccagggacgcctccggccacctcaccccctacaactacaccctcaggaagactgggcctgaagatgtggtggtgaaggttttgtattgtggtatctgccatactgacatccaccaggccaagaaccaccttggtgcttccaagtaccccatggtccctggccatgaggtggtcggcgaggtggtggaggtcgggccggaggtgaccaagtacagcgccggcgacgtcgtcggcgtaggcgtcatcgtcggctgctgccgcgagtgccatccgtgcaaggccaatgtggagcagtactgcaacaagaggatttggttctacaacgacgtctacaccga

SEQ ID NO: 418249 - DNA, 497 bp, Oryza sativa
gtctggacactttggggatgtttggcattactggactgatgatggccttggatattatgaatttctccagctttctgaggatctgggtgctgccccaatctgggtgttcaacaatggaatcagccataatgatgaagttgatactgctgcgattgctccttttgtaaaagacgtattggacagtctagaatttgcaagggggaatgcagattcaacatggggttctgctagagctgcaatggggcaccccgaaccattccctgtcaaatacgtcgcaattggaaatgaagattgtgggaaaaaattttaccgcggtaattacctcaagttttataatgctataagggaggcctatccagacattcaaatgatttcaaattgtgatgcttcatcaagtccacttgaccatcctgctgatttatatgatttccatgtctatactgattctaagactttgttttcaatgaagaatacatttgatagatcatctcgtaatg

SEQ ID NO: 418250 - DNA, 495 bp, Oryza sativa
agctcgctgtgaaaatcatctaactgatttacaagtgtgcacatggccgaagagttcagcagcagcaatgcattccaagccaggtactttcaagttttccagtaattacagaatgcgatacatccaaagatgtgagaatcaccagcatgaaaaatagcaataccagcgacaaaactattaaagcaatttttagattgttccattcagcatatgctagtaaggcctcaagccacccaggcggctttgttatttggcttctgataatcagatcaccgttggttctccctcctccgggcgtatcgggtcctgtcattgtacctaggcctatctgatgctctttgtgggacaggttctacccgcctctgcctctccggggacctctgaacaatctctccattgacgaagagctcagctccatagtccttgtactcagggtcgacataggaatcagggaggacaaacagaacaccaggaagcccttccagcttgttgacg

SEQ ID NO: 418251 - DNA, 380 bp, Oryza sativa
cttcttccttcactccgctagggttttaccccgcgatggccgccgccgccgccgccgccgcgcggaggctcctctcccgccgcgccacctccttctcggcctccgctctcctccgccgaggcggccccggtgcgccggagtcgctgctgcgccccaccgtcgccgcggtctcgcgcgtcggcttccttcgcgggttcgcgcggcggccgggcggcgatgggtactccccgatgcggaccggtggcggcggaggaggaggcggagaccgcgcgccgacggagatggccccgctgttccccgggtgcgactacgagcactggctcatcgtgatggacaagccaggcggggagggcgccaccaagcagcagatgaatgactgc

SEQ ID NO: 418252 - DNA, 466 bp, Oryza sativa
gattagggatcacttattcattatagttcttccatgctgctctaccacagcaaaacgcttcagacaccatcaaaccagacttaaggatacacattacaggtaaatagtacacaatgaaacgggacacgaccaaggaccagaccagacaaccatagctccattggggaagacaaataggcagacttgtgaaccctacaacagcagcagctccatggctgaggacttactggccaccacggaggcggagcaccaggtggagtgtggactccttctggatgttgtaatccgcaagggtgcggccatcctcaagctgcttaccagcaaagatcagacgctgctggtccggggggatgccctccttgacctggatcttcgccttcacgttgtcaatagaggcggacgactcaacctcaagggtaatggtcttgccagtcagggtcttcacgaagatctgcatcccacccct

SEQ ID NO: 418253 - DNA, 382 bp, Oryza sativa
tttttggtttccaccctccaccttgtgctcaggctcaggggaggtatgcagatcttcgtcaagaccctgaccggcaagaccatcaccctataggacgagtcctcggacacgatcgacaacgtgaaggccaagatccaggacaaggagggcatccccccggaccagcagcgtctcatcttcgccggcaagcagctggaggacggccgcacccttgccgactacaacattcagaaggaatccacccttcaccttgtgcttaggctcaggggaggtatgcagatcttcgtcaagaccctgactggcaagaccatcacacttgaggttgggtccttggacacgatcgacaatgtgaaggccaagatccaggacaaggagggcatcc

SEQ ID NO: 418254 - DNA, 558 bp, Oryza sativa
gtgggcatcttatacttgtatggagtatatcagtatatgctagttgcagacgttttacagtgcaactgtaactgttgctacaatgttactgaaagagaaacagaagaaaacaaaaacaacagtctgtatattccagtttgtattgctttcaatgctgtctgatgtacaaccgcattgtgatcgacagtgaagcaacaagttgcaaaactatttccagtgaaacacaaatctatggtatataatgagttgattttctatcaatcatgcatacaatcctccacacgaaatcaacaacaggcccaactgactgttaaaaataggatctcgatgaacgtgatgaacgagtggtgctgccctcatttcgatctttcttccacatgccctcaaagctcaggaagcatttgagaggtttcaccttccaacggtttctctgagatatttcattctggatataagacaattgttcaatgatcgttctaaagtcaggcctgctagcaggattttcactccagcattgttcaatcagttttttaatccgtaagcataatgctttgagga

SEQ ID NO: 418255 - DNA, 426 bp, Oryza sativa
ttttgattgatccgatctctcgtctcgtctcgtcctccccatcggaaccctagccgcctcccgtgcccgcgcccgcgccgccacatggagccgaagccaagcacgccgacggccgcggcgaccccgcggtttaagctggggaagcagtcgtcgatggcgcccgaccgcggcggtgcgggggagagctcggaggaggggtcgagcgaggcggtcggggtcatgggcttccagctgatgtacatggcccacgagggcgacgtcgaggggatccaggagctcctcgacgccggcgccgaccccaacttccgcgactccgacggccgcacggcgatgcacatcgccgcctgcgaggggcaagccgaggtcgtcgagctgctcctccagcgtgggggggatgccgtcgccgaggaccaggggggcagcacg

SEQ ID NO: 418256 - DNA, 526 bp, Oryza sativa
aatgaaccatccactggaattgtagggataatatatgaacatgtcccattggggcattcaacaatcggcaatgttcgacaagactaaccagaatattcaacaaaagtaacaacactgaaaccatcagatggtagcaattgtacacttgtatgagactctgtttctgctagcagaggaattttacaacgatgcaggagatgtcgactttgcttttccggttcacggcctgctccgtcagatgcttcgcagctgcctgagcatccttgaagtccttgatttcatccaccgcctcttggttggacatcaccttccataatccatcacttgcaagaattagaaaatcagtattctcgtctataggttcctccaccacatctggctctgagctgaggtgcttctttaggctccggtctccaaatgcccttgcaaccgcaagctgaccatcaacacgcggtacatctcctggtaagtttgaaacaagccaccttttttctcgattgaatgccgctccttgttggttcatgat

SEQ ID NO: 418257 - DNA, 424 bp, Oryza sativa
tttgtgttgcagaagggggagggagggctctgaattttcaagaaagggaccatctttctgctgctgctgctgaccgggttggtgcttgctgaatttgaggctaaagaagtcgcaattggaggttttgtaagagggaaacaatggctggcaaggaaatctaccacaagatgaacgacaaggtgaaagatgcttttagttcgtcaggaccagaaacagggaaaggaaaaacaaaattgtcaggcaagcgtgtcaagcatggttaccatcttgtgaagggaaaatcaaatcatccgatggaggactatctagtggcagagtacaggcaagaaggagagcatgatctggggctgtttgcaatatttgatgggcatttgggccacactgttccagacttcctgagcttacatctctttgataatatctt

SEQ ID NO: 418258 - DNA, 521 bp, Oryza sativa
aggtaaaaggtttaattaacataggagtacagcagaaaataacaataaaaagatagcatggaattaaagccgctgctccaatttaccatacgcagcatttgattacaggaataccaaaaaactactaccgatgacaggtattaattattaaaaagcacaggttcagattattgcgacaaaagtttttgatacccgtaagattggacgcttgatagccaaaccacactcagaaccctaaatatgcatacggaggatgtccaatcggatcttcagccaccaccagaggcagatcagtacttgtagtccttgacgtgaaggctctcagaggcaccctcgccgagcacagcatcaccctggtatgtaccaagggtagcctcagagttggccttgcacctggtgatgaaggccttctgcgccttcaccacgttctacgtcttgccgcccaggccttgagcgtgctctgctggagagcacggccgaaggagaaggacagagcccacggcttttttgtgctgagcttg

SEQ ID NO: 418259 - DNA, 434 bp, Oryza sativa
tcgcttctttgcgtcctctcgattcctcagcaaccatgtcggcctactgcggcaagtacaaggacgagctcatcaagaacgctgcctacattggcactcctggcaagggtatccttgctgcagatgagtccactggcaccattggcaagcgctttgccagcatcaatgtcgagaacgttgaggagaaccgccgctctctccgcgagctgctcttcaccacccctggtgccctccagcacctaagtggtgtgatcctcttcgaggagaccctgtaccagaagaccaaggacggcaagcccttcgtcgatgtcctcaaggagggtggtgtcctccctggcatcaaggttgacaagggtaccgttgaggttgccggcaccaacaaagagaccaccacccagggccacgatgatcttggcaagcgttgcgccaagtac

SEQ ID NO: 418260 - DNA, 454 bp, Oryza sativa
gatccttggacaatgcttacatgatttactcaatggaatggaatcgaatcgaatctatatatacatattcaagcagtgccaagcactgttgaatgaaaaagacctaggtacctgacttattactaccaggccttagctgagctagaaagctgggaaagaatgggcgatacatcttacactgttacatctcgctcagcagattgctgatcttgcgaagctccgtcagagcagccattgcagtgacctgtcctttgcctccaagaatgttgtttgagaagttctccacagggccaggctgaccacggtcttgctgaaatgccgactcaatcacctggatatttccaagcatgccctgtccaagaccctgtagggtgcccatgacctttttatcaccagaagccaactttaccctaccacgggagttatttgaattcccgtcataaggagaacagga

SEQ ID NO: 418261 - DNA, 313 bp, Oryza sativa
tcgattcatctttatcccgaaaagatcctccttttcttggggtttctgacaggcgtgcacggctatctttaggcgttctcggtctcatctctcgtggaaaggttcttgttcttcggggttgtttgctgctgcttaatttgaggaggaaaagcccaattcttgtggggagcgaaggcagggaggagggccgcctgtctcttcgagtgctgctattgaccacccctggtgccctacagcacctaattggtgtgaccctctttgaggagacccttgaccagaagaccaaggtcggcaagtccttagaagctgtcct

SEQ ID NO: 418262 - DNA, 389 bp, Oryza sativa
ggcgcgttcgagtccatgggcgccggcctcgccatggcccccggcgacatcgccttcaagtcaaactttgctacgttggatgaaagcacggggatcattgtcagcagaagggcggatcgacactttgaggaggaaggcccgatactctgtgctgcattggatgggttgaagctcccatcgtttcctgaatatgaagtgagagtcagatatgctactgaacacaggtgtggtgtggttgtgaaaggaccgaggctgagtgggaacatttctggaactgatccattgaaggacaaccgcttgcatctaaaggctgaacctttggatgattcagaagaagctaaaaacacggcagctgtggtcaatgagcttttctaggagattacacgtat

SEQ ID NO: 418263 - DNA, 473 bp, Oryza sativa
gtaatccatagttccgtaccacgagggtaaaattttataaccaaatgcatttacattttcaagaattatcccagtacagaaatgttacagcaggcttaatttattagaatgccaacagaaccacgtttccttgggctgctttgacccaaattacaagcatttattaagcaaggtgagagtgtggtaacagaggcatgttgtttatttgctcatgtgcttcttgaaccaaacacctatattgaggaagctttcaaaatcagactgtggcttgtcaaggccatgcatatcttctggaaagacaataattttggtttcaactcccatctccttcaaggtccttgcatactgtaagccattagaaacaggaactctgagatcttgtgctccaaggagaaaaagtgttggcgtgctcacctttgatatatgtgatattggtgatttctggtgaaattgacaaagatcatcaaatgaag

SEQ ID NO: 418264 - DNA, 428 bp, Oryza sativa
gttatttcgtggaatcaagaagagactttagtagcttacgttgctgaggagcctcctcaaccgaagccagaattcaatgattcaggatacaagaaggctggctcgtctgaaaaagactgcaagagctggaagggaaaaggggattgggaagaaacttggggagaaacgtattccaagaaaaggatacctgcattgttcgtggtcaacatttcaagcggtgaagtgcgagctgtgaagggcataccgagaacattaagtgttggccaagtgatttgggctccatcatcatcacatagcctggtttttgtggcgtggtcatctgataatggttaccaaaagacaccaaggaaacttggaattaaatactgctttaacagaccttgggctctgtatgctgttcctgatcctttatggaagaagctgataag

SEQ ID NO: 418265 - DNA, 354 bp, Oryza sativa
tttaatgtttcgccggcgaagtgaaccagagagagtcatccatggaggtggaggaggcggtgtacaggacggtgtggtcggagccgccgaagaggccggcgggaaggaccaagttcagggagacgaggcacccggtgtaccgcggtgtgcggcggcgcggggggcggccgggcgcggcggggaggtgggtgtgcgaggtgcgggtgcccggggcgcgcggctccaggctgtggctcggcacgttcgccaccgtcgaggctgtggctcgcgcgcacgacgcctccgcgctggcgcttcgcggcatggcctgttgcctcaacttcgtctactccgcgtggaggattgccgtccgtt

SEQ ID NO: 418266 - DNA, 425 bp, Oryza sativa
agaataaccaaaacataggaggtttcatttcttcttctcaaagtagtgtagcatctttccttctttcaccattacataagcttaagcaataacagataacaaatcctcctcctcctctaggtaaaatattcaaacacaatacccttataagtacttattattaggaaagtagcgtgcatgggcataaatggcagcggggggcaggttaagaatcacaatgctgagcagcgaggaaacaaaacaccataatgggacagagcaaaagcctccgaaagggagcttttaggcagaaggcttctcccacttgaggggcttcaccacctcccaggtgaagtctgggtcgtcccttccgaagtgaccgtaagccgccgtcttgaggtagcgtccgttgccgcctttcttgaggtcaaggttgatgatgatca

SEQ ID NO: 418267 - DNA, 443 bp, Oryza sativa
gtcggatctaattaatttacctcctccacctcctcctcctccccccgatcggatcggcccggctcctcctcctccgccgccgccaccgccgtcgcagataggagaagatggccgcacttgataccttcctctttacctcggagtctgtgaacgagggccaccctgacaagctctgcgaccaagtctcagatgctgtgcttgatgcctgcctcgccgaggaccctgacagcaaggtcgcttgtgagacctgcaccaagacaaacatggtcatggtctttggtgagatcaccaccaaggctaacgttgactatgagaagattgtcagggagacatgccgtaacatcggttttgtgtcagctgatgtcggtctcgatgctgaccactgcaaggtgcttgtgaacatcgagcagcagtcccctgacattgcacagggtgtgcacggc

SEQ ID NO: 418268 - DNA, 497 bp, Oryza sativa
gaaacaaaatcatttttttgaaagattatgcgcatgtcatcatgacagtacaatcttgttacataatctttcaaaaaattacaacgtcaaaagaaatctttcagaaaaagcttcaaaacagcagcatgcactgacgggtcccaaacagctaagctggtcgtcatttccacggttgtaaagccattttcacctcattgcagttgtgcatttggtcaagcggcgcatgtcttgtggcctgcagattctctcctgacatcaaccaatgggtggagtacaggtcctctctcctctgcatttccaaagggaggttatcccttattgtttggatcatagaatggtcgatttcacctacgacagttgcttcctcgtgccctgctgttgcaatgacttccccaaatggtccaataagacttgaatggccccagatcatgtagtccgattctgcattagggtctctagctggcgagcaggtcaccacaaacaactgattgtcaaca

SEQ ID NO: 418269 - DNA, 443 bp, Oryza sativa
tttatattggccgctgtctcaatccctcctccccaacccaacgccaccaagtacaaggtcgcgctgctgcagctgccggtgtcgccgcgcaaggaggagaacatcgtccgcgcgcgcgcccgcctcgacgccgtcgccgtcgccggcgccacgctcgtcgtcctcccggagatatggaactgcccgtactcgatggagacgctgccgagccacggcgaggacatcgacggcggcgcgttgccgtcggtctcgatgctgtcggaggtcgccgcccggaggaggatcaccatcgtgggcgggtcgatcccggagagatcatccgggcggctgttcaacacttgctgcgtgatcgggccggatggacagataaaagccaagcacaggaaactgcatttgttcgagattgatatcccaggagacatcactttcagagaatctgacac

SEQ ID NO: 418270 - DNA, 431 bp, Oryza sativa
tcggtctattgttgccctctctggcggtcacaccctgggaaggtgccacaaggaaagatctggttttgagggaccttggacaagaaaccctctgcagtttgacaactcttacttcacggagcttctgagtggtgacaaggagggccttcttcagcttcctagtgacaaagccctgctgagtgaccctgccttccgcccactcgtcgagaaatatgctgcagatgagaaggctttctttgaagactacaaggaggcccacctcaagctctccgaactggggttcgctgatgcttaagaggtttctagtctactactgctagtacattgcccgtggtactcttgttttgcatctaggctagggccagtgtgaaccagcagactaccactgtgagtcgcctctgtataaaatttgttcggcctatggccattct

SEQ ID NO: 418271 - DNA, 383 bp, Oryza sativa
ttggtaaaaccgagttcgccgcccacctcgccgccatggccatggagctcgccgcgctctgcaccgaccccgtcgtgctctccgccgccttcctctgcctcctcctccacctctccctccgctcctaccgaccgccctcccccggcggtggccgccgcctccccccgggacccccgggcctccccgtcctcggcgcgctgccactcgtcggcccggccccgcacgccggcctggcgtcgctggcgcgcaagtacgggcccgtcatgtacctaaagatgggcacctgcggcgtggtggtggcgtcaacgccgtgcgcggcgaggacgttcctgaaggcgctcgacgcccggttcgcgaaccggccggcggtggcgagcgccgtg

SEQ ID NO: 418272 - DNA, 427 bp, Oryza sativa
tctctttaaggagagaaatgacaagtgtctggaagaccaaggttctcactggactcaacaagctctttgacaaggatggaaagaaggctgctgctgctgagttcttgaaatcattcaacaaggaggagattggcaaggagattgatgacaagaagacagagcttgagcccaaggttgtggaggttgttgagtcatctcctcctgagattaaggctttgttgaagggaaaaaaaacaggccaccaaatcaaaaagaacggtcctgcaatcacttaagtccttgaggaattggcttagattgatttccccggagccaaggccgggagcgacgcggtggccaagtccggcacgaccccccttttcccggcgaacgcctttatcctggagaaggttgcgcctttcggttcccaagaggagcccaagcccca

SEQ ID NO: 418273 - DNA, 442 bp, Oryza sativa
ttgtttgtaggagagaaactcgacatgcgtctggaagaccaaggttctaactgaactcaacaagttcttcgacaaggatggaaagaaggctgctgctgctgagttcttgaaatcattcaacatggaggagattgtcacggagattgatgacaagaagacagagctagagcccaaggttgcggaggttgttgagtcatctcctcctgagattaaggctttgttgaaggacaaaaaaacagccagcaaaatcaagaagaacggtcctgcagtcactaagttccttgaggaattggctaagattgatttccccggagccaagccggtgagcgacgcggtggccaagtccggcacgacgccgctctccccggcgatcgccttcatcctggagaaggtcgcgcctttcgttcccaaggaggagcccaagcccgagccggaggcacag

SEQ ID NO: 418274 - DNA, 476 bp, Oryza sativa
caaattgaactgtatatattttattatttatacattaaaatgaaaaaaaatgaactgtacaatttcagtacaagagagaccaccaattcatcatcactactactttgggtatacatctacattttaggcagtcctaacatgctgcttgatcaatatcatgaatttgtaaagaatgtgctgtatttaagttcaggtagtttaacatgctccaatgatcacttttttttccctgaaggtaactacagcttgattgcaaaataaaacctttttccagttacagcaccaaggggggtagcaaccaaataaacccaaatctgggtgaatctccctgttgcaatggccgggccaagtgttcttgctggattcattgatgctcctgtcgatggccctgcgacaagagcgttcatcatgattgttgctccgactgccactgctatcagctttttaactgcattggggtcagtggcaagagcagt

SEQ ID NO: 418275 - DNA, 401 bp, Oryza sativa
ggagaaagtcaaggttcgataaatattgcttcacttgtacaaagtacagataaaaatacattgatacatgacacggagagagccatgcacaccacttatttggacacacagagggcaaggctgcagagaaaatcaagcaacacaagctgaactcacggccccacctgtcagcctctcactggtcgaggccggagactcttgtgaaaaacagcaacaccacgcatgcagaagaagacaaattattacacacacaaatcgacgacacggcggccggcgacgtacggcgaggtcgtcgccgccgccggcgacgttgtgatgaggtcgatcagccgaagaggtggtgcttcttctcgccggtggactcctcggcgctcttgtggaccttcttcttctcgtggtgc

SEQ ID NO: 418276 - DNA, 393 bp, Oryza sativa
gaaaggaaattaaactgatttattacttgttccattaaaaccatcacactcgggtacgtggtgaaaccgtgaaagttaaaaaacaaaaacagtagtagtagagtgaggccctgctcgctgttacatgagaggtgcacgaagaaccagcacacgagcagagcatccagcccacacgcagcaaggaaacggtagggatgccgccgccgccgccggccgatccgccgcccggcgatgatgcgtcgtcgtcgtcgttcaggtgcacgcggaggcggagcggcgtgcggcgcggcgcggtcgagaggtgatgagtagttgacgcggagcagatatatatggatggatggcgtttttctcggtcggacgaccggtaggttgtgcgcattacgcgcgggc

SEQ ID NO: 418277 - DNA, 320 bp, Oryza sativa
ccaagtcgcgtcgcaccgaagcagagtagagaaggagaggagcggagcgccatcagccgtccgatcgagtgatccgatggctctcgctctctccacctctgctgctgctgccgctgccgccgcggcgcgggcgctcgcggcgagggtgacgacgacgaggggttacgccgcgtcggcggcgtcgtcggcgatgaggcgggcggcggcggcggtggaagggaagggcgctgcggggatgacgcaggcgaaggacgggttcgtcgtcgtccctggcgagggaggtgttctgcgtgcccgaccccgtgactggccactaccgg

SEQ ID NO: 418278 - DNA, 435 bp, Oryza sativa
gtcaatccttcattaactgattaactctataataatttcgtttgccatgctgagcagatcaaacaacaacatccaaaccaaaaccaaaccaaaacagttgtttttcacctgtataatataattataaccataataattacaatcattccaagaatgacacccacatcgtcgacacctactcgacgaactgcttgccttcgaaggtctgcgcgaacatccagtccggcggcgcgacgctgtaggcgacgaccgtgcggcccctcccgccggtgacctcgaacgacagcggctggccgcggaggtcggcgtcgcactgccagttctggccccagttcctccccatcgggatccacccggtcctcgaccctttcaccttcaccgccgccacctccccgttcgccgccacgttcgtgatcagcacctgcaggaagctgg

SEQ ID NO: 418279 - DNA, 513 bp, Oryza sativa
atctcccgctcggtgcgccgcgcgctcgaccagccgctcaactacgcgcgcgtctacctcgccgacacgctccccgccggcgtgcgccgcgtcctctacctcgactccgacgtcgtcgtcgtcgacgacgtgcggaagctctggtcggtggacctcgccgggcacgtggtggcggcgccggagtactgccacgccaacttcaccaagtacttcaccgacgcgttctggtcggacggcgagctcagcggcgccgcgttccgacgcggccgccgccggccgccgtgctacttcaacaccggcgtgatggtgatggacatggggcggtggcgcgacggcgggtacacgcggcgggtggaggagtggatggcggtgcacaagcggaggcggatctaccacctcggctcgctgacgccggtcctgctggtgctcgccggcgacatcaaggcggcggatcaccggtggaaccagcacgggctcggcggcgacaccgtggcggggaaatgccggagcctg

SEQ ID NO: 418280 - DNA, 485 bp, Oryza sativa
tttttgttttttttttttttttccttgttttctatttcatttcattccgatagatagcaacaagcagttcaaacaccataaccaaagcgaactcaattcatggtaacatcacggacgaagaacacctaacactggatggatggatagagggcttctcgactcgagagagccactggacacgataacgactcgactcgatgataagatgattctgacacggatagctaaggataactggccacgatgggccccaccaatcagttcctccagttcccgccggagtcgccgccgaagccgccgccacggctgccaccgaagccgccgccgccgccgccacggccgccgccgtagccgccgccgccaccgtagccgccctcacggcgcccgtagccgccgccgacaccttctccgtagccgccgtctacacgaccgacgccgaagccgttaccgacgtcgccgtagcccccgcctcagccgccggagcg

SEQ ID NO: 418281 - DNA, 488 bp, Oryza sativa
gcaccattggatacatttttttattaagctaatgttaccaaatgagccatggagtgaatgttctaggtattatggggacttgttaccatcgaaattacatatagaccacagcaagcatacagtcttagttacagggaatacacaggatgaatcaacacctgagtgtatgcaaatccttcaagatctttatatccatatatcagaggggcaatctccaccaggatatttcatttcatgggccaaggagggaccctttggctcagcaccaaaatttacaaagaagttagggttgatcgatagtcctcctttttcagggtcgacgtcgatctgcaacatgggggagccctttttgacaagatcttggccatagaactgctcgtcccatcggctgaaaagagagttggtcacatatatcctcttcccatccaggctcagctgaatcatttgtggcccaccttaagtcgatgacccttgacctggggcacact

SEQ ID NO: 418282 - DNA, 432 bp, Oryza sativa
cttcttttccctctcgccgtgctggtggtgagtgaggcggcgagcggcgagctcctccggtgatccgaggctcgccggccggcgagagcttgcctgtttcgggaggttttcagggtgatctgagagcacagcgagccgatggcggcggccgcgaacggggcggcgtgctgcggtggcgcgacggggccagggtacgcgacgccgctggaggccatggagaagggcccgagggagaagctcctctacgtcacctgcgtctacaacggtactggaattaacaagccggattacctgggtacggtggacgtggaccccaattcccctacatactcccaagtgatccacaggctcccagtcacccatgtcggcgatgagctgcatcactctggatggaacgcttgcagttcttgccatggtgatccatcggctagc

SEQ ID NO: 418283 - DNA, 432 bp, Oryza sativa
ctttttggcggttaacttgcatatcaaacagacgccgcgcgcgcgagcagttcgtcgtcgtcttcgctcgatcgtagtagttgccggccggcatcggcatgggcgacggcggggagaagcaggcggcggcggcggaggggtggcggctgagcgtcaacgacttccagttgccggagcggcccaaggacccgcacttcgtcaagagggtcatcaagcgatgccacggaaagcatcggaaaattgcaaaatactacaagaagcaggaaaatctcctgaaggatttcagcgagatggaaaccatgaatgagattggttccttagatcagaatgctcctactgaggaagagttgaggcaaatggcaaagggcgaacgattggccatcaacctgtcgaatatcatcaatctgattcttttcattgggaaagttcttg

SEQ ID NO: 418284 - DNA, 439 bp, Oryza sativa
aagatgacaaaaatatgcacataaactgcatatgaaaaccatgagggcactttatacaagccggacaaaagctaaaagaagtttacgatgcctaaaggctgaggcacacggaatctgaaaaccccgcagctagttaaaaacaacatacacagcctacatgagacataacttacttggggagataagagggcaactaccacctaggccacattatacgcaaaggtacctttttttcagcccacatgaacccggggtctaggaaatattcgaccttgtccttgcgctctgagatatggtcgaactttaaatctctctgtccaagaggagcttgaattgaagggcgtcgtgcgcggcgaagaatggcgcgaacaccagtgactcgacggccatgagcttgatgaggatgttcagggacgggccccacctgtactagagcggg

SEQ ID NO: 418285 - DNA, 430 bp, Oryza sativa
cgggtaactagagtatgaaacagacggagagcgcgcgagcacttcgtcgtgtacttcgctcgatcggagtagttgccgtgcggaatctgcatgatcgacggaccggagaactaggccgtatgcggcggcatgattggcgagctgagcgttaactacttccaggtgccgtagcggcccaaggaccggtacttcggcaagagggtcatgaagcgatgccacgggacgcatccgaaaattgcataatactacaagaagcaggaaattctcctgaacgatttcagcgagatggaaaccatgaatgagaacggatccttagatcaaaatgcatctactgaggaagagttgacgcaaatggcaaagggcgaacgattggccatcaacctgtcaaatatcatcaatctgatttctttcattgagaaagctcttgcat

SEQ ID NO: 418286 - DNA, 435 bp, Oryza sativa
tcggtttatactagcttgcttgttcaattcaatcgagcagtagctaattgcatagtgatcgatcggtctgtatagatggtggtggccggcaagaagcagggacggcattctttttctgcatcatcatcgtcgtcttcgtcttcttcttgttcagtagtgcagctgggtcatcatcagcgcccacagggtgaggaccctctcatcggcatcaaagcagcagcagcaggaggaggaggaataatgagaaagggcccgtggacggagcaggaggacgtgcagttggtttggttcgtgcggctgctgggcgaacggcggtgggatttcttagcaaaggtgtcaggtttgcgcggcggcgggtgatgagcatatgcgtgcgtgcatctaatctatcgattaattgttgatgatgtcgatcagatggatggatgcatgcat

SEQ ID NO: 418287 - DNA, 500 bp, Oryza sativa
gcacataaactgcagatgaaaaccatctggtcactttatacaagccgtacatcagctaaaagaagttcacgatgcctcagggctcaggcagacagaaactgaaaacgacgcagcaagttaaaaacaaattacaaaacctacatgagacaaaattaaatcgtagagatagtgtcccactaccaccaaagcaacattatttgcagaggttcctttttttcagcccacatgatcccgtggtctagttattattcgaaaatctccgtccgtcctcaaattcgatcgaattttaaatctctctctcctagaagagcttgaatagaattcctccgtgcgtggcgaagaatggcgcgaacaccagcgactcgacggccatgagcttgatgaggatgttcagcgacgggcccgacgtgtccttgagcgggtcgccaatggtgtcgccgatcaccgccgccttgtggcagtccgatcccttgggccccagcgacctcgcgtgctcactc

SEQ ID NO: 418288 - DNA, 431 bp, Oryza sativa
tcgctccactctctttgccactgacttcttcgagatcaaggccgtgaaagaaatcgaaccgtcactaaagaagcagctcatcatttctacggctctgatgactgttggtattgcactggtcagttggttggcgctcccatacaaattcaccatcttcaattttggtgaacagaaggaagtcactaactgggggttgttcttgtgtgtttcgatcggtctatgggctggtctgatcatcggatacgtgacagagtactacactagcaatgcatacagccctgttcaggatgtcgcagatgcttgcagaactggtgctgccaccaatgtcatatttgggcttgctctaggatacaagtctgttattatcccaattttcgctatcgcgcttggtatctacgtcagcttcaccattgctgcgatgtacggcatag

SEQ ID NO: 418289 - DNA, 563 bp, Oryza sativa
ctctcataaccctcgtagcatttgattggagaaacagatgttcacaagtagatacagagctaccgaaactggaagaacagaaacccgagggaatggacacaaggaacataactgaagggcaaagtgtttacattattatgattgagcccagcttgcaacaagtactaaaagtttctactgaggatttggtggcctggagttggcagcagaaaccctcgatccccattccagcagctctttgctggtgtcgtccttgtgcgcgatcacctcaatgaagcacaggcagtccttctcccccagcgccatcccgatcgcctccgtcagctcctcctcgcacttcaccttagaagtccagcatttgccctctccattgtggatggcatccacaaggccagtgtagttccagttcttgatgacgttgtatggaccgtcatggatctccacctcaatggtgtacccgccgttgttgatcaggaagattatgctgttctgtgcacagcgaatcattgttgacacatcctgtgccgtcacctggaaactcccatcaccatacaggcattaca

SEQ ID NO: 418290 - DNA, 441 bp, Oryza sativa
acaagcgtcaaatcgcgttaaagccaaaaacctcatacaagtccaggaatctgtaatatattccgagacttttacacgcattccagtcatcactagtgtagcggttgctgcttcttccccggggaggtttatcggatcttgatggagacccatatcggatccgtggacggggcggcggcggcggcggacaacggcgcggtggggtgcccggcgtcggcggtggggtgcccgatgacctcggcgcgccccgcgcccgtgtcggccggcgaggcgtcgctgggacggcacctggcgaggcggctggtgcaggtgggcgtcagcgacgtgttcgccgtgcccggggacttcaacctcacgctgctcgaccacctgatcgccgagcccgggctgcgcctcgtcggctgctgtaacgagctcaacgccgggtacgcggtcgacggc

SEQ ID NO: 418291 - DNA, 446 bp, Oryza sativa
acaaactaaatggagaattaatttattgatatggctaaattattttttggtggcatggttgattggtataaaccaaacatgccattttttttaaaaaaaaagcctacaatgcatgatatgaacatcacaagatcgacgatcagattgccctaagcttaattggtgccccatgcatcggacgcagcatcaacacaatatggggagcgtgagtgtaagacggcgctagctcgaactcgaagcgctggagaatcatacacagcgccatcttggcctcgagcagcgcgaagttctggcccatgcagatcctcgggccccagccaaacgggaagaacgcgccatgatcgttggacgccctggagatcccctcggcgaacctctccggtttgaactcgttcacatcgctcccccagatgtctgggtcatggtggatgaacaacaacggtagc

SEQ ID NO: 418292 - DNA, 416 bp, Oryza sativa
ccagtgcggtcctttccggcacaaagcacactcgtccgctgacagtgaccagagattctactccagcttgctactcatttttgagggtgccagatcatggatccgacctcagtgccatggagctccatggtgtacggtctcctggggctcgcgcttttgtggcaggtccaccggctgctggtgcggctgtggtggcagccgcggcggctggagcgggcgctgcgggcgcagggcgtccgtggcacgtactaccgcttcctcaccggcgacctcaaggactacggccggctgagcaaggaggcatgggcgagggcgctgccgctgcggtgccacgacatcgcgccgcgcgtggcgccgatcgtgcaccggaccatcgcggagcacggcaaggcgtgcctcttctgggtcggccccat

SEQ ID NO: 418293 - DNA, 494 bp, Oryza sativa; identical to SEQ ID NO: 387492

SEQ ID NO: 418294 - DNA, 568 bp, Oryza sativa
gcgagaagaagctccgcctcgtcatgggcctccccgacggatcggccaagggagaaaagacgaggaaagcgacggatgggagtgaagagccgtcagattccgggcccacgacacctttgccggacaaaaagttgttagtcttcgtccttgataggctgcagaagaaggacacatatggtgtattctctgaccctgttgaccccgaagagctgcctgattaccatgatattatcaagcatccaatggatttttcaacaattcggaagaagctcaataaaggggcttatggcaacttggagcaatttgaggatgatgtattcttgttaacctcaaatgcgatgtgctacaattcaccagatacaatatactatcgacaggcacgggcgatccaagagcttgccaagaaggactttgagaaccttaggcaggatagtgatgcaagtgagccagaaccagaaccggaaattaaaccagatcctgaaccaaagccacaaccacggaggggcaggcctccaaataagaacactatcaaacagaaagttgggaagccaccggtagaacgcgctac

SEQ ID NO: 418295 - DNA, 550 bp, Oryza sativa
cttgaacaggctaagaggcggcgaaggccgaattctgcagacgccttggttctcttgcactgtacacctcaaccttcgccacggaaaagcacaaggtatccctcagcagcagatgttacccagtcaagagttttcacctcctctgcctttttgactcagccttaggctcatactttgttgaacctgcatatgcatgtgaaggtctctttgcaccgttttccttgacacaatctgagcacacaaagtgatctagttttttggcctgctcaatcgtcatgctcatgcatgaaggatgaaaccagtccttgcagtcatcgcactgcaccatgagatcatccgggttgtatggcatctcacacttgcagtatacggcgacgcggtcgggggtgaaggcgcccgtggcggccttgtactcgaagcggcagaagaagtcctcggggccgacgttgtcgagcttgggtagttcttgaggagtgacgacgcacttgccctcgaggtgttggcgctctgcatgtcaaatggtcggagagaagagctccttgcgccatgg

SEQ ID NO: 418296 - DNA, 436 bp, Oryza sativa
gtgcttctcccagctgcccacccatctcatggccgtcgcctctagggttactctccccacctcccccctcctccacctcccaaaacctcgccccctcgccatggccaagaccaagcagggcaagcgggacgtcgactcctacaccatctccggcaccaacaaggtcgtacgagtgggggactgcgtgctgatgcggccggtggactcggacaaccagccgtacgtggcgcgggtggagaagatggagctggacgggcgcgggagcgtgcgggtgcgggtgcggtggtactaccggcccgaggagtccaagggcgggaggaggcagttccatggcgccaaggagctcttcctctccgaccacttcgacatgcagagcgccaacaccatcgagggcaagggcgtcgtccactcccttaagaactacaccaagctcgac

SEQ ID NO: 418297 - DNA, 488 bp, Oryza sativa
gggcgctcttgccgcacccgggcaccgtgcaccgcttcccgccgccgtgcgccacgcagaagctggtgccgccgtggacgctcttggggcagagcccgccgccctcgaacatgcaccgcttcccgccgccgtgcgccttgcacagcggcgtgctcccctccgcgcccttgaggcacccgtcgaacacgcaccgcttgccgccgccgtgcgccttgcagtacagcgtgctcccctgcgcgccctttcggcagtccgggtactggcaccgccgcccgccgccgtgggagatgcagagcccgaccctcccctccgcgctccggatgcagccctcgaccgaacacctcttccctccgccatgcttgatgcaccgcccggacttcccccgcgcggccttcgggcagccctggtgcccgcaccggcggcccgcgccgtgggcgatgcagtgatccgtcttcccctcggcgctcttggtgcagccgagctgcatg

SEQ ID NO: 418298 - DNA, 421 bp, Oryza sativa
ctactataagtggcagttgtacatttttacaaacaaaggaacatgcgttaagttgtattactagtttcatcatcttcttttttattgcttgtaacccccatctcatccttccatcatacaagatgcgaggaggagctacacacttttgttttcaagtcacagtaactacttatcaacagtaagttctcgacaacattatgtttatttcattttttgactaaagttaaccgttgtaactaattaattaattaattaattaattaggcaacaattaattaattaattaatcaatcagttgaagatgtcctggccaggggagagcagcttcttggggtcgtacttgtccttcctctgcacgaagcgatcccatttggcgccaaaatgcctcacccagtcgccgcggctgtcgtagtgcgccagg

SEQ ID NO: 418299 - DNA, 415 bp, Oryza sativa
ttcgtttaattaccaaacactctcatcgatcgatctcgcggattaattaaagtggtattagcgagcttaaacgcgccgctaatggcggcgatttacctgctgatcgccgcgctgatcgcctcctcccatgcactcgccgcgcatggcgccggcggcggcgttccgttggcggcggcggcgcctctcccgttccccggcgacctcgccgcgtccggcaagctccggaccgacccgaacgccaccgtgccggcgtcgatggacttcggcaacatcacggtggcgctgccggcggtcgtgctgttcccgggctcccccggcgacgtggcggagctcctgcgcgccgtctacgccgtcccggggcggccgttcaccgtctcgttccgcggtcgcggtcactccaccatgggccaggccc

SEQ ID NO: 418300 - DNA, 523 bp, Oryza sativa
tttttgtagaagcgaataagtaaattccacgacagtaaacaattgcaaatcgtaaaatgacgacagaagaagtgataaaccattatccctttaagttttttaattgaagtacagttacacgaggataagtagaatccatgaccaaataaagcgagaccagatatctccaatgcttcgggcgcctgcgagattgatcaagaggtggttgcaaggaagacacaaaggagttgatttatttcttctcatcttctggcttgtctgatttgtcttccttcttctcttgctcgccctgcccatgcaatgatgccagcaaatctttcacagaggggtcattggggtcaacaccagggagagagttaaggatggatgtaacaaatgatctgtcttcaaacaccttgctcatatcagactgactagacccgcctgcgtcctggacagacatttgaagagctagtgccaagtcctggtcatctacagcagcctctgccatagcagcatcagccgctgcagcccctgaagaacc

SEQ ID NO: 418301 - DNA, 432 bp, Oryza sativa
ttcgtttgtatcatcttgctccccaaaccaagccaaccccctcgacggccggaacacatcggggggacgcagccatggtgctcgaggcgacgatgatctgcatagacaactcggagtggatgcggaacggcgactactcgccgtcgcgattccaggctcaggccgacgccgtcaacctcatctgtggcgccaagacccagtccaacccggagaacacggtgggcgtcatgacgatggccggaaagggcgtgcgcgtgctcgtcactcccaccagcgacctcggcaagatcctcgcttgtatgcacggacttgaagttggtgctgaagcaaatttggctgcagcaattcaggttgctcagctggctctgaagcatcgccagaataagaggcagcaacagcggattattagcttttattggaagccctgtgaaa

SEQ ID NO: 418302 - DNA, 446 bp, Oryza sativa
agggctcttcagaattcagtgtacacgatcaaattcttgcaaacacgccactttctcggacacaatttgatccaagaaagcgtgaacatgatcactgatcagtgcaaagcacaaatatcgatttcagtggcatatatagccttattattgtcccctcatgcactcagaattttcgttgatgatcaccgctaattaattcaccttggagcagacgagcctgatttgtccctgcgttcccgtcaacggggcgatgttccccatcttcaccatggccgccgcgaagtcccttctgaacctcgacggcccggacgcgtacgaccggacctggccgtcgacggcgccgccgttgaagagcacctggtcggagtgcaggagccccttgttcgacagcaggttggtgtagtaggcgttgtcgaacgcggtgggcgttgtcgtgtccagcggcg

SEQ ID NO: 418303 - DNA, 427 bp, Oryza sativa
gtttgtattgtagattgacaatggcctcttgtctgtcagtcctgttgctcttgtgtctagcacttgcaggttcagtctccgggcaacaactgtcggctacattctattcgaggtcgtgcccgagagctctggccatcatcagggccggcgtgagagctgcggtggcgcaggagcctcgcatgggggcgtcactgctcaggcttcacttccatgactgctttgtccaagcaagtcgtgcatttccacactacttgacttacatttttatatccatcagtcaattacattgtggtcgcagcctttgcagtttcagttctttacactctttcagtctctcttccagtttaatgtgctgcgtcagaacagaatggactcgtagcactgtgttgacgttggattagagagactatggccaccgaatttgctc

SEQ ID NO: 418304 - DNA, 415 bp, Oryza sativa
gagttagagtgagacgtgactgttgacgttttttttttatcaacgcaagatcaccggacgatttacggtgcaatcaattacaccgcaaaacagtgacatggagctcaacaaggcggtggccgtggcggcggcggcgatggtcgccgtggtggcaatggtggcggcgccggcgtcggggcaggcggtggcggcgtcgtgcacggcgtcgctgatcaccagcttcacgccgtgcttcaacttcatcaccagcagcagcggcggcggcggcggcaacggcacggccgccggcggcggcgcgccgacggcggagtgctgccagtcggtggcggcgatgatcaacacgagcgccagctgcgcctgcctcgtgctcaccggcaacgtgcccctcggcatccccatcaaccggacgctagcc

SEQ ID NO: 418305 - DNA, 485 bp, Oryza sativa
tgatttttaggttagtgtaaatagtagcagtagttgaggaagcttcggcatcctaaggacctcctgtgaagatgtcgtctgctgccattgccattagcccgatggtggaagagtttgctctcctgcccatctgcttcgacggcagccggtcgccccactgtttgtccgggtcacagctgcaggattcgattatcatctttcttgctgtgcctggtgccccaccgatgccgatgagtgtgctcggctcggagtccatcgcctcggtcaagctgcgcattcagcggttcaaggggttcgtggttaacaagcagaggcttgtgcttgatgggcacgagctggcaaggaacaactgccatgtgaaggattatgggcttgccgatggaaatgttctgcaccttgttatccgcttggctgatcttcgcttgattaacatcgagactaccagtggaaagaagtttcagttccaggtggacccgagccgcaat

SEQ ID NO: 418306 - DNA, 430 bp, Oryza sativa
gttcgtgttgccctttttttttttttttttgctacaaacaaatgaaatcatttagtccattgaagagtggcttgtcaacatacttacaccaaactgactggatacagctgaacaactagatcagttattctgggtttctaagcgaacttcttgtcgaggtgacggtctatgatttcagatacggtttctaagaagattacttcacttgaccctgggagaacatggccctcggcttcctggacgatgtcctcaatctcagagtctctattcacagtttccctgcacagtatacgcccgatgtcatacggtgtgaggcctcgtgctgcacctttctttaaaagcatggtgctgatgcacaggacacgagcacatcttgcagacagctcccacccatggaacttgagaagcttgatgtcctcttcagcgtcta

SEQ ID NO: 418307 - DNA, 525 bp, Oryza sativa
ggccgcctcgatccgctccagctcgtcggggcggtcgggcttgtggtcggaggatagctgcacgggcgcgccgccgcggcagagcacggcgcgggagtcgccgcagttggcgacgacgacgcggctctcctccacgacggccaccaccgcggtggaccccacgtggtcgcacttctgcccctcgcaccggcagctgccgctctcggctcggcagccggcgatcacctcggcgtccatcctcgcgaagctccgctccatcgtctccgtccaagacgccggctcgcgcgccgccgccgccggtgacccggcgccaatctccttcgcgacgagctcgtgcatccgctccctgcacgcgtccgccacgtgcgagcagccgtgcccgtcgaacaccccgtagaagtcacacctcgccgtcgcaaccttcccgttcgccggtgcggcgaacgcctcgcgcagcgacacggtgttctacatcttcttcttctcccgcgaccggacgcgcccgtgccgtttggcacaccacca

SEQ ID NO: 418308 - DNA, 440 bp, Oryza sativa
ggaaacacaactcattttttattgatatatgtgggatgaatccaataaaaccgatccaagtcacgaaaaatcagactagatgaatccttcgagatcacatgagcaaaagctttcgacgaaagctgtcctatagtcggggaagcaataacccttgataaagatgggaattcaaacccgaggggttgcaaactataagatgtcatcaaatttccttgaacgccgggaagagatcaccgttgatgtagccgttgcccacaagactaaccaagaagtggcttttctggaccttggctaggatctccctagatgagccgccctcagggaacaggcaagcccaaccctttgaccaaatttcgaaaggtttgtttttccaaaccataaagctggctgagtcaacgacaggtggctggactatttccttgccagggaaaacaccccat

SEQ ID NO: 418309 - DNA, 425 bp, Oryza sativa
tcggtcgcagcagcagcatcaggggaagggtctagaagcttctagaagcttcttccgagatgaaggtgatcgagaagatccaggaggcggcggcggatgggcggacggtgttctcgttcgagtacttcccgcccaagacggaggaggggctcgacaacctgttcgagcggatggatcgcatggtggcgcacggccccaacttctgcgacatcacctggggcgccgggggatccaccgtcgacctcaccctcgagatcgccaaccggatgcagaacatggtgtgtgtggaaacaatgatgcacctgacatgcaccaatatgccagttgagaagattgatgatgccttaacaacaataaagtctaatgggattcaaaatgttctggctcttaagggtgatcctcacatggtcaggacaaatttgttc

SEQ ID NO: 418310 - DNA, 500 bp, Oryza sativa
tttttgttttttttgattagggatcacttattcattatagttcttccatgctgctctaccacagcaaaacgtttcagacaccatcaaaccagacttaaggatacacattacaggtaaatagtacacaatgaaacgggacacgaccaaggaccagaccagacaaccatagctccattggggaagacaaataggcagacttgtgaaccctagaacagcagcagctccatggctgaggacttactggccaccacggaggcggagcaccaggtggagtgtggactccttctggatgttgtaatccgcaagggtgcggccatcctcaagctgcttaccagcaaagatcagacgctgctggtccggggggatgccctccttgtcctggatcttcgccttcacgttgtcaatagtgtcggacgactcaacctcaagggtaatggtcttgccagtcagggtcttcacgaagatctgcatcccacccctgagcctgagaaccaggtgaa

SEQ ID NO: 418311 - DNA, 428 bp, Oryza sativa
ttcgtttgaggtcgagtcctcggacacgatcgacaacgtgaaggccaagatccaggacaaggagggcatccccccggaccagcagcgtctcatcttcgccggcaagcagctggaggacggccgcacccttgccgactacaacatccagaaggaatccaccctccaccttgtgcttaggctcaggggaggtatgcagatcttcgtcaagaccctgactggcaagaccatcacacttgaggtcgagtcctcggacacgatcgacaatgtgaaggccaagatccaggacaaggagggcatccccccggaccagcagcgtctcatcttcgctggcaagcagctggaggacggccgcacccttgccgactacaacatccagaaggagtccaccctccaccttgtgctcaggctcaggggtggtatgcagatct

SEQ ID NO: 418312 - DNA, 476 bp, Oryza sativa
acgccgtgatggtgccgtacccggcgcagggccacgttacgcccaatgctgacgctggctgagctgatctcctaccgtggttttgacgttaccttcggcaacaacgagatcaaccaccgaggactcctccgtgcacgcggagcccgggcgctggacggggggcacggataacgatacgccggcatggacgacgggctcccggcatacgacgccaacgccagccaggacaagccggccctctgtcactacgtacggaccacctgggttcccagggtcatgtcgctcgtagacaagctcgacgaccaggccgtcgccgccggcgacagggacggagcggcccggcacgggatctgcgtggtcgtcgacaggcacatggacgtcggcatgcacgccatgcgggagcttggacttcggtgtaccacgctctggaccggcagggcgtgcgggttcatgggctactaccactacaaacacct

SEQ ID NO: 418313 - DNA, 371 bp, Oryza sativa
agcgcggcaataaaacattgcattgaattctgaacgataaacaccaggaaccggcgtttatttgaggcaagcactgcccaaaatcttgcaaaagtactgaaaccttagacatagtacacatccatggcaaacatggatgccaaatgacaactacagaaaattatcaaattcgaatgcagctgacggcttctcctgctgaagatgcatattttcccctccattacttggatgggctctctccatcgacagccaatgggacggcgctggccaggctgcggtatttcagagcatagaacatctcaatgtaacggcgagtctcgcgcctctcaaggttggttacgtacttccagaatccgtatacaccagtcaag

SEQ ID NO: 418314 - DNA, 425 bp, Oryza sativa
gttcctgaaattgagtcatggctgccaagctagctcgcctccacagtctccgcgaacgcctcggtgccaccttctcgtctcatcccaatgagttgattgcactcttctctaggtatgttaaccagggaaagggaatgctccagcgtcaccagctgcttgcggagttcgatgccttgatcgaagctgacaaagagaaatatgctccctttgaagacattctccgggctgctcaggaagccattgtgctgccgccctgggttgcactggccatcaggccaaggcctggtgtctgggactacattcgggtgaatgtaagtgagttggcagtggaagagctgagtgtttctgagtacttggcattcaaggaacagcttgttgatggacacaccaacagcaactttgttcttgagcttgattttgagccc

SEQ ID NO: 418315 - DNA, 541 bp, Oryza sativa
gaataaaatataaatatttacattattcatactgcaaataaggagaagtgcacctgtgccaatcaaagttcccacgcaaacaccaagaaatatagccttgaaggcgtgcccaagcgcattgagcagtgctccagtgctagagagacatcaatccgtggtgtttgtcgaaggcgttcattggcaaagcaaatcccaggagaatgatagatacatccaacccctgaagtataatcttgaagtaaacttgacagatcaagtaacaccatgaggaaataaacgagcatcgctcctctagaaccgccatcagattttggtgatcttgtcagctttcacaagaggattctgtttggcaatctgctccctcccgacctgcttgtaatcaaatgtgcatttgtgtgaatcggcatagcggtgcattgaacagaaggtgcctccgcagcggcacttgaatcctgtcaacccaaccttctttcggcatgataagcaacggttactgggtggctttgtggatcctcctccttacttgttcccactgcactga

SEQ ID NO: 418316 - DNA, 532 bp, Oryza sativa
ctttgcctcgttcgtcctccggttttctccgcagtttcttgatccatccgcctttcctctcgcagccgtcggcggggggagtggttagttggttactggcttgcagagttttcagagagatttaggcaatggcggaatcaggccaatcgattgcgagtgatgtgactgcactgatcggcaatactcccctggtgtacctgaacaaggtggtggatggatgtgaggcccaaatcgctgccaagcttgagatcatggagccctgctccagtgtcaaggataggattggttatagcatgattacagatgcagaagagaagggtctcattactccaggaaagagtgttttgattgagcctactagtggaaatactggtattggccttgctttcatggctgctgccaagggttataagctaatcctgacaatgccagcatccatgagcatggaaaggaggatcattcttaaggccttcggtgccgagttggtccttaccgatccacttctggcatgaaggtgcatccagaagcatat

SEQ ID NO: 418317 - DNA, 401 bp, Oryza sativa
ccatggaagcttcagtagctaagatacacatttcagtatggaagaaagtacacatatgaactgctcatataacaccaggaaagctgatcgaatccccagactttgattgatgtatgtaagttctttattcagatcaagcgactacatgatggcaagtgcgaccaacatgaagaaatgcactcgggacgccattctctccaagccccctaaaccatggaagcacaatttgcacaatgctggagccgttcatggctcgaacaccatgttttcggcctccctcttgatcgattcgaagaggacagacgacaggtagcgctcaccgaagctcgggaagaccacaactacgagcttccctttgttctcgggccgctgcgcgaccctgatggcagcgactgcagcag

SEQ ID NO: 418318 - DNA, 486 bp, Oryza sativa
gatgtaaacataccaattcacactggtaaaaccctgagtacgtacgtaatcacctagatatagccctattggcacatacagatgagacaggcgcccgtgaccaagttttgatgtcacgtataccttattgcacagatcggaaagctacaagcccacaagaggacaccgtgatttcagaaagggaaaagaagagaatacatagactgcacaagccgttctcgtgcatttgctagcagcagcttggctctagatgagatagcggtagatcatcttaattaatcttaattcttaattagttgcaggactccttggcgaagccgacgcgggagttggcgacgtcgaagacgacccggatgttctgctgctgcaggttggcgatgacgttgacgacggagttgacgttctgcggcgcctcggccatggcgaggcaggccagcggcgtggcgctgctgtggatgagcgtgttctccatcggcagcgccaggt

SEQ ID NO: 418319 - DNA, 421 bp, Oryza sativa
gttcgcgtgggtgaaggtccccgcgggatcgttcgcgttcgacgccgccaccggcgccggcacggtggtggactccggcacggtgatcacgcggtggacggcgccggtgtacgcggtgctgcgggaggagttccggcggcaggtagcggcgccgagcgggtacacgtcgctgggcgcgttcgacacgtgcttcaacaccgacgaggtggccgccggcggagcccccgcggtgacggtgcacatggacggctgcgtggacctggcgctgccgatggagaacacgcttatgcacaggagtgccacgccgctggcctgcctcgccatggccgatgcgccgcataacgtcaactgccgtgtcaacgtcattgccaacctgcagcagcagaacatccgggtcgtttttgacgttgtcaactcccgt

SEQ ID NO: 418320 - DNA, 430 bp, Oryza sativa
ttggtttcacaccactactctcacaacaatggcgaggagcgtagccgtggtggtgttgctggcgatggcggcggtggcggcggcgcaggcgccgggtcccgctgcgacgccggcggcgggcgccacggggccgccgaacgtgacggcggtcctggagaagggagggcagtacacgacgttcatccggctgatgaaggagacgcagcaggacacgcagctgaacagccagctgaacaactccttcaacggcaacggctacaccgtgttcgcgcctaccgacaacgccttcaacaacctcaagccgggcaccctcaacagcctgacgcagcagcagcaggtggcgctcgttcagggccacgttctcccgcagttctactccatggactccttccagacggccagcaaccccgtccgcacccaggcgttcggc

SEQ ID NO: 418321 - DNA, 417 bp, Oryza sativa
actccagaccaaacaattacttcaaaattcttaacttcatcatcaagaccaaacaaagcaaacgcatagactcaaaaacattcatttctcatcagaaagcaaatatgcagctggcaagtaatcccaacaaactattcagaatatctgccattgacacaggctaggatgttcacgatccacaactagatagctgtttacttggtgtctaaataaacgggcagcaaaataagggataatctctactcggcagcagcgacctcctgcccggccatggcctcatcttctgcaggcctatcaagcttcgtaccgatgtcctccttggcatagtcaccatgcacctccatgagcttccccaggtcaaatttcggggcctttagaatcttcactttgcggacaaacacattctgaagggggaaa

SEQ ID NO: 418322 - DNA, 431 bp, Oryza sativa
ttcgttttctcgcgccgccgccgccgccgagcgcctggagcagcgtcagccatggccgtaggtaagaacaagcgcatctccaaggggaagaagggatccaagaagaagaccgtcgatccctttgctaagaaggactggtatgatatcaaggccccgtcggtgttcaatgtgcggaacatcggcaagaccctcgtgtccaggacacagggtacaaagattgcttctgagggcctaaagcatagagtgtttgaggtctccttagctgatctccagaacgatgaggatcaggcgtacaggaagatcagacttcgtgctgaggatgtgcaagggaagaacgtgctcaccaacttttggggcatgtcgtttactaccgataagctcagatcacttgttaagaagtggcagacactgattgaggctcatgtggatgt

SEQ ID NO: 418323 - DNA, 550 bp, Oryza sativa
tttttgttttttttttttttttttttactccagaccaaacaattacttcaaaattcttaacttcatcatcaagaccaaacaaagcaaacgcatagactcaaaaacattcatttctcatcagaaagcaaatatgcagctggcaagtaatcccaacaaactattcagaatatctgccattgacacaggctaggatgttcacgatccacaactagatagctgtttacttggtgtctaaataaacgggcagcaaaataagggataatctctactcggcagcagcgacctcctgcccggccatggcctcatcttctgcaggcctatcaagcttcgtaccgatgtcctccttggcatagtcaccatgcacctccatgagcttccccaggtcaaatttcggggcctttagaatcttcactttgcggacaaacacattctgaagggggaaaatactggatgtcgccttctcaatttccttcccaataactttaggaatgaactttgaaactagctctttcaaatcacagcttgaagcctggttggccatgatttcaac

SEQ ID NO: 418324 - DNA, 427 bp, Oryza sativa
tcgctctctcgcgccgccgccgccgccgagcgcctggagcagcgtcagccatggccgtaggtaagaacaagcgcatctccaaggggaagaagggatccaagaagaagaccgtcgatccctttgctaagaaggactggtatgatatcaaggccccgtcggtgttcaatgtgcggaacatcggcaagaccctcgtgtccaggacacagggtacaaagattgcttctgagggcctaaagcatagagtgtttgaggtctccttagctgatctccagaacgatgaggatcaggcgtacaggaagatcagacttcgtgctgaggatgtgcaagggaagaacgtgctcaccaacttttggggcatgtcgtttactaccgataagctcagatcacttgttaagaagtggcagacactgattgaggctcatgtgga

SEQ ID NO: 418325 - DNA, 439 bp, Oryza sativa
tgttgctagcagaagtccaggtggacaagaacgcgaggaggggaagaatcatccccgagatctcgctgccgctgctcatggcgttcgcggcgtcccacaccgcatcgccgtcctcctgcggcggcgtggcgcagaggaggagcaatgggatgtcgccggtggtggccatggcctccaccatcaacagggtcaagactgctaagaagccctacactcctccacgtgaagttcatctccaagtcaagcattcactgccaccccaaaagcgggagattttcgattcgcttcaaccttgggccaaagagaaccttttgaacctcctgaagccagttgagaagtcatggcagccacaggactttctgccagacccttcttccgatgggttttatgatgaagtaaaagagctgcgggagagggctaaagagatccctgatgacta

SEQ ID NO: 418326 - DNA, 437 bp, Oryza sativa
gtctcttttaaccgcataatatggagtcctgatggaaccttgtttggtgttgcttattcaaggcatattgtacagatctattcataccatggcggtgatgatatcaggcagcacttggagattgatgcgcatgtcggtggtgtaaatgacattgcatttgcccatccaaataagcagctatgtataataacctgcggagatgacaagacaattaaggtctgggaggccactagtggagcaaagcaatttacatttgaaggtcatgaagctcctgtttactctgtttgtccacattataaggaaaatattcagttcatcttctcaactgctttggatggaaagataaaggcttggctatatgataatttgggatccagaggtgactatgatgcgccaggacattggtgcacaacaatggcatatagtgcagatggttc

SEQ ID NO: 418327 - DNA, 542 bp, Oryza sativa
  unsure (1)..(542): unsure at all n locations
gtcttcaaggcatttattgatttagtgaattccttgtaagattttctggtaggcatcataaatgtttgttcgccaattatcgcttgattctacaataagactttttacaagggtttcaatttttgctttgttatcttctaaatgaaatcttttacgcaaattctttaggagagaatcaccatttaaacagggcaaaaattggccacccattataggtaacgtcagggtcatttgtactaatgttaatatctttcggtaatgttttctaattgcgaaaaaaccttgaacacataattcttcatattttgcaaataacttggacttttctcctcctaatacatcaataatttcttctgtgagtttgaaaggagccttttcaaactcaacagttcttgacaataaatatccaaaatctatatgtaacaaattgccataagaatctatcattatattaccattgngtctaaataagtcaatagggttaataattaaaaatacatacctgcttttatctgtaaaaaataacatacttatgagtaagc

SEQ ID NO: 418328 - DNA, 452 bp, Oryza sativa
ttgttcccaacacattgtttatagacaaattaaagcagaaactcgaagaaggtacttctctgagaaaattttttaaacaggtattctactttgtattaattacttttaatgttcctttcagcaatggccagataaagcagattttaacaaagcaatgacaaatttcgttcagtctttagccgcttactcattagtatgttattttttacagataaaagacaggtatgtatttttaattattaaccctattgacttatttagacacaatggtaatataatgatagattcttatggcaatttgttacatatagattttggatatttattgtcaagaactgttgagtttgaaaaggctcctttcaaactcacagaagaaattattgatgtattaggaggagaaaagtccaagttatttgcaaaatatgaagaattatgtgttcagggtttttcgc

SEQ ID NO: 418329 - DNA, 562 bp, Oryza sativa
caagtaaacatggctatttttattcaagctgagctgaccctaacctgggcctcgctctccagtctcctaatttctagtttttaatctcctttctttctttttgccacgcaattgtactaatacctaccagaatgattgagcacaaagcataattacatacattgaaacattcatcattttgttcacttcaagtcagaataggccacattgtttgacatgacatgagcgccggtagttggttcctctatctctgtacacatgtgttgtattgttgtatgctgtcaggagtcaagtagatggtgcccaacgttgcgatcatcagtgcagtaggcagcagtagtaagtttgttaatccccaaggacaggaactattgcggatttcagttcaatgtgcgaaacacgaactgcaccgatcagtcgttctgggagctcctcatatgtatttccctggacaagaaaagccatgtcaacaactagtgtcgtgatcacaccacacactagccccaagactccatttgcaaccgtagatgaaccgatgtccacatctatttctaaataattg

SEQ ID NO: 418330 - DNA, 427 bp, Oryza sativa
gtttgtccgtcaaagtgttggcagcacaccttgtctgctgggaaaagcagttgacattacctatatccgtggtccaaattatttagaaatagatgtggacatcggttcatctacggttgcaaatggagtcttggggctagtgtgtggtgtgatcacgacactagttgttgacatggcttttcttgtccagggaaatacatatgaggagctcccagaacgactgatcggtgcagttcgtgtttcgcacattgaactgaaatccgcaatagttcctgtccttggggattaacaaacttactactgctgcctactgcactgatgatcgcaacgttgggcaccatctacttgactcctgacagcatacaacaatacaacacatgtgtacagagatagaggaaccaactaccggcgctcatgtcatgtcaaa

SEQ ID NO: 418331 - DNA, 439 bp, Oryza sativa; identical to SEQ ID NO: 394777

SEQ ID NO: 418332 - DNA, 512 bp, Oryza sativa
cctttccccgggatctcctcttctattccttttcttccatcgccataagagcagccgcagatcgaattgcattgcagtctttgcagatttcagcttaattgccggacagtgaagtgaaagcatcttcaagggcgtggaagctctctgagattccaaagggtcacaaggcaggggatgagtacaaccaaagtgaagagacgtgtgggaaagtatgagctaggaagaacaatcggagagggcacattcgcgaaggtcaagttcgcgagggataccgagaccggtgatccagtagccatcaagatcctagacaaggagaaagttctcaagcataagatggtcgaacagattaaaagggaaatttcgacgatgaagttgattaagcacccaaatgttgtccgtatatatgaggtgatgggaagcaagacaaatatctacattgttttagaatatgttaccggtggtgagctctttgatacaattgttaaccatggtcgtatgagggaagatgaggc

SEQ ID NO: 418333 - DNA, 454 bp, Oryza sativa
  unsure (1)..(454): unsure at all n locations
cgttcatctcttctcttccagcaaggaagcagcagagaagacaatggcagcatcggccatgaagctcgccatggcggtggcgtgcgcgctggcgctcgcgtcggcgtgccacggcctgcagctgggctactacaagcagtcgtgcccccgcgtggaggccatcgtgagggacgaggtgaagaagttcgtctacaaggacgccggcatcggcgccggactcatccgcctcgtcttccacgactgcttcgtcgagggatgtgatggctcggtgctcctggacccaactccggcgaacccgaagccggagaagctcagcccgcccaacatgcccagcctccgcggcttcgaggtgatcgacgccgccaaggacgccgtcgagaaggtctgcccggcgtggtctcgtgcgccgacatcgtcgccttcgccggccgcgacgccgnctactttctcagca

SEQ ID NO: 418334 - DNA, 489 bp, Oryza sativa
  unsure (1)..(489): unsure at all n locations
atttttctgacagcgagattattccatcttctcgcgccaaatcaaatcaaacttcagtactaggttcgatcggttggaaatcaatggagaccgccacgtncaagcctcattttgtgctcgtcccatggataggtagcatcagccacatcctccccatgactgacatcggctgcctcctcgcctcgcacggagcgccggtgaccatcatcacgacgccggtgaactcgccactcgtccagagccgcgtggaccgtgccacgccacacggcgcggggatcacggtgaccacgatcccgttcccggccgccgaggccggcctgccggagggctgcgagaggctggacctgatcccgtctccggccatggtgcctggcttcttccgcgccagcanagggttcgangaggccgtggcgcggcactgccgtccgcaggatgctcgttcccgccgccggncgagctgcatcatcgcggngatgtgccacacgtggg

SEQ ID NO: 418335 - DNA, 377 bp, Oryza sativa
gctttttgtgagcgggcgacctttccatttttttgcgccaaatcaacacaaacttctgaactatggctgcccaggttggaaatcaatggagaccgtcacgtccatgcctcattttgcgctcgtcctatggataggtagcatcagccacatcctccccatgactgacatcggctgcctcctcgtctcgcacggagcgccggtgaccatcatcacgacgccggagaactcgccactcgtccagagccgcgtggaccgtgccacgccacacggcgcggggatcacggtgaccacgatcccgttcccggacgcctaggccggtctgccggagggctgcgagaggctggacctgatcccgtctacggtcatggtgcctggct

SEQ ID NO: 418336 - DNA, 519 bp, Oryza sativa
tttaaagctccccggccggaggaggagcggtcttacgccgccgaggtgcgccgtccggggagccgggaacgtgtcgtcggcggcggtgcgggagatggcggtcgcggaggggcggcggcagcatgagtactccatcgacgcacgcctccggcagctcgcgccggagaaggtgtccgccgacgaccgcctcgtcgactacgagaccctcctcgtcgcgcgcttcctcgacatcctcgaggacctccacggcggcgacttcagacaagtggtggaggattgcctgaggctgtccgaggagtaccagagcgagggcgacccggcgaggctgggcgagctgggcggcctcctgacgagcctggacgtgggcgacgccatcatggtggcgagctccttctcccacatgctcaacctggccaacctcgccgaggagatccagatggtgtaccgcaagaaggcggaggcgagccggcgcggggacttcgtcgacgaggccttcgcgcccaccgagtccgacatcga

SEQ ID NO: 418337 - DNA, 522 bp, Oryza sativa
tttagactcagagaggaggcgtgttggttagctcattggcagcagcacacacaaaccacatctcctatatatagctcatttttagcttttggaatttgagagaggttttgagagaaatggctagccaaggtgtagcctccatgttcgctctcgcattgctcctcggtgcctttgcctccattcctcaaaaggcggaggcgatcggggtgtgctacggcatgagcgcgaacaacctgccgccggcgagctcggtggtggggatgtaccgctccaacggcatcacgtcgatgcggctgtacgcgccggaccaggcggcgctgcagtcggtgggcggcacggggatcagcgtcgtcgtcggcgcgcccaacgacgtgctctccaaccttgccgccagccccgccgcggaggcgtcgtgggtgcggaacaacattcaggcctacccgtcggtgtcgttcccgtacgtcgccgtcgggaacgaggtcgccggcagcgccacgtccagtctggtccccgccatggaga

SEQ ID NO: 418338 - DNA, 521 bp, Oryza sativa
gtcaaaagcaagagaaagaggggggggttgtgttgtgagcagcgatggcggcgaaacgcgggagcgagtcggacggcgacgagctcggcggcggcggcgccgccgagggaaccagccccaacgacgggggcgcgtctccgcctcccctcgccgccgcgcccgccgtatgcttcatccgctccgccggagacttcgccggtggcgccttcatcggatctatcgtcggatatggacaaggtttgttcactaagaagggatttaagggctcattcagcaccgcagggtcttctgccaagacttttgcagttctctctggcgtccagagtctggttgtgtgcttgttgagaaggctgcgcggcaaagatgacattggtaatgctgggatagctggttggtgcactggccttgctttgagctttccaggaacaccacaagccttgctccaaagctgtgcaacctttgcagcattctcatgcatcatggaggggctcaacaaacagcaggctgcaatggcacagaca

SEQ ID NO: 418339 - DNA, 451 bp, Oryza sativa
tttgcattgggagagggggagatgagcggcccaatgcaacgctcgtcgcagccacagtttatctctagcgtcgagcggaacaatcaatcgaatggtcctggcactcctcttattgacagcatagatgttgatcagattgttattccagagaaaaatagttggaagaacctattttcatacatagggcccggatttcttgtctctattgcgtatattgatcctggaaattttgagacagacctacaggctggagcacagtacaaatatgagcttctttggatcatacttattgcgtcatgtgctgctcttataattcaatcacttgcagctaggctaggaagtcgtgactgggaagcacctggccgagcattgcagagctgaatatccaaaggctacaaatttcatattatggattcttgcggaactagctggagttgcatgcgacattcct

SEQ ID NO: 418340 - DNA, 509 bp, Oryza sativa
atgtaagcaagcagccgctcggagcgaagactgaggcggcggcgaccatggcggggctcgcgcacctcgtcctcgccctcctcctccccctcgcgctgctcccgccggccgcgcgcggcacggaggagacgccgcagtacacgacggtgcacgccgagtccgacttcgaggtgcgccgctaccgcgacaccgtctggatgtccgccccctccgacgacatcttcttccacgtcgccaccaagctcggattccaccgattgttccagtacctgatgggcgcgaaccttaactcctccaggatcaggatgacaactcccatcctaactagcatcgtcccaggtgcagggccgctacactcgtctgcctactttgtgcggctctacttaccagcgaagttccaggcttcccctcctgtgcctctccccgaactgaacctccacccggataggtggccaagccactgcattgcagagaggagcttctcgggttatgcacgggacaacaatgtc

SEQ ID NO: 418341 - DNA, 464 bp, Oryza sativa
ggaaatctgtataaaatatggtcccatttaattcaatggcgcaagcaggaagtatcccccctcatggctgagtcccagccaacaaaaataaagtatgtccaccccaaaaaaatcgccccagttacaacaaatgattcgattattgtaaaagacacaatagtaccaccacggcaacatttaagctaggataacttggtttaaacttttgtctaccaaaaccaactaccgatagtgtaagcagctggaacgttattatctccactcgagcaaatgataactccgcatattaacctccaactgaagaccttatattccaatctgcttctcgaacttctggatttgattcaagaatatccatgtcatcatcacatggggagcaatcctgacacagtacacagggaagccagtgtagaacttgaatgggccaccgctcttgaaggtcttcatggcacagtccaaagaac

SEQ ID NO: 418342 - DNA, 530 bp, Oryza sativa
cttttgatattttctctccccctgctcccgtcgccatcgcaaaggagaaaaaaaaaagaggaggaaggaaggaaggatgagcgccacggcggtgtcgtcgctgaacccggacgcgccgctcttcatcccggcggcgttccggcaggtggaggacttctcgccgcagtggtgggacctcgtcaagaccaccgcctggttccgcgaccactggttccacgagcaccagcagctcgacgagatggccgactccctcgccctccacgacgccgccgccgacgacgacgacctcgccggcctcctccccgacgacgccttcgacgacgacgacgacgacgacctcttcttcgaccagacccataacctcctcgtcgatcccccgcagccgcccgccgctctcaagactgatgcggtgctcaaggcgctgagcctggtgtctcccaagggcggcgacgcgccgcgggggctccgggagaagccccggcactccgagaagcccaccaagtacgccggcagcccgaggagcggcggcg

SEQ ID NO: 418343 - DNA, 448 bp, Oryza sativa
ggcaatgattcagagttccatacacagcggaattagacggcgacgatattacaacgggtttatgtccagatcagataaacgccgatgctctctgcaccccacttacacttcatagaggctatgaaaaacagcacgggatttttatacagtttacggcaaaaaggaaggctactagcttactgctactggtggtcgttcgcttcggtttttacttcctactgaagaggttgcgcagcttgcctcgctcaagcttctcgagcagcttcttggcgccggcgacgtccatctcggagagcttcttgaggtagccaatggcgccgtgcgagatcatcagcttcttgcagcgcttgctcgccgacagcgtgaggaggcaggagatggcgtacttcttggccgtgttctgggggctcggctccagcagctgcaccaggttggggacgctcttctc

SEQ ID NO: 418344 - DNA, 484 bp, Oryza sativa
  unsure (1)..(484): unsure at all n locations
accttctcctccggctcttcttcagtatcgaatcctctcttctcctcgtgcccaccaccaccaccgtagcaatggcgggcaacgggccgatcaacaaggaggacccgctcaactggggcgcggcggcggccgagatggccggcagccacctcgacgaggtgaagcgcatggtggcgcagttccgcgagccgctggtcaagatccagggcgccaccctccgcgtcggccaggtggccgccgtcgcccaggccaaggacgccgccggcgtcgccgtcgagctcgacgaggaggcccgcccccgcgtcaaggccagcagcgagtggatcctcaactgcatcgcccacggcggcgacatctacggcgtcaccaccggcttcggcggcaccttccaccgncgcaccaaggacggncccgccctccaagtcgagctcctcaggcatctcaacgccggaatcttcggcactggctccgatggccacacgct

SEQ ID NO: 418345 - DNA, 531 bp, Oryza sativa
  unsure (1)..(531): unsure at all n locations
tgtgggcagcatgtcgtcaccgcatccgccgccgacgtggccatcctcatccatgacgccgctgcggtcgccgccgccggtggccggagctcgggctccgcggctgcggcggcgctttccacgatccggcttcacaaggatggcgtcacggcgctcgccgtcgcgccgggctccggcgcgtcgctggcgtccggctccatcgatcactccgtcaagttctgttctttcccagagggggtgttccagagcaatatcgcccggttcaccctgccgatccggtcactggccttcaacaagaaggggactctgctggcggcggccggagacgacgacggcatcaagttgattgccaccatcgacaacaccatctccaaagtgctcaagggccacaagggatcggtaaccgggttgtctttcgatcccagaaacgattatttggcatcaattgacaccttcggcacagtcatcttctgggatctctgcacggngactgaagccccgagtctggagcggattgcgccgacatttggt

SEQ ID NO: 418346 - DNA, 491 bp, Oryza sativa
ctttgaggtgggttggtttctcctccccctctttaccttttcctcctcggttcggttccgtggttcgtctagggtttagtgggttgagatggcggcgccggatgtcgagtaccgctgcttcgtcggcggcctcgcctgggccaccgacgaccgctccctcgaggccgccttctccacctacggcgagatcctcgactccaagatcatcaacgacagggagacggggaggtcacgtgggtttggcttcgtcaccttctcctccgagcagtcgatgcgcgacgccatcgagggcatgaacggcaaggagctcgacggccgcaacatcaccgtcaatgaggcccagtcccgccgctccggcggcggaggcgggggctacggcggcggcggtggcggctacggcggcggtcgtggaggcggcggctacggaggaggtggcggcggcggctactggcgccgtgagggcggctacggtggcggcggcggctacggcg

SEQ ID NO: 418347 - DNA, 483 bp, Oryza sativa
  unsure (1)..(483): unsure at all n locations
ttggtcgcttgcttgtgctttgctttgctaggacgagaagaaaagaaaagcggcgagagctaagcgaggaaggatgcgtggggcgtcggcattggcatctctcgtcgccgcggcggcggtggcgctgctcctcctcatcgacggctgcggcggcgccatgtacaaggttggcgacctcgacgcctggggcatcccgccgccgtccaagcccgacgtctactcgcgctgggccaaatccatccacttcgcgctcggcgactccatctggtttctgtacccgccgagccaggactcggtggtgcaggtgacgccggtggcgttcgccgcctgccaggcgtcggacccggtgctgaagctcgacgacggcaactccgtcttcaacctcaccacgcccggccgcgtctactacatcagcgccgcgctgggacactngccggagggccagaggctggccgtcgacgtgcccatggccaacggcaccta

SEQ ID NO: 418348 - DNA, 537 bp, Oryza sativa
ttcaaccacacacgcacgacacgaagaacgccatggcgaagcaggcgtggagctcgctgttcgggtgcttcacctcgcaccacgacggcggcggcaagaggaagaaaggcggcggcggcgggaagaaggcgaagaagaaggtggcggcggcggcgagccagaagcagcggaagctgcagagccggctgtcgttctccgacctgtcgttcggagggatggtgtcgccggaggacctgtcgctgtcgctggccgggtcgaacctccacgtcttcaccatcgccgagctccgcgccgtcaccagggacttctccatgaccaacttcatcggcgagggcggcttcggccctgtctacaagggctacgtcgacgacaagctcaagcccggcctacgcgcgcagcccgtcgccgtcaagctcctcgacctcgagggcacacagggacacaacgagtggctgactgaagtcatctttctggggcaactgaggcatcctcacctcgtcaaactgatcggctactgctacgaggatgaacacagac

SEQ ID NO: 418349 - DNA, 525 bp, Oryza sativa
ctccgtctcctcctcatggcgatctcgaaggcttggatctcgctgctgctcgcgctcgccgtggtgctgtcggcgccggcggcgagggcggaggaggcggcggctgcggaggaggggggcgatgcggcggcggaggccgtgctgacgcttgacgcggacggcttcgatgaggccgtcgccaagcacccgttcatggtcgtcgagttctacgccccgtggtgtggacactgcaagaagctcgctccagagtatgagaaagctgcacaagagctaagcaagcacgatccaccgattgttcttgccaaggttgatgccaacgacgagaagaacaagcctcttgctaccaagtatgagatccagggtttcccgacactcaagatattcaggaaccagggcaagaacattcaggaatacaagggcccgagggaggctgagggcattgttgaatacttgaagaagcaggttggtcctgcttccaggagatcaagtcaccagaagacgcaaccaaccttattgatgacaaga

SEQ ID NO: 418350 - DNA, 521 bp, Oryza sativa
tcccctccttcctcctttcttttcccctcctctcttcccccctctcacaagagagagagagcgccagactctccccaggtgaggattcagccatgaagggggccaaatccaagggcgccgccaagcccgacgccaagttggctgtgaagagtaagggcgcggagaagcccgccgccaagggcaggaaggggaaggccggcaaggaccccaacaagcccaagagggctccctccgctttcttcgtttttatggaggagttccgtaaggagttcaaggagaagaaccccaagaataaatctgtcgctgctgtaggaaaagcagccggtgataggtggaaatccctgaccgaagcggacaaggctccctatgtagccaaggccaacaagctcaaggccgagtacaacaaggccattgctgcctacaacaagggcgagagcactgccaagaaggcacccgccaagaggaagaggaggacgacgaggaggaatctgacagtccaagccgaggtaatgatgagatga

SEQ ID NO: 418351 - DNA, 470 bp, Oryza sativa
  unsure (1)..(470): unsure at all n locations
gtaccaccggcgccaaaccaaccacccaccatccaccggtcgaacacttggcgctctcgcccgccttagctcgctctgctcgtggtgctcgacccgaacaagaacggacatggctcccaggaacgccgccgaggccgtcgccgtcgccgtggcggagggcggaggagccggcatggagcccaggttccgcggcgtgaggaagcgcccgtggggcaggtacgcggcggagatccgcgacccggccaggaaggcgcgggtgtggctcggcaccttcgacaccgccgaggccgcggcgcgcgcctacgacagcgccgcgctccacttccgcgggcccaaggccaagaccaacttccccgtcgccttcgcgcacgcccaccaccacgccccgccgccgncgntgcccaaggcggcggcgctggccgtcgtcagcccgaccagcagcacggtcgagtcgtcctcccgggacacgc

SEQ ID NO: 418352 - DNA, 529 bp, Oryza sativa
ttccagctgatcaagagctcttaattagctagctagtgattagctgcgcttgtgatcgatcgatctcgggtacgtagcaatggcgtccaaggcgttcgctctgttcctggccgtgaacctcgtcgtgctcggggtggcaagcgcctgcggcggcagcccgtcgtgcccgacgccgacgccgtcgaccccgacaccgtcaacgccgacgccgacgccgtcggcgttcgggaggtgcccccgcgacgcgctgaagctgggcgtgtgcgccaacgtgctgggcctgatcaaggccaaggtgggcgtgcctccggcggagccgtgctgcccgctgctggaggggctcgtcgacctcgaggcggcggtgtgcctctgcacggccatcaggggcaacatcctcggaatcaacctcaacctccccatcgacctcagcctcatcctcaactactgcggcaagaccgtccccaccggcttcaagtgctaagcagcgtgcatatgcaatgcctgcatgggttgatcctacgtacggtga

SEQ ID NO: 418353 - DNA, 430 bp, Oryza sativa
tttctgtcagcacagctggccgaacttgatcttccagctgctgcttgcaccttgacacaacagcatcaggatgcagctctgcaaccaaaacgttgccgccaatgtgcggactgcggcccctcagcgcgctgcaaaggcctcccgcacagcagtgaggcctgtggcagcagctcaagtggaggcagtagcagcagatgcaagcaccagccagcaggcacctctgatgatccgtgctctgcgcggtgatgcagtcgagaggcctcctgtctggatgatgaggcaagctggccgttacatgaaggtgtaccaggacctctgcaagaagcacaccacattcagggagcgctcagagaatgtcgacctggccgttgagatctctctgcagcctttgcatgcgttcagcctgacggtgtgattctgttcagtgaca

SEQ ID NO: 418354 - DNA, 447 bp, Oryza sativa
  unsure (1)..(447): unsure at all n locations
ttcttgacaaccttcctctggtcgtcccgatcaggagtttgttggatgatcacgacgcgcccacatcttatcagcttggcgtccatgtcggcatcaagggccagtacgccgggagtaatgaggagaagcacttcatgtacaaccacttatcgtttctggtgaagtaccacagggatgagaacacggatcttgctaggatcgctgggtttgaggtcaaaccattcagtaccaagcatgaatatgatggcgaatggaaagagaatgagacccggctcaagacctgcgatccgcattcgcgacgcctcgtcagggactccgattcggctcaagaagtagaggccggcatagagatcatgttcacctatgatgttaactttgaggagagcgatatcatatgggcgncgtgacgggacagctacctgctgatgacggatgatcagattcact

SEQ ID NO: 418355 - DNA, 504 bp, Oryza sativa
  unsure (1)..(504): unsure at all n locations
ctctcactcccaaatcttatcctcaaattcagattcagagtcgtcgaaatcagtagtattcatcaggaatggagcggctgagctcatcggtgcagtcgtgggtggaggaacacaagctcgccagcatcggagggctgtgggcgacggcggtgggcgcatcggtggcgtacgggcggaggaagacgccgcagatgcggctgatccacgccaggcttcacgcgcaggccctcaccctcgccgtcctcggcggcgccgccctcgcgcaccactactacaacccatcatccaagaccaacaacagcagcagcttggactacgacttctactcgcagctgccgccggccaccaccgacgacgggcaggagaacgagaggtggagctggtagtgctacccttccttcctgctgcaagatgcagacaaatgaagatgatgacgatcacgatgatcaattagtaataatctaatcggctccattagntaaatttatctttatcttaataata

SEQ ID NO: 418356 - DNA, 516 bp, Oryza sativa
  unsure (1)..(516): unsure at all n locations
gtgacatctacggcgtcaccaccggcttcggcggcacctcccaccgccgcaccaaggacggccccgccctccaagtcgagctcctcaggcatctcaacgccggaatcttcggcactggctccgatggccacacgctgccgtcggagacggtgcgggcggccatgctcgtgcgcatcaacaccctcctccagggctactccggcatccggttcgagatcctcgaggccatcaccaagctgctcaacaccggcgtcacgccgtgcctgccgctccgtggcaccatcaccgcgtccggtgacctggttcccctgtcctacattgccggcctcatcaccggccgccccaacgcgcaggccatctcgcccgacggcaggaacgtggacgccgccgaggcgttcaagctcgccggcatcgagggtggcttcttcacgctgaaccccaaggaaggtctcgccatcgtcaatggcacgtccgtggngtcggcgctcgcggcaccgtgatgttcgacgccaacat

SEQ ID NO: 418357 - DNA, 469 bp, Oryza sativa
atttatacctctctgcagtgctgctgctgctagcttgcagaaaaaaaaaactctcatcttttgcaggaagagacatcactgtttctgcattcgtgtgcatttggattaagctttgcttatccctttttagtggagattgttgagtatatcaggtctatatattggcagctctggttggagatagacactcacactgagccaagatggggagtttgcacaagttcagtgttattctcctcatgttatgttttgctacgttggggagcgctcagtatgtcaagtataaggatccgaagcagcccgtctctgttcgtgtcaaggatctgctcggacggatgactctcgctgagaagattggccagatgacccaaatcgagagggagaatgccacggcggagcaaattgccaagtacttcataggtagtgtactgagtggtggaggcagtgtgcctgctcctcaggcatcagc

SEQ ID NO: 418358 - DNA, 246 bp, Oryza sativa
ctaaccgaccaggcggtcttattccccgagagaagaagaccgtagcggttaactagcgtattctttcggcgctgtgtgaatataagcatgctgcatatcatgtttatgttttccaaggcctgagatggcgcccgtctattttagctaggcaagaatatctcggaccattctctgttcgaattctcgtactgataagtgaacttctgctcccatataaaaatatcattggtcgtattgttttctagc

SEQ ID NO: 418359 - DNA, 438 bp, Oryza sativa
ggctcaaataaacacatgctgattaattattgaaaaccaaaccaacattattacaatatgcataatacctcacccacatcacacttactacatcacaggctgtattacttaattttacatcttagcttagcttagctagaactgagctagctagctaacttagctttagctcagctcaagaggaactgaggttgtttctgcgtagccttctctcctctgagagcttcttggcaaagcgagcgagtgcctcctcgttggtgccctctccatcaacgggctcgtatactccggtgtcgatgttcaccctcgccactcgcttagtcagaaggtccttgccgatcttgatcagtgcctccatgttctccttcgtcgcgatgtccaccgacgacgtgtgcccctccagcgaatcgtcctgaatacggaggtagctcttctcgc

SEQ ID NO: 418360 - DNA, 463 bp, Oryza sativa
ctttaacatctacgggggggtggtcgaagaggtggctgtccccatggacgcggaggccgccgcgcagttggacccgcacggcgggatgctcgccgcctccggcgctgtccagcccatggcgtccaaccaactcaccctctcgttccagggcgaggtctacgtcttcgactctgtctcccctgacaaggttcaagcagtgctcttgctactcggtggaagggagctgaacccaggtttgggctctggagcatcgtcatctgcgccatacagtaagaggttgaattttccacaccgggtggcatctttgatgcggttcagagaaaagcggaaggagcgcaactttgatagaagatccggttttctgttcggaggaagttgcacttaggatgcagcgcatagaggtcagtttacatcttcaaaaccaagggtgatgaagcaacatcggaattgacagcttcagatg

SEQ ID NO: 418361 - DNA, 213 bp, Oryza sativa
ctaatgacgaggtgtgttcgcatacgccgagagaagaagaccgtagcttttaactagcgtatttatccggcgatgtgtgtatatatgcatgctacataacatgtttatgttttccaaggcctgagatggcgcccgtctattttagcttggcaagaatatctcggaccagtctctgttcgaattctcgtactgataagtgaacttctgataaca

SEQ ID NO: 418362 - DNA, 430 bp, Oryza sativa
ttttgccggcctgcagaatctgaggtgcatgagtgtcacctcttgccctggggtcaccaatctcgcgcttgctgctatcgccaagttctgcccgagcttgaggcagctttccttcaggaagtgtggacacatgacggatgccggtctcaaggctttcacggaatcggcgaggttgttggagagcttgcagcttgaagagtgcaatggggttactcttgttggtattcttgatttcctcgtcaactgcggtccgaagttcaggtccctctctttggtgaagtgcatgggtatcaaggacatctgctctacgcctgcgcagcttcctctgtgcaaatcgcttcaattcctgaccatcaaggactgcccggatttcactgatgcaagcttggctgtggtggggatggtttgcccttacttggagcaggttgat

SEQ ID NO: 418363 - DNA, 500 bp, Oryza sativa
  unsure (1)..(500): unsure at all n locations
gtaagtgttagcaggaattgataccaacttcactgttacctcaaaggcgtccgatgaggatggtgactttgctgagctatacgtgttcaagtggaccagtctcctcattcccccgaccaccgtgcttgtcatcaacctggtgggcatggtggcgggtatatcatatgccattaacagcggttaccaatcatggggtcctctctttggaaagctcttcttctccatctgggtgatcctccatctctaccccttcctcaagggtctcatgggcaggcagaaccgcactccgaccatcgtcatcgnctggtcgatccttctcgcgtcgatcttctcccttctgtgggtcaagatcgatcctttcatttcgcctactcagaaagccgtcgccttggggcaatgcggtgtgaactgctgatcnggcaccgtacgaagatgaacttcaatcaatcaaggtctaccccnncttgtgtaaatacctgaggggggctagaatgggatct

SEQ ID NO: 418364 - DNA, 469 bp, Oryza sativa
gtttggggcaacctcggcggcggcgccgtccagctgctcatgccgctcgtgtacgaggccatccacaagatcggtagcacgccgttcacggcgtggcgcatcgccttcttcatcccgggcctgatgcagacgttctcggccatcgccgtgctggcgttcgggcaggacatgcccggcggcaactacgggaagctccacaagactggcgacatgcacaaggacagcttcggcaacgtgctgcgccacgccctcaccaactaccgcggctggatcctggcgctcacctacggctacagcttcggcgtcgagctcaccatcgacaacgtcgtgcaccagtacttctacgaccgcttcgacgtcaacctccagaccgccgggctcatcgccgccagcttcgggatggccaacatcatctcccgccccggcggcgggctactcttcgactggctctccagccggtacggcatgc

SEQ ID NO: 418365 - DNA, 406 bp, Oryza sativa
  unsure (1)..(406): unsure at all n locations
ctgtcttgctaatggcggcggcggcggcggacttcgcggcgagcaagcgggccatggcctacgcgctctgcaagaacctcagcctcgatccgaatacaatatccagtacaagtattgaagagagtgatattgccaccctgttctcacatattgtgaaatcgagtgaagatgaggtactgaaatgggttgaattttccagcaattttgttggaaaatgtggagaacagcatgtattgcttggtaatctgaatcaagacttgtcccagaaatcagttctgttgggtaatggttttaaaccatcagttgctgatattgttgtgtttgcaaccatacangtttttgtgagtcatcttggtgaaaacgagttgcagaaatatccacatgtattgcggtggatggactatat

SEQ ID NO: 418366 - DNA, 496 bp, Oryza sativa
atttatactgatttatttatatatgtttcaacataatatagcggggatggatcttcctgtatttttcttggattcagcctgtatttgctactatacaaagacattctcatgttaccacagattataatatcatgggatttgtcagtaacaagtgttcttacatgtctgttcaatttgtcataggactttcttggtttggtggagaaattctactacctttctggaagatatgacctggagcttgcagttggtgatgctgcaatggagaattcatttctacgagcccttggccatattgaattggacctgcctgaggccccagaaaaagccccaaagcctccggcccaggctgttgatccattctcaaaatttggtccgaagaaggaaatatcgcacatattccgttcaccagagaagaggccaccccaggaactctcatttgcggttaccggccccacgcttctgcctattggtgggttcttgattggcttatgcg

SEQ ID NO: 418367 - DNA, 528 bp, Oryza sativa
gttgtggggatggacgggagcatctcgccatcgcaggcgagccgcggcggcgaggaggccgccggcaacggcaaggatggagaagctctgggaggaggtgacaaggctctgccgttcgagttcagggcgctcgaggtgtgcctcgagttcgcctgcaagtctctcgaacatgagacttgcacattggagaaagaggcatacccagctttagatgaactcacctccaaagtcagcaccctcaatcttgagcgtgtgaggcaaatcaagagccgactcgtcgcaatatctggcaaagttcaaaaggtcagggatgaactggaacacttgctggatgacgacatggacatggcagcattgcacctaacggagaagctcgcttaccagtcatcaagattcgacatcgataaagaagcaagcgagctcgaagatcacagcagcagggatgaagaaggagtccagggaggcggcggcggcgacggcgacgacgagacgatcgccggcggcggcagcttcagccccaacaccgac

SEQ ID NO: 418368 - DNA, 456 bp, Oryza sativa
tttaaagacctctaaccttacaccgacctgtatgagaaatcaggtctcatgactgctatccaaattccatataggaccaaggctgcaaaagcagaaggtgctaatccaaggtttgaaatgccaatgtttgtgattatgggtcagaaagactacatcctcaagtttccagcactgaaggaatatatgtcaagcgaaaaactgaaagaaattgctccagactccgggatcacttacatcccagaaggatcccattttgttcaggagcaattccctgacctggtgaatcagcttgtgatagacttcgtcagtaaacatgcatgagatagcaacaaaaacaaggtgcaatttgacaaatccccagactgcaaaaggtaacagttgagcactgcgttcactgatgtgcaccactaaagagttgacgttgtaacgtcgtggtcatgatggtatcgcaaacta

SEQ ID NO: 418369 - DNA, 501 bp, Oryza sativa
ttcagttcttgaatccattcggggtgtaaaaatcatttacagaactaaagaattgaaagagaaacaggacagaagtcgcatttggaatgagacttggctggcaggtttcttttacaaaccgtgcaattatgaactatttgtcaaacagtcgctgaacatggaaatggctatcattatggcaagggatgctggcatggactggatcattcatcttgataccgatgagctaattcatccagctggtgcccgggagtactctctgaggcgattgcttttagatgttcctgataatgttgacatggttatcttccccaactatgagagcagcattgagcgagatgacatcaaagatcctttcacagaggtttccatgtttaagaaaaattatgatcatcttccaaaggatacatattttggcctatacaaagaagcaacgcgtggtaatccaaactattttctcacttaccggtatgggaaatcagcagcaagggttcaggagca

SEQ ID NO: 418370 - DNA, 501 bp, Oryza sativa
  unsure (1)..(501): unsure at all n locations
tttagctccgcgacgcggcggcggggcggcgcggcgaggaggtggagatcggcgcccacatgacccgcctcaccggcgacatcatctcccgcaccgagttcaacaccagctacgacactggcaagcgcatcttcctcctcctcgagcacctccagcgcctcacctcccgctccagccgccatctctggatccccggcagccagtatttcccgagcaagtacaggagggagatcaggcggctcaacggcgagctggaggcggtgctgatggagtcgatacggcggagcagggagatcgccgacgaggggagggcggcggtggcgacgtacgggaggggtttgctggctatgcttctgtcggagatggaggagaaggagaagaatggcggcggcggaggcggcgagttcagctacgacgcgcagctggtgatcgacgagtgcangaccttcttcttcggcgccacgagacgtcggcgctgctgctcacgtgggcgatcatgct

SEQ ID NO: 418371 - DNA, 470 bp, Oryza sativa
  unsure (1)..(470): unsure at all n locations
ttcacgcgtccgggtgcggatgtcgactgtttccttggcactgaatgcccacctgttcgtgtcaagggaattggaggacttcctggtggcaaggttaagctctctggttccatcagcagtcagtacttgagtgccttgctgatggctgctcctttggcccttggggatgtggagatcgaaatcattgacaaactaatctccattccttacgttgaaatgacattgagattgatggagcgttttggtgtgaaggcagagcattctgatagttgggacagattctatattaagggagggcagaagtacaaatctcctggaaatgcctatgttgaaggtgatgcctcaagcgcgagctatttcttggctggtgctgcaatcactggaggcactgtgacagttcaagggtgtggtacgaccagttngcagggtgatgtcaaatttgctgaggtacttgagatgatgggagcaaa

SEQ ID NO: 418372 - DNA, 522 bp, Oryza sativa
ttcctctccccctcgtcctcctcctcgtctccgccgcgctcctcgcggcggctcccctctcgccggcggccgagaccggtgccgccgcgttcgacgtccgccgccacctctccaccgtcaccaggtacgatgtggcgaggggatccaatagtgtgtcctccgcgccgtctatgtcggatgagtgccgcgtgatccacctcaatctcgtggcaagacatgggactcgcgcacctaccaaaaagagaatcaaagagctggatagactggcggttcggttgaaggctcttatcgatgaagcaaaacaagggcctgaaagtgactccctgaaaaaaattccttcatggatgaaagggtgggagtcaccctggaaaggtagggtgaaaggtggtgagctggtcagtgaaggggaggaagagctatacaaccttgctatcagagtcaaggagaggtttcaaggcctatttgatgaggaatatcaccctgatgtgtattcaataagagcaactcaggttcctcgggcat

SEQ ID NO: 418373 - DNA, 458 bp, Oryza sativa
ctatcaatcgccgccgccgtctcctcgtgtaaccctagcttagtggattagtttaagtgtttgccggagattatggggtcggtggcggcggaggaggtggtggtgttccggtcgaagctgccggacatcgagatcgacaacagcatgacgctgcaggagtactgcttcgcgaggatggcggaggtcggggcgcggccgtgcctgatcgacgggcagaccggggagtcgtacacgtacgcggaggtggagtccgcgtcgcggcgcgccgcggcggggctccggcggatgggggtgggcaagggcgacgtggtgatgagccttcttcgcaactgccccgagttcgccttctcctttctcggcgcgggcaggctgggcgccggcaccacgacggcgaacccgttctacacgccgcacgaggtccaccgtcaggctgaggccgcggtcgccagggtgatcgt

SEQ ID NO: 418374 - DNA, 416 bp, Oryza sativa
ctctctcataccttccgctacagaggtatttatagggagagatcggcgccagcatccctgatcatattcagttctgagtttttcttttggcagggagagggacaaagatgagtcttttcggcctcggaagcaagaaccagaagacattcaggccaaagaagaatgcaccatctggcaataagggtgtgcagctgaagaagcacattgatgcaaccttaggaagtggtaatttgagggatgcggtcaggctgcctcctggagaggatctcaatgaatggctagctgttaacactgttgatttcttcaaccaggtgaacatcctttacggcactctgatggagttctgcacgcctactacatgtccaacaatgtcagctggacctaagtttgagtacagatgggctgatggaattcag

SEQ ID NO: 418375 - DNA, 486 bp, Oryza sativa
  unsure (1)..(486): unsure at all n locations
ttttaagcaaagcgcaccacgcacacggaaagagaggagaggtcacatcgcggcggcggcggcgaggatgttggcggtgtttgatccgacggtggccaagtgcccggagggcctccggagcccgccggtggccggcggcgccgtggcggccggcggcgcgggcgcgctgatgaagggcttcgccggagcgcacgccgacgcggtcaccgtcagcctgggccccgccggcgccctcgcctactcggcggccaaccagagccccctcgtacccaggttgtttggtgctgtgaatgacatattctgcctgttccaaggacacattgacaacattgccagtctgcagcaacactatggcctgagcaagacagcaactgaggttaccatcctgattgaggcctacaggacccttanggacaggggccctctaccagctagtcatgtcgtgagagatcttatcgggaagttcacgttcatccttgatgacac

SEQ ID NO: 418376 - DNA, 497 bp, Oryza sativa
ttcgtgccgcacgaccgcgacttcgacaaggatcccgtcctcgtcgggggcgccgctaaggattggaataaatgttctgtaggatgtgaatttgggttttcagctactaagacgcctgatgctacttttggaattgccccagatcctactgtagagagtatcctcagatcgatggagtcatctcagtattattcagagaacaacattgctgtggctcgagggagaggttacaaaattgtgatgacaacaagcctttcctcagatgtacctgttggctacttttcatgggctgaatatgatataatggcacctgtgcctccaaaaactgaagaagccctagctgcagcatttatttcaaactgtggtgcacgtaattttcgtttgcaagcccttgagatgcttgagagcttagatgtcaaaattgattcatatggtagttgccatcgtaatcatgatggcaaagttgataaagtggaaactttgaagcgctacaaatt

SEQ ID NO: 418377 - DNA, 500 bp, Oryza sativa
tttctaaaagccaaagcggacctaagctggctacgtctttctctcggattcgatcatggtgcagagggagaagaaggtggaggagccgacggagctgacgtcgccggagatgacgctctgcgccaacagctgcgggttcccgggcaacccggcgaccaacaacctctgccagaactgcttcttggctgcctcggcgtcttcttcttcttcttccgccgctgcctcgccgtcgacgacgtcgttgccggtgtttccggtggtggagaagccgaggcaggccgtacagtcgtcggcggcgtctgcggtggcgctggtggttgagcggccgacggctgggccggtggagtcgtcgtcgaaggcgtcgaggccgttgtcggtcaaccgatgccacagctgccggaggcgggtgggcctgaccgggttccggtgccgctgcggtgagctctactgcggtgcgcaccggtactacgaccgccacgactgcagcttcgactacaagt

SEQ ID NO: 418378 - DNA, 523 bp, Oryza sativa
  unsure (1)..(523): unsure at all n locations
tgtttcctcttccccccagccatcggcgacgcgaggacgcgacgcgccccaccaaccaccaccgcctccgccgacctcgccgccatgctgtccgcgcgcgccgccgccaccgccgccgccgccgccgcctccccgctgtggaagcgcggcgagggtggcagcagcgggagcgggagcggatgcacgagctgcagggaggtgcggaggagggccgcggcggtgagggtccgtgcggcggcgccgaggagggtggaggcggtcgcgatggagtccgcggcggagaccgagaagaaggaggaggttgcggcggccggcggcggggttgaggacatggctaccgaggaggtgcccgtcacgccatgggccttctccgtcgcgagtggttacacccttttgagggatccacatcacaacaagggccttgcctttagtgagaaggagcgggatgctcattacttacgtggccttcttcctncggcagttgtgtctcaggatcttcaagtgaagaagatcatgcataatc

SEQ ID NO: 418379 - DNA, 508 bp, Oryza sativa
gctaacctcctctcttcttcttcttcttcttcttcttcttcttcttcttcttcttcttcttcttcttctaggctagcactgcacgtgcccaactaacacatacattcatcatatatacacctcctcctccttcttcctctaagttgtgtgtgcatatataatctactagtagagagcagggctaggctagcaattgcaatggcgcctccctatgaaaccagcgccgccggctctgaatcgccggtgccggtggtaacggtggatgtggcggcggcgagcgaccttatcacctcggccggccaccgttacgtcgacgtcaggacagaggaggaaatgaacaagggccatctacacaactccctcaacgtgcccttcatgttcgtcacgccgcaagggagggaaaagaatcctctgtttgtggagcagttctccgcgctggtgaagcaagaggaacatggtgttgtggggtgccaaagcgggaagaaggtcgagctagcatgcgttgatc

SEQ ID NO: 418380 - DNA, 516 bp, Oryza sativa
ttcagatctgcagttggagcgtgtcaatgtgtactacaatgaggcctcctgcggtcgctttgtgcctcgtgctgttctcatggaccttgagcctggtactatggacagtgtccgcactggaccctatggccagatcttccgccctgacaactttgtcttcgggcaatctggtgctggtaacaactgggccaagggacactacactgagggtgccgagctaattgattctgttttagatgttgtgaggaaggaggctgagaactgtgactgcctgcaaggattccaagtatgccactctcttggtggtggtactggatctggtatgggtacactgttgatatcaaagatcagggaggagtaccctgaccgcatgatgctgacattctcagttttcccctcaccaaaagtatctgatactgtggttgagccatacaatgctacactctcagtccatcagttggttgagaatgctgatgagtgtatggttcttgataatgaggctctctacgacatttg

SEQ ID NO: 418381 - DNA, 496 bp, Oryza sativa
  unsure (1)..(496): unsure at all n locations
cgcgctcttcccgccgccggcgccgccgcagtctcctcaaggctgctcccatcctctccttcgagttagcttcctccttattcaaccatgggtaaggagaagacgcacatcaacattgtggtcattggccacgtcgactccggcaagtcgaccaccacgggccatctgatctacaagcttggaggtatcgacaagcgtgtgattgagaggttcgagaaggaagccgctgagatgaacaagaggtccttcaagtacgcgtgggtgcttgacaagctcaaggccgagcgtgagagaggtatcaccatcgatatcgccctgtggaagttcgagaccaccaagtactactgcacggtcatcgatgcccctggtcaccgtgacttcatcaagaacatgatcacgggtacctnccaggctgactgtgccgtgctcatcattgactccaccactggtggttttgaggctggtatcttcaaagatggcccgacccgtgagcacg

SEQ ID NO: 418382 - DNA, 534 bp, Oryza sativa
cttgatgcaatctcagctggaaagtactactattttgtccgtctgatgggtagaaaagcatctcacgtggcctttgaatgtgcacttcaatcacacccaaacatgcttatcttagcggaggaggtagcactatcaaaactcacactgatggaagttattaacaagatatgtgatggagtacaagcaagggcagaattagggaaattccatggtgtgctccttattccagaaggactaatagaaagcattccagaaatgtatgctctgcttcaggaaatcaatatcctccacaacaacaatgttcctgtggcagagatgccatcacaactgtctccttgggcagctgcgctgttccagttcttgccacccttcatcagaagagagctgctgctccatcaagaatcagacaactctgcccagctgtcccagattgatactgagcaattgttggcccacttagtagaagcagaaatgataaagagaacaaaagaaggaagatacacgggaaggaagctcagctcttgatgccatttc

SEQ ID NO: 418383 - DNA, 491 bp, Oryza sativa
gttgatggaggaggaagaaaccctcgcggcggaggaggaagaaggaagaagaaggcgaggcgatgccgcgggaggggacgcggatggcggggctgtgggagcgcgaggtcggctgcctcccgcccaagctcttcgccaactccgtcatggcctcccaggactttgtgcggtctctcggtgtccagaagaggctgcggaagcacaggggctgtgtgaataccatcagctttaacgaggatgggagcttgatcctgtccggttcggacgatcgggccgctgtactgcggaattggcaagaggggacgcctaccttcgcgttccacactggccacagcgacaatgtgttccatgctctgttcatgcccttctcaggtgaccggagcatcatcacatgcgctgctgatggacaggtgaggcattcgcaaatacaagaaggtggtcctgtaattacaaatgagctagttgatacagaggtagcagtgcacaaacta

SEQ ID NO: 418384 - DNA, 369 bp, Oryza sativa
aaggctggcccgcgtgcgggcaccgccccggatttcgcggcgcgccccacgcgcgtgtctctagctgactagtaggactgcgtgaggcgagtgaatggcttcgttgtcgggtactcaaggaccgtcgcgtctgagggcatggctgctttgcaccgtggattcaacatatcctgggtggtgctgcactcttatccttgcttgttctcacctgtgtatgatgctccagggccaggcgctttagttggcaacctttaagatcacttgcttgccagcttgttacttggctggggtggtaccattgttgctgggctgccttcatagacaacggacactgttcttgggtggatgataatgacatccggtgaggct

SEQ ID NO: 418385 - DNA, 505 bp, Oryza sativa
ttttattggaggccatgcagtcacggccaattccatcgaacacgctctactatgctgcagatctccacggattggtcgttggtttgaatccatactgtcgacggcgatgcggaagaaatgcgcagatgagaagcaactcgtccagctcaaattcggcctgccggactgccagcctctcgccctgttcgctctgtgcacaggagcttcatctgatcccatgctgaaggtgtacacggcgaagaacatcagtgaggagctggagcgtgcgaagcgggagttcctgcaggcgagcgtggtggtgaggaagtccaagaaggtgttcctgccgcgcctcgtcgagcggtacgcccgggaggccggcctcgccggcgccgacgagctcctcgcgtgggcgcgcgacaacgccgacgcccgcgccacccaagacgccatccagcggctgtgcgtcgactccggcggcggccggaggaaggcagcgcaggccgtcgagtggctaccctacaac

SEQ ID NO: 418386 - DNA, 525 bp, Oryza sativa
atcctacctgactagtactaccactactagctagtagcgagctactctctctggtcatcaagctttgagtggttggagtggtggcagctatggctttttccatctccaagaaggctgcagttgctgcactcttctccttccttgttgtcacctgcgtcgccggcgccaggccggggaacttcagcgcctccgacttcaccgccgatcccaactgggaagtcgccagggccacctggtacggcgctcccaccggcgccggccctgacgacgatggcggtgcttgcgggttcaagaacaccaaccagtacccgttctcgtcgatgacctcctgcggcaacgagcctatcttcaaggacgggaagggctgtggctcatgctaccagataagatgcgtcaaccaccctgcctgctccggcaacccggagacggtgatcatcaccgacatgaactactaccccgtttccaagtaccacttcgacctgagcggcacggcgtttcgcgccatggcccagcccgggcagaacg

SEQ ID NO: 418387 - DNA, 527 bp, Oryza sativa
ttcaaggctgcaaagaagggtggtgggaggcaattcaatggacttgttgatgtttaccgcaagacccttgcgtctgatggtattgctggtctgtaccgtggattcaacatctcctgtgttggtatcattgtctatcgtgggctgtactttggaatgtatgattctctcaagccagtcgttcttgttggcaaccttcaggataacttccttgccagcttcttacttggttggggcattaccattggtgctggccttgcttcatacccaatcgacactgttcgtcgtcggatgatgatgacatctggtgaggctgtcaagtacaacagctccttggatgcgttcaagcagattgttgcgaaggagggtgcgaagtcactcttcaagggcgctggtgctaacattctgcgtgctgttgctggtgctggtgtgcttgctggatatgacaagctgcaggtggtcgtctttggtaagaagtacggttctggtggtggctaagactagatgatgatgataagcagtggggaact

SEQ ID NO: 418388 - DNA, 513 bp, Oryza sativa
gtcagatcacatcaccacagtgtgggtgtaattaaggttgggaaacgagtaattagcttaggttaattaggattcgatccatcgatacgatggcgttgagaagaatgggcatcattcttgtgctcttggccattgctactctgctctcgccggcagtgtccgcacggttcatctctctgcccaccgaccatcttccaatcactacgccgcccctcgccgacggcctcggcttcgacctctacagcgactcgtgcccgcagctggagaccaccgtgcgctccgccgtgcaggcggcgctccagcaggagatcgccctcgccgccggcctcctccgcatcttcttccacgactgcttcccccagggctgcgacgcgtcgctgcttctgacgggagccaacagcgagcagcagctgccgcccaacctgactctgcaaccacgggcgctgcagctcatcgaggacatccgcgcccaggtgcacgccgcatgcggccccaccgtcttctgcgccgaca

SEQ ID NO: 418389 - DNA, 440 bp, Oryza sativa
gttaccatcctcatgcgagtactgaagaacgattttgtcaagtatgcccatgatgaggaagcagctgatgaccaagaagagtctggatggaagtatatccatggggatgtcttccggttccccaagaacaagtcctttttttcggctgctctcggcaccggaactcaactgtttgccctcacaacctttatattccttcttgcacttgttggagtattctacccgtacaatcgtggtgctctttttactgcattggttgtcatctatgctctcacttcaggaattgctgggtatattgcaacctctttctactgtcagctagagggaacaaactgggtgaggaacttgctgttgacaggatgcctgttctgtggacccctattcctgactttctgctttctaaacacttgtgctattgcttatagtgcaacagcagcttt

SEQ ID NO: 418390 - DNA, 469 bp, Oryza sativa
aaaaaagcaagcattgccaaaatgcttttattcatatatagacttacaaagatcacaacaaaggttccaatgataaatatccatgttctctccaccctgggctgctccttacattaaaagaatggagatagctatggacctccttatccaaattaagcgtagcacattgaccataaaatttaacaacagttcctcccaccctacaagcgactcagcagcaagcagcaaccaaatattaccgaaaatttgaagcatttcacatcttagcagcacgcgcgatcttgaaccactcggtgtggaaggagccgggcatgtcgaccctctcgtaggtgtgagccccgaaatagtccctctgtgcctgcaccaggttggcaggcagcctgtccctccggtaggagtcgaagtacgcgagactcgccgacatgcctggggtgctgaccgccattgtgatggcaaggcagaccaccct

SEQ ID NO: 418391 - DNA, 266 bp, Oryza sativa
gatctttccagctgggctactccggcagcgcggatccggagcccggccggtgccgccggacggacggcaagaaatggcggtgctcgagggatgcggtcgccgaccagaagtactgtgagcgacacatgaaccggggacgccaccgttcaagaaagcatgtggaaggccagcctggccatgccgcgaaagcgatgcccgcggcggtggcagcagccgctgcctctgctacccagcctagggcttcggccgcccacaatggcggagct

SEQ ID NO: 418392 - DNA, 447 bp, Oryza sativa
gttggttgctcctcccgctcccgctacggttcggttcggttgggggccggttcgattgcggttgttccttcggttcgggggttggggggaaagcatggcggcgccggatgttgagtaccgctgcttcgtcggcggcctcgcctgggccaccgacgaccgctccctcgaagccgccttctccacctacggcgagatcctcgagtccaagatcatcaacgatcgggagacggggaggtcgcgcgggttcgggttcgtgacgttctcgagcgagcaggccatgcgcgacgccatcgaggggatgaacggcaaggagctcgacggccgcaacatcaccgtcaacgaggcccagtcgcgccgctccggaggcggaggcggcggtggctacggccagcgcggctgaagcggaggctactgtggctgcggctacggtggtggtggcggcggcgg

SEQ ID NO: 418393 - DNA, 346 bp, Oryza sativa
  unsure (1)..(346): unsure at all n locations
tcgttgagattgctcacatgtacaagactgatcgggccaagtacgagtccaccgcaaggagctggacccagaaatatgctatgggctagaatggttaacaataagaaatgtgagatatgccattgtattgccttgtattctcctgtaactctttcaacatttaagaaacagcaagaatcaaattgaactctcgagttgttgtatggaatcctactatagatgttcagctattgtaaattatgtagtgggtggttctattgattgttcgatgagcacttggaatggtacttttatgttccaaanaaaaaaaaaaatataacactacaatgaattttcaactttaact

SEQ ID NO: 418394 - DNA, 469 bp, Oryza sativa
ttgttttgataaaatgtgccttccccaacaatacagaggaaggtgtgcttgtgaactttattgttttgacaagcagattttagcactaacacaaaaaatagaacatatgtgctattagttacacatcaagcactgaaaatacgggagttagattgttctttggcgactgattctgcaagcacacactagactaccacacactagactaccaaccacaaaatctagcagtttacaagaatgccacagcacatttctgaagccatattataggcatagcttcggtagaagcacaagaaaggcacaatttacactgagtcaaccacttcaacctgttgttgtgcaagatatctttcccttcgttctttccatttatcgatgacaagcccttcgccaacaatctttgggccattctcttcaggaggtttgtttcttgcctcaagtgcagtcttagcctaagccaactgattat

SEQ ID NO: 418395 - DNA, 429 bp, Oryza sativa
ttggtttttaccaaatttgcatatatttatttttcagaacccgcattgtacaacatgtatatttcatcgcagtttattgttccatctttattcattcacaaaagtagatacagccagtgccttggagagttggaggttcgagcatcttggcctacaatgctcttgctaacaattctggcgaatgaaaaccaaaaagagctcaagtgtgcaagtttaaagatacatggcacaatattacagaagttgccgtgacaaagtgatctacgaacgaattatgctcacccgacagaaagaataggaccggactatatataactacagcaaaaaggccacaagttcaaacatttcaatttattcaagctgcacttgagagaaaacatttgatttttctgaacatagatcagtgggtagcatctctgctgtagtctg

SEQ ID NO: 418396 - DNA, 428 bp, Oryza sativa
tcgtgttaacatctttcagtcacttgacctagcatggacattgcttcgcatattccctcgtgagcttctccatcgtatccctgcgaagacattggatcagtactacagcagagatgctacccactgatctatgttcagaaaaatcaaatgttttctctcaagtgcagcttgaataaattgaaatgtttgaacttgtggcctttttgctgtagttatatatagtccggtcctattctttctgtcgggtgagcataattcgttcgtagatcactttgtcacggcaacttctgtaatattgtgccatgtatctttaaactttcacacttgagctctttttggttttcattcgccagaattgttagcaagagcattgtaggccaagatgctcgaacctccaactctccaaggcactggcttgatctactttt

SEQ ID NO: 418397 - DNA, 416 bp, Oryza sativa
  unsure (1)..(416): unsure at all n locations
ttgtgatgtacggcatgcacctcgtggagctctcggagcggtcgtcggcgatcaccctggtgcagcgcgcccgccgcaacggcatgccgttcttcaactccggcgacaaggccgagcagatggtggtggcgttcgaggcgttccagcagctgagctcggtgcgggtgcgccccatgacggccatctccgacctggacaccatccaccgcgacgtcatcgacagcgccaccgccaagcgcgccgccatcgtcgtcatgccgtaccacaagatgctccagcacgacggcacgttccagtccctcggctccgcgtaccacgccatcaacaagcgcgtnctccgcgaggcgccctggttcgtcgacgtcctcgtcgaccgcggcctcggtggccacgcccaggtgtacgacaagaacgtg

SEQ ID NO: 418398 - DNA, 449 bp, Oryza sativa
  unsure (1)..(449): unsure at all n locations
tcgtttgagcatcttgtaccacctacgcagagttttgtttgcttgcttgtttgcttgtcagtgtccagaatggcagcgagggtggcgtggatcggcgcggcggcggaggtggaggacgtggcgctgatggccggtcgcgcgggggcccaccccgcctggtccataagcggctgcacgcacaccctgctgaacatgttgccgtgcctcaactacctgaccgggaacgagacggcgccgtcggcgtcgtgctgcggcaagctgggcgaggtggtgaagtcgcagccagagtgcctgtgcgtngagctcaacggcgacacgggggcgctcgatctcagcatcaaccgcacccgcgcgctcggcctncccgacacctgcaaggtccatacgcccgcggtcagcaactgcaagagtggcgctgctgctcctactgcgggacagacgccgacgac

SEQ ID NO: 418399 - DNA, 474 bp, Oryza sativa
ggcgcaggtgaaggtgctcgtcgggtcgtcgtaggcgtagctgtaggagcgcgggcacgccgacttgaagacctgggagtaggcggtggggcggcaggtgttcgggttggcgtacgcgccgctgcagcagaactcgggcttgccgaacgcgtcgcacgcgctccggcacgccgcgccgaccacggcgcggagcttggccgggcaccgagcgttcaggtcggtcgcgcacccggcggccgcgcacgtcgttgccgtcgcgccgagggcgcccgagggctccaccagcaacggcaggttgtacccgtccacgaggctgacgtcgtagaagttgttgcggtcgccgccgtcgagcgtgaactccgccagcgtggccgggggcgccgcgccgaggtcggcgcactccagcgtgcccgagccgtagtcgcccgtcgcgcacacgaccttcccggtgccgtcctgcatgcagcccgtgcg

SEQ ID NO: 418400 - DNA, 461 bp, Oryza sativa
atattgtacacctcagtttctgtatggagaactgcaatttcaatccgtcagagaaagctattcaaaatcctgtctggaagtggaacctgcattttagtgcaaaattcactgtgttttactggatgctgtacagtagctgatgagtgatgacagcagccatggctgactgaagtctctcgttcatgctgcctgcaggatttgcggccctcctcttgcagattcatatgggagcgtgctcagcaccttcacacggaacacggcctttttatctgaaccaaactcaatggcatccgagggatggaaacggacagggaagttcggaggtacgcgatagcgtctaccttcgttgtcggtaatccatgtaccatgttcacttccattatcagtcacataaaagggcttattcttgcatgtgatagtagcatggttttctgatatctggggcaagggcaatgccaggg

SEQ ID NO: 418401 - DNA, 551 bp, Oryza sativa
ttatttggcttctaacacaccaattcgtcgaacacttccgatcgtcttctctgtctccgtgtgagtattgacctcaggcgccgcgacgtctgcaagagtagtcagattcaggagatgctcgttgggtagagcggatcggagagtcactgtcacagtagcgcttctgctcttgcttctcggatcccaccacccaagaagagctttgctttgctcccgttccactgccagtgccagccatggcgccactcccaagctccagctcaacgcgggccacctctctcgtggcgatcccgggcgcctcctgcccccatggccaggcgcaacgcctgctcgccttccgttccccacgacgcgggtcacagtggcgcgggctttgcgtgtcccgggggcgccaaggtgcgaccgttgccatggcaatgacaggtcgagacgtcgtacctgcaacatgaaacgcgactactatcagtacctcgacactttaagactggagctgagaggaaggatgctgctgagaacaccatggtggcatacaaagccgctcatgatattgc

SEQ ID NO: 418402 - DNA, 436 bp, Oryza sativa
tcgttctcctctcatctcctccacactttgaggaaacgtctaagcacaagtgctaaacgcgattagaaggcagcgaaatcgtacactaaattgcacggattagagatagatctcaagcaatgggggaggagaaagtggcgccgaagtctgacgctgccccggcggtggagttgctggggttcgtgatgagcgcggaggaggccgagcgcgccgcggcggcggccggggtggagacggtggaggacctgctgccgctggtcggcccttccgcgatgcggcgcgcgcgtgccccgatctcgcggttccccgtgggcgccgtgggccttggcgcgagcggccgcgtatacgccggagtcaacctcgagttccggggcctcccgctgtcccattcccgtcacgccgagcagttccttgtcgtaaacgcggccgccgcggt

SEQ ID NO: 418403 - DNA, 458 bp, Oryza sativa
ttgttttttaccaaatttgcatatatttatttttcagaacccgcattgtccaacatgtatatttcatcgcagtttattgttccatctttattcattcacaaaagtagatacagccagtgccttggagagttggaggttcgagcatcttggcctacaatgctcttgctaacaattctggcgaatgaaaaccaaaaagagctcaagtgtgaaagtttaaagatacatggcacaatattacagaagttgccgtgacaaagtgatctacgaacgaattatgctcacccgacagaaagaataggaccggactatatataactacagcaaaaaggccacaagttcaaacatttcaatttattcaagctgcacttgagagaaaacatttgatttttctgaacatagatcagtgggtagcatctctgctgtagtactgatccaatgtcttcgcagggatacgatgg

SEQ ID NO: 418404 - DNA, 492 bp, Oryza sativa
tcgtgttaacatctttcagtcacttgacctagcatggacattgcttcgcatattccctcgtgagcttctccatcgtatccctgcgaagacattggatcagtactacagcagagatgctacccactgatctatgttcagaaaaatcaaatgttttctctcaagtgcagcttgaataaattgaaatgtttgaacttgtggcctttttgctgtagttatatatagtccggtcctattctttctgtcgggtgagcataattcgttcgtagatcactttgtcacggcaacttctgtaatattgtgccatgtatctttaaactttcacacttgagctctttttggttttcattcgccagaattgttagcaagagcattgtaggccaagatgctcgaacctccaactttccaaggcactggctgtatctactttgggaatgaataaaggaggaacaataaactgcgatgaaatatacatgttgtacaatgcgggttctg

SEQ ID NO: 418405 - DNA, 484 bp, Oryza sativa
agaaaggcgtcttcgtacgtcgcctctctccgcgcctccgcgcttttcctcctcctctcccctctctcccttctccgccgccgtcgcagcatcaacccaatccgccgccatgagggagtgcatctcgatccacatcggccaggccggtatccaggtcgggaacgcgtgctgggagctctactgcctcgagcatggcatccaggctgatggtcagatgcccagtgacaggactgttggtggaggtgatgatgctttcaacaccttcttcagtgagactggtgctgggaagcatgttccccgtgctgtatttgttgatcttgagcctactgtgattgatgaggtgaggactggttgctaccgccagctcttccaccctgagcagctcatcaatggcaaggaggatgcagctaacaactttgcccgtggtcactacaccattggcaaggagattgttgatctgtgccttgaccgcatcaggaagctt

SEQ ID NO: 418406 - DNA, 433 bp, Oryza sativa
tcgttgagcatattgtcccacctacgcagagttttgtttgcttgcttgattgcttgtcagtgtccagaatggcagcgagggtggcgtggatcggcgcggcggcggcagtggtggtggtggcgctgatggccggtggcgcggcggtgcagccgccgtcgtccgacaagcgggtgcacgcagacgctgctgagcatgtcgccgtgcctcaactacctgaccgggaacgagacggcgccgtcggcgttgtgctgcggcaagctgggcgaggtggtgaagtcgcagtcggagtgcctgtgcgtcgcgctcaacgccgacacggaggtgctcggcctaagcatcaaccgcacccgcgcgcttggtctccccgacgcctgcaaggaccagacgccgccggtcagcaactgcaagagtggcgctgctgctccttctgcgg

SEQ ID NO: 418407 - DNA, 414 bp, Oryza sativa
  unsure (1)..(414): unsure at all n locations
tcgttagagcatcttgtaccacctacgcagagttttgtttgcttgcttgtttgcttgtcagtgtccagaatggcagcgagggtggcgtggatcggcgcggcggcggcggtggtggtggtggcgctgatggccggtggcgcggcggcgcagccgccgtcgtcgacaagcgggtgcacgcagacgctgctgagcatgtcgccgtgcctcaactacctgaccgggaacgagacggcgccgtcggcgtcgtgctgcggcaagctgggcgaggtggtgaagtcgcagccggagtgcctgtgcgtcgcgctcaacgccgacacggcggcgctcggcctcagcatcaaccgcacccgcgcgctcggccttcccgacgcctgcaaggttcagacgccgncggtcagcaactgcaagagtggc

SEQ ID NO: 418408 - DNA, 445 bp, Oryza sativa
ggaacggtaaaacaggatcttcgttaatgtattcttgagatgataaattatatagagtacaaattggagaagataaataagagtacaaattggatcgagctatgtacacagatcactgtaagataaaaggcaggcagtagagtaaataagctgtcccctcaaaatgcgacaacgatatatggaggcacggaagcagaaatttcagaaaggctccacgctgcctcatcccctctcctcgccgattacatgttatcgatgagctcatgcggtgttcagcttagcgagcgtgcgcttcaaagccttcacgctcaatgggctgttcttgctcgctgagcaggttccagcccgggtgttgcagacagggtaggcaggcgggcaggagctggcatgatccttgcagcaggttgcacctttaactgggcaacagccccaaaccaagcagaga

SEQ ID NO: 418409 - DNA, 506 bp, Oryza sativa
ttaagaaggaaaaaaaaaggaggaaaagaaaagaggaggaaagcgaagaggttggagagagacgctcgtctccacgtcgccgccatggccgcccgcgccgccgccgccgcgttcctgctgctgctcatcgtcggcgcggccaccgcggcgccggacatgtcgatcatctcctacaacgcggagcacggggcgcgggggctggaggaggggcccacggaggccgaggcgcgcgccgcgtacgacctctggctcgccgagaacggcggcggctcgcccaacgcgctcggcggcgagcacgagcgccggttcctcgtgttctgggacaacctcaagttcgtcgacgcccacaacgcccgcgccgacgagcgcggcgggttccgcctcgggatgaaccgcttcgccgatctcaccaacgaggagttccgcgcgaccttcctcggcgccaaagtcgccgagaggagccgcgccgccggggagaggtaccgccacgacggtgtggaggagct

SEQ ID NO: 418410 - DNA, 549 bp, Oryza sativa
tgatttccctacatatcgacatcagaaggttcacatatgcagagctgaagctcataactaacaatttccaatcaatcattggaaaaggaggttttggtactgtttatcatggcatactggaaaataatgatgaagtagctgttaaggttcttgtggagacatccatagcagagtcaaaagactttctccctgaggtacaaaccttgtcaaaagttcatcacaagaatcttgtcgctttggtagggtattgccaaaacaagaagtgccttgcacttgtttatgatttcatgcctagaggaaatcttcaacagcttttaagaggaggatatgacagtttgaattgggaagagcgacttcacattgcacttgatgctgcacaaggtctggaataccttcatgaatcatgcaccccatcaatagttcacagagatgtgaagacacccaacatccttctggacaagaatttggtggccagatatctgatttgggctctcacggcttttaatgctgttacacccatatatctactggtgctgctggcactctggt

SEQ ID NO: 418411 - DNA, 426 bp, Oryza sativa
ttacttccctacatatcgacatcagaaggttcacatatgcagagctgaagctcataactaacaatttccaatcaatcattggaaaaggaggttttggtactgtttatcatggcatactggaaaataatgatgaagtagctgttaaggttcttgtggagacatccatagcagagtcaaaagactttctccctgaggtacaaaccttgtcaaaagttcatcacaagaatcttgtcgctttggtagggtattgccaaaacaagaagtgccttgcacttgtttatgatttcatgcctagaggaaatcttcaacagcttttaagaggaggatatgacagtttgaattgggaagagcgacttcacattgcacttgatgctgcacaaggtctggaatacctttattgaatcatgcaccccatcaataggtcac

SEQ ID NO: 418412 - DNA, 396 bp, Oryza sativa
tcgatcatctccagctgatcaagagctcttaattagctagctagtgattagctgcgcttgtgatcgatcgatctcgggtacgtagcaatggcgtccaaggcgttcgctctgttcctggccgtgaacctcgtcgtgctcggggtggcaagcgcctgcggcggcagcccgtcgtgcccgacgccgacgccgtcgaccccgacaccgtcaacgccgacgccgacgccgtcggcgttcgggaggtgcccccgcgacgcgctgaagctgggcgtgtgcgccaacgtgctgggcctgatcaaggccaaggtgggcgtgcctccggcggagccgtgctgcccgctgctggaggggctcgtcgacctcgaggcggcggtgtgcctctgcacggccatcaggggc

SEQ ID NO: 418413 - DNA, 461 bp, Oryza sativa
gtctaacacgcgcttttattaatacaggcattaacgtcagccatcccaaatttcaccagacgtggctcaagttcacaaatcaaatggcgcaacaggacacatttcacaaatcaaacagcgcagcaggaaagtcataacagtacagaacacaggaataacaccatgggagtagcttttatttggggcaatatagtgacgagaagcatacgtagcagtgacatgccacagttgcatttcttcgaaacgaagagcagcggaaagctcttcagagcttcgagatgaggccgttctggatggctttgggcgactcggcttccttgatgtcagcgtcggaggagccgggaggcacgtcgaccgccggcgagcagttgaagaacccatgtggcatgagcatgaagccgatgcgttccactggcatgacaggccagtccttcagccttgggatatgggtgagcccaaac

SEQ ID NO: 418414 - DNA, 522 bp, Oryza sativa
tcgttgagaaactacactcctggggaaacgagaggtggtgttgatcgaagtgatttgaaacctcttattatcaatcaacctgagggcccgagcttccgcattaacggatattttgtggaatggcagaagtggaacttccgtattggcttcacccctaaagagggtttggtcatctattctgttgcatatgttgatggcagccgtggacgtcggccgatagctcataggctcagctttgttgagatggttgttccttatggagatcccaatgaaccacattatcgcaagaatgcttttgatgctggagaagatggacttgggaagaatgctcattctcttaagaggggatgtgactgtttaggtttcataaagtattttgatgcacacttcacgaattttacgggtggtgtggaaacaattgagaattgtgtatgtttgcatgaggaagaccacggaattctttggaaacaccaggattggagaactgctttagcaagaagtaggaggtcaaggaggcttact

SEQ ID NO: 418415 - DNA, 514 bp, Oryza sativa
tcgtacctgagcacaggagaagccgcagccactgagaaaaacacaaacagtgaagatgtcgcagcctgctgagctttcccgtgaggagaatgtgtacatggctaagcttgcagagcaggccgagaggtatgaggagatggttgagttcatggagaaggttgctaagacagttgactctgaggagctcactgttgaggagcgcaaccttctatcagttgcttacaagaatgttattggtgctcgccgtgcgtcatggcgcatcatatcatccattgaacagaaggaagagagccgtggtaatgaggatcgttgcacgctcatcaaggaatacaggggaaagattgaaactgagctctccaagatctgtgatggcatcctcaagcttcttgactcccaccttgtgccttcatccactgctccagagtccaaggtcttctacctcaagatgaaaggcgactactacaggtacctcgcagagtatatgactgtagctgataggaaggatgcttgtgag

SEQ ID NO: 418416 - DNA, 441 bp, Oryza sativa
ctgtaggtacccattcattgaatgatattaacatgcagacaattgaaatgttatcaggatgaaaatacatttgaattggcagtttgagaaataatggaaaagctgaacattgtagttttattcctccctagatcatcagggggactttggcgtatctgagactctatcctgcacattagtacatctgaaacttctccttggtcttctcaaagacttgctctgcaatcagggctccattgccatcagccttcttgatctccatgttggccttctggtaaaacccagtgcctttcagagcatctgcaatgaagtcatcaaatccaatggcaatggcagcttctgccttggctccatacaccagcctcttgatccgggagagatgaactgcaccaaagcacattgggcatggctcacaagacgcgtaaattttacaatctgaga

SEQ ID NO: 418417 - DNA, 529 bp, Oryza sativa
tcgttaagctagagcacgagggtcaggcaacgcgtttctctctcgctgaaaagtttgctggatttgctcctctccctctctccgccatggaggaggcccagtttgtggagtcaaaggatggaaccatctcagttgcttctgcatttgctggtcaccatgaagctgtgcaagatagagaccacaaattcttgacaaaagcagttgaagaagcgtaccggggagttgactgcggtgatggaggcccctttggagcagtcgttgtccgtaatgatgaagtagtagtcagctgccataacatggttctgaagcatactgatccaactgcacatgctgaagtgactgcaataagagaggcttgcaaaaagctcggaaaaatcgagctctcagattgtgaaatttacgcgtcttgtgagccatgcccaatgtgctttggtgcagttcatctctcccggatcaagaggctggtgtatggagccaaggcagaagctgccattgccattggatttgatgacttcattgcaaatgctct

SEQ ID NO: 418418 - DNA, 249 bp, Oryza sativa
gcagtaagagagggatttattatttaactggattacttccatctcttgtaccaaattcacgcaaaacatatactcttttattattcaatgagaaaagcaatgagtgcaatggtgcttttttatcatttcaggaggaacttcttgaaccaatgggcagagttcttggggtatctcttccttccgtcattgtaatctacgaagtttatcccaaatcgaactgtgtagccgttcgaccactcgaagttatca

SEQ ID NO: 418419 - DNA, 252 bp, Oryza sativa
tcgttataacttcgagtggtcgaacggctacacagttcgatttgggataaacttcgtagattacaatgacggaaggaagagataccccaagaactctgcccattggttcaagaagttcctcctgaaatgataaaaaagcaccattgcactcattgcttttctcattgaataataaaagagtatatgttttgcgtgaatttggtacaagagatggaagtaatccagttaaataataaatccctctcttactgc

SEQ ID NO: 418420 - DNA, 481 bp, Oryza sativa
tcgtaagaagaagagaaacaacaagaagtagtaatggcttcctctatgctctcctccgccgctgtggttacatccccggctcaggccaccatggtcgctccattcaccggcttgaagtcatccgctgcattcccggtcacccgcaagaccaacaaggacatcacttccatcgcaagcaacgggggaagagttagctgcatgaaggtgtggccaccaattggaaagaagaagtttgagactctatcttacctccctgaccttagtgacgtcgaattggctaaggaagttgactaccttctccgcaacaagtggattccttgtgttgaattcgagttagagcacggatttgtgtaccgtgagcacggaaacactcccggatactacgaaggacggtactggacaatgtggaagcttccattgttcggatgcaccgactccgctcaagtgttgaaggaagttgaagaatgcaagaaggagtacc

SEQ ID NO: 418421 - DNA, 463 bp, Oryza sativa
tcgttcatttggctcttcagactttggttgggaggatgacaccctgaccccagactacacttcagtcttcgttcctaatgctgccatgccagcatatggtgaacctgcttacctgacaggtggagcgccaaagagaatgaggaacaactatggtatcgccgtgccccagggaaatggcatgcctaatctcgcacaaaacatgcccaccttcgatcccgagatgaagtatttgccattaccttatgttgagagcagctcagatgaatcaatggacaaccttctgcaaaatgatgctacacaagacggggcaagcaacgagggcatctggagccttgatgagcttgctcatggcagctggggcctactgaggagaccaaatgttctgtcagtgtggtctgtcactagcaaaccattgtgaatgtgtatggccaagatgaagagctggtgatgtctgctatgtttt

SEQ ID NO: 418422 - DNA, 456 bp, Oryza sativa
ttttgtttttttttttcttttaagaattggggaactatttattactcatcacttaggtacttcctccattttatattataagactttctagcattggctacattcatatgtatattaatgaatctagacatatatgtatgcgtagattcattaacatatatatatatgctagaaagtcttataacctgaaacggatggagtaattacctcaggttggtacacatatgtacatgcacgaatttcgatgcacaaacacaagcagagctgggtggttgaccgttgacacagccgaagctaactctctacgtgttacaccatttctctcttcttgaacagggtgatcgatctcacttgccggcggccatggcgtcgtagaagcgggtcctcctgacctcctcgggcgggatgaaggcgtcggggccgagcccgggcacgttgaacgccacgtcgtcgatg

SEQ ID NO: 418423 - DNA, 516 bp, Oryza sativa
  unsure (1)..(516): unsure at all n locations
tacgttttggccatggatctgcaaagcttgctcgtcaagctcagagcaaagagaaaactcttgctaagatggaacgaggtgggctcactgagaaggttgtcagggacaaggtactggtgttccgctttacagatgttggcaaacttccaccaccagtgctgcagtttgttgaagtctcattcgggtataccccagataacctcatctacaagaatctcgactttggtgttgatcttgactctagaatcgcactggttggccccaatggtgcgggcaagagtactcttctgaagctcatgacaggtgacctagctccattagatggtatggtcaggcgccacaaccaccttcgaattgcgcagtatcatcagcatctcgcagagaagctggacctggacatgccggccctacagtacatgatgagggaataccctgggaatgaggaggagaagatgagggctgcaattggtaagtttggcctgtctgggaaggcgcangtgatgccaatgaggaatc

SEQ ID NO: 418424 - DNA, 465 bp, Oryza sativa
tcgttcgttgtctcctccgctccttgcgccgccgccaagacgagtcgcgtcgcggctgaacaggggagggccgggcggcgatctccatctggcgagcagagcagcggaggggaggggatcctgaggaaatgcaagttaataaagaggcacctctggggtgcctcaagccaatttctcagtataacctgcaagagcagagaagcaacgggtttcctgagaatagtgaaaaaaagaatgatagtattgcaacagaaagagtcttggaggcatctcctcttccaaatcaaggctttttcagacccgttcaacggacagaatattatgcctatccatttatttatgctgattaccaaatgccgggacagccacaaccttacaacttagataaccaattttatcaaataaacagggaccacagttttcctattgagagtagagttcaatatcttccattcaagatgcccc

SEQ ID NO: 418425 - DNA, 460 bp, Oryza sativa
gatcaaatcaagatgctttcaaattccaattcagaaaatagagatgtgtacaggggaagggggaatggagcatactgcatacacaccatcaagctagacaaactgacagaacctaacagacacgcatgaaacttataggaagctagctaaactctaccggtagctgcacatcgatccaacattttcgtcatcatcattggcaaacacgcatagacccacttctttattgtaaccaactgactagcttcatcgcgttctttatctgcatattttttattcttcagtaactcaaaagtttggtccagcagcgaggatcttgtctgtcaggctgctgtctcccccgatcttgtagttggcgaacacctcgaagttcttcttgaacaggccagccagcttcaggagcgtctccttgtacgcgcccttgtccgtccaggtgttgatcgggtcgaggatttcagac

SEQ ID NO: 418426 - DNA, 522 bp, Oryza sativa
tcgttcaggcgatcaagtacgagaaggggtcgttcatcacgtccaccggcgcgctggcgacgctgtccggcgccaagaccggccgttcgccgagggacaagcgcatcgtcaaggatgaggcctccgcgcaggagctttggtggggcaagggttcgcccaacatcgagatggacgagcacactttcctcaccaacagggagagggccgtcgactacctcaactcccttgacaaggtgtttgtgaacgaccagttcctgaactgggacacggagaaccggatcaaagtccgtatcatctcggccagggcgtaccactcgctcttcatgcacaacatgtgcatccggccgactgaagaggagctggaggagttcggcacgccggacttcaccatatacaacgccgggcaggttccctgcaacccgtacacgcactacatgacgtcgtcgacgagcgtagacatcaacctcgctaggagggagatggtgattcttcgcacgcagtacgccggggagatgaagaggg

SEQ ID NO: 418427 - DNA, 430 bp, Oryza sativa
tcgttaacacctcgccgccgtttactctctctctctctggctgcagcggacgacgagaacatgcaaggaggaggcggcgtgagctgcgcggtggccggggacgcgccgtcgtcgacgagggggggaggcggcggagggatgctggggttgacgctgttcgacccgccgggaggggagcagccggcggagaggatcgggaggctggtgcgggagagccccgtggtgatcttcgcgaggagggggtgctgcatgtgccacgtcatgcgccgcctcctcgccgccgtgggggcgcacgccaccgtcatcgagctcgacgaggccgccgaggaggccgcggggttcgcggccgccgccgccgctgttccggcgctcttcgtcggcggcgccccagtcgggggcctcgacggccttatgggccttcacctcagcg

SEQ ID NO: 418428 - DNA, 446 bp, Oryza sativa
ccaaggtacgaattatcaatcaagaaattatcaaaccatccaaatgaggaacatagataattttccagtcggacgctaactgatagggataaaacaactatcagcaatgacagattgttctatatatcctttatttgggaggtcccgtctacgtgatatcagcatctatggactgcttggatcgacaacaatttgtaccgatgctgtaaatgttcattcagtccagaatgagaactcgaatggtaatggtgatacagccaaaatgactttaaaagaagggaaatgaagcactgaagttggcaagagtatcttgtaaaaagctcagttggctgccagtcttgaccggagctccgcagcaaccgcatcaatgaactcttcagtgttcaggtaatggcttcttgtgacgtttgaagacccgtgaataagaagagcaaggtctttggtca

SEQ ID NO: 418429 - DNA, 537 bp, Oryza sativa
tcgtttcctttcccacatcctcctccgccgccggctgcttcccaccggctcccgatctccgaggcaagcagcgccgcacccggccgctgccgccgccgccatggcgttcgagaagatcaaggtcgccaaccccatcgtcgagatggacggtgatgagatgaccaggatattctggcagtctatcaaggacaagcttatctttccatttttggatctggacattaagtactatgacttgggagttctccaccgtgatgcaactgatgacaaggtcaccgtggaggctgcagaggctactctcaagtacaatgtggctattaagtgtgcgacgattactccagatgaggctcgggttaaggagttcaacctaaagcaaatgtggaagagccccaatggcacaattaggaatattatcaatggcactgtattcagagagccaattatatgcaaaaatgtcccaaggcttgttccaggatggactaagcccatttgcattggaaggcatgcttttggtgatcagtaccgagcaactgatgc

SEQ ID NO: 418430 - DNA, 437 bp, Oryza sativa
caccatgacagcaagccatgagcccatgacttcactatcaccaagagagcaatggaggcgaaaattttcaagctctaatagagaggaaacaaaaaacattgtctttttgcccacaaacgcatgtaggtaggtagaaaggatccttcaaaatatctttcaaaaatgacacaattaagttttgctagtctcagtagagaagtgactactaattactgtcgattgctcaaacagaacggtcgcacaatgccgatcgcaacacttgcaaacaggagctgacttagaccttgaatccacggttgttcctcctgccacgggccttctcgaacttccttcccttggagcgcacatatggcttcgtgtggctgtgcggcacaccaggagccttaccaaagtgcctgacggcctcacgggcatttttgggacccctcaagaggacc

SEQ ID NO: 418431 - DNA, 552 bp, Oryza sativa
cgacacgaggtaagaagcccagaagccctagcgccgccgcagcagcagcagccatgggtatcgacctcgttgccggcgggaggaacaagaagacgaagcgcaccgcgccgaggtcggacgatgtctacctcaagctcctcgtcaagctgtaccgtttcctggtgaggagaaccaagagtaacttcaatgccgtgatcctcaagaggctcttcatgagcaagaccaaccgcccgccgctctccctgcgccgcctcgccaagttcatggaaggcaaggaggagaacaacattgctgtgattgttggtacagtcactgatgacaagaggatccaagagattccgaaaatgaaggttactgccctgaggttcacggagacggctagggcaaggattgtcaatgctggcggcgagtgcctcaccttcgaccagcttgctctccgtgctccgcttggggagaacacggtcctcttgaggggtcccaagaatgcccgtgaggccgtcaggcactttggtaaggctcctggtgtgccgcacagccacacgaagccatatg

SEQ ID NO: 418432 - DNA, 462 bp, Oryza sativa
atgcaactccttttttccatatcatttatagaaagatcagcaatacaaacacaaccatccggacaagaggatggtaacatctggaagagaagtagagagctcttagctctaaattatcactccagttagaggaagacatagccacagctaatacattacacaagtgacactgcaaggcagagtgttgtgctcatatatgagcaactatggagcatacaaggcctaatggaggaaatccctcataggatcatcatggtgaattctcttcatgcggtaagcctccatgtcttccgcggtgacctcatcattccatttcacattgtacttcctcttcctttcatccatctcctctttcctcctcgcaccctccttctttagggcttcatcaagcagcttcttgtcaagaacaatatcattaggcacatcagttccccaggtggccagtcgcttttcttcatgtcg

SEQ ID NO: 418433 - DNA, 364 bp, Oryza sativa; identical to SEQ ID NO: 394796

SEQ ID NO: 418434 - DNA, 451 bp, Oryza sativa
gattgaggaagcgcggcaataaaacattgcattgaattctgaacgataaacaccaggaaccggcgtttatttgaggcaagcactgcccaaaatctcgcaaaagtactgaaaccttagacatagaacacattcatggcaaacatggatgccaaatgacaactacagaaaattatcaaattcgaatgcagctgacggcttctcctctgaagatgcatattttcccctccattacttggatgtgctctctccatcgacagccaatgggacggcgctggccaggctgcggtatttcagagcatagaacatctcaatgtaacggcgagtctcgcgcctgttaaggttgcttacgtacttccagaatccgtatacaccagttaaggtcatcagcctctcagagtacagcttccaggtgtacttctggtaaatcctctgcagacctccctgtgaaata

SEQ ID NO: 418435 - DNA, 440 bp, Oryza sativa
gtcatggctgccaagctagctcgcctccacagtctccgcgaacgcctcggtgccaccttctcgtctcatcccaatgagttgattgcactcttctctaggtatgttaaccagggaaagggaatgctccagcgtcaccagctgcttgcggagttcgatgccttgatcgaagctgacaaagagaaatatgctccctttgaagacattctccgggctgctcaggaagccattgtgctgccgccctgggttgcactggccatcaggccaaggcctggtgtctgggactacattcgggtgaatgtaagtgagttggcagtggaagagctgagtgtttctgagtacttggcattcaaggaacagcttgttgatggacacaccaacagcaactttgttcttgagcttgattttgagcccttcaatgcctccttcccgcgcccgttcat

SEQ ID NO: 418436 - DNA, 519 bp, Oryza sativa
gaactcggaaaaagggaaaaaagaatccgtctttgcatcccacatccctgtctttctcctctcctacccttcttcttcttccacttgaagctttttctctcttggtcttatcctcctccttgttgttgcgggaagaggcaggaaggaggaggttttgtggtgcgatcttgttggggtttcaggtcagaagggagaaggggagaggtcagccatggcattgcctgtttccctcctccgcatcgcggcggttctgctcgccatcttgccattctgcgccacgcatccaagccccgggttccatgctcctcgcgagtttcacaaggcactcgtcccagatagatatggatttgtggcaagaagatcaattgctgaagctcctgttgacgtaaatgtcactacaaacagttcctttgtcttggcgcatgagcgaacatatagaaaagaccccttgaatggattcaagaaatatactggcggttggaatattagcgaagtgcactatatggctttcagtggata

SEQ ID NO: 418437 - DNA, 460 bp, Oryza sativa
ttttgtttttttttttttttttttttttttttttttttttttttttttttttttttttaaaaagagggaagccccctggatcgcaggggtcatcaaacaatttattgaaaagggaggcaaaacaaaacatggggcaaaacaaacccctattccacagtatccatgagctcaatcctggggctactccatagagggggaaattaagcaaaagtcctcaggcagattaatgcctttaaaaccgccaaaaagaaccctggggggatcccccaggcgtttcccaaaacgcgataactaaaacaaccctccccatttttagccggcgtagctgaaacctgagatcttggaaaccccgaggggtccatttgggaaacccgcataaagggggcttccatttgggctccaaataaagcttgggcaaaaaagcatttggttcttggagacagggatctcgggcttaagg

SEQ ID NO: 418438 - DNA, 377 bp, Oryza sativa
ttagtcctagctctcccctatccctcgccgcacgcaccaccaccaaccatggccggcgcgcaggagtctctggtgttggccggcgtgatgcacggccacaacgacgtggtgacggccatcgcgacccccatcgacaactcgccgttcatcgtctcctcctcccgcgacaagtcgctgctggtgtgggacctcaccaaccccgtccagaacgtcggcgagggcgccggcgcctccgagtacggcgtgcccttccgccgcctcaccggccactcccacttcgtccaggacgtcgtcctcagctccgacggccagttcgcgctctctggctcctgggacggcgagcttcgcctctgggacctcttcaccggggtcaccac

SEQ ID NO: 418439 - DNA, 460 bp, Oryza sativa
ttttgtttcagtctcgaacaaggcacacaaacagatgttgatataatggcaatgttcttattagctagtcccaacactaaaccattggcaaacaatgcaacatttttcccatgctaagtttcttattttttgtcacaagtactgcaccttaaaattacagctgcagcaatccactagatcatcatattaaccataacccacaaaggattttcaagtccacatgagtcaatcaagcagctccacttttatttcttactggttgcaacattggaactgcccactgacaccccttcaggtggatcacttggatttggctggggctgggagcaactgatagcaagcaatgagtgagctagcaaatccaaacgcccctgtcacacgcggagtcactttcttgggagccagttgaagcagccctatagcaacaactatgtcgaggctcgatttgatgagagcgaga

SEQ ID NO: 418440 - DNA, 390 bp, Oryza sativa
gtcgttcgccgtcgaagccgatctcctgcgcgcggagctgctagcctctgtcagtcaccagctgtacagtatgagttcactggagagtgcaagagcagatcttgctctgcttattttatacctaaacaaggctgaagcaagagataagatctgtagagctatacaatatggctcgaaatttgtgagtaatggacaaccagggcctgcacagaatgttgacaagtcgactagtctagctcgtaaagttttccgactttttaagtttgttaatgatctgcatgctttgattagtcctcctgccaaaggaactccactacccctgatcttacttggaaagtcgaagaatgcactgctatcaactttcctctttctggaccaaattgtatgggc

SEQ ID NO: 418441 - DNA, 540 bp, Oryza sativa
tcggtcactctctccgagctctcgcctctcctcctcccccgtcttcccttcgcgcgcgccacccccacacacgcgaccatggcggcagtggcaggaggcgcagcgcgggcgctgtcgcaggcggagcaggacgtgcagatgatgctcgccgccgacgtccacctcggcaccaagaactgcgacttccagatggagcgctacgtctacaagcgccgctccgatggtatctacatcatcaacctcggcaagacatgggagaagctgcagctcgcggcgagggtgattgttgccattgagaacccccaggacatcattgtccagtcggcccgcccctacggccagcgcgccgtcctcaagttcgcgcagtacactggcgcgcacgccattgctggaaggcatacgcctggtacatttaccaatcagctccagacctccttcagcgagccccgtctgctcatcctcactgacccaaggaccgatcaccagccaatcaaggagtctgctctgggaaacatcccgaccattgccttctgtgacacc

SEQ ID NO: 418442 - DNA, 471 bp, Oryza sativa
ttttgtttattccgaaagggcaaggattacccaaatagcttattattcgtcaaacaaatgataatatacatggtacaggaacaaatattgtgtaaagagaatgctcattagttgtaaatacatcagcggtaattcagcattctatcaaccatactaggtgcaaatgaaaagtcttatcggcaagattccgtcaggaggatttccacaatactagggaacagttcaagcttcaaggaggaaattcagcaatctatgttgtgcaaataacctttgcttttgcaactcacctttagctgaggacatgactgccatagtcttgattgaatttttcgtatctatgtacatgaagatgagcagatggccgtgtattccttagtgcaagctcaatgtcttctgtcgttactggaccaacttcaggcaacttatcctcaggcacttcttcttgccttccttcaagaaccgacattaacc

SEQ ID NO: 418443 - DNA, 348 bp, Oryza sativa
ttttggttaatcggagaaaattcgcccaattttcttccaatctgcttcttaattcttatacaagcagagagatttgattttgaattttttttacagggcatggtgcgcgtcccgggcatcggcctcgtatacaccgacctcacctccggcgtgccggccatctaataccgcttcgtcaccaacctcccggcgttccaccgcgtgctggtgtacgtctgcgtcaagtccgtcccggtaccgcacgtgctttccgccgagcgctacctcgacggccgcgtcggcccggctgggcaccggtcgaaccggtgcatcgtgcggcacggcttcggggacgtgcaccaggacgag

SEQ ID NO: 418444 - DNA, 459 bp, Oryza sativa
ttcatgcctcactcgcctagaacccctcctcctcctcccgatctccgaggcaatcctcctcgaattccccgcgccccgatctccccctgacgccaccctcctcctccgccccggatcgccccgcccgatctcgccgcggggtcgaatttccccttctcttgtctccgatcagggccgcctcgatcgaaggcggcgccgcgccgaccatcccaccttgtttggttgtaatttcttcttgtcgcgtgaggaggggggcgtggcggcgggggagagcgcgtgagcgggcgggagatgggggcgccgaagcagaggtggacggccgaggaggaggccgcgctcaaggcccgcgtggcgaagcacgggacggggaagtggaggaccattcttcgcgacccggaattcaccgcgcttctgcggctgggaaccaaagttgacctcaaggataagtggcgcaacttg

SEQ ID NO: 418445 - DNA, 449 bp, Oryza sativa
gaggaagcgcggcaataaaacattgcattgaattctgaacgataaacaccaggaaccggcgtttatttgaggcaagcactgcccaaaatctcgcaaaagtactgaaaccttagacatagtacacatccatggcaaacatggatgccaaatgacaactacagaaaattatcaaattcgaatgcagctgacggcttctcctgctgaagatgcatattttcccctccattacttggatgtgctctctccatcgacagccaatgggacggcgctggccaggctgcggtatttcagagcatagaacatctcaatgtaacggcgagtctcgcgcctctcaaggttgcttacgtacttccagaatccgtatacaccagtcaaggtcatcagcctctcagagtacagcttccaggtgtacttctcgtaaatcctctgcagacctccctgtgaaatat

SEQ ID NO: 418446 - DNA, 505 bp, Oryza sativa
  unsure (1)..(505): unsure at all n locations
gttcaccgccgtgtttttcgttcgttctgtttcttggtgttcttgaagagttcctgaaattgagtcatggctgccaagctagctcgcctccacagtctccgcgaacgcctcggtgccaccttctcgtctcatcccaatgagttgattgcactcttctctaggtatgttaaccagggaaagggaatgctccagcgtcaccagctgcttgcggagttcgatgccttgatcgaagctgacaaagagaaatatgctccctttgaagacattctccgggctgctcaggaagccattgtgctgccgccctgggttgcactggccatcaggccaaggcctggtgtctgggactacattcgggtgaatgtaagtgagttggcagtggaagagctgagtgtttctgagtacttggcattcaaggaacagcttgttgatggacacaccaacagcaactttgttcttgagcttgattttgagcccttcaatgcctnctttccgcgcccgtccatgt

SEQ ID NO: 418447 - DNA, 524 bp, Oryza sativa
gatatcaaacagagagcaattctcttctcctacctagcaacctagtgcagtgcagtgcagtgcagcgaaggtttacttggcgacttccatgggttgcctgttgatgctctgcttggtttctcccctcctcctcgccacctctgtccacggcaacccgtggtatgggtatgggtatggcttgttcccgcagttctacgaccactcgtgccccaaggcgaaggagatcgtgcagtccatcgtagcacaggcggtggccagggagaccaggatggcggcatccttggtcaggctgcattttcatgactgctttgtcaaggggtgtgacgcgtctgtgctcctggacaacagcaccaccatcatcagtgagaaggggtcaaaccctaacatgaactccctcaggggtttcgaggtcgtcgacgagatcaaggccgccctcgaagcagcttgccccggcaccgtctcctgcgccgacatacttcgccctcgctgcacgcgatttcactgtcctcgttggtggcccgtac

SEQ ID NO: 418448 - DNA, 466 bp, Oryza sativa
  unsure (1)..(466): unsure at all n locations
tgtttttgatcacaagaggaattgatataatgacatagtttataacattacataacacaaacaacataattaacccttacaaaacaccacatggacacagacaaaagaccatcacttattcagacacaaaatcatcatcagaagagtagtagaagaagaccatagagcagcagcagattaaagccttgaaattctcaaagcagccaagagaagaaaaaagatgaagacttcttgatgccaaccacagcttagctcagagctcactctcccatggcgcggcgttcgttcagtactggagcatgtgcgcggtggcggggcaggggatctgccatggccggagcagcgggtcgtcgggggggcactcctcctggatgtccatggcgacgccgctgaactcctngacgacgcggagcaccttgttgacgctgcgcagcctgtcgccgagctcggcggcgcgcgcccggag

SEQ ID NO: 418449 - DNA, 541 bp, Oryza sativa
  unsure (1)..(541): unsure at all n locations
tcggtctcttctccggctctctctctcttctcctcctcctcatctcggcaaaaccaccaccgcattgccggtatatttagttaagccgcgatagaggagggagggatagcgtagagggagagggaacaggggagggtggcgagctcctgaccatctctctccgccctcttcgtttcgccgctcctcgccggatccatcttcaaaagaggacgtcggagaagatgatgggcggattcctctcccgggtcctcctgttggcctttggctacgcctatccagcatatgagtgctacaagactgtcgaactgaataaaccagagattgagcagctcatattttggtgtcagtattggattctagtagctctgatgacggttatggagagatttggagattctacaatatcatggctaccattttactcggaagcaaagctgatgttctttatatacttgnggtaccctaagacanagggaactacctacatttatgggactttttttaggccatatatttcacagcatgagaatgaaattgaccg

SEQ ID NO: 418450 - DNA, 507 bp, Oryza sativa
gtcgggaagcacgcggtgatggcgcggacggggctgccggcgcgcgacctgcgggtgctggacccgctgctgtcgtacccttccacgatcctgggccgcgagcgcgccatcgtcgtcaacctggagcgcgtcaaggccgtgatcaccgccgccgaggtgctgctcccgaactccaaggatcccgccttcgcgagcttcgtctgcgacctgcaggcccgcgtcctcgcctcgtcctccgaccaggctgcagaatttactgatatggaaggcgaatcatctgcagttacttcaccatttcctgctctgacttcaaccacaccaaatgaattggagatgactaacaagaattccaatgtggtaggcggaatgactcacagcaacagtatgcccacattgactgctgcaaaagatggaaataccaaagttttacccttcgaattccgagcacttgaagtgtgccttgagtcagcctgtagaagccctagagaggaaacgtcgactctggag

SEQ ID NO: 418451 - DNA, 467 bp, Oryza sativa
tttgtttttttttttttttttggttttactccagaccaaacaattacttcaaaattcttaacttcatcatcaagaccaaacaaagcaaacgcatagactcaaaaacattcatttctcatcagaaagcaaatatgcagctggcaagtaatcccaacaaactattcagaatatctgccattgacacaggctaggatgttcacgatccacaactagatagctgtttacttggtggctaaataaacgggcagcaaaataagggataatctctactcggcagcagcgacctcctgcccggccatggcctcatcttctgcaggcctatcaagcttcgtaccgatgtcctccttggcatagtcaccatgcacctccatgagcttccccaggtcaaatttcggggcctttagaatcttcactttgcggacaaacacattctgaagggggaaaatactggatgtcgccttctcaat

SEQ ID NO: 418452 - DNA, 539 bp, Oryza sativa
tcgttctctcgcgccgccgccgccgccgagcgcctggagcagcgtcagccatggccgtaggtaagaacaagcgcatctccaaggggaagaagggatccaagaagaagaccgtcgatccctttgctaagaaggactggtatgatatcaaggccccgtcggtgttcaatgtgcggaacatcggcaagaccctcgtgtccaggacacagggtacaaagattgcttctgagggcctaaagcatagagtgtttgaggtctccttagctgatctccagaacgatgaggatcaggcgtacaggaagatcagacttcgtgctgaggatgtgcaagggaagaacgtgctcaccaacttttggggcatgtcgtttactaccgataagctcagatcacttgttaagaagtggcagacactgattgaggctcatgtggatgtcaaaaccacagacggctacatgctgcgtctgttctgtatcggcttcaccaagcggcggcctaaccaggtgaagaggacttgctatgctcaagcgagtcagatcagacag

SEQ ID NO: 418453 - DNA, 535 bp, Oryza sativa
tcgttctctttcaagcgtagagacctctccacacttatcagagtaataaggaaaaaaatatagattaaaaatggtgaagctcgcattcggaagcttgggtgactccttcagcgccacgtccgtgaaggcctacgtggcggagttcatcgccaccctcctcttcgtcttcgctggcgtcggatccgccattgcctatgggcaattgaccaatggtggcgccctcgacccggccggccttgtggcgatcgcgatcgcccatgcactcgccctgttcgtgggcgtttccgtcgccgccaacatctccggcggccaccttaacccggccgtgacgttcggcctcgccgtcggcggccacatcaccatcctcaccggactcttctactggatcgcccagctgctaggcgcctccatcgcctgcctcctcctcaagtttgtcacccacggcaaggccatcccgacgcacggcgtcgccggcatcagcgagctggagggcgtcgtgatggagatcgtcatcacgttcgcgctggtgtacacg

SEQ ID NO: 418454 - DNA, 449 bp, Oryza sativa
agtccacacaaaacggaacaagtcttatttccaaggcaaattaacaaatgcaaacagatttacaaacggaagaaatcaactgcacgctacagacagtatccactaaaattattccgtaaccaaatcaaatgagtagatcagatggttttgttgatgaaagaaaatgcagaaaatgatgggagatcgacggcggccggctacgatcacttgaacttggccttgatggcgtccacctgcgggacgtcgacgcggaaggccttggcgaggacgtcggacggcacgggcggcgcggcggcgaagagcgtggcggcgatggcctgggtgccctggagctggctgttgaaggcggcgatgacggcggcggggccgtggccgcggttctgctggaagtggacgaggccgcgcgggaagacgaagacctcgccggcggtgacagtctttgtgaagag

SEQ ID NO: 418455 - DNA, 380 bp, Oryza sativa
ttcagtcaatcgcagcgagaagccaagaagcactcaaccacgcgctgttcgtcatggcgagggtacagctctgggtggccgccgcgtgcgccgtcgtgctcgcgctcgccgcgccctcgctcgccggcgaccccgacatgctccaggacgtctgcgtcgccgacttggcgtccccggtgaagctgaacgggttcccgtgcaaggcgaacgtgacggcggacgacttcttcttcgcggggctgaagaaccccggcaacaccaacaacccggcggggtcgaacgtgacggcggcgaacgtgcagtcgttcccgggggtgaacacgctgggcgtgtctattgcgaggatcgactacgcccccgggggacagaacccggcggac

SEQ ID NO: 418456 - DNA, 398 bp, Oryza sativa
ttcgtacagatgcaagatgctgaggctatccctgcattagaggcagttctcaaagatctttcacttcatccaattgtccgacacgaggctgcggaagcgcttggagctattggcctggaaaagagcatttccctgctggaggagagtttagctgttgatcctgccgcggaagttcaagaaacatgtgagctggctattagacggatagaagagcaaaagaatactagtggagttgaaagtgcaactgtttcaccttttctctcagttgatccagcactgcctgcaaagcaaggacttccagtagaacaactaagggagcttcttctcaacgagcaaagaagcatgtatgaacgttatgcagctctctttgcactaaggaatgacagtggagatgctgc

SEQ ID NO: 418457 - DNA, 315 bp, Oryza sativa
tcacttcgtagggtttttgcttgcttctcccggctgcaaagcggagccgcggcgcggcccggggacgaggagggaggggagccatggagatcgggcagcatccggcgagcggctactccaaggagcaccagaagacctaccaggagtggttcgccttcgccgactcagatggcgacgggcgcatcacggggcccgacgccatcaagttcttcgccatgtccaagctcccccgcgccgacctcaagcaggtttgggcaatcgcggactccaagcggcaggggtacttaggtttcagcgaattcgtcacggcaatgc

SEQ ID NO: 418458 - DNA, 379 bp, Oryza sativa
ttcattttccgcttgcatcttgctcattcagatctcttctgctttgagcaatggccaacctcaccgacctcgttaacctcaacctcagcgactgcagcgacaagatcatcgccgagtacatctgggttggaggatcgggcatagacctcaggagcaaagcgaggactgtgaaaggccccatcaccgatgtgagccagctgccgaagtggaactacgacggctccagcaccgggcaggctcccggcgaggacagcgaagtgatcctctaccctcaagccattttcaaggacccgttcaggaggggcgacaacattcttgtgatgtgcgactgctacacgccacagggtgagccaatccccactaacaagaggcacagtgc

SEQ ID NO: 418459 - DNA, 367 bp, Oryza sativa
tcgttcactccagaagttacatcacgcattgctaaccgagctgtgatcaaggagctggtaaatctgtacaaggcatcttatctgggtgggaggctgcctgcatatgatggtagaaagagcttatacacggctggcccattgccgattacttcacaggagtttcagatcactttacttgacgacgatgatggttctggttctgagaggcgacagaggactttccgagtagtaatcaagttcgccgaacgggccgaccttcaccggcttgagttgtttttagctgggaggcacgcagaagctccacaggaggcactgcaagttcttgatattgtgctgcgagagctaccatcagcaagatatgcgccat

SEQ ID NO: 418460 - DNA, 460 bp, Oryza sativa
gaaaaaatggaggtaatagatagatatgacgtttcgtatgctctacacgtatcatgaatatcaccatcatcatatctagcttagctctctacacaagtgctactattgaattggggctaaaaaataggtgagcggattaacagcaggtaatggatagcagcctagtggacaaatgttacgtttgggggggggacgcccacatctggtaatatgactcctgtgcctccgcaattctcgaatggaaaattccccattctttgcgacaacgttcccttaccccttcccacggtgccctcccgagctctgactgcccctggttcccaagagaaggaaccacttgatgtacaatccattgggaatcaacgacaccgattttgtcatgtgcaggagctacacattttctgagagcgaaatcaagaccccatccatgaaccaagtcatgctgaatcatatgccatac

SEQ ID NO: 418461 - DNA, 466 bp, Oryza sativa
tttgttttagtccacacaaaacggaacaagtcttatttccaaggcaaattaacaaatgcaaacagatttacaaacggaagaaatcaactgcacgctacagacagtatccactaaaattattccgtaaccaaatcaaatgagtagatcagatggttttgttgatgaaagaaaatgcagaaaatgatgggagatcgacggcggccggctacgatcacttgaacttggccttgatggcgtccacctgcgggacgtcgacgcggaaggccttggcgaggacgtcggacggcacgggcggcgcggcggcgaagagcgtggcggcgatggcctgggtgccctggagctggctgttgaaggcggcgatgacggcggcggggccgtggccgcggttctgctggaagtggacgaggccgcgcgggaagacgaagacctcgccggcggtgacagtcttggtgaagagcttgttggc

SEQ ID NO: 418462 - DNA, 501 bp, Oryza sativa
  unsure (1)..(501): unsure at all n locations
caatcgcagcgagaagtcaagaagcactcaaccacgcgctgttcgtcatggcgagggtacagctctgggtggccgccgcgtgcgccgtcgtgctcgcgctcgccgcgccctcgctcgccggcgaccccgacatgctccaggacgtctgcgtcgccgacttggcgtccccggtgaagctgaacgggttcccgtgcaaggcgaacgtgacggcggacgacttcttcttcgcggggctgaagaaccccggcaacaccaacaacccggcggggtcgaacgtgacggcggcgaacgtgcagtcgttcccgggggtgaacacgctgggcgtgtctatggcgaggatcgactacgcgccggggggacagaacccgccgcacacgcacccgcgcgccaccgagatcatcttcgtcctcgagggcgtcctcgaggtgggcttcatcaccactgccaacangctcttcaccaagactgtcaccgccggcgaggtcttcgtcttcccgcgcg

SEQ ID NO: 418463 - DNA, 530 bp, Oryza sativa
  unsure (1)..(530): unsure at all n locations
attagctatagcagcttaattagcttaagcacaaaaggtacagtaagcctaagctagctacacactaagcaagcttattagccatggcttcatcaccaagtctgccattggtgacgtgtgccctgctgctgctgctggccgtggcatgccaggctcacccttactggccactggagttggcgtactaccgcgacaagtgcccccaggccgaggccgtcgtcaaggccgtcgtcggggaggccgtccgccagaaccccggcaatggcgccgccgtcatccgcatgctcttccacgactgctttgtcgagggttgtgatgcttcgatcctcctggacccgacgccgttcaacccgacgccagagaagctgagcgcgccgaacaacccgtccatgcggggcttcgacctcatcgacgcgatcaagcacgccgtggaggcngcgtgccgggcgtcgtctcgtgcgccgacatcatcgccttcgcggcgcgcgacgccacctacttnctcagcggcgggaaggtctacttcgaca

SEQ ID NO: 418464 - DNA, 471 bp, Oryza sativa
tttttggtttttttttttacaaactcaagaagcactccgaattgaaatactcgccattgcttgcagtacgtacagagccgaaattgctacactacccttaagtttgcatgccgtcgctagctgcttatcgatcaatctcacatggccacgcatgagctgatacatagcatcggtgtagtttctcaaccgtgatttgatcagtgagacagtgacatatatatagaacagttcagcgactaaattaaacggtggcgccgttgctcttcccgccattggggacgacgtggtgtttgtcggcgtcgtccatgaagcgcttccagaaccagtgctgcttccacaccctctcggtcatctcctcgaaggggatgttcttggtctcgggcaggaagaagagcacgaagagcgacatgacgacgacccacgcggagaagaaggcgaagatggcgtacttgaggtggcagagcatggaga

SEQ ID NO: 418465 - DNA, 489 bp, Oryza sativa
  unsure (1)..(489): unsure at all n locations
tttgtttttttttctccttggtttctatttcatttcattccgatagatagcaacaagcagttcaaacaccataaccaaagcgaactcaattcatggtaacatcacgggcgaagaacacctaacactggatggatggatagagggcttctcgactcgagagagccactggacacgataacgactcgactcgatgataagatgattctgacacggatagctaaggataactggccacgatgggccccaccaatcagttcctccagttcccgccggagtcgccgccgtagccgccgccacggctgccaccgtagccgccgccgccggcggcacggtcgtcgtcgtagccgccgccgccaccgtagccgccctcacggtgcccgtagccgccgccgacaccttctacgtagccgacgtctacacgaccgccgncgtagacgacaccgtcggcgtcgtagcccccgcctccgccgacggagcggcgggactggg

SEQ ID NO: 418466 - DNA, 289 bp, Oryza sativa
agggcccgaacggccgggtgctctacggccgcagcatcaccgtcaatgaggcccagtcccgccgctccggcggcggaggcggaggctacggcggcggcggtggcggctacggcggcggtcgcggaggcggcggctaccgaggaggtggcggcggcggctacaggcgccgtgagggcggctacggtggcggcggcggctacggcggcggccgtggcggcagcagcggcggctacggtggcagccgaggcggcgtctacagcggcgactccggcaggaactggaggaactg

SEQ ID NO: 418467 - DNA, 435 bp, Oryza sativa
aaatccatgaattacttcatgcataaaccgcacgacataatggaatggacggtgaacaacaaaccgaattagatacagaacaaaacgtaaaatacggtagcaaattattcactccctacaatgctccctccatctgatggaaatggaagtcatcagatcggaggcccagaagggaatcctgcgttccagcaattattcgtcaggcgatggactaaaaaggcagagaaacaagaggctggctgattacaatttttcgacagagtttcatctcatgaagagagatatactgctcactcaggcctcgagctggagcttcttgattgtgtcgatgtgcttcgctgggttgaggcccttggggcaggcgtgtgtgcagttcttgatggtgtggcagcggtacagcttgaactcgtcgttgatggaatccaggcgctcctt

SEQ ID NO: 418468 - DNA, 269 bp, Oryza sativa
gttttccttcgcgccgccgccgccgccgtcgaaggcgggggcgaacaccaagacgttctcgatctacaggtgggatcccgactcgccgtctaccaacccccacctaagggactaccaggtgcaccttgtacgctgtggtccgatggtgcttgacctgctggtcaagactgagaacgacgaggatccggctgtcgaactacacctgatttagcgtcagaaccgccgagagctacggcgccatgaacatagaacaaggtgatcgcgaccga

SEQ ID NO: 418469 - DNA, 455 bp, Oryza sativa
ccttttctaaatcacatagtgctaaacccgccccctcttaattatatctccacttagcaaggtgtgtggttgcgagcttaaaacgcacccacgcagggccatggcgaccgatggcggcgtgttgcagctgcacccctacgccatggccgcggctgccgtggcattggcttcggcgtacatggtgtggttctgggcgctgtcgcggcggctgtccgggccacggatgtggccgctcgtcggcagcctacccagcgtcgtgctgaaccgggcgcgggtgcacgactggatcgccgacaacctgcgcgccacgggtgacgccgcgacgtaccagacgtgcatcctgcctctgccattcctggcgcggcggcaggtgctggtgacggtgacgtgcaacccgctgaaccttgagcacatactgggcgcgcgctttgacaactacctcaaggtgcccatgt

SEQ ID NO: 418470 - DNA, 413 bp, Oryza sativa
gcttcacttacgcctgcactagctgctgaagccaacatgttaagggagagatttgctcatcggtatcacagtggctccctttttggcatgaactccaggggcaggagaggtgagtcctctcgacgtggtgacataattggttcaggtcttgatagaaatgctggtgattcttctcgacaaccaactagcaagccaattgaaacggaaggatctcctcttgttgacaaggatgctcttaaagctcttattaggctactccgggttggtcagcctctatacaaaggtcaattgcagaggcttctcttgaacctttgtgctcatagggaaagcagaaagtccttggctcacattctagtggacatgcttatgctttgatctgcagggctcttctagaaatcaattgatgcaactga

SEQ ID NO: 418471 - DNA, 444 bp, Oryza sativa
ggtgtctttcgccggcttgtgcataacccacggagtcagcccggcgagcccctgcgccacgtacccgaacgtcgaccacccgctggtcaccagcgcgtcggagaggctgagcaggtatatctccgcccacgccttgccgtcgtgcgacctggcaccgaaccgctggtactcctcgtggctcggctggtgcacgctcaccgcctcgccggtggccgtcgcgtgctcccagtacatgctcttcatcttctcgtagtaccacgacttgagcgaggtgacgagcacggttttggacttggagttcgccggcacgacgtctacgacggggggctctccggcggcgatcacctccgggagcagcttctccttctgcgtgcacgtggtgatctgatcaagcagcttcggcgactccggctgggcgccgaagacgcgcacctggatgccgac

SEQ ID NO: 418472 - DNA, 236 bp, Oryza sativa
gttttccttcgcgccgccgccgccgccgtcgaaggcgggggcgaacaccaagacgttctcgatctacaggtgggatcccgactggccgtcaaccaacccccacctaagggactaccaggtgcaccttgtcacgcggtggtccgagagcccttgcccggctcgacaaggatgctgccgacggggatcccgctggcgaactacaccagcttcaacgtctaaaccgtctgaagctacgg

SEQ ID NO: 418473 - DNA, 474 bp, Oryza sativa
  unsure (1)..(474): unsure at all n locations
ctgcacctcttatggctctattttcattcggtagggaaaatgtttaggactaacaaatagagacatacgtttgcacgtgcagctgtagcacggatgccataaccactaataatccagtgacacgctgcactcacataatccaattgagaatgaagattagccccaaactgtgtaaatcttaagtccacaaagactgagcatggaaaaaaagtaaggagcaatgaacatagacacgaacagcgcttcttgctttggtcgactatctcatttgaactattccagcgcttacaagcttctgaatcttctgcatcactccagggttcttaagatgctcctgagaagccctagggttctcctgcaaatcgaccagtacctgtcgcatgatgggatctgtaagaatattctggatctctggatcctgcatagccttgttctgtcgntcctgaatctcttcctgagtcaaatcacccctgt

SEQ ID NO: 418474 - DNA, 567 bp, Oryza sativa
gctggctggcccgcctgcacggagccgggacttactggctggaccgacccacgcggacgtttcgagctgggctactccggcagcgcggatccggatcccgggcgtagccggcggacggactgtaagaaatggcggcgctcgagggatgcggtcgccgaccagaagtactgtgagcgacacatgaaccggggacagccaccgttcaagaaagcatgtggaaggccagcctggccatgccgcgaaagcgatgcccgcggcggtggcagcagccgctgcctctgctacccagcctagtgctccggccgcccacagtggcggagctgttgctggcctcgctattaaccattagcaccagcaaatgaagaactacgctgccaacactgccaatccttgctctctgcaatatagcagggatctggcaaacaagcataatgagagtgaacaagtgcaagactcagacagtctctcgatgctgacttccattagcacgagaaatacgggcaggctgtttgcgttttcaaacaacataatccttttgaagtggtcaacttaagggcagattttggc

SEQ ID NO: 418475 - DNA, 479 bp, Oryza sativa
ctcactttcaataacttgcaaggataactcaaactacttgaatcagatcagacaaaaacatcataagaatatcacgatgtgtggaggagcactgatcccgaacgactatggcgacaagccgccgccgccgccgtcggagtcgtcggagtgggacgcctcagcgaagacggacaatgaagaataagtgacagtggtaaccggcgacgtctagttgggggcactgcctatgttgtcactttttaacagcatattgtgcagagtttctaaatttgcaaggcagtccccctttcaagattgctctagatctcaagagtatacttgccaaatgccctctcaaccttcttgttgaagtgttcgatccggtcattggtcgagtaaaagtccctggcttcagggaacctgcgccttcctgtgaaatgttttccgtttcttattccggccctttaagctaataaaccattcctgtttatgattacttt

SEQ ID NO: 418476 - DNA, 422 bp, Oryza sativa
  unsure (1)..(422): unsure at all n locations
aattcaaaaagactgcccaaacagaccaagggttttatcatagcagcaaagttttttaacacgcaacatcaaagagacactaatgcaataagataacttgaagcgcggatcactagcaaatttcgcgcttagtcgacctccttgatcttggggccagcaccgttgccgcctgccgggggagcattggcctcgtccatgccgccggccatgtccgcgccagcgccctggtacattttggcgatgatggggttgcagatgccctccagcttcttcattttggcatcgaactcatcagccttggcgagctggttgccgtccagccactggatggcctgatcgatggcatcctcgatcttcttcttgtccgctgccgggagcttcgaggcgatcttctcatccttgatggngttgcgcatgttgta

SEQ ID NO: 418477 - DNA, 249 bp, Oryza sativa
ctcgagcggaatccccctctctccggctaaacctcgccgacaaggagaagcataagtgcctccctgttcgacggcgccggccatcaacgtcgaccttagcacgacctactcgagcgtgggcgtttggctgcacgaccgcgtggagatcatcgtcaacgaccagggcaaccggaccaccctctgctacgtagagtccacggaatgcgagaggctcatgggagatgccttcaagaaccagtgcgacatgaa

SEQ ID NO: 418478 - DNA, 490 bp, Oryza sativa
tttgttgttagcatccaaataatctgcccacagagattctgctctgctgtgtttgcactagcttaccgatttgagtcgatacagtaaggtaaaagagtcgcacaagcacttgaagggtacaagcctgggttccgcaccagaggatataaccaatatttgaaaggaacattctaaatggacaagaaattagaaacctactagagttattacaggactgggttacacagatagtcacacgattcagctccttggagcacagctggccaagtgagtcttgaagttctccagctctgcaagaacttcatcttctggacggtatatcaggtcactcatgcgccatatctgcaatgttccacctccaccagtactctcaccatcatcagacacactcacaatagtccaaggatccgaagaattccagtggaagtctacaatcttatccctatgaccagcatgttgaaagaaaagcccagcaggtgcgttgggattt

SEQ ID NO: 418479 - DNA, 508 bp, Oryza sativa
ccggctggacccacgcgtgcggtctgtcttttctgagcgggagccacgcgcaagggttcagagcaaacgctcctcatacgacagagagagcgtgacagcgcgagggggttcggaggcgggagcgggcgacggcggcggctgcaggcgccagcgagcggcgaagggcgcgctggagatgaaggagaaggggtcgagggcggcggtggacgagcgctacgcgcagtggaagtcgctcatcccggtgctctacgactggttcggcaaccacaaccttgtctggccgtccctctcctgccggtggggaccccagtttgagaaggctacctacaagaatcgtcagcgtctttacctttcagagcagacggatgggactgtccctaatactctggttattgcaaattgtgaagctgtcaaaccaagggttgcagatgctgaacatatatcttaggttcatggggaagcacgatcaccttttgatagaagtcaagactataattcattcaggcga

SEQ ID NO: 418480 - DNA, 535 bp, Oryza sativa
gtctcgcccttttttgtttgttttttcaatgactatgctcatttggatacattgcaaaatcactatagttaatgattccgctcattttggatacacaacttctcgaatatgctatattctcacgacattacatccgagttggctttcttacagttacagtttccaagcaaattgttgataggttacaacttacaagcaaaagacagctggggaaacagacaacatgtccactctctaccagcagagtgtgcagagtttctaatctggcaaggcagtccccctttcaagattgttcttgatctcaagagtatacttgccaaatgccctctcaaccttcttgttgaagtgttcgttccggtcattgatcgagtcaatgtccttgtcttcatggaacttgcgcctcctgctgaatgctttcccgtttctcatccccgttccttaagctcattaaccatcctgtctatgttttctttcgggaccttagacacctttccatattggagacttgaagcgtcccgattaaataaggatcggt

SEQ ID NO: 418481 - DNA, 491 bp, Oryza sativa
ggtggaccgcaccgtccaccccgactgcatcaacgcctccaacccctaccacgtctgctccgagtactgcttcaagaggatcgccgacgccaaatcagggttggagcgtgcggagcaagaaccgccttctgcagacgctggcaaatccgatgctgcccaagctgagggtggtggtggtgatgatgatgcggagcaggaggacgccggctcagacgacggttacccgcagatgacagagaagcagaagaagctatttgagttgcggctgaagatgaatgaagctaggaaggcaaatcagcaagcgatggtggcagagaagaagaggatggagcctcgcgctgagagtagaggtgtttctaaacaaaagtggctggaagacagaaaaaagaagatcggaaagcttcttgactcaaatggcctggacatgacaaagtcttacatgctcgatacacaagaagtcgccgaagcgaaatacaagaagtgggaaaagg

SEQ ID NO: 418482 - DNA, 472 bp, Oryza sativa
  unsure (1)..(472): unsure at all n locations
gaaaagctcatggaatccctttattatttagtgtgtcaaaggaaacagcagcacaccagtctcggctctagtattagcaaaatgaaagttacagcattgccgcagcggttgcgaaagaaaatcagcacattctggttccccagtgtgccagggagctcgaagcagactgttaaactcgttcaatccagcgtcaagagtgagtaggtcagaggagatctcatctcttccaccgccgagcttgctatcttgagtccacaacagtgccctcaggaagcgcagacaggtgtacgagagcgtgagatttttgtgggctatcggagccagngatcttctccttcggccggctcaacaccttcctgacctcgttagctagctcgatgattgaatcatcttcatggcatatgttggacaatgccttctccattgagaacaggtaatccctgttattcccattggggccattggctgtagc

SEQ ID NO: 418483 - DNA, 439 bp, Oryza sativa
ggaaaaagaatacttttcattcaattcatacttatgaaaagaatttatgaagagtagttacaccaaggtgtatcacagtactgaatacatgagtatactcgagagttcagagtaaccccgcaaaaaacccaacaacaatcgctctcaagttgtcttgatccaattagctaaacccacgaaagaatcttaaatactgtcaagaacgacattccatcacagtctaaaccgaatccagaacagtactaatcctaggctaggcaaactgccggagggcgcagagagacacgcccaagctgctcggatgcgtacttcctgtatgccgtcttcagcttgctctcaggagcggcagcatgagcgttgacaaggaccttcgcacactccctgagctgtgattcggtgaaaccggtgtggtgcttgagcgtgctcgttcagaggggac

SEQ ID NO: 418484 - DNA, 429 bp, Oryza sativa
  unsure (1)..(429): unsure at all n locations
ccttgtcgaggtgaaccccaagatgagggccatcctggcagactggatcatcgatgtgcactacaaattcgagctgatgccggagaccctctacctcaccatgtacgtcatcgaccggtacctctcgctgcagcccgtgctgcgcagggagctgcagctcgtcggcgtcgcggccatgctcatcgcctccaagtacgaggagatgtgggcgccggaggttcaggacctcatgcacgtctgtgacaacgcctactcgcggcagcatatcctcgccatggagaagaacatcttgaacaggctgcagtggaacattaccgttcccacaccttacgtcttcttgcttncggttcatcaaggccgtccgaggcgacaaggagcttggagaacatggggtccttcttctgtgagatggcgctgaaggagtacggc

SEQ ID NO: 418485 - DNA, 424 bp, Oryza sativa
cgaaaaaaaaaattgtccgtgcaaattaacaaatgagcaaatcccaaactggcttaagctagctagtaggctagtagccgtggcatctggacatgatgggcgggtcggcgaacgggccgtcgagcacgccgcgcgccatgatccggtacaccgcctccgtcatgtgcaggccgtcccacgagatgcgccgcgacgggtccgcgcactgcgtcgcgccggggtcggagcagtgcacggtgaagttgccgttgtacggcccgccgccggcgcagaacgcggtcagggcgtcgtcgaacccgctcgccgcggggttcgacacgagctccatcacctcgccgtagtagtcggcgtaggcgatggtgacgcccgggtgcgcggcgcggagctcggcgaggcggcggcggaagagcgcgttgtggagggc

SEQ ID NO: 418486 - DNA, 506 bp, Oryza sativa
agctaaagtattttacttcaataattcaagacaactcaaacttagttggcacacatgtactccaccccctatcactagagttgttttcttttttgtacaagatcatcctaacattcccacaaggacataaagaaacagcagaaccttcccgggaaaatttcactgagacaggtgcattccgtgcacgtacaataatcatcaccatcatcgtatgatccaacctacaggaaaacgcaaattcaaggtactcttgtccaaacctgtaggtggccagtgatttgctcccatcggctacaactaccagactcaaaaaaactagacacaggtatgatgctaataagcttagcatgatcgactgatggacagacagtaataacaaataggaaacggagggaactatatgtgtcaactcgatgaactctataatatatggatgatttccagcgcccttctggcaaaaataacgtcctcgtaaattattgtcaccatcttaaaccacttgaaga

SEQ ID NO: 418487 - DNA, 495 bp, Oryza sativa
gggaaggacggcggcgccgccagcgagtacctcatcgaggaggaggaggggctcaacgagcacaacgtcgtcgagaagtgctccgagatccagcacgccatctccgaaggagcaacttctttcctcttcactgaatacaagtatgttggactattcatgggcattttcgcggtcctgatcttcctcttccttggatctgttgagggattcagcacaaagagtcaaccttgccactacagcaaggataggatgtgcaagcctgcccttgcaaatgctatcttcagtactgttgcctttgtgcttggtgcagtcacctctcttgtatctggtttccttggaatgaagattgcaacttatgcaaatgccaggacaacccttgaggcaaggaagggtgttgggaaggcattcattactgctttccgctctggtgctgtcatgggtttcctgcttgctgcaagtggcccttgtgttctttacattgccatcaacttgttc

SEQ ID NO: 418488 - DNA, 407 bp, Oryza sativa
ctccctttctgcctgtcctccggccccgccgccagagcccttgcagaagcttccggagcccgcgccgacgatctgatcgccgtcgcgtgccatggccgacgaggcgaaggcgaagggtaatgcggccttctcggccggccgctacgaggaggcggtgcggcacttcactgacgccattgcgctcgccccggggaaccacgtcctctacttcaaccgttccgccgcgctcggcttggtccaccgttactccgaagggctcgccgacgcctagaagaccggcgagctgaagcccgactgggctaaggggtactcccgccttggagccgtccacctcgcttcggggggcagccagagcgccgtatttcgcctacgagaaggggtttcgtcctcaacccccacccaccgag

SEQ ID NO: 418489 - DNA, 503 bp, Oryza sativa
tctctgacgcactcacacactcagcttaagcgagcgagcgagtgaacgagagagagagacagagatggcgagtgttgcctccttcccggtgatcaacatggagaacctggagaccgaggagaggggcgcagcaatggaggtcatccgcgacgcctgcgagaactggggcttcttcgagatgctgaaccatggcatcgcgcacgagctgatggacgaggtggagcgggtgagcaaggcgcactacgccaactgccgggaggagaagttcaaggagttcgcgcggcggatgctggaggccggcgagaagggcgccgacgtgaagggcatcgactgggagagcaccttcttcgtccgtcaccgtcccgtctacaacctcgccgaccctcccgacgtcgacgaccactacaggcaggtgatgaagcaatttgcgtcggagatcgagaagctctcggagagggtgctggacctgctgtgcgagaatctggcctggagaagggtacctg

SEQ ID NO: 418490 - DNA, 455 bp, Oryza sativa
gaaaaaaaatgaagtttattcatatgatcatgatgagcacgtacttggagaaaactttgttacatacatgcatggctcgctatataaacaaaacaattaattaatgaagtgattgaaatcaagaaaaaaaaagaagggacaggtaaatcttacgataatgatctacatggaaattaattataagatggtcacggccggaatcaaaagctgaaatccataatcacagtctcggcgagcagctgatgatatatgacgataattaagagagatgattagttaaccacgttgcacttcttcctgatctcgccctggctgccggtgagcacttcgacgccgcccatcttgaccatggaggcggcgaagtcggcgaagaactcgtccttgtagccgccgccggcgtggcgctgcacgtaggcgcgggtgaagccgttggtgagcagctcgccgtcggagtg

SEQ ID NO: 418491 - DNA, 462 bp, Oryza sativa
ggtgagaaaaaaaaactggcagtgttatctccattgctaaaggactaaaaaaaactttgctaaaggactaaaaaaagaagacatatgccgtctggtaagattgccaacttggctgtttatttcgagcagatactctccaaatacttctccacgttgtctaagccgcatagctccttcaccgtgggcatgatggcaggaacttcaagatcaaagaagggaggtgaagatccagacctggaacagtgatactcctcccttgctgctctaattgcttcccttgttgcacaatgcaccgaggcagcaagtagcaaaggtggctccccagaagcttttgaagagagcacacgtttcttgtggaatccactgttgagtagcttaacgttgaactgttttgggatggtgtccaccgtaggaatcttgtatgtccaagtcccgtctgagacaagcagcccatctgagttc

SEQ ID NO: 418492 - DNA, 407 bp, Oryza sativa
tttgttttggtattcccatacactttgtttctcttccccgtctcgtggtcgtgagaaaccgagaggagagagagggagaggagcgctgccgattttccggagggggagatctttttcttctccctgaaggttcgagatcgatctgcgacgaggaggatcgtggaatcgtaactttatttccgaggaaatttcatcaaattgatgcactaatggagtccaagggtggcaaaaagaagtctagcaggtagtcgtatctatctgatgtacgatgctcccctaggctacagcattgatgtcctgcgacctgccggtggcatctagaagttcctgctctgctgcttactccaactgagcgaggaagccctttttgtaatccccctttgtttaccttgacctaagttgtttag

SEQ ID NO: 418493 - DNA, 347 bp, Oryza sativa
cgaaaaaaaaaattgtccgggcaaattaacaaatgagcaaatcccaaactggtttaagctagctagtaggctagtagccgtggcatttggacatgatgggcgggtcggcgaacgggccgttgagcacgccgtgcgccatgatccggtacaccgactccgtcatgtgcaggccgtcccacgagatgcgccgagacgggtccgcgcactgtgtcgcgccggggtcggagcagtgcacggtgaagttgccgttgtacggcccgccgccggcgcattacgcggtcagggcgtagacgaacccgcttgccgaggggttcgacacgagctccatcacctcgccgtagtagtcg

SEQ ID NO: 418494 - DNA, 404 bp, Oryza sativa
gttatgaggaacatgttactctgatcaaggagtaccgtggcaagattgaagctgagctgagcaagatttgcgatggtatcctgaagttgcttgactcacaccttgtgccctcatctactgctgcagaatctaaggtgttttacctcaagatgaagggtgattaccacaggtaccttgcggaatttaagactggtgccgagagaaaggaagctgctgagagcacaatggtggcttacaaggctgctcaggatattgctctggcggatcttgctcccacccatcccataaggcttggactggcacttaacttctctgtgttctactacgagattctaaactctccagacaaggcttgcaaccttgctaagcaggcgtttgacgaagccatcttcgagttggatacc

SEQ ID NO: 418495 - DNA, 415 bp, Oryza sativa
ggacgacaactttaaatattgctcaataaaacactatctggagacaacacacacgagagtcatatccagaggaaaacaatcagcccagacggaccactagcaccaaatgcaaagcaatgggaagaactaattcgaccgctaccaccctagtaaaaaccagagaagagagaggaaggggggacaggaagaaaaacattctagtagaacaggagaagaatccatccatcatggtgacagcagcatgaggcatctaaatcgatggtctccaataacatgcggagccatcgatcgatcgatcttcccattttactggccctcgcaggcgtcgcccttggaggcttctttcacctcatcaccaccgtcctccgtgaggtcagaggtccagagggtcaagttgtccctcaggagctgcatg

SEQ ID NO: 418496 - DNA, 492 bp, Oryza sativa
  unsure (1)..(492): unsure at all n locations
gcgcctcgccgccgatgcgggcgtgctccccggccacgtcgtcgcgctcgccttccccaacaccgtcgagctggtgatcatgttcttggcggtgatccgagcgcgcgcggtggcggcgccgctgaacccggcgtacacgcaggaggagttcgagttctacctctccgactccggggcgcgtctcctcatcaccaaccccgagggcaacgtcgccgcgcaggcggccgcctccaagctgggcctcgcccacaccaccgccagcctcaaggacgccgccggccaagtccacctcgccggcttccccgnctacgccgccgncgcggtcaaggacttcgccaacgacccgtccgacgtggcgctgttcctgcacaccttcggcaccacgagccggcccaagggcgtgccgctcacgcagcgcaacctggcggcgtncgttcagaacatccgcgccgtgtaccgtctcaccgaggcggacgcgacggtgatcgtgct

SEQ ID NO: 418497 - DNA, 476 bp, Oryza sativa
gacaatgccgacattattataaaatgacttgtattatattcccaacattaaagtttgatattcggatacattttgctcactgtggcagacaaagcagaccacctagagcccttttattcagaatatatgcaagataataaagaacattggtcatagcatatactagtactatatgaatagtctggctggctgcttcacaaagtaacagagtgatcgctactggagttttgagtattctttaatcttcagtgcgcttccctcatcagcagctcctcatcttcttaccctctgtgccatctatctcctcgacagcatcgtcttcccagtagagagcctccattttaccagctttctccgtgttttcatcagcaaagcaatgcagaacagatcgtggcgacccggtggcgatttcagcagtagcagtgaagctctggtaaatgagcaaacccccagaaggcagctcctgctcaaccatg

SEQ ID NO: 418498 - DNA, 327 bp, Oryza sativa
cttcttgcattctcttctagccttagcctagctagctagctttgttgtctagctctgatcgaggttggtggtgatcatggcgtcgtcgagggtgatcctagcgctgctgctcgcggcggcggcggtgatggcgtcgtcggcgcagctggacgagaagttctacagcaattcgtgccccagcgtggaggccgtcgtccggaaggagatggtgcgcgcgctcggcgccgcgcccagtctcgccggcccgctcctcaggatgcacttccacgactgcttcgtcaggggttgcgacggctcggtgctgctcgactcggtcggaaacagcac

SEQ ID NO: 418499 - DNA, 382 bp, Oryza sativa
aaatagaggggaactagctaacattttttataacattattcattaccatattaaggctgctgttagaaaaaaaacccgataagagtctcacacaaagcacataatgttaagaatgggaaagaccgaatattcacacagagaaggttaatcaattcttagagctagataataacgaaggtcttgctccatcccattcgccactttgacacatgccacggatgctcggcctcggcagcctacctcacttggacttcaggatcatgttgttctcgggggacaccccaacgcaggccctcatgatgttctgaaggattgccctctggtttgccagggatttcaccactggtgtgccaggaggaacaaggggagccttggtgaggta

SEQ ID NO: 418500 - DNA, 392 bp, Oryza sativa
gcgctaagtaggaaaaaaaaaggaggaaaagaaaagaggaggaaagcgaagaggttggagagagacgctcgtctccacgtcgccgccatggccgcccgcgccgccgccgccgcgttcctgctgctgctcatcgtcggcgcggccaccgcggcgccggacatgtcgatcatctcctacaacgcggagcacggggcgcgggggctggaggaggggcccacggaggccgaggcgcgcgccgcgtacgacctctggctcgccgagaacggcggcggctcgcccaacgcgctcggcggcgagcacgagcgccggttcctcgtgttctgggacaacctcaagttcgtcgacgcccacaacgcccgcgccgaccagcgcggcgggttccgccttgggat

SEQ ID NO: 418501 - DNA, 445 bp, Oryza sativa
tctaattcccccttccgccgccgcccccaaacctcaacccgccgccgccgccgacgccgccggcgagatggcgctgtacctgctcttcgagtcggcgtccggctacggcctgttacacgcctacggcatcgacgagatcggacagagcgtggacgccgtccgcgcctccgtcgtcgacctcgaccgcttcggcaaggccgtgaagctcgccggcttcacccccttcttctgcgccgtggacgccctcaaccagtgcaacgccatctgcgaagggatcatgaccgacgagctgaggagcttcctggagctgaacctgcccaagcccaaggaggggaagaaggccaagtacagcctcggcgtcgtcgagcccaaggtcggctcccacatctccgaggtcaccggcatcccgtgccagagcaacgagttcgtccaggagcttctccgc

SEQ ID NO: 418502 - DNA, 417 bp, Oryza sativa
ctcagttccaggctcagcttcatcagccacattggaaggcttgtccaggtccattgcttcgccgtcagcttcagctttagacttctttttcttacttttcttggcagatgcatcgaccttctcgccatcatcaacatcatttgtggcatcattaaccatgctgtctatcgcagctttcatcacatcaaggtttttacgaggtgcaacacccttgtcatagaagtctaaccgctcctcaacttgctcacgaagcttttgcccaaagactgcggtagctgactctgaataacaatcaatgcgtgatgcaatggagcacttgttcgccagatatctagccattctgcctttgttcttggttgaagcacggccaatgaaggatgagtggaatataaggccatactttggcgtattccccct

SEQ ID NO: 418503 - DNA, 445 bp, Oryza sativa
ctcaggtccaggctcagcttcatcagccacattggaaggcttgtccaggtccattgcttcgccgtcagcttcagctttagacttctttttcttacttttcttggcagatgcatcgaccttctcgccatcatcaacatcatttgtggcatcattaaccatgctgtctatcgcagctttcatcacatcaaggtttttacgaggtgcaacacccttgtcatagaagtctaaccgctcctcaacttgctcacgaagcttttgcccaaagactgcggtagctgactctgaataacaatcaatgcgtgatgcaatggagcacttgttcgccagatatctagccattctgcctttgttcttggttgaagcacggccaatgaaggatgagtggaatataaggccatactttggcgtattccccctagttttcaatgcccctgaaagtgccttt

SEQ ID NO: 418504 - DNA, 471 bp, Oryza sativa
tcggtactttgctgctgttggttgcaggtggagctccggtgatcgacgccgcgatgtccaggtctggggccatggatcttgcatctggactcggggggaagatcaccaaggatgaggtcaagtcggctgtcgatgagtatgagaaataccatggatactatggaggaaaagaagaagcaagaaagtccaactacacagacatggttaataaatactatgatcttgccaccagcttctatgagtatggttggggtgaatccttccactttgctcacagatggaatggagaatccctacgtgaaagcattaagcgacatgagcacttttttgcccttcagcttggagtgaaaccaggaatgaaggttttggaccgcggttgtggaataggcggaccactaagagaaattggcaatttagcttggctttagtcactggattgaccaacatgagtcccagatactaggggaaagg

SEQ ID NO: 418505 - DNA, 343 bp, Oryza sativa
gttcaactttgcgtcccatgcggcggacgcgtcagacggcgttcctgaagcgtaccgaggccgagcccacgatctgatcgacggcgggtgccaaggcctgctagaccttggacacggggactgcggtcttgtcggccggccgctacgaggaggcggcgcggcacttcactgacgccatcgcgctcgccccggggaaccacgtcctatactccaaccgctccgtcgcgctcgccttggtccaccgctactccgaggcgctcgccgacgccgagaagaccgtctagctgaagcccgactgggctaaagtggtctcccgccttggagtcgcccacctggacttccg

SEQ ID NO: 418506 - DNA, 492 bp, Oryza sativa
ctgtgctcccggacgtctgttgctttggttttccacagtcaatcaaccacctttggagaccaagctctcgcagcagcgcccagttgcagcaccaagactccttccctaaaaggtccccactccctttttcaaaacaatcagcaaagatgtcttgcacagcaggaggacagatgtacaacgagaccctgtggaggtggagcacacccctcccgtccacaagcgcatgctgtacatcatgcctggtgtgcttgatggtggtcgcccgcatcatggtgggccagccctttgacaccatcaagacacgcctgcaggcgctgggcaagggcacaatcggtgctgccggcatgcccccgaagatggtctacacaagcggcatggactgcgtcaggaaagatcgttcaagggctgagggcccccttttccctgtacaagggcacttgttgcccccctgctgggcaacatggtgctgctgggcaattcactttcccacat

SEQ ID NO: 418507 - DNA, 464 bp, Oryza sativa
ggaacggtaaaacaggatcttcgttaatgtattcttgagatgataaattatatagagtacaaattggagaagataaataagagtacaaattggatcgagctatgtacacagatcactgtaagataaaaggcaggcagtagagtaaataagctgtcccctcaaaatgcgacaacgatatatggaggcacggaagcagaaatttcagaaaggctccacgctgcctcatcccctctcctcgccgattacatgttatcgatgagctcatgcggtgttcagcttagcgagcgtgcgcttcaaagccttcacgctcaatgggctgttcttgctcgctgagcaggttccagcccgggtgttgcagacagggtagtcaggcgggcagcagctggcatgatccttgcagcaggttgcaccttcaactgggcaacagccccaaaccaagcagagattcctgaagccgaatgcgc

SEQ ID NO: 418508 - DNA, 491 bp, Oryza sativa
cccccccttcggggggtttttttatcagggccaggctcagcttcatcagccacattggaaggcttgtatccagagcatgatctggcagtagaaatccccagaaatacagtacgggcactttttttggtaaaggcattacttttaacaacagctcaaattgcatatggggaggccaagggaactctgcatatcgcagttttctgcgcattaccacttttacgaggtgcatcacttgtcaggtagaagtctaaccgctactcaacattggcacgaagcttttgcccaaagactgtggactcggactctgaataacaatcaatgccctgtgcaggctgaactttgttcgccagatatctagccattcgggatatgttattcatcgcctttctgacaaggaaagatgagtggacgatcccgtcatacttagatagaaccctcctttttgtaatgcccagaagagcacgtgcaccacattatgtggagagtcagtg

SEQ ID NO: 418509 - DNA, 350 bp, Oryza sativa
cctaaccccccttccgccgccgcccccaaacctcaacccgccgccgccgccgacgccgccggcgagatggcgctgtacctgctcttcgagtcggcgtccggctacggcctcttccacgcctacggcatcgacgagatcgggcagagcgtggacgccgtccgcgcctccgtcgtcgacctcgaccgcttcggcaaggccgtcaagctcgccgccttcacccccttctcctccgccgtggacgccctcaaccagtgcaacgccatctccgaagggatcatgaccgacgagctgaggagcttcctggagctgaacctgcccaagcccaaggaggggaaagaaggccaagtaca

SEQ ID NO: 418510 - DNA, 413 bp, Oryza sativa
tttgttttttttttagcacaaggcccatctaacgtggtagccattgaagcacagaacaatacgattagagcgcccgttacacacacttgagtacttgacgcgatacttacatccccaggttacgtacacacactagtagtagtctagtacgtaaaaacattacgcagaaaaacacgggacggcatgtacagcaccacgtacactaccgtacacatcccatatatctggatcatggcacgcgcagccgtagctagtgaagtctgatccttatcaagcggtggcgatgggcgccgcgtggacgacctcggcggcggacttcatggcctcgaagcgtggctccttggcctcgaacttgtggcgcacgtacaggttcatgtagtcctcgaacacgaaccttgggtaggcggccgccg

SEQ ID NO: 418511 - DNA, 410 bp, Oryza sativa
  unsure (1)..(410): unsure at all n locations
ctgacatagggtcatttctgctctggattcgccattgttacgaatagcggaatcatcaacgaaatcacaacgccaacgttgagccctattccaaatgtatcggcaactattccaaatgttgtggaaaggagcagcttttgcagtacagcacattaataaatacgaaaataatgtccaggtaaaaaaaccagccgaggaaaactgcccagtccgtactgagtccaaaccttgctcttgggaaaaaaagcaaattatggcaccagcctttgtggatcgcgagggaaaagtgatgtcttcctgatgttgtttagggcgcagaacagcattaccaccctttncaggccgacaccaaaaccaccatgaggaggtgcaccatagctgaacgattcgatatatgatgaaatagtact

SEQ ID NO: 418512 - DNA, 406 bp, Oryza sativa
gggcatagagctcccaacgcagtttttcaattcaaaaagactgcccaaacagaccaagggttttatcatagcagcaaagttttttaacacgcaacatcaaagagacccttatgcaataagataacttgaagcgcggatcactagcaaatttcgcgcttaggcgacctcctcgatcttggggccagcaccgttgccgcctgccgggggagcatcgtccttgtccatgccgccggccatgtccgggccagcgccctggtacattttggcgatgatggggttgcaaatgccctccagctccttaattttggcatcgaactcatcagcctcggggagctggttgccgtccagccactggatggcctgatcgatggcatcctcgatcttctttttggccgctgccgggagc

SEQ ID NO: 418513 - DNA, 466 bp, Oryza sativa
agctaaagtattttacttcaataattcaagacaactcaaacttagttggcacacatgtactccaccccctatcactagagttgttttcttttttgtacaagatcatcctaacattcccacaaggacataaagaaacagcagaaccttcccgggaaaatttcactgagacaggtgcattccgtgcacgtacaataatcatcaccatcatcgtatcatccaacctacaggaaaacgcaaattcaaggtactcttgtccaaacctgtaggtggccagtgatttgctcccatcggctacaactaccagactcaaaaaaactagacacaggtatgatgctaataagcttagcatgatcgactgatggacagacagtaataacaaataggaaacggagggcactatatgtgtcaactcgatgaactctataatatatggatgatttccagcgccctcctgcaaaaataacgt

SEQ ID NO: 418514 - DNA, 505 bp, Oryza sativa
gtcgcggagcagcaaccccttcgactccgactccgacgatggcgggagggagcagagaccggcgagggcctcctccgtgcctcctccggccgaccagcggggctccctcttcggcggcggggatggcttctccgcctcgtcggcggcggcgaggagccggtacaggaacgacttccgcgacaccggcggcgtggaggcccagtcggtgcaggagctggagggctacgcggcgtacaaggcggaggagaccactcagcgggtgcagggctgcgtccgcatcgccgaggagatgagggataccgcgttcaagagcctcgttaccatacaccagcagggccagcagatcacgcgcacgcacatgatgaccctcgacattggccaggatctctccaggagcgagaagctgctgggtgatcttgggggcatatttttccaaaacagggaagccaaaaagaatggagaaatcagggggcctatgctaacttgagaagattcctttttcgga

SEQ ID NO: 418515 - DNA, 462 bp, Oryza sativa
cttcctcctccccaaaccctagccgccgccgccggcgtactcgagagaaacatcagcatccatggcgggcaagggcgagggtccggccatcggcatcgaccttggcacgacctactcgtgcgtgggcgtttggcagcacgaccgcgtggagatcatcgccaacgaccagggcaaccgcaccaccccctcctacgtcggcttcaccgactccgagaggctcatcggagatgctgccaagaaccaggtcgccatgaaccccatcaacaccgtcttcgatgccaagcgtctcattggcaggaggtttagcgatgcttctgttcagagtgacattaagctctggcccttcaaggtgattgctggacctggcgacaagcctatgattgttgcccagtacaagggtgaggagaaagcagtttgctgccgaagagatctcctccatggtacttatcaagatgcgtgaga

SEQ ID NO: 418516 - DNA, 503 bp, Oryza sativa
gggaaggacggcggcgccgccagcgagtacctcatcgaggaggaggaggggctcaacgagcacaacgtcgtcgagaagtgctccgagatccagcacgccatctccgaaggagcaacttctttcctcttcactgaatacaagtatgttggactattcatgggcattttcgcggtcctgatcttcctcttccttggatctgttgagggattcagcacaaagagtcaaccttgccactacagcaaggataggatgtgcaagcctgcccttgcaaatgctatcttcagtactgttgcctttgtgcttggtgcagtcacctctcttgtatctggtttccttggaatgaagattgcaacttatgcaaatgccaggacaacccttgaggcaaggaagggtgttgggaaggcattcattactgctttccgctctggtgctgtcatgggtttcctgcttgctgcaagtggccttgttgttctttacattgccatcaacttgttcggaattta

SEQ ID NO: 418517 - DNA, 435 bp, Oryza sativa
  unsure (1)..(435): unsure at all n locations
atagcaaatgtaattcacccttaaataacatcacgaaaattgctcaagaaatatgcaagcccattcatgacagtaactaaataagttaattatacatacacaacacacactgcacacgaagagcacaccatatatattagttcttctttctgctaaagacttaaccatcacccattttacttaacctgcttcttggccgagttcttccgtttcggcctggcctcctgcagcatggacagcacctccctcatcgacggccgctcctgcgggcaccggctggtgcacagcagcgccaccctaagcgccagcgccatctcgtcccgcgtgccaccgacatcattgtcggcccacgccgcagcgtcgatcacgtngcccaccccgccttcggccacctttcgccgcacccagtccacgatgttgttcccctccccgtac

SEQ ID NO: 418518 - DNA, 314 bp, Oryza sativa
gaaaagaaagctatcaagcaggtgccttattgcaaagttacaatacacactggcgaatgaactgcaaacttaacttatgtgtcactaacaacttagaaacgagcaaacaaaaaccagtcagttcatcgtcttagactaaaacaggcaccctgcagacaagtgccttgatcaaacggtttttacacggcaaaccaacagacgaaaattcaccagttaaacacatttcagcatctcttcgtacgcataagaactcttcaagcttctgagcttcatcaggtgtttctttgaccgccataatgtttttttcaaactcc

SEQ ID NO: 418519 - DNA, 379 bp, Oryza sativa
aaatagaggggaactagctaacattctccataacatcatccagtaccatagtaaggctgctgctagttgcatagcccgataagagtctcacacaaagcacagaaggttaagaatgggaaagaccgaaaaatcacaagagaagctaaaacaattcttagagctagctaatcacgtctttcttgctccatcccattcgcctctttgccacatgccacggctgctcggcctcggcagcctccctcacttgtactccaggatcatgttgttctcgggggccagcccaacgcaggccctcatgatgttctcaagcattgccctctgctttgccagggcgttcaccactggtgtgccaggaggaacaaggggtgccttggtgagg

SEQ ID NO: 418520 - DNA, 328 bp, Oryza sativa
tttctccttctcgctcgcttcgcccgcataagtctagccacaaacccgccgccgccgccgccgccgccgccgctagcttccgcggagcggggcgagatgttcatcgagagcttccgcgtggagagcccgcacgtgcggtacggcgcggcggagatcgagtcggactaccagtacgacacgacggagctggtgcacgagagccacgacggcgcctcccgctggatcgtccgccccaagtccgttcgctacaactttcggaccaccaccaccgtccccaagctcggggtgatgcttcgggggtggggcggtaacaacggctcaacgctga

SEQ ID NO: 418521 - DNA, 273 bp, Oryza sativa
gggggacccacgacgtccgacactgtttcgctcgtctgcagggtgtggtacagagatcgagaggctgagccgccgcggcgtcttcgtgggcaactgctacgccgtgcgcgccggccgagtcgccgggcgactccccaacgtgcgggcgctcacggtgaaggggaagccccacttagcccacgttaacctcgtgccccccgactggggcggatactcggggccgccgaccgaggcgtccgccaggggatgccacggccttcaggagctcatgat

SEQ ID NO: 418522 - DNA, 391 bp, Oryza sativa
ataggatcaaaacatttctattaccacaactttttaaggatggaatcgagtagcaatactttcaccccaaaatacagtttagcgacaatatcttagaaaagccgcttgctttgccgccatggctggcaagctgagcagagcagctaacacaaagaacacgagatcactataaaccaaacggcaacgaacgaagaaaatacagggtcttttttgtctgaagatacacgaagcggttcgttttcttttatttttagtctcctctcctcctcgatgatgggtgtatggcaatggcaatggcgatgggatcttggcttagttgatgggaaggggctcgccgttccactccttgaggcagtcgagcatggggtcgatgagcttgccctggctgatg

SEQ ID NO: 418523 - DNA, 404 bp, Oryza sativa
ctatccttcttctctgtctttcgttcaggatggcagagtcttttctgatggtgccgaagaccaccaccgcaatattgtcggcgaacggtgccatgaacaaggaggacccggtcaactggaacgcggccttctccgacatgcgctacaaggaggttgaccaggagtagagtatggcgatgcagctccgcgagccgaatgacaagatctagtgcaaccgcttccgcgtgctccacttggtccaccgctactacgaggaggtcgccgacggcgtgaacaccgagctgctaaaggccgactgtcctaaggtgtactccagcctcgagggcatccatatgcatttgggccacggcggcgacatctacggcgtcaccaccggctgttgtggcacctaccaccgtcgtacc

SEQ ID NO: 418524 - DNA, 409 bp, Oryza sativa
gtgcagcaagagccccgcatgggcgcctccatcctccgcctcttcttccacgactgcttcgtcaatgggtgcgacgcgtcggtgctgctggacgactcgtcgacgatcaccggcgagaagaacgccgggccgaacgccaactcgctgcgcggattcgaggtcatcgactccatcaagtcgcaggtcgaggccgcctgccccggcaccgtctcctgcgccgacatcctcgccgtcgccgcccgcgacggcgtcaacctgttgggtgggccgacgtgggcggtgcagctggggcggcgcgacacgcggacggcgagccagtcggcggcgaacagcaacctgcccgcgccgtcgtccagcgcggcggcgctggtgtcggcggtcgggttcaagggctcgactcccgcgacat

SEQ ID NO: 418525 - DNA, 355 bp, Oryza sativa
tttccttctcctccggctcttcttcagtatcgaatcctctcttctcctcgtgcccaccaccaccaccgtagcaatggcgggcaacgggccgatcaacaaggaggacccgctcaactggggcgcggcggcggccgagatggccggcagccacctcgacgaggtgaagcgcatggtggcgcagttccgcgagccgctggtcaagatccagggcgccaccctccgcgtcggccaggtggccgccgtcgcccaggccaaggacgccgccggcgtttccgtcgagctcgacgaggaggcccgcccccgcgtcaaggccagcagcgagtggatcctcaactgcatcggccacgggggggac

SEQ ID NO: 418526 - DNA, 447 bp, Oryza sativa
acgccaccacgcgcgcttttaaatggtgtggatccaatacctgtcaatagagggcttgttggcgcctactcattgacaaccagcaaaggcgagaaggctgccattgcgaagccaaatgacgagagagccatttgcaccgaacaattcatagggctttacagggaaagcccttgggcagcctggccttaaaagatcggctcgagttgaggagactggcttagagagggcgctgcctaccttgggtattatgagaacactgctaatgggccgcgaacggcgcctgcgaagatccctcatcctgtaagcaatgcggatgaatgggttagtccagccaagatggcggcctcctagggcttgtgcaagggcctgaacgccagattgcatcatctcagcagttgattcctcatgattttgatgcccgtggccatgggacttcaagcttttctg

SEQ ID NO: 418527 - DNA, 344 bp, Oryza sativa
  unsure (1)..(344): unsure at all n locations
gtaccctgaagagtgcaagtccagcttctctactgaaggaagctatacatgttattagctgtggttacgaagacaagacagactgggggaaggagattggctggatctatggttcaattacagaagatatcttgactgggtttaagatgcactgccatggttggcggtctatttactgcattccaaagcggccagcattcaaaggttctgcacctcttaatcttttggatcgtcttcaccaggtccttcgttgggctcttggatctgttgaaattttcttcagcaaacattgcccactttggtatggagangtggggggccataaaattcttggaacggatttt

SEQ ID NO: 418528 - DNA, 366 bp, Oryza sativa
cacgttttggccatggatctgcaaagcttgctcgtcaagctcagagcaaagagaaaactcttgctaagatggaacgaggtgggctcactgagaaggttgtcagggacaaggtactggtgttccgctttacagatgttggcaaacttccaccaccagtgctgcagtttgttgaagtctcattcgggtataccccagataacctcatctacaagaatctcgactttggtgttgatcttgactctagaatcgcactggctggccccaatggtgcggacaagagtactcttctgaagctcatgacaggtgacctagctccattagatggtatggtcaggcgccacaaccacctttgaattgggtagtatc

SEQ ID NO: 418529 - DNA, 492 bp, Oryza sativa
cgttctgtccgaaggcgcgtgatcccgcactcgcagactgagcatcagctgcatcactccccgcctatccgcgatcgcaagggccgggccgatcccccccgcaccagaagccctcgagattccgatctgccagaaaaccttcgcctcgcagcgcgacggatccatccatattggcacctttctgccacagggaatttactagctcttggagaaactacagttgaggcttgcgggttggatgcaccttcatgcttataagaaggctcaaagctacctgatataactcctgttctgtcataaacaggttattaacatgggaatttacctcagtacccccaaaacccgatagttctctgaagacggggaaaatgataagcttaaacttggtccttcggctatgcaaggaaggcgtgcatacatggcagatgctcattcagcatcgctaaatcctgacaatgagacatcgtctcttggtgttctggatgccctgga

SEQ ID NO: 418530 - DNA, 507 bp, Oryza sativa
tttgttgagaaaacgattgccgtttattgagccaagggtgcatgtagggagagcatacatactgatatttttggtgttgagtgcttaccccaagaatatgatacagagatcgacgcttcaatatacaccaagggtgaatcatggggttagcttcaaaatgagccgaaaggcgaaagaattgacaagaaaaaaaagaaataatacgatatggaaaaaaaataagggagcaaatcacaacagctctatatgcagctgaagaaaacaaaaacaattacagccgttttcgcctatggtcctgcctcaatcctctcgatggtttctaaccttgttatccgtttccatcctttcatagtcgcaaccaggttaaccaacccgacaacctgacttttgctgtattctggatgagaccgtgcccaatgaacatactcggtctctggcaaataataagcctttatgaaagtatccacaatttgcagctttggccctacatttgcggatacaatgtgc

SEQ ID NO: 418531 - DNA, 421 bp, Oryza sativa
atatccttcttgcagattatattgatgatgatagacagttgcctagcaggttagcaaaaacaaaaattgtgaaaggcaattcttcccattggaaggatggggacatttcatcacagacaggatcatcgctttctttattaaggatgatggataaatatgccagattaatgcaaaagctggaaattgtcaatgttgagctttttaagggtatatgccaactgtttggcattttttatcactacatatacgagacatttgggaaccaggacaggggtcaaagtggcaagtctttacctgatcatcaatcgtttcggcttagagaggctttgtcaaaaataacacaagactctgaccagtggatcaaaccacagagtatttcatatttacctttattacccgtttaatggatgtgatgcctact

SEQ ID NO: 418532 - DNA, 464 bp, Oryza sativa
ggtataaattgctactcaatactatattaataaaaccataataatccaaactttaacaagtaaagcaaaaccggggccataatgaaagcccgtaccaaaaaagttgcaggagcactcaagaattcggtgtaaaacgaacgacaaattattgcaggtataactaaaagcgataaaagatcgatcatttagtcgacttcctcgatcttgggccctggtccgctgcttccgccggcggccgccggagcatcctcgtccatgcctccggccatgtcagctccggcgccctggtacatcttggcgatgatggggttgcagacgccctccagctccttcatcttgtcctcgaactcctcggcctcggcgagctggttgctgtcgagccagctgatggcaccgtcgatggcgtcctcgatcttctttttgtcggcctccggcagcttggacgcgatcttgtcgtccttgat

SEQ ID NO: 418533 - DNA, 536 bp, Oryza sativa
gtcggtgcagagcgacgcgaagctgtggccgttcaaggtgctacccggccccggcgacaagccgatgatcggcgtgcagtacaagggagaggagaagcagttctccgccgaggagatctcgtccatggtgctcaacaagatgaaggagacggccgaggcctatctcggaagcaccgtcaagaacgccgtcgtcaccgtcccggcctacttcaacgactcccagcgccaggccaccaaggacgccggcgtcatctccggcctcaacgtcatgcgcatcatcaacgagcccaccgtcgtcgccatcgcctacggcctcgacaagaagtcgagcagcgtcggcgagaagaacgtgctcatctttgacctcggcgggggcacattcgatgtctccctcctcacatcgaggagggcatcttcgaggtgaaggcaccggcggtgacacccaccttgaagcgaggacttcgacaccggatggtgaaccacttcgtgcaggaattaagaggaagaacaggaggacatcacggcaaccgagggcg

SEQ ID NO: 418534 - DNA, 463 bp, Oryza sativa
ataggatcaaaacatttctattaccacaactttttaaggatggaatcgagtagcaatactttcaccccaaaatacagtttagcgacaatatcttagaaaagccgcttgctttgccgccatggctggcaagctgagcagagcagctaacacaaagaacacgagatcactataaaccaaacggcaacgaacgaagaaaatacagggtcttttttgtctgaagatacacgaagcggttcgttttcttttatttttagtctcctctcctcctcgatgatgggtgtatggcaatggcaatggcgatgggatcttggcttagttgatgggaaggggctcgccgttccactccttgaggcagtcgagcatggggtcgatgagcttgccctggctgatgccgaggaacaccttgttgcactcctcgccgggggacttgagcttctcgccggtgaggaatacgcagccgagc

SEQ ID NO: 418535 - DNA, 434 bp, Oryza sativa
cctcatgcatctcaacgccggaatcttcggcactggctccgatggccacacgctgccgtcggagacggtgcgggcggccatgctcgtgcgcatcaacaccctcctccagggctactccggcatccggttcgagatcctggaggccatcaccaagctgctcaacaccggcgtcacgccgtgcctgccgctccgtggcaccatcaccgtgtccggtgacctggttcccctgtcctacattgccggcctcatcaccggccgccccaacgcgcaggccatctcgcccgacggaggaaggtgggacgccgccgaggcgtttaagctcgccggatcgagggtggctttttcacgctgcacccaagggaaggtcttgccatcgtcaatgcacgtccgtggtggcggtgcttgcgggcccgtgatggtcgacgccaacatcc

SEQ ID NO: 418536 - DNA, 402 bp, Oryza sativa
  unsure (1)..(402): unsure at all n locations
gggaacgaatgatgaagcctatacgattatattacaagcttaatcattggccaaaatactactcacaggaggaagaacgatcgaatgaagtagctagcagaaagaggataatgaatatgaccaagaaaagctgcgacaggtgaatcgacctggctgctactgcgatcatgtgatcaagaatcgtggctttcatggtgggtatcgccggcgacggcgacgtcggcgtcggcgtcgccgtctgtcggctcccacgacgaggcggtgagcagggacaggtccttccacccgagcttgaggcagccgtccttttcgacgagagggtagcccttccatgggtacatgccaagaagcagccttgcctgccggnggggctgccggccagggtcaccggccggaaccccg

SEQ ID NO: 418537 - DNA, 377 bp, Oryza sativa
atgcgcttgcttctcagctttgccgagacctggttgcctcaagccgtgttgcgtgctgcatgctctgaattgaagaactctcttgagcctgaccaggtatatcagaagtggagaagaagattggaagcatgagggaaatgggagagaagaggaggcgtggacaccttaaccctgctggttttgcaggagggttgcatgatcatgaggtgaagaagaacgaggagcataagctagacatgagtggcatgtccatggatgcccttccacacctcaccatgtgtcttggtcaagtcaccatcttggatctctctaacaacaatcttgagagcatcccggagtcaataatcgctcggctgctgaacgtggtggagctggac

SEQ ID NO: 418538 - DNA, 448 bp, Oryza sativa
gctcttctccttgtcgctcgcttcgcccgcataagattagtcactaagctggctcggccatcgccgccgacggcgtttgcttacaccgggcgatgcatgacgcggatctagagattccgcgtggagagcccgcacgtgcggtacggcacggaggaaagcgagttggactaccattacgaccatgcatgaatgtttcgcgacggtatgaccacaaaccagaaaggcaacagaggcccccaggttgatgaggaagagccatcatatgatcgagtgcgcccgcatgcttggagtgacacttgcagggcggatactgatcaacggatcatcgctcacagcggggataatcttgaacaggaagggaaatcaatggccgaccaaggacatggtgcagcatgtgaagtactctggttcaatcacctaggagatcaagatcagggtcgtgagctac

SEQ ID NO: 418539 - DNA, 473 bp, Oryza sativa
ggattaataatttattgagtttttacataatttacaaatcatttgttattgtatctacattatcgtctttgagcagctgttccaataatgattccattgtgcttatgtaactaggcatgtaatgctcctttatcatgtttggagctagccttattttcccatacaaatctcttggcgtttcataaatgctaatgatctcattgctgctggatccctcaccaggatttgggtcaggtgaggccattgcaaccatgtgaataattcttccaggagggaaaaactggcgcgaactgcaggttggtagcggttctttcagcttgtctttgatatcacagttctgcttcagtgattctggttcctcctgccctgtcaaggatgattgttcttgttcagtgtccagtgatccattgatgttcacatccccttgtgctgcaaagcctgatccagcaacagactttgtactgataacatta

SEQ ID NO: 418540 - DNA, 462 bp, Oryza sativa
gtatgatgatggatttgatggacgatcagttggggacgacaccggcatagttgcaaacaccgcaagtgtttccaccgttgagtctgatgtaacctccctctccccatccagttccccaggagttcttgatcttccaggcaccaccgacgacaccgacggcaaggacagcgtggttgatggaggcagcgcagttggagaagatacctgatctgtaggggctccagttagtggcatcaacagtgacggagacgggggagttgttcaactgggaagtaattccattgcatccgctgtagcttccgaaaccgttgattctgtaagcaccaccctgggtcttgcaagcctggtctctagcaacatagggataggcagattcggtagtgataccgttacccttgatgtagttaagggcagatgaaggccatccaccgttgcatccctggttgccctgaggtctggagc

SEQ ID NO: 418541 - DNA, 458 bp, Oryza sativa
gggggaaatatattcaattattattagtgaagcatcttattgcctgcttttacaccccaatagcttatacatcccaacaaaaaatcgtaaattcaacaccggcaacaacaaaaccccaaaactcactttgttttgacactgacgccatctgttccagcgatgatcaccgaagtcgccatgtccaggaacagcccatgctcaacgacgccttccaaagctgagatctccttccctgctgccaacgcatccttgatcggcgtcttgaagtataaatcaacgatgtagtttgagttgtcggtaacgtagggtttgccgccttcatccaatctcagcttcgcctcgcatccttcatcgttaaacagatcctgcaatctcacttggttgtacttccagcagaactgcacaaccttcacaggcatggctagaccactcccttctaagccggtaactagctttgt

SEQ ID NO: 418542 - DNA, 324 bp, Oryza sativa
atcaggttctgtcttgcatatgctatgcctgcttgttggaccggttttgccacacagaagggtcaccggctaattattgttttggctgactctactctgcacggagcaactgtggtgtggtcccggaacctacgcgacaaggttaaatgagattcgcccatgcaacaactactggtgacaggaggggcggtgagccgcccctggaaaggcgttaccctgatgcagaaagcaagggtgctcaaggactgcgtactgcgagtgaccaccatcaagattgacccatacctcaacactgatgctggaaccatgtcttcgttcgagcat

SEQ ID NO: 418543 - DNA, 443 bp, Oryza sativa
  unsure (1)..(443): unsure at all n locations
tttgtttttttttttttttttgtttttttttttcccaaactacaggggcaaatccatctaattaaacatcaagactcgttttaacaacaacctgccacaattcacaaacagcaggctgttgcacaagacggtgtacacggttcattttatttgggtgttcgtttccaccatcagattgatataatacacgcgaacaagcagaaacattcggcaacaatttttccaggaaaatcgcggcctatttcgtcatcatcccgagcgagcgttttttggaagagggagtttttttcagacaggcacagccttaatggcaggagcgagtgaccaacgtcgacgtcggcgtcctagtagccaccctggatgtaggcgttgagccggttcagtttttcccggtgcttgctgaccacggngcggacaatgtctccaatggggaccattccaac

SEQ ID NO: 418544 - DNA, 440 bp, Oryza sativa
gtttgttccgtacatgtactcgcactgcagatgtggcgatgtgtcaagcactgcgcagcacacagctcgcggtctgtctgccagctattgcttactactgaccaggctggtcttgccgagaaaacatatcccaagaggtaatttgaggtcctaccatgactaacactgctggggacaggaggattggtcagcagccctcggcaagatcaagaccgcgagcagcaccggcgtggagctcaaggcctgcgggctctgggtcaccaccatcaagattgacccatacctcaacactgatgctggaaccatgtctccgttcgagcatggtgaggtcttcgttttggacgatggtggagaggtggacttggaccttggaaattacaaacgttttttgggacataaaattgacctgtgataacaacataaccacggaaaaaatatat

SEQ ID NO: 418545 - DNA, 438 bp, Oryza sativa
  unsure (1)..(438): unsure at all n locations
aaacacataacccctggcggggtggattgcccaggaaatttggtttgaagatgaatcaacctgcccctaagggcaaacgaatttcaatctaatcagggggttttgtaaagcatacttccaggggtgggggggattcggagacacaattaccctttttgcccaaacggggaaaaaattttttcccacgattttttttttccaagttacaatcaagccccttttttccatggctggataacggcaacaacaatgatccccattttgatnaccaggaggatgatggcttaaaacatccacttcctggagtttttttggggctttttcgggttttgaaaagcactgaccccttgttgtatggggggggtagcatttgaaacatggggctttatgtggttgatcatgtctccttgagcataaaccaaaactgccatatccatg

SEQ ID NO: 418546 - DNA, 406 bp, Oryza sativa
tttttattccgaaagggcaaggattacccaaatagcttattattcgtcaaacaaatgataatatacatggtacaggaacaaatattgtgtaaagagaatgctcattagttgtaaatacatcagcggtaattcagcattctatcaaccatactaggtgcaaatgaaaagtcttatcggcaagattccgtcaggaggatttccacaatactagggaacagttcaagcttcaaggaggaaattcagcaatctatgttgtgcaaataacctttgcttttgcaactcacctttagctgaggacatgactgccatagtcttgattgaatttttcgtatctatgtacatgaagatgagcagatgggcgtgtattccttagtgcaagctcaatgtcttctgtcgttactggacc

SEQ ID NO: 418547 - DNA, 557 bp, Oryza sativa
gttcttcttctcatctcctcccactccagctctgcccctgagccaagaactgagcagcagagagctcgtggtctctttgccagcttctcctcagtcctcaccaagctgttcttgcagagaaaacatagccaaagagctaatttgagctcccaccatgaagtacgtgctggtgacaggaggggtggtgagcggcctctgcaagggcgtgaccgcgagcagcatcggcgtcgtgctcaaggcctgcgggctccgcgtcaccaccatcaagattgacccatacctcaacactgatgctggaaccatgtctccgttcgagcatggtgagggcttcgttttggacgatggtggagaggtggacttggaccttggaaattacgaacgttttctggacatcaaattgacccgtgataacacataacccgggaaaaatatatcagtcagtcataacaaagaaaggagaggagactacttggggaaaaccattcaggttgtgccacatattacagatgaaattcaagattggattgacgtgtagcgatgaatcccgtcgatggtaa

SEQ ID NO: 418548 - DNA, 334 bp, Oryza sativa
cctcatgtcagtttcatctgctcaaatagaggagagtggatttgagactgccactgtggcagatattttgaagtctaaggggaagagtgctgatggatcttggctctggtgcactactgatgactctggctatgatgctgtcaaatctatgacgcaacacaatgttggagctctggtggttgttaaacctggaccaggataaaccaactgctggtattgttactgggagagattacctctagaaaatcatagtgcaggggctatctttcaaggtaacttaagttggagacatttttgactgcatagaacccgctgatcatggtgaagcctgata

SEQ ID NO: 418549 - DNA, 149 bp, Oryza sativa
gtctgtgcagagcgacgcgaagctgtggtcgttcaaggtgctacccggccccggcgacaagccgatgatcggcgtgcaatgcatgggagaggcgaaggggccgcttggcgaggtgatgctaagcatagtgctcaaccagatgaatgata

SEQ ID NO: 418550 - DNA, 451 bp, Oryza sativa
ctctctttctctctctctctctctgaatctctggatctctgaaaactctgaacattccaagaactcataagttacctgtgatctgtgaagcttgagctgaagctgtgacagtgtctcactgatcgttgatcactcagcttggctgctactgtgcattcactgcgtggttagctagctaactgagcagaagagctttagcaatggcgacgccggggcagcagctgccgccggggttcaggttccacccgacggacgaggagctggtggtgcagtacctccggcggagggcgctgtgccggccgctccccgccgccgtcatcccggacgtccacgacgccgccgtgctcgacccctgggacctccccggcgccggcgatggtgaggcctacttcttcagcttccggcagctcgcggcggctagcggcggctgcgggtggcggaagaggagggc

SEQ ID NO: 418551 - DNA, 505 bp, Oryza sativa
tttcattctcaagactctgacacaatcaattgctagccttctatactcattagcaagtgatgcaaggcttttcggaattgcactagttgagcgagtatggcgaccctggtggatgtgatttttgttctccaacatggtagatgaattaatgaatgactctccaagcctttcaactgaatccgctaaatattccaatgaatcactaagagatgctaacagtatcaatttctggtcatcatggatcaagttttcctgttttattgggcacatatccaataggagatcacttagttcaatctctacttctacagcttctgcatctggaatactgtggtcaagttgaccaaaagaattttgtaaagatagatttgctggatccaagcgcattaaactttcaacatcattccttgagaggagaatataactttgttttttaaggacagcctccatataggatgcacggcatctttcatgtgtacgttctaaaaatgtgcgaacatactca

SEQ ID NO: 418552 - DNA, 465 bp, Oryza sativa
gttattttagaaaaaagaaaacctgagctttcgatctcttcggagtggtttcttgttctttgaaaaagagggggattaatggcgacagccgggaaggtgatcaagtgcaaagcggcggtggcatgggaggccgggaagccgctgtcgatcgaggaggtggaggttgcgccgccgcaggccatggaggtccgcgtcaagatcctctacaccgccctctgccacaccgacgtctacttctgggaggccaaggggcaaacacctgttttccctaggatcttgggccatgaagctggaggcattgtggagagagtgggagagggtgtgaccgaactctcgccgggcgaccatgtactcccggtgttcaccggcgagtgcaaggagtgtgatcactgcaaatcggtggagagcaacatgtgtgacctcctcaggatcaacgtcgaccgcggcgtcatgatcggcgaccgc

SEQ ID NO: 418553 - DNA, 407 bp, Oryza sativa
cggggggattggaaaaagtcagggttcaataaatattgcttcacttgtacaaagtacagataaaaatacattgatacatgacacggagagagccatgcacaccacttatttggacacacagagggtaaggctgcagagaaaatcaagcaacacaagctgaactcacggccccacctgtcagcctttcactggtcgaggccggagacttttgtgaaaaacagcaacaccactcattgcaaaagaagacaaattatttacacacacaaattgaccacacggcggccggggacgtacggtgaggtttttgtctcctccggggaagtttgtgatgagggcgatcagcccaagagggggggctttttttttccggtgggatccttcgggcttttggggggcctttttttttt

SEQ ID NO: 418554 - DNA, 500 bp, Oryza sativa
gcccggccggactggctcgaccgacccacgcgtcctctttttactgtcactatcattttattctcctaaacgctatcactagcttctagctagctcaattaatgaatgagccacggcggaggagaagcaccaccaccacctgttccaccacaagaaggacgacgagccggccaccggagtagactcctacggcgagggcgtctacacgtcggagacggtgaccaccgaggtggtcgccggcggccaggacgagtacgagaggtacaagaaggaggagaagcagcacaagcacaagcagcacctcggcgaggccggcgccctcgccgccggcgccttcgccctgtatgagaagcacgaggcgaagaaggacccggagaacgcgcacaggcacaagatcacggaggagatcgcggacaccgcggcggtcggcgccggcggctacgcctttcacgagcaccacgagaagaagaaggaccacaagagcgcccaggagttcaccg

SEQ ID NO: 418555 - DNA, 377 bp, Oryza sativa
agcaaccgggggacgactatcaaaattacatgataaaattattattgtcttgaattatggaaacgatgataacaaatccttttccagctacaaaagaaccagcataacaacaaagaattataaagttgcttaagtaatctctcccttcatcttaaaaagagctatttctagggggcctaggccacagcaacacttttcacttaaaggggacttttcattctgggacacaaaagcttccaggatcaaattacttgggcttgcccgtctcgacaggaactattggggggggtagtttatcccagggctcgatccaaggggcccttgcattcgcaaggttggcgaaataaggggccaattttgccaggcttttttcctta

SEQ ID NO: 418556 - DNA, 511 bp, Oryza sativa
ctcaccaccatcacctccttcttctcctcctcttcctccgcgcgcgcgagatccagggagagggagagggagagatcatggcggggacggtgacggtgccgtcggcgtcggtgccgtcgacgccgctgctcaaggacgagctggacatcgtgatcccgacgatccgcaacctggacttcctggagatgtggcggtccttcttccagccctaccacctcatcatcgtgcaggacggcgacccgaccaagaccattcgcgtccccgagggcttcgactacgagctctacaaccgcaacgacatcaaccggatcctcggccccaaggcctgctgcatctccttcaaggactccgcatgccgctgcttcggctacatggccttcaagaagaagtacgtcttcaccatcgacgacgactgctttgttgccaaggacccatctggcaaggacataaatgctcttggcagcacataagaaccttctcagcccgtcaccccgttttttttaacacttgt

SEQ ID NO: 418557 - DNA, 351 bp, Oryza sativa
aagttggtcatctttgcttgagctgaatctaaacctttgcaacaatggcggcgcgtgttgttgtggcgttcgcggttgcgtccgccatgttcgtggccgtctccggccagaagttcaacgccatcttcagcttcggcgactccatgtccgacaccggcaacctctgcgtgaacggcccccccgccggcctgacgctcacccagccttcctacggcgagaccttcttcggccgtgccacctgccgctgctccgacggccgcctcgtcgtcgacttccttgcggagaaattcgggctgccgttgctgccgccgtcgaagaggggcggctccgacttccggcgaggcgcgaaca

SEQ ID NO: 418558 - DNA, 518 bp, Oryza sativa
gactgttccgagagccctaaaccctagaactccctcgccctcgcgtcggcgccatggaggacgaggagatggagaagaaggtgcagcagtacctgcagcggaaggggttccgcctcaccgagctcgcgttgcaggaggagcgcaaccgcatctccacctcctccgtctccgacgtcgcgctcgccaggtcggaaaatgatccggcaagatactatgatggttatagtaaactaagaacatgggcatacagttctctcgatcagtacaagcatgaattactccgtgtcctttacccagtgtttatccattccttcatggatctagtggcagagggacatacacaggaagctcggtcctttttccacacgttccatgaagaccatgaactgatgcattctagggatctccagaaactggaaggcattctttctcctcacatttggaggaaatggaactggccagatctttaaggaaaaatcaattcagaattaagtatgtgagtattcatatgagttact

SEQ ID NO: 418559 - DNA, 542 bp, Oryza sativa
ttttgttccagttaggcggttaacttgtatatcaaacagacgccgcgcgcgcgagcagttcgtcgtcgtcttcgctcgatcgtagtagttgccggccggcatcggcatgggcgacggcggggagaagcaggcggcggcggcggaggggtggcggctgagcgtcaacgacttccagttgccggagcggcccaaggacccgcacttcgtcaagagggtcatcaagcgatgccacggaaagcatcggaaaattgcaaaatactacaagaagcaggaaaatctcctgaaggatttcagcgagatggaaaccatgaatgagattggttccttagatcagaatgctcctactgaggaagagttgaggcaaatggcaaagggcgaacgattggccatcaacctgtcgaatatcatcaatctgattcttttcattgggaaagttcttgcatcagttgaaagtttatcgatggcagtaatagcatcgacactggactccctactggatcttttgcaggtttcatactctgtttactgcacatgctatgaaa

SEQ ID NO: 418560 - DNA, 487 bp, Oryza sativa
gttttctttttattgtcacttccatctcattctcctaattgtcatcactagcttctagctagcttaattaattaattagccatggcggaggagaagcaccaccaccacctgttccaccacaagaaggacgacgagccggccaccggagtagactcctacggcgagggcgtctacacgtcggagacggtgaccaccgaggtggtcgccggcggccaggacgagtacgagaggtacaagaaggaggagaagcagcacaagcacaagcagcacctcggcgaggccggcgccctcgccgccggcgccttcgccctgtatgagaagcacgaggcgaagaaggacccggagaacgcgcacaggcacaagatcacggaggagatcgcggccacggcggcggtcggcgccggcggctacgccttccacgagcaccacgagaagaagaaggaccacaagagcgccgaggaagtcaccggcgagaagaagcaccacc

SEQ ID NO: 418561 - DNA, 369 bp, Oryza sativa
agggcatgaacggcaaggttgctttcggccgcaacatcaccgtcaatgaggcccagtcccgccgctccggcggcggaggcagaggctactgaggcggcggtggcggctacgcgagcagccgtggaggcggcggctacggaggaggtggctgtagcaggctaccgtcgctctgagggcggctacggcggcggcggaggctacggatggtgacgtgaccaccaccagaggcggctacggtggcagacgtggcggcggataccgccgccactcctgcgggaactggaggaactgattggaggggcccatcgcggacagctatccttagctatccgcgtcagaatcatcttatcatggagtcgagtcgatatc

SEQ ID NO: 418562 - DNA, 453 bp, Oryza sativa
gttctagatcgcgagcgtttgcttttcattgactgttttgtttctcatttgttgggttttatttttatcctgtggtgttttttttaaaacacatcaacattgttaagcaagagcagaatttggggataaaccccattacataaccaaggttaatatctgtaagcaaaagaaccacccctgagaagggggggttaactgaactaccaaatcaatttttctgaaaatacctaatatccaaaaaaggagcatgtcgattgggatctgcggtgaatcctcaacgactgttaccctgggcctcaaaagatgttcactctgcttgacaaacctgtaattcccatcagctgtgttcacggaaacggcacaagaccgaggtttgttgctgagccctaattttggtgggtgcattcactggactcagcgaaggatccccaagagggtaataatttatctggg

SEQ ID NO: 418563 - DNA, 433 bp, Oryza sativa
tttcttctcctcacccctcgcaccccctccacctcgccgtcgccgccgactcgccggggctcgccgccaccggtggtgggggggagctcgacctcctcgccccacgcgcgcgtccggacgccgtcgttctgggcgcgggagagatccgtccgtcgccccccgctgggcttgcgccatcctctcgccgggtgatttgagacaatcaagatggctttttcatcagttttcaggagaggaaatgtcaaagaattgatctcaaatgtttcggtctacactagcgcaacagagtcatctggaggattgagcttgatttttaagcgttgggccaccaaaaagacagctggatcaacaaaaaatggcccggacttttaccctaagtatttgggtgttaaaaagtttggccgagagaaagtggagccaggaaacattatta

SEQ ID NO: 418564 - DNA, 528 bp, Oryza sativa
ttgtttataaaacttcgactattcatgctgttgataaagcaggtcacatgtaccggtcacagtcgcttcccatgaacatgaagaaattgaataatggaaagagcttcaagagaatgaattcactcggcggtgtctaccgcgtagttccttcgacaccatcagtccccgtgacaagcagcaatgtcatcccagatatagtcccatctgaaccaggtgatgaagatggagaggacatagcagaggaagaggcagtatgcaggatctgcatggttgagctgtcagaagggagtgacactctgaagctggagtgttcatgcaagggcgagctcgctctagctcacaagcactgcgccatgaagtggttcaccatgaaaggtaccaggacatgcgaggtctgcaaggaagatgttcagaacctccctgtcacccttgttcgtgttcagagcatgcagcagcctgagcttcagaccaaccctgccaacgcatcaagatacgatcgcctcaggatgtggcagggagcgccaattc

SEQ ID NO: 418565 - DNA, 521 bp, Oryza sativa
tcggcttcacaagaaagctcactgcgctgcaccaccagccaacccaagatcaacaggaaccagagagagagatgaacgccgacttcggcgcgcccaaggacctcgcggggggcctccagcagcggaggtctctctaccagcccaccctccctccctgcctccagggcgcaacggtgaaggtggagtatggcgacgccaccaccaccatcgacccaacctgcgccaacgtcgtcgcgcaggccttcccccgcacctacggccagccgctcgtcagcttcgtcgcgccgccgcccgacgccgtcgacaaggaccgcgccccgatcagggtaggggtggtgttctccggcaggcagtcgccgggaggccacaacgtgatctggggactccacgacgctctcaaggcttacaatccttatagtggtctctatggattcgtccgtgggactgagggacttgttgcgaacaagacaatcgagatcacggatgatgtttttgctcatacaagacccaagtggttttga

SEQ ID NO: 418566 - DNA, 465 bp, Oryza sativa
cgctctttcagagcaccggcgacaccgtcgtgttctggggccggaacacggaccagctcgaggggtccctccgtgaggcgtgcgacaccggcctctacaccaccgtcatcatctccttcctcagcgccttcggctacatcccgggcacctacaagctggacatctccggccacaccgtctccgccgtcggccccgacatcaagcactgccagtccaggggcatcctcgtcctcctcgccatcggcggccagggcggcgagtactccctgccgacctcccaggcggccgtcgacctcgaggactacctctggaacgccttcctcggcggcggccgccccggcgtcgcccgccccttcggcgacgccgtcgtcgacggcatcgacttcttcatcgaccagggcgccacggagcactacgacgagctggcgcggcggctgtacgcgcacaacaaggactacaagggga

SEQ ID NO: 418567 - DNA, 435 bp, Oryza sativa
atctttttcttcgccggccagggctccggcatggccttcagcaagctgaccggcggcggagcgacgacccccgccgggctgatcgcggcggcggtggcccacgccttcgccctgttcgtggcggtgtccgtcggcgccaacatctccggcggccacgtgaacccggccgtgaccttcggcgccttcgtcggcggcaacatcaccctgttccgcggcctcctctactggatcgcccagctcctgggctccaccgtggcgtgcttcctcctccgcttctccaccggcgggctcgccaccggcaccttcggcctgaccggcgtctccgtgtgggaggccctggtgctggagatcgtcatgaccttcggcctcgtctacaccgtgtacgccaccgccgttgaccccaagaagggcagcctcggcaccatcgcccccatc

SEQ ID NO: 418568 - DNA, 459 bp, Oryza sativa
tggtttgagtcatgaagtgcaagtacgttgagctcactgcggattatgtgtacccctacagaaaccagggtggatttgatatgatctgcagtggtagggacaagattgaaacaccagagcagttcaagcaagctgaagacactgtaaacaaacttgatttggatgggcttgttgtcattggtggtgatgattcaaacacaaacgcatgccttcttgctgagtacttcagggggaagaacatgaaaactcgtgtcattggttgcccaaagactattgatggagatctgaaatgcaaggaggttccaacaagctttgggtttgacactgcttgcaagatatactctgaaatgattggtaatgttatgactgatgcacgctcaaccgggaagtactaccaatttgtgaggcttatgggacgtgctgcttttcacattacattggagtgtgctttgaaacaca

SEQ ID NO: 418569 - DNA, 539 bp, Oryza sativa
gaagaaagtgcaatttgtatgggtaaagaattgaggttcaacacaacagaccgatcagcccagaaaacaacactataaaatagtattcctgttaaaaaaaataacactatagattgacatgtacttagaacatctccatcactacataacatacaagatcgacatgtacatatatgtatgcacagaactgcagctcaatcagatagtatttggtgggcttttgtaatatttcttccacggcccatttcacttgtgccctctgaaatacatgtatactttctgaagaacccaaatgctcacaagtgtctccaagcaaaacaaggcaaatccgacaaagtaaaagatcccgactattgcatgatcagagaaggtgtcaattgcagccaatataccagttaatgattttccacgaaatataactggtggagcgatggcagcaaatacacagaaggcaatgtgaagcatgtagcaaaggaaaaaccatccaaagctgaatgcgctatcagttcttattgcgcggtacagaggcctttaccaca

SEQ ID NO: 418570 - DNA, 492 bp, Oryza sativa
ggaggaagttcaatttgtataggtaaagaattgaggttcaacacaacagaccgatcagcccagaaaacaacactataaaatagtattcctgttaaaaaaaataacactatagattgacatgtacttagaacatctccatcactacataacatacaagatcgacatgtacatatatgtatgcacagaactgcagctcaatcagatagtatttggtgggcttttgtaatatttcttccacggcccatttcacttgtgccctctgaaatacatgtatactttctgaagaacccaaatgctcacaagtgtcttcaagcaaaacaaggcaaatccgacaaagtaaaagatcccgactattgcatgatcagagaaggtgtcaattgcagccaatataccagttaatgattttccacgaaatataactggtggagcgatggcagcaaattcacataaggcaatgtgaagcatgtagcaaaggaaaaaccctcccaagct

SEQ ID NO: 418571 - DNA, 486 bp, Oryza sativa
  unsure (1)..(486): unsure at all n locations
atctttttcttcgccggccagggctccggcatggccttcagcaagctgaccggcggcggagcgacgacccccgccgggctgatcgcggcggcggtggcccacgccttcgccctgttcgtggcggtgtccgtcggcgccaacatctccggcggccacgtgaacccggccgtgaccttcggcgccttcgtcggcggcaacatcaccctgttccgcggcctcctctactggatcgcccagctcctgggctccaccgtggcgtgcttcctcctccgcttctccaccggcgggctcgccaccggcaccttcggcctgaccggcgtctccgtgtgggaggccctggtgctggagatcgtcatgaccttcggcctcgtctacaccgtgtacgccaccgccgttgaccccaagaagggcagccttggcaccatcgcccccatcgccatcggcttcatcgtcggcgcgaacatnctcgtcggcggcgcgttcgac

SEQ ID NO: 418572 - DNA, 241 bp, Oryza sativa
ggaaaaaaaaaattgtccgtgcaaattaacaaatgagcaaatcccaaactggcttaagctagctagtaggctagtagccgtggcatttggacatgatgggcggttcggcgaacgggccgtcgagcacgccgtgcgccatgatccggtacaccgcctccgtcatgtgcaggccgtcccacgagatgcgccgtgacgggtccgcgcactgcgtcgcgccggggtcggagcagtgcaacggtga

SEQ ID NO: 418573 - DNA, 483 bp, Oryza sativa
cttgttccaaccatggcgacgaggccggcgcggttgtctgctcccgcagtggcggctatacttgtcgccgccttagccttgtgcgcagccacggcgtcggcggcgaacgtcacgacgacgacggcgacggcgccgagcggcgggtgctacagccacctgttcaccttcggcaactcgctgatcgacaccggcaacttcatccactactccacctcgccgggccccgtcgcccgctccccctacggcgagaccttctttcgccgtcccaccggccgctggtccgacggccgcctcatcgtcgacttcatcgtggagaggctggggttcccgtactggacgccgtacttggccgggaagagcagggaggactttcggtacggcgccaacttcgcggtggcgagcgggacggcgctgaccagctgctgttcaagcgaagcaccttagcgtcgccggcattacgccctacttccttggcggtcaggt

SEQ ID NO: 418574 - DNA, 513 bp, Oryza sativa
  unsure (1)..(513): unsure at all n locations
cgtcttcgtactcgcctctctccgcgccctcctccgccgccgctcgccgccgttcgtctccgccgccaccgccgccgccatgagggagtgcatctcgatccacatcgggcaggccggtatccaggtcgggaacgcgtgctgggagctctattgcctcgagcatggcatccagcctgatggacagatgcccggtgacaagaccgttgggggaggtgatgatgcttttaacaccttcttcagtgagactggtgctgggaagcatgtcccccgtgctgtcttcgtcgatcttgagcctaccgtgattgatgaggtgaggactggtgactaccgccagctcttccaccctgagcagctcatcagtggcaaggaggatgcagccaacaactttgcccgtggtcactacaccattggcaaggagattgttgatctgtgccttgaccgcatcaggaagcttgccgacaactgcacttggtctcagggcttnctttgtgtcacgcttgtggaggaggaacg

SEQ ID NO: 418575 - DNA, 421 bp, Oryza sativa
tctatttcatccaggtcggttcacgaggtcatgcccaggctgtgatcctggcggctgggacatgcctgctttggcaggtgtatgagctggcataagatggcgtggacacgggctgtaatgtcgagcagcagcagaatacgtattacgtagtggcaattggacgaccaaccaatggaagctgattggttgctatgggcaaaggaactccatacacacatcattcatacaaagtacgtgaatcctttgcttacaagtggattaacaaaaagctgaaagaaggtttgcatgttacatgtatggctactgctggaaaccattggggagttctaatgtcaagaaatgcacgctattcccatcaagtagctgagatggactatctatatccacatgtagggatccatcgtcgatgagagacaggtta

SEQ ID NO: 418576 - DNA, 411 bp, Oryza sativa
gttgggtgttttttttgaaaaaaaatgaagtttattcatatgatcatgatgagcacgtacttggagaaaactttgttacatacatgcatggctcgctatataaacaaaacaattaattaatgaagtgattgaaatcaagaaaaaaaaagaagggacaggtaaatcttacgataatgatctacatggaaattaattataagatggtcacggccggaatcaaaagctgaaatccataatcacagtctcggcgagcagctgatgatatatgacgataattaagagagatgattagttaaccacgttgcacttcttcctgatctcgccctggctgccggtgagcacttcgacgccgcccatcttgaccatggaggcggcgaaatctgcgaagaacttgtcctttgtagccgccgc

SEQ ID NO: 418577 - DNA, 485 bp, Oryza sativa
catcatgcattctcttctagccttagcctagctagctagctttgttgtctagctctgatcgaggttggtggtgatcatggcgtcgtcgagggtgatcctagcgctgctgctcgcggcggcggcggtgatggcgtcgtcggcgcagctggacgagaagttctacagcaattcgtgccccagcgtggaggccgtcgtccggaaggagatggtgcgcgcgctcggcgccgcgcccagcctcgccggcccgctcctcaggatgcacttccacgactgcttcgtcaggggttgcgacggctcggtgctgctcgactcggccgggaacagcacggcggagaaggacgcgacgccgaaccagacgctgcgcgggttcggcttcgtcgagagggtgaaggccgccgtggagaaggcatgcccgggcaccgtcttctgcgccgacgtgctcgcgcttatggccagggacgccgtgtggctgagcaagggcccgt

SEQ ID NO: 418578 - DNA, 436 bp, Oryza sativa
cttcattctattctcttctagccttagcctagctagctagctctgttgtctagctctgatcgaggttggtggcgatcatggcgtcgtcgagggtgatcctagcgctgctgctcgcggcggcggcggtgatggcgtcgtcggcgcagctggacgagaagttctacagcaattcgtgccccagcgtggaggccgtcgtccggaaggagatggtgcgcgcgctcggcgccgcgcccagcctcgacggcccgctcctcaggatgcacttccacgactgcttcgtcaggggttgcgacggttcggtgctgctcgactcggacgggaacagcacggatgagaaggacgcgacgccgaaccagacgctgcgcgtgttccgcttctgcgagagggtgaaggccgtccatgagaaggcatgccccggcaccgtctactgcgccga

SEQ ID NO: 418579 - DNA, 458 bp, Oryza sativa
ttgttacactgccaatgtgatccgttacttccccacccaggctttgaactttgctttcaaggattacttcaagaggctgttcaacttcaagaaagacaaggatggttactggaagtggtttggtggcaaccttgcctctggtggtgctgctggtgcttcatctctgttttttgtgtactcccttgactatgctaggacaaggttggccaatgatgcgaaggctgccaagggaggaggtgaaaggcagttcaatggccttgtggatgtttaccgcaagactctcaagtcagatggcattgctgggttgtaccgtggatttaacatctcatgtgttggaatcattgtctaccgtggtctgtactttggaatgtatgattctctgaagccagttgtactcactgggtctctccaggacattttctttgcaagctttgcccttgggtggctgatcaccaacg

SEQ ID NO: 418580 - DNA, 473 bp, Oryza sativa
tttcctttttccgcagagcttccagtgaccccttgtgcttggaagacaactccgtccaacatggaattgaaagatgcccattcctaaggaacatcaatgagcctacaagtttttcattctcgtccgttaattttcctgttcctgtaagccctttaccttccatcctcataatcttatcgcatgtttctgaaaaattggatgtattgtggatgccattgctcaactatatcatttgctgcttgtaaaggcaagaggagacaagggttcaatttttgaagatggacccaattctgacatggcatttcgagttttccatggccaagatggggttgttccactttcacatggaacatttgagcgaattgagaagccaatggcaaagtccaatccttgatttaaccccttggcttgctaagcagctaccatcagtctttttgatattgaggttttttcagctttggtgatttttaaat

SEQ ID NO: 418581 - DNA, 398 bp, Oryza sativa
ggcagccgccgccgcggtggggtctggtggcgcggggggctccgggcggaggctgcccccgccgtgctggacgcacgaggagacgctggcgctcatcgaggcctaccgcgataggagggaggggctccgcaaggggaacctcagagcctacgactgggacgacgtcgccggcgccgtcaccgcccgctgcgggaggttccccacggcgacgcacaagtccggcgtccagtgccgccacaagatcgagaagctccggaagcggtaccgcgccgagagggcgcgcgccgccggccgctccaagggccccaagaggcccttcttcccgctcctccacgacctcgccggcggcggggcgcccgaccctagcccaaccccatcatcaagatcaaatccaaggg

SEQ ID NO: 418582 - DNA, 501 bp, Oryza sativa
aaaggatggaatcgagtagcaatactttcaccccaaaatacagtttagcgacaatatcttagaaaagccgcttgctttgccgccatggctggcaagctgagcagagcagctaacacaaagaacacgagatcactataaaccaaacggcaacgaacgaagaaaatacagggtcttttttgtctgaagatacacgaagcggttcgttttcttttatttttagtctcctctcctcctcgatgatgggtgtatggcaatggcaatggcgatgggatcttggcttagttgatgggaaggggcttgccgttccactccttgaggcagtcgagcatggggtcgatgagcttgccctggctgatgccgaggaacacctttgtggactcctcgccgggggacttgagctttttgccggtgaggaatacccagccgagctccttgcggacgaagcggtagagcgggaacgacccggttttgacgatccggttggcgaacgggggcggtgcc

SEQ ID NO: 418583 - DNA, 525 bp, Oryza sativa
cttctcttctcctccggctcttcttcagtatcgaatcctctcttctcctcgtgcccaccaccaccaccgtagcaatggcgggcaacgggccgatcaacaaggaggacccgctcaactggggcgcggcggcggccgagatggccggcagccacctcgacgaggtgaagcgcatggtggcgcagttccgcgagccgctggtcaagatccagggcgccaccctccgcgtcggccaggtggccgccgtcgcccaggccaaggacgccgccggcgtcgccgtcgagctcgacgaggaggcccgcccccgcgtcaaggccagcagcgagtggatcctcaactgcatcgcccacggcggcgacatctacggcgtcaccaccggcttcggcggcacctcccaccgccgcaccaaggacggccccgccctccaagtcgagctcctcaggcatctcaacgccggaatcttcggcactggctccgatggccacacgctgccgtcggagaccgtgcgggcgggcatgctcgtgcgca

SEQ ID NO: 418584 - DNA, 471 bp, Oryza sativa
ccttcctgtcgaaccctctccagtctccactccactgaatcctcccacctcggctcgaaggaatggcaagcggtagtgaagctgagaagtcacctgaggttgtgctggactggcctaagaaggacaagaagaggcttctacatgctgtttaccgtgttggagatttggatcgcaccattaaatgttacacagaatgctttggaatgaaattactgaggaaaagagatgtgcctgaagagaaatatacgaatgcatttcttgggtttggacctgaggacaccaactttgcacttgaattgacatacaattatggtgttgataagtgcgacattggagcaagatttgggcatttcgctattgcaactgaggacgtgtacaaattggctgagaaaattaaatccagttgttgctgcaagatcactcgtgaacctggtcctgtaagggaggatccactgtgattgcctttgcaca

SEQ ID NO: 418585 - DNA, 351 bp, Oryza sativa
ttgcttttcttcagtgtcgaatactctcttctcctcgggcccaccaccaccaccgtagcaatggcgggcaacgggccgaacaacaaggaggacccgctcaactggggcgcggcggaggccgatatggctcggcaggcacctggacgaggtgaagcgcatggtggcgcagattcgcgagccgatggtcaagatccagggcagccaccctccgcgtcgggcaggtggccgccgtccgctaagccaaggacgccggctgggttgccgtcgagctccactagcaggcccgcccccacctcaaggccaagatcgagtggatacagaactgcatcgtccacagcggaaacatctaca

SEQ ID NO: 418586 - DNA, 453 bp, Oryza sativa
aatgggcaaaagccatactctctgtattaaagatccaacaggttcagagaacacgcaagctcagaactacacatcaccaaaattggagcaagtttgggggtacatatccgttcatacagtggaggatttatttctcgattctacgagctttttaactagagttcgaccgggaagtcaattacggatagaaatgagcatcctgtcttcacaaaacccatgcacacaacagtgggcatgaaccgcatgatatttaccatcaagtttagtagggctccacgggtgcgcggaacttggcaccagcgtagacagcagccgtaccaagcttcttcttaatcctaagaagctggttgtatttggcaaggcgctttgatcggcagggtgctccagtcttgatctgacccgtggccaaaccaacagtcaaattagtaatgaaggtttcctcagttttaccac

SEQ ID NO: 418587 - DNA, 452 bp, Oryza sativa
ccttcttcttcctccattcctccgccgctagaaccttctagaagctctcctcctcctcccatggcggcgacgatcgtgtccgtcaaggcgcgccagatcttcgacagcaggggcaaccccaccgtcgaggtcgatgtgtgctgctcagatggaacctttgcaagggctgcagttcccagtggtgcatcaactggtgtctatgaagctctcgaattgagggacggtggatctgattacttgggaaagggtgtttccaaggctgtcgacaatgtgaactcggttattgccccagctctgattggcaaggaccctacgtcacaggctgagcttgataacttcatggttcagcagcttgatggaaccaaaaatgagtgggggtggtgcaagcagaagcttggtgctaatgcaatcctggctgtgtcactggccatttgcaaagctggagctatcat

SEQ ID NO: 418588 - DNA, 543 bp, Oryza sativa
  unsure (1)..(543): unsure at all n locations
cttctctcctccctcccctcccctcccctccccgtccggccatggcggcgtcgctgcttctccgagccgcccgccggcgagacctcgcctcgcccctcggaacgttgaccgccaatgctcaatcggcatattctgcgaatatttgttcacaatggggtagttttgcaagagctttcagtgtaaaaccaactggaaacgaggttattggaattgatttgggaacaactaattcttgtgtttctgttatggagggaaagaaccccaaagtgatagagaattcagaaggcaccaggacaacaccatcagttgtggcctttaatcagaagggagagcgacttgttggaactccagccaagcgtcaagcagtgaccaacccacaaaacactttctttggcacaaaacgtctgattgggagancgcttgaggatccacaaacacagaaagagatgaaatgggtccatacaaaattgtgaggctccaaaggtgatgcttggtggaacacagatggcagcagacttaccagtcagatgcgcattgtttgac

SEQ ID NO: 418589 - DNA, 437 bp, Oryza sativa
ttttgtttctcaacgccggaatcttcggcactggctccgatggccacacgctgccgtcggagacggtgcgggcggtcatgctcgtgcgcatcaacaccctcctccagggctactccggcatccggttcgagatcctcgaggccatcaccaagctgctcaacaccggcgtcacgccgtgcctgccgctccgtggcaccatcaccgcgtccggtgacctggttcccctgtcctacattgccggccttatcaccggccgccccaacgcgcaggccatcttgcccgacggcaggaaggtggacgccgccgaggcgttcaagctcgccggcatcgagggtggcttcttcacgctgaaccccaaggaaggtctcgccatcgtcaatggcacgtccgtggggtcggcgctcgcggacaccgtgatgttcgacgccaacattctc

SEQ ID NO: 418590 - DNA, 542 bp, Oryza sativa
tctattacatggatccacaaccatctaacagctatgaatggcacctctatgagtatgagatcaatgattgtgatgcttttgccctatacaggcttgaattcaagtcctctgatgcaaagaaaactgctaaatcaaaattagcttgtaacccactgaatgaaatccagcagcaaatggttaggctgagtgcagatagccctgtcgaaaacaaacggtctgcccgcagcaggacaaaggctaacccaaatgatatcaatagcaacatctacttagttcagaacactacagttcaaggcagtattccaaatgcttatcaggcagtgtcacaaccggaccagatgacgtatttgaatggcaatgttgtttatgggcctcatctcccatacggttactcaactgaaagaagtgacttctattggagctcaaatgatggagcttgaagaagggtaaccatattttatcaacggcatatttggcctttaagttctacagctccagctttacttatggggtctaatttaatggcatgcccccatcattta

SEQ ID NO: 418591 - DNA, 433 bp, Oryza sativa
ggggatcaaaacatttctatgaccacaactttttaaggatggaatcgagtagcaatactttcaccccaaaatacagtttagcgacaatatcttagaaaagccgcttgctttgccgccatggctggcaagctgagcagagcagttaacacaaagaacacgagatcactataaaccaaacggtaacgaacgaagaaaatacagggtcttttttgtctgaagatacacgaagcggttcggtttcttttaattttagtctcctcttctcctcgatgatgggtgtatggtaatggcaatggcgatgggatcttggcttagttgatgggaaggggctcgccgttccactccttgaggcagtcgagcatggggtcgatgagcttgcctctggctgatgccgaggaacaccttgttgtacttctcgcctggggacttgagt

SEQ ID NO: 418592 - DNA, 363 bp, Oryza sativa
cttttcttcagtatcgaatcctctcttctcctcgtgcccaccaccaccaccgtagcaatggcgggcaacgggccgatcaacaaggaggacccgctcaactggggcgcggcggcggccgagatggccggcagccacctcgacgaggtgaagcgcatggtggcgcagttccgcgagccgctggtcaagatccagggcgccaccctccgcgtcggccaggtggccgccgtcgcccaggccaaggacgccgccggcgtcgccgtcgagctcgacgaggaggcccgcccccgcgtcaaggccagcagcgagtggatcctcaactgcatcgcccacggcggcgacatctacggcgtcaccaccggcttc

SEQ ID NO: 418593 - DNA, 395 bp, Oryza sativa
gtgaagcatatatggtttattttcccttttggtccacacaagcgaacagggacaaattaaacacacccacacacatggagcacacaaactaacaaagcatgcaagatgcacaaaagctgcagagcactgaaaaatctggatggagctaagctctagcctctagctataccaactttgaatgatcgaacgaacgatcagcttgctgcaagctagggcgagttttattgatggacacacagatcgatcattgatcatttgtagctagctagttttgggctcggggtttgcacatgggcccgggctggccggtgaagcggttcttgcagacgtagcgaggcggctttgacgactccacacgctggctattcttgcacgcggcggcgcatttggtcacc

SEQ ID NO: 418594 - DNA, 533 bp, Oryza sativa
accataccaaagatgagcaacaccaccatggctatttccaccatccttctcttcctcctcgccggcctcgtcgccgcccacggcgacggcgacaccatgatccgtctcccaagcgacggcgccgaagcaccaccacgcccgcccaaaccctgggactgctgcgacaacatcgagatgtccccgctcgagatcttcccgccgctgtaccgctgcaacgacgaggtgaagcagtgctccgccgcctgcaaggagtgcgtggaggcgcccggcgacttcccccgcggcgccttcgtgtgccgcgactggtactcgacggtggacccgggccacatgtgcacggcgccggatcagccgacgacgaagaggccgtggaagtgctgtgacagcatcgtgcagctgccgcagaggatcttcccgccgttctggcgctgcgacgacgagctggagccccgcaagtgcaccgccgcgtgcaagtcgtgcagggaggcgccggggccgttcccggggccgtcatctgcgaggacgctactggg

SEQ ID NO: 418595 - DNA, 470 bp, Oryza sativa
ccttcttttcgaaccctttccagtctccactccactgaatcctcccacctcggctcgaaggaatggcaagcggtagtgaagctgagaagtcacctgaggttgtgctggagtggcctaagaaggacaagaagaggcttctacatgctgtttaccgtgttggagatttggatcgcaccattaaatgttacacagaatgctttggaatgaaattactgaggaaaagagatgtgcctgaagagaaatatacgaatgcatttcttgggtttggacctgaggacaccaactttgcacttgaattgacatacaattatggtgttgataagtacgacattggagcatgatttgggcatttcgctattgcaactgaagacgtgacaaattggctgagaaaattaaatccagttgttgctgcaagatcactcgtgaacctggtcctgtcaagggaggatccactgtgattgcctttgcac

SEQ ID NO: 418596 - DNA, 450 bp, Oryza sativa
ccttcctgtcgaaccctctccagtctccactccactgaatcctcccacctcggctcgaaggaatggcaagcggtagtgaagctgagaagtcacctgaggttgtgctggagtggcctaagaaggacaagaagaggcttctacatgctgtttaccgtgttggagatttggatcgcaccattaaatgttacacagaatgctttggaatgaaattactgaggaaaagagatgtgcctgaagagaaatatacgaatgcatttcttgggtttggacctgaggacaccaactttgcacttgaattgacatacaattatggtgttgataagtacgacattggagcaggatttgggcatttcgctattgcaactgaagacgtgtacaaattggctgagaaaattaaatccagttgttgctgcaagatcactcgtgaacctggtcctgtaagggaggatc

SEQ ID NO: 418597 - DNA, 514 bp, Oryza sativa
gtttattgtctgatcgtctgcttgaagttctgaattgtactggttgtccaaatattaagaaagtcatcatcccttcaatgacaacctatctacgcctgtctaaaatcaatcttaatctgtccacaaatttaaaggaagtggatttgacatgctccaatctttatactttgaacctgagcaattgtagctccctggaggttctgaagcttgattgcccaagactgacaaatctccaacttctggcatgcaccatgttgcaagatgaggaactagaatctgcaatatcgcgctgcagtgcattggagattctcaatgtgcactcttgtccaaagataaatgtgctggactttagcagactgcgtgtggtttgtccaagcctcaagcgcatccaaagcagccttatcacataatttgaggctgcgattatttcgaggagagttattgaggcaatagttggcattcgtgcgggccctttcatggacgccggtgattctagcttagattcagaaacaac

SEQ ID NO: 418598 - DNA, 421 bp, Oryza sativa
ggcagccgccgccgcggtgtcatctggtggcgcggggggctccgggcggaggctgcccccgccgtgctggacgcacgaggagacgctggcgctcatcgaggcctaccgcgataggtgggaggggctccgcaaggggaacctcagagcctccgactgggacgacgtcgccggcgccgtcaccgcccgctgcgggaggttccccacggcgacgcacaagtccggcgtccagtgccgccacaagatcgagaagctccggaagcggtaccgcgccgagagggcgcgcgccgccggccgtttcaagggccccaagtggcccttttttccgctcctccacgacctcgtcggcggcggggcgcccgtccctagcccccaaccccattatcaggatccaaatccagggccccgccgccccggtcgcctt

SEQ ID NO: 418599 - DNA, 411 bp, Oryza sativa
gaggcaaatgcatgcacagttttacagaagcaaagcaacgggttcccaaaggtccacacttacagtacgttcaacgtacaactgatccaagcaaatgaaacaggtttgatgatgcactgatgcgagaaactaaacggttggatcggagtcggagacgaggcgatcatggacaagcggcggcggcggtgatgagcttagtagtcggtggtggggagcttgcttttgggttgtgggagatgaagaggacctcttatatgacgccggttaggtcaccgccgatgagtgggccaacccagtacacccactgggactcccaggaccagctgacgagggccggtccgtaggagacggccgggttcatggaggcgccgtcgaacgcgcctgctatcaggatgttcgcgccgaccattg

SEQ ID NO: 418600 - DNA, 385 bp, Oryza sativa
ctagtttgagtgagttagtagcagaagggagtagtgcaagatgccgatccgcaacatcgccgtggggagccaccaggaggtgtaccacccgggtgcactcaaggcggcgttggccgagttcatctccaccctcatcttcgtcttcgccggccagggctccggcatggccttcagcaagctgaccggcggcggagcgacgacccccgccgggctgatcgcggcggcggtggcccacgccttcgccctgttcgtggcggtgtccgtcggcgccaacatctccggcggccacgtgaacccggccgtgaccttcggcgccttcgtcggcggcaacatcaccctgttccgcggcctcctttactggatcgcccagcttctgggctccacc

SEQ ID NO: 418601 - DNA, 508 bp, Oryza sativa
  unsure (1)..(508): unsure at all n locations
attgagatcattcccccgcagtacgaacaagactggtatagatggcttgaaaatatacgtgattggtgtgtttcaaggcaacattggtggggacaccgtgtacctgcatggtatgtgacactagaagatgaccaggagaaaactctaggttctgacaatgaccgctggatagtcgccaaaagtgaaagtgctgcaagcgttgaggcacagaaaagttatccaggaaagaaattcatcctaaatcaggatcctgatgtgctagacacatggttttcatctgctctcttccccttagcagtacttggttggccagatgatactgctgacctccgttctttctaccctacttcagttctagaaactggacttgatattctcttctgttgggtagcacggatggtgatgatgggaacacaacttggtggtgatgtgccgtttcagaaggtttaattgcatnctattgtatgcgacacacatgtgncgaaaatgtgcaagtcacttggtaatg

SEQ ID NO: 418602 - DNA, 437 bp, Oryza sativa
cttactggctagccattgagggagtccagcctgcaattccagagaatcctcctgtagatgctatcgtagcaccaacagagaataaaaggacagagcatgggaaagatgatgggcttcctgttgacatcaagcttcctgttaagcatgtgttatctagagaactccagatgtattttgataaaatagcagagcttacaatgagtagatctgaaacctcagtttttagagaagcattagtgagcttatcaagagactcaggccttcatccgttggttccttacttttcctacttcatcgccgatgaggttacccggagtttaggtgatcttcctgttttatttgctctcatgcgtgtagtccaaagcctcctacacaatccccacattcatattgaaccatatttgcatcagttgatgccgtcaattatcacctgcatg

SEQ ID NO: 418603 - DNA, 443 bp, Oryza sativa
cctgctcgcttggctgtacgccggccgcgtccgccatggggaattgcttcggctccgatgacggcgaggtggaggccgtcaaggtgatggcccgtcatgcgctgccacaagcggcaatggcgagaccggtcatggtcgcgatcgcgcagcccaatgcacgcgtcgcgatgagcccagggcggccaccaactggtaagttgccgagccaggccacagccacaagcaccggcggcgggcgatcggtggctggtggtggaggccggacgaacgccggcggcgacgccagcgcggaggggaggatcctggaggcgcccaaccttcggatcttcacgttcgccgagctcagggccgacacgaggaactttaaggcggacaccgttcttcgcgagggccggttctggcgggtgcacaaggtgtgggtggacgagaggaccatgagcccc

SEQ ID NO: 418604 - DNA, 388 bp, Oryza sativa
gtttgctctcctctcgatctccattcgtttttgagttcctcgtttgctccgtctctctttcactcatgggcaagattaagatcggaatcaatgggttcggccgcatcggcaggctggtggccagggtggcgctgcagagcgaggatgtcgagctcgttgccgtcaacgatcccttcatcaccaccgagtacatgacatacatgttcaagtatgacaccgtccacggccagtggaagcatcatgaggtcaaggtcaaggactccaagaccctcatctttggcacgaaagaggttgcggtgttcggctgcaggaaccctgaggagatcccatgggctgcggctggtgctgaatacgttgttgagtctactggtgttttcaccgacaagga

SEQ ID NO: 418605 - DNA, 453 bp, Oryza sativa
gacaacgacaatgatgccaatattattatcaactccatcgacatcacctgaaaaaacagtaatcaaacaacacagtagctaccagaaaattgtgcaggcatggaatagaaaccacctgccatactacatggcatcgacgataaatagagctctacataatggagttctatctctcctcattttaccagcaaatctatgtaacgaaaggcaccctgcgaactgcaggggctgatacggtaattaaattgtctcccaaagatggactatgggagtaaaaacaagcatagcagtttttgttttgccacttaacccagcaaaatggcgctaagaagacaccgtgtagcgattacttcacgatgcagatcttgatcacggatgcgacgccaatacggtgcagagcaacaacagcatcaccaggcttgcacaactgcttctgtacagctgacttgagag

SEQ ID NO: 418606 - DNA, 498 bp, Oryza sativa
ctctctctctctctctctgtctctctctcgtcgtctgcaagcttccgcctcccggatcgcggcgaccaccggaggaggagggagcagccatggcgaacatcgacatggggaagatcctggcggggctggagaacgacgacgcgcgggtgcccaagaccaagctggtctgcacgctcggtccggcctcccgctccgtccccatgctcgagaagctgctccgcgccgggatgaacgtcgcgcgcttcaacttctgccacggcacccacgagtaccaccaggagaccctcgacaacctccgccaggccatgcacaacaccggcgtcctctgcgccgtcatgctcgataccaagggtcctgagattcgtactggatttttgaaggatggcaagccaatcaagctaacaaagggtcaagaactcactgttaccaccgattatgagatcaaaggtgatgagaacatgattaccatgagttacaagaaactgccagttgatgtga

SEQ ID NO: 418607 - DNA, 464 bp, Oryza sativa
agttcctcgtttgctccgcctctctttcactcatgggcaagattaagatcggaatcaatgggttcggccgcatcggcaggctggtggccagggtggcgctgcagagcgaggatgtcgagctcgttgccgtcaacgatcccttcatcaccaccgagtacatgacatacatgttcaagtatgacaccgtccacggccagtggaagcatcatgaggtcaaggtcaaggactccaagaccctcatctttggcacgaaagaggttgcggtgttcggctgcaggaaccctgaggagatcccatgggctgcggctggtgctgaatacgttgttgagtctactggtgttttcaccgacaaggacaaggcagcagctcacttgaagggtggtgccaagaaggtcgtcatttctgctcccagcaaagacgcccccatgttccgtgtttgtgtcaacgagaaggagtacaagtct

SEQ ID NO: 418608 - DNA, 373 bp, Oryza sativa
ttgttttgcggctccgtggtggcatgcagatctttgccaagacactgaccgggaggaccatcaccctgaaggtggaatgttgtgacaccatcatcaacgtcaaggtcaagatccaggtcaaggaggtcattaactacagaccagcagaagcattatctttgccgccaggcagcttaggggactgtaggacccttgctgactacaacatccaggacgagtgaaccgcttaccttgtgctacgaatcacgggaggtatgcaaatgttggagaagactctgaccatgaagaccatcaccctagaggtggagtcttctgataccatcgacaatgtcaaggccaagatccaggacaaggagggaattccgccggacca

SEQ ID NO: 418609 - DNA, 465 bp, Oryza sativa
agttgcttagcaaccatggccgcgcgcgtgctccccctcctcctcgtcgtcgtcgtcgccgcggccatggcgagagcccccacggcccacgcgtggggcaaggagggccactacatggtgtgcaagatcgccgagggtttcctgacgaaggaggcggcgacggcggtgaaggagctcctccccgggtgggccggcggcgagctcgcggaaacgtgctcgtgggcggacaccgagcggttccggtaccggtggtcgagccccctccacttcgccgacacccccggcgactgccagttcaactacgcccgggattgccacaacacatacggtgagaaggacatgtgtgtggtcggagcgatcaacaactacaccaacgcgctcgaggactcatcaagtccatatgatccaaccgagagcttgatgttctttgcacactttgtcggcgacgttaccagccttttcact

SEQ ID NO: 418610 - DNA, 519 bp, Oryza sativa
gatagcttctgttgtctgggaccaggaggctggtcggtatgtttcagtgcctgcgcagacaagggcagttcctggtcttgatctgccagcaagaaccccgcgtttcttggcaaatccaactggtgagtcaagcaaccatgggaaaaatcttgcacctgcaaacgcttcttcctcggcaatatcatcagggcagccatctgagagattgacgtacactgggcagtcgatattctttggcgggccaattctgagcacctcaggtacgaacgctcagaggagcgaagcgggcacaagagcacgacctgatggaagtagtgatcctcctaatgccttccagcgtgatacccggggcgagagagcacgcacgggctccttcccggtgtttgctcctgggacttttcagaagaacccaccatttgacaagtgatttcctgttcttgatgtcatctctgctcaagagctttcatgacaatagaatgaatgatgcatctgcacttggatagttcagatcagttgaag

SEQ ID NO: 418611 - DNA, 505 bp, Oryza sativa
tggccgcccgcccggccgcgtacccggaccggactgggccgggccgacccacgcggtctgtcttccctaccaagcgagaccactcgggccccacaaaatctccgcttcttctccgagaccgagatggcactcgactctgttccatcctaccccagcgatcttggatccagcagggccaggacgccgcagcagcaaagggtcagccccaggaaggaggagcggacatggacgaccgacacctacgcgccgtacgacgacggccaccagtggaggaagtacgacgagaagaaactctccaattccaacttcccaaggttctattacagatgcacctacaagaatgacatgaagtgccctgctacgaagcaagtccagcagaaggacactaatgatccaccatttgtctcagtcacttaccttaaccaccacacctgcaacagcagctcaaagatcgtaggcagcacttctgaatctactgtgcagtcgaggaaagccatttcgatct

SEQ ID NO: 418612 - DNA, 450 bp, Oryza sativa
ggtgcggcggccgcggcggcggcggcggggaggacgccgacgtggaaggagagggagaacaacaagaggcgggagcggcggcggcgtgccatcgccgccaagatcttcacggggctccgggcgctcgggaactacaacctccccaagcactgcgacaacaacgaggtgctcaaggcgctctgccgcgaggccggctgggttgtcgaggacgacggcaccacctaccgcaagggatgtaagccgccgccatcgtcggctgggggagcgtcggtggggatgagcccctgctcgtcaacgcagctgctgagcgcgccgtcgtcgtcgttcccgagcccggtgccgtcgtaccacgcgagcccggcgtcgttgagctttccgagccccagccggatcgacaacccgagcgccttctgccttcttccgttccttcgggggcttcccaaccttccg

SEQ ID NO: 418613 - DNA, 489 bp, Oryza sativa
tttgttcgatcgattgcttctccctcctctcgctactagactagagagtaggtagagctagctttctagctcgtggatcgttaagtttgtagtcctgcccgggcgccggcggtgaggtcgcgatggccggcggcgcggtggtgagcacgggggcaggcaaggactaccctggcaagctcaccctcttcgtcttcttcacatgcgtcgtcgccgccaccggtggtctcatcttcggatatgacatcggtatatcaggtggtgtgacgtccatggacccgttcctgaggaagttcttcccggaggtgtatcggaagaagcagatggcggacaagaacaaccagtactgcaagtacgacaaccagctgctgcagaccttcacctcgtcgctctacctcgccgccctcgtctcctccttcttcgccgccaccgtcacccgcgtgctcggccgcaagtggtccatgttcgccggcggcctcaccttcctcatcg

SEQ ID NO: 418614 - DNA, 439 bp, Oryza sativa
gtggtgtcttgctgtacatacagggtgaaattaattgattaatctttccgtgtgataatggtaacaagggacgctctttgacagtgaaaggtacagcaattaagatcaatttggccaaacaagaaacacacgtacattaagattgaagactgactaggcaaaacaaaacaaactaataaaaggcatttactgtacacggggatgaacacaagaagaagaatatagggcgtgacggagacatggactacgatattcgtgagcggattatggttggagcttattgttggagacgtggttggcgccgacgtggacgtcgtggtctccgatgaatcggcgccagaaccagtgggactttcaaacgagcaccatctcctcgatggggacgttcttggtctccgggaggaagagggcgataaaaactgacatgatgaccacccca

SEQ ID NO: 418615 - DNA, 395 bp, Oryza sativa
tttgttcgatcgattgcttctccctcctctcgctactagactagagagtaggtagagctagctttctagctcgtggatcgttaagtttgtagtcctgcccgggcgccggcggtgaggtcgcgatggccggcggcgcggtggtgagcacgggggcaggcaaggactaccctggcaagctcaccctcttcgtcttcttcacatgcgtcgtcgccgccaccggtggtctcatcttcggatatgacatcggtatatcaggtggtgtgacgtccatggacccgttcctgaggaagttcttcccggaggtgtatcggaagaagcagatggcggacaagaacaaccagtactgcaagtacgacaaccagctgctgcagaccttcacctcgtcgctctacctc

SEQ ID NO: 418616 - DNA, 264 bp, Oryza sativa
gtttgttttgtctgcccgtcgccgtcgacgccggctgccagatcttggcatggcgtcggagaagaagcaggcgaacccgatgcgggagatcaaggtgcagaagctcgtccttaacatactcgtgatcgagagccgatatcgcctcacccgcgcctccaaggtgctggagcagctgaatgggcagtcaccggtgttcttcaatgcgaggtacactgtgaggtcggtcggcactcgtcgtaaagagaagatcgcgtgctacttgac

SEQ ID NO: 418617 - DNA, 367 bp, Oryza sativa
ccgcctccgtggtggcatgcagatctttgtcaagacactgaccggcaagaccatcaccctcgaggtggaatcttctgacaccatcgacaacgtcaaggccaagatccaggacaaggagggcattcccccggaccagcagcgtctcatctttgccggcaagcagcttgaggacggcaggacccttgctgactacaacatccagaaggagtcaacgcttcaccttgtcctacgtctcaggggaggcatgcaaatcttcgtgaagactctgaccggcaagaccatcaccctcgaggtggagtcttgtgataccatcgacaatgttcaaggccaagatccacgacaaggagggcattcccccggaccagca

SEQ ID NO: 418618 - DNA, 397 bp, Oryza sativa
gaggaaaggggcaattaatgctattcaagatctatatgaagttgttcatcatgaagtgctgtctggtgatatgagtggcaatattgatgaatgggaacagattaagcaagcaagagctgaaggccgtctcttcaataatctcaagtggccaactgactctggattgaaggacttgatcaaacgattgtactctcttctgaccatcaaggagtcagctgcaaatgttcctaaaaacctggaagctagacggagattggagttctttacaaactctctggtcatgcacatgcctgttgcaagacctgtttcagaaatgctttctttcagcgtatttactccatactactgcgagactgttctttatagtaaggatgatctccagtagagaaatgaagat

SEQ ID NO: 418619 - DNA, 288 bp, Oryza sativa
tttggtgctgcggccgcggcggcggcggcggggaggactcctatgtggaaggagagggagaacaacaagaggcgggagcggcggcggcgtgccatcgccgccaagatcttcacggggctccgggcgctcgggaactacaacctccccaagcactgtgacaacaacgaggtgctcaaggcgctctgtcgcgaggccggctgggttgtcgaggacgacggtaccacctaccgcaagggatgtaagccgccgccatcgtcggcttggggagcgaccggggggatgagcccc

SEQ ID NO: 418620 - DNA, 448 bp, Oryza sativa
tatttgaggaaaggggcaattaatgctattcaagatctatatgaagttgttcatcatgaagtgctgtctgttgatatgagtggcaatattgatgaatgggaacagattaagcaagcaagagctgaaggccgtctcttcaataatctcaagtggccaactgactctggattgaaggacttgatcaaacgattgtactctcttctgaccatcaaggagtcagctgcaaatgttcctaaaaacctggaagctagacggagattggagttctttacaaactctctgttcatgcaaatgcctgttgcaagacctgtttcagaaatgctttctttcagcgtatttactccatactactccgagactgttctttatagtaaagatgaactccagaagagaaatgaagatggtataagtacactattttatctacagaagatttatccagatgaat

SEQ ID NO: 418621 - DNA, 422 bp, Oryza sativa
tttctttcacatggcgaagtcggcgatgccggcggagtacggggacgaccacggcgagtggtacggcgcgtcgctgcgctccgtgtccggcgccgggaagatgctgtacgcgtacgacaccgtgctccacggcttctccgcgcggctcaccgcgcgggaggcgcgcgacatggcggccatggacggggtgctcgccgtcaacccggaggcgaggtacgagctgcacaccacgcggacgccggagttcctggggatcgccgggaacgacgggctgttcccgcagtccggcacggcgggggacgtcgtcgtcggggtgctcgacaccggggtgtggccggagagcaggagctacgacgacgcgggcctcggcgaggtgccgtcgtggtggaagggggagtgcatggccgggacggtgttcaact

SEQ ID NO: 418622 - DNA, 399 bp, Oryza sativa
ttttcgcgccgtgctcgacaccatcggggagaacctaggcctcggggcctggcacatggagccgtcgcggatgacgctctaccggtggggcaacacgtcgagcagctcgctctggtacgagctcgcgtacgccgaggccaagggccgcgtccgccgcggacagacggcgtggcagatcgcgttcggctccgggttcaagtgcaacagcgccgtgtggagggcgctccgcaccgtcgagcccgacgccgacgagcgcaacccgtgggcgggggagatcgacagcttccccgtcgaggtgcccaaggtggaggcccgcgccaccgtcaccggcgacgccgcgtcgtcgtgagatcgccttcgccggcgatggcgacgaggatgatgggggatcttgcaggc

SEQ ID NO: 418623 - DNA, 479 bp, Oryza sativa
tccattcaagaagctcagctcctcctcctctcgcatggcagccatggccaccaccgcgtccagcctcctcaagacctccttcgccggcgtgcgcctccccgccgccgcccgcaaccccaccgtctccgtcgcgccgcgcaccggcggcgccatctgcaactccatctcgtcgtcgtcgtccactcccccctacgacctcaacgccatcaggttcagccccatcaaggagtccatcgtgtcccgcgagatgacccggcggtacatgaccgacatgatcacctacgccgacaccgacgtcgtcgtcgtcggcgccggctccgcggggctctcctgcgcgtacgagctctccaaggacccctccgtcagcgtcgccgtcatcgagcagtcggtgtcccccggtggcggcgcgtggctcggcgggcagctgttctccgccatggtggtgcgcaagccggcgcaccctgttcctcgacgagctc

SEQ ID NO: 418624 - DNA, 464 bp, Oryza sativa
aaggagggataacggattcattgtaataggaccatccaaggaggtttgaggttctcatcccacagacacagattctcgataacaccatatcaaaactcaaaacttgagagtactttaagtgaacctaaaagacacaacataagatagtcttgcaaagcataggcggactggctaacatctgtggactgcttagtcgaacaagctgaaacccatgtcatcgtcgctctcctccttcgcctcctccttcttctcctcggcagctggggcagcagcagtaccaccgtcagcagtaggggcagcagcagcagcaactggagcagcaccaccaccagatccgactgagaggatgaggtcatcgacgctgcggtgctcgaggagcttggcgaaaagaccgggccagtaggccttgaccttgatgttggccgccttcacccagggggcgatcttttcaaaggtgatgggga

SEQ ID NO: 418625 - DNA, 479 bp, Oryza sativa
gtcttttgcgcctccgccgccgccgccttcttcgtgtgctgagttcgtagattagctcgagctcgccgccatgtcgtccagcgaggtcgcctgcacgctcgccgccctcatcctccacgacgatggcatccccatcacctctgagaagatcgccaccctggtgaaggcggccaacatcaaggtcgaggcctactggcccggtctcttcgccaagctcctcgagcaccgcagcgtcgatgacctcatcctctccgtcggatctggtggtggtgctgctccagttgctgctgctgctgcccctgctgctggcggtggtgctgctgctgccccagctgccgaggagaagaaggaggaggcgaaggaggagagcgacgatgacatgggtttcagcttggtcgactaagcagtccacagatgttagccagtccccctatgctttgcaagactatcttatgttgtgtcttttaggttcacttaaa

SEQ ID NO: 418626 - DNA, 314 bp, Oryza sativa
ataggatcaaaacatttctattaccacaactttttaaggatggaatcgagtagcaatactttcaccccaaaatacagtttagcgacaatatcttagaaaagccgcttgctttgccgccatggctggcaagctgagcagagcagctaacacaaagaacacgagatcactataaaccaaacggcaacgaacgaagaaaatacagggtcttttttgtctgaagatacacgaagcgggtcgttttcttttatttttaggctcctcttcttctcgatgaagggtggatggcaaaggcaatggcgatgggatcttggctt

SEQ ID NO: 418627 - DNA, 404 bp, Oryza sativa
  unsure (1)..(404): unsure at all n locations
ttgttctacggctcttcttcagtatcgaatcctctcttctcctcgtgcccaccaccaccaccgtagcaatggcgggcaacgggccgatcaacaaggaggacccgctcaactggggcgcggcggcggccgagatggccggcagccacctcgacgaggtgaagcgcatggtggcgcagttccgcgagccgctggtcaagatccagggcgccaccctccgcgtcggccaggtggccgccgtcgcccaggccaaggacgccgccggcgtcgccgtcgagctcgacgaggaggcccgcccccgcgtcaaggccagcagcgagtggatcctcaactgcatcgcccacggcggcgacatctacggcgtcaccaccggctttggcggcaccttccaccgncgcaccaaggac

SEQ ID NO: 418628 - DNA, 471 bp, Oryza sativa
gccgcgcccgcgccggagggtgccttcgacgccgcccggaagatgccgccgttcgactacacgccgccgccgtacgacgggccgcgggcggaggagatctcccggaagcgggccgagttcctcagcccctccctcttccacttctacgaccgccctttgaacatagtcgatgggaaaatgcagtacctgttcgacgaggatggccgtcgttacctggatgcttttggtggcattgcaaccgtttgttgcgggcactgccatccggatgttgttgaggcgatggtcaaccaagcaaagaggatacaacactccacagttctttacctgaatcatgctattgcagattttgccgaggcattggcagccaaaatgcctggtgatctgaaggttgtttttttcacaaattctgggacggaggcgaacgagcttgcactgatgattgcccggttttacactggttgcatgacatta

SEQ ID NO: 418629 - DNA, 449 bp, Oryza sativa
gcgaaatcactgacatttgccaatataattgtttcaacatttacatcgcctgggcattgtgattggttcgttttgtcgttcagcatgtaaacaataactataacaatacatctgacattgacatgcgcttattggtcacgagtcacaacacatctgattagagaccggaggagcgcctattggaccatgtgttgagcagcgcatggtgggtttgcaggacatattacgagacaacgaggtgctatctcaccaatccccaacattatttatggatacggatcacatgcggacaggttgatcctgccagtccctctccgactcacagcttcgatagtgaaatgtccatcgcctcaatgaagaaatcggagtcctctttggtgaagcatagtggaggtgttactttgaacacgttcccgtagaaaccacctttcccaaccagcacacccatg

SEQ ID NO: 418630 - DNA, 504 bp, Oryza sativa
cactcttctctaggtatgttaaccagggaaagggaatgctccagcgtcaccagctgcttgcggagttcgatgccttgatcgaagctgacaaagagaaatatgctccctttgaagacattctccgggctgctcaggaagccattgtgctgccgccctgggttgcactggccatcaggccaaggcctggtgtctgggactacattcgggtgaatgtaagtgagttggcagtggaagagctgagtgtttctgagtacttggcattcaaggaacagcttgttgatggacacaccaacagcaactttgttcttgagcttgattttgagcccttcaatgcctccttcccgcgcccgtccatgtccaagtccatcggaaatggggtgcagttccttaaccgtcacctgtcgtccaagttgttccaagacaaggagagcctctaccccttgctgaacttcctgaaagcccataaccacaagggcacgacaatgatgctgaatgacagaattc

SEQ ID NO: 418631 - DNA, 442 bp, Oryza sativa
tcggtatcgactacaatgcgccgctgtttgcggggaagggccttgaggaggcctacaagttcatgccggatgtcatccaggctatctccgatggcatcgagcaattgattgctgagggcgcaagggagctgattgtacccggtgtgatgcccactggatgcttccctgtctacttgaacatgctcgatgagccggccgatgggtatggcccccagagcggctgcgtccgtcggtacaacacattctcatgggtgcacaatgcacatctcaagcgcatgcttgagaagctccggcccaagcaccccaatgtgaggatcatatatggcgattactacacgcctgttatccagttcatgcttcagcccgagaagtttggattttacaagcagctacctagggcatgctgcggggctcctgggttcggtgcgaagccgcttacaac

SEQ ID NO: 418632 - DNA, 451 bp, Oryza sativa
tttgttgcaaccatggccgcgcgcgtgctccccctcctcctcgtcgtcgtcgacgccgcggccatggcgagagcccccacggcccacgcgtggggcaaggagggccactacatggtgtgcaagatcgccgagggtttcctgacgaaggaggcggcgacggcggtgaatgagctcctccccgggtgggccggcggcgagctcgcggaaacgtgctcgtgggcggacaccgagcggttccggtaccggtggtcgagccccctccacttcgccgacacccccggcgactgccagttcaactacgcccgggattgccacaacacaaacggtgagaaggacatgtgtgtggtcggagcgatcaacaactacacccacgcgctcgaggactcatcaagtccatatgatccaaccgagagcttgatgttctttgcacacttcgtcggcgacgttcacc

SEQ ID NO: 418633 - DNA, 366 bp, Oryza sativa
cgtttgttctacggctcttcttcagtatcgaatcctctcttctcctcgtgcccaccaccaccaccgtagcaatggcgggcaacgggccgatcaacaaggaggacccgctcaactggggcgcggcggcggccgagatggccggcagccacctcgacgaggtgaagcgcatggtggcgcagttccgcgagccgctggtcaagatccagggcgccaccctccgcgtcggccaggtggccgccgtcgcccaggccaaggacgccgccggcgtcgccgtcgagctcgacgaggaggcccgcccccgcgtcaaggccagcagcgagtggatcctcaactgcatcgcccacggcggcgacatctacggcgtta

SEQ ID NO: 418634 - DNA, 551 bp, Oryza sativa
gccacgccgccaccaactcctccccccaaatccgccatggaagacggccacgctcccgccggagccgagctcgcggtggccctcgacgaggaggaggaggaggccgccccgctggtatccggcagacgcggcgccgcggcggcggcgagggcggcgacgtcccagacccgcgacctgcacctgctgagctcggccttcctcttcgtcttcctcgcctaccacgccgcccagaacctgcagagcaccgtcaacacggacgagaacctggggtcggtgtcgctggggctcctgtacacgtcgttcacggcgttctcggtggtgggctcgccggtggtgcggcggatggggtccaggcgcgcgctcgtgctcggcacctccggctacctcctcttcatcgccgccaacctcgtcccctcctggtacacaatggtgccagcctccctgtatctgggttttactgcatcgatcatttgggttgggcagggaacatatttaacgtttgttgccctcagtaatgcaagagacaataatttgcctgaaggccaaacttt

SEQ ID NO: 418635 - DNA, 472 bp, Oryza sativa
gttgtttgtggcggcggcgcaggcgccgggtcccgctgcgacgccggcggcgggcgccacggggccgccgaacgtgacggcggtcctggagaagggagggcagtacacgacgttcatccggctgatgaaggagacgcagcaggacacgcagctgaacagccagctgaacaactccttcaacggcaacggctacaccgtgttcgcgcctaccgacaacgccttcaacaacctcaagccgggcaccctcaacagcctgacgcagcagcagcaggtggcgctcgtccagggccacgtcctcccgcagttctactccatggactcctttcagacggccagcaaccccgtccgcacccaggcgttcggcaccgacggcccctacacccttaacatcaccttcaccaccaacaacaacgtcaacgtctccaccggcgtcgtctaggtcaccgtcaccaacgcgcttagcgcggtcaag

SEQ ID NO: 418636 - DNA, 509 bp, Oryza sativa
  unsure (1)..(509): unsure at all n locations
gagaccccacatattcatatctgcaagcttcctcctcctccttcctcctgatcctttagcttcctatatacgattccaccatcgaaggccagggcccagacttgcttgccgcaggttactgatccaccgaaggagggaggcgcccgcccgccgccatggccgaggtgacggtggtccgtgcggagcgcgaggaggagtccaccctggagcagggtctcctcgccatcccggaggaatccaaccaacttacatacactggagatggatctgtcgacttttctgggaatcctgttgtgaaggagagaactggtagatggagggcatgcccatttatcttaggtaatgagtgctgtgagcggntggcctattatggaatctccacaaaccttgttacatacttgacaaagaaactgcatgatggtaatgcttctgctgctagcaatgtgactgcatggcagggaacttgctacttaactccccttattggagctatactggctgatgcatac

SEQ ID NO: 418637 - DNA, 463 bp, Oryza sativa
attaagcttccagaggcagtgaggcaccacaaattttcagacacatgctggctggagtagtgtaaatatacacacacacacactctctctctcatagtaacagggctcaagggccaacaagattagcactcactggttcttcttccttgtttatttggtaattactctgtccctgattcttctccggctccggcgagatcatgtatcttgtgaaggatatcggcggcgccattgcgctgatgggcgtgtcactggtgctcctgggcacatggccggtggtcctcgccgtgctggagcgccgcggccgcctcccgcagcacacctacctggactacttcatcaccaacttcctcgccgccctcctcgtcggctttaccttcggccagatcggcgccgacacgccggagacgcctaattttctcacacagctcacccagatgcaggacaactggccttcaatctt

SEQ ID NO: 418638 - DNA, 404 bp, Oryza sativa
ggggaagctctcagcacatcagcccaacaaggcctcacaactttgatcaaccggcgaatatacaagatgggaactaattcacactgcaacaggaaacctggtataaatctcttatcttacatacagacgtacccaagccagtcgcactactaataattaattagcctagagttatgatgttacgagccaatatatttggtgtcaaaatcctcaagatcatggccttgagactttttcagttttgccactagaacccacatgtttgcaagttcactttccaagaaggcttccttttgcttcgactcctcaattttcctttggagttctgcttccttttgttccttctccataagcacagcttctaatgccttttttttttcgaagcctggcgtgatgcttttttt

SEQ ID NO: 418639 - DNA, 540 bp, Oryza sativa
cttggattggatccaattgcgggtggtggtggtggtgccgccgcgtgctgctagatctcgggctgtggaggcaatggcgacgcggccggcttcgcggcagcggagggcgtcttcggcggcggcggcggtggcggtggtgaggagttcgccgcagccgcagcagcagcagcagcagcaactgccgataccgcagtcggggtcgccgacgtcgacgacgaccaccaccacgtcctcgtcgcggctcacgccggagctctcgctcgacgggcccgcgtcgccgctgttcgccgggcttgacgaggacccggcgcccaaggagaatgtcaccgtcaccgtccgtttccggccgctgagcccccgcgagattcggcaaggggaggaggtggcatggtatgcggacggcgacacggtcgtgaggagcgagcagaatcccaacgttgcttatgcttaccatcgggtttttgcaccaactactacaacccgtcaggtatatgatggtgctgctcaacatgttgtcagcggtgccatggagggaggaaa

SEQ ID NO: 418640 - DNA, 521 bp, Oryza sativa
tcgcttctcctccggctcttcttcagtatcgaatcctctcttctcctcgtgcccaccaccaccaccgtagcaatggcgggcaacgggccgatcaacaaggaggacccgctcaactggggcgcggcggcggccgagatggccggcagccacctcgacgaggtgaagcgcatggtggcgcagttccgcgagccgctggtcaagatccagggcgccaccctccgcgtcggccaggtggccgccgtcgcccaggccaaggacgccgccggcgtcgccgtcgagctcgacgaggaggcccgcccccgcgtcaaggccagcagcgagtggatcctcaactgcatcgcccacggcggcgacatctacggcgtcaccaccggcttcggcggcacctcccaccgccgcaccaaggacggccccgccctccaagtcgagctcctcaggcatctcaacgccggaatcttcggcactggctccgatggccacacgctgccgtcggagacggtgcgggcggccatgctcgtgcg

SEQ ID NO: 418641 - DNA, 532 bp, Oryza sativa
tcggtgctgacaaatggtgcctatcttctcaatgtggattgtgatcactacttcaacagtagcaaagctcttagagaagcaatgtgcttcatgatggatcccgcactaggaaggaaaacttgttatgttcagttcccacaaagatttgatggcattgacttgcacgatcgatacgctaatcgcaacatagtcttctttgatattaacatgaaaggtttagatggcattcagggtccagtttatgtgggaacaggttgctgcttcaataggcaggccttgtatggctatgatcctgtactaactgaggctgatttggaacctaacattgttgttaagagctgctgtggtggcagaaagaaaaagagcaagagctacatggatagcaaaaaccgtatgatgaagagaacagagtcttcagcttctatctttacatggaagatatagaagagggcattgaaggttatgaagatgaaggtcagtgctgatgtccagaagagattagagaaacgttttggtcaatcgccaattttta

SEQ ID NO: 418642 - DNA, 395 bp, Oryza sativa
gggagaagaataagcactgcaatacacaagattagaatcctgagcatatcagttccagaaaacataaaacaaaaaacaaaaccctgctatgacaattagtgaacctatcaaagaacactcgtgggcaaccggggcaatgcaccatcaaaattttcgccaggcacatcaaggccagctattttaaaaagaaatgtaaccagaaaaaggatatatctatacagggagtgtgaaggcacactgtcatattctgtagtcagcattcaagaagctctcatactgagtgccatttagagcattgtagacttcatcccaattttcaatttgctccgaaagtggtttggtgtgtattttcacgtgtcggctgactagtttgctccttggcactttgaggaaat

SEQ ID NO: 418643 - DNA, 447 bp, Oryza sativa
aaaggcaaaggaattagcaatgtatactcgcattccacaacagtcgaagggcaataataagtcttaacatccaagtttaaaccgaacagaaaatagagttttaaatgactgacatagtgcacaaagcgagcagatattaacggtcaatgcaacaactgaaatgaccgtcgacaaaacttaacgagtactaaaagagctagatatctcaaatgcagatatggaaagcaccacttgaacgaggctcatttctttttggcggcagccttggtcaccttggcaccggttgggtccttcttctccacgttcttgatgacgccaacagccaccgtttgcctcatgtcccgcacggcaaaacgaccaagaggagggtactcagagaaggtctccacaaccatgggcttggtgggaattatcttaaccataccagcatcaccgttcttgaggaac

SEQ ID NO: 418644 - DNA, 523 bp, Oryza sativa
ctcaaggctgctcccatcctctccttcgagttagcttcctccttattcaaccatgggtaaggagaagacgcacatcaacattgtggtcattggccacgtcgactccggcaagtcgaccaccacgggccatctgatctacaagcttggaggtatcgacaagcgtgtgattgagaggttcgagaaggaagccgctgagatgaacaagaggtccttcaagtacgcgtgggtgcttgacaagctcaaggccgagcgtgagagaggtatcaccatcgatatcgccctgtggaagttcgagaccaccaagtactactgcacggtcatcgatgcccctggtcaccgtgacttcatcaagaacatgatcacgggtaccttccaggctgactgtgccgtgctcatcattgactccaccactggtggttttgaggctggtatctccaaggatggccagacccgtgagcacgctcttcttgctttactcttggagtgaaacagatgatctgctgctgcaacaagatggatgcca

SEQ ID NO: 418645 - DNA, 391 bp, Oryza sativa
gggctcgacaaaacatggcatggctgattactgatactgatagtagatcgatccaccgatcaagagggaaaagaaaagaaaaacaaactttaaaagagatcccgaccttgtctttccaacccaaaatcctccaccaaaaaaattgaaagcaaaattagctacgaacaagaaagagtaacaataaacatcatccttatttctcctttaaacgatcaaatttaacttaattttaaggcactctcttcttcaacctttcctccttaccaggtaggtagtctgctttttttacctcagctgctgatctgcgagattttttttgttgttttccctctgtttcttccgctggtgagtgaatgaaggtaggtgtttgttgtgtcgcccaagactttgt

SEQ ID NO: 418646 - DNA, 452 bp, Oryza sativa
ctcttcccccgctccgttctcgtctccgctctgctctggtctgctctgctgcgagggtgggtgttgcttgtaccgggcggggatggaggcggcgacgatggcgtggacggcggcgggggtggggatggcgctggtgtactggttcgtgtgggtgatgggagcggcggaggtgaaggggaagcgggcggtggatctcaagatgggatccatcacgaacgacaaggtgaaggacaagtacacgcagtactggtcgttcttccgccgccccaaggagacggcgaccaccgaggcctccgccgagaaggtgccggccttcgtcgacaccttctacaacctcgtcaccgacatctacgagtggggttggggtcagtcgtatcacttctccccttccctccccggccgctcccaccgagaggtcacgcgcgtacacgaggagcgcgttgccgaccttc

SEQ ID NO: 418647 - DNA, 510 bp, Oryza sativa
cctcattcttatttttctcattatctagtggtctagttagtaatgaagcttctatgtcctttctaggtgatcattctttttgtagtattttttatactctctagatgatgcttgttctcttcatttattttttctgcagacacttatcatgggtaaccgtgatgttattgatgaaatgtcaagcacaaattcagctgttttgacatcaatactcaagttaattgacaagtatgatctatatggccaagtggcataccccaagcaccataagcaatctgaagttccagatatttatcgtttagcggcaagaacaaagggggtgtttatcaattgtgcttttatcgagccatttggactaaccttgattgaggctgctgcttatggtctaccaatggttgctactcgaaatggtgggcccgttgatatacatcgggttcttgacaatggtattctcgttgatccccacaatcaaaatgaaatagctgaggcactttatagcttgtttctgat

SEQ ID NO: 418648 - DNA, 462 bp, Oryza sativa
tcggttaattggcaagtattttgaagagatcagccaagatactgggaaatatggatatggggttgatgacactcttaaagctcttgagatgggtgctgttgagactgtaatagtgtgggagaaccttgaaaccaacagatatgtgcttaagaacagagcatctggtgaaactgcgatcaaacattttaacaaagagcaggacgctgaccagagtaatttccgtgatccggctagtaatgctgagttggaagttcaggaaaaaatgtctcttctggaatggcttgctaatgaatacaagaagtttggttgctcgcttgagtttgtcactaataaatgtcacgagggatctcagcattgtagaggatacggtggcattggcggtatcttgcgttaccagctagatatgcggacatttgatgagctttatgacgatgagggattgtatgaagactctgcatagca

SEQ ID NO: 418649 - DNA, 400 bp, Oryza sativa
aggggtgaatagtgcaaaactgcacttattttgggacggagggagtataacgaatctggacagacagtatgtccagattcattgtacttggatatgttacatctattcaaaatcccttttgttataagacggagtgggagtagtcagatatttaaggagtttcttcttaagttttattcaagcccaaataccaagcaaggacatcaaagctttcccaaccagcagcaagatgctgatgatgagctgcaaccttccgcttttccgcaccctagggttcatgaaatctttagcttgaagggcgacgagcgccatgtaattggggattccagcagccgttgtgtcgagaatgccttccacgatcagggccgtgggggtatttttatttgaggcggaggagatg

SEQ ID NO: 418650 - DNA, 447 bp, Oryza sativa
ctaatctttggccacaggctaaaaagatggctttcgatctcaagctaaccgcatgcctcctcctcgccgtcttctccctcgccgccgccgccgactgcgagtgccagcccagcgacgaaggccacgacgcggccaagtcccggacgctcaaggtcatcgccatcttctgcatcctcgtgggcagctcagcggggtgcgccattccgtcgctcggccggaggttcccggcgctccgcccggacacgagcctcttcttcgccctcaaggcgttcgccgccggcgtcatcctcgccacggcgttcgtgcacatcctcccggtgtccttcgacaagctcggctcgccgtgcctcgtggacgggccgtggcggaagtacccgttcacggggctcgtcgccatgctcggcgccgggccacgcttctcctcgacaccgatcgccaacggctact

SEQ ID NO: 418651 - DNA, 580 bp, Oryza sativa
gcaggaggaggaggaggaggggaaggggagaccagggaggacgtgttcctccggaagctgaacgtctgctgcgtcgtgttcgacttctcctccgccgccgccgctgccgccgcagagcgcgggagggactcgccggagagggagaggaagcggcaggtgctcgtgtccctcgtcgactgcgtcggcgccgccgaggagcccctcaccgaggcgatgatctccggctgcgtccgcatgttcgccatcaacctcttcagggtgttcccgcccaaggtccggtccggcgccgccggggcggcggaggccgacgaagacgagcccttcttcgatccctcatggtaccacctgcaggccgtttatgagctgctcctccgcttcgtcatgtccccggtcgtcgacgtcaagattgctcgcaagtacatggacaattcttttgtgtctaggttgctcgacttgttcgattccgatgatccgagagaaagggaatgcttgaagacagtcttgcataggatataccggaaattcatgggcaacccgcctctttatccgcaaggcggggagcaataatctttataggttc

SEQ ID NO: 418652 - DNA, 431 bp, Oryza sativa
  unsure (1)..(431): unsure at all n locations
gtctcgcgtctcgtgtctccgtctcccgccgaggcaggcagcaaccatgatatccccgcgccccgcgctgtcctcctccagcttcctcgcgttccgtcccgcggcggcgtcgcccacgacgaacccctcgccgccgccctccccgcgcctccacgccgcgccgccgccgctctcggcctccttctccccgtcgacctccgtcgtcgcgccggaccacgtggccgccgccgccgccgccttgttctacgacgtcctcggcctccacgcgggggccagcgcgcgggagatcaaggacgcgtaccgtcgcctcgcacgcgccgttcacccggacgcctgcccgcaccccgccgtcgngtactccgacgacttcatccgcgttcacgccgtctactccacccttttcgaccccgaccagcgcgccgactacgacc

SEQ ID NO: 418653 - DNA, 456 bp, Oryza sativa
aaggaaatatatcatatattcgattatatatatatatataatagcagacaggttacatccattagaactcagaatcaccggaattgaacatcaaaagtacaacacaagcagcagcagcatcagccagcagcaaacgacatgattacccacgcttttggatgaagaacaagaagtacgagaagaagaagacgatggtcgaacaccttgatcgagctcaacaatggcgatcgatcaccaatcacctacttggtgaactcgatggcccaggcgttggcgtagatgtaggtggccttgaagccggtgaatccggcggcgcgggcgagctccctgaactccctctcgtacctctccttgccgccggggttgtgggcgagcatgatcatgtcgacgtggaacaccccctgctccctcgccgtcgcgtcggagctctccggcagcacgcacttcaccaccacc

SEQ ID NO: 418654 - DNA, 513 bp, Oryza sativa
  unsure (1)..(513): unsure at all n locations
gatcatcctcctcctccttcttctccatcgccggcgagagagagagagttagctagctaggatgggttctacagccgccgacatggccgcggcggccgacgaggaggcgtgcatgtacgcgctgcagctggcgtcgtcgtcgatcctgccgatgacgctcaagaacgccatcgagctgggcctgctcgagacgctgcagtccgccgccgtcgccggaggaggggggaaggcggcgctgctgacgccggcggaggtggccgacaagctgccgtccaaggcgaacccggcggcggccgacatggtggaccgcatgctccgcctgctcgcctcctacaacgtcgtcaggtgcgagatggaggagggcgccgacggcaagctctcccgccgctacgccgncgcgccggtgtgcaagtggctgacgcccaacgaggacggcgtctccatggccgcccttcgcctcatgaaccaggacaaggtcctcatggagagctggtactaccttaaggacgcagt

SEQ ID NO: 418655 - DNA, 429 bp, Oryza sativa
tcgttgttttactaacccacctgagcctgaattgattgatggaggcagggatatgggaaatggacagacttcacatcaactacatttaccacgcactatggatgatatggttaatggatgaattgtgaaggtcaaatactgagatacctgcatgctgtaccggtcacctctatgctctaactggtctatatgtaataactgtgtggagcgggttgatcatcactgcacttgggttggcaaatgcattgcaatgcaaaataaccgatttttttacatgcctgtattctcaaccacattgctgggcctctatgtgtatgactcgtgctgggagctcattgttaaaatcagagatgctgccaatacaacgatatgtaaagcaatgttaaagacacgcgctttaaatggactgagcatatagtgctttatttg

SEQ ID NO: 418656 - DNA, 528 bp, Oryza sativa
gtcgtcttcgacttcactccaactccacctccacctccaccacccctctctcgaagccatcgccgcctgtctctcctctccagctcgcccggtcagagtccgcgggggattcgattgattggtagctagctaggcttccgcgcgcggcgacccaacgtcggtggaggcggtgctgaaggccgggcggcgtctcgttcgtggtgcggtggagatgggccaggacctcgccgagatccaccctcgcgagctccagttcacctttgaggtgaagaagcaaagttcatgtactgtccatcttgtcaacaaatccaatgaatatgtcgcattcaaggttaaaacaacatcacctaaaaggtattgtgttcgaccaaacactggagtcatccttccaaggtcaacatgtgatttcacagttaccatgcaagcacaacgtactgctccaccagacatgcaattaaaagacaagtttttggttcagacaacagttgtcccttaggaacatcaaatgaggaccttgtcctttttatt

SEQ ID NO: 418657 - DNA, 474 bp, Oryza sativa
gaaggggattacaggcttagatgcataagaacagttatgcaatcaaccggtataatacaggcccaagttcaggctatctgataaggaatacaaatgttgtttctttagacaggccttaagaaaaattgtcactataacaataatccatgctcattcgcccaacaagtgggcataaaattaatagatgcacaaagcaaggggatttggcttttctagagctaccgatcttcagatgccagcattgataaattgctctgagctcttagtagggaggatccggattaaatgccaaggattccctccagatgagttcttttatatgttcttcagtaaaggatggttgctcaaaatcaaagctgaaaggtgctgggcaggtgggttttttattgatgtcatgaagagaagccaagtatgggtgatgaaaagccttatcaacaggtattcgtttgtttgggtaaaacaccacattttttt

SEQ ID NO: 418658 - DNA, 526 bp, Oryza sativa
atcaacgactagtcgcggcgaccaagagccaaaccctacgcctcctcccctccccctccacctcgtcctccccgcgagcggcggcggccatggattcctcctccggcggcgcgggcggcggcggcggcgcgcagatcaaggggatggggacgcacgggggccgctacgtgctgtacaacgtgtacgggaacttcttcgaggtctcctccaagtacgcccctcccatccgccccatcggccggggcgcctacggcattgtctgcgcggctgttaactcggagaacggcgaggaagttgccatcaagaagattggcaatgcattcgacaaccatatcgatgccaagcggacactgagagaaatcaagctgcttcgccacatggaccacgagaatattattgccataaaggacataatttcgccccccaagaagagacaactttaatgatgtttacattgtttctgagttgatggatactgatctccatcagatcatacgctcaaatcaaccattgactgatgaccact

SEQ ID NO: 418659 - DNA, 398 bp, Oryza sativa
atcttggcgcgatacgatgtgtcgtcgtaggggcggcggtagaagcggaggaacggcaggaaggactcgcgctcccgctcgccgcggctggcctggccgtccttcttgaacgcgaacagcatcgacggcgactgcaggaacgacggccgcggcgtccgcgggaactgctgcgctggcgccggcgccttctgcccgcccttggtcgagaacggcgtcagcggtgcgccgcggtggacgggcggcgtcgtggtggagcgcgcggcgggggaggcgaaggagaaggagcgcgccgagagcggcgacgcgccgatgagggacgggctggaggtcggcaccacggagcgaggccccaccgacgacggcgtggtggtggacaggtaccacggcttgagggtgtt

SEQ ID NO: 418660 - DNA, 522 bp, Oryza sativa; identical to SEQ ID NO: 394816

SEQ ID NO: 418661 - DNA, 476 bp, Oryza sativa
tcgctcacatgatagaaattcatatgtttggacacaagagggccatgattgggttcctacccttgttattctcaagctaaatcgtgcagctttatgtgtccagtggagcccaaaagaaaacaagtttgccgtaggaagtggtgctaagtctgtgtgcatttgctactatgaacaagacaacaactggtggattagcaaggttgttaggaagaagcatgaatcttctgtcactagtgttgcatggcatccaaacaatatacttcttgcaacaacatcaactgatggtaaatgcagagtgttatccactttcatcaagggtgtcgatacaaggggatcacatgcgagcacttctactgattggaaatttggagagcaaattgctcagcttgacctatcatctatgtgggcatttggtgtaaggtggtcgccaagtggaaagacactagcctatgcagggcacaattccatgatttatt

SEQ ID NO: 418662 - DNA, 522 bp, Oryza sativa
tcggtctggaatgcagccaatttttaagtccagttcccattccagctccgtctttctttcttctcctcctggatttctgccggctcgagatcttttcaacgctcttgagctagcggcggctttgtttaattcgtggtgagcaacgtcgtcgtcgacgacgaattcgatccggaggaagggttcgttgtccggcccagttcggccggccggatggcattgttgggcgtcctcgtcggggcggtgatcatcgtcgtcgccaccgcggccgccgtttcgggcagcgggctgccggtgcctggatacgacgggctcgccatcgggttctaccacgagacgtgcccacaggcggaggacctggtgctcgccgagatgagggagatcgtccaggaggacaggaccctcgcgccggcgctcctgcggttcatgctccaagactgcttcgtcagggggtgtgacgcgtccatcatgctgaaatcgcggaaaaaaatcgggagagggccgccactcgagcttcagccttcg

SEQ ID NO: 418663 - DNA, 489 bp, Oryza sativa
atggataagaagctggcatgtgcttcggctagtagcattgcaacgcaaacagtatgacaaggtaccacgcattgtttaagagctaagacaaagacaaaactgatgcatccaacgtaccaaaaagaaagcgaacagcagcagtcagatagctatgagaagagaactaggagagggataactagaagggacagaatggcatccatgggtccatgacgtttagtcgacctcctccatcttgctctcgccggcgtcgtcctccagcggcggcatgtcggcgtcagccttggcggactcgtcctcgtcgatgctcaggccgagcttgagcatgcggtggatcctggtgccgaaggtgttggggtcctccaagctgaaaccggaggtcagcagggcagtctcgaagagcagcatcaccaggtccttcacggacttggcattcttgtccgcatcggcacgcttgcggagctcgtccatgatggcattctccgggtt

SEQ ID NO: 418664 - DNA, 446 bp, Oryza sativa
ttattgggcagtttggtgtcgggttctactccgcctaccttgttgctgagagggttgttgtgaccaccaagcacaacgacgacgagcagtatgtgtgggagtcacaggccggtgggtccttcactgttacacgtgatacctctggtgagcagcttggacggggtactaagatcaccctctacctcaaggatgatcagctggaataccttgaggagcgtcgcctcaaggatctggtgaagaagcattctgagttcatcagctaccctatctccctatggactgagaagacaactgagaaggagatttctgatgatgaagacgaggaagagaagaaggatgctgaggagggaaaggttgaggatgttgatgaggagaaggaagagaaagagaagaaaaagaagaagatcaaggaagtctctcacgagtggaacgtgatgaacaagcag

SEQ ID NO: 418665 - DNA, 517 bp, Oryza sativa
ggaatgcggtgaattggcgggagtccgttcgtggagacactttcttggccgtgagttcttggttcgtgcgccatggacggtgcgaaatcggggaagcaatgccatgtctgccagatctgcggcgacggcgtgggcacggcggcggacggcgagctcttcaccgcctgcgacgtctgcgggttcccggtgtgccggccatgctacgagtacgagcgcaaggacggtagacaggcgtgcccgcagtgcaagaccaagtacaagcgccacaaggggagcccgccgatacttggggatgaaagcgatgatgttgatgcggatgatgctagtgatgtgaactatccaacatccggcaaccaggaccataagcacaagattgccgagaggatgctcacctggcgcatgaactctgggaggaatgatgatattgcccattctaagtatgatagtggcgagattggtcatcccaagtatgacagtggcgaaatccctcggatatatattccatcggtcacttcac

SEQ ID NO: 418666 - DNA, 468 bp, Oryza sativa
acagagcaacattgatttcatattcccattaagtgcagcagaatgttgtcaggcatttttcagcaaagtagttctactaacttaattatcaacagatgaacagcaaggtaccacttactactccttaatacataacaagcattccggcagctaagatcttacagtagactatatagagtcatccactaataacttacacaacagaatggatagcaaactggcgattctttgcctactatcttgctcactcctagcagttgataccacatttttgggtatcagggcctgtgacacgggtggtgaatggatcgatacgaacccacagcaaggagaagatcgatgcaaggaggatggcccaaacaacaacaatggtcggtgtaccggtttgccgacccatgagacccttaaggaaggggtacaggtggacaatcacccagaatgcaaagaagagcttcccaagagcggacc

SEQ ID NO: 418667 - DNA, 375 bp, Oryza sativa
gaatgcggcgaattggcggggggccgttcgaggagacactttcttggccgggagtgcttggttcgggcgccatggacgggcgaaatcgggaagcactgccatgagtgcgatctgcaagacggactgggcacggcggcggacggagagctcttcaccgtctgcgacgtctgcgggttgccggagagccggccatgctaccagtacgagcgcaaggacggtagccaggcgtgcccggagtgcaagaccaagtacaagcgccacaaggggagcccgaccatacttgtggatgaaagcgattatgttgatgccaatgatgctagtgatgagaactattcaacattgggcaaccaggaccataagcacaagattgccgag

SEQ ID NO: 418668 - DNA, 492 bp, Oryza sativa
acagagcgacatcgatttcatattcccattaaacgcagcagaatgttgtcaggcctctttcagcaaagttgttctactaacttaataatcaacagatgaacagcaaggtaccacttactacttcttaatacataacatgcataccgggagctaagatcttacagtagactatatagagtgatccactaataacttacacaacataatggatagccaaccggcgattctttgcctactatcttggtcactactagcagtcgataccacatttttgggtatcatggcctgcgacacgggtggtgaatggatcgattctaacccacagctaggagaagatcgatgcaaggaggatggcccaaacaacaacagtggacggtgtacggctctccgtcccatgagacccttaaggtaggtgttcaggcggacaattacccaagatagcaagagaagagcttcccaaagagcggaccccatgactggtatcaaatgtta

SEQ ID NO: 418669 - DNA, 514 bp, Oryza sativa
gtgttctgtaagcagcgtggattcaccagttgttatatatgggcttgccctcctgttaaaggtgaagattacattttgtattgccatccagagattcagaagacaccaaagtctgataaactgcgtcagtggtacttatctatgcttcaaaaggctattaaggagaacattgttgtcgagttgacaaatctctatgatcaattttttgtcactgcaaaagaatgcaagataaaagtatctgcagctcgcttgccatattttgatggagattattggccaggagctgcagaaaatattatcaaccaacttcaactagagggtgatggtaagctgctgaagaaggggagagtaaataaaattatcacaaaacgagctttaaaagctgccggccacactgatctaagtgggaatgcttcaaaagaggctatgctgatgcaaaaacttggagaaatcatttgcccaattaaggatgatctcatcatggtccatttgcagtattcgtgcagtcactgtt

SEQ ID NO: 418670 - DNA, 527 bp, Oryza sativa
ttcatcgccatcgccattgccgccgacgaggaagaggagaagcttcgagtggagcgatctcgatggacccgtgcccgttcgtgcgggtgctggtcggcaacctctcgctgaagatgccggtggcgccgcgccccgccggagccggggccggggtgcacccatccacctcgccgtgctactgcaagatccgcctcaacaagctgccgtaccagaccgccgacgcgccgctgctgctgccgccctcgccggaggcatcggcggcgccggcgccagcgccggcgacgggcgcgctcgccgccgcgttccacctctccaaggccgacctcgaccgcctcaccgcgaagccgtcgctgttcgggtcgcgcacggcgaggctgaagatcgtggtgtacgctggccggaggggcaccacgtgcggcgtcagcggcggctccgggaggctgctcgggaaggtggtcatcccgctcgacctcaagggcgccttcgcgaagccggtggtgtacccacagaagctgatctgcatcggg

SEQ ID NO: 418671 - DNA, 224 bp, Oryza sativa
gccctttctacttttttttggggggataaaaaaagacggggtaaatattaataagaagctggcctatccttcggctagcagcattgcaacgcaaacaggtagacaaggaaccacgcatcgtttaagagctaagacaaagacaaaactggtgcattcaacgtaccaaaaagaaagcgaacaggcgcacgtcagattgcttttgagaagagaacttgggagagggg

SEQ ID NO: 418672 - DNA, 407 bp, Oryza sativa
ggtgataaaaaaagacgttgtaagtatgaataagaagctggcatatacttcggctagtagcattgcaacgcaaacagtatgacaaggtaccacgcattgtttaagagctaagacaaagacaaaactgatgcatccaacgtaccaaaaagaaagcgaacagcagcagtcagatagctatgagaagagaactaggagagggataactagaagggacagaatggcatccatgggtccatgacgtttagtcgacctcctccattttgctctcgccggcgtcgtcctccagcggcggcatgtcggcgtcagcctcggcggactcgtcctcgttgatgcttaggccgagcttgagcatgccggtggatcctggagcccaaggtgttggggtccttccaagctgaaaccggagg

SEQ ID NO: 418673 - DNA, 428 bp, Oryza sativa
gatcaggagcacgcaaggcgcgcggccatggcgtcggagaccgagacgttcgccttccaggccgagatcaaccagctgctgtccctcatcatcaacaccttctactccaacaaggagatcttcctccgcgagctcatctccaactcctccgatgcattggataagattaggttcgagagcctcacggacaagagcaagctcgatgcgcagccggagctgttcatccacattgtccccgacaaggctagcaacaccctgtcgatcatcgacagtggtgtcggcatgaccaagtcggacctcgtcaacaacctcggtaccattgccaggtcggtgaccaaggagttcatggaggcgctcgctgctggtgctgatgtgtccatgattgggcagtttggtgtcgggttctactccgcctacccttgtgctga

SEQ ID NO: 418674 - DNA, 448 bp, Oryza sativa
gggggcttgttggatttttatggtatactgaatacatcaacaatattacaatcttctaaaatcctcccataatatgaatctcaagaattgaacgaatgaccataagcgctatattacatataacttctgtgagtgagcaattgaaagcccttgatgatgaacattcctaagaatatatccacctaagtttttaagttttcagccaatagatgctacagggtaaattctcttcacaaaaccatggcctgagggggtccgtagccgctccggtgcttcttctgccatgtccaggcaaccctgaggctttccaggagatcggtatgttgagcagtccagttcagctcgctgttgatctttgcgggatcgctgtacactttggcatatcaccgggtcgaccagggaagtagtcgaccctgatgtcaactcctgttgctttcttgcaagcttc

SEQ ID NO: 418675 - DNA, 530 bp, Oryza sativa
tcgctcctcttctcgcggccaacgagagagggagagggagagctaggaccaccgccactgcctcgggaagtaggtggctcccctgctttccctcctctcctccgccgtcgccgaggcagccagccaagtcgtcccagcaggtggtaggctactagtccgggtggccggcagtgagcaggaggaatcatctctggcgttcttgtctccgaggaactttgattctttctgggaggggatttggtgtgctgctgctgctccagatgcttcccaccaacaggaacaggccccagcagaggcctgccagatcttggtatttcatctcagacatggacttctccgatccgaagcgcaagccgcggtacctcagtaagatcctcatggtggcgctcctcaccgccatgtgcgtcgtcatgctcacacagccgccctgccataggaggactcccagtgtgttctccatccatgaaccccgcgtcacgcatgttctagtgacgggcggcgctggatatatcagttcgcacgctgcgctt

SEQ ID NO: 418676 - DNA, 463 bp, Oryza sativa
  unsure (1)..(463): unsure at all n locations
agcccgcgagatgggaaaccccctcagaaattgtactaatcgttccaaattcatcagcacacaccgttaattacttactacttgtatttatgtatttatgtatgtatatctcacaacggatacacgtcgaatctttattacttgtgtccttcaccggcagtcccctgatattcttcagcaagcagcagcagggaagcagtagcctcaggcgtcatccttgtctgcaaagatgtcaagaagggagagcgcctcggcgacgctgagctccagcctgaacttggggccgtcgtagtggtggaggatcggccggaaggcgtcctcctccagcgggtcatagatcttcctcgtcgcaaccttcacctgtgcagggaagcgcgactcgccggggcacttcttgtccttccacgccgtnggatcgatgttttgtccgccaaagctcgcagcctcgaagatgccgtggagc

SEQ ID NO: 418677 - DNA, 471 bp, Oryza sativa
agcccgggagatgggaaaccccctcagaaattgtactaatcgttccaaattcatcagcacacaccgttaattacttactacttgtatttatgtatttatgtatgtatatctcacaacggatacacgtcgaatctttattacttgtgtccttcaccggcagtcccctgatattcttcagcaagcagcagcagggaagcagtagcctcaggcgtcatccttgtctgcaaagatgtcaagaagggagagcgcctcggcgacgctgagctccagcctgaacttggggccgtcgtagtggtggaggatcggccggaaggcgtcctcctccagcgggtcatagatcttcctcgtcgcaaccttcacctgtgcagggaagcgcgactcgccggggcacttcttgtccttccacgccgtcggatcgatgtttgttccgccaaagctcgcagcctcgaagatgccgtggagcttgtgggt

SEQ ID NO: 418678 - DNA, 521 bp, Oryza sativa
gaaaaccgaaacatataatcatgacatgaaggggaaaaaacactcctgtttgagtgcaataacatcacatcaggttcagcaatatcaatcaacaggttctaacttcgttaacaacaataaatcacagagttagttaatgtgatagcttaaactagactgctgacatggtagcctttacatgttctaatattctaatgtaatcgtagaagagcgcggagtgctcgccctccagaccatctcggtgatggcggttgctgccagcaaggttgttgcacgggctgccaccaatcaccaggtcaaaaccgccaaaccttctgatgaatgtttcaattctttcagtagtaagatgccgcacgtcggcgatttcaatcagcgttccagtttgtgtctgatcccaccagctcttcagaatcgttctgttcacttctgatttctcaacagagatcactgttttcatatgtatccccagtcttgggagagctacctttgctccttcaataccagaaaacagggataagaca

SEQ ID NO: 418679 - DNA, 300 bp, Oryza sativa
ttgtccacccacgcgtccgagcggccggccgttttttttttttttaacttcaacaaggcagatatattagaatggttcttttactcagcacagcatagcatggtatcctcagtaaaccagagtactactacccttaacatttcagaaaaccttaataaaaagcatcatggaatcacatcctaagcttgcataaacactgaaacatccataaaacaaaatccgcaggcagcagccggtgccacctcctgctcagaacccaagcttggtgcggcgccagtgcctgcgcttcgcgttatacct

SEQ ID NO: 418680 - DNA, 386 bp, Oryza sativa
gtcgtctcttcgtccccgccgcgacgatgccgtcccacaagaccttccgcatcaagaagaagctggcgaagaagatgcgccagaaccgccccatcccctactggatccgcatgcggaccgacaacaccatcaggtataacgcgaagcgcaggcactggcgccgcaccaagcttgggttctgagcaggaggtggcaccggctgctgcctgcggattttgttttatggatgtttcagtgtttatgcaagcttaggatgtgattccatgatgctttttattaaggttttctgaaatgttaagggtagtagtactctggtttactgaggataccatgctatgctgtgctgagtaaaagaaccattctaatatatctgccttgttgaagtt

SEQ ID NO: 418681 - DNA, 454 bp, Oryza sativa
tttactcttgaagcagatggacttaaggctgacataattattgtggacgttgagagagataagaagcttttcatgttgaaacagcttagtggcgcacttgtgaaaggattaaactctagtccagctttggtgataaagaaaatagctggcttggtttttgactgcttcaagagcctagatcctgatgtaagtcctgcaagatctccaactgaagataatcatttctttggaaacaaagggtcacaacttctagggcagataaagcatggatcatgccgaccccgagctatcctgtttaaggttcttgcagatgctgttggtcttgagagtaaacttgtagtgggtctacctgatgatggtggagttggatttgtggattcctacaaacacatgtcccgggttgtttcactgaactctatggaactgctagttgatcttatgcgatttccagggc

SEQ ID NO: 418682 - DNA, 474 bp, Oryza sativa
ggagagaatgtcaaagaaagttgaccaattggtcgattttataaattattaataattgaacaaatcctcatttacatcaacatattataccacgcggccagccctgcgggcgattcatggcgattcagctggatgtgccgagagcccaagccgaatccaaccccccacagtgcttggttgatattgtacagtagcaactgggggaagaggagtagagtagccgcaagaacacctctcagctcaaggaaggcatgggaagaaccccctctatacgttttgtttcactagcctactattgtttctatttacacgcaggatctccaaatcctgccctccaaagagatgacgatgacagatacatcgtcatggtatcgccgacgatcaccatgtggtatctcgatcagttcatgaaagtccattcctgctttgttggcagcacggaaaagaacttcctccacaagatgttgggcaggg

SEQ ID NO: 418683 - DNA, 518 bp, Oryza sativa
atctactcaagattgatagaatcgaaccatcagagctcaacattgatgagagttcaactgtgtactcacatagtggatatcttgatctgctaaaggttcttgatgaagaccacaggtcaactggtggagtaaaatttgttacaaaatgttttggaatcatcggtttcattaagttcctcggaccttattacatgctaatcatcaccgagcagagaaaaattggggctatatttggccatccagtttaccaagttactaggactgcaatgattgagctgtcaaattccgagtcgagggcaaaatttctaaattccaaggatgaagacagatacaagaagctcttgcagacaattgatcttagaaaggacttcttttttagccactcgtataatatcatgagaagtttccagaagaattttaatgatccaaaggaaggatgggacctgtatgacacaatgtttgtatggaatgagtttttaacacgaggggttcgcaacattctaaaaagtaccatatgg

SEQ ID NO: 418684 - DNA, 501 bp, Oryza sativa
tcggttcgtcaacaccttccaagagatgaagacttacgcgctgaatgtggcattgctgtccatcttcggggaggaggagatgcgctacatcgaggagctgaagcagtgctacctgacgctggagaaggggtacaactcgatgccggtgaacctgccgggcaccctgttccacaaggccatgaaggcccggaagaggctgggcgccattgtggcccacatcatctctgcccggcgcgagcggcagcgggggaacgacctgctagggtcgttcgtggacggccgcgaggccctcaccgacgcccagatcgccgacaacgtcatcggcgtcatcttcgccgcccgcgacaccaccgccagcgtcctcacctggatggtcaagttcctcggcgaccacccccgccgtctcaaggccgtcaccgaagagcagctgcagattgccaaggagaaagaggcgtcgggcgagcccgttgcatgggcggacacgcggcggatgaagatgac

SEQ ID NO: 418685 - DNA, 530 bp, Oryza sativa
cgggggcgccaaaaaccaatagtgagagaacaaggagtatgacagccactttaattttcttttactgtggataagtgataatctgataccaagcattacacatgaacagagtagagaggagggatagctagagaaggggaatctgtacacagccatcccaggtaaaaccttttccaccaataaatatgtaaagataaacaaaatgacacatttaagttgactaaccgaaacatgtatattgcaatctgaaatgttgcctccaaagctccaagcccaggtgtaattcaaagtagtcatctcatcctgtaagcccaaccatgttcactcaaaaatgcatggacagcttccttgatggcaaggttaggaaccagttggtgtggttcaagtgtctcacgggtcacaggatcaaacttccccaccctatgaagatgatcaagaatcaccgcccttttatacgtgattccacttggggttatcaccgggtctctgaaaatatcaagagtaattttgcagcagagatgatcaggaac

SEQ ID NO: 418686 - DNA, 523 bp, Oryza sativa
gtttctccaattttccaagcctgcctccaagcgcacgccacgatcttctagaagcgattcgcgcgcgccgccgcctcctcccctccccttccccggagcgaagccgccccgccgggggggatgtcgccggcggcggacagcgcggcgtcgaagcggcaggcggagctgctcaagcaggagggcaacgccttcttcaagaaggaccgcatcagcgccgccatcgacgcctacaccggggccatagctctctgcccaaaggttgcagtatattggaccaaccgagcactttgctacaagaggcggaatgagtgggttagggctgaggaagattgtagaacagctattcagcttgacagccactctgttaaggcacattacatgctcgggcttgcacttctcaacaaggacgaattggccgagggaataaaagaactagagaagtcgttggagcttggaaggtgtgcacattcagcaagttacatgtttgaagagatctggcaagagctttctaaagcaaaataca

SEQ ID NO: 418687 - DNA, 401 bp, Oryza sativa
ggcggcaggtgcggcggccgggcgcttgggcggagccgccgccgctttcttggtcttggcacggatggcgtcgagggcctcgacgtacttctgcacccgcttctcctgcactcggcgctgctccttgacctcgccgtcggcggcgatggagtcgagcttgaccagctcattcatcagcgcctcggtgagcgccaccacgtcggcgtcaaccaccctcccgcccttgctcacgatcgcctccagcgccgacaccttggaggcgagcttgtcgacgtcgagggcgacgcgggagacggacttggcggcgcgctcggccttgcaatggcggcgctcctcgaggaggcgcttggcctgggcggtggggtccttgaggaggagcattttggagcggtccttgaccc

SEQ ID NO: 418688 - DNA, 414 bp, Oryza sativa
ctccttctcgtcgcgggggggcccgtctcggctgcggcggcggcggcggagtaggccacggtggtggtggtggtggtgagtggggggaccatcgccgctggtggtcggttcagtctggcgggcgggcggtctcaccggtcgttgacgaggagtttggttgaggggggccctgcggcatcagcggcggcggcggaatgtacgtgccgcagccatctctctccgatgcggtcggccttgacgccggcgaccagcctagggtttaccaggtttggcggggaagcatcgaattcttcttgcgagggaggtttatatttgggcctgatgtgagatccatatttatcactatgttcctcatctatgcaccagtggtggccctttgcgtgtttgtcgccagacaccttattgatgactttt

SEQ ID NO: 418689 - DNA, 516 bp, Oryza sativa
  unsure (1)..(516): unsure at all n locations
tttataagccagacaagccaagcgactaatatatagttagaatcagaaagaatgccaccgtcgtcggcggccaccaccggcggcgccgtccataaaccaattatcatgccgcccgagtcggagaggcagatcaataatcttccagacgtactgcagccccgccggcggtggcggtcctcgctcgccacgggcttccgctcggccctggcctgcaccatcgtcggcgtggcctccatctacgctccgctcgtcatccgccgccacctcaccttcccggccttctcttacgtagtcaccgtcatcgtagtcaccgacgccacgctgggcagctccctgcgcggcgccctcagcgcggtccacgccacggccatgggcgcagttccatcggtgctgccactctggctggcgcaccgcaccggcgccggggagtcggtgctggcgacgacggcngtggtggcgctgagcacgttcgcggtggcggtggcggggtcggcggtgaccgtggcgaagcggatc

SEQ ID NO: 418690 - DNA, 532 bp, Oryza sativa
tcggttgaccgtgatggaaacccaagagttacaccagaggttacaagagatgtatgcttgttggcaagaatgatggctgctaacctgtacttctctcagatagaagatctgatgtttgagctctctatgtggcgctgcagtgatgaacttcgaattcgtgcagatgatttgcattgctcctccagaaaagctgcaaagcactatatagaattctggaagcaaattcctccaaatgagccttatcgtgtcatacttggtggtgtcagggataaattgtactatacgcgtgaacgtactcgccatctattgacaactggagtttctgaaattccagaggaggcaacgtttactaatgttgaagagtttctggagccgcttgagctgtgctacagatcattatgtgcttgtggtgacaaacctatagctgatggaagccttcttgatttcttgcgtcaagtatcaacttttgggctggctcttgtaaaacttgacataacgcaagagtctgatcgacacactgatgtccttgatg

SEQ ID NO: 418691 - DNA, 297 bp, Oryza sativa
ggtggaccgcaccgtccacgccgactgcatcaacgcctccaacccctaccacgtctgctccgagtactgcttcaagaggatcgccgacgccaaatcagggttggagcgtgcggagcaagaaccgccttctgcagacgctggcaaatccgatgctgcccaagctgagggtggtggtggtgatgatgatgcggagcaggaggacgccggcttagacgacggttacccgcagatgacagagaagcagaagaagcttttttagttgtggctgaagatgaatgaagctttggaaggcaaatt

SEQ ID NO: 418692 - DNA, 433 bp, Oryza sativa
acacaacttctcgaatatgctatattctcacgacattacatccgagttggctttcttacagttacagtttccaagcaaattgttgataggttacaacttacaagcaaaagacagctggggaaacagacaacatgtccactctctaccagcagagtgtgcagagtttctaatctggcaaggcagtccccctttcaagattgttcttgatctcaagagtatacttgccaaatgccctctcaaccttcttgttgaagtgttcgttccggtcattgatcgagtcaatgtccttgtcttcatggaacttgcgcctcctgctgaatgctttccgtttctcatcccgttccttaagctcattaaccatcctgtctatgttttcttccgggaccttagacaccttcccatattggagacttgaagcgttccgataaaattc

SEQ ID NO: 418693 - DNA, 324 bp, Oryza sativa
agcaagctgaaaacctttcataacccttgtagcatttgattggggaaacagaattttacaaggagattcagagcttccgaaactggaagaacagaaacccgagggaatggacacaaggaacataactgaaggggaaaggggttacattattatgaatgggcccaatttggaacaaggactaaaagtttttactgaggatttggtggcctggagttgtgcaaaaaaaaccttattcccattcagagggtttttgttggggggggccttgggcgcgatcaccttaatgaagcacagggagttttttttccccaggggcattccgat

SEQ ID NO: 418694 - DNA, 464 bp, Oryza sativa
tcgcccaacaagcgtcaaatcgcgtcaaagccaaaaacctcatacaagtccaggaatctgtaatatattccgagacttttacacgcattccagtcatcactagtgtagcggttgctgcttcttccccggggaggtttatcggatcttgatggagacccatatcggatccgtggacggggcggcggcggcggcggacaacggcgcggtggggtgcccggcgtcggcggtggggtgcccgatgacctcggcgcgccccgcgcccgtgtcggccggcgaggcgtcgctgggacggcacctggcgaggcggctggtgcaggtgggcgtcagcgacgtgttcgccgtgcccggggacttcaacctcacgctgcttgaccacctgatcgccgagcccgggctgcgcctcgtcggctgctgtaacgagctcaactgccggtacgcggccgacggctacgcccgcgcgcgcg

SEQ ID NO: 418695 - DNA, 528 bp, Oryza sativa
ttgttcatcttcccgccatcagcatcggactattatcagattgatgatttactcaccactgaagagcagtctatcaggaagaatgtcagggctataatggagaaagaaattgcacccattatggcaacgtactgggagaaagcagagttcccatttcatgccattcctaaactttcaagcctcggtgtagctggaggcacaataaagggatatgggtgcccaggactttcaataacagcaagtgctattactatggcagaaattgcacgggtagatgcaagctgctccacgttcattctagtacactcctcccttgcaatggtcacaatagctctttgtggatctgaggttcagaagcagaagtacttgccatcccttgctcaacttactgctgttggttgctgggcattgacagaaccaaatcatggaagcgatgcaggctctttgataactacagcaaccaaggttcagcacttgaggatttgaagcattatttgttttttactaaataaaaatctcaaatttttt

SEQ ID NO: 418696 - DNA, 490 bp, Oryza sativa
tcgtgtcgcctgatcgcctccagcgaaattcttcctccatttctctctccatcgaatctcatcccagcagcagcagcagcagcagcagccgccatggattccaaggcggacgcggagtcagccacggccagggccgcccgtcgtgtcgccgcccgtctccgccaacccctacgtggtctccgccccctccgctcagccgcccgccaagagcgccagggagaatctccgggagaagctcgacgtggtcgggaggaggttcggggacgccgcgcgcaagaccgagggcatcgtcggcgacatctggcagcatctgaaaactgggccaagcattgctgatacggcgatggggaggattgctcagatatccaaggtgatagctgaaggtggatatgacaaggtgttccaccagacgttcgagtgcctgcctgatgagaagctcaagaaggcgtacgcatgctacctttcgacctttcatggcccgatcatgggc

SEQ ID NO: 418697 - DNA, 506 bp, Oryza sativa
tttgtttgtcggagtgggcgatggtccatgggatgagcagctgatgcactgtcaggaggatcgacagctgtttgacaatttccagtttgttgatttcaccaaaataataatgtcaagagaaatgcctgaaaccgagaaggaggaacaatttgctttagaagcgctgaagaagataccgagccagtacgcagccataatcagcaagaggatcagtgatctggctgcagatgcgccttcaaggatgcctcttcctccccctcctccaaggcctgttatttctacctaataattttcaggacaggggaaatgacagatgaatgtacagtaccgcaaagctagcccttggattagtttcagagccgggagatactattaacctcttaggggaagggcaggccactgtaaacctttttattttacaaagtggttgtgtaggcaatgcaagcctagtctgatgacttagcagaatacttatttaatttaaatattaattacttcattatttc

SEQ ID NO: 418698 - DNA, 484 bp, Oryza sativa
atgtgtggatgcacttaaccttctttgcagcagcttcggatgtcaaatagaagaaataatactgccagaacttgaggagatgcgtactgcccatgttgtctcaattggcacagaatcattctgtgatttgaatcctcattacagagcaggaaaacgaactgaatttacgttagacactcgaacaagtttggcactttttggatcattcacttcgactgactatgttgcttctcaacgaataaggagaaggataatgtactatcacaatgaagctttcaagaaggttgatgtcatagcaactcctacaactggcatcactgctccagaaataccacaaagttctctgaagttaggagagtccaattacgttgtgtcagcttacctgatgcgattcgtgatagctggcaatcttcttggtttgccggcgataactgtacctgttggtcattgatagcaagggcttcctataggcttgcaactgata

SEQ ID NO: 418699 - DNA, 355 bp, Oryza sativa
cactcaggaagtatcaggttcaactattatagcatcaagccatcaacaaacttttgataatacagacattaacggcactttcagttcatctgatcctctcgggagaaaaagtcaaaaagaaaaaaaagcacccacagggggctgcatgctttatggaacgatatggagttcactgacttcgggatataacaaagcaagctggccaaacatgtcattaacttaaaattgggaggattaacttctacgatcatctggttgcaacccagaacactaagcaaaagacttgacggtagcagacttgattatgtccacaaattcaggcttaaatgaagcttctccaacaaggaatccatca

SEQ ID NO: 418700 - DNA, 498 bp, Oryza sativa
gtcacgtgtttcctccttcccctcctcgatttaaccgccccatctcgagtccccccatcacagcttccactccacgaaaaccctctgcctccttcgctcgctgcaccctcgtctcggcgatccatccatggctgccaggaagttcttcgtcggcggcaactggaaatgcaatgggacaggggaggacgtgaagaagatcgtcaccgtcctcaacgaggccgaggtgccctccgaggacgtcgtcgaggtggtggtgagcccgccgttcgtgttcctgccgcaggtgaagggtttgctccggccggacttctccgtcgccgcgcagaattgctgggtgcgcaagggcggcgccttcactggcgagatcagtgccgagatgttggtgaacctgcaggtgccttgggtgattctgggacactctgagcggagagcgctgatgggcgaatcaagtgattttgttgctgacaaaattgcgtacacacttttccaaggtatcaa

SEQ ID NO: 418701 - DNA, 468 bp, Oryza sativa
tttaattccaacaagaacaccttcgatttcgatccaccaatctaacacaacatccaatatccatggccgattcaggcagcgacgccccgatcagcaaccgccccgaggaggaggtgacggtggagaagacgccggagatggaggcggcggcggaggaggagaggctgaggtatctggagttcgtgcagcaggcggcggcgcaggtgctggtgctggcggcggcggcgtacgcgtacgccaagcagggcgccggcccgctccgccccggcgtcgaccacgtcgagggcaccgtcaaggccgtcgtcggccccgtctacgaccgcttccatggcgtccccctcgacctccttaagttcctcgaccgcaaggttggtgagtccgtccaggagctggaccgccgcgtgccgtcggtggtgaaggaggcgccgggcctggcccgctcggcggcggcggatgtgcggcaggcgg

SEQ ID NO: 418702 - DNA, 488 bp, Oryza sativa
ctccttctcactcccaagcccgaccccgacgcccccctacccccgctcccttaccccgaccccaacctcgtgcaaagcatgctcttctccgcccagtccccgcaggcgcagccgcaggcgccgccaccccacatacaaccccccgcctccgcctccgccgaggccccctccggcgacgagaagaataagaagaagaagaagcgggcccgcgcctcccaggagatggtgcgcatcaccaaccttagcatcggcgaccacctgcactaccgctccctcgtccgccgcgcccgcctcaccttcgaggccctccgcgccatctaccaacgccaggacctcgccaccgccgggggaatccgcaaccgcttcgacctccgggcctccagcaagatgctctccaagggcctctggatgcaccgcgacatccgcaccgtcggctccatccccggcctcctcgtcggggactccttcttctaccgcgccgagctctg

SEQ ID NO: 418703 - DNA, 371 bp, Oryza sativa
ccttcaaagacaatgatactgaaaacctgtacttttcactcacaacagctgttttgcaatttgttcacactttctagacagccctgacatcaacaagcagcagcaggccagcagctgggactgggaagccgaatgccgagaaatgcgaaccggtcagacaaatcattggtggatctcgcatagctcccagtttccttctccgtcgatgagtttcagctccaaggaatggaaggggatcaaagctggcctttgcgaggaagtaatcacagtgatgcccatgctagttgcttgcttgtacaaatgctcttcaacatcaacgcttgtagcattcgtgcattcgtcaagaataccaaattttaggatggtggaaa

SEQ ID NO: 418704 - DNA, 466 bp, Oryza sativa
ctggcttagttactggaatggtaaaaccacttgtcgacattctttggtttacatggagaatgaagcttttgtctgggcgaagaggagttgctatcttgtatgcttacatgctgctaggtttgggcttcctgagagctgtatccccagactttggtcatcttgctgggcaagaacaagagcttgaaggaactttcaggttcatgcactcgagactgcgaacgcatgctgaatcaattgctttctttggtggtggatcaagagagaaagctattgttgaggctaaattcatgaaattgcttgaccactcaaagattctgttgagaaagcagtggctttatggtattgttgatgattttgtaacaaagcaactccctcacaatgtaacatggggtcttagtttggtatatgctctagagcacaagggtgacagaactttgacttcaactcaaggagagttggcacatgc

SEQ ID NO: 418705 - DNA, 413 bp, Oryza sativa
tcggtccaatgatctctgcactaagtatcactccaaattttactcctactgtgagaaatggagttccaaaaaagaaaagtaaagctggcgtaattgctggcatagtgattggtgcgtcagttataggatcagcagccttacttgggatctttgttttggtaaagaagagaagaaaagcggcaaggcagcaagaagaactatacaacctggttggaaggcctaatatcttcagtagcgcagaactgaaattagctacagataatttcagttctcaaaatgtgattggagaaggcggatatgggccagtatataagggtaagctacctgatggaagaattatagctgtcaaacaactttctcaatcatcttatcaggggaaaagtgaattcgtgacagaagttgcaacaatttca

SEQ ID NO: 418706 - DNA, 505 bp, Oryza sativa
cttcctccctcctcctcggtgagccagtcatccaagctctgtcaagatgtctgacagccatgaaactgataggaacattgagatctggaagattaagaagctaatcaaggctctggagtcagctagaggaaatggcacaagcatgatctctcttattatgcctccacgtgaccagattgcgcgagtggctaagatgttgggtgatgaatatggtaccgcctcaaacatcaagagtagagtcaatcgtcagtctgttttggctgccattacctcagctcagcagaggctgaagctctataacaaagttcctccaaatggattggttctctacactggaaccattgttactgaagatgggaaggaaaagaaggttaccattgattttgaacccttcaagcctatcaatgtatcactgtatctttgtgataacaagttccacactgaagctttgaatgagctcttggaatctgatgacaagtttgggttcattgttatggatggtaat

SEQ ID NO: 418707 - DNA, 456 bp, Oryza sativa
tcgttctctctcgccctcgccgccatcaccatggagcatcatcgtcatcggggagcggtggttctcgtggtggcggcggcggcgatggcgatggcgatgtcggcggtgaggggggatttcgcggcggacagggcggagtgcgcggacaagctgatggcgctgtcgacgtgcctgacgttcgtgcaggacggcgcgtcggggggcgcggcggcgccgacgccggactgctgctcggggctgaaggcggtgctggcggcgagccgcaagtgcctgtgcgtgctcatcaaggaccgcgacgacccaaaccttggcctcaagatcaacgtcaccaaggcgctctccctcccccagctctgcaacgcccccgccaacatcttcgacttgcccaggcttgtgaacttgccaccaaactccaaggacgcgcagatcttccaacagttcgccaagcagcatgct

SEQ ID NO: 418708 - DNA, 188 bp, Oryza sativa
ggcggaatctggttcttctgtatttatcaatcaatcatcctatgtaagactgtaacgagaatgaacacaacttttgggctacaagatcaaaccaaaacgtgacagtacaagcgtgccatgggcgaaggcatattgtcgagtactttacaaggacggcaagagatcaccggaggcaagcaaaacacccc

SEQ ID NO: 418709 - DNA, 364 bp, Oryza sativa
ccaccaccaccgtgtccagccatggcctgctgcgcctccctgcagcgcttccttcccccgtacccccacgcggcagcatgccgctgccgccctcccggcgtccgagcccgccccgtgcagtcgtcgacggtgtgcgcaccgtcctcctcgactccggcggcggacgaggccgtgtcggcggagcggttggagccgcggggggagcagtgggagggccggtactgggtgctcaaggagaagttccggactgggctgaacccgcacgagaaggtgaagctggggaaggagcccatgtcattggtcatggagggcggtattaacgagctcgacaagatgcccatggaggagatcgaggccgacaagc

SEQ ID NO: 418710 - DNA, 525 bp, Oryza sativa
gttttgttggcccccattcctcccccaccccggtgtcctcccctccgccgctcgcgtcgccgcctttttcccctatggcgctgccgaatcaggggaccgtggattaccccagcttcaagctggtcatcgtcggcgatggcgggactggtaaaactacatttgtgaagaggcatctcactggagagtttgaaaagaaatatgagccaaccattggtgtcgaagttcaccctctagattttaccaccaactgtggtaagatccgcttctactgctgggacactgctggacaagagaagtttggtggacttagggatggatactatatccatggtcaatgtgcgataattatgtttgatgtcacttcaaggctgacttacaagaatgttccaacatggcatagggacttgtgcagggtgtgtgaaaacatccccattgtcctgtgtggtaacaaggttgatgtgaagaacaggcaggttaaagcccagcaggtcacattccacaggaagaagaatcttcagtactatg

SEQ ID NO: 418711 - DNA, 427 bp, Oryza sativa
ttattgccactcggcgccgccaccccgcaccaggtaagggaggaggagtaagaagatgtcgcacaggaagttcgagcacccgaggcacggatccctcggcttcctcccgaggaagcgctcctcccgccaccgcggcaaggtgaagtcattccccaaggatgacgtcaacaaaccatgccacctcacctcctttgtcggttacaaggctggaatgacccacattgtgcgtgaggtcgagaagcctggttccaaactccacaagaaggagacctgtgaggctgttaccattattgagacacctcctattgtcgttgttggacttgtggcctatgtgaagactccacgtggcttacgcagtctcaactctgtctgggctcagcatcttagtgaagaagtaaggagaaggttctacaagaactggtgcaag

SEQ ID NO: 418712 - DNA, 260 bp, Oryza sativa
gatgcacgcacgcgtacgctaggtagccactctatttggggcggcccgccctttttttttggggggaatctggtcgctaccggcacaaaatcaatacaatcaatctatgtaagcactgcaccgaggaacggacacaacgcatgggccacaagatcaaaccaaaacgtgacagtacaagcgcagccatgggacgaaggcaaaaggtcgagaacttgacaaggacggcgagagaacaccagagcaagcaaaacaccccaaaa

SEQ ID NO: 418713 - DNA, 507 bp, Oryza sativa
tttctagcgccgccacctccgatcgtcagccatgaccttcaagcgcaggaacggcggccgtaacaagcatggccgcggccatgtgaagtacatccgctgctccaactgcgccaagtgctgccccaaggacaaggccatcaagaggttccaggtgaggaacatcgtcgagcaggcggccatcagggatgtccaggaggcgtgcgtccatgacggatacgtcctcccgaagcttgacgccaaggtccatcactgcgtctcctgcgccatccacgcccacatcgtccgtgtccgcttccgcgagaaccgtagggaccgcaggccgccggagaggttcaggcgcagggaggataggctctactggacctatccctggtggtgctggtggacctggtgcccctgctgctgctggaccaggtggccccccttatggtgctcgcacctaaacagccgtagtcgctccttcgttactttatatcatatcctgataatggccccatggatatcatc

SEQ ID NO: 418714 - DNA, 267 bp, Oryza sativa
ggcttggggagagcggttgtattgtattggaacagtggccacagatgctgcttgcagaagccatggtagtagcgctcggcgatgtcggggggcaggaacgccggcacgcagttgtacgactcgaggagcgcctgcgcgacggcgtcctggtcggccagcgggatgtcgccgaggaggcagacgatgtagatgaactccatggaagaggaggaggacgagtgctggagggggcggagggggggagtcctcgtaaaaggagaaggtcca

SEQ ID NO: 418715 - DNA, 445 bp, Oryza sativa
ctttatatgcgccgtttcgctccctgacccttcggcggcgtctttgccgatcattatgagtaagttgcagagcgaggttcttaaggaagccatcttccaggttgttggggaatccaaggtgaagggcaggaagttcaccgagaccgttgagcttcagattggtctcaagaactatgacccgcaaaaggacaagcgtttcagctgctccgtcaagctgtcccatatcccctgccccaagatgaaggtctgcatgcttggtgatgcccagcatgtcgaggaggctgagaagattgggcttgactacatggatgttgaggctcttaagaaaatgaacaagaacaagaagctggtttagaagtttgccaagaagtaccatgcttttttagcatcagaggccattaataagcagatttctcgtcttcttggtccttggtttcacaaggca

SEQ ID NO: 418716 - DNA, 504 bp, Oryza sativa
cgctccctgaccctccgccgccgccgccgccgatcatcatgagtaagttgcagagcgaggttctcaaggaagccatctcccaggttgttggggaatccaaggagaagggcaggaagttcaccgagaccgttgagcttcagattggtctcaagaactatgacccgcaaaaggacaagcgtttcagcggctccgtcaagctgccccatatcccccgccccaagatgaaggtctgcatgcttggtgatgcccagcatgtcgaggaggctgagaagattgggcttgactacatggatgttgaggctcttaagaaaatgaacaagaacaagaagctggttaagaagcttgccaagaagtaccatgctttcttagcattagaggccatcatcaagcagattcctcgtctccttggtcctggtctcaacaaggcaggcaagttccctacattggttactcaccaggagtctcttgaatccaaggtcaacgagacgaaagctacagtcaagt

SEQ ID NO: 418717 - DNA, 477 bp, Oryza sativa
gtctcttttcaccacccgccgctcgccgctcgcccaccatggccatggcgacggcgctccgcaagctctcctccgacgccctccgccgccagccgctctcccgcatcaccccgctctactacatggcgtccctgccggcgacggaggagagatccggagtcacctggccgaagcagctgaacgcgccgctggaggaggtggatcccgagatcgccgacatcatcgagcacgagaaggcccgccaatggaagggtctggagctcatcccgtcggagaacttcacctcggtgtcagtgatgcaggcggcgggatccgtcatgaccaacaagtacagcgaggggtaccccggcgcgagatactacggtggaaacgaatacattgatatggccgagtcattgtgccagaaacgtgctttggaggcctttcgcttggacccagcgaaatggggagtgaatgtgcaacctttatcaaggtcac

SEQ ID NO: 418718 - DNA, 410 bp, Oryza sativa
cctccctcctcctcttcgatctcacaatctccttgttcgcggaaccgaaaatgcagtcgaggcacagggtgttcgcggaggacctgctcctgccgcgggaggcggaaggggaggaccacttcgaccgcgtcccggactcgctcgtgctcctcatcttcaaccgacttgccgacgcgcgctcgctggggcggtgctcggccgtgtccaagcggttcaactcgctcgtgccgttcgtggacgacgcctgcctccgcatcgaccgagtcatcaccgacgcggtcgacgccgacgacgcgctcggcctcgtcggaccgcgccccgacggccgcggggtgctgtcgcaccttctcaaggcgatgctgctcgccgggctcaagccggtcgggcactgtgacgtcagagtcaggggc

SEQ ID NO: 418719 - DNA, 137 bp, Oryza sativa
gtggagggtgacacccctgtactttgagctgccgcgggagaagccggtgctctgtcgccggagaacgtgcacgaactcctacttggacaagctcttcatctgcctcatgtcctcctcgtagatcgctcaggtatgaa

SEQ ID NO: 418720 - DNA, 306 bp, Oryza sativa
gctcgaaataagaagtttgaacttttatatcgaagacttctacttaaaactcctatgatgattaaatcatggccgggtcgcagagttcttctatgccaaaagagcaagtagaactatcctaaaggtacccaccacaagtggggcatgcgctttggaccatacaaacaagactgcttattcactacagtatatagctgggaataaaaaagcaggtgcagatctgtgggtaatccggagtaggacatttgaatgggtgacatgctgtgttggttacccattgctacaggttcctcccatgacagggca

SEQ ID NO: 418721 - DNA, 394 bp, Oryza sativa
tgtataaactacaagcagctcacctcgcaaattaactgtcggccatggcggctgctggtgaagcttcaggaggcagggacaagtaccggtcgttcatgtacggcgagggagagaaggacaccgtgtggaggcttggatcccctccaaactacgacgtcgtcaacaagctcttcgaggaagagagaaccaaggaatggccagaggggtctctggaggagaaggtccagaggttgctgaagacctgggagatggagctcatccacaaggtgcgacccgaggaccagaagagcgtccactcgcagaaattctgcgcgagcaccaacgggatgagatttctgagccggaaggaggtgatggctatcggcggctacaacgcgtttctgcagacgaaact

SEQ ID NO: 418722 - DNA, 505 bp, Oryza sativa
ttttcctcccctccctccttcccccacccgcttcccttgccgtcgccgccgccgccgaccgccgcgggaggggaggtccccggcgccatctcccagaaatggacgcctgtttttcaacacagcttattgatggagatggcgttttcaatgtttctggattggagaacttcatgaaggaagttaaaatgggcgaatgtgggctttcatatgctgttgtgtcaataatgggtccacaaagtagtggaaagagtacacttttaaatcaccttttccgcaccaatttcagggaaatggatgccttcaaaggaaggtcacagactaccaaaggtatatggatggcgaaggcccataatattgaaccatgcactcttgtaatggatttggaaggcacggatggtcgagagaggggagaggatgacacagcctttgaaaagcaaagtgcactgtttgctttggctgtttcagaattgtgttgatcattatgtggggtcatgacattggttga

SEQ ID NO: 418723 - DNA, 211 bp, Oryza sativa
aaaacaccaggaaccggggtttatttgggggaagcactgcccaaaatctcgcaaaaggactgaaaccttaaacaaagtacacatccatggaaaacatggatgccaaatgacaactacagaaaattatcaaattcgaatgcagctgacgggttttcctgctgaaaatgcatattttcccctccattacttggatgggctctttccatcgaca

SEQ ID NO: 418724 - DNA, 506 bp, Oryza sativa
cactcttctctaggtttgttaaccagggaaagggaatgctccagcgtcaccagctgcttgcggagttcgatgccttgatcgaagctgacaaagagaaatatgctccctttgaagacattctccgggctgctcaggaagccattgtgctgccgccctgggttgcactggccatcaggccaaggcctggtgtctgggactacattcgggtgaatgtaagtgagttggcagtggaagagctgagtgtttctgagtacttggcattcaaggaacagcttgttgatggacacaccaacagcaactttgttcttgagcttgattttgagcccttcaatgcctccttcccgcgcccgtccatgtccaagtccatcggaaatggggtgcagttccttaaccgtcacctgtcgtccaagttgttccaggacaaggagagcctctaccccttgctgaactttctgaaagcccataaccacaagggcacgacaatgatgctgaatgacagaattcag

SEQ ID NO: 418725 - DNA, 423 bp, Oryza sativa
tcttcttacttcggctgagctgagcaatggggctactgcggcgaggtagtagcggcggcggcgccgagctcgtggtggtggtgtgtgtaggctgcattgcagcgactgcgatggcggcggcggcagtcggcggcggaggaggaggggagtgtcccaagtacaaggactcgaagcagccgctgaacaagaggatcgacgacctactccggcggatgacgctggcggagaagatcggccagatgtcgcagatcgagcgcgagaacgccaccttcgacgtcatgcgcaactacttcattgggagcgtgctgagcggcggcggcagcgtgccggcggcgcaagcctcgccggcggcgtgggtgtcgatggtgaacgagatgcagcgcggcgccattggcgacccgcctcgggatccccaagatctac

SEQ ID NO: 418726 - DNA, 456 bp, Oryza sativa
cgcatagaaaggcgcgtattttttcgcctttcttcgcgcctccgcgcttgggctacttttgtgccctcactcccttgtccgccgccggcgtaggatcaacccaatgcgccgtcatgagggagtgcatgtcgatccacatcggccaggccggtatccaggtcgggaacgcgtgctgggagctatactggctggagcatggcattcaggctgatggtcagatgcccagtgacaggactgttggtggcggtgatgatgctttcaacacctttttcagtgagactggtgctgggaagcatgctccccgtgctgaatttggtgatcttgagcctactgtgattgatgaggtgaggactggatggtaacgccaggtgtttcaccctgagcagctcatcaatggcaaggaggatgcagttaacaactttgcccggggaactacaccattggcaaggagattgt

SEQ ID NO: 418727 - DNA, 301 bp, Oryza sativa
aaatacttaatagtaatagactctttgatggagtattacaacatgcagcagtggcattaatacgccagtacattaattaagtaacacatatgcaggctccattttggtttcttttaatttatcgtattacagaatttctgtagccttgctgatgatcacttggatatcatgcactagtaattaacaataggatgcatacaaaagatggcccaacgacaacagaagatgcgtgcatctgacattgtctggccttattgggttgggagaactccaattaattaacaagagatgatgcattctt

SEQ ID NO: 418728 - DNA, 519 bp, Oryza sativa
aattctttctcactcccagatacctgctgctgccactagcccactaccatggatccttgcaagttccggccgtcgagctcgttcgacacgaagacgacgacgacgaacgcgggagctccggtgtggaacgacaacgaggcgctgacagtggggcccagggggccgatcctcctcgaggactaccacctgatcgagaaggtggcgcacttcgcccgggagcgcatcccggagcgcgtggtccacgcccgcggcgcctccgccaagggcttcttcgagtgcacccacgacgtcaccgacatcacctgcgccgacttcctccggtccccgggcgcccagacccccgtcatcgtccgcttctccaccgtcatccacgagcgcggcagcccggagacgatccgcgacccgcgcgggttcgccgtcaagttctacacccgcgagggcaactgggaccttctcggcaacaaacttcccgtcttcttcatccgcgacggcatcaagttccccgacgtcattcacgcc

SEQ ID NO: 418729 - DNA, 475 bp, Oryza sativa
tttgatcagaaagagagacaagagaagagctagggtttcatctcatctccagccatggcgtccgccgcctccccgccgcgctccggcgacgcctccccgtcctcccctctcctcccttccccgacgtcccccgaccgccgcagcggcggcggcggaggcggaggacgcctgcttccggggctgcgcggcgcggcgcggttcctgggccgcacggggagccgccgactgatgcgggagccgtcggtggcggtgcgggagacggcggcggagcacctcgaggagcgccagaccgactgggcctactccaagcccgtcgtcgtgctcgacgtgctctggaacctcgccttcgtcgccgtcgccgcccgcgtcctcgccgcctcggtcccggagtccccctcggtgccgctccgcgtctggctcgccgggtacgtgctccagtgccttttccacgcctctgcgttaccgtcgagtacag

SEQ ID NO: 418730 - DNA, 197 bp, Oryza sativa
aaggatggaatcgagtagcaatactttgaccccaaaatacagcttagcgacaatatcttaaaaaagccgattggtttgccgccatggctggcaagctgagcagagcatctaacacaaagaacacgagatcactataaaccaaacggcaacgaacgaagaaaatacagggttcttttattggcctgaagattacaacg

SEQ ID NO: 418731 - DNA, 518 bp, Oryza sativa
ctcctccggctcttcttcagtatcgaatcctctcttctcctcgtgcccaccaccaccaccgtagcaatggcgggcaacgggccgatcaacaaggaggacccgctcaactggggcgcggcggcggccgagatggccggcagccacctcgacgaggtgaagcgcatggtggcacagttccgcgagccgctggtcaagatccagggcgccaccctccgcgtcggccaggtggccgccgtcgcccaggccaaggacgccgccggcgtcgccgtcgagctcgacgaggaggcccgcccccgcgtcaaggccagcagcgagtggatccttaactgcatcgcccacggcggcgacatctacggcgtcaccaccggcttcgggggcaccttccaccgtcgcaccaaggacggtctccgcctccaagtcgagctccttaggcatcttaacgccggaattttcggaactggctccgatggccacacgctgccgttggagaccgtgcgggcggccatgctcgtgcgcat

SEQ ID NO: 418732 - DNA, 501 bp, Oryza sativa
  unsure (1)..(501): unsure at all n locations
aaacgcgaacacgcgaggacatggacgacatggccaagctagctcagatgccgcgcgctcctctgctcgtcctgctgctgatgctgggggtcggcgcggcggtggccgtgccggagtacagggaggcgccgcacttcaccaactcggcggcggcgcggtgcccgccgccgctgccggcgacggacgcggacgcggcgtgctcgccgcacgcggcggtgcacgtggccatgacgctggacgcgccgtacctgaggggcaccatggccgcggtgctctccgtcctccgccacgcctcctgcccggagtccgtccacttccacttcctcgcctcctcctcctcgtcgccggaggcggcggcggcggtgcgggagctgagggacaccgtgcgggcgtcgttcccgtcgctggcgttccgggtgtacccgttcgacgagtcccgcgtcgcggggctcatctccaccttcattcgcggggcgctcgaccgnccgctcaactacgccc

SEQ ID NO: 418733 - DNA, 306 bp, Oryza sativa
gtaaaacaaaataatttactttagttcccccaacttatacaaatttacagcaccaaaagtttcagaaagctgcctgccaggccatgcggaactgcgggttatggcaaccgcagaagctgaaacagcaacagtaacatcaagttaactacaaagaaccgtaaaatagtgatcatcaccatgttcatctagacatagtagaaaacattcacactctcgaaatgctgtctatctttcagttttgtgttgctatacgtcttcttgttttgcattttttttagtattccatttctgttcagcagagtggca

SEQ ID NO: 418734 - DNA, 440 bp, Oryza sativa
tctatactcgagctcttcttctacttaaaagaaaaaaaacacgcatatctagtagtactgttctagtgttcttgtacttctattcgtgtgctactactgcatctgtgagtctgtgtgactgtacacatctgtaatggagtgcgaaaccgggcttgttcgttccctgaacggcgacgggctgtgcatgtcgtcggtgtcggcgccgccgcgggccgacccactgaactgggggaaggcggcggacgagctggcggggagccacctcgacgaggtgaagcggatggtggaggacttccgccagccgctggtgaagatcgagggcgccagcctgacgatcgcgcaagtggccgtcgaggccgccggcgcctgcgacctcagggtggagctcgaccagtccgcccgcggccgcgtaaggccagcagcgactgggtcatgaacag

SEQ ID NO: 418735 - DNA, 181 bp, Oryza sativa
ggagtagtaaaaatgcaattcaccagatcgtccggtgaatggatcaaccggagcgacacggattgctggggaggacgatgactaggatgtcttggtcgcaataagcctgttctaggttttaagatgatggaggtcttggcgatcatggaggtgactatgtatgggtccatgttggactcct

SEQ ID NO: 418736 - DNA, 211 bp, Oryza sativa
gagatgaaatcctgcaatcctttctctgccactgttccacaaatttgaagttacagagctgtttgtgtcacaggtacacctagaaggaaatctcactcggcgcatggaatgtccgtccgcggcaaatggcttccaagttttctccagcataggagctaagtggagaaacttccacacctggcatgaacaatgggacagacatggcgtcaag

SEQ ID NO: 418737 - DNA, 483 bp, Oryza sativa
catttatctctcgttccagatttattatcttcacctcgtcgacccgatgcctacgcagccatttccctggtccggcgacaagccttcctcgtagatcgagatccccaaacctacctgtgtaggcggagaggagggcgatttctgtcgtcatcgctggattccactcgccgtctccgtcgccctgattccactcactcgccaccgcactttttctggagccacttcgtccatttgagcgagagcctggatctttcaaggattgatcggatcatccggcgctcccttggatcacaaggattcactttgcccaccgtcgagccggtgccggagtccagcgtgtccaaggtggaggagaggttgccggaggacaaagaacggtggtggaagaaggggctgaaggccatttcggaggggaagctagccggcgttctttaagccggtggtcaggggactcggcttggtagctctgatcctaaaggatgt

SEQ ID NO: 418738 - DNA, 330 bp, Oryza sativa
  unsure (1)..(330): unsure at all n locations
atcaggaaggttcacctttatcacgtacgnaggaatttcgaacacggagacctggtcccgagaatatttctttgccaaggctaaaatagaacggggcgccatctcaggccttggaaaacataaacatgttatgtagcatgcatatatacccacatcgccggataaatacgctagttaaaagctacggtcttcttctctcggcgtatgcgtccacctcgtcattaggaacgtgacaacaacacgtttaggccgacttcgcgaagccaaccctcatcttgccgtagtcgaacacggtatggtaggcacccatgaaaacgtcacccaggatcc

SEQ ID NO: 418739 - DNA, 527 bp, Oryza sativa
tgttttttggccccacagccataatcactgaaatcaatgagaagatcggtgctactggggtagtcagccaagaatgcaagacagttgtttctcaatatggacaacagatcctagatctgttgcttgctgagacacagccatcaaaaatctgctctcaggttggtctgtgtacttttgatgggaagcatggtgttagtgctggaattaagagcgtagtagatgatgaagctggggaatcgaatggtctccaaagtggtcccatgtgcaatgcctgtgagatggctgttgtatggatgcagaaccaacttgcacagaacaagactcaggatctcatcttgaactacattaatcagctctgtgacaagctcccaagtccaatgggagaatcatctgtggactgtggcagccttgcatccatgcctgagatttcattcaccattggaggcaaaaagtttgcactgaagccagaagagtatattttgaaggttggtgaaggagctgctgcccagtgcatcagttgattcaca

SEQ ID NO: 418740 - DNA, 471 bp, Oryza sativa
tacatcttcagcttcctgccggcgcagcgcgaccgcaacacggtctcgctcgtctgcaaggtgtggtacgagatcgagaggctgagccgccgcggcgtcttcgtgggcaactgctacgccgtgcgcgccggccgcgtcgccgcgcggttccccaacgtgcgggcgctcacggtgaaggggaagccccacttcgccgacttcaacctcgtgccccccgactggggcggctacgcggggccgtggatcgaggcggccgcgaggggatgccacggcctggaggagctcaggatgaagcggatggtggtgtccgacgagagcctcgagctgctggctcgctcgttcccgcggttcagggctcttgttcttatcagctgcgaggggttcagcactgacgggctagccgccgtcgcgagccattgcaagcttctgagggagttggatttgcaggaaaatgaagtggaggatcgaggg

SEQ ID NO: 418741 - DNA, 528 bp, Oryza sativa
ttctctccctccgctcctccgctcctcgcctcttttacccgctcttccccccgatctccccggactcccacagccgcagcgaacaaatcccgcgcgggttgggaagagcgagctcgtgaggagagcagagggaaagcgcgagggggaaggaggaggaaaggtcagactaagtttgcgttgaagaacaaaggagaggaaaaatgtcgcctgctgaggcatcgcgtgaggagaatgtgtacatggcaaagcttgccgagcaggctgagcgttacgaggaaatggtcgaattcatggagaaggtggcaaagaccactgatgttggtgagctcaccgttgaggagcggaacctgctttctgtggcttacaagaacgtgattggtgctcggagggcatcgtggaggatcatctcttctattgagcagaaggaggagagccgtgggaatgaggcatatgttgcatcaattaaggagtaccgtagcaggattgaaactgagctcagcaagatctgtgatggtatccttaagcttc

SEQ ID NO: 418742 - DNA, 511 bp, Oryza sativa
gtttttgctgctggagttcctgcaggagcgtgcgctgtacgcgaacaaggagatcctggaggcgaagctccgcctcctcagcgggaccaacatggtggactacgccatggacatccacaagtccctccacgacaccgacgaggtccccgacgacatggtcaggcgccgcaccgacgtcgtctccaggctcagggcgctcgacgaggccaccgcccccatcgtctccttcctccagaaccagcagctcgtccaggagctcaggccagacaagcagtacaacctccacatgctccaggaccgcttccagattggtcctgagcagattgagactctgtatcagtttgccaagtttcagtttgactgcggtaattactcagatgctgctgtctacttgtatcaataccgtgctttgtgcacgaacagcgagaggagcttgagtgccctgtggggaaagctggcagccgagattttgatgcagaactgggatgttgcactggatgagctcaaccgt

SEQ ID NO: 418743 - DNA, 497 bp, Oryza sativa
  unsure (1)..(497): unsure at all n locations
ggttttgttcgcaagtggatctcacgttttgaagtctggccgtacctggaaacattcactgatgatgtcgcgcacgaaattgctggagagctccaggccaatcctgacttgatcatcggaaactacagtgacggaaaccttgttgcatgcttgcttgcacacaagatgggtgttacccattgtaccattgcccatgcgcttgagaaaaccaagtaccccaactctgacctctactggaagaagtttgaggatcactaccacttctcatgccagttcacaactgacttgattgcgatgaaccacgctgacttcatcatcaccagtaccttccaagagattgccggaaacaaggacactgttggtcagtatgagtctcacatggcattcaccatgcctggtctgtaccgagttgtccacggtattgatgtttntgacccgaagtttaacattgtctcgcctggtgcggacatgttcatctacttcccttactctgagtc

SEQ ID NO: 418744 - DNA, 516 bp, Oryza sativa
gtttgtagccggaaggacgccgtcatcgacttctgcctgggctcccgcaccctctcctccacccctatccgcttctggaccatgcatgtggtggataattgtactgtacagttaatacaaaaaagccatggagaagatgttgtagtcagagacttggaaactccgttatctcttcagccctgcccaccagcggttattcttgttgcaagtgcaggacaggatgctgaccatattactgcgatggagctccttagtgaagtgaaatctgctggtaagctggctgcatcaatatttttgaagcccttttgttttgagggacagagacgacaattagagttattgaagctgattcactgcttgagacagaagtggaaacccttgctgaagctctggaaagtgccaacaacgctgttctgtcaactattagcatgatatctatcatgatgggttaaatcagacgttccggagttcgattaatgctcaaattatggaagtccattctgatgaactaggaca

SEQ ID NO: 418745 - DNA, 467 bp, Oryza sativa
gatttttctcccctcgcctcctcgtcctccccctcctaggggatcgccggagaggaatcgcgcggaggaaaaaaaaagaaaagggcttcctcgtcgtctaagttaaaaggaagccatggagcacaaggagactggatgccagcagccagaaggcccgatcctttgcatcaataactgcggcttctttggcagtgcggctaccatgaacatgtgctcaaagtgccacaaggagatgataatgaagcaggagcaggccaagctggcagcctcctctatcgacagcattgtcaatggtggtgattccgggaaggaaccaattattgctggtcacgctgaagtagctgttgctcaagtcgaggtgaagacgcttgttgcgcagcctgctgagattgctggtcctagtgagggggtcacggtgaaccccaaggggagggaaggaccaaatcggtgctccacttgtcggaaga

SEQ ID NO: 418746 - DNA, 455 bp, Oryza sativa
ggcagcaaatcctgaaccatcatattcgcttgcacagccaaatacaaacgacaatagagatgaagtcactgacaggataacactatcgctagaacagtacatgcattttgaatgcaattctgatcaggcaaattattcaaaattcaatagccacatgtgattgctggcatcattttttcctgagctttgtcttcatcctctcaaccgcggctctcagcgtctcatcatccttgcaaaaggtgaacctcaccaagttcttcccatcctcagggttgagataaaatacactaggtggtatggcgacaacaccgacttcgcgaatcaaatactcgcagaactcaatatcattgtcgaaaccaaatggggtgtggtcgaccatgacgaagtatgttccacttgaaggatagacaatgaaacctgcatccttgagtccgttgactagcaatgccttctta

SEQ ID NO: 418747 - DNA, 496 bp, Oryza sativa
ttcttcggaggtttggaaggtttgaccgtgagattgacattggtgtccctgatgaggttgggcggcttgaggttcttcgtattcacactaagaacatgaagctagctgaagatgttgatttggaactcattgcgaaggatactcatggatatgttggtgctgatcttgctgccctttgcactgaggctgctcttcagtgcattcgtgagaagatggatatcatagatcttgaggacgagacaatagatgctgagatattgaactcgatggctgtcacaaatgaccatttcaaaaccgcgcttggtacaagcaacccatctgctcttcgtgaaactgttgttgaagttcctaatgtctcatgggaggacattggtgggctggagaatgtcaagagggagctgcaggagactgtccaatatccagtggagcacccagagaagttcgagaagtttggaatgtcttcatccaaaggagttctgttctatggcccttctgc

SEQ ID NO: 418748 - DNA, 513 bp, Oryza sativa
aatgtagaattggcacatcagatataccttgaagctaagaagtttgccaaaccttacaatcttcgagttgctgctgtatatggtggggtttccaaatttgatcaattcaaagaactgaaggcaggctgtgaaatagtcattgctaccccagggagattaatagacttgcttaagatgaaggcattgaagatgtttagggcaacttatttggttcttgatgaagctgatcgcatgttcgatcttggatttgagcctcagataagatccatcgttggtcaaattagaccagaccgacaaaccttgcttttctcagcaacaatgccatacaaagtggaacgtttggctagagaaattttgactgaccctattagagttacagtaggtcaggttggcagtgctaatgaagacattaagcaagttgtaaatgtactcccttctgatgctgagaagatgccttggcttctggaaaaacttcctgggatgattgatgatggagaccgtcttgtatttgca

SEQ ID NO: 418749 - DNA, 501 bp, Oryza sativa
ttctcgccgctgattcgattcgatccgatccgatccaaggggaggggaagcaatggcgacgaagaggagcgtggggacgctgggggaggcggatctgagggggaagaaggtgttcgtgcgggccgacctcaacgtgccgctcgacgacgcccagaagatcaccgacgacacccgcatccgcgcgtccgtgcccactgtcaagttcctcctcgagaagggcgccaaggtcatcctcgccagccatctgggccgtccgaagggtgtcacccccaagtacagcttgaagcctcttgttccacgcttgtctgagctacttggagtcgatgttgtgatggccaatgattgcattggtgaggaagttgagaaattggctgctgctttgccggaaggtggagttctactcctagagaatgttagattctacaaggaggaagaaaagaatgatcctgagtttgccagaagcttgcagctgtcgctgacctttatttaaatgatgctttt

SEQ ID NO: 418750 - DNA, 497 bp, Oryza sativa
ctccctcccgtcgccgcggcggcggaggtgcctgcgggagatggggatggggatgggggcatcgccctggggaactggttcgccagggtcctcgacatggagctccagaagctcaacgacttctacatcgagagggaggagtggtacgtcatccgccttcaggtgctcaaagaaagaattgaacgtgtcaaagctaacaagaatggggcttttacatctaacagcgaattcactgaagagatgttagagatactcaaagcttttgtcatcatccatggggagatgattcttttgcaaacctatagctccctaaattttgccggacttgtgaagatacctgtaaaaatatgacaagagaacaggtggtttgctcagcctacctttcactcaacgtgctctacaccaaccatttttcacaacggaacctttaacaaggcttgttcgagaatgttagagtaatcttgagctactgttttctatttgaacaaacagacttg

SEQ ID NO: 418751 - DNA, 428 bp, Oryza sativa
ctggttttatgtgatctcatatatctgggggaatcatcttctccgcgtcaatccgccattgttactagtagtagtagagctctcttgttgttgttcttcttcttcgtgttcttcttcggttgattaaataatcgtagcagcagaagaagcagctgtttgtagacaaggtgtttgtggaaatgtcgtcgtcgtcgctgtcgccggcggggtcgtcggacggggactcggcgggggtggtggtggcggcggaccaccggagggagaagcggcggctgtcgaacagggagtcggcgaggcggtcgcggctgcggaagcagcagcacctggacgagctggtgcaggaggtggcgaggctgcaggcggacaacgcgcgcgtgctggcccgcgccaagcaaatcgccgggcagtaccccccccgcgcgcatgag

SEQ ID NO: 418752 - DNA, 507 bp, Oryza sativa
gttttgtcgggcaaccgtaacttcgagggtcgtgtgcacccattgacccgggctaattaccttgcttcaccgcctcttgtggttgcatatgcacttgctggcactgttgacattgattttgagaaagagccgattggagttggaaaggatggtaaagaagtcttcttcagggacatatggccctcaactgaagaaattgcagaagtggtccaatctagcgtactgcctgatatgttcaaaagtacatacgaggctattacaaaaggcaacccgatgtggaatcagctgaccgtgcccgaagcatcgctctattcgtgggatccaaactccacctacatccatgagcctccatactttaaggacatgaccatgtccccacctggcccccatggggtgaagaatgcctactgcttactgaactttggggacagcattacgacagaccatatttcaccagcaggtagcattcacaaagacagccctgctgccaagtacttgcttgagcgt

SEQ ID NO: 418753 - DNA, 447 bp, Oryza sativa
atctttgtgaagcaaagcgatcgatggaggcgcgagtgcttgtgttggtgaccatggcgatcgccgccgcgtgctgggccaccggcggcgtggccgcggcggcgacggcggcgacgacgacgacgacgtcccgcctcaagggcctgcgcgtgcacctgacgcacgtggacgcgcacggcaactactcgaggcaccagctgctgcggcgggcggcgcggcggagccaccaccgcatgtcgaggctggtcgcgcgggccaccggcgtgccgatgacgtcgagcaaggcggcctgcggcgacaccaacgagggcgacgggttctcccagggcgccgggctcgtcggcctcggccgcggcccgctctcgctggtgtcccagctcggtctggacaagttcttctactgcctcaccttcctcgacgacaccaacaacagcccgctccttctcg

SEQ ID NO: 418754 - DNA, 532 bp, Oryza sativa
ccaagattccacggatattttttctccccctgctcccgtcgccatcgcaaaggagaaaaaaaaaagaggaggaaggaaggaaggatgagcgccacggcggtgtcgtcgctgaacccggacgcgccgctcttcatcccggcggcgttccggcaggtggaggacttctcgccgcagtggtgggacctcgtcaagaccaccgcctggttccgcgaccactggttccacgagcaccagcagctcgacgagatggccgactccctcgccctccacgacgccgccgccgacgacgacgacctcgccggcctcctccccgacgacgccttcgacgacgacgacgacgacgacctcttcttcgaccagacccataacctcctcgtcgatcccccgcagccgcccgccgctctcaagactgatgcggtgctcaaggcgctgagcctggtgtctcccaagggcggcgacgcgccgcgggggctccgggagaagccccggcactccgagaagcccaccaagtacgccggcagcccgaggagcg

SEQ ID NO: 418755 - DNA, 307 bp, Oryza sativa
gattaggaaacactgaacaaactgcaactgcagctaggcactctggaatgttcacgcaactgaaaagaaaaaaagttaggacttgcctccaaaccatttaagatcactatgctccgagtctacccgcgaatctcacacctggctctttacaatatgatgttgaacgctccattgtacatatcaagcagagcagcatgccctctttgggtttcctgcagcgctgtcaatgctgatagttttaccctgggaaggcagcggagcaaaagcagcagctgcttctttggcggccagggctttcctgttaaca

SEQ ID NO: 418756 - DNA, 526 bp, Oryza sativa
cctagtcttcttctccgccactccatcggcaaggaggaagatctcggaggcggtgcccggaggaggtgaggcgagatgggcgggcgggtggatcacgagtactcgtacctgttcaagatggtgctgatcggcgacagcggcgtcggcaagtctaatatcctctcccgcttcacccgcaaccacttctccctcgactccaagtccaccatcggcgtcgagttcgccaccaaatccctgcagatggagggcaaaacaataaaggctcagatctgggacacagcaggacaggagagatatcgtgccatcacaagtgcttactaccgtggcgctgttggggctctccttgtttacgacatcacaaagaggcagagcttcgacaatgtccacaggtggcttcgtgagctccgcgaccatgccgactcgagcattgttatcatgatggtcggtaataagtctgatttgattcatctaagggctgtctccgaggatgaaggtaaggcattggctgaaaaggaggggctgtttt

SEQ ID NO: 418757 - DNA, 302 bp, Oryza sativa
  unsure (1)..(302): unsure at all n locations
agagttaactcttttttttatttattcacaagctacttgttacacaaacgatacatcgaatgcgatgtttcgaatactttttaagactaggcgtcatcgcttagaagcattttctgtggacgatcgaaggaccggattcgtcgtactcctctttcgagatccacatttgttggaatgtggagagcgacgctaagatcgagccaccgatccagaccgaatacttacgttcgggtggagcgatgatcttaatcttcatcgncgacggggctaaggccggttaactccttttgcatacggtcggc

SEQ ID NO: 418758 - DNA, 542 bp, Oryza sativa
tcacgttgaagtaccctatcgaacacggtatcgtaacgaattgggacgatatggaaaagatctggcatcacaccttctacaacgagcttcgcgttgcccccgaagagcatcccgtcctcttgactgaggcgccgctcaacccaaaggccaaccgcgagaagatgacccagatcatgttcgaaacgtttaacactcccgcgatgtacgttgcgattcaagctgtcttatctctatacgcctccggtcgtaccaccggtatcgtgatggactctggcgatggtgtcactcacaccgtacccatttacgagggttatgccttgcctcacgcgattcttcgtctcgatcttgcgggtcgcgatttgaccgattacttgatgaagatcttgactgaacgtggttattcgtttaccaccaccgccgaacgcgagatcgtacgtgacatcaaggagaagctcgcttatgtcgctctcgacttcgaacaagagatgcataccgctgcatcgtcttcgtctctcgagaaatcatacgaattgcccgacggc

SEQ ID NO: 418759 - DNA, 512 bp, Oryza sativa
  unsure (1)..(512): unsure at all n locations
tgtttgtgtcagcaactacaaagagtctatatagctactaattaatcatcctcgatcgatcgatctcggtcgtgtatagcagtagcactgcatatggcaataagcagattaatggtgacgaagaagcagcaggcggccttgttggccgtggtcgccgtggcagctctggcgcaggtcgcggcggcggcggtgcatccggtgggaggcaatggcgcctgggacaccaccggcaactacaatgcctggtccgtctcccaaaagttctcccaaggcgactccatcctgttcacctatccctcctcgcacgacgtggtggaggtccccaaggccagctacgacgcctgctcacccgccaacgccctcgcctcctacaccggcggcagcaccaccgtcaagctcgacgccccgggcaagcactacttcatctgcggcgtgcccggccactgcgccgtcggcatgaagctcgaggtcaccgtcgncgtcgtcaccgtcaccaagcccaggcacaagaa

SEQ ID NO: 418760 - DNA, 533 bp, Oryza sativa
  unsure (1)..(533): unsure at all n locations
gagagagagagcagcagcaggtagcaggtcgaggagggtttgtggccatggcgatcctgtcggatgtggccaccgaggtgctgatcccgatcgccgccatcatcgggatcgggttctccatcgcgcagtgggtgctggtcgcccgggtcaagctggcgccgtcgcagccgggagcgtcgaggagcaaggacgggtacggcgactcgctgatcgaggaggaggaagggctcaacgaccacaacgtcgtcgccaagtgcgccgagatacagaacgccatcgctgaaggagcaacatcgttccttttcaccgaataccaatacgttggcgttttcatgtcgatattcgcggtggtgatcttcctcttcctcggctccgtcgagggattcagcacaaagacccacccctgcacatacagcaaggacaaggagtgtaagcctgctctgttcaatgccctgttcagcaccgtctncttcctgcttggagccatcacctcagtggtttctggctttctccggatgaagattgcgacttac

SEQ ID NO: 418761 - DNA, 531 bp, Oryza sativa
ttttagctagctaactaatcttccccttcgtctgcggcattattccacttggacgaacactagctcaccggccggccatggcgtcttcttccgttctgatcaagctgctcgtcgtcgtcggctgcgccgccgcggcctccgcggcgacgctcaccgtgggtggtagctccgggtggacgcttggccagaactacgatacttgggcaagtggccaaaccttcgcggttggagacaagctcgtgttcagcttcgttggggcgcacacggtgacggaggtgaacaagaacgattacgacaactgcgccgtcgcaagcaactcgatcagctcgaccagcaccagcccagccaccctcgacctcgccgccgccggcatgcactactacatctgcaccatcagcggccactgcgccggcggcatgaagctggccatcaacgtcggcagcggctccggctccggctccggctccgggacgccacccagcaccaccccaggaagcagcggcacgcccgccggccaccccttttttcccc

SEQ ID NO: 418762 - DNA, 426 bp, Oryza sativa
gtttgtgtgcctctaccaagaacaataagaagccttgcattggtagccatgatcacggtggtggacctgtaccacgtcctgacggcggtggtgccgttgtacgtggcgatgacgctggcgtacgccttcgtccggtggtggcgcattttctgcccggaccagtgctccggcatcaaccgcttcgtcgcgctctttgccgtcccgctcctatgcttccacttgatctccaccaacaaccccttcgccatgaaccttcgttttctcgacgacgacacgctccagaagctcatcgtcctcgccctcctcgcgctctggtgccgccttttcgcgcgcgggtccctcgactggctcatcacccttttctccctctgcaccctgcccaacaccctcgtcatgggcatcccgctgcttaaggggatgtacgcc

SEQ ID NO: 418763 - DNA, 524 bp, Oryza sativa
gaaactttcctcgtcggcgaggagcggcgagatcccccgggccccggccatggaggggctcctgtccaagctccggagcctggacgcctaccccaaggtgaacgaggacttctacagccgcacgctctccggcggcatcatcacgctcgcctcctccgtcgacatgctcctgctcttcgtctccgagctccgattatatcttcatgcggtcacagaaacaacactaagggttgatacctcaaggggagaaacacttcgcataaattttgatgtcacctttccagcccttcagtgttctataataagccttgatgcaatggacatcagtggacaagagcaccttgatgtgaaacatgatatattcaagcagagaattgatgtccatggtaatgttattgcaactaagcaagatgcagttggtgggatgaaggtggaacagcccctacagcggcatggcggcaggcttgaacacaatgagacctattgtggctcttgttatggtgccggagaatctgatgagcagt

SEQ ID NO: 418764 - DNA, 494 bp, Oryza sativa
cgaatcctctcttctccttgtttccaccaccaccaccgtagcaatggcgggcaacgggccgatcaacaaggaggacccgctcaactggggcgcggcggcggccgagatggccggcagccacctcgacgaggtgaagcgcatggtggcgcagttccgcgagccgctggtcaagatccagggcgccaccctccgcgtcggccaggtggccgccgtcgcccaggccaaggacgccgccggcgtcgccgtcgagctcgacgaggaggcccgcccccgcgtcaaggccagcagcgagtggatcctcaactgcatcgcccacggcggcgacatctacggcgtcaccaccggcttcggcggcacctcccaccgccgcaccaaggacggccccgccctccaagtcgagctcctcaggcatctcaacgccggaatcttcggcactggctccgatggccacacgctgccgtcggagacggtgcgggcggccatgctcgtgcgca

SEQ ID NO: 418765 - DNA, 531 bp, Oryza sativa
agttgtctcaataagtttgcctgccctaagtgtgctgagatcatccttaatagcgatgatgctaaatcaggtgaacctatcgttgacagaaccactttttggccatccatcttccgttgagctgttgaggttccctggaggaattacagtaattcctgagcagtctggttctgtatgggcggatcctcttttcaactttgtgttgaacaattccatttatcagatcttgggtaatattacagagctaaaggaccagttgaagcttggattgaacttgaggtcctacgagaaagtatatttgcagttcaggaatgagattggatcttcagttgatgccccggcaactattgaggcatctgttctagatgggagcagcattcttttaccatatagattgaaacaactagctcagctaatcaaagaacccaatgcaaggaaccttgggcttaatcactctgtatttggtaaagtaaaaggtgttcaactgtcatcatacctacagcattcgatctcagatttatcttcgagtcc

SEQ ID NO: 418766 - DNA, 485 bp, Oryza sativa
ggttatttcctggtgagcagcttcaagtcgtggtggacgaacaggtacatgcaaatcttccagcggctcagcaagtacgaattggttgacatcgacaatgatgacgaggtccgatgttaccggagcgtggtggtcgggccgacgttccacaaggagctcggtgtggacgcgtccaggacgccgtcggggtactccatggtggacttccgcacgatgttgcgtggagcgctcgggctggagcgcgctgtggctgagcccagcggcgaccggtgggacatccggcgccgcccacgactgctgatcatctcgcggcgcaacttccgtgcgttcctgaacgagcgtgccatggcggacatggtcatgagcctgggcttctacgtgcgtttgggcgagccggacatcagcacggacgtgtccaagttcgcccggctggtgaactcggcggacgtgatggtggccgtgcactgtgcatggctgaccaacat

SEQ ID NO: 418767 - DNA, 299 bp, Oryza sativa
ccaaaaagccaaacggaaaagctacatgtttatttaggcttagactttttgacttataagttggcttataagcctaaacaaagagggccttaggatttagacgaaaagcccaaaccgaggcacactttttacgaataccaaaataatgacaattacctccaagcctcttgcaaatattacaaattatatggggatgtttctattccattaatctaagcccataggattcaaattagagcctactaaatattggatacacattttcattcttcaatgtacatatagtctcatgagattgt

SEQ ID NO: 418768 - DNA, 473 bp, Oryza sativa
  unsure (1)..(473): unsure at all n locations
tttttcatcaccagctcagctgtggccggccgcgcgcgatccaagttgctagctagctaagcttttgtaactgagagtgagctagctaggtagctgggtattgggtattatattgcgagagatagagagagatgagctgcaacgggtgccgcgtgctgcggaaggggtgcagcgacgcgtgcgtgctgcggccgagcatcgagtggatcgacggcgcgcagccgcaggccaacgccaccgtcttcgtcgccaagttcttcggccgcgccggcctcgtcgcctccctcgccgccgtccctctccaccatcgtccagcgctgttccggtcgcttctgtacgaggcgtgcgggcggacgataaacccggtgagcggcgccatcgggctcatgtggacgggcaactgggacctctgccaggccgtcgncgacgccgtccttcgcggcgactccctccgcgccctctcggccgtgcca

SEQ ID NO: 418769 - DNA, 525 bp, Oryza sativa
ctctcctgcgcgggcgagtcgtcctcctcgtcctcgtcgtcccctttctctgctcccgcgagatctcacccccgctgcggcgacgcggccatggcggggaggaactaccacggctacggcggcggcggcggcgggggcatgtccatggtggtggcgagcacgccggggcaggagctggccctcaccaactgcgcgtacgtctcctccgccgacatccgccgcttccccaacgccctcgccctcgtcggcgacgccttcgtcttcaccctgcgtgcccatgatgctgtttctgctggaagcatcgcattgaatgccattcagcgtcgccagacgaaggtttcagctggggattcaatcactgttagcagttttgcccctcccgatgatttcaaattggcattgctcacattagaactagagtataccaaggcaagaaccaaccgaaatgaggagctggatgcttgtgtgcttgcccaacaacttcgaaggagatttcttgatcaggtcatgacatctggggcaaga

SEQ ID NO: 418770 - DNA, 487 bp, Oryza sativa
  unsure (1)..(487): unsure at all n locations
tatggatgctggtctggagaaagctgccagaagtgcttcccaatcaaaggtggaaaatggctcaccttcagaaatcattttagatgattttgaagacttgagccctctatcagaaaatgatgactccactgttagtatcactgtagtcggagcatctggtgaccttgccaagaagaagatatttcctgcactttttgctctatactatgaagattgtcttccaaagcatttcactatcttcggatatgcacgcagcaagatgacagatgctgaattgagaaacatggtcagcaaaacactgacatgcagaatagataaaagggaaaactgtaatgagaagatggaagagtttttaaagagatgcttctatcattcaggccaatatgattcagaggagcatttcatggaccttgacaagaagctgaaacaacatgagggttccagagtttctaaccgtctnttctacttgtcaataccaccaaatata

SEQ ID NO: 418771 - DNA, 374 bp, Oryza sativa
tgtagatccgatccaggaagagctcgccgccgccgctgccatggcgctctgggacgtgacaagcacagggaagagtggggaaagccgatgcccaaagttctgtcttggtactgaggtgtttctgagctttggtaattcagttgcttcaacccgcttcttgctccaagatgaattcaacatacagacaactaaatgcgataactgcattattggcttcatgttttgccttcaacaaattgcttgtattttctctatagttgccgctattgttggtagtgaagagctttcagaggctttccaaatcctttcctgcttggctgatatggcctactgttcgggttgggcctgtttgcagacccaacacaaaattgaaa

SEQ ID NO: 418772 - DNA, 368 bp, Oryza sativa
gtttatataagggctctgtataatgacatgtcaagatatgtcttctgtgctgggtacatgccatgcattgggaagagtggtgaaagccgatgcccagagttctgtgttgctactgaggtgtttctgagctttggtaattcagttgcttaaacccgctttttgctccaagatgaattcaacatacagacaactaaatgcgataactgcatgattggctttatgttctgcctgcaacaaattgcttgtatcttctctatagctgccgctattgttggtagcgaagagctttcagaggcttcccaaatccttttctgcttgactgatatggtctactgcttggtttgggcctgtatgcagacccaacacaa

SEQ ID NO: 418773 - DNA, 530 bp, Oryza sativa
acatcatacgccatctcctccctccgccgcggcgacgtcgagggaatcggggcggggccggagctagctagttcgccgccggcgagacgcgtgtgccatggtggcagcggcggggacgatggagctggagatcctggggatcaacttcgggtgcgtcctcgcggcgctcgcggacgccaagatcccggagaaggactgcctgctcccgctcgcctccaagctgctcggctacgccatcgtcgccgcctccaccaccgtcaagctccctcagatattaaagattttgaagcacggaagtgtaagaggacttagtgtagcatcctttgagcttgaggttgtcggctacacaattgctctagcatattgtattcataaaggactgccattttctgcgtatggggaactagcttttctgttaatccaagcaattatttttggttgcaatcatttactattactccccaccatgggaaccaagacatggatgaaagctttactatattgcggactggctccaacagtattgggtg

SEQ ID NO: 418774 - DNA, 456 bp, Oryza sativa
  unsure (1)..(456): unsure at all n locations
tgttgatccgatccaggaagagctcgccgccgccgctgccatggcgctctccgtggagaagacctcgtcggggagggagtacaaggtgaaggacctctcccaggcggacttcggccgcctcgagatcgagctcgccgaggtcgagatgccggggctcatggcgtgccgcgccgagttcggcccctcccagccgttcaagggcgcccggatctccgggtccctccacatgaccatccagaccgccgtcctcatcgagaccctcaccgcccttggcgccgaggtccgctggtgctcctgcaacatcttctccacgcaggaccacgccgccgtcgtcatcgncagggactccgccgccgtgttcgcctggaagggggagaccctcgaggagtactggtggtgcaccgagcgctgcctcgactggggcgtcggcggcgggcccgacctcatcgtcgacga

SEQ ID NO: 418775 - DNA, 336 bp, Oryza sativa
tttttgttttttttttttttttatggggaaaactatgttataaaggaccgaaacaacatcgggtttacttgtttaatcggcgttggaggaggagatttgatcatgggtggccataggggcggtgtgagaccagtttctgacccattcaggggggacactctttggtctttcaagtgggaatccgagggcctctggtccagacaaggttggataagacaccaatagctgtggaaacaccgaagggaacggggtagcagttgtcttcagacattccgtagtgaaccaacagaactccagggtgggcatccacattaggccatgggttcttgggctttc

SEQ ID NO: 418776 - DNA, 534 bp, Oryza sativa
  unsure (1)..(534): unsure at all n locations
gtttaattctaccacctttgaatcgaaattcttgttattcaagcatgtttgcaagaactactccacgcgttcgtattagcgctccagtgaaaaaagccaattttggatctgtgagaaactcacatagtctgaaacaaagactgcaacatttgatcccagaaaaggccgcagaaatcaaaaacattaaagataagcatggagacaaattgcttggaacttgcactgtgtctcaggcatacggtggtatgagaggagttaaagctatgatttatgaaacatcactcttggatgctgacgagggcatccgattcagaggatttaccatccctgaagttcaacaaaagttgccaaaggctccaggaggtgctgaaccccttcctgaaggattgttgtggcttttattgactggagaagttccaactcaagcacaagtttcagaactcagcgctgatcttgctcatcgtaacaaagtncctgagtgggtgttcaaagtgttgaaggacctcccttcagatatgcatccaatgactcaat

SEQ ID NO: 418777 - DNA, 529 bp, Oryza sativa
  unsure (1)..(529): unsure at all n locations
ggttgctgcacaccggagacatcggcttcgtcgacgacgacgacgagatcttcatcgtggacaggctcaaggagatcatcaagtacaaggggttccaggtgccaccggccgagctggaggcgctgctcatcactcacccggagatcaaggacgccgccgtcgtctcgatgaaggatgatcttgccggtgaagtgccagtcgccttcattgtccggacagaaggctcagaaatcaccgaggatgagatcaagaaattcgttgcaaaagaggtggtgttctacaagaggatcaacaaggtgttcttcaccgattccatccccaagaacccttccggcaagatcctcaggaaggacttgagagccaggctcgccgccggcatccccgacgccgtcgccgccgccgtcgccgatgcgcccaaaagcagctaaggccaacgccgacgttntctctattttcagtcacacaaccggtgaaaaaaaaatgcagagatatgatgttgctgtccatgaaatggaggccagaatggagc

SEQ ID NO: 418778 - DNA, 258 bp, Oryza sativa
tatttggtaatgtgttacacaaaaaggttccagaattattacggacaagacattttagataaccatagattgccctctagatatcaaaaccacattaagcaacagccgcagaatgttccaatggtagccagcacctcccaaggcaaatcagtacttgtagtccttgacgtgaaggctctcggaggcgccctcgccgaggacagcggtacccttgtatgtaccgagggtagcctcggagtggccttgcacctggtagga

SEQ ID NO: 418779 - DNA, 505 bp, Oryza sativa
ggtcacccccctccccctcccttctcgcctcattccccacagccgccgcctccttcctctcctcgatctccctattcgtcgtagcctcctccctcgttcgctccgcccgcaaccatgtcggcctactgcggcaagtacaaggacgagctcatcaagaacgctgcctacattggcactcctggcaagggtatccttgctgcggatgagtccactggcaccattggcaagcgcttcgccagcatcaacgtcgagaacgttgaggagaaccgccgctccctccgcgagctcctcttctgcacccctggcgccctccagtacctcagcggcgtgatcctcttcgaggagaccctgtaccagaagaccaaggatggcaagcccttcgtcgatgtcctcaaggagggtggtgtcctcccgggcatcaaggtggacaagggcaccatcgaggttgccggcaccgagaaggagaccaccacccagggccatgatgaccttggcaagagatgcg

SEQ ID NO: 418780 - DNA, 456 bp, Oryza sativa
gtttgttgagtggaagcagatcaggaagatgctggagaagctgtgggacgacgtggtggccggtcctcgaccggagaccggcctcgagaagctccgcaaggccgctacaacccgcccccttgtcatcaacaaagatggcgacggcgaggcgagcggagtggcgtacaagcggacgcagtcgatgccgacgaccccgacgacgccggtgacgccgtcgtcttcgtccccgacgacggcgacgacgacgacgccgcggggcagcaacgtgtggaggagcgtgttccacccggggagcaacctcgccaccaagagcctcggcgccaacctcttcgaccgtccgcagcccaactaccccaccgtctacgactggctgtacagcgacgagaccaggagcagccatcgctgaactgaataatccattgatcggaggctgacgatcttatgtcacgccatgtt

SEQ ID NO: 418781 - DNA, 471 bp, Oryza sativa
  unsure (1)..(471): unsure at all n locations
cgttatctttactgtccaaacggctgaacaagatgctgcatgccggtcgtgtcaatcaggtgcagcgcaatgcttctggcgccccagcgcggctgctgaaggcatctcatgtgcaaggcgtcaatggacgtgtggtggccaaggttgccaggcgtgcagcactccgtgtttagcgcaagctggctgccagcatcagtgccagcgccacgactgcagtgaagcagcagtcagcagcaccagcagcagcccccaacggcggtggcggtggtggcacccgcgtcatgatcatcggtggagactgctactgtggctgggccaccgggctgtacctgtcagngcgcaactatgaggtgtgcattgtcgacaacctctgcaggcgttagtttgacctgacctttggactgacacggtgacccccatcaccaccatccatgagcgtgtcaaggtctggggcgagcagttacggaagca

SEQ ID NO: 418782 - DNA, 464 bp, Oryza sativa
tttgtgtttttttattttgggggggtggaatcgagtagcaatactttcaccccaaaatacagtttagcgacaatatcttagaaaagccgcttgctttgccgccatggctggcaagctgagcagagcagctaacacaaagaacacgagatcactataaaccaaacggcaacgaacgaagaaaatacagggtcttttttgtctgaagatacacgaagcgggtcgttttcttttatttttaggctcctctcctcctcgatgatgggtgtatggcaatggcaatggcgatgggatcttggcttagttgatgggaaggggctcgccgttccactccttgaggcagtcgagcatggggtcgatgagcttgccctggctgatgccgaggaacaccttgttgcactcctcgccgggggacttgagcttctcgccggtgaggaatacgcagccgagcttctctcggaccaagc

SEQ ID NO: 418783 - DNA, 515 bp, Oryza sativa
  unsure (1)..(515): unsure at all n locations
ctaccttttcctccggctcttcttcagtatcgaatcctgtgttctcctcgtgcccaccaccaccaccgtagcaatggcgggcaacgggccgatcaacaaggaggacccgctcaactggggcgcggtggtggacgagatggccggcagccacctcgacgaggtgaagcgcatggtggcgcagttccgcgagccgctggtcaagatccagggcgccaccctccgcgtcggccaggtggccggcgtcgcccaggccaaggacgccgtcggcgtcaccgtcgagctcgacgaggaggtccgcccccgcgtcaaggccagcagcgagtggatcctcaactgcatcgcccacggcggcgacatctacggcgtcaccaccggcttcggcggcaccttccaccgtcgcaccaaggacggtcccgccctccacgtcgagctactcaggcatctcaacgccggaatcttcggcactggctccgatggccacacgctgtcgtcggagaccgtgcgggcggncatgc

SEQ ID NO: 418784 - DNA, 441 bp, Oryza sativa
ctctacttcacgggcaccaacgacgtctaccacccgggctgcatgctcgcctttttcgtcgcctcctacgcgctcggcgtgctcagctacggtgtcgtcgggccgtcggggctgttggttcccatgatgcttaccggcgccacctacggccgcctcgtcgccatgctgctcggcggccgttcaggactcgaccacggcctggtcgccatcctcggctccgcctccttcctcggcggcacgcttcggatgacggtgtccgtgtgcgtcatcatcctggagcttaccaacagcctgctcctgctaccgctcgtcatgctcgcgctgttcatctacaagaccgtcgtcggctgctgtaactgcagcatatacgacctcatcctcaatctgaagggccttccgcacctagacggtcacgccgagccgtacatgcggcagctcacc

SEQ ID NO: 418785 - DNA, 457 bp, Oryza sativa
gcggttttagagcgcgagcggccgacctgatgctgatgccggttgtgtaatcagttgagcgcgagaactaggcccagaagggtgtgaagatcaatgtgcatggggaaatgaaccgtggcgataatgttgccaggcgtgcacaaactctatatttatgtgtgctggatgccacaattattagccagcagctactactgcaggcatggagcgaacctgagaaccagcttaatggcggaaccgatgtggaccgggtggcacacccgtcatgatcatcggtggtgacggctactgtgcctgaggcaccgcgctgaacctgtcagggcgcaactatgaggcgtgcattgtcgacaacctttgcacgcgtaagtttgacctgacccttgggctggacaccatgacccccacaccaccatgcatgagcgtgtcacggtctggggcgagcagttagggaagcaca

SEQ ID NO: 418786 - DNA, 520 bp, Oryza sativa
cccttcatctctctctctcgcttcctagggtttcgcgccctcggatcccgcggcggcggcgagaagcttccactcgcctcggcggcggcgccggccagaaagatggctggcggttttcgagtactgcatcttgtcaggccctttctggctttcttgccagaagtacagagcgctgataggaaaataccattcagagaaaaagtgatctataccgttatctctctcttcattttcctggtgtgcagtcagctaccactctatggaattcactcaactactggagcagatcctttctactggatgcgtgttattcttgcttcaaaccgtggtactgttatggagctgggtattaccccaattgtgacatctggaatggtaatgcaacttctagtgggatcaaagattattgaagttgacaacagtgtgagagaggaccgtgcacttctgaatggcgcacaaaaattgctgggcatcttgattgctattggggaagctgtggcatatgtgctgtctggaatga

SEQ ID NO: 418787 - DNA, 436 bp, Oryza sativa
tttgttctgactttggagcgggcagtatcttaaaaagaagcttctgacatttattatttcatcgatgatttcaaagcgcgcaaaagaaaatcgaatacaaacaaacagcttgggcttctctctctctctctgtctctctctctctgtctcctccaaatctttggaaagaagaaaacacagtggaattaaaggctaatacaacaagaggagaagagagaaactttgaaggaccatcatatgtatgatcctcatgtgtcgattcacttgagctatttagtagtaggagtttagctgcccttggtggggtaagaggccatcttgatgatgccacatagaccttcacccttgccagtgcccctcttgatgcggctgtaccccttctcgccccaatgtgggccccatgagttcttcacgatgatgtaatcttggcccttgc

SEQ ID NO: 418788 - DNA, 444 bp, Oryza sativa
cgtcttcagttaaaaaaagaagaaggagaagaggaaaaattcagacagagatcgacatggagacgaaggtgaccgtgggcgtcgtcctcctgctgctgtgcctgtgcggcggcgccgcgtgcgccgccggccgtagcggcggcgagttctccattgtcgggtactcggaggaggacctggcgtcgcacgaccggctgatcgagctgttcgagaagtgggtggcaaagtaccggaaggcgtacgcgagcttctaggagaaggtgaggaggttcgaggtgttcaaggacaaccttaaccacatcgacgacattaacaagaaggtcaccagctactggctggggctcaacgagttcggcgaccttacccacgacgagttcaaggcgacctacctgggactcacgccgtcgacgacgaggtcgaacagcacgcactacttgtcggagg

SEQ ID NO: 418789 - DNA, 386 bp, Oryza sativa
gctgctgctgctggtgtcgctggcagcgggggacatgtccatcgtgtcgtacggggagaggagcgaggaggaggcgcggcggctgtacgcggagtggaaggccgagcacggcaagagctacaacgccgtcggcgaggaggagcggcggtacgcggcgttcagggacaacctccggtacatcgacgagcacaacgccgccggcgacgccggggtccactccttccggctcggcctcaaccgcttcgccgacctcaccaacgaggagtaccgggacacctacctcggcctcaggaacaagccgcggagggagaggaaggtcagcgacaggtacctcgccgcccacaacgaggcgcctgcggagtccgctgactggaggacccaggggg

SEQ ID NO: 418790 - DNA, 369 bp, Oryza sativa
gtggggttttttttttttttgggcaatgaccttatcttgttccaatatcaatttgcagttccgtcgaactggcatttaggagcttaggagcaaacctagctgaattttacatatacattcagaagcaaatttggcagttttgtaaccaactgaacccgtttttttagattttatgtacacgagaaatctattataaaagccgatatacttagtgcgcagggttcgccgccgagctgcgcaatcgtttttgtcagttaccagctgatcatttgatgatgcaaccacgctggctctggacggtctgataccgttctgaaattgctcaagcgctgctcttcttgccgttgccaaacaagaaagacaagtttg

SEQ ID NO: 418791 - DNA, 524 bp, Oryza sativa
gcaatctccccctcctcccgtctcgtcgtcgtcaccgccgccggctcaccccccacccgtcgccgccggcgcggaggccaagccctagccccagcgcggccgatcgcctcgatcccccggcgagccgatgggcgtgcgccgctgaagcatgccagcgcgccgaggccgtggaaagcggaagcagcagcagccgccgccgccgccgacgggcccagcggacgcgaggcagccggaggggaagcagcgggaggaggagcggaaggggatggaagggtccgacaaggggggcgccggcgacgacgggagccccgcgccgctcccggagacggtacaaatcggaaattcaccaacgtataagcttgagaggaagcttggaaagggaggatttggacaagtatacgttggccggcgtatttcctctcctactcatggtaacagaaattctggtgcaaatgcattagaggttgcgctaaaattcgaacatcgaacccagcaaggttgcagctatggagctccctatgaat

SEQ ID NO: 418792 - DNA, 437 bp, Oryza sativa
tttggttttttttttttttggggtatctgcatttccacggcccttactattcatgtttttcttggaaaacttccatccaagcaataaacccatcagtttattggattccacaaaattccccaaatccatcacattgcaaggttgccctcctcgtgatcttgcaagacccagcgcccgctcgcgttctgcaccatgcccttgttcttctccacccaccacgccgccggcacctggtactcgtccctgagcgcgtccactttcttgttcaccagcgccaggtcacggtccaccacaaggctgaaccccgcgccgtcgccggcgccctgcgtgcccgcgacggcgtgcaggtagcactccaggttgtgccactgggcccggcccgccgggttcttcaggtaccgcgaccggcgcgtgttcacgagcagattcccgcccac

SEQ ID NO: 418793 - DNA, 417 bp, Oryza sativa
gctccggcgaggtcggccgggtacaccgccgggccgttggcgtagtacagcccccagtgccgctccgtgccgggccccggcttgaggtcctcgttgtagagcgagaacacgaacaccggcatcttcgcgccgggccgcgccggcgtgccggggctcctcgccatccgcgccgcgaggttcctgttgtagatggcggcgctgtgggcgttgcagccgatctgctcgtagtcgccgccgttgggccagccggtctccgcgatgcccagcttcacgcccccgtaccccagcttcgccatcgcgtgcaccacggcgtcgagcatttcgtcgagcatgttggtgtatgtgagccccgtgcccggatcaacgtagcggccgtcgccgccgccgccctggaagagcgcgtactcgagcgggacg

SEQ ID NO: 418794 - DNA, 441 bp, Oryza sativa
tcgttttgcatacgcgtacatgcaccggatgaatgctgggtagtaatcctcgcggcctggccgctagttccaccaccgggcgccaccatgtgcgggatcctgggcgtgctcggagccgccgactggtcgcaagcaaagagggctaacgtgctgtcctgctaccggaggctgaagcacaggggacccgactggtgcgggttgcaccagtgcgagcgaaacttccttgctcagcagcgactggccatacgatcaccgctctacggagaccagtcggtgtgcaacgcggaccgcaccatagtagacttggccactggagagatctacaaccacaagaagatcaggaagcagtaactctccaagcacactgttagtacctgtagggacagcgaggacataatgccgatgtatgaggagtacggtcaggacttcggaggcatgctg

SEQ ID NO: 418795 - DNA, 495 bp, Oryza sativa
cttttgttttttacatctggggtataattcaatgggccatcaagaaacacccttcaaggaaaacatccagtgaaggaagatgacttagttaacatcaagtatctaaagcttatcatcaaggagactctaaggctgcatcctgtggtaccattgcttcttccaagagagtgtctccatgcgtgcaaggtcatgggctacgacgtgcctaaaggcaccaccgtgtttgtgaacatatgggcaattaacagagaccccaagcattgggatgaccctgaggtgttcaagccagagcggttcgatgatggcaagatcgacttcaaaggtgcaaactttgagtatattccgcttggtgctggtaggaggagttgccccggggtgacattcgggcatgccaccgtggagctcatgcttgctacgctcttataccactttaaatgggagcttcttgaaggagttgcgccgaacgaactagacatgacggaggagataggcatc

SEQ ID NO: 418796 - DNA, 455 bp, Oryza sativa
aacgaaaggcaccctgcgaactgcaggggctgatacggtaattaaattgtctcccaaagatggactatgggagtaaaaacaagcatagcagtttttgttttgccacttaacccagcaaaatggcgctaagaagacaccgtgtagcgattacttcacgatgcagatcttgatcacggatgcgacgccaatacggggcagagcaacaacagcatcaccaggcttgcacaactgcttctgtacagctgacttgagagcagcatcaaggatgacctttgtcgactccgaatcgggggctttggcagaaccctcagccaggagaggaacaagacctctgtagattaggctgtgccttgctgggccctccgagctgattgtccagtccaatgaatcggttgtcaacacggggacaaccacagagaggattggaaccctgggacgatacttggcaaccagct

SEQ ID NO: 418797 - DNA, 397 bp, Oryza sativa
tctgtttgttgagtggaagcagatcaagaagatgctggagaagctgtgggacgacgtggtggccggttctcgaccggagaccgggctctagaagctacctaaggacgctacaacccgcccccttgttatcaacaaagaaggcgacggacaggcgagcggagtggtacacaagcggacacagacgatgccgacgaccccgacgacgccggtgacaccgttgtattggttcccgacgacggctactacgacgacccctcggggcagaaacgtgtggaggaagactttacaccccgggagaaacctcgccaccaagagtccttgtacccaacctaatcagaccgcccccagctcaacttcccccacccactacgaatggctgtgcagggaccagaccagg

SEQ ID NO: 418798 - DNA, 332 bp, Oryza sativa
gctgctgctgctggtgtcgctggcagcgggggacatgtcgatcgtgtcctacggggagaggagcgaggaggaggcgcggcggctgtacgcggagtggaaggccgagcacggcaagagctacaacgccgtcggcgaggaggagcggcggtacgcggcgttcagggacaacctccggtacatcgacgagcacaacgccgccgccgacgccggggtccactccttccgcctcggcctcaaccgcttcgccgacctcaccaacgaggagtaccgggacacctaccttggcctcaggaacaagccgcggagggagaggaaggtcagcgacaggtacc

SEQ ID NO: 418799 - DNA, 441 bp, Oryza sativa
gggcaaggaccttatcttgttccaatatcaatttgcagttccgtcgaactggcatctaggagcttaggagcaaacctagctgaattttacatatacattcagaagcaaatttggcagttctgtaaccaactgaacccgtttttttagattttatgtacacgagaaatctattataaaagcagatatacttagtgcgcagggttcgccgccgagctgcgcaatcgtcttcgtcagttaccagctgatcatttgatgatgcaaccacgctggctctggacggtctgatacggttctgaaattgctcaagcgctgctcttcttgccgttgccaaacaagaaagacaagtttggctttgccagggtacgcttcagagccttcactgccagtggactgtccttagccatgaggcaggttccctgctgaacattgcagatggggtac

SEQ ID NO: 418800 - DNA, 405 bp, Oryza sativa
accatcctttcaccccaaaaaacggattaacgccaatatcttaaaaaagccacttgacttgccgcccttggtggcaaagctgagcaggagcatctaacccaaagaacaccggaaccactataaaccaaacggcgacgaactaaaaaaatacagggtctttttttgctgaagatccaccaagcggctcgttttcttttattttttaggctcctctcctccaccatgatgggtgtaaggccacggcaatggccatgggacctcggcttagttgatgggaaggggcttgccgttccactccttgaggcatcccagcatggggtccatgagcttgccctggctgatgccgaggaacaccttgtgcactcctcgccgggggacttgagctcttgcccgagaggaaaacgc

SEQ ID NO: 418801 - DNA, 494 bp, Oryza sativa
tttactcacacaaaccaacgcgacgcacgagagattggtacgtgaagcacctgcagcgggcgacccaatggagaccccgactctgaccacgctgctcaaggcggcggtggccacgttcccctcgcgccgcgccctcgccgtcccgggcaaggtcgacctgtcgcacgcggcgctcgacgcgctcgtcgacgccgcggccgcgcgcctcgccgccgatgcgggcgtgctccccggccacgtcgtcgcgctcgccttccccaacaccgtcgagctggtgatcatgttcttggcggtgatccgagcgcgcgcggtggcggcgccgctgaacccggcgtacacgcaggaggagttcgagttctacctctccgactccggggcgcgtctcctcatcaccaaccccgagggcaacgtcgccgcgcaggcggccgtctccaagctgggccttgcccacaccaccgtcagccttaaggacgccgtcggtcaagtcacctcgc

SEQ ID NO: 418802 - DNA, 419 bp, Oryza sativa
tttggttttttttgtgctatggggtcaccaaattcattatttataccggtaaaaacttgtccctgatttttttacctgttttacatagactagcaatctgtaccagcctaaggtatgtctggatccacaggaaaacctacgacctggggagctccatgagagcctgaccgacctctgtggccttctgtgctaccaagggggggcgaccttgctattggaggggctggtgctcggtgatgttgaacctcaaaaggttctagagcaggatgatgaaatattgcatgtattctgagcttgattggaccttacatctgcttttacgctccactgcctggagcagatctcgactggtaggatccttcaaactgactggttgccaacacataggacactgagaacttgtctgacaccattcaaga

SEQ ID NO: 418803 - DNA, 427 bp, Oryza sativa
ttttggtacaagtaacgattggtaaacacgaaaaattccgcaatcatgcgaattattcacagaatacaccaaagtatgtgtaactgcttgtccaagaagatagcgaaggttaatatagcattagcataacatcttacagtaggtgtctacgataagaactattgacaaagtttccacacgctgtaaaatgccaggggtcccttttacataagatggcactccatggatatatgtttacaccgacttgttcttgcaagaattccaacagtcacctcaggaattcagcttgatgccttttcttttacccttgctgttccattcaaagtttcttagttcttgtacttcatggtttttttctcaaacccaattgtggggaactgttttgcatattcctccacatcatggcgaagttttgcaatctcggatt

SEQ ID NO: 418804 - DNA, 525 bp, Oryza sativa
tcgctcccaccgtgttcttcctcctcccagatctaagatccgtggaccgaccgagctcgagctccaccacctcgtctccaatggcggtcaaggtctacgtcgtgtattactctatgtatggtcatgtcgccaaactagctgaggagatcaagaaaggtgcttcatctgtcgaaggcgtggaagttaaaatatggcaggtccctgaaaccctctcagaggaggtgctgggcaagatgggcgcgccgccgaggagcgacgcgccggtgatcgcgccgcaggagctcgcggaggccgacggcgtcctgttcgggttcccgacgaggttcggcatgatggcggcgcagatgaaggcgttcttcgacgccaccggcggcctgtggcgcgagcagagcctcgccggcaagcccgcgggcgtcttcttcagcaccggcacccagggcggcggccaggagacgacgccgctcacggcggtgacgcagctggcgcaccacggcatggtgttcgttccggtcggctacacgttcg

SEQ ID NO: 418805 - DNA, 461 bp, Oryza sativa
ttgtttttacacccacccggtttaccagagatccgggcccgccacttgtaaacctgctgcacccatggcgcccagagcagctacggtggagaaggttgctgtggcgccacccaccgggcttggtcttggcgtatgaggaggtgtcggagccgggggtccttactacaggggcgtccgcaagcgcccgtgggggcgttacgcagcggagatccgtgaccctgccaagaagagccgggtgtggctcggtacctacgacacggcagaggagggccgccgcgcctacgacgccgtcgctcgagagttccggggtgccaaggcaaaaacaaactttccgtttgcatcacagtcgatggtcggctgtggcggccgccccagcagcaatagcgcggtagacaccggtggcggcggcgttcagacgcctatgccggccatgcctttgtcgccgactatggactaggatt

SEQ ID NO: 418806 - DNA, 358 bp, Oryza sativa
gtgttcttagaagacgtgagagtataactgtagcactagaagagtacagcaacacacgttaattaatcacgcgagagcgatggatggatcggccggtaaggtctcggtctcgacctcacacgaggcggcggcagatggtgatgccgtcggcgatggcgagctggcagacgtcgatgcgcgggtcggcggcgagcctggagttgaggtccctgatggcgacggagaacctccggtccaggtccgacagcggcgtgtccggcggcagcgccaccgtgccggcccacagcgtgttgtcgtacacgatgtgcccgccgacgcgcaccagcttgagcagctgctcgtggtacttgacgtagtt

SEQ ID NO: 418807 - DNA, 297 bp, Oryza sativa
ggggaagattaaattgccgtggcgaccggtaatggccactcatccgagatcaagaacgtccacagcgacattgacagcaccaacaagacgttgctaaagagcgacgctctgtacaagtatgtcctggacacgacggtgctgtcacgggagccggagttcaatgccgaactgtgcctcattacggacaagcaccagtgggggttcatgcagtcgtcggtggatgaggcgcaaatgctggggatgcttctcaaaaaagcccgtgcgcaaaggacaattcaggcgggtgtcttaacccgc

SEQ ID NO: 418808 - DNA, 328 bp, Oryza sativa
gaggttgatgaggctagctagctagctagggtttcgtgctccccatcgcctcgcgcgcgcagccggatccgatcgggcgtcctcgtcggcgtcggcggcggtgcccctgatatcagtgttgtgattccgttgcaatggcatctggaactgatgagaaagccaagatggagggtttgacatcagctgcagcctttgttgagggtgggattcaggatgcatgtgatgatgcatgttgtatctgctttgaggcgttctgtgagagtgacccttccacattgactggtagcaaacactagtttcacctgcaatgcatttttgaatggagtta

SEQ ID NO: 418809 - DNA, 512 bp, Oryza sativa
cggacgcgtgggttcttgcccaccattcctctcttccttccttctcatgatttctgcgccttctgtggggatcgccttcgcgcccaagccgccaccggcagcggcggttgggtcgtaccgggcaaggaaggtccggtgcgcggtggccgtggctcctgcgccggcgccggcggggacgctgtacgacgtgctggggctgcgtgccggcgccacggtgcgggagatcaaggcggcgtaccggcgcctcgcgcgggagcggcaccccgacgtggccgccagcgccggggccgacgacttcgtcaggctccacgacgcctacgccacgctctccgaccccgacagccgtgcgcgctacgaccgcgacgtcgtcgccgtcgccttcatggcgcgcggcgcgcaccaccggacgatggcggatcccgccggcgagccgagctggtacggacgtcgtccacgccgcacctgggagaccgaccagtgctggtagcgcacacacgcgatttctgtctctt

SEQ ID NO: 418810 - DNA, 523 bp, Oryza sativa
cataccccgagacccccccgcctccaccaccacccgccgctcgccgctcgcccaccatggccatggcgacggcgctccgcaagctctcctccgacgccctccgccgccagccgctctcccgcatcaccccgctctactacatggcgtccctgccggcgacggaggagagatccggagtcacctggccgaagcagctgaacgcgccgctggaggaggtggatcccgagatcgccgacatcatcgagcacgagaaggcccgccaatggaagggtctggagctcatcccgtcggagaacttcacctcggtgtcagtgatgcaggcggtgggatccgtcatgaccaacaagtacagcgaggggtaccccggcgcgagatactacggtggaaacgaatacattgatatggccgagtcattgtgccagaaaccgtgcttggaggccttccgcttggacccagcgaaatggggagtgaatgtgcaacctctatcagggtcacctgccaacttccatgtttacactgccct

SEQ ID NO: 418811 - DNA, 451 bp, Oryza sativa
  unsure (1)..(451): unsure at all n locations
tttgtttttaaggaagtggtggtatagttgtagcagtagaagagtacagcaacacacgttaattaatcacgcgagagcgatggatggatcggccggtaaggtctcggtctcgacctcacacgaggcggcggcagatggtgatgccgtcggcgatggcgagctggcagacgtcgatgcgcgggtcggcggcgagcctggagttgaggtccctgatggcgacggagaacctccggtccaggtccgacagcggcgtgtccggcggcagcgccaccgtgccggcccacagcgtgttgtcgtacacgatgtgcccgccgacgcgcaccagctgcagcagctgctcgtggtacttgacgtagttgggcttgtccgcgtccacgaacgcgaagtcgaacgccgtctcgcgccccgccgccgtcttctcggngagcagctcgtccagcttctccagccc

SEQ ID NO: 418812 - DNA, 392 bp, Oryza sativa
tttgtttttaaggaagtaagtgggtatagttgtagcagtagaagagtacagcaacacacgttaattaatcacgcgagagcgatggatggatcggccggtaaggtctcggtctcgacctcacacgaggcggcggcagatggtgatgccgtcggcgatggcgagctggcagacgtcgatgcgcgggtcggcggcgagcctggagttgaggtccctgatggcgacggagaacctccggtccaggtccgacagcggcgtgtcccgcggcagcgccaccgtgccggcccacagcgtgttgtcgtacacgatgtgccccgcgacgcgcaccagcttgagcagctgctcgtggtacttgacgtagttggggttgtccgcgtccacgaacgcgaagtcga

SEQ ID NO: 418813 - DNA, 453 bp, Oryza sativa
tcgacctccagcagctcaagcagcaacagctcaaacggaggaagatctcatcgccatgacgaccggcaatggcgacgcaccggtgatcaagaacgcccacagcgacatcgacagcaccaacaagacgctgctcaagagcgacgccctgtacaagtatgtcctggacacgacggtgctgccacgggagccggagtccatgcgcgatctgcgcctcatcacggacaagcaccagtgggggttcatgcagtcgtcggcggatgaggcgcagctgctggggatgctgctgaagatggccggagcgaagaggacaatcgaggtgggtgtcttcaccggctactcgctgctggcgacggcgctggcgctgccggaggacgggaaggtggtggcgatcgacctcgacagggagagctacgagatcgggcggccgttcttggagaaggccgggtggcgcac

SEQ ID NO: 418814 - DNA, 494 bp, Oryza sativa
ttttgttttttttttgctatgaggtcaccaaatccattatttataccggtgaaaacttggccctgatttttttccctttttacatagatgaagaaactgaaccagcagaaggcatgtttggatgcgaagaaaaaactaagaactgtggacgaccatgagagccggaacgacccctgtgtccttctcttctaccaaggtggtgtgaccttcccattgcagcggctgctgctaggtgatgctgaacctcaaaatctccaagagcaggatgatgaaatatagttgtatttcgagtttgattggtccttacattcctttcacgctccactgcctcgagcagctcttgactggtaggatccttcaaactgataggctgccaacacataggacactgagaacttttctgacaccattcaagaatgcattggaggtggaactcgtgtttgcaaccagtcaatgtggaagggtcactcttacagaacgcctcaaggcagata

SEQ ID NO: 418815 - DNA, 454 bp, Oryza sativa; identical to SEQ ID NO: 394833

SEQ ID NO: 418816 - DNA, 432 bp, Oryza sativa
tcactgtcacaggtgcttgcttagcttagcttagctttgctgctgctccttctcattcataagccagcagctagctagcaagcagcacacacatatatcacaggccatctctctatccctaattaagctatatactccatatagctagctaaacacaggaggagtggaggaaggagaggctagctgatctagctatctgcagtgattagttaaaatgatggcttctgataggttggatgcagaaaggatcatagagtacttcaagggcaagagcatcctcatcactggagcaactggctttcttggcaagattcttgtggagaagatactgagggtgcagcctgatgtcaagaagatctacctgctcgttcgcgccatcgaccaagcatctgcaaaccaacgcgtccaatctgaggtgacggaaacggagct

SEQ ID NO: 418817 - DNA, 407 bp, Oryza sativa
ttttgttttgaccaaatccacgctccttcgttcatttgcaacgaatcagtcatcaaaacgctaaataaacaggcctcgtgtcgtgtcacacgccggcggtcttttctccgccgccgtcgccgtcgccgtcgtggtggtggcggcgcttggcccataacctgaggcggagctcccttccctcgagcatattgtccacctcctcggtggggaggcccttggtctccggcacgcagacgagcacgaacgctagtgccgccacggacagcccgccgaagatgaggaacgtccacgccgccccgatggcatccggcagcgactggaactactgcgccaccggcaggttcgacacccagttcgccgactgcgtcgcgccgcctgacacgctggggtgccgcagcgggtagacc

SEQ ID NO: 418818 - DNA, 429 bp, Oryza sativa
ttgtggttgcacataaactgcggatgaaaaccatctggtcactttatacaagccgtacatcagctaaaagaagttcacgatgcctcagggctgaggcagacagaaactgaaaacgacgcagcaagttaaaaacaaattacaaaacctacatgagacaaaattaaatcgtagagatagtgtcccactaccaccaaagcaacattatttgcagaggttcctttttttcagcccacatgatcccgtggtctagttattattggaaaatctccgttcgtcctgaaattcgatcgaattttaaatctctctctcctagaagagcttgaatagaattcctccgtgcgtggcgaagaatggcgcgaacaccagcgactcgacggtcatgagcttgatgaggatgtacagcgacgggcccgacgtgtccttgagcgg

SEQ ID NO: 418819 - DNA, 497 bp, Oryza sativa
cttccaccgtgttcttcctcctcccagatctaagatccgtggaccgaccgagctcgagctccaccacctcgtctccaatggcggtcaaggtctacgtcgtgtattactctatgtatggtcatgtcgccaaactagctgaggagatcaagaaaggtgcttcatctgtcgaaggcgtggaagttaaaatatggcaggtccctgaaaccctctcagaggaggtgctgggcaagatgggcgcgccgccgaggagcgacgcgccggtgatcgcgccgcaggagctcgcggaggccgacggcgtcctgttcgggttcccgacgaggttcggcatgatggcggcgcagatgaaggcgttcttcgacgccaccggcggcctgtggcgcgagcagagcctcgccggcaagcccgcgggcgtcttcttcagcaccggcacccaaggcggcggccaggagacgacgccgctcacggcggtgacgcagctggcgcaccacggcatggtg

SEQ ID NO: 418820 - DNA, 531 bp, Oryza sativa
gtggcgttgaggctagctagctagctagggtttcgtgctccccatcgcctcgcgcgcgcagccggatccgatcgggcgtcctcgtcggcgtcggcggcggtgcccctgatatcagtgttgtgattccgttgcaatggcatctggaactgatgagaaagccaagatggagggtttgacatcagctgcagcctttgttgagggtgggattcaggatgcatgtgatgatgcatgtagtatctgccttgaggcgttctgtgagagtgacccttccacattgactggttgcaaacacgagttccacctccaatgcattcttgaatggtgtcagagaagttctcagtgtcctatgtgttggcagcctatcagtttgaaggatcctaccagtcaagagctgctcgaggcagtggagcgtgaaaggaatgtaaggaccaatcaaactcgaaatacaactatatttcatcatcctgctcttggagattttgaggttcagcatcacctagcagcagccggtgcaatgggaaggtcacacca

SEQ ID NO: 418821 - DNA, 481 bp, Oryza sativa
aaccaagcaaaccatctagctttattttctcctgtccccaaggccaaacagcacagagctgaggcccccttaaaaattcatcagaacacatccatcaaaaaacttattacaacacggcgagtatatatgctaccatatcctcgacaactgcctatagtgccaagaacactcaacaaccaccatacaaacatttgacagaacacatgcagatatcaccgccggcgagttgaaactattctaccccctcctcccagattcttttcccttcccccgtttcagcagtttagaaagccaatgggggcaatggcaggttgctgttgaccccggaccgcatcctcctccgcctcagtctctcggcgatgatgaaggcgagctccagggattgcgacgcgttcagccttgggtcacagtgggtgtggtagcggtcgctcaggtcatcgaaggtgacggtcctggatccaccgatgcattcagtcacgtt

SEQ ID NO: 418822 - DNA, 474 bp, Oryza sativa
tttgtttgttaattttttttatttattaattttatatatatcaaatatttttaacatctgtatatgttaaaactttttcacttgcatattctaagttataacctcatttatttaatgttaaaacttgtaatgatattggcataaatccatgttctattccacataattcactacacataccactatataaacctaattttgatgctataacagtttttaaatttattctaccaggtattgcatctatttttaaacctaaaccttgaattgctcagctatgtgcaacatcattagatgtaataaaaaaagaggtttttaaccctactggtatagatacagcatttgttgtaactaataaacgtgtataacttttactttgtttatccatttcatcaattaaaactaaattactaacttgttttaaagctcccattgctgatttaattcataagttccatatcattgattacctat

SEQ ID NO: 418823 - DNA, 371 bp, Oryza sativa
atgtgtttgatggatgaaccttcagagagtgcttctccctctcatggaggaacccttatgtacttaggctcgccttctccgccggcatcggtggccttctcttaggctacgacaccggtgtgatttcaggagctctgctttacatacgtgacgatttcccttcagtcgacaagaacacatggcttcaggagatgatcgtgagcatggtggtggacatcgcgatcatcggggcggcgatcggcgggtgggctaacgaccggttcgggcgacggacgtcgatactggtggtcgacgcgctcttcttcgccggtgcggttgacatggagtgggcgacggggccagcgcatttggtggtgggggaggggtttgac

SEQ ID NO: 418824 - DNA, 494 bp, Oryza sativa
gcactcccttgagcactccgtgccgcgccggagctcggccacgaggcgcaccaccgcgccgtcgatgttcacgatcgcctccgcgccgccgcgcttggccagcgacgccagcaccgccacggcggtctcctcctcgctgatcgccgacagcgccgcctccgcggcgccggcttccacgagcttcccgacgttctccctctcgccggacaggcacaggagcgcggcgatcgcgtccttcttggtgctggaggggccggtgcgcacgaggtgcacgaccctctcgacgacgcgtgggttccggccaagccggcggcggtaggaatggacggacgccaggctgagcacggtggccgccgcgttctccttggcgcgccacgtcgcgccggagcccatggcgtggcagatcgcctcgacggcgccctcggcgtgcatgatgcgcttcttggtggcgtcgaggatggacaggttgagcagcgccgtgacggcgttgagct

SEQ ID NO: 418825 - DNA, 483 bp, Oryza sativa
tttgtttgaatatagattatgtgatggtataatatcgatgggagtgcacaatcaacttaacaagtttatacaagcacagtacgtagaatcaaacccacaaccaaatccaaccaaatctttgtgtaacgaatcggtaaagattaattccggcatatgaacacggatcaaatcagcacaggcagccaatgcgaatgatctctgtaacaattctgtatatgattcaggcggaggaggcgcccttgagcttcttggcgatgccagcgaagtacttgccctggtggaaggcgtgctccagctccgcctccgacggccacctcgacccgtcgccggcgaacgtgccggcgccgtacgggctgccgccgtgcaccgccgccatgtcgaacatcttggcgccgaacgtgtagccgaccgggacgaacaccatgccgtggtgcgccagctgcgtcaccgccgtgagcgggtcgtctcctggccgccgccctg

SEQ ID NO: 418826 - DNA, 545 bp, Oryza sativa
gctgtagttccgaattcacatcttgttacgtgtcgagttacgtgcgaaacagaaacgtcaggctaaccaataactggctcaagcgctgagggaaccagtcggctgctccgctgtcgcactctcgaccgatcagtcgttcgttctatttctcgtatttgccttcgtactggctgtcgccgatcgggggatgcattccatctcgtactcgcttgcgacgcgtgtctggcgacgggtatcatggcttgctggccggtaggacgctcggctacgcgtttctatggagcacaggacttatgacgcgcgactccactgatcgcgaaggttgtagggctcaacgaccacaacctgctcgcaagtgcgcgctgatacagaacgccatccttgaaggagcaacatcgttgcttttcaccgaataccaatacgttggcgttttcatgtggatattcgcggaggtgatcttccttttcctcggctccgtcgagggattcagcacaaagacccacccctgcacatacagtaaggacaaggagtgtaagcctgctctg

SEQ ID NO: 418827 - DNA, 445 bp, Oryza sativa
tttgtttgaatatagattatgtgatggtataatatcgatgggagtgcacaatcaacttaacaagtttatacaagcacagtacgtagaatcaaacccacaaccaaatccaaccaaatctttgtgtaacgaatcggtaaagattaattccggcatatgaacacggatcaaatcagcacaggcagccaatgcgaatgatctctgtaacaattctgtatatgattcaggcggaggaggcgcccttgagcttcttggcgatgccagcgaagtacttgccctggtggaaggcgtgctccagctccgcctccgacggccacctcgacccgtcgccggcgaacgtgccggcgccgtacgggctgccgccgtgcaccgccgccatgtcgaacatcttggcgccgaacgtgtagccgaccgggacgaacaccatgccgtggtgcgccagctgcgt

SEQ ID NO: 418828 - DNA, 437 bp, Oryza sativa
cgaacaagcatttcctcgaacacttcgccctccaccaccatggccgccgccgcctccaccctcgcctccctctccgccaccgcggccgcggccgccggcaagcgcctcctcctctcctccccctcccgctccctctccctctccctcgcctcccgcggccgcatcgccgtcatgccccacctccgcgctggcatcctctccgccgcaccgaggagggcggtgtcggcctcggccccggccgcggccaccatcgcggtcggggacaagctccccgacgcgacgctctcctacttcgactcgcccgacggggagctgaagacggtgaccgtgcgcgacctcaccgccgggaagaaggtggtcctcttcgcggtccccggcgcgttcaccccgacctgcacgcaggagcacgtcccggggttcgtcggcaaggtcgggga

SEQ ID NO: 418829 - DNA, 474 bp, Oryza sativa
gatgaaaaatatttttaacggttttcaacttcttccatgtcactatcgatgatgcttatttattgcagttttttttcactattttttccccatatatatgtcactgtaacaaaacaaaatgatcgattgattcatcatctcggattgtaatcagctgcatcccttggcgccgaagccgatcctctggttggcaacgtcgtacgcgacggcgaacgtcttctgctgcgtgttcccgaggatggcgatggacgagtcgtcggcgttgggcgcgaacgccaggcacgcctgcgacaccttggagacgtagagcacgccggtgaagtcgaggctgacggtggcgccgccggcgaacgccagctccaccgtgggtatctgcgccgtccggtggccggtgaagccgtagcacgtgtcgaggatggacagcgcgggcgccttcttgtactgcgccatggagcgcgcgaacgccgcgccgag

SEQ ID NO: 418830 - DNA, 504 bp, Oryza sativa
gttgatccttgcttggccacgaaaagagaccgggtttaggcctttttttttccactgggcatttggacagctcctattaacataggggtttaagcatagaagaaggggaaaaaaaacaatacgatatctgcagcatgtgatgtttcgcactatcacccactcgagcgcaaagccaacttgagtttggcagcagtacattagacagtgggttgctttatcgtcaattcagctctcagatgcaacacgccgtcgaggaagaagaggctgtcgtcagccatgaacgtcgaccatggtatcgcaaagagattcctgtaaccaaccgccttcccaccggtgaacgtgtagttacccttgtacttgctcacaaactctcctgacggtcttgtccttgcagcaaactcataatctactgtcacgctcattgagcccttctcttgcatccctaagaagagaccgaagcagtagaacgtactctgctgttccatgttacagtgtgctgagagc

SEQ ID NO: 418831 - DNA, 504 bp, Oryza sativa
cgtgctagcaaatatcaaaaagcagctccagcttcttctgatcgatcgatcgagctgagctataggcagtagctgctaattaagctaattaattgctaagcagtagtagagctagctaattaattaagatggccggcaagaaggtgcaggtttgtgcgctgttccttgccctcaatgtgctcttcaccatgcagatgggtgcagtagtgcaggcatgcgagccctactgccccacaccgacgccgccggtgacgccgcctccgtcgccgccgtcgggtggagggaataagtgcccgatcgacgcgctgaagctgagcgtgtgcgccaacgtgctcaacctgctgaagctgaagatcggcgtgccggagagcgagcagtgctgcccgttgctgggtggcctcgtcgacctcgacgccgccgtctgcctctgcaccgccatcaaggccaacatcctcggcatcaatctcaacatccccgtcgatctctctctccttctcaactact

SEQ ID NO: 418832 - DNA, 488 bp, Oryza sativa
tttgggttttttatttttttgggagtaatacccgcagtacaacatccacaaatttcacgccacatatcaaccattctatacaagtgacaactatcgtagtgtcatttccaatttcgttcaataaaaacggggacatgttacacaacgatttccctctcccctagtatttattattcatgaaatctgggcggcatcctgatgacgcgagactacatccttgctctttgcagctccagcttagcgattgtcccaagatgaacttcatcagggccgtcggcgatcctcagtgtcctagcagttgcccatagatgtgatagaactgtgtctgatgagagaccagcaccaccatgaacttgcattgccatgtcaagcactttcagggccatatttggagctgccaccttggccattgcaaggataccacgagctttcttgttcccatgtcggtcaagttgatcggctgcttccagcaccagaagtctagcctg

SEQ ID NO: 418833 - DNA, 478 bp, Oryza sativa
tttggtttttttttataggagcgaaacatttctattaccacaactttttaaggatggaatcgagtagcaatactttcaccccaaaatacagtttagcgacaatatcttagaaaagccgcttgctttgccgccatggctggcaagctgagcagagcagctaacacaaagaacacgagatcactataaaccaaacggcaacgaacgaagaaaatacagggtcttttttgtctgaagatacacgaagcggctcgttttcttttatttttagtctcctctcctgctcgatgatgggtgtatggcaatggcaatggcgatgggatcttggcttagctgatgggaaggggctcgccgatccactccttgaggcagtcgagcatggggtcgatgagcttgccctggctgatgccgaggaacaccttgatgcactcctcgccgggggacttgagcttctcgccggtgaggaatacgcagccgagct

SEQ ID NO: 418834 - DNA, 476 bp, Oryza sativa
ttttggtacattcaactgatcacagccggcctggagttcattcctgcttgaacaacaaaggtacagagatcatactacacacccagaacactgaagcacttgccatgcaggcagtacttctcttttatgaaaagatgatacagatcagttgcaactatgttacaccaccaccatgtacaacgaccggacaccgaaacatcatcctagtgcagagctgtgaggattgcagtggcgctctcaaccttgaaggttgcaccacagatctcttcttcatttgcaggaacagcagtcaccttgttctttgggttctcatagcacttcaagcctccaagagcattggaatagaagcaaccttgtgggaaaggtgcaagtgacttgccacatgatcctttaagcaggtcaatgtcgttagagaaggcaacagatccatcagcagttattccccagaacagaggcaccttgccctctggatcaga

SEQ ID NO: 418835 - DNA, 473 bp, Oryza sativa
ctttcatctccaattcggtccgaatttttccaaagtccaattgctcatcgcgcttcgaattcgttgccgagatccatccaatctttgagttaagacatgccgtcagagttcgtcgccgccaggaagaagccgccgccggagttgttgttcgccgccggtcggaagaagcagcagccgccgccgcctggcatggcgttcgtgccgtcggagttcgccgccgccggcgttggcaggaagaggcagcctgcgccgccggtggagatacgccgggtgtgggcgcacaacgtggaggaggaattccggatcatccgcaacgcgatcgatcacttcccgtacgtgtccatggacacggagtttcccggcgtgatccaccgcccgaccaagcaccccgccctgctcaccgccggcgaccggtacgacctcctccgtcgcaacgtggacgcgctccacctcatccaggtgggcatcaccct

SEQ ID NO: 418836 - DNA, 474 bp, Oryza sativa
tttgtttaactggttggcatgaaaaatatttttaacggttttcaacttcttccatgtcactatcgatgatgcttatttattgcagttttttttcactattttttccccatatatatgtcactgtaacaaaacaaaatgatcgattgattcatcatctcggattgtaatcagctgcatcccttggcgccgaagccgatcctctggttggcaacgtcgtacgcgacggcgaacgtcttctgctgcgtgttcccgaggatggcgatggacgagtcgtcggcgttgggcgcgaacgccaggcacgcctgcgacaccttggagacgtagagcacgccggtgaagtcgaggctgacggtggcgcctgcggcgaacgccagattcaccgtgggtatctgcgccgtccggtggccggtgaagtcgtagcacgtgtcgaggatggacagcgcgggcgccttcttgtactgcgccatggagcgc

SEQ ID NO: 418837 - DNA, 505 bp, Oryza sativa
tactttctcctccggctcttcttcagtatcgaatcctctcttctcctcgtgcccaccaccaccaccgtagcaatggcgggcaacgggccgatcaacaaggaggacccgctcaactggggcgcggcggcggccgagatggccggcagccacctcgacgaggtgaagcgcatggtggcgcagttccgcgagccgctggtcaagatccagggcgccaccctccgcgtcggccaggtggccgccgtcgcccaggccaaggacgccgccggcgtcgccgtcgagctcgacgaggaggcccgcccccgcgtcaaggccagcagcgagtggatcctcaactgcatcgcccacggcggcgacatctacggcgtcaccaccggcttcggcggcaccttccaccgtcgtaccaaggacggtcccgccctccaagtcgagctcctcaggcatctcaacgccggaatcttcggcactggctccgatggccacacgctgccgttcgagacggtgcggg

SEQ ID NO: 418838 - DNA, 482 bp, Oryza sativa
tttgttttttaattttttgggttttttttttttttttttttttttttttttttttttttattttttttttataaaattggtttaatgtataaaataagggttaaaaaaataattctatattagaaaaaagggaagaaaaaaattattacccacttaaacaaaaaaacaaatagagaaaggcagcaggacaaaaaaaaaagagtatgcttatcgaaaattcaggtttgaaaaacaaaacgtcggaaaaaaaaaaaaggttgacgtcagccaagaacgtttaacatggtatggcaaagagaatcctggaaccaaccggcttaccaacggggaacggggaaatacccttgtacttggtcacaaactctcctgacgggcttgtccttggagcaaactcataatctactgtcacgctcaatgagcccttatattgcatcctaaaaagagaccgaagcagtagaacgtactctggtgttccatgttac

SEQ ID NO: 418839 - DNA, 470 bp, Oryza sativa
gccgccaccggggaccactggggcgctgggtaccacggcggcggaggcgggcgcggcgggaagagcgccgcgggccccggcgtgcagtgcgacgtggacgtggtgtcgtggcgcgagcggcgggtgttcgcgtccgtggcggtggccgccgacgtcgacaccgtgtggcgcgtcatcaccgactacgagcggctcgccgaattcatccccaacctcgttcacagtgggaggattccatgcccgcatcagggccgagtatggctcgagcagagggggctgcagcaagcgctttactggcatatcgaggcacgcgtcgtgttggatctcaaggaggttccggatgctgttaatggacgagagctccacttctccatggttgatggtgactttaagaagttcgaagggaaatggtccatcagatctggtccacggtcatctagtgcaattttgttgtatgaagttaatgtgat

SEQ ID NO: 418840 - DNA, 480 bp, Oryza sativa
atacaggtaacatggaggtcctgttgagatatgggactaaggagcaacaaaagcagtggcttgttcctttgttggaagggaaaattcgttctggatttgcaatgacagaaccacaagttgcatcttcagatgcaacaaacatcgagtgttcaatatcaaggcaaggagatttctatgtgataaatggaacgaaatggtggaccagtggggctatggatccaaggtgccaaattcttgtattaatggggaagacagatttttctgcacctaaacataaacagcaatcgatgattttagttgatgtcaaaacacctggagtgcagataaggagaccgttgttagtatttggtttcgatgatgcacctcatgggcatgcagagattacttttgagaatgtgcgcgttccagccacaaatattctccttggggaaggccggggttttgagattgctcaaggaagactaggtcctggaagattac

SEQ ID NO: 418841 - DNA, 461 bp, Oryza sativa
aaaccatctggttttccctcttattattactgtacatctgccgaaagaaatcctttcttgcagacgacgaatcaacaaattttacagcggaggagaggagatcgtatcatctcgctgccaccagcggcagcgagggtgtcttgttgctgggcatgtccatgtcgagctccaggccgaagagcacgccttggtaggcctcgacgccatgcttgaggaagtagagctcccgcatccgccggaagacgtcccaggtgagcaagctgtcggaggcggcctggtggcaccgccccgccgcgcgcttcacctgcagcgccgccgacacgcgctccagcccgccgtacagctcgccgccggagtgccgcatcatgtgcttcacgtcgtacacctcgtcgccgaagaagacgcgcaccaggttcaggaactcggccatggacctcggcagcttccgccccatgaggagc

SEQ ID NO: 418842 - DNA, 520 bp, Oryza sativa
tccggttcttcttcagtatcgaatcctctcttctcctcgtgcccaccaccaccaccgtagcaatggcgggcaacgggccgatcaacaaggaggacccgctcaactggggcgcggcggcggccgagatggccggcagccacctcgacgaggtgaagcgcatggtggcgcagttccgcgagccgctggtcaagatccagggcgccaccctccgcgtcggccaggtggccgccgtcgcccaggccaaggacgccgccggcgtcgccgtcgagctcgacgaggaggcccgcccccgcgtcaaggccagcagcgagtggatcctcaactgcatcgtccacggcggcgacatctacggcgtcaccaccggcttcggtggcacctcccaccgacgcaccaaggacggtcccgcccttcaagtcgagctcctcaggcatctcaacgccggaatcttcggcactggctccgatggccacacgctgtcgtcggagacggtgcgggcgggcatgctcgtgcgcatcaacac

SEQ ID NO: 418843 - DNA, 391 bp, Oryza sativa
ctgtattttttgaccagggcggatgaggagtcggggggtgatatattcgttaccgccactggggatacggatataataagggaggaccacatgaggaatattacgaacacagcactaggtcgtacgattgagcagtctgatactgagagtgatacgcttcggccagggacctaccctggtgttaagcgcatcactatcaagcctcagatcgaccgctgggtcttccctgagaccaacactggcatcattgaccttgctgagggtcgtttcatgaaccttgggtgcgttactggtcaccccagttttgccatgttctgtttattcactaaccaggtcattggttatcttgagctgtggaaggagaagagcactggcaagtacgagaagaagg

SEQ ID NO: 418844 - DNA, 377 bp, Oryza sativa
gcggcgcgccagccaatgaccataaacccgtcccagtcccagcgatggatcagcgcaagggcagtggaagcgacgccaacggcggactggcggaggcgacggagtataggctgatgttctagtactattgctagggtttggatgatgacctaccctggtgttaagtcgcattacaatgaagccgtagaccgaccgctgggttaattccttgtgaccaatactggcattattgtccttgctgagggtagttttatgaatcttgggtgcgctactggtcaccccaggtttgtcatgttttgcttatttactaaccaggttattgcttagcttgagcttgtgaaggagaagagtactgctaagtaccttaagaaggtgta

SEQ ID NO: 418845 - DNA, 466 bp, Oryza sativa
ttttggttcaaacatataggagggactgaatcagtctttattatctctttcccaagacacagcaaggtatattttcaggattccagatacagtttcacaacttgcgtcaccagaatacatatcaccgtataacattttattcacgactacggctggtcgacacattacagttcatgtttgactgtccaacatagcaccaccactggattcctcctggccgatctacatgtttggtttcaggttgagacgtgaagccagcttctgcccaagggacgcatcacactgcgaccagtaggagatccagatgccacggagttcatgtgtaatacgaggatctgagagagcatcaacccaccgctggagaaaacgatcttgcctggcagggacaaatgaccggtatatctcaccagcctgtttgaaattgttttccttgcaatgacacactttcccgacagcctgttagaac

SEQ ID NO: 418846 - DNA, 469 bp, Oryza sativa
  unsure (1)..(469): unsure at all n locations
gaaaaactactagcatgagtggagagctgaagagagactacgagattggcgaggagatcgggcgcggccgcttcggcgtggtccaccgctgcacgtcgcgcgccaccggcgaggccttcgccgtcaagtccgtcgaccgctcgcagctggccgacgacctcgaccgggagctcgcggagctcgagcccaagctggcccagctggccgccgcgggcaacccgggcgtcgtccaggtgcacgccgtgtacgaggacgacgcgtggacgcacatggtcatggacctctgctccggccccgacctgctcgactggatccgcctccgccgcggcgcgcccgtcccggagcccgtcgccgccgccgtcgtcgcgcagctcgcggaggcgctcgcgcactgccaccgtcgtggggtcgcccaccgcgacgttaagcccgacaacatnnctctcgacgtcgtcgacgacgggatcga

SEQ ID NO: 418847 - DNA, 454 bp, Oryza sativa
ttggtttattttctacttaggcttagatcccaaagaacataaataacgtatgttaatacaggatcacgggaacaagcacagtttgcgaaacaagatacttggtcaaccaaaatttaatggattgcagggcagctgagctcgcattgatcaccgcatcttgtagtgttgtgttcttgacacttggcatctatgcccacttagggcgtagcagagcttaatgtcaatatctgggggattctttttattcggtgtaacagtcatactgcctgtgatggtttccccctcacagatggtcagtacattctccaggtacagaacagtttggttcccgtgagtggcttttgatcttgggcctgttgagaagcccatcatcttatggcatttggtgaaggacacattgaaataggcaacaagagcatggatataggcattacgctctgctactaacttaaat

SEQ ID NO: 418848 - DNA, 468 bp, Oryza sativa
ctttatgttttgacctgggaggatgtggtgtcgtggggtgatatattcgttaccactactggggatacggatataataatggaggaccacatgaggaatattacggatacacgacatacggttgtaagattgagcagtctgatactgatagtgatactgctacggatatggacgtaccctggtgtcaagcgcataactatcaagcctgagaccgaccgctgggtcttccctgagaccaacactggcatcattgtccttgctgagggtcgtctcatgaaccttgggtgcgctactggccaccccagttttgtcatgttctgctcattcactaaccaggtcattgctcagcttgagctgtggaaggagaagagcactggtaagtacgagaagaaggtgtacgttctttccaagcaccttgacgagaaggtggtcgtcctccacttgggcaagcttggtgccaggctgacc

SEQ ID NO: 418849 - DNA, 301 bp, Oryza sativa
ctgttaatgctaatgtctgtgacgagatggaagagctggggattgagaaggacactgtcacctacaactctttgattaatgggtatggaaagcagggacgcttggatatcgcttctatccttgttcaagatatgaggaaacggggggtagcttctagcggatcaactgattcaactttgatagatatatattcaaaggcagggatgcatggagatgcattcaatgtctacttggattctaaggagttaggcctaaagtcagatgttgatctattcagctctttcattgatacattggccaa

SEQ ID NO: 418850 - DNA, 474 bp, Oryza sativa
ataggggagtagcaagtacttttattagattgacaatatcccagacaaaccatactcataatatgccggtagtgcataatgaggacacaacttgcatcaagcaagaatcgctttaatagcaacaaatagtcttatgacttcaaatatagagaacagtaactggtagcttcagaggcttcccaatatctggcagcacacgatattgcatacgagcatctataggcagcttagaaaccgtgaatcttgatgttgtccttcttagcaatcccagcctgaactaggaacgtggcaacattcttacgctgatcaccttgaagctgaatgacctgcaaccacaaatttacgttaccagcacatcctcatagcagaaaactgagaaccagttaagcattgctaagtgcatacctggccaagctctggatcttggactacagtaccattgcagcagaactcctttttcagatccttgaggat

SEQ ID NO: 418851 - DNA, 508 bp, Oryza sativa
tttttatctctcccacaacaaatcacgccatggatccctacaagcatcggccgtccagcgggagcaattccaccttctggaccaccaactccggcgcccccgtctggaacaacaactccgccctcaccgtcggagagcgaggccctatcctccttgaggactatcatctgattgaaaagcttgcacagtttgacagggagcgtatccctgaacgtgtcgttcatgcaaggggagccagtgccaagggattttttgaggtcactcatgatatttctcacctcacatgtgctgattttctccgtgctcctggtgttcagaccccagttattgttcggttctccacagtcgtgcatgagcgtggaagccctgagacattgagggatccacgtggttttgctgtcaagttttacactagagagggtaatttttgatcttgttgggaacaatttgcctgtcttttttatccgagatgggatgaaatttcttgacatggttcatgctttcaagc

SEQ ID NO: 418852 - DNA, 450 bp, Oryza sativa
ccgtctccgcctccaaaaccctaaccctagctcgccgccttcgcgcgagctctcctccatggagaaccccaggccacaggctcctgcggggacccctcccatggctcccctccccgtgcccccgcccatcgcccccatccctgccccgcctccgcgagccccagcacccgccccggccgccgccgccgccgtcgcctcgacctccgcggcgggaggaggcggcgggggcggcggtgaggctgactacgaggtctccgatgaccaccgcgccgcgcgggagcgccacgagcgcgcggtgcatgagctgctccagcgccgtcgcgccttcgccatggccgtgcccaccaacgactccgccgtgcgggcgcgcctccgccgcctcggcgagcccgtcacgctcttcggcgagcgcgagatggagcgccgggaccgtctccgcgctctcatggt

SEQ ID NO: 418853 - DNA, 457 bp, Oryza sativa
ggttacgatcgtgtccgtcaaggcgcgccagatcttcgacagcaggggcaaccccaccgtcgaggtcgatgtgtgctgctcagatggaacctttgcaagggctgcagttcccagtggtgcatcaactggtgtctatgaagctctcgaattgagggacggtggatctgattacttgggaaagggtgtttacaaggctgtcgacaatgtgaactcggttattgccccagctctgattggcaaggaccctacgtcacaggctgagcttgataacttcatggttcagcagcttgatggaaccaaaaatgagtgggggtggtgcaagcagaagcttggtgctaatgcaatcctggctgtgtcactggccatttgcaaagctggagctatcatcaagaagattcctctgtaccagcacattgccaaccttgctggaaacaagcaactggttttgcctgtacct

SEQ ID NO: 418854 - DNA, 355 bp, Oryza sativa
tgcagcgcgtacgcatgctcgggtcctctttagcgggcgcggcgacggcgccgggggaacccacattgcggtgcgccgccgccgatggggcggctagtagcgggacaacatctggcgctggtgctggaacgggaatcaactcgaactcggtgctggtggcgctgctggactcgcattacacggagctggcggagctggtggagaaggccctgctgctccagacgctggaggacgccgtcggcaagcacaacgtgaccatcttcgcgccgcggaacgaggcgctggagcgtgacctcgacccgtagttcaagcgcttcctgctcgagccgaggaacctcaagtcgctccagtcggt

SEQ ID NO: 418855 - DNA, 487 bp, Oryza sativa
ttttgttttttttattatttaggctgggcagaaatcattaataccaaggcagaatgcccagcccaaaaccaatacaagagtgccaataataattaaacaaactcaacatctagtacttgactatagcaaactgaagcccgtaccccacacgaaacacaaacttcgatcactgatcgggcttcgctgaccaggccttgaccaatcttgacacgaacttaacaaagctgcagtgcagaaaaagcaccaaactaacacacgccaaacacttccaaattccaaccatggcctggtctcacacacgccccaattaagcgctgctcttgtgctcgccggtggcggcggccgcggtcttgtcttcctcgccggagcccttgtggtaaccgggcagtttctccatgatcttggccaggatacccttcttctccttcccatccgggctggtcacttcctctgtagccggcggtgggtgtgctggcccccgagtagt

SEQ ID NO: 418856 - DNA, 412 bp, Oryza sativa
tccgtctccgcctccaaaaccctaaccctagctcgccgccttcgcgcgagctctcctccatggagaaccccaggccacaggctcctgcggggacccctcccatggctcccctccccgtgcccccgcccatcgcccccatccctgccccgcctccgcgagccccagcacccgccccggccgccgccgccgccgtcgcctcgacctccgcggcgggaggaggcggcgggggcggcggtgaggctgactacgaggtctccgatgaccaccgcgccgcgcgggagcgccacgagcgcgcggtgcaggagctgctccagcgccgacgcgccttagtcatggccgtgcccaccaacgactccgccgtgcgggcgcgcctccgccgactcggcgagccccgcacgctcttttgcgagcg

SEQ ID NO: 418857 - DNA, 484 bp, Oryza sativa
ttttgtttttttaattattgaggctgggcagaaatcattaataccaaggcagaatgcccagcccaaaaccaatacaagagtgccaataataattaaacaaactcaacatctagtacttgactatagcaaactgaagcccgtaccccacacgaaacacaaacttcgatcactgatcgggcttcgctgaccaggccttgaccaatcttgacacgaacttaacaaagctgcagtgcagaaaaagcaccaaactaacacacgccaaacacttccaaattccaaccatggcctggtctcacacacgccccaattaagcgctgctcttgtgctcgccggtggcggctgcggcggtcttgtcttcctcgccggagcccttgtggtaaccgggcagtttctccatgatcttggccaggatacccttcttctccttgccatccgggctggtcacttcctctgtagccggcggtgggtgtgctggccccggagt

SEQ ID NO: 418858 - DNA, 524 bp, Oryza sativa
catggatgctggtctggagaaagctgccagaagtgcttcccaatcaaaggtggaaaatggctcaccttcagaaatcattttagatgattttgaagacttgagccctctatcagaaaatgatgactccactgttagtatcactgtagtcggagcatctggtgaccttgccaagaagaagatatttcctgcactttttgctctatactatgaagattgtcttccaaagcatttcactatcttcggatatgcacgcagcaagatgacagatgctgaattgagaaacatggtcagcaaaacactgacatgcagaatagataaaagggaaaactgtaatgagaagatggaagagtttttaaagagatgcttctatcattcaggccaatatgattcagaggagcatttcatggaccttgacaagaagctgaaacaacatgagggttccagagtttctaaccgtcttttctacttgtcaataccaccaaatatattccttggatgttgtaaatgtgcaagcaaatcagcat

SEQ ID NO: 418859 - DNA, 400 bp, Oryza sativa
tttgttttttttttttttttgttttttttttgggcaattgattttattttcaccatgcatacgtcaaataatcacagccataataacaaaagccatactctttgtattaaagatccaacaggttcagagaacacgcaagctcagaactacacatcaccaaaattggggcaagtttgggggtacatatccgctcatacaggggaggatttatttcttgattctacgagctttttaactagagttcgaccgggaagtcaattacggatagaaatgagcattctgtcttcacaaaacccatgcacacaacagtgggcatgaaccgcatgatattcaccatcaagtttagtagggctccacgggtgcgcggaacttggcaccagcgtagacaggagccgcacca

SEQ ID NO: 418860 - DNA, 501 bp, Oryza sativa
gtgtttttgaacatatactagattccttgacagcttggtatttatcatgggtgggctactcgatgctatcctactgcttctggtctcctgcgcgggagacagccatgccgcgttgccagcggagatgtactggaagatcgtgcttccgaccgctgccgactccgtaccgttggccaccgaaaagctcccggagatcctctcccagctctccgtccccgccggctccccggccgccgacgccatgagtgcgaggccgtgccgctcgccggcgaggcgaagcaatgcgcgacggcgctcgagtccatggtggagttcgccgcgtccagccttggcacccgcgacgtgcacgcagtgttcacggaggtcgacagggcagggccggcgccgaggcacgcgtacagggtggaggccgtgaggaccgtgccggtgtaccgcggtgacatggtggtgtgccacggtatggcctacgcgtacgccgtgttcgggtgccacacgaccacg

SEQ ID NO: 418861 - DNA, 376 bp, Oryza sativa
ttgttttgtaacttcaaagggggggatgcaaacccaggacaggggtaatcgcccctaagccgttcgatcgtaaattttctacaacgtcaagtagaagagttacatatgaaacatttcacaggctaagggctatgaggtgctacaactacaagatggcttcatgtagatgctgacaacttctaacaagttaattcagtgcctcagtccagctccatggcattatcttgtgccctgcttctgcaggaccaaatcttgatcgttctatcatgtgacacagacacaatctggtgtccatctccactaatatccaaactagtaacctttgactcatgggccaccaaactcttgactggttttgaatcacgagctgaccaca

SEQ ID NO: 418862 - DNA, 522 bp, Oryza sativa
gatttcactgaagcacgtccatgtagcaaaaaaccttgctgtattcctgggttgagagtagaaactggcaatcttgctattagttcatcgctggcttctgcaaagtcatttcgctctctatcatacaattcttctgctccttcattatattcaagccttttttcttgggagacagatgcatctttatcttgttcagatggcatatcaaggccaatcgatactatattcaaatttcataaagcaattcgcaaggacttagagtacctagatgttgaatctggaaagcttattgatggtgatgagtcttgtcttcgccagttcattggaagattccgtttattgtggggtctttacagggcacacagtaatgctgaggatgaaattgtttttcctgctttagaatcaagagagacattgcacaatgtcagtcactcgtacactcttgaccacaagcaagaagaacaattatttggagatatatctgatgccctcgctgagctatcgcagctacatgagaggttg

SEQ ID NO: 418863 - DNA, 466 bp, Oryza sativa
  unsure (1)..(466): unsure at all n locations
tttgtttttttattttttgtgttttttttttttaccacaaagttatttatagtctaatggttccaggccttgcaacctaagctaactgattgccttattttccatctgtcccactaactgagaaatgcaatcttacagaaatgcaatggcaaaaaaaaaaaaggggcgaaaatagatatcatctggctcatgccttctgttctgggggcaaatcaccccatctgacgttgtactttgctgcaagggagtgagcccctacaggaccgcggcttccataagggtatagctcaggggctatccgctttttttccaacttctttagtaagggagtgaagagctcccatgcggcattcaactcatcagaacggataaaaaggcttcggtctccttcaatgggatcaaggaagagcctctcataagcatctggcatctccttggagtaccttgctgcatagngaagattcaa

SEQ ID NO: 418864 - DNA, 496 bp, Oryza sativa
gtctcatttcaaacaagtcaagagcgaatagttcttgctgatctgttgtttgattactttagttctcgagaggctttagctgaatccatcgatcgatcatggaggatgagaggaacacggagagccaccagggtggcgaggctgcagagcaggtggaggtgaaggacaggggcctcttcgacaacctccttggcaggaagaaggacgatcagccggaggagaagaagcatgaggaggagcttgtcaccggcatggagaaggtctccgtggaagagccaaagaaggaggagcaccacgcccagggcgagaagaaggagagcctcctctacaagctgcaccgatccagctccagctccagctcgtagagtgatgaggaagaggaggtgatcgatgacaacggccaggtggtcaacaggaagaagaagaaggggctcatggagaagatcaaggagaagctgcccggtcacaaggaccatgcccgtgagcatgcttcttc

SEQ ID NO: 418865 - DNA, 490 bp, Oryza sativa
gtcacagttcaaacaagtcaagagcgaatagttcttgctgatctgttgtttgattactttagttctcgagaggctttagctgaatccatcgatcgatcatggaggatgagaggaacacggagagccaccagggtggcgaggctgcagagcaggtggaggtgaaggacaggggcctcttcgacaacctccttggcaggaagaaggacgatcagccggaggagaagaagcatgaggaggagcttgtcaccggcatggagaaggtctccgtggaagagccaaagaaggaggagcaccacgccgagggcgagaagaaggagagcctcctctccaagctgcaccgatccagctccagctccagctcgtcgagtgatgaggaagaggaggtgatcgatgacaacggcgaggtggtcaagaggaagaagaagaaggggctcaaggagaagatcaaggagaagctgcctcgccacaaggaccatgccggtgagcatgc

SEQ ID NO: 418866 - DNA, 500 bp, Oryza sativa
tgcacacccaccttaacaccgtcgaccccggatgacgccaggtaggggtgaagctggtcgcagacgtctagcacctcgcgcggttggacgaggcccaggccgagcacggagagggagtccatgacgatgcccggctggttcgccgttacccccggagactgcaccgggtacgccagcgccggctcgtaccggtccatcgccggcgccggcgccacgccgacccagtacccggccatggcgtgccacacgtacacctgccggacgccgtgctccccctttacctcctacaccagcatcctcagcaccggcgtgtcctcgccggcgccgacgttcttgctctggaacttgacgttctccttgatgcccgtgagcccgctggcgaactgggcgccctcctggacggcgaccgcggggtgttcgttcgtgttgtcatcctcgagcccatctgctgccagccgtcttccaaaataaggacccccccccccccccccccccccccc

SEQ ID NO: 418867 - DNA, 448 bp, Oryza sativa
agtggagattgttgagtatatcaggtctatatattggcagttctggttggagatagacactcacactgagccaagatggggagtttgcacaagttcagtgttattctcctcatgttatgttttgctacgttggggagcgctcagtatgtcaagtataaggatccgaagcagcccgtctctgttcgtgtcaaggatctgctcggccggatgactctcgctgagaagattggccagatgacccaaatcgagagggagaatgccacggcggagcagattgccaagtacttcataggtagtgtactgagtggtggaggcagtgtgcctgctcctcaggcatcagcttaggcttgggcttcaatggtgaatgaaatgcaaaagggtgccctttcgacccgactaggtattccgatgatctacggtatcgatgccgtgcatgggcacaataacg

SEQ ID NO: 418868 - DNA, 396 bp, Oryza sativa
acgattttgaggagggcaccagcgtttaggtaatgagcagttgttaattatcttcactagccttaattaccctgacgcaaagcactctctaatactcctcggcgctcgcataatcttgtatccctcatctcagattatgatcacctcgccgtgttagaaaaaagggagtaagttcgttttatcgtcggatttggtgagagttcgccggagtagaagaagatgacggtgacgccgaagatcacggtgagcgactggaggctggcggtgcgggggcggacggtgctgaccggcgtgccggagaacgtgacggcggcgcacgcgtccggcgccgggctcgtcgacggcgccttcgttggcgccgacgccggtgaggccaagagccaccacgttttcacc

SEQ ID NO: 418869 - DNA, 506 bp, Oryza sativa
tgatttgcttcagctgatcaagagctcttaattagctggctagtgattagctgcgcttgtgatcgatcgatctcgggtacgtagcaatggcgtccaacgcgttcgctctgttcctggccgtgaacctcgatgtgctcggggtggatagactctaaccgaagcagacccgtcgtgcccgacgccgacgccgttgaccccgacaccgtcaacgccgacgccgacgccggcggcgttcgggaggtgcccccgcgacgcgctgaaactgggcgtgtgcgccaacgtgctgggcctgatcaaggccaaagtgggcttgtctacggcagagccaagctgcccgctgctggaggggctcgtcgacctcgaggcggatgtgtgcctctgcacggacatcaggggctacatcctgggaatcaagcttaacctgcacatcgacctcagactcattcttaactactgcggaaagaccgttcccaccggttttaagtgtttagcctaaagcatatgca

SEQ ID NO: 418870 - DNA, 473 bp, Oryza sativa
ttttgttttttttattatttgtggtgggcagaaatcattaataccaaggcagaatgcccagcccaaaaccaatacaagagtgccaataataattaaacaaactcaacatctagtacttgactatagcaaactgaagcccgtaccccacacgaaacacaaactttgatcactgatcgggcttcgctgaccaggccttgaccaatcttgacacgaacttaacaaagctgcagtgcagaaaaagcaccaaactaacacacgccaaacactttcaaattccaaccatggcctggtctcacacacgccccaattaagcgctgctcttgtgctcgccggtggcggcggcggcggtcttgtcttcctcgccggagcccttgtggtaaccgggcagtttctccatgatcttgcccagtatacccttcttctgcttcccatccgggctgctcacttactctgtagccggcggtgggtgtgct

SEQ ID NO: 418871 - DNA, 434 bp, Oryza sativa
tgggtcggcattctttttctgcatcatcatcgtcgtcttcgtcttcttcttgttcagtagtgcagctgggtcatcatcagcgcccacagggtgaggaccctctcatcggcatcaaagcagcagcagcaggaggaggaggaataatgagaaagggcccgtggacggagcaggaggacgtgcagttggtttggttcgtgcggctgctgggcgaacggcggtgggatttcttagcaaaggtgtcaggtttgcgcggcggcgggtgatgagcatatgcgtgcgtgcatctaatctatcgattaattgttgatgatgtcgatcagatggatggatgcatgcatatgccgtacatagtagatttgatgatagtaactgacataaatataatgtatgcgtgcgatcaacgctggttgttggatcgtacgacgtgtgtatgg

SEQ ID NO: 418872 - DNA, 446 bp, Oryza sativa
tttggtttttttttttttttgggttttttttttttttttttttttttttttttggaaacaagggtgctacaatatattattggagaaacggcaccaaggccgtttttattattcatagggaacatcccaataacaaggggggacagagcaccaaccacacaccacattccactgaactcacccccaactaaatcaaactggaaaactcccaaattcaaacgaccttacttttttaaggaaaaagagcagtgcctaggaatgcaaagcatcctgaaaaatctctcttgttttttcatctctgaaacccgagaatggaaacaaagcaaagaaactccaatgctttcctttttcagaggctcaacctgagatgttggccagctcacttgtttgacggctcgccctctacggccaacgggacggtgctagccatggggcggtacttgggg

SEQ ID NO: 418873 - DNA, 486 bp, Oryza sativa
cccgtctcctccgcttcgctactctcctcgtcgtctccggctccggctccggtttccggcgagcggcggcgcgatcccgggcggcgaaggagggggaagccatgagggagatcctccacatccagggcgggcagtgcgggaaccagatcggggccaagttctgggaggtgatctgcgacgagcatggcgtggacgcgacggggcggtacgcgggggactccgacctgcagctggagcggatcaacgtctactacaacgaggcgagcggcgggaggtacgtgccccgcgccgtgctcatggacctcgagcccgggaccatggactccgtgcgctccggccccttcggccagatcttccgccccgacaacttcgtcttcgggcagtccggcgccggaaacaactgggccaaggggcactacaccgagggcgccgagctcatcgactccgtcctcgacgtcgtccgcaaggaggccgagaactgcgact

SEQ ID NO: 418874 - DNA, 464 bp, Oryza sativa
gtggccggcgcggagcgtctcgatgatgtgctgcacgtccaccttcacgccgtcgacgccgcacgacgccaggtaggcgtggagctcgtcgtagaagtcgagcaccttgcgcgggtggacgaggcccaggccgagcacggagagggagtccatgacgatgtccggctggttcgccgtcacccccggcgactgcaccgggtacgccagcgccgcctcgtaccgctccatcgccggcgccggcgccacgccgccccagtacccggccatggcgtgccacacgtacacctgccggacgccgtgctcccccttcacctcctccaccagcatcctcagccccggcgtgtcctcgccggcgccgccgttcttgctctggaacttgacgttctccttgatgccggtgagccggctggcgaactgggcgccctcctggaccgcgacggcggggtgttcgtccgtgtcgtcgt

SEQ ID NO: 418875 - DNA, 503 bp, Oryza sativa; identical to SEQ ID NO: 395066

SEQ ID NO: 418876 - DNA, 513 bp, Oryza sativa
tttgtttgtaacttcaaaacgagggatgcaaacccaggacaggggtaatcgcccctaagccgttcgatcgtaaattttctacaacgtcaagtagaagagttacatatgaaacatttcacaggctaagggctatgaggtgctacaactacaagatggcttcatgtagatgctgacaacttctaacaagttaattcagtgcctcagtccagctccatggcattatcttgtgccctgcttctgcaggaccaaatcttgatcgttctatcatgtgacacagtcacaatctgctgtccatctccactaatatccaaactagtaacctttgactcatgggccaccaaactcttgattggtttgtaatcacgagctgaccacagtgctgctttggtgtcataggacgaagttgccaaataatagccttccctgggttcaaacttgacatgtgagataagactcttatgtgctggtatagaatataacattcttttagtgctcaaataccatattcgacag

SEQ ID NO: 418877 - DNA, 410 bp, Oryza sativa
tttgttttttttttttttgggctacgatcgatatacagagaaactggatatagtaacagactacacagaagcttcacagagatgagaaaaccactaccaatacatgtcagaacttacaggtgatttagctcaaggagggcactcaaaacacttttcaagccttcagctactgaccaccagagacgtcttacaaaacgggactgcagcctgctacgcagcacaggtgacaaaacgaagcacggacgcaaacctcacccatacatccatcacgcacgtcagagaaagaaaaaagagcacagcatcacaaagacacaaaactcttcactggcaaaacaacctgtgaagggcaaatggggctcaatgctattcggcctcagcttcttcctcttcgtcttcgtactcttcatcgg

SEQ ID NO: 418878 - DNA, 491 bp, Oryza sativa
gttttagttcaaacaagtcaagagcgaatagttcttgctgatctgttgtttgattactttagttctcgagaggctttagctgaatccatcgatcgatcatggaggatgagaggaacacggagagccaccagggtggcgaggctgcacagcaggtggaggtgaaggacaggggcctcttcgacaacctccttggcaggaagaaggacgatcagccggaggagaagaagcatgaggaggagcttgtcaccggcatggagaaggtctccgtggaagagccaaagaaggaggagcaccacgccgagggcgagaagaaggagagcctcctcttcaagctgcaccgatccagctccagctacagctcgtcgagtgatgaggaagaggaggtgatcgatgacaacggtcaggtggtcaagaggaagaagaagaaggggctcaaggagaagatcaaggagaagctgcccggtcacaaggaccatgctcgagagcatgct

SEQ ID NO: 418879 - DNA, 540 bp, Oryza sativa
tcgtaagaggctcaccttccttcacccagagattgaggagttgctctacagcgaagttgacaacaacgagcacaagtttatgctgaaggacaggaacaagccaatcatcttctccatggctcgtcttgaccgtgtcaagaacttgactggtctggttgagctgtatggtcgcaaccctcgcctgcaagagctggttaaccttgtggttgtctgtggtgaccatggcaacccatctaaggacaaggaggagcaggctgagttcaagaagatgtttgaccttattgagcaatacaacttgaatggccacatccgctggatctccgcgcagatgaaccgtgtccgcaacggtgagctctaccgttacatctgcgacaccaagggtgcttttgtgcagcccgctttctacgaggcattcggtctcactgttgttgagtccatgacctgtggtctcccgacattcgcaaccgcctatggtggtccagctgagatcatcgtgaacggagtgtctggcttcacattgacccatacagggtgacaagg

SEQ ID NO: 418880 - DNA, 456 bp, Oryza sativa
ctgtgtcctgtagagaacagtcagttcagtcggcgaagcagatgaaaaagttagatcagaggagagctcagagctcaaagagttgggaagccatggcgggagggcagctcaacgtgctgagcacgctcgaccaggcgaagacgcaatggtaccacttcatggcgatcgtcatcgccggcatgggcttcttcaccgacgcctacgacctcttctgcatttgcctcgtcaccaagctgctcggccgcatctactacaccgacgattccaaggacacccccggcgcgctcccgcccaacgtgtcggccgccgtcaccggcgtcgcgctctgcggcacgctcgccggccagcttttcttcggatggctcggcgacaagctcggacgcaagagcgtgtatggtttcacgctgattctgatggtcgtgtgctcggtcgcgtccgggctctcgttcgggagct

SEQ ID NO: 418881 - DNA, 468 bp, Oryza sativa
  unsure (1)..(468): unsure at all n locations
ccgcgaaacgcacggcgtcacgagtccagcaaacagcaagagaagagaagagaagagaagagaacgcgtcccgcttccgactccggcgagagcgagaccgagagcgcgcggcggcggcggcggccggaggaggagaagacgatgggttgctgctgccggtgcctggagatcctctgcgccatcctcctcccaccgctcggcgtctgcctccgccatggctgctgcaccatggagttctggattagcgtgctgctcaccatcctcgggtacctccccggcgtcctctacgccgtctacgtcatcgtctccgtcgaccccgaccgcgaacgccgtcgccgcgtcgaccccgacgaatacatctacgtcgcctgaccatctgtggagtacttagtaggtgattaatttagctcctggaaagcatatccttgntcctagtcctattacctatatctgctcctgttccaccct

SEQ ID NO: 418882 - DNA, 485 bp, Oryza sativa
cccgcaaatacttattcatatgttttgacaacatttctcccgacgcatgctcattgtggcagacgcagctgaccacctagagcttttagttcaccattattatttagaccaagcatacgtcccaagatcagaacacatgcttacaagcgaaaatactaatagcctggctggctgcttcacagaataaccaaacgacaacctcaacagataaaaatgccacggaatgaaaacaaagcagcgaatcgtcaccagaagtcccatcttactcatcaaacactccatcattctcctgcaacgcatcctctccccaggggagaagattgcccagtttaccttccttaacaggagcagggttcaccatattctcagcctcgaagcagtgcagaacagatttgggcgacccaacagcaacaggtacgtcttcagtagcgtcgaagctctggtagatgaggaggccaccacagggcagcttctgctttaccatg

SEQ ID NO: 418883 - DNA, 494 bp, Oryza sativa
ctttcttgtttaagaactcccccccctcctcgctgcccggctccgtcgccgttttcttggagaggagaaatccgtaggctcagaggatttttggtagtcttgtttcgcgatattcgtgaagagggggggagctaaggggggattcgtaagatcagaattggatcacgcgggggcgcgctcgggatcgggggttccaaacacaggttcttcgttgaatttaagtggatgtactaatggagtcaaagggtggcaaaaagaagtctagcagtagtcgttccttgatgtatgaagctccccttggctacagcattgaggacgttcgacctgccggaggcgtgaagaagttccagtctgctgcttactccaactgcgcgaagaagccatcctgatagccctttcggcttctccatcctagtagtttaggatttcttgcaattccattttggcacttttcttctgacctatttctctggctgctgcttcctgattatcga

SEQ ID NO: 418884 - DNA, 437 bp, Oryza sativa
  unsure (1)..(437): unsure at all n locations
acatctattaattaaaccaaaacaactgtacattattattcagattacaaaacggcatttcaccatgcaaatcattttactggaaaagtaacaagcagaacacaccaaaatttccaattgtttatctaccaaaatataagaaggctgttctcttttccctattgagcccggccttatctttcaaagacaacttgctgtgatcaaagactaaaaacgttgatcctaatttagattgcactggtcttgaaaagtttgcctgtttcatttatgctgcaacaggctgcacaaaacctgcacccgagggggttatgtcctctgcggcatcttgttcattccttgacaagtacttgtcgacagctgcagcagcttgccgncccttggtgatggcccaaacaacaagtgattgtccacgtctgcagtccccggcagcaaaaatg

SEQ ID NO: 418885 - DNA, 486 bp, Oryza sativa
gttctcttttaaataagattccagagttcaatgaactgggtcaccataacagatggcgtgaagcactagatcgtctgcttgagacgaacaacttccctgaatttactggaagagtatgccctgctccctgtgagggatcatgtgttcttggcattattgaaaatccagtatctatcaaaagcatagaatgtgcgatcatagacaaaggttttgaagagggatggatggtaccgtggcctccacttcaaagaacaggaaagaaggttgccatcattggaagtggctccgctggtttggctgctgcagatcaactaaacaaaatgggccattttgttactgtgtttgaacgtgctgatcgattggtggtctgatgatgatgggagtgccaaacatgaagacagacaagattgacattgtgcacgccgtgtcaatttaatggcagaagagggcattacatttgtagtgaacgctaatgtaagcagtgat

SEQ ID NO: 418886 - DNA, 491 bp, Oryza sativa
tcgatctaatcccccaaaccaaaaccaaacgagatccctcatttccacctgggaatctctgcgcgcgatggccggaggcggcggcgcgggctcctccacgggcggctccggcggcggaggcggaggggggcgggagggcgactgggactgcggcggctgcggcaaccgcaactacgcgttccggtcgctgtgcaaccggtgcaagcagccccgcctcctggtcgaccccaacacccctcccgactccaagtggctcccccgcgccggcgactggatctgcaccggttgcagtaacaataattatgcatccagaaagaactgcaaaaaatgtggcctgccgaaggaggaagcagcaatgccagcattatcaatggcaggaatggctatgccagcttatgcaaattatattgctaggatgcaaggccttgctggctctaagatgaacatgaaacttgggatggctggcaattcagctttgcaacagcagctac

SEQ ID NO: 418887 - DNA, 397 bp, Oryza sativa
accagtctaaaagcagccttcttttactcttgccacataaacatattcagtttaactacacttttagcaccctgtgtggatgtcatgtgatgagaggcaggaccgactgacttgttcactcacgggattattcaagctgccaggctctttgaagctatctcgtacacattctctgatagcccattggctgacacgatcatctccagctgagccttagcaagagcttgtctgctctcatcatatcgcctccaccgagagaaagctgacaccatgcgggaggccacctgaggatttatcttgtctagctgtaaaacaacttcacccaagaacttgtaaccagagccatcttttgcatggaaatttacaggggaacccacaaaattctccaattagcgaa

SEQ ID NO: 418888 - DNA, 488 bp, Oryza sativa
cattaactcgccccccaaaattcctcctgcttggggtcgaaggcggcgaaccccatggattcctcttcctcctccgccgcacgcgccccaatccgattcaaccgccggcggcggcggcggcggcggcggtggcggcgatggaggtcggggacctgcacaaggtgtgggagatccgcgcgctcaagagaaagcccgacgagcccgccgcccgcgcgctcctcgaccgcgtcgccaagcaggtccagcccatcatgcgccgccgcaagtggcgcgtcaaggtcctctccgagttctcgccgaagaacccgaggctgctggggctcaacgtcggcgggggagtcgaggtgaagctgcggctgcggcacgcgggacgggactacgacttcatcccctacgaggaggtgctcgacaccatgctccacgagctctgccacatcgcgcggggcccccacgacgcgcaagtctacaagctctgggatgagctcccc

SEQ ID NO: 418889 - DNA, 418 bp, Oryza sativa
ctttgtgttgtagagaacagtcaggtcaccgggggagcggtagaatatgctagaccagtggagagctcagagctcaaagagttgggaagccatgccgggtgggcagctcaacgtgctgagcacgctcgaccaggcgatgacgcagtgggaccacttcatggagaacgtcatcgtcggcatgggcttcttcaccgacgcctacgagctcttctgcatttacctcgtcaccaagctgctcggtcgtatctactacaccgacgattccaagggcacccgcggagcgctcccgcccaacgtgtaggacggcggcaccggcgcagcgctctgcggcacgctcgacgagcagcttttcttcggatggctcggcgacaagctcggacacaagagcgtgtatggctttacgctgattctgatggtc

SEQ ID NO: 418890 - DNA, 312 bp, Oryza sativa
gttgaagcgcggcaataaaacattgcattgaattctgaacgataaacaccaggaaccggcgtttatttgaggcaagcactgcccaaaatgtaggaaaagggctgaaaccttagacatagtacacatccatggcaaacaaggaaagccaaatgacaacgtgcagaaaattatcaaaatcgaaagcagctgacggcttctgcccgctgaagaggcatagtttccccctccattaacttggatgggcctctctccatcgacaggccaaagggcacgggcgctggccaggcctgcggtatttcagagcatagaaca

SEQ ID NO: 418891 - DNA, 403 bp, Oryza sativa
ttactgaaatggaccgatgcatgtcaagctagctctgcttcacagtcgcggcgaacgcctgggtgccacctcatcgtatataccaatgagttgattgcactcttatctaggcacgttaaccagggaaagggaatgctccagcgtcaccagctgcttgcggagtctcgacgccttgatcgaagctgacaaaagaaaaatatgctcccgtgagaagacatacctccgggctgctcaggaagccattgtgctgccgccctgggttgcactggccatcaggccaaggcctggtgtctgggactacattcgggtgaatgtaaatgagttggcagtggaagagcttggggctcctgagtacttggcattcaaggaacagcttgctgatggacacaccaacagcaacttt

SEQ ID NO: 418892 - DNA, 365 bp, Oryza sativa
ttgccttctttgaggattttttgaccaactggggatgggcttatatttattagaggatccgtcttcggttcaaaataggggatacagtgtagttacatgatgttcattcttaatgctgggaccttgaaagaggtatcttagaaaactgaacagaccaaagggactagtacattgcatttaccaatataacacaacagaagagagcaaacattagactggagtagaattctattttgtagcctgggcaatgatgttgctcatagagctagctccctctttagctgcctctaccaatgaatcctgcgcagcaattagtcttgcaccatttttcttgctagattaccgaagcttaccagcgaggagaa

SEQ ID NO: 418893 - DNA, 440 bp, Oryza sativa
gaaaaaaaccaccagtttgatactattcgaaatcactgcaatgagtgagtgacacaatggagcaacaccaagagtgcactgcaaagccggttttgatccttacaccacacaaggcgagagggagacacacccgttgataatgttgttacaacatcgacatgtccatcgatatctgaggtgctacatggcgtacctctgagtccaggtccttgctgtgttctcgtacttgtgcctatctgtcttgtacatgtgggcgatctcagggaccagaggatcatcagggttcggatcagtcagcagggaacagattgacagcaacaccttggaaatggttagtgctgggctccattggttccttaaggatgtcaaggcaaatgctcccgttgctgttgatgtttggatggaaaaccttggtgcgaaacgccaccttgggtggtttg

SEQ ID NO: 418894 - DNA, 504 bp, Oryza sativa
ggctagcccagcgtttctttaaggaggaagagcagctataggcgaggcaggaaaagaagtgaaatctctccgttagacaggaagaggaaaagcaagggggaattggggatggcgtcaaagaggatacagaaggagctcaaggatctgcagaaggatccccctacatcatgcagtgcaggtcctgttggtgaagacatgttccactggcaggcaacgataatgggtccatctgatagcccatatgctggtggagttttcctagttaccatccacttccctcctgattatcccttcaaaccacccaaggtggcgtttcgcaccaaggttttccatccaaacatcaacagcaacgggagcatttgccttgacatccttaaggaccaatggagcccagcactaaccattttcaaggtgttgctgtcaatctgttccctgctgactgatccgaaccctgatgatcctctggtccctgagatcgcccacatgtacaagacagataggcac

SEQ ID NO: 418895 - DNA, 453 bp, Oryza sativa
ggttcccaacgcccgcgaaaccctagccgtcgcgctcgcccaccgccttcctctccccccctaccctaccccgagctcgccacccgatccgatcgaagatgcataagctggggagaggaagccgcgacaaggtgcagcagttcatgaccataactggtgcgagtgagaaggtcgcccttcaggccctgaaagctagtgattggcacttggaaggagcttttgattttttctacagccaaccacaaatttctctgacgaactctcggcatcttgaagatctgtacaacagatacaaagaacctgatgttgatatgatcatggtggaaggtgtatctcagttttgcactgatcttcaggtggatccccaggatattgttatgcttgtcatatcatggcacatgaaagctgccacaatgtgtgaatttactcgccaggaattcattgggggactgc

SEQ ID NO: 418896 - DNA, 352 bp, Oryza sativa
ggagagagcatcaattattccaagtgatcatttaatttaacagtacgttattacagtttttgacaatacaccaggaggggcagaagcagcactccatttatgcgccgaattttggtacagacacacacacacagagagattcacacagtcaattcagtccttgagatgagaataccatcagtatcggcgtagagccactccccgtcgcaaatcctggtccctgcaatggtcacaggcacatgcttctccccgatgcccttcttgtttgctttcatagggtgcgagttcagagctcggacaccaatgtcgcagccattgatctcatacacgtccctgatgcaaccattgacga

SEQ ID NO: 418897 - DNA, 515 bp, Oryza sativa
  unsure (1)..(515): unsure at all n locations
aggtgactaaaagcagaatttattataaggttctcaagagcgaaggccagagcacaagaatgctcatagcagtacaagacttaggttggatcatatgcagcataacaacacaatcctgattgcttgaacattcaacatccaggacacacataataacacaaatccttaaacgagcaaccaactgggcacacctcagcttattctgtggaccatggacgacaaacctgtgcctagaacaactaccttaagcaggaggcttcatcagtgaagccaccttctgggaagacggccttgccatcaggtcagtccaccaggccttcacatgcgggtatgcgtccaacacggatgcgtggggagtagcccccaagcatacagtgccagccacatggcttaggtccgcgacactgatgtagtctccagccaggtacttgcacttcgtcaggcgcgccttgtacacctncaacaccttcttcagcttcttaaggttctcctcaacaactttctcgtcgggggtg

SEQ ID NO: 418898 - DNA, 498 bp, Oryza sativa
tcgaccttccatccatccgcgcgcggtgcgtagtagcgagaagagaagggggggagggcaaagcgatggctccgatgaagctgtacgggtcgacgctgtcgtggaacgtgacgaggtgcgtggcggtgctggaggaggccggcgccgagtacgagatcgtgccgctcgatttctccaaaggcgagcacaaggcccccgaccacctcgccaggaacccctttggtcaggtgccggctttgcaagatggtgacttgttcctctgggaatcacgtgcaatttgcaagtatgtatgccgcaagaacaaaccagagctgttgaaggatggcgacctcaaggagtcagcaatggtggatgtgtggcttgaagtggagtccaaccagtacactcctgcactgaaccccattctttttcagtgcctaatccgtccgatgatgtttggggcaccccccgacagatagttgttggagagaaccttgagaagctgaagaggtgttggag

SEQ ID NO: 418899 - DNA, 465 bp, Oryza sativa
gtttacaatcaaggattgctatttgatgcgcatgctagaacagctttggcatttgtgacactccgaaatgatggtgaacgtgaatttatgttttatcgcaatccaagtgcagatatgctgcttgaagaaaaggaacttgaccttgatcttatcagaaaggcaaaaatcttccaccatggctcgataagtcttataactgaaccatgtaaaactgcacatattgcagctgccaaagctgctaaagatgctggggtgctaaattcgtatgatccgaatttgaggctcccactgtggtcatcagctgatgatgctagagatggtatactgagcatatgggaaactgctgatgttatcaagattagtgaagaggaggtttcctttttgacgaaaggggaggatccatatgatgattctgtaataaaaaaactcatgcacccaaatctgaaactgcttcttgtcactgaa

SEQ ID NO: 418900 - DNA, 495 bp, Oryza sativa
ctctcaaatccgtgacgctctctccacacgctataaatgtggtgctcgtgtcgccgagatgaggcttgaagcggctcgcttagtaataaaggcagcaaggcctagccactccccgcgcgcgcgccgaagattctcagcaagattctgagccgtcgtcggccgttcgtccgtccaaggaaaggagagccatggtgggaacctcctcctggtcgtcgtcctcgtcgtcgtcgctcggctccctcgacgacgacatcatcgtcgcgtgcgtcgtcaaggcagcggacgccgccgtcgagggggcgtgcgtcaagttcctctgcagctacggcgggaggatcctaccacgccacgccgacggcgcgctgcgctacgtcggcggcgacaaccgcgtcgtctccgtcgaccgctccctccctttcacgagttgcaacggaagctgagggagatgtgcgggtgggaggcggtgtgcctgcggtgccagctcccgacggagga

SEQ ID NO: 418901 - DNA, 451 bp, Oryza sativa
gaaactgaaatatactgtctttattccgacaaattgatatttgatacaagcaatcaactaaccacaaatataacccaacctttcagctgtatatatagaaatgttatttttttccactgtaattaatctttctgtgctgttcatcatcagatcatagccaaggggtgttgtagagaggggtgaccaccgccttggtgtggaggtacttctcaagggcgttccatgcccatgtccttgccgaagccgctcatcttgtaccccccgaacggcacgtcggggtcgaagccgaggtagcaattgatccagattgcccctgcccggatcgaccgcgaaaccgtgttcgcgacgtcgatgttcttggtgactttgcccgcagccaggccgtaccgggtgcttttcgccttttggatcgccttcttaaccgtcttgaatttcatgagggccatcaccg

SEQ ID NO: 418902 - DNA, 471 bp, Oryza sativa
gtttcttttatttctcctctgctcgcggcgatggcggcggcgaacggcggctacagcaaggggttcgaggtgccgaagctggagatcaagttcaccaagctcttcatcaatggccgcttcgtcgacgccgtctccggcaagacattcgaaacccgtgacccgcgcaccggcgaggtcatcgccaagatcgccgaaggagacaaggccgacatcgacctcgccgtgaaggccgccagggaggccttcgaccatggcccctggccaagaatgtccggctttgcgaggggaaggatcctgcacaagttcgcggacctggtggagcagcacgtggaggagctggcggcgctggacccgggtggacgccggcaagctgttcgcgatggggaagctcgtcgacatccccggcggcgcgaacctgctccggtactacgccggctcggcggacaaggtgcacggcgagacgctcaagat

SEQ ID NO: 418903 - DNA, 501 bp, Oryza sativa
gcgtgccgtccgtgacctgcgtcgtgctcagtggcctcgtcagcttcgcgctcgacgtcgcggaggagctcggcgtgccggcgttcgtgctctggggcaccagcgcctgcggcttcgcgtgcacgctccggcttcgccagctccggcagagagggtacacgccgctcaaagacgagagctacctgacgaacggttacctggacacgccgatcgactggatcgccggcgtgccgacggtgcgtctcggcgacgtctccagcttcgtccgcacgctcgacccgaccagcttcgcgctgcgcgtggaggaggacgaggcgaacagctgtgccagggcgcagggcctcatcctaacacgttcgacgacctcgagtccgacgtgctcgacgcgctcagggacgagttcccgcgcgtgtacaccgtcgggcccctcgccgtcgaccgtgcgaacgggggactgagcctgtgggaagaggacgcggcgtgcatggcgtggctcgatgc

SEQ ID NO: 418904 - DNA, 428 bp, Oryza sativa
ccctcatcgagcagtggaatgacttttcggccacagaggttgatgctaatattggaaaatggctctacccacggctaggaattgctccctatgttgctgtgagtgaggaagcagctattgctgctttgaagagatcattgggtgccctcaacacacaccttgcatcaaacacataccttgttggccattcggtgactcttgctgatattgtgatgacctgtaacctctacatgggctttgctcggatcatgaccaagagttttacttctgagttccctcatgttgagaggtacttctggaccatggttaatcagccaaactttaagaaagtcttgggtgatgtgaagcaggcagagtctgtcccaccagttcaaaagaaggctccaccaccaaaggagcagaagccaaaggaagccaagaaagaagct

SEQ ID NO: 418905 - DNA, 478 bp, Oryza sativa
tcggtttgccaaagcattccaccgagcaggagccttccgccctcttcgctcctgcatcgccctgcccttcgccgcaaccgccgccgcgaccactttctacaatccctactgctcccccgccctcgtctcgaccgcctcccaggtcctccaccagactcgcaacatgcactccaaggtcgtcatcatcggctccgggcccgccggccacaccgtcgccatctacgcctgccgcgccgacctcaagcccgtcatgtacgagggcttcctcgccctgggaatcgccgccggcggccaggtcaccaccaccgacgaggtcgagaacttccccggtttcaagatgatccagggcgccgacgctcatggaccagatgcgcgcgcagagcgaggcctgtggcaccgagatcgtcttcagaccgtggcaaggtcgacctctctcagagacctttaagtactggctcaaccccatggcgacgaccag

SEQ ID NO: 418906 - DNA, 502 bp, Oryza sativa
cggtatcaatatctcgaaatttcaatattattttggaaaataccatatttatcgattacgaatagaagaaagataacaattgagcacatctggcgctccatttcacacaattattttgcgagaagacagaagattaaaattgaattacaaattattttgctagatccccagcaagcatgatccatccagattattggtgcatagggccagcctgcgacatgttaagcaccatcccacaaatcttcgacgcacttgtaaggcccattgtcacagacgaactgcattccagtcagacccctctgctgggggagtttgctgattttgtctctctcttcctcagtgagctcccagtcgaaaatatcaagattctccttcatcctattttcattgtatgtcttcactaacaaaacatcaccctgctcgtacatccacctcaaacaaatctgagcaagcgtcttgcccttggtttgggcgatgtcgtgcaggacgccggagtccatca

SEQ ID NO: 418907 - DNA, 492 bp, Oryza sativa
gctatggcaatggcgaccatcccggaggtgcctgcgagcgcgctgctcccgaccatgccgcgcatcggcatgggcacggcggcgttccccttcacctcctccgaggaaaccacggcggcgctgctccgcgccatcgagctcggctaccgccacttcgacacggcgaggctgtacgcgacggagggctgcgtcagcgaggccgtcgcggaggccgtccggcgcggcctcgtcgcctcccgcgccgacgtgttcgtcacctccaagctctggtgcagcgacctgcacgccggccgcgtcgtgccggcggcgagggagacgctccgcaacctcgggatggactacgtcgacctgctcctcgtccactggccggcgaccgtggcgccgggcagctacgacttcccgttcccaaggaggagatggcgccggcgttcgacatggagggcgtgtggcgcggcatggaggagtgccaccggctgggcctcgcgcgcgcca

SEQ ID NO: 418908 - DNA, 486 bp, Oryza sativa
gctccatctttgaagttaatgggaatcctattacaaaacacatgggtttcttaattttcaagtttagagagtacaattgcactgtggagtattacaggtctcctttcatagtccttcaaggtcgtgcaccagctggagcccctgcagtcgtaaaatatacaattagagtagatgccatggattggatgtctggccggggtaagtggaaggatgctgatcttttgatctttaacacggggcactggtggaaccatgagaaaacaatcaaaggtggcgcctatttccaagaaggcaacgaggtcaaaatggagatgactgttagagatgcttaccaaagatccatgcagacattgtttcattggcttcgcaatgaagttaacacaaacaagacccagatcatcttccgtacatatgctcctgtgcatttcagaggtggtgactggaagactggagggacctgccacttggaaactctacagatgtaac

SEQ ID NO: 418909 - DNA, 481 bp, Oryza sativa
ggctagcttctgctccgacaagcgctctctctctctctgaactccggcgaggctcacgcgcgctccgaagcttcggatagcggcagtagtcagcgcattgatggcgaccgacgcggcagcgactgagcccgaggtggcggcggaggaggctgcggccgccgcgcctgagaccacggccaccgccggggattccaagccggcgaaggaggccaaggccaagaaggccgccgcgccgaggaaggcacgctccaccgacacccacccgtcgtacgccgagatgatctcggaggcgatcgcgacgctgaaggagaggaccgggtcgagccagtacgcgatcggcaagttcctcgaggacaagcacaaggaccacctgccatccaacttccgcaagcagctgctcgtccagatcaagaagctcgtcgccgccggcaagctgaccaaggtcaagaactcctaccagttgcccgcgacgcgcgcgccg

SEQ ID NO: 418910 - DNA, 471 bp, Oryza sativa
atcctgagcatgggtggatcatcagccaacatgaatcatggagatggattctcccccttcatgccgtctcctgcaccagccttcaactacgaggatgaccgggctcgcccgtctggtaaggctgttgctgggtggcttaagattaaggccgctatgcgatggggcatctttgtgaggaagaaagctgccgagagaagagctcagcttgtcgagctggaggactagcctagcggaggtcgtccggagtgttcatcttatggaccatgaggcctggccagtctggacagatggtaacacgcctctcttggctggtcttgtacaatagtactgttgaattttatgtttactgatgaaagaaatgggctcagcgatgcaccaggccaggatggtccacatgacgagcttattagtatgaaatggacacccgctgtttgatagctgcttgatggacattatgtaagttttgctagt

SEQ ID NO: 418911 - DNA, 410 bp, Oryza sativa
cattccgatagatagcaacaagcagttcaaacaccataaccaaagcgaactcaattcatggtaacatcacggacgaagaacacctaacactggatggatggatagagggcttctcgactcgagagagccactggacacgataacgactcgactcgatgataagatgattctgacacggatagctaaggataactggccacgatgggccccaccaatcagttcctccagttcccgccggagtcgccgccgtagccgccgccacggctgccaccgtagccgccgccgccgccgccacggccgccgccgtagccgccgccgccaccgtagccgccctcacggcgcccgtagccgccgccgccacctccttcgtagccgccgccttcacgaccgccgccgtagccgccaccgtc

SEQ ID NO: 418912 - DNA, 359 bp, Oryza sativa
gcttctcttctcccctctttaccttttcctcctcggcatggggtccgtggttcgtctagggtttagcgggttgagatggcggcgccggatgtcgagtaccgctgcttcgtcggcggactcgcctgggccaccgacgaccgctccctcgaggccgccttctccacctacggcgagatcctcgactccaagatcatcaacgacagggagactgggaggtcacgtgggtttggcttcgtgaccttctcctccgagcagtctatgcgcgacgccatcgagggcatgaacggcaaggagctcgacggccgcaacatcaccgtcaatgcggcccagtcccgccgctccggcggctgatgcggggg

SEQ ID NO: 418913 - DNA, 511 bp, Oryza sativa
gtctcgctcacccgccagttccaccaggccctcgacgcctccattgccaagaacttccctgagaacggcatcatcgcctgcatgagccaccacaccgacgccctctactgtgctaagcagacggcagtggtgagagcatcggatgatttctacccgagggatccggtgtctcacacgatccacattgcctcggtggcgtacaacagcgtattcctcggcgagttcatgctcccggattgggacatgttccactctcttcatcctgccggcgactaccacggatcggcgagggcgatcagcggcggccctgtctatgtcagtgatgcccctgggaagcacaactttgagctgctgaagaagatggtcttgcccgatggctccgttcttcgcgcgtggctacctggccggccaacccaggactgcctcttcaccgatccggcgcgtgacggcgtcagcttgctgaagatttggaacatgaacaagttcacccgagtgctccgagtctacaatt

SEQ ID NO: 418914 - DNA, 418 bp, Oryza sativa
aattcaacaatgtcatcatatattttcttctgaaagaaaaaatgtcaccatatattccatccttcaattgagccaagaatcagatatgtgcactatcaaatcctatacctctccaaattcttacaaccaacatatgctgctcctgaacatcataatggactcacaagagctcacattctgatgtgtttgtgatacagtgataccactacaatgaatcttacaactcaacaacaatcttgtgaaccctttccttgggcatggtctccaggtcaaggatcaccagcccagatgaggaatcataggtgaactccacctgagctgagcctagcatgcactttcttggcctgactgaagagtaggcaccaaactttccacattccctcactttcatgcagaccaatccgatggcctgggagct

SEQ ID NO: 418915 - DNA, 463 bp, Oryza sativa
tcgcttataatgactttcgtgaaagtaatcgagaatgaagcgttctttaaaagatatcaagtaaaattccgtcgtcgccgtgaaggaaaaactgattaccgtgctcgcaaacgtttaattgcgcaagataagaacaaatacaactccccaaaatatcgtttagttgtacgtttgaccaacaaatttgtcatctgtcaaattgcttacgctgaaatcgatggtgataaaattttagcatcagcttattcatctgaattaccacgttacggattaaatgtaggattaaagaactatgctgctgcatactgcacaggtttacttgttggacgtcgtttacttcaaaaacttggtttagatcaagattatgaaggaaacaccgaaattaatggtgaagttgtcaagactgagatcaatggtcgcacatacttcgtcaatgaagttgctgatgataaacgtccattcc

SEQ ID NO: 418916 - DNA, 494 bp, Oryza sativa
gcttgatctagaaagacttgtgttagctgcaggtcctatcggcctcatgcaagcatgccttgatgtagctgttccttatgttcgccaaagagagcaatttggccgtccaattggtgaatttcagttcatacaggggaaattggcagatatgtacacctccttgcagtcatcaaggtcatttgtttactcggttgctagggactgtgacaatggtaaagttgaccgcaaggattgtgctggtgtgattctctttgctgctgaaagggcaacccaggttgcacttcaggcaatacagtgtcttggtggcaacggatacataaatgagtacccaactggccgattgctgagagatgcaaaactgtttgagattggagccggtactagtgagataagaagaatgataattggccgcgagctcttaaagaggagtgaaactattattttggagccaggtatctgatatgtataacttggggagagccccattcgatggc

SEQ ID NO: 418917 - DNA, 469 bp, Oryza sativa
cgacgggttcgactgcaagcgatgcacgcgtgtcggacgagccggtctactgcggcggcggctgcgtctgcccgaagccggtggtggagaagggcggcggggtggtggccaggcggttcgggtgggcggagatcgagtcggtcacgggcggattctcgtcccgggtgatccggcagggcgggtttagcaccgtgtacctcgcgtggctcacctcctcccgcctcggcgccttcaaggtgcagcgcagcatcgagcgccttcaccgcgccttctgccaggagcgcgacgtgctcctcttccttcgtcacccccacgtgtttcgccttctcggttactgcgacgaacgagatgagggtgtattggggttcgagtacgcaccgaacggggacctccacgagaggcttccccaccggagcgggtgtaagagcccgacggtgctgccgtgggctccgggcatggccgaagggtt

SEQ ID NO: 418918 - DNA, 472 bp, Oryza sativa
ctcttcgctccctcgcgccgccgccgccgccgccgccgcggggaagagctagccctagaggagaagtgggggtgagttgggagagaggagagggggctagatgttccggtacgagaagggcggtgacgccaaggcggggacctagggcggtgcgagggagctctacccggggatgacggagccgcctgagatgcggagggcgcttattcggaagatctacgagattctctccatgcaggttctgctcaccgccgccgttgccgacgtcgtcgacaaggtcccggccatgtcccactattttttattcttccaccccggcctcggaccttacatgttactcatcattcttccctttatcgtgctctgcccgctggtctacttaccaccagaagcaacctttcaacctgaatcctgctcggtcctctttaccgttatcataaactatgtggttgggatgacatgcgcctttacc

SEQ ID NO: 418919 - DNA, 495 bp, Oryza sativa
ggttaggttatgttctgatttaccatggcatgttagtcttgaagttgatggaaagaacgtcgaaattccagaggacgcagaaggtgtgattgttctgaacattcctagctacatgggcggtgttgatctttggcaaaacgacaatgaacatgatgatgattttggtttgcaatccatgcatgacaaaatgcttgaggttgtctgtatatctgggacgtggcatctaggaaaactgcaggtgggactctctagagcacacaggctagcccaagggaaagttataaggttgcatctccacagttcattccctgttcaggttgatggtgagccatggatccagccacccgggtgccttgagatatctcatcgtgggcagatgttcatgttgaggaggacatccgaagaacccaccgggcatgccgctgctatcatgagcgaggtcctcatgaatgcagagtgcaatggtgtgattgatgctgctcagaagagattgct

SEQ ID NO: 418920 - DNA, 374 bp, Oryza sativa
aatgctgacacaaattaatttatttattgcaaaatagtttcctttccttttttttttccatttggttctcctggaagtcggagtaaataaaaagaaaaaaacaacaaaactttggtactgaaaaacgggctgaaagcctgtaacaacttaaaaaggaacataaataaacttattacagaatatgccggctaaaccttgtttaactcaaagaaaatagcgtgccaaacacatcatattaaactttcggcattgttgaagggttgaaaggagtggatggttcaacaagcgagatatcgggtcagccaaacttgcagggctgctgttgaacccctggacaggctttccttccatgcgggatgcatgcaaagattttc

SEQ ID NO: 418921 - DNA, 496 bp, Oryza sativa
ccgttcgccccctccttcatcctccggtagcagtcatggcgtcgtcggcgctaatctgcgacaccgagcagtggaagggcctccaggcgcacgtcggggcgattcagaagacgcacctgcgcgatctgatggatgatgccgagcgctgcaaggcaatgacagctgagtatgaaggcatatttctggattactcgaggcagcgtgcaactggcgagaccatggagaagctgtttaaattggcagaggcggcaaagctcaaggagaagattgagaagatgtttagtggtgacaagataaatagcacagagaacagatctgtgcttcatgtagctctaagggctccaagagacgaagtaataaaaagtgatggggtcaatgtggttcccgaagtttggggtgtaaaagataaaatcaagcagttttcagaaacttttaggagtggatcatgggttggggcaactggtaaagcattgacaaatgttgtgtcagttggaat

SEQ ID NO: 418922 - DNA, 429 bp, Oryza sativa
acgcttttccttttctacacgaccagttcctggtttctgctgccttccctcggtctggatcaacaagaggaggtcgtccaatggcgagtggtgggagcagcaatgccgggagcctgacgcagtggctgagggagaaggggttcgacgaggaggccatcgggcggatgtcgagacggtgcaagaaccttcacggccttgacgccggcgaggcctccggggtgtgggactacctcctgaacgtcgtcaagatcgagcggcggaagctccggtacgtggtcaccaagtgccccaaggtgctcaccctgtccgtcgacgacaagctcgtccccacggtgcagtgcctcaccacgctgcaggctaagcccggcgaggttgcgcaggccattgtcaagttcccccagatactgttccacagcgtggaggagaagc

SEQ ID NO: 418923 - DNA, 507 bp, Oryza sativa
agatacataagaacagttatgcaatcaaccggtataatacaggcccaagttcaggctatctgataaggaatacaaatgttgtttctttagacaggccttaagaaaaattgtcactataacaataatccatgctcattcgcccaacaagtgggcataaaattaatagatgcacaaagcaaggggatttggcttttctagagctaccgatcttcagatgccagcattgataaattgctctgagctcttagtagggaggatccggattaaatgccaaggattccctccagatgagttcttttatatgttcttcagtaaaggatggttgctcaaaatcaaagctgaaaggtgctgggcaggtgggttcttcattgatgtcatgaagagaagccaagtatgggtgatgaagagcctcatcaacagttatccgtctgcttgggtcaaacaccagcattttctctaacagatcgactgcaccagcagacatgttgcggaagcgcaagcggaagt

SEQ ID NO: 418924 - DNA, 500 bp, Oryza sativa
  unsure (1)..(500): unsure at all n locations
aactactagtcgcggcgaccaagagccaaaccctacgccttctcccctccccctccacctcgtcctccccgcgagcggcggcggccatggattcctcctccggcggcgcgggcggcggcggcggcgcgcagatcaaggggatggggacgcacgggggccgctacgtgctgtacaacgtgtacgggaacttcttcgaggtctcctccaagtacgcccctcccatccgccccatcggccggggcgcctacggcattgtctgcgcggctgttaactcggagaacggcgaggaagttgccatcaagaagattggcaatgcattcgacaaccatatcgatgccaagcggacactgagagaaatcaagctgcttcgccacatggaccacgagaatattattgccataaaggacataattcgccccccaagaagagacaactctaatgatgtctacattgcttctgagttgatggatactgatctncatcagatcatacgctcaaat

SEQ ID NO: 418925 - DNA, 406 bp, Oryza sativa
tcggatatagtgtcatgctatgtttctgacgatggttcagctatgttaacttttgaggctctgtcagaaactgcagaatttgctaggaagtgggttccgttttgcaagaagcacaatattgaaccacgagctccagagttttactttgctcaaaaaatagattacctgaaggacaaaatccaaccttcctttgttaaagaaaggcgggcaatgaagagagagtatgaagaattcaaggtacggatcaatgctcttgttgcgaaggcacaaaaagtacctgaagaggggtggaccatggctgatggcactgcttggcctgggaataacccacgggatcaccctggcatgattcaggtgttcttggggcacagtggtgggcttgacactgatggtaacgagttgccac

SEQ ID NO: 418926 - DNA, 480 bp, Oryza sativa
acggttttggcttcgttgtgatttaccatggcatgtgggccttgtagtttatggaacgtacgtcaaaattccagaggacgcagaaggtgtgattgttctgaacattcctagctacatgggcggtgttgatctttggcaaaacgacaatgaacatgatgatgattttggtttgcaatccatgcatgacaaaatgcttgaggttgtctgtatatctgggacgtggcatttaggaaaacttgaggtgggactctctagagcacacaggctagcccaagggaaagttattaggttgcatttccacagttcattccctgttcaggttgatggtgagccatggatccagccacccgggtgccttgagatatctcatcgtgggcagatgttcatgttgaggaggacatccgaagaacccaccgggcattgccgtgctattatgagcgaggtcctcttgaatgcacagtgcaatggtgtgattgatgc

SEQ ID NO: 418927 - DNA, 490 bp, Oryza sativa
gattaaaagcacttcaaatttaggaataacatcaaaccaccggataaaagggtcagattctgaatatcaaaattgcaagattttcttgatacacttcctagtgcaaaataagcttactttaaaatatcatccaaacacagtgcgctaacaatgagctcatggaactagttcatccttctgatgagttcgttgatgtagttctcacggttaccagcatcaccaccctcaacgtagtggttcctcttcttcttcagcccacccagtggtgccttcagcttgaatggccagaggaagttgttggcctccttgaaatgtgggccaacagtcatgatctcatgaacaagatcctcaatgcagatgatgtcatgcttacccaaaccctcctcgatgactttgttgtttgtaagagggattctttgcttgttgagctttccatagcccctcttgtagatcaattcacggacactcttcaaattgggtacccatatgc

SEQ ID NO: 418928 - DNA, 495 bp, Oryza sativa
ttgcgtttccccactccccgtctcctcctccctcacgcagctcgtcgagatggcgtccgaggcggccaaggtggtggtgccggagtccgtgctccgcatgaggaagcgggaggaggtgtgggcggccgcgagcaaggagaaggccgtcgccgagaagaagaagtccatcgagagccgcaagctcatcttctcccgcgccaagcagtacgccgaggagtacgaggcccaggagaaggagctggtgcaacttatgcgtgaggctcggatgaagggtggtttctatgtcagccctgaggaaaagttgctgtttgtggtccgtatccgtggtatcaatgccatgcacccgaagaccaggaagattttgcagctcttgcgtttgaggcagatctttaatggagtgttcttgaagggcaacaaagccaccattaacatgctgcgcagggttgagccatatgttgcatatgggtacccaaatttgagagtgtccgtgaattg

SEQ ID NO: 418929 - DNA, 497 bp, Oryza sativa
ttcggcgtggtccaccggtgcacgtcgcgcgccaccggcgaggccttcgccgtcaagtccgtcgaccgctcgcagctggccgacgacctcgaccgggagctcgcggagctcgagcccaagctggcccagctggccgccgcgggcaacccgggcgtcgtccaggtgcacgccgtgtacgaggacgacgcgtggacgcacatggtcatggacctctgctccggccccgacctgctcgactggatccgcctccgccgcggcgcgcccgtcccggagcccgtcgccgccgccgtcgtcgcgcagctcgcggaggcgctcgcgcactgccaccgccgcggggtcgcccaccgcgacgtcaagcccgacaacatcctcctcgacgtcgtcgacgacgggatcgacggcggcggcacgccgcgcgcgcggctcgcggacttcgggtcggccgcgtgggccggggagagcggcggcagcgcccagggccctctggggacgcccca

SEQ ID NO: 418930 - DNA, 497 bp, Oryza sativa
gtcactcatagaagtaataggtgatcctgaataaaatctctgaatgtatcaaccaacatacagtcatatatgatctgaacagcagtaagtaagccgtacccaaaagaaaggggaaaaaactaagaagaacaagacatggatcgataatatgtgcatgacaagcgctagctacaagggctagaagatatgtaaccacctaaaccacagcgatgtacagcaacatccggcgagctaatccctcatcaacaaatcgaaagaaacaaaagaatccatccgtccatactggaagcagtgctggctaatagtaatccccaaatgcgaagcggaaccaaccatcgaaatcagaaccagactttgcagtcggtgcgctggaatgcgggggcgttgggggcggacgctgggacggtgatggggcagctgatcttggccttgggtccgggaaccttgaaggcccagaccttgaccctgagcttggcgttgagcttgacctcgatgtc

SEQ ID NO: 418931 - DNA, 451 bp, Oryza sativa
  unsure (1)..(451): unsure at all n locations
gcttctgttcctcctcctccacttgttgttcaattccccccccccctctctctctctctctctctccgtcgcagatctcggcaagggggcaacaaggcaggaggcggcgatgggttcggcgagccgcgcggtgtcgtgcctgtgctgcccgtgcaagtgcctggcgtgcggcctcttcagctgcctctgcagcatcctcatctccctcctcgtcaccctcggcgtcctcgccctcatcttctacctcatcttccgcccccacatgatcgccgccaccgtcgactccgccgccctcacccagttcaccctctccaccaactccgccctcgcctacagnctcaccgtcgacctcaccgtccgcaaccccaacaagcgcgttggcctctactacgacaacgttgagtccctcgccctcttcgacggccagcgcttcggatacgcccccctcgac

SEQ ID NO: 418932 - DNA, 413 bp, Oryza sativa
ggcactcatagaagtaataggtgatcctgaataaaatctctgaatgtatcaaccaacatacagtcatatatgatctgaacagcagtaagtaagccgtacccaaaagaaaggggaaaaaactaagaagaacaagacatggatcgataatatgtgcatgacaagcgctagctacaagggctagaagatatgtaaccacctaaaccacagcgatgtacagcaacatccggcgagctaatccctcatcaacaaatcgaaagaaacaaaagaatccatccgtccatactggaagcagtgctggctaatagtaatccccaaatgcgaagcggaaccaaccatcgaaatcagaaccagactttgcagtcggtgcgctggaatgcgggggcgttgggggcggacgctgggacggtgatggg

SEQ ID NO: 418933 - DNA, 494 bp, Oryza sativa
gcatcgtctcctcctcctccacttgttgttcaattccccccccccctctctctctctctctctctccgtcgcagatctcggcaagggggcaacaaggtcggaggcggcgatgggctcggcgagccgcgcggtgtcgtgcctgtgctgcccgcgcaagtgcctggcgcgcggcctcttcagctgcctctgcagcatcctcatctccctcctcgtcaccctcggggtcctcgccctcatcttctacctcatcttccgcccccacatgatcgccgccaccgtcgactccgtcgccctcacccagttcaccctctccaccaactccgccctcgcctacagcctcaccgtcgacctcaccgttcgcaaccccaacaagcgcgttggtctctactacgacaacgttgagtccctcgccctcttcgacggccagcgcttcggttacgcccccctcgactccttctaccagtccaccgaggcatgcaccaagctcttccccg

SEQ ID NO: 418934 - DNA, 470 bp, Oryza sativa
tcgcttctcctccgcatcccccatcccctcctccccggcggcggcggcggcgcggaggcggcggcacgggagcggctagtggtttcgtcggcggaggcggaggcggggccaagatgttcgggcgcgcgccgaagaagagcgacaacaccaagtactacgagatcctgggggtccccaagaccgcctcccaggacgacctcaagaaggcgtaccgcaaggccgccatcaagaaccaccccgacaagggcggcgaccccgagaagttcaaggagcttgcacaagcttatgaggtattgagtgacccggagaaacgtgaaatctatgaccaatatggtgaagatgccctcaaggaaggaatgggtggaggcggatcccatgttgatccatttgacatcttttcatcattctttggaccttcttttggtggtgggtggcagcagcaggggcagaaggcataggaggggagagga

SEQ ID NO: 418935 - DNA, 340 bp, Oryza sativa
cttcgtgctgctgacctaagagatgttagaacaccacaacacggagcaaaccaggttgtgcctgcgtgtagtggaggccttcctccagaagaaactgctcgacggcgatgggcagcctggcggtgcgagaacccttggtgtgatgacctgtcccgacacatatcatgacttgcatcctctcacctgtagccctcgcggtgctcttaagagtaccgagctcgaccttaagtatatggaatgcttcgttcacatggagaccatgtagatcgatcagacggttcgctccctcgttgcgaagatgggtttcccttgtcgataaaatagcttcttttgctttctc

SEQ ID NO: 418936 - DNA, 496 bp, Oryza sativa
tcgcttttcccgtattgtgaattctaaccatttccgtagattgacaaatttgatagaggataagaaagtcgcccaaaagattgtatatggtggccaaacagatgagaagcaactaaaaatagctcctactgtgttgttagatgttcctcttgatacaacactcatggcagaggaaatttttggtcccttacttcccattgtaacagttgacaagattgaagatagcatccagttcatcaactcaaggaccaagccacttgcagcctatcttttcaccaaggacaagaaactgcaagaggaatttgtgtccaatgtcccagcaggaggaatgcttgtaaatgatgttgccctgcatctcgccaatccgcacctgccatttggcggagtcggcgacagcgggatcggctcctaccatggcaaattcagcttcgattgtttcacccacaagatggccgtcctgatccgcggcttcggaggggaggcaactgctaggtac

SEQ ID NO: 418937 - DNA, 463 bp, Oryza sativa
acagaaatcacagtacatatatagatgtacgtacacacatacactggtttggaataaggcgcgcggccgcggcggcgaaattgtgggtgagcaacgtatatacgtgtacgtacgtacatccttgctcatcttattgtaccgtatatatacgtacgtagtagccagtatttatttagtggtacgtacgtacgcatggattattaataatttgggggtgattaataattaatcagttgcagtagtagccctgctgctgcggcatcctggcgtagccgtactgctgctccttggcgccgtagctggcctgcttctgctcgcggtgctcgtggtaggcgtagccgccggcgcccaccgccgtcaccgacgtcacgccctgctcgatcctgtgcctctgcgcgttcgccgggttccttttttgcctggtgcccctcatagagagcgaaggcgccgctggcgagggcgc

SEQ ID NO: 418938 - DNA, 467 bp, Oryza sativa
tcgctttccttgcaccaccacctgatcagagaagtagctagctgcaggagagaaaccgaccaacaatggcggagtactactccagcaccgtggacgagtgctacgagaccaccggcaggcagcacggccacgggcacggccacggtcacgggcacgggcacgggcatggtggcatgagggtggagtcccacaccgacgactactacagcgagggcggcgagatcgaccgtgggaggaggaacaactccatgcactcgcaggagtacctgatgaggcagcagagcggccatggcggctacggctacggcggcggccagcagcaggagtactacaagcgggaggagcgcgagcacaagcagcgcgagcgcgtcggcgagatcggcgccctcgccagcggcgccttcgctctctatgaggggcaccaggcgaagaaggtacccgcgaacgcgcagaggcacaggatcgag

SEQ ID NO: 418939 - DNA, 490 bp, Oryza sativa
tcgctttctcccctcgccgccgccgcgacgcgacgcgtccccatcaccgacatggcgaagccggcgccggcgccggcggccggggcgcgggaggacgaggacgcgccggcgctgcggaggcgcctgcgcaggctcgtggcggcggccaccgccggcgccgcctcggagtccgtgctcgacgaggccgccgcggcgctcgcggcgctgcgggatgcggaggtcggcgtcgggaggaagggcgccggaggaggagaggaggcggccgccgccgccgtcccggcgctgttcctgtgcccgatctcgtccgggatcatgagggaccccgtcgtcatcgagtccggacagacctatgatcgtcgttccattcaggagtggtttagtgcaggaaaccagatatgcccgcagactcaacaagtgctctcacacacaattgtcattcctaaccaccttgttcgtaccatgatctcacagtggtgcacagaaaatgggc

SEQ ID NO: 418940 - DNA, 400 bp, Oryza sativa
gaacgataaacaccaggaaccggcgtttatttgaggcaagcactgcccaaaatctcgcaaaagtactgaaaccttagacatagtacacattcatggcaaacatggatgccaaatgacaactacggaaaattatcaaattcgaatgcagctgacggcttctcctgctgaagatgcatattttcccctccattacttggaagagctttgttcatcgacagccaatgggacggcgctggccaggctgcggtatttcagagcatagaacatcttaatgtaacggcgagtcttgcgcctctcaaggttgcttacgtacttccagaattcgtatacaccagtcaaggtcatcagcctttcagagtacagcttttcaggtgtacttttcgtaaattctttgcagacc

SEQ ID NO: 418941 - DNA, 223 bp, Oryza sativa
acgctcttaccacttttggttcctgaaattgagtcatggctggggggctagctcgcctccacaggctcctccaacacctccgtgccaccacctttggttatcccaacaaggtgattgcgcccctctcttggagtgatgttaaccaggaaaagggaatgctccatcatcaccagctgcttgcggagctcgatgccttgatcgaagctgacaaagagaaatatgc

SEQ ID NO: 418942 - DNA, 416 bp, Oryza sativa
gccgctccgacggcgcccccgtcgccctcaaggaggtccacgacgccgtcagcgcccgccgcgaggccgacgccctcctcgccgccgcgccctcccgccacgtcgtcgccctcctcgaccacttccccggcggggaccacgacgacgacgtcctcgtcctcgagtggctcccgctcgacctctccgccgtcgtccgcgccgccgccgccgccaggccgagcgccctccccgccgcgcagcgcaagcgctggatgctgcaggtgctcgagggcgtcgccgcgtgccacagcgccggggtcgtgcaccgcgacctcaagcccgccaacctgctcatcttcgaggacggggttcctcaaggtcgccgaccttggtcaggccaggatacttcaggagacaggaacataccaaggtatgca

SEQ ID NO: 418943 - DNA, 500 bp, Oryza sativa
acgcactacccatcggcggtgatcgccatggcgaacaagctggtctcggagatgcgggtacctccccacctcgcccacatgctcgccgcgcgccggctcaccaccgccaaggtcagcccccgccgccgccctccaaaacccctccccctgctccaacaccaaccgccgccgctaaaccccattctacccaggacgtgctgtcgctgccggaggtggagctcatgggcgtcctcgacgccggcatccacaccgcccgcgccgccgtcgcccacgtcagcgagatcgcctgccctccgtaccaaacggcgcttgcgctcctcgaggccttcagggcaagaggagatgggcggctggccaccacgctccgcggattggatgaggcattgcatggaggaatccccgcagggaagctcactgaggtcgctgggccctcggggattggcaagacccagttctgtctgaagctggctttgctagcaacattaccagaatgctatgga

SEQ ID NO: 418944 - DNA, 355 bp, Oryza sativa
ggattaaagcaataccatatatcaagagcaactggtaaatgcatgcataacatgcaacataatgaacaaaaacttcagttcgcacagacaaaggttcttgagatgctgatctcaattctcaactataaaatagcagctaaatagcacggtcgatcttcagatgccaactctccaggttcatagtgacaaggcattttagacctcatagatccatgggtgctggttgctcctccactcggcgatgccctcagggaaccacagagcaatctccttcctggcgttcttgaccgagtcgcttccgtggatgacattcctgccaatgtcgacagccaagttcgccacgggatggtgcccg

SEQ ID NO: 418945 - DNA, 498 bp, Oryza sativa
ctctctaatctcagaccccgaaatctcgaggagcttgtcttttttcggtagcaatggcgttggagcagaccttcatcatgatcaagcccgacggcgtccagaggggcctcattggcgaggtcatcggccgcttcgagaagaagggattctacctcaaagccatgaagctcatcaacgtggagaagtcgttcgccgagaagcactacgccgatctgtcctccaagcccttcttcggagggctcgtggagtacatcgtctccggccccgtcgtcgccatggtctgggagggcaagcaggtcgtctccaccggccgcaagctcgtcggggccaccaaccccctggccgttgagccgggcaccatccgtggcgacttcgctgtcgacattggcaggaatgtcatccacggaagcgactcggtcgagaacgccaggaaggagattgctctgtggttccctgagggcatcgccgagtggaggagcaaccagcacccatggatct

SEQ ID NO: 418946 - DNA, 507 bp, Oryza sativa
cccgcaaatacttattcatatgttttgacaacatttctcccgacgcatgctcattgtggcagacgcagctgaccacctagagcttttagttcaccattattatttagaccaagcatacgtcccaagatcagaacacatgcttacaagcgaaaatactaatagcctggctggctgcttcacagaataaccaaacgacaacctcaacagataaaaatgccacggaatgaaaacaaagcagcgaatcgtcaccagaagtcccatcttactcatcaaacactccatcattctcctccaacgcatcctctccccaggggagaagattgcccagtttaccttccttaacaggagcagggttcaccatattctcagcctcgaagcagtgcagaacagatttgggcgacccaacagcaacaggtacgtcttcagtagcgtcgaagctctggtagatgaggaggccaccacagggcagctcctgctctaccatgttgttgcatttgtaagcatcag

SEQ ID NO: 418947 - DNA, 465 bp, Oryza sativa
ctttcttgtttaagaactcccccccctcctcgctccccgccgccgccgccgttttcttggagaggagaaatccgtaggctcagaggatttttggtagtcttgctccgtgatattcgcgaagagggggggagctaaggggggattcgtaagatcagaactggatcacgcgggggcgcgctcgggatcgggggttccaaacacagcttcttcgttgaatttaagtggatgtactaatggagtcaaagggtggcaaaaagaagtctagcagtagtcgttccttgatgtatgaagctccccttggctacagcattgaggacgttcgacctgccggaggcgtgaagaagttccagtctgctgcttactccaactgcgcgaagaagccatcctgatagccctttcggcttctccatactagtagtttaggatttcttgcaattccattttggcacttttcttctgacctat

SEQ ID NO: 418948 - DNA, 372 bp, Oryza sativa
ggggccagtatcacatatggttccttcatattgaaagagacagtattacagatgcggttacacaacaacctgaaaaaaaaaaagaacaagacaaactgatagagcaaactgcaaagctctcttgcagtttcagctgactcaaaaaaatgaaaaaaggataaaacgccgaaaatatctgaacactaaaactctggctgctacaccgatatcactagcaacttcgcaagtcgatttcaaccctttcataatcttcccatcttcttcttcttccatggagcaaccagtcactactgatcaaagacacattaggtaggcggcggcggcgccgacaacggccggcaatggaggtagatagccagagagagacccccc

SEQ ID NO: 418949 - DNA, 329 bp, Oryza sativa
tcgcactcgccggactctccccttctctctgtctcgctccttcgttcgctcgctttatcccccccgaataaaggcgagaagccgcagcggcggacgaagaagatagaaatggcggcggagacgttcctcttcacctccgagtccgtgaacgagggtcacccggacaagctgtgcgaccaggtgtcggacgcggtgctcgacgcgtgcctcgcccaggaccccgacagcaaggtggcgtgcgagacgtgcaccaagaccaacatggtgatggtgttcggcgagatcaccaccaaggccaccgtcgactaccagaagagacggcgcgacac

SEQ ID NO: 418950 - DNA, 470 bp, Oryza sativa
gctggagtgcgggcggatcacgttcccttcctcgctgaagcagcctggaccaagggatgctccgatgcactgcttcatcaggaggaacaaaaagaactcgaccttctacctttatctcagcttaacacaggccctaacggataaaggaaagtttctgctggctgctcgaaggttcagaaacggggcacatacagaatatatcatttcctatgattgtgatgatctatttccaggaagcaattcgtatgttgggaaactgagatctgacttcctgggtacaaagttcatcatctatgatagccagccaccatacgatggtgcaaagccctcacggagccaatcgagtccgtcgctttgcaagcaaaccgattaacccaaatgtttcaggcggtaattatgaagttggaccagggtcatacaagttcaactttctcaaatcaagaggaccaagaagaatgcagtgcaatatc

SEQ ID NO: 418951 - DNA, 485 bp, Oryza sativa
gacggcgcgtaccactacgagctcggcagggcgctggtgccgctccgcgacgacggcgtcctcgtcctcggctccggcagcgcgacgcacaacctccgcaggatggggcccgagggcacgccggtgccgcagtgggcggcggagttcgacgggtggctgcaggaggcgctgctcggcgggaggcacgacgacgtgaagcggtacgaggagaaggcaccgcacggcagggtggcgcacccgtcgcccgaccacttcctcccgctgcacgtcgcgctcggcgccgccggtgagggggccaaggcggagctgatccaccgcagctggagcaacgcctcgctctcctacgcctcgtaccgctttaccaccgccaagaactgaaaaccggtcgacgcgatgcacgccggctcgccgcatgcaaccacgtgtttgcttgtaacatatttgactcgaacaataatccccgtgggctcacgtagaactgtgtg

SEQ ID NO: 418952 - DNA, 495 bp, Oryza sativa
gtgtagagtgtccagcgtactgttatctggatgggaaagaaacaagagtctgttgaggatgttccttgtggtaacactgtcgctatggtcggtctggatcagttcatcacaaagaatgccaccctaacaaatgagaaggaagctgatgcctgcccaatcagagcaatgaagttctcagtgtccccagttgtgcgtgttgctgttcagtgcaaggttgcatctgatcttcccaagcttgttgaaggtttaaagcgtctggcaaagtctgatcctatggtcctctgtaccattgaggagtccggtgaacatatcattgctggagctggagagcttcaccttgaaatctgcttgaaggatctacaggaagacttcatgggtggtgctgagattattgtttcccctcctgttgtctccttccgtgagactgttcttgagaagtccctgcgtacagttattgagcaattcccgaacaagcacaaccgtctttacatggaa

SEQ ID NO: 418953 - DNA, 475 bp, Oryza sativa
  unsure (1)..(475): unsure at all n locations
ggcatgctgtgcacaattgccactggactggccattgatgcttatggtccgatcagcgacaacgccggtggtattgctgagatggcagggatgagccacagaatccgcgagagaaccgacgctcttgacgctgctggaaacacaaccgctgctataggaaagggatttgccattgggtcagcagcactggtgtcccttgcactgttcggcgccttcgtcagcatagccggggtgaaggtggtcgacgtcctgtcccccaaggtgatcatcggattgatcgtcggagcaatgctcccgtactggttctccgccatgacgatgaagagcgtcggcagcgcggcgctgaagatggtggaggaggtccggcggcagttcaacaccatccccgggctgatggagggcacaggcaagccggactacgccaactgcgtcaagatctccaccgacgcctncatcaagcagatgatccctcccg

SEQ ID NO: 418954 - DNA, 333 bp, Oryza sativa
gcgcggtgatggggtggttgctgaaagcagccgcccaaagcgaagggcaacctggccatggatgcctaaaaggccacagcaaggatgaatcccgttaatcgtccacgaccacgacaactgagatgcagacgtgaaggccgcacacgcgctcagcatctcaaaactgcggtacaagctcaccaaggagaagaccaggtccatactatcccggaagtttaaagctttaacttccatgtttgcagctggttgactatactgcagattccctgtggggactgacatgcacactgtgttagagactgctacactcggaggtacactttgtgtaaatta

SEQ ID NO: 418955 - DNA, 483 bp, Oryza sativa
ggtttatccggtgttggattcagaggttgtccaggtacactttctcatctagaagctgagtcgtgcatgctttctccagatggtttgttggatgtagtgagtggtggtggactggagtatctaaatttgtacaatttgaaaagcccaactggacttgatggcctggacagagttggttatgcgagaagtcttcggtttttaaacctcaggatgtgccgttaccttaccgatgattctgtgacggcaatagctagcgggtgtccattgattgaggaatggagcctcgctgtctgccatggagttcgcttgcctggatggtctgcgattggattgctctgcaacaagctgagaatcttgcatgttaaccgttgccgaaacatttgtgaccaaggtttgcaggctctaggggatggctgtgtatgccttcaagttctgcatatccatggatgtggcaagatcactaataatggtctggcatcattt

SEQ ID NO: 418956 - DNA, 448 bp, Oryza sativa
ggtttatccggtgttggattcagaggttgtccaggtacactttctcatctagaagctgagtcgtgcatgctttctccagatggtttgttggatgtagtgagtggtggtggactggagtatctaaatttgtacaatttgaaaagcccaactggacttgatggcctggacagagttggttatgcgagaagtcttcggtttttaaacctcaggatgtgccgttaccttaccgatgattctgtgacggcaatagctagcgggtgtccattgattgaggaatggagcctcgctgtctgccatggagttcgcttgcctggatggtctgcgattggattgctctgcaacaagctgagaatcttgcatgttaaccgttgcccaaacatttgtgaccaaggtttgcaggctctaggggatggctgtgtttgcttcaagttctgcatatccatggatg

SEQ ID NO: 418957 - DNA, 415 bp, Oryza sativa
tttttgttgacaacacaccaccagtgagaaaccttctactcaagttggcacacgccgtttacacaaaccacactgtacagaggcgaaagaaaaaccaaaccctccctgcctgccaacactttcagctgaaactacttattcaacaaacaaaaaaggcactttgccctctcttccaacatcagcatcatcaacaaaacccatggtttatactaggctctttttttttcccacatatatatgtatactttgatatcagatcagatgtatcaaatgcctagatttcatacgtgatcccaaccttgagcagctgatcgtttggaatcgccagtgccctgtgcccttctgtcaggttcttcctcaggaaggtgtagatgtagttcaccgcgatcctcttgaggatggacgagttgggccc

SEQ ID NO: 418958 - DNA, 477 bp, Oryza sativa
gcttaacacgtcggagccggcgggcgccgacgcggcgttcaagagcgtgaaggtgaagctgtgctacgcgccggcgagccggacggaccgcgggtggcgcaaggcctccgacgacctgcacaaggacaaggcgtgccagttcaaggtcaccgtgcagccgtacgccgccggcgccggcaggttcgactacgtggtggcgcgcgacatcccgacggcgtcctacttcgtgcgcgcctacgcggtggacgcgtccggcacggaggtggcctacgggcagagctcgccggacgccgccttcgacgtcgccgggatcaccggcatccacgcctccctcaaggtcgccgccggcgtcttctccaccttctccatcgccgcgctcgccttcttctttgtcgtcgagaagcgcaagaaggacaagtagatcgtcttgctgcaaacgcaagttcgcagcttcagtggactgaattccgttatcgg

SEQ ID NO: 418959 - DNA, 475 bp, Oryza sativa
cattgatggtaggttctggatccagatcatgggggtgttcatgatgaccgtgttcatgctcgcgctcggcgtgccctacgaccactggacgcacccggcgcaccacaccgggttcgtcgtgctctacgcactcaccttcttcttcgtcaacttcgggcccaacagcaccaccttcatcgtgccgggtgagatcttcccggcgaggctccggtcgacgtgccacggcatctccgccgtgtccggcaaggccggcgcgatcatcggcgcgttcgggttcctgtacgctgcgcaggaccagcacaatcccgacgcgggatactcccgcggcatcggcatccggaacgcgctcttcgtgctcgccggcacaaacttccttggtatgctcatgacgctgctggtgccggagtccaagggcttgtcgctggaggagatgtccaaggacaacgtcgttgacgagaccgcccaagaagcgatc

SEQ ID NO: 418960 - DNA, 469 bp, Oryza sativa
cttccttttgctcaagaaatccaccagctgctgggtcgggtggttttactagctcgtctggttcaacttcgttgcgcttcgtctactcaggtgcccggaggagcaagaattgttgggggggcagcgaggtatacgcagatggagagccctcttgcatggatgcagtccactggcaccaggggctagggctggtgaagcccatggaggagatgctgatggcagctaacgcggccgccggcgcgaatcctaatccggcggcgacggcgccgtcacccgtgactgggggcgcactgtagggcggcggctgcggcggcgcgcctccggtggcatgtggcgcgggggcgggtagcacggagcggtgggcgcggccgcataaggagaaggcgctcaactgcccgcggtgcaactcgactaacaccaagttctgctactacaacaactacaggctacagcagacgcgctacttctg

SEQ ID NO: 418961 - DNA, 467 bp, Oryza sativa
gtttccttcgcgtgagcggcagcaagtgttcagggcgggcttcttctcgatttagctttcttggtttcttgatctgtagcttattagcggccatgtgcggcggagcaatcatctccgggttcatcccgccgtcggccgctgcggcggcgaggaggaggaggacgacgacgacgtggtcgtggtggtccccccgccggcggcggcgaggttcgtcgtccgtgccgcggccaaggcggcgcccccaactgcagatgggatgttgactacaaagcttgtccaacatgatggacctactgctagatcagcaaagcacaagaggaagaatcagtacagggggatccgccagcgtccctggggcaaatgggcagctgaaatccgagaccccacaagggtggccgtgtttggcttggaacatataacactgctgaggaggcagctagggcatatgacgctgaagcccgcaagat

SEQ ID NO: 418962 - DNA, 410 bp, Oryza sativa
ttttggtgtttttttttttttttgtgtttgaagcgcggcaataaaacattgcattgaattctgaacgataaacaccaggaaccggcgtttatttgaggcaagcactgcccaaaatctcgcaaaagtactgaaaccttagacatagtacacatccatggcaaacatggatgccaaatgacaactacagaaaattatcaaattcgaatgcagctgacggcttctcctgctgaagatgcatattttcccctccattacttggatgggctctctccatcgacagccaatgggacggcgctggccaggctgcggtatttcagagcatagaacatttcaatgtaacggcgagtctcgcgcctttcaaggttgcttacgtacttccagaatccgtatacaccagtcaagggcatcag

SEQ ID NO: 418963 - DNA, 322 bp, Oryza sativa
ttcctccattggttcctgaaattgagtcatgggtgggaagtttgttcgtctggagagttttcttgaacgcctcggtgccaccttctcgtctcatcccaatgagttgatagcactcttctctaggtatgttaaccagggaaagggaatgctccagcgtcaccagctgcttgcggagttcgatgcctaggtcgaagctgacaaagagaaatatgctccctctgaagacattctccgggctgctcaggaagccattgtgctgtcgccctgggtggcactggccatcaagccaaggcctggcgtctgggactacattcgggtgaat

SEQ ID NO: 418964 - DNA, 471 bp, Oryza sativa
tttggtcgctacacaccactactctcacaacgggggggaggatctataaccgcggaggggttactcaccatagcggcgggggccgccgcacaagcgccgggtcccgcaacgacgccggcggagggcgccacggggccgccgaacgtgacggcgggcctggagaagggagggcagtacacgacgttcatccggctgatgaaggagacgcagcaggacacgcagctgaacagccagctgaacaactccttcaacggcaacggctacaccgtgtgcgcgcctaccgacaacgccttcaacaacctcaagccgggcaccctcaacagcctgacgcaacagcagcaggtggcgctcgtccagggccaccgcctcccccaggctactccatggactccttccagacggccagcaaccccggccgcacccaggcgttcgggaccgacggcccctacacccttaacaaaaccttcacca

SEQ ID NO: 418965 - DNA, 480 bp, Oryza sativa
ttttgttggagttttcaaaatcgttggtccaatacgctaataaaacgccattagaaatctccctgcagcagctctgccgcaaaatcacaccttgccccgtcaagtatctgaacgcatggttaatagtgccacaattttccaaaggtaatcagacctatccatgtgaagcatagggcatgtacaatcctgatagcaggtaattacaccttaatgatgttaaaagtaaaccttggcacaagtttccctctgatccgtagcttcatacatcgctgagatcagcgtcatcacccttggcatcagcagcttgtttacttcctgggcagcaacatgcaaagaaatctcctaatggtctctctgggacagggataagctttcccacaaatgccaacggccagctaaaaaaggcgagacctattgacaccaaccacaactgccaggtgagtctgggtgtcgagtaaacttgccaagggacttaacaat

SEQ ID NO: 418966 - DNA, 319 bp, Oryza sativa
ctggatctagaaaggaaggacgcttaataagggagggggtgatatagaaaggcgggtgatttaaccaccccggggccgtggcaattgacgccaccgggggagcaaaaattgtaggagcggccctgaggcagacccagttcgacagccctcttccatggatgcagcccactggcaccaggggctagggctggcgaagcccatggaggagatgctgatggcagcgaacgcggccgccggcgcgaaaccgaatccagccgcgacggcaccgtcgtccgggactgggggcgcactgaggggcggcagactgctgtggcgcccc

SEQ ID NO: 418967 - DNA, 464 bp, Oryza sativa
ttttgttgatattgtacgtcctcgtcaccgcagggttgcttgtgttcgtcgtcagcgccgtcgccggaatcaagactcttggaaaggggaagcttttcgcgtttccgccgctggttacgatggtaggtcacctgcacctcgtcggggagcgtaccgcaccgctcgttggacgccctgcaccgacgctactgcagcgacgggggcctcatgttcctccgcctgggccgtgcgggggcgctggtcgtgtccacggtgggcgccgtcgccgacctgtacaggggccacgacctcgccttcgcctcccggtcgccgtcgtacagtgccgagaggctcttctacggcgggcgcaacatgtccttagcgccgattggcgacgcgtggtgccgcaccaagaagctggccgtggcgcaccttctgttcacttgccgcgcccgcccgtgccggcgaggccgccgcgctcgtcg

SEQ ID NO: 418968 - DNA, 499 bp, Oryza sativa
agagtagcaaccatggaaagagatgttgcacttatcaacatgtagtacagtaacaaccatcatcaaatgtccctacaactccgtctctctcatgctcgaagaatataataatctcattgattgaaacacgtataggaaaatttaagcggcaattaaggaagtaatagtatagttgtagcagtagaagagtacagcaacacacgttaattaatcacgcgagagcgatggatggatcggccggtaaggtctcggtctcgacctcacacgaggcggcggcagatggtgatgccgtcggcgatggcgagctggcagacgtcgatgcgcgggtcggcggcgagcctggagttgaggtccctgatggcgacggagaacctccggtccaggtccgacagcggcgtgtccggcggcagcgccaccgtgccggcccacagcgtgttgtcgtacacgatgtgcccgccgacgcgcaccagctgcagcagctgctcgtggaacttgacgt

SEQ ID NO: 418969 - DNA, 439 bp, Oryza sativa
tgttattttgccaccaccacaccacagagagcccgagggccctactgaacttctctccggttcttcctctcccgcaagcaaagcgcacgccgcctttgccttagatctcctcgactccgccgccgccgccggcgcctccccacggtccctccctcgccatggagggtaacagtaccaacctcgatgcggcgatagagtcgctcctcaacgtggagaagcagatgaggctggccggcgatgtcgccggctcgaggaaggccgtcatcgacatcgtcgagctctgctacaaggccggcgcctggaagacgctcaacgatcagaccgtggtcctctccaagaggaggggccagcttaagcaggctatcactgccatgggtcagaaagcaatggagtacattgacttaacccccgacatgggcacacgtattgagctaataag

SEQ ID NO: 418970 - DNA, 481 bp, Oryza sativa
aagcaagccagccaatgcaaaatggtttacagattaagctttcaacaccgccttatggatcatcgtctccttgtgtatttggtgacagctcttctcaacaagatcgaggagtttctcgaggttcgccgcccaggaattgagtataccattactgtcttgtgctgtgcggaagcatacaacacccattggcctgtcaatcttcgcaatcagcgactttgagtttaccatgtccgaaaggtgtttctctgcctcctgcaagctcaagcaaagaagatctgcgagcctcttcagggtaatccttgaatagtacttcgaaacaaccaagatattctgaacaaaagcaaagaactggaaatcaactgacaaatacaaagcaaggaaccaaaagagaaatacgataaagtcaagtaagcaatacatgttcaatgatcctcatttcagatcctctgcagctttgtcacccaaagctcctccgagaaaa

SEQ ID NO: 418971 - DNA, 477 bp, Oryza sativa
tggattcagaaagggaagaagctgcagaaaagatttcggtgatggggaggtcttcaccaaatgacaagcttttacttgttaaagcattaagaaaaagaggtcatgttgttgctgtgactggagatggcacaaatgatgccccagctttgcatgaggcagatataggtctctccatgggcatccagggaactgaagttgccaaggagagttctgatattatcatcttggatgacaattttgcatcggtcgtgagggttgtcagatggggtcgctcggtttatgcaaacattcagaaatttatacagtttcagttaaccgtcaacgttgcagccttgattataaccgttgttgctgctgtcagttctgagaatgtttccctgaacgctgttcagctactgcggggtaacctaatcatggatactctgggtgcttttgcactgcccatagattcacctactgaccattttatgcagtgac

SEQ ID NO: 418972 - DNA, 472 bp, Oryza sativa
tttcttgagcccaaaccttcgtaggtctctgaccacagaaatggataaatatggcaggtatgatccaagtgaaattcaaggcgagagccgttcttcatctggtgcttcaaagaatgttagttctggttcatggggtcctagtccatccagttctgcaccaactgatgatactggttcaagtcaaacaggggttaagactcgtgaagagagacttttagatacaattgcaacttcaagtggtgtgcggttgcaaccaactcgagatgctctgcaaatatttctaacagaagctgccaaattggacgcagttgctttgagccgtgcccttgagaacaaattgaattctcctttatggcaggttcgcatgaaggcaatttgtgtattggaagcaattgtaaggaaacaggatactgatccttattcaatcattacttcatatttctgtgagaacagtgcatctgttgttagatgc

SEQ ID NO: 418973 - DNA, 481 bp, Oryza sativa
ttcgatacttcaaagactgctagtgtgttctgttctggctacaaagtttcccagccggctgaggaagatgaaatggattttgattctgaagaagttgaagatgaagaggaggaagaaaagatcattccagctcccagggcaaatggcaaagttgaagggaaggaaaatgagcagaaaaaacaaggcaagacagattcttcagcttcaaaatcaaaggctgcagtgaatgacgatgatgatgatgatgacagtgatgaggatgattctgaggacgaagatctttctcctgaggatgatgatgatgattcttctgaggatgattccagcgaagatgatgaggatgagagtgacgaggaagaaactcccaagaagccagagactggaaagaggaaagtagctgaaattgtgttgaagacaccttcgtctgataagaaagcaaagattgctacaccgtcaggccagaagacaggtgacaagaggg

SEQ ID NO: 418974 - DNA, 196 bp, Oryza sativa
gaaaacctctcataaccctcgtagcatttgattggagaaacagatgttcacaagtagatacagagctaccgaaactggaagaacagaaacccgagggaatggacacaaggaacataactgaagggcaaagtgtttacattattattgattgagccccagcttgcaacaaagtactaaaaagtttctactgaggatt

SEQ ID NO: 418975 - DNA, 492 bp, Oryza sativa
gttctgttggctactccttcctcctcaagaagggcaaggccataattgtgcaaccggagcgtgtcatcgtcgggaatggcccggcgtttgggtgcgtcatgatgaaggagttcttatctgagctggctaagcgcgtcaacaagaacaccactgcttatgagaactacaagaggatcttcgtgcctgagggccagccgctggagagcgagccgaatgagccgctgcgcgttaatgtgctcttcaagcacgtccagaagatgctgaacagtgacagtgctgtgattgccgagactggtgactcctggttcaattgccagaagctgaagctccctgagggctgcgggtatgaattccaaatgcagtatggttccattggatggtcagtgggtgcattgctcggatatgctcagggcgctaaggacaagcgtgtgattgcctgtattggtgatgggagttttcaggtgaccgcacaagatgtgtcaacaatgattc

SEQ ID NO: 418976 - DNA, 333 bp, Oryza sativa
  unsure (1)..(333): unsure at all n locations
tttagtggccgccgccggagcagggaggaaggagaagggtatcggcggcggtggggggctgcggttccggggcgggagcgggacgttcaaggtggtgcaggtggcggacatgcactacgcggacgggcggcggacggggtgcctcgacgtgctcccctccgaggccgacggctgctccgacctcaacaccaccgncttcctctaccgcctcttccgcgacgaggaaccccgaccccgtcgtcttcaccggggataaatatctatgggctttggatgcaaaccgatgcgggccaagtcctatggaaggcaggcaatcggccccaggccattaac

SEQ ID NO: 418977 - DNA, 496 bp, Oryza sativa
  unsure (1)..(496): unsure at all n locations
tagatcgcgagcggccttcttttttttttttttttaaaactacagtggctggttttactaaaattcactgttttctcggtgagaattacaaccgcgaaaagggtgcatgccgtgtcgtgtaccatgtttttgttcatttacataaatcgaaaattttgtaaaacaaattggcaaacagcacatcataacgtgtagtacgttgcaacatttcactatccccgtcttcccatctatatcactatctcatctttccatcaggattcttcttgcgccttccattggagcctctgttccagaggacttctgagtcaattgtggtgagatgtggatcatcaagcctcttccatgtcttgatggacttcacaccttgccactcgccgncgttcgacttttcaagctgcacggacaccaccctcgctctcctcgaccacccggcctttccatacgcatggtacccaaattcaccagcatagcacaagtgaatgccattgagctt

SEQ ID NO: 418978 - DNA, 502 bp, Oryza sativa
gtttgtttcagacctatatgtgctgaaaccctggaaatatattggaattgaggtttggcaggtaaaggctggttcggtttttgacaacatcctcatttgtgacgatccggaatatgcaagaaaagctgctgaggaaacatggggtgcaaacagggaggccgaaaaagaggcttttgaagaagctgagaaggagaggaaagctagagaggataaggaagctgaacgagcaagggaggaaggagagcgacggatgagagagaggggtgatcggcaccgtggcagggattacaaggacagatacaaaagacgtcatagggatcactgggatgatgactaccatgatgagctttgaaatcacggaaaagtgcattcttcctaggagaagctggaatttgcatggtcattgcttataattgttaccaataaatgatctgggaggccagaatagccgcaagtgttccttgctgcgtgtgctgaaaatttgaatatccggattggaatg

SEQ ID NO: 418979 - DNA, 519 bp, Oryza sativa
gcataattcaattcaattttaatttactaaaataaacaattggcatcttccttccttctgtccaaatggcaaggcaacgcctttgtaacttagcttacacatgctgcagcttccaccaagtaagctcagcgatgatggaaatcccctccaaataaataaataatcttggatcaaccacaggagtagatttgacttctctggtagcactgcacaagaattgacatagcttctggtttgccctaatacacacagatgaagctgccctaccactgtggaacaaaagaaatgccggagatctgtatttctatctacaggaaagaatttaaaaacttgggcttgattcgccgcctgcaaaataatttcttcaagctcgtatcgccgcatatatggagtgtaggctgcttagttacaatccagaccacattcctccagaagagggccattattcttcgcaaggaaaggatcgatcccgacccatagaagtgagaagattgaagccagtagaatggaccagacgat

SEQ ID NO: 418980 - DNA, 242 bp, Oryza sativa
tttctttgaattgaaggaacaggaaaaggcagctaaggataattaaactgttcaaagtgtgcttggtacacccacccgcgactacttactttcgaacaagggagatagggtacccatctctgaccttgagggcaagtacgttggtttgtgctttgtggtgaatggctatggcccagtagtccaatttacctcattgcttgctaaattttatgagaaactcaaagaagtaggggagaaatttg

SEQ ID NO: 418981 - DNA, 411 bp, Oryza sativa
  unsure (1)..(411): unsure at all n locations
gttgtctttagcagcaacagctcaaacggaggaagatctcatcgccatgacgaccggcaatggcgacgcaccggtgatcaagaacgcccacagcgacatcgacagcaccaacaagacgctgctcaagagcgacgccctgtacaagtatgtcctggacacgacggtgctgccacgggagccggagtgcatgcgcgatctgcgcctcatcacggacaagcaccagtgggggttcatgcagtcgtcggcggatgaggcgcagctgctggggatgctgctgaagatggccggagcgaagaggacaatcgagtggggtgtcttcaccggctacttgctgctggcgacggcgctggcgctgccggaggacgngaaggtggtggctgatcgacccggacagggagagctacgaagatc

SEQ ID NO: 418982 - DNA, 468 bp, Oryza sativa
agagtagcaaccatggaaagagatgttgcacttatcaacatgtagtacagtaacaaccatcatcaaatgtccctacaactccgtctctctcatgctcgaagaatataataatctcattgattgaaacacgtataggaaaatttaagcggcaattaaggaagtaatagtatagttgtagcagtagaagagtacagcaacacacgttaattaatcacgcgagagcgatggatggatcggccggtaaggtctcggtctcgacctcacacgaggcggcggcagatggtgatgccgtcggcgatggcgagctggcagacgtcgatgcgcgggtcggcggcgagcctggagttgaggtccctgatggcgacggagaacctccggtccaggtccgacagcggcgtgtccggcggcagcgccaccgtgccggcccacagcgtgttgtcgtacacgatgtgcccgccgacgcgcacc

SEQ ID NO: 418983 - DNA, 402 bp, Oryza sativa
gcagcaacagctcaaacggaggaagatgggatcgttatgacgaccggcagtggcgacgcaccggtgatcaagaacgcccacagcgacatggacagcaccaacaagacgctgctcaagagcgacgccctgtacaagtatgtcctggacacgacggtgctgccacgggagccggagtgcatgcgcgatctgcgcctcatcacggacaagcaccagtgggggttcatgcactcgtcggcggatgaggcgcagctgctggggatgctgctgaagatggccggagcgaagaggacaatcgaggtgggtgtcttcaccggctactcgctgctggcgacggcgctggcgctgccggaggacgggaaggtggtggcgatcgacccggacagggagagctacgagatcggg

SEQ ID NO: 418984 - DNA, 468 bp, Oryza sativa
gcacacggaaaagaccaaggtatatatatcaccgacagcaacaagtgagtggtccacatgacaaaatgtatatagagcagagtaccactggacaccatttcccaactacacaaacccaggcacataaagcagcttccaaacataagacaatggaagataataatatcgtctaaaagaatcccaccgggtaaatcctgaaatccctggagcacactctgcacaccccctgtaccgcttcatctgtatgactcggtgcgcttcggcttgctttggaccaccgcttcgatcttgtcgacgacttctggggttagcagcggaatgacatcgagggccttcatgttttcaacaatctggttttcttttgtggctccagtgatcacagatgagacgtttgggttcgatgcgcaccacgcgatagcaagttgggctaacgaaacaccaaacttagaagcaattgttttagcccat

SEQ ID NO: 418985 - DNA, 452 bp, Oryza sativa
gcagatccaaaccttttttatcgtcgacgaggaagaaggcggcgggggcggttgaggcgaaggcggcgaagatgcagtacaagaacctggggaggtcggggctgcgggtgagccagctgtcgtacggggcgtgggtgacgttcggcaaccagctggacgtgaaggaggcgaaggcgctgctccaggcgtgccgcgacgccggcgtgaacttcttcgacaacgccgaggtgtacgcgaacgggcgcgccgaggagatcatggggcaggcgatgcgggacctcgggtggcgccgctccgacgtcgtcgtttccaccaagctcttctggggagggcagggtcctaacgacaagggtctttcccggaagcacattgttgagggccttcgcggttcgcttaagcgccttgacatggactacgttcgacgtaggttactgccaccgtcccgactccac

SEQ ID NO: 418986 - DNA, 311 bp, Oryza sativa
ggacgacaactttaaatattgctcaataaaacactatctggagacaacacacacgagagtcatatccagaggaaaacaatcagcccagacggaccactagcaccaaatgcaaagcaatgggaagaactaattcgaccgctaccaccctagtaaaaaccagagaagagagaggaaggggggacaggaagaaaaacattctagtagaacaggagaagaatccatccatcatggtgacagcagcatgaggcatctaaatcgatggtctccaataacatgcggagccatcgatcgatcgatcttcccattttact

SEQ ID NO: 418987 - DNA, 516 bp, Oryza sativa
tcgatttgcattcgcatccacgagaccactcgaacccgacccgtctcgccgccgccgccaccgaagtaatcccttaattggtcaaaatgtctcgggaggagaatgtctacatggccaagctggccgagcaggctgaaaggtatgaggagatggttgagtacatggagaaggttgcaaagactgtagatgtggaagagctcactgttgaggagcgcaacctcttgtctgttgcttacaagaatgtgattggtgcccgccgtgcctcctggcgtattgtctcatccattgaacagaaggaggagggtcgtggcaatgaggaacatgttactctgatcaaggagtaccgtggcaagattgaagctgagctgagcaagatttgcgatggtatcctgaagttgcttgactcacaccttgtgccctcatctactgctgcagaatctaaggtggttttacctcacgatgaagggtgattaccacaggtaccttgcgggattttagactggtgccgagagaaag

SEQ ID NO: 418988 - DNA, 419 bp, Oryza sativa
ggacgacaacccaaaaggttgctaactaaaacactatatggagacaacacacacaagagtcatatacagaggaaaacaatcagaccagacggaccactagcaccaaatgcaaagcagtgggaagaactaattggaccggtaccaccctagtaaaaaccagagaagagagaggaagggggagacaggaagaaaaacattctatgggaacaggagaagaatccatgcatcatggtgacagcagcatgaggcatttaaatcgatgggattcaataacatgcggagccatggatcgatcgatcttcctattttactgcccatcgcaagcgtggccattggaggcttttttcacctcatcaccaccctgctgcgtgaggccagaggtacagagggtcaagctgtcccttaggagctgcatgatc

SEQ ID NO: 418989 - DNA, 328 bp, Oryza sativa
tctatttgcttttgcatccacaagaccactcgaacgggctctctatatccgccgacgggtctcgactaatcacttaggtggtcacaacgccccccgaggagattgtgtacatggtcaagttcgccaaccacgctcaaaggattgaggtgatccgtgagtacgtgctgcacggtggcaacactgtaggtgcccacaagctcactgtcatggaccgcacccttttggctgttgcctacatgaatgagattagggcccggcaggcctcctggctcatgagactaattctacagacacacagggtggccggcaacctggcctgaagaacatg

SEQ ID NO: 418990 - DNA, 449 bp, Oryza sativa
atccatttgagggtgtcattaaaaccataccgggggtatttaaatattataaaaaatcctatggatcttggaactattaaacaaaatctggaatctggaagttatactactgtaaatcaatggattgcggatgttaggcttgtatggagtaatgccatgttatataatcctcctggaaatgaatttaacacaatggcaaaaactttatccgatacatttgagaaaaaacttgctcagatggttcataaactaagttattcctcttcacagaaaagagatcagctacgtagtactctagagacgttagtagcacaatataagaattatgagtcaaaattgggaatgctcacaaaacaggcagaggatgaagctagagagcatcctgatttgcctccccccatcaaaccaagttctgcactacttaaggcacctttgaattttaatgagaa

SEQ ID NO: 418991 - DNA, 393 bp, Oryza sativa
agggtatcaaccatggaaagagatgttgcacttatcaacatgtagtacagtaacaaccattattaaatgtccctacaacttcgactctctcatgctcgaagaatataataatctcattgattgaaacacgtataggaaaatttaagcggcaattaaggaagcaatagtatagttgtagcagtagaagagtacagcaacacacgttaattaattacgcgagagcgatggatggatcggacggcaaggtctcggtcttgacctcacacaaggcggcagaagatggtgatgccggcggggatgtgaagctggcagacgtcgatgcgcgggtcggaagccagcctggagttgagggccctgatggcgacggataacctccggtccagagttcgacag

SEQ ID NO: 418992 - DNA, 426 bp, Oryza sativa
atgcaactccttttttccatatcatttatagaaagatcagcaatacaaacacaaccatccggacaagaggatggtaacatctggaagagaagtagagagctcttagctctaaattatcactccagttagaggaagacatagccacagctaatacattacacaagtgacactgcaaggcagagtgttgtgctcatatatgagcaactatggagcatacaaggcctaatggaggaaatccctcataggatcatcatggtgaattctcttcatgcggtaagcctccatgtcttccgcggtgacctcatcattccatttcacattgtacttcctcttcctttcatccatctcctctttcctcctcgcaccctccttttttagggcttcatcaagcagcttcttgtcaagaacaatatcattaggcacatc

SEQ ID NO: 418993 - DNA, 393 bp, Oryza sativa
tcccaccctgttttcctcctaatctccacgccccggcgatccgagcacaagtatgcatggccgagcgcggaggcggcggcgagaggggcggcgagcgcggcgggttcgggcgcgggttcggccgcggcgggcgcggcgaccgtggcaggggcgggcgcggcgggcggcgcggcccccgccaggaggaggagaagtgggtgcccgtgaccaagctggggcgccttgtgaaggagaacaagatccacatgatcgaggagatctacctccactccctccccgtcaaggagcaccagatcgtggagcagctcgtgccgggcctcaaggacgaggggatgaagatcacgccggtgcagaagcagacgcgcgccgggcagcgcacgcggttcagggcgt

SEQ ID NO: 418994 - DNA, 465 bp, Oryza sativa
ttctgttgcgctgctcgacccgacggcgctgggcttgggcctgcccacgccggcgatcaacaaggaggagtacctcgccatctgcctcgccgcgctcgcctgcacgcgggcggggaaggccctggtgggagtgggaggccagcagcaggtgcaggcctgcaataagtggctgtgcccagcgcccgcggcgcctgaggagctccgcttccggtgcaccgtctgcgggaaggccttcgcctcgtaccaggcgctcggcggacacaagtccagccaccggaagccgccttccccgggagaccactacggcgccgccgccgcggcgcagcagctggcatgcgctggtgactcgaaggaggactcggcgtcgtcagcggccgggagcactgggccgcaccggggcaccatctgcaagaggagctctccgacggggcaggcgctcggtggccacaagcgctgtacctactg

SEQ ID NO: 418995 - DNA, 498 bp, Oryza sativa
tcggtataaaatccacatgagattgatcgattgatttggccggtgattaagcgagccagatcgacgatggacctcgtcgtcggcgcgtcgagcgaagccgtgaagtcgctgacagggaagctgggcagcctcctcgcgcaggagtacaccctgatcgccggcgtccgcgacgacatccagtacatcaacgacgagctcgccagcatgcaggccttcctcagcaagctcaagcgacgggacgtcgaccacgacgagcagcgtcaggactggatgaagcaggtgcgggaggtggcctacgacatcaaggactgcgtcgacgatgtcggccaccgcctcggccgcgagccgcgggggagcggcgcggccatcttcttccaagggcgtggtaccttcttaccaccctttacaagcgccgccgcatcgcagccgagatcggcaacctcaagctccgggcgcagcatgtcagcgagcgccgacccagtacggggtggagaacct

SEQ ID NO: 418996 - DNA, 473 bp, Oryza sativa
  unsure (1)..(473): unsure at all n locations
ggacgacaactttaaatattgctcaataaaacactatctggagacaacacacacgagagtcatatccagaggaaaacaatcagcccagacggaccactagcaccaaatgcaaagcaatgggaagaactaattcgaccgctaccaccctagtaaaaaccagagaagagagaggaaggggggacaggaagaaaaacattctagtagaacaggagaagaatccatccatcatggtgacagcagcatgaggcatctaaatcgatggtctccaataacatgcggagccatcgatcgatcgatcttcccattttactggccctcgcaggcgtcgcccttggaggcttctttcacctcatcaccaccgtcctccgtgaggtcagaggtccagagggncaagttgtccctcaggagctgcatgatcaaagggctgnccttgnaagactcctccccgagggtatccaactcggagatggctt

SEQ ID NO: 418997 - DNA, 512 bp, Oryza sativa
tctatatgcattcgcatccacgagaccactcgaacccgacccgcctcgccgccgccgccaccgaagtaatcccttaattggtcaaaatgtctcgggaggagaatgtctacatggccaagctggccgagcaggctgaaaggtatgaggagatggttgagtacatggagaaggttgcaaagactgtagatgtggaagagctcactgttgaggagcgcaacctcttgtctgttgcttacaagaatgtgattggtgcccgccgtgcctcctggcgtattgtctcatccattgaacagaaggaggagggtcgtggcaatgaggaacatgttactctgatcaaggagtaccgtggcaagattgaagctgagctgagcaagatttgcgatggtatcctgaagttgcttgactcacaccttgtgccctcatctactgctgcagaatctaaggtgttttaccttaagatgaaagggtgattaccacaggtaccttgcggaatttaagactggtgcccagag

SEQ ID NO: 418998 - DNA, 442 bp, Oryza sativa
gttgatacatttgatagatcatctcgtaatgggcccaaggcttttgtcagtgaatatgctgtttggagaagtgatgcaggtagaggaagtctacttgcttcattggcagaggcagctttccttactggactggagaagaatagtgatgttgttcagatggcaagttatgcaccactcttcgtgaacaacaatgatcaaacgtggaacccagacgccattgtatttaactcctggcaacaatatggaactcctagttactggatgcagactcttttcggtgaatctagcggtgctatgtttcatccaggtacaatcacttccagctactctggttctctggcagcatctgcaattacttgggaggattctgaaaatagcttcttaagagtaaagattttaaactttgggtctgatccagtgagcctcacgaatctctgcaact

SEQ ID NO: 418999 - DNA, 446 bp, Oryza sativa
ttttatttcatttgatagatcatctcgtaatgggcccaaggcttttgtcagtgaatatgctgtttggagaagtgatgcaggtagaggaagtctacttgcttcattggcagaggcagctttccttactggactggagaagaatagtgatgttgttcagatggcaagttatgcaccactcttcgtgaacaacaatgatcaaacgtggaacccagacgccattgtatttaactcctggcaacaatatggaactcctagttactggatgcagactcttttcggtgaatctagcggtgctatgtttcatccagttacaatcacttccagctactctggttctctggcagcatctgcaattacttggcaggattctgaaaatagcttcttaagagtaaagattataaactttgggtctgatccagtgagccttacgatctctgcaactgggc

SEQ ID NO: 419000 - DNA, 347 bp, Oryza sativa
gttttattagcaatggagagggctctgatgagcctcatgaggcggcgctccctcctccagagcggcggacgagcaccgccggcgatggccgccgccgccggtggctcaccattcttctccaccctgcagcaagcagccgccgcagacccggtccagtcgcctggcatcttgccagggctcaagatcagggactctgcgtcacagctgattgggaggacacccatggtttacctgaacaaggtcactgaaggatgtggggcccggattgctgctaagctcgagttcttgcagccgtccttcagcggcaaggacagaccagcaatttcaatgttggaagatgctgaaaa

SEQ ID NO: 419001 - DNA, 279 bp, Oryza sativa
cttttcttcattgatcaagttcagagagatgttgtccggaaatatgtggaaggtctttgctgggttatgagatactactatcaaggtgtttgctcatggcagtggttttatccataccattatgcaccttttgcatcagacctgaaatgcttggctgaattggagattacatttttcttgggctaacctttccagccatttgatcaactaatgggaacactaccagctgctagttccaatgcgttgccaaagtactatggggatctgtggaatgatcct

SEQ ID NO: 419002 - DNA, 483 bp, Oryza sativa
aagaaacttgatggcaagatttattattttcatcatcaaagacattaccccccaggggcaataatacagacatagtcagcactgggtagccagggggggttcacaaaagaaggaacaattttacatcagggttgataagagttgctttagcttacagatttacaatggggggggtttgcctggcgcttaagggttggcctaactccggaaggttgtggttaaaaacccgctctaaatcactgcatatctcttgctgggagcgatgacctttttgcaataagtctacgttggaatgaaaatggccacatttgccaatgccagaactaccctggaagcaaggaagggtgatgggaaggcattttcaagtgcttttcgttttggtgctgttatgggcttcttgctggcatcaagcggacttgtggttctttacatcggcattaatgtatttaagttggattatggtgaggactgggaaggcttttt

SEQ ID NO: 419003 - DNA, 329 bp, Oryza sativa
cctgatgtccacctccggagtacgacacatgcctaggggacttgtacagcgttgcttggatggaagacagcgatgtccacaacctgagaactgaatcactcaagcagcagtacaatctcgtcaaggaaaggacatctgtgcagcacacatattactctgggtcacatgtgatggaatacggttctttagagctgaatgcccatcatgtgttcatgtacatgggttccaatccggctaacgacaatgctacatttgtggaagataactcgttgccatcgttctcaagggctgctaatcagcgggatgctgacctgcattacttctggaaa

SEQ ID NO: 419004 - DNA, 435 bp, Oryza sativa
acagcaatgatggcaggtaatattgccatatcaattttcctgctatggtatgtacaccagagaacgagaacaatttagatgatttgggatggtggagcatctgaaataatgcacagttcttcagacttcacctacggttcaagcactactgcccccaatcgatcatcaaactacaggggcaagagaaaaagataacttgggtatattgcaggagctgagaatatttgctaagttttcttcacctatgatttaagcactaaaacccctatgggtggaactccaggggttggagggaatgctggtgcaagcctgcgcagcaacctttgccatcgcttcagcagagatgccagcattgcagatgtttgcaaaggaacgcatatgcttcattccatactgcgctagcgagccgcattgtgcttcgaaagtgcgtaccat

SEQ ID NO: 419005 - DNA, 438 bp, Oryza sativa
tggggctccttccaaaccacctccgcccccaacgtcggcggccgccacgtcgtccccggcggcgtaacaacgacacaaaaaaatgaagccccgaaaaacgtctctgtaccagccactgcaaccaaatctctgccccaaccccaggacaagcttctcggaggactactctctgccgcattcgaagaatcctcatgtcagagcagatacaaatcatctctctaccggaagaagtctccgttccctctgtccccttacctggttcagaagctgcggaagtacgaggcctaccacaagaagtgcggccctggcacgaagcgctaccggaaggcgatcgagcagctcaaggcggggcgcaacccccacaacgcccagtgcaagtacgtggtggggttcccctgcaacggccctggcaaccgcatgctcaccatcgccttcacc

SEQ ID NO: 419006 - DNA, 545 bp, Oryza sativa
  unsure (1)..(545): unsure at all n locations
tggggctccttccaaaccacctccgcccccaacgtcggcggccgccacgtcgtccccggcggcgtaacaacgacacaaaaaaatgaagccccgaaaaacgtctctgtaccagccactgcaaccaaatctctgccccaaccccaggacaagcttctcggaggactactctctgccgcattcgaagaatcctcatgtcagagcagatacaaatcatctctctaccggaagaagtctccgttccctctgtccccttacctggttcagaagctgcggaagtacgaggcctaccacaagaagtgcggccctggcacgaagcgctaccggaaggcgatcgagcagctcaaggcggggcgcaacgccgacaacgccgagtgcaagtacgtggtgtggttcccctgcaacggcctcggcaaccgcatgctcaccatcgccttcaccttcctgtacgcgctcatcttcaaccgcgtnctcctcatgcacgtcgcggcggagcaggagggcctcttctgcgagccgttcccggggagcttgtggtgcttccggcg

SEQ ID NO: 419007 - DNA, 431 bp, Oryza sativa
ggcgtcgggggggagcaagaacggcgggtacggggactacctcatcgaggaggaggaggggctcaacgaccacaacgtcgtcgtcaagtgccacgagatccagaccgccatctccgaaggagcaacatcatttctcttcacggagtaccaatatgttggtatcttcatgtcaatcttcgctgtcgtgatcttcctcttccttggttcagtcgagggattcagtacaaagagccagccttgcacatacagcaaggacaagtactgcaagcctgcccttttcaacgcgctctttagcactgcatctttcttgctgggagcgatcacctctttggtctctggttaccttggaatgaagatcgccacatttgccaatgccagaactaccctggaagcaaggaagggtgttgggaaggcatttatcattgctttcc

SEQ ID NO: 419008 - DNA, 507 bp, Oryza sativa
tcgctttcatcatctcattgttcaagagttcaaacattatcgtcgtcatcatgggacgaggaaaatttgccagacacgcaccagagatgggagaacatctggactctggtctcttctaagtgaagctaacagtaaggctaaggtaacaactcccaagaggccaaagataagacaacagcaatcctgaaacaacatgagacccaaaaagaaacggtgcgggcgattcccaagcacaacgtacactggcagtcgttattcgtgatgtccgtcgaagatttcagcgctgctgccaatggtattatgttcttagaaccacttgaacagcagaccaccgtgtgtggcgaagaaaggcgcaaacacaagggactcgacggccatgagcttgatgaggatgttgagcgacgggcctgatgtgttcttgagggggtctcaatggtgtcaccgatcacggcggccttgtggcagtctgatcccttgggaccaagggtccgagcatgctcactggca

SEQ ID NO: 419009 - DNA, 504 bp, Oryza sativa
atttatcctggccttttctagaaccagtagatggtgtcattcttaccatacctgattattttgatattataaaaaatcctatggatcttggaactattaaacaaaatctggaatctggaagttatactactgtaaatcaatggattgcggatgttaggcttgtatggagtaatgccatgttatataatcctcctggaaatgaatttaacacaatggcaaaaactttatccgatacatttgagaaaaaacttgctcagatggttcataaactaagttattcctcttcacagaaaagagatcagctacgtagtactctagagacgttagtagcacaatataagaattatgagtcagaattgggaatgctcacaaaacaggcagaggatgaagctagagagcatcctgatttgtctccccccatcaaaccaagttctgcactactcaggtcacctttgaattttaatgagaagatgaaattatatcataatatcaactcgctggata

SEQ ID NO: 419010 - DNA, 451 bp, Oryza sativa
agtaattccaccgaacacatagcgagcaagaaggggaggaggaggagaagcgaaggagacaaggaaacagcgcgacatgccgggcatcccggcgtccagccctggcatccacgaccagcaccagcaccaggaccaccgggcgctagcaggcgtcggcatggcggtcgggtgcgcggcggaggcggccgtggccgcggcgggtgtcgcggggacgaggtgcggggcgcacgacggggaggtgcctatggaggtggcgcggcaccacgagcacgcggagccagggtcggggcggtgctgctccgcggtggtccagcacgtagcggcgccggcagcggaggtgtggtccgtggtgcggcggttcgaccagccccaggcgtacaagcggttcgtccgcagctgcgcgctgctcgccggggacggcggcgtgggcacgctccgcgaggtgcgcgtc

SEQ ID NO: 419011 - DNA, 354 bp, Oryza sativa
gtttgatatagatgggatagcaaactgcatgggggcctgagatgagaagcaggagtattctaaatgcagaagagtatccggtggaagtaggcatggagatcttatgctcaactgcgtttgtcagacaggacattgcagacagggtgaagaaccatggaaggtctgaagggatccatgcttagaagagcaaaacatggctactacgcatatccagacccagtggcgttgacacagaggaaactctaactatctaaaactgaagagagcagcactgacttatgaatgtgcttggagaataagggttgccagaagggagctgtgacagctcataatggctgcatgagatacacaagc

SEQ ID NO: 419012 - DNA, 417 bp, Oryza sativa
tttggttttagggcaataggctacagcttcgattacgatgtgtaccacagttttgtccatggaagactgccctacgagaacatcaagccggaccctgtcctgaagcacattctcaagaacctgcgcatccgcaaactcatattcaccaacggcgacaaggaccacgccgtgagagccctcaagaggctggggctggaggactgcttcgaggggatcatctgcttcgagaccctcaacccgccgtgcccgttgccgccgtgcgacggggaggccagcatctttgacatcgtcggacacttctacatgcccggcgccgtcgtcgacgagctttccaggacacccgtcctctgcaagcccaacgttgacgccatggaggaggcccttaggatcgccaacgtgaaccctcacaaggcgatt

SEQ ID NO: 419013 - DNA, 446 bp, Oryza sativa
atgcggttggattcatggcaataggctacagcttacattacggggagtaccacagttttgaccgtggaagactgccctacgagaacatcaagccggaccctgtactgaagcacattctcaagaacctgcgcatccgcaaactaatattaaccaacggttacgaggaccacgccgtgagagccctcaagaggctggggctggaggactgcttcgaggggatcatatgcttcgagacccttaacccgtcatgcccgtcgccgccgagcgacggggaggccagcatcttcgacatagtcggacacttcttcatgcccggcgccgacgccgacgagcttgccaggacacccgtactctgcaagcccaacgttgacaccatggaggaggccctcaggatcgccaacgtgaaccctcacaaggcgattttcttcgacacagcatgaggaaca

SEQ ID NO: 419014 - DNA, 471 bp, Oryza sativa
cctagttgtaaattgaactgtatatatcttgaatttgaaaacaaacagctgcccaaattatgttttacactccatcgcattgcactgctgacccaaaaaaaagaactagcaaaatctttctattctagcggggctaaaagaatcgctactttgtcgggggattttgtaccaagaagcggcggtggtgtgatcgatcgatcgatggtcagaagaaggtggttccggcgaagccgcggtggaggaggttgtgggcgatgttgtccctggcgcgcttggcggcctcggagcggacgggggtctccggcgaggtctcgtcgtcgacgagctcgaaccggagctccggctcgagctcctcgccgcgcgtcttgcagatgttgtggaggacgcagcaggcgccgagcacgacggggaggtcctggagcttcacctccgtccgttctggaggcacgcccaccgtgccttgaggcgggc

SEQ ID NO: 419015 - DNA, 484 bp, Oryza sativa
gcacgaactaaacagaataatgccaatcacttgaaaattacaaacttcacagaatttcccttcattttggtgcataactttcttagtagcaaagaaattgacataaaattgttcagcaggcttctggcacacaaaacaagataaaacagagtgttgttctcttgtaaacgaagatttatttcaagaccatatcaaagtaacagacatgaggatgccttcagcagcaaaacaactgcatctttcgatccaaaaggcagttagatatcaaggggttgcctcaagaacatctccatttgcttcgccctagtcttgatcgacatatcaaacaccttctgcccaaattgaataactagccctcccatgatgctgtagtcaatcttctgttcaatcaagatagttttgttctttccaagaatatcttgcaagggctccttaagttccttctcctcttttttggggagtgggaaaatgtcctgacaaggac

SEQ ID NO: 419016 - DNA, 152 bp, Oryza sativa
tcgcgatctagaacctcagcattgtgattcttaacaccataatgggacagagcaaaagcctccgaaagggagcttttaggcagaagggttctcccacttgaggggctttaccaccttccaggggaagtctgggtcgtcccttccgaagtgac

SEQ ID NO: 419017 - DNA, 319 bp, Oryza sativa
ttgattgtgccactgtccgtattcgtcgacacatacggcactggcaggatccctgtcatggagatcctcaagattgtgaaggagaacttcgacttcaggcctggcatgatcatcatcaaccttgacctcaagaaaggcggcaacggacgctacctcaagacggcggcttacggtcacttcggaagggacgacccagacttcacctgggaggtggtgaagcccctcaagtgggagaagccttttgcctaaaagctccctttcggaggcttttgctctgtcccattatggggttaagaatcacattgatgaggttctagat

SEQ ID NO: 419018 - DNA, 457 bp, Oryza sativa
ttggtttgcgcagccgccgagcctgccgctctcgccgccgccggtgtcgccgtcgtcctacttcgccatcccgccggggctcagccccaccgagctgctcgactcccccgtcctcctcagctcctcccatatcttggcgtccccgaccaccggtgcaatcccggctcagaggtacgactggaaggccagcgccgatctcatcgcttctcagcaagatgacagccgcggcgacttctccttccacaccaactccgacgccatggccgcgcaaccggcctctttcccttccttcaaggagcaagagcagcaagtggtcgagtcgagcaaaacgttcgggcgccgccgcgtcgagcaacaagagcggcggcggcgggaacaacatgctggaggacgggtacaactggaggaagtacgggcagaagcaggtgaaggggagcgagaaccccaggagctacta

SEQ ID NO: 419019 - DNA, 291 bp, Oryza sativa
cagacaccatcaaaccagacttaaggatccacattacaggaaaatcttacaccatgaaacgggacacgaccaaggaccagaccagacaaccatagcttcattggggaagccaatttggcaacatcatgatttttcaccagcaagcggttccatggctattaggaagaagcccttcacacggggggagagcaccaagctgaaagggggccccttttggaaggtgaaaacccgaagggggggggcattcttaagtttttttccaggaaaaatctaaccctttttgtccggggg

SEQ ID NO: 419020 - DNA, 399 bp, Oryza sativa
ttgctggcacgcagctttggatggccgcaccctggccgactacaacgggcggaaggagttcaccctccaccttgtgctcaggctcaggggaggcatgcagatcttcgtcaagaccttgactggcaagaccatcacccttgaggtcgagtcgtctgacaccattgacaatgtcaaggccaagatccaggacaaggagggcatccccccggaccagcagcgtgtcatcttcgctggcaagcagcttgaggatggacgcaccctggccgactacaacattcagaaggagtctaccctccaccttgtgctcaggctcaggggaggcatgcagatcttcgtcaagaccttgactggcaagaccatcacccttgaggtcgagtggtctgacaccattgacaatgt

SEQ ID NO: 419021 - DNA, 526 bp, Oryza sativa
gcggcttgcttctctccccaaccctagctagctccgggtgcttccccggcggcgacatcgacgatggcggcggctgcggcaggcggcggcagcggcggcgccccgcgggcgctctcccagcgggagcaggacatacagatgatgctcgcggaggacgtgcacctcggcaccaagaactgcgacttacagatggagcgctacgattacaagcgcccatccgacggcattgtgatcattaaccttggcgaaacctgggagaagcttcagctggctgccagagtgattgttgccattgagaacccacaggacatcatcgtgcagtctgctaggccttatggtcagagggctgtcctcaagtttgcacagtacaccggagcttatgccattgctggcaggcacactcctggtacatttaccaaccaactgcaaaccttattcagtgagccacgtcttctcatccctactgaccccaggacagatcatcagccaatcaaggaggctgctcttggaaacatccccactattg

SEQ ID NO: 419022 - DNA, 452 bp, Oryza sativa
atttattagagataaaatccgggaactacttgcagatgccttctccagggttcatggagagactagcaaagatgacagggaggaagtgagaaacatcttagatgaagtggatgcacgagatccattcagagttgctgggaccgttgaatctgcggtatttgagaggctgggacgttcaactggggctcacaaggcaaaattcaggtcaataatgttcaatcttagagctggcatcaacactgatttccgaagaagggttctacttggccaagtgaggcctgagaggcttgttgacatatctccagaagagatggctagtgacgcgaggaagcttgagaattagcagatcaaggagaaggctttgctccattgtgagcgtggaggaaccccaaaggcgactactgatcagttcaagtgtggcaggtgtggcccgcgggagacgacttactacc

SEQ ID NO: 419023 - DNA, 395 bp, Oryza sativa
aggaaaaatacaagttcgtgaatggcgataatacttaaagctacctccaaatagcgtgtagcattgcgtagcaaaccaagcatataacttaggacaaacattcagttgcagcttcacatcatcgctgcttatcataactgcaataacagcgcagatggagcataaactaagtatatttcgtagttctagcttatatataatatcagaatcaccaactgtgaaccatccacaggatggtcgggggactactgatcagaatctactcctttgaggtgtggatggcagacacggtggagaccatagaatccacgccacatttgttgcggacgttggagcccctgcagatcttgtagtacccatgctcttcccaatttttgccccaagagttcttggtg

SEQ ID NO: 419024 - DNA, 353 bp, Oryza sativa
gcgtgtcttttaacctcgacgactgcatacgcatacgccgggggctccgcatgcggctccggcgcgaactcgccgccaagagggggatggcgaacgtggagtacaaaggatcagacgtggagcacacgggggcgctctcaagatcgggggttccaaacacagctatttcgttgaatgtaagtggatgtactaatggaggcaaagggtggcaaaaagaattctagcagaagtcgagcctggatgtatgaagctccccgtgattacagcattgaagacgttcgacctgccggaggcgtgaagaagttccagtctgctgcttactccaactgggcgaagaagccaacctgatagcc

SEQ ID NO: 419025 - DNA, 336 bp, Oryza sativa
agaaaacaacagtttcttctacgggtgaatgaacatctttgatattacaaggttccctcggaatccacatacaacacggatagtaatgctgagagaccaggaacagcaggcatcagaaatggttccaagaactcttcgcaatgataaatttagtccatcctgcccttgatcacacactcttttacttcggttggtgtcacaagcagaacaaagcctccccaaccactgaggcaatcacgatcaactgatgactgcagagcttgtgagatagtctcaaagagttcttcaggttccatgtttggtttgtacatggactcacaagcaccatattgagac

SEQ ID NO: 419026 - DNA, 506 bp, Oryza sativa
ctttacttctggtggttttgaggctggtatctccaaggatggccagacccgtgagcacgctcttcttgctttcactcttggagtgaagcagatgatctgctgctgcaacaagatggatgccaccactcccaagtactccaaggcccgttatgatgaaatcgtgaaggaagtctcatcctacctgaagaaggtcggctacaaccctgacaagattccctttgttcccatctctgggtttgagggtgacaacatgattgagaggtccaccaaccttgactggtacaagggccccaccttgcttgaggctcttgaccagatcaacgagcccaagaggccatcagacaagcccctacgtcttccccttaaggacgtgtacaagatcggcggtattggtaccgtgcctgtgggtcgtgttgagactggtgtcctcaagcctggtatgtgggtgacctttggtccagcggtctgaccactgaggtcaagtcggttgagatgcaccacgaggc

SEQ ID NO: 419027 - DNA, 451 bp, Oryza sativa
caccaaatagcacaatcgaaaataaagagcaaaggatttagcactgtaagtactcgcattccacaacaaccgaagggcaacaataagactcagagcatccaagtttttaaccgaatagaaataaacgagttttaaacgactaacatagtgcacattgcgagcagatattaacggtccatgcaacgagtgccatggccgtgggcaaaacttaacgaacgctaagatatctcaaatgcagccagcataaccaccacttcaacgatgctcatttcttcttggcggcagccttggtcaccttggcaccggttgggtccttcttctccacgttcttgatgacgccaacagccaccgtttgcctcatgtcacgcacggcaaaacgaccaagaggagggtactcagagaaggtctccacaaccatgggcttggtgggaataatttaaccataccagca

SEQ ID NO: 419028 - DNA, 353 bp, Oryza sativa
ggaggttcttaaaaggcgccttaaataaggtaaacagtcgcattacagctagcagcaaacatgagttcgcgaattgatcaacataacattaggcaaaagagctcaaaaaaggatagtctggggcagatagttctatatccttgcaaacaactcgctatagcaaaactccaggcagacgcagcagcagattttaagcgttggcagcagcctgggcggcagcatcccgcttcctttgctcctcgatgatgctgagcttgatgcccttgcccttgggcaggctcacccaaggcttgttgcccttgccaatggtgaacacattgcccagacgggtggcgaattggtggcccagggca

SEQ ID NO: 419029 - DNA, 443 bp, Oryza sativa
ttgctgttcagaggaggacgaagcaacaggcggcggcggcagagcacggcgacctagcccgacctcgcaaccatggcaaggggtttgaagaagcatctgaagaggctcaatgcgcccaagcattggatgctcgacaagcttggtggagcttttgcccccaagccatcttctggtcctcacaagtccagggagtgcctgcctctgatcctcattatcaggaacaggctcaagtatgctctgacataccgggaggttatttctatcctcatgcagcgccatgtcttggttgatggcaaggtcaggactgacaagacctacccagctggtttcatggatgtcatttccatccccaagactggtgagaactacaggcttctgtacgacaccaagggacgtttccgccttcaatctgtcaaggatgaggatgctaagttcaagctttg

SEQ ID NO: 419030 - DNA, 389 bp, Oryza sativa
ggaggttcttaaaaggcgccttaaataaggtaaacagtcgcattacagctagcagcaaacatgagttcgcgaattgatcaacataacattaggcaaaagagctcaaaaaaggatagtctggggcagatagttctatatccttgcaaacaactcgctatagcaaaactccaggcagacgcagcagcagattttaagcgttggcagcagcctgggcggcagcatcccgcttcctttgctcctcgatgatgctgagcttgatgcccttgcccttgggcaggctcacccaaggcttgttgcccttgccaatggtgaacacattgcccagacgggtggcgaattggtggcccagggcatcctcaacgtggatggtcttgaagctgcctttatgc

SEQ ID NO: 419031 - DNA, 501 bp, Oryza sativa
tttgttagcagaggaggacgaagcagcaggcggcggcggcagagcacggcgacctagcccgacctcgcaaccatggcaaggggtttgaagaagcatctgaagaggctcaatgcgcccaagcattggatgctcgacaagcttggtggagcttttgcccccaagccatcttctggtcctcacaagtccagggagtgcctgcctctgatcctcattatcaggaacaggctcaagtatgctctgacataccgtgaggttatttctatcctcatgcagcgccatgtcttggttgatggcaaggtcaggactgacaagacctacccagctggtttcatggatgtcatttccatccccaagactggtgagaactacaggcttctgtacgacaccaagggacgtttccgccttcagtctgtcaaggatgaggatgctaaggtcaagctttgcaaggctcggtctgcgcagtttggccagaagggaatcccctacctgaacacctatgat

SEQ ID NO: 419032 - DNA, 514 bp, Oryza sativa
ggttaagacggcggcggggagcccgcggcggcgagggttttgattgatttgtcgccggcgacacgccgcccgccatggagagggagctgctggagacgttcgaggccgccaagaaggcggccgacgcggcggccggggcggacgactccccggaggccgaccgctgcctcgacgcgatgcggcggctgcgcggtctccgcgtcaccaccgacgtcctcgtctccacgcaggttggaaaacgtcttcgttaccttactaagcaccctcactcagacatacaatccatggctacagatcttctggggtactggaaaaaggttgttatcgaagaaggaaagaaaaatggtaccacagaaaatgttggatcaaccaactcagccgccagagctgaaaaggctcagcccatgaaggttgataagagttctgcatcaagaagtgtgaagcctgagaaaagagaagtcaatgttaggggccagaagcctgagagcataaggttgagaagatcaccaataat

SEQ ID NO: 419033 - DNA, 297 bp, Oryza sativa
ggaacggtaaaacaggatcttcgttaatgtattcttgagatgataaattatatagagtacaaattggagaagataaataagagtacaaattggatcgagctatgtacacagatcactgtaagataaaaggcaggcagtagagtaaataagctgtcccctcaaaatgcgacaacgatatatggaggcacggaagcagaaatttcagaaaggctccacgctgcctcattccctctccttgccgattacatgttatcgatgagctcatgcggtgttcagcttaacgagcgttccctttaa

SEQ ID NO: 419034 - DNA, 416 bp, Oryza sativa
cgttgattgaaaaaaaaaggcggacaagataaggggaggaatgcgaagaggttggagagagacgctcgtctccacgtcgccgtcatggccgcccgcgccgccgccgccgcgttcatgctgctgctcatcgtcggcgcggccaccgcggcgccggacatgtcgatcatctcctacaacgcggagcacggggcgcgggggctggaggaggggcccacggaggccgaggcgcgcgccgcgtacgacctctggctcgccgagaacggcggcggctcgcccaacgcgctcggcggcgagcacgagcgccggttcctcgtgttctgggacaacctcaagttcgtcgacgcccacaacgcccgcgccgacgagggcggggggttccgccttgggatgaaccgctttggcgatctcaccaacga

SEQ ID NO: 419035 - DNA, 498 bp, Oryza sativa
tcttccttccgtgcctacttcccccacccgcttggctggccgttgtcgccgccggcgaccgtcaagggaggggaggtccccggcgccatctcccagaaatggacgcctgtttttcaacacagcttattgatggagatggcgttctcaatgcttctggattggagaacttcatgaaggaagttaaaatgggcgaatgtgggctttcatatgctggtgtgtcaataatgggtccacaaagtagtggaaagagtacacttttaaatcaccttttccgcaccaatttcagggaaatggatgccttcaaaggaaggtcacagactaccaaaggtatatggatggcgaaggcccataatattgaaccatgcactcttgtaatggatttggaaggcactgatggtcaagagagggtagaggatgacacagcctttgaaaagcaaagtgcactggttgctttggctgttttagatattgggttgatcaatatgtggtgtcatgaca

SEQ ID NO: 419036 - DNA, 494 bp, Oryza sativa
ggtcattaggggttgcgccgtctgggttaaagaacagcagtagcaccagcatgggtgctgagaagttgcctgatcagatgcatgatctgaagataagggacgataaggaagttgaagcgactattattaacggtaagggaacagaaaccggccacataattgtcacaactactggtggcagaaatggtcagccgaaacagacagttagctacatggctgagcgtattgtagggcaaggttcatttgggattgtcttccaggcaaaatgtctggagacaggtgagacagttgctatcaagaaggttcttcaggataagcgctacaagaaccgtgagccttagaccatgcgtctttttgaccacccatatgttgtagctttgaagcactgttttttttctacaactgagaaggatgaactgtatctaatactgggaattgagtatgtgtctgaaactgttcataatgatgtgaagtataataacatggatgaacca

SEQ ID NO: 419037 - DNA, 509 bp, Oryza sativa
attttaggcaccaaatccccccaccatggatcaccgcgtcctactcctcggcctcctgctcctctccccggcggtggccgccgcctcagtccccggcgaggaggagccgctgatccggcaggtggtcggcggcggcgacgacaacgagctggagctgaacgcggagcgccacttcgccagcttcgtccagaggttcgggaagtcctaccgtgacgccgacgagcacgcgtaccggctctccgtgttcaaggccaacctccgccgcgcgcgccgccaccagctgctcgacccctccgcggagcacggcgtcaccaagttctccgacctcaccccggccgagttccgccgggcctacctcggcctccgcacgtcgcgccgcgccttcctgcgggggctcggcgggtccgcccacgaggcgcccgtcctccccaccgacggcctccccgacgacttcgactggagagaccacggcgccgttggccccgtcaagaacagggatcgtgcgggtc

SEQ ID NO: 419038 - DNA, 288 bp, Oryza sativa
ggtggtgtacaccgatcctctgcagtacggcggcgccccgggggaggcgtggttccccgactcccggtggctgccgccgaccggcgtgcaggtgggcagcctgttccggggcgtgggcgacccgacgacgccgatgtgggcgtcgtccgaagggtgcgagcgcgtgagtgtggaggaggcgatggacaccgacgacatgccggggatccccgcgctgccggtgtccgcgcgtgacgcggcggagatccacgccggtctgggcggcggaccctgcgccggcggactggc

SEQ ID NO: 419039 - DNA, 264 bp, Oryza sativa
tggatagagagagagaaggtcagggatgcaggctggggctcggttcgtctcgcctgcgatgaagcgaaccagcgactggatactttcgcaagaactcccaagcgatattaccatcaaagtcgacgatgccgccttcaacctgcacaagcttccattggcatccaggtgcggctacatcaagaagcaggtgtcaggagtcggcggcaacaaggcgacgcacctggagatcgccggcatgcccggcggctccaagtcgatcgagct

SEQ ID NO: 419040 - DNA, 486 bp, Oryza sativa
ttatttatagagaaaaaaagaaaaaaacgggagacgcggccatggcggggacggggagcttcaaggtgacgaggatctcggagggggcggtgaagccggcggcggcgacgccggaggagacgctgccgctggcgtgggtggaccggtacccgacccaccgcgggttggtggagtcgatgcacatcttccggtcgggcgccgacgcggccccgggcgtcatccgcgacgcgctcgccagggcgctgggcttcttctacccgctcgccgggcgcatcgtggagcccgaggccgggtcccccggcatccggtgcaccgccgacggcgtctacttcgccgaggccgccgcccactggaggctggaggacgttcgctttctggagcgcccccttcttcttcccaaggaggacctgggtccctaccccgccgaccaccgctggggcgtcgagccccacaacaccatcatgaagatgcagatcaccaaattca

SEQ ID NO: 419041 - DNA, 396 bp, Oryza sativa
gctacataaacattgaaattaacgtgattgcaagtttgcaacgcctgggttctcgatcaaaagggcactacactgttacatttttttcaacttttggatgacgagtcaaacaacatatgtttcgcctggtttcagttagaacacaagcccaaaagattacatgttttgctacgattagaacaaaaaacttagcataggcaatgtctgctccccgcaataaccactgcatttgtttagcaaagcatccattgggctaactcaggttcttttatctgtactgttcaggtagccgataacctgtcatgactattttggctgcaaacatcttgccggtctttggcataatatgccagtgcattgtcaggttaaaatcctttcctttgaggttgcttccct

SEQ ID NO: 419042 - DNA, 511 bp, Oryza sativa
ttgtttgagagctgaactgaagtcgccggcgccgccgtggagaagcgaagcccggcgatctacccgaccgtggagagggagcagctcgtcggggaggagagggggaggatgcattcgttcgggcaccgcgccaacgcggtggcgacgttcgcggtgaccatcctggccgccatgtgcttcgccgcctccttctccgaccacttcaactccccttcccccaccgcctctgtcaagatcttgaacataaactggtttcagaaggaagccaacggcaacgacgaggtcagcatgacgctgaacatttcggctgacctctcgtctctgttcacgtggaacacaaaacaggtctttgtttttgtcgcagctgaatatgagactccacaaaatgccttgaatcaagtttccctctgggatggcattataccatcaaaagagcacgccaagtttttgatccatacaacaaacaagtacagatttattgaccagggaagcaacctcataggaaaggatt

SEQ ID NO: 419043 - DNA, 368 bp, Oryza sativa
ataggtgtggttttattctttgtctccttcttttttccccggcggtggtcgtcgtcttatttcctgtgtaggaggagccgctgatccggaaagtggacggcggcggcgacgacaacgagctggagctgaacgcggagcgccacttcgccagcttagaccagaggttcgggaagtcctaccgtgacgccgacgagcacgcgtaccggctctccgtgttcaaggccaacctccgccgcgcgcgccgacaccagctgctcgacccctccgcggagcacggcgtcaccaagttctacgacctcaccccggacgagttccgccgggcctaccacggccttcgcacgaagagccgagcctttctgcgggggctc

SEQ ID NO: 419044 - DNA, 458 bp, Oryza sativa
gaacattagcagaaggcaaaggaaatttcccgcaaatacttattcatatgttttgacaacatttctcccgacgcatgctcattgtggcagacgcagctgaccacctagagcttttagttcaccattattatttagaccaagcatacgtcccaagatcagaacacatgcttacaagcgaaaatactaatagcctggctggctgcttcacagaataaccaaacgacaacctcaacagataaaaatgccacggaatgaaaacaaagcagcgaatcgtcaccagaagtcccatcttactcatcaaacactccatcattctcctccaacgcatcctctccccaggggagaagattgcccagtttaccttccttaacaggagcagggttcaccatattctcagcctcgaagcagtgcagaacagatttgggcgacccaacagcaacaggtacgtcttcatagcg

SEQ ID NO: 419045 - DNA, 510 bp, Oryza sativa
tttccgttttcttggagaggagaaatccgtaggctgagaggatttttggtagtcttgtttcgtgatattcgtgaagagggggggagctaaggggggattcgtaagatcagaattggatcacgcgggggcgcgctcgggatcgggggttccaaacacagcttcttcgttgaatttaagtggatgtactaatggagtcaaagggtggcaaaaagaagtctagcagtagtcgttccttgatgtatgaagctccccttggctacagcattgaggacgttcgacctgccggaggcgtgaagaagttccagtctgctgcttactccaactgcgcgaagaagccatcctgatagccctttcggcttctccatcctagtagtttaggatttcttgcaattccattttggcacttttcttctgacctatttctctggctgctgcttcctgataatcgaccagttctctagtcttgctccctgcactcctccctcctgcatctccggcacagtgttctga

SEQ ID NO: 419046 - DNA, 348 bp, Oryza sativa
  unsure (1)..(348): unsure at all n locations
ttttgaacccgctcctcggcccgtcttccgccactttgcagaaaatgggagctcttgattggaacaaagattgttcatcagcaccacggatggcgtctcattagctgtatctggctccatgctggcctaatccatttggttgtgaacatgctgagtttactgtttattggaatccaccttgaacagcaatttgggttcgttcgcattggtgccatatacctgctatctgattttggcgggagtgatgttgtctgcgcttttccttctgaataactacaccactgntggagcctctggagctttatttggactgattggaacactgctttctgagcttattatgaactg

SEQ ID NO: 419047 - DNA, 468 bp, Oryza sativa
  unsure (1)..(468): unsure at all n locations
cttattccccaaacccctcctcctcgccatggcggcgccgtcccagaccaccgccaccaccacccaccaccgtgtnctcctcccgtcccaccaccaccaccgagcggtgcctccctcgctcctccgcctcccgctccgcgccgcgcgccggggccgcctctccgccgccgccgcggccgcggcgcccgccgcgtcgaccgcggcgccgtcggagcccgccgcgggtgccgtaccggggaagccgacggtgctcgtggccgagaagctcggcgccgcggggctcgagctgctccgggggttcgccaacgtggactgctcctacggcctctcccccgaggagctccgcgccaagatcccgctctgcgacgcgctcatcgtgcggtcggtgaccaaggtggggcgcgacgtgttcgaggcatccgggggaaggcttcgcgtcgtggggcgcgccgtgtcgggatcgacaac

SEQ ID NO: 419048 - DNA, 400 bp, Oryza sativa
tttctctcgatctccattcgtttttgagttcctcgtttgctccgcctctctttcactcatgggcaagattaagatcggaatcaatgggttcggccgcatcggcaggctggtggccagggtggcgctgcagagcgaggatgtcgagctcgttgccgtcaacgatcccttcatcaccaccgagtacatgacatacatgttcaagtatgacaccgtccacggccagtggaagcatcatgaggtcaaggtcaaggactccaagaccctcatctttggcacgaaagagttgccggtgttcggctgcaggaaccctgaggagatcccatgggctgcggctggtgctgaatacgttgttgagtctactgggggtttcaccggcaaggacaaggcagcagctcacttg

SEQ ID NO: 419049 - DNA, 452 bp, Oryza sativa
  unsure (1)..(452): unsure at all n locations
tgtttcttcttctgccattccatccatccaccgccgcctccgctctctcttcttcttcttcctaccctttgcctagttgcattcggagaggagaggactgattgattgattgatcgatcgatggccatcgaccacgagtcgccgttcaaggagctccgcctcaagaacaggaggatcatgggaggaggagggcctgagccggaggaggaggaggcggtggcgcacggagagcagtggccgcggtggctgagcccgctgctctcggccagcttcttctcgcagtgcaaggtgcacgccgactcgcaccggagcggcgagtgcaacatgttctggctcgactgcgccgccgacgccgacgccgccgncgccgcgctctgctccctctgcctcgcccacaaccaccgngaccaccacaccatncagatccggcggtcgtcgtaccacgacgtgat

SEQ ID NO: 419050 - DNA, 491 bp, Oryza sativa
  unsure (1)..(491): unsure at all n locations
tttctctcgatctccattcgtttttgagttcctcgtttgctccgcctctctttcactcatgggcaagattaagatcggaatcaatgggttcggccgcatcggcaggctggtggccagggtggcgctgcagagcgaggatgtcgagctcgttgccgtcaacgatcccttcatcaccaccgagtacatgacatacatgttcaagtatgacaccgtccacggccagtggaagcatcatgaggtcaaggtcaaggactccaagaccctcatctttggcacgaaagaggttgcggtgttcggctgcaggaaccctgaggagatcccatgggctgcggctggtgctgaatacgttgttgagtctactggtgttttcaccgacaaggacaaggcagcagctcacttgaagggtggtgccaagaaggtcgtcatttctgctcccagcanagacgcccccatgttcgttgttggtgtcaacgagaaggagtacaagtctg

SEQ ID NO: 419051 - DNA, 405 bp, Oryza sativa
  unsure (1)..(405): unsure at all n locations
tttcctctcgatctccattcgtttttgagttcctcgtttgctccgcctctctttcactcatgggcaagattaagatcggaatcaatgggttcggccgcatcggcaggctggtggccagggtggcgctgcagagcgaggatgtcgagctcgttgccgtcaacgatcccttcatcaccaccgagtacatgacatacatgttcaagtatgacaccgtccacggccagtggaagcatcatgaggtcaaggtcaaggactccaagaccctcatctttggcacgaaagagtntggcggtgttcggctgcaggaaccctgaggagatcccatgggctgcggctggtgctgaatacgttgttgagtctactggtgttntcaccgacaaggacaaggcagcagctcacttgagg

SEQ ID NO: 419052 - DNA, 289 bp, Oryza sativa
tttctcgcggaggccgccgcaaccaaaaaaaaaaaagtctaaccctagatccaggccccgcgtctccggcgatctcccggccatggcgactcgccgggccctctcctccctcgtccgcgccgcctccaggctccgcggggcctcgcccgccccgcgcccgcgcgggccgctccaccgaccgtcgccatcggggtacctcttcaaccgcgccgccgcgtacgccacggccgccgcggcgaaggaggcggcgccttccgcgcccgcgacggggaaggcctcgggtggtggt

SEQ ID NO: 419053 - DNA, 539 bp, Oryza sativa
  unsure (1)..(539): unsure at all n locations
ctcgtacattttcagctagccacaagcaacacaagtccaagacaagtcaagcgttcgcaccaagtcaaaccgcgcctcactgccaccttcgtttgcgcaccatggagcttgccctggttggcaacccttcgaatggcgtggcgaagccgtcgtgcaactccgtcggctcgctgcccgtcgtcagctccaacgccgtcatcaacccgccggtgaccagcgcggcgggcgccacgctcggcaggcacctcgcgaggcgcctcgtgcagatcggcgccaccgacgtgttcgccgtccccggggacttcaacctcaccctgctcgactacctcatcgccgagcccgggctcaagctcatcggctgctgcaatgagctcaacgccgggtacgcggccgacggctacgcccgcgcccgcggcgtcggcgcctgcgccgtcacgttcaccgtcggtggcctcagcgtgctcaacgctatcgccggcgcctacagcgagaacctncccgtgatctgcatcgtcggcgggcccaactccaacgactac

SEQ ID NO: 419054 - DNA, 498 bp, Oryza sativa
ctcgtcttccttgcttttatcgccggcgacgtcgccgtcggctccggcggcgccgaggagtaggagtagtaggaggaggaagccggtagccggaggaggagcgatgagatggatgacgcgaagcagcagcagtagcagctgacggggggggtcgacactggggtttggaagacggtgaatcctttggtcaacggaggtgcctctgggatgctcgccatctgtgtcatacatcccatggacatggtcaaggtgaagatccaactgggagagggatctgcagctcaggtcacaaagaacatgcttgctaatgagggtattgattccttttacaagggttagtgagctggtttactaaggcaagagacatatactactgctcgtctaggatacttaaggtgtctgacaaacaaagcaattgaaaagaatgatggaaagccattgcctttagttcagaaagcttttattggccttactgctggagctatttgagcatgtgtt

SEQ ID NO: 419055 - DNA, 497 bp, Oryza sativa
  unsure (1)..(497): unsure at all n locations
ctcgtgccttctagggtttcctcttcctcgcaccgcgccgcctcgcctcttcgtccccagattcagatctactcctactcctactaccaaggttgttgccatggctcccgctgttgaagccgtggagaagaagacaggctcagcccccgtcaaggcccctgctctgaatgaaaggatactgtcatctatgtcccggagatctattgcagcacatccatggcatgatcttgagattggacctggtgcaccaactatattcaactgcgtcattgagattcctaggggcagcaaggttaaatatgaacttgacaagaaaactggactgatagtggtggaccgtgtgctctattcatcagntgtgtaccctcacaactatggattcattcctcgcacgctgtgtgaagacagtgatcccgtggatgtgctggttataatgcaggagcccgttataccaggatgctttctacgagcaaaggccattggtctcatgcctatga

SEQ ID NO: 419056 - DNA, 529 bp, Oryza sativa
ggatcttgggccatgaagctggaggcattgtggagagtgtgggagagggtgtgaccgaactcgcgccgggcgaccatgtcctcccggtgttcaccggcgagtgcaaggagtgtgatcactgcaaatcggaggagagcaacatgtgtgacctcctcaggatcaacgtcgaccgcggcgtcatgatcggcgacggcaagtcccgattcaccatcaaggggaagcccatcttccactttgttggcacatccaccttcagcgagtacaccgtcatccatgtcggctgcctcgcgaagatcaacccggaggcgcctctcgacaaggtctgcattctcagctgcggtttctctaccggttttggtgcaacagtgaatgtcgcgaaaccgaaaaagggccagaccgtggctattatcggtcttggagctgttggtcttgctgctatggaaggtgccaggctgtctggagcatcgaggatcattggtgtggacctgaaccctgcgaaattcgacatgctaagaagtttggctgcact

SEQ ID NO: 419057 - DNA, 544 bp, Oryza sativa
tctttaggatcttgggccatgaagctggaggcattgtggagagtgtgggagagggtgtgaccgaactcgcgccgggcgaccatgtcctcccggtgttcaccggcgagtgcaaggagtgtgatcactgcaaatcggaggagagcaacatgtgtgacctcctcaggatcaacgtcgaccgcggcgtcatgatcggcgacggcaagtcccgattcaccatcaaggggaagcccatcttccactttgttggcacatccaccttcagcgagtacaccgtcatccatgtcggctgcctcgcgaagatcaacccggaggcgcctctcgacaaggtctgcattctcagctgcggtttctctaccggttttggtgcaacagtgaatgtcgcgaaaccgaaaaagggccagaccgtggctattttcggtcttggagctgttggtcttgctgctatggaaggtgccaggctgtctggagcatcgaggatcattggtgtggacctgaaccctgcgaaattcgaacaagctaagaagtttggctgcactgactttgt

SEQ ID NO: 419058 - DNA, 514 bp, Oryza sativa
tctaaaccatcgcttcccctcctctctcgctctcgccggagttagatgcgcgtgagctcgtgtaggagagcgggagcgagcactaccgggtgagactccggcggcggcggcggccgcgatggcgtccatctccggcgcggcggcgcctccgtcctcgtcggcggcgtgcaggctgcggctgcggcggcagctcctcctccgcccctcccacctccgcctccgcgccccccactccatcgcggacctctcccgctcctcctcgtcctcgtcggagcagcagccctcctctaccccggcggcgccgctcgcctccaggccggggcagaacggcagcacccgcggcgcggtggagaaggacccgatcaagctgtgggagaggtacgtggagtggctgtaccagcacaaggagctcggcctgttcgtggacgtgagccggatggggttcacggaggagttcctccgccggatggagccgcggatgcagcgcgccttcgcggcgatgcgggagctcgag

SEQ ID NO: 419059 - DNA, 526 bp, Oryza sativa
gttctgtcggctactccttcctcctcaagaaggacaaggccataattgtgcaaccggagcgtgtcatcgtcgggaatggcccggcgtttgggtgcgtcatgatgaaggagttcttatctgagctggctaagcgcgtcaacaagaacaccactgcttatgagaactacaagaggatcttcgtgcctgagggccagccgctggagagcgagccgaatgagccgctgcgcgttaatgtgctcttcaagcacgtccagaagatgctgaacagtgacagtgctgtgattgccgagactggtgactcctggttcaattgccagaagctgaagctccctgagggctgcgggtatgaattccaaatgcagtatggttccattggatggtcagtgggtgcattgctcggatatgctcagggcgctaaggacaagcgtgtgattgcctgtattggtgatgggagtttccaggtgacggcacaggatgtgtcaacaatgattcgctgtgcacagaacagcataatcttcctgatcaa

SEQ ID NO: 419060 - DNA, 532 bp, Oryza sativa
gctttgtcggctactccttcctcctcaagaaggacaaggccataattgtgcaaccggagcgtgtcatcgtcgggaatggcccggcgtttgggtgcgtcatgatgaaggagttcttatctgagctggctaagcgcgtcaacaagaacaccactgcttatgagaactacaagaggatcttcgtgcctgagggccagccgctggagagcgagccgaatgagccgctgcgcgttaatgtgctcttcaagcacgtccagaagatgctgaacagtgacagtgctgtgattgccgagactggtgactcctggttcaattgccagaagctgaagctccctgagggctgcgggtatgaattccaaatgcagtatggttccattggatggtcagtgggtgcattgctcggatatgctcagggcgctaaggacaagcgtgtgattgcctgtattgttgatgggagttttcaggtgacggcacaggatgtgtcaacattgattcgctgtgcacagaacagcataatctttcctgatcaacaacc

SEQ ID NO: 419061 - DNA, 528 bp, Oryza sativa
gttgttgctgctgctcctcccgttttccgatcgcagccatgggaacccgcagcgtggccttggtgctcctcgcggccgtgctgctccaagccctcctccccgcttcggcggcggagggtttggtgcggatcgcgctgaagaagcgcccgatcgacgagaacagccgcgtcgccgcgcgactctccggcgaggaaggggcgcgccggctgggcctccgcggcgccaactcccttggcggcggcgggggtgagggcgacatcgtggcgctgaagaactacatgaacgcgcagtacttcggggagattggcgtcggcactccgccgcagaaattcaccgtcatcttcgacactggcagctccaacctctgggtgccgtcggccaagtgctacttctcgattgcgtgcttcttccactctcgctacaagtccggacagtcgagcacttatcagaagaatggaaaaccagctgccattcagtatggcactggttcaattgctgggtttttcagcgaggataggtgtacagtag

SEQ ID NO: 419062 - DNA, 549 bp, Oryza sativa
gtataatcaatgcagcgttctacccatgcttttctttctgtacttcctgcctaaactttgcctataaatctgcacatccatggctcgtttcttgcaacaaagccacagccttcatcatcatcagagagagaaggagagagaggaagagattgcagtgagtgagtgagtgagtgaagcagccatggcggcggcggcgagggcaacggcgcgggtcgggcttgcgctgctgctcgcggtggtgggcgtcggcgcgcaggactacgacttcttcttcctggtgctgcagtggcccgggtcgtactgcgacacgaagcagagctgctgctacccgcgctccggcaagccggcggccgacttcggcatccacggcctctggcccaaccgcgacgacggcagctacccgcagaactgcgaccctgacagcgagttcgacccctccaaggtgagcgacctgctggggagcatgcgctcggagtggccgacgctggcgtgcccgagcaacgacggcatccggttctgggcgcacgagtgggagaagcacggcacctg

SEQ ID NO: 419063 - DNA, 458 bp, Oryza sativa
  unsure (1)..(458): unsure at all n locations
ttcttcttctccttagttgatttcatcttcagttgcttgagcttaattacagactgagagaagatgtcttgcagctgtggatctagctgcagctgcggctcaaactgctcctgcggaaagaagtaccctgacctggaagagaagagcagcagcaccaaggccaccgtcgtgctgggtgtggcgccggagaagaaggcgcagcagtttgaggcggccgcagagtccggcgagaccgcccatggctgcagctgcggttccagctgcaggtgcaacccttgcaactgttaagatgcctgcctgcatctaccatctatgtgaattgtgatgcagaaaaataaagaagcttggccatttgggttggtgcttgaccaatatatatggtgtgtgtgtgtgtgtgtgatgggnttatnnnatgtgctatgttattggtttcactattcacgtactatgcttgtaat

SEQ ID NO: 419064 - DNA, 548 bp, Oryza sativa
tttgggtttaagatgcactgccgtggctggcgatccatctactgcatgccgataagacccgcgttcaagggatcagcgccaatcaacctttctgatcgtctccaccaggttctccggtgggctctcggttccgttgagatcttcctcagccggcactgcccactctggtacggctacggtggtggtcgtctgaaatggctccagagattgtcctacatcaacaccatcgtctacccgttcacctctcttcctcttattgcatactgttgcctgcccgccatttgcctgctcacaggcaaattcatcattcccacgctctccaacgctgcaaccatatggtttcttggcctcttcatctccatcatcgtgacgagcgtcctggagctgcggcggagtggcatcggcatcgaggactggtggcgcaacgagcagttctgggtcatcggtggcgtctccgcccacctcttcgccgtgttcagggtattctcaagatgattgctgggctggacaccaacttcaccgtacggccaaggcgaccgacgacaccg

SEQ ID NO: 419065 - DNA, 550 bp, Oryza sativa
  unsure (1)..(550): unsure at all n locations
gcagatccaaaccaactcttaccgtcgacgaggaagaaggcggcggcggcggcggaggcgaaggcggcgaagatgcagtacaagaacctggggaggtcggggctgcgggtgagccagctgtcgtacggggcgtgggtgacgttcggcaaccagctggacgtgaaggaggcgaaggcgctgctccaggcgtgccgcgacgccggcgtgaacttcttcgacaacgccgaggtgtacgcgaacgggcgcgccgaggagatcatggggcaggcgatgcgggacctcgggtggcgccgctccgacgtcgtcgtctccaccaagctcttctggggagggcagggccccaacgacaagggcctctcccggaagcacatcgtcgagggcctccgcggctcgctcaagcgcctcgacatggactacgtcgacgtcgtttactgtcaccgncccgacgccaccacccccgtcgaggagaccgtgcgcgccatgaactgggtcatcgaccacggcatggccttctactggggcaccttcgagtggntccgccagcagatca

SEQ ID NO: 419066 - DNA, 532 bp, Oryza sativa
tcggttattgttgatatgcagaataacgttgtcatagaatttgaagataggaagttggttcctctccccccaccagatcatctgagaaactacactcctggggaaacgagaggtggtgttgatcgaagtgatttgaaacctcttattatcaatcaacctgagggcccgagcttccgcattaacggatattttgtggaatggcagaagtggaacttccgtattggcttcacccctaaagagggtttggtcatctattctgttgcatatgttgatggcagccgtggacgtcggccgatagctcataggctcagctttgttgagatggttgttccttatggagatcccaatgaaccacattatcgcaagaatgcttttgatgctggagaagatggacttgggaagaatgctcattctcttaagaggggatgtgactgtttaggtttcataaagtattttgatgcacacttcacgaattttacgggtggtgtggaaacaaatgagaattgtgtatgtttgcatgaggaagaccacg

SEQ ID NO: 419067 - DNA, 227 bp, Oryza sativa
tctgcatataatggattctctcctatatatatataggacttatgaaatgacttagctaaatgatttatcattttagaagtgattgcaagactccaattaatgaaacaaactgttcaatcatccatatattaaaaatattactgaattttaaattggcaaatcatgatatatgggttcttgttctctcttgcagataaccaatatcatatgtatgatatagagttccc

SEQ ID NO: 419068 - DNA, 482 bp, Oryza sativa
attttcattcgcatccacgagaccactcgaacccgacccgcctcgccgccgccgccaccgaagtaatcccttaattggtcaaaatgtctcgggaggagaatgtctacatggccaagctggccgagcaggctgaaaggtatgaggagatggttgagtacatggagaaggttgcaaagactgtagatgtggaagagctcactgttgaggagcgcaacctcttgtctgttgcttacaagaatgtgattggtgcccgccgtgcctcctggcgtattgtctcatccattgaacagaaggaggagggtcgtggcaatgaggaacatgttactctgatcaaggagtaccgtggcaagattgaagctgagctgagcaagatttgcgatggtatcctgaagttgcttgactcacaccttgtgccctcatctactgctgcagaatctaaggtgttttacctcaagatgaagggtgattaccacaggtacctt

SEQ ID NO: 419069 - DNA, 539 bp, Oryza sativa
  unsure (1)..(539): unsure at all n locations
ctctctacccccaaacttgccctccaatctatctccgccgccgccgccgcctccgccgcgagagggcgtcgccgagctgcgcgggaggctcgcctcccgcagcatctggccggattcgtcgtagtcgaggcagctgtaagcgagagagagggagatggccgcggccgccgggaaggcggcgatggagcggcaccagtcgatcgacgcgcagctgcggctgctcgcgccggggaaggtatccgaggacgacaagctcgtcgagtacgacgccctcctcgtcgaccgcttcctcgacatcctccaggacctgcacggccctcacctccgcgaattcgtgcaggagtgctacgagctgtcggcggagtacgagaacgacagggacgaggcgcggctcgacgagcttgggaggaagcttaccagcctgccgccggggactccatcgtcgtctccagctccttctcgcacatgctcaacctcgccaacctcgncgaggaggtgcagatcgcgcaccgccgccgatcaagctcaagcgcggggac

SEQ ID NO: 419070 - DNA, 424 bp, Oryza sativa
gtctttgccacgccgccgccgccgccatggccatcaaaacctagtgccgcctcgcgcagcgcgctgcgtcgtttggatctcgacgacggccggcgccaaggcacggagggagaagaaaaccacgcgcctcttctgtgttctccggcgatggcgagctccacggcatttgcagcggcatttgcgctgctgctgctagcgtcgtcggcggcggcggagggggaggcggtgctgacgctggacgccggcaacttcacggaggtggtgggggcgcacgacttcatcgtcgtcgagttctacgccccatggtgtggccactgcaaccagcttgctccggagtacgaggcggacgccgcctgcctgcgctcgcacgacccgccggtcgtccttgccaaggttgacgccagcgccgacctgaaccggggcc

SEQ ID NO: 419071 - DNA, 551 bp, Oryza sativa
gtcgtcgccgtcgaagccgatctcctgcgcgcggagcggatcgcctctgtcagtcaccagctatacagtatgagttcactggagagtgcaagagcagatcttgctctgcttattttatacctaaacaaggctgaagcaagagataagatctgtagagctatacaatatggctcgaaatttgtgagtaatggacaaccagggcctgcacagaatgttgacaagtcgactagtctagctcgtaaagttttccgactttttaagtttgttaatgatctgcatgctttgattagtcctcctgccaaaggaactccactacccctgatcttacttggaaagtcgaagaatgcactgctatcaactttcctctttctggaccaaattgtatgggctggaaggacaggaatatacaagaacaaggagcgagcagaattcctcagcaagatagcattttattgcttcctgggttctaacacatgtactagtattattgaggtagccgagcttcagcggctatccaagtcgatgaagaaactagagaaggagcttaaaca

SEQ ID NO: 419072 - DNA, 499 bp, Oryza sativa
atcgatcgagttatcaagagataattaatatcgtttcggtttagtgcgcgtgatccagcagcagcaatggcaggcaaggcctcgatcgcgctattcctcgccgtcaacctggtggtcttctcgttgggcagcgcctgcggcggccactgcccgacgccgacgccgccgaccccgtcgacgcccaccccgactcccgccgcattcggcaagtgcccacgcgacgcgctgaagctgggcgtgtgcgccaacgtgctgggcctcatcaaggccaaggtgggcgtgccgccggcggagccgtgctgcccgctgctggaggggctcgtcgacctcgaggcggcggtgtgcctctgcacggccatcaagggcaacattctcggcatcaaccttaacctccccgtctacctcagcctcattctcaactactgcggcaagcgcgtgcccaccggcttcaagtgcttctaaaggctttataaagtagccgcgcgatcgattcatgcac

SEQ ID NO: 419073 - DNA, 456 bp, Oryza sativa
tctttttccccaactcggcgtcgcgccgcctcaaccgaagcaaggagcaaagcggggattcagaacgggaaggagaaggtccggttcgtccgctctcgagctcaagtgtcagttgaagtgttttgaaagtcatggcggagcatttggcttcaatatttgggactgagaaggatagggttaactgccccttttacttcaagattggggcttgccgtcatggggatcgttgctcccgtctgcacaacaggccaactgtgtcgccgacaattgtgcttgctaacatgtatcagcgccctgatatgatcacaccaggagtcgatgctcaaggccaacctattgatcctgaaaagatgcaggagcactttgaggatttctatgaggatatctatgaggagctgagcaagtttggtgaggttgagaccctcaatgtctgtgataaccttgctgaccacatga

SEQ ID NO: 419074 - DNA, 505 bp, Oryza sativa
ccccaactcggcgtcgcgccgcctcaaccgaagcaaggagcaaagcggggattcagaacgggaaggagaaggtccggttcgtccgctctcgagctcaagtgtcagttgaagtgttttgaaagtcatggcggagcatttggcttcaatatttgggactgagaaggatagggttaactgccccttttacttcaagattggggcttgccgtcatggggatcgttgctcccgtctgcacaacaggccaactgtgtcgccgacaattgtgcttgctaacatgtatcagcgccctgatatgatcacaccaggagtcgatgctcaaggccaacctattgatcctgaaaagatgcaggagcactttgaggatttctatgaggatatctatgaggagctgagcaagtttggtgaggttgagaccctcaatgtctgtgataaccttgctgaccacatgataggcaatgtgtatgtccagtttagggaggaaagacaggcagtcgctgcgcataat

SEQ ID NO: 419075 - DNA, 557 bp, Oryza sativa
  unsure (1)..(557): unsure at all n locations
cgccgctgctcgcttccttttcctctcccacgaaagatggcgtctcacattgttgggtacccccgcatgggccccaagagggagctcaagtttgccctggagtctttctgggatgggaagagcagcgctgaggatttggagaaggttgcgaccgacctcagggccagcatctggaagcaaatggctgacgctgggatcaagtacatccccagcaacaccttctcgtactatgatcaggttcttgacacggctgccatgcttggtgctgtcccagagcgctactcatggactggtggagagattgggttcagcacctacttctcgatggctaggggcaatgccactgtccctgccatggagatgaccaagtggtttgacaccaactaccactttatcgtccctgaacttggtcccaacaccaagttctcctactcttcccacanggctgtgaatgaatacaaggaggctaaggcgctcggcgttgacaccgtgccagtacttgntggaccagtttcatacttgttgctctccaaaccttgccagggtgtagagaagtc

SEQ ID NO: 419076 - DNA, 530 bp, Oryza sativa
gtccgctcggcgacgccgcgctgcaggagcgcctcggccagcacctcgacgtcgtcgaggcgcacctcgtgcgggagatcgcgcgccgctccgagtccttctacgaggcgcagggccggctgcgggggctggacggggagatcgtcgccgcggtcgggaggatccgggagctcagggaggtggtccgggtgctcaccggcgatctcgtgggtgccgcgcgccaggtgcaggagctcaatgcgacgcggggtaacctcgtcgcgctgcagcagaagctcaccgtcatcctctacgtcagccaggcgctcgctgctctaaagctgcttgtggcagctgcggattgtgctggtgcccttgacgtaattgatgacctgcaaaacttgctagatactgatgaactcactgggctttattgctttcgaaatattcgtgatcagttggggacatcactagattctgtcaacagcattctttcagcagaatttgtgcgggctgctgttcctgatggaaaagctgtagacgcattgatt

SEQ ID NO: 419077 - DNA, 566 bp, Oryza sativa
  unsure (1)..(566): unsure at all n locations
gtctcgtcgtcgtcaccgccgccggctcaccccccacccgtcgccgccggcgcggaggccaagccctagccccagcgcggccgatcgcctcgatcccccggcgagccgatgggcgtgcgccgctgaagcatgccagcgcgccgaggccgtggaaagcggaagcagcagcagccgccgccgccgccgacgggcccagcggacgcgaggcagccggaggggaagcagcgggaggaggagcggaaggggatggaagggtccgacaaggggggcgccggcgacgacgggagccccgcgccgctcccggagacggtacaaatcggaaattcaccaacgtataagcttgagaggaagcttggaaagggaggatttggacaagtatacgttggccggcgtatttcctctcctactcatggtaacagaaattctggtgcaaatgcattagaggttgcgctaaaattcgaacatcgaaccagcaaaggttgcagctatggagctccctatgaatggcaagtctacaatactcttagtggaaatcatggtgtnccacgggtacactacaaaggaaa

SEQ ID NO: 419078 - DNA, 550 bp, Oryza sativa
  unsure (1)..(550): unsure at all n locations
gtcatagatggtgacaaaaatgtctgagaaagtggcaactggaatactatccggagttgtaaaggttactggctattttacaaactcaatagctaactcaaaagctggcaagaagttctttaatttgttacctggagagattgttcttgcttcgcttgatggattcggtatgattctttaacttttctattgtatctggttagtgttacataatgggtctgcttggcattattgttttttttaatggtataatgagtgttgatatgtttgctttattcagacatgaaacctggtttcataatttaataaatttatgttattcttaaactcacctagacaacacctgtgtcatgactcatgagcagattggtttttctgtttctaatntgaatatccctgtgggttgcattatataagtcataattatctgacgtaggtcaggctttgcttgggtttttttggtcgcatatattctgtgaatttgcataacttgatggatacaaaattttgccaaatctgaggtagcataagaagcatatactttggtgac

SEQ ID NO: 419079 - DNA, 554 bp, Oryza sativa
ctttgcacaaagcctcagtgcctcactgcacttgcaccggtcactaatggctccggctcaatgtgctcgtgtgcagagggtgttccacttcggcaagggcaagagcgagggcaacaaggccatgaaggacctgctgggagggaagggggcgaacttggcggagatggcgagcatcgggctgtcggtgccgccggggttcacggtgtcgacggaggcgtgccagcagtaccaggcggcggggaagacgctgccggcggggctgtgggagggagatcgtcgaggggctccagtggtggaaggagtacatggcggtgcgcctcggtgaccccgtccgccctctcctactgttcgtccgatccggcgccatcgtgctgatgccggggatgatggacacggtgctgaacctggggctgaacgacgaggtggcggcgggactggcggacaagagcggtgaccgctttgcgtacgactactaccgacgttttctcgacatgttctggaacgtggtcatggacaattctcatgcactgttcgaggagaagctcgaagccatg

SEQ ID NO: 419080 - DNA, 526 bp, Oryza sativa
gtttccccaattcggaggccaagcctgcaccggcaagcggcggcggcggcggcgacgaggcgagagggttcccttccgcggagccggcggagatggaggccacggcgaagtacaaccggggcaacccggcggtgaagcggatccttcaggaggtcaaggagatgcagtccaacccgtccccggacttcatggccatgcccctcgaggaggacatcttcgagtggcaatttgcgatcctggggccacgagacagtgagtttgagggaggaatctaccatggaaggatccagctgccatcggactatccgtttaagccaccatcattcatgctgctcacgccaagtggaagatttgagattcaaaagaagatttgtttgagcatatccaattaccaccctgagcactggcaaccatcatggagtgtgcgcacagctcttgtagctttgattgcattcatgccaacaccaggtggtggggcattgggttcgttggacttcaaaaggaagatagacgggcactagctatc

SEQ ID NO: 419081 - DNA, 501 bp, Oryza sativa
tatcatctccagctgatcaagagctcttaattagctagctagtgattagctgcgcttgtgatcgatcgatctcgggtacgtagcaatggcgtccaaggcgttcgctctgttcctggccgtgaacctcgtcgtgctcggggtggcaagcgcctgcggcggcagcccgtcgtgcccgacgccgacgccgtcgaccccgacaccgtcaacgccgacgccgacgccgtcggcgttcgggaggtgcccccgcgacgcgctgaagctgggcgtgtgcgccaacgtgctgggcctgatcaaggccaaggtgggcgtgcctccggcggagccgtgctgcccgctgctggaggggctcgtcgacctcgaggcggcggtgtgcctctgcacggccatcaggggcaacatcctcggaatcaacctcaacctccccatcgacctcagccttatccttaactactggggcaagaccgtccccaccggcttcaagtgctaagcagcgtgcatatg

SEQ ID NO: 419082 - DNA, 480 bp, Oryza sativa
tttgcatttgttagtgaatatgcggtgactggaaatgatgctggccgaggaacattagtagctgctctagcagaagctgcatttctcattggattagaaagaaacaggtcttttgcctcttttatggcatttctagggcctgttcactttgatgccattttcaaccttaccaaaatttggtaaagttgccaataaagtggctacatttagtttgctgccaaattttggtaaatatataagaaatcctgccagttgccaaaattttggtaactatgccaaaatttggtaaggttttttttggcatcaaagcgaacaggccctagttttggcacctgggtgatacttgcttttattggaagcttacttgttttgcgagctgtttctgtgcagtgatgtggtcgagatggcaagttgtgctccactcttcataaatgacaacgatcgcgggtttagtccagatgccatagtcttcaactcatg

SEQ ID NO: 419083 - DNA, 562 bp, Oryza sativa
tcctgcgccgcctcatcttatctcgccaatcccccttcgtcgcgcgcaaggctaaaccctagctcctccgcggctccgcccccaccgcctaaaccctgctccgcccccaccgcctaaaccctagttcggaggtagccttcgcggtcctcctctcctgtttggctcatcgattctacggttcgattgagttgcgtgcgggcgtggtgcgggaggatggccgagccctccaaggtgatccacatccggaacgtcgggcatgagatctccgagagcgaactgctccaggtggtgcagccgttcggcactgtcgccaagctcgtcatgctgcgtgctaagaaccaggctctcgtccagatggaggatttagcttctgctgtgaatgtgatccaatactacaatacaattcaacccagtgtaaggggaagaaatgtttacttgcaatattcatcccaccaagaattgactactgatcagagctctcatggacgaaatcctgatcaggaagaacctaaccgaattctgttagtaaccattcatcatatgctttaccctataaaccatg

SEQ ID NO: 419084 - DNA, 523 bp, Oryza sativa
aaggaagcagggcaactttgcgggtgcagtggaggagtacagcagagccctcagcctgacacccagccacttcaaggcgctgttcaaccgcggcttctcgtatgacaagctgggcaagtatgacttggccatccaggactacaccaaggccctggaggttgaccctgccaacagctttgcatactacaaccgcggtatcaccaaggaccgcatgggtgactttgagggggcagtggcagacttctcgtcagccatctcgctggaccccggcaacgccgacttctatcacaaccgcggcttctcgctgcgcaagcagggccgctttgagtcagccatccgggactacacgcaggccattcagctcaacccaggtcactgccgcgcctactacaaccgcgccttcagccacgaccgcttggggcagtttgaggatgcagttgcagactacagcaaggccctgcagatagagccggcgaatgccacagcactgcacaacaggggcagcttgtttgagcggatgggc

SEQ ID NO: 419085 - DNA, 551 bp, Oryza sativa; identical to SEQ ID NO: 394858

SEQ ID NO: 419086 - DNA, 521 bp, Oryza sativa
gcgtcctccgttgacaacatcgatgctcctgctttgggttcttctttgcacgaattccgccaccgccgacgtcgccggcagcaatggcggctgcggcggctttaagcgcatgttcagcttcggcgactccatcaccgacgccggcaaccttgcgaccatcagccctcccgacgccttcttgaacatgctccggtacggcgagaccttcttcggccaccccaccggccgcttctgcgacggcaggctcatcgtcgacttcctagcggatgatctggggctgccgttcctgacgccgttcctccgggcgaagtcgccggaggacttccggcagggggccaacttcgcggtggccggagcgacggcgctgagccaggactttttcaagcagatggggctcaacctcaccatcatacctccattctcgctggacgtgcagctcgagtggtttaagagcgtgcttaattctcttggctctcagaccaagaacgcatagaaattatgtctaaatccctatttctaat

SEQ ID NO: 419087 - DNA, 269 bp, Oryza sativa
cttccaccttctcccttctcctcgctcttccccctccgccgccgccgcagcggagcagcaacagcaggcgagcgacatgggagggtttgtcaagacccagaagacccatgcctacttcaagcgtttccaagtcaagttcaagagacggaggcagggcaagactgactacagggccaggattaggctcaccaaccaagataagaccaggtccaacacaccgaagtaccgttttgttgtgagattaacaaacaaagatatcacagttaaaa

SEQ ID NO: 419088 - DNA, 524 bp, Oryza sativa
ctcattttccgcttgcatcttgctcattcagatctcttctgctttgagcaatggccaacctcaccgacctcgttaacctcaacctcagcgactgcagcgacaagatcatcgccgagtacatctgggttggaggatcgggcatagacctcaggagcaaagcgaggactgtgaaaggccccatcaccgatgtgagccagctgccgaagtggaactacgacggctccagcaccgggcaggctcccggcgaggacagcgaagtgatcctctaccctcaagccattttcaaggacccgttcaggaggggcgacaacatccttgtgatgtgcgactgctacacgccacaaggtgagccaatccccactaacaagaggcacagtgccgccaagatcttcagccaccctgatgttgttgctgaggtgccatggtacggtattgagcaggagtacacactccttcaaaggatgtgaactggccccttggctggccagttggtggctttcctggcccacagggaccatactact

SEQ ID NO: 419089 - DNA, 553 bp, Oryza sativa
  unsure (1)..(553): unsure at all n locations
ctttctcctcctccttcttctccatcgccggcgagagagagagagttagctagctaggatgggttctacagccgccgacatggccgcggcggccgacgaggaggcgtgcatgtacgcgctgcagctggcgtcgtcgtcgatcctgccgatgacgctcaagaacgccatcgagctgggcctgctcgagacgctgcagtccgccgccgtcgccggaggaggggggaaggcggcgctgctgacgccggcggaggtggccgacaagctgccgtccaaggcgaacccggcggcggccgacatggtggaccgcatgctccgcctgctcgcctcctacaacgtcgtcaggtgcgagatgggnngagggcgccgacggcaagctctcccgccgctacgccgncgcgccggtgtgcaagtggctgacgcccaacgaggacggcgtctccatggccgccctcgccctcatgaaccaggacaaggtcctcatggagagctggtactaccttaaggacgcagtcctggacggcggcatcccgttcaacaaggcgtacgggatgac

SEQ ID NO: 419090 - DNA, 571 bp, Oryza sativa
  unsure (1)..(571): unsure at all n locations
acacaagctaccccaactccggccatggcgcgccagcacttcctcgtcgtcgcgtaccctggccagggccacatcaacccggcccgagccctcgccgcgcgcctcgcccgcgccaccggcgcgcacgtcaccctgtccgtcgccgtgtcggcgcaccggcgcatgttcccgtccctcgccgcccccgacgaggaggtccacgacgccgacgccggcggcggcgggatctcctacgtcccgtactccgacggctacgacgaagggttccggctgttcgccagcgacggcgaggcggcgtggcggcactcggagacgttcgggagcgtcggccgcgaggcgttcgccggcgtggtggaccgcctcgccgcgcgcggccgccccgcgacgtgcgtcgtgtacgcgttcctgatgtggtgggcggccgacgtcgcgcgcgagcgcggnatcccgcgggtgctctactggatccagccggcgaccatgctcgccgtgtactaccactacctncacgggctcgaggagctcgtgacggagcancgccgcgagccggagttacggtggacatgccgag

SEQ ID NO: 419091 - DNA, 419 bp, Oryza sativa
tgctgcctttggaaatcatgtggacacatatggtggactagatatttgcatcaattgtgctggaattgccatcaagacactagtttatgatgatagatctgatggaactagcacatggaggcatgctgtaaatgtgaaccttgttgctgttattgatggtactcgcattgcaagtcaaattatgcgatctgggaagaagcctggtgtcataataaatattggttcagccgcaggcctttatcctatgaactttgatcccatatatagtggaacaaaagctggcgttggtatgtttacaagatcacttgcttcattgaaacgccatggtatacgtgtcaatggactctgcctgagtttgttcaaactaatatggcagagcaactaagtcgtcgaataatagatgtaactggtggatatat

SEQ ID NO: 419092 - DNA, 543 bp, Oryza sativa
ctccccgccgccttttttcgccgctcgccgccgccgccgccgccgccatgggtgcgtacaagtacgtgtcggagctatggaggaggaagcagtcggacgtgatgaggttcgtgcagcgcgtgcggtgctgggagtacaggcagcagccggccatcgtccgcctcacccgccccacccgccccgacaaggcccgccgcctcggctacaaggccaagcagggttatgtggtttaccgtgtccgtgtgaggcgtggtggcaggaagaggccagtgcccaagggtattgtctacggcaagcccaagcaccagggtatcacccagctcaagttccagaggaacaagaggtcagttgctgaggagagagctgggcgcaagttgggcggactcagggtgctcaactcctactgggtgaacgaggactccacctacaagtactttgagatcatccttgtggatgttgctcacagtgctatccgcaatgacccaaggatcaactggctctgcaagcctgtgcacaagcaccgtgagctccgtggtctcacct

SEQ ID NO: 419093 - DNA, 451 bp, Oryza sativa
  unsure (1)..(451): unsure at all n locations
gttgtactaactgatgaactgctctcatgcaagccagattaccataaagattgggtcataagcactgttgttagggtttctttcatgtagggaaaggaaaggtgatttcagttgcctgactgctgccagaatctgcgaagcatctacaagcgacgccgtcgttcaggcagccggcacggcaatgccggttccccttgctccatacccaaccccgcctgtgccatttacacctcccaatggggctcaaagccagctcgtgtgctctgggtgccgtaatctgctcatgtatccagccggagcaacgtcggtttgctgcgcagtttgcagtaccgtgactgctgtgcctgctcctggaaccgagatggcgcagttagtttgcggaggatgccacactctcctgatgtatatacgcngtgcgacgagtgtgcaatgttcttgctgtcacactgtc

SEQ ID NO: 419094 - DNA, 517 bp, Oryza sativa
gttgtactaactgatgaactgctctcatgcaagccagattaccataaagattgggtcataagcactgttgttagggtttctttcatgtagggaaaggaaaggtgatttcagttgcctgactgctgccagaatctgcgaagcatctacaagcgacgccgtcgttcaggcagccggcacggcaatgccggttccccttgctccatacccaaccccgcctgtgccatttacacctcccaatggggctcaaagccagctcgtgtgctctgggtgccgtaatctgctcatgtatccagccggagcaacgtcggtttgctgcgcagtttgcagtaccgtgactgctgtgcctgctcctggaaccgagatggcgcagttagtttgcggaggatgccacactctcctgatgtatatacgcggtgcgacgagtgtgcaatgttcttgctgtcacactgtcaacctggctatggaagatattttcctgtggcttgaaagcacagcaatcagtccgtagcaataaaca

SEQ ID NO: 419095 - DNA, 461 bp, Oryza sativa
gttctttggaacgcgtacttacccacaagttaggtgcatgccatggcaccattcatggcgtgcgcctcgccaccggtactcacgctggccctgctcgcgtcgtgcggtgcccttctcgccacctccatgctcccggcgcgtgcgacggcgggcagttgcttggacgtcggcgacatggtgatgatggacaggttccgcgcttggcagggagctcacaaccggtcgtacccgagcgcagaagaggcgctgcagcggttcgatgtgtaccgccgcaacgcggagttcatcgacgccgtcaacctgcgcggcgacctcacttaccagctcgccgagaacgagttcgcagacctcaccgaggaggagttcctggccacgtacaccgggtactacgccggcgatggccccgtggacgactccgttatcacgacgggtgccggagacgtcgacgccagcttcttcta

SEQ ID NO: 419096 - DNA, 514 bp, Oryza sativa
ttgttttggagattaagttacctatactggtttattggaatctgacagtgtctagtggagtaaacagctcaaatacattggattattcggctatgtggtcatctggatatgtaactattgcgtgtagagtcctcttatactcttcatctgtgcatgtatacaagcatccaagaacaatcttttctgattctgaagatgatgatcagagaagatgtggaaattatcaacatcatgcagggtgatctgggaatggaagagaattgtccacgatgagaagcttctcaggatccaggcccccattctcaatgtcaacgatttcgctgtgccagtgtagcctgtctgcagcatccttcaccttgtgaaccacatcaggcgcgtcccggattatcgcagcgcctcctggccggagaatgcgatccatctcgagcatgatgtaagggatgccacacgtgttcatatacaggctgaatactccattggcatgtagcacatcatatgtacgtggataagtaga

SEQ ID NO: 419097 - DNA, 520 bp, Oryza sativa
  unsure (1)..(520): unsure at all n locations
ttgttttggagattaagttacctatactggtttattggaatctgacagtgtctagtggagtaaacagctcaaatacattggattattcggctatgtggtcatctggatatgtaactattgcgtgtagagtcctcttatactcttcatctgtgcatgtatacaagcatccaagaacaatcttttctgattctgaagatgatgatcagagaagatgtggaaattatcaacatcatgcagggtgatctgggaatggaagagaattgtccacgatgagaagcttctcaggatccaggcccccattctcaatgtcaacgatttcgctgtgccagtgtagcctgtctgcagcatccttcaccttgtgaaccacatcaggcgcgtnccggattatcgcagcgcctcctggccggagaatgcgatccatctcgagcatgatgtaagggatgccacacgtgtccatatacaggctgaatactccattggcatgtagcacatcatatgtccgtggataagtagagaaaga

SEQ ID NO: 419098 - DNA, 515 bp, Oryza sativa
tttgctcagcaagttcttatgatgaccactacaaccgtgtccgttgcacgcttgcgtcttatatcatcaacgagaactcaactggtgaagtgaaatttagcccaatgaggcgagtattgttggagatgattgagaaagcgttttcaaccataaaccttgaaacgcacactggaactcacccaaggattggagtcattgatgacatgtccttccaccccttgaatcaagccacaatggaagatgctgctcaactggctaagactgtggcctctgacattggcaacttcttacaagtcccagtattcttgtatggagcagcacaccccactggcaaacctgtgactgcagtacggcgtgaactgggctacttccagccaaattacatgggcatccaatggatgggtcaggtactccctgatattctgccggtgaagccagatgagggcccagatcatgtttctcgtgaaagaggtgccataatgatcggtgctgcacctttacccctgaactataat

SEQ ID NO: 419099 - DNA, 508 bp, Oryza sativa
tttgctcagcaagttcttagatgaccactacaaccgtgtccgttacacgcttgcgtcttatatcatcaacgagaactcaactggtgaagtgaaatttagcccaatgaggcgagtattgttggagatgattgagaaagcgttttcaaccataaaccttgaaacgcacactggaactcacccaaggattggagtcattgatgacatgtccttccaccccttgaatcaagccacaatggaagatgctgctcaactggctaagactgtggcctctgacattggcaacttcttacaagtcccagtattcttgtatggagcagcacaccccactggcaaacctgtgactgcagtacggcgtgaactgggctacttccagccaaattacatgggcatccaatggatgggtcaggtactccctgatattctgccggtgaagccagatgagggcccagatcatgtttctcgtgaaagaggtgccataatgatcggtgctgcacctttaccccctgac

SEQ ID NO: 419100 - DNA, 407 bp, Oryza sativa
gctgtttgagttcgagtgcttccttgacaagacctggactgtttgaaatgtcttcctatcgaactcagctggatatgcgactttaacacgaactgctcgcgatgcacaggctaggaatcagctcgagcgctttactgaatgtctcgagagagagagttgtgagacattccaagattgtattacctgtgaccggctcaagctcgcggagtatatgtacacccgtgtgaagcatctgacatacactactactgaagatgctgtgaccagctctggagctcctttctggtctgctccaaatcgtttaccacgaccactggagttcttgacgtctgatccaaggcagcttaacttctttttggatgctgcaatcttaaggctagagacatttgggatacccatacctgact

SEQ ID NO: 419101 - DNA, 522 bp, Oryza sativa
tgttgagcagaggaggacgaagcagcaggcgggggcggcagagcacggcgacctagcccgacctcgcaaccatggcaaggggtttgaagaagcatctgaagaggctcaatgcgcccaagcattggatgctcgacaagcttggtggagcttttgcccccaagccatcttctggtcctcacaagtccagggagtgcctgcctctgatcctcattatcaggaacaggctcaagtatgctctgacataccgtgaggttatttctatcctcatgcagcgccatgtcttggttgatggcaaggtcaggactgacaagacctacccagctggtttcatggatgtcatttccatccccaagactggtgagaactacaggcttctgtacgacaccaagggacgtttccgccttcagtctgtcaaggatgaggatgctaagttcaagctttgcaaggttcggtctgtgcagtttgccagaagggaatcccctacctgaacacctatgatggtcgcaccatccgctaccctga

SEQ ID NO: 419102 - DNA, 534 bp, Oryza sativa
tttatagacccacccctgcacatacagcaaggacaaggagtgtaagcctgctctgttcaatgccctgttcagcaccgtctccttcctgcttggagccatcacctcagtggtttctggcttcctcgggatgaagattgcgacttacgcaaatgcgcggaccaccctggaggcgaggaagggtgttggcaaggccttcatcaccgcgttccgttcgggagcggcgatgggattcttgctggcatcaaatgggcttctggtgctttacattgccataaacttgttcaagatgtactatggcgatgattgggagggtctctttgagtccatcactggctatggccttggtggatcctcaatggctctgtttggaagggtggtggagagggtatctacaccaaggcggctgacgtcggtgctgatcttgttggcaaagttgaaaggaacatccctgaagatgatcctcggaaccctgctgtgattgctgtcactgttggaaacaacgttgggtgatattgcttgtaatgggatccgatc

SEQ ID NO: 419103 - DNA, 192 bp, Oryza sativa
caaggattctggtctggagaaagctgccagaagtgcttcccaatcaaaggtggaaaatggctcaccttcagaaatcattttagatgattttgaagacttgagccctctatcagaaaatgatgactccactgttagtatcactgtagtcggagcatctggtgaccttgccaagaagatgatatttcctgcact

SEQ ID NO: 419104 - DNA, 391 bp, Oryza sativa
atcctctccttcctcttcctctgctcactcagctctcccccgcgcgcgccaccgtcgtcgccatgtcgggcaacatcgccttcggccgcttcgatgactccttcagcgcggcctccctcaaggcctacgtcgccgagttcatctccaccctcgtcttcgtcttcgccggcgtcggctccgccatcgcctacaccaagttgaccggcggcgcgccgcttgacccggccgggctggtcgccgtggcggtgtgccacgggttcgggctgatcgtggcggtggccatcggcgccaacatcttcggcggccacgtcaacccggccgtcaccttcggcctcgccctcggcggccagatcaccatcctcaccggcgtcttctactggatcgcccagct

SEQ ID NO: 419105 - DNA, 451 bp, Oryza sativa
gccaatcttcctttcccacatcctcctccgccgccggctgctttccaccggctcccgatctccgaggcaagcagcgccgcacccggccgctgccgccgccgccatggcgttcgagaagatcaaggtcgccaaccccatcgtcgagatggacggtgatgagatgaccaggatattctggcagtctatcaaggacaagcttatctttccatttttggatctggacattaagtactatgacttgggagttctccaccgtgatgcaactgatgacaaggtcaccgtggaggctgcagaggctactctcaagtacaatgtggctattaagtgtgcgacgattactccagatgaggctcgggttaaggagttcaacctaaagcaaatgtggaagagccccaatggcacaattaggaatattatcaatggcactgtattcagagagccaattatatgc

SEQ ID NO: 419106 - DNA, 220 bp, Oryza sativa
cttcttttttttttttttttaggttcaaatccaacttattcataaagcatactgctgtcccacaggacactgttttataaaactaacatagcatacggacttggttgtccattaaaccagacacaaggagacattagcaccacaaatacttgacgtacagagggtcgggcctgccaggcacatcgtcagctccaccaaactggctgattactgaccacca

SEQ ID NO: 419107 - DNA, 246 bp, Oryza sativa
tcttaacgccgccgccaccgacgccgccgtcgccgccgaatccgagacccccatctcggattcacctctcccgcctccggcctccgtcaccgtctccccacgcgcgtcagtcatggcgggaatggcaccagagggatcccagcttgatgctaagcactatgattctaaaatgcaggagcttctgaaccaaggtgaaaccgaggagttcttcacatcttatgatgaagctcatgagagttttgatga

SEQ ID NO: 419108 - DNA, 305 bp, Oryza sativa
tgttatagctgactcaaaacttcagccacaggggctgcgcagggtgccgaagggcgcggaagggctatgcccaggactactctatgtatggacacgatgctaaactagctgaagagatcaagaagggtgctgcatctaacgaaggagctgaggctaaaacagggcagggtcctgcagctgttcatgaggaagtactagggaaggaggtcgcgcctcctaagccagaggcgctagctaccacaccacatgaacttactgtggctgatggaaaactgcttgctgtccctacaagggtcggcatgaag

SEQ ID NO: 419109 - DNA, 361 bp, Oryza sativa
aaaaaacaaggaaacatttttatttcgagggaaggacgcaggactgaagaaacttaaaagtgtccctgatgtgtttcatcatccgttctgtcactcacaaatggactcaaaatacagacccagatcaagtgtggtgttcaaccaaaatgttaactggcgaatggaaggtggcgtggttttctagaaactgcagatttgtacagaccaatccccagacagaagaaatacaagatcaagactggtgggcagcaaacaaattttgctgggatttatttgccccgattcatcgtccaagttcttcataccttcagggccaacttcttagcagcaagaacctccgcttcgagggttggctcccaaa

SEQ ID NO: 419110 - DNA, 267 bp, Oryza sativa
gcagctttgagcttagctatggcaatggccgcgccgctgacgttggtggtggtggcggcggcggtggccgtcgtcttcgtcggcggcggcgtggaggggtgggtgctcaaggaggggttctacgagcagagctgcccgcgcgcggaggcgctggtgaagcactacgtggagcagcacgtccccctcgcccactccgtcgccgccaccctcatccgcacccacttccacgactgcttcgtcagggggtgcgacgcgtcggtgctgctg

SEQ ID NO: 419111 - DNA, 481 bp, Oryza sativa
cttattgtcacttccatctcattctcctaattgtcatcactagcttctagctagcttaattaattaattagccatggcggaggagaagcaccaccaccacctgttccaccacaagaaggacgacgagccggccaccggagtagactcctacggcgagggcgtctacacgtcggagacggtgaccaccgaggtggtcgccggcggccaggacgagtacgagaggtacaagaaggaggagaagcagcacaagcacaagcagcacctcggcgaggccggcgccctcgccgccggcgccttcgccctgtatgagaagcacgaggcgaagaaggacccggagaacgcgcacaggcacaagatcacggaggagatcgcggccacggcggcggtcggcgccggcggctacgccttccacgagcaccacgagaagaagaaggaccacatgagcgccgaggagtccaccggcgagaagaagcaccacctc

SEQ ID NO: 419112 - DNA, 383 bp, Oryza sativa
ggagatcgcgatggtgctgaagcaggggctggagaagacggggcggttcaacatcgtgtccaaggacaacggcgtgccgctggtggccttctccctcaaggacagcgcccggcacaacgagttcgagatctccgacttcctccgccgcttcggctggatcgtgccggcctacaccatgccccccgacgcgcagcacgtcaccgtgctccgcgtcgtcatccgcgaggacttcagccgcacgctcgccgagcgcctcgtgctcgacgtcgagaaggtgctgcacgagctcgacgcgctccccgcccgcgtcgtcgtcaacggcggcgacgccgccgccgcgtcggcgagcgagagggagatggagagcatcgcgaggtgatctc

SEQ ID NO: 419113 - DNA, 488 bp, Oryza sativa
ccatcccatcgcttcccccctccacccgtctcctccgtctccggcgccggcgccggcgagctcgccccccgcgattcgtgccctccgatcagaggcgaggcgggagaagagatggggctcacgttcaccaagctgttcagccggctcttcgccaagaaggagatgcggatcctgatggtgggtcttgacgcggccggaaagaccacaatcctctacaagctcaagctcggcgagatcgtcaccaccatccccaccatcggattcaatgttgaaaccgtggagtacaagaacatcagcttcaccgtctgggatgtggggggtcaggacacgatcaggcctctgtggaggcattatttccagaacacccagggtctcatctttgttgtggacagcaatgatagggaccgtgttgtcgaagccagggatgagcttcacaggatgctgaacgaggatgagctacgtgatgctgtgctgcttggcttttgcta

SEQ ID NO: 419114 - DNA, 421 bp, Oryza sativa
gagaaatgaaaagcgagccatttgaagctggtggttacaaatggtatattcttgtataccctcaaggatgtgatgtttccaaccacctatcactttttctctgtgttgctaatcatgacaaacttctcccagggtggagtcattttgcgcagttcactatagctgtaggcaatatagatcctaagaaagtaaaatactccgatactttgcataagttctggaagaaggagcatgattggggatggcaaaaatttatggagttgccgaagattcaggatggctttcttgttgatgatgttcttgaaatcatagctcaagttcaagttatcagggagaaggtggacaaaccatttcgttgcctcgatcgcccttatcgaagagaattgctccgtgtttatacgacaaacatcgagtcaatata

SEQ ID NO: 419115 - DNA, 422 bp, Oryza sativa
ctttcctaaacctcgccggaatccaacccctccgccgccgccatgagggagatcctgcacatccagggggggcaatgcgggaaccagatcggggccaagttctgggaggtgatctgcgacgagcacgggatcgaccacaccggcaagtactcgggcgactccgacctccagctcgagcggatcaacgtctactacaacgaggccagcggcggcaggttcgttccgcgcgccgtgctcatggacctcgagccgggcaccatggactcggtgcgctccggtcccttcggccagatcttccgccccgacaacttcgtcttcggccagtccggcgccggcaacaactgggccaaggggcactacaccgagggcgccgagctcatcgactccgtcctcgacgtcgtccgcaagggagcccgagaact

SEQ ID NO: 419116 - DNA, 409 bp, Oryza sativa
  unsure (1)..(409): unsure at all n locations
taacaatggagggtgtcggtggcggcaagcgccgcggggacgacggggcggaggccacgccgcggtggcgcttctcccggccgtcgtcgcagggcgggcccctggcggccgccggcctcacgagcatccgcgcggtgctcaaccgcgtcaactcctccgtcgacgccgccgccgccggcgggccgcgccccgtcctgcggctcggcaacggcgaccccaccgcgtccgcctgctaccgcaccgcgcccgccgccgaggacgccgtcgtcgacgcgctccgctccggggcgcacaacggctactccctaaccgtcggcgtactctcggcgcgccgtgctattgcagaatacctatctcgagatcttccttatgagctttcggcanatgatatttaccctgacctccggat

SEQ ID NO: 419117 - DNA, 470 bp, Oryza sativa
aagttggtcatcgtgctcgagctgaatctaaacctttgcaacaatggcggcgcgtgttgttgtggcgttcgcggttgcgtccgccatgttcgtggccgtctccggccagaagttcaacgccatcttcagcttcggcgactccatgtccgacaccggcaacctctgcgtgaacggcccccccgccggcctgacgctcacccagcctccctacggcgagaccttcttcggccgcgccacctgccgctgctccgacggccgcctcgtcgtcgacttcctcgcggagaagttcgggctgccgttgctgccgccgtcgaagaggggcggctccgacttccggcgaggcgcgaacatggcgatcatcggcgccaccaccatggactccggcttcttccagtcgctcggcatcggcgacaagatctggaacaatggccccctcaacacccagatccagtggttccagcagctcatgc

SEQ ID NO: 419118 - DNA, 378 bp, Oryza sativa
aaatgctcctcctccgccgcctcctctcgctgagctgagctgagctgtgaaatagtgccaccgagtgagcgctgagctgagctcgaagcaagagaggaagaggaggaggagggaagagggggggcgaagatgattacggcggcggacttctaccacgtgatgacggcgatggtgccgttgtacgtggcgatgatactggcgtacgggtcggtgaagtggtggcgcatcttcacgccggaccagtgctccgggatcaaccgcttcgtggcgctcttcgccgagccgctgctgtcgtttcactttatctacaccaacaacccgtacacgatgaaccttcggttcatcgccgccgacacgctgcagaagctgatggtgctg

SEQ ID NO: 419119 - DNA, 490 bp, Oryza sativa
gccaaatgttgatatcaaaaccgtgctgtctcaactcatggacaggttatcaagctatgctgccgcaagtcctgaagtattgccagaattcttgcaagttgaagcttttgcaaagttcagcaatgctattggaaaggtgatagaggcccaagttgacatgccagttgttggtgcagtaactttatatgtatcacttttgacatttactctccgtgtgcatccggatcggcttgattatgttgatcaagtgttgggtgcatgcgtaaagaaactttcagggaatgcaaaacttgaagatagcagggcaacaaagcaaattgttgcacttctcagtgcccccctggagaaatatagcaatattgttactgcattagagctctcaaactatcctcgggttatggattaccttgataattctacaacacaagttatggctcttgtaataattcaaagcataatgaagaacacgacttgcatatctacttctgac

SEQ ID NO: 419120 - DNA, 464 bp, Oryza sativa
cgatgaaggaaaaaaaaaggaggaaaagaaaagaggaggaaagcgaagaggttggagagagacgctcgtctccacgtcgccgccatggccgcccgcgccgccgccgccgcgttcctgctgctgctcatcgtcggcgcggccaccgcggcgccggacatgtcgatcatctcctacaacgcggagcacggggcgcgggggctggaggaggggcccacggaggccgaggcgcgcgccgcgtacgacctctggctcgccgagaacggcggcggctcgcccaacgcgctcggcggcgagcacgagcgccggttcctcgtgttctgggacaacctcaagttcgtcgacgcccacaacgcccgcgccgacgagcgcggcgggttccgcctcgggatgaaccgcttcgccgatctcaccaacgaggagttccgcgcgaccttcctcggcgccaaggtcgccgagaggagccg

SEQ ID NO: 419121 - DNA, 482 bp, Oryza sativa
  unsure (1)..(482): unsure at all n locations
gctcagtatgtcaagtataaggatccgaagcagcccgtctctgttcgtgtcaaggatctgctcggccggatgactctcgctgagaagattggccagatgacccaaatcgagagggagaatgccacggcggagcagattgccaagtacttcataggtagtgtactgagtggtggaggcagtgtgcctgctcctcaggcatcagctcaggcttgggcttcaatggtgaatgaaatgcaaaagggtgccctttcgacccgactaggtattccgatgatctacggtattgatgccgtgcatgggcacaataacgtctacaaggctacaatcttcccccataatgtcgggctcggcgctaccagggaccccgacctagtaaagaggataggagaagcaactgctcttgaagttagagctactggaattccctacgtctntgctccttgcgttgcggtttgcagagacccaagatggngacgctgcta

SEQ ID NO: 419122 - DNA, 489 bp, Oryza sativa
gctcagtatgtcaagtataaggatccgaagcagcccgtctctgttcgtgtcaaggatctgctcggccggatgactctcgctgagaagattggccagatgacccaaatcgagagggagaatgccacggcggagcagattgccaagtacttcataggtagtgtactgagtggtggaggcagcgtgcctgctcctcaggcatcagctcaggcttgggcttcaatggtgaatgaaatgcaaaagggtgccctttcgacccgactaggtattccgatgatctacggtattgatgccgtgcatgggcacaataacgtctacaaggctacaatcttcccccataatgtcgggctcggcgctaccagggaccccgacctagtaaagaggataggagaagcaactgctcttgaagttagagctactggaattccctacgtctatgctccttgcgttgcggtttgcagagacccaagatggggacgctgctacgaaagc

SEQ ID NO: 419123 - DNA, 507 bp, Oryza sativa
  unsure (1)..(507): unsure at all n locations
aagttggtcatcgagctcgagctgaatctaaacctttgcaacaatggcggcgcgtgttgttgtggcgttcgcggttgcgtccgccatgttcgtggccgtctccggccagaagttcaacgccatcttcagcttcggcgactccatgtccgacaccggcaacctctgcgtgaacggcccccccgccggcctgacgctcacccagcctccctacggcgagaccttcttcggccgcgccacctgccgctgctccgacggccgcctcgtcgtcgacttcctcgcggagaagttcgggctgccgttgctgccgccgtcgaagaggggcggctccgacttccggcgaggcgcgaacatggcgatcatcggcgccaccaccatggactccggcttcttccagtcgctcggcatcggcgacaagatctggaacaatggccccctcaacacccagatccagtggttccagcagctcatgccctncatctgcngctcatcttgcangacgtacctgtc

SEQ ID NO: 419124 - DNA, 362 bp, Oryza sativa
gctctagctggctagcggccgccgtaacaatggcggcgcgtgttgttgtggcgttcgcggttgcgtccgccatgttcgtggccgtctccggccagaagttcaacgccaggttcagcttcggcgactccatgtccgacaccggcaacctatgcgtgaacggcccccccgtcggcctgacgctcacccagcctccctacggggagaccttcttcggccgtgccacctgtcgatgatgcgacggccgcctcgtcgtcgactttctcgcggagaagttcgggctgccgttgctgccgccgacgaagaggggcggttccgactttcggcgaggcgcgaacatggcgatcatcaacgccaccaccatg

SEQ ID NO: 419125 - DNA, 477 bp, Oryza sativa
gctgatttggtgtggaggcggggaaatgcgtgatgtgtgagatctagggcgtggggaggcggatcgcagcaatggcggcgccgcggtgggcggtgtgggcggtgctgctgctgcggctgctcgtgccggcggcgcgggtgctcgccaacatggaaggtgatgcattgcatagcttgaggactaatttagtcgatcctaataatgttctacaaagttgggacccaactctggtcaatccgtgcacttggtttcatgttacttgcaataacgacaacagtgttatcagagttgatcttgggaatgctgcactatcaggcactttggtcccacaacttgggcaactaaaaaacttgcaatacctggagctctacagtaataacataagtggaacgatacctagtgaacttggaaacctcacaaacttggtcagtttggatttgtacttgaacaacttcactggtccaataccagattcac

SEQ ID NO: 419126 - DNA, 482 bp, Oryza sativa
  unsure (1)..(482): unsure at all n locations
cgtgttccatgaagctccagtacctccgcctcggcgccgtgcccgccgtcgtggcggcgctcgcggggcccggggcctcccccgccgcgctcgtgcaggccgccgccgccgttgggagcttcgcgtgcggcgtcgacgacggcgtgcgggccgtgctcgccgccggggccgtggcccacctgacgcggctcctcgcccaccccgacgagaaggctgttgatgctagtgcacgtgctctgagaatgatttatcaatcgaaactagctccaaagtttgatgtcaacaataatgagaaaaacatggaatttcttcttacccttttgaacagcgagaatgaaaatgtcacagagcttgctgccaatattatatctcactcttgtgatagcactacagaacaattagcactatgtgctgctggagttccgcagagacttgttaaccattttggaggctccatgaatctacnggatgcttgcttagat

SEQ ID NO: 419127 - DNA, 474 bp, Oryza sativa
  unsure (1)..(474): unsure at all n locations
aaccttcgtcttcgtcttcctctcgccgctgattcgattcgatccgatccgatccaaggggaggggaagcaatggcgacgaagaggagcgtggggacgctgggggaggcggatctgagggggaagaaggtgttcgtgcgggccgacctcaacgtgccgctcgacgacgcccagaagatcaccgacgacacccgcatccgcgcgtccgtgcccactgtcaagttcctcctcgagaagggcgccaaggtcatcctcgccagccatctgggccgtccgaagggtgtcacccccaagtacagcttgaagcctcttgttccacgcttgtctgagctacttggagtcgatgttgtgatggccaatgattgcattggtgaggaagttgagaaattggctgctgctttgccggaaggtggtgttctactcctagagaatgttagattctacanggaggaagaaaagaatgatcctgagtttg

SEQ ID NO: 419128 - DNA, 499 bp, Oryza sativa
  unsure (1)..(499): unsure at all n locations
cgcttctccaggctcctcttcttcctgctcttctccaccaccgcgctctactcctccacctcgtcgtcctcctcctccgccgtgctccgcgccacgacgacgacgacgaccaccaccacaaccaccacgaccaccaccaacaccttcaccctctccttccaagccaacccaaaccctcccccatctaacctctccaaccacactgccctggacgcggcgggggcggccgggcacacgcagagccacgtggtggtggggcggcatgggatacggatccggccatggccgcaccctgaccccgtcgaggtgatgcgggcgcaccggatcatggagcgcgtgcaggaggagcagcggaggtggtatggcgtcaaggagccgcgccatgtcctggtcgtgacgcccacctactcccgcgcgttccaggcgctccacctcaccggnctnctccactcccttcgaacgtgccctacccgctcacctggatcgtggtcgaggcagg

SEQ ID NO: 419129 - DNA, 420 bp, Oryza sativa
  unsure (1)..(420): unsure at all n locations
ctagtcttcgctccccaccaagctccgccaccgccggaaccctagacccgccggcgatggcccgctacgaccgcgccatcaccgtcttctcccccgacggccacctcttccaggtcgagtacgccctcgaggccgtccgcaagggcaacgccgccgtcggcgtccgcggctccgacaccgtcgtcctcggcgtcgagaagaagtccacccccaagctccaggactccaggtcggtgcgcaagatcgctagcctggacacccacatcgcgctggcgtgcgcggggctcaaggcggacgcccgcgtgctcatcaaccgcgcgcgggtcgagtgccagagccaccgcctcaccgtcgaggacgccgtcaccgtcgagtacatcacgcgctacatcgncggnctgcagcagaagtacacccaga

SEQ ID NO: 419130 - DNA, 487 bp, Oryza sativa
  unsure (1)..(487): unsure at all n locations
cgcgtccatggccaccgccgcatccacctccgccgccgccgtcgccgccgcatcgcgcctcctcgtccgccgcgcgccgccgcgcctgctgcgccggttaccccgcgcggcgctcgccgcctctcgcccgtcgccgccgtcgtcgtcgtcgtacggtgcagcagccgtcgccctcggccggcagccgctcggccaccgcgctaggatgggacacaccgccgccgccgccgccgccgcgggccccgcgctcgggctcaccaagcccaacgccgtcgagccgccgcaggtttcatttgctgctaaagacgtcgaattctccgaatggaagggagacatcctcgcaatcgcagtgacagagaatgatctggtcaaaggatcagactccaaattcgagaatgcggtgttgaagaagctcgacggccagctcggcggcctnctgtcggaggcatcggcggaggaggatttcaccggcaaagccgggcaatca

SEQ ID NO: 419131 - DNA, 376 bp, Oryza sativa
ctatcttctcctccggctcttcttcagtatcgaatcctctcttctcctcgtgcccaccaccaccaccgtagcaatggcgggcaacgggccgatcaacaaggaggacccgctcaactggggcgcggcggcggccgagatggccggcagccacctcgacgaggtgaagcgcatggtggcgcagttccgcgagccgctggtcaagatccagggcgccaccctccgcgtcggccaggtggccgccgtcgcccaggccaaggacgccgccggcgtcgccgtcgagctcgacgaggaggcccgcccccgcgtcaaggccagcagcgagtggatcctcaactgcatcgcccacggcggcgacatctacggcgtcaccaccggc

SEQ ID NO: 419132 - DNA, 396 bp, Oryza sativa
cattaatgatttctttttacattggtgggcaccctcgactgggccccctgagggagctcatgctcgcccttgcgtcgttccgcgagggcaagagcagccacgaggacaaggagaaggatgcgaccgaccgcaggggcagcatcaggaagaacaaggcagaccctgggaacaagaacatccccagcaacaccgccccggactatgaagagggggccgaccccgctgccaggcacggggcggcgccagagcgcgacacacggaccggtggagagaccggcgccagcacccacccggcgatggcgaggcgccggggcaacagagccccgcccaggaggagaccaagaggtgggacaccaacaacgcacccaaccgtgcttcaacctgggcccaacacca

SEQ ID NO: 419133 - DNA, 493 bp, Oryza sativa
ccatactctcctttaccccaatctcgtgagcggcgacgaactttgccaccgatttcgatccttttttttggcagcgtgtagtgacgcgagagagaaatggcgagcaagaggagcgtgggcaccctgacggagtcggatctgaaggggaagaaggtgttcctccgcgccgatctgaacgtgccgctggatgacagccagaagatcaccgacgacacccgcatccgcgcgtcggttcccaccatcaagttcttgatggggaagggcgccaaggtcatcctggccagccatctgggtcgcccaaaaggtgtaaccccgaagtacagcttgaagcctcttgatccgcgcttgtctgagcttcttggtgttgatgttgtgatggccaatgactgcatcggtgaggaagtccagaaattggctgccactttaccagatggtggtgttctgcttctagaaaatgttcggttctacacggaggaagagaaaaatgaccctg

SEQ ID NO: 419134 - DNA, 485 bp, Oryza sativa
tcactgaggaagaagagcatagcaaaagagtggtcgatcgtcatcaatggagcacgacggcacggcggcgctcggctgggcggcgcgggacgcctccggccacctctcaccgttcagcttcacaagaagggttcaggaggaagacgacgtgacgatcaaggtgctctactgcggcatctgtcacaccgacctgcacaccatcaagaacgagtggggcaacgccatgtaccccgtcgtccccggccacgagatcgtcggcgtcgtcgccggcgtcggcgccggcgtgaccaggttcaaggccggcgacacggtgggcgtgggctacttcgtcgactcgtgccgcgcctgcgacagctgcggcaagggggacgagaactactgcccgacgatggtgatcacgtcgaacggcacggactacggcggcgccaccacccagggcggtttctccgacgtcatggtcgtgaggcaggactacgtgttgcgcg

SEQ ID NO: 419135 - DNA, 485 bp, Oryza sativa
ggcatctcaacgccggaatcttcggcactggctccgatggccacacgctgccgtcggagacggtgcgggcggccatgctcgtgcgcatcaacaccctcctccagggctactccggcatccggttcgagatcctcgaggccatcaccaagctgctcaacaccggcgtcacgccgtgcctgccgctccgtggcaccatcaccgcgtccggtgacctggttcccctgtcctacattgccggcctcatcaccggccgccccaacgcgcaggccatctcgcccgacggcaggaaggtggacgccgccgaggcgttcaagctcgccggcatcgagggtggcttcttcacgctgaaccccaaggaaggtctcgccatcgtcaatggcacgtccgtggggtcggcgctcgcggccaccgtgatgttcgacgccaacatcctcgccgtcctgtccgaggtgctctcggcggtgttctgcgaggtgatgaacggc

SEQ ID NO: 419136 - DNA, 504 bp, Oryza sativa
tcgtgctcccctcgtcgtcgccgccgccgcctcgcctcctcggagatcttcgctgcccttccgccaacatggggaagacacgtggtatgggagctgggcgcaagctcaagacccaccgcaggaaccagagatgggcagacaaggcctacaagaagagccacttgggtaatgagtggaagaaaccctttgctgggtcatctcatgccaagggcatcgttctggagaagattggtattgaggccaagcagcccaactctgccatccgtaagtgtgctcgtgtgcagcttgtgaagaatgggaagaagattgctgcctttgtgcccaatgacggttgcctgaacttcattgaggaaaatgatgaggtgttgattgctggatttggtcgcaagggccatgctgtgggagatattcctggtgtccgattcaaggtcgtcaaggtctctggtgtgtctctccttgctctcttcacggagaagaaggagaagcccaggtcttagattactg

SEQ ID NO: 419137 - DNA, 498 bp, Oryza sativa
caaatattccacttccatttgttttctcttttggattcaagaagactaatgattcgtcagagggacctatattgaatgccatggagatctacaaatatatagagatttctgtgggatctcaagatgcaaacattatggccagcttggtctcacggtatccagaagcaggttgggcacaagagggtggtgacccttgcttaccagcatcatggtcttgggtgcaatgcagttctgaggcagcacctaggatattttcaatctcattgtcagggaagaacattacagggagtatccctgtggaattaacgaagctatcggggctggtcgaactaaagcttgatggtaactcatttactggtcaaattcctgatttcactggatgccatgatttacaatatattcaccttgaggacaaccaattaaccggtgcattgccaccttccttgggagaactacctaactctgaagaagtgtatattcagaacaataagctgtctg

SEQ ID NO: 419138 - DNA, 395 bp, Oryza sativa
  unsure (1)..(395): unsure at all n locations
ggcacacaaacacagagagcagcccaaaccgaccaaaatcactgcagagttcaggcacttcttcagatagttctccccctctgtttctttctctctttatttctttctcgagttcagtttgagagatggatttggcgtggcggttcgcggtggccgcggtggcgtgcggccttgtggggggcggcagcgccgggctgctggagaccaacccgggtttggcgtacaacttctaccagaagtcgtgccccaacgtggactccatcgtccgcagcgtcacctgggcgcaggtcgccgccaacccggcgctccccggccgcctcctccgcctccacttccatgactgcttcgtccagnggtgcgacgcgtcgatcttgctggacaacgccgggagcgag

SEQ ID NO: 419139 - DNA, 462 bp, Oryza sativa
gcataatgtgcaattagcctgcaggcagctaatcagtagtagcttgctagccatggcttctgcaactaattcttcacttagcttaatgctgctggcggctgcagctatggcgtcagtggcatcggcgcagctctcggcgacgttctatgacacgtcgtgccccaatgcgttgtccaccatcaagagcgtcataacagccgccgtgaacagcgaggctcgcatgggggcgtcgctgctcaggctgcacttccacgactgcttcgtccaagggtgcgacgcgtcagttctgctgtccgggcaggagcagaatgctggcccgaacgtggggtcgctgaggggattcagcgtcatcgacaacgccaaggcgcgggtggaggccatctgcaaccagaccgtctcctgcgccgacatcctcgccgtcgccgcccgtgactccgtcgtcgcgctgggagggccatcatg

SEQ ID NO: 419140 - DNA, 460 bp, Oryza sativa
gagttgaggttgctgtatttatcgtctttgtcctcatctttctttcttgctttcctctaccttgactttggcttccccactctctcttcttcttgggaggctgggagctaccagcacaacacaccaaggaagctgaggtgcgttgatttcttgatatcatggccaagaggcacctcttgttggcgacaacttgcttgtgggctctgtcatgtgccttgctgcttcatgcttcctctgatgggttcctgagagtcaacctcaacaagaagagattggacaaggaagatctcactgccgccaagttggcgcagcagggcaaccgtcttctgaagaccggcagttcagacagtgatcctgtccctctggtggactacctcaacacccagtactatggggtgattggcctcggctcaccgccgcagaacttcacggtgatatttgacactggaagctccaacct

SEQ ID NO: 419141 - DNA, 340 bp, Oryza sativa
gttttcgcttcggctcgctagctagctctgctgtttctgtgagagccgggagcaccaaccgcgcgtggggtgggtgcccggaggtttgatgcgcgtggccgccggtttctccccgtcgtttgatgggcaacgcatgcggcggttcccttagatccaagtacctgagcttcaagcagaccgcgtcgcagcgccacgacaccgacgacaacaacaacgccgccgcggccgactcgccgaagaagccctcccgccctccagcagccgccaagacggacgaccacccagtctccgcgttcggcgccggccgtcgtcatgaggcgcggacaggcgcccgtcgacc

SEQ ID NO: 419142 - DNA, 479 bp, Oryza sativa
ttcctcctcctcctctcctcgctcgtggccgccaccatgtcaggcggcctctacaaccaccagggtttctccccggcaagaaccctctcgccccagattaggagcaaccccgaggccgataggtacggcctcgcccgcttccgccgccgccgtggattgctactgtgtttcttgctgattctttgatccaaggattgcttcttgctcttggttgcgtgcccttttttcgatttgtttaggtgattggttgtgcgatttcttgggttttgtttctttttgcagccagtacttgagcgagctgctcgcggagcatcacaagctggggcctttcatgcaggtgctgccgatatgcagccggctgctcaaccaagaaatcatgcgggtatcaagcatggtcaacgaccatggattcaacgattttgacaggcgtcgttatagaagtccgagtcccatgtcttcgccattatgagacccaacct

SEQ ID NO: 419143 - DNA, 475 bp, Oryza sativa
tttttctctccgcgtcacttctcttccacctcttgtagtagctgcttctcctcccgatcgagcagaggcagtagtagcttagctagcagatatatactgtagcgatggagtaatatgatcgtcgatcgagccgatccgcgcgatgcagattcgccacgccctcgtccacctcattaccctggggatggttatcagctcggcattgatgatatggaagggattgattatcatgacagggagtgagtcgccactagttgtggttctatctgaaagcatggagcttggatttgaaaggggggatatcctgtttttgcaaatgagcaaacaccctatacgaacaggagatatagttgttttcaatgatggccgtgaaattccaatcgtccatcgcgttattgaggtcgttaagctatgtaatatccacaccaatcagtctccccttacatttgatctcaggtattatgtctgaaaattt

SEQ ID NO: 419144 - DNA, 400 bp, Oryza sativa
cgacgacgcgcacgagcagatcgacaccgccatagcgacggcactaagggagagcaagccagtgtacatcagcgtgggctgcaacctggcgggcctctctcacccgacgtttagccgcgagccagtgccgttgttcatctcgccaagattgagcaacaaggcgaacttggagcacgccgtcgaagccgcggcggacttcctgaacaaggcggtgaagccggtgatggtcggggggccaaagatccgggtggccaaggcgaagaaggcgttcgccggcatcgcggagtcgagcgggtacccgttcgcggtgatgccgtccgccaagggcctcgtgccggagcaccacccgcggttcatcggcacgtactggggcgccgtgagcaccaccttctgcgccgag

SEQ ID NO: 419145 - DNA, 474 bp, Oryza sativa
cttcttttaagagagaagggagtctctcctcttctcttctcttctcgcgccgccgccgtgtccagtgcccaagatgtggggcagcgccgacggcggcacgccggaggtcaccctggagacatccatgggcgccttcaccatcgagatgtactacaagcacgcgcccaagacctgcaggaacttcctcgagctctcgcgccgcggctactacgacaacgtcatcttccatcgcatcatcaaggatttcatcgtgcaaggtggggatcctactggcaccggaagaggcggcgaatccatctacggagcaaagttcgaggatgagattaggccagaactgaagcacaccggcgctggaattctgtcgatggccaacgctggtccaaatacaaatggaagccagatctttattactcttgcgccttgtcagtcacttgatggaaagcatacaatttttgggagagtatcaaaaggaat

SEQ ID NO: 419146 - DNA, 483 bp, Oryza sativa
  unsure (1)..(483): unsure at all n locations
gtttttgagttcctcgtttgctccgcctctctttcactcatgggcaagattaagatcggaatcaatgggttcggccgcatcggcaggctggtggccagggtggcgctgcagagcgaggatgtcgagctcgttgccgtcaacgatcccttcatcaccaccgagtacatgacatacatgttcaagtatgacaccgtccacggccagtggaagcatcatgaggtcaaggtcaaggactccaagaccctcatctttggcacgaaagaggttgcggtgttcggctgcaggaaccctgaggagatcccatgggctgcggctggtgctgaatacgttgttgagtctactggtgttttcaccgacaaggacaaggcagcagctcacttgaagggtggtgccaagaaggtcgtcatttctgctcccagcanagacgcccccatgttcgttgttggtgtcaacgagaaggagtacangtctgacgttaacatt

SEQ ID NO: 419147 - DNA, 456 bp, Oryza sativa
agttttagagcaaccatggccgcgcgcgtgctccccctcctcctcgtcgtcgtcgtcgccgcggccatggcgagagcccccacggcccacgcgtggggcaaggagggccactacatggtgtgcaagatcgccgagggtttcctgacgaaggaggcggcgacggcggtgaaggagctcctccccgggtgggccggcggcgagctcgcggaaacgtgctcgtgggcggacaccgagcggttccggtaccggtggtcgagccccctccacttcgccgacacccccggcgactgccagttcaactacgcccgggattgccacaacacaaacggtgagaaggacatgtgtgtggtcggagcgatcaacaactacaccaacgcgctcgaggactcatcaagtccatatgatccaaccgagagcttgatgttcttggcacacttcgtcggcgacgtttaccag

SEQ ID NO: 419148 - DNA, 382 bp, Oryza sativa
  unsure (1)..(382): unsure at all n locations
ttgctcacaaacacagagagcagcccaaaccgaccaaaatcactgcagagttcaggcacttcttcagatagttctccccctctgtttctttctctctttatttctttctcgagttcagtttgagagatggatttggcgtggtggttcgcggcggccgcggtggcgtgcggccttgtggggggcggcagctccgggctgctggagaccaacccgggtttggcgtacaacttctaccagaagtcgtgccccaacgtggactccatcgtccgcagcgtcacctgggcgcaggtcgccgccaacccggcgctccccggacgnctccttcgcctacacttacatgactgcttcgtccaggggtgcgacgcgtcgatcttgctggaca

SEQ ID NO: 419149 - DNA, 452 bp, Oryza sativa
gattcagtcgagctatttgaaaatgctggaagcaagagcttctctaccaatctctagattcaaagatcattttctacagttactgaaagagaatgatgtgattgttgtttgcggagaaaccggatgtgggaagacaactcaggtgccacagtttattttggatgatatgattgaatctgagcttggtggttactgcagcatagtctgcacacaaccccggaggatagcggccatttcagtggctgaaagagtgtctagtgagaggtgtgaatcttctcctggatctaaggattctttggtcggatatcaagttcgtcttgacagtgctcggaatgaaaggacaaagcttctgttctgtaccaccggtatccttcttagaaaattatctgggaacaatgatttaagtgatgttactcatgtagtagtagacgaagtacatgaacgtactattt

SEQ ID NO: 419150 - DNA, 498 bp, Oryza sativa
agattgccaggttcttatgatgcgattagaatccgatctagcacaagttctgatgtctgcatgcagaggagaacttggcaatgtttcactaacctggtcacctgaaatggcgatggtggttgtgatggcaagcgaaggataccccggatcttataagaaggggactgtaataagaaatctcgagaaggccgagcaggtctcgcccgcggtaaaaatattccatgctggaacagcactggatggggatggaaatcttgtcgctgtcggaggccgggtgctcgggatcacggctaagggcaaagatattgaggaagcaagggcaagagcatatgatgcagtagatgttgttgactggcctgcaggattcttcaggcgcgatattggttggagagcactgaagcacaaacaagtggccaattactgatgcggattttcctgagcacaccacaactatggtgagcatgtaatcttaagagcaataaaaagaaaatttgtcac

SEQ ID NO: 419151 - DNA, 483 bp, Oryza sativa
ttctctttcaagcgtagagacctctccacacttatcagagtaataaggaaaaaaatatagattaaaaatggtgaagctcgcattcggaagcttgggtgactccttcagcgccacgtccgtgaaggcctacgtggcggagttcatcgccaccctcctcttcgtcttcgctggcgtcggatccgccattgcctatgggcaattgaccaatggtggcgccctcgacccggccggccttgtggcgatcgcgatcgcccatgcactcgccctgttcgtgggcgtttccgtcgccgccaacatctccggcggccaccttaacccggccgtgacgttcggcctcgccgtcggcggccacatcaccatcctcaccggactcttctactggatcgcccagctgctaggcgcctccatcgcctgcctcctcctcaagtttgtcacccaacggcaggccatcccgacgcacggcgtcgctcgcatcagcgagct

SEQ ID NO: 419152 - DNA, 471 bp, Oryza sativa
gtcacggcggcgcagggctccgacgacaaggactacaaggagccgccgccggcgccgctgttcgagccaggggagctcaagtcgtggtccttctaccgcgcagggatcgccgagttcatggccaccttcctcttcctttacatcaccgtcctcaccgtcatgggggtcaacaactccacctccaagtgcgccaccgtcggcatccagggcatcgcctggtccttcggcggcatgatcttcgccctcgtctactgcaccgccggcatctccggcggccacatcaacccggccgtcaccttcggcctcttcctcgccaggaagctgtccctcaccagggccctcttctacatggtgatgcagtgcctcggcgccatctgtggcgccggcgtcgtcaagggcttccagaagggcctgtacgagaccactcgcggcggcgccaacgtcgtcgcgcccggctacaccaagggcgac

SEQ ID NO: 419153 - DNA, 543 bp, Oryza sativa
  unsure (1)..(543): unsure at all n locations
ttcctcgcctcgtttcgtctagttgagcagccgcgacgagcacggcggcgacgacgacctccgccgcgacgatggccgcgcgcctcctcctcctcgtacttttcgccgtcgtggcagcgcgcgtaggcgcagcggcggcctatcagcccggatctgctgaggggcacacgatcgcgggccgcatcaagatcgatgctgcaagtgcaattgcaaagggctttggtcttccagccaagacatcaaacacaaaagtgatacttaacggtggtcagagggttacatttgccaggccagatggctactttgcattccacaatgtgccagctggtactcatttaattgaggtctcctcattgggctacttattttcaccagttcgggtagacatcagtgccaggaatcctgggcacattcaagcagcattgactgaaaacagaagagttctaaatgagcttgtgttggaacctctcagagaagagcaatactacgagaaaagggagcctntctncattatgtcacttttgaagagccctatgggtatga

SEQ ID NO: 419154 - DNA, 361 bp, Oryza sativa
tttgtttgataattaatggaggattggtatccacaccaatcaacttgtcattgatgtaccaattgacatgtaaattatgttccgacactcgagtttcgaacaatattacagtttttagtcaacaacaccccaccacaactccataagcttacagctcttgtactaagggccactcaacggcagcgtggggcaaaatatagcttagtaacggtatttagtggagtagtccttgggagcaatcaccaaaccacgccctttgcgagcacctctgtagacggtctccacaatgtcgatgaactcctgcttgtccttcaaggcccagttgatcttgttgttgtttcctgtccccagatcaatcatg

SEQ ID NO: 419155 - DNA, 493 bp, Oryza sativa
  unsure (1)..(493): unsure at all n locations
gttagtcgccgaatcggaggaagaagcagcagcttgcggcggcggcggcgaggcggagatgtcgtaccttctgccgcatctgcactcggggtgggcggtggaccaggccatcctcgcggaggaggagcgcctcgtcatcatccgcttcggccacgactgggacgagacgtgcatgcagatggatgaggtgctagcggcagtagctgagaccataaagaactttgcggtcatctacctggtcgacatcaccgaggttccagacttcaacaccatgtacgagctgtatgatccgtcgacggggatgttcttcttccgcaacaagcacatcatgatntgatctggggacaggaaacaacaacaagatcaactgggccttgaaggacaagcaggaagttcatcgacattgtggagaccgtcacagaggtgctcgcaagggcgtggtttggtgattgctcccaaggactactccactaaataccgntactaagctata

SEQ ID NO: 419156 - DNA, 403 bp, Oryza sativa
gtagcctctctatagtctcagctcttcttccaccaccacccagctcctcctcctcctcctcgtcgttgttcgccaccaccgctcggagagatggcgagccagaccgccgacgccacggggttcgtcgcgagcgacccgctgtcgtggggcaaggcggcgctggagatgacggggagccacctggacgaggtgaagcgcatggtggcgcagtcacgggaggccgtggtgaagatcgaggggtccagcctccgcgtcggcaggtggccgccgtctccgcggccaaggacgcctccgcgtgggtggtcgagctggacgaggaggcccgcccccgcgtcaaggccagcagcgaggtggatcctcaactgcatcgcccacggcggcgacatctacggcgtcaccaccg

SEQ ID NO: 419157 - DNA, 327 bp, Oryza sativa
  unsure (1)..(327): unsure at all n locations
ttcatctggaggtaattcaatgcagagacagagtatgctgttgcacaagcaatttctatgcaggaagcacacagacgtagcaataactggctgccacctgcatggactgttttgcttctcgcaattttaggttacaacgaatttatattccttctaaggaaccctttatatctgctggggctcttcgtcgccttcgtagtatcctatgctgcatggttgcaatatgacatcacagcctattttcgccatggcacgctctcaggtcttctgactattacatctngggtttctccccacaataatggacatcataacagcagtcatcaa

SEQ ID NO: 419158 - DNA, 366 bp, Oryza sativa
ggtcttgcgcacgttcagctccttcacctgctccctgaagccggcatagttggagggcatggcctctagcttgaagggcaggtcgtcaatgtggtacagggtgcttccccagaagaacttggcctggacgcccgcgtccttgagggccgcgcacaccttgcgctccgactgcagctcctcgtgggtcacctcctggtgcgcaaacagggtcttggcgccggtcttgccggccaggtcagccaaaacctcctccggctttccgatcctgacaaccagctcgctgcctctctccctcaggttcttgcgcaggtccgttacgcactcgatctggaacttgccccgatatggcccggtcttgtcgaaccc

SEQ ID NO: 419159 - DNA, 514 bp, Oryza sativa
  unsure (1)..(514): unsure at all n locations
atttcatttcttcttcttcgccgccgccgccaccttccaccccttcagccgccactccaatccaaggaggatgagtgaagaggacaccaatgctgctgctgggcagcccaggcgcgcccctaagctcaacgagaggatcctgtcctccttgtcgaggagatcagtagctgcacatccgtggcatgatcttgagatcggccctggtgctcctgctgtcttcaacgttgttgttgagatcaccaagggaagcaaagtgaaatatgagcttgacaagaaaactggactgattaaggtcgaccgtgtcctatactcatcagttgtgtatccccataattatggtttcattccaaggacactttgtgaagacaatgatccaatggatgttctggtcctgatgcaggagcctgttattcctggttccttcctccgtgctagagcaattggccttatgcccatgattgaccgggtgagaaggatgacangatatagcagtatgtgctgatgatccctgata

SEQ ID NO: 419160 - DNA, 378 bp, Oryza sativa
aacttaagaattaagatctccatcacataaaaacatacagtgactgagtactggattacacgattgagttgttcagggttcagataggaaaaacatcttggggactagagatagagggaatcgacagatgcgcagcagtagcgcgcgggaaacaggacatcacgattgcgttgcatgtcgtcggctgcgcagcggcggcgcggggcttaagacctgctcttgaatgggatcgccctgatgatcacctggtggtagatggcagccagggcagcgccaacgaagggaccaacccagaagatccaatggtcattccaggcatggtccttgttgtagatgatggcagcgccaaggctcctggctgggttgatgccagtaccg

SEQ ID NO: 419161 - DNA, 506 bp, Oryza sativa
gcttgtgatcgatcgatttcgggtacgtatcaatggcgtccaaggcgttcgctctgttcctggccgtgaacctcgtcgtgctcggggtggcaagcgcctgcggcggcagcccgtcgtgcccgacgccgacgccgtcgaccccgacaccgtcaacgccgacgccgacgccgtcggcgttcgggaggtgcccccgcgacgcgctgaagctgggcgtgtgcgccaacgtgctgggcctgatcaaggccaaggtgggcgtgcctccggcggagccgtgctgcccgctgctggaggggctcgtcgacctcgaggcggcggtgtgcctctgcacggccatcaggggcaacatcctcggaatcaacctcaacctccccatcgacctcagcctcatcctcaactactgcggcaagaccgtccccaccggcttcaagtgctaagcagcgtgcatatgcaatgcctgcatgggttgatcctacgtacggtgattagttggctttgacgactcttga

SEQ ID NO: 419162 - DNA, 387 bp, Oryza sativa
tttggttgaaaagaaaaacagggctacaaaaagacgggactcaactgcaatgcaattcagggttcggagagatcagagcaagccttaacagattcacacagaaaaatcaagcaagaagttccatggcacaaccggtagagacctggagcagatagacaaaatggttcagcagactacacactagttacggtctcggtacttcttcatttagggacagacgacttgtaaaccgagtgtgtgcatgccaccttacctaatacggtagatgcacaggttttcctacttaccaggggtactactgccataaatcggcaggggaaaagtggtgcctgacttggccatcatgaccttggcgaactcctcacagatgatctggccgacaccgtg

SEQ ID NO: 419163 - DNA, 530 bp, Oryza sativa
gtttcagatcgctcccagccattctctcctcgacggtctcgtcttccccacccctcgcctcctcgcgcgctcggtgagagaagcgaagaagaagaagaagaggaggaggaagaagccaggctaagccccgcggcatggcggaccagctcaccgacgaccagatcgccgagttcaaggaggccttcagcctcttcgacaaggacggcgatggttgcatcacaaccaaggagctgggaaccgtgatgcgttcgctggggcagaacccaacggaggccgagctccaggacatgatcaacgaggtcgacgcggacggcaacggcaccatcgacttcccggagttcctcaacctgatggcacgcaagatgaaggacaccgactcggaggaggagctcaaggaggcgttcagggtgttcgacaaagaccagaacggcttcatctccgccgccgagctccgccacgtcatgaccaacctcggcgagaagctgaccgacgaggaggtcgacgagatgatccgcgaggccgacgtcgac

SEQ ID NO: 419164 - DNA, 497 bp, Oryza sativa
gtcgtcatcaggtggcacttagaaagtttgcctctggagacattcgattctatgagtcagtggaggattccatcgtacattctgattcacgttctttagctacacttcttctaattcgcgacattcagtctaaacgtcttccatcaaaggaactaaaatcacctctgcgttacaatggcttctgtcacagctcctggattcgggagatgcagcacgcatcagataaatcaataattatcagtgaaattctggattccagaaccagaaaccttgtatctgtctccaaaatcagcgactatgttctatcaaatgaactcgtcagcatggcattagcaatggtagcagaggacaaacaaatcaacagagttcttgaagaactttttgccgaggagggcaacgagatgtgcataccgtcagctgagttttacctctatgagcaagaggaactgagtgtctttgatataatggtcagggctcgtgaatgagacgaggtgtca

SEQ ID NO: 419165 - DNA, 379 bp, Oryza sativa
tttggttttgaaacatttcccgtccatgtatttgatttttcatttgcagtgtacatgagtggaactttagttacatcgcggttccaacgttattttcagaattatgcattcagttgatacattgggaaaaagaaagagggtaaaaaaggaaacatgaagctttaggcactccgtgaaacggcaactcaaactacctattagactatttcagttgtatttttatcacatcgcagcatacatcggttgctcaggaagctcggcaagccattcctccttgagtttcccttgagtaaatctcctcagcatttccagggaagctttgggttggtccattggaaccatgtgaccagcattgtggaccttgaggaagctgagtggc

SEQ ID NO: 419166 - DNA, 519 bp, Oryza sativa
cttaagggaaactttgctatgatttctcaaacttggagaagttttttggagataaagcagtcaaagaagcaattggagttggcgaccttgaatttgtctcatgcagcactactgtttatcaagcaatgctgacagactggatgagaaacttggaagctggcatcccagctctacttgaggatgggatcaatgtgcttatatatgctggagagtatgatcttatatgcaattggcttggaaactcgaggtgggtccactcgatggtatggtctggccagaaagactttgtatcatctcatgaatcgccatttgcagtagcacggtgccgaagctggtgttttgaagagccacgggccactcagcttactcaaggtccacaatgctggtcacatggttccaatggaccaacccaaagcttgcctggaaatgctgaggagatttactcaagggaaactcaaggaggaatggcttgccgagcttctgagcaccgatgatgctggatgtgataaaatccactga

SEQ ID NO: 419167 - DNA, 503 bp, Oryza sativa
tttatctggtgcttgagccacattgaaacattaagtacctgggactggaatgatgggagtagagaactgaatatagatgatgctcgttccttggcaactgataggtggaaccttgaccatgtggactattttgttgattgtcactactctctgcccgacgacaagttatgggtgattggcggcacaactgcagggacaataggttacttccctgtaagagctggtcttgaaggggcaataggttccgcggaagctatccttgaaggaggccatacagacgttgttagaaccgtatatccagccgcaaacactcatactgggcaaaacaggggcatttttggatggacaggtggcgaagatggtcgtctgtgttgttggcgctctggtgaaattgctgagatgaacaagtcttggatctctagttcattagtgtcaagggttcaaaagaaagctaatgccgacacagccatactaactgatgcgatatatgtccgacacatatg

SEQ ID NO: 419168 - DNA, 503 bp, Oryza sativa
gtaaatctccccgtctcgtcgtctcctccgctccttgcgccatctcgcggctgaacaggggaggggcggcgatctccatccggcgagcggagcaggggaggggaggggatcttgacaatggttggacctgggcataggaacagtcacgggaagcgtcactctgattatgctgaaaatggaggtggcaagagaaggaatcctggtgatgatacatatgctcctggtccagatgatactgtctaccgctatctttgcccttctagaaaaatagggagcatcattggaggggtggagaaaattgctaagcagatgagggccgacactcaagctaagataaggattggtgagagtgtatctggttgtgatgagagagttatcacaatatttagctcaagcagggaaactaataccctagtagatgcttgagataaggtttgccctgtccaagacgctctttttagagttcatgaaaagctatccatagatgatgatattgggaatga

SEQ ID NO: 419169 - DNA, 491 bp, Oryza sativa
gtattatactagcttgcttgttcaattcaatcgagcagtagctaattgcatagtgatcgatcgatctgtatagatggtggtggccggcaagaagcagggacggcattctttttctgcatcatcatcgtcgtcttcgtcttcttattgttcagtagtgcagctgggtcatcatcagcgcccacagggtgaggaccctctcatcggcatcaaagcagcagcagcaggaggaggaggaataatgagaaagggcccgtggacggagcaggaggacgtgcagttggtttggttcgtgcggctgctgggcgaacggcggtgggatttcttagcaaaggtgtcaggtttgcgcggcggcgggtgatgagcatatgcgtgcgtgcatctaatctatcgattaattgttgatgatgtcgatcagatggatggatgcatgcatatgcccgacatagtagatttgatgatagtaactgacataaatataatgtatgcgtgcg

SEQ ID NO: 419170 - DNA, 365 bp, Oryza sativa
cttgatcgaaattagacggccattaatttgaactagagtatcacaaactacgtacatcgacaaaatccccgtatcatggtactaagcattttcgcatggaaaaatggacgtccctcgaaaccatcacatttttaaacaacctaacacaagagctagataaaaaaacaacagttggtggcgacacatcactacagctcgtccttatcatacgacgacggctccgcctcctccttgatgttggatgattccttctcttcaacctcggcctcctcgacctcctcttcctcttccacggccgcgtcggggctcaggtcaaggctcttctgcaccgacctgtagatgctggaggcgaagtccttgggatt

SEQ ID NO: 419171 - DNA, 518 bp, Oryza sativa
  unsure (1)..(518): unsure at all n locations
ctcggcgaggcgacgaactcatcacctccactctctgctgcaacacgagtgaatcggaggcggcacgatgcgcaagtgggcgctctcctccgcgctcctcctcctcctcctcctcaccacactccccgatccagctaagaagctccaagtcaatgctgatgacagcactgatgagttagttgatccgccgaaggtagaggagaagattnggtggtgttccccatggcctgtccacggactctgaggttgttcagagggaggctgagtcaatctcgaggaagaccctcaggagctcagcggagaaatttgagttccaggctgaggtgtccagactcatggacatcatcatcaactcactctacagcaacaaggacattttcctgagggagctcatctccaatgcttctgatgctttggacaagattaggttcctggctctcactgataggaggttttgggcgaaggtgacactgctaagcttgaaatccagattaagctggataaagagaagaagattc

SEQ ID NO: 419172 - DNA, 372 bp, Oryza sativa
ttggttttattaaaccactatgtttattcatgccaaacaccagcactagtccagtgacaaccaaacgacaatcctacactccaaaagtttacatttaggttctcaaatagtgatacatagctttgagagttgaaaccgtcagatactgacatagtttatgaggtgcccctggagttggcaaaaacttcacgaagattgtcgcagctctggacgcacaaagtctgcatcagcaggcactgaaatgtcaacggtgggcctcaactgagcacagacttcaatggcactatggacgggatcggagaagaaattgctgatgaggtcttgattaactggagcattcttgtcaacagtcacaaaagcttgttgggtcaa

SEQ ID NO: 419173 - DNA, 487 bp, Oryza sativa
ctgacgcgtgggtggcggccgccgccgccgcggtgccgtggccgccaaggtctcgtcgccgcaggtgatcggggccaccatgccgtcgctggacttcgagacatccgtcttcaagaaggagaaggtgtctctagctggccatgacgagtatattgtgaggggcgggaggaatctgttcccgctgctgccggaggcgttcaaggggatcaagcagatcggcgtaatcggatggggttctcagggtcctgcacaagctcagaacctgagggactcacttgctgaggcaaaatcagacatcgttgttaagattggtctccggaaaggttctaaatcttttgaagaagcacgcgcagctggatttactgaatagagtgggacacttggagatatatgggagactctctcacgtagcgatcctttgctggtggtgatatcagatgctgctcaagcggattactatgaggaaatttttttacacatgaaaccc

SEQ ID NO: 419174 - DNA, 476 bp, Oryza sativa
  unsure (1)..(476): unsure at all n locations
gtttgacaagactggaactttaacaattgggaaacctgtagtgactaaagtaatagcttctcacagagagggagatgaaaatacaaaggattcctgtaacaatgaatggactggtgagattctgagtttggcagcaggtgtagaatcaaatacaacccacccgcttggaaaagccatcatggaagctgctcaggctgccaattgcctctatctgcaggcaaaagatggatccttcatggaagaacctgggtctggtgctgtggcgaccattggcgagaaacagngtttcagttggaacacttngattggatcaggaggcatggaagttcttcacaatccatttgctgatggagaaaattttggtcagtctgttgcatatgtagctgtggatggtactctagctggacttatttgttttgaggataagctgagagaagattctcatcaaattattgatatcctatctaagcaaggga

SEQ ID NO: 419175 - DNA, 534 bp, Oryza sativa
  unsure (1)..(534): unsure at all n locations
gtgaaatgcaggccaaacctgatctcatcattggcaattacagggatggaaaccttgtcgccactctgctggctcacaaattaggagttacccagtgtaccattgctcatgccttggagaaaaccaaataccccaactcagacatatacttggacaagtttgacagccagtaccacttctcatgccaattcactgctgatcttatcgccatgaatcacactgatttcatcatcaccagtacattccaagaaattgctggaagcaaggacactgtggggcagtatgaatcacacattgcattcacccttcctgggctttaccgagttgtgcatggcatagatgtttttgatcccaagttcaacattgtctctctgggagctgacatgagtgtctacttcccgtacaccgaggctgacaagaggctcactgccttccaccctgaaattgaggagcttctctacagtgaagtcgagaacgatgaacacangtttgtattgaaggacangaacaagccaatcatcttcttcatggctc

SEQ ID NO: 419176 - DNA, 485 bp, Oryza sativa
gttgcggcgaaggatctgaagcgtgggtacgtggcctccaactccaaggatgaccctgccaaggaggctgccagcttcacctcccaggtgatcatcatgaaccaccctggccagatcggcaacggctacgccccagtgctggactgccacacctcccacattgccgtcaagtttgctgagctggtgaccaagattgacagacgatctggtaaggagctggagaaggagcccaagttcctcaagaacggtgatgctggtatggttaagatgattcccaccaagcccatggttgtggagaccttctctgagtaccctcctcttggtcgttttgcggtgcgtgacatgaggcaaacggtggctgttggcgtcatcaagaacgtggagaagaaggacccaaccggtgccaaggtgaccaaggctgccgccaagaagaaatgatcctcgttcaagtggggggttgcgtgtctgcatttaagatatctagc

SEQ ID NO: 419177 - DNA, 426 bp, Oryza sativa
  unsure (1)..(426): unsure at all n locations
gttcacgctacatcccgagctctcaccgagagacccaaaaccctttccaccgatggccaccgccgtagccgccgccggcggtggcggcggcggcgagcagccgcgcaggaggaagccggcgccggggagagggggagtggtgctccccgcggggctgtcggaggaggaggcgcgggtgcggcccatcgcggagatcgtgtcggcgatgggggagctctcgcggcgaggggaggacgtggacctgaacgcgctcaagtcggccgcgtgccggaggtacggactggcgcgggcgccgaagctggtggagatgatcgcngcggtgcccgagggcgaccgcgccgcgctgatcccaaggctgagcgccaagcccgtgcgcacggagttgggcattgtcctaggtcgacgtgatgtccaagccgtaccggt

SEQ ID NO: 419178 - DNA, 511 bp, Oryza sativa
gttatgtgggggtctgcccttggccattgtagtagtagcagggctgattgctagtaaactgaaatcaaagatagaccagacattggatcagcatttggttgaagtagatgaggctttaagtgcagagttgggaaacaatctcaccactgaaggagtggcgcaaataattaaccactgttacaaaaatctgccatctgatcttaagacatgcttgctgtacttgagcacatttccaaagggccgcaatattagcaggaagcatttgataagaagatggattgctgaaggattcattactgaagagcatgggaagactgccgatgaagttgcagaagacagcctcaatgaactcattggcaggaatttggtaaagcctatcaacaacaacagcaacggcaaggtgaagagctgtcaaattcatgacatggtcctacagtacattgtcttcaagtctagcgatgaagaattcatcaccgttattggtggccactggcagacggcattttcaagc

SEQ ID NO: 419179 - DNA, 553 bp, Oryza sativa
  unsure (1)..(553): unsure at all n locations
cttgcaaatcaataagcttattaagacattgagcggcgcaagaggtcgtcgataagatccgccaacatagtggaggtcttgttgatcaggcacagcttgtttcaaaggaactgatacgagttgccattctgtggcatgagatgtggcatgaggctcttgaggaagctagcaggatgtattttggtgagcacaatattgagggaatgcttgcagtgcttgaaccattgcatgcaatgctcgagaggggtcctgagacaataaaagaaaatactttcattcaggcttatggtcatgaattactggaagcccacgaatgctgtttaaaatatcgggctacaggagaggatgctgagttaactaaggcatgggatttgtattaccatgttttcagaagaatagacaaacagcttncaagtcttacaactttggatttgcactctgtgtcacccgagcttttgagtgtcgaaagttggagcttgctgtaccaggaacttattctgcagatgcacacttgtgacaantgagtatttgttctcatttgatgtataacatt

SEQ ID NO: 419180 - DNA, 350 bp, Oryza sativa
  unsure (1)..(350): unsure at all n locations
tttggtttaggttcaaatccagcttattcataaagcatactgttgtcccacaggaaactgtttcataaaactaacatatcatacggactcgatggtccattaaaccagacacaagtagacatcagcaccacaaatacttgacgaacagaggctcgggatgaccaggcacatcggcagttccaccaaactggctgattactgaccaccacggcggcggagcaccaggtgnagggtggactccttctggatgtcgcagtctccgagggtgcgtccatccttcagttgctacgccagccaagatcagacgctggtggtctgggggaatcccgtgcttgtcctggaacttggcc

SEQ ID NO: 419181 - DNA, 473 bp, Oryza sativa
gtaaaatttctctccaatctcgcgaggctctcgtcgtcgaatcgaatcctctcgcgtcctcaagatgcagatctttgtgaagacattgaccggcaagactatcaccctcgaggtggagtcctctgacaccatcgataatgtcaaggctaagatccaagataaggagggcatccccccggaccagcagcgtctcatcttcgctggcaagcagctggaggatggcaggacccttgctgactacaacatccagaaggagtcgacccttcaccttgtcctccgcctccgtggtggcatgcagatctttgtcaagactctgaccggcaagactatcacccttgaggtggagtcttctgacaccatcgacaacgtcaaggccaagatccaggacaaagagggcatccccccagaccagcagcgtctcatcttcgccggcaggcaactggaggatggcaggacccttgctgactacaaca

SEQ ID NO: 419182 - DNA, 343 bp, Oryza sativa
ttgggtttttttttttaggagcaaaacatttctattaccacaactttttaaggatggaattgagtagtaattctttcaccccaaaatacagaatatggacaatatcttagaaaagccgattgctttgcccccatggctgggaagcttggcaatggagctaacacaaagaacacgagatcattattaactaaactggaacgaacgaataaaatacagggtcttttttgactgaagatccacaatacggttatctatattttattgttagaacgctctactgctcaaggaaggaaaatggcaacaggaggccaggaacggatcttggcttacttgacgggaaggg

SEQ ID NO: 419183 - DNA, 463 bp, Oryza sativa
gtcctccaacctggccttcagccgcaacccgagcttggactacgggttcaagggcaccgagatcgccatggcctcctactgctctgagctccagtacctcgccaaccccatcaccaaccatgtccagagcgcggagcagcacaaccaggacgtgaactcgctgggtctcgtctcggccaggaagaccctggaggcggtggacatcctcaagctcatgacctccacctacatcgtcgccctgtgccaggccgtcgaccttcgccacctcgaggagaacatcaagagctccgtcaagaactgcgtcacccaggtggccaagaaggtgctcaccatgaaccccaccggcgacctctccagcgcgcgcttcagcgagaagaacctcctcaccgccatcgaccgcgaggcccgtgttcagctacgccgacgacccgtgcagcgccaactacccgctcatgcagaagct

SEQ ID NO: 419184 - DNA, 369 bp, Oryza sativa
ttggttttgtcacaaattttgcccttttttcacacgccgctgtaactagcgacaggggccttcaaaattcaacacccgaagtttttatcacagcagcaaacactaacacacgaaatcgcacgatttcggtacctccaatggtataccacaaacaaccaaacaccagtatatatctctctcacggtaatgttagctctaatgtgatcttttcacatcgccaaagaagccagtatcaatccctgattagtctgtaccgaagtagcgatcaccatactctcctaaccctgggatcacccggtactcctcgttcaacccagtttcgatctctgaggttacaatcttcagacgagggaatcgcttgcagacaca

SEQ ID NO: 419185 - DNA, 474 bp, Oryza sativa
gttttaatgcatctgatgtcatcattttggagggcattttagtttttcatgatcaaagggttcgtgatttgatggatatgaaaatttttgttgacacagatgccgatattagacttgcccggcgtataaggcgtgatacagttgaaagaggtagagatgtcatctcagtgctggagcagtatgggaggtttgtgaagcctgcattcgatgattttgttcttccttccaaaaaatatgctgatgtgatcataccgcggggggagataaccatgttgccatagatttatattgtgcaacatatttcgcacaaaacttggtcagcatgacttatgcaaaatctacccaatgtttatgtggttaatacaactttccagatacgtggaatgcatactcttattcgtgaccgggacattgcaactccagatttcgtcttttattcagatcgtctgattcgtctggtagttgagcatggac

SEQ ID NO: 419186 - DNA, 362 bp, Oryza sativa
ttgtttttgcgaacaaaactttcgaactcttttttttctccttgttttctatttcatttcattccgatagatagcaacaagcagttcaaacaccataaccaaagcgaactcaattcatggtaacatcacggacgaagaacacctaacactggatggatggatagagggcttctcgactcgagagagccactggacacgataacgactcgactcgatgataagatgattctgacacggttagctaaggataactggccacgatgggccccaccaatcagttcctccagttcccgccggagtcgccggcgtagccgccgccacggctgccaccgtagccgacggcgacgccgccacgggcgccg

SEQ ID NO: 419187 - DNA, 380 bp, Oryza sativa
cttctcctccccctctttaccttttcctcctcggttcggttccgtggttcgtctagggtttagtgggttgagatggcggcgccggatgtcgagtaccgctgcttcgtcggcggcctcgcctgggccaccgacgaccgctccctcgaggccgccttctccacctacggcgagatcctcgactccaagatcatcaacgacagggagacggggaggtcacgtgggtttggcttcgtcaccttctcctccgagcagtcgatgcgcgacgccatcgagggcatgaacggcaaggagctcgacggccgcaacatcaccgtcaatgaggcccagtcccgccgctccggcggcggaagcggtggctacggcggcggcggtggcggcta

SEQ ID NO: 419188 - DNA, 361 bp, Oryza sativa
ttgttttaatgagaacactagaacttagacagcaaaaagatgatccaggttccacatccgttacatcacgacagagtaaaaatagtttctcagtagcacgcgaacataggattgttgatgtgaaacacatgcattcgacaaaagggaaatgaaatacgacaacgaaagcagttctcttagcagtagaccaactagaacatgtaagggtaacggcacaacacatgcggcggccaaaaatttagagcttgtcctcgaaatcggagaggggagtcatctgctccttgagacccttcctcttgcggatatcctgcaccagggttgaagcctgcgagccagcttcaagaggatcagaggtcatcat

SEQ ID NO: 419189 - DNA, 514 bp, Oryza sativa
cttggtggtatctatggtgttctgaaccagaagagaggacatgtgttcgaggagatgcagaggcctggtacccctctgtacaacatcaaggcttacctccctgtcatcgagtcctttgggttctcaagccagcttagggctgcgacatctggccaggccttcccccagtgtgtgttcgaccattgggacatgatgacctctgatcctcttgaagctggctcgcaggcttcaaccctggtgcaggatatccgcaagaggaagggtctcaaggagcagatgactcccctctccgatttcgaggacaagctctaaatttttggccgccgcatgtgttgtgccgttacccttacatgttctagttggtctactgctaagagaactgctttcgttgtcgtatttcatttcccttttgtcgaatgcatgtgtttcacatcaacaatcctatgttcgcgtgctactgagaaactatttttactctgtcgtgatgtacggatgtggaacctggatcatcttt

SEQ ID NO: 419190 - DNA, 473 bp, Oryza sativa
  unsure (1)..(473): unsure at all n locations
gtaccgcgccatcctgtgcgccgactgcgacgagcccatccactccgccaacgacctcaccgccaagcacacccgcttcctcctcgtcggcgccaagctctcccctgccgcgctcgccgaacagccgctcccgtcctccgactgcagctccgacgacgacgccgccgccgccgccaccgaggaggagtaccactcctccgccgcatccaccggcgccgcagtgagcgcgcctcttgacgcctccagcaacggcgccggtggcggaggaggagtagggaggggagcagcatctccgactacctcaccaccatctgccccggctggcgcgtcgaggacctcctccccgacgacgacgccttcgccgncgccgccgcgcaggcggngaaagagaaggacgagcgcgtgccgttcctcgacgccgacctgtcgacgtggtcgcccgccggccggagaagagggcggctcgtgggcgc

SEQ ID NO: 419191 - DNA, 349 bp, Oryza sativa
ggataggtaatcaccacctttattcgattcttcggcggcattgctgtttggtaccttcccatggcagttcaagcgaaattttctgaaaactaccaccacataggcttacatgcgaacatgcatactacatacaacggcgcctttgacaggtagcagagtttccaccattccatggctatggatttattattcttcaccaggtgcaccaccagcaggcgatctggttgccgggtaagagaagggcgttatcatcagaggagcaccttggctgcagctagcctagcaattgggaccctgaaaggcgaaccagaaacattgtccagcccagcctttgaaaagaaagcgactg

SEQ ID NO: 419192 - DNA, 488 bp, Oryza sativa
  unsure (1)..(488): unsure at all n locations
tttgatcggaaatccttggagttggcttgcagatcccaagaagcagctgcagctgtccgtgttggccgtgttcaactcatgggatagcccaagagcaatcaagtacagaagcataaacaagatcactgggctgaagggcactgctgtaaacgtgcagaccatggtgtttggaaacatggggaacacctctggcacgggtgtgctcttcactaggaacccaagcactggagagaagaagctttacggcgaattccttgtgaatgctcagggtgaagatggtggttgctggaatcagaactccagnaggatcttgatgctatgagggaccacatgccggagccttatgaagagctcgttgagaactgcaaaattttggagagtcactataaagaaatgatggatatttgatttactggtcaggaaaataggctttggatgtttcagtgcagacaggaaagcgcacagganaaggtgctgtaaagattgct

SEQ ID NO: 419193 - DNA, 560 bp, Oryza sativa
ggaacagctgttgcaattaaacgggcacacgaaggttctcttcaaggttcaaaggagttctgcacagaaatagaattgctatcaagactacatcatcgtaatttagtttctctggttggctattgtgatgaagaagatgaacagatgctggtgtatgagttcatgccgaatggtactctgcgtgatcacctttctgccaagtcaagaagacctctgaactttagccagaggatacatattgccctgggtgctgcaaagggaatcctctatctacacaccgaagcagatcctcctatatttcaccgtgatgttaaggccagcaacatcctcctggactccaaatttgtagcgaaagtcgcagactttggtctttcaaggcttgcgccagtaccggatgtcgatggaaccatgccagctcatatctccaccgttgttaaggggaccccaggctaccttgatccagagtactttctaactcacaaactgacagacaagagcgacgtgtacagcctcggcgtcgtgcttctagagctattgactgggatgaagccaatccagca

SEQ ID NO: 419194 - DNA, 365 bp, Oryza sativa
tttggttttttttttttttttttttttttttttttgaaggactcgcacagacggggcgaagttctattgatagagcaggaaaaaattataagattgcaaccctggagggtcgtaaccaggaaaaagaaaaattaaaccaccacccacacacggacaacgcctaaacacaagtccgggagaaggctagcaccataccggccgccgttaagggagaccgaccgccgttggaccaacaaaggaacacagactagatcgtcaagcaagagggtgccaagaccacgttttcaaggagagaagcgacggaaaaccgacgccgacgtccgggagggatcaaaggagccaggactgggctttcgcccggtaac

SEQ ID NO: 419195 - DNA, 510 bp, Oryza sativa
ttgatgtcaaggccacagctggtgacacccatcttggtggtgaagattttgacaaccgcatggtcaaccactttgtgcaagaattcaagaggaagaacaagaaggatatcactggcaaccccagggctctcaggaggttgaggacagcttgtgagagggcgaagaggaccctgtcctccactgcccagaccaccattgagatcgattccttgtatgagggcatcgatttctactcaaccatcacccgtgccaggtttgaggagctcaacatggatctcttaggaagtgtatggagcctgtggagaagtgcctcagggatgctaagatggacaagagctctgttatgatgttgttcttgttgggggctccactaggatcccgagggtgcagcagctcctgcaggatttcttcaacggcaaggagctttgcaagaacatcaacccagatgaagctgttgcttatggtgctgctgtccaggctgccatcttgagtggtgagggcaacgagaag

SEQ ID NO: 419196 - DNA, 532 bp, Oryza sativa
gtcggttggagctattgaagggcatcagtggttcatttaggccaggagtacttacagctcttatgggtgtcagtggtgctggaaaaacaacattgatggatgtgttggctgggaggaagaccagtggatacatagagggtaacattaccatctctggctatccaaagaagcaagaaacttttgctcgtgtatcaggatactgtgagcagaatgacatccattcaccaaatgttactgtctacgagtctcttgcattctctgcatggctccgattgcctgcggaaattgattctgcaacaagaaagatgtttattgatgaggtcatggaacttgtggagctttcccccttaaaagactccttggttggattgcctggcgttagtggattatcaacagaacaaaggaaaaggctaacaatagcagtggagctagttgctaacccatctatcatattcatggatgaaccaacatctggacttgatgcacgagcagcagccattgtcatgagggcaataagaaatactgtggacac

SEQ ID NO: 419197 - DNA, 526 bp, Oryza sativa
ttctttacgcgtccgttttactcggagatcatcaacgagagtttgatcgagtctgtggattccctgaacccattcatgcatgctcgtggggtggccttcatggttgataactgctccacaacagcccggttgggatcaaggaaatgggcgccacgcttcgactacatcttgacccaacaagcttttgtgactgttgacaagaatgctccagttaatcaagacctcatcagcaatttcttctccgatcccgtccatagtgccattgaagtctgtgctcagttgaggcccaccgttgacatttcagtgcctgctgatgcagactttgtgcgtccagagctgcgacaatcttcgtgaagtttttgccaactccaggggcacctcataaactatgtcagtatctgacggtttcaactctcaaagctatgtatcactatttgagaacctaaatgtaaacttttggagtgtaggattgtcgtttggttgtcactggactagcgctggtgttggcatgaataaaatagtggtt

SEQ ID NO: 419198 - DNA, 330 bp, Oryza sativa
caacgttggattgcttctgattttggcgatggagtgagaaagacagcgcctacctatgacggatctatccttactaatgcaatcctgcgtatggaccttgctgggcgtgacctcactgacagcttgatgaagattcttactgagagaggttactccttcactaccactgatgaacgggaaattgtaagggacatcaaggagaagcttgcatatgtggcccttgactatgagcaggagctggaggctgcaaagagcagctcatctgtggagaagagctatgagctgcctgatggacaggtgatcaccattggggcagaaaggttccgatgc

SEQ ID NO: 419199 - DNA, 368 bp, Oryza sativa
tttgtttgatcaactgcaaagcatataatagctcacgataagtcacttgcattatatcaaattcatggaagtgtgcagcaaaatagtgataacttagccactgaggcattcgctaagtaatagctacaaaactccaatcacatagagaccaggacacaaaagactactgcagcaccctaacttagatgatgccaatcttgttggccacgtcgagagcatcgtagtctggtgtcagcttcacgtaagccttcttcttcccatcaggcctgatcagagtgttcactttctttgcctggatgtcgtacatcttcttgacagcagccttgatcttcttcttgtcagccttaaggtcaacaatgaagaccaga

SEQ ID NO: 419200 - DNA, 369 bp, Oryza sativa
ttttgttttttttttttaaggagggaattgagtagcaatactttcaccccaaaatacagtttagcgacaatatcttagaaaagccgcttgctttgccgccatggctggcaagctgagcagagcagctaacacaaagaacacgagatcactataaaccaaacgggaacgaacgaagaaaatacagggtcttttttgtctgaagatacacgaagcggttcgttttcttttatttttaggctcctctcctcctcgatgatgggtgtatggcaatggcaatggcgatgggatcttggcttagttgatgggaaggggctcgccgttccactccttgaggcagtcgagcatggggtcgatgagcttgccctggct

SEQ ID NO: 419201 - DNA, 372 bp, Oryza sativa
tttctcctccggttcttcttcagtatcgaatcctctcttctcctcgtgcccaccaccaccaccgtagcaatggcgggcaacgggccgatcaacaaggaggacccgctcaactggggcgcggcggcggccgagatggccggcagccacctcgacgaggtgaagcgcatggtggcgcagttccgcgagccgctggtcaagatccagggcgccaccctccgcgtcggccaggtggccgccgtcgcccaggccaaggacgccgccggcgttcgccgtcgagctcgacgaggaggcccgcccccgcgtcaaggccagcagcgaggtggatcctcaactgcatcgcccacggcggcgacatctacggcgtcaccaccg

SEQ ID NO: 419202 - DNA, 503 bp, Oryza sativa
ctacagcaacacggtgctcgacgccgagatgtccgggttctggacgaagctgccgctgctgcgcgcgctgatgctggcgcacccggagacggagctgctctggtgggtggactccgacgtggtgttcaccgacatgctgttcgagccgccgtggggcaggtacaggcgccacaacctcgtcatccacggatgggacgggcgccgtgtacggcgccaagacgtggctcggcctcaacgccggcagcttcatcatccgcaactgccagtggtcgctcgacctgctcgacgcctgggcgcccatggggccgccgggccccgtccgcgacatgtacggtaagatcttcgccgagacgctcaccaaccggccgccgtacgaggccgacgaccagtcggcgctcgtcttcctcctcgtgacgcaacgcaccggtggggcgcaaagtgtttcttgagaactcgtcaacctgcacggttttgggcggacatcgtcataggtccaggagatg

SEQ ID NO: 419203 - DNA, 367 bp, Oryza sativa
tggttttgacaaagattttgggcgtcttattggtgaaaaaacatgagcaggaaccaacatatgcatcgaatatggtcctgctcgctgttgggcggctggcagcagcagcagcagatagtaagaaaacaaacacaacaacgtttctgcacctaaaagattaattctacagtgtcttcaggagtggaagactacagctcagaacttcgtatcttctcactgacagtagaaccaaaagctggaccgcccttccggtagcacacaagaaactcaaccgggtaacccttcaatttgtgaggcacgattccgaggtccgaaaaggtgagagcattatcagacactagggtgtctacagaaaatgcattaatct

SEQ ID NO: 419204 - DNA, 541 bp, Oryza sativa
  unsure (1)..(541): unsure at all n locations
ctgaggattgtcaccgacacctgaagttgatgggtgacctgggtcagattgttcctatgaaatacaatccaagagatgtggattcaattaaggctgtcatggccaaatccaatgtggtcattaacctaataggacgcgagtatgaaacaagaaactatggatttgacgaagtaaatcatcatatggctgaacaacttgcaatgatttcaaaggagcatgggggtatcatgagatttatccaggtttcttccctaggagcatcggcctcttctccttctagaatgctgagggccaaggctgctggggaggaatctgtgttgaaagaatttcctgaggctacaattatgaggcctgcaactatgattggacagaagatcggattntgaatagatgggcacagtttgccaaaattggngtttcctccctcttgttgattctgggtctacaaagaatcagcctgtttatgnttgggatggttgctgctgctattgtcaactccctcaaggatgacggcaccagcatgggaaagacctacgaactg

SEQ ID NO: 419205 - DNA, 373 bp, Oryza sativa
tttcttgtcggggtcgtagagtagcgcccgtacagcgccgggaccatgatccggatgagccggagcgggtcgcgcaggcacgggcgcgcgtactccacgaggctctgctacctgaccgggcttggcttgaggacagagcgccgcctcaaaaggatctccaggagcaccacgccgtggctgcacacatgcattggagccgtcaggacggcgggcgtgatgatctccggcgcggttgatgcatgggtgcccatgacgcgcgctgaatcgagggtgtaggccttgttcggtgcgtccatgaacaccctgacttgcgacaggttagctgtgcattacagatgcagtgggatgatgtaggatttgatgagcccattaa

SEQ ID NO: 419206 - DNA, 544 bp, Oryza sativa
gacacgcaccaaattgtcaaccataaagcatacctcggcggctgctgcgagtcagctgcgctcgctcgccagatacgagactcggccggtgcgagacgggcacggtgcatgctggcatgcggatagactgcggcagaaatgaggacatccagctatggcacggcctgtagcggccgcatgcgaggaggaaggagaaggaggcagtgcaaagtacgtgcacgctcggggtactgtcttccgacggggagccggccgggatgcaggatacaagaagacagaaatagggcgacatgaaggaaactgaaaaatgtctgccaggtctgcctgctagatcttgaatatggtctaccggtccagggtagggatacagcactcgctattaattagaatgatgcaatcccaaggagtgatgtgaaccgtgagtactttgcggaagagcatgatcgcaaggccagggctggaattgaataatgattcttcccatcgggaaggcacaacccaatgacaccattgctgaagcttcagaggacggcaccatattaca

SEQ ID NO: 419207 - DNA, 375 bp, Oryza sativa
  unsure (1)..(375): unsure at all n locations
ggacgacaactttaaatattgctcaataaaacactatctggagacaacacacacgagagtcatatccagaggaaaacaatcagcccagacggaccactagcaccaaatgcaaagcaatggganagaacnntaattcgaccgctaccacccctagtannaaaaccagagaagtagagaggtaaggggggaccaggaagaaaaacatntctagtangaaccagggagaagaatcnccatccatcatggtgacagcagcantgnaggcatctaaantcgatggtctccaataacatgcggagccatcgatcgatcgatcttcccattttactggccctcgccggcgtcgcccttggaggcttctttcacctcatcacc

SEQ ID NO: 419208 - DNA, 518 bp, Oryza sativa
taaagcattcgcatccacgagaccactcgaacccgacccgcctcgccgccgccgccaccgaagtaatcccttaattggtcaaaatgtctcgggaggagaatgtctacatggccaagctggccgagcaggctgaaaggtatgaggagatggttgagtacatggagaaggttgcaaagactgtagatgtggaagagctcactgttgaggagcgcaacctcttgtctgttgcttacaagaatgtgattggtgcccgccgtgcctcctggcgtattgtctcatccattgaacagaagggaggagggtcgtggcaatgaggaacatgttactctgatcaaggagtaccgtggcaagattgaagctgagctgagcaagatttgcgatggtatcctgaagttgcttgactcacaccttgtgccctcatctactgctgcagaatctaaggtgttttacctcaagatgaagggtgattaccacaggtaccttgcggaatttaagactggtgccgagagaaaggaagc

SEQ ID NO: 419209 - DNA, 361 bp, Oryza sativa
acgggcacaaccaaaatgcataattaacgataccattgttggatacattcttgtctagtacaaaattaatatgctaaagattaaaaacaaacttcgatgttcagaacttgaaacaaaactttcaactttgcagcgatatggcaagaggcttagtcgaagaggctcatgcccaggtcaccatcggactcctcctcgggctcttccttcttctcttcctccttggcagccgatggagcagcagcaccactgtcggcggcaactggggcagcaacagcgaacttgctggggtccttcaaatactccttgatcttatcagcatgtgggtacgagtattcggtcttcacagcaacagcaagcacat

SEQ ID NO: 419210 - DNA, 345 bp, Oryza sativa
cttgctcctcctcgccgtgagcttggtcttcgccgtctcctctccccacgcgcagatctaagcctagggttagggtttgtgtagctcgcagcgatggcgatcaagaggaccaaggcggagaagaaggtggcgtacgacaagaagctctgccagcttctcgacgagtacaccaaggtgctcatcgccgtcgccgacaacgtcgggtccaaccagctgcaggagatccgcaagggcctcaggggcgactccatcgtcctcatggggaaagaacaccctcatccgccgctgcatcaagggtgcacgccgacaacaccggcaacaaggaggtcctcgagctcatgcccc

SEQ ID NO: 419211 - DNA, 363 bp, Oryza sativa
tttggttaatcaaaacttattgttctttccataacagagacgacagccccaaatacttgacttgtccactatgattttcttgacaaacttaggtaccagataacattgagaaaagaaaaagaaaaacataacataccacctataacttaccatacttttaacctaacaaaattactctacgaatgctaaatgtgcgttggagttcttatgggcggaactgaaatctcaagggcacgagcagattgattttgctgggggaaaaaacccaagaaatctgctcccaaggacccacactcacagggccatcacaccaacatgaataactttagcaagcttttaattcacacgcagaaatccacctgc

SEQ ID NO: 419212 - DNA, 376 bp, Oryza sativa
  unsure (1)..(376): unsure at all n locations
cgaggatttcccagagatacccagcggctatcgacttcggccgtggtgatatgttccggcaggtggatttctgcgtgtgaattaagagcttgctaaagttattcatgttggtgtgatgggcctgtgagtgtgggtgcttgggaggagatttcttgggttttttccccgagcaaaatcaatctgctcgtgcccttgagatttcagttccgcccataagaactccaacgcacatttagcattcggagagtaattttgttaggttaaaagtatggtaagttataggtngatggtattgttttttctttttcttggcaaacttaggtcccagatctcattgagcgccgatttgagtcggggttttagcaagcgtctggga

SEQ ID NO: 419213 - DNA, 362 bp, Oryza sativa
tttggtttttttactattttgggccaaaatctgagacattgcacaaaaatcaaccagttcaaaaggtataccaggtcaaataaacagcaagtaacaaaactccaccaaaaaggcaactgttttaactccgaattcaagtcctaaatagtacttttgcaactgatgattttgcttataaacattgtgctgctcacttgaagcattttgcatccagcaagtcctcgccctcgaacggatcctggtcctcaatcatggcattgacacgctctttctgggcctcatcagagaggtcaaccttggtccactcatagagctccatgtcgtagacctcatccatgacgaacttgtggatgtcctgacca

SEQ ID NO: 419214 - DNA, 441 bp, Oryza sativa
gattcctgttctggagactcctgaaggtgctgtttttgagagcaatgctatcgcgcgctatgttgctcgcttgaaggacaacagctctctttgtggttcttctcttatcgactattctcacattgaacaatggatggacttctcagcaacagaggttgatgccaatattggaaggtggttgtacccaaggcttggttttggcccttatgttcctgtgcttgaggaatttgctattacttattgaagaggtcattgggtgctctgaacacacaccttgcttcaaacacataccttgttgggcattcagttactctagctgatattgtgatgacatgcaacctatattatgggttttggttcggatcttgatcaagagtttcacctccgagttccctcatgttgagcggtacttctggacaatggttaaccagcccaacttca

SEQ ID NO: 419215 - DNA, 460 bp, Oryza sativa
ctatagctcatcagtgttatagataagatatcttgtgagtgtttagggttttcgataattcggtcgaccattcgttggttcttggtggaagggagggaggttcttgtttggtgatgtcttgtacctccccagacccgcccgattactgctcggccgcatcgcctgagcttaagctataccaagccttcatcttctccgtgccggttttcttcacgttcgtcttgcttctcttcttctacttgttctacttgcgacggcgcagagcaaactggcagtccttgcgcatgaggactaataacttgatacggggagataaccccagattggagtgcggcataaagaaggagatgcgggaaatgttgcctgttgtggtcttcaaggagagcttcttgatcagggaaacacaatgctctgtctgcttagcagactatcaactcgatgagcggctccagagaatacc

SEQ ID NO: 419216 - DNA, 425 bp, Oryza sativa
gtagatctttgtcaagacactgaccggcaagaccatcaccctcgaggtggaatcttctgacaccatcgacaacgtcaaggccaagatccaggacaaggagggcattcccccggaccagcagcgtctcatctttgccggcaagcagcttgaggacggcaggacccttgctgactacaacatccagaaggagtcaacgcttcaccttgtcctccgtctcaggggaggcatgcaaatcttcgtgaagactctgaccggcaagaccatcaccctcgaggtggagtcttctgataccatcgacaatgtcaaggccaagatccaggacaaggagggcattcccccggaccagcagcgcctcatctttgctggcaagcagctggaggatggcaggacccttgctgactacaacatccagaaggagtccaccc

SEQ ID NO: 419217 - DNA, 463 bp, Oryza sativa
  unsure (1)..(463): unsure at all n locations
ttcgcctcctcctcctctcgccgctcgcagcgaaaaagccagcgcctcccagcgcccacgcgatcccgacgaatcgaatcgagtccgagacgccgatctcggattcgagaccgttgatttcaaccaacacaagccctcctccggatcgatccgctcctcttcagccatggcaggaatggcacccgaaggctcccagtttgatgctaagcactatgacagcaagatgcaggaactactgcaccaaggtgacaatgaggaattcttcacttcatatgatgaagtttttgagagttttgatgacatgggcctccaagagaaccttctcagaggcatctatgcttatggtatacaaaaagtcttatcccttttccattgtttcaacaacacatattttggtgatgttacaaatccctgtactttgatggtaggttttgagaagccatcagctattcagcanaggggg

SEQ ID NO: 419218 - DNA, 363 bp, Oryza sativa
tgtttttagaacaaccaaatgaactcattttatatattgaattattaaacatacacgttttgcaacgcaatcacaataacacaaatgatcaaacagccttgacgcattacaaccagctttacttatttaaacaaaacatgccactaccaccaccttgtaaaactcagcacacaagacaacctcagtggtagtagttgttgagcctcctgcagttcttcctgatctccccctgtgatccagtcagaggcgagatgttgcccatattcaccattgactgtgcgaagtgcttgaagaagaggttgacatcatcagcatacgccttcacgagcgccgctgtttcagcgctcttggtaagcaggacct

SEQ ID NO: 419219 - DNA, 494 bp, Oryza sativa
gtccactcgtgccccaaggcgaaggagatcgtgcagtccatcgtagcacaggcggtggccagggagaccaggatggcggcatccttggtcaggctgcattttcatgactgctttgtcaaggggtgtgacgcgtctgtgctcctggacaacagcaccaccatcatcagtgagaaggggtcaaaccctaacatgaactccctcaggggtttcgaggtcgtcgacgagatcaaggccgccctcgaagcagcttgccccggcaccgtctcctgcgccgacatactcgccctcgctgcacgcgattccactgtcctcgttggtggcccgtctggggatgtgccacttggccggagggactcactgggtgccagcatccagggctccaacaacgacatcccagctcccaacaacaccctccccaccatcatcaccaagttcaagcgccagggccttacatcgtcgacgtcgtagcccttcaggtggcccaccattgcatg

SEQ ID NO: 419220 - DNA, 300 bp, Oryza sativa
tagcaagcaaggaagagaattagtcaagcggatcattagacggaggaaacaagacatgggatgtccacaacagcctaaacaggcagccaacaaggagcgctgtctcctataggacgagagaaaaagtaaaacataacggtgagaagtgaaactgattaatgatagtatacaatgatgatgatggataggttgcataggacgcccggcgtcattagtgtcttgctgatgccatcttggccactggtaagggtacactcggatctgtattagcctcttagctgcccttgtggctattctcat

SEQ ID NO: 419221 - DNA, 520 bp, Oryza sativa
  unsure (1)..(520): unsure at all n locations
ttcttctcttctctggtggtgtgggtgtgtccctgtctcccctctccttcctcctctcctttcccctcctctcttcccccctctcacaagagagagagcgccagactctccccaggattcagccatgaagggggccaaatccaagggcgccgccaagcccgacgccaagttggctgtgaagagtaagggcgcggagaagcccgccgccaagggcaggaaggggaaggccggcaaggaccccaacaagcccaagagggctccctccgctttcttcgtttttatggaggagttccgtaaggagttcaaggagaagaaccccaagaataaatctgtcgctgctgtaggaaaagcagccggtgataggtggaaatccctgaccgaagcggacaagggctcctatgtagccaaggccaacangctcaaggccgagtacaacaaggccattgctgcctacaacaggngcgagagcactgccaagaaggcacccgccaggaggaagggaggacganaggaggaatct

SEQ ID NO: 419222 - DNA, 433 bp, Oryza sativa
ctgaaggtgatattcagtttttcagagtgagtgctcgtgtgttgtgcgatcagtgcccactgcccagttcgatcgatccgtgttgatctttgaaagaaagatgtcgtgctgcggaggaaactgcggctgcggatccggctgccagtgcggcagcggctgcggaggatgcaagatgtacccggagatggctgaggaggtgaccactacccagactgtcatcatgggtgttgcaccttccaagggtcatgccgaggggttggaggccggcgccgccgccggagcaggagcagagaacgggtgcaagtgcggcgacaactgcacctgcaacccctgcaactgcggcaagtgaagcaagcaacctcctgacgaaaccaaggagatgggagggcctagtactgctagctagtagtttgatccagttacaagtgatgag

SEQ ID NO: 419223 - DNA, 354 bp, Oryza sativa
tttgtttatgaagaatgtctttttttttatttagagcgtttttgttactttttaggcccatgtggacactatttttacatggaacatcaaaaaaactaacattttattgcaacacggtactactagaacatcctggttttactaggaagaggttgctaaaaatgcataaccagtcaggttattgaaatgattttaaggccccttaccaaggatccggcgggcgagctgaataaccttggacataatggggacccccttggcggggatggaccaaaggttggtgtccttgaaaagcccagccaggaaaggcttagaggccctctggagcccgtgcaacgcagatttttggaaccg

SEQ ID NO: 419224 - DNA, 325 bp, Oryza sativa
tggtaccggtgcgggatccggggcggagacccacgcgtgcggtaatcttcaggccagagcgcgagcgagaagaccggaggcctgctgctacgttcttggggagggccctgacgaagcagacgggtcggaagtcgaccggcgggaaggcgccgaggaagcagctggcgacgaaggcggcgcggaagtcggcgccggccaccggcggcgtgaagaagccgcaccggttccggccgggcaccgtcgcgctccgggagatccgcaagtaccagaagagcacggagctgctgatccgcaagctccccttccagcggctcgtccgggagat

SEQ ID NO: 419225 - DNA, 264 bp, Oryza sativa
ttgaagcccacctaattccattcctcgggattcctctcccctcgcctcctcgtcctccccctcccaggggatcgccggagaggaatctcgcggaggaaaaaaaaagaaaagggcttgcccgtcgtctaagttaaaaggaagccatggagcacaaggagactggatgccagcagccagaaggcccgatcctttgcatcaataactgcggcttctttggcagagcggctaccatgaacatgtgctcaaagtgccaccaggagatga

SEQ ID NO: 419226 - DNA, 538 bp, Oryza sativa
ccggccgccaccgtcgccgcgatcccccacctccgctcgccggaaggggcgccgtagccccgcccctcccctcccccctctccggtggctggcccctctccggcgatggggagcgccgacctggtgctgaaggcggcgtgcgagggctgcggctcgccgtcggacctctacggcacgtcgtgcaagcacaccacgctctgcagctcctgcggcaaatccatggcgctctccggcgcccgctgcctcgtctgctcggcccccatcaccaacctcatcagggaatataatgtacgggccaatgccaccacagataagagcttctctattggaagatttgtgactggtttaccccctttctcaaaaaagaagagtgcggaaaacaaatggtctcttcataggaggggttacaaggtcgccagattcctgagaatatgcgggaaaaatacaataggaagccatggattttggaagatgaaactgggcaatatcagtatcaaggtcaaatggagggatcacagtcatcaacagctacatacta

SEQ ID NO: 419227 - DNA, 367 bp, Oryza sativa
tgctcctgaagggagaagaggaaaaaacccgactggttttggccggccaagtcgcgaagcgcttgccaagaggggtggtatagcgactgtacaatatcaatatggcagggtcttaatctgtctcacatgttatgatggaatcgctctcacatgaagtagctcagtgctttcttcttcctcgaaccgccctcgccatataggtcgttccattgaagaagttcattcatgtttgctgaatcagatgaaacgcttgcacaaacctgctcatgggcagatttgaaatcatctaaggtcagaggacgaatgtcctcactaccatacaatgcaggctcaggcctgccttctgcttttgccacatttttctcct

SEQ ID NO: 419228 - DNA, 513 bp, Oryza sativa
  unsure (1)..(513): unsure at all n locations
ctggtccagcaggttcggagatttatcaggaaacattgataaaggcacttgcaaaacatttcggtgctaggctacttgttgttgattcgcttttgttgcctggggcgccttcaaaggacccagagtcgcagaaagatgctgcgaagtctgataagtcaggggataaggctggtagtgagaagttggcaattcttcataagaaccgctcttccttggcagacgctatgcacttcaggaggccagctgtacaaccttctagtgtgcatgctgatatcgtgggtacatcgactctgcattctgcatctttgcccaaacaggaatcatcaacagctacatccaagagctatacttttagagaaggggatagggtaagaatgtgngggtccagctcagcaatcgtcattgtcgcaaaggggacccagttatggttatcgaggcagagtgatgcttgcttttgaagaaatgggtcttccaaattggagttcgatttgacagcagatccctgatggtatg

SEQ ID NO: 419229 - DNA, 512 bp, Oryza sativa
  unsure (1)..(512): unsure at all n locations
ttcgccgtcgccacggacacgagagcggtgggtgagttggccgggttggcggttggttccgcggtttgcattacgtccatcttcgcaggggcaatttcaggtggatcgatgaacccggcaaggacgctggggccggcgctggcgagcaacaagttcgacggcctgtggatctacttcctgggcccggtcatgggcacgctctcgggagcatggacctacaccttcatccgcttcgaggacacccccaaggaaggctcctcccagaagctctcctccttcaagctgcgccgcttgcggagccagcagtccatcgccgccgacgacgtcgacgagatggagaacatccaagtgtgataggacgacgagatgtcgtcgattcgtgtcctcttactcggaaaattaccagtcgatctcggtctcgtcatcactagctacgtctntgtgtgtgttttgtgtcgtgtcactgctgcttcgtacacgccggagagagttacataaaacgcgcgcgcgtg

SEQ ID NO: 419230 - DNA, 388 bp, Oryza sativa
gtccgacgcggtcgaggaagaaggtcgccacgaggatgaagagcgtcttggtgacaccgacggcgcaggtggtgccgaggaggtgtttgtcgtcggtgatgccggcgctcttgaacacgcgcgggctgtagagcacgacggagtcgatgcccgacgcctgctggaagaagtggatgccgatgcccgacagcaggatgcgccgcatggccggggtcggggacaggatgagctccttccacacccgctttctcgtttccgctccctctcttggggacggtcaccacgtcgccgtcgagctcctcggcgatgccggcggcggccttgatgtcggccaggcgctccgcggcctcctacgccgtgtcggaggtcttctccagcaccaccttgg

SEQ ID NO: 419231 - DNA, 407 bp, Oryza sativa
ttcgaccgccactactggacacggcccagagcgagcctcctcctcctctgcaccaccggagatggcttccgccgcgctgccggaggccgtcgcgccgaagaagaagggcaacgtccggttcgccttcgcctgcgccatcctcgcctccatgacctccatcctcctcggctacgatatcggggtgatgagcggcgcgtcgctgtacatcaagagggacttcaacatcagtgacggcaaagtgccaggttctcatgggcatactgaacctatactgcctcatcggctccttcgcggaggggcggacgtgggactgtatcggccggcggtacaccatcgtgttcgccgccgacatattattcgcgggggcgttcctcatggggtacgccgtcaactacgccatgctcatg

SEQ ID NO: 419232 - DNA, 534 bp, Oryza sativa
agacgcttctctcctcctttaatctcaagtctctctctctcgtcctcgcatctccactcgccatgggcaagattaagatcggaatcaacggtttcggaaggatcgggaggctcgtggccagggtggccctccagagcgaggatgtcgagctcgtcgccgtcaacgaccccttcatcaccaccgactacatgacctacatgttcaagtacgataccgtgcacggccaatggaagcacagcgacatcaagatcaaggactccaagactctgctcttgggcgagaagccggtcaccgttttcggcatcaggaaccctgacgagattccgtgggctgaggctggtgctgagtatgtcgtggagtccaccggtgtcttcactgacaaggagaaggctgctgcttcacttgaagggtggtgccagaaggttgtcatctctgccccgagcaaagatgctccgatgtttgtctgcggtgtcaacgaggacaagtacacttcagatattgatattgtctcaaatgctagctgcaccacaaact

SEQ ID NO: 419233 - DNA, 365 bp, Oryza sativa
tttggttatttaaaacttagttggttctttccataacagagacgacagccccaaatacttgacttgtccactatgattttcttgacaaacttaggtaccagataacattgagaaaagaaaaagaaaaacataacataccacctataacttaccatacttttaacctaacaaaattactctccgaatgctaaatgtgcgttggagttcttatgggcggaactgaaatctcaagggcacgagcagattgattttgctcggggaaaaaacccaagaaatctcctcccaagcacccacactcacaggcccatcacaccaacatgaataactttagcaagctcttaattcacacgcagaaatccacctgc

SEQ ID NO: 419234 - DNA, 440 bp, Oryza sativa
aacacaatatcacagatttcctttttgactgaatatccagtatgaatagaccaaaatgcccctacctacactggtttccaaacatgggggaattatcaagaagacaaagcaaagggggacatttttctgatcatgccaccaggaggggcaccaccaagatcgccgaggcggtgggggccacggaacgcgggggcccgatcggagcggacttgggtaggtaggggtaggagtccggcgggggtattttgcactcgtcgccggtgaagtagatcttgcgcgggaacccccagccctggttgaaggggaaggtgttgaactcctttcgcatcagcacctccaactggacgttgccgaacgggcctgccttcatgagcaggccgttgtataacttgagcccgtaaaacatgcccgtgtttttgatgttgccgaaggggaggagg

SEQ ID NO: 419235 - DNA, 355 bp, Oryza sativa
tttttgtgtaggatcaaaacatttctattaccacaactttttaaggatggaattgagtagcaatactttcaccccaaaatacagtttagcgacaatattcttaaaaaagccgcttgctttgccgccatggctggcaagctgagcagagcagctaacacaaagaacacgagatcactataaaccaaacggcaacgaacgaagaaaatacagggtcttttttgtctgaagatacacgaagcgggtggttttcttttattttaaacctcctttcctgccacattgtcgctgaatgggaaatcatcagattgatcctaaaaaaacaaccccacaaggaatacttgaactatttcaatgg

SEQ ID NO: 419236 - DNA, 469 bp, Oryza sativa
tttttggtgggcttaatttaattttcttttgtccggaactagtgacagtgcattaggagttcattcaggaaaagacaaaacacatactgcagtatcatacctagatgcatccaacttccaattctctgagccagcaaagatagggcatgttctaattcaaaactgcaaacaaactatagccgactcaaccaaagatagggcatgttctaattcaaaactgcaaacaaactgtagccgactcaaccaccaaacatatgagaggcagtaagggttgaagatccatggatctgttcaggcgatggtaacatcaactcttccggccacttggtccagatcacgccttccctgggaggtgatgagtcttccgcccttggggtcgacatcgatgatgcccatcttctgcagctgctgaaggatgttgcgtgagatagcgccgctgctcttgcagaagtgcgggggacgtgagcca

SEQ ID NO: 419237 - DNA, 388 bp, Oryza sativa
ttttggtttggagataatgcagaacaaagagttactataaaagggctaatgcagaataagaaaatacagattctggattaattaactagcatatttaaatttaaaacgtaactgtttgagcaaataccacgaaatgttcaggcgctaagatacggcaataccgatacatccagcatagcaaaaatggcgaagagcacagagtcagataaagctatagagaactagggctccaggagatgggggccgaatgacaaccatggcgcttagtcgacctcctgcatcttgctctcgccggcgtcgtcctccagcggcggcatgtaggcgtcagcctcagcagactcgtcctggtcaatgctcaggccgagttggagcatccggtggatcctgg

SEQ ID NO: 419238 - DNA, 482 bp, Oryza sativa
gtgcacgcgcgcaagcgcgggtactctattgcgggcgccctcttttttttttttgatgggatcaaaacatttctattaccacaactttttaaggatggaattgagtagcaatactttcaccccaaaatacagtttagcgacaatatcttagaaaagccgcttgctttgccgccatggctggcaagctgagcagagcagctaacacaaagaacacgagatcactataaaccaaacggcaacgaacgaagaaaatacagggtcttttttgtctgaagatacacgaagcggttcgttttcttttatttttagtctcctctcctcctcgatgatgggtgtatggcaatggcaatggcgatgggatcttggcttagttgatgggaaggggctcgccgttccactccttgaggcagtcgagcatggggtcgatgagcttggcctggctgatgccgaggaacacctttgtgcactcctcgccgggggac

SEQ ID NO: 419239 - DNA, 468 bp, Oryza sativa
gatcataaggcaaagctgcgagcgccagatcatcttattactacagcttcttggcgatatgctacagtagcttcttcctcccttgcaaaaagaaacccaaaccttatctacaacgcaacacacacaccggacacagagcgctcgatcgatcgaagcagacgagacgacgatggcgaactactactaggtaagcgacaacacctaggctatacagggatacagcgcgcggcggcgacgggcggcgagacggcggcgatgatcaggcgctggccttgttggccttcttggagatggcggagcggatggatttgggcggctgcatcggcttcgcgggggcggccttcctcgccctcttggcgcgggctgggcgggcggggggaaccgacttcttcgcctccgccgacgacgcgggcttcttggcggcggcggcggaagggcgcggggtcctcttcctcttggcgccgccga

SEQ ID NO: 419240 - DNA, 485 bp, Oryza sativa
gacgaagatgtcggccgcctcaacgatcttgccggcgctgtccttggtgaggcagcccatgaagccgatgtcggcgacctgcacctggccgcagctgttggggcagtcggtccagtgcatccgcaccgcccggggcaccgacacgagcttctccacctgcgacgtcaccagcagcgcccgctgcttcgtctcgatgatggcctggccgcagaactggttgccggtgcacgcgaccaggcccttgagcagcagcgacggctgctgggagaacttgtgtagcagcggctcgcagagcaggaccttcaccttgtcgttctggacgttcgggatcacgacgttctgctccacggtgcggcggagctagccggagccgtactcgtcggcgaggcgtgcgagctcgaacatgtccgtcgactgcacccggccgacgggcacgtgcaggccgacgtaggacatccctttctgattctgcgggtgcacgccga

SEQ ID NO: 419241 - DNA, 489 bp, Oryza sativa
gcgaactcttttttttctccttgttttctatttcatttcattccgatagatagcaacaagcagttcaaacaccataaccaaagcgaactcaattcatggtaacatcacggacgaagaacacctaacactggatggatggatagagggcttctcgactcgagagagccactggacacgataacgactcgactcgatgataagatgattctgacacggatagctaaggataactggccacgatgggccccaccaatcagttcctccagttcccgccggagtcgccgccgtagccgccgccacggctgccaccgtagccgccgccgccgccgccacggtcgccgccgtagccgccgccgccaccgtagccgccctcacggcgcccgtagccgccgccgccaccttcttcgtagccgccgcctccacgaccgccgccgtagccgccaccgccgccgccgtagcccccgtcttcgccggcggagcggcgggact

SEQ ID NO: 419242 - DNA, 451 bp, Oryza sativa
tttttgtgtttttttttagagagaaaaaaaaatgcagcagatatgcaaagatcgttacaagacagatatagaacagagaagctcaaggcgtcattaaccctatgaagctttgacaagatacattacattaatatatattggctatgccgaatgccgatatatcaatatcgctggaagatggattgcacaacagtggctgccttagttggaagaaacatgttgatgttggccattgagtggagtgacgtttgagatcaacagatgccttcatgtgtgacttgtccggagcatccatggcggaagcttgatgttgcctgcttgtgccggagacggttgagcttctgactcccctgatcctcttggttggctttgactgttatttgttgtcgggatgggacctgcagccgtcactggtgttggtgatgatgagcttggggttgctcaatttggc

SEQ ID NO: 419243 - DNA, 501 bp, Oryza sativa
gaaacaaatgatggggacatcagttttgacggaacagtttgcatacaacagcattgcaacccaaatccttttatccgaagaacacaacgacgacagcaaccagccgagtgcagaggcaaaagaggagctcacatcctgctcttcttgacggggccgagctccttggccttggtcctcagctcgtgcttcttgatcttccccgtcgccgtcttgggcagcggcccgaacaccaccgacttgggcacccagtaccccggcatcctctccctgcagaaccgcatgatgtcgccggccaccgccgcctcgtcggagctgtcggcgccttccttgagcgtcacgaacgcgcacggcgactccccccactgctcgtccgccctcgccaccaccgacgcctccagcaccgccgggtgcgcgtacagcaccttctccacctccaggctgctgatgttctccccgccggagatgatgatgtccttcatccggtccttcacctcgatgtac

SEQ ID NO: 419244 - DNA, 475 bp, Oryza sativa
aacaaaagccatactctctgtattaaagatccaacaggttcagagaacacgcaagctcagaactacacatcaccaaaattggagcaagtttgggggtacatatccgctcatacagtggaggatttatttctcgattctacgagctttttaactagagttcgaccgggaagtcaattacggatagaaatgagcatcctgtcttcacaaaacccatgcacacaacagtgggcatgaaccgcatgatattcaccatcaagtttagtagggctccacgggtgcgcggaacttggcaccagcgtagacagcagccgcaccaagctcctcctcaatcctaagaagctggttgtatttggcaaggcgctctgatcggcagggtgctccagtcttgatctgacccgtggccaaaccaacagccaaatcagcaatgaaggtatcctcagtctcaccactcctggggctggtcatcacaccccag

SEQ ID NO: 419245 - DNA, 410 bp, Oryza sativa
ttttgggttttagggcgggccatgtaaccttgactttgtagtcaattatgtcataaaaataagctggagtactctgcagcgtaaccaaggttaacatacaacaggataaacagaaagttcggtatacaacatgaggcattacactacagaaagacttaaactctgatcttactgttgaatacaatgatccgcggaaatgatatcataaactctagttgttgatcttcttcttgggcctgagctggttgttgaggccgcacttcttcttgcgggaggtgtcagccctggggtgcagccgagcatagcacttggggcagatcatattggactgattgtacttggggccaagggcctggggggagggctcgatgatgcccccgcggaggcggtggacgaggtggagcgtggtc

SEQ ID NO: 419246 - DNA, 493 bp, Oryza sativa
tttttgtatttttaaaactattttcccgatcgaatacacatacaaccttattttgatcgttaagatggtgcatatgctctctctagctatatatctactcctcgtctccctcttacatgtcgctatatagccttagctactttttgcatgtgtgcgtgtgtggctaataacctaagctaagccgattcaattgatttctagccggcggccgggtgcggccgggtggtggtccagaacaaggcgagcgcgcggaggcggccgaagtagtcgtcgacggcgacgaagcagcgcgccgcctgcctcaccgtcaggatccgccgcagcgcgtgcagcgttcgcatcctctcctcatccgcctgtcgtaggaagatggcgaggttggcgagcttgtccatggcgagctgcaggttgctgtagctgccgtactgccccatgaagctcgccgcagccatggcggcggcggcggaggggtggtacatcaccggcggcgtct

SEQ ID NO: 419247 - DNA, 490 bp, Oryza sativa
ccatgtaaacagaccacatgcatataatacagaccattcaaaagattggtaatagtaaaaatacaagttcgtgaatggcgataatacttaaagctacctccaaatagcgtgtagcattgcgtagcaaaccaagcatataacttaggacaaacattcagttgcagcttcacatcatcgctgcttatcataactgcaataacagcgcagatggagcataaactaagtatatttcgtagttctagcttatatataatatcagaatcaccaactgtgaaccatccacaggatggtcgggggactactgatcagaatctactcctttgaggtgtggatggcagacacggtggagaccatagaatccacgccacatttgttgcggacgttggagcccctgcagatcttgtagtacccatgctctccccagttctcgccccaggagttcttgatgatccagtaggccttatcctttaggcggattggagcaaaacca

SEQ ID NO: 419248 - DNA, 522 bp, Oryza sativa
tgattgatttcgccagggagaaggtcgggggcgccgcggcggaagtgcggctcatggccaccgccgggctgcggctgcaggaggggcgcctccaggaggccatcctgtcgtcctgcagggacgtgctcagggcttccggattccggttcgaggactcttgggccgaggtgatcccaggctctgatgagggtatctatgcttgggttgcggcaaactatgctcttggcacacttggaggggatccacacaaaaccattggaataattgaacttgggggcgcctcagcacagctgacatttgtttctgatgaagtacttcctccggaactgtcaagaaatttcacttttggtggaacaacatatactctctatagcaacagctttctaaactttggacaaaatgctgcacaagaatccttccgtgaaatactgcggtcaaaagactccaaaaatggtacactggttgatccatgtgctcctaaaggatattctcgcatcaaagaagtaatatcaagacccagca

SEQ ID NO: 419249 - DNA, 512 bp, Oryza sativa
agtacagtgaaaatattttttttaacgactcgcacgagacaatacgattgatagagcaggaaaatattacaggactataaccctggagggtcataaccaggaaaaaggaaaaaatataccaccacccacacactgacagcgccaacacacaagaccgggagaaggctaacaccggaccggccgccgctaagcatgactgatcaccgctagaccgacaaaggaacgcagacgagatcacctaaaagaacaccctcacaaccaacgcaaagccaactcctagagtgtgcttgcaccaatcgatcgagaggcttcggctaggggatgccaaaacgacgtcttcaagaagagaagcgatagaaaaccgccgtcaccgtccgtcggggctcaaagaagccaagactggctttcgcccggcaaccacccttgagggatgagacagcacgacaacgccctcaggagggagaattaaccatcgttgtcggtccggccaaggccgggctgggttttacctg

SEQ ID NO: 419250 - DNA, 498 bp, Oryza sativa
acgagcagcgatctcacagtatatttatattagaatcaaaccaggctggagatgtagactgttctgtacaagaggggccgctaccaaatccagctagtaaacagggaggatttccaaatgtgcaaccacacataataaataagtacacaccagtagcaattgcatgtttgctaaaatgttaattatggttacatatatttatgtgcatatatttatagagcgatgcattaaccgttccagttaagggcgtgcaagcgatcgcacaatatcgatgcaaaacgaagattggtgccagcaggactgaagaagaatggggattaagcacccacgcaattttcccaacaaccatagctcgaactgaaactgcctccaccagtctgttgagcatactcagcaattactttgcgggcacacgcgtcccacggcctcgcaatttctcttagtgacatgggctcagctaaaccccgaagcaatatgctgaacttcgacctcgctttg

SEQ ID NO: 419251 - DNA, 457 bp, Oryza sativa
gaaaagcaatatccatggattcagagaacaaggtctgttgatatataattattctgtttttatttgaatacacataaacgatcaaactgtgaaacggtacaggatctgagataattaggaaactacagagcagcagctacaatattaaccatagcagctgcaggataaacacggtgctaaataggcaggctttgttcttctttcacagcctggatatctggaaggggaccatgacttcagtcatctcctccctcatgataatcttcccaacctggaaaaggtcggagatgcctagctgcgtcgacagatgccttcggcaatcctctgcagcaacaatgcctgaagaataagctccatgcacggacccagagtgatcgatgcaggcggcctccccagcgaaaaacaggttgcccaccggagcacagaattttcatacaagtgagttggcttcccaaca

SEQ ID NO: 419252 - DNA, 508 bp, Oryza sativa
atagaaaccaacatataaatagttttttaactgccaactacagcctcagatcaatggaattgaagcctccaacatgccgacatagcaatgttacttcgggtcggaacggagtttgtgcggagtaatttctgggacaactctgtagatgtgcacttttatgttatccttctggacaagctcgaagacacacacatcaaacttctccagattgttgccaacagcaaatttgccccagccaccactgaaagaaccaacagaacgatcactgtagtagacatagttaacttcccaagccttcccttgtggatcccagagtgtgatccttttgttggtacggggaagacactcacggacaaattcacatgggatattcatgaaaaatccaacatagacatatgactccatcattatttgcacggcaaaaggattcttagatttaaactctcttgccctttgaagagcatggtccctctctgcttcagttaccggacgcctctgtgatattact

SEQ ID NO: 419253 - DNA, 479 bp, Oryza sativa
gggcgcagaaatgcacgggagaggcccgccggacggcttagttctgcttccacagcagcgtggtctcggcgatcatgccggtgacgacgtatgggtccatgttggacgccggcctcctgtcctcgaagtaccccttgccctccttctccgtgtcgcgccccacgcggatggacgcgccgcggttcgccacgccccatttgaaggtgttgatgtcggcggtctcgtggcggccggtgaggcggcgctcgttgccctcgccgtaggcggcgatgtgctccttgtgcctcagcgcgagcttgtcgatcgccttcttgatcacctcgtagcctcccggctccctcatcgacttggtgctgaagttggtgtgggcaccagcgccattccagtcacccgggatcggctttgggtcaagggagagcacgactgcggccacctatgtgacccttttgagatgtagcgggcacccacacttgtcagca

SEQ ID NO: 419254 - DNA, 492 bp, Oryza sativa
gcccaaacagaccaagggtatcatcatagcagcaaagttttttaacacgcaacatcaaagagacactaatgcaataagataacttgaagcgcggatcactagcaaatttcgcgcttagtcgacctcctcgatcttggggccagcaccgctgccgcctgccgggggagcattgacctcgtccatgccgccggccatgtccgcgccagcgccctggaacattttggcgatgatggggttgcagatgccctccagctccttcatcttgtcatcgaactcatcagcctcggcgagctggttgccgtccagccactggatggcctgatcgatggcatcctcgatcttcttcttgtccgctgccgggagcttcgaggcgaacttctcatccttgatggtgttgcgcatgttgtaggcgtagttttccagcgcattcttggactccaccttcttcttgtgttcctcatcctctgacttgtacttctcggcctcctggac

SEQ ID NO: 419255 - DNA, 476 bp, Oryza sativa
accatataacggacgattgctgattactattactggttgcaatgtaacacttcggatacaatagtacattacagagctagctaaatgcgaagccacaataccgtcagcgcaagacgatcataaataaagcttacacaacatagccaacatgcaaaccattcggactgaccagagatgagggttcttgaagctgccgtggtgtgccatgcatcacaaatgccgaacaactagattgtagcagccaacatgaaaggaaaaggcatggataatgcagcaaagatggatgatgaagaccgcagattgtgacgcttcgttcaccaaccatatgaaacccctaaattttgtcaagtttctccgccttcaccaccggattagccttggcaatagcatccctagcagcggtccgatagtcaaactggcagtcatgcttatcggaatagcggtgcgttgcgcaatacaagttgccacattcgcag

SEQ ID NO: 419256 - DNA, 401 bp, Oryza sativa
atatcaaccaagcaaaattattatacacacaaatctattttggcggagaatttcattttacatgcagggtggcaactaggaaagaacacccgccaactaaagatggtagacaggtacaaatggggctgttaatctacaaaatttacaggttgtcggagcacatcaccctgtgtcactcactagggttcatcctgacagaacaaaccaatcatcccgaaccattatcagaaggtcctcctggctcttaggccttggtgaggcaccatctgaagttctgaagaatataggcactatcaacaactcattagcagcagccaaactctacaaacccaaaacttgccttctctcttttgctgtcacattttacatgtattctcctcatcaaccattccattctcatt

SEQ ID NO: 419257 - DNA, 507 bp, Oryza sativa
tttttgggttttttttttggccaaaacctttgatggaaattttatggacatcgttggacacaccacatggcccacagggttgttcaaactacgagctgtttattctgtatttctggcaacactaatgaaaccagagaaaacgcttctggatttctgcatcagctatgcgatgaaaccctttgaaatcagagcacctgcttcattttgtaaacatgcttttgagcttctcgttggcggataccagttcggcagcaacaccaacctcgttagcggagtgtcctgcatctggaaccatcttaaattctgcttcaggccatgctttatgaagatcccaggcagacatcataggacagcaaacatcataccggccctgtacaataaaagctttaatgtgtcgaatcttgtcaacattgtctaacagatgcgagtctgagggtaaaaaatcccttattcacaaaataatggttttcaatccttgcgaatgccaatgagaacttatcatcttcc

SEQ ID NO: 419258 - DNA, 496 bp, Oryza sativa
ctgataattaattaggaatactcgagaaggggcgttatggttcacatcctctttgagtaaatatgacagttctaacaaactaacatagccacagaactccttcactttctttgcgagggtaaaacattatttacaacaaaaagaaaagtacctgccttcacaaaagaagaagacaaatagcatgtgattgacaattaggcgtaaactttcaagcggttctatcaattaaatagcaggtaaatgaagtgggctctcttgacatcaacatctatgaccaaaccttttccagatttttcccgaattgagaatctggtaacctgttgccaatgagctcccgtagctcaaactcgctgggaaatctctgttcggataattttgagaaaaccaattgtccattgcagtaaacttcaaaggcaccagaactttgtagaaatgactgggcgaaattgccaaacagccagattgttgccattgttccaaatctattagcacggag

SEQ ID NO: 419259 - DNA, 478 bp, Oryza sativa
aaccaaaacataggagggttcatttcttcttctcaaagtagtgtagcatctttccttctttcaccattacataagcttaagcaataacagataacaaatcctcctcctcctctaggtaaaatattcaaacacaatacccttataagtacttattattaggaaagtagcgtgcatgggcataaatggcagcggggggcaggttaagaatcacaatgctgagcagcgaggaaacaaaacaccataatgggacagagcaaaagcctccgaaagggagcttttaggcagaaggcttctcccacttgaggggcttcaccacctcccaggtgaagtctgggtcgtcccttccgaagtgaccgtaagccgccgtcttgaggtagcgtccgttgccgcctttcttgaggtcaaggttgatgatgatcatgccaggcctgaagtcgaagttctccttcacaatcttgaggatctccttgtcagggat

SEQ ID NO: 419260 - DNA, 498 bp, Oryza sativa
ggcaaaaagtttctcataacaaacaaatcaactacattcaatcacatacacgaagattgaagagaagggatgtcagttgacaacatataagcttcactgtgccagcttgtaagacaattacaagataactcctattgatttcaggtaacagaaccaaacttggaaattaattaacagtagccaagtagcagctcattattctttactagaaggtgtccaacaaagtagagcaacaaaaaggtgaaacgtcaaaccaacagagaatagaagtgccataagattttaaaccctgtggtcaatgtaatctcagccgatgagcaatttgttctcttccagaaatgagtaggtcgggacttcgaggttgtatggtgcagggcccttacggattctacctgatatatcataatgtgatccatggcatggacagaaccagccaccaaagtcaccagcgttgggaagtggaatgcagcccagatgagtacacaccccaatcacaac

SEQ ID NO: 419261 - DNA, 382 bp, Oryza sativa
gaaccgcgacgcggcgcgcgacgcgaacgagatgttgctgtagccgaggctgagcacgccgtcggacgcctcgaacccctggccggcgtgcgccgtggtgcaccccagcaccaccccctgcagcttcgccttccggtcgccgccgccgccgccgccgcgcccgccggagagcgccaccgtcgccgagtcggtgcccaccacgccgcgcgccgccgagttgtcgttgtaccggtagtcgtaggagcaggcggcggtggagctggagcagttggcgagggagaaggggatggtcgacttgcacgtctccgacgagcacgggatgggcgaccacgtcttggagtcgccgggacggaacacccgtggcggcgccaccgccggagac

SEQ ID NO: 419262 - DNA, 518 bp, Oryza sativa
ggccgcggcggcggggggcccgagcctggcggacaggttccggagcaggttcaggccggcgaggttcgggcggcggcgaggcgggggcgcgggcgcggccgactgccgcgtctgcctcgcgcggttcgagccggagtcggtggtgaaccgcctcccctgcggccacctcttccaccgcgcctgcctcgagaagtggctcgactacgaccacgccacctgcccgctctgccgccaccgcctcctccccgccaccaccgagtccccctcgccgtcgccggcgacggcgaccccccatttcgcccggatttagagagatctccccccttcaatccgccactgggccgtgtgcgcgtaggaaaattgagaggatcatttagctctagtgctagctccatttagtgctcctttttccccccactttcttaatttttttttcacctctttgcagtgtttttttttaccatcttcgagtggccttttcttttcttttctttctttttttacttctttgtgttgct

SEQ ID NO: 419263 - DNA, 364 bp, Oryza sativa
tttttgttttttgcacaaaagaaaatgatgtataaatccagcttgaactgcaactcaaattttatctgtaccaccaccagattaccaatttactgactttaaacaaatatcacacagatggcagcatcgccgtcatacagtcaacatatcacatccatccgacagcactttaacgcaccgaaaccatacaatccagaatgtcgggaagaggcccaggtggcttaacttactaatgtttgtggcacccagcaccatatcatgcacatcttgggaaatagtgttgacccacatagcctccggccattgcccttttaacattagcttcaaacagctttgggttgtcacggaggacagctgctgcttc

SEQ ID NO: 419264 - DNA, 483 bp, Oryza sativa
agtaacaactgacaaggacaggttatttgcaacagaactacattcaactgatcacagccggcctggagttcattcctgcttgaacaacaaaggtacagagatcatactacacacccagaacactgaagcacttgccatgcaggcagtacttctcttttatgaaaagatgatacagatcagttgcaactatgttacaccaccaccatgtacaacgaccggacaccgaaacatcatcctagtgcagagctgtgaggattgcagtggcgctctcaaccttgaaggttgcaccacagatctcttcttcatttgcaggaacagcagtcaccttgttctttgggttctcatagcacttcaagcctccaagagcattggaatagaagcaaccttgtgggaaaggtgcaagtgacttgcccatgatcctttaagcaggtcaatgtcgttagagaaggcacagatccatcagcagttatccccagaacagag

SEQ ID NO: 419265 - DNA, 393 bp, Oryza sativa
aagcaatgtaaatacttgcattccacaacaggcgaagggcaattattaggctcagaacaaggttaaaccgaacagaaaatagagagttttaaacgacacagtgcacacagggggcatatgataataacgggcaatgcaacgagggccatgggcgggcacaaaacttaacgaattagtaaaagcttgatattttaaatgcagacacgcaaaccaccacttgaacggggatcatttttttttggcggcagccttggtcaccttggcaccgggtgggtccttttttttcacgttcttgatgacgccaacagccaccgtttggcttatgtcacgcaccggaaaacgaccaagaggagggttctcagagaagggctcccaaccatgggcttggtggga

SEQ ID NO: 419266 - DNA, 544 bp, Oryza sativa
ctctatttcggggcgcgccttcgtcttccccggccgctcaaccgcctcacggggttcaacgccttctggtactcccaccactgcttcgtcatcgtctacgccctcctcatcgtccacggctactacctcttccttaccaaggattggtacaagaaaacgacgtggatgtacctggcggtgccgatgttcctgtacgcgtgcgagaggctgacgagggcgctccggtcgagcgtgaggccggtgaagatactcaaggttgcggtgtaccccggaaatgtgctgtcgctgcacttctccaagccacagggtttcaagtaccagagtgggcagtacatcttcgtcaactgtgccgccgtctcgccgttccaatggcacccattctccatcacgtcggccccacaggacgactacgtcagcgtccacatcaggacgctcggtgactggacacgggagcttaagaacgtcttctcaagggtctgccggccaccgacggaagggaagagcgggttgcttccggccgagtacgaccgcgacggcgccatga

SEQ ID NO: 419267 - DNA, 445 bp, Oryza sativa
ggggcaaatcaagatgagcaccgtactcatacaccttcactgtcataagttggcatcaaaacttaaccaatcaagtaaaagcacaccaaataagctgtgccactaattgattacacaagcccttgatgtatcaaggagttccaaatacaacacctagcagcagaatactaaaattaaagctacaacaggaagctttttggcttctaatattagctttgctcctcggcctcagcctccgctgccgcggcctccctctcttccgcggctgctgccatcagttcgtcaaatttgtccgtcttgcccagcactatttcaatcttggctttctgcatagggcgactcctcgaatcatctttgacgtcaacagtagatgtcataatcttcttctcgacagcaaggccattatttttcagaatttcagcaacagtcaccacagttgcaatag

SEQ ID NO: 419268 - DNA, 496 bp, Oryza sativa
agcatctctccgctgacagaattcagaaattttagatagctcgactgagaaatcctgaaccagaagacatctctacacaagtcctggcctcaaatgtgattacaaaaactcctatgtcagataatgggtgggaaatgtcaagaggcaaagatcacaacaaggtgtcgactacagtggagattgcctgaggtcctcctcgctcaagtaaagccaatgcaagatcgtgctcattccaactccgaagcccagacgctatcttctttagcgtgtccagtttaatgtcccgcaaccatgacgggacaaacttcaccaccaggaacacaaagcgcgatacatatgccttccaggtgccatggtcacaacccagaagaatgtgcccatccaatacacccgccatgaaatccatatggtttccaacactcgtggccttcttgcaggaaagacaatttcatgacaggagaagttctttccgctccccagagcagactaccacaga

SEQ ID NO: 419269 - DNA, 361 bp, Oryza sativa
ccgtaggctgggtccctttttgggggccgccctttttttttttttttgggccaaaatgtaagcggaaaatgaatcaaatcccctgggtctggttgctcctcttgattcgtgagcaaagagcaacacagcaaagttacatatatatttgcagctccctaaccatctgattaaagaaaagatgctatcgagggcgttcaaatgaatattacaaatacgttgtagtgagcaaacagtagtaacatacgtcgaattttacatagaaggaagtacttcgttatctttaggacgagcagcacgacgtcttctggttgacaggttgcccgcggatctgcaccgtcggtggccttgcatttgcagcggc

SEQ ID NO: 419270 - DNA, 586 bp, Oryza sativa
acccgggatccggcagaatgcattaatctctggctttgtggacacctatctcacccttaaccaagcggaagagacaatttttaaagaagctatcgctgaattttcccccctggaacaggaggacgttatgcagttaacaaccagttggatgcttcagggcattgaacagggcatcgaacgtggacaaaaatctctgctactcaaacaaattagacatcgttttggagagttgaatgcagttaatttgtcgaggattgacattctcacagtgcctcaattggaacagttgggagaagtgctgttggactgctctgatttcgcagaattagaacaatggctagcggcccaatctgaaacacctgagcgaaaaatttagtgaatttccagaggtggatgttgccatgaatgttcccaaagaatcaggtttcaaccatcggcttgcaattccaaaactgagttgataaagttgccgacggggcagtttagtttcttctgccaattgccgactagcctgggagcgagttaaccctttagccattaaacttctcaattcgtcccgtagattttcttcagagaagctgggcct

SEQ ID NO: 419271 - DNA, 570 bp, Oryza sativa
gactctatgaggatcgcctactttagggaaaatacaccgaaaggagaattttgcttagtcattgtcttttctacaccggaggacaggcccagcttctgtgaagaaaatctacgggacgaattgagaagtttaatggctaaagggttaactcgctcccaggctagtcggcaattggcagaagaaactaaactgccccgtcggcaactttatcaactcagtttggaattggaagccgatggttgaaacctgattctttgggaacattcatggcaacatccacctctggaaattcactaaatttttcgctcaggtgttttagattgggccgctagccattgttctaattctgcgaaatcagagcagtccaacagtacttctcccaactgttccaattgaggcactgtgagaatgtcaattctcgacaaattaactgcattcaactctccaaaacgatgtctaatttgtttgagtagcaaagatttttgtccacgttcgatgccctgttaaatggcctgaagcatccaacttgcttgttaactgcataaccaccttccgtttcaggggggaaaa

SEQ ID NO: 419272 - DNA, 376 bp, Oryza sativa
tttgttctgctccggacaccaactatgacccggctggggctatgtatcccccatcgcctcctccaaggcgggggatgaggatcggaggcagcgacacgggaccgggtagaggatgcgccggcagaggcggaggcgaggcccataagttcgggcgcgcgccgaagaagagggacatcaccaagaactacgagatcctgggggtccccaagaccggctcctaggacgacctcaagaaggcggaccggatggccgtcatgaagaaccacccctacaagggcggcgaccccgagaagttcaaggagcttgcaccagcttatgaggaactgagtgacccaggaaaacccgaaacctatgaccaagatggtgaaaatgccct

SEQ ID NO: 419273 - DNA, 400 bp, Oryza sativa
ccggggttccgcgatgtgaccgtttgacaccgttcacgccgattccttacggcttttgccttagggcgggctaaggattggcccacagacttgaatatctaagctttacttcgggaggggccaaaggggggggggcattatgatttcggcctataatgccggcatgatccaattaccaaaattctaccatggattgaggtatgcttgctcacattgtgcctaccctacaaaagacagaggcgctggcaggagtatttagcgccgtaaatggagcccaacggtggttttaacggcaatggcgtcagttcaaccatggcggatagcggcgaagactgagttatcgtggccgtgattccccatccctacagcgaaactaaattgcagttattgcagccggggg

SEQ ID NO: 419274 - DNA, 436 bp, Oryza sativa
cctgcaggttgactatagaggatcgccggtgaacgaccctggccctgccgctggacaaaaatcgggccttatttttacccaaaatatccccctctaaattgacccaatcccacggctgcaataactgcaaattcgctatgatgaaggtatggagaatcaccgacacgttagaccagacttagacgcagtccgacacggactaacagatgccatttaccgaaatactacccttgggcaccaaacagggagctaaatattcctgccattgcttctgtaaactgcccactgagccacagctgagcaaccaggcgttattgatttgttcattgctcaataattgccctaccccgtacacgtggccggaaacaaaatgcccccccacttttccccccacccggagggaagttttaatgttgaccgctgagcgcctttcctt

SEQ ID NO: 419275 - DNA, 509 bp, Oryza sativa
cccggtgatctgatgggagggggtgctgccgattctgaaacactggccatattgacctaagaagccagcactgaagggggtgtggcaaaaatcatacgaccgggggaggcttgcaaagctgaagtgacaatgacctgcaattctgaccctacataggggcgcccttgttgcaccaccaccatggtgccatcttgtaggtaacctactccctgggaagcttccttgccttgtttgatgatttttagctccagagaatcccctggtagggaaatgggccgcactgcctgggccaaatcgatcacgttgagaatttggactttttgcaagttggcaactttgctgaggttgtaatcattggtgagcaaaatgccattgatttcttgggctaaatggactaattgggcatccaccgtggcaatgtcaccataggcagcggaatgaataacgatgctttggggaaaatccgcctggatactgccgagaatatataatgccctacggcctcgcac

SEQ ID NO: 419276 - DNA, 510 bp, Oryza sativa
tgcggtcactctgaggataatagtgaaactttggctaaattttccttcatggcctggatgtggggtttaagtttgggttgttctgccacaatcacattatccagattattgattcgccaaccccgttcaaggattaattgatgcacctgagccaaaagtttgaggctatcggccccctgccaccgggcatcgctgggagggaagtagtggccaatgtcccccaaactcaatgcccctaggagagcatccattaaagcgtgggtcagcacgtcggcatcgctgtggccatccagtcctaaatggtgggcaatggtaactccccccaaaatcaaggggcgatcgcctacgaggcggtggatatcgtagccgttgccgatgcgtagagcagtcatagaaatttagtgagttcaaataatctaaataaattgggcaagtagagaataattagcttactaagggttacttgaataacccccaaaaaaaccggttgatccccgggtaccgagctcg

SEQ ID NO: 419277 - DNA, 599 bp, Oryza sativa
acccgggatcgagcaattttcaacagcacggcgtagtcaccgacccagaggcgatcgacaccctagtccgttactccatggcttgccccgccctgcccacctgtggcctagcagtcaccgagtcggaaagaattatgcccagtgttaacgcccgtctgcgggatttgttgaacagtctggatttacccaatgaaagtatcgtcacccgcatgaccggttgccccaacggttgtgcccggccctacatggcggaaattggttttgttggtagtgcccccaacagttaccaagtgtggctggggggaagtccgaaccaggaacgtttagcggcagcctatacggaaaaaatgcccctggaacagctagaaagcctttttgaacctttatttgtgtacttcaagcagagccgtaaaggtaaggaaagttttggagacttttgccatcgagtgggcttcactgccctacgggaatttagccatggttacacagcaccggccaagggcggtaaaaaccgcaaaaaccaacggcgggtcagcctgtccgatgaaatgtatgcccagcttaagggcccgtctgagcgggattattccccatgaatc

SEQ ID NO: 419278 - DNA, 520 bp, Oryza sativa
atagcgaaggactattgctgctcaccagcaacggtaaactttatcatcgtttggcccaccgggagtttgcccaccaacgtacttattttgcccaagtagaaggctctccaacggacgaagacctagaacccctgcggcggggcataactttcgcggattaccctaccagaccggcgatcgccaaaattatcactgaaccagattttccccccagaaatcctcccattcgttatcgagcctccattcccaccagttggttaagcattaccctaacggaggggcgcaatcgtcaggtacgtcgaatgacagcggcagtgggcttccctaccctacgattggtgcgggtgcaaatacaggttactggtcgctctccccaacagggcaaaggtaagtcagcagcaacttggtgcttaaccctagaaggtttgagtccggggcaatggcgacccctgaccccttgggaagaaaatttttgccagcaactcttaacgggaaatcccaatggtccctggcagaaaaa

SEQ ID NO: 419279 - DNA, 548 bp, Oryza sativa
cctgtaggtctgactgtagaggatcgccaaattttttctgccagggaccattgggatttcccgctaagagttgctgtcaaaaattttcttcccaaggggtcaggggtcgccattgccccggactcaaaccttctagggttaagcaccaagttgctgctgacttacctttgccctgttggggagagcgaccagtaacctgtatttgcacccgcaccaatcgtagggtagggaagcccactgccgctgtcattcgacgtacctgacgattgcgcccctccgttagggtaatgcttaaccaactggtgggaatggaggctcgataacgaatgggaggatttctggggggaaaatctggttcagtgataattttggcgatcgccggtctggtagggtaatccgcgaaagttatgccccgccgcaggggttctaggtcttcgtccgttggagagccttctacttgggcaaaataagtacgttggtgggcaaactccccgtgggccaaacgatgcttgaagttacccgtggttgtgagcagcaatagtcctttg

SEQ ID NO: 419280 - DNA, 515 bp, Oryza sativa
acccggggatcagcgttatgaccgctttacacctatcaggttgattcggaatgggttttagcccgatagagagataaatattagcccccagacttgttttactaagtattatttaaatatctaccaaagggatgatggcagaagaattttggtatataatgccgccatgatccaattaccaaaatcctcccatggttagagctatacgtcctcccattgtgcctaccctaaaaaagacttggtggcaaaaaggggtttttagtgcggaaaatggattcggtcgttggtttcaacgggttttcggtcgttacttccagggaaaagagttagtttcggagagttctttgtttctccatcagcgggccatggaggaggcggtgattttgggtcggaatgcggaagccctcgacaacgaaaaatttggcaagaaagaattcttagtattagttcgactccgttacattctggccaaaaatatcggtgaatatgagggacttaattatagtgtagaacta

SEQ ID NO: 419281 - DNA, 494 bp, Oryza sativa
cctgccggttgactctagaggatcgccggtgaacgatacagttcctgttgcttgcttgcccggaaacgatgttttgcttggtctatggtaatgaagctgtccttggcgtcgatcgccgcctgaagtggttctacactattattaaggcccttatattcaccgatatttttggccaggatgtaacggagtccaactaatactaagaattgtttcttgccaaatttttcgttgtcgagggcttccgcattccgacccaaaatccccgcctccttcatggcccgctgatggagaaacaaagaactctccgaaactaactcttttccctggaagtaacgaccgaaaacccgttgaaaccaacgaccgaatccattttccgcactaaaaacccctttttgccaccaagtcttttttagggtaggcacaatgggaggacgtatagctctaaccatgggaggattttggtaattggatcatggcggcattatataccaaaa

SEQ ID NO: 419282 - DNA, 537 bp, Oryza sativa
cccttgattgaggttaagcacgaaggttctgaaatgttcctggaaattatgatcgatatccgccgcaacgtgggttattctctcttccagggccagccccagcaacaaccccaggccggttaaccctagtcctagtcagtcaagttttgtgcggaaggggagatttggatttaggcaaatgccacctccccagtttgattgggggcttacatggtcttaactgccgttagacttttgcctgaaactccctgagcattgactccagcgattccctcggatttaagcaccaatcttctacccgcaaataacccacatttccccctgggcaaaccgctctgaggggcagatttttttcatccaaatagcgatgaattttttccacactggcttgctgaccgggccagtggaatgttttagcctgcttaatggcccttagattaccttccccatcgggcagttaatgacggccggtgaaaagaataccgacgttctgtccccagtaatagcaactagcaccttgagaataaccaggagtcc

SEQ ID NO: 419283 - DNA, 584 bp, Oryza sativa
ccgggatcgccatgaagagttcctgctccttaatttccccggtttctttgtaatcagacgggtcggcacatacatctggaccgaataactagcatcccgtcgcttggattcatcaacatcatacttgggttgtttgagcttgtaatctttgcccaaaaagtggagttccagcttgcctgtgtagtcagaaatcggcgaaaaactattcaattcctcgattaaaccttcctccaaaaaccagtggaaactagcgtgttggatttcaattaaatcgggcaacatcgtggtggcaaggtttgtcatggtggctcagaagtctccggaaatttgcggtggttggggttagggaaggccggggagaggttaccaggggggcgatacccccagattaggcaggcaccggtagtttaaaaaggttgcgggcattagtagtggtttgttgggcaagggtttctagggggacatggcgcagggcagcgatcgcctcggccacatggcggacaaaggctggttcattgcgtttaccccgttggggcactggcgccaaaagggacaatcgtttccaccacaggcgatcgggggga

SEQ ID NO: 419284 - DNA, 405 bp, Oryza sativa
cagtgcccagatggtcccccccgatcgcctgttggtggaaaccgtttgttcctttttggcgccagtgccccaacggggtaaacgcaatgaaccagcctttgtccgccatgtggccgaggcgatcgctgccctgcgccatgtccccctagaaacccttgcccaacaaaccactactaatgcccgcaacctttttaaactaccggtgcctgcctaatctgggggtatcgcccccctggtaacctctccccggccttccctaaccccaaccaccgcaaatttccggagacttctgagccaccatgacaaaccttgccaccacgatgttgcccgatttaattgaaatccaacacgctagtttccactggtttttggaggaaggtttaattgaagaattgaatagttttt

SEQ ID NO: 419285 - DNA, 358 bp, Oryza sativa
cgaatgctcaccagcccaggccgggaggctctttaatggacacactagttcgctgttaagaagcctgaatccactgtgtgacttcatactctgaccagatgcctatttgccagaacggatctactcgcaccacctttcccaccgggtaccggtctggcacgtcacaaatggcaaaaacctgccgtaaatctcagcacggtgcaaagggaaccaacacaccactttcctgtaggacctcaaacccacataggtgggcttgacagacgggggctgtttgttctcacacgctggcacaataggtagcccacctcacataccaagacgctgttgacacactcctttctcaggaacagataca

SEQ ID NO: 419286 - DNA, 430 bp, Oryza sativa
cggctgcgggaacctgatcggcttacccacggtagaaatcgctgctgattattttattactgctacaggtatggacgctgttgttgtcactgacgaccatacagtggttgccggcgacgccactggcatgatttaccagaggaaattgggcgggtccaaatacggaaggcgactgccgtctcaatgtgcaatgtcggctagtgctcgaccaaaagtatgttggaaaactcccaagccatgattaaggactatcgctggccagcaagggaaacctccctccgttatgattaagaattgttaggtgactcttatgtgtctgcacctgtgaaaggagtgcgttaccagtgtctaaagatgggcttaggggaacctatggtgacagcgtggaagaaaatagagcccccgggcgttaagcacacctagatggact

SEQ ID NO: 419287 - DNA, 526 bp, Oryza sativa
ccggggatcatcgtcggggaacgccacgtagccccccaggggaatagcccggatggaatattccgtttcggcaccttggtatttcaacagcggtggcccaaatcctaaggcaaagcgagtgacatggatgccctgtaaacgggcggccgcaaagtggcccaactcatgcacagcaattagtactgcaagtactccgatcgccggcaacgccgctaaaactgacataaatttctcaaataggaaaaaactggggacgaaatcccgccgaacgtgtaattcccccgattttaacccaacggccgacagaccgagttccctggcccatgcaaacccctaagtttctgttaacctgaagaaggtgagggtatctgacaaaaatttcagattacacagttatcaatatcaactctatccgttagtcaatggcggctctcagaattatatgggcgatgagcaccaagatattggcaaggtaatagcaaaactggaaacttcaaaggaagtcgttgctaacctaaaactccag

SEQ ID NO: 419288 - DNA, 504 bp, Oryza sativa
tgctgccgtcgactctagaggataaaaccggggcgtggttggcaaggtaattaaacatttcttccccttcttgaatgttagcctctagaaatttgccgacatcctcaccactgttaatatgtgatgcctctgagagaaaagcagaacgaagaaaggtctggagttttaggttagcaacgacttcctttgaagtttccagttttgctattaccttgccaatatcttggtgctcatcgcccatataattctgagagccgccattgactaacggatagagttgatattgataactgtgtaatctggaatttttgtcagataccctcaccttcttcaggttaacagaaacttaggggtttgcatgggccagggaacacggtctggcggccgttgggttaaaatcgggggaattacacgttcggcgggattttcgccccagtttttttctatttgagaaatttatgtcagttttagcggcgttggcggcgatcggagtacttgcaggac

SEQ ID NO: 419289 - DNA, 491 bp, Oryza sativa
ccggggttctaggctacatcattctccgtgcccagaagcctagctagctctaagttacctaatcactttccatctttacttgaaggccactatgaaaaccccaatcctttcgtttcaagcaacttttacccgcctacaggagcacatggaataccctcaagcaggagtgttgagcaaaactttattgcaggacaagacctgccaatacaccctcttttgtttggcggcgaacaccgaaatttcagagcatacttccacccgcaatgccgtggtgcaaggaatagaaggcactggcattttgaccctagaaggtaaggatatttccctagacccaggggtgtttattgttatgccggcccatgctccccacgccctaaaagctatctgtaatctgtcctttttgcttactttgtcacaacctaattaggcattcagtcccaggatttttggagttgttttactgggtcaatacatccccgttgggcttggga

SEQ ID NO: 419290 - DNA, 569 bp, Oryza sativa
cccggggatcgcctgcccagggacaatccccgcctattggccaaagcggccaggaatctcaaagaaattaaccaagcccgcgatcgcctcaaggaattattggagctggagttaagcgctaaaacttcccagattcctaaaaaggaccagaccagcaaagctcccaaagctaaacccaaatccaagcccaaggccacatctgctgcaccttacccgccccccggcgatcgtccacctcaatcccatcaccatcatcaccagaccaaccacaaccacagttccagttcccagcaccatcaccaagaaaaccacaatcgaccctactatcgggacttaaccggggcagatttgcgttgggctaatttaaaagagaaggatttgtcaggacggaaaatggtgtctgccaatctaagtaatgcagatttgagcgacagttttttacaccaagttaatttggaaaatgccaatctttttcgggctaatcttttccgggccaatttgttggaagctaatctgcggggagctaatttgcaggaagctaatctggtaggagcagatttaagtggggc

SEQ ID NO: 419291 - DNA, 508 bp, Oryza sativa
atgcctgcaggtcgactctgaggatccgccccacttaaatctgctcctaccagattagcttcctgcaaattagctctcccgcagattagcttccaacaaattggcccggaaaagattagcccgaaaaagattggcattttccaaattaacttggtgtaaaaaactgtcgctcaaatctgcattacttagattggcagacaccattttccgtcctgacaaatccttctcttttaaattagcccaacgcaaatctgccccggttaagtcccgatagtagggtcgattgtggttttcttggtgatggtgctgggaactggaactgtggttgtggttggtctggtgatgatggtgatgggattgaggtggacgatcgccggggggcgggtaaggtggagaagatgtggccttgggcttggatttgggtttagctttgggagctttgctggtctggttctttttggaatatgggaagttttagcgcttaacttccgctccaataatttcttga

SEQ ID NO: 419292 - DNA, 452 bp, Oryza sativa
acccggggatcattgataaggcttgctccttctcctgttcagaagccgccagatagtgggacaacacattcaaattcttgtgaccactaattttttgaataacccggagattcattcccttccgacacattatggttaacgtagtccggcgaaaagaatgggttgatgccccccaacaccaatcctgtcagtggtggccttcaaaattttgtgggccatggaagaatacagatgaaagcccactcgtttgcccagaaatgtataggacaatggaaacctatcggattgttgagcttaccggtaatcatcaaataaaacttgcaacatcggggggcggaggttgtggccatcgagattgaacataaattcctggttaaagatgaccgctggcggagtttagtccaaggttatttgtaccgtcaaggttacattgccaccccagatttaactac

SEQ ID NO: 419293 - DNA, 562 bp, Oryza sativa
  unsure (1)..(562): unsure at all n locations
gggaagtagacttattttttcaccagtgtaggttaattccacttccgttaaaattagaccctggttatcccccaaaaactcgtctacttctcaggttttaccatggtaatcgaggcaataacgatattttcaatcaggggcggtgaacagagttctgtcaaaatttaattggcttccactgcaagaatttcatactcaaatccaagcgggcaatgctggcatttttacccttaatggtgagataggcccgatcgccaatggtacggactcgcagcgtagttaaatctggggtggcaatgtaaccttgacggtacaaataaccctggactaaactccgccagcggtcatctttaaccaggaatttatgttcaatctcgatggccacaacctccgccccccgatgttgcaagttttatttgatgattaccggtaagctcaacaatccgataggtttccattgtcctatacatttctgggcaaacgagtgggctttcatctgtattcttccatggcccacaaaaattttgaggccaccactgacaggattggtgttggngggcat

SEQ ID NO: 419294 - DNA, 495 bp, Oryza sativa
tcccaaaagtgtgctccgtgttgtcccccaccctgtgctcaggtttgtccagctcgggcgatcaccattgatgctgatgaagatgccccgacaggagcgcgggcggaacaatggtacggatgcggccgctgtttacccatctgaccccagggaatcattactacttattctcatcaagcaacggcgactagtctggtcccttggttggagttgggacaaatcgctgccctggaaatccatacccaggtgggacatgaagaacggttatcagcacactactcggcgtagtctggctccggtattgactcaactgcaagcgatcggcattagttgcccctaccatgctccggcggtggagtatctcacaaaccatctctggctggctggggccattagcaatgccgacaatttggcgaaccgatggcaggcccatgagtggggacattggccggggtactacccatctttgtttccactacactgatcctgtagagt

SEQ ID NO: 419295 - DNA, 522 bp, Oryza sativa
tgcctgcagtctactctagaggatcaccgctgtggagacaaagatgggttgtaccccggccaatgtccctacttttgggcctgccatcggtttgtcaaattgtcggcattgctcatggccccagccagccagagatggtttgcagatactccaccgcctctgcatggttggggcaactaatggcgatcgcctgtagttgagtcaataccggagccagactacgccagagttgctgaaaccgttcttcatgtcccacctgggtatggatttccagggcagcgatttgccccaactccaaccaagggaccagactagtcaccgttgtttgatgagaataagtagtcataattccttgttgacagatgggtaaacagaggccacaaccgtaacatttttccacccacactcctgtggggacaacttcatcaacatcactggtgatcgcccaagctggacaaacctgagcacagggtctgggacaatccggaggacacttttggggatccgctggtaccgaactcg

SEQ ID NO: 419296 - DNA, 280 bp, Oryza sativa
tgcggtcactctgaggatctccataattgccgttgattgttgtaggtaaagcccccggctttttgttatgcttgcgctttttctgggtcatagttatagactttgacatcgggattaaaaaagggagattgcacaggaataaaggaattttgtttttcccccaaccctcggtaaatgttattaaccattctttcccggtcaatgccataggcgatcgcctgacgaaaattgagattattaaaccaccgggatttaatcggatccccgggtaccgagctcg

SEQ ID NO: 419297 - DNA, 448 bp, Oryza sativa
cctgcaggtcgactctagaggatcgcgtcaggggtaaagtcgccactctccgctgctttcacccacacgcttcattataaattagaggcagggagccggacaaaatccaaaagaaaatttctgcccggtactccaccatttgggcaaagtaaacgctcaacagcacccgcagtttgtggggaaaatgacccataaagttttagtcaaattacaactcacccgctatccccagccaaggtttggggggagtattcactttaacctgcttcttcttcgacgggaaagggtaacaccggcaggcgatcgcctcggaacacttcttcggaaagtttacctagggcttcactgcgttgaccaaggcaacgggctaaacccagggcggaaagcacgggcagggtagtggcgcttaaaactaatttggttaagggatccccgggtaccgagctcg

SEQ ID NO: 419298 - DNA, 582 bp, Oryza sativa
ccggggatcattgataaagcttgctccttctcctgttcagaagccgccagatagtgttacaacacattcaaattcttgtgaccactaattttttgaataacccggagattcattcccttccgacacattatggttaacgtagtccggcgaaaagaatgggttgatgccccccaacaccaatcctgtcagtggtggccttcaaaattttgtgggccatggaagaatacagatgaaagcccactcgtttgcccagaaatgtataggacaatggaaacctatcggattgttgagcttaccggtaatcatcaaataaaacttgcaacatcggggggcggaggttgtggccatcgagattgaacataaattcctggttaaagatgaccgctggcggagtttagtccagggttatttgtaccgtcaaggttacattgccaccccagatttaactacgctgggagtgcgtaccattggcgatcgggcctatctcaccattaagggtaaaaatgccagcattgcccgcttggatttgagtatgaaattcttgcagtggaagccaattaaattttgacagaactctgttca

SEQ ID NO: 419299 - DNA, 596 bp, Oryza sativa
ccggggatcgccgaattgggggaaaacatccaagttcgtcgctttatccgctttaactcttggtgaaggcatcgaaaaagcagaaaccaactttgcggaagaagtggccgccgccgctaagggctagtaactcaggcttgattaccgcactacttattagctaaatctaagaaccttttgaacccagatttccaccgccacaggccagggaagatttgggtttttgcttttgggataaaccccagaaaatcttggcagcccatctttgctttgcccagagagtgtgtcaaaatcgtgggtaacttagtctgtcctaggcttccataacttataattatcgccatcattgctatgttgccattgccattaattgctaacggaaaaggatttatccgcgctctagaaaacgacggggctttggcagtgtatgcccccctagaaggtggttatgaaggtcgttaccaaagacgcctacaggccaacggctacgccagtatatccctttcggcaaggggtttgggggacgtggaagcctatttgatgcaagtccatggagtacgtcccgcccatttaggtaagaaaaacattgcccaaga

SEQ ID NO: 419300 - DNA, 511 bp, Oryza sativa
ccggggatcccgatccgctgtaaagataattacaatcaaattttttgactctggctttgtccctggactcaagaaaatttttgcgaggcattgcactttggcgttggtgattacttggggctagaacggtcagaatgctgagggtggcggctccgagcaatcgttaagatatattacaattgtgagtaagtgggggtagtccctcccgttgctgatctcaccctaccagtgccccaacgccatgatcgatcgccttttgtacgttcgtcttccctgtaacccgattttccccattggggtgatttatctggcggaccatgtccataaatgttttccggcgaccgcccagcggattttcgatttaggcaccattcctcccctggatttcaaccgggcccttgatgaatgtattgatgaatttcagccgacaattttggttttttcctggcgggacattcaaatctatgctccggtggggggtaagggtggaatcccctgcagaacgcgtttg

SEQ ID NO: 419301 - DNA, 512 bp, Oryza sativa
tcgactctattaggatcactgcactaacgctttgccctccgcaatccccggtttattcgtcttaaattactccataattcgccgtaataggcactggtaactttcaaaccacctaaggctcccctcagcttcaccaagggattttttccgtagtaaaactcaaacgcgttctgcaggggattaccacccctaccccccaccggagcatagatttgaatgtcccgccaggaaaaaaccaaaattgtcggctgaaattcatcaatacattcatcaagggcccggttgaaatccaggggaggaatggtgcctaaatcgaaaatccgctgggcggtcgccggaaaacatttatggacatggtccgccagataaatcaccccaatggggaaaatcgggttacagggaagacgaacgtacaaaaggcgatcgatcatggcgttggggcactggtagggtgagaacagaacgggagggactaccccacttacttacaattgtaatatatcttaacgatt

SEQ ID NO: 419302 - DNA, 440 bp, Oryza sativa
tttttggttggtgagcaaagaatggacagtatcataaaacatctgggagcacatatcacggttttgtaagctaaaaacaatacaaggctacacaatgatgttcatgtaggataatctctactgcctgtcattccaactcaaacaaattgacaacaactgacaactcatgaaaattgggagtagcaaaaattgagttcggatgggcctttgtaataatttgatatacgtgtgacgtcttcgtcacagctcagttaactgctgcctcccttctgtttgagggtgatcttgtcgcctaagctgagggcgattccttgggtcttactccgtattctgatatagccgctcagcttgccatcggcttgcttttcaacgctgatgttcaccaatgcatcctgaccaaaaacactcttggcatagagattagcagcgataaacccaca

SEQ ID NO: 419303 - DNA, 454 bp, Oryza sativa
cataggcatagagaggtttctcccccccagatccgatccccgcacagagcccagatccaccgaccactcccccagatccaccccccaccggcggccgtgcagcggcggcgtcggcggccatggagaagccatgcaccctcctggtccacttcgacaagggctccccctccatggccaacgagatcaaggccgacctcgagggcagcgacgtcgccgccaaggtcgacgccatgaagcgcgccatcatgctgctcctcaacggcgagaccctcccccacctcttcatcactgtcgtccgctacgtcctcccctccgaggaccacaccatccagaagctcctcctcctctacctcgagatcgtcgacaagcgcgacgtcgccttcggcaaggtactcccggagatgatcctcatctgccagaaccttcggaacaaccttcagcaccccaacgagta

SEQ ID NO: 419304 - DNA, 292 bp, Oryza sativa
gatgcctgcggtcactctgaggatcgccaaggtggtggggcagcccgtcactctccatggtgccgggagaacattcgcaggggtccatgcagcggcccaggtggcccattttgacgacccagtgggacagattcctccccaccgctggagtaaaattcttaatggtcatttgccccaagacataatagttagggggtcagcggcggtggatagccattggcacgcccgcttttctgctctgtggcgacggtatcgttacagcatctatacagatccccgggtaccgagctcg

SEQ ID NO: 419305 - DNA, 463 bp, Oryza sativa
agtgtatgtatacatgttattcattcatcgtacaactccatccgctcgcatacgtatacgtaagtaatatttgtatataccaggactatccctgttcggggcttcacgggctcaacgccgcggcggggaagacagcgagggggatcctcacggtgtgcttcttgtcgcccctgaggaccacctcgccgaagctgaaggtgttccccggcgcggtggtgttgagcacgatcctcagcgtggccgtcgcgccgggggcgacggcgaacgtgtccggcgacacgcgcaccgacacgccgtcgggcgcctgcacgtgcgccatgtacgtctcgttctccgcgcccacgctcgtcacccgccggtccacccgccgcgaccccaccaggctcgccaccgtcacgctcggcgcgttcaggtccgagcaccaccgcgcccgcgacggcgggcagggcacgcccaccgcgcg

SEQ ID NO: 419306 - DNA, 458 bp, Oryza sativa
gttctccgctgcggcagccggcaatcgcacggcggaagcaaaacgaggaaaaaatggggagctcgcggcgaggggaggagaagggactccctgttcctcctcctcctcctcccaaccctggtggtgtcacttcaagacggcaaaaggaagcagccatggagatcgaggccgtcggggccgatggtttttatggtggtgatggaggatgacccaatcatttcccccaagtcaagccaaaagaaagtaatgagaggtgaggaagctcagaagtacaaggcaatgaccacaacgaagcatgatatcttcctggattcatttctcccagctggatcttacaagaagctatacagttacacccaccttctcaatggctttgctatctatgcaaaatctgaaaaggcaattaaaactcttagtggagcaaaaggagttagactcatcccagaagatataaaaat

SEQ ID NO: 419307 - DNA, 440 bp, Oryza sativa
atgagaagttggtaaaaaccttttaactgcccaaaaaacggcaacaggttttttggctaccaattaacagagcacgaggctaccaattctaactaccgttaggcttatatacagctaccctataatcaacggactactatggtacattacataagcacaaggctagaatgtaggactacacggtaagtttcgccaacagataatacacagaaagacaagaagagaacacagagtctcccgcttttaatggccaccatcggggagaccaactccatcgtctcccccttttcctccacaagaccttgcaacagactcgaacagcttctcgatctcaggtgcacagcgagtaaatgatcgagcccaaaaactgtagcgtggattctttataagctcaatgaaagtaattagtagcccccacgggtgagggggttaactattag

SEQ ID NO: 419308 - DNA, 569 bp, Oryza sativa
  unsure (1)..(569): unsure at all n locations
acccgggatctgttaattctggctttttctcccatggtgacacagcattatttttccccttaatggattccttgttgggtcaagacccataccttgtatttgccgatttccaagcctatgtggattgtcaaaaccaagtgggagaagcctataaagatcaggaaaactgggctcgcatggccatcttaaatgtggctcgcatgggtaagttttcctcggatcgcactattcgggaatacgccgaagacatctgggctatcaaacccgtggtaattgaattagaagacctctgtcccgatggtcaatgtttgttaatttctcctaataaatagttaccttaacctgcctctattgcactgtaaaaacccagtcctgagcatcagttacattttgttaagacactgttactggcccttcaatcttcgtttaccgtccagataaagacaactttcgtcaccttttatcactggattgtgattattccagtatcaccatggtncaactcgtaataagatggttgagaccgcgtttttactagtaggattgagtgtttactgatacttttttag

SEQ ID NO: 419309 - DNA, 558 bp, Oryza sativa
  unsure (1)..(558): unsure at all n locations
ccggggttcacctttataacctgtttgagaagttgaactttcggcacataatctttcccaatctcccttaaacgggaaaggtggggactgttgatagtcgttttgagacttttaaaacaggcctttaagctgcttcgggttggataaatctggtttgtgagtgaatgaagtaaaagcgccctgagaattttgccaagtttaggtaaaatttttggggcatttttcctggctgaaaattttttggcggtgtgttcgccgcaatcatggcagataatagggtttgaaggctgattaatcccgctgtttctatgtctgataatttgaccgaactctcccaacaactccatgatgcttcagaaaaaaaacagttgacggcgatctagactgacaacttaagattcaggatggggttctttaactacatttgccataaaatgtagctatcatctgttgatagcccattcataatgcgaagacgcagacctaccaggcgaagggtttcttcgcgaattgtcacancaagcattgctgaccaaattgctaatagtcagcacaggt

SEQ ID NO: 419310 - DNA, 325 bp, Oryza sativa
acccgggataaaaatgttcactggctgagcggtactttcattgttgtagtccgctctccacagtaggcgcagatttttttctcccgttaggggggtgtccagttgtagtctgccgccccactcggtggagtcaatttcagactgaaaaatactattgcccaagctaacggaggctcggccgtcgaaagggaaaaacctagtcagataatcacgatagtagatttgtcccttaaggttgccattgaggacgttactgtggctgtaatcaaggctgactacggtgttattgctggtttggggggtatcaaggtccagcccgtcaatc

SEQ ID NO: 419311 - DNA, 250 bp, Oryza sativa
ccggggatctcgctgggaatcccgctacccctgctactcgcaacatcactgttgatacggttgcaccagcggttaatgagcttgacatcactgacaacaccgataccggcgcagatgacttgattactagcaatggcaatcctgtcctcaccttcacgggtgaacctggactcaccatcacccttaccggtccggatggtgcactggctccatctgctgcctacaccgtcgcagagacacccagtgcgaa

SEQ ID NO: 419312 - DNA, 266 bp, Oryza sativa
ttcgcactgggtgtctctgcgacggtgtaggcagcagatggagcctgtgctttcatccggaccggtaagggtgatggtgagtccaggttcacccgtgaaggtgaggacaggattgccattgctagtaatcaagtcatctgcgccggtataggagttgtcagtgatctcaagctcattaaccgctggtgcaaccggatcaacagtgatgttgcgagtagcacgggtagcggcattctcagcgagatccccgggttccgagctcaaca

SEQ ID NO: 419313 - DNA, 297 bp, Oryza sativa
aggataaacaattggaaaacattcctgtctgataatcttaatttttacgaaacatattatccaagagaacataaccccctggttttaccaataattttgccccatcggcgatagtggctacagacatatatctgggtactaggactaaaaagcaacaaatcatattggggcatagaaccaatccgttgccaatcttctataaaaccttggaaagtattactattaaagcgagcatctgtccctaagcctattgtaaaaaacttgactcctgaaaaggatccccaggaacagagctcg

SEQ ID NO: 419314 - DNA, 608 bp, Oryza sativa
cccggggatctttttcccggcttagcggacatgctcggagaagctcccctccagtgttagtggcgagttagatgacttggatgccttgttgagtgacaccagctcccccggtgccgatgctgtgatctcaacttccctagacgattttgacttcggcccggacgaccatgacccctagactttttcccctaaatttccggtaacaaattgaccttaaagcggataaacccaactaactttactgggcttatccgtttttttgttgtcggaaagaatgagttaatcgactaattcactattgaattcgttataggtacgctgtttcagttccatggactcggaacggggcaataaatcaaataaatcccggagaacatcatccactacttgaaacttaagtgctccctgggcgtcgaagatttttttgccgcttttgtctagaattaccggctggggtaccccaccgctgtagtaatagccaggctcatcgcgacggaaacgcttttggtcgggaatgctgtcaacggaaaccggaataatgctagcaacccgaccgtaaattcctgcatacgggaaacgatgaaagcatactggttgcaatctttact

SEQ ID NO: 419315 - DNA, 183 bp, Oryza sativa
tcgccacttatgccacttttggcgcgtgtttctcaaacagtttggtgtcagccctaaacagtggatgctgcgtaattgatactctctcccgggtaaagccagaggatttccatctacccaaacaaagaaaattaggggagtttctcccgttagccggggattgttttgcctcaaagtccgctt

SEQ ID NO: 419316 - DNA, 243 bp, Oryza sativa
ggccaaatatccgggcttaacgggagaaactttgctttttatgactgtttggggagatggaaatcctgtggctttaaccggtagagactatcacttactgagcatccactgtttagggctgacaccaaactgtttgcgaaacgccgcggagaagcggcctaagtggctataacccaccttgttatggactctcgggacagggctatcgccctgtgatagcagatcccaagggatccgcgctcg

SEQ ID NO: 419317 - DNA, 524 bp, Oryza sativa
ccggggatcagacagtgctaaccatggccaacgattaccaagggaaagcccaagattttgccctcgtggtgccggttccggtggtgctacaggaagaccaagtaaacgtaggggagagaaaaattattgagcgtttagacaattttagtgccccccgtttagtggaatattttgacaataatccctgtgaaacctacggcggccgtcaatttatggatgcaatgccagcggcccccagcatgaccagaggattgcaagaaaaaataagcaatgaagcgttgggagtcaccattgaaaatcagttttcggtaggagaatacgacattctcatcctcagtgccaaggaatccaatggcctagaaacttggttaaaccaaaataattaccgcattccccctggagcgaccgatgtattgggagcatatattaaacaagggctaaagttttttgttgctaaagtcaacctgaaagaattcgatcgccaaggatttcaagccttacggccgctgatgatggcctatgaa

SEQ ID NO: 419318 - DNA, 586 bp, Oryza sativa
acccggggatcgcccggtcaatgcacagccgtaaactctgaatgaaatcctctaacctcgtatttaaccccgtggccggattaatgtgcccatgggaaaaaccactgcccaggtgaatatcagaaagatgcaggacttttaacatggcaatgactctccaacaaaaaaagggaagacctctagtcctcccttcatcctatggtaatggcccgctgggggacctaattattcaacgccgggggcaatcagttccctcgtttcaccggggatgaccaccacttggttgtcttcaccaatgtccaccagcgcttggctaccttccttgaggcggccggaaagaatttcttcggctaacacgtcttccaacaggcgcataatggcccgacggaggggacgggcaccgtaggctgggttgaacccttcttccacaatgcgctccttgaacttgtcggtgacctggagagaaatttctttttccaccaaccgggcaaacacatcccgtaggagaatttccgaaatttcctggacttccctcttgtcaattggcggagacgatatttcatccaacgattcaagactcagggcg

SEQ ID NO: 419319 - DNA, 586 bp, Oryza sativa
  unsure (1)..(586): unsure at all n locations
atgcctgcaggtcgactctgaggatatgacctccacattggttccaaggtaattgaaaaaggtggcggtggtttgggctttgactttgccgatgaccaagcggagtctcagtacaatcgcattcgttccttggtgaatgaagagttgaaaaactacttccgccctgagttcttgaatcgtttggatgaaattatcgtcttccgccaattgaacaaggaggaagtcaaggaaatttcggaaattctcctacgggatgtgtttgcccggttggtggaaaaagaaatttctctccaggtcaccgacaagttcaaggagcgcattgtggaagaagggttcaacccagcctacggtgcccgtcccctccgtcgggccattatgcgcctgttggaagacgtgttagccgaagaaattctttccggccgnctcaaggaaggtagccaagcgctggtggacattggtgaagacaaccaagtggtggtcatccccggtgaaacgagggaactgattgcccccggcgttgaataattaggtcccccaagcggccattaccataggatgaagggaggactagaggtcttcccttttt

SEQ ID NO: 419320 - DNA, 495 bp, Oryza sativa
ccggggatccttagcctggtttaaacggcgttttctggtaataaaaatacggggataggtttctgaccaggtgatacacacataaggatattttttatcatctttaagcagaacattaaaatggggttggtgttgtttgattaaattagcttctaaggctaaagcttccgcttccgtatcggtgacaataaactcaatttccgctacctgttgcaccatcaaagcaatgcgggcagtgtggggttgggaatcccgaaaataggatctaaccctagttctcaatttttttgccttgccgatgtagagaatttctccttggcgatcgcccatgaagtaaacccccggctcttggggaatttcctggagacgccgttctaataattctggttgttcaagaagagacgtagaggaaacagtagcaaccattgattaagcaaaagagcgaatgtttttctatggtagaagggaaaactagggcttggcaatttgcgtctg

SEQ ID NO: 419321 - DNA, 459 bp, Oryza sativa
ctgcaggttgactctagaggatcgccgtaaagcaaattggttcgccagcaggacgactaatgggcacttttgtttgtgagggagccggcggcaaaaccaccttggggggacaatgtggggccagtgccaatgcgggtaatggtacgctcaatccgttgggactctgcttgaaaaacaaactgattttcccccatcttgagagggattacaggggcaaaattgccttgggcactgcgttcaatgggctggccattgagggtaacggtcacatttggagcggcagaaccaatgaaaaaaatcgtcgggctactggtttggtgattttggggtggataggccaaaaataagggctgactttgggctacagccggcatagtgaaaaccaccgctgcccccacaccaatcattgttcccaaccaagatttcattgccatcattgcaaaaaattccccgtttaaa

SEQ ID NO: 419322 - DNA, 552 bp, Oryza sativa
acccggtgatcgcctttcctggctccaaagattcataacttcacgttgctagagctatttgctctgaatccttcatggaaggtaacatcaccctggggataatgactgtcaaacgaaagagcaaaaaatacctcatcgggaaccccttcgagagcaagccccgccacattcttaaatccaaattttttgtagtattctgggtgtccgacaaggcaacagcccttggctcctaagcccttcaactgtgacagtccttcctgaataagagctttaccaatccccctacgctggtataggggtaacacggagaccgggccgagtccataccagttttttgtgccgtccgagatggccacaggggaaaatgcaatatgtcccacaacacgactattcacttctgcaaccaatgacagggttaaagcacctgccgaacgaagagcttcgatgatgaactgctctgtgtggttactaatctgtaggggcgcgaaagccgcactagtcacttcagtaatgagaacggcatcggactttctctcatccttataaaatttc

SEQ ID NO: 419323 - DNA, 324 bp, Oryza sativa
gttaaacaaactcaacatgtagtacttgactatagcaaactgaagcccgtaccccacacgaaacacaaacttcgatcactgatcgggcttcgctgaccaggccttgaccaatcttgacacgaacttaacaaagctgcagtgcagaaaaagcaccaaactaacacacgccaaacacttccaaattccaaccatggcctggtctcacacacgccccaattaagcgctgctcttgtgctcgccggtggcggaggcggcggtcttggcttcctcgccggagcccttgtggaaaccgggcagttgctccatgatcttgcccagtatacc

SEQ ID NO: 419324 - DNA, 584 bp, Oryza sativa
ccggggatcaaccgcaaaaagaataatgtgagcgaattagaacaaagaattcgtgttctcaaacaagaaatatcagatcttgaggatagtgctcgagtagcattacagactttagaagagcccatcaaggatttaattccggttcaaaggcaaggtattaacgaagatgatttccttaaccagtttagtaattccctaaaagtaaagggcttagactttcatgaacgtatcgttaaagcctttcatacttctctaaaagtacaagatatttcggcattagtaattttagccggaattagcggtacaggaaaaagtgaattaccccaaaaatatgcggatttcattggtgctccactcgtcatgttgccggtacaaccccgttgggattctccccaagatttacagggtttttataattatattgaaaaaaagtataagccaactcaattaatgcattatttctatcaatatcagcaggatagaaaaatgcatggcagaatcatcatggtgctacttgatgagatgaatctagctcgggttgagtattattttagtgatttcctttctaaactcgaaacacgacg

SEQ ID NO: 419325 - DNA, 595 bp, Oryza sativa
ggtcgactctagaggatcaggttctttagtccactttacaaattcattccaaggtaaataattttctgttttttcatacttgatttttcttccccgtaatttcaattcatttggacgaccaaaagttaagacattggctcggtctaacactttatcggataaggattgagtggtttcatcttcattcatggtgccaataaacaggaattcttcgggaatcagaatatctcgttgcttctcaggaagttttaaactacctacgtccaatgataaataggttggcttactacgtcgtgtttcgagtttagaaaggaaatcactaaaataatactcaacccgagctagattcatctcatcaagtagcaccatgatgattctgccatgcatttttctatcctgctgatattgatagagataatgcattaattgagttggcttatactttttttcaatataattataaaaaccctgtaaatcttggggagaatcccaacggggttgtaccggcaacatgacgagtggagcaccaatgaaatccgcatacttttggggtaattcactttttctgtaccgttattccggctaaattactatg

SEQ ID NO: 419326 - DNA, 348 bp, Oryza sativa
ggtcgactctagaggatcgcccacttggagcaaacggacacggaacggattagtagttcccgtctttttttagccttaaaagaaggcaagttggcaatggccaatcatttgttgggacggccctatgccctcagggggacggcggtgcagggacagcaattggggcgtaaattgggctttcccactgctaacctttgtttgccagcggataaactctggccgaagtatggagtgtatgcgggttgggtcaatctaaatgccttggacgcacccataccagcggtgattaatcttggtgatcgccccacagtcaacggccagtaaccttcggcggaagtgcatttactt

SEQ ID NO: 419327 - DNA, 536 bp, Oryza sativa
cccactcgtccgggcttcctctctccctaatagcaaccttccagttggtctggagttgatcaaggctctaaacgtgaagctggagccaacaaactcaaagaggaagaagaacacggagagtggctcccatcctatccaaggtagaagtgaacaacgttagcattgcaacatcccaagccccaatatggtgacagtgagagaggagatgcgcaagggaccatggacagagcaggaggacctgcaactggtatgcactgtccgcctgttcggtgaccgccgttgggatttcgttgccaaagtatcaggtttgaggggtggggacctgcaaattagggctcaataggacaggcaagagctgccgcctccgttgggtgaactacctccaccctggcctcaagcatgggcgcatgtcaccaaaagaggaacatcttattattgagctccatgctcgttggggtaacaggtggtctaggatagcaccgaggctgccagggcgcacagacaatgagatcaagaactactggaggacacacatg

SEQ ID NO: 419328 - DNA, 229 bp, Oryza sativa
ccttagatggataaggtgaacctcccggctctacttaaagtcaatgctggttcatataggcattggacgggggggcaaaacccaaatccaggaatgtttgctttaaaggtgtatggcaatggcgacatttcataaactcagacctaaaaaggtggaatctagtaaggggtgattttggtctcgctgggataattcggtaattgcttggggccactcaatccctaggcga

SEQ ID NO: 419329 - DNA, 243 bp, Oryza sativa
tcgcctagggattgagtggccccaagcaattaccgaattatcccagcgttgatcaaaatcaccccttactagattccacctttttaggtctgagtttatgaaatgtcgccattgccatacacctttaaagcaaacattcctggatttgggttttgcccccccgtccaatgcctatttgaaccagattgatttaagtagaccggaggttacttatccattaaggatccccgggtaccgagctcg

SEQ ID NO: 419330 - DNA, 490 bp, Oryza sativa
cccggggatccggaggttgccccgatcgccacccagcaaatggccgagttgattggttcgattttttcctttggatacttgtcggcgattcaagtttttgcccttagcccagcaggaaggcgacccccccagtgtgctagtggccatggtggaccccgataacttggctgcccaggacgagctaaaccgaattttgcgggttaaaggttttgaattgcgccgcttggtggccacccaagatgattttaaccaactgttggaacagtactatgccatccgggaagagagggaggcggcccaggaaaaaagggaccaggaaagggcccttgataaacttaatgatttgacggatattgtcggctccatcgacatgaatctgggggaggacaaagaagatgtccatagtgctctagactccaacgatgctaaccaagcaccggtgattaacctggtcaacaaaattttggctaaagctctccaggaaggaact

SEQ ID NO: 419331 - DNA, 540 bp, Oryza sativa
tgcaggtcgactctagaggatcgaaagcctgatttaaaaccccatccttgcggaaacgaattctcagggtttttttctgcggctccacgtgaatgtcggaagttccttcctggagagccttagccaaaattttgttgaccaggttaatcaccggtgcttggttagcatcgttggagtctagagcattatctacatcttctttgtcctcccccagattcatgtcgatggagccgacaatatccgtcaaatcattaagtttatcaagggccctttcctggtcccttttttcctgggccgcctcccactcttcccggatggcatagtactgttccaacagttggttaaaatcatcttgggtgaccaccaagcggcgcaattcaaaacctttaacccgcaaaattcggtttagctcgtcctgggcagccaagttatcggggtccaccatggccactagcacactgggggggtcgcctttctgctgggctaagggcaaaaacttgaatcgtcgacaagtatccaaaggaaaaaatcgcccaatca

SEQ ID NO: 419332 - DNA, 210 bp, Oryza sativa
acccggggatcagctcaggggtcagcagaattcctccaaaaacagaggttgccgccatgagatttgccttaactcgattatcttcaatctgttccaatgcagtcgccacttccctcaattttaatgtagggtcagaggtctgcgtcaataccgctaggggcaatagccctgggctttggaggaatatctccgaggggtgctcccagagcc

SEQ ID NO: 419333 - DNA, 245 bp, Oryza sativa
atgcctgcggtcactctgaggatccggctctgggagcacccctcggagatattcctccaaagcccagggctattgcccctagcggtattgacgcagacctctgaccctacattaaaattgagggaagtggcgactgcattggaacagattgaagataatcgagttaaggcaaatctcatggcggcaacctctgtttttggaggaattctgctgacccctgagctgatccccgggtaccgagctcg

SEQ ID NO: 419334 - DNA, 480 bp, Oryza sativa
gtcgtcttctccccttcttctcctcctcctcctcgattcggagctccacccgcagccatggctaagaactaccccgtcgtgagcgccgagtaccaggaggccgtcgagaaggccaggcagaagctgcgcgccctcatcgccgagaagagctgcgcccctctcatgctccgcctcgcgtggcactcggcggggacgttcgacgtgtcgtcgaagaccgggggcccgttcgggacgatgaagaccccggcggagctgtcgcacgccgccaacgcggggctggacatcgcggtgcggatgctcgagcccatcaaggaggagatacccaccatctcctacgccgatttctaccagcttgccggagttgtggccgtcgaggtgtccggtggacctgccgtccccttccacccaggaagggaggacaaacctgcacccccacctgagggccgtcttcctgatgctaccaagggttctgaccaccta

SEQ ID NO: 419335 - DNA, 468 bp, Oryza sativa
ttcatcctcctactagtttctttcttgtttctttggaatttttttgatctcttgaagagatccggttcttggattaagttttggacaagaaccgtactgtgaccatgtcgtcgccttcgcgccggagctccagcccggagagcaacaccagcggcggcggcggtggcgccgacgagcggaagaggaagaggatgctgtcgaacagggagtcggcgaggcggtccagggcgaggaagcagcagaggctggaggagctgatcgccgaggcggcgcgcctccaggccgagaacgcgcgcgtcgaggcgcagatcggggcctacgcgggggagctgagcaaggtcgacggcgagaacgcggtgctccgcgcccgccacggcgagctcgccgggcgcctccaggcgctcagcagcgtcctgagatcctccaggtggccggcgcgccgtcgacatgcccgagatgcccgacgac

SEQ ID NO: 419336 - DNA, 468 bp, Oryza sativa
  unsure (1)..(468): unsure at all n locations
caatgtcaaaatattacaatcatcagttcatcacatcacaaaccagcacacatgtgctctccaagaattacatcaaatcggattgttctcttccacccttattagcaaggagcactggagatgaacacatctcacataagactagacaagattacaacacacattgcttattaatggtctagattaatgaaaacaacatgaagcaaaccataattaaacataataagcatcatcagacacaaccacagaggctagtactactagttgtaatgcagctgcaaccatgccattgatgccaatggccatggcgtgcgagctctccatggtggctcagaactggaaggcgtcggccatggcggtggcgacgatgggctgggccgcgaacggcggctgccatgggcggagcancgggtcgtcggggatctccgggatgtcgacgggcgcgccgccccctgaggatctccagga

SEQ ID NO: 419337 - DNA, 537 bp, Oryza sativa
cccggggatcaagcccaaaaggtctatcaccaatacgaacacaagttgcagattttagcctatcaagttaacccccaagaccccaaccgagccaccgttactgcccgggtagaagaaattagccagccctttaccctaggtaatcaacagcagaagggctccgccaccaaagatgacttgactgtgcgctatcagctagtacgacaccaaggggtttggaaaattgaccaaatacaagtggtaaatggcccccgttagtgcgtggcgttaactccccttttgaccaatggcatacggctagatgcccccataggtacggaaacctgcacttccgagaactaagcccctaccgtcactataagagtgtgaacgtgtcggccccaggcaatggattggaaccatggcttttcggcccatcgttgtgtcttatattcttacttgttaacgggagttaattaaaattatgggaaaagttgttgggattgacctcggtactaccaattcctgtgtggctgtaatggaagggggtaaacccac

SEQ ID NO: 419338 - DNA, 533 bp, Oryza sativa
cggcgattttacccgcatctttggtggcttgccgttgggagtcgttaatgtaggcaggaacggtgatgacggcttgggtaacggtctcccctaggtacttgctggcatcgtccaccaatttccgcagcacttgggcagaaatttcttccggggcaaactgttttccttgggctgggcaatctagtttcacattgccgttgccgtctttaactacgctgtaggcaacttcggtggcttcattggtaatttcatcaaatttacgaccaatgaatcgtttgacagaataaaaagtattgcccgggttcatcaccgcttgacgcttggcaatttgccccactaggcgatcgccatttttggcataaccaaccaccgatggggtcgtgcgaaaaccttctgcattggcgataacagtgggtttacccccttccattacagccacacaggaattggtagtaccgaagtcaatcccaacaactttttccataattttaattaactcccgttaacaagtaagaatataagacacaacgatg

SEQ ID NO: 419339 - DNA, 460 bp, Oryza sativa
ccgggatccacaaggctcgatgggcacctttacggcgggtggtgtcactgtcaatgcgaatccagcgtaaatcgggaaattcttgggttagggcttcggttactttttgggtgccactgccaaaaaatttcagatagggggaagaacattccggacacactttgggctggatttccgcatggttacagtaatggcaccgcaggagaggttggccattgccctggacgtagtgataggaaagggaaacgtcacagttgggacattccaacacataaccgcaactgcgacaggagacaaaggtgctatggccccggcggttaataaacaaaataccttgctgttgtttggctttgagttcccccagggcagtttgtaaagcccgactaaaaatggagcgattgccctgttttaatttccgccgcatatcgacaattttgcaccgggggtaggggggcggact

SEQ ID NO: 419340 - DNA, 561 bp, Oryza sativa
ccggggatcactgagggatttggtcacaccggacaaataggtgtggtccccaaacatgatttcttttttaactgtgtagtccaactgcacggtgccgcagtcctggcagtataaaacccgcaggggataatagggttcctggcccacttccgccggggtgagaaaatggttacaccagggttgttcccccaaatcgatcgccaaatctagacgggtagaatcacaaacacggcactgcataggaactaaccaaaaaactaagaaccaggacgacgggcaagggctatcttcccacgtttgttgtttcggctcaagctggggctaggccgttgggggtgtttagggctggcagtgaatttgctgtaaatcggcgatggtggcgtcggtccccactaggtttccctgggcataaccaggccagtgaatggcgatcgccccttgggcatgggcccctttggccatggtgatatccccctgggcatccccaatcatcaaggtgtgctccggtttcacgcccaactcccggcaggttaaaaggtataaagctggatcaagtttact

SEQ ID NO: 419341 - DNA, 625 bp, Oryza sativa
ggtcgactctagaggatcaccaattgcaaagcctagtggatgtggctaaggggtcggaccaaggactcattaaacctgatccagctttataccttttaacctgccgggagttgggcgtgaaaccggagcacaccttgatgattggggatgcccagggggatatcaccatggccaaaggggcccatgcccaaggggcgatcgccattcactggcctggttatgcccagggaaacctagtggggaccgacgccaccatcgccgatttacagcaaattcactgccagccctaaacacccccaacggcctagccccagcttgagccgaaacaacaaacgtgggaagatagcccttgcccgtcgtcctggttcttagttttttggttagttcctatgcagtgccgtgtttgtgattctacccgtctagatttggcgatcgatttgggggaacaaccctggtgtaaccattttctcaccccggcggaagtgggccaggaaccctattatcccctgcgggttttatactgccaggactgcggcaccgtgcagttggactacacagttaaaaaagaattattgttggggaccacacctatttgtcctgtgtgaccaaattcctcagtgatccc

SEQ ID NO: 419342 - DNA, 562 bp, Oryza sativa
ccggggatcgccgtggacagaaacggcaacattatcctggtggctagccataacctggtggggggagctggagctagcttgggggaatttgcccaaattttgcaacagttgggggcggtgaatgcgttgaatttagatggcggcagttccacctccctggccctggggggtcagttgctggatcgatcgccagtgacggcggcccgggtgagcaatgccattggcgtgtttgttcgttaaataatggttgtgccgaccctaatcaatgctgagggggtccacgtcaatatccaggtaaacggagctagggcaaatttgtttaattctctccagcggcaaaattactttgatgaagctgggatatttaactaacaactgccagcgataccgttgggcaatgcggagaatactggccggggcgggtcccaaaatctccacggtcttgggtaaaagttgttgacacccaaccgcgatcgcctggatcgttttttccaccttcctttcattggtccccaaacaactgagcaaaattaacttgccgtaagggggataatttaacatt

SEQ ID NO: 419343 - DNA, 402 bp, Oryza sativa
cgttaaaacccacaattaccatggttttatcgcccaggagttactcttacgggaaatgttaaattatcccccctacggcaagttaattttgctccgttgtctggggaccaatgaaagggaggtggaaaaaacgatccaggcgatcgccgttttgtgtgaacaacttttacccaagaccgtggagattttgggacccgccccggccagtattctccgcattgcccaacggtatcgctggcagttgttagttaaatatcccagcttcatcaaagtaattttgccgctggagagaattaaacaaatttgccctagctccgtttacctggatattgacgtggacccccttagcattgattagggttggcacaaccattatttaacgaacaaacacgccaatggcat

SEQ ID NO: 419344 - DNA, 587 bp, Oryza sativa
acccggggatccccaggcttgccccaccgtcatcgaccaattaagcggagatgttgaaggaaaccggcatcccggtgcaggtgattttcagcagtggcaaagatgtggatttattgccccaacggagtaacaaaggtaacgccacccaatatctgcaacaacatttagccatggagccgtctcaaaccctggtgtgtggggactccggcaatgatattggcttatttgaaacttccgctcggggtgtcattgtccgtaatgcccagccggaattattgcactggtatgaccaatggggggattctcgtcattatcgggcccaatcgagccatgctggcgctatcctagaggcgatcgcccatttcgattttttgagctgatattttagttaacaattccgaatgggcaagcaaagtaagctacaatttgacattgttcaattttgagtacagggtgtaaagccgaggagggcgttattgctgagccactaaacttgacggtcagtttgcgcgggacattagaagtcaaggaaaagttacaaatcttccgtctgacgggtttgttggacgcattttccgagcctacct

SEQ ID NO: 419345 - DNA, 488 bp, Oryza sativa
gagctatgacgccggatgcacgcaacgacagctcgcaacctctggtgcaggcgacctacatttttggccagtggaatcacctgaaacaaacccgtgaacgctttgggctggagatggcccggcaaaccctaattgatgaactgattagctacagcagacaccaaggctatcaaacccaagtggcattccatgctcagtaccaacaaagccctgctagccaagagcatcccagcccccacctttccatccactacactgactggctccagactgccgatacgctcattgaaaagcggagggcccattatcgccgtcacacctatgagtatgccggccggctaattgtcgtcacctccgatcgcgctcaggtaataaccgtgggggggcaccgcgcagaatggatgtcggcccaactttttgcccaggaggtggatcaaaggcgagctaaaaggtcgcaacaggctaaacagtacggtgaaaagagtcaa

SEQ ID NO: 419346 - DNA, 527 bp, Oryza sativa
atagggataagctggcagcgcctggacggacccggtcacggaatatcactgggtcgaccgcacgcgtacgttgattcgtgggcggacggcatggggagtactctgtagtcgtaatagcttgacgtatagatagcggatttgtctttgccacaggcgccagtggccggctttacgggggggagtcaagttaaccaaggtgcttgaggggggtaaggagtggggaagattatcagttattttaactaagatgttgctaaattccccattcctaaaccggtccggggcagaaacccaatcttccattgccccactaatcgacgccataacgccattgactaagcttttcccgcactgatgggtctaatttgtgcacccagccccgttgcttttcccccaagggtttaccctttggcgatcgccgttgactctttttgccgtactgtttagcctgttggcgaacttgagcttgactctgatccaccttctgggccagaagatgggccgacatccattttgcaccggaaccc

SEQ ID NO: 419347 - DNA, 403 bp, Oryza sativa
ggcgtcgccgctgtctgtgctggggttcgacgccaatggcccgtcattcttccggcacctgacgctgaccgatggcgacgaccgcacgctgccccggcggcggctgatcaagatcttggtgatcggcgcgggcaacgtgggcatggccatcgcgcagacgatcctgacgcaggacctggccgacgagatcgtgctgatcgacgcggcggcggacaaggtgcggcgcgagatgctggacctgcagcacgcggcggcgttcctcccccgcgtgaacatcgagtccggcacggaggtgtcgctgacgaggagctcggacctggtgatcgtgacggcgggggctcggcagatcccggaggagacgccgctgaacctgctgcagcggaacgtgtcgctgttccggaag

SEQ ID NO: 419348 - DNA, 262 bp, Oryza sativa
acccggggatcgcaatggtgctcaaactgcggaagaaggaattgtccaagtcttgcactaacagtttcattaatagtccaaagaaaacaatgggaatggtgcccaaaccaatacccagacctaatttaaattcgagggaatcgtattggcgagtttgcacagctttgataatgcccttagcaatgccggttaaatcttcccagaagtaccaaaatacggctccaatgctacccaattgaataacggcggtgaacgccacccc

SEQ ID NO: 419349 - DNA, 272 bp, Oryza sativa
ggggtggcgttcaccgccgttattcaattgggtagcattggagccgttttttggtacttctgggaagatttaaccggcattgctaagggcattatcaaagctgtgcaaactcgccaatacgattccctcgaatttaaattaggtctgggtattggtttgggcaccattcccattgttttctttggactattaatgaaactgttagtgcaagacttggacaattccttcttccgcagtttgagcaccattgcgatccccgggtaccgagctcg

SEQ ID NO: 419350 - DNA, 309 bp, Oryza sativa
gctccgcacccggggatcattagggtgtagtctcggttttcgatgacagcttcagcgctcattatcctcgtggggcaattttgcaaacaatggcggttttttctcttttagcctattacaactttttggaaatgttcttaagattgcatatttccttaaaattaatcagaaatttgttcgaggggtaatgctgtgccgactgtccactgctccaactgcgattgtcaagcccccaatgacctaggcgatcgcctgtgcaaaacctgccggactcctctgctgaaaaggtatctgtggtcggtgggggac

SEQ ID NO: 419351 - DNA, 310 bp, Oryza sativa
ccgcaccgacacagataccttttcagcagaggagttcgttctgtcttgcacaggcgatcgcctaggtcattgggggcttgacaatcgcagttggagcagtggacagacggcacagcattacccctcgaacaaatttctgatgaattgtaaggaaatatgcaatcttaagaacattgccaaaaagttgtaatacgctaaaagagaaaaaaccgcgcattgcttgcaaaattgccccacgaggattatgagcgctgaagctgtcatcgaaaaccgagactacaccctaatgatccccgggtaccgacgctcg

SEQ ID NO: 419352 - DNA, 312 bp, Oryza sativa
ccgctttgtcgatacgagaaaaaccaccccagggtttttgttgtaggcaaaacatgccaggcgttaggggggagccatgaaccatctccttggcctgggtgacgcgggcatggtcatggataatcatattcaagcggtggggattctgacaaatgcagtgaaagccctacagcatgtattacaatgtgcgtgggacatcgaagtgacaaccatcgatttcatggaagtacaggaggcgatcaccacccatgtggcaattattttgcaagataatatgggcaccgacaccatggccactgccgtcagattaat

SEQ ID NO: 419353 - DNA, 488 bp, Oryza sativa
ccggggatctaaaaatggggggcgcataccccgcggcttgctgcgattgggtctttctttaagaatttctttgggttcttcagaatagaaaaccgcaatctgtttctgaaaaatatcttgactactgtgcccgtgggcgacatctttgctccaccaactcggcggccagtttaatggcggcaatgagactatctgccctggcaatgccttgccccgcaatgtcaaaggcggtgccgtggtcgggggaagtgcggacaaagggtaaaccaatagtggtattaatagcctgatcaaatgccagcagtttaacgggaattaagccttggtcatggtacaaagccaggtaagcgtcggatacccgtcgtttggccatcggttaaccaagctttgccagggccgacccacatggtatcccgaggaatggggccaattagttgggcctggggatatttttttctagcttgctccaaccaaggaattaaccaatc

SEQ ID NO: 419354 - DNA, 414 bp, Oryza sativa
tgaggagcgcctctgggggagcttgcgttaaaccgctaaaagcaaaggatcgcgcattttttttaaccagtgctaccccgattaaataaaacaacatggcagtgttgctcagcagccgatagcgcagtcccagccaaataattcggggttccctaggataggtcatcaggcaaaaagcggcgctcgccaccacttccagggccacataaagactcataaaatccggacaaagaaaaggggaattaaggctagcgtggagaatgatcagtcgggcataacataaggctgagcggccggaattccagcaatagaccaacaccgcccatgtgaccatggcattgctccataagtactaagaggaccgggcatacagtggagaaacaacgcccaaactgactgagaaacaccaacact

SEQ ID NO: 419355 - DNA, 474 bp, Oryza sativa
tcgccagaatggcgttggacgatcccccacgggacggatggcatcctatccatcggccgccattcgtacctttttgtgctatgggatgacggaccgggacctgaaggtgccgcagcagatcgacgacagatgtagaaaagccaccgttgcagaaacactctatcttaccctgcactcagacaacacccaagtacggaatccatttaacaggctgtccctcaacgaccccacaccatcacaacaccaggggcaacacgttaccctataccagtaacatagggacacatgacactgctagggcccctctgcccacaggggcaaaggagagtttttaccctaacgcttgacatggtcacaaccataggggaacgcggacctaaccacatgtggcccgacctgaaacccgcgtaaccgcgcgccattcgtttttagcaggctgcaactgctctgggaactctgcggctgaacccagat

SEQ ID NO: 419356 - DNA, 271 bp, Oryza sativa
atggcatggcagacctatgctggcggtttttgtgctgggctgaacggattctgccgatcagaataaaatgggcattgtggatgctaaggcgtcagagccgagaaataatggttaggaggctgatgagaccaatgctaggttggaacccgacatgctaaatagggtagactttggcatggcctgcttgaaaaatgcaatctacaaaggtgctaaatggagcgaaccatactgctgttatgctgacctgtacatgcgctatctacgtgaagcc

SEQ ID NO: 419357 - DNA, 429 bp, Oryza sativa
cataatcaatggaattcttatcccaggccattaaaaaaatttcaccaaaaaacaactccatcacaaggggttctatccttggagtcttgtcctccaaattactacagtaagatgtatcgtttagccataacaaacataaattgttcataaactaaaacctaaaatgtaacttcactgaaaatttctttaaaaaaacccaggggattgatccccacttggaacatacaattcccatgactcaaaaggcttaaaaacatatgctgggctctgtagggttgcaactaatcaatcttcacagatgagtaaatcaacctcgtgaaccagaaacaagcgcagaaaccgatggtcccagtaagcacaaagaacgctaatgaagcaagcaacatgtccccaaagtacaagatgccagacaccagcttagtaatctgc

SEQ ID NO: 419358 - DNA, 537 bp, Oryza sativa
  unsure (1)..(537): unsure at all n locations
ctggattcttgacaatctcccgctagttgtttctgtgttaaggcaagataagaacattgcttaccaaggtggctatcatgttggtgtcaagggccagtacaccggaagcaaggaagagaagtacttcattcacaaccatttgtcatttttagtgaagtaccacaaggacgatgattcagaactttctagaatagtgggatttgaggtcaagccatacagcattaagcatcagcttgatgataaatgggatggcgtgaacactcgcctgagcacatgtgaccctcatgctaacaagcttgtaacaagttctgactctcctcaggaggtcgaagctggcaaagaaatcatattcacctatgatgttcactttgaggagagtgacatcaagtgggcttcccgttgggacacctatcttttgatgactgatgatcagattcactggttttctattgtcaactctctcatgatcgngcttttcctgtctggtatggtcgcaatgataatgcttcgcactctatatagagatatctttagata

SEQ ID NO: 419359 - DNA, 494 bp, Oryza sativa
acccggggatcctaaggggccttccggttcgggaaaaacaacattgttgaccctgatgggggggttacggtcggcccagagcggtagtttgcgggtgtttggtcaagagttaaatggagcaaaaaaacaggatttggttcaggtccgccgtcacattggctatattttccaagcccacaatttgctcgaatccctcactgctaggcaaaatgtacagatggccatcgaactacacccccaatacaatgctcaacaggcgaaagagttgtccattgccatgctggaggcggtgggactaggagctcacattaactacaatccccacaatctttccggtggacaaaaacaacgggtggcgatcgccagggcactaggaagtcatcccaaaatgattttggccgatgaaccaacggcggccttggacagtcaatcgggccatgacgtggtggagttgatgcgaaaattagcccgagagcaagggtctactattttga

SEQ ID NO: 419360 - DNA, 438 bp, Oryza sativa
ttttgttatacaaactgcaccacaggggctccacgttaagtattatgccttaattaatacactcgaggaaaatttcacgtctaagtgacaggaaaaatgaactatgttgacgacagaggcgcaatgatagcctaacgcaataaacaggttggaatcaatcatctgtaggctatcaattgtacaaatccgtgaatccagctttcaaccagaacaatcgaaggcataaaatatacattactgtggagcagtatatgcataaccgagggcgcataaccttgtgaacccttctggccaaactattttgtaaacctttcgtgcacctacaagtatttcttgctcactgaggggctatgcctgccgaggactttgtcgaaatctgtacttgagacaggtggaggaaggatctttagtgccggtccttggagcaagctcctgcat

SEQ ID NO: 419361 - DNA, 386 bp, Oryza sativa
ctcgtcaaaccccaccccgaagcaaccgccgccgtcgtcgaatccgacaccggcgaccccaatccgcgccgccggggcccgatccccactccgatccgtcgtaatccggacggtccccccgagcgcgcgcggtcggaggaggcgccgccttcgcccccgatgtacagcaacttcaaggagcaggcgatcgagtacgtgaagtatgcggagcaggaggacaatgccggcgactacgtcaaggcgttcccgctatacatgaacgcgctcgagtacttcaagacccacctcaagtacgagaagaaccctaagatcaaggaggccattaccgacaagttcaccgagtacctgcgccgcgccgaggagatccgcgcggatctcgatgaggg

SEQ ID NO: 419362 - DNA, 579 bp, Oryza sativa
  unsure (1)..(579): unsure at all n locations
acccgggatccacaattgctgaaattccctaaggcgatcgggtaaatcgagtgtttgcgtagacgacattgctccgatgaatttgacgggggttgggcgaatcaaggttaaaataatgttaaggcttgctgattattaactcaaacttgtcgaccctgtgtggtccaactccctgggaaatctcctggggagagtatcgcttttacctgtccctagtaaaaggagcaaaaatcattaataaccattaacattaattaacattaatcccaaaaacctgcaccgatacagaaatgtctgctacaagataaatacgggattttgacaagctaatagctgatactatttttcccccgttaattggcaattatcggcttttttggtcgttttttctgttttataactaggtagtgcaaactaccctaacaccctccccaaaactatgaatgccgtcgccgatgtgnccaatnngaccattcacaccacctgtgcccaagacattcacgatattgaattgccccagtggttagaggattgtttacagcagcggcagagggagatagaacaggggcaggaccaaac

SEQ ID NO: 419363 - DNA, 514 bp, Oryza sativa
ctgcaggtcgactctagaggatcgtaggcgaaacagaacgctcgacaaattagacaatggggcgccgttgtttcgtcctggccctgttctatctccctctgccactgctgtaaacaatcctctaaccactggggcaattcaatatcgtgaatgtcttgggcacaggtggtgtgaatggtgggggtgggcagagcggcgacggcattcatagttttggggagggtgttagggtagtttgcactaactagttataaaacagaaaaaacgaccaaaaaagccgataattgccaattaacgggggaaaaatagtatcagctattagcttgtcaaaatcccgtatttatcttgtagcagacatttctgtatcggtgcaggtttttgggattaatgttaattaatgttaatggttattaatgatttttgctccttttactagggacaggtaaaagcgatactctccccaggagatttcccagggagttggaccacacagggtcgacaagtttgagttaat

SEQ ID NO: 419364 - DNA, 279 bp, Oryza sativa
gcggtaacgtcccaacttacggtcccagattcaactttattgttatgcctgccccagggtcggcgatgtgacctttgcccaactccattcccgccaagtgcccaacagttaccgtattgttaacctcgcagacgtgattcccctcctgccccccactacggggttaggcacctatgtccatgtcgggcaaagttggagtttcctcagccaaggaggggacatcttacccaaccatgtggtggatacctaccagggagcagtggatagggaagtggaaac

SEQ ID NO: 419365 - DNA, 328 bp, Oryza sativa
gcctgcaggttactctgaggatccgtttccacttccctatccactgctccctggtaggtatccaccacatggttgggtaagatgtcccctccttggctgaggaaactccaactttgcccgacatggacataggtgcctaaccccgtagtggggggcaggaggggaatcacgtctgcgaggttaacaatacggtaactgttgggcacttggcggcaatggagttgggcaaaggtcacatcgccgaccctggtgcaggcatagctataaagttgaatctgggaccgtaagttggggaggttaaccgctagatccccgggtaccgagctcg

SEQ ID NO: 419366 - DNA, 548 bp, Oryza sativa
gcgatttctagggttttgggtcctttgctcggggcatgggccctgcggttcggcggcagtgacgagcggcaagccacctagaggaggagatgattacggagaagccgagctggattcgccacgagggcctgcagatcttctctatcgacatccagccgggcggcatccgcttcgccaccggcggcggcgaccagaagattcgcatatggagcatgaaatcagtggccaaagacaatgacagtgatgattccagccaaaggttgctggctacaattcgagaccattttggaacagtaaactgtgtgagatgggcccatcatggccgctatcttgcttcaggatcggacgatcaagttatccaaattcatgaaagaaaagctggcactggaacatctgaatttggaagtggagaacctccagatgtagaaaactggaaggttgttatgaccttaagagggcatactggccgatgggttgacctttattggtcccctgatgactcgacattggctaagcggagtttggataatactgtcacatatggagca

SEQ ID NO: 419367 - DNA, 553 bp, Oryza sativa
acccggggatcagctatcaccatgaggcactccagcgttgcaccaccaaccgcactgagccgtcttcatttttttgttgttccgtcaccgcaaaaccttgtttggccgattcattaagtacggtttccagagcgtaaccctgggtgattttttgcagaaatccttccaccgaaaggggctgttgccagtactgtaaatctgtcaccaactcatattcctgaccattccagctaaaacctaggtcgtaatcattgctctgttcaatcaccactgcggctttggcggtcaaaccctggtagccccgcacggtggccggcccttctttccaatccagacccaagttggtgagggtgccttctaacacaataaggttaccaaacctggttttgatattgctaaagcgagacataggaaattacaaaaaaattataagaatggatgagacacggtcttaaaacttttaaacaaggattttcatacagagagaatttaactttccccaggccaagtagaaagagtctgggattgctgaactgattggttcaacggactg

SEQ ID NO: 419368 - DNA, 411 bp, Oryza sativa
gtgtttatttttggtagaataaccaaaacactagagcggatcataccgtatgttcctagattggacaaatatgttcccaatagaacaggccatggctggggaagcttccgtgtaggcatcggctaaccaagtgtgtaggggaaccaggggaatcttgatgccaaaacccaacaaaatcagaatcaacagaatggtttgggctgactcggtaaaggtctgggtaattactggattgtaatcaaaggaatggctaccacttagtaaactgatgccgagaaaggctgctaacaccaacaaaccaaaaaagggagtgtagagcataaacttcatggaggcataaccccgtttttgcccaccccaaatggccatcattaagtggaagggaattaattctagatcgtacaagaccat

SEQ ID NO: 419369 - DNA, 226 bp, Oryza sativa
gctcaggtcgactctagaggatcgtgctcactaatccccggcgatggaagttaattaatacttcccggtaattattctttttggtagaaaaactaacgcaactgggctaccacttgattttccagtaacagcttttgctgcaacaaatactccaccgtcagacgcaggtagcgctggtcatctacccaaaatttgaccttgatgcgatccccgggtaccgagctcg

SEQ ID NO: 419370 - DNA, 579 bp, Oryza sativa
ccccgggttcaaataaagagttgatttggcaggaaaaagtccagttttcccaggttcccggcccccaattggttaccatctggcgggaaagtttgtttcatcttttagatcaaattcccgatgaactaagcagtcaaatccaggcgatcgccattgatggcacttcctccacggttttactgttggatagccaaggcaatgggttaatggagcctctgttgtataacgatgaccggggcaaagaagttaagcatttattatcagcaatagctccagcagatcatttagtgcaaagtgctacttctagcctagccaaactgctttggtactcccaacaaccggagtttgaacgagctaattacttttgtcatcaagcggattggttagcaagtttgctccatggtggcagacccgttagtgattatcacaatgccctcaagctgggctacaatccccacaatttaacctatcctgattggttaaaaaatgcttcttggtttgcccttttacctgcagtaattgcccccggtaaagcaattttccgttattcccagcattgccacccagaaaattccctaa

SEQ ID NO: 419371 - DNA, 595 bp, Oryza sativa
gtcactggcttttcacttagtaacttcagcaccagagtggaacccaaatttagtgaccgcttcccctggttgcgttgcgccactggctaaaaaagcagcaatgctgtccgtggtgccggcacaaaccaaataatttttagggaatttttctgcgttggcaatgctgggagataagcgggaaattgctttaccgggggcaattactggaggtaaaagggcaaaccaagaagcattttttaaccaatcaggataggttaaattgtggggattgtagcccagcttgagggcattgtgataatcactaacgggtctgccaccatggagcaaacttgctaaccaatccgcttgatgacaaaagtaattagctcgttcaaactccggttgttgggagtaccaaagcagtttggctaggctagaagtagcactttgcactaaatgatctgctggagctattgctgataataaatgcttaacttctttgcccccgtcatcgttatacaacagaggctccattaacccattgccttggctatccaacagtaaaaccgtggaggaagtgccatcaatggctattcgctggatttgactgctagtt

SEQ ID NO: 419372 - DNA, 472 bp, Oryza sativa
agaataaccaaaacataggaggtttcatttcttcttctcaaagtagtgtagcatctttccttctttcaccattacataagcttaagcaataacagataacaaatcctcctcctcctctaggtaaaatattcaaacacaatacccttataagtacttattattaggaaagtagcgtgcatgggcataaatggcagcggggggcaggttaagaatcacaatgctgagcagcgaggaaacaaaacaccataatgggacagagcaaaagcctccgaaagggagcttttaggcagaaggcttctcccacttgaggggcttcaccacctcccaggtgaagtctgggtcgtcccttccgaagtgaccgtaagccgccgtcttgaggtagcgtccgttgccgcctttcttgaggtcaaggctgatgatgatcatgccaggcctggagtcgaaagtcttcttcacaatcttgaggatcttc

SEQ ID NO: 419373 - DNA, 532 bp, Oryza sativa
  unsure (1)..(532): unsure at all n locations
gtcggatctaattaatttacctcctccacctcctcctcctccccccgatcggatcggcccggctcctcctcctccgccgccgccaccgccgccgcagataggagaagatggccgcacttgataccttcctctttacctcggagtctgtgaacgagggccaccctgacaagctctgcgaccaagtctcagatgctgtgcttgatgcctgcctcgccgaggaccctgacagcaaggtcgcttgtgagacctgcaccaagacaaacatggtcatggtctttggtgagatcaccaccaaggctaacgttgactatgagaagattgtcagggagacatgccgtaacatcggttttgtgtcagctgatgtcggtctcgatgctgaccactgcaaggtgcttgtgaacatcgagcagcagtcccctgacattgcacagggtgtgcacgggcactttaccaacgccctgaggagattgtgctggtgaccagngacacatgtttggatatgcaactgatgagacccctgagttgatgcccc

SEQ ID NO: 419374 - DNA, 453 bp, Oryza sativa
actgacttcatatctaatacaccagggaataaaatatacaggcactaagaattttacagcatgtcgtagtatcttatgaccgcaattaagctactctgaagaaacgaactgaactccgcctgcatggaacttgcaagcacagtcatcatagacctctgataatttctaccgacagcagtctcctgttactaatctggaaattttgagcaggcggagcaagtcctgggatgtcgcggatgttcttgttatgtgggttgacaatcttaacaacaataattgcaatcacaccacaaacaatcagaaaaagcaatgccataatgcatttgtcagttgcaacctgacggccaatctctttcaccagctggctagccttctttaacgaaaagtgaacagtatccagctcattgccaattctcttcatttgttctggttgctgtgatagcgctgaagcag

SEQ ID NO: 419375 - DNA, 547 bp, Oryza sativa
gtctcctcctctcctcccaatccccaatccctgttcggcttctccttcctcccctccgcggccgatcgcgatggaaccctgagctacgtggttggtgcttcaccgctggagtagagttctactatagtagggtttgggggcggcggtctcggaggagggaggaagcctttggccatggcgagcgacgtgcccatgagcccggagctcgagcagatcgacggcgaggtccaggacatcttccgcgccctccaaaatggatttcaaaagatggacaagattaaagattcaagtaggcaagctaaacagctggaggatctcacagcaaaaatgaaggagtgcaagcgtttgatcaaagagtttgatcgtatattgaaagatgaggagtcaaacaaccctcctgaggtccacaagcagctaaatgacagaaagcaatatatgatcaaagagttgaattcctatgtcaccttgaggaagacatatcaaagtagcctaggtaataataataagagggttgagctctttatatgggcgctggaagtagtgacct

SEQ ID NO: 419376 - DNA, 594 bp, Oryza sativa
gctcccacccggggatcgagtgtaaaagactcaactcaacgcagacctgcaataggggggattccggcaagattttcagtcttggctcaacctttgttccgtcgtagttggggattgtccttacctttgcctggggctaaaacgatcatttccatggcacgacaagctcgctatcaaaaccttttagggctcaatccgagaactgaatcccgcagtctaatttggtgtcgtcgtttctccgttcgtcctaattgccttgggcttttgtatagaaaaaattgctttgaaaaaactttagaaccgggtatttactccttttgggattttcgctcagaattggaacttttcctgattccccgttctgaccagttctttattgttacaaatcaagaagtattaaccaaagataatattcctctacgtttttcttacattgtcaattatagaattacagacggtcagaaattgttgacctatattgatcctgcccaaatgggatacatcgaatggctagcaagtatgattcaaactctgattcatcctctaacccaaatttatagtcatagggctattaacgaattaacagccttgagc

SEQ ID NO: 419377 - DNA, 602 bp, Oryza sativa
atgcctcaggtctactctagaggatcatctcctattaattgggaagcattttttaacgccctagcggtggcaacttctgtgcgggcattttccaaatccgtttgacctctaattttggcttctaactgaagagcaaaaagagtttggatatttttgggaaaagtaatatcccttaatttcattgcttcaatcataaccccaaatttttgggctgattcttgcaattcatccggaatattggggatgaaagcttcccattgctcattaagctcaaggctgttaattacactaatagcactacgccaataaatttgggttagaggatgaatcagagtttgaatcatacttgctagcccttcgatgtatcccatttgggcaggatcaatataggtcaacaatttctgaccgtctgtaattctataattgacaatgtaagaaaaacgtagaggaatattatctttggttaatacttcttgatttgtaacaataaagaactggtcagaacggggaatcaggaaaagttccaattctgagcgaaaatcccaaaaggagtaaatacccggttctaaagtttttcaagcaatttttctatcaaaacccag

SEQ ID NO: 419378 - DNA, 549 bp, Oryza sativa
  unsure (1)..(549): unsure at all n locations
cttccctttctctgcattactcaagaagctggacttgcagtacacttttctcaccactgaagatcactgccaactcattgcaaaatgtcccaacttactagttcttgcggtgaggaatgtgattggagatagaggattaggggttgttgcagacacatgcaagaagctacaaagactcagagttgagcgaggagatgatgatccaggtttgcaagaagaacaaggaggagtctctcaagtcgggttgacaactgtagccgtaggatgccgtgaactggaatacatagctgcctatgtgtctgatatcacaaatggggccctggagtctattgggactttctgcaaaaatctttgcgacttccgtcttgtcctactcgatagagaagagaggataacagatttgcccttagacaatggtgtccgtgcactgctgaggggctgcacgaaacttcggaggtttgctctatacttgagaccagggggactttcagatacaggcccnggctatattggacagtacagtggaattatccaatacatgcttctggg

SEQ ID NO: 419379 - DNA, 375 bp, Oryza sativa
tttttgggtctaacatacgcaaactgatattatcacaatgttagccgatgacaatggaaagagtaatctaggtacaagcggatcattgacggtggagacaagacattggctgcaccacaacacccaccagtggcgccaacaaggagcgctatccgttataggacgagagaaaaagtaaaacatcacgatgtgaagtgaaactgaataattctagtagacgatgatgatgatggataggctccttaggacgcccgccgcccttagcgtcttgctgctcccatcttgtccactggaaggctcactcgtcatcgtcttcatcctcttcgatgccctcgtcgtcatcctcatcattgacctcggacttggacttgtcag

SEQ ID NO: 419380 - DNA, 223 bp, Oryza sativa
tgaccttttaccggccgccaactacaatccgtgcaagtgcagacttaacccctctcacaagaaaaagaggcgcaatgatttgggtagcacacagacatcactggggacaaaaagacggacaccgtcaagcccgacaccaaccagaaaccaacgagggagggcgcgaagaagcccgccaccaagggcacgaaggggaaggccggcaaggaccccaacaagccca

SEQ ID NO: 419381 - DNA, 471 bp, Oryza sativa
gtgcggacatggcgttcgcgcactacgggcccttctggcgccagatgaggaagctgtgcgtggtgaagctcttcagccggcgccgcgccgagacgtggctcgccgtgcgcgacgagtccgcggcgctcgtgcgcgccgtggcggcgtcgcgcggcgaggccgccgtcaacctcggcgagctcatcttcaacctcaccaagaacgtcatcttccgcgccgcgttcggcacgcgcgacggcgaggggcacgacgagttcatcgccatcctccaggagttctccaagctgtatcgcgcgttcaacatcggcgacttcatcccctggctcagctgggcggacaccaacggcatcaacgcccgcctcgtcgcggcgcgcaccgcgctcgacaggttcatcgacaagatcatcgacgagcacatggagcgcggcaagaaccccgacgacgcctacgccgacatggtcgacgacatgc

SEQ ID NO: 419382 - DNA, 458 bp, Oryza sativa
ttaatccgccgcgagtcgcgaccatttcttgcgagtagtagtagaggggagagtgagtgaggggcgtgctgcaatggcgactgaggaggttgtccctgaggttccggtgaccgaggtggaggctgccgcggcggaggaggccgtccaggagaccacggctgcggaggagaaggccgccaagccggccaaggagaagaagaaggccggcaggccgccgaaggagaagaaggaggccaagccggccaaggagaagaaggtgaaggaggccaaggccaagaagccccgcgtcgacgacgcccacccgccgtacgccgagatgatcatggaggcgatcgtggcgctgaaggagaggactggatcgagctcccaggccatcggcaagcacattcatgccaaccatggcgccaacctgccgcccaacttccgcaggcttctatccggcaacctcaagaagctca

SEQ ID NO: 419383 - DNA, 355 bp, Oryza sativa
tcagggagcgcgtgggggccgtaggggccgtctgctcctccggatcgtggggcgatgagcatgcattcttcaagagggatgagaatgagataagtccgtactcatggaatatcacagggacatataaaggaagttggaactttgctggttccacaaatggttcttctaggtttcttgagtttacaaaattgaagggcgatgcggttttggaactattaagtacaccgacaaagataagcggggtgcactatgttcagggatctgttacattccatgatgttctagacaatgctcatgatcgtggagttgctcagataaggttagaaggcgtggcatatggccttttcggcaactt

SEQ ID NO: 419384 - DNA, 420 bp, Oryza sativa
ggggatactaaggtgaaatcatgattccctctattgtcatgctcgcaagtcacaggaccataaaaagaggcaacaaaagggccttaggtaaagaaaaattataccgatacattactgcaactcctcccgaattttcaacatcatacacactacatcgcatgcagggaacatgtgccgctaccaagagaccggacaaaacctcattcctcccaatgacaagttactcggatatattcattggaggttcaaggctctcgacaagaatgcgcaggtctaaatccttatcctcaaactttcttgatgaaaggatgattcaagagttctgaagcagacatccgctccgcaggatccttttgtatgcaggaggagataaatgcacaaaattctggaaagaactggtccgctggtgcaaaaggtggt

SEQ ID NO: 419385 - DNA, 375 bp, Oryza sativa
atatacctctccttcctccctccctcgccgccgcgggctgcttcctccctccctcccgccgcgtcccgccattcccggctgattactcgagccgccgcggagcagatccgtgccgggataggcctctcgctcgcgcttcggtcccccgtctcttaccggcggataaaccctaaccggagaggaggaggagggggaggccatgagggggaagaagccgcacaaggagctcaagctctccgtgcctgcgcaggagacgcccgtcgacaagttcctgaccgcgagtggtacattcaaggatggtgaactgcggcttaatcaaagagggttgcagcttatatccgaggaaactgcagatgaacctcagtcaacaaacct

SEQ ID NO: 419386 - DNA, 402 bp, Oryza sativa
gacccacccaatttaaggcacatacattcagttcttttttttccaatggatcacatttttgttgacgatcagttcacaaactagtcacaatcacatcgttattacttctgcttcttcaagcattcatgtaacatcaaaacattacacacactggtttaaatacgccttgggaaaagtacaagaaatttactatcttttcaacacactgaagctcagttaattaacaaccctgcagtttttgcgaatttggccgtcgtcaccggtgagggggctgatgttgcccattttcaccatggatctgccaaaatcccaaaagaacttgggggcattggcgctgtaagtctccaccagctccttggtgttggcgatgccgtcgtcgctggagaagagaccctggtcgga

SEQ ID NO: 419387 - DNA, 446 bp, Oryza sativa
tatggcattaacttctgcgagagatggagtactcttacagctacaggttcatgcttgtatgctcagttcttgtactgtgccttaatactcggggtgcgagatgccagttatccgacgatttctacgactacatatgtcctgatgtgtacaccgttgtccagcagcatgtttatgctgccatgaggactgagatgaggatgggtgcctccctcctaaggctccatttccatgactgcttagtcaatgggtgtgacggttccatgcttctggacggagacgacggcgagaaatttgcacttaccaacaagaactctgtcagagggttcgaagtcattgacgcgataaaggaagatctcgagaacatctgccctgaagttgtttcctgcgccgacattgtagcccttgcagctggctatggagtactatctagtggaggcccttactat

SEQ ID NO: 419388 - DNA, 430 bp, Oryza sativa
gggtcaaaaagccatagcatggtatagcacatgtcaaaccatcagtaaattatggggataaaaaacaacataacaacctattactgatatgttatgaaatcatctttcttttttctaacttcttgccttttgtcccccagaaccaatagaaatctacctcgctaggtaccgccaatattcacagtcacttttacgaaatttcgttcaaacaggctcaagacacccaagagccttttgaaccctgctttttgatcagatgtcaacctggaagggaacctgatgttgaatttaatcttcagatctcccttcttattgggcccttttggatttggcatgccttctccagggaccacctccacatagtcaggatggatgactgaattaatgggcactgacagactttgcgcatcaagtgtaatgatacgtgcag

SEQ ID NO: 419389 - DNA, 476 bp, Oryza sativa
ctcgcggctcgacgcgttacccttttcacccgccgccggctgcgtctcccttcttgtcacccaccgtcacggtggcggtgcgaggggcacgaggctggggacaccacaaggcaggcacgattcgacaggccggcggagccaagcggagggcgccagcctcgttgtcgtcggcttcttccgccgcgcggaccggccgctgccggcgcagggaggcgcccccgccgccgccggcggcacagacaccgtctccgctgtgggagatgggggtcgactactacaaggtcctcggcgttgaccgttgcgccggggacgacgacctcaagaaggcctaccacaagctcgttatgcggtggcaccccgacaagaaccccaccaacaacaagaaggaggccgaggccaagttcaagcagatctccgaggcctacgaggtccttagtgatccccagaacgcacaatctatgatcaggtaggggaag

SEQ ID NO: 419390 - DNA, 420 bp, Oryza sativa
gggcaatgtatactcgcattccacaacagtcgaagggcaataataagtcttaacatccaaatttaaaccgaacagaaaatagagttttaaacgactgacatagtgcacaaagcgagcagatattaacggtcaatgcaacaactgaaatgaccgtcgacaaaacttaacgagtactaaaagagctagatatctcaaatgcagatatggaaagcaccacttgaacgaggctcatttcttcttggcggcagccttggtcaccttggcaccggttgggtccttcttctccacgttcttgatgacgccaacagccaccgtttgcctcatgtcccgcacggcaaaacgaccaagaggagggtactcagagaaggtctccacaaccatgggcttggtgggaatcatcttaaccataccagcatcacc

SEQ ID NO: 419391 - DNA, 480 bp, Oryza sativa
ttttagttgtcgccgcagcctcctctcggctgctcccatcctcttcttcgagttagcttcctccttattcaaccatgggtaaggagaagacgcacattaacattgtggtcattggccacgtcgactccggcaagtcgaccaccacgggccatctgatctacaagcttggaggtatcgacaagcgtgtgattgagaggttcgagaaggaagccagtgtgatgaacaagaggtccttcaagtacgcgtgggtgcttgataagctcaaggccgagcgtgagagaggtatcaccatccatatcgccctgtggaagttcgtgaccaccaagtactactgcacggacattgatgcccctggacaccgtgacttcatcaagaacatgatcacgggtacctcccaggctgactgtgccgcgctcatcaatgacttcaccactggtggctttgaggctggtctttccaggatggccagacccgtgagca

SEQ ID NO: 419392 - DNA, 521 bp, Oryza sativa
tatcggtttatcacaagataggattatcctccgttctcagtttgataagttcaacgtaatcataacgtcatatgatcttatacgcacggatattgattctcttgagaatgtcttttggaactattgtgtgctggatgaggggcacataataaagaactcaagatctaaaataacatctgctgtgaaacaattgaaagcacaacaccgtcttatcctcagcggtactccaattcagaataatgtattggagctctggtctctatttgactttcttatgcctggatttcttgggacagaaaaacagttccaagctacatatggaaaaccattgctagcagcaaaagatccaaaatgttcagcaaaggatgctgaagctggcattcttgctatggaggcactgcataaacaggtcatgccgtttctacttagaagaacaaggatgaagttttatctgatcttcctgagaagatatccaggatagatattgccatctcagtctattgcagctcagactttatgac

SEQ ID NO: 419393 - DNA, 377 bp, Oryza sativa
gggagaaagtcaaggttcgataaatattgcttcacttgtacaaagtacagataaaaatacattgatacatgacacggagagagccatgcacaccacttatttggacacacagagggcaaggctgcagagaaaatcaagcaacacaagctgaactcacggccccacctgtcagcctctcactggtcgaggccggagactcttgtgaaaaacagcaacaccacgcatgcagaagaagacaaattattacacacacaaatcgacgacacggcggccggcgacgtacggcgaggtcgtcgccgccgccggcgacgttgtgatgaggtcgatcagccgaagaggtggtgcttcttctcgccggtggactcctcggcgctctt

SEQ ID NO: 419394 - DNA, 389 bp, Oryza sativa
  unsure (1)..(389): unsure at all n locations
cttatggtcacttccaatacattttcctaattgncatcactagcttctagctaggcttattaattaattagccatggcggaagagaaacacccaccacacccggtccaacacaaggagggccaccaggccggccaccgagtaaacttctaccgggagggccgctatccactcgaaaccgtgaccaccgaagtgggcccccgcgggccagaccaataccagagggtcaagaaggaggagaagcagcacaagcacaagcaggaccttggggagggccggggcctctgcgccggcgcctttggcctgtatgagaagcaccaagcgaaaaaagaccccgaaaacgcgcacaggcacaagatcacggaggagatcgcggccacggcggcggtcg

SEQ ID NO: 419395 - DNA, 106 bp, Oryza sativa
tttttggttttttttttttttttttttgacaataaagttcagaactttaagagaaccgggtgatcagaatcatacaagccaagaatgagcaacttttaggatttcg

SEQ ID NO: 419396 - DNA, 86 bp, Oryza sativa
ttttccgttaaatcctaagagttgctcattcttggcttgtatgattctgatcacccggttctcttaaagttctgaactttattgtc

SEQ ID NO: 419397 - DNA, 439 bp, Oryza sativa; identical to SEQ ID NO: 394422

SEQ ID NO: 419398 - DNA, 409 bp, Oryza sativa
attttctcttcccctgctcccgtcgccatcgcaaaggagaaaaaaaaaagaggaggaaggaaggaaggatgagcgccacggcggtgtcgtcgctgaacccggacgcgccgctcttcatcccggcggcgttccggcaggtggaggacttctcgccgcagtggtgggacctcgtcaagaccaccgcctggttccgcgaccactggttccacgagcaccagcagctcgacgagatggccgactccctcgccctccacgacgccgccgccgacgacgacgacctcgccggcctcctccccgacgacgccttcgacgacgacgacgacgacgacctcttcttcgaccagacccataacctcctcgttcgatcccccgcagccgcccgccgctctcagactgatgcggtgctcag

SEQ ID NO: 419399 - DNA, 579 bp, Oryza sativa
  unsure (1)..(579): unsure at all n locations
aaagatgaaagccatgccccctgcgggccccgatcccgagttcgagccacgcggccgtttcgctttatcacaagataggagtatacgccggtctcagtctgattagaacaacgtactgatgacgtgaaacgaacggatacgcacggaacatagatactctggagaatggcttttggaactattgagtgctggaagaggggcacataatccagaactcaagatctaaaataacatctgctgtgaaacaattgaaagcacaacaccgtcttatcctcagcggtactccaattcagaataatgtattggagctctggtctctatttgactttcttatgcctggatttcttgggacagaaaaacagttccaagctacatatggaaaaccattgctagcagcaaaagatccaaaatgttcagcaaaggatgctgaagctggcattcttgctatggaggcactgcataaacaggtcatgccgtttctacttagaagaacaaggatgaagttntatctgatcttcctgagaagatatccaggatagatatngcaatctcagtctattgcagctcagactttatgac

SEQ ID NO: 419400 - DNA, 440 bp, Oryza sativa
ctctctcgtcgtcgagttttcgattccgccgcgggagatgatgaagcacttggtggagactgagaaggcggcggagaatgccgggccgacgtaccggaacgagctggccaaggacgccgggcgtctgcggccgtcgacgggggtctacagctgctggtacctctagcgtagatcggtggacaagtacccagacagtccggtgctggagcgacagagagtacgctacgacggcaaggcaggtgaatataagaggatgacttacacggaggaatatcacattgagaagaaacttgctgcctacattagcaagctcggaataatcaagggtgacagatgttacaaatacggtgcaaactgccctgaatggatcatcagcatggaggcttgggatgcacttagcgctataggcaagccgctctatgatagtcatggtgctggtg

SEQ ID NO: 419401 - DNA, 390 bp, Oryza sativa
ggggaactcttttttttctccttgctctctatttcatttcattccgatagatagcaacaagcagttcaaacaccataaccaaagcgaactcaattcatggtaacatcacggacgaagaacacctaacactggatggatggatagagggcttctcgactcgagagagccactggacacgataacgactcgactcgatgataagatgattctgacacggatagctaaggataactggccacgatgggccccaccaatcagttcctccagttcccgccggagtcgccgccgtagccgccgccacggttgccaccgtagccgccgccgccgccgtcacggtcgccgccgtagccgtcgacgccaccggagccgccctcacggagcccgtagccg

SEQ ID NO: 419402 - DNA, 422 bp, Oryza sativa
ttggtttttctagggcttagtgggttgagatggcggcgccggatgtcgagtaccgctgcttcgtcggcggcctcgcctgggccaccgacgaccgctccctcgaggccgccttctccacctacggcgagatcctcgactccaagatcatcaacgacagggagacggggaggtcacgtgggtttggcttcgtcaccttctcctccgagcagtcgatgcgcgacgccatcgagggcatgaacggcaaggagctcgacggccgcaacatcaccgtcaatgaggcccagtcccgccgctccggcggcggaggcggaggctacggcggcggccgtggcggctacggcggcggtcgtggaggcggcggctactgaggaggtggcggcggcggctcctggcgccgcgagggcggctacggtggctgcggc

SEQ ID NO: 419403 - DNA, 382 bp, Oryza sativa
ctgctctttactctaattttattgtttgagcaacgccttgctggccctgctatggtgcatccatctcaggcagttgctaaaggtccaaaatgggcagacttattcgaacctggagtgaagcatgctctgtttgttggcatagggatacaaatcctgcaacagtttgctggcattaatggagttgtgtactacactccacaaattcttgagcaagctggtgttggtgttcttcttgcaaacattggacttagctcctcatctgcatctattcttattagcggactgacaaccttgctgatgcttcccagcattggtattgctatgaggctcatggatatgtctggaagaaggtttcttgtgcttgcaacaatccctatcctga

SEQ ID NO: 419404 - DNA, 425 bp, Oryza sativa
gtttgggataaaagctctttaaatttacagaaggcaacagagatgaatttattgacgcttgtacactcagaacgacgaaacacgggctgatagcaaagctacaacaaacgaaaatgccaagaaaacgtgcatcaggaggcaggaggtccaaacatacattatccatctcctcaaaacgatactaccagatcaccagataccaaatcaccgtacaagacatgtacacaagaacgaacagggatcggagctggatggtgtagagaagcgctgaagcggtggcgcctacagaaagttcagcaccagggcccagacagggtagatgaagagcaagaggatgccaatgctgttggacactcccgtgcccttcctgaaggcgttcctgaatccacctgacgccctgatgtgctcttgaagcaggtagcatc

SEQ ID NO: 419405 - DNA, 436 bp, Oryza sativa
tgcggagttgacgaagcgagagagagagggagaggtggaggaggctagctagggttgcgagcgatctgcagcgtgggagatggggaaggggttcatgtcgtacctggcgatgaagacggacgcggcgggaggggaggcggcgcaggcggcgctgatcgacgccgacctgcaggagctgggcgtggcggcgcggaagctcgccaaccacgcgctcgtcctcggcggcggcctcgggttcggcaccaccttcctcaagtggctcgccttcttcgccgacgtgtacctcctgatattggataggacaaactggaagaccaacatgctgaccgctctcttggtcccttacattttctttacactgcctggtgggctgttctctctgctgaggggagaaattggaaaatggattgcgatcattgctgtcatccttcgtctc

SEQ ID NO: 419406 - DNA, 438 bp, Oryza sativa
tttttggtttttagcaatgtaaatactcgcattccaaaacagccgatggacaataatcggactcagagcatcagttttaaccgaacagaaataaacgagagtattaaacgactgacatagtgcacattgcgagcagatattaacggtccatgaaacgagagccatgcccgtgggcaaaacttaacaaatactagaactagatatctcaactgcagacatgcaaaccaccatttgaacgaggctcacttcttcttggcggcagccttggtcaccttggcaccggttgggtccttcttctccacgttcttgatgacgccaacagccaccgtttgcctcatgtcacgcaccgcaaaacgaccaagaggagggtactcagagaaggtctccacaaccatgggcttggtaggaatcatcttgaccataccagcatcaccggtc

SEQ ID NO: 419407 - DNA, 446 bp, Oryza sativa
cgccgcctcctcctcctttcgccttctcccgtcttctccttcgagttagctacctccttattcaaccatgggtaaggagaagacgcacatcaacatcgtggtcattggccacgtcgactccggcaagtcgaccaccacgggccatctgatttacaagcttggaggtatcgacaagcgtgtgatcgagaggttcgagaaggaagccgctgagatgaacaagaggtccttcaagtacgcgtgggtgctcgacaagctcaaggccgagcgtgagagaggtatcaccatcgatattgccctgtggaagttcgagaccaccaagtactactgcactgtcatcgatgcccctggtcaccgtgacttcatcaagaacatgatcacgggtacctcccaggctgactgtgccgtgctcatcattgactccaccactggtggctttgaggctggta

SEQ ID NO: 419408 - DNA, 480 bp, Oryza sativa
gatcactggggagttttagttatggtcgtagtggtcgtcttcacaatatatgatttgacattgctgcttcttacctctggtagagatcctggtatagtaccacgtaatactcacccacctgagcctgaatcgattgatggaggcagtgatatgggaaatggacagactccacaacaactacgtttaccacgcacgaaggatgttttcgttaatggagtaattgtgaaggtcaaatactgtgatacctgcatgctgtaccggccacctcgatgctctcactgttctatatgtaataactgtgtggagcgttttgatcatcactgcccttgggttgggcaatgcattggaaggcgaaattaccgattctttacatgtttgtattctcaaccacattgctaggcctctatgtctttggctactgctgggtgtacattgttaaaataagagatgctgaacattcaacgatatggaaagcaatgt

SEQ ID NO: 419409 - DNA, 379 bp, Oryza sativa
ccaagatgttttagctgtagataccatcctcctttggttccgcaagggttcaaacccaaagggcaggcaatctttcgtcaaagcactggaaccttttgttaaatggctggaggaggccgaggaggaggaataaatggtgctactggaggctgtgcgaatgtattgtttgaatatttccttatatcccaagtttccagctaaagttatgtatcttttgctcccttgatactgggccgaccattttatgatcacatgctgatcctaatagtctactgaatgttaaaatcccatgcaagaagttattccaggatttgctaaattattggttgttacacaccaaaaactctaacttgagcatcgttaaaagcccaacttttcc

SEQ ID NO: 419410 - DNA, 405 bp, Oryza sativa
ttcgctcgctgtctcgcgtcagcggcggagctctctagaaggagcagaggagtcccccccaagcgatcgattcgatcccctccgccgccgatcgcctcgccgaagtctccgagaaacacttgagggatggctgaagaggatatccagcctattgtctgtgacaatggcactggaatggtcaaggccggttttgctggtgatgatgcacccagggctgtctttcctagcattgtaggcaggccacgccacactggtgtcatggctggtatgggccagaaggatgcctatgtgggtgatgaagctcagtcgaaaagaggtatactgacattgaaatacccaatcgagcatggtattgtcaacaactgggatgacatggagaagatatggcaccacaccttctaccat

SEQ ID NO: 419411 - DNA, 432 bp, Oryza sativa
  unsure (1)..(432): unsure at all n locations
ttttgtttttttttttgggcaaaacagatgttccgtccacaaaagagcatagttcatgtgaaacaaatgtctgtttgacatgtccaattattagccaagatttcatcaacacaacaaatgcacagcgagtgctttaagagtgagttcctcgtagcaattttttttgggtattctggttcaaaaggccttatgcatggcccaaaagacatgatggcatctttggtagngctgcggcaagccccttggatttcatcaatcttcacgacgcagctcgccggtggcaggaggcatccatttcccggaattatagacactttggccgaccttccatccagggacatctttcataattatttcctcccacataagagactttgtccactctttgacaaatctttcatcttcttcagcttggagcactggcactaaagc

SEQ ID NO: 419412 - DNA, 442 bp, Oryza sativa
  unsure (1)..(442): unsure at all n locations
tccacgcgtccgcttctcgctggtgtcgaggagattccccaaaaacttggcccccatttctttcgcatcgtcgtctcgccttgccccgtccactaaccctagcggcaactgcgatctccaaccgctcgatctctcgccggaggctccagatctgcgggaggtagtcgacctcgtcgccggcggtggggtttccgaatcgggggcgaagatgacggaagcgtgggtgcggcacaagcccgggatggcgagcgtcaaggacatgccggtgctgcaggacgggccgccgccgggcggcttcgcgcccgtgcgctacgcgcgccngatccccaccaaggggcccagcgccatcgccatcttcctcactaccttgggcgccttcgcctgggggatgtaccaggttggccaggggaacaaggtccgccgtgcactcaaagaggagaaa

SEQ ID NO: 419413 - DNA, 415 bp, Oryza sativa
ttttgggggaactattttttttctccttgttttctatttcatttcattccgatagatagcaacaagcagttcaaacaccataaccaaagcgaactcaattcatggtaacatcacggacgaagaacacctaacactggatggatggatagagggcttctcgactcgagagagccactggacacgataacgactcgactcgatgataagatgattctgacacggatagctaaggataactggccacgatgggccccaccaatcagttcctccagttcccgccggagtcgccgccgtagccgccgccacggctgccaccgtagccgccgccgccgccgccacggccgccgccgtagccgccggcgccaccgtagccgccctcacggcgcccgtagccggcggcggcaccttcttcgta

SEQ ID NO: 419414 - DNA, 338 bp, Oryza sativa
gttggctacttctccctttctttaccttttcctcctcggttcggttccgtggttcgactagggtttagtgggttgagatggcggcgccggatgtcgagtaccgcatgcttcgtcggcggactcgactgggccaccgacgaccgttccctcgaggccgccttcttcacctacggcgagatcctcgactccaagatcatcaacgacagggagacggggaggtcacgtgggcttggctgtcgcaccttctgctccgagccgacgatgcgcgacgccatcgaaggcatgaacggcaaggagctcgacggccgcaacatcaccgttaatgaggcccagacccg

SEQ ID NO: 419415 - DNA, 414 bp, Oryza sativa
gaaaataaagacttcgcgaccttatatttgccttccaggaagcccaaaattctacccaatagtgaatataccacaaagctatttatagtctaatggttacaggccttgcaacctaagctaactgattgccttattttccatctgtcccactaactgagcatgcaatcttacagaaaatgcaatggcaaaagaaaaaaaaggagcgaaaatagatatcatctgtctcatgccttctgttctgtggtcaaatcaccccatctgacgttgtactttgctgcaaggtagtgagcccctacaggaccgcggcttccataagggtatagctcaggggctatccgcttctcttccagctccttgagtaagggagtgaagagcttccatgcgggatccaactcatcagaacggataaaaagc

SEQ ID NO: 419416 - DNA, 416 bp, Oryza sativa
ttaacctgtctgtccttcgcttctcaaatcttgtttttgaacctctatggtcaaggcagtatataaggaatgtgcagctgatattctcaaaggaattcggcactgaaggacgaggagggtactttgataggtatggaattatccgtgacataatgcagaatcatcttcttcagatactagccctatttgcaatggaaactcctgttagctgggaggcagaggacataagaaacgaaaaggttaaggttctgcgttccatgaagcccttgcaactgaaagaagtggtgatgggacagtacaaaagtcatacaaggggtggtaccacataccctggatacactgaagataagacggtgcccaaggatagtgaaaccccaacattgctgcagctgcacttttcataaataatgctagat

SEQ ID NO: 419417 - DNA, 438 bp, Oryza sativa
tttttgggtttggtaggtaaatttctcctcaatttgccatcgaaggcatcagtttttcagtaccctctgtgattagcacactaaaaaaaagcatgtctggctttgatttattttgttttggtctacacgatgatgctatcatggggacaaaaaaaaagaaggcctggggaaaatccatcaggcttgtatagaactccccatctgttcaatggtgaatggcaattcagtcgcggtacgctgccatgaagccctcatggaatgccttgaagcgggagatgatcgcggggatcttctcctcctgtggcaggattgtgcatctgatgtgccatgtgccaggaacttggccaaatccagatccagggacaacaacaattccggttgcctcgaggagacgaagggcatagaaagcatcaggtgctttgttagcagctttagcag

SEQ ID NO: 419418 - DNA, 540 bp, Oryza sativa
  unsure (1)..(540): unsure at all n locations
ctttcaagaagatagcgtgatccatgggatacaacgaggatgatctccctttagtatcatttcaatctgtttctaagggatattatggtgaatgtggcaaaagaggaggctacatggagattactggcttcagtgctccagttagagagcagatctacaaagtggcgtcagtgaacttatgttccaatatcactggccagatccttgccagcctcgtcatgaatccaccaaaggctggagatgcatcatatgcttcatacaaggcagagaaagatggaatcctccaatcattagctcgccgtgcaaaggcattggagaatgctttcaacagtcttgagggaattacatgcaacaaaactgaaggagcaatgtacctcttccctcagcttagtctgccacaaaaggcaattgacgctgctaaagctgctaacaaagcacctgatgctttctatgcccttcgtctcctcgaggcaaccggaattgtngttgaccctggatctggattnggccagttcgctgcacatggcacatcagatgcac

SEQ ID NO: 419419 - DNA, 430 bp, Oryza sativa
acaccaatacaaatatctcacatatatttcagaaaaaaaacaacaaacatatatctcacgtacaaacaaagctcctcgtcttcaagagcgaagcctgagttattcacacgatgcatatatatgtatatatagcacaaactaattaacggcaaatactccatccgtttcacaatgtaagtcattttagcattttcaacattcatattgatattaatgaatttagacatatatatctatctagttttattaacattaatatgaatgtgaaaaaaatactaaaatgacttacattgtaaaacagaggaattagcatacatagcgagaatctgtaccgtaaaccacgcagcaacacgtacgtatatgtgtgtgttcttaacacacatgtataataaacttaatcatgtactacgtccatttcatcttaattaaa

SEQ ID NO: 419420 - DNA, 392 bp, Oryza sativa
ttttgggaatatcttcaaaatggagctcttgccacagcagatgcagtaatttacaaacaaggcattttcctagttatctctagcagcagccatggcgctaattcacgagacaatttgaccaactcagcgagggctcagtaagcaaaggctcaagagagagagaaaaaaaattggaattagaatgtctggacagatatggtagtagtatacatagtagatacacgggctgaaaaaaaaaaatctcttcttcaatctcagttctgggacttctccaccttcgccttgatcttctgctcaatgatcgccttctcggtgtcgaggctgaacatcctgttgagggcgtgcatgttctccagcgtcttatctagggtgccgttgacgctgccgtcaca

SEQ ID NO: 419421 - DNA, 484 bp, Oryza sativa
ccaatccccgtatcactatatccacacaagcttcgcagctcgcgcgccgcgggaggggagggagaaaagctcgcccccgagatttttctcctctcctctctgctcgtgtttcttggattggtccatatatccacggttcttgggggcgcggcgcgccgccattgatctggttttggttttgtgaggaggagaagctgcggtggtgctggtgctggtgctttcttgatctgatgatggcgagcacgacgtcagcgacggccgccgggggcgcgttcgccgccgcgaagacgcgggcggggtcgtcggcggcgggcggcggcgcgtgcgcgagggtcgccgccggcgggcggaggcggtccggcgtggtgctgcggtgcgacgccggcgtggaggcgcaggcccaggcgcaggcggtggccaaggccgccagcgtcgccgcgctcgagcagatcaagatcttcgccgccggtacatgaaggaaaga

SEQ ID NO: 419422 - DNA, 406 bp, Oryza sativa
ttttggggcggtactagaaaagttcaagaatctcaaatcaatttatgaaatcaaactacacacataatgttcttgactccccacgtacttacggaataattatattggcatacacaaaaaccggagctaatcagaggagatacacccatagacaagccatcagacccaacaatttttttgtccatgaaacagccagctaatgctaatagacaaggggttactcatgaaagatacagcttggccacatctagaagcacttcctgtggacgatagctgggccagattcttgatactcagcccttgagatccacatctgctggaaggtgctcagagatgcaaggattgatcctccaatccagacactgtactatctctctggcggagcgacaaccttgatcttcatgct

SEQ ID NO: 419423 - DNA, 497 bp, Oryza sativa
tggacgcgtgggctcctcttctttagatcagttaaaataaatggctgacgcagaggacattcagccccttgtctgtgacaatggaaccggaatggtcaaggctgggtttgctggagatgatgctccccgtgctgttttcccgagtattgatggccgtccgcgacatacaggcgttatggttgggatgggacaaaaagatgcttatgtcggtgatgaggcccaatccaagaggggtatcctaaccttgaaataccccattgagcatggaattgtcagcaactgggatgacatggagaaaatttggcactcacacattctacaatgagcttcgtgtagcaccagaagagcatccaattcttcttacggaggctccacttaaccctaaggccaacagggagaagatgacacaaattatgtttgagacattcagcgttccagccatgtatgtcgctattcaagccgtgctttccttctatgctagtggacgtactactggt

SEQ ID NO: 419424 - DNA, 450 bp, Oryza sativa
ttgcaaggagccttatccatccacctgtgaagaagccatccaagcttggtgaaaacttaacgagtcttgctgcagtagtggagaatgagcacaagcgtcttcttgcgaggaaatcaattattgaaaaacgcaaagaagatcttgagcgccaaatattggaaaaggaaaaggaagaagaaaaaaagagattgagtgttctcaagaaatctgcagaagatgaaaggataaggcttctcaatgatgtaaaattgagggaacaggagaggatccgtcgacaattggttgaaaaagaaaagatagaggcagaagaactgcttcagaaacagataaaggagatagcaaagagaggaggaaaaaaacctgtccttcagggggaagttactaaggaggctgtgatggaattggctatgaatgagcagtttaaggagcgctcagagatggagacaaaac

SEQ ID NO: 419425 - DNA, 494 bp, Oryza sativa
ttaagggtgggtggaggtatctacaccaaggcggctgacgtcggtgctgatcttgttggcaaagttgaaaggaacatccctgaagatgatcctcggaaccctgctgtgattgctgacaatgttggagacaacgttggtgatattgctggaatgggatcagatctgttcgggtcgtacgctgaatcttcctgtgctgccctagttgttgcttccatttcttcctttgggatcaaccatgatttcactgggatgtgctacccgctgctggtcagctccatgggcatcattgtctgcttgatcaccactctctttgccactgacttcttcgagatcaaggccgtgaaagaaatcgaaccgtcactaaagaagcagctcatcatttctacggctctgatgactgatggtattgcactggacagtatggtggcgctcccatacaaattcaccatcttcaatattggtgaacagaaggaagatactaactgggggatgtc

SEQ ID NO: 419426 - DNA, 354 bp, Oryza sativa
ttgagcaagaagctcatctactcctcctctcgcatgggagacatggccaccatcgcgtccagcctcctcaagacctgcttcggtggcgcgcgcctccccggcggcgacagaaaccccaccgtgtgcgtcgcgccgcgcaccggaggcgccatctggaactccatctcagcgtcgtcgtgcactcccccctacgacctcaacgccgtcaggttcagcctcatcaaggagtccatccagtcccgcgagatgacccggcggtacatgaccgacatgagcacctacgccgacaccgacgtgtgcatactcggcgccggctccgcggggctcttctgcgagtacgagctctccaaggac

SEQ ID NO: 419427 - DNA, 407 bp, Oryza sativa
caatcctctgcttccttttcggtttcctccttcctcaccatggcgctcgcgctgcgctgccccgccgctgcctcgccgacgccagccaagagcaccttcccgccctcctcctccccgtcggcgaggaggctcccgaggaggccgcccgccagctgcaggtgctactactacggcgacggcggcggcttacgcaagaactacgaccacatccccaagcagttccgcgaggagaacctcaaagatggcctgatggataatcacaagaatgttcctcaagtcctttatggcttaagccctgctcagatcgaaatgtacatgaacgatgatcattcatatgagcggccatcacagagagctacagaggacagcctttctgcttctaggagctatgatgaatttggcatgta

SEQ ID NO: 419428 - DNA, 446 bp, Oryza sativa
  unsure (1)..(446): unsure at all n locations
tgtgagtttcccggattacccggactcggagttcaggaaggtgttccgcatgtccaaggccacgttcgaggtggtctgcgacgagctcgccgccgccgtcgccaaggaggacaccatgctccgcgccgccatcccggtgcgcaggcgcgtcgccgtctgcgtctggcgcctcgccacgggggagcccctgaggctggtgtccaagcgcttcggcctcgggatctccacctgccacaagctcgtgctcgaggtctgcgccgcgctcaaggccatggtgatgcccaaggtggtgcgctggcccgaggccggcgacgcggcagccatcgccgcgcacttagaagtcatctccgggatctccggtcgtggtcgcgcgatctacaccacccacgtactgatcatcgcgcccaagtccaacgttgactcctactacaaccgncgacacacgg

SEQ ID NO: 419429 - DNA, 514 bp, Oryza sativa
cgcgctcgctgtctcgtgtcagttgcggagctctctagaaggagcagaggagtcccccccaagcgatcgattcgatcccctccgccgccgatcgcctcgccgaagtctccgagaaacacttgagggatggctgaagaggatatccagcctattgtctgtgacaatggcactggaatggtcaaggccggatttgctggcgatgatgcacccagagctgtctttcctagcattgtaggcaggccacgccacactggtgtcatggttggtatgggccagaaggatgcctatgtgggtgatgaagctcattcgaaaagaggcatactgacgtcgcgataccgacactagcatggtattgtcaacaactgggatgacatggagaagatatggcaccacaccttctacaatgagctccgtgtggctcctgaagagcatcctgcatagttgaccgaggctcctatgaaccccaggcaaacagagagaagatgacccagatcatgttcgagaccttcaactg

SEQ ID NO: 419430 - DNA, 429 bp, Oryza sativa
  unsure (1)..(429): unsure at all n locations
ttcaaactcgacgcgccactcgacagcgaccccgcagccgatccatcccgccgacgaagcagcagcaaccgccacggtgcgccgccgccgccggtaccgatgtcgacgagctccggcgccgactcgtccccgcccgtctcgggcctcgactacgacgacaccgccctcaccctcgccctccccggctcctctcctnnctcctcctcctccaccgacgaccccgaacgcaagcgcgccgcccacgccgaccacgccgacgccaagccgccttccccaaaggcgcgggctggtggggtggccgccggtgagggcgtacaggcggaacgcgctgcgggaggacgccgcgagggcgaagctggtcaaggtggccgtggacggcgcgccgtacctgcgcaaggtggacctcgcggcgcacgccggctacgcgcc

SEQ ID NO: 419431 - DNA, 418 bp, Oryza sativa
  unsure (1)..(418): unsure at all n locations
aatctaacatacgcaaactgatattatcacaatgttagccgatgacaatggaaagagtaatctaggtacaagcggatcattgacggtggagacaagacattggctgcaccacaacacccaccagtggcgccaacaaggagcgctatccgttataggacgagagaaaaagtaaaacatcacgatgtgaagtgaaactgaataattctagtagacgatgatgatgatggataggctccttaggacgcccgccgcccttagcgtcttgctgctcccatcttgtccactggaaggctcactcgtcatcgtcttcatcctcttcgctgccctcgtcgtcatcctcatcattgacctcggacttggacttgtcagattcctcctcgtcgncctcctcttcctccttggcgggtgccttcttggc

SEQ ID NO: 419432 - DNA, 500 bp, Oryza sativa
  unsure (1)..(500): unsure at all n locations
gtgggtgtgttcctgtctcccctctccttcctcctctcctttcccctcctctcttcccccctctcacaagagagagagcgccagactctccccaggtgaggattcagccatgaagggggccaaatccaagggcgccgccaagcccgacgccaagttggctgtgaagagtaagggcgcggagaagcccgccgccaagggcaggaaggggaaggccggcaaggaccccaacaagcccaagagggctccctccgctttcttcgtttttatggaggagttccgtaaggagttcaaggagaagaaccccaagaataaatctgtcgctgctgtaggaaaagcagccggtgataggtggaaatccctgaccgaagcggacaaggctccctatgtagccaaggccaacaagctcaaggccgagtacaacaaggccattgctgcctaccacaagggcgagagcactgncaagaggcacccgccaggaggaagagaggacgaccaggaga

SEQ ID NO: 419433 - DNA, 422 bp, Oryza sativa
aggatcaaaacatttctattaccacaactttttaaggatggaattgagtagcaatactttcaccccaaaatacagtttagcgacaatatcttagaaaagccgcttgctttgccgccatggctggcaagctgagcagagcagctaacacaaagaacacgagatcactataaaccaaacggcaacgaacgaagaaaatacagggtcttttttgtctgaagatacacgaagcggttcgttttcttttatttttagtctcctctcctcctcgatgatgggtgtatggcaatggcaatggcgatgggatcttggcttagttgatgggaaggggctcgccgttccactccttgaggcagtcgagcatggggtcgatgagcttgccctggctgatgccgaggaacaccttgttgcactcctcgccgggg

SEQ ID NO: 419434 - DNA, 386 bp, Oryza sativa
ttagtatcgaatcctctcttctcctcgtgcccaccaccaccaccgtagcaatggcgggcaacgggccgatcaacaaggaggacccgctcaactggggcgcggcggcggccgagatggccggcagccacctcgacgaggtgaagcgcatggtggcgcagttccgcgagccgctggtcaagatccagggcgccaccctccgcgtcggccaggtggccgccgtcgcccaggccaaggacgccgccggcgtcgccgtcgagctcgacgaggaggcccgcccccgcgtcaaggccagcagcgagtggatcctcaactgcatcgcccacggcggcgacatctacggcgtcaccaccggcttcggcggcaccttccaccgacgcaccaaggac

SEQ ID NO: 419435 - DNA, 463 bp, Oryza sativa
ttgccttcacctccctgctcagctcagcagctcagggacttcgaggatgatggaatccaaagcagccatgatggtgaccatcctgctctgctgctcctccatctcaccggcgttcgcgcagaagcacaagggtccgcccgccgcggcggccgtgagcctcccgccgtcgccggcgccgtccccggcggcgccgcgccacgtggacctcgccgacctcctgagcgtggcgggtccgttccacacgttcctcgacctcctggagaagacggacgtgctcaggacgttccagagccaggcgaacggcagcaaggacgggatcacggtgttcgtccccaaggacgcggcgttcgcgtcgctggcgaggtcggcgacggcgaacctcacctccgaccagctcaagtcgctggcgctgtaccacgcgctgccgaggtactactccctcgctgagttcaacaggctgggc

SEQ ID NO: 419436 - DNA, 528 bp, Oryza sativa
gtcgtcgcgcctcgactgcttttgctcccctctcccccaccgcctcctccggccgccgccgccgccgctgccgccgcccgacgacgtagtcaggggggctcgtcaggagtaaggagggagatggggctgagggagaagaagcggaaccagaggcgcgtgctcgcccggcgctcggccgctccccgctccggggagggcaaggacttcctgccgctggaagaaaggcctgggaagaagagggcccgggaggagcagcccgaggagccggagaacacgtccaccgtcctctacatcgggcacatcccccatgggttctatgaggaacagatgcaaggtttctttcagcaatttggaactgttaaaaggttgaggattgcccgaaaccgcaagacaggaaagtccaagcattatgggttcattgagtttgagaaccctgaggtagcaaagattgtggcagatgagataaacaactacctgctgtttgagcacactctgcaaattgcgattggtccacctgagaaaattcat

SEQ ID NO: 419437 - DNA, 436 bp, Oryza sativa
tggtgaggtgagccctgggtgcagaggagggcgacgtggatggcccggagcacctccgccctgttgaattctctgagatttgggtctacaatgcccagagggttgttgttctcgtacagctcccaggcccattcgaaaatgtaaatcttatcttcttcaagtgtatcatcgtagttcggccgtccagctaaagtctccaataagaccacgccaaatgcaaagacatcaactttctcagtcatatgacctctcatggcatactcaggtgcaagataaccgaatgtaccagcaactttcgtgctgacatgcgtcttcttgtcatcataaagtttggctagcccaaaatctgagatcttaggattgagattggcgtcaagtaagacattgctggccttgatgtccctgtgcacgacaccgatgctggactcttcatgaa

SEQ ID NO: 419438 - DNA, 485 bp, Oryza sativa
ttacgatatcatccatctcacccgtcgacaccgcctccgttcacagcttctattctcccagaaacggacaagagggggaggaggcgagcagaaggctcaaggagggagaccatgcgggtgatgagccatctcctcctccatggaggagagctcctgctgcttcatgcagcggcggctggtcaggctcagctgggtagcaaccaagactgatccgactgaagcggaggcgctgaacgcggagtacgcgaagctcgggcagcacgcgtcgttgacaacggcgacatggaacattagcggcgacccctgcaccggcgccgacacggacggaaccgctatccacgacaaccccaacttcaacccggccatcaagtgcgactgcacctttcagaacaacaccgtctgccggatcaccaagctgaaaatatatgccttagatgtgcctggcacgataccacatgagctgcggaacctcacgcgcttgaccc

SEQ ID NO: 419439 - DNA, 492 bp, Oryza sativa
gttgacgtttagcttagctagctaaaaagtaagtagccgtgcgaagtcgtcggcggtgatcagccggcgatgacgacgtacagggtgtgctgcttcctgcggcggttcagggcggcgtcgaacgagccgtcggaggagctcggcgacgagttccaggcgtacgccgacggcggcggcggcgtgatgggggaggaggcgctgaggcggttcctccgggcggtgcatggggaggccgccggcggcggcgacgacgagctggaggcgacggcgagggaggtgattgccttcgcggcggagcagaggctgctcaggaagggcggcgccgctgccgccggcggcgggctcaccgtcgagggcttccaccgctggctgtgcagcgacgccaacgctgcactggatcctcagaaacgggtatatcaagacatgggattgcctttgcacactacttctctacacggggcacaacttatacctgacggggaaccagctgag

SEQ ID NO: 419440 - DNA, 488 bp, Oryza sativa
  unsure (1)..(488): unsure at all n locations
tcctctcgccggagttttcgcggccctagccatcgaccggcggcggcggcggcggcggtagccgtgggatggacgaattcggcggcggatccgtcgggccgttctccaagaagccgaggcacctgtcccggtcgctgacgtaccaccaccaccaccacccctaccagggccaggggcgctcgccgtcgttcaacgcgcggcgccagcatcatccgcagcagcaggaccacgcggtggtgctgtacacgacgtcgctccgcggggtgcgccgcacgttcgcggactgcgccgcggtgcgcgccgtgctgcgcgggctccgggtggcggtggacgagcgggacgtgtccatggacgcctcgctgcggcgggagctccagtcgctgctcgcggcgcggggccgccccttctccctcccgcagctcctcgtcggggcccgcctcgtggngggagccgacgaggtgcggcagctgcacgaggcccgcgagctg

SEQ ID NO: 419441 - DNA, 355 bp, Oryza sativa
tttttgggggatcaagcttgatttttcatggcaggaagcaaatcacaggatcctaaaacgactgaaacaccctaatacaaagctggcagaaacttacacggatcaaatactgacagaaagggaaaagaagagaaaaaaaggcgaaaagcgcgacaagcatcgactcctaaggttgaaggtggcatcctagttgtcgacgacgagcttccgccgcttgaagttgaccatcaccttgtccttgatgccgacgaccatggctttccagttggtctccgggaagggggagaccagctcgaactcaaagttcctcagcaggtgagtccatatggccttgatctgtaagtaggcgaagggc

SEQ ID NO: 419442 - DNA, 488 bp, Oryza sativa
caaagagttcgacatcttgaagggccacatcgtcgcgacatctccagccttcgccaacaggctccctcacatcttcaagaaccccgactcatacgaccccgaccgctacgcaccaggcagggaggaggacaaggcagcgggcgccttctcgtacatctcctttggtggcggcaggcacggttgcctcggtgagcccttcgcctacctacagatcaaggccatatggactcacctgctgaggaactttgagttcgagctggtctcccccttcccggagaccaactggaaagccatggtcgtcggcatcaaggacgaggtgatggtcaacttcaagcggcggaagctcgtcgtcgacaactaggatgccaccttcaaccttaagagtcgatgcttgtcgcgctattcgcctttatttctcttcttttccctttctgtcagtatttgatccgtgtaagtttctgccagctttgtatagggtgtttcagtcg

SEQ ID NO: 419443 - DNA, 431 bp, Oryza sativa
gggctacagaatcaaacagattcataccaataggttgaaacaaactccatacacaagtcagtgcaattatcaggctttcagtatcatggttagatgactcacatgaggcaacacaaccagtcaaacacaggtagcacacacatcaaacattgctaaaacaccacagcataggttcttcattacaagtaacctgtaatacgttccccatccttttattaccatgctccccccctttgaatctaacaaggcagtagcccagaggcacaatggcaaactcttttgctctacctggggatcaatcagttgggaggaactctgacagcaaacagagcatgcaccattttctctttttttttattagctttttaatttgggaggggcatgcactgccaaacttatgcacaggacacctgtgcttcctgctcatgcac

SEQ ID NO: 419444 - DNA, 467 bp, Oryza sativa
tgtacgtttccgtttacccccaccgacgagaggcggagagggaggggagctagggtttttcggggcggggatggcgcggagggggagagtgcagctgaggcggatcgaggacaaggcgagccggcaggtgcggttctccaagaggagggcggggctgttcaagaaggcgttcgagctcgccctgctctgcgacgcggaggtggcgctcctcgtcttctcccccgccggcaagctctacgagtactcctcctccagcattgaagatacctatgatcgctatcagcaattcgctggagccaggagagacctgaacgaaggaagtacaagcatcaacagtgatgaaaatgcaagtatacactacaggcttagggacataacggcctggtctctccaaaacaatgctgacgagtcggatgctaatcagctagagaaactggagaaactgctgacaaatgctttgagggata

SEQ ID NO: 419445 - DNA, 423 bp, Oryza sativa
tttttggacaccaacaagcagatgttattaacataggaaagctccattagatcctgttgacatgcacgggaacatctatattccagaagagattacttgggctgtgcaactcacacaagattgaatcgaataacacagaatcttaaagcctaggaacttctgggggcacacagaccctatgagctggtactaatgaatacattgagattgcctgtttcttcatcctcccttgcttcctacctcgatccatgttgtaatcatctacattgctttaattgcagacggttgccatgggctcagtgatgcaacagtggaagcgtgctttacggacattgctgagaatcttcatttttgcactatcaagcatacggacgatatcagtcaatgcggggcgaacttcagggttcgcatcccaacaaagag

SEQ ID NO: 419446 - DNA, 275 bp, Oryza sativa
gggaagcacaggtagattatattaagaagcctggcacgcatgaggagatggagcaggagtacatgatgagatcaccatgatgatagatgatccatccaagctaggttgggatccatgcaacattgatggacacacgcacacactgacaaggcacgacgacggctataactagcgcgtcagagcaaaaggcaaggcgcttgcctacattatgaagctgggtatctaagtgcaaggcaaaattaagggccttcgatcaaaggctctgaatcgacagt

SEQ ID NO: 419447 - DNA, 440 bp, Oryza sativa
ggtcccggttccgggttcccggcacgcgcccgtttttcttttgctcaaacagcagcaacagccagcgccggcttgcttagataagggcttcgccctcccaagaagaagaagatgtcttgctgcggcggcagctgctgctgctgcagcggctgacaatgcggcggctgctgctgcggatgcaagatgatccctgctgtggaggccacagtcactaccaagaccttggtgctcgctgctccatccaacaaggcgagctctggaggaatggacatggcagtggccagccgccagaacggaggctgcggctgcaacacctgcaagtgcggcacccgctgcaacggctgctactgctgctactgcaactgactctatcgtcgtctactcccgactgcctgaggatatatcgtatggatgctgctactgtcgatcagagctttgat

SEQ ID NO: 419448 - DNA, 490 bp, Oryza sativa
gtgagcgccaccaccaccctctccacctccgccaccaccaaaatccgcgcggcgccgccccaaaaccctaatccgcgcggcccaccgcatcccgcggcgctcagatctagggcatcccccggcgatggcggaggcaagggcgacgaggcggcgggcggaggaggcggagatggaggcggaggcggggacggagggggacgacggcgacggtggcggcagcagcgactacacgtcggaggacgagggcacggaggactaccgccggggagggtaccacgccgtccgcgtcggggactcgttcaagcagggcgcctacgtcgtgcagtccaagctcggatggggccacttctccaccgtctggctcgcctgggacaccggccactccagatatgtggcgctgaaggtgcagaagagtgcacagcactacacagaggcggccatggatgagatcaagatcttgaagcagattgccgatggtgatcctgatgac

SEQ ID NO: 419449 - DNA, 458 bp, Oryza sativa
tttgggcgccctcttttttttttttgggacacaacctgtttggttttaattaagtcacatagttaacgactgatgcatgcatgacacgtctcaaaagatcatcttggtagtgacaatgtatgaacttggggttgaactttcttcttcctttgttggctaaaaaaaaaacttttgcagtaactggtttcatcatgtgtgcctatgagtagaacttgaacttgcagccacatgagattactatgatgaacatgtaatctaccagtagaacttgtatgtcttggcatctatgatgatctgccggagtcctccgattggtgacaggatcatgagcatcactccaagaatgatgcagatccagttggtgaaccatgagagactgaaccttcttggcttgtagattgcttgccacatgatgcagggaaggaagtaagtagttggcgcgaaagctaattcaccga

SEQ ID NO: 419450 - DNA, 397 bp, Oryza sativa
atgttcttgtttttctttttgttcttgttgctctgatcctccatcgctgcctactaagaagacgtatacgatggacgacgagatcaggtgatcatggggactcaggtggcagataactacccaccggccaaggatggccggagcgcgcaggagaaggcgatcgacgactggcttcccatcacgtcgtccaggaacgccaagtggtggtactccgccttccacaatgtcaccgccatggtcggcgccggcgtcctcagcctgccctacgccatgtacgagctcggctggggacctggcatcgcggtgctgatcctgtcatggatcatcacgctctacacgctgtggcagatggtggagatgcacgagatggtgcccgggaagcggttcgacaggtacc

SEQ ID NO: 419451 - DNA, 367 bp, Oryza sativa
tctggcgtggtccaccgctgcacgtcgcgcgccaccggcgaggccttcgccgtcaagtccgtcgaccgctcgcagctggccgacgacctcgaccgggagctcgcggagctcgagcccaagctggcccagctggccgccgcgggcaacccgggcgtcgtccaggtgcacgccgtgtacgaggacgacgcgtggacgcacatggtcatggacctctgctccggccccgacctgctcgactggatccgcctccgccgcggcgcgcccgtcccggagcccgtcgccgccgccgtcgtcgcgcagctcgcggaggcgctcgcgcactgccaccgccgtggggtcgcccaccgcgacgtcaagcccgacaaca

SEQ ID NO: 419452 - DNA, 392 bp, Oryza sativa
ttgcaattaaaatatttcaacgtgctgtaaaggcactccctgattcaggagtactaaagtatgcctttgctgaactggaagagtctagaggagcaattcagcctgctaaagcaatatatgagtctcttatagctgagaatgcgggaatgacttcacttgcacatattcagtttattcgatttctaaggagaactgaaggcattgaagcagctcgtaagtactttctggatgctcggaaattgccaggctgcacttatcatgtctatgttgcttacgctacaatggcattttgccttgacaaggatgcaaaggttgtgaaaggaattatcttgatgtttttttaatataaaaaatgcaaacatggtttttagggtatttatactgttttattt

SEQ ID NO: 419453 - DNA, 396 bp, Oryza sativa
tttcgtttaagaaaaagttagatcacaggagagctgagagctcaaagagttgggaagccatggcgggagggcagctcaacgtgctgagcacgctcgaccaggcgaagacgcaatggtaccacttcatggcgatcgacatcgccggcatgggcttctttaccgacgcctactacctcttctgcattaccctagtgaccaagctgctcggccgtatgtactacaccgacgattccaaggacacccccggcgcgctcccgcccaacatgaaagccgtcgtcaccggcgtcgcgctctgcggcacgctgcgcggccagctatacttaggatggctcgttgacaagctcggacgcaagagcgtgtatggactgacgctgattctgatggtcgtgtgctcgg

SEQ ID NO: 419454 - DNA, 407 bp, Oryza sativa
gaaaaaggaaaataaaatccccaatccaaaacacactccgcccctccgatccccccctctctcaaaccctagctccccccctccccaccaccaatcccccacgcgattcgccggatgcgcccgcccgacgcggcctaggcccctgcggttcaccggcggcggtggggcgagagagcgcgcgccggcgaccggcgaagaggaggggggggcggtcgatggagccgcgcgtgggcaacaagtaccgcctcgggcggaagctcgggagcggctcgttcggggagatctacctcggtactaacgtgcagaccaacgaggaggtcgcgattaagctggagaatgtgaaaacagagcatccacaattgctggacgagtcaaagctgcacaggatacttcagggtggaactggg

SEQ ID NO: 419455 - DNA, 433 bp, Oryza sativa
tgttcgtgacatgaacggcctcaagctcgccggattcagcaccacgaagctgggcctcggcagcagcaggaagaggacgacgcgccgccgagggatccggcagcggccatgggggaaatgggcggcggcgatcacggaccccagcaagggcatgcgcgggtggctcggcacgttcggcaccggcgaggacggcgtcatggcgtacgacatgaaggcacgccggatccgccgcaagaaagccaaggtcaacttgcgcgacaccgtcgccgacggtcccaagcggccacggcgttcttcggcgaaacattcgccgcataagcagaaggccaggtcctcggcaccgtcgactgcgagcctgaacgccagcgatgccaagtccaagaccaacaacaaccgggtcagctcgggtgggagcaggaccgacactaccgac

SEQ ID NO: 419456 - DNA, 314 bp, Oryza sativa
attgaagttaaacaggaaaaaaaatcaaacagagagaataaatattgcccatctgtgaaactcgcaaaaccctagcgcggcggagatgtcgcacacgagggtgttcttcgacatgaccgtcggcggagctccggcggtgcggatcgtgatggagctgtacgctaaggacgtgccgcagactgaggagaactaccgcgcgctctgcaccgcggagaagggcgtgggcaagagcggcaagtctttgcactacgaggggagcaccatacaccgagtgatcccggagttcatgtgccatggcggggaattcacccgcg

SEQ ID NO: 419457 - DNA, 102 bp, Oryza sativa
cggtaccattgtttacttaggttccctgccaaactctaaatgccagctgatcaaagactaaacaccaatcgataactccgactctactaccgactaacttaa

SEQ ID NO: 419458 - DNA, 411 bp, Oryza sativa
gttgcccaacctgaatagcttcttttgtatgtaattttgcttcaacaaggcaggtatgtaagtgtgtaaagcaaacatagacataagaagcaacctatttcttagcctatagaaaccttctctatatttctcttgcacagatgaaaacttgttaagagctaactgtggaaaccatttcatattcacttgccttcctgttcttcgaacaaatgaagaaagcgcctccaaaccgctgctgaaggaacagaagaaccgacagcagtattgctccacatggtatggcaatgtcccatgcgaggctgaagagatcatcgcgagggtttgcatacctgtaaaatggtcttaagctgggcacaaaatgcttagccctgaacacatcatacacatgaggtagcgcacgaatcatggggc

SEQ ID NO: 419459 - DNA, 372 bp, Oryza sativa
ccactgaggaccccatttttgttatggctgcccctgaaagggcagcggcactggttcaagatgcctcatcgctgaccacggagccgtcgcaagccatataaggcagagggcatgtgcctgccttgcaaaagcgagtagatgatcgaggaaccgctttaccgggggcggctgctgggggccaaaggggaactgaagaagcttattctgaccaaacaggataggctaacatgtggggaaaggtgccccacttgagggccttgagctgatcaccaacagatgtggctccatgtggcacactggctgacctactcggtcgatgacaaaagtaattacatcgggcaaactcggagtgcagcgagtcctcacacatgc

SEQ ID NO: 419460 - DNA, 402 bp, Oryza sativa
cggtaccattgttcacttaggttccctgcaaaactctaaatccaagctgatcaaacactaaacaccaatcgaaatctccgattctactaccgattaactcaataaataggcgatcggagattggagtctctgttcatcggccagatttcaaaatccgagcgacggacatcgactacgaatggggtcaagatggagtggagagagtatttgcctcatcttcaaccgtatcggtagcagataaagcaatcgaatccgtggaggagacggagaggctaaagagatcactagcggattcgttgtacggaacagatcgaggtttaagcgcatcgagtgatacgagagctgagatcagcgagctcatcacacaggtcgagtctaagaaccctactccagctcctaacg

SEQ ID NO: 419461 - DNA, 342 bp, Oryza sativa
ttttggtttttttatatgtttttgtttttaaaccaaaacataggaggttgcatttgttcttctaaaaggagggaagcatctttccttctttcaccattacataggcttaagcaatcacagataacaaatctctcctcctcctctagggaaaatattcaaacacaatacccttatacgtacttatttttaggaaaggagcgcgcatgggcataaatggcatcggggggcaggtttaagaatcacaatggctgagccgggaggaaacaaaaacccctaatgggacagagcaaaagcctcccaaagggagcttttagggggaagggttcttccccttgggggggt

SEQ ID NO: 419462 - DNA, 379 bp, Oryza sativa
atgaaccacttttactttctcctcctccccccgatcggatcgggccgggtccttcttctccggcgtcggcaccgccgccgcagataggagaagatggccgcacttgatacctttctctttacctcggagtctgtgaacgagggccaccctgacaagctgtgcgaccaaatctcagatgctgtgcttgatgcctgcctcgccgcggaccctgacagcaaggtcgcttgtgagacctgcaccaagacaaacatggtcatggcctttggtgagatcaccaccaaagctaacgttgactatgagacgattgtcagggagacatgccgtaacatcggttgtgtgacagctgatgtcggtctcgatgctgaccactgcaaggtgc

SEQ ID NO: 419463 - DNA, 422 bp, Oryza sativa
ttcgtttaagactggtaggtctcgaccccagcatgagatcccttctctagctcatttcagaacgagatcgcaaatgggtgactacgccatctgatcccgcttgctccgatctcgatctggtctccccgttcccgttctgttctagtggagtgatgcttgcgcaattctatctgactattagccggtcggctttctggctcctgcagcgaagatcaagatcaggatcaacgggttccggaggatcgggaggctcgtggccagtgtggccctgcaaagcgacgatcatccgctcgtggccgtcaacgaccccttcatcaccaccgactacatgacatacatgttcaagtatgacactgtgcacggccagtggaagcatcatgaggccaaggtgaaggactgcaagacccttctattcggtgaga

SEQ ID NO: 419464 - DNA, 484 bp, Oryza sativa
acctttttatgtgggttcttatgaactttctctacaaacatgcaagtgcattggggcttatgtgaaaagcaagaaaaatcaaagtcagatatgttggctatggcaaaaggttaagtcaacagaagacagaggattccaaagattcctggacaatgtgcagtacaaaaccactggaatcatactctatgagcgtgtctccggagagggttatgtcagcactggtggtattgaaaccacaaaggaatttgtggataagctggatcttaaacctggacagaaagcgcttgactgcgagtgcggaattggaggcggcgacttctatatggctgaaaactacgatgcccatgttcttggtattgatctttcaatcaacatggtttcatttgcaatcgaacgtgccattggacgcaagtgttcggtcgagtccgaagctgctgattgcaccacacagacctacgcaccaaatacatttgatgtgatctac

SEQ ID NO: 419465 - DNA, 477 bp, Oryza sativa
ttttgaaccgtcctgctgtgttcacgcaatacaatcttctgaagtcctctcttgttccttctgtgctcaaacatcaaaagcagctctctcctaagttctcttgattgtttgtgctcctaaattctgttgtttgagcactcaaacatttcccttactggtcaatcttagatcacttgttgattattggtattggcattatttggtgaagcatttctgcttgtaccttaaacaaaggtctctgttgtcttattggtgctgaaggcaagatatacactgcagtgatggctcaaacttgcttgccacctggctttcgttttcatccaacagatgttgaacttgtttcatactatttgaaaaggaagattatgggaaagaagcctcttattcaagctatatcagatgttgaactgtataaatttgctcctgggatcttactgctccatcctgtctccagagcagagatcttgaatggtcttc

SEQ ID NO: 419466 - DNA, 484 bp, Oryza sativa
ttagttgctagggttgagagagcaccacgcgcggacgctgctcatccactacaggtgggatgtcgaaaggattttcgagctgcttgatcagaaggggagggacaggctcttctcggaggctggtatccctctccaacctgctaataatcccggctcgccctcctcaacggaggtaacctgcaatgtttgctatgacgatgtgcccctctcggacgcctccaagatggactgcggccacaactactgcaatgaatgctggacaggatatttcattgtgaagataaatgagggacaaagccgccgtatcaagtgcatggctctgaagtgcaatactatctgtgacgaagcaataattcgtaagctagtaaatgcaaagcggccagatattgcagagcgctatgcaaggttcttgttggaatcttatattgaggacaatgatacagtcaagtggtgcccctgcacaccgcattgtggaaatgctata

SEQ ID NO: 419467 - DNA, 482 bp, Oryza sativa
tttctgcgagtgcaatggccttcccgaggtggccaactactggaagcaggtcatcaagatcaacgactaccagaagagccggtttgtcaaccgcgttgtgtcctccatgttcaacacagtctccggcaagaagatcgccgtccttggctttgcgttcaagaaggacactggtgacaccagggagacaccagccattgatgtgtgccacggtctgttgggtgacaaggcacagatcagcatctacgacccacaggtcaccgaggaccagatccagcgggacctcgccatgagcaagttcgactgggaccacccgatgcacctgcagccgaccagccccaccgcattcaagcagggagcgtggtgtgggatgcatatgaggccaccagggggccatggtgtctgcatcctaccgagtggacgagttcagaccttggactaccgaagatctttgacaacatgcagagcctgattcgttttgatgg

SEQ ID NO: 419468 - DNA, 421 bp, Oryza sativa
ttcgtcaccccaccccgatcccctccccgccgtacggtcgcagaaggaacccgtcttctagaaggaggacgagggctacctctctctctctatcttctgccatggggagctccgcgaggaaggagcaccagttcctcgccgagcttggcctcgcgccgcgtaaccccggacccttcgcctgcggcgcctggggcggctcgggccccgtcgtcacgtccaccaacccgacgaacaaccaggtcatcgcaaaggacgtggaggcgtccactcgtgagtacgatgaggtcatgcgcgcctgctacgatgccgccaagacctgcatggcgattccagctccaaagcgaggtgaaattgttaggcaaattggtgatgcattgagagcaaagctgcatcacctgagcaggcttgtgtcacttgagat

SEQ ID NO: 419469 - DNA, 534 bp, Oryza sativa
  unsure (1)..(534): unsure at all n locations
gccactaatagcttctgtcaagattcccttctaggagagggctcacttggtcgtgtttacaaggccgatttccccaatggaaaggttcttgcagttaagaagatagatagttcagccctttccttgcaggaagaagacaattttcttgaggctgtatcgagcatgtcacggctaaggcatccaaacattgtgccacttacagggtattgtgttgagcatgggcaaaggcttcttgtttatgagtacattggaaatggaacactgcatgatgtgctgcactactctgatgagttgagcaggaagcttacatggaacatccgtgtaagggtagccctagggactgctcgggcgctagagtacctgcatgaggtgtgcttgccatctgttgtgcatagaaactttaagtcctcatacattctactcgatgaagagcataatccacatttatctgactgtgggcttgccgccctgacacccaacacggagagacaggcttcaactgangtgtttggctcattggatacagtgccccga

SEQ ID NO: 419470 - DNA, 396 bp, Oryza sativa
gttctttttagagttgatgatatcagggttggcgcaacttccagaaaatctattcctcttcttgttgacctactcaaacccattccagaaagacctggtgctcctttcttggcgttgggtcttctgacacaattagctatttgtttgccccccaaacatgatgctaatggctgaagctggaatcctagaggcacttaccaaatacttgtcacttagcccacaagatgcaacagaagaagctacaactgatttgttaggcattctttttagttgcgcagaaataaggcacaatgaagcagcacttggtactgttaaccaacttgtggcagtccttcgtctaggaggaagaaattcacgctacagtgctgcgaaggcattagagagcttatttattgc

SEQ ID NO: 419471 - DNA, 468 bp, Oryza sativa
ctccagtctccactcctctgtttcctcccacctcggctcgaaggaatggcaagcggtagtgaagctgagaagtcacctgaggttgtgctggagtggcctaagaaggacaagaagaggcttctacatgctgtttaccgtgttggagatttggatcgcaccattaaatgttacacagaatgctttggaatgaaattactgaggaaaagagatgtgcctgaagagaaatatacgaatgcatttcttgggtttggacctgaggacaccaactttgcacttgaattgacatacaattattggtgttgataagtacgacattggagcaggatttgggcatttcgctattgcaactggtgacgtgtacaaattggctgagaaaattaaatccagttgttgctgcaagatcactcgtgaacctggtcctgtcagggaggatccactgtgattgcctttgcacaggatctgacggta

SEQ ID NO: 419472 - DNA, 473 bp, Oryza sativa
ctctgctgctgctgctgttgatcctcgtcgctgctggcccccaggcaggcagagctgcaaagccaatcccaaatctccagctcatgaccaaggagggcggcagttcaagaatcatccaggacgacatcataaaggcaatcaacaagcatcccaatgctggctggacggctgcacggaatccatactttgcaaactatactactgcgcaattcaaacatatccttggagtgaagccaacaccgcatagtgtgctaaatgatgtccctgtcaaaacttatccaagatcgctgatgcttccaaggagtttgatgccaggtctgcatggtcacaagtgtaacacaattgggaccatacttgatcagggtcactgtggctcgtgctgggcatttggtgctgtggaagtgtctccaggatcgtttctgcattcatttcaacatgaacatttcgctatctgtcatgacctagtggcatgc

SEQ ID NO: 419473 - DNA, 329 bp, Oryza sativa
gaggggaagggacccgggaaaattgatctgaaacttacatgataataacccacgccaaaaggggccaaacatttttgggttgggagtatgttcaagggggggcattattagcattgctcaagccccagggtgctttagggaagggaagggggggaaaaaggggggcttgtcccggccaaaacctcttgcatttcctaagccccaaaaagggggtggtcctttttaaacatttttccacccccaaagggaaaggggggaaaaacttaggggggctttaccgggggggggtttataaattccaataaattaggctttaaagaaaccccccc

SEQ ID NO: 419474 - DNA, 470 bp, Oryza sativa
ctccagctctcttcccttcctcgtccagttccatctaatcagcttctcgtcgagatgggccgcaagttcttcgttggtggcaactggaaatgcaacgggaccactgatcaggtggacaaaattgtgaaaattctgaatgagggacagattgcttctacagatgttgttgaggtggttgtcagcccaccttatgtgttccttcccgtggtcaagagtcagctgcgcccggagatccaagttgctgctcagaattgttgggtgaagaagggcggggctttcaccggtgaggtcagcgctgagatgcttgtcaaccttagtattccctgggttattcttggacactctgaaagaaggagtttgttgggtgaataaatgagtttgttggagacaaagtggcatatgcgctctctcagggcttgaagggcattgcatgtgttggtgagactctcgagcagcgggaatctggatcg

SEQ ID NO: 419475 - DNA, 476 bp, Oryza sativa
ttcgttctcgtgacctagaatatcttttcggcagatatggaagaatacgtgaagtggagttgaagcgcgactacgcgtttattgaattcagtgatccccgtgatgctgatgaagcgcggtataacctagatggcagggatgttgatggaagccgcattcttgttgagtttgctaaaggagttccacgtggtgctgctggtggttcacgtgaatatatggggatgaggacctcctccaggaacaggtcgctgttttaactgtgggattgatggtcactgggcaagagactgcaaggctggtgactggaagaacaaatgttatccgttgtggagaaagaggtcacatagaaagaaactgccaaaacagtccaagaaatctcaggcgagagagaagttattcgcgctccccatcgtcacgccgtggacgtggtcatggtcgtagtcgtagctatagccggagccggagcatgagttaca

SEQ ID NO: 419476 - DNA, 457 bp, Oryza sativa
ttgtctcgtgggcggacgcgtgggcaccgactccgagaggctcatcggagatgctgccaagaaccaggtcgccatgaaccccatcaacaccgtcttcgatgccaagcgtctcattggcaggaggtttagcgatgcttctgttcagagtgacattaagctctggcccttcaaggtgattgctggacctggtgacaagcctatgattgttgtccagtacaagggtgaggagaagcagcttgctgccgaagagatctcctccatggtcctcatcaagatgcgtgagattgctgaggcctaccttggcaccaccatcaagaatgccgctgtcactgttcctgcctacttcaatgactgccagaggcaggccaccaaggatgctggagtgattgctggtctcaatgtcatgcgcatcatcaacgagccaactgctggcgctattgcctatggtcttgacaag

SEQ ID NO: 419477 - DNA, 361 bp, Oryza sativa
ggtaaaagcatcaccgatggagcttattaggtgattcgaaatcaccactttttctgaatccacaggtacaaaactgctcccaaaagcaagtcacacgagtctattacaaggaaacttccaggatgtgctcagccagcaaacatcactgtctgaatcctcagaacactgctgcggatggttttaagatgttattcttggagggagctgctatgctaccatcattcacttcagttttgtgactgcggcatggattgcatctgcaagatgccgaatggtcctcccgctcaaaccagccatactgatcctcccatcagatgtcatataaatggggtattcctgcctcatgaaagccacttgatca

SEQ ID NO: 419478 - DNA, 452 bp, Oryza sativa
tttcgtgtaaccaccaccagcacctcctcctccgccgccgacgccgactcctccctccaagctttccccaccatggcgtcgtcgtccgtcttcgctggcctcgcgcaggcgccggaggaccccatcctcggggtgacggtcgcgtacaacaaggatcccagccccgtgaaggtcaatctcggcgtcggcgcctaccggaccgaggaagggaagcccctggcgctgaatgtggtcaggcgcgctgagcagatgctgatcaacaacccgtcacgtgttaaggagtatttgccgatcactggactggccgatttcaataagctgagtgctaagcttatttttggtgctgacagtcctgccattcaagagaatagggtggctacagttcagtgcttgtcaggaactggctcttaagggtgggaggtgaatttcttgcagggcatatcatgacgcac

SEQ ID NO: 419479 - DNA, 350 bp, Oryza sativa
atcatccaggacgacatcatataggcaatcaacacgcatcccaatgctggctggacgggtggacggaatccatactttgcaaactatactactgcgcaattcaaacatatccttggcgtgagatccaacaccgcattcagagctaaatgaggaaccagtgaaaacttatccaacatcgctgatgcttccaaaggagtttgatgccaggtctgcatggtcacagtgcaacacaactgggaccatacttgatcagggtcactgtggctcgagttgggcatttggagctgtggagtgtctccaggatacgtcttgcattcattcaacatgaacatttcgctatctgtcaatga

SEQ ID NO: 419480 - DNA, 453 bp, Oryza sativa
agcaaaaataacaatacatgctcctaatcgatacatgtgctgttccatgttacatcatcaccaagaagggaagggaagggaagtgagccaagccaacaaagtcctggctggctggtgtctaattcattttcttcttatcacgacgatgatagtagatgtaattattacttaatcgaaggaaggagcatatatatatagcgaaagaaggataaggcggatatgaatgatgatggatgggctactcggagcgggcggcgaagcgctccaccttaggatcggagaggttgatgccaaccatggcctcgccgagcccgctgctgacctccgccaagatcttggggtcgctgtagtgggtgacggcctgcacgatggcgcgggcgcggcgcgcggggtcgccgctcttgaagatgcctgagccgtcgaagacgccgtcgcagccgagctgcatcatga

SEQ ID NO: 419481 - DNA, 503 bp, Oryza sativa
gaggaggccggtgtctgcgccgtcatggccctcgagcgcgtccccgccgacatccgcgcccagggcggcgtcgcccgcatgtccgaccctggcctcatccgcgacatcaagcgcgccgtcaccatccccgtcatggccaaggcccgcatcggccacttcgtcgaggcccagatcctcgaggccatcggcgtcgactacgtcgacgagagcgaggtcctcaccctcgccgacgacgcccaccacatcaacaagcacaacttccgcgtccccttcgtctgcggctgccgcgacctcggcgaggccctccgccgcatccgcgagggcgccgccatgatccgcaccaagggcgaggccggcaccggcaacgtcgtcgaggccgtccgccacgtccgctccgtcatgggcgacatccgcgcgctccgcaacatggacgacgacgaggtcttctcctacgccatgcgcatcgccgcgccctacgacctttgtatgcagaccaagcagct

SEQ ID NO: 419482 - DNA, 480 bp, Oryza sativa
agagaaaaaaagaatctattggggaagttcgaataaatccttgtcaaaactgctttgaaacaacagcaagagcaatcctgtctgtgcagtagaagtcgcatttaccgatggcgaattggcgatcgatcgcgttagacgaggagcatctggaagagcatgtcgttccagatgtcgatggggcctggcaggcaccagtggatgcagtcgttgtagagctgcaccttctggttcggcaggtggccgtaccggctggggtggccgtcgggccgcatcagcatcgccgccgtggcgtccatgagcatcatccgccggcccttggcctccgcgaccttctccgcggcgcggtactcctccatctgcgccgtgtagaagtgcaggtcccgcccctccatcaccgtctcgttgctccggagcggctgcgtccgcttgcagttgccgccctggtcccacgtcccgttctcgagtgcgacatcggcgaca

SEQ ID NO: 419483 - DNA, 461 bp, Oryza sativa
ttctttccacccagcgactcgccggaaccctagccctagatcccgcgcggcttgccgtcgtgctagccatggcgtccctcaaggagctcctcccgacgcccaaggcggcggcgtcgacgttctacgaccacagcagcgacccgtggttcaaggagcggtatggcggggagtcggcgcaatccgacgcggcggcggcggcggcgaagccttcgggccccgccaagcccgtgccgccgtacgggaagcgtggcgggttcgtgccgcggcggccggaggacttcggggacggcggcgccttcccggagatccacgtcgcgcagtacccgctcggcatgggccggcgcgacgagaagggcggctcgaagatcctcgcgctcaccgtcgacgccaagggcagcgtcgccttcgacgccgtcgtgtagcatggtgagaacgcctctaagatcgtttactcaaagcac

SEQ ID NO: 419484 - DNA, 495 bp, Oryza sativa
  unsure (1)..(495): unsure at all n locations
gtgtgaatgatgctcccgctttgaagaaggctgatattggcattgctgtggacgactcgactgatgcagcccgtagtgcctccgatattgtcctaactgagccaggccttagtgtgattattagtgctgtgcttacaagtcgagcaattttccagaggatgaagaattacactatttatgctgtttcaattacaattcgtattgtgcttggttttatgcttcttgctctgatatggaagttcgatttcccaccatttatggtcctgatcattgccatcctcaatgacggtaccataatgaccatttcaaaggacagagtaaaaccatccccacaacctgatagtgtgaagttatctgagatttttgcactgggggtcgccttggtagttacttggccatgatgacagtcattttcttctgggtagcatacaagactgatttcttccgagaagtgttcacgttgaaaagccttgaaagactgctcangatgacttt

SEQ ID NO: 419485 - DNA, 449 bp, Oryza sativa
gaacgactcgcacgagacggtacgaagttctattgatagagcaggaaaaaattacaagatcacaaccctaaagggtcgtaaccaggaaaaaggaaaaatataccaccacccacacaccgacagctccaacacacaagaccgggagaaggctaacaccggaccggccgccgctaagcttgaccgactgccgctagaccaacaaagaaacatagatgagatcgcccaaaagaacaccctcacaaccaatacaaagccaactcctagagtgtgcttgcaccaatcgatcgagaggcttcggctaggggataccaaaacgacgtattcaagaagagaagcgatggtaaaccaccgccgccatccgtcggggctcaaaggagccaggactgggctttcgcccggcaaccacccttgagggatgagacagcacgacaacaccctcaagaggggga

SEQ ID NO: 419486 - DNA, 456 bp, Oryza sativa
gggagcgaaaagtaaatttggggagtctatatttcacggtacaaagtagactctcttccttattcgttctttttttttttttttgcatcctgcaatttttcttgtcttgttgcactgctcttgatcactgtctactccttggggattttgagcagcttccccaccgtgaagccgccgtcgacgacgaggttatggccgttgatgtacctggcctcgtcggacgccaggaagacggccgccctcgccacgtcctcggggtcgatcaacgggccagcttccatctgctccatggacgccgccatggcgttcttgagctcctcgaagctcatcccggggtaggcctcaaggacctgcaccatggacagcggcgtcgcgacgccgcacggcgagacggcgttcgcccgcacgccgtggcgcgccagctccccggccacggtgcgcaccacgcccagcacg

SEQ ID NO: 419487 - DNA, 389 bp, Oryza sativa
agaatgattggtccatattttattttggatcgggctgcaaaagccaaataagtccccccttgacatttacatcaagtacacaaccaaaagaaaacgtgcgagcaaaaaaaagtctccagaattcactagcatcggcgaacgtactagttaaacatattcaccatctcatcatggaaggagttattgatgattgattgattgcacctgctggaagcattcttgtggacaatctagcctgtgttctgcatgccggcagcaatgcccttcatcgtcaggatgagggtgtcctccaggccaggtgcgtactcgctcgcagcgttcagttggaccagctcggcaggctggttgctgtcgacgaactccttcgacaggccggctgcgacatcacc

SEQ ID NO: 419488 - DNA, 323 bp, Oryza sativa
gaaagcctagtggtggttattgaatcgctccgtgcaattccttggatttttgcttggacacaaactaggtttcatcttcctgtatggcttggatttggtggagcgttcaaacatataatgcagaaggatatcaggaacatccatacactgaaagaaatgtacaatgagtggccattcttcagggtcaccttggacttgcttgagatggttttcgccaagggagatccaggaattgctgctttatatgacaaattgcttgtggcatggtgatctgcaatcctttggagagcagctgagaaacaactgtgaagagacaaaacagc

SEQ ID NO: 419489 - DNA, 464 bp, Oryza sativa
cacacaacttttcacttcatgttgaaacaagattttgacaatactaaaaggagtagcatacaagctcgaaaagtggatgggttaggagaaactgagctaagcaacaccagctttatcaaagcacataaactgcttaccacctccctaacataggatggtgagtgctgctgataaacgctccagtcagtaaatctttatcacccggagtagatggacgccaagatgatcttatttgcgagctgtatagctttctggaacatagatctcccctccagcttcaccgtgttgctccccactgatcgttttccttgcagccaaaaactcagcactcatagcattcattcctggtattaccgcttcctccactatcctgtaaccatgttcatcagcatattttctaatatcctctgtgattttcatcgaacaagactttgggccacacattgagcagaaatgtgctactt

SEQ ID NO: 419490 - DNA, 451 bp, Oryza sativa
caacgttcaacagctagcagatcaggcaggtgcctgcttatatgacgtttgttacgaaaattgtgatgagtggcagtatttcaaagtttctcaacgtttacagcccaagccacacaaatacaaccagagctttagaataggtgacaaacatgtcccagtgctattcagccttcctgggagacgaaaccgggaccaccaccaggcacactatgggaagtacagagggggagaagtgaattgctagtgtcaactgacatttggaaatcgacagccaaatcatgcacatgtgacgtggtatggttaactttccccagtactgccggttttttcagagcatttcttgtgatttccttacagggcgcctaaccttttttttgaagtcatccctgttctctctccattccttagcttgttcaatatttgctggtgattcatcatttggaccagaaag

SEQ ID NO: 419491 - DNA, 494 bp, Oryza sativa
tcatccgcctgttgatgatcccaatggttatgagcttgcgagtgagcgttggacaccagtgcatacggttgagagcatagttctgagcatcatttcgatgctttctggtccaaatgatgaatcaccagcaaatattgaagcagctaaggaatggagagagaagagggatgacttcaagaaaaaggttaggcgccttgtaaggaaatcacaagaaatgctctgaagaaaccggcagtactggggaaagttaaccataccacgtcacatgtgcatgatttggctgtcgatttccaaatgtcagttgacactagcaattcacttctccccctctgtactttccatagtgtgcctggtggtggtcgcggcttcgtctcccatgaaggctgaatagcactgggacatgtttgtcacctattctaaagctctggttgtatctgtgtggcttgggctgtaacgttgagaatacttgaatactgccactcatcacatttttc

SEQ ID NO: 419492 - DNA, 402 bp, Oryza sativa
  unsure (1)..(402): unsure at all n locations
gaaaggaaattaaactgatttattacttgttccattaaaaccatcacactcgggtacgtggtgaaaccgtgaaagttaaaaaacaaaaacagtagtagtagagtgaggccctgctcgctgttacatgagaggtgcacgaagaaccagcacacgagcagagcatccagcccacacgcagcaaggaaacggtagggatgccgccgccgccgccggccgatccgccgcccggcgatgatgcgtcgtcgtcgtcgttcaggtgcacgcggaggcggagcggcgtgcggcgcggcgcggtcgagaggtgatgagtagttgacgcggagcagatatatatggatggatggcgttnatcgtcggtcggacgactgtgaggtcgcgcgcatcacgcgcgggcgtagctgc

SEQ ID NO: 419493 - DNA, 451 bp, Oryza sativa
caattcaaaaagactgcccaaacagaccaagggtatcatcatagcagcaaagttttttaacacgcaacatcaaagagacactaatgcaataagataacttgaagcgcggatcactagcaaatttcgcgcttagtcgacctcctcgatcttggggccagcaccgttgccgcctgccgggggagcatcgtcctcgtccatgccgccggccatgtccgcgccagcgccctggtacatcttggcgatgatggggttgcagatgccctccagctccttcatcttgtcatcgaactcatcagcctcggcgagctggttgccgtccagccactggatggcctgatcgatggcatcctcgatcttcttcttgtccgctgccgggagcttcgaggcgatcttctcatccttgatggtgttgcgcatgttgtaggcgtagttctccagcgcattcttggac

SEQ ID NO: 419494 - DNA, 500 bp, Oryza sativa
  unsure (1)..(500): unsure at all n locations
tcaagaaccaggtcgccatgaaccccatcaacaccgtcttcgatgccaagcgtctcattggcaggaggtttagcgatgcttctgttcagagtgacattaagctctggcccttcaaggtgattgctggacctggtgacaagcctatgattgttgtccagtacaagggtgaggagaagcagtttgctgccgaagagatctcctccatggtcctcatcaagatgcgtgagattgctgaggcctaccttggcaccaccatcaagaatgcncgttgtcactgttcctgcctacttcaatgactcccagaggcaggccaccaaggatgctggagtgattgctggtctcaatgtcatgcgcatcatcaacgagccaactgctgccgctatttgctatgngtcttgacaagaaggccacccacgctggtgagaggaatgtnctcatctttgacctggangtggtacctttgatgtttccctccttaccattgaggagggtatctttga

SEQ ID NO: 419495 - DNA, 457 bp, Oryza sativa
aaaaaaatacccgcattccacaacagccgaagggcaataatcaggctcagaacaagtttaaaccgaacagaaaatagggagttttaaacgacacagtgcacacagcgggcatatgataataacggtgaatgcaacgagtgccatggccgtgcacaaaacttaacgaattagtaaaagctagatatcttaaatgcagacacgcaaaccaccacttgaacgaggatcatttcttcttggcggcagccttggtcaccttgggaccgggtgggtccttcttctccacgttcttgatgacgccaacagccaccgtttgcctcatgtcacgcaccggaaaacgaccaagaggagggtacttagagaaggtctccgcgaacaaggggggggtgggaataatcttaaccataccagcatcaccggtcttgaggaacttgggctccttctccagctccttaccaga

SEQ ID NO: 419496 - DNA, 498 bp, Oryza sativa
tagacaagtagctatctatctctatctagcaagctagctaggttgcttgcattctctcctctctctcttcctgtgtcaccaatggcgccggcggcgtcctccaagtccaacccaagggtgttccttgacatcgccatcggcggcgagtgggttggccgcgtggtgatcgagctgctcgccgacaaggtgcccgacacggcggagaacttccggcggctgtgcaccggcgagcgcgccgggcgctccggcaagagcaggctccactacaaggggctcggcgctccacccgcgtggtgcccgggttcatgtgccagggcggcgacatcacggccgggaacggcaacgcggcgagtcggcgctggacggcgccgcgaggcacttccccgacgagggtgtcgcggtgaagcacgacgggcccgggtgggtgtccatggcgaacgccgggcccaacaccaactgctcccagttcttcatcaccgtcgacaaggcgcccgtggc

SEQ ID NO: 419497 - DNA, 479 bp, Oryza sativa
ttcacgcgtccgcctcactccatttcgcagtccatgaccaagtgaagctctcgccgtctcgcggagacgccaccatggcgagggcggcgagggggaaggcgccgaggccgaggccgaggccgccgcgcgggctggcggcgagcctccggcggctcctcgccggggccggcggcgggctgggcgtcgcggcggcggcgtacgtcggggtggactacctgcggtacctctccccggcgtggcacgggcggctgatgccggcgctgtgggcggcgctggcgctcgccgccgcggcgcgggcgccgttctaccgtcactggtccgccgagctccgcgccgcgctgccctttctcggctccatcgccttcatgctcggggccttcctctgcgaggccgtcttcgtccgcttcgtctccgccgtgatggggctccagtggcacagatctgctgtccactttctgacactgggcaatggctgcttc

SEQ ID NO: 419498 - DNA, 438 bp, Oryza sativa
agcaatgtaaatactcgcattccacaacagccgaagggcaataatcaggctcagaacaagtttaaaccgaacagaaaatagagagttttaaacgacacagtgcacacagcgggcatatgataataacggtcaatgcaacgagtgccatggccgtgcacaaaacttaacgaattagtaaaagctagatatcttaaatgcagacacgcaaaccaccacttgaacgaggatcatttcttcttggcggcagccttggtcaccttggcaccggttgggtccttcttctccacgttcttgatgacgccaacagccaccgtttgcctcatgtcacgcaccgcaaaacgaccaagaggagggtactcagagaaggtctccacaaccatgggcttggtgggaatcatcttaaccataccagcatcaccgttcttgaggaacttgggc

SEQ ID NO: 419499 - DNA, 427 bp, Oryza sativa
  unsure (1)..(427): unsure at all n locations
tccgccgccgccgcagcttcctcctctcgccatctcccgtcctctccttcaagtcagctacctgcttaatcaaccatgggtaaggagaagacgcacatcaacattgtggtcattggccacgtcgactctggcaagtcgaccaccacgggccatctgatctacaagcttggaggtatcgacaagcgtgtgatcgagaggttcgagaaggaagccgctgagatgaacaagaggtccttcaagtacgcgtgggtgctcgacaagctcaaggccgagcgtgagagaggtatcaccatcgatattgccctgtggaagttcgagaccaccaagtactactgcacggtcatcgatgcccctggtcaccgtgacttcatcaagatcatgatcactggtacctnccagctgactgtgccgtgctcatcattgactc

SEQ ID NO: 419500 - DNA, 469 bp, Oryza sativa
aggttcaaatccaacttattcataaagcatactgctgtcccacaggaaactgtttcataaaactaacatatcatacggactcgatggtccattaaaccagacacaagtagacatcagcaccacaaatacttgacgaacagaggctcgggatgaccaggcacatgggcagctccaccaaactggctgattactgaccaccacggaggcggagcaccaggtggagggtggactccttctggatgttgtagtcggcgagggtgcgtccatcctccagctgcttgccagcgaagatcagacgctgctggtctgggggaatcccctccttgtcctggatcttggccttcacattatcaatggtgtcggagctctcaacctccaaagtgatggtcttcccagtcaaggtcttcacgaagatctgcataccaccacggagaccaagcaccaggtggagggtagactccttctggat

SEQ ID NO: 419501 - DNA, 479 bp, Oryza sativa
tcgattaatttctccccaatctcgcgaggctctcgtcgtcgaatcgaatcctctcgcgtcctcaagatgcagatctttgtgaagacattgaccggcaagactatcaccctcgaggtggagtcctctgacaccatcgataatgtcaaggctaagatccaagataaggagggcatccccccggaccagcagcgtctcatcttcgctggcaagcagctggaggatggcaggacccttgctgactacaacatccagaaggagtcgacccttcaccttgtcctccgcctccgtggtggcatgcagatctttgtcaagactctgaccggcaagactatcacccttgaggtggagtcttctgacaccatcgacaacgtcaaggccaagatccaggacaaagagggcatccccccagaccagcagcgtctcatcttcgccggcaagcagctggaggatggcaggacccttgctgactacaacatcca

SEQ ID NO: 419502 - DNA, 462 bp, Oryza sativa
aggaaacgacttaaataacagaacagtcaggtagaacagactaccagactgaaacggacttcacaaggtagggtacatatgagttcaactgggcacaacagccctcaaaagtccattcatacttcgttggggggagagtggtgacttgatggttatttaggtgataacgtcgttgggtttcgacacgtccaccagtttggctggctttagcccatggcgtacttctgtgtccaggagcgagcggtggattcatacttggccctatcagtcttgtacatgtgagcaatctccggcaccaacggatcatcggggttcgggtccgtcagcagtgaacaaattgacaggaggacctttgatatggtaagtgcaggactccactgttccttgaggatgtcgaggcaaatgctgccattgctattaatgttcgggtggaaaaccttggtgcggaaagagaccttcggt

SEQ ID NO: 419503 - DNA, 516 bp, Oryza sativa
ctcgcagcttcctcttgtttttcttggccgaaccccccctcgacacgccgtcgccgccgaggggagagagagagaggccgccggccgccgctaccactgacccccccccctcgccggagcgccccgtcgccggtcgggtttgatcgatggcgtccaagaggatcctgaaggagttgaaggacctgcagaaggaccctcccacctcatgcagcgcaggtcctgtgggtgaggacatgttccattggcaagctactattatgggaccctcagacagcccatttgctggtggggtattcttggtgaacattcatttcccaccggattatccttttaaaccaccgaaggtctctttccgcaccaaggttttccacccgaacattaatagcaatggcagcatttgcctcgacatcctcaagaacagtggagtcctgcacttaccatataaaggtcctcctgtcaatttgttcactgctgacggacccgtaccccgatgattcgttggtgccggagattgct

SEQ ID NO: 419504 - DNA, 486 bp, Oryza sativa
  unsure (1)..(486): unsure at all n locations
ctccacgcgtccgcggacgcgtgggctgacaagctctctctctctctcttctctctttgggggtggttcttggtgcagagccgatctgcggcggcggcgggtgtggggggctcgaggagccgctggtcgggaagaggaggaggaggaagaacggccgccctgacacaatggcagatgtcttaggatgttacactataaagtcccatggaaccaaagtggcgagacttcacatgtacgactggataatacttctactccttgctgttatagatggactgttgaacataattgaaccttttcaccgtttcgtcgggagggacatgatgactgacttgagatatccattgaagggcaatactgttcccttctgggctgttccgctcattggaattgtattgccttgtgccatctttggtggaatttacttcaaaaagaagaatttctatgatttgcaccatggcatactgnggatcctatactctgtgc

SEQ ID NO: 419505 - DNA, 465 bp, Oryza sativa
ggaactcaaacaaacaatctgagatgacacaaacataggacactcttacactgatcgaacacatagagaagtcgtctccaaaaagaaaacaaacatagcctgcaaatctccaatacatcgctagaaaaacgaatcaaacataactcgatactacagatgacaagagcagagcacttgagaaaatcagaagcatttcctgaggacaattgctgggccagattcggcggactcgtcctttgatatccacatctgttggaaagtgctgagtgaggctaggatcgaccctccgatccagacgctgtacttgcgctcaggtggagcaacgaccttaatcttcatgctgctcggggcaagggcagcgatctccttgctcatacgatcagcaatgcctgggaacatggttgtaccaccactgagcacaatgttgccatgaaggtccttcctgatatacacgtcgcacttcat

SEQ ID NO: 419506 - DNA, 331 bp, Oryza sativa
accgttctttagttgaaaagagttattagctacctgtcggtcaagtaacaacaattgttgcgcagtggttaaggcgcccaacggggatgttccaaccatccatgatccgtctgtaggctggttgtatctacgagacctcctacatgtccatcatgaagtgcgacatttatatgaggaacgacctttattgcaacattgtcactctccggtggaacaaccatgttgccaggcatcactcctcgtatgaccacggagatcactgccctatccacgagcaggatcatcactaaggtagttgcttcacactaatggctagtacactgtatggatc

SEQ ID NO: 419507 - DNA, 488 bp, Oryza sativa
  unsure (1)..(488): unsure at all n locations
cactatccacctcgccgccgccgccgccgccggaaatggccgccgccgcgcgccccctggtgtccgtgaaggccctggagggcgacatggcgacggactcggccggcatccagatgccgcaggtgctccgcgcgccgatccgtcccgacgtggtcaccttcacccacaagctcctctcctgcaaccgccgccagccgtacgccgtgtcgcgccgcgcggggcaccagacctccgcggagtcgtggggcacgggccgcgccgtgtcccgcatcccgcgcgctccctgccggcggcacgcaccgcgcggggcagggtcgcgttcggcaacatgtgcgttgggcgggcggcatggttcgcgcccaccaaagatctgtgcgccgctggcaccgntcgcgtcaacatccgcctccgccgcatagccctcgcgtccgcgctcgccgtcaccgcgtccngtcctcgtcctcgcccgcggcaccgcatcggggcgt

SEQ ID NO: 419508 - DNA, 504 bp, Oryza sativa
tccaaaaaagaaaaaataatttcgttttcttttcttctcttctcttctcttgttgcggcgaagggggagaggaaggtcgaggtcgacgagatgggcggcggcaatgggcagaagtcgaagatggcgagggagaggaacatggagaagaacaagggcgccaaggggagccagcttgaggccaacaagaaggccatgaacatccagtgcaagatatgcatgcagactttcatctgcaccacctctgagaccaagtgcaaagagcatgctgaggcgaagcatccgaagagcgaccttaccgcgtgcttccctcacctcaagaaataatggcggtggcatctctctgctcaatcagaagagaaaaagagaagctgccataatccactagtatcatcttgtatgcaatgactggttgccctatgtatgggtctaaactttggtcagctgctgctgcttttttggctgtgtgcctcatctaatatgtaatgctctatcaacctcttgtgc

SEQ ID NO: 419509 - DNA, 463 bp, Oryza sativa
gtcttgtcaaatctataacattaaggtgatcatgaacattcattgcaccatactgataaaacgagattgggtatctgacaactaataatctaaacaaagtttgtgcagtaccatgcaatggttgctctgcaactcagtacataaaaaaaacaaaaacaaaaaaatggcaaacaaaattcctccattaaatattaggttcatatggttccaaagtagccatagaaaatatccaggtagatcaataggacaaagatgcttgaactagtttcctccttagttggttactctgtacttcttaacagtgttaagcagaatctttgcttcactgttgttattgaagtggtcacgaataggctgcaatatttggtttattgcttttgctagagctggcttaacatcagcaggatgcaaagcaccagtcttataatcatcgatgagttcatcccatgtttgaaatgtcttg

SEQ ID NO: 419510 - DNA, 475 bp, Oryza sativa; identical to SEQ ID NO: 392276

SEQ ID NO: 419511 - DNA, 314 bp, Oryza sativa
tctttccgaggacatcttgtaaggagacaagctgcatgaacccttcgtgtgacatggttgatcgcgaaacttcaagctttagttcgaggaagaaatgttagactctccggtgcttccattcaatttgttgtgaagtacggccaacataagtttctgagtgataaaccatcgtacgcttgcaaagagatggtttcttcaaacgcatatgttcgaaagcttctatcttcatcaattgggttagaagctcttcactctcagtatgacaagagggaccccaattcattgtacaactggttggaaagaccgactataag

SEQ ID NO: 419512 - DNA, 385 bp, Oryza sativa
ctgacgcgtgggcggacgcgtgggctcagagaggaggcgtgttggttagctcattggcagcagcacacacaaaccacatctcctatatatagctcatttttagcttttggaatttgagagaggttttgagagaaatggctagccaaggtgtagcctccatgttcgctctcgcattgctcctcggtgcctttgcctccattcctcaaaaggcggaggcgatcggggtgtgctacggcatgagcgcgaacaacctgccgccggcgagctcggtggtgggggatgtaccgctccaacggcatcacgtcgatggggctgtacgcgccggaccaggcggcgctgcattcggtgggcggcacggggatcagcgtccgtcgtctgcgcgccc

SEQ ID NO: 419513 - DNA, 451 bp, Oryza sativa
acagaacagtacagttttccagatttcacataaatgatcttccaggtataatgcaccaattgcattccacaagcagcactttgaaattttggtagagcaattgaactcatgatctacttgaacgagtatatactagtactattgatcaaccagcatgtggaacagcagctcgctccacaggtcaatcggccccggcaagcaccaatgcaggcaatccacaacgaagctgccctccacgctgccgcccggcgggtgcccgtaccggctcgggtgcccgtccggccgcaggtccatcgcctcggtgatgtccagcagccgcagctcgccgacgttcctgctcaccgccgcctccggctgcctgaccgcgtggacctgcacggcgaggtactcggcctcgacggcgcccagggcgcgctcgtcgcgcctgaacgggcgggtgcggacgcagtcg

SEQ ID NO: 419514 - DNA, 495 bp, Oryza sativa
ctctcccaagagctcatttcctcgctctgatttcatcatgaaatcgcagaagaacaacctgcctcttcccaagcgatcggctgccatcgctgcgccgatcgctctcctcctagtggtcgggctcatctcgctctatgacttcaccttcgctgatcgctacccgaacattgacgccgcctcgtcatcgtcgtcgtcgtcgtcgtcgccgtctccggccaccgtgagtaagtgcaaccttacgcggggcgatgtgggtgccggacggcgaggcgccgtactacacgaacctgacgtgcccgttcatcgacgaccaccagaactgcatgaagttcggcaagccgagcctcgagtacgtgagctggaggtggaagccggacgtggtgcgagctcccccgcttcgacgccgcgaggttcttggaggccatgaggggcaaatcctggcgttcgtcggcgactcgctcgccaggaaccacttcaagtctttgctgtgcctct

SEQ ID NO: 419515 - DNA, 485 bp, Oryza sativa
tcgtaaacctccggcctccgcaccgtgcgcgccagctcagcacgtcggcggcggcggcggcggcggcgacggcgaggggagagatggacgccgcgatggagtcggcggtggggccgcacttcagcgggctccgcctcgactcgcgccgcctctcctcctcctccctccccacctccccctccgccgcctccagcaacggctgcggcggcaacgacgcccccgccgcggttaacgggttcgcgccgccgtcgcccccctccgtcgccgcagccgctgaggaggggagcaagcagcccttcgtgatcggtgtgtcgggagggacggcgtctgggaagacgacggtctgcgacatgatcatccagcagctgcacgaccaccgtgtcgtgctcgtcaaccaggattcattctaccgtggtttaactgaggaagaatctgaccgtgtgcaagattacatctttgatcacccagatgcatttgatacagag

SEQ ID NO: 419516 - DNA, 399 bp, Oryza sativa
aagggacaaacaaatatggctcactgaattctcattgagaagcagttatcagaatgtgagcaacatacatgctatgtcaacatcttggaaggatcacaattgtaaagtatctatactgcattaaaagaacttgagtataccataacataaaaaggattatttcacatgacaatctcaggtttcaggatgcttgatttgatctctttgtgcgggagaataacaccgccgttggtatagacctcatcacctacatgtacggcctctcctaggatagtcatattttctatccgggcccattgtccaacagttgagtgccatccaataatgctgtttgatatgcaagcatgcttcttaatacgcacgccacgcattaccgtgcaacgggaaagcctcacacca

SEQ ID NO: 419517 - DNA, 438 bp, Oryza sativa
attgggtcgtaggactgcaacgattcgcctcacttgcatttgcaactcaaaaaattgacaaagattttgtgcgtcttattggtgaaaaacatgagcaggaaccaacatatgcatcgaatatggtcctgctcgctgttgggcggctggcagcagcagcagcagatagtaagaaaacaaacacaacaacgtttctgcaactaaaagattaattctacagtgccttcaggagtggaagactacagctcagaacttcgtatcttctcactgacagtagaaccaaaagctggaccgcccttgcggtagcacacaagaaactcaaccgggtaacccttcaatttgtgaggcacgattccgaggtccgaaaaggtgagagcattatcagacactagggtgtctacagaaaatgcatcaatctgatctttgttgaaaattgatggg

SEQ ID NO: 419518 - DNA, 383 bp, Oryza sativa
ctccgttcggcgacgatgcaggcggcggcggcgtggaggcgtcacctcctcgacggcaacatctcccccaccaccgcggcggcgatctccgccttcagatccgcctcccagccggcgctcgcaccccaaggattgggtggagcggatggcgcgaggtacatgtccgcgagggcgccggcggtcaaggggacggggcatctcgtccgcaagggaaccggagggaggtcgtctgtgagtggaatcatagctacggtgtttggagctactggatttcttggccgctaccttgtccaacaacttgcaaagatggggtctcaagtgcttgtaccattcagagggtctgagggattgtcaccgacacctgaagttgatgggtgacccgg

SEQ ID NO: 419519 - DNA, 431 bp, Oryza sativa
ggacacaatgattagggatcacttattcattatagttcttccatgctgctctaccacagcaaaacgtttcagacaccatcaaaccagacttaaggatacacattacaggtaaatagtacacaatgaaacgggacacgaccaaggaccagaccagacaaccatagctccattggggaagacaaataggcagacttgtgaaccctagaacagcagcagctccatggctgaggacttactggccaccacggaggcggagcaccaggtggagtgtggactccttctggatgttgtaatccgcaagggtgcggccatcctcaagctgcttaccagcaaagatcagacgctgctggtccggggggatgccctccttgtcctggatcttcgccttcacgttgtcaatagtgtcggacgactcaacctcaagggtaatg

SEQ ID NO: 419520 - DNA, 424 bp, Oryza sativa
  unsure (1)..(424): unsure at all n locations
ttagaccttgactggcaagaccatcacccttgaggtcgagtcgtctgacaccattgacaatgtcaaggccaagatccaggacaaggagggcatccccccagaccagcagcgtctcatcttcgccggcaagcagctggaggatggccgcacccttgctgactacaacatccagaaggagtccaccctccaccttgtgctcaggctcaggggaggtatgcagatcttcgtcaagaccctgaccggcaagaccatcaccctcgaggtcgagtcctcggacacgatcgacaatgtgaaggccaagatccggacaggagggcatccccccggaccgcagcgtctcatcttcgctggcaagcagctggaggacggacgcacccttgccgactacaacatccagaaagagtccaccctccancttgtgctc

SEQ ID NO: 419521 - DNA, 452 bp, Oryza sativa
aagcacaaaaaatacatatatattgaccagtaaactgatcacccggggtcacaaccaacacttacacatgtaataatacatactggccaatggttttttcccagaactaattaaactttgcaagcataaacaaagacaaaacagacagtttccaaagttcagagagttcagactgctcacagtaaaccaaccaacaaaaacatgtagacgacgtgtagcacactgtcaatcgatcgatcgatcgatcggctgcagtgtcccaatgtgattaagcacactggtagtcggatgggcagatcttgccgcagttgttgaggatgaggctgaggtcgatggggatgttgaggttgaggccgagcacgttggccttgatggcggtgcagaggcagacggcggcgaccaggtcgacgaggccgtctagcagcgagcagcatggctcgtactgggccacc

SEQ ID NO: 419522 - DNA, 460 bp, Oryza sativa
gcgagcgcctgcacctactgcccggagccgccgacgccgaagccgaagccgccggcgccgaggccgccgacgcccggcggcggcgccgggtcgtgcccgcgcgacgcgctgaagctgcacgtgtgcgccaacgtgctcggcctcgtgaaggccaagatcggcgcggtggcgccgtacgagccctgctgctcgctgctcgacggcctcgtcgacctcgacgccgccgtctgcctctgcaccgccatcaaggccaacgtgctcggcctgaacctcaacatccccatcgacctcagcctcatgctcaacaactgcggcaagatctgcccatccgactaccagtgtgcttaatcacattgggacactgcagccgatcgatcgatcgatcgatgacagtgtgctacacgtcgtctacatgttttggtgggtgcttactggagcagtctgactctctgacttggaa

SEQ ID NO: 419523 - DNA, 397 bp, Oryza sativa
caggcaaatgcatgcacagttttacagaagcaaagcaacgggttcccaaaggtccacacttacagtacgttcaacgtacaactgatccaagcaaatgaaacaggtttgatgatgcactgatgcgagaaactaaacggttggatcggagtcggagactaggcgatcatggacaagcggcggcggcggcgatgagcttagtagtcggtggtggggagctgctcgtgggtgtgggagatgaagaggacctcgtagatgacgccggcgaggccaccgccgatgagtgggccaacccagtacacccactgggactcccaggaccagctgacgagggccgggccgaaggagacggccgggttcatggaggctccgtcgaacgcgccgccgacgaggatgttcg

SEQ ID NO: 419524 - DNA, 385 bp, Oryza sativa
tctttcagccacacacacaccactccatttctgagctcttctagtttgagtgagagagcagcagaagggagtagtgcaagatgccgatccgcaatatcgccgtggggagccaccaggaggtgtaccacccgggtgcactcaaggcggcgttggccgagttcatctccaccctcatcttcgtcttcgccggccagggctccggcatggccttcagcaagctgaccggcggcggagcgacgacccccgccgggctgatcgcggcggcggtggcccacgccttcgccctgttcgggcggtgtacgtcggcgccaacatctccggcggtcacgtgaacccggccgtgaccttcggcgccttcgtcggcggcaacatcaccctgttccgc

SEQ ID NO: 419525 - DNA, 452 bp, Oryza sativa
catcgactagaaaatttcaaataggagtagcagaactgggatgcataacaacggtttaaacaccttgattgtactatcatgagtcaccatactactaggaataagggggcacatgtttcacaaaactgatgatgcacgaaagcaaagcttctcagtatttgatcggagcaagaatctccagctgaggacccagcttctcctcggctgccttctcagccttgacacgcagcttcgccagttgcttcctcctgtcataggcaaccttggccttctccttcctgttctcctaaagctccctgatggtgtcggtttccggtacgggtaccatatcaatatgcttagggggttttcttggaagtctgcttacgttctctatccctttggccgaagcctccaggtactattgggtttcacaaaacctgcggattttcctacagtgctatacctacacc

SEQ ID NO: 419526 - DNA, 342 bp, Oryza sativa
ctgatcaagagctcttaattagctagctagtgattagctgcgcttgtgatcgatcgatctcgggtacgtagcaatggcgtccaaggcgttcgctctgttcctggccgtgaacctcgtcgtgctcggggtggcaagcgcctgcggcggcagcccgtcttgcccgacgcctacgccgttgaccccgacaccgtcaactcctacgccgactccgtaggcgttcgggaggtgcccccgcgacacgctgaagctgggcgtgtgcgccaacgtgctgggcctgatcatggccaaggtgggcgtgcctccggcggagccgtgctgcccgctgctggaggggctcgtcta

SEQ ID NO: 419527 - DNA, 412 bp, Oryza sativa
accacaactttttaaggatggaattgagtcgcattactttcaccccaaaatacagtttagcgacaatctcttaggaaagccgcttgctttgccgccatggctggcaagctgagcagagcagctaacacaaagaacacgagatcactataaaccaaacggcaacgaacgaagaaattacagggtcttttttgtctgaagatacacgaagcggttcgttttcttttatttttagcttcctctcctcctagaagatgggggtatggcaatggcaatggcgatgggatcttggcttagttgatgggaaggggctcgccgttccactccttgaggcagtcgagcatggggtcgatgagcttgccctggctgatgccgaggaacaccttggtgcactgctcgccgggggacttgagct

SEQ ID NO: 419528 - DNA, 379 bp, Oryza sativa
tcgtttcaggctcacacacaggcacacacacttgccgatggagcccaccggcacgatcgtcttcgccaccgtcggcgtcaccaacttcggcttcgacgtcttctccgccgccgtgccactgccgccgatggaggaggacgccgagcgccgccacacggacggcgtatccgtgaacttcaacgcgcagttcgtcgacgatggcggggaggaggtggcgttcgcgtcgtaacgaggcggcgcggcggggctgttccggtgccggccggggcccgagcatcgggccgagcctgtgccgacggtggaggggagcctgttccatgaccgcccgacagtgaagggcgggaggttgtacttcgtctccgcccacgagcagccgtcg

SEQ ID NO: 419529 - DNA, 407 bp, Oryza sativa
actaaaacatatggattcaaaacatctggacaatgcgttgtacaacattcaaaaattcttccatactaaacaaggaacaatacaccagaaaggcaaaagaagctaaagcaaatgcagaacactgacatcaacgaggtcaggccgcctgagctgctgctctgcttcagggattacaccgcctgaatgcattgctctcatgggcattacgctgcgaataatacgcacggcgccggatgctctcttcgatcgtggcgcttccgaccttctgggttccaaatatgctcttcttttcttcttccaagaagttcttccctctgaattggtttgcgttcacagatgccgcctccttggcatcgacgtctgcagctttcttgagcctgctccatctttgttcttcgtggacctct

SEQ ID NO: 419530 - DNA, 419 bp, Oryza sativa
agagcatagatgacgcctcgcattatcgcatatagcgggtgaaaaaacgtcaggccagcctgcgcgacaacgtgtagttacagataagagcagaactgcgagtcaaatacactcttttctctccatagtagagtttgagcagcgagcgggccaacataaattattcaattattaaatgatatgaacactcttgatcatctgaacactataggaacaaaacttcgctaccgcgattttactattttaggtgtccacaacttcaatgagggtgggttcgtagtcagcaggagcctctaaaccatggaaggtcattacggttgcagcaacattggcgagcccaggggtctgaatgtcagaccggaatttcacaccagggtgaagaccgggacctccaatagcaaccgggaccggctgaagag

SEQ ID NO: 419531 - DNA, 427 bp, Oryza sativa
ctaaaaagaaaagaaaggctttcgtctcggtgggcaaaagcgcgagggcaaagcgaagcatctagtaggcgatggcgagctccggtttctcatggacgctgcccgaccaccccaagctccccaaggggaagacggtagccctcgtcgtgcttgacggatggggcgaggccaacgccgacaagtacaactgcatccatgtcgcccagacgcccgtcatggattcgctcaagaatggtgctcccgagaggtggagattagtgaaggctcatggaacagctgttggtcttcctagcgaagatgacatgggcaacagcgaagtgggtcacaatgctcttggtgctggtcgcatttttgcttcaaggtgctaagcttgtggaccttgctcttgcctctgggaaatttatgatgagagggggttcattacatc

SEQ ID NO: 419532 - DNA, 451 bp, Oryza sativa
ggagcatgattgacgcctcccattatcgcatataggggatgaaaaaacgtcaggccagcctgcgcgacaacgtctaggtacagataagagccgaactgcgaggcaaatacacttttttctctccatcaaagaggttgagcagcgagcgggccaacataaattattcaattattaaacgatatgaacactcttgatcatctcaacactataggaacaaaacttggctaccgcgattttactattttagttgtccacaacttcaatgaggggtggttcgaagtcagcatgagcctcgaaaccatggaagttcattacggaagcagcaacattggcgagcccaggggtctgaatgttggaccggaatttcacaccagggtgaagaccgggaccttcaatagcaaccgggaccggctgagagtatgtgaggtaagaatctggtaccaccgttctt

SEQ ID NO: 419533 - DNA, 331 bp, Oryza sativa
cgcccgcggtaccgaccgggaactgtgaattgctggagccgacgcatgcgttcattcaaatagaacggaaaggctttcgcattggagggcataatcgcgagggcattgcgaagcttctagtacgcgttggcgagctctggtttctaacggacgctgtgcgaccacccgaagctccccaaggggaagactgtagccctcttcgtgcttgactgatggtgcgaggccaaccccgacaagtacaactgcattcatgtcgcccagacgcccttcatggatgccctcaagaatggtgctctcgacaagcggagactagtgaagtctcatggaacag

SEQ ID NO: 419534 - DNA, 140 bp, Oryza sativa
agactcctctcctcctcgatgatgggggtatggcaatggcaaaggcgatgggatcttggcttgaatgacgggaaggggcatcgccgttccacctccttgaggacagtcgagcactgggtgtctgacatagactccgccct

SEQ ID NO: 419535 - DNA, 482 bp, Oryza sativa
ttcggcccgcagatcgaggtcatccgcgccgccaccaagtccatcgagcgcgaggtcaactccgtgaacgacaacccggtgatcgacgtccaccgcggcaaggcgctccacggcggcaacttccagggcacccccatcggtgtgtccatggacaacgcccgtctcgccatcgccaacatcggcaagctcatgttcgcgcagttctccgagctcgtgaacgagttctacaacaacgggctgacctccaacctggccggcagccgcaacccgagcttggactacgggttcaagggcaccgagatcgccatggcctcctactgctctgagctccagtacctcgccaaccccatcaccaaccatgtccagagcgcggagcagcacaaccaggacgtgaactcgctgggtctcgtctcggccaggatgaccctggaggcggtggacatcctcatgctcatgacctccacctacatcgacgccctgtg

SEQ ID NO: 419536 - DNA, 497 bp, Oryza sativa
ctcgattattgcctctttgttctgagtgtgactgtcaatctgtgagcttagctagtgactggccattgcacgagaaaagaacaggttgatcgatcattagtaggtgaagtgttcttgccctgttcttttcttggtttcttgggtaaaccaactggttgggttcggtgagtttgagaacttcagaaactgtaacaacaatgggaggcaccatggattacctgtctgatcttctcggcggcggcgggagcagcagccgtcggaggtacaagaagaggaagcagttccagacggtggagctcaaggtgaggatggactgcgacggctgcgagctcaaagtcaggaacgccctctccagcatgaaaggggtgcagtcggtggagataaacaggaagcagtacaaggtgacggtgcaagggttcgtggagccgcacaaggtggtgaagcgggtgcaggcgacggggaagaaggcggagatctggccctacgtgccctacacc

SEQ ID NO: 419537 - DNA, 491 bp, Oryza sativa
  unsure (1)..(491): unsure at all n locations
ctggtacagaaaccgccgagagagttcgtagcgggcaacgcgcgaggcagggccgagaagaaaccgccggcgacgcacgcgcgatggacgctcggcggaggcggttgtccccggcggtggccgtggcggcggctcttcttttcttccccatgttcttcgggagccatacgccggcggcggcggcggcgtacggagaggcttcaggcgacgccggcgtgacggcgctgcagaagcacgcggcgttcttcgacaaggacggcgacggcatcgtctccctctccgagacatacgacgggttacgagcactcggactcggatctggcctctccagcttgagcgccgccttcatcaatggcgtcctttccccaaagaccagacctgacaatggaacagcaccacgcttatctatctacatagagaacatctancaggggattcatggaagcgattcaagcgcctatgattcttgaggaaggttcgttgctgaaaag

SEQ ID NO: 419538 - DNA, 386 bp, Oryza sativa
ctttcccccctctctcttctcccccaaatcgagccaagaatcaccgccgccgccgccgccaatgggcgcgcttctcctccgctgcgccctcctagccctcgccgccggcctcgtcgccgcgcgcggcggaggcggcggcggcgcgggggcggcggggaggctgtcccccaactactaccgccacagctgcccgcgcgtggagcggatcgtcgcggacgtcgtcgccgccaagcagcgcgccaacccgtccacggcggcgggcacgctccgcctcttcttccacgactgcttcgtcggggggtgcgacgcctcggtcctcgtctccccgctctccgccgaccggtcgcccgagcgcgccgcggagatcaacctctcccttccgggcg

SEQ ID NO: 419539 - DNA, 463 bp, Oryza sativa
ctctcatgggatgtcatggaacccatctgcttctatgtgacctccatgtacttcatggccggctacaccttcttcctccggaccaagaaggagccctccttcgagggcttcttcgagagccggtttgcggcgaagcagaagcggttgatgcacgcccgggatttcgatctccgccggtctgaccagctccggcgagcctgtggcctgccggtggttcggactccgacgagcccctgcagaccgtcgacggcgacgtcggcttcgacgcaggagagccattgccattcttactgccattgccaatgatctttgtgctgctctgttctattgtcagaatatttttcatgcccagtttatgggggttaagctagcttctccattgtatcgctctgatgcgcggatgatgcgatgcacagcatagttgtgtgaagagatgacaaggcagattttagcttgaaaacct

SEQ ID NO: 419540 - DNA, 374 bp, Oryza sativa
ttcgatccttccaaagtccaaaccctagtggtgacctcgcctcggtctcgaaaccctagccgcagatctcgcctctccttgccccgcgccatggacgacgacttggagatgccgccgcccggcgccgacgacgacttgatgatggcggaggacgggatgggcgacttcggcggcgccgacgggccgccgctgaaggtcggagaggagacagagatcgggaagcagggtctcaggaagaagctgctcacggagggcgaggggtgggagaccccccaggtcggcgaccaggtcgaagtacactacactggcacactgcttgatggagagaagtctgattcaagtcgtgaccgtgggacacccttcaagtttaagct

SEQ ID NO: 419541 - DNA, 569 bp, Oryza sativa
ctctcgcatcaccaattctaaccctaacgacaaccctactctctctctccaacaatcaaagattcgatggccgtgctggtggcgaggcaggggcgggagctgcagcggtacacgagcgccgggggccgcatcgtggtgggttgcatcccgtaccgggtgcgcagcggcggcgagatggaggtgctggtgatcacgtcgcagaaggggcacggcatgatgttccccaagggcgggtgggagctcgacgagtccatggacgaggccgcccgccgcgaggcgctcgaggaggccggcgtccgcggcgacaccgagacgtccctcggctgctggtactacaatgagccgcgctacgacaccacctacgagggcttcatgttccctctccgggtcaccgacgagctcctccagtggcccgagatgtcctcccgcaagcgcacctgggtgagtagtagtagtacatgacccccccatctgactttgatacacgggaaattgccattctacggtgagaacgatcgatttgatcgaccaagaacgacacgggcgttaatagccatttattttgtgca

SEQ ID NO: 419542 - DNA, 484 bp, Oryza sativa
ggttcaaatatggattgcaatttgaaaatctcaacaagaatcatcatcgcccgacaacttgggaagtaacgtttctcatcagtgcaccactagaacaaagattagccagcacacaaaatctaagatatgtcgtgagtgtcctgtccttaggcagcagtaacaggttccgatccttgcttcgattcagctccagatccagctttgccgtcttcggctggctgcttggtcatcttggcgaacatattgctgtagaatttggcatccttcttgttgtactccttgaccttttccttgaggttcttgtatgtcaacttcacatccctgttatcaggatcaatttcaagtgccttcttaatatccacctctgctaactctaggtcagcaagttgcatgtaagcttgggcccttccgtataaagccttgacattttggctgtcaagttccaaaaccttggtgcaaagcttctcaacttgcttgtaatctt

SEQ ID NO: 419543 - DNA, 486 bp, Oryza sativa
  unsure (1)..(486): unsure at all n locations
ttcgaaccttccaaagtccaaaccctagtggtgacctcgcctcggcctcgaaaccctagccgcagatctcgcctctccttgccccgcgccatggacgacgacttcgagatgccgccgcccggcgccgacgacgacttgatgatgggggaggacgggatgggcgacttcggcggcgccgacgggccgccgctgaaggtcggagaggagaaggagatcgggaagcagggtctcaggaagaagctgctcaaggagggcgaggggtgggagacccccgaggtcggcgacgaggtcgaagtacactacactggcacactgcttgatggaaagaagtttgattcaagccgtgaccgtgggacacccttcaagtttaagttgggacaaggtcaagtgataaaagggtgggatctaggtatcaagaccatgaagaaaggcgaaaatgctggtttcaccattcctcctgattnggcctatggtgaatctggttca

SEQ ID NO: 419544 - DNA, 484 bp, Oryza sativa
aggtaagcatagagggatattctctttttttttcatccctctcttgactcattttctcatagagttcaggcttctaaaacatcatgctacaacaacagcttattaaagaaacaaagagagaaattaaaaaaaaagttgattgctttgatcagcatcaaacaacaagacctcctgcatttcacttatgtacattgtcagttaccatgagtttaaccaccattctttgttcgcttcgccgtggatgaccttcgcagcggcttgtacagcacgaagcttacatacttggattgaaaccggtgagtgactccaagagcaagcagcgactgcgatccccatcctttctcgatatacaggtggttgaggacaacatgctttggcttcagagtttgttcttcagagttatcagtatcaccaagaacagacattacaagctgaggtggcagtataggtggcttcttggcaaactcctcatcacctgggagct

SEQ ID NO: 419545 - DNA, 453 bp, Oryza sativa
tcggtctgaccaacttccacggcctggacctcaccaccgacaagctgcgctcgctcatccgcaagtggcacaccttgatcgaggcccacctggacgtcaagaccacggacggctacctggtccgcctcttcgccattggcctgaccaagcgccggcccaaccaaacctccaagactgcctacgcccagtcctcccagatccgcctcatccgcaagaagatgaccgaggtgatggagaaggaggtgtccaccgtcagcctgaacgagttcgtgggcaagctgaccaccgagaccattggcgccgagatcgagaaggccacccaaggcatcttccccctggagaacgtcctcatccgcaaggtcaaggtcatccgctcgcccaagaccgacctgggcaagctgctggaggtgcacgcggacgcgggcaagaaggtggagcggaagtaagtggagg

SEQ ID NO: 419546 - DNA, 355 bp, Oryza sativa
aggatcaaaacatttctattaccacaactttttaaggatggaattgagtagcaatactttcaccccaaaatacagtttagcgacaatatcttagaaaagccgcttgctttgccgccatggctggcaagctgagcagagcagctaacacaaagaacacgagatcactataaaccaaacggcaacgaacgaagaaaatacagggtcttttttgtctgaagatacacgaagcggttcgttttcttttatttttagtctcctctcctcctcgatgatgggtgtatggcaatggcaatggcgatgggatctttgcttagttgatgggaaggggcttgccgtttcacttctttgaggcagt

SEQ ID NO: 419547 - DNA, 377 bp, Oryza sativa
tcgttaccttctcctccggctcttcttcagtatcgaatcctctcttctcctcgtgcccaccaccaccaccgtagcaatggcgggcaacgggccgatcaacaaggaggacccgctcaactggggcgcggcggcggccgagatggccggcagccacctcgacgaggtgaagcgcatggtggcgcagttccgcgagccgctggtcaagatccagggcgccaccctccgcgtcggccaggtggccgccgtcgcccaggccaaggacgccgccggcgtcgccgtcgagctcgacgaggaggcccgcccccgcgtcaaggccagcagcgagtggattctcaactgcatcgcccacggcggcgacatctacggcgtcaccaccg

SEQ ID NO: 419548 - DNA, 502 bp, Oryza sativa
  unsure (1)..(502): unsure at all n locations
cttgtgggttcttgcattgggagagggggagatgagcggcccaatgcaacgctcgtcgcagccacagtttatctctagcgtcgagcggaacaatcaatcgaatggtcctggcactcctcttattgacagcatagatgttgatcagattgttattccagagaaaaatagttggaagaacctattttcatacatagggcccggatttcttgtctctattgcgtatattgatcctggaaattttgagacagacctacaggctggagcacagtacaaatatgagcttctttggatcatacttattgcgtcatgtgctgctcttataattcaatcacttgcagctaggctaggagtcgtgactgggaagcacctggccgagcattgcagagctgaatatccaaaggctacaaatttcatattatggattcttgcggaactagctgtagttgcatgcgacattcctgaagtaatnggaactgcttttgcttttgacatgctccttaaa

SEQ ID NO: 419549 - DNA, 462 bp, Oryza sativa
atgtgaagccgtaagataaagagacatggaatattacaagaagcactcaaacatcttcagagttacaaaattcatgtcacgctacagggagtatcaagaactctcttgaacatcaggcaattcttacctcctaccagactacatgttctaccaaaaaccatccaatccggtcgcacatcccacttccatttatatatgttaattgggagacaccattgtatcacatttgtagcagatgatgtttcgagctgtctcatcagtcgatcttcacagaagcatatatcttcctcacgaaccagaagcaagcatagaagccaatggtaccagtcagcacgaagaaagcatacgagatgatcagcatgtaaccaaagtagagaatgcctgaacaagcttcgtgatctccagcttgttgaaaaagtagaagatggcataagcaaaaagatacagtgctgaagagccagc

SEQ ID NO: 419550 - DNA, 348 bp, Oryza sativa
tttacgcgtggggaaaaatttctccccaatctcgcgaggctctcgtcgtcgaatcgaatcctctcgcgtcctcaagatgcagatctttgtgaagacattgaccggcaagactatcaccctcgaggtggagtcctctgacaccatcgataatgtcaaggctaagatccaagataaggagggcatccccccggaccagcagcgtctcatcttcgctggcaagcagctggaggatggcaggaccttgctgactacaacatccagaaggagtcgacccttcaccttgtcctccgccttcgtggtggcatgcagatctttgtcaagactctgaccggcaagactattaccctt

SEQ ID NO: 419551 - DNA, 407 bp, Oryza sativa
tttgtttgcacagaacaggattacgtaacaatacgctatgcccaagacaagtcaatactacaacatttgtggcgagtacagaggtacaaaagtcaggcaccgtaagcctttcgattaaaaaccaaactgaaacacgcacgattttttaacaccccacgaaaaacaatctgatacctagctcctttggtggtggaacctaaagagctttatcttcccaaaacatccacatcattatctgtcatgactatatagtttcgatacgtaaaaaggcagcgttcactcagggatatccgccatgtcttcctttcatttaagcccggccaagatgctttaagccttgttggcaatgttgttggaaagccagtcaagccccctatacaacccttcaccagaggtagcacattgtg

SEQ ID NO: 419552 - DNA, 226 bp, Oryza sativa
ctccctctccgcccatttcttctctccacctgcgatccatccgcgcccgcgaggaggagggagccggacgccgccgcggggagagcaggggagagaaggagaggaggagatcgccgtcgccgtcgccgtcgccgtcgccgatctcaagcggaagcggatatgggcctcacttttcacaaggttgttaacccgctttttcgccaagaaggagatgaggatcctcatg

SEQ ID NO: 419553 - DNA, 212 bp, Oryza sativa
gcgaataagcacatggttctgtgctctgaaagatagggctcgcctgaagttcttggttctttaggctgcttctgcctgtactccggtcttgttaactaacggtccacatgaaaagcatgttcaggagctgctttggtatatcagatttggattatggtgggtcatactaggggtggcttcatccattgcgttaggctctgcattgcacacat

SEQ ID NO: 419554 - DNA, 526 bp, Oryza sativa
cgcatcgtctcctctccgccgccgcagcggaagcggaagcgcgcgcgcgagagagatggcgtcccgcgccgtcggcgccgcagtcgccgccgtggcggtgctcctgctgctggctcccggggcggagccgatcgggctgtggctgccgcctcccaccggtggcggggggcgcctcggcggcgccgccgcaccaggcaggtacctgacgcaggaggagcggtggatggaccagaccctcgaccacttcaaccccaccgaccatcggcaattcaatcagcgttactatgaattccttgattactaccgagctccaaaagggccaattttcttatatatctgtggagaatcttcgtgcaacgggattcctaacagctacttagctgtgatggcaaagaagtttggtgcggcagtggtctcccctgagcatcggtactacggaaagagttccccttttgagagtttgacaacggaaaatctaaggttcttgtcatacaaacaggccttggttgatctgggctgtttccgc

SEQ ID NO: 419555 - DNA, 299 bp, Oryza sativa
  unsure (1)..(299): unsure at all n locations
tcggaacaaacagtgaatacttcgaacctgtcaattggctccaagaaaaacagaagccccagaagttctgtgctgggaacatatgttaattgtctttcaacaaaacaccttcatccgtccaaatcttctggttcagttacaaggaacagatttggtcctgttgattgtgatggcatccacatatcctcttgtggacatgctgtacaccaggaatgccatgatcgatatttattctccttgaaacanagatatgtcaggagacttggttttgaaactggtcatattgttgatccggatct

SEQ ID NO: 419556 - DNA, 414 bp, Oryza sativa
aatgtaaaagggtgacggtgcgccgagattgtattgaacgtgtgtgttagattgattacatggggctcggggtctatttatacccgagattacaaaatatgtccatgtcggacacaaatataatctctaacaaactttaagataccataaggcgttgcggcaaacttttgcccaaacttatctctaaggaaattacataaaatatcctaattgatagatacacttgccttctcaggacttaatccgtgcatggcaatccacatgaagcacattaactcaacccgacaacgtgtatcgagttacattgtcggaatcggtttaatcggctaaccttgtccgactcgaactctggcgattctggttgcagccgattcggactttagctgattcttgctttgttcccggaacgatcca

SEQ ID NO: 419557 - DNA, 421 bp, Oryza sativa
gaaaaaagcattcgccgctttgcttcgacccagccaagcctgggcgttgcgtagcgcgcttcaagccagcagctagctagcgcgagagccgtcagttcagtcatgcatcagctcgaccggctttgctacgccgtcgtcgtgctcgtcgtgatcggcgcgacggtcgccgaggcggccaccggcacgttcatctacgccgggtgctcgccgtccaagtaccagccgggcacgccgttcgagggcaacctcaactcgctcctcgcctccatcgccaacgcggcgcccaacggcgggtacaacagcttcacggccgggagcaacggcaccggggacggcgcggcggcgtacgggctgtaccagtgccgcggcgacctgggcaacgccgactgcgcggcgtgcgtgcgggacgccgtggggcagc

SEQ ID NO: 419558 - DNA, 351 bp, Oryza sativa
tttggtttttttgcacaaactggcccttgctatcaacaacactccaacagtcatgctgatacaggtagcaatgcatagcggatttacagccaaacccagacagtactagcataagcacaacgcatgtgccagaatttattcttgttcatagagcggaaaccgcttctttattacattgcactggcattactacataaggtttgcgctttgcctcctagcacagaacttgggccatctctcatcttcactggagttccttcaggaagtcggcgttatcaaccaaaaccacttttccagccatcagggtcaaggaaagaggcaatctttggggtgagccctggtagtggacct

SEQ ID NO: 419559 - DNA, 452 bp, Oryza sativa
cgtctaaccctctccagtctccactccactggatcctcccacctcggctcgcaggaatggcaagcggcagtgaagctgagaagtcacctgaggttgtgctggagtggcctaagaaggacaagaagaggcttctacatgctgtttaccgtgttggagatttggatcgcaccattaaatgttacacagaatgctttggaatgaaattactgaggaaaagagatgtgcctgaagagaaatatacgaatgcatttcttgggtttggacctgaggacaccaactttgcacttgaattgacatacaattatggtgttgataagtacgacattggagcaggatttgggcatttcgctattgcaactgaggacgtgtacaaattggctgagaaaattaaatccagttgttgctgcaagatcactcgcgaacctggtcctgtcaaggaggatccactgtga

SEQ ID NO: 419560 - DNA, 377 bp, Oryza sativa
ctaccttctcctccgttttttcttcagtatcgaatcctctcttctcctcgtgcccaccaccaccaccgtagcaatggcgggcaacgggccgatcaacaaggaggacccgctcaactggggcgcggcggcggccgagatggccggcagccacctcgacgaggtgaagcgcatggtggcgcagttccgcgagccgctggtcaagatccagggcgccaccctccgcgtcggccaggtggccgccgtcgcccaggccaaggacgccgccggcgtcgccgtcgagctcgacgaggaggcccgcccccgcgtcaaggccagcagcgagtggatcctcaactgcatcgcccacggcggcgacatctacggcgtcaccaccggct

SEQ ID NO: 419561 - DNA, 461 bp, Oryza sativa
cgaagcagcaggcggcggcggcagagcacggcgacctagcccgacctcgcaaccatggcaaggggtttgaagaagcatctgaagaggctcaatgcgcccaagcattggatgctcgacaagcttggtggagcttttgcccccaagccatcttctggtcctcacaagtccagggagtgcctgcctctgatcctcattatcaggaacaggctcaagtatgctctgacataccgtgaggttatttctatcctcatgcagcgccatgtcttggttgatggcaaggtcaggactgacaagacctacccagctggtttcatggatgtcatttccatccccaagactggtgagaactacaggcttctgtacgacaccaagggacgtttccgccttcagtctgtcaaggatgaggatgctaagttcaagctttgcaaggttcggtctgtgcagtttggccagaagggaat

SEQ ID NO: 419562 - DNA, 499 bp, Oryza sativa
ctaactggtagtcagtcatgaaggtgctcatcgttctcgctctggtagcatgcgccgcggccgtcggccgtaaccgccccgacacgcacatcgtcggaggccaaaacgccgacgccaacgagtggcgctggcaggcaggatggctgagcggcggctcgttcagctgcggctgctcgatcgtgcacgccaactggatcatcacggccggtcactgcgtcggtggagtcatcggacagtacagcgtcgaggtgggcagcgccaaccgcggcgctggccagagaatcaccgtcagctccgtcgtccgtcaccccgactacaacgtcggcgccggattcacgcccaacgacctcgctgttgtcggcgctagcgtgcccctcgacggtagttcggtgatcgctgttcccggtggcattgacaaaggcgagaatcgcgagtcgcagaactgctacatcaccggctggggccgcacgtgcggctcgtgcagtctgcccgtcgccct

SEQ ID NO: 419563 - DNA, 462 bp, Oryza sativa
tcgtccacgcgtccgcccacgcgtccgcggacgcgtgggtccgcctccgcctcctcctcctccacctcctcccaccccctcgccgatccagatccatcgccggggaggcgccagccatggccggcggcgggggcgccggcggcatgtcggagtcggtgctccgcaaggtgctcctctcctactgctacgtcggcgtctggatcttcctctccttcgccgtcatcgtctacaacaagtacatcctcgaccccaagatgtacaactggcccttcccgatctccctcaccatggtccacatggccttctgctcctccctcgccgtcgccctcgtccgcctcctccgcgtcgtcgagccgccctcgtcgcccgccatgaccccgcagctctacacctcctccgttgttcccatcggcgcgctctacgccatgtcgctgtggttcttcaactcggcctacatctacc

SEQ ID NO: 419564 - DNA, 499 bp, Oryza sativa
aacgtgcggaacatctacttcccgttcgacgtggcgaacgacacggcgatggaggtggcgacggagatggtgaaggagctggacatcgccgaccgggagcccacggagatcgccgccatgatcgagcaggagatcgtgaggttggtgccagggtacaagcagcacgagtactcgtacgcggatgacaacgacgatgatgacgtcagcggacaccctaatcccttctactacctctcctcttcgccgacctcctctcagggatctctctgcggagtggggtccacatcgtcagaggggtttcctggcccacatggaaaagttgactggtcaagagattactgttactaccctccaagcagcgtcagcgtgagcgacgacgatgacagcagcacgagctcactctctgctgcagtcagtgcaagcagcctgcatcagcagcagcagcattgctcgcctcttccagcagattgggccagcatctgcatctgcatctgaagac

SEQ ID NO: 419565 - DNA, 508 bp, Oryza sativa
ttattattcgaagccatccaccaacgaagaaaaaggaaagggagaaaaaaaaatccacgcacactttgcgtgcgaggcgaggcggttcgattcgagaggagagagagagagagagagagagagagagatggacgccttctactcgacctcgtcggcgtacggagcggcggcgagcggctggggctacgactcgctgaagaacttccgccagatctcccccgccgtccagtcccacctcaagctcgtttacctgacactatgcgtcgccctggctgcgtcggcggtgggcgcatacctgcacgtcgccttgaacatcggcgggatgttgactatgctcgggtgcgtggggagcatcgcctggttgttctcggtgcctgtctttgaggagaggaagaggtttgggattctcttggccgctgccctgctggaaggggcttcagttgggcctctgatcaagcttgctgtagactttgactcaagcattctcgtaacagcatttgttggaact

SEQ ID NO: 419566 - DNA, 451 bp, Oryza sativa
ttgtaaggcgtttagccccacaaccatcaacagtgggcgtggtgctgaatttgaaggagctgtcattgcattgttccatttgttgattactagaactgacaaagtccgtgccttgcgtgaagctttctaccgtcagaaccttccgaatgtgacaaatttacttgcaactgtattggtcttcctcatagtcatctacttccaaggcttccgtgttgtgcttccagtgagatcaaagaatgctagggggcagcaaggctcatatccaattaagttgttctacacttcaaacatgcccatcattctgcactctgcactgattaccaacctctacttcatatcacagcttctctacaggaggtacagtggaaattttctggttaaccttcttgggaaatggaaggaatctgagtactctggccattcggttcctgttggtggtctcgcttactat

SEQ ID NO: 419567 - DNA, 583 bp, Oryza sativa
  unsure (1)..(583): unsure at all n locations
cacgggccgccgcccccactgcaccctctcccacccccatcacggcgcctcctcgccctcgcgccgcccgccgtgtgccatggcggaagtagcggcgacgcagcacggccacgccgtcgccgcgcgcgcaatgccgggccgcggcgaggtggacacgtcgtccccgttcgagtccgtgcgccaggccgtcgacctgttcggcggcggcgccctctccccctggcgccaccaccacccgcctacgcctccgccgcccccacccctgcaactccgcccggaggaggtagaacttatgaaagttgaggaacaaactgtgaagttagagatggagctttttgtcaaggaaaaagaaacgtttaaggttttgaaagaattacaggcaacaaagcaggttgctgacaacttgaagctacagttagagaaagcggcatctgagagtgcagcttctgcaagaggtcacagtgatgcagggaaggtgtatccactccctgacaccgaacggaaatgcagttaccatactgggcagccngtcgagagcgcaaaaggaatcagtccgcgctaaccacangatcaagctgatcag

SEQ ID NO: 419568 - DNA, 490 bp, Oryza sativa
ccggccaccaactttgacccgtcctcctcctccgcatcccccatcccctcctccccggcggcggcggcggcgcggaggcggcggcacggcagcggctagtggtttcgtcggcggaggcggaggcggggccaagatgttcgggcgcgcgccgaagaagagcgacaacaccaagtactacgagatcctgggggtccccaagaccgcctcccaggacgacctcaagaaggcgtaccgcaaggtcgccatcaagaaccaccccgacaagggcggcgaccccgagaagttcaaggagcttgcacaagcttatgaggtattgagtgacccggagaaacgtgaaatctatgaccaatatggtgaagatgccctcaaggaaggaatgggtggaggcggatcccatgttgatccatttgacatcttttcatcattctttggaccttcttttggtggtggtggcagcagcaggggcagaaggcaaaggaggggagaggat

SEQ ID NO: 419569 - DNA, 537 bp, Oryza sativa
  unsure (1)..(537): unsure at all n locations
atttcggagggggatgtgtagcggcggcggcggctagggtggtggtttgctgttcttcgagctagcatctgtagtaattctcgcaagttatttgaaggacaaatatggctactattcaagatataggtgtctctgcagctatcaacatactgagtgccatcactttcctgctagcgtttgctttcctgcgactacagcccatcaacgatagggtttacttcccaaagtggtatctcaaaggtgcaagagagagtccaagtcatgggggtgcatttgtgcggaagtttgtcaatttggacatgcgatcatacttgaaggtcttaagttggatgcctgctgctctcaaaatgccagaggatgagttaattagccatgcaggccttgattcagctgtctatctgcggatctacttaatagggcttaaaatatttgctccaatcacagttctagcatttattattctntgtgcctgtaattggaccaatattacccttcaaagctcgaaggtgcagcacagtgatattgacaaacttcata

SEQ ID NO: 419570 - DNA, 573 bp, Oryza sativa
  unsure (1)..(573): unsure at all n locations
ctcctcacatcgccagctcgtccgcttgccccgcaccgcaaccgcggcgcggaggaggagagctctcgcgccgcgcgtgcgcgcgcgcgtgcgggcgtgcgcgggcgatcgaatccgatcgccatgaccggcgccgacgagccgtccatcacccgctggaccttcgaggacttcgaggtctactacgaggtgcgcctcggcatccgccgcgagcccgggggagatgaagacggcgacggcgacggcggcggaggtcgcggctacgcgccgcttggatccggctccgcgggcagcacccgcccttnncgcggcgcacgccaacggcggcgccgacctggccgtcttcgagcagttcgagcggctggagaggaaggtggagctgcggaatggagcaattgaagctgggcctccgcagaaatccctacttccttcttttgaatctgcagaaatgcgcaatttagctgagacattgttgagggatatcattcgtgggagtccagatgtcaaatgggaaagcattaaggtttgagaatgcaagcgtcttctgaagagcagtgtgatgctataaatacc

SEQ ID NO: 419571 - DNA, 294 bp, Oryza sativa
gacacaaatcttattcactcgattcgattcctgggcaccgatccagaccaattgtgcttcttctttcacggttaaaacagggcggagaaaaaaaaagagtaaggaaggggagaaaaaaatgaagaagacgaactagcgagtagacggagaggagcaacgaacgaactttgaatccagttcgaacagcgggttggtggtgagtggaggccggtcagccgcggcagcgggtgatggcggagcagccgcgggagtaggggttggcctggccgccggggcggcagttgtagtaggagg

SEQ ID NO: 419572 - DNA, 564 bp, Oryza sativa
  unsure (1)..(564): unsure at all n locations
caaccattacgctatccgccacgagcaagaaggcgacctcaccaaataatcccccaccaccacaagaagcaggggcgcgccatggcgagagccgctaccgtggcggcggcgtcgtccgcgctgctgctggcgctgctcctggcgctggcgtggggagccgcggcgggggcgggggaggtgccgctcggctgggagctcggggtcggcgtcggcggcggcagcggcgacgacgacggcttcgggttctccggggcggcggctgacggcgccgcggtggtgaggcgggtcctgcaggggcggggctacatcagctacggcgcgctgcgtcgcgacacgacgccctgctccgtccgcggcgcctcctactacaactgccgccccggcggccaggccaacccctactcccgcggctgctccgccatcacccgctgccgcggctgaccggcctccaccaccaccaacccgctgttcgaactggattaaagttcgttcgttgctcctctccgtctactcgctagttcgtcttcttcatttntttctcccctttcctactccttttttttc

SEQ ID NO: 419573 - DNA, 430 bp, Oryza sativa
aaaccttcaaatgaacaggggaaacaattccacaagcgtttattacaattttcggtttttccacgatacattgcttgattgaaagtaaaataccatcaaataggctgtaatatgtaatatccaaggagccatgcttcagaaatgcagattaacaagattatgtatcacttcactggttcaatctttcttttggagcctgagtgtgaaagcctgaagggataagagaacttgcttgatccgttctctgatttgcgcatcaatcaaattaccatcactgtcaaactttggaggctgctcaaatgcttttacggctagttctggcttgttgatgaagtgaagatctaaaaataccccgacctgacgaagatggtactgtgatctacccccttcaaagccacctcctgcactgacaattgcagcaggtttgtct

SEQ ID NO: 419574 - DNA, 517 bp, Oryza sativa
  unsure (1)..(517): unsure at all n locations
gcgcgcgtcaccaactcagcagcctgagccgccgagggagaagacgacgacgacgaccaccaccaccaccatggaggccgcggcggcgaggcccgtcatccgcgtcgccgccatctgcggctccctccgcaaggcctcctacaacggcggcctcctccgcgccgccgcgggggtgtgcgaggagtccatcccgggcctgcgcgtcgaccacgtcgacatctccggcctgccgctgctcaacaccgacctcgagaccgccgatggcggattccctcccgccgtcgaggccttccgcgacaaggtccgccaggccgactgcttcctcttcggatcccccgagtacaactactccatcgcaaccccactgaagaatgcacttgattgggcttctagagggcaaaattgctgggcagacaaacctgctgcaattgtcagtgcaggaggtggctctggagggggtagatcacagtaccatcttcgtcaggtcggngtatttttagatcttcacttcatcaac

SEQ ID NO: 419575 - DNA, 464 bp, Oryza sativa
aagcacaatacatcacataagtcttttattcatatataatcatatataaaccacgtacatatatagcgaatgtaatacaacacaaataaatgtatacgacactgacagaggtataacggggcactagtgtggtaaacccttggacctagtccaagcacatacacatgcacactatatatgtatagttatatagtgattgaaagaaatatcacccttaggtcttgttcggttcattcccaaaagagagattagagagaattgaggggattaattccacacctcaataaatgtggaattattctcctacaaatctcacttaacttcttgttgagggactaaacgaatagacctaggggtgaatttatcatgagcactgatccaaccatatatccaaggatatattcatatgtagataatatatatcatatgtggacataaactccgatagagccacaagtgcttcc

SEQ ID NO: 419576 - DNA, 319 bp, Oryza sativa
ctagtcacagatacatagtaggacagaggctacaaattaaaatgagcacacaacttgttaagatcgggacatggggtggaaatggaggaggtcgtgtagacctatctgtactcccaaggagcttgaaaagcgtgacaatccgtagtggtgcagccattgatgctattgcctttacatacattggcacagatgggaaggaacatcttgcaggtccttggggtggtggcggtggaaatccaactacgattacacttggatctcaggaattcgtgaagggaatctccggaacttttaccaacgtcgtgacaaaccttaaaat

SEQ ID NO: 419577 - DNA, 387 bp, Oryza sativa
gaggaagcgcggcaataaaacattgcattgaattctgaacgataaacaccaggaaccggcgtttatttgaggcaagcactgcccaaaatctcgcaaaagtactgaaaccttagacatagtacacatccatggcaaacatggatgccaaatgacaactacagaaaattatcaaattcgaatgcagctgacggcttctcctgctgaagatgcatattttcccctccattacttggatgtgctctcttcatcgacagccaatgggacggcgctggccaggctgcggtattttcagagcatagaacattttaatgtaaccggcgagtctcgcgccttttaaggttgctttacgtactttcagaatccatatacacccgtcaagggcattag

SEQ ID NO: 419578 - DNA, 427 bp, Oryza sativa
  unsure (1)..(427): unsure at all n locations
gataattgagtcatggctgccaagctagcatcggcttcacagtctccgcgaacgcctcggtgccaccttctcgtctcatcccaatgagtggattgcactcttctctaggtatgttaaccagggaaagggaatgctccagcgtcaccagctgcttgcggagttcgatgccttgatcgaagctgacaaagagaaatatgctccctttgaagacattctccgggctgctcaggaagccattgtgctgccgccctgggttgcactggccatcaggccaaggcctggtgtctgggactacattcgggtgaatgtaagtgagttggcagtggaagagctgagtgtttctgagtacttggcattcaaggaacagcttgttgatggacacaccaacagcaactttgttcttgagcttgattntgagcccttcaat

SEQ ID NO: 419579 - DNA, 485 bp, Oryza sativa
  unsure (1)..(485): unsure at all n locations
cttactcttcttcttgctagcttgctagcttctgcatttagacattgcaaaatctgaaaaaacttgagaaattaactaaacaaaatggttgttccggtgatcgacttctccaagctcgacggcaccgccgcagagagggctgagacgatggcgcagatcgacaatggctgcgaggagtggggattcttccagctggtgaaccatggcgtcccgaaggagcttcttgatcgggtgaagaaggtgtgcttggagagctaccgactccgggaggcggcgttcatggagtcggagccggtgaggacgctggaggggctcatggcggcggagcggcgcggcgaggcggcggcgccggtggacgacatggactgggaggacatcttctacctccacgacgacaaccagtggccgtcgaacccgccggagttcaaggagacgatgcgcgagtaccgcgcggcgctgcggnggctcgccgagagggtgatgga

SEQ ID NO: 419580 - DNA, 568 bp, Oryza sativa
  unsure (1)..(568): unsure at all n locations
cttcggattcaggtgcaatctacaatgttcttgagcttctcatacaatctggaagaagtgcgccagaggctgtcatgatgatgatccctgaggcgtggcaaaacgatgttaacatggaccctgagagaaaagctttgtatgagttcttttcagcacttatggagccttgggatggaccagctctaatctcatttactgatggccgctaccttggtgcgacccttgatcgtaatggtttgaggccaggccggttttatgtgacctacagtggccgtgtaattatggctagtgaagttggtgtggtcgatgttcctcctcaagatgtttcaagaaagggtaggctaaaccctggaatgatgctattagttgattctgagaaccattgtgttgtgaatgatgatgaattgaagaaagagtactccaaagttcgtccatatggagagtggctgaaaagacaaaggatacaactcacagatatcatagaatctgtaaatgaagcagagagaattgcaccgagcatttcgggtgcacttccaattacanaggagaacatagcagatatgggtat

SEQ ID NO: 419581 - DNA, 517 bp, Oryza sativa
  unsure (1)..(517): unsure at all n locations
cccacgcgtccggaaaaaaataatttattttttataggagaaaaaaagaggagaaaaaaaagggaagaaagagatggacgaggcgtgggagagggcggtggaggcggcgctgcaggccgccggagaggggagctcgtcgccggcgaggagcctgacgctggacggcgccgtgaagtgcctgcacggacggctgcccgcggcggagattctggagcggtaccagagcctggagcacctgtcgatcgccggcgtcggggtcgcgtcgcttgccgggttccctcggctgcggaacctgacgcgcctgacgctctccgacaaccgcatcgccggcggcctcgaccacctcgtcgccgccgggctggcctcgctccgcgacctcgacctcagcaacaatcgaatccaggacgtcggcgacctctcgccgttcgccaacctnncgctcgtctcgctcgacctctacgagtgccccgtcacgcgggtcaaggattacagatccagggtgtcggcatgatccgga

SEQ ID NO: 419582 - DNA, 491 bp, Oryza sativa
tgatagatcatatcagacaagtaaatctagcttgctgtaaacacagttagttcgtaattatcgcatagggccatggggaagtacagtgtgggtctcgtggttttagggttgctggcccttgcgttttcgaccactgtgctggctgaaacacatgttgttggtgactccaacggttgggacttctctgtgtcgtttgatagctgggctgatggaaaggtcttcgctgctggtgacactcttgttttcaactacaaaccgggcgcacacaacgtgctggccgtggacgcggcgacgtacaggagctgcaaggtgggcagctcggcggacttcgtggcggcggcgacggtgaccgcgtcgttcctcctcaagaagggcgtcaactactacatctgcggcgttcgcggccactgcgccgccgggatgaaactccgggtcgtcggcaactgatgaaacttccgcgacagatcaatcccttatttaatgaaactatg

SEQ ID NO: 419583 - DNA, 491 bp, Oryza sativa
caaatacaaataaacctttactacgtacacaaaaataagttatcttcaagagagaaaacaaaactagaggtacaatcattaagacccgcaattcggctagtagaaaattcgaaacaaaaagctttcaaactgcacgggcaaacatccttgttgcccggtgaaacccaacacaacaatccattgcatacattaggaatgccctgatgcgatgccattgtctgaaaaaactgaccgactcagacgacctacactgcacactacctggacagatttcttccagtacaccaattgacttcaccttccgcattgccccatggccaacagccctcaggtgctactgaaaccatgggacgcatgcaaacaatctgcagattacgtttcaatcagctgataatggtacaaatctgcccacaaacttagaagcactttatgtggacgatgcctggaccagattcatcgtatttggccttggagatccacatctgctgaaa

SEQ ID NO: 419584 - DNA, 468 bp, Oryza sativa
tggacgcgtgggtgagcaaggaaataactgcacttgcccctggcagtatgaagatcaaggtagttgcaccgccagagaggaaatacagtgtctggattggtggttccatcctggcttctctcagtacctttcagcagatgtggatctccaaggccgaatacgatgaatctggtccaggcatcgtccacatgaagtgcttctaagtttgtgggcagatttgtaccattatcagctgattgagacgtgatctgcagattgtttgcatgcgtcccatggtttcagtagcacctgagggctgttggccatggggcaatgcggaaggtgaagtcaattggtgtactggaagaaatctgtccaggtagtgtgcagtgtaggtcgtctgagtcggtcagttttttcagacaatggcatcgcatcagggcattcctaatgtatgcaatggattgttgtgttgggtttcaccgggca

SEQ ID NO: 419585 - DNA, 554 bp, Oryza sativa
tcagttagttgaagctgctcaacttgcaagggctccagttcagaagttggcagataggatttcacggttttttgtcccaacggttgtggtggctgcatttcttacatggcttggctggttcgtagctgggcaattcgacatataccctcgagaatggattccaaaggcaatggatagctttgagcttgctctgcagtttggaatatctgttcttgttgttgcatgcccgtgtgctcttggactggctaccccgactgctgttatggttgccactggaaaaggtgcttctcaaggtgttcttattaagggtggcaatgcacttgagaaagctcacaaggttaaagctatcatatttgataaaactggaacgctgactgtcggtaaaccttctgttgttcaaacaaaggtgttctccaagataccgctactagagctgtgtgatttggctgctggtgcagaggcgaacagtgagcatcctctatcaaaggctattgtagagtacaccaagaagctcagggaaacatatggatctcacagtgaccatattatggagt

SEQ ID NO: 419586 - DNA, 536 bp, Oryza sativa
  unsure (1)..(536): unsure at all n locations
tctctctctctctctcctccgcatcaccaccaccgccgccgacgagctccggtcgccgccggcgagaggcgccgcgcgatccgggagatgccgccgctcacggggcccaagtccggggacgctctcttcggcagcgtcgagcgcgtcaacgcggagctgttcacgctcacgtatggggccatcgtgaggcagctgctcacggatctggaggaggtcgaggaggtcaacaagcagcttgatcagatgggctacaacattggaactcggttggttgatgagttcctggccaaatcaaatgtatcaaggtgtgttgacttcaaggagactgccgatgtcattgcaaagcttggattcaaaatgttcttgggtgtgactgcaactgtcaccaattgggatgctgagggtacaagctgcagctttgtattggaggacaatcctctngtagaatttggtgaacttcctgatacttggccaggtcttcagtactgcaatgtgctaagtggagttattaggggtgcactggaaatggtgtctat

SEQ ID NO: 419587 - DNA, 482 bp, Oryza sativa
acgtaacaatacgctatgcccaagacaagtcaatactacaacatctgtggcgagtacagaggtacaaaagtcaggcaccgtaagcctttcgattaaaaaccaaactgaaacacgcacgattttttaacaccccacgaaaaacaatctgatacctagctcctttggtggtggaacctaaagagctttatcttcccaaaacatccacatcattatctgtcatgactatatagtttcgatacgtaaaaaggcagcgttcactcagggatatccgccatgtcttcctttcatttaagcccggccaagatgcttcaagccttgttggcaatgttgttggaaagccagtcaagcccctcatacaacccctcaccagaggtagcacatgtgctctggatgtaccagtgccgctggcgcaaggagtgcagaccaagctttgcggtgatctcagcagcgttcatggcattaggaagatcttgtttgtttgc

SEQ ID NO: 419588 - DNA, 578 bp, Oryza sativa
  unsure (1)..(578): unsure at all n locations
ctctccctctccgcccatttctcctctccacctgcgatccatccgcgcccgcgaggaggagggagccggacgccgccgcggggagagcaggggagagaaggagaggaggagatcgccgtcgccgtcgccgtcgccgtcgccgatctcgagcgggagcggagatggggctcacgttcacgaagctgttcagccgcctcttcgccaagaaggagatgaggatcctcatggtcggtctcgatgcggccggtaaaaccaccatcctctacaagctcaagctcggcgagatcgtcaccactatccccaccatcggttttaatgtcgaaactgttgagtacaagaacattagcttcaccgtttgggatgttggtggtcaggacaagatcaggcccctgtggaggcactatttccagaacacccagggcctcatttttgttgtggacagcaatgacagagagcgtgttgttgaggccagggatgagctccaccgtatgctgaatgaggatgagctacgtgatgctgtgctgctgggtgttgcaaacaaacaagatcttnctaatgccatgaacgctgctgagatc

SEQ ID NO: 419589 - DNA, 503 bp, Oryza sativa
ttttgttagttaaagtattttacttcaataattcaagacaactcaaacttagttggcacacatgtactccaccccctatcactagagttgttttcttttttgtacaagatcatcctaacattcccacaaggacataaagaaacagcagaaccttcccgggaaaatttcactgagacaggtgcattccgtgcacgtacaataatcatcaccatcatcgtatcatccaacctacaggaaaacgcaaattcaaggtactcttgtccaaacctgtaggtggccagtgatttgctcccatcggctacaactaccagactcaaaaaaactagacacaggtatgatgctaataagcttagcatgatcgactgatggacagacagtaataacaaataggaaacggagggaactatatgtgtcaactcgatgaactctataatatatggatgatttccagcgcccttctggcaaaaataacgcccttgtaaatctatcgtcaccatttaaac

SEQ ID NO: 419590 - DNA, 543 bp, Oryza sativa
tgctgcgcctgctggtaccgccgcgcaattcccgcgggaaacccagctgccattgctgatcctgttggggacagtggtggggatattgctggaatggggtcagatctctttggttcctatgctgagtcatcttgtgctgctcttgtcgtggcttcaatctcttcttttggaattaaccatgaattcactcctatgctgtacccgctcctgattagctcagttggtatcattgcttgtctgataaccacacttttcgccactgatttttttgagatcaaggctgttgatgaaattgagcctgccctcaagaagcaacttataatttccaccgttgtgatgacggttggcattgcacttgtcagttggttaggcctcccatattccttcacaatattcaactttggtgcccagaagactgtgtataactggcaacttttcttgtgtgtggcggttggtctttgggctggactaatcatcggatttgtgacagagtattacacaagcaacgcctacagccctgtccaagacgttgctgattcctgc

SEQ ID NO: 419591 - DNA, 433 bp, Oryza sativa
ataggagcaaaacatttctattaccacaactttttaaggatggaattgagtagcaatactttcaccccaaaatacagtttagcgacaatatcttagaaaagccgcttgctttgccgccatggctggcaagctgagcagagcagcttacacaaagaacacgagatcactataaaccaaacggcaacgaacgaagaaaatacagggtcttttttgtctgaagatacacgaagcggttcgttttcttttatttttagtctcctctcctcctcgatgatgggtgtatggcaatggcaatggcgatgggatcttggcttagttgatgggaaggggctcgccgttccacttctttgaggctgtccagcatggggtcgatgagcttgtcctggctgatgcctaggaacaccttgttgtactacctagcgggtacttgagc

SEQ ID NO: 419592 - DNA, 569 bp, Oryza sativa
ctgctgctccggctggtggtgctccggcataattgcgctaccttctcatgcgtctctttttcagtatcgaatcctctcttctcctcgggcccaccaccaccaccgtagcaatggcgggcaacgggccgatcaacaaggaggacccgctcaactggggcgcggcggcggccgagatggccgggagtcacattgacaaggcgaagcgcatggtggcgcaaatgcgcgagccgctggtcaagatccagggcgccaccctccgcgtcggccaggtggccgccgtcgcacacttcaaggacgccatccgcgcaatacgcccagctcataaatggaggcccgcccgcgcgtcaaggccaggaacgagtggatcctcaactgcatcgcccactgcggcgacatctacagcgtcaccaccggcttaggcggcaccttccaccgccgcaccaaggacggccccgcccttcaagtcgagctcctcaggcatctcaacgccggaatctttggcactggctccgatggccacacgctgccgtcagagacggtgcgggcggccatgctcgggcgcataacac

SEQ ID NO: 419593 - DNA, 461 bp, Oryza sativa
cccacgcgtccgagactatctcctccccctcctcctcctctccccgccgacgaccccgccgagctacatctccgccgtgctgatcgcgtggagccgaggagaggagcggcggccaacgctacgaggagaggagagtgggggaggggaggggagctagccttatcttacccgctccgccgaagcctatggactcggagcactggatctcgcgcctggccgccgccaagcggttctacgccgcgcagctcggccacgccgatcgagcggggatggaggaggtggacatggacgaggaggtgaggccggagttcgcgtgcccctactgctacgaggaccacgacgtcgtctccctttgcgcgcacctggaggaggagcaccccttcgagccccatgcggcgccttgccctatatgttttgataagattgcataagatatgcttaattatattactgtgcaacat

SEQ ID NO: 419594 - DNA, 557 bp, Oryza sativa
  unsure (1)..(557): unsure at all n locations
ccgcatcgcttcctccgccgccacccccatggccaccaccaccaccacctcctcctcctccaattcccaaaaccctaaccccttcaacctcccgccatggctccgcagcctccgctgccccttcaccttcctctgcccgcccccaccgcccccgccgccccctcctcctccgccgccgccgcctcccccgctggaggtggtgtcgccgtccccgcggtggaggcggccggggctgagggtgaccacggagtacgacagcgaggaggccatgttcgcgcacaaggtgtcgtgcaaggtcgcgggcgggctcgccaagctgcggctgtcgttccagagcgacccgtcggggcaggggttggtggaggagggcgacccgcggcggcagctattcgtcgcgcccgtggtcgggctcatcgccaagaatttctccgtgctgtacgacgtcgaggcccgcaacgcgctgctcagcgggcagtgctccctccccggnggngccatccagcttcgcgggtcacacgatgtcaaggagcgacaaggagaagtctcagtgatcacta

SEQ ID NO: 419595 - DNA, 454 bp, Oryza sativa
  unsure (1)..(454): unsure at all n locations
ctcggcgagcccgcggccgtgcagcgggaggagggtggtggcgaggaagaggccgaggcacgaggcggcggtgaacagcgtgcggaagctgcagcggcgggagatcagctcctgccgcgaccgggccttctccatgagcgccgcgcaggagcgcttccgcaacatacagctccaggaggagtttgacacccatgatcctaaggaaaacagcttgctactaccttacttgaggaaaaggtcaaaaattattgagatagttgcagcacgcgacatagtttttgctttatcacagtccggagtgtgcgctgcttttagtagagagacaaataggagaatatgctttctgaatggaagtccagatgaagttatccgcagtttattctacaacangaataatgagtcactcattacagtatcagtgtatggttctgaaaatttcagtgccttgcgatgc

SEQ ID NO: 419596 - DNA, 514 bp, Oryza sativa
  unsure (1)..(514): unsure at all n locations
ctaagccgtaagtgagaagttgaaggcgatagaacctcttagaaaccgtttaggaaagttccgcgatgaaaacaatgctatccgggcacagggtgcaggcatatgttcttcaattgaagagcttgagaaatcgatcaagagattgaacgaccgcatatctcatgagagcatacccttggatgaggagaagcggttgatcaaacagattagagagcttgaaaagaccagaccgaaagtcatctccacttctgctaaccgagctcaaatccaagatacagtggtcgaaagagacgccatacaggatcaggttaaaatcatcggggagggcattgatggagtaaagaaggagcgacaagcagtcaggtctaaaattaaggtcctggaggatgagctaaaggctattgacatggagatgggttcgcttcaagaagatttaactgctgccaatgccagaaaggacanggcacatgaatcattggtccaatngagacatgcacgagatgccctatacgca

SEQ ID NO: 419597 - DNA, 498 bp, Oryza sativa
  unsure (1)..(498): unsure at all n locations
ccgcgctccctccctctcctctcctcgcactcgccgtccctcccaatggcctccgctgccgcccacgcggccaccgccaccgccgccgccgtcctcctcgtcgtcttcctcgccccccttgccgccgcctccgactccgaccacaagtaccaatcggaggagaaggttatgctctgggtgaacaaggttggcccgtacaacaacccacaggaaacttacaactactacagccttccgttttgccatccgtccaataaccccgtgcataaatggggagggcttggggaggttctcggtggaaatgagctgattgacagccagatcgacataaagtttggaagggatgttgacaagggtaccatttgttcaattgaacttgatcctgacaaggccaaacagttatctgatgcgattgagagttcatattgggttgaattcttcattgatgatctgcctctatggngttctggtggagaggcagacagaaatagcgataac

SEQ ID NO: 419598 - DNA, 456 bp, Oryza sativa
  unsure (1)..(456): unsure at all n locations
tggacgcgtgggggagatcggaagagagagagagagattgaggaggaggaggaggaggagccatggctgcggtggtgcgtggcgtgttgaacggcatccgggagaagggcctctccaacttcctccgccatgcccgcgacgaaggctacttcaaatgccttctggatggaaacctcttgcaaactaaaatccacaatatcggcgccacacttgtaggagtagacaagttcggcaacaaatattatgaaaaactacatgacactcagtatggaaggcacaggtgggtagaatatgcagagaaagggcgctacaatgcatcccaagtgccccctgaatggcatggatggctgcaccacatcaccgacagcactggggacgagctactggagcagaatgcttaagcgtacatcgtggatcacaaggagaacttctncggcgagggtgaggaactgatct

SEQ ID NO: 419599 - DNA, 365 bp, Oryza sativa
caccgagccagcgtccagaaggaggggagcggagcgccatcagccgtccgatcgagcgatcccatagctgtcgctctctccacctctgctgctgctgccgctgccgccgcggcgcgggcgctcgcggcgagggtgacgacgacagggggttacaccgcgtctgcggcgtcgacggcgatgaggcgggcggccgcggcggtggaagggaagggcgctgcggggatgacgcatgcgaaggacgggccgaggccaaacgtcccagatagaggcgagctgaactctcccgcgccgatggcggcagcggccctgtgcacagtcaacgcgcggcacgacgcggccatgatctccacccttctcagccactc

SEQ ID NO: 419600 - DNA, 453 bp, Oryza sativa
gctgttctgtcagccgcactgaccacctgtcttggggagaccagagagagaatcatggcccagctactcacctacccgctccaatcggggtgctgtccgactccgacaggacgctaatcctccaagccggcgatcaaggacggcgccgtccgccagatgtgcctggtggtgaagcatgaagggtgggagcggctgtacggagcactcatgccctcgcttgttggcactgcggcctcccagggtgtctactattacttctaccagatattccggagcagggcggaggccgcggctctccagcgatccacgacaggaatcggtgatggatccgtcgggatgctccaatccctcactgtcgctgcgctttctggatgtgttaatgtacttctcacaaacccaatttgggtaattgttacacgaatgcaaactcacccggaggcatacaaacagcag

SEQ ID NO: 419601 - DNA, 475 bp, Oryza sativa
gatagatcatatcatacaagtaaatctagctggctgtaaacacagttagttcgtaattatcgcatagggccatggggaagtacagtgtgggtctcgtggttttagggttgctggcccttgcgttttcgaccactgtgctggctgaaacacatgttgttggtgactccaacggttgggacttctctgtgtcgtttgatagctgggctgatggaaaggtcttcgctgctggtgacactcttgttttcaactacataccgggcgcacacaacgtgctggccgaggacgcggcgacgtacaggagctgcaaggtgggcagctcggcggactcggtggcggcggccacggggaccgcgtcgatcctcctcaagaagggcgtgaactactacatctgcggtgtccccggtcactgcgccgtcgggatgaaactgcgggtcgtcggcaactgatgaaacttcggcgacagatcaatccctta

SEQ ID NO: 419602 - DNA, 357 bp, Oryza sativa
aattaaaggacccgtgtatagcactataatcagcctctcatttggctataattaatataggagtacattactatatagcggctaataagcatttggaggatcagttttgacggtcacttttggggacggtggccgggccggcgaaaaagcggttgatcgccgggaagacctcggggcgctgcgtgccgaggaatcggcggaaggcgtggtggtgatacttctcccccttgtgggcgttctccagcacggggctctggcgggggcttttgttcacccttacgtccgggtttatgaacaccgttccttgtcaggtggaaacaccccattcctcccaccagagacatcgccacgatcagg

SEQ ID NO: 419603 - DNA, 489 bp, Oryza sativa
  unsure (1)..(489): unsure at all n locations
gtttcaaggcttcgatctatcggatcattcgttgcagtcctagcaagaaacaaaaacagcagcagcgtcaggcagacgaggatcatccatcgatcgacatgggccgttgggtgaagccagatgtatacccgctgatcgtggcgatgtctctggtgggagggatgtgcgtgttccagctgacgaggaacgtgttcatgaacccggacgtgagggtgaacaagagccaccgccagagcgccgtgctggagaacgccgacgagggggagaagtatcaccaccacgccttccgccgattcctcggcacgcagcgccccgaggtcttcccggcgatcaaccgcttcttcgccggcccggccaccgtccccaagagtgaccgtcaaaactgatcctncaaatgcttattagccgctatatagtaatgtactcctatattaattatagcccaatgagagggctgattatagtgctatacacngggtccctttattt

SEQ ID NO: 419604 - DNA, 457 bp, Oryza sativa
acgcaaacatgacgactttcattgcgtaatacaggtcgttgaaagaacaaccaacaaagcgaatgcacctcttttgggttcttttttaattgctaggcggccttgcaactacatcaaccaatataccaccactatatgctcatgctattgtctccatagagactacgctacttatcaactcacacttgcttggaataaataccaactaaatgaattgacttgatctcttctcatacaagtcacagacccgaattgggtagtgaagaatgaatggacaagagaagagaacaaaatctatacattcgtgcatcaatgtacttgaggtgcgtctcttaatgctacattcaaactgctttccattgtttgccaccctagtccaacgttgctgccttgcatcatggctacaaattcggcgtagtcaaatttgcccgtcattggtttgatcaacccttgaaat

SEQ ID NO: 419605 - DNA, 384 bp, Oryza sativa
atgcaaacaacaacaaaaaccacttctcgtgggtagaagagagagagagcgaggcgatttcgaccaagaagatggccgggatcgtggtggtgttcgacttcgacaagacgatcatcgacgtcgacagcgacaactgggtcgtggacgggctcggcgcgacggaggagttcgagcggctgctgcccaccatgccgtggaacaccctcatggacaccatgatgggcgagctccacgcgagcggcaagtcgctcgccgacgtcgcgggcgtgctcaggtcggcgccgcttcgaccgcgcgtcgtcgccgccatcaaggcctgctacggcctgggctgcgacctccggatcctcagcgacgccaaccgcttcttcatcgacaccattc

SEQ ID NO: 419606 - DNA, 376 bp, Oryza sativa
gatgttgatgttcccttcagttcaactgctgctgcttttgtgcctgtctttgatgagcctgcgcctgaacctgctgtgactcctgtgcctccaactgttaatgtgcctgctggtaatgcacctgcgtctgttggtgcatcatcatctgatcatcatggcattgacaatctcacagaagagaaactgctgaaggaacttgaggaaatgggttttaggcaggtcgatctgaacaaggagatactcaggcagaacaagtacaacctggagcagtctgtcgatgatctctgtggcgtcagcgaatgggaccctctcctggaggagttgcaggaaatgggctttgaggacactgagataaaccaggagatgctcgagaaga

SEQ ID NO: 419607 - DNA, 389 bp, Oryza sativa
agtatctgaagcagctcagatgacaaaccagtatgcaggacagattttattatatgagcactgctatgcagactagctcacttgtatcattcagaaacaacaaaatagaacacagttctatgcagatcttattttccgatcaaacaaggaggatcagacagacgagatggagcagatatacacctcactctgctccaaggagggcaaggagtatatcctcgtagtctctggttgtatctttagcaacagctcgctccaatgggacactgtttctcttctggtaggcctcctttatcagcttcaggtctacctcggcacgagttgttatgatccttgtaagagagttttcggctgtgcccattcctcctagagccaatcgaatgactttc

SEQ ID NO: 419608 - DNA, 546 bp, Oryza sativa
gaggcataaagtgtgagaccgtgattggatcgatcaccggagcgacgatcaatggcgacgctcaccgtgcccgccgccgtgccgcccgtcgccgaggactgcgagcagctgcgcaaggcgttcaaagggtggggcacgaacgagaagctcatcatctccatcctcgcccaccgcgacgcggcgcagcgccgggcgatccgccgcgcctacgccgaggcgtacggcgaggagctgctccgcgccctcaacgacgagatccacggcaaattcgagagggcggtgatccagtggacgctggacccggcggagcgggacgcggtgctggcgaacgaggaggcgaggaagtggcacccggggggccgcgcgctcgtcgagatcgcgtgcacgcgcactccatcgcagctcttcgctgcgaagcaggcgtaccacgagcgcttcaagaggtcgctcgaggaggacgtcgcggcgcacatcaccggcgactaccgtaagcttttgggtgcacttgtgactgtatatcgctatgatgggccagaggtgaacaca

SEQ ID NO: 419609 - DNA, 448 bp, Oryza sativa
gtcattgacgatgtggaccattcagcataactttgattagaagaatcacttttcacagttcgataacaatgcgttacatgtcatgatcctcttttgatgtaaaaacaaaagggattttacttgccgtttccaaactgtctatttaggttgctcaagtagaaaacaacagtaagtccgaatcacacaacatttttcacactaatttggacacagcaagaacagagacgctgttagttaaacgccgtccactatctagggttgttttatggttaattcagctctcaagtgtagtaccccctcgatgaagaagaggctgtcatcagccatgaacgatgaccatggaattgcaaatagattccggtatccaaccgccttttcaccggtgaaggtttagtagcccttgtacttgctgacaaactcgcctgatggcctggtcttgcggcaaact

SEQ ID NO: 419610 - DNA, 454 bp, Oryza sativa
gcggttgtcgccgtgaagaaggtggcgcacgggtcgaggcaggggatgagggagttcgtggcggaggtggtcagcatcggccggctccggcaccggaacctcgtgcagctgctcggctactgccggcgcaagggcgagctcctgctggtgtacgactacatgcccaacggcagcctggacaagcagctgtacgaccagggcaagatcaccctgagatgggcgcagaggttccgcatcatcaggggcgtcgcgtccgggctgctctacctccacgaggactgggagcaggtggtggtgcacagggacatcaaggccagcaacgtgctgctcgacgccgacatgaacggccggctcggcgacttcggcctggcgcggctgtacgaccacgggaccgacccgcacacgacgcacgtggtgggcaccatgggctacctgggcgccgagcttgggcaca

SEQ ID NO: 419611 - DNA, 386 bp, Oryza sativa
atcgccatggccgcgtcgccgtcgccgccgccgctgcaggagctcaccatcacgcggcccgacgactggcacctccacctccgggaaggcgatgtcctcgcggccgtgctcccccacagcgcgatgcattttgggagggccatcgtgatgcccaacctgaagccaccggtgaccacgacagcgcgagctttggagtacagggaggagatcctcagggcgctgccgcctgggagcaactttgtgccgctcatgacgctctacctcacggacaatactagcccagaggagatcaagctcgcaaaaaagagtggcgtggtttttgctgtgaagttgtacccttctggagcaactaccaactcccaagatggtgtcactgatatatttgg

SEQ ID NO: 419612 - DNA, 411 bp, Oryza sativa
  unsure (1)..(411): unsure at all n locations
caaactgcttaactttactcactaaaccacatcatatatatctctttggtcccaagcatctcatagcccaggccattacccacaccatactatcatcctatatcagtatttcagtagctacacgttggcaattcaggcggaccgatgacgagctcttcttcagggaaggcgcatggcttgcccgccgccccgagctccgggcacggcaccggcgagacgtcggaggcgacacccttgacatcgntgcagttccattgcagcttcttggcgtccggcgcgagctgcgcggtgacgttggacatgcagaagccagtggaggggtcggtgggaatcccctccatcctgccggccatggtgacgttctccgcgaacacgtcgcttgagttgatgccggtgaccttccgcagagcg

SEQ ID NO: 419613 - DNA, 424 bp, Oryza sativa
aaactcagacgttcggtaaattttgttcaaaattcacaggttttcgagtggtaatgacaaaaatcggcaaaacccctcgaatcagctaataatctttggaactctgcatactacggcatcccatccaatgtccaacaacagaaatgatattacagtttactattggcagacttggtgagactgcccatggcccgggccttctcccggagcacgaacttctgcgtcttccccgtcgacgtcttgggcaaatcatcgaacaccaccgtcttcggcgccatgtaatgcggcagccttttccggcaaaagcttatgatcttgcctttcgtggcgttggcgccatccttgagcttgacgaacgcccccgggggtttcccccagtaattgtttggcctggccacccccgtcgtctccaggcccccccccc

SEQ ID NO: 419614 - DNA, 419 bp, Oryza sativa
cgtcgacgatctcctcaacaccagcgagctcgcgctgtgttcagtggtgctcatgtcagggctgatcataatcctgagcagcgcggcgaagatcacgcaccaggcgcaggcgctgaccgggcagacgacgaaatggcacgcctgctgtaccatcgagccggtgccggacgaggaggcggagcccgggtcgaaccacagctcgatgctcgaggtggagcccgtcagcgacagcgacggcgagtccagcgaggagaccggcgacgaggacctgctcgagaacaccaagatcatgctgccccaagcacacgtcatctccttccagaaaagacaggctctagtgacctatctggagaacaacagagccgggatcacggtgttcgggttcacgctggacaggtctacctgcacacgatattcat

SEQ ID NO: 419615 - DNA, 506 bp, Oryza sativa
agcaaatgcaatggatcaaaatatcacaaatttaaggatctcagtatttttccaaaagggatgcaatccagtctcaccgactggtgatcaaaatactggtgttttccagcagttaaagcaaaagctgtgaaagacttttcctgctaaacctaagatatggaacccataaaccataagaacaaaatataacaagataattgtctcgtggattgcaccctgtaaaaccagagcgacccagatgtctaaatatttttatttaactgtagaatgaattgtccgattgtctcatgttacgacagctccactccttttaagaggttgcttccttcaggtaggaaataagatcagcacgctcctgtggcttcttcaacccagggaagaccatcttggttccagggatgtacttcttaggattaagcaggtagtcataaagtgtgttctcctcccagatcacagccatgttcttgttggccgtagagtaagaataaccaggggtggtacctgac

SEQ ID NO: 419616 - DNA, 503 bp, Oryza sativa
  unsure (1)..(503): unsure at all n locations
tcttgttatctcctttgctcttctactgctcatcctcctcttctactactcgtcctctttgctctattcacagctagcaacaagaaggaggcttacacatgcatgtgcacggtctctgccggacgcatatgaatcaggcatgaatagggggcacatcagcagctcggagctcatcgacgccaagctcgaggaacgccggatctccacggccaagcactgccccagctgcggcaacaagctcgactgcaaaccggattgggtggggctaccggcaggagtcaagttcgatccgacggaccaggagttgatcgagcacctcgaggccaaagtgagggaagaaggctcaagatctcatcctctcatcgatgagttcatacccacgatagaaggggaggacggcatatgctacacccaccctgagaaacttccaggtgtgacaagggacngcctgagcaagcacttctttcaccggccgtcgaaggcgtacacgacggggacgagga

SEQ ID NO: 419617 - DNA, 493 bp, Oryza sativa
gcaacagaactacattcaactgatcacagccggcctggagttcattcctgcttgaacaacaaaggtacagagatcatactacacacccagaacactgaagcacttgccatgcaggcagtacttctcttttatgaaaagatgatacagatcagttgcaactatgttacaccaccaccatgtacaacgaccggacaccgaaacatcatcctagtgcagagctgtgaggattgcagtggcgctctcaaccttgaaggttgcaccacagatctcttcttcatttgcaggaacagcagtcaccttgttctttgggttctcatagcacttcaagcctccaagagcattggaatagaagcaaccttgtgggaaaggtgcaagtgacttgccacatgatcctttaagcaggtcaatgtcgttagagaaggcaacagatccatcagcagttatcccccagaacagaggcaccttgccctctggatcagaggccacaaggaga

SEQ ID NO: 419618 - DNA, 524 bp, Oryza sativa
  unsure (1)..(524): unsure at all n locations
ctagcccaccatgtgctgcggttccatcctctccgacctcatcccgccgccgcggcgggtcaccgccggcgacctctggctggagaagaccaagaagcagcagcagcagaagaagaagaacaagggcgcgaggaggctgccactgcgccaagaggaggaggatgatttcgaggccgacttcgaggagttcgaggtggattccggcgagtgggaggtggagtccgacgccgacgaggccaagccgctcgccgcgccccggagcggcttcgctaaaggtggattgaaaaacactactgttgctggtgctgatgggcctgcagcaaggtctgctaaaaggaagagaaagaaccaattcaggggtatccgccagcggccatggggcaaatgggctgcggaaatcagagatcctcgaaaggtgtccgcgtctggcttggcaccttcaactctcctgaggaagctgccagagcttatgatgctgaagcacgaaggattcgaggcangaaggccaaggtcaatttcccaga

SEQ ID NO: 419619 - DNA, 534 bp, Oryza sativa
  unsure (1)..(534): unsure at all n locations
tttttggttttttttttttttttttttttttcacccccaattttgacattccacattccaataaaacttggccggcacagtccaggattcttgaaccaaaaggccaaaaaatctatttcaacctactgaccatgactttgtttcccctaatcttttttgcctgggcagattttagctgccaatgaggtctagttggatcaagaattcacatatccttgtcaacgcatttacaaaaggaaaacaaagtggtggaaagatccttccagatttgctcgccaaaggccaagacagcatagctaacaatgctggggttttatgttttccaaagatcgccaagaatgtgtcatatgaactgcttcaggaattcagttgccactaaccgaccacgtgtatttaccgaaagctttagctcactgatctccttgacgatgtcctccataaactgaacaatgaaatctatgagcttatgcttgtgcatgtcctcacagnggtagtttgttatcaggaaactgatatcataaccctgaactggtt

SEQ ID NO: 419620 - DNA, 506 bp, Oryza sativa
acaaaagcttgtggtgtgttctttctcagtaggaaaacatatgtacaagcatgggaacttagttccaagatatatatacttggctctacaactaaagaggcaatcttctacacaaaagaagcctacaattgcgtctgtgtctcttcctgttattgggtattatgtacattgactgaaaccaaaactgcaaattcacctaccaaaaggggctacttttctttcctgtaagttaaaaggattaacctagtttacttacattccattaacaatcaaaatctgcaagaaccagaagcatttacactgatttttcagatgattcctccatgtttgttgaattgagtgagaagtcatcgaggaaattgctgcccgagtcaacctgaaattctttgaacattgtcatgacctggatcatggtaggcctgcggttaggctggtcatccaagcagcggcaagcaatcttcagatactgatagagctccaattcactagatgtcgtggccatcaat

SEQ ID NO: 419621 - DNA, 284 bp, Oryza sativa
gtttgaaggacatttctttgtttatctcaatcagtggacagcgctaaggtttcaatcaatggccattcaatgtcctaacgtgttctacggaaggccgcgaagaagtctcggtccagttggacctggttcatattggtatgactaccgttctggattttgcggtgtcattggacatgagtgtagagacatcatccctccatttataaaggaatgtaattatgcaatgcctaaaaattgtgccggtgggaacacacgagatattgtcaatggtactgaactttatc

SEQ ID NO: 419622 - DNA, 508 bp, Oryza sativa
gtaatcaacactgcaatttgcctccactttatttcagatcgtagtacagaatacagaccacatctgtagtagttcatgcaaagttaccgctagagtactagctatgacaagcaagttcatgtgtatggagctctgttgttttacaggttgcttgaatcaaaagtaacaaatcctttctctttcaagctctcgatggtctccttgatgctcgtgtgcaggggagtcagttccaggcccaagctttttatcttttcctttgatacctggtagattggcactgatggcttgtcatctgcacacttgtctggcagaggaatattgggatacatctcacgaatgatttggacgagctctgagtagtgcgcaactctttcaaccatgcaatatcttccatttgctgaaggaacttcatatgcaaggatatgtgccagggcaacatccttaacgtttatccagccaaagctgaaattaggatatgtcgaggatgatccattgattagcttcagaa

SEQ ID NO: 419623 - DNA, 314 bp, Oryza sativa
  unsure (1)..(314): unsure at all n locations
ctctgagagtgatttctangnttatcagaagcagcacattccagcatatccacctatttctgaaaaagtttctgcaaatgagaatcacaagaactccaatagtatttcaacatccagtaatggaacaccttctcctgattatgcctttctaagggtttctgatgtcaacgtgcaaacacaaacagtaaaaccaccacctcctctgaagcagacatctaaattgcttaagaggagagagattttagcagaaggagatgtccatcttgaaaatcacagctgtcctgcagcctcttctgctcatgccccttcaaaca

SEQ ID NO: 419624 - DNA, 425 bp, Oryza sativa
ggcagaaaatttttcatccattatttctccatcttgcattccgcaagaagaccgctagttagggggaaaagagtaaaaaaagaccaaaaacgatcacaacacgtggtcgtactccaacacgtacgtacggtactccactagaacgtaaaacctttttagaagagggaaaccggaccatatatttggtagcactttacaactagggctgttcagatcagccatggttttttgttttttgttcttccaatcattcatcgaaaatttcctttaaccagagcgccgtttgcaattcccgctccagcgctgatgacgatctctcgttgaatgccgagggggttcctcacactgtgtagttctgctggatcgtgtcgatgtccagccccttcagcttcaccaccgattcgacgtggcccttgagagtgttc

SEQ ID NO: 419625 - DNA, 452 bp, Oryza sativa
ggctcctacgctttctttaaggtgccagctggtactcattgacatgaggtctgcttattgagctccttattgtcaccgggtcgggtagacatcagagccaggaatacggggcacattcaggcctgattgactgaaaacagaagagctctaaatgagctggtgttggaacctctcaaagaagagcagttctactagaaaagggagcctctgtccattatgtcactactgaagagccctatgcatgtgacgctagtttatatggtcataatggacttcgttatgcccaaagcgatagcaaacatatagcccgtagagataaacaacgctcaagaacacatgaggaacttccctggttcatcctgtattggtctattagcaagagcgaacagctagacatactacacggggatactgtatgggttaagaaagtgtatgatgggatgaagagcagt

SEQ ID NO: 419626 - DNA, 496 bp, Oryza sativa
tgacaatgccagcatccatgagcatggaaaggaggatcattcttaaggccttcggtgccgagttggtccttaccgatccacttctgggcatgaaaggtgcaatccagaaggcagatgagctggcagcaaagatgcctaactcttacattctccagcagtttgagaaccctgcaaacccaaagatccactatgagacaactggacctgagatttggaaggccactgctgggaaagttgatatccttgtctctggcattggaaccggtggtacagtaaccggaacaggaaagtacctcaaggagcagaaccctgagatcaagatctatggtgttgaaccgacagaaagtgcaattttatctggaggaagacctggtccacacaaaatccaaggtataggtgctggttttgttcctggtgtacttgatgtcaatctcctggatgaagtggtccaagtctcaagtgatgaagccatcagcatggcgaagcagctagcgtt

SEQ ID NO: 419627 - DNA, 445 bp, Oryza sativa
aatgtaaattgccatgtattttaatcatgtgattcatgaatattggaattggctgttcttgcaagcttacaatggagtacatctctgcatgaaacaacaaacaaatatcccccttcctcgccaaaatcaccatgaacgttttcctaccagtaatctttacacgagcagaggccatccctgaaatgatgaaacctcgtggcgtcccgcacgatgatctccctgtccgtgaccttggagatggccttgatcgcggcgtggcagtcgttgcacacccgcaggttcttcatgacccgcagcgtcgtcttctccggcgtgctgatgaggccgaacgcgatggcgagcttctcgctgtggcggctcagcagctcctccttgagctcgtcgtcgacgtcgtgcaggacggactgcaggtcgggcacgaacccggcccccttgatctccttcc

SEQ ID NO: 419628 - DNA, 484 bp, Oryza sativa
  unsure (1)..(484): unsure at all n locations
agagctcccaacgcagttcttcaattcaaaaagactgcccaaacagaccaagggtatcatcatagcagcaaagttttttaacacgcaacatcaaagagacactaatgcaataagataacttgaagcgcggatcactagcaaatttcgcgcttagtcgacctcctcgatcttggggccagcaccgctgccgcctgccgggggagcatcgtcctcgtccatgccgccggccatgtccgcgccagcgccctggtacatcttggcgatgatggggttgcagatgccctccagctccttcatcttgtcatcgaactcatcagcctcggcgagctggttgccgtccagccactggatggcctgatcgatggcatcctcgatcttcttcttgtccgctgccgggagcttcgaggcgatcttctcatccttgatggngttgcgcatgttgtaagcgtagttctccagcgcattcttggactccaccttcttc

SEQ ID NO: 419629 - DNA, 310 bp, Oryza sativa
ctgttcactgcacattacaatgaataggttgatatatattcatttgggatgtgcatgcttgaaatggtgacatgcgaatacccatacagagaatggcaaggcatggctccatatattcaaaaagattgaggagggtgagaaaccagctgcgttctacaaaattaaagatgcagaagtaagaacttacatagataactgtttagctccagtagagaacagaatgtctgcaacagagctgttgaaaagctctttcctccatgatgatgatcttatctaagtctctctggacaagaatatgtctgaagatgga

SEQ ID NO: 419630 - DNA, 313 bp, Oryza sativa
tggtcttgtgggcggacgcgtgggcaccgaaccatacccaacaagcgtcaaatcgcgtcgacgccaaaaacctcatgcacgtccaggaatctggaatatattccgagacttttacacgcattccagtcatcactagtgtagcggatgctgcttcttccccggggaggtctatcggatcttgatggagacccatataggatccgtggacggtgcggtggcggcggcggacaacggtgcggtggggtgcccgtcgtaagttgtggggtgcccgatgaccttagcgcgcactgcgcccgtgtctgacgacgaggcg

SEQ ID NO: 419631 - DNA, 478 bp, Oryza sativa
ccccgtacaataaccaatatatatcatgggggaaccaataatacaataacagaacttactccaaattacaaccagctgaccaaagcgtaaaacagcatcatatcatgcgtacggcaatgagaagttccagggagaagccacatagcatcgagaaacaccacaaaagaagagaccaagctattgactgtatgtcggtatggtttggagctgtatgaaatgcctcacgatgttgtgcgtagggacacgcacacgcccaattgaatttgcccaatggagatctcaagcggaccccttgagcttcttcgcgatgcctgcaaagtacttcccctggtggaaggcgtgctccagctccatttccgtcggccacctcaagccgtcggcggcaaaggtgccggcgccgtacgggctgcccccctgaacttctcccatgttaaacatcttggcaccgaaggtgtacccgaccgggacgaacaccatg

SEQ ID NO: 419632 - DNA, 550 bp, Oryza sativa
gcagatccagtccgtggcggcagcggcggcgcggatcagttccgcggcggcggcgacgacgtggttgcggcccgatgtgacggcggcggtgcggatccagtccgcggtggcagcggcggcgcggatcaggtccgcggcggcggcgacgatgtggttgcggcccgacgtgacggcggcggcgcggacgcggcccgtggcgacggcggcagcacggatccagtcctcagcggcggctgcggcgcggacgcggcccgcgacgacggtggcggcgcgagggccgtctcctgcgtcgttgcttccagttgcagctcaccctttctcgttgcttccagtttcatggtgcaggccatctcttcctcaaccatctccatcatctcagcaagacaagttgatttgcagccattcaagtgctccatcgttgaaggttggctgctcttcggattcacccttcctgttgttccctaacagaagaaaccattgctggtttgtcattcgggttgagctcgaaccatctgccaatttcagttgacagggttgatgttagagctcc

SEQ ID NO: 419633 - DNA, 388 bp, Oryza sativa
tttgtgtgtctcagttggcgatgatcacaatttgctaatttgggatttacgttctcctgtgtctactaagcctgtacagtctgtggcggcacaccagggcgaggtgaattgtctggctttcaacctcttcaatgaatgggttgttgcaactggttcaactgacaagaccgtgaaactatttgatcttccgaagattgatacttccctacacacctttgattgccacaaggaggaagtatttcaagttggatggagcccaaagaatgagactatacttgcatcttgttgtcttggcagaaggctaatggtctgggatttaagcaagattgaccaggaacagacaccggaggatgccgaagatggtccttccgaactcctgttgattcat

SEQ ID NO: 419634 - DNA, 483 bp, Oryza sativa
  unsure (1)..(483): unsure at all n locations
gtgtcgccgaagaacctcttcatcggctcgtactcggcgtcggtggcatggagcagccgtggaaaatcgcaggtaaggtgagagatgacgtgcagcccggcccccacggtgatccccacggcgatcaccttgtggaagttgaggttgtcgtcgaacggcacgacgcgggcgacggcggcgcggttgcggatccaggtgacggtgttccggcacaccgggaggaggatgagcgccatgttgaacttgagcgtctcggcgccgcccttggcgacgcagacgcagtagcccatgacgtggaacacggcgcggtgccggtactggatgaacttgtaggtgaagaggcccgcgcagatggcgagccacaggaggagcacccagacgcggcgccagttgtcctcgaggaagtaggaggcgcgccgncaccaccgtcggagcgggttgggctccgccgtcggccggaggttctggctcagcatctggctc

SEQ ID NO: 419635 - DNA, 546 bp, Oryza sativa
  unsure (1)..(546): unsure at all n locations
agaacagctttgtctttgtttacagcaaggacaaccctaatctgctgtttagcatgtgtgggtttgaggttcgtatactaccaaaaatacggatgactcaagaagcgtttagtaacaccaaagatggagtctggaacttgcagaatgaacagacaaaagaaaggacagctattgcctttctaagagttgatgatgagcatatgaaagtgtttgagaaccgtgtcaggcaaatccttatgtcctcagggtcaactacattcactaagattgttaacaagtggaatactgctcttattggtcttatgacatatttccgtgaagcaactgttcatacccaggagctcttggatttacttgtcaaatgtgaaaacaagattcagactcgcataaagattggactgaactcaaaaatgcctagcaggtttccgcctgttatcttctatacacccaaggaaattggaggtctgggaatgttatcgatgggtcacattctgataccacagagtgatctcaggtacagcanacagacagatgtggtgtgcacat

SEQ ID NO: 419636 - DNA, 517 bp, Oryza sativa
aagaatgcctaaagaaaccttaatatatcattagcttaaggactagcaaaactgacatttgtttgctaattaacaagtcaagagatagtgacacgtcaatgaagtagacaaaatagaactaagattaacattcataagattccaatcctactcgcctgctcggtaaggcaatagccgcaaaaggtaagcaaacactactagttcattacatcgctaaggctaatttattatctcatcgtcatgtcatatatattttggcagaaggacaaccagcacatgtattagatgggcacaaaatgaagctaacagaagaacctaatcgagcaattcagacattgcgttcttcctgttgaatggatcggtagcagcaagcaaagacgccacagccctattggggaaaatgtcatcagccttcatcctctccttgaatccataaggtggggtctttgcattcagatatgcctcaagaagcagctgatactgtctaatcctcccagtataacccatctgccgcacc

SEQ ID NO: 419637 - DNA, 473 bp, Oryza sativa
tgacaatgccagcatccatgaacatggacgggaggatcatttttaaggccttcggtgcacccatggtgcttaccgagccacttgtgggcatgataggcgcaatcaagaaggcagatgagctcgcagcaaagatgactaactcttacattgtccagcagtttgagaaccctgcatacccaaagatccactatgagacaactggacctgagatttggaaggccactgctgggaaagttgatatccttgtctctggcattggaaccggtggtacagtaaccggaacaggaaagtcacctgaggagcagaaccgtgagatcaagatctatggcgttgaaccgacagaaagtgcagttaattctggaggaagacctggttcacacaaaaaacaaggtataggtgctggttaatgtcctggtgtacttgatgtcaatctcctggatgaagtgctccaagtcttaagtgatgaagccatc

SEQ ID NO: 419638 - DNA, 499 bp, Oryza sativa
aattaattgacacattcactggatttttgaagagaacactagcattggcacaagaccatcaaaatttcaattttcaggtacaatgctaataagattttgcacaacagacgatgtccttgaggacggcagtacaacaagaatatggtcatgctgttgcaaaaaagaacagaaaaactcccctgttattcacctttagggagggagtcaggacggtaaatctacttacgacatgcacgccaatgtgctggtgacaatttacatgtctccaggaattaacacctgctggaaaagcctacagctgggcttcagggatcagtcatgcttgcacatctacatttggtcccagtcaatagaactgttgttttcaaaattataacttggttgctgtagacggttgcgacccaatcggctcatcatggcaagtccttccatgactttgtatagcgatgaccaccacctatcagatggaacctcatactgagcgagtgtatcatcaatt

SEQ ID NO: 419639 - DNA, 518 bp, Oryza sativa
aattaattgacacattcactggatttttgaagagaacactagcattggcacaagaccatcaaaatttcaattttcaggtacaatgctaataagattttgcacaacagacgatgtccttgaggacggcagtacaacaagaatatggtcatgctgttgcaaaaaagaacagaaaaactcccctgttattcacctttagggagggagtcaggacggtaaatctacttacgacatgcacgccaatgtgctggtgacaatttacatgtctccaggaattaacacctgctggaaaagcctacagctgggcttcagggatcagtcatgcttgcacatctacatttggtcccagtcaatagaactgttgttttcaaaattataacttggttgctgtagacggttgcgacccaatcggctcatcatggcaagtccttccatgactttgtatagcgatgaccaccacctatcagatggaacctcatactgagcgagtgtatcatcaatttcggtgttgtgcttccctt

SEQ ID NO: 419640 - DNA, 517 bp, Oryza sativa
gggagaaagtcaaggttcgataaatattgcttcacttgtacaaagtacagataaaaatacattgatacatgacacggagagagccatgcacaccacttatttggacacacagagggcaaggctgcagagaaaatcaagcaacacaagctgaactcacggccccacctgtcagcctctcactggtcgaggccggagactcttgtgaaaaacagcaacaccacgcatgcagaagaagacaaattattacacacacaaatcgacgacacggcggccggcgacgtacggcgaggtcgtcgccgccgccggcgacgttgtgatgaggtcgatcagccgaagaggtggtgcttcttctcgccggtggactcctcggcgctcttgtggtccttcttcttctcgtggtgctcgtggaaggcgtagccgccggcgccgaccgccgccgtggccgcgatctccttcgtgatcttgtgcctgtgcgcgttctccgggtccttcttcgcctcgtgcttctcatacaggg

SEQ ID NO: 419641 - DNA, 537 bp, Oryza sativa
gccccgccttcccgtccgtcgccgcggcgtccacatcgatggcgtcctcggagagcgaggagaggaaggagaccaagctgtggggcgggcgattcgaggagggcgtcaccgacgccgtggaagggttcaccgagtccatctcctacgactggcagctctacaagtacgacatcatgggcagcaaggcccacgcatccatgctcgccgcgcagggtttgataacggctggcgataaggacatcatcttagaggggcttgatcaaatagagaagctgattcaggatggaaaatttgagtggcggacagaccgggaggatgtccatatgaatattgaggcagctctgatcgaaaaggttggtgaaccagccaagaaactgcatactgctaggagccgcaatgaccaaatcgtgacggatcttcgcctgtggtgccgtgatgctattgacaagattttgttccgcatcaaacagtttcaggtgtctcttgttctggtagcttcaaatatgttgacttaatagttcctggttacactcacct

SEQ ID NO: 419642 - DNA, 518 bp, Oryza sativa
aacagcaaatctcgacattttacatattgttaccgggagaaaagacctcattaaccatcctatctaagttgacccatgaggttccactaggcaccacagccatggctgccctttccttccattccgtggcacgctgcctcacctccttgcctttgatctcctcttccatcacctccctcaccatcctcgccacctcttccctctcgatgtcgtcgccgacctccacaccgacgcgccactccgtgcaagcgtaccggcagtttgtctgctgatcggcggccatcgggtagcacagcatgggtacgccattggagatgccctcgagtaccgagttccacccgcagtgcgtcaggaacgcgccgatggcgtcgtgccggagcaccgcctcctgcgggcaccagctcgtcaagtaacccttccccttcgtcttctccacgaactcggctggtagcacgccggtggggccgtcgccgccggtgaccttagcttggtcgtctctgatcacccacaggaagtcg

SEQ ID NO: 419643 - DNA, 509 bp, Oryza sativa
atccgatccaggccatggcgtgtatccatccagagcgtgaaggcccgccagatcttcgacagccgtggcaaccccaccgttgaggttgatatttgctgctcggatggaacatttgcgagggctgctgtgcctagcggtgcatctactggtgtatatgaagctttggaattgagggatggtggttctgattacttgggaaagggtgtcctcaaggctgttgacaatgtgaactctattattggaccagcattgatcggcaaggaccctacagaacagactgtcattgacaacttcatggttcagcaactggatggaaccaaaaacgagtggggctggtgcaagcaaaagcttggtgctaatgctatcctggctgtctcacttgctctatgcaaagccggagctattatcaagaaaattccgttgtatcaacacattgctaaccttgctggtaacaagcaacttgttttgcctgtgcctgctttcaatgtcatcaatggtggatcacatgc

SEQ ID NO: 419644 - DNA, 507 bp, Oryza sativa
ggagcatcctcgtccatgcctccggccatgtcagctccggcgccctggtacatcttggcgatgatggggttgcagacgccctccagctccttcatcttgtcctcgaactcctcggcctcggcgagctggttgctgtcgagccagctgatggcaccgtcgatggcgtcctcgatcttcttcttgtcggcctccggcagcttggacgcgatcttgtcgtccttgatggtgttccgcatgttgtaggcgtagttctcgagcgagttcttggcgtcgaccttcttcttgtgctcctcgtcctccgccttgtacttctccgcctcctgcaccatcttctcgatatcctccttgctcagacggcccttgtcgttggtgatggtgatcttgttcttctgcccggtggtcttgtcctccgccgagacgttcaggatgccgttcgcgtcaatgtcgaagcacacggtgatctgggggacacccctgggcgccggcggaatgccggagagctcgaac

SEQ ID NO: 419645 - DNA, 317 bp, Oryza sativa
cacgtttccttgacaacgagaacatcggcatggcggtggaggaagtagcggtgctcgcgttcctcgtcgccgcggcggcagcggcgtcgccagcgcctgcggtggtggcgacactggtggagggcggcgtggacgtgcgcccgacggtggagatgaccccgagagggaggacgtgcctacaacgcaggaggagagcatggagatcctcggcgtcactgcgagggggaggacaagctggctgaggcggccaccggcaagccgtagttgatgaagggccgatcggggcacattgaatgcgacgcgctacaacgcgacag

SEQ ID NO: 419646 - DNA, 527 bp, Oryza sativa
  unsure (1)..(527): unsure at all n locations
gcgaacaaaactttcgaactcttttttttctccttgttttctatttcatttcattccgatagatagcaacaagcagttcaaacaccataaccaaagcgaactcaattcatggtaacatcacggacgaagaacacctaacactggatggatggatagagggcttctcgactcgagagagccactggacacgataacgactcgactcgatgataagatgattctgacacggatagctaaggataactggccacgatgggccccaccaatcagttcctccagttcccgccggagtcgccgccgtagccgccgccacggctgccaccgtagccgccgccgccgccgccacggccgccgccgtagccgccgccgccaccgtagccgccctcacggcgcccgtagccgncgncgncaccttcttcgtagccgccgncttcacgaccgccgncgtagccgccaccgncgncgncgtagcccccgcctccgccgncggagcggcgggactgggcctcattgacggtgatgttgcg

SEQ ID NO: 419647 - DNA, 488 bp, Oryza sativa
aacatacgcaaactgatattatcacaatgttagccgatgacaatggaaagagtaatctaggtacaagcggatcattgacggtggagacaagacattggctgcaccacaacacccaccagtggcgccaacaaggagcgctatccgttataggacgagagaaaaagtaaaacatcacgatgtgaagtgaaactgaataattctagtagacgatgatgatgatggataggctccttaggacgcccgccgcccttagcgtcttgctgctcccatcttgtccactggaaggctcactcgtcatcgtcttcatcctcttcgctgccctcgtcgtcatcctcatcattgacctcggacttggacttgtcagattcctcctcgtcgtcctcctcttcctccttggcgggtgccttcttggcagtgctctcgcccttgttgtaggcagcaatggccttgttgtactcggccttgagctttgtggccttggctacata

SEQ ID NO: 419648 - DNA, 470 bp, Oryza sativa
tatggcttctcctccccctctttaccttttcctcctcggttcggttccgtggttcgtctagggtttagtgggttgagatggcggcgccggatgtcgagtaccgctgcttcgtcggcggcctcgcctgggccaccgacgaccgctccctcgaggccgccttctccacctacggcgagatcctcgactccaagatcatcaacgacagggagacggggaggtcacgtgggtttggcttcgtcaccttctcctccgagcagtcgatgcgcgacgccatcgagggcatgaacggcaaggagctcgacggccgcaacatcaccgtcaatgaggcccagtcccgccgctccggcggcggaggcggaggctacggcggcggcggtggcggctacggcggcggtcgtggaggcggcggctaccgaagaggtggcggcggcggctacaggcgccgtgagggcggctactgtggcggcggc

SEQ ID NO: 419649 - DNA, 486 bp, Oryza sativa
aaccaaaacataggaggtttcatttcttcttctcaaagtagtgtagcatctttccttctttcaccattacataagcttaagcaataacagataacaaatcctcctcctcctctaggtaaaatattcaaacacaatacccttataagtacttattattaggaaagtagcgtgcatgggcataaatggcagcggggggcaggttaagaatcacaatgctgagcagcgaggaaacaaaacaccataatgggacagagcaaaagcctccgaaagggagcttttaggcagaaggcttctcccacttgaggggcttcaccacctcccaggtgaagtctgggtcgtcccttccgaagtgaccgtaagccgccgtcttgaggtagcgtccgttgccgcctttcttgaggtcaaggttgatgatgatcatgccaggcctgaagtcgaagttctccttcacaatcttgaggatctccttgtcagggatcctgccag

SEQ ID NO: 419650 - DNA, 512 bp, Oryza sativa
atgtgaaactaggttttctgttatgaaaagttcattacgacaattatgactaattggcagcattccaaaatattcctcaacgttgacactccatgccacacaatacaatcgaaatttctagaataggcaacatttccgagcatctcggagacaagaccaacatcaccactcgaatgacactgagggggaaatatacaggggaagaagcaaaaatgctatctttaggtagtcgtttgacgacagacagttaagtgtagtgcacctgttgtagcactcgcttactcccccttgtgctccttatctttcagagcatttcctgtgatttacgaacaatgcgtctaacctttttcttgaaatcgtccctcttttctctccaatccttagccgcttcaatatttgctggagactcatcatttggactagagagcatcgaaatgatgctcagaactatactttcaactgtatgcacaggtgtccaccgttcgctcgcaagctcataaccgttgggatct

SEQ ID NO: 419651 - DNA, 513 bp, Oryza sativa
  unsure (1)..(513): unsure at all n locations
ctctccgcccatttcttctctccacctgcgatccatccgcgcccgcgaggaggagggagccggacgccgtcgtggggagagcaggggagagaaggagaggaggagatcgccgtcgccgtcgccgtcgccgtcgccgatctcgagcgggagcggagatggggctcacgttcacgaagctgttcagccgcctcttcgccaagaaggagatgaggatcctcatggtcggtctcgatgcggccggtaaaaccaccatcctctacaagctcaagctcggcgagatcgtcaccactatccccaccatcggttttaatgtcgaaactgttgagtacaagaacattagcttcaccgtttgggatgttgggtggtcaggacacgatcaggcctctgtggaggcactatttccagaacacccagggcctcattnttgttgtggacagcaatgacagagagcgtgttgttgaggccagggatgagctccaccgtatgctgaatgaggatgagctacgtgatgct

SEQ ID NO: 419652 - DNA, 447 bp, Oryza sativa
gtcacctaaattctgcgaggaggacatggatagggagacacactgagccggcgactccttccactgctgcatgaccgactggggatgggtgaaaaactgcacgcccgccttgccacaaaaattcaagtctcctgcaaaggaggctttgctgccggggaaggagaagaacggcaggggtactggaatcggcacgttgatgcccacctggccagcttcaatgtctgatggaaatttccttgcagacacaccagatgttgtaaatatggatgctccattgccatatttgtttatgttcacaatttggatagcatcatctaggctctcagccttcatcaagagaagaactggaccaaaaatctgctactgttctaatttagcaaagttcagttaaaatataatgcatatgcggcgtctaagtatgcaacggctgtcactgcaacatatgac

SEQ ID NO: 419653 - DNA, 483 bp, Oryza sativa
tttttggaccacaactttgtaaggatggaattgagtagcaatactttcaccccaaaatacagtttagcgacaatatcttaaaaaagccgcttgctttgccgccatggctggcaagctgagcacagcagctaacacaaagaacacgagatcactataaaccaaacggcaacgaacgaagaaaatacagggtcttttttgtctgaagatacacgaagcggttcgttttcttttatttttagtctcctctcctcctcgatgatgggtgtatggcaatggcaatggcgatgggatcttggcttagttgatgggaaggggctcgccgttccactccttgaggcagtcgagcatggggtcgatgagcttgccctggctgatgccgaggaacaccttgttgcactcctcgccgggggacttgagcttctcgccggggaggaatacgcagccgagctcctcgcggacgaaacggtagagcgggaacgaccg

SEQ ID NO: 419654 - DNA, 564 bp, Oryza sativa
  unsure (1)..(564): unsure at all n locations
gtgggtgtgtccctgtctcccttctccttcctcctctcctttcccctcctctcttcccccctctcacaagagagagagcgccagactctccccaggtgaggattcagccatgaagggggccaaatccaagggcgccgccaagcccgacgccaagttggctgtgaagagtaagggcgcggagaagcccgccgccaagggcaggaaggggaaggccggcaaggaccccaacaagcccaagagggctccctccgctttcttcgtttttatggaggagttccgtaaggagttcaaggagaagaaccccaagaataaatctgtcgctgctgtaggaaaagcagccggtgataggtggaaatccctgaccgaagcggacaaggctccctatgtagccaaggccaacaagctcaaggccgagtacaacaaggccattgctgcctacaacaagggcgagagcactgtctaagaggcacccgccaggaggaaaggaggacgacgaggaggaatctgacangtccagtccgaggtcaatgatgaggatgacgactagggcagcgaagaggatga

SEQ ID NO: 419655 - DNA, 480 bp, Oryza sativa
  unsure (1)..(480): unsure at all n locations
gcttcttctgatggattgcgtagaattagcctgaataagaagagattggacaagaagaccttggacggtgcaaaattggcaagggaggaaagccatcgtctgagagccgacggtttaggtgatgacatagttcctttggacaactacctggacacgcagtactttggagagatcggcatcggcactccaccacagaacttcactgtgatattcgacactggaagctccaacttgtgggttccatcagtgaaatgttatttttcgatagcatgctacttacaccacaagtacaagtcaaaagggtcgagcagttacaaaaagaatggagaatcttgcagcatttcctatgggtctggatcaattgcttgtttcttcagtgaggatagcgtgctagttggngatcttgctgtgaaaaatcagatgttcattgagacaaccagggaaccgagccttactttcatatcgggagtttgatggaat

SEQ ID NO: 419656 - DNA, 526 bp, Oryza sativa
  unsure (1)..(526): unsure at all n locations
tttcgttgtctcgcgtcagcggcggagctctctagaaggagcagaggagtcccccccaagcgatcgattcgatcccctccgccgccgatcgcctcgccgaagtctccgagaaacacttgagggatggctgaagaggatatccagcctattgtctgtgacaatggcactggaatggtcaaggccggttttgctggtgatgatgcacccagggctgtctttcctagcattgtaggcaggccacgccacactggtgtcatggttggtatgggccagaaggatgcctatgtgggtgatgaagctcagtcgaaaagaggtatactgacattgaaatacccaatcgagcatggtattgtcaacaactgggatgacatggagaagatatggcaccacaccttctacaatgagctccgtgtggctcctgaagagcatactgtattgctgaccgaggctcctatgaaccccnaggcanacagagagaagatgacccagatcatgttcgagaccttcaactgcccagcgatgtacg

SEQ ID NO: 419657 - DNA, 455 bp, Oryza sativa
ggtctagaataataattattttgatgggcattaattgaagccgaaactttattgcaacaacacgcacggaaatctgctcatgtacttcaaaaccctgctttaactgtaagagttagaccacatacatgatcctactacacttagcttcaacgtgaacacagctttcctctacactaaatgcactataaatttccaaacgtgtgctacgacaattcatcttggaaagactgctacaataagatggcaactgcatgcttcagttacgcagccttgggcttgggcttcagtctcttcagttgtgagtacaggaaaactccggcaagtgcgatggcagtgccgagggagttgataggagaaacaggagtcctgaagaacaaaaccgatgttacgatgaccacgacacgcttgacacagttgcccacggagtgagtgacaggagacacccttctgaggat

SEQ ID NO: 419658 - DNA, 372 bp, Oryza sativa
tttttggtttttttagggcaaacaacaacatttctaaactaataaccaaaatctatgaaatgtttcagccatatagagatgctgaccatcacaagaagctcatttaacataacattagcaaactcgacaaaggtaacagctgttctagaggaggcaagccccccgtacacattcagggcaaacaaagatgcatgtcaccctcacacttaggggttgggtgccctggggcagatctgctggcttgagtgaaccgagaccatgcggattaggccccgggtcatcaaatcattgatggccctacgagccagggacccgttgatcctgagtctttcagagagaacggagggggtgatctgcttgtacttgggcacc

SEQ ID NO: 419659 - DNA, 518 bp, Oryza sativa
gcaaatacgagaccagctacctttattggcatggcatggcatcccgcgcctatcgattattcttctgttcatttcgcattggtgcatgtgtctatttccatggatgggcaaatgaagaacgtacaagatgcctttcttttttttcacctcacttctgcgaggtgggcatggagagggagacgcgctgagccggcgactccttccactgctgcgtgaccgtcttgatctgggtgaagaactgcacgcccgccttgccgtagaaattcaagtctcctgcaaaggaggctttgctgccggtgaaggagaagaacggcaggggtactggaatcggcacgttgatgcccacctggccagcttcaatgtctgtttgaaatttccttgcagacacaccagatgttgtaaatatggatgctccattgccatatttggttctgttcacaatttggatagcatcatctaggctctcagccttcatcaagagaagaactggaccaaaaatctcctccttgaacattcca

SEQ ID NO: 419660 - DNA, 516 bp, Oryza sativa
cgctcatacccgttgcgacacaaatccgcctcctcttccgctcgaatttacgattctgcccccctccgctccaccgcgcgaaggcgaagccggtagccatgaagctggaggtgatgccgaagcagagggccatggaggccgagcagagggaggaggccatggagatgagcgggctcgagctgtggaagcacgagaagcccgtgtccatggtggtgttcctcccgccgccgccgccgccgtcgccgattgtgccggcggcggcggacgaggtcgcggcggcgtgtggtgaggaggcgacgctggtgccaccgctcaacttcgcgatggtcgacgacggcatcttccgctccggcttacgcgcggccgacaacttccggttgctcaagtcgctcaacctccgctccatcgtgtacctgtgcccggagccgtacccggagacgaacgcggagtttctcgacagaacgggatcaagctcaccagttcggaatcgaggggcgcaagggaccattcgtcaca

SEQ ID NO: 419661 - DNA, 537 bp, Oryza sativa
gctcactattatgaataaacagtagctaagctagctatagctacgtttttgttcatatgctgttgttgctgccggctgcttggccgcggggaagcatggcggcggcgatggcgttcctcgcggtggtctgcgcggcggcgatggcggcggtgagcggagcggaggaggtgtacgagttcggctccggcgcgtcgttcatcttcggggactcgctcgtcgacgccggcaacaacaactacatcccctcgctgtccaaggccaacatgacgcccaacggcatcgacttcgccgcctccggcggcatgcccaccggccgcttcaccaacggccggaccatcgtcgacatcatcggagaaatgttgggccagacggactactcgccgccgttcctcgccccgaacacgaccggcggcgcgctgctcacggcgtaactacgcgtaggaggcgctcggattctcacggcacaggagaattttgtgacaggatcggatggatctcaggtggatacttcacatacgaggagcagctgacatctct

SEQ ID NO: 419662 - DNA, 473 bp, Oryza sativa
tttttgtttttttttttttttaccacaactttttaaggatggaattgagtagcaatactttcaccccaaaatacagtttagcgacaatatcttaaaaaagccgcttgctttgccgccatggctggcaagctgagcagagcagctaacacaaagaacacgagatcactataaaccaaacggcaacgaacgaagaaaatacagggtcttttttgtctgaagatacacgaagcgggtcgttttcttttatttttaggctcctctcctcctcgatgatgggtgtatggcaatggcaatggcgatgggatcttggcttagttgatgggaaggggctcgccgttccactccttgaggcagtcgagcatggggtcgatgagcttgccctggctgatgccgaggaacaccttgttgcactcctcgccgggggacttgagcttctcgccggtgaggaatacgcagccgagctccttgcggac

SEQ ID NO: 419663 - DNA, 477 bp, Oryza sativa
tttccgtatctccccaatctcgcgaggctctcgtcgtcgaatcgaatcctctcgcgtcctcaagatgcagatctttgtgaagacattgaccggcaagactatcaccctcgaggtggagtcctctgacaccatcgataatgtcaaggctaagatccaagataaggagggcatccccccggaccagcagcgtctcatcttcgctggcaagcagctggaggatggcaggacccttgctgactacaacatccagaaggagtcgacccttcaccttgtcctccgcctccgtggtggcatgcagatctttgtcaagactctgaccggcaagactatcacccttgaggtggagtcttctgacaccatcgacaacgtcaaggccaagatccaggacatagagggcattctcccagaccagcagcgtctcatcttcgtcggcaagcagctggaggatggcaggacccttgctgactacaacatcca

SEQ ID NO: 419664 - DNA, 459 bp, Oryza sativa
aggttcaaatccaacttattcataaagcatactgctgtcccacaggaaactgtttcataaaactaacatatcatacggactcgatggtccattaaaccagacacaagtagacatcagcaccacaaatacttgacgaacagaggctcgggatgaccaggcacatcggcagctccaccaaactggctgattactgaccaccacggaggcggagcaccaggtggagggtggactccttctggatgttgtagtcggcgagggtgcgtccatcctccagctgcttgccagcgaagatcagacgctgctggtctgggggaatcccctccttgtcctggatcttggccttcacattatcaatggtgtcggagctctcaacctccaaagggatggtcttcccagtcaaggtcttcacgaagatctgcataccaccacggagacgaagcaccaggtggagggtagact

SEQ ID NO: 419665 - DNA, 468 bp, Oryza sativa
tctactttctcctccggctcttcttcagtatcgaatcctctcttctcctcgtgcccaccaccaccaccgtagcaatggcgggcaacgggccgatcaacaaggaggacccgctcaactggggcgcggcggcggccgagatggccggcagccacctcgacgaggtgaagcgcatggtggcgcagttccgcgagccgctggtcaagatccagggcgccaccctccgcgtcggccaggtggccgccgtcgcccaggccaaggacgccgccggcgtcgccgtcgagctcgacgaggaggcccgcccccgcgtcaaggccagcagcgagtggatcctcaactgcatcgcccacggcggcgacatctacggcgtcaccaccggcttcggcggcaccttccaccgccgcaccaaggacggccccgccctccaagtcgagctcctcaggcatctcaacgccggaatctttcgcactg

SEQ ID NO: 419666 - DNA, 525 bp, Oryza sativa
aaaacccgaaaaatcatatatgcaaacctgcaatctgtcactgaattgaacatttacacactgcaaattgcatgccaaatctcgcaattcgcgtgcaaaaacaccaaaagcatcagatacaattacacatgcgaatcaaaatgcaagctcgacatcaatcgcggtaattaacaatggagtgctagtaaggctagagggagaacagcttgcggaggttcatcggcgagatgtacttgctgtcgccgtcgacgatgtacttggccatcaccaggttcgccgcctcgctggggtggtacgggtcccagaacacgtggctcttccggtcgccgcacatgctcgacgccggcccgcacggcaccatcccgtcgtacgtcccgccgttcccgcagcacgccatgctcgccgtctcgaacccgtaggagtcgtagttggtgatgacgtccatgacgaggtcgtagacgttggcgaggcagaacttggcgcccgcgaggtcgccgttgagctggatgaggagctcccggaggc

SEQ ID NO: 419667 - DNA, 462 bp, Oryza sativa
ttttgttcgtctctccctccctccctccgactcgcaccgcacccaggccccagcccacgcggggttcggattccctccgccgccacccgcgagagggagacgccggcgccggcgatcggtgaccgatggcggcggcggcggtgcgggtagacaaggccacgagcgagctgctgctcggccccgactggaccctcaacatcgacatctgcgacgccgtcaactccgatcacgggcaagcaaaagaggtgattaaagctttgaagaagcgtcttcagcacaaaaattcaaaggttcagttttttgctttgacgctattggaaactctaatgaagaattgtggggatcatgtgcattcacaagttgtagagcgtgatatactgcaagagatgatcaaaatgttaagaagagactgattgcagttgagggacaaaatctagtactcttgaatcttggcagagcatt

SEQ ID NO: 419668 - DNA, 515 bp, Oryza sativa
gcatcaagagaaagttcattcccgccgagcaatgctgctcgagtacagctttcagtacccgaaaacaattggtgaattcctcgcaagagttaccagaaaaaaaaatggggaaaaaacctcttgcaatcctacccacaactgtctggttcataggatctgcagggagctaagcaggagaaaactagaactctcaactcaattacaaacattttctttttttacggggttcattctacgggttccaaaattattcactgctgaatcaaattcagtagctgcagggagaagatcataggtttgggagatttgctaggacttaaagaggaggagacagcgcgaatcgcacgctcttggttaacaatgtgaagctgtcaggtgcttcaagcttgagatgtcgaacagctccatgaatctctgatcggtgctcctcgccttcgcagcggcgaagcgctggtactcgtcgaacactgaagacaagcaccatttctgaagcttcctcaagcaccccacgacgc

SEQ ID NO: 419669 - DNA, 469 bp, Oryza sativa
ttccgtcgagccgcggaggcgacccctcccccgccgccgccaagatgcagatcttcgtgaagaccctgacggggaagaccatcacgctggaggtggagtcctcggacaccatcgacaacgtgaaggccaagatccaggacaaggaagggatccccccggaccagcagcgcctcatcttcgccggcaagcagctcgaggatggccgcaccctcgccgactacaacatccagaaggagtccaccctccacctcgtgctccgccttcgcggcggcgccaagaagcgcaagaagaagacgtacaccaagcccaagaagatcaagcacaagcacaagaaggtgaagctcgccgtgctccagttctacaaggtggacgacgccaccggcaaggtcaccaggctcaggaagggagtgccccaacaacgactgcggcgcgggcaccttcatggccaaccacttcgatcgccactact

SEQ ID NO: 419670 - DNA, 441 bp, Oryza sativa
tccacgcgtccgaagagaggctgcactccactcgccgccggcgaccgatgctccgcgccgccctcctccgctcaggctccggcctccgccggcctcccatggccgcgccgctctccaccgccgccgccgcctcgtggctctccgacagcgcctcgtctccgcctagggtgcgcctcctcatcggcggggagttcgtcgagtcgcgggccgacgagcacgtcgacgtcaccaatccggcgacgcagaggtgggtgtcgcggatcccgctcaccaccgccgacgagttcagggccgccgtggacgccgccaggaccgccttccccgggtggcggaacacgccggtgaccacgcggcagcgcatcatgctcaagtaccaggagctcatccgggccaacatggataaactggcagagaacattacaaccgaacaggggaggacac

SEQ ID NO: 419671 - DNA, 523 bp, Oryza sativa
tttcgcagcctcccttctcctctgctcgccccgccgccgccgccgtctccgcgccaccgccgcccccgagatggccccgaagaaggacaaggccccgccgccgtcgtcgaagccggccaagtccggcggtggcaagcagaagaagaagaagtggagcaagggaaagcaaaaggagaaggtgaacaactcggtgctgttcgaccaggccacctacgacaagctgctctccgaggtgcccaagtacaagcagatcaccccctccgttctctctgagagactcaggatcaacgggtccctggctcgtagggccatcaatgatttgatgacacggggcctaatccgcatggtctcggttcactcaagccagcagatctacaccagggcaaccaacacctaagtgtgagggtgacatgcatctttgtttgccctgaatgtgtacggggggcttgcctactctagaacagctgttacctttgtcgagtttgctaatgttatgttaaatgagctacttgtgatggtcagc

SEQ ID NO: 419672 - DNA, 513 bp, Oryza sativa
tccactcgtacgctagaaccctaggtggagcgcgaatacagctactggaatccattgaaaaaccctcgttaacccacgcatcgatctcgtcggcagatcgtggaactcgcatagatgcgggggtgttcttttcttttctttttcttgcagaacagatcggattttctgtctcttttcatcgcgaggagatagatggcggtgggaggcacaggagggacgacgcctacgcctccatcgacctccccatcctgggcctcctcttcgccaccatggtcgtcggcggctacctcaagaacgccggcatgttcaggcacctgggccggctgctggcgtggaggagccagggcgggcgcgacctcatgtgccgcgtctgcgtcgtcaccgcgctcgccagcgcgctcttcaccaacgacacctgctgcgtcgttctcaccgagttcgtgctcgagctcgccgccgagcgcaacctccccgcgaagccgttactgctcgcgctcgccaccagcgccaaca

SEQ ID NO: 419673 - DNA, 519 bp, Oryza sativa
ggttaaacaagatactcagtcccaagggggaaagcataacatccaaaacactacaagtcgttcaaatacaaataaacctttactacgtacacaaaaataagttatcttcaagagagaaaacaaaactagaggtacaatcattaagacccgcaattcggctagtagaaaattcgaaacaaaaagctttcaaactgcacgggcaaacatccttgttgcccggtgaaacccaacacaacaatccattgcatacattaggaatgccctgatgcgatgccattgtctgaaaaaactgaccgactcagacgacctacactgcacactacctggacagatttcttccagtacaccaattgacttcaccttccgcattgccccatggccaacagccctcaggtgctactgaaaccatgggacgcatgcaaacaatctgcagatcacgtctcaatcagctgataatggtacaaatctgcccacaaacttagaagcacttcatgtggacgatgcctggaccagattcat

SEQ ID NO: 419674 - DNA, 405 bp, Oryza sativa
cttgtgcaccatccaagaaccatatctgcatatccatagctgatacagctccatcgggaaaacgttaattcctctacaaggatttgcgtgctactgctaacggactatacctttagacattcccaggttacaataccgggtaaacaagctgcctaacagacattaccatacttgatatgttgtatgatcctgaagggcctagccaagcaatggaagcaaattcggcgaacccaatcctgtttttgccaaagacgaagacggtgtggtatgcagccatgaacacgtctccaagaatccagagagggccgcgtggaggtggcacgtcgaacgccatgaacccgctgatgcaaacagtttgaccttgctgctccagcttcactacgtactgctctggggtcaagggga

SEQ ID NO: 419675 - DNA, 462 bp, Oryza sativa
aatctaacatacgcaaactgatattatcacaatgttagccgatgacaatggaaagagtaatctaggtacaagcggatcattgacggtggagacaagacattggctgcaccacaacacccaccagtggcgccaacaaggagcgctatccgttataggacgagagaaaaagtaaaacatcacgatgtgaagtgaaactgaataattctagtagacgatgatgatgatggataggctccttaggacgcccgccgcccttagcgtcttgctgctcccatcttgtccactggaaggctcactcgtcatcgtcttcatcctcttcgctgccctcgtcgtcatcctcatcattgacctcggacttggacttgtcagattcctcctcgtcgtcctcctcttcctccttggcgggtgccttcttggcagtgctctcgcccttgttgtaggcagcaatggccttgttgtact

SEQ ID NO: 419676 - DNA, 470 bp, Oryza sativa
  unsure (1)..(470): unsure at all n locations
tgaaagaaaagaaaaaaaaaaggaaaatcgtgtctcgtctcgtctcgtcttcgtctcccccgattcccgagcagcttctcgaaaccctcgcggcctcgattccggcgatggcggagcccaacccgcaagtggagagggaggtggaggtggaggaggtgaggaggccaaagctgaggtacttggagttcgtgcaggtggcggcagcgcaggcgacgatctgcctcgcggggctctacgcgcttgccaaggaccacgccggcccgctccgcccggcgtcgacgccgtcgagtccgccgtcaagggcgtagtcggccccgtctacggacgcttccatggcgtccccctcgacgtcctcgccttcgtcgaccgcaaggtggatgacacggtgcaagagctggaccgacacctnccgtcgacgctgaaaggccgtcttcgtcaggcttgcgcggtggcccgcggcgtgccggacg

SEQ ID NO: 419677 - DNA, 204 bp, Oryza sativa
acgttcagttctccgagctcgtgaacgagttctacaacaacgggctgacctccaacctggccggcagacgcaacccgagctcggactacaggttcaagggcaccgcgatcggcatggcctcctactgctctgagctgcaggtcctctgacaaccccatcaccaaccatgtgcagagcgcggagcagcacaaccaggacgtgaac

SEQ ID NO: 419678 - DNA, 268 bp, Oryza sativa
ttccatcactccactccccaatccaaccaccccccgaacaaccggagaagagaggctgcactccactcgccgccggcgaccgatgctccacgccgccctcctgcggtcaggctccggcctccgccggcctcccatggccgcgccgatctccaccgccggcggcggctcgtggctctccgacagcgcctcgtctccgcctagggtgcgcctgctcatcggcggggagttcgtcgagtggcgggccgacgagcacgtcgacgtcaccaat

SEQ ID NO: 419679 - DNA, 482 bp, Oryza sativa
ggctgcacagaacaggattacgtaacaatacgctatgcccaagacaagtcaatactacaacatctggggcgagtacagaggtacaaaagtcaggcaccgtaagcctttcgattaaaaaccaaactgaaacacgcacgattttttaacaccccacgaaaaacaatctgatacctagctcctttggggggggaacctaaagagctttatcttcccaaaacatccacatcattatctgtcatgactatatagtttcgatacgtaaaaaggcagcgttcactcagggatatccgccatgtcttcctttcatttaagcccggccaagatgcttcaagccttgttggcaatgttgttggaaagccagtcaagcccctaatacaacccctcaccagaggtagcacatgtgctctggatgtaccagtgccgctggcgcaaggagtgcagaccaagcttgtcggtgatctcagcagcgttcatggcattag

SEQ ID NO: 419680 - DNA, 527 bp, Oryza sativa
  unsure (1)..(527): unsure at all n locations
ttcgcttccacaaataaagctcgtcccgaggaagggcggcgacccaccccccccaatcgccaaaaccctaactccgatccgatcgagctctgcttcccatggcgactgccgcgagccaggcgagcctcctgctccagaagcagctcaaagatctcgcgaagaaccccgtggatgggttctcggcggggcttgtggacgatagcaacgtgttcgagtggcaggtcaccatcatcggcccgcccgataccctgtatgatggaggctacttcaatgcaataatgaccttcccccagaattatccgaatagtcccccatcagtaaggtttacctctgagatgtggcatccaaatgtttatcctgatgggcgcgtatgcatttctatccttcatccacctggcgaagatcccaacggttatgagcttgcgagcgaacggtggacacctgtgcatacagttgaaagtatagttctgagcatcatttcgatgctctctagtccaaatgatgagtctncagcanatattgaagcg

SEQ ID NO: 419681 - DNA, 489 bp, Oryza sativa
  unsure (1)..(489): unsure at all n locations
tttacttcctccacctcctcctcctccccccgatcggatcggcccggctcctcctgctccgacgtcgacaccgtcgccgtagataggagaagatggccgcacttgataccttcctctttacctcggagtctgtgaacgagggccaccctgacaagctctgcgaccaagtctcagatgctgtgcttgatgcctgcctcgacgaggaccctgacagcaaggtcgattgtgagacctgcaccaagacaaacatggtcatggtctttggtgagatcaccaccaaggctaacgttgactatgagaagattgtcagggagacatgccgtaacatcggttttgtgtcagctgatgtcggtctcgatgctgaccactgcaaggtgcttgtgaacatcgagcagcagtcccctgacattgcacaaggtgtgcacgggcacttcaccaagcgccctgaggagattggtgctggtgaccagngacacatgtttggatatg

SEQ ID NO: 419682 - DNA, 476 bp, Oryza sativa
  unsure (1)..(476): unsure at all n locations
cattccgatagatagcaacaagcagttcaaacaccataaccaaagcgaactcaattcatggtaacatcacggacgaagaacacctaacactggatggatggatagagggcttctcgactcgagagagccactggacacgataacgactcgactcgatgataagatgattctgacacggatagctaaggataactggccacgatgggccccaccaatcagttcctccagttcccgccggagtcgccgccgtagccgccgccacggctgccaccgtagccgccgccgccgccgccacggccgccgccgtagccgccgccgccaccgtagccgccctcacggcgcccgtagccgccgccgtcacctcctccgtagccgncgcctccacgaccgccgccgtagccgccaccgccgtcgccgtagcccccgcctccgccgncggagcggcgggactgggcctcattgacggtgatgttgcg

SEQ ID NO: 419683 - DNA, 467 bp, Oryza sativa
  unsure (1)..(467): unsure at all n locations
gtgggtgtgtccctgtctcccctctccttcctcctctcctttcccctcctctcttcccccctctcacaagagagagagcgccagactctccccaggtgaggattcagccatgaagggggccaaatccaagggcgccgccaagcccgacgccaagttggctgtgaagagtaagggcgcggagaagcccgccgccaagggcaggaaggggaaggccggcaaggaccccaacaagcccaagagggctccctccgctttcttcgtttttatggaggagttccgtaaggagttcaaggagaagaaccccaagaataaatctgtcgctgctgtaggaaaagcagccggtgataggtggaaatccctgaccgaagcggacaaggctccctatgtagccaaggccaacaagctcaaggccgagtacaacanggccatngctgactacaacaggngcgagagcactgtcaagaagg

SEQ ID NO: 419684 - DNA, 449 bp, Oryza sativa
  unsure (1)..(449): unsure at all n locations
tttccgtttctcctccccctctttaccttttcctcctcggttcggatgccaggttcgtgtagggtttagtgcgttgagatggcggcgccggatgtcgagtaccgctgcttccacagcagcctcgcctgtgccaccgacgaccgctccctcgaggccgccttctccacctacggcgagatcctcgactccaagatcatcaacgacagggagacggggaggtcacgtgggtttggcttcgtcaccttctcctccgagcagtcgatgcgcgacgccatcgagggcatgaacggcaaggagctcgacggccgcaacataactcgcaatgaggcccagtcccgccgctccggcggcggaggcggtggctacggcggcggcggtggcggctacggcggcggtcgtggaggcngcggctaccgaggaggtggcggcggctgctaccggcgccgtga

SEQ ID NO: 419685 - DNA, 283 bp, Oryza sativa
tttttggtttttttaatttttttggttggatccacaaaacagtattacaaaaaaatacactttgccaaaaacaagtaaatactccaacatctggggcaagtacagaggtcaaaaggacaagccacgtgagccgattcttttaaaaaccaaacttacacacgcacttttttataacaccctacaaaaaacaatctgatacctaacagctttggtggcggaaccaaaaaagtttgaatttcccaaaacatccacaggatcttctggaaagactatttagtttccc

SEQ ID NO: 419686 - DNA, 465 bp, Oryza sativa
tgtgtgagcttgcgtcggcgcccaaggtggcgcttggatcgatcgcgttcgcggtgttctggatgatggcggtgttcccgtcggtgccgttcctgccgatcgggcggacggcggggtcgctgctgagcgcggtgctgatggtgatattccacgtgatcagccccgacgacgcgtacgcctccatcgacctcccaatcctgggcctcctcttcgccaccatggtggtgggcagctacctccggaacgccgggatgttcaagcacctggggcgtctgctggcgtggaagagccagggcgggcgcgacctcatgtgccgcgtctgcgtcgtcaccgccctcgccagcgccctcttcaccaacgacacctgctgcgtcgtcctcaccgagttcgtcctcgagctcgccgccgagcgcaacctccccgccaagcccttccttctcgccctcgccttcagcgccaacatcg

SEQ ID NO: 419687 - DNA, 319 bp, Oryza sativa
ggtacaagaagccaaacgtgagagctcagttcaaaactttagatatctaaaaaattaaatatgaaaggtatgcaaggacctcactaaaaacttgacagctataggatataagctcagctatgatcaacgggacactgcaacgtacgcaatgggtacccataccgttacagtgtggttaatttaacgaatgaggtagcttggccgaccgatcgaacgatcatgccctgcactgcttgatgcaggaacatcctccaatagaaaggttggtctcagggccgggctggcagttgtagtaggacgcgcctggttgcgagcactg

SEQ ID NO: 419688 - DNA, 537 bp, Oryza sativa
  unsure (1)..(537): unsure at all n locations
ctcgtcggaggttccttccgtatcccccgcgtgcagcagctgctccaggacttcttcaacgggaaggagctctgcaagagcatcaaccccgacgaggccgtcgcgtacggcgccgccgtgcaggccgccatcctcaccggcgagggcaacgagaaggtccaggacctgctcctcctcgacgtcacgccgctgtctcagggcctcgagacggccggaggcgtcatgaccgtgctgatccccaggaacaccaccatccccaccaagaaggagcaggtcttctccacctactccgacaaccagcccggcgtgctcatccaggtgtacgagggtgagaggacgcggaccaaggacaacaacctgctcggcaagttcgagctctccggcattccgccggcgcccagnggtgtcccccagatcaccgtgtgcttcgacattgacgcgaacggcatcctgaacgtctcggcggaggacaagaccactcggcagaagaacaagatcaccatcaccaacgacangggccgtctgagcaagaggata

SEQ ID NO: 419689 - DNA, 500 bp, Oryza sativa
gggtgttgaactttgcttataacgtttaatataatcatttgcgttccttcaaatcacgcttgcgccacgcaacatcaaaattaagcgttttgtgggagcatgtccacccacatctgaccgtggggaattattgctcaaaccctacgagcaaatctaaagcaccatcttcacaaaatttacggaaacgaagtggttctattcccatctagtagggctccactggtgcacggaatttggctccggcatagacggcagcagcaccaagctcctcctcgatcctaagaagctggttgtacttggcaaggcgctcagatctgcaaggagctccagtcttgatctggcccgtggataaaccaactgccagatcagcaatgaatgtatcctcagtttcaccactcctgtgactggtcatcaaaccccagccaggacgttttgacattttgacagcctcaatgctctcaataacagatccaattttgttaaccttaaggagaagagca

SEQ ID NO: 419690 - DNA, 412 bp, Oryza sativa
tacgacttcgaggcggagttcgagcttttcgaggacgacgacgacgacgatgagttcgagctttccgacgatggcgacgagagtttggccgtgtcatgtgtgtcgtcccccaagtcgaaggcagtaccttcgttttctttttcgtcggatgtctcctcgagctccaggccgtggcggtgcgtggcggcggcggcggccggtcgtcggaaggcgagcaagaagagcaagtacaggggcgtccggcgccggccgtcggggaggttcgcggcggagatcagggaccccaagaaggggctgcgcgtgtggctcggcacgtacggcagcgccgaggaggccgtcatggcctacgaccgcgaggcccgtcgcatccgcggcaagggcgcgaggctcaacttacttcgcgacggcgatg

SEQ ID NO: 419691 - DNA, 198 bp, Oryza sativa
acccgtccgatcttattggcacttccatcacattcttctaattgtcatcactagcttctagctagcttaattaattaattacccatggcggaggagaagcaccaccaccacctgttccaccacaagaaggacgacaagccggccaccgtagtagactcctacggcgagggcgtctacacgtcggagactgtgaccacc

SEQ ID NO: 419692 - DNA, 190 bp, Oryza sativa
accttttctttcacaatacgggcatacacagcctagggcgcaatggccgacattagggttcatttattggacaacaacatggaaagcactcttgtgaacatgagtgtaaacagaccgttcaccataccagtggaaacatcggctggcatcacgatatgggacacaacaacatttgctgtcatgcaaaacc

SEQ ID NO: 419693 - DNA, 541 bp, Oryza sativa
  unsure (1)..(541): unsure at all n locations
tgtctgtctacaatccgtgcctacaaagcctatgacagaatggcaaacatcaatgggaaatcaatggacaacaacatcagattcactcttgtgaacatgagttcaaacagatggctagccatccgtctggaaacattgggtggcatcatgatatggttcacagcaacatttgctgtcatgcaaaaccaacgagcagaaaatcaaaaggcttttgcctccacaatgggtcttcttcttacttacaccctcaatatcaccaatttgctcacggctgttcttcgtcttgctagtctggctgaaaacagtttaaatgctgttgagcgggtaggaacatacattgagttgccttctgaggctcctcctgtcattgaggatagcaggccacctcctggttggccatcatctggtgttgtcaagtttgaagacgtcgtgcttcggtaccgaccagaacttnctcctgttcttcatggcatatctttcatcattaatggcagtgaaaaggtaggaataagtggcagaacaggagctggtaaatctagca

SEQ ID NO: 419694 - DNA, 460 bp, Oryza sativa
gatcgaatccccagactttgattgatgtatgtaagttctttattcagatcaagcgattacatgatggcccgtgcgaccaacatgaagaaatgcacttgggacgccattctttccaagccccctaaaccatggaagcacaatttgcacaatgctggagccgttcatggctcgaacaccatgttttaggcctccctgttgatcgattcgaagaggacagaccacaggtagcgctcaccgaagctcgggaagaccacaactacgagcttccctttgctctcgggccgctgcgcgaccctgatggcagcgactgcagcatccccagatgagatcccaaccagcagcccttctttcaacgctagctgcttcgccatgctgatggcttcatcacttgagactcggaccacttcatgcaggagattgacatcaagtacaccaggaacaaatccagcgcctatacctt

SEQ ID NO: 419695 - DNA, 377 bp, Oryza sativa
ggcataatgtaagtgtagccagtctcctttatatcatctgagttaacataaatgtgattgacacgaagatacaagtttgtggcagagatagccctaacacgccaatcagtctttgatgcaaatgcttgttgctcgtatggactggtcgttgtgatgatgagctcatctccatgcacattggtcgtccttgtagtaactgcggtcagctgagtcgtctctctagactgtttctcaatttcagcaatctgttgcctctgctgtgatggtggagctatttcagcaccaagtataatgtcacgaatttcagattgtgtcagcgcagacgtattaacattgtttttttttgcataatcagacaggatgaggtccctgagtgc

SEQ ID NO: 419696 - DNA, 408 bp, Oryza sativa
  unsure (1)..(408): unsure at all n locations
tttttggttcttaccaatacaagcctcttattcaaagttacaaatgtgcacgacaagttgacaacaaaaaaagcgagaattatatccttattttgaaatttgaattataggggcagacggtgagcccattttagtttcttgcgaagttgaagttgccacacgtagccctgatgaagaagagggtgccactgaaccctagccttgacgcggcctcgtcgaacagcaaaaagttgttctccatctggaacgcgcccacggtcaccgcgctccgngccgacctcccgccgtcgacgaacgccaagcacgccgtgtagctcgccacctgcgccagcgagttcgaccccaacaccgtccagttccggccgccggacgtcacgaggtcgatcggcgcccccgcgtagccgaccc

SEQ ID NO: 419697 - DNA, 485 bp, Oryza sativa
gttctagatcgtgagttgccgccctttttttttttttttttttaaaacacatcaactttgttaagcaagagcagaattaggggataaaccccattacataaccaaggataaaagctgaaagcaaaagagccacccctgagaagggagggttaactgaactacgaaatcaatcttcctgaaataacctaatagcagaaaaaggagcaagtcgatagggatctgcggcgaagccgcgacgactgctaccctgggcctcaaaagatgtgcactccgcttgacaaaccgttaatccccatcagctgcctccacggaaacggcacaagaccgaggtttgttgctgagccgtagattttggtgtgtgcatcactggactcagcgaaggatccccacgaggctcatcattgaatctgaggagctctaacatcaaccctgtcaactgaaattgcgcagattgttcgagctcaacccgaatgacaaacccagca

SEQ ID NO: 419698 - DNA, 497 bp, Oryza sativa
ctcctctgctcatcctttccccagatctccagccccaggagctccggagggttcccaatggcggtgaaggtctatgtcgtgtactactctatgtatggacatgttgctaaactagctgaagagatcaagaagggtgcttcatctattgaaggtgttgaggctaaaatatggcaggttcctgaaactctccatgaggaagtacttggaaagatgggcgcgcctcctaagccagatgtgccaacgatcacaccacaagaacttactgaggctgatggaatcctgtttgggttccctacaaggtttggcatgatggctgcgcagatgaaagcattctttgatgcaaccggtggcctgtggagtgagcagagccttgcaggcaagcccgccggcatcttcttcagcactggtacccagggcggtggtcaggagactacaccgttgacagcaataactcagttgactcaccacggcatggtgtttcgtcccggtcgggtaca

SEQ ID NO: 419699 - DNA, 463 bp, Oryza sativa
tttttgggggtcacaaggaacatagctgaagggcaaagtgtttacattattatgatagagcccagcttgcaacaagtactaaaagtttctactgaggatttggtggcctggagttggcagtataaaccctcgatccccattccagcagctctttgctgaaggtgaccttgtgcgcgagcacctaaatgaaagcacaggcagtccttctcccccagcgccatcccgaacgcctccgtcagctgctcttcgcaacttcaccttaaaagaccactatttgcccccttcattgtggatggcattcacaaggtcagtggagttccagtttcttgatgaccttgtatggaccccgaatgggactccaccttaatggggtccccgcccgtgttgatcaggaagattatcctgttctgtgcacagccaatcaattgggacaccattctgtgccgccacctggaaacttcca

SEQ ID NO: 419700 - DNA, 511 bp, Oryza sativa
  unsure (1)..(511): unsure at all n locations
ctaaccccggttagccttctcgccgcagatggcagtccccggccgccgcgacgacctcgtcggcgacgacctcgtcgacgacgacgggatcggcgaggagtacatggccccctccgacgacgaggaggcgcaactgcctgacgaactcttccgcctcgccgacgccgcccagtccggcaacgtcgctgccctccgcgccgcgctcgataattattctggcaacattgatgatccaatagaagatggtgatactctgcttcacatagcatgcttatatggccatctaccttgtgttcagctactgttggaacgtcaagctagcttggaatgcaaagatgaagaaggagcaattcctcttcatgatgcttgtgctggaggctttagtgatatagtccagtacattatgaaatttgctgcgaacattgatggctgcgtaacaagaatgctcaacacttngtgatctgaaggcgacactccactccatcatgctgccagaggggaacatcttggt

SEQ ID NO: 419701 - DNA, 168 bp, Oryza sativa
cgttccgtatgccctagctctcaggcgccggctgtgcatcgacgagaaaacatcacttttcatggggggcaagggcgagggtgcgggcatcggtatctaccttggtacgacctactcgtgcgtgggcgtttggcagcacgaccgtgtggagatcatcgacaacgacca

SEQ ID NO: 419702 - DNA, 525 bp, Oryza sativa
agtacaaactggcaatctcatgtagtttcctgtgttaaatgtttcaagtgcaaacgttttcaatcatcctgaattcctgatgctatctgctgcaccaaattacaaaacaaacgagcaaaattgtttgctataagagaatttagcagggccggaaaagaaaacaaaaaaatgtaggaacatccatcgatgtgccaactgttgagacttcgttgcaatcgggcacagatgcaggagaccaggaacaatagtctcccccatgttcctccaggcgaaaaggatggctatggtgtatacacaatgcttaatatcaccattttgacgtcttgagttggtcatggtcagttcttctggcagcgttgtaggtcttcgatcgccttcttccattgccaggcgcgctgttttgcatcctcaaacgatgacaccttctttggcgtgcatatcctgaaatgcgaagagtttgatacttgcacattgagttcacttgggtcatcaaaccacatgatgttccctttagtcaccattttt

SEQ ID NO: 419703 - DNA, 479 bp, Oryza sativa
  unsure (1)..(479): unsure at all n locations
ttggactactactttattaagcccgtgggccgtgcggcccactgatccgcaccggcacggcggcatgcgagatgccgccgccttggagctccacgccgccgacgccgcggcggcggcgcggccggcgatggtggccgccagcgatcactacgcgcggctcctgcagctctgccagacggcggctaacccgggcgctggccgtgccatccacgcgcgcgccgtcaaggctggcctcctcgccagcgcctacctctgcaacaacctgctctcctactacggcgagaccgccggcggcgccggtgggttgcgggacgcgcgacgcctgttcgacgagatccccttggcgcggcggaacgtgttcacctggaactcgctcctgtcgatgttcgccaagtccgggcgcttggccgacgcccgcggcgtgttcgcggaaatgcctgagagggatgccgtctnctggacagtcatggtcgtcgggc

SEQ ID NO: 419704 - DNA, 459 bp, Oryza sativa
gatcgaatccccagactttgattgatgtatgtaagttctttattcagatcaagcgactacatgatggcaagtgcgaccaacatgaagaaatgcactcgggacgccattctctccaagccccctaaaccatggaagcacaatttgcacaatgctggagccgttcatggctcgaacaccatgttttcggcctccctcttgatcgattcgaagaggacagacgacaggtagcgctcaccgaagctcgggaagaccacaactacgagcttccctttgttctcgggccgctgcgcgaccctgatggcagcgactgcagcagcaccagatgagatcccaaccagcagcccttctttcaacgctagctgcttcgccatgctgatggcttcatcacttgagacttggaccacttcatccaggagattgacatcaagtacaccaggaacaaaaccagcacctatacct

SEQ ID NO: 419705 - DNA, 512 bp, Oryza sativa
gttgattcaacaaggcgtgaaatatacgaacatccaaaattcaacacacttaactcagtctgggctataataattcaataatgcatcgctacttcagttagattcagaaggttctacccccacaaacctattacatcttaaagtacaataaaaatggagaaagagtttccaccttgtgctagggaaagattctattcaagtgtggtgttcagtactgctcttcatcccatcataaacttaacttaaaccatgcagtatccccgtgtagtatgtctagctgtttgctcttgctaataggccagagaaggatggaacaggggagttcctcatttgttcttgagcttgctttatctcctcgggatctatgttctccatcattttgggcataacgaagaccattatgaccataaaaccaagcatcatacccatagggctcttcaaaagtgacataatggagaaaggctcccttttctcggagtattgctcttctctgagaggttccaacacaagct

SEQ ID NO: 419706 - DNA, 521 bp, Oryza sativa
ctggccgcctccccggcccgtaccggaacggcatggccgacccgccccacgcgtccgttatgacggaactatcatgacgatctcgaaggacagagataagccttctcccttgccagacagctggaagctgaaggaaatcttcgctaccggtattgtgcttggaagctaccttgctctgatgaccgttattttcttctgggccatgcacaagacagactttttcacggacaaattcggtgtcagatcaatcaggaacagtgaacatgagatgatgtctgcactgtacctccaagtcagtattgtgagtcaggccctcatcttcgtcacccgttctcgcaggtggtccttcatcgaacgccctggtcttatattggtcactgcattcatgcttgcacaactggttgcgacattcctcgctgtctatgccaactggggctatgccaggatcaagggcattggctggggctgggctgggcgtatctggctatacagcattgagttctacttacctcttgacatct

SEQ ID NO: 419707 - DNA, 469 bp, Oryza sativa
gccagtctccgagaagcctctttgtccttctctctttccctttctgttcttagacttccctgctctttgagtctctgaaccccaggtgtttcttttcttgatatatcagcagaagatgggatatgaccttctgcagatttaggtaaactgctactcttctcagaatgaaattgttgctgctttagctctgcctttgatttgcatgccctgctattctcatcttcaaatgcagcagatttatctgttggtaattctctcccagcttctttgcaaacttcttcggtcttttcaagactagggaaagttccgttagatgtctgagaaatagcaggtccagcatcttgaggcaagtgctgtctgccagttagcatttctgaagaggaagacgcctggccttttgaatttgtagtcaatctagttgtaacattattagcagcacttgtaacatctccatcttcataaaagttta

SEQ ID NO: 419708 - DNA, 411 bp, Oryza sativa
agctggccgcctcgcccggcccgatccggaccggccgggtcggcccgccccacgcgtgcgtttatatcgcgctctctccggagccaaggcgaggaggctgaggcggcggctgccgctgtggagcgagacgagatcgtggagtccggcaccccacccccgtacttcgcttcacacgaaaaggaagggaggaagatgagctccgagtctgaggcggcgcccgggaccgggaagctggtgtgcgtcaccggcgcgtcggggtacatcgcgtcgtggctcgtcaggctgctcctcgcccgcggctacacggtccgagccaccatccgggacacctctgacccaaagaaaacactacacctgcgtgccctggatggagccaacgaaagactgcatttgttcgaagcaaatctgctg

SEQ ID NO: 419709 - DNA, 555 bp, Oryza sativa
  unsure (1)..(555): unsure at all n locations
ttcatcatctccatcccgcctcaactccgccgctcgatcgcctccacccgccgccgttccgtctacctctccgacccccggcgggcgccgccgccgccgccgcgcctaccatggctaatacgctgcgattgtatctcacttgcataaggaacactctggaggctgccatgtgcctgcagaatttcccttgccaagaggtcgagaggcacaacaaaccggaggtggagctaaagactagccctgaacttctgctgaacccagtgctcatttgccgtaatgaagcagaaaagtgtttgatagagacttcaatcaactctattcgtattagcatgaaggtcaaacaggcagatgagctagaaaatattcttgcaaagaagtttcttaggtttttatcaatgagagcagacgcattccaagtgctgaggagaaaaccagttcagggttatgatatcagtttcctgatacaaactaccactgtgaggacatgcacaagcataagctcatagatttcattgggtcagttatggaggacatcgacanggagatcagtgagct

SEQ ID NO: 419710 - DNA, 501 bp, Oryza sativa
  unsure (1)..(501): unsure at all n locations
ttcgtttcttgctccatccatctatccatccaaggagtgtggaacgccacacgtattttttttttatctatgctaatctgatcattagcagaggagagttttagcagtaggattggattaaattggagtagtttcatagtttgtgtgtagtgatcttaattagctttgattagacagacagtacagtagagtagaggatgttggctgtgttcagcggcgcggtggtggaggtgccggcggagctggtggccgccggcagccggacgccgtcgcccaagacgcgggcgtcggagctggtcggccgcttcctcgccgccgccgagccggccgtgtccctgcagctcggcgaccttggccacctcgcctactcccacgccaaccaatccctcctccgcccaagatcctttgcatcaaaagatgacattntctgcctgtttgagggagtnctggacaatctgggcaggctgagccagcagtatggcctgtccaggggcgccatga

SEQ ID NO: 419711 - DNA, 471 bp, Oryza sativa
tccggcgagaagatcttcaagaccaagtgcgcccagtgccacaccgtcgacaagggcgccggccacaagcaaggtccaaacttgaatggtctgtttggaaggcagtcaggtaccacccctggttattcctactctacggccaacaagaacatggctgtgatctgggaggagaacacactttatgactacctgcttaatcctaagaagtacatccctggaaccaagatggtcttccctgggttgaagaagccacaggagcgtgctgatcttatttcctacctgaaggaagcaacctcttaaaaggagtggagctgtcgtaacatgagacaatcggacaattcattctacagttaaataaaaatatttagacatctgggtcgctctggttttacagggtgcaatccacgagacaattatcttgttatattttgttcttatggtttatgggttccatatcttaggtttagcagg

SEQ ID NO: 419712 - DNA, 541 bp, Oryza sativa
  unsure (1)..(541): unsure at all n locations
cagaagcaagattaaactgtttctccagaataatataacctttcctgatcttatcactaaaatctgttttacaacacctgatctaatacaaacgatcaagtggcatatagtcacaagtcgcaacacgctcggaagagcatttgaactgatcatcccgttgaggttacactccaaattgaatgatgaggcaacgaataacaaagcagcactcagaaatccatgatggtccaggcatctacaaatgatatatcgcgcaactccatttgagtacaaatgggtccaagccctggcaacaggtgtatggatctcagatgatcaagcctcttaaggggttcttggaatataatgaggaaagacaaacagtattctttcaacaattgtaaaggaagttagaacatgcgccgccggttgggagcaatctcagggttgttgttcctcattatggcgacaaactcctggtagttaattcttccatcatgatcagtatctactccagcgatgatntccttaatcgttttatcgtcccccatatcatactttt

SEQ ID NO: 419713 - DNA, 479 bp, Oryza sativa
aagcacgaattataaatatgatttaggaaacgacttaaataacagaccagtcaggtcgaacagactaccatactgaaacggacttcacaaggtagggtacatatgagttcaactgggcacaacagcccttaaaagcacattcatacttggttggggggagagcggagacttgatggccatttaggtgataacagtcgttgggtttcgacacgaccaccagtttggctggctttagcccatggcggacttatgtgcccaggagcgagcgggggattcatacttggccctatcagggttggacatgtgagcaatcttcggcgaccaacggatcctcggggttcgggtccgtcagcagggaacaaattgacaggaggaccttctctatggtcagtgcaagactccactgttccttgaggatgtcgaggcaaatgctgccattgctattaatggtccggatggaaaaccttggtgcggaaaga

SEQ ID NO: 419714 - DNA, 524 bp, Oryza sativa
tttaatttctagctaacccctcctcctccaggtcccttctcctcgccgcccctctctcccgcggcgccaccccactgcccctcctgcggcgcgatgtctccgcggcctacggcgacgacgacatggacgacgacttcggggacttcgacctcgacgacggggacggcgtgggggacgacgaagacctcgacaacgagcaggactacgacgtcgactacgaccgcctgctcgcccccgtcaaggcgccgccgcgcccgctgtccggggagggcgacgaggaggaggagggggacatcgccatggtcgccgcccagagcttcgtctccacgcaggactccgcctccgacaccgtggtcgactactccgtcaacgaggacgaattccacaagattcgcctactgcactgcgatttttttatccgcaaggtgcctgaccccgacgacgacgtcttcgacttccgggagatgtatgtcacgccgcctgacactgacatctattccatcccaagggttcttgctccgatg

SEQ ID NO: 419715 - DNA, 532 bp, Oryza sativa
atcacttccaccactcaccacgcgccacccacccccgcaccgcacgccaagatccgaccgccgccgccgccgccgccggagtagggagagggagaggagatggggcggagggcggggtcctacccctactacgtggaggcggcgccgccggtggacgtgaacaagaacacggagtggttcatgtaccccggggtgtggaccacctacatcctcctcctcttcttcgcctggctgctcgttctctccgtctccgcctgctcccccgggatcgcgtggaccgtcgtcaacctcgcccacttcgccatcacttatcacttcttccattggaagaagggaactccatttgctgctgatgaccaaggcatctacaacagactaacttggtgggaacaaattgataacgggcagcaacttactcgtaataggaagttcttgactgtggtacctgtggtgctgtacctgatcgcgtcacacttgaccgactacaaacagccaatgcttttcctcaacaccattgcagttctggtactag

SEQ ID NO: 419716 - DNA, 484 bp, Oryza sativa
tttttgtggaaaaacagagcatccaatatagcgaatgacaatacgataaacaccaagagccggcttctatttgaggcaagcactgtccaaaatctcgcaaaagttctgaacccttagacatattacacatccatggcaaacatggatgccaaatgacaactacagaaaattactcaaattcgaatgcagctgacggcttctcctgctgaagatgcatattttcccctccattacttggatgtgctctctccatcgacagccaatgggacggcgctggccaggctgcggtatttcagagcataaaacatcttaatgtaacggcgagtttcgcgcctcttaaggttgcttacgtactttcagaatccatatacaccagtcaaggtcatcagcctctcagagtacagcttccaggtgtacttctcgtaaatcctctgcagacctccctgtgaaatattgtcccagtaggttgaatcctgcttgcact

SEQ ID NO: 419717 - DNA, 451 bp, Oryza sativa
tttacttttccgcaggcttgaccctctgaagtttgacgatgtgaagagtataaccctcaggagatcaaagcttgtgaaatggttcatggagccgttctttgaggaccttgtgtctgggtgctttgtgcggattgggattggcaagtcaaaatcagggacccctgattacaggctatgcatagttagaaacgtggatgcgaatgaccctgaccggaagtacacgttggagggctacacgacgtgcaagtacctgaatgctgtgtgggacaatgaggctaatgctgctcggtggcagatgactcaagtatcagactgctttcccagagaagaggagttcaagaagtggctacaagtggctgagacgaatggtgtgcgagtaccgacttcgcaggatgtattggagaagaagatgccattcacaggcctacaactttgtgtatttagcacatac

SEQ ID NO: 419718 - DNA, 493 bp, Oryza sativa
acaacaacaaaaaacacattacaaagtaccacattgttttttctcagctgaacctagtatttcagttcagtccccatctgcatccatcatatccacagctgcttccttccattcttctttacctttgtggaagaaaccagctgaaatagtagtagtagtagtagtaaaaccttcaatcttgtactgctgctacgtgatttcgattgctgctacttacttacttcttcttctccatttgaggcttgttcatcagtagctcatgacgatgagaaggccgatggcggtgacgatgatcgtcgacggcacgccgaagcggaggtggctccagaaggtgaggttgtacccgaagaactgcgcgcgcctcgcctgctcgcagacgatcaggttcgcggctgagccgaggagggtcaggttgccggccaccgtgctcacccaggccaggatcagccaggctttcttctccgatgcaggggagatcgctgcggctgatgct

SEQ ID NO: 419719 - DNA, 504 bp, Oryza sativa
tcggataaatttctccccaatctcgcgaggctctcgtcgtcgaatcgaatcctttcgcgtcctcaagatgcagatctttgtgaagacattgaccggcaagactatcaccctcgaggtggagtcctctgacaccatcgataatgtcaaggctaagatccaagataaggagggcatccccccggaccaggagcgtctcatcttcgctggcaagcagctggaggatggcaggacccttgctgactacaacatccagaaggagtcgacccttcaccttgtcctccgcctccgtggtggcatgcagatctttgtcaagactctgaccggcaagactatcacccttgacgtggagtcttctgacaccatcgacaacgtcaaggccaagatccaggacatagagggcatccccccagaccagaagcgtctgatcttcgccggcaagcagctggaggatggcatgaccctagctgactacaacatccagaaggagaccaccctgcaccttgt

SEQ ID NO: 419720 - DNA, 448 bp, Oryza sativa
  unsure (1)..(448): unsure at all n locations
tcgtttacgcgtgggtttaggcggcagcggtggtggtcgagaagcactatacgtacgtcatcctcagaggaggatctttagcgggatatgaggcacgagagctcgacaagcagggggttaagccaggggagctatggatacatgtcacaaggtggccgtggatccttatgagcgctctgctctgaccaagggatacctatttcctcagaatgctataagactgccaggatttcatgtgtgtgctgccagaggcggagagaggctatcgtccgaatggtactcagagaaaggcatagagttgatcctgagcactagaattgtcaaagctgaacttgcctccaagactntgactagtgcaactgctgcaacctctacatgtgatatattgatcattgcgactggctcctcaatcatcaatctatcagattttggcactcaaggagctgat

SEQ ID NO: 419721 - DNA, 645 bp, Oryza sativa
atgcacgcttaggttggatcctatctcttatagcggcctttttttttttttgggttggtttattttattagaggcatcggtttttctctttatttacaattgttttatgacagcatatgacatacatacatgtttagagctgtccaaattgtcaactgacaattagcctttttgacagccacaaacactacagttgcatatcagcctatcagctattcatcgtccagtacaacgacaacaaccatgtgaactacaactagcagtaaaatacatgaaacaaagtgcatcctggcacaacgctgcaatcgaatgaatgcagcataagcaccctggagcattatttgatatcaaaatacctgagcaaacgacactggaaatgagaggttcacctttgattggtagcagtaaataggggtatcggagggcatcctacaaggatgatggtaaggcgatacaagccagaaagcatcaggctctgatggtcacactgcacagacataatcctggtggcttgagctcagatgtgcaccactctgatcccgttggtgcagcgggatcatacatcagtgtcttatagcagggctcttcatccagagagaacagcagcagctctccatcatgtttgccgaaacaaaaacgagttct

SEQ ID NO: 419722 - DNA, 483 bp, Oryza sativa
tcgatcaggagcaaattaagcctcgaccagctaatcaattaattgagcttgtgctgttagccgtgtcatctatagctcgctagcttgccatggcgtcctctgctatggcggcggaggcggaggcgtatgctgtagtggtggccgcgacgacgagcagcgcgcagcttgacccgcacttctacgacggcttgtgcccggcggcgctgcccaccatcaagcgcatcgtcaaggaggccgtcgcggcggagccccgcatgggcgcctcgctcctgcgcctgcacttccacgactgcttcgtcaacggatgcgacgggtccatcctgctggacgacacgccattcttcacgggagagaagaacgcggcgcccaacatgaactccgtccgcggcttcgacgtcatcgaccgcatcaaggacgccgtaaacgccgactgacgccgcaacgtcgtctactgcgccgacatcgtcgtcgtcgccgcgcgcg

SEQ ID NO: 419723 - DNA, 382 bp, Oryza sativa
gcctgaattattgttgttattatttatcaatgctatgaacctaaatcatcaatagttactacaatatggaaacctctggtcacccaatacaactaaatatgcacatcagctgggtagtctgcagggtgcttcttgattgtatccctcaacaatcgctcttgctctcttaggttggaaggaacttcatcataaacatcagtgaaaagttcagcgagtggcggttttggcattctttctgctacctgaatggctttaagaagctcttgcttcacattattcctgagttcagattcctattgatcacaccaccagccatttccctgaacccattttctgtacctggaaatcggatctcgcgctggtcgccagtgctcgatctcat

SEQ ID NO: 419724 - DNA, 501 bp, Oryza sativa
aaaaacaggacaaacagcccatgtgtcatggtctaatgggtaccccaagcggtccatcacacccgaaataacacctcgtaacattattatcccagatcagcaaattggaacatacaacataagttggtagagaaaaaacatgctacaatgggcaggtttctggacaaaaaccccccctacgtatgggtctggcagatctcgtgcaggaagggcttcaaaacattctgaacagctatgcttggctgggctcctatatgcggaaggaactgcttgcaactctcggtctcatagcccacaaagaccgcccatagggttagcactctgaagaggctttttactgtcggcacacaggcgggatctttgtttgcataatttgcaaataaaacgctcttttgaccctcataagcacgctgaagggcttgcccaaccagccaagagcatttgacaccttgaatgccagacccgatcttgccaataaagctggggtcaccacaacaatcc

SEQ ID NO: 419725 - DNA, 442 bp, Oryza sativa
aataaacgggggacagagaccaaataataggcgctgtaagcaccacaataattaaatttctcacgcaatttatagttgtcatagagctcccaacgcaggtcttcaattcaaaaagactgcccaaacagaccaagggtttcatcatagcagcaaagttttttaacacgcaacattaaagagacacttatgccattagataacttgaagcgcggatcactagcaaatttcgcgcttagtcgacctcctggatcttggggccagcaccggtgccgcctgccgggggagcatggtcctcgtccatgccgccggtcatgtccgcgccagggccctggtacattttggcgatgatggggttgcagatgccctccagcttcttaattttgtaatcgaactcatcagccttagggagctggttgccgtccagccactggatggcccgacc

SEQ ID NO: 419726 - DNA, 446 bp, Oryza sativa
tttacttgtgggctcgagctgatctactagctacctagtactctcatcttcttcactagcttttgctagatcaattgcagcaatggcggcgaaggcagcgctcgttctagcggtgagcctactggtggtggccgtggcgagcgcctgcacctactgcccggagccgccgacgccgaagccgaagccgccggcgccgaggccgccgacgcccggtggcggtgccgggtcgtgcccgcgcgacgcgctgaagctgcacgtgtgcgccaacgtgctcggcctcgtgaaggccaagatcggcgcggtggcgccttacgagccctgctgctcgctgcttgaccggctagttgaccttgacgcccgcgtctgcctctgcaccggcatcaaggtcaacgtgcttgggcctaaacttaaaattcccaattgaccttagccccattcttaacaac

SEQ ID NO: 419727 - DNA, 539 bp, Oryza sativa
  unsure (1)..(539): unsure at all n locations
atcagatacgcctccgtttccttctcctccacctcctcccaccccctcgccgatccagatccatcgccggggaggcgccagccatggccggcggcgggggcgccggcggcatgtcagagtcggtgctccgcaaggtgctcctctcctactgctacgtcggcgtctggatcttcctctccttcgccgtcatcgtctacaacaagtacatcctcgaccccaagatgtacaactggcccttcccgatctccctcaccatggtccacatggccttctgctcctccctcgccgtcgccctcgttcgactcctccgcgtcgtcgagccgccctcgtcgcccgccatgaccccgcagctctacacctccttcgttgttcccatcggcgcgctctacgccatgtcgctgtggttctccaactcggcctacatctacctctccgtgtccttcatccagatgctcaaggcgctcatgcccgtcgccgtgtactccatcggngtgctctttaagaggagacctttaggttcgtctccatgctcaacatgc

SEQ ID NO: 419728 - DNA, 525 bp, Oryza sativa
tttagttctagctaactcaggctcagccaactgatcgcgagctgtgacgaggtgatcaccatggcgtcctcgtcgtcgcttcttgttcgtgggagagcgttcgcgctggttgtggctgtagctctggtggctgctcctcgccggattaatggcggcgccgccgggccggcggcgaggacgaacgaccccaactggcacgtcttcagcgtcagctcgctgctgccgagctcggcctgcactgcatcgaaagcggcgtccaactcgtcggctctcggcgtcgtgcaccggcacgggccgtgctcgccggtgcaggctcgtcctcgcggcggcggcggcgctgtcacccacgccgagatcctggaacgcgaccaggccagggtcgactccatccaccgcaaggtcgccggcgccgggggcgcgccgtctgtggtcgacccggcacgcgcctcggagcagggcgtgtcgctgcccgcgcataggggcatcttcctcggcacccggcactacgttgtgtccgtcgggctc

SEQ ID NO: 419729 - DNA, 440 bp, Oryza sativa
ctcacgcaattcatagttgtcatagagctcccaacgcagttcttcaattcaaaaagactgcccaaacagaccaagggtatcatcatagcagcaaagttttttaacacgcaacatcaaagagacactaatgcaataagataacttgaagcgcggatcactagcaaatttcgcgcttagtcgacctcctcgatcttggggccagcaccgctgccgcctgccgggggagcatcgtcctcgtccatgccgccggccatgtccgcgccagcgccctggtacatcttggcgatgatggggttgcagatgccctccagctccttcatcttgtcatcgaactcatcagcctcggcgagctggttgccgtccagccactggatggcctgatcgatggcatcctcgatcttcttcttgtccgctgccgggagcttcgaggcgatcttctc

SEQ ID NO: 419730 - DNA, 528 bp, Oryza sativa
tcgtgtatgcagatgccagggaagcagaaaatatagtggaacgggttacaccccgtctgcaacatgcaaattgtgctgttgttctctctgctgtaaagataatccttttacaaatggagctcattactagcacagatgttgtccgtaatctctgtaagaaaatggcaccccctcttgttacgcttttgtcagcagaacctgagattcagtatgtagcgttaaggaacattaatctgattgttcagaaaaggcctactatacttgcacatgaaattaaggtcttcttttgcaagtataatgacccaatatatgttaagatggaaaagctggagattatgataaagcttgcctctgacagaaacatagatcaggttctattggaattcaaagagtatgccacagaggtggatgttgactttgtccgcaaagctgttcgtgctattggaagatgtgcaattaagttggagagagctgctgaaaggtgtatcagtgttttgcttgagctgattaagataaaagttaattatg

SEQ ID NO: 419731 - DNA, 411 bp, Oryza sativa
agaatagtagaaccgaacaaaccctagcaatatataatttaaaaggcataatggtttacatgtccggacaaactgcaactcatcacactcctgacgaaactcaaaaccagacgggttcaggaatgtgttgtgacggctttgcagaaacttcgactcaggctatacaagtagcaaaatgttgcacaccatactaaaagatgcaaacactacatagtagtagcctgatgaaaaacgcagacttcaaagctttaatccctgttacagacgtagtgatatgatatccgtgaccagtagggaaataatgtgacactggcccccttgaaacctttagcttattgaaccacccgaacaatttagttccccgcacagtgggcacaatttaccacctctgggcaaatctgtatttatttg

SEQ ID NO: 419732 - DNA, 524 bp, Oryza sativa
tcgttctcgccaagcctcgcatggagtcctacctccacgagatatcattggcaaaggcagcctgcacatttgccttgaaggggttgaagaattggatgaaacctgtgaaggtacctgccgacctcacgacattcccatcaactgcacaaattgtgtcagagcctcttggtgtcgtcctagtcatctcagcatggaactaccctttcttgctctccatcgacccagacataggagcaattgctgctgggaatgccgatgtgctgaagccatcataaattgcaccagccacctcagcattgctcgccaagctgctacctgaatacgttgatagctcttgcataaaagtggtggagggaggcgttccagaaacaaccgcactcttagaacaaaagtgggataagatcttctacacaggtagcggaaatgtgggccgcaatagtgacggcagcagctgcaaagcatcttacccctgcggctctagagcttggcggaaaatgccctgcaattgttgattctaatactga

SEQ ID NO: 419733 - DNA, 539 bp, Oryza sativa
aagtatgaataagaagctggcatatacttcggctagtagcattgcaacgcaaacagtatgacaaggtaccacgcattgtttaagagctaagacaaagacaaaactgatgcatccaacgtaccaaaaagaaagcgaacagcagcagtcagatagctatgagaagagaactaggagagggataactagaagggacagaatggcatccatgggtccatgacgtttagtcgacctcctccatcttgctctcgccggcgtcgtcctccagcggcggcatgtcggcgtcagcctcggcggactcgtcctcgtcgatgctcaggccgagcttgagcatgcggtggatcctggtgccgaaggtgttggggtcctccaagctgaaaccggaggtcagcagggcagtctcgaagagcagcatcaccaggtccttcacggacttgtcattcttgtccgcatcggcacgcttgcggagctcgtccatgatggcattctccgggtgatctccatggtcttcttgctagacatgtagcgccatgctgagtccc

SEQ ID NO: 419734 - DNA, 436 bp, Oryza sativa
tcgtttgacttgagttgctgagctctaacgacgagagcgcgcgtaccagcgaggcaaagatgtctagcttcaaatcgccagccattcctctcgccgctcttgtcatcaccgtactccacattgccgccacccatgcgcagatacccgccgcgacgacgacaggtgccgccgtctccgccaccaacccacagaatggcggtggcggcgtctccggtggcgtaggcgccaccgcgggcggcgcgcacgagcccctggagctgtacatgcacgacatcctcggcggctcgagcccgacggctcggcccatcaccggcttgctcggcaacatctacaacgggcaggtccccttcgcgcggcccatcggcttcgcgacgcccaagaacggcgtcccgatccgcaactccaatggcgccatccccacgtacaacggcaacaa

SEQ ID NO: 419735 - DNA, 483 bp, Oryza sativa
agaacaaacgctaccgccatcttctcatatacaaatgaaaatatgccctaccacacaaacaagactcaggggatactagatatcccgtgtcaaaacgattacaagaacccaggaaaatttgtctgctctgctctaccctttgccaaagtaatagcttaaagaaaaagtggtgtcatatgtaatatacatgctttatgatcattcatgacgccgtactagaaagaaagctccgcgaatccttgaaataaccgtgccaaatacctgggacttttttcttcatcgctaacaccttatctcatatgatccagcccttgtgatgtagcgaacccactcaacggtgttgtaaccgctcttctcccacaccttaaggaaccgaactcgtaacccagaagcagtaaacataggaacctggatttcatctgaattggcggcctgtccatgatttcttttccccattgagaaatcagctcaacttcggcactc

SEQ ID NO: 419736 - DNA, 462 bp, Oryza sativa
ccaccgcaaatccaagagcttcttattaataataataggaaaaataaacgccaaaagttctcacacggaagcaactaacttagcacacaaaagacagacatgaacacacccaagcccctccttttccttgtctaaaacgaagcagcaactaaattaaatcgacctaaaattccgaggcccccaatggcggctatcgacgacgaaaccgaggagctctagttggctgccttgctgatgagctcctgcgcgacggcgacggtgggcagcgccggaatggcaccctttttggtggtgcagatggctccgcacgcgttcgagaacttgagcgcctccctcagcttctcctcgttgaggaagatggagtcgtccttggcgacgttgacgaggagggagccgacgaaggcgtctccggctccggtggtgttgacggtgttgaccgacatgccggggacggagcccttg

SEQ ID NO: 419737 - DNA, 512 bp, Oryza sativa
gtaaatcatcatatggctgattatcttgcaatgatttcaaaggagcatgggggtatcatgagatttatccaggtttcttccctaggagcatcggcctcttctccttctagaatgctgagggccaaggctgctggggaggaatctgtgttgaaagaatttcctgaggctacaattatgaggcctgcaactatgattggcacagaagatcggattttgaatagatgggcacagtttgccaaaaattggggtttcctccctcttgttgattctgggtctacaaagattcagcctgtttatgttgtggatgttgctgctgctattgtcaactccctcaaggatgacggcaccagcatgggaaagacctacgaacttggtggaccagagatttatactgttcatgagctggctgagctgatgtatgagacaatacgtgaatggccacggtacatcgatgttcctcttcctattgcaagggctatcgcatctccaagggaaatgctgctaaacaaagt

SEQ ID NO: 419738 - DNA, 508 bp, Oryza sativa
ggaggtgagctctggtgaagttgctccggcggaagaggaggaggcgtctgcgccagcgccgtcgatgaagcacgtcatctggatggcggtgaagaagctgctacagattccgaatacctatgcaagcttccttggcctcatctggtctctaatcgcattcaagtgtggattctcgatgccaaaaatcgtcgaggactctctgttcaccattcgtaccaccgctgtaggcctaagcatgttttcttcagggacgttcatagcgcggcagtcgcggttcgtgccgtgcggatacaagatagcgtcgttctccatggtcatcaagtttctgataggcccggttgtgatgctgttcgcctcgctcgtcatcggcatgcacggcacacttctgcacatcgctgttgtgcaggcggctctccccctggcagtgacatcatttgtgtacgctgaagagtacaaggttcacgcagacatcatgagcacaggggttattcttgggatatttatatca

SEQ ID NO: 419739 - DNA, 491 bp, Oryza sativa
  unsure (1)..(491): unsure at all n locations
ctcctttctcctcgcgagttcacccgcccgccgcctgcggcgatctccatccagcgagcagcggcgccggcgccggcgtaccgctgcttccgccgcatcctctatctctggagatgcctcgctatgatgatcattatggaagcacacgcttgtatgttggtagactgtcttcgcgcactcgttctcgtgacctagaatatcttttcggcagatatggaagaatacgtgaagtggagttgaagcgcgactacgcgtttattgaattcagtgatccccgtgatgctgatgaagcgcggtataacctagatggcagggatgttgatggaagccgcattcttgttgagtttgctaaaggagttccacgtggtgctgctggtggttcacgtgaatatatggngagaggacctcctccaggaacaggtcgctgttttaactgtgggattgatggtcactgcgcaagagaactgcaggctggtgactggaaaacaaat

SEQ ID NO: 419740 - DNA, 404 bp, Oryza sativa
ggaaaacaaccccataactttcactagagctgggccatttacctattttctagttggccccaaaccggttaagaaaattgatttttcaagaaactaaaccaaacgtttttttccgggggagactccagtaaagctgaaaaacaagggggaaaaagggaattacctgcagctgctaccatcgaaaaggttcctttggataaaaacccataggcggttccgaaataactttgggggacatttttacccagcatctgcaacaccttgctgtttgatgggtccacaaaccttggggtcttgaactggctcaccgcccccccaaggctcaggaaatgatctaggatccccttggaggtcccctttttgaggatccggaccccaagggggccgatcgctttgatcttcct

SEQ ID NO: 419741 - DNA, 446 bp, Oryza sativa
cggcgccggcgtgtccgagctccgcgccgaggcgaaagggaaggagaaggaggaggagcgcgtggtcctggcggatcccgacgtcgccgggagggtcgcgctgggtctcaccgtcgacgcgccgagggggcgcctgctcatcgtctacgccgaccggttgccgcggttcgcgtactccgccgtcgccgcgtacgacctcgcctcgtggcgccgcctcttcctcacccgcctcgacggaccaggtgattcaacgctcgccgacgacgtggccgtcgacgaggaaggcaacgcgtacgtgacggacgccaagggcaacaagatctggaaggtgagcccggacggcgagccgctgtccgtcatcaagaacgccaccttcttccagaggccagggtggatcaacaacttcgtcggcctgaacggcatcgtctaccaccccaacggctacc

SEQ ID NO: 419742 - DNA, 507 bp, Oryza sativa
  unsure (1)..(507): unsure at all n locations
ttaaatccaccttgcctcgcctcgcctcgccggatccagatctccaccgcctcgcctcgccgcgccgcgccgccaccaacccactcgccgtcgccgtcgccggcggcggatcggccccacatcacctcggcctccccgagcaaaccggcgggggacgcccccgggcaacgggcgggcgaagaggggcgcaatggagcagctgcggacgatcgggcgggagctggcgatggggtcgcagggagggtgggggcagtcgaaggagttcctcgaccttgtcaagtccatcggcgaggcgcggtccaaggcggaggaggaccggatcatctcgcgggagctggatcacctcaagcgccgcctcgccgaccccgacgtgccccgccggaagatgaaggagctcctcctccgcctcgtctacgccgagatgctcggccacgacgcctncttcggccacatccacgccgtcaagatgacccacgacgagtccctcccgctcaagcgcacgggcta

SEQ ID NO: 419743 - DNA, 452 bp, Oryza sativa
aacaggcatcttaacaaaactttgcatagagtagattccataaaacacgttctgatgataagacttcgttttgttgggaacaatatccaaatcgatagggtcaaaacaccagccctgccaggacttctagcaaaaggatctgtctataaactacccatgaataatgcgagtacaagctcatgctgcggtgaaggccttcttgccgccgctgccgccggtggatccagctgggatgaccttcaggacgttgaacctcacagttttcgacagcggcctgcactggccaatgatgacatggtcaccttccttgacacggaagcatggggagacgtgagccggaatgttggaatgcctcttctcatacctctgatatttcttgacaaaatggaggtagttcctgcgaacaatgatagttctgttcatcttggcactgtggcatgtttcagcaatga

SEQ ID NO: 419744 - DNA, 492 bp, Oryza sativa
ttcgctatatcgaagatgaagaagaagaagaagcgtggtggcggcggcgactacgactgggaggccgccttccgggagttcatcgctggcgacgacgacgacgacgacggtggtgtttccatgttcccttctggtgcagggacgatggagacgaccacagaggtggcgccggcggcggaggtggtggagaggccgcggcggtggctaatggtgaggcggagctacccgtaccgcggcgtccggcagcggccgtgggggcggtgggcgtctgagatccgcgaccccgtcaagggcgcccgcgtctggctcggtaccttcgacaccgccgtagaggccgcgcgcgcctacgacgacgaggcgcgccgcatccacggccacaaggaaaggaccaacttcccgaccgacgagccttcgctgccggtgccatcgcaggcgccgatctgctttctgctcgacgacgacgacgacgacgacggcgtggtccgtgaaaca

SEQ ID NO: 419745 - DNA, 495 bp, Oryza sativa
aacagaacggtttaggcattcagaatgataggattctattcatcacaaaacaatcagtaccgattctattcatcactgctatatgcagtcccgaaataacaaaagaaacaatgaaacaaaacagcggggttcttatgctaagatgtacatgaagggctaggtcaaaccaaagacctgattacactccctgacaattttcaggatatcatcattaagtacatgatacatggcaccggatgagccatttttatgcgacaagggttttggaccttttaaccgcctccaggatgtctgttccaggacaagtagttgtgaccacccaatttccttggttttatgaggtatagcaaggtgaaagcctttccccagaaaaagcagacccctccgactttaacatacgcaaatcctaaaaaatcatttcttcccccaagcccggttgccaccctaaggaccccttttttttttgcacaaagttttttgcctggccccgtcccc

SEQ ID NO: 419746 - DNA, 536 bp, Oryza sativa
ttactctctggtacggtgcaactgtcggtggcgtatcccaaagacatgtctgtgaacccgacgactcagaacaaggcgtaccactacagggggtacaacttcaccgtcagcatgttctggtcgccgttcctggtgaaggcgcgtgagcccgaccacgacgggtcggcgcacacgggccactggagcctgtacctcgacgagcccgaccagtcgtggatgttcgagatctcgcggatcgactacgtgctggtgtccgccggcaactggttctccaggccgtcgctcttctactagaagcgacggctggtcggctgcagcttctgcagcaggcagtacggggtgccggacctgacgctctactactcgcagcgcctgacgtggtgcgtggcgctgaaggcgatcaacgacctggagagcctccacggtcgggtgatcgtgcggatgctgtcgccgatgtcgcacttcgagaacgggacgtgggaccagggctgcaactgcaagcggacgcagccgttccggagcaacgagacggtgat

SEQ ID NO: 419747 - DNA, 513 bp, Oryza sativa
  unsure (1)..(513): unsure at all n locations
tgttcgttgctatcatgtccctgcgactgcgtctcgccttccgtctactcttctgctactgccttctcctcgccgccgctcatccgtcgtcccgccgtctcctccccctgctcgtcgtctccggcgccgaacgcacgaacgtcgccagcctccctggcctagatggcgcgctcccttcccgcttcgaaaccgggtacgtgaccgtcgactaggagaacggcggcgagctgttctactacttcatcgagtcggagggcgaccccggcgccgaccccgtcctcctctggatcaacggcggcaaccgctgctccgtcctcagcgcgctcttcttcgagatcggtccggtgaagctggcgatagagccgtacgacggcggcgtgccgcggctgcggtacaacccctacacgtggaccaaggtcgccagcgtcctctttgtcgactcgccggtcggcgccggcttgtacttctcccgggaccccaggggtacgacgtaagagacgtctncttcacgct

SEQ ID NO: 419748 - DNA, 450 bp, Oryza sativa
accactaccagcaaggaggaagggctctcctctaatcctctccgtctctccaagaatccaaccaggtagcagctgcttggcagtgggcagagcaacatgtctagcaatccggttggtgtcgataacactttccggaggaaatttgacaaggaggagtacttggaacgagctcggcagagggagcgggaggagaaggaagaagcgcggaaaggcaaggaaaagggccctcctgtgcaaaggcaacctttgaagcatagggactatgaagttgaccttgagtcccgtcttggcaagactcaggtggcaactccaattgcacctttgagtcaacaggctggttactattggaaagctcgtgaatgtgtcgttaaagattcagctaactatttggaccatataaatggcaagaaacatcagagagcattgggcatggctatgcgtgttgagaga

SEQ ID NO: 419749 - DNA, 522 bp, Oryza sativa
tcgtgtacgcgtgggtagggttttaggaggcaacacgccgccctgcgccgccgtcgccgccgccgccaccgccaccgccaccgtcagattctcctaagcggcgatggccatggcacggcgttccgcctcccgtctcctctcctcgttccgccccttctcgctcctccttcaaccgctcgatgacgccccttcgctctcggccgcggcggcagcagcgtcggcccgccgggggatgtcttcggcgtcggcgctgcgggcgcgggacgagaaggaggtggcgaggtggcgcgagtcgatggaccggatgcggaatatcggaatctccgcgcacatcgactccgggaagacgacgctgacggagcgcgttctgtactacaccggccggatccacgagatccatgaggtgcgtggccgcgacggcgtgggcgcaaagatggactccatggacctcgagcgcgagaagggcatcaccatccagtccgctgcaacctactgcacctggaatggataccaggttaatat

SEQ ID NO: 419750 - DNA, 367 bp, Oryza sativa
ctttccgaccagtacgtttatccacctgcgactcatccgcgcgcgggaggaggttggatccggacgcccgcgtggcgagagcaggaccgagaaagtcaggaggagatcgacggtgtcgtcgacgacaacgcatcaaatctcgatcgggagacgaactgggggtcgacgacaccaagctgctgaggcgccaataaggccagaaggagatcaggatcctcagatccggacgaaacgcgctatgaagaaccaccatgctatacaagctcaagatgggacaaagcgacacgactatgcccaccatgaggctcaaagtcaaaacgggtgaagacaggaacatttgcttgaacctgggggatgttggtggtca

SEQ ID NO: 419751 - DNA, 470 bp, Oryza sativa
cctcagcaatagtaacatattatacttcattactttatctacaaaaatatctcgcattttattcaatggatagcaggtatctcaaattttcaccagcatccatcaaacaatgttctctcatagtatacaccggtcagctatatgcatcagggtactccagttgaacatttttacaattttgagcgccgtatgcattttatcggattgaaagtgccatgctgacgagcaatagaatttatatgcctcccgtttattgatgcagaaggcttgaagtcccagccttctacgttcttggggacgcatacatcgtaaagcatctgacccaacactccatgggggttgttaatgctttccacactgggcatgttgaacaactccggtttcggctcttcgttgctgctttcatgatactccatggaactcggtagcaagacatggtcaatcggatcatctggtgcccttcttagcct

SEQ ID NO: 419752 - DNA, 272 bp, Oryza sativa
tgtttatttgcttttataatagatttctcgtgtacataaaatctaaaaaaacgggttcagttggttacagaactgccaaatttgcttctgaatgtatatgtaaaattcagctaggtttgctcctaagctcctagatgccagttcgacggaactgcaaattgatattggaacaagataaggtcattgccatattaatccatcattcatgtattccataacaaaaaaaaaaaaaaaagcaagaggagcatctaaaaaacgaaactattaaaatt

SEQ ID NO: 419753 - DNA, 545 bp, Oryza sativa
cgacggaactcaatgtaatagctgtttaattcaaaaacatgttaaggctaaaagtacagtaaaccatttaactatgaaatcataaccaaagctcaataactattgagctccggaattacaccttacatattgggatagcaaccacagccctaaatacccatcgatccatccaaagctcccctagcttatgcaaatcttgttaaaatttaggccttgctggcaatgttgctggacagccagtccaggccctcgtacaatccctcacctgttgtagcacaagtgctctggatataccaatgtcgctggcgaagggagtgcagtccaagcttatcagggatctcagcagcattcatagcggttggcagatcttgcttgttagcaaagacaagcagcacagcatcacgtagctcatcctcgttcagcattctgtggagctcatccctggcttagacaacacggtccctatcattgctgtccacaacaaagatgagacccctggtgttctggaataatgcctcccagaggcctgatcttgtctgaccccc

SEQ ID NO: 419754 - DNA, 528 bp, Oryza sativa
gtcgctggcgtactcgagagaaacatcagcatccatggcgggcaagggcgagggtccggccatcggcatcgaccttggcacgacctactcgtgcgtgggcgtttggcagcacgaccgcgtggagatcatcgccaacgaccagggcaaccgcaccaccccctcctacgtcggcttcaccgactccgagaggctcatcggagatgctgccaagaaccaggtcgccatgaaccccatcaacaccgtcttcgatgccaagcgtctcattggcaggaggtttagcgatgcttctgttcagagtgacattaagctctggcccttcaaggtgattgctggacctggtgacaagcctatgattgttgtccagtacaagggtgaggagaagcagtttgctgccgaagagatctcctccatggtcctcatcaagatgcgtgagattgctgaggcctaccttggcaccaccatcaagaatgccgttgtcactggtcctgcctacttcaatgactcccagaggcaggccaccaaggatgg

SEQ ID NO: 419755 - DNA, 473 bp, Oryza sativa
caccaccgtagcaatggtgggttacgggccgatcaacaaggaggacccgctcaactggggcgcggcggcggccgagatggccggcagccacctcgacgaggtgaagcgcatggtggcgcagttccgcgagccgctggtcaagatccagggcgccaccctccgcgtcggccaggtggccgccgtcgcccaggccaaggacgccgccggcgtcgccgtcgagctcgacgaggaggcccgcccccgcgtcaaggccagcagcgagtggatcctcaactgcatcgcccacggcggcgacatctacggcgtcaccaccggcttcggcggcacctcccaccgccgcaccaaggacggccccgccctccaagtcgagctcctcaggcatctcaacgccggaatcttcggcactggctccgatggccacacgctgccgtcggagacggtgcgggcgggcatgctcgtgcgcatcaacaccc

SEQ ID NO: 419756 - DNA, 466 bp, Oryza sativa
aaccaaaacataggaggtttcatttcttcttctcaaagtagtgtagcatctttccttctttcaccattacataagcttaagcaataacagataacaaatcctcctcctcctctaggtaaaatattcaaacacaatacccttataagtacttattattaggaaagtagcgtgcatgggcataaatggcagcggggggcaggttaagaatcacaatgctgagcagcgaggaaacaaaacaccataatgggacagagcaaaagcctccgaaagggagcttttaggcagaaggcttctcccacttgaggggcttcaccacctcccaggtgaagtctgggtcgtcccttccgaagtgaccgtaagccgccgtcttgaggtagcgtccgttgccgcctttcttgaggtcaaggctgatgatgatcatgccaggcctgaagtcgagttctccttcacaatcttgaggatctcc

SEQ ID NO: 419757 - DNA, 510 bp, Oryza sativa
  unsure (1)..(510): unsure at all n locations
ttttattggacctgtttgaacagcaagcttctgaggtctctacggttgagctgaaggttgcacgcttaaaccagcaaatcctcacctgccaaatcttcaccgacagagcaggcctcaggcagcagaagattggtggaacaacttttaaacatcataagcactatatcctaccatctaccggtcataaaagaactcaagctgcacgcctgcaaacagacaatggtcaggattcaaaacctaaaccttatccttcagccaagaccctttcatggcatctgtcttcaaagaacagcatttcgacaactggagcacagaaatatacatttacactaagggatactatatcgtataaacctgcatcaaatggttccatgtaccttctaggcaaggacatacctgcttctcccatgcacaagcctctgcaaccgaatgggaacaccagttttgatgcttagacaaatgtttgttcaaaggaccagccttggnttcatgcatatgtcgacatttaat

SEQ ID NO: 419758 - DNA, 528 bp, Oryza sativa
tttgtttcgcacttgtagctctcgacccccgcatctcatccctcctctcgcttagttcagatcgaaatcgcaaatggcgaagattaagatcgggatcaatgggttcgggaggatcgggaggctcgtggccagggtggccctgcagagcgacgacgtcgagctcgtcgccgtcaacgaccccttcatcaccaccgactacatgacatacatgttcaagtatgacactgtgcacggccagtggaagcatcatgaggttaaggtgaaggactccaagacccttctcttcggtgagaaggaggtcaccgtgttcggctgcaggaaccctgaggagatcccatggggtgagactggcgctgagtttgctgtggagtccactggtgttttcactgacaaggacaaggccgctgctcacctgaagggtggtgctaagaaggtcgtcatctctgctcccagcacggatgcccccatgtttgttgttggtgtcaatgagaaggagtacaagcctgacatcgacattgtgtccaatgc

SEQ ID NO: 419759 - DNA, 478 bp, Oryza sativa
aagcaacatagctagcacaacaatttcatcattatctttctccagccatcacaaagcaaattaatatcgttccaaacatttaaggagctcatgaatccaataatccggaggtttttttaaaaggactcatctcaacatccataacaagcaaacgatagttgtttccgacaccaacattagaccataacgagtcaactgacaaccatagactagaccaaaaataccgcggactgcatagataaaacatcagtgtcgagcagaaggaaccgctcagcacttgacctccttcagcccatgagagaagtaaaggaaggttgggtcggtggctccgtccttgtagtaggcaaacaccaagccgccatcatcatgcatgctctcaccaacaaagaactgaaggtccttgagctttccaagcaagtacttggtggcaccctcaatgttcttcttgaattcctcttgcttttccgcatccagcttg

SEQ ID NO: 419760 - DNA, 504 bp, Oryza sativa
ttgacgcgtgggtcagtatcgaatcctctcttctcctcgtgcccaccaccaccaccgtagcaatggcgggcaacgggccgatcaacaaggaggacccgctcaactggggcgcggcggcggccgagatggccggcagccacctcgacgaggtgaagcgcatggtggcgcagttccgagagccgctggtcaagatccagggcgccaccctccgcgtcggccaggtggccgacgtcgcccaggccaaggacgccgccggcgtctccgtcgagctcgacgaggaggcccgcccccgcgtgaaggccagcagcgagtggatcctcaactgcatcgcccacggcggagacatctactgcgtcaccaccggcttcggtggcaccttccaccgccggaccaaggacggccccgcccttcaagtcgagctcctcaggcatctcaacgccggaatcttcggcactggctccgatggccacacgctgacgtctgagacggagcgtgcgggcatgc

SEQ ID NO: 419761 - DNA, 518 bp, Oryza sativa
tcgtttctctactcctctaatctcaagtctctgtttcgtcgtgctcgcatctccactcgccatgggcaagagtaagatcggaatcaacggtttcggaaggatcgggaggctagtggccagggtggccctccagagcgaggatgccgagctagtagacggcaacgaccccttcatcaccaccgactacatgacctacatgttcaagtacgataccgtgcacggccaatggaagcacagtgacatcaagatcaaggacttcaagactctgctcttgggcagagaagccggtcaccgttttcggtatcaggaaccctgacgagattccgcgggctgaggctggtgctgagtatgtcgtggagtacaccggtgtcttaactgacaaagagaaggttgatgctcacttgaagggtggtgccaaaagggttgtcatctgtgccgcgagtcaagatgctccgatgtatgtctgcggtgttaaccaggacaagtacacttcagatattgatattgtctcaaatgct

SEQ ID NO: 419762 - DNA, 438 bp, Oryza sativa
ggattaaaggaacaaaacattcctattaccacaactttttaaggagggaattgagtaacaataccttcaccccaaaatacagtttagcgacaatattttaaaaaagccgtttgctttgccgccatgggtggcaagctgagcaaagcacctaacacaaagaacccgagatccctataaaccaaacgggaacgaacgaaaaaaatcccgggtcttttttggctgaaaaaacccgaagggggccggtttcttttattttaaggcccccctcctcctcgatgatgggggaatggcaatggcaatggcgatgggatcttggcttaattgatgggaaggggctcgcccttccactccttgaggcaatcgagcatggggtcgatgagcttgccctggctgaagcccaggaacaccttgttgcactcctggccgggggacctgagc

SEQ ID NO: 419763 - DNA, 518 bp, Oryza sativa
tcgttgcaattacacctcatgtacaacagttctttgatgcaaatccaaacctagaaaaggttgtggttccacttggcgggacaatctttggtacaatgatggcttggtttgtcatgcctatcgttttaaggaggattcacaagtattcgatacagagtcctatatcagcacttttggggagctcaacaaagaatgatgtctcgtatgaaactagcctctggagtgcattggaggatcctgcgaaataccttatcacatttatggcattttcagaaatggctggattcaccgcaccaagcatatcagcttatcttccacaggcatggaggggtgcaattgctctctcttttgtctggttccttcataggtggaaaacaaacttcatcactaaagttgctgcctcaagtattgatcaaaccaggttgtcagcatttgataagatctcgtcattaggactgattgcactaggagtaatggctcttgcataggctcgtagtgtagctgctcagtcaatacta

SEQ ID NO: 419764 - DNA, 466 bp, Oryza sativa
  unsure (1)..(466): unsure at all n locations
cttctcctcgtgcccactaccttcaccgtagcaatggcgggcaacgggccgatcaacaaggaggacccgctcaactggggcgcggcggcggccgagatggccggcagccacctcgacgaggtgaagcgcatggtggcgcagttccgcgagccgctggtcaagatccagggcgccaccctccgcgtcggccaggtggccgccgtcgcccaggccaaggacgccgccggcgtcgccgtcgagctcgacgaggaggcccgcccccgcgtcaaggccagcagcgagtggatcctcaactgcatcgcccacggcggcgacatctacggcgtcaccaccggcttcggcggcaccttccaccgncgcaccaaggacggccccgccctccaagtcgagctcctcaggcatctcaacgccggaatcttcggcactggctccgatggccacacgctgccgtcggagacggtgcggg

SEQ ID NO: 419765 - DNA, 483 bp, Oryza sativa
gcacgaaccaaacacactgcccatatatgcaaccagcataacaaaattacaactgcactggacggcttatattcttcacaagcaaaaaagtagactcaggtccatatcatcagcatcgttacaacttacaagtaggtagattggaaaacaaaatgcaactcattatcccaactagcattaacagagggggtgggtcctgatgaacaccgtccacgttttattctcagcatagacaaagcataccggtatcttcggctcggcggccatggaataccatggcaagcaaaaggattctactgggccttggccatgtggcggatcaggtcgatgacacggttgctgtaaccccactcgttgtcgtaccatgcgacaagcttgacaaagttatcgttaagagcaattccagccttggcgtcgaaaatgctcgacctgctggcaccaacaaagtccgtagaaaccaggtcttcctgaacatatgctatg

SEQ ID NO: 419766 - DNA, 543 bp, Oryza sativa
catactcccaatttctttttcttaagactccttgctgctgtgtatctctctcatcattttataatgacacaattgtgaactgcccaacatgctcttgtggctgccaaaacaatgggacaagtcctggaagctgtgtaaatgagaattcaccttatttacaatctgccattgatggccctggcaaatggaccggtcagcctcttgtccaatgtacttctcacatgtgcccgatcagaatccactggcatgtgaaactcaactataaggaatattggagagtgaagatcacgattacgaacttcaactaccgcatgaattacacacagtggaatttggtcgctcaacatactaacttcaataatatcacccagctgtttagcttcaactacaagccacttactccatatggaagcaagataaatgatactgcgatgttctggggagttaagttctataacgatttgctcatgcaagctggtccacttggaaatgcacagtcagaacttcttctgcgtaaggatttcaaggactttacctttgaca

SEQ ID NO: 419767 - DNA, 464 bp, Oryza sativa
ataggatcaaaacatttctattaccacaactttttaaggatggaattgagtagcaatactttcaccccaaaatacagtttagcgacaatatcttagaaaagccgcttgctttgccgccatggctggcaagctgagcagagcagctaacacaaagaacacgagatcactataaaccaaacggcaacgaacgaagaaaatacagggtcttttttgtctgaagatacacgaagcggttcgttttcttttatttttagtctcctctcctcctcgatgatgggtgtatggcaatggcaatggcgatgggatcttggcttagttgatgggaaggggctcgccgttccactccttgaggcagtcgagcatggggtcgatgagcttgccctggctgatgccgaggaacaccttgttgcactcctcgccgggggacttgagcttctcgccggtgaggaatacgcagccgagct

SEQ ID NO: 419768 - DNA, 411 bp, Oryza sativa
ctgacacacactttcgttttgttaacactacggcctggtgcgcttctctgttggatgtttctcatgacacatattgggaagtgcacagcatgctggttgtaggtgccaaaacaatgggacaagcactggaagctgcaccaataagaattcagcttatttacactactctatcgaccggcctggcgtatggatccatcagtctgtgggtcagaggactagtaacatgtacaacaacatgatgcactggcatgtgatacttaactttcatgcatattgcagagtggagacaacgattactgactgctactaccgtgtggattacacactgcggaacttggtcgctgaagacactacctccgataatataaccaagatgatcatcttcaactacaaggcacttactcaatatgg

SEQ ID NO: 419769 - DNA, 384 bp, Oryza sativa
cttcgtactcgcctcttttcgtgccctcctccgccgccgctcgccgccgttcgtctccgccgccaccgccgccgccatgagggagtgcatctcgatccacatcgggcaggccggtatccaggtcgggaacgcgtgctgggagctctattgcctcgagcatggcatccagcctgatggacagatgcccggtgacaagaccgttgggggaggtgatgatgcttttaacaccttcttcagtgagactggtgctgggaagcatgtcccccgtgctgtcttcgtcgatcttgagcctaccgtgattgatgaggtgaggactggtgactaccgccagctctttcaccctgagcagcttatcagtggcaagggaggatgcagccaacaact

SEQ ID NO: 419770 - DNA, 521 bp, Oryza sativa
ttgcgtcgctactcccccctcgccgagagagctctagggtttccgctgccgaatttttttttaattcggggggagagatttgaagaggcggcaccatgttggtctaccaggatctgcttaccggtgacgagctcctgtcggattcgttcccctacagagagatcgagaacggcatcctctgggaagtcgatggcaagtgggtcgttcaaggagctattgatgtggacattggtgccaacccatctgctgagggtggtggtgatgatgagggtgtttgatgaccaagctgtgaaggtggtcgacattgtggacaccttccgtcttcaggagcaacctccttttgacaagaagcagcttgtgaccttcatgaagcgctacatcaagaacctctccgccagctggatgcggaaaagcaagaggaattcaagaagaacattgagggtgccaccaagtacttgcttggaaagctcaaggaccttcagttttttgttggtgagagcatgcatgatgatggccgcttg

SEQ ID NO: 419771 - DNA, 525 bp, Oryza sativa
  unsure (1)..(525): unsure at all n locations
atccgcttaatgccacttgaactttcaaattcaaaaaccacgatttataaagtgccggagatgaagtacacaaattaacattacatcgagttttaataaaacatcatgcgaaaagccagcaaaaacaaaaggcagtatacagctcatgaagctctactggagtagctcgcaaggggcccgacttattttcagtcgcactctactacattccttccgaaagagtgaccatcttctactgggtgttgtacatgtgacggatcaggtcaacaacgcgagagctgtatccccattcgttgtcataccaagacacaagcttaacaaagttgtcattgagagcaataccggcctttgcatcaaagatgcttgacctgttgtcaccctggaagtctgtggaaacaaggtcctcctcaacgtaacccagaatacccttgagtttgccctcagactccttcttgatagctganttaagnggancataggatgctggcttctcaagcctgacagtcaaatcaacgacagagacat

SEQ ID NO: 419772 - DNA, 486 bp, Oryza sativa
aagctgggccgcctgcccggaccggaccggaactgaattcccgggattaatttaccttctcttctctactcctcctccccccgatcggatcggcccggctcctcctcctccgccgccgccacggccgccgcagataggagaagatggccgcacttgatacctgcctctttacctcggagtctgagaacgagggccaccctgacaagctctgcgaccaagtctcagatgctgtgcttgatgcctgcctcgccgaggaccctgacagcaaggtcgcttgagagacctgcaccaagacaaacatggtcatggactatggtgagatcaccaccaaggctaacgttgactatgagaagattgacagggagacatgccgtaacatcggttttgtgtcagctgttgacggtctcgatgctgaccactgcaaggtgcttgtgaacattaatgcatatggccctgacattgcacagggtgtgcacggccactaga

SEQ ID NO: 419773 - DNA, 508 bp, Oryza sativa
cacaaaggtaaggtatgttacatagagaaaacattgcttgaggtgcaagcattaagacccgtaatttggattggagaaaattcgaatcaacaaggtttcaaactgcacgggcgaacatacacgtggcccggagcaacccaacacaacaatatcatgggcacacattaggaatgccctgatgcgatgccatgggctgaaaaaactgaccgcactcgccgacctacactggacactacctgaacagatctacttccagctcaccaattggctgaaccttgcgcattgccccatggccaacagccgtcaggtgctcctgaaaccatggcacgcttgcagacaatctgaagatcacgactcaatcagccgataatggtgcaaggctggacacaaagttacaagcagttgatggggacgatgcctggaccagagtcatcggatacggccttggagagccacatgtggtgaaaggtactgagagacgccaggatggaacctccaattcagacac

SEQ ID NO: 419774 - DNA, 523 bp, Oryza sativa
tcgttcgcataaataaaagctcgcaccaccgccacaatccctgctcctgcccagcccatcggttcccccctccacccgtctcctccgtctccggcgccggcgccggcgagctcgccccccgcgattcgtgccctccgatcagaggcgaggcgggagaagagatggggctcacgttcaccaagctgttcagccggctcttcgccaagaaggagatgcggatcctgatggtgggtcttgacgcggtcggaacgaccacaatcctctacatgctcaagctcggcgagatcgtcaccaccatccccaccatcggattcaatgttgaaaccgtggagtacaagaacatcatcttcaccgtgtgggatgtggggggtcaggacaagatcaggcctctgtggaggcattatatgcagagcacccagggtctcatctttgttgtggacagcaatgatagggaccgtgttgtcgaagccagagatgagctccacaggatgctgaacgaggatgagctacgtgatgctgagct

SEQ ID NO: 419775 - DNA, 269 bp, Oryza sativa
tttttgttttttttttttttttttttttttttttttttttttttttttttttttatggaaaacatgaatgatggattaaaaagggaaagaccttattttggtccaaaataaatttggagttccgtcgaactgggatttaggagcttaggagaaaacccaggtgaattttacatatacattcaaaagcaaatttgggagttttgtaaccaactgaacccggttttttagattttatggaccccagaaatttattataaaagccgattttc

SEQ ID NO: 419776 - DNA, 489 bp, Oryza sativa
ttcggcagcccacctccacgcgctcaccctccgcccccacctcgcgggcaccgaggccaacgcccgcgccgccgagcacgtcgtctccgcgctctcctccctctccttccccacccgcgtcgtgccctactccgtcctcctcgcctacccggtccaccgctccctctccctctcggcgccaggccacgccaccaccccctttgcgctggtgcaggacacataccccggtgatccctatgccgcggtctccgcggaggccgtccccaccttcctcgcctacgccgcgtccggctcggtcgccgccgaggccgtctacgctaactacgggcgcccggaggatttcgcctacctcgccgcccgcggcgtagacgtcaccgggaaggtcgtcctcgcgcgctacggcaaggtgtaccgcggcgacatcgtgataaacgcccggaaagctggcgcggcggcggcggtcatatacaccgatgccaaggactacgc

SEQ ID NO: 419777 - DNA, 417 bp, Oryza sativa
tttttggtaggctttttattgagcaccgtgcttccttcagcccatattccaaggtacgaattatcaatcaagaaattatcaaaccatccaaatgaggaacatcgataattttccagtcggacgctaactgattgggataaaacaactatcaggaatgacagattgttctatatatcctttatttgggaggtccggtctacgtgatattaggatgtatggactgcttggatcgacaacaatttgaaccgaggctgtaaaagttcattcagtccagaatgagaactcgaatggtaatggtgatacacccaaaatgactttaaaagaagggaaatgaagcactgaagctggcaagagtatgtcgtaaaaagcttatttgggtgacagtcttgaccggagctccgcaacaaccgcattaat

SEQ ID NO: 419778 - DNA, 545 bp, Oryza sativa
atcgatcaccaggttactgtagtagtacagatcggagcgagcgatcgatcgatcgaggaagaagaagaggtagaggttgtagatggctgtgtcggctggcggcggcggcggcgcggcggggcagttcggcgacacgacgctgacgaaggtgttcgtggggggactcgcgtgggagacgcagaaggaggggatgcggggatacttcgagcagttcggcgatatcctcgaggccgtcgtcatcaccgacaagaacaccggcagatccaagggctacggatttgttacattccgcgagccggaggctgctatgaaagcttgctttgatccgtacccggtgatcgatgggaggagggccaactgcaatcttgcatatcttggggtccagagatccaaggcagctgcagcgtctctgcaaccttatgcttggcatatgagggcaatgaagtccattatccagacaggcgggtggtggtgccagcttgagcatggcagatcatggcatccagcaggggatcccgacctacaatgtgtatgggtactcacct

SEQ ID NO: 419779 - DNA, 470 bp, Oryza sativa
ctggattactctgtgcccctgctggccttgtacgtattcactagttgcatctgtacatcctgcgatacggcattgtgctccagatactccatcgaaaattcacctttcccctgtgtcattgaccgaagagctgttgaatatccaaacatattgtttaggggaacatggcaaaccacaactgtgtcgtcgccttcctgatcatttccaacaatgataccctttctcttggtcatgtcaccggataccgtgccctggaactttgtgggaacttttagttccactttcatcactggttccaatattacaggtctagcagcagcataacactgtctaaaagcatagatagaagctaacttaaaagcaagttcgctggaatccactgcatgtgaagcaccatcagtcaggacaattcgaatatttttcacaggatgccctatcaacgaaccaaaattgcaagcttgcttaaaacc

SEQ ID NO: 419780 - DNA, 479 bp, Oryza sativa
catattcactttagtaatcatctaaagcttgttctggtcctctgtggcatgttctaccataatgcgcctcacctgagctacctccttgcccaatgaactggccaagggatgtatcattcattagataataatcaaagcagctctcatcataactgatatacacaatcgtcaaagtgatttctctgaaatccatctcccaaacattgcaagacacctctccggctggtactctggtgcagtgtgtccaccaccctttaccgtagcgaaggtcaagtcatttgcatatgtgattgtgaatcctgcagactgcccatcgatatgccaggctctccagtcatccacaattgggtagttgagtgatcttacccaggcttgtgtacccaaaaatggaaccacggaatcatggtcgccactgtataccaagacacgatagcctctagatgtaagattttgatggtacttaatactgctctctatgt

SEQ ID NO: 419781 - DNA, 528 bp, Oryza sativa
  unsure (1)..(528): unsure at all n locations
tttcctgcaaccgcttctgtaggagaggcagcgccgcgggcagccggccggagatggccggcgccggcgccggcgagagcctggacctccccgtggtggacctagcgtcctccgacctcgccgccgccgccaaatccgtccgaaaggcttgcgtggagtacggattcttctacgtggtcaaccatggagccgagggattggcggagaaggtgttcggggagagcagcaagtttttcgagcagccgctgggggagaagatggcgctgctgaggaacagaaactacctggggtacaccccgcttggcgccgataagctcgacgcctcgtccaaattcaaaggagatctcaatgaaaattactgtatcggacctatcagaaaagaaggttatcagaatgatgctaaccaatggccttctgaagagaatttcccatgttggaaggagacaatgaagctataccatgaaactgcacttgctactggtaaaaggatactctctctaatngctctgagtttgaatctcgacgttg

SEQ ID NO: 419782 - DNA, 513 bp, Oryza sativa
ttccattatcgcggcaagctagcctcgagggaggcccgcctgcccgggcctcgggctccgggggcccggttcttgaggtttcttggtcgtggggtcgaggaggtggtgggtggtggtggctgcggcttggcgcgatgaacaaccacgcggcgggcgggagcacgagcaacggcggatccggggtcgacggggatggcggcggcggtggcggcgcggccaggaggaacaccaagatgcccaagtattccaagttcacgcagcaagagctgccggcttgtaaaccaattctaactccaaaatgggttgtatcggtgtttttccttgtcggcgtcatcttcgtaccagttggtgttgtttcgctgctagctgcacaaaatgttgttgagatagttgatcggtatgatgatgcatgcgtgccagccaacatgactgataacaagcttgcttacatgcaaaacccaaacatatccaaagagtgcacaaggactctgacaattacagaggatatgaatc

SEQ ID NO: 419783 - DNA, 428 bp, Oryza sativa
cttgggtttacctccgcgccgccgcatcctccttcgcaagcctcgcctccactccccgcgccggcgccgccgtcgccgactcgccggacgtcaccctcgccccgcagccatggctgagcagactgagaaggctttcctgaagcagccaaaggttttcctcagctcaaagaagtctggcaagggtaagaagccaggcaagggtggcaaccgcttctggaagagcattggccttggcttcaagacccccagggaagcaattgaagggacatacattgacaagaagtgcccattcactggaactgtttctatcagaggcagaatcattgctggaacatgccacagtgcccagatgaacagaactatcattgttcgcaggactaccctcattttgcaagatatatcacaggtttgagaagagcattcaacat

SEQ ID NO: 419784 - DNA, 522 bp, Oryza sativa
tcgttgcatcgtaaggatgggttggctctaacatagaccctactgtgccaccagagcaggtgacatatgctgttctcccacaagttggttattttgagttcattcctttggagaaaccaataggggaggagacagaaaactccgcctccattcattacatagaatcagatccagttggcttgactgaagttgaggtcggcaaaatctatgaagttgtaataactaactttgcaggtctatatcggtacaggctaggagatgtcgtgaagatagcacgcttccacaactccacacctgagctccaattcatctgtcgcagaagcctagtgctgagcatcaacatcgacaagaacaccgagaaagacctccagttggctgttgaggaggcatcaaagttcctggaaggagagaagctcgaagtcatggatttcacgagcttcgtggaacgatcaagcgatccagggcgctacgtgatcttctgggagctgagtggcgatgcgagtgatgaggtcttgagcagct

SEQ ID NO: 419785 - DNA, 518 bp, Oryza sativa
gttatcgaccccttgcttccgccctttttttttttttattttttttttttttttttttttttcgaagaatcaactggggggctgtaataagccctgttcattgtatacttgctgtacattgcaaaagtttcagtatatatgccgggtttttgtgacatcttattattaccaaacattacagtcacatctcactgtatttctcgccagaaccccaatcttcaggttccggtgggaaatcaattcaccttgttgtcatccttcagtatttttactgtttggattctgtcttcctacatatatgcacatcagcacacatgcaactttaattagccttcgactaaatttagatgtctcaatcacaggctcacagccccaacagaatatattaaacaattgccacaggaagtgatataaatatcccaagaataacccctgtgctcatgatgtttgcgtgcaccttgtactcttcagcgtacacaaatgatgtcactgccagggggagagccgcctgcacaaca

SEQ ID NO: 419786 - DNA, 546 bp, Oryza sativa
agggtaaagaaagaaacatatctttgttattgtgtcgtaggactgcaacgattcgcctcacttgcatttgcaactcaaaaaattgacaaagattttgtgcgtcttattggtgaaaaacatgagcaggaaccaacatatgcatcgaatatggtcctgctcgctgttgggcggctggcagcagcagcagcagatagtaagaaaacaaacacaacaacgtttctgcaactaaaagattaattctacagtgtcttcaggagtggaagactacagctcagaacttcgtatcttctcactgacagtagaaccaaaagctggaccgcccttccggtagcacacaagaaactcaaccgggtaacccttcaatttgtgaggcacgattccgaggtccgaaaaggtgagagcattatcagacactagggtgtctacagaaaatgcattaatctgatctttgttgaaaattgatggggttggcaacggaaagggcactttgtttagcagcatttcccttggagatgcgatagcccttgcaataggaagaggaacatc

SEQ ID NO: 419787 - DNA, 468 bp, Oryza sativa
tcgttcaaggtgagcgacgaccaggtcgccttgctcacccagggcgacgccaacgacaagaagaacgtgctctcgctctggttcgacggcctcaagctcctcatcgtcaccgacggcgagaagggatgcaggtacttcaccaaggacttcaagggctccgtacccggcttctccgtcaacaccgtcgacaccaccggcgccggcgacgccttcgtcggctccctcctcgtcaacgtacgccaaggacgactgcatcttccacaacgaggagaagctgagggaggcgctcaagttctcgaacgcgtgcggagccatctgcaccaccaagaagggtgccatcccggcgctgcccaccgtagccgtcgcgcaggagctcatcagcaaggcacccaactagagctcctcggtttctgcgtcgatcgccgccattgggggcctccgaatctaggtcgacttaatttagatgct

SEQ ID NO: 419788 - DNA, 528 bp, Oryza sativa
tcgttgacgcgtgggcggacgcgtgggcggacgcgtgggcggacgcgtgggcaaatccccctcctttttcttggtgctgctgctgctgcacgaagccacgagcgcctcgccacctcgggatcgcctccaagatccgattttgatcgccccgccgccgacgaattcgtcgagacccgccctcgccgtacctgcccaacggtgctcgatttggttgtagccttctggttctggtacttggctccatggacctatctttgatcttattatgattcttattacggttttaatcttctatatatatcggttgtggcttgtaattaggggaatagggggatcgtattagaacagtgaaagtttggaaaaattttccatggtttgtgtgtgcttaccaatcaaggaggcagttggaggcaagcctgttgttttcttgattggacactaaaagccggttcttgcttttaactgtgttggagttttattaaggatgttttctgttggtatttaatgaagtcgatttggtattcaaca

SEQ ID NO: 419789 - DNA, 419 bp, Oryza sativa
gtgtgcctgatgctggtggtactacatgcggccagcatgtggagaaggttattgaaactgagcacactgacattcttcgtgttccatgcaggagtgagaatggtatccacctcatgtggatctaccgttttgatgtctgaccattcctggaaacatacactgatgatgttgcaaactaaataattagggaaatgcacggcggacctgatctaatcattgacttgaactgatatgtaaaccttggaaaagaaatcatggctcaagattacgagttacatagaattccagggttcaatccttgctgattatgggttacgagctctgatacatatagtgtgacagaagagacggtacaacacagttgagatggttcgctacatcacaagggatggatcatatgagataaggtgttagcgatg

SEQ ID NO: 419790 - DNA, 397 bp, Oryza sativa
accataatactaaagtgtttttctgctttcataaagtttaatccctgcagaggacgcacactcacttgtaagatcattgcacatggagcaaacagcgcaaccatgaatcgcccaatgcaaagcaacccatcccaaggacgtgagaaccaacggcaaaacttatggcatggtcgagcactccaggtactatactaggcgagatggacactgatccggagcagcgtctcggcgccgtcggtgacatgctgcccggtggcgatcagcgggcgcacctcgtggaagccgtaggcgcccttgaacttgccagtgccgccggagatggacagcttgcacatggtggatcccaccttgttgaccccgaataagttgatcgtgtcgccgtactcgccgaccttca

SEQ ID NO: 419791 - DNA, 282 bp, Oryza sativa
ccgtttggttccggacgtcagatgtgatcaccaaggcagagtacgctgctttctacaggagcttgacagacgactgggacgaacatctggctgccaagcgcttctctgtggagggccagctagaattcaaggccatcctgcttgtaccaaagagagcgccgtattatacgactcccgccacgaagaatcaagccaacgtcgaactgcacctacccgcgtgtgtgtatcatggacaactgcgaggagttgatcccagaatggctcacatttgtaaagggcatt

SEQ ID NO: 419792 - DNA, 546 bp, Oryza sativa
ctcctccgccccgacgcttcgttagggtttttgcctctccctccgccgacgccgctgccgcgaggagaggagggggggagagcacccagccggcgagccagccatgtcgctgcgcccgagcgagcgggtggaggtgcggcggaaccgctacaaggtggcggtggacgccgaggaggggaggcggcggcgcgaggacaacatggtggagatccgcaagagccgccgcgaggagagcctcctcaagaagcgccgcgaggggctccaggcccaggcccccgtccccgcctccgccgcaaccggcgtcgataagaagctcgaaagccttcctgctatgattggtggagtttattcggacgataacaaccttcagcttgaggccacaacacagttccgcaagttgctttctatagagaggagccctccaattgaagaggttattcaatcaggcgttgttcctagattcgtgcagtttcttaccagagaggatttcccccagctacagttcgaagctgcgtgggcacttacaaacattgcatctggcacttc

SEQ ID NO: 419793 - DNA, 560 bp, Oryza sativa
gcaagctacttatatttcatatgctatggcatgaaaagaggttcaggtccgagatatacaaattacgcagacaaaatggccatgtcgagtgttcgtcgtgaaaaaactttgaaaccaggaaactagcagtttaaatacagtaatctaatacaaagaacaacaaatacaattcacaccagctcctgtgaaacaacgccgcatccaaacctacaatagctcatgaactgatcaatttggaaggaacaatgatccttcaattttgtatcacttgagaagagactccatggcttcgaagaagagagccaccatctccttgtttggagttttgaccgcacacttcacgccaggaacaccgactgcagcagtaagctctatcaggaaggggattccacgcggaatctttgcagacatgtacagaacatccttgtttgagtttttcctcttggcgataaagaacacatttgatgctgcaaggtgctcaacggtcgcatctatgctgctgacgacagatgaggggaactctttcgaaaaatcgttgtcatcaggtaaagatttccagg

SEQ ID NO: 419794 - DNA, 541 bp, Oryza sativa
cttactcctgcccaaactctattcgccgccgccggcgtactcgagagaaacatcagcatccatggcgggcaagggcgagggtccggccatcggcatcgaccttggcacgacctactcgtgcgtgggcgtttggcagcacgaccgcgtggagatcatcgccaacgaccagggcaaccgcaccaccccctcctacgtcggcttcaccgactccgagaggctcatcggagatgctgccaagaaccaggtcgccatgaaccccatcaacaccgtcttcgatgccaagcgtctcattggcaggaggtttagcgatgcttctgttcagagtgacattaagctctggcccttcaaggtgattgctggacctggtgacaagcctatgattgttgtccagtacaagggtgaggagaagcagtttgctgccgaagagatctcctccatggtcctcatcaagatgcgtgagattgctgaggcctaccttggcaccaccatcaagaatgccgttgtcactgttcctgcctacttcaatgactcccagaggcag

SEQ ID NO: 419795 - DNA, 377 bp, Oryza sativa
gtccttgatgccgacgaggtcgatgtagtagaacgacggcgtcgcgccgtcggccagcgccgtgaactgcgcgttcgccggcggggcgccgccgagggacaggtagcccctgccgctcgacgacgacggtaggcagtaggtgaatccggggccgtagctcggcgcgccctgcgacggcagcgacaccttctccctgccgaggccgaacagcccgtcgacctggccgaacagcccggcgttctggtcgccgcacccgaagacgaagcccgggagcgtgtccgacgccgagagcgtcagcgtgtcgcgcacgaggttgccgtcggtctgcgactggtcgccgtactggaccttgttccggcacctggtgtccgacgagc

SEQ ID NO: 419796 - DNA, 504 bp, Oryza sativa
  unsure (1)..(504): unsure at all n locations
gttgattttaacgtacaaagtgggtaggcgtctgtggtccatcgccgaggcccgctacctgaaccgcaccctggttctcgatctcggcgtctgtgtcgtcgtcgcctacgacgggggcatgcccgaggagggcaagcgcctcgccttctatattgacattgagcacctgcaatccgtggtcgggatcgttgaacacaagcggttctgggaggattgggacaagtggggagcacagggtcagcttggagtccgcatcatcgaggacagcagggttgcgcccaccaagttctccaagtcgagggatcccctgatcgttaggaaatttggggacgtggagccagggaattattggtacaatgtgtgcgagggcgaagctgagcatgtactgcgtccaccgcanggagcaatacgcacggcgccaagcttgatggacattgatgatggtatcatatcacggatgcaagtagattttgactctgttatgttggtggaatgatgggaacc

SEQ ID NO: 419797 - DNA, 525 bp, Oryza sativa
atggattttaagtttgtgtggtgtgtcatccatggcggacatggtgaagttcaccatggagtggcttcaggatcctctgagcctggcgatcgtcgtcacggtggccgtcctaatcatgcggatgcagcggcggcgcgcggcgccgttcccgccggggccgaagccgctgccgatcgtcggcaacatggcgatgatggaccagctgacgcaccgcggcctggcagcgctggcgaaggagtacggcggcctgatgcacctccggctcggccggctccacgcgttcgccgtgtcgacgccggagtacgcgcgcgaggtgctccaggcgcaggacggcgcgttctcgaacaggccggcgaccacggcgatcgcctacctcacctacgaccgcgcggacatggcgttcgcgcactacgggcccttctggcgccagatgaggaagctgtgcgtggtgaagctcttcagccggcgccgcgccgagacgtggctcgacgtgcgcgacgagtccgcggcgctcgtgcgcgccgt

SEQ ID NO: 419798 - DNA, 472 bp, Oryza sativa
actaattgcaacttcgattgacatctgaaccataacagatcataagcacaaaaaatacatatatattgaccagtaaactgatcacccggggtcacaaccaacacttacacatgtaataatacatactggccaatggttttttcccagaactaattaaactttgcaagcataaacaaagacaaaacagacagtttccaaagttcagagagttcagactgctcacagtaaaccaaccaacaaaaacatgtagacgacgtgtagcacactgtcaatcgatcgatcgatcgatcggctgcagtgtcccaatgtgattaagcacactggtagtcggatgggcagatcttgccgcagttgttgaggatgaggctgaggtcgatggggatgttgaggttgaggccgagcacgttggccttgatggcggtgcataggcagacggcggcgtcgaggtcgacgaggccgtcgagcaacgagc

SEQ ID NO: 419799 - DNA, 451 bp, Oryza sativa
tcgttccccaaaccctagccgccgccgacggcgtactcgagagaaacatcagcatgcatggcgggcaagggctagggtccggccatcggcatcgaccttggcacgacctactcgtgcgtgggcatttggcagaacgaccgcgtggagatcatcgtcaacgaccagggcaaccgtaccaccccctcctacgttagcttcaccgactccgagaggctcatcggagatactgccaagaaccacgtagccatgaaccccatcaacaccgtcttcgatgccaagcgtgtcattggcaggaggtttagcgatgcttctgttcagagtgacactaagctgtggtccttgaaggtgattgctggacctggagacaagcctatgacagttgtccagtacaagggtgaggagaagcagttggctgccgaagagatctcctacatgatcctcatcaagatgc

SEQ ID NO: 419800 - DNA, 536 bp, Oryza sativa
aaaacccaagctttgcttctgcgccggccggcccaccacctgcggtccatctcggccgccgccgctgtcgctgtcgcgatcgcgatccccgcctagatagactttcccaagaacccgccgccgccgctgcaggggtggcgtggcatcctggtagaccagctcgagccttcaggctcttttgcgccgtcgccgccgccgacggtcgatccgtgttcttggctcaagcggcgtcaatggcggcggcgaatgggagcgcctgccgcggaggcggcgtggacaaggagaaggaggagttcaagcacatctacagtgtgctcaaggaggatctgctcagggaccccgccttcgagttcaccgactcgtcgcggcagtggatcgatcgcatgttggactacaatgtacctggagggaagtgcaatcgtggtctctctgtggtcgatagctataagccgctgaagggcaccaatgttctaagacaggatgacatgtttctcgcgagcactctttgctggtgcgtagaatggcttcaagcttac

SEQ ID NO: 419801 - DNA, 428 bp, Oryza sativa
attaattttgcttaattattcgttctaccaggatgttcagatcaacagcgctacgcctactcagggagaccaagagagcggttggcccatggatgacgacgatgacgtcgacttcgcctgaaagtctaatcgccggtggattctccacggcggcgagctcccaccagaggttggccggcaaggtggccgtcatcaccggcgccgccagcggcatcggcaaggcgaccgccgcggagttcatcaggaacggagccaaggtgatcatcaccgacgtcaacgacgacctcggtcacgccgcggcggcggagctcggcccggacgccacgtacgcgcgctgtgacgtcgccgacgaggcgcatgtcgccgccgccgtcgactcgccgtggcgcgccacggtcgtctcgacgttatgcacaacaacgccgtca

SEQ ID NO: 419802 - DNA, 431 bp, Oryza sativa
gcgtacaaaaactcagtgcatttaacttttgaactcatcactattacaagaggaaatggaaatcaaagaacaccagaacgtttaaacaatattcacttcactcacacaaactgaattaaatgagctaattaaaccacaatgaagaactctcatccacaggagaaggtaattaattaacatacttaagcactactaattcattcggaactcatttaatttaggccatctcgcgttcttgctagtagtagttcaccttcctgcagttgacgcggacctcgccttggctcccgacgagcgggctcaggctggccatcctcaccatggactcggcgaagtctcgccggaacgcgtccgggttggcggcgtagaacctgacgagcccgtcggtggcgccgaggccgccgccggcgaacagctgctggtccgagtgc

SEQ ID NO: 419803 - DNA, 441 bp, Oryza sativa
gtgattcttgagctcagtcacaggcacagcatggggatctgtgcatcttcagagcatccggcgcatgcacatgagacacaaggcagcattgcgattgtaaaagacgacccatgctgggctgtaagacctgtgttacctgaagatctcgcagagatatgtcttgctcttgatactcggagccagggccctgatatgggttcagtgtccaagaggcggatgccattcctcgagagtaaggaattcattgctgaaaggaaagaggttgggaagcttgtcgagtggatgcatgtcctgactgctgatgcttgatcaaagggggcccattgggaaagtttagggtggttcagggcaaaagcacagccctcttcgacccatgcctgggccaaccaaagctggttttggtgtggatgatctagatggaaagcttttcgtattgctggc

SEQ ID NO: 419804 - DNA, 474 bp, Oryza sativa
tttttgtttattatttccactatatctcagactattaatttcggcttgttgaagctggggcatttgatgctctgatggatctattggttagccatggcagctccattaaccagtacaagacacccagatgcatcgaatctagccttgcactgaagctgctgaactccaagggcattgcctgctttttcagtccacaggatcctgaatgcggcatgtaaaactttggtaaataagcaagtatgcttctgtgcttgcttgatatgcaatcttactacaattaaccgaaattaatagtctgagatatagtggaaataataataataataatgtactactagcttaaataatgaagttcttattttagatggctgcaggctttaggagcttcatttccaatctagtcagatcagcctgctgcctagataagtgggtataaatgttgccaacttttagaatttcatttgggtttaatta

SEQ ID NO: 419805 - DNA, 407 bp, Oryza sativa
gggagtagaaaacttctttattcaaatctcagcaggtatagcaagtgcccatatttaagaggagtccagagtacagacgcattacaatcagaaaaccaatagggggagtaccatgtggaaatgtacatcaaaactacaaaaatctcatattatgctggcgaactggaggccttccttcttgagctcctctatgttggcaacgggcggctgagttttcgcgaccttggcaatggccttgttctcatcaggtgacccaccctccaggaaggcacccaacaccttgccgtccttgatccagtaggacccgaacttgggcttggcataggtcgggtcactgtctccgaacaggatggtgtctccaacgttgtcgccgtagaattgccatcccaggtcgaatgaccgggagt

SEQ ID NO: 419806 - DNA, 495 bp, Oryza sativa
gttcagcctgcggagcgtttttttgttggccgcattggcccaaaaaagtataggatatacagagtgattgtccggtatggttaccgtgatgtacagaaggatgatgtagagtttgagaaggatctagtcagtagtattgcagagttcatccgctgtgcggactctaaccaaaacagttttatggacggcgcaagccattcatgtgaggggctatctttcatcagtaaaggccttccacttgaggaggaggaaggtgagtttgatggatcagattcaacaggatcatctgctcataaggagataaatccaaacacgacggcaccgaagccaaagagggtgaggtttgcacttccaaaggacacaaagatagaccgggaggtgcgcggcgagctgcaggagctgatggaagcaagggaggcaggcatgtccttcataacgggccgctcccatatgaaggcgaaaagcgggtctggtctgataaagcagattgtgata

SEQ ID NO: 419807 - DNA, 459 bp, Oryza sativa
aggttcaaatccaacttattcataaagcatactgctgtcccacaggaaactgtttcataaaactaacatatcatacggactcgatggtccattaaaccagacacaagtagacatcagcaccacaaatacttgacgaacagaggctcgggatgaccaggcacatgggcagctccaccaaactggctgattactgaccaccacggaggcggaccaccaggtggagggtggactccttctggatgttgtagtcggcgagggtgcgtccatcctccagctgcttgccagcgaagatcagacgctgctggtctgggggaatcccctccttgtcctggatcttggccttcacattatcaatggtgtcggagctctcaacctccaaagtgatggtctttccagtcaaggtctttacgaagatctgtataccaccacggagacgaagcaccaggtggaggggagact

SEQ ID NO: 419808 - DNA, 528 bp, Oryza sativa
  unsure (1)..(528): unsure at all n locations
ctcgttttgacacccgaggaggcgtacgccgccatcgacctccccatcctcggcctcctcttcggcaccatggtcgtcttcatcttcctggagcgcgccgacatgttcaagtacctcggcaacatgctgtcgtggaagagccgcggcagcaaggacctcctcttccgcgtctgcgtcgtctccgccgtcgccagcgcgctcttcaccaacgacaccacctgcgtcgacctcaccgagttcatcctcaaggtggcgcgccagaacaacctcccgccgcagccgttcctcctcgcgctcgcgtcgagctccaacatcgggtcggcggcgacgcccatcggcaacccgcagaacctcgtcatcgccgtcgagagcgagatcacgttcggccagttcctcctcggcgtgttcccggcgatggtcgtcggcatcctcgacaacacctgcatnctcctatgctacttgtggaggtacctctccgacgaccgcgaccagctcgagggcggcggtagcgcgcatggtcccgaggtc

SEQ ID NO: 419809 - DNA, 519 bp, Oryza sativa
ttctgcctgatgctgttggtactacatgcggccagcgtgtggagaaggttattggaactgagcacactgacattcttcgtgttccattcaggagtgagaatggtatcctccgcaagtggatctcccgttttgatgtctggccattcctggaaacatacactgaggatgttgcaaacgaaattatgagggaaatgcaagccaaacctgatctcatcattggcaattacagtgatggaaaccttgtcgccactctgctggctcacaaattaggagttacccagggtaccattgctcatgccttggagaaaaccaaataccccaactcagacatatactgggacaagtttgacagccagtaccacttctcatgccaattcactgctgatcttatcgccatgaatcacactgatttcatcatcaccagtacattccaagatattgctggaagcaaggacactgtggcgcagtatgaatcacacattgcatttcacccttctgggctttaccgagttgtgcatg

SEQ ID NO: 419810 - DNA, 530 bp, Oryza sativa
ggaactgaactccggttcaccattttaacaaccaccaaactttccatatccacaagattacatgtttatttaagttacagtctacactctccactagagttcttaaaggaagtggcatgagcaaacatgcagcagcctccaacctgtaggcaaattataagctacagtaacatttacaggttcttcctacacctatgcacatactacagattgcagtggtgaaaaagtttagttttttcactactttagataccgtgtttgcacaaagttcgcttgtccctcgttgcaaacacacagaagcttgtgccctgatgttcttcatatggtcctcagatatctgcattgattccaaatatacggaacttgtgcatgtttggcagctttgctaccactagtaccagaactgcaatggtgttgaggaaaagcattggctgtttgtagtcggtcaagtgtgacgcgatcaggtacagcaccacaggtaccacagtcaagaacttcctattacgagtaagttgctgcccgttatcaat

SEQ ID NO: 419811 - DNA, 480 bp, Oryza sativa
accgacataattgtcttgtctgccgctttgtagtttttattgaggattctgcttagtacaggacttgcctacgaaattcatacctaaaaaaccggagggaaaacttacctaggaaattctgaatccaaggaccacatattcgttggctactcaacaaggtagtgcattcacaagcatcaaacctttcagttttctacagataggctcgctaagtggcatgccttctacctgctacaaaaacctaaagtacacagaattagcctactcgaagatggcgattctcccttgagcaccatggtcgcttcctctaatataagcagctgcaaaattagcaaaataatttctctgctgaatgactccagctactatttcttcagaaccaattcgagtagtcaaagtcgcggagcttcctaaagtgcttctccacatcttgcctcgactttgcccactcctctctttggatcacagtggtcgcatcat

SEQ ID NO: 419812 - DNA, 412 bp, Oryza sativa
tcggtcttcgacgccgaggggagagagagagaggccgcctggacgaacataccactgactggctcccactcgccagagcgccccgattgcggtcgggtttgatcgatggcattcatgcggatcctgatggagttgcaggacctgcgtaaggaccgtccaacatcatgcatcgcaggacatgcggttgaagacatgtttcattgacaagctactattattggaccatcatacaaagcactagctggtcgggtattctatgagaacattcattttccaccggattatccttttaaaccaccgaaggtctgtttccgtaccaagggtctccacccgatcattaatagaaatggcagcatgtgcctcgacatactcaatgaacagtgaagtcctctacttaccatatcaaaggttc

SEQ ID NO: 419813 - DNA, 514 bp, Oryza sativa
  unsure (1)..(514): unsure at all n locations
ctgagcaatgcgttcgttatgtgttactgcggagcgcatatcgcgtgcacgtgcgcgtgcacggtgagagagaatactagttatgctttgcccaaagggaccggaacagtctagtctgtagctacctagcttcggctatttcaagtgcctgctgagcttattccggatcaatcttagcagctgatcctacttagaatgaagccacattaagcttaatgtagactgagacagtaacaagatgctcatttgaaaggaatggttatatggaagaatttgagtatttggcagtagcatgtatacacactgttctggtggttccagcacatgccatcatatcattatttacttgttttcccaaacaggctgatgttgatggaaatggaaccattgactatgctgagttcatatcagcgacaatgcacatgaacagattggagaatgaagaccacatacttaaagcatntgagtattttgataaggaccacagcgggtacataacagtttatgagttgga

SEQ ID NO: 419814 - DNA, 472 bp, Oryza sativa
  unsure (1)..(472): unsure at all n locations
aatctaacatacgcaaactgatattatcacaatgttagccgatgacaatggaaagagtaatctaggtacaagcggatcattgacggtggagacaagacattggctgcaccacaacacccaccagtggcgccaacaaggagcgctatccgttataggacgagagaaaaagtaaaacatcacgatgtgaagtgaaactgaataattctagtagacgatgatgatgatggataggctccttaggacgcccgccgcccttagcgtcttgctgctcccatcttgtccactggaaggctcactcgtcatcgtcttcatcctcttcgctgccctcgtcgtcatcctcatcattgacctcggacttggacttgtcagattcctcctcngtcgcctcctcttcctccttggcgggtgccttcttggcagtgctctcgcccttgttgtaggcagcaatggccttgtgtactcggccttgagc

SEQ ID NO: 419815 - DNA, 501 bp, Oryza sativa
  unsure (1)..(501): unsure at all n locations
tttctcttctcttctctggtggtgtgggtgtgtccctgtctcccctctccttcctcctctcctttcccctcctctcttcccccctctcacaagagagagagcgccagactctccccaggattcagccatgaagggggccaaatccaagggcgccgccaagcccgacgccaagttggctgtgaagagtaagggcgcggagaagcccgccgccaagggcaggaaggggaaggccggcaaggaccccaacaagcccaagagggctccctccgctttcttcgtttttatggaggagttccgtaaggagttcaaggagaagaaccccaagaataaatctgtcgctgctgtaggaaaagcagccggtgataggtggaaatccctgaccgaagcggacaaggcttcctatgtagccaggccaacaagctcaaggccgagtacaacaaggcccatgctgnctacaacaagggcgagagcactgccaagaaggcacccgccaggaggaag

SEQ ID NO: 419816 - DNA, 298 bp, Oryza sativa
ttcatttaatacctgaaggtgcatgcattggtttgtattttataaacagacctgagtggatcatagttgatcatgcctgtgcagcatattcattcgagtctgtgccactttatgacactcttggtccagatgcaggtcagttcattgtcaaccatgcgacagtagaagctattttctgtgtgcctcaaacactaagcactctgttaagctttataactcaaatgccatgtgttcgccttatagtggtaattggtggagacaatgcaaatatgccatctaccccaacatttactggagt

SEQ ID NO: 419817 - DNA, 426 bp, Oryza sativa
ctctcttccccacctcttcgttcctccgcctccgcctccgccatggaggtgttctactacctcgtcttcggcgggctcgccgccgtcgtggcggggctggagctcggcaagtccggcaaggaccgcgtcgccaccaccccggccttcaacgcgttcaagaacaactacatcctcgtctactcgctcatgatgtctggggattggctgcaggggccgtacgtgtactacctctacagccagtacggcttctacaagggtgacattggccgcctcttcatcgccggctttcggctcctcgatgctcttcggcaccatcgtcggatccctcgccgataagcaggggaggaagagggcgtgcattacctactgcatcagctacatcctgagctgcatcacgaagcactcgcctgagtacaagatcctgat

SEQ ID NO: 419818 - DNA, 433 bp, Oryza sativa
gagtaaagagacgtccgtgttatgctagatcactacgaaccggccacaactaaggggcgatataagcacgctgttatagtctaacagaaatttactccagccagatttggggtggaagcatagccaaacagagcaggtaataacagctctacaacgagaagcaagcgcggccgttttagtgcaacatgattacagataattacatcgtcagttcgccgatgcacgcgaagacaagtttgctcttcggtgacccactctgctggccctgagcttgaatgttgaaaaccacattcattcccaaccgcaccttaccgaacactacgtgctaccgcgccaaccagctggtggacacagcggtgaggaaaaactgggacccgctagggtctctcccagcattggccatggacaggaggcctggtgcggggtgcttgat

SEQ ID NO: 419819 - DNA, 479 bp, Oryza sativa
gttgcaataaatttgattgtatatagtaccctgtcaccgaaaaaccagctgcaccagtactataatataaagtgaaacagatctctttctctctatttatatcactctgctatcttttcttatctcatcaatgctatgatatcctttttcttttctgtgtaaaaaggtgaaagtagaaattaaggagaaaaagaatcttcagttggtgtcagcatgtagtggcatcctcctcttttctactgagcaggagattgtgtaatgtcaccaagcatcttcaatgcagggcaagggttgtctattggtaccatgtggccagctcccagtatccagtagaatttgagattcttgtaagatttgaggaaggcttgggtgccagctgcttcaccaccactgcagtagagcggcactctgcgtgagtttgtgaagttcttcagaccatcccacttgagtttctgaatccaatccaatgttcccttggt

SEQ ID NO: 419820 - DNA, 526 bp, Oryza sativa
tcttcagaggctgcctcacgcatccctgtcgatctcggtcaagaatggggttgctgatgaggcccgtcgccttgctcatctactgcaccaccgcctccctcttcttcctcacctcctcctcctccgccgccatcgccggtggcacgccggacggctcggaggagtggggctatgtccaagtacgcccgaaggcgcacatgttctggtggttgtaccggagcccgcagcgcgtgaacaacaagggcagcacgccatggccgaccgtgctctggctccagggaggcccgggcgcttcgggcgtgggttatggcaacttcatggagatcgggccgctggacaccaaccttaaaccccgcccatccacctggctctccaaggccgacctcctcttcgtccgaatactatgatttgcttaatttcgatctcattatcttaaacaaattttctggagagagagagatagagatagagatagagatagagtagttgtaggttggtgaaggatgaattgaatggtgcaatgaga

SEQ ID NO: 419821 - DNA, 449 bp, Oryza sativa
tcgttcaggttctgaatggaagtccttgaaggtccaatgggatgaagtcacaaatgttaatggccctgagagggtttccccttgggaaattgaaacatgtgatggcactgcacctgccatcaatgtacccctgcagtcagcaacgaaaaacaagcggcctagggagccaagtgaaactattgaccttcaatcactggaaccagctcaagagttttggctatctggaatgccacaacagcatgagaagacaggtattggttccagtgaacctaattgtatctctggacatcaagttgtttggccaggcgagcatccaggatatggtgccgtgagttagttcagtttgtcagaatccgctagtacttgaaagttggttgaaggatttcaactcttcaaacaagggtgtctcccctaccttgtagagatttcttaaaaaatttttcaggtta

SEQ ID NO: 419822 - DNA, 302 bp, Oryza sativa
tcgtggacgcgtgggtctcgatctcgtgttctctctctcgcaggactcgatcgcgatggcggcggaggtggcgaaggcggcggtggtgccggagtcggtgctgaagaagcggaagcgggaggagcagtgggcggcggacaggaaggagaaggcgctcaccgagaagaagaaggccgtcgagagccgcaagctcatcttcgcccgcgccaagaagtacgcccaggagtacgacgcgcaggagaaggagcttgtgcagctcaagcgtgaggctcggatgaagggtgggttctacgtcagccctg

SEQ ID NO: 419823 - DNA, 436 bp, Oryza sativa
ttccttctctctgccgccgccgtcgccgccgcttgccccgtactcctcctcttcagcggcgatgaagggacggcaaggccagcgcgtgaggctgtacgtccgcggcaccatcctcggctacaagaggtcgaagtcgaaccagtacgagaacacgtcgctgctgcagatcgagggggtgaacaccaaggaggaggttgggtggtacgccgggaagcgcatcgcctacgtctacaaggccaagacgaagagcaacgactccaccatccgctgcatctggggcaaggtcacccgcccgcacggcaactccggcgtcgtccgcgccaagttccggtccaacctcccgcccaccttcatgggcaagaaggtccgcgtcttcatgtaccccagcagcatctaaaagcaaccaaggttcttgcctatgctgcgaaactgatag

SEQ ID NO: 419824 - DNA, 469 bp, Oryza sativa
gcaggaacataccccccttgatataaaagtcttgaaaacaagttcacacacaaccagaggtactctgcccactagttatatcacttccatcatctgacatcacggtaacagttacatagttgaaatgcagcatggatcatcacacaaattccttggaacattcgtgaacaaaggcaataaggaacaagagttctggagcatgctgggtcaacttaacctgctgtctcggtcttctccagcgtgttgtagttgagtaacttctcgatgaggtcaacatgggtcatgagcattcgccggcagcagtaacggaccaaacccaatgcatccagagcatccccctctgtgtagccagcctggaggagatccaggtacagatcccacttgttcccaatcaccttcccgcaggtgaagcaccgcaccgggatgatcatctccgatgcgctcccgccgccgccgccgccgccgccgg

SEQ ID NO: 419825 - DNA, 504 bp, Oryza sativa
ttaaccctctccgactctccccttctcccactcttctccggcggcggcggcggcggcggcgggagcgcatcggagatgatcatcccggtgcggtgcttcacctgcgggaaggtgattgggaacaagtgggatctgtacctggatctcctccaggctgactacacagagggggatgctctggatgcattgggtttggtccgttactgctgccggcgaatgctcatgacccatgttgacctcatcgagaagttactcaactacaacacgctggagaagaccgagacagcaggttaagttgacccagcatgctccagaactcttgttccttattgcctttgttcacgaatgttccaaggaatttgtgtgatgatccatgctgcatttcaactatgtaactgttaccgtgatgcagatgatggaagtgatataacttgtgggcagagtacctctggttgtgtgtgaactttgtttcaagacttttatttcaaggggggtatgttcctg

SEQ ID NO: 419826 - DNA, 499 bp, Oryza sativa
gtagactcaaaaacattggtttctcatcagaaagcaaatatgcagctggcaagtaatcccaacaaactattcagaatatctgccattgacacaggctaggatgttcacgatccacaactagatagctgtttacttgttgtctaaataaacgggcagcaaaataagtgataatctctactcggcagcagcgacctcctgcccggccatggcctcatcttctgcaggcctatcaagcttcgtaccgatgtcctccttggcatagtcaccatgcacctccatgagcttccccaggtcaaatttcggggcctttagaatcttcactttgcggacaaacacattctgaagggggaaaatactggatgtcgccttctcaatttccttcccaataacttcaggaatgaactttgaaactagctctttcaaatcacagcttgaagcctggttggccatgatttcaaccatcttgcgacgaatctgtctgatctgactcgcttgagca

SEQ ID NO: 419827 - DNA, 499 bp, Oryza sativa
cgcgccgccgccgccgccgagcgcctggagcagcgtcagccatggccgtaggtaagaacaagcgcatctccaaggggaagaagggatccaagaagaagaccgtcgatccctttgctaagaaggactggtatgatatcaaggccccgtcggtgttcaatgtgcggaacatcggcaagaccctcgtgtccaggacacagggtacaaagattgcttctgagggcctaaagcatagagtgtttgaggtctccttagctgatctccagaacgatgaggatcaggcgtacaggaagatcagacttcgtgctgaggatgtgcaagggaagaacgtgctcaccaacttttggggcatgtcgtttactaccgataagctcagatcacttgttaagaagtggcagacactgttgaggctcatgtggatgtcaaaaccacagaccgctacatgctgcgtctggtctgtttcggctttaccaagcggggcctaaccaggtgaagaggactt

SEQ ID NO: 419828 - DNA, 430 bp, Oryza sativa
tttttgtttttaaaggcgctgggggcaccacaataattaaatttctcacgcaattcatagttgtcatagagctcccaacgcagttcttcaattcaaaaagactgcccaaacagaccaagggtatcatcatagcagcaaagttttttaacacgcaacatcaaagagacactaatgcaataagataacttgaagcgcggatcactagcaaatttggggcttagtcgacctcctcgatcttggggccagcaccgctgccgcctgccgggggagcatcgtcctcgtccatgccgccggccatgtccgcgccagcgccctggtacatcttggcgatgatggggttgcagatgccctccagctccttcatcttgtcatcgaactcatcagcctcggcgagctggttgccgtccagccactggatggcctgatcgat

SEQ ID NO: 419829 - DNA, 330 bp, Oryza sativa
aacaccgtcttccttttctttcgtctcattggcaggaggtttagcgatgcttttgttcagagtgacattaagctctggcccttcaaggtgattgctggacctggtgacaagcctatgattgttgtccagtacaagggtgaggagaagcagtttgctgccgaagagatctcctccatggtcctcatcaagatgcgtgagattgctgaggcctaccttggcaccaccatcaagaatgccgttgtcactgttcctgcctacttcaatgactcccagaggcaggccaccaaggatgctggagtgattgctggtcttaatgtcatgcgcattatt

SEQ ID NO: 419830 - DNA, 430 bp, Oryza sativa
ttatttggttttttaatattatttgggttatacaggaacaataccccccttgatataaaagtcttgaaaacaagttcacacacaaccagaggtactttgcccactagttatatcactttcatcatctgacatcacggtaacagtttcatagtttgaaatgcagcatggatcatcacacaaattccttggaacattcgtgaacaaaggcaataaggaacaagagttctggagcatgctgggacaactaaacctggtgtctaggtcttctccagcgtgttgtatttgagtaacttctcgaagaggtcaacatgggtcatgagcattcgccggcagcagtaacggaccaaacccaatgcatccagaggatccccctttgtgtagtcagtctggaggagatccaggtacagatcccacttgttcccaaaaacct

SEQ ID NO: 419831 - DNA, 51 bp, Oryza sativa
tcgttcacgcgtccgcccacgcgtccgcggacgcgtggggttctagatcgc

SEQ ID NO: 419832 - DNA, 426 bp, Oryza sativa
gtcagcaggaaactggaagtagatacaacagcagaaaaggatatacctctgcttccccggttaccatatggaaagatttttacgttacagacatacaagttacagcacaagcagttttcatatgcttgaacatctaatgtcagcggtagcacattaaccaaaagtaaagtaaaaatcacatcttgggagcaagccccgtatcatgcttgggaacatcagctaatatcagtcttaaatcacatctcaggaaactgaccggcaagtcatcctttcctactcgctgatcctacagcagctgcttgcagtgacagtcatggtgtggccttgtcagcaagtgagtgggcagccgagctccttcgccgccgcggtgaggaaggcgagcgtcagcccggtggcgcggcggctgtgggcttcccactctatgca

SEQ ID NO: 419833 - DNA, 403 bp, Oryza sativa
tcggtctattttagatggtgtggtggagtcatgggaaaatacgcagctggtggagaattgaagcctccaacaactgcttacagccgaggatctgggaagcacccacaacttatgccatccacgcccagatgggctgttgccaatggagctggagttatactaagtgtctgtgatgaggaagtagctcgttatgagacagcaaatttgactgcggcagctgttcctgcacttctattacctccaccgaccacaccattggacgaacatttggttgcggggctccctcctcttgaaccatatgctcgcttgtttcatagatactatgcaattgctactccaagtgctacccaaaggttgctttttggtcttctcgaggcaccaccatcatgggccccagatgcac

SEQ ID NO: 419834 - DNA, 532 bp, Oryza sativa
  unsure (1)..(532): unsure at all n locations
cactaccttctcctccttctcttcttcagtatcgaatcctctcttctcctcgtgcccaccaccaccaccgtagcaatggcgggcaacgggccgatcaacaaggaggacccgctcaactggggcgcggcggcggccgagatggccggcagccacctcgacgaggtgaagcgcatggtggcgcagttccgcgagccgctggtcaagatccagggcgccaccctccgcgtcggccaggtggccgccgtcgcccaggccaaggacgccgccggcgtcgccgtcgagctcgacgaggaggcccgcccccgcgtcaaggccagcagcgagtggatcctcaactgcatcgcccacggcggcgacatctacggcgtcaccaccggcttcggcgggaccttccaccgncgcaccaaggacggccccgccctccaagcgagctcctcaggcatcttaacgccggaatcttcggcactggctccgatggccacacgctgncgtcggagaccgtgcgggccggcatgctcgtgcgcattaacac

SEQ ID NO: 419835 - DNA, 488 bp, Oryza sativa
gatataattcataaatacacaccatttggacttttatattgcttttcgaagcacatcaacacatattacagcacacgctgctagataagtcttgtacattatatttattcaaccccgatggcctaaacgcacgtgcagatatatacctagtactaatttactgactaattatatgctatgcgtacatgcacgtgtacacgacaaaatctggagttttatgcatgtggctgactataggtatcagtaggcagcaacagcagcagcagcatcggcagaggcgagtctgggcttgttcttcaacgggcagattgcccaggtggtaatgccacagataccattcttgttgaggatatcccgctccatgcggatataaccgtactccccccatgttttaccccaagagttcttgatgatccagtattttatgttgtccgtcgtcactccataccccaccaccagtaccacatggttatccacattcggattac

SEQ ID NO: 419836 - DNA, 510 bp, Oryza sativa
tttggtttatttgcagagcgggaagcacaagtcttcatgtcgtactgctggattttgtgcactatgtgctcttcaaaaccatgttaagactgctctacagtcaactggaaaaatagtgacgccatcacagattgtcaagaacttgcgctgcatctcccgtagtttccgcaattcaaggcaggaggatgcacatgagttaatggttaatttacttgaatccatgcataaatgttgtctaccttctggagtaccaagtgagtctcctagtgcatatgagaagagcttagttcacaaaatatttggtggccgcctaagaagtcaggtgaaatgcacacagtgctcacattgctccaacaaatttgatcctttcttggatctcagccttgatattggtaaggccacgtctcttgtagggcacttcaaaatttactgcggaagagctcttaaatgggggagaaaagcaatatcagtgccaacgctgcaagaaaaaggttgtagcaaagaaaaagt

SEQ ID NO: 419837 - DNA, 484 bp, Oryza sativa
ataggatcaaaacatttctattaccacaactttttaaggatggaattgagtagcaatactttcaccccaaaatacagtttagcgacaatatcttagaaaagccgcttgctttgccgccatggctggcaagctgagcagagcagctaacacaaagaacacgagatcactataaaccaaacggcaacgaacgaagaaaatacagggtcttttttgtctgaagatacacgaagcggttcgttttcttttatttttagtctcctctcctcctcgatgatgggtgtatggcaatggcaatggcgatgggatcttggcttagttgatgggaaggggctcgccgttccactccttgaggcagtcgagcatggggtcgatgagcttgccctggctgatgccgaggaacaccttgttgcactcctcgccgggggacttgagcttctcgccggtgaggaatacgcagccgagctcctcgcggacgaagcggtag

SEQ ID NO: 419838 - DNA, 517 bp, Oryza sativa
tcgttcacgcgtccgcccaaaccctagccgccgtcggcggcgtactcgagagaaacatcagcatccatggcgggcaagggcgagggtccggccatcggcatcgaccttggcacgacctactcgtgcgtgggcgtttggcagcacgaccgcgtggagatcatcgccaacgaccagggcaaccgcaccaccccctcctacgtgggcttcaccgactccgagaggctcatcggagatgctgccaagaaccaggtcgccatgaaccccatcaacaccgtcttcgatgccaagcgtctcattggcaggaggtttagcgatgcttctgttcagagtgacattaagctctggcccttcaaggtgattgctggacctggtgacaagcctatgattgttgtccagtacaagggtgaggagagcagtttgctgccgaagagatctcctccatggtcctcatcaagatgcgtgagattgctgaggcctaccttggaccaccatcaagaatgccgttgccactgttcct

SEQ ID NO: 419839 - DNA, 461 bp, Oryza sativa
aagaaccactgaatccatctgcctatcattttcaaatatactcaacgagcagtgccaaccaaatttagatatacagatacgatatcaaacggctgagatcacgatccaaatgctaaacctttgtagcttcaaatccgctaaaaagccttcaaataattgtcatcatgatacagcaaatagtccgaaataaaaagaaaagctaaaactcctcaaaaccgtttaaatttctgactggttaaccaagtgactagctgatataaaaccctccacggggacaactatcagtttcgcagcataggcaagaaaccttggttgctttaagatgctgctggggtacatgaagacgcggaccttcttgcccatggaggtgggcgggaggttggaccggaacttggcgcggacgacgccggagttgccgtgcgggcgggtgaccttgccccagatgcagcggatggtggagt

SEQ ID NO: 419840 - DNA, 359 bp, Oryza sativa
tcgttaagatcctagcaacataggagtatatactactacatacaacaaacactcagatagatatgaagaagacgacattatcactagtcgtagggttgtgggctgtgctgctggtggcgacggcggcggcgcaggacgtcgacctgacggtgacggacaaggacctagagacggaggagagcatgtggaatctctacaagtggtggtgcagcgtgtactacgcgtcgtcgtcgtcgagggacctcgccgacgtcgagagcaggttcgaggcgttcaaagcgaacgccaggcacgtcaacgagttcaacaaaaaagagggcatgacctacaggctcggcctcaaccagttctccgacatg

SEQ ID NO: 419841 - DNA, 520 bp, Oryza sativa
tctttcacgcgtccgcccacgcgtccgcccacgcgtccgcgcacgagcagcagcagcagcagcggcggccgcagcgcgagctctctctctctctctcgcggtgggcggcgggatgaaggtgtccgtcgtgtcccggagcggccgggaggtggtcaggggcggcgtcgagctcaaggactcggctaaggtcgcggatctgcaggatgccatctatgccaagactaagaagtattaccctgctaggcagcggctcaccctccctatccaacctggaaaatcaggaaagccagttgtccttagtgcaaaggccagcctatcagaatactgcgaaaagggttctggatccctgacagtggtctttaaggatttaggcccacaggtcttctacagcacgctgttcttctttgaatactgggtcctcttcttatctaccccatgttctattacttgcctgtctacaaatatttcggatacgagggagagccggtcatgcatcctgtccagacttacgccatgtact

SEQ ID NO: 419842 - DNA, 489 bp, Oryza sativa
tacacacccaaacccaacctcccaaaacacccacccggtttaccagagatccgcgcccgccacttgtaaacctgctgcacccatggcgcccagagcagctacggtggagaaggttgctgtggcgccacccaccgggcttggtcttggcgtcggcggaggtgtcggagccgggggtcctcactacaggggcgtccgcaagcgcccgtgggggcgttacgcagcggagatccgtgaccctgccaagaagagccgggtgtggctcggtacctacgacacggcagaggaggccgcccgcgcctacaacgccgccgctcgagagttccggggtgccaaggcaaaaacaaactttccgtttgcatcacagtcgatggtcggctgtggcggcagccccagcagcaatagcacggtagacacggtggccgcggggttcagacgcctatgcgggccatgcctctgccggcgactctggacttggatttgttcaccgcg

SEQ ID NO: 419843 - DNA, 448 bp, Oryza sativa
ttcgtttcccccctccacccgtctcctccgtctccggcgccggcgccggcgagctcgccccccgcgattcgtgccctccgatcagaggcgaggcgggagaagagatggggctcacgttcaccaagctgttcagccggctcttcgccaagaaggagatgcggatcctgatggtgggtcttgacgcggccggaaagaccacaatcctctacaagctcaagctcggcgagatcgtcaccaccatccccaccatcggattcaatgttgaaaccgtggagtacaagaacatcagcttcaccgtctgggatgtggggggtcaggacaagatcaggcctctgtggaggcattatttccagaacacccagggtctcatctttgttgtggacagaaatgatagggaccgtgtttgtcgagccaggatgagctcacaggatgctgaacgaggatgagc

SEQ ID NO: 419844 - DNA, 498 bp, Oryza sativa
gctgatggaacgagtagatattgtatatttcctcgtgtatgttgacagtgagaactgtcttctccaaaataacagcaacaaaaataaccccatgcatcattacaatccacatatcaaagcttgaactttatacaagcacacggtcaccacaagtaactgtattctgccgtattacctcagaaagcagatcaccctaatgcatttcaatctcctgcacaggaatatctgtgtggtcagagcgacgagtatcagatgttccagatgagctcgctatctcagatttgcacaatgggcaaagtgcattaatcttcagccatttatcaacacattccttgtggaaacaatgtgtgcagggaagttcacgaagctcatcattgtgtgcatactttgcaagacagatgcaacaaacagcatcctcagcagatagtgaccgctccttgtcagtccctgcagctactatcccaccatcttggccttcagcttcatttcctgaactat

SEQ ID NO: 419845 - DNA, 524 bp, Oryza sativa
ttcttgttacatacacttcaaggctcctctcagaacaattcaactgagccttctgctagtgcatcagagcgtcgaaggaatgctgcacgaaatgcagtgctcgctaatccaaggattaatgctctttttgaccacttcaagatggccttggattgtttctttgctgtgtggtttgtcgtaggaaatgtgtggatatttggcgggcgttcttctgctgccgatgctccaaacttgtacaggttatgtattgtgttccttacctttagttgtattgggtatgccatgcctttcatcctctgtgcaatgatatgctgctgcctgccctgcatcatatctgttatgggatttagagaagatacaaacaatacaagaggggctacctcagaatccatcaattctcttccaacatcaaattcaaaaccaagaaacgccgtcatagttcaggaaatgaagctgaaggccaagatggtgggatagtagctgcagggactgacaaggagcggtcactatctgctgaggatgct

SEQ ID NO: 419846 - DNA, 433 bp, Oryza sativa
aatatgaatatgaaggccagggaaaatggcccttttatttaacacatgtagtttggagtagtactggagtagtagtttgcaataataatgaacaagattgccttcggcatttgggggacaaaaagaaaaacgaaaacttgggttacaaacaaattacagggttttttatgggctgggggaaatactcctcctaatgggatatatgggggattttaccagccgtatactgggttttgtacctgaggcggcaagagggggaggtccaagctatgttgcttggtgaaattgagggggccgggtattgctccggttgacagtttggggggctcattgccagggaagcagtagtgggcgaaggccaacccaccatttaccatgtttgacatgttcgggaacgaggctgatttttccatcttattgggtccacttttac

SEQ ID NO: 419847 - DNA, 477 bp, Oryza sativa
  unsure (1)..(477): unsure at all n locations
tttgttgtgggggtgggaggaggtccaggaggccgaggagtgggagcccatacggatggtcaaggcgcgcctcagggagatggagcggaggcggcagtggcaggccaccgacatgctccacaaggtcaagctcagcttgaaatcaatgagctttgtacctgaagcatctgaggaagttccaccgctagatttaggtgaactcctggcatatttcctaaagcaatctgggccattgtttgaccaacttggtataaaaagagacgtgtgcgataagctggtggaatctctgtgcagcaaacgcaaggaccaccttgcatataattcatttccagcaagtgaaccatccgcattcagcaatgacaatgctggtgatgaacttgacctaagaatagctagtgtcgtgcaaagacaggacacaattatgaaggtggattttggaatgatgggcatanatatgaaacagctgacaagaggcat

SEQ ID NO: 419848 - DNA, 497 bp, Oryza sativa
ggcaatgtaatagctgtttaattcagaaacatgttaaggctcaaagtacagtaaaccatttaactgtgaaatcataaccaaagctcaataactattgagctccggaattacaccttacatattgggatagcaaccacagccctaaatacccatcgatccatccaaagctcccctagcttatgcaaatcttgttaaaatttaggccttgctggcaatgttgctggacagccagtccaggccctcgtacaatccctcacctgttgtagcacaagtgctctggatataccagtgtcgctggcgaagggagtgcagtccaagcttatcagtgatctcagcagcattcatagcgtttggcagatcttgcttgttagcaaagacaagcagcacagcatcacgtagctcatcctcgttcagcatcctgtggagctcatccctggcttcgacaacacggtccctatcattgctgtccacaacaaagatgagaccctggtgttctg

SEQ ID NO: 419849 - DNA, 515 bp, Oryza sativa
agagcccgcgccggccggcgcggccttgtcgggagcgtcaccgtcgccgtcgccggcgtcatcctgctgctcggcgccgcgtggttcgcccacaggtacaggagtcaaaggaggtggagcacggaggacgccgccggcgagaagtcgaggtgggtggtcacgtcgttccacaaggcggagttcgacgaggaggacatcctgagctgcctcgacgacgaggacaacgtggtcggcacgggcgcagcgggcaaggtgtacaaggccgtcctcgggaacggcgcccgcggcggcgacgacggcgccgtcgtcgccgtcaagaagctctgggctaacggcggcgcggcgaagaaggcggcggccatggaagccggcggcggcggcggcggcggcggcaaggacacgttcgaggcggaggtggcgacgctggggaggatacggcacaagaacatcgtgaagctgtggtgcagcctcagcagcggcgaccggcggctgctcgtctacgagtacatgcccaa

SEQ ID NO: 419850 - DNA, 421 bp, Oryza sativa
tcgtccacctgctcgtcgcggtggggcccgtctcggttgtgtgtgcggcggcgacggcggagtaggccacggtattggtggtcttgatgagatcaagaaccatgcccattatctgtagaacataccgatcgaggaggtgttctaacagcttaaatgtacgctctagggtctatgctcccacgaggggaaccggtgtatcgagatgatcttcctcaacaagctctatgagaataatgagagcaagatactcaagttcttgcagttcatgtggaacccgctgtcgtgggtcatggatatggccgtcatgatgggcatattgctggtcaacggtggggggaagctaccagtctggaatgacttactcaggattataacactgctggatataaacttcaccatctccttatcgatgagaacaact

SEQ ID NO: 419851 - DNA, 360 bp, Oryza sativa
tcgtgagcgtagccgtggtggagttgctggcgatggcggcggtggcggcggcgcaggcgccgggtcccgctgcgacgccggcggcgggcgccacggggccgccgaacgtgacggcggtcctggagaagggagggcagaacacgacgttcatccggctgatgaaggagacgcagcaggacacgcagctgaacagccagctgaacaactccttcaacggcaacggttacaccgggttcgcgcctaccgacaacgccgtgaacaacctcaagccgggcaccatcaacagcctgacgcaacagcagcaggtggcgctcgttcagggccacgtcctaccgcagttatactgcatggactactttc

SEQ ID NO: 419852 - DNA, 431 bp, Oryza sativa
ttatttggcacgaggagactatctcctccccctcctcctcctctccccgccgacgaccccgccgagctacatctccgccgtgctgatcgcgtggagccgaggagaggagcggcggccaacgctacgaggagaggagagtgggggaggggaggggagcgagccttatcttacccgctccgccgaagcctatggactcggagcactggatctcgcgcctggccgtcgtcaagcggttctacgccgcgcagctcggccacgccgatcgagcggtgatagaggaggtggacatggacgaggaggtgaggccggagttcgcgtgcccctactgctacgaggaccacgacgtcgtcttcctctgcgcgcacctggaggaggagcaccctttcgagccccatgcggggccttgccctatatgtttgataagattgcaa

SEQ ID NO: 419853 - DNA, 452 bp, Oryza sativa
ttgtaaccaccaccagcacctcctcctccgccgccgacgccgactcctccctccaagctttccccaccatggcgtcgtcgtccgtcttcgctggcctcgcgcaggcgccggaggaccccatcctcggggtgacggtcgcgtacaacaaggatcccagccccgtgaaggtcaatctcggcgtcggcgcctaccggaccgaggaagggaagcccctggtgctgaatgtggtcaggcgcgctgagcagatgctgatcaacaacccgtcacgtgttaaggagtatttgccgatcactggactggccgatttcaataagctgagtgctaagcttatttttggtgctgacagtcctgccattcaagagaatagggtggctacagttcagtgcttgtcaggaactggttctttagggtgggagggaatttcttgaaggcatttcatgaacgcactatta

SEQ ID NO: 419854 - DNA, 511 bp, Oryza sativa
tttgtttcgtgggttgacacaaggaggttgcacgagagaatgcaggctgttcaaaaggaaagggaagagaaacttgcagagacactgaaaaaccgactgcacatttacgttcaaggaaataaagaggaatttgtccagcttgctcaagctgaggtgaccagacttagcaatgcagcatatggcactgttatgttaaacactatcggctatgtatattcgagacaagctgcaaaagaacttgggaagaaagcaatattcttgggtgttccatttgtagctgagtggttcagagacaaaggccatttcatcaaatcccaagtaacagctgcagcaggtgcaatagctttgatgcagttgcaagaagacttgaagaagtatcttagtgctgaaggccattacacagaggagaactagaaatgttcatgcaaaaccacaaaaggttatggttgattccttgtgaagcttaacgttgctgacatagaagccaccctatcacgagtcttgcaatggt

SEQ ID NO: 419855 - DNA, 478 bp, Oryza sativa
agggggagcagccacctttgctgctctaaggaaacggcatttattaaaccactatttttattcatgccaaacaccagcactagtccagtgacaaccaaacgacaatcctacactccaaaagtttacatttaggttctcaaatagtgatacatagctttgagagttgaaaccgtcagatactgacatagtttatgaggggcccctggagttggcaaaaacttcacgaagattgtcgcagctctggacgcacaaagtctgcatcagcaggcactgaaatgtcaacggtgggcctcaactgagcacagacttcaatggcactatggacgggatcggagaagaaattgctgatgaggtcttgattaactggagcattcttgtcaacagtcacaaaagcttgttgggtcaagatgtagtccaagcgtggcgcccatttccttgatcccaacccggctgttgtgggcagttatcaaccatgaag

SEQ ID NO: 419856 - DNA, 547 bp, Oryza sativa
gcaatctgttggccttgtttttcctaaaaacatcagtgttgttgctgtgtgtcccaagggaatgggcccatcagttagaaggctttatgttcagggaaaagaagtaaacggtgctggtatcaactccagctttgctgtacaccaggatgttgatggaagagcaacagatgtcgctcttggatggtcagttgctctaggttctcctttcacatttgctactactctagagcaggagtaccgaagcgatattttggcgagcgaggtattttgcttggggctgtacatggtattgtggaggctcttttcaggagatacacagagcatgggatggatgaggactcagcatacaagaacactgttgagtgcatcactggaatcatctttaaaactatttcgaaaaaggggatgcttgaagtgtacaatcattgacagaagaaggaaagaagcaatttatcgaggcttacagtgcatcatattatccatgcatggatatactatatgaatgctataaaatgtttcttctggaagtgaaatagagtgttgtttg

SEQ ID NO: 419857 - DNA, 396 bp, Oryza sativa
ggggaaaagcctccccgggggggcttattaggggattcgaaaacacccctttttttgaatccccagggccaaaactggtcccaaaagcaaggcccccgagtttattacaagggaacttccagggtgggcttagccagcaaacattactggttgaatcctcaaaacactggtgggggtgggtttaaaaagttattcttggggggggggggtatgctaccctcattcactttagttttgggactgcggcatggattgcatctgcaagaagcggaatgggccttccgtttaaaccagccatactggacctcccataaaaaggcatataaaggggggattcctgcctcaagaaagccacttgatccctggtgagcccagggaaagggaacattccgatct

SEQ ID NO: 419858 - DNA, 514 bp, Oryza sativa; identical to SEQ ID NO: 394471

SEQ ID NO: 419859 - DNA, 487 bp, Oryza sativa
gagtaacgatcgaatctatttctcttctttagcaaccaatgaactgaatggagcaatcctttgtacatctcaaaagttactgtaaaccaaaccatctccacatttacaaattgtttgtcactacgctgttaactagcagtagcacaactaggattcaaccacgctaattaacaaaggaaaattactgaaacaacgaagataaattacatttacattgtctaagctacacctacaaactttgcctttgtatatcatcaccatttctgaaaaaagttcagaactggatcagcttatatcagctatatatagctctagctctagctctagctaagctagaacgggttccacgcctgcgacgccatggcgctctgctgcacgtagccggaggactcctcctcgctccagccaagatggaacccctccgtcttggcggaggcagcgccgccgccgccgccttgtgccatgttgctcagcaggtccctgaagt

SEQ ID NO: 419860 - DNA, 495 bp, Oryza sativa
  unsure (1)..(495): unsure at all n locations
tgttcgtgtccgtgtcctagaaaaacttctgcacacgcagccgacgcccttctctatctagctaaatctccattttaattcctctctctctctctttgtgtctttctcaagggaaaattaaccatcaaatcaatagatacaatgagcttgatcagcatgatggaggcgaacctgccgccggggttccggttccaccccagggacgaggagctcgtcgtggactacctctaccacaagctctccggcggcggcgagttctacggcggcgtggccatggtcgacgtcgacctcaacaagtgcgagccgtgggagcttccagacgccgcgcgggtgggcgccacggagtggtacttcttcagcctgcacgaccgcaagtacgccacggggcagcgcaccaaccgcgcacccgctccggctactggaaggccaccggcaaggaccgcgccatcgtcacccgnctgcgagccgtcggcggtgaggtggtcgggatgagga

SEQ ID NO: 419861 - DNA, 488 bp, Oryza sativa
ggaagttcaccgaagaaagccttttctttccccctcttttttctacaagtatgattaaacggatttaacggtgccctctcatagtttcagcggcttcaacatcaaaacttcttatatcacagacaataacaatacaatgaacattttcatgcggagtactaacctacaacacctctcagatcgaggacaaagcccagagagaggaaaccacccatcgtcttcgtcgcattagatacacacatttgcaataccggcaaaacaccgccaaacgggatgctcctggagcacaaatgtcgctcagcagtcgaagttggcgcagctgttggtggtggtggtctcggagctgccgatgaacgggtcgatcttgacccagaggagggagaagacggaggcgagcaggacagaccagagcacgacgatggtgggcgtccggttctggcgacccatgagacccttgaggaaggggtacaagtgcatgatcacccaca

SEQ ID NO: 419862 - DNA, 528 bp, Oryza sativa
tcgttaggagtagattgtttcaatataaaggaaattgcaaagaaggagagttatttaactacattccaatggtccgatggaggatttggatttttatggaattcacgtgtttccccgatgttgtggcgagctgtggcaggacctcctgcccaagcatggtttcctgcttgtgcgtatgccgtcatgccgtttgagaattggtcgggatcaatgaagtttagatttcaagttgtgtgttctagttttcataaagggcgtttgcgtattgtgtttgatccaacaggtgctcaaacaaatcctgagttgaatgtcgcgtattctcacgttattgatatttcagatactcaagattttaccatagaggttcctcatatgcaaacacgaactttgttaactagggctgaaccgcatttacactggttaccacacaatacggcactactttgttgccaccgttgtccactggttatggaactatttgctgttatggtgagactattcttgcacttctatagcacagtggatgca

SEQ ID NO: 419863 - DNA, 412 bp, Oryza sativa
ttcttacaaggcccgtggcctcctcgagatgtaccgcatcggcgagctcatcgtcaccggcagcgactactcgccgcagagcagcagtgctgacctcacgtccatcgttgagagccctacggcagcggcggcgcccgccgtgccggtgtcgaccgtcgcgctgtccaacccgcgggagaaggtgaaatgccggctcatggacaagaagagcctgtcctacaacgtgcgcctgttccggttcgcgctgccgtcgccggaccagaagctcgggctaccggtcggcaagcacgtgtacgtgtgcgcgtcgatcggcggcaagctctgcatgcgcgcgtacacgccgacgagctccgtcgacgaggtcggctacatcgagctcctgatcaagatatactttaagggcgaggacccc

SEQ ID NO: 419864 - DNA, 424 bp, Oryza sativa
acacagatgaatttcaaagagggattttgtatatcaaaaaagtctgaacccccatgatttgacccacgatgttaaaattcactagtcattatacacacaaatttttttggggcagcagtcaaaccagttatttgtataattggattggaacctactgaagggggcagcaaacttaagtagacaactggtttggtcaattgcaatttcacttagccacatgacttgtccatccaaagggggcatgtgagacttttcccctgcaacaaaaggtcaaatgccgggttgatgtccttcaggggaaccttgggaggtatgaacttggccaactccagctccttgttcaaatacttgtcggccaggaagggaatggcctgcttgggtttcacccctccgaagagggaccccattacgcatttgccggtgg

SEQ ID NO: 419865 - DNA, 383 bp, Oryza sativa
gtcacaggtgcttgcttagtttagcttagctttgctgctgctccttctcattcataagccagcagctagctagcaagcagcacacacatatatcacaggccatctctctatccctaattaagctatatactccatatagctagctaaacacaggaggagtggaggaaggagaggctagctgatctagctatctgcagtgattagttaaaatgatggcttctgataggttggatgcagaaaggatcatagagtacttcaagggcaagagcatcctcatcactggagcaactggctttcttggcaagattcttgtggagaagatactgagggtgcagcctgatgtcaagaagatctacctgctcgttcgcgccatcgaccaagca

SEQ ID NO: 419866 - DNA, 459 bp, Oryza sativa
agctcaattctgcagcttatttttcatcattttccacaaattgagaggttctccacaaaaaaaaaggcactacaccaattttgtcaggggtcatgcaaaggcccgctaagatttattactcaacagcgttctcacaattgagcattcaagtttcttccttgttccccaattctcagggaggatgttaaccgttgctttttgtgtaagagaagattaagaaaaaaaaaatgtacccatcctttttttccacgatggcaaaaaccatgtgttataatcttcaactaccaggtttcctcacaaacagcttttggacctgctccagtgtcaagaacattatcacattccatgatcccagtctagcaaagtttgggaggaagcctttgtaaaatgccagaggtccatcattcttcagcgttttcacgaaacaatcaatagtacttgtgtaggccgagtcaccca

SEQ ID NO: 419867 - DNA, 349 bp, Oryza sativa
tttcttttctagcagaagaagataattaacctgctcatttttgtatgtgcagaaaaatcaaaacaccgaccaaaagcaaaaaaaacaataaataagggtgtagagagttgttgagttgggtccgcgaatcgtggtttcccactagcaagcgcaagcgcaggcgcaaacgcaaacgccgccgccggtatgccggagcacgggtcgaagcccgacatcttcttcgccggccgcttcaccgcaagcgccatcgctgcatgcttcgctgaggtgtgcacgatccccctggatacggccaaggtgaggcttcagctgcagaagaacgtggccgccgatgccgcccccaagtacc

SEQ ID NO: 419868 - DNA, 474 bp, Oryza sativa
ggtcgggaggcttgattagctgttttatgccctgatcactggagatggaggaaagggaccctattgggaggtgctggggagcctggagcagcagaataggatgcttcctcctatgcctggactgactaaagctggatttagtgtggttgttcttgatggaaagctgcttgtcatggctggctatggtgttgattatggaaaagaatgtgtttctgatgaagtttatcagtatgatgctcgtctgaacaggtgggctgcactggccaagatgaacgtggcccgtcgtgacttcgcatgtgcagaggtcaatggtgcagtatatgttgctggtggatttggttctgatggcgatggcttgtcaagtgttgaagtatatgatccacaaagaaacaaatggacaataatagagagccttcgcaaccaaagtggggctcctttgcctgcagcttcaacggcaagctctacatcatgggt

SEQ ID NO: 419869 - DNA, 477 bp, Oryza sativa
gatcaggcgcaccaatattgattacaaaacatgaattgatgtgatgacaacaaaatatcaagacgctgttgcagtttctcaaccaaagttccactgcggtaaagattattcatgctggctgacaagtgtaggtccacaaaatctcgccttttacaaaatcacccatttagtcgccacaatttaccattagcgatacaaacttaaaacagaccataaaattcttctttatttcatacagctgcacgtctgcagcatgaaataaggctctggtaaatcctattatgcctgtgctggcgccgcctcagtagttttgtcttccttcttcccactaaaaagcctgccgacaccataaaaaatacctccccacatagctaagctggctagcacaaattgctcttccttccagttagccgggttcattggttcttgccaaatgttgaccttcggaggcccatggtgatctgcagcgccggcgag

SEQ ID NO: 419870 - DNA, 472 bp, Oryza sativa
ttgatgcgtgggaagcgatggcatctcgtctcggtgcggcggcggcggcgtcctcctcgtcttccccgctcgcccgcctcgtctcccgccgtggccttgccggcgctgcagatcaccatgggcctccgaaggtcaacatttggcaagaaccgatgaacccggctaactggaaggaagagcaatttgtgctagccagcttagctatgtggggaggtattttttatggtgtcggcaggctttttagtgggaagaaggaagacaaaactactgaggcggcgccagcacaggcataataggatttaccagagccttatttcatgctgcaaacgtgcaactgtatgaaataaagaagaaatttatggtctgctttaagattgtatcgctaatggtaaattgtggcgactaatgggtgattttgtaagaggcgagatttttggggcctacacttgtcagccagcatgaataatcttta

SEQ ID NO: 419871 - DNA, 479 bp, Oryza sativa
gtcgcccgcgccttctttgggggagaagcccacgagatcggcgacccgcgcaagcatgccgacggtctcccgcgaccccggatctctccaacatgtgtactgtcaagggacagaccaggagggagaggcctagaggagctcgccctcatggattgacgaagcagaagaggcaggaaataaaggaggcgtttgatctgttcgacacagataactctggaaccattgatgccaaagagttgaatgttgccatgagagccttgggatttgagatgacagaagaacaaattaaccagatgattgctgatgtggacaaagatggtagtggatccatagattatgaggagtttgagcatatgatgactgctaagattggagagagagacagtaaagaagaacttacgaaagcattcagtattatcgaccaagataaaaatggacgatatcagatgttgatattcagcgaattgcctaagaattag

SEQ ID NO: 419872 - DNA, 407 bp, Oryza sativa
tcgtccacgcgtccgcccacgcgtccgcccgccgtgccgcccgccacggcctccctcctcagctgcggcgccaccaccggggtcggagcagcgtggaagctggctaaagtcgagccggggtcttcggttgctatctttggcctcggcgccgtaggattagcggtagctgaaggggccaggatttgcggtgcgtcaacgatcatcggcgtggatttgaaccctgagaaacatgaacttggaaagaagttcggtgtgacgcacttcatcaatccacaagaacttggggacaaacctgtcagccaagcgatcatcgagatgactgacggtggcgcggactactgcttcgagtgcatcgggctggcgtccgtgatgagcgatgcatttcggagctcccgagagggatgggg

SEQ ID NO: 419873 - DNA, 531 bp, Oryza sativa
tcgttaaccgagagctcgctagtcgtcgtcctcgaaacgctcgcggcgactccggtggctgccgcgccgccgcctccggccgccgtaccagcctcacctcgcttcgatggaggatggagtgtctacttatactgttgatgaggctcttatttccatggggtttgggaaatttcaagcatttgtgcttgcgtactccggaatggccaagatatctgaggcaatggaaatgatgcttttgtcatttgttggacagtcggttcaagctgaatgggagctttctgcgcaggcagaatctctcatcacaagtgttgtttttgtaggtatgcttgtaggagcatattcttggggcatagtctcagacaactatgggagaagggttgggttcaatttcacagcccttgtaatggtggggctggtcttcttagtgcatttgcaccaaattacctttctttgatcgtgctgaggtttatggttggtgttggactgggtggtggaccagttttatcttcctggtttttggaattcattcct

SEQ ID NO: 419874 - DNA, 502 bp, Oryza sativa
gttactgaacgtctcagcgaattgaattcaattttatttcttgacaaatgtaacaagcaaatccatatttacaatttgtaggctactaggcacacacctaccaaaagaatcgccgccgtcgttgtcacgattccgccgccgtcgccgccgccgcatccaccgcgttctggtcaatgaagttgaccagcgcgaggccggcggcccagacgtcgtcgtccatcacggactcctccggcgagtggctcacgccgtcgtggtaccgaacgaacagcatccccaccttcgtcagcctcgccatcgccatcgagtcgtgccccgctccgctcatcagcaccggcgttttgccgccggtccggcgcacgcccgccgccattgacgagatcgtcgaccgcgtagcgcgctccagccgcgacgtcagctccgtgtcgcacggagttgccgcccccgcgtgcttctgctcgacggcgcagtcgaccaatctgtcgtcgcatctgtgaagaac

SEQ ID NO: 419875 - DNA, 483 bp, Oryza sativa
  unsure (1)..(483): unsure at all n locations
gagcaaattgagggcatatttaggttcaaatccaacttattcataaagcatactgctgtcccacaggaaactgtttcataaaactaacatatcatacggactcgatggtccattaaaccagacacaagtagacatcagcaccacaaatacttgacgaacagaggctcgggatgaccaggcacatcggcagctccaccaaactggctgattactgaccaccacggaggcggagcaccaggtggagggtggactccttctggatgttgtagtcggcgagggtgcgtccatcctccagctgcttgccagcgaagatcagacgctgctggtctgggggaatcccctccttgacctggatcttggccttcacattatcaatggtgtcggagctctcaacctccaaagtgatggtcttcccagtcaaggtcttcacgaagatnttgataccaccacggagacgaagcaccaggtggagggtagactcct

SEQ ID NO: 419876 - DNA, 380 bp, Oryza sativa
cgtacggctgaaggagcaacatcgtgccttttcaccgaataccaatacgttggcgttttcatgtcgatattcgcggtggtgatcttcctcttcctcggctccgccgagggattcagcacaaagacccacccctgcacatacagcaaggacacggagtgtgagcctgctctgttcaatgccctgttcagcaccgtctgcttcctgcttggagccatcacctcagtggttactggcttcctcgggatgaagattgcgacttacgcaaatgcgcgggccaccctggaggcgaggaagggtcgtggctaggccttcatcaccgcgttcccgttgggagcggtgatgggattattgctggcatcaaatgggcttctggtgcttta

SEQ ID NO: 419877 - DNA, 401 bp, Oryza sativa
cttcactgtcgttcatgcatgcgttgatgcatgcaggtgctttggcagtactgctggattgaattaatggatcaagactgaatttatctataggttcgccttcagcaccttgccggtgaataacgccggcaatgccgcgagccgtgtccgacgggggcgaggccatcgacgccgacatcgccagccggacgtcatcgcacagccacatggacggcggccatcatcatcatcatcacggccacaaggtcgagttcccaccgaagaagaagctcatcgacgagttcaccgacgccgtgaaggagacgttcttcgccgacgacccgttgcggaagtacaaggaccagccgatgtcaaagaaggtgttgatcagcctgcataacttcttcccggtgctggactgg

SEQ ID NO: 419878 - DNA, 467 bp, Oryza sativa
gacacaagggtagattcattgctgcaaacattatagcataggttcaatgtcaaaatattacaatcatcagttcatcacatcacaaaccagcacacatgtgctctccaagaattacatcaaatcggattgttctcttccacccttattagcaaggagcactggagatgaacacatctcacataagactagacaagattacaacacacattgcttattaatggtctagattaatgaaaacaacatgaagcaaaccataattaaacataataagcatcatcagacacaaccacagaggctagtactactagttgtaatgcagctgcaaccatgccattgatgccaatggccatggcgtgcgagctctccatggtggctcagaactggaaggcgtcggccatggcggtggcgacgatgggctgggccgcgaacggcggctgccatgggcggagcagcgggtcgtcggggat

SEQ ID NO: 419879 - DNA, 525 bp, Oryza sativa
  unsure (1)..(525): unsure at all n locations
ctaacgttcgccgtacttctttgaagttgaacgtgctccgccgccgccgttcccactccttctccgtcgccttcctctactggttctacgtcttctcatgaactcatcgccttcctcccaagaacaccatctccagcctctaattgattagatcttgatttctttttcatcctcctactagtttctttcttgtttctttggaatttttttgatctcttgaagagatccggttcttggattaagttttggacaagaaccgtactgtgaccatgtcgtcgccttcgcgccggagctccagcccggagagcaacaccagcggcggcggcggtggcgccgacgagcggaagaggaagaggatgctgtcgaacagggagtcggcgaggcggtccacggcgaggaagcagcagaggctggaggagctatcgccgaggcggcgcgccttcaggccgagaacgcgctcgtcgaggcgcagatcggtgcctacgcggnggagctgagcaaggtcgacggcgagaacgcggtgct

SEQ ID NO: 419880 - DNA, 547 bp, Oryza sativa
ctctttgttttttgggttacttttgagcctttggatgcaacagccctggtaaatttcccttggctattgttttggccccaacaagagaactcgcgaaacaagttgagagggaattttctgattcttccaatgtggaaacgatctgtgtatatggtggaactccaattagccagcaaataagacaactcaattatggagttgatgttgttattgggacaccaggacgagtaattgacctgcttaaaagaggtgctctgaatctgtcagaggtccggtttgttgttcttgatgaagcagaccagatgttgtcagtgggttttgatgaagatgttgagacaattttggatagagtacctccaaaacgtcaaaccttgatgttctctgcgactatgccaacttggattcagagactcacccagaataccttaagaatcctgttacaattgaccttgtgggtgaagatgatcagaagctagcagaaggaatcagtctttattctatcgcttcagagggccatgccaaacctgctgtccttggagaattgatt

SEQ ID NO: 419881 - DNA, 510 bp, Oryza sativa
ttcttagcaaaatccaagaaggggagagagagagagagatggatcctaggttgagctactgttgctacctccatggctgtctctgcgtgctgctgctgctgctgctgtgttcttggagagcagcagatgctcaggctcagcaaccaccacctcacactgatccaaccgaagcggcggcgctgaacgcgatgatggcgaggctggggctgagcgcgccgccgtcgtggaacatcagcggcgacccgtgcagcggcgccgcgacggacgacacgccgctggacgacaacccggccttcaacccggccatcaagtgcgactgctccgatcacaacaacacgctctgccacatcaccagactgaaaatcaacacgctggatgtggtcggcccgatcccagaagagctcagaacctcactcacctcatcaagctttggggggactcccgtgtcgctctctccagggcgacccgggaggcgaccgtcgccgaggcccactctccctacgtgcgcgc

SEQ ID NO: 419882 - DNA, 446 bp, Oryza sativa
ggcacataaactgcaggggaaaaccatctggtcactttatacaagccgagcatcagctaaaagaagttcacgatgcctcagggctcaggcagacagaaactgaaaacgacgcagcaagttaaaaacaaattacaaaacctacatgagacaaaattaaatcgtagagatagtgtcccactaccaccaaagcaacattatttgcagaggttcctttttttcagcccacatgatcccgtggtctagttattattcgaaaatctccgtgcgtcctcaaattcgatcgaattttaaatctctctctcctagaagagcttgaatagaactcctccgtgcgtggcgaagaatggcgcgaacaccagcgactcgacgggcatgagcttgatgaggatgttcagcgacgggcccgacgtgtccttgagcgggtcgccaatggaggcgccgatcac

SEQ ID NO: 419883 - DNA, 508 bp, Oryza sativa
gccagagaggccatactcacacaagcacaacacaaaagtggccatggctctcctcctctcctaccccaggcgccacccatccatccacctcctcatcctctccgcctacgccctcttcctcctcccaatcttggatggattggagctgggaggagatgggctctacagggagatcctcagggatgagacggtgctcaggctcaaagaacttggcaagatatctgatggggaaggttaccttgagaggacatttttgagtcctgcctcaatcagagcctctgctgtcattatcagctggatgaaagatgccggacttaccacgtggattgatcaaatggggaatattcatggtcgatttgaaccgaccaactcaaccaaggaggccttgttgatcggatctcacatggacactgttattgatgctggcatgtatgacggagcttgggattatctctgcaatctctgctttgagggttttgaaagttctgggagactgaagagacttact

SEQ ID NO: 419884 - DNA, 434 bp, Oryza sativa
tcgtccacgcgtccgctttgtcaagacactgaccggcaagaccatcaccctcgaggtggaatcttctgacaccatcgacaacgtcaaggccaagatccaggacaaggagggcattcccccggaccagcagcgtctcatctttgccggcaagcagcttgaggacggcaggacccttgctgactacaacatccagaaggagtcaacgcttcaccttgtcctccgtctcaggggaggcatgcaaatcttcgtgaagactctgaccggcaagaccatcaccctcgaggtggagtcttctgataccatcgacaatgtcaaggccaagatccaggacaaggagggcattcccccggaccagcagcgcctcatctttgctggcaagcagctggaggatggcaggacccttgctgactacaacatccagaaagagccaccct

SEQ ID NO: 419885 - DNA, 498 bp, Oryza sativa
gaaacagtcggggtaatatctcggttttatttgctctagtatgaccaatgaaatatacatcttgattctcaaatgaaccatgtgcacaaccatccatcaatctacactctacactttttccatggccatcgaatgcgaccgccgcgcgctactccgatgtaccggaactcgagagagctccaaactttgaattaaaatttatgcaactatgctacgtatatgtacagtttttgcagtgtcgtacactacacacgtcacgtttcagaagacgaggcaggacttgtcgaggtcatagcccatcttctccaggcccggccgcaccgtgcactcgaccatcgccggcggcccgcacacgagcgcgagcgtctcgccgtcgcccggcggcaggtgctccctgagcgtccgctcgtccaccctccccacgctgtacttccacccgtcctccggccgcgccaccttggtcaccacgtaccacaccttgagccgcgccgggtgcgc

SEQ ID NO: 419886 - DNA, 471 bp, Oryza sativa
cctcaataaataggtacaaaaaaacatgacatttcatttgagtaattctcgaaataaattacaattatttcaggtgccttaacatgcaacctctgatagctgtttgatgtttatggcagcaattaccgtgggcacacaaacaaaaaatattatttatacacatgcaaacctccatttgcaggtcatcatacatttcgtcaagcaaagcatgttgcgagtgtccatcgtaacataaattatttaagcattatttactcttcgtatatttacaagatgcaccaacggtttgcttcattagtactcgccgatcacagcatcacctgcgctgctgctagccttgcaattggaaccctgaatggggagcaagaaacgtagttcagcccaaccttcgcgaaaaatgcaactgaagaaggctcaccaccatgttccccacaaatgcccacctctaaatcaggccttgccttccggccc

SEQ ID NO: 419887 - DNA, 515 bp, Oryza sativa
  unsure (1)..(515): unsure at all n locations
cagaacacatgttttttttttctgatgaaaggataaaggccatgagacagatgataatggcggaaacaattgaacacaggcagatagcactagatcgcctcttgccatatcagagacttgactttgaaggaattttccgtgcaatggatggacttcctgtgactattcgactcttggatcctccactccacgaattccttccagagggtaacgttgaggatatggttcgtttgttgtcttctggaaacgtatatactcaggaggaaattcttacaagaatagaaaaactttctgaagtgaatccaatgcttggcttccgtgggtgcaggcttgggatatcatacccagaattgacagcaatgcaagcccgtgctatctttgaagctgctatttctatgactgaacaaggtgttaaagtttcccagagataatggtgcctctcattggaacacctcangaactcgcccaacaagtagatgtaattcgtgaagttgccgaaaaggtttttgcaaatg

SEQ ID NO: 419888 - DNA, 548 bp, Oryza sativa
  unsure (1)..(548): unsure at all n locations
tcaagcgcaagagtgttgtgggtctgaactttgattttctggtgttgaacttgacaaagcactcatcctacctcatatacaatgctgctctattcttcagccccttcatccagagacagtatcatgagacatatggtgataaagagatgattcctgtcgcggcaaatgatgttgccttttctgtacacgcggttgccttgacagcttttaccctttttcaagtattcatctacgagcgaggaaaccagaaaatctccaaagtctgcatatcaatcactgctattgtgtggacagctgctattgtttgccttattgtagcttggccaaaaagtaactggctctggcttatagatgtgttcaattcaatacaggttgggatgacagcaatcaaatacattcctcaggccatcatgaacttaggaggaagagtacaattggttggagtattggcaatattttacttgatcttacaggaggggtgctaaactntggccagatgggtgtgcaatcatagatcaacacacgctagtgaacttctattgaaatat

SEQ ID NO: 419889 - DNA, 521 bp, Oryza sativa
ctcccttcctcctgcttttttatgcgactgctaattttgaagtgccatttctcatcgtcaaggagaggtggcattaatccgcagcaagtgctcgatgacagatcattattatgctcctctgaggcttattcttctcttgatattgagtgccacctgttttggctctgaacttgatgttcagtgcttgaaaaccatattccagtcagtgaccgatcccaatggtatactcaaatcctcatggagttttgtcaacaacggcacccctggttacatctgcaaatttactggggtggaatgttggcatccagatgagaaccgagttctttctttgcgtctcggcaaccttggtcttcagggtccatttcctgcaggccttcagaactgtactagtatgactgggctagatctgtcgagtaacaactttacaggactcattcctaaggacatttccagcaaataccatacttgacatcactggacctcttctacaataagtttcaggccaaatcccataaatattt

SEQ ID NO: 419890 - DNA, 469 bp, Oryza sativa
gaatgactgagaacatatgtgagagcaaagtaagacaggcaagctccctgatattatatcaggctcacaatatttgtgcatacaaactaaaataatttctcaacactgcttgatctacctatcatctccctttgtattcatgtgccgtgctgaaatcacaatgtcacattattttatcaatgctttgcccacacacatgaaaaacagctttcagatcaatggccatatttcttcaatcctaccaagtaacaacacaaatggtggctgctgagctgctttgatgagaggcggaagagaattcgagtactgaaaggcacatttagacatctgatggaagaaatgggtagtcagtgtatccaataactggatcagagatgtagaaagtctctctgttgtattttgtgagaggagcatctatttcaaacctctcaggcaaatcaggattagacaaaacaagcgcccataagca

SEQ ID NO: 419891 - DNA, 504 bp, Oryza sativa
gtcgtgtcggtcgacctggccgggctgcgccgcaggcggctggggcgcctggcgccgcggttcgccgtcgacgggctgcgcaacctcacgcggctcgaggccttcagcgcgcccgggttcggcctgccaggctcccttccggcgtggctcggcgcggggctcgcgcccaccttccagctcctcgacatctccggctgcgccgtcacgggggagatccccgcctcggccatcgccggcctcagcaacctcaccactctcaacctcgcggggaatctactctcggggcagctccctggcagtgctctcgccgggctcgctcggctcaagactctcaacctctctggcaatgccttctcaggcgagctacccaaggcggtctggtcgctcccggagctgagcgttctcgatgtgtctcggaccaacctcaccggcgcattgccggatacagggctcgcgcttccatccaatgtacaggtggtggatctgtccgggaacctcttctat

SEQ ID NO: 419892 - DNA, 419 bp, Oryza sativa
ggctactgctattactacccttggcattgcttccacttccaggggaagggggctcgttttgcgcgccaaacgattcaaacatgccagactgcagtgcattctgcaaccactcgaagaactcctcttcatcgattccgccatccatgtttacaccattagggatccctccacccctctgcgccgaggtgctccccttgccactattctgctttaacaagctggcattgacatggaagctcggcttgtgagtgttcgcggggcatctcattccctgacaggtgaaccactcggtgacatcgaaaatgatgctttcagcacaaacatatgcatgaggcaattcaggcttgtgcagcaacccaaatagaactggttgaaaagactgctcaacccatccatccccatctttagcttggtgaaat

SEQ ID NO: 419893 - DNA, 177 bp, Oryza sativa
tttttgtctttgtcttagctcttaaacaatgcgtggtaccttgtcatactgtttgcgttgcaatgctactagccgaagtatatgccagcttcttattcataaaaaagaaaaaagactgaacgaacaaaaatgaaaaaaaacaaaaaaaaaaaactgaactaaaaaacaaaaacatag

SEQ ID NO: 419894 - DNA, 568 bp, Oryza sativa
  unsure (1)..(568): unsure at all n locations
agatactcctggttttttgacaaaggagcaagtggaagcgtggaagccaatcgtagacggcgttcatgccaaaggaggaatatttttctgtcagatttggcacgtaggaagagtctctaataacacttttcagcctaatgggcaggctccaatttcgagcaccaataagtcactaaaacctgcagtaagagccaacggcatagatgtggctactttctcaactcctaggcgattagagactgatgagatcccttttgtcgtgaatgattacagggttgctgctagaaatgcaattgaagcaggatttgatggtgttgaaatccatggagctcatggttatttgatcgatcagtttctaaaagaccaagtcaatgatcgttctgacaaatatggtgggagcttagagaatcgctgccggtttgcgctagaagtggtccaagcgtaactgatgaaattggagctgacaaggttgggataaggctgtcaccctttgccagctattcagaggcagcagactcaaacccagaagctctaggcctatacatggcanatgcactaaacaagtttg

SEQ ID NO: 419895 - DNA, 394 bp, Oryza sativa
atcgtgttcaaacgcgcacgtggaagcgtgggtgccaatcgtagacggcgttcatgcctaaggacgaatacttttctgtcagagttggctcgtaggaagagtctctaatcacacttttcagcctattgggtaggctccaatttccagcaccaactaagtcactgaaacctgcacttatgagccaatcggttcgatgtggctactctatcatctcctaggttactagagaccgatgaaatcccttccgccggagtgactacacgggttgctgctagaaatgcatttaaagcatgaactgacggaattgaaatccatagagcttatggctatatgctcgaaccggtccttaatgaccttgccaatgaacgttctgaccaattatggtcaaagctta

SEQ ID NO: 419896 - DNA, 492 bp, Oryza sativa
gtatcaacattgctataattgatttaggcgagtacacaggctacaaacaaaagtataaagagttctccaaaagcggtaatgatacaaatagcccagccccgtatgacgattctagtaacacaatatttcaggtgaacaacaaaggtgtatcagaatttattggaacccaaattccacaatgaactgcgacacaaataatggtgaaacccaactattaagtatgctccagtgacatctttcgccaaatgcgatgcagcagcttaggcctggttcttcttgggcacttggaggcgctcccggaaatcatcttccatgagcaccaagccatcacgcagaacgatcttgggctcccaccccaaaacttcctttgcctttgtaatgtctggcttcctctgacgaggatcatcaggagtgttctcagtcattgtgacggtaacctctgggttgatcaactccttcacattctcagcaagttccagcatggtgaattca

SEQ ID NO: 419897 - DNA, 522 bp, Oryza sativa
tcgttgattcaaacccgccgtttccaagcttgctctcctctcccccccaatccttccctcccgagtggcagggtgctcgacgggatggcgcagaaggaggccaatggcagcagcaacggggagcacaccacccgcccgccgccgacgccctcgccgctccggttctccaagttcttccaggcgaacctgaggatcctcgtcaccggcggagctggcttcatcggctcgcacctcgtcgacaagctcatggagaacgagaagcacgaggtcattgtcgcagacaactttttcactggttcaaaagacaacctgaagaagtggatcggacacccaagatttgagctaatccgtcatgatgtcacccagcccctgcttgtggaggttgaccaaatctatcaccttgcttgcctgcttcaccaatcttctacaagcacaaccctgtcaagaccatcaaaacaaacgttatccgaaccctgaacatgcttggacttgccagagagttggagctaggattttgtgact

SEQ ID NO: 419898 - DNA, 491 bp, Oryza sativa
tttttgggacacagatttctaagggccattccacaggtaaattcatggttcagattttaggacttcagatgagaaactactagatacacatccatcagatggatggatgaaatcaacagtcgagacaacttactagcaaaatatccagttctagaacacagaaacagagtacttcactaacaatctactactacatgtgagtagtattagcaccattcacgacaccaaataagagttcagcagcaaaagcaggaagtagtcacagatgaaacaccagagcccctcccagagatgagaaagcctaagccctctcaccacggatcctcctagccagctgaatgtccttgggcatgatggtcacacgcttggcatggatggcgcacaggttggtgtcctcgaagagacccaccaggtacgcctcggcagctttctgaagggcaagcaccgcatggctctggaaacgaagatcagttctaaaatcctgggcaatc

SEQ ID NO: 419899 - DNA, 500 bp, Oryza sativa
ccggaagtcagaattgtttggaaaaaggaactcgaagtcgccgccggatttgggatttggagagcgcgcgaggtaaaccaaagttctttttccgatggctcgtactaagcaaactgctcgcaagtcaactggaggaaaggctcccaggaagcaacttgccaccaaggctgctcgtaagtctgctcccacaactggaggagtgaagaagcctcaccgttaccgccctggaactgttgctcttcgtgaaatccgcaagtaccagaagagcactgagctgctcataaggaagcttccattccagaggcttgttagggagattgcccaggattttaagactgatcttcgtttccagagccatgcggtgcttgcccttcaggaagctgccgaggcgtacctggtgggtctcttcgaggacaccaactgtgcgccatccatgccaagcgtgtgaccatcatgcccaaggacattcagctggctaggaggatccgtggtgagagggc

SEQ ID NO: 419900 - DNA, 474 bp, Oryza sativa
ctctttgcgacgtcgtccccgacctggagctcgacaccacccacggcaagatccgcctccacgacttcgtcggcgacgcctacgccatcatcttctcccaccccgctgacttcacgccggtctgcacgacggagctgtcggagatggcgggctacgccggcgagttcgacaagaggggcgtcaagctcctcggcttctcctgcgacgacgtcgagtcgcacaaggactggatcaaggacatcgaggcctacaagcctggccgccgcgtcggcttcccgatcgtcgccgacccggacagggaggcgatcaggcagctcaacatgatcgacgccgacgagaaggacaccgccggcggcgagctccccaaccgggcgctccacatcgtcgggccggacagaaggtgaagctgagctttctgttccccgcgtgcacggtgccggaacatgcggaagtgctgcgcgcgactgacgcgct

SEQ ID NO: 419901 - DNA, 466 bp, Oryza sativa
aaaagcaggcaatgatcagtgttcatttaccagtctccaaagcaaggtaggcagcatttagcatgtcattacaagaaaaaccatggtgctactgactaaaagttacagaactaaagatggcaacaatgttttaagtgggatggtcaatggagatcatcatggcattgcagccaacacatatgaccgatcacaacgttttaccaccaccaccaccaccacttgacatgagtgaggcggcagcagcgcctgcagtcgggacgattccagtcgaattgcctggtttagagagatgcagaagcggtgctagatattcacagaacgaagtgacggctgaaacgacatcgttgtaattgtcagcagcagcaggggccgtgatttccactagctgtattgcaggagtgattggcacagctttcttggtagcatggagttttgtcatcttgctaacagaggtaacggtcacagt

SEQ ID NO: 419902 - DNA, 468 bp, Oryza sativa
ccctttgcgacgtcggccccgacctggagctcgacaccacccacggcaagatccgcctccacgacttcgtcggcgacgcctacgccatcatcttctcccaccccgctgacttcacgccggtctgcacgacggagctgtcggagatggcgggctacgccggcgagttcgacaagaggggcgtcaagctcctgggcttctcctgcgacgacgtcgagtcgcacaaggactggatcaaggacatcgaggcctacaagcctggccgccgcgtgggcttcccgatcgtcgccgacccggacagggaggcgatcaggcagctcaacatgatcgacgccgccgagaaggacaccgactgccgcgagcttcccaaccgggcgctccacatcgtcggaccggacaagaaggtgaagctgaacttcctgttccggcgtgcacggggcggaacatggctgaagtgctgcgcgcgaccga

SEQ ID NO: 419903 - DNA, 462 bp, Oryza sativa
gttttgcactgcaggcctctgtcgttataaacaacattggcgtgatgattgcttacatgattatcattggtgatgtattatctggaacataatcaaccggtgttcaccatcgcggtatacttgagggctggtttgtagctcatctatggaattcacgtgccattgttcttattgcgacgactcttttcgtgtatgctgcattggtgagctttaagcgtgtggattcattgagatacacctctgacctatccgttgctcttgctgaggtttatgtcgtcattactgctggaattgctatcatcaaactcttcaatggaactgtaacgatgcccacactatttccagaactagatgggattagttgcatctggaagctcttcacagctagccctggtcttgtgactgcctacatctgacattacaatgtgcacagcattgacaatgagcttgaagacagaacac

SEQ ID NO: 419904 - DNA, 459 bp, Oryza sativa
ggccgtccttttgtgaatcatgccttttcatgattttgcgaaggatgaatcggtgtgatgcagtgtaacggggaagtgaaacagattacaaatcggagcaccaaacatagcaacgattcaacgaatgtaccaccaccacaccaaaaccaaagctaaaagagtcgatgatgatttgggtatgcagtaaaaatctgaactgtaaagcgacgagccggtgatgatgagcgtgagatttggcattggtttctttataggaaagcgtccatttcgagcaccttgaggacctcatcctggttgttcagcttggccacctcgatgggggtcttcccgtccagattctggggcgtgacagcagcgccatgcttcagcagaagatccacacattctttccgaccatatccagcagcgtaatgcagtggggtgttcttgttcttatccagtgcgtttacagcagcacct

SEQ ID NO: 419905 - DNA, 452 bp, Oryza sativa
ctgcgcctcctggtgccgctccggaattattgcgcccaaaggtccattatgtgtactactgggccagaaatctgggaggattctaaagggaaggtggatgtattcattggtggaattggaacaggtggaacaatatctggtgctggccgtttcctgaaagagaaaaatcctggaattaaggctattggtattgagccttcttagagctacatactctctggtggaaaacctggcccacattagattcaaggcattggggcaggatctgttccaaggaacttggatagtgaagttctcgaagaagtgattgagatatctagcgatgaggattgtgagacagcaaagcaattggctctttaagaaggattactggttggaatttcatctggggcaggatcagctggtgccattaaagttgcaaaaagaccagaaaatgctgtaaagttggtagt

SEQ ID NO: 419906 - DNA, 405 bp, Oryza sativa
  unsure (1)..(405): unsure at all n locations
cttcctctgatcctccattgctgcaaaagaagaagaggtagacgaaggaggaggagatcaggtgatcatggggactcaggtggcagataactacccaccggccaaggatggccggagcgcgcaggagaaggcgatcgacgactggcttcccatcacgtcgtccaggaacgccaagtggtggtactccgccttccacaatgtcaccgccatggtcggcgccggcgtcctcagcctcccctacgccatgtccgagctcggctggggacctggantcgcggtgctgatcctgtcatggatcatcacgctctacacgctgtggcagatggtggagatgcacgagatggtgcccggaagcggttcgacaggtaccacgagctcgggcagaacgcgttcggcgagaaagct

SEQ ID NO: 419907 - DNA, 522 bp, Oryza sativa
tttttgttttttcgttcaaatacaaataaacctttactacgtacacaaaaataagttatcttcaagagagaaaacaaaactagaggtacaatcattaagacccgcaattcggctagtagaaaattcgaaacaaaaagctttcaaactgcacgggcaaacatccttgttgcccggtgaaacccaacacaacaatccattgcatacattaggaatgccctgatgcgatgccattgtctgaaaaaactgaccgactcagacgacctacactgcacactacctggacagatttcttccagtacaccaattgacttcaccttccgcattgccccatggccaacagccctcaggtgctactgaaaccatgggacgcatgcaaacaatctgcagatcacgtctcaatcagctgataatggtacaaatctgcccacaaacttagaagcacttcatgtggacgatgcctggaccagattcatcgtattcggccttgggatccacatctgctgaaggtactgagagaagcca

SEQ ID NO: 419908 - DNA, 479 bp, Oryza sativa
gcttgttcaattcaatcgagcagtagctaattgcatagtgatcgatcgatctgtatagatggtggtggccggcaagaagcagggacggcattctttttctgcatcatcatcgtcgtcttcgtcttcttattgttcagtagtgcagctgggtcatcatcagcgcccacagggtgaggaccctctcatcggcatcaaagcagcagcagcaggaggaggaggaataatgagaaagggcccgtggacggagcaggaggacgtgcagttggtttggttcgtgcggctgctgggcgaacggcggtgggatttcttagcaaaggtgtcaggtttgcgcggcggcgggtgatgagcatatgcgtgcgtgcatctaatctatcgattaattgttgatgatgtcgatcagatggatggatgcatgcatatgccgtacatagtagatttgatgatagtaactgacataaatataatgtatgcgtgcgatc

SEQ ID NO: 419909 - DNA, 503 bp, Oryza sativa
tttttgtgtttgcaaacgacactagatagatattgacttaatctcggttttcatgatctcactacattcctcctgaaggtgatacacttatacacaccagaactttggatcgctttgatagcgcaccaacctaaacgagcattcaaatcaaatgagccctaattatgattcaccttctctcaagaagataacacacatattaattagacagttcaccagcaaatgtgataagctacagccctactactcgaacttgttgatacgggagaggtcgcatgagcatcttgtcgatctttgtcgctgccggggtcgccaacgaacctgccgacggagcggagggagggcacgagggcggaggcctgagacctggggtggggacagacgttgccgagggtgcatagatggaactcggcaaggccgtagccgctcagggtgtccctcacctgcctaaccgggttcggtatcttgtaccgattgaaccgtttaacgtactgcagcgattt

SEQ ID NO: 419910 - DNA, 500 bp, Oryza sativa
attttctccggatgggcccatatccgatgaagcacttgagagagttcgtgcattgttagatgagataagacctatagatgttggcctagacaatgaagcacagattgctcgtaattggaataattcaacgcgtcaaccaaatggaagaagaggacgtaatggggctaaccagttcacatctccaatcaaatatttacacattcatgaaagtgaaagtttctctatgggtatattttgtatgccgccgtcatcagttattccacttcacaatcacccaggaatgacagttctgagcaagcttctctatggcacactgcatgctgaatcttatgattggattgatgtaactgatccaaccgatcaattacaggaactttcagtgagaccagcaaggcttgtcagagaccgtgaaatgtctgctccagagaccaccattctttatcccaatagaggtggtaacatccacactttcagagcgatcacaccttgtgctctctttg

SEQ ID NO: 419911 - DNA, 499 bp, Oryza sativa
cgcgctcgctgcctcttgtcagcggcggagctctctagaaggagcagaggagtcccccccaagcgatcgattcgatcccctccgccgccgatcgcctcgccgaagtctccgagaaacacttgagggatggctgaagaggatatccagcctattgtctgtgacaatggcactggaatggtcaaggccggttttgctggtgatgatgcacccagggctgtctttcctagcattgtaggcaggccacgccacactggtgtcatggttggtatgggccagaaggatgcctatgtgggtgatgaagctcagtcgaaaagaggtatactgacattgaaatacccaatcgagcatggtattgtcaacaactgggatgacatggagaagatatggcaccacaccttctacaatgagctccgtgtggctcctgaagagcatcctgtattgctgaccgaggctcctatgaaccccaaggcaaacagagagaaaatgacccagatcatgt

SEQ ID NO: 419912 - DNA, 526 bp, Oryza sativa
  unsure (1)..(526): unsure at all n locations
ctcgcatcgcatccatcctctcgtgtcgccgccggcggaggctgcggcgagccttcaccccccacccgcccaccgccggcgagccacggcgtgggcgacctcctctcctctcccgatcccctctcgcccttaggtaggggcttctccccagtccccaccacacgcgcgtgcgtggccgacgagcaccccaggttcggatcggatggaagaccagaagaaaaatgcaaaaccagaggggtcttctggctcgcaaaggggagctcccccggcacctgatgcaggccttcccaatccttttgatttttctcagtttagcaacttgctcaatgatccatctataaaggagatggcagagcagattgcaagcgaccctgtgttcacccagatggcagagcagctgcagaagagtgctcatgtgaccggngaacagggtggccctgcattggatcctcagcagtacatggaaacaatgacacaagtcatgcaaaaccctcaattcatgtcaatgcagaacgtcttgggatac

SEQ ID NO: 419913 - DNA, 422 bp, Oryza sativa
tctttagaactcacccatatgagacctgtactagtggccaacaatataagcatctggcctatgtgatctcctttctcccatacttctggagagccttgcagtgtttaagaaggtacttggaggaaggacatgatatcaaccaacttgctaatgctggaaaatatgtatcagcaatggtagcagctgctgttaggttcaaatatgctgcaacaccaacaccattctgggtgtggatggtcatcatttcatcctcaggtgccacaatttaccagctctactgggactttgtcaaggactggggcttcttaaacccaaaatcaaagaaccgatggcttcgtaacgagctcatcttgaagaataaatcaatctactacgtatccatgatgctcaatcttgcacttcgcctagcatggactgagagt

SEQ ID NO: 419914 - DNA, 333 bp, Oryza sativa
gggaaggtgaaaaccttttataacccttgtagcatttgattggaaaaacagatgttcacaagtagatccagagctcccgaaactggaaaaacaaaaacccgggggaagggacccaaggaacataactgaggggcaaagggttaacatttttatgattgggcccagtttgcaacaagtactaaaaggttttactgaggatttgggggcctggagttggcagcaaaaacccttgatccccattccagcagttttttgctgggggcgaccttgggcgcgaccccctcaatgaagcacaggggggcctttttccccagggccatcctgaacgccttc

SEQ ID NO: 419915 - DNA, 495 bp, Oryza sativa
ctctgctcatcccctccttatatctccagccccaggagctccggagggttcccaatggcggtgaaggtctatgtcgtgtactactctatgtatggacatgttgctaaactagctgaagagatcaagaagggtgcttcatctattgaaggtgttgaggctaaaatatggcaggttcctgaaactctccatgaggaagtacttggaaagatgggcgcgcctcctaagccagatgtgccaacgatcacaccacaagaacttactgaggctgatggaatcctgtttgggttccctacaaggtttggcatgatggctgcgcagatgaaagcattctttgatgcaaccggtggcctgtggagtgagcagagccttgcaagcaagcccgccggcatcttcttcagcactggtacccagggcggtggtcaggagactacaccgttgacagcaataactcagttgacttaccacggcatggtgttcgtcccggtcgggtacacc

SEQ ID NO: 419916 - DNA, 507 bp, Oryza sativa
tttttgtttttattaacagcattacttcactatattccacagtaatttcggaagggataaataaaaaacatacggttacattttacatacaaatgacaaacataatccgttcgtcactttcaggcaacagaacagcaaatgcaccactacacccaaacagcagattacacataactagagtacttaccgaatgatcgatcgatcaatcgaagcagcacgggaaacacacacgtggaagcatctacgtcgtgcgttggtttattacacacgaaaccgacggcccagatctctccctccctccctcaccatcagtctcagtccacctgggtgaagcggaggtagcacttgttggagggcagctgggcggtctcgaacccggccgggaacctcgccttggcctcctcgtcggagacgccgggggggatgacgacgcgctcgccgggcttccagttcaccggcgtcgccacccggtgcctcgccgacgtcagcagcgcgtccgtcgcgcgc

SEQ ID NO: 419917 - DNA, 450 bp, Oryza sativa
cttctcctagctcgccaagatgaggatttccatggctctcgcggcggccgcgctgctgctgctgctgtcgctggcagcggcggacatgtcgatcgtgtcgtacggggagaggagcgaggaggaggcgcggcggctgtacgcggagtggaaggccgagcacggcaagagctacaacgccgtcggcgaggaggagcggcggtacgcggcgttcagggacaacctccggtacatcgacgagcacaacgccgccgccgacgccggggtccactccttccgcctcggcctcaaccgcttcgccgacctcaccaacgaggagtaccgggacacctacctcggcctcaagaacaagccgcggagggagaggaaggtcagcgacaggtacctcgccgccgacaacgaggcgctgccggagtccgttgactggaggaccaagggggccgtggctgagat

SEQ ID NO: 419918 - DNA, 415 bp, Oryza sativa
attaacagcattacttcactatattccacagtaatttcggaagggataaataaaaaacatacggttacattttacatacaaatgacaaacataatccgttcgtcactttcaggcaacagaacagcaaatgcaccactacacccaaacagcagattacacataactagagtacttaccgaatgatcgatcgatcaatcgaagcagcacgggaaacacacacgtggaagcatctacgtcgtgcgttggtttattacacacgaaaccgacggcccagatctctccctccctccctcaccatcagtctcagtccacctgggtgaagcggaggtagcacttgttggagggcagctgggcggtctcgaacccggccgggaacctcgccttggcctcctcgtcggagacgcccggggggatg

SEQ ID NO: 419919 - DNA, 476 bp, Oryza sativa
  unsure (1)..(476): unsure at all n locations
gaggatcttcgtgcctgagggccagccgctggagagcgagccgaatgagccgctgcgcgttaatgtgctcttcaagcacgtccagaagatgctgaacagtgacagtgctgtgattgccgagactggtgactcctggttcaattgccagaagctgaagctccctgagggctgcgggtatgaattccaaatgcagtatggttccattggatggtcagtgggtgcattgctcggatatgctcagggcgctaaggacaagcgtgtgattgcctgtattggtngatgggagtttccaggtgacggcacaggatgtgtcaacaatgattcgctgtgcacagaacagcataatcttcctgatcaacaancgcgggtacaccattgaggtgggagatccatgacggtccatacaacgtcatcaagaactggaactacactggccttgtggatgccatccacaatggagagggcaaatgctggac

SEQ ID NO: 419920 - DNA, 456 bp, Oryza sativa
cctacttagggatagctggacgcccgtgcgaccggcccggcattcccgggcttcgtactcgcctctctttttgccctcctccgccgccgctcgccgccgttcgtctccgccgccaccgccgccgccatgagggagtgcatctcgatccacatcgggcaggccggtatccaggtcgggaacgcgtgctgggagctctattgcctcgagcatggcatccagcctgatggacagatgcccggtgacaagaccgttgggggaggtgatgatgcttttaacaccttcttcagtgagactggtgctgggaagcatgtcccccgtgctgtcttcgtcgatcttgagcctaccgtgattgatgaggtgaggactggtgactaccgccagctcttccaccctgagcagctcatcagtggcaaggaggatgcagtcaacaactttgcccgtggtcactacaccatt

SEQ ID NO: 419921 - DNA, 504 bp, Oryza sativa
gcgtggccgccctttttttaaaagaattattctttattttctaacaagcatagacaacactcttcagcatccagggggaaatgattcaaaattcagtctatttgggacaatatgagtggtagataagtccagcagggagaaacagcagggctcaccacaaacttttggggttacattcaaaacccagcatataaatttcaccttctaatagctactaaagcgaactggagcaaacattcctggggctaccaacagcatagtctgtcttgatgcttaaacctcctggacagtcaaacctgaaaaaagaaattcacaatcagtaacagctaacaatggctggtcaattcaacaaaagaaattttgtaccttatgtgtcagtgataaaaacagtaaagcacagaaggcaatgtaaaaaacatatataaattcaggatgaactatagacagctcaattgtgtgtattacagggttgtaagttggctggtctttaggctgcaccaatcc

SEQ ID NO: 419922 - DNA, 519 bp, Oryza sativa
ccctcctcctgaaaggcgcttgaactgcctgattcccccaccacatggctataaggttcccataaaatggccaaaaagtcgtgatattgtgtggaaagcaaatattccgcacactcaccttgcacatgagaagtcagaccagaattggatgattgatgcaggtgagaaaatcaaatttccaggtggtggaacacatttccatcatggagctgacaaatatatagcaaacatagcaaatatgctaaagttcaaagataacaatattaacaatgagggaatgcttcgtacagttcttgatgttggttgtggagttgctagttttggaggatatcttctttcatctaatgtgatagctatgtctttggcacccaatgatgtacatcagaaccagattcagtttgctcttgaaagagggatccctgcatatcttggtgttttgggaacaaaaagacttccatacccaagtagatcattcgaattagcccattgttctcgttgtaggattgactggcttcaaag

SEQ ID NO: 419923 - DNA, 489 bp, Oryza sativa
caccaatccgccatggctagtgttctcgccgtccccctcctgctgtgcctgctcgcctccgcctccgccgcccgcttcgccccggcggacaaccacctcctcgcctgcggcgcgacggcaccggccgtgctccccgacggccgacgcttcgtccccgactccggctgcgcctccacgcgcctccgctccccggcacctaccctcccgtccgcggcctccagcgcggccccgcagccgacccctctccacgccgccgcgcgggtcttctcctgccgcgcgtcctacgacctcgccgtccgccgccgcgggtaccacgtcctgcgcctccacttctaccccttcgagcccgcgctcgcgtccgcgcgcttccacgtcggcgccgccggattcctcctcctccacaacttctccgcgtcggcccccgtcgtgaaggagttcatcctacccgtccactccgacgtcctcgtcctcaccttcgtccccgagtcg

SEQ ID NO: 419924 - DNA, 493 bp, Oryza sativa
aaaagaattattttttatttcctaacaagactagagaacactcttcaattaccaaggtgcagtagtctgaaaaaacaaaaaataggccttcgcttagcctgctagacatttgccatatgctgataaattatctatcttcacgtgggtagactaggaatcacgaactggaatctatttcaggagcggtttcgacattgaatcgtatctgagggagcagccgagcctcgcttcttggcttctgagctgcagatgctcacagtgcgaaagggactcaaaagaagagactacttggggttggggtcctgtgagcctcctggttgccacaatttcttccggattatgaagatcatttcattctcctcagattctggacttgactcggcatctacagttgttactgcttcccagtgaagtgcgttgaggtatttcttgatgaattcgatgacagtgtccttgtctctcacgatgataaatccactaggcctaacgatgc

SEQ ID NO: 419925 - DNA, 464 bp, Oryza sativa
  unsure (1)..(464): unsure at all n locations
ttgtcgcgtgggcggacgcgtgggctccggcgaggctcacgcgcgctccgaagcttcggatagcggcagtagtcagtgcattgatggcgaccgacgtggcagcgactgagcccgaggtggcggcggaggaggctgcggccgccgcgcctgagaccacggccaccgccggggattccaagccggcgaaggaggccaaggccaagaaggccgccgcgccgaggaaggcacgctccaccgccacccacccgccgtacgccgagatgatctcggaggcgatcgcgacgctgaaggagaggaccgggtcgagccagtacgcgatcggcaagttcctcgaggacaagcacaaggaccacctgccatccaacttccgcaagcagctgctcgtccagatcaagaagctcgtcgccgccggcaagctgaccaaggtcaagaactcctacaagttgccgncgacgcgcgcgccg

SEQ ID NO: 419926 - DNA, 471 bp, Oryza sativa
gtcgccgccgccgccgcctccgtcgtcttctgccgccgagcagcagcagcagtgccttccaccatgccgaagcagatccacgagatcaaggacttcctcctgacggcgaggaggaaggacgcgcggtcggtgcggatcaagaggaccaaggacgccgtcaagttcaaggtgcggtgctccaagtacctctacaccctctgcgtcttcgacgccgacaaggccaacaagctcaagcagtcgctccccccaggtccgtgcctacatttcatccacctttttcactattgactctgttctggtgcaagtggtggtggtaggactgtgtttgttgatgcgaactgttaaaatttggttgcttctaggattataaaaaatggctggttgagacagtggtatggtatggttctgtatgtcctttgtaaattcagtttggtctgacatgctaatctgggtggactggtgataaatgcc

SEQ ID NO: 419927 - DNA, 432 bp, Oryza sativa
ctaactcttgctactgatcttggaggacttcaagagcgaattacaactacaaagaagggttccattacatctgtccaagctatttatgtgcctgctgatgacttgacggatcctgctcctgctactacttttgcacatcttgatgctactactgtgttgtcacgacagatctctgagcttggtatttaccctgctgtcgatcctctggactccacatccagaatgctctccccccatgtgttgggtgaggatcactacaacactgctcgtggtgtccaaaaggttcttcagaactacaagaatcttcaggatattattgcaattttgggtatggacgagctcagtgaagatgacaagttgaccgtcgctcgcgcaaggaagatccagcgtttcttgagccagcccttccatgtggctgaagttttcacgggt

SEQ ID NO: 419928 - DNA, 420 bp, Oryza sativa
ctccccgtacaataaccaatatatatcatgggggaaccaataatacaataacagaacttactccaaattacaaccagctgaccaaagcgtaaaacagcatcatatcatgcgtacggaaatgaaaagttccagggagaagccacatagcatcgagaaacaccacaaaagaagagaccaagctattgactgtatgtcggtatggtttggagctgtataaaatgcctaacgatgttgtgcgtagggacacgcacacgcccaattgaatttgcccaatggagatctcaagcggaccccttgagctttttcgcgatgcctgcaaagtacttcccctgggggaaggggtgctccagctccatttccgtgggccaccttaagccgtcggcggcaaaggtgccggcgccgaacgggctgcccccctga

SEQ ID NO: 419929 - DNA, 493 bp, Oryza sativa
ggatggacctcctgagggcatgccttgtaggtgcagctggaacaccttatcatgacaatcttttcttctttgatattttctttcctcctgattatcctcatgagccaccttctgttcactaccattccggtggcctccgtttgaacccaaatttgtatgagtctggcaaagtgtgccttagcctgctcaaaacatgggcaggaactggtagtgaagtgtgggaccctgaaaattcaactgttcttcaactgctgctgtcccttcaagctcttgttctcaatgaaaaaccttacttcaatgaggctggctatgacaaattcatggggaaagcagatggagagaagaactccatcacttacaatgagaacgctttcctgctgtcatgcaagtccatgacgtacattttacacaagccaccaaagcatttcgagaattttgtcaaggagcacttcacttgttgcgcgccgcacattctggatgcctgcaggcttat

SEQ ID NO: 419930 - DNA, 470 bp, Oryza sativa
atgcgcgcgtacgtgcgccttggctcctgtttggcggccgtcctcggtcgtcctttttttttttttttttatttttttttcagctgaattttacatatccattcagaagcaaatttggcagtggtttgaccaattgtcccccgtttttacagaggtttattagcgcttataaacctattgtaaacctataaatgcttggcgggcacggtagccccccgggcgtgcgaatcgacgacgaatagcaaccacgaggaccatttgatgaagcaacctcactgtgtttggacggtctgatacggttctgaaattgctcaagcgctgttctttttgccgttgccaaacaagaaagacatgtttggctttgccagggtacgcttaaaagccttcactgccaggggactgtccttagccatgaggcaggttccctgctgaacattgcagatggggtactcttgagggcagcagctgta

SEQ ID NO: 419931 - DNA, 402 bp, Oryza sativa
agtttgcctgcacttggtgcaggactgcatccatttcgacatcaaatggttcggttgtctgaaacagctgacataaagcctaaatggagggtacttcttcagccaggagtcaggcatgccttgtgttatggaatgctgattcaagctcttcaacagttcgcaagaatcagtggccttctccgatacactcctcaaattcttgaacaggtcggagtaattaggttgttttcagacattggacttgatttccatacagaatcgatcctcataagtgcccttaatgcttcgctgatgctcccctgtataactgctgcaatgatactgatagatgtctgtggaagaagggttcttctactggtcaggatccgcttgctaacattatcagataggtgccatatcttt

SEQ ID NO: 419932 - DNA, 485 bp, Oryza sativa
gaagaggagcggcggcgagatccaattccaatcgatccttgtgctgctgctgctgctgcgctcgacgatcccatccggatctcgatggcggccatggctcgccatctccctgctattcttcttctctcgtcggcgctgctcctcgcccttgcctccgcctccgcttccgctgctgctccggcgctggccgccttcgtcgatgccgcgtcgcgccgctacctgcgggatcagcaacaccacgaccaggccgcttcaatgtcactagaccaagtttctgcggctgtttctgtcttgcttggttttgcaccaccaccctcgctacctgcacaatcttcttcaaagttagacaagctgttactccctaacccatttgacagaccacgggctgttttcttgctgcaaatcgatggattccatgcctccgttgaaagcatcacatctgaagctggtagcatcttcaaaaccactattgatggtctaagcga

SEQ ID NO: 419933 - DNA, 461 bp, Oryza sativa
ccactctacttctccttgcaacatcgtcgttagtcctctaacccaaggcattgacctgagcttgttgtgcgcttctgccttatctgcatcccctcccggccgagacgcgaccatctttctttcccgcttcgttagctgtctctgccgatcgatcggactggacggggagacatgaaggtgcagtgcgacgtgtgcgcggccgaggccgcctcggtcttctgctgcgccgacgaggccgcgctgtgcgacgcgtgcgaccgccgcgtccacagcgcgaacaagctcgccgggaagcaccgccgattctccctcctccaaccgttggcgtcgtcgtcgtccgcccagaagccaccgctctgcgacatctgtcaggagaagagggggttcttgttctgcaaggaggacagggcgatcctgtgccgggagtgcgacgtcacggtgcacaccacgagcgagctgac

SEQ ID NO: 419934 - DNA, 498 bp, Oryza sativa
tgttcaaaccagcaaccacccgccgccgccgccatgtcgggagggatcgcacgcggccgcctcgcggaggagcgcaaggcctggcggaagaaccaccctcacgggttcgtggcgaagccggagacgatggccgacgggtcggcgaacctcatgatctggcactgcaccatccccggcaagcaggggaccgattgggaaggtgggtactaccctcttacccttcacttcagtgaggactatcctagcaaaccacccaagtgcaagttcccacagggctttttccacccaaatgtctatccttcaggaacagtgtgcctctcaattcttaatgaggatagtggctggagacctgctatcactgtaaagcagatccttgttggaatacaggacttgcttgatcagccaaatcctgctgatcctgcacagactgacggttatcacatttttatacaggacaaaccagattataagaggcgtgttcgtgttcaggccaagcag

SEQ ID NO: 419935 - DNA, 257 bp, Oryza sativa
caagccactccagcttggaaatttactgcgtcactaattactgtagctaaagagatcacacgaaactgacaagattgttaccacaatacactctctaccaaaatagtcaaagattcatagacctagaaacacactgtgttggatagaagcccacacggacagaccataggatcggagtactaattgaccattgtccaggcaccaggcaagaaccctgaccctctctagtacttgtcaccctcatgacccttgtaacc

SEQ ID NO: 419936 - DNA, 502 bp, Oryza sativa
gttcttttttaaaaacatgagctggccgatcctatgctttatggttctgctttatagcggacacatgctttcgaagtttcgagtgctttagagctttacaataaatgtcactgcggttccttattaggggtaaaaggagaaaaagaagacaaaaaaacattggtcatgagaagatgtcacccctgcttgtaatcacgtcctggctacagaacgggcatatagaaaccagaatccaaaaatttaacttgtacagaacttaacaatgaagagatcttatgaagccgactccttggcgatcttctcagctttagcaatgacttcctcaatgcctcccaccatgtagaatgactgctcgggaaggtcatcatatttcccatccaaaacaccctggaaactgttgacgctctccttcagttccacgtactttccaggagcacccgtgaaaacttcagccacatggaagggctggctcaagaaacgctgatcttccttgcgcgagcga

SEQ ID NO: 419937 - DNA, 405 bp, Oryza sativa
ggttttgtttaagactggagcaccctgtgcctcagagcgccttgccaaatacaaccagtttattaggattgaggaggagcttggctcggctgctgcattcgatggggccaagttacgagcactcggggagcgcttctaaacttgatggtgaatatcatgcggtttatgcccactgttatgtgcatgggtttggtgaagacaggatgctcatttttatccggattttacttaccagtctaactgtagataaagagctcgttgagcctagaaagacattcttcagtgagtgagcagacatgtacccgcaatcttgctccaatcttggtgatgagtaagactgagcttgggtgttttatgaccctgttggagcgtggatacacagagtctggcttttgataatattgc

SEQ ID NO: 419938 - DNA, 417 bp, Oryza sativa
cgctcacccacagtgtggtcgtatccgctgcagtttgctagcttcacactgcgatgcctcctcgcccgtagccgtgtccagctgctgtgcgacactatggtcggtgtaacgacaagggcggtggctgcggcggtgctggaggtggtcgtggtcgtggctgctgccgagctcgagggcgctgagccgccggcgagcgagcggttggcgcttatggagctcctgcacacaacgccgtacgagcggactctgggatggaactgatctacaaggtggtgcggttgggtcactgtgacgtgccacccccggaaacccacggtggtgcacgtgcgactcccctgaactactctatatggggccatcccggcgggtacgcttgggcgactaaccaacctgcaggtgctctccctgcgctccacc

SEQ ID NO: 419939 - DNA, 507 bp, Oryza sativa
  unsure (1)..(507): unsure at all n locations
ctcgcctactccttcgaccgcctcaggccgccatccaaccccgccggcgtcgaggtcgcccgctcatcatccttctccaccgccttccccgtctccgagccagggcagtacacgctcgtcttcgccaactgcctcggcggggggctcaaggtctccatggacgtccgctccgccatgtacaacgtcgacccgcccaccggcgagcgctcctacctctccgcgggggccaccgcgctcccgaccatcttcggcttcttcggcgtcgcctacgccgcgctcgccgccggctggatcgccatactcctgcgcaagcgcgccgccgtgttccggatccactacttcatgctcgccgtgctcgtgctcaaggcggtcaacctgctcgccgaggccgaggacaagtcatacatcgagcgcactggcacggcgcacggctgngacgtgctcttctacatcttcagcttcctcaggggatctcgctgntcacgctcattgtgctcatcggcaccg

SEQ ID NO: 419940 - DNA, 314 bp, Oryza sativa
gtactgcaaaagaagccatgtatgattttccttttttatgtatctccaaagcacagaaagacaatgaacaactaccaagtgccaacactatggctgatcttcacacaaggcaaaaggtagtgacagttcaacctgcatacaatgtatattcgccagactattcaaacattccttttatcagttatatctccataaactctcaatactttaacgtagcactcatctgtgattttgccaacttctattcggaagctcatgatgaatcggtttgaaactctattaaggcactttcctcaaaggaactctggtactgc

SEQ ID NO: 419941 - DNA, 424 bp, Oryza sativa
cccagagcaagaagctcatctcctcctcctctcgcatggcagccatggccaccaccgcgtccagcctcctcaagacctccttcgctggcgcgcgcctccccgccgccgcccgcaaccccaccgtctccgtcgcgccgcgcaccggcggcgccatctgcaactccatctcgtcgtcgtcgtccactcccccctacgacctcaacgccatcaggttcagccccatcaaggagtccatcgtgtcccgcgagatgacccggcggtacatgaccgacatgatcacctacgccgacaccgacgtcgtcgtcgtcggcgccggctccgcggggctctcctgcgcgtacgagctctccaaggacccctccgtcagcgtcgccgtcatcgagcagtcggtgtcccccggcgcggcgcgtggctcgcgggcagc

SEQ ID NO: 419942 - DNA, 502 bp, Oryza sativa
cgcacggccgcgccgccttcgtacgccgccccaagtcgtcgtcggcgtcgtccgcgggggcggctgccgaacggaagcggaagcgcgccgccgccgccaagaccgtttccctcaagaaccagatccgctccaccgagcgcctgctccgcaaggaccttcctaatgacattagggtagctcaagagaagaaactggaagaattgaagcggcaacaagagcttcagaatcaactggctattcaacgaacagttcagctgagagatagaaagataaaattctttgagaggcgaaagattgagaggatgatcaggcgccttgagaagcagcaacgttcaaatgccgatgatgccagcaataaactgtcaaaattaaaggaagatcttgagtatgttaggtttttcccaaagaatgagaaatatgtctcactgttttctggagggaataccccagatatgttagagaagaggaataagtggcgtaaacagattaaagaaatttgatg

SEQ ID NO: 419943 - DNA, 462 bp, Oryza sativa
  unsure (1)..(462): unsure at all n locations
attgatcttgagcaatgctctcttggatatgtatgccaaatgcggggaaatgaacacggccatgagagtctttgatgaagctggtgagagggatggcatttcgtggaacactatggttgccggattcgctaatgctggcttgttggaccttgctagcaaatatttcggtgaggcgcctgccagggatataatatcctggaatgcgcttctggctggatatgctcgatatgaagaattctctgcaacaatgatactatttcatgatatgcttgctagtagtgtaatacctgataaggtgactgctgttactttgatctctgcggttgccggcaaggggactttaaattcagcaaggagtgtccatggttggngtggttaaggagcatggtactcaagattctttcttagcatccgctcttgttgatatgtattgcaaatgtggaagtatcaagctagcgtatg

SEQ ID NO: 419944 - DNA, 488 bp, Oryza sativa
  unsure (1)..(488): unsure at all n locations
tgattattggtattggcattatttggtgaagcatttctgcttgtaccttaaacaaaggtctctgttgtcttattggtgctgaaggcaagatatacactgcagtgatggctcaaacttgcttgccacctggctttcgttttcatccaacagatgttgaacttgtttcatactatttgaaaaggaagattatgggaaagaagcctcttattcaagctatatcagatgttgaactgtataaatttgctccctgggatcttcctgctcaatcctgtctccagagcagagatcttgaatggttcttcttttgcccacgagacaagaaatatcctaatgggtctaggacaaatcgttccacaccaaatggttactggaaaacaagtgggaaagatagaacgattgagcttaactctcgcattgntgggtcaaagaaaacactgatttttcatgaaggcaaagcacctaaaggcaacaggactgattgggtgatg

SEQ ID NO: 419945 - DNA, 479 bp, Oryza sativa
agtaaatctagcttgctgtaaacacagttagttcgtaattatcgcatagggccatggggaagtacagtgtgggtctcgtggttttagggttgctggcccttgcgttttcgaccactgtgctggctgaaacacatgttgttggtgactccaacggttgggacttctctgtgtcgtttgatagctgggctgatggaaaggtcttcgctgctggtgacactcttgttttcaactacaaaccgggcgcacacaacgtgctggccgtggacgcggcgacgtacaggagctgcaaggtgggcagctcggcggactcggtggcggcggcgacggggaccgcgtcgttcctcctcaagaagggcgtcaactactacatctgcggcgtccccggccactgcgccgccgggatgaaactccgggtcgtcgccaactgatgaaactccggcgacagatcaatcccttattaattaaaactatgtgggtgt

SEQ ID NO: 419946 - DNA, 509 bp, Oryza sativa
cttttctctccgattctgcgaggcgacatcggcggcgagaggcgggctagggtttcgagcaccgccaccgcgcgccatggccgaggccaaccagtaccagatcctggtgcggctcctcgacggccgcacacgctgcctccgcttctcgacgacgaccgtctccggcgcggcgctcctcgacgccgtctcggcgctctcccgcgtccccgccgcgtccctccgcctcgtcaccggccgcctcgacgtctcgccgtcctccgtcctcgcctcctccgccgacggccgattcccctccgcatccgcgctccttcgcctccgcggaggcaagggcgggtttggctcgctcctccgtggcgccgcctccaaggccggccagaagaagaccagcaacttcgacgcctgccgcgatatcaacggccgccgcctgcgccacgttaacgccgagccgccgctcgaggagtggaaggccgaggccgcagatcgccagctcgagaagctcgcggaggatt

SEQ ID NO: 419947 - DNA, 491 bp, Oryza sativa
cttgagagtaaatagggaaaccttggtcctctatttgagctgagagaggaacctaactatcaactgcctgaggtgacattgtaccgaacacatgtacacatctggaccccaaattctttacgaacactggctcggtgatgaccaggcacatcggcagctccaccaaactggctgtttactgaccaccacggaggctgagcaccaggtggagggaggactccttctggatgttgtagtcggcgagggtgcgtccatcctccagctgcttgccagcgaagatcagacgctgctggtctgggggaatcccctccttgtcctggatcttggccttcacattatcaatggtgtcggagctctcaacctccaaagagatggtcttcccagtcaaggtcttcacgaagatctgcataccaccacggagacgaagcaccaggtggagggtagactccttctgtatgctgaatcggcagggtgcggccatcctctagctg

SEQ ID NO: 419948 - DNA, 494 bp, Oryza sativa
ctgattggcaagaccatcaccctcgaggtggaatcttctgacaccatcgacaacgtcaaggccaagatccaggacaaggagggcattcccccggaccagcagcgtctcatctttgccggcaagcagcttgaggacggcaggacccttgctgactacaacatccagaaggagtcaacgcttcaccttgtcctccgtctcaggggaggcatgcaaatcttcgtgaagactctgaccggcaagaccatcaccctcgaggtggagtcttctgataccatcgacaatgtcaaggccaagatccaggacaaggagggcattcccccggaccagcagcgcctcatctttgctggcaagcagctggaggatggcaggacccttgctgactacaacatccagaaggagtccaccctccaccttgtgctccgccttcgtggtggtatgcagatctttgtcaagacccttacaggcaagaccatcaccctggaggttgagagctc

SEQ ID NO: 419949 - DNA, 499 bp, Oryza sativa
gtgttggtttcagaaatcccatgctgcatatcatcagttgcacggcgagtcattgggtccaacatgcttaaagttaaagttggtggatgtgctcttcttgtttgcgcagcgaaagagcattgtcagaagcagatagagattctcagtgactcaagcttgtacattcaactaatccattctctagtcagtatgattcatatgacaaacttgccttctgaaaatgggagtggtgaaaacatatcagacattaaaatttctagacactccaaagaaaataacaacagcgatgaaactgtgtgccgcactgctgtaatctcaggtaacatgattccgctatggctgcttgctgtttttgcacgccatgacagcaaaacaagggctgaaattctagaagctggagcagtcgaaatgcttatggagaagatttctcaaaatgcattcctatatgtgggcgacgaagatagcaccccatgggtctgagccttacttgttgctttgc

SEQ ID NO: 419950 - DNA, 328 bp, Oryza sativa
tgctgcgcctgctggtaccgccgcggcattctcggcgggacctatgcgtccgtgctttcggcgtcgccgcccttgggggtcgccatgacgactgaggttcaagaagaaccggatgaaactcgggcgcgtgtcgaccggtcacggtcggatcggtaagtatcggcaggaccctcgagggcgcgggaaccccggtggtatgcaccaccaccacgtcctgttcgacaagtaccaccagcgctacctaggcaaggtcgggatgtgctacttacacaggctcagtaacaggttccactgtcgccgcgttaacgtcgagcgcctctggtccatg

SEQ ID NO: 419951 - DNA, 486 bp, Oryza sativa
  unsure (1)..(486): unsure at all n locations
ccggtatggcgctatggtacgagcacctgggaatgctggatgatgtgttccagcgccccgagagcctggagtgtgtgcagaacgtgaacaggatcgcggagaagtactgggacatgtactccagcgacgacctccagcaggacctccctggccacctcctcagctaccccattggcgtcgccagcgatggtgtggtgactgagctgcccgggatggagtacttccctgacacacgggcccgcgtcctcggcgccaagtcggattacatgccccccatcctcacctcatagacgaggaagcactacactacaatctgctggcttctcctgtcagtccttctgtacttcttcagtctggtggcgagatggtatggccgttgttcagaatttcttcagatagcagttgttacagttgtgaatcataaaagaataagtgcagtatctgtgcatggttgagttgggaagaagatcggngatgcaatgatgc

SEQ ID NO: 419952 - DNA, 377 bp, Oryza sativa
gcctgcacgcgggcgcctgcttggacgctcgttctcggccgccctttgtttttttttgtgtattctggttcttgggactcaataatcagaggtggccctacatgagtttataatccgtatcatcggtaactttttttacaagagcatcacatattcgaggtgcaacatttgtttcagaggttctatgcactaggtttaactttccgctttcagtggggtccgcggacagcttctttgggtgcatttcttaacacaaagacaagggtggccataaccaggtaccgcaagaaaaatttaactaacttgaaatgaaaagaaaaggatatggacttaatacccgtctataccatttggcctttggggggacatacaatatc

SEQ ID NO: 419953 - DNA, 480 bp, Oryza sativa
gttaattcggaggcggacatacagctcgcgatcaagtcgctccgggcatcgagcatgtcgcatgagatggtcgaggtctcaactgtcactgacaggagggatgaaggtgcatcctccaggaagttcacaagaactgctagccagcagaggagtgtgatcatagaggactcgccgccgtctcccgccagcaatggcgacaaggagaaggaagatgaggttgcggagaagagatggagggtgtttgtgtggaagactgctgtttatctcatcactcttggcatgctcattgcacttctcatggggcttaacatgtcatggacagccatcactgcggctcttgttcttctggcgcttgattttactgatgcacaggcttgtctggagaaggtgtcatactcattgctgatcttcttctgcgggatgtttattacggtcgatggcttcaacaaaactggcataccgaacacactttgggagctc

SEQ ID NO: 419954 - DNA, 492 bp, Oryza sativa
ctagttctagatcgcgagcgccgccctttttttttttttttgctagtatactaataatatagatatcccttatcccaattttattacaaaggtacaaatatcacaactcacaaccaagagttgtactaataaaacacgctataatctgaaatgatcatatagctctaactttaatctgtgcaccgtgcattggatgcagagttaccatagtatgcggcgcatgagtatacgatggcgcaagctcaaactccaagcgttgaagaatcaggcacaatgccatcttggcctcaagcagcgcgaagttttggccgatgcagattcgtggcccccaaccgaacgggaggaatgcacccggatccttagacgccttagagatcccctcagagaacctctcaggtttgaactcatgcacatcacttccccaggtgtccggatcatggtggatgaacaacacggggattttaatgctgacaccagctgggtaagtgactc

SEQ ID NO: 419955 - DNA, 499 bp, Oryza sativa
  unsure (1)..(499): unsure at all n locations
atctatccatcgatccattccgccccgcagcagcagcagatagctagctagctagcaaacaatggcggcggatcatgaattgcgagctgcagcagtggtgatggtggtggtggtggtgctgggcatggtgtcgacgtcgtcggcgcacgtgttcgtgggggcgtacaacacgacgtgcccgaacgcggaggacatcgtgtacaaggagatgaccagcatcctcgccaagtcgccggagctcgccgggccggtgctgaggctcttctccgtggactgcttcgtgggcggctgcgaggggtccatcctgctggactcgacgccggggaacaaggcggagaaggactcgccgctgaacaagggagtgaaagggtacgaggtggtggacgccatcaaggccaagctcgacgccgcctgccccggcatcgtcttctgcgccgacaccctcgacctcgccgnccgcgacgtcgtgcgcctgacgaaagggccgtacatcccactt

SEQ ID NO: 419956 - DNA, 491 bp, Oryza sativa
atactagcttgcttgttcaattcaatcgagcagtagctaattgcatagtgatcgatcgatctgtatagatggtggtggccggcaagaagcagggacggcattctttttctgcatcatcatcgtcgtcttcgtcttcttattgttcagtagtgcagctggatcatcatcagcgcccacagggtgaggaccctctcatcggcatcaaagcagtagcagcaggaggaggaggaataatgagaaagggcccgtggaccgagcaggaggacgtgcagttggtttggttcgtgcggctgctgggcgaacggcggtgggatttcttagcaaaggtgtcaagtttgcgcggcgccggctgatgagcatatgcgtgcgtgcatctaatctatcgattaatcgatgatgatgtcgatcacatggatggatgcatgcatatgccgtacatagtagattcgatgatagtcactgacataaatataatgtatgcgtgcgatcac

SEQ ID NO: 419957 - DNA, 498 bp, Oryza sativa
gcatactggcacgtcatagctcattaattttcagcggcaagacaaaagtttatcatcacattacaacaatttcaaattataaaagaacatcacatatagatttgcatttcgtcattttagatgttatatgcactagttctcactttcccccaccactgggctttgcgaacagcttctttggtagcttctccagaggtgttgttttcagaaggaaaagcctggcagcacgctcttgtaaggtgccaccacattttagtccacgattctgcaactctagcttgagtctctccatgccaagtacctccaattctgcagctgaactgtaaattgtcaggtccagtggttcctgtgaaagaggagatatatttccattggcaggttcttctactggaggcgcctctaggtcattaagatgtgatgtggctgaagcagaagcgtgttatcctctgcttttacatctggtttcaacacttcttctgaaagagcactaacaccatt

SEQ ID NO: 419958 - DNA, 488 bp, Oryza sativa
  unsure (1)..(488): unsure at all n locations
gttgactcgtacgctgtttccggcggaaagtagtgcggctagtccggtcgagacaggggacgcggctgccgccaccgcgaggtggagcgccgtgttgccatccttgtcctgcgcgttgatgatgccggcgagcatcgggttcttgacggcgagcgagatgaccgacttgtgccctttctcggccgcggcgtggaggaacgtcctgccacggtcgtcgcggagctcggcggtgtccggccacgccgacatcaggtcctcgacgacatggtggtggcccatcagcgcggcgacatggatggccgagagtccgtccgagtccttcaagaacgccgtggacggcggcgcggcgcgcacgattgcgcttacgatggagctgtcgccgtcggacgacgcgagatggagcggactgctgcctttgatgtcgccttgtccggacaganctcgtttccatttaatatcaggtcgaccatttcttgcaattatgaatg

SEQ ID NO: 419959 - DNA, 479 bp, Oryza sativa
gtgcttgtaaaaaatatctagtatccaattagtatacccatttgctcagaagattgcgaatttcactgatcaaattccatgctctgcattaattatctaatatttggtgtaggttccaggagggtggatcctcaatgggcagaagcgatggccggccaacggcagttttgcggatgtgttcgtcgttcttgcctgcaataccagtaataatcagattaacgggttcattgtgaatggtgggtccccagggcttaagatcagcaagatcgagaacaagacgtcgctgagggttgtccagaactgtgacattctgctggaggacgtgttcgtccctgacgatgaccgtcttcccggcgccaactctttccaagacctagtgaaggccctctctttctcttgcgtcatcgttgcctggatcagcatcggcattgcagcaagggtttatgatgcatgcttacggtatctgggggagaggaagc

SEQ ID NO: 419960 - DNA, 409 bp, Oryza sativa
tttttgttttttttgggggacataaacctacatgatcatgtaattcaatcaaaactcatgaatagccaccacagatcttagtagccataccatcaatttgttccataacacaaaaaacagcagcaacagcacaaaagtagtctttctttgctttggcttccaacacaacaggagataaaaaaagaagctaacactttagatagatagcaagaagccaagaaccctagctcccgagtacctaggcggtgaggaggacggcgccgccggcggccttgatctttttctcggggaccttggagatgagcttggccttgacgacgatgggcctctctggggggagcatccccttgccgagcaccttggtgtagccgaactgcgtgacgtcgatgacgggggccttgccggggcc

SEQ ID NO: 419961 - DNA, 428 bp, Oryza sativa
taaccatcagtagcaaattaagcctcgaccagctaatcaattaattgagcttgtgctgttagccgtgtcatctatagctcgctagcttgccatggtgtcctctgctatggcggcggtggcggtggcgtttgctgtagtggtggccgcgacgacgagcagcgcgcagcttgacccgcacttctacgacggcttgtgcccggcggcgctgcccaccatcaagcggatcgtcgaggaggccgtcgcggcggagccccgcatgggcgcctcgctcctgcgcctgcacttccacgactgcttcgtcaacggttgcgacgggtccatcctgctggacgacacgccattcttcacgggagagaagaacgcggcgcccaacatgaactccgtccgcggcttcgacgtcatcgaccgcatcaaggacgccgtcaacg

SEQ ID NO: 419962 - DNA, 437 bp, Oryza sativa
ggaacacacggttaaccagtttcaacaacgctaaacagtagggcaaagtacaatcatgccaattacttagtagttcccaacttcccattttacaaacgggatcacaacttcacaggcataattgcatccccgatcttcttcccaacttaaccatgcacagatactgcacttattactttatgattcacaactgtaacaactgcttttttgaagaaattttgaacaacggccataccatttcgccaccagactgaagaagtccagaaggactgacaggagaagccagcaaattgtaggggagggcttcctcgcctatgaggggaggatggggggcatgtaatccgacttggcgcccaggacgcgggcccgtgtgtcagggaagtactccatcccgggcaggtcagtcaccacaccattgttggcgacgccaatggggt

SEQ ID NO: 419963 - DNA, 514 bp, Oryza sativa
gttctgacaaaatcaattcttgagaacaataagtgctttttggtcgactgtgggtctgatttatttatatgggttggtcgactaacacaagtggaggagagaaaagctgcaagtgcagcagttgaggaattcattgctactcaaaataggccaaagacaacaagagtaacccgagtgattcaagggtacgagaatcatacattcaagtctaagtttgaatcatggccagtaaatagtgcaggaagtgctggcgcggaggaaggccgagggaaagttgcagctctgttgaagcaacaaggagttgatatcaagggagcctcaaaaagcagcgctccagtagacgaggaagttcctcctttgctagaaggcgatggaaaacttgaggtttattgtgtcaatggcagtgctaagactgctcttccaaggaggagcttgaaagttttacagcggagattgctatattgttctctatacatatcattctggtgacaagagagaagaatttatttgactt

SEQ ID NO: 419964 - DNA, 477 bp, Oryza sativa
  unsure (1)..(477): unsure at all n locations
ataaantttttttgggtaaaggcctcagggcgaaacctgttttttagcccgaatctttaaccggtataacttgactcaaaaacatttatctgtcataattatcgcaaatatgcaggtggcaagcaatcccaacaaactattcagaatatctgccattgacacaggctaggatgttcacgatccacaactagatagctgtttacttgttgtctaaataaacgggcagcaaaataagtgataatctctactcggcagcagcgacctcctgcccggccatggcctcatcttctgcaggcctatcaagcttcgtaccgatgtcctccttggcatagtcaccatgcacctccatgagctttcccaggtcaaatttcggggcctttagaatcttcactttgcggacaaacacattctgaagggggaaaatactggatgtcgccttctaaatttctttccaaaactttaggaatgaactttgaa

SEQ ID NO: 419965 - DNA, 434 bp, Oryza sativa
cccacgcgtccggcctttctctctggtagcttcgccttgctctccagcttctgcttttgctgccgcccatggccgatccggccgccgaggagaccgtccccgcgccgccgccaaccccggcggtcgaccccgccgagggtgcctcggacgcgccgcagccggtcgagctgcccgccgacaccgccgccgcctcgccggagaaggtgtcgtcgccaccaccggagccggcgccggcggtgaggagccgggggttcaggctgctcggggaggacacctccgtgcacaaggctcttgggggcggtaaaactgctgatgtactattatggaaagacaagaagacatccgctgtagtgattggtggtgcaactgtcatatggatcttgtttgaagtgcttgattaccatctcttgactctgctttccatgtgatgattg

SEQ ID NO: 419966 - DNA, 482 bp, Oryza sativa
tctctctcgcgccgccgccgccgccgagcgcctggagcagcgtcagccatggccgtaggtaagaacaagcgcatctccaaggggaagaagggatccaagaagaagaccgtcgatccctttgctaagaaggactggtatgatatcaaggccccgtcggtgttcaatgtgcggaacatcggcaagaccctcgtgtccaggacacagggtacaaagattgcttctgagggcctaaagcatagagtgtttgaggtctccttagctgatctccagaacgatgaggatcaggcgtacaggaagatcagacttcgtgctgaggatgtgcaagggaagaacgtgctcaccaacttttggggcatgtcgtttactaccgataagctcagatcacttgttaagaagtggcagacactgattgaggctcatgtggatgtcaaaaccacagacggctacatgctgcgtctgttctgtatcggcttcaccaagcg

SEQ ID NO: 419967 - DNA, 501 bp, Oryza sativa
accataataataatagtctcattgataccctttacttcacaatcacacaaacttaaattaacaacattggaataaaatcatcaagtagatcttgggacacacggtaggggacatcacataacaccaatccagctacacacaaatagattattgcttctggtccataaacaaattaaacatgacaactcttccttcttttaatccagctaaacaagtaaaaccttatatttctaaggaaaccataacacactgcaagaacaccattcttatggcaccatgctcagcatcttaatactgcaacattttcagctcttgttcttgcacttgtcctttgctcttggtgcaagaccaatggcttcggaacccttcatgatcctcaagcgtttgcatgactcgacaaacatctgccacgggacatctccaacaagcatccagtcaccatccttgtcttcataagttgtaacagcatcagagccattcacctcattcatattggtccca

SEQ ID NO: 419968 - DNA, 470 bp, Oryza sativa
ctccctcctctcgctactagactagagagtaggtagagctagctttctagctcgtggatcgttaagtttgtagtcctgcccgggcgccggcggtgaggtcgcgatggccggcggcgcggtggtgagcacgggggcaggcaaggactaccctggcaagctcaccctcttcgtcttcttcacatgcgtcgtcgccgccaccggtggtctcatcttcggatatgacatcggtatatcaggtggtgtgacgtccatggacccgttcctgaggaagttcttcccggaggtgtatcggaagaagcagatggcggacaagaacaaccagtactgcaagtacgacaaccagctgctgcagaccttcacctcgtcgctctacctcgccgccctcgtctcctccttcttcgccgccaccgtcacccgcgtcctcggccgcaagtggtccatgttcgccggcggcctcaccttcctcatcg

SEQ ID NO: 419969 - DNA, 464 bp, Oryza sativa
attaacattattactttattatattttacagtaattttggaagggataaataaaaaacatacggttacattttacatacaaatgacaaacataatccgggggggactttcaggcaacagaacagcaaatgcaccactacacccaaacagcagattacacataactagagtacttaccgaatgatcgatcgatcaatcgaagcagcacgggaaacacacacgtggaagcatctacgtcgcgcgttggtttattacacacgaaaccgacggcccagatctctccctgcctccctcaccatcagtctcagtccacctgggtgaagcggagggagcacttgctggagggcagctgggcggtctcaaacccggccgggaacctggccttggcctcctcccccgagacgccgggggggatgacgacgcgctagacgggcttccagttcaccggcgtcgccacccggtgcc

SEQ ID NO: 419970 - DNA, 426 bp, Oryza sativa
cccgtaatcatggatgtttaaaccatctttgtgtttgggttttgatgtcaccacatcgtttactcaaaaaagactgtttgcactcccaatcgggagcttgggcattatcaagacctaattggcccagacacacactctcacaatgcggataaggagcttcatggttttagatggtgatggtaatgatgttccaagcatgggggatattgttcatatagtagtaaggtggcaactcgctcacagacaacagggaacacactcaactacaactatcagtgaagtgagcggctcaggaagaaaacctctcaatcaataaggaactggcagagcacgacatggtacactgcgcggtcctcagattcgcggtggtgcaaccatgcatgggcctaaaccacgaagtcatgcgattaagttgcagaagaaagt

SEQ ID NO: 419971 - DNA, 542 bp, Oryza sativa
tccaccggcgccacgggcaccgggtacatgtccctggcctctccggcgaaccccggcgatgccggtgcgctcggcggatcttccgacctcaccctttgcttgtgcagcaggtgcaccggcgacgagccgcggctcggcgtcgtgtcgccgctcatctgtgctaggaactcgtcggcgtcccggagcttcttcttctccctcgccgtcttcctccagttcatcagggccttcatcgtctgctcctcgaagatggtcttcttcatgtttgatcccatctgtgtgacgagtgcgtagagagggaaggtgctgtagctgcataggaactgaatgaatatccccactacaactttcatgatactcaagcccatgttttcatggaagcatttcttcaggccaggggttgccagagtccacacgaaatgtgccatctgaaatgcgttctggaacagtatcaagtgtatgaagaacaagacccaatcaggccggttaaaccagaagtacttgttgcttgtttcaacgaccggtgctcccttgatcacagt

SEQ ID NO: 419972 - DNA, 482 bp, Oryza sativa
cgcatttgtcgcagaatagcaagttcgacttccacaaatacatcaagaggtcattagaggacgatttcaaagttgtcgttggcatcagcctcccattgtggtttgtcgcgatccttgtgctcttccttgatatccaagggttcggcacgcttatctggatctcttttgttccactcgtcgtaagtgcgaattatatatatttcttgacttcttgtgcaaatgaatagtcaacagaatcatgattttatcctacaaggtatgcaaaacatttgacaaaaaaaatgcatgccgttgtctttagatcctcatgttggttgggacaaagctggagatggttatcatggagatggcacaggagatacaggacagggcaactgtgatcaagggagcaccggtcgttgaaccaagcaacaagtacttctggtttaaccggcctgattgggtcttgttcttcatacacttgatactgttccagaacgcat

SEQ ID NO: 419973 - DNA, 447 bp, Oryza sativa
ttccgcgccgcttccccccaagaacttgcctgctgtctgtttgaatgggtattctactcttttggctccagcaaatgaagtgctgattccacaagaactttaatcaaaaagaaacttagcacacccaaaaggagggagagttattcacagctcaggaatggaacacacacacaaactctgcatcctacaaaacaaaatcggcatttccatcaagtatggaaatagtggttcttggtttggttctttactttcccttttcgttttctttgtgtggtatgcacgctagaaggtgttattgtgtcagcacaccaatctgctgcagagctgacttcatgtcatctgtactgtaaccctcaatgccaatgatatttgagctgtccagggcgacgacatcttgtaacggatatctcctgacagtatggattctgttcgcggggatgttgaact

SEQ ID NO: 419974 - DNA, 340 bp, Oryza sativa
catctacgcctatttgtactcttcacctgacatccatccgcgcccgctaggatgagggagctgtactccgcccatttgagagctgggtagagaatgatatgcggagatcaggattaccgtctccgacatcacagggtttcattatcactagcgttgattgctctaatattcacgaaactaatcatactactcttgtactataatgatatgaggatccttatgctcgtgatttatgcggccggtaaaaccaccatcctctagaatctcaagctcactgagatcgatacaactatctccaccatcagtcataatgtcgtagctggcgagcacaagaacatta

SEQ ID NO: 419975 - DNA, 483 bp, Oryza sativa
ctcactcctctccccctccacgatctcgccgggatctccacggcggcggcggcggcatggcgggcaacgacaactggataaacagctacctcgacgccatcctcgacgccggcaaggcggcaatcggcggcgaccgcccctcgctcctcctccgggagcgcggccacttctccccggcgcgctacttcgtcgaggaggtcatcaccgggtacgacgagaccgacctctacaagacatggctccgcgcaaacgcgatgcggagcccgcaggagaggaacacgcggctggagaacatgacgtggaggatctggaacctcgcgaggaagaagaaggagttcgagaaagaagaagcctgtcgtctgttgaaacgccaaccagaagctgagaaattacgaactgatactaatgcagatatgtctgaagatctatttgaaggagaaaagggagaagatgctggtgatccctcagttgcgtatggtgaca

SEQ ID NO: 419976 - DNA, 501 bp, Oryza sativa
ggttcatcagacaatatattgaaaaggaagtcaaaacaaaacatggtgcaaaacagatccctattccacagtatccatgagctcagtactggagctactacatagatgggtaaattaagcagaagtactcaggcagattaatgcctttcaaacagccaaaaagaacactagggtgataccacagtcgtttaccagaacgcgataactaaaacaacactccccatctctagccggcgtagctgaaacctgagatcttgtagatcctgatggttccatctgtgtaaccagcatagagggtgcttccatctgcgctccagttcaagcttgtgcagtagagcatctggttcttggagacagggatctcgggcttaaggtcctgcacaatgtgctttgactcaagatcccagatcttgatagagtcctgggtcgccgcgcagagccagtagcggttgggcgagaagcagagcgagtgaatgatggaacccgcgtcaagcgagtaca

SEQ ID NO: 419977 - DNA, 478 bp, Oryza sativa
cccacgcgtccgcggacgcgtgggcgaggccaatcattctctcccttcccctccgcctcgcgccgcctctcctctcctcgcccccctcaccggagccgaagcttccccgccgccgcgcggcagggaatatggcggggaagtcgaagggcgcgaggaacaaggcgaaggcgcagggtggaagccaggccgccgtcgcggcggagccggaggtgccggtgaccgatggagtcgaggatgccaagcccgagatcgaggaagttagtgaacctgccgtcgtagagggcagtgacactggcgctgagaaggagcagggcgatgcagctggggaaacacaagccgcgaagaagccagctgaaggggaggttcatctctaccctgtttctgttaagacacagtctggtgaaaagcttgagttgcagctaagccctggagactccgtcattgatgtcaaacaatttctcttggacgctcctgaaac

SEQ ID NO: 419978 - DNA, 515 bp, Oryza sativa
gattgtgttgaataattcattgctgactaatgaggaacaaaacaatatttagatgggcaccctgtacacactctgctaatgttattcttgctgtacatacagagtgaaattaattgattaatctttccgtgtgataatggtaacaagggacgctctttgacagtgaaaggtacagcaattaagatcaatttggccaaacaagaaacacacgtacattaagattgaagactgactaggcaaaacaaaacaaactaataaaaggcatctactgtacacggggatgaacacaagaagaagaatatagggcgtgacggagacatggacgacgatattcgtgagcggattatggttggagcttattgttggagacgtggttggcgccgacgtggacgtcgtggtctccgatgaatcggcgccagaaccagtgggacttccagacgagcaccatctcctcgatggggacgttcttggtctcggggaggaagagggcgatgaagacggtcatgatgacgacc

SEQ ID NO: 419979 - DNA, 466 bp, Oryza sativa
cggtgctgcaatgcttgacgtacacagaaccatttgcggcctatttgcagagcgggaagcacaagtcttcatgtcgtactgctggattttgtgcactatgtgctcttcaaaaccatgttaagactgctctacagtcaactggaaaaatagtgacgccatcacagattgtcaagaacttgcgctgcatctcccgtagtttccgcaattcaaggcaggaggatgcacatgagttaatggttaatttacttgaatccatgcataaatgttgtctaccttctggagtaccaagtgagtctcctagtgcatatgagaagagcttagttcacaaaatatttggtggccgcctaagaagtcaggtgaaatgcacacagtgctcacattgctccaacaatttgatcctttcttggatctcagccttgatattggtaaggccacgtctctggtgagggcacttcaaaatttcact

SEQ ID NO: 419980 - DNA, 432 bp, Oryza sativa
cccagcgccgccgccgccgccatcctccccgagccctagctctcccctatccctcgccgcacgcaccaccaccaaccatggccggcgcgcaggagtctctggtgttggccggcgtgatgcacggccacaacgacgtggtgacggccatcgcgacccccatcgacaactcgccgttcatcgtctcctcctcccgcgacaagtcgctgctggtgtgggacctcaccaaccccgtccagaacgtcggcgagggcgccggcgcctccgagtacggcgtgcccttccgccgcctcaccggccactcccacttcgtcaggacgtcgtcctcagctccgacggccagttcgcgctctctggctcctgggacggcgagctccgcctctgggacctctccaccgggtcaccacccgccgcttcgtcgccacgacaagacgt

SEQ ID NO: 419981 - DNA, 395 bp, Oryza sativa
tttattcatccatccatctacgcgtagattttgcttttctttgctttgctttccagttgtaattttgtgtacgagtacagcacaagctcagctcagctgcttcagctataaaagcttctcactctctcacacacacactctctctctctgctagctcagctctagatccagcaatggcgcctcctccggctgcagctgcggcgttggcggcgtgcattctcgccgtcgccgacacccttgccggcgccgacgacccctaccggtttttcacctggaacgtcacctacggcagcatcaaccctctctggtccaccccgcagcaaggcattttgatcaatggccagtttcctgggccgagaatcgactgcgtgacgaacgacaacatcattctgaac

SEQ ID NO: 419982 - DNA, 436 bp, Oryza sativa
  unsure (1)..(436): unsure at all n locations
cggacttcgtgggcggacgcgtgggcccacactctcgtgctcctctttctcatggcgatctcgaaggcttggatctcgctgctgctcgcgctcgccgtcgtgctgtcggcgccggcggcgagggcggaggaggcgccggcggcggaagaagaggcgccggcggcggaggccgtgctgacgctagacgcggacggcttcgatgaggcggtcgccaagcacccgttcatggtcgtcgagttctacgccccgtggtgtggacactgcaagaagctcgctccagagtatgagaaagctgcacaagagctaagcaggcacgatccaccgattgttcttgctaaggntgatgccaacgacgagaagaacaagccacttgctaccaagtatgagatccaggtttcccgaccctcaagatattcaggaaccagggcaagaacat

SEQ ID NO: 419983 - DNA, 405 bp, Oryza sativa
gattgtagtttacatgcatctatatatggcttgaattttgcttatgttttccctttacatttgtgcaaaagaaagcaataatttgaaaactggattaattaagctcagtgtaagaacaaccatgtagatgatcatcagttaataattaattgagcactgcacaattgcgacgaatgttgccttgcgacccggtcttgaccccaacccggcccaacttggtcatagccgtgacgaaggcctggttgaaggcggcgctgctctgggcccaagaatccacgatgggcctggaccgtgggtccgagtacagcacctggtcagagcccagaaagcccatcccgttctgcaggttcttgaagtactggttgtcgaagcccgcggcgtcacccggtccatggtcacggcgat

SEQ ID NO: 419984 - DNA, 481 bp, Oryza sativa
ggtggaggcggcggaggacggcgagcggtcagtggcggagaggggagtgttcggggacgcggggtttgcgaggtggggggagctcttgcgcctcggatcggctcacttcccgacgcctcagcccccgccgcgccgcggattattgctgttaggttaaagggattgtggtagcgagaagcggtggggttgatggagtgcgtggtgcaggggatcatcgagacccagcatgttgatgctcttgaggttcttctccagggcctctctggtgtcccaaaagaacgtgtcagagtgcatgagctctgtcttaaaagtgggccaaatctaggagttgtcccatcagaggttcgtttattgtgtgacttagctcagtccacgccatcctggaccataagacatgttggaggtgccatgagaggtgctggtgcagagcaaatctcagtccttgtgcggtcaattgtagagagcaaagccagcaacaatg

SEQ ID NO: 419985 - DNA, 503 bp, Oryza sativa
aattcgcatcttcacggctttattgatctataattctatattatcaaatacaatgcttttatggagatgcatattcaggctacaaccagcaataaggtgcacataatttttgtctatactgtcaaggaacaacgcataggtagcttgctccagcacctcagtaatttacagttgctttgatagcgtccaggaccttgttctttgtgggcatgtaaaatgtttcataaacaagagggaaaggagtgtccaggccgcatactcttgcgacgggcgcttctaacctttggaagcagcgctcggtgatggatgcggcaatttctgcaccaaaccctccggtgattggagcctcatggctaacaagaagttttcctgtcttgctgacagaggcctctactgtttctttgtcccatggaatcagtgttcttagatctatgagctcacaagatattccatcctttgctgcatcttcgcatgcttcttccagtactgaagttgagctcccc

SEQ ID NO: 419986 - DNA, 480 bp, Oryza sativa
ttcactccgtgatttagatggcaagaatggatggagagttgagctctcacggaactcaagtagccgcggaggtcgtgatcgacatggtgggtctgagatgaagtgctatgagtgtggtgaaactgggcactttgctcgtgaatgtcgtttgcgtattggtcctggaggtctgggtagtggaaagcgtcgtagcaggagtcgcagccgcagtcgcagccctcaataccgcaagagcccgacctatggtagaagaagctacagtcctcgtgatcgctctccaaggcgccgcagtgtttcaccagttcgtgggcgcagctacagcaggtcaccacgtggccgaggtggttctccttatgctgatggaagagatggtggcaggtaccgccgtagcaggagctagaccctgatgcctgtgcttgaccgtctgctctttggcttgcatgccatgaatgctttaagactggcatcaactgattgact

SEQ ID NO: 419987 - DNA, 508 bp, Oryza sativa
  unsure (1)..(508): unsure at all n locations
cttcatcaccggccactctgcctagagcattatcatcgatcgtcgtctacctagctagcttcacttgtgctccactgcaaccagtacaccacattaacttaattcacacctagcttagctcactatatagcttagcttcgcttaagcttaagctgatctcggagaagacgtacatgatggtggtggtgatgaggcggcggatggcggcggcggcgatgctggtgctggtcgctatggcgggcggcgccaccgtgtgcgcggcgcagctccggcggaactactacgccggcgtgtgccccaacgtggagtccatcgtccgcggcgctgtggcgaggaaggtccaggagacgttcgccaccgtcggcgccaccgtgcggctcttcttccacgactgcttcgtcgacggctgcgacgcgtcggtggtggtcgcgtcggcggngaacaacacggcggagaaggaccaccccaacaacctttncctcgccggcgacgggttcgacaccgtcat

SEQ ID NO: 419988 - DNA, 476 bp, Oryza sativa
tctagaggggagagagagcgcgccgagatgttcggtgaggaggaggagaacgcgtcgagtctcaagatcggggaagagttcttgaaggccaagtgcctgatgaactgctaggtggcgattatcctggagcacaagtacgagcagatccagcacatgttggacggtgacccgtcgtcggaggtgtctcacgtgttcgagaaatctctgcattacgtgaagcggttcagccggtacaagaaccccgacgcggttaggcaggtgagggagacgctgagccggtacggactcgccgagtttgagctctgcaccctcggcaacctatgtcccgacaccagcgacgaggcctgcggcctcgtgccctgctttcgttccggcagtaggtttcgtagcgatccacgcagcgagaagatcgacaagatgctcaacgacctctgccttataagaagttcgagtagtacgactgtagcttatcaaat

SEQ ID NO: 419989 - DNA, 497 bp, Oryza sativa
gaaactagctccagttggcattcaagctctctctccctctccttgctagctgctcatcaacaatttgctatacttcccatggctacttacagtagctctgcacttttcatcctcttcttgcttccaacattcctgagcatggctgccagcacctactatgatatatatcctgtggagtgtggttgccctgaccaaaatgaggttaccatgcacttgtatctcaccagtttgttgctggagcaaatcacccaaaccgcaatgaagaatttgtgatagcctcgagctatcctaatggattcggtacaacactcgttgacgactggtatttaacagctacaaccaatcccaatgataatatcgttgcacgtgcacaaggcatgcatgtccaggctggccaaagcaatgctaacatgtggtacacttcccacaacattgtgttccaggatgacaggtttaagggatccacacttcaggtgatggggattattgctgcaagc

SEQ ID NO: 419990 - DNA, 482 bp, Oryza sativa
  unsure (1)..(482): unsure at all n locations
cattggtattcctgccaacaacaaggggaagcagagcattggttgcctcttctggctgcttgctaggatggttcttcagatgcgtggcacaattctccctgggcacaagtgggatgtcatggttgatcttttcttttatagagatccagaggaagctaaggagcaggaggaagaggaggctgcagtaggtcctgaatatgctgcagttgctgagtatggtgctgctccaactgacaattggggtgaccagcaatggggtggagaggtccagcctcctgccctccctgctgcaccgactggggaatggggtgctgctccagctcctgtggctgcagaagggtgggatgcagttgctgttcctcctgccgctgctgctgctgttgcacctcctgccgnccctggatgggaagaaggcaatgctcccgcacctactgncttgtaggaaatgtgcggatcatcattcgtcagctactggaggaaaa

SEQ ID NO: 419991 - DNA, 399 bp, Oryza sativa
agcccacagcgaaacgcggtagcagaatcacgcttctggatactctccttaaagaggacgcgcctaaccacgtcctcaacatcattaatcagacgaagacaatgatcactgcgtctgttctagtcaactcggtaagcgtccgaacgtcaactagcagccgagttccgcctctctgatatcaagattatcactagccaagcctctctgcacggcaccagccaagcctcagcgttgccgcatcaggatctaatcgcaggagcagggatcatgctgaacgctctgttcattcgttagctgacaggcacagggagtaccacgtagagtagccttgctcgccacgtcaccggcaacccatcgatcttcacgatacaatcaaccgtcaccatgcagaaagaggca

SEQ ID NO: 419992 - DNA, 553 bp, Oryza sativa
ccccgtggtaatccatgtagcttttatcgggcggagtcatccaaagctactggcacataattagccttgctttgctatctcctcctgctgcgcggattgcgagaccatagacggtgagccatgactcgggatctgtttttgcgtcatacttctcaatgccagtcggcttaaaaacagccggccaatccactcgacgcaggtcacttgtaaaggctgcaactccatcttgatcatcttcgtagcggtctggtgaatgatgtcgtcgattgcctctttctgcatggtgacggttgattgtatcgtgaagatcgatgggttgccggtgacgtggcgagcaaggctactctacgtggtactccctgtgcctgtcagctaacgaatgaacagagcgttcagcatgatccctgctcctgcgattagatcctgatgcggcaacgctgaggcttggctggtgccgtgcagagaggcttggctagtgataatcttgatatcagagaggcggaactcggctgctagttgacgttcggacgcttaccgagttgactagaacaga

SEQ ID NO: 419993 - DNA, 547 bp, Oryza sativa
cgcctctcgcctccgttttgctttggctgcggctgcggcggcgcccctctcctacaccggacgcgccgcggcttcctcgcgccgagcaccaccaccacccagacgacgaggacgagtttcgcggcgatgagctggctcgggaagctggggctgggcgggctggggggaagcccgcgggcgtcggcggcgtcggcggcgctggcgcagggccccgatgaggaccgcccggcggccgggaacgagttcgcgcagttcggcgccgggtgcttctggggcgtggagctcgcgttccagcgcgtccccggcgtgactcgcaccgaggtgggatacagccaggggaacctccacgacccgacctacgaggacgtctgcaccggcgccacctaccacaacgaggtcgtccgcgtccactacgacgtctccgcctgcaagttcgacgaccttctcgacgtcttttgggcgcgccacgatcccaccacgcccaaccgccagggtaatgatgttgggacccaatacaggtcaggtatctactactacacccctgagc

SEQ ID NO: 419994 - DNA, 399 bp, Oryza sativa
ggacatcgaacaaacaggaccattcactcatttcaatagttaacctcgcaaacgctactcgatcattattccttaattattccaacttgttgtaactaacggcgaggaaaaagaagaagaactggctgaggatgacggccggcatgcggctagctgcgatcgatatatgtatatggccggctagacggtggggtagaatggtgagacggcgaggccgcacgtgccatgcggctgcaggacgtccttctccagcaggatgtagccctgctgcccccacgtctttccccacgagttcttggcgacccagtacttcttccccgacgcgccgtcctggcagtaacccaccagcgtcaccgcgtggtttgacgacgccccgcacgggcccgggaacaccccgga

SEQ ID NO: 419995 - DNA, 520 bp, Oryza sativa
atccagtttaaacactaaaaagatcaaagtatcaaacttgaccaagagaaaacaatattgtgttgtagcttagaagtgataagtcacacttgagatgatggcgccttcgcgtccaatggctagtgccgtcctcttggttgtgtgcacgttgatggctttgcaggcaatgggggcggacgcgtactacaacaacggcagcgacgactgcgtgacgatgcagatgttcgaggagtggatggccaagttcggcaagacgtacaagtgccacggcgagaaggagcaccgcttcggcatcttccgcgacaacgtccacttcatccgcggctacaagccgcaggtcacctacgactccgccgtggggatcaaccagttcgccgacctcaccaacgacgagttcgtcgccacctacaccggcgccaagccgtcgcaccccaaggaggcgccccgtcccgtctaccccatctggacgccctgctgcatcgactggaggttcaggggcgccgtcaccggcgtcaaggac

SEQ ID NO: 419996 - DNA, 438 bp, Oryza sativa
gtttcgattttgctctctcgctcttctccctccaataattcgcttgccctctggtggctcaaagcccagggaaattgatggagaagaattggggtagccccatgccacctggttcgggctagatctccggcgagacggccgctgggagcagccgatccggccccgatccgatgggtggcgaggtgccggatccggaggggctgaaccgggcgctcagcttcgacgactgggtccccgacgaggcgctgcacctcgtgatgggccacgtcgaggacccgcggtacagggaggcggccgtccgggtgtgccgacggtggcaccggatggacgcgctcacgcgcaagcacgtcaccgtcggcttatggtacgtcgtgcgcaccttgcgcctacgggagcggttcccgcggctcgagtcgatctcgctcaagggcaagcccc

SEQ ID NO: 419997 - DNA, 444 bp, Oryza sativa
tgcccctccggtcccgaatcccagtttcgtcccacgcctacgcttactcttgttggaatggcagggccggtcccgaccccaggaattgcctcatggacgtcaactcgtgttgcaaaagtactccagtctttctcattgacttggcctgcagcatttggtgtcattcacgcctgctatttgtctatatactatctgtctgcatgccaaacagcccatgtggcagctttgtcctcagcatttattgcgacgcatttagcatctggctttccagctatactgtcggcacttgctttgacatacaagtgaaatctctatggtgcactgacacattatagtagtgggcagtctgcaccatactatggagcggggcatgttgatcttcctgatgtattgaaactgggttctacaacaacagcaatcaatgctgtgatatggggagtcgtc

SEQ ID NO: 419998 - DNA, 224 bp, Oryza sativa
tggccttctcaagctttcgctcagcggacggagacatagcaaagcgactgggactttttagcctcgctttgctatcacctccggctgcgcgaatagcgagaccatacacagtgagccaggactagaaacctgagtttgcgccatactttgtaatgccaggcggcttaaaaacaacctgccaaaccactcgactcaagtcacttgtgaaggctgcaactccatct

SEQ ID NO: 419999 - DNA, 403 bp, Oryza sativa
tttttggttttttaggttcaaatccaacttattcataaagcatactgctgtcccacaggaaactgtttcataaaactaacatatcatacggactcgatggtccattaaaccagacacaagtagacatcagcaccacaaatacttgacgaacagaggctcgggatgaccaggcacatcggcagctccaccaaactggctgattactgaccaccacggaggcggagcaccaggtggagggtggactccttctggatgttgtagtcggcgagggtgcgtccatcctccagctgcttgccagcgaagatcagacgctgctggtctgggggaatcccctccttgtcctggatcttggccttcacattatcaatggtgtcggagctctcaacctccaaagtgatggtct

SEQ ID NO: 420000 - DNA, 494 bp, Oryza sativa
tcgtttaaaatttctccccaatctcgcgaggctctcgtcgtcgaatcgaatcctctcgcgtcctcaagatgcagatctttgtgaagacattgaccggcaagactatcaccctcgaggtggagtcctctgacaccatcgataatgtcaaggctaagatccaagataaggagggcatccccccggaccagcagcgtctcatcttcgctggcaagcagctggaggatggcaggacccttgctgactacaacatccagaaggagtcgacccttcaccttgtcctccgcctccgtggtggcatgcagatctttgtcaagactctgaccggcaagactatcacccttgaggtggagtcttctgacaccatcgacaacgtcaaggccaagatccaggacaaagagggcatccccccagaccagcagcgtctcatcttcgccggcaagcagctggaggatggcaggacccttgctgactacaacatccagaaggagtccacc

SEQ ID NO: 420001 - DNA, 421 bp, Oryza sativa
ttttgggttttgttgatagtgtagtatttattcacttattacttcattgaatccaaattatgtgcagaaacacacatattttaacacaacgaattgaacaagaccgatcgatcgatgtacaaacagaaaactggcaaacccaacgaatcactcctttgcaatttatatacgtgtcaacacacacattttcaatcgatcgtgtatacacaaatctacaaatggtccgtagtcgtcgccgtcgtagtgccatttttctcagttgaagacgtcacactgcttccggatgttgcccttgccgccggacttgaccccgacgcggccgagcttgacgatggcgttggcgaaggccttgaagaagtccggtgtgctggccgccagcgagtccaccgtccgccgcgtgcgggtgtcggggtagagcagc

SEQ ID NO: 420002 - DNA, 543 bp, Oryza sativa
ctgacgcgtggggcgctgctcgtcgtcgccgccgtggcgcagctcggcgcgtccgacctgaggacggactactacaacagcacgtgccccaacgtcgagagcatcgtgctcggcgtggtgaaggacaagatgcaggccaccatccgcaccatcggctccaccgtccgcctcttcttccacgactgcttcgtcgatgggtgtgacggctcggtgctgatcacgtcgacggcgggcaacacggcggagagggacgcgcccgacaacctctcgctggcgttcgagggattcgagacggtgaggagcgccaaggccgccgtcgaggccgcgtgccccgaccaggtctcctgcaccgacgtgctcgccatcgccacgcgcgacgccatcgccctgagcggtgggccattcttcccggtggagctgggcaggctggacggcatgaggtccagcgccagcaacgtcgccggcaagctgccgcagccgaacaacaccctcagcgagctcgtcgccatcttcaaatccaacggcctcaacatgtctgacatg

SEQ ID NO: 420003 - DNA, 427 bp, Oryza sativa
cgcgcgcgcacgtacgcgtggaccctattttgcgcgcgccctttttttttttttgggtttgataaacaaagggggtatcactatgactaagacgctggcacttactttgcctagtagcattgtaacgcacacagaatgacagggaaccacgcattgttcaagagctcccacataaacaactctgatgcatccatcgggccacaaagaaagcgaacagcagcatacagatagctatgagaagagacactaggagagggataactagaagggacagaatggcatccatggggccatgacgtttagtcgacctcctccatcttgctctcgccggccacggcctccagcggcggcatgtcggcgtcagcctcggcggactcgtcctcgtcgatgctcaggccgagcttgagcatgcgggggatcctggtgc

SEQ ID NO: 420004 - DNA, 514 bp, Oryza sativa
ctgaggatgctgttgagttttaggatgagaatgtgatgaataagatgatgatcaaggaagtctctcacgagtggaacgtgatgaacaagcagaaacccatttggttgaggaagccagaggtgatcaccactgaagagtacgctgctctgtacatgagcttgacaaacgactgggaggaacatctggctgtcaagcacttctctgtggagggtcagctcgaattcaaggccatcctgtttgtaccaaagagagcgccatttgacctctttgacaccaggaagaagcaaaacaacatcaagctgtacgtacgccgggtgtttatcatggacaactgtgaggagctgatcccagagtggctcagctttgtcaagggcattgttgattctgaagaccttcccctcaacatatcacgtgagatgcttcagcagaacatgatcctgaaggtgatccgcaagaaccttgtgaagaagtgcgtggagctcctgtttgagatcgctgagaacatggaagacta

SEQ ID NO: 420005 - DNA, 370 bp, Oryza sativa
  unsure (1)..(370): unsure at all n locations
gtaccacaactttttaaggatggaattgagtagcaatactttcaccccaaaatacagtttagcgacaatatcttagaaaagccgcttgctttgccgccatggctggcaagctgagcagagcagctaacacaaagaacacgagatcactataaaccaaacggcaacgaacgaagaaaatacagggtcttttttgtctgaagatacacgaagcggttcgntttcttttatttttagtctcctctcctcctcgatgatggggtgtatggcaatggcaatggcgatgggatcttggcttagttgatggaaggggctcgccgttccactccttgaggcagtcgagcatggggtcgatgagctgccctggctgatg

SEQ ID NO: 420006 - DNA, 467 bp, Oryza sativa
ctgtagcaatggggggcaacgggccgaacaacaaggaggacccgctcaactggggcgcggcggcggccgagatggccggcagccacctcgacgaggcgaagcgcatggtggcgcagttacgcgagccgctggtcaagatccagggcgccaccctgcgcgtcggccaggtgggcggcgtcgcccaggccaaggacgccgacggcgtcgccgtctagctcgaccaggaggcccgcccccgcgtgaaggccagcagcgagtggatcctcaactgcatcgcccacagtggcgacatctacagcgtcaccaccggcttcggcggcacctcccaccgccgtaccaaggacggacccggcctccaagtcgagctcctcaggcatctcaacgccggaatcttcggcactggctccgatggccacacgctgccgtctgagacggtgcgggcgggcatgctcgtgcgcatcaacacc

SEQ ID NO: 420007 - DNA, 395 bp, Oryza sativa
atgaataagaagctggcatatacttcggctagtagcattgcaacgcaaacagtatgacaaggtaccacgcattgtttaagagctaagacaaagacaaaactgatgcatccaacgtaccaaaaagaaagcgaacagcagcagtcagatagctatgagaagagaactaggagagggataactagaagggacagaatggcatccatgggtccatgacgtttagtcgacctcctccatcttgctctcgccggcgtcgtcctccagcggcggcatgtcggcgtcagcctcggcggactcgtcctcgtcgatgctcaggccgagcttgagcatgcggtggatcctggtgccgaaggtgttggggtcctccaagctgaaaccggaggtcagcagggcagtct

SEQ ID NO: 420008 - DNA, 338 bp, Oryza sativa
ctcgttttttctcgtcctctccacgcccccgagatctcaggagcacaggaggaagaagctcgtctctgccaccaaggaaggtctgaagcttgatgagagtgaggacgagaagaagcggcaggaggaactcaaggagaagttcgagggtctgtgcaaggtgatcaaggaggtgctcggtgacaaggtggagaaggttgttgtctctgaccgtgtggtggactctccctgctgtctagtcactggggagtatggctggactgcttacatggagaggatcatgaaggcccatgctctgagggactccagcatggccggcttcatgtctagcaagaagacca

SEQ ID NO: 420009 - DNA, 328 bp, Oryza sativa
gggggcccactaaaaatcattcattcattcatttgatcaaagcaaaccagacgagctttttttttgcgatcaaaaacacaaaggggcaaccccccagttaacacaaactagatagttccccacaaaactaacgattataaccatcggatgatgatgatgggagctcgattagatagatagaaaacttggccaagagggccccaccggttaattcctccagttcccgtcggagttgccccccccgcggttgcccaaacccccgccgtagccgccgacaccacgggcgccaccggaaccaccgccaccggcgtaaccccccgacccctgg

SEQ ID NO: 420010 - DNA, 371 bp, Oryza sativa
gcggctattgcggcggcggtggctacggtggcggccgtggtggcggcggctacggcggcggctacggcagccgcggcggcggcaactccgacgggaactggaggaactgagcggtggggccctcatggccaagttatctatctatctaatcgagctaccatcatcatcatccgatcgttatcatcgttagttttgtgtggaactatctagtttgtgttaactgtgtggttgcccatctgtgtttttgatcgcaagaagaaagctcgtctcgtttgctttgatcaaatgaatgaatgaatgaatcttagtgtgctccaagaaaaaatgagcacagaacaagatagatctaacagatcacaatcagaaaattg

SEQ ID NO: 420011 - DNA, 564 bp, Oryza sativa
ctcggacttcttgttctttgtggtgctgccaattatggttaggcagagcgagctatgctagcgtgtgctcattctgtgctggcgttttgcagtacaaggtcgcgctgctgcagctgccggtgtcgccgcgcaaggaggagaacatcgcccgctcgcgcgcccgcctcgacgccgccgccgccgccggcgccacgctcgtcgtcctcccggagatatggaactgcccgtactcgatggagacgctgccgagccacggcgaggacatcgacggcggcgcgtcgccgtcggtctcgatgctgtcggaggtcgccgcccggaggaggatcaccatcgtgggcgggtcgatcccggagagatcatccgggcggctgttcaacacttgctgcgtgatcgggccggatggacagataaaagccaagcacaggaaactgcatttgttcgagattgatatcccaggagacatcactttcagagaatctgacacattcactgctggtcaagagcctaccatagttgacactgatgttggacggattggcatcggaatatgtcatgacatccgat

SEQ ID NO: 420012 - DNA, 545 bp, Oryza sativa
acgcttatggttgatcttatggccttgctgtgattacaactcggggcaacaatgtatatgggccaaatcagatgcctgagaagctcattcccaaatttattcttttggcaatgagaggctcgccccttcccattcacggtgatggctcaaatgtcagaagctatctgtattgtgaggatgtcgctgaagcttttgaggtggttcttcacaaaggagaggttgggcatgtgtacaatattggtactgtgaaggaaaggagggtgattgatgtggccaaggacatatgcaagctctatggcttggacaccgagaaggtcatcacatttgttgagaacaggcctttcaacgaccagagatacttgttggatgatcagaagctgaagaaattgggatgggcagagcgcacactatgggaagaggagttgtagaaaacaattgaatggtacactaacaatcctgattactgtggagatgtcgcatgtgccttgctccctcatacaggatgttgatgacaccttgagctgaaaagcataactggactgatg

SEQ ID NO: 420013 - DNA, 531 bp, Oryza sativa
gtctagtctagtctaccaccctcctctccaacctttctccttcctcctcatctcctcctccaagccgagccaccgaaattcctccaatcctacagttcgctcgcatctctccctctcctccccgtcccaggcgcggccaggacctccggatcggtgaaaagaggccgccttggtgcttcttggcgccgaatcttggggaggaggtcgctcagattcggatttagggtttttggtggtgagagggggaaaatggcgacggccgtggcgtgcgcggagagggcgacgagcgacatgctgatcgggccggattgggcggtgaacatcgagctctgcgacatcatcaacatggatcccggacaagccaaggatacactcaagctcctaaagaaacgcctgggaaacaagaattcaaaagtgcaaattctgacgctgtatgtgctagagactctaagcaaaaactgtggggatgttgtttaccagcaaatcattgagcgagacatattaagtgaaatggttaagatagtaaagaaa

SEQ ID NO: 420014 - DNA, 418 bp, Oryza sativa
tttttggtttttggaggtcagatggacttattcccatacataatggaccgataaatcggttcatttcgtcggcccatcagagtgcatgggccggaatttcgagcctaccaaacaagcccagaagtatcaacaggccttcctggatttgtacttcatggcacagctcgtaaacaccacaagattgaggcaaccgagcccagccatcatccagaagaagcgatcaaggtgcccctcgttgaggtcgtcggggatccaccccggccggccgccggtcgccgtcgcccacgacacggccgtcacgacgagcgagctcaggtactcccccgccgcgacggagatgaacccgagcgccgtgcaccaccgtcttcatggccggcggcgcctggctgtagaaaaagtccagctgccccacggtggc

SEQ ID NO: 420015 - DNA, 493 bp, Oryza sativa
atatcctctcgaggtcttgattagcttgtacagtttgtcctcgagctctcgaccggctccggcaatggcgtccacggacactgagcagcaggaacacgcagtggcgctgctacaacccgaggttgaagaagcatacaccactgatgggtctcttggcgtcgatggcaacccggcgctgaagcatcgcacaggcggatggatggcatgccgcccgattcttggcaccgagttctgctactgcctggcctactacggcatcacgttcaacctcgtcacctacctcaccgccgagctgcaccagagcaacgtcgccgccgccaacaacgtgtcgacgtggcaggccacctgcttcctcacgccgttggccggagccgtcgccgccgattcctactggggaaggtaccgcaccatggtcgtcagctgctgcatcggcgtcgctggcatgctcatggcggctctgtcggcgcttctgccgctgctgatcaatgacacg

SEQ ID NO: 420016 - DNA, 379 bp, Oryza sativa
attataaacttcatcgcttgtctccacatatccctcaaattggggacgatctgtttgttattaagaagcaccaacaaaggcttcagtttttcaccagaggcttcattcagtcaaagcttgggaacaagcctccttccatgggaacgtctaggaggtaggtccaaattcttcccactctggatcatcgactttggaaaaatatttttcgaccacctcgtcgtgcacctcttccaaccttggaggcatccactttgggtttcgatctctatccaacaatatatgccctgcatccctcaaagaagtctctactgaagtcaccacgcattacatggcaaaccattctatattctcgacgtaagcattcaccaacagtttgtgt

SEQ ID NO: 420017 - DNA, 550 bp, Oryza sativa
  unsure (1)..(550): unsure at all n locations
ggaggagcttttcctcttctccattctatcttctgttggagaacagcagcaagcagaaaagggaccagggaatcaaaggcttcctgtatagatctttggaggaaagatcctttctttctgcaggaattcagggcattgctggtgtcctcttcagttgtgctaaatctgtgacgagtatgcgccgcgtccgggtctcatcccaccaatctccagtccacaagcttggtgattcacagatgaaattgacacccaaattccggcttgccacaacctccgcattgccgtcgtcgatgccggcctctgatttggagcaagcctcatgggagacacccctcatacctggccttcctgatgatgctgctctcaactgtctcctccggctacctgttgagacccatgaggcatgcaggcttgtgtgtcgccggtggcatcacctcctagctgacaaggcgcggttcttcatgcagaggaaggtgatgggttttcggtcaccgttgttgttcaccctggcttntcaccgttgcactggtaagatacagtggaaggtgct

SEQ ID NO: 420018 - DNA, 497 bp, Oryza sativa
tttagcgtgcgagctagccagccagtgttagagcttgagctgcttgttcttcttctacctcctgcactcgcgtgctgcacaagtagctcagctagatagagcgtcagaaatggccagcaacaactcgagaacaaactccagggcgaactactccaacgagatccacgatctctccacggtgcagaacggcaccatgcctaccatgtactacggcgagaaggccatcgccgacttcttccctcctcacctcctcaagaaggtcgtgtcggaggtggtggccacgttcctgctggtgttcatgacgtgtggggcggcagggatcagcggcagcgacctgtctcgcatatcgcagctgggacagtcgatcgccggtggcctcatcgtgacggtgatgatctacgccgtcggccacatctccggcgcccacatgaaccccgccgtgacgctcgcgttcgacgtgttcaggcatttcccctgtattcaggttccgttctact

SEQ ID NO: 420019 - DNA, 393 bp, Oryza sativa
agggataatttaaatacttaatagtaatagactctttgatggagtattacaacatgcagcagtggcattaatacgccagtacattaattaagttacacatatgcaggctccattttggtttcttttaatttatcgtattacagaatttctgtagccttgcagatgatcacttggatatcatgtactagtaattaacaataggatgcatacaaaagatggcccaacgacaacagaagatgcgtgcatctgacattgtctggccttatttgttggtagtactccaattaattaacaagagatgatgcattcttgtgccttagtttcttcacatgcttggcttcacgttgagcctattcgcaatcttcacccccaacgactcattacactgggaga

SEQ ID NO: 420020 - DNA, 508 bp, Oryza sativa
ctccgccaagggcttctttgagtgcacccacgacgtcaccgacatcacctgcgccgtcttcctccggtccccgggcgcccagacccccgtcatcgtccgcttctccaccgtcatccacgagcgcggcagcccggagacgatccgcgacccgcgcgggttcgccgtcaagttctacacccgcgagggcaactgggacctcctcggcaacaacttccccgttttcttcatccgcgacggcatcaagttccccgacgtcatccacgccttcaagcccaacccgcgctcccatgtgcaggagtactggagggtcttcgacttcttgtcccaccaccccgtgaggcttcacaccttcttcttcctcttcgacgacgtcggcattcccaccgattaccgccacatggacgggtttggaaggaacacctacaccttcgtgacccgcgacgccaagggcaggtacgtcaagttccactggaagcccacctgcggcgtcagctgcttgatggacgac

SEQ ID NO: 420021 - DNA, 408 bp, Oryza sativa
ggggttaaaaagaagcttcggacatccattatttcatcgatgattacaacgcgcgcaaaagaaaatcgatttcaaacaaacagcttgtgctagtctctctctctctctctctctctctctctctctctcctccaaatctttggaaagaagaaaaaacagtggaattaaaggctaataaaacaagaggagaagagagaaactttgaaggaccatcatatgtatgatcctcatgtgttgattcaattgagttatttagtagtaggagtttagttgtccttgggggggtaagaggccatcttgttgatgccacatagaccttcacccttgccagggcccctcttcatgcggatgtaccccttctcgccccaatgtgggccccatgagttcttcaccaagatgtaatcttgg

SEQ ID NO: 420022 - DNA, 561 bp, Oryza sativa
tatagtgtaaagctggtgcgcctgccggtaccgagtccggaggtctcgggctttagcactatttgtttttacggagaagaggaaatagtcatacagagatcgacatggcgactaaggcgaccgtgggtgtcgccctcctgctgctgtagctgtgcggctgggtcgtgtgggtgggccgccgcaccgggggcgagctctcgattgtccgctactcgcgcgtggtcctggccgtcgcacgacacggatcccgagctcggtggagcgggaggcggaggcgcacgcgacggctttcgcagccttggaggagaaggacagcgaggatccaggtggtgatggacgccacgaggaacgaggaagagatgagcaagaaggtgaccagctactggctggggctcaacgagttcgccgacctcacccacgacgagttcaaggcgacctacctcggcctcacgccgtcgtcgacgaggtcgaacagcaagcactactcgtcggaggagttcaggtacgggaagatgagcaacggcgaggtgccgaaagagatggactggaggaagaagaacg

SEQ ID NO: 420023 - DNA, 458 bp, Oryza sativa
ctttgcacccaccgccactcgcagggatgcatggcgacgaagcaggtgcagcgcaccgacgaggacgcgacggtgttcgacgtgatctaccacggcgagcacacgtgcgtccacaaggcggtggccgccggcgccggcaagccggagacggagacggacacgaacgccgtcgtcgagagccgcctccacgacctgagctccggcctgacggtgcagatcgaggggctgacggcgccgccgcagcaacagcagggcggcggcggctggaacgccatgccgccgttctgcctgtcgtcgccggtgagcggcctggcgccgccggatcagcacaacccgttctccgcgccgtcgacgccggagaaccgtctcgccgccgccgcgtcgtcggcggcctcgccggcgacctccgactcgatggccgccgcgccgttccaccaggcggcggccggcggcggcga

SEQ ID NO: 420024 - DNA, 467 bp, Oryza sativa
gtttgcaccatcgtcgtcaagcccgccgagcagacgcccctctccgctctgtactacgctcacctcgccaagctggctggagttccggatggagtgatcaacgtcgtcccgggattcgggccgacagccggtgcggcactctcctcccacatggacgtcgacagtgttgctttcactggctctgctgaaatcggccgtgccatcatggagtcggcggcgcggagcaacctgaagaatgtgtctcttgagctcggcggcaagtctccgatgatagtcttcgacgacgccgatgtcgacatggctgtcagtctgtcatcccttgcagttttcttcaacaagggagagatttgcgtggacgggtcacgcgtctatgtgcaagaagggatctacgatgagtttgtgaagcaggccgtggaggctgccaagaactggaaagttggagacccttgtgatgctgccaccaatat

SEQ ID NO: 420025 - DNA, 328 bp, Oryza sativa
  unsure (1)..(328): unsure at all n locations
ggaacaaaacatttttattaccacaactttttaaggatggaattgagtagcaatactttcaccccaaaatacagtttagcgacaatattttaaaaaagccgcttgctttgcccccatggctggcaagctgagcaaagcagcttacacaaagaacacgagatcactttaaaccaaacgggaacgaacgaagaaaataccggggcttttttggctgaagatccacgaagcgggtcggtttcttttatttttaggctcctctccttctngatgatgggggtatggcaatggcaatggcgatgggatcttggcttaattgaagggaaggggc

SEQ ID NO: 420026 - DNA, 445 bp, Oryza sativa
ttctcctccggctcttcttcagtatcgaatcctctcttctcctcgtgcccaccaccaccaccgtagcaatggcgggcaacgggccgatcaacaaggaggacccgctcaactggggcgcggcggcggccgagatggccggcagccacctcgacgaggtgaagcgcatggtggcgcagttccgcgagccgatggtcaagatccagggcgccaccctccgcgtcggccaggtggccgccgtcgcccaggccaaggacgccgccggcgtcgccgtcgagctcgacgaggaggcccgcccccgtgtcaaggccagcagcgaggggatcctcaactgcatcgcccacggcggcgacatctactgcgtcaccaccggcttcggagggacctcccaccgtcgtaccaaggacggtcccgccctccaagtcgagctcctcaggcatctcaacgc

SEQ ID NO: 420027 - DNA, 479 bp, Oryza sativa
tctcgttctatggcgattcggccgtatatgaaaccttagtacggatggctcaggacttctcaatgaggtatccacttgttcaaggtcatggaaattatggttccatagatgctgatcctcctgccgcaatgcgatatacagagtgccgcttggattcactaacagaagccatgttcctgactgatctggagttgaatacagatgacttcgtcccaaactttgataattcacagaaagagccttctctgttgccagctcgtgttccatctctattgtcgaacggttcttctggaattgcagctggaatggcaacaaatattcctccttataatctgggtgagcttgctgatgtgctctctgttatgaatgaaaaccctgaagctactctgtaagaactactagaatgcatgcctggacctgactttcctacaggagggacactcgtgggaaatcaaggtattttggaggcctataaaact

SEQ ID NO: 420028 - DNA, 525 bp, Oryza sativa
tttattgtcaagtatgctgagcgtgggcttcgttctcttgctgttgcaagacaggaagtacctgagaagtcgaaggagtctgctggtggaccatggcaattcgttggtctgctgcccctgtttgatcccccgaggcacgacagtgctgaaactatccggaaggctctccatcttggtgttaatgttaagatgatcactggtgaccagcttgctattggtaaggagactggtaggaggcttggaatgggtacaaacatgtatccttcatccgcattgctcggacaaaacaaggacgcttcacttgaggcacttcccgtggatgagctcattgagaaggctgatggttttgccggagtcttccctgagcacatatatgagatcgtgaagaggttgcaagagaagaagcacatcgtcggtatgaccggagatggtgtcaatgatgcccctgctcttaagaggccgacattggtattgctgttgctgatgctacagatgctgcatgagtgctttcgacattgtgctcac

SEQ ID NO: 420029 - DNA, 510 bp, Oryza sativa
ggtaattcggttgaattcatcctttctaacattggatatctgcggaatcttaaaatcctcacacttgacagaaataagatctctgtcttacctgaagaattgggttctctatcaaatcttcaacaactctctatttctcagaattctttatcacgcctgcctaagagtgtaggagatttgcgcaatatgttgctactcaatgtatctgacaacaaactaattgcacttcctgaatcaattggaggttgcagttccctggaagaattgcaggcacttggaaattcaattgaagacgtgccttcatcaatctgtaaccttgtttgcctcaaatccgtatcattgcacgggaataagattcgtcagcttccccaaaacctactgaaagactgcaaggctcttcagaacatatcgttggatgacaatccaatctcgatggaccagtttcaacaaatggatggtcttacggaatgtgaggcacgccgtaggaaaaaatttgacaaacagattgat

SEQ ID NO: 420030 - DNA, 543 bp, Oryza sativa
ttttgatttccgcagcaccgcaccagagccaaggcggaggtagggttttagccggcggccatggcgctctcctcctcgctgctccaccgcctgctccgcggctctacccccgtctcttcctcctccgccgccgcctcctcaatactccgcgccaccttctgctcctcctcctcgtccgcccccttgcccaccgagtcgcccctttcctccgtcttcggcgacggcgccgaggtcagcaacgtgccgccgctgaccgcccccaagctcttcatcagcggcctttcaaggttaacgacggatgagaagcttaaaaatgcctttgctccctttgggcagctacttgaagcaaaagtcattacagataggatttctggaagatccaagggattcggttttgttagatatgctactttagaagaagctgagaatgctcggcaggagatgaacgcaaagtttctggatggatgggttattttcgttgatcctgctaaaccaaggcagcagaagcctgctcctcgtcctgacactgattcatcacacact

SEQ ID NO: 420031 - DNA, 86 bp, Oryza sativa
ggaaaggaaattaaactgatttattacttggtccattaaaaccatcacactcgggtccgtggggaaaccgggaaagttaaaaaaca

SEQ ID NO: 420032 - DNA, 479 bp, Oryza sativa
  unsure (1)..(479): unsure at all n locations
ttcaagcccaagtcgcgtcgcaccgaagcagagtagagaaggagaggagcggagcgccatcagccgtccgatcgagtgatccgatggctctcgctctctccacctctgctgctgctgccgctgccgccgcggcgcgggcgctcgcggcgagggtgacgacgacgaggggttacgccgcgtcggcggcgtcgtcggcgatgaggcgggcggcggcggcggtggaagggaagggcgctgcggggatgacgcatgcgaaggacgggttcgtcgtcgtcggcggcgagggaggtgtcgtgggtgcccgaccccgtgacgggccactaccggtcctccaacttcgccggcggagccgacgccgtcgacctacgngccgcccacctatgccgcagctacgcccgcgcgtgatgcgcgcgacctcgccgtcgtccgaccgacgacgacgccatccatccatatatatctgcttcgcgtcaactact

SEQ ID NO: 420033 - DNA, 540 bp, Oryza sativa
ccagtacatattgaggttgaagataaagttatcactaatgatgatgtgctaggagatgctgtaccatatgatcagcaagatgctctgcgtgtcgtatgttatcgcttgctggaaatgccccctgtgagagggcatgcacagtttcctggatcacatcctgtctctcttaacagtgagaatttgcaactactcagacagcgatactactttgctacatggaaagctgatggaacccgatatatgatgcttataatgagggatggctgtttcttgattgatcggaatttttgcttcagaagagttcaaatgcgctttccccataggaatcttaatgaaggactacatgagatgactttgattgatggagaaatgattatagacacagtaccagattcaggattgaagaggaggtatttagcatatgatctgatggcacttgatgccgtgtcaaaaaccaagttgccattttctgaaagatggaggctgcttgaagatgaaataattcgtccacgttattatgaaaaaaaacagtttgagagt

SEQ ID NO: 420034 - DNA, 512 bp, Oryza sativa
ttctacgcgtccggcacatgcaaaaaaaggttgcaaagccacgaaaagcttgggagattctcgatggcacggtccctcgcatgcgccttcttcttcgacgccgagccggtcggcgagaccgggcggcacgcgctggacgcctgcgcgctctgcaccaagccgctgcgccgcgatagcgacatcttcatgtacagaggggacacccccttctgcagcgaggagtgccgctacgagcagatgcacctcgacgccgcctgcgcgaggcaggccgcgagcgccaggcggaagcagcagcagcaggggcagcggagcaggcacgagaccgcgccggctgcgcccgtgtcccggaaggcgggggtgtccgtggcgagctgttgatgagctgcataccttaggtagacgagcgtgagcttgcaagatgtgatgaaggagttgttcttgctcatgtctggccggccgctgtgccgatggatggatctggtcggagtcgaagcagagaaaggacggatctg

SEQ ID NO: 420035 - DNA, 533 bp, Oryza sativa
tttcaacacgctcaccaaggtcgacctggtggagaggacggccaagaactggcacgaggagggctccgtgccgtccgagcccttcttcgtgccacgccccggcgccaccgaggaagacgacggcgtggcgatatcgatggtgagcgccaaggacgggtcgggctatgcgctggtgctggacggcaagacgttcgaggaggtcgcgcgggccaagttcccgtacgggctgccctacggcttgcactgctgctgggtgcccaggaaaaggaacagcaagtaacacacacgccggtccatcccaacatgtcaccgccagtactgattcgtctctgctgcttgcgtcttgggtctgcgcatcgaatcacagtacaagtggaggcttggatttgtagctacgaaaatggcagcatgaatgcagtcaccgcttggtaggtggtctcagaaggaaagaaagacatacatacgctgcacgtggtgaactgttagtacgtgatgtatgaagtacccgaagatgtaatatacgtggaaatgaa

SEQ ID NO: 420036 - DNA, 399 bp, Oryza sativa
  unsure (1)..(399): unsure at all n locations
ggcacactaagattcattcattcattcatttgatcaaagcaaacgagacgagctttcttcttgcgatcaaaaacacagatgggcaaccacacagttaacacaaactagatagttccacacaaaactaacgatgataacgatcggatgatgatgatggtagctcgattagatagatagataacttggccatgagggccccaccgctcagttcctccagttcccgtcggagttgccgccgccgcggctgccgtagccgccgccgtagccgccgccaccacggncgccaccgtagccaccgncaccggcgtagccgccttcacggcgctggccgtagccaccgncgncgncaccaccaccgtagccgccgccaccgtagccttcgcctccgccgngctggcc

SEQ ID NO: 420037 - DNA, 442 bp, Oryza sativa
gttggcttctctaccctttcccggttcggttcggttcggttcgggtccggttcgatttcggtttttccttcggttcgggggttggtgggaaagcatggcggcgccggatgttgagtaccgctgcttcgtcggcggcctcgcctgggccaccgacgaccgctccctcgaagccgccttctccacctacggcgagatcctcgagtccaagatcatcaacgatcgggagacggggaggtcgcgcgggttcgggttcgtgacgttctcgagcgagcaggccatgcgcgacgccatcgaggggatgaacggcaaggagctcgacggccgcaacatcaccgtcaacgaggcccagtcgcgccgctccggaggcggaggcggcggtggctacggccagcgcggcggaggcggaagctacggtggcggcggctacagtggtggtggcggc

SEQ ID NO: 420038 - DNA, 451 bp, Oryza sativa
  unsure (1)..(451): unsure at all n locations
ttctgggatcaccagtcgccaggccagcgcgaggttgtacgcggcaggacgacgaggcggcccggcgcgctctccccgcgccgccgccggggtcgcgggggacgaaatgccggcgtgttcggaagcagatcggtgacctgacctcccccgcgcggcgggatttcggcggccggaaggctggatctttgattcttgaggcgaatggtggtggaggggaggaggagggagggtctcncctttcctactctcctcgactcctccgccgacggccgattcccctccgcatgcgcgctccttcgccttcgcggaggcaagggcggatttggctcgctcctccgtggcgccgactgcaaggccggccagaagaagaccagcaacttcgacgcctgccgcgatattaacggacgacggctgcgccacgttaacgccgagcgccgtcttgaggagtgga

SEQ ID NO: 420039 - DNA, 510 bp, Oryza sativa
aaccaagacaggtcaacttgattgatatacaatatgacaaggtatcaaaacaagtcgatgttcatgccttgaaagaagtgctctggaatcacatcaatacatctgctgacactgatgacctgcaggaagacaaggacacagaatcacccctgtgcctatcgaaagtattgcaagatcttccaagctgcaaccctgatgctgcagcaacagaaatttcaccgcacctatatttcatttgcctcttgcatttggcaaatgagcacagcttgaccttacgtgatcgtccaacattggatgaaattgacatatacattcctgcttcatctctcgtgaagtaatcctgtagttcaatatgttgtgcatgtttgttttattttttgttggttagggacttctcgttctcggtgtattattagattgccttgtatgttgaagattatgtattatgtaatgagcagcatattattggatcgcgctaagctaatatataggtaacctatcatttactct

SEQ ID NO: 420040 - DNA, 388 bp, Oryza sativa
ccgacgcagtgacgaggtcatgcacgtacttgatggcaagatcctgggcaatcctgacttgatcatcgataactacagtgacagcatcctcgttgcatgcactgcttgcacacaagatgggtgccacccattgtaccgtcggccatgcgcttgagactaccaagtcccactactctgacctctactggaagacgactgaggatcactaccacttctaatgccagtacacaactgacttgcttgcgatgtaccacgctgacttcatcatcaccagtaccttccaagagattgccgggaacaaggacactgctggtcagcatgagtctcacatggcattcaccatgcctggtctgtaccgagatgtacacagcattgatgctaccgaccc

SEQ ID NO: 420041 - DNA, 399 bp, Oryza sativa
ggcttcctacgagcttacctccctcggcttctcttcggttgctggcgccttctctggctcagcggcagcggcggtttcagttgtttctggtgaagtgcttggggcaccatcttcaacagggacggtcttcttgacggtaccgaccttcacgtacttgcccataaacttgtactcccagtcctgcaatgcgtcgagttcaaatgggccaagaccagagatgtcaccggtcaaatcctggggctcgaaggacatcttagcgagtgctctgctggcatctttgccagcgaatagcgcataaggtccaccaggtccatagaacatcctgcatatggccgtcaaaatgtgaatggtaattagaaacacagttaaaaaatatttaagtatccactttcaaaacag

SEQ ID NO: 420042 - DNA, 533 bp, Oryza sativa
tttctaaactgcagagatactcatgaggtgaaacttgagccagggcttcaagtgcttaagattttcaaggaccatgtctgcaagacgtcgttactggatgactttgatttctatgataatcgtgagaagatgatgcaagagaggaaggcaaagcatcaacaactgaagaaggaaacagctgaggtagagattgatgtcttaaacaaagagcctcatggtaaagcaggacaagttgatgggaaagagaacggtgtgttggccgtttctgtaaatggtgttaccccagaagatgttcagttgacaaacgagaagttggccagtttgagcgtctgttaagttttttctcatcatttcagccattgaggggtggtgtaaggtgaagggctatataggttgtgaaggcagcaatcaaggcaattcaagatccatttgagtctccttgtgagtttctccgttgcttttgttaggacttggaggtggtttcataggagagctagaagttagctgattgtgcctgtgagatgtgcgatagc

SEQ ID NO: 420043 - DNA, 523 bp, Oryza sativa
cttcggttccgtgccctccacacgatccccccccccctgcactctctctctctctctctcgcccgagtctcctcctcccgcacggaagcagtagtcccgcaggcggagctctctctctctctccggcaaatcggcgaggatggaaatgttctttggcagttttcttaatgaatcagcatcacaagagtacttctctggtcgtccaaatgtcgagagatgcccattcctgagaaacatcaatggagctacaacattttcattttcttctgctttgccagtagctgcccgaggagccaagggtccaatttttgaggacggaccaggctttgattcagcatttaaacttttccatggacgggatggaatagctccgctttcaggaaagtcatatgtacctgatgagaacaacagcgagagcgttgatgccaagcctgaacctgctctgccgtttaacccattggctgctagagctgccacaataagtctatctgcatttgggccattcggctttaacttctttaat

SEQ ID NO: 420044 - DNA, 482 bp, Oryza sativa
ttacgctagctgcattgtagtgagagagagaggcggccatggcgctggcgtcgctgccgaaggtggtgatggggtcggtggcgttcggtgtgttctggatgctggcggtgttcccgtcggtgccgttcctgccgatcgggcggacggcgggggcgctgctgggcgcggtgctgatgatcgtgttccacgtgatcagcgccgacgacgcctacgcctccatcgacctccccatcctgggcctcctcttcgccaccatggtcgtcggcggctacctcaagaacgccggcatgttcaggcacctgggccggctgctggcgtggcggagccagggcgggcgcgacctcatgtgccgcgtctgcgtcgtcaccgcgctcgccagcgcgctcttcaccaacgacacctgctgcgtcgtcctcaccgagttcgtgctcgagctcgccgcctagcgcaacctccctgcgaagccgttcctgctcgcgctc

SEQ ID NO: 420045 - DNA, 318 bp, Oryza sativa
acacaaatgaactggtcatataacaccaggaaaggtgatcgaatccccagactttgattgatggatgtaagttttttattcaaatcaagcgactacatgatggcaagggccaccaacatgaaaaaatgccctcgggacgccatttttttcaagccccctaaaccatggaagcacaatttgcacaatgctggagccgttcatggctcgaacaccatgttttgggccccccttttgatcgattcgaagaggacagaccacagggagcgctcaccgaagcttgggaagaccacaactacgagcttccctttgttctcgggc

SEQ ID NO: 420046 - DNA, 354 bp, Oryza sativa
tttccatcttcctttcctctcgcagccgtcggcggggggagtggttagttggttactggcttgcagagttttcagagagatttaggcaatggcggaatcaggccaatcgattgcgagtgatgtgactgcactgatcggcaatactcccctggtgtacctgaacaaggtggtggatggatgtgaggcccaaatggctgccaagcttgagatcatggagccctgctccagtgtcaaggataggattggttatagcatgattacagatgcaaaagagaagggtctcattactccaggaaagagtgttttgattgagcctactagtggaaatactggtattgcccttgctttcatggc

SEQ ID NO: 420047 - DNA, 485 bp, Oryza sativa
  unsure (1)..(485): unsure at all n locations
ttctctctcttcttcttgggaggctgggagctaccagcacaacacaccaaggaagctgagcaggtgcgttgatttcttgatatcatggccaagaggcacctcttgttggtgacaacttgtttgtgggctctgtcatgtgccttgctgcttcatgcttcctctgatgggttcctgagagtcaacctcaacaagaagagattggacaaggaagatctcactgccgccaagttggcgcagcagggcaaccgtcttctgaagaccggcagttcagacagtgatcctgtccctctggtggactaccttaacacccagtactatggggtgattggcctcggctcaccgncgcagaacttcacggtgatatttgacactggaagctccaacctgtgggtttcttcagcaaaatgctatttttcgatagcatgctaccttcacagcagatacaactcgaaaaagtcgagctcttacaaagcagatggagaaac

SEQ ID NO: 420048 - DNA, 516 bp, Oryza sativa
  unsure (1)..(516): unsure at all n locations
atcgcattctccactcttctgcttttgccgttgcgtttgcgttttgcgtagcaagggaagggagagagctcgtgcttttggattggccgcgatgagctgcgggggcgccgggcagagcgggtggctgctcgagtacgggctggtggaggaggagatccagggctccgacttcatctacatggtcgacgaccccgcggccgtctccagcgtgctactgggcttcgacgttcccaggaaggaggacggcagcggcggccaggacaactctgcctccaagaaaagatctcgtccagaatcgagcgcaccgtctggcaccaaggcttgccgcgaaaagctccggcgagacaggctcaatgaaaggttcaacgagctcagcgcgatcttggagcccggcaagccgccgagggccgacatggtctncatcctgagcgacgccgcccgtcttctgagccagctgcgcgccgaggcccagaagctcaagagctcgaacgagtcgcttcaggactccatcaagag

SEQ ID NO: 420049 - DNA, 387 bp, Oryza sativa
tcttccgtttgagtatggtcacttcttcagttcttcctaaggtggttgatgatgccggcgagggcgaggccaaccctcgccgggcgaaatggtggtacgcgacgttccacagcgtcaccgccatggtcggcgccggcgtgctcagcttgccgtacgccatggctcacctaggatgggggccggggacggcggcgctggtggtgtcgtgggggatgacgctgtacacgctgcggctgctgatcgagctgcacgagtgcgtgcccggtgtgcggttcgaccggtaccgcgacctcggcgcgcacgcgctgggcccgcgcctggggccctggctcgtcgtgccgcatcagctcatcgtgcagctcggctgcgacgtggtgtacatggtca

SEQ ID NO: 420050 - DNA, 461 bp, Oryza sativa
cccgtcctccttttccttttcccccatcccctcctccccggcggcggcggcggcgcggaggcggcggcacgggagcggctagtggtttcgtcggcggaggcggaggcggggccaagatgttcgggcgcgcgccgaagaagagcgacaacaccaagtactacgagatcctgggggtccccaagaccgcctcccaggacgacctcaagaaggcgtaccgcaaggccgtcatcaagaaccaccccgacaagggcggcgaccccgagaagttcaaggagcttgcacaagcttatgaggtattgagtgacccggagaaacgtgaaatctatgaccaatatggtgaagatgccctcaaggaaggaatgggtggaggcggatcccatgttgatccatttgacatcttttcatcattctttggaccttcttttggtggtggtggcagcagcaggggcagaaagcaaagg

SEQ ID NO: 420051 - DNA, 332 bp, Oryza sativa
aaaaaaaacttatttttttttccaaaacaaaaaccacagccccaaaaacttggcttggccactatgatttttttgacaaacttagggcccaaaaaacattggaaaaagaaaaagaaaaacataacataccccctataacttaccattctttaaacctaaaaaaatttctttccaaatgctaaaagggcgttggagtttttaaggggggaactgaaaattaaagggccccagcaaattgattttgccgggggaaaaaacccaaaaaatttttttccaaggccccaaacttaaaggccctttaccccaacgtggattactttagcaaggtttta

SEQ ID NO: 420052 - DNA, 394 bp, Oryza sativa
tttttggttttttttttttttttttttttttagagctcccaacgcagttcttcaattcaaaaagactgcccaaacagaccaagggtatcatcatagcagcaaagttttttaacacgcaacatcaaagagacactaatgcaataagataacttgaagcgcggatcactagcaaatttcgcgcttagtcgacctcctcgatcttggggccagcaccgctgccgcctgccgggggagcatcgtcctcgtccatgccgccggccatgtccgcgccagcgccctggtacatcttggcgatgatggggttgcagatgccctccagctccttcattttggcatcgaactcatcagcctcggcgagctggttgccgtccagccactggatggcctgatcgat

SEQ ID NO: 420053 - DNA, 519 bp, Oryza sativa
ttaccattgagatcgattccttgtatgagggcatcgatttctactcaaccatcacccgtgccaggtttgaggagctcaacatggatctcttcaggaagtgtatggagcctgtggagaagtgcctcagggatgctaagatggacaagagctctgttcatgatgttgttcttgttggtggctccactaggatcccgagggtgcagcagctcctgcaggatttcttcaacggcaaggagctttgcaagaacatcaacccagatgaagctgttgcttatggtgctgctgtccaggctgccatcttgagtggtgagggcaacgagaaggtccaggacctcctcctgttggatgttacccctctctctctcggtttggagactgctggtggtgtcatgaccgtcttgatcccaaggaacaccaccattcccaccaagaaggagcaggtcttctccacctactctgacaaccagcctggtgtgctcatccaaggttatgagggtgagaggaccaggacacgtgaca

SEQ ID NO: 420054 - DNA, 370 bp, Oryza sativa
aaaggaagagaaaataatagaattacaaagcatttcaaaatgttcagggcattcgccatcattggacaaattccacgaggaaacagaacaaaaacagaaacaagagcacagtgttcatcccgcacatttcaaacattttattgggagtaaaacagatgcagtattctagggttcgaggtgacctgaggcgcgcagatcactcggcctgggcctccccggaggccagctcctgctgctggaggcgctcgagcgccttctggggcgcccaggtctcgagggtgaggtcgggcttggcgttgagcccgacgccgaggatgaccacggtgaggaacgaggtgacgtaacagggcaactcccagtcctcccactt

SEQ ID NO: 420055 - DNA, 496 bp, Oryza sativa
ttccgatctccaccaccaccaccaccacgcgggcgcgcgcaccaaccgggggggcttcgatgcgggcgatctcgtcggcagcgggggggatgctgcgggcgcggctgcgcggcggggcgcgcgtccgcggcggcggcgggcacggggaggggggcgggcggtggacgaccccggggcacgaggagcagcccaagggctacctattcaaccggccgtcgccgccggcgggggagtcgcggaagtgggaggactgggagttgccctgctacgtcacctcgttcctcaccgtcgtcatcctcggcgtcgggctcaacgccaagcccgacctcaccctcgagacctgggcgcaccagaaggcgctcgagcgcctccagcagcaggagctggcctccggggaggcccaagccgagtgatctgcgcgcctcatgtcacctcgaaccctagaatactgcatctgttttactcccaataagatgtttgagatgtgccggatgaa

SEQ ID NO: 420056 - DNA, 491 bp, Oryza sativa
ttatgcttgatactgccaggagtagctcctctattgagaagagctatgagctgcctgacggccaggtcatcaccatcggagcagaaaggttcaggtgcccggaggtgctcttccagccatcttttattggtatggaagctcctggcatccatgaagccacatacaactccatcatgaagtgcgatgttgatattagaaaggatttgtacggtaatgtggtccttagtgggggatctacaatgttccctggtattggtgatcgtatgagcaaggaaataactgcacttgcccctggcagtatgaagatcaaggtagttgcaccgccagagaggaaatacagtgtctggattggtggttccatcctggcttctctcagtacctttcagcagatgtggatctccaaggccgaatacgatgaatctggtccaggcatcgtccacatgaagtgcctctaagtttgtgggcagatttgtaccattatcagctgattg

SEQ ID NO: 420057 - DNA, 421 bp, Oryza sativa
acgatttttactctcgcggccgcagcctcttccacctcctccacgagaacagaggagaggggaggacgccgctgccatggccggcgaggttggcgatagcgaagggcgtggcgcgggggctggcctacctgcaccagacgctgtcgctcttccaccggccgccgcacggcgacctgaagtggtggaacgtgctcgtcgtcttcccggggcccggcggccgcggaggcggcggcggcgactcggtgccggtggccaagctgactgaccacgggtttcacccgctgttgtcgcaccacgcgcaccgtctcggggcggtcaaatgcccggagctcgcgcgcggaaggcgtgggctctgactccgcgccgacgtgttctgtctcggccttgtgctgcttgaggtggtcaccgcgaaggtccccgt

SEQ ID NO: 420058 - DNA, 371 bp, Oryza sativa
acggtttttctctctctgtttgaagccacggtgaaaaagcttgggtgatttcttggaagcgaagcgtgcggggagaagaagaagaagacgaagaagaagaggggggaggaggaggagcagcatggctgagcacaaggaggagcacgcggtgatggagaagctctccgagaagctgcacggcgactcctcgtcgtcttcctcggactcggacgacgacaagaagggttcctcctcgtcgtcggcggcggcggccatgaaggccaagatctaccgactattcggacgcgagaggcccgttcactccgtcctcggcggcggcaagcctgctgatctcgcgctatggaggaacaagaagatctccggtggggtgc

SEQ ID NO: 420059 - DNA, 467 bp, Oryza sativa
ctaagttttccttacactgcaacagttgtcgaccaccaatagttcaaattctacatacatatatatgtacagtttggtcaacttgttatttattaggtgctttgctagatttgtttattactttattaaatttaaaacccccttctctttactttatcatgttacgtccacatgtactaacactgttaagccaaacccgtataagctatttaacttgcccatctattgttcatttgctcttgcacatctagttccgaacaaatattatcctgttgcatctaaatgcagattccggaagcctacagtcaaatcatttgtcttggactgtgaaattgttgcttatgaccgtgaaaagaagaaaatattaccttttcagatacttagcacacgggcccgcaagggtgttaccataagtgatatcaaagtgtcagtctgtacttttggctttgatattctttacatcaatg

SEQ ID NO: 420060 - DNA, 553 bp, Oryza sativa
tttcaggaacttcttctgaagcttaatggtgaccgtgcaatttgggagtatccatttgctgtggctggtgtaaatataacattcatgctcatccagatgcttgatcttcaatcagttaaaccaaggtcgttcatcggagcagtttttctaaagctactttctggtaaagcctatgtttcataatcccttaggatctacaggagatgcttattgtttgtttcttttttgaacctaaactgagtcatgcatttgttcctttgcactccattagtgacctgtgatcaggctttagggtgtatgattgtacagatgttgcagctacaagaatttgtgtttcagtatatttttgttatataaaccagctctattgattttgcaaatagatgactattgtgttatgactattgatagtctacgtttgctaaattcactctaatggtctaaggtataccacactagtcatacttcttgaaacagacaacatatattagattggtgaaggatttagtaataattccctgaatatttgtttcatactatagtgctactaaaa

SEQ ID NO: 420061 - DNA, 492 bp, Oryza sativa
ttccatctctcgatccatttctccccccaaattcttctccaatcaggtcgattccgtcctcttcgagcagatcagctcccgctgatcgaatcggtgtcgaattttggttgggggtgccggtcctggggtggatcctggtggggagaaagaacgtgacttttggtggtgggatttgggaggaattgtttgcgcttgaagggggagatttagctctcttggccttggttgccccggcgcgcacagaaaaaaactctgtgagctataagaagatcgccactcacgtgcgccggtcctgtttcctccactcgttctgggttgtctccctctactggttttatgtgatctcataattctgggggaatcatcttctccgcgtcaatccgccattgttactagtagtagtagagctctcttgttgatggtcttctgcttcgtgatcttgttcggctgattaaatgatcgtagcagcagaagacgcagctgtttgtagac

SEQ ID NO: 420062 - DNA, 512 bp, Oryza sativa
tttaatcttaagaaaaaaagagttttaagcatacaaatataagcatcaatctgatctgcattcgacactttggtcactagttgagttgagttgagagttgctgacaaagcaagcggctttccatgtctatcacctccgcttcccgccgcgccggcgccgtcgtgctccccatcctccgacgaatcggcggcgcgttccgccgccccttctcgtcggagccggacccggcatcctccccggggtaccacgtcgccggcgggcccagcttcatgtcgcgcgcggtgttctgggagcccggccgccctctcaccctcgaggacttccgcatgccgcgccccaaggccggcgagctcctcatcaagaccaaagcttgtggagtttgccactccgatctccatgttctcaagggtgagctcccattctccagcccctgcgttgttgggcatgagatcacctgggaggttgttgaccatggtactcacacccctgctgagatcatcaacaggttccca

SEQ ID NO: 420063 - DNA, 369 bp, Oryza sativa
acttctcccagcacaaatgcaattcaccagatcgtccgatcaatggagcaaccggagcgacacggcgagctggggaggacgatgacgaggatgtcgtggcgtcaagaagccgcttcagggcttccagatgatggtggtctcggcgatcatggaggtgacgatgtaagggtccatgttggacgccggccggcgatcctcgaagtagcccttgccgttctgctccgtctcccggccgacgcggaccgaggcgccgcggttggcaactccccagctgaaggtgttgatgtcggcggtctcgtgcctgccggtgagccggcgctcgttgccctcgccgtaggcggagatgtgctccttgtgcctgagcttgag

SEQ ID NO: 420064 - DNA, 471 bp, Oryza sativa
tgcttcctgcttttgattgtccgccatggcttctctcaccgatctcgtcaacctcaacctctccgacaccacggagaagatcatcgccgagtacatatggatcggtggatctggcatggatctcaggagcaaggctaggactctctccggccctgtgactgatcccagcaagctgcccaagtggaactacgatggctccagcaccggccaggcccccggcgaggacagtgaggtcatcctgtacccacaggctatcttcaaggacccattcaggaagggaaacaacatccttgtcatgtgcgattgctacacgccagccggagaaccgatccccaccaacaagaggcacaatgctgccaagatcttcagctcccctgaggttgcttctgaggagccctggtacggtattgagcaagagtacacccttcttcagaaggacatcaactggccccttggctggcctgttggtgg

SEQ ID NO: 420065 - DNA, 494 bp, Oryza sativa
tttatgatggtggtgagagagagaatctcccccctgggtcttatgtagtattgcaattagagaaggaggagattttagcaccacatactcacttctgcttgatctgtggcaagggttttaaaggagatgctaatcttaggatgcacatgaggggccatggagacgagtacaaaactgctgcagctcttgcgaaaccttcgaaagattctagcttagagtctgcaccagttacaaggtactcgtgcccatatgttggctgcaagcggaacaaagagcacaagaagttccagcctctcaagacaatcctgtgtgtgaagaaccactacaagagaagccactgtgacaagagctacacctgcagccgttgcaacaccaagaagttctcagttatcgcggacttgaagactcatgaaaagcactgtggccgcgacacgtggctatgctcgtgtggaactaccttctcagcaaagacatgttatttgggcatgttgctc

SEQ ID NO: 420066 - DNA, 346 bp, Oryza sativa
tttatccttttaccatggatcaccgcctcctcctgctcggtctcctcctcctctccccggcggtggccgccgcctcagtccccggcgaggaggagccgctgatccggcaggtggtcggcggcggcgacgacaacgagctggagctgaacgcggagcgccacttcgccagcttcgtccagaggtttcgggaagtcttaccgtgaccgccaccaggacccgtaccggctctccgtgttcaaggccaacctccgccgcgcgcgccgtcaccagctgttcgacccctccgcggagcacggcgtcaccaagttctccgacctcaccccggccgagttccgccgggcctacc

SEQ ID NO: 420067 - DNA, 382 bp, Oryza sativa
aaataagaatgtgcagcattttcaaacttgcaactcaaataaaacatcaacaggaatgagatgcaaatgagcaaattgagcacatatttaggttcaaatccaacttattcataaagcatactgctgtcccacaggaaactgtttcataaaactaacatatcatacggactcgatggtccattaaaccagacacaagtagacatcagcaccacaaatacttgacgaacagaggctcgggatgaccaggcacatcggcagctccaccaaactggctgattactgaccaccacggaggcggagcaccaggtggagggtggactccttctggatgttgtagtcggcgagggtgcgtccatcctccagctgcttgccagcgaagatc

SEQ ID NO: 420068 - DNA, 552 bp, Oryza sativa
  unsure (1)..(552): unsure at all n locations
ggcatccacccggaccttcagcttctcatcttcgctggcaagcagctggaggatggcaggacccttgctgactacaacatccagaaggagtcgacccttcaccttgtcctccgcctccgtggtggcatgcagatctttgtcaagactctgaccggcaagactatcacccttgaggtggagtcttctgacaccatcgacaacgtcaaggccaagatccaggacaaagagggcatccccccagaccagcagcgtctcatcttcgccggcaagcagctggaggatggcaggacccttgctgactacaacatccagaaggagtccaccctccaccttgtcctccgcctccgtggtggcatgcagatctttgtcaagacactgaccggcaagaccatcaccctcgaggtggaatcttctgacaccatcgacaacgtcaaggccaagatccaggacatggagggcattcccccggaccagcagcgtctcatctttgccggcaagcagcttgaggacggcaggacccttgctgactacaacatccagaangagtcaacg

SEQ ID NO: 420069 - DNA, 392 bp, Oryza sativa
ggggattacgaaacaatgggctatgcccaagacaagtcaatactacaacatctgtggcgagtacagaggtacaaaagtcaggcaccgtaagcctttcgattaaaaaccaaactgaaacacgcacgattttttaacaccccacgaaaaacaatctgatacctagctcctttggtggtggaacctaaagagctttatcttcccaaaacatccacatcattatctgtcatgactatatagtttcgatacgtaaaaaggcagcgttcactcagggatatccgccatgtcttcctttcatttaagcccggccaagatgctttaagccttgttggcaatgttgttggaaagccagtcaagcccctcatacaaccccttaccagaggtagcacatgtgc

SEQ ID NO: 420070 - DNA, 530 bp, Oryza sativa
tttctctctctctccgcccatttctcctctccacctgcgatccatccgcgcccgcgaggaggagggagccggacgccgccgcggggagagcaggggagagaaggagaggaggagatcgccgtcgccgtcgccgtcgccgtcgccgatctcgagcgggagcggagatggggctcacgttcacgaagctgttcagccgcctcttcgccaagaaggagatgaggatcctcatggtcggtctcgatgcggccggtaaaaccaccatcctctacaagctcaagctcggcgagatcgtcaccactatccccaccatcggttttaatgtcgaaactgttgagtacaagaacattagcttcaccgtttgggatgttggtggtcaggacaagatcaggcccctgtggaggcactatttccagaacacccagggcctcatttttgttgtggacagcaatgacagagagcgtgttgttgaggccagtgatgagctccaccgtatgctgaatgaggatgagctacgtgatgctgtgctgctg

SEQ ID NO: 420071 - DNA, 408 bp, Oryza sativa
gttcggcaacacatgagagttgtcttgcatttctttagaagggccttgtcaccggggacagttcctatcaaaaagggtgataagcagttgatcacatattcagtcatcattacgatgcaactattcggaccgagattcatccaatacgccataatgttacaggaaacgaactaatgtagctgctccactattacgaatttgatcgaacggctgaacggctcctgattcacctcacacacttgtatgccaactcgatctttgccacccatcactagtctgctagtttgggaacttcattttgtactgctgagcagtcataaaggtcgctgtaatcatctttcctgcgaaccatctaccatgcaatgcgcgttgagcagctgtcgcagctgctacactgtcgaaatgaag

SEQ ID NO: 420072 - DNA, 509 bp, Oryza sativa
tcttcctctccctgagcgtcgccgcacggaggaggaggagatggtgagggagctccagaaggagcgcgaacgcagcgaccgtaaccgtgactaccgtgaccgcgatgttagacgtaggaaagatgacggtgcatagccagaagctgatccagaaaggagatcaaaggactgtatttgccttcagctatctttgaaggcagatgaaagagacgtctatgagttcttctcaagagcagggaaggtccgtgatgttcgccttattatggacaggaactcgcggcgttccaaaggagttgggtacattgagttctatgatgctatgtctgttccaatggcgatagctctaactggtcaggtgcttcttgggcaacaagtgatggttaagccctcagaggctgaaaagaatctagttcagtcaaacgtggcatcaggtggaatagcttcaggtggagcaagaaaagtgtatgttggcaacctacattccaatatcactgaggatcaattgagac

SEQ ID NO: 420073 - DNA, 543 bp, Oryza sativa
gtccagccttatctcctttccccccaccacctccaagatatttccccacctccgccgccgccgccgccatggagtccggcctcgtcgcaagccaccgtctgcgcgtccccttcgccgtcgaccaccaccgccaccacccggccgcgccgtcgcacctcctccgccagcggcggggcagcgtcgccgccaccccactccggctcgggctccacctccccacgccgaccccgctccgcctccccgccgcgctcccgctccgcccttccctcccgcctctccgcgccgccgtcgcgtcggcggcggcaccggagccggtggggtcggcctcgcccaagttcctgggcgtggagacgaagacgctgaagaagatcgagccgctggggctcatgttcttctgcatcctcttcaactacaccatcctgcgggacaccaaggacgtgctcgtcgtcaccgaccagggcagcagcgcggagatcatgccgttcctcaagacgtgtgtcaacctccccatggccactcggttcatgctgctctacaccaagc

SEQ ID NO: 420074 - DNA, 417 bp, Oryza sativa
tttaaagcggcggcggcggcgacggcggcggctgcgggtccgatggatctggtggaggcggaggcggaggagcagccgccggacgaggacggcgacgaggaggggtacgtcgaggcggaccccgcaggccgcttcatccggtatgatgagatcgtggggtcaggggccgtcaaaacggtctacaaagccttcgataagctggagggtgtcgaggtagcatggagccaatcccggatcgatgactctgtcatggggtcctctaagaagatgaagcaactaaacacagagattcaacttttgaagacactcatgcataagaacatcgagaaaatgtttgcttcatgggtgatggggagaagaagactgtttacataatcacagagttgttcacatacgggagctcgacacagtaccgga

SEQ ID NO: 420075 - DNA, 338 bp, Oryza sativa
catgttaaactacagttactttgagacatacatatgagctaatgagggggggatgaatctgcagagcctggaaattatcaaccaaagctttaatattggcgacgtgaagccagcaaacatggaggagctaactgaggagatcacatgtgcggagttccacccagcttattgtaatacattagactatagtagcttggtggtctagagaaagcgcgactatacacaaaggctagcattgttgtggaggcctgcgaccgggagctgaggagcatgaaccacctggatcgagatcctttttttacagagataattgcatcggtttcagatttaaaatttgc

SEQ ID NO: 420076 - DNA, 371 bp, Oryza sativa
tttcgtttatactccggctcttattcagtgtcgaatcctgtcttatgctggtgcccaccagcaccaccgtagcactggcggtcatcgggccgatcaacaaggaggacccgctcaactggtgcgcggtggtggcctatatggtcagaagccacctcgacgaggtgaatcgcatggtggtgcagttgcgtgagccgctggacaagatccagggcgccaccctccgtgttgtccatgtggtcggcgtaatctaggtcaaggactgcgccagcgtctgcgttgagctcaacgaggaggcccgctcccgtgtcaaggtcaacagcggttggatcctcaactgcatcgtccacggtggagacatatacggcgttact

SEQ ID NO: 420077 - DNA, 478 bp, Oryza sativa
  unsure (1)..(478): unsure at all n locations
ctcacctctcatcaacattcgcgacgacgaaaagaaaaaaaaaaaagaatctcgtctcacccccaatggcgcagatcatcgacgggaaggcggtcgccgccgacatccgccgcgaggtcgccgccgacgtcgccgncctctcctccgcccacaacctcgtgcccgggctggcggtggtgatcgtggggagcaggaaggactcgcagacgtacgtgcagatgaagcgcaaggcgtgcgccgaggtcggcatccgctccgtcgacgtcgacctcgccgaggacatctccgaggcggcgctcgtcgccgaggtccaccgcctcaacgccgacccagccgtccatggcatacttgtccagcttccattgccaaagcatattaatgaggaaaagatattgaacgagatcagcttagagaaagatgttgatgggttccatcctctgaatattggcaagcttgcaatgaaaggcagagacccact

SEQ ID NO: 420078 - DNA, 399 bp, Oryza sativa
  unsure (1)..(399): unsure at all n locations
tttactgcgtcacccagggggccaagaaggggctcaccatgaaccccaccggcgacctctgcagcgcgcgcttcagcgagaagaacctcctcaccgccatcgaccgcgaggccgtgttcagctacgccgacgacccgtgcagcgccaactacccgctcatgcagaagctccgcgccgtgctcgtcgagcacgccctcaccagcggcgacgccgagcccgaggcctccgtgttctccaagatcaccaagttcgaggaggagctccgctctgcgctgccctnggagatcgaggccgcccgcgtcgtcgtcgccaacggcaccgacctcgtcgccaaccgaatcgtcgagagcccggtcgttcccgctctaccgctttcgtccgcgaggagctcggctgcgt

SEQ ID NO: 420079 - DNA, 223 bp, Oryza sativa
tccacgcgtccggaagctcaagtacagtttgcacttgagagaggcatgccagcaatagcatctgctatgggcaccaaaaggctcccataccccagcaggatctttgatgtcaatcattgcgctcattggagggtacattggcacatcgaaggagggatgctattgctggaactgagccgcctattacgcactggtggttactacgcacggtctgtcactcctg

SEQ ID NO: 420080 - DNA, 471 bp, Oryza sativa
cacgttgtgttattaatgataccagggcacgagggaggcacggccggctgagagtgagatcgctgagatggacatcagcgaggtgctgggcgcaacggcggagtgggcggtcaccttggtggccatggctgtgggtctcctggtggtggcctacttgtacgagccgtaccggaaggtttggcacgtgccgggtcccgtgcctctgccgctcatgggccacctgcacctgctcgccatgcacgggccggatgcgttctccgttctcgctaggaagcacggtcctgtcttcagatttcacatgggaaggcatccactgatcattgtggcggatgcggagctgtgcaaggaagtgggcctgtagaaattcaagagcattccaaattgaagcatgccctcctccattgccaaatcttctatccataagaaagggttgttcttcataaggtgaccgaggtgggacgtcatgagaaa

SEQ ID NO: 420081 - DNA, 381 bp, Oryza sativa
tggactcgtgggggaagtccaaaaggctgctgctgctctgagggggtctgaccaccgccgtgctaccaatgtatagcgctaggttggacgcacagcacaagaagctcaaccttacagtgctggctacaaccacaattggttcattcgcacagactgtggagctcaggagagtccgccgtgagtacaaggctaaaaagatctatgaggatgagtacgtcagcgccatcaaggaggaaatcagcaaggttgttaagatccaggaagagcttgacattgatgtgcttgttcacggcgagcctgagagaaacgatatggttgagtactatggtgagcagctttctggttttgcatttactgccaatggattgggtgcaatcctat

SEQ ID NO: 420082 - DNA, 476 bp, Oryza sativa
agctttgtcaagggtattgttgattctgaagaccttcccctcaacatctcacgtgagatgctccagcagaacaagatcctgaaggtgatccgcaagaaccttgtgaagaagtgcgtggagctcttctttgagatcgctgagaacaaggaagactacaacaagttctacgaggccttctccaagaatctcaagcttggcatccatgaggactccaccaacaggaccaagattgctgagctcctgaggtatcactccaccaagagtggtgatgagttgaccagcctcaaggactacgtaacccggatgaaggagggccagagtgagatctattacatcactggtgagagcaagaaggctgttgagaactcccccttccttgagaagctgaagaagaagggatatgaagtcctgtacatggttgatgccattgatgagtacgctgtttgtcagctaaggagtttgagggcaagagctcg

SEQ ID NO: 420083 - DNA, 464 bp, Oryza sativa
tccacgcgtccgcagagacacacctcaccagcttgatcaagagctagccaagccaaatggagctcctgccatggcttctcggcttcgtggtcaagtacccggagatcatggcgtccgccgcttgcttcttgctgctcttctgcaggtttaggaggaggagcaagcggattccgacgaactggccggtggtcggcgcgctcccggcgatcgtggcgaacgccgggcgcgtccacgactgggtgacggagttcctccgcgcggcggcgatgtcgcacgtcgtcgaggggccgtggggctcgccgggggacgtgctcatcaccgccgacccggcgaacgtggcgcacatgttcacggcgaacttcggcaactaccccagggggaggaggtcgccgccatgttcgacgtgctcggcggcggcatcttcaacgccgacgcgagtcgtggtcgttccaacagtcggaggc

SEQ ID NO: 420084 - DNA, 472 bp, Oryza sativa
  unsure (1)..(472): unsure at all n locations
ttctcttttcttcttcatcgcaagctagtaagagtgaatcgaagatgatgaagaagctggtgaggttgctgatcatggtggaggtggtggccatggcggcggcgccgcggcgagcggcggcgctgagcatggactactacgggatgagctgcccgttcgcggagatggtggtgaggagcgtggtgagccaggcgctgatgggcgacccgtcgctcgccgccagcctcctccgcctccacttccatgactgcttcgtccagggctgcgacgcctccgtcctcctcgactccaccccggacaacaccgccgagaaggacgcgctcgccaacaagagcctccgcggcttcgaggtcatcgaccgcatcaaggacgccctcgagtcgcggtgccccggcgtcgtctactgcgccgacgtgctcgccctcgccgngcgcgacgccgtcatcatggcggngggcccgtactacggcgt

SEQ ID NO: 420085 - DNA, 373 bp, Oryza sativa
  unsure (1)..(373): unsure at all n locations
ctaattcaaataaagttttcccggcaactaccaagggtgttgggcacttggctggcattttacatgactttctggagaaacccaacagtgcggttgatggtgccaacgatgctatgctatatacacttcctaaggaagagttgttagaattgtttctaactgtgagcagccaactttcacttctatggaatgctttcttgaaatttcataggataaataaaaccaagatattggactacttgcgtgatatttgnggctcttgaccggaaatcaaaatggtcaatatgggactggttcacttaaaaattgagatcccacaccggtatttaacgtagtaccgacgatgaagtcatttaccggcattcccttttga

SEQ ID NO: 420086 - DNA, 483 bp, Oryza sativa
  unsure (1)..(483): unsure at all n locations
ctctctctctctctcctccgcatcaccaccaccgccgccgacgagctccggtcgccgccggcgagaggcgccgcgcgatccgggagatgccgccgctcacggggcccaagtccggggacgctctcttcggcagcgtcgagcgcgtcaacgcggagctgttcacgctcacgtatggggccatcgtgaggcagctgctcacggatctggaggaggtcgaggaggtcaacaagcagcttgatcagatgggctacaacattggaactcggttggttgatgagttcctggccaaatcaaatgtataagggtgtgttgacttcaaggagactgccgatgtcattgcaaagcttggattaaaatgtcttggggtgtgactgcaactgtcaccaattgggatgctgagggtacaagctgcagctntgtattggaggacaatcntcttgtagattttggtgaacttcctgatacttgccaaggtcttcagta

SEQ ID NO: 420087 - DNA, 447 bp, Oryza sativa
cttcgttgccaagcgtctcattggcaggaggtttagcgatgcttctgttcagagtgacattaagctctggcccttcaaggtgattgctggacctggtgacaagcctatgattgttgtccagtacaagggtgaggagaagcagtttgctgccgaagagatctcctccatggtcctcatcaagatgcgtgagattgctgaggcctaccttggcaccaccatcaagaatgccgttgtcactgttcctgcctacttcaatgactcccagaggcaggccaccaaggatgctggagtgattgctggtctcaatgtcatgcgcatcatcaacgagccaactgctgccgctattgcctatggtcttgacaagaaggccaccagcgttggtgagaagaatgtcctcatctttgaccttggaggtggtacctttgatgtttccctccttaccattga

SEQ ID NO: 420088 - DNA, 419 bp, Oryza sativa
cttcctcctccccaaaccctagtcgccgccgccggcgtactcgagagaaacatcagcatccatggcgggcaagggcgagggtccggccatcggcatcgaccttggcacgacctactcgtgcgtgggcgtttggcagcacgaccgcgtggagatcatcgccaacgaccagggcaaccgcaccaccccctcctacgtcggcttcaccgactccgagaggctcatcggagatgctgccaagaaccaggtcgccatgaaccccatcaacaccgtcttcgatgccaagcgtctcattggcaggaggtttagcgatgcttctgttcagagtgacattaagctctggcccttcaagggtgattgctggacctggtgacaagcctatgattgttgtccagtcaagggtgaggagaaagcaagttgct

SEQ ID NO: 420089 - DNA, 454 bp, Oryza sativa
gttgcggtagactggttttgcttcctcagctcaacccgctcgagctgggagcggttcgttagctgtgcaccaatggcgtcatccagggcgtcggcttcctgtgccctcttcctcgcccttcaacctcctcctcttcgccatcaccaccgcctgcccgtcctgcggcagcggcggcggcggcggccatggccattacggtggcggcggcagcagcggcggaggcggcggctacggaggaggcagcggcggctactgaggaggcggcagcagcggcggcggatactgcggcggcggggggtcgtcgactagcgggtggtacgggaagtgcccgacggacgcgctgaagctgggggtgtgcgcgaacgtgctggacctgattaaggcgaaagcgggggtgccggccactgagccgtgctgcccgctgctgaacgggctggtggacctggaggccgcc

SEQ ID NO: 420090 - DNA, 347 bp, Oryza sativa
ctgggggtcgctgatacttccctggaagcacgatacatcacccttcatgtctgcgacctcgttgcagagagaggtgcacgcttagctgctgctggtatatatggcattctaaagaagctgggcagggacagagtgccaagtgacggtagtcaaaagcagaggactgtcattgctctggatggtggtctctatgagcattacaagaagttcagaacctgcctagaagcaacgcttgcagacctgcttggagaggaggctgcctcatcagttgttgtcaagttggcaaacgatggctctggcatcggaactgcacttcttgcagcatttcacttccagtatgctagcgt

SEQ ID NO: 420091 - DNA, 466 bp, Oryza sativa
ggcttccactgatggtaacgacgatagtgtatatcctattgcagttctaatcgacgaattaagaaatgaagatgtgcagctccgtcttaattcaataaagaaactttcaacaattgctctagcattaggagtagagaggactcgaaaagaactaataccatttttgaccgagacgatctatgacgaagatgaagtattgttggcgcttgccgaacaacttggaatgttcacaccgctggtgggaggtccagagcatgtgcattgcttgctggcgccgctggaaagtctggcaactgtagaagagacagtggtgcgtgacaagcagtggagtcgctccgaatcattgtagcacagcactccccgagtgatcttgagaatcactttgtgccgttggtgaaacgattgtctagcggcgattggtttacctcgagaacatcagcatgcggcctatcagcgtatgttatgc

SEQ ID NO: 420092 - DNA, 361 bp, Oryza sativa
cccagccattctctccgcgacggtctcgtcttccccacccctcgcctcctcgcgcgctcggtgagagaagcgaagaagaagaagaagaggaggaggaagaagccaggctaagccccgcggcatggcggaccagctcaccgacgaccagatcgccgagttcaaggaggccttcagcctcttcgacaaggacggcgatggttgcatcacaaccaaggagctgggaaccgtgatgcgttcgctggggcagaacccaacggaggccgagctccaggacatgatcaacgaggtcgacgcggacggcaacggcaccatcgacttccggagttcctcaacctgatggcacgcaagatgaaagacaccg

SEQ ID NO: 420093 - DNA, 494 bp, Oryza sativa
ctgaagtgatcggcggttgctgtggcggagcagctttcttcttcctggggcagggcagggggaggtctcgttgcgatggcgggaaggggcgagatgccgatgaggcctgtgcggccagggccgccgatgcagtaccgggggcctcctcccatggctcgcgcgcgcgtcgaacccgtcgatcgcgagaagacgtgccctctcctgctccgggttttcacaaaggttggtggccatcaccaaaatgaagagtttgccgtgagaggaaaggagccgaaagatgaagtgcagatatacacgtggaaggatgccacactccgagagctcactgatcttgtgaaagaggttgctcttgcagcaagaaaaagaaatgcaaggctttcttttgctttcgtgtaccctgataagcatgggtcgttcgttgtcaaagaggtgggttcaaccttctcttatggccatgggaggggagatgatgctaaaactcttgcagagctagg

SEQ ID NO: 420094 - DNA, 405 bp, Oryza sativa
  unsure (1)..(405): unsure at all n locations
tgcaaacccaaacccacccacctccgctccgcggccgtcttcttcttccctttcttccaccgcaagaagaagaagaaaccccacccgagccaagccccacacacaaagcgagcgactcggcggcggcggcgatggccacggtggcgatggacatctccaagccccctcccgcggcgggcggcgacgaggctgcggcggcgaaggggaggggcggcgccggagaggaggnggaaggggggctgcgggcagtactacctgcagcacatccacgacctgcagctccagatccggcagaagacgcacaacctcaaccgcctcgaggcccagcgcaacgacctcaactcccgagttagaatgctcagggaagagctngcagttgcttcaagaacctgctcataggtgtga

SEQ ID NO: 420095 - DNA, 376 bp, Oryza sativa
tacatcaccccccttctcggtgccttcttggctgatgcctacatgggcaggttctggaccattgccagcttcatgatcatctacatcctgggtttggcgttgctgacaatggcgtcgtcggtgaaggggctggtgccggcgtgcgacggaggagcgtgtcacccgacggaggcgcagacgggggtgggtgttcttggcgctgtacctgatagcgctgggcaccggcgggatcaagccgtgcgtgtcgtcgttcggcgcggaccagttcgacgagaacgacgagggggagaagcggagcaagagcagcttcttaactggttctacttctccatcaacatcggcgcgctggtggcgtcgtcgtgctggtgtacgtgca

SEQ ID NO: 420096 - DNA, 437 bp, Oryza sativa
cttatgttaccctcgttttctttgtcgcagggacgcgagctgctgggcagggggccccttcctggctccaaggggctatctgtcttggtcatgacgccaccaaaggagcagactatgggttgtggcatgtgaaccgtgccaaacatctgctctgctctatttgcactagagctattatgtgatgaatgttctctactgccttggtgaaactctgaatgttcgtcggtaaatatgagtgttgtctgatatgggatcatgatggacaatggaaactgcaacctgtttctctgaattctgttgatcgtgtgcggacgttctgttccgtatggaccgcttgcgtattctgtcattctgaatagcattcgaagacgtggtcaactttgtgttggttagaaaataattgcaccattgggaatataccgtccagtataatatat

SEQ ID NO: 420097 - DNA, 473 bp, Oryza sativa
gtcgtcgtcttcctccgccgaattccccaccccaccggcggcgcgaccgggcggagatgtaccacccgacgagaggcggcgtccgcggcggacgggatcaattcaaatgggatgatgttaaggttgacaagcaccgagagaattacctcggtcatagcattaaggctcctgttggaagatggcagaaagggaaggacctgttctggtatacaaaagataagaaatctgactcagaagatgctctcaaggaagaaatcaggagagtgaaggaagaggaggagcagtccatgcgggaggcacttggcttagttcctaagcgtagtagtcgacctaagggcaaccgattagataagcatgagtacgcagagcttattaagcgaggatcaactgcaggagacttgggtgctggacatgctgaagcagcacaagtgcagggtctaggtttatacaagggtcctcgcagagaggaagaa

SEQ ID NO: 420098 - DNA, 463 bp, Oryza sativa
  unsure (1)..(463): unsure at all n locations
gtcggggatggcaggtgcgcccatggcgtcggccccgccgtacgacaacccgacggctgggttccccatcgcgatcgtgatcgccatcgggttcatggtcacctcgctcatcctcgccagctactacttcctcgtcgtccgctgctggctccgtggcacgggcggcggaggcgccgccggggccgggctgctgcaccgctcgcgccgcgagagcgcggcggagcgcgtcgccgcggtgttcttcaccgactacgaggccgaggttggaggcgggctcgaccgggctgtcgtggcggcgctccccgtcgtcaagtctcgccgcgccgcctcggtgaagtcggcgtcgcgcaggagtgcgctcggtgcctgtcggagttcgtccgggacgagcggctcangctgctgccgagctgctccacgcgttccacatcgactgcatcgacacgtggctccaccacaacgt

SEQ ID NO: 420099 - DNA, 471 bp, Oryza sativa
tttcctttattataatgagtatgttatgcggaacctggccagggggtacaccagaaaggatcttggtgtcagttacgttaaggaaaaaagactgagagttaacatgggattaaaaaacctgcgtgacaaagtgaagcagcaccaagaaaaagtaggggagaagtggaatacagtggcgaaactccaggaagagtgggtggaaaatgcagatcgatgggttgctggttttctggagaagtttgaagaaggctgtcactcaatgggaactgccatcaaagagcggatccaagagaggctcaaggcgcaatccagggatttcagccttctacagtatgatggcgaggatgttgacgaggatgaggacgacgacgaagatgtcagagaataatgccaccactgggaatattcgtcaagtataatatatgtacatgcgctgcatgtagcaaatcttcaaatctgggcatgtcatgc

SEQ ID NO: 420100 - DNA, 368 bp, Oryza sativa
ttccgtttgcgtattgtggagaaacataagaatgcatggtgggcggggactagggggcgcacatcggcgtacaccttgatatgacctactggtgcggcggcgattgccaatacgaccgcggggaaagcatagcgaacgaccagggaaatcggaccaccccttcctacgatggatgcacccactctgagaggctcaccggagatgctcccaagaaccaggaagggatgaactcaatcaacacctgatttaaagcagagcgtctcattgtcacgagaggtaacaatgcttctgttcacagacacactaagctctggaccttgaatgtgattgctggacctggtgacaagcctatgattggtgcgcagtac

SEQ ID NO: 420101 - DNA, 352 bp, Oryza sativa
tttcattatcgaattctcatgtctcctcgtgcccaccaccaccagggtagggatggctgacaacgggccgggcaacaaggaggacctgctcatctggggtgcgggggttgtcgacatggccgagagccacctcgacgaggtgaagcgcatggtggctgcagttcctcgagccggtggtcaagatccagggcgccacactccgcgtcggccaggtggccgacgtcgcccaggccaaggacgccgccggggactccgcgcacctcgacttgggggtgcggccgatggtcaaggacaccacctagtgcgtcctgaggtggatcgacatcttctggcgcctgctcaaggagcggat

SEQ ID NO: 420102 - DNA, 461 bp, Oryza sativa
gttggatgctgaggagggaaaggttgaggatgttgatgaggagaaggaagagaaagagaagaaaaagaagaagatcaaggaagtctctcacgagtggaacgtgatgaacaagcagaaacccatttggttgaggaagccagaggagatcaccaaggaagagtacgctgctttctacaagagcttgacaaacgactgggaggaacatctggctgtcaagcacttctctgtggagggtcagcttgaattcaaggccatcctgtttgtaccaaagagagcgccatttgacctctttgacaccaggaagaagcaaaacaacatcaagctgtacgtacgccggggtgtttatcatggacaactgtgaggagtttgatcccagagtggctcagctctgtcagggcattgatgattttggagaccttcccctaacactcacgtgagatgctccagcagaacagatcctg

SEQ ID NO: 420103 - DNA, 404 bp, Oryza sativa
ggcgtcttcgtactcgcctctctccgcgccctcctccgccgccgctcgccgccgttcgtctccgccgccaccgccgccgccatgagggagtgcatctcgatccacatcgggcaggccggtatccaggtcgggaacgcgtgctgggagctctattgcctcgagcatggcatccagcctgatggacagatgcccggtgacaagaccgttgggggaggggatgatgcttttaacaccttcttcagtgagactggtgctgggaagcatgtcccccgtgctgtcttcgtcgatcttgagcctaccgtgattgatgaggtgaggactggtgactaccgccagctctttcaccctgagcagctcatcaatggcaaggaggatgcagccaacaacttgcccgtggtcactac

SEQ ID NO: 420104 - DNA, 299 bp, Oryza sativa
ttgcgtggtcgtactcctagatcagaacaagtgaagggcaacagtatccaacattccaggctgcttgccaggctcctggcatcctatgagatgatcgggagtggatgtccgctatagttgatgcagcgcattgggctcttccataccagctccgagagttgtttgtcacacttctgctgttttgcattgctacagatccattggctttatttgaagaacattgttctagaatgggtgaggactacatgcattggattgggcatagtatgacataccattctacaccttttacacaacat

SEQ ID NO: 420105 - DNA, 376 bp, Oryza sativa
gtgcttaaacgcacttgctaaagttgttcctggtcttcttggaggaagtgctgatcttgcatcctccaacatgacattgcttaagatgttcggtgacttccagaaggatacgcctgaggagcgcaatgtccgatttggagtcagggagcatggaatgggcgccatttgcaacggcattgctctgcacagcccaggactcattccatactgtgctactttctttgttttcactgattacatgagagctgccatgaggatctcagccttgtgtgaagccggagttatctatgttatgacccatgactcttattggtcttggagaagatggtccaacccatcagcccattgagcacttggtgagctttccgtgcgatgc

SEQ ID NO: 420106 - DNA, 473 bp, Oryza sativa
  unsure (1)..(473): unsure at all n locations
gctgggaaattatcctgtgatacatttattgccccactagtccagcttttgtatgactcgtctatgtcagttcaggttgctgcccttggtgctatttgcaatattgctgtgaatttaacacccaggaaatcgattcttcttcaatctggggctgtctcccagcttgttcatttgtccaagtctatggatccaacattgagattaaaagctgtgtgggctcttaggaatattatgttccttttgaatccaaaggataaagactttattctcaaggaactaactttatctactctttcaagcctcatatgtgattctgaacattttgtccaggaacaaacttggcaactggtgcacaatcttgttgatggatatgtgaactctttaattatgtcattggtgaagatggcatgattntaaatgctatttaagacaactgaataatgcacctgcctnagagtatgcatcagggtatg

SEQ ID NO: 420107 - DNA, 441 bp, Oryza sativa
ttatggatgcaaagtttttggccagaccgcaagcgcagatcaccacaacgaatgggcgaatattggcatcattccctccttgaagggatccacttttcctcagaaggttccatatgttattttctgtgctcccccatctcgttcggatgattaccctggggatgtgagagtagctgcctcaaattggactggtgaaggctctttcgtttttacatcaagtactgctctgtacgattgtagtgacaacgaattgtgcaatgaggattgcccatctgtgccaattggcagaagccctcgtactgacgtccttctaaaagcagagaatgttgttcttgaggcaggaggctgtgtcctcaggctagcaggactctataaaatagatagaggtgctcattttttttggttgaggaaaggaaacttggacacacgaccagatcattt

SEQ ID NO: 420108 - DNA, 300 bp, Oryza sativa
tttgtgttggaggaggggatgcttgaggtggactgcccatgtgtgactcctgaagttgtcttgaagggctctggccatgttgacaaatggacagatctgatggttaaagatgaaaagactggtacttgctatcgtgctgatcatttgctcaaggacttctgcaaggataagcttgagaaggacaatacattgtcaccagagaagacagcagaatctaaccatgttcttgctgtcttggatgatctgattgcaaaacagttgggtgctaagatcaaggagtatggcattgttgctccagac

SEQ ID NO: 420109 - DNA, 421 bp, Oryza sativa
tcgaattccattcctcgcgattcctctcccctggcctgctcgtcctccccctcccaggggatcgccggagaggaatcgcgcggaggaaaaaaaaagaaaagggcttccccgtcgtctaagttaaaaggaagccatggagcacaaggagactggatgccagcagccagaaggcccgatcctttgcatcaataactgcggcttctttggcagtgcggctaccatgaacatgtgctcaaagtgccacaaggagatgataatgaagcaggagcaggccaagctggcagcctcctctatcgacagcattgtcaatggtggtgattccgggaaggaaccaattattgctggtcacgctgaagtagctgttgctcaagttcgaggtgaagaccgcttgttgcgcagcctgctgagattgctggtccta

SEQ ID NO: 420110 - DNA, 453 bp, Oryza sativa
tcgttaacgcccatctccaagatatgcatcccggagtcagctgccaacatcatgctgccgtgcaaggcagggcaagatatcgtcaagggcctgaagggaaaaaaggaccatcgccggaggcttctctggtacaccggagaagaagagagccatcgccggtcactggccggcgccgccggcgaggattactgcgcgcaatcgggcaaggtggcgctgatgtcatcgggcggcatgcaccagctgcacatattcattttcgtgctcgcggtgttccacgtcacctactggcgtcatcaccatggctctagggcgtctcaaaatgaagaaatggaagaaatgggaattagagaccaactcgttggagtatcagttcgcaaacgatccttcacgattccggttcacgcatcagacatcgttcgtgaaacggcatctgggactgtcaagcacacctgg

SEQ ID NO: 420111 - DNA, 496 bp, Oryza sativa
ctcacgttcacgtagctgttcagccgcctcttcgccaagaaggagatgaggatcctcatggtcggtctcgatgcggccggtaaaaccaccatcctctacaagctcaagctcggcgagatcgtcaccactatccccaccatcggttttaatgtcgaaactgttgagtacaagaacattagcttcaccgtttgggatgttggtggtcaggacaagatcaggcccctgtggaggcactatttccagaacacccagggcctcatttttgttgtggacagcaatgacagagagcgtgttgttgaggccagggatgagctccaccgtatgctgaatgaggatgagctacgtgatgctgtgctgctggtgtttgcaaacaaacaagatcttcctaatgccatgaacgctgctgagatcaccgacaagcttggtctgcactccttgcgccagcggcactggtacatccagagcacatgtgctacctctggtgaggggttgtatg

SEQ ID NO: 420112 - DNA, 436 bp, Oryza sativa
gttggcttctcctccccctctttaccttgtcctcctcggttcggttccgtggttcgtctagggtttagtgggttgagatggcggcgccggatgtcgagtaccgctgcttcggctgcggactcgcctgggccaccgacgaccgttccctcgaggccgccttctccacctacggcgagatcctcgactccaagatcatcaacgacagggagaccgtgaggtcacgtgggtttggcttcgtcaccttctcctccgagcagtcgatgcgcgacgccatcgagggcatgaacggcaaggagctcgacggccgcaacatcaccgtcaatgaggcccagtcccgccgctccggcggcggaggcgggggctactgcggcggcggtggcggctacggcggcggtcgtggaggcggcggctactgaggaggtggcggcggcggcta

SEQ ID NO: 420113 - DNA, 436 bp, Oryza sativa
ctgggcagtaacttctgtgagagatggagtactcttacagctacaggttcatgcttgtatgctcagttcttgtactgtgccttaatactcggggtgcgagatgccagttatccgacgatttctacgactacatatgtcctgatgtgtacaccgttgtccagcagcatgtttatgctgccatgaggactgagatgaggatgggtgcctccctcctaaggctccatttccatgactgctttgtcatgggtgtgacggttccatccttctggacggtgacgacggcgagaaatttgcacttcccacaagaactctgtagagggttcgaagtcattgacgcgataaggaagatctcgagaacatctgcctgaaagttgtttcctgcgccgacattgtagcccttgcagctggctatggagtactttttagtggaggccct

SEQ ID NO: 420114 - DNA, 458 bp, Oryza sativa
ttcacgcgtccgcccacgcgtccgcccacgcgtccgcggacgcgtgggcggagcgccatcagccgtccgatcgagtgatccgatggctctcgctctctccacctctgctgctgctgccgctgccgccgcggcgcgggcgctcgcggcgagggtgacgacgacaaggggttacgccgcgtcggcggcgtcgtcggcgatgaggcgggcggcggcggcggtggaagggaagggcgctgcggggatgacgcatgcgaaggacgggtcgtcgtcgtcggcggccagggaggagtcgtgggtgcccgaccccgtgacgggccactaccggccctccaacttcgccggcggagccgacgccgccgacctacgggccgaccacctcgcccgtagctacgcccgcgcgtgatgcgcgcgacctcgccgttgtccgaccgacgacgacgccatgcatccatatatat

SEQ ID NO: 420115 - DNA, 461 bp, Oryza sativa
cgtcaattccattcgatcgcgagagctctcggaaagcaccaccgccagcacagagccagcgcgagagagagagagagggagaccaaaccccatcccggatctctcgtcgtcggcggcgtctgcgatggcgctctccgaccgctcccgcgagtcgctcctcccgagcttcctctacacctcctccgccgcgaggtccttcgccaccggcgccacccgcttcccctccccggtgtccccagcttccccggctccgggtgccgtcgggggcggcgcgcccatctcgatccaggctcccagggagaagatcgagatgtactcgccggcgttctacgccgcctgcactgccgatgggatcgccagctgcgggctcacccacatggccgtcacgccgctcgacctcgtcaagtgcaacatgcagcttgatccagcaaaatacaagagcataacatctgggtttggcg

SEQ ID NO: 420116 - DNA, 362 bp, Oryza sativa
tttttgtgtttgtatcgagaaagatatcgtccgattctccttctattgattcttttccgatcgagatgtatggatccatgtgtctacatacctagattctggtcatggattaacgaaaaagagcaagagctctatttgcctctgccattctatgagtcgcttgctttctgggattggcccccccaccccctttggcagcatctactaattcggaacttaatgtgaaagccataattcagggcctgacgctcaccggatgcttctaatgaccgaccacatggcaggtgctcttccttgcttagatcctatttcaatcggaactttccgcgacgatccttttttattacgtcttgtttttactc

SEQ ID NO: 420117 - DNA, 429 bp, Oryza sativa
ttttgtttttttttttttttttgtttttttacgggaaaccacttgataaaactgattgatatattccagataggagaggagggcatcgatacttatcggcgctaaattaaatgggagcaccggctaaacacatgagacatccctcgatttaaaacagattacaaacacatggatgttcacttcacacacaccagaagcttgaagaggagcatcttgtgaaacaaaacgaccaggggcgaacttaattttttttgaaaagggagaatcttaacacgggagaactcatcatggatcatcatggccattgtttaatcaacgccttccaatcattattccccaacaatggtttgtataaccccttgatatcacacgttggtcctgaaggaaccaagggccttgatggcaccggcccggaggatgtactggtgg

SEQ ID NO: 420118 - DNA, 442 bp, Oryza sativa
cagatttgaggagttgttcattgatctgttccgcaagaccatgggacctgtcaagaaggctatggacgatgctggccttgagaagagccagattcatgagattgttcttgtcggtggtagcaccaggattcccaaggttcagcagctcctcagagactacttcgagggcaaggagcccaacaagggtgtcaaccctgatgaggctgttgcctatggtgctgcggttcagggaagcattctcagcggcgagggcggtgacgaaaccaaagatatccttctcctggatgtggcaccccttaccctcggtatcgagactgtcggtggagtcatgaccaagttgatccccaggaacaccgtcatccccaccaaagaagtccaggtgttcaccacctaccaggatcagcagacaaccgtcttcattcaggtctttgagggtgagcgc

SEQ ID NO: 420119 - DNA, 296 bp, Oryza sativa
ttttgttttacaatcaaatctggctcattgaattcgttttgggtacaaactatcagaaggcccctgccatacatgctttgtcaaaacattggaaggatcccaccacccaaggataactgctggaacaaaagatgaggtagtagccatcccaatttccggtggggcaaacaagcggacaaccagccaaaattttcactattccaaaagccacagggtgagaaaaacaccgacctaacaaacaagctaaaggggggcaaagacttcctctcttggccttcctggatgggatatgagac

SEQ ID NO: 420120 - DNA, 421 bp, Oryza sativa
  unsure (1)..(421): unsure at all n locations
ctttgaggtgggttggtttctcctccccctctttaccttttcctcctcggttcggttccgtggttcgtctagggtttagtgggttgagatggcggcgccggatgtcgagtaccgctgcttcgtcggcggcctcgcctgggccaccgacgaccgctccctcgaggccgccttctccacctacggcgagatcctcgactccaagatcatcaacgacagggagacggggaggtcacgtgggtttggcttcgtcaccttctcctccgagcagtcgatgcgcgacgccatcgagggcatgaacggcaaggagctcgacggccgcaacatcaccggtaatgaagcccagtcccgccgctccggcggcggaggcgggggctaccgcggcngcggtggcggctaccgcggcngtcgtggaggccgcggc

SEQ ID NO: 420121 - DNA, 432 bp, Oryza sativa
ccatccgctcaaaccttttgaaaaaattcctatggattaatgtatgttaacattgttattcctccacttttcctattcctatggattcaaattcctccaaactgaataagccttaaaagccccctttgaatcaaaggattcatgaagggatttcataagattgaaatcctatagaaaattttcctatttggccctttgattcaaaggattggaattttctaaatcctatacaatttcaatggaatagctcattacctataggttttaaaggaaatttagcaagaggcccaggaaaagtcatccgattcctatgttttctctggggcccaatcaaacaattattcatgtgttttgcaatcatctgttttacacttacattctctgcagaataatgtgttttcctgttcctccactatttggctactacaattc

SEQ ID NO: 420122 - DNA, 413 bp, Oryza sativa
cccgtcctcctactccgcatttcccatccccttctccccggcggcggcggcggcgcggaggcggcggcacgggagcggctagtggtttcgtcggcggaggcggaggcggagccaagatgttcgggcgcgcgccgaagaagagcgacaacaccaagtactacgagatcctgggggtccccaagaccgcctcccaggacgacctcaagaaggcgtaccgcaaggccgccatcaagaaccaccccgacaagggcggcgaccccgagaagttcaaggagcttgcacaagcttatgaggtattgagtgacccggagaaacgtgaaatctatgaccaatattgtgaagatgcccttaaggaaagaatgggtggaggcggatcccatgttgatccatttgacatcttttcatcattcttt

SEQ ID NO: 420123 - DNA, 387 bp, Oryza sativa
gccatcgagagtgtctttggattccgggagaagttggatccagaagttctagccgagggacaaatcgaagagtccagcggtggctgccagtcatggaaaggatccaggaaagccaccaattgatgacgcgccatctagtgcaacaaaacagagggttgccgcggcaaaacaggtcattgagaatcattacaagacccagatgaagtccctgcatgataggaaagaaaggcgctggatgttggagaggaaactacaggatgcagaggttgctgtagaagagcaaaataattattctaaagcatttggagaaaaaggagaccgaatatatgcgggtggagagacataacatgggggttgaagatttgaacttttgacaattatcggaag

SEQ ID NO: 420124 - DNA, 436 bp, Oryza sativa
tgttgttttttttttttttggcgctgatgaagaatagcacactttcgttattaagaaaagacaatcagatgtacttttgtcaagaaataaaatagcaagattacactgcccgctacaccatcaaaatgacaaatttggagtaaattcttagcaaaagggtgtgaaatcaaaatcatttgtaagctgctacttcctccttaaaacgtgtgatgatgtcatcaatgctcactgtggctagttcagctttgtcccttaccctgacgctgacctgtccagtctctgcttcttgtgcaccaacgacaagaatgtagttgaattgggctaattgagcctcccgtaccttcttctgtattggcctgtctgtctcatcgatggcaacatgaaaaccagcttcatgtatcctagcacggacctgtttagcgtattccactgaatt

SEQ ID NO: 420125 - DNA, 474 bp, Oryza sativa
  unsure (1)..(474): unsure at all n locations
gccattgtgagtggaattggattccgcgagaagttggttccagaagttccagccgagggacaaatcgaagagtccagcggtggctgccagtcatggaaaggatccaggaaagccaccaattgatgacgcgccatctagtgcaacaaaacagagggttgccgcggcaaaacagtacattgagaatcattacaagacccagatgaagtccctgcaagataggaaagaaaggcgctggatgttggagaggaaactacaggatgcagaggttcctgtagaagagcaaaataatattctaaagcatttggagaaaaaggagaccgaatatatgcggttgcagagacataagatggnggttgaagattttgaacttttgacaattattggaagaggtgcatttggcgaggtgcgtctttgtagagagaaggcgtctaagaatgtatatgcaatgaaaaagcttaagaaatctgagatgct

SEQ ID NO: 420126 - DNA, 446 bp, Oryza sativa
acaatcaaatatggctcactgaattctcattgagaagcagttatcagaatgtgagtaacatacatgctatgtcaacatcttggaaggatcacaattataaagtatctatactgcattaaaagaacttgagtataccataacataaaaaggattatttcacatgacaatctcaggtttcaggatgcttgatttgatctctttgtgcgggagaataacaccgccgttggtatagacctcatcacctacatgtacgtcctctcctaggatagtcatattttctatccgtgcccattgtccaacagttgagtgccatccaataatgctgtttgatatgcaagcatgcttcttaatacgcacgccacgcatcaccgtgcaacgggaaagcctcacaccatcctccacgacgcatccaggaccaatagcaacatcaggaccaatcagacagc

SEQ ID NO: 420127 - DNA, 345 bp, Oryza sativa
ttttggtttttttttttttttttttttttttttttttttttttttttaaagaaaatccaaacccctccaagatttgcgttttgggaacatagtaatagattcagtccccagagataacggttttgacaaagtatgagctagtagtattccgaatttccgatgggccaaacaaggggacaaccagccaaaattttcactcagccaaaagccacaggctatataataatctgatctaacaaacaggcagaaggggggcaaagcttccttttctaggccttcctggctgcggatctgagactcaggctctttcttcactggttcttccttctctgacaggataagctc

SEQ ID NO: 420128 - DNA, 422 bp, Oryza sativa
cgacgacccgcggccttcttcgcgccgacctcctcgccgccggcggcgccgccgtctccgcagaatctgatcgatggcgccgtcgtcgacgtcgtcggagggtgcctccgacgagtggttgccacccagccggcggccggagctggcggacgtggtccccgtgacgcaggacgacgggccccaccccgtggtggccatcgcctaccgggacgagttccgcgaggtcatggactacttccgcgccctctacttcggcggcgagcgcagcgtccgcgcccttcacctcaccgccgaggtcatcgaccttaatcccggcaactacacggtgtggcattttaggcgtcttgttctagaggcactggatgctgatctgcgtgaggaaatggattttgtggaccgacatgctgaatgtcacccaaaaa

SEQ ID NO: 420129 - DNA, 254 bp, Oryza sativa
cagctcgcccgccgcattcgcggcgagcgcgcgtaagccgccgccttcgacgcggttgcgttgcgtagcgccgaagcgatctggggggatcaacgacgacgacgtgacgtggtcaacttgttgattcccctctcgcttccgcgttttagatctcgttttcattagcagctttgtaatagggtttggtcggttaattagtgtaaaaacagggttcggttaaagactcgaaatcaaatgttattgccgttctttgg

SEQ ID NO: 420130 - DNA, 509 bp, Oryza sativa
cgccgctactcccccctcgccgagagagctctagggtttccgctgccgaatttttttttaattcggggggagagatttgaagaggcggcaccatgttggtctaccaggatctgcttaccggtgacgagctcctgtcggattcgttcccctacagagagatcgagaacggcatcctctgggaagtcgatggcaagtgggtcgttcaaggagctattgatgtggacattggtgccaacccatctgctgagggtggtggtgatgtgagggtgttggatgaccaagctgtgaaggtggtcgacattgtggacaccttccgtcttcaggagcaacctccttttgacaagaagcagtttgtgaccttcatgaagcgctacatcaagaacctctccgccaagctggatgcggaaaagcaagaggaatttaagaagaacattgagggtgccaccaagtacttgcttggaaagctcaaggaccttcaggtctttgttggggagagcatgcatgatgat

SEQ ID NO: 420131 - DNA, 423 bp, Oryza sativa
tcgtccccctcctcccgatccacccctcccgccgccgccaccgccaccgccgccgccgccggccggcgagagagacaggatgtacgggtgggagatgctctcgttcaacatccacgacggcttcctggaggccatcgtgcgggggaaccggtcgggcctcctcaccgccgccgactacaacaacctctgccagtgcgagaacctcgacgacgtcaagatgcacctcaccgccaccgagtacggcccctacctccagaacgaaccttcacccctgcacacaactacaattgtggagaagtgcactcttaaactggttgatgagtacaaacacatgatgtgccaggcgactgaaccactatccacattcttacagtatataacgtatggccacatgatcgacaatgttgtacttattggtaccgg

SEQ ID NO: 420132 - DNA, 412 bp, Oryza sativa
tcggggggcatcgcatctggaggtggaggccaatccgctcgctcgctcgctcgccggcgacccgaatccggccaggagggggggcggctggccggagctagggtgggtgggtggttggccgcaccaccttcctccgcgccgccggagcgtgggcagcggcggcggccggtgggaggaggggaagcatggcgggctccatggtggaccgggcgaccagcgacatgctcatcgggcccgactgggccaagaacatggagatctgcgacatctgcaaccgcgaccccgggcaatcaaaagatgttgttaaggcactcaagaaaaggattgggcacaaaaatccaaaagtccaaattcttgcgctgactctcttggaaactgcaatcaagaactgcggggatatattccacatgca

SEQ ID NO: 420133 - DNA, 423 bp, Oryza sativa
agcacacacaatgatccaaggaaaatggattaacatcaatggcagtcgttttcagcacgcggaactcaggaggcagatcggcaaggcgatcgtcgtcgtgagtagtctgaagctctgaaacgaactaatcgacgagcggcacatacaggagaagataatcggtggagagagatctcatgagctgttgctatcgcattcaagcgccatgaccagtacgccgttgctatcggttttggggaggctttgcaacctccggcaacggcgtcgtcggcgtcaacagcggtggcggcgcagtcggaaatcctcctcggggtggcgctcccggacgacatcgccttcccggctggaggtggagcacggcgatgggatcggggcggccaccgcttcagctcccgccggctgccaccactccagcccccgccc

SEQ ID NO: 420134 - DNA, 399 bp, Oryza sativa
ctctccccacccttccttcgccccgagacgacgagacccagcgagcgatcccgagggaagaaagagatcgagagggaagggaagggagaggatcggagagctttccgccggccatggggttctgggtgaccacgctcatcttcctcctcgccggcttcgtcgcctccctcttctcgctgctctgctgcaaccgcgggccgtcgaccaacctattccatttgaccttggttattacagcaacggtttgctgttggatgatgtgggcaatcgtctatcttgcgcagctgaagccactgatcaaccctatcctaagcggcgagtgagctgtgttacaatttgaagtctgctcatgctgtatcactatttagttgaagatttctattcattttggcacgactg

SEQ ID NO: 420135 - DNA, 527 bp, Oryza sativa
  unsure (1)..(527): unsure at all n locations
cgcactcccaactcctctcctctccttcccactactctcgcgaggaggaaagcgaagccaagcgagagaggcttccgccgtcgccttccccttcgccttccgatcggtcgcgaggtttcaagatggcgacgtgcacacttgcaacttcatgtgtgtccttgagcaatgctagaactcaggcctccaaggtggcggcggtcaagagcccggcatctctaagcttcttcagccaaggcatgcagtttccaagcctgaaggcctcctccaagaagcttgacgtctcggcaatggctacctacaaggttaagctcatcacaccagaagggcaagagcacgagttcgaggctccggatgacacctacatccttgatgccgccgagaccgctggagtagagcttccctactcatgccgtgctggagcatgctctacctgtgccggtaagatcgaggctggctccgtcgacccagtcgatggatcattccttgatgatgcgcagcangaaagaagctatgtgctgacatgtgtc

SEQ ID NO: 420136 - DNA, 374 bp, Oryza sativa
tcgttcgcagccaaagccgagccggccaccgacgtgcatgcggcggccgaagccgactcccaccctcgagactgacactgcgacgccggcatagtgcaagccgacagtcgaaggcgactgccatcacagacacttgtactacgacgccgccatcctacaagccgcagaccaagccgaacccgccacccacgtacaagctcgcagtccaagccaaacccgtcacccacgtacagggcggcgccggcaacctacaagccgcaggctaagccgaacccgccacccacgtacaagccgaaggctaagacgactgccactgcctacactacacccacgtacaagccacaaccgaagccgcttccagtcccacttgcata

SEQ ID NO: 420137 - DNA, 425 bp, Oryza sativa
ttgttggccactccaatggatcactccacctccctgctccggctcatcttcctcgccctcggcgcagccctcgtcgtccttgtcgttcgctccacgttccgccttcccggcgacatcgacacgaccacgacctctctgttcgatgatggcaacggcggcagctgcaccaggttctcgccgtgggcgtgccggcaagggcggggcgacccgaggtcgaagccgtccaacccgcggcgaccgtcgcacgagtccgacgtgccgcggcacccgctcgacccactcacggtgagggaggtgaaccgcgtccgcgagctcctccgcgcgcacccgctgtttgcgtcggcgccgtcgtccctgttcgtgcactcgctggagctcgacgagccggaaaagtccgtcgtcaagagctggcggaaggggcgccg

SEQ ID NO: 420138 - DNA, 473 bp, Oryza sativa
  unsure (1)..(473): unsure at all n locations
tttggcttctcctccccctctttaccttttcctcctcggttcggttccgtggttcgtctagggtttagtgggttgagatggcggcgccggatgtcgagtaccgctgcttcgtcggcggcctcgcctgggccaccgacgaccgctccctcgaggccgccttctccacctacggcgagatcctcgactccaagatcatcaacgacagggagacggggaggtcacgtgggtttggcttcgtcaccttctcctccgagcagtcgatgcgcgacgccatcgagggcatgaacggcaaggagctcgacggccgcaacatcaccgtcaatgaggcccagtcccgccgctccggcggcggaggcggnggctacggcggcggcggtggcggctacggcggcggtcgtggaggcggcggctacggaggaggtggcggcggcggctaccggcgccgtgagggcggctaccgtggcggcggcggc

SEQ ID NO: 420139 - DNA, 438 bp, Oryza sativa
ttttgtgtttttgaggaggacgacaactttaaatattgctcaataaaacactatctggagacaacacacacgagagtcatatccagaggaaaacaatcagcccagacggaccactagcaccaaatgcaatggaatgggaagaactaattcgaccgctaccaccctagtgaaaaccagagaagcaggaggaaggggggacaggaagaaaaacgttgtagtcaaacaggagaagaatgcatccagcatggtgacagccagatgaggcatctccatcgatggactccaataacatgcggaaccatatgacgatcgatcttcccattttactggccctccacgcacctgccctctggagattgtttcacctaatcaccaccgaactgctggcggacgcccgacacgaaccacaggatggccctaaggagctgcatgatcaaa

SEQ ID NO: 420140 - DNA, 447 bp, Oryza sativa
  unsure (1)..(447): unsure at all n locations
ttaagcactcctctcctctcctctcctcagatcggatcgcgagagccccaatcccaccaccgatcgatccattcctgctgctcgcggccaccggagaaggagagagagagagagctcgacctcgtcggcgggtgaaggatcgcagcagcagcagcggcggtagagcaggaggagaggcgaagatgtcgtcggtgttcagcggcgatgagaccgcccccttcttcggcttcctcggcgccgcctccgccctcgtcttctcatgcatgggggcggcgtacgggacggcgaagagcggcgtcggggtggcgtcgatgggggtgatgcgcccggagctcgtgatgaagtccatcgtgcccgtggtcatggctggtgtgctgggtatctacggnctcatcatcgcagtcatcatcagcacgggggatcaaccccaaggccaagccctactac

SEQ ID NO: 420141 - DNA, 422 bp, Oryza sativa
attggtggttttttttaaaaaaggacaagatatataactttcttgttcttccttcttttccttcgattattgctttccttttgttcatcatggacactgctgctatataccaaagtggtacgggtaccctcagagctttgatgctgtcttcaagtctttgctcggatcaaactggcgctttgcagccatacgttccttcatcttgaaaatgacctcatggacttcatcaaaatgagggcttgcggctttcttcacattctgaacccaactgtggatttttctcatgaggtccaagaatccggacgcggtcactatcacccaggacctccaattgcattattgcacaaacaaggcttagatccttgagaccgcactcagggttgcccaataagaactttgcgttgccctccagcagcatatag

SEQ ID NO: 420142 - DNA, 446 bp, Oryza sativa
tccacgcgtccgcccacgcgtccgcgcggcatgttttcctcttacactcttctcaaacacctttgaccaaggttgggcatcaggtatctcggcagctgcaatacaaggactcttagagttgttagtagagggtggtgccgataatgtgaaccagtgctttcttgaggctgctcgctatggaagcactgaactcgtgcgcatcttacttcagattgctcgaaggaatagcttggacatcgatgtggatctagcccttggctttgctgctcactatgggaaactggataccatggggtgcttagttgaggagggtaatgcggttgcctttcttggccctttaatgcgggcagctgaacggggatgcctttaagttgttgaatggttcgtcaaccttggttgtcgggatatggagctttgcttagcccttactgctgcaacctctagta

SEQ ID NO: 420143 - DNA, 510 bp, Oryza sativa
tcgcggacgcgtgggcgaatgaagactagtagctgtgctcttcgtccacctcgactcgtcggctcgcctcggcttccttcgttggtccgcaccttctcccctcacccgccgccggggatccgctccgccgtctcgcctcccgccccgtggatccaccttgccgctccagatggaatcctgcccttcggtgaagaacatccttctgctggattccgaggggaagcgcgtcgccgtcaagtactacacggatgattggcctactctctcggcgaagctggccttcgagaagtcggtgttcgtcaagacccagaaagccactgccggagcagaagctgagattgtaatgtttgatggccacattgtggtgtataagttcatccaagacctccatttttttgttactggaggagaggaggagaatgagcttattttagcatcggcccttcaggattcactgatgcaagtgacattattctcagaaataccgtcgacaaagacagcactcgaaaa

SEQ ID NO: 420144 - DNA, 423 bp, Oryza sativa
gagagagagctatcttccatgtgtcatgactcaatggtagtagtaacattgttagtaaggagcaggtgtagcaaagctgtattgcaacatctcaacaagtggaagaacaaaaaagaaacaaaaaagaagaaaaagatatatcccagcagaggagagcagagcatggcaatgcagtgaagctccactatgccaaaacaactaaggagctcactgcctacacttgcttttcaataacccaaaaacactagtagtaatattatttcagtcctgctctgctaccttaggctcaatgtccttgagcaggccaacgatctgctgcatggccggcctcttggaggggagctcggcggtgcagaggtaggcgatcctcagggcctcctccatctgcctctccagcccggtgtcgcggatctttgggtcgat

SEQ ID NO: 420145 - DNA, 482 bp, Oryza sativa
tcgtctcgatccttcattcctgcccggcggcgagcgagagagaggcggaggagatccgagatggcggggagcgggtggaggaggatcccggcggcgaggaggccgcccatgtcgcgcccggcctcggtctgcctctggatcgtgctcgtcgccgccaccctggcgctcgcccaggcgaagaaatcgaaggcggatttgactgaggtcacccacaaggtctacttcgacgtctagattgatggcaagcccgcaggacgggttgtcatgggacttttcgggaagactgttcctaaaacggcagagaacttccgagcactttgcacaggagagaaaggaactggaaagagtggcaaagcactccacttaagggaagtgcattccacagaattatacccagctttatgatccaaggaggtgacttcacacttggtgatggaaggcgtggtgaatctatctatgggacgaagttcgccgatgaaaac

SEQ ID NO: 420146 - DNA, 448 bp, Oryza sativa; identical to SEQ ID NO: 394497

SEQ ID NO: 420147 - DNA, 451 bp, Oryza sativa
gccgctgaacgcttgcaactgatcagtcgcgtcgatgccacacgaaatcgggccgcgcgcataaatctcagctttcatctgatcgacaccggaaatggagttgtagtcaccgaccttgaaaacggtatagttctgaatggggttgcacccgccgtccggtgagcaggtaccgcactgattgaacggcgtacagtcctgattctgagcctgataattgttgcaggtctcatcgggaatgccgttgtcgtgagcataggcatagacaggaatgtcgtcaccgccgtcacaggagccggcgttaccgcagtcgatgacgttctgagtcgacaggtaagccgaaggccacgcacctccgcgcttgatattgatgcggtcagccaaagccgaagtgctgccgaacgcccaacacgaaccacagtattgaggaatgtgctgattgcgtgaagtgctg

SEQ ID NO: 420148 - DNA, 428 bp, Oryza sativa
ttttgttgtaatttgatccgcaacgattcagatgcagatgaaacactgctgattcccactcagattacacacaatacaaatacaccgacaaactgcctcaaaaaccaccaaattgattcaaaagtaaaacgggtatgagggatcttcccaccgagactgactaaacctaaccacagacaattggatccactggacccagattattcaaaaacagatggctatgacggcatcgtcctcgcaaccgaagggaacttgcagctatggatatcctcacttggcgctggcgagctgggtgcggatgagcttggcggccgaaaccatgttggtaagggcgggcttgacctcgttgtacttgcgggtcttgagaccgcagtcagggttcacccagagaatgttagtgtcgagcaccgcgagcatcttgttgacgc

SEQ ID NO: 420149 - DNA, 457 bp, Oryza sativa
tcgtcatcgtctcctcctcctccacttgttgttcaattcccccccccccccctctctctctctctctctctccgtcgcagatctcggcaagggggcaacaaggtaggaggcggcgatgggttcggcgagccgcgcggtgtcgtgcctgtgctgcccgtgcaagtgcctggcgtgcggcctcttcagctgcctctgcagcatcctcatctccctcctcgtcaccctcggcgtcctcgccctcatcttctacctcatcttccgcccccacatgatcgccgccaccgtcgactccgccgccctcacccagttcaccctctccaccaactccgccctcgcctacagcctcaccgtcgacctcaccgtccgcaaccccaacaagcgcgtcggcctctactacgacaacgtcgagtccctcgccctcttcgacggccagcgcttcggctacgcccccctcgac

SEQ ID NO: 420150 - DNA, 437 bp, Oryza sativa
ttttgtggtttttttagcagggacatctatctcatgaatatattatttttattgcgacacagctagcctattctgaaggattatcaagaatgttaagactatagtggtccctatcttttgaaagaaaaaaggaaaccgactgttatcaaaactctatactatgagactatgacgcactccattccaatttggaacaggcactcttgactgacaagagatattttgacacaatcgacgataccttaaccgtcgtcgtcaggtattacacactcggtgtcagtttctaagactgctacatgaggagggcgaacgaaggttgccatgtgtttgaccggcctgcatcagattgcagtgatctgcctcatcatcccggatattgacagattcatcatacaggacttcaattttagggcatctagaacatgggactcttgctg

SEQ ID NO: 420151 - DNA, 365 bp, Oryza sativa
ttttcgcgtgggtcagtatcgaatcctctcttctgctcgtgcccaccaccaccaccgtagcaatggcgggcaacgggccgatcaacaaggaggacccgctcaactggggcgcggcggcggccgagatggccggcagccacctcgacgaggtgaagcgcatggtggcgcagttccgcgagccgctggtcaagatccagggcgccaccctccgcgtcggccaggtggccgccgtcgcccaggccaaggacgccgccggcgtcgccgtcgagctcgacgaggaggcccgcccccgcgtcaaggccagcagcgagtggatcctcaactgcatcgcccacggcggcgacatctacggcgtcaccaccggc

SEQ ID NO: 420152 - DNA, 476 bp, Oryza sativa
  unsure (1)..(476): unsure at all n locations
tgctgcacacatccatccatccatccatctatccagagagcacagcaacggctcatatatagtacccctctaccaaagcacaacaaccagaatctcctgagctcgatctagctactagcttgatctatccgatcaatcgactgccccgcgaggatcgatcgagactcgaaagggagggattttgatccggatcggtcgacgatggacatggcgcacgagagggacgcgagcagcgaggaggaggtgatgggcggcgacctgcgtcgcgggccgtggacggtggaggaggacctcctgctcgtcaactacatcgccgcgcacggcgagggccgctggaactcgctcgcccgatcagcagggctgaaacgcacaggcaagagctgccggctccggtggctgaactacctnncgcccgacctncggcgaggcaacatcacgccgcaggagcagctgctcattctggagctgcactcgcg

SEQ ID NO: 420153 - DNA, 399 bp, Oryza sativa
cgtgtcgcgtgggcttgttttgacggtcgtggtatatggtaattggcagcacactatattggtcaaataagatgaccatgaacaccgctcagtgacgctctagttcttgatcttcttcttgggcctcagctggccgctgtgaccacacttcttcttgcggcaggtgacagccctagggcgcaggcgcgcatagcatttgcggcagatcatcttgtcctggctgtacttgcgggcaagcgcctgaagcgacggctcgatgataccgccacggagcctgaggacgaggtggagggtggactccttctggatgttgctgaaccgtgttgtactggggtggatgcttcagcttcttgttttgacggtcgtggtatatggtaattggcagcaaactatattggt

SEQ ID NO: 420154 - DNA, 447 bp, Oryza sativa
caatacgccattgccgtgcttctcgacctgcatgcacctctgttcttggcgttgagatacatagaggcttggggtgggtgtttaagaactaagaccggagttaattagcacccctgtggctaccatcgatctgtctaaagagtgattagatcgagatgaccatcaccattgagcagcctcaccttgatgctatcgccgaccggaaggtcgccggcggcggcggcggcgacaacgcggcggagctcgtgctcgacggcggcttcgtcgtgccggactccaacgccttcggcaacgccttcaggaattatgaggccgagtctgagaggaaggagacggtggaggagttctaccgggtcaaccacatcaaccagacatatgatttcgtgaggcggatgcgggaggagtacggtagggtggacaagacggaaatggggatctgggagtgca

SEQ ID NO: 420155 - DNA, 420 bp, Oryza sativa
cttctcctcgatctcttctcttgtccatctccaataattctccatgtacgccgccatgtacccggagaccttcggcttctctgcttacccccagcagcagcagccgccgcccgacgccgcctcctgcatctacaccaccgccttgccgctcatcgccgacccgcctgacatcctcggaaacatggcacaaccatcctttctatcagagtatgaccttggaggggaaggggacctgttcaaagctcctgaacccatcattgaagaaccagtgcttagccttgatccagttgcagcagccatttcgatgatgtctggcagtgagaacgtaatggatgaaactatagaggttgcagatatcagcgacattcagaatgactctcttttaagcgaagtattatacgagtgcgagaaggaactcat

SEQ ID NO: 420156 - DNA, 469 bp, Oryza sativa
  unsure (1)..(469): unsure at all n locations
tcgtacagatttgacttcgatcctcttgatgtcaccaagacatggccagaggatatcatccccctgcagccagttggacggatggtcctgaacaaaaacattgataacttctttgcagaaaatgaacagcttgctttctgcccagcgataattgtccctggaatccattactctgatgataagctgctccagacaagaattttctcctatgctgatacccaaaggcaccgtcttggcccaaactatttgatgcttcctgtgaatgcaccaaaatgtgcataccacaacaaccaccacgatggctccatgaatttcatgcacagggatgaagaggttaactacttcccttcaaggtttgatgctgcacgtcatgctgagaaagtccctattcctnctcgtgttctaacaggctgtcgggaaaagtgtgtcattgacaaggagaacaatttcccacaggcttgtgagagat

SEQ ID NO: 420157 - DNA, 437 bp, Oryza sativa
ttttgtttttttttgaagcgcggcaataaaacattgcattgaattctgaacgataaacaccaggaaccggcgtttatttgaggcaagcactgcccaaaatctcgcaaaagtactgaaaccttagacatagtacacatccatggcaaacatggatgccaaatgacaactacagaaaattatcaaattcgaatgcagctgacggcttctcctgctgaagatgcatattttcccctccattacttggatgtgctctctccatcgacagccaatgggacggcgctggccaggctgcggtatttcagagcatagaacatctcaatgtaacggcgagtctcgccctctcaaggttgcttacgtacttccagaatccatatacaccagtcaaggtcatcagcctctcagagtacagcttccaggtgtacttctcgtaaatcctc

SEQ ID NO: 420158 - DNA, 395 bp, Oryza sativa
tcgtagcaacaagcattctcttctagccttagcctagctagctagctttgttgtctagctctgatcgaggttggtggtgatcatggcgtcgtcgagggtgatcctagcgctgctgctcgcggcggcggcggtgatggcgtcgtcggcgcagctggacgagaagttctacagcaattcgtgccccagcgtggaggccgtcgtccggaaggagatggtgcgcgcgctcggcgccgcgcccagcctcgccggcccgctcctcaggatgcacttccacgactgcttcgtcaggggttgcgacggctcggtgctgctcgactcggccgggaacagcacggcggagaaggacgcgacgccgaaccagacgctgcgcgggttcggcttcgtcgagagggtga

SEQ ID NO: 420159 - DNA, 429 bp, Oryza sativa
aacggacgattgctgattactattactggttgcaatgtaacacttcggatacaatagtacattacagagctagctaaatgcgaagccacaataccgtcagcgcaagacgatcataaataaagcttacacaacatagccaacatgcaaaccattcggactgaccagagatgagggttcttgaagctgccgtggtgtgccatgcatcacaaatgccgaacaactagattgtagcagccaacatgaaaggaaaaggcatggataatgcagcaaagatggatgatgaagaccgcagattgtgacgcttcgttcaccaaccatatgaaacccctaaattttgtcaagtttctccgccttcaccaccggattagccttggcaatagcatccctagcagcggtccgatagtcaaactggcagtcatgcttatcgga

SEQ ID NO: 420160 - DNA, 379 bp, Oryza sativa
cttcttcctgcttcctttcgcgcaagctatccgccgccgcatcgcgtcgtcgacgaggagatggtggggccaggcctgtacccggagatcggcaagaaggccagggatctgctgtacagggactaccagaccgaccacaagttcaccctcaccacctacaccagcaatggcgtcgcaatcactgctaccagtacaaagaaggctgatctgatttttggtgagatccaatcacagataaagaacaagaacatcactgtagatgtgaaagcaaactcagactcaaatgttgttactactgtaaccgttgatgagctaacaccaggattgaagtccatcttgagctttgctgttccggatcaaagatctggaaagtttgagc

SEQ ID NO: 420161 - DNA, 482 bp, Oryza sativa
ttagagttgcagcaactaactcatcaagaaactcaaagatgagtagtggcggcgctaaggcctatgcggccgttgttctgatcaggatcatgtactctggtatgcatgtgatgagcaagatcgccttggatcaaggcatgaaccccttggtgtttctgttctatcggcataccactgctgcactcgtgctgatccctattacttttgttctagagaggcggaaagctaaaccggtgacgttaaaaattgcagggaaaatgtttgtacatgccttatatggggtgacagcttgtggcgacttatttaaccttggtcttaattatacttcggcagcatcatcatcagcattgtacaacgttcaaccagtggttacctttgtccttgctgttgtatttgggatggagtctatgaacctaagaaggtccatggaaatggtaaagcggcaagtattcttgtctgcattcgcggtgtacaaattttgg

SEQ ID NO: 420162 - DNA, 414 bp, Oryza sativa
tcttttggcttctcctccccctcccggttcggttcggttcggttcgggtccggttcgatttcggtttttccttcggttcgggggttggtgggaaagcatggcggcgccggatgttgagtaccgctgcttcgtcggcggcctcgcctgggccacctgacgaccgctccctcgaagccgtcttctccacctacggcgagatcctcgagtccaagatcattaacgatcgggagacggggaggtcgcgcgggttcgggatcgtgacgttcttgagcgagcaggccatgcgcgacgccatcgaggggatgaacggcaaggagctcgaccgtcgcaacaatcaccgttaacgaggcccattcccgccgctccgtaggccgaggcggctgtggctactgtcagcgcggtggatgcggaagc

SEQ ID NO: 420163 - DNA, 358 bp, Oryza sativa
tcttcgcgtccgcccacgcgtccgcccacgcgtccgcgagaatcggcggcggcggcggcgagagcggagagagacaggagggggcggcggcggcggcgggggggcgcggagatgacggggaaggcgaagccgaagaagcacacggcgaaggagatcgcggcgaagatcgacgcggcgacgacgaacaggggcggcgggaaggccgggcagaaggaccggctggggcaggacaagggcggccacgccaagctcgagtgccccctctgcaagaccaccgcccccgacatcaagtccatgcagatccaccacgaggcgcgccaccccaagctccccttcgagcccgacatgctcaacaacc

SEQ ID NO: 420164 - DNA, 433 bp, Oryza sativa
agttcataattttgccgagcttgaattattggggtgcaagggttgctcattgaacaagtgctaacaccgataacagaaaaaaaaaatcctcaaattaaacatggcagttcttggaatctaatagactgcaacaaccaaaagatgcgcatgcgccaagatgtttttcaactcatctcaatttcatctttgaaatgtaagtacaccctgagaaaaatcaaggcttgagggccaccgcaatgccgacctttgagctcttgtcaatggccttggtgtcaacttctgctgagatggtccacacagactttggcctccactcgtgctggagcagcgcgctggccttgccggaattgttgaagcgggccttcacgacggtaagcgggtcgagagtgtgctgggtaccgaaggtgagggagttctcgttgctcgagaagct

SEQ ID NO: 420165 - DNA, 475 bp, Oryza sativa
tttttcgccccccatttcgaagcccaccgaattccattcctcgcgattcctctcccctcgcctcctcgtcctccccctcccaggggatcgccggagaggaatcgcgcggaggaaaaaaaaagaaaagggcttccccgtcgtctaagttaaaaggaagccatggagcacaaggagactggatgccagcagccagaaggcccgatcctttgcatcaataactgcggcttctttggcagtgcggctaccatgaacatgtgctcaaagtgccacaaggagatgataatgaagcaggagcaggccaagctggcagcctcctctatcgacagcattgtcaatggtggtgattccgggaaggaaccaattattgctggtcacgctgaagtagctggtgctcaagtcgaggtgaagacgccttgtgcgcagcctgctgagaatgctggcctagtggggggtcacggtgaccccaggggaggga

SEQ ID NO: 420166 - DNA, 435 bp, Oryza sativa
ttttgggtttttttttttttttttttttttgaaaaaaaatgaagtttattcatatgatcatgatgagcacgtacttggagaaaactttgttacatacatgcatggctcgctttttaaacaaaacaattaattaatgaagggattgaaatcaagaaaaaaaaagaagggacaggtaaatcttacgataatgatctacatggaaattaattataagatggtcacggccggaatcaaaagctgaaatccataatcacagtctcggcgagcagctgatgatatatgacgataattaagagagatgattagttaaccacgttgcacttcttcctgatctcgccctggctgccggtgagcactttgacgccgcccattttgaccatgggggcggcgaagtcggcgaagaactcgtccttgtagccgccgccggcgtggcgc

SEQ ID NO: 420167 - DNA, 498 bp, Oryza sativa
  unsure (1)..(498): unsure at all n locations
tttttctgaccaccattggttcctgaaattgagtcatggctgccaagctagctcgcctccacagtctccgcgaacgcctcggtgccaccttctcgtctcatcccaatgagttgattgcactcttctctaggtatgttaaccagggaaagggaatgctccagcgtcaccagctgcttgcggagttcgatgccttgatcgaagctgacaaagagaaatatgctccctttgaagacattctccgggctgctcaggaagccattgtgctgccgccctgggttgcactggccatcaggccaaggcctggtgtctgggactacattcgggtgaatgtaagtgagttggcagtggaagagctgagtgtttctgagtacttggcattcaaggaacagcttgttgatggacacaccaacaagcactttgttcttgagcttgattttgagccctttaatgcctcctttccgcgcccgtccatgtncaagtncatcggaaatggggtgc

SEQ ID NO: 420168 - DNA, 432 bp, Oryza sativa
tttgtggtttttttttcttttttttttttgttgtttttttttttttttttttttttctttttttcttttttttgtctttttttttttttttccgaaaaaaaagccgccctgaacgacgggctgagccgggcttctcccgcggggggcacgccctcaattttttccacccgggggcccacgggcacaccgggggttttttttgccctgttttacacccctcttaacccaagggggaacaagggggggccgttgcttcaccctggtggccgtatggccccgcccggggcaatggttttttttttttttcccaaggaacggggggggccgttccactgcttgaggcagccgagcatggggtcggtgagcctgccctggcttccgccgaggaactttttgtcgcactccccggcgggggacccgagccactcgccg

SEQ ID NO: 420169 - DNA, 503 bp, Oryza sativa
ttttggttccatcagtgaaatgttatttttcgatagcatgctacttacaccacaggtacaagtcaaaagggtcgagcagttacaaaaagaatggagaatcttgcagcatttcctatgggtctggatcaattgctggtttcttcagtgaggatagcgtgctagttggggatcttgctgtgaaaaatcagatgttcattgagacaaccagggaaccgagccttactttcatcatcgggaagtttgatggaattcttggacttggatttccggagatctctgtgggaggagcccctccaatttggcagggaatgaaagagcagcaactgatcgagaaggatgtattctccttctggctcaaccgcgatcctgatgcaccgacagggggtgagttaatctttggtggtgtagacccaaatcattacaaggggagccatacatatgttccttgtacccgcaaaggctactggcagtttgagatgggggatcttcttattgatgactac

SEQ ID NO: 420170 - DNA, 485 bp, Oryza sativa
ggcgaggcgagcgtgttggcgtacaagcggacgcagtcgatgccgacgaccccgacgacgccggtgacgccgtcgtcttcgtccccgacgacggcgacgacgacgacgccgcggggcagcaacgtgtggaggagcgtgttccacccggggagcaacctcgccaccaagagcctcggcgccaacctcttcgaccgcccccagcccaactcccccaccgtctacgactggctgtacagcgacgagaccaggagcagccatcgctgaactgaataatcccattgatcggaggctggtcgatctctctgtcacgccatgtttgctggtccttgtggttatctaatacgtaattaattatctagtatgttgctatcttatcttggtactctgttcctagtagcttgctgtctctgttagtactaccagagaccggtacgtgtcagctagcctgctggctcctataagggctagcgacaacccaaagaagt

SEQ ID NO: 420171 - DNA, 432 bp, Oryza sativa
acaaagaacaatcaccggcaacttttattccacgtgcatggctcccaacaaattctgctcttaacatacaaaatgtgtacacgtactactacatacttgtacagccaactgaactcctgcaattacatcatattacaggataatttcgaccaattttttttatgttctctccctcttcttcaccatctcaacttggccgggaaatacttttcgatgagtgacatgtagtagggcttcaccttctcaacgtctatcctctcattgctcttgctgtacaggtcgtatttgttgaacacacgcagccatttgaggttctccttgtcctcatcgttcatcagatgcatgtaggctccatgcttgtgcagggggtagaatgaatgatatctgatgatgaacaagcctgcagaaggaagagtggtcttgttctccttt

SEQ ID NO: 420172 - DNA, 428 bp, Oryza sativa
attaccacaactttttaaggatggaattgagtagcaatactttcaccccaaaatacagtttagcgacaatatcttagaaaagccgcttgctttgccgccatggctggcaagctgagcagagcagctaacacaaagaacacgagatcactataaaccaaacggcaacgaacgaagaaaatacagggtcttttttgtctgaagatacacgaagcggttcgttttcttttatttttagtctcctctcctcctcgatgatgggtgtatggcaatggcaatggcgatgggatcttggcttagttgatgggaaggggctcgccgttccactccttgaggcagtcgagcatggggtcgatgagcttgccctggctgatgccgaggaacaccttgttgcactcctcgccgggggacttgagcttctcgccggtgag

SEQ ID NO: 420173 - DNA, 424 bp, Oryza sativa
tcgtggacgcgtgggttcggttcttccctcttcccatttccgcgcggcgcaacaccttctggacgtcggcatggcggcggtcgcctccgcctccccgctccccgccgcggcggcgccctccacccgctgctcgccgccgcccgccttcctccctctccgtgcgcaccgcccccgcgtcggcaccgtcgccaccaggagggttttccgcgcggaggcgatgaggacgcagcgggagaaggagcagaccgaggtggccgtcgaggagtccttccccttcagggagacggctcctcctgacgagccactggtcaccgccgaggagagctgggtggttaagctcgagcagtccgtgaacattttcctcacggagtcagtcatcacgatacttgatggattgtaccgtgaccgcaactacgcttgattt

SEQ ID NO: 420174 - DNA, 383 bp, Oryza sativa
ttttgtgggatcctgaataaaagctttgaatgtatcaaccaacatacaggcatatatgatctgaacagcagtaagtaagccgtacccaaaagaaaggggaaaaaactaagaagaacaagacatggatcgataatatgtgcatgacaagcgctagctacaagggctagaagatatgtaaccacctaaaccacagcgatgtacagcaacatccggcgagctaatccctcatcaacaaatcgaaagaaacaaaagaatccatccgtccatactggaagcagtgctggctaatagtaatccccaaatgcgaagcggaaccaaccatcgaaatcagaaccagactttgcagtcggtgcgctgggatgcgggggcgttgggggcggacg

SEQ ID NO: 420175 - DNA, 517 bp, Oryza sativa
  unsure (1)..(517): unsure at all n locations
ctcctcctctcttccattttcgctggtcgctttctccccctcttccacgaaagagggcgtctcacattggtgggtacccccgcaagggccccaaaagggagctcaagtgtgggctgtggagtctctgtgatatgaagagcaccgctgaggatttggagaaggttgcgaccgacctcagggccagcatctggaagcaaatggctgacgctgggatcaagtacatccccagcaacaccttctcgtactatgatcaggttcttgacacggctgccatgcttggtgctgtcccagagcgctactcatggactggtggagagattgggttcagcacctacttctcgatggctaggggcaatgccactgtccctgccatggagatgaccaagtggtttgacaccaactaccactttatcgtccctgaacttggtccaacaccaagttcttctactcttccnacagggctgtgaatgaatacaaggagggctanngcgctcgcgntgacaccgtgccagtactt

SEQ ID NO: 420176 - DNA, 442 bp, Oryza sativa
ttctgttaactcgataaatcaagatgctcagtaagttgttggtcgtcacagcggtcgccctgtcgatcgccgtggccgtggacggccgtaatcacggtctgaaacgcgatttggcgttccgcgccgggccccgcgccaaattcctgtctgagcccgagccgtgggaatacctcaatccggaggacattccgtcagactgggactggcgcaacgtcaacggaaagaattattgcagcacttcacgcaatcagcacattcctcaatactgtggttcgtgttgggcgttcggcagcacttcggctttggctgaccgcatcaatatcaagcgcggaggtgcgtggccttcggcttacctgtcgactcagaacgtcatcgactgcggtaacgccggctcctgtgacggcggtgacgacattcctgtctatgcctatgctcacgacaa

SEQ ID NO: 420177 - DNA, 372 bp, Oryza sativa
tgcgagagattgacttgggatttgttgagttggcaactttgcttggctctgcacggaccaacgccgacgacgaccgccggagccgccgcatctagctcgccgccccgccatgcagccgctgctcaaggtgtacgccgaccgccggtcgcagcccagccgggccataatcatcttctgcagagtgaaccggatcgatttcgaggaggtcacggtggatctgttcaagcgcgagcacctgtcccctgaattcaagaagataaacccaatgggacaggtgccagcaatcgttgatgggcgattcagattgtttgagagccatgccattctgaggtatcttgcaacggtgttccctggagttgcagatcactggta

SEQ ID NO: 420178 - DNA, 443 bp, Oryza sativa
tgttgttttttttgaacaaaagagtctcatgctcccattgcattacgaattatttgcttattcaccagattacatcactgtctagccagacccaaaaaaactgtgcataaataagattcagaccgccgccagcaccaccatagcgaaaaagaatggcaccacaagggcaaacatcccttggatacagatgtttttttgttcatgacccaacagaagaacagaaactaagacagaataaacccctagagctcagcttgtagtttcaggaatatgaaacaagaacccactaagggtttgcgtgttgaaacatgcctaatccgcacgagattggccagcgcgggatgacaggatgatgccgacgatgagcccatagagagcaagcgcttcggcaaaaatgaggatgaggatcatacccacgaacagctttggttgctgggcgttcg

SEQ ID NO: 420179 - DNA, 452 bp, Oryza sativa
tcgaaagcattcgcatccacgagaccactcgaacccgacccgcctcgccgccgccgccaccgaagtaatcccttaattggtcaaaatgtctcgggaggagaatgtctacatggccaagctggccgagcaggctgaaaggtatgaggagatggttgagtacatggagaaggttgcaaagactgtagatgtggaagagctcactgttgaggagcgcaacctcttgtctgttgcttacaagaatgtgattggtgcccgccgtgcctcctggcgtattgtctcatccattgaacagaaggaggagggtcgtggcaatgaggaacatgttactctgatcaaggagtaccgtggcaagattgaagctgagctgagcaagatttgcgatggtatcctgaagttgcttgactcacaccttgtgccctcatctactgctgcagaatctaaggtgttttacc

SEQ ID NO: 420180 - DNA, 359 bp, Oryza sativa
tttcttgtctgcaatgcatcagggacttatgttggcgccaacacgatcccttcgccggagaactcgccgtcggagttcgccaagattgttcagtctaagcagacgaagcatgcgcgcgtgttcatcggcggcggggaccatcggtcgctgcgatcgctggcgaacaccggcgaggaggtgatcctcaccgtgcccaacgaccagctcgagcacatggccgagttcccggaggaggccgagctctgggtcgccgccaacgtcgcgcggttcctcccggcgacgaggatcacgcacgtggtggccggcgacgacgttgtggccaggtcaccggggaacgcgtactttcttcttccggcgat

SEQ ID NO: 420181 - DNA, 432 bp, Oryza sativa
tgggttttaactcttttttggctccttgattcctatttcatttcattccgatcgattgcaacaggcagttcaaacaccataaccaaagcgaactcaattcatggtaacatcactgacgaagaacacctaacactggatggatggatcgagggcttctcgactcgagagagccactggacacgataacgactcgactcgatgataaaatgattgtgacacggatagctaaggataactggccacgatgggccccaccaatcagctcctccagtttcccgccggagtcgccgtcgtagccgccgccacggctgacaccgtagccgacgccgccgccgccacggccgccgccgtagccgcctccgtcaccgtagccgccctcactgagcctgtagcactcgcttctgccttctccgaagccgccgcctccacgac

SEQ ID NO: 420182 - DNA, 417 bp, Oryza sativa
tcgtctcacgcgtccgcccacgcgtccgcccacgcgtccggcgaaaattccattactcgataaccagagggcggatctgcaaaaagcctcctcctctccacccctcgtcggcggcatctcgtcgcccccgcctcgaagctaacagaagcttctcctcctctctcctcccctccccatggcgcggcggggccaccaccaccacctggcggaggtggccctcctcgcgtcggcctccgaggacctcgccgccgtgggcgccggcgagagggaggggtggctcgacgaccccgccgtgctccccttcctcgcgccgtgcgcgcgcgccctcgccgtcgccagcgcggcgaggtccgtgctcgcgggtggcccggtcgcccgagtatgcggcggggtcacggtgaggccccgtgctggggc

SEQ ID NO: 420183 - DNA, 429 bp, Oryza sativa
gcagccttgaagcctgctcctttcaggttctcaattatgttcataccactgcagtgcacatacatccgctcatacatatatagagcaacatagatagccagccatggctagctccaaatccgtagatgtaccgatacattctttcactatgaacaatccatatcagtagatcgatacaccgaagcatcgaccatgcacgcacacatgtcggtgatccgctgtcgtctcaagaggtcgtggcagcggcggcacacaccggcaggtcgttctcctgggtcggacgctgccctaggatggggttgctctcaaagaagttcactggcttaaggtcgaagctggacgacaccgtgggcatgatggggaagtcctcctggcacgggacatggtgaaaccccagcgtgtaccacagcaccaggtccttgttctcga

SEQ ID NO: 420184 - DNA, 398 bp, Oryza sativa
ttttgttgactattgaaaacaggttttacttccatttccgctgttatttttggttataccgtaacacaacaataccatactccacaaatcaccacgggatcgacgtacgctagacagtacaaattcgagcaacacacaacacatgatacacatcacatctagagagggagcgagctagcaacattggcactcaagcatgcattattctcctcgcaacattggccctagctaattaattagctataggtaattaaaggcagcgcagctcggcatgcacagcaatcttcacggaaggaagagcctctttggcctctcgcacaactctggtcggacggtcacctccttttgtcggaacgtgactgatagtggcggaacacaactagtacggcggcggcggg

SEQ ID NO: 420185 - DNA, 440 bp, Oryza sativa
caaaaccaccatcaaagtccgatttaattgagagttgagacaactggtacacacgatggaccttgccgacgacattgagagttttttgcctcttggcagaaaattttcaagaaaaagcaccttagtaaaggtctccttccttgtgagtatggatgacgcagtcggacttagggtaggagacacatgtcagcacatagccttcttcctgctgcgcatcatcaaggaatgatccatccgactggtcgacggagccagcctcgatcttaccggcacaggtagagcatgctccagcacggcatgagtagggaagctctactccagcggtctcggcggcatcaaggatgtaggtgtcatccggagcctcgaactcgtgctcttgcccttctggtgtgatgagcttaaccttgtaggtagccattgccgagacgtcaagcttcttg

SEQ ID NO: 420186 - DNA, 502 bp, Oryza sativa
cccttgcgtccgcccacgcgtccgcggacgcgtgggtgaggaggaagtactgagaaagatgcgggtcgctttacctgatgactattcagagaaactgctctcgcagaagaacggcactgaaaatttggaactaccagaggttaaggattatcaacctagaaaagtacctggggatgaagttcttgagcaagaagtgtatggaatagatccatatacacataatctcctacttgaaatgatgcctactgaacttgattggccatcctctgacaaacatacctttgttgaagagttgcttctgaacaccttgaataagcaagtgaggcagttcactggttctggaaatactcccatggtttacccccttaaacctgtaattgaagaaatccaaaagtctgcagaggagagtggtgacagacggacttcaagatgtgccttggaatgctaaggccatgaggaccacccagaatatactatgtcgctataggagggtcttggagtg

SEQ ID NO: 420187 - DNA, 473 bp, Oryza sativa
tttcttcttcctctcggccagctgcggggagcatgggctggagcggcggcgggcgggggctggagtggtggcagccggcgggagctgaagcggtggccgccccgatcccatcgccgtgctccacctccagccgggaaggcgatgtcgtccgggagcgccaccccgaggaggatttccgactgcgccgccaccgctgttgacgccgacgacgccgttgccggaggttgcaaagcctccccaaaaccgatagcaacggcgtactggtcatggcgcttgaatgcgatagcaacagctcatgagatctctctccaccgattatcttctcctgtatgtgccgctcgtcgattagttcgtttcagagctttagactactcacgacgacgatcgccttgccgatctgcctcctgagttccgcgtgctgaaaacgactgccattgatgttaatccattttccttggatcattgtgtgtgct

SEQ ID NO: 420188 - DNA, 423 bp, Oryza sativa
  unsure (1)..(423): unsure at all n locations
ttaagacttcacactacatacattcagaagtgctttctttcgcttcgagcctcttcctctcttttctctcgtctcttccatccacattcttctctctctctcgattgcttcgcactgggaatggcgatagaccatgcgtcccctttctcgctgaagaacagaggcgacatgggaggaagggggtatgaggagggnagaaggtggagaaccagcggtggccgccgtggctgaagccgctgctgtcgacgagcttcttcgtgcaatgcaggatccacgccgacgcgcacaagagcgagtgcaacatgtactgcctcgactgcatgaacggcgcgctctgctncctctggctctnccaccaccgngaccaccacgccatccagatacggagggtcgtcgtaccacgacgtgatccgggtgtcggag

SEQ ID NO: 420189 - DNA, 434 bp, Oryza sativa
  unsure (1)..(434): unsure at all n locations
ttgtttccagctgcgtggtccgcgacgttcacgatgaccaacaattgcggctacacggtgtggcctgggctgctgtcgggtgccggcacggngccaatgcctctactacaccctgnagcgctggcgcacggngcnncacacgcggtggacgcgccggcgagctggtcggggcgcatgtgggcgcgcacgctctgcgccgaggacgcgacaggcaagttcacctgcgccacgggggactgtggctcgggtggcatccagtgcaacggcggtggcgcggcgccgcccgccacgctcatggagttcacgctcgacggctccggcggcatggacttcttcgacgtgagcctcgtcgacgggtataacctggccatgatcatcgtgccgcagggcgggggcgccgcagcgccggccggaagtggcggcggcagcggcgg

SEQ ID NO: 420190 - DNA, 413 bp, Oryza sativa
  unsure (1)..(413): unsure at all n locations
tcgtccacgcgtccgcactacactatccacctcgccgccgccgccgccgccggaaatggccgccgccgcgcgccccctggtgtccgtgaaggccctggagggcgacatggcgacggactcggccggcatccagatgccgcaggtgctccgcgcgccgatccgccccgacgtggtcaccttcacccacaagctcctctcctgcaaccgccgccagccgtacgccgtgtcgcgccgcgcggggcaccagacctccgcggagtcgtggggcacgggccgagccgtgtcccgcatcccgcgcgtctccggcggcggcacgcaccgcgcggggcagggcgcgttcggcaacatgtgccgcggcgggcgcatgttcgcgcccaccaagatctggcgccgctggcaccgncgcgtcaaca

SEQ ID NO: 420191 - DNA, 271 bp, Oryza sativa
ttttgtggaaaatcaccaaagaggggcaataacattggaagttgagacttcagccgcaccctgtggacacacgtaagacaacctaccaagccctattgcaaaggtgataaagaaaacaagaactaaaacccgaaaacaggaggggaatcaacaaggtgaccacgacacgtcgtcacttatgatcccaccaaaacggttcggcactacgcaacgcaccgcgtgtcaaagcgggggattacgcgcgctcgccgcggatgcggcgggcgagctg

SEQ ID NO: 420192 - DNA, 441 bp, Oryza sativa
tgtggtttaataaactagcaggtttaaatataaaacggaactgtctgagcaaacaccacgaaatgttcaggcgctaagatacgggaatatccgattcatgcagcatagcaaaaatggcgaagagcacagagtcagataaagctatatagaactagggctccaggagatgggggccgaatgacaacacatggcgcttagacgacctcctccatcttgctctcgccggcgtcgtcctccaccggcggcatgtcggcgtaagcctcatcagactcgccctcgtcgatgctcaagccgagcttgagcatccggtggatcctggtgcctaaggtgttggggtcctcaaggctgaagccggaggtcaggagggcagtctcgaagagcatcatcaccaggtgcttcacagacttgacgctcttgtcagcatctgcacgctagcggagc

SEQ ID NO: 420193 - DNA, 458 bp, Oryza sativa
tcgttgaaatccaagttggatagccttgactttgatgctagcaatgggaactgcctggaagcacatgcgtttcttcaactcctggctacctttgctatattttctgaatttgcggaagacgagctgtgtaagcttctcccatcagtcagtcgtcgtcgccagacacctgagctttgtagaatacttgggttgtcacagaacatgccaggtgtcattggagttttgattgaaaatgggagaactattgatgcaattaatttggcttatgcatttgagctgactgatcagtttgaaccagtcgaattactgaaagcttatctgaaggaggtcaagagtatgtcacatgtcaagaccggaaagatgtctccgggagtacagaatgaaattaatgaacgcgagttgtctgccttgaaagctgttatcaaatgtattgaggagcacaaacttgatgagaaata

SEQ ID NO: 420194 - DNA, 429 bp, Oryza sativa
  unsure (1)..(429): unsure at all n locations
aaaaaagctagtaacttttcacattatgtgcatggtggttattcacatgaaagggaaaaaaaaagactagaagtgctttctcttctttctttttttttcttttttcttaatctgatctgaaagcaaaatttagacccgatccagaatcccttggtcctcctcatttgccatggccttgtcccctttcttgtactccccatagacgtaggacgagaaggcccagaggcagagcagcatggccaccgccttctccggcccgaactcgtcgccgaacaccaccacgccgccggccacgttcaccgccaacagcgccgtcatgcagatgccgccgtgcagggacgtcgtcaggaacaccgttccggcggtgccaagaaagcacagctgccagctaagcaccgccgccccgaccaccgngtagtaggccgccgg

SEQ ID NO: 420195 - DNA, 427 bp, Oryza sativa
atctggaataacatacgatgcacaagaacacaatattggagtaatatcagtgatcagttatgcccaaggaaagttcataacaaatgtagctaggcacctcaacgcccagaatcacacgaagatagaagatatctccattatgacctcatggaggccactgcatgcttcaggtttgagaagaaatagtggtcctgtaccaggaccagtaatttatccgcaggggatcacatctctgcaatattgagcagattgcagtcgcaagatcagcatctactgcttcatctgcttcaggatcagagttctttattgcttcgatagttcctttgagttcatctgaaggttgtaaaccaatttgaagaagatcgagcagcaagctcaaagcaaatacgcatgtcgaatcatgtttcaggaccttgagacaaacata

SEQ ID NO: 420196 - DNA, 367 bp, Oryza sativa
  unsure (1)..(367): unsure at all n locations
cttcttcatcgctttgctagtaagagtgaatcgaagatgatgaagaagctggtgaggttgctgatcatggtggaggtggtggccatggcggcggcgccgcggcgagcnncggcgctgagcatggactactacgggatgagctgcccgttcgcggagatggtggtgaggagcgtggtgagccaggcgctgatgggcgacccgtcgctcgccgccagcctcctccgcctccacttccatgactgcttcgtccagggctgcgacgcctccgtcctcctcgactccaccccggacaacaccggcgagaaagacgcgctcgccaacaagagcctncgcggcttcgaggtcatcgaccgcatcaaggacgccc

SEQ ID NO: 420197 - DNA, 484 bp, Oryza sativa
tttctttggcgacgccgtcgcctcctcctccttctaggtgcatctccgccgccgtctcagccatggtgaagtactcgagggaggcgaacaaccccaccaagtgctccaaggccatgggccgggacttgcgtgtgcacttcaagaacacccgtgagacagcttttgctatcaggaagttgcctctgggcatggccaagaggtaccttgaggatgtgattgcccacaagcaagctatccccttccgtaggtactgcggtggtgttgggcgcactgctcaagctaagtcacgccattcaaacagtcagggacgctggcctgccaagtctgctagattcattctggatcttcttaagaatgcagagagcaatgctgaggtgaaaggtctggatgttgatactctatatgtgtcccacattcaagttaaccaggcccagaagcagaggcgccgtacctaccgtgctcatggacgcatcaacacttacat

SEQ ID NO: 420198 - DNA, 321 bp, Oryza sativa
cggacgcgtgggcggacgcgtgggctcaaggaatataaacatctgctagaagaggctaagaagcgtgatcataggctattaggacagacccaggatctcttctttttccatcaacttagtccaggaagctgcttcttccttccacatggtgctataatatacaacaaattgatggattttttgcgacagcaatacagagatagaggatatcaagaggttttgagcccaaatatttacaatatgcaactctgggaaacctctggacatgctgcaaactacaaggagaatatgtttgtttttgagattgagaaacaggaattt

SEQ ID NO: 420199 - DNA, 427 bp, Oryza sativa
cccacgcgtccggccgggcaaccgaatatctggctccatacccgcgtcgatcaggctgctggtgaagctcaactcgctcaacctgagcagcaaccggatctccggcgtgataccgccggcgagcttcgggacgctcccggcgctgaccatcctcgatctgtccggcaacgagctcaccggcgacatacctgccgatttggggtacctcaacttcaactcgctcaacgtgtcgtcgaaccggctcaccggcgaggtgccgctcacgctccagggcgcggcgtacgatcgcagcttcctcggcaacagtctctgcgccaggccgggctccggcacgaacctcccgacctgccccggtggaggcggcggcggaggcggccacgacgagctctccagggcctgatcgtcctcttctcgatgctcgccggca

SEQ ID NO: 420200 - DNA, 503 bp, Oryza sativa
  unsure (1)..(503): unsure at all n locations
ttgttttggcacacctttgcgtcctccgctttccatctccacctccaccgcactaccagtaccaccacgtacgtccaccaccacctacacctccgccgtgcggacgccgccggcttcccaatcccagccgcgacgcggaggaggaccaaattcctcccccacccctccgtcaaatctgcgcgcaccacctccgagatttgaggactggagatccaagcagtctgttatgtcactgcggaggcataatgctctaagttcacttaaggaaagaactgctggaatttttgcattcctaggaaaccttgtgcattctgaaaccttagagagatcggtgctgcatgaaatgaagttgacaactggaactcttcatcctcagggaccatttctgcaaagctggaacaagatatttgntttgtcatgtatctttgcagcttctgtggatccattgttcttctatatcccggttatcaatgaaaacaatacatgctggtatttggataaaa

SEQ ID NO: 420201 - DNA, 365 bp, Oryza sativa
tggtggtaacaccataaccaaagcgaactcaattcatggtaacatcacggacgaagaacacctaacactggatggatggatagagggcttctcgactcgagagagccactggacacgataacgactcgactcgatgataagatgattctgacacggatagctaaggataactggccacgatgggccccaccaatcagttcctccagttcccgccggagtcgccgccgtagccgccgccacggctgccaccgtagccgccgccgccgacgccacggccgccgccgtagccgccggcgccaccgtagccgccctcacggcgcccgtagccggcgccgccaccttcttcgtagccgccgtctccacaa

SEQ ID NO: 420202 - DNA, 454 bp, Oryza sativa
ttttgttttttagtaattaaaatttacttatgtttcttcttcttcttcacagttcacatggaaatcagaaggaagtagcaaaaggaagagctgttctacactcgacagagtaacaaactaagagagcaacacaagtaacaagaggagagatttagtctcttttctggtgttctgcaaataaaactctcccctcttgctacccctaaaccccaacccaaggtagtagtaagtcaccccactaaaagtaaccggccatctcttacaaaaattggctgtctcctttgaatcaatcgaatcagatcatcatcatcatcatctacagctcgtcatgctcgtcgtcgacgccgccctcgccgtcggcgccgccacccggggcgccaccggtcctctggtagacggcggagatgatggggttgcagacggcctcgacctccttgagcttctcctcgtactc

SEQ ID NO: 420203 - DNA, 500 bp, Oryza sativa
tcgtgtgcctcggcgccatctgcggcgtcggcctcgtcaaggcgttccagagcgcctacttcaacaggtacggcggcggcgccaacaccctcgccgccggctactccaagggcaccggcctcgccgccgagatcatcggcaccttcgtgctcgtctacaccgtcttctccgccaccgaccccaagcgcaacgcccgcgactcacatgtcccggtcttggcgccgctgccaatcggcttcgccgtgttcatggtccacctggcgacgatcccgatcaccggcaccggcatcaacccggccaggagcatcggagcggccgtcatcttcaacaacgagaaggcgtggcacaaccattggatcttctgggtcggcccgttcgtcggcgccgccatcgcggcgttctaccaccagtacatcctccgggccggcgccatcaaggccctcgggtccttcaggagcaacgcgtgatataaggggttcgagagccattgttggggatat

SEQ ID NO: 420204 - DNA, 430 bp, Oryza sativa
gtcatcacgtaaggatacatgtccactgtttgcgatcagttgcgcaagaacgccaaggccaagccctgaacactgtatagaccgagatgaatctcacacgtttgtacagcccaatcatgattgtatttgaagtagtgagaatgtgggcctcccattgttcacttcctaagctgaacgaatccattctcggttaggtactccacaaattcatctattaggtagggccaagcaccttcttcgtcgtagttggataactgtggatcgatcgtcttgacaaattccaacagttgagaccatgtgtccctagaaatggctttattatgcctcacctgtaaaaactggcaccaatggtcgataaggggccagtgcctttcagcaaagagcaactgccacattccaagagcagtctccagtgcgagagatttttgac

SEQ ID NO: 420205 - DNA, 496 bp, Oryza sativa
tcgttaaaccaatccattttttctatatacatacgacatgccaacggttaaacaacttattagaaacgcaagacagccaatacgaaatgctagaaaatcggccgcgcttaagggatgtcctcagcgtcgaggaacatgtgctagggtgtatactatcaaccccaaaaaacccaactctgccttacgtaaagttgccagagtacgattaacctctggatttgaaatcactgcttatatacctggtattggccataatttacaagaacattctgtagtattagtaagaggaggaagggttaaggatttacccggtgtgagatatcgcattattcgaggagccctagatgctgtcgcagtaaagaatcgtcaacaagggcgttctaaatatggggtcaaaaagccaacaaaataagtgattcgtttttagcccttaaaaaagaaaacggattcttgaacctctttcacgctcatgtcacgtcgaggtactgcagaaaaa

SEQ ID NO: 420206 - DNA, 442 bp, Oryza sativa
tctcattgcttgtttgtgagcctgcttcttcttcctttccagtgccagcttgttcttttctatctcttcctgtctcttcatctctttcaattttgcttcatctactttaggttttgccttctcctttgggggctcatcatcatggacatctggaatatcatcaatatcaagaggttgttttgcctttgcagctttggcaggtgctttggcacgaatctcatcctttggagtaacatctgcacgtggagcaggagcctccttcgcctgcttcgccggctttttcagtggagcaggctcctgttcagcaggtggtgccacttgtgtttcgagaacgataggcttctcatcaggattcctcattcgtccatctcgactcagctgtcggctgttgagggaaacgagtatcctcttctcataatcctctctaaaggacttgctgctg

SEQ ID NO: 420207 - DNA, 536 bp, Oryza sativa
ctcctcctcactctgcttgacgccggcgcccagcaccagcagcctccgctctccatctccgtcgccgccgccctcctcccgccgccggatcaagaaatggaggccactggtgctgaagctacattgtcacaggttacagcagttgatggagaagataaccttttccaagataaggaaagtagggctactgccaaggagcgtggggaggcagctgtttttggtttggaaaacattgttactgcaaatggagccacaagtgctgctgatcttgcacccccaaaagatgttgtggatgagtggcctgaacctaagcaaactcacacgttcttctttgttagaatccgttcatatgaggatcctagcctgaaggcaaaacttgaacaagctgacaaggagtgccagaagaagattcaagctcggtcccatatttttgaggctttgaggaccaagaggagtgaacgatccaatattatatcagagctgaagccattggctgcagagaataaacaatatatgacagtgtgagtggaaaattg

SEQ ID NO: 420208 - DNA, 518 bp, Oryza sativa
tttttagtttctttgattgcaaggcatggtggtgatcgatttttattggacaccattcaaacaatttatgctaccatccaagagcaagttgacgctctagcaaagtctaatgtctcgagtaaacaggcgatgagtgaagaagctgctgaagctgctaaagagaaaggtaacattgcatttaaggagaaacaatggctaaaggcaataaatttctatactgaagcaatcaaattaaataataaagtggctacatactacagcaacagagctgctgcttttctagagctagctagttaccgccaagctgaggcagattgcacaagtgccatcgatattgatccaaagattgtaaaagcttatttgaggagaggcactgcaagggagatgctgggttactacaaggaggctgttgatgatttcaaccacgcccttgttctagaacccatgaacaagacagctggtgtggccatcaataggttaaagaagctatttccgtaaatactgagctgttggatttt

SEQ ID NO: 420209 - DNA, 465 bp, Oryza sativa
agggtcaaatccaacttattcataaagcatactgctgtcccacaggaaactgtttcataaaactaacatatcatacgggctcgatggtccattaaaccagacacaagtagacatcagcaccacaaatacttggcgaacagaggctcgggatgaccaggcacattggcagctccaccaaactggctgattactgaccaccacggaggcggagcaccaggtggagggtggactccttctggatgttgtagtcggcgagggtgcgtccatcctccagctgcttgccagcgaagatcagacgctgctggtctgggggaatcccctccttgtcctggatcttggccttcacattatcaatggtgtcggagctctcaacctccaaagtgatggtcttcccagtcaaggtcttcacgaagatctgcataccaccacggagacgaagcaccaggtggagggtagactccttct

SEQ ID NO: 420210 - DNA, 487 bp, Oryza sativa
acgtgtttgtcccgaatctcgagaggctctcgtggacgggtcgaatgctatcacgtgctcaagatgcagatctttgggaagacattgaccgggcagactatcaccctgtaggtggaccgctctgacaccatgcttaatgccaagggtaacatccaagataaggaggggatgctcgcggaccagtagcgcgtcatctacggtggcaagcagctggaggatggcaggacccttggtgactacaacatgcagaaagagttgacccttgaccttgttctccgtctccgaggtggcatgcagatctttgtcaagactctaaccggcgagactatcacccttgatggggagggtgttgacaccatacacaacgtgaagggcaagatccaggacaaagagggtatccgcgcagaccaggagagtccattttcgccgctagcacctgaagatgcgacgacccttgctgactacacactcaaaggagtccaccctc

SEQ ID NO: 420211 - DNA, 453 bp, Oryza sativa
ggtaagtcaccaagtcagggtaacaatacaactaggtccaatacgagactccagaacaatgtttagcatccaaataatctgcccacagagattctgctctgctgtgtttgcactagcttaccgatttgagtcgatacagtaaggtaaaagagtcgcacaagcacttgaagggtacaagcctgggttccgcaccagaggatataaccaatatttgaaaggaacattctaaatggacaagaaattagaaacctactagagttattacaggactgggttacacagatagtcacacgattcagctccttggagcacagctggccaagtgagtcttgaagttctccagctctgcaagaacttcatcttctggacggtatatcaggtcactcatgcgccatatctgcaatgttccacctccaccagtactctcaccatcatcagacacactcacaatag

SEQ ID NO: 420212 - DNA, 508 bp, Oryza sativa
ttcatacgctcctcatacgacagagagagcgtgacagcgcgagggggttcggaggcgggagcgggcgacggcggcggcggcgggcgccagcgagcggcgaagggcgcgctggagatgaaggagaaggggtcgagggcggcggtggacgagcgctacgcgcagtggaagtcgctcatcccggtgctctacgactggttcgccaaccacaacctcgtatggccgtccctctgctgccggtggggaccccagtttgagaaggctacctacaagaatcgtcagcgtctttacctttcagagcagacggatgggactgtccctaatactctggctattgcaaattgtgaagttgtcaaaccaagggttgcagctgctgaacatatgtcttagttgaatgaggaagcacgatcaccttttgtaaagaagtgcaagactatcattcacacaagcgaggtgaacaggattagggagctttcgcagaacagtaagatcattgccactcataccgaca

SEQ ID NO: 420213 - DNA, 507 bp, Oryza sativa
cgcgcgtactcgcgtccgtcttgcggcgcgtgggcggcggcacgcgctgcggcgggtggttggtccgggagagcgtcgtcgtcgccggtcgtcgggtgcggcgcctgcagggcgcagatcggggccgtcgcgcctgccgtcgagcgcgtccaccgcaggatggccgccaccgcagctgctgagcatcccttcaagaacattttgaccaccctccctaagcctgggggtggtgaatatgggaaattttacagccttcctgcactaaatgatcccaggattgataagctgccctactctatccgtattcttctagagtcagctatccgcaactgtgataacttccaagtcaaccagaatgatgttgagaaaattattgattgggagaatacatctcccaagctggctgaaatacctttcaagccagcacgagttcttcttcaggacttcactggagttccagctgccgtagatcttgcaactatgcgtgacgcgatggccatagtggca

SEQ ID NO: 420214 - DNA, 516 bp, Oryza sativa
ttgcggacgcgtgggcggacgcgtgggcggccaccaactttgacccgtcctcctcctccgcatcccccatcccctcctccccggcggcggcggcggcgcggaggcggcggcacgggagcggctagtggtttcgtcggcggaggcggaggcggggccaagatgttcgggcgcgcgccgaagaagagcgacaacaccaagtactacgagatcctgggggtccccaagaccgcctcccaggacgacctcaagaaggcgtaccgcaaggccgccatcaagaaccaccccgacaagggcggcgaccccgagaagttcaaggagcttgcacaagcttatgaggtattgagtgacccggagaaacgtgaaatctatgaccaatatggtgaagatgccctcaaggaaggaatgggtggaggcggatcccatgttgatccatttgacatcttttcatcattctttggaccttcttttggtggtggtggcagcagcaggggcagaagggcaaggaggggagaggat

SEQ ID NO: 420215 - DNA, 423 bp, Oryza sativa
aattaaacataatttattaactcaacacccatacgatcagttacattaattggggggcaaaacatttaatcgggcttgccacaaccaacgcgtttgacaaaacgactggtaacagaaaaaaacaagttaatgccacgcaacacacaacctagcaaaacatgcacaaacgggcgggatgggtaggaattaattaattatgtccatgaacagcatgggttttatttattaactaaacctgtccgtacgttgcagtactttaaaactgcacccaaaagggagagtagggggcacccaaaaaccaattggacggggggacctttcaaggcgggaccttttggccgttgtttagctgcacaatgaaagacaggcttttcccggggaggtacgcgttgctttgccaattggggccccaatttctggtta

SEQ ID NO: 420216 - DNA, 477 bp, Oryza sativa
ttgttagaatcaccagccttgcaaaccaatcaacctgtctagattaatttttgcatgctctctggaatggagaaacaacctgcaatgcttctcgttcttgtgacactctgcgccttcgcatgcaagcgatccgtcgcacagtctgcctttgccacgttctacggtggcaaggacgggtcgggcaccatgggtggcgcgtgtgggtacggtaacctgtacaacgccgggtacgggctgtacaacgcggcgctgagctcggcgctgttcaacgactgcgccatgtgcggcgcgtgctacaccatcacctgcgacaccagccagaccaagtggtgcaagcccggcggcaactccatcaccatcacggtcaccaacttatgcccgcctaactgggcgctgcccagcaacagcggcgggtggtgcaacccaccgcggcagcacttcgacatgtcacagccagcctgagagaacatcgccgtc

SEQ ID NO: 420217 - DNA, 524 bp, Oryza sativa
ttcagggccatggttgctcttccgtggccagcttcctggtcatctctcagaagacaatggttttgatgtattcatcaatggacgccgtggtgttggcatgcgcagagcaaacattgcagactactttgttggacctggactggatgatctgattgagcaattaactcagaatgatcgacgagggccgccacctgccactcaatcatcgattgatgctatgcctactgtgaagattacacagaggcatctcagtggagactcacattgccctgtctgcaaggacaagtttgagctgggatcagaagcaagggagatgccatgcaagcatttataccactctgattgcatagttccttggctggaacagcacaattcctgccctgtttgccgatatgagttgccaccacagagctctactggtgctagctgctcgcacacaagatcaaccaaccaaagtcagagttcaagtagcaatgggagaaccaatggacgtcaaaggaagaggaatccgttctcgttcctat

SEQ ID NO: 420218 - DNA, 456 bp, Oryza sativa
gcgttatgaattcatcttatattgtatccaagtcagcatccaataactagttggcgagccaaaagttacgttaaattttcttgcgcaattaactgtaaaccactgaaagatggatgccacatgataaaccgctggaaaatacaatgccaattgtcgcacagttaccctaaaaataaacccctcgcatcttccattggaaacatggtgaaacaaataccagcttcttccatgtgaccagagaggccactactctactgaaaagccgcatctttattactcctttgatgttataaccagcaggcccagcgcgccgatcagaaggtacttaataattggcttctcagtcatgataattgtaacccatccaacatatggcagaaaaccaacagctcgccccataatatgatgttgctgaagccaaagctgcccatgtgcatacagaagtcggtcatcccc

SEQ ID NO: 420219 - DNA, 540 bp, Oryza sativa
cgctctcctcctcgtcgccgtcgccggtcgtcgccggtcgcgggtggcgcgcaacccggagtctctctctccctctacctctgccggctgcttacctcgccgtgggcttcagcttcctcctcgatctccggcgcgcctccatctgcagatcggccggctccccccagtgtgttgaagcttgcccttgacacttagcaactgcagagtcctgctggagagagatggggttcatcggcgacacgatagagtcgatccgctcgatgcaggtccgccaggtgctggcgcaaatcatcagcttaggtatgattgttacctctgcattgatcatatggaagggtttaatagttgtaacaggtagtgaatctccagcggtggtggttctttctggtagcatggaacctggatttaaaagaggtgacatcctgtttttgcacatgagcaaagaccctatccgcactggagaaatagttgttcttaatgttgatggccgtgaaattccaattgttcaccgtgtgatcaaggctcatgaaccgccagaga

SEQ ID NO: 420220 - DNA, 435 bp, Oryza sativa
gagcacatatttagggtcaaatccaacttattcataaagcatactggtgtcccacaggaaactgtttcataaaactaacatatcatacggactcgatggtccattaaaccagacacaagtggacatcagcaccacaaatacttgacgaacagaggcttgggatgaccaggcacatcggcagctccaccaaactggctgattactgaccaccacggaggcggagcaccaggggggggggggactccttctggatgttgtagccggcgagggggcgtccatcctccagttggttgccagcgaaaatcaaaccctgctggtctgggggaatcccctccttggcctggatcttggccttcacattatcaatggggtcggagctctcaacctccaaagggatggtcttcccagtcaaggtcttcacgaagatctgcatac

SEQ ID NO: 420221 - DNA, 528 bp, Oryza sativa
gcagatctttgtaatgttcactgaccggcaagaccatcaccctcgaggtggaatcttctgacaccatcgacaacgtcaaggccaagatccaggacaaggagggcattcccccggaccagcagcgtctcatctttgccggcaagcagcttgaggacggcaggacccttgctgactacaacatccagaaggagtcaacgcttcaccttgtcctccgtctcaggggaggcatgcaaatcttcgtgaagactctgaccggcaagaccatcaccctcgaggtggagtcttctgataccatcgacaatgtcaaggccaagatccaggacaaggagggcattcccccggaccagcagcgcctcatctttgctggcaagcagctggaggatggcaggacccttgctgactacaacatccagaaagagtccaccctcaccttgtgctccgccttctggtggatgcagatctttgtcaagaccctcaaggcaagaccatcacctggaggttgagagctcggacacatcgacacgtcaa

SEQ ID NO: 420222 - DNA, 494 bp, Oryza sativa
gcgccgctcccgccggggtccgtccgctccgcgtgcctcgcctccgccccctccccgcgccgcttctccgtctccatcgccgccggccgcgccaggagccccatcattgcgatggcttctgccaaggaaggaaatggtgccccaacgaagaggacaacccttcatgatctctatgatctccagggtcagtccccgtggtacgacaacctctgccgtcctgtcaccgatttgctgccccttattggcagcggcgtccgtggagtcaccagcaacccatcaattttccagaaagccatctcgacttccaatgcatacgatgaccagttcaagcagcttatattagctggaaaggacgcagagagcgcttattgggaacttgtcatcaaggatatccaagatgcgtgcaaacttttcgagcctatctatgaccagaccgatggggcagatgggtatgtttctggggaggtctcccctaggctggcaaatgataccca

SEQ ID NO: 420223 - DNA, 541 bp, Oryza sativa
gaaggatcagtttggtttctatgttgtacagaaagtactggagacttgtgatgatcagcagcgtgagttgatcctgtcacgagtaaaggttcatttaagtgcactgaagaaatatacatatgggaagcacatagttgcccgggtagaaaaacttgttgctgccggtgagaggaggattgggcttcaggcacaatatccttcataatggcatgaaaatgacaatgtacagctaaccatggctagccagatctaccctgtgtctcctgctttgggctgctacaagccaactttaaaaataaacgtgttgtactaagaagattgtacattttgtagtttttgcttatagtcatgtcaggggtgaggctcagagtttatttacctgatgacgctgcagagaagataggcgttttgtataagtcggttaggtgtaaaaagaggaagaaagtctatatttgcgatgagactgtacaaattgcgaacctgagaagctaccagctgttcctgttaggataagatttatgatctccatgttatactgatg

SEQ ID NO: 420224 - DNA, 448 bp, Oryza sativa
  unsure (1)..(448): unsure at all n locations
ctatcttgttggggtttcaggtcagaagggagaaggggagaggtcagccatggcattgcctgtttccctcctccgcatcgcggcggttctgctcgccatcttgccattctgcgccacgcatccaagccccgggttccatgctcctcgcgagtttcacaaggcactcgtcccagatagatatggatttgtggcaagaagatcaattgctgaagctcctgttgacgtaaatgtcactacaaacagttcctttgtcttggcgcaagagcgaacatatagaaaagaccccttgaatggattcaggaaatatactggcggttggaatattagcgaagtgcactatatggcttcagttggatacacagcttttccactgttcatcattgccttggtgtggcttgtgctgctttttctggttatgcttggaatttgctgcangcattgctgttgt

SEQ ID NO: 420225 - DNA, 503 bp, Oryza sativa
tttgatttctcgccggagaattcctgctccgcctcccggctcctcccctccgccctcgcttccgcaggcgaactaaaccatggcgacaggtcaaattttctccaaaaccacccaagcgttattctataattataagcaacttccgatccaacggatgcttgattttgacttcctatgtgggagagaaacaccttctgttgctggaataatcaatcctggttctgatgggtttcagaaacttttctttggacaagaagaaattgccattccagttcatcctacaattgaagctgcctgcaatgcacacccaactgctgatgtatttatcaactttgcatcctttcggagtgctgccgcttcttcaatgtcagctttgaagcagccaacaatcagagttgtagccatcatagcagagggtgttcctgaatcagatacaaacaacttattagttatgcacgtgccaacatcaaggtaatcattggaccagcaacagttggaggaat

SEQ ID NO: 420226 - DNA, 444 bp, Oryza sativa
tttttgacggccatggctgctctttcgcggcccggtcgctggtcattttttataagacagtgggtgtgaggtattcatgaatggacgccgtggtgttggcatgcgcagagcaaacatcgcacactactttgttgtacctggactgtatgatcggattgtacatttaacgcaaaatgatcgaccagggccgccacctgtcactcaatgatcgattgacgctatgcctactgtgatgatgacacagaggcatctgattgtggactcacattgacctgtgctgcaaggacaagatcaagctgggatcataatcaaggagagatgccatgcaagcatttataccactctgattgcatagctccttggctggaacagctcatattgtgccctgtttgccgatatgagttgccaccacagagccttactggtgctagctgctcgcacaca

SEQ ID NO: 420227 - DNA, 527 bp, Oryza sativa
ttgattccaagctatatcagagactcttccgttgctgtcatcgtatttgatgttgcaagcagacagtctttcctaaacacttcaaaatggatagaggaagttagaactgagaggggcagtgatgttatcattgtgctggttgggaacaaaactgatcttgttgacaagaggcaagtctccatagaggaaggagagggcaaagcgaaagatctcggtgtgatgttcattgaaaccagtgctaaagctggttttaacattaaggcgttgttccgtaagattgcggctgcacttcctggaatggagaccctctcatcagcaaagcaggaagacatggttgatgtgaacttgaagtcaagcaacgccaactcatcccagtctcaggcacaggctgggggatgcagttgttagcttcagtcccctaacacttactgcttcgcggtcttaaggccccccatgcctctttcaccaaaagcatcaatactgcttgtctgaggggaggagagttaaattgtcgtctcatgccagtg

SEQ ID NO: 420228 - DNA, 515 bp, Oryza sativa
tcgtgtactgtattcattttatcatgaggttcctgagcatatgataacatgcccttcaacaccagaatggaaaaggtcatccgatcttgatttaaatggtgaagccaagcaagatgatgatgatgagaatggtgatcttgcaccagtacataatgaggtggaagataaagttatcactaatgatgatgtgctaggagatgctgtaccatatgatcagcaagatgctctgcgtgtcgtatgttatcgcttgctggaaatgccccctgtgagagggcatgcacagtttcctggatcacatcctgtctctcttaacagtgagaatttgcaactactcagacagcgatactattttgctacatggaaagctgatggaacccgatatatgatgcttataatgagggatggctgtttcttgattgatcggaatttttgcttcagaagagttcacatgcgctttccccataggaattttaatgaaagactacatgagatgactctgattgatggagaaatga

SEQ ID NO: 420229 - DNA, 512 bp, Oryza sativa
ttggaatcctgtttgggttccctacaaggtttggcatgatggctgcgcagatgaaagcattctttgatgcaaccggtggcctgtggagtgagcagagccttgcaggcaagcccgccggcatcttcttcagcactggtacccagggcggtggtcaggagactacaccgttgacagcaataactcagttgactcaccacggcatggtgttcgtcccggtcgggtacaccttcggtgccaagatgtttaacatgggagaagttcaggggggcagcccgtacggcgccggcacctttgccgccgacggctcgaggtggccgacggaaatggagctggagcacgccttccaccaggggaagtacttcgcaggcatcgcgaagaagctcaaggggtccgcttgagatctccattgggcaaattcaattgggcgtgtgcgtgtccctacgcacaacatcgtgaggcatttcatacagctccaaaccataccgacatacagtcaatagcttggtctcttc

SEQ ID NO: 420230 - DNA, 454 bp, Oryza sativa
gatcaaagcaaacgagacgagcttttttcttgcgatcaaaaacacagatgggcaaccacacagttaacacaaactagatagttccacacaaaactaacgatgataacgatcggatgatgatgatggtagctcgattagatagatagataacttggccatgagggccccaccgctcagttcctccagttcccgtcggagttgccgccgccgcggctgccgtagccgccgccgtagccgccgccaccacgggcgccaccgtagccaccgccaccgccgtagccgccttcacggagctggccgtagccaccgccgacgccaccaccaccgtagccgccgccaccgtagcctccgcctccgccgcgctggacgtagccaccgccgtcttcgtctccggagcggcgcgactgggcctcgttgacggtgatgttgcggccgtcgagctccttgccgttca

SEQ ID NO: 420231 - DNA, 487 bp, Oryza sativa
tttgtcttctcctccccctcccggttcggttcggttcggttcgggtccggttcgatttcggtttttccttcggttcgggggttggtgggaaagcatggcggcgccggatgttgagtaccgctgcttcgtcggcggcctcgcctgggccaccgacgaccgctccctcgaagccgccttctccacctacggcgagatcctcgagtccaagatcatcaacgatcgggagacggggaggtcgcgcgggttcgggttcgtgacgttctcgagcgagcaggccatgcgcgacgccatcgaggggatgaacggcaaggagctcgacggccgcaacatcaccgtcaacgaggcccagtcgcgccgctccggaggcggaggcggcggtggctacggccagcgcggcggatgcggaggctacagtggcagcggctaccgtggtggtggcggcggcagtggctaccgtcagcgccgtgaaggcggctactgcggtggc

SEQ ID NO: 420232 - DNA, 421 bp, Oryza sativa
gttggtcgaatatggtctacaatatatgactgtcaaagaacaaagtgtaaaagatacaggtacagttccagtgttacaaagaaccaaggaagagctagacctatatctgtatgactgtatgtatggctatgtatcactcgcttgctctgtacaaaagcaggaacaaattaaacaatagcggcacaaaacgaatcaacgaatagtgtgtttcgactgaatttcactccctagacaaaaactctctgacggatcggatccatgcagctgctgaattacgcggtgagaagccggggcttcttgaaggcgagggggctctggacctcctcctcctcgtcccacattttcttgcccttggagcacggccgccacacgaactccggcacggtcgggaggttgaggtcgaacgcccgggtggcggact

SEQ ID NO: 420233 - DNA, 497 bp, Oryza sativa
atctctcacagcaaccagccagctgccacactagcttgaggcgagcgagcgaagcttagctagcggatataacaagtcgtcgatctgcttgctgcttttgtgaattgcggtggaagcatgtcgagcgcgtcgtccatggaagcgctccacgccgcggtgctcaaggaggagcagcagcagcacgaggtggaggaggcgacggtcgtgacgagcagcagcgccacgagcggggaggagggcggacacctgccgcaggggtgggcgaagcggaagcggtcgcgccgccagcgatcggaggaggagaacctcgcgctctgcctcctcatgctcgcccgcggcggccaccaccgcgttcaggcgccgcctccgctctcggcttcggcgcccccgccggcaggtgcggagttcaagtgctccgtctgcggcaagtccttcagctcctaccaggcgctcggcggccacatgacgagccaccgggtcaagctgtcgacttcgcc

SEQ ID NO: 420234 - DNA, 358 bp, Oryza sativa
gttctatgttggccccgcaatttgagccactggactaaaaaatggaaataggcccttctggacaaaaaaaaggaatttacggccctgtcaggggctctttgaaaccccaatgggggggttacctacccaaccattcgggaaaagattccctgcccgggggtaatacatggccttatgatcttatattaacaagaaagtttcagtttttgggtacccattttcctccttggacagaaaaatttttttttggggccaactaaattgccccactggaactaatcccggggcacctcatgcaaaaataggggtgggtgcgcaagtagaaaaaccccccatggtcttgcccattttcattttg

SEQ ID NO: 420235 - DNA, 525 bp, Oryza sativa
tggtcgcgtccgcccacgcgttcgcccacgcgtccgctccgtgacggaccacgccgcctccgcgctcgagtcaaccgtcatcgccgccctcggccgcacccgcgacgccctccgcttcgcccgcttcgccgtcaggcatgggaagaggtacggcgacgcggcggaggtgcagcggcggttccggatcttctccgagagcctcgagctcgtccgctccaccaaccggaggggcctcccctaccgcctcggcatcaaccgtttcgcggacatgagctgggaggagttccaggcgagccggctcggcgcggcgcagaactgctcggcgacgctcgccggcaaccaccggatgcgcgacgccgccgctctcccggagaccaaagactggagggaggatgggatcgtgagccccgtgaaagaccagggtcactgtggttcctgctggaccttcagcaccactggttctcttgggcagcatatactcaggccactgagaagcctgtctctcttctgagcagcactggttga

SEQ ID NO: 420236 - DNA, 388 bp, Oryza sativa
ttctaggaagcggctgatgcgggacttcaagcggctgcagcaggacccgcccgccggaatcagcggcgcgccgcacgacaacaacatcatgctctggaacgccgtcatattcggaccggatgacacgccgtgggatggaggcacgttcaagctgacactacaatttacagaagattatcccaacaaaccaccagttgttcggtttgtctcaaggatgtttcacccaaatatttatgcagatggaagtatctgcttggatatcctacaaaatcaatggagccctatatatgatgttgctgcgatattgacctctatccagtccctgctctgtgatccaaacccaaactcccctgcaaacttcgaagcagccagactgttcagcgagaac

SEQ ID NO: 420237 - DNA, 520 bp, Oryza sativa
tcgttaactatatatccttttggtttgcaaaggttttactaggttatttgcccccctcttctagaacgcatccagaattcgtggactctgcgacccaactcacacggcgaagcacacagaattttttttcccaaatccatttattttcctctcttctctctctcgaatcgaatcgaatcgcctcgcctcctttgttgaattgaatccaagctcgattcgccgccgccgcacgccgccatgggcaactgctgcggcacgccggcgacggcggaggagggcgggaagaggaggaggagggggaagcagaagaaggcgaaccccttcaccgtcgcgtacaaccgcgcgccgtcgtcggcgggggcggcggcggagaggcccgggctgatggtgctgcgggacccgacggggcgggacctcagcgcgcggtacgagctcggcggcgagctggggcgcggcgagttcgggatcacgtacctgtgcacggaggccgagacgggggacaggtacgcgtgcaagtcga

SEQ ID NO: 420238 - DNA, 515 bp, Oryza sativa
  unsure (1)..(515): unsure at all n locations
tctcggagaaagaagagcgcgccgcgccatgtgcggcggtgcgatcctcgccgatttcaccccggcgagggtgccccggcggctgaccgccgccgtgctcctgccggtgaccccgactccccccgccgacgagaggagaaccacccggaagcgcaagtccgacgtcgacttcgaggcggagttcgagcttttcgaggacgacgacgacgacgatgagttcgagctttccgacgatggcgacgagagtttggccgtgtcatgtgtgtcgtcccccaagtcgaaggcagtaccttcgttttctttttcgtcggatgtctcctcgagctccaggccgnggcggcgcgtggcggcggcggcggccggtcgtcggaaggcgagcaagaagagcaagtacaggggcgtccggcgccggccgtcgatgaggttcgcggcggagatcagggaccccaagaaggggcggcgcgtgtggctcggcacgtacggcagcgccgaggaggccgccatggcctacgacc

SEQ ID NO: 420239 - DNA, 509 bp, Oryza sativa
gttgaacagggtgaaaaaaaatatcacaatatcacgtccagtttgcgcgatgtatcgcaagcaaaaggagccaatgcaaccaagtcatgcattacaacccaactagacaggcctacgagcttaggtgtgttttcgtatgacaaaacttattacaacgcgcaaggtcctagtatcccggtctcttccaaaaaactactagctgctatctctaaaagcagggcaactgttagcacatgcggtttcacttcttgacctcctcgtactcagcctctggagcctgctcgcctccgccctgagatcctcctgtctctgaaccgcctgcgccaccaccaccaccagacatatgctgcccaatctttgaaacagccttgttggccgcttcgatattggccttgatcttctcgatgtcatctgaggtcatcacagagcggagatcggcgattgctgtctcaatctcagtggcaacctctgcaggaatcttgtccctgtactctcccagacttttctca

SEQ ID NO: 420240 - DNA, 470 bp, Oryza sativa
ttcctcctcgcctccctcccctcccctcccctccccgtccggccatggcggcgtcgctgcttctccgagccgcccgccggcgagacctcgcctcgcccctcggaacgttgaccgccaatgctcaatcggcatattctgcgaatatttgttcacaatggggtagttttgcaagagctttcagtgtaaaaccaactggaaacgaggttattggaattgatttgggaacaactaattcttgtgtttctgttatggagggaaagaaccccaaagtgatagagaattcagaaggcaccaggacaacaccatcagttgtggcctttaatcagaagggagagcgacttgttggaacttcagccaagcggtaagcagtgaccaacccacaaaacactttctttggcacaaaacgtctgattgggagacgctttgaggatcccacaacacagaagagatgaaatggttccatacaaaat

SEQ ID NO: 420241 - DNA, 535 bp, Oryza sativa
caggaagctgatgagcgtcaaaagatcatgaaggatccccagtcagctgttccagcagcctttgtttcatttcgttcacggtggggggctgctgtttgtgctcagacacagcaaaccagtaatccaacagtctggataactgaatgggctccagaacctcgtgatgtctactggaataatctatccattccatttgtgtccctcacagttaggaggctgatagttgctgtggcattcttcttcctcaactttttttatgtcattccaatagcattcgtgcaatctcttgcaagccttgaaggaatagaaaaggcgcttccatttctgaaacccttaatcaaaattgatgtcatcaaatcattcatccaaggttttcttccaggaattgctttgaaggtcttccttatattgcttccaactatactgatgtttatgtctaagtttgaaggattaatatcacagtcatcactggagcgaagatctgcatctaaatattatatcttcttggtcttcaatgtatttttgggaagcatcg

SEQ ID NO: 420242 - DNA, 519 bp, Oryza sativa
ccccaccccaccccctctttcttcttctcacgctcctcgtcgccgccggcgccgcctccgccggcgccgatgacctggtcgccgagctgcaatccctgcggtcccgctccccgtcgggcgtgatccacctcaccgacacctccatcacccgcttcctatccgccccggcgccgcgcccctactccgtgctcgtcttcttcgacgccgcctcgctccactccaagaccgacctccacctcccccagctccgccgcgagttcgccctcctctccggctccttcctcgcccacaaccccgcctccgtcgacctcttcttcgccgacatcgagttctcggagtcgcagcactcgttcgcgcagttcggcgtcaactccctcccccacgtccgcctcgtccgccccgagcacacccggctcgctggctccgagcagatggaccagtcccacttcttccgcctcgccgactccatggtggagttcgtggagtcccgcaccggtccgaggtcggccccatcgtccg

SEQ ID NO: 420243 - DNA, 494 bp, Oryza sativa
ttttacacatcacactaccactgatgatagtgtgctcttggtgaggcctccaagaagttgcctgaccacacaagcacaaagcaagcactatcaccaaaaggatcagagaagaaactgatatcactatctgatcagtgtagcattgcagcctctcttcttggtaggagtgagctagcacagtgaagagctaattaagccatttgtgtgagcttgcgttgagtgagctctgagctaatatggatgttgagtcaaggcaaggccccaagggtggtgacaccatggctgactccgaggtctccgtggactggaggggcaggccttgcggctctcgcaagcatggcggcatgaaagcggccgtctttgtgctagggatccaggcgttcgatatgatggctatcgcggcagcggggaacaacctgatcacctacgtcttcaacgagatgcactacccgctgtcaaagtcggacaacatcgtgaccaacttcattggcacc

SEQ ID NO: 420244 - DNA, 534 bp, Oryza sativa
ccacgctggcccccggcggcgaggcctccccgttcgcgccggtcaccggggaccacccggcgccggcgctcgcgtcgccgacgtccgtgcgggtgcgcgtggcggccaccagcctcaacttcgccacctacctgcaggtacagggcaagtaccaggagcgccccgcgctaccgttcgtcccgggctccgactacgcggggttcgtcgacgccgtcggccccgccgtgcggaggttccgccccggggaccgcgtctgcggcctcgccgccgtcggctccttcgcggatctcatcgtcgccgacgagaagcagctattttcggtgcctgatggatgtgaccttgttgctgctggagcattgcctgttgcatttggtacatcgcatttggcccttgtacacagagctgaactaaaggctggccaggtgctacttgttctgggtgctgctggtggtgtcggggcatctgctgtacaaataggaaaagtttgtggtgctgttgttattgcagttgctaggggaactgagaaattgcagt

SEQ ID NO: 420245 - DNA, 524 bp, Oryza sativa
gtttcttgctccatccatctatccatccaaggagtgtggaacgccacacgtattttttttttatctatgctaatctgatcattagcagaggagagttttagcagtaggattggattaaattggagtagtttcatagtttgtgtgtagtgatcttaattagctttgattagacagacagtacagtagagtagaggatgttggctgtgttcagcggcgcggtggtggaggtgccggcggagctggtggccgccggcagccggacgccgtcgcccaagacgcgggcgtcggagctggtcggccgcttcctcgccgccgccgagccggccgtgtccctgcagctcggcgaccttggccacctcgcctactcccacgccaaccaatccctcctccgcccaagatcctttgcatcaaaagatgacattttctgcctgtttgagggagtcctggacaatctgggcaggctgagccagcagtatggcctgtcccagggcgccatgaggtgctcctgttatcgaggcgtacag

SEQ ID NO: 420246 - DNA, 486 bp, Oryza sativa
cttagaaaagccgcttgctttgccgccatggctggcaagctgagcagagcagctaacacaaagaacacgagatcactataaaccaaacggcaacgaacgaagaaaatacagggtcttttttgtctgaagatacacgaagcggttcgttttcttttatttttagtctcctctcctcctcgatgatgggtgtatggcaatggcaatggcgatgggatcttggcttagttgatgggaaggggctcgccgttccactccttgaggcagtcgagcatggggtcgatgagcttgccctggctgatgccgaggaacaccttgttgcactcctcgccgggggacttgagcttctcgccggtgaggaatacgcagccgagctcctcgcggacgaagcggtagagcgggaacgaccggctctcgacgatccggttggcgacgggggcggtgccgttggcgacggcgacgcgggcggactcgatcttccggggcagc

SEQ ID NO: 420247 - DNA, 497 bp, Oryza sativa
agtatcgaatcctctcttctcctcgtgcccaccaccaccaccgtagcaatggcgggcaacgggccgatcaacatggaggacccgctcaactggggcgcggcggcggccgagatggccggcagccacctcgacgaggtgaagcgcatggtggcgcagttccgcgagccgctggtcaagatccagggcgccaccctccgcgtcggccaggtggccgccgtcgcccaggccaaggacgccgccggcgtcgccgtcgagctcgacgaggaggcccgcccccgcgtcaaggccagcagcgagtggatcctcaactgcatcgcccacggcggcgacatctacggcgtcaccaccggcttcggcggcaccttccaccgtcgtaccaaggacggccccgccctccaagtcgagctcctcaggcatctcaacgccggaatcttcggcactggctccgatggccacacgctgccgtctgagacggtgcgggcggtcatgctcgtgcg

SEQ ID NO: 420248 - DNA, 426 bp, Oryza sativa
ataggatcaaaacatttctattaccacaactttttaaggatggaattgagtagcaatactttcaccccaaaatacagtttagcgacaatatcttagaaaagccgcttgctttgccgccatggctggcaagctgagcagagcagctaacacaaagaacacgagatcactataaaccaaacggcaacgaacgaagaaaatacagggtcttttttgtctgaagatacacgaagcggttcgttttcttttatttttagtctcctctcctcctcgatgatgggtgtatggcaatggcaatggcgatgggatcttggcttaattgatgggaaggggctcgccgttccacttcttgaggcaatcgagcatggggtcgatgagctcgcccctgctgatgccgaggaacaccttgctgcactccctcgcggggga

SEQ ID NO: 420249 - DNA, 530 bp, Oryza sativa
ctaccttctcctccggctcttcttcagtatcgaatcctctcttctcctcgtgcccaccaccaccaccgtagcaatggcgggcaacgggccgatcaacaaggaggacccgctcaactggggcgcggcggcggccgagatggccggcagccacctcgacgaggtgaagcgcatggtggcgcagttccgcgagccgctggtcaagatccagggcgccaccctccgcgtcggccaggtggccgccgtcgcccaggccaaggacgccgccggcgtcgccgtcgagctcgacgaggaggcccgcccccgcgtcaaggccagcagcgagtggatcctcaactgcatcgcccacggcggcgacatctacggcgtcaccaccggcttcggtggtaccttccaccgtcgcaccaaggacggtcccgccctccaagtcgagctcctcaggcatctcaacgccggaatcttcggcactggctccgatggccacacgctgccgtcggagacggtgcgggcggtcatgcttgtgcgcataacac

SEQ ID NO: 420250 - DNA, 508 bp, Oryza sativa
ttcttccccgtcgtctaagttaaaaggaagccatggagcacaaggagactggatgccagcagccagaaggcccgatcctttgcatcaataactgcggcttctttggcagtgcggctaccatgaacatgtgctcaaagtgccacaaggagatgataatgaagcaggagcaggccaagctggcagcctcctctatcgacagcattgtcaatggtggtgattccgggaaggaaccaattattgctggtcacgctgaagtagctgttgctcaagtcgaggtgaagacgcttgttgcgcagcctgctgagattgctggtcctagtgagggggtcacggtgaaccccaaggggagggaaggaccaaatcggtgctccacttgtcggaagagggttggtcttaccggattcaactgccgatgtggcaacttgtactgcgcaacgcaccgctattccgataagcatgactgccagtttgactatcggaccgctgctagggatgctattgccaaggc

SEQ ID NO: 420251 - DNA, 440 bp, Oryza sativa
gtgacgaaaccagatgcgggacagattttattatatgagcactgttatgcagactagctcacttgtcttattcagaaacaacaaaatagaacacagctctatgcacagcttattttccgatcaaacaaggaggatcaaacaggccagatggagcatatatacacctcactctgttccaaggagggcaaggagtatatcctactagtctctgggtgtatatttagcaacagctcgctccaatgggacactgattctcttctggtaggcctgctttatcagattcaggtctacctaggcacgcgatgttgtgatccttgtcagagagttctccattgggcccattcctggtaaggccaatcgaatgactttctcaaagcatgtggcagggcaagcgaagcatcttatgatcgcccttagtgaccaaggaactcggcttagga

SEQ ID NO: 420252 - DNA, 473 bp, Oryza sativa
tttttagtgagagaccgtgattggatcgatcaccgatgcgacgatcaatggcgacgctcaccgtgcccgccgtcgtgccgaccgtatccgaggactgcgagcagctgcgcaaggcgttcaaagggtggggcacgaacgagacgctcatcatcttcatcctcgcccaccgcgacgcggtgcagcgccgggcgatccgccgagcctacgccaaggcgtacggcgaggagctgctccgagccctcaacgacgagatgcacggaaaattcgagagggcggtgatccagaggacgctggacccgacggagcgggacgcggtgctggcgaacaaggaggcgaggaagtggcacccggagggccgagcgctcgtcgagatcgctgacacgctcactgcatcagatctctttactacgacagaagcgcaccacgagcgctttaagaggtcgatcgaggaggacaccgcggcgcacattacc

SEQ ID NO: 420253 - DNA, 521 bp, Oryza sativa
ttgtcgcgtgggcgcggccgttcccatgggggcttccgttagggccgtgccgctgcagtcgccgctgccgcccgccgaggaagttatggcattcataagatcatatgttgtgcctgaaggctttccggatagtgttactccgtcatacgtcccatacatgacctggagagccctgaagcatttctttggtggagctatgggtgtttttacaacaagaaccttgctgagctctgttggagtctctcaaagcaaagtaacaccaggagccattgctatcaactggatcctcaaggatggtgcaggtcgtgtcggaaaaatgctttttgcacgtcaaggaaagaagtttgactatgacctaaagcagctccgcttttctagtgatctattgctggagattggagctggaattgagttagcaactgcagcctttcctcaatttttcttgcccatggcttgcgtagcaaatgctgtaaagaatgtcgcggctgttacatcaacatcaactcgaacttcaatttata

SEQ ID NO: 420254 - DNA, 465 bp, Oryza sativa
  unsure (1)..(465): unsure at all n locations
gctcccgtgcgcgaacggctgcggcttcttcggctctgccgacacccgtggcctctgctccaagtgctaccgccagaccgtgatgtcccaggcctccgcgccgtcggccgcagcacagtccgcggagcacgaccaggtggtgttgccggcgccggagggcgtacccgtggacgagggggcgatgccgccgccgccgccgcggcacggggcgaagacgaagagcaggtgcgctgcgtgcgggaggagcgtggggctgatggggttcgagtgccgctgcggtgccgtgttctgcggcgcgcatcgctactcggacaggcacgactgcggctacgattacaggggcgccgggcgcgacgccatcgcccgngccaaccccgttgtgagacccgacaaggtggagaagctctgaaaaaaaaggaaaagctacaactggtcgatcttgccaacattgccatgcccgaacca

SEQ ID NO: 420255 - DNA, 518 bp, Oryza sativa
accgacgcggcgttttttttttgttgttttgtgttgagcggaacacattgggccccacagaatcagtcaatttccaatctctacgtatatgatatctccatacatagagcagtaccgagtgccgactccatctcgcacgagaagcaaatgagcaatcgaccaatgagtttggtgcgggcatggcaatgtcggcaagaacgagcagttgaagcttttccttttttttcagagcttctccaccttggcgggtctcacgacggggttggcgcgggcgatggcgtcgcgcccggcgcccctgtaatcgtagccgcagtcgtgcctgtccgagtagcgatgcgcgccgcaaaacacggaaccgtagtggtactcgaaccccatcagccccacgctcctcccggacgcagagcacctgctctttgtcttcgccccgtgccgcggcggcggcggcggtattgacccctcggtcacgggtacgcccttcggcgccggcaacaccacctggtcgtgcttccgggact

SEQ ID NO: 420256 - DNA, 418 bp, Oryza sativa
atcaaattattttttaacattaacaaaccggcacgagacggtgcgaatatcaaatgatttgagtcctatattgattgatgactggtatgtttccctcaacctgaaaataaacttattccagtgtctagctctattaatgcttgattgggtacacgataagagctgtcaacgatcaagcttgaagcatacaagcaaatttaactggccctggcagtgaccatggtgatgccggcgcggtggccgaacctggcgacggcgcagtcggcggagaagatgtcggaggcgacgtagcttggtgcgccgcccatgaccggcatgctggcgctgacgctgagcttgttgacgtagtcggagcggtaggtctggccgagcacgccatggacgtcgtcggagaggtcgtagaacttgaagccgatgt

SEQ ID NO: 420257 - DNA, 510 bp, Oryza sativa
gccaacttaaccaaatttactgtacgttgaccaccagctagctagcttagctagcgacgatggcccgggcatacatggctgtcgccgtggccctcttcttggtggtcgtgtgcgccgccgtctccgaggccgcgaagccgccggcgtcgcataccaggctgccgcccaactaccacatgatcaacccggggagctcgggcttgggcaagagggaccaggagctgtcgtgcgccgacaccaagggcaagaagaaaggatgcatggccaagtgcgacaagcgctgccccaaccagtgcatggtcatgtgccccagctgcaagaccttctgcatgtgcgacttctaccccggcgtgtcgtgcggcgacccgcggttcaccggcggcgacggcaacaacttctacttccacggcaagaaggaccacgacttctgcatcgtctccgacgccgacctccacatcaacgcccacttcatcggcaagcgcaaccccaccatgagccgtgacttcacct

SEQ ID NO: 420258 - DNA, 480 bp, Oryza sativa
aggagattaaaatgttcatcacggaaacatgccataccatgtgctcaaatgtcgaaacaaaagcgggtcgcggaacatatcatattcgttacagggttcattttgatttgaagttttaggctaccagaaaataacatttggaagccaaccagctgacgatcgatatcagcatcttaagcagtgcgcaggatgatgtgaacaccactgtcagtgtccacagtgtcactcatctcaccaaccttgagagcaaatgtcgcatcttcgaagggtttctgcatctgcctcctcccaaaagtgcccaggtcgccgccacggcgcgcggaggagcagtcggagtggcgggcggcgaggtcggcgaagttggcgcggccggagaggatctggtcgcggaggtcggccaggcgcgcggcggcgtccgcgcgcgtggtggcggagatgacgcggtcgtctggatccttccaggaggccttgcggcgggag

SEQ ID NO: 420259 - DNA, 513 bp, Oryza sativa
tttttgacgcgtgggcggaggagtagaggaggagatcgagatggcgtcgtcggcgacggagacggagacggtgagggcgtcgcacatgctgatcaagcacgagggctcccgccgcaaggcctcctggaaggatcccgacggccgcgtcatctccgccaccacgcgcgccgacgccgccgcgcgcctcgccgacctccgcgaccagatcctctccggccgcgccaacttcgccgacctcgccgcccgccactccgactgctcctccgcgcgccgtggcggcgacctgggcacttttgggaggaggcagatgcagaaacccttcgaagatgcgacatttgctctcaaggttggtgagatgagtgacactgtggacactgacagtggtgttcacatcatcctgcgcactgcttaagatgctgatatcgatcgtcagctggttggctttcaaatgttattttctggtagcctaaaacttcaaatcaaaatgaaccctgtaacgaatatgatatgttc

SEQ ID NO: 420260 - DNA, 442 bp, Oryza sativa
  unsure (1)..(442): unsure at all n locations
gaaacaagaacctgaaatgtgcactgcgatatatataggattatgagtataaagtgggtttacaacatttgctatatatgaactgaattggaaatattgtcttgcatcttattctataacagtactataactgcctattattaattatctagagtcattcatctgcaacagccaccaacaacttgcccacattcctcccagaaaacatgccaatgagagcctccgatgccttctcgatgcccttgacaacatcctgcaggacggtcaccttaccttcctttagggacctagccatctcatcctcaaacctcgggtataagccgaagtggttgaatacggcaaatccctccacccggatggtcttggataggatctgtatcacgttgtgcatcccttcgggctcctgcaggttgtactgtgagatcatnccacacaccaccac

SEQ ID NO: 420261 - DNA, 498 bp, Oryza sativa
ctggttttacaagaatctaaaccggcaatggctggaggaggcgtcgatggcgatgggatggagatggtgaggaacaggaaggtggtgctaaggaggtacgtgacggctggataccctacagtagatgatatggaggtggtatcctccaccgtgatgccacgcgtgcctcttggaacgatggcaccagcggtgatagtgaagaacatctacctttcgtgcgacccgtggatgcgcggtcgcatgactaagcacgacgatgctactgcggagatagccgaagacttcgtgttaggagaggccatggttaatttcggtgtgagcaaggtgatcgactcgacgcacccggtgttcgctgctggcgacctcgtgtggggactgtgtggttgggaggagtacagcctcatcacccaaccggagacactgcacatgatcaaccatcctgatctaccgttatcctactacaccggtgttctcggtgtgactggtctaacagcatat

SEQ ID NO: 420262 - DNA, 490 bp, Oryza sativa
ccactggtgaagagcatcaatgtcagtgggcacaagtatggccttgtgtatccaggtgttggttgggtcatttggcgaagcaaagaggatttgcctgaagaactcattttccatataaactatctggggacagaccagccgacgttcactctgaacttctccaaaggttccagccagataatcgcacagtactatcaactaatacgcctgggattcgagggatacaagaacatcatgcagaattgcatggagaacacagcaatactaagggaaggcatagaggcgactggtcgattcgaaatcctctccaaggaggccggtgtgcccttggtggcgttctcgctcaaggacagcggcaggtacaccgtgttcgacatctccgagcacctgaggaggttcggctggatcgtgccggcgtacaccatgccggccaacgccgagcacgtcgccgtcctccgcgtcgtcatcagggaggacttcaagccgagcc

SEQ ID NO: 420263 - DNA, 485 bp, Oryza sativa
aagcgcggcaataaaacattgcattgaattctgaacgataaacaccaggaaccggcgtttatttgaggcaagcactgcccaaaatctcgcaaaagtactgaaaccttagacatagtacacatccatggcaaacatggatgccaaatgacaactacagaaaattatcaaattcgaatgcagctgacggcttctcctgctgaagatgcatattttcccctccattacttggatgtgctctctccatcgacagccaatgggacggcgctggccaggctgcggtatttcagagcatagaacatctcaatgtaacggcgagtctcgcgcctctcaaggttgcttacgtacttccagaatccatatacaccagtcaaggtcatcagcctctcagagtacagcttccaggtgtacttctcgtaaatcctctgcagacctccctgtgaaatattgtcccagtaggttgaatcctgcttgcactttctcaagaa

SEQ ID NO: 420264 - DNA, 418 bp, Oryza sativa
ggtaaaacgaaacgcaatgctaatgcgattagcccataacgaacttgaacttagagttacacaggccgcggttcaaacacggtggggaagaacagtctcgggcagaagtgtagaaatccggcaaatttctcaatcatcctaaattgggaaatcttattaagtcaccacgagctgacgaccagctcattaactatcagggccagcaatatgtacttaatgaaggacgggaaaagcacactagaggagttcgaatcaggaggcctgaggtggctgatccccgagcagcagcgacttgacgatggtgtcggccatcccgtcggcgagagggaacatgtggccggacttggggagctcgtggtagacgacccaagggagtttctcgctgaggtacctggacaggctgaccggcacgatcaga

SEQ ID NO: 420265 - DNA, 467 bp, Oryza sativa
ttgtcgcgtgggtgttgcttggctcctctcttctgccactccctcgcgaactcgatcgcttgctgcctttgctggccttggcaaccgccgcatggcggcctccggcgtgaagcggccaccgaggccggccccggcctcctccggcgtaaggaagctcattctagctctggccgtgttcttgccggcgctgctgtacagtcagctccagcctccgcctccgaagatctgcggctccccgggtggccctccgattacagggacaagaacacggctcaaagacggtaggtatttggcctacctggagtccggcgttccaaaggagcaagccaagtacaagatcatctttgttcatggattcgactcgtgcagatacgatgcactccctatttgcccggagctggcgcaagagctgggcatttaccagctgtcctttgatcggacgaggtacgccgagagcgacccaacct

SEQ ID NO: 420266 - DNA, 378 bp, Oryza sativa
gtataggatcaaaacattggtattaccacaactttttaaggatggaattgagtagcaatactttcaccccaaaatacagtttagcgacaatatcttagaaaagccgcttgctttgccgccatggctggcaagctgagcagagcagctaacacaaagaacacgagatcactataaaccaaacggcaacgaacgaagaaaatacagggtcttttttgtctgaagatacacgaagcggttcgttttcttttatttttagtctcctctcctcctcgatgatgggtgtatggcaatggcaatggcgatgggatcttggcttagttgatgggaaggggctcgccgttccactccttgaggcagtcgagcatggggtcgatgagc

SEQ ID NO: 420267 - DNA, 534 bp, Oryza sativa
ctaccttatgctccggttcttgttcagtatcgaatcctctcttctcctcgtgcccaccaccaccaccgtagcaatggcgggcaacgggccgatcaacaaggaggacccgctcaactggtgcgcggtggcggccgagatggccggcagccacctcgacgaggtgaagcgcatggtggcgcagttccgcgagccgctggtcaagatccagggcgccaccctccgcgtcggccaggtggccgccgtcgcccaggccaaggacgccgtcggcgttgccgtcgagctcgacgaggaggcccgcccccgcgtcaaggccagcagcgagtggatcctcaactggatcgtccacggcggcgacatctacggcgtcaccaccggcttcggtggtacctcccaccgacgtaccaaggacggtcgcgccctccaagtagagctcctgaggcatctcaacgccagaatcttcggcactggctccgatggccacacgctgtcgtcggagacggtgcgggcggccatgctcgtgcgcatcaacaccct

SEQ ID NO: 420268 - DNA, 452 bp, Oryza sativa
gacttacagcatacacattaattcttcaagtctcaacttggattacagcgagattaacgtgcgctcctccctaacacctctacgtcacatcccgtagttaaccggacgtagagagagagagagagagagagagagagagagagagagagagagagagagtacatctattattcagatattattccaatgtgtttctggacaagtagcctaaactccgatcagtctcgagaagcctgcccgtgtgtgcaaaatccagaaatcacccaggacaaatttacatgatcccaaccgtatttgaggccattaacattgattaaagtcaaactatggccgttccgactccgaaggcgctatcatagttcctcaccatgttcttcgtcgagggcataccagcaacaacatcttgttcgatgccacattcgtttgtgccccttatgatcttgaagtaccca

SEQ ID NO: 420269 - DNA, 524 bp, Oryza sativa
tcaaacatatccttggagtgaagccaacaccgcatagtgtgctaaatgatgtccctgtcaaaacttatccaagatcgctgatgcttccaaaggagtttgatgccaggtctgcatggtcacagtgtaacacaattgggaccatacttgatcagggtcactgtggctcgtgttgggcatttggtgctgtggagtgtctccaggatcgtttctgcattcatttcaacatgaacatttcgctatctgtcaatgacctagtggcatgctgcggtttcatgtgcggcgatggttgtgatggaggctatcctatcatggcatggcgctactttgctcggaatggtgttgttaccgatgagtgcgatccatactttgatcaggtcggttgtaagcatccaggatgcgaacctgcttatcctacgccagtgtgcgagaagaaatgcaaggtgcagaaccaagtttggctggaaaagaagcatttcagtgtcaatgcatacagagtaaattctgatccacatgacataatggca

SEQ ID NO: 420270 - DNA, 536 bp, Oryza sativa
ctagccgcgagccctgtcgttgcgaggaaggggaagaggagagatcgagatcggagagatccatccatggcgctgcgagccctgatcagcgagatccgggggatgaaggtgcgggaggtgccggggtacctgaagccgcggctgagctgggagaacgtgaagaagagcagcgaccaggccgtcgaccgctacatcgacaagtacatcgagaccagctcgccggagccgctcttgcacgtgatctacggcctcatggccttctcctacctcatcaacctccccaaggagcgccgccacctcgcccacctcgaggagctcgagaggcatggcgccgtcggcgccgtccaccactagatccgaggtcaggacttggggtttgtctgtggttgattcgatctaacagaatttctgttcttgcaccgatgagctacctggagttgtgatgatgttcgttcgatggtttattttgtacgggaagtcagaaaaaaactttccagttattgttacattcctatgcatgttatcataagcaactt

SEQ ID NO: 420271 - DNA, 490 bp, Oryza sativa
gtagcagaaacgtagcagggagtcacgtttagatattttagatacaggcttcaagatagaatgaacatgaactggcatcactgaagcacacagcagcgaagccagcaaaccacccatcaagcagaacgaacattcagctgctaccgtcagtaggacgcgacgcagttgggtacacctgagaactcgcaaacccgacaaaagacgccacccttccgaatcgagtccccttgcgcaacttattctagttcttctttggcttcaccgggcccctgggtattttgctcaaaaccttggcatccagcacctcatagtgcttgcaggcctcagagtgagcccttgcagcaaaggggacgaccttatcctggtacttgacatacaagatcggcaccgtgtggagcatcaggacggcaacatatatcaaggtgaggaagtcgcagcagcttcctacttctgagagaacccagagagcaacaatcacgcccagaaactt

SEQ ID NO: 420272 - DNA, 538 bp, Oryza sativa
gcacgatgccatctagctaaagtacctagataccgaccagtctaatggaatgcccaggaaactatctggggagcagagtgcgcccgagagtcgtgtgccgtcgcacctctctactccgtcatctcgctccctgtctccaactaggcatcgcaaaggagagtatgatcctaagttcaatctacctggacagtgcttattgcctgcttcagaggcaaactctaccatcatgtggaaacaggatcttcttgctaaggttaaagaacatgaagaagagatcgcacagctcagaaggcatcttgctgactactctgtgaaggaagcacaaatactcaacgagaaacatgttttggaaaaacgcattgcatacatgcgaatggcattcgatcagcagcaacaagatttggttgatgctgcatcaaaagctttatcctacagacaagacattattgaagaaaatatccgtctgacatatgccttacaggcagcacatcaggagagatccacttttgtatcttctttattgcctcttttgacagaa

SEQ ID NO: 420273 - DNA, 537 bp, Oryza sativa
ccactggtgaagagcatcaatgtcagtgggcacaagtatggccttgtgtatccaggtgttggttgggtcattcggcgaagcaaagaggatttgcctgaagaactcattttccatataaactatctggggacagaccagccgacgttcactctgaacttctccaaaggttccagccagataatcgcacagtactatcaactaatacgcctgggattcgagggatacaagaacatcatgcagaattgcatggagaacacagcaatactaagggaaggcatagaggcgactggtcgattcgaaatcctctccaaggaggccggtgtgcccttggtggcgttctcgctcaaggacagcggcaggtacaccgtgttcgacatctccgagcacctgaggaggttcggctggatcgtgccggcgtacaccatgccggccaacgccgagcacgtcgccgtcctccgcgtcgttatcagggaggacttcagccggagcctcgccgagcggctcgtttcggacatcgtcaagatcctgcacgagctg

SEQ ID NO: 420274 - DNA, 506 bp, Oryza sativa
ttgcattgtagtgagagagagaggcggccatggcgctggcgtcgctgccgaaggtggtgatggggtcggtggcgttcggtgtgttctggatgctggcggtgttcccgtcggtgccgttcctgccgatcgggcggacggcgggggcgctgctgggcgcggtgctgatgatcgtgttccacgtgatcagcgccgacgacgcctactcctccatcgacctccccatcctgggcctcctcttcgccaccatggtcgtcggcggctacctcaagaacgccggcatgttcaggcacctgggccggctgctggcgtggcggagccagggcgggcgcgacctcatgtgccgcgtctgcgtcgtcaccgcgctcgccagcgcgctcttcaccaacgacacctgctgcgtcgtcctcaccgagttcgtgctcgagctcgccgccgagcgcaacctcccggcgaagccgttcctgctcgcgctcgccaccagcgcctacatcggctccagcgcgacg

SEQ ID NO: 420275 - DNA, 487 bp, Oryza sativa
  unsure (1)..(487): unsure at all n locations
gtaggtggagtggcataggtacattatacatacaagttacaacaaagccctcctcagaaggaaaagacaaaaatagttacaacgtacaagcccactacttacataagttgttgacggaggtgattactatacaatatcaagctatcaaattgtaagataatatataccaacagcttaaagttgagataagttgactaattatctcaagggagatgtgggacaaggaggagcttctccttgaggtgaatagttatcccgaaagtctctgtcatatcgatgcctccatttgctgcttgatctattggtagcttccaattgaagcgatacacaaggcttgctagcatgacctcgatggcggcgatcgcgaagttcatacctgggcatatcctccgaccagttccgaatggcaagaaattgaaattatttccattgtacccagccattgtgttgctaaggaacctctctggcatgaactcctcngcatttt

SEQ ID NO: 420276 - DNA, 537 bp, Oryza sativa
aaatttgaaggttgctagctctagcgagcttgctctgccttggaagctaggccactaatacgtagaacgtagcaatggcacaaatgctagacggcctaaggcatgatgagcaagcatcgctgcatgctccacaggaggccagcaccatgccgacgatgtcgtgctctgatctcctgctcgccatgatgtgccctcttatcctcctgctcatcatcttccgttgctatgcctacgcaacaaggtccggcgggatgctcagcagggtcccctcgccgccgggaaggcttccggtgattggccacatgcacctcatcagctctctcccgcacaaatcactccgcgaccttgcaactaagcatggtcctgatctgatgctcctccacctcggcgcggtgccaaccctagtggtttcgtcggctcgtacagcacaggccatcctacgcactcatgaccgtgtgtttgcgtcacggccctacaatactatagccgacatcctcttgtatggcgcaacagatgtggcattctcaccatatggtg

SEQ ID NO: 420277 - DNA, 525 bp, Oryza sativa
ggtatagagtactttgtccgtacggtgagcctcaagatccttgctgtgggtgtacatgttggtcgtcttgagtctgtgttgaggctgcctgccacaattagcaaggttcaagaaattgagcaaagatataagggtaagatggtgatgttgggtgtagatgatatggatatcttcaaagggatcagtctaaaattgcttggcttggaatttcttttggagagaactccaaagctaagagggaaggttgtccttgtgcagattataaatcctgcaagaagcactggaaaagatgtgggggaagcaataaatgaagccgtctctgtagctgaaaggataaacattaagtatggttctgctgagtacaagcctgtcatccttattgactaccccataccttcttatgagaagattgcatactatgctgcatctgattgctgtattgtaaatgctgtgagggatgggatgaacttgataccgtatgagtatactgtctgcaggcagggaaatgaggagattgataagctc

SEQ ID NO: 420278 - DNA, 465 bp, Oryza sativa
atggccaaagaatgattcttgaattcattacgaacttaaaagaaagagtaaaggaggttccaagcgacatgacagattttctccacttttcactaataaattcaactgatgaaatacattgggtttggaagtttgaaggatctcgtagccattggcaatcccaataaatcactccactgatccccagaatttccaagtatcttgaatccctcagcttccagtgctgctcgtctttctgacttgtactgcacggctgtcttgccaatatcaggggattgcctcaggatgagtttttcccatgaatggtagcctgcaaataaaagattcacttgtgtggcgttacgttggaattcacttcgaccggtcaagaggatgatgtggatcccaagaccctgaagctcattgtacagtttcaagctggctggtaatgcaagtgcctttgctacatccacccattcatcaaat

SEQ ID NO: 420279 - DNA, 513 bp, Oryza sativa
ctcacgcgtccgcccacgcgtccgcggacgcgtgggcaaaccctaactcccagcctgtctccccaaacagccgccactcgccagctacacgggtcacaggagcagcacatcccaggattcccagcgtcgtcgccctacggcgccagcgccagcgccagccccgcttgcccgccgctgcccagcaccggcatctcgcgccccaagtccctagcgccaccgccactcggaagcatctcgcgcccgccggcgaccatgagcgcttcccggtggtgaagctgccgacgagctcgagctcctcccctggcgcatgtatgccatggcagtgacggcaccgtcgaccgtcccaggctcccagctccccctcgtgggcttacgctgctgctgcgctccctccctccctcgtctgtagcgtcgtccatctgctaatccgccatgttgatttgggtggtgattttgttcgcttgttctttcggctcgttgattctgaaaattaaccaggcttcagaagttcag

SEQ ID NO: 420280 - DNA, 471 bp, Oryza sativa
ttcttgaggtgcggcggcggcggcggccatggcgctcgcgcagggcaccggcgacttctccgtggtggtgctgggctccgacttcgcggtcgacaccagcgccgtgctcctcaacccggccgaccgggaggagtggcacgactgcctccccgacctctccgcgcccgccgacggcgaggacttctccgacctcgaagagctccaggtcgtccgcgtccagagcaccgacagggccgggaggcgcatcgcccgcgtcgtcggcaggatcttccctgctcctgtcataggtggtgatcgtctgaagaagtctgttcttcacaagctgcgcaccgaattgccagaggggccattctgccttttgtacatgcacagcactgtgcattcagatgatgacaaccctgctatggcaaccttgaagggggcctatgaagatcttgcacctgaatacaacgatagactgcagatcgtata

SEQ ID NO: 420281 - DNA, 488 bp, Oryza sativa
gcagagggaaatgtaggaattcgtgttatcacaaacagttactatattgtattttgggacaactgtcatgcaaccctgtagaacatctctgctgtctcccccataagaaatgtacaggagaacgaaaaatgtgatgacaagtgtatattgactgtaatctatagctatgacaatgctgagtttctagatggcaaatctacggcttcagcactaaacgaagacgccaggcaaggtttcctttgtatatcatacctgcatcaccagaaaaacttcacagaagaaattgtcatataaatcgcaggtcacgtactatttctcactgccatccttctcgtctaatgctccattaggcttctcagaccttactggaagaacgctgcgccgctctttgccacctggtttagctgatgcattcccataccatatcatcccaacaacagcagggatcatcccaaggactacctgaaaattcagaccttccttgccaa

SEQ ID NO: 420282 - DNA, 512 bp, Oryza sativa
tctcttggctgccgtgcagcgactcctgcgggcgttcgcctccggtggcgcggcggctgctgcggcggctgcgaggaggcgcatgtccacggcggtggcgccggagcagacgcctgcggccgtggtgttcccgttcgcggcggctgcggatgagggcgaggcagcgggtggcggatgagaggaacgtgcagtgggtgttcctcgggtgccccggcgtgggcaaggggacttatgccagccgtctctcccgcctactcggcgttccccacatagccaccggggatctagtccgcgacgagctcgcttactccggccccctatctgtgctgcttgctgaaattgttaatcaggggaaattagtttctgatgaaattatcatcaatctgtgatctaaacgtcttaagaaaggagatgagcatggggaatcgggatttattctggatgggtttccacgtactgtaaaacatgcggaaattcttgatggagttactgacattgatatggtggtcaat

SEQ ID NO: 420283 - DNA, 378 bp, Oryza sativa
ggttcgaactcttttttttctccttgttttctatttcatttcattccgatagatagcaacaagcagttcaaacaccataaccaaagcgaactcaattgatggtaacatcacggacgaagaacacctaacactggatggatggatagagggcttctcgactcgagagagccactggacacgataacgactcgactcgatgataagatgattctgacacggatagctaaggataactggccacgatgggccccaccaatcagttcctccagttcccgccggagtcgccgccgtagccgccgccacgggtgccaccgtagccgccgccgccgacgccacggccgccgccgtagccgtcgccgccaccgtagccgccctcac

SEQ ID NO: 420284 - DNA, 484 bp, Oryza sativa
tcttctcctccccctctttaccttttcctcctcggttcggttccgtggttcgtctagggtttagcgggttgagatggcggcgccggatgtcgagtaccgctgcttcgtcggcggcctcgcctgggccaccgacgaccgctccctcgaggccgccttctccacctacggcgagatcctcgactccaagatcatcaacgacagggagacggggaggtcacgtgggtttggcttcgtcaccttctcctccgagcagtcgatgcgcgacgccatcgagggcatgaacggcaaggagctcgacggccgcaacatcaccgtcaatgaggcccagtcccgccgctccggcggcggaggcgggggctactgcggcggcggtggcggctacggcggcggtcgtggaggcggcggctacggaggaggtggcggcggcggctacgggcgccgtgagggcggctaccgtggcggcggcggctacagcggctgccgt

SEQ ID NO: 420285 - DNA, 545 bp, Oryza sativa
cccccctactctcgctgtacatccgggccccaccacgtcagcctctcatggccttcgcggcggagccgatggatctggaggtgtcgccggattcctcgccggcggcggcggcggcggcggcggcgtgctcgatctgcctggacgcggtggcgtgcggcgacggggtggcggcgaggtccaccgcgcggctgcagtgcggccacgagttccacctagactgcattggatctgcatttaatgcaaaaggggtgatgcagtgcccaaattgtcggaatattgagaaaggtcactggctctatgggaatgagagccaaccatgtagccattctgatacaggtgactggctgaatggtgaaacctttgactacccgttctcatttgaatttgggtggtgtcccttcaatacaccattgacctctgtttttggggaaagcgaatctgagccaaatccttttttggagtatatagggtctctgcatggttttcaccatccaatgtatgcgccttctagttctactgccagtactgaaagcataccattccat

SEQ ID NO: 420286 - DNA, 481 bp, Oryza sativa
cttatcctaccttttgtactcgcgtgctgcacaagttgctcagctagatcgagcgtcagaaatggccagcaacaactcgagaacaaactccagggcgaactactccaacgagatccacgatctctccacggtgcagaacggcaccatgcctaccatgtactacggcgagaaggccatcgccgacttcttccctcctcacctactcaagaaggtcgtgtcggaggtggtggccacgttcctgctggtgttcatgacgtgtggagcggcagggatcagcggcagcgacctgtctcgcatatcgcagctgggacagtcgatcgccggtggcctcatcgtgacggagatgatctacgccgtctgacacatctccggcgcccacatgaaccccgccgtgacgctcgcgttcgccgtgttcaggcattttccctggattcaggttccgttctactgggcggcgcaattcaccggagcgatatgcgcg

SEQ ID NO: 420287 - DNA, 495 bp, Oryza sativa
caaaagcaaagcgttcttaagctcgcttcgtctctctctcggattcgatcatggcgcagagggagaagaaggtggaggagccgacggagctgagggcgccggagatgacgctctgcgccaacagctgcgggttcccgggcaacccggcgaccaacaacctctgccagaactgcttcttggctgcctcggcgtcttcttcttcttcttccgccgctgcctcgccgtcgacgacgtcgttgccggtgtttccggtggtggagaagccgaggcaggccgtacagtcgtcggcggcggcggcggtggcgctggtggttgagcggccgacggcggagccggtggagtcgtcgtcgaaggcgttgaggtcgtcgtcggtcaaccgatgccacagctgccggaggcgggtgggcctgaccgggttccggtgccgctgcggcgagctttactgctgcgcgcaccggttctccgaccgccacgactgcagcttcgactacaaag

SEQ ID NO: 420288 - DNA, 415 bp, Oryza sativa
taagaaactgaacagctgacaaagaggatacagaatgctggaacagaggtggcggaggcgaaagctggtgctggctccgctaccctctccatggcctacgctgctgccagattcgtcgagtcatctctgcgtgcacttgctggcgaccctgatgtttatgagtgcacattcgttcagtctgagttaaccgagctgccgttctttgcatccagagttaagcttggaaagaacggtgtcgagtccatcatttctgctgaccttgagggagtgaccgagtacgaggccaaggcacttgaggcattgaagtctgagttgaaggccagtatcgagaagggcatcgagttcgtccacaaacagcagacagcagcggcatctgtttgaagcaagcagaatggaatcaatacaaggaagataa

SEQ ID NO: 420289 - DNA, 499 bp, Oryza sativa
  unsure (1)..(499): unsure at all n locations
tantcggtgccatgtccaaataccatctctctcacccattcgctctatgcactctattcggaagccaaacaaagcattaatatctgcagcttcatgattttccacgaaatcaaatgtacattctgaggatactcaaccttcaatgcaagaagaagagtcattgtttctaagctatgctggccacgatccacataatcacccaagaagagataatcaatgtaagcaatgtctcctgctgttgaaggagcaccatactcatcaaacaatcgcatgaggtcaccaaattgaccatgtaaatcaccaaatatcttaacaggagctttaagttgcagaacacttggttcacttgaaaatattctctcagcactatcacatagatctgcaatctcattgcagtccaagaagaactgtcttcgcacagggggctttccaccacgaggtttaatagagatgcaaccacccttttagaacactattaatgacatctgtcgatctaaca

SEQ ID NO: 420290 - DNA, 446 bp, Oryza sativa
ttgttcgcgtgggttcgccaccatggtggtgggcagctaccttcggaacgccgggatgttcaagcacctggggcgtctgctggcgtggaagagccagggctgggcccgacctcatgtgccgcgactgcggtcgcaccgccctcggcagcgccctcttcaccaacgacacctgctgcgtcgtcctcaccgagttcgtcctcgagctcgccggcgagcgcaacctccccggcaagaccttgctactggacctcggctccagcgacaacatgggctccggcggcacccccatcggcaacccccagaacctggtcattgcctttaatagcaagagcaccttacccaaggtcctcatgggaattctcccgggcatgcctcgccggatggccgtcaacatggtcatgctgctctgcatgaactggaaggagctgggcgggagggccgagctc

SEQ ID NO: 420291 - DNA, 203 bp, Oryza sativa
gtcgcgctcacgcgcggctacaaccgcgcgctggggccgtccgtggcgcggagcttcccggacaacggctgcatctcctgcatgtgccacaacaccgacatgctctacagcgcgcgccagaccgccgtcgtccgcgcctccgacgacttctaccctcgcgacccggcgtcccacaccatccacgtcgcctccgtcgcctacaa

SEQ ID NO: 420292 - DNA, 482 bp, Oryza sativa
ctctcgatctccatcttttcttcgtctactaacaaagttataatatcaaattaaggtatatatatatatatatagtagctagcttcaattaatggcgagttcgtcgagcaggttatcctgctgcttgctggtgctcgcggcggcggccatggcggcgacggcgcagaactcggcgcaggacttcgtggacccgcacaacgcggcgagggccgacgtcggggtggggccggtgagctgggacgacacggtggcggcgtacgcggagagctacgcggcgcagcggcagggcgactgcaagctggagcactcggactccggcgggaagtacggcgagaacatcttctggggctccgccggcggcgactggacggcggcgagcgccgtgtcggcgtgggtgtcggagaagcagtggtacgaccacggcagcaacagctgctcggcgccggaggggagctcgtgcgggcactacacgcaagtggtgt

SEQ ID NO: 420293 - DNA, 396 bp, Oryza sativa
tggacccggcggcggcggggcagtcctccgccgtgccgttgttcgggtcggcctcgcaggagtcactcgacttcgaggcgcaccaccagctcagcctcgacgacacggacgccgaggcggcggtgcagccgttcccggcgtgcccgctcaacttcagcgagtacacgccgtgcgaagacaggaagcgcggccggcggttcgagcgcgcgatgctggtgtaccgggagcggcattgccccggcaaggacgaggagatccggtgcctcatcccggcaccgcccaagtacaggacgccgttcaagtggccgcagagcagggacttcgcctggttcaacaacatcccccacaaggagctcagcatcgagaaagccgtgcagaactggatccaggtggacg

SEQ ID NO: 420294 - DNA, 195 bp, Oryza sativa
tttttgtgtgaaaaaacatcaacgggattaagcaggaacagatctagggaataaaccccattacatatccaagcaaaagagccatccttaagaaaggagagttaactgaactacgaaagcaaccttcctgaaataacctaacatcagaacagaaaaaggagcaagtcgacagggatctgcggcgaagccgcgacg

SEQ ID NO: 420295 - DNA, 446 bp, Oryza sativa
ctgctctcccttagtgttctcctttttggtgttggagttttaactgtgactgacctgcagctcaatgctgtgggatctgtcctgtctttgctcgcaatcattacaacctgcattgctcaaatcatgacaaacacaattcagaagaaattcaaggtatcttcaacacagctgctgtaccaatcatgcccataccaagcattgaccttgttcatcgtcggccctttccttgatgggtttttgactaaccaaaatgtctttgcttttgattacacatctcaagttgtgtttttcattgtgctgtcatgcttgatatcagtctcagtgaaacttcagcacttttcttgtgattgggaaaacctcttctgtaacttaccaagtgcttggccatctcaagacatgcttggttcttgcctttggctatgttttgcttcacgatccatttaact

SEQ ID NO: 420296 - DNA, 211 bp, Oryza sativa
gggagccacggggccgaggccggcgccggggtgcacggcggtcagcgctgtgatcgagaagaaggaggacgggccgggctgccgctgcgggcacacgctcacggcggtgccggccgtcggggaggaaggcacgccggggtacatcggcccacgcctcatcctcttcgggggcgccacggcgctcgagggcaactccgccacgccacccttc

SEQ ID NO: 420297 - DNA, 520 bp, Oryza sativa
tctgcggcgtaaaagaaagagaaatctcccgggggcgtctcgtcgtctcctccgctccgctccttgcgccaagacgagtcgcggctgccgatctccatctgcgcgagcagagcagagcagagcagggtatcctggacctgggcccactccttgtgattaagggattgtcccggggagcttggtgcacacagcgatggagccacgcatcggcaacaagttccgtgttggccgcaagctggggagtggctccttcggggagatctaccttggtaccaatgttcagaccaacgaggaggtcgctattaagctcgaaaatgtgaagaccaagcatccacaactgctgtatgagtcgaagctgtacagaatactccagggaggaactggaattccaaatgttaagtggctcggtgtccagggcgattacaatgttttgttaatggacttactaggaccaaaccttgaagatcttatcagtttttggaacaggaagctgtctctaaaaactgccttgatgcttgct

SEQ ID NO: 420298 - DNA, 380 bp, Oryza sativa
cagactgagagagattatccgggtgtgcgccaccggagccgccgggtacattgcgacatggctcgccaagaatctcctcggcagaggctgcgtcgtccatgcaaccctggcgagagctcggggatgagaagaagacggcgctgctgaagaggatgcccggcgcggcggagcggctggagctgttcgaggcggacatgtgcgacgccgccacctttgagcccgccatcaccggatgcgagctcgtcttactcatcgacaccccgctgcagcacgaccccagcagcaccaaggacacgaacaacgctgaagcggccgcggacgcgatgcgcgacatcctgcatcagagctagcgatccaagacagtgcgccatgtcatccac

SEQ ID NO: 420299 - DNA, 431 bp, Oryza sativa
gctgctgtcgaacaccacacctgcgtccatggcgggaggcaggggagcccgcgccagcctccacctccacctcgcctggctctgcgccttcgcgaccacccgcgtgggcgcatggcggtggcggcggcgggggcgattctgacgccgacgccgacggcggcggcgaggggaagccggacctgcgggcgcgggggctggtggcggcgaagctgtggtgcttggcggtggtgttcgccgggacgctggccggcggcgtgtccccctacttcatgcggtggaacgatgcgttcctggcgctgggcacgcagctcgcggagggagtcttcctcggcaccgccatgatgcacttcctcgccgacgccaacgagactttcgccgacctcctgccccgcaccgactacccctttcgggtcatgctcgcctgcgccggc

SEQ ID NO: 420300 - DNA, 195 bp, Oryza sativa
ggggagcttaatcaaggggtcataatattatttccccacaaacaagaaccacagtaaaagaagtacataacaacagggacaacagaagtaaatacagaactgacagaaagtgcctaatatagagaagcctaattcagatattggctatcctctcttgcagctcagttcatctcccttagatcggcatgcctttgg

SEQ ID NO: 420301 - DNA, 442 bp, Oryza sativa
gagaaagcttgttgtaatagcatgaagctttgaaggaaaagcttgatcaggagtatcatcagctggcagaaagaaaaagggaattccagcaggaaattgatgcactcgagacacacaatgagcgtatcaaagggtacctgaattcaaagaagggcgagaagcttaatgaactacaggaaaaacatactcagttgcagtctgatctacagaaaagtaaggaaagaaaagaagaaaaatcggcggagttaagcaagaacaaagagctattgaagagccaagatcagttgaaaagaaacattgatgacaaccttaactacaggagaacaaaggatgaagtggaacgacttactcatgaaatagaattacttgaggacaaaatactttccattggcagcctgtctactatagaagcggatcttaagcaacactcacaagaaaaaga

SEQ ID NO: 420302 - DNA, 493 bp, Oryza sativa
tctcgagggctgcctccatcgtcatcgatccatctccgtatctctcaccgaccccaaatcgcacagctccagctcctcctcgatccccgtcgcgatcggcgagatggccacggcgatcccgcagcggcagctcttcgtcgccggcgagtggcgcgcccccgcgctcggccgccgcctccccgtcgtcaaccccgccaccgagtcccccatcggcgagatcccggcgggcacggcggaggacgtggacgcggcggtggcggcggcgcgggaggcgctgaagaggaaccggggccgcgactgggcgcgcgcgccgggcgccgtccgggccaagtacctccgcgcaatcgcggccaagataatcgagaggaaatctgagctggctagactagagacgcttgattgtgggaagcctcttgatgaagcagcatgggacatggacgatgttgctggatgctttgagtactttgcagatcttgcagaatccttggacaaa

SEQ ID NO: 420303 - DNA, 425 bp, Oryza sativa
ctaccactctctcctctccccttcgtggcggcggcggcggcggcggcggcgtgacgaggaggagcaatggcgatggcctcctgcgcctacgccccagcggggcggcgttggcacccactccgcgccgggcaggatcaggccgccgcgcggcctcggcttctccaccaccaccaccaagtcgaggcccctcgtgctcaccaggcgtgggggaggcggcggcaacatctccgtggctcggctgaggtgcgcggcgtcgtcgtcgtcggcggcggcgaggccgatgtcgcagccgcggttcatccagcacaagagggaggcgttctggttctaccgctttctctccatcgtctacgaccacgtcatcaacccgggccactggacggaggacatgcgggacgacgcccttgagccccgcgacctctaca

SEQ ID NO: 420304 - DNA, 392 bp, Oryza sativa
tcctgataaggagctcaagggctgaggggtcgtttttcttggacactgaaagcacaagcagagagggagagggagagagagggaagaagaaggtgagggagctgggcaatggcgacttcctttcaggggacgacgaccaagtgcatggcgtgcgacaagacggtgtacctggtcgacaagctcaccgtcgacaacagggtctaccacaaggcctgcttccggtgccaccattgcaagggcaccctcaagctcgcgaactacaactcgtttgaaggagtgctctactgcaggcctcactctgatcagctgttcaagaagactggaagtttagacaagagctttgaaggaactccaaaagttgtcaagccagaaaaaacagctgagaatgagaa

SEQ ID NO: 420305 - DNA, 542 bp, Oryza sativa
  unsure (1)..(542): unsure at all n locations
attccttttcctttctatcttctcccctcccttctttttccacccactcgaattctcccttcacattctagttctagctccgcacctttgctgcgcgcgcggatttggttcagggtttggaaatggcaatagacgatgaatcgccgctcagaatcaataccaccagaggcggcgccatgggaggaggaggggagtgcgactgggcggagaaccagcggcggccgccatggctgaagccgctgctggcgactagcttcttcggccaatgcaagctgcacgcggactcgcacaagagcgagtgcaacatgtactgcctcgactgcatgaacggcgcgctctgctcgcagtgcctctcctaccaccgngaccaccacgccatccagatacggaggtcctcctaccacgacgtgatccgggtgtcggagatacaaaaagtgctggacatcaccggcgtgcagacgtacatcataaacagcgcgcgcgtcgtgtttctcacgagcgcccccagccgaggcccggcagggcgtcaccacacctgcgag

SEQ ID NO: 420306 - DNA, 534 bp, Oryza sativa
taggtgatgttatgaaggttctcaggttgagttaccaacacttgcccatccacttgcaactatgcttcagcttctgcagcttattcccgaagaactggcgttttgatcccaggaggcttacagacatgtggatttcacagggttttgttcagaaggaggatgagtctgacaatgacatgaatgttgaagatgttgcgaagggctactttaatgatcttgtacaaagatcattcttcgagagatctttgttagaccttccaatagagtatgtcatgcatgacttgatcaatgaccttgccaggaatgtttcaaaggacgagtataccagaattgagagtgagaagcaaaaggagatcccaccaaacattcgccatttatctatatctgcacatttgtgggccggtatgaagaaaacagagatgaaaaacctgcgcacgttacttgtttggagcaaatcatggccttgctggaaattgtccccttcaaatgatgtgttcaagaaatcccaatacattcgagtgctagatttgactg

SEQ ID NO: 420307 - DNA, 178 bp, Oryza sativa
aggatcaaaacatttctattaccacaactttttaaggatggaattgagtagcaatactttcaccccaaaatacagtttagcgacaatatcttagaaaagccgcttgctttgccgccatggctggcaagctgagcagagcagctaacacaaagaacacgagatcactataaaccaaacg

SEQ ID NO: 420308 - DNA, 357 bp, Oryza sativa
cctgctttgaggcgggttgtcttctcctccccctgtttaccttttcctcctcggctcggttccgcggttcgtctagggtttagtgggttgagatggcggcgccggatgtcgagtaccgctgcttcgacggcggcctcgcctgggccaccgacgaccgctccctcgaggccgccttctccacctacggcgagatcctcgactccaagatcatcaacgacagggagacggggaggtcacgtgggtttggcttcgtcaccttctcctccgagcagtcgatgcgcgacgccatcgagggcatgaacggcaaggagctcgacggccgcaacatcaccgtcaatgaggcccagtcccgccgct

SEQ ID NO: 420309 - DNA, 407 bp, Oryza sativa
cgctaaaggactcgagtcgccgccggatttgggatttttgagcgcgcgaggtaaccaaagttctttttccgatggctcgtactaagcaaactgctcgcaagtcaactggaggaaaggctcccaggaagcaacttgccaccaaggctgctcgcaagtctgctcccacaactggaggagtgaagaagcctcaccgttaccgacctggaactgttgctcttcgtgaaatccgcaagtaccagaagagcactgagctgctcataaggaagcttccatcccagaggcttgttagggagattgcccaagatattaagactgatcttcgtttccagagccatgcggtgcttggccttcaggaagctgccgaagcgtacctggtgggtctcttcgaggacaccaacctgtgcgcc

SEQ ID NO: 420310 - DNA, 459 bp, Oryza sativa
  unsure (1)..(459): unsure at all n locations
tcttccttctcctccggctcttcttcagtatcgaatcctctcttctcctcgtgcccaccaccaccaccgtagcaatggcgggcaacgggccgatcaacaaggaggacccgctcaactggggcgcggcggcggccgagatggccggcagccacctcgacgaggtgaagcgcatggtggcgcagttccgcgagccgctggtcaagatccagggcgccaccctccgcgtcggccaggtggccgccgtcgcccaggccaaggacgccgccggcgtcgccgtcgagctcgacgaggaggcccgcccccgcgtcaaggccagcagcgagtggatcctcaactgcatcgaccacggcggcgacatctacggcgttaccaccggcttcggcggcacctaccaccgncgcaccaaggacggccccgccctccaagtcgagctcctcaggcatctcaacgccggaaatc

SEQ ID NO: 420311 - DNA, 198 bp, Oryza sativa
tttttggcgaactcttttttttggtccttgttttctatttcatttcattccgatagatagcaacaagcagttcaaacaccataaccaaagcgaactcaattcatggtaacatcacggacgaagaacacctaacactggatggatggatagagggcttctcgactcgagagagccactggacacgataacgactcgact

SEQ ID NO: 420312 - DNA, 322 bp, Oryza sativa
ctacatatctggccgggatcgctgcccaagggccttcattagctcgatctgtcgcggaacaagatcgccaacatcgaggggctccgggagctgaccaagctgcgcgttctcaacctcagctacaaccggatctcgcgcatcggccacgggctgtcggtgcgcacggcgctgagggagctgtacctggcggggaacaagatcagcgacgtggaggggctgcaccggctgctgaagctggcggtgctggacctggggttcaacaaggtcaccacggcgagggcgctgggccagctggtggccaactaccactccctccgggccc

SEQ ID NO: 420313 - DNA, 417 bp, Oryza sativa
gttgatatcccaggagttttatatcccacattcaatttcgttggccgcatccttggtcctagaggaaattctttgaagcgagtggaagcaaccaccgactgccgagtgcttataagaggtcggggaagcattaaagatccagctcgggaggacatgatgcgagggaaaccaggttatgaacatctgaatgaacccctgcacatattggttgaggcagaactgcctgttgaaattattgatacccgtctgatccaagcccgtgatatccttgaagatctgctgaagcctgtggacgagtctcaggacttcttcaagaagcagcagctccgggaactcgccatgctcaatggcaccctccgtgaagaagggatgcaaagatctggctcagctttccctttccacaacagccttggaatg

SEQ ID NO: 420314 - DNA, 506 bp, Oryza sativa
tactggctttgtgtggagcctgcagctgttgagaagcctattactctgaagccaggtgaagagtggaaaggaagacttgcactctcagctgttccttccagttactgtagtgggcagttagatccattgaaggtccttcaaggttgagaattctcatttctgcgtcttgtacaggagcacctcattgcccttaatatttgatgctgggctggcgcgcgaccttttgtttctttgccattttaaatcccccgtgcttcgttctttttttgtacctagaagcgagtagtagggcacctccgaaataacagactgtgccacctgcttcgaccctagagcggatcatctccttggtgaatgaattcgaccagtggacacaagccattcgtgccctggtgatatgattcatcgtccatattccaggaaatattcgccatgctgcataaggtacgtagcattctcagttaatctgtagctatgatcattgcgagcaattgaattacactgct

SEQ ID NO: 420315 - DNA, 178 bp, Oryza sativa
gaacaatcatggccaacgaggggctaacaacagtttagcacagtacaaaaagtaaacacacataacaggaatatgcaatgcaatggaaccggagtatactgacaaaccaatcattaaccagagaactacttattaaccagctactaatagtcttctccatcgtcgttctcgtcgtctg

SEQ ID NO: 420316 - DNA, 497 bp, Oryza sativa
tcttaaagacaagattgctttcctagagcttctgtaactgaggattctgaatacaagcaaagatggcccgtacaaagcagaccgcccgtaagagtactggaggcaaggccccaaggaagcagctggccacgaaggctgctcgtaaatcggctcccacgactggtggagtcaagaagccccacagataccgcccaggaactgttgcccttcgtgagatcaggaagtatcagaagtcgactgagctgctcatccgcaagcttcctttccagaggcttgttagggagatcgctcaagatttcaagaccgatcttcgcttccagagccacgcagtccttgcccttcaagaagccttagaggcatacctcgtcggtctctttgaagacacttacttgtgcgcaatccatgccaagcgggttacgattatgccccaagacatccagctggccaggcgcattcgtggcgagcgtgcttagatagttgagcaagattttttttaa

SEQ ID NO: 420317 - DNA, 383 bp, Oryza sativa
actgctcctccgcaaaccctagccgccggcgccggcgttctctagagaaacatcagcatccatggcgggcaagggcgagggtccgggcatgggcatcgaccttggcacgacctactcgtgcgtgggcgttcggcagcacgaccgcgtggagatcatcgccaacgaccagggcaaccgcaccaccccctcctacgtcggcttgaccgactccgagaggctcatcggagatgctgccaagaaccaggtcgccatgaaccccatcaacaccgtcttcgatgccaagcgtgtcattggcaggaggtttagcgatgcttctgttcagagtgacactaagctctggcccttcaaggcgattgctggacctggtgacaagcctatgattg

SEQ ID NO: 420318 - DNA, 413 bp, Oryza sativa
gctctcgcttcttctcctcccccgtcttcccttcgcgcgcgccacccccacacacgcgaccatggcggcagcggcaggaggcgcagcgcgggcgctgtcgcaggcggagcaggacgtgcagatgatgctcgccgccgacgtccacctcggcaccaagaactgcgacttccagatggagcgctacgtctacaagcgccgctccgatggtatctacatcatcaacctcggcaagacatgggagaagctgcagctcgcggcgagggtgattgttgccattgagaacccccaggacatcattgtccagtcggcccgcccctacggccagcgcgccgtcctcaagttcgcgcagtacactggcgcgcacgccattgctggaaggcatacgcctggtacatttaccaatcagctccaga

SEQ ID NO: 420319 - DNA, 492 bp, Oryza sativa
tcttgaggcgaggcgaggcgaggagaggagaggaggaggaggagggaggagaagatgagagagatcatcagcatccacatcggccaggccgggatccaggtcggcaacgcgtgctgggagctctactgcctcgagcacggcatcgagcccgatggcaccatgcccagtgatacaacggttggcgtcgcacatgatgcgttcaacactttcttcagcgagacaggcgctggcaagcatgtgcccagggccatctttgtcgacctggagcccactgtcatcgacgaggtgcgcactgggtcgtaccgacagctcttccaccctgagcagctcatctctgggaaggaggatgccgctaacaactttgcccgtggccattacactgttggaaaggagatcgtagatctatgcctggaccgtgtgcgccagttggcagacaactgcactgggctgcagggattcttggtgtccatgctgctggtgtggaactggatc

SEQ ID NO: 420320 - DNA, 441 bp, Oryza sativa
atggtgctcatcccctgcccagatctacagtcggagtatctgcagagggttcccaatggcggcgaaggcctatgtcgagtactactctatgtatggacacgtggttaaactagctgcagagatcaagaagggtgctttatctattgaaggtgctagaggctaaaatatggaggggtcctgaaactctccatgaagaagtacttggaaagatgggcgcgcctcctaagccagatgtgccaacgatcacaccacaggaacttactgaggctgatggaatcctgtttgggttccctacaaggtctggttttatggattgacagctgaaagcatcctatgatgcaccccgccatcctgggagtgagcagagtcttataagaaagacccgccggcatcttctttaggactggaactcaaggcggtggtcaggagacttcaccgttg

SEQ ID NO: 420321 - DNA, 418 bp, Oryza sativa
tgtcgtcggggagcccgcggcggctagggttttgattgatttgtcgccggcgacgcgccgcccgccatggagagggagctgctggagacgttcgaggccgccaagaaggcggccgacgcggcggccggggcggacgactccccggaggccgaccgctgcctcgacgcgatgcggcggctgcgcggtctccgcgtcaccaccgacgtcctcgtctccacgcaggttggaaaacgtcttcgttaccttactaagcaccctcactcagacatacaatccatggctacagatcttctggggtactggaaaaaggttgttatcgaagaaggaaagaaaaatggtaccacagaaaatgttggatcaaccaactcaaccgccagagctgaaaaggctcagcccatgaaggttgataagagttctg

SEQ ID NO: 420322 - DNA, 498 bp, Oryza sativa
ggtattgctgtactgaaccgcggattcaacatctcctgtgttggtatcattgtctatcgtgggctgtactttggaatgtatgattctctcaagccagtcgttcttgttggcaaccttcaggataacttccttgccagcttcttacttggttggggcattaccattggtgctggccttgcttcatacccaatcgacactgttcgtcgtcggatgatgatgacatctggtgaggctgtcaagtacaacagctccttggatgcgttcaagcagattgttgcgaatgagggtgcgaagtcactctttaagggcgctggtgctaacattctgcgtgctgtcgctggtgctggtgtgcttgctggatatgacaagctgcaggtggccgtttttgttaagaagtacggttctggaggtggctaacactagatgatgatgataagccttggggaactattgacatattaggtgcttttcgacgctggtgcgtttaaataaaattaa

SEQ ID NO: 420323 - DNA, 537 bp, Oryza sativa
tgatacaacatcaagctctacgtccgccgagtcttcatcatggacaactgtgaggagctgatccctgagtggctgagctttgtcaagggcattgttgactccgaggatcttcccctcaacatctcccgtgagatgctgcagcagaacaagattctcaaggtcatcaggaagaaccttgtcaagaagtgcgttgagctcttcttcgagattgctgagaacaaggaagactacaacaagttctatgaagccttctccaagaacctcaagctcggtatccacgaggactccaccaacagaaacaagattgccgagctcctgaggtaccactccaccaagagcggcgatgagctgaccagcctcaaggattacctgacgaggatgaaggaaggccagaacgacatatactacatcaccggcgagagcaagaaggccgtggagaactccccctttttgagaagctgaagaagaagggttacgaggtcctctacatggttgatgccatcgacgagtatgctgatggccagctcagggagttga

SEQ ID NO: 420324 - DNA, 368 bp, Oryza sativa
cccagggcgtccgtcgtgctcaacgaccccgccgccgccgagggcgacatgtcggcgctcgtcgacgccatcgcgctcggcctcttgtgcgtcgttgccacgctcggcgccgtgcccgtcatcaggtgcgctggcggcgggccggcggagatggtcgccgccgcgcttgacgcccggctccgcgatcaccttatcgccaagcccaatctcttcactgaggccgcgtccacagcagtagcatccttccagcgggcactcctgtgcctgattgataggaaattccagctttcggtggggatccagcatgattggagctaccggccggtggtccacgacgtgctcggcctgaagtcgaacaaactgaagtt

SEQ ID NO: 420325 - DNA, 165 bp, Oryza sativa
atgaataagaagctggcatatacttcggctaggagcattgcaacgcaaacagtatgacaagggaccacgcattgtttaagagctaagacaaagacaaaactggtgcatccaacgtaccaaaaagaaagcgaacagcagcagtcagatagctttgagaagagaact

SEQ ID NO: 420326 - DNA, 506 bp, Oryza sativa
tctctcgctgcggcgccaccccctcctcgccgtggacctcggggtgggagcgtggcggcctgcacagccggagctcagctcgcccgccgcgtcggatggacgccgcctcctgctgccgcgtcttctcgacgcagagatgccgcttcccgctgcggaggctggcgccgccgatttcgcggcggccgttcggcacggagtcgacgagtgagctgttcgccgcgtcgacctcgaagcggcgctcccgggggcccgtcatggcggcgaagaaggccgccgagggtgctaaacaagaagaggggaaatacaaacacacggtggatctaccaaagacaacttttggcttgagagctaattctgttgtgcgggagccggagctccagaagttgtgggaggagaaccaggtgctcaagagggtatcagaaaggaacactggggctacatttgttctccatgaaggtcctccttatgctaatggtgatctttatatgggccatgcactgaataaa

SEQ ID NO: 420327 - DNA, 434 bp, Oryza sativa
tcgagacgttcgccttccaggccgagatcaaccagctgttgtccctcatcatcaacaccttctactccaacaaggagatcttcctccgcgagctcatctacaactcctccgatgcattggataagactaggttcgagagcctcacggacaagagcaagctcgatgcgcagccggagctgttcatccacattgtccccgacaaggctagcaacaccctgtcgatcatcgacagtggtgtcggcatgaccaagtcggacctcgtcaacaacctcggtaccatcgccaggtcggggaccaaggagttcatggaggcgcttgctgctggtgctgatgtgtccatgattgggcagtttggtgtcgggttctactccgcctaccttgttgctgagagggctggtgtgaccaccaagcacaacgacgacgagcagtatgtg

SEQ ID NO: 420328 - DNA, 401 bp, Oryza sativa
atcgccttcctccaagtactccatctccagcctctaattgattagatcttgatttctttttcatcctcctactagtttctttcttgtttctttggaatttttttgatctcttgaagagatccggttcttggattaagttttggacaagaaccgtactgtgaccatgtcgtcgccttcgcgccggagctccagcccggagagcaacaccagcggcggcggcggtggcgccgactagcggaagaggaagaggatgctgtcgaacagggagtcggcgaggcggtccatggcgaggaagcagcagaggctggaggagctgatcgccgaggcggcgcgccttcaggccgagaacgcgcgcgtcgaggcgcacatcggggcctacgccggggagctgaacaaggtcc

SEQ ID NO: 420329 - DNA, 208 bp, Oryza sativa
gctccagcggcttcctgggcgtgatcacctccaggagcagcacgccgaagctgtacacgtcgctccggtccgtcagctgctgcgtcatgtagtactccgggtccaggtaccccattgtgcccttgacttgggtggtgatctggccacgaccgtcttcgccgagaagcttggacaggccgaagtcggagaccttggcgttgagccgctc

SEQ ID NO: 420330 - DNA, 316 bp, Oryza sativa
tttttggaagaactttactctcttgatgtggactctattagtgaactgcggccagtttatgggctaatttttctcttcaagtggatggctggggaaaaggatgaacggcctgtcgtcaaagatccaaacccaaaccttttctttgctagccaggtcatccctaatgcatgtgctactcaagctattctgtcaatcctcatgaatcgcccagaaattgacataggtccagaactatccaacttgaaggaattcacaggagcttttgcacctgacatgaagggccttgctattaacaacagtgattctattcgcacag

SEQ ID NO: 420331 - DNA, 375 bp, Oryza sativa
ctgatcttccattccccattccacaccggcgggggcggctcgagcagcggatgagatcggcggctactatgtcggctacgacagcggcggttcccttctggcgcgcggcggagatgacctacatcggctactccaacgtctgcgccgccctggtgcgccggtgcctcaaggagccccacacgtccgaggccgacctccgcgagaaggtccacttcgccatctccaagtgggccgacggcaagcaggagaagccgactgtccgcacagatgatgaaacaacatttggtgccatggagacataattctttctacagatgttgcacaaatgttcttgcctttcttgcgaagccgtgcacctgaaacttgctgatatct

SEQ ID NO: 420332 - DNA, 488 bp, Oryza sativa
cgctccgacgctgtgctcgcctcctcctcctcctcggcgcctgtgcgccgttgtctcagccatggtgaagtactcgagggaggcgaacaaccccaccaagtcctccaaggccatgggccgggacttgcgtgtgcacttcaagaacacccgtgagacagcttttgctatcaggaagttgcctctgggcaaggccaagaggtaccttgaggatgtgattgcccacaagcaagctatccccttccgtaggtactgcggtggtgttggccgcactgctcaagctaagtcacgccattcaaacggtcagggacgctggcctgccaagtctgctagattcattctggatcttcttaagaatgcagagagcaatgctgatgtgaaaggtctggatgttgataccttttatgtgccccacattcaagtaacccggcccagaagctaaagcgccgtacctaccgtgcttatggacccataacccttacatgttcttc

SEQ ID NO: 420333 - DNA, 191 bp, Oryza sativa
ggttatacagggtcgggcgggtgcgaagcgtaataccctactcctgtgtttttgtggatttgtgtatgaatgagctacaaagtgtgagccaacttctcccccgttctaagctctaaatctggaaaagaatcaaaaaaaacccccttctctatgggcaaggtcctccttttatacttcaaggggataccaca

SEQ ID NO: 420334 - DNA, 282 bp, Oryza sativa
ctgacgcgagggctagccctagcgccgccgctggcgccgacatgaagctcagcatcgtcgaccggaccaccgggtgccagaagaggctagcgatcgatgacgagcagaagctccggccatattatgacaagaggatctcccaggaagtcagtggtgatgctccaggcgaagaagtcaagggctatgtatcaagatcatgggaggctgtgacaagcaagggtcccccatgaaacagggtgtgcttactcgtggacgtgttccgcttctactagacaggggtac

SEQ ID NO: 420335 - DNA, 192 bp, Oryza sativa
ttttgggtgttttttatttttttgggttttttctttttttaaagaaaatccaaacacctccaagatttgcgttttgcgaacatagtaattgattcagtacacagagataacggttttgacaaagaatgagctagtagtattccgaatttccgataggccaaacaagcggacaaccagccaaaatttttactc

SEQ ID NO: 420336 - DNA, 396 bp, Oryza sativa
attttcccggcttgcgtaccttggaacaatggtgaattacccgaagacgcgcattcactattgcagagccaggggctgcaaacgacaccgcctgcataaggttgtgcagtacaaggtcggtaagcccaggttgatggcccagggtaagcgccgttacgacgccaagcagaaggggtttggtggtcagactaagcccgtcttccacaaaaaggcgaaaaccacgaagaagatcgtgctcaagctgcaatgcaccaagtgcaagaagatttcacaaactattctgaagcgttgcaagcattttgagctcgcggagcgcaaggctaagggcgggcggtcggagccgagctggtaaaactgccgtgggttgcgcacagaaaaccttccttgatgtctgct

SEQ ID NO: 420337 - DNA, 539 bp, Oryza sativa
tgataacactggtaaaaaaaaaaggagagagagaggtgagacaggtcgcttcctgcttccattggagaagaggagaggagaggagaggagaccgagccggcggcagcggcgacgaggagagggagctgatcgggcggtccccccctttgccgaggggacgccggcggcctccgggttgggtccacttggcagcggtgagcggcggcgggggatggcggaggcgcggctgctgcggcggcggcggctgtgcttggcggtggcggtcgtgtgggtggtggcggtggccgtgagccgggtcggcgccaacacggagggtgatgccctatatagtctgcgccaaagtctgaaagatgctaacaatgtgctgcagagttgggaacccactctggtcaatccatgcacatggttccatgtaacttgtaaccctgacaacagcgtgatcagagttgatcttggaaatgcacaactgtcaggtgcattggttccccaagttgggcagttgaataaattgaatatttggagctttacaagaacaacat

SEQ ID NO: 420338 - DNA, 539 bp, Oryza sativa
  unsure (1)..(539): unsure at all n locations
tgcgagactgagacgagacgcgagaccaaaccctcccctccccgaccgcgccccgcccagatctcgccgccgacgagatgcatcgccgcggcggccaccacctccacctcctcctcgccgccgccgtcgtcctcctcctcaccgtcgcggggctgcccctcgcttccgcctccgagtccgaccacaagtacaaagctgaagaaacagttaaactctgggtaaacaaggttggcccgtacaataacccgcaagaaacttacaactattacagcctcccattttgtcagccatctgaaaaccccgcacacaaatggggtggtctcggagaggtccttggcggcaatgagctgatcgatagtcaggttgatataaagtttttaaaaaatgtggagaagggtcccatttgcacaattgaacttgatgacaacaagattcaacaatttactgatgccattgaaaggtcatattggtttgaactcttcatagatgatcttncattatggggttttggtggtgagactgacaaaaacaacgaaaat

SEQ ID NO: 420339 - DNA, 427 bp, Oryza sativa
tctgtgaagatcacttttcctgtttccctcaagcagcctggtccccggaatggagccatccagtgcttcattaaaagggataaatctacccaaacttacaacctatatctatgtcttagctcagctgtgctcgttgaaagtggcaagttccttttatcggcgaaaagatactcccgtgcaacctgtacagaatatacaatatttatgagtgctgacaatacatctaggtcaagcaacatgtacattggaaaattgaggtcaaatcttctcggaacaaagtttgtaatatatgatacccaacctccatgcaacacagccaatgtttcacagtcagggaaaacaagccgtaggttctactccaggaaggtgtcgccaaagaaccctttcagcacctacagcatagcttaagtttcatatgaactgaatg

SEQ ID NO: 420340 - DNA, 518 bp, Oryza sativa
tctctcgacattccggaggagaggtataccaatgcttttctcgggtacgggcctgaggactcgcattttgttgtggagctcacttacaattatggtgtggaaagttatgatatcgggactgctttcggtcacttcgggattgctgtcgaggacgttgcaaaaacagtagatctcattaaagccaagggaggaacggtaacaagagaaccaggacctgtaaaaggtggaaagtctgtaattgcttttattgaagatcctgatggttacaaatttgagcttatagaaagaggtcctacacctgagcctttatgccaggtaatgcttcgagtgggagatcttgatcatgctatcaatttctatgagaaggcatttggcatggaacttttccggaaacgagacaatccccaatacaagtatactattgcaatgatgggatatggtcctgaagacaaaaatggctgtctggagttgacctacaactattgtgtcaaggcatatgataaaagaaatgcttatgc

SEQ ID NO: 420341 - DNA, 439 bp, Oryza sativa
ttttagttcttgtggtggaatcattggtaaaggagggtcaacaatcaagtcattcattgaagactcacatgctggaatcaagatttcaccacaggataacaattttgttggtttgcatgatagactcgttactgtcacaggacccttggaccatcagatgcgtgcaatatatttgatattaagcaagttatcggaggacgttcactacccacctaatctgagttccccatttccatatgcaggccttggtttccctagttaccctggtgttcctgttgggtatatgatcccacaggtgccgtataataatgctgtgaactatggacctaatgggtatggaggaaggtaccaaaacaacaagcccagtacacctatgagatcacctgctaacaatgatgcccaagattctctcactattgttattgcttgtgaacatatt

SEQ ID NO: 420342 - DNA, 188 bp, Oryza sativa
gcagaagtagacatgcaaaattatccagcagttatgatacatcagtcacaaaacgcccgaccgtcattgtgtagtgtgtacactgtttacaccattgcattactgaagtatcaaattaaaccaccatcatttcagtcatcttggccaacagttctgcatattactgctagcaacaagccatattggcc

SEQ ID NO: 420343 - DNA, 450 bp, Oryza sativa
tgtttagtcggctacaagctggatcaaattaagaaggaaaaaagaaaaagaaacttcatcgccttcgatctccaattggacagattgaggctgcttgttgactctgccgctataagtaccgtaccacatggtggtacatacacactcgcgttgagctgtgcggtggagatggccagagggggagcgatggtcgcggcggcggatgccggcgccggcgccggcgtggcgcccgggtacagcagcgagatcacgttcaccgtggtgatgagctgcctcatggcggcctccggcgggctcattttcggctacgacatcagcatcacaggtggactgacgcagatgcagtcgttcctcgaggcgttctttccagacatctgggcgaagatgaacaacgccgagcaggacgcgtactgcattttcgacagccaggtgctcaccaccttcgtcttc

SEQ ID NO: 420344 - DNA, 525 bp, Oryza sativa
atctcaccatcccatttcactcttctcgactcccagacgacgcttgctgctgcctttcgtcaaccccccacttctccttccccgccgccgctcgccgccatggatgaggagtacgacgtgatcgtgctggggacgggcctcaaggagtgcatcctcagcggcctcctctccgtcgacggcctcaaggtcttgcacatggataggaatgactactatggaggagattccacctcgctcaaccttaaccagctgtggaagaggtttagaggggaagacaaacccccggctcatctgggctcaagcaaagattacaatgtagatatggtcccaaagtttatgatggcaaatgggacactggttaggaccctcattcacactgatgtgacaaagtatttgtcattcaaagctgtcgatggaagctatgtcttcagcaaagggaagattcacaaggtacctgctactgacatggaggctctgaagtcccctttgatgggtccttttgagaagcgcagaacaaggaacttc

SEQ ID NO: 420345 - DNA, 484 bp, Oryza sativa
ttcttcttctagcgagaaagcaacagcggaggagccaaacgcgagatctttggaggctccgccggagcggggaaccgacagattagcggaggagagatggccgcggcggcggcggcgaaggggaggacggagatggaggtcggagcggacggcgtctccgtcatcaccatctgcaacccgcccgtacaactcgctctccatcgatgtattgctaagcttaaaggaaaactatgctgaagctcttcggaggaatgatgtgaaagctattgttgttacagggaaaggaggaaaattttctggaggatttgatattagctcctttggtagtgttcagggtggcaaagttgaacagccaaaggctggttacatatcaatagatattattactgataccctaaaagctgcaacaaagccatcagtggctgcaattgatggtcttgctcttggttgaggattggaaagtgctatggcatgccatgcacgc

SEQ ID NO: 420346 - DNA, 195 bp, Oryza sativa
gatgacaatatcctttgcgtgtaaatagtatcactgagttcgatgcaacactatatacagagattcgatgaaactaaattctcctcagcgtggcgtagccactgggtgggtacatagttacatacaaaatgctgatattttttcttgtactatatctgcttggtcctaattagtattactcatgtccaagatgca

SEQ ID NO: 420347 - DNA, 242 bp, Oryza sativa
tttttactctccctcctctagtcctcttcttcttctactttgtacgcgccactcactctccgagcttgacggcggcggcggcggcggaggtcgtcgagtggtggtcggggagatgggtcaagatgaggtggaggtaggtgcggagaagaaggatcaagaactaccggaggtggaggtggtccacgaggaggaagaggagggatccaagaaggcggcggggggctgcgactactgcggcgacg

SEQ ID NO: 420348 - DNA, 545 bp, Oryza sativa
atcatggcaagcttttttgattctttcttagcggatcttgatgaactttcagacaatgaagcctatcctgaggaagaaaatgctgaggcagtgggcacggaagagattggtgatgatgatatgcctgacctcgagtctcttaattatgatgaccttgatagtgtttcaaagcttcagaaaacacaacgttacaatgacattatgcaaaaagttgaaaatgcacttcagaaaggtacagatttttccaatcaaaggtcgatcctggaggaagatccagaataccagctgattgttgattgcaatgctctatcagtagatattgagaatgagatcattataatccataatttcatacgtgacaagtataggctgaagtttcctgaactagaatcccttgttcatcatccgatcgattatgctcgtgttgtccaaaagattggatatgagatggatttaacgctcgtagatctggaagggcttttaccttctgcaattataatggtaatttcagtgacagcatcaacgacaaagtgggaagccgtttt

SEQ ID NO: 420349 - DNA, 368 bp, Oryza sativa
tctctcttctctggtggtgtgggtgtgtccctgtctcccctctccttcctcctctcctttcccctcctctcttcccccctctcacaagagagagagcgccagactctccccaggtgaggattcagccatgaagggggccaaatccaagggcgccgccaagcccgacgccaagttggctgtgaagagtaagggcgcggagaagcccgccgccaagggcaggaaggggaaggccggcaaggaccccaacaagcccaagagggctccctccgctttcttcgtttttatggaggagttccgtaaggagttcaaggagaagaaccccaagaataaatctgtcgctgctgtaagaaaagcaaccggtgataggt

SEQ ID NO: 420350 - DNA, 300 bp, Oryza sativa
ttgttcaacaagagcttccaatcacccgcgaaacccgcatctgagaagctgactcctgagctgacaagatcacctagcaaagccgcacgcatgttttcagggacacatgagaagtgtgccacttgcagtaaaacagcgtatcctctagagaaggtgacagttgaaggacaggcctaccacaagtcctgcttcaaatgatctcacggtggctgtgccatttcgccatccaattatgcagctttggaaggtatcctatactgtaagcaccatttcttccaactttttaaggagaaagggagc

SEQ ID NO: 420351 - DNA, 349 bp, Oryza sativa
ttgctgcagcagcagcagccgcgcccccacacctggcctccttctcggcttggatctcgccgcatcatctgccgccgacgacgacgaagaggaagacgaccgccatggggacggcgagcggtgaccagccggcggaggcgtcgtcggacaagctgcggcacgtggagtccatgtcggagctgccctccggcgccggcaggatctccgggatcaacgccgtcgtcctcggcgagtcactccccggcgaggagcacgacctcgactaccccttcagcgagttctccgccgaccccctcgtgccctcccccaagaagtaccaaaagatgtatgagaggtcaatcaacgaccc

SEQ ID NO: 420352 - DNA, 437 bp, Oryza sativa
caaagacaaagcacgtcttttcagtagccatggcgaagcatctcgcgctgtccgtggccgccgcggtggccgtgtcgtggctggcggcgtcgtcggcggcggcggcagtgttctacgagaagttcgacgtggtgggcgccggccaccacgtgagggtggtgagcgacgacgggaagacgcagcaggtggcgctgactctggaccggagctccgggtccgggttcacctccaaggacacctacctgttcggcgagttcagcgtccagatgaagctcgtcggcggcaactccgccggcaccgtcaccttcttctacctcttctacggcgagggcgacggccacgacgagatcgacatcgagttcatgggcaacctcagcggcaacccctacgtcatgaacaccaacgtctgggctaatggcgacggcaagaaggagcac

SEQ ID NO: 420353 - DNA, 386 bp, Oryza sativa
cgagtctctctcgtcttctacaatggcgagcggcggcggcggcggaggggagggggagacggtgctggtcaccggcgcgagcggcttcatcggctcgtgtctcgttcgccgcctcctcgcccgcggctactccgtccacgccgccgtcctcaaccccgatgacaaggccgagacggaccacctccacgcgctcgccgccgccggcggcggcgagggccgccgactccgcgtgttcccgggcgacctccttgacggagccgccctcctcgacgccgcgcggggctgctccggcgtcttccacctcgcctccccctgcatcgtggaccgcgtcctcgacccccaggcgcagctgatggtgcctgcggaggaggggacgctgaacgtgc

SEQ ID NO: 420354 - DNA, 445 bp, Oryza sativa
tttctaccacccaaaccatgggaacgtgctggaacttcatctggtccagcgcctttcaagcccccatccgggggtagcactagtgatatcgtcgaagcttctggcacagcaaaacctggggaagttgtttctgccgcagagagcaatgttgcttccaatgtgaacagcaccatctctaggcctgtgcccccacggccttggcagcagcaaggatacggaaattcttatggaggttatggctccagtatgtatagttcgcttggcgggtttggtggaccttatagtagcggcggactttacggaaataacatgtattcaagttatggaggaggttatgggggtatgttgggaagttctggaatgtacggtgggtccatgtataatagcgggatgggaggcccctatggcggctatggtatgggcaatggtgcttacaacccagggc

SEQ ID NO: 420355 - DNA, 191 bp, Oryza sativa
gttaacatacgcaaactgatattatcacaatgttagccgatgacaatggaaagagtaatctaggtacaagcggatcattgacggtggagacaagacattggctgcaccacaacacccaccagtggcgccaacaaggagcgctatccgttataggacgagagaaaaagtaaaacatcacgatgtgaagtgaa

SEQ ID NO: 420356 - DNA, 237 bp, Oryza sativa
tttttggaggtcaaagcttaaactgtttcagagcaagttcaggtaaaaccatacggcgatacacacttacaaaagcttcatcgcacgaaactctcgacggctaaaaaacacaggggatcacacgacgccagccacatcacacggttcagactcccttccagccggaatcacgtaggaccaccaccagcttaatcgacctcctcgatcttggggcctgcaccgctgccacccgccggc

SEQ ID NO: 420357 - DNA, 231 bp, Oryza sativa
ttccttcgggtggcagcggtgcaggccccaagatcgaggaggtcgattaagctggtggtggtcctacgtgattccggctggaagggagtctgaaccgtgtgatgtggctggcgtcgtgtgatcccctgtgttttttagccgtcgagagtttcgtgcgatgaagcttttgtgagtgtgtatcgccgtatggatttacctgaacttgctctgaaatagtttaagctttgacct

SEQ ID NO: 420358 - DNA, 465 bp, Oryza sativa
ttgttacactgttccaatatacgaaggatttacactcccgcatgctattcttcgactcgatcttgctgggcgtgaccttaccgacaaccttatgaagattctcacagagaggggttactccttcaccacaactgctgagcgggaaattgtcagagacataaaggagaagctcgcctatgttgctcttgattatgaacaggagcttgatactgccaggagtagctcctctattgagaagagctatgagctgcctgacggccaggtcatcaccatcggagcagaaaggttcaggtgcccggaggtgctcttccagccatcttttattggtatggaagctcctggcatccatgaagccacatacaactccatcatgaagtgcgatgttgatattagaaaggatttggaccgtaatgtggtccttagtgggggatctacaatgttccctggtattggtgatcgtatgag

SEQ ID NO: 420359 - DNA, 468 bp, Oryza sativa
ttccttgcgtccgcggacgcgtgggattgggagctagccgccccttggactgggacactagaatgaggatagcactagatgctgccaggggattggcataccttcatgaggattcttagccttgcgtaatccacagggatttcaaggcttctaatatattgctcgaggatgactctcatgctaaagtgtctgattatggcttggccaaacaggcaccggaaggttgcacaaattatctctcaacacgtgttatgggaacattcgggtatgtagcacccgagtatgcaatgacaggacacttgcttgtaaaaagcgatgtatatagctatggagttgttctacttgaactacttactgagaggaggcctgtggatatgtcacaaccttctgggcaggaggatttagtgacatgggcacgaccaattttacgagataaagatacgctagaagaactagctgatccccagc

SEQ ID NO: 420360 - DNA, 429 bp, Oryza sativa
ttttcgggcgcgctcttttttttttttgtttttttttttttttttggtttttttttttttttaacactcatcaattatcaaacaaatagtattaaaacatttgactagtcattgaccacaaacacatatggtaacttccaacaagaggcatttgatgtcctccgatttatggatgaaacaacatatgtaatgcttgaaatgggtaaaatccattaaatcaatccgcaatagtaactaatagcagagcaatcaacaaccaactaaattccttcatcattttgggggctcaatgaaaaacttgttgatagctggcatgatctcaggggtcttggcgcgcacatagttttttagcccatgctctgggtagcgccttccctcctcatggtttttgagcactccagctgccctccctaccttgttaaccctgac

SEQ ID NO: 420361 - DNA, 403 bp, Oryza sativa
ctttcccctctctctttctttccgccgccgccgacgccgacgatggcctccagccgctgggtccgaccggaggtgtacccgctgttcgcggcgatgggcgtggccgacggcatctgcggcttccagctcttccgcaacatcaccggcaaccccgaagtcagggttaacaaggtagggagggcagctggagtgctcgagaaccatgaggagggaaggcgctacgcagagcatgggctaagaaactatgtgcgcgacaagacccctgagatcatgccagctatcaacaagttcttgactggacccacaaaatgaagaaggaatttcagtggatgctgatagctctggtattagtactaatgcggattgatttaatggattttacccatttgaagcatacatatgt

SEQ ID NO: 420362 - DNA, 373 bp, Oryza sativa
ttttgtggttttttttttttttggttttttaggtgtcatagagctcccaacgcagttcttcaattcaaaaagactgcccaaacagaccaagggtatcatcatagcagcaaagttttttaacacgcaccatcaaagagacactaatgcaataagataacttgaagcgcggatcactagcaaatttcgcgcttagtcgacctcctcgatcttggggccagcaccgttgccgcctggcgggggagcattgtcctcgtccatgccgccggccatgtccgcgccagcgccctggtacatcttggcgatgatggggttgcagatgcccttcagctccttcatcttggcatcgaactcatcaacctcggcgagctggttg

SEQ ID NO: 420363 - DNA, 528 bp, Oryza sativa
ttttggcaccaccatcaagaatgccgttgtcactgttcctgcctacttcaatgactcccagaggcaggccaccaaggatgctggagtgattgctggtctcaatgtcatgcgcatcatcaacgagccaactgctgccgctattgcctatggtcttgacaagaaggccaccagcgttggtgagaagaatgtcctcatctttgaccttggaggtggtacctttgatgtttccctccttaccattgaggagggtatctttgaggtcaaggccacagctggtgacacccatcttggtggtgaagattttgacaaccgcatggtcaaccactttgtgcaagaattcaagaggaagaacaagaaggatatcactggcaaccccagggctcttaagaggttgaggacagcttgtgagagggcgaagaggaccctgtcctccactgcccagaccaccattgagatcgattccttgtatgagggcatcgatttctactcaaccatcacccgtgccagtttgaggagctcaacatgatc

SEQ ID NO: 420364 - DNA, 403 bp, Oryza sativa
tttttgtttttttttgcgggttcaatataaaaccatgtcgatagatagatagaatagagcactacatatttttctcagcactagtgatgttcattcaaacattaaaccacaggtaggtctgaaaaggcttaaattactagcaaaaagtatagtcctgccaaacagcgcaagagctttagcacaatgacatgggatcaccactcaacggttggccttggcaacacgctcgatctcatccttcttcttgatggcatagctgttggatgagcccttggcggcattaataagctcgtcagcaaggcactcagcaatggtcttgatgttcctgaaggcgctctccctggcaccagtggtgaggaggtagattgcctggttgaccctcctcaagggagagatatccaca

SEQ ID NO: 420365 - DNA, 451 bp, Oryza sativa
  unsure (1)..(451): unsure at all n locations
ttcgtttagggtttccctccgccgccgccgcctcccgcatccacgcgcctcctcctcctccgccgccgccgccgccaccgcagcatcagccatggccgaagtggagctcccgcagcaggaggtcaagctcttcagccgctggtccttcgaggacgtccaggtgaacgacatctcgctggcggactacctggcggtgaacccgacgaagcacgcgacgtacctgccgcacacggcggggaggtactcggcgaagaggttccggaaggcgcagtgccccatcgtggagcgcctgaccaactcgctcatgatgcacggccgcaacaacgggaagaagatcatggccgtgcgcatcgtcaagcacgccatggagatcatncacctnctcaccgacgccaaccccattcaggtcatcgtcgacgccatcatcaacagtggcccttgtgaggatgcg

SEQ ID NO: 420366 - DNA, 370 bp, Oryza sativa
ttttgggttagagctcccaacggagttcttcaattcaaaaagactgcccaaacagaccaagggtatcatcatagcagcaaagttttttaacacgcaacatcaaagagacactaatgcaataagataacttgaagcgcggatcactagcaaatttcgcgcttagtcgacctcctcgatcttggggccagcaccgctgccgcctgccgggggagcatcgtcctcgtccatgccgccggccatgtccgcgccagcgccctggtacatcttggcgatgatggggttgcagatgccctccagctccttcatcttgtcatcgaactcatcagcctcggcgagctggttgccgccagccactggatggcctgatcga

SEQ ID NO: 420367 - DNA, 499 bp, Oryza sativa
tgtccgactcatacttagtttattgctgaaggtagctagcgagctgactgctcactcactagatgcccttcctttcctaccatacctgggaaaggttcctgtcatacgatacgaccttggcacgacctagtcgggcgtgggcgtctggcagcacgaccgcgtggagatcatggccaacgaccagggcaaccgcaccaccccctcctacgtcggcttcaccgactccgagaggctcatcggagatgctgccaagaaccaggtcgccatgaaccccatcaacaccgtcttcgatgccaagcgtctcattggcaggaggtttagggacgcttctgttcagagtgacattaagctctggccctcaaggtgattgctggacctggtgacaagcctatgattgctgtccagtacaagggtgaggagaagcagtttgctgccgaagagatctcctccatggtcctcatcaagatgcgtgagattgctgaggcccaccttgccacca

SEQ ID NO: 420368 - DNA, 373 bp, Oryza sativa
ttttgtggttgatgacagacaggcgtattcttattattctcgaaataaccgtcacacaacagaaatgagaacgaatttgtccagaaatgcactcaattacaacatcatccttgcagttacagcatacaagatggaaactttactgaactataccacgtttcgctccatccaccgtgttcttcagcaacatcgccaccgtcatggggccaacgccacctgggactggagtcaggtgaccagcaaccttgctcacctctgcgaaatccacatcgccgacgagtctgtaccccgatttcctggttgggtcactgatggagttcgtcccaacgtcgatgacagcagcgcctggtttgatccagtctcctttgatcat

SEQ ID NO: 420369 - DNA, 396 bp, Oryza sativa
accacacgcgacgattaatagaaaaaaaaaaaagaatctcgtctcacccccaatgtcgcagatcatcgacgggaaggcggtcgccgccgacatccgccgcgaggtcgccgccgacgtcgacgacctctcttacgcccacaacctcgagccggatctgaaggctgcgatcgtattgagcaagaaggactcgcatacttacgtgcagatgaagcgcaaggcgtgcgccgaggtcggcatgcgctccgtcgacgtcgacctcgccgaggacatctccgaggcggcgctcgtcgtcgagggccaccgcctcaacgccgacccagccgtccatggcatacttgtccagctttcattgccaaagcatattaatgaggaaaagatattgaacgagatcagctt

SEQ ID NO: 420370 - DNA, 493 bp, Oryza sativa
ttttcggccgcaagaggggcaagcccgacggtgcgaacggcgccggcgggaagcgcgcgcgagaatcggagtcatttcaaaccggtgtaggaagcaaatcgaagccatgcaccaaatttttcaggttataatccaacttaaaatgaactccacctggtaacatttattatgcatggttatttcattaaaattttgcttctgttttttttcctaaaagaattgtattgttgctaacacatgaatcaagtaaagattgtgatacaggttgtacctaatccaagcttaagaaacactcactggagtaaaattggaatgcgcacagttgcgcgaaatcactttgaacctgtgaaagatgcaacagtataaggaattaaggatatgtaactccttgtcagatgaacaacctgtcagtaatatcatgatgcagcttcatctgctcaaattgagaaaagaagattgaatacatgacttgggaactgcaactgaactcaca

SEQ ID NO: 420371 - DNA, 542 bp, Oryza sativa
ccaacaatcaacgagactgctcactttgccagagaaacagtcacagtagcattaattttatgaaaagcatagtaatcatcaaccacagtaggctttaacatcgcaggagaaaagggataacataatcacataaccaggcgtacgagaaatagctcaaaaataaaatgcaataaagaatccagaggtaaaacaagacagcacataagcctaaacggtcagaaaattcagcatcagccctcaaagtttcgagttacaatgactaatcgctacaaaccacaatggatctcaagcagcagctgatttccgaagctcattttcaccatgggcaaaatggcacctgtcgccaaaagtgcacgaccctttggtgaagttctcgcacagcttggtcttgaagttgcttccggggcctcccccgcggtgggatcctcccacaagtttcttgccttgtggaggggcaccgccaccgatgctgacattcagctccctcaccattgcactagcgttcttgatctgatcaaatgtgccctcaagctcaatgtttt

SEQ ID NO: 420372 - DNA, 475 bp, Oryza sativa
gttcaagcatagccatctgaccacaaaaaatgttgagccactgcacacggtgcagtgtcagttgtagcattcacaacataccgagtttctttttaggaggtaaaactctacgagtctcacagcatagtaaaacgtagccagctattactagatacgagtagcattttttaagtcgcaaacaaaagggatacagtcccggcttaaggggtgtaaaatcagcttcactatcttcatgttcgccgcaacgggaaacagagcacaatcatctttgggtccaaaaatttacggcaaacctttgcgacgacgttgatttgtgaaccaatgacgagtttcctagatgacatactctgcttactgttgcgcgcactgaactctctgggcacctccaggcatctcatcgtcctcatcatacgcctcctgagcagcttgggctttcctgcgcatctcttcctcaatgttgttgacatcccgggaa

SEQ ID NO: 420373 - DNA, 464 bp, Oryza sativa
atgtcaacaacattgttgattagatgcgcaggaaagcccaagctgctcaggaggcgtatgatgaggacgatgagatgcctggaggtgcccagagagttcagtgcgcgcaacagtaagcagagtatgtcatctaggaaactcgtcattggttcacaaatcaacgtcgtcgcaaaggtttgccgtaaatttttggacccaaagatgattgtgctctgtttcccgttgcggcgaacatgaagatagtgaagctgattttacaccccttaagccgggactgtatcccttttgtttgcgacttaaaaaatgctactcgtatctagtaatagctggctacgttttactatgctgtgagactcgtagagttttacctcctaaaaagaaactcggtatgttgtgaatgctacaactgacactgcaccgtgtgcagtggctcaacattttttgtggtcagatggctatgcttg

SEQ ID NO: 420374 - DNA, 381 bp, Oryza sativa
gtaatctaacatacgcaggctgatattatcacaatgttagccgatgacaatggaaagagtaatctaggtacaagcggatcattgacggtggagacaagacattggctgcaccacaacacccaccagtggcgccaacaaggagcgctatccgttataggacgagagaaaaagtaaaacatcacgatgtgaagtgaaactgaataattctagtagacgatgatgatgatggataggctccttaggacgcccgccgcccttagcgtcttgctgctcccatcttgtccactggaaggctcactcgtcatcgtcttcatcctcttcgctgccctcgtcgtcatcctcatcattgacctcggacttggacttgtcagattcctcctc

SEQ ID NO: 420375 - DNA, 427 bp, Oryza sativa
tttcttctcttctcttctctggtggtgtgggtgtgggcctgtctcccctctccttcctcctctcctttcccctcctctcttcccccctctcacaagagagagagcgccagactctccccaggtgaggattcagccatgaagggggccaaatccaagggcgccgccaagcccgacgccaagttggctgtgaagagtaagggcgcggagaagcccgccgccaagggcaggaaggggaaggccggcaaggaccccaacaagcccaagagggctccctccgctttcttcgtttttatggaggagttccctaaggagttcaaggagaagaaccccaagaataaatctgtcgctgctgtaggaaaagcacccggtgataggtggaaaatccctgaccgaagcggacaaagctccctatgtagccaaggccaac

SEQ ID NO: 420376 - DNA, 434 bp, Oryza sativa; identical to SEQ ID NO: 393043
  unsure (1)..(434): unsure at all n locations

SEQ ID NO: 420377 - DNA, 522 bp, Oryza sativa
tagtattgtagtgatggctcttcatgtactagcatcgatgggagatctatggagaaggtacgcgccgcacaatctgatgatactgtcgcagctgtgctacacgctcatgtacttcatcaccgaggccgcgttcaacaaggggctcaaccctttcatctacgtcacctaccggcatctcgttgtcgccgtcttcctcgcgcctttcgcctactaccaagagaagaaactgaggccgagaatgacgttgatgctgtttctggagatcttcgtgctctcacttctaggggtgagcctaactctgaacatgtacttcgcgagcttaatgtacacatccccaacctttgtcacgtccgtggtgaacaccgtcgcctcgatcacgttcgtcatcgccatcgtcgtcaggatggagatcgtccacgtgaggagcatacgagggctcgcgaaggtcgccgggacggtggtgtcggtcgcccgggtgaccaccatgaccctgtaccaaggcaccgtgatttcagcccctgg

SEQ ID NO: 420378 - DNA, 429 bp, Oryza sativa
gctctagaaatcacgaattgaataacacaaacaggacagaaaatgtggtcaacacaattcacatccattgaaatttctggctaaaaacggatggacaaaaggatccgtccctcagacagctcgaataaatgttaagccatgtatttgaatgctaagccagcaattaaataaagcaagtattgtacaagagataaatcgatgcaacgcggtgttagctccatctcagcttgttcaatttggatccaaagcacccgcaaacttccaaagtctgataaattgcagggcaggtgtacagaataagcgggtttaaataattccatctaatcttcatcagcagcatgttcaagaaggtaatttgctgcgagttgctcgttcctgtcacaggcgaagaatgcttcgatgacacgtgctctgtcaaatcccatgcct

SEQ ID NO: 420379 - DNA, 500 bp, Oryza sativa
tcgtgagccgccacctcctccgccgccgccgccgccgacgacgacgacgacgccgcatccccaaccctagctgccgctcggcggtgctgcgacgtaggagcgggtctcctctctgcatgatccgttagggctaccgagccgatcgaccggcgggcctaaaaccctagccgagagaggctgcgggttgggtgggggtgggggcgtgctcgactctccggcggcgccatgaagctgacggtgaagaccctcaagggcacccagttcgagatccgggtgcagcccaacgacaccattatggctgtcaagaagatcattgaagagatacaaggaaaggatagctacccatggggccaacagttgctgattcacaatggcaaggttttgaaagatgaaagtacattggaagagaacaaagtccgtgaagttgggtttttagttgtcatgcttagtaagagtaaagcttctggttccagtggggctttaagttcactgacttcaag

SEQ ID NO: 420380 - DNA, 447 bp, Oryza sativa
tctttaagcttgggcatttggtgaggcactgattgaagctcagcactaggcgaagtgcagggcatggtgcttcccaaaccagaaatgccgttctttgtcctgctcctcttcctcggcctcggctgcctccgcccggcggcggcgaccgacgagcggttcgtcttcaacgggttcaccggcgccaacctcagcttcgacggcatggcaacggtgacctcgaacgggctgctcatgctgaccaacggcacgaaccagctcaagggccacgccttcttcccgtcgccgctccagttccagagggggcccaacagcacggcgatgcagtccttctccacggccttcgtcatcggcatcatcggcgcgttcgaggacctgagcagccacggcatggcgttcatcatcgccaagagcaagaacctcacctcggcgctgccggggcagttcatg

SEQ ID NO: 420381 - DNA, 316 bp, Oryza sativa
tatgcacagcagcagcagaagcagctcggatccctcctgcaatggcgaccgcgtgcccgccactctcgctgcagccggcctacctctcggggaggtccgcgcgcgcgcgccgcccgccgcccgccgtccgctgcagcgccgtcggagaggttatggcggagacggcggcggtcgggacggcggaggagccgctgctggtgagcgcgatcaaggggaggaaggtcgagagaccgccggtctggctcatgaggcaggccgggaggtacatgaagagctatcaattgctctgcgagcgacatccttcattccgtgaaag

SEQ ID NO: 420382 - DNA, 392 bp, Oryza sativa
tttttgtttttttcagaagacagagattcaccaccaggacggtatgtttctgctactgattacacgagtacagattgtgtcgattttagcacagttaatactcgcacaaccacacattcactaactttggtcttttacacataactgtcgatcaaagacttcctcatgtcatcaacaatcgcggcaggctgcccttctctcagcttgaagacgctctcaatgaccgatagctcagtagccgtagtgtctgagccacagaaagcagtccagtcattcactgtcatgcccgcagcaatgacctcgctgcctcggttcacggttccagcaacaagagggacttgcaggagcgtggacagctcatcaagatcttcaatggatgtatgaggatggac

SEQ ID NO: 420383 - DNA, 501 bp, Oryza sativa
ctcccgattcgtcgctatttcgttccaggtgtgtgttgattagtagaagagaagcggcggctgcgacgaggcggaatcgaccatggcgacccgtattcagtttgagaacaattgtgaagttggtgttttctccaagttgacaaacgcctattgtcttgttgcaattggaggatcagagaacttctacagtgcctttgagtctgagctcgcagatgttattcctgttgtcaagacctccataggtggtactagaataattggtcgtctctgtgtcggaaacaagaatggacttctcttgcctcacactaccaccgatcaagagcttcagcatctgaggaactgcttgcctgatcaagtggttgctcagcgtattgatgaaaggctatctgcgcttgcaattgtgtagcttgcaatgaccatgtcgcgcttacacaccctgacctcgacaggccactgaggaacttattgcagatgtgcttggggtgaagtgttccgcagaca

SEQ ID NO: 420384 - DNA, 411 bp, Oryza sativa
gaagaataacatgttggttgcattgccatcgactatgtcatcctgttctgttccttttggtatctgtctgatcacaacaaatcatatacaattgccaagctagaacttcaccaatcgtgattaattacttactacaatctgaatctacatgatttataaacgtgcctgcactgcaaatgctatctgccttcctcctctatcaacgtgacgttgcccatgcagtacgactcgccgaaggagctggacgacacggccaggctggagatcctgacgttgaagtacgccggctgcctcggctccggcaacgtcagcccctcgctgccgagcatggcgatcacgtcggacatgttcggccggtcgtcggcgctgtcctggacgcacagcagctccacctgcacgcactttatcacc

SEQ ID NO: 420385 - DNA, 403 bp, Oryza sativa
atcaccgccgacgaggagcgcctcatcctccacctccactcccagtggggcagccgctggtcccgcatcgcccgcagcctccccggccgcaccgacaacgagatcaagaacttctggcgaacccacatgcgcaagatcgcccaccacgccaagaagaagaccaattcaccatcgccggcgccgacgacctcctccggttccttgtcctcctcgctcaccacggcgacgacgacgatggcgacggctgcggcgctgcaagaaagcagcagctgcggcggcgacgacgaggccgtcgaccagctggtggcggcggccaccacgccggcgagccagctgctgacgatggactacaccatggaccagctctggaacgacatcgcggcggcggaagccgatacgagct

SEQ ID NO: 420386 - DNA, 431 bp, Oryza sativa
aggatcaaaacatttctattaccacaactttttaaggatggaattgagtagcaatactttcaccccaaaatacagtttagcgacaatatcttagaaaagccgcttgctttgccgccatggctggcaagctgagcagagcagctaacacaaagaacacgagatcactataaaccaaacggcaacgaacgaagaaaatacagggtcttttttgtctgaagatacacgaagcggttcgttttcttttatttttagtctcctctcctcctcgatgatgggtgtatggcaatggcaatggcgatgggatcttggcttagttgatgggaaggggctcgccgttccactccttgaggcagtcgagcatggggtcgatgagcttgccctggctgatgccgaggaacaccttgttgcactcctcgccgggggacttgagc

SEQ ID NO: 420387 - DNA, 510 bp, Oryza sativa
  unsure (1)..(510): unsure at all n locations
ttcagtatcgaatcctctcttctcctcgtgcccaccaccaccaccgtagcaatggcgggcaacgggccgatcaacaaggaggacccgctcaactggggcgcggcggcggccgagatggccggcagccacctcgacgaggtgaagcgcatggtggcgcagttccgcgagccgctggtcaagatccagggcgccaccctccgcgtcggccaggtggccgccgtcgcccaggccaaggacgccgccggcgtcgccgtcgagctcgacgaggaggcccgcccccgcgtcaaggccagcagcgagtggatcctcaactgcatcgcccacggcggcgacatctacggcgtcaccaccggcttcggcggcacctcccaccgccgcaccaaggacggccccgccctccaagtcgagctcctcaggcatctcaacgccggaatcttcggcactggctccgatggccacacgctgccgtcggagacggtgcgggcggncatgctcgtgcgcattaacacc

SEQ ID NO: 420388 - DNA, 470 bp, Oryza sativa
gcccaaactacagcgggaaatccatctaattaaacatcaagactcgtctcaacaacaacctgccacaattcacaaacagcaggctgctgcacaagacggtgtacacggttcattttatttgggtgttcgtttccaccatgaggattgatataatacacagcgaacaagcagaaacattcggcaacaatttctccaggaaaatcgcggcctatttcgtcatcattcccgagcgagcgttatttggaagagggagtctttttcagacaggcacagcctcaatggcaggagcgagtgaccaacgtcgacgtcggcgtcctagtagccaccctggatgtaggcgttgagccggttcagctcttcccggtgctcgctgaccacggcgcggacaatgtctccaatggagaccatcccaaccatgcccgtgccgtcgatcaccgggatgtgcctgatgcgcttctctgtcatcagct

SEQ ID NO: 420389 - DNA, 437 bp, Oryza sativa
tcggacgcgtggggcctcacatcataccaagtgtcctccttcctcctcatcctccccaaccactgcatccgggtcggcgtcctcctcctcctcctcctcctcgcagaatgcaacgggcaattcaagctatcgggtcacatggcagtctcctcaagtctgctgttctgcgacacatcagtgctccaaaaccatctattttacctgctgtatattcacgctccatgtcagtttcatctgctcaaatagaggagagtggatttgagactgccactgtggcagatattttgaagtctaaggggaagagtgctgatggatcttggctctggtgcactactgatgactctgtctatgatgctgtcaaatctatgacgcaacacaatgttggagctctggtgggttgtaaaacctggacaggataaatcaattgctgtattggt

SEQ ID NO: 420390 - DNA, 407 bp, Oryza sativa
agcaggctctactactgctgctgctggacaaagtttgaattcttaactacttgcgaatacagcgagtccagctttcccacaaggacgagagcgaggaacaaaaggaagcttgagaaaatgggatgatctctgaatcaaacattaagggtaaagggtaactaaaaacaagggcccggctgggcaggacggggaagggttttctgatgtgttttttggtcaggcgtgcatcgtcgccgtcttcttgaagtcgatcctttgtcgaccttgacctcgccgtcgatcagctcgtacacctagaccaccacccctgagcccgcgatgtccatgagcaccaacctcgggttcacgttccaggtgatgctgctgtaggcccccgtggcggaacccgggttgatgacccctccccc

SEQ ID NO: 420391 - DNA, 520 bp, Oryza sativa
gttatcgatgggagtttgcttctcatctttgtcagagctaattatacaattgagactgtagaggcagagaggatatctgctgatcatgttgcccatctcaaaccatctgatggtggctctgcggcgactcaattggctgctcatctgacaggaatacacagtgccatcaagatgctcaatagcagggtccgtgttatccatcaatatcttgtttccatgcagaaaggtgatatgccactggacaattcgctgcttaggcaagtctcaagcctagtaagaaggctaccagcaatggagtcagaaaaattccaagatgacttcctaatggaatacaatgacaccctcctcatgacttaccttgctatgttcactaactgttcaagcacaatgaatgagctggtcgagaagtttaacgcgacatactagaggtcgactgccaggagaggaggccgaggtgctttcatgtagattttcccccttctgcatctgcagctggttctctgctgagattttggaaata

SEQ ID NO: 420392 - DNA, 535 bp, Oryza sativa
  unsure (1)..(535): unsure at all n locations
ttcctatattatatctcactcttgtgatagcactacagaacaattagcactatgtgctgctggagttccgcagagacttgttaaccattttggaggctccatgaatctacgggatgcttgcttagattctttgactgcaatcataagaaataactgggaagttgcttcaagatttgcactgctggaccatggaaaagctttgcgctcaatagttgcattaatacatgatcggagcccacgcacaagactacttgcttgtttgtgcttgattgcgcttagccatgcttctccctgtcactttcaagacagacaaattaaaaccaagttgatcctggtcttacttgagctcatcgaggaacctggtcatgtaggagatgatgctccattggcattgacaaccttgatcaaagacagtgtggaactgcagaaacaagcactctcaacaaacgcagttcagaagttaagcaaccatcttatagcaaattcgttggagtcaaggcgtgcagtgaccatatngcttgtttagctgaacttg

SEQ ID NO: 420393 - DNA, 518 bp, Oryza sativa
ttgattcccccccacttcccctctcctccatccatggcgagcgccgaggcggaatgcgccgcggcggcggtgggcggcggcgggagggcggagatcgacacgtcggcgccgttcgagtcggtgcgggaggccgtcgaccgcttcggcggcagcgccgcctggagctcccacctcatcaggcgcatgttcgcccctcccaaccccaaggagcaatctgaagaaagtaaacagcctgtcgatatcaaagagcaggctgcacaactagaacatgatcttatcatcaaagaaaaggagacacttgatgtgttaaaggaattggaatctaccaagaaaatcatagcagacttaaaacagagaatacagaaggaatcaaatgaaacatctccttcagctgtgaagtctgatgaccaaagtgaaattcctattacagaatctgaagagcagaaacctgaaaatgttaacattgatatggatatggaaggcctagatgaacatccacaaccgctttcagttcagta

SEQ ID NO: 420394 - DNA, 481 bp, Oryza sativa
tttttgtttttttttcagtcaaaaaaaattctggaggaaatacatcatgatttcacttgataatgtgactttacatccaacgtgtatgtacagacaatttgagtcgtggcaccaaacagagaatcagaagtaatgcctaactagatatcatatcagcatacctagagtcaccctgtttagtactactcagtactcgtaattcttcctcactacacctaattgttaaactgaaaatgaaacagacaacaaatgggacagaatacactcccgcgacaaattggaacatggcttttatagctcatatgcactctcccctccctacacatatgattgcttttgtagctcgtacgcactctcccctccgtagcatatgactccagacatttaagcttcgtgtcacctaaatactcatgtattcaccgcaactaggctactgccgataaaacagaagattgacaaacaggagcaatgctacataact

SEQ ID NO: 420395 - DNA, 564 bp, Oryza sativa
  unsure (1)..(564): unsure at all n locations
ggttgctcaccatcacttagtggagcaattcgggtaaacccttggaacattgatacaacagcagaggcaatgaacgagtcgattgctttatcagagaacgagaagcaactgcggcatgagaagcattacagatatgtcagctcacatgatgttgcctattggtccaagagctatattcatgatttggagagaagctgcagggaccattttaggaggaggtgctggggtattggactaggatttggatttagagtagttgctcttgaccgcaacttcaaaaagcttactgtggattctatcgttactgattacaagaattctaagagcagggttatactgctagactacgatggaacgctagtaccacaaactacaatcaacaggactccaaatgaaagtgttgttaaaatcatgaatgctctntgtgacgataagaagaatgttgtttttattgctagtggacgaggaagggatagccttgagaaatggttctccccttgccaggatcatggcattgctgccgaacatggctactttatgaggtggaccagagatgagcaatgg

SEQ ID NO: 420396 - DNA, 550 bp, Oryza sativa
  unsure (1)..(550): unsure at all n locations
cccgcccaacccaaattttttgtcacccagcgccgcggcgcccccggttgctgacttgccgcgggaaggaggatgagcaggcggtggagccggacgatctacgtggggaatctccctggtgacatcagggagagggaggtggaggatctcttctacaagtatggccgaattgttgatattgacttgaagatccctccgaggccaccaggctatgcttttgtagagtttgaagatcctcgtgatgctgaagaagcatgtgctggcagggatggttataactttgatggacatcgtctaagggttgaacctgctcacggtgggagaggtaatggtggttcctcctttgaccgccccagcaactttggtggtggaggacgccgtggtgtgtccaggcactcagaataccgtgttctggttactggtttgccttcttctgcatcatggcaagatttaaaggaccatatgncgcaggctggtgatgtttgtttctcagaagtgtatcgcgagggcgggggtactgtagggattgtggctacacaaactatgatga

SEQ ID NO: 420397 - DNA, 306 bp, Oryza sativa
atcgcgagcgggccgttcatctctttcctgttgttaagatgtagatgtttgtgttgacattgatcggcttgacttttatccctgatggtgtatttttttgacaccagcgagaatagaaagggttagaggcaagacaaggagggcatgcacccggaccagcagggtcttataatacctggcaagcagccgtaggacggcaggaccctcgctgaccacaacatccaaaaggagtccacccttcaccttggccttcgtccccgtggtggcaggcagaactttgtgaagactcttgccgacaagactatc

SEQ ID NO: 420398 - DNA, 317 bp, Oryza sativa
ttttgggttttttggcgaacaagggtttcaaactcttttattcctcctggttttatcttagatttcattccgggggaataaaccccgcgggataaacaccataacccaagcggactcaattcatggtaacatgacgtacgaagaacacctaaaactggttggatggatagagggctgatagactagagagcgccactgggcacggatagcgacttaccggggtgataaaacgattttgagacggcttgttaagggcaactgggcacacaggaccctacctatctgttacttcatttcccgtcagattcgtcggcgta

SEQ ID NO: 420399 - DNA, 284 bp, Oryza sativa
gtcgtctggcaaattagtcgcaatctgcgtaattagtttttttttagcctatatttaatattttatacaggtgttcaaacgttcgatgtgacatgttaaaaaattttagggtgggattgcggaagggaggaaggaaatagttaggagtataagttacttgggttggagttggggctaccctggattcctggggcaggaaccacagggttcctcttgatcatgacggtcctttctaatggcaaaaatgtctttggctttcccaaattgcccaggaacgagtactt

SEQ ID NO: 420400 - DNA, 506 bp, Oryza sativa
ttcgtgcccgggctgcgcctcgtcggctgctgtaacgagctcaacgccgggtacgcggccgacggctacgcccgcgcgcgcggcgtcggcgcctgcgccgtcacgttcaccgtcggcggactcagcgtgctcaacgccatcgccggcgcgtacagcgagaacctgccggtcatctgcatcgccggagggccgaactccaacgactacggcaccaaccgcatcctccaccacaccatcggcctcccggacttctcccaggagctccgctgcttccagaccgtcacttgccaccaggcggtggtgaccaatctggaggatgcgcacgagcagatcgacaccgccatcgcgacggcgctgcgggagagcaagcctgtgtacctcagcatcagctgcaatctcccagggctgcctcaccccacgtttagccgcgaccccgtccccttcttcctcgcccccaggttgagtaacaagatgggtctggaggctgcggtggaggccactgtcga

SEQ ID NO: 420401 - DNA, 491 bp, Oryza sativa
  unsure (1)..(491): unsure at all n locations
tttttgtttttaaatgaaatcatggagtccattgaagagtgggttgtcaacatacttacaccaaactgactggatacagctgaaccactagatcagttattctgggtttctaagcgaacttcttggcgaggtgacgggctatgatttcagatacgggttctaagaagattacttgacttgaccctgggagaacatggccctcggcttcctggacgatgtcctcaatctcagagtctctattcacagattccctgcacagtatacgcccgatgtcatacggtgtgaggcctcgtgctgcacctttctttaaaagcatggtgctgatgcacaggacacgagcacattttgcagacagctcccacccatggaacttgagaagcttgatgtcctcttcagcgtctagtgatttgatgaatgcaacggtttcatcactgcatggttcacgagccatgggncagtacagccactcaaaggtacaatcttcaaacttc

SEQ ID NO: 420402 - DNA, 548 bp, Oryza sativa
  unsure (1)..(548): unsure at all n locations
tggagatcaagatgggattgtaaccacgctggttatctcgcgatcgcagagggtttcctccatcctctaaggaaggaaaggaacccttgccctttcttctccatggcttctaattcgtagtgtgaaggatctgatttttaggttagtgtaaatagtagcagtagttgaggaagcttcggcatcctaaggacctcctgtgaagatgtcgtctgctgccattgccattagcccgatggtggaagagtttgctctcctgcccatctgcttcgacggcagccggtcgccccactgtttgtccgggtcacagctgcaggattcgattatcatctttcttgctgtgcctggtgccccaccgatgccgatgagtgtgctcggctcggagtccatcgcctcggtcaagctgcgcattcagcggttcaaggngttcgtggttaacaagcagaggcttgtgcttgatgggcacgagctggcaaggaacaactgccatgtgaaggattatgggcttgccgatggaaatgttctgcacctttgtatccgcttggctgata

SEQ ID NO: 420403 - DNA, 388 bp, Oryza sativa
  unsure (1)..(388): unsure at all n locations
gcgaacaaaactttcgaactcttttttttctccttgttttctatttcatttcattccgatagatagcaacaagcagttcaaacaccataaccaaagcgaactcaattcatggtaacatcacggacgaagaacacctaacactggatggatggatagagggcttctcgactcgagagagccactggacacgataacgactcgactcgatgataagatgattctgacacggatagctaaggataactggccacgatgggccccaccaatcagttcctccagttcccgccggagtcgccgccgtagccgccgccacggctgccaccgtagccgccgccgccgacgccacggccgncgccgtagccgccgccgccaccgtagccgccctcac

SEQ ID NO: 420404 - DNA, 503 bp, Oryza sativa
ttccacgcgtccgccgtggttcgtctagggtttagtgggttgagatggcggcgccggatgtcgagtaccgctgcttcgtcggcggcctcgcctgggccaccgacgaccgctccctcgaggccgccttctccacctacggcgagatcctcgactccaagatcatcaacgacagggagacggggaggtcacgtgggtttggcttcgtcaccttctcctccgagcagtcgatgcgcgacgccatcgagggcatgaacggcaaggagctcgacggccgcaacatcaccgtcaatgaggcccagtcccgccgctccggcggcggaggcgggggctacggcggcggcggtggcggctacggcggcggtcgtggaggcggcggctaccgaggaggtggcggcggcggctactggcgccgtgagggcggctacggtggcggcggcggctacggcggcggccgtggcggcggcggcggcggctaccgtggcagccgtgcggcggctaccgcg

SEQ ID NO: 420405 - DNA, 475 bp, Oryza sativa
cggaaagaagctttttttaggcaccaaatgcagcatgcacatgcttagcagcatcagctgctgccggccaggggagacaagaaaacagaggagaagaagaagaagaagaggaaagccatcgtcatcatcgtgtcgtgattagaatccggccatgtcgacagcagaagcagccgtgtggaggggccatggcagcagcaacatcacgcggcaaatcctcaagtgcacgaggtggcagctggaggagaccacggacttcatcacatgcccctaccactactactgcgacagcgcctaccccggcgactactcccccgccgtcggcgcgctcgtcgccgccttcgccgcgtactgcctcgtttccgccgccgcattcgccgtactggacatcggcagggccggcggcggcggcgggaggaataggcggaagtacatggtgccgtcgggcccattcttgctgccggtggtgctcctggcg

SEQ ID NO: 420406 - DNA, 469 bp, Oryza sativa
ttttgtttttgagttcaaataatgaatatatttgacgaattcaagatgtacatacatgtacaattaatccaaaaaaagtactaacaaattaatttcccagcttgagatcatgcagacgaacaaattcctctccctgctaataactgaactgctggttgctggtgaatgtcatgccgaagctccaccagctgggcacgacgttgtagatgtagagcgtctggccgccggtggatgtgacggcgaaggagagcgcctggccgacgagccccgagttgcactgccagttggcgccccagttccggttcagcgtgatccaccccgtgcttccccccttcaccgacaccgacctcaccgacccgctccccgccacgttcgacaccagcaccagctcgaagaagttgaaccctcccatcgtgaacctgatccctccctgcctccagcacttcacctgttggtagaggacggggat

SEQ ID NO: 420407 - DNA, 541 bp, Oryza sativa
cagaacctcggttacttcctgatcagtgttcgattctctgctctatcgtctcgacggagatggagtacgcgatcttattcgccacgtcgttggtgatcaccgtgctagcagcatccggcttcgcgccggcgcatggctggaacaaagggacggcgacgttctacggcggcgccgacgcctccggcacgatgggtggcgcgtgcgggtacgggaacctgtacacggcggggtacgggacgaacacggcggcgctgagctcggtgctgttcaacgacgggtggtcgtgcgggcagtgctacctgatcatgtgcgacgccgccgcgacgccgcagtggtgcagggcgggcgccgcggtgaccatcacggccaccaacctgtgcccgcccaactgggctctccccagcaacagcggcgggtggtgcaacccgacccgtcctcactttgacatggccgagcccgcctggctccagatcggcatctacaggccggcatcatccccgttcttaccacaggtgaagtgctggaagcgggagggatcagg

SEQ ID NO: 420408 - DNA, 520 bp, Oryza sativa
  unsure (1)..(520): unsure at all n locations
ctggatatggttactcttggcaaaacactagagaaactttatgaagaggagcaaaaactctacaagttagtcaaggatgaagaatttgcaaggctccagtacagaaagaacacctcgttgctacaaagactagaatcaggtgaccatgataaattgcatgcagagaaagtgcgagataatatagaggaattgcaagctcggataatctctttggaggaagctgttggtttgacatgtttgtccatatcaaagctcagagatgaggagttatatcctcagattattgaattatctgcagggcttgtgcatatgtggagaaacatgtatgagtgccatcaggttcagaaccacattgcccagcaagccaatcttctaggcaatttaccagggaatgaaccaacaactgacactcattgtcaggcaacatctcagctggaagttgaagtttctgcatggcatagttcattctgcaatctcatcaccttacagngtgactacgtaaccattcttaaccagtgga

SEQ ID NO: 420409 - DNA, 442 bp, Oryza sativa
tggttcgcgtgggcggcaaaataccgaaatttctggcacatcgtcttttcccatcatcaaggttctcaatctggttagacagcaaattgcgattacaaaacgatcctatccttatcctagagtattttctttggcggcatggctatgaatatgctatttccaatcattatgatcgacactgtgtttgggaggaagtggcacagaacaaaaagctgaacaagttcaaccatacaataattgatcagcagtttgagttttaccaagcagatggactgacaaagttcaacccatcagatcccaacaagctgctaccaagctatgtccctgaaggttctttcatcgtgagggaacacacaccaatgtccaacttattctcatgcctatggttcaatgaggttgatcgattcacacctcgtgaccagctcagttttgcatatacata

SEQ ID NO: 420410 - DNA, 259 bp, Oryza sativa
tttttgggtttttttataggggcaggggcaacttattcataaagcatattgctagggaccaggaaactgtctcataaaactaacatatcataccgactcgatgggccattgaaccaggcccaaggtgacatcagctccacaaatgcttgacgaacagaggctcgggatgaccaggcacataggcagatccaccaaactggctgattactgaccaccacggaggcgagagcacccggtggggggtggactccatatggat

SEQ ID NO: 420411 - DNA, 449 bp, Oryza sativa
tgtttcctctcgcgtcctcaagatgcagatctttgtgaagacattgaccggcaagactatcaccctcgaggtggagtcctctgacaccatcgataatgtcaaggctaagatccaagataaggagggcatccccccggaccagcagcgtctcatcttcgctggcaagcagctggaggatggcaggacccttgctgactacaacatccagaaggagtcgaccctttaccttgtgctccgcctccgtggtggcatgcagatctttgtcaagactctgaccggcaagactatcacccttgaggtggagttttgtgacaccatcgacaacgtcaaggccaagatccaagacaaagagggcattcccccagaccagcagcgtttcattttctccggcaagcagatggaggatggcaggacccttgctgactacaacattcagaaggagtccaccc

SEQ ID NO: 420412 - DNA, 456 bp, Oryza sativa
gatatgatgatatcggaattaataacatatatatatatatataagggtagaatataataacaagaaggaataattagggaagaattaatgggtataggagtagctagctaggaggagtactggacgaaggaacggtagaaggtgttgggcgtccagttgagggggatgacgtcgggtgccaccaacgtcttgccggagtcgctccggatgcggatggagaatggcgcccgcaggcggtggttggagtccagcctccacaccgacccccacgactcccgcatcggcgtccaccttcctcctccggcgccggcctccttgaggtccacctgcgccacgtctccgtcgccgttcttgtactccaccagcaccgccaggtacacggggctggacccttcctccacgtggaatcccaccttgaaggcccggaactcgcacggcacgcgcgcgaactgcacg

SEQ ID NO: 420413 - DNA, 450 bp, Oryza sativa
  unsure (1)..(450): unsure at all n locations
tccttcccggccggtaggcagcaacaagctgtaagcacaagtatcgaaatggttagcggtgatgtaggagtagtagtgtactacctgctgctagtattagtggtggtgcaggggtgcaaaggcagcagcgcggtgcagggtgaaggtcggtggtacaacgagagcgaggccatcggtggtgcggcggcgtgggggaacgcgaaggcgacgtggtacgggcagccgaacggcgccggggcggcggacaacggcggggcgtgcgggttcaagaaggtgaaccagtacccgttcatggggatgacgtcgtgcgggaaccagccgctgtacaagggcggcaagggctgcggctcctgctaccgcgtcaggtgcaatcgaaaccccgcctgcttcggcaacgcccagaccgtcgccatcaccgacatgaactacttncccctcttccagtaccac

SEQ ID NO: 420414 - DNA, 424 bp, Oryza sativa
tttttgttttttttttttttttttttttttttttttaaacgacggaattagaaacaatttaatctaacatacgcaaactgatattatcacaatgttagccgatgacaatggaaagagtaatctaggtacaagcggatcattgacgggggagacaagacattggttgcaccacaacacccaccagtggcgccaacaaggagcgctatccgttataggacgagagaaaaagtaaaacatcacgatgtgaagggaaactgaataattctagtaaacgatgatgatgatggataggctccttaggacgcccgccgcccttagcgttttgctgctcccatcttgtccactggaaggctcactcggcatcgtcttcatcctcttcgctgccctcggcgtcatccttatcattgaccttggacttggactt

SEQ ID NO: 420415 - DNA, 436 bp, Oryza sativa
ttcttctcttctctggtggtgtgggtgtgtccctgtctcccctctccttcctcctctcctttcccctcctctcttcccccctctcacaagagagagagcgccagactctccccaggtgaggattcagccatgaagggggccaaatccaagggcgccgccaagcccgacgccaagttggctgtgaagagtaagggcgcggagaagcccgccgccaagggcaggaaggggaaggccggcaaggaccccaacaagcccaagagggctccctccgctttcttcgtttttatggaggagttccgtaaggagttcaaggagaagaaccccaagaataaatctgtcgctgctgtaggaaaagcagccggtgataggtggaaatccctgaccgaagcggacaaggctccctatgtagccaaggccaacaagctcaaggccgagt

SEQ ID NO: 420416 - DNA, 384 bp, Oryza sativa
ttagagaagcaaccagacactgcacacatcatcatcttctcccccgagaccgggtgatcttgggttagcttagctagctaaattaagctgcgtgcagcatggggctcctcgaccagctctgggacgacacggtggccgggccgcggccggactccggcctcggcaagctccgcaagtacgcctccttctccccttcctcctcctcctcgacgatggcggcgtcgccgtcgcccatctcggcggcggcggcggcggccgacgcgccggccgtgacgcgcagcatcaccatcctccgcccgccggcgctgtccgtgacgtcgccgcgcggcagcgagatgggccccttcacgccgtcgtcggcggccagcgttccggactccccct

SEQ ID NO: 420417 - DNA, 443 bp, Oryza sativa
ttaagctttcgctttcataaaagccattactccctctcctccattgctggcctcccgcctccgcctcctctcgcctcgcctcgcctccgccacccatggcttctcgaaaccctagccccgcctccctctccacgccgctcctctccgactccatctcgcccacgcccaccaccaacggccacgcggggcaccataaccacgacgacgacgacgaggagtcgccaacggtgtgcggcggcgatggcggaggagggggggacccgttcgcgttcctatcggaggatcggccggcgtggtggtcgccgcggggggtgtccccggccgacccgttccgcaacgggacgccggggtggtgcggggcgtacgagctcgtgagggcgctcgtgtgcgcgcccgtggcggcggcgaggctggtgctgttcgggctctccatcgcggtgggg

SEQ ID NO: 420418 - DNA, 451 bp, Oryza sativa
tttttgtgaattgaaaatttgccaaattttggttggctccgaatggaattctgaatttctctgcttgtcacgaaaaaaaattatgtgttaactaagggtgagatttacatggccgaatctcttgtgacccgtgaggttgcaaattaattacatcgctctcaactccggcgaactcgccgccggcgccgccgcctacaagagggacaacggcgtgggttgggggaagaggtcggcgaatcgctggagggcctcgcgcatccaccagtgcgggcaccggtccatggcctgctgcggggagacccagctgcggcgcctggccgccatctccggccaccggtcgagctcgtcggtgacccggagcgggaagacgaagccctcgtaggtggcgtcgtagcggcggctccggtagcaccaccgccccagcgaggcgccgatctcgccgagcaccccg

SEQ ID NO: 420419 - DNA, 452 bp, Oryza sativa
ttctcaagcaaagattcatccatcgatccaactgatccaatccaaactccaaaggcaaagcaaagaaggtcgcattcgattcgattccagcgatggcggcggtgatggtggcgaggcaggggagggagctgcagaggtacagcgacaacacgggggggaggatggtggtggggtgcatcccgtacagggtgaggggcgacggcggcggggtggaggtgctcgtgatcagctcgcagaagaagggcgccgccgccggcgacgtggtgatgttccccaagggcgggtgggagctggacgagtccgtggacgaggcggcgcggcgggaggccctggaggaggccggtgtgctcggcgagatcggcgcctcgctggggcggtggtgctaccggagccgccgctacgacgccacctacgagggcttcgttttcccgctccggtcaccgacgagctcg

SEQ ID NO: 420420 - DNA, 403 bp, Oryza sativa
gacaaataaaggacatgcaatgcctggcctgtattctcaatcataaccagcccatggaaaacgctaatacagcgatactaataatgtgctgcaaatacaggaagtggttgaaagttgctaattaactagtaaataagtcacggaagcaatgtagtgcacataaactgtgtccactgggtacttcagctcgacacattttgacatacgcagccctaatcttatgattccacatagcaattgatcctagtacatcttatgatccagtaatacagcaggtagctgagtaaatggactcagaaatagacttcaggacagattagtggccctctccttcaggcttcgctgcttccttgatctcgtcaccaccatcctccgcattgtcagaggtccagagagtcagatt

SEQ ID NO: 420421 - DNA, 416 bp, Oryza sativa
ctctctctccggttttttactccctccgctcctccgctcctcgcctcttttacccgctcttccccccgatctccccggactcccacagccgcagcgaacaaatcccgcgcgggttgggaagagcgagctcgtgaggagagcacagggaaagcgcgagggggaaggaggaggaaaggtgcacaaggtcagactaagtttgcgttgaagaacaaaggagaggaaaaatgtcgcctgctgaggcatcgcgtgaggagaatgtgtacatggcaaagcttgccgagcaggctgagcgttacgaggaaatggtcgaattcatggagaaggtggcaaagaccactgatgttggtgagctcaccgttgaggagcggaacctgctttttgtggcttacaagaacgtgattggtgctcggagggca

SEQ ID NO: 420422 - DNA, 555 bp, Oryza sativa
  unsure (1)..(555): unsure at all n locations
gttgattttaacaagttattggaacactggcaacaggacaagtggactggctgtttccctgtaaagtggcatattgtgaaggatgttccaaacagcttactgaaacacatcattcttgaaaacaatgagaacaaaccagtcacaaattgcagagatactcatgaggtgaaacttgagccagggcttcaagtgcttaagattttcaaggaccatgtctgcaagacgtcgttactggatgactttgatttctatgataatcgtgagaagatgatgcaagagaggaaggcaaagcatcaacaactgaagaaggtcgttgatgagaagctgcttaatgctgtggacactgagaacagcttgttaactgtgaaatccaaattgcaggaaacagctgaggtagagattgatgtcttaaacaaagagcctcatggtaaagcangacaagttgatgggaaagagaacggtgtgttggccgtttctgtaaatgggttaccccagaagatgttcagttgacatacgagaagttggccagtttgagcgtctgttaagtttttttta

SEQ ID NO: 420423 - DNA, 468 bp, Oryza sativa
tttttgttttaacaaaaaccagacattgctcttataatcacaggatttgcatctcttcacaagaagaaacagggaaaaaatatacgcgtccgcaaaatttcccttttatcatacttatataaacaaaagggccccctcttttcttgtaaattatttacaggccctttattttacctttttatagctaaaaaatgcatggccctactatcttcgcatcatcaatgctgtatcaaaattgcagaaatgttctctcggcctatgcaactacgggttggaccagaccttcacttgagacagcaatgtcttctgtgccattggtttcaccttcatcatccttcgacaggtaattgtctacggctgctgcagcttggcgcccctctgtgatggcccaaacaaccagtgattgcccacgtctgcagtctccagcagcaaatacaccttccacattgggtcgcaagtttccaattg

SEQ ID NO: 420424 - DNA, 432 bp, Oryza sativa
tggtacattaaccgagctgttggtactatgctcagccatgaagtcacaaaacggtatcacattcatggattgccatcagataccatccatattaagctgaatggaagtgctggccaaagttttggtgcttttctctgtcctgggatcactcttgagcttgagggagacagcaacgattatgttggtaagggactatctggtggaaagattgttgtgtatccaccaagaaatagtcgatttaatccacaagacaatattgtgattggtaatgtggctttatatggtgctacaaagggagaggcatatttcaatggtatggcggcagaaaggttttgtgtccgcaattcaggagctcaagcagtagttgaagggattggcgatcatggatgtgagtacatgacaggaggtacagctgttattcttggaaaaact

SEQ ID NO: 420425 - DNA, 463 bp, Oryza sativa
gctgttcgccctgctcctctgccatggctgctgccgcggcaaggtgggccccggtcgtcggcctattgggcctcctcctgctcccgttcgcgcctgctccggcgggagccgcaacgcccgcgaggtcgccgccgtcgtcggcctcctccgccgtgttcctcctcagcggcgacgtgtaccccaccgggcattactatgttactatgaacattggggacccagcgaagccgtacttcctggatgtcgacaccggcagcgacctcacctggctgcagtgtgacgctccctgccagagctgcaacaaggtgccacatccgttgtatcggccaacaaagaacaagctagtaccgtgtgcaaattcaatctgtactgcgttgcacagtggatctagccctaataagaagtgcaccacccaacaacaatgtgactatcaaattaagtacaccgaccaggcatcttctct

SEQ ID NO: 420426 - DNA, 373 bp, Oryza sativa
gaaacttgattaatcactttacttgaacatcctactatgcctgttgaaccatcttcatacagtatatatagcaaatcctaatcaccttctaaatcttctaaaaaggaaattatgcaaaaaaaaaatgctaattaagccatttccaagttcttcctctgttctccattgtctccggcggcggcgctcctcgtctcggcgcgcgcccctctccggcgccgggagcggagcaccgcgacggcgtggcaggcccagtcccatgagttgagcagcatgtaggaggcgatgccgccgatgaggccgtaggcgatggagtaggtgagcggcatgagcgccagggtgaggaacgccggcacggcctgcctcatgtcggccc

SEQ ID NO: 420427 - DNA, 404 bp, Oryza sativa
tctctgacgcgtgggcggacgcgtgggcgtcgacgctcgtcacgctcggcgcgtgcccggcgtcgcagcgcgcgtccgtggcgccggtcgtgacgttccccaatggcacggtggcgctcatgccgggcggcaccgtctccggcgggatactctgcctgtccggccggatgacctccccgaccttctggctcgccgtcgtcggcttcctcatcatcgccttctgcctcatcaagaacgtcaagggcgccatgatctacggcatcctcttcgtcaccttcatctcctggccgcgcaacaccgccgtcacggtgttcccggacacgcccggcggcgacgagagctttggctacttcaagaaagtgttcgacgtgcaccgcatccagtccaccgccggcgcgctcgac

SEQ ID NO: 420428 - DNA, 464 bp, Oryza sativa
ttttggttaacttgctcggtatggattttgtttttaggttcaaacaatacaatctaattgttcatactaatatgcatatttacatatgttctcaaatgtgcccgcaacgaagctcggggtttcatctagttattagaaagctatattccaccgatccaacaccgttacgacaacaatctcattctgacatcttgacagtgtcgatgactcgtgtccctcttgcaaaagtctcgtagaagccacttaagtagtccttgatcttcatcttggcatactgcctcggcctcttctcatcgtccaccagctccggcgccggctccagcgcgtagaacatcaccaccgacactcgctccctctcggcgttcgtcaccaccctatgcaccgggctctttaacaacccattgctcattatctccattccatcccccatgttgatgagcagagcattggggacgacgggcaca

SEQ ID NO: 420429 - DNA, 511 bp, Oryza sativa
ctggaacattgtcaagataccgccgattgtgcaggagctcgccgccggcgtccatgagccgccgagccagtacatggtcggcgagaaagaccgccctgccatcgccggctccgacatgcctgagcccatccccgtcgtcgacctcagccggctgtctgcctccaatggtgaagacagcgccggcgagcttgccaagctacgctccgccttagaggactggggcctcttcctggtgcagggttatttggtactataatggaggggagcattctcagtgagatgatcaatgtgacaagaggattctacaagctcccactggaagagaagcagaagtactccaacctggtgaacggcaaggatttcaggatcgaagggtacggcaacgacatggtcgtgtcagagaaacagatcctgaactggtgcgaccggttctaccacatcgttgagcctgagtcccggatagcccatagcctctggccacacagccctctttttcagagatgttctgcat

SEQ ID NO: 420430 - DNA, 339 bp, Oryza sativa
tggagttcctgatcgatgtcgcctgtgatcagtgagatcctcctctcggggtttatgatcaactccacactccggcgccgcacccatctcgtccagtctttctccgtcgtcttcctctactggttctatgtcttctcataagctactcgccatccatttccctctcctcctctctctctagcttccttctacaataatcgatctcgtgttcgtcgtcgtcgttcttgtcgatctctgtgtgtgttcttcgtcgtcgtcgtgttcgttttggattttggtttcagtttagtatatgcacttcttgttcttcactgctgctgctgctgctaaagcttgtag

SEQ ID NO: 420431 - DNA, 300 bp, Oryza sativa
cctgcacgtacccggccttcctggctggacccacgcgtacttgattttggctccccaagctggcgcggctctggttgtaccttaaacaaatgtctcttcctcatgatggatgctgtaggcaagacatacactggcatgactgctcaccttggggtggcccctctgacaccatcgatactgcaaaggctgagatccaagataaggagggcatccgcccggaccagcagcgtctcatcttcgctggcaagcagctggaggatggcaggacccttgctgactacaacatccagaaggagtcga

SEQ ID NO: 420432 - DNA, 447 bp, Oryza sativa
aattaactagcatatttaaatttaaaacgtaactgtttgagcaaataccacgaaatgttcaggcgctaagatacggcaataccgatacatccagcatagcaaaaatggcgaagagcacagagtcagataaagctatagagaactagggctccaggagatgggggccgaatgacaaccatggcgcttagtcgacctcctccatcttgctctcgccggcgtcgtcctccagcggcggcatgtcggcgtcagcctcagcagactcgtcctcgtcgatgctcaggccgagcttgagcatccggtggatcctggtgccgaaggtgttggggtcctcaaggctgaagccggaggtcaggagggcagtctcgaagagcagcatcaccaggtccttcacagacttgtcgttcttgtcagcatcggcacgcttgcggagctcgtccatgatggaat

SEQ ID NO: 420433 - DNA, 351 bp, Oryza sativa
cgccgcagccgcagcctgattcgcgcgtcgtctactccgaccgcgagcttgtgttcttttcggcgagagatcatgatcacgcacggctcgcatgacaaagcttcacgagaccgagacagttcaactcttcaggccattgatcaaccagcgtgctagccctcatgatgaacaccgtgtactctaacaaggagatcttactgcgggagatcatttccaactcctccgatgcattggataagattaggctcgagagcctcacggacaagagcaagctcgatgcgcagccggagctgctcatccacattgtacccgacaaggctagcaacaccctgacgatcatcgacagtggtg

SEQ ID NO: 420434 - DNA, 449 bp, Oryza sativa
aagcaacatagctagcacaacaatttcatcattatctttctccagccatcacaaagcaaattaatatcgttccaaacatttaaggagctcatgaatccaataatccggaggtttttttaaaaggactcatctcaacatccataacaagcaaacgatagttgtttccgacaccaacattagaccataacgagtcaactgacaaccatagactagaccaaaaataccgcggactgcatagataaaacatcagtgtcgagcagaaggaaccgctcagcacttgacctccttcagcccatgagagaagtaaaggaaggttgggtcggtggctccgtccttgtagtaggcaaacaccaagccgccatcatcatgcatgctctcaccaacaaagaactgaaggtccttgagctttccaagcagtacttggtgcaccctcaatgtctttctgaatc

SEQ ID NO: 420435 - DNA, 448 bp, Oryza sativa
tcggtcgcgtgggccgcgccgctactcccccctcgccgagagagctctagggtttccgctgccgaatttttttttaattcggggggagagatttgaagaggcggcaccatgttggtctaccaggatctgcttaccggtgacgagctcctgtcggattcgttcccctacagagagatcgagaacggcatcctctgggaagtcgatggcaagtgggtcgttcaaggagctattgatgtggacattggtgccaacccatctgctgagggtggtggtgatgatgagggttgttgatgaccaagctgtgaaggtggtcgacattgtggacaccttccgtcttcaggagcaacctccttttgacaagaagcagtttgtgaccttcatgaagcgctacatcaagaacctcttcggcaagctggatgcggaaaagccagaggaattcaggaagaac

SEQ ID NO: 420436 - DNA, 385 bp, Oryza sativa
agcgctatcaaaggagcatatattattcaatcttgatgaaagagggacacaagccatcatctatagtgatggtgcctcttacaaacttcaacacacgggtaacaagcatacactcaagagtcaacgacggtggcctaggttcttgtgagtacaatggaacacgcaggcatgtacacaaccaagtatactccaccccaaactatagcctttgcaatggctttggcagctgctcagaaaccatgaatctcgatggggtccttcttcacaatgccggcctgaacaagaaaatttgatacgctcttcctctgaacaccctgaagttgaatgacctggccaagctttgggggctggacaacagtaccattggagcaaaactctttcttga

SEQ ID NO: 420437 - DNA, 436 bp, Oryza sativa
tggacgcgtgggcggacgcgtgggcggacgcgtgggcggacgcgtgggcaagccaagaagagggagagcaccaaggacacgcgactagcagaagccgagcgaccgcctcctcgatccatatcttccggtcgagttcttggtcgatctcttccctcctccacctcctcctcacaggttcttggtgtagcttgccactttcaccagcaaagtttcatgtctgatctcgacattcagatcccaactgccttcgatccctttgctgaggccaatgctggagactctggtgcggctgcaggatcaaaggactacgttcatgtacgcatccagcagcgtaatggccgtaagagcctgaccactgtccagggattgaagaaggaattcagctacaacaagatcctcaaagatctcaagaaagagttttgctgcaatggtactg

SEQ ID NO: 420438 - DNA, 470 bp, Oryza sativa
cttgctgattattggttttggcattatttggtgaagcatttctgcttgtaccttaaacaaaggtctctgttgtcttattggtgctgaaggcaagatatacactgcagtgatggctcaaacttgcttgccacctggctttcgttttcatccaacagatgttgaacttgtttcatactatttgaaaaggaagattatgggaaagaagcctcttattcaagctatatcagatgttgaactgtataaatttgctccctgggatcttcctgctcaatcctgtctccagagcagagatcttgaatggttcttcttttgcccacgagacaagaaatatcctaatgggtctaggacaaatcgttccacaccaaatggttactggaaaacacgtgggaaagatagaacgattgagcttaactctcgcattgctgggtcaaagaaacactgattttcatgaagcaaacacctaaaggcac

SEQ ID NO: 420439 - DNA, 482 bp, Oryza sativa
tcttgtaaatctagcttgctgtaaacacagttagttcgtaattatcgcatagggccatggggaagtacagtgtgggtctcgtggttttagggttgctggcccttgcgttttcgaccactgtgctggctgaaacacatgttgttggtgactccaacggttgggacttctctgtgtcgtttgatagctgggctgatggaaaggtcttcgctgctggtgacactcttgttttcaactacaaaccgggcgcacacaacgtgctggccgtggacgcggcgacgtacaggagctgcaaggtgggcagctcggcggactcggtggcggcggcgacggggaccgcgtcgttcctcctcaagaagggcgttaactactacatctgcggcgtccccggccactgcgccgccgggatgaaactccgggtcgtcgccaactgatgaaactccggcgacagatcaatccctttaataattaaaactatgtgggtg

SEQ ID NO: 420440 - DNA, 484 bp, Oryza sativa
tcgcacagtagtttgtcagtcgccgcctccaacaatggcgaagccgacggtggtggtgctgcccgtgtggggcgccggccacttcatgcccatgatcgaggccggcaagcggctgctccgcggcagcggcggcgcgctgtcggtcaccgtgctcctcatgccggcgccgacgccggatgcggcggtcgacatcgcggcccaggtgaagcgcgaggaggcctccggcgccgacgacatcagcttccggcacctccccgccgtcgacatgccgaccggccacaccggcgtcgaggagtggatctcccgcatactgcggagccacgcgcccaacgtgagggccgccatcgccgggctcgactgccccgtggccgcgctcgtcaccgacatcttctgcacgccggcgctcgaggtgtcccgggagcttcgcgtgccgggctacgtgtacttcccctgcagcgcgttgatgctggcgctgctgctgcgc

SEQ ID NO: 420441 - DNA, 511 bp, Oryza sativa
  unsure (1)..(511): unsure at all n locations
gttctatcataacatcacctcaaacactttagttgtgctagaggctatggcagcacacaatgtgagaaccctgatctactctagcacatgtgccacctatggagaacccgagaagatgcctatcaccgaaggaactccccagtttccgatcaacccatatggtaaagccaagaagatggcagaggacatcatcttggatttttccaaatccaagaaggcagacatggctgtgatgattctaagatacttcaacgtcattggttctgaccctgaaggaaggcttggcgaggctccaaaacctgaattacgggagcatggccgtatatctggtgcatgctttgatgctgcactggggataattcctggtttgaaggttaaaggtactgactatgaaacacctgacggtacttgtgtaagagattacatcgatgtcactgacctcgttgacgcccatgtgaaggcgctcaacanggcngaaaggggcaaagttggcatatacaatgttggcaca

SEQ ID NO: 420442 - DNA, 512 bp, Oryza sativa
gcttaggcggcggcggcggcggcgcgaggtgagcggggcaccagcggcggcggaggagatggggaaggcctcgaaggggtcgcggagagggaagaaggcgtggcgcgccaacatcagcaccgacgacatcgaggacttcttcgagaagcagacgcgcgacgcgcacgccggggccgccgccatcccgtccctgccctccgactccctcttcttcgtcgacaagccggcctccgccgcgtccacctcctccgccgccgacgccgtcgcggcggatgtcgcccccaaagatattcctgtccaaaggaagattgagaagaagagagagaaggttctatatcatgagagtgtattgaagcggaatccatatgtacaaccagtcccgttttctttaacgacaaagaaggatatgaagaagtcaaagaagaaggaatcgaaagagacacaggaagcgaaaattgttccatggaagatgttcaagtgataagatccttgacatctggggtcaagatgtt

SEQ ID NO: 420443 - DNA, 445 bp, Oryza sativa
ctgaatttgcctatcgcaacgaaatgccctccagaagtactcctgtgaagaggaaagtggtcgaggccactaacatagcggaagcatctattacaatagatgggatgtataatgtagttgacccagcatttgcaaaactcaatgtgtgtaacccaaaacagggcctggattcactgatcatcacaccgatatctcaagcatcagctaaacacagggcatgggcgagctggacgtacaggcccaggatagtgcaattgtctatacactgaaagagcctatcgcaacgaaacgccctccacaactactgcagaaattcagaggatcaactcgggggagacggaactcaatatgaaggcaatgggaataaaccaactattgtcatttgactgcatggacctcgcagctccttaataactcataactgaattggaacaactgtacaacc

SEQ ID NO: 420444 - DNA, 483 bp, Oryza sativa
tttgcttttcctgcttccatcacgttgtctcgagaaagattggagtttttggaggtttgggttgagcgactcttgtttttgtcggcgcaagcgcatgactgtttctggaacatagtgagcgcgagaaagagatattgtgttagttggagttcgccttatggtgaatcttcgattcaagtctggagatggcgcgtttttaggaaaccaaggagaggaatgatcaaagacctgttgctgatcatgtagagcaccaagacctgatgcaaaacctgacacatcctcatgattaccacgacatggacaagatggtcaaagcgcgaatctaaaggtgctgaagccatacacgataacgaaactaaggttgaaattaaccatggtactacattagatgatcttggaagcccttgagttatatggcttgcattagtacccagctaatatgtaggcaggccttgcctattgctctgacgcctaaataaaacc

SEQ ID NO: 420445 - DNA, 505 bp, Oryza sativa
tctctatgtctcctccgcatcaccaccaccgccgccgacgagctccggtcgccgccggcgagaggcgccgcgcgatccgggagatgccgccgctcacggggcccaagtccggggacgctctcttcggcagcgtcgagcgcgtcaacgcggagctgttcacgctcacgtatggggccatcgtgaggcagctgctcacggatctggaggaggtcgaggaggtcaacaagcagcttgatcagatgggctacaacattggaactcggttggttgatgagttcctggccaaatcaaatgtatcaaggtgtgttgacttcaaggagactgccgatgtcattgcaaagcttggattcaaaatgttcttgggtgtgactgcaactgtcaccaattgggatgctgagggtacaagctgcagctttgtattggaggacaatcctcttgtagattttgttgaacttgctgatacttgccaggtcttcagtactgcaatgtgctaagtggagttatt

SEQ ID NO: 420446 - DNA, 507 bp, Oryza sativa
caagaagcaattcttgagctcaatcagcaacaacatctatctccttcttgcttagttaagtccttcgccctcccaagaagaagaagatgtcttgctgcggcggcaactgcggctgcggcagcggctgccagtgcggcggcggctgcggcggatgcaagatgttccctgatgtggaggccacagccaccaccaagaccttcgtcctcgctgctccatccaacaaggcgagctctggaggaatggagatggcggtggagagcggcgagaacggcggctgcggctgcaacacctgcaagtgtggcaccagctgcagcggctgctcctgctgctcctgcaactgaatctatcgtcgtcgtcgcccggctgcatgaggatttatcgtatggatgctgctactgtcgatcagagctttgatcgaggccttaatttgcttgcattagtacccagcttatatgtaggcaggccttgccttttgctctgacgcctaaataaaaccgtccgtcgtcg

SEQ ID NO: 420447 - DNA, 485 bp, Oryza sativa
cttgtaatctatgtcctgaaggcatcaaatattccagggagatttaagttatcacctatttgcaatcataatgcacaacacatctaaactgaaccatggttaaattacataaagtacaagcagctcctcgctagcgtgaagttcgaactaacatgacaaaactgttttccccaatgtaacaacatttgcaattttggagtcacggtacagctcaagcgagctaacctagatgagcttcttcttctggaagtacccttgaaggtgccacaattgcaaaattgaaaccacaatgcagacgcttagtgacaaaatactgaaccaggctaccctagcgtttgttttctcgctcactgttcgcatctctgcttcccttgctttgagatatatcatgttctgatggatggattggactgccacttcaagttttctaagctctagttctacaccctcaattttttccttcttagcgataacatcccaatcct

SEQ ID NO: 420448 - DNA, 437 bp, Oryza sativa
cctcctctcgccttctcccgtcttctccttcgagttagctacctccttattcaaccatgggtaaggagaagacgcacatcaacatcgtggtcattggccacgtcgactccggcaagtcgaccaccacgggccatctgatttacaagcttggaggtatcgacaagcgtgtgatcgagaggttcgagaaggaagccgctgagatgaacaagaggtccttcaagtacgcgtgggtgctcgacaagctcaaggccgagcgtgagagaggtatcaccatcgatattgccctgtggaagttcgagaccaccaagtactactgcactgtcatcgatgcccctggtcaccgtgacttcatcaagaacatgatcacgggtaccttccaggctgactgtgccgtgctcatcattgactccaccactggtggttttgaggcttgtatc

SEQ ID NO: 420449 - DNA, 467 bp, Oryza sativa
  unsure (1)..(467): unsure at all n locations
gcatgttggcacaccatggccaggaaacaatactagggaccatcctggaatgattcaggttttccttggtcacagtggtggccttgataccgagggtaatgagcttccccgcctggtctacgtatctcgtgagaagcgtcctgggtttcagcaccacaagaaggctggtgccatgaatgctcttgttcgtgtctcagctgtgcttaccaatggacagtacatgttgaatcttgattgtgatcactacatcaacaacagcaaggctctgcgggaagctatgtgcttccttatggatccaaacctaggaaggagtgtctgttatgttcagttcccacaaangttcnatggtattgataggaatgatcgatatgcgaacaggaacactgtgtttttcgatattaacttgaggggtcttgatggcatccaaggaccagtttatgtgggaactggttgtgtattaacagaac

SEQ ID NO: 420450 - DNA, 506 bp, Oryza sativa
cgtggagatagcgcaagagaggagagggtttctgcgacggcgatggcggcggcggcgaacctggaggacgtcccgtccatggatctgatgaacgagctgctacgccgcatgaagtgcagctccaagcccgacaagcgcctcatcctcgtaggtccacctggctctggaaagggaacacaatcgcccattattaaggatgagtactgcttatgccatttagctacaggtgatatgttgagagctgctgttgctgctaagactcctttaggagtcaaggcgaaagaagcaatggacaagggagagcttgtttctgatgacttggttgttggaattattgatgaagccatgaagaaaccttcatgtcaaaagggtttcattcttgatgggttcccacggacagttgttcaggcacagaagcttgatgaaatgctggaaaagaaaggtacaaaggtcgataaggttcttaactttgccattgatgattcaattttggaagaaagaattac

SEQ ID NO: 420451 - DNA, 292 bp, Oryza sativa
atttctctccatctctggttatactatacccctggggggtttatagagagtgtctgcgccgtttcgaccaccatcacttcactaatctatcctgctaccacgttgcttccctcaacaatgcaagagggccatgcctggactgttggtttgaaggctgtgacaacatctgcgacagctgatggaattgaagaatgccgaaaactctgtggtggacatggatacctgaacagcagcgggcttcctgaattgttcgctatctatcttcctgcttgcaccttatgaaggagacaat

SEQ ID NO: 420452 - DNA, 396 bp, Oryza sativa
ctttcctttgctggcttcagcttatgcatttaggtttgtgggtgagtggctgaagtggctgtacacggatgtcacacataaactggaagccaaggatttctcaacacttcaagaggcccatgcctgtactgctgggttgaaggctgtgacaacatctgcgacagctgatggaattgaagaatgccgaaaactctgtggtggacatggttacctgaacagcagcgggcttcctgaattgtttgctatctatgttcctgcttgcacttatgaaggagacaatgttgttttgctattgcaggttgcaaggtttctaatgaagactgtatcccagttagcttctggaaaacagcctgttggtacaacggcttacatgggcaacatacagtacttgatgca

SEQ ID NO: 420453 - DNA, 464 bp, Oryza sativa
cagcttcctcttgttttttttggccgaaccccccctcgacacgccgtcgccgtcgaggggagagagagtgaggccgccggccgccgctaccactgacccctctcccttgtcggtgcgccccgtttgtcggtcgggtttgatcgatggtgtccaagaggatcctgaaggagttgaaggaccttgcataaggaccctcccacctcatgcatcgcaggtcctgtgggtgaggacatgttccattggctagctactattatggtaccctcagacagcccatttgctggtggggttttcttggtgaacatttattttccaccggattatccttttaaaccaccgaaggtttttttccgcaccaaggattcccacccggacattaattatcatggccagcatttggctcgacatcttcaatgaacagtggagttctgcacttaccatttcaaggtcctcctgtcaatttg

SEQ ID NO: 420454 - DNA, 321 bp, Oryza sativa
gccctcacccgttgccgaacctgcggggggtcctttttatctccatggagagcgtgaaggcccgccacacctttccattcctgctaccctgctcgctaggttgatatttgctgctcggatggaacatttgcgagggctgctgtgcctagcggtgcatctactggtgtatatgaagctttggaattgagggatggtggttctgattacttgggaaagggtgttctcaaggctgttgacaatgtgaactctattattggaccagcattgatcggcaaggaccctacagaacagactgccactgacatcttcatggttcatcac

SEQ ID NO: 420455 - DNA, 408 bp, Oryza sativa
tttgttatgtgaactcggcctccaatcctgacgggggagtcatatgaagggataggcaggtacatatgatgaggcttattgcccctaatcattgtatgcttccctagttttatagtgcttttcgcccccaagccatcttttgtttatcacaagatcatggagcgccagcctcttattctcataatcaggaacaggttcaagtatgatctgacataccaagaggttatttctatctctcattgcagtgccacgtcttggatgatgtgctaggtcacctactgacaagacctacccagcctgttacaatgaatggaatttccatccacaagacttgagcgaactacatgcttatgtacgactaccaaaggacaatcctctacattatatctttataggctaaaatactaa

SEQ ID NO: 420456 - DNA, 429 bp, Oryza sativa
atcgtatcccaggagctccaggaaaggaaaagcatgcatatcattcgacaataccagctgcctctgaagaaatacatggctatgatggacctccatgaggggaatgagaggcttttctacaagctcttcattgacaatgttgaggagctacttactgtcggttacactccaacagttgatgaggcctgccaaaagtatggatccatatttagccgtcctcatggtctttatatcagcttgaaggagaagggaaagatccttgaggtgctaaaaaactggccagagaggagcattcaggttatcgttgttactgatggtgagcgaattctggggcttggagaacttggctgccagggaatggggatccctgatgggaagcttgccctttacactgctctatgaggagcgcgtacatctgcttgtctgcca

SEQ ID NO: 420457 - DNA, 465 bp, Oryza sativa
  unsure (1)..(465): unsure at all n locations
atccccttccccgatctaagatccatccgatccaggccatggcggcgaccatccagagcgtgaaggcccgccagatcttcgacagccgtggcaaccccaccgtcgaggttgatatttgctgctcggatggaacatttgcgagggctgctgtgcctagcggtgcatctactggtgtatatgaagctttggaattgagggatggtggttctgattacttgggaaagggtgtcctcaaggctgttgacaatgtgaactctattattggaccagcattgatcggcaaggaccctacagaacagactgtcattgacaacttcatggttcagcaactggatggaaccaaaaacgagtggngctggtgcaagcaaaagcttggtgctaatgctatcctggctgtctcacttgctctatgcannagccgagctattatcaagaanattccgttgtatcaacacattgctaacc

SEQ ID NO: 420458 - DNA, 277 bp, Oryza sativa
tttcttgtgggcggacgcgtgggttgtgcaccatggccattgtcggatttgatgggcctgctgcaaagcttgccaaaagaaagagaaagaaccaatttaggggcattcgccagcgcccttggggtaagtgggctgcagaaatcagagatcctcgcatgggtgttcgcgtctggcttggctctttcaacagtgctgtagaagctgtaagagcttatgatgctgaagcactcaagatttgtggtaagaaggccaaggtgaattttacagaagcttcaac

SEQ ID NO: 420459 - DNA, 512 bp, Oryza sativa
acggttttaagttcaaaaatgagaggagcagatccatacaaggcgagccttcgagctactcctttgccagccttgtctcgacttccggttctagaccaccttgcgcgggagccagagccactcgagctgtgcttctcccccctccaggagatacgcgccctccggggatggacaccgtataaaagatcgtcgaggacttcggctacgacatggccatgggcccgttatgctccggcacggaccgttccggacatgatacgggcgatacgcgcgtgcaggacggcggaccgaggagcgggccgaggcgcggcggtagtgcgcggcgatacgagaggccatcggcgagaaccagcaggagatccggcaccggaacatggccaagctcatgttcatccatatgctcggataccccacccacttcggccagatggagtgcctcaagctgatcgccgtcgcgtgatacccggagaagcggatcggctacctcggcctcatgctgcttctcgacgagc

SEQ ID NO: 420460 - DNA, 275 bp, Oryza sativa
cggacgcgtgggcgccgccacacacccccaaccaagcttacaccagcgcgaagcggcggcgagagggcgagatggcgcgcggcgtggcggtggcggctaagggcggtgcgggcggcaagaagaagggctccgtctcgttcgtgatcgactgctccaagcccgtggaggacaagatcatggagatcgcgtcgctgtagaagttcctgcaggagcgcatcaaggtcgccggcggcaaggccgggaaccttcgcgactgcgtcaccgtcacgcgcgac

SEQ ID NO: 420461 - DNA, 495 bp, Oryza sativa
ggaatagggaagcgagggcggagtacggcgcgcttcgccgttgccggaggcggcgggggtgagggcagcgagcgatgccggtggcgaggccggagccgcaggagccgcgggtgatcgcccatgtcgacatggattgcttctacgtccaagttgagcagcggaggaacccggagctcagggggcagccgaccgccgtggtgcagtacaacgactggaaaggcggcgggctgattgccgtcagctacgaggcccggaagttcggcgtgaagaggtccatgcgtggtgatgaggccaagatggtctgtccaagtatcaatttggttcaggttccggtggcccgtgacaaggccgatcttaatgtttaccgtagtgctggctctgaggttgtcacaatcctctcgaccaaggggaagtgtgagcgagcatccatcgacgaagtttatcttgaccttactgatgcagccaaggaaatgcttttagaatctccaccgggag

SEQ ID NO: 420462 - DNA, 349 bp, Oryza sativa
ctcatgcagcagcagtcgctcaagcacgtgcgcgtgtacgacaccaacatcgacgtcatcaaggccttcgtcaacaccggcgtctagctcatggtcgtcgtccccaactctgaccttctccccttcgcgcagtaccagtccaacgtagatacctgcctcaagagcagcattctgccctactacccggccaccatgatcacctacatcaccgtcggatcctaggtcaccgagagccccgtcaacgtgtccgccctcgttgtgcctgccatgctcaatgcgcatactgccctgaagaaggtcagccttgccaagaagatcaccatcttgagcacgcacttgctcgggatac

SEQ ID NO: 420463 - DNA, 220 bp, Oryza sativa
cttatctttaacccgatgtggaaccagctttccgtgcgggattcatagatctattcgtgggatccaaaccccacctacatccatgagccttcatactatcaggacatgactatgtcctcacttggtccccatggggtgaagaatgcctactgcttactgtatctttgtggtcagaattacctacacaccatatattcaccaccaggtagtatttacatta

SEQ ID NO: 420464 - DNA, 307 bp, Oryza sativa
cggacgcgtgggcggacgcgtgggcggacgcgtgggcggacgcgtgggccttctcctccggctcttcttcagtatcgaatcctctcttctcctcgtgcccaccaccaccaccgtagcaatggcgggcaacgggccgatcaacaaggaggacccgctcaactggggcgcggcggcggccgagatggccggcagccacctcgacgaggtgaagcgcatggtggcgcagttccgcgagccgctggtcaagatccagggcgccaccctccgcgtcggccaggtggccgccgtcgcccaggccaaggacgcc

SEQ ID NO: 420465 - DNA, 515 bp, Oryza sativa
cttgtatctttcacaggccgagaaggacttgcagccctggattgctcgagatgatgagcaaggtcagaagatgtggagagtcaaccagcgaatagttaagctgatagcagagcttatgaggaaccacgatagcccagaagcattggtgatccttgctagtgcttcagatcttcttcttcgagcaactgatggaatgcttgttgatggtgaagcttgtactttaccacaattagagctattggaagtaaccgccagagcagtccatctcatcgtcgaatggggagattcaggtgtatccgtcgctgatggcctctccaatctgctgaagtgccgtctatcaaccaccatccgctgtctttcgcaccccagcgcgcatgtccgtgcactcagcatgtccgtccttcgcgacatcttgaacagcggacaaataaactccagtaagctcatccaggggaacaccggaatggcatccagagcccaacctaccagtgcttggcagcaagcatcatcaactg

SEQ ID NO: 420466 - DNA, 516 bp, Oryza sativa
gagaaggttacccttctcaagaccaagtttggctttcacgatgcattcaactacaagaaagagggcaacgaccttactggtgctctccggcggtgcttcccagatggaatcgacatctactttgacaatgtcggcggtgcgacgctggatgcggcgctggtcaacatgcggcgtggtggtcgagtggtggtgtgtgggatgatctcacagtacaacctgcaggagcccgaagggatgcacaacgtgatacagatcctatccaagaccatccgggtggagggatttgccgtattcaaccacttcggcttatacccgaggtttgaggatgagatggctaggtacctaaaggaaggtaaggtgaccgtcctgcaggatgttgtcaagggcatcgagaaggcatcggaggctctcattggcatgttttctgtgaggaatgtgggcaagtttgtggtggctggtgcagatgaatgactctagataataataataggcagttatagtactgttatagaataa

SEQ ID NO: 420467 - DNA, 490 bp, Oryza sativa
gtgaaggttacccttctcaagaccaagtttggctttcacgatgcattcaactacaagaaagagggcaacgaccttactggtgctctccggcggtgcttcccagatggaatcgacatctactttgacaatgtcggcggtgcgacgctggatgcggcgctggtcaacatgcggcgtggtggtcgagtggtggtgtgtgggatgatctcacagtacaacctgcatgagcccgaagggatgcacaacgtgatacagatcctatccaagaccatccgggtggagggatttgccgtattcaaccacttcggcttatacccgaggtttgaggatgagatggctaggtacctaaaggaaggtaaggtgaccgtcctgcaggatgtttgtcaagggcttcgagaaggcatcggaggctctcattggcatgttatctgggaggaatgtggtcaagtagttggtggctgttgcagatgaatgactctagatattaataata

SEQ ID NO: 420468 - DNA, 264 bp, Oryza sativa
gtctgtcttcgccgtcgaagccgatctcctgcgcgcggagcggatcgcctctgtcagtcaccagctatacagtatgagttcactggagagtgcaagagcagatcttgctctgcttattttatacctaaacaaggctgaagcaagagataagatctgtagagctatacaatatggctcgaaatttgtgagttatggacaaccagggcctgcacagaatgtagacaagtcgactagtctagctcgtaaagtctttccactttttaa

SEQ ID NO: 420469 - DNA, 366 bp, Oryza sativa
tcagaccccattaagctcggcatggccgttgttgagcggctgaatgctctccagcagcagtcagggcggctcgcctacctccacgtcacgcagccacggtacaccgcctacgggcagaccgagtctgggcagcatggcagtgccgaggaggagagccgcctgatgcgcaccctccggggcacgtaccagggcacattcatgtgcagtggcggctacacgcgggagcttgggttggaagcagtggagagcggcgatgccgacctggtgtcgtacgggcggatctttatatcaaacccggacctggtcgagcggttcaggctgaacgcccgtctgaacatgtccgtgcgtaaggaatttttcaccccc

SEQ ID NO: 420470 - DNA, 329 bp, Oryza sativa
cttgccctctacatattctgcagaagctcagggaatagcattgtccaggcatatgcaaaggaccattacttcgatgtcgtaaccaatgttgttggtttagtggctgctgtgcttggagataagttcttctggtggattgacccagtaggggctgtgctacttgctgtgtataccattgtgaattggtctggaactgtatacgaaaatgcagttacactggtgggtcagtgtgcccctttagatatgctgcagaaactgacataccttgccatgaagcacgatccacgtgtgaggcggtttgacacggttcgagcttacagctttggagc

SEQ ID NO: 420471 - DNA, 229 bp, Oryza sativa
ggatggttgaaatctatttggatttgaagtctatgcaaccactttccagtaagaaagaaaatgatgaagttttcatcaaactgggatctgacaaggatgctttgaagaagaaagaaaatgctgaacgtgatgagcgtgctaagaagtctgtgagcatcaacgagttcctaaaaccagctgaaggagagaggctctatggcggtcgtggtcgtggcaggggccgcgggga

SEQ ID NO: 420472 - DNA, 362 bp, Oryza sativa
ctcctcccctgcttcgttgcctcgtgctcctccgccgccgccggagaagctccaagcctcctcctcctccgggccgccgggaatggcggggaagcaaggagatgggcgcgaggaggatggcgctaaggtcggcctcccggcgctggatatctcgctcgcgtttccgcaggccacgtccggcatccatcttcccgtcattagcattggactattatcagattgatgatttactcaccactgaagagcagtctatcaggaagaatgtcagggctataatggagaaagaaattgcacccatcatggcaacgcactgggagaaagcagagtttccattttatgccattcccaaacttttcaagcct

SEQ ID NO: 420473 - DNA, 175 bp, Oryza sativa
ttcactcgtccgctaccttctcctccggctcttcttcagtatcgaatcctctcttctcctcgtgcccaccaccaccaccgtagcaatggcgggcaacgggccgatcaacaaggaggacccgctcaactggggcgcggcggcggccgagatggccggcagccacctcgacgaggtg

SEQ ID NO: 420474 - DNA, 424 bp, Oryza sativa
gctggcacgccggcagcggccggtgccggaattggccgggatccggcgccatggtcatcgcagtcgccgcctcccccgctcagtcccgcaagactgagacctacaccgacaccaagcgccgggatgacgtccgcggccttaacatagccgccgcgcgcgccgtcgccgacgccgtgcgcacctccctcggcccccgtggcatggacaagatgatctcctccggcgagcaggaggtcatcatcaccaacgacggcgccaccatcctctcccgcatgttcctcctccagcccgccgcccgcatgctcgccgagctctcccgctcccaggacgccgccgccggcgacggtaccactaccgtcgttgtccttgccggatctctgttccgccgtgctcaatgcctactctatgctggtgcccaccctac

SEQ ID NO: 420475 - DNA, 169 bp, Oryza sativa
ctgggtagtaacttctgtgagagatggagtactcttacagctacaggttcatgcttgtatgctcagttcttgtactgtgccttaatactcggggtgcgagatgccagttattcgacgatttctacgactacatatgtactgatgtgtacaccttttttcatgcttttgt

SEQ ID NO: 420476 - DNA, 310 bp, Oryza sativa
caccacacctaaacccttctttcttctcctcctccgccgccgccgccctcccctctcgccatggcgtcggagaagaagcagtcgaacccgatgcgggagatcaaggtgcagaagctcgtgctcaacatctccgtcggcgagagcggcgacaggctcacccgcgcctccaaggtgttggagcagctgagtgggcagagcccagttttctccaaggcgaggtacaccgtgaggtcattcggtatccgtcgtaacgagatgatcgcgtgctacgtcaccgtctggggcgagatggccacgcagcttttggcga

SEQ ID NO: 420477 - DNA, 450 bp, Oryza sativa
gagggaccccaaaggcatttgatatatatttcaaataaaggtgttcaacacaagaaagctttagacccggcaatatagcccccgacccttggggattcaggggtcaacaaaggggtttatgatcgggtttacaaacaaacaaaaagggccggtatttcggttcccacaaaggataagggtaggtttttttaagcggctgaaaggaagggcttcccgggggccccaggagaggggggaccctgggaacccaggggcttagcattgaccccatcagggagggttttacccccgcttttaagccggacgtattcatcgggggtgaacttggggaaaccccactttttaccctgaaagaactttgggggaccagggaacttggacttggcacgacggagggcttttctggcatggaccggattggtggggttgcccccaccaaaaggagggccc

SEQ ID NO: 420478 - DNA, 451 bp, Oryza sativa
gaccaaagggtacagtaccgatttcattattccatttgcccatcgaagtgatatgatgcattgaaatctgataacttacataactaaaacgtagttgtttcaaatagtaaggcaaatcctatgattacaccataggaaaaactgctcattggaaagcctatataggaattatacatatagccaagaagcatcgtttttggcctagtcaaaatctggcaaaccatgacttgccgtagtatcatcaacaagcacaagctggtcgtctaatcgtccagctcaatgatcttcacaaccgaggaatcacccactttctggcagacaacaacgcgatcatgcgacttgatcacaccggaagctttgccatggtcaagagcaaccttcaaaactgactcattggtagcgctggtcgattcaactggatggcgaggatcagcaagcatcggaaagagac

SEQ ID NO: 420479 - DNA, 371 bp, Oryza sativa
aggtcaaaaccaatgcgtaattccattgaatttttgccgtttgacaaattaaagcatagagacaaaagaagaacaaaaactctgatgataggaacaagtagaggcttcaaaaatgttgttgttcagcaagcgaggcctagctcagtttgcaaccctgcagtttgtgcggatctggccgtcgctgccggtgagcacctggatggcgcccatcttgaccatggcctggccgaacttggtggcgaagaggtacatgttgtaggcgttctgcgccacgagcgcggcggtggcgttgtcggcggtgagcgtctggtcggaggcgaggacgccgcggccggcgaggaggttctggtagtagctggtgtcgaacgtgt

SEQ ID NO: 420480 - DNA, 416 bp, Oryza sativa
ggatgaaacggagtgatgcagcgtaacggggaagtgaaacagattacaaatcggagcaccaaacatagcaacgattcaacgaatgtaccaccaccacaccaaaaccaaagctaaaagagtcgatgatgatttgggtatgcagtaaaaatctgaactgtaaagcgacgagccggtgatgatgagcgtgagatttggcattggtttctttataggaaagcgtccatctcgagcaccttgaggacctcatcctggttgttcagcttggccacctcgatgggggtcttcccgtccagattctggggcgtgacagcagcgccatgcttcagcagaagatccacacattttttccgaccatatccagcagcgtaatgcagtggggtgttcttgttcttatccagagcgttttcagcagcacc

SEQ ID NO: 420481 - DNA, 460 bp, Oryza sativa
aatctaacatacgcaaactgatattatcacaatgttagccgatgacaatggaaagagtaatctaggtacaagcggatcattgacggtggagacaagacattggctgcaccacaacacccaccagtggcgccaacaaggagcgctatccgttataggacgagagaaaaagtaaaacatcacgatgtgaagtgaaactgaataattctagtagacgatgatgatgatggataggctccttaggacgcccgccgcccttagcgtcttgctgctcccatcttgtccactggaaggctcactcgtcatcgtcttcatcctcttcgctgccctcgtcgtcatcctcatcattgacctcggacttggacttgtcagattcctactcgtcgtcctcctcttcctgcttggcgggtgccttcttggcagtgctctcgcccttgttgtaggcagcaatggccttgttgtt

SEQ ID NO: 420482 - DNA, 439 bp, Oryza sativa
gtattataggatcaaaacatttttattaccacaactttttaaggatggaattgagtagcaatactttcaccccaaaatacagtttagcgacaatatcttaaaaaagccgcttgctttgccgccatggctggcaagctgagcagagcagctaacacaaagaacacgagatcactataaaccaaacggcaacgaacgaagaaaatccagggtcttttttgtctgaagatacacgaagcggttcggtttcttttatttttaggctcctttcctcctcgatgatgggtgtatggcaatggcaatggcgatgggaccttggcttaattgatgggaaggggctcgccgttccactccttgaggcagccgagcatggggtcgatgagcttgccctggctgatgccgaggaacaccttgttgcactcctcgccgggggacttgagct

SEQ ID NO: 420483 - DNA, 462 bp, Oryza sativa
aggatcaaaacatttctattaccacaactttttaaggatggaattgagtagcaatactttcaccccaaaatacagtttagcgacaatatcttagaaaagccgcttgctttgccgccatggctggcaagctgagcagagcagctaacacaaagaacacgagatcactataaaccaaacggcaacgaacgaagaaaatacagggtcttttttgtctgaagatacacgaagcggttcgttttcttttatttttagtctcctctcctcctcgatgatgggtgtatggcaatggcaatggcgatgggatcttggcttagttgatgggaaggggctcgccgttccactccttgaggcagtcgagcatggggtcgatgagcttgccctggctgatgccgaggaacaccttgttgcactcctcgccgggggacttgagcttcttgccggtgaggaatacgcagccgagct

SEQ ID NO: 420484 - DNA, 475 bp, Oryza sativa
aaaaacaggaactcaatgatcctatgcttcatggatctgcattataaaggacacatgctttcgaagttccagagtacttttgtgcagcacactaaatgtcactgcggttacttattaggggtaaaaggagaaaaagaagacaaaaaaccatcgctcatcaaaagatgtcacccctgcttgtaatcacgtactggctacagaacggtcatatagaaaccagaatccaaaattttaacttgtacagaactttaacattgaatagatcttatgaagccgactccttggcgatcttttcagctttagcaatgacttcctcaatgccttccaccatgtagaatgactgctcgggaaggtcatcatatttcccatccaaaacaccctggaaactgttgacgcttttctttaattccacgtacttaccatgagcacccgttaaaactttaccacatggaagggctggcttaagaaaccctgg

SEQ ID NO: 420485 - DNA, 418 bp, Oryza sativa
agatgcgaatcagccaccgacaataaataacactcgacacgtctattacttcaaatccaagctgcccattatgatcaagcacaatttacaaagcaggcacaagtttgcaactactgccacctagcacactgcacacgaggggaaagggaaggagagaagcatggcatcgaaaccctagagagacaggcctagttgctggtgaacttggtgaccgccttggtgccctcggagacggcgtgcttggcgagctcgccggggaggacgaggcggacggaggtctggatctcgcgggaggtgatggtgggcttcttgttgtagcgggcgaggcgggcggcctcctgcgcgagcttctcgaagatgtcgttgatgaaggagttcatgctcgacatggccttggaggagattccgatgtccgggt

SEQ ID NO: 420486 - DNA, 475 bp, Oryza sativa
tggctgcggcggcggcggcgaggggtgtgacgaccgtcgcgctcccggacctcccctacgactacggcgcgctggagccggccatctccggggagatcatgcgcctgcaccaccagaagcaccacgccacctacgtcgccaactacaacaaggccctcgagcagctcgacgccgccgtcgccaagggcgacgcccccgccatcgtgcacctccagagcgccatcaagttcaacggcggaggccatgtcaatcattcgatcttctggaataacctcaagcctatcagcgaggggggtggtgagccaccacatgcaaaacttggctgggccattgatgaggattttggttcatttgaggcacttgtaaagaagatgagtgcagaaggtgctgctttacaaggatccggatgggtgtggctagctttggataaagaggcaaagaagcccccaatggaaacaactgctaacaggaccct

SEQ ID NO: 420487 - DNA, 458 bp, Oryza sativa
gaattctgaacgataaacaccaggaaccggcgtttatttgaggcaagcactgcccaaaatctcgcaaaagtactgaaaccttagacatagtacacatccatggcaaacatggatgccaaatgacaactacagaaaattatcaaattcgaatgcagctgacggcttctcctgctgaagatgcatattttcccctccattacttggatgtgctctctccatcgacagccaatgggacggcgctggccaggctgcggtatttcagagcatagaacatctcaatgtaacggcgagtctcgcgcctctcaaggttgcttacgtacttccagaatccatatacaccagtcaaggtcatcagcctctcagagtacagcttccaggtgtacttctcgtaaatcctctgcagaccttcctgtgaaatattggcccagtaggttgaatcctgcttgcacttctcaaag

SEQ ID NO: 420488 - DNA, 471 bp, Oryza sativa
agcgcgggcgctgcaactgcttcaacggcagcaactacgaggagagtgacgacgaggagggcttcttcctcccctccgaccactcctccgcctccgcccccgccgccgccggcgacgccttggagtctctcaagggtttggtgcagagcgcgagcgtcgcggagcggaatcttctcgcggacgcgtcgaggatagcggagaggtgctgcaagggatccaagggcaaggcggagtgccgccgcgcggtggccgacggcctccgcgcactcggctacgacgccgccgtctgccgctcgcgatgggagaagacctcctcgtaccccgcaggtgaacatgagtacatcgacgcggtggtcggcgaggaggtgaggctcattgtggaggtggacttccggtcggagttcgaggtggcgcggtcgaccaaggcgtaccgggcggcgctgcatgcgctgccgccgctgttcgtgggga

SEQ ID NO: 420489 - DNA, 477 bp, Oryza sativa
cccaaactacagcggcaaatccatctaattaaacatcaagactcgtctcaacaacaacctgccacaattcacaaacagcaggctgctgcacaagacggtgtacacggttcattttatttgggtgttcgtttccaccatcagattgatataatacacgcgaacaagcagaaacattcggcaacaatttctccaggaaaatcgcggcctatttcgtcatcatcccgagcgagcgttatttggaagagggagtctttttcagacaggcacagcctcaatggcaggagcgagtgaccaacgtcgacgtcggcgtcctagtagccaccctggatgtaggcgttgagccggttcagctcttcccggtgctcgctgaccacggcgcggacaatgtctccaatggagaccatcccaaccatgcccctgccgtcgatcaccgtgatgtgcctgatgcgcttctctgtcatcagctgcattgcttgc

SEQ ID NO: 420490 - DNA, 486 bp, Oryza sativa
tctgttcgcaacaagcatggccgcggccatgtgaagtacatccgctgctccaactgcgccaagtgctgccccaaggacaaggccatcaagaggttccaggtgaggaacatcgtcgagcaggcggccatcagggatgtccaggaggcgtgcgtccatgacggatacgtcctcccgaagctgtacgccaaggtccatcactgcgtctcctgcgccatccacgcccacatcgtccgtgtccgctcccgcgagaaccgcagggaccgcaggccgccggagaggttcaggcgcagggaggataggcctactggacctcgccctggtggtgctggtggacctggtgcccctgctgctgctggacctggtggcccccctaatgttgctcgcacctaaacagccgtagtcgctcctttgttactctatatcatatcctgttaatggcgccatggatatcatcgttatggtctttcatgaggtcaaagtctttct

SEQ ID NO: 420491 - DNA, 208 bp, Oryza sativa
gtggtaagtactgaccaaaatttttcaaaagtactgaaaccttagacataggacacatccatgggaaacaaggatgccaaaggacaactacagaaaagtatcaaattcgaatgcagctgacggcttctcctgctgaagatgcatattaatgccctccattactgggatgtgctctgtaccatcgacaggccaatgggcacgggagctg

SEQ ID NO: 420492 - DNA, 454 bp, Oryza sativa
ataggatcaaaacatttctattaccacaactttttaaggatggaattgagtagcaatactttcaccccaaaatacagtttagcgacaatatcttagaaaagccgcttgctttgccgccatggctggcaagctgagcagagcagctaacacaaagaacacgagatcactataaaccaaacggcaacgaacgaagaaaatacagggtcttttttgtctgaagatacacgaagcggttcgttttcttttatttttagtctcctctcctcctcgatgatgggtgtatggcaatggcaatggcgatgggatcttggcttagttgatgggaaggggctcgccgttccactccttgaggcagtcgagcatggggtcgatgagcttgccctggctgatgccgaggaacaccttgttgcactcctcgccgggggacttgagcttctcgccggtgaggaatacg

SEQ ID NO: 420493 - DNA, 434 bp, Oryza sativa
agatattaaccgtactgaacaggtcgccctaggtattcttctgcagatgtcacagctaaaagcgatgtggcacaggcatatatgtaagttcgaaatacggatctatgaatacaagaaattgccatcactcgagcaaactcaagggtcgacggatggtagaaacaccacgacgaggaagatgcggatccgacggtaaattttcctcactccgaaagcgtggacttcagctctccactgttcttcaggtcaagaacgatgtcacaggctccaatcagttctgatttgcagtacagctgagggaacgtgggccacttggagtacgttttcaagccttgcctaaccttctaggaggataggatgcccaacgctccgaagctgactcctgcttgcttcagggcattcacaaccttagaactgaagccgcaacggggggc

SEQ ID NO: 420494 - DNA, 433 bp, Oryza sativa
aaccaaaacataggaggtttcatttcttcttctcaaagtagtgtagcatctttccttctttcaccattacataagcttaagcaataacagataacaaatcctcctcctcctttaggtaaaatattcaaacacaatacccttataagtacttattattaggaaagtagcgtgcatgggcataaatggcagcggggggcaggttaagaatcacaatgctgagcagcgaggaaacaaaacaccataatgggacagagcaaaagcctccgaaagggagcttttaggcagaaggcttctcccacttgaggggctttaccacctcccaggtgaagtctgggtcgtcccttccgaagtgaccgtaagccgccgtcttgaggtagcgtccgttgccgccttttttgaggccaaggctgatgatgatcatgccaggcctgaa

SEQ ID NO: 420495 - DNA, 469 bp, Oryza sativa
cgttcaaatacaaataaacctttactacgtacacaaaaataagttatcttcaagagagaaaacaaaactagaggtacaatcattaagacccgcaattcggctagtagaaaattcgaaacaaaaagctttcaaactgcacgggcaaacatccttgttgcccggtgaaacccaacacaacaatccattgcatacattaggaatgccctgatgcgatgccattgtctgaaaaaactgaccgactcagacgacctacactgcacactacctggacagatttcttccagtacaccaattgacttcaccttccgcattgccccatggccaacagccctcaggtgctactgaaaccatgggacgcatgcaaacaatctgcagatcacgtctcaatcagctgataatggtacaaatctgcccacaaacttagaagcacttcatgtggacgatgcctggaccagattcatcgtattcg

SEQ ID NO: 420496 - DNA, 428 bp, Oryza sativa
actcatcaaaacttgcacagtaaaaatggacggatgtactttgacatagcatatgtttcgccattacaagccgctctgcagttcaactacttcaagataagaggcactaatgacaggcatcactcaaaaataaactcaaactagcacttttgtgaaggataataagatgggatgaaaaatgcttccagaacaaccagtcccagtcccagtttttggataagtagcaacatccccttttgatattttaaatcttggtgaacgcaacgatgtcgcagctctggacaaattcgttgatcggcttttcagtcagatgttcttcgataaggctatccacagacaccaagtcatcaacaatggtcaacatgatctgcaactttttgatcccgtaacccacaggcacaagctttgatgctccccaggtgagaccc

SEQ ID NO: 420497 - DNA, 442 bp, Oryza sativa
agcgaacaaacagttcattgacaacattttgcaaagtaggtaggggtgctcaatcatagcagtagcacatggtgtccaaaccatttacacgaatagcattaacacacgtacaaagacttgggcacaatcaaatagagtttatgtccctaggagatttggcgaagctaacataacaagacacctttttttttaactttcacaatagcaaaccatgtagtacagaccataaggcagactccatcttaaaactgttagacttcttggttttcagaaaattccctacagtcatttgatctccatcttgcttttgactgtggggcagaaaccattctagttgcggtttttggacttatcaactgcccttggagcaagtccaattgcatctgaacctttcatgatcctgagtctgcgacaagagttggcaaacattttccatggaaca

SEQ ID NO: 420498 - DNA, 465 bp, Oryza sativa
aagcacaaccgaacaagcactgtttatttcatgaaattcttatggaagagattgtatcatgtattacaagtttacaacagcaaccacagccagataggtagaattaagcgcctgaacggaacatatggcgccttggacatttgaactcaattcacctaataggtaaaatgaaaagatagcctcaaagccgtaagttcagttcaaaactcaactcttctcaagcaatgaacctcatcccgttctaatcaatgattctacaagagaatcacacaatactaggtgccctttgcactattcggttgcgctaaccaggaggaactccccctcgcacactaggtcaccaccaacgtaagcttttccttccatcttggcaagaccaaatcttttctgatacttggtcagagtcattctcatgatcaaggtattccctgcaattactggcttacggaacctcactttatcaat

SEQ ID NO: 420499 - DNA, 414 bp, Oryza sativa
gaaaggaaattaaactgatttattacttgttccattaaaaccatcacactcgggtacgtggtgaaaccgtgaaagttaaaaaacaaaaacagtagtagtagagtgaggccctgctcgctgttacatgagaggtgcacgaagaaccagcacacgagcagagcatccagcccacacgcagcaaggaaacggtagggatgccgccgccgccgccggccgatccgccgcccggcgatgatgcgtcgtcgtcgtcgttcaggtgcacgcggaggcggagcggcgtgcggcgcggcgcggtcgagaggtgatgagtagttgacgcggagcagatatatatggatggatggcgtcgtcgtcggtcggacgacggcgaggtcgcgcgcattacgcgcgggcgtagctgcgggcgaggtgggc

SEQ ID NO: 420500 - DNA, 439 bp, Oryza sativa
accaagggaaagaaaggagaatgtataatagagaagctaattactgtacattatttagtgtacctcttcttcacataactactgtagttaatactacagtgtgtgccttagctttttatatggatcactatctgcctaaacatttctcactgcaataataatagtaaaccaccaattacaagacgaaagaacagtacaatttaggctggttcataaattttgcacaggagtttcttctgatgttggagattctgtttctgcaggcttcagaaacttcaggatatccatttttgttttctcagtacagcctgatccttgtggttatatgctgctggcacatagggcagcgcaccaaattcttcccgcattcataacaggtctgatgtccacatccaaatgcaagatcctttgatttatccatacagatagcgcacaaaag

SEQ ID NO: 420501 - DNA, 463 bp, Oryza sativa
aaaaagcgtgtcacaagtatccaaaatttaatcttccccttacacaagaaacgaacaggccgtgttctaaacataaaaaaacatcattttatacgcactagcgcctcatggccgtccatgttggatggctctggccaggaaattataaatttcaatatgattcactttgtttattgattttggattactaagcaagcaagcaaacacttgttgacgagcatcgaccgatcgacggttgacctaagtcaaggcttcaagcttttgttgacgagcacgcacgcagcacgtggtccggcgtgacggcggcccagaactcgccgtcgagctccagcgccgccatgtgctccggcgccagcaccacctccgcgttgacgccgtctccgccgttccgcgccgggtacagtgacgccttcccgtcggacttgttcgcctttccggttcgggccggcaccgtctttcccca

SEQ ID NO: 420502 - DNA, 457 bp, Oryza sativa
gcgccaccatcatggtcggcgccgtcagcttcttcctcggcggcgccgtcaacgccgccgccgccaacgtcgccatgctcatcgccggccgcctcctcctcggcgtcggcatcggcttcggcaaccaggccgtccccctctacctctccgagatcgccccctacaacatccgcggcgccgtcaaccagctcttccagctcaccacctgcctcggcatcctcgtcgccgacgtcatcaactacttcaccgacaagatccacccgtgggggtggaggctgtcgctggggctcgccatgggccccgccaccgcgatcttcgtcggcgcgctgttcttgccggagacgcccaacagcctcgtcgagatggggcggctggaggaggcgaggcgggtgctggagaaggtgagggggacgaggaaggtggacgccgagttcgaggatttgagggaggcgagcga

SEQ ID NO: 420503 - DNA, 484 bp, Oryza sativa
ggagacggtcggcttcttccaggtggtcaaccatggcgtcgccggggagctgatggaggagatgctcgcggcggtgcggcgcttccacgaggagcccctggaggcgaaggtgccctactacaccagggacgtcgccagcaaggtctggttcaactccaacttcggcctcttccgtaacgggttccgttcgccggaggccaactggcgcgacacgatgttcgttgagatgttcccggaggcgccctcgccggaagagatcccgccgccgtgcaggggcgtgctggaggtgtacgccgcggcggtgcggcggctcggggaacggctgttcgagctgctgtcggaggcgctgggcctccccgtggggtaccttggccgcgacgccgggtgcatggacgggctgagcctgagcgtggcggcgcactactacccggcgtgcccggagccggaggcgacgatgggcgcgaccaagcactccgaccccagc

SEQ ID NO: 420504 - DNA, 464 bp, Oryza sativa
gagccaacatgatataactattattaatcaaagaccacccaagggcaagttttattttgtttatttcatccacatccacaaactcagaaacaaaatcatagtataaaagctacacctaatataataaccaagacaaggtccaagggggagagcctcatcagcttgatttaatttctttctaggccgagccattgttgtgggtaggcttgctgctgctccggagttgcttgctgatgtcgtcggcgatgtgctccgcgtcctcgtagctgccgtagattcccctcctcaccatcccggcgcagtacagcccgttctcccccttccagtgatccgggtagctccgccccgccatcccgtcgtcgccgatcagcccgtcatcactcttgagccagtgcttggtggtgctccggtagccggtggcgaagacgacggcgtccaaggcgtggcgctggccgtcggcgaac

SEQ ID NO: 420505 - DNA, 480 bp, Oryza sativa
gccatcgccgtgaagaagttcggcaagctggcatggcccgaccccaagcagttcgcggaggaggcgagaggggtggggaagctgcggcaccggaggatggccaacctcatcggctactgctgcgacggcgacgagcggctcctcgtcgccgagttcatgcccaacgacaccctcgccaagcacctcttccactgggaaaacaaggctattgaatgggctatgcgcctcagagttgcatacaacattgctgaagcattggaatattgtagcaatgaggaaaggcctttatatcacgacctaaatgcatacagagtactctttgatgagaatggtgatcctcgtctatcatgctttggtttgatgaaaaacagcagggatgggaaaagttatagtacaaacctggcatatacaccttcagaatatctgagaaatggcagggtcacactagaaagtgttgtattcagttttggcacaatactc

SEQ ID NO: 420506 - DNA, 480 bp, Oryza sativa
gatgccacaaagaaggttcacataaacaacacaggtcacagcagcgaaagctacaagcaaaccctgcataatcgaaaagcaaatgtttttcaaaaccagacacacaaactgatagatagaagcccacacggacagatcataggatagcagcagtaatcaagcattgccaaggcaccaggcaagaaccctgaacctctctagtactcgtcaccctcatcaccctcgtcaccatcgtcgaactcggagccgacctcctcgtagtccttctccagcgcggcgaggtcctcgcgggcctcggagaactccccctcctccatgccctcgccgacgtaccagtggacgaaggcgcgcttggagtacatgaggtcgaacttgatgtcgatgcgggagaacacctcgacgacgctggtggagttggagatcatgcacacggccctctgcaccttggccaggtcttcccccgggacgaccctgggcggc

SEQ ID NO: 420507 - DNA, 447 bp, Oryza sativa
tcgttcgctgcgcttggcgccggtgccggagtggtactcgcccacattgccgacgacgaggttgcaggtgttgacgtcgcgggtgagcgtgaagcggcggtagtccttgtagtaggtggtgcggccgttggtgtcctcggcggggcggaagcgccatgcgaggtcgcactccatggggctccccggcacggcgacggggcggccgaagcggtagaagtggaggtcggagaacttctcgatcgccgtgcgcatgagcaggttgaagagatccttgtcccccgtgcagtccaccggcgcctccgtgtcgcaggagaccgcctcgacgatggggttctcctccgccgcggcgcccgcgtccgagctggcgtcggtgttaacggtgacggcccgtttcgcccccgacgactcctccttggtcgcgacgtcctcgagcttgatgaacgggac

SEQ ID NO: 420508 - DNA, 353 bp, Oryza sativa
ggaagggaaattaaacggatttattacttggtccattaaaaccatcacactcgggtcccgggggaaaccgggaaagttaaaaaccaaaacccgttgttgtagaggggggccccgctcgctgttccatgagaggggcccgaaaaacccgcccccgagcagggcttccagcccacacccagaagggaaacggtggggatgccccccccgccgccggccgatcccccgcccggcgatgatgcgccgccgccgtcgctcaggggcaccccgaggcggaccggcctgcggcccggcccggcccaaaggggatgagtagttgccccgggccaaatatatatggatggacggcccccccc

SEQ ID NO: 420509 - DNA, 392 bp, Oryza sativa
gaactgaaccgaggcaatttcaagggattccacattacatcatccacatgttaccacattcaaagtaaacaaaagtttaaacatcagcactaaagttttgcccatcaaatcattattctttcatcgaatccataacataaaaaaagcgttggcgcggcacgaacgcacccgccgagggagacggtgggggaaaggaagtctcacatcaccatcgcagcggcggttcgcaattacgggatgtcccatggtttgggctccggaacggcgacgaccatcccctggagctccggggggagcacgacctggcacccgagccgggcgtgcttgttgagctcccggttccgggacgcgcgggtgaggacctaacgcttctcttaagaaggaggggggag

SEQ ID NO: 420510 - DNA, 438 bp, Oryza sativa
gttagaaatataatgtgttagttagagataagagtcaaatacaaatatagagataagatatatcctagagattgactcctagagataagatagagtcctaaagatagaatcctagagataaatctactcttacttgtattatactccaagtctctatcccctatgtactcctatatataccccatgagagggtcgatataatagatcagaaaacatcacaataaaacaaattagaattttccacagtcagccaaaacactcccaagaacgcaaacgcaaaggaaacctgggtacactacagccgagaacaacggcggatcctgtcgctctcggtgacgacgtggccgcgcgtgatctccttcaccgacgtgcagccgctgagcgccatggtgatctccagctcgtctctcagcatccgcagcgcgttcctcacgccgg

SEQ ID NO: 420511 - DNA, 456 bp, Oryza sativa
aaacagagaagagattatacatatatcacaattttcaaagaatagtaaaaaaaatgtacattatgatgatatcgcccatgggagattaatcaatcccttggaaagaaaaccaaaattttttccttctttgcagctagtaggaaatcagcagcttcaagttgtaaccatgcatgtacaatgtacaccctcctctcctccggctcgtccagtctcttctacagctcatcgttctatcacctcttgttctgaggagacggttgcgaagaaggtagcggcgtcgtgttgacatgccataccataacctctgaacagtctgaaggaattcctctcactttgctataatcttcaaggaccacttgctgtacgaacttcaccgagtcctgggacttgtcgggctcggaggtcgggtaccggccccaccgctcggggtcccagagcaccgagctgttgaacgcg

SEQ ID NO: 420512 - DNA, 366 bp, Oryza sativa
ggcgtggatgcagaagtggtcgaacgccatcttgaagtccgggatgtagggcctcacgccggcgaggccgaacacgcggcgcgccacgagcgacgccaggaacaggatctgctcggacatggggaggacgaggggccccagggtggtgatgttggtgcggagggcctcgccggcgacggccatgaggtccttggagagcgcgacgccgacgccggcggcgtcgtcctcctcctggaacacgcagcggtaggcgcggtcggcggcgccgctgtgggtgcgcaccgtgtgcagcagctggtacttggcgcgggggcggtcgtcgcctcggttgctgaggaggatggcggcccccgcccatccggtaga

SEQ ID NO: 420513 - DNA, 461 bp, Oryza sativa
gaaaacacatcaactttattaagcaggaacagatctagggaataaaccccattacatatccaagcaaaagagccatccttaagaaaggagagttaactgaactacgaaagcaaccttcctgaaataacctaacatcagaacagaaaaaggagcaagtcgacagggatctgcggcgaagccgcgacgactgctaccctgggcctcaaaagatgtgcagtccgcttgacaaaccgttaatccccatcggctgcctccacggaaacggcacaagaccgaggtttgatgctgagccgtagattttggtgtgtgcgtcaccggactcagcaaaggatccccacggggctcatcaggtggtccgagctcaacccgaatgacaaacccaacatgggttcttctgttagggaacaacaggatagatgaatccgaagaacagccaacctttaaggaagaagcacttgaat

SEQ ID NO: 420514 - DNA, 454 bp, Oryza sativa
aggatgaactcttcgtatttttatattccattcttaaaaaacaattctgtaacactccagtaaaaagcataactttggggtaacattttacagtgtaaaggaaaaacagcatgcattacgtataccacatatttatccacgtcgggacaactcactgagcaagctatctaagcttggcagaaaatcagaagctcctatgtactgcaaatgtgcgcaattacttgactggaacaaactaactttaatttgcgcgtcaaaccacttggtagttataagtaaccaatcgattcctctgagaaaactttggtgggctaccttccctcagcggacggatggcggtcaccttcaaatcactaaatgtatttgatgcagaaaacccaacagatatcgggaagaatgttgatggatcagctgcagggacagtgaactccaaagaaccactgcggtttgattg

SEQ ID NO: 420515 - DNA, 452 bp, Oryza sativa
gtaatagaaaaacggatggtatatagatctaacaacattattcagttgaagttccacattaaatttcacaaccctcttcagccaaaattatgataggaacgatcttcggagtacactggtaaaagcaaaaacagacagaaaattatggttcatataagataggaaaattgctaagacgaaaggaggcgcagccgacatgagtaaattgttcatcttgatgcgaagctaataggcgaaggagggttcgctgggcctgaagctcctgtaaatggaggctgcaactgggataagacccaacagcgcgatctggacctgctccgaggtgcttgtcctgacagtgatctggccacttagtttgttattcaatccaagacgaaccaccatcttcgagccccttccaatcgagaactgggactgcaaattcgcaccgagagcaaggtctcggcgccact

SEQ ID NO: 420516 - DNA, 382 bp, Oryza sativa
cttactgcggcccatataggcccatcaagattagaggctctagcggcatgttggcacaatagcctttgggaaaaagtacacccaaggtccctcaacttgtcatcgaattacaaaatcatcctccaaccgtaaaaccggatacacatccctcaacttataaaaccggtgcaaattagatccctaagcagttttgaccccggttttatccaatgtggcagttgactcagcatgggacatgtcaaccccttattcccctccccttttttcctctgtcctcttcttctcacttcctctgtatccttcccctccccacgcagggcaaccgcccggtgtctgtgtcggcggggcccgatgagtcgaagccaaaggggaagacaagagg

SEQ ID NO: 420517 - DNA, 250 bp, Oryza sativa
caggcaacataatttgataaaaaaagacgttataagtatgaataagaagctggcatatacttcggctagtagcattgcaacgcaaacagtatgacaaggtaccacgcattgtttaagagctaagacaaagacaaaactgatgcatccaacgtaccaaaaagaaagcgaacagcagcagtcagatagctatgagaagagaactaggagagggataactagaagggacagaatggcatccatgggtccatga

SEQ ID NO: 420518 - DNA, 477 bp, Oryza sativa
ggatcataactttttttcttgtattcagcagtgtagcaatgctagtcaataaagctaatttcacctttgaacgggaatggggaagcaatgaagtacagaattacaggagaaggtggcagctgaggagagaatcaggagctgtcacaactcacaaagctatatacaagttcagaagctgaacgagaagagagcatgcttccttcctaccggaagcattatgactttttggggctggtttacaaatttgggggattattggaagaacattgcggagcagctgaagctttttttgggattgggaaccctggtgcaaaggggaaatgagggtgcgatccccattcacattgtccacgcgacatgttgttggccagaacttggcgcccccaaaccccctgcaaggaacgcaacgtactccctggagtacgggttagtccatgagtcggttattaaaatttggggcgggtgaggagcactttt

SEQ ID NO: 420519 - DNA, 392 bp, Oryza sativa
gatcaaacattgattactcaagatcgatcacatcaagagtacacttctacaagttcactagacggccacaattctgatcatagacacgaattgcataatcgaatcaatttgcagtccttttatttccatcacatagttcatagccagctctgatgccatccaagcggcagccaagaactgaacatgatgatcaatggatggcaacttcaacttcagtctgcgtgtctttcattctcagtgctttagcatgtccctgaaccagtaggccgacgccttggggtggcgctcgagcgtgttgaagtcgacgtagacgatgccaaacttggacgtgtaacctgacagccactcgaagttgtccaggagagaccaggcgaagtagccagccacattgg

SEQ ID NO: 420520 - DNA, 393 bp, Oryza sativa
ccgagctcattatcttttatagtatgtttttattcccacgcaaaaccaacaggtagatgctagatagatacataacatagccggtgttgacagcatcatgtcaaacaaaaccattctccgacagcaaccaaaccacacaccaagcttctcgctgctcacttctccctcactgcttggaagcagctttatttcgatcatacacactcgcaaagatcaaatattatcaaacatattttgggggcataggcatgatgacgatttagttgtaagcgtccgggttggcgatgaggtaggcctcggcggtcttgaagatgccggtgagggactccttagccttggtgatctcgtccttcacctccactccggggaggagcttgtacgtggacttcacct

SEQ ID NO: 420521 - DNA, 483 bp, Oryza sativa
gaaaggaaattaaactgatttattacttgttccattaaaaccatcacactcgggtacgtggtgaaaccgtgaaagttaaaaaacaaaaacagtagtagtagagtgaggccctgctcgctgttacatgagaggtgcacgaagaaccagcacacgagcagagcatccagcccacacgcagcaaggaaacggtagggatgccgccgccgccgccggccgatccgccgcccggcgatgatgcgtcgtcgtcgtcgttcaggtgcacgcggaggcggagcggcgtgcggcgcggcgcggtcgagaggtgatgagtagttgacgcggagcagatatatatggatggatggcgtcgtcgtcggtcggacgacggcgaggtcgggcgcattacgcgcgggcgtagctgcgggcgaggtgggcggtgcggaggtcggcggctttggggccgccggcgaaattggagggccggtagtgggattttacggggtt

SEQ ID NO: 420522 - DNA, 396 bp, Oryza sativa
aattaactagcatatttaaatttaaaacgtaactgtttgagcaaataccacgaaatgttcaggcgctaagatacggcaataccgatacatccagcatagcaaaaatggcgaagagcacagagtcagataaagctatagagaactagggctccaggagatgggggccgaatgacaaccatggcgcttagtcgacctcctccatcttgctctcgccggcgtcgtcctccagcggcggcatgtcggcgtcagcctcagcagactcgtcctcgtcgatgctcaggccgagcttgagcatccggtggatcctggtgccgaaggtgttggggtcctcaaggctgaagccggaggtcaggagggcagtcttgaagagcagtattaccaggtgctttacagact

SEQ ID NO: 420523 - DNA, 385 bp, Oryza sativa
aaggcaaagctgcgagcgccagatcatcttattactacagcttcttggcgatatgctacagtagcttcttcctcccttgcaaaaagaaacccaaaccttatctacaacgcaacacacacaccggacacagagcgctcgatcgatcgaagcagacgagacgacgatggcgaactactactaggtaagcgacaacacctaggctatacagggatacagcgcgcggcggggactggcggcgagacggcggcgatgatcaggcgctggccttggtggccttcttggagatggcggagcggatggatttgggcgggtgcattggttttgcgggggcgggccttcttgcccttttggcccgggctgggcgggcggggggaaccgacttttt

SEQ ID NO: 420524 - DNA, 368 bp, Oryza sativa
agatagatagataatagatagattccagttgtgaagacaagaaaatttgatcttgcccaagttgtcattacattccagttctgttttgtactatccgaattcagaaacagagcaccatccataataccatactgcttatttaaaacctgctagctgcatgccattcactcgttcagatttcagagtgatggttgtcacgccgtcgggtaggaggccatcatggcgaggccacagacgcccttcttgtcggcgacgcccctctccatcctgacgtagccgtccttcccccacgacgtgccccacgagttcttcataagccagtacttggtcccgtcgcttgccacgccgtaccccaccgccgtgatcgc

SEQ ID NO: 420525 - DNA, 392 bp, Oryza sativa
gggatgtgataaccgcatatcaaaatatcgatccatgagagtatgtatgtcagttcgaaccacttcactcgcggcagcgaggaagtcgaaaagcttattcacgactcatctagcaaaacttgacgataagcctatctcaagttcttcatacaagcattgacattgcaaagttacaccgagaggtctgaaacaaaagtgcagactgctgatggagacaagccgaattagcttacgcttcatcaagggcaagaacacctgggagggtcttgccttccagcaactccaagctagcaccaccgccggtggagatgtggcttatcttgtcggccagcccagccttttcgaccgcagcaacggagttaccaccaccgatgaaggtcgtggcgcccttt

SEQ ID NO: 420526 - DNA, 431 bp, Oryza sativa
aataagaatatgcagcattttcaaacttgcaactcaaataaaacatcaacaggaatgagatgcaaatgagcaaattgagcacatatttaggttcaaatccaacttattcataaagcatactgctgtcccacaggaaactgtttcataaaactaacatatcatacggactcgatggtccattaaaccagacacaagtagacatcagcaccacaaatacttgacgaacagaggctcgggatgaccaggcacatcggcagctccaccaaactggctgattactgaccaccacggaggcggagcaccaggtggagggtggactccttctggatgttgtagtcggcgagggtgcgtccatcctccagctgcttgccagcgaagatcagacccttgttggctgggggaatcccctccttgtcctggatcttggcctt

SEQ ID NO: 420527 - DNA, 469 bp, Oryza sativa
aagcacaatacatcacagtagtcttttatttatatataatcatatataaaccacgtacatatgtagcgaatgtagcacaacacataaatgtatacagcactgagagaaacataacggggcactagtgaggtaaacttttgggcctaggccacatacacatgcacactatatatgtataggtatatagagtgattgaaagaaatgtcacccttaggacttaggtcttgtgcgattcatccccaagagagagattggaggggaggtgtagaattaatctcctacaaatctccttcaacctcttgtgtgagggattatacaaacaagactttagcggtgaatttatcatgagcactgatccaacatatatccaattggatatattcatatgtagatgacatatattatatgtggacataaactccgatagagtccacaagtgcgcccgagcgaccaaagaaaccaaccacac

SEQ ID NO: 420528 - DNA, 336 bp, Oryza sativa
gaccgaaaaaaaccaccagtttgatactattcgaaatcactgcaatgagtgagtgacacaatggagcaacaccaagagtgcactgcaaagccggttttgatccttacaccacacaaggcgagagggagacacacccgttgataatgttgttacaacatcgacatgtccatcgatatctgaggtgctacatggcgtacctctgagtccaggtccttgctgagttcttcgacttgggcctatctgtcttgtacatgtgggcgatctcagggaccagaggatccttagggttcggatcagctcagcagggaaccagatttgacagcaacacctttggaa

SEQ ID NO: 420529 - DNA, 407 bp, Oryza sativa
gaggctacaaaccaagatttggcatacatatgactggaacttttgtcttggcaaaacttagtttaaaaaaaaataaaatgacaccagtacatagcttttgtccataataaaactgaagtaaccgactgttgcattgcccttactgaagacagagacctagcttgaactggccaaactggagttttaagagggtactggcaaacatgcccaaggttttaaaaagatgtgaaatatcatcataagcttaagcctcagggatcaacaccggagggcgcagctcctcctcctccttgggagcatggatggttacaagatccggcagaggggtggtcgggccaaccttggccttggggccccagtcgagcatgatcttcaccttgatgccaaaaacacccctgtttaagagc

SEQ ID NO: 420530 - DNA, 248 bp, Oryza sativa
aaacgaacatacccaaactgatattatcacaatgttagccgatgacaatggaaagagtaatctaggtaccggcggatcattgccgggggagacaagaaattggttgcaccacaacacccaccagtggcgccaacaaggagcgctatccgtttttggacgagagaaaaagtaaaacatcacgatgggaagagaaactgaataattttagtggacgaagatgatgatggataggtttcttaggacgcccg

SEQ ID NO: 420531 - DNA, 529 bp, Oryza sativa
  unsure (1)..(529): unsure at all n locations
attaataggggcgatcctaatgcagcttcccttcactgtctaccaataatacaaaatggaagtacataaggagaaaaaaatccagtgcatgtaacttttaacgtcttgtataaaggttgagaagcagcaacaaaatctccaaacaaaagaattgagagacatacagccgggctcgtggaacccgtatctaaggacagaagatctacagaccccgacaccgcggaggagaggagcatcaacacaggtgagttaaaattgtcaacaccacaaattacaaaaagtagtcgggagtcttgcgtgttgtgtctggttcaatttgccgaggagctggatcaaattggaggaagttctgatccatgttttcgccaatctcaagaattgcagccatgttaccacagcgataacagtagnnnggtgcactgaagaccgtcacaacattcttgtcctgacaccaattaaatccttccatacaagttgatgtgccccttggaagagagatggaccatttgtatgggtaaactgttgagcg

SEQ ID NO: 420532 - DNA, 330 bp, Oryza sativa
aaccacagttaatatctatttcgcagtcaatcgcaacaacaaatcaaaagaaatcataatatctaatattttgcaatcactttgagtgccatggcacgtgtaccaatccagcaatcattaacgaatggctggatctgtgctgttgagggatcaaaaccgttaccgccagcagccaattccatggtaattgagatgggaatgtttgccttggccaatgcccaatcatcgctaccaccagcagcagcataaagcacgtttgtggagctgccaacggtgtatttggggcccgttgcggcacggatagcgcttgcgccagcctgggcaaccttt

SEQ ID NO: 420533 - DNA, 226 bp, Oryza sativa
gagggtcaaatacaacttattcataaagcatactgctgtcccacaggaaaactgtttcataaaactaacatattatacggactcgatggcccattaaaccagacacaagttgacatcagttccacaaatacttgacgaacagaggcttgggatgaccaggcacatcggctgcttcaccaaactggctgattactgacccccacggaggcggagcaccaggtggagg

SEQ ID NO: 420534 - DNA, 544 bp, Oryza sativa
caggaggaagcgtgcaaggggctttttaccaggaacaataaaccaaagctgacattattacaaataatcaaacaaataatcaaagcatatttgtccttcagtttacagaagaaaacctgtagttgcagaatactcctgggtcgcagtacagcaattgcaggaatttgggatgacgggatgttagactttttacaaactatatatatcccagaatttttgttgagcttttttcacatgaaaaccaagcaacctacctacaaagaaatccgtggttaagatttacatttctgtactcaccagtttgaaggaacaatttgcaagggcacattggggatccctggactgatctaatggattggatggtactgtgtgatcccccgtttaggtggtaggttccttaatatgaacagcaccaaaactgaaggtacaattttaaccaacaagtagtagaagaagtttaggattggatggttcagaacatcaagatcggctttttttataaacgcatttaagcacatcattacgcatttgatcaagaagccag

SEQ ID NO: 420535 - DNA, 431 bp, Oryza sativa
ttttccgctctcgctgcagatgatgggatgcgcgacgcccttgcggtcacagacgcggccgacggcggccaccactctgtcctggtgttcgaggccttctcggcttcggcgcccggccgcattgacccggccacgggctacctgctcgacgagctcaccgacgactgccacgccgactaccgcaacctcatggccgccgcggtgcgcggcgacttcgacacctgcgctctgtacgccgaccagctgaagcggcgctgcgccgatcagttcaaggacggcgttcttggcctggagcacctcgccgcggtggacagcctctgcgagatcgtcgcccgcggcatgggcgccgacgagccgtcgggcacgtaccacatcaacctgtccgggttcaccttcctgcccgacatgtgggcaatcgggcagatggttcc

SEQ ID NO: 420536 - DNA, 383 bp, Oryza sativa
agagctcccaacgcagtttttcaattcaaaaagactgcccaaacagaccaagggtatcatcatagcagcaaagttttttaacacgcaacatcaaagagacactaatgcaataagataacttgaagcgcggatcactagcaaatttcgcgcttagtcgacctcctcgatcttggggccagcaccgctgccgcctgccgggggagcatcgtccttgtccatgccgccggccatgtccgcgccagcgccctggtacattttggcgatgatggggttgcaaatgccctccagcttctttattttggcatcgaacttattaaccttggcgagctggttgcccgccagcccctggatgggctgattgatgggatttttgattttttttt

SEQ ID NO: 420537 - DNA, 435 bp, Oryza sativa
gacaaagacagttgtgatgatgtagcactaactgatgatgatgatacatttgacatgcagttactctgtcccgaccgaggaatcgagtagtaactttactttttatgaagcaaaaccattctaactaagcagagaatgcatggaaaccaaacaccacgcgcagatggcatcctcttaattattattactagcacaaaacataaacataaaacgatcactaattactccataagttaattaggcgtcggcggcgaagccttggtcgtcgtcggcagcgttgaggaggtcggaggagcggcggttgggagcggtgcagttgttgcggatcttgccggcgttgccggtgaggacgtccatttggctcatcttgaccatggagcgtgcgaactggtcaagaaggcggcctggttgagggcgaaacggacggcggtgcgg

SEQ ID NO: 420538 - DNA, 101 bp, Oryza sativa
aaaggatggaattgagtatcattactttcaccctaaaatacagtttagcgacaatattttagaaaagtcgcttgcttttgcgccatggcttggcaaagctt

SEQ ID NO: 420539 - DNA, 392 bp, Oryza sativa
gcacaaaccgatgagcttagcagtagcaggcagccttcttaagttcttattaccatttgaagaaataaaatacctagtgaaaaactaccaaaccagcaagtttgctaccaacaatgacaaaaatagtaaaatactgaatccatggtgatgaaaaatgagtgaaaaatagtcctaacaattaaaacggaggcaaagatgggggaaatcggacatgcatccactgcttctcgtaggccgatacatggacccatcctatctcctcaatcaattggatcttcaaatcataaagtcttttctttggttgctcagagtcatcttgaatcatgtcattcagaaccttcaatgcagtgccaagtctttcacagggccttttacgcaggacagttaaagag

SEQ ID NO: 420540 - DNA, 403 bp, Oryza sativa
aagcaacttatatcatatttttcattttttgcgagtctataagtgaactaatcttaatgagtctatgaccgaactaatcttaagagtagccatgttttcttttcttctttttgttctcctctgatcagctcagctgctaggggaggtttgactagctatcggaagtaaactgagacaagaggaatatcgatgtcgtttccatcatcatcctcgcaggccgccacaagatccaaatgcttcctgtattcaggaacatccaccttggcgacttctctggccacgtctaccaccttcttgttcaatctctccttgtgtcttgcgaacatgttgttgtacagcagcgaagtgccacaggaaatgctgtaagcggtaaggccccttgtcgctgaaccattgcaggagc

SEQ ID NO: 420541 - DNA, 248 bp, Oryza sativa
tggtgcggtgagccctgcgtgcaaaggagagcaatacagatgactctgaaagcttccttctcatcaaattccttaagacatggatcgactacgcgcagagcttgccccatttcatacaaaccccaagcccactccaagagatatatcttgctttcctcaagggagttgtttgtattcgaacgaccagcaacagtctccaacataagtactccaaatgcaaaaacatcggccttttttgacaaatgacc

SEQ ID NO: 420542 - DNA, 533 bp, Oryza sativa
tgttgtggccgccgccggtgaggcgaagatggcgtggcaggcgtacgtcgacgaccacctgatgtgcgagattgacggcaaccacctcaccgccgccgccatcgtcggacacgacggcagcgtctgggcgcagtcccccaacttcccgcagtacaagcctgaggagattactggcatcatgaaggactttgatgaacccggcagtctcgcaccaactggtcttttccttgggggcacaaaatacatggcgatccaaggtgaaccaggggttgtcatccgaggaaagaagggcactggaggcatatgtgtcaagaagactggcctgtcgttgattcttggaatctatgatgagccgatgaccccaggccagtgcaacatgattgtggagaggcttggcgattatttgatcgagcagggttggttagtcctccctcccccctttggggcatttgggactaagtttactccctatttggatcagttttgggagcttggcatttgtttgggtatcaaatgatatggagtgattaatt

SEQ ID NO: 420543 - DNA, 428 bp, Oryza sativa
tttgtttttttttccaggaaataagccaaagttttgatagagaggtagagcactgcaggacaaaaggacccacgcaaagtctttgagccctgcacagccacctatcttgaccaccattccaccacacccttatgacgataaaattcgaccacaaaataaaacaataattgcagtaaccattgtgcaaaagaaaattaaaccctaacctctgattcttcccaccttcacaccacacattctaagacacgtccgcatgcctgtacacaagagaagcccagcaaaagtgaaagacactcgtccatcctacagtgtttttacagtcttgcaacaccagagagagcggcaaaagcatttggcccaaacagaaactggcaattaaatatggggatcaaatttatgacgtgacgatcgagatcggagagggagag

SEQ ID NO: 420544 - DNA, 371 bp, Oryza sativa
ttagttttgaacgagggatcgtagagaggagggtttggtgagggagggaggaagatggcgacgtgcgcggcggacctggcgccggtgctggggccggtggcagccaacgcgacggactacctgtgcaaccggttcgccgacacgacgtgtgtggtggacgcgaccgacctgctcttctcgggggacctagtgtccgccatgcaggtcgggttcgcgatgctctgagccgggtcggtgcgggccaagaacacgatgaacatcatgctcaccaacggcgctcgacgccgtggtcggggcgctcttctactacctcttcggctttcgcttcgcctttggcacgcctgtcaacggctatatcgggaagcagttct

SEQ ID NO: 420545 - DNA, 441 bp, Oryza sativa
tttgtttttggttacagcattgagcacattctcatggttgacatcattcgtgatgctgctgtacgcagagcagggaatgaaataaatgcagcacaaaggctttagcttgcaagtgtctacaaaggagaggcggagaagattcttctggtgaagaaagcacaatcagaagcagaggcaaaacacctttccggagtcggtattgctagacagcggcaggctactactgatggcctgagagagaacatgctgaacttctcgcactcggtttcaggcacctcagcaaaagaagccatggatctcatcatcgtcacacaatacttcgacaccatcaaagaacttggggatggctaggaaaacaccacggggttcatacctcatggcccaggccatgtcagggatatcagcgagcaaatccggaatggtatgaccgaagcgtcctgc

SEQ ID NO: 420546 - DNA, 368 bp, Oryza sativa
atattgaggagaatgtttattattgctcaacactacatggaattattccaatctttccagtatcacacatgaacccgccatatatcatattgtgtctgagtacatgtccacctcaaaacatccaatttgaacaaacccagcttacgacagaacacgtaccctttaattgcacataattaacatataacagcgattaaaaatagggcaaaagaaaggacggagaggagggactcaaggtcattggattcattcattcattgatagcatggctccaatgctccatgcttgcatcgatcagctccagaaccaggcggtccagctgccgagctgcgcctcctcgtcgtccgtggggtaggggtgcacaactt

SEQ ID NO: 420547 - DNA, 345 bp, Oryza sativa
ttagtatatgggtacagcagtgaacacaatatttacaactaggtccctggccgggccggtcggccaccggaaggagcacctcgccggagaaggctttggctcttctttttcttctcctcctcctcctccatcggcggcggcatggggttctcgctgtaccccatgaagacgtcgacgcgcatgctgtggagcaccagcttcttccgccataaggtcgcctcctccttctaagcccacgccctctcgggcggcggcggcgagccggcggcggagcgcgcggttggtaggtgcgcgtgcgtgcgtgaacgggagagcagcttcgagatcgggttttcttgggttctt

SEQ ID NO: 420548 - DNA, 431 bp, Oryza sativa
  unsure (1)..(431): unsure at all n locations
tcttctngcttggttgctcacattgagctcaacaatggaggccaagggagtggtggtgatcacccttgtggtcacacttgcggcgtttgcgagggcggcccgcccagaagaaaccaggccgggcttggcccgccgcgggtcagcatcctcaccgacgactcacctgcacttctacttccacgacaaggtgagcaagccatcaccgacggcagtgcgggtggtggacccggtggacccgtcatcgcggtccttctttgggatgatcaacgtcatggacgatccgctgacggaggggcccgagcccgagtccaagcccatgggccgggcccaggggctgtacatgggctcagaccaggccaagctgggcttcctccaggcaatgaacctggtgttcaccgacggcacctacaacggcagcgtggtcaccgtgc

SEQ ID NO: 420549 - DNA, 445 bp, Oryza sativa; identical to SEQ ID NO: 394560

SEQ ID NO: 420550 - DNA, 387 bp, Oryza sativa
ctctagatccagtaattgcgcctcctccggctgcagctgcggcgttggcggcgtgcattctcgccgtcgccgccaccctcgccggcgccgacgacccctaccgcttcttcacctggaacgtcacctacggcagcatcaaccctctcggctccaccccgcagcagggcatcttgatcaatggccagtttcctgggccgcgaatcgactgcgtgacgaacgacaacatcatcgtgaacgtgttcaacaacctggacgagccgttcctcctgacatggaatggcatcaagcagcgcaagaactcgtggcaggacggcgtgctgggcaccaactgcccaatcccccctggcgccaactacacctacaagttccaggccaaggaccagatcg

SEQ ID NO: 420551 - DNA, 446 bp, Oryza sativa
cctgcccattttttcatattgaggcccctctgaaaatattatatttacaactaggtccctggccgggccggccggccaccggaaggagcacctcgccggagaaggctttgtctcttctttttcttctcctcctcctcctccatcggcggcggcatggggttctcgctgtaccccatgaagacgtcgacgcgcatgctgtggagcaccagcttcttccgccataaggtcgcctcctccttctaagcccacgccctctcgggcggcggcggcgagccggcggcggagcgcgcggttggtaggtgcgcgtgcgtgcgtgaacgggagagcagcttcgagatcgggttttcttgggttcttggagaagggaggagaaaaaggggaggagagcatggatcccggccgcgtcgtgtttcgacttcggcgtggcgcggcgggcgtgcccccgc

SEQ ID NO: 420552 - DNA, 447 bp, Oryza sativa
tttgttgtttttttttgcaaagtaggtaggggtgctcaatcatagcagtagcacatggtgtccaaaccatttacacgaatagcattaacacacgtacaaagacttgggcacaatcaaatagagtttatgtccctaggagatttggcgaagctaacataacaagacacctttttttttaactttcacaatagcaaaccatgtagtacagaccataaggcagactccatcttaaaactgttagacttcttggttttcagaaaattccctacagtcatttgatctccatcttgcttttgactgtggggcagaaaccattctagttgcggtttttggacttatcaactgcccttggagcaagtccaattgcatctgaacctttcatgatcctgagtctgcgacaagagttggcaaacatcttccatggaacatcgccaacaagcattcagt

SEQ ID NO: 420553 - DNA, 457 bp, Oryza sativa
gtggagaaagatctactgctgcaacaaagaacagccatggagcttctctggctgctgctgttgctgctcatggcttcctcaacatcgtcgcggtccgaaatgaaggcgggagaggtgatcaggagaagccaattccctgaggacttcttcttcggcacagcttcttcggcataccagtatgaaggtgctgtgagggaaggtggcagagggcccagcatctgggacaccttcacccacaatcatccagagaagatagcaaatggaagcaatggtgatatagcaatagattcctaccaccggtacaaggaggatgttggaatcatgaagggtttgggcttgaacgcgtatagattttcagtttcctggccgagaattcttcctaatggaaaactgagtggaggggctaacctagaaggaatcaaatactacaataatctcatcgacgagctaatttcaa

SEQ ID NO: 420554 - DNA, 261 bp, Oryza sativa
tttgttggatattaaaaggtggctttactctgacaaatgacagagagaaatacaatggtacatgacacgcagtgggttaagcacaccaattatttggacacacagaggtcaaggttgcagagaaaatcaagcaacacaagctgaactcacggacccacctgtcagcctctcactggtcgaggccggagactcttgtgaaaaacagctacaccacgcatgcagaagaagacaaattattacacacacacatcgccggcacgg

SEQ ID NO: 420555 - DNA, 499 bp, Oryza sativa
ctcctctattccttgattatgccgggggacgaaatctgtactcgttgcgcctattttggtcccaactaaaagaggatcccttgccatccctttctcggttgttaaatctaacagagctacatttcaccagagcctacaacggagagaagctggtcttccttactagatggtttcccaagctgaaggttctacgtttaagagacttgcctaatctaaagaggatggatattcagcaaggtgccatggtgagccttgaaagattaagactaataaacctaagcagcatggaagaggtccctctaggcattgagtttctcatgcccctcaaatatctaagcttcgaggagatcactgttgtcttcttactgtcattgcgccaatctagaattgggggtatgcgatggtggcacactttacgagaggagaatgatatggaagcttgtgtaagaacgtacgctacttgattccgggcaattagctactgttatgaatataaatt

SEQ ID NO: 420556 - DNA, 427 bp, Oryza sativa
ctcgcttccccctaaatctcgccggattccgccgccgctgccgcgcccgcttcctcccgaggtgcagctctggccggggcacgcgcgcgcctccccggcggggggccgccgcagtcggtggactacggcggcggccaggcatccgacagcagcggaactgctgatgatcttcctccaccatatccaagcaataggggtattagaggcagtggacgtgtcagtggtaatggaagagctattgttcctgctggttcatacactagagcccatactgatatggcaacacaaatccatcatcttgaacaagaagcatattgctcggatcttcgtgcatttaaagcccagactgacgccattacatgtgagaaagaaggtctcataacaaaacttcggaaagagcttagggtatctgatgtagaccacaagg

SEQ ID NO: 420557 - DNA, 404 bp, Oryza sativa
tttgttgttttcgataaatattgcttcacttgtacaaagtacagataaaaatacattgatacatgacacggagagagccatgcacaccacttatttggacacacagagggcaaggctgcagagaaaatcaagcaacacaagctgaactcacggccccacctgtcagcctctcactggtcgaggccggagactcttgtgaaaaacagcaacaccacgcatgcagaagaagacaaattattacacacacaaatcgacgacacggcggccggcgacgtacggcgaggtcgtcgccgccggcggcgacgttgtgatgaggtcgatcagccgaagaggtggtgcttattctcgccggtggactcctgggcgctcttgtgggccttcttcttctcgcggtgctcgtggaa

SEQ ID NO: 420558 - DNA, 425 bp, Oryza sativa
  unsure (1)..(425): unsure at all n locations
tctcacatcttattgtcacttccatctcattctcctaattgtcatcactagcttctagctagcttaattaattaattagccatggcggaggagaagcaccaccaccacctgttccaccacaagaaggacgacgagccggccaccggagtagactcctacggcgagggcgtctacacgtcggagacggtgaccaccgaggtggtcgccggcggccaggacgagtacgagaggtacaagaaggaggagaagcagcacaagcacaagcagcacctcggcgaggccggcgccctcgccgccggcgccttcgccctgtatgagaagcacgaggcgaagaaagacccggagaacgcgcacaggcacaagatcacggaaggagatcgcggccacngcggccggtcggcgcccgccgctacgccttccacgag

SEQ ID NO: 420559 - DNA, 394 bp, Oryza sativa
tttgttttttatttatattatcttttttttttttttacatttttatggaattatcttttttacatattcaagctgaagagtcatccttaagaaaggagagttcacagaactacaaacgcaacctacctgaaataacctaacatcacaacaaaaaaaggagcaggacaccagggatctgcggagaaaccgtgaggactggtaccccgggcctcaaaagatgggcagaacgatagacaaaccgataatccccatcggctggcttcacagaaacggaacaagaccgagcggtgaagcatggccgtaaataacggagagggcgtcaccggactcaacaaaggatccctgcggggctcattaggcggcacgagctaaacccgaatgacaaacccaacat

SEQ ID NO: 420560 - DNA, 503 bp, Oryza sativa
tctttttctctctctctctctcccttgtttcagtggctcagaaattttcctcttttcttattattgctttcctttatttaaggaaggagttgggctctctctctttctctgagtctgaatccccacgagacgagaaacctagcaaaaatctcgtctttcgccgcgctctccctcctctgattcctgctgttcttgatcttggatctcaattcccaaccaagaacacacagacagagaaaggaaggagaagaagatgtcgaacgacaacaagaaggtgtataccctggaggaggtcgccaagcacaactccaaggacgactgctggctcatcatcggcggaaaggtatacaatgtgtcgaaattccttgaggaccatccaggaggtgatgatgtcttgctatcttcaactggcaaggacgcgactgacgattttgaggatgtcgggcacagcacgactgctcgtgcgatgatggatgagtattacgttggcgacatcgacacat

SEQ ID NO: 420561 - DNA, 451 bp, Oryza sativa
tgtttttttttcaattcaaaaagactgcccaaacagaccaagggtatcatcatagcagcaaagttttttaacacgcaacatcaaagagacactaatgcaataagataacttgaagcgcggatcactagcaaatttcgcgcttagtcgacctcctcgatcttggggccagcaccgctgccgcctgccgggggagcatcgtcctcgtccatgccgccggccatgtccgcgccagcgccctggtacatcttggcgatgatggggttgcagatgccctccagctccttcatcttgtcatcgaactcatcagcctcggcgagctggttgccgtccagccactggatggcctgatcgatggcatcctcgatcttcttcttgtccgctgccgggagcttcgaggcgatcttctcatccttgatggtgttgcgcatgttgtaggcgtagttctccagcg

SEQ ID NO: 420562 - DNA, 370 bp, Oryza sativa
  unsure (1)..(370): unsure at all n locations
taccattgaggtgggtatctttgaggtcaaggccacagctggtgacacccatcttggtggtgaagattttgacaaccgcatggtcaaccactttgtgcaagaattcaagaggaagaacaagaaggatatcactggcaaccccagggctctcaggaggttgaggacagcttgtgagagggcgaagaggaccctgtcctccactgcccagaccaccattgagatcgattccttgtatgagggcatcgatttctactcaaccatcacccgtgccaggtttgaggagctcaacatggatctcttcaggaagtgtatggagcctgtggagaagtgcctcagggatgctaagatggacaagagctctgntcatgat

SEQ ID NO: 420563 - DNA, 422 bp, Oryza sativa
tctccccgtaaattctcccccgaaaccgcccgagatggcggctgcggcggcgcggctgttggagagggcgacgagaaccgcggcatcctgctcctccgctcttctccgcagtcctctggattctttctccggacgcttcccaagcttccggtcgcccctcctacggccggctccggcgccgtcgaccgtcttcccccggggcctctccgacacggccttcgacgcgcaggcgctggacacccgcgtacccgccaccgtcatcaccggcttcctcggctccggcaagacaaccctcctgaatcacattttaacttcacagcatgggaagagaatcgctgtaattgagaacgagttttgtgaggtggacattgatagctcactcgttgcaagtcattcatcagttgccgaggacattgaaatgg

SEQ ID NO: 420564 - DNA, 347 bp, Oryza sativa
gtcgccgagacggtgctctttttcttcttaggccaggccgcgtgcgggctcaccttcggcatcgtgccgtacgtgtcgcggaggtcgctggggctcatctccgggatgaccgggggcgggggcaacgagggcgccgtgctgacgcagcacatctttttacacggcacagagtacaagacggagaccaggatcaagtacatggggctcatgatcatggcgtgcacgctgtccgccatgctcatctacttaccgcagagaagcggcatgctcgtatgcccgaagaagggggccacggcggaggagtactacaggcgagagtggtcggatcacgagcgcgagaagggttt

SEQ ID NO: 420565 - DNA, 496 bp, Oryza sativa
tataacctctccctccggcgatgtacggcgacaccgagccggccgccgccgccgccgcggagcgcacggcgttccggcgagccgagaagcagtacaagctctacaagccgctgaagcccaagggcggcagggcaaggagcaagccgggaggcggcggcggcggcggaggattggaggacctgtccgcggtggtcgacttccacgcgctgctcgctgccgccgccggcggcgggggggagctgcccgccgggatcgggaggcgcgacgtcgccgggttcgacctcttctgcttcttggaccgacctggattctatttcatacctggtgctctatctattgaggaacaatgctattggatcagggaaagcttgaaaaccttcccacagcctcctaatagaactaacctgacagctttgtatggtccaatttttgacttactcactgctgccaaaagtggaaagattttagtcgaagtgggaatcccatgaccaaaaag

SEQ ID NO: 420566 - DNA, 362 bp, Oryza sativa
tacgtgttggggattgactgattgctccggatggggatgaagaagaagcacgggagcatgggcagcaagacgtacccgacggggagcgatgagtacctggcggccgtgggcaaggcgaaacgcaagctttgcggccttatcgccgagaagaactgtgctccactcatgctccgcctcgcgaggtcactctgctggcaccttcgatgtgtcgtcgaggaccggcgggcccttcggcaccatgaagaaccccggcgagcagttctacgccgtcaacgccggccttgacaatgtcaccaggcttctcgtccctatcaaggaccaaacttccattcttttctacggctacttctaccaacttgctg

SEQ ID NO: 420567 - DNA, 382 bp, Oryza sativa
tgttttcgtgggcggacgcgtgggttggatatcaatctattgtatgccaccacggccatgcttcaagggttctgtgccaatcaatctgtctgatcgtcttaaccaagtgctacgttgggctcttgggtctgttgagattctgcttagcagacattgtcctatctggtatggttacaatgggcgtttgaaacttctggagaggctggcttacattaacaccattgtttatccaattacatccattccacttatcgcctattgtgtgcttcctgctatctgtctcctcaccaacaaatttatcattcctgagattagcaattatgctgggatgttctttattctggttttcgcctccattttcgcaactggtaattctggagct

SEQ ID NO: 420568 - DNA, 303 bp, Oryza sativa
gctttcacgccttcttccacgtttttaccgggtagagtttattaaaattgaggtaaccgaagtcgaatacctttgtttcttcggcagactcaattgggacactcacgaccgatcactcgaggccgacttgcacaactacggcctgatcctcgactccaagatcatcaccgacagggagaccgggaggccacaagggcgtgagcttataaattattactccgagctgatgatgcgcgacaccatctttggcctcaacggattggagcttaacggccggtactattaccgacatttacgcccatg

SEQ ID NO: 420569 - DNA, 443 bp, Oryza sativa
acatcaagaaaatctacactcagattattctaacgaatcgtataatgtcagggagcacacagttccactatatcagaccggatgatcgttacatttgttatggagcagtaaaaagaaacacaggtacagaaggtatctacaaggttgatgatgaggggaggtgaaactaatttgaccagacatgcaccaggcctttgctgtttccagtgtagatttcgttgcggtcctcgtcgtagaatagtgcggtgatgtcctcaagagcatcagaaacagtgctccgaatggtagatctgctgctgtcacctctttttcgaggagcaattgtgagagtagggtcgaggggggagatcttggcgacgcactttcccgtgaagatgttgattatgttgattgatcccgtggggggagctattgccctcgtagtcggcactatctttgacctt

SEQ ID NO: 420570 - DNA, 399 bp, Oryza sativa
ggtgtttttttttttttttttttttttttttttttttgaattaaaacaattcataagcttaaccaccaagcaaaaaatacacaagcttagatttcatttccaggggaaggggaaaaatgtgccatccagaataaggaaaagttacagcagggacatatatagatcttccactccaaatacagaaacagaaacaccgcgacctgagacagggacgggcaggccgcgaaggcccggggccagaggacaacggcagtatcactccatgtaccactgcaaaaactgacgggggaaatcccttgtgaaagggccgaagcggaaacgtctcggggccttggcctctgcacgagcctggattttgatacaacatcctaattccactttacctttaacagtgaagga

SEQ ID NO: 420571 - DNA, 458 bp, Oryza sativa
tacaagcctactcctagaaggttcaaggagagaggctgaggataagatagttcctagagaaatcgatgcagatgattctgatgtggaacccagaagtgatgatgaaagtgatgaggatgatgacgacgatgatgacactgaagctctaatggcagagcttgaaagaatcaagaaagaaagagctgaagaaaaccttagaaaggaacgccaacaagcagaagaggaggctaagatgaaggaagctgaactgatgcggggaaaccccctgatcaatattaacaacgccggatccttcaatgttaagagaaggtgggatgatgaatgttgtattcaagaaccaggctcgtggagagaccaagacaccgaaacgtttcatcaacgacactatcagaagtgatttccaccgtaagtttttgcagaggtacatgaagtgatgctgccgttgtacgctgttccct

SEQ ID NO: 420572 - DNA, 493 bp, Oryza sativa
tggacgcgtgggcgcgtgtcgtctttgcgttgtgcaataggtattgctggaaaggattcacaacttactagacctgattcacgtcctcgttggagcacgcaacacattgcgttacgcctctcgctgacagcaaccatggcagactatttcccggcgccggggcggaaccatctgtttgtgccaggtcccacaaacattccggacaaagtgatccaggcaatgaccagaaacaatgaggatcacagatcgcctgcttttcctgcgctcagcaagacgtgcttagaagatgtcaagcagctctttggaaccaagaagggccatgcattcattttcccgtccacaggaactggtggttgggagagcgccctcacaaacactttgtcccctggggacaaaattatctcctttcgtgtggggcaattcagcctgctatggattgaccagatgccgcggctgaatttcgacgttgatgtgggtgacacgtgatggggcg

SEQ ID NO: 420573 - DNA, 395 bp, Oryza sativa
tttgttgataaagatctatatactatgtaagtctgtaacaaccaacattttggtgcttaacacaacactagtcactcaaacaacaaccttcgctgtctaaggactgggaagaaagtcacagctgcctatttacatggtgtcctttattcattattgcagtgaaaaaccgcacatgataaaaccctaggtttggtttttcactgaagccaacacaagggtactatagaaccctcagcttggtaaggaagtctgcacagaagtccaggaaaaggagctgaggccccgtaactctctgcatatccagcagatacttcttgtctctggtctttgaaagctggatttcaaacttgatcacagcagggagccctccatttacatcacccgtatccattatg

SEQ ID NO: 420574 - DNA, 503 bp, Oryza sativa
  unsure (1)..(503): unsure at all n locations
tttattgtcatgcatgatggccattttttgaagacaagctgtgggagtccaaactatgctgctccagaggtgatctctggtaaattatatgctggacctgaggttgatgtatggagctgtggagtgatcctttatgctctcctttgtggtactcttccatttgatgatgagaatatccccaacctattcaaaaagataaagggtggtatatatactctcccaagtcatttatctgctctggccagagatttgatcccaaggatgcttgttgttgatccaatgaagagaatcacaattcgtgaaattcgagagcatcagtggtttcagattcgccttcctcgttacttagcagtgcctccaccagacacagcacagcaagccaaaatgattgatgaagatacccttcaagatgtcgtaaacttgggttatggaaaggaccatgtgtgtgaatctctgcgcaatagactgcagaatgaggcaactngtgcatattatttactctt

SEQ ID NO: 420575 - DNA, 402 bp, Oryza sativa
ggggcgcgtcgggcggaggccggtctccttcgtccactcgcccgcccggcggcgcatctcccggcccttgtctcctcccatcgcctcccgtatcttggcctccaccgcgtcgcgccgcacgtcgtcgtcgatctccatggcgacgccccactcggtgcagctgtaccggcggttggtctgctgctccgcgaagaacggccagcacagcatcggcaccccgccgcagaggctctccaccgtcgagttccagccggagtgcgtcaggaacacgcccaccgcctcgtgccgcagcaccgccttctgcgggcaccagctcgccagcaggccgcgccccccgacggactccatgaactctggcggcagcacggcggcatcgccgtggatgaggtcggggcggacgat

SEQ ID NO: 420576 - DNA, 497 bp, Oryza sativa
  unsure (1)..(497): unsure at all n locations
ttactggacacggttcagtgaccacacgaggttcacgagtacagtgacgcatacagagacatgggctccatcgcggccgacggcgacaagccgcacgccgtgtgcatgccgttcccggcgcaggggcacgtcacgcccatgctgaagctcgccaagatcctccaccaccgtggcttccacatcaccttcgtcaacaccgagttcaaccaccgccgcctcctccgctcccgcggcgccgccgcgctggacggcctcccggggttccgcttcgccgccatcccggacggcctcccgccgtccgacgccgacgcgacgcaggacgtgcccccgctctgccgctccaccagggagacgtgcctccctcacttcagccgnctcctcgccgaccttaacggcaacgcctccnccgagtcccccgccgtcacgtgcgtcgtcggcgacgacgtcatgagcttcggcatcgacgccggcagggagttccgcgtgccgtgcgcgct

SEQ ID NO: 420577 - DNA, 426 bp, Oryza sativa
aaggatggaattgagtagcaatactttcaccccaaaatacagtttagcgacaatatcttagaaaagccgcttgctttgccgccatggctggcaagctgagcagagcagctaacacaaagaacacgagatcactataaaccaaacggcaacgaacgaagaaaatacagggtcttttttgtctgaagatacacgaagcggttcgttttcttttatttttagtctcctctcctcctcgatgatgggtgtatggcaatggcaatggcgatgggatcttggcttagttgatgggaaggggctcgccgttccactccttgaggcagtcgagcatggggtcgatgagcttgccctggctgatgccgaggaacacctttgtgcactcctcgccgggggacttgagctttttcgccgtgaggaatacgcagacga

SEQ ID NO: 420578 - DNA, 438 bp, Oryza sativa
ttggcgacatctacggcgtcaccaccggcttcggcggcacctcccaccgccgcaccaaggacggccccgccctccaagtcgagctcctcaggcatctcaacgccggaatcttcggcactggctccgatggccacacgctgccgtcggagacggtgcgggcggccatgctcgtgcgcatcaacaccctcctccagggctactccggcatccggttcgagatcctcgaggccatcaccaagctgctcaacaccggcgtcacgccgtgcctgccgctccgtggcaccatcaccgcgttcggtgacctggttcccctgtcctacattgccggcctcatcaccggccgccccaactcgcaggccatctcgcccgacggcaggaaggtgggacgccgccgaggcgttcaagctcgccggcatcgagggtggcttcttcacgctg

SEQ ID NO: 420579 - DNA, 470 bp, Oryza sativa
tttgtttagcacaattgcagttttccttgattccaatttccaatgaatgagacaaaacaagacggcgtgtacacagttcacgcaacaacacttaaaattaaatcttacagctaatcgcaagcagcgacatgagaaacgacatgaatttttatagcaagctagaagggctgctggtgctcgcagtcgaggttgggcccgacgtcgacgccgagcacctggcagtagcgccggtagaagccgatgcggttgttcacccgggcgtcgcctgcccggttgcactcgagcccgccgttgacgatgttggtgaccagcccgaagcccgccgtgcggttagccgccacgtcggccgggccgggccggtactccccgaccatcacctggtggcacgacggcttggtgtcccttggcgtcattcagaaccacagcgccgtctggaacgctatgtccgagcagttggccacgatctccgg

SEQ ID NO: 420580 - DNA, 441 bp, Oryza sativa
tcagttgcagccatggcgaagcccactcctgctcctcgcgccacaccattcctcctcgccgccgtgctctccatcgtcgtcgtcgcggcctccggcgcggaggcgcggtggtacggcggcggcggcggcggcgggtacagccccagccccagcccggtgtcgtcgatcgtcagcgagcagctgtacgcctccctgttcctgcacaaggacgacgcggcctgcccggcgagggggttctacacctacgcgtccttcgtcagggccgcgacgaggttcccccggttcgccgccacgggctgcgccgacgcccgcaagcgcgaggtcgccgccttcctcgcgcagatctcccacgagaccaccggcggctgggccaccgggcccgacggcccctacgcctggggcctttgctacaggaggagatcaacccgcagagcaactact

SEQ ID NO: 420581 - DNA, 98 bp, Oryza sativa
cagccgccctccttttttttgttgtgtctgaaactcacatcgataataactcacgacaaaaggagctaaacaatattggtatggtagaatcgaccaaa

SEQ ID NO: 420582 - DNA, 437 bp, Oryza sativa
ttcttgctctcttcccccccgcgtccagttccatctaatcagcttctcgtcgagatgggccgcaagttcttcgttggtggcaactggaaatgcaacgggaccactgatcaggtggacaaaattgtgaaaattctgaatgagggacagattgcttctacagatgttgttgaggtggttgtcagcccaccttatgtgttccttcccgtggtcaagagtcagctgcgcccggagatccaagttgctgctcagaattgttgggtgaagaagggcggggctttcaccggtgaggtcagcgctgagatgcttgtcaaccttagtattccctgggttattcttggacactctgaaaggaggagtttgttgggtgaatcaaatgagtttgtttgagacaaaagtggcatatgcgcttttttaacggcttgaggtcattgcatgtg

SEQ ID NO: 420583 - DNA, 309 bp, Oryza sativa
tttgttgccaaagaacggcaataacatttgatttcgagtctttaaccgaaccctgtttttacactaattaaccgaccaaaccctattacaaagctgctaatgaaaacgagatctaaaacgcggaagcgagaggggaatcaacaagttgaccacgtcacgtcgtcgtcgttgatccccccagatcgcttgggcgctacgcaacgcaaccgtgtggaagggggtggattacgcgcgctcgccgcggatgcggcgggcgagctggatgcccttgggcatgaaggtgacgcgcttggcgaggatggcgcaaag

SEQ ID NO: 420584 - DNA, 463 bp, Oryza sativa
ttccttgccagtttggtcgctctcgatttcgatttcccccaaatccaccgcaagagaaagccaagtcgccgccgagaagcgaagaggagatggcccgtacgaagcagaccgcccgcaagtccaccggcggcaaggccccgaggaagcagctcgccaccaaggcggcgaggaagtctgctccgaccaccggcggcgtgaagaagccccaccgctacaggccggggacggtggcgctccgcgagatccgcaagtaccagaagagtacggagctcctgatccgcaagctccccttccagcgcctcgtccgcgagatcgcgcaggacttcaagaccgacctccgctttcagagccatgcggtgctcgccctcaagaggccgccgaggcctacctcgtcgggctctttgaggacaccaacctttgcgccattcacgccagcgcgtcaccattatgcccaggacattca

SEQ ID NO: 420585 - DNA, 386 bp, Oryza sativa
ttttctcttgcttcctcatcataaccattccatccgcggttgatgagaagagctccagggagcatctactcaaatggcgggcgttggcaatatatagactcccattgatcacagcctatgcgatcatgcattctagaccaattgttagaaacgcctttcgaactgcaagatgcccgacctcaagattgctaggatgacacaatctgaaattcagagcgatctgtgttaccagagccaggctgtgcttgacctataaaaagtttgagaaacgtaccttgttggtctattagaggacaccaacctgtgcgctattaatgacaatcgtgtgcccattttttttcaagtaatacaattggctaggaggatttgtggagagaggtcttaaa

SEQ ID NO: 420586 - DNA, 448 bp, Oryza sativa
tgttgttttacacgaacagcaacggaacattacattaacacggattagagacaggtgaattacaatgtaattgtatctagccatgcacagtgccaaagaggcagcaccgctagaataagacgcaaacgaatccgactaacaaaatacgagtcaccaaacacactgacaatattctgagtatttttgacagatccaccaataagacgaatacagcaccatcatgtcacagagagaaacatattgttccacaaaatacaccctactcagattgttcttataagcaaaagattaaacccactactaacactacgacgcatgcttcatttgtcaaaggagtcgccgaggggaatttaagccctttcaccacgaatccttctagccagctgaatgtccttaggcatgatggtcacacgcttggcatgaatagcgcacaggttggtgtcctcga

SEQ ID NO: 420587 - DNA, 510 bp, Oryza sativa
cagaccgctcgttagttcacaggaggaaaggctcccaggaagcagcttgcaaccaaggctgctcgtaagtctgctcccaccactggaggagttaagaagccccaccgttaccgccctggaactgttgccctccgtgagattcgcaagtaccagaagagtactgagcttttgatcaggaagctgcccttccagaggcttgttagggaaattgcacaggacttcaagaccgatctgcgtttccagagccatgctgtccttgccctccaggaggctgcggaggcataccttgttggtctcttcgaggacaccaacctgtgcgctattcatgccaagcgtgtgaccatcatgcctaaggacattcagctggctaggaggattcgtggtgagagggcttaaattcccctcggcgactcctttgacaaatgaagcatgcgtcgtagtgttagtagtgggtttaatcttttgcttataagaacaatctgagtagggtgtattttgtggaacaatatg

SEQ ID NO: 420588 - DNA, 446 bp, Oryza sativa
tttgtttttttctgttatgaaaagttcattacgacaattatgactaattggcagcattccaaaatattcctcaacgttgacactccatgccacacaatacaatcgaaatttctagaataggcaacatttccgagcatctcggagacaagaccaacatcaccactcgaatgacactgagggggaaatatacaggggaagaagcaaaaatgctatctttaggtagtcgtttgacgacagacagttaagtgtagtgcacctgttgtagcactcgcttactcccccttgtgctccttatctttcagagcatttcctgtgatttacgaacaatgcgtctaacctttttcttgaaatcgtccctcttttctctccaatccttagccgcttcaatatttgctggagactcatcatttggactagagagcatcgaaatgatgctcagaactata

SEQ ID NO: 420589 - DNA, 510 bp, Oryza sativa
ctccacgcctctacatttaaagctcgtcccgaggaagggcggcgacccaccccccccaatcgccaaaaccctaactccgatccgatcgagctctgcttcccatggcgactgccgcgagccaggcgagcctcctgctccagaagcagctcaaagatctcgcgaagaaccccgtggatgggttctcggcggggcttgtggacgatagcaacgtgttcgagtggcaggtcaccatcatcggcccgcccgataccctgtatgatggaggctacttcaatgcaataatgaccttcccccagaattatccgaatagtcccccatcagtaaggtttacctctgagatgtggcatccaaatgtttatcctgatgggcgcgtatgcatttctatccttcatccacctggcgaagatcccaacggttatgagcttgcgagcgaacggtggacacctgtgcatacagttgaaaagatagttctgagcatcatttcgatgctctctagttcaaatgatgagt

SEQ ID NO: 420590 - DNA, 453 bp, Oryza sativa
ttctttaggtggtcctcaaggcctctggccacgtggaccgcttcactgacttcatggtcactgacgagaagacgggcgactgctaccgtgctgatcacctgttggaagcagcaattgaggccgcgctggaggacgcaaagaaccccctcagcccagaggcacgcaaggaggctgagcagttgctggctggtgtgggtgagctgggcctggaggcgctgcatgaggccctcaccaaattcagcgtggtggcaccggacaccaagaaccccatcagcaggcccttccccttcaacctgatgttcaagaccagcattgggcccaggggagacctggtgggctacctcaggccagagacagctcatggcatctgtgataacttccgtgacctgctgtacttcaacggccgcaagctgccctttgcagctgcacagattggcaatgcatacaggaatg

SEQ ID NO: 420591 - DNA, 452 bp, Oryza sativa
  unsure (1)..(452): unsure at all n locations
tgtgtctggtcataatattcacctaaaccaaatcggctctggaataggtgctccgacaaatgtgtctggattgagtttccatcaattgggcacgcaaagtcgtgaaatggcacatgataaaccgcctgctggtggtggttggacgccacatagaaacagtggaccaaccagaaaagctccttcaaggggtgagcagaatgattactcacagaactttgtggacactggcatgcgacctcaaaatttcattagagaactggatcttacaagtgtagcagaggactatccaaaattgagagaactcatccagaggaaagatgaaattgttgccaattctgcttcaccaccaatgtattataagntgtgatctgaggcaacatgttctttcttcaagatttttttggtacaaaagtttgatgttattcttgtggatccttcatgggaggagtatg

SEQ ID NO: 420592 - DNA, 473 bp, Oryza sativa
ttcttttcgccaacaactatacaaagaaattgaggtagcaagtgttgattccttccagggaagagaaaaagattacataatcctgtcttgtgttagaagcaatgagcaccagggtattgggtttcttaatgatccacgcaggttaaatgtcgcattaactcgtgctcggtacggtatagttattcttgggaaccctaaagttctaagcaagcagccactctggaatagtttattgacacattataaggagcatgagtgtttggtagaaggacctttgaacaacttaaagcagagtatggtgcaatttcaaaagccaaaaaagatctacaatgatcgacgactcttcctgggtggcggtcaaggtgttatgcaaggagctagttttggtgctgcaggcacaaacccagtggcagataagaaaagtggtagggggaaagggcattcctttgttccatttggcccaccaaatgggg

SEQ ID NO: 420593 - DNA, 346 bp, Oryza sativa
tttgttgtttttttttttttttttttttttttttttttttgcttacaaagaacgggaataacatttggtttagagtttttaaccgaaccctgtttttacactaattaaccgaccaaaccctattacaaagttgttaatgaaaacgagatctaaaacgcggaagggaggggggaataaacaagttgaccacgtgacgtcgacgaaggtgatccccccagatcggttgggggctacgcaacgaaaccgcgttgaaggggggggtttacgcgcgcttggcgaggatgcggcgggcgagctggatttccttgggcatgatggggacgcgcttggggtggatggggcaaag

SEQ ID NO: 420594 - DNA, 446 bp, Oryza sativa
tttgtttcgtgggtcgatttcgatttcccccagatccaccgcatgagaaagccatgtcgtcgccgagaagcgaagaggagatggcccgtacgaagcagaccgcccgcaagtccaccggcggcatggccccgaggaagcagctcgccaccaaggcggcgaggaagtctgctccgaccaccggcggcgtgaagaagccccaccgctacaggccggggacggtggcgctccgcgagatccgcaagtaccagaagagtacggagctcctgatccgcaagctccccttccagcgccttgtccgcgagatcgcgcaggactttaaggccgacctccgctttcagagccatgcggtgctcgccctccaagaggccgtcgaggcctaccttgtcgggctctttgaggacaccaacctctgcgccattcacgccaagcgcgttaccatcatgccc

SEQ ID NO: 420595 - DNA, 315 bp, Oryza sativa
gttcttgttaacttcgtttgagaccatggcaatatcagaaatgtcagctcttttctttctatttagtgctttgctaagaagttctttggtccacagtcaaggattgcagatagggttttatgataataattgccctgatgctgaggacatagtcaggtctaccgtcgaaaagtattacaacaatgatgcaaccatagccccaggcttgctcaggctacatttccatgactgttttgttcaaggatgtgatgcgtcagttttgatttcaggtgcatcctctgagaggactgcaccacaaaattttggtatcagggg

SEQ ID NO: 420596 - DNA, 432 bp, Oryza sativa
tgtgttttttttttgacaaacatgaacatcactgtacctcttttacttgcataacaattcgaaaacatcagaattgccaagtttatcatatgagcagcagccgattcacaaggaatggggtgtttccgatgatgattagatggatagcgtctttaacaactaagaactacaagatagaagggccaaaactgttaaaaacagcacacagaaactagagcacactcaatatagactaatataaccacacgctgatagtgttttctttttcagaatcatgaactattttcgaacggtaaatccaaaacctaaatagctcatttttccacggtatccttgctccaacgacgcctcacttgaagcatttcgcattcaggataggctcgccctcaaatggctcaaggtcctcaataatggcgctgacgcgctccttct

SEQ ID NO: 420597 - DNA, 495 bp, Oryza sativa
ttttacttcttccactagggttcgtcttgctgctccctccactgctcgcctcgcctccgccaccatctgaaatcgagtgagtgggagctaaggcggcggccccgtcgagatggcgctcgtattgcatactttcgatggaaacaagaatgcattcaaggcactcattgctgccgagtactctggtgtcaaggttgagttggcaaagaactttcagatgggtgtctccaacaagactcctgagtatctcaagatgaatcctattgggaaggtccctattctagagactcctgatggtcctgtttttgaaagcaatgcgattgcacgatatgttactcgctcgaagtctgacaacccactctatgggtcttcactgattgaatatgcccacattgagcagtggattgacttttcagccacagaggttgatgctaatactggaaaatggctcttcccacgtcttgggatttgctcttatgttgctgtcagtgaggaagc

SEQ ID NO: 420598 - DNA, 415 bp, Oryza sativa
tgtgtttttttttttgaactgaacaatgcttcacattaccaaaccacatatacagtaagcatctcccaatccttttttgacgcatgaacaattttgacacatatgagcatcagagagaggaacacacgtgtagtagtactgtacaataatataacacatctaagctaccattatactaaatctgttccattttgaatcattgatcactgggttttagggccactggccaacccaagagctttgaccagacgaaggtgccattgatggccatcccggaaccgcagtttgctgtagtccatgacgatcctgcaggagctccatgcctcggcgtgcatgctgacgccaagatagtatatgtggtcttgcacgctgctcccactcacagacctgcagcatgatgggtcttcaccagaat

SEQ ID NO: 420599 - DNA, 424 bp, Oryza sativa
ttttgggtggttgaggctttgaacatcttcatttcgagatatttacacccagatcgagaagcaatacgctgcctatcttaaacatctcctcgtcacaaaaatcaaacaaacacgaaactctctccaaaaagagaaaaaaattgaacgtaatcctatcccctttcggagcaataatatacaaacacaaaaaaaacactagtcctgtctccacatttccagttcttcttcttgttttttttttttcagatagacgtctgcgtcggcgtctttgacgatgagaaaggcttcgtttaattagtggtgctgaacgatctcatgtttggatgaccgggttgtttcgttctcccttttgctggctgctgctgaccttgaggtcggcgaaatcggtgatcatggccggcctggtgatcccgtgcacccgaga

SEQ ID NO: 420600 - DNA, 427 bp, Oryza sativa
tttcgagcaacatacttcttgacaaggacctgtgcctattataagtctgattgcggattggcaaggctcctcccacccaacgcaactcatgtgagcacccgaggtgcaggcacattaggatacctggcacctgaatacgctatccgaggccaggtgacaaagaaatccgacatctattgctctggtgttcttctactggaaatcgttagcggcagatgcaacaccaacacaagattggcttatgaagatcaattccttctcgaaaggacatgggtacgctacgagcaagaacgcctggctgagaacatcgatgctgacctggggaatgacctggacggcgacgaggcatggccggttctgatagattgggccgtttgcacacagacgcaaaggcgccgccgcccaacatgagcaccgtggtcaggat

SEQ ID NO: 420601 - DNA, 451 bp, Oryza sativa
tttttgtttgttttttttttttttttttttttttttatacaggttcgggccggtgcgaagcgtaataccctactcctgggtttttggggatttgggtatgaatgagctacaaagtgggagccaacttttcccccgttctaagctttaaatctggaaaagaatcaaaaaaaacccccttttttatgggcaagggcctccttttatacttcaaggggataccacatgcacccacccctttccaaactggacttttcttttttttatggacggagattggtatggttgctgtccgaatgacactccgatgggacagcccacacctaccttcacttccgggggagacaggcgcaacgtgggatactggctgcccgttgctgacgcgaccagtgccagaccggtcattcttgtccaccacgcgtcagtttaacaacatgcatgtttgcccttcctt

SEQ ID NO: 420602 - DNA, 434 bp, Oryza sativa
tttttgtttttttttggcatgaatgtaaattgccatgtattttaatcatgtgattcatgaatattggaattggctgttcttgcaagcttacaatggagtacatctctgcatgaaacaacaaacaaatatcccccttcctcgccaaaatcaccatgaacgttttcctaccagtaatctttacacgagcagaggccatccctgaaatgatgaaacctcgtggcgtcccgcacgatgatctccctgtccgtgaccttggagatggccttgatcgcggcgtggcagtcgttgcacacccgcaggttcttcatgacccgcagcgtcgtcttctccggcgtgctgatgaggccgaacgcgatggcgagcttctcgctgtgggggctcagcagctcctccttgagctcgtcgtcgacgtcgggcaggacggactgcaggtc

SEQ ID NO: 420603 - DNA, 429 bp, Oryza sativa
gtgcattcatccaccggctcaagctgggtagtgatcctttaggcctcgccgctagttccaccaccgggcgccaccatgtgcgggatcctggccgagctcggagccgacgactggtcgcaggcgaagagggctcacgtcctctcctgctgccgtaggctgaagcacacgggacccggctgctccaggttgcaccagtgcgagggaaactttcttgctcaacagcgtctagccattgtattaccggtctccggcgaccaggcgttgtacaacgcggaccgggccatcgtggtcggggccaatggagagatctacaagcacaagaagatcaggaagcagttcgacttccaggacacagtcacgaccggcagcgacctgccagggcatcatcccgctgcatgaggaggaccgggaggacctcgtcgtcatgct

SEQ ID NO: 420604 - DNA, 292 bp, Oryza sativa
tgggtgggaacaccagcagaatctgtttcttctttatttatcaatcaatcatgctctgagagactgtaacgagaatgaacacaacttttgggctacaagatcaaaccaaaacgtgacagtacaagcgtgccatgggcgaaggcatattgacgtttactttacaaggacggtgagagatcaccggagcaagcaaaacaccccagtctgtggtcctactccttgacctcctccctctccctccgcacggacccgaaccgatcgaccaggatgttggctacgatcggctgccagc

SEQ ID NO: 420605 - DNA, 333 bp, Oryza sativa
  unsure (1)..(333): unsure at all n locations
atacgcncgcgagtacggctacggcgagctgtgtttatttaggagcataacattttgatcccgaacgtcaagaacgagaaggtggaggcgctgctctccgagccgctgcttcagaagttctccccgcagccgtcgctgctgctcaagggcctcgtcgtgtgcaccggcaaccagttctgcggccaggccatcatcgagacgaagcagcgggcgctgctggtgacgtcgcaggtggagaagctcgtgtcggtgccccgggcggtgcggatgcactggaccgggtgctcaaacagctgggccaggtgcaggtcgtcgacatcggctttatgggct

SEQ ID NO: 420606 - DNA, 368 bp, Oryza sativa
tataggcccagaacgcgtcatacaaacatttgagagccagtcatgggtgcactccaatcgcttagcactttcagagtatgttaaagctcttgtcaaggcagataggctggatgatagcaccttgctcaaaacactacggagaggtatggtctgttcaagaggagaggcagacagacatgataggtcttctgaattaaagagtgctgctcaagcgacaatagatggaactcttgagactgcaaacgcacccattcacatggtgacatcagacacaggccagtgtgaggatcagatctggcggacctttcgaaggcttgcactagctatccttgcaattgcagtcattggggctctcatggaggatagag

SEQ ID NO: 420607 - DNA, 472 bp, Oryza sativa
tttttgtttttttttttttagggtcaaattcaacttattcataaagcatactgctgtcccacaggaaactgtttcataaaactaacatatcatacgggctcgatggtccattaaaccagacacaagtagacatgagcaccacaaatacttgacgaacagaggctcgggatgaccaggcacatcgggaggttcaccaaactggctgattactgaccaccacggaggcggagcaccaggtggagggtggactccttctggatgttgtagtcggcgagggtgcgttcattctccagctgcttgccagcgaagatcagacgctgctgggctgggggaatcccctccttggcctggatcttggcctttacattatcaatggggtcggagctcttaaccttcaagtgatggtcttcccagtcaaggtcttcacgaagatctgcataccaccacggggacgaagcaccaggtggagggt

SEQ ID NO: 420608 - DNA, 490 bp, Oryza sativa
cctacgcgtgcgggaggatggcaggacccttgctgactacaacatccagaaggagtcgaccctttaccttgggctacgtctacgtggtggcatgcagatctgtgtcaagactctgaccggcacgactatcacccttgaggtggagtcttctgacaccatcgacaacgtgaaggccaagatccaggacaaagagggcatgctcccagaccagcagcgactcatgttcgccggcaagcagctggaggatggcaggacccttgctgactacaacatccagaaggagtccaccctccaccttgggctacggctccgtggtggcatgcagatctttgtcaagacactgaccggtaagaccatcaccctcgagggggaatcttctgacaccatcgacaacgtcgaggccaagatccaggacaaggagggcattctcccggaccagctgcgtcttatacttgccggcaagcagcttgaggacggcaggacccttgct

SEQ ID NO: 420609 - DNA, 434 bp, Oryza sativa
tttttggtataccaagaaattatttattattaagatcattacatgctttattgttcacggacgtcgatcccagagtcacaaacatcgatgaaatgtactgcggcagcgacatagcatgcagttcaacacgactgtgtacgagtgagtggtcgtctacttggccgcggcgtcgagggtgaggaacgggcgctcgccgttgaagttgcccggggggtcgtagttgcaggtgatgaacacgccgcggttcgccgcgcacacgacgcgggcgcagccgatgcgcaccgacttgcgccacaccacctgggtgtagtggccgcacaccttgcccgggtcgcacgtgttggtgttcgaatggtagttcttcttttcgcccacccacgacgccaccgcgtcggcggtgctccaggcgcgccccgccgagccccagaagatgt

SEQ ID NO: 420610 - DNA, 377 bp, Oryza sativa
atgacgcgtgggcagaaaatggcaccttccaaggtcagcctcgccgccgtgctcgccgtggccatctcgctggccatggcggccaccaccaccacctcggcgcagaacacgccgcaggactacgtcaacctgcacaacagcgcgcggcgcgcggacggcgtcggcccggtgagctgggaccccaaggtcgccagcttcgcgcagagctacgcggccaagcgcgccggcgactgccggctgcagcactccggcgggccgtacggcgagaacatcttctggggctcggcggggcgcgcctggagcgccgccgacgcggtggcgtcgcgggtgggcgagaagaagaactaccactacgacaccaacacgtgcgacccggg

SEQ ID NO: 420611 - DNA, 541 bp, Oryza sativa
tttttgtttttaacaaaacacagaacacgatgtgatgtttaagctttcggtgcaatggaagtcgtctatgtatgaatctcacgtgatgaatcacatatacagcaaaatgtcaggcaggtcagctctgctcagtggtcaggtgaggtgctgccgcttgtatctgaaacaatgagaaactatctccacacctcaacaacactataccctaagctgactgagggaatccggaccaacgaggtatattcgtcttcgactactcttgtaccggaagactactactcctttataagctgttcttggaatgccatccttccattcttcaaatattccaaattgacgagctatccgctcaaagtcttcctgatcgttatactggatccttacatccgcatccatattgtgggctttcaacgcggcatcagatccatggagaggggtggcactagcgacgtctttcccaaattggatcaggaacttgtcctccttgaggtagctcaggtccctagaattccacttgatatgggcatcatttaacttgatt

SEQ ID NO: 420612 - DNA, 528 bp, Oryza sativa
aaaaagtagtctggtcttatggtattgtccagaaagttatattgagatggaggataaagggacgtggtttgcgtggctttcgacctgagaaacaattagaaggccagacacaaatgcagcctgcaaaaacagaggatgaatacgattacttgcaggatggcagaagacaggctgaaggcagactacagagggcactggaccgggtgcgctctatgacacaatacccagaagcaagagaacagttccgtaggcttacaacttgtgttgctgaaatgcaacagtccaggatgatgcacgacgagatgctaagtgaggcagctggtgctgacggaagtgatttcatgaatggactggaggacttgatatgcagagacgacccccaaatgactgccatttggtgaagtcgaagttgttacatcagttaggccgatcattgcccttgtcattgacatattagccttgtaaattctttccgtttgagttcactcactgattaatatctagctcatgctgttagtattatgtaac

SEQ ID NO: 420613 - DNA, 478 bp, Oryza sativa
tcttacactttgtttctcttccccgtctcgtggtctattgaaaccgagaggagagagagggagaggagcgctgcctattttccggagggggagatctttttcttctccctgaaggttcgagatcgatctgcgacgaggaggagcggggaatcgtaactttatttccgaggaaatttcaacaaattgatgcactaatggagtccaagggtggcaaaaagaagtctagcagtagtcgttcctccctgatgtacgaagctcccctcggctacagcattgaggacctccgacctgccggcggcatcaagaagttccgctctgctgcttactccaactgcgcgaggaagccctcttgatagcccccttggctaccttgatctagtagtttagttactcctctgaattcctgttttgggcttttttacatctctctggctagctgcttcccagtgaccgggaaggacattagtcctgcttcctt

SEQ ID NO: 420614 - DNA, 455 bp, Oryza sativa
cttctcggctccctgcttatccctccactccccgtccggccatggcggggtcgttttttctccgagccgcccgccggcgagacctcgcctcgcccctcggaacgttgaccgtcaatgctcaatcggcatattctgcgaatatttgttcacaatggggtagttttgcaagagctttcagtgtaaaaccaactggaaacgaggttattggaattgatttgggaacaactaattcttgtgtttctgttatggagggaaagaaccccaaagtgatagagaattcagaaggcaccaggacaacaccatcagttgtggcctttaatcagaagggagagcgacttgttggaactcccagcaagcgtcaagcagtgaccaacccacaaaacactttctttggcacaaaacgtctgattgggagacgcttttgaggatccacaaacacagaaagagatgaaaat

SEQ ID NO: 420615 - DNA, 481 bp, Oryza sativa
ttcgccgccgccgccgccgccgacgccgccgggtccgcttcgactcccgccgccaggttctctctctccagcgcgcaggcaccatggccgaagccgaggttaaggacaacgaggtttacgaggaggatctcgtcgactacgaggaggaggtggagaacggcaccgacggtggcgccaacgccgccaacgcctccgccgatgtcgtcaagaaggggtacgtggggatccacagctcggggttcagagacttcctgctcaagccggagctgcttcgcgccatccaggactgcgggtttgagcacccttccgaagtgcaacacgaatgcatcccacaagccattcttggaatggatgtcatctgccaagcaaaatctgggatggggaagactgctgtttttgttctctcaagtcttcagcacattgatcctgttgctggtaaggttggtgcacttgtgctatgtcacacaagggagctagctta

SEQ ID NO: 420616 - DNA, 273 bp, Oryza sativa
tttttgtgaaaaatcaaatgacaaatttttttagaaaagtacattattgattactaatagcacatacaacacatcaacacattgccacaatctctactgtcatttcacttgtcaaaatatttaacattaagactgttcgttcaatgattgtggttgtggctgctcaccttgccaagcccatacaatatcctttagtgctggtctcatctcttgtttgaccttttgatactcaagtgtatcaccatttatcttcgtaaattccactaaatgaaa

SEQ ID NO: 420617 - DNA, 390 bp, Oryza sativa
attatggggagaacgagctctttcctgggcagatacttttgcagcttgtactacttatgcttgctttggtttgtgagccttggatgctgaatcctaagccattttttttgaagaagcaacatgagcagaggcaccatggccagcagtacaccatgcttcaggtcactgatgaatcagtgacagagctagaagaacaccaggatgaccctcaccaccatgaggagttcgaatttagcgaagcctctgttcaccagctgctccacacaattgagtatgcgctctgagcagtcataaagacagtcttttaccttcgtctttaggatcttagttttgcacactaggagctggccactgtattttacgagaaagttcttgttttataatgggggt

SEQ ID NO: 420618 - DNA, 278 bp, Oryza sativa
gcgttttcgagcccgacccgcctgggcttcgccggcaacaaagtgactcataactaggcaaaaatgcatcggcaggagaatgtttacatgggcaagctggtccagcaggttgaagggcatgaggtgatggccgtgaacatggagatggttgcatagactgtacattaagaagagctcactgcagtggaatgcaacctctcctctgttgcttagaagaatgtgattggggcccaccacgcctccagagatgtcgatttattcagtgcacactatgagga

SEQ ID NO: 420619 - DNA, 539 bp, Oryza sativa
tgcacgcacgcgtacgctaggatgcattctagtggccgccctttttttttttttgggacgacaactttaaatattgctcaataaaacactatctggagacaacacacacgagagtcatatccagaggaaaacaatcagcccagacggaccactagcaccaaatgcaaagcaatgggaagaactaattcgaccgctaccaccctagtaaaaaccagagaagagagaggaaggggggacaggaagcaaaacattctagtagaacaggagaagaatccatccatcatggagacagtagcatgaggcatctaaatcgatggtctccaataacatgcggagccatcgatcgatcgatcttcccattttactggccctcgccggcgtagcccttggaggcttctttcacctcatcaccaccgtactccgtgaggtcagaggtccagagggtcaagttgtccctcaggagctgcatgatcaaagtgctgtccttgtaagactcctccccgagggtatccaactcggagatggcttcgtaaacgcct

SEQ ID NO: 420620 - DNA, 489 bp, Oryza sativa
tcgcatacacgagacttatacgaacccgacccgcctcgccgccgccgcggccgatgttatcccttaattggtcaaaatgtctcgggaggagaatgtctacatggccaagctggccgagcaggctgaaaggtatgaggagatggttgagtacatggagaaggttgcaaagactgtagatgtggaagagctcactgttgaggagcgcaacctcttgtctgttgcttacaagaatgtgattggtgcccgccgtgcctcctggcgtattgtctcatccattgaacagaaggaggagggtcgtggcaatgaggaacatgttactctgatcaaggagtaccgtggcaagattgaagctgagctgagccagatttgcgatggtatcctgcaagtgcttgactcacaccttgtgcccttatctactgttgcagaatttaggtgttttacctcacgatgaaaggtgattaccacaggtcccttgcggaatttaagact

SEQ ID NO: 420621 - DNA, 515 bp, Oryza sativa
tttttggttgtttttacagcaaagcaacatcgggagcccattggtatatatatatattttgccattgctccttgctgtaaacaaaaccgatcctcaaaaccattattggtgctcttttacttaatggacatgtcgaaactacaaacctactagccatcacctctattatatttatagccgttgatcatttacaatttcagcaagggaaggtgattcaaagtcattgtatttactcggaactggggtgttccgtctggactggcgctttgtcgccacgagaacctgctccgcctttggttcgtcggagatggagaacttcttgttgacctcgtcgcctttgaacaccgggtggatgtaggcattcatcaggtatcctttgaggtcgaaccctggctctcttgcgcgttctagggtatccttccgcattgcatcctgaatggatatttcacaaaagcaggctcatagcgattcttgcagtatttatagaaataaaaggttacaacagggagaacaag

SEQ ID NO: 420622 - DNA, 528 bp, Oryza sativa
  unsure (1)..(528): unsure at all n locations
atatcttcaccaatcagcaaatgaaataccaaggacaattggtgaagcaattccaatgaaagcaaccttttttataacatacgtaatggttgatggttgggctggggtagctggtgaaattttaagattgaaaccattgataatcttccacttgaaaaactttttcttggtcaagactgagaaagacagagaagaagcaatggaccctggaagcattggttttgactcaaatgagcctcaaatacagctctatttcttgctcggacttgtctatgctgtggtgacaccatttttgcttcctttcatattaatattctttgggttagcatatgtggtataccgtcaccaggtaataaccctttggaacactttgtgatttttagcactttgtgattaatcatgaatctgtccatattctgttttggngtgccaagtgaaagtaattcttgaaaaaatcattttcacaaatatatgtctatcaatctgagtacttttttttgtactttgttcaaaaaatcatgaggcttg

SEQ ID NO: 420623 - DNA, 494 bp, Oryza sativa
gccgccgggcgtgcggaggggcggtgcgacgtacgccagcgccccgcccccgccgcgcagcgcgcacgccgcgccgcccagcttcttcgactgcgccgccgccgccttgtgcgcgccgccggcgacgaggcgggcgaggccgaagccggagacgtgggcgcggagctcgtcgtcgagcaggatcttggatgacttgatgcacccgtgcacgtaccggcgtgggctgcactcgtgcaggtatgccagccccctcgccgcgccctgcacgatggacagcctcatcgaccacggcaatggcgtcggcgacgccgtcgggccaccgtggagagcggagtggagggagccattggagaggtagtcgtagatgagaagcttcttcgtcgggcgcgtagtagtaggcgcggaggcgcgcgacgttggggtggcgcgcgcggccgatggcggcgggcttggttttgaacgcgcggcgccggcgccacccggagtcggagccg

SEQ ID NO: 420624 - DNA, 425 bp, Oryza sativa
tcttgccttctcccgattcatggcagtggcagggttgtaaattggtagcttcggttgcgagcggccacttccgtcgcaatggcggcagctgcgcgggcggcggcggtggcggtggtggtggtggtggtggtgctcggcgtggaggtggcggctgcgctgaacacggacgggctggcgcttcttgcgctcaagttcgcggtgtctgaggatcccaatggcgcgctctcgacgtggagggacgccgacaacgacccctgcggctggtcgggcgtcacctgcgtcgacggtggtggcggcagggtcgccggcgtggagctcgccaacttctcgctcgcgggctacctcccattcgagctgtcgctgctgtccgagctggtgacgctgtccctgccctacaaccaggttgccggccagatcccggtcgt

SEQ ID NO: 420625 - DNA, 545 bp, Oryza sativa
ttagttgccgcggcccacgacgcggggcaggtccttggtggccttggcgaacacctccggcttcttcaggagctccgacagcgcccactccacggtcaccgccgagctctctgtgccgccagcgatgaggtcctgagtgaatgccttgacaccttccctcttgagcttgacctcaaggttgggattgtcagcgaactgcagcagcacgtccaccatgtccttggccacgaagctctccccctcgcggcggcggcgctcgttgtgctcgtccacgacgtgttccaggaaccggtcgaacatcttgccgagcttcttcatcctcttgatgtacccctgcaggtccagccagtcgagccacgggatggagtcgccgatgttgagcacgccgttgagcaggaacagctcgtcgagcatccacttgaactcctccggcgtcgtcaccgacccccccgcatccttgtccaggtacttcttgccccagaccatgcgcgtgatcacgttcaggctcaccgtcgacaggtagtccttgagcaccacgacgccga

SEQ ID NO: 420626 - DNA, 490 bp, Oryza sativa
cggtccgaattccggggcgctagcctatattagaactgaatgcagcatccacgtactaccgaccggtaccgatggagctgatgctgccgcatgggcgtcttcgcggcgtagtgctcgcaccggctgttcctgaaagcggtgctcggcgagccgcgcgtgtacaacctcccgcggggccgaagccgggcggtcatcggaacctcaacctgggggcacgctccgaccgtccatccacaacctctcaagaagtacggcccctgatgtacctaggttcgggcgttcccgtcgtcgcggctcgtcggggagatggccaagttcttcctaagacccacgacgtggtgttcaccgaccggccaagaccgccgccggcaagcacaccacctacaactacagcgacattacgtggtcgccctacggcgcgtactggcgccaggcgcgcaagatgtgccttaccgagctcttcagcgccaagcggctggagtcgtacgag

SEQ ID NO: 420627 - DNA, 533 bp, Oryza sativa
actggggggggaccaacccgactctggcgcccgcgcacctccaggatttacctggcttcacacgtagtgtttacaaaagggatcatgctttgattacaccagagagccatgtattcagccctttgcctgactggatcaacacattaggagcatatttaattagtccagctatcggggcacatttcacaatgtacctggcaaaaatgcatgatggatcaaaatcagccctaccaccaaaaggtgttgaaaggcttatctttgtactccaaggaagcattctattgtctgaggagagtgggaatacccatactctgctggtggactcttatgcctatcttcctgcaaacatgaaacactctgtgatctcagatgaagtaactacccttgtaatctttgagaggaggtacacaaccattgagggttaccatcctgatctcattgttggatcaactgataagcaaccccttcttgaaaccccaggagaggtatttgagttgaggaagctgctacccacttctttgccttatgacttt

SEQ ID NO: 420628 - DNA, 366 bp, Oryza sativa
tttatattacatacaaggaggtagcaatgggggagaaatatcatctcttgtacagtattatcgctgtacggaaagccatggatgacatgctgactttcttgttctactggattgacatcccactggacgacatggctactgaagatactattcctgtgtggggtctgccttatatgactacagccgttactaatatgaatgctatattacaaaccaggaacgcacatatcatgccaggctggagactattagagaatgcgatggccatgcaccgtatgcgtgtaacgatgagcggatgactagctactgggcctactgatgactgagtagctactgaaagagatacagagcaggtgaaggatgagc

SEQ ID NO: 420629 - DNA, 439 bp, Oryza sativa
ttgctttgcttagcccttactgctgcaacctgtagttgtcagggtgcagttgcagtctatcttctccctctagtcccaaagcatgtacttgcacccctcaacgtcgaagttctcaaggctgctggtgagaggagcaccggttccctgcatggcgtggacttccttctacggtcaaacttcctcaatgacccagctgccacatatgctggagcagacgacattgcgaaatctgccgatgaggcagtggatgcaaagcttagatctttcatgctcgagcattggtcacaggcagctttttctgagggattcgcgtctgctcaagagcacttcgataactttcatgaggataatggcaaagggtgagtcgccgatctgcctgaaggacctcccacttgagccggtgattgccatggccttcctaccactggtcagggaatgc

SEQ ID NO: 420630 - DNA, 293 bp, Oryza sativa
atcgtgggagaaccagctctttcctgggcagagactattgcaggttgttctactgacgctcgctctggaccgtgtgccttggaagctgattcctaaaccatttttcctgaagaagcaacatgagcagaggcaccaatgacagcagtacaccatgcttcagggcactgatgaatcattgacagagctagaagaacaccaggatgaccctcactaccatgaggagtttgaattcagcgaagtctttgcacaccagctgatccacacaattgagctagtgctcagtgcaaactcaa

SEQ ID NO: 420631 - DNA, 439 bp, Oryza sativa
acgacattctcttagctaagctaagctaagctaagcttgagctaatacaagagcaaatgcatggcggacgttagaggagttgcactggccgtcagtgctcgccgcggctgtggcgatcctcgcggagagccccgtcgcggcgcatggcgacagcagcggtggcagcagcggcagctgcatgacggagataatcagcctggcgtcgtgcctgggctacatgtccgggaactcgtccgcgccgaagccgtagtgctgcacggcttctgtcagcgtggggaccaccaaaccggcgtgcctctgcgccgtgctcggcggcggcgcctactcactcggtgtcaccattaacaacacccgcgcccttgagctccccgtacgactgcaacgtcaagacctctccggagagccagtgcagcactgactgtgtaccgatgccatctac

SEQ ID NO: 420632 - DNA, 538 bp, Oryza sativa
tttttggggggaatcaaatgacaaatttttttagaaaagtacattattgattactaatagcacatacaacacatcaacacattgccacaatctctactggcatttcacttgtcaaaatatttaacattaagactgttcgttcaatgattgtgggtgtggctgctcaccttgccaagcccatacaatatcctttagtgctgggctcatctcttgtttgaccttttgatactcaagtgtatcaccatttatcttcgtaaattccactaaatgaaaatctggtgtgatctgaaatatttcagcattgatggacattacacctttccttcctggttttgatccttccatctttaacaaaccaccatttttcttcaagaattttaatcgtaaattctttcgcacatcctcaagcttttttggtgattgtcgtagctgtgttaagtggatgtaaattttgattccttttttgtgttttcattttaaacattgcagaaagatcaaattctgatgaaagagaaataatatcaaaagcttttaagct

SEQ ID NO: 420633 - DNA, 488 bp, Oryza sativa
ttgtggttttttttttttttttttttttttttttttgaccgagtaagccatgagccctagaacaatatgatacagggatacaagatcacagcatcaaaatacaggacatcacagagaacatggaagggcatacataatttagatagctgggccaaaccacatactttatgttctcacgacagcacattaacaaaacagagaaactagtctcaaaatcccacagataacttcttatggagatgttcaggtaaaaacagattgataaatccttgagataagatccggtaacgctgctactcaaaacttaaaacaagacaacgctcactggggcactccgagccactttgagaagttgtcgaactcagcatagtcactgtctgagatcatggttttggaccatgcctttcctgcagccttaaccttagcagcctcctccgggctaagcttggtcctcttggagtaaagcttttcctttctggccttgatgc

SEQ ID NO: 420634 - DNA, 379 bp, Oryza sativa
tataaccctagccgccgccgccgccgccggcgtcgccttcatggccacccaaacccgcccccttgtctccgtcaaggccctggagggcgacatggccaccgacaacagcagcagcctcgccctcgccgaggtgttccgcgcgccgctccgtcccgacgtggtccgcttcgtccacaggctgctctcctgcaacaagcgccagccctacgccgtgtcccgccgcgccggccaccagacctcggcggagtcgtggggcacggggcgcgccgtgtcgcgtatcccccgcgtccccggcggcgggacgcaccgcgccgggcagggagcctttggcaacatgtgccgtggcgggcgcatgttcgcgccgacccagacatggcgc

SEQ ID NO: 420635 - DNA, 506 bp, Oryza sativa
ttccaagtgacaagagaccttgatgctctacctggctcacagacaagacctgttgaactttcaggcactcctgatcagataagcagagctgagcaattgatcaatgaggtcctggcagaggctgatgctgcttcatctggtaatctctctagccgaaagtacaatgctcctcaaccaggtgctgatcaattccaaatgaaaatagctaacaataaggttggtctggttattggaaagggtggtgagactataaaatccatgcaagccaaatctggtgctcgtatacaggttgtccctttgcatttaccccctggtgatcctgcaaccgaaagaacagtgtatattgatggtacacaagagcaaattgaaactgcaaagcaattggtgattgaggttaccagtgagaatcgtgctagaaacccaatgtcaggtggctattctcagcagggctaatcgcctcctcggcttagtaaaatggggttcgcatggggggcaccgatgcaaca

SEQ ID NO: 420636 - DNA, 474 bp, Oryza sativa
tttttgtttttttttttttttttttttttttttttttggccgcatcacatgtaaataatcggtccaaaacacaatcgatgttgatcaaagagaccgtcgcaaagttgtagtactgaagaaagggtacacaacagtcacagttttttaaaacagtagttttttggaaactcagacacggtgtaagggaggagataagatgtattttgggcctagatgtccatgggcgcggggtccgtgcccttggcctcctcctgcatcgagctcgactcagcctttgccgctggggcctcctcggcagcctccatggaatcgattattttttggatccttttcacgtcgatcatttaaaatggctcaacggggccatcgtcctttctgccaacaatagcaacggtgcatttggagctggttagcttctcaccttgcagcgtctcctttatgggggaaagggcatctttgataagttgctttggg

SEQ ID NO: 420637 - DNA, 407 bp, Oryza sativa
tatgccttcgggtacgacgcgcccctccccgtttccagtctcgtgctccgccttgccgacaaggcgcaggtttgcacacagcgatcatggtagaggccatatggtgttggcctacttgttgctggattagatgagtctggagcccatctatactataactgccccagcggcaactattttgaggaccaggcatttgctattggctctggctctcaagccgccaagactttacttgagcgcagattcgagggctacaacgactacaccccagagcaacttatcaaagatgccctttgcgccataaaggagacgctgcaaggtgagaagctaaccagcttcaactgcaccggtgctattgttggcagaaaggacgatggcaccgttgagccatttgagatgatcgacgt

SEQ ID NO: 420638 - DNA, 439 bp, Oryza sativa
gcggtactcctaccaactcttctcgtcgtggcggtggctttgtccggtcaccggccgctgcatctccctttgtgtcttagttagtttaatcccatttacaaatcttacgtggtgaactgatcaattattagttgagctgagctgagcttataagtagcagctgctctgatctgctcagctcgcttcatcaccttccactcaggcaatcgcagcgagaagccaagaagcactcaaccacgcgctgttcgtcatggcgagggtacagctctgggtggccgtcgcgtgcgccgtcgtgctcgcgctcgccgcgccctcgctcgccggggaccccgacatgctccaggacgtctgcgtcgccgacttggcgtccccggtgaagctgaacgggtttccgtgcaaggcgaacgtgacggcggacgacttcttcttttgcggggct

SEQ ID NO: 420639 - DNA, 329 bp, Oryza sativa
gtgtgcgcctgactcctctcgataaccattggtttttttgtggcgtgtttgcacaggctctctttcactcagggacaatagtaagatcggaatcaatgggttcggtcgcatcgctaggctggtggccagggcggcgcatgcaagcgaggatgacgagctcgggggcgttaacgatcccttgatgaccaccgaggacatgacatacatgttgaaggatgacaccgttcacggccagcggaagcattcatgaggtcaagggtaagggcttgaatacacctatttttggcacgaaagaggttgtggggtctggctgcaggaaccctgaggag

SEQ ID NO: 420640 - DNA, 534 bp, Oryza sativa
ttggattttccacgcctccggtactacccttgaccatctccaataattctgggggtactttgacatgtacccggagaccttccgcttctctgcttacccccagcagcagcagcccgccgcccgacgtcgcctactgcatctacaccaccgtcttgccgctcatcgacgacccgcctgacatccttggaaacatggcacaaccatcctttctatcagagtatgaccttggaggggaaggggacctgttcaaagctcctgaacccatcattgaagaaccagtgcttagccttgatccagttgcagcagtcatttcgatgatgtttggcagtgagaacgtaatggatgaaactatagaggctgcagatatcagcgacattcataatgactctcttttaagcgaagtattatacgagtgcgagaaggaactcatggagaaagccccaatcgaagagactatttctgacctgctggacgtcaagaattcctatgctgcaaggggaagaggccccctagggaaacccaagttctactacc

SEQ ID NO: 420641 - DNA, 426 bp, Oryza sativa
gggtcccgcctaaagaaaaaacagcgcacacatcttattctgctttccctccccttgctttccgctccactttcccttgcaagcagagaaaacccgaggcttcagcttagtctaggtaccgaccgatctcgatgatgcggcggtgcaatcatctacgactacatcccggcgcgccgccggttgtgcgcctccgacttctggcccgacgccgacgactccgacccccacacccccgctcccgagaaaccgccgcgcgcgaagagggagcggaagaaccagtaccgcgggatcaggcagcggtcgtgggggaagtgggcggtggagatccgcgacccggtgaagggggtgcgcgtctggctcggcacctacccgaccgacgaggccgccgcgcgggcctacgaccgcgccgcgcgccgcattaggggc

SEQ ID NO: 420642 - DNA, 491 bp, Oryza sativa
gcccgcaggtgaccttcagcacgaacacgccgaacgcgaacacgtcggtgaccggcgtcgccttgcccgtgcgcaccagctccggggcgaggtaacccatggtgccgacgacgtgcgtcgtctgcgggtcaacgccgtggtcgtacagcctcgcgaggccgaagtcgcccagcctgccgttcatctcgccgtcgaggagcacgttgctcgccttgatgtcccggtggatgacgacctgctcccagtcctcgtggaggtagagcaggccggaggcgacgcccttgatgatctgaaacctctgcccccaatcaagaacaggcttggtcttgtcgtacaagtacttgtcgaggctgccgttggacatgtagtcgtacaccagcaggagctcgcccttgcgccggcaggtgccgagcagctgcacgaggttgcggtgccggaggtggccgatgctgacgacctccgcgatgaacttcttcatcccttgcttcgag

SEQ ID NO: 420643 - DNA, 465 bp, Oryza sativa
  unsure (1)..(465): unsure at all n locations
gtgttcgacaccatgctcaacccggagttccaggacatgaacagcaaccacatcggcgtcgacatcaacagcatgaagtccgtgcagaaccacagcgccggctactacgacgaagccacgggggccttcaacaatctgagcttgatcagccgccagccgatgcaggtgtgggtggactacgacggcgccaccacggtgctcaacgtgacgatggcgccgctcgacgttcccaagcccagtaagcccctcatctccgcgcccgtcaacctctcgtccgtcgtgaccgacacggtgtacgtcgggttctcggcggccacgggcgtcatctacacgcggcactacgttctcggctggagcttctcccagaacggcgccgctccttttctccacacctcaagcctnccggcgctgccgcggttcgggccgaagccccgttccaaggtgctggagatcgtgctcccgatc

SEQ ID NO: 420644 - DNA, 489 bp, Oryza sativa
tgtgtgtctgattcgtgttcgcttctccgactcgactcgatcgactcctccctcctcgccgtggtgcggcggcggcggcggcgaagcgcattggtggtccactccggcggcggggggagtgagaagtcaccagtaaggaggagtagaggatggcggcgagcggaggcagctgcccggcggcgatgaaggcgacgtcgcagggggcgttccagaaggagaacccgctggacttcgcgctgccgctcatcatcctccagatctgcctcgtcgtcgtcgtcacccgcggcctcgcctacctcctccgccccctccgccagccccgcgtcatcgccgagatcatcggtggtatccttcttgggccgtcagcgctgggccggagcagcaagttcttgcacaacgtgttcccgccaaagagcatgaccgtcctggacacgctggccaacctcgggctcctcttctttctcttcctcgtcgggctcgagctcgaca

SEQ ID NO: 420645 - DNA, 410 bp, Oryza sativa
caaaaactactacgaattgcttcaaactctacatcctcaagtcgcacggattcgtttttcgttaatttggcaaataggtatggttttgccgatgtctcgcgcgacgagggtggccgggaggctgatgccagagatatcgttgctgagacgggggaggaagtcggcggctagaggcggcgactatgcggaggtggaggtgtcggtgccggcgaacttcgtgtgcccgatctcgcttgagatgatgagggacccggtgacggcgccgacggggatcacgtacgatcgggagagcgtggaagggtggctggcgagggggcacgacacgtgttcggtgaccggccggccggtgaggctcgccgacctggtgcccaaccacgcgacgcggcggatgatccaagactggtgcgtgg

SEQ ID NO: 420646 - DNA, 544 bp, Oryza sativa
ttttggtttcacaaacaatagtttaatttattagcaagtcaaaatttcttgaaagaataccatcgactcacttgtgtctacaagccttgagttatacttcttgcaacacagacaacactacagataccatacattcattttacctgtttcactcgcttttaggacgttctataacctcacatctggcgctaccatgctgaccggaccaaaaccttgttttccattggagggaatggaatgaagctctctctctctctcttctctagctcactagctgctgactgccatagacagggtaggctccatatgcagcagcatacatgttagggtgcgggacgggggaggcataaccgtatccaccgtagaatggcgtcccatagtacatattgtttcttcggctgccagaatcagccctagactgtttatgtgatgggctgcggccccatgaaaggcgaactgcctgctttccaatgactgatccattcaatccttgcagtgcttcttccgcatcaattctgctgacgaattgaacaaagccacattg

SEQ ID NO: 420647 - DNA, 498 bp, Oryza sativa
tggggggtgagctgacaaaccatttatgccgtatggataatacaagcctggggaaaaacatgggccactctgtgatcacaagctgcacagggcaacagcagcaacagcaaatatacaacttgttttaaaatcttttttacaattaggttctcggatgcgcacagctcagcaaacatcacacgaagaacggcagctagattaatccagcacacaaaaggcactgaaagaaacagagcagcagcagatcgatcaagatcgaaggtttgcacaggctggctgcaggaagctagaagaaggatcgcttggtaggcaccctcccaacagccttcatgaagttggcgagctcgagcaccttggcgagcttgaggcctctcttcgactacgtcgacgccctcttctcctccgccttgcgccgcgccttcgggatgtcgttctgcgtcctctccagcgccttggcgcgctgctcgtccagctttttttcgatcttttgagccatgc

SEQ ID NO: 420648 - DNA, 393 bp, Oryza sativa
tacaagcctactactggaaggttcaaggtgagtggctgtggataagatagtacctagagaaatagatgcacatgacggtgaggtggtgccgaaagaggatgacgcacgggatgaggatgatgaccacgatgatgacattgaagttctaatggccgagatcgacagaatcaataaagatggaggtgacgacaaccttgtaacggaacgccccccagaacgagaggtggactctatgacggaagctgaactgatgcggggaaaccccctgatcaagatgaacaacgccggatccttcaatggggagagaaggagggatgaatgatgcgtgttcaacaaccaggctcgttgggagaccaagacaccgtaacggtcatgaacgacactatgacaagt

SEQ ID NO: 420649 - DNA, 326 bp, Oryza sativa
caatgccgggcgcggtggtactgccggcatcagcggttgccgtcgccgttgtgctgttacaggccactgctacttgaagcacaccaacgggcacgcggacaactgggccttctacaccgtccgcctcagcctccacctaggcctcctcgctggggagagaggaggatgcataattgctgatttaacaaggatagggaaacggttccctgacagcatgttaaagaccatacccatgtggtgttgtgactcttaaccgggcaattgagaggtatcggcggtacactaacaacaagccatctgatgcaaccaacaaagacgctgaaaag

SEQ ID NO: 420650 - DNA, 515 bp, Oryza sativa
tttttgtttggtttttttttttttttttttttttttttaaaaccaaacaaaccctagcaaaatataatctaaaagggataatggtttacatgtccggacaaacagccacttaacacacttctggcgaaactaaaaaccaggcgggttcaagaatgtgatgtgacggctttgcacaagctttcactcaggctatacaagttgcaaaactggtgcacaccttcctaaaggatgccaacactacataattgttgcctggtgaaaaacgcatactttagaagctttaatccctgctccagacttagagatatgaaatccgggaccagctgggaaataatgtaacacaggccccctgggaacctttaggttatgggaccaccggaacaatttagttccccgaacgggggccacaatttaccaccgttgggcaaatattgttttatatggattgggcagcaacaccgccttgggcaaagtcaaaggttgcaccttggggagcagctaccgggggggctccc

SEQ ID NO: 420651 - DNA, 499 bp, Oryza sativa
ggttgtaccaatatttgtgaagcttcttggttcttctagtgatgatgttcgtgagcaggctgtatgggcattgggcaatgttgctggtgattcctctaagtgccgtgaccttgatcttgccaatggtgcattgctgcctctgctagcacagttgaatgagcacactaaactttctatgctaaggaatgcaacttggactttatcgaacttctgcagaggaaaaccacagccatcatttgaacagactaggcctgctcttccagcactggcacggcttattcactgcaatgatgaggaagctctcactgatgcgtgctgggctctttcatatttatctgatggcactaatgacaagatccaagccgtgattgaagctggtgtttgcccccgtcttggggagcttctcctgcatgcatcaccttcagtgcttatacccgcactacgaactgttggaaatattgtcactggagatgacgcgcaaactcagtgcatcattgat

SEQ ID NO: 420652 - DNA, 502 bp, Oryza sativa
tgtgaatcccccctcggacggcggcggaagcggatgcagcataggagagcatctggttcccctgcgctgcccgatttttggtggtggcggctgcggtcggcgggagatcgatgcctcgacgtgccggtaagcattctcatgatgtaccatgcaaagaagttctgtgtaccctttggaccgtagagttcacagagtaacgagcatatgagcaatatcggagcttttggcgggtcaaacatgggcagccctgctcattctgcagggagtgggaaacaacggctacgttggacctcagatcttcataaccgttttgtggatgctcttgctcagcttggtggacctgatagagcaacacctaaaggggttctcactgtaatgggtgttcctgggatcacaatttataatgtgaagagccatgtgcagaaatataggcctgcaaagtacataccacaatcttccggctgaggctcaaaagaccaaaagacggattctagcgattccc

SEQ ID NO: 420653 - DNA, 457 bp, Oryza sativa
tcgttgctctgcacctggtacatctgctcgtggatgccgccctcgccggcgttgcagaagacgtacttgccgcggacgtccttgcggctgaggctgccggactcgcaccgctccttggtccggctgccgtggccgtagtagagcgcggcggcgccggccggcacgcgccccgggtacaccgacctgccgacgatgctcctcgcgccgccggcgccggcgccgagcgtcacggtggcggtgaacgccctgtcgatggtcgacgcgccgacggtggtgatccacggcgcgccgttgaggacggagtagctgtcggagccggcgttgccggcggagcacgtgacgaggatgcccctacgcacggcggcgaaggcgccgaaggggactacgatggtgtagaagggggactccggtaagaccagcgagagcgacatgactttgacgccgtctgcgatggcct

SEQ ID NO: 420654 - DNA, 404 bp, Oryza sativa
cggtgccacacctccggtgatcgaggtattctgctcggggctgtacatggtcttgtggaggctcttttcaggagatacacatagcatgggatggatgaggactcagcatacaagaacactgttgagtgcatcactggaatcatctctaaaactatttcgaaaaaggggatgctagaagtgtacaattcattgacagaagatggaaagaagcaatttatcgaggcttacagtgcagcatattatccatgcatggatatactatatgaatgctatgaagatgttctttctggaagtgaaatttgaagcgttgttttggctggaaggagattttatgaaaaggaaggactttctgttgtcccgatgggcaacattgatcaaacacgtatgtggaaggtgggtgaaag

SEQ ID NO: 420655 - DNA, 488 bp, Oryza sativa
tgttggttttctggaaggccatatacttcaactcaaatacccgcgggatcattttctattctatttccttatctgaaatggggcattgcaacccacgacaagcatggggtgaaagcattccagcaaaatgcaagcacgctgttacttggattcactgcacaaagcatgcccgaatgctgtgagaaatgtactatagcttatccttgacaatgtcaccagtggctactggttcgacatccgcaatttggagcttctccttgacgaattttgccatggccttcagatatgatttctttgaaagatttatcgggttgcttttgtcttgcgcaggatatagcaacagtgtaggggacatgtttatctgcactttgggatgttcattcacagaagcatctatgcctgcaaatttaacattagtgtggcccaaatcattgaaatgtttggccaacttctccacgttcttacttatggcctgacagtaaacacaa

SEQ ID NO: 420656 - DNA, 365 bp, Oryza sativa
gtattccactactcctacacctgctcctcggggcttcatatcgagcggagctcgtagtgtgctagatctaggaggaggcgggcatgagggcgcggtgggttgccgcggcggaggcagtgctgctgttgaccgccgcagtggcggcggcccgggtcgacctggacgacgacgggcaccactcggaggtgctggacgagctgctcgccgaggacgaggaggaggagagaggggagctcggtggaggaggggaggccgcccgaaaacctttcgtccgtggagaccgacatggtgtacgtagggctcttggtcgccacgggcgctatcaacacgcgggactaccgtccttggcaggagcttctctccac

SEQ ID NO: 420657 - DNA, 432 bp, Oryza sativa
gttgctctgcacctggtacatcatgctcgtggatgccgccctcgccggcgttgcagaagacgtacttgccgcggacgtccttgcggctgaggctgccggactcgcaccgctccttggtccggttgccgtggccgtagtagagcgcggcggcgccggccggcacgcgccccgggtacaccgacctgccgacgatgctcctcgcgccgccggcgccggcgccgagcgtcacggtggcggtgaacgccctgtcgatggtcgacgcgccgacggtggtgatccacggcgcgccgatgaggacggaggagctgtcggagccgtcgttgccggcggagcacgtgacgaggatgcccctccgcacggcggcgaaggcgccgatggggacgacgatggtgccgtagggggactccggtgagcccagcgagagtgacatga

SEQ ID NO: 420658 - DNA, 546 bp, Oryza sativa
tttttgttgtgcaaacaaaccatttatgccgtttggataatacaagccaggggaaaaacaagggccactctgtgatcacaagcagcagagggcaacagcagcaacagcaaatatacaacttgttttaaaatcttttttacaattaggttctcggatgcgcacagctaagcaaacatcacacgaagaacggcagctagattaatccagcacacaaaaggcactgaaagaaacagagcagcagcagatcgatcaagatcgaaggtttgcagaggctggctgcaggaagctagaagaaggatcgcttggtaggcaccctcccaacagccttcatgaagttggcgagctcgagcaccttggcgagcttgaggcctctcttcgcctccgccgacgccctcttctcctccgccttgcgccgcgccttcgcgatgtcgttctgcgtcctctccagcgccttggcgcgctgctcgtccagctttctctcgatcttcttgagccatgcggatgctttctcgacctgctcggtctcccaccccgtgatgacaacct

SEQ ID NO: 420659 - DNA, 358 bp, Oryza sativa
tgacgcgtccggacaagagcggccggttctttgtgttttacacatgtgacaggacgcagcccgcctcctgctccggtcggtgcggcatgctctgcgacgtgtgctgcgaccctggcaagctcaccgcctacaatggcgcgcacacgtgccaggaccagaccgtgatcagcgagtacaccgtcaacgcctccttcggctcgccggcgacggcgaccgtggctaacccggcggaggtcaagaggatcatgacgatggggctgccgattagaacgcaccacggagggctgatcctctgtagaatgggcgaccgcttaccttacttgaaaatgggcgaccagcggagccacggcaacccgtg

SEQ ID NO: 420660 - DNA, 406 bp, Oryza sativa
tttttgtttgttttttttttcaccaacttgctgttacacagctgcgattgatgacagaccctcagcaagacaccctttttacactacactctcacaacagcaacggtaggggttacaaaacgtacagcacagcagctccatgccaagtacgtttagtacacctccacatgccactggttcttgtgcttgaggttctcgacgaactcgtcgaagttgcgtcccttctcctcggacacgcgcttgagcatgtccaagatgcctggcatcatgcccttcagaccgcagaagtacatgtgggcgccgttgtccagcaggtcaaacacctcgtcagcatactcctcaaccttgtcctggatgtacatcttgccacccttcctgttctgctgctcacgagacagggcatagt

SEQ ID NO: 420661 - DNA, 417 bp, Oryza sativa
tcttcgcgtccgcatttgtgcaggtctttcacaatggctgttcagatggcacgtgcccctgtcaacacccgcacggtcggtggccagcaggctgccgtcgttcgctcagcacgccccagcgtggtggtgcgcgctgcagccaccagcacactgacgcgccagagcgtccctctggagctggaagagggacccatgcccctcaacaccttcaacaacaaggctcccttcaaggctaagatcaagtctgtcgagcgcattgttggccccaaggccaccggtgagacctgcaacatcgtcatcgagacagagggcaagatccccttctgggagggtcagagctacggtgtgatccccccaggcaccaaggtgaacagcaagggcaaggaggtgccccacggtgtgcgcctggactccatt

SEQ ID NO: 420662 - DNA, 540 bp, Oryza sativa
tttttgtttggtaactttgaaactccacagtacaatacggcgttctagaggtccagacaaagagcatcaaagcaagaatgaagagaaagacaattggaatcacataaaaagatggcccaaagcacactaatttttattacaaccgccacgacagtcttgatcgtactgactctaaggcgcaaaatacaaatcggcattaatcttttgcggatatcccgctctctaaaggcttcttattcctcagcaaatcccagttcagagagcttgaggtgggcctcggcgtaatccgcaaagaaggcgtcctcatccgcagcatatttctccaccagtggacggaaggctgggtcagccatgagggctttgtcacttggcagctgaagaaggccttccttctcgccactcacaagctcggtgaagtaagagttgtcaaagatcaaagggttggacgttcaggctccctcaaagccagatctctccttgtggcatcttcccaggtgtgaccaccagaaagagcaactatgttcttgtcactcaaaccca

SEQ ID NO: 420663 - DNA, 508 bp, Oryza sativa
ctgctggcaccttcgatttttcgtcgaggaccggcgggcccttcggcactatgaataaccccggcgagcagtcccacgccgtcaacgccggcctcgacatcgtcgtcaggcttctcgaccccatcaaggaccaacttcccatcctctcctacgccgacttctaccagcttgctggcgttgtggccgtcgaggtcaccggcggacctgaggtccccttccatccgggcaggcaggacaagcctgagcctcctcctgaaggccgtctttctgatgccacacaaggttctgaccacctaaggcaggtcttttctgcgcagatgggttttgagtgacaaggacatagttgctctttctggtggtcacaccctgggaagatgccacatggagagatctggctttgagggagcctggacgtccaaccctttgatctttgacaactcttacttcacccagcttgggagtggcgagaaggtaggtctttttatgctgccaagggtcaaaagccctt

SEQ ID NO: 420664 - DNA, 405 bp, Oryza sativa
atgacgcgtgggcggacgcgtgggcgcgtacgcttccattgacctcccaatcctgggcctcctcttcgccaccatggtggtgggcagctaccttcggaacgccgggatgttcaagcacctggggcgtctgctggcgtggaagagccagggcgggcgcgacctcatgtgccgcgtctgcgtcgtcaccgccctcgccagcgccctcttcaccaacgacacctgctgcgtcgtcctcaccgagttcgtcctcgagctcgccgccgagcgcaacctcctcgccaagcccttcctcctcgccctcgcctccagcgccaacatcggctccgacgccacccccattggcaacccccagaacctggtcatcggctttaatagcaagatcaccttccccaagttcctcatggg

SEQ ID NO: 420665 - DNA, 536 bp, Oryza sativa
tttttgttgaagatgaaaaattggagcaaccattataatgctaaaataattacattgacagtagtacaaaacaggttatttgacactttgactgttgactaccgtagaccccctatccttatgtacatgcacaggcaacatgcatactgaaaagtagctagctactcctagtttttcttaaaagaaaaaagaaaaagaaaaagaaaaaaatacgcctatactgtaggagtagtaattactatcgacggctaggttgcatgaatagaaatagaagtccatttccgagatttagatggtgaatttgccatgcggagcataatgtcaagcgacctccactcagcgtcgcacgtgattgccggtcgccgctttctctccaggctgcagcagcgcagcgccaggcggagcagcttctcggcctgcacctccggccagctcccggcggaggcgttcagcacggagtggacggcgtccattttgagggccttgcgcacctggtcggcgatgttgaggtcgagcagtccggtgagcacctggag

SEQ ID NO: 420666 - DNA, 456 bp, Oryza sativa
ctttctagctctaagtatactcatgaagttgatggtattgatacagatgccaccattaagtgaagttgatgaaaagtggtgcaccacaataagttcctgatgtagaagagggcatgaaaagatggatgaggaagagattcatattgcggttgggaagaacttcagaaaggagaaggctaacatcttatgggctgctgcaaggttcccaagggccactatagttcttgttcatgttcactggccttccaagtggatgcccttcatgggtggcaaagttctatataagtttgcagatgaaaaggagaaggagatgcatcgagccaaagaaacggatgcgatggtcaagatgttgtcacaatacaaaaacctttgtggatcaagaaaggctagggcacattacctttcacacgatgatgttcttgctggtgttgtgaatttgataaagaagcttaaaat

SEQ ID NO: 420667 - DNA, 385 bp, Oryza sativa
ttgcaccggccgacgcatctccgattcgatttcgccttcccacgaatctatctccccccgagtccccagcgagatggccacgtcgttcgaccgctgggagaaggaccccttcttcccggccgccgaggaggtgcaggagtccgccgaccggatggagtcggtgtacaggaggtggttgcaggagaggaaagaagtaggtggcggcgctgtggagacggcggcggaacgtgatggtggtggatgggggcgagccgctggggatctccgccgcgagctgcacacggcgctcggcaccgccaagtggcagcttgatgagttgcagcgggctattaaatcaaattatagtgttgtgttagctggcaaagatactagagctccgcatgat

SEQ ID NO: 420668 - DNA, 444 bp, Oryza sativa
gaagaaaacacaaataggaactgaaatccagatccacacaatgctgaagtaactgaactgccgtttaacaaagataaagacagacttccccacaggttcaagttccaaaacacaccaagtacatactacatcacttgcagtctcagatataagatgccaaccaagttaagaaacgacgccgtcgctcagggtgagagcagctagctgatcagttggggtatttgcctgctgctgctgagcattacggagaacttccatagcctcagcgaccttggccttaagagcatcaggtgactcaatgagatggagaacttcagtctggtccatttccaaaagcatgccagtgaccttcgctgcctgatcatgctccagctgatcaaaaagcgggtataaactttcaccaagcattagtctttgctgatctgggggtgaattggccagtgc

SEQ ID NO: 420669 - DNA, 433 bp, Oryza sativa
tgtgattagaatggtgttagtcacggatctggttttgttgcatttaagtctgctgtacatgctccacgagctcttgtggctatgaatggtaagatgattggcagtaaacctctctatgtagcactcgcacaacgcatggaagaaagaagggcaaggcttcaggcacagctctgacacatgcgtcctatggtgatgcctacttcaggtgctcctccgatgcccgtgcatgcccctggagtccctggagtaggccaaacagctgttggatggccagccacctccagattttgttaaccctcagcctggatttggttccaagaaacatctcattcctggtatgaggcctagtgttggaccaattccaaattttgtcatgcctatggtcccagcaggtcaacaaccacaacgttcaactggaaggcgtgcaggcact

SEQ ID NO: 420670 - DNA, 533 bp, Oryza sativa
ttgtttgggaaaatttgtaacctgaaaccaaacaattttgagcaacggcacaccagcaacactcgggatatcatctagtttgtttttttttacacttgcaaccttaaactgcataatctatggcttgaacattggaggcattctcactttggtaacctgctcgaaggcataagccatctcaattagcctcggctcgtaccccttcaatccaccgaagcagacaccaaaggggactcctttctcgtcgtaccctgccggcacaaccacgccggggaggccatggaaggcgaggacgacggcggcggcggagtccggcgtcacgatggcgtccagctgatgatcggtcatgagcttcttgaccccattcactgacagctctgtgggacgacggatcgcagccttctctgcagggccgatcccgggtgtgttttcagacatcagcaagatgctctgtccatgctcttttagctcctcttcgacaggatgtgcattggtgaatgcaattttttcagcgagagaacgaactggcgagt

SEQ ID NO: 420671 - DNA, 380 bp, Oryza sativa
tgttcagtttgccagccatggtggagtgcactggcacatacacatatgaaggcagtggtttcaaggccactgctgcccagcagtatgatagctctcctttcctcagtgggttgaagtcgatttcttcaaagcctttccatcaagtttgctctcatttcatcagaacagtagctgggttccagttatgctacgctgcgaagacttggtttggtggatttgtgggcatgatgatctttggtgcaagcgaggtcagccggaacgttgatctgggcgacgaaacaaccacaatgatctgcaaattcgtagtgcgtgcatccgatgaatcgatcacaagagagatcgaatcataccttcagggctggatggacgatatcaccgat

SEQ ID NO: 420672 - DNA, 348 bp, Oryza sativa
ttgttggttgtaaaatagcagcaatgcatttatcatattatatatgtagctacaaactacatatagcaagctataagtatgtacagcaatgatggcaggtaatattgccatatcaattttcctgctatggtatgtacaccagagaacgagaacaatttagatgatttgggatggtggagcatctgaaataatgcacagttcttcagacttcacctacggttcaagcactactgcccccaatcgatcatcaaactacaggggcaagagaaaaagataacttgggtatattgcaggagctgagaatatttgctaagtttttttcacctatgatttaagcactaaaacccc

SEQ ID NO: 420673 - DNA, 358 bp, Oryza sativa
ttgaagcgaacgaaccaattctcctctcttgctccgcacggaacagcgccgcgccgcgactcgccgtgaagccatggcggcgcgcgctcgccttcgcctcgtcctgcccccgctcgcggcgctgctcctcttcgcgcacctcgccgtcgtcgcggtggcgcggccgctgtgggaggaggagggcagcaacctccgcctgccgtcggagcgcgccgtggcggctggcgcggcggcggacgacgctgccgaggccgccgagggcaccaggtgggccgtcctcatcgccggctccaacggctactacaactaaccgcaccaggcggatgtctgccatgcctacccgatcatgaagaggggc

SEQ ID NO: 420674 - DNA, 287 bp, Oryza sativa
cttatccggcaggtggtcggcggcggcgacgacaacgagctggagctgaacgcggagcgccacttcgccagcttcgttcagaggttcgggaagtcctaccgtgacgccgacgagcacgcgtaccggctctccgtgttcaaggccaacctccgtcgtgcgcgccgacaccagctgctcgacccctccgcggagcacggcgtcaccaagttctccgacctcaccccggtcgagtttcgccgggcctacctcggtcttcgcacgtcgcgccgcgcctttctgggggggct

SEQ ID NO: 420675 - DNA, 293 bp, Oryza sativa
gtttttgcctctcctactcccccgtcttccctttgtgcgcgccacccccacacacgcgaccatggcggcagcggcaggaggcgcagcgcgggcgctgtcgcaggcggagcaggacgtgcagatgatgctcgccgccgacgtccacctcggcaccaagaactgcgacttccagatggagcgctacgtctacaagcgccgctccgatggtatctacatcatcaacctcggcaagacatgggaaaagctgcagctcgcggcgagggtgattgttgccattgagaaccccccagaca

SEQ ID NO: 420676 - DNA, 381 bp, Oryza sativa
tctactacccggtgatcgacggcggcggctacgtgctgacccaggaggtgatggacagcatggaccgctacatggccaccgccgccgactccgtcgtcgccaaggcccgcgacatctgcaccgccttccccaatgtgaaggtggagacgcgggtggagaaaggggacccgagggatgtgatctgcggggcggtggagaaggccggcgcggacatggtggtgatggggagccatggttacggttttctgcagaggacgctgctggggagcgtcagcaaccactgcgtccagcactgcaagtgccccgtcgtcgtcggcaagaggcccggcaccaacgccaaggccttttgatgcgccaactccgcggtccaggatgcaatct

SEQ ID NO: 420677 - DNA, 423 bp, Oryza sativa
gcgggtaagactctcctgctcccccgttttccctttgggcgcgccacccccacacacgcgaccatggcggcagcggcaggaggcgcagcgcgggcgctgtcgcaggcggagcaggacgtgcagatgatgctcgccgccgacgtccacctcggcaccaagaactgcgacttccagatggagcgctacgtctacaagcgccgctccgatggtatctacatcatcaacctcggcaagacatgggagaagctgcagctcgcggcgagggtgatcgttgccattgagaacccccaggacatcattgtccagtcgggccgcccctacggtcagcgcgccgtccttaaggtcgggcagtacactggcgcgcacgccattgctgggagggatacgcctggtcatttaccaatcagcttcagacctgcttca

SEQ ID NO: 420678 - DNA, 276 bp, Oryza sativa
ggggaggaaaatggttattattgctcaacactacatgggattattccaatctttccgagtctcattcatgatcccgtctatatatcatatcgtgtttgactacatgacaccttcaaaacatacagtttgaacacacacatcttacgacaaaacacgtccactttaattgcacatcattaacatataacagcgattaaaaatagggcaaaagaaaggacggagaggagggtctcaaggccatttgattcattcattcattgatagcatggcttcaat

SEQ ID NO: 420679 - DNA, 335 bp, Oryza sativa
ttgacgcctgggcggacgcgtggtaaaatcccaaacacacaaaatcttaaataaaaaagaaagagagagacatttcgcatgtgctgccctgcctgctctcccatcacctgcccattttttcacattgaggcccctctgaaaatattatatttacaactaggtccctggccgggccggccggccaccggaaggagcacctcgccggagaaggctttgtctcttctttttcttctcctcctcctcctccatcggcggcggcatggggttctcgctgtaccccatgaagacgtcgacgcgcatgctgtggagcaccagcttcttccgccataaggtcg

SEQ ID NO: 420680 - DNA, 407 bp, Oryza sativa
tattattccacttggacgaacactagctcaccggccggccatggcgtcttcttccgttctgatcaagctgctcgtcgtcgtcggctgcgccgccgcggcctccgcggcgacgctcaccgtgggtggtagctccgggtggacgcttggccagaactacgatacttgggcaagtggccaaaccttcgcggttggagacaagctcgtgttcagcttcgttggggcgcacacggtgacggaggtgaacaagaacgattacgacaactgcgccgtcgcaagcaactcgatcagctcgaccagcaccagcccagccaccctcgacctcgccgtcgccggcatgcactactacatctgcaccatcagcggccactgcgccggcggcatgaagctggccatcaacgtcggcagcg

SEQ ID NO: 420681 - DNA, 314 bp, Oryza sativa
gccctctatctagggtttctcgactcgccctcgacgattcgttctgtcatgtctaagcatggagggaaggccatgcccctcatggggcccaatgccgagaagaatgagtacgacgagagtgatctcgggtatctgccgaagaagaaagatgaggaaaaggcactgaccgagcttaaggccacggcaggacagaaaggtgcactgtgaggctttggtctgaagtagagccggaagacatgatgctgatacccaatcagaatgccctgacaatgataaaccagctacctgcctgaggtactttactatgtgcggat

SEQ ID NO: 420682 - DNA, 463 bp, Oryza sativa
atgcttacagatgattattgactgactggcagctatcaaaagatgtttacagcaacattattaattccacaaataataaaaatattaaccagatcacaaaaataaatccaaaggagcaaaaacagacatcttgactgttcactacacttgtagttcttggacacgttcgtcatcaggttgactttagttgaccttcctacagttcagacggacctcggtcggcgtcccggccgccggcaggagggcgcccatcctcaccatcgccttggcgaagtcggcggcgaacatgccggcgttgccggcgtacttcctcaccagcgcgtcctgcgacccgccgttgaacagctcctggtcggagtggaacagcccctgcttctttaccaggttcgcgtagtaggcgttgtcgaacgcgtcgggcgtctgcacgttgatgggcgccagcgtcgtgtcgccgccggactgc

SEQ ID NO: 420683 - DNA, 298 bp, Oryza sativa
tgttcttgccgtgtcactggcttgctctgctcgatcacgagcttgaactgtgcttgtgatcagcgagcaatggctactcaatgggtgctcgtggtggttgctgtaatggccgtgctcttcgccggaggcgccgccggcgggcagctgtcgacgaggtactacgacggcaagtgcccgaacgtgcagagcatcgtgagggccgggatggcgcaggccgtggcggcggagccccggatgggcgcctccatccttcgcatgttcttccacgactgcttcgtcaacgggtgcgacgcgttca

SEQ ID NO: 420684 - DNA, 449 bp, Oryza sativa
gttaaccaaataatctactaccatgatggcattaatgaacaatcaggaattcagaatactgttctgtagacaggatacaatggcacacctggtcctacaatatatcaagcaacacctgtgattatgtactgatgaaactgactttcttttctatttctccttccattcttctctccaataggcgataggcgaacaaaataaatacaatttgagatgtaacaggaaaagctaggggtgtagtttttgtcatatgaaatcttgttcttggtcgtctgttcggcgcgacgaagtatctccgtcgagcattctcttcgtcatgttggccctctggacaagacgaaccaatgcttgcaccacctctgacattggtggcctgaattctggttcaggctggacacacaaagcgagcacgtcggcaaaccgggagagagacttggcagggtacagac

SEQ ID NO: 420685 - DNA, 448 bp, Oryza sativa
  unsure (1)..(448): unsure at all n locations
tatggaaatataactgatgtattttccagcctctatagcttgacaacactggatctttcctttaattctcttgctggtgacctaccacaagggttcacatcattgtcaagcctgaagaaattatatctgcagaacaatcaatttactggttatatcaatgtccttgctaatctcccccttgatgatctgaatgttgcaaacaatcatttcactggctggattcctagtcaacttaagaagataaacaatctacaaactgacggaaattcttggagtaatggaccagcaccaccaccttcaccgtattcagctccacctccaccaaaccgtccaaacagcccaggtcaaaacaatggtggttcaagttctggtggaagctctgggataggtggtggaggtgtagcangcattatcatatcattgctggtagttggagcagacgttgcat

SEQ ID NO: 420686 - DNA, 294 bp, Oryza sativa
tctcagtgaaagcaaggccgaactagacaggttctgtgatgctctaatctcaagcagggaagaaattgcagaaatcgaaagtggctaagcagatgtgaacaacaatgtcctcatgagtgctcctcacccgccccaacttctgatgagcgactcatggactaagccgtactccagggagtacgctgcgttccctgcagcgtggcttccgggcgccaagttctggccaacagcatgtcgcgtggacaatgtctatgggggtcgcaacctcatctgcactctggaacagggatccca

SEQ ID NO: 420687 - DNA, 430 bp, Oryza sativa
aacaggttaagtatggttttactggtttcacatgaaaaccaacaccatgccccagttgacgcggagaccatacaacaataggaagatctaaactgatctggccaaacctttcagttatagcagtaaactctctacgtaacatagaaggggctaatactactaacaatttctaagtcgctggaacggagataacacaagttcacacaggtcccaaaaaaaatacagcaagagcttagcccgagcagcagccgacctttttcaccgccgaaacataatcctttatattgatcttttcacccttgccaggaccagaacctgcatcatcacctgcttcgactgaccttttgctcacgatgcggtagatctgggtcaagacctttgcaaatgcattctcaaagttggtggacttgagcgcagaggtgtctatgaa

SEQ ID NO: 420688 - DNA, 223 bp, Oryza sativa
gcgctattacctgctccctgaggcgaggagaggcgctatgtttgttgggtactggtcggaggacgactaccactacttctctaaggcggtccttatcggctacttcggggtctgctaagtcaaccttatctaccgctttacccgcaacgagtccagtctggagtccatgttcaccatgggcgttgagtttgccacccgctacctccaggtcgacggaaaggtc

SEQ ID NO: 420689 - DNA, 363 bp, Oryza sativa
gtggaggaaacgacttaaataacagaacagtcaggtagaacagactaccagactgaaacggacttcacaaggtagggtacatatgagttcaactgggcacaacagccctcaaaagtccattcatacttcgttggggggagagtggtgacttgatggttatttaggtgataacgtcgttgggtttcgacacgtccaccagtttggctggttttagcccatggcgtacttttgtgtccaggagcgagcggtggatttatacttggccctatcagttttgtacatgtgagcaattttcggcactcaacggtatattggggttcgggttcgttagcagtgaacaaattgaccggaggacctttgata

SEQ ID NO: 420690 - DNA, 448 bp, Oryza sativa
cttcctcttgttttctgcggccgaaccccccctcgacacgccgtcgccgtcgtggggagagagagagaggccgccggccgtcgctaccactgacccccccccctcgccggagcgccccgtcgccggtcgggtttgatcgatggcgtccaagaggatcctgaaggagttgaaggacctgcagaaggaccctcccacctcatgcagcgcaggtcctgtgggtgaggacatgttccattggcaagctactattatgggaccctcagacagcccatttgctggtggggtattcttggtgaacattcattttccaccggattatcctcttaaaccaccgaaggtctctttccgcaccaaggttttccacccgaacattaatagcaatggcagcatttgcctcgacatcctcaaggaacagtggagtcctgcacttaccatatcaaagggtcct

SEQ ID NO: 420691 - DNA, 465 bp, Oryza sativa
ttaggaagatggcttacgagacctagtccggctcacaatgtttgagaagggacagagcaaaagaatttggggtgaactctataaagttattgactcttcagatgttgtcgtgcaggtgttggatgccagggatccaatgggtactagatgctaccatctggagaaacatctgaaggagaatgccaagcacaaacacttggtattcttactaaataagtgtgatctagtacctgcttgggccacaaaaggatggttgcgcactttatcaaaggactaccccaccctagcattccatgcaagcatcaacagttcatttggcaaaggatcacttctttcagtgttacggcagtttgcacgcctgaagagtgacaaacaagctatatctgttgtttttgttggataccccaatgttgggaagtcatcagttatcaacacgttacgctccaagagtgtttgcaaagtggc

SEQ ID NO: 420692 - DNA, 357 bp, Oryza sativa
gcgcttgtcacgcccccaccccctttgctttgatgcacgcctagctaatcaattaacttaacctgcctcgcctctgcctattcgaaacagcagcggctccagctcgccgtggtcgactttcccggcggcgatcaccggcagcggaggaggagcagtacgtgtgtatatataaaggatggggaggcagccgtgctgcgacaagctgggggtgaagagggggccgtggacggccgaggaggacaagaagctgatgagcttcatcctgaccaacggccattgctgctggcgcgccgtgcccgagcttgcccgggctgttccgctgcggccagagctgccgcctccgggtgacaaactacc

SEQ ID NO: 420693 - DNA, 484 bp, Oryza sativa
aacaggtcaagcatggctgcactggtttcacatgaaaaccaacaccatgccccagttgccgcggagaccatacaacattaggaagatctaaactgatctggccaaacctttcagttatagcaataaactctctacgtaacatagaagttgcttatactacttaacaattggtaattcgttggaacggtgataacacaagttcacacaggtccaaaaaaaattcaggaagggctctttcccgagctagtaatcccaccttttttaaccgccgaaacattatcctttatattgatcttttcacccttgccaggaccagaacctgtatcatcacctgcttagactgacctcttgctcacgatgcggtagatctgggtcaagacctttgcaaatgccttttcaacgttggtggactcgagcgcagatggtttccatgaaattaaagcgattttttttccgaaatgccttacttttatcggtttgaacc

SEQ ID NO: 420694 - DNA, 390 bp, Oryza sativa
gcgctggtacctgcactccgaggagaggagaggagctttggtagtggggtaccgggcggaggacgactaccactacctttttaaggtggtccttatcggcgactccggggtctgcaagtccaacctgctgttccgctttacccgcagcgagtccagcctggagtccaagttcaccatcggcgttgagttcgccacccgctccctccaggtcgactgcaaggtcgtcaaggcccacatttgggacaccgacggtcaggagcgataccgtgctgttactagtgcatgagactcacgtgtctgtggagtgaagcttgtttataatgtcacccagcacctaacctttgcgaaagtagagcgctggttgaaagaatttggggaccatacagaccc

SEQ ID NO: 420695 - DNA, 434 bp, Oryza sativa
tcaagaagcacttcttgagctcaatcagcatgttcatctatctccttattgcttagttgagtccttcgccctcccaagaagaagaagatgtcttgctgcggcggcaactgcggctgctgcagcggctgccagtgcggcggcggctgcagcggatgcaagatgttccctgatgtggaggccacagccaccaccaagacccttgctcttgctgctccatccaacaaggcgagctctggaggaatggacatggccgtggagagcgctcagaacggcggctgcggctgcaacacctgcaagtgtggcaccagctgcaccggctgctcctgctgctcctgcaactgaatctattgtcgtcgggccccggttgtatgaggatttatcctatggatgctgctactgtccatcagagctttgatcgaagccttaattcgctt

SEQ ID NO: 420696 - DNA, 505 bp, Oryza sativa
gcgcgtgtcatagccggctggccgtccgcggccgtgccggtccttttcaagccactggccgcgtgcctcgcgtcgcctgacccgcgggcgtcggctgctgccgcagctgcattctgtgagctgtcggcgccgccagccgatgctgctcctttcctgccgctggcgcccgacctctacaatctgctcaccacgtcccgctccaactgggcgctcatcaaggtgctcaaggtgtttgcacggctggctcctctggaatcacgcctcgccgcacggattgtcgacccggtgtgccagcttctcgcgcgttctgctgctatgtccctgacgtttgagtgcatccggactgttctaactgccctgccggcacatgatgctgccgtgcgccttgccattgggaaggccaaggagttccttgctgctgaggatgatcccaacctgcggtaccttggcctccttgcgcttggtatgcttggaccggcatatgcatcgccgttgcatgaatgcc

SEQ ID NO: 420697 - DNA, 491 bp, Oryza sativa
gggaaactaggttttctgttatgaaaagttcattacgacaattatgactaattggcagcattccaaaatattcctcaacgttgacactccatgccacacaatacaatcgaaatttctagaataggcaacatttccgagcatctcggagacaagaccaacatcaccactcgaatgacactgagggggaaatatacaggggaagaagcaaaaatgctatctttaggtagtcgtttgacgacagacagttaagtgtagtgcacctgttgtagcactcgcttactcccccttgtgctccttatctttcagagcatttcctgtgatttacgaacaatgcgtctaacctttttcttgaaatcgtccctcttttctctccaatccttagccgcttcaatatttgctggagactcatcatttggactagagagcatcgaaatgatgctcagaactatactttcaactgtatgcacaggtgtccaccgttcgctcgcaag

SEQ ID NO: 420698 - DNA, 475 bp, Oryza sativa
cacatcccttgcactttcgaactctccacgcctccacaaataaagctcgtcccgaggaagggcggcgacccaccccccccaatcgccaaaaccctaactccgatccgatcgagctctgcttcccatggcgactgccgcgagccaggcgagcctcctgctccagaagcagctcaaagatctcgcgaagaaccccgtggatgggttctcggcggggcttgtggacgatagcaacgtgttcgagtggcaggtcaccatcatcggcccgcccgataccctgtatgatggaggctacttcaatgcaataatgaccttcccccagaattatccgaatagtcccccatcagtaaggcttacctctgagatgtggcatccaaatgtttatcctgatgggcgcgtatgcatttctatccttcatccacctggcgaagatccccacggttatgagcttgcgagcgaacggtggacacctgtgcat

SEQ ID NO: 420699 - DNA, 405 bp, Oryza sativa
ttgttcacgcccccacccgctttgctttgatgcacgcctagctaatcaattaacttaacctgcctcgcctctgcctattcgaaacagcagcggctccagctcgccgtggtcgactttcccggcggcgatcaccggcagcggaggaggagcagtacgtgtgtatatataaaggatggggaggcagccgtgctgcgacaagctgggggtgaagagggggccgtggacggcggaagaggacaagaagctgatgagcttcatcctgaccaacggccattgctgctggcgcgccgtgccgaagctcgccgggctgctcccgtgccgcaagagctgccgccttcggtggacaaactaccttccgcccgacctcaagcgcggtcttctcaccgacgccgaggagcagcttgt

SEQ ID NO: 420700 - DNA, 419 bp, Oryza sativa
tctccggccaagctcgaccaggccaagacgcgatggtaccattacatggcgatcgtcatcgccgggatggggctcttcacagacgcctacgacctattttgcatagcgctggtcaccaagctgttgggtcggctttactacaccgacatcaccaagcccaacccagggacactcccgcccaacgtgtcgcccgccgtcaccggcgctgcgctctgcggcacgctcgccggccagctctttttcggatggcttggcgacaagctcggccgcacgagcgtctatggattcacgctcatgctcatggtcgcgcgcttcatcgcctccggtctctcgtttggccccacgcccaagagcgtgattgccacgctatgctttttccgcttgtggcttggcttcggcatcggcgggcacttcccgct

SEQ ID NO: 420701 - DNA, 503 bp, Oryza sativa
agcaatgtaaatactcgcattccaaaacagccgatggacaataatcggactcagagcatcagttttaaccgaacagaaataaacgagagtattaaacgactgacatagtgcacattgcgagcagatattaacggtccatgaaacgagagccatgcccgtgggcaaaacttaacaaatactagaactagatatctcaactgcagacatgcaaaccaccatttgaacgaggctcacttcttcttggcggcagccttggtcaccttggcaccggttgggtccttcttctccacgttcttgatgacgccaacagccaccgtttgcctcatgtcacgcaccgcaaaacgaccaagaggagggtactcagagaaggtctccacaaccatgggcttggtaggaatcatcttgaccataccagcatcaccgttcttcaagaacttgggctccttctccagctccttgccagatcgtctgtcaatcttggtcaccagcttagaaacttgaca

SEQ ID NO: 420702 - DNA, 437 bp, Oryza sativa
tttctctcgccttctcccgtcttctccttcgagttagctacctccttattcaaccatgggtaaggagaagacgcacatcaacatcgtggtcattggccacgtcgactccggcaagtcgaccaccacgggccatctgatttacaagcttggaggtatcgacaagcgtgtgatcgagaggttcgagaaggaagccgctgagatgaacaagaggtccttcaagtacgcgtgggtgctcgacaagctcaaggccgagcgtgagagaggtatcatcatcgatattgccctgtggaagtttgagaccaccaagttctactgcactgtcatcgatgcccctggtcaccgtgacttcatcaagaacatgatcaccggtaccttccaagctgactgtgccgtgcttatcattgacttcaccactggtgggtttgaggctggtatct

SEQ ID NO: 420703 - DNA, 324 bp, Oryza sativa
tgaggagaaggccggaagagcttacgacctgggggacctaaagtactgggggccaaccaccacgacgaactttcctgttgacaactacgagacggagctggaggagatgaagtcgatgacgccgcaggagtttctcttgtccctgcgcaggaagagcaacggcttctgaagaggggcttccatctacagaggagtaacaagacatcatcagcacggccggtggcaagagatgatcggtcgagtggacggaaacaaggacctgtacttgggcacttatagcacgcaagatgaggctgtcgaggtggacgacattggccctttcaa

SEQ ID NO: 420704 - DNA, 498 bp, Oryza sativa
agggaaaaggtttaattaacataggagtacagcagaaaataacaataaaaagatagcatggaattaaagccgctgctccaatttaccatacgcagcatttgattacaggaataccaaaaaactactaccgatgacaggtattaattattaaaaagcacaggttcagattattgcgacaaaagtttttgatacccgtaagattggacgcttgatagccaaaccacactcagaaccctaaatatgcatacggaggatgtccaatcggatcttcagccaccaccagaggcagatcagtacttgtagtccttgacgtgaaggctctcagaggcaccctcgccgagcacagcatcaccctggtatgtaccaagggtagcctcagagttggccttgcacctggtgatgaaggccttctgcgccttcaccacgttctccgtcttgccgccccaggcctttgagcgtgctctgctggagagcacggcccaaggagaaggacagagc

SEQ ID NO: 420705 - DNA, 361 bp, Oryza sativa
tcgtacaaagagaccaccacccagggccacgatgatcttggcaagcgttgcgccaagtactacgaggccggtgcccgcttcgccaagtggcgtgccgtcctcaagattggccccaacgagccatcgcagctttccattgacctgaatgctcagggtcttgctcgctatgccatcatctgccaggagaacgggctggtgccgattgtcgagcctgagatccttgtcgatggctctcatgacattgagcgctgtgcctatatcaccgagaaggtcctcgctgcctgctacaaggccctcaacgaacaccatgttctcctggagggttcccttctgaagcccaacatggtcaccccaagatctg

SEQ ID NO: 420706 - DNA, 358 bp, Oryza sativa
ttttcgcgtgggcggaggagggagcggtggggttgtcgatcgaggccaagatggtacatgggcctgtgggcctactgcatgtacatcctgccaaagtactgcgacaacaacgagggggtaaagggggtctgcaacgaggacggctggaccgtcgagcccagcgggaccacataccgcatgggatggaagcctcctcaagcagagggtcctgagccaattggaagatcggattcgacaagctcttgctcttcatattaaccaagtacgcggactatatacatccaaggtcctgcatcgatcttctttccaagctctggatactgctcgtagatcagtattggtggaaacaggttgattg

SEQ ID NO: 420707 - DNA, 533 bp, Oryza sativa
gggccggggcggaggtttctgggtggagacacgacgccgtttttccttgtgaagaggggcagcactaaggagggtcctcttaaacggctgtggcccagggtgactagagaacaaggaggtcaaacctgtgactaattgcagggacacccacgaggtgaagctggaacatggcctgcagatgtcaactatctttaagaaccatgagtcggggaggaacatgcttgaagaccttgacttctatgagcagcgggagaaagtcttgctggagaatagacgtcagctactgcctgcccgcccagagctgcaaaaactagtttagaaaaaggccctaggagaacttatgggccaaatctcagacacatttggttagactgaccagataaaagaaactgagattggccatagcaagcctgcaggtgagggtgttccttcagctgatgaagcgttcaccgatcccaccaaggctgtagatggaacgggttagacgaacgcataaccttggggagtttagcagcgattttttcccccacact

SEQ ID NO: 420708 - DNA, 399 bp, Oryza sativa
gaggcataaaccatttgccaatctgatttattgatatttaggagttaggaccaacacaacacattggcctaaattaccagctttttatccaagataataactacaagagcacatatcagggcaaaagtactaaaatcaaagtctcttaacggctcacatctttgaacataattaagacaaatcgtaagctaggtgttcgtcccaaatcaggatcatgtccggcgaccaccaccgtcgacgataatgtccttgaaagcgccattgctggggatcatcggctgcacgtgctcctggtgaggcacgacgacgtccagcaagtacggccccggcgccgccatcatctcctcgacggcggcgcggacctcgcccttccttgtcacgcgggccggcgggatgccg

SEQ ID NO: 420709 - DNA, 398 bp, Oryza sativa
ggacaggttctacgtctccaaccgggcgcacacctacctcggcaatccggtggcgaacggcggcggcgaggtgtacccggacttcgtggcgatcgccggaggcttcggcatcccggcggcccgcgtgacgaggaagggcgaggtccgcgccgccgtcgaggagatgatggcggcgccggggccgtacttgctggacgtcgtcgtgcctcaccaggagcacgtgcagccgatgatccccagcaatggcgctttcaaggacattatcgtcgacggtggtggtcgccggacatgatcctgatttgggacaaacacctagcttacgatttgtctttattatgttcaaagatgtgagcccttaagagactttgattttagtacttttgccctgatatgggctc

SEQ ID NO: 420710 - DNA, 408 bp, Oryza sativa
  unsure (1)..(408): unsure at all n locations
ctgatcctccccaacctcngtatccgggtcggcgtcctcctcctgctggttcttttcgcagaatgcaacgggcaattcaagctatcgggtcacatggcagtctcctcaagtctgctgttctgcgacacattagtgctccaaaaccatgtattttacctgctgtatattcacgctccatgtcagcttcatctgctcaaatagaggagagtggatttgagactgtcactgtggcagatattttgaagtctaaggggaagagtgctgatggatcttggctctggtgcactactgatgactctgcctatgatgctgccaaatctatgacgcaacacaatggtggagctctggtggattgtaaacctggacaggataaatcaattgccggctttgctcctgagagagattacc

SEQ ID NO: 420711 - DNA, 459 bp, Oryza sativa
ttcgattctctatccggcgagcagggggacgccgtcgtcctgctgtttccgccgcatcctggtttgggaggttcaactgagcccccatgtcgcaggagaggagccagtcgcagagcccccggtcgccggcgtcggcggctggggtgccgttcctgtcgatctccgtcacagatcctgtgaagatgggtaccggagtccaggcctacatctcctatcgcgtcatcaccaagaccaacctgcctgactttgaggggcaagagaaaattgttatccggcgctatagtgactctgagtggttgcatgatcgtcttgctgagaagtacaaaggcatttttataccctcccttccagagaagaatgcttgtgaaaaattccgggttagcaaagagttcattgaattaccggcgtaagccctggatctatttggcaatagaatagcttcacattctgaactcaagc

SEQ ID NO: 420712 - DNA, 293 bp, Oryza sativa
tctacgccggcgtcaacctggtgttccggggcctcccgctgtcccattccgtccacgccgagcagttccttgtcgtcaacgcggccgccgtgggggagttggagctgcgcgccgtcgccgtcttccacatgccctgcggccactgccgtcagttcctccaggagatccgtggcgccggcgggatcctaatcattgtcaccttcgacgccgaggacggctgcgcccccgagtggcgcacggtggtgttccttcttccgcgcccattcggtccccatgatctccttctcaagcac

SEQ ID NO: 420713 - DNA, 370 bp, Oryza sativa
gggcaccggcgcggaattcctggggacgacaccacgcgcgtgtcgggggtacggcggggggagcgaatgcggtgggtgattgtggccaagaccacgctgggctgcgcgcccaccgtatctacaacctccccaagcggtgcgacaacaaccaggtgctgaaggcgctatgccacgaggccggctggaccgtcgagcccgacggcaccacctaccgtaagggatgtaaaccttcttaagcagagcgtactgatccaattggaagatcggattcgccaaccaaggggtctggatatgaaccaagtacggggggttcatacaacccaagatcctgcattggaccttctttacaagctctggatccttcttgaat

SEQ ID NO: 420714 - DNA, 297 bp, Oryza sativa
acttcaaatccaagctgcccattatgatcaagcacaatttacaaaggaggcacaagtttgcaactactgccacctagcacactggacaccaggggaaagggaaggagagaagcatggcattcaaaccctagagagacaggcctaggtgctggggaacttggggaccgccttggggcccttggagacggggtgcttggcgagctcgccggggaggaccaggcggccggaggtctggatctcgcgggaggggatggggggctatttgttgtaacggtagagggggaaggatttcccccc

SEQ ID NO: 420715 - DNA, 425 bp, Oryza sativa
ctcgccttcttttatatgtggtttctatgggatatggtgttgttagacccacattaggtggggttacatctaaagtaggtgctcttggtgtcgtctattttattgcttcggaaggtcttgaacttgttgaaaatcttggaaacatcaatgacttctctgggaaaacaaggttatttctggtgttacctgttgccatacttgatgctaccttcattatctggatattttcatcactctcgagaactttggagaagctccagctgcggagaagtatggcaaaacttgaattgtatcggaagtttacaaattctctagctttgtcagttcttatctctattgcttggattggctatgaactatactttaatgcaactgatccattgagtgagctatggcgaaaggcttggatcatccctgcgttttgg

SEQ ID NO: 420716 - DNA, 332 bp, Oryza sativa
caacaaggcgcttgtcttatcgctgccacgcgttgtgtttgcggtcattgacgctgttgtgtgagcttcattggtatctacttgactgaactgaccgcgacattaaattggcgaaggcccagcaaagaatgaccaaatccaagtcgttcaaggaagagcatactctagacaagcgacaagcagaggcgcagcggatcagggagaagtatccagatagaataccagttatcgtcgagaaggcggagaagacggacattccagatattgataagaagaagtatttggttccgtctgacctgacagtgggccagttcgtgtacgtcattcgtaag

SEQ ID NO: 420717 - DNA, 471 bp, Oryza sativa
gtgggaatgaggcatattttgtatcaattaaggagtaccgtagcaggattgaaactgagctcagcaagatctgtgatggtatccttaagcttctggattcccaccttgtcccatctgccactgctgcagagtccaaggtgttctacctgaaaatgaagggtgactaccacaggtaccttgctgagtttaagtcaggagctgagaggaaggaagcagctgagaacactcttgtggcatacaagtctgcccaggatattgcactcgctgacctgcctacaactcacccgataaggcttggacttgcactgaacttctcagtgttctactatgagatactgaactcaccagaccgtgcttgcaaccttgcaaagcaggcgttcgacgatgctattgctgaactggacactcttggcgaggagtcttacaaggacagcaccttgatcatgcaacttcttcgtgacaatctgactc

SEQ ID NO: 420718 - DNA, 464 bp, Oryza sativa
tttactcgtgggcggacgcgtgggcaggtcttctccacctactctgacaaccagcctggtgtgctcatccaggtttatgagggtgagaggaccaggacacgtgacaacaacctgctgggcaagtttgagctctctggaatccctcctgctcccaggggtgttccacagatcactgtttgcttcgacattgatgccaatggtatcctgaacgtgtctgctgaggacaagaccaccgggcagaagaacaagatcaccatcaccaacgacaagggcaggctcagcaaggaggagattgagaagatggtccaggaggccgagaagtacaagtcagaggatgaggaacacaagaagaaggtggagtccaagaatgcgctggagaactacgcctacaacatgcgcaacaccattaaggatgagaagatcgcctcgaagctcccggcagcggacaagaagaagatcgagga

SEQ ID NO: 420719 - DNA, 451 bp, Oryza sativa
ttcgtgtttcgggctttcgtctccaccgccttgatgccttcccgggagcaggagtagcggctcatcgccaactacccttctccgtcggagcgtgcgtcgtcgtcaccggcgatccccacccacctgctcactgcgccgtctcgccgtccgccccttctccaccttgccctcaacccgccacagatccctctccctcccttcctcgtccccggccttcctcgccgcaaacactgccccctcttctccgctttccttcctcctctccacctcagccgacggccacgatctcagccgtgatctggaagaggctcttcttttaatttcagagccttaaccttaatacaagcaacagtttggggggtcaactgaacccccatgtcccaagttggatccgcccctgctcccatggtgacatcccatgaagatgctaagaaggcgtatgctgatttcg

SEQ ID NO: 420720 - DNA, 464 bp, Oryza sativa
ttggtgactcgccggaaccctagccctagatcccgcgcggcttgccgccgcgctagccatggcgtccctcaaggagctcctcccgacgcccaaggcggcggcgtcgacgttctacgaccacagcagcgacccgtggttcaaggagcggtatggcggggagtcggcgcaatccgacgcggcggcggcggcggcgaagccttcgggccccgccaagcccgtgccgccgtacgggaagcgtggcgggttcgtgccgcggcggccggaggacttcggggacggcggcgccttcccggagatccacgtcgcgcagtacccgctcggcatgggccggcgcgacgagaagggcggctcgaagatcctcgcgctcaccgtcgacgccaagggcagcgtcgccttcgacgccgtcgtgaagcaaggtgagaacgcctctaagatcgtttactcaaagcacaacgaccttgtgc

SEQ ID NO: 420721 - DNA, 473 bp, Oryza sativa
tacagaagaaatttgtttcctgctccactatctgacgaacctatgtgctatagtgggaggggttttcaccgtctccggcatcattgactcgttcatatatcacgggcagaaggcactcaagaaaaaaatggagctaggcaagtacagatgatttacctgaaacatggactggccctcatgttccccaagttcccaagttccgtggcttgtaaaggatccattgcttaagacctgaagacgttgctttgctggaaggttttgctaaggccatcagaattgacgatattgcacattagttgatcaaaaactcgtttacatgtaaaaaaagacaatatcatagcgttgggcctgggggagtgctttgatgtctcagtgagactctttttgagtggccaaaactggcgaaatgagatggatagattaaatcaattttaccactgcgtgtgccatttacactgtttgacgttttctgt

SEQ ID NO: 420722 - DNA, 457 bp, Oryza sativa
atccttttctccttcctccattcctccgccgctagaaccttctagaagctctcctcctcctcccatggcggcgacgatcgtgtccgtcaaggcgcgccagatcttcgacagcaggggcaaccccaccgtcgaggtcgatgtgtgctgctcagatggaacctttgcaagggctgcagttcccagtggtgcatcaactggtgtctatgaagctctcgaattgagggacggtggatctgattacttgggaaagggtgtttccaaggctgtcgacaatgtgaactcggttattgccccagctctgattggcaaggaccctacgtcacaggctgagcttgataacttcatggttcagcagcttgatggaaccaaaaatgagtgggggtggtgcaagcagaagcttggtgctaatgcaatcctggctgtgtcactggccatttgcaaagctggagctatcatc

SEQ ID NO: 420723 - DNA, 466 bp, Oryza sativa
cttctcctccggctctttttttgtatcgaatcctctcttctcctcgtgcccaccaccaccaccgtagcaatggcgggcaacgggccgatcaacaaggaggacccgctcaactggggcgcggcggcggccgagatggccggcagccacctcgacgaggtgaagcgcatggtggcgcagttccgcgagccgctggtcaagatccagggcgccaccctccgcgtcggccaggtggccgccgtcgcccaggccaaggacgccgccggcgtcgccgtcgagctcgacgaggaggcccgcccccgcgtcaaggccagcagcgagtggatcctcaactgcatcgcccacggcggggacatctacggggtcaccaccgggttcggcggcaccttccaccggcgtaccaaggacggccccgccctccaagtcgagctcctcaggcatcttaacgccggaatcttcggcactggct

SEQ ID NO: 420724 - DNA, 424 bp, Oryza sativa
tttactcgtgggcttctctgaaactttcaatcttgtggctagacagcaactactctatcatgcgcctctcaatcacaagcctcgtcgccgtcctcccggcagttattcttgctgtccccgctccaggggtttccaaccagcacgccgcacctctcattcgagcacgctcgccggggaaagccattcccggaaagtacattgccaaattcaaggaaagcgccacggatgctgctctcaacaaagctctaggtagccacaaagcaggtcatgtctaccgagcgaaggggctcaagggattttcgggtgctttggatgccgactctctcgaagcgatacgccaactcccagaggttgaatttgtagaagaagacgccctattcacagcctacccgatcgttacccagactggcgccccgtggcacct

SEQ ID NO: 420725 - DNA, 445 bp, Oryza sativa
gtcattgacaccaaagctgatgacgtcgacgctggtcttgtgtgaaaggttgtgcccggactacccgctgaagatgcacgtgagcgcgatcgtgctggtgctttggaaggccacaatgggggcgatggcgccgcacgaggggttgtgctttctgagagactagctggtgaaactataagcccaatgatgcttgtgggaacacaggaacaacaactgtataagtgatagaccttaaagctttatactagctcatcttgttgtcattaattggagctggagatcccatcagacggcatactctcaatatgacgaacacacaactttggggaaatatccactattgaagatccaatgggcttcatgcagaaaggatgttttatgactatgctgctcggtgatgataccttaggagcgtatacccggaggctgctgtgcactggaacaa

SEQ ID NO: 420726 - DNA, 454 bp, Oryza sativa
tcggtttcatcctcctcctcctcctccgccgccgcctccctcctcccccacctccactctccactccaatggcgactcacacgcagatcagcaagaagcgcaagttcgtggcggatggggtgttcttcgcggagctgaacgagatgctgacgcgcgagctcgcggaggacggctactccggcgtcgaggtccgcgtcacccccatgcgcaccgagatcatcatccgcgccacccgcacccagaacgtcctcggcgagaaggggaggaggatccgcgagctgacgtccgtggtgcagaagcggttcaacttcccggagaatggcgtcgagctctacgccgagaaggtgaacaaccgcggcctctgcgccatcgcccaggccgagtcgctccgctacaagctcctcggtggcctcgccgccagaagggcgtgctatggtgtgctcaggtttgctat

SEQ ID NO: 420727 - DNA, 450 bp, Oryza sativa
tcgtttacgcgtggggtttgtagactacaatgagcctcaaacagaaagggtttactcttcgtatcttgagttggatcttaatgaggtggaaccttgcatttcaggcccaaagaggcctcatgaccgtgtccctttgaaggaaatgaaatctgactggcattcttgcctggataacagagttggtttcaagggttttgctgtaccaaaggaacaacaagataaagttgtgaaatttgacttccatggacaacctgctgaactcaaacatggcagtgttgtcatagcagcaattactagctgcacaaacacatcaaatcctagtgttatgcttggtgctgcccttgtggcaaagaaagcctgtgaactgggtcttgaggtgaaaccatgggtaaagacaagccttgcccctggatctggggttgcaactaaatacttgttacagagtggcct

SEQ ID NO: 420728 - DNA, 458 bp, Oryza sativa
caaaaaggatcaatccgtaggtcccagagatgagcttagcaatgaagtagaattgcttgctaagattgaccaccggaatttggtgaggttgctgggatttactgataagggacatgaacgtatcattatcactgactatgttccaaatggcactctgagggagcatcttgatggccaatatggaaaaaccctggattttaatcagcgtctcgaaatcgcaattgatgttgcacatgcactgacttatcttcatctatatgctgagaagacaataattcatcgggatgtgaagtcatcaaacatcctgctgacagagagctaccgggccaaggagtttgactttggatttgcaagaagtggccccagtgacacagaaaagacacacatttcaacaaaagtaaaaggaaccgatggctaccttgatcctgagaatctgagaacataccatttgacttctt

SEQ ID NO: 420729 - DNA, 495 bp, Oryza sativa
ctgggcctggctctggttcctccgctggtattgtcatcggatactacttcttcatctacttccagccaactgatgtcaaggacgtcaaagttcgcccacttgtcgaatatgactcaatatcgttggacggtatccttcctgaaattcctttgtgggtcaagaatcctgactatgatagaattgattggctgaatagatttttggagatgatgtggccttacctcaacaaggcgatctgcagaactgcactggatattgcaaagccaatcattgaagagaacaggaagacgtataaactagaatctattgagtttgaatcacttacattgggtagcttaccacccacctttcaaggaatgaaagtgtatgtcacagaagaacaagaattgataatggaaccatctcttaagtgggctgcaaatcccaatgtcactgttgttgtaaaggcttatgggtcgaaagcaactgtccagattgtggatctgcaagtctttg

SEQ ID NO: 420730 - DNA, 456 bp, Oryza sativa
tcgtaggttttgatacggccgtagaagaggcccagcgtgccattgattcagctcatgtggaagcttgcagtgctgagaatggaataggcttagtaaaactgatgggccgttatagtgggttcattgcaatgtatgctactcttgcaagtcgagatgtggactgctgcttaattccagagtccccattttatatggatggtgaaggtgggttgcttcaatatgtagagagaaggctgaaagagaacaagcacatggttattgttgctgctgagggagcagggcaggatcttatagccaaaagtttatctacttctgagcagcaagatgcatcaggaaataagctactgcttgatattggtctttggctgactcacaagataaaggaccacttcaagagcaaaaagatggagatgactattaaatttttgatcctacctacatgatccgagctatttc

SEQ ID NO: 420731 - DNA, 463 bp, Oryza sativa
gtgctctcgaatccctggttttgattatcactgaaggccgattccggtccctcatttcccctttctttaattgatttaaacctttttttttcttattctgtaataccacaaaccgcccaacatgtctgtctgggatgccataaccggacgcaagaacaagcccgcacaatcacctccccctgcgccagcgccgacagcgaccgagcctcatcatgtatcttctcacttcgacccctcagccgctcaaggcgtagacgcgttcctcggaacctccagcttcgccgatccttcagttctacaccccctcgctgggctgaacaaggagacgctggattacatctcgctcgaggacggagcgatcgctaccccaggttcacaggccggtctgccgtcgcgcggcttcaccgacgatctctgctacggaacgggcatcacatatctctcgggtttgacgataggtggc

SEQ ID NO: 420732 - DNA, 469 bp, Oryza sativa
tttgtctctagacttggtcgggagcatcatgatgacctggctcagtttatgctgggaatgggctatgctactgaagcacttcatttacctggaatatcaaagaggttagagtttgatctcgcaatgcaaagtaatgacttgaaaagagcacttgcatgcttgttgacaatgagcaacagccgagatgtgggacaagaaactactgctactgatgttacacagattcttaatttagcagtagctaagcaagctaagcaagaaagtctggcagatgccgtgcaagggatagtgaagtttgtcaaggaattttttgaccttatcgatgctgcagatgccactggacaggctgacattgctcgtgaagttctaaagagattggctgctgcagcttctgtaaagggtgctctgcatgggcaaatgctacgaggtctggcactccgtcttgcgaaccatggagagcttaccaggc

SEQ ID NO: 420733 - DNA, 427 bp, Oryza sativa
tttcttctaaatggatttattgtgaggaagggtgctcctggcttgaaagctacaaagattgagaacaaaattggtctcagaatggttcagaacggtgatatagtttttaataaagtatttgtccctgaggaagatcgactgccaggtgtcaattcatttcaggatataagcaaggtccttgctatttcacgtgtcatggtggcatggcaaccgattggtatatcaatgggggtgtttgatgtctgccatcggtatctgaaagaaaggaaacagtttggagttcctctagtagcttttcagctgaaccaagaaaaacttgtgcgaatgcttggtaacatccaagcgatgctttttgttggctggcgactatgcaagctttatgagttagggaaaatgacaccagggcatgctagtttagggaagggtt

SEQ ID NO: 420734 - DNA, 463 bp, Oryza sativa
tcgtccaggtcaaaacaatggtggttcaaattcttggagtaatggaccagcaccaccacctccaccgtattcagatccacctccaccaaaccgttcaaacagccgaggtcaaaacaatggtggttcaagttctggtggaagctctgggataggtggaggaggtgtagcaggcattatcatatcattgctggtagttggagcagtcgttgcattctttgcgataagaagaagaaaacgcagagcggcattggaagaacattttgaacagcaccagccattcacttggttcccttcaaacgaagttaaagacatgaagcctattgaagagtctactacaatagatgtagagtctttgccatcccctgcttcatttagtctgaagccaccccccaagattgaacgccacaagtctttcgatgatgatgatttatcaaacaagcctgtcttgaagaaaaccaatgtg

SEQ ID NO: 420735 - DNA, 477 bp, Oryza sativa
gtgcgggcacgactggctatagatagatccatggggtgggcggtcgcgctgcacggcggcgccggggacatcccgcgctcgctgccgcccgaccgcagggagccccgcctcgccacgctccgccgctgcctcgacctcgccaccgccgcgctccgttccggccgcgctgccctcgacgtcgtcgagctcgtcgtgagggagctggagaactgcccgcactacaacgccggcgtgggctccgtgctcaccgccgacggcaccgtcgagatggaggccgccgtcatggacggcaacaccttgcgctgcggcgccgtctccggactctccaccgtcgtcaacgccgtctccctcgccaggctcgtcatggagaagacgccgcacatctacctcgccttcgatggcgccgaggccctcgccagggagcagggagtggagacttaagatccaagccactttattacggaggcaaacaagaga

SEQ ID NO: 420736 - DNA, 471 bp, Oryza sativa
caacgtggagcttgctttggtttacggcttaaccgaatcgtctggcgcggtggctgccacagtcgggccagaggaatcgaaggcatacggatcggtcgggaagctggggtcgcatttgcaggctaagattgcagatccctgcaccggtgaggccctcggaccagggcagcgcggcgagctttgggttagaggcccaatcgtgatgaaaggctacgtgggcgatgatgaggcgaccgcagcaacggttgactcagaaggctggttgaaaacaggtgacctctgctacttcaatgaagatggtcttctatacattgatgagcgactgaaggagttgagttggtacacgagttacgaggttcctgcaggagaactggagcattttctgtagttccaatgtgaatttgctgatgcgggagtttttccatatccagatgaagaagctggggaactaccaatggctttcattgcaag

SEQ ID NO: 420737 - DNA, 456 bp, Oryza sativa
ctcgcgattcctctcccttctttctcctcgtcctccccctcccaggggatcgccggagaggaatcgcgcggaggaaaaaaaaagaaaagggcttccccgtcgtctaagttaaaaggaagccatggagcacaaggagactggatgccagcagccagaaggcccgatcctttgcatcaataactgcggcttctttggcagtgcggctaccatgaacatgtgctcaaagtgccacaaggagatgataatgaagcaggagcaggccaagctggcagcctcctctatcgacagcattgtcaatggtggtgattccgggaaggaaccaattattgctggtcacgctgaagtagctgttgctcaagtcgaggtgaagacgcttgttgcgcagcctgctgagattgctggtcctagtgagggggtcacggcgaaccccaaggggagggaaggaccaaatcggtg

SEQ ID NO: 420738 - DNA, 402 bp, Oryza sativa
ctcggaccacctgatgtgcctcgtggggatcctttgctgagtccggtgacgcacacaccaaaatctacggctcagcatcaaacctcggtcttgtgccgtttccgtggaggcagccgatggggattaacggtttgtcaagcggactgcacatcttttgaggcccagggtagcagtcgtcgcggcttcgccgcagatccctgtcgacttgctcctttttctgttctgatgttaggttatttcaggaaggttgctttcgtagttcagttaactctcctttcttaaggatggctcttttgcttggatatgtaatggggtttattccctagatctgttcctgcttaataaagttgatgtgttttcaaaaaaaaaaaaattaaaaaaaaaaaaaactcaaccataatg

SEQ ID NO: 420739 - DNA, 473 bp, Oryza sativa
caaaaccagtaaaaaattattgtcaccttcgccggcgagatggcccaccgccgcatcatcctcctcctcgccgccgccgccgtcgccgcgacctccgccgtcgccgccgcgtcctccggcttcgacgactccaacccgatccgctccgtcacggaccacgccgcctccgcgctcgagtcaaccgtcatcgccgccctcggccgcacccgcgacgccctccgcttcgcccgcttcgccgtcaggcatgggaagaggtacggcgacgcggcggaggtgcagcggcggttccggatcttctccgagagcctcgagctcgtacgctccaccaaccggaggggcctcccctaccgtcttggcatcaaccgatctgcggacatgagcttgaagaaacctggtgacagagttgaggctgatgagcccatagcacagattgaaactgataaggttactatagatgttgctagtccggagct

SEQ ID NO: 420740 - DNA, 466 bp, Oryza sativa
ttcctgttcactcatgcacaccgctgtggatcttgtaaatgagaccaagctcgatagcgagattaagtcatggcttgcttttgctgcccaaaaagtggttgaggtgaatgcccttgctaaggcattggctggacagaaggatgaggcttactttgcagcaaacactgctgctcaggcctccaggaggtcatcacctcgtgtgacaaacgaggaagtccaaaaggctgctgctgctctgagggggtctgaccaccgccgtgctaccaatgttagcgctaggttggacgcacagcagaagaagctcaaccttccagtccttcctacaaccacaattggttcattcccacagactgtggagctcaggagagtccgccgtgagtacaaggctaaaaagatctctgaggatgagtacgtcagtgccatcaaggaggaaatcagcacggttgttaagatccaggaagagctt

SEQ ID NO: 420741 - DNA, 458 bp, Oryza sativa
tcggtcggatcccatgttgatccatttgacatcttttcatcattctttggaccttcttttggtggtggtggcagcagcaggggcagaaggcaaaggaggggagaggatgtgatccatccgcttaaggtttctctagaagatctttacaatggtacttcaaagaagctctctctttcccgcaatgtcctctgcgccaagtgcaagggcaagggttccaagtctggtgcttccatgaggtgcccaggttgccaggggtctggcatgaaaatcaccatccgccagctggggccttccatgatacagcagatgcagcagccttgcaatgagtgtaaggggactggagagagcattaatgagaaggatcgctgcccaggctgcaagggcgagaaggttattcaggagaagaaggttctggaggttcacgttgagaaggggatgcaacacaatcagaagatcac

SEQ ID NO: 420742 - DNA, 465 bp, Oryza sativa
ctgcggctcaacagaggaggggcgccgatctccatctggcgagcagagcaggggaggggaagggaaggtatcctgaaagatgcttaatcttatcaaaataaaggataaaaagaaagagcaggcagcaagtgctgctggaaaggctcctgtgaagaagcaatctgctggagagctccgtcttcacaaagatattagtgagctaaacctacccaagagcacatcaatttcttttcccaatggcaaggatgatctgatgaattttgagatcatcgtccgacctgatgaaggatattacctaggtggcactttcgtctttacttttcaagtctctccctcttatcctcatgaacctccaaaggtgaagtgcaagaccaaggtataccatccaaatattgatttggaaggaaatgtatgccctgaaccatttttgcgtgaagattggaagcctgttctaacatcaacact

SEQ ID NO: 420743 - DNA, 377 bp, Oryza sativa
cgttctcacacctttcttctcctcctcctcgcgcggcggcggcggcggcgtgagtcagcagcagccatggtgctgttctcggtgacgaagaaggccaccacgcccttcgacggccagaagcccggcacctccggcctccgcaagaaggttactgtattccagcagcctcattacctccagaactttgtgcaatccacatttaatgcccttcctgccgacaaagtaaaaggtgcaaccattgttgtgtctggtgatggccgctatttctcgaaggatgctgttcagatcattacaaaaatggctgcccctaatggagtaagacgtgtttgggttggacaaaacagcctcatgtctactccagctgtatctgccgttat

SEQ ID NO: 420744 - DNA, 473 bp, Oryza sativa
tcgtatctccttccccaaacacggtgtggtctgcacgcgactcctcccccctccgccgccgccgccgccgcagcgagaccccggcgaatggcgtcccgcatcgcctctcgcctcctccgccgctccaacgcgactctaggcctcatcaggagttattcacatgccaggaactacagcagtcaactttcagctcttattccaattgtttcccagagctcaaagcttacaagaagacgctattacttgccaaatgcctctccgtaccaactctggagtaggtcatttgcatctgacaatggagaccaggttgaagctgttgtccctttcatgggtgaatctgtaactgatggaactcttgctaacttcttgaagaaacctggtgacagagttgaggctgatgagcccatagcacagattgaaactgataaggttactatagatgttgctagtccggaagctggtgttattgaaaa

SEQ ID NO: 420745 - DNA, 479 bp, Oryza sativa
caaaatcatcagatccgttcttcgcctcctcctcctccacctcctcccaccccctcgccgatccagatccatcgccggggaggcgccagccatggccggcggcgggggcgccggcggcatgtcggagtcggtgctccgcaaggtgctcctctcctactgctacgtcggcgtctggatcttcctctccttcgccgtcatcgtctacaacaagtacatcctcgaccccaagatgtacaactggcccttcccgatctccctcaccatggtccacatggccttctgctcctccctcgccgtcgccctcgtccgcctcctccgcgtcgtcgagccgccctcgtcgcccgccatgaccccgcagctctacacctcctccgttgttcccatcggcgcgctctacgccatgtcgctgtggttctccaactcggcctacatctacctcttcgtgtccttcatccagatgctcaaggcgctcatgcccg

SEQ ID NO: 420746 - DNA, 474 bp, Oryza sativa
ctgtattgggggattactgcttatggatctgttgccttctctgacaacattgacctgcttaaaggatcgtgtggcaagtctcttgcacctttcccacaaggtaatgtttaaactttgaacagtaatgcagcgacgaaagatgaagcatttactataaaatttgatctctaactattgatttagttaggcacaattgaccttttctttgtttctgttcactaattcatttcggttgcaggctgcttctattccaatgctcttggagttggaggcttgaagtgctatgagaacccaaagcacaaggtgaccgcagttcctgccaaagaagaagaaatttgcggtgcaaccttcaaggtaaaaaaataataataataattgatggcaacctaaatacttaactgaatacattgtaaccgactgatgtcaaatggtgttttcaaccctttcttgggtcgatgtgcatctcttctttat

SEQ ID NO: 420747 - DNA, 466 bp, Oryza sativa
ttctctcaccaccaccaccaccaccaccaccaccaccgtctccagccatggcctcctccgcctccctgcagcgcttcctccccccgtacccccacgcggcagcatcccgctgccgccctcccggcgtccgcgcccgccccgtgcagtcgtcgacggtgtccgcaccgtcctcctcgactccggcggcggacgaggccgcgtcggcggagcggctggagccgcgggtggagcagcgggagggccggcactgggtgctcaaggagaagtaccggacggggctgaacccgcaggagaaggcgaagctggggaaggagcccatgtcattgttcatggagggcggcatcaaggagctcgccaagatgcccatggaggagatcgaggccgacaagctctccaaggaggacatcgacgtgcggctcaagtggctcggcctcttccaccgccgcaagcatcagtatgggcggct

SEQ ID NO: 420748 - DNA, 472 bp, Oryza sativa
tttgtctcccctctccttcctcctctcctttcccctcctctcttcccccctctcacaagagagagagcgccagactctccccaggattcagccatgaagggggccaaatccaagggcgccgccaagcccgacgccaagttggctgtgaagagtaagggcgcggagaagcccgccgccaagggcaggaaggggaaggccggcaaggaccccaacaagcccaagagggctccctccgctttcttcgtttttatggaggagttccgtaaggagttcaaggagaagaaccccaagaataaatctgtcgctgctgtaggaaaagcagccggtgataggtggaaatccctgaccgaagcggacaaggctccctatgtagccaaggccaacaagctcaaggccgagtacaacaaggccattgctgcctacaacaagggcgagagcactgccaagaaggcacccgccaaggaggaagagg

SEQ ID NO: 420749 - DNA, 460 bp, Oryza sativa
tcgttcacgcgtccgcccacgcgtccggagaggagggaggggggacaaggaggaggagcgcaccaccctctcggagaggtcgcctccgttcttgcatcgttttctttggatagggcagcgctttgacagctttggggagttagtcgagaagtgtgcacatggagtccaacagtggtgaaatcgaggagttgccacctcccccacctttgccaccaaatgctgagccaattaaaactgatgatacaaaaaagttatcaaaacctaagagggccttgatggctcgctctggttgtggcaaaaaagggcagccgatacagctgctgacgaaccacttcaaggtttcactgaaggcagcagacgaatttttccatcactactatgttaatctgaagtatgaggatgatagaccagtggatggaaagggcataggtagaaaggtgctggacaaactccagcagac

SEQ ID NO: 420750 - DNA, 458 bp, Oryza sativa
ttcgtttccgccggcgccgaggccgtcgacgcccggcggtggtgccgggtcgtgcccgcgcgacgcgctgaagctgcacgtgtgcgccaacgtgctcggcctcgtgaaggccaagatcggcgcggtggcgccgtacgagccctgctgctcgctgctcgacggcctcgtcgacctcgacgccgccgtctgcctctgcaccgtcatcaaggccaacgtgctcggcctcaacctcaacatccccatcgacctcagccttatcctgaacaactgcggcaagatctgcccatccgactaccagtgtgcttaatcacattgggacactgcagccgatcgatcgatcgatcgattgacagtgtgctacacgtcgtttacatgtttttgttggttggcttactgtgagcagtctgaactctcttaactttggaaactgtctgcttttggcctggttatgcttggaa

SEQ ID NO: 420751 - DNA, 445 bp, Oryza sativa
ctagcttgctgtaaacacagttagttcgtaattatcgcatagggccatggggaagtacagtgtgggtctcgtggttttagggttgctggcccttgcgttttcgaccactgtgctggctgaaacacatgttgttggtgactccaacggttgggacttctctgtgtcgtttgatagctgggctgatggaaaggtcttcgctgctggtgacactcttgttttcaactacaaaccgggcgcacacaacgtgctggccgtggacgcggcgacgtacaggagctgcaaggtgggcagctcggcggactcggtggcggcggcgacggggaccgcgtcgttcctcctcaagaagggcgtcaactactacatctgcggcgtccccggccactgcgccgccgggatgaaactccgggtcgtcgccaactgatgaaactccggcgacagatcaatc

SEQ ID NO: 420752 - DNA, 448 bp, Oryza sativa
tttgtttcgagaacgcgcgcgtcgaggcgcagatcggggcctacgcgggggagctgagcaaggtcgacggcgagaacgcggtgctccgcgcccgccacggcgagctcgccgggcgcctccaggcgctcggcagcgtcctggagatcctccaggtggccggcgcgcccgtcgacatcccggagatccccgacgacccgctgctccgcccatggcagccgccgttcgcggcccagcccatcgtcgccaccggcatggccgacgccttccagttctgagccaccatggagagctcgcacgccatggccattggcatcaatggcatggttgcagctgcattacatctagttagtactagcctctgtggttgcgtctgatgatgcttattatgtttaattatggtttgcttcatgctgttttcattaatctagaccattaataagcaatgtgt

SEQ ID NO: 420753 - DNA, 416 bp, Oryza sativa
tttgttaaaaaaaatcatcagcacaagatcgaggaggctttatctgaacaagggagatggcggactacgtgtatgggccggggcggaaccacctgttcgtgcctgggccggcgaacatcccggaccaggtgatccgcgccatgagccgtcagaacgaggactaccgctcgccggaggtgcccgccctcaccaagaccctcctcgaggacgtcaagcagatcttcaagaccaccagcggcacccccttcctcttacccaccaccgggacgggggcgtgggagagcgcgctgacgaacacgctgcaaccggtggacaggatcagtgcggccaatgatcgggcagttcagcctgttgtggatcgaccagcagcaacgcctcaacttcaacgtggacgtggtggagagcgactggggcta

SEQ ID NO: 420754 - DNA, 463 bp, Oryza sativa
tcgtgtgcttccgtttagcatctaggctctagcaaacctgtaaagatggaatcctacacaactggagccaagtttgattgtttgttgtttgacatggatgatactctgtacccactgagcttaggaatcaacttagcttgccgcaagaacatacaagactatatgctgaacaagcttcagattgaagagagccttgttcccaagatgtgtcttgatctgtacagggaatatggaactacaatggctggactgaaggtcttgggttatgatttcgactatgacgatttccacgcttgtgttcatggcacattgccatacgagaagctgaagcctgaccctgtcttgaggcacctactgctttcactgccacaaaggaagattatattcacaaactctgacaaggcgcacgccgcgacggttctgaagaagctcgggctggaggattgcttgaagggatcatctg

SEQ ID NO: 420755 - DNA, 294 bp, Oryza sativa
tcgatacattcctggtatgaggcctagtgttggaccaattccaaattttgtcatgcctatggtccagcaaggtcaacaaccacaacgtccagctggaaggcgtgcaggcactggtggaattcagcaaccaatgccaatgggccaccagcaaatgcttccaaggggtagtcgtggtggttaccgttatgcttctggtcgtggcatgccagacaatgcattccgtggtgttggaggtttagtgccatccccatatgagatgggaagaatgcctctcagtgatgctggttgcaccac

SEQ ID NO: 420756 - DNA, 453 bp, Oryza sativa
tttcttcctactagtttctttcttgtttctttggaatttttttgatctcttgaagagatccggttcttggattaagttttggacaagaaccgtactgtgaccatgtcgtcgccttcgcgccggagctccagcccggagagcaacaccagcggcggcggcggtggcgccgacgagcggaagaggaagaggatgctgtcgaacagggagtcggcgaggcggtccagggcgaggaagcagcagaggctggaggagctgatcgccgaggcggcgcgcctccaggccgagaacgcgcgcgtcgaggcgcagatcggggcctacgcgggggagctgagcaaggtcgacggcgagaacgcggtgctccgcgcccggcacggcgagctcgccgggcgcctccaggcgctcggcagcggtctggagatcctccaagtgggcggcgcgcccgtcgacattccg

SEQ ID NO: 420757 - DNA, 471 bp, Oryza sativa
ctcgcctacgcgattccttttttatttcgccgccgatgaagggcggcgggggcgcggcggcggcgtctgcggcgccgggggactacgtctacttcaagtccggcggaccgctccacaagatctcgattggaccgaaattatggaggtactatgattttggaccaaagactgttccacctcttgtctgcatgccaggaattgcaggaacgggtgatgtgtactacaaacagatcatgtctgtctctatgaagggttatcgagtgatgtcaattgatgttcctcaagtttggaatcaccaggaatggatttattcattaaaaaattttggactctgaatatctatggcatatttatggtacatctcttggtggatttcttgcacaaatatttgctcaacaccgtccaaggagagtaaagtccttggtcctatcaaatacttttcttgagacacataagtttgctgctgctacg

SEQ ID NO: 420758 - DNA, 231 bp, Oryza sativa
ttcgttcgtacacgccgacgagcatggtcgacgaggtcggtcacttcgacctcctcatcaaggtgtacttcaagaacgagcaccccaagttccccgatggcgggcgtcatgacgcagtacctggactcgctccccgtgggcacctacatcgacgtcaaggggccactcggccacgtagagctcaccgggcgtggcgagatcgttatcaccggtcagccgtggtacgcgcgg

SEQ ID NO: 420759 - DNA, 461 bp, Oryza sativa
tttatccgccgccgccggcgtactcgagagaaacatcagcatccatggcgggcaagggcgagggtccggccatcggcatcgaccttggcacgacctactcgtgcgtgggcgtttggcagcacgaccgcgtggagatcatcgccaacgaccagggcaaccgcaccaccccctcctacgtcggcttcaccgactccgagaggctcatcggagatgctgccaagaaccaggtcgccatgaaccccatcaacaccgtcttcgatgccaagcgtctcattggcaggaggtttagcgatgcttctgttcagagtgacattaagctctggcccttcaaggtgattgctggacctggtgacaagcctatgattgttgtccagtacaagggtgaggagaagcagtttgctgccgaagagatctcctccatggtcctcatcaagatgcgtgagattgctgaggcctacctt

SEQ ID NO: 420760 - DNA, 453 bp, Oryza sativa
ttgttcggacgtctgttgctttggttttccacagtcaatcaaccacctttggagaccaagctctcgcagcagcgcccagttgcagcaccaagactccttccctaaaaggtccccactccctttttcaaaacaatcagcaaagatgtcttgcacagcaggaggacagatgtacaacgagaccctgatggaggtggagcacacccctcccgtccacaagcgcatcctggacatcatgcctggtgtgtctggtggtgttgcccgcatcatggtgggccagccctttgacaccatcaagacacgcctgcaggtgctgggcaagggcacaatcggtgctgccggcatgcccccagagatggtctacacaagcggcatggactgcgtcaggaagatgttcaaggctgagggccccttctccctgtacaagggcactgtcgcccccctgctgggcaacat

SEQ ID NO: 420761 - DNA, 465 bp, Oryza sativa
tcgtcccaagtcgcgtcgcaccgaagcagagtagagaaggagaggagcggagcgccatcagccgtccgatcgagtgatccgatggctctcgctctctccacctctgctgctgctgccgctgccgccgcggcgcgggcgctcgcggcgagggtgacgacgacgaggggttacgccgcgtcggcggcgtcgtcggcgatgaggcgggcggcggcggcggtggaagggaagggcgctgcggggatgacgcaggcgaaggacgggtcgtcgtcgtcggcggcgagggaggtgtcgtgggtgcccgaccccgtgacgggccactaccggccctccaacttcgccggcggcgccgacgccgccgacctccgtgccgtccacctagcccgcagctacccccgcgcgtgatgcgcgcgacctcgccgttgttcgaccgacgacgacgccatgcatccatatatatttggctcc

SEQ ID NO: 420762 - DNA, 465 bp, Oryza sativa
ttcttcctctggatttatcggttcgtcgatctcgcgggaggaataggaagaatatctccagcaagactttcatctgcttatcatcagtatgtccatcgaagagagaacattaagtttgataaacaagaccactgcgttaaatccaaatgcacaagaatttgtaccttcatccctcagatctatcaatgatgtttcaaatagatcagacacatccaggatttctgtatcaggatcctccaaagacactattgcagatcaacaagatcctgttataccaagtaaccctgatgaagaagcacatcggtactggcaagaacagcttccagatgatattacccctgatttcaaagttctgggacaagatgagatgcctggacctgataatatttcactcactggcttgtcaataaatgatagcattggtgctttactattttctccaaaccagacatcgaatttgcaaca

SEQ ID NO: 420763 - DNA, 358 bp, Oryza sativa
gtttccgtctccccgccggccgcctccacccgcaccgcgcggtgcccccctcatcaccaagaacggaagatgacagaagctgctgagtggaatgatgagaacactaaaattatctgtgaactttatgctgaacaagttcgggctggaaatcgaccaagtactcatctcaacagcattggatacagccaagttgcattgaagtttcagcagagaactcatttgctctacaccaagagacaacttaaaaacaaatgggataaacttaggaatgagtacaccatctggaagaaattgcttataagagggtcaggtttaggttgggacagtacaaaaggaacaattgcagctgacgaaaact

SEQ ID NO: 420764 - DNA, 479 bp, Oryza sativa
ttgataaaaatttctccccaatctcgcgaggctctggttgtttaatcgaatcctctcgcgtcctcaagatgcagatctttgtgaagacattgaccggcaagactatcaccctcgaggtggagtcctctgacaccatcgataatgtcaaggctaagatccaagataaggagggcatccccccggaccagcagcgtctcatcttcgctggccagcatctggaggatggcaggaccctagctgactacaacatccagaaggagtcgacccttcaccttgtcctccgcctccgtggcggcatgcagatctttgtcaagactctgaccggcaagactatcacccttgaggtggagtcttctgacaccatcgacaacgtcaaggccaagatccaggacaaagagggcatccccccaaaccagcagcgtcttatgttctgcggcatgcaactggaggatggcaggacccttgctgactacaacatc

SEQ ID NO: 420765 - DNA, 354 bp, Oryza sativa
cagagctcacaagtctcatgtcgcgtcgcaccgaagcagagtagagaaggagaggagcggagcgccatcagccgtccgatcgagtgatccgatggctctcgctctctccacctctgctgctgctgccgctgccgccgcggcgcgggcgctcgcggcgagggtgacgacgacgaggggttacgccgcgtcggcggcgtcgtcggcgatgaggcgggcggcggcggcggcggaagggaagggcgctgcggggatgacgcaggcgaaggacgggtcgtcgtcgccggcggcgagggaggtgtcgtgggtgcccgaccccgtgacgggccactaccggtcctccaacttcgccggcgg

SEQ ID NO: 420766 - DNA, 462 bp, Oryza sativa
atctttcgctgcggcggcggcggctgcggcggccaagatgcatcagggcaggagggtcacggccgacatgctgtggccggggatgctgcggaaggggaaggcggcagctgcggaggaggactttgaggccgacttgcgcgagttcgagcgtggcatgagcgacgacgaggcggaggggggcggcggcgaggaggaggaggacgacgacgacgtggtcgtggtggtccccccgccggcggctggcgaggttcgacgtccgtgccgcggtcaaggcggctcccccaactgcagatgggatgttgactacaaagcttgtccaacatgatggacctactgctagatcagcaaagcacaagaggaagaatcagtacagggggatccggccgcgttcctggggcaaatgggcaactgaaattcgataccccagcaagggagtccgtgtttggcttggaactattacaa

SEQ ID NO: 420767 - DNA, 461 bp, Oryza sativa
tctttatgcagttgcagcctatcttctgcctctagtcccaatgcatgttcttgcacccctcagcgtccaaattctcaaggctgctggtgagaggagcaccggttccctgcatggagtggacttccttctccgctcaaacttcctcaatgacccagctgccacatatgctgtagcagacaacattgcaaaatctgccgatgaggcagtggatgcaaagcttagatctttcatgctcgagcattggtcagaggcagctttttctgagggattcgcgtctgcgcaagagcactttcggtaacttcatgaggataatggaaaagggtgagtcgccgatctgcctgagggacctcccacttgagctggtgattgccatggcctacctaccactgtacagggaatgcgtggagacaggtgggcggcttttgccgcagaaactgacagggcagctcgttgaggcggct

SEQ ID NO: 420768 - DNA, 531 bp, Oryza sativa
tcgctttattagcttattgatcaaggccgtgacaccatttcatgcggttgaatcatgtgctttattgttaaaagaggctgggtttcaagaacttcgtgaaaatgatccgtgggatattgctccattaggaaaatattacgttacaaaaaaccgttctgcgatatttgcctttgctattggtggtcaagttcaagagaaaagtggattttcgatagttgttgcccatacggatagcccatgtcttagagtcaagcctatttcaaaattgacatctgagaaattcttgcaggtcggtgtctcaacttatggaggtggcatttggcgtacttggtttgaccgtgatttgagtgttgctggacaagttgttattcggaaaaattcttctctggtgcataaattgatcgatgtgagaaaaccgattttaacgattccttattttggctattcatctggaaacggatcgaacacagtttgaattggattaatgaacacaattgccgtccgattttggctatgcaagcttatgagaag

SEQ ID NO: 420769 - DNA, 288 bp, Oryza sativa
cccttccgtaggttggatcctttagattgggccccgccggcgggcctcgccatggcgacgggccgccgcccggtcaccagttcgagcagcacgacgccgaggctgtagacgtcgccgcggtaggtggccaccgacgagtggccgtactccggcgggatgtagcccatcgtgccgacgaggtctgaggacacgggcgacaaatgaagcgaatagaccagccgatggaggacgctttgaggaaaaaggggttccatgcgggccaggaggaggatgttgtttgacttgatg

SEQ ID NO: 420770 - DNA, 418 bp, Oryza sativa
atggtgaacatttattatatttattaattaaacatgtcaaacataacgttcttctcaactagattcattttcattcattgaaccgagtgcaaaacttcaggcagctccgaaaagaacgtcgaaaataaactagtcgcttgttcaattgaactagtgtctgcaaattcgcggattgagtgcatcgccaactgagggcacccgacatcgattgtttgtagccctaattttgccgataaaattgggccgacggtggagccacatggtgaatcgttgcggaccacaactttttgaagaggaactttggctttttttgcaatctttttcaaaattagcatgagtggtcgatgtggtagcatagccgcttgttgacattttacctttcacctaccacacctttgtggaaagctggacggcgttt

SEQ ID NO: 420771 - DNA, 277 bp, Oryza sativa
aaaaaggtaaactcttcataataatattattaagacattatagctgatgtcttttgatcacactgcgatcaaattatgcatcataggcagtacaactccgcgtcaggaaaaagtagaggagatatatttcttgttattacttaatacagcattcacatatatcgaaccatccggtacgtacgtagtagtactccacgcgttcacatcgatgatcggggacgatatcctcaggtagtacttatgcaaaagcgttggcgtaaactgacgaactgaacgg

SEQ ID NO: 420772 - DNA, 333 bp, Oryza sativa
ggttactaagccgtccatagattcttcttcctccccgtcactcctcaccaacaaccatcccccacccttcaagatggacgccgccgtcgaccgcctcaaggatgggttcgccaagttcaagaccgagttctatgacaagaagccggagctcttcgagccgctcaaggccggccaggcacccaagtacatggtgttctcgtgcgccgactctcgcgtgtgcccgtcggtgaccatgggcctggagcccggcgaggccttcaccgttcgcaacatcggcaacatggtcccagcttactgcaagatcaagcacgctggcgtcgggtcggccatcga

SEQ ID NO: 420773 - DNA, 298 bp, Oryza sativa
aaggatggaattgagtagcaatactttcaccccaaaatacagtttagcgacaatatcttagaaaagccgcttgctttgccgccatggctggcaagctgagcagagcagctaacacaaagaacacgagatcactataaaccaaacggcaacgaacgaagaaaatacagggtcttttttgtctgaagatacacgaagcggttcgttttcttttatttttagtctcctctcctcctcgatgatgggtgtatggcaatggcaatggcgatgggatcctggcttaattggagggaaggggctt

SEQ ID NO: 420774 - DNA, 521 bp, Oryza sativa
cttctctggtggtgtgtttgttttcctgtctcccctctccttcctgctgtcctttcccctgctctgttcccccctcttacaagagagagagcgccagactctccgcaggtgaggagtcaaccatgaagggggcctaatacaagggcgcggccaaggccaacaccaagttggctgagaagagtaagggcgcggagaagcccggcggcaaaggcaggaaggggaaggccggcaaggaccccaacaagcccaagagggctgcctccgctttcttcgctgttatggaggagttccgtaaggagttcaaggagaagaaccccaagaataaatctgtcgctgctgtaggaaaagcagccggtgataggcggaaatccctgaccgaagcggacaaggcttcctaatgagcccagggccacaagctcaaggccgagtacaacaaggccattgctgcctacaacaagggcgagagcactgccaaaaaggcacccgccaggaggaagaggaggacgaccaggaggaatctg

SEQ ID NO: 420775 - DNA, 281 bp, Oryza sativa
gcgtgtgtgtgtacatgggtagcttagctctagttctactagctcttgccaacagcccagctaagctgagctgatctattcacgtctgtggcgtgagctagatcagcttattaactatctctctaccaaatcaagctaagttaattagctggatagctcgctcgcagtgatggtggttgtagtcgctgtcctcatgtccggcgtgggtgagacggctggcgcctcagcagggggtgcagatatatggggaatttcgtcggctgcatggggcttgcggagag

SEQ ID NO: 420776 - DNA, 259 bp, Oryza sativa
aaggatggaattgagtagcaatactttcaccccaaaatacagtttagcgacaatatcttagaaaagccgcttgctttgccgccatggctggcaagctgagcagagcagcttacacaaagaacacgagttcactttaaaccaaaacggtaaccgaacgaagaaaatacacgggtcttttttttgtttgaaagataccacgaaggcgggttcggttttctttttatttttagggctacctttcctccctcgattgatgggg

SEQ ID NO: 420777 - DNA, 445 bp, Oryza sativa
cggcccggaccggaactgccgggccggcccatcccacccgtgcgtgtaggctcaagtccaccggcgaggagtgcaacacgagagatcctagggatcatcctgggcaagctcatcgaccccatgctcgactgacccaaggagcgaaaccgtgagccccttcggatcacctctgtcaagatcccatcgccattgtcactgccatacacgcattatcgaggaggagaggcgactaataataaaagaaaacgaaccgtttcgcgtatcttgagacaaaaaagaccctgtattttgttggttcgctgccgcttggattatagcgatctcgagttcttagtgatagctgctctgcccagcttggcagccatggtggcaaagcaaagcggctctctaagatattgtcgctaaactgcattttggggcgacagtattgctactcaattccatc

SEQ ID NO: 420778 - DNA, 362 bp, Oryza sativa
aaccaaaacataggaggtttcatttcttcttctcaaagtagtgtagcatctttccttctttcaccattacataagcttaagcaataacagataacaaatcctcctcctcctctaggtaaaatattcaaacacaatacccttataagtacttattattaggaaagtagcgtgcatgggcataaatggcagcggggggcaggttaagaatcacaatgctgagcagcgaggaaacaaaacaccataatgggacagagcaaaagcctccgaaagggagcttttaggcagaaggcttctcccacttgaggggcttcaccacctcccaggtgaagtctgggtcggccccttccaagtgaccgtaagcc

SEQ ID NO: 420779 - DNA, 502 bp, Oryza sativa
gtcggatctaattaatttacctcctccacctcgtcctgctccccccgatcggatcggcccggctcctcctcctccgccgccgccaccgtcgtcgcagataggagaagatggccgcacttgataccttcctctttacctcggagtgtgtgaacgagggccaccctgacaagctctgcgaccaagtctgagatgctgtgcttgatgcctgcctcgccgaggaccctgacagcaaggtcgcttgtgagacctgcaccaagacaaacatggtgatggtctgtggcgagatcaccaccaaggctaacagccgactatgagaagattgtcagggagacatgccgtaacatcggttttgtgtcagctgatgactgacgcgacgctgaccactgcaaggtgcttgtgaacatcgagcaacagtcccctgacattgtacatggagtgcacagacactttacaagcgccctgaggagattggtgctggtgaccagggacacatgtttggata

SEQ ID NO: 420780 - DNA, 501 bp, Oryza sativa
  unsure (1)..(501): unsure at all n locations
gggctggatcacatcatggtgtctacgtcggtgagaagggacgtgctgggtttgtcctatcctccctctgctggtgctttctcctcagcgatggaacagtacatggcacctattgtgcagttcttggccaagattggggctccacttctggccagtgtgttcccttactttacttacgtgcacaatcaggaaggcattgatatcgattacgcccttttcacctccccgggaactgtggtgcaggacggtgaacatagctatcagaacctcttcgatgccattgtggatgctctgtattcggcgatggagaaggtgggtggctcaaccgtcagaatagttgtctcagatagcggctggccatcggctggggctcctgcagcgaccaaagataatgctagggcctacgtccagaacctgattaccatgtgagcaaagggacacccaagagggcccgacctatagagacatacattttngccatgttcaatgagaacgagaaaa

SEQ ID NO: 420781 - DNA, 518 bp, Oryza sativa
ttgtttatgcaaagggagagagcatctgcagctagtggagcacgcggggagctagctagctccgacgtcgtcgacgagctcctgtggctcgccgttatccgctcgctgatcgagccgtgtgcgggtgagaaagaaaaagaaaaaaaaaagatcgcgcctttttggcgggttcttggggtgtgaatccacggtttccccggggtaggatcctgatggggctcgaggaaggcggcgcgatgagggcgctgatgcggcggaagcaggtggactccgaccgggtccgcgccgtcggcggccaccagctcgccaaggagctctccgttacgcagctcgtcgcgattggtgttggttcaacaattggagctggagtatatgttcttgtgggaacagttgctcgggagcatgctgggccggcattgacactttcatttcttgatagctggagtggcagctgcactttaagtttctgttatgcaaagcttgctaggtcctgcccttctgcatgaagtgcctaccat

SEQ ID NO: 420782 - DNA, 466 bp, Oryza sativa
tcctaatctcaaggccgcggctgtgagcgctcctcccgtctctcccccaacccgccgccagccaccgagctcgccaccgtctccgttgcctcgccgtgctctaggttctcggatggaggccgaggcggcggcgaagagggcgcgggagagcggtgacgcggcggcggccggtgccggcgagcaggcgggtatctctgccgtcatccctggatggttctccgagattagccccatgtggcctggtgaggcacactcattgaaggtcgaaaaggtactattccaaggaaagtcggactaccaaaatgtgatggtgtttcagtcctccacgtacggcaaggtgcttgtgctggatggagtgattcaggtcactgagagggatgagtgtgcttaccaagagatgattacccacctccccctttgctctatcaaagatcccaagaaggtgttagttattggaggtggagat

SEQ ID NO: 420783 - DNA, 495 bp, Oryza sativa
  unsure (1)..(495): unsure at all n locations
tctaattccattcctcgcgattcctctcccctcgcctcctcgtcctccccctcccaggggatcgccggagaggaatcgcgcggaggaaaaaaaaagaaaagggcttccccgtcgtctaagttaaaaggaagccatggagcacaaggagactggatgccagcagccagaaggcccgatcctttgcatcaataactgcggcttctttggcagtgcggctaccatgaacatgtgctcaaagtgccacaaggagatgataatgaagcaggagcaggccaagctggcagcctcctctatcgacagcattgtcaatggtggtgattccgggaaggaaccaattattgctggtcacgctgaagtagctgttgctcaagtcgaggtgaagacgcttgttgcgcagcctgctgagattgctggtcctagtgaggnggtcacggtgaaccccaggggagggaaggaccaatcggtgcttcacttgtcggagaggttggtcttacc

SEQ ID NO: 420784 - DNA, 390 bp, Oryza sativa
ctttgacccgttttctttctccgtatcccccatcccctccttcccggcggcggcggcggcgcggaggcggcggcacgggagcggctagtggtttcgtcggcggaggcggaggcggtgccaagatgttcgggcgcgcgccgaagaagagcgacaacaccaagtactacgagatcctgggggtccccaagaccgtctcccaggacgacctcaagaaggcgtaccgcaaggtcgtcatcaagaaccaccccgacaagggcggcgaccccgagaagttcaaggagcttgcacaagcttatgaggtattgagtgacccggaaaaacgtgaaatctatgaccaatttggtgaaaatgcccttaaggaaggaaatggtggaggcggatcccatgttg

SEQ ID NO: 420785 - DNA, 543 bp, Oryza sativa
tcgttcgcggaagcggcggaggcccgtggcgacggcgaacagcgcgcggaagctgcagcggcgggagatctccgcgctgccgtgccgcgcgttctccgcgagcaccacgcgggagcggttccgcaacatccagctccaggaagagtttgatactcatgatcccaaggagatgggttcactactaccttacttgatgaaaaggtctgagattattgagatagttggagccagtgatatcatctttgctttatcacagtcaggagtatgtgctgcattcagcagagtctcaaaccagcggatttgctttctgaatggaagaccagatgaagtcattcgcagtttgttttacaacaagaacaatgactcactcattactgtatcagtttatggttctgaaaacttcagtgccttaagatgcaggacaactcgaatagagtatatacgacggtggaagccagatgctggtttccctcttttcgagacagagtccttgaaaagggccaggttttgtggaacttgatgatgttaacgggaaggtgctga

SEQ ID NO: 420786 - DNA, 508 bp, Oryza sativa
tctcacgcttccgcggacgcgtccgcccacgcgtccggagaaattctcccgtcgtctccttccttgcgccaagaaagacgagccgcggctcaacagcggagtggaggggcgccgatctccatcgccgaggagagcagagcaggggaggggaggggatcctggttagcgcttttggcgtgtgattgatttctaaacgaattttgggccgtgaagggaagttcaatcatggcagggtctcttgccgcctcagcattcttcccaggtccaggctcatctcctgcagcatcagctagaagctccaagaatgctgctgttaccggcgaattgccggagaatttgagtgtccgtggcattgtcgcaaagcctaacccaccttctgcagccatgcaagttaaggcacaggctcaaacccttccaaggttaatggtacgaaggttaacctcaagacggtgaagcctgacatggaggaaacggtggcttacagtgctccatgacgtttataaccact

SEQ ID NO: 420787 - DNA, 346 bp, Oryza sativa
cacgcaatccatagtcgtgatagagctcccaacgcagttcttcaattgcaaaaagactgtccaaactgaccaagggtgttattatagccggggagttttttaccacgcaacatcaaagagacactaatgcattaagataacttggagcgcggatcactagcaaatttggcgcttagtcgaccttctagatcttggggccagaaccgatgacgtctgccgggggagcatctgactcttacatgccgccggccatgtccgcgccagcgcgctgggtcattttggcgcttacggggttgcagatgccctccagttgctacatcttgtcatcgaactcatcagcctcggt

SEQ ID NO: 420788 - DNA, 378 bp, Oryza sativa
ttggcgttatgaccgtctcgatccccaagaacaccagggttactaccaagtaggatcatgccttgtgcacatactgtgacaaccagactgaactgctcattcaggtgtatgaggtctagaggaccaggacacgcgacaacaacctggtgagcaagtcttagctatctgtaatggctcgtgcttccatgggtgacgcacattatcaccgttaggtgaaacattgatgccgatggtattctgaacgtgtcagctgtggacaagaccaccgggcaatataacaagatcaccattagcaactacaggggcggggtcagcacggaggagattgtgaagatggtgcaggacgccgacaagttcacgtgagatgacgaagaacac

SEQ ID NO: 420789 - DNA, 453 bp, Oryza sativa
gcatcgaggacaaatcactcctggggtggcactgatttgaagcagagaagactaacatatttgaccgaatcattcattcaattaggtcatgaattgagcacgctgaaagttctacagaactgggttattggccgatgactacatcaactgttatctacctattacaaaatacttttaaggctagcagttcaacaagtaaaggaccaaagtcgagtctaaccacaacaagcaacctgttcagtatgatggtgcataatggtcgatcgacgtcattaggatcatgcgtattaagtggatatagtggaatggtcggcagggctgacaatgcatcaaatgttgaaggaaaatgactagaactacgtttatacaggaaatgacagcttctgtcgggcagacttatggaatgatcagagataacctgatgaatgatataacccgggtttgatatttgca

SEQ ID NO: 420790 - DNA, 138 bp, Oryza sativa
aaagaaagtataatcaaatcacaaacatatcatatacatagacccataaactagcatagttcatggtcccaaaagcacaagagtgctccggtgctcccccacaaacttcctccggcccatgtgggcctgattcggggg

SEQ ID NO: 420791 - DNA, 505 bp, Oryza sativa
ttggttgagccggtcttctttcatatcggcgtgtaccgcgcctgcattgtgcccgtctcctacagaagggtgccgtgcgtgaagaagggcgggatcaggttcaccatcaacgggcactcctacttcaacctggttcttgtgaccaacgtggccggcccaggcgacgtgcagtccgtgtcgatcaaggggtccagcaccgggtggcagcccatgtcccgcaactggggccagaactggcagagcaactcctacctcgacggccagagcctctccttccaggtcgccgtcagcgacggccgcaccgtcaccagcaacaacgtcgtgccggccggctggcagttcggccagaccttcgagggcggccagttctgatcgagtactcggctaattccgtttttcagttcacttttctgcagaaatgtcagtgtgagattgagattgaggtggaggaggaggaaggcctctttgctttagtaaagagaagaggctttggctattctgaggc

SEQ ID NO: 420792 - DNA, 449 bp, Oryza sativa
ttgacgcgtgggcggacgcgtgggctcgagcggagagcatatggggaaggactccaagccgaaggacaaggggaagggcaagcaggctgccggctcgtccggcggcgatgacgccggcggcggcggcaagggaggcaagggcaagggcggcaagtccgtcgacggcctcggcacctgcacctacgtcaaagctaggcacgtactgtgcgagaagcaagggaagatcaatgaagcttacaagaagttgcaggatggctggttggacaacggggacaaggtccctcctgccgagtttgcaaagatagcccaagaatactctgaatgtccatctggaaagaaaggtggagatcttggatggttcccgcgtggaaaaatggctggcccttttcaggatgttgcaattagcacacctgtgggagctactagcgcaccatttaagtcaacgcatg

SEQ ID NO: 420793 - DNA, 404 bp, Oryza sativa
gagggtaaggcaaagctgcgagcgccagatcatcttattactacagcttcttggcgatatgctacagtagcttcttcctcccttgcaaaaagaaacccaaaccttatctacaacgcaacacacacaccgtacacagagcgctcgatcgatcgaagcagacgagacgacgatggcgaactactactaggtaagcgacaacacctaggctatacagggatacagcgcgcggcggaaactggcgtgaagactgttgcttttattcaggctctgtcctttgtggcctttcttggagatggctgaatcggatggattttggcggctgcatttggatttttgggggcgggtcttttcttgcccctctttggtgcggtctgggttggcggggggaacccactttttttcct

SEQ ID NO: 420794 - DNA, 243 bp, Oryza sativa
tttcccacttttcactttttgtagcactctggtattctcccgtggtgactgccatccgaggaggttgccgctgcgtctgctgccgccggcgaggcgcctccgcctccttctcctgctgtggtagaggaggcgaaggatgcctcggaggcaccgaagccggaggaggctccgaacgctgaggatggggaggagaagaaggcggagggtgagaaggagaatgtgatggcgaactattgagaggaa

SEQ ID NO: 420795 - DNA, 243 bp, Oryza sativa
gaagttgaaaggaaattaaactgatttattacttgttccattaaaaccatcacactcgggtacgtggtgaaaccgagaaagttaaaaaacaaaaacagttgttgtagagtgaggccttgcttgctgttacatgagaggtgcacgaagaaccagctcacgagcagagtattcagcccacacgcagtaaggaaaacggtagggatgccgtcgtctacgacggccgatccgccgttcggctatgat

SEQ ID NO: 420796 - DNA, 460 bp, Oryza sativa
tgttcgttttcctttgctcatacgctctccagatcttcagccccaggagctccggagggttcccaatggcggggaaagtgtatcacatgtactactctatgtatggacacgtagctaaactagctgaagagatcaagaagggtgcttcatatactgaaggcgtcgaggctaaaatatggcaggttcccgaaactgtccatgaggaaggacttggaaagatgggctcgcctactatgccagatgggccaacgatcacaccacatgaacttagtgaggatgatggtatgcggcttggattgcctacaaggttcggcatgattgctgcccatatgaaagcattctttgatgcaaccgattgcctgtggagtgagcacatgcttgcacagcaagcccgtcggcatcttttttagcactgttacccacggcggtggtcaggagactacaccgatggcaggaataa

SEQ ID NO: 420797 - DNA, 546 bp, Oryza sativa
cctgtccaattcggtggtctcttcaaggaagatgatcctgagttcaccacctcagacgccgttaccgagctcactatcaaaccttcatcgaaagaaaccgttgagattcctgtcactgagaattccacgattggatgggagctccgggtgcttggatgggaggtgagctacggagcagagttcactcctgatgccgagggtggatacacagtcatcgtgcagaaaacgaggaaggtgcctgcaaatgaggaaccaatcatgaaaggcagcttcaaggttggcgagccaggaaagattgtgctaacgatcaacaaccctgcatcaaagaagaagaagctcctctacagatccaaggtcaagagcaccagtgagtccgtttgaggttgcagctgcctgatcaccagattcaccacaatggcagctgaactcattccctgatggaagagaaaccttttggttttggctctttaattattggttttgctgttttgtttcacatttggatttggttaataaaaaccaaagtgagcttgttttgggatagtt

SEQ ID NO: 420798 - DNA, 479 bp, Oryza sativa
tcgttcgcctcctcctcctctcgccgctcgcagcgaaaaagccagcgcctcccagcgcccacgcgatcccgacgaatcgaatcgagtccgagacgccgatctcggattcgagaccgttgatttcaaccaacacaagccctcctccggatcgatccgctcctcttcagccatggcaggaatggcacccgaaggctcccagtttgatgctaagcactatgacagcaagatgcaggaactactgcaccaaggtgacaatgaggaattcttcacttcatatgatgaagtttttgagagttttgatgacatgggcctccaagagaaccttctcagaggcatctatgcttatggttttgagaagccatcagctattcagcaaagggggattgttcccttctgcaaagggcttgatgtgattcagcaggctcaatctggaacaggaaaaactgctaccttctggtctgggatcctgcagcaccttg

SEQ ID NO: 420799 - DNA, 470 bp, Oryza sativa
ctcatcttcttcatcgctagctagtaagagtgaatcgaagatgatgaagaagctggtgaggttgctgatcatggtggaggtggtggccatggcggcggcgccgcggcgagcggcggcgctgagcatggactactacgggatgagctgcccgttcgcggagatggtggtgaggagcgtggtgagccaggcgctgatgggcgacccgtcgctcgccgccagcctcctccgtctccacttccatgactgcttcgtccagggctgcgacgcctccgtccttctcgactccaccccggacaacaccgtcgagaaggacgcgctcgccaacaagagcctccgcggcttcgaggtcatcgaccgcatcaaggacgccctcgagtcgcggtgccccggcgtcgtctcctgcgccgacgttcttgccctcgtcgtgcgcgacgccgtcatcatggcggggggcccgtactacggcgtgg

SEQ ID NO: 420800 - DNA, 480 bp, Oryza sativa
ataagggtaagatcaccatcaacttttgaaaaaacaactttgcataagcatctactacatccagcagcatgaaacataatgttcaaggtatcagactttggaagatacttaaatactaggccaaacggttcgtatttcaaaattcagctaacacctccactggtttcactaagacgaccacacttcaagccaggtgttcacttctttgccttcttaggtgccgctgcagtttgagcaggagctgccgctgcaggagctgctggctctcttgggccctgagccaacctctcctccctcctagcaatcttcctctcacggcttgccttgctcttggcacgctttagcctcaaactggtcagagagtgttttctttcttgccttttcaggcttaaacttgtggatacttttccattaagaacacgcttgttctttgaacatgttaccctttgacctttatgtacatgtaatgatacatgtgct

SEQ ID NO: 420801 - DNA, 495 bp, Oryza sativa
ttttactcttgggcggacgcgtgggctcccacccaggtaaggagagggtggaggaagggaacctctaaggcggcggcggcggcggcggagatggattccctcaagctgcagaagcggctcgccggcagcgtgctcaagtgcggcaagggcaaggtctggctcgaccccaatgaggtcaacgagatctccatggccaactgccgtcagaacatccgtaagttggtcaaggatggattcatcatcaagaagccccagaagattcactccaggtcccgtgcacggagagcccatgaggctaagcagaagggacgtcactctggctatggtaagcgtaggggtacaagggaggctaggctccccaccaagatcctgtggatgaggaggatgcgtgtgctcaagcgtttgctgcgcaagtttcgtgaggccaagaagaatgacatgcacatgtatcatgacatgttcatgaaggtcaagggtaacatgttcacgaacaag

SEQ ID NO: 420802 - DNA, 426 bp, Oryza sativa
gagaaaaacatggaagccgtccttaaccacaattcaaatagaccccgtccttaccactcctcccaaacgagaaagttggtcatattaaaacaaaaacaaaaacaaacttttatccagaaccttacttcctaagacataatctagagaaggtcagcgacgttggccggcagctcctcgatggtcacattgtagaacctctggatgtcgaacagcatcctctaattcatcgcgggtgacaaagttaatggcaactcccttcctgccaaaccgaccactacgaccaatgcgatggaggtagttctcaggctgggtgggcaggtcgtagttgatgacaagggagacttgctggacattgataccacgagcaagcagatcagtggtgataagcacacgggaagaaccagatcggaactccctcatgatgat

SEQ ID NO: 420803 - DNA, 340 bp, Oryza sativa
gattcaccggtaaccaaatacttatagtacggattaggacagaagtacattacagccacaagcaacatgagcacacgtcttttgcttgttcttattttaggcatcagcattcgcctcactgtaactaccgatgcacgccatgtcgatctgctgatactatattagcagaaccacactactagtacagtaataataatcaaggagccccatctgaagagaatggtaggtggcacaaagccaaggctcgtattaggcctgtcgatcaggcgacgggaggctttttaacgtccttgagggggcggaaccaaaccttttggttgagcacggaggctccaccatt

SEQ ID NO: 420804 - DNA, 526 bp, Oryza sativa
ttactttatacactgaaccttcgccttcctctctcgtccgatcgacctttgcatggcagcagtagctagctccaaggggcgggtgatcgctggaagcttcgtcgcccgcgtcctggccggcaaggccgcctccccgaggagatttgtgagcgcttcagcctacgacaagaacgtggaagagcaggtgcgcccggcggtggtgccggacgatgtgatcggcagcgtcgggagccctgacaagtactggggccctcacccgaccaccggcgtgttcgggccagcggcggtggacgccaaggcggcggcggccgttggcgcggcgaaggccggcgcgaatggtggcgcctccgtgctcgaccagaaggtttggttccgccccctcgaggacgttgagaagccttccgtcgcctgatcgacaggcctaatacgagccttggctctgtgccacctaccattctcttcagctggggctccttgattattattactgtactagtagtgtggttctgctaatatagtatcagca

SEQ ID NO: 420805 - DNA, 364 bp, Oryza sativa
gccccgccttcccgtccgtcgccgtggcgtccacatcgatggcgtcctcggagagcgaggagaggaaggagaccaagctgtggggcgggcgattcgaggagggcgtcaccgacgccgtggaagggttcaccgagtccatcttctacgactggcagctctacaagtacgacatcatgggcagcaaggcccacgcatccatgctcgccgcgcagggtttgataacggctggcgataaggacatcatcttagaggggcttgatcaaatagagaagctgattcaggatggaaaattttgagtggcggacaaaccgggaggatgtcatatgaatattgaggcaccttttgtcgaaaaaggttggtgaac

SEQ ID NO: 420806 - DNA, 390 bp, Oryza sativa
aggttcaaatccaacttattcataaagcatactgctgtcccacaggaaactgtttcataaaactaacatatcatacggactcgatggtccattaaaccagacacaagtagacatcagcaccacaaatacttgacgaacagaggctcgggatgaccaggcacatcggcagctccaccaaactggctgattactgaccaccacggaggcggagcaccaggtggagggtggactccttctggatgttgtagccggcgagggtgcgtccatcctccagctgcttgccagcgaagatcagacgctgctggtctgggggaatcccctccttgtcctggatcttggccttcacattataaatggtgtcggagctttcaaccttcaaagtgatggtct

SEQ ID NO: 420807 - DNA, 338 bp, Oryza sativa
tcgttgttcgtctagggcttagtgggttgagatggcggcgccggatgtcgagtaccgctggtctcgcggaggactcacctgggccaccgacgaccgcaaagggtagccatcttttacacctacggcaagatcctcgactccaagatcatcaacaacgggaagacggtgaggtcacgtgggtttggctttgtcaccttctcctccgagcagtcgatgcgcgacgccatccaaggcatgaacggcaaggagctcgacggtcgcaacattaccgtcaatgaggcccagtcccgccgctccggcggcggaagcggtggctacggcggcggcggtggcggcta

SEQ ID NO: 420808 - DNA, 506 bp, Oryza sativa
ccagactccacgcttccttttccagaggagatgcgacagtacgacgccttgctcgtctgaaaagcaagggttcccggaaaatcatttccagtgctacctcaactaatggaactatgttggcctattcagattgtgtgaaaccctgcctttttgcactaagacataagggtggaaaaaagtttactctagacaaactagagctgccaaagggattgctgaattctcagtgtatgctgttttctattgactcatccagtttgattctagctggccgtgatggaaagatttatgttgtagacattgccacacgggaaatttcaaatgtctttcaacctatgagaaaaatggatggagctttcaaagaaccacctgttacaaaaatgttcctcactgcggatggacagtggttggctgcagtttactgttctggggatatttacatatttaacctctaggtgcaaaggcaacactggttcataccttgtatgaatgatgggtctgttaca

SEQ ID NO: 420809 - DNA, 244 bp, Oryza sativa
aaacaccataaccaaagcgaactcaattcatggtaacatcacggacgaagaacacctaacactggatggatggatagagggcttctcgactcgagagagccactggacacgataacgactcgactcgatgataagaagattctgacacggatagctaaggataactggccacgatgggccccaccaatcagttcctccagttcccgccggagtcgccgtcgtagccgccgccacggttgccacc

SEQ ID NO: 420810 - DNA, 440 bp, Oryza sativa
ttgatttctgattctattgccttgatggtcatgcaatccatgcttggctcatggaacaagagtgctggaggagggaaacacatgggttcagagcttgtacaaagggtagcgatcaatgacattgctgagagtataatggcatttaatacaaattacaaggacactggcctctttggtgtctacgctgttgctaagcctgactgcttggatgatttggcttttgcaatcatgcaagagattagcaaactgtcataccgggttactgaggaagatgttatccgtgcacgtaatcagctgaaatcttccatccaactgcacctcgatggttccactgctgttgttgaggatattggccgtcagttactcatctatggtcgaagaattcctattcctgagctttttgcaagaatagatgcagttgacgcaagcacagtcaagcg

SEQ ID NO: 420811 - DNA, 293 bp, Oryza sativa
ctcacaagcccaagtcgtgtttcaccgaagcagagtagagaaggagaggagcggtgcgccatcagccgtccgatcgagtgatccgatggctctcgctctctccacctctgctgctgctgccgctgccgccgcggcgcgggcgctcgcggcgagggtgacgacgacgaggggttacgccgcgtcggcggcgtccgcggccgatgaggcgggccgcggcggcggtggaagggaagggctcttttgtcctttccctggcggaaggacggctcctactcacatgacctccgtctttc

SEQ ID NO: 420812 - DNA, 374 bp, Oryza sativa
catgagaaatgaaatttgttctatccaactccatcccaagaagtaacaaaacaaatttcacaagttttttacaaaccaaggcagcatagcctatgtgataaatcaaatttatattctgtcctacaatggttacccaccccgtcactggcgaccagtgagcacatcacatgtaaagaccctccggcacacctttcctttttcttgaacatcaccttttcctttgccttcttgaagtcagcatgtgtcaccttcattcggcgttttctcaaagcaagatgtccagcttcagtacatattgcttttgatatcagcaccggaaaactcattcttggtcatgacaaactctttcccccgtgaatttccggtccggtacc

SEQ ID NO: 420813 - DNA, 352 bp, Oryza sativa
agccggtaccggaccggtaatcctgggggaagagtcttttacgtttaaggatgagttccccggtgctgagatcaaggcaatatgtactgatgctggactttctcgccttgtgtgatcgctctaatgaatgtgacacatgctgactccatgaaggcaaaggagaaggtgatgatcaagaagaaggaaggtgtgccggagggtctttacatgtgatgcgctcactggtcgacagtgacggggtgggtaaccttgtaggacgaaatatatatttgatttatcaccataggctatccagccttggtctgctaaatacttgtgaaatttgttttgttacttcttgggatggagttgg

SEQ ID NO: 420814 - DNA, 462 bp, Oryza sativa
tcttttgacgctagctgcattgtagtgagagagagaggcggccatggcgctggcgtcgctgccgaaggtggtgatggggtcggtggcgttcggtgtgttctggatgctggcggtgttcccgtcggtgccgttcctgccgatcgggcggacggcgggggcgctgctgggcgcggtgctgatgatcgtgttccacgtgatcagcgccgacgacgcctacgcctccatcgacctccccatcctgggcctcctcttcgccaccatggtcgtcggcggctacctcaagaacgccggcatgttcaggcacctgggccggctgctggcgtggcggagccagggcgggcgcgacctcatgtgccgcgtctgcgtcgtcaccgcgctcgccagcgcgctctttaccaacgacacctgctgcgtcgtcctcaccgagttcgtgctcgagctcgccgccgagcgcaacctccc

SEQ ID NO: 420815 - DNA, 408 bp, Oryza sativa
ttttctttacgcgtgggcgcgtgcgtggggcagtcgactgtggcggtggaggaggcgtgggggaggtacgacgctttgctggggcccggttgccacttcgtgccgtggtgcgttgagccgccgcgttgctggctacctttccctccgcgtccagcagctggacgtccgctgcgagaccaagaccagggacaacgtcttcgtcaccgtcgtcgcctccgtccagtaccgcgccctcgccgacagggcctacgacgccttctactgcctcaccaacgcccacgcccagatccagtcctacgtcttcgatgtgatcagggcgagcgtgccgaacatgaacctggacgaggtgttcgggcagaaaaaggatgtggcgcgggcggtggatgaggagctggctagggctatgac

SEQ ID NO: 420816 - DNA, 417 bp, Oryza sativa
agctaagaatctacctttattcccatactaacattcaatggcacaaaatgggaatgagatcccatgaacacatgaaaagcagtagcagcagcatcgcgaaatagttactggtaccgatacaacagatggatcgaaaatctcttacgcgcaaagaagcttttgcagggagcctaattttgctatgatgaagaacagagaccattcctactgaagacagcatcaaaataccataaccaccatgagtcaaattaagggttcctggcttggaaatccttcatgaacgcgacgagcttttccacaccggcgagcggcatggcgttgtagatggaggcgcgcacgccgccgaccgacctgtgccctttgagctgcaccattccctccttggccgccttggcaatgaactgcttttaaaaatcc

SEQ ID NO: 420817 - DNA, 379 bp, Oryza sativa
aaacaaatatacagacagacttcattcatgcttgtgcttaaaagtctgcatacatattatgaaaacacattgcaatcaagactcatatatagcacaacaattagtaatcaatctcaaatgtttgacacgagaagtgcagatcaactggctattaattctgcatgtcaaattgcaaagcaaacagaatgttacctttaacgtgaccatgacacagcatcgatctcatccctggcagacttgtataactcaagcctcttaaagcactgctgccttcgctccataagagcaggatcctcatcaaggagttgcgcaagctgcttagcatctttcctgcccacttgggtatagaaatagttaagcaaggaacgcttagcttccc

SEQ ID NO: 420818 - DNA, 376 bp, Oryza sativa
cttcggcaactgttcctatggcaactcgctgccgtcggaggtgtcgcgtgcggcgatgcttgtgcgcatcaacaccctgctccagggctactcgggcatccgcttcgagatcctcgaggcgatcaccaagctgatcaacaccggggtcagcccatgcctgccgctccgaggcaccatcacggcgtccggcgacctcgtgccgatgtcctacattgccggcctcatcaccgggcgccccaacgcgcaggcggagaccgtcgatggcaagaaggtggacgccgccgaggcgttcaagatcgccggcatccagggcggtttcttcaggctggagcccaaggaaggtctcgccatcgtgaacggcacctcccttgggctc

SEQ ID NO: 420819 - DNA, 292 bp, Oryza sativa
acccacagaaatcagagagttttaataggattgcaacaagcaaagcacacacaaaaattgcaggtacaaaaaaacatggcggcggcgcgcgctgccggttttaggaacctactataatgccttggggggggctgctcctcctccggcggtggcggtggcctggaggaggccgtcgcggacctgcgcggccatgttgcggacggcgctggggccgtgggggatgaaaacgggggaggacctggagggggcgcctatgttgtggttggggtaaaaatactgggtgacgagcacc

SEQ ID NO: 420820 - DNA, 327 bp, Oryza sativa
ttctctttctcgcgaggctctcgtcgtcgaatcgaatcctctcgcgtcctcaagatgcagatctttgtgaagacattgaccggcaagactatcaccctcgaggtggagtcctctgacaccatcgataatgtcaaggctaagacccaagataaggagggcatccccccggaccagcagcgtctcatcttcgctggcaagcagctggaggatggcaggacccttgctgactacaacattcagaaggagtcgacccttcaccttgtccttcgccttcctggtggcatgcatatctctgtcagacttttaccggcaagactattacccttg

SEQ ID NO: 420821 - DNA, 425 bp, Oryza sativa
taaccctcctcccctcctctcctctccattccgccgccatggccgccgccgccgccgccgccaccacccccaactccctcctcctccgccgcccggcggcacccaagccggcctccgcggcggcctcgccgctccgtctccccacgcgggcagccaggatctcctgcgcggccgtggccacgcccgcgcagtcctcctcctcccccgccgccgtcgccgccgaccgcggggtctacaacttcgccgcgggcccggccacgctgccgctctccgtgctccagagggcgcaggcggagctcgtcgactaccgcggctccggcatgagcatcatggagatgagccaccgcgggaaggagttcgacgccgcgatcaagaaggcggaggccgacctccgcgcgctccttgccgtgcccgacacccacgag

SEQ ID NO: 420822 - DNA, 379 bp, Oryza sativa
ttgaagctaagcgttccttgcttaactatttctatacccaagtgggcaggaaagatgctaagcagcttgcgcaactccttgatgaggatcctgctcttatggagcgaaggcagcagtgctttaagaggcttgagttatacaagtctgccagggatgagatcgatgctgtgtcatggtcacgttaaaggtaacattctgtttgctttgcaatttgacatgcagaattaatagccagttgatctgcacttctcgtgtcaaacatttgagattgattactaattgttgtgctatatatgagtcttgattgcaatgtgttttcataatatgtatgcagacttttaagcacaagcatgaatgaagtctgtctgtatatttgatt

SEQ ID NO: 420823 - DNA, 446 bp, Oryza sativa
aatcaagatagcgctatattagtatatttcacttgcaaaatacaacaacggaatcagaaagctgccagccaaggccatgaacgctgcaggcgccacggcattgcagcagcaatctcacacgattacaacacggataaatacagcaagctcaaaaaggaaaaaaaaaacacggacggagaaacaacgtaatctgctgatgagcgtacgagaagccttcaggatcctgaattcctccctttcttatttcggtgcacgtatcgtctcttcctggatcttgtcgcgttcgcgggtggactggttcgatcagcagatgggcaggggctcgccgttccactccttgaggcactcgagcatcgggtcgatgagcttgcgctcgctgatggccaggaacaccttgttgcactcctcgccgggggacttgagcttctttccggggaggtacacgc

SEQ ID NO: 420824 - DNA, 500 bp, Oryza sativa
ctcgtcttcctctactttccgccgccgccgccgtcgctctcctcttcgctccgccgcgcaggtaagaaggagaggaggagaaaatggtgaagcacaacaacgttatccccaatggccacttcaagaagcactggcagaactatgtcaagacatggttcaaccagcccgcccgcaagcagaggcgccgcattgctcgccagaagaaggctgtgaagatcttcccccgcccaacatctggccctcttcgacccattgttcagtgccaaactttgaagtacaacatgaagtcgagggctgggagaggctttacccttgaggagctgaaggctgcgggcatccccaagaagtatgctccaaccattggaattttcgtggatcaccgccgcaagaaccgctcacttgagggactccaggctaatgtccagaggctcaagacatacaaggccaagctggtttatctttccaaggcgtgctcgcaaggtcaaggctggtgattccac

SEQ ID NO: 420825 - DNA, 465 bp, Oryza sativa
ttagggcttacccgtcgtctaagttaaaaggaagccatggagcacaaggagactggatgccagcagccagaaggcccgatcctttgcatcaataactgcggcttctttggcagtgcggctaccatgaacatgtgctcaaagtgccacaaggagatgataatgaagcaggagcaggccaagctggcagcctcctctatcgacagcattgtcaatggtggtgattccgggaaggaaccaattattgctggtcacgctgaagtagctgttgctcaagtcgaggtgaagacgcttgttgcgcagcctgctgagattgctggtcctagtgagggggtcacggtgaaccccaaggggagggaaggaccaaatcggtgctccacttgtcggaagagggttggtcttaccggattcaactgccgatgtggcaacttgttctgcgcaacgcaccggtattcccataagcatgac

SEQ ID NO: 420826 - DNA, 482 bp, Oryza sativa
cgttccaaacatttaaggagctcatgaatccaataatccggaggtttttttaaaaggactcatctcaacatccataacaagcaaacgatagttgtttccgacaccaacattagaccataacgagtcaactgacaaccatagactagaccaaaaataccgcggactgcatagataaaacatcagtgtcgagcagaaggaaccgctcagcacttgacctccttcagcccatgagagaagtaaaggaaggttgggtcggtggctccgtccttgtagtaggcaaacaccaagccgccatcatcatgcatgctctcaccaacaaagaactgaaggtccttgagctttccaagcaagtacttggtggcaccctcaatgttctttttgaattcctcttgcttttccgcatccagcttggcggagaggttcttgatgtagcgctttatgaaggtcacaaactgcttcttgtcaaaaggaggttgctcctg

SEQ ID NO: 420827 - DNA, 391 bp, Oryza sativa
gttaatcagacacaacacatggatggaatttcattcgatagcagagcatgcaaatcagtaccagatatcaaacagaaggggtatgatgacaccaaaatgataagctggtctctatttccagcacaaaaacaaaatttagatttagtccctgatagcatccactagctgctgaatataacaaaacagatactatgtccggtcacttcacttcttctcttccttctctgcctcaacagcccttttctggcgggcaccaacatggcgctggttcatcctctcaacacggagcttagcataggccttgaacgcctttcatctaattggggaccttcacaaccttaactgagcgcttttcaccacgagcaataggcatgtagtcaccctggacctg

SEQ ID NO: 420828 - DNA, 482 bp, Oryza sativa
accatataacggacgattgctgattactattactggttgcaatgtaacacttcggatacaatagtacattacagagctagctaaatgcgaagccacaataccgtcagcgcaagacgatcataaataaagcttacacaacatagccaacatgcaaaccattcggactgaccagagatgagggttcttgaagctgccgtggtgtgccatgcatcacaaatgccgaacaactagattgtagcagccaacatgaaaggaaaaggcatggataatgcagcaaagatggatgatgaagaccgcagattgtgacgcttcgttcaccaaccatatgaaacccctaaattttgtcaagtttctccgccttcaccaccggattagccttggcaatagcattcctagcagcggtccgatagtcaaactggcagtcatgcttatcggaatagcggtgcgttgcgcaatacaaagttgccacatcggcagttgaa

SEQ ID NO: 420829 - DNA, 280 bp, Oryza sativa
acgttcactttgcgcgcaccgctactcccccctcgccgagagagctctagggattgcgctggcgaatttttttttaattcggggggagagatttgtagaggcctgaccatgttggtctaccaggatctgcttaccggtgacgagctcctgtcggattcgttcccctacagagagatcgagaacggcatcctctgggaagtcgatggccagcggtgtcgatcaaggagctattgatgtgggacattggtgccaacccatctgctgagggtggcggtgatga

SEQ ID NO: 420830 - DNA, 539 bp, Oryza sativa
tctttgtattcgcacttagtagcttgagaccgggagcaggacgtgcggcggaatgggttccggatccggatctttcctcaaggtggtggtaaagaacttggatgttcttgcggggcctatagtttcacttgcttatccactatatgcatctgttcgagcgatagaaacaaaatctgctgtagatgatcagcaatggctcacatactgggtgttgtactcgtttatcactctatttgagctcactttttctccggtacttgaatggcttcctttatggtcttatgctaaattgtttttcaattgctggttggtcttgccctacttcaatggtgctgtacatgtttatgaacactttgtgaggccaatggttgtcaaccagcaaaaagttaatatttggtacatcccaagaaaggatgagtcagattgaccctatgatgtgatatcagctgtgccaagataccatgaacaaaatggatcaagagcgtttgaaagtctgggtaacaagtttaaggcttaaacacaaggcgctccattctgga

SEQ ID NO: 420831 - DNA, 319 bp, Oryza sativa
ctccgttggggcaaggaccccgcgggcggcgggggggggctacccgcccaagccgcggcagacccaggagcaggcgcggcggaagaagacgtcgcgcgcgcaggaaggcatactcaagcacatgctcaagacgatggaggcgtgccgcgcgcaggggctcgcgaacgggaacaacccggagaagggcaagccggagagcggagccaccgacaacccccgaggctggcggaaggagaaggcccgattcgaccggaacggccccgccgccatggacaagaaccaggccgaaaaacgccgaaccgggccggaagagcaagcc

SEQ ID NO: 420832 - DNA, 446 bp, Oryza sativa
ttttgtttttttcatccaactatacaagttcctgaagagtttacatgtgacccagaagatcaagatgtcgtgcggtggaagttgcaactgtggttcctgcggatgcatcggtggctgcggaaagatgtaccctgacctggctgagaagatcaccatcaccactactactacatccactgtcctcggtgtttgcacctgagaaggggcaatttgagggagttgtgaaagcagctgaatctggtgagggtgcccatggctgcagctgtggttccagctgcaagtgcaacccctgcaactgctaatggccaatgcgatctgtgactatgttatgaacaaacaaagccctttcagtctgatggctcatggcttgtgagaccctgttaatttcaatcattgtgtgtgccctcgcccgtcattgaatgtcaaaaattatggcttgaaaacca

SEQ ID NO: 420833 - DNA, 162 bp, Oryza sativa
gccggtgaggcgaagatgtggtggcaggcgtacgtcgacgaccacctgatgtgcgagattgacggcaaccacctcaccgccgccgccatcgtcggccacgacggcagtgtctgggcgcagtccccccactttccctgtagtccaagccctgaggagattact

SEQ ID NO: 420834 - DNA, 469 bp, Oryza sativa
cggaccggtcttgccgggcaagagatcgacccacgctttcgtcctactccggctcttcatcagtatcgaatgctctcttctcctcgtgcccaccaccaccaccgtagcaatggcgggcaacgggccgatcaacaaggaggacccgctcaactggggcgcggcggcggccgagatggccggcagccacctcgacgaggtgaagcgcatggtggcgcagttccgagagccgctggtcaagatccagggcgccaccctccgcgtcggccaggaggccgccgtcgcccaggccaaggacgccgccggcgtcgccgtcgagctcgacgaggaggcccgtccccgcgtcaaggccagcagcgagtggatcctcaactgcatcgcccacggtggcgacatctactgtgtcaccaccggcttctgtggcaccttccaccgccgcaccaaggacggtcccgccctccaagtcgagctt

SEQ ID NO: 420835 - DNA, 412 bp, Oryza sativa
ttggtttgcttctcctccccctcccggttcggttcggttcggttcgggtccggttcgatttcggtttttccttcggttcgggggttggtgggaaagcatggcggcgccagatgttgagtaccgctgcttcgtcggcggcctcgcctgggccaccgacgaccgctcccttgaagccgtcttcttcacctacggtgagatcctcgagtccaagatcatcaacgatcgggagacggggaggtcgcgcgggttcgggttcgtgacgttctcgagcgagcaggccatgcgcgacgccatcgaggggatgaacggcaaggagctcgacggtcgcaacatcaccgtcaacgaggcccagtcgcgccgcttcggaagcggaggcggcggtggctacggccagctcggcggaggcggatgc

SEQ ID NO: 420836 - DNA, 428 bp, Oryza sativa
tggatcaaacgtaccaacggtgctttttatgggtgatgaggtggcgaaggcggcggtgctgatatcgccggcggcggtgacgacgtcgtggctgctgctggcgtgggtgagcacggtggcggggaacctgtcgctgctggggtcggcggcgaacctgatagtgtgcgagcaggcgaggagggcgcccaggaacgcctacgacctcaccttttggcagcacatcgtctttggcgtcccatccaccctcatcgttaccgtcgtcggcatacccctcatcggcaagatctgatcttatcttatcgacccatccaaattaattaattatgagatcgacaaacatccaagcttgctaggctcgtcgcgtcgtcgtcgaccaccgaccataatttatgcatgcatgccacgcacggatattatatgcttcctaa

SEQ ID NO: 420837 - DNA, 431 bp, Oryza sativa
atttaccaaacccaaactttattcttagtccgagaataggccaacccaagtacatttatataatgcaatcatttttataaagcaaaacccacaggttccatgaccaggttaatgtacagaactcacggaatggaccgctgagtttgatacgacacgatgccaaacataaaccacaggtaaatattttttaacacgttcaccaaccaacaaaccggagctaaattattcactccatatcatgtgatacgcaaggagatgcaagctcacattactgaaccaaatagggggtaaacttagtcccaaatgaccaaaatagcatattgaggacttaacaaccctgcttgaacagataaatcgccaagcctttccacaatcatgttgcactggcctggggtcaatgggtcatcatagattccaagaatcaacgacag

SEQ ID NO: 420838 - DNA, 72 bp, Oryza sativa
aaggatggaattgagtagcaatactttcaccccaaaatacagtttagcgacaatatcttagaaaagccgctt

SEQ ID NO: 420839 - DNA, 386 bp, Oryza sativa
ctgatcgacgaaaccttcatctcgccggcgcctacgctctgagccacaagagcgttttgtcgcagtcggtgttccggtcttttgagcgcggagattgcggaggagaccccagtcgagactccagctgccctggttcttggggagcccatggatctgatgactgctctgcagcttgtgatgaagaagtcaagtgctcatgatgggcttgcgaaggggcttcgagaggctgccaaggccatcgagaagcatgctgctcagctccgcgagcttgcttgaagaccgccaccaacctgaatatgccaagttggctaaagctctgggagctgagcacaacgttcaccttggtgccgtgcctaaagctaaaactcttggctagcgggcagggc

SEQ ID NO: 420840 - DNA, 431 bp, Oryza sativa
tcgttcttcttcatcgcaagctagtaagagtgaatcgaagattatgaagaagctggtgaggttgctgatcatggtggaggtggtggccatggcggctgcgccgcggcgagcggcggcgctgagcatggactactacgggatgagctgcccgttcgcggagatggtggtgaggagcgtggtgagccaggcgctgatgggcgacccgtcgctcgccgccagcctcctccgcctccacttccatgactgcttcgtccagggctgcgacgcctccgtcctcctcgacttcaccccggacaacaccgtcgagaaggacgcgctcgccaacaagagcctccgcggctttgaggtcattgaccgcatcaaggacgccctcgagtcgcggtgccccggcgtcgtcttctgcgccgacgtactcgcccttgccgcgcgcg

SEQ ID NO: 420841 - DNA, 384 bp, Oryza sativa
tttcgctgccacttccatgactctcgaatgttcgtctcacgcccaggggcctattgagcgagtacttacaccgggaggcagacgatccagaaggagaaggggctagggccctccaaggtagacgactccgacgggcacgctttttttgaccttgataatgaggaccagcatctaaagagcaagctgaaggacctgaacatcatcaatgcaaaccatatggatattgccggaaccaggaaggctgtggtgaatgaccacccgcaccatgagctgatggcattcaagataattcaagtcaaggtcgtcaaggagaggattaaaaataacatgggaaaggtatgcatgaagtgttgaacaaggaagattgagaggccacccatgaaa

SEQ ID NO: 420842 - DNA, 488 bp, Oryza sativa
gtttctggagcagcatccaaatacatccctagtggtggatatggacgattcttaaggatggatggattgaaaggcaagaggattggcatccccaatggctttttcactgaaggagcctatgggaagacacaactgagggtgtaccaaaaacatctttccactatgaggaaacacggagccctggtgatagagaatatcaacatcacaacaaatttgtctgccgcgcaggatgttctttattccaacgagaatatcgcattgcaagcagagttcaagttaagcctaaacgcttatttgtcagacttgctgtattccccagttcattccctcgccgatgtggtagcattcaataatgcacatcctgtggaggagagacttcaagattttggccagcccgacctgattgcagctcacaaaaccaatggcattggtccagtggaaaaagcggcaatccagcgtctcaacgagctgtcagctgatggattgga

SEQ ID NO: 420843 - DNA, 494 bp, Oryza sativa
ggttcacgacacggttgttacgccgatgagagggcgtgctgggtttgtttatcctgccttgctggtgctccctcctcagcgatggaacagtacatggcacctattgtgcagttcttggccaaaattggggctccacttctggccagtgtgtttccttactttacttacgtgcacaatcaggaaggcatcgatatcgattacgcccttttcacctccccgggaactgtggtgcaggaccgtgaacatagctatcagaacctcttcgatgccacttgggatgctctgtattcggagaaggaaaaggtgggtggattaaccgtcagaatagttgtctcaaatagcggctggccatcagctggggctccttgcagcgaccaaagatatggttagggcctacgtcagaacctgatttaccctgtgagcaaagggacaccccataggcccgtacctattgagacatacatttttgccatgtccatgagaacgagaaaacc

SEQ ID NO: 420844 - DNA, 485 bp, Oryza sativa
ttgttcatctgccttccaccctgaaattgaggagcttctctacagtgaagtcgagaacgatgaacacaagtttgtattgaaggacaagaacaagccaatcatcttctccatggctcgtcttgaccgagtgaagaacatgacaggtctggttgagatgtatggtaagaatgcacatctcagggatttggcaaaccttgtgattgtttgtggtgaccacggcaatcagtccaaggacagggaggagcaggctgagttcaagaagatgtacggtctcattgaccagtacaagttgaaggggcatatccgctggatctcagctcagatgaaccgtgttcgtaacggggagttgtaccgatacatttgtgacaccaagggagtctttgtccagcctgcattctatgaagcgtttggtctgactgtcatcgaagccatgacatgtggtttgccaacaatcgcaacatgccatggtggccctgctgagatta

SEQ ID NO: 420845 - DNA, 427 bp, Oryza sativa
tcgtattgctctgctctgatctggttgatcgatgctcgtgttggcgatggagaagtcgctttcctcctccggcgccgccgccgccgtggcgtcgcagggccagctcccggactgcttcgtgttcccgggcgaccggcgcccaccggcctccaccgcggccgtgtcgctccccgtcatcgacctctccggcccccgcgacgccgtccgccgcgccgtcctcgacgccggcaaggagctcggcttcttccaggtggtgaaccacggcgtgccgtcggagacgatgcgggagatggcggcggtgtgcgaggagttcttccggctgccggcggaggacaaggcggcgttctactccgacgcggaggagaaccccaaccgtcttttatacagcaccatctacgaggtcggagaccagcgctactggcgcgac

SEQ ID NO: 420846 - DNA, 427 bp, Oryza sativa
ttcgagccggccttcctccagatcggcgtgggccgcgccggcatcgtgcccgcctcctacacaagggagccgtgcgtgaagaagggcgggatcaggttcaccatcaacgggcactcctacttcaacctggatcttgtgaccaacgtggccggcccaggcgacgtgcagtccgtgtcgatcaaggggtccagcaccgggtggcaaaccatgtcccgcaactggggccagaactggcagagcaacttctaccttgacggtcagagcctcttctttcaagtcgccgtcagcgacggccgcaccgtcaccagcaacaacgtcgtgccagccggctggcagttcggccataccttcgagggcggccagttctgatcgagtacttggctaattccgattttcagttcacttttatgcaaaatgctagtgtgag

SEQ ID NO: 420847 - DNA, 429 bp, Oryza sativa
ttttacgcgtgggcttctgataggttggatgcacaaaggatcatagagtactccaagggcaagagcatcctcatcactggagcaactggctttcttggcaagattcttgtggagaagatactgagggtgcagcctgatgtcaagaagatctacctgctcgatcgcgccatcgaccaagcatctgcaaaccaacacgtccaatctgaggtgacggatactgagctgttcagcgtggtgaatgagaagcacggcaagggattctcgcgattcatcgaggagaaggtggtcgccctcgccggcgacatcatctacgacgacctgtgcctcgatccctcgttgcttcaacaccttgccgacaacctcgaagttatcgtgaatggcgctgccaccaccaacttctacggcaggtatgatgcgtcgctggatgtg

SEQ ID NO: 420848 - DNA, 470 bp, Oryza sativa
cttttctacccgttcgtcctcccgatctccccggactcccacagtcgcagcgaactaatcccgcgcgggttgggaagagcgagctcgtgaggagagcagagggaaagcgcgagggggaaggaggaggaaaggtgcacaaggtcagactaagtttgcgttgaagaacaaaggagaggaaaaatgtcgtctgctgaggcatcgcgtgaggagaatgtgtacatggcaaagcttgccgagcaggctgagcgttacgaggaaatggtcgaattcatggagaaggtggcaaagaccactgatgttggtgagctcaccgttgaggagcggaacctgctttctgaggtttacaagaacgtgattggtgctcggagggcatcgtggaggaacaatttttctattgagcataaggaggagagccgtgggaatgaggcatatgttgcatcaattaaggagttccgttacatgattgaaac

SEQ ID NO: 420849 - DNA, 467 bp, Oryza sativa
ttcactcgtccgcccacgcgtccgcccacgcgtgcgcccttgcgttcgcccacgcgtccgcgctactccaaacttaattttgatttctcgccggagaattcctcctccgcctcccggctcctcccctccgccctcgcttccgcaggctaactaaaccatggcgactggttaaattttctccaaaaccacccaagcgttattctataattataagcaacttccgatccaacggatgcttgattttgacttcctatgtgggagagaaacaccttctgttgctggaataatcaatcctggttctgttgggtttcagaaaccttttctttggacaagaaaaaattgccattccagttcatcctacatttgaagctgcctgcaatgcacaccccactgctgatgtatttatcaacttttgcattctttcggagtgctgccgcttttttaatgtcagctttgaagcgccaaca

SEQ ID NO: 420850 - DNA, 446 bp, Oryza sativa
tgtactcgtgggctcaaacatcaactactccgtggcctttttgtagccacagcccgacaaagcatgagccagaatgcgagcttgagccagctgtatggcagcatgcaggaagcttaccagcagatgcagacaccactgatttaccagcaaccgtcagtcaagggattgaatgagctcaaggactcaacagaccaaatggctttaagcatgggcaacatagatgcgccagtagatgagacagtctttgacatcgagaaagaaatctgacgacctgctgcctattgaggttaaggagcaaaggttgagcaatttggtccaggccacaatggttgggggttgtgttgttgctatgccattgctcaagaagatcccgacttgtgaactttgggggtacttcgacttcattgacattgaaagctttgctggtaaccagttttgggagagga

SEQ ID NO: 420851 - DNA, 390 bp, Oryza sativa
cttatccacgccaccgggtgctagccagagcgaaacgaaaatgaagaagaagcttttgaggttgctgatcatggtgacagaggcggccatggcggccgagccacagcaagcggttggttctgagcatggactactacaggatgagctgtccgttcgcagagatagtggagaggagcgtggtgagccacgcgctgatgggagacccgtcgattgacgccagactccttcgactacactttcatgactggtttaaacagggctgagacaactccgtacttcttgacgtaaccccggacaacaccgtacggaaggacacgcttgccaacaagaggctccgcggaattaaagggcattgaccgcattaaagacgccctctagtcgaagtgcccc

SEQ ID NO: 420852 - DNA, 469 bp, Oryza sativa
tcttgttcccatcctctccttcgagttagcttgctccttattcaaccatgggtaaggagaagacgcacatcaacattgtggtcattggccacgtcgacttcggcaagtcgaccaccacgggccatctgatctacaagcttggaggtatcgacaagcgtgtgattgagaggttcgagaaggaagccgctgagatgaacaagaggtccttcaagtacgcgtgggtgcttgataagctcaaggccgagcgtgagagaggtatcaccatcgatatctgccctgtggaagttcgagaccaccaagtactactggacgggcattgatgcccctggttaacgtgacttcattaagaacatgatcacggggtcctcccaggctgactgtgcccggctcatcattgactccaccactggtggttatgaggctggtattttcaaggttggccagaccccggagcacgctcttttggttt

SEQ ID NO: 420853 - DNA, 422 bp, Oryza sativa
cgcgaagcagcaacactccgagcgagagagtgcgtgtgaagccatggcggcgcctgcagccagcgcgctcccgctcgacggccgcgtcgcgctcgtcaccggcggctcccgcggcatcggccgcgaggtgtgcgcccacctcgcctccctcggcgcccgcgtagtcgtcaactacgccttcaactccgccaacgccgacgccttcgtcgccgaccttaactcccgcggcgccgccgccctcccgagcgccgtggcggtgcgcgccgacgtgtccgacccggcggcggtgcgcgcgctgttcgaccgcacggaggaggcgttcggcacgccgccgcacatcgtcgtcgactgcgcgggccttctggagtccaagtacccgtagatggcccacaccgccgaggaggacttcgacgccatgctcg

SEQ ID NO: 420854 - DNA, 451 bp, Oryza sativa
tcgtctccttcctccattcctccgccgctagaaccttctagaagctctcctcctcctcccatggcggcgacgatcgtgtccgtcaaggcgcgccagatcttcgacagcaggggcaaccccaccgtcgaggtcgatgtgtgctgctcagatggaacctttgcaagggctgcagttcccagtggtgcatcaactggtgtctatgaagctctcgaattgagggacggtggatctgattacttgggaaagggtgtttccaaggctgtcgacaatgtgaactcggttattgccccagctctgattggcaaggaccctacgtaacaggctgagcttgataacttcatggttcagcagcttgatggaaccaaaaatgagtgggggtggtgcaagcagaagcttggtgctaatgcaatcctggctgtgtcactggccatttgcaaagctggagctatca

SEQ ID NO: 420855 - DNA, 388 bp, Oryza sativa
cctccgccggcgtactcgagagaaacatcagcatccatggcgggcaagggcgagggtccggccatcggcatcgaccttggcacgacctactcgtgcgtgggcgtttggcagcacgaccgcgtggagatcatcgccaacgaccagggcaaccgcaccaccccctcctacgtcggcttcaccgactccgagaggctcatcggagatgctgccaagaaccaggtcgccatgaaccccatcaacaccgtcttcgatgccaagcgtctcattggcaggaggtttagcgatgcttctgttcagagtgacattaagctctggcccttcaaggtgattgctggacctggtgacaagcctatgaattgttgccagtacaagggtgaggagaaagcag

SEQ ID NO: 420856 - DNA, 466 bp, Oryza sativa
cactttcacacatagcggttgggtgcaaacaagaaagcatcaaatgttggacaattcatagatggtgctaatgtatcaaaagttgaagatggtcatgtggatagaagtataggtgtgaaaaaaccccgatattctgcagatgaagggccttctttgactgaactgagtggatacaattcaaagagacatgaatttgacccagagtatgataacgatgctgaacaggcactcgctgagatggagattaaagaaactgattcggaaactgatcgtgaactgaagctaatggtattgcgtatttactttgtcaaggcttgatgaaagaaaaaggagaaaagagtttcatactggaaagaaaacttactaatttcctaatcctttggagaaggatctcacaaatgaagacaaggaagtttaccatccttataaggtgttcatgccgtttccttctaaggaggaacattga

SEQ ID NO: 420857 - DNA, 470 bp, Oryza sativa
ctatttttttcatcctatcgattttgcagtttagccctcgaagaagcaaggatttcgagcccggtccctaggctcgatccggccgtgtcctttgctccgatcgagcgcgcgaggtctcgtaaggtccatcctgagcttgttgctgtggagtgcgcgattccgcgctcgatttcgtttcttccggcgcagatttcgtgttttttggcctagatttggcttgtgggtgaccgcctaggcgtttctcgcgtgtttcggctttttgtctgggatcgatttgtggctggatttgcttgttcctggctgcggagcttggatcttagcattagaaaccctcagattggggatttcctgccggaggaagctttttggaggagctgcctttgggaggaactctttcagttctgagggtttcggtgtttgttgctcgcctggctcgagaagaaagctggaaatctcgtattttagggcgg

SEQ ID NO: 420858 - DNA, 440 bp, Oryza sativa
tctcctccccaaaccctagtcgccgccgccggcgtactcgagagaaacatcagcatccatggcgggcaagggcgagggtccggccatcggcatcgaccttggcacgacctactcgtgcgtgggcgtttggcagcacgaccgcgtggagatcatcgccaacgaccagggcaaccgcaccaccccctcctacgtcggcttcaccgactccgagaggctcatcggagatgctgccaagaaccaggtcgccatgaaccccatcaacaccgtcttcgatgccaagcgtctcattggcaggaggtttagcgatgcttctgttcagagtgacattaagctctggcccttcaaggtgattgctggacctggtgacaagcctatgaatgttgtccagtacaagggtgaggagaagcagtttgctgccgaagagatcttctccatggtcc

SEQ ID NO: 420859 - DNA, 470 bp, Oryza sativa
tcatgtacggcacaaaactaaatctccattatatctgaagcaggatcaggtggcgttttgctgcatgctgatagaagggcaaaaaaccagagaagaagagtacacataacacttgagctcccttggagtgcagatcgtgcaatacaacagtttgggagaactcatcgttctaatcaaacttttgcaccacaatataggcttctctttacaaatcttggaggtgaaaagcgatttgcatcaatcgtaacaaaaagactggagtctctaggagctttaacgcaaggagatcgtaaggctggaccttttctgagtgcttttaactacgacagcaattatgggaaaaaagccctaaccatcatgtatagaggaataatggagcaggattcttttccagttggtcctgcggggtgttctgacaataaatttagcatccaagaagtcattgctgaagcaaaagctgctctaaattc

SEQ ID NO: 420860 - DNA, 413 bp, Oryza sativa
ttcatctgcaaaggatgttgctaaacagatgtaggtacatcaaacggtgatgcccggccatcgcgagacaaacttgcagaaggaattgaacagatacatccccactgcagctgaatttggtggagagtgcattggtgcattgactgttctagctgataacatgggtgcgattggttcaggaactggtattctgtttgctggtaccatgatttaccagaactttgagacattcgagaaagagagggcaaccgagcttggattctttggtgttagataccgttgcttgaggacatagttataccaatacgtggatcttctttcaaatgaaagtacttattggccggctgcttatggatgacattggcgagctttaagtcagtttaggttgcaccacttatttgaaaatgagggac

SEQ ID NO: 420861 - DNA, 416 bp, Oryza sativa
gaggaagcagagctcttttctgtatgccaatggctgctggcacctgggtgaagctagagcagaagggagatgggccgggagcaagaagctcccacgccatcaccctcgtcggcggcacggcgtacgcgttcggcggcgagttcacgccgcgcgtgccggtggacaacgccatgtacgccttcgacctcaagtcgcagtgctggtcggcgctggacgcctccggcgacgtgccgtcgccgtgcgtcggcgacaccatggcgtccgtcggcgccaccgactacatgttcggcggtcgcgaccaggagcacaaggagctgaacgagctctactcgtttgacacggagaccaacagatgggcgctgctgtccttcggcgccggtgacggtccgccgcaccggagctaccactccatggtg

SEQ ID NO: 420862 - DNA, 429 bp, Oryza sativa
tcgtcctcctcgcctccctcccctcccctcccctccccgtccggccatggcggcgtcgctgcttctccgagccgcccgccggcgagacctcgcctcgcccctcggaacgttgaccgccaatgctcaatcggcatattctgcgaatatttgttcacaatggggtagttttgcaagagctttcagtgtaaaaccaactggaaacgaggttattggaattgatttgggaacaactaattcttgtgtttctgttatggagggaaagaaccccaaagtgatagagaattcagaaggcaccaggacaacaccatcagttgtggcctttaatcagaagggagagcgacttgttggaacttcagccaagcgtcaagcagtgaccaacccacaaaacactttctttggcacaaaacgtctgaatgggagacgctttga

SEQ ID NO: 420863 - DNA, 484 bp, Oryza sativa
gattttagccgcctcctccgccgctcacccgcgccttcgacgagctccagcccgtagacctcgccggatctccccgatggccgtgaccttcaccgacctccacaccgccgacgggctcaaagccctcgagcagcacctctccggcaagacctacgtctccggaaacgcgatcagcaaggacgacatcaaggtgttcgccgccgtgccatcaaagcctggagctgagttcccgaacgctgctcgctggtatgataccgtcgctgcggccctcgcttcaaggttccctggcaaggcagttggagtgaatctgcctggaggaggtgcggcatcgtctgctgcagcggctgcgccagctgctaagggtgctgatgaagatgatgatgacctggatctttttggtgatgagacccgggaagacaagaaagcagcagatgagcgtgcagcttccaaggcctctttaaagaagaaagaaagccggaaatta

SEQ ID NO: 420864 - DNA, 477 bp, Oryza sativa
tctctttataagcttatacttggacaagagctggtcttatttgacataatctcatttgatgctgaatacggaaagacattgcaagaactgcaaattcttgttgaacggaagaggttccttgaatccacttatggcatgaatcagctagaagtcacggacttgcgtttccgtggcactcctatcgaagatttgtgtttagattttactcttccaggttatcctgattatattcttaaagaaggcgaggaaaacacaattgtaaatatttacaacttggaagagtatgttactttggtagtggatgctacagttaaatcagggataatgaggcaagtctaagcatttagatcaagatttaaccaggtttttgacatcttatccctgaaaatatttttacctgaaagagcttgactatctaatatgtggtcgccgagaaatttgggagcctgattcattggtgggaaatataaacatttg

SEQ ID NO: 420865 - DNA, 206 bp, Oryza sativa
acctgggtgatcttacaccatgcatggcataatatgtgacaatgctaagcctaaaaagtcctattggcactcaatgactgggctttgcatacaacttggcaggatttatctctgcaggtggtgaaaagggaacaagttcgggtatgcctcttagccggaatacacttcaaggacctgctggaacatctagagggcaagctgatgat

SEQ ID NO: 420866 - DNA, 330 bp, Oryza sativa
tggtaccgcaccaccccccccaacaccggcaggagcgttttttagaggcacattggtgatgccgccaagaaccaggttgtcaggaaccccatcaacaccggattcgatgccaagcgtctaattggcaggaggcttagcgaagcccctgtggcgagggacaataagctctggccctgcaaggcgatagctggacctggtgacaagcctatgaatggtgaccagaacaagggcgaggagaagcacctagctgccgaagagaacctcctcatggtactaatcaaaaagcgtgagattggtgaggcctaacctgggaccaccatcaagaatgcc

SEQ ID NO: 420867 - DNA, 395 bp, Oryza sativa
cctgctctctctctctctcccacgtgagcgcgaggcggttgttgcggcggcgcgaggtgagcggggcaccagcggcggcggaggagatggggaaggcctcgaaggggtcgcggagagggaagaaggcgtggcgcgccaacatcagcaccgacgacatcgaggacttcttcgagaagcagacgcgcgacgcgcacgccggggccgccgccatcccgtccctgccctccgactccctcttcttcgtcgacaagccggcctacgccgtgttcaccttcttcgtcgccgacgccgccgcggtggatgtcgcccccaaagatattcctgtccaaaggaagattgagaagaagagagagaaggttctatatcatgagagtgtattgaagcggaatccatat

SEQ ID NO: 420868 - DNA, 366 bp, Oryza sativa
cctgcacggccctatcgttattctcccgaaccccaagaatgcgccggggggggccatggagagcccatcgcagcttgacgacgagcagaggctggccgactgggacctggacgccgtgatcaccctggtggagatgcttgccgaggccctcatctactggataccgatctggtacgagctgaagctgctggacatcgcgaggctggcgctgcccaacttcaggggagccgcgttcaactacaacagggtcggcagggagcacctcacgaagcatggactcgccggcgccggcgcccgcgccagggtaggcaagaaggacaaagcggcgccggcgtcgtcacccaaggacaaggagaagaccaagag

SEQ ID NO: 420869 - DNA, 345 bp, Oryza sativa
gcgtccacgcgtccgcccacgcgtccgcggacgcgtgggtttcaatcccaatctcttctcttcccctctcgctagggttaggtttttattttctctctctcgatttctctcttcgcttccacttcccaaaattctcgagtcaaacctcgtggcgttcggccatggcgacggcggcggtgctcggatcccacgacgccctcgacaaccggatgcatctgggggccttcgccgtgtccccggcgtcgaagccgaggcggaggcggcacagcatggcggcgtcgccgccccccaaggtggcggcggagagctcgccaccggtggttaagtcggcggcgagggtggcgt

SEQ ID NO: 420870 - DNA, 335 bp, Oryza sativa
tccataatcgaccaagaaggaaccggctacccacaagagatacaacctcaagaagctaacctacgagcagaggaaggccagtctcgtcgaaagattgaatgctctcaactcctcagctggtgctgatgatgatgacgaggaagaggatgacgagtgagagagtagccttatcacagtagtttcatcttatgctgccaaacaaactccttatggcatttaagtttacctgtagtcttgcaatttgcaacaggcatttttgtttatgttctgcactctgctcaaagaacctatttctttcggtttttgattctcaaccttgagctatcggttatctt

SEQ ID NO: 420871 - DNA, 424 bp, Oryza sativa
tggacgcgtgggtgccacagcaattgcgtgaaacaattttctcatctgatttgtttactaaaggtgatcagcagtttggaaatggagagctcatatttgaattttttgaatctgaacaaccattttggcgacgacagttgtttgacaaggtaaaggagctgattagtggtgtgaagccatcaagctgccaaatatcaggagacccaaagaatttggagctcagcctgtgtgatctccatcctgcctcctggtattgtgttgcatggtatcccatataccgtatacctgacggtaaatttcaggcagcattcttaacataccattcacttgggcactggattgttcaaggcgcatcagagcaagctgatgacagtctttttgttttgtcagtcacagggttttgagtcttacaatgaccaagtgg

SEQ ID NO: 420872 - DNA, 399 bp, Oryza sativa
agaacaaccaaatgaactcattttatatattgaattattaaacatacacgttttgcaacgcaatcacaataacacaaatgatcaaacagccttgacgcattacaaccagctttacttatttaaacaaacatgccactaccaccaccttgtaaaactcagcacacaagacaacctcagtggtagtagttgttgagcctcctgcagttcttcctgatctccccctgtgatccagtcagaggcgagatgttgcccatattcaccattgactgtgcgaagtgcttgaagaagaggttgacatcatcagcatacgccttcacgagcgccgctgtttcagcgctcttggtaagcaggacctgatcagagctgagaaggcccttgccagacaggatgttcttgaag

SEQ ID NO: 420873 - DNA, 392 bp, Oryza sativa
aaataatcagagagcaattctcttctcctacctagcaacctagtgcagtgcagtgcagtgcagcgaaggtttacttggcgacttccatgggttgcctgttgatgctctgcttggtttctcccctcctcctcgccacctctgtccacggcaacccgtggtatgggtatgggtatggcttgttcccgcagttctacgaccactcgtgccccaaggcgaaggagatcgtgcagtccatcgtagcacaggcggtggccagggagaccaggatggcggcatccttggtcaggctgcattttcatgactgctttgtcaagggtgtgacgcgtctgtgctcctggacaacagcaccaccatcattagtgagaagggggtaaaccctaacatgaactccc

SEQ ID NO: 420874 - DNA, 396 bp, Oryza sativa
ttctgagggccctgaagcttaccaggagtattacattaggcatattgatggctcacctgtcaactctgaggcggagcgacagcgagtcatccagtgtcttgaagctgctatagaaaggagagtatccgaggggctgaagctagagttgtcgacaggtgatagagtgggactgctatccgatgtcacacgcatcttccgtgagaatggcttgacggttacgagagctgaagtttctactaggggtgacaaggctgtcaacactttctatgtccgcgatgcagcagggagctccgccgtcgatctgaagactcttgaagctatacgccaagagataggccagacagtgctttaagtaaaagggcaccctgatcaccgcaaatcaccttcgcaagagtc

SEQ ID NO: 420875 - DNA, 393 bp, Oryza sativa
  unsure (1)..(393): unsure at all n locations
tcggtanggtgctatggatttctgatccggggtttcttggatcttggggagtaggaggtggggggcggcgatctggccgggagatggccggcgggaaggagccgatcgaggtcaagttccggctttttgatggtacggacatcggcccgagcaagtacgacccctccaccaccgtctccgcgctcaaggagttcatcctcgctcggtggccgcaagataaggaaataactccaaaaactgtcaatgacctgaagctcattaatgccggacggatattggagaataaccggacacttgctgagtcccgtgtttcagtaggagaggttccaggaggtggtattacaatgcatgtggtagtacgcccttcacaacccgacaaaaacagggagaagc

SEQ ID NO: 420876 - DNA, 483 bp, Oryza sativa
cgaattccattcctcgcttttcctctcccctcgcctcctcgtcctccccctcccaggggatcgccggagaggaatcgcgcggaggaaaaaaaaagaaaagggcttccccgtcgtctaagttaaaaggaagccatggagcacaaggagactggatgccagcagccagaaggcccgatcctttgcatcaataactgcggcttctttggcagtgcggctaccatgaacatgtgctcaaagtgccacaaggagatgataatgaagcaggagcaggccaagctggcagcctcctctatcgacagcattgtcaatggtggtgattccgggaaggaaccaattattgctggtcacgctgaagtagctgttgctcaagtcgaggtgaagacgcttgttgcgcagcctgctgagattgctggtcctagtgagggggtcacggtgaaccccaggggagggaaggaccaaatcggtgcctcacttgtcggagag

SEQ ID NO: 420877 - DNA, 409 bp, Oryza sativa
aagagggtaaaaccattgcattccaaatttatgagaaaactgaatgggtgcacctagaccatataaaagcacaagctacatgaatgttccttccatgcataccgtacatgacacttcattattcaaagtacagaattcagacctagaatcataaagacaacagttgtgaattcaaagagaacccacaaagagacaccacacagagttactgataccattcaagtcctcaaatggccgtaccattactctttttcgccagcttagtccactctgtgtggaacgaacctggacggtcaatgcgctcataggtgtgtgccccaaacaagtctctctgtgcttggatcatatttgcaggcagccgactacacctgtaggggtaaagtatgaaaggctagcaaacatccctgga

SEQ ID NO: 420878 - DNA, 434 bp, Oryza sativa
tttggttaaaacagcactaaatcaacattttatttcgtctctcagacagtaccatgctgatgatgcgcacgacctacacacatcacatgcttacatattcacaaaatgtatgtaggtaatgcacttgaaggtttgagatgctacaaacaaatgaaatcatttagtccattgaagagtggcttgccaacatacttacaccaaactgactggatacagctgaacaactagatcagttattctgggtttctaagcgaacttcttgtcgaggtgacggtctatgatttcagatacggtttctaagaagattacttcacttgaccctgggagaacatggccctcggcttcctggacgatgtcctcaatctcagagtctttatttacagtttccctgcacagtatacgccccatgtcatacggagtgaggtctcttgctg

SEQ ID NO: 420879 - DNA, 339 bp, Oryza sativa
cggtcgcgtgggccggcgtctgaccaggccgcctgctgccgctacggcgcttcctggggcttcgcccggcggcggagccgaggcccaggcggtgttggcggagttcgtgacgtccgagagggtgaaggtggcggcgatgctggggctggctctcgcgctctgcaacgccgaccgcgtcgtcatgtccgtcgccatcgtgccgctgtcgcaggcgtacggatggaccccgtccttcgccggcgtcgtgcagtcatccttcctttggggttatctggtgtcaccaaaaaattggtggagcactggtcgactactattgcggaaagcgagttatgggttatg

SEQ ID NO: 420880 - DNA, 484 bp, Oryza sativa
ctgtcttctccattttaaatccttcttccctaatccccctcgccggcgaagcgcggcggcggcggcggcgccttcttccctaatcccctcgccagcggggagccgcagggcggcggaggcgtgcgtcggctgctgctgctgcgcgggcgggggaggtggggagagatgcacagatccgcgggcgccacgatggcgtggaacgtgttcaggttctgcactgcgctgagggggctgggctccatcatgatcctgctcgtcctctccatcgtcggggtcacctactacgcggtcgtggtgtacaactacggccccgcgctcttcgccggcggcgccagcaccctcctcgcgctcgtcgtcctgctcctcttccacttcctgcttgttatgcttttatggagctacttttctgttgtattcaccgaccctggttctgttccaccaaattggaatctcgactttgatgaggagaggggagaaactgccc

SEQ ID NO: 420881 - DNA, 436 bp, Oryza sativa
gtgaatggcgtttttttttaccatgtgatacatcagtcctgtatcctacaacaggagggaacatgcaccggtttcgagctattgcgccgtgtgcaattctcgacattcttggccccccttattccacggaagatggccgagactgcacatattaccgcgctattccctactcacgtcattcggtgaaaaatggcgcggccgatcagctcaccggagtcgacgaagaaggccatcgcctctcatggctaacggagaccattccgcggatgctgaggatgcgccagatccggtacggcggcccgccgatctccgatgacgaatgaccgccggcttgtcctgatctgaaagagtgatattccgacatggacggccagcccagctgtgaatccgtccgacgtctaccatgtagtagacagcagatagccatagatgcaaa

SEQ ID NO: 420882 - DNA, 442 bp, Oryza sativa
gctggaacatgtccattgtgggttcctgtattgcagccactagcaaagtgttctggaggagttcttttacttcatgacgattttggagaggcctttggggtcaacctgcaaagagcgtcaactagagcagctggttcccatggcttatttgagattagatgttctgatgacatgcttgttactcaagtcattggccctggtgaagaagcatctcctgattcccatgaaacattcaagcacgatacctcattttgaatccagatgcatagtgtcgaggaaacacagagttttttcgtgtctatggagtcaaagggtgatatcaagaatgattttgtttacttccagtttgatgaccattactctaatatgtatcaaacagaaataaccagagtaatcactatgaggcttcaaactgttgatggtttatctgcatatctggcaa

SEQ ID NO: 420883 - DNA, 463 bp, Oryza sativa
gctggcgagcaaggcgaaggtgctggggcggctagtgcccgggtgccggaagctggcgttcccggcgctcctggcggaggcgtcggactacattgctgcgctggagatgcaggtgcgcgccatggcggcgctcgcgcaggcactccagtccgtggcacccgcgccgccgccgccgccgtcgtcgtcgtgatctcacctcctcatcgtcatccagttcggatttggcctgtgtgtctgtacatgattttttttttttttggggttcgggctagcttggccattgttagtgaattgatgatgaaaatcgaaatgagtttttgggtttagtttggtcaggattatcattaatttttgtttataggtctggtgttatcttgactctgcagtgaaagcaagcaggagatttgagatttttcatacgcttttttgagttggatgttggcgatcgatccatggatcgaat

SEQ ID NO: 420884 - DNA, 454 bp, Oryza sativa
cgattgctccatggtgtgcggcgacagcgcggcggtgtcggcggtggaggggaggctgtcggagctctccaccaacagcgacgagaaggggctccccaggaggggcaagtctttatcaggaaggacattaaacaccgcacagattcaactcgttgcaagccatccagaggtgtatgaaccatgtgatgattcctttgcacttgtcgatgcgcttctttctgacaaagcacaacttttgacgctaaagccaagattatgcatggagataggatgtggcagtggctatgttatcacatctctagcaatcatgctcaggcagttaggctcaggaacccagtacctcgctactgatatcaatcaacatgctgtggagacaactcaagcaacccttgaagcccatggcgttcatgcagacgtgattgctactgatattgtgtcacggtttgagaaacgc

SEQ ID NO: 420885 - DNA, 474 bp, Oryza sativa
  unsure (1)..(474): unsure at all n locations
cttccaagtctacggttgaactcccaccctccgccaccgccgccgccgtgctcctgccgagctccgccgcgcgctgtctcaccgacgccccgccgttcccgatcgccgaggctatggcgtcggccatctgtccggcgtcgggcacggcgtcggcgccctccgccacggccacggccacgccggcctccgcgagcagccacgcgttggtgaactggtcggcgctcatcggccacgcgagcatcgccacgccggcggcgaccgcctcgagcaccgagttccagccgcagtgcgtcaggaaccacccacgtcgcggtggcgcaggatctccacctgcggcgcccacccgcggatgaccataccgcgcgccgncgtcgccgnctcgaacccgcccggacccggcgtgccgtccctcgctcgccagacgaacggcgccgcgctccgctcagcgcgccggcaggctcgccgnctgcgccg

SEQ ID NO: 420886 - DNA, 451 bp, Oryza sativa
agtcgttggtggtattgataacattccttacaatcctttccatcctctcccgaactggtgtgccttggtttcttaagctgatgataagtctttcatctcagacaaatgaactgtaccagttggcagctgttgcattctgcttgttgtttgcttggtgcagtgataagttgggcttgagtcttgagttgggttcgttcgcagctggagtaatgatatcaacaactgatcttgcacaacacacacttgaacaaattgaacctattcgaaacttcttcgctgctcttttccttgccagcattgggatgctaattaatgtccatttcctttggaaccatgtcgatatactccttgcagctgtgattttggtgataactgtaaagacgtttattggtgctgttgtcgttaaagggtttggctatagcaacaaaacatcttttcttggtggcatgtc

SEQ ID NO: 420887 - DNA, 334 bp, Oryza sativa
gcgtgtcagtattgctcagcaagctgcacttttccacagtattaagtccttgttcatgaacaagcctctagtcattgtgtgcaacaagacggacttgcagcctcttgaaaatttgtctgaggaggacatgaagctggttatggagatgaaagcggaggctatgaagactttaggtcatggtggagaagctaatgaagagggtgttttgttgactatgagtacttttactgaagagggtgtgatggctgggaaaaatgctggatgtgagaagctttttgatcaaagggtggaagatcaaagatgaaatcaaagaagatcaatgactgcctaaata

SEQ ID NO: 420888 - DNA, 432 bp, Oryza sativa
ttcgtctactcgctcatgatgtctggggattggctgcaggggccgtacgtgtactacctctacagccagtacggcttcgacaagggtgacattggccgcctcttcatcgccggcttcggctcctcgatgctcttcggcaccatcgtcggatccctcgccgataagcaggggaggaagagggcgtgcattacctactgcatcagctacatcctgagctgcatcacgaagcactcgcctgagtacaagatcctgatgattgggcgcgtgctcggaggcatcgccacatcgctgctcttctcggcgttcgagtcgtggctcgtcgcggagcacaacaagagaggatttgacccacagtggttgtcgataacattctccaggctatattttttggaaaaggcctagttgcgatcatcgctgggctatttgcaaatc

SEQ ID NO: 420889 - DNA, 486 bp, Oryza sativa
tggttcttgtgggtttagtattgctcagcaagctgcacttttccacagtattaagtccttgttcatgaacaagcctctagtcattgtgtgcaacaagacggacttgcagcctcttgaaaatctgtctgaggaggacatgaagctggtaatggagatgaaagcggaggctatgaagactctaggtcatggtggagaagctaatgaagagggtgttttgttgactatgagtactttgactgaagagggtgtgatggctgtgaaaaatgctgcatgtgagaggcttcttgatcaaagggtggagatcaagatgaaatcaaagaagatcaatgactgcctaaataggtttcatgttgctatgccaaagcctcgtgataacaaggagaggcctgcttgcatccctcaggctgttctggatgctcgagcaagtgctgctgctgcaaaggaaaagaagaagctggaaaggaaactggagaagacctcgagatg

SEQ ID NO: 420890 - DNA, 445 bp, Oryza sativa
gcacggacaacttcctttcttaaaaaaagaagcgttggaactcaatctgttcatactatttttttggtacaataactgatggctctacacacagtatgtacaatctgaaaatttcgaataaacatgtagtgttgcattacaaacaaatggattttgatattcttcaaatgtgtcaggcaattgagctaaagtgaacactttaaacttctggaaaatgaagagataaaaaaagggaaggcaaattatccaagaatgcgctcaacatgctgcgccactcgttttgcaaggcaatccagctgcttcctctgaagatgcctttgcatatacacgcaccacatcctcggtaccagatggccgtacgaaacatcgcccatgagagtaatttgatatctccccatctattaattcctgcagcccattaggctggcaaacccttcttttctgc

SEQ ID NO: 420891 - DNA, 392 bp, Oryza sativa
ttattaggtcgccgcagacctctccgtcggcggcgagagggtttcgatccacccgcagcgccatggccgagctcgcggcgggaggcgaccagcgcgccgcgctgctcgcggcggccaccctcttcccgccgccgcccgacggcgcgaggttctcgtacgggacggcggggttccgcgcggagggggccgccatgggccccgcggtgtgccgcgccggggtggtggcggcgctgcggtcggccaagctgggcggcgccgccgtggggggtggtcatcacagcctcgcacaacccggttcgcgacaacggccgtaagatcgtcgacgcggacggcgggatgctgtcgcaagactgggagccgttcgccgacgcactcgccaatgcccccaaccc

SEQ ID NO: 420892 - DNA, 456 bp, Oryza sativa
cttcgccgccggcttcgttttcctcctcgtcgccgccgactccggatcgggcctcgccgcgctgctcgccttcctcctcgccctcgcctacatcgcgggcctcgtctacctcagcgtcgtctggcacctcgccagcgtcgtctccgtcctcgaggactacaagggattcgaggccatgcgcaagagcaaggcgctcatacagggcaagctctggaccgcctccgccatcttcttcgtcctcaacgtcgtcttcatcgtcgtcgaggtcgccttccgggcgtgggtggtgcgcggggccacccacggcctcggcgccggctcaaggctcctcctgggcctcgccatgctcgccgcgctctgcgctgacgagatgctggcgctcgtggtgcaaaccgtggtgtacctggtgtgcaagagctaccaccacgagagcatcgacaagagcaaccttttcga

SEQ ID NO: 420893 - DNA, 331 bp, Oryza sativa
ggagaaacagggacttttattggaatttttggaggtaaaacaccttgcaatcatttttacttagtactaatacacattgaaatatgccatagggaaaatctttaaaagctatatatccaagccatattatcgggggggatccttatatccaagccattttatcatggggataattaacatggccaatagctttatccacaccatatttttccccatttttttgataactgggtacacataggattcgaggtgggccttagggatttgcactggcattgacagggttgaactcctggggctccttgaagccctccaaggttttttcccaaac

SEQ ID NO: 420894 - DNA, 427 bp, Oryza sativa
tttgaatgattgcaaggtgtattaactacaaatattgcaataaaagtccctgttactacaagaaggccaattctctgctggagttcgagaagcttgtgagtgtgaagcagcaagttgtcgctggcactttgtactatttcacaattgaggtgaaggaaggggatgccaagaagctctatgaagctaaggtctgggagaaaccatggatggacttcaaggagctccaggagttcaaagcctgtcgatgccagtgcaaatgcctaaggcccatctcgtatcctatgtgtatcaagttatcaagaagaaggggaataatatggtgggggatatagcttttggacatgttaattatccaacatgataatatggcttggatataaggatcttacacgataatatggcttggatatattgctattaaaaattt

SEQ ID NO: 420895 - DNA, 418 bp, Oryza sativa
ctcattcataagccagttgtatgctagcaagcagcacacacatatatcacaggccatctctctatccctaattaagctatatactccatatagctagctaaacacaggaggagtggaggaaggagaggctagctgatctagctatctgcagtgattagttaaaatgatggcttctgataggttggatgcagaaaggatcatagagtacttcaagggcaagagcatcctcatcactggagcaactggctttcttggcaagattcttgtggagaagatactgagggtgcagcctgatgtcaagaagatctacctgctcgttcgcgccatcgaccaagcatctgcaaaccaacgcgttcaatttgaggtgacggagacggagcctgtcagcgtggtgaaggaaaagcaccgcaagggattc

SEQ ID NO: 420896 - DNA, 469 bp, Oryza sativa
tttttctcgccgcgcgccggcgagacctcgccgccatgaacaatctcctcaccgattcgtttgagctccctcggggaggctcttcaagagatggggacattgaaatgggaatgcaagctgatccttcagacaatctaaaaggtttcttgaaaaaggttgacgcaattgaaagcctaattgctaagctgacgaatctcttgcataagcttcagactgcaaatgaggaatctaaagcggttacaaaagcaagggacatgaaagcaattaaacagaggatggagaaagatattgatgaagtggggaaaatcgctcgcatggcaaagacaaaagttgatgaattggaaaaagataacttatcaaacagacaaaagcctggatgtgggaaaggatctgcggtagatcgatcaagagaacagactactggagcagtgaaaaagaaattgaggaacgcatggatgattttaagttt

SEQ ID NO: 420897 - DNA, 419 bp, Oryza sativa
actgaattcactttaatagcacttctcatcatgaactagtacaacaacataactgtccagtggaaatgtgaaatgcatacaccaagtaatggtccataacatgaactatatggatacaacaacgttcttatttcgctcatatatacatgaaataagtcttgcacgtcttggttacttaataggtgcgataatcgccgtaggcttttagaagaagaaaaaaaagtgagcctgcaaagttcctggggacagttgaagatcatcgggcactcattgctgcaacaaacttagggtggtagtggagcatttcgtgccacatcatttccctgatcatatctgcactgatgttcttggctatgtccagatcgataggcacttgcgcgggaggatttggacttggatcatacagaggggacatgtaa

SEQ ID NO: 420898 - DNA, 468 bp, Oryza sativa
cctcttctcctcctcggctgcggccacggcgacgacgacgacgacgaattcgagcgaggcgatcggcgatggaggcggtggcgatctgatccgctcttcccgtctcggcctcgcgctcctctccctccctcgcggtgtctcgggtaggaaatggcgatcatggtggatcctccaaatgggatgggtaaccaagggaagtattactactcgatgtggcaaactttgtttgagatagacactaagtatgtgccaatcaagcccatcgggcgaggagcttatgggattgtttgttcatccataaatcgtgagaccaacgagaaaggagcaataaagaagatacacaatgtttttgacaaccgtgttgatgcactaaggactttgcgggagctgaaacttctccggcatcttcggcatgagaatggtattgctttgaaggatataatgatgccagtacacaggaggagtttt

SEQ ID NO: 420899 - DNA, 379 bp, Oryza sativa
tttttggctccccgacatcgccatcccggaccacctcccgctgcacgactacgtgttcgagcgcctcgccgaccgccgcgaccgggcatgccttatcgatggcgccacgggggagacgctctcgttcggcgacgtcgacgcgctgtcgcgccgcgtggcggctgggttgagctcgattggtgtttgccatggtagtaccgtgatgctgctgctgccgaactccgtcgagttcgcggtggcgttcctcgcgtcgtcacggctcggggcggtcaccaccacggccaacccgctgcacaccccgccggagatcgccagcaagtggcggcgtccggcgcgacggtggtggtcaccgagccggcgttcgtcgcaaggtgagcgg

SEQ ID NO: 420900 - DNA, 322 bp, Oryza sativa
ttggtgttccactttttgagcgaactgctgcagtaactgcacattttatagttgggagaacagggaaacatttattccttacagactcagatgatgggaagcccccacttctcctacgaatggctgaagactgtgatgatggaaaattcatgtctgcgttgcgctcttttaagcgccgtgttgcctatgcgaatgtaacatatgatcatatagttggctggagaacatcatcaattcggcgtcagcacgaattacctaaattgcagttaacaccaagtgataaaaagtatccacatattatccatgttgacaaaggaaattc

SEQ ID NO: 420901 - DNA, 428 bp, Oryza sativa
aacaatacgctatgcccaagacaagtcaatactacaacatctgtggcgagtacagaggtacaaaagtcaggcaccgtaagcctttcgattaaaaaccaaactgaaacacgcacgattttttaacaccccacgaaaaacaatctgatacctagctcctttggtggtggaacctaaagagctttatcttcccaaaacatccacatcattatctgtcatgactatatagtttcgatacgtaaaaaggcagcgttcactcagggatatccgccatgtcttcctttcatttaagcccggccaagatgcttcaagccttgttggcaatgttgttggaaagccagtcaagcccctcatacaaccccttaccagaggtagcacatgtgctctggatgtaccagtgccgctggcgcaaggagtgcagaccaagcttg

SEQ ID NO: 420902 - DNA, 283 bp, Oryza sativa
ttccctcgaggaggagggagccggacgccgccgtgggtagagcaggggagagaaggagaggaggagatcgccgtcttcttcgcctgccctcttgccgatcttgagcggtagtggagatggtgctcacgttcactaagcttttcagtcttcttttctccaataaggagatgaggatcctcatgtgcggtttctatgcggtcggttaaaccaccattctttacaagcttaagctctgttagatcgtcaccactattcccaccatttgttttaatgtctcaactgt

SEQ ID NO: 420903 - DNA, 371 bp, Oryza sativa
tcttttcgcgtggctaggccacaccccggcgctccgcgagcttggccactgcctccaggacggctacggcgcccgccgtgacgcccccgccggccgtcgcctgctgctccacgccgacgcccgcgagcacctctcctggaagaagcacaaccacggacaccacgacggcagcgccgccgaggacgcggtgagccggttcatggccgcgtggtgggactcgcaccgcgccaaggcggcggcgcgggggtgcctccctggcgaacacggggacaggtagcacgactgtagctaggacctgcggctgtgctcgcacgcccggtgcgggcggagggagacccggcagcacgagttccgggcgtgctcggagtgcg

SEQ ID NO: 420904 - DNA, 440 bp, Oryza sativa
actacaataattcttggctagtatgaattatggcccagttgatcaaatctgattctagatcagaatggttcatacttaaaaaagacaggattcaaccaaaaaaaattagtacaggttttcgataccaaaatttgttccccttcgttaacctttgtgcagcataacattttcagccttcaagcattgccttggctgcatcaattagtgcaggtctaaagctatcagatgctcgaccaagtacggtatagccttccttgtcctcaatggcaacatcagcaccatgtctaactagcagaagagcaaccgctttgtcctcagaaataacagcatgcattagtggtgtttgtcctgttttgtcaactgcatcaacatcagccccctcctcaattaggaattcacacagttcagcatttcctgtactggcagctctatgtaagggc

SEQ ID NO: 420905 - DNA, 399 bp, Oryza sativa
ctacaatggacatcgtctgcgccgccgccagcgccgccgcgggcggtgggagacattcggagaaggagctcttcagcgcggcggagtccggggacgccgcggccttctcctccctctcccccgccgacctcgccgccgcgctcgccctccgcgatgaggacggccggtccctcctccacgtcgccgtcgcctccggccacgcccaggtggtgagagtgcttgccgcgatgggcggcgacgcggcggccagcgttgtgaacgggaaggacgaggaggggttgggcgctcgatccacacggcggcgagcagcggaaaagctgagatcatctccatcctgctcgatcaaggtgctaatgttgatttgacaaccgatgctggccggactgctcttcattatgc

SEQ ID NO: 420906 - DNA, 464 bp, Oryza sativa
ctgatctactagctacctagtactctcatcttcttcactagcttttgcttgatcaattgcagcaatggcggcgaaggcagcgctcgttctagcggtgagcctcctggtggtggccgtggcgagcgcctgcacctactgcccggagccgccgacgccgaagccgaagccgccggcgccgaggccgccgacgcccggcggcggcgccgggtcgtgcccgcgcgacgcgctgaagctgcacgtgtgcgccaacgtgctcggcctcgtgaaggccaagatcggcgcggtggcgccgtacgagccctgctgctcgctgctcgacggcctcgtcgacctcgacgccggcgtctgcctctgcaccgccatcaaggccaacgtgcttggccttaacctcaacattcccatcgaccttagcctcattctaacaactgcggcaagatctgcccatccgactaccagtgtgctta

SEQ ID NO: 420907 - DNA, 385 bp, Oryza sativa
ggcagaaaatttttcatccattatttctccatcttgcattccgcaagaagaccgctagttagggggaaaagagtaaaaaaagaccaaaaacgatcacaacacgtcgtcgtactccaacacgtacgtacggtactccactagaacgtaaaacctctctagaagagggaaaccggaccatatatttggtagcactttacaactagggctgttcagatcagccatgtttttttgttttttgttcttccaatcattcatcgaaaatttcctttaaccagagcgccgtttgcaatttccgctccagcgctgatgaccatctctcgttgaatgccgagggggttcctcacactgtgtagttctgctggatcgtgtcgatgtccagcccctt

SEQ ID NO: 420908 - DNA, 451 bp, Oryza sativa
ctttcatacatcgatgccgatggtaactggcaccgtgccagcaagggtgctcctgagcagatcctgaccctgtgcaactgcaaggaggatgtaaagaggaaggtgcatgctgtgattgacaagtatgctgagcgtgggcttcgttctcttgctgttgcaagacaggaagtacctgagaagtcgaaggagtctgctggtggaccatggcaattcgttggtctgctgcccctgtttgatcccccgaggcacgacagtgctgaaactatccggaaggctctccatcttggtgttaatgttaagatgatcactggtgaccagcttgctattggtaaggagactggtaggaggcttggaatgggtacaaacatgtatccttcatccgcattgctcggacaaaacaaggacgctttacttgaggcacttacctgggatgagcttattgagaaggctg

SEQ ID NO: 420909 - DNA, 387 bp, Oryza sativa
attatatctcatcactcttcacccgccgcgacctccggaagcaaacgccacacgcgcctctccgccatgcttcctcctagggttgccccggccgccgccgccgccgcgcctacctatctcgccgccgcggcctcgacccctgcttccgtctggctgcctgtgccgcgtggtgccggacccggggcagtgtgcagggccgccgggaaagggaaggaggtgctcagcgcgtggtcttccagccattcgaggagctcaagggggagctctccctcgtcccccaggccaaggaccagtctctcgctaggcaaaagttcgtcgacgagtgcgaggccgccatcaacgagcagatcaatgtggagtacaatgcatcgaacgcgtaccactccc

SEQ ID NO: 420910 - DNA, 285 bp, Oryza sativa
tagccggcggcggccgacgccggcggcgattggtacggcaagaagagcatcgaggagacggtgaggaaggaggtggagaaggccatcaagcacaatcccggcgtgggtgccgcccttgtccgtttggtgttccatgactgctgggtcaacggttgtgatggatcggtgctcttggacaagacgccgtacagcagcagcacggagaaggcggcggcgaacaacatcggcctggacggcttcgacgtcatcgacgccctcaaatccaagctgggcgccgacgtcttc

SEQ ID NO: 420911 - DNA, 433 bp, Oryza sativa
tcctccacctctacctcctcctccgccaccggcgatggctttttccgacgccgcggccgcgcaggcggcgacgccgctgctgaaggacgagctggacatcgtgatcccgacgatccgcaacctggacttcctggagatgtggaggcccttctttcagccgtaccacctcatcatcgtccaggacggcgaccccaagaagacgatccgggtgcccgagggcttcgactacgagctctacaaccgcgactacattaaccggatccttggccccagggccttctgcatcttcttcaaagactccgcctgccggtgctttgggtacatgggctccaagaagaagttcatctacaccattgacgacgactgctttggtgctaaagacccaataggaaaggatattaatgcacttgagcagcacaataaaaaccctttg

SEQ ID NO: 420912 - DNA, 373 bp, Oryza sativa
tttgggtaacaaaaaggatgggggttacataaaacccgatgtcataagagtattatatgaaacctaacgacgcaaaaaaccagtcacaccagctaaaatcaaaggaagaactgccccacgccccaggcaccaagcctatagaaagtctgttacgaaatttagttgccaagtcccaacccaagtagctatcgctcagccacgccgcgaaccttcagaatttgcacaattaagactgctcggctgtggcaattaaaccataaaatatatcgtgctaattgccatttgttacactgctttcaactgcagattttgaggcgttcagaatttcgccgacaataggggtgccctccttgctcaatggctgcttctgagc

SEQ ID NO: 420913 - DNA, 274 bp, Oryza sativa
ttgtaaggcgatatctccatactttggatggtccagatgtaccgacaacaaaaaatgcattggtttgggtcgaattggttcaatatattccaaggttgctacagattttgcctgtgaccaaagatttgaaaaggaccgctggggttttcattgaaactgattggcttggtgctgcttactatcttctatggtttatgcctggctggacataatgtaggtactttgtggtattttttgaccatagagcgggaagattcttgctggcgctttaact

SEQ ID NO: 420914 - DNA, 433 bp, Oryza sativa
  unsure (1)..(433): unsure at all n locations
ctgatacagaccacttgnctgcttgtcacaagcctcatgccaaaagctcctctcacacactcactctctcgcgccatgaaattctcctcgacctcaacccctttattcatcctcctcctccctttcctgcctctcctatactttctctacctgtaccaggataccaagaagcagcctgcaggttccaatggactcaagtcctaccctgtagtcggcacgctgccgcacttcgccaagaacaggcacaggtttctcgagtggtcgaccgacgtaatgaagcgcagccccacgcacaccatgacgttcaaggcgcttggcctcacaggcggcgtcatcacagccaacgtggccaacgtctagcacatactaaagactaactttagtaactacccgaaaggcgagctcttcgtgtccttgctcgaggacttgcttg

SEQ ID NO: 420915 - DNA, 468 bp, Oryza sativa
  unsure (1)..(468): unsure at all n locations
ccctantccattttcacgccaccccaccacccgcacacccacactccacgagagacgacccaaaccggtcgccaccgccgccgcgatcccccaccttcgcttgccggaaggggcgccgtagccccgcccctccccttccccctcttcggtggctggcccctctccggcgatggggagcgccgacctggtgctgaaggcggcgtgcgagggctgcggctcgccgtcggacctctactgtacgtcgtgcaagcacaccacgctctgcagctcctgcggcaaatccatggcgctcttcggcgcccgctgcctcgtttgctcggcccccatcaccaacctcatcagggaatataatgtacgggccaatgccaccacagattagagcttctctattggaagatttgtgactggtttaccccctttctcaaaaagaagagtgcggaaaacaaaatggtttttcataagaggggt

SEQ ID NO: 420916 - DNA, 422 bp, Oryza sativa
ctttgaaatacgttttgagtagcagttgtcaatgctggattcagttgacttaaaagttatactttccaaggcaaccgaacttgttgacaggcacctgcagtcaattcttgtagctgagaaaataactcaaaaggttgagggtcagctatcaaagtctcagaaagagtttttgcttcgccagcagatgcgggctatcaaagaggaacttggcgataatgatgatgatgaggatgatgtaacggcattggaaaggaagatgcagaatgctggaatgcctgctaatatttggaagcatgctcaaagggagttaaggcgtctaagaaagatgcaacctcagcaacctggatatagcagctctcgaacctacttggaacttcttgctgaaacttccttggcaaaaagtcagtgaggagagggagctt

SEQ ID NO: 420917 - DNA, 496 bp, Oryza sativa
ccttgttacagctgtgctgcctcttgcttcctcctcctcatcgtccgccatggcttctctcaccgatctcgtcaacctcaacctctccgacaccacggagaagatcatcgccgagtacatatggatcggtggatctggcatggatctcaggagcaaggctaggactctctccggccctgtgactgatcccagcaagctgcccaagtggaactacgatggctccagcaccggccaggcccccggcgaggacagtgaggtcatcctgtacccacaggctatcttcaaggacccattcaggaagggaaacaacatccttgtcatgtgcgattgctacacgccagccggagaaccgatccccaccaacaagaggcacaatgctgccaagatcttcagctcccctgaggttgcttctgaggagccctggtaccgtattgacaagagtacacccttctccaaaggacattaactggccccttggctggcctggtggggcttc

SEQ ID NO: 420918 - DNA, 477 bp, Oryza sativa
tccaagcacctttttcagaggagatgcgacagtacgacaccttgctcgtctgaaaagcaagggttcccggaaaatcatttccagtgctacctcaactaatggaactatgttggcctattcagattgtgtgaaaccctgcctttttgcactaagacataagggtggaaaaaagtttactctagacaaactagagctgccaaagggattgctgaattctcagtgtatgctgttttctattgactcatccagtttgattctagctggccgtgatggaaagatttatgttgtagacattgccacacgggaaatttcaaatgtctttcaacctatgagaaaaatggatggagcttccaaagaaccacctgttacaaaaatgttcctcagtgcggatggacagtggttggctgcagttaactggtctggggatattttacatatttaacctcgaggtgcaaaggcaacaactggttcatacct

SEQ ID NO: 420919 - DNA, 408 bp, Oryza sativa
ttgtttttcttccaagctaagagttgattcatcattctttcagaaaattggtgttcagtagggtctgtaggcacgacatagacgcaaacatgactaacaaaatccactgaataaaataggcgggccttccagcgtaaaacacactcgagagaacgctctaagctgcagcacccttgcccttcttcctctggagcttcttcatgtagaactcaagctctttgccctccaggatgtacccatcagctctgccacattgcccaggccgggaggagatgcaggccaagagccttccgctgccaaattgcttttcaatgtgcgagtccagagtgcgagtttgctgacgctttttaagcttcctcacaacatgggtgctcttttttgcttcctccgtggcaggctcaccctttt

SEQ ID NO: 420920 - DNA, 453 bp, Oryza sativa
tctaccagcagctgcggcggcgcgagcacacgaagaggaggcggagcagccggagccacctccgccgccgccgccaccatgggtatctcgcgtgactccatgcacaagcgccgggccaccggtgggaagcagaaagcgtggaggaagaagcgaaagtatgagcttggtcgccagccggcaaacaccaagttgtcgagcaacaagacagtgaggagggtccgtgttcgtggaggaaatctgaagtggagggctcttcgcctggatactggtaactattcttggggaagtgaggctgtcactcgcaagacccgtatccttgatgtggtctacaatgcgtcaaacaatgagcttgtgaggacccagacccttgtgaagagtgccattgtgcaagttgatgctggcccattcagcagtggtatctcactcctatggtggcgatatcggaggaagaag

SEQ ID NO: 420921 - DNA, 380 bp, Oryza sativa
  unsure (1)..(380): unsure at all n locations
aggttcaaatccaacttattcataaagcatactgctgtcccacaggaaactgtttcataaaactaacatatcatacggactcgatggtccattaaaccagacacaagtagacatcagcaccacaaatacttgacgaacagaggctcgggatgaccaggcacatcggcagctccaccaaactggctgattactgaccaccacggaggcggagcaccaggtggagggtggactccttctggatgttgtagtcggcgagggtgcgtccatcctccagctgcnngccagcgaagatcagacgctgctggtctgggggaatcccctccttgtcctggatcttggccttcacattatcaatggtggcggagctctcaaccttcaaa

SEQ ID NO: 420922 - DNA, 276 bp, Oryza sativa
ctgacgctgcttcctcaaatcttcagtttcctcagaaagagagttgcttcgcattctgtattcatcaatctctttcttcagttgtgctgtaagcatgatgtgctcttgcctctcttcctctgtaagtttcaaattgttctgctcttgcaatattttctccttttcagcaaccactgtggctttcaaactctcaagctccaatttgtacatctcagcctgctttctttcattttcaatctgcagcttttgttccgataactgtttctcatcattttg

SEQ ID NO: 420923 - DNA, 315 bp, Oryza sativa
ggtataaattgctactcaatactatattaataaaaccataataatccaaactttaacaagtaaagcaaaaccggggccataatgaaagcccgtaccaaaaaagttgcaggagcactcaagaattcggtgtaaaacgaacgacaaattattgcaggtataactaaaagcgataaaagatcgatcatttagtcgacttcctcgatcttgggccctggtccgctgcttccggcggcggccgccggagcatcctcgtccatgcctccggccatgtcagctccggcgccctggtacatcttggcgatgatggggttgcag

SEQ ID NO: 420924 - DNA, 396 bp, Oryza sativa
agtcacaatcacatcgttattacttctgcttcttcaagcattcatgtaacatcaaaacattacacacatcgtctcaatcgccttgtgaaaagtacaagaaatttactatcttttcaacacactgaagctcagttaattaacaaccctgcagttcttgcgaatctggccgtcgtcaccggtgagtgggctgatgttgcccatcttcaccatggatctgccaaaatcccagaagaacttgtgggcattggcgctgtaagtctccaccagctccttggtgttggcgatgccgtcgtcgctggagaagagaccctggtcggaggacaggaggcctttctgattgaggaggttctggtagtagcggttgtcgaaaacgtaggcggaggtgatgcccagcac

SEQ ID NO: 420925 - DNA, 394 bp, Oryza sativa
acagtaaacaccacaatattacagcagcaaaatatggatttccaaattctttgctaggacaattagtttggtgctacaacaaaaactgctccagtagcgcaagctcgggagaacgagtaaatataacttgttatataacatacaaaaactgtataagtaattaaagaagcgcatatgaaccaacaatttaaagtctcaaggcagcaattgcttcaggcctgaagtcaatccgaagccctaacaccctcctaacctctgctggtgtcaaaagccatgtcagatgcccggcattgtcaccccagaaatccagtatctccgatacccgctcaaaattcagaattgttgacatctgggaaagtcttgagaacttgtctcggactggtctctgtgacat

SEQ ID NO: 420926 - DNA, 397 bp, Oryza sativa
cctggtacaaaccaaatctaatgcaaattgatcttatcaattgtgtcgatgaaattttacaattttgatttccccttccagacaacaatcgcagaaagtgaccttttacatgtaccgtgtttgacaaaaagaaggtaaaccggaaaatacaaagcctgtgaacgtatcacacacgacgaatatcaaatcaagcaaacgtacgatgcatgcaaactgacacggatacttcaattaattcggttcatccacttttaagcgtagtcctggtcggcaacgggctggtatgagccgatgaacacgtcgccgtacacgagcccggcgaggccgccgccgatcagcgggccgacccagtagacccagttgccaacgaagttgccggcggcgacggcggggccca

SEQ ID NO: 420927 - DNA, 391 bp, Oryza sativa
gaacatgaaggaaggaaaaactatgtatagcttgaaaagcatctaagcaaagataactacagcatccgacgtcccagttatactgagaaaacctaattttatggactatccctattacaagataaccttttcataactagggcaaacatccgacaagttacaagcacacctgatctttacgattccattttttttctggttgcttttccaacaaatgcaacaatagcctagtcacatcaacatacaaacaagtcaatgtaaaagattagaaaagctttacagtgaagatccaaccggcatgcacctctatctttggatttggtctgcagctgggttgctagttgctgatgatgttgacgtcctgccattgggcaccccgttttccgtggga

SEQ ID NO: 420928 - DNA, 392 bp, Oryza sativa
gattcagaaccgttttattcaacactattgttcctgtacaaggatctgaaacagaaaactgatgcacacatatacaagccatggcgacgactgcagtttatgctcgctatttgtaacagctaacataacataaatggtgaatcttgatcctatgcctaattcccccccaatagtggggtgcaccttatggagtgaacctagtaagcttcagtgacaggctcagtcgaggaaaatcatgaattctctagatctaattctgctcaagtgtatggtggaatgtcttcgagattattggcctaacgtcctccacaccaacaagtgtctccaggaatgggagtaactcgaccaattcctggtctgaggggtcatcaaaccagctctttattggtata

SEQ ID NO: 420929 - DNA, 391 bp, Oryza sativa
ccaatggatcacatctttgttgacgatcagttcacaaactagtcacaatcacatcgttattacttctgcttcttcaagcattcatgtaacatcaaaacattacacacatcgtctcaatcgccttgtgaaaagtacaagaaatttactatcttttcaacacactgaagctcagttaattaacaaccctgcagttcttgcgaatctggccgtcgtcaccggtgagtgggctgatgttgcccatcttcaccatggatctgccaaaatcccagaagaacttgtgggcattggcgctgtaaggcttcaccagcttcttggtgttggcgatgccggcgtcgctggaaaaaaaaccctggtcggaggacaggaggcccttctgattgaggggggtttt

SEQ ID NO: 420930 - DNA, 376 bp, Oryza sativa
ataggatcaaaacatttctattaccacaactttttaaggatggaattgagtagcaatactttcaccccaaaatacagtttagcgacaatatcttagaaaagccgcttgctttgccgccatggctggcaagctgagcagagcagctaacacaaagaacacgagatcactataaaccaaacggcaacgaacgaagaaaatacagggtcttttttgtctgaagatacacgaagcggttcgttttcttttatttttagtctcctctcctcctcgatgatgggtggatggcaatggcaatggcgatgggatcttggcttaattgatggaaggggctcggcgttcactccttgaggcagtcgagcatgggggcgatgagctt

SEQ ID NO: 420931 - DNA, 224 bp, Oryza sativa
tttgaacatggatcaaagacaacctattcataaagcatacaagctttcccacaggaaactgcttcataaaactaacatatcatacggctctcgatggtccattttaaccagactacacgctattacacagatacacctttatcactagccggaacagaacactccgacaagactacagcgcactctgtcaggcttcacccaaactggcttgattacctgaccac

SEQ ID NO: 420932 - DNA, 395 bp, Oryza sativa
gacgagattggttcaaatatggattgcaatttgaaaatctcaacaagaatcatcatcgcccgacaacttgggaagtaacgtttctcatcagtgcaccactagaacaaagattagccagcacacaaaatctaagatatgtcgtgagtgtcctgtccttaggcagcagtaacaggttccgatccttgcttcgattcagctccagatccagctttgccgtcttcggctggctgcttggtcatcttggcgaacatattgctgtagaatttggcatccttcttgttgtactccttgaccttttccttgaggttcttgtatgtcaacttcacatccctgttatcaggatcaatttcaagtgccttcttaatatccacctctgctaactctaggtcagcaag

SEQ ID NO: 420933 - DNA, 399 bp, Oryza sativa
gcaccacgacatacaatgtaaaatgtattccagatatgttaaaggcatataacagatgagccttgtgcccacagtttaaaacacgctactctgaatgatcggtcaaaaagacccactgaacgggtacatctggggtgagagtcgcaacgagaagaatgaagtgtatagcattgcgtccttacacgagtaagacagcattgatacagccatcattctctgggttgtttgtaacttgtgcatatttaccccaaacaacttttccagcaggggttaccagaccaagttcactaacgttcacctcaatgatagttccccttgtcaaaacaccaagagtagagtacatttgaccatttgggtttttcttcacagaaattatgtcaaggttgaaagtacatttca

SEQ ID NO: 420934 - DNA, 407 bp, Oryza sativa
gatctcttcggctctccccgccggagacggccaccgcgtcgcctcccccttcaaccgcctcgatcccttcctgttctttcggtattttggtgtagtttgcactggtttctggatttcttgacaaaatggtgaagctgacaatgatagcacgtgttactgatggccttccactggcagaagggttggatgatggacgggatcagaaggacgctgacttttacaagcagcaagctaaacttctattcaaaaacttatcaaaggggcaacatgaagcctcgcggatgtcaattgagactgggccatactattttcattacatcattgaggggcgagtatgctatctgactatgtgtgaccggtcttatccaaagaaactcgcattccagtacctagaagatctgagaaat

SEQ ID NO: 420935 - DNA, 93 bp, Oryza sativa
ctattgaattacattccgatggatagcaacaagcagttcaaacaccataaccaaagcgaactcaattcatgggaccatcacggaccgaagaac

SEQ ID NO: 420936 - DNA, 423 bp, Oryza sativa
  unsure (1)..(423): unsure at all n locations
gccgccgcgacgtggtacttatcgtcgtcggcgtggtggtggtggccgtggtggtgcatcagcggcatggccgacggcaggtggtggtggtgtcccatgcagaggtggtcctgcggcgggaactgcagcggcggcagcttgtcgatctcgtggcgcgccgcgttgagcagccagtccaccaccttgctgggctggttgagccccagccggtcctgcaggtcgtacagctggatcgccgtcggcaccgacagccgcacccgccggtcgcgcagccccttcaccgtcttcaccttgctgtgccggtccttgccgccgaacacccgcgacacgcgcacgatccgcgactccgtctgcgccgaccattgccgcgacgtcgccaccgccgccgtgtgcttcctcgctagctccgccgnctcctcctcc

SEQ ID NO: 420937 - DNA, 408 bp, Oryza sativa; identical to SEQ ID NO: 394599

SEQ ID NO: 420938 - DNA, 397 bp, Oryza sativa
aggatcaaaacatttctattaccacaactttttaaggatggaattgagtagcaatactttcaccccaaaatacagtttagcgacaatatcttagaaaagccgcttgctttgccgccatggctggcaagctgagcagagcagctaacacaaagaacacgagatcactataaaccaaacggcaacgaacgaagaaaatacagggtcttttttgtctgaagatacacgaagcggttcgttttcttttatttttagtctcctctcctcctcgatgatgggtgtatggcaatggcaatggcgatgggatcttggcttagttgatgggaaggggctcgccgttccactccttgaggcagtcgagcatggggtcgatgagcttgccctggctgatgccgaggaa

SEQ ID NO: 420939 - DNA, 376 bp, Oryza sativa
ggttcaaatatggattgcaatttgaaaatctcaacaagaatcatcatcgcccgacaacttgggaagtaacgtttctcatcagtgcaccactagaacaaagattagccagcacacaaaatctaagatatgtcgtgagtgtcctgtccttaggcagcagtaacaggttccgatccttgcttcgattcagctccagatccagctttgccgtcttcggctggctgcttggtcatcttggcgaacatattgctgtagaatttggcatccttcttgttgtactccttgaccttttccttgaggttcttgtatgtcaacttcacatccctgttatcaggatcaatttcaagtgccttcttaatatccacctctgctaactcta

SEQ ID NO: 420940 - DNA, 399 bp, Oryza sativa
  unsure (1)..(399): unsure at all n locations
gtcgcgagatggaagacgccgtgtccatcagaccggacttcttgccggcatccggcaagttccatttttacggcgtcttcgacggccatggctgctcccatgttgcgacgacgtgccaggacaggatgcacgagattgtcgccgaggagcacaacaagggggcctccggcgaagtggcgccttggagggatgtgatggagaagagcttcgcgcggatggatggngaggttcggtaaccgggcgtccacccgcagcgacgacgagcccgcctgcccgtgcgagcagcagacgccttcgcgtcgcgaccacgcgggttcatccgccggcgtcgccgtcgttagcccaacacaggtcgtcgtcgccaacgccgttgactcccgcgccgtcatctcccgtgcc

SEQ ID NO: 420941 - DNA, 407 bp, Oryza sativa
cattcaacattgaggtgaataaacaacccaaaatcttggaaccagtcaacgatcagcccgaatttcgccgttgttgcttgcctacctctccactccatcattcgcaaattttttgcagaacacagcaaggagtagcagagaatgagcgagatgcagccgcacgccgtgtgcttgccgttcccggcgcaggggcacatcacgccgatgatgaagctggccaaggtgctccactccaggggcttccacgtcaccttcgtcagcaccgagtacaaccaccgccgcctcgtccgctcccgcggcgccgccgccgcggccggaatcccggggttccgcttcgccaccatcccggacggcctgccgccgtccgacgccgacgccacgcaggacccgccgtcgctcagctactc

SEQ ID NO: 420942 - DNA, 373 bp, Oryza sativa
aactgaattgctactagattagcaaatgaaacaaagttctgtgacaagtggttagcaaaagaaaagcaacagaacagcaggcggcattcaggctttttctttgctaatccactgtaggaaaacattctgagtaccataattctaaacggtcccccttcacacccacgcacgcctattcccaacatcttagggtcgaagatagcaaactagtaaagctaataggggacctaagacacagtttgctacctcatgcccccggatacactatttactcttcatcgtcctcattttcctcatcgctaccaccatcctggtcatcgtcgacctcagacttggacttgtcagagccttctccatcatcatgggtcttagc

SEQ ID NO: 420943 - DNA, 405 bp, Oryza sativa
gaaaaattgcaatggaattatcagctgagtagatcaactactatttggttcacttcgtttttacatgttacaatctcatctgtgtttcccagtgaggaggtagtatacaaacattaccaagaaaagctggtaaaacctacaatctaacaaaattcatttgcccgcatgcaaaatctttgatgacgtgtatttcttttctgtgtgttcagtgtttgcttagtgtgggcagggcaccaagatggcacaagcaactgcccacactgggaaatgctttccaccactgtgttatcaccaattctgcaactgcgatgccacgcttttcaccactgggtgatacttcgtgtgtagatacttctttgcgttttctgaaccaggttgcccaagccattcatcatataatctttt

SEQ ID NO: 420944 - DNA, 391 bp, Oryza sativa
aggttcaaatccaacttattcataaagcatactgctgtcccacaggaaactgtttcataaaactaacatatcatacggactcgatggtccattaaaccagacacaagtagacatcagcaccacaaatacttgacgaacagaggctcgggatgaccaggcacatcggcagctccaccaaactggctgattactgaccaccacggaggcggagcaccaggtggagggtggactccttctggatgttgtagtcggcgagggtgcgtccatcctccagctgcttgccagcgaagatcagacgctgctggtctgggggaatcccctccttgtcctggatcttggccttcacattatcaatggtgtcggagctctcaacctccaaagtgatggtctt

SEQ ID NO: 420945 - DNA, 393 bp, Oryza sativa
  unsure (1)..(393): unsure at all n locations
gagtagcaatactttcaccccaaaatacagtttagcgacaatatcttagaaaagccgcttgctttgccgccatggttggcaagctgagcagagcagctaacacaaagaacacgagatcactataaaccaaacggcaacgaacgaagaaaatacagggtcttttttgtctgaagatacacgaagcggttcgntttcttttatttttagtctcctctcctcctcgatgatgggtgtatggcaatggcaatggcgatgggatcttggcttagttgatgggaaggggctcgccgttccactccttgaggcagtcgagcatggggtcgatgagcttgccctggctgatgccgaggaacaccttgttgcactactcgccgggggacttgagcttcttgc

SEQ ID NO: 420946 - DNA, 320 bp, Oryza sativa
ctccttgctttctataggatttcattccgatagataccaacaagcagttcaaacaccatacccaaagcgaactcaattcatggtaacatcaccgccgaagaacacctaccactggaagcatggatagagggcttctcgactcgagagagccactggacacgataacgactcgactccaggataagatgattttgacacggctagctaaggataactggccacgatgggccccaccaatcagtcccccaagatccgggcatggccaccgcaatggccatggcaactgggctcaccggaaccgacggcgccggccgaaccac

SEQ ID NO: 420947 - DNA, 380 bp, Oryza sativa
ggatcgaaattagacggccattaatttgaactagagtatcacaaactacgtacatcgacaaaatccccgtatcatggtactaagcattttcgcatggaaaaatggacgtccctcgaaaccatcacatttttaaacaacctaacacaagagctagataaaaaaacaacagttggtggcgacacatcactacagctcgtccttatcatacgacgacggctccgcctcctccttgatgttggatgattccttctcttcaacctcggcctcctcgacctcctcttcctcttccacggccgcgtcggggctcaggtcaaggctcttctgcaccgacctgtagatgctggaggcgaagtccttgggatcaggaaggttgaagccgc

SEQ ID NO: 420948 - DNA, 371 bp, Oryza sativa
gatgaaaagtagagcttcattttattggcgaatcattcatgggaatcaaacaacacatggaaccaagagatagatcaagaactaaagtactccaaacaacatcaagatacagtagtactctcaagctcgcagccatggtcatggagaaacaagtgcaacaaccagctctagtgcacgcacttgaagtcggatgggcagatcttgccgcagttgttgaggatgaggctgaggtcgacggggaggtcgagcttgatgccgagcacgttggccttgacggcggtgcagaggcagacggcggcgtcgaggtcgacgaggccgtcgagcagcgagcagcagggctcgtacggcgccaccgcgccgaccttggcctt

SEQ ID NO: 420949 - DNA, 412 bp, Oryza sativa
ataggatcaaaacatttctattaccacaactttttaaggatggaattgagtagcaatactttcaccccaaaatacagtttagcgacaatatcttagaaaagccgcttgctttgccgccatggctggcaagctgagcagagcagctaacacaaagaacacgagatcactataaaccaaacggcaacgaacgaagaaaatacagggtcttttttgtctgaagatacacgaagcggttcgttttcttttatttttagtctcctctcctcctcgatgatgggtgtatggcaatggcaatggcgatgggatcttggcttagttgatgggaaggggctcgccgttccactccttgaggcagtcgagcatggggtcgatgagcttgccctggctgatgccgaggaacaccttgttgcac

SEQ ID NO: 420950 - DNA, 406 bp, Oryza sativa
aatagtgttgcttgtcacgctttcaaaagagtacatccatcaagaattcaagacataacaaagcaacgttacaactgaataacctatctggcaaagtagactatcacccgaagagaactagggtaaaggggatacacactgggatggcaaagttagggagaaaaagagagagcatacatatatgtttcagctatgcgagaaagcaacggtcgtgatgcaggaactatccacgatggggtacgtttggacatggtcgatgtacttgaacaccgcagtatcactggcctgcgcaccttcggagcccatagcactgagctttctctggttgaagctctctacctcctggaccaactcatccttggttctgctacatgatgtgatgaccagtatgccaccaggagaaacc

SEQ ID NO: 420951 - DNA, 388 bp, Oryza sativa
gagattcaaacggaagttcatgatgatagaaactgggggggttcttgacatgttcatggtgatgatacacaaaagcaatactacataaggtctttaggacagacaaggcatgaggggggatcgattctactagggtggttctcagacgaatgaccagttgacgaacatgaaggcgaggcagtgcggcgtgtcgtcgtcgctcaggacctttcacgccaccggctgctcgtacgacaccggccgccccatgctcgacacgcacacgccgaccgggaggtaggcgaaaccctgctgcatgatcttggggaactctgtacatagtgccttccggccatcatcatcaaggatcttctcgagcgagatgtcctggagagcaatcagcgtcgtc

SEQ ID NO: 420952 - DNA, 180 bp, Oryza sativa
aacacggattagagacaggtgaattacaatgaaattgtatttagccatacacagtgccaaagaggcagcacggatagaataagacgcaaacgaatccgactaacaaaatacgagttatcaaacacactgacaattattctgagtattttttgacagaattcatcaattaagacagaaaac

SEQ ID NO: 420953 - DNA, 397 bp, Oryza sativa
ggagctaaaaccaccgaataagattatgtttcacacgttatctgataaaagatacatgatggcattgcacaggttccactagaacgagttcataaaagggcaacaaaaggcacaacataatttacacttgagaacatatggcaagggttttatgctgcgatagggactttgcaggttgccttgttgtgcccataacccttacacctgctgcagcgcaccgcccttttgattgcgattcgaggatcagctggcttttcctttggtcttccaacctgcctccgggttagaatcggtgattgatgtaatgcctcgccttgtgatgggtcagttgatggagcagccacaacaatgtcaggtattggattgattgacatggcataggtcaagcggtagcact

SEQ ID NO: 420954 - DNA, 396 bp, Oryza sativa
tttgtttgtgggagtgaaccagaaattccaggagcaactctctcagtttctggcacagattctacaatgtctttgaggtatattttttgtctcttgagccactccccatatgggtgagctttcgagtactgtgccttcaatgcttcatcatccactacaggatgggtctcaaaatcaaccaacagcatcattccagggtttagtctaccctttctcaatacatctttggaaggaacatcaacaacaccaacttcacttcccatgactacacgtccactgtgtgtcacataaaatcgaccaggcctcaacccattgcgatccagggtggctccaaggtaacggccatcagtaaaagatattagagcaggtccatcccaaggctccataagggcagac

SEQ ID NO: 420955 - DNA, 409 bp, Oryza sativa
ctattcacaagccacactttcttggggatgcccttgccctcagccgtaggaagcatatcacgctgaggggttactcgctcaccacagctgcgccactcgtagaaagatctgcataccgaagaagctgccatactgcagctactgtgcaaaaacaggacctaaaacctgccaggatgaagttctatattgagaagagctatgagctgcctgacggccaggagaccaccatcggatcataaaggatcaggtgcccggaggcgctctcccagccatcttatattggtagggaagctgctggcatccatgaagccacatacaactccatcatgaagcgccgatgttgatattagaaaggatttgcacggaaatggggcccttagtggggagatctacaatgccccctggtatt

SEQ ID NO: 420956 - DNA, 538 bp, Oryza sativa
  unsure (1)..(538): unsure at all n locations
caaatacaaataaacctttactacgtacacaaaaataagttatcttcaagagagaaaacaaaactagaggtacaatcattaagacccgcaattcggctagtagaaaattcgaaacaaaaagctttcaaactgcacgggcaaacatccttgttgcccggtgaaacccaacacaacaatccattgcatacattaggaatgccctgatgcgatgccattgtctgaaaaaactgaccgactcagacgacctacactgcacactacctggacagatttcttccagtacaccaattgacttcaccttccgcattgccccatggccaacagccctcaggtgctactgaaaccatgggacgcatgcaaacaatctgcagatcacgtctcaatcagctgataatggtacaaatctgcccacaaacttagaagcacttcatgtggacgatgcctggaccagattcatcgtattcggcccttgagatccacatcntgctgaaggtactgagagaagccaggatggaaccaccaatccagacactgtatt

SEQ ID NO: 420957 - DNA, 511 bp, Oryza sativa
cgaaggatttacactccttcatgctattcttcgactcgatcttgctgggcgtgaccttaccgacaaccttatgaagattctcacagagaggggttactccttcaccacaactgctgagcgggaaattgtcagagacataaaggagaagctcgcctatgttgctcttgattatgaacaggagcttgatactgccaggagtagctcctctattgagaagagctatgagctgcctgacggccaggtcatcaccatcggagcagaaaggttcaggtgcccggaggtgctcttccagccatcttttattggtatggaagctcctggcatccatgaagccacatacaactccatcatgaagtgcgatgttgatattagaaaggatttgtacggtaatgtggtccttagtgggggatctacaatgttccctggtattggtgatcgtatgagcaaggaaataactgcacttgcccctggcagtatgaagatcaaggtagttgcaccgccagagaggaaa

SEQ ID NO: 420958 - DNA, 493 bp, Oryza sativa
cttacgcgtgggcggacgcgtgggtgctggtggttttcagggagaactaatttgcaaggttgtgggagaccgtgatgttaagttctgcacaaggacaactttaagcgacaatgctatcacaaatgcgatagatatacacagatctgcaagtggaagcttgcgtgttaccgtgtccaacaatgattgtggtgttcgtgaatttgacatggaaacatttcagctcttgaaccacttcagttataactggccagtaaatcacacatctgtgagccctgataggaaacttctggcagtagttggagatgatcgggatgctcttcttgttgattcaagaaatggaaaggtaacctctaccctagttggccatctggactattcgtttgcttcggcatggcaccctgatggccgcacctttgcaaccggtaaccaagacaagacctgccgcgtctgggacgtacgaaacctgtcaaccttcctctcagtacttaggggc

SEQ ID NO: 420959 - DNA, 475 bp, Oryza sativa
ttcgaatctcctcccctcccccacgcaactcgccgcctgcgctgccgctgctcgtgagggggagacgacgccggaggagatcgccgccgccgccgccgccgcctcggacggccgcgcccccccgccgcgcgtgtaccacgggcttgggggattgattggtagcgatggcggcgccgccggctagggctcgggccgactacgattatctcatcaagctgctcctcattggcgacagcggtgtaggaaaaaagttgtctcctcctacggttctcagatggctctttcacgactagtttcattaccacaattggtattgacttcaagataaggaccgttgagttggatggtaaacggattaaattgcaaatctgggatactgctggccaagaacgctttcgaactattaccactgcttctacaggggagccatgggcatttcactcgcttatgatgtcaccgatgaattcttattcaa

SEQ ID NO: 420960 - DNA, 344 bp, Oryza sativa
  unsure (1)..(344): unsure at all n locations
cttctttaagaagaggaaaagggatgctatcactcaggcttgtcagtggtggctggttggctcaagagtctgatgatctaacccctgaagatatcaccttcacaacagtgtccgagagagctcctcaagacagtgagctctctgatgccaaatttgcctggctttgtgtaaagcacgtaaagagtaacgccattgtgatagccaagaataactgcatgttaggcatgggaagtggccagccaaacagactggagagtctgagaattgctttcaagaaagcaggagaggaggcccaagggagctgctttggncagtgatgcattctttccattcgcttggaacga

SEQ ID NO: 420961 - DNA, 509 bp, Oryza sativa
gcataaaacgagggaatatcccctcgagggatgaaatcactttcccaagtcggtctgaatgatacaatcacatgcatgtttagtttacaatctagtgctactaagattacattacacgtagaaaacctgcccaacattgagcatgctctcatgaggcacattgaagatggcactgttctccctgcagatcttcctcaggaaagcatacatgtagttgatgacaatcttcttgacgaaccctgaatccctgcgagctctgatcaccgtgttcccgaggatgtgcaccaccccggcgtccctgcacgcgttcaggaacgcgatctcgtcgccgacgctctggaacgccatctgccccgacgccggcatcacctggctgctgcccgtgtcgtcggacctggagttcaccggcacaatggagtcatggggcgacgtgcagctcatcacctccatgacattgttggtgccggtggggtcacgccgccatttgctgatccctggttatttgggag

SEQ ID NO: 420962 - DNA, 492 bp, Oryza sativa
gctggcacagaagcattgtttgctgacctttcgtattttcctgtacaagctattcagattgctttcactgtggttgtgttcccatgccttcttctgcaatatactggtcaggctgcgtttatagctgcaaacacaaaccaagtcagccatgccttctatatctcccttccagctcctatactttggccagcatttgccgttgcaacagcagctgcaatagttgctagtcaggccactatatctgcaacatattcgattatcaagcaagcacttgccctagggtgctttccccgagtgaagatcatccatacttccaagaagtatctcggccagatatacagccctgatattaactggatcctcatggttttctgcatagctgtcactgcagggttcaaaaaccaatcccagattgcaaatgcatatggtactgctgtgatcatggttatgcttgtgacaacatttctgatgatccccatcatgctgctggtg

SEQ ID NO: 420963 - DNA, 494 bp, Oryza sativa
gacaaaaatatgcacataaactgcagatgaaaaccatctggtcactttatacaagccgtacatcagctaaaagaagttcacgatgcctcagggctcaggcagacagaaactgaaaacgacgcagcaagttaaaaacaaattacaaaacctacatgagacaaaattaaatcgtagagatagtgtcccactaccaccaaagcaacattatttgcagaggttcctttttttcagcccacatgatcccgtggtctagttattattcgaaaatctccgtccgtcctcaaattcgatcgaattttaaatctctctctcctagaagagcttgaatagaattcctccgtgcgtggcgaagaatggcgcgaacaccagcgactcgacggccatgagcttgatgaggatgttcagcgacgggcccgacgtgtccttgagcgggtcgccaatggtgtcgccgatcaccgccgccttgtggcagtccgatcccttgggccccagcg

SEQ ID NO: 420964 - DNA, 510 bp, Oryza sativa
gtacagcggtatagagagagatacacagagagagagagagagagagcagcagcaggtagcaggtcgaggagggtttgtggccatggcgatcctgtcggatgtggccaccgaggtgctgatcccgatcgccgccatcatcgggatcgggttctccatcgcgcagtgggtgctggtcgcccgggtcaagctggcgccgtcgcagccgggagcgtcgaggagcaaggacgggtacggcgactcgctgatcgaggaggaggaagggctcaacgaccacaacgtcgtcgccaagtgcgccgagatacagaacgccatcgctgaaggagcaacatcgttccttttcaccgaataccaatacgttggcgttttcatgtcgatattcgcggtggtgatcttcctcttcctcggctccgtcgagggattcagcacaaagacccacccctgcacatacagcaaggacaaggagtgtaagcctgctctgttcaatgccctgttcagcaccgtcttcttcct

SEQ ID NO: 420965 - DNA, 438 bp, Oryza sativa
gtcatggacccggcttggccacacttgcagattgtgtatgaactattcttaaggtttgtccagtctcctgagaccgatgctaagctggccaagagatacgtcgatcatggtttcattatcaagctgcttgatctctttgactcggaggatcctagggaaagggagtatttgaagacaatacttcataggatatatgggaagttcatggtgcaccgtccattcattaggaaggcgattaataatatcttctacaggttcatatttgagacagaaaagcataacgggattgctgagctattagagattttggggagtataatcaatggttttgctttgccactcaaggaagagcacaaattgtttcttgtgcgagcattgattccacttcacaaaccaaaatgtgttagcatgtatcattaacaacctgcatattgtgta

SEQ ID NO: 420966 - DNA, 479 bp, Oryza sativa
acattcggcattgattttaggcattgaacaagacacgggggattctaaatcttcaagaaatagcaaggtgtgggcaaaatcttctgatgtggatttctatcctcattttgacgccaatcactcagcaaaacatcaatccaaagaaaatgctatagttgcatacgatcccaataatgcacctgagacccctgttgatctagatgaatcagatatgaccccaagcatccaggaggcgttgcacagtggtgcagaatatgtaagaaaggaggtgccactttatgtatttccgaccaggcatctgctaaagctggacaccacattaacttcttactgtgatatgcaacatgtcgttttcgaagaggaaaaatcagcatataatcaagccatgcatcaaaatattcgtgatgggaagatccacccacttacatctattcaccatgcatctacatacaactcatctttctgcaaataaatggata

SEQ ID NO: 420967 - DNA, 522 bp, Oryza sativa
gataacaaacaagaaaaacttatttgcaacacaactacattcaactgacacagctgggcctgaagttcatttccgcctgaacagcataggatacagatcatacacacacccaaacactgaaaagtgctaaccatgctggcagcactagtctttacggaagatgatgatacagatcagatgcatgccttgcgactatgttacaccaccatttacagactacagagttttcctttcccaacaacagctggagatccaaaaatctcctaatgcagcgctgtgaggattgtagatccttccaccttgaaggttgcaccgcaaatttcttcttctttggcaggaactgcggtcaccttgtgctttgggttctcatagcacttcaagcctccaactccaagagcattggaatagaagcagccttgtgggaaaggtgcaagagacttgccacacgatcctttaagcaggtcaatgttgtcagagaaggcaacagatccatcagcagtaatcccccaatacagagacacc

SEQ ID NO: 420968 - DNA, 455 bp, Oryza sativa
ttggtttttttgataacatacatgaaaaacttatttgcaacacaactacattcaactgacacagttgggcctgaaggtcatccccgtctgaacagcataggatacagatcatacacacagcccaaacactgaaaagtgctaaccatgctggcagaactagactttacggaagatgatgatacagatcacatgcatgccttgcgactatgatacaccaccatttacagactacagtgttttccttaacaaacaacagctggagatccaaaaatgggctaatgcagcgctgagaggattgtagatcctttccaccttgaaggggggaccgtagatttgttcttatacgacaggaactgcggttaccttgtgctttgggttctcataccacttcaggcctccccctgcaagagcattggaatagaagcagtcttgtgggaaaggtgcatgatacttgc

SEQ ID NO: 420969 - DNA, 504 bp, Oryza sativa
aatgtcagggggaagccatccaatcccttaagctgttactggcatatattaaagacagattttaagataatacaagaaaagaagcaaattcaacgagatcaaatgttctcaaattgctatgcttatttttcatgacaatctccacggcactagctttgtcatgctctccagagagtttcagaaataacttgcaaaaaacaaaggcaaaagactttcaacacaaaagactactcctagacgacaacactgatctggcccttctcgagcatgtcgtagaaggatctagtcttcctctgctcgttccagtgatgcatcttccacagaccaccagcgaccagcccaagggtgagcccaatgcagatctccttcaccacgctcggccccttgagggtcgcatgtgcaattctgccacctgccatttgcttgctgttgagctcagatgccttgccgccggtggaggaggatagaacccgcgccgcctgcctgagggaaaggaggaggaag

SEQ ID NO: 420970 - DNA, 489 bp, Oryza sativa
ctatgtcttcctcctcctctccctcgcggcggcggcgcggcgtctatcctcctccaccggcggcaaggcatctgagctcaacagcaagcaaatggcaggtggcagaattgcacatgcgaccctcaaggggccgagcgtggtgaaggagatctgcattgggctcacccttgggctggtcgctggtggtctgtggaagatgcatcactggaacgagcagaggaagactagatccttctacgacatgctcgagaagggccagatcagtgttgtcgtcgaggagtagccttttgcgttgaaagtcttttgcctttgttttttgcaagttatttctgaaactctctggagagcatgacaaagctagtgccgtggagattgtcatgaaaaataagcatagcaatctgagaacatttgatctcgttgaatttgcttcttttcttgcattatcttaaaaacctgccttaatatatgccagtaacagcttaagggatt

SEQ ID NO: 420971 - DNA, 486 bp, Oryza sativa
aactactggtggttcgtgtaggggacggaggggtggacggggctggtgatgctggtgctcatggcggtggcgttcaccctcgccacgccgtggttccgccgcggccgccttcgccttccccgcccgctcaaccgcctcacggggttcaacgccttctggtactcccaccactgctttgtcatcgtctacgccctcctcatcgtccacggctactacctcttccttaccaaggattggttcaagaaaacgacgtggatgtacctggcggtgccgatgttcctgtactcgtgcgagaggctgacgagggcgctccggtcgagcgtgaggccggtgaagatacttaaggttgcggtgtaccccggaaatgtgctgtcgctgcacttttccaagccacagggtttcaagtacatgagtgggcagtacatctttttcaactgtgcctgcgtttcgccgttcaatggcacccattcttcatcacgtcggccc

SEQ ID NO: 420972 - DNA, 518 bp, Oryza sativa
ggaagaccataacatcaagaactctccttgaaaattttgtaatttgatccgcaacgattcagatgcagatgaaacactgctgattcccactcagattacacacaatacaaatacaccgacaaactgcctcaaaaaccaccaaattgattcaaaagtaaaacgggtatgagggatcttcccaccgagactgactaaacctaaccacagacaattggatccactggacccagattattcaaaaacagatggctatgacggcatcgtcctcgcaaccgaagggaacttgcagctatggatatcctcacttcgcgctggcgagctgggtgcggatgagcttggcggccgaaaccatgttggtaagggcgggcttgacctcgttgtacttgcgggtcttgagaccgcagtcagggttcacccagagaatgttagtgtcgagcaccgcgagcatcttgttgacgcggtccgcaatctcctctgtggacgggatcctttgggaagggatgtatagacaccagggc

SEQ ID NO: 420973 - DNA, 466 bp, Oryza sativa
tttaggacaagcttgtggtctcgacttcctgctcactcatgcacaccgctgtggatcttgtaaatgagaccaagctcgatagcgagattaagtcatggctcgcttttgctgcccaaaaggtggttgaggtgaatgcccttgctaaggcattggctggacagaaggatgaggcttactttgcagcaaacgctgctgctcaggcctccaggaggtcatcacctcgtgtgacaaacgaggaagtccaaaaggctgctgctgctctgaaggggtctgaccaccgccgtgctaccaatgttagcgctagactggacgcacagcagaagaagctcaaccttccagtccttcctacaaccacaattggttcattcccacagactgtggagctcaggagagtccgccgtgagtacaaggcaaaaaagatctctgaggaggagtacattagtgccatcaaggaggaaattcagca

SEQ ID NO: 420974 - DNA, 293 bp, Oryza sativa
ctatcaagtacaacatggtggtgcaagaggaggatgagctgccgcctgagaaattagcgatagcaaatgtgggacggcaagatgctaagaagcacttggaagagcatgtctccaatttgatgtcatcaaacatagttcagacgctaggaaccatgctcgatacagttgtattttagatcactactgctgttatcccaacactgtacccagagctcgtttattttttatttttttatgtttatcgaagcctaccataattcagtgaacttaacgccagttacatttgggttatg

SEQ ID NO: 420975 - DNA, 379 bp, Oryza sativa
ctatcaagtacaacatgtgttgtgcaagaggaggatgagctgccgcctgagaaattagcgatagcaaatgtgggacggcaagatgctaagaagcacttggaagagcatgtctccaatttgatgtcatcaaacatagttcagacgctaggaaccatgctcgatacagttgtattttagatcactactgctgttatcccaacactgtacccagagctcgtttattttttatttttttatgtttatcgaagcctaccataattcagtgaacttaacgccagttacatttgggttatgaaaaaaaaaaaaaaaaaaaaataataaaaaataaaaaaaaataaaaaaaaaaaaatataattaaatttaaataaaatataccaat

SEQ ID NO: 420976 - DNA, 382 bp, Oryza sativa
gtaatcaagatagcgctatattagtatatttcacttgcaaaatacaacaacggaatcagaaagctgccagccaaggccatgaacgctgcaggcgccacggcattgcagcagcaatctcacacgattacaacacggataaatacagcaagctcaaaaaggaaaaaaaaaacacggacggagaaacaacgtaatctgctgatgagcgtacgagaagccttcaggatcctgaattcctccctttcttatttcggtgcacgtatcgtctcttcctggatcttgtcgcgttcgcgggtggactggttcgatcagcagatgggcaggggctcgccgttccactccttgaggcactcgagcatcgggtcgatgagcttgcgctcgctga

SEQ ID NO: 420977 - DNA, 392 bp, Oryza sativa
ctgcagcctctctatagtctcagctcttcttccaccaccacccagctcctcctcctcctcctcgtcgttgttcgccaccaccgctcggagagatggcgagccagaccgccgacgccacggggttcgtcgcgagcgacccgctgtcgtggggcaaggcggcgctggagatgacggggagccacctggacgaggtgaagcgcatggtggcgcagtcacgggaggccgtggtgaagatcgaggggtccagcctccgcgtcggccaggtggccgccgtctccgcggccaaggaccgcctccgcgtgggtggtcgagctggacgaggaggcccgcccccgcgtcaaggccagcagcgagtggatcctcaactgcatcgcccacggcggcgacatcta

SEQ ID NO: 420978 - DNA, 517 bp, Oryza sativa
atatatatataagcgatgctagaaagtcttataatatgaagtatttaagaacgacatgtgtgtattcaagaacatgcatgaatctcagcatatatattttttcgaaaagaaaaaagtaaattatagcaatttttgttttgaacatactaattaagaatcagtaatctcagcagtcaaccaggttttatttagactagttgcgaaacggagtacctgcagaccctggcctctgaataaacgagccccggtctgcagtagtaccccttgctcgggctgcagtgcctgtcctcggagcagacgcagcggccctccagcgcgcagccgtcggccttgggcagctgctcctccccgccgacgaccttgtcggaccaccggctgtcgaacagcccccgcgggtcgagctgccgcttcgccgcgccgaacttgtcccagctcgggtacttgccccgcacgccccggaacgccgtcagcctgttcttggcccagtgcgggcgcgccccgtgcttgacgaacgcca

SEQ ID NO: 420979 - DNA, 471 bp, Oryza sativa
gatgtctaaaattgggacatttctattgcattcttatgtcataattcacttaatacatgaaattgacagctgattatataactttaaactttgtactatgaacaatttgcgcgcggcaatgctatctagtagtatcgatcaggaattcactttcctgcagttgagcctgacctcgccggttgacccggtcaacgggccgatgttcccgagcctgatcatggacgcggcgaagtccgacgagaaggcggcggcgttggagctgtacagctgcaccaccgagtccaccggcccgttgttgaacagctcctggtcggagtgcagcagcccggcgccggcgacgaggttgcggtagtagccgttgtcgaacgcgtcgggggtcagggagtccagcggcgccagcgcggcgtcgccgccggacgccgggcaggactgccgtggtgcgacgcgaacgccgggctcacgttggcgtcc

SEQ ID NO: 420980 - DNA, 477 bp, Oryza sativa
gatcaaccagcaaatacagctgctattatttcacaagatagctcatttcggagaattacataacacggctctttgctaagatatacaatcatacaaggtaccatccatatttgataaagtagaaatcagcaattttaaaccttgaaggccagggatgagacttccatatcggcacgcaaacgcgaccgatatcatggtgtcctctctcttttcttttttcttttctgtactctatcctgcattagtttcagtctgtggtcattggccccgcaatacaacagcggaaacgtgccctgcggacatttctcataacctctatctcggcattctcaagcatgacaacgatctcggcaaatgatggcgaacttcagggtttgcgtcccaacagcaagtcatgatcttgctcagagaatccacacaatcctgcgggattgcaggacgagagcccctgtttacgacagcaaatgcagcctgaac

SEQ ID NO: 420981 - DNA, 194 bp, Oryza sativa
caagcccaagtcgcgtctctctcgaagcagagtagagaaggagaggagcggagcgccatcagccgtccgatcgagtgatccgatggctctcgctctctccacctctgctgctgctgccgctgccgccgcggcgcgggcgctcgcggcgagggtgacgacgactaggggttacgccgcgtttgttgccctttccg

SEQ ID NO: 420982 - DNA, 452 bp, Oryza sativa
gtagtaacagggacttttattgcaatatttgtagttaatacaccttgcaatcattcttacttagtactaatacacattgaaatatgccataggtaaaatctttaatagctatatatccaagccatattatcgtgtgagatccttatatccaagccatattatcatgtggataattaacatgtccaatagctatatccacaccatattattccccatcttcttgataacttgatacacataggatacgagatgggccttaggcatttgcactggcatcgacaggcttgaactcctggagctccttgaagtccatccatggtttctcccagaccttagcttcatagagcttcttggcatccccttccttcacctcaattgtgaaatagtacaaagtgccagcgacaacttgctgcttcacactcacaagcttctcgaactccagcagagaattg

SEQ ID NO: 420983 - DNA, 516 bp, Oryza sativa
ccggattggtagcctccctgctcgtgctgcattcgctagccacgccgtccgctcaggccgaggcgcatcgcgcagggggagaaggggaggagaagatgtcgtgcgacggagggccggtgcttggcggcgtcgagccggtggggaacgagaacgacctccacctcgtcgacctcgcccgcttcgccgtcaccgagcacaacaagaaggccaattctctgctggagttcgagaagcttgtgagtgtgaagcagcatgttgtcgctggcactttgtactatttcacaattgaggtgaaggaaggggatgccaagaagctctatgaagctaaggtctgggagaaaccatggatggacttcaaggagctccaggagtttaagcctgtcgatgccagtgcaaatgcctaaggcccatctcgtatcctatgtgtatcaagttattaagaagatggggaataatatggtgttggatataggctattggacatgttaattttccacattattaatatggcttgga

SEQ ID NO: 420984 - DNA, 473 bp, Oryza sativa
gacacacaaacaatagtttaatttattagcaagtcaaaatttcttgaaagaataccatcgactcacttgtgtctacaagccttgagttatacttcttgcaacacagacaacactacagataccatacattcattttacctgtttcactcgcttttaggacgttctataacctcacatctggcgctaccatgctgaccggaccaaaaccttgttttccattggagggaatggaatgaagctctctctctctctcttctctagctcactagctgctgactgccatagacagggtaggctccatatgcagcagcatacatgttagggtgcgggacgggggaggcataaccgtatccacccgagaatggcgtcccatagtacatattggttcttcggctgccagaatcagccctagactgtttatgtgatgggctgcggccccatgaaaggcgaactgcctgctttccaatgactga

SEQ ID NO: 420985 - DNA, 529 bp, Oryza sativa
aggagtcgtgcaaaatgtctagtcgcctcagaaatggttgtattccaagcgtcgttttccgttggatatgagtaccacatattgctacaatgcatgtccttgttctgctttcaatagtcaagctatcaaatgcgtccacaatctacttctctccgggcaggcccttgctaacacatcctccaggctccccaacgaatgtagcctttcttccagctttagtttcacagccggaacttgctttgatatccagagaatgtagagggctgcaagctcagattggacacatgcctcaccaaattcatcggcaggggcattcaggcagtctgacaggaggtatatctcctggactaggaagagatccaccagcgatgtgcctgcagcacactctgtttcctcactgctgagcaagaacttcatccaccattgtgagaggaacctacgatggatccacaaagactacaccaacacactagcacaatcaacatagggggacaacattcactagaaattattgcactaacataaaaat

SEQ ID NO: 420986 - DNA, 481 bp, Oryza sativa
gtatttattcccatctactttacggaaccttcatttcctagcagataattatccgaactcatcatattagcatttcacacagttccttatttaactggttattaaattacttttttttgccgggtggttattaaattactttgacatttcacacttgtagtgataaacagtgtacaacaagatagtttgatcctttatgcagaaatcaaagatgaactaccgtgcgtggaggcatcgctgctggcttattccctacatgacaagagaacaggttctgaatgagttaaagaaatcaacaagatggaacgagttacatgtccgctgacactgtttgttttcactaccgacggtccctactgcttgcattactagacagttgccatgtagaggacacagaagattcccttgataggaagtcagaagttcatttactgtggaagggattgttgttttttattaaaaatctatacctgctttacta

SEQ ID NO: 420987 - DNA, 290 bp, Oryza sativa
ctgaggtgggcaggctctccctccccctcccggttcggctcggttcgggtcgggtcctgttcgatctcggctcttccttcggctcgggggttggcgggaaagcatggcggcgccggatgttgagtaccgttgcttcgtcggcggcctcgcctgggccacccactaccgctccctcgaagccgctttctccacctacggcgagatcctcgagtccaagatcatcaacgatcgggagacggggaggccgcgcggtttcgggctagtgaccgctctcgagcgagctagccctg

SEQ ID NO: 420988 - DNA, 459 bp, Oryza sativa
aaattaacttgtatatagctaggatacaacaatactctctctgcccccaatcgccggcgcaaagttagtagggtcctagttcgccgtggccgctgccggcctgctgcttccgcagcctttccgattgcacgccgtgcggaaagggtagttcaggttgttgcactccgggcaggtccagctcccttccggagcgtccttgtctttgcgagatggggtagcattagatccagggcttggccttggagctccacatttcttcatattgcaactgtttctgaaggaaaagttgacattctcacactttgggcagatccagtcattctcagccattccatctgggcctccacgacgcttgcgtgaagcagagctgtcattattttccactaatgctccaccagaccatgggctagaaaccggcattggagatcctctaaaaccataaccatatcggcctagctc

SEQ ID NO: 420989 - DNA, 489 bp, Oryza sativa
tctagaatccccatagctcaagcaaagggagagagcagcagcagcaagaggagcacgcggggagctagctagctccgccgccgccgacgagctccggcggctcgccgttatccgctcgctgatcgagccgtgtgcgggtgagaaagaaaaagaaaaaaaaaagatcgcgcctttttggcggcttcttggggtgtgaatccacggcttccccggggtaggatcttgatggggctcgaggaaggcggcgcgatgagggcgctgatgcggcggaagcaggtggactccgaccgggtccgcgccgccggcggccaccagctcgccaaggagctctccgttacgcagctcgtcgcgattggtgttggttcaacaattggagctggagtatatgttcttgtgggaacagttgctcgggagcatgctgggccgggattgacacttatcatttctgatagctggaggggcaagtgcactctcagctttctggtatgc

SEQ ID NO: 420990 - DNA, 479 bp, Oryza sativa
ctttcgccaacggcggcggcgccaacatggtggccagcggctactccaccggcaccgccctcggcgccgaaatcatcggcaccttcgtcctcgtctacaccgtcttctccgccaccgacccaaagcgcaatgcccgcgactcccacgtcccggtgctcgcgccgctgcccatcgggttcgccgtgttcatggtgcacctggccaccatccccatcaccggcacgggcatcaaccctgcccggagcatcggcgccgccgtcatctacaaccagaagaaggcatgggacgaccactggatcttctgggcggggccgttcatcggagcgctggcggcggcggcgtatcaccagtacatcctccgggcggcagccatcaaggcgctggggctcttccggagcaaccccagcaactgagcttagatagccatggctgctctgctgctgctggcctggttggacttggtcatatcgtttgcatgt

SEQ ID NO: 420991 - DNA, 434 bp, Oryza sativa
aaagaacagccaaccggcgtcgaaggaaaagacatgcttttatttctcatcaggtggcagtacaaattaacagcaatttggtgaaacatgttactacatatgaaacagacaaaattacattctttataaatgcaaaacaatccttcttctccatgacttctaaacagctcattgccgaaaggaaatgcccgcaaacatgtgtgctgaagtgaggtaatctcccttatttgggcgttaaaccacttgataattggctgttaccaaacgagccctctgcgaatactttggggggttaccatcctttagaggacgaattccagtaaccttcaaatcgctgaatgtactagatgcggaaaatccaattgatatggggaaaaatgttgatggatcagctggggggacaacaaaatccatggagccacttgggtttgact

SEQ ID NO: 420992 - DNA, 488 bp, Oryza sativa
ggtttatccagttgcagattgtaaaccaggatgtacctggacttagcttcaaaacacaccccaatatcaacaaagatttgtttaacagtcaacaagttgtgggggcaaaagatccaaacaggccattcccaagtggtcaaaatgaaactcctctggttaagtggagaattcatgggatggatgagtcatcgttacctctatcagtcaactgctggccatcggtatctggaaatgaaacttatgtcaacattgaatatgaggctgctgagatgtttgacctgcacaatgttgtcatatctataccattgcctgcacttcgggaggctccgagtgttagacagattgatggagagtggaggtatgattcgagaaactccgtgttggaatggtccattcttttatcgatcagtcaaaccacagtggcttcatggaatttgttgtccccccagctgatccatcaacatttttccccatatcaattggatttt

SEQ ID NO: 420993 - DNA, 487 bp, Oryza sativa
ctgcctcccatgtatcattgttattttatatgctgtgtctgatcaggagggagcatcggaagatgatattcgccaaattccaagatacaaatttcggaggatggatgagcctgaaaagcaatctgtcaacatgactggatcttccggtggaataatgatagaatgtggcaccaaccaacctattgaaaaagtacttgcagctgaagatgcggagtgctgcatttgcctgtcagcgtatgatgatggtgcagagctgcgtgagctcccttgtgggcaccatttccactgtgtctgcattgataaatggctgcacatcaatgcgacttgtcccctatgcaagttcaatgttcgaaaaaacagtagcagcagtggtagtgaagaagtataaatctccacgagagaatccaagcataatcggtatttagcttctcgtcccacgcgacttctgtcacaactgtggtacttttcatgtcatatcccctagagt

SEQ ID NO: 420994 - DNA, 487 bp, Oryza sativa
agggaaaagctcatggaatccctttattatttagggggtcaaaggaaacagcagcacaccagtctcgggtctagtattagcaaaatgaaagttacagcattgccgcagcggttgcgaaagaaaatcagcacattctggttccccagtgtgccagggagctcgaagcaaactgttaaactcgttcaatccagcgtcaagagtgagtaggtcagaggagatctcattttttccaccgccgagcttgctatcttgagtccacaacagggcccttaggaagcgcagacaggggtacgagagcgtgagatttttgggggctatcggagccagggatcttttcctttggccggctcaacaccttcctgacctcgttagctagctcgatgattgaatcatcttcatggcatatgttggacaatgcctttttcattgagaaccggtaatccctgtaattcccattggggccattggcttgagcaatttgccttgc

SEQ ID NO: 420995 - DNA, 511 bp, Oryza sativa
gtattatactagcttgcttgttcaattcaatcgagcagtagctaattgcatagtgatcgatcgatctgtatagatggtggtggccggcaagaagcagggacggcattctttttctgcatcatcatcgtcgtcttcgtcttcttattgttcagtagtgcagctgggtcatcatcagcgcccacagggtgaggaccctctcatcggcatcaaagcagcagcagcaggaggaggaggaataatgagaaagggcccgtggacggagcaggaggacgtgcagttggtttggttcgtgcggctgctgggcgaacggcggtgggatttcttagcaaaggtgtcaggtttgcgcggcggcgggtgatgagcatatgcgtgcgtgcatctaatctatcgattaattgttgatgatgtcgatcagatggatggatgcatgcctatgccgtacatagtagatttgatgatagtaactgacataaatataatgtatgcgtgcgatcaacgcttggtgttggat

SEQ ID NO: 420996 - DNA, 453 bp, Oryza sativa
cgacaaatgtactgcaaattttcactgagggggcacggtaacaatacatgaacgggtgaacccgataaagtatatatgtacatcgatgaaggggcaaacaacaaaaaaaaaaaaaacgactccctacaaaattgctggctgtgtgagaacagccgtcataaggtatttacacagcaggaaacaaaaagcctgcccattatcatcatcatctactcattaggttccagccatttcttcaggttgcaaagggcctctgaagacaggctcttgcaacatctaaccctcctgatcggcgcctgctccgaagacggtgaaccaccaccgagctcagatccaaagcagatgactatcaccgtgaggttgtcaaaggtctggagcctcttcgcctccatggcaagctccctcgcgcacctttgggggtcatcgtgtcgtcggagccccttgcggactatg

SEQ ID NO: 420997 - DNA, 501 bp, Oryza sativa
aagtatgaataagaagctggcatatacttcggctagtagcattgcaacgcaaacagtatgacaaggtaccacgcattgtttaagagctaagacaaagacaaaactgatgcatccaacgtaccaaaaagaaagcgaacagcagcagtcagatagctatgagaagagaactaggagagggataactagaagggacagaatggcatccatgggtccatgacgtttagtcgacctcctccatcttgctctcgccggcgtcgtcctccagcggcggcatgtcggcgtcagcctcggcggactcgtcctcgtcgatgctcaggccgagcttgagcatgcggtggatcctggtgccgaaggtgttggggtcctccaagctgaaaccggaggtcagcagggcagtctcgaagagcagcattaccaggtccttcacggacttgtcattcttgtccgcatcggcacgcttgcggagctcgtccatgatggcatttctccgggtgatctcca

SEQ ID NO: 420998 - DNA, 498 bp, Oryza sativa
ataggatcaaaacatttctattaccacaactttttaaggatggaattgagtagcaatactttcaccccaaaatacagtttagcgacaatatcttagaaaagccgcttgctttgccgccatggctggcaagctgagcagagcagctaacacaaagaacacgagatcactataaaccaaacggcaacgaacgaagaaaatacagggtcttttttgtctgaagatacacgaagcggttcgttttcttttatttttagtctcctctcctcctcgatgatgggtgtatggcaatggcaatggcgatgggatcttggcttagttgatgggaaggggctcgccgttccactccttgaggcagtcgagcatggggtcgatgagcttgccctggctgatgccgaggaacaccttgttgcactcctcgccgggggacttgagcttctcgccggtgaggaatacgcagccgagctcctcgcggacgaagcggtagagcgggaacgaccg

SEQ ID NO: 420999 - DNA, 488 bp, Oryza sativa
tcgcttccttctcctccggctcttcttcagtatcgaatcctctcttctcctcgtgcccaccaccaccaccgtagcaatggcgggcaacgggccgatcaacaaggaggacccgctcaactggggcgcggcggcggccgagatggccggcagccacctcgacgaggtgaagcgcatggtggcgcagttccgcgagccgctggtcaagatccagggcgccaccctccgcgtcggccaggtggccgccgtcgcccaggccaaggacgccgccggcgtcgccgtcgagctcgacgaggaggcccgcccccgcgtcaaggccagcagcgaggtggatcctcaactgcatcgcccacggcggcgacatctatcggcgtcaccaccggcttcggcggcacctcccaccgccgcaccaaggacggccccgccctccaagtcgagctcctcaagcatctcaacgccggaatcttcggcactggctccgatggccacac

SEQ ID NO: 421000 - DNA, 502 bp, Oryza sativa
tatttgttggtcacaagcactggcagtgtgaagataggggatttcagtgttagtcagatttttgaggatgatgatgatctgctttggaggtctccaggtactcctgttttcactgcaccagaatgctgtcaaggttcagcctaccatggtcgggcagctgatacatgggcagttggcgttactctgtattgtatgattactggtcactatccatttctaggagataccttacaggaaacttatgataagattgtcaatgatccggtgcaaatacctgacaacatgaacccccaacttgctgatttgctggaaaggcttctctgcaaagatccagcaaatcgtatcaccctgcaggctgtaggtgagcatccttgggttgctggggaccaggggccagttgttgaatacttctgtagatgtgggtttggccgaagaaagagagatgatcttaagggagaagtacaatagcaaaggcttgttcacagtttatcatccgatggtt

SEQ ID NO: 421001 - DNA, 392 bp, Oryza sativa
tttatctgaggccgttggcttggaaatgagaggaatgggccaagatactgcatatcatcctggtctttatttaacagctgctcaaagagaggcagttgaggcactgattcaagaactcccgaagttcagactgaaagctgttcctacagactgcagtgagtgtccaatctgccttgaagaattccatgttggcaacgaggtccgtgggctcccgtgcgcgcacaatttccatgtggagtgcatcgaccagtggctccggctgaacgtcaagtgcccccgttgccggtgctccgtcttccccaacctcgacctgagcgcgctcaacaacctccggccatcctccgagccggaccggtcgtcggccagcgaggtgacagcggcgacgatggcgc

SEQ ID NO: 421002 - DNA, 239 bp, Oryza sativa
  unsure (1)..(239): unsure at all n locations
gtttgtgttctgtgccaccattggatgctggaattgagccatggctgccaagctagctcgcctccacagtctccgcgaacgcctcggtgccaccttctcgtctcatcccaatgagttgattgcactcttgtctaggtatgttaaccagggaaagggaatgctccagcgtcaccagctgcttgcggagttcgatgccttgatcgaagctgtctaanagaaatatgcggcctttgaagaca

SEQ ID NO: 421003 - DNA, 472 bp, Oryza sativa
gtggccctcgaaccagatgttctgtctgcattgcagttgcctgaatacagataccacttggaggccttactctatgcacatgccgttccaggcaccatcttgtcaagcaacattaccgatggcgaaactgttgattccttgaatgggccattgacgtttactgtcaatgaccagggcgtctttgtcagcggtggtggcttcaacctcagtcaagtggttgaggctgatgacgaggcatccaacggtgttgtccacgttgttgatcaagtcttccttcccaccaacctcgtgcaaaccacatggcaaaaccttctagacgtgcctgaaggatttgatgttctcaaggaattattggaagcgacaaatttgaatgtggccttggaatcgtcggaacctcttaccatttttgcccccagcgatgatgtctttgctggagtcagccaagaaacccttgacgcactcaacttgactg

SEQ ID NO: 421004 - DNA, 482 bp, Oryza sativa
agtagttcgagaacgagacgtggcaatggcgggagacggcgagctgaagctactggggatgtggaccagcgcgttcgtgctcagggtgcgcttcgtcctcaacctcaagtcactgccgtacgagttcgtggaggagaacctgggcgacaagagcgacctcctcctcgcctccaacccggtcaacaagaccgttcccgtcctcctccacgccggccgccccgtcaacgagtcgcaggtcatcctgcagtacatcgacgaggcctggcccgaccgcccccccgtcgtgctgccctccgacccctacgagcgcgccgtggcgcggttctgggcggcatacgtcgacgacaaggtgcggctggcgtggctggggatcctgttccggagcgagacggaagaagagagggcggcggcggtggcgcatgccgacgcggcgctggagacgcttgagggcgcgctctgtgagtgctccggggggaagcccc

SEQ ID NO: 421005 - DNA, 515 bp, Oryza sativa
ctcagaagtcagaactactcagaatacaggtttaagaattgtgtaactatttattactcatcacttaggtacttcctccattttatattataagactttctagcattgtctacattcatatgtatattaatgaatctagacatatatgtatgcgtagattcattaacatatatatatatgctagaaagtcttataacctgaaacggatggagtaattacctcaggttggtacacatatgtacatgcacgaatttcgatgcacaaacacaagcagagctgggtggttgaccgttgacacagccgaagctaactctctacgtgttacaccatttctctcttcttgaacaggttgatcgatctcacttgccggcggccatggcgtcgtagaagcggctcctcctgacctcctcgggcgggatgaaggcgtcggggccgagcccgggcacgttgaacgccacgtcgtcgatggtccacgactcctccatcgcgttacgacgcgggcggcgcgaacgccg

SEQ ID NO: 421006 - DNA, 480 bp, Oryza sativa
actgacaaatcatgtttatttatgtaaccctgtgtagtagaattttcaataagttacacaagaaaatccgacaaatataatgtacacctgtgtaaaacaacatgcaggaaatggcttccattgacagcatggcctgcactcactcaaatgcacaagtactgtactgaaactactgaaagttttctaacgcctctctttggggaagcccaggagggcaagaatcagtgcaaagaagctgccgtttatcagtcctctcaggatcttctgcttctcaatcgtgtaaggtgggtacctagcagttgcctcccctccgaagccgcggatcaggacggccttcttgtgggtgaaacaatcgaagctgaatttgccatggtaggagccgatcccggtgtcgccgactccgccaaatggcaggtgcggattggcgagatgcagggcaacattatttacaagcattcctcctgctgggacattggacac

SEQ ID NO: 421007 - DNA, 393 bp, Oryza sativa
ctcgccaagcctcgcattttgttttacctccacgagatatcattggcaaaggcagcctgcacatttgccttgaaggggttgaagaattggatgaaacctgagaaggtacctgccgccctcacgacattcccatcaactgcacaaattgtgtcagagcctcttggtgtcgtcctagtcatctcagcatggaactaccctttcttgctctccatcgacccagtcataggagcaattgctgctgggaatgccgttgtgctgaagccatcagaaattgcaccagccacctcagcattgttcgccaagctgctacctgaatacgttgatagcttttgcataaaagtggtggagggaggcgttccagaaacaaccgcactcttagaacaaaagtgggat

SEQ ID NO: 421008 - DNA, 338 bp, Oryza sativa
gtgccgtcagcctccaacacaagagctggtggccaaggatctgcacggtgtggaatggcgctttcgtcacatattcagaggtcaaccacgaagacaccttttgcagagtggctggagtgtgtttgttagtgccaaacggcttgttgctggggatgcctttatctttctcagaggtgagaacggggaactgcgtgttggagtcaggcgtgcaatgaggcagcaaactaatgttccatcttcagtgatatcaagccacagcatgcatcttgggggtctagccacagcatggcatgctgattacacagggaccatgttcactgtctactacaagcctaggc

SEQ ID NO: 421009 - DNA, 506 bp, Oryza sativa
ctagaccgacacgctggacccggcctacgccgcggcgctcgaggagcagtgccccatcgtcggcgacgacgaggcgctcgcctcgctggacgacacgccgaccaccgtggacaccgactactaccagggcctcacgcagggccgcgcgctgctgcacacggaccagcagctgtaccagggcggcggcggcggcgacagcgacgagctggtcaagtactacggcgagaacccggacaagttctgggaggacttcggcgccgccatggtgaagatgggcaacatcagcccgctcaccggcgacgacggcgagatcagggagaactgccgggttgttaaccagtgagtgatcgatcgatcctggtgtggtcaagcgacacacgacacgagtcatcgccacgaatttgcatggcacctgtggtagctggtggattcttgaagggtgtgcttgcatgtacttctgattttgtgatggcctgctcctgtatttgaattgtttgaaaaatatt

SEQ ID NO: 421010 - DNA, 320 bp, Oryza sativa
agggatcacttattcattatagttcttccatgctgctctaccacagcaaaacgtttcagacaccatcaaaccagacttaaggatacacattacaggtaaatagtacacaatgaaacgggacacgaccaaggaccagaccagacaaccatagctccattggggaagacaaataggcagacttgtgaaccctagaacagcagcagctccatggctgaggacttactggccaccacggaggcggagcaccaggttggagtgtggacttccttctggatgttggaaatcccgcaggggtgcggccatcctcaagctgcttacca

SEQ ID NO: 421011 - DNA, 299 bp, Oryza sativa
ctgtatccccaaaatcgcagagaaaaaaaaatctcccctcgaagcgaagcgtcgaatcgccttctcaagatgcagatctttgtgaagaccctcaccggcaagaccatcaccctcgaggttgagtcctcggacaccattgacaatgtcaaggccaagatccaggacaaggagggcatccccccggaccagcagcgtctcatctttgctggcaagcagcttgaggatggccgcaccctggccgactacaacatccagaaggagtccacccttcaccttgtgctcaggctcagggaggcatg

SEQ ID NO: 421012 - DNA, 146 bp, Oryza sativa
gatgcaaagctatatatagctgaaggcgtgcaaccaagaacatgcatgcctccgcacacacaagtaccatttctcacaccaaacatactacgtacacatagatataattacagcaacatcagatatatataaacgcgcttataatt

SEQ ID NO: 421013 - DNA, 146 bp, Oryza sativa
aattataagcgcgtttatatttttctgatgttgctgtaattatatctatgtgtacgtagtatgtttggtgtgagaaatggtacttgtgtgtgcggaggcatgcatgttcttggttgcacgccttcagctatatatagctttgcatc

SEQ ID NO: 421014 - DNA, 447 bp, Oryza sativa
acaataaaccaagtttaagaaccttgatgtatgctttgcaagtttgtggatctaagtgaaacctcctgacaagtttaaggactgccggtgcattttactcaaaaaagaatgtgcagcaaaatcaacagcatgtgattagcttccattaactcggaaaggccacataatattctccatgcgactgcaagaatattgtcgcctcgatattcatgtccaacaaaatcaacagccatgtgattagtacagtatgagcatgtggcttttcaacgagctcagcattttccatgatatttccatctagtgctccttgtatatttatgattcaatcgtaatcttcagaatgtttggacctatatgatgttagactgactgactctcctccagaaggtcagaaactccccaggtgatctgatatactcacaacttggacgtggcattcagcaaaat

SEQ ID NO: 421015 - DNA, 365 bp, Oryza sativa
aacatacgcaaactgatattatcacaatgttagccgatgacaatggaaagagtaatctaggtacaagcggatcattgacggtggagacaagacattggttggaccacaacacccaccagtggcgccaacaaggagcgctatccgttataggacgagagaaaaagtaaaacatcacgatgtgaagtgaaactgaataattttagtagacgatgatgatgatggataggctccttaggacgcccgccgcccttagcgtcttgctgctcccatcttgtccactggaagggtcactcggcatcggattcatcctctttcgtgcccttgtcggaatcctcattattgacctcggacttggacttgcagat

SEQ ID NO: 421016 - DNA, 291 bp, Oryza sativa
tctcttctcttctctggtggtgtgggtgtggccctgtctcccctctccttcctcctctcctttcccctcctctcttgccccctctcacaagagagagagcgccagactctccccaggcgaggattcagccatgaagggggccaaatccaagggcgccgccaagcccgacgccaagttggctgtgaagagtaagggcgcggagaagcccgccgcccagggcaggaaggggaaggccctgtaggaccccaacacggcctagaaggctcccttcggtttccttggttttatgga

SEQ ID NO: 421017 - DNA, 418 bp, Oryza sativa
agcgcggcaataaaacattgcattgaattctgaacgataaacaccaggaaccggcgtttatttgaggcaagcactgcccaaaatctcgcaaaagtactgaaaccttagacatagtacacatccatggcaaacatggatgccaaatgacaactacagaaaattatcaaattcgaatgcagctgacggcttctcctgctgaagatgcatattttcccctccattacttggatgtgctctctccatcgacagccaatgggacggcgctggccaggctgcggtatttcagagcatagaacatctcaatgtaacggcgagtctcgcgcctctcaaggttgcttacgtacttccagaatccatatacaccagtcaaggtcatcagcctctcagagtacagcttccaggtgtacttctcgtaaat

SEQ ID NO: 421018 - DNA, 372 bp, Oryza sativa
ctcgtctctgaccaccattggttcctgaaattgagtcatggctgccaagctagctcgcctccacagtctccgcgaacgcctcggtgccaccttctcgtctcatcccaatgagttgattgcactcttctctaggtatgttaaccagggaaagggaatgctccagcgtcaccagctgcttgcggagttcgatgccttgatcgaagctgacaaagagaaatatgctccctttgaagacattctccgggctgctcaggaagccattgtgctgccgccctgggttgcactggccatcaagccaaggcctggtgtctgggactacattccggtgaatgtaagtgagttggcagtggaagaagctgagtgttctgagta

SEQ ID NO: 421019 - DNA, 437 bp, Oryza sativa
cctaatccatcccatccggcctcggcctcggcctcggatttcgcctcctcgcccgccgcttccgccgcgagcagaggtggcgcccggcgtcctcctgcttccaccgcatcgtcgctcgccggcagaactaagagagcatggtggcgatggcgcggtggccgtggagggtgctgctgccgctgcttctccttcactcctcccccgtcttcttcgtcttcgctcaagaaggccaagataatgatccctctactttgttcaaacgagccttagaaatgatgaacctaaggaaatatgatggatcacttggtctgctaaatgctgtgctggaggttgaaccaaatcactcagaagcttacaggcagcgtgcatctgtgcttcgtcacaagtgcaggtacaaggaagcggagggtgactatagcaaatacctggagctaaaa

SEQ ID NO: 421020 - DNA, 541 bp, Oryza sativa
ctgtcccagctccacgctcatatcctcaagcaggccggcgacatgcccgcgttcagctccatggcggacaccacgcagatgcacatgccgacctcgccgatggtgggcggcccgaacaccgcgttcgggctggaccactccatggcgaaggcgatcatgagctcccgcgcctcggcgttcgccaagcgcagccagagcttcatcgaccgcggaggccgcgccccggcggcgcgttcgctcatgtcgccggcgacgaccggcgcgccgtccattctctcggactggggctcgccggacggcaagctggactggggcgtccagggcgacgagctgcacaagctccgcaagtcggcgtcgttcgcgttccgcggccaatccgccatgccggtggcgacgcacgccgcggcggcggagccggacgtgtcatgggtgaactcttttgtcaaggacggccacgccgccggcgacatattcgtgcagtggccggagcaggagcagatggtggcatgatcatcagaggcttatagccacctagctaacc

SEQ ID NO: 421021 - DNA, 408 bp, Oryza sativa
caccaaaatgctggggccagtttttataccaaaaaagaaatacattttggcctttttttaacatacaacacacacacacatttcagctttcctcagggggacatcttctcttctatgcaaccgtggaactgaatgaacaaatgatctgttgcagggcacaccatggaacctgacaacttgaagctcaccgaatttctgggtttcactcatcatgcataagccagcaaagtagccaacacaatcgaaaataccaaaaccgagagtgtcaatggttgttttgtcagaggacttgcattaggcaaccatggatttgcatccgggggtggcatgacacaattatcaccattgaagtacacgcggtgtgggaaggcccatcccttgtcaaaggtgaagtccttggaatcctta

SEQ ID NO: 421022 - DNA, 453 bp, Oryza sativa
cgcggcgcggcggaccatctcaatttgcctgccgctcctcgtcttccggtggggcggaggagggggacgccgggcgggcgggcgctcgcattccggagcggggagcgcgagctcgatcgggcggggatatggcggtggggggagccgggagctccagatccgtggcgccgtgctgctgctgcgccgtgctgctcgcggcggcgctgctcttctccgcgccggccaccacagaggcttatgatgcgctggatccaaatggaaacatcacgataaaatgggacgttatgtcgtggactcctgatggctatgttgctgggggcacgatgttcaactatcaacaatttcggcacattcaggcacctgggtggcagctgtggtggacatgggcaaagaaggaggtcatttggtcgatggttggagcacagaccactgagcagggcgattgcttaaagt

SEQ ID NO: 421023 - DNA, 258 bp, Oryza sativa
tcagattctcagagtgagtgttcgtgtgttgggcgatcagggcccactgcccagttcgatcgatccgtgttgatctttgaaagaaagatgtcgtgctgctgatgaaactgcggctgcggatccggctgccagtgcggcagcggctgcggaggatgcaagatgtacccggagatggctgaggaggtgaccactacccagactgtcatcatgggtgttgcaccgtccacgggtcatgccgaggggttaggaggccggcgc

SEQ ID NO: 421024 - DNA, 446 bp, Oryza sativa
ctcaagcagcattacacgtgctgacacatccgcagtctatgatgtccaaacaagctgttgctggtagagcgcaccacagctgctgcttctgtgcggctcatgggcacatagcagacttaggcagcaaaccaagcctgctgctgcatgctgctacataccagctacttgtgctgcctgtgaggcagcgagcgctctgacagtgctgtcagggcgtcctgcttacttcttgcccttgcccttgccgcccttggcctgctcctccaccaggtaggtggtggtgcacttgccgcagtacacgcggtcaaagtgggtggccatgaagatgccagggccgcactgggggcactgcttccgcaggcgggacaccttgccggagtcgtccaccttggagaacttgggcacccggagcttgacctttttgtgcttgtgcttctgctttttgggct

SEQ ID NO: 421025 - DNA, 404 bp, Oryza sativa
tttacggcacaggcgaggcctctgccgagtatcgtggcagccatgcagattttcgtgaagacaggtcagacccacctcttcgaggtgggttcaagcaccactgttgctgatgtgaaggagctcgtgcagtctcgcgagggtgtcgatgcctctgagctgtatgccgtgttcaacggcaagcctttggctgacagcgagctgctgagcctggctggtgttgaggaggagcagaccctgtacatcctgggtcgcctgctgggtggtggtaagaagcgtaagaagaagacctacaccaagcccaagaagcagaagcacaagcacaagaaggtcaagcttcgggtgctcaagttctacaaggtggacgactccggcaaggtgtcccgcctgcggaagcagtgccccca

SEQ ID NO: 421026 - DNA, 515 bp, Oryza sativa
ctacccaatagtgaatataccacaaagctatttatagtctaatggttacaggccttgcaacctaagctaactgattgccttattttccatctgtcccactaactgagcatgcaatcttacagaaatgcaatggcaaaagaaaaaaaaggagcgaaaatagatatcatctgtctcatgccttctgttctgtggtcaaatcaccccatctgacgttgtactttgctgcaaggtagtgagcccctacaggaccgcggcttccataagggtatagctcaggggctatccgcttctcttccagctccttgagtaagggagtgaagagctcccatgcggcatccaactcatcagaacggataaaaagccttcgctctccttcaatggcatcaagtaagagcctctcataagcatctggtatctccttggagtaccttgctgcatagtgaagattcaaattacttctatctagtctcataccaagaccaggaattttgttgttaatcttcaagtagatagct

SEQ ID NO: 421027 - DNA, 366 bp, Oryza sativa
gtgccatccaagtatcctatcgaacgcaagatggctctggttgctcaggcctccaccatcgcgcagttcgccggagtggacgcctacggcctgatcaagatgatcgccgaggcggcgcaacagggcgacgtgcctgcagctcgcgcggcgcctcaagatgatcggagatcttctcaagcagctccacggtgcgcagctgatgcagcagccggagacgaggaacccggtggagcagctggaggagacgctccggcgagcgtacctgctcgtccggtcatgccagggccggagctacgtgtaccgctgcttcatgggaggccggcacgccgacgagctaggggaagtgcagagtgagatcgccttcta

SEQ ID NO: 421028 - DNA, 542 bp, Oryza sativa
gatacaccaaaagttgtttttgcttgcaatatgcattgagagaaagaaatcattgagtcgcgagaagggtactgatcatgcacatgaagatggtatttcaaatagcgtggcacaaaataagactcgtaaaggatcagcaggtgttgtcccctcaatgatgcttctgaatacatttcaagaaatgcatgcaccatatactcaggatgcatttttgatgactgaagatatgcatgaagaaaggctccatgctgctgaagcttttggcaatgctgttggattatctggtcaattggaacgagatgtattatcttctgatatgtctgcttttaaagctgcaaatccagatgctgtttttgaagattttattcggtggcactctcctggtgactgggtgagtgaggacagagcagagggttcttcaggttggccacccaaaggaaggctttctcagcgtatgtctgaacatgggaatatgtggcgtaaaatctggaatgacgctcctgctttacctgtctctgaacagaaatatctgcttgatccta

SEQ ID NO: 421029 - DNA, 527 bp, Oryza sativa
ctgtttaggaatgggctgtcaaaacaaatgaaacaagtttcctttgtcgacggactctctgatgatgctcaagtttcgagggaagagaggtcattccggttatggattaatagccttggaatttctacatacatcaacaatgtgtttgaggatcttagaaatggatgggtgcttcttgaggtgattgacaagattgctcctggctcagttaattggaaaatggcaaataggcccccaataaaattaccattcaggaaagtggaaaattgcaatcaagttctgaagattgggaaagaactaaaattttccttggtgaatattgctggtaatgatattgtgcaaggaaacaagaaactgatattagcttttctgtggcaattgatgaggtacaatatccttcaattgttaaagaatctgagattccattcaaatggtaaagagatcacagataacgacatactgatttgggcatacaaaaaagtaaaggattctggaaagcattctcgaatggagaagttcaggataga

SEQ ID NO: 421030 - DNA, 392 bp, Oryza sativa
aattaattacatatttttctgatctgtaaacttcccggtgcaacgcacgggcacttttgctaaaccaaacaacacttttggtcaatatacacactctgtaatcacccggtgcaacgcacgggcactttgctagtatatatatatatgtaaccagtaatcaacacgtaggacacaggttttcttgataatttattaagcaagtagcttagtaggagtcgacagcatcaacgaccatagagattgcagcggttttcttgatggggtacatgccgtacagggcgatgccacatagcccagacttcgctgcaatgtcacgcttcatccggatgtaacccattttaccccaccctgttccccacgagttcttaacgatccagtacttggtgttgtcc

SEQ ID NO: 421031 - DNA, 527 bp, Oryza sativa
tttgtaaatagctaataattaagagacgatacaggcgctaacacacatggagatgaaaaatccattggcagtagggctgttggctctgctggtggcagccatggcggtgacggcggcggcgcacgacgacgacgacgtgccattcaccgacgaggacctggagtcggagcagagcatgtggaatctgtacgataggtggcgcgccgtgtacgcctcgtcgtcgtcgcacctcggcggcgacatcgagagcaggttcgaggcgttcaaggcgaacgccaggtatgtcagcgagttcaacaagaaggaaggtatgacctacgagctcgggctcaacaagttcgccgacatgacgctcgaggagttcgtcgcatagtacgccggcgccaaggttgacgccgccgccgccttggcttccgttccggaggccgaggaggaggtggacggcgatgtccctgccgcttgagactggagacagcacggagttgtcactcctgtcaaggatcaaggctcgtgcgggagcttgctgg

SEQ ID NO: 421032 - DNA, 388 bp, Oryza sativa
gggatacaaacaattaattaatgttatggtagctgaatgcaggcaagtttttacaggtcatcccaactccctcttacaacaccatatacacaataatttcgacaaaatgatgaggttattgattgatttcatctttttttccttttaatatatgatcatcccttgctcctcacagagggtgtagcagcaggtaatacctgccaatgtctgttgcaaggtgctacatttaatttggagtgcaatctgatcatggaccaattgtgccggtgtcgaagtacagtgtcgtcccggaggaggatccttcggtgaccccctccatgagcgcgaaccgcatgttctccgatggcttccagtgcctcttcctttggttgatgaaccagttgttgat

SEQ ID NO: 421033 - DNA, 489 bp, Oryza sativa
ggttcaaggaagaactcacgcggccgttcgacgaggcggcctccttcctcaccggcatccacacccagctcgcctccctctgtggcggcgcgccgccgcccaccgacaactccgatgaaatggtggggtcttcagaggatgagccgtgctcaggagacgccgatgcagcagattttgggcaagaacacagctcccgcttggctgaccatgagctcaaagagatgttgctcaagaagtacagtggctgcctcagccgcctccggtccgagttcttgaagaagaggaagaaagggaaactaccgaaagacgcgcgatcggcacttatggactggtggaacacacattaccgttggccttaccccacggaagaggataaggtgaggctggccgcgatgactggcctcgacccgaagcagatcaacaactggttcatcaaccagaggaagaggcactggatgccatcggaggacatgcggttcgcgctcatga

SEQ ID NO: 421034 - DNA, 444 bp, Oryza sativa
aggttcaaatccaacttattcataaagcatactgctgtcccacaggaaactgtttcataaaactaacatatcatacggactcgatggtccattaaaccagacacaagtagacatcagcaccacaaatacttgacgaacagaggctcgggatgaccaggcacatcggcagctccaccaaactggctgattactgaccaccacggaggcggagcaccaggtggagggtggactccttctggatgttgtagtcggcgagggtgcgtccatcctccagctgcttgccagcgaagatcagacgctgctggtctgggggaatcccctccttgtcctggatcttggccttcacattatcaatggtgtcggagctctcaacctccaaagtgatggtcttcccagtcaaggtcttcacgaagatctgcataccaccacggagacgaagcacca

SEQ ID NO: 421035 - DNA, 519 bp, Oryza sativa
ttcacgcgtccgcccacgcgtccgcggacgcgtgggaaaaatttctccccaatctcgcgaggctctcgtcgtcgaatcgaatcctctcgcgtcctcaagatgcagatctttgtgaagacattgaccggcaagactatcaccctcgaggtggagtcctctgacaccatcgataatgtcaaggctaagatccaagataaggagggcatccccccggaccagcagcgtctcatcttcgctggcaagcagctggaggatggcaggacccttgctgactacaacatccagaaggagtcgacccttcaccttgtcctccgcctccgtggtggcatgcagatctttgtcaagactctgaccggcaagactatcacccttgaggtggagtcttctgacaccatcgacaacgtcaaggccaagatccaggacaaagagggcatccccccagaccagcagcgtctcatcttcgccggcaagcagctggaggatggcaggacccttgctgactacaacatccagaaggag

SEQ ID NO: 421036 - DNA, 439 bp, Oryza sativa
acgcaatatgagcacaactatataacttaataagcacattggggtttccaatttgtcctgacacatctggacaacagacagctgctcattaagtcaaaccccggtgaagttgttaagcctgaccaattcaaggcaataaacgatgagggaatgccaatgtaccagaggcctttcatgaaggggaagctctacattcatttcacgggggagttccctgattccctggcgcctgaacaatgcaaggctctcgaggctgggcttccaccgaagcctgcatcccagctgacagaaatggagatagatgaatgcgaggagaccacgatgcacgatgtcaacaacattgaggaagagatgcgcaggaaagcccaagctgctcaggaggcgtatgatgaggacgatgagatgcctggaggtgcccagagagttcagtgcgcgcaac

SEQ ID NO: 421037 - DNA, 485 bp, Oryza sativa
gaacagcaaaggaagaaatgcatatttagatgcacaactctacgagtctcacggtgcaagcatagccatctgaccacaaaaaatgttgagccactgcacacggtgcagtgtcagttgtagcattcacaacataccgagtttctttttaggaggtaaaactctacgagtctcacagcatagtaaaacgtagccagctattactagatacgagtagcattttttaagtcgcaaacaaaagggatacagtcccggcttaaggggtgtaaaatcagcttcactatcttcatgttcgccgcaacgggaaacagagcacaatcatctttgggtccaaaaatttacggcaaacctttgcgacgacgttgatttgtgaaccaatgacgagtttcctagatgacatactctgcttactgttgcgcgcactgaactctctgggcacctccaggcatctcatcgtcctcatcatacgcctcctgagcagcttgggc

SEQ ID NO: 421038 - DNA, 342 bp, Oryza sativa
ggaaacaaggatgctacaatatattattgcagaaacggcaccaaggccgtttctattattcataggtaacatcccagcaacaagaggagacagagcaccaaccacacaccacattccactgaactcacccccaactaaatcaaactagaaaactcccaaattcaatcgaccttactttcttaaggaaaaagagcagtgcctaggaatgcaaagcatcctgaaatatctctcttctcttttcatctctgaaaccagagaatggaaacaaagcaaagaaactccaatgctctcctttttcaaaggcttaacctgagatgttggccagcttacttgttcgacggg

SEQ ID NO: 421039 - DNA, 414 bp, Oryza sativa
ttgttcgttttgaagtctggccgtacctggaaacattcactgatgatgtcgcgcacgaaattgctggagagctccaggccaatcctgacttgatcatcggaaactacagtgacggaaaccttgttgcatgcttgcttgcacacaagatgggtgttacccattgtaccattgcccatgcgcttgagaaaaccaagtaccccaactctgacctctactggaagaagtttgaggatcactaccacttctcatgccagttcacaactgacttgattgcgatgaaccacgctgacttcatcatcaccagtaccttccaagagattgccggaaacaaggacactgttggtcagtatgagtctcacatggcattcaccatgcctggtctgtaccgtgttgtccacggatttgatgtttttg

SEQ ID NO: 421040 - DNA, 541 bp, Oryza sativa
ctctgtcatggggtcctttaagaagatgaagcaactaaacacagagattcaacttttgaagacactcaagcataagaacattgagaaaatgtttgcttcatgggttgatggggagaagaagactgttaacataatcacagagttgttcacatccgggagcttgacacagtaccgcagaaagcacaagaaagtgaatatgaaggctatgaaacgatgggcaatacagatattaacagggctagaatatctgcacagtcagaagccagcaattatacacagggatttaaaatgtgacaatatattcataaatggaaatcatgggaaagtgaagattggtgattttggtttggcaacattcatgcagcaacagaaaaaaagtataaaaggcaccttagaatttatggcaccagagctgttaactgggcattacaatgaattggttgatatatattcatttgggatgtgcatgcttgaaatggtgacatgcgaatacccatacagtgaatgtaaggcatggccatatattcaaaaagattgatga

SEQ ID NO: 421041 - DNA, 473 bp, Oryza sativa
ttatagtctcgtcgtcctcgcatctccactcgccagtgggcatgattaagatcggaatcaacggcttcggaaggatcgggaggctcgtggccagggtggccctccagagcgaggatgtcgagctcgtcgccgtcaacgaccccttcatcaccaccgactacatgacctacatgttcaagtacgataccgtgcacggccaatggaagcacagcgacatcaagatcaaggactccaagactctgctcttgggcgagaagccggtcaccgttttcggcatcaggaaccctgacgagattccgtgggctgaggctggtgctgagtatgtcgtggagtccaccggtgtcttcacttgacaggagtaggctgctgctcacttgaagggtggtgccaagaaggttgttatctctgcccctagcaaagatgctccgaggttgtctgctgtgtcaacgaggaccagctcaccgcagatgttg

SEQ ID NO: 421042 - DNA, 514 bp, Oryza sativa
ttctacgtcgtggctgctgctggcgtgggtgagcacggtggcggggaacctgtcgctgctggggtcggcggcgaacctgatagtgtgcgagcaggcgaggagggcgcccaggaacgcctacgacctcaccttctggcagcacatcgtcttcggcgtcccatccaccctcatcgtcaccgccgtcggcatacccctcatcggcaagatctgatctcatctcatcgacccatccaaattaattaattatgagatcgacaaacatccaagcttgctaggctcgtcgtcgtcgtcgtcgaccaccgtaccatatatatgcatgcatgccacgcacgtatatatatgctcctcaacctcaagtcaattaattaagagaatggatgaatgaatcaatgttgtgtatgatttcctttttgtttttgttttacccaccgtatatgtgctgtgtggcgtatggccggcgagcttgaaattgaattggccttgcttgcatgcatgcatggtgatcagatcagct

SEQ ID NO: 421043 - DNA, 256 bp, Oryza sativa
ttctcggcgcattggcggcgccaccgcccggccaccattattcgccgcataacgatgatctcgcgagcagcggcggcaccaacgacgacggcgatggcggcgcggccgtggtggtcttcgacgacaccgagggcgccaacgaccgcctcagctgcgagtcggggtacttcgatgacgccaggcatgctaactagcgccgccgcacccatcccgacgccgtcattatcgttgcggatgtaacttgtcactctgaatg

SEQ ID NO: 421044 - DNA, 470 bp, Oryza sativa
cgtacaaatacaaacaaacctttactacgtacacaaaaataaggtatcttcaagagagaaatcaaaactagaggtacaatcattaataccgggaattcggttagcagaaaattcgaaacaaaaagctttcaaactggaagggtcaaacattgcttgttgcccggtgaaacgcgaacacaacaatggcattgcatacattagagaatgcctctgatgcggatgccatcgtactgaaaaaacttgaccgactgagacgatcctacactgcacactacctggacagatttgttccagtacaccaattgacttcaccttacgcattggcccatggccaacagccctcaggtgctactgaaaccatgggacgcatgcaaacaatctgcagatcacgtctcaatgagctgataatggaacaaatgtgcccacaaactgagaagcacttcatgtggacgatgcctggaccagattca

SEQ ID NO: 421045 - DNA, 524 bp, Oryza sativa
cgcgctcactgtctcgcttcagcggaggagctctctagaaggagcagaggagtcccccccaagcgatcgattcgatcccctccgacgccgatcgcctaggcgaagtctccgagaaacactggagggatggctgaagaggatatccagcctatggtctgcgacaatggcactggaatggccaaggccggctttgctggtgatgatgcacccagggctgtctttcctagcattgtaggcaggccacgccacactggcgtcatggttggtatgggccataaggatgcctatgtgggtgatgaagctcacaccaaaagaggtatactgacattgaaatacccaatggagcatggtattgtcaacaactgggatgacatggacaagatatggcaccacaccttctacaatgagctccgcgtggctcctgaagagcatcctgtattgctgaccgaggctgctatgaaccccaaggcaaacagagagacgatgacccagatcatgctcgagaccttgaactgcccagcgat

SEQ ID NO: 421046 - DNA, 290 bp, Oryza sativa
tgtcttacacacgcgtttcttgaggaaccgactgctggcctcaactggggtgtgtactagtatctgatggactggttgctccagacacatccatatgatcttggcaaggacaatgagccgcatgaagctacaaggcttgaatgtggagctgtgactggaaccataggccagactgtcgcttaccctcttgatgacatcacgaggagaatgcacaaggttgcttggaataatgcagcaactatagtcactggagaaggcaaagaggagctccagcccaaagcgtacgaccg

SEQ ID NO: 421047 - DNA, 342 bp, Oryza sativa
ccaataatccggaggtttttttaaaaggactcatcttaacatccataacaagcaaacgatagttgtttccgacaccaacattagaccataacgagtcaactgacaaccatagactagaccaaaaataccgcggactgcatagataaaacatcagtgtcgagcagaaggaaccgctcagcacttgaccttcttcagcccatgagagaagtaaaggaaggttgggtcggtggctccgtccttgtagtaggcaaacaccaagccggccttatcatgcatgcttttaccaacaaagaactgaaggtccttgagctttccaagcaagtacttggtggcccccttaat

SEQ ID NO: 421048 - DNA, 255 bp, Oryza sativa
ttgtgctcgctactcccccctcgccgagagagctctagggtttccgctgccgaatttttttttaattcggggggagagatttgaagaggcggcaccatgttggtctaccaggatctgcttaccggtgacgagctcctgtcggattcgttcccctacagagagatcgagaacggcatcctctgggaagtcgatggcaagtgggtcgttcaaggagctattgatgtggacattggtgccaacccatctgctgagggt

SEQ ID NO: 421049 - DNA, 413 bp, Oryza sativa
ataggatcaaaacatttctattaccacaactttttaaggatggaattgagtagcaatactttcaccccaaaatacagtttagcgacaatatcttagaaaagccgcttgctttgccgccatggctggcaagctgagcagagcagctaacacaaagaacacgagatcactataaaccaaacggcaacgaacgaagaaaatacagggtcttttttgtctgaagatacacgaagcggttcgttttcttttatttttagtctcctctcctcctcgatgatgggtgtatggcaatggcaatggcgatgggatcttggcttagttgatgggaaggggctcgccgttccactccttgaggcagtcgagcatggggtcgatgagcttgccctggctgatgccgaggaacaccttgttgcact

SEQ ID NO: 421050 - DNA, 544 bp, Oryza sativa
cactaccttctcctccttttcttcttcagtatcgaatcctctcttctgctggtgcccaccaccaccaccgtagcaatggcgggcaacgggccgatcaacaaggaggacccgctcaactggggcgcggcggcggccgagatggccggcagccacctcgacgaggtgaagcgcatggtggcgcagttccgcgagccgctggtcaagatccagggcgccaccctccgcgtcggccaggtggccgccgtcgcccaggccaaggacgccgccggcgtcgccgtcgagctcgacgaggaggcccgcccccgcgtcaaggccagcagcgagtggatcctcaactgcatcgcccacggcggcgacatctacggcgtcaccaccggcttcggcggcacctcccaccgccgcaccaaggacggccccgccctccaagtcgagctcctcaggcatctcaacgccggaatcttcggcactggctccgatggccacacgctgccgtcggagacggtgcgggtggccatgctcgtgcgcatcaacaccctcctccagg

SEQ ID NO: 421051 - DNA, 402 bp, Oryza sativa
tagtacacgagggtgttcttcgacatgaccggggggggagcttcggcggggctgtgcccgtgatgcccctgtacgcgaaggacgtgccgcggacggcggagaacttccgcgcgctctgcaccggcgagaagggcgtgggcaagagcggcaagccgctgcactacaaggggtgcaccttccaccgcgtgatcccggagttcattgtgccagggcggcgacttcacccgcggtatcggcacgggaggggagtcgatctacggcgagaagttcgccgactgaggtgatcaagttcaagcacgaacagcccccggcatcctgtccatggcgaacgccgggcccaacactaacgggtcccagtttttcatctgcaccgtgccctgcagctggctggacgggaagcac

SEQ ID NO: 421052 - DNA, 527 bp, Oryza sativa
tttttacgagggtgttcttcgacatgaccgtgggcggagctccggcggggcggatcgtgatggagctgtacgcgaaggacgtgccgcggacggcggagaacttacgcgcgctctgcaccggcgagaagggcgtgggcaagagcggcaagccgctgcactacaaggggagcaccttccaccgcgtgatcccggagttcatgtgccagggcggcgacttcacccgcggcaacggcacgggaggggagtcgatctacggcgagaagttcgccgacgaggtgttcaagttcaagcacgacagccccggcatcctgtccatggcgaacgccgggcccaacactaacgggtcccagttcttcatctgcaccgtgccctgcagctggctggacgggaagcacgtcgtgttcggccgcgtcgtcgagggcatggacgtcgtcaaggccatcgagaaggtgggatcccgcggcgggagcaccgccaagccggtcgtcatcgccgactgcggccagctctcctagatctgtgctgtt

SEQ ID NO: 421053 - DNA, 553 bp, Oryza sativa
  unsure (1)..(553): unsure at all n locations
ctcgagaatcaggtgatgctctgatccatttgatcagttcgttagatggtttgatgaagctgttactgctggtctacgtgaaccaaatgctatggctttaacaactgccgataaggagggaaaaccttcgtcaagaatggttcttttaaagggtgttgataagcagggatttgtttggtatacaaattatggtagccagaaggcacatgatttatctgagaatccaaatgccgctctgcttttctactggaatgagatgaaccggcaggtaagagtagaaggttctgttcagaaggttccagaagaagaatctgagaagtatttccacagccgcccacgagggagtcaacttggtgcaatagtcagcaagcagagcactatcattcctggaagggaagttcttcagcaggcgtacaaggaattggaacaaaagtattctgatggcagcgtgatcccaaaacctgattactggngtgggtacagattaacaccaaaactttttgagttctggcaggcncacagtctcgactgcatgaccggcttcagtattcac

SEQ ID NO: 421054 - DNA, 442 bp, Oryza sativa
agatcaaacgcagcatgtcgaattaacttgaaccgtatggaagttagcgaacttctagagattgcaaacagcaccacgaaagtctgctgaattcgggtataaggtggagtacattacaaaatggattcatcggtgcatcctgaggattatgacgggtctgtgggctgatgggaagaagaaacttttgcttatcagctcaggtccttttgatcttcgagaacgtcccggtctctgaaaaataggtgctctgagttccacttccaagcaggttgccgtgggcctgtggatttgacaactctatcccctgaactggtgtaaacgccaaactagaagtcagccccgatgttgcaccactgctaccatagctcttctccttgaatttcttggaaattttgcagaaagtttgcttggtgcagttgacacgcgtagcttttcacttcct

SEQ ID NO: 421055 - DNA, 535 bp, Oryza sativa
ttatttgggtcctccctcctccgcctcctccgccgccgccccctgtatcccaccggctcgccggagagtccgcctcgccgccgcggcctcacgggcgcgtatccagcctcgcggagagcgtgcggaaccgcgacccgtactagggcagcgcgagagagaagctgctgcgcctgcgctgcaaaggtctacagttggagctcttgctgctgcttggaagacttcggacaagaacctaagatcatggcaagccttgctgattctttcttagcggatcttgatgaactttcagacaatgaagcctatcctgaggaagaaaatgctgaggcagtgggcacggaagagattggtgatgatgatatgcctgacctcgagtctcttaattatgatgaccttgatagtggttcaaagcttcagaaaacacaacgttacaatgacattatgcaaaaagttgaaaatgcacttcagaaaggtacagatttttccaatcaaaggtcgatcctggaggaagatccagaataccagctgattggtgatt

SEQ ID NO: 421056 - DNA, 527 bp, Oryza sativa
  unsure (1)..(527): unsure at all n locations
ttacgctggtgttcgtctgcgtcaagtacctcccggtgtacaccgtgccaccggatgagaggttcctggtgaagcggatcggccccaagaacttccacatgttccggtgcgtggcgcggtacgggtacaaggacatccacaagaaggatgacgacttcgagaagatgttgttcgatagcctgattctgttcgtgaggctggagagcatgatggaggagtacagcgactccgacgagtacagcaccctgatgatgagcctcccaaataacccagggatcagcaatggcggcgtgaccaccaccggcaccaacaatgtcatggaggtgatgagctgcacgtcgacccatgactccattgtgccggtgaactccaggtccgacgacacgggcagcagccaggtgatgccggcgtcggtgcagatggcgttccagagcgtcggcgacgagatcgcgttcctgaacgcgtgcagggacgccggngtggtgcacatcctcgggaacacggtgatcagagctcgcagggattca

SEQ ID NO: 421057 - DNA, 520 bp, Oryza sativa
  unsure (1)..(520): unsure at all n locations
tcagagtaaggtttattctaaatgcaagctccatctggttgatcaacaagaaggttcggcttctaaggtggagctggtggggaggaataccgacaatgtggaaattagccatggaagcagttctggtgacaaaatgattgctgagttgaccgaggaggaattgacattgcaaggtgtgcccgcagatgagactcagacagacatggaatttggggagtgggaagggattgaaagaactgagatagaaaagaggtttggtgtggcagcagcgtttgcatctagtgacgccgggatggctgccctgtcaaagcttgatagtgatgtgcagctgcagctgcagggactccttaaggttgccattgatggtccatgctatgactctacacagccacttaccttgaggccttcatctcgtgcaaaatgggctgcttggcaaaagctagggaacatgtatccggagacagctatggaaagatacatgaatnctttgtcagaggctattccaggatggatgggtgac

SEQ ID NO: 421058 - DNA, 518 bp, Oryza sativa
gcgggaaggttcatcctaccataattggaaacaatgttacaataggtcatagtgctgttctgcacgcatgcaccgtcgaggatgaagcttttgttggtatgggtgccactctgcttgatggagtggtcgttgaaaagcacagcatggttggtgcaggatcgcttgttaagcagaacacaaggattccttctggagaggtctgggtcggtaatcctgccaagttcctaagaaagcttactgaagaggagatagcgttcattgctcagtcagcaacgaactacatcaatctggcccaagtccatgctgccgagaattccaagaccttcgacgagatcgagctcgagaagatgctgaggaaaaagtatgcccacaaagacgaggagtatgattcgatgctcggcgtggtccgtgagatcccgccgtagctcatcctctcggacaacatcctcccaacaaggctcagaaggctgttgctcactgaatgtttttcaagcttccgtttggaaaagcttgttttt

SEQ ID NO: 421059 - DNA, 320 bp, Oryza sativa
tcgtactctccccccccccccccctccaaacgcttgttaaaatccctcattcccatcacctcagcacgtacgaacgagagtgatcgatcgctagctcgccgagatcaccagcctcctcgtgttcttcttcttcttcctctcgatctcgaggagggtgccatgggtaccatggttggccatgtcgcgccgggcgccggcttcatcctcatcggcatgtggcagctgttcaaccacatccggctgttcgcgctgcggccgagctcgtacgcggcgccggtgtggttcccggtgcgcggggtgcgccacctggagcttatact

SEQ ID NO: 421060 - DNA, 399 bp, Oryza sativa
tcttttatggacccttttattaaccatagaaccacccatatatactgccataggacctttagtgcacggctttgtatagtctagggtgaagatttctggttttgtatttaagggacctaaaaaaatctcgctgtatatactgccataggacctttagtgtatggttttgtatagtttaggggtgaagatttctggttttgtgtttaaggacctaaaaaaaattaagttgaggtacctccggtgaacttattcttttatatatcaacatgccctcgaagtctcgaactggaaacctgaaaggcgaaaagaagctagtccaaattaagcggcggcgtggcccaaccggtccacaacgacccagacactctcgccgttgccgactcctcgccttcgcttact

SEQ ID NO: 421061 - DNA, 368 bp, Oryza sativa
atgtgaaactaggttttctgttatgaaatgttcattacgacaattatgactaattggcagcattccaaaatattcctcaacgttgacactccatgccacacaatacaatcgaaattcctagaataggcaacatttccgagcatattggagacaagaccaacatcaccactcgaatgacactgagggggaaatatacaggggaagaagcaaaaatgctatctttaggtagtcgcttgacaacagacagttaagtgtagtgcacctgttgtagcactcgcttactcccccttgtgctccttatctttcagagcatttcctgtgatttacgaacaatgcgtctaacctgtttcttgaaatcgtccctcttt

SEQ ID NO: 421062 - DNA, 541 bp, Oryza sativa
tgcgaactctccacgcctcctcaaataaagctcgtcccgaggaagggcggggacccaccccccccaatcgccaaaaccctaactccgatccgatcgagctctgcttcccatggcgactgccgcgagccaggcgagcctcctgctccagaagcagctcaaagatctcgcgaagaaccccgtggatgggttctcggcggggcttgtggacgatagcaacgtgttcgagtggcaggtcaccatcatcggcccgcccgataccctgtatgatggaggctacttcaatgcaataatgaccttcccccagaattatccgaatagtcccccatcagtaaggtttacctctgagatgtggcatccaaatgtttatcctgatgggcgcgtatgcatttctatccttcatccacctggtgaagatcccaacggttttgagctttgcagcgaacggtggacacctgtgcatacagctgaaagtactagtctgagcatcattttcgatgctctcttgtccaattatgagtcttcagcaaaattgaagcggata

SEQ ID NO: 421063 - DNA, 545 bp, Oryza sativa
gtgcgtatgccgtcattctttttgagaattggtcgggatcaatgaagtttagatttcaagttgtgtgttctagttttcataaagggcgtttgcgtattgtgtttgatccaacaggtgctcaaacaaatcctgagttgaatgtcgcgtattctcacgttattgatatttcagatactcaagattttaccatagaggttcctcatatgcaaacacgaactttgttaactagggctgaaccgccatttacactggttaccacacaatacggcactactttgttgccaccgttgtccactggtaatggaactattgctgtttatggtgagactattctcgccactcctaatagcacagtggatgcaccagttgatattaatgtttttatatcgatgggagatgattttgaagtatataatccaggtaatggatttcaatattatggttttgttccccaatctggaacggagttacacccagtttcaaacacgaccgaggagctaaatgctccattaaaggatgagtctttaatgattgggggcaaacat

SEQ ID NO: 421064 - DNA, 497 bp, Oryza sativa
ctgttttatagagagagagacacagagagagagagagagagagcagcagcaggtagcaggtcgaggagggtttgtggccatggcgatcctgtcggatgtggccaccgaggtgctgatcccgatcgccgccatcatcgggatcgggttctccatcgcgcagtgggtgctggtcgcccgggtcaagctggcgccgtcgcagccgggagcgtcgaggagcaaggacgggtacggcgactcgctgatcgaggaggaggaagggctcaacgaccacaacgtcgtcgccaagtgcgccgagatacagaacgccatcgctgaaggagcaacatcgttccttttcaccgaataccaatacgttggcgttttcatgtcgatattcgcggtggtgatcttcctcttcctcggctccgtcgagggattcagcacaaagacccacccctgcacatacagcaaggacatggagtgtaagcctgctctgttcaatgccctgttcagcaccg

SEQ ID NO: 421065 - DNA, 532 bp, Oryza sativa
agatgcgagtcgctgttgtttgaaaaagggtgtgcgtgcgaggacagagagagtgcagcggacgtgctagagcagacgccagctactacctggcctcctcctttccccctcgaccccggtcaccaccaccctgctcgtccaccgcacctccctcttcccgacccgccgcatcctctcgccctgctgctccgcgctctcccaagtggcggcggcgccggaaaccgtcgaccactccgacggcgacgagccccagggggatgtgcaggttcagctacctctcgaccggctcttcgtgccgcccggggcgagcgtgtccgcgggggacgccgaggcggtgaccgcgcgggtcctcaagggctccaacatcgtgctgggcccgtacgcgcgcggcgacgcgaacgtgatcgccgcggacttcgtgaagagcagcgtccgccccgatgactgccccagggacgggctaccggagttcgcccttgttggccggtccaacgtcggcaagtcgtcgctgctcaactcgctcgtccggcgc

SEQ ID NO: 421066 - DNA, 515 bp, Oryza sativa
  unsure (1)..(515): unsure at all n locations
ttttcgcgtccgattctttcaggatgacatttcaacagtatttaaaatggctgataaagacaactccggcactctaacactcaaagagataaatgatgttcttgaagacatttgtataagatacccacaagtagaactgtatatgaaaagtatgcacatgcttgacattagggatttgataaaagatgccataggtgattctcacaaggagtcgatggtggttaacatagaggagttcaaaaaagctctgtctcatgtggattcccaagctaaaagtattccagcaacagctcaggttgcagcacaacaaggacactatcttgctgaatgttttaacangatggaccaatgcaaagaacatccagaaggtcccgttgcgcatgacaggaacaggatcaggacgacacaatttccgccatttcggtacaagcatcttgtgcaatttgcacctttgtgtggagaggaagctgctgcagagctcccaggcgactgggtttccattggccatagcactc

SEQ ID NO: 421067 - DNA, 436 bp, Oryza sativa
ctatgttgtcgtattttcgtcagatactgttcatcgttctgaactactcagacaagctaggatagccacaatctcgcgtgtgttcagagtgttctagctaacagggtgagcttcacagatagagctgctacattttgattgaaattctcgatttttgttgtcccaggtatggggcatacgtcgcttccctgatgatggacccaggccaatgcgagttgtgacggtgtgcatccttttctggctgccattaagttaacacgctcaaatatttcagcatttcttctcgagattcgctggttgaaatctaggaagatgcttgcgaacatcctgaacagatagactccactagtttagctccaccagaaaagaaccctttaccaagtgggctgtaagctactattcccattccaagttctttgaaatggaaataagaaaa

SEQ ID NO: 421068 - DNA, 438 bp, Oryza sativa
tggacgcgtgggtgcagcgatgcttgcagtgagttgtatggtactagcattaacccctatgtatgtgagtggccagagcccacgtagcatcaccaccgagaatcgcgcgcgcggcggagagaaattaatcgatcgatcgatcgatccgattccggccggccatggcagctgctgctccggcgacggcggcggtgcggcgcatgaagctgggctcgcagggtctggaggtctcggcgcaggggctgggctgcatgggcatgtccgccttctacgggccacccaagccggaggccgacatggttgcgctcatccaccacgccgtcgccgccggcgtcacccacctcgacacctccgacatgtacggcccccacaccaacgagctcctcctcggcaaggctctgcaaggcggcgtgagggagaaggtggaggtggccacga

SEQ ID NO: 421069 - DNA, 477 bp, Oryza sativa
ggtgtccgctttctcgccttccgcaacgagcagtccgcgggctacgccgccgccgcctacggcttcctcaccggctcccccggcctgctcctcaccgtctccggccccggctgcgtccacggcctcgcgggcctttcccacgccaccgtcaacgcctggccgctcctcatggtctccggctcctgctcccagccagacgccggcaggggcgacttccaggagctcgaccagatcgccgccaccaagcctttcatcaagatcgccgtcaaggcaaccaccatcgccgacatccctcgcctcgtcttccaggccctcgccgccaccgtctccggccgccccggcggctgctacctcgacatcccatccgacgtccttcaccaaaccctcacggaatcggaggccgacgccctcatcgacgctgccgccgccgattccgccaaatccgattcttcttcacccaagcacaagtccctggac

SEQ ID NO: 421070 - DNA, 549 bp, Oryza sativa
ttcttatttcagggtctgtgatataagatgttcttccatgggtgtccgttttaatttcaataggacattgcttattaactgggacctgcgttctggtatgatacaaacaccttcagttcttatgctgcattctaccgctctctgcaccagcataaggatcaatgataacatttatcaccgctggcttcctggcacgaaacgactctgaaagggcggattttagctcatctggtgtctcaacaagataaccttttcctccaaaagcttccatcattttatggtaaccagcagctggaacgaaagaggttggggcaggatcatctttgtacggtccggttatctcatcagggcttctccgatcaccgccataaactccattattgttgaagacaattacaacaacaggcagctggtaccttaccaatgtctcaacctccattgcactgaatccaaatccagaatcaccctccacagcaaccacaagtcgatcaggctcagcaactgcagctgcaacacagaatcccaatccaactcccattgtcccccatg

SEQ ID NO: 421071 - DNA, 417 bp, Oryza sativa
tttatagttggcccccattcctcccccaccccggggttctctcctccgccgctcgcgtcgccgcctttttcccctatggcgctgccgaatcaggggaccgtggattaccccagcttcaagctggtcatcgtcggcgatggcgggactggtaaaactacatttgtgaagaggcatctcactggagagtttgaaaagaaatatgagccaaccattggtgtcgaagttcaccctctagattttaccaccaactgtggtaagatccgcttctactgctgggacactgctggacatgagaagtctggtggacttagggatggatactatatccatggccaatgtgcgataattatgtctgatgtcacttcaaggctgacataccagaatgttccaacatgtcatagggacttgtgcagggtg

SEQ ID NO: 421072 - DNA, 466 bp, Oryza sativa
  unsure (1)..(466): unsure at all n locations
aagtaaatatatcatatattcgattatatatatatatataatagcagacaggttacatccattagaactcagaatcaccggaattgaacatcaaaagtacaacacaagcagcagcagcatcagccagcagcaaacgacatgattacccacgcttttggatgaagaacaagaagtacgagaagaagaagacgatggtcgaacaccttgatcgagctcaacaatggcgatcgatcaccaatcacctacttggtgaactcgatggcccaggcgttggcgtagatgtaggtggccttgaagccggtgaatccggcggcgcgggcgagctccctgaactccctcttgtacctctccttgccgccggggttgtgggcgagcatgatcatgtcgacgtggaacaccccctgcttcctcgccgtcgcgtcggagctctccgggagnacgcacttcaccaccaccacctttccgt

SEQ ID NO: 421073 - DNA, 510 bp, Oryza sativa
ttttccgacaagctgccgtccaaggcgaacccggcggcggccgacatggtggaccgcatgctccgcctgctcgcctcctacaacgtcgtcaggtgcgagatggaggagggcgccgacggcaagctctcccgccgctacgccgccgcgccggtgtgcaagtggctgacgcccaacgaggacggcgtctccatggccgccctcgccctcatgaaccaggacaaggtcctcatggagagctggtactaccttaaggacgcagtcctggacggcggcatcccgttcaacaaggcgtacgggatgacggcgttcgagtaccacggcacggacgcccgcttcaaccgcgtcttcaacgagggcatgaagaaccactccgtcatcatcaccaagaagctgctcgacctctacaccggcttcgacgccgcctccaccgtcgtcgacgtcggcggcggcgtgggcgccactgtggccgccgtcgtctcccgccacccgcacatccgggggatcaactac

SEQ ID NO: 421074 - DNA, 480 bp, Oryza sativa
ggcgctaccgcctgcgccgctcaggtgctcgcgttgagcatcgcgccgcaaccgccgccaccgcagccgccgccacagcctgaaccgcagccaccggacttggcatgtccaacggtggagctttccatggccacgccgtcaccacagcctccgtcgcagtccgccgccgcagtccgccggacttgacatggacagtccttggagctttccatgaccatgccgccgccacaaccgccaccacagccgccgccgcagcctgagccgcatccgccggacttgacatggccagccttggagctttccatggccacgccgtcaccgcagtctccaccacagccggcgtcgcagcctgagccgtacccgccggacttgacatggccagccttggaggcttccatgaccatgccaccgtcacagccgccgtcacatcgccggcgcagcctgagccacagcctgcacacttcgcatggacatatcctt

SEQ ID NO: 421075 - DNA, 529 bp, Oryza sativa
tttttcatgccagttcacctatcgtcagtcttcgagttgctgcctcttccactgtcccagtgaaggctcagcaggttcttagcatgatcaggacagaacctttctctcttaagagttttctgtcaccgaattccatcaaggatcaaaagatgagctgctggactcgctttgtgtatgattgcaatactgaacttatccgtcttcaaattagggatcagaaggcaaagaacggcatggttgtcgctcgggagttggtcggagtaacaaagtcatcaaagaaaccatttaagctagcagagttcgtggacaacaagtggtcactgagcaactctaacttatgcatcactaatgacatgaaaccaagcaaggatggctctatacttgagctcaaatgtgacaacaaaacgatcaaactctaccagggaaagaggctagaatttcaacggaagtgcttgcacaatcacgcagaggagaatgcttcagctattactgctgtgaagttctctgctgaacatccctatggcaaagc

SEQ ID NO: 421076 - DNA, 295 bp, Oryza sativa
tggtcgcgtgggtttctttcgtcttcagttaaaatttgaagatggagaagaggaaaaattcagacagagatcgacatggagacgaaggtgaccgtgggcgtcgtcctcctgctgctgtgcctgtgcggcggcgccgcgtgcgccgccggccgcagcggcggcgagttctccattgtcgggtactcggaggaggacctggcgtcgcacgaccggctgatcgagctgttcgagaagtgggtggcaaagtaccggaaggcgtacgcgagcttcgaggagaaggtgaggtggttcgtgg

SEQ ID NO: 421077 - DNA, 362 bp, Oryza sativa
ggctccaacaccattcattaattgaactgaaccggggcaatttcaagggattccacattacatcatccacatgttaccacattcaaaggaaacaaaagtttaaacatcagccctaaagttttgcccatcaaaacattattctttcatcgaatccctaacataaaaaaagcgttggcgcggtacaaacgcccccgccgagggaaacggggggggaaaggaagttttacattaccattgtagggggggtttgcaattacgggatgtcccaaggcttgggctccggaacggtgacgaccatcccctggagctccggtgtgagcaccacctggcaccctaaccgtgcgtgcttgtttagctcccgg

SEQ ID NO: 421078 - DNA, 450 bp, Oryza sativa
ttgacgcgtgggcagatctcccacctcgaaccctagccatggcgatcgcggcgcgcgccctgcgccgcatccccctccacctcgccccctccctctcgcgggccttctgcgcgctctcgccggccgcccccgccccggccgctgcctccgccaaggtcgccgaccgcatcgtgcgcctcctcgccatcgacccggacggcgcgcgccgcgaggtggtcggcctgtccggccagaccgtcctccgcgcgctcgccaacgcgggcctcatcgagccggagtcccaccgcctcgaggagatcgacgcctgctccgccgagtgcgaggtccacatcgcgcaggagtggctcgacaagctcccccctccttcctacgaggagcgctacgtcctcacccgcgcgtcccggaccgggagctaacaagcacgcgcggctcgggtgccaggtcgtgctc

SEQ ID NO: 421079 - DNA, 365 bp, Oryza sativa
ttgtctaggtctcccacgcggcggcggcggcgggcgggggtttctcgccatgtcgcacttcgggaggtcggggccgccggacatccgcgacaccttctcgctcctcgtcctcaacatcagcttccgtaccacagccgacgacctcttcccgctcttcgaccgctacggcaaggtcgtcgacgtcttcatcccgagggatcggaggactggggactcgaggggattcgcgttcgtgcgctacaagtacgctgaagaggcgcagaaggctatagatcggcttgatgggcgtaatgtggatgggaggaacatcatggtgcagcctgccaaggttgggcccaatgcggagccattacgaaatggaagga

SEQ ID NO: 421080 - DNA, 277 bp, Oryza sativa
tggcatgccagttcacctatcgtcagacccagtgttagctgcctctgccactgcccgagtgaacgctcagcaggctctcagcatgatccggtcagaaccttactctcttaagagttatctgtcaccgacttccatcatggatcaaaagacgagctgctgtactcgctatgagtatgatcgccatactgaacttatccgacttgaactcagggatcagatggcaaagaacgaggtggttgctagtcgatagtaggcagagttgcatgaccagcaatgc

SEQ ID NO: 421081 - DNA, 395 bp, Oryza sativa
gtagcatcaaaatgtatctattttattattacaatctgtgtttattcagtttttggtgcaagaatattatgaattatgtacaacaagtccatgcatgatatctctttatacaatcaatgaatacatgaatggtcactgctcggtatgcaatcctgcgtgtataaatcacaactaggtagtagtagggtagcaatgatcaaggcatcttgatatataggcgactcaatttgatcaagaggaggatgccaagagattcttgaaccactgcactgaattctttgggtatttcttccggttcttgtagtctacgtagtataatccgaatctcgaggtgtatccagcggcccactcccagttgtcaagaagagaccatgcaaaaatacccggaacattac

SEQ ID NO: 421082 - DNA, 436 bp, Oryza sativa
ggtccggaattactggtcaacgcattactagctttagtaattgaaccatatgtaacgctctatcactgtgacctttcacaagctttggaggacaagtacactgggtggcttgacaggcagatcatcaatgattatgcggtatatgctgagacgtgcttccaggcatttggggacagggtgaagcactggatcaccttcaacgagccccacaccgtcgcggtgcaggcctatgacagcgggatgcatgcaccgggccgctgctcggtgctcctgcacctctactgtaagaaagggaattcaggcaccgagccctacatagttgctcataacatgatcctctcacatgccacggtttcagacatatacaggaagatattcaaggctatgtcagattggggagctgggtcttattttgaatgtttatgggactatccat

SEQ ID NO: 421083 - DNA, 496 bp, Oryza sativa
ttcaacgtgctgggtgttagtcaataggagaccctatatactctttgagttattatggtgcttcctcctgcccatcttggccaattctttactaatgtgtgcaatttatagacacctttctcagaatcatttgcccagtatctagcgtcatcaaattcatctatttgtccaccaccggaatacttcgccaaccttttgtttggccttgttaataatgtcatacctcctttgagttgcaagtccaaatcaaacccatcggatgctgctggcagtacagcacgcacaacttataacaagccttatacatcttccgctggaggaatcagtaactctgatggtcagagggcattttatcaaaatcaggagcctgaatgatatacacagcttgttctggaaacagcaagccgagacgccccctcacttggtaggccaccttctcaaagacacgggagcctcgacttgaaaacctagcacacagcgccagcatacggagtca

SEQ ID NO: 421084 - DNA, 431 bp, Oryza sativa
aatacttaatggggctctttactaaaaagatactaccaaatagacagtacgaataattacgtgatgaaacacaaccctcaagcccactaccagagaagaatcaacataaacttgccctgtcatctgtaaacagagtagcaacaagctgcttccgaaaggcatattaaaaaaaaaactcgaatattaggaaataacctaatatcaaataattagaaggggtgaggctttgaacccaggtcgtctagcccaccaccttgtggaggtagcaggaagacccctgagcatttctcgaaaggcatatacaatgcagaatgacgagtggcctcgtgtgccaccacataggagccgagacgccacctcaattgagagcataccctcgtaaagacacgggagcctcgacttgaaaacctagcacacagcgccagcatacg

SEQ ID NO: 421085 - DNA, 494 bp, Oryza sativa
tcgttggaaactctgggtccatatgaacaagttgcggtcacttccatcatctatctgcgagatgagatcattgtacctcctggatgcacatttcaatgaactatgtggtctgccatctgccatagggaaactttcaagtcttgaaattctgaacctgagcagcaactttagtgacctgaaggatctccctgcttctttcggtgacctgctgaatctgcgcgagcttgacctcagcaacaaccagatccatgctcttcccgacaattttggtcggctggataagctagagaagctcaacctggagcaaaatcccctttctatgccgccaatggagatcgtgaacaaaggcgtggacgcggtgaaagaatacatgttgcagaggtggcttgacatcttgctcgaggaagaacggatgagcatcgcagcagcggagagccctcaagcaccgaccactccttcggcctggctggcacgcagcgtctcctgggtctccg

SEQ ID NO: 421086 - DNA, 121 bp, Oryza sativa nipponbare
acctctgctggagaaagccgatcatcgtgggaccataccatgctgccacacggacatcagcgtggagggtaccaagggtctacacagacgctagccatgatgggatctaaggggctcactg

SEQ ID NO: 421087 - DNA, 86 bp, Oryza sativa nipponbare
ccacgcgtgcggggtattctggcagtgatctcaagaatatatgtcttactggtgctcatctgcctatgaaagatctccttgaaaag

SEQ ID NO: 421088 - DNA, 197 bp, Oryza sativa nipponbare
gtacgacccacgcctacgcttacgtgtaaagtccggatgctgaaagccacccactagatgaaggtgcctatacattagctggaccaacagtgcaaaagttcccaccaactcgtcacacccgtactgtaccacttggattgacgacaggacgcagctgtgctacaactgacagtcgagcaaggacgccgcggcggcga

SEQ ID NO: 421089 - DNA, 55 bp, Oryza sativa nipponbare
tggaaacacactgtcgatgactggaactaaaacggaagatattgctgatgtgaat

SEQ ID NO: 421090 - DNA, 62 bp, Oryza sativa nipponbare
ccacgcgtgcgcccacacgtgtgcgcacgtagacggcgaggcgtccgtctacacgatcggag

SEQ ID NO: 421091 - DNA, 157 bp, Oryza sativa nipponbare
ccacgcgtacgcccacgcgtgcgcggacgcgtgggtgatcctagacagatgatacgcccgggcttgttaaccacaggcagtggctatacacaggagataggtgaaatattgcaaagacttcttctacagatggtgccttacatgacaaagatgcctg

SEQ ID NO: 421092 - DNA, 281 bp, Oryza sativa nipponbare
agtatagggtgagcggcctggcctgcacgtaccggaattgaagtatcgagccagaccttactgctacgcgtccggaggacgtggactgcatcgactgatccggccacgagagcgtggtcctggatagatggacctctgtgtgaatggcgtcccagttgctagtgcaacatgctgattttcggcttcggactgctacgtgcgaatccgcaactgctccggccacagtcaaagcggcaacccgctgttactgtagccgtattgtaagcgccacgccgctgtca

SEQ ID NO: 421093 - DNA, 79 bp, Oryza sativa nipponbare
cgatccgcaattaccgcgtcgacacgacgcgtccgcccgagatctccaaccttgcgaaggcgaagcctgcgcgagatct

SEQ ID NO: 421094 - DNA, 112 bp, Oryza sativa nipponbare
gccggttgaaccacgcgtacgggcaccttctaaggcgacgtcgagatcttcttcaagccgacctttaacggggaccgctaaatgtttcaaggggttttctacaaggaccccc

SEQ ID NO: 421095 - DNA, 236 bp, Oryza sativa nipponbare
ccacgctttcggagagtgccgagcagtgaccgcagcgggggtttgcccgctgcgggcggcttcacccaaccagtgctcgtccgaggggcgaactcttctgtgacaatcccagatcctattgctgcgctgctttcctctacccgcatgccctccttctccaacgcctaaggccggccgatgccgtagcctgtccaaatggaaagtgcaaattataccatggatcttaagggttgcct

SEQ ID NO: 421096 - DNA, 281 bp, Oryza sativa nipponbare
ccacgcgttcgaaaactatcaggtgagaaagcagggttgaggtattcaatttcaggcacacacgacaacattgatgtattacacatgtctggccgacagacacaatgatgaatcacgaagctctcgtggcatgtgataatattgcagcatggtgcttacaacaggtataatatgagaactagatggaggcaggtgcatgttaagacaagggagacattatcataatggtacttctaaagcttctgattgacaaaaatatattgattatcatggatgctagt

SEQ ID NO: 421097 - DNA, 71 bp, Oryza sativa nipponbare
ccacgcgtacgaccatccggaagatcctcatgaaggctctgatgcacgctctggaatactcgcatgtctgc

SEQ ID NO: 421098 - DNA, 254 bp, Oryza sativa nipponbare
ccacgcgttcggcgtgaagccatcgctagagccggaattccgatgctagccattgttaatgaggttgagttcctacgatccatccatggaggatgaggctaatttacgacaaagcttcactgaggtggttgactatgtcaacacgatgttcacgcacccatcaagacaacgagtgcatcatgtgcgcacacaacctagagcgacattggatacttatagtcactgcacctaagtcgagtatggttacctacctt

SEQ ID NO: 421099 - DNA, 194 bp, Oryza sativa nipponbare
acgcgtgggtgaagtgcggatttgacgagaggtgcgcacgcggcgtgaggaggccagagccgcacatggtcaccgcgcgcggcggtggctgcttttggtggctggtggtggtggtggcagttgtctgcctgtcatgcgccgccgccgccgtgaggtcttcagcagggagggcgcaccggaacctgaaggggctt

SEQ ID NO: 421100 - DNA, 268 bp, Oryza sativa nipponbare
ccacgcgtacggtgtgaaaacacctcattaaagcacgtgctcagatattgggtcatgccaccttgtgcacatactatgcaataagggcgtgattcgtaatgtgtagtgctacaaatccaagcttgtatcatattgctgtatgcaaggttaccgactctgtattgagaagacatcttggccttgatttgacatgttgggaagattgagaaaattttcaattgacgtttcaggagagaatatagaggatcaaaatttaagaacgggcgcg

SEQ ID NO: 421101 - DNA, 325 bp, Oryza sativa nipponbare
ccaagctgtccgacgacacatactcgtggtcgtacaccactcggggcgagcacatacacgtgctactacacacaaaggagacagatggaggaggcttcggcggaaacccaagacggccaccgacgacgcgccagaggctaccaccggcgggggatcaagaagccccaccgattaacactgggtggacataacttcgttggaccgatgaactatatcgcgatccaccgtggtgccaaagttgcgaaagattttatatgacaaaagaacctatctagctgacgaatatgtatgacaaaggaagctagctagcttacgagcctgaggc

SEQ ID NO: 421102 - DNA, 186 bp, Oryza sativa nipponbare
ccacgcgtccgaggagatcgaaatgaggcggctcagaacacacggaagacatagagtcttagctgctatcacttaccctcatacctaaagactagtatgttgaacctgagcctatgttcagaagatcatttgattgaaagggatactctgatgtggaagagggtcgctgaaggcttggtccaagag

SEQ ID NO: 421103 - DNA, 70 bp, Oryza sativa nipponbare
ccacgcgtgcgcccacgcgtgcgcccacgcatccggccacgcgtccgtacacgcgtccggctagatcgcg

SEQ ID NO: 421104 - DNA, 160 bp, Oryza sativa nipponbare
gggaaagctgtagcccagaggtaccgggcgggaatcgccgggccgaccgatgggtcagcacacgatgaccgccacgacatgcggtcggtcagccgagcatgtcggccacgaactgctgcctcgccgccgcaccactggtgcttttaccgctgcctcgacg

SEQ ID NO: 421105 - DNA, 107 bp, Oryza sativa nipponbare
taagttccaagctccaagaaccatggccggcacctggctgtcgccgccgaccgtggccgggctgctgttggcgccatcgccgcgcgtgcggacaccatctgtggcgt

SEQ ID NO: 421106 - DNA, 185 bp, Oryza sativa nipponbare
ccacgcgtccgcgacggtggcggtgctcgttatggtggcgatgctggtgatgtacggggctgtgtattctgacgatgcacgtgctcatggcgtcacttgaaaaacaggttgcagctgctgcacacgctcatggaagtcatggaggacgcgtcgtgacagaggcacttagtactgagtcaacagct

SEQ ID NO: 421107 - DNA, 53 bp, Oryza sativa nipponbare
cgacgcgttcggaaaggctagataactcctgtacagagtgttttggtggaacc

SEQ ID NO: 421108 - DNA, 90 bp, Oryza sativa nipponbare
  unsure (1)..(90): unsure at all n locations
tccacgcgtacagcgtatcaacgtatggcccgcatttgaagggagaagacgaagaagagggggatgatganggattgggcgggccttcgt

SEQ ID NO: 421109 - DNA, 171 bp, Oryza sativa nipponbare
tctacgcgtccgatgtgcgcggcaaggatggccctatggtgttcggcgctggccgcataggcctgcgcaaatgtgttcggaaagggacgcatgaccatgcgcaaggcgggtggtaaggccaagaccgcctggtctaggtgcccgtggtatggggccaaccgcgtgctttac

SEQ ID NO: 421110 - DNA, 132 bp, Oryza sativa nipponbare
ccacgcgtccgaaaacacacgcctcgccgtattctgtgggagcaaagcgaacgccaaaccccacccgcgggggcgagaaatacggcgacgataagacgaggtacgggcgccgggtacgactgtcacatgacc

SEQ ID NO: 421111 - DNA, 67 bp, Oryza sativa nipponbare
ccacgcgtgcgctccaaatctcaaatactcatgcgtctccaagctctggtaggcaacgtcagacatg

SEQ ID NO: 421112 - DNA, 260 bp, Oryza sativa nipponbare
ccacgcgtacgctagcggcaattacagagatatggcttgtgaacaatattacagtgggtgcagctatatcattcgtgaagaaatacttcatggatgtggatcgtggtcgtaatgatttcagcactatatgttggcttgctactcagactttatgtttcaaattgacaatttaaagttcaaactagcaattcaatacttacaatgacaactgcgggcaacgaagttggaatgaaaatgatccaaagtggagttagaggtag

SEQ ID NO: 421113 - DNA, 424 bp, Oryza sativa nipponbare
ccacgcgtgcgcagagctgtcctaaaaatcaagaagacagatgatgaaactgctaaaattggacagggtagatgatgctatataagtcatttgtggacactgcaggcactagggaatctaatccactgaaacattatctggagaaatgaactacatcagtcttacagatactgtgaatatgacagtcagttcttcttggaacatagatggatataggtattgtattgtggcacatatttggaatatagcctcaatctgtttggggccaccacatggggacgcctctacttattaggtagcataacatggagaatggtattattgatatttatacttttatcaatgaccagctttcaagaacatcatcgtattgaaatgtgacacgttgtgtatgatgataccttccgcatctgggttggggtga

SEQ ID NO: 421114 - DNA, 283 bp, Oryza sativa nipponbare
ccacgcgtacgctgacgcgtgggcggacacctgggttatcaaatgctgtattatatgcacagaacattgctataaacgtgcatgatacatgtctccctggttgcacattacatgatggccatgggcctaatggcacaccttatgaactcaaactgggaaagatcaacaacatttgtgctaggtaaagattgcttcaaccacttgacctcggcgaggccgtacgggtctgctcgcgtggccgacgacgcgatctagtggtggtagcggtctccggaggggcggt

SEQ ID NO: 421115 - DNA, 54 bp, Oryza sativa nipponbare
agctgtgaagcttgaaacttgccctcaagggaagctatgccgaacctggccctg

SEQ ID NO: 421116 - DNA, 110 bp, Oryza sativa nipponbare
ccacccttaccttgctagctagcaaagaggaggaggaactcgatcttgtatagagacaacaatggcgggtcacgctcttatttctgagaggcaactgctggtgaggccat

SEQ ID NO: 421117 - DNA, 345 bp, Oryza sativa nipponbare
  unsure (1)..(345): unsure at all n locations
gcgagcccacgcgtccgcgattgcaaattgtcggtgctgtttatgcgggtatatataaccacgatggctactgctaaaattgagagggcgatctatcatggccctaaatatgagtgtggcactatggtaaaatataacgccaattgatcggccgacttgcattgatgatctaaccaggtcgtcaaccatgcgttctgaattccgcaacagaaacatgatggacgagtgctgtcatatgctggtgcttgttgctggatggtgggttccttgtgaatgtgaatgtttgtaatttgtaacaaaaccacntagctaccgaaaggtaaataaaaccacaaaaactgggct

SEQ ID NO: 421118 - DNA, 288 bp, Oryza sativa nipponbare
tgacccacgcgtgcggcttgccccgtctcgagcctcggaggtgctggagcgacctaccatggggagcgcgggggcgctgctctcgcactcgactacggggatcggcggattcccttctggtgaccatcactaccaccgtctctgcggcctgcgctgcgtaccggtcctcacctccccgacgcccgatcccctcacctgtagccacgggccggaccttcgatggaccgtcgcttaccggggagcccgtcgagagacggagcgtccctcggcagccgtacctcaaaagga

SEQ ID NO: 421119 - DNA, 370 bp, Oryza sativa nipponbare
ccacgcgttcgcccacacgtccgtcacgcgttagaggacgcgtgggcgagaatacacttggatcctacaccttaggtggggtgggcaaacctatagacctgtatgagaagctgaagataccagtcgataacctattgtttgctggagaagccaccagtgtcacagtacactggcacggtgcatggcgccttatgcactggtctgatggcagcagaggagtgcccaatgagggatattgagcggctcaaggagctgaacatgctggagatgtgccaccctgcaatgtgagagcagacctgcactgagtcaatgacactgctaatatttctggtgtgaacaggccatgagctgctcaaaaattatagtgttc

SEQ ID NO: 421120 - DNA, 94 bp, Oryza sativa nipponbare
ccacgcgtgcgacacacccaaccaacagaggcagacatggctgacctcgaaacagcacactgaggtacacatgtgcgccgccacgatggcccta

SEQ ID NO: 421121 - DNA, 322 bp, Oryza sativa nipponbare
ccacgcgtccgaagggaccaactgctcacgatgtggactcaccatgaacacgtagcataatgcccacacgacttaagctggagattgaatctcataacccgaccacaccagacgtcgtctgtctgactaaacgcatggactacatgcaacaacgggtgaacataatggagcatctggttatgactcaaggtgtgcagaatataaaaacaagagcccatcatgcttataattctcaacatgctgtgagcccaaggcgtccagtacttgcagagctgcatgctaatgagcctaccaatacgcacttgcttgaggagccttatgc

SEQ ID NO: 421122 - DNA, 149 bp, Oryza sativa nipponbare
ccacgcgtgcgagcacgcgtccgagagatcaggtctaacactgagagtgacgtgctccatgatcacatctgcagctgtggatggcaacatgcatgatgagccttccgctatttgcgcccggccaggccaatggcctatcgtccatatcc

SEQ ID NO: 421123 - DNA, 351 bp, Oryza sativa nipponbare
  unsure (1)..(351): unsure at all n locations
gtatagcggatgctcctacacctagccggtccgatcctcaaatcccacccagacccacgcatcctgaaactacctaacacactactagcccaccacggagattcccgtggaggcgtgcgacgacatgcgcctacagacctaaaactacacctgcttccatccatatcctttgagaaantgactatattatgagcatttacccattgatacactaccaaacatgcataggactacacattcatatattaaacctcaccgtattctgcatatctccttgtgtataacctacactaatttagcttaccaacactacactcactgcaataatattttccatccagtaattcactt

SEQ ID NO: 421124 - DNA, 91 bp, Oryza sativa nipponbare
ccacgcgtccgcccacacgttccttctaacactgagagtggcgcgccccataatttcctctgaaggcgtgggacgcaatatgcataaagac

SEQ ID NO: 421125 - DNA, 192 bp, Oryza sativa nipponbare
taccgatcccgaattacaggatagacccacgcgtgcgagtacgcgtccgagagatcagggctaacagtgagagtgacgctgaccaactaacaaagcgcctcttttggacgccaccaacagcaaacaatgcactactgattgaggacaagcactgacttgaccagatcagcgaaaggctacgcataggaagat

SEQ ID NO: 421126 - DNA, 169 bp, Oryza sativa nipponbare
ctgaaatatgtaccattgctctaaaagcttattcattcctgcatactatgttcaatgaaaggtacctccaagatacagtttgccatcaactcagtacaaaacttggcctaagattacattattggttcatcggttggaaggggctattaaaacaaagaaattaaagaat

SEQ ID NO: 421127 - DNA, 341 bp, Oryza sativa nipponbare
ccttccaaaagtaaacatatattatccaatctcattggtggacaggggaacaaaggggggtgggtggcacaattaactttcttctgccaacgcgcaggtgacaggaaacttatagcgctattctgatgaacaatcaactccaaaatttacaggatcactcactgggcattcctagagaaattcaggcgaacctacaaatcaaagaaaccaaggatcaagccatgaaactaacatagggcatttaggaattcataattcactactaagaattgtgactggccttatgatcaactaaaaattgcccttccaagcaagcatgtcatgggtaatcagagaaacat

SEQ ID NO: 421128 - DNA, 418 bp, Oryza sativa nipponbare
  unsure (1)..(418): unsure at all n locations
gcacatatgaaagtaaattacattgcactctataaaaacataattttttacatcggcagaaattataaaaacatcttttttacatcacaataaattatctagccaagttcatgagtctatttggcatgaaaacgtcctttcttgttcattatttctgcaagaataaaggcgcacaattcgcctctgatagcgggggggttgatgggtgagatcttgaagccagctctacctttctctcttagaagtgttgacatgttgtggcacacgtggaaaccacattggtcttcgatctgttgggcgcatgcaaactttggtgtcatgataaaagntcattcttgccctccttgtgcttaccacccttttgcacatatgggccccaagccatatataaggccttggtgatttcactgaaatcata

SEQ ID NO: 421129 - DNA, 228 bp, Oryza sativa nipponbare
  unsure (1)..(228): unsure at all n locations
gaaacggaaatttaaaattttattaatggttttaatgtgaacaaaacggggccaagatcgctaacaaatacaaattctgtaaccttgcctacaacaatatgatacaagcttgaatttgaagaactacacataccaaatgacaaccttatcgcctattatgagtacaaggtcgcctgaaccaatatttatgctcaaacttatattaggngtttttaccctaacccgtgg

SEQ ID NO: 421130 - DNA, 311 bp, Oryza sativa nipponbare
aaattaaaaagcgaaagagacacacggtgcgtttatcatttcgccatgggttgaaaaagatctaaagtttactctaatattgatccgaatttgacacaatttcattatcgctcgaactttacatgaacactccgatgaagatctggcagccatttctaaattgccggttcacatgggtaccggagcacagtgtggcacaatcttttttcggagggttctggagtggcctttttagggctatggctttaccggtttgatgataagcaacactggactaccgaatttaccactggtccttcaaagacacgagt

SEQ ID NO: 421131 - DNA, 59 bp, Oryza sativa nipponbare
cggacgcgtgggcggacgcgtgggcggacgcgtgggcggacgcgtgggcggacgcgtgg

SEQ ID NO: 421132 - DNA, 368 bp, Oryza sativa nipponbare
tatgagatgagttttttttttatattatttattgtgcctttcggggcgcaaactggaaacattttttatttttgttgcattaaaatagggacatgggcagtttattacccataatagttttttgtctgctttgagcccggggataacatggaaataatgggggggccagtttaaaaacgttggcaacctccttttcactggcttgggtgcctacagatgcgaacctgctggtctttgatttacagaaatcttttcgaaaatggtttgaaaatacctgctgctcccggcgattttattgggggggctcttgattttactcaccagaactttcctttttggttggaaaataagggcttggttttaaacca

SEQ ID NO: 421133 - DNA, 394 bp, Oryza sativa nipponbare
  unsure (1)..(394): unsure at all n locations
acaatactttttatttaattttttttttttttttttaaattttggggncacggggatatttagggaaagggggggattttttctttaagggaaaaaagcattatttttcctgcctttatcaaaatggaaaaatttccaaaaccaggccccaatgaaaaaggcgtcaacttcgtgaattatttaagggggggcccaacaacaaacctaaatggaaaagcgttgtttttttcagggctaaaaatccattcattcttcaaggggggctttctttttcttttaatatttcaagctttgggcgccaaaacctttaagggattaaagatactggatcttgggaacaacgaatacaagaacctgacaccggcgggtggaattttaaagttttttttttttt

SEQ ID NO: 421134 - DNA, 308 bp, Oryza sativa nipponbare
cattaaacaatatatattatgggatctgtgtatttgttgacattgggtacaaagatgatactttcatacagattgtacatgatttttttctctgatacaggttatacaggacttttctctgagtaactttagtccatcagttatgtaggcacaggagacgatgaatttgcaaaaggaatgagtcgctcccagatttttcaccacctacggcgtttcctgccgtaccaataaccaaatgcagcaatggacgcagctgcaatgacaccagccggtgcatgccatacatatgtaggctttttaccaagagc

SEQ ID NO: 421135 - DNA, 258 bp, Oryza sativa nipponbare
aactcgtacacacatcttattgccagttcctacgactgactggactgacttgagaaggtgtacaggacaattgccactggcatgaatgtacaaatgactggactgaagcaaccacggaccatttatgtagactggggaaaaaaagccccgaagttacatcgggcaataaatagccttgtttatgtgcacaacccaactaacagaattcggcagctggacaagcggactcagagcttatccatggccgcgatcctgaag

SEQ ID NO: 421136 - DNA, 429 bp, Oryza sativa nipponbare
acaattaaatccacgcattgaatttacaaaatgagtgcatagggcgatcaattcagttgcagtgtacaaatggaggaagtgcatttacagagaattgtttcagaagatttacaaggaaggcccttgcttgggccaaaaaagaacattttctgcagaaaatgtgtttttgcagggaaatgaatggctctacagctacagtttcaagtatatgcctttcatgtggaggaaacaagcatccaggcaccagaagatgatctccaagacgactaacgccaaggttccccagcgtttggagtggaagattgtctgaagcagagattcagtcaaattcaccaggttgttttcaggtgatcttcaatagaacccttgtacaagtgtaggggagatctcacaagcagcaagaacatacactataagcgccgtgatgcc

SEQ ID NO: 421137 - DNA, 301 bp, Oryza sativa nipponbare
gtataaatttatatatgtttgattttttatattttttatttatatggggtttattggggaacacaaaggcaacccagatccggaaggttttataatttcagaggggttacttttaaaaacactgatgtttttgaatccaggtcaatgttaaaggtaaaaaaaaaaataatacctttctccatgttatgctacctaaaagggaggggcaaccaaatttgggggcccaaaacaaattgcggttatattccaaatatttgcaacaatacaatccctatttccatttatgttcaaagaaaaattg

SEQ ID NO: 421138 - DNA, 343 bp, Oryza sativa nipponbare
atctatatctatattctttttggttagagagagagagaggaggaagagggggatataggaaaaagacattgtcatcggcatcaatcatcatcatcatcctcatcattttatccctagaaaacggcaaattttccaatgctccttgttcactttgccacacgatgacttctcccgctcactacaaaagctagacacgcctcgacaaaaacctagctagcaaacacaagggtggaacctggacctagaacaaaaatgggaaatcaagctcacttgtgcggtactaactcaggggccaaagccacgccaaagttgttacctatttcggtcatccccaacaaaacta

SEQ ID NO: 421139 - DNA, 229 bp, Oryza sativa nipponbare
gagcggccgacctcggtcgttctcgatctataactaggcgcgtctaggagagagagagagagaggaggaggaggaggagagcggcggcagccatggccaagaagggaaaaatcgcaactggggagttcttccgtcgttgggacgactggaggaggcttttaaagggccgaaccagttggtttacgttacgccggtgctagctattggcatcgactccttctggatctac

SEQ ID NO: 421140 - DNA, 213 bp, Oryza sativa nipponbare
ttaaaatatcaatcatgacattccttttcttttttgttgcaaaacggtgtcgatacatcagtaattcaatatgttacaaaagaatgcaacaataaataacagaactacaaaattgttgtctcatgatcctgaagtactgctggtgcatatcgttgttaacagcacgcagacgccttgtagctttaccctgaatccctgagtccatgacagacg

SEQ ID NO: 421141 - DNA, 153 bp, Oryza sativa nipponbare
ttataaatatcaattttgacatttctttatttttttgttgcaaaacggggtttgtgtgtcattttggggggggggggaaaagaataccacaatagatggcgggactcaaacctgtcgtctaaggagcctgacgcactgctgccgcatatcgga

SEQ ID NO: 421142 - DNA, 166 bp, Oryza sativa nipponbare
  unsure (1)..(166): unsure at all n locations
acctcggccgtcctttttttttttttttcaatatcgctcgaaaaaatgaatagttcgcactctggggcaacggggtacattattgttgcaaaaacatgaccgtaattcttgattatctacatgtacacaacatcaatttatacttaatanttcacacactaaatcc

SEQ ID NO: 421143 - DNA, 60 bp, Oryza sativa nipponbare
acgcgtactgcagctgtgctcctgctagagcggcctatagcgatctagactgacgcgtgg

SEQ ID NO: 421144 - DNA, 377 bp, Oryza sativa nipponbare
atactgtcgctgcggtcgaacagcaaattactgataattgcaagctggcaaacgagtggaagttgacaccaaattccagacattacccccgaagattacataaacatgtatattgctgccctgtcataggttcatgtcaactaccagtcattactccaaaggttcacatgcttctaacatcagtttgctgtcacaggtgcatgtcaactacaagttattactccaaaagcttacatgcttctaacatcaaatggtgaaacgatcaatggacaagcagtgtttactacaaaaggcatacaagttacatggtttctaaaagcgcactaccctaaggtggtaattgtcatcagcccccatttggccaaaaaactcccttt

SEQ ID NO: 421145 - DNA, 234 bp, Oryza sativa nipponbare
tttttttataccataacatacggcacaacttaaagggtttatggtgcaatttttatttttatttctctatttatttatctattcttttgccccaaaaaaatgttattaaaagggaggggccccacttcttccaataaaaaaaaaaccgggcccgaagggcaaaaaaaaaggacgcgatgtctataaaggaatccctttttaaatattcccacggtattttttgttttagccacc

SEQ ID NO: 421146 - DNA, 294 bp, Oryza sativa nipponbare
acccataccaaaatcaagtatcaagcagtcgtatgttatcaacatgcatgtacagggttacataaatctatcacaacgcagtttgattaaccagtgtgcataataacatagcatttatacgaaggctgtctaacataacagctgaatattcatacaacccacctggctgtaacatacatatactggattacggtgaaatttagccggcgaaggcgctgttcttctatacaacaattgctaacgattctaaaaaatctgaaccgggagactgcccagatcataatccggttcttt

SEQ ID NO: 421147 - DNA, 252 bp, Oryza sativa nipponbare
actcggtacggggaaagctgtcgcccagccgtaccggtacccgagttaaaggataatactaaacctgcttggtctccaggaaacgacgagtacggagagggttttgttgactcaagtgatcaagatcaatatgatgtttgtgataaaaatgatgacaaatacagatactgatgcttagtaagatgataacatggacctggacttagcgatacagggtgatgtttatgtaagtgggcttagttgcaatcgatg

SEQ ID NO: 421148 - DNA, 246 bp, Oryza sativa nipponbare
ccacacgtgtgcgcacacgtgtgcccatgcgtgtgctgactcgactgtccacacactcggttatgagaacggacttcactgtgcatatactagtagctggaatggcactaagtatggccttgtatactactggtactacatcgaacgatcgtcaaatattacaataatcctaaattgtacatgctttaaccacaaacagctgcttgaaggatacatatatggcgatcaagagctacattgcataac

SEQ ID NO: 421149 - DNA, 116 bp, Oryza sativa nipponbare
tccagccagccgtaccggtaccatgaatatcaggaactacccacacgtgcgaggcaatcattatggagaactaatatcactggcgatcgagtgattgatgatgaggaacatgcatg

SEQ ID NO: 421150 - DNA, 434 bp, Oryza sativa nipponbare
ccagacgtacacatcaactggcacaccgacgtggagagatgcatatagcgctaagcttacagacggcgggccaccaggatgacgcttgcctacttaatcgctgacgagaacgaactatgatggccactgactggatgacatggccaaacaatgactgtgactggatgcctctgctgtcagatcactgagatggaaaggatgacttgtcttacatgatgctgagatgcgagatacgactgatagttacctgaaggtgacaagcacgatactgggcttgcacgcaagacgtgatgacatactatacttaagcatatgagctccgcgttgacattagatgtgcaagcatatgaaaactagatgtgctgtaacttgaacgctgaaacagaaaaatattttcatatggtgaccggtgaagcagaggtatatccttttct

SEQ ID NO: 421151 - DNA, 323 bp, Oryza sativa nipponbare
agagacccaagcgtacgtccacgcgatctagttgtgataatacaaagcatgcacagcctatatggctacatcgattatctgatcacacacaaagtctgtgtacctccattagaaaatgcgatcacaaaattgatgaacaacattgaagatgttggcctatctatgatgagaaactatgctggctatatctgcgaatcactgcagcatgatgttgtctacatatgcgatacagcacgagagatagctgaatacagatgttgccttgcaagagttgaaaaggacaggtctgacgtgcttagatgatattgctggtagcacgatca

SEQ ID NO: 421152 - DNA, 334 bp, Oryza sativa nipponbare
agtgcgacccacgcgtacatctctctatcatcaggaggagaaaggaaggaagagggtggcatgaggaggaggaggcccccatgatccttcctacctcccatgggctgaacagatacggccgaccgcaacccagacgccatgataagatacacccctcgcgtgcacagaaaccttgctaacaatcgactcaggtctgtaaatagggctaaaaaagctatgcatttttacaaaaaagcctgacagaaaagacatgctccttcactaaagaaccctccaccaataatgcctactgagactcttttaaacaaccctcagaatgattacggtccaacaa

SEQ ID NO: 421153 - DNA, 81 bp, Oryza sativa nipponbare
ccacggcgtccgcccacccgtccagagactcatgggccatcgcaaataccaccgtctagagggggatctcggattacagat

SEQ ID NO: 421154 - DNA, 420 bp, Oryza sativa nipponbare
tggttctactcactcgtccgcccacgcgtccgtgtctgcctgttcaataggcgtccgtcgccacctcccatgactgttaaagaggctcccgtcaaaagcggcaatgcctactacagctccttgtgcgaagacgggggttgccaaggtccaaccctcgaaagcacccccagctgtatcctctcatacagcccatatgaccacccaaagaactcgaacatgcgtaacatcccaccgtcccaagaccttaaagacgtttaggggcccaagcttcctcagagccagatccttagggaggcccaagctagtgcagccccagtgccttaaatctccccctaccactgtatgcgctttgtagaagacctaaaagatcaccactctgggctccatggtggtccttagggcttgcacgacgtacatcca

SEQ ID NO: 421155 - DNA, 406 bp, Oryza sativa nipponbare
  unsure (1)..(406): unsure at all n locations
atgcgacccacgcgtgcgaagcaagctgcactcaatggcagcccttaccggagtgaacatggtgctcacggacatcggctacccggtgaacttcggataccgactgccgtcagccggggcatacctggaaactcaaccaccgatcatccggaccaggatctgaaccacaacggacgagggtgggaaagcacttatcagcacagagggttctgactgctattgggtataacggggcatctgcaaataaagcctaatgcatatactctggactctgcatgtaaaggcaaaggattatacgctccatcgatcagctctgtcctaaggattaacgtgtataatcttgagaccgtactgatgcttttgctgaattaatcttgaacctcgatgtatacaacagtgncgaaaa

SEQ ID NO: 421156 - DNA, 339 bp, Oryza sativa nipponbare
ctacgcgtccggcagccatcaccggcatgagagcctccacctcgcgcggccatgcttgctctgaggggagccagggtggcacacctacggtacgctttcgccgctgtgggtgccacctccacgccctcgttttccgggttctcgcgccgcctcccgcttcttgcctccgcggccctgttgcctctgccgggatgcatatgcttcttctccggtttcgccgtcaggagggataggtaccgtccaatgcatccagtatgcggcgctgttttgaggttcgatccagaccaccaggggggcatggtgtgcggttgctactgttcccagggagggcaaggagat

SEQ ID NO: 421157 - DNA, 161 bp, Oryza sativa nipponbare
ccacgcgtccggacttccccacctttatattgatcctgcgagtactcgactgaggacgcctgatacaacctttcataacctcagagaggctgcgagatgctcggattcctcacctcgcactgcctggacgcgcctcatgttctgtggcgcgccaaacaaag

SEQ ID NO: 421158 - DNA, 328 bp, Oryza sativa nipponbare
ccacgcgtccgagcaattggtgaagaaattgacaggaagggtctgatataaagactatatatagaacatgttagcgtgtatataagatgctatagatcggatctgaaacgcgtggaggggagctatggcgcaaagaggtctttccatgaatagaacacataatgcttagaggtccgagattaatgctctggtctatgcatgtatatgcccagatgcctacgctcatcatgctctggttagggacactgccatttgctgcagctgaacgcgatactagtacaaactgctcagagggctaattgctgtacgacatcactttctacacaag

SEQ ID NO: 421159 - DNA, 379 bp, Oryza sativa nipponbare
  unsure (1)..(379): unsure at all n locations
gctgagtcgtacccacggctgctacgcctacagctgctgagcctggggaggctgtatcggaagacaacagtgtatggcgcatacaccgacctgaccaaggacaatggctgacacataggtggctacgacagctgaaaccaagctagagggaggtgcatccgtagccaacacgcttgagagaggcccatccatctctagctaaaacgatggaagctgatccctcactgtagagctcatgatatgtcaccaattaactggggggaagccaatacattaccgataagctgaaaggaggctgatcaggaaatggatcatagggagtagatccgctatgtggtctataggatgtganagaatgttcttcttgttatagctattt

SEQ ID NO: 421160 - DNA, 84 bp, Oryza sativa nipponbare
agcggctattgcgggctcgactgacgcgtgtggtaaggactgaagcgatcccaagtgcgtcgtgttctactgacggttgcatgt

SEQ ID NO: 421161 - DNA, 108 bp, Oryza sativa nipponbare
ccacgcctacgctttagatcatttgcgagctgtccctagatatgctctgacctatcgtgcgcggtctgtccaaatatccaccgtgagaccttcaagtgtatgtctgat

SEQ ID NO: 421162 - DNA, 189 bp, Oryza sativa nipponbare
gcgctacagaattctagggtacacctcacagcattcgctcgacaggatgatacgggactatcgaggagtccatagaaggcatcacctgcgcctaactgggaatccacaatatgacccttggccatctgaaagtgaccgggctgtatgaccctgatctatacttcattgacatggctggcatcataatga

SEQ ID NO: 421163 - DNA, 390 bp, Oryza sativa nipponbare
gcagtccttattacctggtacgaccgagacgtctggagtgatgttgagatgaatactcaggcgagggctgacctgacctgtgctaggatggaagcgggccatggtgtccatcgacccgcatgtcgccgggcgtgcatctggcctccgggcccaggcgcgccggcggtaggtccaggctcgccagagctggggccgccgccgcctccgccgacgcccaaaccggacggcgggccgtgctctaactcgtggggacctagatcgccggagaagccctatcacgggtggcacccgacgacgacgacttgccgatctggatgggcccctcatctgccttctctggaaggatacaggaggcgcttatctcgcatcactcgaccggcacggggtggt

SEQ ID NO: 421164 - DNA, 370 bp, Oryza sativa nipponbare
ccacgcatccggtactgatgatggcctctctttgcaccccacctgctaccgccggtgcatgaccgttgccccgctcttcccttctccattacaagaaggctggtgggctcaccccatctccatggtgccgatggaggagggcgccggtggacaccgcaagaccaagctccattcggaccgctgcactatcctagaccatggtgactggaaatgatggccctatctagtctatggctgaggatgcagaaaggctagatgcattgcatgcatctggaaccagaaatgaaaaatacctgcccatgctctctagtatttgtggcggaattaccaccaaatcttctgcaaaggacataccaatctatgatcacat

SEQ ID NO: 421165 - DNA, 390 bp, Oryza sativa nipponbare
ggaaacgacccacgcgtgcggttaccatcaacctgcaaacgcgggaaagatgggcattatctgaacctggtcaagcacgtgcgagaagcatatgaagcatgtgaacttgtccgagaaggatgctcacgtcacaataagagctagtgcacatggcctggcgctagtctgagtgatgctcgtatcctgtacctgactaggctatggagttagaacatatccttgatgcattagggaaagatcggatatcgtccctagctcccttagacggaattgcttttaaagtggctagcgaccagctcttgcatacgcaaagagccaggatctgggagtgctctgacaccaattgcgcttggctacaatgccccgttttttaagaagatgcccttgatt

SEQ ID NO: 421166 - DNA, 315 bp, Oryza sativa nipponbare
ccacagcgtccgacgacgcgtccggtcttagcgaatccaggagggcatgcagcatcatgggctcaacctccggcgatggcgtccacgataatggcttcatcgtccatcgtcctcgctgcaatgaccccgttcgtgagatatccgcggccgtccaatgccgccttacgatacataaggggctgcggcaccggccggataaccatgagcacggggctgcggttcgggccgaatacgggtgaagtccttgggggcatgctcggcgcagactccggctgacatgcggggcgagtctccgggcgactacgggtgggacac

SEQ ID NO: 421167 - DNA, 108 bp, Oryza sativa nipponbare
tagcagagaagaagaataggatgccgaccggtgctatcatggtaatgggatcgtcctgcgtattcacccttgttgtcaaggggcgcagcctgcacattcaggctcctc

SEQ ID NO: 421168 - DNA, 319 bp, Oryza sativa nipponbare
tcacgcttacgtcttccgcgtaaataaatgactcactcatggtactatgtcgtctgagtatcttgttccctaatccggccatgggctcctaccttcaaggcgaggatgacgttacctggtgcgaatatggaactgagatggtgcacaatctgtaggaaaaatgtcaatcgacctcggcgccgttctcgtcgacctactcaagagtgctcggcggcttgataatgaactgggcgatcatgtccacggcgtttgacaaccacatgttatacctcggtcacagctttttgaacaccaccatgatcctggacggttacttcta

SEQ ID NO: 421169 - DNA, 348 bp, Oryza sativa nipponbare
ccacacacccggataccctaggactatccgggaaaaacaaacgtgaatacgaaggtatgagccgactcaaaaacgtgagcatctagagggattcgattgtaccatgcggctgccgataacaatttggtagctgggtcaaacttctacaaagtaacactgatcgatctgtacgtatatggtgcaggtgacactgatgctatactaggctcttaggctgtttacaccgaccgggacctaggctcgactaacatataatgcacgatgagagattggcggcgttagttactcagctggcgtgaccatcgagcttcgctaggtgatgatccaaagtgaccaacacatatgggg

SEQ ID NO: 421170 - DNA, 295 bp, Oryza sativa nipponbare
tgaaacgacccacgcgtgcgaactcttactaccctcaagatgccggtatgtgccaacttggagggtgcactcgatgcaagcataccagaaaggcggtgttgcaaagggtacaatcttgacagtttgggatatatgcccctgaagtgcttttgggggtgatggatatgaacccacaaagtggcttgatgaggaagagctatcaaaggaatgacagactaatgaaaaaggcgtacttgtgtgcaattctcaaaaaaaaaacgtgcgtgtttgacaactatccaccttggacatctga

SEQ ID NO: 421171 - DNA, 340 bp, Oryza sativa nipponbare
ccacgctagcgtccacgcgtgcggcgactgcgccgtgccctagattccgacggagctggagccgcgcactcggcggcaaaatcaccgatgtatatgccctcacatcgggggcaaatgggcggcgaatccggtcttcgatccgcggaatccggagcgggtcagccatgatgttggtgcagttagacgagtcggccgcggataaagctgatgcagggatggcagtggcgccgacgtccaacttggggatggcggacacgggggtgtaccggtcgggggtctcggactctgacagtgttggtttcctcaggggccacggtatatgatcagtaatgtatatgtg

SEQ ID NO: 421172 - DNA, 324 bp, Oryza sativa nipponbare
  unsure (1)..(324): unsure at all n locations
actggatccacccatgcgtacgctcgacggagcgagttgattcaaacatcagaacgcgccgacacgcatatggcatcacatgtgacaaggcgcctacgattctagggttattctcgcgcctnctcgggtattctccgcgtttaatcatgcggcctgcttcgtcagttgtcgtcctgatccacgccgacgagctcttctgcccttgacgcatagtgtgacgaggagtgctgctccccttgtcgcctagtatgatgccggcggtagtcgctgtggtactgtgctcagatgcctgcctactcccctgcagcatacagctacaatggg

SEQ ID NO: 421173 - DNA, 238 bp, Oryza sativa nipponbare
ccacgcatgcggacacgcatccaagctaattaagcgcaagacggatgatagcaaagaagaagaatagtatgccgaccggtgctatcatggtaaggggatcgtcctgcgtattgaccgttgttgtgaaggggcgcagcctgtacattcaggctcctcgccgggttcagttggagcgttcgtgcggtggactacagcctgtagcagtgtaggcgtgtgcaggtggactacagctctaaca

SEQ ID NO: 421174 - DNA, 444 bp, Oryza sativa nipponbare
ccacgcatacgtcttattagctcctgagagtgaatcccctatagctgagcgaatctatgaagaaaaagtggctcgccaacccgagagtggaggaaaggagaggtgctcgctaggcccccaagagagggggagtagttagcgtggtgcttgcacattgctatggtgcgtgtcaagcagcgtgagacaagttctttccctctgtgtctaagagccacaacctgctgctattgaactgggacttcaccgtcacaggcgccgggaaggacaactactagtacacttacaggaggttcgcctacgagcttatcgcgctgatggaggagcgcaccttatgcgcgtcatgcgcggctgtgttggcgcactacatgtacgccatggccggctgcatatcctcccaacggagacctcgcctatgtacacacattttgctggtgtgcgccttcc

SEQ ID NO: 421175 - DNA, 242 bp, Oryza sativa nipponbare
atccacccacacgtccggtattcgctatggaataagcctaaagagggcgttgttgctttagagaatatgcctatatcttttattattgtggtcactaatgtctttgccacaagtgtttggaagcggttcccgaagacgtaccaccaggctgtcaccggtgcctgaaattgagcgtcattatcaacttgaccgtgacaaaaatttaaaggtgatttattattaaactggagattttgtttggg

SEQ ID NO: 421176 - DNA, 205 bp, Oryza sativa nipponbare
ctacgctgttcgcaggcagcttgggcactcactgggctttctgggtgcaagaccttgctcaccgacgctcagatggaggtgtgaccctgccattgaccaagcaatagaatttcacgttaactggtataaaccattcaatggagccgcaccctacccaatataacttgtgttaaatggccgcagaccttggaaattctattgaggg

SEQ ID NO: 421177 - DNA, 105 bp, Oryza sativa nipponbare
gcggaccctagattctcgtgtcgacccatcgcgtgcacagaggctgctgttcctgaccgcgctgctcgggacgtgtatgtgtatgtactgacgggcgtgctcgac

SEQ ID NO: 421178 - DNA, 140 bp, Oryza sativa nipponbare
ccacgcgtacgctattgaatgtgattcagagtactcgtggagatgctcagaggtatgtatcgacaaacacagatcttactgtgaggaaacataaagacggacgcagccattctctgttattaggcatcacttagagacag

SEQ ID NO: 421179 - DNA, 197 bp, Oryza sativa nipponbare
acgaagtcgtcccacgcatacggccacacgttcgaagacttcctagatcaacgaatgcgagagcttgttgagctgcacaaatggccctctctttgatggggtcaagtgcaaccacggtatgtcctttgcaggggcttaagtcaactgcaggtatgcccgcgtcccgactgtccggaagatcaagctcatgcaacttt

SEQ ID NO: 421180 - DNA, 333 bp, Oryza sativa nipponbare
taacactactgagtatggggatagctgtgccgctccgcaggtacggataccatattctaggcacgctcctgatgaacggatgaactttcgaaagcattcatgcttgtgaagcattgcaggtcgcaacattccttgcctaacgaaacagttccacaagctccctctcttgcgtaaagattgagggccaaaaatccctcctgtagtaaagctatagagtggtttagggacctcgccctgaaaaaccttaaaagaacctcggaaactttggtataattcttgggctttatcatccgaaactctgatgtagttcttgatctttggttccacccaata

SEQ ID NO: 421181 - DNA, 191 bp, Oryza sativa nipponbare
cgcttaaggggctctaggggtcaaagaatgtgtacactgttggcattgttcggataataggctttgtcaacgttaggcaccggcatgcaaagagctacgtcgcgtataagccctcgcgttgcaaggaggcaggcggttactaaacccttttatttcgtagggcctgttctatcttctccattttgtttttg

SEQ ID NO: 421182 - DNA, 80 bp, Oryza sativa nipponbare
cgacgcatctgaattgccgatggggactttatccgctatgacctcatttcccaagggtacgtgtataccttgtggacgga

SEQ ID NO: 421183 - DNA, 139 bp, Oryza sativa nipponbare
tgagtctacccacgcgacctcccacgcgaccggctgggcatttatcaactgcataagaacggacagagctgacagccctcaaatgcacatctacttttgatgatgtcagacgcatctagtattgccagtttgggtgatt

SEQ ID NO: 421184 - DNA, 98 bp, Oryza sativa nipponbare
aaccgaatatcgagctcgacccacgcattcgggcaaccccagaatgaacgtgtccatcatatattggggagactaacatagaacaacccatgcttaat

SEQ ID NO: 421185 - DNA, 382 bp, Oryza sativa nipponbare
ccatgtaaccggccacgcgtccgccactatctacctctgtagcgtggcgcctggcaagcataacatggatatggcgtgtgatgactagcaagacaagaagggacacttgggcgattgacgagccctataagatggaaggcttctgatacctgccttagctctgggatggaatgtctctgataccggccttcccagcgggaggaagtacctctatgaactccggcgggagggggaggaaggacacgcagacagtgtcatccggcagaccctcggtggcacgcgggagttcccatcgcgcagacgctgctgacctaggggttcgccatgagctcgggggtgctcgatctggggaccggctaatagctggcacggatgggctccg

SEQ ID NO: 421186 - DNA, 146 bp, Oryza sativa nipponbare
agacgtacgcgcgccggatattccaggagagacagacacagacgaacgcatatcgtagaccagagacagagagagaccatctgctagcttagctgcgatggcctcgtccaccgtgtgcggtcttgcaggggctacactagggcggc

SEQ ID NO: 421187 - DNA, 294 bp, Oryza sativa nipponbare
aacaggtgcattataacctgccgggggcctccggaaaacctacctgacgactgaggagctccattcctggaacccaaaggcaactcactacccccttttgcttcgtgcaccggccaactcgatggcgcacatggcaaagagcacctgtgcctcaaaaactacctctactaaagagggcttgttcaacaaaaacaacgaatcctctgctgctcctgtcccatacaaaaagtgcacctgttctggttgttcctccagactacatctactgctgtactgttagaacctcagggggac

SEQ ID NO: 421188 - DNA, 96 bp, Oryza sativa nipponbare
catgacccacgagtaagctagaccgatctatctcacataaaattgaggtagaaggaccgattgaccacccacactatcgcgctgcctgggcgatgg

SEQ ID NO: 421189 - DNA, 126 bp, Oryza sativa nipponbare
ctagcgcgtccgcatcggccagcatcgaggttcctgctggccggcgcgaacaggcttcagcagaacaggctcggccagacacttgagcttttccgacaacagggtcaggtggaggatgttgatctt

SEQ ID NO: 421190 - DNA, 185 bp, Oryza sativa nipponbare
ctccgagcctggggggctttgggggcccaatactcatcttcctccggggggagtaaggacacaatcctatgttttcccgccggttgcagtcaaatcaaggcaatggtttccggttagcctgcggaagcggtaacgcctgtcacgcagttgtggtggcggagcaaaaaaactggtaaagaattggt

SEQ ID NO: 421191 - DNA, 309 bp, Oryza sativa nipponbare
ccacgcgtgcgccttttgttgctacttaggcttcttaactctgggtgcccgccgaggaacaggagcaagactaacttccgggctgccgcccgaatacctacctagcggcctgaggagctctactccggaacccaaagccagcccactgccccctattcctacgagcaccggccacttcgatggcgcctatgccaaagagcacctgcgcctcaaaaactccccctactaatgtgggcattttcaacaaaaacaacgaatactaagctgctcctctcccatcctaacagtgcacctgttgtggttgttcct

SEQ ID NO: 421192 - DNA, 172 bp, Oryza sativa nipponbare
gtcccgggtccggaatcccgggttccccccttgagtcatgtttaaagggacggatttttctaccataaagttttacaggagggctcaattggggtcccaaaaaaccgccaagccggggtcaatgggatgcctggaccccgtacaaaaaaggtgttttccataacgtgaaaac

SEQ ID NO: 421193 - DNA, 361 bp, Oryza sativa nipponbare
ccacgcatccgaggagatcagggtgcaggtcgaggacacgatgtacctcgtcatccgcaccgagcttgatgaccgtagagatgccacggaagatgcggctgtcgccgaaggagctccccgaggaaatttcggctgacggcaatggcggacgcctacgggatatcggccgaagacacccaccgcgtgctcagggtaaccgtacccaggctgcatacgcgggctcgccccgtggtcaacctctccaccggcggcgccggtggcgctggaccgtgctgcgacctcaatgaccgagcagactgattagcgattcgatatcgctctggaagcttactaaattacttagttaagctgcactgtgagc

SEQ ID NO: 421194 - DNA, 272 bp, Oryza sativa nipponbare
agtaacggaatagatggagcgacccacccgttcaatgaatttgaatgaacgagtgtgcgatcagtcagagcgttgtctgcataaacatgccatgctctatgtcacagtactagaacgctctgaagctcatatggatatgcacaactagaacgccataatctatcatggaaggcgacaatgccaaggccatttatacatataatgcctatgagcgcgctgaagaagcagacatcccagccctatgggcctcatgtaggagggtagcccaagga

SEQ ID NO: 421195 - DNA, 344 bp, Oryza sativa nipponbare
ccacgcgtccgcccacgcgtccgtccacgcgtccggacgcctactccggtcctccattgcttgcgccaacaagcccactcgagatctggatcggccaggaagagcaaagcagatcaggggaggggagcctgcacatctggaagaagctcttgatacaacagccttaacgtttgttaatactacaagtaacagcagatgcgcagtcagctcccatgaccacataaaggctatgcgcacgcgtcacccatggcctgcttctaactgtaacgctggaccacgcattggcatgtgcctaactgagacgctcgactagacggtctacagcgggaccattaggctggggc

SEQ ID NO: 421196 - DNA, 95 bp, Oryza sativa nipponbare
gcgtaccgtatagtttctgttatgaccgactgctttcgataacgtacacatgtatcatacatgtaggtgctttgcataacgaacacatggaacta

SEQ ID NO: 421197 - DNA, 266 bp, Oryza sativa nipponbare
caactcatacgtccacacgtgagacaccacacatgaactgagagctgaacacgcgagccagcgtacatcacacgatcaatctaagccgcgggcactctgatgcagccgtgcaatctcgccggtcgggcctcgtccgccgcgctgtcatcgtgcacacctttgcacgtggccagagcatttgctgtctacaccggtgcatccggcaggatcacaagctgcgtgcagatcgacatccggtaggccgctaacaagtgcgcagatgacgt

SEQ ID NO: 421198 - DNA, 232 bp, Oryza sativa nipponbare
cgcacccgaattgcgaaatcgtcacacgcttgcgaccacacgtccgaagaaatgctgagagaatactcaggcgaggtctgacctgaccttgctagatgacacacgccatgtggtccatcgacccgactggcgcaaggcgtgcagctcacgtccgcgcccagacgcgccagggggaggtccaggatcgccatactgagggccgacgccggctccgacgacgtgcaaaccggtc

SEQ ID NO: 421199 - DNA, 183 bp, Oryza sativa nipponbare
ccacacgtgcgccaacgtgttcatcaacgcgtacgaccacgcgttcgattcttttgattagctcagatgagtcattattttagtgggtgaaaactcatatgtacaccatggtagttatgaccatgaactcttcctaacaaaagagagattcttattgacaatctgctatttatcaatcactga

SEQ ID NO: 421200 - DNA, 285 bp, Oryza sativa nipponbare
agcgtcccacccgtgctaccacgcgttcggaaaacgcatacacacactgatacaatgtcctgggtgaacacattacagagctgatcagcgctcgagggagcagatatcaatggttccaagatcggacgtgggaggggatcaccaaccttctggtgctggacatcgacgataatggacgggagcctatgtctagagagcgaccagaaccctgaagccttcatctctgctgagaggtcggagaactcctccatgctcaggtacgacgatctcaaggcctacctccag

SEQ ID NO: 421201 - DNA, 352 bp, Oryza sativa nipponbare
ccacgcgtgcggccacgcatccgcccacgcgtagcaaggacgcgtgggtctcgaactggatgcgggaggaatctagtttccttttcttacggcggctgagcccgcgcgtgctgactcttgttcaacgtcggaaggcgcagccgcatgacgcaggatgaaactagaaaagcattgcaaaatgccctgtgctggaagaagacagggcttacaaaatggcttatgcaaattgaaagaaggcaggaaatactggctgcttcagccggaggtggaggatggtctggaggaggtggtggctcacgaggatcatcattggacgatcctgggatgcatcaaaacaaactctttttacgaa

SEQ ID NO: 421202 - DNA, 305 bp, Oryza sativa nipponbare
ccatgcgttccatcgtttatgaggagattgtcaatactcaggtcctagcttacagtggacagcctgagaagaatttgatgaacttttggtcaatggtcgaaaatagcaccggagagttcttgttgttagatctgctgtatgacctgatagtcgtgcttgttacacaacctgctagggcctggacacaggacattctgacaccacactgtataccggacgcgatgcctgctgaccttattacctagtggtgacaagacgccgtcttcggctatttggaggccctgcttgcgccacattgctgattg

SEQ ID NO: 421203 - DNA, 236 bp, Oryza sativa nipponbare
ccgtaccgatccctaatttcatggtcgacccacgcgtgcgcagatgctcagagaatgctcaggcgagggcggacctgacggggatagatgacacacgccatgtcctccatcagcggactcgcgcctggcgtgcatctcccctccgggcccatacgcgccagcggtaggcccatgatcatcgtcctgagcgccgaggccgcccccgccatgcgttcggactggaccctacccccttc

SEQ ID NO: 421204 - DNA, 340 bp, Oryza sativa nipponbare
cgcacccgaattcccgttgcgacccacgcgtccgcccacgcgttcgggcattgctttctatgtttcctctactgaagatgatgaactttgcctcagtaatcaaggactaatcatatgcaatatgccctgtggctttaggatgcatcaccctgacaaaataactgctgatggccaatcatacgcgccatattatgactgctaatcaattagctcacgcgccacatacatcatgatactgaatgcacgttctggaacgtacaacatgacactgactccatatggcttctaggttcactgtactgaatactagagatccttgtttgcttaaagcacttatgac

SEQ ID NO: 421205 - DNA, 317 bp, Oryza sativa nipponbare
tcggcctacgcgtccccagcctcgtccaccggctgcggtcttgcaggggctacactagggcggcgcgcgtgcttgtgaagaaccttcatcgacacgcgcaacctggacaggaacgaacccatcacttacatgacacctgcacaggaacggcttaatcacctccttgacgtgatcggatgactgcttatcgagggacccgaacctgatcgcgttcgggctgataacggggaccgccccacggagctcttcttctataaaatggaacaggatcactgggattttcttttgcagcatgggctagaatctctgctacttct

SEQ ID NO: 421206 - DNA, 269 bp, Oryza sativa nipponbare
aggcgcacggactgcacggggagggagcattgttacgcgactgcccgccatgatgtctcctgagtgcgccgccgtcgccctgctccatcccgccggagtcgccgccagcaacagagctcgccggcgtgtactgatgctcgaccaagaccggccgttgtgggggactgaggtgcgacgccgccggcgccgacgatgatggagcctcgagactccggcgaggtgcagcaagatgtacaaacccggctaaagagagggatcttctgaaaata

SEQ ID NO: 421207 - DNA, 113 bp, Oryza sativa nipponbare
gaaactcgtagacatgtgtcctccaaaggtttggtatttacagaggggtgaggcctcaatatgttttgtttatcaagcgtggggggggattaatgtggggtgattatttatgt

SEQ ID NO: 421208 - DNA, 299 bp, Oryza sativa nipponbare
acccgaaaaaccgggccgacccacccgcccgagaagaccagaaccccagcaaaaaccgggggggccggaacacggagccgaggggggaaccagaagcacacaaccaggggcggaaggccaacacagaacgcccgaccacgggagggagggaaaccggagggaggcccaccaccacaagggcggggaccccggaggaggcaaccagggccaaagggagggcgaccgggggaaaaaccacggggacaaaggagaacaagaggacgaaaggccacgaggaccagccaggagcggacaagaca

SEQ ID NO: 421209 - DNA, 383 bp, Oryza sativa nipponbare
ccacgcgtacgtggacgcgtgggcggacgcgtggggtcgacgattcgccgacgattcccaacaagagggtatcattgtgtggcggcacctccttcaacgaccgccttaccgcatgggtgaacagtataaccaccaacactttccgcatcaccattgaagacgagaacgagaagaagaaaaaggagaattaccactggaacaccgacaacgactacggcgagcacgccatggacctacagaactgcatggcgccggcaccgcgcgccctgaagataagcgagtcatccgcgaaggggcactgtaagatgaaacgttccacgttcaaccacttaagtcgactatggcaagaggatcatatattcggtaagagcattatcgtgggg

SEQ ID NO: 421210 - DNA, 327 bp, Oryza sativa nipponbare
acacgaataacctagtagacctatgcgttctacgagaccagaaacttatctgaaatctggtgttttggagctctgttcttaatgtgaaacctgcagcactcgaacttggatcggaattgcaaaccaatagcacacgaccacagaaaggtgtgtacccaggatgtggaacgacaacacaactgcgaataccattgatgagttatcatagcacaactggaatgccatgtgttgaattatcttgaggaccatggaatacgaggtgatgaaatgctttgtggaccatgcaaggggggaagataccattttatggataactggcacagaccc

SEQ ID NO: 421211 - DNA, 185 bp, Oryza sativa nipponbare
tcacgcgtacaaggacacatggggcaaaacttactggagcgcccactgcgagagcttgttgagctgcacaaatggccctctctttgaggggctcaactgccaccaccgtatgtcccttgcaggggcttaagtccactgcaggtatgccaacggcccgactgtccggcagatccagtttatgcaac

SEQ ID NO: 421212 - DNA, 331 bp, Oryza sativa nipponbare
ggagaaaaaccaagtatattcaacattcttcgtgtcctggaatatccggttatacagcagaagaattatacagtgctcgtgtgctagtacattttgggggtggaaacgtaccttctacctcgagcctgcttaaataattgttacaaaatgagaagtatgagaagacatcgacacaatgattaccatttacacccaactcagcttttctaaggcagatcccagcagccaatttgcaaacaacaaagcaaatgggatatacagagtagagacatgcgaaagttatatgcccttcgtccaaaagaccatgcgtaaacagaagcagcagcaatac

SEQ ID NO: 421213 - DNA, 216 bp, Oryza sativa nipponbare
ggggaaaaaaaattctttttttaaaaaaaaaatccccttttttccaaaaggtttttgccccccctttattttgaatttttttttaaaaattttttaataaaaaaaaagggggggggggccccccttaattaatagagtctcaaaaattttcccccttccccccaaagctttaacttttaacgcccccactttttttcaaaaaatgaaaaccctaaa

SEQ ID NO: 421214 - DNA, 328 bp, Oryza sativa nipponbare
  unsure (1)..(328): unsure at all n locations
tttttatatttttttttttttttttttttttttattttttgtgagggggcgtgggttttagggggtggggggtgtcgttttgcgaaaaaggccccccgtgngggcgtgggtttatgttagatttaggggggggggcccaaaaatggggaaacccaagccccgggggctgtgggtggggtaatagccccaaaaccccaatcacggggggcccggggcccaaaagacttcggggggcgcgtgacctaaagggggcccattttgtgggccccctcgggggcatccaaaccgggggtgagcttaacaaaagccttttttttcccatcaggcc

SEQ ID NO: 421215 - DNA, 411 bp, Oryza sativa nipponbare
gaatatataagctcgtgcctgtgttaattgagattccagaagaattgtcacaaaccgttgaggaacatgagcctagacgcttaagatacaataatttgaaatcacattaaacgcatgtgcaggatgtactgccaatccgagcagagagcaagatttgcaaagaaaacaaaaaaaaaatgtagctagcacatatactacttgtacaatcctcgagtgccatacatagaagagctacacttgagaacaaacttctcgaaattactcaaattgagctacctttagaagaactatattggctttgcaactttactcaaccaaccatttcttgtcttgcaaaattcagcagcaccattccttgttgattgaccgaaaatagcctgtgccccgatagtaaacctaatttaccaacca

SEQ ID NO: 421216 - DNA, 107 bp, Oryza sativa nipponbare
cagaaatcatttttccatagaaagagaaccaggccatcttatgtgtctgaaggtcaaaacgaatcagactcatgcgattgctctgaaacagttctttatatatgcta

SEQ ID NO: 421217 - DNA, 392 bp, Oryza sativa nipponbare
  unsure (1)..(392): unsure at all n locations
cagatgcaaaataagaacaatataatggtgtgtgccaaattcacttgagtttctagtttcaaaaaatcaattcgtccttacaaagcaaaccaaacctctgactgcacaggatctacagagcaacagatcacagctccaaagtatattgacctgcctgcaaccttgtggctccacgcattcagttcttttggtgtaactggcactcaatgtatgaaatttcagcatggaaaggaactgaaaggttcatttttctttcaaagaacaaataaaaaatgtaatgtcaatcaccaaagaaaattgtgtagaaagtgaaagagtatagcaattagcccacttagcagnttggactgatttcaagtctactggagcaaatggagtgtccctaagcagag

SEQ ID NO: 421218 - DNA, 270 bp, Oryza sativa nipponbare
  unsure (1)..(270): unsure at all n locations
gtggtgcgacaacaatgtgaacattcacccttgattaatagtggggggagccgagagacagtgnngtgagggggggggnacgacaacaatgtttatccgcacccttgatnnattcggtgaggggatggtggtatgannnataacagacatggggggttctttgtgcgggggctatnttggggggggggtccctattttattaagggaagaataggtaccaatatatggtaccaggnccatgtttgtggttgcgaccccntctgagtaacc

SEQ ID NO: 421219 - DNA, 303 bp, Oryza sativa nipponbare
  unsure (1)..(303): unsure at all n locations
ctttatttnnattttacatttgaaatcgagagaatccattattcattcacttaatgggcagttgatatacacatacacttatgacagnactnatacacctcaaaatacaangattacnnatactacacgtacagataaaaaaccatacaaaccacacatttaacacatggagaaacgnancnaaaccacattaaactgcatcatatccatctcagctcgcttacgcgtacgtacactacacatatatactcgagtactattgcccttttctcctatctccgatggacgtaactcctctcatat

SEQ ID NO: 421220 - DNA, 400 bp, Oryza sativa nipponbare
  unsure (1)..(400): unsure at all n locations
taataaggtatatgtcccattgaaaatggtacttacatccatcagcatacccaaactcatgcatgcaggtgtacaggtaacataacctctatgatatgtttacacaggaaaacataatagtacaactaatgcatgctctgaaaacaaatcatacaaacatacatacangggagcacatatgctgctagctctgacgcatatatgtgcagactttttacaagcatgcatgcatgatgcacattctatatggcaacatcgatgccaccggcaatctccacggtgccggcgtcgtcgtgctccgacttccgcgccgncttccggaggcgcaggacgccggcgagtatgtccaagcatttctgcggcgcgacgagctgggggaagtgcccgacggagccgatga

SEQ ID NO: 421221 - DNA, 323 bp, Oryza sativa nipponbare
  unsure (1)..(323): unsure at all n locations
aatcaaagatgatggatcagatcaacaaacttancacgggggagtacatcacaagagagaggtgatctaacttgtgatgggantaactttgtcnnctagcgactctatactttgatctaacctaagcctatgtgttcttggcggcggctaaaggtataagaagagggggagaacgaccacaggggtgttggtgtcgtgctctaaccctaggacgcacccctaatgcgcccaacttgatatacagcacattgggcccaaatgaggtgacgcaacatcgtggacagaaaagtactcgacagtaaaatgatgaatgcagctgctcc

SEQ ID NO: 421222 - DNA, 293 bp, Oryza sativa nipponbare
  unsure (1)..(293): unsure at all n locations
tacaaaaatgtgaaacctaataaatatgaggagcttatatagacaagtgttgagaaagataatnctaatatgggacaactnggagtgttnnaatgattgctggataagacccctacgctataaccgcgtacagctaatttattgaaatnntactggcctttactcttttcaatgacctgatgtatcctagttacaacaacgatgaacctttttagttctttacatgcttatgaagctgcctgaccttttaggacctcgccatcaatcaacgcaatttcactaaaagaattgtg

SEQ ID NO: 421223 - DNA, 154 bp, Oryza sativa nipponbare
  unsure (1)..(154): unsure at all n locations
cattgcatgctctcttcaaagatttttgccacactgatgatatnaaagcagccttatctcttttatangtnggancatggaanngcaggcagaaccttcccagtgcaggttccaaatcctactttggagcccttacccttccaacaagcttttc

SEQ ID NO: 421224 - DNA, 52 bp, Oryza sativa nipponbare
  unsure (1)..(52): unsure at all n locations
tttagtgccacataaataagccaacatcccctcaaaagnaggccaacatata

SEQ ID NO: 421225 - DNA, 169 bp, Oryza sativa nipponbare
  unsure (1)..(169): unsure at all n locations
agcagcaagcctaattaattcacgggaaaaccaattataaaagatggagccaaagatattgcaatcgttgttgtcagaaagatacaacagtgcacagcacggcatgtncnnacacgaccgattataactgaacttatgtgctgaaaaaaaaggcaatcaaagtgagact

SEQ ID NO: 421226 - DNA, 341 bp, Oryza sativa nipponbare
  unsure (1)..(341): unsure at all n locations
ttgtttgtttttagtaaagatcactaatttatattcagaactgaaggggtgaagctgatcagggtggctagtagattaactcatattgcattgctcttnctacaaataccccctccaggagtgccgcataaacaacnnggcccaaattcactgaagagtgagcccatntnnngccaatggtgtgggctaaaatgctgagcagttggccagcagcagnagtgattttgctcatcactgcagtatagtgtgtaaaactagcagctggtgtaccattccatccaatacattggcaaaatgaatgaaagtaataaaaaggaacaattttgcagcactaacacata

SEQ ID NO: 421227 - DNA, 59 bp, Oryza sativa nipponbare
  unsure (1)..(59): unsure at all n locations
cagcgtcgcccttttntttnnttttggacagaaaaacaatcctcgcatgcaggggaaaa

SEQ ID NO: 421228 - DNA, 86 bp, Oryza sativa nipponbare
  unsure (1)..(86): unsure at all n locations
gtggcaggatcagcatcgtgcatgtgatctgtgactggntgagtaccacagcaaagtctacatcgccgatgtgtttactgacatta

SEQ ID NO: 421229 - DNA, 183 bp, Oryza sativa nipponbare
  unsure (1)..(183): unsure at all n locations
aggatgcatgggatgtgttgacattatattgcagatgagacaaccgatggatggacgacgttacagctgcaatgcatggttggcttggttgacagcacancacagattttggaattaaaggagatttacgtaaattgtttgtacagaagaagagagtnntaattgattgggggtgggagacga

SEQ ID NO: 421230 - DNA, 304 bp, Oryza sativa nipponbare
  unsure (1)..(304): unsure at all n locations
ccacgcgtccgggaagagaaaaaaaaaatggagctcttcgtctccaccgtcgcctccgcgcgcgccaccggccccttatgcttcgcctcctccttccaccaccgccgcgctgctcctcccgccgtcgccgccgccgncaccctccgccgnagcaaccgccacctnccgactcgaggatggcggtgcgcgagcgcggcggcgccggacccggtgccatcggaggagcccgcgtcggcgtcggcgtccaccgtcgtcgtcacggaggacaagcccgatccgccgtcggcggaggagaagagcgagg

SEQ ID NO: 421231 - DNA, 261 bp, Oryza sativa nipponbare
ccacgcgtccgctcacgcgcatgattactaaatcaaacactgcactgcatgaacggccgggaacacacatggcgctatcatacccggtgatggcgccgagcagcgccggctaaccttctccatgctcttcggtaaggcaccaaacaccatgcgcaggaccgacatacagccaaagccgcatgaggagcaaccgagcccgataaacggggcctagcggagtcaatacatgaggcagctctaaagcgagccgccgagctacct

SEQ ID NO: 421232 - DNA, 280 bp, Oryza sativa nipponbare
ccacgcgtccgcggacgcgtggttaatttgtaaaagaaagatgtgccagagatctttatgaaaaagaaagggaaaagaatcttcctaagacgcgaggatctgaagaatacaatagagaatgagatgggtggccttatagtagattactggtctacaaggctggtgatacctgttatatttgcagagagttgaaacctctatatgagtcgacgtatcaaagcctcatttcttaccaacgcggcttgcccaagaatggtatgtacatgttgcatacagcagc

SEQ ID NO: 421233 - DNA, 416 bp, Oryza sativa nipponbare
ccacgcgtccgacccgctcgagctgcagctcatccacgagaacctctccggcttcgccgccgagctcggcgtcttcttccacttcaccgtcttcaacatcgacaccctggaccccgccgagctcctcgccaacgccaccgcgggcgacgccgtggccgtgcacctccccgtcggccccgcccacgccgccgcgacgccggccgtgctccgcctcgtgaagcgcctcggcgccaaggtggtggtctccgtcgaccgcggctgcgaccgctccgacctccccttcgcggtgcacctcttccactccttccactccgccgtctacctccttgagtccatcgacgccgtgggcacggacccggacaccgcgtccaagatcgagcggtacctcatccaccccgccatcgagcagtgcgtcg

SEQ ID NO: 421234 - DNA, 419 bp, Oryza sativa nipponbare
ccacgcgtccgcaagaccttcgcttcactcattgctgccaagtccatcccaagctgctccactgcctcgcaagcgacaagtactatccgtttccttcatctgctccagccgccagcaccatcaatccctttctaacttccacagaacatcagaatgggaatataggatgcattccttgatgaaagacaggtagaggtgtccaaccattacgaatttctaaatcgaagaagaattcagcatggaaagatagggtattttactctctttctcttccatgatttcctatggagaggggtatggtgaaataatgaggtatgtctgcttcaccttgtctttgctggtattgcccatttttctgattcctggttaacatcaaggctcttctcatcaagcaaaatgattccctaaccctgttcagt

SEQ ID NO: 421235 - DNA, 415 bp, Oryza sativa nipponbare
ccacgcgtccgctgagttactggattatcagcgtagttgacatgacagggagcgccttcacaatttggtccaacattctgtctgtatgggacatcgcgatagtactctgcgtgctgcgcatgaacatgcaccatgttggttgggatatcaaggctcacatattctgcaaggcaataaaaccgatccctccgagttctgtaactctggccagtttgatgggagccttcgaactaccttactgattaaattccctcaagtactggaactataccgtaccttcttctgctctctgagacgagcttgaacaccgcgtgctcgaggaaggctattgccataaactaaagggaaggcactcgaatagatccaagaatagctcacatgacagctcgaggaggatttgtatgtagaacgctcg

SEQ ID NO: 421236 - DNA, 177 bp, Oryza sativa nipponbare
gggattcgaggctcgccccacgcgtccgcccacgcgtccgctccacgcgtccgcgcgtggtcgtcaccaccccgctggccgcgtgcgacgcgtctctcgccggcttagccgtgtacgctgtcggagtctttgtactttctttgtgactgaatgccctgttgctggattgctttttgg

SEQ ID NO: 421237 - DNA, 421 bp, Oryza sativa nipponbare
ccacgcgtccgcagctaactgaactaaaacaaacatttcgaatagaaaaaatggagacacgagtcacatgactgacaaatacagagtacacattttatcgagagcaaagtgctcatatccaagtgctcctaactggctaacttttgtcttcattctttagattagactgatgctgttggtttttacttgtactatttggtttcgataaatttgtgagcttgaaatgttttatccttccctttgccatcatcctctgttggcacttggcaccgcagttttaatatatctagctgccaattatctcattttgctgtcccttttataagaacccgctgttctattttgccatcacagaggtttaagttgtcatattactttgttactcgccctgttattgtcttcttttcacttctgaaaacct

SEQ ID NO: 421238 - DNA, 95 bp, Oryza sativa nipponbare
attccgggtcgacccacgcgtccgggcagacaagactattcctaccgccactataaaggatatattgtccttactaaggcttttatatgtcatgg

SEQ ID NO: 421239 - DNA, 247 bp, Oryza sativa nipponbare
aaatcaaagacctctctcatcacttggattaattaatactagtaatatttagagactcttgggcaagcatagaaataattagcaaatgaggatggtgatgcaggaggtgtagaggctaggcagcaagggaggggtggtggtggtcagagtcagggctatggtgctaccctattgaggcctcaaaggacatgacgatgcaaacattgcctgctgccctcatatcagtcaggacgttcatcttcccggt

SEQ ID NO: 421240 - DNA, 124 bp, Oryza sativa nipponbare
ttaacttctttatgatgtatcaaaataagacctttttttgggagttggtggatattttgttcttttaaggaacccgcccttaaaaatgggaagaggccctttttgcttttaaaggggtattacc

SEQ ID NO: 421241 - DNA, 197 bp, Oryza sativa nipponbare
aaaactacaaacattttgtcattttgattggaaatgacaatacaatcgctaattcggaggtctgaagaacactactagccaacatgacctctgaattttacaacagaatacagtattgtacacacaaacatattgtcgtagcatcagtgctatggtgctaccctcttgtggtctcaaaggacatgatggtacaaaca

SEQ ID NO: 421242 - DNA, 291 bp, Oryza sativa nipponbare
  unsure (1)..(291): unsure at all n locations
tttttacccatttgaaatgaattttactgaattcatttgaaaatgtgggcnagggttctaatttcaaaaccacatggcattcgccgatttacaacagaccaactacctgactacattttatactaacaaaaaaatcatatcccaaaccgctcggccaaatgggtgatacatgacgttttaaaagtcttcccggctcaaggagaactatcattatacggcctcttccggcctacaagctggacaaggcataaaatactacctggccatatatgcattccgccggacccgggg

SEQ ID NO: 421243 - DNA, 147 bp, Oryza sativa nipponbare
atttaatttattattagctgctgagaactcacggtcaatacagtggacatttacattacgcagggtaattgcgtgcggagtcgaaacaaagatgtctgtcgaactgtgcacaagttaaaaattgaacgagatgtcctaggaacgctc

SEQ ID NO: 421244 - DNA, 345 bp, Oryza sativa nipponbare
  unsure (1)..(345): unsure at all n locations
ttttttttttttttttttttttttttttattttttttttttttttttgttttttgttttttttatttataattaattnttttttttaattttttttaattttttnaatatttttattttttttttaaaaaaaaaatntggggaagaaaaaaaaaaaaaaatttttttttataaaagtgtggntaataaataaaaaaataatttattttttatttaaaaanaaaanttttaaaaaaaattttttatattatataaaaaaaannnnntaataaatttttttaagggattataaantaaaagttttatattgtntgttaaatatgtaaaaaaaggttgttttttttat

SEQ ID NO: 421245 - DNA, 159 bp, Oryza sativa nipponbare
tttattgcacaaacataatcttgttttacatcacatgagcgaacacagccccaccgggtgcatcatatgcaccaactaaagccatctacttctagctaaccacaccgaactctctggccacacatgcatacaaccacacttgactactgatatgataca

SEQ ID NO: 421246 - DNA, 192 bp, Oryza sativa nipponbare
  unsure (1)..(192): unsure at all n locations
ggggtgtggtacgggggtgatacaaaaacaactttgctgtgggcaatcgaatctggntttcttgaaaattactgacatacataccctactggaatactactactacttcttctactactactactactactactacttcttctacttctacttctactagtttttatcttcggagctnnggtgaagatcaag

SEQ ID NO: 421247 - DNA, 100 bp, Oryza sativa nipponbare
taacgcagaaaggatagccttatcattgcaccgcacatagattacagccttacaccgtcccttagataggagtagtactaagatgataacaaagtcataa

SEQ ID NO: 421248 - DNA, 195 bp, Oryza sativa nipponbare
  unsure (1)..(195): unsure at all n locations
aataagtatcgtttttgacgagtgggacaatatatttattacgatgtgtatgtgcatatgattagcctggngctagcattcacatatgcatgctcttcaacctatgttgatacatacatatgtacatacatacacagcttatgttgacacaaacaagatgaaaaaaaaaaactgaagcaacaaactgggaaaggg

SEQ ID NO: 421249 - DNA, 308 bp, Oryza sativa nipponbare
tttcatgaaatggcaatgcaatttattttcatgatcatcatgggaaacacccaatgttttataaggcatcaaatcccattttagggacctcaaactattggtactaggaatgccaacattacaaagccaattgaagctagtgtgactgctgttggtattctcccattgtcctttcttaggaacattgcctcataaattggcatattaatgattactatcattccacagaggatggcctgtggtaaaaacacattccatggcatattccagacacctgccattatttgacttaaccctccaactaggca

SEQ ID NO: 421250 - DNA, 266 bp, Oryza sativa nipponbare
tcaagagaatacaaaaatgtctctattcccaacatgctagacaggacgaagtttttagatttggcctggaaatactgtgacgtctctgccacttttttttcaagtacacatcatatacacaggaccacagctttgttggattctcttgaggtgtagtggacggcggtaaaaaaaaaatagtggtgattgccaaggaaaatcatctcccactactacaagttaagcatcttattgctcccctttgtttcttatcttacttacacccc

SEQ ID NO: 421251 - DNA, 215 bp, Oryza sativa nipponbare
tataattaaaacgcaacaccaggtttcgttgtgccggctgagaacctgcgcagggatacacactgccgtgtcagcactcagcttctctacaatactgaggcatacatgcgcgctacatacacaaattcgtacagctatactgtgcacgtacgtacatttactgcacggggttcacacacacacactgtcctgaagagacgcgcatacaacacaac

SEQ ID NO: 421252 - DNA, 282 bp, Oryza sativa nipponbare
  unsure (1)..(282): unsure at all n locations
attaacaatgttcatcacattagatccagtgctcaacagcacaaacaatacaaacagtttcacagtttctctgcttaatatttgcagagtctgaatatcagagcagcagggaagggaggagcaagtagcatgcaggttcagacacaagactncaggcagttcgattacattgatgcttataaagaccagcaaccatactatacgaactggcgacagggtgagctgagagctgtagagacaagcgacagcttacagcgcactgttacgttatgagacagagct

SEQ ID NO: 421253 - DNA, 91 bp, Oryza sativa nipponbare
  unsure (1)..(91): unsure at all n locations
ttatattgggcctaaatttggattatggggctgtnnatgccatattttangatcctatatgtccgggngccccgtggggtcaaacccgcgg

SEQ ID NO: 421254 - DNA, 161 bp, Oryza sativa nipponbare
gtacttaaagcccgatatgatagaaggatctatttacttgtggactggggaagggcgaacacatctgctaataaaaaaccaagggcttcattgtcaaccacgaacaatttcatgtccaactatccatcgcccgagaagaaaaattcattaattgcgggaag

SEQ ID NO: 421255 - DNA, 113 bp, Oryza sativa nipponbare
ccacgcgtccgcggacgcgtgggcgcggcgcgggggcggggacggttagcgagcagagggagacgatactgctgcccggttgcgactacaaccactggctgatcgagatggag

SEQ ID NO: 421256 - DNA, 88 bp, Oryza sativa nipponbare
  unsure (1)..(88): unsure at all n locations
ccggnccgacccacgcgtccgggcaatggcgtccatgaccgggctgtccagggcgtgcagctgccggccggtcccaggcgcgccggtg

SEQ ID NO: 421257 - DNA, 130 bp, Oryza sativa nipponbare
cccacgcgtccgcccacgcgtccggctcgtcgtcgttagcttgcttcgtggcgacatcgtcgagctcgcttgcttggttggtgatggagatggagctagggttgggaaggtactggggggttgggaggag

SEQ ID NO: 421258 - DNA, 99 bp, Oryza sativa nipponbare
ccacgcgtccggtgctctcatgaagagtggcctatgtacatttaagatgatgacaactaatgtcgtgtcaaagcggaaaaataggatcagtccgtcgtg

SEQ ID NO: 421259 - DNA, 303 bp, Oryza sativa nipponbare
ccacgcgtccgtcatgaaccacttcagggactcgagctcgacgtccagcagatcgagaatggcatggtgcccttcccggtctacggcgccgccatattactcagcacgtttacactagattcttatacctatcatggcctcaaatactccatgcacgaataccggtttgcagatgcttgatcgacaatgcggtgcttgttgaaatcttttgaacatattgctagcaacaaaacctaacaaaaggataagttgtttagatgcatttatgcaccccttactattgtgacctaaataacttataaa

SEQ ID NO: 421260 - DNA, 216 bp, Oryza sativa nipponbare
ccacgcgtccgcctcttatcccaagaactcctcctgtctctctctactcttatcttgtctgtcctgttgctgcttccatttttcggtcttgcacggggaagaggagagaaagatgtgtgtcgctgtggtttgaaaaaggttgggtgtgagaggagagagaaagtggagtggaggggagagagagagagagagattttttttcttatcttctgtcca

SEQ ID NO: 421261 - DNA, 66 bp, Oryza sativa nipponbare
cgacccacgcgtccgcccacgcgtccgcccacgcgtccgcccaccgtccgcccacgcgtccggcga

SEQ ID NO: 421262 - DNA, 334 bp, Oryza sativa nipponbare
ccacgcgtccgcggacgcgtgggaaaaaaaaaaaaaaaaaaaataaaattaaaaaaaaaaaaaaaaaaaaaaataaaggaaaatgggaaaaaaaaaatatgttggatccctcaaataatgacgccgtccccttttcctgggttgcgctttctttcctgggctttcgcggtttttggtctcttttttggggccccctatcttttttcctgggcccgttttttcccgttttttcccggggtaccctctgttgtcccccgtgcatttcttttgaacccactttctttttgtcccgtggggttttcctctttttggcccccccctcattttcctcttt

SEQ ID NO: 421263 - DNA, 63 bp, Oryza sativa nipponbare
ccacgcgtccgcccacgcgtccgcctgcatcgactcactctccactcccgtgtcggcgacgac

SEQ ID NO: 421264 - DNA, 115 bp, Oryza sativa nipponbare
  unsure (1)..(115): unsure at all n locations
ccacgcgtccgaaaaaaaaaaaataaaaaanaaaaaaaaaaaaaaaaaataaaaaaaaaaagaaaaggggaatgtggggaaaatataaaaaacaaatatcgaacacaaaaaggtt

SEQ ID NO: 421265 - DNA, 468 bp, Oryza sativa nipponbare
ccacgcgtccgcccacgcgtacggcaatttgaagactctagtgtaaaccgttcatgcaagcactcacatactggttgcagttgaggtctaacaacatgcagatgcagtagtgcttgaactttaaatatcatatacttactattctaaaattagatcagcaaaagtgcatgtcatgttaagtttagtgccatgcggacattctatgcatgcatgattcatatagtattgtaatgcatgtagggtgcagattattatatgagaatattcgctggtggatctagttatctaagtttctttatcttccaatgccaccattttcttattttactgttcagctcttataaaatgttttttctgttggctttcgttgctgtctcatttatggatatctttacttttggattgcgccttttagtgcgcctatagtcattgtgtgagatgttcggtggccattattttttgcttgtt

SEQ ID NO: 421266 - DNA, 416 bp, Oryza sativa nipponbare
ggtcgacccacgcgtccggccaataaatatttcaaaatgatgaaatccatggctttcgttccatcaccaacaattgacattggggtcaaggctagttttggggttagggggggtgttcatccaactggtaggcatcgtggttaaggctttgtccgttggcagtgatcaactgccattcatgcactgattctgtcttgaaaattttgtattagcattgaccacgccatattcaattcttgttaatttaagcgatataaaaaaattttccgtttatattgttttttggttttcctgatacattatgtctttattttgaagatgccttcatgaacttatgattcatacaagaagatggtcggctggccctgtattggccggaatttttttcctcatcaatagtacttgcattgttacac

SEQ ID NO: 421267 - DNA, 179 bp, Oryza sativa nipponbare
ccacgcgtacggacgcccccgcggacgctgtcgttgtcaggaactcgtaggggcatgctccaccaaaaggggggaaacatggcgcagagtgacatgaaaaaggcgagtgagtaaagaaagtgactaaaatcggcccaggagctagacctaatggtggagaaactacaggagcttacttc

SEQ ID NO: 421268 - DNA, 241 bp, Oryza sativa nipponbare
ccacccctccgcactccgcaccgcagccatggcgaccgcacctccactctcttcttcctctcctccctctccggctgcttggtgcccccgggcaggcagccccggcgtctctctccctccgcgccgtctccccgcgggcccgcctgtccgccttctacgccgccttccccatcggtgggatcggggcatgggcggcggcgacgccggcgttgtcggcgaggaggaggaggaggcgacttgg

SEQ ID NO: 421269 - DNA, 237 bp, Oryza sativa nipponbare
ccacgcgtccgcccacgcgtacgtccacgatcagcctatgcgtccaccagactacacctcgctccattatcatgtgggtaaacaacagtaaggcacgatccaatctgacggaagtggtgagcagctagggatcactccaccagtcgacggtgggggtcacctcgtgcgtcctctaccagtccacggccagagtgaccgagcgcgttgtctgccgggcccagaagaaagagaaccacc

SEQ ID NO: 421270 - DNA, 166 bp, Oryza sativa nipponbare
ccacgcgtccgcccacgcgtccgcctacctctctccctcctctgtttcggcggcgcatcaggcggcgtggagggcggactggtaggcggtgccgggccgggggtggttcggcggagcgggtggcggcgccggggccgggcggcaggtgtaggtggagcaggcggtg

SEQ ID NO: 421271 - DNA, 470 bp, Oryza sativa nipponbare
  unsure (1)..(470): unsure at all n locations
ccacgcgtccgcagaagagcgttgtaggtcttgctgacaaatgcaatcttggacctccgatgaagtgcctaaggagtatgaatatggcaagccgtttttgccgttcaacttgatgtgtgaactcccatggccaatgaggttgatgcatgagtggtacttgagggcaagtgagttaggtctcgggatgattactgtgcatgtcccgggaggcgctttcaaggatggacctaatgcaaacttcgccttcagtttcaaggacctccacgcattccttaagatggataaaatggatatcaatctcgtcggcgcgtggtgcctgtcacaatgggtagacgctcaaaaaacggnggcctcaatcggttacgtaaatccaacgatggtttgcgagacggcccacactgtgcggatatcggaggatagtgcggtactaaagaataagacaccttaggaggaaaaagatacatcgagcg

SEQ ID NO: 421272 - DNA, 353 bp, Oryza sativa nipponbare
cgcgtccggagagagagagagtatttgattcttgaattctctagtttggaaggaggggagctgcgttattattattattattattattattattattattattattattattattattattattattattattatttttggttcgtttgtttcatggagtcgaaggaagtgcatggccgggatgtgctggttgatctggagaaagggaattgcttgctaatgagagaggggggcgataatgggacggatgtgaatatgatatctagccaggccaaaacttcatggaatgatcttatagctatgaaagggtgatcaccacatttccttgctgcttgtcactgcttttaagattt

SEQ ID NO: 421273 - DNA, 94 bp, Oryza sativa nipponbare
ccacgcgtccgcctactcttccacctacaccgcctcgatagggcaccgactacgaggcgtaatgggggggcggtggtcaagggtgagagcctcc

SEQ ID NO: 421274 - DNA, 265 bp, Oryza sativa nipponbare
ccacgcgtccgggtggtgcatatggagggttttggattttgacactcatttaggagtgttctcatacttgtcatactgtgatccaaatttattgtaaacactaaaagttttatgatgagacggccaagttcctaagagagctatgattggatgatagatttgttcaaataagctattattgttaccatatgtgacgttgattgctaacagctgtcagatgcttaaggatatacgtagtctattgcggtacttgttgtgcatcatg

SEQ ID NO: 421275 - DNA, 438 bp, Oryza sativa nipponbare
tccggccctgccctgccctagcgccgccgtccttttcctttcctccccggcttctcttcgccggcgacgacgatgcggtgcggtgtctccggctcagattctcaagaattctcgagctctccatgtcaagtagagggagtggccggtgcggtctgttccccgcaaccctatcctccactattcccccaccctcctctcgctctctccccctgacctttgcgacggtgcaacctcgacctcgacttgccctcctctacttaacgccgccgtcgccagccttcctcgcttgccctcctttgacctaccccatatcctggagcttttcctaccaatgctcccttctttctctctctctctctctccgctctctctctctttcccccctcagccgggcttgctccggggaatgttgtgatcgagacccatggtgagggggtt

SEQ ID NO: 421276 - DNA, 284 bp, Oryza sativa nipponbare
ccacgcgtccgtcctaatccacccacagagcaaccggttgttctcttccccctctccctcagtctgtccgtcctgctcccgtggcaagctcgcccctcctcctcctcctccttctcgatccgctttgacgctccactcaggcactcacctccccccgtgcgacgacctcctctactgctgccgctgcgggcgcttctctccgagcctgagcggaaggtggagatgaagatggtgggcgaatcggagggggggggggggtgtatttcttgcggtttcgctctctt

SEQ ID NO: 421277 - DNA, 110 bp, Oryza sativa nipponbare
  unsure (1)..(110): unsure at all n locations
tcgacccacgcgtncgcccacgcatacggtcagtgtccagaatggcagcgagggtggcgtggatcggcgcggcggcggcggtggtggtggtggctctaatggccgggggg

SEQ ID NO: 421278 - DNA, 161 bp, Oryza sativa nipponbare
tattagaatttggcaatttgatgggaggcaaggccaactggttgagtaagtaaatgaacctctgcccagtgtccagtaacaagtctgtctgactgacgtgaactttagtatttacagcggttatcaagactagatagcaaacaccgtgatcaattaagctt

SEQ ID NO: 421279 - DNA, 72 bp, Oryza sativa nipponbare
tagcttacactctattatttacatttgctagttatgaataatgggcagctagatatacaaagaatgtacacc

SEQ ID NO: 421280 - DNA, 63 bp, Oryza sativa nipponbare
tcgccggacgcgtgggcggacgcgtgggcggacgcgtgggcggacgcgtgggcggacgcgtgg

SEQ ID NO: 421281 - DNA, 130 bp, Oryza sativa nipponbare
ggcaaaggggggggacacaatattattattggactggtctttctagttatgtggacatggtgcaaattcagactaatgggcgatagacatgacatgaatttggggctatatactgtttatcttggaatta

SEQ ID NO: 421282 - DNA, 255 bp, Oryza sativa nipponbare
  unsure (1)..(255): unsure at all n locations
tnntttttttttttttttttttttttttttttgttttttttttttgttggggtgtttttttttttttgggttttttnnttttaaaccaaaaaatgtcccggttttgttcccgggggttttgtttttttcatcattangggcntttgattggaggggggtggttgtgtgtgtatgaaggggttatgggnnnngggttttttttccacttaacaaccgaagtttttaccaacaaagctttttttaattgcccctctt

SEQ ID NO: 421283 - DNA, 281 bp, Oryza sativa nipponbare
tttttaactgatatttgctaagataaatccgattgttggcacaggcacaagctagatatccaggcgttacagtgactaaaagacttattaagtgtgagcatgcaagtacaattgatgaggaaaaaaaatcccggcaataacaggacaagcggccatctacttgtatgaatccatagttcatggaggcatcttcaaaatgaagacatctgatatcagatcaaacaaaaccaattgaagccggaaattttttttgccgcttcagttgacagaattggctatgg

SEQ ID NO: 421284 - DNA, 182 bp, Oryza sativa nipponbare
aatcataacttcttttcctgtactcagcagtgtagcaatgctaggaataaagctaatttcacctttaacggaatggggaagcaatggagtagagaatacagagaagggagctagaaaatagactgcacaagttatcagtggagctacagaaagcttctcctctcagagatatactgtgctgt

SEQ ID NO: 421285 - DNA, 287 bp, Oryza sativa nipponbare
gataaacagcctcatttggttctgtatttgctgttaaaaaaatgcataaacattggtgagcacaagagtacgaatttggttcctgtgcagtccagtatgactgcaacttagacagtcatgctacggctgtgggatgcaaatccaaagcccaaatttaatggacactgttcattcaaacaatctagcacaaaattattataacaaggttattgtagcatttaatctagatcttccactgaaaaattgaatggacaagatcttgggcagtccctaacgtgcagttgtag

SEQ ID NO: 421286 - DNA, 111 bp, Oryza sativa nipponbare
  unsure (1)..(111): unsure at all n locations
ctaatcctcacattaaatcataccacatggggagggttttatttattacacgcattcctcacaacaaatacatccntttagtccacaccatgttgcctaacccactctctt

SEQ ID NO: 421287 - DNA, 108 bp, Oryza sativa nipponbare
  unsure (1)..(108): unsure at all n locations
cttggccttattgaatgattaaatcgcatataacgcaacgtaccgcaggacgagctgcatatttgtatagccatatctagtnactggatgttgatcagcatggcctat

SEQ ID NO: 421288 - DNA, 169 bp, Oryza sativa nipponbare
  unsure (1)..(169): unsure at all n locations
acacaataaccaatcttacaatttctaatccaaaatgcaggctggcaatcatacatggcaacaatctccagcaagcaagaacaagcaaaagaaaactgaaatctcgagaaaattgcaggtaggtaggtgagctagcatccggacttcttggcccngaggacggggcact

SEQ ID NO: 421289 - DNA, 123 bp, Oryza sativa nipponbare
  unsure (1)..(123): unsure at all n locations
ttttattnnnctattttacattggagcaacaatttgggcgggggggtatttatcttctggcaggaacttcccgtacatttcacncnnaagaaggcttaaagcatcaatacaagtgaaatacac

SEQ ID NO: 421290 - DNA, 103 bp, Oryza sativa nipponbare
  unsure (1)..(103): unsure at all n locations
tgaaacaaaaacaaaaacagagcacggcacgttaattggggagacgataaacaaactgggaacactcgnctctgaggggagacatcatcgaatcacagatgga

SEQ ID NO: 421291 - DNA, 250 bp, Oryza sativa nipponbare
  unsure (1)..(250): unsure at all n locations
agctagaacactcacactaccatgagatatatgattcgggtggagagccgtacatcaaaacatgaacactcacacaagccggcaacccatgcattccaatacatgcatgcagganacaattgccacaacacacccantcagtctgtatttcataacatgcatatatgcttataaactgcccacaagggattaacagcctatacatgcatacttcacaaaaaaaaaaaggaggaacaaggagagaacctct

SEQ ID NO: 421292 - DNA, 341 bp, Oryza sativa nipponbare
  unsure (1)..(341): unsure at all n locations
tgaccgacccacgcgtgcgcgacgccaaggcatggacccgccgactacaaggccatcacggcgccgtgcgagctgccgacctcgtgcggcgcgtactgcctgtgggtccggggcggcggctaggccaagtgccagtgcctcaccaacagcaccgtgacctccccaccgtgcagagcctatgtacccttttatctttgcngctacagnnactgttactgctgtcatgtgtttgactatgttcggtttaattttttgnncntgcgtacaaggagcggctgccgttcgaggcgaacgcgacggctgaccatttctagcaggcttgcgctcgcaactgcagctgc

SEQ ID NO: 421293 - DNA, 77 bp, Oryza sativa nipponbare
ttgttgaagttcgattgagtatgatagacctttttactaggcaggccacgcgaatacacgattgaataatttcactg

SEQ ID NO: 421294 - DNA, 262 bp, Oryza sativa nipponbare
  unsure (1)..(262): unsure at all n locations
atgataaagtccgattgactataatacacctttttactgggcatgctcaacgtatacacgacagggaatnannccgacaatagttcggctccatcacatcacacaaatttgcgcgcngcttcacttttagcncgctatgctatcagctgcttaatttattctttacgtactttgttaatttattaatnntnaggacacacacagaccacactaatatgggtgggccttattgcaaactaactaaggttaactacttccaccc

SEQ ID NO: 421295 - DNA, 301 bp, Oryza sativa nipponbare
  unsure (1)..(301): unsure at all n locations
gacgcgcatgcaccgtantaagctggatcctcttaccggccaccctttcttcttttttttaccccnttttatccattcatactatccatattacaccttcaaccggcgcattttattcttacacgagaggggcactcnnnnnnatcaataaatgaactccctcattactcatcattgattcntcntgctactttatctcccggctatgcatttcccttctatacttttattttgttttgctctgtagtttttttatnnannnatagcacatccaccacaacacccccgacattaccactta

SEQ ID NO: 421296 - DNA, 61 bp, Oryza sativa nipponbare
tacactaatacactattgattaatttaactcttaatagggggggttctttacattacacaa

SEQ ID NO: 421297 - DNA, 59 bp, Oryza sativa nipponbare
ccacgcgtccggtacaggattcgtgtcctatttaatcaaattttattttcttattatcc

SEQ ID NO: 421298 - DNA, 363 bp, Oryza sativa nipponbare
ccacgcgtccgcgcttgtgcgtccggaggccgacactttgtatataaagggagctcttgactggaacacagtggctgatgagcacctagggtaggcgtgtgattagctgactctggctggatgctgaccttatccatgtggccgcaaacatgctcaggtatctgcttatcgagatccctctcgaacaggaacgggtgtaccaagagatccgggcggtgtacctgctctgtcggtttggcgggagcgcgttgcatgggtgccgtactttaactacctacatctctagacgctgcccctgcagctttatgtggacttcatacatccaaggtttgtcgagcttagacaccaactgtggctgtttat

SEQ ID NO: 421299 - DNA, 262 bp, Oryza sativa nipponbare
ccacgcgtccgcccacgcgtccgcaaaaaaatccccaattccgccgtcgtcttcgtcgccgtcgccgcgaggatgtctgggcgcgggaagggagggaagggcctgggcaagggaggctcgtatctccacctgtttgttcttctctacttctttcttttgatttctttattttctatttcctttcttttttattattctatttttttattttttttttttcttttctctatgtttatatattttcttatttttcttttttttt

SEQ ID NO: 421300 - DNA, 170 bp, Oryza sativa nipponbare
ccacgcgtccgccgacgcgtgcggtacacatatactggaaacgaaaaagctagattaaccatgggacgtagcctatggatgctgatacatacctctacgagagctaactaagggacggcgccaccaaagttcgccaggctcacacgacgagggaggggacaacgacatac

SEQ ID NO: 421301 - DNA, 307 bp, Oryza sativa nipponbare
ccacgcgtccggataattcacattacacgttctcataacacgctgatctgatgacatgacatattgagctttactatgctactactactgacatcaacctgtaaaaacctccaaggagggaatttacatgctttaagagaccaatgcacgccacggccggcttaaccgacctgggtcgcgccacatggaactcgctcccacacacacaaacatcggctggatgccgaatagctgacatgcgggggggctgaacacccacctgccgtagcatctacagatgaatcgagtgctgagcgagatcgatcta

SEQ ID NO: 421302 - DNA, 90 bp, Oryza sativa nipponbare
ccacgcgtccgggttcccatccccatagccgaggtagtggctatggtggtggggggaacaggaggggcaatggtggaggtggaggtggag

SEQ ID NO: 421303 - DNA, 227 bp, Oryza sativa nipponbare
ccacgcgtccgcccacgcgtccggcgagttcagctggagatggacacctcaccctctctccaggtgggaggaggtggcgcagctggtggactgcacgtgcctggacatctacgggcggctgccggcggcggcgctgacaccggcgacgccgtacgcggcgtacctggtgttcggcaccgcggcggcggcggaggggcaccgtgggctgagcttcccggaccaggata

SEQ ID NO: 421304 - DNA, 255 bp, Oryza sativa nipponbare
aactagactgctcaacttatataaacttaagtggtgcgatgatcaaaggtgcaggaggaacaacatcgcaaacagtggagaacatgcttgttgaacatacatgttcatgtatctcctaacacacaagcttaaagaggacctctgaatactacagtaattggtttcagtccaaactttaaccgagaggtggacatgtaacggatggcgcttgcacgtcgataggtgtacgcagttcacgttgtggtaccagcggta

SEQ ID NO: 421305 - DNA, 410 bp, Oryza sativa nipponbare
ttcaaactacgagagacttcaaaattttatatataatcgacacaatgggcacaatcacatcatacactttgacccattgatctaaatcacacaatttgactgacattgacccatcattggtctgtaaacagaagaaccaaaaaccaggggaagaagagagaccattcattctaagaccctattcaaaagatcaacttccatatgaactgtataattcttctgtatctatccaggtaaattttattgtcccgtcctgtcctgttcttcgcgagatgaaagcgtgcgaggaagaagaaccttgatcactgggagtaggctccgccgccggccagcgccgccgccgccggccggagctcgccgccgcggaggaagccggcgtaccaccgcgccgagtgcctctggtacctggt

SEQ ID NO: 421306 - DNA, 255 bp, Oryza sativa nipponbare
taattcgatcatcctttggatgcggccaggagttaaaatgggatcgggccctaaatataaaaatatgtagaccgacacttctatatatagcattaacatatgtctaacccaaaaacatatacacacagttaatgcccatacaaacatacactgatagaagagcaactgaaacaaaaactcaagcctactacaggcgtcaaaattaaaagacgattaacaaaatgtgaacacactaaacaaggtggcttacattat

SEQ ID NO: 421307 - DNA, 316 bp, Oryza sativa nipponbare
gttggagaaataacattatgcccgttcatcatgccatgggggatgtgagatgtacacagaagaacaaaatggtatatatatgcacgcaaaacatgtgtatatatgacggtatacatacggtatatccggatatatccagtatgcataccttgacgtacgtacatgggtatgtatgtcactgaggtatctactagctagggaggagttatatttgcttggccatggcattgaggatgccgagcgcgtatgccgtgaggtggaggatgcccatgatgtgggcgcggacggcctctatggcgtcgtcgccgacggaggt

SEQ ID NO: 421308 - DNA, 230 bp, Oryza sativa nipponbare
aatccaatctttaataatacaaaaatatacactttactattttctttgatagtgatacttaaatcttgtgggacctctcaaaaacctcctttatttaaatcttcccaaatatcctaaaataaattaaaaaatacttttcactaccctaaactaatctcctgaaataaaacttctatcattctctctaaatttaccattctcaaatcaactatttcttctctttattttat

SEQ ID NO: 421309 - DNA, 273 bp, Oryza sativa nipponbare
  unsure (1)..(273): unsure at all n locations
anggggggaaaccccctaagggttttataatttttttttctgggggggggttttttccacaaacccaaaatttttggaagttttttaaaccattttcaacttttttttaaaaaattggttttttacatatttaggggtttaaaaggtccctaaaaaggatttaattttccccgttttaaatggtcccttaaaaaaattcccccaaaggaaatttttcctttattcgccccagggtccgtttttataaatgttaatttctcttgaagttttttt

SEQ ID NO: 421310 - DNA, 166 bp, Oryza sativa nipponbare
gtatgagtcatccagaacatactagaatggcagtgcgtatattacagacagcggcaatgcaagtccgctatggcaaaccagctaacaactcagacagaagtggttaccagcaacaggaaacacgtgtttgcataacaaaagttggtacttgcattcaagtgataca

SEQ ID NO: 421311 - DNA, 357 bp, Oryza sativa nipponbare
ggcaggaaggaaagggcatcttctggcatcataatttgctaatcatgtgaagattccagttgcaaactgatacagcttattttgtgaacccaaaaaagggctttttccatttccttcactacttctatacactgataatcctaacatacaggatgtatactacgcaaaagaaaaaggtaacctttacaaaagtataaaatgtgtaacagcaatgacttgagtaagctaacaacaaggcatttgacttcaccttgatctaccggctttgtttagcggctcccaactaatatcctggccacattctttgcaactcgggctgcatccaggcttggtgccttggcttctcagagtaagcaa

SEQ ID NO: 421312 - DNA, 127 bp, Oryza sativa nipponbare
aagtaagctagagaacttcattaatgatgacacacacacacacattggaggtacatacatacaagcactggtgcaactgaaactccaagctaactgcgagggtactccacgtgttcacatggtataa

SEQ ID NO: 421313 - DNA, 299 bp, Oryza sativa nipponbare
  unsure (1)..(299): unsure at all n locations
gaacatgaaaaacctttgataatcttaccaagaaagaatcaaacttggcattcaaaatgttgcaacaacccaaatgcatatatatgtgaattgattcattgatggaagatgagatcatcacttggtgtggaagagctcctccatgtcctcgaggctccgccccctggtctccggcaggcaggcgtagatgaacacgaaagaggcggcggcgatggcggcgtanaggtagaacgcccccgccatggtgatggcgccgtaaagcgagatgaacgtcatggtgaccacgccgctgacgacgc

SEQ ID NO: 421314 - DNA, 380 bp, Oryza sativa nipponbare
acaagctgtaccgtggtgtgcggtataaaaactgccgtaagcgaatggcacataaacgtatggggatctaccaaacggagtgtaaactgttcacaactactacagtcatatacctgtaattaacgtacgacacaaacctaattaagcaacaaacattactattgtgacagaacatgacatggatcctcttcatcttgtccaaaatagatactacttgcatagcataacactttcaaaagtgcacaaaactctcttacatgaaaatttctatactaaacttaaaagcaaacaaggtggagttacacacactaggtgtaatatgaccagatcaacttcaaggtgtacttcttctcgagcgagctgagtgcaggcacaccatc

SEQ ID NO: 421315 - DNA, 271 bp, Oryza sativa nipponbare
tccacccttctttttttttttttttaaactaccagaaacttcactaccttaagtaaatggcaacataatgtatgtgcctcatacatacactgggggttgattgatctaaatcacacaatttgactgacattgacccatcattggtctgtaaacagaagaaccaaaaaccatgggaagaagagagaccattcattctaagaccctattcaaaagatcaacttccatatgaactgtataattcttctgtatctatccagggaaaatttattgc

SEQ ID NO: 421316 - DNA, 132 bp, Oryza sativa nipponbare
gggggggggggtcctattaaggggggtacgcaaccacaacgtaaaccatttccatatatagggagtaaacccgagaatttcggaaccatacctacaggtgaaccatgttttaaaataataagcactaataaa

SEQ ID NO: 421317 - DNA, 377 bp, Oryza sativa nipponbare
ggaataaactcgagccctgtgggtttcgatccaattatgtactacaagggaaaccaagtcattttagaaaaacattacacaacaccaagtggaatcgcatgtttgaccagcaattccaatcttttgcacaccctacttccaattttctactgggctatcgggcgagtacaattcacgctccatgtattgtgccagccgacgccgccttgtcgtcgtcataaaaaaccgggagagtaaacttgtagcgcccgctggttattctgattgattattccgaatcagatgcatgttagcttctcgactcggggatgcgctttcagctcatctgctacgatgctgcgcctttgaagacgaggaacctgagcgcccccagcttg

SEQ ID NO: 421318 - DNA, 231 bp, Oryza sativa nipponbare
atttctgtccgtttcctgcaaaactaataatggttgcattggggtgaggtatatcagaacaagggcgggccatactttaccagctcatcaacgagatgaactgatggctccacgtgcccaacaataggaccgtccgatacgttatacaacccctgaattccctcgatcacgaccgttcattttaccaacttcagactacggccctaaacttcatgcactcgacaactaggc

SEQ ID NO: 421319 - DNA, 71 bp, Oryza sativa nipponbare
  unsure (1)..(71): unsure at all n locations
tttttatttttcactcgttccangactcctnnttctaccccanagggggaaagtggacactctgagggggg

SEQ ID NO: 421320 - DNA, 275 bp, Oryza sativa nipponbare
ggggggaaaccccccaggggtttgaaaattttttttcccggggggggggttttcccacaaaccccaaattctggggagttttttaaaccatttcccccctttttttaaaaaattggttttttccctttccagggtttaaaaaggtcccaaaaaggggtaaaaatttccccgttttaaagggtcctttaaaaaaattcccccaaaagaaaattttcccttttccgccccaaggaccctttttataaaaggcaagaccctccggaagtttttttttt

SEQ ID NO: 421321 - DNA, 398 bp, Oryza sativa nipponbare
ccacgcgtccgctagaccaggagggcataaagaaggcggtacagagagtactaggacgtgttccttgagtttggagaacagcgagtatgaggcagcatgcctgtactccccccaattttctgaccaaccgactatagtgaaacaacagcacgagcagacaacctgaaaagttcgtcgttgtttcctcattctgatgctgagcttcctctcagctggagactacttaaccgaaaattgcaaattttgtcagtaatacaatgagtaggtagttatcttcgtgcatgcatgtacctatctgaaacctcaaggccacctgtatatatatcagtattcatcttcagtgtcatcaattcatcatatcttgttctggtaactaatagctagatatgcctttcttg

SEQ ID NO: 421322 - DNA, 499 bp, Oryza sativa nipponbare
ccacgcgtccgcggacgcgtgggatttgatgctgcagcctctgggctttctacacacaaagaaacctataaaggggttgatgtggtatattctggtgacttgtctgctgattcttggattgagaaggaggttgaagctttggtggcagatggatgcccgaaagtctgggttgtaacatctgatgcattggagcaacaattggcacatggagaaggtgctcttatttggagctctaaaagattggtcaaagagataaaagaatcagaaaaggagcttgatgaagagctgaaggaaaccagatcaacatcgttgcaagggaagctttttcagcacaagctgaaacctaaagtagtgcatgcattgaaagatctccggaataagcttgaagaagaagagcggagaaagaggtgactacagtgtgactgtatgacctaaaagcatgaacaaatggcttacaaccgcacctgggcatgaacaagtttgtaaaaaggctgacaac

SEQ ID NO: 421323 - DNA, 229 bp, Oryza sativa nipponbare
ccacgcgtccgcggacgcgtgggtgctgagctccaaagcttctagctgtgatcaagcaaagaagaattgaaaaaaaacatatatatattatatatatggcaggggtgtgggtgtttgaggatgggatggtgaggagggcagatagcgaggcgccgtcgagagggcgcggtgtcggtggtggaggtgggggagggaaggtgcttgtgcacgtgccgagcagcgaggtggt

SEQ ID NO: 421324 - DNA, 498 bp, Oryza sativa nipponbare
ccacgcgtccgatttcatccaattaaggtttggattgtggatgcaatcatcttgatactcatgcaaccaatgcatgttagttgatttatttcacctgtttgtatgaatcagtttcttttatcgcgcaggatttaattgtccatgcattcttaatttggcacaagcattgacacatgataacttggtttgcctgatttttatgattggcaacactctaatcatggaaaccaattcaatatacactagctttcatgcaggtaactagctattaatgcatgtgttctacaatttggtcttgggttctaaattgggagaattattaagaaccactcggttatctcttcagggccagtaacacttctagactcactagaaatagatatattatctcttcacggcactactgtgttcttttctaattgagcatctaaaatagaagaaattatgcctatgtaccttttctatatacagtgaaataggttttgatagcaaaaatat

SEQ ID NO: 421325 - DNA, 384 bp, Oryza sativa nipponbare
  unsure (1)..(384): unsure at all n locations
ccacccccccgccgacgcgtggngtctcaacagctacaaacccccacatcacacgcagaaatccgcatcaacgagccagccatggcgtccacgctgaccaacgtcttcctgtctaccccggctgctgctgcttcgttcctcgttaggccggtcgccggagctggacgcgtggtgtttccccgtgttggccgcggcggtttcgcggcggtgagggcgagcgggccggcgactccgccggacatctgggacaagatgttggagtgcatcgacatggcgaatgaggcgtgcgcggaggacacggctagcggtgagtgcgcggtggcgtgggacgaggtggaggagctgagcgcggttgtgagtcatcgcgcgcgacatgcttatgga

SEQ ID NO: 421326 - DNA, 477 bp, Oryza sativa nipponbare
ccacgcgtccgcccacgcgtccggcctgccacttttccatccttatttgttcccgttttgcctctgctgattttgctgttgcctctgctgatttcaataatgcttcagctttaattttcatagcttcgttgtacaaaactatgttctgagatggctggttccccaacggagaagattgagcttttccttttccttttccttttaatctctcttttgctttcttctgtccctcggggtgtctctctttgtttgatgattcttcttcagtctcttggtttgatgaggatgtgtaagctcctgactcagaaatcttagtcctcttgttcttgttttcttcctttttgataatacttcgccattttggttgatccttgagctctctccacatatactctaaggtgaaaggcttcttctgatttgattgattcttgtaccatagatgagctttttccatgatcatgtcatcagagtgtccac

SEQ ID NO: 421327 - DNA, 139 bp, Oryza sativa nipponbare
ccacccctccgcggacgcgtgggctacttcaacaaccgcaaccccttcttcgtggccggggcggtgttcggctggctgcgtgttttcctgttctttcattattacttcaatattttctatcctttttaactctatttac

SEQ ID NO: 421328 - DNA, 447 bp, Oryza sativa nipponbare
  unsure (1)..(447): unsure at all n locations
gacccacccgtcctttcctcttctaccggcngtgacaaccccnactattatcctgttcttccctttttgcaagagctggcgggttgggtctttttcccttccgaattcctgtgccatcttttcctctaccttttcctctatctcaatgatcctttatttgatcttttcaatgggcctgtttttgacatgtgtgaccaataggttggtgatcttgttggtcaaccttgcaaaggcatggtagatgtgttgactctatcgcatcaaacaatcttgttaagcagcttgctttaatggaacctctatttgacctggtatggccaatttatcatttggcaagcggttgatgttagttggaaggaggtttacgttcatgggacaatacgggatgggagagctgtagaagattgtttaaacaatgagcaaaaccggtaggctgttatctaaacg

SEQ ID NO: 421329 - DNA, 176 bp, Oryza sativa nipponbare
  unsure (1)..(176): unsure at all n locations
ccacgcgtccgatctgctccccctcccgccgccgccaccgccaccgccaccgccaccgccgaggaaagcgaggagacgaatgtctgacatgactgttcaaattnttttttcttccttttcattatttctcttttctctttcttctattaccattctattgttactatattatgttc

SEQ ID NO: 421330 - DNA, 420 bp, Oryza sativa nipponbare
ccacgcgtccgctaaatttatctctggagaaaagtatgaagagcaagatgactgtcttctggcagttagcttttcttccaaaaccactggcgaggattctgcattcttcaattatgccctttctggacatatagttggttttagtaatctggtcaagcgagataaagaccagatgaggcacgtgtgggtagctgaggcgacagagagctccacctatagtctctcccacgagatacctaaaaaatcacatctcaaagaggctgccacttctgctgaaaaatgggcttcaaattctcatcctatgattcagcatctgaaggaaagagttctgcaaatagttggtgacagtggtggctgaagtactctgaatggtgcttgtcgtagaacaagtttgtttcaagactcgaccagaatgaaacc

SEQ ID NO: 421331 - DNA, 450 bp, Oryza sativa nipponbare
ccacgcgtccgcggacgcgtggggtttggaggaacttcgtcgtgtgcccacctgtcgctataacaagatatccccagtcttcaaaagctcgttggctaatccaaaacacatggagacagaattttggaatcgtgaagatgatgcaagcatatcagttgaagatatatctgattccgatgatgggaaggaggtggtgagcaatactgccatttcaaagctcccatcaaaagcagggctagatgcaaaatttgaagcattggagcgtgctgaaaatgcttattatcaagctaaaggtcagaccaagcagcagggtgggaagcttgttgacaagaagagcatatctcagacactaagagatgcaagccaaaagcgattgttgaatggccttggacaagcaaagttgcgacttgggaatctacccgttgatgaaaagccttctgcagcacacct

SEQ ID NO: 421332 - DNA, 425 bp, Oryza sativa nipponbare
  unsure (1)..(425): unsure at all n locations
ccacgcgtncgcggacgcgtgggcggacgcgtgggccgacatgcgcaacagccgtagctatgtgatccgtgcaccatttgatctgctgtggcttgagaggttttgaaatatcctgctccagaaacagaacaaaagcctgattccacttggaattgcttgtgtagatggcactctagtttgttcattcaatagacaaggcgtgggtccacttcttttcttttgcacaaaccaagatgaagatgaagatattgaaactgatttatattccgatctgacaagatggtctgcatcccttgagaaggacagaatgtagggaagtatatgttcaaaaccagcgaggcagatcggttacaagggcagcgacaatgtggaggggtggcaaagccgcgtcgatgctaaaggtggggattactcacttccacatg

SEQ ID NO: 421333 - DNA, 247 bp, Oryza sativa nipponbare
ccacgcgtccgcaggcaaataagcagttgccaatctactgtaccaagtgcaagggtgaacaccatcagcttaagttcaaatccactgtcatggtggatggtgaggagttttcatccactttttgtcatatacctttgaaggtcgcttttcattttgctgtttatgtatcctatgtttccttgcttgtaaggtaatagtctgtgtctttttattctgattttcttgttcttttttatttgtttttttt

SEQ ID NO: 421334 - DNA, 116 bp, Oryza sativa nipponbare
ccacgcgtccggctgttccccatcgacatgcgggcggtgaggtcccccaccgactctgtcgtgggcgtgcgtgctgattctggaggctattctaccctcaccttcctatccttttc

SEQ ID NO: 421335 - DNA, 474 bp, Oryza sativa nipponbare
ccacgcgtccgcccacgcgtgcgcccacgcgtgcggcgaaaatcactaatcacatcaactctggggatgctgttacttcttctaggccaatctacactgtcagctctcttataaacgtgctcgggtcaaaagcattaccttagctcacattgatcacgaaaaatatgctgcgagtttgacacccaggatcattttgccctagtggaaaatatgctcacagttccactaaaactgatgctaaactttctaatcaagctatacccatattgttgtcggggttgacaactgtcgaggtgattggcaaaaagcttggcgaatttgttaatccatatttggaagaaattctggatttggtggttttgcctccggagtgtgcttttcgaaatgatgaaaaattggatgcaaaagcagctgacgtttggaagctactgactgacaaaggtccagctcgacttatgctttcacctttactta

SEQ ID NO: 421336 - DNA, 134 bp, Oryza sativa nipponbare
ccacgcgtctcgctgactaagtatgaataaagtgtataatattcgtgactttatataataggtactagttctggtggtgactatattaattaattcttatcatttattttctttctattcttatttattttata

SEQ ID NO: 421337 - DNA, 228 bp, Oryza sativa nipponbare
ccacgcgtccgcggacgcgtgtgaaaaaatataataaaattttaaaaaaaaaaaaaaaaaaaaaaaaaaaaaaaaaggaaagaagatatataaaaaaaaaaaataaaattatattaaaaaataaaaaaaaaaaaaattttttttttattaaaataaaatatataaaatataaaaataaaaaaaaatgggggggggtttttaaaaaaaaaataatattttaacctttat

SEQ ID NO: 421338 - DNA, 120 bp, Oryza sativa nipponbare
ccacgcgtccgaaaaaaaaaaaaaaaaaataaaaaaaaaaaaaaaaaaaaaaaaaaaaaaaaaaaaaaaaaaaaaaaaaaaggaaaaaataaaaaaaaaaaaatataacggggcgccctt

SEQ ID NO: 421339 - DNA, 136 bp, Oryza sativa nipponbare
ctgaaccaattttctccaatctttcgagtgaaataaagattgtcattctgatatatgaatgtacaatttctggatgctgatgttagttgaacactgattgtggagagactatgcttgttcttcctttaacttaatg

SEQ ID NO: 421340 - DNA, 123 bp, Oryza sativa nipponbare
ccacgcgtccggccgcagagaagaggaaggcggaatcagtctagggcgaagcggcggcggcggcggcgatggcgacggcgaggaaagcgccgcgcatggtggcgatctgggcggtggtggtgg

SEQ ID NO: 421341 - DNA, 296 bp, Oryza sativa nipponbare
ccacgcgtccgcccacgctttttttcatttttttttttgattcattttttttttttatgttttgttggtgtttgtagtttttttttttattttttttcttttctttttttttttttttttttttttttttttttttttttttttttttttttatttatttttttttttttttatttttttttttttttttttttttttttttttttttgttttttttgttttttttttttttttttgttttttgtgttttttttttttttttttgtttttttttttttttttttttttttgttttt

SEQ ID NO: 421342 - DNA, 178 bp, Oryza sativa nipponbare
ccacgcgtccgaataattatggagctcttcgtctccaccgtcgcctccgcgcgcgccaccgcccccttatgcttcgcctcctccttccaccaccgccgcgctgctcctcccgccgtcgccgccgacgccaccctccgccgaagcaaccgccacctcccgactcgaggatggcggagcg

SEQ ID NO: 421343 - DNA, 318 bp, Oryza sativa nipponbare
acccacgcgtccgcggacgcgtggggggtttttgttcgcgcccccccggttagaggtagaccggtctccccggcgagattggccacgtctacgcatctgcctccccctccgccgtgcgcgactcgaataagaagagggggaaccggtcgtcggctaattctgaagctttgcaagctcgacgcccgccgcgagcagtggctttcgcaagtcaaggattgtatggtggcttaggcatttacttctccgacaggttcagagccaaatgctgggttcattacccgttctttgccacacccttcgcttccttggcgtaggtta

SEQ ID NO: 421344 - DNA, 338 bp, Oryza sativa nipponbare
ccacgcgtccgcccacgcgtccgcacgcgcacacgacacgacgcaccaatggcgctcgtctccgcctcctcctccaccacgcgccgtctcggcgctccccgtgctcctcagttccttctccttactaagtgggttcattaataacaactctatgatgatgatactgtccttatagatactatttattttgtgacaacagtaattttttttaaaattaattaataattatttagttatatttattagtaatattttaaaaaaaattattaaatttattgaataattatattatataaattatatatcttaaataaataatatatttataataatatata

SEQ ID NO: 421345 - DNA, 92 bp, Oryza sativa nipponbare
ccactcgtccgcccactcctacggcctaccactagcggtttcttgaccactactagaacccgccgaacgtggggttcctgattattctcaac

SEQ ID NO: 421346 - DNA, 67 bp, Oryza sativa nipponbare
tcccggttcgacccacgcgtccgcccacgcgtccggtgcgggagccgcggccggcggaggggcgccg

SEQ ID NO: 421347 - DNA, 442 bp, Oryza sativa nipponbare
cgacccacgcgtccggaaacactaactcttgactgccctctattccgtaatgcaagaattgttcttgatgattttgaagttatactccactcgcctgattccatctctccagtaggaattcttcacccgttaaaatttcatcttgaacacaagccaaattcttttggcaccgttggtgatagtgctattgcccaagagaattctagttatttgtatgaagtagatggagctattgcacacagtgatgtcgaaaagaaacaagagaccttgagtccagttacaactgttgatgcttgcacaaatatagacctatgcatctcaaagactggcaaaaagttgttctccattggttggtggattcaggatccctgtggtacttcagaaggcctgaagacagatctagtagcatgtttgagcagaatctagaatcagctcaaggaag

SEQ ID NO: 421348 - DNA, 248 bp, Oryza sativa nipponbare
  unsure (1)..(248): unsure at all n locations
ccacgcgtcctcccacgcgtcctcccactcgttctcccactcgtcctcccactcgtccggcagcaagctgtacctagcaagcgacaatggctacgggggctgtctccnctcttttttcactctctctatccgtccatttcaaccttctaccttatcgttttatatctcttatctcctaccttacctagacctttacctccatcggcccaaggtcattcttttttttttctactagttctatcttttca

SEQ ID NO: 421349 - DNA, 206 bp, Oryza sativa nipponbare
ccacgcgtccggactcatgacagtatggactacaagttacatttgacctcaaatattgccgacttaacggctggggtggaacgcccggtagacaacaacaccaatcaatatgacgagtacaatctatcctgagaagatctgatcaaattgcgcatgacgctcggcgagaccaaaactgacactgaacttgatggccaaccagaaag

SEQ ID NO: 421350 - DNA, 392 bp, Oryza sativa nipponbare
  unsure (1)..(392): unsure at all n locations
gcccttncttnntnttacnttttgcggtaaacctgtccctctccccactctcgcgcctacttccatgggggggttggggaccaccggcggcggcgccgcctctcatgcattctccttctccctcgcgccgaagccatccttctccgacgccgcaccatccgaggctgtccgccgcaccgccgcggcggcggcgttcccgacgctggctgtgcgaggaagcgggaaggcgaggcagccggtggtggccgcggcggggggggcggggaccgggagcgagcatagggggacgatactgctccccgggtgcgactaacaaccactggctgatcgtgatggaagttcccaagggaccccgcccgacccgggagccgatgatcgacaacctacctaac

SEQ ID NO: 421351 - DNA, 140 bp, Oryza sativa nipponbare
cctcgcccccgccccagtttggcccctctctcattaacagtatgtaaatcctggcatttgttcaactggagccacctctggcgtatgaaatgatgctccaatagatagaggtgtttcacatgatttacccgggttggttt

SEQ ID NO: 421352 - DNA, 59 bp, Oryza sativa nipponbare
ccacgcgtccggcgtggtggtttccatgtccgacctgctgagctactttggctcgcgcg

SEQ ID NO: 421353 - DNA, 186 bp, Oryza sativa nipponbare
ccactaaaatttccaaagtcagttttaaaaagagcaatttgacttttacataactttttacctaactgtccagtcaatgtcaatcacactgcaaaatgtaaaattttttttacccatccattatacttttggggggaaaaaaggctgcactggtggttcaacaaaggggctttggaaaaacctgaa

SEQ ID NO: 421354 - DNA, 81 bp, Oryza sativa nipponbare
  unsure (1)..(81): unsure at all n locations
tttnnnnngggnttttttnnnaaacaacaaccccaaaacattatgtaattacccttctgttggaaaactgtacccccactt

SEQ ID NO: 421355 - DNA, 74 bp, Oryza sativa nipponbare
taaagtgaaaacacatatcacccatctggcagttgaccataacttgataaggcaactcaagatcagtagatcac

SEQ ID NO: 421356 - DNA, 197 bp, Oryza sativa nipponbare
caaccaaaaggatatattcccgaatttttccagtaagggggggcttgccttaaaaaaccaaggttttttttaaataaataacccggaagagcttaaatatccactttattgtggaagaccaaagaaacaagatgccttacaggttcttacaaaaggtttttccaaataagaatttaaactttttgaaaatttccagg

SEQ ID NO: 421357 - DNA, 313 bp, Oryza sativa nipponbare
ctcgatctataaccttacacgtgaacacacatcataccggactcgtagtcgaacacgtgggtataccgcaaaatatgagaccgatacctctcacacacacagcttatcatatattctgtaacatgaaaatatcacctacaacttaatatagctatgcatgcatgcaagtctgtatcatatttagtagcacatacatacatagatccatatactttcatatatatgtctatatgcatatatgcagggtctgaccatcagttaataggccacccgtactgatgtctgacaacttggacttgatccacttgaagct

SEQ ID NO: 421358 - DNA, 345 bp, Oryza sativa nipponbare
gcatccaactgaaatgacactattgccaaactcctgaaacggggggactggaaaacccgtaagacctacattcttattgaatgctacaacaaatggaactacaagctatatatcgtacaatgtcatacattcggcagaaagcaccaccccttctgacggatgttttttatctaaaaaaacacaatggatattgtataattcagactaatcatatcaaattaactacatgcgtagaatcccgaactatacaagggagcaggaataaacattatcataacgaatgacaaacaccttcaatagcatgtagtcaaccaaattatgctaatacattctgcctatatgaat

SEQ ID NO: 421359 - DNA, 380 bp, Oryza sativa nipponbare
tcacatgcactcgtacctaagcttagatcctatacagcagacgccctctcctttttttttttttttttgcaatctaaaacttttaattattaccaccttttaaagattggtaattttttaatcaattagtatattttttttttaccgaacccctgggtcaacccggaaatttcaaaccgttacctgaaagctaacaaattttccataaagggaggttaataaaaacttggcaaaaaaaagacaaaaactttttcctggtaaaaatttttatcccctaaaaattccaaaaaaaaaaccaaccgaaaaaaaaaatttaaaagcctggggccccaaaaaagggacctaacccaaattaattgctttgccctaactcccccttt

SEQ ID NO: 421360 - DNA, 275 bp, Oryza sativa nipponbare
  unsure (1)..(275): unsure at all n locations
aaatatcgaacaagcatagccattcaatcatagtaaagaagggttgacaatccttggcctagataaaggctttaggcactctcccacacaccagcacgattccaccacgaaagtgacacataatacatgaggatggcgatagcaatataaataaacaaagggttagcaaaaaccccaccaaaggacacaaaaaaatggtccttgtacaagcattataactacccncagcggttaaaagacagaccactgtcactaggatctttaactagtgctca

SEQ ID NO: 421361 - DNA, 301 bp, Oryza sativa nipponbare
  unsure (1)..(301): unsure at all n locations
aagggggggggttttnnnttaaaaaaaaaaaaaaaaatttttttttaaatttttaaaaattaaaattttttttaaaatatttttaattgaaaatattaaaaaatttttatttttttattaaaggtttttaaaaaaaaataaaaattttaaaaaatttttatttttttttttaaagggttttaaaataaaaaaaaaaaaatttataaaaatattttaattggtattttttaaaaaaaaggttttaaaaaatatatattttttttttttataaaaaatttttttgagataaagaatttttttt

SEQ ID NO: 421362 - DNA, 316 bp, Oryza sativa nipponbare
gtcaacttgccaaatgcaaagataaagagcctgatttgggagggtgttagaaatacccacgcgcccaattaatcacatgttacaaacatatcaaagagaatataatgacatcgaagtgctctttggtcataaaacacattatgcaagtgctcttgcagggaatcaggatgcttgtaaaaatatatttctgcaaagaggatattctaattcgaccatgataattttcttaatctcccttttctttgcgtcattcttagtacgaaatctcaattccttcaacatcatacaacctatattctcgtgcagtctctttcac

SEQ ID NO: 421363 - DNA, 168 bp, Oryza sativa nipponbare
tacaataatcaatatatatcatgggggaaccaataatacaataagagaggttactccaaattacaaccaggtgaccaaagcgtataacaaaatcatattatgcgtaccgcaatgagaaattccaaggagaagccacatatcatcgggaaacaccacaaaagaagagac

SEQ ID NO: 421364 - DNA, 286 bp, Oryza sativa nipponbare
caaaaaaacccttgaatcccccctccggttaaaataaaatttccacccaaaaaaccaaaaattattccaaacaaaaattaattaacttaaaaatttccttaatcgaccaaaaacacacacccatttaagggccaaaaatacatccacttttaaaactaaaactgaagggtcggtccgtgtttacaaaaaattaacaaatggaactttgtttgacacaatttaaaccgtgtcgtttccctaacttcccagaaacaaaattgttgccttatcccaaacctttttttcc

SEQ ID NO: 421365 - DNA, 209 bp, Oryza sativa nipponbare
tttaaataaatagcttcaaaggtcatcttatataactatcgtatatgatatcacaaaacggtaaggagtcctcttcaacaacatacccattacatacaatgcaaacaatctaaaaacaaacacccagtttcttgaaacgttctatattgatttaacacctatccaatattcacatttctttataccaaaaagggacaacacaagacaaa

SEQ ID NO: 421366 - DNA, 123 bp, Oryza sativa nipponbare
atctcgcgaccgtaaagccgcaccatatcatcattggtagggcatacacacacatgcggggtgatttttactttcaatatacacagaggcattcattcaaaaatgtatgtctttaacacttat

SEQ ID NO: 421367 - DNA, 213 bp, Oryza sativa nipponbare
aaaaacaaaaaaaccaaacacttttaaaaaatacatttaataaaaaacaaaacccctttacccccaaaaaattaaaactataaacccttcccccagttccaaaataaccaaaaacaaaaaaaggtttcccatttaacccaaacccactattaaaattacctaaaggaatttctaaaaaaaaaaaaacaaaaaacttaaaccgcccccattttt

SEQ ID NO: 421368 - DNA, 89 bp, Oryza sativa nipponbare
aaaaaatgcaacaattgtatattgacaggagggatgggcttgcatatttacactggtccatacaataaccatttgcaagctagcttaac

SEQ ID NO: 421369 - DNA, 67 bp, Oryza sativa nipponbare
aatttggactccaccttgaatattaccaccctcttttaattaattgtgcgattccgaaccaattttg

SEQ ID NO: 421370 - DNA, 350 bp, Oryza sativa nipponbare
tcacccctacctaaacctggaatccctaaaaccggccccccttttttttttttttttaacaaattcacaccctggtcaaggcctatataatttattataggtggcccctccatcaaaatgggccatggataatattcaaccaagggggcgtttaattaataaacttttaattaaattatattgcccatggaccaaatactactccattagttccatccatgagatgatccattttggccagaaaacaacttggtagttccttttgcccctcaaaccgccttttttggggttgttttcccccccgatcggcccaaggaacttgggccttaaaacccaaaggaggggcccag

SEQ ID NO: 421371 - DNA, 289 bp, Oryza sativa nipponbare
  unsure (1)..(289): unsure at all n locations
ttnnnncagcaaaaatacaaaaaagcgttttttgtcaacttgcagaacatacagtacaacaagggagcattacagggctaaagaaatggactttggagctaccattttagacaaatacaacaggttctttgttaggtttaaccatccaacgtttaaggtggctgaaaatttttaggatgtaaacagtttttccgggtgtggggccatgtgatacaaaaattcacattttaagcggaggctaaatgggcccttctacaagggtatgaattctcttatggtttcttacccc

SEQ ID NO: 421372 - DNA, 310 bp, Oryza sativa nipponbare
ttattccgtcctcatttctaaaagaaactcaaaaaaatcggagggctgcatatctacatatgagggtcattcttaacttcctggtataaccatccaaaaaccaatgaactttcctttcaacctttaagtgcttaaatctttgccaccccctcaatttgtttttaacatactaaccaattttgtcataccacctaactacttaagccttacatctttaaaaccatcaacattacctattttgggtacctggcttggccccactcccttcacctattggtgaaatctttccaccaaacctgttaagggccaa

SEQ ID NO: 421373 - DNA, 104 bp, Oryza sativa nipponbare
agtataagtgatctttatttcaaagatgctgccctttatttatgtgtaggatacctcctgtcctgtgaacatgaaaaccacaacgaaacgcacgccgacacaca

SEQ ID NO: 421374 - DNA, 116 bp, Oryza sativa nipponbare
ttttagtcttgtaattagtgtatatttaatgctcaagattagtgcgcaaatatttaatgtgacagactaaacttccctatatccaaacaaggcccaaatatggatgaaattaaatg

SEQ ID NO: 421375 - DNA, 231 bp, Oryza sativa nipponbare
agagaaaaataaataattttttttataaaaaaaaaagtggttttaattaatataataattttttatttttaaaaaaaatttttttatttttttttaaaaaaaaggattttttttttttttattaaaaaaaaatttttggggaatgtatatttataaaaatttattattttatagtttttttgagggtgttttttatttttttataatatgagattattatatttttttttt
